(19) United States
(12) Patent Application Publication
(10) Pub. No.: US 2016/0122760 A1
(43) Pub. Date: May 5, 2016

(54) COMPOSITIONS AND METHODS FOR MODULATING FOXP3 EXPRESSION

(71) Applicant: RANA THERAPEUTICS, INC., Cambridge, MA (US)

(72) Inventors: James Barsoum, Lexington, MA (US); Mariano Severgnini, Newton, MA (US); James McSwiggen, Arlington, MA (US)

(73) Assignee: RaNA Therapeutics, Inc., Cambridge, MA (US)

(21) Appl. No.: 14/896,537

(22) PCT Filed: Jun. 6, 2014
(86) PCT No.: PCT/US14/41345

§ 371 Date: Dec. 7, 2015

Related U.S. Application Data
(60) Provisional application No. 61/832,677, filed on Jun. 7, 2013.

(51) Int. Cl. C12N 15/113

(52) U.S. Cl. CPC C12N 15/113; C12N 2310/3231; C12N 2310/321; C12N 2310/11; C12N 2310/315; C12N 2310/351

(57) ABSTRACT

Aspects of the invention provide single stranded oligonucleotides for activating or enhancing expression of FOXP3. Further aspects provide compositions and kits comprising single stranded oligonucleotides for activating or enhancing expression of FOXP3. Methods for modulating expression of FOXP3 using the single stranded oligonucleotides are also provided. Further aspects of the invention provide methods for selecting a candidate oligonucleotide for activating or enhancing expression of FOXP3.

### CROSS-REFERENCE TO RELATED APPLICATIONS

[0001] This application claims the benefit under 35 U.S.C. §119(e) of U.S. Provisional Application No. 61/832,677, entitled “COMPOSITIONS AND METHODS FOR MODULATING FOXP3 EXPRESSION”, filed Jun. 7, 2013, the contents of which are incorporated herein by reference in its entirety.

### FIELD OF THE INVENTION

[0002] The invention relates to oligonucleotide based compositions, as well as methods of using oligonucleotide based compositions for treating disease.

### BACKGROUND OF THE INVENTION

[0003] FOXP3 (forkhead box P3), a member of the FOX protein family, is a master regulator transcription factor that drives the differentiation and activity of immune suppressive regulatory T cells (Tregs). Tregs are Foxp3⁺CD4⁺CD25⁺ T lymphocytes which have immune suppressive activity and can establish a toleragenic response. It has been shown previously that administration of Foxp3⁺ Treg cells leads to marked reductions in inflammatory/autoimmune disease severity in animal models of type 1 diabetes, multiple sclerosis, asthma, inflammatory bowel disease, and thyroiditis. Expression of FOXP3 decreases effector T cell proliferation and activity. Additionally, Foxp3+ T cells can control a Th1 response, Th17 response, suppress antibody production, CD8+ cytotoxic T cell activity and antigen presentation.

[0004] Alterations in the number or function of Tregs, such as those that express Foxp3, are associated with several disease states. For example, patients with autoimmune diseases such as systemic lupus erythematosus (SLE) have been found to have defective regulatory function of Tregs. The FOXP3 gene has also been shown to be mutated in patients with IPEX (Immunodysregulation, Polyendocrinopathy, and Enteropathy, X-linked) syndrome. IPEX syndrome is characterized by the development of multiple autoimmune disorders, such as enteropathy, dermatitis, and Type 1 diabetes, in affected patients.

### SUMMARY OF THE INVENTION

[0005] Aspects of the invention disclosed herein provide methods and compositions that are useful for upregulating FOXP3 in cells. In some embodiments, single stranded oligonucleotides are provided that target a PRC2-associated region of an FOXP3 gene (e.g., human FOXP3) and thereby cause upregulation of the gene. In some embodiments, single stranded oligonucleotides are provided that target a PRC2-associated region of the gene encoding FOXP3. In some embodiments, these single stranded oligonucleotides activate or enhance expression of FOXP3 by relieving or preventing PRC2 mediated repression of FOXP3. Aspects of the invention disclosed herein provide methods and compositions that are useful for upregulating FOXP3 for the treatment and/or prevention of diseases or disorders associated with aberrant immune cell (e.g., T cell) activation, e.g., autoimmune or inflammatory diseases or disorders.

[0006] Further aspects of the invention provide methods for selecting oligonucleotides for activating or enhancing expression of FOXP3. In some embodiments, methods are provided for selecting a set of oligonucleotides that is enriched in candidates (e.g., compared with a random selection of oligonucleotides) for activating or enhancing expression of FOXP3. Accordingly, the methods may be used to establish sets of clinical candidates that are enriched in oligonucleotides that activate or enhance expression of FOXP3. Such libraries may be utilized, for example, to identify lead oligonucleotides for developing therapeutics to treat FOXP3. Furthermore, in some embodiments, oligonucleotide chemistries are provided that are useful for controlling the pharmacokinetics, biodistribution, bioavailability and/or efficacy of the single stranded oligonucleotides for activating expression of FOXP3.

[0007] According to some aspects of the invention single stranded oligonucleotides are provided that have a region of complementarity that is complementary with (e.g., at least 8 consecutive nucleotides of) a PRC2-associated region of a FOXP3 gene, e.g., a PRC2-associated region of the nucleotide sequence set forth as SEQ ID NO: 1, 2, 5, 6, 7, 46, or 47. In some embodiments, the oligonucleotide has at least one of the following features: a) a sequence that is 5′X-Y-Z, in which X is any nucleotide and in which X is at the 5′ end of the oligonucleotide, Y is a nucleotide sequence of 6 nucleotides in length that is not a human seed sequence of a microRNA, and Z is a nucleotide sequence of 1 to 23 nucleotides in length; b) a sequence that does not comprise three or more consecutive guanosine nucleotides; c) a sequence that has less than a threshold level of sequence identity with every sequence of nucleotides, of equivalent length to the second nucleotide sequence, that are between 50 kilobases upstream of a 5′-end of an off-target gene and 50 kilobases downstream of a 3′-end of the off-target gene; d) a sequence that is complementary to a PRC2-associated region that encodes an RNA that forms a secondary structure comprising at least two single stranded loops; and e) a sequence that has greater than 60% G-C content. In some embodiments, the single stranded oligonucleotide has at least two of features a), b), c), d), and e), each independently selected. In some embodiments, the single stranded oligonucleotide has at least three of features a), b), c), d), and e), each independently selected. In some embodiments, the single stranded oligonucleotide has at least four of features a), b), c), d), and e), each independently selected. In some embodiments, the single stranded oligonucleotide has each of features a), b), c), d), and e). In certain embodiments, the oligonucleotide has the sequence 5′X-Y-Z, in which the oligonucleotide is 8-50 nucleotides in length.

[0008] According to some aspects of the invention, single stranded oligonucleotides are provided that have a sequence X-Y-Z, in which X is any nucleotide, Y is a nucleotide sequence of 6 nucleotides in length that is not a seed sequence of a human microRNA, and Z is a nucleotide sequence of 1 to 23 nucleotides in length, in which the single stranded oligonucleotide is complementary with a PRC2-associated region of a FOXP3 gene, e.g., a PRC2-associated region of the nucleotide sequence set forth as SEQ ID NO: 1, 2, 5, 6, 7, 46, or 47. In some aspects of the invention, single stranded oligonucleotides are provided that have a sequence 5′-X-Y-Z, in which X is any nucleotide, Y is a nucleotide sequence of 6 nucleotides in length that is not a seed sequence of a human microRNA, and Z is a nucleotide sequence of 1 to 23 nucleotides in length, in which the single stranded oligonucleotide is complementary with at least 8 consecutive nucleotides of a PRC2-associated region of FOXP3 gene, e.g., a PRC2-associated region of the nucleotide sequence set forth as SEQ ID NO: 1, 2, 5, 6, 7, 46, or 47. In some embodiments, Y is a sequence selected from Table 1. In some embodiments, the PRC2-associated region is a sequence listed in any one of SEQ ID NOS: 8-45 or 48-59.

[0009] In some embodiments, the single stranded oligonucleotide comprises a nucleotide sequence as set forth in any one of SEQ ID NOS: 60-45713, or a fragment thereof that is at least 8 nucleotides. In some embodiments, the single stranded oligonucleotide comprises a nucleotide sequence as set forth in any one of SEQ ID NOS: 60-45713, in which the 5′ end of the nucleotide sequence provided is the 5′ end of the oligonucleotide. In some embodiments, the region of complementarity (e.g., the at least 8 consecutive nucleotides) is also present within the nucleotide sequence set forth as SEQ ID NO: 3 or 4.

[0010] In some embodiments, the PRC2-associated region is a sequence listed in any one of SEQ ID NOS: 8-45. In some embodiments, the single stranded oligonucleotide comprises a nucleotide sequence as set forth in any one of SEQ ID NOS: 16426-45713 or a fragment thereof that is at least 8 nucleotides. In some embodiments, the single stranded oligonucleotide comprises a nucleotide sequence as set forth in any one of SEQ ID NOS: 16426-45713, wherein the 5′ end of the nucleotide sequence provided in any one of SEQ ID NOS: 16426-45713 is the 5′ end of the oligonucleotide. In some embodiments, the at least 8 consecutive nucleotides are also present within the nucleotide sequence set forth as SEQ ID NO: 4.

[0011] In some embodiments, the PRC2-associated region is a sequence listed in any one of SEQ ID NOS: 48-59. In some embodiments, the single stranded oligonucleotide comprises a nucleotide sequence as set forth in any one of SEQ ID NOS: 60-16461 or a fragment thereof that is at least 8 nucleotides. In some embodiments, the single stranded oligonucleotide comprises a nucleotide sequence as set forth in any one of SEQ ID NOS: 60-16461, wherein the 5′ end of the nucleotide sequence provided in any one of SEQ ID NOS: 60-16461 is the 5′ end of the oligonucleotide. In some embodiments, the at least 8 consecutive nucleotides are also present within the nucleotide sequence set forth as SEQ ID NO: 3.

[0012] In some embodiments, a single stranded oligonucleotide comprises a nucleotide sequence as set forth in any one of SEQ ID NOS: 60-16461. In some embodiments, the oligonucleotide is up to 50 nucleotides in length. In some embodiments, a single stranded oligonucleotide comprises a fragment of at least 8 nucleotides of a nucleotide sequence as set forth in any one of SEQ ID NOS: 60-16461.

[0013] In some embodiments, a single stranded oligonucleotide comprises a nucleotide sequence as set forth in Table 4. In some embodiments, the single stranded oligonucleotide comprises a fragment of at least 8 nucleotides of a nucleotide sequence as set forth in Table 4. In some embodiments, a single stranded oligonucleotide consists of a nucleotide sequence as set forth in Table 4.

[0014] In some embodiments, a single stranded oligonucleotide, when delivered to a cell, is capable of increasing the level of CTLA4, GITR, and/or IL-10 expression in the cell (e.g., results in a level of expression of CTLA4, GITR, and/or IL-10 that is at least 30% greater than a level of expression of CTLA4, GITR, and/or IL-10 in a control cell). In some embodiments, the cell is a T cell. In some embodiments, the single stranded oligonucleotide, when delivered to a population of T cells, is capable of increasing the number of CD4+CD25+FOXP3+ T cells in the population of T cells (e.g., results in a number of CD4+CD25+FOXP3+ T cells in the population that is at least 30% greater than a number of CD4+CD25+FOXP3+ T cells in a control population). In some embodiments, the single stranded oligonucleotide does not comprise three or more consecutive guanosine nucleotides. In some embodiments, the single stranded oligonucleotide does not comprise four or more consecutive guanosine nucleotides.

[0015] In some embodiments, the single stranded oligonucleotide is 8 to 30 nucleotides in length. In some embodiments, the single stranded oligonucleotide is up to 50 nucleotides in length. In some embodiments, the single stranded oligonucleotide is 8 to 10 nucleotides in length and all but 1, 2, or 3 of the nucleotides of the complementary sequence of the PRC2-associated region are cytosine or guanosine nucleotides.

[0016] In some embodiments, the single stranded oligonucleotide is complementary with at least 8 consecutive nucleotides of a PRC2-associated region of a FOXP3 gene, e.g., a PRC2-associated region of a nucleotide sequence set forth as SEQ ID NO: 1, 2, 5, 6, 7, 46, or 47, in which the nucleotide sequence of the single stranded oligonucleotide comprises one or more of a nucleotide sequence selected from the group consisting of

[0017] (a) (X)Xxxxxx, (X)xXxxxx, (X)xxXxxx, (X)xxxXxx, (X)xxxxXx and (X)xxxxxX,

[0018] (b) (X)XXxxxx, (X)XxXxxx, (X)XxxXxx, (X)XxxxXx, (X)XxxxxX, (X)xXXxxx, (X)xXxXxx, (X)xXxxXx, (X)xXxxxX, (X)xxXXxx, (X)xxXxXx, (X)xxXxxX, (X)xxxXXx, (X)xxxXxX and (X)xxxxXX,

[0019] (c) (X)XXXxxx, (X)xXXXxx, (X)xxXXXx, (X)xxxXXX, (X)XXxXxx, (X)XXxxXx, (X)XXxxxX, (X)xXXxXx, (X)xXXxxX, (X)xxXXxX, (X)XxXXxx, (X)XxxXXx (X)XxxxXX, (X)xXxXXx, (X)xXxxXX, (X)xxXxXX, (X)xXxXxX and (X)XxXxXx,

[0020] (d) (X)xxXXX, (X)xXxXXX, (X)xXXxXX, (X)xXXXxX, (X)xXXXXx, (X)XxxXXXX, (X)XxXxXX, (X)XxXXxX, (X)XxXXx, (X)XXxxXX, (X)XXxXxX, (X)XXxXXx, (X)XXXxxX, (X)XXXxXx, and (X)XXXXxx,

[0021] (e) (X)xXXXXX, (X)XxXXXX, (X)XXxXXX, (X)XXXxXX, (X)XXXXxX and (X)XXXXXx, and

[0022] (f) XXXXXX, XxXXXXX, XXxXXXX, XXXxXXX, XXXXxXX, XXXXXxX and XXXXXXx, wherein “X” denotes a nucleotide analogue, (X) denotes an optional nucleotide analogue, and “x” denotes a DNA or RNA nucleotide unit.

[0023] In some embodiments, at least one nucleotide of the oligonucleotide is a nucleotide analogue. In some embodiments, the at least one nucleotide analogue results in an increase in Tm of the oligonucleotide in a range of 1 to 5° C. compared with an oligonucleotide that does not have the at least one nucleotide analogue.

[0024] In some embodiments, at least one nucleotide of the oligonucleotide comprises a 2′ O-methyl. In some embodiments, each nucleotide of the oligonucleotide comprises a 2′ O-methyl. In some embodiments, the oligonucleotide comprises at least one ribonucleotide, at least one deoxyribonucleotide, or at least one bridged nucleotide. In some embodiments, the bridged nucleotide is a LNA nucleotide, a cEt nucleotide or a ENA modified nucleotide. In some embodiments, each nucleotide of the oligonucleotide is a LNA nucleotide.

[0025] In some embodiments, the nucleotides of the oligonucleotide comprise alternating deoxyribonucleotides and 2′-fluoro-deoxyribonucleotides. In some embodiments, the nucleotides of the oligonucleotide comprise alternating deoxyribonucleotides and 2′-O-methyl nucleotides. In some embodiments, the nucleotides of the oligonucleotide comprise alternating deoxyribonucleotides and ENA nucleotide analogues. In some embodiments, the nucleotides of the oligonucleotide comprise alternating deoxyribonucleotides and LNA nucleotides. In some embodiments, the 5′ nucleotide of the oligonucleotide is a deoxyribonucleotide. In some embodiments, the nucleotides of the oligonucleotide comprise alternating LNA nucleotides and 2′-O-methyl nucleotides. In some embodiments, the 5′ nucleotide of the oligonucleotide is a LNA nucleotide. In some embodiments, the nucleotides of the oligonucleotide comprise deoxyribonucleotides flanked by at least one LNA nucleotide on each of the 5′ and 3′ ends of the deoxyribonucleotides.

[0026] In some embodiments, the single stranded oligonucleotide comprises modified internucleotide linkages (e.g., phosphorothioate internucleotide linkages or other linkages) between at least two, at least three, at least four, at least five or more nucleotides. In some embodiments, the single stranded oligonucleotide comprises modified internucleotide linkages (e.g., phosphorothioate internucleotide linkages or other linkages) between all nucleotides.

[0027] In some embodiments, the nucleotide at the 3′ position of the oligonucleotide has a 3′ hydroxyl group. In some embodiments, the nucleotide at the 3′ position of the oligonucleotide has a 3′ thiophosphate. In some embodiments, the single stranded oligonucleotide has a biotin moiety or other moiety conjugated to its 5′ or 3′ nucleotide. In some embodiments, the single stranded oligonucleotide has cholesterol, Vitamin A, folate, sigma receptor ligands, aptamers, peptides, such as CPP, hydrophobic molecules, such as lipids, ASGPR or dynamic polyconjugates and variants thereof at its 5′ or 3′ end.

[0028] According to some aspects of the invention compositions are provided that comprise any of the oligonucleotides disclosed herein, and a carrier. In some embodiments, compositions are provided that comprise any of the oligonucleotides in a buffered solution. In some embodiments, the oligonucleotide is conjugated to the carrier. In some embodiments, the carrier is a peptide. In some embodiments, the carrier is a steroid. According to some aspects of the invention pharmaceutical compositions are provided that comprise any of the oligonucleotides disclosed herein, and a pharmaceutically acceptable carrier.

[0029] According to other aspects of the invention, kits are provided that comprise a container housing any of the compositions disclosed herein.

[0030] According to some aspects of the invention, methods of increasing expression of FOXP3 in a cell are provided. In some embodiments, the methods involve delivering any one or more of the single stranded oligonucleotides disclosed herein into the cell. In some embodiments, delivery of the single stranded oligonucleotide into the cell results in a level of expression of FOXP3 that is greater (e.g., at least 50% greater) than a level of expression of FOXP3 in a control cell that does not comprise the single stranded oligonucleotide. In some embodiments, delivery of the single stranded oligonucleotide into the cell results in an increased level of CTLA4, GITR, and/or IL-10 expression compared to an appropriate control cell that does not comprise the singled stranded oligonucleotide. In some embodiments, delivery of the single stranded oligonucleotide into the cell results in a level of expression of CTLA4, GITR, and/or IL-10 that is greater than (e.g., at least 30% greater than) a level of expression of CTLA4, GITR, and/or IL-10 in a control cell that does not comprise the single stranded oligonucleotide. In some embodiments, the cell is a T cell.

[0031] According to some aspects of the invention, methods of increasing levels of FOXP3 in a subject are provided. According to some aspects of the invention, methods of treating a condition or disease (e.g., a disease or disorder associated with aberrant immune cell activation such as an autoimmune or inflammatory disease or disorder) associated with decreased levels of FOXP3 in a subject are provided. In some embodiments, the methods involve administering any one or more of the single stranded oligonucleotides disclosed herein to the subject. In some embodiments, administration of the single stranded oligonucleotide to the subject results in an increased level of CTLA4, GITR, and/or IL-10 expression the subject compared to an appropriate control subject who has not been administered the single stranded oligonucleotide. In some embodiments, administration of the single stranded oligonucleotide to the subject results in a level of expression of CTLA4, GITR, and/or IL-10 that is greater than (e.g., at least 30% greater than) a level of CTLA4, GITR, and/or IL-10 in the appropriate control subject who has not been administered the single stranded oligonucleotide. In some embodiments, administration of the single stranded oligonucleotide to the subject results in an increased level of CTLA4, GITR, and/or IL-10 in a T cell of the subject compared to a T cell in the control subject who has not been administered the single stranded oligonucleotide. In some embodiments, administration of the single stranded oligonucleotide to the subject results in a level of expression of CTLA4, GITR, and/or IL-10 in the T cell of the subject that is greater than (e.g., at least 30% greater than) a level of CTLA4, GITR, and/or IL-10 in the T cell in the control subject who has not been administered the single stranded oligonucleotide. In some embodiments, administration of the of the single stranded oligonucleotide to the subject results in an increased number of CD4+CD25+FOXP3+ T cells in the subject compared to a control subject who has not been administered the single stranded oligonucleotide. In some embodiments, administration of the single stranded oligonucleotide to the subject results in a number of CD4+CD25+FOXP3+ T cells in the subject that is greater than (e.g., at least 30% greater than) a number of CD4+CD25+FOXP3+ T cells in the control subject who has not been administered the single stranded oligonucleotide.

[0032] Other aspects of the invention relate to a method of increasing expression of FOXP3 in a cell, activating T cells, and/or treating a condition or disease (e.g., a disease or disorder associated with aberrant immune cell activation such as an autoimmune or inflammatory disease or disorder) associated with decreased levels of FOXP3 by inhibiting or decreasing expression of EZH1 and/or EZH2 or another component of PRC2, e.g., Suz12, EED1, or RbAp48. In some embodiments, the method comprises delivering an oligonucleotide having a region of complementarity that is complementary with at least 8 consecutive nucleotides of an EZH1 mRNA or EZH2 mRNA to the cell. In some embodiments, the method comprises delivering to the cell a first oligonucleotide having a region of complementarity that is complementary with at least 8 consecutive nucleotides of an EZH1 mRNA and a second oligonucleotide having a region of complementarity that is complementary with at least 8 consecutive nucleotides of an EZH2 mRNA.

[0033] In some embodiments, the oligonucleotide is 8 to 30 nucleotides in length. In some embodiments, at least one nucleotide of the oligonucleotide is a nucleotide analogue.

[0034] In some embodiments, the oligonucleotide comprises a gapmer. In some embodiments, the gapmer comprises a central region of at least 4 DNA nucleotides flanked one both sides by at least two nucleotide analogues. In some embodiments, the at least two nucleotide analogues comprise at least one LNA or at least one 2′-O modified ribonucleotide.

[0035] In some embodiments, the oligonucleotide comprises at least 8 nucleotides of a nucleotide sequence as set forth in Table 8. In some embodiments, the oligonucleotide comprises a nucleotide sequence as set forth in Table 8. In some embodiments, the oligonucleotide consists of a nucleotide sequence as set forth in Table 8. In some embodiments, the oligonucleotide (e.g., single stranded oligonucleotide) comprises a sequence as set forth in any one of SEQ ID NO: 45714-45717 or a complement of anyone of them.

[0036] In some embodiments, at least one nucleotide of the oligonucleotide comprises a 2′ O-methyl. In some embodiments, each nucleotide of the oligonucleotide comprises a 2′ O-methyl. In some embodiments, the oligonucleotide comprises at least one ribonucleotide, at least one deoxyribonucleotide, or at least one bridged nucleotide. In some embodiments, the bridged nucleotide is a LNA nucleotide, a cEt nucleotide or a ENA modified nucleotide. In some embodiments, each nucleotide of the oligonucleotide is a LNA nucleotide.

[0037] In some embodiments, the nucleotides of the oligonucleotide comprise alternating deoxyribonucleotides and 2′-fluoro-deoxyribonucleotides. In some embodiments, the nucleotides of the oligonucleotide comprise alternating deoxyribonucleotides and 2′-O-methyl nucleotides. In some embodiments, the nucleotides of the oligonucleotide comprise alternating deoxyribonucleotides and ENA nucleotide analogues. In some embodiments, the nucleotides of the oligonucleotide comprise alternating deoxyribonucleotides and LNA nucleotides. In some embodiments, the 5′ nucleotide of the oligonucleotide is a deoxyribonucleotide. In some embodiments, the nucleotides of the oligonucleotide comprise alternating LNA nucleotides and 2′-O-methyl nucleotides. In some embodiments, the 5′ nucleotide of the oligonucleotide is a LNA nucleotide. In some embodiments, the nucleotides of the oligonucleotide comprise deoxyribonucleotides flanked by at least one LNA nucleotide on each of the 5′ and 3′ ends of the deoxyribonucleotides.

[0038] In some embodiments, the single stranded oligonucleotide comprises modified internucleotide linkages (e.g., phosphorothioate internucleotide linkages or other linkages) between at least two, at least three, at least four, at least five or more nucleotides. In some embodiments, the single stranded oligonucleotide comprises modified internucleotide linkages (e.g., phosphorothioate internucleotide linkages or other linkages) between all nucleotides.

[0039] In some embodiments, the nucleotide at the 3′ position of the oligonucleotide has a 3′ hydroxyl group. In some embodiments, the nucleotide at the 3′ position of the oligonucleotide has a 3′ thiophosphate. In some embodiments, the single stranded oligonucleotide has a biotin moiety or other moiety conjugated to its 5′ or 3′ nucleotide. In some embodiments, the single stranded oligonucleotide has cholesterol, Vitamin A, folate, sigma receptor ligands, aptamers, peptides, such as CPP, hydrophobic molecules, such as lipids, ASGPR or dynamic polyconjugates and variants thereof at its 5′ or 3′ end.

[0040] Other aspects of the invention relate to a single stranded oligonucleotide having a region of complementarity that is complementary with at least 8 consecutive nucleotides of an EZH1 mRNA or EZH2 mRNA. In some embodiments, a single stranded oligonucleotide comprises a nucleotide sequence as set forth in Table 8. In some embodiments, the single stranded oligonucleotide comprises a fragment of at least 8 nucleotides of a nucleotide sequence as set forth in Table 8. In some embodiments, a single stranded oligonucleotide consists of a nucleotide sequence as set forth in Table 8.

[0041] In some embodiments, the oligonucleotide is 8 to 30 nucleotides in length. In some embodiments, at least one nucleotide of the oligonucleotide is a nucleotide analogue.

[0042] In some embodiments, the oligonucleotide comprises a gapmer. In some embodiments, the gapmer comprises a central region of at least 4 DNA nucleotides flanked one both sides by at least two nucleotide analogues. In some embodiments, the at least two nucleotide analogues comprise at least one LNA or at least one 2′-O modified ribonucleotide.

### BRIEF DESCRIPTION OF DRAWINGS

[0043] FIG. 1 is a series of four graphs showing the levels of CD69, CD62L, CDKN1A, and IL-2RA expression in human T cells that were activated with PMA and Ionomycin.

[0044] FIG. 2 is a diagram showing the location along the human FOXP3 gene where the FOXP3 oligos in Table 4 bind.

[0045] FIG. 3 is a series of two graphs showing the levels of CD62L and CD69 mRNA in human T cells activated with different concentrations of PMA and Ionomycin (1× or 2×), compared to T cells treated with DMSO, or untreated.

[0046] FIG. 4 is a series of two graphs showing the levels of CD62L and CD25 mRNA in cells activated with dynabeads at a ratio of 2:1 beads to cells (left bars) or 1:1 beads to cells (right bars).

[0047] FIG. 5 is a graph showing the downregulation of GAPDH mRNA with GAPDH gapmers at concentrations 0, 0.032, 0.16, 0.8, 4 and 20 uM delivered gymnotically to activated human T cells.

[0048] FIG. 6 is a graph showing FOXP3 mRNA levels at 48 hours in PMA/Iono activated human T cells treated with 10 uM FOXP3 oligos. Bars with stars indicate oligo treatments where stable housekeeper gene Ct values were observed.

[0049] FIG. 7 is a graph showing FOXP3 mRNA levels at 96 hours in dynabead activated human T cells treated with 10 uM FOXP3 oligos.

[0050] FIG. 8 is a graph showing GAPDH mRNA levels at 96 hours in dynabead activated human T cells treated with FOXP3 oligos. Black colored bars indicate oligos where housekeeper gene varied more than 1.5Cts from negative control.

[0051] FIG. 9 is a graph showing CTLA4 mRNA levels at 96 hours in dynabead activated human T cells treated with FOXP3 oligos.

[0052] FIG. 10 is a graph showing GITR mRNA levels at 96 hours in dynabead activated human T cells treated with FOXP3 oligos.

[0053] FIG. 11 is a graph showing FOXP3 mRNA levels at 96 hours in dynabead activated human T cells treated with FOXP3 oligos.

[0054] FIG. 12 is a graph showing GAPDH mRNA levels at 96 hours in dynabead activated human T cells treated with FOXP3 oligos. Black colored bars indicate oligos where housekeeper gene varied more than 1.5Cts from negative control.

[0055] FIG. 13 is a graph showing FoxP3 fluorescent intensity at 96 hours in dynabead activated in CD4+CD25+FoxP3+ human T cells treated with FOXP3 oligos.

[0056] FIG. 14 is a diagram showing flow cytometry results in activated human T cells treated with a negative control oligo (293) and an exemplary FOXP3 oligo (FOXP3-35).

[0057] FIG. 15 is a graph showing the percentage of CD4+CD25+FoxP3+ cells at 96 hours in dynabead activated in human T cells treated with FOXP3 oligos.

[0058] FIG. 16 is a graph showing IL-10 protein levels at 96 hours in dynabead activated in CD4+CD25+FoxP3+ human T cells treated with FOXP3 oligos.

[0059] FIG. 17 is a graph showing MALAT-1 mRNA levels in sorted CD4+ cells from whole blood collected from mice treated with MALAT-1 gapmer oligos.

[0060] FIG. 18 is a graph showing MALAT-1 mRNA levels in liver collected from mice treated with MALAT-1 gapmer oligos.

[0061] FIG. 19 is a graph showing EZH1 mRNA levels at 3 or 5 days in activated human T cells treated with EZH1 gapmers, EZH2 gapmers, or combinations of EZH1 and EZH2 gapmers. The left bar in each pair of bars is 3 days. The right bar in each pair of bars is 5 days.

[0062] FIG. 20 is a graph showing EZH2 mRNA levels at 3 or 5 days in activated human T cells treated with EZH1 gapmers, EZH2 gapmers, or combinations of EZH1 and EZH2 gapmers. The left bar in each pair of bars is 3 days. The right bar in each pair of bars is 5 days.

[0063] FIG. 21 is a graph showing FOXP3 mRNA levels at 3 or 5 days in activated human T cells treated with EZH1 gapmers, EZH2 gapmers, or combinations of EZH1 and EZH2 gapmers. The left bar in each pair of bars is 3 days. The right bar in each pair of bars is 5 days.

[0064] FIG. 22 is a heatmap showing mRNA expression of T cell genes after EZH1/2 knockdown.

[0065] FIG. 23 is a series of graphs showing flow cytometry data of FOXP3 protein levels in activated human T cells treated with EZH1 gapmers, EZH2 gapmers, or combinations of EZH1 and EZH2 gapmers.

### BRIEF DESCRIPTION OF CERTAIN TABLES

[0066] Table 1: Hexamers that are not seed sequences of human miRNAs

[0067] Table 2: Experimental evaluation of single stranded oligonucleotides. SEQ ID (column 1) refers to the SEQ ID NO: that corresponds to the base sequence of the oligonucleotide. The formatted sequence, including any modifications, for each oligonucleotide is provided in Table 4. Oligo name (column 2) refers to the name for a given oligonucleotide and also refers to the same formatted oligonucleotide in Table 4. RQ (column 3) and AVG RQ SD (column 4) shows the expression level of the “probe” gene in a well containing oligo relative to a control well (carrier alone or a universal negative control oligo 293) and the standard deviation for the triplicate replicates of the experiment. Target (column 5) refers to the gene that is targeted by the oligonucleotide. Probe (column 6) refers to the gene whose expression was measured in a given assay. For example, Target FOXP3 and Probe GITR refers to an experiment where are oligo that targets FOXP3 was added to a well and the level of GITR was measured by qRT-PCR. The RQ and AVG RQ SD for that experiment would be the RQ and AVG RQ SD for GITR. [Oligo] is shown in nanomolar for in vitro experiments and in milligrams per kilogram of body weight for in vivo experiments.

[0068] Table 3: A listing of oligonucleotide modifications

[0069] Table 4: Formatted oligonucleotide sequences made for testing showing nucleotide modifications. The table shows the sequence of the modified nucleotides, where lnaX represents an LNA nucleotide with 3′ phosphorothioate linkage, omeX is a 2′-O-methyl nucleotide, dX is a deoxy nucleotide. An s at the end of a nucleotide code indicates that the nucleotide had a 3′ phosphorothioate linkage. The “-Sup” at the end of the sequence marks the fact that the 3′ end lacks either a phosphate or thiophosphate on the 3′ linkage. The Formatted Sequence column shows the sequence of the oligonucleotide, including modified nucleotides, for the oligonucleotides tested in Table 2.

### DETAILED DESCRIPTION OF CERTAIN EMBODIMENTS OF THE INVENTION

[0070] Aspects of the invention provided herein relate to the discovery of polycomb repressive complex 2 (PRC2)-interacting RNAs. Polycomb repressive complex 2 (PRC2) is a histone methyltransferase and a known epigenetic regulator involved in silencing of genomic regions through methylation of histone H3. Among other functions, PRC2 interacts with long noncoding RNAs (lncRNAs), such as RepA, Xist, and Tsix, to catalyze trimethylation of histone H3-lysine27. PRC2 contains four subunits, Eed, Suz12, RbAp48, and Ezh2.

[0071] Aspects of the invention relate to the recognition that single stranded oligonucleotides that bind to PRC2-associated regions of RNAs (e.g., lncRNAs) that are expressed from within a genomic region that encompasses or that is in functional proximity to the FOXP3 gene can induce or enhance expression of FOXP3. In some embodiments, this upregulation is believed to result from inhibition of PRC2 mediated repression of FOXP3. FOXP3 is a master regulator transcription factor that drives T cell differentiation and activity of T regulatory cells (Tregs). Tregs have immune suppressive activity and can help to promote a toleragenic response. Tregs have been shown to be helpful in shutting down T cell-mediated immunity toward the end of an immune reaction and in suppressing self-reactive T cells that have escaped the process of negative selection in the thymus. Activated T cells are important for immunoprotection of a host from pathogens and tumor cells. However, inappropriately activated or self-reactive T cells may have deleterious effects, e.g., by causing uncontrolled immune responses or a self-targeting autoimmune response. It is contemplated herein that upregulation of FOXP3 may be used to drive T cell differentiation and/or activity toward a T regulatory state. This may be useful, e.g., to drive activated T cells to differentiate into Tregs or to suppress activated T cell activity. Accordingly, aspects of the invention relate to compositions and methods for upregulating FOXP3.

[0072] As used herein, the term “PRC2-associated region” refers to a region of a nucleic acid that comprises or encodes a sequence of nucleotides that interact directly or indirectly with a component of PRC2. A PRC2-associated region may be present in a RNA (e.g., a long non-coding RNA (lncRNA)) that interacts with a PRC2. A PRC2-associated region may be present in a DNA that encodes an RNA that interacts with PRC2. In some cases, the PRC2-associated region is equivalently referred to as a PRC2-interacting region.

[0073] In some embodiments, a PRC2-associated region is a region of an RNA that crosslinks to a component of PRC2 in response to in situ ultraviolet irradiation of a cell that expresses the RNA, or a region of genomic DNA that encodes that RNA region. In some embodiments, a PRC2-associated region is a region of an RNA that immunoprecipitates with an antibody that targets a component of PRC2, or a region of genomic DNA that encodes that RNA region. In some embodiments, a PRC2-associated region is a region of an RNA that immunoprecipitates with an antibody that binds specifically to SUZ12, EED, EZH2 or RBBP4 (which as noted above are components of PRC2), or a region of genomic DNA that encodes that RNA region.

[0074] In some embodiments, a PRC2-associated region is a region of an RNA that is protected from nucleases (e.g., RNases) in an RNA-immunoprecipitation assay that employs an antibody that targets a component of PRC2, or a region of genomic DNA that encodes that protected RNA region. In some embodiments, a PRC2-associated region is a region of an RNA that is protected from nucleases (e.g., RNases) in an RNA-immunoprecipitation assay that employs an antibody that targets SUZ12, EED, EZH2 or RBBP4, or a region of genomic DNA that encodes that protected RNA region.

[0075] In some embodiments, a PRC2-associated region is a region of an RNA within which occur a relatively high frequency of sequence reads in a sequencing reaction of products of an RNA-immunoprecipitation assay that employs an antibody that targets a component of PRC2, or a region of genomic DNA that encodes that RNA region. In some embodiments, a PRC2-associated region is a region of an RNA within which occur a relatively high frequency of sequence reads in a sequencing reaction of products of an RNA-immunoprecipitation assay that employs an antibody that binds specifically to SUZ12, EED, EZH2 or RBBP4, or a region of genomic DNA that encodes that protected RNA region. In such embodiments, the PRC2-associated region may be referred to as a “peak.”

[0076] In some embodiments, a PRC2-associated region comprises a sequence of 40 to 60 nucleotides that interact with PRC2 complex. In some embodiments, a PRC2-associated region comprises a sequence of 40 to 60 nucleotides that encode an RNA that interacts with PRC2. In some embodiments, a PRC2-associated region comprises a sequence of up to 5 kb in length that comprises a sequence (e.g., of 40 to 60 nucleotides) that interacts with PRC2. In some embodiments, a PRC2-associated region comprises a sequence of up to 5 kb in length within which an RNA is encoded that has a sequence (e.g., of 40 to 60 nucleotides) that is known to interact with PRC2. In some embodiments, a PRC2-associated region comprises a sequence of about 4 kb in length that comprise a sequence (e.g., of 40 to 60 nucleotides) that interacts with PRC2. In some embodiments, a PRC2-associated region comprises a sequence of about 4 kb in length within which an RNA is encoded that includes a sequence (e.g., of 40 to 60 nucleotides) that is known to interact with PRC2. In some embodiments, a PRC2-associated region has a sequence as set forth in any one of SEQ ID NOS: SEQ ID NOS: 8-45 or 48-59.

[0077] In some embodiments, single stranded oligonucleotides are provided that specifically bind to, or are complementary to, a PRC2-associated region in a genomic region that encompasses or that is in proximity to the FOXP3 gene. In some embodiments, single stranded oligonucleotides are provided that specifically bind to, or are complementary to, a PRC2-associated region that has a sequence as set forth in any one of SEQ ID NOS: 8-45 or 48-59. In some embodiments, single stranded oligonucleotides are provided that specifically bind to, or are complementary to, a PRC2-associated region that has a sequence as set forth in any one of SEQ ID NOS: 8-45 or 48-59 combined with up to 2 kb, up to 5 kb, or up to 10 kb of flanking sequences from a corresponding genomic region to which these SEQ IDs map (e.g., in a human genome). In some embodiments, single stranded oligonucleotides have a sequence as set forth in any one of SEQ ID NOS: 60-45713. In some embodiments, a single stranded oligonucleotide has a sequence as set forth in Table 4.

[0078] Without being bound by a theory of invention, these oligonucleotides are able to interfere with the binding of and function of PRC2, by preventing recruitment of PRC2 to a specific chromosomal locus. For example, a single administration of single stranded oligonucleotides designed to specifically bind a PRC2-associated region lncRNA can stably displace not only the lncRNA, but also the PRC2 that binds to the lncRNA, from binding chromatin. After displacement, the full complement of PRC2 is not recovered for up to 24 hours. Further, lncRNA can recruit PRC2 in a cis fashion, repressing gene expression at or near the specific chromosomal locus from which the lncRNA was transcribed.

[0079] Methods of modulating gene expression are provided, in some embodiments, that may be carried out in vitro, ex vivo, or in vivo. It is understood that any reference to uses of compounds throughout the description contemplates use of the compound in preparation of a pharmaceutical composition or medicament for use in the treatment of condition or a disease (e.g., a disease or disorder associated with aberrant immune cell activation such as an autoimmune or inflammatory disease or disorder) associated with decreased levels or activity of FOXP3. Thus, as one nonlimiting example, this aspect of the invention includes use of such single stranded oligonucleotides in the preparation of a medicament for use in the treatment of disease, wherein the treatment involves upregulating expression of FOXP3.

[0080] In further aspects of the invention, methods are provided for selecting a candidate oligonucleotide for activating expression of FOXP3. The methods generally involve selecting as a candidate oligonucleotide, a single stranded oligonucleotide comprising a nucleotide sequence that is complementary to a PRC2-associated region (e.g., a nucleotide sequence as set forth in any one of SEQ ID NOS: 8-45 or 48-59). In some embodiments, sets of oligonucleotides may be selected that are enriched (e.g., compared with a random selection of oligonucleotides) in oligonucleotides that activate expression of FOXP3.

### Single Stranded Oligonucleotides for Modulating Expression of FOXP3

[0081] In one aspect of the invention, single stranded oligonucleotides complementary to the PRC2-associated regions are provided for modulating expression of FOXP3 in a cell. In some embodiments, expression of FOXP3 is upregulated or increased. In some embodiments, single stranded oligonucleotides complementary to these PRC2-associated regions inhibit the interaction of PRC2 with long RNA transcripts such that gene expression is upregulated or increased. In some embodiments, single stranded oligonucleotides complementary to these PRC2-associated regions inhibit the interaction of PRC2 with long RNA transcripts, resulting in reduced methylation of histone H3 and reduced gene inactivation, such that gene expression is upregulated or increased. In some embodiments, this interaction may be disrupted or inhibited due to a change in the structure of the long RNA that prevents or reduces binding to PRC2. The oligonucleotide may be selected using any of the methods disclosed herein for selecting a candidate oligonucleotide for activating expression of FOXP3.

[0082] The single stranded oligonucleotide may comprise a region of complementarity that is complementary with a PRC2-associated region of a nucleotide sequence set forth in any one of SEQ ID NOS: 1-7, 46, or 47. The region of complementarity of the single stranded oligonucleotide may be complementary with at least 6, e.g., at least 7, at least 8, at least 9, at least 10, at least 15 or more consecutive nucleotides of the PRC2-associated region.

[0083] The PRC2-associated region of a FOXP3 gene may map to a position in a chromosome between 50 kilobases upstream of a 5′-end of the FOXP3 gene and 50 kilobases downstream of a 3′-end of the FOXP3 gene. For example, the PRC2 associated region of a FOXP3 gene may have a sequence that maps to a position in chromosome X of a human genome within the coordinates chrX:49,057,795-49,164,962, based on the February 2009 UCSC genome assembly (GRCh37/hg19). The PRC2-associated region may map to a position in a chromosome between 25 kilobases upstream of a 5′-end of the FOXP3 gene and 25 kilobases downstream of a 3′-end of the FOXP3 gene. The PRC2-associated region may map to a position in a chromosome between 12 kilobases upstream of a 5′-end of the FOXP3 gene and 12 kilobases downstream of a 3′-end of the FOXP3 gene. The PRC2-associated region may map to a position in a chromosome between 5 kilobases upstream of a 5′-end of the FOXP3 gene and 5 kilobases downstream of a 3′-end of the FOXP3 gene.

[0084] The genomic position of the selected PRC2-associated region relative to the FOXP3 gene may vary. For example, the PRC2-associated region may be upstream of the 5′ end of the FOXP3 gene. The PRC2-associated region may be downstream of the 3′ end of the FOXP3 gene. The PRC2-associated region may be within an intron of the FOXP3 gene. The PRC2-associated region may be within an exon of the FOXP3 gene. The PRC2-associated region may traverse an intron-exon junction, a 5′-UTR-exon junction or a 3′-UTR-exon junction of the FOXP3 gene.

[0085] The single stranded oligonucleotide may comprise a sequence having the formula X-Y-Z, in which X is any nucleotide, Y is a nucleotide sequence of 6 nucleotides in length that is not a human seed sequence of a microRNA, and Z is a nucleotide sequence of varying length. In some embodiments X is the 5′ nucleotide of the oligonucleotide. In some embodiments, when X is anchored at the 5′ end of the oligonucleotide, the oligonucleotide does not have any nucleotides or nucleotide analogs linked 5′ to X. In some embodiments, other compounds such as peptides or sterols may be linked at the 5′ end in this embodiment as long as they are not nucleotides or nucleotide analogs. In some embodiments, the single stranded oligonucleotide has a sequence 5′X-Y-Z and is 8-50 nucleotides in length. Oligonucleotides that have these sequence characteristics are predicted to avoid the miRNA pathway. Therefore, in some embodiments, oligonucleotides having these sequence characteristics are unlikely to have an unintended consequence of functioning in a cell as a miRNA molecule. The Y sequence may be a nucleotide sequence of 6 nucleotides in length set forth in Table 1.

[0086] The single stranded oligonucleotide may have a sequence that does not contain guanosine nucleotide stretches (e.g., 3 or more, 4 or more, 5 or more, 6 or more consecutive guanosine nucleotides). In some embodiments, oligonucleotides having guanosine nucleotide stretches have increased non-specific binding and/or off-target effects, compared with oligonucleotides that do not have guanosine nucleotide stretches.

[0087] The single stranded oligonucleotide may have a sequence that has less than a threshold level of sequence identity with every sequence of nucleotides, of equivalent length, that map to a genomic position encompassing or in proximity to an off-target gene. For example, an oligonucleotide may be designed to ensure that it does not have a sequence that maps to genomic positions encompassing or in proximity with all known genes (e.g., all known protein coding genes) other than FOXP3. In a similar embodiment, an oligonucleotide may be designed to ensure that it does not have a sequence that maps to any other known PRC2-associated region, particularly PRC2-associated regions that are functionally related to any other known gene (e.g., any other known protein coding gene). In either case, the oligonucleotide is expected to have a reduced likelihood of having off-target effects. The threshold level of sequence identity may be 50%, 60%, 70%, 80%, 85%, 90%, 95%, 99% or 100% sequence identity.

[0088] The single stranded oligonucleotide may have a sequence that is complementary to a PRC2-associated region that encodes an RNA that forms a secondary structure comprising at least two single stranded loops. In has been discovered that, in some embodiments, oligonucleotides that are complementary to a PRC2-associated region that encodes an RNA that forms a secondary structure comprising one or more single stranded loops (e.g., at least two single stranded loops) have a greater likelihood of being active (e.g., of being capable of activating or enhancing expression of a target gene) than a randomly selected oligonucleotide. In some cases, the secondary structure may comprise a double stranded stem between the at least two single stranded loops. Accordingly, the region of complementarity between the oligonucleotide and the PRC2-associated region may be at a location of the PRC2 associated region that encodes at least a portion of at least one of the loops. In some cases, the region of complementarity between the oligonucleotide and the PRC2-associated region may be at a location of the PRC2-associated region that encodes at least a portion of at least two of the loops. In some cases, the region of complementarity between the oligonucleotide and the PRC2-associated region may be at a location of the PRC2 associated region that encodes at least a portion of the double stranded stem. In some embodiments, a PRC2-associated region (e.g., of an lncRNA) is identified (e.g., using RIP-Seq methodology or information derived therefrom [see, e.g., Zhao et al. Genome-wide identification of Polycomb-associated RNAs by RIP-seq. Mol Cell. 2010 Dec. 22; 40(6): 939-953]). In some embodiments, the predicted secondary structure RNA (e.g., lncRNA) containing the PRC2-associated region is determined using RNA secondary structure prediction algorithms, e.g., RNAfold, mfold. In some embodiments, oligonucleotides are designed to target a region of the RNA that forms a secondary structure comprising one or more single stranded loop (e.g., at least two single stranded loops) structures which may comprise a double stranded stem between the at least two single stranded loops.

[0089] The single stranded oligonucleotide may have a sequence that is has greater than 30% G-C content, greater than 40% G-C content, greater than 50% G-C content, greater than 60% G-C content, greater than 70% G-C content, or greater than 80% G-C content. The single stranded oligonucleotide may have a sequence that has up to 100% G-C content, up to 95% G-C content, up to 90% G-C content, or up to 80% G-C content. In some embodiments in which the oligonucleotide is 8 to 10 nucleotides in length, all but 1, 2, 3, 4, or 5 of the nucleotides of the complementary sequence of the PRC2-associated region are cytosine or guanosine nucleotides. In some embodiments, the sequence of the PRC2-associated region to which the single stranded oligonucleotide is complementary comprises no more than 3 nucleotides selected from adenine and uracil.

[0090] The single stranded oligonucleotide may be complementary to a chromosome of a different species (e.g., a mouse, rat, rabbit, goat, monkey, etc.) at a position that encompasses or that is in proximity to that species' homolog of FOXP3. The single stranded oligonucleotide may be complementary to a human genomic region encompassing or in proximity to the FOXP3 gene and also be complementary to a mouse genomic region encompassing or in proximity to the mouse homolog of FOXP3. For example, the single stranded oligonucleotide may be complementary to a sequence as set forth in SEQ ID NO: 1, 2, 5, 6, 7, 46, or 47, which is a human genomic region encompassing or in proximity to the FOXP3 gene, and also be complementary to a sequence as set forth in SEQ ID NO: 3 or 4, which is a mouse genomic region encompassing or in proximity to the mouse homolog of the FOXP3 gene. Oligonucleotides having these characteristics may be tested in vivo or in vitro for efficacy in multiple species (e.g., human and mouse). This approach also facilitates development of clinical candidates for treating human disease by selecting a species in which an appropriate animal exists for the disease.

[0091] In some embodiments, the region of complementarity of the single stranded oligonucleotide is complementary with at least 8 to 15, 8 to 30, 8 to 40, or 10 to 50, or 5 to 50, or 5 to 40 bases, e.g., 5, 6, 7, 8, 9, 10, 11, 12, 13, 14, 15, 16, 17, 18, 19, 20, 21, 22, 23, 24, 25, 26, 27, 28, 29, 30, 31, 32, 33, 34, 35, 36, 37, 38, 39, 40, 41, 42, 43, 44, 45, 46, 47, 48, 49, or 50 consecutive nucleotides of a PRC2-associated region. In some embodiments, the region of complementarity is complementary with at least 8 consecutive nucleotides of a PRC2-associated region. In some embodiments the sequence of the single stranded oligonucleotide is based on an RNA sequence that binds to PRC2, or a portion thereof, said portion having a length of from 5 to 40 contiguous base pairs, or about 8 to 40 bases, or about 5 to 15, or about 5 to 30, or about 5 to 40 bases, or about 5 to 50 bases.

[0092] Complementary, as the term is used in the art, refers to the capacity for precise pairing between two nucleotides. For example, if a nucleotide at a certain position of an oligonucleotide is capable of hydrogen bonding with a nucleotide at the same position of PRC2-associated region, then the single stranded nucleotide and PRC2-associated region are considered to be complementary to each other at that position. The single stranded nucleotide and PRC2-associated region are complementary to each other when a sufficient number of corresponding positions in each molecule are occupied by nucleotides that can hydrogen bond with each other through their bases. Thus, “complementary” is a term which is used to indicate a sufficient degree of complementarity or precise pairing such that stable and specific binding occurs between the single stranded nucleotide and PRC2-associated region. For example, if a base at one position of a single stranded nucleotide is capable of hydrogen bonding with a base at the corresponding position of a PRC2-associated region, then the bases are considered to be complementary to each other at that position. 100% complementarity is not required.

[0093] The single stranded oligonucleotide may be at least 80% complementary to (optionally one of at least 85%, 90%, 91%, 92%, 93%, 94%, 95%, 96%, 97%, 98%, 99% or 100% complementary to) the consecutive nucleotides of a PRC2-associated region. In some embodiments the single stranded oligonucleotide may contain 1, 2 or 3 base mismatches compared to the portion of the consecutive nucleotides of a PRC2-associated region. In some embodiments the single stranded oligonucleotide may have up to 3 mismatches over 15 bases, or up to 2 mismatches over 10 bases.

[0094] It is understood in the art that a complementary nucleotide sequence need not be 100% complementary to that of its target to be specifically hybridizable. In some embodiments, a complementary nucleic acid sequence for purposes of the present disclosure is specifically hybridizable when binding of the sequence to the target molecule (e.g., lncRNA) interferes with the normal function of the target (e.g., lncRNA) to cause a loss of activity (e.g., inhibiting PRC2-associated repression with consequent up-regulation of gene expression) and there is a sufficient degree of complementarity to avoid non-specific binding of the sequence to non-target sequences under conditions in which avoidance of non-specific binding is desired, e.g., under physiological conditions in the case of in vivo assays or therapeutic treatment, and in the case of in vitro assays, under conditions in which the assays are performed under suitable conditions of stringency.

[0095] In some embodiments, the single stranded oligonucleotide is 7, 8, 9, 10, 11, 12, 13, 14, 15, 16, 17, 18, 19, 20, 21, 22, 23, 24, 25, 26, 27, 28, 29, 30, 35, 40, 45, 50 or more nucleotides in length. In a preferred embodiment, the oligonucleotide is 8 to 30 nucleotides in length.

[0096] In some embodiments, the PRC2-associated region occurs on the same DNA strand as a gene sequence (sense). In some embodiments, the PRC2-associated region occurs on the opposite DNA strand as a gene sequence (anti-sense). Oligonucleotides complementary to a PRC2-associated region can bind either sense or anti-sense sequences. Base pairings may include both canonical Watson-Crick base pairing and non-Watson-Crick base pairing (e.g., Wobble base pairing and Hoogsteen base pairing). It is understood that for complementary base pairings, adenosine-type bases (A) are complementary to thymidine-type bases (T) or uracil-type bases (U), that cytosine-type bases (C) are complementary to guanosine-type bases (G), and that universal bases such as 3-nitropyrrole or 5-nitroindole can hybridize to and are considered complementary to any A, C, U, or T. Inosine (I) has also been considered in the art to be a universal base and is considered complementary to any A, C, U or T.

[0097] In some embodiments, any one or more thymidine (T) nucleotides (or modified nucleotide thereof) or uridine (U) nucleotides (or a modified nucleotide thereof) in a sequence provided herein, including a sequence provided in the sequence listing, may be replaced with any other nucleotide suitable for base pairing (e.g., via a Watson-Crick base pair) with an adenosine nucleotide. In some embodiments, any one or more thymidine (T) nucleotides (or modified nucleotide thereof) or uridine (U) nucleotides (or a modified nucleotide thereof) in a sequence provided herein, including a sequence provided in the sequence listing, may be suitably replaced with a different pyrimidine nucleotide or vice versa. In some embodiments, any one or more thymidine (T) nucleotides (or modified nucleotide thereof) in a sequence provided herein, including a sequence provided in the sequence listing, may be suitably replaced with a uridine (U) nucleotide (or a modified nucleotide thereof) or vice versa.

[0098] In some embodiments, GC content of the single stranded oligonucleotide is preferably between about 30-60%. Contiguous runs of three or more Gs or Cs may not be preferable in some embodiments. Accordingly, in some embodiments, the oligonucleotide does not comprise a stretch of three or more guanosine nucleotides.

[0099] In some embodiments, the single stranded oligonucleotide specifically binds to, or is complementary to an RNA that is encoded in a genome (e.g., a human genome) as a single contiguous transcript (e.g., a non-spliced RNA). In some embodiments, the single stranded oligonucleotide specifically binds to, or is complementary to an RNA that is encoded in a genome (e.g., a human genome), in which the distance in the genome between the 5′ end of the coding region of the RNA and the 3′ end of the coding region of the RNA is less than 1 kb, less than 2 kb, less than 3 kb, less than 4 kb, less than 5 kb, less than 7 kb, less than 8 kb, less than 9 kb, less than 10 kb, or less than 20 kb.

[0100] It is to be understood that any oligonucleotide provided herein can be excluded.

[0101] In some embodiments, it has been found that single stranded oligonucleotides disclosed herein may increase expression of mRNA corresponding to a target gene by at least about 50% (i.e. 150% of normal or 1.5 fold), or by about 2 fold to about 5 fold. In some embodiments, expression may be increased by at least about 15 fold, 20 fold, 30 fold, 40 fold, 50 fold or 100 fold, or any range between any of the foregoing numbers. It has also been found that increased mRNA expression has been shown to correlate to increased protein expression.

[0102] In some embodiments, it has been found that single stranded oligonucleotides disclosed herein may increase expression of mRNA or protein corresponding to CTLA4, GITR, and/or IL-10 by at least about 30% (i.e. 130% of normal or 1.3 fold), or by about 1.5 fold, or by about 2 fold to about 5 fold. In some embodiments, expression may be increased by at least about 5 fold, 10 fold, 15 fold, 20 fold, 30 fold, 40 fold, 50 fold or 100 fold, or any range between any of the foregoing numbers. For example, mRNA or protein corresponding to CTLA4, GITR, and/or IL-10 may be increased by an amount in a range of 1.3 fold to 2 fold, 1.3 fold to 5 fold, 1.3 fold to 10 fold, 1.3 fold to 20 fold, 1.3 fold to 50 fold, 1.3 fold to 100 fold, 2 fold to 5 fold, 2 fold to 10 fold, 2 fold to 20 fold, 2 fold to 10 fold. 2 fold to 20 fold, 2 fold to 50 fold, or 2 fold to 100 fold. Exemplary human mRNA and protein sequence identifiers for CTLA4, GITR, and IL-10 are provided below. These sequence identifiers can be used to identify exemplary mRNA and protein sequences for CTLA4, GITR, and IL-10 by using the NCBI Gene search as of the filing of the instant application.

[0103] CTLA4: NM_001037631.2, NM_005214.4, NP_001032720.1, NP_005205.2

[0104] GITR (also called TNFRSF18): NM_004195.2, NM_148901.1, NM_148902.1, NP_004186.1, NP_683699.1, NP_683700.1

[0105] IL-10: NM_000572.2, NP_000563.1

[0106] In some embodiments, it has been found that single stranded oligonucleotides disclosed herein may increase the number of CD4+CD25+FOXP3+ T cells by at least about 30% (i.e. 130% of normal or 1.3 fold), or by about 1.5 fold, or by about 2 fold to about 5 fold. In some embodiments, the number may be increased by at least about 5 fold, 10 fold, 15 fold, 20 fold, 30 fold, 40 fold, 50 fold or 100 fold, or any range between any of the foregoing numbers. For example, numbers of CD4+CD25+FOXP3+ T cells may be increased in a population of T cells by an amount in a range of 1.3 fold to 2 fold, 1.3 fold to 5 fold, 1.3 fold to 10 fold, 1.3 fold to 20 fold, 1.3 fold to 50 fold, 1.3 fold to 100 fold, 2 fold to 5 fold, 2 fold to 10 fold, 2 fold to 20 fold, 2 fold to 10 fold. 2 fold to 20 fold, 2 fold to 50 fold, or 2 fold to 100 fold.

[0107] In some or any of the embodiments of the oligonucleotides described herein, or processes for designing or synthesizing them, the oligonucleotides will upregulate gene expression and may specifically bind or specifically hybridize or be complementary to the PRC2 binding RNA that is transcribed from the same strand as a protein coding reference gene. The oligonucleotide may bind to a region of the PRC2 binding RNA that originates within or overlaps an intron, exon, intron exon junction, 5′ UTR, 3′ UTR, a translation initiation region, or a translation termination region of a protein coding sense strand of a reference gene (refGene).

[0108] In some or any of the embodiments of oligonucleotides described herein, or processes for designing or synthesizing them, the oligonucleotides will upregulate gene expression and may specifically bind or specifically hybridize or be complementary to a PRC2 binding RNA that transcribed from the opposite strand (the antisense strand) of a protein coding reference gene. The oligonucleotide may bind to a region of the PRC2 binding RNA that originates within or overlaps an intron, exon, intron exon junction, 5′ UTR, 3′ UTR, a translation initiation region, or a translation termination region of a protein coding antisense strand of a reference gene

[0109] The oligonucleotides described herein may be modified, e.g., comprise a modified sugar moiety, a modified internucleoside linkage, a modified nucleotide and/or combinations thereof. In addition, the oligonucleotides can exhibit one or more of the following properties: do not induce substantial cleavage or degradation of the target RNA; do not cause substantially complete cleavage or degradation of the target RNA; do not activate the RNAse H pathway; do not activate RISC; do not recruit any Argonaute family protein; are not cleaved by Dicer; do not mediate alternative splicing; are not immune stimulatory; are nuclease resistant; have improved cell uptake compared to unmodified oligonucleotides; are not toxic to cells or mammals; may have improved endosomal exit; do interfere with interaction of lncRNA with PRC2, preferably the Ezh2 subunit but optionally the Suz12, Eed, RbAp46/48 subunits or accessory factors such as Jarid2; do decrease histone H3 lysine27 methylation and/or do upregulate gene expression.

[0110] Oligonucleotides that are designed to interact with RNA to modulate gene expression are a distinct subset of base sequences from those that are designed to bind a DNA target (e.g., are complementary to the underlying genomic DNA sequence from which the RNA is transcribed).

[0111] Any of the oligonucleotides disclosed herein may be linked to one or more other oligonucleotides disclosed herein by a linker, e.g., a cleavable linker.

### Method for Selecting Candidate Oligonucleotides for Activating Expression of FOXP3

[0112] Methods are provided herein for selecting a candidate oligonucleotide for activating or enhancing expression of FOXP3. The target selection methods may generally involve steps for selecting single stranded oligonucleotides having any of the structural and functional characteristics disclosed herein. Typically, the methods involve one or more steps aimed at identifying oligonucleotides that target a PRC2-associated region that is functionally related to FOXP3, for example a PRC2-associated region of a lncRNA that regulates expression of FOXP3 by facilitating (e.g., in a cis-regulatory manner) the recruitment of PRC2 to the FOXP3 gene. Such oligonucleotides are expected to be candidates for activating expression of FOXP3 because of their ability to hybridize with the PRC2-associated region of a nucleic acid (e.g., a lncRNA). In some embodiments, this hybridization event is understood to disrupt interaction of PRC2 with the nucleic acid (e.g., a lncRNA) and as a result disrupt recruitment of PRC2 and its associated co-repressors (e.g., chromatin remodeling factors) to the FOXP3 gene locus.

[0113] Methods of selecting a candidate oligonucleotide may involve selecting a PRC2-associated region (e.g., a nucleotide sequence as set forth in any one of SEQ ID NOS: 8-45 or 48-59) that maps to a chromosomal position encompassing or in proximity to the FOXP3 gene (e.g., a chromosomal position having a sequence as set forth in any one of SEQ ID NOS: 1-7, 46, or 47). The PRC2-associated region may map to the strand of the chromosome comprising the sense strand of the FOXP3 gene, in which case the candidate oligonucleotide is complementary to the sense strand of the FOXP3 gene (i.e., is antisense to the FOXP3 gene). Alternatively, the PRC2-associated region may map to the strand of the first chromosome comprising the antisense strand of the FOXP3 gene, in which case the oligonucleotide is complementary to the antisense strand (the template strand) of the FOXP3 gene (i.e., is sense to the FOXP3 gene).

[0114] Methods for selecting a set of candidate oligonucleotides that is enriched in oligonucleotides that activate expression of FOXP3 may involve selecting one or more PRC2-associated regions that map to a chromosomal position that encompasses or that is in proximity to the FOXP3 gene and selecting a set of oligonucleotides, in which each oligonucleotide in the set comprises a nucleotide sequence that is complementary with the one or more PRC2-associated regions. As used herein, the phrase, “a set of oligonucleotides that is enriched in oligonucleotides that activate expression of” refers to a set of oligonucleotides that has a greater number of oligonucleotides that activate expression of a target gene (e.g., FOXP3) compared with a random selection of oligonucleotides of the same physicochemical properties (e.g., the same GC content, Tₘ, length etc.) as the enriched set.

[0115] Where the design and/or synthesis of a single stranded oligonucleotide involves design and/or synthesis of a sequence that is complementary to a nucleic acid or PRC2-associated region described by such sequence information, the skilled person is readily able to determine the complementary sequence, e.g., through understanding of Watson Crick base pairing rules which form part of the common general knowledge in the field.

[0116] In some embodiments design and/or synthesis of a single stranded oligonucleotide involves manufacture of an oligonucleotide from starting materials by techniques known to those of skill in the art, where the synthesis may be based on a sequence of a PRC2-associated region, or portion thereof.

[0117] Methods of design and/or synthesis of a single stranded oligonucleotide may involve one or more of the steps of:

[0118] Identifying and/or selecting PRC2-associated region;

[0119] Designing a nucleic acid sequence having a desired degree of sequence identity or complementarity to a PRC2-associated region or a portion thereof;

[0120] Synthesizing a single stranded oligonucleotide to the designed sequence;

[0121] Purifying the synthesized single stranded oligonucleotide; and

[0122] Optionally mixing the synthesized single stranded oligonucleotide with at least one pharmaceutically acceptable diluent, carrier or excipient to form a pharmaceutical composition or medicament.

[0123] Single stranded oligonucleotides so designed and/or synthesized may be useful in method of modulating gene expression as described herein.

[0124] Preferably, single stranded oligonucleotides of the invention are synthesized chemically. Oligonucleotides used to practice this invention can be synthesized in vitro by well-known chemical synthesis techniques.

[0125] Oligonucleotides of the invention can be stabilized against nucleolytic degradation such as by the incorporation of a modification, e.g., a nucleotide modification. For example, nucleic acid sequences of the invention include a phosphorothioate at least the first, second, or third internucleotide linkage at the 5′ or 3′ end of the nucleotide sequence. As another example, the nucleic acid sequence can include a 2′-modified nucleotide, e.g., a 2′-deoxy, 2′-deoxy-2′-fluoro, 2′-O-methyl, 2′-O-methoxyethyl (2′-O-MOE), 2′-O-aminopropyl (2′-O-AP), 2′-O-dimethylaminoethyl (2′-O-DMAOE), 2′-O-dimethylaminopropyl (2′-O-DMAP), 2′-O-dimethylaminoethyloxyethyl (2′-O-DMAEOE), or 2′-O—N-methylacetamido (2′-O—NMA). As another example, the nucleic acid sequence can include at least one 2′-O-methyl-modified nucleotide, and in some embodiments, all of the nucleotides include a 2′-O-methyl modification. In some embodiments, the nucleic acids are “locked,” i.e., comprise nucleic acid analogues in which the ribose ring is “locked” by a methylene bridge connecting the 2′-O atom and the 4′-C atom.

[0126] It is understood that any of the modified chemistries or formats of single stranded oligonucleotides described herein can be combined with each other, and that one, two, three, four, five, or more different types of modifications can be included within the same molecule.

[0127] In some embodiments, the method may further comprise the steps of amplifying the synthesized single stranded oligonucleotide, and/or purifying the single stranded oligonucleotide (or amplified single stranded oligonucleotide), and/or sequencing the single stranded oligonucleotide so obtained.

[0128] As such, the process of preparing a single stranded oligonucleotide may be a process that is for use in the manufacture of a pharmaceutical composition or medicament for use in the treatment of disease, optionally wherein the treatment involves modulating expression of a gene associated with a PRC2-associated region.

[0129] In the methods described above a PRC2-associated region may be, or have been, identified, or obtained, by a method that involves identifying RNA that binds to PRC2.

[0130] Such methods may involve the following steps: providing a sample containing nuclear ribonucleic acids, contacting the sample with an agent that binds specifically to PRC2 or a subunit thereof, allowing complexes to form between the agent and protein in the sample, partitioning the complexes, synthesizing nucleic acid that is complementary to nucleic acid present in the complexes.

[0131] Where the single stranded oligonucleotide is based on a PRC2-associated region, or a portion of such a sequence, it may be based on information about that sequence, e.g., sequence information available in written or electronic form, which may include sequence information contained in publicly available scientific publications or sequence databases.

### Nucleotide Analogues

[0132] In some embodiments, the oligonucleotide may comprise at least one ribonucleotide, at least one deoxyribonucleotide, and/or at least one bridged nucleotide. In some embodiments, the oligonucleotide may comprise a bridged nucleotide, such as a locked nucleic acid (LNA) nucleotide, a constrained ethyl (cEt) nucleotide, or an ethylene bridged nucleic acid (ENA) nucleotide. Examples of such nucleotides are disclosed herein and known in the art. In some embodiments, the oligonucleotide comprises a nucleotide analog disclosed in one of the following United States patent or Patent Application Publications: U.S. Pat. No. 7,399,845, U.S. Pat. No. 7,741,457, U.S. Pat. No. 8,022,193, U.S. Pat. No. 7,569,686, U.S. Pat. No. 7,335,765, U.S. Pat. No. 7,314,923, U.S. Pat. No. 7,335,765, and U.S. Pat. No. 7,816,333, US 20110009471, the entire contents of each of which are incorporated herein by reference for all purposes. The oligonucleotide may have one or more 2′ O-methyl nucleotides. The oligonucleotide may consist entirely of 2′ O-methyl nucleotides.

[0133] Often the single stranded oligonucleotide has one or more nucleotide analogues. For example, the single stranded oligonucleotide may have at least one nucleotide analogue that results in an increase in Tₘ of the oligonucleotide in a range of 1° C., 2° C., 3° C., 4° C., or 5° C. compared with an oligonucleotide that does not have the at least one nucleotide analogue. The single stranded oligonucleotide may have a plurality of nucleotide analogues that results in a total increase in Tₘ of the oligonucleotide in a range of 2° C., 3° C., 4° C., 5° C., 6° C., 7° C., 8° C., 9° C., 10° C., 15° C., 20° C., 25° C., 30° C., 35° C., 40° C., 45° C. or more compared with an oligonucleotide that does not have the nucleotide analogue.

[0134] The oligonucleotide may be of up to 50 nucleotides in length in which 2 to 10, 2 to 15, 2 to 16, 2 to 17, 2 to 18, 2 to 19, 2 to 20, 2 to 25, 2 to 30, 2 to 40, 2 to 45, or more nucleotides of the oligonucleotide are nucleotide analogues. The oligonucleotide may be of 8 to 30 nucleotides in length in which 2 to 10, 2 to 15, 2 to 16, 2 to 17, 2 to 18, 2 to 19, 2 to 20, 2 to 25, 2 to 30 nucleotides of the oligonucleotide are nucleotide analogues. The oligonucleotide may be of 8 to 15 nucleotides in length in which 2 to 4, 2 to 5, 2 to 6, 2 to 7, 2 to 8, 2 to 9, 2 to 10, 2 to 11, 2 to 12, 2 to 13, 2 to 14 nucleotides of the oligonucleotide are nucleotide analogues. Optionally, the oligonucleotides may have every nucleotide except 1, 2, 3, 4, 5, 6, 7, 8, 9, or 10 nucleotides modified.

[0135] The oligonucleotide may consist entirely of bridged nucleotides (e.g., LNA nucleotides, cEt nucleotides, ENA nucleotides). The oligonucleotide may comprise alternating deoxyribonucleotides and 2′-fluoro-deoxyribonucleotides. The oligonucleotide may comprise alternating deoxyribonucleotides and 2′-O-methyl nucleotides. The oligonucleotide may comprise alternating deoxyribonucleotides and ENA nucleotide analogues. The oligonucleotide may comprise alternating deoxyribonucleotides and LNA nucleotides. The oligonucleotide may comprise alternating LNA nucleotides and 2′-O-methyl nucleotides. The oligonucleotide may have a 5′ nucleotide that is a bridged nucleotide (e.g., a LNA nucleotide, cEt nucleotide, ENA nucleotide). The oligonucleotide may have a 5′ nucleotide that is a deoxyribonucleotide.

[0136] The oligonucleotide may comprise deoxyribonucleotides flanked by at least one bridged nucleotide (e.g., a LNA nucleotide, cEt nucleotide, ENA nucleotide) on each of the 5′ and 3′ ends of the deoxyribonucleotides. The oligonucleotide may comprise deoxyribonucleotides flanked by 1, 2, 3, 4, 5, 6, 7, 8 or more bridged nucleotides (e.g., LNA nucleotides, cEt nucleotides, ENA nucleotides) on each of the 5′ and 3′ ends of the deoxyribonucleotides. The 3′ position of the oligonucleotide may have a 3′ hydroxyl group. The 3′ position of the oligonucleotide may have a 3′ thiophosphate.

[0137] The oligonucleotide may be conjugated with a label. For example, the oligonucleotide may be conjugated with a biotin moiety, cholesterol, Vitamin A, folate, sigma receptor ligands, aptamers, peptides, such as CPP, hydrophobic molecules, such as lipids, ASGPR or dynamic polyconjugates and variants thereof at its 5′ or 3′ end.

[0138] Preferably the single stranded oligonucleotide comprises one or more modifications comprising: a modified sugar moiety, and/or a modified internucleoside linkage, and/or a modified nucleotide and/or combinations thereof. It is not necessary for all positions in a given oligonucleotide to be uniformly modified, and in fact more than one of the modifications described herein may be incorporated in a single oligonucleotide or even at within a single nucleoside within an oligonucleotide.

[0139] In some embodiments, the single stranded oligonucleotides are chimeric oligonucleotides that contain two or more chemically distinct regions, each made up of at least one nucleotide. These oligonucleotides typically contain at least one region of modified nucleotides that confers one or more beneficial properties (such as, for example, increased nuclease resistance, increased uptake into cells, increased binding affinity for the target) and a region that is a substrate for enzymes capable of cleaving RNA:DNA or RNA:RNA hybrids. Chimeric single stranded oligonucleotides of the invention may be formed as composite structures of two or more oligonucleotides, modified oligonucleotides, oligonucleosides and/or oligonucleotide mimetics as described above. Such compounds have also been referred to in the art as hybrids or gapmers. Representative United States patents that teach the preparation of such hybrid structures comprise, but are not limited to, U.S. Pat. Nos. 5,013,830; 5,149,797; 5,220,007; 5,256,775; 5,366,878; 5,403,711; 5,491,133; 5,565,350; 5,623,065; 5,652,355; 5,652,356; and 5,700,922, each of which is herein incorporated by reference.

[0140] In some embodiments, the single stranded oligonucleotide comprises at least one nucleotide modified at the 2′ position of the sugar, most preferably a 2′-O-alkyl, 2′-O-alkyl-O-alkyl or 2′-fluoro-modified nucleotide. In other preferred embodiments, RNA modifications include 2′-fluoro, 2′-amino and 2′ O-methyl modifications on the ribose of pyrimidines, abasic residues or an inverted base at the 3′ end of the RNA. Such modifications are routinely incorporated into oligonucleotides and these oligonucleotides have been shown to have a higher Tm (i.e., higher target binding affinity) than 2′-deoxyoligonucleotides against a given target.

[0141] A number of nucleotide and nucleoside modifications have been shown to make the oligonucleotide into which they are incorporated more resistant to nuclease digestion than the native oligodeoxynucleotide; these modified oligos survive intact for a longer time than unmodified oligonucleotides. Specific examples of modified oligonucleotides include those comprising modified backbones, for example, phosphorothioates, phosphotriesters, methyl phosphonates, short chain alkyl or cycloalkyl intersugar linkages or short chain heteroatomic or heterocyclic intersugar linkages. Most preferred are oligonucleotides with phosphorothioate backbones and those with heteroatom backbones, particularly CH₂—NH—O—CH₂, CH, ˜N(CH₃)˜O˜CH₂ (known as a methylene(methylimino) or MMI backbone, CH₂—O—N(CH₃)—CH₂, CH₂—N(CH₃)—N(CH₃)—CH₂ and O—N(CH₃)—CH₂—CH₂ backbones, wherein the native phosphodiester backbone is represented as O—P—O—CH,); amide backbones (see De Mesmaeker et al. Ace. Chem. Res. 1995, 28:366-374); morpholino backbone structures (see Summerton and Weller, U.S. Pat. No. 5,034,506); peptide nucleic acid (PNA) backbone (wherein the phosphodiester backbone of the oligonucleotide is replaced with a polyamide backbone, the nucleotides being bound directly or indirectly to the aza nitrogen atoms of the polyamide backbone, see Nielsen et al., Science 1991, 254, 1497). Phosphorus-containing linkages include, but are not limited to, phosphorothioates, chiral phosphorothioates, phosphorodithioates, phosphotriesters, aminoalkylphosphotriesters, methyl and other alkyl phosphonates comprising 3′alkylene phosphonates and chiral phosphonates, phosphinates, phosphoramidates comprising 3′-amino phosphoramidate and aminoalkylphosphoramidates, thionophosphoramidates, thionoalkylphosphonates, thionoalkylphosphotriesters, and boranophosphates having normal 3′-5′ linkages, 2′-5′ linked analogs of these, and those having inverted polarity wherein the adjacent pairs of nucleoside units are linked 3′-5′ to 5′-3′ or 2′-5′ to 5′-2′; see U.S. Pat. Nos. 3,687,808; 4,469,863; 4,476,301; 5,023,243; 5,177,196; 5,188,897; 5,264,423; 5,276,019; 5,278,302; 5,286,717; 5,321,131; 5,399,676; 5,405,939; 5,453,496; 5,455,233; 5,466,677; 5,476,925; 5,519,126; 5,536,821; 5,541,306; 5,550,111; 5,563,253; 5,571,799; 5,587,361; and 5,625,050.

[0142] Morpholino-based oligomeric compounds are described in Dwaine A. Braasch and David R. Corey, Biochemistry, 2002, 41(14), 4503-4510); Genesis, volume 30, issue 3, 2001; Heasman, J., Dev. Biol., 2002, 243, 209-214; Nasevicius et al., Nat. Genet., 2000, 26, 216-220; Lacerra et al., Proc. Natl. Acad. Sci., 2000, 97, 9591-9596; and U.S. Pat. No. 5,034,506, issued Jul. 23, 1991. In some embodiments, the morpholino-based oligomeric compound is a phosphorodiamidate morpholino oligomer (PMO) (e.g., as described in Iverson, Curr. Opin. Mol. Ther., 3:235-238, 2001; and Wang et al., J. Gene Med., 12:354-364, 2010; the disclosures of which are incorporated herein by reference in their entireties).

[0143] Cyclohexenyl nucleic acid oligonucleotide mimetics are described in Wang et al., J. Am. Chem. Soc., 2000, 122, 8595-8602.

[0144] Modified oligonucleotide backbones that do not include a phosphorus atom therein have backbones that are formed by short chain alkyl or cycloalkyl internucleoside linkages, mixed heteroatom and alkyl or cycloalkyl internucleoside linkages, or one or more short chain heteroatomic or heterocyclic internucleoside linkages. These comprise those having morpholino linkages (formed in part from the sugar portion of a nucleoside); siloxane backbones; sulfide, sulfoxide and sulfone backbones; formacetyl and thioformacetyl backbones; methylene formacetyl and thioformacetyl backbones; alkene containing backbones; sulfamate backbones; methyleneimino and methylenehydrazino backbones; sulfonate and sulfonamide backbones; amide backbones; and others having mixed N, O, S and CH2 component parts; see U.S. Pat. Nos. 5,034,506; 5,166,315; 5,185,444; 5,214,134; 5,216,141; 5,235,033; 5,264,562; 5,264,564; 5,405,938; 5,434,257; 5,466,677; 5,470,967; 5,489,677; 5,541,307; 5,561,225; 5,596,086; 5,602,240; 5,610,289; 5,602,240; 5,608,046; 5,610,289; 5,618,704; 5,623,070; 5,663,312; 5,633,360; 5,677,437; and 5,677,439, each of which is herein incorporated by reference.

[0145] Modified oligonucleotides are also known that include oligonucleotides that are based on or constructed from arabinonucleotide or modified arabinonucleotide residues. Arabinonucleosides are stereoisomers of ribonucleosides, differing only in the configuration at the 2′-position of the sugar ring. In some embodiments, a 2′-arabino modification is 2′-F arabino. In some embodiments, the modified oligonucleotide is 2′-fluoro-D-arabinonucleic acid (FANA) (as described in, for example, Lon et al., Biochem., 41:3457-3467, 2002 and Min et al., Bioorg. Med. Chem. Lett., 12:2651-2654, 2002; the disclosures of which are incorporated herein by reference in their entireties). Similar modifications can also be made at other positions on the sugar, particularly the 3′ position of the sugar on a 3′ terminal nucleoside or in 2′-5′ linked oligonucleotides and the 5′ position of 5′ terminal nucleotide.

[0146] PCT Publication No. WO 99/67378 discloses arabinonucleic acids (ANA) oligomers and their analogues for improved sequence specific inhibition of gene expression via association to complementary messenger RNA.

[0147] Other preferred modifications include ethylene-bridged nucleic acids (ENAs) (e.g., International Patent Publication No. WO 2005/042777, Morita et al., Nucleic Acid Res., Suppl 1:241-242, 2001; Surono et al., Hum. Gene Ther., 15:749-757, 2004; Koizumi, Curr. Opin. Mol. Ther., 8:144-149, 2006 and Horie et al., Nucleic Acids Symp. Ser (Oxf), 49:171-172, 2005; the disclosures of which are incorporated herein by reference in their entireties). Preferred ENAs include, but are not limited to, 2′-O,4′-C-ethylene-bridged nucleic acids.

[0148] Examples of LNAs are described in WO/2008/043753 and include compounds of the following general formula.

[chemical structure]

[0149] where X and Y are independently selected among the groups —O—,

[0150] —S—, —N(H)—, N(R)—, —CH₂— or —CH— (if part of a double bond),

[0151] —CH₂—O—, —CH₂—S—, —CH₂—N(H)—, —CH₂—N(R)—, —CH₂—CH₂— or —CH₂—CH— (if part of a double bond),

[0152] —CH═CH—, where R is selected from hydrogen and C₁₋₄-alkyl; Z and Z* are independently selected among an internucleoside linkage, a terminal group or a protecting group; B constitutes a natural or non-natural nucleotide base moiety; and the asymmetric groups may be found in either orientation.

[0153] Preferably, the LNA used in the oligonucleotides described herein comprises at least one LNA unit according any of the formulas

[chemical structure]

[0154] wherein Y is —O—, —S—, —NH—, or N(R^{H}); Z and Z* are independently selected among an internucleoside linkage, a terminal group or a protecting group; B constitutes a natural or non-natural nucleotide base moiety, and RH is selected from hydrogen and C₁₋₄-alkyl.

[0155] In some embodiments, the Locked Nucleic Acid (LNA) used in the oligonucleotides described herein comprises at least one Locked Nucleic Acid (LNA) unit according any of the formulas shown in Scheme 2 of PCT/DK2006/000512.

[0156] In some embodiments, the LNA used in the oligomer of the invention comprises internucleoside linkages selected from —O—P(O)₂—O—, —O—P(O,S)—O—, —O—P(S)₂—O—, —S—P(O)₂—O—, —S—P(O,S)—O—, —S—P(S)₂—O—, —O—P(O)₂—S—, —O—P(O,S)—S—, —S—P(O)₂—S—, —O—PO(R^{H})—O—, O—PO(OCH₃)—O—, —O—PO(NR^{H})—O—, —O—PO(OCH₂CH₂S—R)—O—, —O—PO(BH₃)—O—, —O—PO(NHR^{H})—O—, —O—P(O)₂—NR^{H}—, —NR^{H}—P(O)₂—O—, —NR^{H}—CO—O—, where R^{H} is selected from hydrogen and C₁₋₄-alkyl.

[0157] Specifically preferred LNA units are shown in scheme 2:

[chemical structure]

[0158] The term “thio-LNA” comprises a locked nucleotide in which at least one of X or Y in the general formula above is selected from S or —CH₂—S—. Thio-LNA can be in both beta-D and alpha-L-configuration.

[0159] The term “amino-LNA” comprises a locked nucleotide in which at least one of X or Y in the general formula above is selected from —N(H)—, N(R)—, CH₂—N(H)—, and —CH₂—N(R)— where R is selected from hydrogen and C₁₋₄-alkyl. Amino-LNA can be in both beta-D and alpha-L-configuration.

[0160] The term “oxy-LNA” comprises a locked nucleotide in which at least one of X or Y in the general formula above represents —O— or —CH₂—O—. Oxy-LNA can be in both beta-D and alpha-L-configuration.

[0161] The term “ena-LNA” comprises a locked nucleotide in which Y in the general formula above is —CH₂—O— (where the oxygen atom of —CH₂—O— is attached to the 2′-position relative to the base B).

[0162] LNAs are described in additional detail herein.

[0163] One or more substituted sugar moieties can also be included, e.g., one of the following at the 2′ position: OH, SH, SCH₃, F, OCN, OCH₃OCH₃, OCH₃O(CH₂)nCH₃, O(CH₂)nNH₂ or O(CH₂)nCH₃ where n is from 1 to about 10; C1 to C10 lower alkyl, alkoxyalkoxy, substituted lower alkyl, alkaryl or aralkyl; Cl; Br; CN; CF₃; OCF₃; O-, S-, or N-alkyl; O-, S-, or N-alkenyl; SOCH₃; SO₂CH₃; ONO₂; NO₂; N₃; NH2; heterocycloalkyl; heterocycloalkaryl; aminoalkylamino; polyalkylamino; substituted silyl; an RNA cleaving group; a reporter group; an intercalator; a group for improving the pharmacokinetic properties of an oligonucleotide; or a group for improving the pharmacodynamic properties of an oligonucleotide and other substituents having similar properties. A preferred modification includes 2′-methoxyethoxy [2′-O—CH₂CH₂OCH₃, also known as 2′-O-(2-methoxyethyl)] (Martin et al, HeIv. Chim. Acta, 1995, 78, 486). Other preferred modifications include 2′-methoxy (2′-O—CH₃), 2′-propoxy (2′-OCH₂CH₂CH₃) and 2′-fluoro (2′-F). Similar modifications may also be made at other positions on the oligonucleotide, particularly the 3′ position of the sugar on the 3′ terminal nucleotide and the 5′ position of 5′ terminal nucleotide. Oligonucleotides may also have sugar mimetics such as cyclobutyls in place of the pentofuranosyl group.

[0164] Single stranded oligonucleotides can also include, additionally or alternatively, nucleobase (often referred to in the art simply as “base”) modifications or substitutions. As used herein, “unmodified” or “natural” nucleobases include adenine (A), guanine (G), thymine (T), cytosine (C) and uracil (U). Modified nucleobases include nucleobases found only infrequently or transiently in natural nucleic acids, e.g., hypoxanthine, 6-methyladenine, 5-Me pyrimidines, particularly 5-methylcytosine (also referred to as 5-methyl-2′ deoxycytosine and often referred to in the art as 5-Me-C), 5-hydroxymethylcytosine (HMC), glycosyl HMC and gentobiosyl HMC, isocytosine, pseudoisocytosine, as well as synthetic nucleobases, e.g., 2-aminoadenine, 2-(methylamino)adenine, 2-(imidazolylalkyl)adenine, 2-(aminoalklyamino)adenine or other heterosubstituted alkyladenines, 2-thiouracil, 2-thiothymine, 5-bromouracil, 5-hydroxymethyluracil, 5-propynyluracil, 8-azaguanine, 7-deazaguanine, N6 (6-aminohexyl)adenine, 6-aminopurine, 2-aminopurine, 2-chloro-6-aminopurine and 2,6-diaminopurine or other diaminopurines. See, e.g., Kornberg, “DNA Replication,” W. H. Freeman & Co., San Francisco, 1980, pp 75-77; and Gebeyehu, G., et al. Nucl. Acids Res., 15:4513 (1987)). A “universal” base known in the art, e.g., inosine, can also be included. 5-Me-C substitutions have been shown to increase nucleic acid duplex stability by 0.6-1.2° C. (Sanghvi, in Crooke, and Lebleu, eds., Antisense Research and Applications, CRC Press, Boca Raton, 1993, pp. 276-278) and may be used as base substitutions.

[0165] It is not necessary for all positions in a given oligonucleotide to be uniformly modified, and in fact more than one of the modifications described herein may be incorporated in a single oligonucleotide or even at within a single nucleoside within an oligonucleotide.

[0166] In some embodiments, both a sugar and an internucleoside linkage, i.e., the backbone, of the nucleotide units are replaced with novel groups. The base units are maintained for hybridization with an appropriate nucleic acid target compound. One such oligomeric compound, an oligonucleotide mimetic that has been shown to have excellent hybridization properties, is referred to as a peptide nucleic acid (PNA). In PNA compounds, the sugar-backbone of an oligonucleotide is replaced with an amide containing backbone, for example, an aminoethylglycine backbone. The nucleobases are retained and are bound directly or indirectly to aza nitrogen atoms of the amide portion of the backbone. Representative United States patents that teach the preparation of PNA compounds include, but are not limited to, U.S. Pat. Nos. 5,539,082; 5,714,331; and 5,719,262, each of which is herein incorporated by reference. Further teaching of PNA compounds can be found in Nielsen et al, Science, 1991, 254, 1497-1500.

[0167] Single stranded oligonucleotides can also include one or more nucleobase (often referred to in the art simply as “base”) modifications or substitutions. As used herein, “unmodified” or “natural” nucleobases comprise the purine bases adenine (A) and guanine (G), and the pyrimidine bases thymine (T), cytosine (C) and uracil (U). Modified nucleobases comprise other synthetic and natural nucleobases such as 5-methylcytosine (5-me-C), 5-hydroxymethyl cytosine, xanthine, hypoxanthine, 2-aminoadenine, 6-methyl and other alkyl derivatives of adenine and guanine, 2-propyl and other alkyl derivatives of adenine and guanine, 2-thiouracil, 2-thiothymine and 2-thiocytosine, 5-halouracil and cytosine, 5-propynyl uracil and cytosine, 6-azo uracil, cytosine and thymine, 5-uracil (pseudo-uracil), 4-thiouracil, 8-halo, 8-amino, 8-thiol, 8-thioalkyl, 8-hydroxyl and other 8-substituted adenines and guanines, 5-halo particularly 5-bromo, 5-trifluoromethyl and other 5-substituted uracils and cytosines, 7-methylquanine and 7-methyladenine, 8-azaguanine and 8-azaadenine, 7-deazaguanine and 7-deazaadenine and 3-deazaguanine and 3-deazaadenine.

[0168] Further, nucleobases comprise those disclosed in U.S. Pat. No. 3,687,808, those disclosed in “The Concise Encyclopedia of Polymer Science And Engineering”, pages 858-859, Kroschwitz, ed. John Wiley & Sons, 1990; those disclosed by Englisch et al., Angewandle Chemie, International Edition, 1991, 30, page 613, and those disclosed by Sanghvi, Chapter 15, Antisense Research and Applications,” pages 289-302, Crooke, and Lebleu, eds., CRC Press, 1993. Certain of these nucleobases are particularly useful for increasing the binding affinity of the oligomeric compounds of the invention. These include 5-substituted pyrimidines, 6-azapyrimidines and N-2, N-6 and 0-6 substituted purines, comprising 2-aminopropyladenine, 5-propynyluracil and 5-propynylcytosine. 5-methylcytosine substitutions have been shown to increase nucleic acid duplex stability by 0.6-1.2<0>C (Sanghvi, et al., eds, “Antisense Research and Applications,” CRC Press, Boca Raton, 1993, pp. 276-278) and are presently preferred base substitutions, even more particularly when combined with 2′-O-methoxyethyl sugar modifications. Modified nucleobases are described in U.S. Pat. No. 3,687,808, as well as U.S. Pat. Nos. 4,845,205; 5,130,302; 5,134,066; 5,175,273; 5,367,066; 5,432,272; 5,457,187; 5,459,255; 5,484,908; 5,502,177; 5,525,711; 5,552,540; 5,587,469; 5,596,091; 5,614,617; 5,750,692, and 5,681,941, each of which is herein incorporated by reference.

[0169] In some embodiments, the single stranded oligonucleotides are chemically linked to one or more moieties or conjugates that enhance the activity, cellular distribution, or cellular uptake of the oligonucleotide. For example, one or more single stranded oligonucleotides, of the same or different types, can be conjugated to each other; or single stranded oligonucleotides can be conjugated to targeting moieties with enhanced specificity for a cell type or tissue type. Such moieties include, but are not limited to, lipid moieties such as a cholesterol moiety (Letsinger et al., Proc. Natl. Acad. Sci. USA, 1989, 86, 6553-6556), cholic acid (Manoharan et al., Bioorg. Med. Chem. Let., 1994, 4, 1053-1060), a thioether, e.g., hexyl-S-tritylthiol (Manoharan et al, Ann. N. Y. Acad. Sci., 1992, 660, 306-309; Manoharan et al., Bioorg. Med. Chem. Let., 1993, 3, 2765-2770), a thiocholesterol (Oberhauser et al., Nucl. Acids Res., 1992, 20, 533-538), an aliphatic chain, e.g., dodecandiol or undecyl residues (Kabanov et al., FEBS Lett., 1990, 259, 327-330; Svinarchuk et al., Biochimie, 1993, 75, 49-54), a phospholipid, e.g., di-hexadecyl-rac-glycerol or triethylammonium 1,2-di-O-hexadecyl-rac-glycero-3-H-phosphonate (Manoharan et al., Tetrahedron Lett., 1995, 36, 3651-3654; Shea et al., Nucl. Acids Res., 1990, 18, 3777-3783), a polyamine or a polyethylene glycol chain (Mancharan et al., Nucleosides & Nucleotides, 1995, 14, 969-973), or adamantane acetic acid (Manoharan et al., Tetrahedron Lett., 1995, 36, 3651-3654), a palmityl moiety (Mishra et al., Biochim. Biophys. Acta, 1995, 1264, 229-237), or an octadecylamine or hexylamino-carbonyl-t oxycholesterol moiety (Crooke et al., J. Pharmacol. Exp. Ther., 1996, 277, 923-937). See also U.S. Pat. Nos. 4,828,979; 4,948,882; 5,218,105; 5,525,465; 5,541,313; 5,545,730; 5,552,538; 5,578,717, 5,580,731; 5,580,731; 5,591,584; 5,109,124; 5,118,802; 5,138,045; 5,414,077; 5,486,603; 5,512,439; 5,578,718; 5,608,046; 4,587,044; 4,605,735; 4,667,025; 4,762,779; 4,789,737; 4,824,941; 4,835,263; 4,876,335; 4,904,582; 4,958,013; 5,082,830; 5,112,963; 5,214,136; 5,082,830; 5,112,963; 5,214,136; 5,245,022; 5,254,469; 5,258,506; 5,262,536; 5,272,250; 5,292,873; 5,317,098; 5,371,241, 5,391,723; 5,416,203, 5,451,463; 5,510,475; 5,512,667; 5,514,785; 5, 565,552; 5,567,810; 5,574,142; 5,585,481; 5,587,371; 5,595,726; 5,597,696; 5,599,923; 5,599,928 and 5,688,941, each of which is herein incorporated by reference.

[0170] These moieties or conjugates can include conjugate groups covalently bound to functional groups such as primary or secondary hydroxyl groups. Conjugate groups of the invention include intercalators, reporter molecules, polyamines, polyamides, polyethylene glycols, polyethers, groups that enhance the pharmacodynamic properties of oligomers, and groups that enhance the pharmacokinetic properties of oligomers. Typical conjugate groups include cholesterols, lipids, phospholipids, biotin, phenazine, folate, phenanthridine, anthraquinone, acridine, fluoresceins, rhodamines, coumarins, and dyes. Groups that enhance the pharmacodynamic properties, in the context of this invention, include groups that improve uptake, enhance resistance to degradation, and/or strengthen sequence-specific hybridization with the target nucleic acid. Groups that enhance the pharmacokinetic properties, in the context of this invention, include groups that improve uptake, distribution, metabolism or excretion of the compounds of the present invention. Representative conjugate groups are disclosed in International Patent Application No. PCT/US92/09196, filed Oct. 23, 1992, and U.S. Pat. No. 6,287,860, which are incorporated herein by reference. Conjugate moieties include, but are not limited to, lipid moieties such as a cholesterol moiety, cholic acid, a thioether, e.g., hexyl-5-tritylthiol, a thiocholesterol, an aliphatic chain, e.g., dodecandiol or undecyl residues, a phospholipid, e.g., di-hexadecyl-rac-glycerol or triethylammonium 1,2-di-O-hexadecyl-rac-glycero-3-H-phosphonate, a polyamine or a polyethylene glycol chain, or adamantane acetic acid, a palmityl moiety, or an octadecylamine or hexylamino-carbonyl-oxy cholesterol moiety. See, e.g., U.S. Pat. Nos. 4,828,979; 4,948,882; 5,218,105; 5,525,465; 5,541,313; 5,545,730; 5,552,538; 5,578,717, 5,580,731; 5,580,731; 5,591,584; 5,109,124; 5,118,802; 5,138,045; 5,414,077; 5,486,603; 5,512,439; 5,578,718; 5,608,046; 4,587,044; 4,605,735; 4,667,025; 4,762,779; 4,789,737; 4,824,941; 4,835,263; 4,876,335; 4,904,582; 4,958,013; 5,082,830; 5,112,963; 5,214,136; 5,082,830; 5,112,963; 5,214,136; 5,245,022; 5,254,469; 5,258,506; 5,262,536; 5,272,250; 5,292,873; 5,317,098; 5,371,241, 5,391,723; 5,416,203, 5,451,463; 5,510,475; 5,512,667; 5,514,785; 5,565,552; 5,567,810; 5,574,142; 5,585,481; 5,587,371; 5,595,726; 5,597,696; 5,599,923; 5,599,928 and 5,688,941.

[0171] In some embodiments, single stranded oligonucleotide modification include modification of the 5′ or 3′ end of the oligonucleotide. In some embodiments, the 3′ end of the oligonucleotide comprises a hydroxyl group or a thiophosphate. It should be appreciated that additional molecules (e.g. a biotin moiety or a fluorophor) can be conjugated to the 5′ or 3′ end of the single stranded oligonucleotide. In some embodiments, the single stranded oligonucleotide comprises a biotin moiety conjugated to the 5′ nucleotide.

[0172] In some embodiments, the single stranded oligonucleotide comprises locked nucleic acids (LNA), ENA modified nucleotides, 2′-O-methyl nucleotides, or 2′-fluoro-deoxyribonucleotides. In some embodiments, the single stranded oligonucleotide comprises alternating deoxyribonucleotides and 2′-fluoro-deoxyribonucleotides. In some embodiments, the single stranded oligonucleotide comprises alternating deoxyribonucleotides and 2′-O-methyl nucleotides. In some embodiments, the single stranded oligonucleotide comprises alternating deoxyribonucleotides and ENA modified nucleotides. In some embodiments, the single stranded oligonucleotide comprises alternating deoxyribonucleotides and locked nucleic acid nucleotides. In some embodiments, the single stranded oligonucleotide comprises alternating locked nucleic acid nucleotides and 2′-O-methyl nucleotides.

[0173] In some embodiments, the 5′ nucleotide of the oligonucleotide is a deoxyribonucleotide. In some embodiments, the 5′ nucleotide of the oligonucleotide is a locked nucleic acid nucleotide. In some embodiments, the nucleotides of the oligonucleotide comprise deoxyribonucleotides flanked by at least one locked nucleic acid nucleotide on each of the 5′ and 3′ ends of the deoxyribonucleotides. In some embodiments, the nucleotide at the 3′ position of the oligonucleotide has a 3′ hydroxyl group or a 3′ thiophosphate.

[0174] In some embodiments, the single stranded oligonucleotide comprises phosphorothioate internucleotide linkages. In some embodiments, the single stranded oligonucleotide comprises phosphorothioate internucleotide linkages between at least two nucleotides. In some embodiments, the single stranded oligonucleotide comprises phosphorothioate internucleotide linkages between all nucleotides.

[0175] It should be appreciated that the single stranded oligonucleotide can have any combination of modifications as described herein.

[0176] The oligonucleotide may comprise a nucleotide sequence having one or more of the following modification patterns.

[0177] (a) (X)Xxxxxx, (X)xXxxxx, (X)xxXxxx, (X)xxxXxx, (X)xxxxXx and (X)xxxxxX,

[0178] (b) (X)XXxxxx, (X)XxXxxx, (X)XxxXxx, (X)XxxxXx, (X)XxxxxX, (X)xXXxxx, (X)xXxXxx, (X)xXxxXx, (X)xXxxxX, (X)xxXXxx, (X)xxXxXx, (X)xxXxxX, (X)xxxXXx, (X)xxxXxX and (X)xxxxXX,

[0179] (c) (X)XXXxxx, (X)xXXXxx, (X)xxXXXx, (X)xxxXXX, (X)XXxXxx, (X)XXxxXx, (X)XXxxxX, (X)xXXxXx, (X)xXXxxX, (X)xxXXxX, (X)XxXXxx, (X)XxxXXx (X)XxxxXX, (X)xXxXXx, (X)xXxxXX, (X)xxXxXX, (X)xXxXxX and (X)XxXxXx,

[0180] (d) (X)xxXXX, (X)xXxXXX, (X)xXXxXX, (X)xXXXxX, (X)xXXXXx, (X)XxxXXXX, (X)XxXxXX, (X)XxXXxX, (X)XxXXx, (X)XXxxXX, (X)XXxXxX, (X)XXxXXx, (X)XXXxxX, (X)XXXxXx, and (X)XXXXxx,

[0181] (e) (X)xXXXXX, (X)XxXXXX, (X)XXxXXX, (X)XXXxXX, (X)XXXXxX and (X)XXXXXx, and

[0182] (f) XXXXXX, XxXXXXX, XXxXXXX, XXXxXXX, XXXXxXX, XXXXXxX and XXXXXXx, in which “X” denotes a nucleotide analogue, (X) denotes an optional nucleotide analogue, and “x” denotes a DNA or RNA nucleotide unit. Each of the above listed patterns may appear one or more times within an oligonucleotide, alone or in combination with any of the other disclosed modification patterns.

[0183] Aspects of the disclosure relate to methods for inducing FOXP3 expression, activating T cells, and/or treating a condition or disease (e.g., a disease or disorder associated with aberrant immune cell activation such as an autoimmune or inflammatory disease or disorder) associated with decreased levels of FOXP3 that involve inhibiting expression or activity of EZH1 and/or EZH2 or another component of PRC2, e.g., Suz12, EED1 or RbAp48. For example, expression of EZH1 and/or EZH2 may inhibited through the using any of oligonucleotides (e.g., single stranded oligonucleotides) disclosed herein. In some embodiments, expression or activity may be inhibited through the use of a gapmer, siRNA, miRNA or other oligonucleotide that inhibits expression of a target mRNA.

[0184] Exemplary human mRNA and protein sequence identifiers for EZH1, EZH2, Suz12, EED1 and RbAp48 are provided below. These sequence identifiers can be used to identify exemplary mRNA and protein sequences by using the NCBI Gene search as of the filing of the instant application.

[0185] EZH1: NM_001991.3, NP_001982.2

[0186] EZH2: NM_001203247.1, NM_001203248.1, NM_001203249.1, NM_004456.4, NP_004447.2, NM_152998.2, NP_001190177.1, NP_001190176.1, NP_001190178.1, NP_694543.1

[0187] Suz12: NM_015355.2, NP_056170.2

[0188] EED1: NM_003797.3, NM_152991.2, NP_003788.2, NP_694536.1

[0189] RbAp48: NM_001135255.1, NM_001135256.1, NM_005610.2, NP_001128727.1, NP_001128728.1, NP_005601.1.

[0190] Accordingly, in some embodiments, gapmer oligonucleotides are provided herein. In some embodiments, a gapmer oligonucleotide has the formula 5′-X-Y-Z-3′, with X and Z as flanking regions around a gap region Y. In some embodiments, the Y region is a contiguous stretch of nucleotides, e.g., a region of at least 6 DNA nucleotides, which are capable of recruiting an RNAse, such as RNAseH. Without wishing to be bound by theory, it is thought that the gapmer binds to the target nucleic acid, at which point an RNAse is recruited and can then cleave the target nucleic acid. In some embodiments, the Y region is flanked both 5′ and 3′ by regions X and Z comprising high-affinity modified nucleotides, e.g., 1-6 modified nucleotides. Exemplary modified oligonucleotides include, but are not limited to, 2′ MOE or 2′OMe or Locked Nucleic Acid bases (LNA). The flanks X and Z may be have a of length 1-20 nucleotides, preferably 1-8 nucleotides and even more preferred 1-5 nucleotides. The flanks X and Z may be of similar length or of dissimilar lengths. The gap-segment Y may be a nucleotide sequence of length 5-20 nucleotides, preferably 6-12 nucleotides and even more preferred 6-10 nucleotides. In some aspects, the gap region of the gapmer oligonucleotides of the invention may contain modified nucleotides known to be acceptable for efficient RNase H action in addition to DNA nucleotides, such as C4′-substituted nucleotides, acyclic nucleotides, and arabino-configured nucleotides. In some embodiments, the gap region comprises one or more unmodified internucleosides. In some embodiments, one or both flanking regions each independently comprise one or more phosphorothioate internucleoside linkages (e.g., phosphorothioate internucleoside linkages or other linkages) between at least two, at least three, at least four, at least five or more nucleotides. In some embodiments, the gap region and two flanking regions each independently comprise modified internucleoside linkages (e.g., phosphorothioate internucleoside linkages or other linkages) between at least two, at least three, at least four, at least five or more nucleotides.

[0191] In some embodiments, oligonucleotides provided herein may be in the form of small interfering RNAs (siRNA), also known as short interfering RNA or silencing RNA. SiRNA, is a class of double-stranded RNA molecules, typically about 18-23 or 20-25 base pairs in length that target nucleic acids (e.g., mRNAs) for degradation via the RNA interference (RNAi) pathway in cells. Specificity of siRNA molecules may be determined by the binding of the antisense strand of the molecule to its target RNA. Effective siRNA molecules are generally less than 30 to 35 base pairs in length to prevent the triggering of non-specific RNA interference pathways in the cell via the interferon response, although longer siRNA can also be effective. The siRNA molecule can be double stranded (i.e. a dsRNA molecule comprising an antisense strand and a complementary sense strand) or single-stranded (i.e. a ssRNA molecule comprising just an antisense strand). The siRNA molecules can comprise a duplex, asymmetric duplex, hairpin or asymmetric hairpin secondary structure, having self-complementary sense and antisense strands.

[0192] Double-stranded siRNA may comprise RNA strands that are the same length or different lengths. Double-stranded siRNA molecules can also be assembled from a single oligonucleotide in a stem-loop structure, wherein self-complementary sense and antisense regions of the siRNA molecule are linked by means of a nucleic acid based or non-nucleic acid-based linker(s), as well as circular single-stranded RNA having two or more loop structures and a stem comprising self-complementary sense and antisense strands, wherein the circular RNA can be processed either in vivo or in vitro to generate an active siRNA molecule capable of mediating RNAi. Small hairpin RNA (shRNA) molecules thus are also contemplated herein. These molecules comprise a specific antisense sequence in addition to the reverse complement (sense) sequence, typically separated by a spacer or loop sequence. Cleavage of the spacer or loop provides a single-stranded RNA molecule and its reverse complement, such that they may anneal to form a dsRNA molecule (optionally with additional processing steps that may result in addition or removal of one, two, three or more nucleotides from the 3′ end and/or the 5′ end of either or both strands). A spacer can be of a sufficient length to permit the antisense and sense sequences to anneal and form a double-stranded structure (or stem) prior to cleavage of the spacer (and, optionally, subsequent processing steps that may result in addition or removal of one, two, three, four, or more nucleotides from the 3′ end and/or the 5′ end of either or both strands). A spacer sequence is may be an unrelated nucleotide sequence that is situated between two complementary nucleotide sequence regions which, when annealed into a double-stranded nucleic acid, comprise a shRNA.

[0193] The overall length of the siRNA molecules can vary from about 14 to about 200 nucleotides, e.g., about 14-100, 14-50, 14-30 or 18-23 nucleotides, depending on the type of siRNA molecule being designed. Generally between about 14 and about 50 of these nucleotides are complementary to the RNA target sequence, i.e. constitute the specific antisense sequence of the siRNA molecule. For example, when the siRNA is a double- or single-stranded siRNA, the length can vary from about 14 to about 50 nucleotides, whereas when the siRNA is a shRNA or circular molecule, the length can vary from about 40 nucleotides to about 200 nucleotides.

[0194] An siRNA molecule may comprise a 3′ overhang at one end of the molecule. The other end may be blunt-ended or have also an overhang (5′ or 3′). When the siRNA molecule comprises an overhang at both ends of the molecule, the length of the overhangs may be the same or different. In one embodiment, the siRNA molecule of the present invention comprises 3′ overhangs of about 1 to about 3 nucleotides on both ends of the molecule.

[0195] In some embodiments, an oligonucleotide may be a microRNA (miRNA). MicroRNAs (referred to as “miRNAs”) are small non-coding RNAs, belonging to a class of regulatory molecules found in plants and animals that control gene expression by binding to complementary sites on a target RNA transcript. miRNAs are generated from large RNA precursors (termed pri-miRNAs) that are processed in the nucleus into approximately 70 nucleotide pre-miRNAs, which fold into imperfect stem-loop structures (Lee, Y., et al., Nature (2003) 425(6956):415-9). The pre-miRNAs undergo an additional processing step within the cytoplasm where mature miRNAs of 18-25 nucleotides in length are excised from one side of the pre-miRNA hairpin by an RNase III enzyme, Dicer (Hutvagner, G., et al., Science (2001) 12:12 and Grishok, A., et al., Cell (2001) 106(1):23-34).

[0196] As used herein, miRNAs including pri-miRNA, pre-miRNA, mature miRNA or fragments of variants thereof that retain the biological activity of mature miRNA. In one embodiment, the size range of the miRNA can be from 21 nucleotides to 170 nucleotides, although miRNAs of up to 2000 nucleotides can be utilized. In a preferred embodiment the size range of the miRNA is from 70 to 170 nucleotides in length. In another preferred embodiment, mature miRNAs of from 21 to 25 nucleotides in length can be used.

[0197] In some embodiments, the miRNA may be a miR-30 precursor. As used herein, an “miR-30 precursor”, also called an miR-30 hairpin, is a precursor of the human microRNA miR-30, as it is understood in the literature (e.g., Zeng and Cullen, 2003; Zeng and Cullen, 2005; Zeng et al., 2005; United States Patent Application Publication No. US 2004/005341), where the precursor could be modified from the wild-type miR-30 precursor in any manner described or implied by that literature, while retaining the ability to be processed into an miRNA. In some embodiments, a miR-30 precursor is at least 80 nucleotides long and comprises a stem-loop structure. In some embodiments, the miR-30 precursor further comprises a first miRNA sequence of 20-22 nucleotides on the stem of the stem-loop structure complementary to a portion of a first target sequence (e.g., a sequence within a euchromatic region of a target gene disclosed herein).

[0198] A miRNA may be isolated from a variety of sources or may be synthesized according to methods well known in the art (see, e.g., Current Protocols in Molecular Biology, Wiley Online Library; U.S. Pat. No. 8,354,384; and Wahid et al. MicroRNAs: synthesis, mechanism, function, and recent clinical trials. Biochim Biophys Acta. 2010; 1803(11):1231-43). In some embodiments, a miRNA is expressed from a vector as known in the art or described herein. In some embodiments, the vector may include a sequence encoding a mature miRNA. In some embodiments, the vector may include a sequence encoding a pre-miRNA such that the pre-miRNA is expressed and processed in a cell into a mature miRNA. In some embodiments, the vector may include a sequence encoding a pri-miRNA. In this embodiment, the primary transcript is first processed to produce the stem-loop precursor miRNA molecule. The stem-loop precursor is then processed to produce the mature microRNA.

### Methods for Modulating Gene Expression

[0199] In one aspect, the invention relates to methods for modulating gene expression in a cell (e.g., a cell for which FOXP3 levels are reduced) for research purposes (e.g., to study the function of the gene in the cell). In another aspect, the invention relates to methods for modulating gene expression in a cell (e.g., a cell for which FOXP3 levels are reduced) for gene or epigenetic therapy. The cells can be in vitro, ex vivo, or in vivo (e.g., in a subject who has a disease or condition resulting from reduced expression or activity of FOXP3). In some embodiments, methods for modulating gene expression in a cell comprise delivering a single stranded oligonucleotide as described herein. In some embodiments, delivery of the single stranded oligonucleotide to the cell results in a level of expression of gene that is at least 5%, 10%, 20%, 30%, 40%, 50%, 60%, 70%, 80%, 90%, 100%, 200% or more greater than a level of expression of gene in a control cell to which the single stranded oligonucleotide has not been delivered. In certain embodiments, delivery of the single stranded oligonucleotide to the cell results in a level of expression of gene that is at least 50% greater than a level of expression of gene in a control cell to which the single stranded oligonucleotide has not been delivered.

[0200] In another aspect of the invention, methods comprise administering to a subject (e.g. a human) a composition comprising a single stranded oligonucleotide as described herein to increase protein levels in the subject. In some embodiments, the increase in protein levels is at least 5%, 10%, 20%, 30%, 40%, 50%, 60%, 70%, 80%, 90%, 100%, 200%, or more, higher than the amount of a protein in the subject before administering.

[0201] As another example, to increase expression of FOXP3 in a cell, the methods include introducing into the cell a single stranded oligonucleotide that is sufficiently complementary to a PRC2-associated region (e.g., of a long non-coding RNA) that maps to a genomic position encompassing or in proximity to the FOXP3 gene.

[0202] In another aspect of the invention provides methods of treating a condition (e.g., a disease or disorder associated with aberrant immune cell activation such as an autoimmune disease or disorder) associated with decreased levels of expression of FOXP3 in a subject, the method comprising administering a single stranded oligonucleotide as described herein.

[0203] A subject can include a non-human mammal, e.g. mouse, rat, guinea pig, rabbit, cat, dog, goat, cow, or horse. In preferred embodiments, a subject is a human. Single stranded oligonucleotides have been employed as therapeutic moieties in the treatment of disease states in animals, including humans. Single stranded oligonucleotides can be useful therapeutic modalities that can be configured to be useful in treatment regimes for the treatment of cells, tissues and animals, especially humans.

[0204] For therapeutics, an animal, preferably a human, suspected of having a disease or disorder associated with aberrant immune cell activation such as an autoimmune disease or disorder is treated for the disease or disorder by administering single stranded oligonucleotide in accordance with this invention. For example, in one non-limiting embodiment, the methods comprise the step of administering to an animal in need of treatment, a therapeutically effective amount of a single stranded oligonucleotide as described herein.

[0205] Examples of autoimmune diseases and disorders that may be treated according to the methods disclosed herein include, but are not limited to, Acute Disseminated Encephalomyelitis (ADEM), Acute necrotizing hemorrhagic leukoencephalitis, Addison's disease, Agammaglobulinemia, Alopecia areata, Amyloidosis, Ankylosing spondylitis, Anti-GBM/Anti-TBM nephritis, Antiphospholipid syndrome (APS), Autoimmune angioedema, Autoimmune aplastic anemia, Autoimmune dysautonomia, Autoimmune hepatitis, Autoimmune hyperlipidemia, Autoimmune immunodeficiency, Autoimmune inner ear disease (AIED), Autoimmune myocarditis, Autoimmune oophoritis, Autoimmune pancreatitis, Autoimmune retinopathy, Autoimmune thrombocytopenic purpura (ATP), Autoimmune thyroid disease, Autoimmune urticaria, Axonal & neuronal neuropathies, Balo disease, Behcet's disease, Bullous pemphigoid, Cardiomyopathy, Castleman disease, Celiac disease, Chagas disease, Chronic inflammatory demyelinating polyneuropathy (CIDP), Chronic recurrent multifocal ostomyelitis (CRMO), Churg-Strauss syndrome, Cicatricial pemphigoid/benign mucosal pemphigoid, inflammatory bowel disease (e.g., Crohn's disease or Ulcerative colitis), Cogans syndrome, Cold agglutinin disease, Congenital heart block, Coxsackie myocarditis, CREST disease, Essential mixed cryoglobulinemia, Demyelinating neuropathies, Dermatitis herpetiformis, Dermatomyositis, Devic's disease (neuromyelitis optica), Discoid lupus, Dressler's syndrome, Endometriosis, Eosinophilic esophagitis, Eosinophilic fasciitis, Erythema nodosum, Experimental allergic encephalomyelitis, Evans syndrome, Fibrosing alveolitis, Giant cell arteritis (temporal arteritis), Giant cell myocarditis, Glomerulonephritis, Goodpasture's syndrome, Granulomatosis with Polyangiitis (GPA) (formerly called Wegener's Granulomatosis), Graves' disease, Guillain-Barre syndrome, Hashimoto's encephalitis, Hashimoto's thyroiditis, Hemolytic anemia, Henoch-Schonlein purpura, Herpes gestationis, Hypogammaglobulinemia, Idiopathic thrombocytopenic purpura (ITP), IgA nephropathy, IgG4-related sclerosing disease, Immunoregulatory lipoproteins, Inclusion body myositis, Interstitial cystitis, IPEX (Immunodysregulation, Polyendocrinopathy, and Enteropathy, X-linked) syndrome, Juvenile arthritis, Juvenile diabetes (Type 1 diabetes), Juvenile myositis, Kawasaki syndrome, Lambert-Eaton syndrome, Leukocytoclastic vasculitis, Lichen planus, Lichen sclerosus, Ligneous conjunctivitis, Linear IgA disease (LAD), systemic lupus erythematosus (SLE), chronic Lyme disease, Meniere's disease, Microscopic polyangiitis, Mixed connective tissue disease (MCTD), Mooren's ulcer, Mucha-Habermann disease, Multiple sclerosis, Myasthenia gravis, Myositis, Narcolepsy, Neuromyelitis optica (Devic's), Neutropenia, Ocular cicatricial pemphigoid, Optic neuritis, Palindromic rheumatism, PANDAS (Pediatric Autoimmune Neuropsychiatric Disorders Associated with Streptococcus), Paraneoplastic cerebellar degeneration, Paroxysmal nocturnal hemoglobinuria (PNH), Parry Romberg syndrome, Parsonnage-Turner syndrome, Pars planitis (peripheral uveitis), Pemphigus, Peripheral neuropathy, Perivenous encephalomyelitis, Pernicious anemia, POEMS syndrome, Polyarteritis nodosa, Type I, II, & III autoimmune polyglandular syndromes, Polymyalgia rheumatica, Polymyositis, Postmyocardial infarction syndrome, Postpericardiotomy syndrome, Progesterone dermatitis, Primary biliary cirrhosis, Primary sclerosing cholangitis, Psoriasis, Psoriatic arthritis, Idiopathic pulmonary fibrosis, Pyoderma gangrenosum, Pure red cell aplasia, Raynauds phenomenon, Reactive Arthritis, Reflex sympathetic dystrophy, Reiter's syndrome, Relapsing polychondritis, Restless legs syndrome, Retroperitoneal fibrosis, Rheumatic fever, Rheumatoid arthritis, Sarcoidosis, Schmidt syndrome, Scleritis, Scleroderma, Sjogren's syndrome, Sperm & testicular autoimmunity, Stiff person syndrome, Subacute bacterial endocarditis (SBE), Susac's syndrome, Sympathetic ophthalmia, Takayasu's arteritis, Temporal arteritis/Giant cell arteritis, Thrombocytopenic purpura (TTP), Tolosa-Hunt syndrome, Transverse myelitis, Type 1 diabetes, Undifferentiated connective tissue disease (UCTD), Uveitis, Vasculitis, Vesiculobullous dermatosis, Vitiligo, and Wegener's granulomatosis (also called Granulomatosis with Polyangiitis (GPA)). In some embodiments, the autoimmune disease or disorder is inflammatory bowel disease (e.g., Crohn's disease or Ulcerative colitis), IPEX syndrome, Multiple sclerosis, Psoriasis, Rheumatoid arthritis, SLE or Type 1 diabetes.

[0206] Examples of inflammatory diseases or disorders that may be treated according to the methods disclosed herein include, but are not limited to, Acne Vulgaris, Appendicitis, Arthritis, Asthma, Atherosclerosis, Allergies (Type 1 Hypersensitivity), Bursitis, Colitis, Chronic Prostatitis, Cystitis, Dermatitis, Glomerulonephritis, Inflammatory Bowel Disease, Inflammatory Myopathy (e.g., Polymyositis, Dermatomyositis, or Inclusion-body Myositis), Inflammatory Lung Disease, Interstitial Cystitis, Meningitis, Pelvic Inflammatory Disease, Phlebitis, Psoriasis, Reperfusion Injury, Rheumatoid Arthritis, Sarcoidosis, Tendonitis, Tonsilitis, Transplant Rejection, and Vasculitis. In some embodiments, the inflammatory disease or disorder is asthma.

### Formulation, Delivery, and Dosing

[0207] The oligonucleotides described herein can be formulated for administration to a subject for treating a condition (e.g., a disease or disorder associated with aberrant immune cell activation such as an autoimmune or inflammatory disease or disorder) associated with decreased levels of FOXP3. It should be understood that the formulations, compositions and methods can be practiced with any of the oligonucleotides disclosed herein.

[0208] The formulations may conveniently be presented in unit dosage form and may be prepared by any methods well known in the art of pharmacy. The amount of active ingredient (e.g., an oligonucleotide or compound of the invention) which can be combined with a carrier material to produce a single dosage form will vary depending upon the host being treated, the particular mode of administration, e.g., intradermal or inhalation. The amount of active ingredient which can be combined with a carrier material to produce a single dosage form will generally be that amount of the compound which produces a therapeutic effect, e.g. tumor regression.

[0209] Pharmaceutical formulations of this invention can be prepared according to any method known to the art for the manufacture of pharmaceuticals. Such formulations can contain sweetening agents, flavoring agents, coloring agents and preserving agents. A formulation can be admixtured with nontoxic pharmaceutically acceptable excipients which are suitable for manufacture. Formulations may comprise one or more diluents, emulsifiers, preservatives, buffers, excipients, etc. and may be provided in such forms as liquids, powders, emulsions, lyophilized powders, sprays, creams, lotions, controlled release formulations, tablets, pills, gels, on patches, in implants, etc.

[0210] A formulated single stranded oligonucleotide composition can assume a variety of states. In some examples, the composition is at least partially crystalline, uniformly crystalline, and/or anhydrous (e.g., less than 80, 50, 30, 20, or 10% water). In another example, the single stranded oligonucleotide is in an aqueous phase, e.g., in a solution that includes water. The aqueous phase or the crystalline compositions can, e.g., be incorporated into a delivery vehicle, e.g., a liposome (particularly for the aqueous phase) or a particle (e.g., a microparticle as can be appropriate for a crystalline composition). Generally, the single stranded oligonucleotide composition is formulated in a manner that is compatible with the intended method of administration.

[0211] In some embodiments, the composition is prepared by at least one of the following methods: spray drying, lyophilization, vacuum drying, evaporation, fluid bed drying, or a combination of these techniques; or sonication with a lipid, freeze-drying, condensation and other self-assembly.

[0212] A single stranded oligonucleotide preparation can be formulated or administered (together or separately) in combination with another agent, e.g., another therapeutic agent or an agent that stabilizes a single stranded oligonucleotide, e.g., a protein that complexes with single stranded oligonucleotide. Still other agents include chelators, e.g., EDTA (e.g., to remove divalent cations such as Mg²⁺), salts, RNAse inhibitors (e.g., a broad specificity RNAse inhibitor such as RNAsin) and so forth.

[0213] In one embodiment, the single stranded oligonucleotide preparation includes another single stranded oligonucleotide, e.g., a second single stranded oligonucleotide that modulates expression of a second gene or a second single stranded oligonucleotide that modulates expression of the first gene. Still other preparation can include at least 3, 5, ten, twenty, fifty, or a hundred or more different single stranded oligonucleotide species. Such single stranded oligonucleotides can mediated gene expression with respect to a similar number of different genes. In one embodiment, the single stranded oligonucleotide preparation includes at least a second therapeutic agent (e.g., an agent other than an oligonucleotide).

### Route of Delivery

[0214] A composition that includes a single stranded oligonucleotide can be delivered to a subject by a variety of routes. Exemplary routes include: intravenous, intradermal, topical, rectal, parenteral, anal, intravaginal, intranasal, pulmonary, ocular, subcutaneous, intramuscular, intraperitoneal, and intra-articular (e.g., injection into a joint for, e.g., rheumatoid arthritis) administration. The term “therapeutically effective amount” is the amount of oligonucleotide present in the composition that is needed to provide the desired level of FOXP3 expression in the subject to be treated to give the anticipated physiological response. The term “physiologically effective amount” is that amount delivered to a subject to give the desired palliative or curative effect. The term “pharmaceutically acceptable carrier” means that the carrier can be administered to a subject with no significant adverse toxicological effects to the subject.

[0215] The single stranded oligonucleotide molecules of the invention can be incorporated into pharmaceutical compositions suitable for administration. Such compositions typically include one or more species of single stranded oligonucleotide and a pharmaceutically acceptable carrier. As used herein the language “pharmaceutically acceptable carrier” is intended to include any and all solvents, dispersion media, coatings, antibacterial and antifungal agents, isotonic and absorption delaying agents, and the like, compatible with pharmaceutical administration. The use of such media and agents for pharmaceutically active substances is well known in the art. Except insofar as any conventional media or agent is incompatible with the active compound, use thereof in the compositions is contemplated. Supplementary active compounds can also be incorporated into the compositions.

[0216] The pharmaceutical compositions of the present invention may be administered in a number of ways depending upon whether local or systemic treatment is desired and upon the area to be treated. Administration may be topical (including ophthalmic, vaginal, rectal, intranasal, transdermal), oral or parenteral. Parenteral administration includes intravenous drip, subcutaneous, intraperitoneal or intramuscular injection, or intrathecal or intraventricular administration.

[0217] The route and site of administration may be chosen to enhance targeting. For example, to target muscle cells, intramuscular injection into the muscles of interest would be a logical choice. Lung cells might be targeted by administering the single stranded oligonucleotide in aerosol form. The vascular endothelial cells could be targeted by coating a balloon catheter with the single stranded oligonucleotide and mechanically introducing the oligonucleotide.

[0218] In some embodiments, a T cell or population of T cells may be obtained from a subject, e.g., a human subject, and contacted with a single-stranded oligonucleotide as described herein. In some embodiments, the T cell or population of T cells contacted with a single-stranded oligonucleotide as described herein are readminstered to the subject. In some embodiments, the T cell or population of T cells contacted with a single-stranded oligonucleotide as described herein are cultured for a time period (e.g., 1 hour, 2 hours, 3 hours, 4 hours, or more; 1 day, 2 days, 3 days, 4 days, 5 days, 6 days, 7 days or more) before being readministered to the subject.

[0219] Topical administration refers to the delivery to a subject by contacting the formulation directly to a surface of the subject. The most common form of topical delivery is to the skin, but a composition disclosed herein can also be directly applied to other surfaces of the body, e.g., to the eye, a mucous membrane, to surfaces of a body cavity or to an internal surface. As mentioned above, the most common topical delivery is to the skin. The term encompasses several routes of administration including, but not limited to, topical and transdermal. These modes of administration typically include penetration of the skin's permeability barrier and efficient delivery to the target tissue or stratum. Topical administration can be used as a means to penetrate the epidermis and dermis and ultimately achieve systemic delivery of the composition. Topical administration can also be used as a means to selectively deliver oligonucleotides to the epidermis or dermis of a subject, or to specific strata thereof, or to an underlying tissue.

[0220] Formulations for topical administration may include transdermal patches, ointments, lotions, creams, gels, drops, suppositories, sprays, liquids and powders. Conventional pharmaceutical carriers, aqueous, powder or oily bases, thickeners and the like may be necessary or desirable. Coated condoms, gloves and the like may also be useful.

[0221] Transdermal delivery is a valuable route for the administration of lipid soluble therapeutics. The dermis is more permeable than the epidermis and therefore absorption is much more rapid through abraded, burned or denuded skin. Inflammation and other physiologic conditions that increase blood flow to the skin also enhance transdermal adsorption. Absorption via this route may be enhanced by the use of an oily vehicle (inunction) or through the use of one or more penetration enhancers. Other effective ways to deliver a composition disclosed herein via the transdermal route include hydration of the skin and the use of controlled release topical patches. The transdermal route provides a potentially effective means to deliver a composition disclosed herein for systemic and/or local therapy. In addition, iontophoresis (transfer of ionic solutes through biological membranes under the influence of an electric field), phonophoresis or sonophoresis (use of ultrasound to enhance the absorption of various therapeutic agents across biological membranes, notably the skin and the cornea), and optimization of vehicle characteristics relative to dose position and retention at the site of administration may be useful methods for enhancing the transport of topically applied compositions across skin and mucosal sites.

[0222] Both the oral and nasal membranes offer advantages over other routes of administration. For example, oligonucleotides administered through these membranes may have a rapid onset of action, provide therapeutic plasma levels, avoid first pass effect of hepatic metabolism, and avoid exposure of the oligonucleotides to the hostile gastrointestinal (GI) environment. Additional advantages include easy access to the membrane sites so that the oligonucleotide can be applied, localized and removed easily.

[0223] In oral delivery, compositions can be targeted to a surface of the oral cavity, e.g., to sublingual mucosa which includes the membrane of ventral surface of the tongue and the floor of the mouth or the buccal mucosa which constitutes the lining of the cheek. The sublingual mucosa is relatively permeable thus giving rapid absorption and acceptable bioavailability of many agents. Further, the sublingual mucosa is convenient, acceptable and easily accessible.

[0224] A pharmaceutical composition of single stranded oligonucleotide may also be administered to the buccal cavity of a human being by spraying into the cavity, without inhalation, from a metered dose spray dispenser, a mixed micellar pharmaceutical formulation as described above and a propellant. In one embodiment, the dispenser is first shaken prior to spraying the pharmaceutical formulation and propellant into the buccal cavity.

[0225] Compositions for oral administration include powders or granules, suspensions or solutions in water, syrups, slurries, emulsions, elixirs or non-aqueous media, tablets, capsules, lozenges, or troches. In the case of tablets, carriers that can be used include lactose, sodium citrate and salts of phosphoric acid. Various disintegrants such as starch, and lubricating agents such as magnesium stearate, sodium lauryl sulfate and talc, are commonly used in tablets. For oral administration in capsule form, useful diluents are lactose and high molecular weight polyethylene glycols. When aqueous suspensions are required for oral use, the nucleic acid compositions can be combined with emulsifying and suspending agents. If desired, certain sweetening and/or flavoring agents can be added.

[0226] Parenteral administration includes intravenous drip, subcutaneous, intraperitoneal or intramuscular injection, intrathecal or intraventricular administration. In some embodiments, parental administration involves administration directly to the site of disease (e.g. injection into a tumor).

[0227] Formulations for parenteral administration may include sterile aqueous solutions which may also contain buffers, diluents and other suitable additives. Intraventricular injection may be facilitated by an intraventricular catheter, for example, attached to a reservoir. For intravenous use, the total concentration of solutes should be controlled to render the preparation isotonic.

[0228] Any of the single stranded oligonucleotides described herein can be administered to ocular tissue. For example, the compositions can be applied to the surface of the eye or nearby tissue, e.g., the inside of the eyelid. For ocular administration, ointments or droppable liquids may be delivered by ocular delivery systems known to the art such as applicators or eye droppers. Such compositions can include mucomimetics such as hyaluronic acid, chondroitin sulfate, hydroxypropyl methylcellulose or poly(vinyl alcohol), preservatives such as sorbic acid, EDTA or benzylchronium chloride, and the usual quantities of diluents and/or carriers. The single stranded oligonucleotide can also be administered to the interior of the eye, and can be introduced by a needle or other delivery device which can introduce it to a selected area or structure.

[0229] Pulmonary delivery compositions can be delivered by inhalation by the patient of a dispersion so that the composition, preferably single stranded oligonucleotides, within the dispersion can reach the lung where it can be readily absorbed through the alveolar region directly into blood circulation. Pulmonary delivery can be effective both for systemic delivery and for localized delivery to treat diseases of the lungs.

[0230] Pulmonary delivery can be achieved by different approaches, including the use of nebulized, aerosolized, micellular and dry powder-based formulations. Delivery can be achieved with liquid nebulizers, aerosol-based inhalers, and dry powder dispersion devices. Metered-dose devices are preferred. One of the benefits of using an atomizer or inhaler is that the potential for contamination is minimized because the devices are self-contained. Dry powder dispersion devices, for example, deliver agents that may be readily formulated as dry powders. A single stranded oligonucleotide composition may be stably stored as lyophilized or spray-dried powders by itself or in combination with suitable powder carriers. The delivery of a composition for inhalation can be mediated by a dosing timing element which can include a timer, a dose counter, time measuring device, or a time indicator which when incorporated into the device enables dose tracking, compliance monitoring, and/or dose triggering to a patient during administration of the aerosol medicament.

[0231] The term “powder” means a composition that consists of finely dispersed solid particles that are free flowing and capable of being readily dispersed in an inhalation device and subsequently inhaled by a subject so that the particles reach the lungs to permit penetration into the alveoli. Thus, the powder is said to be “respirable.” Preferably the average particle size is less than about 10 μm in diameter preferably with a relatively uniform spheroidal shape distribution. More preferably the diameter is less than about 7.5 μm and most preferably less than about 5.0 μm. Usually the particle size distribution is between about 0.1 μm and about 5 μm in diameter, particularly about 0.3 μm to about 5 μm.

[0232] The term “dry” means that the composition has a moisture content below about 10% by weight (% w) water, usually below about 5% w and preferably less it than about 3% w. A dry composition can be such that the particles are readily dispersible in an inhalation device to form an aerosol.

[0233] The types of pharmaceutical excipients that are useful as carrier include stabilizers such as human serum albumin (HSA), bulking agents such as carbohydrates, amino acids and polypeptides; pH adjusters or buffers; salts such as sodium chloride; and the like. These carriers may be in a crystalline or amorphous form or may be a mixture of the two.

[0234] Suitable pH adjusters or buffers include organic salts prepared from organic acids and bases, such as sodium citrate, sodium ascorbate, and the like; sodium citrate is preferred. Pulmonary administration of a micellar single stranded oligonucleotide formulation may be achieved through metered dose spray devices with propellants such as tetrafluoroethane, heptafluoroethane, dimethylfluoropropane, tetrafluoropropane, butane, isobutane, dimethyl ether and other non-CFC and CFC propellants.

[0235] Exemplary devices include devices which are introduced into the vasculature, e.g., devices inserted into the lumen of a vascular tissue, or which devices themselves form a part of the vasculature, including stents, catheters, heart valves, and other vascular devices. These devices, e.g., catheters or stents, can be placed in the vasculature of the lung, heart, or leg.

[0236] Other devices include non-vascular devices, e.g., devices implanted in the peritoneum, or in organ or glandular tissue, e.g., artificial organs. The device can release a therapeutic substance in addition to a single stranded oligonucleotide, e.g., a device can release insulin.

[0237] In one embodiment, unit doses or measured doses of a composition that includes single stranded oligonucleotide are dispensed by an implanted device. The device can include a sensor that monitors a parameter within a subject. For example, the device can include pump, e.g., and, optionally, associated electronics.

[0238] Tissue, e.g., cells or organs can be treated with a single stranded oligonucleotide, ex vivo and then administered or implanted in a subject. The tissue can be autologous, allogeneic, or xenogeneic tissue. E.g., tissue can be treated to reduce graft v. host disease. In other embodiments, the tissue is allogeneic and the tissue is treated to treat a disorder characterized by unwanted gene expression in that tissue. E.g., tissue, e.g., hematopoietic cells, e.g., bone marrow hematopoietic cells, can be treated to inhibit unwanted cell proliferation. Introduction of treated tissue, whether autologous or transplant, can be combined with other therapies. In some implementations, the single stranded oligonucleotide treated cells are insulated from other cells, e.g., by a semi-permeable porous barrier that prevents the cells from leaving the implant, but enables molecules from the body to reach the cells and molecules produced by the cells to enter the body. In one embodiment, the porous barrier is formed from alginate.

[0239] In one embodiment, a contraceptive device is coated with or contains a single stranded oligonucleotide. Exemplary devices include condoms, diaphragms, IUD (implantable uterine devices, sponges, vaginal sheaths, and birth control devices.

### Dosage

[0240] In one aspect, the invention features a method of administering a single stranded oligonucleotide (e.g., as a compound or as a component of a composition) to a subject (e.g., a human subject). In one embodiment, the unit dose is between about 10 mg and 25 mg per kg of bodyweight. In one embodiment, the unit dose is between about 1 mg and 100 mg per kg of bodyweight. In one embodiment, the unit dose is between about 0.1 mg and 500 mg per kg of bodyweight. In some embodiments, the unit dose is more than 0.001, 0.005, 0.01, 0.05, 0.1, 0.5, 1, 2, 5, 10, 25, 50 or 100 mg per kg of bodyweight.

[0241] The defined amount can be an amount effective to treat or prevent a disease or disorder, e.g., a disease or disorder associated with FOXP3. The unit dose, for example, can be administered by injection (e.g., intravenous or intramuscular), an inhaled dose, or a topical application.

[0242] In some embodiments, the unit dose is administered daily. In some embodiments, less frequently than once a day, e.g., less than every 2, 4, 8 or 30 days. In another embodiment, the unit dose is not administered with a frequency (e.g., not a regular frequency). For example, the unit dose may be administered a single time. In some embodiments, the unit dose is administered more than once a day, e.g., once an hour, two hours, four hours, eight hours, twelve hours, etc.

[0243] In one embodiment, a subject is administered an initial dose and one or more maintenance doses of a single stranded oligonucleotide. The maintenance dose or doses are generally lower than the initial dose, e.g., one-half less of the initial dose. A maintenance regimen can include treating the subject with a dose or doses ranging from 0.0001 to 100 mg/kg of body weight per day, e.g., 100, 10, 1, 0.1, 0.01, 0.001, or 0.0001 mg per kg of bodyweight per day. The maintenance doses may be administered no more than once every 1, 5, 10, or 30 days. Further, the treatment regimen may last for a period of time which will vary depending upon the nature of the particular disease, its severity and the overall condition of the patient. In some embodiments the dosage may be delivered no more than once per day, e.g., no more than once per 24, 36, 48, or more hours, e.g., no more than once for every 5 or 8 days. Following treatment, the patient can be monitored for changes in his condition and for alleviation of the symptoms of the disease state. The dosage of the oligonucleotide may either be increased in the event the patient does not respond significantly to current dosage levels, or the dose may be decreased if an alleviation of the symptoms of the disease state is observed, if the disease state has been ablated, or if undesired side-effects are observed.

[0244] The effective dose can be administered in a single dose or in two or more doses, as desired or considered appropriate under the specific circumstances. If desired to facilitate repeated or frequent infusions, implantation of a delivery device, e.g., a pump, semi-permanent stent (e.g., intravenous, intraperitoneal, intracisternal or intracapsular), or reservoir may be advisable.

[0245] In some embodiments, the oligonucleotide pharmaceutical composition includes a plurality of single stranded oligonucleotide species. In another embodiment, the single stranded oligonucleotide species has sequences that are non-overlapping and non-adjacent to another species with respect to a naturally occurring target sequence (e.g., a PRC2-associated region). In another embodiment, the plurality of single stranded oligonucleotide species is specific for different PRC2-associated regions. In another embodiment, the single stranded oligonucleotide is allele specific.

[0246] In some cases, a patient is treated with a single stranded oligonucleotide in conjunction with other therapeutic modalities.

[0247] Following successful treatment, it may be desirable to have the patient undergo maintenance therapy to prevent the recurrence of the disease state, wherein the compound of the invention is administered in maintenance doses, ranging from 0.0001 mg to 100 mg per kg of body weight.

[0248] The concentration of the single stranded oligonucleotide composition is an amount sufficient to be effective in treating or preventing a disorder or to regulate a physiological condition in humans. The concentration or amount of single stranded oligonucleotide administered will depend on the parameters determined for the agent and the method of administration, e.g. nasal, buccal, pulmonary. For example, nasal formulations may tend to require much lower concentrations of some ingredients in order to avoid irritation or burning of the nasal passages. It is sometimes desirable to dilute an oral formulation up to 10-100 times in order to provide a suitable nasal formulation.

[0249] Certain factors may influence the dosage required to effectively treat a subject, including but not limited to the severity of the disease or disorder, previous treatments, the general health and/or age of the subject, and other diseases present. Moreover, treatment of a subject with a therapeutically effective amount of a single stranded oligonucleotide can include a single treatment or, preferably, can include a series of treatments. It will also be appreciated that the effective dosage of a single stranded oligonucleotide used for treatment may increase or decrease over the course of a particular treatment. For example, the subject can be monitored after administering a single stranded oligonucleotide composition. Based on information from the monitoring, an additional amount of the single stranded oligonucleotide composition can be administered.

[0250] Dosing is dependent on severity and responsiveness of the disease condition to be treated, with the course of treatment lasting from several days to several months, or until a cure is effected or a diminution of disease state is achieved. Optimal dosing schedules can be calculated from measurements of FOXP3 expression levels in the body of the patient. Persons of ordinary skill can easily determine optimum dosages, dosing methodologies and repetition rates. Optimum dosages may vary depending on the relative potency of individual compounds, and can generally be estimated based on EC50s found to be effective in in vitro and in vivo animal models. In some embodiments, the animal models include transgenic animals that express a human FOXP3. In another embodiment, the composition for testing includes a single stranded oligonucleotide that is complementary, at least in an internal region, to a sequence that is conserved between FOXP3 in the animal model and the FOXP3 in a human.

[0251] In one embodiment, the administration of the single stranded oligonucleotide composition is parenteral, e.g. intravenous (e.g., as a bolus or as a diffusible infusion), intradermal, intraperitoneal, intramuscular, intrathecal, intraventricular, intracranial, subcutaneous, transmucosal, buccal, sublingual, endoscopic, rectal, oral, vaginal, topical, pulmonary, intranasal, urethral or ocular. Administration can be provided by the subject or by another person, e.g., a health care provider. The composition can be provided in measured doses or in a dispenser which delivers a metered dose. Selected modes of delivery are discussed in more detail below.

### Kits

[0252] In certain aspects of the invention, kits are provided, comprising a container housing a composition comprising a single stranded oligonucleotide. In some embodiments, the composition is a pharmaceutical composition comprising a single stranded oligonucleotide and a pharmaceutically acceptable carrier. In some embodiments, the individual components of the pharmaceutical composition may be provided in one container. Alternatively, it may be desirable to provide the components of the pharmaceutical composition separately in two or more containers, e.g., one container for single stranded oligonucleotides, and at least another for a carrier compound. The kit may be packaged in a number of different configurations such as one or more containers in a single box. The different components can be combined, e.g., according to instructions provided with the kit. The components can be combined according to a method described herein, e.g., to prepare and administer a pharmaceutical composition. The kit can also include a delivery device.

[0253] The present invention is further illustrated by the following Examples, which in no way should be construed as further limiting. The entire contents of all of the references (including literature references, issued patents, published patent applications, and co-pending patent applications) cited throughout this application are hereby expressly incorporated by reference.

### EXAMPLES

[0254] The invention is further described in the following examples, which do not limit the scope of the invention described in the claims.

### Example 1

### Materials and Methods:

### Real Time (Quantitative) PCR

[0255] RNA was harvested from the cells and converted to cDNA as described below. Real time PCR (also referred to herein as quantitative PCR or qPCR or qRTPCR) was performed in a 96 well format with a final volume of 20 ul/well. Each well included 2.5 ul of cDNA, 5.5 ul of water, 1 ul of target gene probe, 1 ul of housekeeper probe and 10 ul of TaqMan® Fast Advanced master mix (Life Technologies™, Invitrogen).

[0256] Target gene probes for qPCR for detection of human specific FoxP3, IL2RA, CD69, CD62L, CDKN1A, TNFRSF18 (GITR) and B-Actin (Life Technologies) were used to detect mRNA levels. The target gene probes were labeled with Fam™ and the housekeeper probe was labeled with VIC® (Life Technologies™, Invitrogen).

[0257] An Applied Biosystems® StepOne™ Plus Real Time PCR System machine was used to read the samples and determine levels of mRNA. The following cycle program was used:

[0258] Step 1: 1 Cycle of 95 degrees Celsius for 20 seconds

[0259] Step 2: 40 cycles of 95 degrees Celsius for 3 seconds

[0260] Step 3: 40 cycles of 60 degrees Celsius for 20 seconds

[0261] A baseline level of mRNA expression for each target gene was determined. Baseline levels were also determined for mRNA of various housekeeping genes which are constitutively expressed. A “control” housekeeping gene with approximately the same level of baseline expression as the target gene was chosen for comparison purposes. Quantitative PCR data presented in Table 2 is represented as RQ (relative quantification): Target dCT=Target Ct−Housekeeper Ct; ddCT=Target dCT−Negative control dCT (unc-293 m01, which is a universal negative control oligonucleotide); RQ=Log 2−ddCT.

### Oligonucleotide Design

[0262] Oligonucleotides were designed within PRC2-interacting regions in order to upregulate FOXP3 (see, e.g., FIG. 2). The sequence and structure of each oligonucleotide is shown in Table 4. Table 3 provides a description of the nucleotide analogs, modifications and intranucleotide linkages used for certain oligonucleotides tested and described in Table 2 or Table 4.

### T Cell Isolation and Culture

[0263] Human T cells were obtained from one healthy male and one healthy female donor, both donors were of similar age and health status. For each experiment, T cells were freshly isolated from the donors and sorted for CD4-positivity using fluorescent activated cell sorting (FACS). The human T cells (Stem Cells Technologies) were cultured in RPMI 1640/10% fetal bovine serum in the presence of Anti-Anti (Antibiotic-Antimycotic, Life Technologies™, Invitrogen). Cells were thawed and cultured for one day before stimulation.

### T Cell Stimulation

[0264] T-Cells stimulation was performed by using 5 ng/ml of Phorbol 12-myristate 13-acetate (PMA) and 1 uM of Ionomycin (Sigma) for 5 hours. For 2× concentrations doses of PMA and Ionomcin were double. The initial T-cell stimulation conditions were determined using T cells from the healthy male donor. The screening of the oligonucleotides (described below) was carried out with T cells from the healthy female donor (referred to as huTcell+ in Table 2).

In Vitro Transfection of Cells with Oligonucleotides

[0265] T-cells were stimulated by PMA/Ionomycin for 5 hours as described above. After stimulation, cells were plated into a 96 well V-bottom plate format with approximately 100,000 cells/well. Each well contained the adequate oligonucleotide amount to produce a final concentration of 10 uM of oligonucleotide. Final volume per well was 100 ul. The same method was used for dose response experiments. The oligonucleotides were delivered gymnotically. The term gymnotic (or gymnotically), with reference to delivery, refers to unassisted uptake of agents into cells without use of transfection reagents or delivery to a subject without transfection reagents. After 48 hours cells were spun down at 2000 RPM, 4 C for 5 minutes, washed with ice cold PBS (Life Technologies) once and a cell lysate was generated using a Cell-to-Ct kit (Life Technologies). The amount of buffer used was 35 ul/well. cDNA was generated utilizing 15 ul of lysate for a total of 50 ul of reaction volume. Quantitative RT-PCR was then carried out as outlined above.

### Results:

### Use of PMA and Ionomycin to Stimulate T Cells

[0266] T cells were stimulated with either (a) 5 ng/ml PMA and 1 uM Ionomycin, (b) 10 ng/ml PMA and 2 uM Ionomycin, (c) DMSO alone, or (d) no treatment. Biomarkers for activation and proliferation of the T cells were evaluated to determine whether PMA and Ionomycin treatment successfully stimulated the T cells. CDKN1A is a housekeeper gene that is upregulated upon or during active cell proliferation. CD69 and IL-2RA are known to be upregulated in activated T cells. CD69, CDKN1A, and IL-2RA were found to be upregulated upon stimulation with PMA and Ionomycin (FIG. 1). CD62L, a biomarker for naïve T cells, was found to be downregulated upon stimulation with PMA and Ionomycin (FIG. 1). These results show that PMA and Inomycin were able to stimulate T cells.

### In Vitro Delivery of Single Stranded Oligonucleotides Upregulated FOXP3 Expression

[0267] Oligonucleotides were designed as candidates for upregulating FOXP3 expression. Single stranded oligonucleotides were designed to be complementary to a PRC2-interacting region within a sequence as set forth in SEQ ID NO: 1-7, 46, or 47. Multiple oligonucleotides were tested in at least duplicate. The sequence and structural features of the oligonucleotides are set forth in Table 4. Briefly, T-cells were stimulated as described above and then gymnotically transfected in vitro with each of the oligonucleotides as described above. The unc-293 m01 oligo is a universal negative control oligo. “Cntl un” refers to a well that contained no oligonucleotide, which also served as a negative control. FOXP3 expression in stimulated T cells following treatment was evaluated by qRT-PCR. Oligonucleotides that upregulated FOXP3 expression were identified. A subset of the oligonucleotides that upregulated FOXP3 were further tested for expression of two T cell biomarkers, GITR (also called TNFRSF18) and IL2RA. The levels of these two biomarkers were measured by qRT-PCR. GITR is a biomarker for Tregs and thus increased expression of this biomarker may indicate that the activated T cells are switching to a T-regulatory state. IL2RA is biomarker for activated T cells and thus a decrease in IL2RA may indicate a decrease in the T cell activation state (e.g., switching to a T-regulatory state). Further details regarding FOXP3 and T cell biomarker expression are outlined in Table 2.

### Example 2

### Methods:

### T Cell Activation by PMA/Ionomycin

[0268] Cells were incubated for 5 hours with two different concentrations of PMA/Ionomycin (1× and 2×). 1× and 2× concentrations of PMA/Ionomycin were the same as defined in Example 1. Naïve T cells were used as control (untreated). CD62L (Naïve cell marker) and CD69 (activated cell marker) mRNA levels were measured (FIG. 3).

### T Cell Activation by Dynabeads

[0269] Human T cells were incubated with different ratios of Dynabeads (2:1 or 1:1 beads/cells ratios) for 2, 5, 24 and 48 hours. Naïve T cells were used as control (untreated). CD62L (naïve T cell marker) and CD25 (activated T cell marker) mRNA levels were measured to test T cell activation (FIG. 4).

### Screening

[0270] Cells were activated with PMA/Ionomycin or Dynabeads (anti-CD3/CD28) for 5 hours prior to adding oligos. GAPDH gapmers were used to determine an optimized transfection method. The FOXP3 oligos in Table 4 were then screened by gymnotic delivery (unassisted uptake of oligonucleotides into cells without use of transfection reagents) to cells, at 10 μM for 24, 48 and 96 hours. Two separate experiments were performed with two biological replicates each. Foxp3 mRNA levels were measured by qPCR and Foxp3 protein levels were measured by flow cytometry. GITR and CTLA4 (Treg biomarkers) mRNA levels were also measured after Foxp3 oligo treatment. Anti-inflammatory cytokine IL-10 was measured in cells supernatants derived from triple positive cells: Foxp3+, CTLA4+ and GITR+. Certain FOXP3 oligos from Table were selected as having desired properties by the following criteria: Foxp3 mRNA and protein levels, presence of Tregs biomarkers.

### Results:

[0271] Human T cells were activated using PMA/Ionomycin. Activation of T cells was confirmed by measuring CD62L and CD69 mRNA levels (FIG. 3). GAPDH gapmer oligos were used to show that oligos could be delivered to activated human T cells. GAPDH gapmers showed up to 70% mRNA knockdown in PMA/Iono activated T cells at 4 and 20 μM after 48 hours of oligo treatment (FIG. 5).

[0272] Next, human T cells were activated either using PMA/Ionomycin or dynabeads. Activation of T cells was confirmed by measuring CD62L and CD69 or CD62L and CD25 mRNA levels (FIGS. 3 and 4). FOXP3 oligos from Table 4 (FOXP3-01 to FOXP3-60) were delivered gymnotically at 10 μM to the activated T cells. The FOXP3 oligos showed 2-6 fold Foxp3 mRNA upregulation compared to a negative control oligo (293) in PMA/Ionomycin activated cells (FIG. 6). The FOXP3 oligos showed 2-8 fold Foxp3 mRNA upregulation compared to a negative control oligo (293) in Dynabead activated T cells (FIG. 7). In the dynabead-activated T cells, housekeeper gene (GAPDH) Ct levels were very consistent between treatments (FIG. 8).

[0273] The level of CTLA4 mRNA and GITR mRNA, both Treg biomarkers, were also measured after delivery of the FOXP3 oligos to Dynabead activated T cells. The FOXP3 oligos were shown, in general, to upregulate CTLA4 mRNA levels after 96 hours of treatment (FIG. 9). The FOXP3 oligos were shown, in general, to upregulate GITR mRNA levels after 96 hours of treatment, with over 20 oligos showing upregulation (FIG. 10).

[0274] A second experiment was performed to confirm that the FOXP3 oligos upregulated FOXP3 mRNA levels Dynabead activated T cells. In general, the FOXP3 oligos upregulated FOXP3 mRNA levels by 2-10 fold in the activated T cells (FIG. 11). FOXP3 oligos that caused housekeeper gene changes of more than 1.5 Cts were not considered positives (FIG. 12).

[0275] Next, the level of Foxp3 protein in oligo treated activated human T cells was detected using flow cytometry. Foxp3 protein levels were measured in cells that were CD4+, CD25+, and FoxP3+. In general, FOXP3 oligos (e.g., FOXP3-2 to FOXP3-60) were found to increase Foxp3 protein levels in the triple positive human T cells (FIG. 13). Raw flow cytometry data from an exemplary oligo, FOXP3-35, is shown in FIG. 14, demonstrating the difference in FOXP3 expression compared to cells treated with a negative control oligo (293).

[0276] The percentage of triple positive Treg cells (CD4+CD25+FoxP3+) compared to the total cell population was next investigated. It was found that several oligos (e.g., FOXP3-3, FOXP3-5 to FOXP3-44, FOXP3-46 to FOXP3-50, FOXP3-52-60) increased the Treg cell population by more than 2 fold compared to a oligo control.

[0277] In some embodiments, several FOXP3 oligos were selected as possible lead molecules according to the following criteria: FoxP3 mRNA and protein levels, percent of Tregs within the total cell population and CTLA4/GITR mRNA expression. A summary of results from oligos from two experiments is provided in Tables 5 and 6. Oligos FOXP3-28, FOXP3-29, FOXP3-30 and FOXP3-57 showed positive biomarkers expression (i.e., met the criteria) in both experiments.

TABLE 5
Experiment #1 exemplary results

| | FoxP3 mRNA | | FoxP3 MFI | CTLA4 mRNA | GITR mRNA |
|---|---|---|---|---|---|
| | fold | Tregs % fold | fold | fold | fold |
| | upregulation | upregulation | upregulation | upregulation | upregulation |
| | compared to | compared to | compared to | compared to | compared to |
| | control oligo | control oligo | control oligo | control oligo | control oligo |
| Oligo # | 293 | 293 | 293 | 293 | 293 |
| 293 | 1 | 1 | 1 | 1 | 1 |
| Untreated | 1 | 1 | 1 | 1 | 1.1 |
| 13 | 5.5 | 1.8 | 1.2 | 1.3 | 2.4 |
| 22 | 2.2 | 1.8 | 1.2 | 1.3 | 2.4 |
| 23 | 3.5 | 1.8 | 1.3 | 0.8 | 1.5 |
| 28 | 3 | 1.9 | 1.4 | 1.7 | 2.8 |
| 29 | 3 | 2.1 | 1.5 | 1.6 | 1.7 |
| 30 | 4.5 | 2.1 | 1.5 | 1.2 | 1.4 |
| 49 | 10 | 1.2 | 1.2 | 1 | 2.2 |
| 52 | 3.5 | 1.8 | 1.5 | 1.6 | 1.7 |
| 54 | 5 | 1.8 | 1.5 | 0.9 | 0.9 |
| 57 | 2.6 | 1.8 | 1.6 | 2.3 | 2 |
| 59 | 3.8 | 1.8 | 1.7 | 1.7 | 1.6 |

MFI = Mean Fluorescence Intensity

TABLE 6
Experiment #2 results

| | FoxP3 mRNA | | FoxP3 MFI | CTLA4 mRNA | GITR mRNA |
|---|---|---|---|---|---|
| | fold | Tregs % fold | fold | fold | fold |
| | upregulation | upregulation | upregulation | upregulation | upregulation |
| | compared to | compared to | compared to | compared to | compared to |
| | control oligo | control oligo | control oligo | control oligo | control oligo |
| Oligo # | 293 | 293 | 293 | 293 | 293 |
| 293 | 1 | 1 | 1 | 1 | 1 |
| Untreated | 1 | 1 | 1 | 1 | 1 |
| 3 | 3.9 | 1.7 | 1.4 | 3.8 | 2 |
| 5 | 2.1 | 1.6 | 1.4 | 2.3 | 1.9 |
| 15 | 2.2 | 1.6 | 1.5 | 2.1 | 1.6 |
| 26 | 2.2 | 1.5 | 1.4 | 3.8 | 1.5 |
| 27 | 3.8 | 1.6 | 1.4 | 3.2 | 3.8 |
| 28 | 2.2 | 1.6 | 1.4 | 3.4 | 3.8 |
| 29 | 2.2 | 1.6 | 1.5 | 4.4 | 4.2 |
| 30 | 3.8 | 1.7 | 1.4 | 3.1 | 2 |
| 38 | 2 | 1.5 | 1.3 | 1.9 | 1.9 |
| 41 | 4 | 1.7 | 1.5 | 5.1 | 2.3 |
| 53 | 4.1 | 2.7 | 1.5 | 2.1 | 2.1 |
| 57 | 3.1 | 1.1 | 1.3 | 2.9 | 2.9 |

[0278] Oligos that were selected based on triple positive markers (CD4+/CD25+/FoxP3+) upregulated IL-10 protein, an immunosuppressive cytokine (FIG. 16). In summary, the results in this Example show that FOXP3 oligos are capable of upregulating FOXP3, as well as several Treg biomarkers and IL-10.

### Example 3

### Methods:

[0279] Mice (n=4) were treated with a single dose of 25 mg/kg gapmer targeting MALAT-1. Blood and liver were harvested after 1, 5 and 7 days from dosing. CD4+ cells were sorted from blood and MALAT-1 mRNA was measured by qPCR.

### Results:

[0280] MALAT-1 gapmers were used to show that oligos can be delivered in vivo to T cells. It was shown that a single dose of MALAT-1 gapmer oligonucleotides could reduce levels of MALAT-1 mRNA in vivo in CD4+ T cells and in the liver (FIGS. 17 and 18). These results show that oligos can be successfully delivered to T cells in vivo.

### Example 4

[0281] Potential lead oligos identified in Example 2 are tested in mouse models, as these oligos were designed to have 1 or 0 mismatches with the mouse FoxP3 gene (see Table 7 below). Exemplary mouse models include GFP/RFP Treg reporter mice, EAE (multiple sclerosis) and NOD (type 1 diabetes) mouse models, mouse inflammatory disease models, and humanized mouse models. Exemplary inflammatory disease models include graft versus host disease (GvHD) models, inflammatory bowel disease (IBD) models such as models of Crohn's disease and ulcerative colitis, rheumatoid arthritis models and psoriasis models. GvHD models include several models involving introduction of donor cells or tissues into a MHC mismatched or miHA mismatched host, e.g., C57/Bl6(H2b) donor strain splenocytes or T cells into BALB/c(H2d) recipient strain or B10.Br(H2k) donor strain bone marrow cells or T cells into BALB.K(H2k) recipient strain (see, e.g., Schroeder et al. Dis Model Mech. May 2011; 4(3): 318-333). IBD models include genetic models IL-10R2^{-/-}×dominant negative TGFβRII mice, SAMP1/Yit, Mdr1a^{-/-}, IKKγ^{-/-}, and chemical agent models Dextran Sodium Sulfate, 2,4,6-trinitrobenzenesulfonic acid, and oxazolone (see, e.g., Mizoguchi. Prog Mol Biol Transl Sci. 2012; 105:263-320). Rheumatoid arthritis models include Collagen-induced arthritis, collagen-antibody induced arthritis, inflammatory arthritis primed with an antigen (e.g. methylated BSA in complete Freund's adjuvant), TNF-a transgenic mice, SKG mice, SCID mice, DR4-CD4 mice, and DNase II^{-/-}IFN-IR^{-/-} mice (see, e.g., Asquith et al. Eur. J. Immunol. 2009. 39: 1991-2058). Psoriasis models include Ttc7^{fsn}/Ttc7^{fsn} mice, K5-Stat3C mice, K14-IL-20 mice, K14-IL-6 mice, K5-latent TGFbeta1 mice, K10-BMP-6 mice, K14-IL1alpha mice, K14-VEGF mice, IL1-ra knockout mice, IRF-2 knockout mice, and IKK2 knockout mice (see, e.g., Gudjonsson et al. J Invest Dermatol. 2007 June; 127(6):1292-308). Appropriate mouse models are also available, for example, from the Jackson Laboratory (Bar Harbor, Me.) or another commercial source.

TABLE 7
FOXP3 oligo number of mismatches with mouse FoxP3 gene.

| Oligo # | # of mismatches |
|---|---|
| FOXP3-03 | 1 |
| FOXP3-05 | 1 |
| FOXP3-13 | 1 |
| FOXP3-15 | 1 |
| FOXP3-22 | 1 |
| FOXP3-23 | 1 |
| FOXP3-26 | 0 |
| FOXP3-27 | 0 |
| FOXP3-28 | 0 |
| FOXP3-29 | 1 |
| FOXP3-30 | 1 |
| FOXP3-38 | 1 |
| FOXP3-41 | 1 |
| FOXP3-49 | 1 |
| FOXP3-50 | 1 |
| FOXP3-54 | 1 |
| FOXP3-57 | 0 |

### Example 5

[0282] Gapmers were designed to target and degrade human EZH1 and EZH2 mRNA. Gapmers were used to evaluate the extent to which FOXP3 expression is regulated by EZH1 and/or EZH2.

TABLE 8
EZH1 and EZH2 gapmers

| | Base | | |
|---|---|---|---|
| OligoID | Sequence | Formatted Sequence* | SeqID |
| EZH1- | GACACGAA | lnaGs; lnaAs; lnaCs; lnaAs; | 45714 |
| 28 m08 | ATCACGCA | dCs; dGs; dAs; dAs; dAs; | |
| | T | dTs; dCs; dAs; dCs; lnaGs; | |
| | | lnaCs; lnaAs; lnaT-Sup | |
| EZH1- | CGACACGA | lnaCs; lnaGs; lnaAs; lnaCs; | 45715 |
| 29 m08 | AATCACGC | dAs; dCs; dGs; dAs; dAs; | |
| | A | dAs; dTs; dCs; dAs; lnaCs; | |
| | | lnaGs; lnaCs; lnaA-Sup | |
| EZH2- | GATTTTAC | lnaGs; lnaAs; lnaTs; lnaTs; | 45716 |
| 09 m08 | ACGCTTCC | dTs; dTs; dAs; dCs; dAs; | |
| | G | dCs; dGs; dCs; dTs; lnaTs; | |
| | | lnaCs; lnaCs; lnaG-Sup | |
| EZH2- | CTTTCGAT | lnaCs; lnaTs; lnaTs; lnaTs; | 45717 |
| 38 m08 | GCCGACAT | dCs; dGs; dAs; dTs; dGs; | |
| | A | dCs; dCs; dGs; dAs; lnaCs; | |
| | | lnaAs; lnaTs; lnaA-Sup | |

*Table 3 provides a description of the nucleotide analogs, modifications and intranucleotide linkages used for certain oligonucleotides tested and described in Table 8.

[0283] Gapmers targeting EZH1 reduced levels of EZH1 mRNA levels in human T cells by 90-95% after 5 days at 10 μM (unassisted uptake) when compared to negative control (293) (FIG. 19). At 5 μM (combination oligos) levels of EZH1 were decreased between 60 and 90% depending on gapmer and time (FIG. 19). EZH2 gapmers decreased EZH2 mRNA levels up to 99% after 5 days at 10 μM when compared to negative control (293) (FIG. 20). Gapmer combinations decreased EZH2 mRNA levels by 75% (FIG. 20).

[0284] EZH1 gapmers increased FoxP3 mRNA levels about 2 fold when compared to negative control (FIG. 21). FoxP3 mRNA levels increased up to 10 fold by EZH2 gapmer #9 (FIG. 21). The effect of the EZH1 and EZH2 gapmer combinations (e.g., 28-9, 29-9, 28-38, and 29-38) on FoxP3 mRNA levels was far greater than either alone, appearing to be synergistic (FIG. 21).

[0285] Several T cell related genes were tested for gene expression levels after EZH1/2 gapmer treatment. Foxp3 showed a higher increase in mRNA levels after EZH1/2 KD. Again, a possible synergistic effect was observed when EZH1 and EZH2 gapmers were combined (FIG. 22). Treatment with EZH1 and EZH2 gapmers also increased the percent of cells double positive (++) for Foxp3 and CD3z (FIG. 23).

### Tables

TABLE 1
Hexamers that are not seed sequences of human miRNAs

AAAAAA, AAAAAG, AAAACA, AAAAGA, AAAAGC, AAAAGG, AAAAUA, AAACAA, AAACAC, AAACAG,
AAACAU, AAACCC, AAACCU, AAACGA, AAACGC, AAACGU, AAACUA, AAACUC, AAACUU, AAAGAU,
AAAGCC, AAAGGA, AAAGGG, AAAGUC, AAAUAC, AAAUAU, AAAUCG, AAAUCU, AAAUGC, AAAUGU,
AAAUUA, AAAUUG, AACAAC, AACAAG, AACAAU, AACACA, AACACG, AACAGA, AACAGC, AACAGG,
AACAUC, AACAUG, AACCAA, AACCAC, AACCAG, AACCAU, AACCCC, AACCCG, AACCGA, AACCGC,
AACCGG, AACCUA, AACCUU, AACGAA, AACGAC, AACGAG, AACGAU, AACGCU, AACGGG, AACGGU,
AACGUA, AACGUC, AACGUG, AACGUU, AACUAU, AACUCA, AACUCC, AACUCG, AACUGA, AACUGC,
AACUGU, AACUUA, AACUUC, AACUUG, AACUUU, AAGAAA, AAGAAG, AAGAAU, AAGACG, AAGAGA,
AAGAGC, AAGAGG, AAGAGU, AAGAUU, AAGCAA, AAGCAC, AAGCAG, AAGCAU, AAGCCA, AAGCCC,
AAGCCG, AAGCCU, AAGCGA, AAGCGG, AAGCGU, AAGCUA, AAGGAA, AAGGAC, AAGGCU, AAGGGC,
AAGGGU, AAGGUU, AAGUAA, AAGUAC, AAGUAU, AAGUCC, AAGUCG, AAGUGA, AAGUGG, AAGUUA,
AAGUUU, AAUAAA, AAUAAC, AAUAAG, AAUAAU, AAUACA, AAUACC, AAUACG, AAUAGA, AAUAGC,
AAUAGG, AAUAGU, AAUAUC, AAUAUU, AAUCAA, AAUCAU, AAUCCA, AAUCCC, AAUCCG, AAUCGA,
AAUCGC, AAUCGU, AAUCUA, AAUCUG, AAUCUU, AAUGAA, AAUGAC, AAUGAG, AAUGAU, AAUGCG,
AAUGCU, AAUGGA, AAUGGU, AAUGUA, AAUGUC, AAUGUG, AAUUAA, AAUUAC, AAUUAG, AAUUCC,
AAUUCG, AAUUGA, AAUUGG, AAUUGU, AAUUUC, AAUUUG, ACAAAA, ACAAAC, ACAAAG, ACAAAU,
ACAACC, ACAACG, ACAACU, ACAAGA, ACAAGC, ACAAGU, ACAAUC, ACAAUG, ACAAUU, ACACAG,
ACACCA, ACACCC, ACACCG, ACACCU, ACACGA, ACACGC, ACACGU, ACACUC, ACACUG, ACACUU,
ACAGAA, ACAGAC, ACAGCC, ACAGCG, ACAGCU, ACAGGG, ACAGUC, ACAGUG, ACAGUU, ACAUAA,
ACAUAC, ACAUCC, ACAUCG, ACAUCU, ACAUGA, ACAUGC, ACAUGU, ACAUUG, ACAUUU, ACCAAA,
ACCAAC, ACCAAG, ACCAAU, ACCACC, ACCACG, ACCAGA, ACCAGU, ACCAUA, ACCAUG, ACCAUU,
ACCCAA, ACCCAC, ACCCCA, ACCCCG, ACCCGA, ACCCGC, ACCCUA, ACCCUC, ACCCUU, ACCGAA,
ACCGAC, ACCGAU, ACCGCA, ACCGCC, ACCGCG, ACCGCU, ACCGGA, ACCGGC, ACCGGU, ACCGUA,
ACCGUC, ACCGUG, ACCGUU, ACCUAA, ACCUAC, ACCUAG, ACCUAU, ACCUCA, ACCUCC, ACCUCG,
ACCUCU, ACCUGA, ACCUGC, ACCUGU, ACCUUA, ACCUUC, ACCUUU, ACGAAA, ACGAAC, ACGAAG,
ACGAAU, ACGACA, ACGACC, ACGACG, ACGACU, ACGAGA, ACGAGC, ACGAGG, ACGAGU, ACGAUA,
ACGAUC, ACGAUG, ACGAUU, ACGCAA, ACGCAG, ACGCAU, ACGCCC, ACGCCG, ACGCCU, ACGCGA,
ACGCGG, ACGCGU, ACGCUA, ACGCUG, ACGCUU, ACGGAA, ACGGAC, ACGGAG, ACGGAU, ACGGCC,
ACGGCG, ACGGCU, ACGGGC, ACGGGG, ACGGGU, ACGGUA, ACGGUC, ACGGUG, ACGGUU, ACGUAA,
ACGUAC, ACGUAU, ACGUCC, ACGUCG, ACGUCU, ACGUGA, ACGUGC, ACGUGG, ACGUGU, ACGUUA,
ACGUUC, ACGUUG, ACGUUU, ACUAAA, ACUAAG, ACUAAU, ACUACA, ACUACC, ACUACG, ACUACU,
ACUAGG, ACUAUC, ACUAUG, ACUAUU, ACUCAU, ACUCCC, ACUCCG, ACUCCU, ACUCGA, ACUCGC,
ACUCGG, ACUCUC, ACUCUU, ACUGAG, ACUGAU, ACUGCC, ACUGCG, ACUGCU, ACUGGG, ACUGGU,
ACUGUC, ACUUAA, ACUUAC, ACUUAU, ACUUCA, ACUUCC, ACUUCG, ACUUCU, ACUUGA, ACUUGC,
ACUUGU, ACUUUA, ACUUUC, ACUUUG, AGAAAA, AGAAAC, AGAAAG, AGAACC, AGAACG, AGAACU,
AGAAGC, AGAAGU, AGAAUA, AGAAUC, AGAAUG, AGAAUU, AGACAA, AGACAC, AGACAU, AGACCA,
AGACCC, AGACCG, AGACCU, AGACGA, AGACGC, AGACGU, AGACUA, AGACUC, AGACUU, AGAGAC,
AGAGAG, AGAGAU, AGAGCC, AGAGCG, AGAGCU, AGAGGC, AGAGGG, AGAGGU, AGAGUA, AGAGUU,
AGAUAC, AGAUAG, AGAUAU, AGAUCC, AGAUCG, AGAUCU, AGAUGA, AGAUGC, AGAUGG, AGAUUA,
AGAUUC, AGAUUG, AGAUUU, AGCAAC, AGCACA, AGCACG, AGCACU, AGCAGA, AGCAUA, AGCAUC,
AGCAUG, AGCCAA, AGCCAU, AGCCCA, AGCCGA, AGCCGC, AGCCGG, AGCCGU, AGCCUA, AGCCUC,
AGCGAA, AGCGAG, AGCGAU, AGCGCA, AGCGCC, AGCGCG, AGCGCU, AGCGGA, AGCGGC, AGCGGU,
AGCGUA, AGCGUC, AGCGUG, AGCGUU, AGCUAA, AGCUAC, AGCUAG, AGCUAU, AGCUCA, AGCUCC,
AGCUCG, AGCUCU, AGCUGA, AGCUGG, AGCUGU, AGCUUC, AGCUUU, AGGAAU, AGGACC, AGGACG,
AGGAGA, AGGAGU, AGGAUA, AGGCAA, AGGCAU, AGGCCG, AGGCGA, AGGCGC, AGGCGG, AGGCUA,
AGGCUC, AGGCUU, AGGGAC, AGGGAU, AGGGGA, AGGGGU, AGGGUA, AGGGUG, AGGUAA,
AGGUAC, AGGUCA, AGGUCC, AGGUCU, AGGUGA, AGGUGC, AGGUGG, AGGUGU, AGGUUC,
AGGUUG, AGUAAA, AGUAAG, AGUAAU, AGUACA, AGUACG, AGUAGC, AGUAGG, AGUAUA, AGUAUC,
AGUAUG, AGUAUU, AGUCAA, AGUCAC, AGUCAG, AGUCAU, AGUCCA, AGUCCG, AGUCCU, AGUCGA,
AGUCGC, AGUCGG, AGUCGU, AGUCUA, AGUCUC, AGUCUG, AGUCUU, AGUGAA, AGUGAC, AGUGCG,
AGUGGG, AGUGUC, AGUUAA, AGUUAC, AGUUAG, AGUUCC, AGUUCG, AGUUGA, AGUUGC,
AGUUGU, AGUUUA, AGUUUC, AGUUUG, AGUUUU, AUAAAC, AUAAAU, AUAACA, AUAACC, AUAACG,
AUAACU, AUAAGA, AUAAGC, AUAAGG, AUAAGU, AUAAUC, AUAAUG, AUAAUU, AUACAC, AUACAG,
AUACAU, AUACCA, AUACCC, AUACCG, AUACGA, AUACGC, AUACGG, AUACGU, AUACUA, AUACUC,
AUACUG, AUACUU, AUAGAA, AUAGAC, AUAGAU, AUAGCA, AUAGCG, AUAGCU, AUAGGA, AUAGGU,
AUAGUA, AUAGUC, AUAGUG, AUAGUU, AUAUAC, AUAUAG, AUAUCC, AUAUCG, AUAUCU, AUAUGA,
AUAUGC, AUAUGG, AUAUGU, AUAUUC, AUAUUG, AUAUUU, AUCAAA, AUCAAC, AUCAAG, AUCAAU,
AUCACA, AUCACC, AUCACG, AUCAGC, AUCAGG, AUCCAA, AUCCAU, AUCCCC, AUCCCG, AUCCGA,
AUCCGC, AUCCGG, AUCCUA, AUCCUC, AUCCUG, AUCGAA, AUCGAC, AUCGAG, AUCGAU, AUCGCA,
AUCGCC, AUCGCG, AUCGCU, AUCGGC, AUCGGG, AUCGGU, AUCGUC, AUCGUG, AUCGUU, AUCUAA,
AUCUAC, AUCUAG, AUCUAU, AUCUCC, AUCUCG, AUCUGU, AUCUUG, AUCUUU, AUGAAA, AUGAAC,
AUGAAG, AUGAAU, AUGACC, AUGACU, AUGAGG, AUGAGU, AUGAUA, AUGAUC, AUGAUU, AUGCAA,
AUGCAG, AUGCCA, AUGCCC, AUGCCG, AUGCGA, AUGCGG, AUGCGU, AUGCUC, AUGCUU, AUGGAC,
AUGGCC, AUGGGA, AUGGGC, AUGGGU, AUGGUC, AUGGUG, AUGUAC, AUGUAU, AUGUCA,
AUGUCC, AUGUCG, AUGUGU, AUGUUA, AUGUUC, AUUAAA, AUUAAC, AUUAAG, AUUAAU, AUUACA,
AUUACC, AUUACG, AUUACU, AUUAGA, AUUAGC, AUUAGG, AUUAGU, AUUAUA, AUUAUC, AUUAUG,
AUUCAC, AUUCCA, AUUCCG, AUUCCU, AUUCGA, AUUCGC, AUUCGG, AUUCGU, AUUCUA, AUUCUC,
AUUCUU, AUUGAA, AUUGAC, AUUGAU, AUUGCC, AUUGCG, AUUGCU, AUUGGA, AUUGGC,
AUUGGG, AUUGGU, AUUGUA, AUUGUC, AUUGUG, AUUGUU, AUUUAA, AUUUAG, AUUUAU,
AUUUCC, AUUUCG, AUUUCU, AUUUGA, AUUUGC, AUUUGU, AUUUUA, AUUUUC, AUUUUG,
AUUUUU, CAAAAG, CAAACA, CAAACC, CAAACG, CAAACU, CAAAGA, CAAAGG, CAAAUA, CAAAUU,
CAACAC, CAACAU, CAACCA, CAACCC, CAACCG, CAACGA, CAACGC, CAACGG, CAACGU, CAACUA,
CAACUC, CAACUG, CAACUU, CAAGAA, CAAGAC, CAAGAU, CAAGCA, CAAGCC, CAAGCG, CAAGCU,
CAAGGA, CAAGGG, CAAGUC, CAAGUG, CAAGUU, CAAUAA, CAAUAC, CAAUAG, CAAUCC, CAAUCG,
CAAUCU, CAAUGA, CAAUGC, CAAUGG, CAAUGU, CAAUUC, CAAUUG, CAAUUU, CACAAU, CACACA,
CACACG, CACACU, CACAGA, CACAGC, CACAGG, CACAUA, CACAUC, CACAUU, CACCAA, CACCAC,
CACCAU, CACCCA, CACCCC, CACCCG, CACCGA, CACCGC, CACCGG, CACCGU, CACCUA, CACCUU,
CACGAA, CACGAC, CACGAG, CACGAU, CACGCA, CACGCC, CACGCU, CACGGA, CACGGC, CACGGG,
CACGGU, CACGUA, CACGUC, CACGUG, CACGUU, CACUAA, CACUAG, CACUAU, CACUCA, CACUCG,
CACUGA, CACUGC, CACUGG, CACUUA, CACUUC, CACUUU, CAGAAA, CAGAAG, CAGAAU, CAGACC,
CAGACG, CAGAGC, CAGAUA, CAGAUC, CAGCCG, CAGCCU, CAGCGA, CAGCGC, CAGCGG, CAGCGU,
CAGCUC, CAGCUU, CAGGAU, CAGGGG, CAGGGU, CAGGUA, CAGGUC, CAGGUU, CAGUAC, CAGUCG,
CAGUUG, CAUAAA, CAUAAC, CAUAAG, CAUAAU, CAUACA, CAUACC, CAUACG, CAUACU, CAUAGA,
CAUAGG, CAUAGU, CAUAUA, CAUAUC, CAUAUG, CAUCAA, CAUCAC, CAUCAG, CAUCAU, CAUCCA,
CAUCCC, CAUCCG, CAUCGA, CAUCGC, CAUCGG, CAUCGU, CAUCUA, CAUCUC, CAUCUG, CAUCUU,
CAUGAA, CAUGAC, CAUGAG, CAUGAU, CAUGCA, CAUGCC, CAUGCG, CAUGCU, CAUGGC, CAUGGG,
CAUGGU, CAUGUA, CAUGUC, CAUGUU, CAUUAA, CAUUAC, CAUUAG, CAUUCA, CAUUCC, CAUUCG,
CAUUCU, CAUUGA, CAUUGG, CAUUUC, CAUUUG, CAUUUU, CCAAAA, CCAAAC, CCAAAG, CCAAAU,
CCAACA, CCAACC, CCAACG, CCAACU, CCAAGA, CCAAGC, CCAAGG, CCAAUC, CCAAUG, CCAAUU,
CCACAA, CCACAC, CCACAG, CCACAU, CCACCA, CCACCC, CCACCG, CCACCU, CCACGA, CCACGC,
CCACGG, CCACGU, CCACUA, CCACUC, CCACUU, CCAGAA, CCAGAC, CCAGAG, CCAGCC, CCAGGU,
CCAGUC, CCAGUU, CCAUAA, CCAUAC, CCAUAG, CCAUAU, CCAUCA, CCAUCC, CCAUCU, CCAUGA,
CCAUGC, CCAUGG, CCAUUC, CCAUUG, CCAUUU, CCCAAC, CCCAAG, CCCAAU, CCCACA, CCCAGA,
CCCAGC, CCCAGU, CCCAUA, CCCAUC, CCCAUG, CCCAUU, CCCCAA, CCCCAG, CCCCAU, CCCCCC,
CCCCCG, CCCCCU, CCCCGA, CCCCGC, CCCCGU, CCCCUA, CCCCUC, CCCGAA, CCCGAC, CCCGAU,
CCCGCA, CCCGCU, CCCGGA, CCCGGC, CCCGUA, CCCGUG, CCCGUU, CCCUAA, CCCUAG, CCCUCA,
CCCUCU, CCCUGC, CCCUUA, CCCUUC, CCCUUU, CCGAAA, CCGAAC, CCGAAU, CCGACA, CCGACC,
CCGACG, CCGACU, CCGAGA, CCGAGG, CCGAGU, CCGAUA, CCGAUC, CCGAUG, CCGAUU, CCGCAA,
CCGCAC, CCGCAG, CCGCAU, CCGCCA, CCGCCC, CCGCCG, CCGCCU, CCGCGA, CCGCGC, CCGCGG,
CCGCGU, CCGCUA, CCGCUC, CCGCUG, CCGCUU, CCGGAA, CCGGAU, CCGGCA, CCGGCC, CCGGCG,
CCGGCU, CCGGGA, CCGGGC, CCGGGG, CCGGGU, CCGGUA, CCGGUC, CCGGUG, CCGUAA, CCGUAG,
CCGUAU, CCGUCA, CCGUCC, CCGUCG, CCGUGA, CCGUGU, CCGUUA, CCGUUC, CCGUUG, CCGUUU,
CCUAAC, CCUAAG, CCUAAU, CCUACA, CCUACC, CCUACG, CCUACU, CCUAGA, CCUAGC, CCUAGG,
CCUAGU, CCUAUA, CCUAUC, CCUAUG, CCUAUU, CCUCAA, CCUCAC, CCUCAG, CCUCAU, CCUCCA,
CCUCCC, CCUCCG, CCUCGA, CCUCGC, CCUCGG, CCUCGU, CCUCUA, CCUCUG, CCUGAC, CCUGAU,
CCUGCA, CCUGGG, CCUGGU, CCUGUU, CCUUAA, CCUUAC, CCUUAG, CCUUAU, CCUUCG, CCUUGA,
CCUUGU, CCUUUA, CCUUUC, CCUUUU, CGAAAA, CGAAAC, CGAAAG, CGAAAU, CGAACA, CGAACC,
CGAACG, CGAACU, CGAAGA, CGAAGC, CGAAGG, CGAAGU, CGAAUA, CGAAUC, CGAAUG, CGAAUU,
CGACAA, CGACAC, CGACAU, CGACCA, CGACCU, CGACGA, CGACGC, CGACGG, CGACGU, CGACUA,
CGACUG, CGACUU, CGAGAA, CGAGAC, CGAGAG, CGAGAU, CGAGCA, CGAGCC, CGAGCG, CGAGCU,
CGAGGC, CGAGGG, CGAGGU, CGAGUA, CGAGUC, CGAGUG, CGAGUU, CGAUAA, CGAUAC, CGAUAG,
CGAUAU, CGAUCA, CGAUCC, CGAUCG, CGAUCU, CGAUGA, CGAUGC, CGAUGG, CGAUGU, CGAUUA,
CGAUUC, CGAUUG, CGAUUU, CGCAAA, CGCAAC, CGCAAG, CGCAAU, CGCACA, CGCACC, CGCACG,
CGCAGA, CGCAGC, CGCAGG, CGCAGU, CGCAUA, CGCAUC, CGCAUG, CGCAUU, CGCCAA, CGCCAC,
CGCCAG, CGCCAU, CGCCCA, CGCCCC, CGCCCG, CGCCGA, CGCCGC, CGCCGG, CGCCGU, CGCCUA,
CGCCUG, CGCCUU, CGCGAA, CGCGAC, CGCGAG, CGCGAU, CGCGCA, CGCGCC, CGCGCG, CGCGCU,
CGCGGA, CGCGGC, CGCGGG, CGCGGU, CGCGUA, CGCGUC, CGCGUG, CGCGUU, CGCUAA, CGCUAC,
CGCUAG, CGCUAU, CGCUCA, CGCUCC, CGCUCG, CGCUCU, CGCUGA, CGCUGC, CGCUGG, CGCUGU,
CGCUUA, CGCUUC, CGCUUG, CGGAAA, CGGAAC, CGGAAG, CGGACA, CGGACC, CGGACG, CGGACU,
CGGAGC, CGGAGG, CGGAGU, CGGAUA, CGGAUU, CGGCAA, CGGCAC, CGGCAG, CGGCCA, CGGCCC,
CGGCCG, CGGCGC, CGGCGG, CGGCGU, CGGCUA, CGGCUC, CGGCUG, CGGCUU, CGGGAA, CGGGAC,
CGGGAG, CGGGAU, CGGGCA, CGGGCC, CGGGCG, CGGGCU, CGGGGU, CGGGUA, CGGGUC, CGGGUG,
CGGUAA, CGGUAC, CGGUAG, CGGUAU, CGGUCA, CGGUCG, CGGUCU, CGGUGA, CGGUGG, CGGUGU,
CGGUUA, CGGUUC, CGGUUG, CGGUUU, CGUAAA, CGUAAC, CGUAAG, CGUAAU, CGUACA, CGUACG,
CGUACU, CGUAGA, CGUAGC, CGUAGG, CGUAGU, CGUAUA, CGUAUC, CGUAUG, CGUAUU, CGUCAA,
CGUCAC, CGUCAG, CGUCAU, CGUCCA, CGUCCC, CGUCCG, CGUCCU, CGUCGA, CGUCGG, CGUCGU,
CGUCUA, CGUCUC, CGUCUG, CGUCUU, CGUGAA, CGUGAC, CGUGAG, CGUGAU, CGUGCC, CGUGCG,
CGUGCU, CGUGGA, CGUGGG, CGUGGU, CGUGUA, CGUGUG, CGUUAA, CGUUAC, CGUUAG,
CGUUAU, CGUUCA, CGUUCC, CGUUCG, CGUUCU, CGUUGA, CGUUGC, CGUUGU, CGUUUA, CGUUUC,
CGUUUU, CUAAAA, CUAAAC, CUAAAU, CUAACA, CUAACC, CUAACG, CUAACU, CUAAGA, CUAAGC,
CUAAGU, CUAAUA, CUAAUC, CUAAUG, CUACAC, CUACAU, CUACCA, CUACCC, CUACCG, CUACCU,
CUACGA, CUACGC, CUACGG, CUACGU, CUACUA, CUACUC, CUACUG, CUAGAA, CUAGAG, CUAGAU,
CUAGCA, CUAGCC, CUAGCG, CUAGCU, CUAGGA, CUAGGG, CUAGGU, CUAGUG, CUAGUU, CUAUAA,
CUAUAG, CUAUAU, CUAUCA, CUAUCC, CUAUCG, CUAUCU, CUAUGA, CUAUGC, CUAUGG, CUAUGU,
CUAUUA, CUAUUG, CUCAAC, CUCAAG, CUCAAU, CUCACC, CUCACG, CUCAGC, CUCAUA, CUCAUC,
CUCAUG, CUCAUU, CUCCAC, CUCCCC, CUCCCG, CUCCGA, CUCCGC, CUCCGG, CUCCUA, CUCCUC,
CUCCUU, CUCGAA, CUCGAC, CUCGAG, CUCGAU, CUCGCA, CUCGCC, CUCGCG, CUCGGG, CUCGGU,
CUCGUA, CUCGUC, CUCGUG, CUCGUU, CUCUAA, CUCUAC, CUCUAU, CUCUCA, CUCUCC, CUCUCU,
CUCUGC, CUCUGU, CUCUUA, CUCUUG, CUGAAG, CUGACC, CUGACG, CUGAGC, CUGAUA, CUGAUC,
CUGCCG, CUGCCU, CUGCGA, CUGCUA, CUGCUU, CUGGAG, CUGGAU, CUGGCG, CUGGGU, CUGUAC,
CUGUCA, CUGUCC, CUGUCG, CUGUGG, CUGUGU, CUGUUA, CUGUUU, CUUAAC, CUUAAG, CUUAAU,
CUUACC, CUUACG, CUUAGA, CUUAGC, CUUAGG, CUUAGU, CUUAUA, CUUAUC, CUUAUG, CUUAUU,
CUUCAG, CUUCAU, CUUCCA, CUUCCC, CUUCCG, CUUCCU, CUUCGA, CUUCGC, CUUCGG, CUUCGU,
CUUCUA, CUUGAC, CUUGAG, CUUGAU, CUUGCA, CUUGCC, CUUGCG, CUUGCU, CUUGGC, CUUGGU,
CUUGUU, CUUUAC, CUUUAG, CUUUAU, CUUUCA, CUUUCG, CUUUCU, CUUUGA, CUUUGC, CUUUGU,
CUUUUA, CUUUUC, CUUUUG, CUUUUU, GAAAAA, GAAAAG, GAAAAU, GAAACC, GAAACG, GAAAGA,
GAAAGC, GAAAGU, GAAAUA, GAAAUC, GAAAUG, GAAAUU, GAACAA, GAACAC, GAACAG, GAACAU,
GAACCA, GAACCC, GAACCG, GAACCU, GAACGA, GAACGC, GAACGG, GAACGU, GAACUA, GAACUG,
GAACUU, GAAGAC, GAAGAG, GAAGCA, GAAGCG, GAAGCU, GAAGUC, GAAUAA, GAAUAC, GAAUAG,
GAAUAU, GAAUCC, GAAUCG, GAAUCU, GAAUGA, GAAUGC, GAAUGU, GAAUUA, GAAUUC, GAAUUU,
GACAAA, GACAAG, GACAAU, GACACC, GACAGA, GACAGG, GACAUA, GACAUG, GACAUU, GACCAA,
GACCAC, GACCAG, GACCCA, GACCCC, GACCCG, GACCGC, GACCGG, GACCGU, GACCUA, GACCUC,
GACCUU, GACGAA, GACGAC, GACGAG, GACGAU, GACGCA, GACGCC, GACGCG, GACGCU, GACGGA,
GACGGC, GACGGG, GACGGU, GACGUA, GACGUC, GACGUG, GACGUU, GACUAA, GACUAC, GACUAG,
GACUAU, GACUCA, GACUCC, GACUCG, GACUGG, GACUGU, GACUUA, GACUUG, GACUUU, GAGAAU,
GAGAGA, GAGAGC, GAGAGG, GAGAUA, GAGAUC, GAGCAA, GAGCAU, GAGCCA, GAGCGA, GAGCGG,
GAGCGU, GAGGGU, GAGGUC, GAGGUG, GAGUAA, GAGUAG, GAGUCC, GAGUUC, GAGUUU,
GAUAAA, GAUAAC, GAUAAG, GAUAAU, GAUACA, GAUACC, GAUACG, GAUACU, GAUAGA, GAUAGC,
GAUAGG, GAUAGU, GAUAUA, GAUCAA, GAUCAC, GAUCAU, GAUCCA, GAUCCC, GAUCCU, GAUCGC,
GAUCGG, GAUCGU, GAUCUA, GAUCUG, GAUCUU, GAUGAA, GAUGAC, GAUGAG, GAUGCA, GAUGCC,
GAUGCG, GAUGCU, GAUGGC, GAUGGG, GAUGGU, GAUGUG, GAUGUU, GAUUAA, GAUUAC,
GAUUAG, GAUUAU, GAUUCA, GAUUCG, GAUUCU, GAUUGA, GAUUGC, GAUUUA, GAUUUC,
GAUUUG, GAUUUU, GCAAAC, GCAAAG, GCAAAU, GCAACA, GCAACC, GCAAGC, GCAAGU, GCAAUA,
GCAAUC, GCAAUG, GCAAUU, GCACAA, GCACAC, GCACAG, GCACCC, GCACCG, GCACCU, GCACGA,
GCACGC, GCACGU, GCACUA, GCACUC, GCACUG, GCACUU, GCAGAU, GCAGCC, GCAGCG, GCAGGC,
GCAGUA, GCAGUC, GCAGUG, GCAGUU, GCAUAA, GCAUAG, GCAUAU, GCAUCG, GCAUCU, GCAUGA,
GCAUGC, GCAUGG, GCAUGU, GCAUUA, GCAUUC, GCAUUG, GCAUUU, GCCAAA, GCCAAC, GCCAAU,
GCCACA, GCCACC, GCCACG, GCCAGA, GCCAGU, GCCAUA, GCCAUC, GCCAUG, GCCAUU, GCCCAA,
GCCCAC, GCCCAG, GCCCCG, GCCCGA, GCCCGG, GCCCGU, GCCGAA, GCCGAC, GCCGAG, GCCGAU,
GCCGCA, GCCGCU, GCCGGA, GCCGGC, GCCGGG, GCCGGU, GCCGUA, GCCGUC, GCCGUG, GCCGUU,
GCCUAA, GCCUAU, GCCUCA, GCCUCC, GCCUCG, GCCUGA, GCCUUA, GCCUUU, GCGAAA, GCGAAC,
GCGAAG, GCGAAU, GCGACC, GCGACG, GCGACU, GCGAGA, GCGAGC, GCGAGG, GCGAGU, GCGAUA,
GCGAUC, GCGAUG, GCGAUU, GCGCAA, GCGCAC, GCGCAG, GCGCAU, GCGCCA, GCGCCC, GCGCCU,
GCGCGA, GCGCGU, GCGCUA, GCGCUC, GCGCUG, GCGCUU, GCGGAA, GCGGAC, GCGGAU, GCGGCA,
GCGGCC, GCGGCU, GCGGGA, GCGGUA, GCGGUC, GCGGUU, GCGUAA, GCGUAC, GCGUAG, GCGUAU,
GCGUCA, GCGUCC, GCGUCG, GCGUCU, GCGUGA, GCGUGC, GCGUGG, GCGUGU, GCGUUA, GCGUUC,
GCGUUG, GCGUUU, GCUAAA, GCUAAC, GCUAAG, GCUAAU, GCUACC, GCUACG, GCUACU, GCUAGA,
GCUAGG, GCUAGU, GCUAUA, GCUAUC, GCUAUU, GCUCAA, GCUCAC, GCUCAG, GCUCAU, GCUCCA,
GCUCCC, GCUCCG, GCUCGA, GCUCGC, GCUCGU, GCUCUA, GCUCUC, GCUCUU, GCUGAA, GCUGAC,
GCUGAU, GCUGCA, GCUGCC, GCUGCG, GCUGCU, GCUGUG, GCUGUU, GCUUAC, GCUUAG, GCUUAU,
GCUUCA, GCUUCG, GCUUGA, GCUUGG, GCUUGU, GCUUUA, GCUUUG, GGAAAG, GGAACA, GGAACC,
GGAACG, GGAACU, GGAAGU, GGAAUA, GGAAUC, GGAAUU, GGACAA, GGACAC, GGACAG, GGACAU,
GGACCG, GGACGA, GGACGC, GGACGU, GGACUA, GGACUC, GGACUU, GGAGAC, GGAGCA, GGAGCG,
GGAGGG, GGAGUA, GGAUAA, GGAUAC, GGAUCA, GGAUCC, GGAUCG, GGAUCU, GGAUGC, GGAUUA,
GGAUUG, GGCAAU, GGCACA, GGCACU, GGCAGA, GGCAUA, GGCAUC, GGCCAC, GGCCAG, GGCCCC,
GGCCGA, GGCCGC, GGCCGU, GGCCUA, GGCCUG, GGCCUU, GGCGAA, GGCGAG, GGCGAU, GGCGCA,
GGCGCU, GGCGGU, GGCGUA, GGCGUC, GGCGUG, GGCGUU, GGCUAA, GGCUAC, GGCUAG, GGCUAU,
GGCUCC, GGCUCG, GGCUGA, GGCUUA, GGCUUC, GGCUUG, GGGAAU, GGGACA, GGGAGA, GGGAGU,
GGGAUA, GGGAUU, GGGCAA, GGGCAC, GGGCAG, GGGCCG, GGGCGG, GGGGCC, GGGGGG,
GGGGGU, GGGGUA, GGGUAC, GGGUAU, GGGUCA, GGGUCC, GGGUCG, GGGUGA, GGGUGC,
GGGUUA, GGGUUG, GGUAAA, GGUAAC, GGUAAG, GGUAAU, GGUACA, GGUACC, GGUACG,
GGUACU, GGUAGC, GGUAGG, GGUAGU, GGUAUA, GGUAUC, GGUAUG, GGUCAA, GGUCAC,
GGUCAG, GGUCAU, GGUCCA, GGUCCG, GGUCCU, GGUCGA, GGUCGC, GGUCGG, GGUCGU, GGUCUC,
GGUCUU, GGUGAA, GGUGAC, GGUGAU, GGUGCA, GGUGCC, GGUGGC, GGUGUA, GGUGUC,
GGUUAA, GGUUAG, GGUUAU, GGUUCA, GGUUCC, GGUUCG, GGUUGC, GGUUUC, GGUUUU,
GUAAAA, GUAAAG, GUAAAU, GUAACC, GUAACG, GUAACU, GUAAGA, GUAAGC, GUAAGG, GUAAGU,
GUAAUA, GUAAUC, GUAAUG, GUAAUU, GUACAA, GUACAC, GUACAG, GUACAU, GUACCA, GUACCC,
GUACCG, GUACCU, GUACGA, GUACGC, GUACGG, GUACGU, GUACUA, GUACUC, GUACUG, GUACUU,
GUAGAA, GUAGAC, GUAGCA, GUAGCC, GUAGCG, GUAGCU, GUAGGA, GUAGGC, GUAGGG,
GUAGGU, GUAGUA, GUAGUC, GUAUAA, GUAUAC, GUAUAG, GUAUAU, GUAUCA, GUAUCG,
GUAUCU, GUAUGA, GUAUGC, GUAUGG, GUAUUA, GUAUUG, GUAUUU, GUCAAA, GUCAAG,
GUCAAU, GUCACA, GUCACC, GUCACG, GUCAGA, GUCAGC, GUCAGG, GUCAUA, GUCAUC, GUCAUG,
GUCCAA, GUCCAC, GUCCAU, GUCCCC, GUCCCU, GUCCGA, GUCCGC, GUCCGG, GUCCGU, GUCCUA,
GUCCUG, GUCCUU, GUCGAA, GUCGAC, GUCGAG, GUCGAU, GUCGCA, GUCGCC, GUCGCG, GUCGCU,
GUCGGA, GUCGGC, GUCGGG, GUCGGU, GUCGUA, GUCGUC, GUCGUU, GUCUAA, GUCUAG, GUCUCA,
GUCUCC, GUCUCG, GUCUGA, GUCUGG, GUCUGU, GUCUUC, GUCUUU, GUGAAA, GUGAAC, GUGAAG,
GUGACC, GUGACG, GUGAGA, GUGAGC, GUGAGU, GUGAUC, GUGAUG, GUGAUU, GUGCAC,
GUGCAU, GUGCCC, GUGCCG, GUGCGA, GUGCGG, GUGCGU, GUGCUA, GUGCUC, GUGCUG,
GUGGAG, GUGGCG, GUGGCU, GUGGGU, GUGGUC, GUGGUG, GUGUAA, GUGUAG, GUGUCG,
GUGUGA, GUGUGC, GUGUGU, GUGUUG, GUGUUU, GUUAAA, GUUAAC, GUUAAG, GUUACA,
GUUACC, GUUACG, GUUACU, GUUAGA, GUUAGC, GUUAGU, GUUAUA, GUUAUC, GUUAUG,
GUUAUU, GUUCAA, GUUCAC, GUUCAG, GUUCCA, GUUCCG, GUUCGA, GUUCGC, GUUCGG, GUUCGU,
GUUCUA, GUUCUG, GUUGAA, GUUGAC, GUUGAG, GUUGAU, GUUGCG, GUUGCU, GUUGGA,
GUUGGC, GUUGGU, GUUGUC, GUUGUG, GUUGUU, GUUUAA, GUUUAC, GUUUAG, GUUUAU,
GUUUCA, GUUUCC, GUUUCU, GUUUGA, GUUUGC, GUUUGG, GUUUGU, GUUUUA, GUUUUC,
GUUUUU, UAAAAA, UAAAAC, UAAAAG, UAAAAU, UAAACA, UAAACC, UAAACG, UAAACU, UAAAGA,
UAAAGG, UAAAGU, UAAAUA, UAAAUC, UAAAUG, UAAAUU, UAACAA, UAACAC, UAACAG, UAACCA,
UAACCC, UAACCG, UAACCU, UAACGA, UAACGC, UAACGG, UAACGU, UAACUA, UAACUG, UAACUU,
UAAGAG, UAAGAU, UAAGCA, UAAGCC, UAAGCG, UAAGCU, UAAGGA, UAAGGC, UAAGGG, UAAGGU,
UAAGUA, UAAGUC, UAAGUG, UAAGUU, UAAUAA, UAAUCA, UAAUCC, UAAUCG, UAAUCU, UAAUGA,
UAAUGG, UAAUGU, UAAUUA, UAAUUC, UAAUUG, UACAAC, UACAAG, UACAAU, UACACC, UACACG,
UACACU, UACAGA, UACAGC, UACAUA, UACAUC, UACAUU, UACCAA, UACCAC, UACCAG, UACCAU,
UACCCC, UACCCG, UACCCU, UACCGA, UACCGC, UACCGG, UACCGU, UACCUA, UACCUG, UACGAA,
UACGAC, UACGAG, UACGAU, UACGCA, UACGCC, UACGCG, UACGCU, UACGGC, UACGGG, UACGGU,
UACGUA, UACGUC, UACGUG, UACGUU, UACUAA, UACUAC, UACUAG, UACUAU, UACUCA, UACUCC,
UACUCG, UACUCU, UACUGA, UACUGC, UACUGG, UACUUA, UACUUG, UACUUU, UAGAAA, UAGAAG,
UAGAAU, UAGACA, UAGACG, UAGAGA, UAGAGC, UAGAGU, UAGAUA, UAGAUC, UAGAUG, UAGCAU,
UAGCCC, UAGCCG, UAGCCU, UAGCGA, UAGCGC, UAGCGU, UAGCUA, UAGCUC, UAGCUG, UAGGAA,
UAGGAU, UAGGCG, UAGGCU, UAGGGU, UAGGUC, UAGGUG, UAGGUU, UAGUAA, UAGUAC,
UAGUAG, UAGUAU, UAGUCA, UAGUCG, UAGUGU, UAGUUA, UAGUUC, UAGUUG, UAGUUU,
UAUAAC, UAUAAG, UAUACU, UAUAGA, UAUAGC, UAUAGG, UAUAGU, UAUAUA, UAUAUC, UAUAUG,
UAUAUU, UAUCAA, UAUCAC, UAUCAU, UAUCCA, UAUCCC, UAUCCG, UAUCCU, UAUCGA, UAUCGC,
UAUCGG, UAUCGU, UAUCUA, UAUCUC, UAUCUG, UAUCUU, UAUGAA, UAUGAC, UAUGAG,
UAUGAU, UAUGCA, UAUGCG, UAUGCU, UAUGGA, UAUGGC, UAUGUC, UAUGUG, UAUGUU,
UAUUAG, UAUUCA, UAUUCC, UAUUCG, UAUUCU, UAUUGA, UAUUGG, UAUUUA, UAUUUC,
UAUUUG, UAUUUU, UCAAAA, UCAAAC, UCAAAG, UCAACC, UCAACU, UCAAGA, UCAAGC, UCAAUA,
UCAAUC, UCAAUG, UCAAUU, UCACCC, UCACCG, UCACCU, UCACGA, UCACGC, UCACGG, UCACGU,
UCACUA, UCACUC, UCACUU, UCAGAA, UCAGAC, UCAGAG, UCAGCG, UCAGCU, UCAGGA, UCAGGC,
UCAGGU, UCAGUC, UCAGUU, UCAUAA, UCAUCA, UCAUCC, UCAUCG, UCAUGC, UCAUGG, UCAUGU,
UCAUUA, UCAUUG, UCCAAA, UCCAAC, UCCAAG, UCCAAU, UCCACA, UCCACC, UCCACG, UCCAGC,
UCCAGG, UCCAUA, UCCAUC, UCCAUU, UCCCAA, UCCCAG, UCCCAU, UCCCCC, UCCCCG, UCCCCU,
UCCCGA, UCCCGC, UCCCGG, UCCCGU, UCCCUA, UCCCUC, UCCGAA, UCCGAC, UCCGAG, UCCGAU,
UCCGCA, UCCGCC, UCCGGA, UCCGGC, UCCGGU, UCCGUA, UCCGUC, UCCGUG, UCCUAA, UCCUCA,
UCCUCG, UCCUCU, UCCUGC, UCCUGU, UCCUUA, UCCUUC, UCCUUU, UCGAAA, UCGAAC, UCGAAG,
UCGAAU, UCGACA, UCGACC, UCGACG, UCGACU, UCGAGA, UCGAGC, UCGAGG, UCGAUA, UCGAUC,
UCGAUG, UCGAUU, UCGCAA, UCGCAC, UCGCAG, UCGCAU, UCGCCA, UCGCCC, UCGCCG, UCGCCU,
UCGCGA, UCGCGC, UCGCGU, UCGCUA, UCGCUC, UCGGAA, UCGGAC, UCGGAG, UCGGAU, UCGGCA,
UCGGCU, UCGGGG, UCGGGU, UCGGUC, UCGGUG, UCGGUU, UCGUAA, UCGUAC, UCGUAG,
UCGUAU, UCGUCA, UCGUCC, UCGUCG, UCGUCU, UCGUGA, UCGUGU, UCGUUA, UCGUUC, UCGUUG,
UCGUUU, UCUAAC, UCUAAG, UCUAAU, UCUACA, UCUACC, UCUACG, UCUACU, UCUAGC, UCUAGG,
UCUAGU, UCUAUA, UCUAUC, UCUAUG, UCUAUU, UCUCAG, UCUCAU, UCUCCG, UCUCGC, UCUCGG,
UCUCGU, UCUCUC, UCUGAA, UCUGAU, UCUGCA, UCUGCG, UCUGCU, UCUGGC, UCUGGU, UCUGUC,
UCUGUG, UCUGUU, UCUUAA, UCUUAC, UCUUAG, UCUUAU, UCUUCA, UCUUCC, UCUUCG, UCUUCU,
UCUUGC, UCUUGG, UCUUGU, UCUUUA, UCUUUC, UCUUUG, UCUUUU, UGAAAA, UGAAAC,
UGAACA, UGAACC, UGAAGG, UGAAUC, UGAAUG, UGACAA, UGACAC, UGACAG, UGACCA, UGACCC,
UGACCG, UGACGA, UGACGC, UGACGG, UGACGU, UGACUA, UGACUC, UGACUU, UGAGAG, UGAGAU,
UGAGCA, UGAGCC, UGAGCU, UGAGGC, UGAGGU, UGAGUA, UGAGUU, UGAUAC, UGAUAG,
UGAUAU, UGAUCA, UGAUCG, UGAUCU, UGAUGA, UGAUGC, UGAUGG, UGAUGU, UGAUUA,
UGAUUC, UGAUUG, UGAUUU, UGCAAC, UGCAAG, UGCACA, UGCACG, UGCAGG, UGCAGU, UGCAUC,
UGCCCA, UGCCCC, UGCCCG, UGCCGA, UGCCGC, UGCCGG, UGCCGU, UGCCUA, UGCCUC, UGCCUG,
UGCCUU, UGCGAA, UGCGAC, UGCGAU, UGCGCC, UGCGCG, UGCGCU, UGCGGC, UGCGGG, UGCGGU,
UGCGUA, UGCGUC, UGCGUG, UGCGUU, UGCUAC, UGCUAU, UGCUCC, UGCUCG, UGCUGC, UGCUGG,
UGCUGU, UGCUUA, UGCUUU, UGGAAC, UGGAAG, UGGAGC, UGGAUC, UGGAUU, UGGCAA,
UGGCAC, UGGCAG, UGGCCG, UGGCCU, UGGCGA, UGGCGC, UGGCGU, UGGCUA, UGGCUC, UGGCUU,
UGGGAA, UGGGCA, UGGGCC, UGGGGC, UGGGUC, UGGUAA, UGGUAG, UGGUAU, UGGUCC,
UGGUCG, UGGUCU, UGGUGA, UGGUGC, UGGUGG, UGGUGU, UGGUUA, UGGUUG, UGUAAA,
UGUAAC, UGUAAG, UGUACC, UGUACG, UGUACU, UGUAGA, UGUAGC, UGUAGU, UGUAUC,
UGUAUU, UGUCAA, UGUCAC, UGUCAG, UGUCAU, UGUCCA, UGUCCC, UGUCCG, UGUCGA, UGUCGC,
UGUCGG, UGUCGU, UGUCUA, UGUCUC, UGUGAC, UGUGAG, UGUGAU, UGUGCA, UGUGGU,
UGUGUA, UGUGUU, UGUUAC, UGUUAG, UGUUAU, UGUUCA, UGUUCC, UGUUCG, UGUUGG,
UGUUGU, UGUUUA, UGUUUC, UGUUUG, UGUUUU, UUAAAA, UUAAAC, UUAAAG, UUAAAU,
UUAACC, UUAACG, UUAACU, UUAAGU, UUAAUA, UUAAUC, UUAAUG, UUAAUU, UUACAA, UUACAC,
UUACAG, UUACAU, UUACCA, UUACCC, UUACCG, UUACCU, UUACGA, UUACGC, UUACGG, UUACGU,
UUACUA, UUACUC, UUACUG, UUACUU, UUAGAA, UUAGAC, UUAGCC, UUAGCG, UUAGCU, UUAGGC,
UUAGGU, UUAGUA, UUAGUC, UUAGUU, UUAUAA, UUAUAC, UUAUAG, UUAUAU, UUAUCC,
UUAUCG, UUAUCU, UUAUGA, UUAUGG, UUAUGU, UUAUUA, UUAUUC, UUAUUG, UUAUUU,
UUCAAC, UUCAAU, UUCACA, UUCACC, UUCACG, UUCACU, UUCAGC, UUCAGG, UUCAGU, UUCAUA,
UUCAUC, UUCAUG, UUCAUU, UUCCAA, UUCCCA, UUCCCG, UUCCGA, UUCCGU, UUCCUU, UUCGAA,
UUCGAC, UUCGAG, UUCGAU, UUCGCA, UUCGCC, UUCGCG, UUCGCU, UUCGGA, UUCGGC, UUCGGG,
UUCGGU, UUCGUA, UUCGUC, UUCGUG, UUCGUU, UUCUAC, UUCUAG, UUCUCA, UUCUCG,
UUCUGG, UUCUUA, UUCUUU, UUGAAA, UUGAAC, UUGAAG, UUGAAU, UUGACC, UUGACG,
UUGACU, UUGAGA, UUGAGC, UUGAGU, UUGAUA, UUGAUC, UUGAUG, UUGAUU, UUGCAA,
UUGCAC, UUGCAG, UUGCAU, UUGCCC, UUGCCG, UUGCGA, UUGCGC, UUGCGG, UUGCGU, UUGCUA,
UUGCUC, UUGCUG, UUGCUU, UUGGAA, UUGGAG, UUGGCC, UUGGCG, UUGGCU, UUGGGC,
UUGGGU, UUGGUA, UUGGUG, UUGUAA, UUGUAC, UUGUCA, UUGUCG, UUGUCU, UUGUGC,
UUGUGG, UUGUUA, UUGUUG, UUGUUU, UUUAAA, UUUAAC, UUUAAG, UUUAAU, UUUACA,
UUUACC, UUUACG, UUUACU, UUUAGA, UUUAGC, UUUAGG, UUUAGU, UUUAUA, UUUAUC,
UUUAUG, UUUAUU, UUUCAU, UUUCCA, UUUCCG, UUUCCU, UUUCGA, UUUCGC, UUUCGG,
UUUCGU, UUUCUA, UUUCUC, UUUCUG, UUUCUU, UUUGAA, UUUGAC, UUUGAG, UUUGAU,
UUUGCC, UUUGCU, UUUGGA, UUUGGC, UUUGGG, UUUGGU, UUUGUA, UUUGUC, UUUGUU,
UUUUAA, UUUUAG, UUUUAU, UUUUCC, UUUUCG, UUUUCU, UUUUGA, UUUUGC, UUUUGG,
UUUUGU, UUUUUA, UUUUUC, UUUUUU

TABLE 2
Experimental evaluation of single stranded oligonucleotides.

| | Oligo | | Avg RQ | | | | | Time | Assay |
|---|---|---|---|---|---|---|---|---|---|
| Seq ID | Name | Avg RQ | SD | Target | Probe | [oligo] | cell line | (hr) | Type |
| 45714 | unc- | 1 | 0 | FOXP3 | FOXP3 | 10000 | huTcell+ | 48 | qRTPCR |
| | 293 | | | | | | | | |
| | m01 | | | | | | | | |
| | Ctrl Un | 0.86831487 | 0.28399334 | FOXP3 | FOXP3 | 10000 | huTcell+ | 48 | qRTPCR |
| 42428 | FOXP3- | 3.04123508 | 1.41567948 | FOXP3 | FOXP3 | 10000 | huTcell+ | 48 | qRTPCR |
| | 01 m01 | | | | | | | | |
| 42429 | FOXP3- | 0.8050441 | 0.10470739 | FOXP3 | FOXP3 | 10000 | huTcell+ | 48 | qRTPCR |
| | 02 m01 | | | | | | | | |
| 42431 | FOXP3- | 0.60289195 | 0.00365975 | FOXP3 | FOXP3 | 10000 | huTcell+ | 48 | qRTPCR |
| | 03 m01 | | | | | | | | |
| 42427 | FOXP3- | 2.00872837 | 0.5894724 | FOXP3 | FOXP3 | 10000 | huTcell+ | 48 | qRTPCR |
| | 04 m01 | | | | | | | | |
| 42426 | FOXP3- | 3.63267026 | 0.40296967 | FOXP3 | FOXP3 | 10000 | huTcell+ | 48 | qRTPCR |
| | 05 m01 | | | | | | | | |
| 42420 | FOXP3- | 3.7983637 | 0.18781968 | FOXP3 | FOXP3 | 10000 | huTcell+ | 48 | qRTPCR |
| | 06 m01 | | | | | | | | |
| 42381 | FOXP3- | 1.93225341 | 0.78123517 | FOXP3 | FOXP3 | 10000 | huTcell+ | 48 | qRTPCR |
| | 07 m01 | | | | | | | | |
| 42862 | FOXP3- | 3.1661807 | 0.03834323 | FOXP3 | FOXP3 | 10000 | huTcell+ | 48 | qRTPCR |
| | 08 m01 | | | | | | | | |
| 42861 | FOXP3- | 1.90576687 | 0.66711136 | FOXP3 | FOXP3 | 10000 | huTcell+ | 48 | qRTPCR |
| | 09 m01 | | | | | | | | |
| 42859 | FOXP3- | 1.86380551 | 0.08363845 | FOXP3 | FOXP3 | 10000 | huTcell+ | 48 | qRTPCR |
| | 10 m01 | | | | | | | | |
| 42858 | FOXP3- | 3.13763788 | 1.08606849 | FOXP3 | FOXP3 | 10000 | huTcell+ | 48 | qRTPCR |
| | 11 m01 | | | | | | | | |
| 42854 | FOXP3- | 1.91683566 | 0.19100954 | FOXP3 | FOXP3 | 10000 | huTcell+ | 48 | qRTPCR |
| | 12 m01 | | | | | | | | |
| 41897 | FOXP3- | 3.82088674 | 0.32436208 | FOXP3 | FOXP3 | 10000 | huTcell+ | 48 | qRTPCR |
| | 13 m01 | | | | | | | | |
| 41052 | FOXP3- | 1.71924737 | 0.28439737 | FOXP3 | FOXP3 | 10000 | huTcell+ | 48 | qRTPCR |
| | 14 m01 | | | | | | | | |
| 41877 | FOXP3- | 1.68978766 | 0.05339158 | FOXP3 | FOXP3 | 10000 | huTcell+ | 48 | qRTPCR |
| | 15 m01 | | | | | | | | |
| 43243 | FOXP3- | 1.32422504 | 0.11241901 | FOXP3 | FOXP3 | 10000 | huTcell+ | 48 | qRTPCR |
| | 16 m01 | | | | | | | | |
| 43375 | FOXP3- | 2.96627721 | 0.80602523 | FOXP3 | FOXP3 | 10000 | huTcell+ | 48 | qRTPCR |
| | 17 m01 | | | | | | | | |
| 43376 | FOXP3- | 2.48879558 | 0.31376938 | FOXP3 | FOXP3 | 10000 | huTcell+ | 48 | qRTPCR |
| | 18 m01 | | | | | | | | |
| 43379 | FOXP3- | 1.62176367 | 0.07036153 | FOXP3 | FOXP3 | 10000 | huTcell+ | 48 | qRTPCR |
| | 19 m01 | | | | | | | | |
| 43380 | FOXP3- | 0.98364872 | 0.35941408 | FOXP3 | FOXP3 | 10000 | huTcell+ | 48 | qRTPCR |
| | 20 m01 | | | | | | | | |
| 43381 | FOXP3- | 2.42135072 | 0.86070806 | FOXP3 | FOXP3 | 10000 | huTcell+ | 48 | qRTPCR |
| | 21 m01 | | | | | | | | |
| 43216 | FOXP3- | 4.40567095 | 0.52743242 | FOXP3 | FOXP3 | 10000 | huTcell+ | 48 | qRTPCR |
| | 22 m01 | | | | | | | | |
| 43215 | FOXP3- | 5.25941152 | 1.28342081 | FOXP3 | FOXP3 | 10000 | huTcell+ | 48 | qRTPCR |
| | 23 m01 | | | | | | | | |
| 43209 | FOXP3- | 0.84410485 | 0.11625078 | FOXP3 | FOXP3 | 10000 | huTcell+ | 48 | qRTPCR |
| | 24 m01 | | | | | | | | |
| 43207 | FOXP3- | 1.97006843 | 0.70813234 | FOXP3 | FOXP3 | 10000 | huTcell+ | 48 | qRTPCR |
| | 25 m01 | | | | | | | | |
| 43205 | FOXP3- | 1.41020745 | 0.5560462 | FOXP3 | FOXP3 | 10000 | huTcell+ | 48 | qRTPCR |
| | 26 m01 | | | | | | | | |
| 43204 | FOXP3- | 2.31376112 | 0.88936632 | FOXP3 | FOXP3 | 10000 | huTcell+ | 48 | qRTPCR |
| | 27 m01 | | | | | | | | |
| 43203 | FOXP3- | 2.31114582 | 0.95718326 | FOXP3 | FOXP3 | 10000 | huTcell+ | 48 | qRTPCR |
| | 28 m01 | | | | | | | | |
| 42533 | FOXP3- | 2.42133228 | 0.8569018 | FOXP3 | FOXP3 | 10000 | huTcell+ | 48 | qRTPCR |
| | 29 m01 | | | | | | | | |
| 42535 | FOXP3- | 2.84205507 | 0.73556048 | FOXP3 | FOXP3 | 10000 | huTcell+ | 48 | qRTPCR |
| | 30 m01 | | | | | | | | |
| 42580 | FOXP3- | 1.68295946 | 0.31974715 | FOXP3 | FOXP3 | 10000 | huTcell+ | 48 | qRTPCR |
| | 31 m01 | | | | | | | | |
| 42579 | FOXP3- | 1.8023751 | 0.3645291 | FOXP3 | FOXP3 | 10000 | huTcell+ | 48 | qRTPCR |
| | 32 m01 | | | | | | | | |
| 42578 | FOXP3- | 1.50499095 | 0.35245102 | FOXP3 | FOXP3 | 10000 | huTcell+ | 48 | qRTPCR |
| | 33 m01 | | | | | | | | |
| 42576 | FOXP3- | 1.55410054 | 0.47399665 | FOXP3 | FOXP3 | 10000 | huTcell+ | 48 | qRTPCR |
| | 34 m01 | | | | | | | | |
| 42575 | FOXP3- | 1.94173584 | 0.79237942 | FOXP3 | FOXP3 | 10000 | huTcell+ | 48 | qRTPCR |
| | 35 m01 | | | | | | | | |
| 42574 | FOXP3- | 1.78502753 | 0.56168053 | FOXP3 | FOXP3 | 10000 | huTcell+ | 48 | qRTPCR |
| | 36 m01 | | | | | | | | |
| 42572 | FOXP3- | 1.18497696 | 0.63819605 | FOXP3 | FOXP3 | 10000 | huTcell+ | 48 | qRTPCR |
| | 37 m01 | | | | | | | | |
| 42571 | FOXP3- | 2.8387527 | 0.16520034 | FOXP3 | FOXP3 | 10000 | huTcell+ | 48 | qRTPCR |
| | 38 m01 | | | | | | | | |
| 42570 | FOXP3- | 2.10550749 | 0.99999309 | FOXP3 | FOXP3 | 10000 | huTcell+ | 48 | qRTPCR |
| | 39 m01 | | | | | | | | |
| 42569 | FOXP3- | 2.16167457 | 0.41220644 | FOXP3 | FOXP3 | 10000 | huTcell+ | 48 | qRTPCR |
| | 40 m01 | | | | | | | | |
| 42568 | FOXP3- | 2.15960714 | 0.14639811 | FOXP3 | FOXP3 | 10000 | huTcell+ | 48 | qRTPCR |
| | 41 m01 | | | | | | | | |
| 42567 | FOXP3- | 2.01961568 | 0.24503396 | FOXP3 | FOXP3 | 10000 | huTcell+ | 48 | qRTPCR |
| | 42 m01 | | | | | | | | |
| 43447 | FOXP3- | 1.40341903 | 0.43004175 | FOXP3 | FOXP3 | 10000 | huTcell+ | 48 | qRTPCR |
| | 43 m01 | | | | | | | | |
| 43450 | FOXP3- | 2.68263331 | 0.86376389 | FOXP3 | FOXP3 | 10000 | huTcell+ | 48 | qRTPCR |
| | 44 m01 | | | | | | | | |
| 43452 | FOXP3- | 1.29728052 | 0.07607689 | FOXP3 | FOXP3 | 10000 | huTcell+ | 48 | qRTPCR |
| | 45 m01 | | | | | | | | |
| 43455 | FOXP3- | 1.69333468 | 0.28727806 | FOXP3 | FOXP3 | 10000 | huTcell+ | 48 | qRTPCR |
| | 46 m01 | | | | | | | | |
| 43456 | FOXP3- | 3.98814452 | 1.11553672 | FOXP3 | FOXP3 | 10000 | huTcell+ | 48 | qRTPCR |
| | 47 m01 | | | | | | | | |
| 43458 | FOXP3- | 1.6118209 | 0.51299822 | FOXP3 | FOXP3 | 10000 | huTcell+ | 48 | qRTPCR |
| | 48 m01 | | | | | | | | |
| 43459 | FOXP3- | 2.71141213 | 0.83492691 | FOXP3 | FOXP3 | 10000 | huTcell+ | 48 | qRTPCR |
| | 49 m01 | | | | | | | | |
| 36466 | FOXP3- | 5.67570129 | 0.17800894 | FOXP3 | FOXP3 | 10000 | huTcell+ | 48 | qRTPCR |
| | 50 m01 | | | | | | | | |
| 36439 | FOXP3- | 0.77547248 | 0.11344935 | FOXP3 | FOXP3 | 10000 | huTcell+ | 48 | qRTPCR |
| | 51 m01 | | | | | | | | |
| 36437 | FOXP3- | 1.66635528 | 0.18881864 | FOXP3 | FOXP3 | 10000 | huTcell+ | 48 | qRTPCR |
| | 52 m01 | | | | | | | | |
| 29244 | FOXP3- | 4.78589887 | 0.05731016 | FOXP3 | FOXP3 | 10000 | huTcell+ | 48 | qRTPCR |
| | 53 m01 | | | | | | | | |
| 29253 | FOXP3- | 1.49697594 | 0.51286873 | FOXP3 | FOXP3 | 10000 | huTcell+ | 48 | qRTPCR |
| | 54 m01 | | | | | | | | |
| 41675 | FOXP3- | 1.34388255 | 0.16698218 | FOXP3 | FOXP3 | 10000 | huTcell+ | 48 | qRTPCR |
| | 55 m01 | | | | | | | | |
| 43610 | FOXP3- | 3.19719516 | 0.03774779 | FOXP3 | FOXP3 | 10000 | huTcell+ | 48 | qRTPCR |
| | 56 m01 | | | | | | | | |
| 43612 | FOXP3- | 1.16023805 | 0.63606665 | FOXP3 | FOXP3 | 10000 | huTcell+ | 48 | qRTPCR |
| | 57 m01 | | | | | | | | |
| 43613 | FOXP3- | 1.32913775 | 0.75851478 | FOXP3 | FOXP3 | 10000 | huTcell+ | 48 | qRTPCR |
| | 58 m01 | | | | | | | | |
| 43616 | FOXP3- | 0.69574924 | 0.28991794 | FOXP3 | FOXP3 | 10000 | huTcell+ | 48 | qRTPCR |
| | 59 m01 | | | | | | | | |
| 40694 | FOXP3- | 1.43965065 | 0.31103627 | FOXP3 | FOXP3 | 10000 | huTcell+ | 48 | qRTPCR |
| | 60 m01 | | | | | | | | |
| 45714 | unc- | 1 | 0 | FOXP3 | FOXP3 | 10000 | huTcell+ | 48 | qRTPCR |
| | 293 | | | | | | | | |
| | m01 | | | | | | | | |
| | Ctrl Un | 1.01249113 | 0.14941646 | FOXP3 | FOXP3 | 10000 | huTcell+ | 48 | qRTPCR |
| 42428 | FOXP3- | 1.01421223 | 0.20838028 | FOXP3 | FOXP3 | 10000 | huTcell+ | 48 | qRTPCR |
| | 01 m01 | | | | | | | | |
| 42429 | FOXP3- | 0.80548151 | 0.16301023 | FOXP3 | FOXP3 | 10000 | huTcell+ | 48 | qRTPCR |
| | 02 m01 | | | | | | | | |
| 42431 | FOXP3- | 1.85375015 | 0.49859871 | FOXP3 | FOXP3 | 10000 | huTcell+ | 48 | qRTPCR |
| | 03 m01 | | | | | | | | |
| 42427 | FOXP3- | 1.03803618 | 0.30098857 | FOXP3 | FOXP3 | 10000 | huTcell+ | 48 | qRTPCR |
| | 04 m01 | | | | | | | | |
| 42426 | FOXP3- | 1.18949951 | 0.33746604 | FOXP3 | FOXP3 | 10000 | huTcell+ | 48 | qRTPCR |
| | 05 m01 | | | | | | | | |
| 42420 | FOXP3- | 1.49213089 | 0.3555691 | FOXP3 | FOXP3 | 10000 | huTcell+ | 48 | qRTPCR |
| | 06 m01 | | | | | | | | |
| 42381 | FOXP3- | 1.04465779 | 0.20591828 | FOXP3 | FOXP3 | 10000 | huTcell+ | 48 | qRTPCR |
| | 07 m01 | | | | | | | | |
| 42862 | FOXP3- | 1.20846974 | 0.30870018 | FOXP3 | FOXP3 | 10000 | huTcell+ | 48 | qRTPCR |
| | 08 m01 | | | | | | | | |
| 42861 | FOXP3- | 1.06823309 | 0.01223336 | FOXP3 | FOXP3 | 10000 | huTcell+ | 48 | qRTPCR |
| | 09 m01 | | | | | | | | |
| 42859 | FOXP3- | 1.18996991 | 1.00158697 | FOXP3 | FOXP3 | 10000 | huTcell+ | 48 | qRTPCR |
| | 10 m01 | | | | | | | | |
| 42858 | FOXP3- | 1.01995327 | 0.24692075 | FOXP3 | FOXP3 | 10000 | huTcell+ | 48 | qRTPCR |
| | 11 m01 | | | | | | | | |
| 42854 | FOXP3- | 0.9671974 | 0.33340657 | FOXP3 | FOXP3 | 10000 | huTcell+ | 48 | qRTPCR |
| | 12 m01 | | | | | | | | |
| 41897 | FOXP3- | 2.08618587 | 0.97479621 | FOXP3 | FOXP3 | 10000 | huTcell+ | 48 | qRTPCR |
| | 13 m01 | | | | | | | | |
| 41052 | FOXP3- | 1.56270566 | 0.50779572 | FOXP3 | FOXP3 | 10000 | huTcell+ | 48 | qRTPCR |
| | 14 m01 | | | | | | | | |
| 41877 | FOXP3- | 1.24448641 | 0.38126836 | FOXP3 | FOXP3 | 10000 | huTcell+ | 48 | qRTPCR |
| | 15 m01 | | | | | | | | |
| 43243 | FOXP3- | 1.09482815 | 0.12860521 | FOXP3 | FOXP3 | 10000 | huTcell+ | 48 | qRTPCR |
| | 16 m01 | | | | | | | | |
| 43375 | FOXP3- | 0.75611626 | 0.06899775 | FOXP3 | FOXP3 | 10000 | huTcell+ | 48 | qRTPCR |
| | 17 m01 | | | | | | | | |
| 43376 | FOXP3- | 1.38423343 | 0.23242212 | FOXP3 | FOXP3 | 10000 | huTcell+ | 48 | qRTPCR |
| | 18 m01 | | | | | | | | |
| 43379 | FOXP3- | 2.23219084 | 0.48397258 | FOXP3 | FOXP3 | 10000 | huTcell+ | 48 | qRTPCR |
| | 19 m01 | | | | | | | | |
| 43380 | FOXP3- | 0.77319797 | 0.12468607 | FOXP3 | FOXP3 | 10000 | huTcell+ | 48 | qRTPCR |
| | 20 m01 | | | | | | | | |
| 43381 | FOXP3- | 0.92951965 | 0.36167181 | FOXP3 | FOXP3 | 10000 | huTcell+ | 48 | qRTPCR |
| | 21 m01 | | | | | | | | |
| 43216 | FOXP3- | 2.19209374 | 0.33354356 | FOXP3 | FOXP3 | 10000 | huTcell+ | 48 | qRTPCR |
| | 22 m01 | | | | | | | | |
| 43215 | FOXP3- | 4.60769744 | 1.32033965 | FOXP3 | FOXP3 | 10000 | huTcell+ | 48 | qRTPCR |
| | 23 m01 | | | | | | | | |
| 43209 | FOXP3- | 0.18862818 | 0.07780705 | FOXP3 | FOXP3 | 10000 | huTcell+ | 48 | qRTPCR |
| | 24 m01 | | | | | | | | |
| 43207 | FOXP3- | 0.53198871 | 0.0250394 | FOXP3 | FOXP3 | 10000 | huTcell+ | 48 | qRTPCR |
| | 25 m01 | | | | | | | | |
| 43205 | FOXP3- | 0.78569731 | 0.05157862 | FOXP3 | FOXP3 | 10000 | huTcell+ | 48 | qRTPCR |
| | 26 m01 | | | | | | | | |
| 43204 | FOXP3- | 1.4702824 | 0.16242886 | FOXP3 | FOXP3 | 10000 | huTcell+ | 48 | qRTPCR |
| | 27 m01 | | | | | | | | |
| 43203 | FOXP3- | 1.83244549 | 0.15170473 | FOXP3 | FOXP3 | 10000 | huTcell+ | 48 | qRTPCR |
| | 28 m01 | | | | | | | | |
| 42533 | FOXP3- | 2.14671471 | 0.65415214 | FOXP3 | FOXP3 | 10000 | huTcell+ | 48 | qRTPCR |
| | 29 m01 | | | | | | | | |
| 42535 | FOXP3- | 1.98183515 | 0.70000334 | FOXP3 | FOXP3 | 10000 | huTcell+ | 48 | qRTPCR |
| | 30 m01 | | | | | | | | |
| 42580 | FOXP3- | 0.80553315 | 0.36415893 | FOXP3 | FOXP3 | 10000 | huTcell+ | 48 | qRTPCR |
| | 31 m01 | | | | | | | | |
| 42579 | FOXP3- | 1.11788013 | 0.41330598 | FOXP3 | FOXP3 | 10000 | huTcell+ | 48 | qRTPCR |
| | 32 m01 | | | | | | | | |
| 42578 | FOXP3- | 1.52166183 | 0.81182555 | FOXP3 | FOXP3 | 10000 | huTcell+ | 48 | qRTPCR |
| | 33 m01 | | | | | | | | |
| 42576 | FOXP3- | 0.90079369 | 0.36068588 | FOXP3 | FOXP3 | 10000 | huTcell+ | 48 | qRTPCR |
| | 34 m01 | | | | | | | | |
| 42575 | FOXP3- | 0.9535541 | 0.34234744 | FOXP3 | FOXP3 | 10000 | huTcell+ | 48 | qRTPCR |
| | 35 m01 | | | | | | | | |
| 42574 | FOXP3- | 0.76441529 | 0.28279382 | FOXP3 | FOXP3 | 10000 | huTcell+ | 48 | qRTPCR |
| | 36 m01 | | | | | | | | |
| 42572 | FOXP3- | 1.49147643 | 0.15811177 | FOXP3 | FOXP3 | 10000 | huTcell+ | 48 | qRTPCR |
| | 37 m01 | | | | | | | | |
| 42571 | FOXP3- | 1.66272868 | 0.71072917 | FOXP3 | FOXP3 | 10000 | huTcell+ | 48 | qRTPCR |
| | 38 m01 | | | | | | | | |
| 42570 | FOXP3- | 2.12350232 | 0.20077097 | FOXP3 | FOXP3 | 10000 | huTcell+ | 48 | qRTPCR |
| | 39 m01 | | | | | | | | |
| 42569 | FOXP3- | 1.24001965 | 0.27790611 | FOXP3 | FOXP3 | 10000 | huTcell+ | 48 | qRTPCR |
| | 40 m01 | | | | | | | | |
| 42568 | FOXP3- | 1.99692286 | 1.69550223 | FOXP3 | FOXP3 | 10000 | huTcell+ | 48 | qRTPCR |
| | 41 m01 | | | | | | | | |
| 42567 | FOXP3- | 0.78743477 | 0.19946904 | FOXP3 | FOXP3 | 10000 | huTcell+ | 48 | qRTPCR |
| | 42 m01 | | | | | | | | |
| 43447 | FOXP3- | 0.7247555 | 0.18846039 | FOXP3 | FOXP3 | 10000 | huTcell+ | 48 | qRTPCR |
| | 43 m01 | | | | | | | | |
| 43450 | FOXP3- | 1.08905435 | 0.03216293 | FOXP3 | FOXP3 | 10000 | huTcell+ | 48 | qRTPCR |
| | 44 m01 | | | | | | | | |
| 43452 | FOXP3- | 1.13227275 | 0.48605068 | FOXP3 | FOXP3 | 10000 | huTcell+ | 48 | qRTPCR |
| | 45 m01 | | | | | | | | |
| 43455 | FOXP3- | 0.66689557 | 0.13950169 | FOXP3 | FOXP3 | 10000 | huTcell+ | 48 | qRTPCR |
| | 46 m01 | | | | | | | | |
| 43456 | FOXP3- | 1.62059627 | 0.2706113 | FOXP3 | FOXP3 | 10000 | huTcell+ | 48 | qRTPCR |
| | 47 m01 | | | | | | | | |
| 43458 | FOXP3- | 1.42062488 | 0.47050077 | FOXP3 | FOXP3 | 10000 | huTcell+ | 48 | qRTPCR |
| | 48 m01 | | | | | | | | |
| 43459 | FOXP3- | 5.04482435 | 0.75486048 | FOXP3 | FOXP3 | 10000 | huTcell+ | 48 | qRTPCR |
| | 49 m01 | | | | | | | | |
| 36466 | FOXP3- | 1.75784419 | 0.20278994 | FOXP3 | FOXP3 | 10000 | huTcell+ | 48 | qRTPCR |
| | 50 m01 | | | | | | | | |
| 36439 | FOXP3- | 0.5987679 | 0.19284557 | FOXP3 | FOXP3 | 10000 | huTcell+ | 48 | qRTPCR |
| | 51 m01 | | | | | | | | |
| 36437 | FOXP3- | 1.51000454 | 0.49882253 | FOXP3 | FOXP3 | 10000 | huTcell+ | 48 | qRTPCR |
| | 52 m01 | | | | | | | | |
| 29244 | FOXP3- | 1.56079422 | 0.22121849 | FOXP3 | FOXP3 | 10000 | huTcell+ | 48 | qRTPCR |
| | 53 m01 | | | | | | | | |
| 29253 | FOXP3- | 1.77819386 | 0.12532551 | FOXP3 | FOXP3 | 10000 | huTcell+ | 48 | qRTPCR |
| | 54 m01 | | | | | | | | |
| 41675 | FOXP3- | 0.74694704 | 0.04752939 | FOXP3 | FOXP3 | 10000 | huTcell+ | 48 | qRTPCR |
| | 55 m01 | | | | | | | | |
| 43610 | FOXP3- | 1.45116927 | 0.30495519 | FOXP3 | FOXP3 | 10000 | huTcell+ | 48 | qRTPCR |
| | 56 m01 | | | | | | | | |
| 43612 | FOXP3- | 0.67204413 | 0.26697083 | FOXP3 | FOXP3 | 10000 | huTcell+ | 48 | qRTPCR |
| | 57 m01 | | | | | | | | |
| 43613 | FOXP3- | 1.25708457 | 0.37514513 | FOXP3 | FOXP3 | 10000 | huTcell+ | 48 | qRTPCR |
| | 58 m01 | | | | | | | | |
| 43616 | FOXP3- | 2.24905264 | 0.0058918 | FOXP3 | FOXP3 | 10000 | huTcell+ | 48 | qRTPCR |
| | 59 m01 | | | | | | | | |
| 40694 | FOXP3- | 0.1994952 | 0.08969861 | FOXP3 | FOXP3 | 10000 | huTcell+ | 48 | qRTPCR |
| | 60 m01 | | | | | | | | |
| 41897 | FOXP3- | 1 | 0 | FOXP3 | FOXP3 | 0 | huTcell+ | 48 | qRTPCR |
| | 13 m01 | | | | | | | | |
| 41897 | FOXP3- | 0.87329521 | 0.15304712 | FOXP3 | FOXP3 | 32 | huTcell+ | 48 | qRTPCR |
| | 13 m01 | | | | | | | | |
| 41897 | FOXP3- | 1.41798849 | 0.0846702 | FOXP3 | FOXP3 | 160 | huTcell+ | 48 | qRTPCR |
| | 13 m01 | | | | | | | | |
| 41897 | FOXP3- | 0.83850744 | 0.33181934 | FOXP3 | FOXP3 | 800 | huTcell+ | 48 | qRTPCR |
| | 13 m01 | | | | | | | | |
| 41897 | FOXP3- | 2.23789843 | 0.93765398 | FOXP3 | FOXP3 | 4000 | huTcell+ | 48 | qRTPCR |
| | 13 m01 | | | | | | | | |
| 41897 | FOXP3- | 2.65002339 | 0.27289354 | FOXP3 | FOXP3 | 20000 | huTcell+ | 48 | qRTPCR |
| | 13 m01 | | | | | | | | |
| 43216 | FOXP3- | 1 | 0 | FOXP3 | FOXP3 | 0 | huTcell+ | 48 | qRTPCR |
| | 22 m01 | | | | | | | | |
| 43216 | FOXP3- | 0.79454623 | 0.10611272 | FOXP3 | FOXP3 | 32 | huTcell+ | 48 | qRTPCR |
| | 22 m01 | | | | | | | | |
| 43216 | FOXP3- | 1.08080897 | 0.23718635 | FOXP3 | FOXP3 | 160 | huTcell+ | 48 | qRTPCR |
| | 22 m01 | | | | | | | | |
| 43216 | FOXP3- | 0.76560804 | 0.00085315 | FOXP3 | FOXP3 | 800 | huTcell+ | 48 | qRTPCR |
| | 22 m01 | | | | | | | | |
| 43216 | FOXP3- | 9.52683765 | 0.25045621 | FOXP3 | FOXP3 | 4000 | huTcell+ | 48 | qRTPCR |
| | 22 m01 | | | | | | | | |
| 43216 | FOXP3- | 34.6761694 | 10.0353302 | FOXP3 | FOXP3 | 20000 | huTcell+ | 48 | qRTPCR |
| | 22 m01 | | | | | | | | |
| 43215 | FOXP3- | 1 | 0 | FOXP3 | FOXP3 | 0 | huTcell+ | 48 | qRTPCR |
| | 23 m01 | | | | | | | | |
| 43215 | FOXP3- | 2.25679314 | 1.7897399 | FOXP3 | FOXP3 | 32 | huTcell+ | 48 | qRTPCR |
| | 23 m01 | | | | | | | | |
| 43215 | FOXP3- | 1.41376849 | 0.84244148 | FOXP3 | FOXP3 | 160 | huTcell+ | 48 | qRTPCR |
| | 23 m01 | | | | | | | | |
| 43215 | FOXP3- | 3.44934969 | 0.18645628 | FOXP3 | FOXP3 | 800 | huTcell+ | 48 | qRTPCR |
| | 23 m01 | | | | | | | | |
| 43215 | FOXP3- | 2.60472728 | 0.24143156 | FOXP3 | FOXP3 | 4000 | huTcell+ | 48 | qRTPCR |
| | 23 m01 | | | | | | | | |
| 43215 | FOXP3- | 21.9984023 | 7.3981651 | FOXP3 | FOXP3 | 20000 | huTcell+ | 48 | qRTPCR |
| | 23 m01 | | | | | | | | |
| 43203 | FOXP3- | 1 | 0 | FOXP3 | FOXP3 | 0 | huTcell+ | 48 | qRTPCR |
| | 28 m01 | | | | | | | | |
| 43203 | FOXP3- | 1.03758152 | 0.13252612 | FOXP3 | FOXP3 | 32 | huTcell+ | 48 | qRTPCR |
| | 28 m01 | | | | | | | | |
| 43203 | FOXP3- | 0.88229811 | 0.34622482 | FOXP3 | FOXP3 | 160 | huTcell+ | 48 | qRTPCR |
| | 28 m01 | | | | | | | | |
| 43203 | FOXP3- | 3.65532124 | 3.11662006 | FOXP3 | FOXP3 | 800 | huTcell+ | 48 | qRTPCR |
| | 28 m01 | | | | | | | | |
| 43203 | FOXP3- | 1.96077256 | 0.8421269 | FOXP3 | FOXP3 | 4000 | huTcell+ | 48 | qRTPCR |
| | 28 m01 | | | | | | | | |
| 43203 | FOXP3- | 2.39760299 | 0.64192758 | FOXP3 | FOXP3 | 20000 | huTcell+ | 48 | qRTPCR |
| | 28 m01 | | | | | | | | |
| 42533 | FOXP3- | 1 | | FOXP3 | FOXP3 | 0 | huTcell+ | 48 | qRTPCR |
| | 29 m01 | | | | | | | | |
| 42533 | FOXP3- | 1.16880692 | | FOXP3 | FOXP3 | 32 | huTcell+ | 48 | qRTPCR |
| | 29 m01 | | | | | | | | |
| 42533 | FOXP3- | 1.2862768 | | FOXP3 | FOXP3 | 160 | huTcell+ | 48 | qRTPCR |
| | 29 m01 | | | | | | | | |
| 42533 | FOXP3- | 1.19650249 | | FOXP3 | FOXP3 | 800 | huTcell+ | 48 | qRTPCR |
| | 29 m01 | | | | | | | | |
| 42533 | FOXP3- | 1.09113218 | | FOXP3 | FOXP3 | 4000 | huTcell+ | 48 | qRTPCR |
| | 29 m01 | | | | | | | | |
| 42533 | FOXP3- | 5.31900948 | | FOXP3 | FOXP3 | 20000 | huTcell+ | 48 | qRTPCR |
| | 29 m01 | | | | | | | | |
| 42535 | FOXP3- | 1 | 0 | FOXP3 | FOXP3 | 0 | huTcell+ | 48 | qRTPCR |
| | 30 m01 | | | | | | | | |
| 42535 | FOXP3- | 0.57034656 | 0.32569034 | FOXP3 | FOXP3 | 32 | huTcell+ | 48 | qRTPCR |
| | 30 m01 | | | | | | | | |
| 42535 | FOXP3- | 0.99605844 | 0.77613072 | FOXP3 | FOXP3 | 160 | huTcell+ | 48 | qRTPCR |
| | 30 m01 | | | | | | | | |
| 42535 | FOXP3- | 0.68412094 | 0.42571495 | FOXP3 | FOXP3 | 800 | huTcell+ | 48 | qRTPCR |
| | 30 m01 | | | | | | | | |
| 42535 | FOXP3- | 1.39510325 | 0.05068993 | FOXP3 | FOXP3 | 4000 | huTcell+ | 48 | qRTPCR |
| | 30 m01 | | | | | | | | |
| 42535 | FOXP3- | 4.50897649 | 2.92595793 | FOXP3 | FOXP3 | 20000 | huTcell+ | 48 | qRTPCR |
| | 30 m01 | | | | | | | | |
| 43459 | FOXP3- | 1 | 0 | FOXP3 | FOXP3 | 0 | huTcell+ | 48 | qRTPCR |
| | 49 m01 | | | | | | | | |
| 43459 | FOXP3- | 1.18302438 | 0.48418155 | FOXP3 | FOXP3 | 32 | huTcell+ | 48 | qRTPCR |
| | 49 m01 | | | | | | | | |
| 43459 | FOXP3- | 1.63764765 | 0.11633382 | FOXP3 | FOXP3 | 160 | huTcell+ | 48 | qRTPCR |
| | 49 m01 | | | | | | | | |
| 43459 | FOXP3- | 2.39939746 | 1.31928791 | FOXP3 | FOXP3 | 800 | huTcell+ | 48 | qRTPCR |
| | 49 m01 | | | | | | | | |
| 43459 | FOXP3- | 3.73578628 | 0.74676582 | FOXP3 | FOXP3 | 4000 | huTcell+ | 48 | qRTPCR |
| | 49 m01 | | | | | | | | |
| 43459 | FOXP3- | 2.79836436 | 0.09852596 | FOXP3 | FOXP3 | 20000 | huTcell+ | 48 | qRTPCR |
| | 49 m01 | | | | | | | | |
| 36466 | FOXP3- | 1 | 0 | FOXP3 | FOXP3 | 0 | huTcell+ | 48 | qRTPCR |
| | 50 m01 | | | | | | | | |
| 36466 | FOXP3- | 1.13875449 | 0.0813526 | FOXP3 | FOXP3 | 32 | huTcell+ | 48 | qRTPCR |
| | 50 m01 | | | | | | | | |
| 36466 | FOXP3- | 1.03665859 | 0.67548254 | FOXP3 | FOXP3 | 160 | huTcell+ | 48 | qRTPCR |
| | 50 m01 | | | | | | | | |
| 36466 | FOXP3- | 1.26553217 | 0.04819054 | FOXP3 | FOXP3 | 800 | huTcell+ | 48 | qRTPCR |
| | 50 m01 | | | | | | | | |
| 36466 | FOXP3- | 2.11758319 | 0.01763026 | FOXP3 | FOXP3 | 4000 | huTcell+ | 48 | qRTPCR |
| | 50 m01 | | | | | | | | |
| 36466 | FOXP3- | 1.81747187 | 0.80710599 | FOXP3 | FOXP3 | 20000 | huTcell+ | 48 | qRTPCR |
| | 50 m01 | | | | | | | | |
| 41897 | FOXP3- | 1 | 0 | FOXP3 | IL2RA | 0 | huTcell+ | 48 | qRTPCR |
| | 13 m01 | | | | | | | | |
| 41897 | FOXP3- | 1 | 0 | FOXP3 | GITR | 0 | huTcell+ | 48 | qRTPCR |
| | 13 m01 | | | | | | | | |
| 41897 | FOXP3- | 0.52501902 | 0.04814779 | FOXP3 | IL2RA | 4000 | huTcell+ | 48 | qRTPCR |
| | 13 m01 | | | | | | | | |
| 41897 | FOXP3- | 2.18467964 | 0.04677421 | FOXP3 | GITR | 4000 | huTcell+ | 48 | qRTPCR |
| | 13 m01 | | | | | | | | |
| 43216 | FOXP3- | 1 | 0 | FOXP3 | IL2RA | 0 | huTcell+ | 48 | qRTPCR |
| | 22 m01 | | | | | | | | |
| 43216 | FOXP3- | 1 | 0 | FOXP3 | GITR | 0 | huTcell+ | 48 | qRTPCR |
| | 22 m01 | | | | | | | | |
| 43216 | FOXP3- | 0.53622332 | 0.00683636 | FOXP3 | IL2RA | 4000 | huTcell+ | 48 | qRTPCR |
| | 22 m01 | | | | | | | | |
| 43216 | FOXP3- | 1.24288249 | 0.5601923 | FOXP3 | GITR | 4000 | huTcell+ | 48 | qRTPCR |
| | 22 m01 | | | | | | | | |
| 43215 | FOXP3- | 1 | | FOXP3 | IL2RA | 0 | huTcell+ | 48 | qRTPCR |
| | 23 m01 | | | | | | | | |
| 43215 | FOXP3- | 1 | 0 | FOXP3 | GITR | 0 | huTcell+ | 48 | qRTPCR |
| | 23 m01 | | | | | | | | |
| 43215 | FOXP3- | 0.49775779 | 0.022437 | FOXP3 | IL2RA | 4000 | huTcell+ | 48 | qRTPCR |
| | 23 m01 | | | | | | | | |
| 43215 | FOXP3- | 1.81662608 | 0.25980483 | FOXP3 | GITR | 4000 | huTcell+ | 48 | qRTPCR |
| | 23 m01 | | | | | | | | |
| 43203 | FOXP3- | 1 | 0 | FOXP3 | IL2RA | 0 | huTcell+ | 48 | qRTPCR |
| | 28 m01 | | | | | | | | |
| 43203 | FOXP3- | 1 | 0 | FOXP3 | GITR | 0 | huTcell+ | 48 | qRTPCR |
| | 28 m01 | | | | | | | | |
| 43203 | FOXP3- | 0.57528551 | 0.01462293 | FOXP3 | IL2RA | 4000 | huTcell+ | 48 | qRTPCR |
| | 28 m01 | | | | | | | | |
| 43203 | FOXP3- | 1.80449429 | 0.42917742 | FOXP3 | GITR | 4000 | huTcell+ | 48 | qRTPCR |
| | 28 m01 | | | | | | | | |
| 42533 | FOXP3- | 1 | 0 | FOXP3 | IL2RA | 0 | huTcell+ | 48 | qRTPCR |
| | 29 m01 | | | | | | | | |
| 42533 | FOXP3- | 1 | 0 | FOXP3 | GITR | 0 | huTcell+ | 48 | qRTPCR |
| | 29 m01 | | | | | | | | |
| 42533 | FOXP3- | 0.94465714 | 0.14681686 | FOXP3 | IL2RA | 4000 | huTcell+ | 48 | qRTPCR |
| | 29 m01 | | | | | | | | |
| 42533 | FOXP3- | 1.10066946 | 0.14692655 | FOXP3 | GITR | 4000 | huTcell+ | 48 | qRTPCR |
| | 29 m01 | | | | | | | | |
| 42535 | FOXP3- | 1 | 0 | FOXP3 | IL2RA | 0 | huTcell+ | 48 | qRTPCR |
| | 30 m01 | | | | | | | | |
| 42535 | FOXP3- | 1 | 0 | FOXP3 | GITR | 0 | huTcell+ | 48 | qRTPCR |
| | 30 m01 | | | | | | | | |
| 42535 | FOXP3- | 0.60238158 | 0.10681676 | FOXP3 | IL2RA | 4000 | huTcell+ | 48 | qRTPCR |
| | 30 m01 | | | | | | | | |
| 42535 | FOXP3- | 1.16496654 | 0.0896547 | FOXP3 | GITR | 4000 | huTcell+ | 48 | qRTPCR |
| | 30 m01 | | | | | | | | |
| 43459 | FOXP3- | 1 | 0 | FOXP3 | IL2RA | 0 | huTcell+ | 48 | qRTPCR |
| | 49 m01 | | | | | | | | |
| 43459 | FOXP3- | 1 | 0 | FOXP3 | GITR | 0 | huTcell+ | 48 | qRTPCR |
| | 49 m01 | | | | | | | | |
| 43459 | FOXP3- | 0.98563279 | 0 | FOXP3 | IL2RA | 4000 | huTcell+ | 48 | qRTPCR |
| | 49 m01 | | | | | | | | |
| 43459 | FOXP3- | 0.42633761 | 0.14166645 | FOXP3 | GITR | 4000 | huTcell+ | 48 | qRTPCR |
| | 49 m01 | | | | | | | | |
| 36466 | FOXP3- | 1 | 0 | FOXP3 | IL2RA | 0 | huTcell+ | 48 | qRTPCR |
| | 50 m01 | | | | | | | | |
| 36466 | FOXP3- | 1 | 0 | FOXP3 | GITR | 0 | huTcell+ | 48 | qRTPCR |
| | 50 m01 | | | | | | | | |
| 36466 | FOXP3- | 0.72010675 | 0.14187437 | FOXP3 | IL2RA | 4000 | huTcell+ | 48 | qRTPCR |
| | 50 m01 | | | | | | | | |
| 36466 | FOXP3- | 0.42291963 | 0.44260683 | FOXP3 | GITR | 4000 | huTcell+ | 48 | qRTPCR |
| | 50 m01 | | | | | | | | |
| 41897 | FOXP3- | 1 | 0 | FOXP3 | IL10 | 0 | huTcell+ | 48 | qRTPCR |
| | 13 m01 | | | | | | | | |
| 41897 | FOXP3- | 0.2719813 | 0.14740902 | FOXP3 | IL10 | 4000 | huTcell+ | 48 | qRTPCR |
| | 13 m01 | | | | | | | | |
| 43216 | FOXP3- | 1 | 0 | FOXP3 | IL10 | 0 | huTcell+ | 48 | qRTPCR |
| | 22 m01 | | | | | | | | |
| 43216 | FOXP3- | 0.45881437 | 0.11316447 | FOXP3 | IL10 | 4000 | huTcell+ | 48 | qRTPCR |
| | 22 m01 | | | | | | | | |
| 43215 | FOXP3- | 1 | 0 | FOXP3 | IL10 | 0 | huTcell+ | 48 | qRTPCR |
| | 23 m01 | | | | | | | | |
| 43215 | FOXP3- | 0.44853129 | 0.2508683 | FOXP3 | IL10 | 4000 | huTcell+ | 48 | qRTPCR |
| | 23 m01 | | | | | | | | |
| 43203 | FOXP3- | 1 | 0 | FOXP3 | IL10 | 0 | huTcell+ | 48 | qRTPCR |
| | 28 m01 | | | | | | | | |
| 43203 | FOXP3- | 0.64629725 | 0.69484085 | FOXP3 | IL10 | 4000 | huTcell+ | 48 | qRTPCR |
| | 28 m01 | | | | | | | | |
| 42533 | FOXP3- | 1 | 0 | FOXP3 | IL10 | 0 | huTcell+ | 48 | qRTPCR |
| | 29 m01 | | | | | | | | |
| 42533 | FOXP3- | 0.78210159 | 0.09875678 | FOXP3 | IL10 | 4000 | huTcell+ | 48 | qRTPCR |
| | 29 m01 | | | | | | | | |
| 42535 | FOXP3- | 1 | 0 | FOXP3 | IL10 | 0 | huTcell+ | 48 | qRTPCR |
| | 30 m01 | | | | | | | | |
| 42535 | FOXP3- | 0.22048642 | 0.18358706 | FOXP3 | IL10 | 4000 | huTcell+ | 48 | qRTPCR |
| | 30 m01 | | | | | | | | |
| 43459 | FOXP3- | 1 | 0 | FOXP3 | IL10 | 0 | huTcell+ | 48 | qRTPCR |
| | 49 m01 | | | | | | | | |
| 43459 | FOXP3- | 0.51181181 | 0.14571517 | FOXP3 | IL10 | 4000 | huTcell+ | 48 | qRTPCR |
| | 49 m01 | | | | | | | | |
| 36466 | FOXP3- | 1 | 0 | FOXP3 | IL10 | 0 | huTcell+ | 48 | qRTPCR |
| | 50 m01 | | | | | | | | |
| 36466 | FOXP3- | 0.22783415 | 0.04265941 | FOXP3 | IL10 | 4000 | huTcell+ | 48 | qRTPCR |
| | 50 m01 | | | | | | | | |
| 41897 | FOXP3- | 1 | 0 | FOXP3 | CCDC22 | 0 | huTcell+ | 48 | qRTPCR |
| | 13 m01 | | | | | | | | |
| 41897 | FOXP3- | 0.99497325 | 0.11794901 | FOXP3 | CCDC22 | 4000 | huTcell+ | 48 | qRTPCR |
| | 13 m01 | | | | | | | | |
| 43216 | FOXP3- | 1 | 0 | FOXP3 | CCDC22 | 0 | huTcell+ | 48 | qRTPCR |
| | 22 m01 | | | | | | | | |
| 43216 | FOXP3- | 1.91996125 | 0.51849461 | FOXP3 | CCDC22 | 4000 | huTcell+ | 48 | qRTPCR |
| | 22 m01 | | | | | | | | |
| 43215 | FOXP3- | 1 | 0 | FOXP3 | CCDC22 | 0 | huTcell+ | 48 | qRTPCR |
| | 23 m01 | | | | | | | | |
| 43215 | FOXP3- | 2.02080353 | 0.04661423 | FOXP3 | CCDC22 | 4000 | huTcell+ | 48 | qRTPCR |
| | 23 m01 | | | | | | | | |
| 43203 | FOXP3- | 1 | 0 | FOXP3 | CCDC22 | 0 | huTcell+ | 48 | qRTPCR |
| | 28 m01 | | | | | | | | |
| 43203 | FOXP3- | 1.08719018 | 0.38056095 | FOXP3 | CCDC22 | 4000 | huTcell+ | 48 | qRTPCR |
| | 28 m01 | | | | | | | | |
| 42533 | FOXP3- | 1 | 0 | FOXP3 | CCDC22 | 0 | huTcell+ | 48 | qRTPCR |
| | 29 m01 | | | | | | | | |
| 42533 | FOXP3- | 0.95815978 | 0.06806494 | FOXP3 | CCDC22 | 4000 | huTcell+ | 48 | qRTPCR |
| | 29 m01 | | | | | | | | |
| 42535 | FOXP3- | 1 | 0 | FOXP3 | CCDC22 | 0 | huTcell+ | 48 | qRTPCR |
| | 30 m01 | | | | | | | | |
| 42535 | FOXP3- | 0.7900138 | 0.03245348 | FOXP3 | CCDC22 | 4000 | huTcell+ | 48 | qRTPCR |
| | 30 m01 | | | | | | | | |
| 43459 | FOXP3- | 1 | 0 | FOXP3 | CCDC22 | 0 | huTcell+ | 48 | qRTPCR |
| | 49 m01 | | | | | | | | |
| 43459 | FOXP3- | 0.83390492 | 0.43203537 | FOXP3 | CCDC22 | 4000 | huTcell+ | 48 | qRTPCR |
| | 49 m01 | | | | | | | | |
| 36466 | FOXP3- | 1 | 0 | FOXP3 | CCDC22 | 0 | huTcell+ | 48 | qRTPCR |
| | 50 m01 | | | | | | | | |
| 36466 | FOXP3- | 0.36224221 | 0.06333645 | FOXP3 | CCDC22 | 4000 | huTcell+ | 48 | qRTPCR |
| | 50 m01 | | | | | | | | |

TABLE 3
A listing of oligonucleotide modifications

| Symbol | Feature Description |
|---|---|
| bio | 5′ biotin |
| dAs | DNA w/3′ thiophosphate |
| dCs | DNA w/3′ thiophosphate |
| dGs | DNA w/3′ thiophosphate |
| dTs | DNA w/3′ thiophosphate |
| dG | DNA w/3′ phosphate |
| dT | DNA w/3′ phosphate |
| dU | deoxyuridine w/3′ phosphate |
| d5mCs | deoxy-5-methylcytidine w/3′ thiophosphate |
| enaAs | ENA w/3′ thiophosphate |
| enaCs | ENA w/3′ thiophosphate |
| enaGs | ENA w/3′ thiophosphate |
| enaTs | ENA w/3′ thiophosphate |
| fluAs | 2′-fluoro w/3′ thiophosphate |
| fluCs | 2′-fluoro w/3′ thiophosphate |
| fluGs | 2′-fluoro w/3′ thiophosphate |
| fluUs | 2′-fluoro w/3′ thiophosphate |
| InaAs | LNA w/3′ thiophosphate |
| InaCs | LNA w/3′ thiophosphate |
| InaGs | LNA w/3′ thiophosphate |
| InaTs | LNA w/3′ thiophosphate |
| omeAs | 2′-OMe w/3′ thiophosphate |
| omeCs | 2′-OMe w/3′ thiophosphate |
| omeGs | 2′-OMe w/3′ thiophosphate |
| omeTs | 2′-OMe w/3′ thiophosphate |
| InaAs-Sup | LNA w/3′ thiophosphate at 3′ terminus |
| InaCs-Sup | LNA w/3′ thiophosphate at 3′ terminus |
| InaGs-Sup | LNA w/3′ thiophosphate at 3′ terminus |
| InaTs-Sup | LNA w/3′ thiophosphate at 3′ terminus |
| InaA-Sup | LNA w/3′ OH at 3′ terminus |
| InaC-Sup | LNA w/3′ OH at 3′ terminus |
| InaG-Sup | LNA w/3′ OH at 3′ terminus |
| InaT-Sup | LNA w/3′ OH at 3′ terminus |
| omeA-Sup | 2′-OMe w/3′ OH at 3′ terminus |
| omeC-Sup | 2′-OMe w/3′ OH at 3′ terminus |
| omeG-Sup | 2′-OMe w/3′ OH at 3′ terminus |
| omeU-Sup | 2′-OMe w/3′ OH at 3′ terminus |
| dAs-Sup | DNA w/3′ thiophosphate at 3′ terminus |
| dCs-Sup | DNA w/3′ thiophosphate at 3′ terminus |
| dGs-Sup | DNA w/3′ thiophosphate at 3′ terminus |
| dTs-Sup | DNA w/3′ thiophosphate at 3′ terminus |
| dA-Sup | DNA w/3′ OH at 3′ terminus |
| dC-Sup | DNA w/3′ OH at 3′ terminus |
| dG-Sup | DNA w/3′ OH at 3′ terminus |
| dT-Sup | DNA w/3′ OH at 3′ terminus |
| dU | deoxyuridine w/3′ OH at 3′ terminus |
| rA | RNA w/3′ phosphate |
| rC | RNA w/3′ phosphate |
| rG | RNA w/3′ phosphate |
| rU | RNA w/3′ phosphate |

TABLE 4
Formatted oligonucleotide sequences showing nucleotide modifications.

| OligoID | Base Sequence | Formatted Sequence | SeqID |
|---|---|---|---|
| FOXP3-01 | CCTCGATGGTC | lnaCs; omeCs; lnaTs; omeCs; lnaGs; omeAs; lnaTs; omeGs; lnaGs; | 42428 |
| m01 | TGGA | omeUs; lnaCs; omeUs; lnaGs; omeGs; lnaA-Sup | |
| FOXP3-02 | CTCGATGGTCT | lnaCs; omeUs; lnaCs; omeGs; lnaAs; omeUs; lnaGs; omeGs; lnaTs; | 42429 |
| m01 | GGAT | omeCs; lnaTs; omeGs; lnaGs; omeAs; lnaT-Sup | |
| FOXP3-03 | CGATGGTCTGG | lnaCs; omeGs; lnaAs; omeUs; lnaGs; omeGs; lnaTs; omeCs; lnaTs; | 42431 |
| m01 | ATGA | omeGs; lnaGs; omeAs; lnaTs; omeGs; lnaA-Sup | |
| FOXP3-04 | TCCTCGATGGT | lnaTs; omeCs; lnaCs; omeUs; lnaCs; omeGs; lnaAs; omeUs; lnaGs; | 42427 |
| m01 | CTGG | omeGs; lnaTs; omeCs; lnaTs; omeGs; lnaG-Sup | |
| FOXP3-05 | GTCCTCGATGG | lnaGs; omeUs; lnaCs; omeCs; lnaTs; omeCs; lnaGs; omeAs; lnaTs; | 42426 |
| m01 | TCTG | omeGs; lnaGs; omeUs; lnaCs; omeUs; lnaG-Sup | |
| FOXP3-06 | GCCTGTGTCCT | lnaGs; omeCs; lnaCs; omeUs; lnaGs; omeUs; lnaGs; omeUs; lnaCs; | 42420 |
| m01 | CGAT | omeCs; lnaTs; omeCs; lnaGs; omeAs; lnaT-Sup | |
| FOXP3-07 | CACCTGCTCCT | lnaCs; omeAs; lnaCs; omeCs; lnaTs; omeGs; lnaCs; omeUs; lnaCs; | 42381 |
| m01 | CGAG | omeCs; lnaTs; omeCs; lnaGs; omeAs; lnaG-Sup | |
| FOXP3-08 | ATCAGTCACCG | lnaAs; omeUs; lnaCs; omeAs; lnaGs; omeUs; lnaCs; omeAs; lnaCs; | 42862 |
| m01 | CAAA | omeCs; lnaGs; omeCs; lnaAs; omeAs; lnaA-Sup | |
| FOXP3-09 | CATCAGTCACC | lnaCs; omeAs; lnaTs; omeCs; lnaAs; omeGs; lnaTs; omeCs; lnaAs; | 42861 |
| m01 | GCAA | omeCs; lnaCs; omeGs; lnaCs; omeAs; lnaA-Sup | |
| FOXP3-10 | CTCATCAGTCA | lnaCs; omeUs; lnaCs; omeAs; lnaTs; omeCs; lnaAs; omeGs; lnaTs; | 42859 |
| m01 | CCGC | omeCs; lnaAs; omeCs; lnaCs; omeGs; lnaC-Sup | |
| FOXP3-11 | GCTCATCAGTC | lnaGs; omeCs; lnaTs; omeCs; lnaAs; omeUs; lnaCs; omeAs; lnaGs; | 42858 |
| m01 | ACCG | omeUs; lnaCs; omeAs; lnaCs; omeCs; lnaG-Sup | |
| FOXP3-12 | ACAAGCTCATC | lnaAs; omeCs; lnaAs; omeAs; lnaGs; omeCs; lnaTs; omeCs; lnaAs; | 42854 |
| m01 | AGTC | omeUs; lnaCs; omeAs; lnaGs; omeUs; lnaC-Sup | |
| FOXP3-13 | GCTCGGTAGTC | lnaGs; omeCs; lnaTs; omeCs; lnaGs; omeGs; lnaTs; omeAs; lnaGs; | 41897 |
| m01 | CTCC | omeUs; lnaCs; omeCs; lnaTs; omeCs; lnaC-Sup | |
| FOXP3-14 | AGAGCCTTCAC | lnaAs; omeGs; lnaAs; omeGs; lnaCs; omeCs; lnaTs; omeUs; lnaCs: | 41052 |
| m01 | AACC | omeAs; lnaCs; omeAs; lnaAs; omeCs; lnaC-Sup | |
| FOXP3-15 | CAGCGTTCTCC | lnaCs; omeAs; lnaGs; omeCs; lnaGs; omeUs; lnaTs; omeCs; lnaTs: | 41877 |
| m01 | TGGC | omeCs; lnaCs; omeUs; lnaGs; omeGs; lnaC-Sup | |
| FOXP3-16 | GTGTAGGCCAG | lnaGs; omeUs; lnaGs; omeUs; lnaAs; omeGs; lnaGs; omeCs; lnaCs; | 43243 |
| m01 | CCGG | omeAs; lnaGs; omeCs; lnaCs; omeGs; lnaG-Sup | |
| FOXP3-17 | CAGCTGCTTAT | lnaCs; omeAs; lnaGs; omeCs; lnaTs; omeGs; lnaCs; omeUs; lnaTs; | 43375 |
| m01 | AGAC | omeAs; lnaTs; omeAs; lnaGs; omeAs; lnaC-Sup | |
| FOXP3-18 | AGCTGCTTATA | lnaAs; omeGs; lnaCs; omeUs; lnaGs; omeCs; lnaTs; omeUs; lnaAs; | 43376 |
| m01 | GACC | omeUs; lnaAs; omeGs; lnaAs; omeCs; lnaC-Sup | |
| FOXP3-19 | TGCTTATAGAC | lnaTs; omeGs; lnaCs; omeUs; lnaTs; omeAs; lnaTs; omeAs; lnaGs; | 43379 |
| m01 | CTCC | omeAs; lnaCs; omeCs; lnaTs; omeCs; lnaC-Sup | |
| FOXP3-20 | GCTTATAGACC | lnaGs; omeCs; lnaTs; omeUs; lnaAs; omeUs; lnaAs; omeGs; lnaAs; | 43380 |
| m01 | TCCT | omeCs; lnaCs; omeUs; lnaCs; omeCs; lnaT-Sup | |
| FOXP3-21 | CTTATAGACCT | lnaCs; omeUs; lnaTs; omeAs; lnaTs; omeAs; lnaGs; omeAs; lnaCs; | 43381 |
| m01 | CCTC | omeCs; lnaTs; omeCs; lnaCs; omeUs; lnaC-Sup | |
| FOXP3-22 | TTGCCCACGAT | lnaTs; omeUs; lnaGs; omeCs; lnaCs; omeCs; lnaAs; omeCs; lnaGs; | 43216 |
| m01 | CTCC | omeAs; lnaTs; omeCs; lnaTs; omeCs; lnaC-Sup | |
| FOXP3-23 | GTTGCCCACGA | lnaGs; omeUs; lnaTs; omeGs; lnaCs; omeCs; lnaCs; omeAs; lnaCs; | 43215 |
| m01 | TCTC | omeGs; lnaAs; omeUs; lnaCs; omeUs; lnaC-Sup | |
| FOXP3-24 | CCGGATGTTGC | lnaCs; omeCs; lnaGs; omeGs; lnaAs; omeUs; lnaGs; omeUs; lnaTs; | 43209 |
| m01 | CCAC | omeGs; lnaCs; omeCs; lnaCs; omeAs; lnaC-Sup | |
| FOXP3-25 | TTCCGGATGTT | lnaTs; omeUs; lnaCs; omeCs; lnaGs; omeGs; lnaAs; omeUs; lnaGs; | 43207 |
| m01 | GCCC | omeUs; lnaTs; omeGs; lnaCs; omeCs; lnaC-Sup | |
| FOXP3-26 | GCTTCCGGATG | lnaGs; omeCs; lnaTs; omeUs; lnaCs; omeCs; lnaGs; omeGs; lnaAs; | 43205 |
| m01 | TTGC | omeUs; lnaGs; omeUs; lnaTs; omeGs; lnaC-Sup | |
| FOXP3-27 | TGCTTCCGGAT | lnaTs; omeGs; lnaCs; omeUs; lnaTs; omeCs; lnaCs; omeGs; lnaGs; | 43204 |
| m01 | GTTG | omeAs; lnaTs; omeGs; lnaTs; omeUs; lnaG-Sup | |
| FOXP3-28 | CTGCTTCCGGA | lnaCs; omeUs; lnaGs; omeCs; lnaTs; omeUs; lnaCs; omeCs; lnaGs; | 43203 |
| m01 | TGTT | omeGs; lnaAs; omeUs; lnaGs; omeUs; lnaT-Sup | |
| FOXP3-29 | CCCCTCACCTC | lnaCs; omeCs; lnaCs; omeCs; lnaTs; omeCs; lnaAs; omeCs; lnaCs; | 42533 |
| m01 | GTGC | omeUs; lnaCs; omeGs; lnaTs; omeGs; lnaC-Sup | |
| FOXP3-30 | CCTCACCTCGT | lnaCs; omeCs; lnaTs; omeCs; lnaAs; omeCs; lnaCs; omeUs; lnaCs; | 42535 |
| m01 | GCAG | omeGs; lnaTs; omeGs; lnaCs; omeAs; lnaG-Sup | |
| FOXP3-31 | AGCATCGTCCT | lnaAs; omeGs; lnaCs; omeAs; lnaTs; omeCs; lnaGs; omeUs; lnaCs; | 42580 |
| m01 | TCTT | omeCs; lnaTs; omeUs; lnaCs; omeUs; lnaT-Sup | |
| FOXP3-32 | CAGCATCGTCC | lnaCs; omeAs; lnaGs; omeCs; lnaAs; omeUs; lnaCs; omeGs; lnaTs; | 42579 |
| m01 | TTCT | omeCs; lnaCs; omeUs; lnaTs; omeCs; lnaT-Sup | |
| FOXP3-33 | ACAGCATCGTC | lnaAs; omeCs; lnaAs; omeGs; lnaCs; omeAs; lnaTs; omeCs; lnaGs; | 42578 |
| m01 | CTTC | omeUs; lnaCs; omeCs; lnaTs; omeUs; lnaC-Sup | |
| FOXP3-34 | GAACAGCATCG | lnaGs; omeAs; lnaAs; omeCs; lnaAs; omeGs; lnaCs; omeAs; lnaTs; | 42576 |
| m01 | TCCT | omeCs; lnaGs; omeUs; lnaCs; omeCs; lnaT-Sup | |
| FOXP3-35 | CGAACAGCATC | lnaCs; omeGs; lnaAs; omeAs; lnaCs; omeAs; lnaGs; omeCs; lnaAs; | 42575 |
| m01 | GTCC | omeUs; lnaCs; omeGs; lnaTs; omeCs; lnaC-Sup | |
| FOXP3-36 | CCGAACAGCAT | lnaCs; omeCs; lnaGs; omeAs; lnaAs; omeCs; lnaAs; omeGs; lnaCs; | 42574 |
| m01 | CGTC | omeAs; lnaTs; omeCs; lnaGs; omeUs; lnaC-Sup | |
| FOXP3-37 | TTCCGAACAGC | lnaTs; omeUs; lnaCs; omeCs; lnaGs; omeAs; lnaAs; omeCs; lnaAs; | 42572 |
| m01 | ATCG | omeGs; lnaCs; omeAs; lnaTs; omeCs; lnaG-Sup | |
| FOXP3-38 | CTTCCGAACAG | lnaCs; omeUs; lnaTs; omeCs; lnaCs; omeGs; lnaAs; omeAs; lnaCs; | 42571 |
| m01 | CATC | omeAs; lnaGs; omeCs; lnaAs; omeUs; lnaC-Sup | |
| FOXP3-39 | CCTTCCGAACA | lnaCs; omeCs; lnaTs; omeUs; lnaCs; omeCs; lnaGs; omeAs; lnaAs; | 42570 |
| m01 | GCAT | omeCs; lnaAs; omeGs; lnaCs; omeAs; lnaT-Sup | |
| FOXP3-40 | GCCTTCCGAAC | lnaGs; omeCs; lnaCs; omeUs; lnaTs; omeCs; lnaCs; omeGs; lnaAs; | 42569 |
| m01 | AGCA | omeAs; lnaCs; omeAs; lnaGs; omeCs; lnaA-Sup | |
| FOXP3-41 | GGCCTTCCGAA | lnaGs; omeGs; lnaCs; omeCs; lnaTs; omeUs; lnaCs; omeCs; lnaGs; | 42568 |
| m01 | CAGC | omeAs; lnaAs; omeCs; lnaAs; omeGs; lnaC-Sup | |
| FOXP3-42 | AGGCCTTCCGA | lnaAs; omeGs; lnaGs; omeCs; lnaCs; omeUs; lnaTs; omeCs; lnaCs; | 42567 |
| m01 | ACAG | omeGs; lnaAs; omeAs; lnaCs; omeAs; lnaG-Sup | |
| FOXP3-43 | GATCTCTGCCA | lnaGs; omeAs; lnaTs; omeCs; lnaTs; omeCs; lnaTs; omeGs; lnaCs; | 43447 |
| m01 | GCCG | omeCs; lnaAs; omeGs; lnaCs; omeCs; lnaG-Sup | |
| FOXP3-44 | CTCTGCCAGCC | lnaCs; omeUs; lnaCs; omeUs; lnaGs; omeCs; lnaCs; omeAs; lnaGs; | 43450 |
| m01 | GTCG | omeCs; lnaCs; omeGs; lnaTs; omeCs; lnaG-Sup | |
| FOXP3-45 | CTGCCAGCCGT | lnaCs; omeUs; lnaGs; omeCs; lnaCs; omeAs; lnaGs; omeCs; lnaCs; | 43452 |
| m01 | CGAG | omeGs; lnaTs; omeCs; lnaGs; omeAs; lnaG-Sup | |
| FOXP3-46 | CCAGCCGTCGA | lnaCs; omeCs; lnaAs; omeGs; lnaCs; omeCs; lnaGs; omeUs; lnaCs; | 43455 |
| m01 | GAAG | omeGs; lnaAs; omeGs; lnaAs; omeAs; lnaG-Sup | |
| FOXP3-47 | CAGCCGTCGAG | lnaCs; omeAs; lnaGs; omeCs; lnaCs; omeGs; lnaTs; omeCs; lnaGs; | 43456 |
| m01 | AAGA | omeAs; lnaGs; omeAs; lnaAs; omeGs; lnaA-Sup | |
| FOXP3-48 | GCCGTCGAGAA | lnaGs; omeCs; lnaCs; omeGs; lnaTs; omeCs; lnaGs; omeAs; lnaGs; | 43458 |
| m01 | GATT | omeAs; lnaAs; omeGs; lnaAs; omeUs; lnaT-Sup | |
| FOXP3-49 | CCGTCGAGAAG | lnaCs; omeCs; lnaGs; omeUs; lnaCs; omeGs; lnaAs; omeGs; lnaAs; | 43459 |
| m01 | ATTC | omeAs; lnaGs; omeAs; lnaTs; omeUs; lnaC-Sup | |
| FOXP3-50 | CTTCGAAGAGC | lnaCs; omeUs; lnaTs; omeCs; lnaGs; omeAs; lnaAs; omeGs; lnaAs; | 36466 |
| m01 | CAGA | omeGs; lnaCs; omeCs; lnaAs; omeGs; lnaA-Sup | |
| FOXP3-51 | CTGCAAGTGGC | lnaCs; omeUs; lnaGs; omeCs; lnaAs; omeAs; lnaGs; omeUs; lnaGs; | 36439 |
| m01 | CCGG | omeGs; lnaCs; omeCs; lnaCs; omeGs; lnaG-Sup | |
| FOXP3-52 | GTCTGCAAGTG | lnaGs; omeUs; lnaCs; omeUs; lnaGs; omeCs; lnaAs; omeAs; lnaGs; | 36437 |
| m01 | GCCC | omeUs; lnaGs; omeGs; lnaCs; omeCs; lnaC-Sup | |
| FOXP3-53 | TGTACACAGCT | lnaTs; omeGs; lnaTs; omeAs; lnaCs; omeAs; lnaCs; omeAs; lnaGs; | 29244 |
| m01 | GGCG | omeCs; lnaTs; omeGs; lnaGs; omeCs; lnaG-Sup | |
| FOXP3-54 | CTGGCGTTTAA | lnaCs; omeUs; lnaGs; omeGs; lnaCs; omeGs; lnaTs; omeUs; lnaTs; | 29253 |
| m01 | TAAT | omeAs; lnaAs; omeUs; lnaAs; omeAs; lnaT-Sup | |
| FOXP3-55 | GCTGGACTATC | lnaGs; omeCs; lnaTs; omeGs; lnaGs; omeAs; lnaCs; omeUs; lnaAs; | 41675 |
| m01 | ACCC | omeUs; lnaCs; omeAs; lnaCs; omeCs; lnaC-Sup | |
| FOXP3-56 | GAGGTGGCGG | lnaGs; omeAs; lnaGs; omeGs; lnaTs; omeGs; lnaGs; omeCs; lnaGs; | 43610 |
| m01 | TACTC | omeGs; lnaTs; omeAs; lnaCs; omeUs; lnaC-Sup | |
| FOXP3-57 | GGTGGCGGTA | lnaGs; omeGs; lnaTs; omeGs; lnaGs; omeCs; lnaGs; omeGs; lnaTs; | 43612 |
| m01 | CTCAG | omeAs; lnaCs; omeUs; lnaCs; omeAs; lnaG-Sup | |
| FOXP3-58 | GTGGCGGTACT | lnaGs; omeUs; lnaGs; omeGs; lnaCs; omeGs; lnaGs; omeUs; lnaAs; | 43613 |
| m01 | CAGC | omeCs; lnaTs; omeCs; lnaAs; omeGs; lnaC-Sup | |
| FOXP3-59 | GCGGTACTCAG | lnaGs; omeCs; lnaGs; omeGs; lnaTs; omeAs; lnaCs; omeUs; lnaCs; | 43616 |
| m01 | CGAG | omeAs; lnaGs; omeCs; lnaGs; omeAs; lnaG-Sup | |
| FOXP3-60 | GTGGACCGTG | lnaGs; omeUs; lnaGs; omeGs; lnaAs; omeCs; lnaCs; omeGs; lnaTs; | 40694 |
| m01 | GATGA | omeGs; lnaGs; omeAs; lnaTs; omeGs; lnaA-Sup | |

BRIEF DESCRIPTION OF THE SEQUENCE LISTING

| SeqID | Chrom | gene | Chr.Start | Chr.End | strand | Organism |
|---|---|---|---|---|---|---|
| 1 | chrX | FOXP3 | 49094896 | 49133288 | − | Homo sapiens |
| 2 | chrX | FOXP3 | 49094896 | 49133288 | + | Homo sapiens |
| 3 | chrX | Foxp3 | 7567675 | 7607243 | + | Mus musculus |
| 4 | chrX | Foxp3 | 7567675 | 7607243 | − | Mus musculus |
| 5 | chrX | FOXP3 | 49091852 | 49146158 | + | Homo sapiens |
| 6 | chrX | FOXP3 | 49105387 | 49126985 | + | Homo sapiens |
| 7 | chrX | FOXP3 | 49105442 | 49121156 | + | Homo sapiens |
| 8 | chrX | FOXP3 | 49131266 | 49131313 | + | Homo sapiens |
| 9 | chrX | FOXP3 | 49131123 | 49131172 | + | Homo sapiens |
| 10 | chrX | FOXP3 | 49127994 | 49128033 | + | Homo sapiens |
| 11 | chrX | FOXP3 | 49127843 | 49127890 | + | Homo sapiens |
| 12 | chrX | FOXP3 | 49127628 | 49127670 | + | Homo sapiens |
| 13 | chrX | FOXP3 | 49124798 | 49124897 | + | Homo sapiens |
| 14 | chrX | FOXP3 | 49123918 | 49123965 | + | Homo sapiens |
| 15 | chrX | FOXP3 | 49120701 | 49120753 | + | Homo sapiens |
| 16 | chrX | FOXP3 | 49118531 | 49118555 | + | Homo sapiens |
| 17 | chrX | FOXP3 | 49115652 | 49115685 | + | Homo sapiens |
| 18 | chrX | FOXP3 | 49112995 | 49113044 | + | Homo sapiens |
| 19 | chrX | FOXP3 | 49112863 | 49112906 | + | Homo sapiens |
| 20 | chrX | FOXP3 | 49112637 | 49112717 | + | Homo sapiens |
| 21 | chrX | FOXP3 | 49107522 | 49107575 | + | Homo sapiens |
| 22 | chrX | FOXP3 | 49106607 | 49106653 | + | Homo sapiens |
| 23 | chrX | FOXP3 | 49106128 | 49106175 | + | Homo sapiens |
| 24 | chrX | FOXP3 | 49105839 | 49105886 | + | Homo sapiens |
| 25 | chrX | FOXP3 | 49105669 | 49105701 | + | Homo sapiens |
| 26 | chrX | FOXP3 | 49105241 | 49105285 | + | Homo sapiens |
| 27 | chrX | FOXP3 | 49129266 | 49133313 | + | Homo sapiens |
| 28 | chrX | FOXP3 | 49129123 | 49133172 | + | Homo sapiens |
| 29 | chrX | FOXP3 | 49125994 | 49130033 | + | Homo sapiens |
| 30 | chrX | FOXP3 | 49125843 | 49129890 | + | Homo sapiens |
| 31 | chrX | FOXP3 | 49125628 | 49129670 | + | Homo sapiens |
| 32 | chrX | FOXP3 | 49122798 | 49126897 | + | Homo sapiens |
| 33 | chrX | FOXP3 | 49121918 | 49125965 | + | Homo sapiens |
| 34 | chrX | FOXP3 | 49118701 | 49122753 | + | Homo sapiens |
| 35 | chrX | FOXP3 | 49116531 | 49120555 | + | Homo sapiens |
| 36 | chrX | FOXP3 | 49113652 | 49117685 | + | Homo sapiens |
| 37 | chrX | FOXP3 | 49110995 | 49115044 | + | Homo sapiens |
| 38 | chrX | FOXP3 | 49110863 | 49114906 | + | Homo sapiens |
| 39 | chrX | FOXP3 | 49110637 | 49114717 | + | Homo sapiens |
| 40 | chrX | FOXP3 | 49105522 | 49109575 | + | Homo sapiens |
| 41 | chrX | FOXP3 | 49104607 | 49108653 | + | Homo sapiens |
| 42 | chrX | FOXP3 | 49104128 | 49108175 | + | Homo sapiens |
| 43 | chrX | FOXP3 | 49103839 | 49107886 | + | Homo sapiens |
| 44 | chrX | FOXP3 | 49103669 | 49107701 | + | Homo sapiens |
| 45 | chrX | FOXP3 | 49103241 | 49107285 | + | Homo sapiens |
| 46 | chrX | FOXP3 | 49091852 | 49146158 | − | Homo sapiens |
| 47 | chrX | FOXP3 | 49105387 | 49126985 | − | Homo sapiens |
| 48 | chrX | FOXP3 | 49127432 | 49127481 | − | Homo sapiens |
| 49 | chrX | FOXP3 | 49127343 | 49127398 | − | Homo sapiens |
| 50 | chrX | FOXP3 | 49117756 | 49117794 | − | Homo sapiens |
| 51 | chrX | FOXP3 | 49100610 | 49100635 | − | Homo sapiens |
| 52 | chrX | FOXP3 | 49100129 | 49100194 | − | Homo sapiens |
| 53 | chrX | FOXP3 | 49099553 | 49099595 | − | Homo sapiens |
| 54 | chrX | FOXP3 | 49125432 | 49129481 | − | Homo sapiens |
| 55 | chrX | FOXP3 | 49125343 | 49129398 | − | Homo sapiens |
| 56 | chrX | FOXP3 | 49115756 | 49119794 | − | Homo sapiens |
| 57 | chrX | FOXP3 | 49098610 | 49102635 | − | Homo sapiens |
| 58 | chrX | FOXP3 | 49098129 | 49102194 | − | Homo sapiens |
| 59 | chrX | FOXP3 | 49097553 | 49101595 | − | Homo sapiens |

Single Strand Oligonucleotides (Antisense Strand of Target Gene)
SeqID range: 60-16461
SeqIDs w/o G Runs:
60-81, 96-201, 215-232, 255-378, 392-600, 616-654, 678-685, 699-745,
759-781, 795-802, 816-876, 902-915, 930-950, 970-1006, 1021-1044,
1058-1196, 1216-1248, 1264-1307, 1321-1322, 1342-1448, 1463-1938,
1952-2189, 2204-2289, 2303-2315, 2330-2416, 2430-2439, 2453-2646,
2671-2717, 2731-2846, 2868-2889, 2903-2912, 2926-2995, 3009-3055,
3075-3127, 3141-3142, 3156-3161, 3175-3182, 3196-3311, 3325-3345,
3360-3399, 3413-3455, 3469-3520, 3534, 3554-3603, 3618-3756,
3770-3803, 3817-3895, 3909-3973, 3987-4087, 4101-4147, 4163-4223,
4237, 4251-4304, 4318-4374, 4409-4488, 4502-4540, 4556-4567,
4587-4633, 4647-4692, 4707-4864, 4894-4957, 4972-4997, 5011-5075,
5089-5100, 5124-5167, 5185-5201, 5238-5245, 5259-5291, 5305-5382,
5397-5449, 5470-5512, 5537-5616, 5630-5669, 5683-5743, 5768-5794,
5822-5889, 5915-5937, 5961-5998, 6012-6016, 6030-6065, 6079-6087,
6127-6167, 6182-6186, 6200-6227, 6244-6289, 6313-6328, 6343-6351,
6365-6367, 6395-6418, 6433-6444, 6458-6488, 6502-6771, 6785-6967,
6981-6984, 6998-7543, 7554-7561, 7575-7578, 7592-7611, 7625-7760,
7774-7840, 7855-8099, 8130-8275, 8289-8420, 8434-8548, 8563-8617,
8631-8632, 8659-8844, 8858-8862, 8877-8895, 8909-8937, 8957-9073,
9087-9091, 9106-9114, 9138-9158, 9174-9185, 9208-9230, 9244-9261,
9276-9342, 9357-9361, 9376-9384, 9399-9443, 9469-9491, 9507-9565,
9579-9609, 9623-9707, 9722-9801, 9825-9872, 9886-9950, 9974-10033,
10047-10065, 10079-10136, 10163-10174, 10201-10207, 10221-10226,
10240-10254, 10278-10280, 10296-10304, 10318-10346, 10360-10632,
10648-10691, 10706-10743, 10763-10772, 10786-10808, 10824-10854,
10868-10881, 10897-10922, 10959-10971, 10985-11116, 11131-11148,
11162-11208, 11222-11246, 11260-11428, 11443, 11458-11517, 11531,
11547, 11563-11602, 11617-11685, 11699-11800, 11814-12163,
12175-12237, 12251-12853, 12856-12906, 12920-12952, 12966-12992,
13006-13017, 13031-13521, 13533-13588, 13597-13635, 13648-13660,
13674-13816, 13830-13841, 13856-13893, 13907-14033, 14047-14096,
14139-14174, 14188-14237, 14251-14272, 14286-14300, 14318-14320,
14340-14410, 14424-14483, 14506-14578, 14592-14599, 14634-14703,
14717-14730, 14746-14864, 14883-15085, 15108-15152, 15172-15196,
15233-15273, 15293-15314, 15387-15506, 15520-15560, 15574-15593,
15607-15615, 15651-15652, 15666-15860, 15874-16122, 16141-16163,
16177-16246, 16272-16285, 16299-16370, 16384-16420, 16426-16443,
16451-16453, 16455-16461
SeqIDs w/o miR Seeds:
60-65, 68-69, 74, 77, 79, 88-91, 93-94, 97, 99-100, 103, 105-106,
108, 110-112, 115-127, 130, 134-141, 144-145, 148-149, 152, 154-157,
159, 161-165, 167-169, 172-173, 176, 180-183, 185, 187-190, 193-195,
202-205, 207-210, 212-216, 218, 220, 222-225, 228, 230-234, 236,
238-239, 241, 245, 248-259, 262-264, 266-270, 273-274, 277-280,
282-286, 290-296, 298-301, 303-309, 312-314, 316-320, 322, 324,
326-329, 334, 336, 338-339, 341, 343-349, 351, 354-360, 362-368,
370-373, 376, 378-379, 382-386, 389-392, 394, 396, 399-400, 402-403,
405-411, 413-421, 423, 426, 429, 431-432, 434-435, 437, 441, 443,
446-447, 449-457, 459-462, 464-468, 470, 472-478, 480-484, 487-489,
492-494, 497, 499-504, 506-509, 511-512, 514-517, 520-525, 527, 530,
534, 538, 540-541, 545-550, 552, 557-570, 575, 577-580, 582-588,
592-594, 596, 599-600, 602, 604, 607, 609-610, 612, 614, 618-624,
627-628, 630-634, 636, 638, 641-645, 648-651, 653-654, 656-657
659-661, 663-664, 666, 674-676, 678-680, 683-687, 689, 696-699,
702-712, 716-718, 722, 728-733, 736, 741-742, 745-746, 751, 753,
756-757, 760, 762-764, 766-767, 769-775, 778, 781-782, 785-786,
788-789, 791-792, 794-796, 799-800, 802, 807-811, 813-814, 817-822,
824, 827-830, 833-835, 837-841, 843, 846-853, 860, 862, 866-873,
875-877, 881, 883-884, 886-891, 893-894, 896-898, 902, 905-913, 915,
919-920, 923-927, 929, 931, 934, 938-942, 944, 947-951, 956, 959,
963, 965-973, 975, 979, 981-983, 986, 990, 999-1001, 1003-1004,
1006-1007, 1012-1013, 1016-1018, 1021, 1023, 1025, 1028-1029,
1031-1037, 1040, 1042-1044, 1048, 1051-1053, 1056, 1058, 1060-1065,
1070-1074, 1076, 1079-1081, 1084-1095, 1097-1108, 1110, 1112-1113,
1115-1118, 1121-1128, 1130, 1132, 1138, 1140-1143, 1151, 1153-1154,
1159, 1162, 1165-1166, 1168-1169, 1171, 1177, 1179-1181, 1183-1185,
1187-1188, 1192-1194, 1196-1199, 1201-1202, 1204-1205, 1209-1211,
1213-1214, 1216-1218, 1221, 1225-1231, 1234, 1236-1237, 1239-1241,
1246-1250, 1252, 1256-1265, 1267, 1269, 1271, 1273-1275, 1277-1287,
1291, 1295-1301, 1303-1307, 1312-1321, 1325, 1329, 1332-1333, 1335,
1338, 1344, 1346-1347, 1349, 1351, 1354-1363, 1367, 1370, 1373,
1375-1378, 1380-1387, 1389, 1393-1395, 1397-1398, 1400-1403, 1405,
1408, 1411-1413, 1415-1420, 1422, 1426, 1428-1429, 1433, 1435,
1437-1441, 1443-1444, 1453-1456, 1458, 1460-1461, 1464-1466,
1469-1470, 1472-1476, 1478-1479, 1481, 1484-1486, 1488, 1491-1493,
1495, 1497, 1499-1502, 1504, 1506-1513, 1515-1522, 1524-1527,
1530-1531, 1533, 1535, 1542-1544, 1550, 1555, 1558-1559, 1562-1565,
1567, 1569-1572, 1576, 1579, 1582-1584, 1586, 1590-1592, 1594, 1596,
1601-1603, 1605-1610, 1612-1615, 1617-1618, 1620, 1622-1623, 1625,
1627-1630, 1632, 1635, 1638, 1641, 1643, 1645-1656, 1660, 1665,
1668-1669, 1672, 1677-1679, 1681-1682, 1684, 1687-1690, 1694-1700,
1702-1703, 1705, 1707-1709, 1711, 1714, 1719, 1721-1726, 1732, 1734,
1739-1740, 1743-1744, 1746, 1749-1750, 1752, 1755, 1757-1759, 1761,
1763-1767, 1769, 1771, 1776, 1779-1780, 1784, 1786, 1790, 1793-1794,
1797-1800, 1803-1805, 1807-1809, 1811-1814, 1816, 1820, 1823, 1825,
1837-1838, 1840-1845, 1847-1852, 1854-1856, 1858-1859, 1862,
1868-1869, 1873-1876, 1878, 1881, 1887-1888, 1890-1898, 1900,
1902-1903, 1905, 1912-1915, 1921-1924, 1926, 1928, 1931-1933,
1935-1937, 1940-1942, 1947, 1951, 1955, 1960-1962, 1964, 1967,
1971-1973, 1977, 1979, 1981, 1983, 1986-1988, 1990-1991, 1994-1997,
1999-2000, 2004-2006, 2008, 2011-2013, 2015-2020, 2022, 2024, 2026,
2028-2029, 2032, 2036, 2038-2044, 2046, 2048-2049, 2051-2052, 2054,
2056, 2059-2064, 2066-2071, 2073, 2075-2076, 2078, 2080, 2083, 2085,
2087, 2090-2091, 2093-2097, 2099, 2101, 2103, 2105-2109, 2112, 2114,
2119-2120, 2122, 2124, 2126-2127, 2130-2131, 2133-2135, 2138-2142,
2144-2145, 2148, 2150-2152, 2154-2160, 2162-2166, 2169, 2172-2173,
2175-2176, 2178, 2181-2184, 2186-2191, 2193, 2195-2201, 2203-2215,
2217-2218, 2223-2224, 2226-2229, 2231-2236, 2238, 2240-2246,
2248-2250, 2252-2257, 2260-2262, 2266-2272, 2274, 2277-2278,
2280-2281, 2284, 2290, 2292, 2294-2296, 2300, 2303-2311, 2319-2320,
2323, 2326-2327, 2329, 2333-2336, 2338, 2341, 2343-2345, 2347,
2349-2350, 2352, 2358, 2360, 2362-2363, 2365-2368, 2373-2374,
2377-2383, 2385, 2387-2388, 2395, 2398-2405, 2408, 2411-2414,
2416-2417, 2424-2425, 2429-2433, 2435-2439, 2443-2447, 2450-2455,
2457-2467, 2469-2471, 2473, 2476, 2478-2479, 2482-2488, 2492, 2494,
2496, 2498-2499, 2501, 2503-2504, 2506-2507, 2509, 2512, 2515-2517,
2519, 2521, 2523-2527, 2531-2534, 2536-2539, 2541, 2543, 2545,
2547-2549, 2552-2560, 2563-2565, 2567-2570, 2572-2574, 2578-2581,
2584-2585, 2587-2588, 2590, 2592-2593, 2595, 2597, 2600, 2603,
2605-2606, 2609-2613, 2617, 2619-2620, 2622-2624, 2626, 2629-2631,
2633-2636, 2643-2646, 2655, 2662-2663, 2665-2667, 2670-2674,
2677-2679, 2681-2683, 2685, 2687-2688, 2690-2691, 2693-2694, 2696,
2703, 2705, 2709-2711, 2713-2718, 2721-2722, 2729, 2737, 2740,
2743-2752, 2756-2757, 2759, 2763-2768, 2770-2774, 2776-2777,
2780, 2782-2783, 2785, 2787-2790, 2795-2799, 2801, 2805, 2810-2811,
2813, 2819, 2823-2824, 2828-2832, 2839-2841, 2843, 2852, 2854-2855,
2859-2860, 2862-2864, 2868-2875, 2882-2884, 2886-2887, 2889-2890,
2900-2905, 2907, 2910, 2912-2915, 2918-2919, 2921, 2923, 2926-2927,
2929-2931, 2934-2939, 2941, 2943-2952, 2954-2956, 2958, 2960-2961,
2963-2964, 2971, 2975-2979, 2981-2982, 2984, 2988, 2993-2997, 2999,
3007-3009, 3016, 3018, 3020-3024, 3026, 3028-3030, 3032, 3034-3041,
3043-3045, 3047, 3049-3054, 3057, 3059-3061, 3069, 3071-3073,
3075-3077, 3080-3083, 3085-3089, 3091-3092, 3094-3097, 3102,
3108-3110, 3113-3114, 3120, 3123-3124, 3126, 3128, 3132, 3134, 3137,
3148, 3150-3155, 3158-3162, 3164-3165, 3168, 3171, 3175, 3182, 3185,
3188-3189, 3191, 3194-3198, 3200-3201, 3204, 3206-3207, 3209-3210,
3213, 3215-3216, 3218, 3220-3221, 3226-3227, 3231-3235, 3237, 3240,
3243-3245, 3247, 3249, 3251, 3253-3254, 3256-3262, 3264, 3271, 3273,
3276-3280, 3282-3283, 3285-3288, 3290-3291, 3294-3300, 3302-3303,
3306-3312, 3315-3323, 3328, 3330-3331, 3334-3336, 3338, 3340-3342,
3344, 3349, 3351-3353, 3355-3364, 3367-3379, 3382, 3384-3389, 3391,
3394, 3396-3397, 3399-3400, 3402, 3404-3412, 3415, 3417, 3420-3424,
3427-3429, 3431, 3434-3439, 3441-3442, 3445, 3447, 3450, 3454-3455,
3457, 3461, 3463-3466, 3472-3474, 3476-3478, 3482-3483, 3485-3486,
3488, 3491-3504, 3506, 3508-3517, 3519-3523, 3525-3526, 3529-3531,
3533, 3541, 3545-3547, 3549, 3552, 3556-3557, 3559-3562, 3565-3567,
3569, 3571, 3573-3574, 3577, 3581-3582, 3584-3585, 3587-3589, 3591,
3594-3597, 3599, 3601, 3605, 3607, 3609, 3613-3616, 3618-3620,
3622-3630, 3632-3633, 3635-3637, 3639-3640, 3642-3648, 3650-3651,
3653-3654, 3656-3657, 3661, 3664, 3666-3668, 3670-3672, 3674-3681,
3684, 3686-3691, 3693-3694, 3697, 3699-3702, 3704-3707, 3710, 3715,
3720-3722, 3725-3727, 3732-3736, 3739-3745, 3747, 3749-3753,
3758-3761, 3763-3766, 3771, 3773-3779, 3781, 3783, 3785-3786, 3788,
3790-3793, 3795, 3797, 3799, 3801, 3803, 3808, 3810, 3812, 3814,
3819-3824, 3827-3829, 3831, 3834-3835, 3840-3842, 3844, 3846-3848,
3850-3851, 3853-3860, 3862-3863, 3865-3866, 3868, 3870, 3872, 3875,
3880-3882, 3884, 3887-3890, 3892-3893, 3895, 3901-3905, 3909,
3911-3912, 3914-3919, 3922, 3926-3927, 3930-3934, 3939, 3941, 3943,
3945-3947, 3949-3950, 3952-3954, 3956, 3960, 3962, 3965-3976,
3978-3983, 3985-3994, 3996-4005, 4008, 4010, 4012-4014, 4017, 4019,
4021-4023, 4025-4032, 4034-4037, 4039-4041, 4043-4045, 4048-4049,
4052, 4054-4055, 4058, 4060-4061, 4064-4065, 4067-4069, 4073-4078,
4081, 4087-4088, 4091, 4096-4098, 4100-4103, 4106-4107, 4109, 4111,
4118-4119, 4121-4123, 4127-4128, 4130-4136, 4139-4141, 4147,
4154-4158, 4161-4163, 4165, 4171-4178, 4184-4186, 4189, 4191,
4193-4195, 4198-4199, 4201, 4203-4206, 4211, 4215, 4218-4224, 4227,
4234, 4237-4238, 4240, 4243, 4245-4246, 4248-4257, 4259, 4263-4265,
4267-4268, 4274-4275, 4277, 4280-4285, 4288-4291, 4293-4295, 4300,
4304, 4308, 4310, 4312-4316, 4319-4320, 4322-4323, 4325, 4334
4336-4340, 4343-4348, 4350, 4352, 4358, 4360, 4364-4365, 4367,
4369-4372, 4374, 4377-4378, 4381, 4385, 4389, 4391-4392, 4404, 4406,
4411-4415, 4417, 4419-4421, 4423-4424, 4426-4427, 4431-4433, 4435,
4437-4438, 4440-4441, 4443, 4446, 4450-4452, 4454-4465, 4467,
4469-4474, 4476, 4478-4479, 4482-4483, 4492-4493, 4495, 4497-4498,
4501-4505, 4507-4517, 4519-4521, 4523-4527, 4530-4533, 4536-4539,
4541, 4543, 4546, 4549-4552, 4554-4555, 4558, 4561-4563, 4565, 4569,
4572-4576, 4579-4580, 4584-4587, 4590, 4592-4595, 4597-4598,
4601-4602, 4604-4610, 4613-4614, 4616-4617, 4619-4621, 4624,
4626-4628, 4632-4635, 4637-4639, 4642-4645, 4647-4648, 4651-4653,
4656, 4658-4659, 4663-4664, 4669, 4671-4675, 4680-4681, 4683-4686,
4688, 4690-4691, 4693, 4698, 4700-4701, 4705, 4707, 4709-4712,
4714-4717, 4719, 4721-4725, 4729-4734, 4736, 4739-4741, 4744,
4746-4747, 4752, 4755, 4757, 4759, 4762-4763, 4766-4768, 4770-4773,
4776, 4779-4780, 4782, 4784, 4789, 4791, 4793-4795, 4802, 4804,
4806, 4808, 4812, 4816, 4818, 4820, 4822, 4825, 4829, 4832, 4834,
4844-4845, 4849-4851, 4855-4857, 4859-4860, 4863, 4867-4868, 4872,
4875, 4878-4880, 4884-4888, 4895-4897, 4899, 4902-4904, 4908-4910,
4913, 4916, 4921, 4923-4924, 4926, 4935-4939, 4942, 4944-4947, 4950,
4952, 4954, 4965-4967, 4970, 4976, 4980-4981, 4992-4995, 5000-5002,
5004-5007, 5009-5011, 5013-5014, 5016-5017, 5019-5021, 5024,
5026-5029, 5031-5033, 5041-5046, 5048-5052, 5055-5058, 5068-5070,
5072-5073, 5080-5083, 5085-5088, 5091-5092, 5095-5099, 5102, 5108,
5116-5123, 5125-5126, 5128, 5131-5133, 5135, 5137, 5139, 5141, 5143,
5145-5150, 5153, 5155, 5157, 5164-5165, 5167-5168, 5172, 5176-5179,
5181-5183, 5185-5188, 5190-5192, 5195, 5197, 5199-5201, 5206, 5210,
5212, 5214-5215, 5217, 5219, 5221-5226, 5231-5232, 5235, 5237-5241,
5244-5248, 5251, 5253-5267, 5269-5271, 5273-5278, 5280-5286, 5288,
5293, 5295, 5297-5298, 5300, 5302-5303, 5307-5308, 5310, 5312, 5316,
5318-5324, 5326-5332, 5334, 5336-5337, 5340-5344, 5349-5350,
5352-5353, 5360-5364, 5366-5369, 5371-5372, 5374, 5377-5383, 5388,
5390-5396, 5399-5400, 5404, 5406-5413, 5415-5418, 5423-5424, 5428,
5430-5433, 5435, 5437, 5439, 5441, 5444, 5446-5447, 5449-5454,
5461-5463, 5467, 5470-5471, 5476, 5479, 5481-5483, 5485-5487, 5492,
5495-5496, 5498-5500, 5502-5506, 5518, 5522-5523, 5529-5530,
5532-5536, 5538-5540, 5542-5547, 5553-5561, 5563-5564, 5566, 5568,
5571-5575, 5578-5579, 5583, 5586-5588, 5590-5592, 5600, 5603, 5606,
5611-5612, 5614-5615, 5618, 5620, 5627-5628, 5630, 5633-5636, 5638,
5640-5641, 5643, 5646-5651, 5664-5665, 5667, 5669, 5673, 5675,
5677-5681, 5683-5684, 5687-5689, 5691-5692, 5695-5706, 5708-5712,
5715-5717, 5719, 5721, 5723-5724, 5726, 5728-5740, 5742-5743,
5749-5756, 5765-5766, 5770-5771, 5773-5775, 5778-5780, 5782-5784,
5786-5790, 5800-5802, 5807, 5817-5819, 5821, 5825, 5831, 5834,
5836-5838, 5840-5842, 5844, 5846-5853, 5855-5870, 5872, 5874,
5876-5877, 5879-5880, 5884-5888, 5891-5893, 5896, 5901, 5905, 5907,
5909-5910, 5914, 5916-5918, 5920-5922, 5924, 5933-5935, 5940-5941,
5943-5944, 5950, 5952, 5954-5956, 5961-5965, 5967, 5969-5976,
5978-5979, 5981, 5983-5990, 5992-5997, 5999, 6005-6012, 6015-6016,
6019, 6021-6029, 6032-6033, 6038-6044, 6046-6051, 6053, 6055-6062,
6064-6065, 6067, 6070, 6072, 6074-6076, 6079-6082, 6085-6086,
6088-6090, 6098-6099, 6101, 6107-6113, 6115, 6117, 6120-6121,
6124-6128, 6130-6134, 6136, 6138-6141, 6143-6147, 6151, 6153,
6156-6157, 6159-6167, 6174-6177, 6179-6181, 6183-6184, 6186-6192,
6195, 6198-6199, 6201-6204, 6206-6214, 6217, 6219, 6221, 6223-6225,
6227-6228, 6231, 6237, 6239-6246, 6248-6251, 6254-6259, 6261-6262,
6266, 6269-6273, 6275-6276, 6282-6283, 6293, 6297-6298, 6304,
6310-6311, 6313-6321, 6324-6331, 6335, 6338, 6341, 6343, 6347-6348,
6350, 6353-6356, 6358-6359, 6361, 6364, 6368, 6371, 6374, 6376,
6379, 6382, 6386, 6388-6399, 6401-6408, 6410-6411, 6413-6418, 6427,
6430-6440, 6442-6444, 6446-6450, 6452-6453, 6455-6457, 6460-6461,
6463-6464, 6467, 6469-6477, 6479-6484, 6487-6488, 6490-6491,
6493-6494, 6496-6503, 6505-6507, 6509-6510, 6512, 6515-6517,
6520-6521, 6523-6528, 6533-6534, 6536, 6541, 6543-6549, 6551,
6553-6554, 6556-6560, 6562-6563, 6565-6566, 6569-6571, 6573-6580,
6582-6585, 6587-6588, 6590, 6594-6597, 6599-6600, 6602, 6605,
6610-6612, 6614, 6617-6618, 6621, 6623, 6626-6633, 6636-6637,
6640-6643, 6645-6646, 6648, 6650-6651, 6654-6655, 6657-6663,
6665-6666, 6668-6675, 6679, 6681-6684, 6686, 6688-6690,
6692-6693, 6696-6699, 6703-6707, 6709, 6711, 6715-6716, 6718, 6721,
6723-6726, 6728-6731, 6733, 6735-6740, 6742-6743, 6745-6749,
6755-6757, 6759, 6762-6767, 6769-6770, 6772, 6774-6775, 6777-6779,
6781, 6783-6791, 6793-6794, 6796-6797, 6799-6802, 6804-6809, 6811,
6813-6818, 6821, 6826-6827, 6829-6833, 6836-6839, 6841-6846, 6848,
6851, 6853-6857, 6859-6864, 6869, 6875-6883, 6885-6886, 6888, 6890,
6893-6896, 6898-6899, 6902, 6904-6905, 6907-6914, 6917, 6919-6920,
6922-6923, 6926-6930, 6932-6933, 6938-6942, 6944, 6948, 6950-6954,
6956-6962, 6964-6966, 6971-6973, 6975, 6977-6978, 6983, 6985,
6987-6990, 6992-7000, 7002-7007, 7009-7019, 7022-7027, 7032,
7035-7039, 7042-7043, 7045-7046, 7048-7050, 7052, 7056-7064,
7066-7068, 7070, 7073-7074, 7076-7085, 7087-7093, 7097-7098,
7100-7103, 7107-7111, 7113-7118, 7121-7124, 7127, 7129, 7132-7139,
7142-7151, 7154-7161, 7163-7165, 7167-7169, 7173, 7175-7177,
7181-7182, 7184, 7186-7189, 7192-7198, 7200-7201, 7203-7209,
7211-7212, 7215-7216, 7218-7225, 7227-7230, 7232-7234, 7237-7238,
7240-7250, 7252-7253, 7255-7257, 7263-7264, 7268-7273, 7276-7279,
7281-7282, 7284-7285, 7287-7288, 7290, 7292, 7295-7300, 7302-7305,
7307-7311, 7314, 7316-7327, 7330-7334, 7336-7338, 7340, 7342, 7344,
7347-7349, 7351, 7353-7355, 7357-7363, 7367-7370, 7372-7373, 7375,
7378-7382, 7384-7385, 7387, 7389-7400, 7403, 7406, 7409-7411,
7413-7429, 7431-7434, 7438, 7440-7441, 7445-7451, 7453-7454, 7456,
7458-7459, 7462, 7464, 7466-7467, 7470-7471, 7473-7484, 7486, 7490,
495-7496, 7498-7501, 7506-7507, 7512-7515, 7517-7523, 7525-7528,
7536-7544, 7546-7549, 7551, 7555-7556, 7558-7561, 7566, 7571-7573,
7577-7580, 7582-7587, 7590-7591, 7595-7596, 7598-7599, 7601-7609,
7611, 7614, 7617, 7619-7623, 7625-7642, 7645, 7647-7650, 7653, 7656,
7658-7659, 7661-7663, 7665-7666, 7669, 7671-7674, 7677-7683,
7685-7689, 7692, 7695-7697, 7699-7700, 7702-7710, 7712-7716, 7718,
7720-7728, 7730-7736, 7739-7742, 7744, 7746, 7748-7752, 7754-7756,
7758, 7760, 7765-7771, 7774, 7776, 7779-7781, 7783-7784, 7786, 7788,
7790-7796, 7798-7803, 7805, 7807, 7811-7813, 7815-7816, 7820-7821,
7825-7826, 7828-7840, 7846-7847, 7850-7852, 7854, 7857, 7859,
7861-7869, 7871-7872, 7874-7881, 7883-7884, 7886, 7888, 7891-7892,
7894-7899, 7901-7902, 7904, 7907, 7910, 7914, 7916-7919, 7921-7925,
7927-7928, 7931-7941, 7943, 7945-7948, 7951, 7953-7955, 7959,
7961-7966, 7968-7972, 7974-7975, 7977, 7979-7981, 7988-7989,
7991-7992, 7994-7997, 7999, 8001-8008, 8011-8015, 8017-8018,
8021-8022, 8024-8025, 8027-8028, 8030-8034, 8037-8038, 8042-8043,
8047, 8049-8059, 8061-8066, 8068-8072, 8074, 8076, 8080-8082,
8084-8086, 8088, 8092-8094, 8096, 8098-8099, 8103, 8105-8111,
8116-8117, 8122, 8124, 8126, 8128, 8133-8137, 8145-8148, 8151-8152,
8156-8158, 8164, 8166, 8171-8174, 8176-8182, 8185, 8187-8192,
8194-8199, 8210-8212, 8215-8216, 8218-8220, 8222-8228, 8233-8237,
8239-8240, 8243-8244, 8246-8252, 8254, 8256, 8258, 8260, 8263-8265,
8268, 8271, 8273-8275, 8279, 8281-8286, 8289, 8291-8295, 8297,
8299-8306, 8308-8309, 8311-8312, 8315-8321, 8323-8326, 8328,
8330-8331, 8333-8336, 8338-8339, 8342-8343, 8345-8346, 8348,
8350-8355, 8357-8360, 8362-8365, 8368, 8371, 8373, 8375-8378,
8380-8382, 8384-8386, 8389-8391, 8393, 8395-8399, 8402, 8405,
8407-8409, 8411, 8413, 8415, 8422, 8426-8430, 8432-8433, 8436,
8440-8442, 8444, 8446, 8448-8449, 8454-8455, 8457, 8461-8462, 8465,
8469, 8473, 8478-8479, 8485-8492, 8495-8497, 8501-8503, 8506,
8510-8512, 8514-8518, 8521, 8524-8525, 8529, 8533-8543, 8547-8548,
8554-8559, 8561-8562, 8566-8570, 8572, 8582, 8584-8585, 8594-8595,
8597-8599, 8602, 8604, 8607-8608, 8610-8611, 8614-8617, 8621,
8626-8628, 8630-8635, 8641-8642, 8647, 8649, 8652, 8654, 8656-8658,
8660-8666, 8668, 8672, 8674-8676, 8678-8679, 8681-8687, 8694,
8698-8699, 8702-8707, 8709, 8713-8714, 8716, 8719-8721, 8723-8725,
8732-8734, 8736, 8738, 8740, 8742, 8744, 8749-8750, 8752-8754, 8759,
8762-8763, 8767, 8769-8770, 8772, 8776-8778, 8780-8783, 8785-8788,
8791-8796, 8798-8800, 8804-8806, 8810-8816, 8818-8819, 8822, 8824,
8827, 8829-8830, 8832-8835, 8837-8838, 8840, 8842-8847, 8850-8855,
8858, 8862, 8866-8867, 8869, 8871-8877, 8879-8881, 8883-8886,
8888-8889, 8891, 8895-8896, 8903, 8907-8909, 8911-8913, 8915,
8917-8921, 8923-8924, 8928-8934, 8936, 8944, 8947-8948, 8950-8953,
8955-8956, 8958-8961, 8964-8965, 8968-8969, 8971, 8973-8982,
8984, 8987-8993, 8995-8998, 9000, 9005-9007, 9015, 9018-9024,
9027-9032, 9034, 9037-9039, 9042, 9044, 9047-9050, 9052-9057,
9061-9063, 9065-9070, 9075, 9077, 9080-9082, 9084-9085, 9087-9091,
9093, 9099-9102, 9105, 9108, 9110-9111, 9113, 9115, 9117-9118, 9124,
9126, 9128, 9130, 9133, 9135-9136, 9138, 9140, 9142, 9145-9148,
9150-9155, 9157, 9167, 9169, 9176-9187, 9195, 9197, 9200, 9202,
9205-9213, 9215, 9217-9221, 9225-9228, 9231, 9239, 9241, 9244-9248,
9250-9258, 9260-9261, 9264, 9266, 9268-9270, 9274-9278, 9281, 9285,
9290, 9292-9294, 9298, 9301, 9303-9306, 9308-9310, 9312-9314,
9316-9318, 9320-9322, 9333-9334, 9336-9340, 9343-9344, 9351-9352,
9361, 9366-9371, 9373, 9376-9377, 9379-9382, 9385, 9387, 9390, 9392,
9396-9397, 9399, 9401, 9403-9404, 9406-9408, 9410, 9412, 9415-9418,
9420-9425, 9428, 9430-9437, 9442, 9451-9453, 9455, 9461, 9463, 9465,
9468-9469, 9472, 9474, 9480, 9482, 9484, 9497-9499, 9501, 9503,
9505-9506, 9508, 9510-9513, 9515-9516, 9518, 9520, 9522-9523,
9526-9530, 9532-9533, 9535-9543, 9549, 9551-9553, 9559-9560, 9562,
9564-9565, 9570-9573, 9575-9579, 9582-9583, 9586-9587, 9594,
9599-9601, 9603, 9605-9607, 9615, 9617-9619, 9621-9625, 9628,
9633-9635, 9638, 9641, 9643-9644, 9646-9650, 9654-9662, 9664-9665,
9667, 9670-9671, 9673, 9676-9677, 9680, 9682-9685, 9687, 9691-9693,
9697, 9699, 9703-9706, 9714, 9716, 9719-9721, 9723, 9727, 9732-9734,
9736, 9738-9740, 9743-9749, 9752-9758, 9762-9763, 9766-9767, 9770,
9772-9774, 9776-9778, 9780, 9785, 9787-9794, 9796, 9800-9802, 9811,
9816-9821, 9823-9829, 9831, 9843, 9848, 9850, 9852-9854, 9857-9858,
9861, 9863, 9866, 9869, 9871-9872, 9874, 9876, 9878, 9882, 9890,
9892, 9894-9895, 9898-9903, 9906-9910, 9912-9916, 9918, 9921,
9923-9928, 9930-9937, 9939, 9941, 9946, 9949-9950, 9952, 9954-9955,
9957, 9960-9961, 9966, 9968, 9970, 9973-9977, 9979, 9985-9987, 9989,
9995, 10001-10002, 10004-10012, 10014, 10016, 10018-10020,
10022-10024, 10027-10034, 10038-10040, 10044-10045, 10050-10066,
10068-10071, 10073, 10075-10076, 10078-10079, 10081-10082,
10086-10089, 10091-10099, 10102-10107, 10110-10121, 10125-10126,
10128-10132, 10134, 10143-10145, 10147, 10152-10157, 10159-10160,
10162-10163, 10165-10169, 10172-10173, 10175-10176, 10180-10183,
10185, 10194, 10196-10197, 10199-10202, 10204-10208, 10211-10213,
10218-10221, 10223-10227, 10232, 10234-10235, 10238, 10240,
10243-10244, 10246, 10248-10254, 10257, 10262-10264, 10266, 10269,
10271-10274, 10276, 10283-10284, 10288, 10291-10295, 10297,
10304-10307, 10309-10310, 10313, 10315-10318, 10320-10329, 10332,
10336, 10338-10339, 10341-10346, 10354, 10357-10360, 10362, 10364,
10367, 10369-10370, 10373-10375, 10377, 10379-10381, 10383-10384,
10387, 10389, 10395-10396, 10399, 10401-10402, 10405-10407, 10409,
10411-10413, 10416-10417, 10422, 10427, 10434-10435, 10437, 10441,
10443-10445, 10447-10450, 10452, 10456, 10459, 10462, 10464-10474,
10476-10477, 10479-10481, 10483, 10486-10487, 10490, 10493-10504,
10507-10512, 10515-10516, 10519, 10522-10523, 10525-10526, 10529,
10531-10539, 10541, 10543-10545, 10548-10550, 10552, 10555-10556,
10558, 10560, 10564, 10568-10574, 10576-10577, 10579-10580, 10582,
10588-10593, 10595, 10598-10601, 10604, 10606-10611, 10618-10619,
10624-10625, 10628, 10631-10632, 10634, 10640, 10642-10646,
10648-10653, 10659-10665, 10667-10669, 10671, 10673-10675,
10677-10680, 10684-10685, 10687-10693, 10697-10698, 10700,
10702-10703, 10705, 10708-10715, 10717, 10720, 10722, 10729-10730,
10732-10733, 10735, 10737-10740, 10743, 10745, 10750, 10753-10754,
10756-10758, 10760-10764, 10768, 10770-10772, 10775-10776, 10782,
10785-10786, 10788, 10791-10794, 10796-10800, 10803, 10806-10809,
10819-10820, 10822-10825, 10829-10831, 10833, 10836-10838,
10840-10843, 10845-10847, 10851-10853, 10856, 10863, 10865-10870,
10872, 10874-10878, 10880, 10885, 10892, 10894-10897, 10899-10910,
10912-10913, 10915-10920, 10930-10931, 10935, 10938-10942,
10944-10945, 10949, 10951, 10954, 10958-10959, 10964, 10967-10975,
10979, 10981-10984, 10987, 10990-10991, 10993-10994, 10996-11002,
11004-11007, 11010-11011, 11014, 11016, 11018, 11020, 11022,
11025-11026, 11028-11030, 11032-11038, 11040-11051, 11055, 11057,
11059-11066, 11068-11070, 11072, 11074, 11076, 11079-11083, 11085,
11087-11091, 11095-11109, 11115-11117, 11120, 11124-11127,
11129-11130, 11133-11140, 11142-11145, 11147, 11151, 11158, 11160,
11162-11163, 11165, 11171-11172, 11175, 11177, 11179, 11181,
11183-11184, 11186-11187, 11189-11191, 11193-11195, 11198, 11201,
11204-11208, 11219, 11221, 11224, 11226-11229, 11231-11233,
11237-11238, 11243, 11245, 11247, 11249-11250, 11252-11255,
11258-11264, 11268-11270, 11272, 11274, 11276-11277, 11279-11280,
11284, 11286-11287, 11289-11290, 11292, 11296, 11298, 11300,
11302-11306, 11308-11314, 11321, 11324-11325, 11330-11332, 11334,
11336-11338, 11340, 11344-11347, 11349, 11351, 11353-11356,
11360-11363, 11365, 11370-11375, 11380-11393, 11395-11396, 11398,
11400-11403, 11408-11409, 11412-11414, 11419, 11421-11425, 11429,
11431, 11435, 11437-11439, 11441, 11444, 11449-11450, 11452-11453,
11455, 11461-11462, 11465-11466, 11468-11469, 11471, 11473,
11475-11477, 11482-11483, 11485-11486, 11488, 11490-11491,
11493-11497, 11501, 11504, 11506-11511, 11516, 11519, 11524,
11527-11528, 11531, 11535, 11537-11539, 11541, 11544-11545, 11557,
11564, 11568-11569, 11571-11572, 11574-11579, 11583-11585,
11588-11589, 11591-11593, 11595, 11597-11600, 11602-11603,
11606-11609, 11612, 11615-11623, 11625-11626, 11628-11633,
11635-11637, 11644, 11646-11648, 11652-11655, 11659-11660,
11666-11670, 11672, 11676-11683, 11685-11686, 11689, 11693-11696,
11698-11700, 11703-11704, 11707, 11709, 11711-11712, 11714-11716,
11718-11723, 11726-11727, 11734, 11738-11740, 11744-11745,
11747-11750, 11752, 11755-11757, 11759, 11761-11763, 11765-11769,
11771-11774, 11776-11784, 11786-11791, 11793-11795, 11797-11801,
11804, 11806, 11808-11812, 11815-11816, 11818-11819, 11821-11823,
11826-11832, 11834-11837, 11839-11841, 11848, 11851-11855,
11862-11863, 11865-11866, 11868, 11870-11871, 11873-11880,
11882-11885, 11888-11893, 11898, 11900-11901, 11903-11905, 11907,
11909-11912, 11915, 11918-11921, 11923, 11926, 11928, 11930, 11933,
11935, 11937, 11940-11945, 11948-11949, 11952-11954, 11956-11964,
11966-11970, 11973-11974, 11976-11981, 11983-11985, 11987-11989,
11991-11994, 11997-12001, 12003-12006, 12008-12009, 12011,
12013-12014, 12016, 12019-12022, 12024-12027, 12029-12031, 12033,
12035-12040, 12042-12043, 12048, 12051-12055, 12058-12061,
12063-12070, 12072-12076, 12086-12090, 12092-12096, 12098-12100,
12105, 12107, 12109-12113, 12116-12120, 12122-12123, 12125,
12127-12128, 12130-12131, 12133, 12137-12139, 12141-12145, 12148,
12151, 12153-12155, 12157-12159, 12161, 12163, 12166-12167,
12170-12171, 12174-12180, 12182-12189, 12193-12194, 12196,
12201-12202, 12206-12210, 12213-12215, 12218-12221, 12223-12225,
12227-12231, 12233, 12237-12238, 12241, 12246-12248, 12250-12252,
12255-12256, 12259, 12262-12264, 12266-12270, 12275, 12277-12278,
12280, 12282, 12290-12296, 12298-12303, 12309, 12311-12314,
12316-12319, 12322, 12325, 12328, 12330, 12332-12348, 12350-12353,
12357-12361, 12363-12364, 12366-12367, 12370, 12372-12374,
12377, 12379, 12382-12391, 12393-12394, 12396-12400, 12402, 12404,
12409-12410, 12412, 12415-12417, 12419-12423, 12425-12427,
12430-12434, 12437-12438, 12440, 12446-12447, 12450-12456,
12459-12463, 12465-12466, 12469-12470, 12472-12473, 12475-12481,
12485-12486, 12491, 12495, 12497-12499, 12501-12503, 12505,
12507-12508, 12510-12512, 12515-12517, 12519-12525, 12527, 12529,
12531-12532, 12535-12557, 12561, 12563-12565, 12567-12568, 12570,
12574-12575, 12577-12578, 12581-12585, 12587-12592, 12594-12595,
12597-12598, 12601, 12603, 12605-12607, 12609, 12611, 12613-12614,
12620-12622, 12624, 12626, 12628, 12630, 12633-12636, 12641-12643,
12645-12649, 12651, 12654-12658, 12660-12684, 12687, 12689-12690,
12692-12697, 12699, 12701, 12703-12710, 12714-12715, 12718-12727,
12729-12732, 12734-12741, 12743-12744, 12747-12755, 12757-12765,
12767-12768, 12771-12778, 12781, 12784-12791, 12795, 12798,
12801-12805, 12807-12809, 12812, 12815, 12817-12820, 12824, 12827,
12830-12831, 12835, 12837-12845, 12847-12848, 12850, 12853-12857,
12860-12863, 12866-12867, 12869-12870, 12872-12874, 12876-12877,
12879, 12881, 12885, 12888-12889, 12893-12896, 12899, 12901,
12904-12905, 12907, 12912-12913, 12915, 12917, 12919-12920,
12922-12926, 12928-12929, 12931-12939, 12941-12944, 12946, 12951,
12955-12956, 12958-12963, 12967-12970, 12972, 12974-12975, 12977,
12980-12982, 12984-12986, 12988-12992, 12995-12996, 12998-12999,
13001, 13003, 13006-13010, 13016-13017, 13023, 13025-13027,
13033-13035, 13037-13038, 13049-13051, 13053-13056, 13058,
13060-13062, 13064-13070, 13072, 13075, 13078, 13080, 13083-13087,
13091-13097, 13101, 13103, 13105, 13108-13110, 13112-13116,
13119-13122, 13126, 13130-13131, 13133-13137, 13139-13147,
13149, 13151, 13154-13155, 13159-13163, 13166-13168, 13170-13171,
13173-13174, 13176-13179, 13182-13186, 13188, 13190-13197,
13199-13200, 13202-13205, 13207-13216, 13218-13227, 13229-13231,
13234-13235, 13237, 13239-13240, 13242-13243, 13245-13247,
13250-13252, 13254, 13262, 13264-13266, 13269-13281, 13283-13284,
13286-13287, 13291, 13294-13298, 13300, 13303, 13305, 13307-13311,
13316, 13318-13319, 13322, 13324-13332, 13334, 13336-13337,
13340-13343, 13345, 13347, 13349-13351, 13355-13358, 13361-13368,
13370-13371, 13373-13374, 13376, 13378, 13380-13386, 13389-13390,
13392, 13394-13398, 13400-13405, 13407, 13409-13415, 13419-13420,
13422-13424, 13428, 13431-13439, 13441, 13443-13444, 13446-13452,
13455-13461, 13463, 13465-13468, 13470-13471, 13474-13475, 13477,
13479, 13482, 13484-13489, 13492-13500, 13504-13505, 13507-13514,
13516-13517, 13519, 13525-13526, 13531, 13533, 13535-13537,
13540-13541, 13543-13544, 13548-13552, 13554, 13556, 13559-13564,
13566-13568, 13573, 13575, 13577-13580, 13582, 13584, 13587-13588,
13591-13593, 13596-13599, 13601-13604, 13608-13610, 13615, 13617,
13619-13622, 13625-13626, 13628-13629, 13633, 13635-13637,
13640-13643, 13647-13648, 13650-13658, 13660-13661, 13664,
13666-13667, 13669-13672, 13674-13675, 13678-13679, 13682-13686,
13689-13690, 13693-13699, 13703, 13712-13714, 13719-13720, 13722,
13724, 13726, 13728, 13730, 13732, 13735-13740, 13742, 13745-13748,
13751-13752, 13754-13761, 13763, 13768-13770, 13772, 13774-13775,
13778, 13781, 13786, 13788, 13790-13793, 13798-13802, 13809-13812,
13816, 13823-13824, 13826-13827, 13829-13830, 13832, 13835-13836,
13838-13842, 13844, 13847, 13849, 13852-13854, 13856, 13860,
13862-13864, 13867, 13872, 13874, 13876-13878, 13881, 13883, 13885,
13889, 13891-13895, 13901-13902, 13905, 13907-13916, 13920,
13922-13923, 13925, 13929, 13933, 13935, 13939-13950, 13953, 13955,
13957-13963, 13966-13969, 13971-13972, 13974, 13976, 13979,
13981-13983, 13985-13989, 13994, 13996-13997, 13999-14000,
14004-14006, 14008-14009, 14012-14017, 14019, 14021, 14024, 14027,
14030-14031, 14033, 14039, 14043, 14046, 14049-14051, 14057-14058,
14061, 14064-14070, 14072-14075, 14079-14080, 14082, 14084-14087,
14089-14090, 14092-14102, 14107-14108, 14112-14113, 14116-14121,
14123-14125, 14127-14130, 14132, 14134, 14141, 14143-14144,
14148-14149, 14152-14157, 14159-14165, 14167-14171, 14173, 14175,
14177-14178, 14182-14184, 14186, 14189, 14191-14194, 14196-14197,
14199, 14203-14204, 14206-14207, 14210, 14213, 14216-14218, 14221,
14223-14224, 14226-14230, 14233, 14235-14237, 14239-14240,
14242-14244, 14246-14247, 14249, 14252-14255, 14257, 14260,
14262-14263, 14266, 14268-14269, 14273, 14279-14285, 14289-14293,
14296, 14298, 14300-14301, 14310, 14322, 14324, 14326, 14332-14333,
14337-14339, 14341-14344, 14346-14347, 14349, 14351, 14353,
14356-14360, 14362, 14364-14367, 14370, 14373-14374, 14380,
14386-14388, 14391, 14393-14394, 14396, 14398-14400, 14403, 14411,
14418, 14423-14424, 14431-14432, 14436-14437, 14441, 14446-14447,
14449-14451, 14455-14457, 14459-14460, 14462-14463, 14465,
14471-14473, 14475-14476, 14478, 14480-14482, 14484, 14487,
14490-14494, 14496, 14498-14499, 14502-14505, 14508-14509, 14513,
14515-14517, 14520-14522, 14524-14526, 14528, 14532-14533, 14536,
14538, 14540-14541, 14543-14544, 14546, 14552, 14555-14558, 14560,
14562, 14564-14570, 14574-14575, 14577, 14580-14582, 14586-14592,
14595, 14599, 14602, 14604-14606, 14608-14612, 14617-14620,
14623-14624, 14626-14627, 14629, 14632-14633, 14635-14636,
14638-14639, 14641-14642, 14644-14651, 14653-14656, 14659,
14661, 14664-14671, 14673, 14675-14676, 14680-14682, 14687,
14689-14690, 14692, 14694-14698, 14701, 14703-14704, 14706-14709,
14711, 14713-14715, 14723, 14727, 14729-14732, 14734, 14737,
14745-14747, 14749-14751, 14753-14755, 14760, 14762-14765,
14767-14768, 14771-14775, 14781-14786, 14788-14792, 14794-14796,
14798-14799, 14801-14807, 14809-14810, 14812, 14814, 14816-14817,
14819-14822, 14827-14828, 14830-14831, 14833-14834, 14837-14839,
14842-14846, 14848-14849, 14851-14853, 14855, 14858-14864, 14867,
14880-14887, 14891, 14894, 14896-14899, 14901-14904, 14907-14909,
14911, 14913, 14915, 14917-14919, 14921-14923, 14925, 14928, 14930,
14935-14936, 14938-14939, 14941, 14948, 14952-14953, 14955-14956,
14960, 14962, 14966-14972, 14974-14975, 14977, 14979-14982, 14985,
14987-14989, 14992, 14994-14997, 15000, 15002-15005, 15008-15010,
15012-15017, 15019-15023, 15027-15028, 15030-15031, 15033, 15035,
15037-15041, 15043-15044, 15046-15048, 15051-15053, 15056,
15058-15060, 15062-15066, 15068-15074, 15076-15077, 15081-15083,
15085, 15087, 15089, 15094, 15098, 15102, 15104-15108, 15110-15116,
15119-15123, 15125-15126, 15128, 15132, 15139-15142, 15144-15145,
15147, 15151-15152, 15155, 15158, 15163-15164, 15166-15168,
15170-15172, 15174-15175, 15177-15178, 15181-15183, 15185-15186,
15188-15190, 15192, 15194, 15197, 15202, 15209, 15215, 15219,
15224-15226, 15228, 15230, 15232-15233, 15235-15238, 15249-15250,
15252-15253, 15255, 15257-15259, 15262, 15266, 15268-15271,
15273-15274, 15277, 15279-15280, 15283-15287, 15289-15290,
15292-15297, 15300, 15302, 15308-15312, 15315, 15319, 15328-15331,
15334, 15338, 15342, 15344, 15346, 15351, 15353-15354, 15360, 15365,
15371, 15374, 15377-15383, 15387, 15390-15391, 15393, 15395,
15398-15400, 15407, 15409, 15411-15416, 15418-15419, 15423-15426,
15428, 15430, 15432-15434, 15437, 15444, 15446, 15448, 15450-15456,
15459-15460, 15463-15464, 15468-15476, 15478-15482, 15484,
15487-15493, 15497-15498, 15504-15507, 15515, 15517, 15519-15521,
15523-15527, 15529-15531, 15533-15534, 15536-15539, 15542, 15545,
15549, 15551, 15555, 15567, 15570-15571, 15573, 15575-15576, 15581,
15583-15584, 15586, 15589-15594, 15598-15599, 15601-15602, 15605,
15609-15611, 15614-15615, 15618-15620, 15626, 15635, 15645, 15648,
15650-15652, 15659, 15661-15666, 15668, 15670-15671, 15674,
15676-15677, 15679-15691, 15694, 15700-15701, 15703-15713,
15715-15716, 15718, 15720-15722, 15727-15730, 15732-15733,
15736-15740, 15742, 15746, 15749-15765, 15768, 15770, 15773-15774,
15777, 15779-15784, 15786-15802, 15804-15809, 15811, 15813-15828,
15830-15835, 15837-15838, 15840-15846, 15848-15858, 15860-15861,
15864, 15866, 15868-15878, 15880, 15882-15886, 15892-15893,
15897-15898, 15900-15902, 15904, 15906-15907, 15910-15923,
15926-15927, 15929-15933, 15935-15936, 15942-15943, 15945-15947,
15949-15950, 15953, 15956-15963, 15965-15966, 15968, 15970-15971,
15973-15974, 15976, 15978-15981, 15983, 15986, 15988-15989,
15991-15995, 15997-15998, 16004-16005, 16007-16012, 16015-16016,
16018-16020, 16023-16032, 16034, 16037-16038, 16044, 16046-16050,
16053, 16057, 16059, 16061, 16063-16064, 16069, 16071-16079,
16082-16083, 16085-16088, 16094-16096, 16098, 16101, 16109-16110,
16112-16115, 16117, 16119-16120, 16127-16129, 16131, 16137,
16139-16141, 16143-16145, 16149, 16151, 16154-16155, 16159-16162,
16166-16174, 16178, 16180-16182, 16185-16189, 16191, 16197-16204,
16206-16209, 16216-16217, 16219, 16223-16227, 16229, 16233-16234,
16236-16239, 16241-16244, 16246-16247, 16249, 16252, 16254, 16257,
16259-16260, 16263-16264, 16266-16269, 16273, 16276, 16279-16284,
16288-16290, 16292, 16295, 16298, 16302-16303, 16305-16309, 16318,
16321, 16327, 16330-16334, 16336-16341, 16343, 16347, 16350,
16352-16353, 16356, 16358-16359, 16363, 16365-16370, 16374, 16376,
16381, 16383, 16385-16392, 16394-16401, 16403-16404, 16407, 16409,
16412-16414, 16416-16423, 16425-16426, 16430-16433, 16435, 16437,
16439-16441, 16444-16447, 16450, 16452-16455, 16457-16459
Single Strand Oligonucleotides (Sense Strand of Target Gene)
SegID range: 16426-45713
SeqIDs w/o G Runs:
16426-16443, 16451-16453, 16455-16465, 16480-16511, 16554-16810,
16824-16869, 16884-16919, 16934-17023, 17037-17389, 17403-17628,
17643-17720, 17734-17741, 17765-17790, 17814-17818, 17843-17880,
17894-17927, 17941-17950, 17964-17998, 18012-18082, 18098,
18114-18140, 18155, 18174-18189, 18216-18220, 18234-18264,
18278-18336, 18350-18354, 18368-18377, 18391-18402, 18421-18428,
18444-18445, 18459-18578, 18592-18628, 18642-18660, 18674-18687,
18702-18703, 18718-18722, 18737-18744, 18758-18770, 18791-18808,
18823-18926, 18956-19009, 19023-19040, 19054-19078, 19092-19133,
19147-19205, 19220-19401, 19415-19417, 19431-19497, 19511-19539,
19553-19555, 19569-19591, 19605-19606, 19620-19846, 19861-20036,
20050-20056, 20084-20099, 20114-20130, 20144-20172, 20186-20261,
20275-20454, 20469-20683, 20697-20848, 20862-21014, 21049-21165,
21180-21242, 21256-21261, 21275-21280, 21294-21361, 21398-21446,
21460-21521, 21535-21603, 21617-21984, 21998-22155, 22174-22182,
22196-22318, 22341-22450, 22464-22465, 22479-22500, 22515-22522,
22548-22598, 22613-22657, 22671-22699, 22713-22723, 22737-22753,
22767-22793, 22816-22817, 22831-22919, 22933-22954, 22980-23032,
23046-23050, 23065-23077, 23098, 23119-23211, 23225-23290,
23305-23318, 23333-23340, 23357-23362, 23389-23425, 23480-23483,
23513-23535, 23557-23602, 23648-23668, 23684-23744, 23765-23780,
23802-23815, 23841-23889, 23903-23920, 23935-23954, 23969-24010,
24033-24053, 24067-24088, 24110-24135, 24149-24169, 24191-24198,
24213-24219, 24235-24242, 24256-24309, 24323-24369, 24389-24511,
24525-24717, 24739-24799, 24814-24913, 24928-24930, 24944-24992,
25006-25072, 25086-25182, 25198-25248, 25262-25274, 25288-25487,
25502-25823, 25838-25932, 25947-26034, 26061-26135, 26149,
26164-26220, 26254-26297, 26311-26322, 26345, 26359-26361,
26375-26392, 26407, 26422-26521, 26535-26544, 26559-26603,
26617-26670, 26694-26793, 26807, 26821-26848, 26862, 26905-26979,
26993-27012, 27043-27072, 27088-27264, 27279-27295, 27309-27325,
27339-27405, 27420-27539, 27554-27573, 27587-27614, 27653-27671,
27697, 27729-27790, 27812-27832, 27858-27897, 27928-27935,
27949-27951, 27966-27976, 27990-27997, 28024-28139, 28153-28272,
28287-28306, 28320-28627, 28641-28650, 28664-28666, 28691-28694,
28708-28794, 28814-29339, 29354-29395, 29423-29515, 29535-29839,
29873-30111, 30125-30439, 30453-30461, 30475-30691, 30715-30731,
30763-30884, 30898-30941, 30955-30996, 31010-31244, 31259-31304,
31318-31352, 31366-31378, 31392-31439, 31453-31501, 31531-31596,
31611-31618, 31632-31750, 31765-31776, 31790-31899, 31913-31923,
31937-31940, 31954-32036, 32050-32066, 32080-32176, 32191-32227,
32241-32250, 32264-32270, 32285-32337, 32351-32359, 32373-32388,
32408-32478, 32503, 32517-32589, 32603-32729, 32744-32795,
32809-32953, 32967-32968, 32993-33318, 33332-33367, 33382-33464,
33478-33507, 33531-33590, 33604-33606, 33633-33639, 33653-33690,
33704-33709, 33723, 33739-33749, 33776, 33797-34293, 34308-34364,
34389-34414, 34430-34457, 34471-34472, 34486-34506, 34531-34562,
34599-34804, 34818-34832, 34876-34881, 34896-34945, 34985-35012,
35047-35053, 35067-35091, 35105-35240, 35255-35263, 35277-35352,
35368-35379, 35393-35498, 35523-35582, 35635-35764, 35779-35901,
35917-36076, 36099-36103, 36125-36130, 36148-36160, 36174-36217,
36231-36242, 36265-36317, 36336-36523, 36550-36605, 36619-36804,
36818-37213, 37260-37264, 37292-37303, 37323-37418, 37437-37482,
37518-37557, 37578-37592, 37617-37619, 37633-37640, 37654-37726,
37740-37800, 37822-37830, 37844-37865, 37880-37945, 37959-37974,
38000-38107, 38121-38138, 38152-38344, 38358-38398, 38412-38530,
38547-38564, 38578-38669, 38683-38700, 38714-38775, 38797-38866,
38892-38902, 38908-38925, 38948-38970, 38993-39015, 39036-39069,
39083-39423, 39437-40260, 40275-40294, 40309-40460, 40474-40493,
40523-40526, 40557-40656, 40670-40672, 40688-40796, 40824-40826,
40847-40861, 40875-40899, 40913-40967, 40982-41097, 41111-41285,
41309-41311, 41326-41450, 41464-41600, 41614-41684, 41698,
41724-41758, 41772-41809, 41824-41882, 41896-41921, 41935-42033,
42047-42172, 42186-42187, 42222-42253, 42278-42448, 42463-42601,
42615-42621, 42635-42711, 42725-42740, 42760-42887, 42901-42965,
42980-42988, 43002-43010, 43024-43030, 43053-43096, 43110-43228,
43242-43243, 43270-43287, 43301-43391, 43405-43505, 43519-43523,
43537-43557, 43571-43622, 43636-43668, 43682-43695, 43716-43722,
43736-43816, 43830-43851, 43865-44058, 44072-44344, 44358-44406,
44420-44445, 44459-44464, 44484-44496, 44516-44547, 44561-44583,
44627-44630, 44644-44738, 44752-44763, 44777-44861, 44878-44925,
44941-45010, 45036-45040, 45074-45201, 45215-45267, 45293-45342,
45355-45378, 45391-45433, 45452-45513, 45524-45665, 45679-45688,
45702-45713
SeqIDs w/o miR Seeds:
16426, 16430-16433, 16435, 16437, 16439-16441, 16444-16447, 16450,
16452-16455, 16457-16459, 16462-16465, 16467-16468, 16470-16472,
16478-16487, 16489, 16492, 16495-16497, 16499-16500, 16504,
16507-16508, 16510-16516, 16524-16529, 16531-16534, 16536, 16541,
16544, 16549, 16552, 16554, 16558, 16560-16565, 16567, 16570-16572,
16574, 16576, 16580, 16582, 16585-16586, 16588-16593, 16595-16597,
16599-16602, 16604-16605, 16607-16611, 16613, 16615-16621, 16623,
16625, 16627-16636, 16638, 16640-16643, 16646, 16649-16650,
16652-16663, 16665-16668, 16670-16671, 16673, 16676-16677,
16679-16682, 16685-16686, 16690, 16692, 16694, 16699-16701, 16703,
16705-16707, 16709-16710, 16712, 16714-16718, 16720-16725, 16729,
16732-16735, 16737-16742, 16747-16753, 16755, 16757-16758,
16760-16776, 16778-16779, 16781-16783, 16785-16789, 16792,
16795-16803, 16806, 16809-16811, 16813-16816, 16818-16820,
16822-16823, 16826-16827, 16830-16832, 16834-16835, 16837-16847,
16851-16852, 16854, 16858-16861, 16863, 16866, 16868-16870,
16872-16874, 16882, 16884-16894, 16896, 16898, 16900-16901,
16905-16907, 16909, 16911-16913, 16915, 16917, 16919, 16922-16923,
16925, 16928, 16930, 16932-16934, 16936-16937, 16940, 16942-16946,
16948, 16953-16954, 16956-16957, 16959-16961, 16964-16966,
16968-16971, 16973, 16975-16984, 16987, 16989-16993, 16998-17003,
17005, 17010-17012, 17014-17015, 17017, 17019-17021, 17023-17025,
17027-17029, 17039, 17041, 17043, 17045, 17048, 17052-17053,
17055-17056, 17058-17059, 17061-17068, 17072, 17075, 17078, 17081,
17084-17087, 17089, 17092, 17094-17097, 17099-17101, 17104,
17107-17108, 17112-17120, 17122, 17124-17125, 17128-17130,
17132-17133, 17139, 17141, 17143-17146, 17149, 17154-17156,
17158-17159, 17161-17162, 17164, 17169-17176, 17179-17182, 17185,
17187-17188, 17190, 17195, 17197-17198, 17200-17210, 17213,
17217-17220, 17222-17227, 17229-17230, 17234-17236, 17238-17239,
17241, 17245-17253, 17255, 17257-17262, 17264-17265, 17267,
17270-17271, 17273-17276, 17279, 17281-17283, 17285-17288, 17292,
17294-17296, 17299, 17301-17309, 17313, 17316-17318, 17320-17321,
17324-17325, 17328, 17333, 17337, 17340-17343, 17347-17350,
17354-17355, 17357, 17359-17362, 17364-17367, 17370, 17372-17374,
17377-17384, 17386-17387, 17391, 17396, 17398, 17402, 17405, 17407,
17410-17412, 17414, 17420-17421, 17424-17428, 17430-17432, 17435,
17439-17447, 17449-17451, 17453, 17455, 17457-17460, 17462-17464,
17467, 17470, 17472-17475, 17478, 17481-17483, 17490, 17492-17493,
17495-17500, 17502-17503, 17505-17506, 17510-17515, 17518-17519,
17522, 17526-17528, 17530, 17532-17535, 17537-17538, 17541, 17543,
17545, 17547-17549, 17558-17559, 17562, 17565, 17567, 17570, 17572,
17577-17581, 17583, 17586-17588, 17590-17593, 17595, 17597-17598,
17600, 17603, 17605-17609, 17611-17613, 17615-17622, 17626, 17628,
17630, 17632-17635, 17642, 17645, 17649-17652, 17657-17660,
17662-17668, 17670-17671, 17673-17674, 17676-17678, 17680,
17683-17684, 17686-17687, 17689-17691, 17698-17709, 17711-17712,
17715-17716, 17718, 17721-17722, 17724-17730, 17732, 17734,
17741-17747, 17750-17751, 17753-17756, 17764-17765, 17767-17770,
17772, 17775-17776, 17779, 17781-17783, 17785, 17790-17794,
17796, 17798-17799, 17807-17808, 17810, 17812, 17816-17819,
17823-17824, 17826, 17829, 17831-17832, 17834, 17837, 17841,
17843-17844, 17846-17853, 17855-17857, 17860-17866, 17870,
17872-17877, 17881-17883, 17886-17887, 17889-17890, 17894-17896,
17898, 17900-17901, 17904, 17906, 17910-17920, 17923-17925,
17927-17929, 17931-17934, 17936, 17941-17944, 17949, 17952-17953,
17955, 17960, 17963-17965, 17967, 17969, 17971-17972, 17974-17975,
17983, 17987, 17994-17998, 18000, 18004, 18007, 18012, 18014-18016,
18021-18027, 18029-18030, 18032, 18036, 18038, 18040-18042,
18044-18046, 18049, 18051, 18058, 18060-18063, 18067-18069,
18071-18072, 18076-18079, 18081, 18083-18085, 18087-18092,
18097-18100, 18102-18108, 18110, 18112, 18114-18116, 18118, 18125,
18129, 18131, 18133-18135, 18139, 18142, 18145-18146, 18150-18151,
18153-18155, 18161-18162, 18166, 18169-18178, 18180, 18182-18183,
18187-18193, 18198, 18201, 18203, 18206-18210, 18214-18219,
18225-18227, 18231, 18233-18234, 18236, 18239-18242, 18245,
18247-18248, 18251-18252, 18255-18256, 18262-18267, 18270, 18273,
18280, 18282-18283, 18286, 18288, 18295, 18297, 18300-18302,
18305-18306, 18310, 18312, 18315, 18317-18319, 18322-18325,
18327-18328, 18330, 18332, 18335-18336, 18338, 18340-18341, 18345,
18350, 18352-18353, 18357-18359, 18363, 18366, 18369, 18371,
18374-18376, 18378-18380, 18383-18384, 18388, 18390-18399,
18401-18402, 18405, 18407-18413, 18416, 18421, 18425-18428,
18434-18435, 18441, 18443-18445, 18447-18449, 18451-18453, 18457,
18459-18461, 18463-18471, 18473-18474, 18478-18480, 18482-18487,
18489-18491, 18493-18494, 18498, 18500, 18503-18504, 18507-18510,
18514-18517, 18521, 18523-18527, 18529, 18531, 18534, 18536-18539,
18541, 18545, 18548-18553, 18557-18561, 18563-18564, 18566-18567,
18569-18572, 18574, 18576-18580, 18582, 18588-18589, 18591,
18593-18601, 18603, 18605-18610, 18612-18615, 18617-18621, 18623,
18625, 18631, 18635-18638, 18640-18642, 18644-18645, 18648-18651,
18653, 18658-18659, 18662-18668, 18673-18674, 18676-18678,
18682-18683, 18685-18693, 18697, 18699, 18702, 18704, 18708,
18710-18712, 18720-18721, 18724-18728, 18736-18739, 18741,
18743-18746, 18748-18751, 18755, 18757-18759, 18761, 18763-18764,
18766, 18770, 18777, 18779, 18781-18786, 18788-18794, 18796-18797,
18801, 18803-18805, 18808, 18812-18813, 18818, 18821, 18823-18824,
18830-18831, 18836, 18838-18839, 18841, 18844-18846, 18848, 18853
, 18856-18857, 18859-18860, 18863-18868, 18873-18878, 18880-18881,
18887, 18890-18893, 18897, 18900-18901, 18903, 18907, 18911-18915,
18917-18918, 18920, 18924, 18929-18930, 18933, 18935, 18943,
18947-18948, 18951-18954, 18958, 18960, 18962, 18966-18970,
18973, 18975, 18977-18978, 18980-18982, 18984-18991, 18993-18995,
18998, 19002-19005, 19008, 19010-19020, 19022, 19024-19025,
19027-19028, 19036-19038, 19045-19046, 19049, 19055-19056,
19061-19062, 19064, 19067, 19071-19073, 19076-19078, 19080, 19083,
19093-19095, 19097, 19099-19102, 19104-19107, 19109, 19113-19114,
19116, 19120, 19123-19126, 19128, 19130-19134, 19137, 19139,
19141-19142, 19147, 19150-19155, 19157-19162, 19164-19169,
19172-19173, 19176-19181, 19183-19186, 19188-19189, 19194-19195,
19204-19210, 19215, 19221, 19226-19232, 19234, 19236, 19240,
19244-19247, 19249-19252, 19255-19257, 19260-19261, 19263-19265,
19271, 19275-19276, 19278-19279, 19282, 19284, 19286, 19289-19290,
19292-19294, 19298, 19303, 19306, 19309-19315, 19317-19318,
19323-19326, 19329-19332, 19336-19337, 19341, 19343-19352, 19354,
19356-19363, 19365, 19368, 19371-19374, 19376-19379, 19381-19382,
19384-19389, 19391, 19396, 19398-19399, 19404-19406, 19414-19415,
19417, 19419, 19421-19424, 19426-19427, 19430-19432, 19434,
19440-19444, 19446, 19448-19449, 19451-19461, 19463, 19468-19472,
19475-19476, 19478, 19480-19481, 19483-19484, 19487, 19490, 19493,
19500-19503, 19506, 19510, 19512, 19514-19515, 19517-19520,
19522-19525, 19527-19529, 19532, 19538, 19541-19542, 19544-19547,
19552-19553, 19556-19558, 19560-19564, 19566-19567, 19569-19570,
19572-19573, 19578-19582, 19584-19585, 19587-19592, 19594-19597,
19599-19600, 19605-19610, 19613-19617, 19619-19621, 19623,
19626-19628, 19630, 19634, 19637-19639, 19641-19643, 19645,
19648, 19651, 19655-19659, 19661-19662, 19664, 19667-19671,
19673-19674, 19678-19679, 19682-19683, 19685-19691, 19695-19703,
19705-19707, 19709-19713, 19716-19717, 19719-19722, 19724-19730,
19732-19740, 19742-19744, 19746, 19750-19752, 19755-19758, 19760,
19762, 19764-19765, 19768-19769, 19771, 19774-19776, 19778-19782,
19785, 19787, 19789-19798, 19800-19807, 19811-19812, 19814-19816,
19818-19820, 19822, 19825, 19827-19828, 19831-19832, 19834-19839,
19842, 19844-19846, 19848-19852, 19858, 19860-19861, 19863-19869,
19871-19878, 19880-19881, 19883-19885, 19890-19891, 19893,
19895-19900, 19903-19905, 19907-19908, 19911-19914, 19916,
19918-19919, 19922-19923, 19925-19928, 19930-19932, 19934-19935,
19937, 19939-19940, 19942, 19944-19946, 19948-19949, 19952-19953,
19957-19958, 19960, 19963, 19965, 19967-19973, 19976-19977, 19983,
19985-19989, 19991, 19993-19994, 19996, 19998, 20000-20002,
20005-20020, 20022, 20024-20025, 20027-20035, 20037, 20039-20041,
20044-20046, 20049, 20051-20055, 20057, 20059-20064, 20071, 20073,
20075-20076, 20078, 20081, 20083-20084, 20086, 20089-20092, 20094,
20096-20097, 20102-20105, 20111-20115, 20121, 20129-20131,
20133-20135, 20137, 20140, 20144-20149, 20151, 20155, 20159,
20162-20164, 20166-20167, 20169, 20171, 20173, 20176, 20180-20181,
20185-20186, 20189, 20191-20197, 20202-20211, 20215, 20218-20219,
20223-20228, 20232, 20236-20245, 20248-20254, 20256-20257,
20259-20267, 20269, 20272, 20274-20275, 20277-20280, 20282,
20285-20286, 20288, 20290, 20293-20300, 20306, 20308, 20310-20312,
20314-20317, 20320-20322, 20324, 20328, 20330-20332, 20334-20346,
20348, 20350-20356, 20358, 20360-20372, 20374-20377, 20379-20380,
20391-20392, 20394-20395, 20398-20399, 20401-20403, 20406-20408,
20410, 20412-20417, 20419-20420, 20422, 20425, 20427-20428, 20430,
20432-20433, 20437-20438, 20440-20444, 20447-20448, 20450-20461,
20467-20472, 20476, 20479-20483, 20488-20491, 20494-20496,
20498-20500, 20504, 20508-20513, 20516, 20518-20519, 20521,
20523-20525, 20527, 20529-20532, 20534, 20537, 20539-20543, 20545,
20551-20555, 20557, 20561-20563, 20566-20572, 20574-20576,
20578-20588, 20590-20593, 20595-20597, 20601-20603, 20605, 20607,
20609-20614, 20617-20618, 20620-20632, 20634, 20637-20638,
20641-20644, 20647-20648, 20652-20654, 20657, 20664, 20667,
20670-20671, 20674, 20680-20686, 20688-20689, 20691-20693, 20695,
20698, 20701-20705, 20707-20708, 20711, 20713, 20716-20719, 20721,
20728, 20732-20734, 20738-20741, 20743-20744, 20746-20748,
20750-20751, 20754, 20757, 20759-20764, 20766, 20768, 20772-20779,
20781-20787, 20789-20790, 20792-20796, 20799, 20802-20803,
20806-20826, 20831-20833, 20835-20837, 20839-20840, 20844-20847,
20849-20850, 20854, 20858, 20860-20862, 20866, 20868, 20870-20876,
20878-20887, 20889-20890, 20894, 20897-20899, 20906-20907,
20910-20913, 20916, 20918-20922, 20925, 20928-20933, 20939-20946,
20948, 20950-20955, 20957-20960, 20962-20966, 20968, 20970,
20973-20974, 20976-20978, 20982-20985, 20987-20989, 20994, 20996,
20998-20999, 21001-21003, 21005-21006, 21008, 21010-21012,
21016-21019, 21021-21022, 21029, 21032, 21035, 21037, 21039, 21041,
21044-21045, 21047-21051, 21053, 21057, 21065, 21067-21069, 21076,
21078-21080, 21084-21085, 21087, 21089-21094, 21096, 21099-21100,
21103-21108, 21110, 21112-21114, 21116-21117, 21121-21126, 21128,
21131-21138, 21140-21142, 21146, 21149-21150, 21152-21154, 21156,
21158-21159, 21163, 21165-21166, 21170, 21175, 21179, 21185-21194,
21196-21199, 21201, 21205-21209, 21211-21212, 21214, 21216-21219,
21221-21227, 21229-21231, 21233-21236, 21238, 21241, 21243,
21248-21251, 21256-21259, 21261, 21263-21269, 21273, 21275-21280,
21284, 21286-21287, 21293-21295, 21297-21298, 21300, 21302-21310,
21313-21314, 21317, 21320-21321, 21325, 21327-21328, 21330,
21332-21333, 21337-21338, 21340-21341, 21344, 21346-21348, 21351,
21354-21358, 21365-21370, 21375-21377, 21379, 21381, 21385, 21387,
21389, 21395, 21397-21403, 21405-21406, 21408-21411, 21418-21422,
21424-21425, 21427-21431, 21433, 21436, 21438-21439, 21444,
21448-21449, 21451-21453, 21455, 21457-21461, 21465-21467,
21471-21473, 21477, 21479, 21482-21484, 21486, 21490, 21492, 21494,
21496-21497, 21499, 21501, 21503-21507, 21511-21514, 21516-21517,
21519, 21522-21525, 21527-21531, 21536, 21541, 21543-21545,
21547-21552, 21556-21557, 21560-21561, 21568-21569, 21571-21578,
21580, 21586, 21590-21593, 21596-21598, 21604-21607, 21609,
21611-21613, 21615-21617, 21619, 21625-21628, 21631, 21633-21634,
21637-21639, 21642-21653, 21655-21657, 21660-21662, 21664-21665,
21670-21671, 21673, 21675, 21678-21680, 21682, 21687-21695, 21697,
21699-21702, 21708-21711, 21713, 21718, 21721, 21723, 21725-21726,
21731, 21733-21738, 21740-21745, 21747, 21750-21752, 21757-21758,
21760, 21762, 21769-21774, 21777-21780, 21783-21785, 21788-21792,
21794-21796, 21798-21800, 21802-21806, 21811-21814, 21816, 21818,
21820-21828, 21830-21837, 21841, 21843, 21845, 21847-21848,
21850-21851, 21853-21855, 21857-21859, 21861, 21863-21868,
21870-21874, 21876-21878, 21880-21881, 21883, 21887-21888,
21890-21897, 21899-21903, 21905, 21907-21909, 21911-21914,
21917-21918, 21921, 21925, 21927, 21929-21934, 21937, 21940-21942,
21944-21945, 21947-21948, 21952, 21954-21956, 21960-21963,
21965-21966, 21968, 21971-21973, 21976, 21978, 21980-21983,
21985, 21987-21988, 21991-21993, 21995, 21997-21998, 22001, 22003,
22005-22007, 22009-22010, 22017, 22020-22021, 22023, 22025-22026,
22029-22031, 22034, 22037, 22039, 22041, 22043, 22046, 22049, 22051,
22053-22063, 22065-22066, 22068-22070, 22073, 22075-22076,
22082-22089, 22091-22093, 22095, 22097-22102, 22105-22106, 22109,
22112-22113, 22116-22117, 22119-22125, 22130, 22132-22133,
22135-22136, 22139-22143, 22153-22157, 22161-22162, 22165-22166,
22168-22171, 22175, 22180-22181, 22185-22186, 22188-22190,
22196-22199, 22201, 22205-22206, 22208, 22210-22215, 22217,
22222-22225, 22227, 22229-22234, 22236-22241, 22243, 22247,
22249-22250, 22252-22255, 22257-22261, 22263-22265, 22267-22269,
22271, 22273, 22275-22278, 22287-22288, 22290-22292, 22296, 22298,
22301, 22303, 22308, 22310, 22313, 22316, 22320, 22323-22324, 22329,
22332, 22339, 22341-22342, 22345-22347, 22349, 22355, 22357-22359,
22361-22363, 22365, 22367-22369, 22373, 22376-22377, 22379-22380,
22384, 22387-22393, 22397-22398, 22401, 22403-22407, 22410,
22413-22414, 22416-22427, 22430-22432, 22434-22437, 22440-22441,
22446, 22448-22450, 22452-22459, 22461, 22469-22474, 22476,
22479-22480, 22482-22485, 22491, 22493-22495, 22500, 22502-22503,
22505-22506, 22508, 22515, 22519-22523, 22525, 22527, 22531-22532,
22541-22542, 22545-22546, 22548-22551, 22553-22554, 22556, 22564,
22566-22569, 22571-22579, 22581, 22583, 22585-22589, 22592-22597,
22601, 22604-22605, 22608-22609, 22612-22615, 22618-22622,
22624-22635, 22637, 22641-22642, 22644-22645, 22647-22650, 22653,
22655, 22658-22660, 22664-22667, 22673, 22680, 22682, 22685-22691,
22694-22698, 22700-22708, 22712, 22719, 22721, 22723-22724, 22730,
22732-22734, 22737, 22742-22744, 22746, 22749, 22751-22752,
22754-22755, 22757, 22759, 22762-22763, 22766, 22768, 22771, 22774,
22777-22778, 22780, 22784-22789, 22792, 22795-22796, 22798-22801,
22804, 22807, 22809, 22811-22813, 22815-22816, 22818-22821,
22823-22825, 22827, 22831-22836, 22838-22841, 22845-22854,
22856-22859, 22861, 22866-22871, 22873, 22875-22879, 22883,
22885-22887, 22891-22894, 22896-22898, 22901-22902, 22904-22906,
22908-22914, 22916-22919, 22923-22927, 22931, 22933, 22935, 22938,
22944-22948, 22950-22952, 22954-22956, 22958-22959, 22961, 22964,
22968-22974, 22976-22977, 22981, 22983-22984, 22989-22991,
22994-22995, 22999-23008, 23010-23011, 23014-23015, 23017-23020,
23022-23025, 23028-23029, 23031-23032, 23035-23038, 23041, 23044,
23046-23047, 23049-23054, 23056-23057, 23065, 23067-23072,
23074-23075, 23077-23079, 23081-23082, 23085, 23092-23093,
23096-23102, 23104, 23111, 23113-23114, 23117, 23119-23123,
23125-23126, 23129-23130, 23134, 23136-23138, 23140, 23142-23146,
23148-23150, 23152-23158, 23160-23166, 23168-23173, 23176-23178,
23180, 23182, 23184-23185, 23187-23188, 23190-23204, 23206-23213,
23216-23218, 23221-23222, 23227-23228, 23232-23235, 23237-23241,
23243, 23245, 23247-23248, 23250-23252, 23254-23256, 23259-23262,
23264, 23268-23270, 23275-23280, 23283-23287, 23291, 23293,
23295-23296, 23298-23299, 23302, 23304-23310, 23312, 23314-23317,
23321-23322, 23324, 23326-23327, 23333, 23335-23337, 23339-23342,
23344-23345, 23347, 23349, 23358-23359, 23362, 23364-23370,
23377-23384, 23386-23389, 23391-23393, 23396-23403, 23405-23406,
23409, 23412, 23414-23415, 23417-23418, 23420-23422, 23424,
23426-23430, 23433, 23435-23436, 23438-23442, 23454-23455,
23457, 23463, 23466, 23469, 23471-23474, 23476-23477, 23483,
23486-23487, 23489, 23491-23492, 23494-23501, 23503-23507,
23512-23514, 23516-23518, 23520, 23522-23523, 23525-23527, 23529,
23531-23533, 23535-23537, 23540, 23544, 23549-23551, 23553-23554,
23557, 23559-23562, 23564, 23566-23567, 23570, 23572-23582, 23584,
23586-23589, 23591-23592, 23597-23605, 23607-23610, 23616-23620,
23622-23624, 23627, 23630-23631, 23633-23635, 23637, 23642,
23644-23645, 23649-23650, 23652-23653, 23656-23657, 23659-23663,
23667-23668, 23670, 23672-23673, 23680, 23684-23685, 23687-23691,
23693-23694, 23696-23697, 23699-23701, 23704-23705, 23707-23715,
23720, 23722-23724, 23726-23727, 23729, 23731-23732, 23734-23735,
23737, 23739-23746, 23748, 23750, 23756-23757, 23759, 23762, 23765,
23768, 23776-23777, 23783, 23785-23788, 23794-23799, 23801-23806,
23808-23809, 23812, 23816, 23818, 23820, 23823-23824, 23827,
23829-23833, 23835-23836, 23839-23849, 23851, 23854-23872,
23876-23878, 23880-23884, 23888-23890, 23892-23893, 23895-23898,
23903, 23905-23911, 23916, 23919-23928, 23936-23938, 23941-23942,
23944-23946, 23948, 23950-23952, 23954-23962, 23965, 23969-23971,
23975, 23978, 23980-23981, 23984, 23986, 23988-23989, 23991,
23993-23996, 23998-24005, 24007, 24011-24013, 24015-24016, 24018,
24021, 24024-24026, 24028, 24034-24035, 24037-24043, 24048, 24050,
24055-24057, 24061, 24063-24064, 24066-24068, 24072-24078, 24080,
24082, 24085-24086, 24088, 24091-24096, 24102, 24106-24110,
24115-24117, 24119-24120, 24122-24125, 24127-24130, 24132, 24135,
24137-24138, 24141-24143, 24145, 24149, 24151-24156, 24158-24162,
24164, 24166-24171, 24176-24177, 24179-24180, 24183-24186,
24193-24194, 24197, 24201, 24204, 24206-24207, 24213-24216,
24218-24219, 24222, 24224-24229, 24238, 24240-24242, 24244-24245,
24247, 24249, 24257, 24260-24265, 24267-24268, 24270-24273,
24281, 24284, 24290-24301, 24303, 24308-24309, 24312, 24316-24319,
24322, 24324, 24326, 24328-24329, 24333, 24336-24342, 24344-24345,
24347-24349, 24353, 24355-24356, 24358-24359, 24361, 24364,
24367-24368, 24375-24376, 24380, 24383, 24387, 24389-24393, 24395,
24398-24402, 24404, 24406, 24408-24410, 24412-24415, 24417-24419,
24421-24423, 24425, 24429-24433, 24436-24437, 24439, 24446, 24451,
24453, 24457, 24459, 24461-24462, 24465-24467, 24469, 24471, 24473,
24475, 24477-24479, 24481-24482, 24484-24488, 24491-24492,
24494-24496, 24498-24500, 24504-24506, 24508-24516, 24518-24524,
24527, 24530, 24533-24537, 24539, 24541-24542, 24544-24549,
24552-24554, 24562-24563, 24565-24568, 24570-24571, 24573-24574,
24576-24577, 24581, 24583, 24585-24599, 24601-24602, 24605,
24609-24619, 24621-24622, 24624-24630, 24633-24642, 24645,
24648-24655, 24657-24658, 24664-24668, 24670-24676, 24678,
24681-24684, 24686, 24690-24692, 24694-24695, 24700-24701, 24704,
24706, 24708, 24710, 24712-24718, 24721-24724, 24726-24728,
24730-24733, 24735, 24738-24739, 24741, 24747-24752, 24755, 24758,
24760-24761, 24763-24765, 24767-24768, 24773, 24775-24776,
24780-24786, 24789-24790, 24792, 24794, 24797-24799, 24801-24803,
24805-24809, 24811, 24814-24815, 24817, 24819-24820, 24823,
24826-24829, 24831-24836, 24838-24841, 24844, 24846, 24849-24852,
24856, 24859-24860, 24862, 24865-24867, 24869, 24873-24875,
24877, 24879-24880, 24886-24888, 24891, 24893-24897, 24899-24900,
24902-24915, 24919, 24922, 24927-24928, 24931-24933, 24937-24938,
24941, 24943, 24945, 24947-24950, 24955-24956, 24958-24960,
24962-24963, 24965-24967, 24969-24971, 24973-24979, 24981,
24983-24985, 24987-24990, 24996-24997, 24999, 25003, 25007-25009,
25011-25013, 25016-25017, 25019-25025, 25033-25035, 25037,
25040-25045, 25047-25053, 25055-25060, 25062-25063, 25065-25066,
25069, 25072, 25075, 25077-25078, 25081, 25087-25089, 25091, 25093,
25095, 25101, 25105-25106, 25108, 25110, 25112, 25114-25118,
25123-25129, 25133-25135, 25137-25140, 25142-25145, 25147,
25149-25150, 25152, 25154-25160, 25163, 25165-25166, 25168,
25171-25176, 25180, 25182-25183, 25185-25186, 25188-25190, 25197,
25199, 25201-25202, 25205, 25208-25209, 25211-25225, 25228-25230,
25232-25233, 25238, 25240-25241, 25243, 25246, 25248-25249,
25251-25252, 25254, 25256, 25259, 25261-25265, 25267, 25269,
25272-25273, 25275, 25278, 25282-25285, 25288, 25290-25291,
25293-25296, 25298-25302, 25304, 25306-25308, 25310-25312,
25314, 25316-25318, 25320, 25322-25324, 25326, 25330, 25335-25340,
25345, 25347-25348, 25350-25352, 25354-25358, 25360-25364,
25367-25370, 25372-25373, 25376, 25378, 25382-25384, 25386-25388,
25391-25392, 25398-25404, 25407-25408, 25410-25415, 25418-25422,
25425-25426, 25428-25429, 25434-25435, 25437, 25440-25442, 25445,
25447-25448, 25450, 25452, 25455, 25457-25459, 25461, 25463-25464,
25469-25470, 25473-25478, 25480-25481, 25483-25486, 25488,
25492-25493, 25495, 25497, 25501, 25503, 25505-25507, 25509-25511,
25514-25519, 25521-25523, 25525, 25528-25532, 25535-25538, 25540,
25543-25547, 25552-25556, 25558, 25561, 25565-25567, 25569-25570,
25572-25579, 25582-25585, 25588-25601, 25603, 25605, 25609-25612,
25615-25619, 25621-25624, 25626-25632, 25634-25635, 25637-25640,
25645-25647, 25649, 25651-25652, 25656-25657, 25663, 25666-25668,
25670-25673, 25675-25678, 25680, 25682-25684, 25686, 25688, 25691,
25695, 25698, 25701-25702, 25704-25705, 25707, 25709-25711, 25713,
25717-25723, 25725, 25727, 25730, 25732-25733, 25735, 25737,
25739-25740, 25742-25744, 25752-25758, 25761-25762, 25765-25766,
25769-25770, 25773-25774, 25776-25782, 25785-25787, 25789, 25791,
25793-25794, 25796, 25798-25799, 25801-25802, 25807, 25809-25817,
25819, 25822, 25828, 25837-25838, 25840-25842, 25845, 25847-25848,
25850-25860, 25862, 25864-25866, 25869-25870, 25873-25878,
25880-25882, 25887, 25889-25891, 25893-25894, 25896-25897,
25899-25901, 25903-25904, 25906, 25908, 25912, 25915-25916,
25918-25921, 25924, 25926-25929, 25931, 25936-25938, 25941, 25943,
25949-25951, 25953-25961, 25963-25964, 25966, 25968, 25977,
25979-25984, 25989-25992, 25995, 25997, 25999, 26002-26008, 26011,
26013, 26017-26024, 26026-26028, 26031-26032, 26034, 26039, 26047,
26051-26055, 26058, 26060, 26063-26065, 26068, 26070-26073,
26076-26080, 26082, 26084-26086, 26088-26093, 26095-26096,
26098-26099, 26101, 26103-26107, 26111, 26114, 26116, 26118-26119,
26122-26126, 26133, 26136, 26138, 26142-26144, 26146-26149,
26152-26155, 26157, 26167-26171, 26173, 26175-26177, 26179, 26181,
26183-26186, 26188, 26190-26191, 26193-26194, 26196-26197,
26201-26204, 26207, 26210, 26213-26214, 26217, 26219-26223, 26225,
26229, 26234-26236, 26239, 26241-26242, 26253-26257, 26260,
26262-26263, 26267-26271, 26273-26274, 26278-26279, 26281,
6285-26287, 26289-26296, 26302-26304, 26306, 26310-26311,
26314-26318, 26320-26322, 26324, 26326, 26328, 26336, 26339, 26341,
26343-26346, 26348-26353, 26355-26356, 26358-26360, 26362, 26368,
26370, 26372, 26374-26375, 26377-26385, 26388, 26392-26393, 26396,
26399, 26401, 26403, 26405-26406, 26408-26413, 26419, 26422-26424,
26426-26427, 26430-26431, 26435-26439, 26441, 26446-26450, 26452,
26455, 26458-26460, 26463-26466, 26468-26470, 26472-26473,
6475-26476, 26478, 26483-26486, 26488, 26490, 26493-26494,
26496-26502, 26506-26510, 26512-26515, 26517, 26519, 26522-26523,
26525-26527, 26529-26531, 26533, 26535, 26537-26538, 26541,
26545-26546, 26548-26551, 26554-26555, 26559-26560, 26562-26564,
26568-26569, 26572-26575, 26577-26581, 26589-26595, 26598-26609,
26611-26614, 26616-26618, 26623-26624, 26627, 26631-26636,
26639-26641, 26643-26650, 26653-26657, 26659-26660, 26662-26665,
26667-26669, 26671, 26673-26678, 26684-26685, 26687, 26690,
26694-26719, 26721-26722, 26724-26731, 26733, 26735-26746,
26748, 26750-26766, 26768, 26770, 26772-26773, 26775, 26778,
26780-26781, 26788-26792, 26797-26799, 26801, 26808-26810,
26813-26814, 26817-26819, 26821, 26824-26825, 26828, 26830-26831,
26836-26837, 26839-26840, 26847-26851, 26853-26857, 26861-26865,
26868-26869, 26880, 26882, 26887, 26889-26891, 26893, 26895-26897,
26901, 26906-26912, 26914-26916, 26918, 26921-26929, 26931,
26933-26935, 26937, 26939-26943, 26946-26947, 26949-26956,
26960-26961, 26964, 26966-26968, 26970-26972, 26975, 26977-26978,
26980, 26982, 26985, 26988, 26994, 27000, 27002-27005, 27008-27012,
27016-27017, 27026-27027, 27029, 27032-27034, 27036-27037, 27044,
27048-27049, 27051-27053, 27055, 27057-27063, 27066-27069, 27071,
27074, 27076, 27090, 27093-27098, 27101, 27103-27105, 27110,
27112-27113, 27115-27116, 27118, 27130-27135, 27137-27138,
27140-27142, 27144-27146, 27148-27154, 27160, 27162, 27164-27165,
27167-27174, 27178-27179, 27181-27182, 27186, 27188-27189,
27192-27195, 27197, 27199-27200, 27203-27204, 27207, 27209, 27212,
27214, 27216, 27220, 27224-27227, 27229-27230, 27232, 27234,
27236-27238, 27240-27243, 27245, 27247, 27253-27254, 27256-27257,
27259, 27262-27264, 27267-27268, 27272, 27277, 27279, 27283,
27285-27289, 27294-27297, 27299-27301, 27303, 27305-27306,
27309-27319, 27322-27323, 27325-27326, 27328-27333, 27335-27337,
27339-27340, 27342-27344, 27346-27351, 27353-27356, 27360-27361,
27364-27366, 27369-27370, 27372, 27374-27375, 27379-27383,
27386-27389, 27391, 27393-27397, 27399-27400, 27402, 27404, 27407,
27410-27412, 27414, 27417, 27420-27424, 27430-27441, 27443, 27445,
27448-27449, 27452-27459, 27462-27463, 27467-27469, 27473-27474,
27476-27477, 27482, 27488-27489, 27492-27496, 27498, 27500,
27502-27506, 27508, 27510, 27513-27514, 27518-27519, 27522-27523,
27525-27526, 27528-27529, 27531-27532, 27534-27535, 27542, 27548,
27555, 27557-27559, 27562-27566, 27569-27572, 27574-27575, 27577,
27579, 27587-27588, 27590-27595, 27597-27599, 27603-27605,
27607-27610, 27616, 27618-27620, 27622-27624, 27626-27628, 27630,
27632, 27635-27638, 27640, 27645, 27652, 27654-27659, 27668-27669,
27672-27675, 27677-27680, 27687, 27689, 27691-27692, 27694,
27697-27698, 27700-27703, 27706, 27709-27710, 27712, 27715,
27719-27723, 27727-27730, 27732-27735, 27738, 27740-27741,
27743-27751, 27753-27756, 27758-27759, 27761-27763, 27765-27766,
27769, 27771, 27773, 27775, 27777, 27779, 27783-27788, 27795-27796,
27798, 27804, 27809-27810, 27812-27813, 27815-27818, 27821, 27823,
27827-27830, 27832-27834, 27836, 27838-27840, 27843, 27847, 27849,
27851, 27853, 27858-27861, 27863, 27866-27867, 27870, 27872,
27875-27877, 27880, 27882-27885, 27887, 27889-27892, 27894-27896,
27898, 27900-27905, 27910, 27912, 27916, 27919, 27922, 27924,
27926-27927, 27932, 27934-27938, 27940-27946, 27948, 27950, 27952,
27954-27956, 27958-27959, 27967-27969, 27971-27976, 27978-27984,
27992-27993, 27995, 27998, 28001, 28003-28006, 28010, 28012, 28017,
28021, 28023-28024, 28027-28028, 28033, 28035, 28038, 28040, 28044,
28054-28056, 28058-28062, 28064-28066, 28068, 28070, 28072-28073,
28075-28077, 28081-28083, 28087-28091, 28096-28098, 28100, 28102,
28104-28106, 28109-28115, 28117, 28120-28121, 28125-28128,
28130-28133, 28135, 28138, 28140, 28144-28149, 28151, 28153-28154,
28161-28173, 28176-28179, 28184-28196, 28201-28202, 28205-28206,
28209-28212, 28214-28223, 28227, 28229-28230, 28233-28238, 28240,
28242, 28247-28248, 28250-28252, 28254-28261, 28264, 28266, 28269,
28271-28278, 28283, 28288, 28290, 28292, 28296-28298, 28304-28308,
28310-28316, 28318, 28320-28321, 28323-28327, 28330, 28332, 28334,
28338, 28342, 28346-28349, 28351-28356, 28358-28374, 28376, 28379,
28381-28384, 28387-28392, 28395-28401, 28404-28408, 28412-28414,
28416-28419, 28423-28433, 28437-28443, 28445-28457, 28461, 28463,
28465-28467, 28469-28473, 28475-28483, 28486, 28488-28491, 28493,
28495-28496, 28498-28500, 28502-28509, 28512-28516, 28518,
28520-28522, 28524-28526, 28529-28530, 28532, 28534, 28538-28542,
28544-28552, 28554, 28556, 28558-28559, 28561, 28563-28564,
28566-28568, 28574-28576, 28578, 28580-28584, 28586-28588, 28590,
28592-28593, 28595-28597, 28599, 28601-28603, 28606, 28608, 28611,
28613-28614, 28616, 28620-28621, 28623-28625, 28627-28630, 28634,
28640, 28642-28647, 28651, 28654-28655, 28657, 28666-28667,
28672-28674, 28680, 28682-28684, 28686, 28688, 28692-28693, 28695,
28698-28699, 28701, 28703, 28709-28711, 28714, 28717-28725, 28727,
28730, 28734-28739, 28741-28744, 28746-28750, 28752, 28754,
28756-28757, 28760-28767, 28771-28772, 28774, 28776, 28778-28780,
28782-28783, 28786-28788, 28791, 28793-28797, 28802-28805, 28809,
28812, 28817, 28819-28821, 28823-28824, 28826, 28829-28841, 28843,
28845-28846, 28851-28853, 28856-28864, 28866-28871, 28874,
28877-28878, 28880-28886, 28888, 28890, 28894, 28896, 28898-28909,
28911, 28913-28915, 28917, 28919-28920, 28922-28923, 28925-28926,
28928, 28930-28931, 28934-28935, 28938, 28941-28944, 28947-28949,
28951-28956, 28958, 28962-28966, 28969-28976, 28978-28981, 28983,
28986-28989, 28992, 28997-28998, 29000, 29002-29003, 29005, 29009,
29011, 29019-29021, 29023, 29025-29026, 29028-29029, 29031-29032,
29034-29036, 29039, 29041-29042, 29045, 29048-29050, 29053-29054,
29056-29062, 29065-29071, 29073-29076, 29079, 29081, 29083-29084,
29087, 29091-29097, 29099-29100, 29106, 29109, 29113, 29116-29118,
29120-29122, 29125-29126, 29129-29130, 29132-29133, 29135, 29137,
29139-29142, 29144-29147, 29149-29151, 29155, 29157-29160, 29162,
29164-29166, 29168, 29171, 29173-29175, 29177-29178, 29180-29186,
29189-29192, 29194-29195, 29197, 29200, 29202, 29206, 29208,
29210-29211, 29214-29218, 29224, 29226, 29229-29231, 29233-29236,
29238-29242, 29244, 29246-29248, 29250, 29252-29261, 29264-29277,
29280, 29282-29295, 29297, 29302-29305, 29307, 29309, 29312, 29314,
29316-29319, 29321-29323, 29325-29327, 29336-29337, 29339-29340,
29344-29349, 29352, 29354-29355, 29357, 29359-29360, 29362-29369,
29373-29378, 29380, 29383-29386, 29389-29391, 29396, 29399, 29401,
29408, 29424-29427, 29429, 29432-29433, 29435, 29437-29439,
29441-29442, 29444-29446, 29448-29456, 29463-29469, 29479, 29481,
29483, 29485-29491, 29494-29498, 29501, 29503-29504, 29508-29509,
29511-29514, 29516-29517, 29519, 29521-29523, 29533, 29535-29536,
29538-29543, 29546, 29549, 29551-29554, 29557-29563, 29565-29566,
29568-29570, 29572, 29575-29578, 29581, 29583-29588, 29593-29608,
29612-29624, 29626, 29628-29629, 29631-29634, 29636-29639, 29642,
29644-29645, 29647, 29650, 29652-29658, 29660-29661, 29663-29664,
29666, 29672, 29674-29676, 29678-29680, 29682, 29685, 29687-29691,
29694-29704, 29707-29716, 29718, 29720, 29722, 29724-29727,
29730-29732, 29735-29736, 29739, 29741, 29745, 29747-29748,
29750-29767, 29772-29776, 29778-29781, 29784-29785, 29787-29788,
29790, 29792, 29794-29809, 29811-29812, 29814-29819, 29823,
29827-29828, 29831-29832, 29837, 29840, 29845-29848, 29851,
29854-29857, 29862, 29864-29866, 29872-29873, 29875, 29877-29884,
29886-29893, 29895-29896, 29898, 29900, 29902, 29904, 29906, 29908,
29911-29912, 29914-29919, 29921-29922, 29924, 29927, 29929,
29931-29934, 29936-29939, 29941-29945, 29947-29949, 29951-29956,
29958-29963, 29965-29966, 29968-29969, 29972, 29974-29976,
29978-29983, 29986-29988, 29990-29997, 29999-30000, 30002-30005,
30007-30009, 30011-30013, 30015, 30018, 30020-30021, 30023-30024,
30026-30027, 30029-30030, 30032, 30034-30035, 30037-30042,
30045-30051, 30053, 30055-30058, 30060, 30062-30066, 30069-30071,
30073-30077, 30079-30087, 30089-30090, 30092, 30094-30095,
30097-30098, 30101-30105, 30107-30109, 30111-30117, 30119,
30121-30122, 30126, 30128, 30130, 30132-30138, 30142-30152,
30155-30161, 30163-30167, 30169-30170, 30174, 30176-30179,
30181-30191, 30195-30196, 30198, 30200-30201, 30203, 30205-30208,
30211-30218, 30222-30225, 30228-30230, 30233-30237, 30239-30244,
30246, 30248-30255, 30257-30258, 30260-30263, 30265, 30268-30277,
30279-30280, 30283-30287, 30289, 30291, 30293-30294, 30296,
30298-30300, 30302-30304, 30306-30314, 30316-30317, 30319-30321,
30325, 30327, 30331, 30334, 30336, 30338, 30341-30347, 30349-30353,
30355, 30358, 30360-30361, 30363-30365, 30368, 30370-30371,
30373-30376, 30378-30387, 30389-30393, 30395-30397, 30400,
30404-30409, 30411-30415, 30417-30422, 30424-30425, 30428-30430,
30432-30433, 30436, 30439-30440, 30442-30443, 30449, 30451-30454,
30456-30457, 30459, 30461-30462, 30465-30466, 30469, 30473-30476,
30478, 30481, 30483-30495, 30499-30502, 30504-30513, 30520-30526,
30528, 30530, 30533-30535, 30538-30539, 30541-30545, 30547, 30549,
30551-30552, 30554-30557, 30561-30563, 30565-30568, 30572-30574,
30576, 30578, 30580, 30582-30583, 30585, 30587, 30590-30598,
30601-30605, 30609-30615, 30617, 30621-30624, 30626-30627, 30629,
30632-30633, 30639-30641, 30643, 30646, 30648, 30650-30654,
30656-30659, 30667-30669, 30671-30672, 30676-30678, 30680-30683,
30685-30688, 30691-30692, 30694, 30696-30698, 30702, 30705-30709,
30711-30712, 30714-30718, 30720, 30723-30727, 30730-30732, 30737,
30740, 30742, 30749, 30751, 30753, 30755-30757, 30761-30767,
30773-30775, 30777-30781, 30783-30794, 30796, 30801-30803, 30805,
30807-30809, 30811, 30813, 30815, 30818-30823, 30825-30827,
30829-30834, 30838-30842, 30845, 30848, 30850-30853, 30855-30856,
30858, 30860-30862, 30864, 30866-30869, 30872-30873, 30877-30878,
30883-30884, 30887-30891, 30894-30898, 30901-30907, 30909,
30911-30912, 30914, 30916, 30919, 30926-30927, 30930-30931,
30934-30938, 30942-30945, 30947-30948, 30954-30958, 30961-30962,
30964-30966, 30968, 30970, 30972-30973, 30975-30979, 30981,
30983-30985, 30987-30989, 30992-30996, 30999-31000, 31002-31006,
31009, 31011-31012, 31017, 31019-31020, 31023-31024, 31027,
31030-31036, 31039-31042, 31044-31045, 31048-31049, 31055, 31057,
31059-31066, 31068, 31071-31072, 31074, 31077, 31082, 31084, 31086,
31089-31095, 31097, 31099-31102, 31104, 31107-31108, 31111-31116,
31119-31120, 31123, 31127, 31129, 31131-31132, 31136-31137, 31140,
31142, 31145-31151, 31153-31154, 31156-31159, 31161, 31163-31164,
31167-31171, 31174-31176, 31181-31182, 31184-31193, 31195-31196,
31200, 31202, 31205, 31209-31213, 31216-31218, 31220-31221, 31223,
31225, 31228-31229, 31231-31234, 31238-31239, 31242-31243, 31250,
31253, 31257-31264, 31266-31269, 31271, 31274, 31277-31278,
31283-31301, 31305-31311, 31314, 31326, 31328-31329, 31331-31333,
31335-31339, 31343-31344, 31346, 31348-31349, 31356-31359, 31362,
31364, 31366-31371, 31373, 31376-31378, 31380-31382, 31385,
31392-31393, 31395-31401, 31403, 31405-31410, 31413, 31415-31417,
31419, 31421-31427, 31429-31432, 31435, 31437, 31440, 31444-31447,
31456, 31460-31462, 31464, 31466-31469, 31471, 31473-31477, 31479,
31485-31486, 31488, 31490-31494, 31496-31499, 31503-31504,
31506-31508, 31519, 31522-31523, 31530-31533, 31535-31536,
31539-31540, 31542, 31547-31548, 31552, 31556-31559, 31561,
31565-31574, 31576-31578, 31580-31581, 31583, 31586-31590,
31592-31598, 31601, 31608, 31611-31617, 31621, 31623-31624, 31626,
31632-31635, 31638, 31641-31642, 31644, 31646-31648, 31651-31659,
31665, 31667-31669, 31671-31672, 31674-31676, 31678-31687, 31690,
31696, 31698-31701, 31703, 31705, 31707, 31709-31711, 31715-31716,
31718, 31721-31722, 31724-31726, 31728, 31730, 31733, 31735-31736,
31739, 31741-31746, 31749-31750, 31752-31755, 31757-31758, 31762,
31764, 31766-31768, 31771-31773, 31777-31779, 31781, 31784-31786,
31791, 31794-31802, 31804, 31806, 31809, 31811, 31814-31816,
31820-31825, 31827-31832, 31836-31839, 31841-31844, 31848-31849,
31851, 31854-31860, 31863, 31865, 31868, 31870-31873, 31876,
31882-31884, 31888-31889, 31893, 31900, 31902-31906, 31908, 31910,
31912-31917, 31919-31920, 31923, 31930-31932, 31935, 31940, 31942,
31947-31949, 31959, 31962-31967, 31969, 31973, 31975, 31977-31979,
31981, 31985-31986, 31992-31995, 31997-31998, 32003-32004,
32007-32008, 32010-32011, 32013-32016, 32021-32022, 32025-32030,
32032, 32034-32037, 32040-32042, 32047-32049, 32051-32052,
32055-32056, 32058-32059, 32062-32067, 32071-32073, 32075,
32079-32084, 32086-32088, 32090-32091, 32093, 32095-32099, 32102,
32104-32107, 32109-32115, 32117-32118, 32120-32121, 32123-32130,
32132, 32134-32136, 32138-32139, 32142, 32144-32149, 32154-32158,
32160, 32162, 32165-32171, 32173-32176, 32178, 32180-32183,
32186-32187, 32189, 32192-32193, 32196-32201, 32203-32204, 32210,
32215-32217, 32219-32221, 32223, 32225, 32227-32228, 32233,
32237-32240, 32242, 32244, 32246-32248, 32250-32251, 32253-32257,
32260, 32263, 32265-32271, 32273, 32275, 32277-32279, 32284-32285,
32287-32289, 32291-32292, 32297-32298, 32301, 32303, 32305,
32308-32315, 32317-32320, 32322-32323, 32329-32330, 32332,
32334-32340, 32343, 32352-32354, 32359-32360, 32366-32368, 32373,
32376-32377, 32381-32382, 32384-32392, 32394, 32396, 32405,
32407-32409, 32415, 32418, 32423-32424, 32427, 32429, 32431-32441,
32444, 32446-32449, 32451-32452, 32454-32459, 32461-32465,
32467-32468, 32470-32473, 32478-32479, 32481, 32484-32485,
32489-32490, 32492-32497, 32503, 32505, 32507, 32511-32512,
32517-32518, 32521-32523, 32526-32533, 32535-32538, 32540-32541,
32543-32550, 32553, 32555-32559, 32561-32566, 32568-32571,
32573-32576, 32584-32586, 32589-32590, 32592-32596, 32598, 32600,
32602-32605, 32607-32609, 32611-32612, 32616, 32626-32630, 32632,
32634-32637, 32640-32642, 32646-32647, 32649-32653, 32655-32660,
32663-32665, 32668, 32670, 32672, 32675-32676, 32681-32684, 32690,
32694-32711, 32717-32719, 32723-32725, 32728-32729, 32731,
32733-32738, 32742, 32744-32746, 32748-32754, 32757, 32765, 32767,
32769, 32775-32778, 32780-32782, 32784-32788, 32790-32791, 32795,
32797, 32800-32801, 32804-32805, 32808, 32813-32815, 32820-32821,
32827-32836, 32838, 32840-32846, 32848, 32850, 32852-32859,
32862-32864, 32868-32875, 32877, 32880, 32882-32883, 32885,
32887-32890, 32895-32900, 32903-32904, 32906-32908, 32910-32916,
32919, 32925, 32928-32929, 32931, 32936-32938, 32941-32946,
32949-32950, 32954, 32956, 32963, 32965, 32967, 32970, 32972-32973,
32976, 32981, 32984-32988, 32991, 32994-32995, 32998, 33000-33001,
33003, 33010, 33012-33013, 33015-33016, 33018-33019, 33022-33023,
33025, 33028-33032, 33035-33050, 33052-33057, 33059, 33065-33066,
33068-33076, 33080, 33082-33086, 33088, 33090, 33092-33096,
33099-33101, 33104-33106, 33108, 33114, 33118, 33120-33121, 33124,
33132-33133, 33135-33139, 33142-33157, 33159, 33161-33167,
33169-33174, 33176-33178, 33180, 33182, 33184-33187, 33191, 33195,
33198-33201, 33204-33209, 33211, 33213, 33217, 33219-33221,
33225-33229, 33231-33232, 33235-33238, 33243, 33245-33249, 33254,
33256-33261, 33264, 33271-33272, 33274, 33279-33280, 33282-33283,
33285-33286, 33293-33294, 33296-33298, 33300-33303, 33305-33307,
33309-33310, 33312-33313, 33315, 33317, 33319-33325, 33328-33329,
33332, 33335-33338, 33344-33346, 33348, 33350-33356, 33362-33364,
33366, 33368, 33370, 33373-33377, 33380, 33383, 33389, 33392, 33394,
33396, 33398, 33400, 33403, 33405-33406, 33408, 33410-33415, 33418,
33420-33421, 33423-33427, 33429-33431, 33434, 33436-33439, 33441,
33444, 33446-33448, 33450-33451, 33453, 33455, 33458, 33461, 33463,
33465, 33467, 33469-33472, 33474, 33478-33480, 33482-33484,
33486-33487, 33489, 33491-33493, 33496-33499, 33501-33503, 33505,
33512, 33514-33515, 33520, 33522-33523, 33528, 33531, 33534, 33536,
33538, 33542-33543, 33546, 33548-33549, 33551, 33553, 33555-33556,
33558-33559, 33561, 33564, 33566-33572, 33574-33576, 33580-33584,
33586, 33593, 33595-33597, 33602, 33610-33611, 33613-33614, 33622,
33627, 33630, 33633-33634, 33636, 33638-33641, 33643-33644, 33646,
33648, 33654, 33660, 33666-33667, 33669-33672, 33674-33675,
33680-33682, 33684-33688, 33690-33693, 33697-33699, 33703-33704,
33706, 33709, 33715, 33718, 33720, 33723-33726, 33728, 33733, 33735,
33738-33743, 33745, 33747-33748, 33753-33756, 33762-33765,
33767-33770, 33774-33776, 33782, 33784-33785, 33793, 33798,
33801-33802, 33804, 33806-33808, 33814, 33816-33817, 33819-33823,
33825-33826, 33828-33834, 33836-33837, 33839, 33842-33843,
33845, 33847-33850, 33852, 33854-33855, 33858-33860, 33862,
33865-33866, 33869, 33872, 33875-33879, 33881-33882, 33884,
33890-33894, 33896, 33898, 33901-33902, 33908-33911, 33914-33917,
33919-33923, 33925, 33927-33928, 33931, 33933, 33935-33942, 33944,
33946-33947, 33949-33950, 33954, 33957-33961, 33964, 33966-33967,
33969, 33971, 33973-33977, 33979, 33981-33988, 33990-33991,
33994-33995, 33997-33998, 34000, 34002-34017, 34019-34021,
34023-34027, 34029-34032, 34034, 34036-34048, 34050-34051,
34053-34055, 34057, 34063, 34066-34074, 34076, 34079, 34081-34083,
34085-34091, 34093-34094, 34097-34098, 34100-34105, 34107,
34109-34117, 34120-34121, 34124, 34126-34129, 34131, 34135-34136,
34138, 34142-34145, 34149-34153, 34155-34157, 34159-34166, 34168,
34170-34172, 34174-34178, 34184, 34187-34188, 34191-34192, 34195,
34197, 34199-34201, 34204, 34212, 34214, 34216-34217, 34219,
34221-34222, 34230, 34232-34236, 34238-34239, 34241-34243,
34245-34247, 34249-34250, 34252-34253, 34258-34259, 34263, 34267,
34270, 34273-34284, 34286-34288, 34290-34291, 34293, 34295,
34297-34298, 34301-34302, 34306, 34310, 34312-34313, 34316-34321,
34324, 34327-34328, 34330-34335, 34338, 34341-34347, 34350,
34352-34353, 34355-34356, 34358-34365, 34370, 34374-34377, 34384,
34389-34390, 34392, 34395-34396, 34399, 34401-34403, 34405-34406,
34408-34414, 34416, 34419, 34421, 34423, 34431-34435, 34437,
34439-34440, 34443, 34445, 34447, 34453, 34456-34458, 34460-34461,
34463, 34471, 34474, 34477-34481, 34483, 34486, 34488, 34490-34492,
34495, 34497, 34499-34500, 34505-34509, 34511-34515, 34521, 34523,
34527, 34530, 34533, 34535, 34537-34543, 34545-34546, 34551-34554,
34556, 34558, 34560, 34563-34564, 34566-34568, 34570, 34575-34576,
34578, 34580-34583, 34587, 34589, 34591, 34593-34594, 34596-34603,
34605-34607, 34609-34612, 34618-34627, 34631, 34634, 34636-34641,
34643-34644, 34648, 34650, 34652-34655, 34657, 34659-34661,
34663-34664, 34666-34670, 34673-34675, 34677-34685, 34687-34692,
34696-34697, 34699-34700, 34702-34704, 34706-34712, 34724-34725,
34727-34729, 34731-34745, 34750, 34754, 34756-34758, 34762, 34766,
34769, 34771-34772, 34775-34776, 34782-34783, 34787-34790, 34792,
34799-34806, 34809, 34811, 34813, 34818, 34821-34823, 34825,
34827-34831, 34833-34835, 34837, 34840, 34845, 34848, 34850, 34852,
34855, 34858, 34863-34866, 34868, 34870, 34874-34881, 34883-34887,
34889, 34893, 34897-34899, 34901-34902, 34904-34905, 34908,
34911-34913, 34915, 34917-34926, 34928-34930, 34933-34936, 34940,
34945, 34948, 34959, 34962, 34965, 34971, 34976-34977, 34982-34986,
34992-34994, 34999-35011, 35014, 35017-35021, 35024, 35026-35027,
35029, 35045-35048, 35052, 35054, 35058-35061, 35063-35065, 35068,
35072, 35074-35075, 35077-35079, 35081, 35083-35086, 35088-35089,
35091, 35094, 35098, 35106-35110, 35113-35114, 35118, 35120,
35129-35130, 35132, 35134, 35136, 35138-35139, 35143, 35145-35146,
35148-35156, 35158-35162, 35168-35170, 35172, 35174, 35176,
35185-35190, 35192, 35194-35195, 35199-35202, 35204-35207,
35209-35211, 35213-35215, 35218-35219, 35221-35225, 35227-35228,
35232, 35234-35236, 35238, 35242-35243, 35248-35249, 35252,
35259-35262, 35265, 35267-35268, 35270-35272, 35276, 35279, 35282,
35285-35286, 35288-35289, 35291, 35293-35312, 35314-35317,
35320-35328, 35330, 35334-35335, 35337, 35339-35341, 35343,
35345-35347, 35349-35361, 35369-35371, 35375-35384, 35392,
35394-35396, 35404, 35406-35411, 35413-35418, 35420-35422, 35425,
35427, 35434, 35436-35438, 35441-35443, 35447, 35450-35452, 35454,
35456, 35458-35463, 35467-35469, 35473, 35475-35482, 35484,
35486-35488, 35490-35497, 35499, 35501, 35503, 35505-35506, 35508,
35511, 35514-35516, 35522, 35527-35529, 35533-35535, 35537,
35542-35543, 35545-35546, 35548, 35550, 35554-35555, 35559-35564,
35566-35569, 35575-35576, 35578-35581, 35584-35587, 35589,
35592-35593, 35603, 35612, 35616, 35619-35621, 35623, 35629, 35632,
35634-35636, 35638-35639, 35641-35643, 35646-35647, 35649-35651,
35653-35655, 35657-35660, 35662, 35666-35667, 35669, 35671-35672,
35674-35677, 35679, 35681-35684, 35688-35692, 35694-35699, 35701,
35703, 35710-35712, 35717-35719, 35721-35722, 35724, 35728,
35731-35732, 35734-35737, 35739-35744, 35748-35751, 35755-35760,
35762-35769, 35772-35773, 35778-35780, 35785-35788, 35794-35796,
35798, 35802, 35804-35805, 35809, 35812, 35814-35815, 35817, 35819,
35821-35823, 35827-35828, 35831-35837, 35839-35841, 35843,
35845-35846, 35848-35850, 35853-35854, 35856-35857, 35859,
35861-35862, 35864-35866, 35870-35871, 35874, 35876-35878, 35884,
35886-35890, 35892, 35895, 35901-35904, 35906-35907, 35913,
35915-35919, 35922-35923, 35925-35932, 35934, 35936, 35938-35940,
35942, 35946-35947, 35949-35951, 35953, 35955, 35957-35958, 35960,
35963-35964, 35966-35968, 35970-35971, 35976-35980, 35982-35984,
35986-35988, 35991-35998, 36003, 36006, 36010, 36012-36013, 36016,
36018-36022, 36024, 36027-36029, 36031-36034, 36037-36041, 36045,
36047, 36050-36052, 36055-36058, 36060-36062, 36064, 36066, 36068,
36073, 36077-36080, 36082, 36089-36091, 36093, 36097-36098, 36102,
36105, 36109, 36115, 36118-36119, 36121, 36124-36130, 36132, 36136,
36139-36141, 36145, 36148, 36150-36151, 36153, 36157, 36159-36161,
36164, 36166, 36168, 36175-36176, 36178-36179, 36182, 36184,
36186-36189, 36191-36200, 36202-36209, 36214-36216, 36220-36226,
36228, 36230-36232, 36234-36236, 36240, 36242-36243, 36252, 36255,
36257, 36259, 36266-36273, 36277-36278, 36281-36283, 36285-36287,
36289, 36292, 36294-36295, 36299, 36301-36302, 36310, 36312-36313,
36315-36317, 36324-36326, 36333, 36339-36345, 36350, 36353-36357,
36359-36361, 36364, 36366-36368, 36370-36379, 36381-36382, 36386,
36388-36395, 36397, 36400-36401, 36403-36405, 36407, 36409, 36411,
36413-36414, 36416, 36419-36420, 36422, 36425, 36427, 36430-36433,
36437, 36439-36440, 36442, 36447-36449, 36452, 36454-36455,
36461-36472, 36474-36475, 36480, 36482-36483, 36485-36487, 36490,
36492, 36499, 36504, 36511-36512, 36514, 36516-36520, 36527-36529,
36531, 36536, 36538-36541, 36543-36549, 36552-36554, 36557-36561,
36564, 36566-36572, 36574-36575, 36577-36580, 36583-36587,
36589-36592, 36595-36596, 36598-36602, 36611, 36613, 36615,
36618-36619, 36624, 36626-36627, 36629-36631, 36633-36635, 36639,
36642, 36647-36648, 36650-36652, 36654, 36660-36668, 36670-36671,
36673, 36677, 36680-36685, 36687, 36689-36697, 36700, 36702,
36705-36707, 36709-36714, 36716, 36718, 36720-36727, 36729-36731,
36734-36738, 36740-36743, 36745-36746, 36748, 36750, 36755, 36757,
36761-36763, 36765-36766, 36769-36772, 36774, 36779-36784, 36787,
36789, 36792-36794, 36796, 36804, 36806-36807, 36810, 36812, 36816,
36818-36823, 36826, 36828, 36830-36831, 36837, 36843-36846, 36848,
36851, 36853, 36855, 36857-36862, 36865, 36867, 36869-36874,
36876-36879, 36881-36887, 36890-36891, 36893-36898, 36905,
36907-36908, 36910, 36915-36920, 36922-36924, 36927-36930, 36934,
36936-36937, 36939-36949, 36951, 36954-36956, 36958-36963, 36965,
36967-36977, 36980-36982, 36984-36991, 36995, 36997, 36999, 37001,
37003, 37006-37010, 37014-37015, 37017-37018, 37021-37022, 37025,
37028-37029, 37031-37034, 37040-37044, 37046-37047, 37049-37051,
37053-37054, 37056, 37061, 37064-37065, 37067, 37074-37075, 37077,
37079-37082, 37085-37091, 37093-37097, 37099-37112, 37114,
37116-37117, 37120, 37122-37123, 37132-37136, 37138-37141, 37145,
37147-37156, 37160-37163, 37169-37170, 37174, 37177, 37181,
37183-37184, 37187, 37189-37190, 37192-37194, 37196-37198,
37201-37203, 37206-37211, 37213-37216, 37218, 37228, 37230-37231,
37234, 37236, 37240-37244, 37246, 37250-37255, 37258, 37263, 37265,
37270-37273, 37275, 37278, 37280, 37285, 37294, 37298, 37300, 37303,
37305-37306, 37308-37310, 37312-37313, 37317, 37325-37326,
37328-37331, 37334, 37337, 37339-37340, 37342-37344, 37346-37348,
37350, 37355, 37358-37359, 37362-37363, 37365-37367, 37369-37370,
37373, 37377-37379, 37381, 37386, 37388, 37390, 37392-37393,
37396-37399, 37405, 37407-37408, 37412-37413, 37415, 37417,
37422, 37428, 37435-37441, 37443-37444, 37446, 37448, 37451,
37453-37457, 37459-37460, 37463-37464, 37466, 37468, 37473-37474,
37482-37485, 37488, 37494-37495, 37497, 37499, 37501-37503,
37505-37507, 37509-37510, 37512, 37515-37516, 37518-37519, 37521,
37524-37525, 37529-37531, 37535-37542, 37549-37553, 37555-37556,
37558, 37561-37563, 37570-37573, 37580-37582, 37585-37587, 37591,
37594-37595, 37599-37600, 37603-37606, 37608, 37610, 37617,
37619-37625, 37630-37631, 37633-37635, 37638, 37642-37643, 37650,
37653, 37658, 37661, 37665, 37667-37669, 37671-37672, 37674,
37678-37680, 37683, 37685-37686, 37688, 37691, 37693-37694, 37696,
37703, 37706-37707, 37709, 37717-37720, 37722, 37726, 37728, 37737,
37740, 37745-37748, 37751-37754, 37756-37761, 37763-37769, 37771,
37773, 37775, 37777-37779, 37785-37786, 37788, 37790-37792,
37794-37795, 37798-37799, 37802, 37806, 37808, 37825-37826, 37829,
37831, 37833-37834, 37836, 37843-37849, 37851-37852, 37855, 37857,
37859-37864, 37868-37870, 37872-37874, 37877, 37879, 37884-37886,
37888-37889, 37891-37893, 37895-37908, 37915-37923, 37925,
37927-37929, 37931-37932, 37934, 37936, 37938, 37940-37942,
37946-37948, 37950-37952, 37958-37965, 37967-37971, 37977-37980,
37982, 37988-37992, 37994, 37997, 38001-38013, 38015, 38017, 38019,
38021-38022, 38025, 38027-38034, 38036-38037, 38039-38047, 38052,
38055, 38057-38062, 38065-38067, 38069, 38071, 38074-38077,
38084-38089, 38091, 38095-38096, 38099, 38102-38103, 38107-38110,
38112, 38114, 38123, 38126, 38129, 38133-38134, 38137-38138,
38140, 38142-38144, 38153, 38156, 38158-38160, 38162-38163,
38167-38168, 38170, 38173-38174, 38176, 38179-38181, 38184, 38187,
38192-38194, 38196, 38198-38199, 38203, 38205, 38207-38210,
38212-38214, 38216, 38218-38219, 38221-38235, 38238, 38240-38242,
38246, 38249-38252, 38254-38256, 38258, 38260-38262, 38264,
38268-38269, 38271-38272, 38276, 38278-38280, 38282-38283, 38286,
38288, 38290, 38292, 38294-38295, 38297, 38301-38302, 38304-38307,
38310, 38313-38315, 38317, 38321-38322, 38324, 38334, 38336, 38340,
38342, 38345-38347, 38349-38350, 38357, 38361-38362, 38364-38365,
38369-38370, 38374-38375, 38377-38378, 38380, 38382-38384,
38386-38387, 38391, 38393-38398, 38400, 38403-38411, 38414-38421,
38423-38424, 38426-38431, 38433-38437, 38439-38442, 38445, 38448,
38454, 38459, 38464-38465, 38468-38471, 38474, 38477-38478,
38480-38484, 38487, 38490-38492, 38495-38503, 38505, 38507-38515,
38517-38518, 38521-38523, 38526-38531, 38534, 38537, 38540, 38543,
38547-38548, 38550-38552, 38554-38556, 38559-38562, 38565-38567,
38570-38571, 38574, 38579-38582, 38584-38585, 38590, 38592,
38594-38601, 38605-38609, 38612-38613, 38616, 38618, 38625-38634,
38636-38642, 38644, 38648, 38651-38658, 38660-38663, 38665-38668,
38670-38673, 38675, 38677, 38681, 38684, 38686-38687, 38689-38690,
38692, 38695, 38699-38700, 38702-38705, 38707-38709, 38713-38716,
38719-38727, 38729-38730, 38732-38734, 38736-38741, 38743, 38745,
38747, 38749, 38751-38752, 38754, 38759, 38761-38762, 38766-38767,
38769-38772, 38776-38777, 38779, 38786-38788, 38790-38791, 38794,
38798-38801, 38804-38812, 38814, 38816-38821, 38824, 38826-38827,
38832-38835, 38837, 38839-38852, 38855-38860, 38863, 38865,
38869-38874, 38879-38881, 38884-38890, 38892, 38894, 38897-38898,
38902-38904, 38906, 38909, 38912, 38915, 38917, 38919, 38921-38925,
38927, 38929-38932, 38940, 38944, 38946-38947, 38949-38950,
38954-38955, 38957-38960, 38962-38963, 38965, 38968, 38970,
38975-38976, 38983-38986, 38994-38995, 39000, 39002-39005,
39015, 39017-39021, 39023-39024, 39037, 39039-39042, 39044,
39046-39050, 39052, 39055-39056, 39059-39061, 39068, 39071-39072,
39074, 39078-39079, 39082, 39086, 39088-39090, 39092-39097,
39100-39102, 39106-39109, 39112-39114, 39116-39122, 39124,
39126-39128, 39132-39133, 39135-39138, 39140-39141, 39143-39145,
39147, 39150-39152, 39154-39158, 39160, 39162, 39164, 39166-39172,
39175-39178, 39180-39182, 39184-39185, 39187-39190, 39192-39193,
39195, 39199-39201, 39204-39208, 39210-39212, 39219, 39221-39222,
39224-39231, 39234-39235, 39237, 39244-39248, 39250-39252,
39257-39260, 39262-39266, 39268-39269, 39271, 39279, 39281-39283,
39285-39286, 39288, 39290-39292, 39297-39307, 39310-39311,
39314-39315, 39318-39319, 39322, 39324-39328, 39330-39334,
39336-39340, 39342-39343, 39345-39347, 39349-39352, 39354,
39357-39360, 39362-39365, 39368, 39370-39372, 39374-39384,
39386-39387, 39389, 39396, 39398-39403, 39405-39409, 39412,
39414-39424, 39427-39430, 39432, 39434-39435, 39438, 39440-39441,
39443-39446, 39448-39450, 39452-39453, 39455, 39457-39458, 39460,
39462-39463, 39465-39470, 39472, 39474-39492, 39494-39501,
39503-39504, 39506, 39508-39509, 39511-39515, 39517-39520, 39523,
39527-39528, 39530, 39532-39535, 39537-39539, 39541, 39543-39550,
39552-39560, 39562, 39564, 39566, 39569-39570, 39572-39573,
39575-39576, 39578, 39580-39581, 39583-39590, 39592-39593, 39596,
39599-39605, 39607, 39611, 39614-39615, 39618-39620, 39624,
39627-39631, 39634-39636, 39638, 39640, 39644-39647, 39649-39652,
39655, 39659, 39661, 39663-39664, 39666-39668, 39670-39671, 39673,
39676, 39680-39682, 39684-39688, 39693-39699, 39701-39706, 39708,
39710, 39715, 39717, 39719-39722, 39724-39727, 39729, 39732-39734,
39736-39738, 39740-39743, 39745-39746, 39748-39749, 39752-39753,
39755, 39757-39758, 39763-39764, 39769-39770, 39772-39786,
39788-39791, 39794, 39796, 39798-39803, 39805-39815, 39822,
39824-39825, 39829, 39831-39832, 39839-39840, 39844-39846, 39849,
39851-39854, 39856-39859, 39861-39863, 39865-39866, 39868-39870,
39873-39874, 39876, 39880, 39882, 39886-39896, 39898-39899, 39901,
39903-39908, 39910, 39912-39913, 39916, 39918, 39922, 39924,
39926-39931, 39934-39937, 39944-39949, 39952, 39954-39957,
39963-39968, 39971-39973, 39978, 39980-39981, 39984-39987, 39989,
39992-39995, 40002-40008, 40010-40015, 40020-40028, 40031-40034,
40037-40039, 40041-40049, 40051-40052, 40054-40055, 40057-40061,
40066-40069, 40074-40078, 40080-40082, 40085, 40087, 40089-40091,
40094-40095, 40097, 40099-40100, 40102-40103, 40105, 40108-40117,
40119-40121, 40124-40132, 40134-40136, 40138-40139, 40141-40147,
40150, 40153-40162, 40164-40166, 40168-40170, 40173-40177,
40179-40200, 40202, 40204-40207, 40209-40215, 40218-40220,
40222-40224, 40227, 40229-40234, 40237, 40239, 40241, 40243-40247,
40250-40251, 40254-40255, 40257-40260, 40263-40264, 40266-40267,
40269-40272, 40274-40279, 40283, 40286-40289, 40291-40297,
40299-40303, 40309-40310, 40313-40314, 40317-40322, 40325-40326,
40328, 40330-40336, 40338, 40343-40344, 40346, 40349, 40353-40355,
40358, 40362-40364, 40366-40371, 40373-40374, 40376-40379,
40381-40388, 40391-40392, 40395-40397, 40399-40405, 40407-40409,
40411, 40416-40417, 40419-40422, 40424, 40426, 40428-40429,
40433-40434, 40443, 40445-40446, 40448, 40450-40452, 40456,
40458-40460, 40462, 40464-40465, 40468-40469, 40474-40476,
40478-40480, 40487, 40489-40492, 40494-40496, 40498, 40501-40502,
40504, 40507, 40510, 40513-40514, 40517, 40523-40524, 40526, 40530,
40532-40535, 40543-40545, 40547, 40550, 40553, 40555, 40557-40562,
40564-40567, 40570, 40572, 40575, 40577-40578, 40580, 40582, 40584,
40586-40592, 40594, 40596, 40599-40600, 40605-40608, 40610-40611,
40613, 40616, 40618-40621, 40623-40624, 40627-40631, 40633-40636,
40638, 40641, 40646, 40648, 40650-40651, 40653, 40658-40660, 40662,
40664-40665, 40667, 40670, 40673-40678, 40688-40689, 40695-40697,
40699, 40703, 40705, 40707, 40709, 40712-40714, 40716-40718,
40720-40723, 40726-40727, 40729, 40731-40732, 40734, 40738-40739,
40745, 40748-40753, 40755, 40757-40760, 40766, 40770, 40773-40778,
40781-40782, 40784-40785, 40787, 40789, 40797, 40799-40806, 40808,
40811-40813, 40816, 40818, 40826, 40829, 40831, 40833-40834, 40844,
40848-40850, 40861, 40864-40870, 40872, 40875-40880, 40882, 40885,
40888-40890, 40895, 40899-40900, 40912, 40916, 40918, 40921-40926,
40929, 40931, 40934-40936, 40938-40939, 40941-40943, 40945-40948,
40951-40953, 40955, 40957-40960, 40962-40964, 40966, 40969, 40974,
40976, 40979, 40981-40982, 40985, 40987-40988, 40993, 40995-40997,
41004, 41006-41008, 41010-41011, 41013-41015, 41017, 41021-41022,
41024, 41026-41033, 41037-41038, 41041, 41043-41048, 41051, 41057,
41060-41062, 41064, 41067-41071, 41074, 41079-41084, 41087,
41089-41095, 41098-41101, 41103-41105, 41115, 41119-41120,
41122-41125, 41127, 41130, 41133, 41136-41140, 41142-41144,
41146-41147, 41149-41154, 41156-41157, 41159, 41161-41162, 41165,
41167-41170, 41172, 41174-41178, 41181-41183, 41188-41191,
41194-41199, 41203-41206, 41209-41210, 41212, 41217, 41219, 41221,
41223-41225, 41227, 41229-41230, 41233, 41235, 41237, 41240-41246,
41251, 41253, 41255-41256, 41258-41261, 41264-41269, 41274-41275,
41277-41284, 41288-41292, 41299-41304, 41307-41309, 41311-41313,
41316-41322, 41326, 41328-41332, 41334, 41337, 41339-41340,
41342-41348, 41350-41354, 41357, 41359-41363, 41365-41366,
41368-41369, 41373-41375, 41378-41393, 41396, 41398, 41400,
41402-41403, 41405, 41407-41414, 41416-41418, 41420, 41422-41423,
41425-41427, 41430-41438, 41440-41444, 41446-41449, 41453,
41455-41456, 41459-41461, 41463, 41466, 41468-41469, 41471,
41474-41475, 41482, 41485, 41487-41490, 41493-41495, 41497,
41499-41504, 41507, 41510-41511, 41514-41522, 41525-41526,
41528-41529, 41531, 41536-41537, 41540, 41542-41543, 41545, 41547,
41549-41552, 41558-41559, 41564-41565, 41567-41568, 41570-41571,
41573-41578, 41580-41582, 41594-41595, 41597-41601, 41604-41607,
41609, 41613-41617, 41621, 41624-41627, 41629-41631, 41634,
41636-41641, 41643-41644, 41646-41649, 41651, 41655-41658, 41660,
41662-41664, 41667-41668, 41670-41671, 41673, 41678-41689,
41691-41694, 41696-41703, 41707, 41709, 41713-41714, 41718,
41720-41726, 41729-41733, 41743-41744, 41749, 41751-41753, 41755,
41759, 41762-41767, 41772, 41778-41780, 41782, 41785-41790,
41796-41799, 41801, 41804, 41807, 41809, 41811, 41814, 41822,
41824-41825, 41827-41831, 41833-41837, 41839-41841, 41843-41845,
41847, 41851-41855, 41857, 41859, 41861-41862, 41864, 41866-41867,
41873, 41876-41879, 41886, 41890-41891, 41895, 41897, 41899-41901,
41903, 41906-41910, 41912-41913, 41915, 41920-41926, 41931,
41934-41936, 41939-41944, 41946-41947, 41949-41950, 41952-41953,
41955-41958, 41962, 41964-41968, 41971-41974, 41977-41980,
41982-41986, 41989-41991, 41993-41996, 42001-42002, 42005-42007,
42009-42010, 42013, 42017, 42022, 42027-42031, 42033-42034, 42038,
42046, 42048, 42050, 42054-42059, 42062-42063, 42065-42067,
42074-42077, 42079-42083, 42085, 42091-42095, 42097-42099, 42102,
42105-42110, 42112, 42114, 42117-42118, 42122-42128, 42134, 42137,
42143-42145, 42147-42153, 42155, 42157, 42159-42161, 42164-42165,
42167-42168, 42171, 42173-42176, 42188, 42192, 42196, 42213, 42215,
42222, 42228-42229, 42232, 42234, 42236-42237, 42242-42243, 42245,
42247-42251, 42253, 42257-42260, 42262, 42274, 42277, 42279, 42282,
42284-42285, 42287-42290, 42292-42293, 42295, 42299-42309,
42311-42316, 42319-42323, 42325, 42331-42340, 42342-42343,
42348-42349, 42352-42357, 42359-42361, 42363-42364, 42367, 42370,
42376-42377, 42379, 42381, 42384, 42386-42395, 42397-42400,
42402-42408, 42410, 42412-42416, 42421, 42426-42433, 42435, 42440,
42442, 42444, 42449, 42451-42452, 42455-42456, 42461-42462, 42466,
42472, 42474, 42477-42479, 42481-42482, 42484-42485, 42487-42488,
42494-42496, 42498-42499, 42502-42503, 42507, 42513-42516, 42521,
42524-42525, 42527-42528, 42530-42534, 42536, 42538-42540,
42552-42563, 42567, 42570-42572, 42574-42576, 42579-42586,
42590-42591, 42594, 42597, 42599, 42601-42604, 42606, 42608-42610,
42612, 42615-42617, 42619-42620, 42624-42625, 42630, 42635,
42640-42643, 42646-42648, 42652-42654, 42657-42659, 42661,
42666-42668, 42670-42671, 42673, 42678-42683, 42686-42687, 42689,
42691-42695, 42697, 42699, 42702-42705, 42707, 42709, 42711-42712,
42715, 42721, 42724-42725, 42731, 42733, 42735-42736, 42739-42749,
42753, 42756-42757, 42760, 42765-42769, 42773, 42775-42777,
42779-42780, 42783-42784, 42786-42787, 42789-42790, 42800,
42802-42809, 42811-42813, 42816-42817, 42820-42821, 42823-42824,
42826-42830, 42833, 42836, 42839-42840, 42842-42843, 42845,
42847-42850, 42853-42854, 42856-42860, 42862, 42864-42879, 42881,
42885-42886, 42888-42891, 42893-42895, 42899, 42902-42910,
42914-42915, 42917, 42919, 42921-42926, 42928, 42931, 42933-42936,
42938-42939, 42941, 42943-42944, 42947-42953, 42955, 42957,
42959-42962, 42964, 42969, 42971, 42980, 42986, 42989, 42995,
42997-42998, 43000-43001, 43003, 43005-43006, 43008-43009,
43011-43015, 43018-43019, 43021, 43024, 43026, 43029, 43034,
43037-43038, 43040-43041, 43043-43044, 43047-43048, 43055-43056,
43058, 43061, 43063-43064, 43066-43068, 43070, 43073-43075,
43077-43078, 43080, 43084-43085, 43088, 43092, 43094-43096,
43098, 43100, 43102, 43106-43107, 43110-43111, 43113-43115,
43117, 43123-43130, 43132-43134, 43138-43139, 43141, 43143,
43145-43148, 43150-43155, 43157, 43159, 43161, 43164-43166, 43173,
43179-43180, 43184-43189, 43194-43197, 43202, 43205, 43207-43208,
43211, 43215-43217, 43219-43222, 43224, 43227, 43229, 43231-43232,
43234-43236, 43238, 43241-43242, 43244, 43247, 43249-43256,
43259-43261, 43267, 43269, 43274-43275, 43280-43281, 43288-43291,
43298-43299, 43301-43304, 43307, 43310-43313, 43315, 43317, 43321,
43325-43329, 43333, 43335, 43338-43346, 43350-43352, 43354-43357,
43360-43362, 43366-43371, 43376-43383, 43385-43387, 43389,
43392-43393, 43395, 43397, 43400, 43402, 43408-43410, 43414-43416,
43418-43421, 43423-43424, 43426, 43430, 43432-43433, 43435-43436,
43441, 43444-43445, 43449, 43454-43462, 43466-43467, 43469, 43475,
43478-43480, 43482, 43484-43488, 43492, 43494, 43496, 43500,
43503-43504, 43506, 43510-43513, 43516, 43519-43520, 43522,
43524-43532, 43534, 43536, 43540, 43555-43561, 43563-43564, 43570,
43575-43581, 43583, 43585, 43587-43588, 43591-43592, 43594-43596,
43600-43601, 43603-43607, 43610-43612, 43614-43619, 43621-43624,
43628, 43631, 43636, 43639, 43652, 43655-43657, 43659-43660, 43664,
43669-43676, 43679-43684, 43686-43687, 43690-43693, 43695,
43697-43698, 43700, 43703, 43711-43712, 43714-43716, 43718-43722,
43724-43726, 43738, 43740-43744, 43747-43749, 43752-43754, 43757,
43760, 43763, 43765-43766, 43768-43770, 43772-43775, 43778,
43781-43782, 43786-43791, 43794, 43796-43797, 43801, 43803-43804,
43806, 43810-43811, 43813, 43815, 43817, 43821-43822, 43824-43825,
43827, 43834-43843, 43845-43847, 43849, 43851-43854, 43856,
43858-43859, 43864, 43869-43872, 43874, 43876, 43879, 43881-43887,
43891-43894, 43897-43904, 43907, 43909, 43912, 43914, 43919,
43921-43923, 43927-43929, 43932-43933, 43935-43936, 43939-43941,
43943-43946, 43951-43953, 43956, 43959-43964, 43967-43969, 43971,
43973, 43975-43978, 43983, 43987, 43991-43993, 44000, 44002-44016,
44019-44020, 44024-44027, 44029-44031, 44033, 44036, 44038,
44040-44048, 44052-44054, 44056-44058, 44061-44063, 44065,
44067-44068, 44070-44074, 44076-44078, 44081-44091, 44093,
44095-44098, 44101, 44103, 44105-44113, 44115, 44118, 44120-44123,
44126-44129, 44131-44132, 44135-44137, 44139-44151, 44153-44155,
44157, 44163-44166, 44168-44173, 44179-44180, 44182-44186,
44188-44189, 44193-44196, 44198-44200, 44202-44206, 44209-44211,
44213, 44218-44219, 44221-44222, 44229, 44233, 44237-44243, 44245,
44251, 44253, 44255-44259, 44261-44266, 44270-44273, 44277-44280,
44282-44283, 44290-44291, 44298-44307, 44310-44313, 44317, 44320,
44322-44323, 44325-44326, 44329-44335, 44337-44338, 44340,
44344-44351, 44354, 44357-44366, 44370-44373, 44376, 44378-44384,
44386-44387, 44389-44390, 44392-44395, 44397-44400, 44406,
44408-44412, 44414, 44417, 44419-44424, 44426, 44429-44430, 44432,
44437-44438, 44441, 44443-44444, 44446-44450, 44462, 44467-44469,
44471-44472, 44474, 44476, 44483, 44485-44487, 44491-44492,
44496-44502, 44505-44506, 44509, 44514-44518, 44520-44522, 44524,
44526-44527, 44530, 44532, 44535, 44539, 44541, 44543-44544,
44546-44549, 44551-44552, 44554-44558, 44562-44564, 44569-44570,
44572-44574, 44578-44580, 44582, 44589-44590, 44596, 44603,
44605-44607, 44609, 44611, 44613, 44616-44621, 44626, 44629, 44635,
44649, 44651, 44653-44658, 44663-44670, 44672-44677, 44684-44687,
44689, 44692-44693, 44696-44699, 44702-44703, 44706-44710,
44713, 44715, 44717-44718, 44720-44728, 44731-44733, 44736,
44739, 44741-44745, 44748, 44751-44753, 44759, 44761-44762, 44764,
44766-44767, 44770-44772, 44774, 44776-44778, 44786-44790,
44792-44793, 44798-44799, 44801, 44806, 44808, 44813-44815,
44817-44820, 44822, 44824-44825, 44827, 44829, 44831, 44834,
44836-44839, 44841-44842, 44844-44850, 44854, 44856-44857,
44859-44861, 44870, 44875, 44879-44880, 44882, 44886-44892,
44894-44895, 44899-44902, 44906, 44908-44910, 44912, 44914-44917,
44922-44924, 44926, 44932, 44934, 44937, 44941, 44944-44945,
44947-44950, 44953, 44955-44956, 44960-44961, 44963-44965, 44967,
44969, 44971-44972, 44975, 44977, 44980-44982, 44984-44985,
44987-44994, 44999, 45001-45002, 45004-45005, 45007-45019, 45021,
45025, 45027-45029, 45032, 45034-45036, 45039-45041, 45044-45045,
45047, 45049, 45054, 45056, 45060, 45063-45064, 45069, 45071,
45073-45077, 45081-45082, 45084, 45086, 45092-45093, 45095, 45098,
45101-45103, 45105, 45107, 45109, 45113, 45115-45118, 45120-45121,
45123, 45125, 45127-45130, 45136-45140, 45142-45144, 45146-45148,
45150-45152, 45154-45158, 45161-45162, 45164, 45166, 45168-45172,
45174, 45176, 45179, 45186-45188, 45190-45192, 45201-45206,
45208-45209, 45211-45212, 45218-45220, 45229-45230, 45232,
45234-45236, 45238, 45240-45241, 45245-45248, 45253, 45255, 45261,
45268, 45270-45272, 45275, 45277-45278, 45280-45281, 45285, 45290,
45292, 45294-45298, 45300, 45303, 45305-45306, 45308-45310,
45312-45314, 45316-45318, 45320-45322, 45329-45332, 45334-45336,
45339, 45347, 45350, 45352-45353, 45355-45359, 45361-45362, 45364,
45367, 45376, 45381, 45383, 45388-45389, 45391-45395, 45398-45399,
45402-45404, 45406-45409, 45411-45417, 45420-45426, 45431-45434,
45439-45442, 45444, 45448-45449, 45451, 45455, 45460-45465,
45467-45468, 45470-45476, 45482, 45485, 45488, 45494, 45496-45498,
45502, 45504, 45506, 45509, 45513, 45515-45516, 45521-45524,
45527-45529, 45533, 45535, 45537-45541, 45543-45545, 45547-45550,
45553-45570, 45572-45575, 45577-45589, 45592-45595, 45597, 45600,
45602-45604, 45606-45610, 45612, 45615-45616, 45618-45621, 45624,
45627, 45632-45633, 45636-45637, 45639, 45642, 45644, 45646-45648,
45651, 45653-45655, 45658-45660, 45662, 45665, 45667, 45669,
45671-45675, 45678-45681, 45685-45687, 45689-45695, 45697-45698,
45701-45704, 45706, 45709-45713

[0287] The foregoing written specification is considered to be sufficient to enable one skilled in the art to practice the invention. The present invention is not to be limited in scope by examples provided, since the examples are intended as a single illustration of one aspect of the invention and other functionally equivalent embodiments are within the scope of the invention. Various modifications of the invention in addition to those shown and described herein will become apparent to those skilled in the art from the foregoing description and fall within the scope of the appended claims. The advantages and objects of the invention are not necessarily encompassed by each embodiment of the invention.

The application's sequence listing, which the Patent Office published only in electronic form, follows.

SEQUENCE LISTING (45717 sequences)

SEQ ID NO: 1 - DNA, 38392 bp, Homo sapiens
agccaccaagttatgtggggcactgctttgccttccccaacaagtgtgtcagcctcaactctgggacttgcgggtgatccagtggggtagagggagagcagtttctcgtgccatgagcttcttcaacagccatgacttcattctttggccacgacccatagtaagaaatccattctacatcataacccagcacacccacacgtgtaaacagacatataaataactgaaaaatggttgttcttcgagtgaaacaatacttacctttactgcatgtggtgatacactggcatttcttatgctatttcctttttctttttaatgcttgttgaaacccagtaaattgatttcacaactcaataaagggttaggatatgcaattttgaacaattccagctctgccacctatcagctgtgtgacctggggcaagttacttaacctctctgtgcctcagttacctcatctctaaggaggggataataatacctacatcagtgagttgttcagcagatcaaagaaatatttgaaaagtacctataaagcacttaacagtaaccccctccaaatttccattgagggaaactgaagctctgaaaggaaagcaacttgcccagtgttgccctgctggtaaaatgcatcacccagcctggtacagtagctaagagctggagcactagagcaggaccacacaggctcagatcccagctctgccactttcttagcacgtggcctcaggcccatgtccttaaccataatgccctaccaagttttctgtggcataaaagaggatcacgttcacattaattcctcactctacagaaaactaagatgcccctgacttgtcccgttcaactccagttattctggtttcccctgaggctgccaactcagatagcaggttggatccccatcccttcagttataggtgcactgaaagacagtgggccttcctgtgcatcagccccagtgacggatcctggagacaccatggtgagcaaacccaactaggaagcttacaattcagtatggaggaagacattaaaaaaatactcaaactcattatttcaacaaacatttattgagcacctgctaagtgccaggcactgtggcaggcctgcaggaatacagtggtgaatgaaagcagaccatgtccctacccctcacggagcttacagtctagcggggcagagagtcatccagcaaccccctaataaagatataactacaaactgcgatcagtgcctttagaaaaggaaagaatgccctagaataagggtccctggcccaatctacagggtcaggcagggcttacttaaggatgctgaaaagcaaaacgagcaagtggggaggtaggggagtgagaggctgcttgggaacactgtgggagaggtgatgaatgcagtccccgacaaggtgagtttgaggaattatttgggccatcagtcaagtggagatgccgagtttggatacatgaagctaagggaagagccaggagaaagagaagggccagagagttaagaggaaaaccagcagagtgtggtctcaaggcaagggaagacaaagtgttttaagtaggagtggtcaaccacttcaagaggaaaactaaaaaaccacctgcagaatctggcagatgccgggggctaacacttacgggggtgagcaagtgcagaaggcaagtacaggcaactctgcaggggtcagcagtgaaggggagggtgatgaggtgctggccagaagcaggagggagagaacgtggggtcagcggagacagaagggatgctggcacaggcaaaggtgaatagaggatcaagcaaggagggcagcagaaaacctgccaggagagaaaaggtgactgatgatgtcagattctagagcaagtagcagaaactgggacccagagcacaggagggagaagtggcctgagcaagaagggactcctcgtcatctgtaacacaggggagggaaatcagcgtgcagacttgggggccacaagttatagggagttccattcttatggcttctgttttgttttttgaagcaggagagaaagtctgaaggtaaagaacatttgaaagagtcacttcagaggagaaacgagtggatcaaaaaaatatagtagaactgctaggcagggtggccgatgacccctcgactggtggcgatgttcatctgctctgccatgggacattctctaacaaagcttagcacgtgctgggctgatgagtgctatgaaaaagccaggggcccgaggacactggggtggacaggctcccctggggaagtcctcttagaactgagggatcaacactggaggagactgcaaggggtacgggataaatgttcctggtgaaggaaacagcaggggcaaaggccctgcagcagaaaggagcgaggccctttggagtaacagaaagaccatggtgacaggagctcagaaagaccactggtgttaagactatgagccagtggaggccagattggggaatgggatgggagggtgcttgaagaccatggtgaggctctcttggtctttacttttaagaagaataggacacttccaaagggtagtgtcaagtgccaaggaagatcaggagggcttttccccacaccagccctaggactttggactctgggagcctcagtttgctcatccaggaaagagaaatttaaaaccctctacttcacagggaatgttgtcggaattaaaccagaccttgcatgaaaatatagtactcagtgaagtgcctggcgaagagcaggggctcagccaggtctcatacaacaaatcctctgtactccatcccacaagccctgtgacatcttaggaccactctgcatctctttccctgctggaacctagcactgtgcccagcacacagtaggcagtcaataaatgcttgtcgatgaatcatctctaagctttagagttaccaaatgcctggtccagcaacccagggaaagcagccatttgggtttctgaactctatcctgatggctaccacggacttctcccatgccctcacctgatgtggctgtgctcagtgcacagagggcctacagccaacatttcctcaacaggaagccctctgatagggctcccacaggtaagggatataccctgagatcctccgccatttcccaagagggctaggtcacaaagggtggctagtcttcaacagtgctgcaagtcactggcagcacacaggttctaaaacaataatatgttgaaatgtactcaccaagaaagccaccgacctacaaagaaacccttatcgctgatcttgcaatgagcaccaacctcccctttgcaagagctgagatcgaaagataaagaagctatcaaaaagccatctgcccacttaaaataatatcacaagtcatgttaggaaccacagacctggggccagataccaaaacaattgtctgaacaggctgcttcaatttctccttaaaaccgcccatgtatgttaaaagaaaaacaccctctccacccaccttggccctgcaaggttttgatttctctgttctctgcctttcacactctttaaaatgaccaaactcctttacccaaactgtcgcatcttacagacagggttcccatgacagccggcggggatgacagcttgggaaagtgatagaaatgaaggtagctctggggtactggacctgctcagtatcttcatctgggtggtggctacacaagtgcatacatatgtacaaatccactgggctatacacagaatatcagtacactttatgtaggtatacctcgataaagcaaaaaaaaaaaaaaaggtaaaaggaaagcacgacatgctgggaacaccaagagtgaaatccagaatttgccctgaatcatgccacgctttctagaggaccagtttaaaaaaaaaaaaatagaaaaaaataaatgtccctagcatttcttccctggccctgtcactcactagctgagaggctttgagcaagctggctcatctctctgagctacctgtctcccctctactaaatggggataatcatagcacctacacaacacagcatgcacagcaggcctcacggagagaatggatctgatgttcatagcacagaaatcagtaaatgctggccagttatcttttgcagttaccaccatgcttcagttaccttgcccatgtttgctgcattcaatccaaccatgcaaagtgactgtcatttcccttagcagagaaggaaacggaggcaaggccacacagctgatgggcggagccgaatttaggagaggaatccaggaaactgtaggtgtggctccctaaatactgacactagctaacacctgtatgatactactttgagccagactcggttctgagcacctttactcttatcccgtaaagtagatgctataattctgttttacaggtgagggtcctgaggcatggtgtagttaaatgcgttggccaaggtcacaaggccagtaagtggcagcgccaggatttgaacccaggcaatctatgccagaatccacactcttaatgctgtaagaaaaaccatgctgcctgccccctttaaatgaagtctcagattatggtggggctcacaggtgggtgagtgggtacctgcctgcctgctcagttacccaggcacatctgcccaccagaccggagctagacctttctgaaccactcacagcctaaggccttaccagaaccagcagaacccacaaatgtcttactgcagccaggggcttctgaccaagcgtatacatacaaggtccaaaaagcattttcccatttccattcccagtcctcccaggaacagggaaatgtatacattttagggagaatctagtgatcctgggccagacttaggtgaccgcaaaaagaatcaggactagctgctgcccttaaagaactcatagcttgatagaggaaacctagggaaatcttctggggccccctggggtataactgattatttctccctgtccctaaatgatcacaggtggtgtggcaaaaaaacaagggacaaaaacttcaagtccagtacccatctggttctgtctctctgctagagccactgctttcttgtgagagcatgggctcagcccctcgcctccacaggactcaaaagtagattacagcgttaacagtagagtgcacaggcttcaaggtcaggcatgggtgaactggaagagccaggtgccatcactgcctcaaccagtttctccacctctggaatcctggtttcctgctctgtcagaaagagaatctgctctaccccccactggcaaagcccttggtccacactatgtcattgcagttctctccactccagcacactgctgatcattcacaccaagctcatttccaccccaggactttgcacttgctgtttcctctacctagaacacccttgttccatatatgcacataactgttattcatcatccaggacttagtttaaatgaaacctcctcagaaaagtcctccctgttccttttcctacaaactctcccccacctccccaccgtatctgcataactcttctttatcatcattcgggactcacctcctcaaaggccctccctttaacagcatgtctgacacagtcattccctcccaatctatccccttactcccttcagcagctaactttgtccctatttatcctatctgcttgcttgcttgttttttcaaactgtctcccataggagcctgtatgaatccttgagggtagggtagatgtctgtcttgttcagggctttacagtggaactcaataaatggaggaataaaaccccagttaaaacagtgcctagcacgtgtttgacctccatcactctttgactgactgactcaatgcaccctcctccctgtcctggagagcaggcctgaggggttcctgggccggaatgcttgtcctccatcccagacacagccctgcgttggcggaggtggcgctggctgacattacctgcgcctcaccggcttcatgcagctcttcagctgcctggcctcagcctccacgggaccctggcactcgggctgtggctccagctgcggcagctgctgctgctggggcagcccttcggcatcagtgggtgtgggagcgggtgcgatccggagcaggactgtgtagttgcggccgtggttgttggcccagaaagtgccctcaggggtctcatagcgcaccacgaagtcgaggcgcgccccatcgcccgcgccctcagcaaagggcagctggaaggcaaagcggtcggtgcggccgccgtcgtcgggcgaggaggcggatgcctggccgggacccaggccgagccccggatccaggatgggatctcctgctcctgttcctcccgctcctgcccacggcgggctgcgcgggacgtagcgcgctgggtggtcgcaaaaggaagcccagccgtcgtgtgaggcccgcacgtgcaccgccttctcgaaggagcggttcagcacgcgtaccaacccgcgcagcaccggcgggcggcccccaggcacccacaccccggcacccccggggaccgctccgggaggcggcagcagcgcctccagctccaccatgacgcgccccaagcgctccagacggcccggcgcgggcggcagcgaaaatgtggggaccaggtaaaaccccccgccagcggggacggggcacagcggtgagggctcggggcaagcctcctcttcctcctccccttcatccccatcctcgccatcgtcgtcctcgtcggccccgccgccgccgccgccatcttgcccggccgccgccgccatcttgcccgccccgggcccgccccacggccggtagcggcgcaactgcgccagcggcagccccaaggcctcgtcggcgaacagcaccctccgcggggccaccgccgcctcgaccgaggtgcggggctcacccgcggccggcgaggggggcgcggaatgccgcagcgggggctccacaggggccgtacgcgccatatcggcggcggcggcggcaccgacggcaccggcggcgggaccggcgggggcagggcctgaaggggcgggcagccaatgggaaggccagcgcggaggggtacggctcacgggggcataggcggtgagatgaagacaagtattgcagagggccaatgggcagccatgcacggatgacgtacagcgaattgagagccggagaagcacgcagccaatggggatgcccgggagtgggcggtgtagggggcgggatgatcgaggaatcaatggagaggccggaatgggggtggtgcgaaatccatgatgaagaaaacagaagcagacagctaatgcggaagtctgagcgagagaggcatgtgggcggtgggaaaagtggaatggctacaggcgatgagggcagccgggaacgaacgcagaggcccaaaaagtgggagatcccgcgggttgcgtaggcggtggaacggtagctagagagagagaacagccaatggagagccacgcgtgggatgacgacaatggctgcagcgagccaatggggaggcttgtgagcgtgcactgcggcttcgaaggggtggtgccaaggtggagctagccaatacgaaggctaaaaggagaccaagaggcgggtgtgtagggagccgagccaatggaggtggaggctgaaggcgggagcgaggacgagagctggcggatagccaatgagggagccagggtgaaggcgtagagacctcaaaggacagtactagtatgggatgagccaatgccgaggctagatagtgcagcgggacggagggaggacttggaggcaagatggggaaaaaagcagagccgacgggggcagtgtaggtggtgtgaagggaggcatgagtagccaataaggaggctggagaggaggacgctgtgtagacagagtctgaggtattgggtggccggacagcagaaccatagaacgcaggcagccattaggaaaaatgtgcttctcagggatggggttaccctctccctaaccctccgtgactccccattgccccaggaatacccagagcccctgaaggcctagaccacaccttggtgtgtgaactaggaaagtgaaaatgactgtcctgttgcagttagttacttactgggtcctccctgcccaactacaaccttttcttgagcagtgccacaagccaagaatgcccctgattgttagccgcaagcactctccaggacttgatactattgttgaatgaatggccgaataggaaatttaactttctgaaggattcacttttttaaatttcagctcagcaaacactgacctgactgtgtgctaccagaagttgattgggcatatgggtagcttctgactaatggaatcacaatcaaagccctgtccttcttgcccaacctgacactccacaccccacaggggcctcacctcccttctttctgtccccccatctctgcttctactgttccctctcccaagagtgctgttccttctgctgcttccatctagtaaactcctttcgctctccctttggggtctcaccttctgtgggaactcaactgcagcttttgtccgctgaacacatccattcatacattccttctccatcctgggaagatttactgaacacctactgagtgccaggttctgagcatgctgttatctcattagaacctcacagcatcctaggagggaggtgatccttccagcagcccctctccccaggtctccatgttcaggatgtccatgagttagaaatgaatatgttcagctgcaagtaacagaaaaatcataaaataatgggggcttaagcaagacagaactttatttttttctcacctaaaagttcaagctggcaaatagtccagggactccttcctgcccacctggtttgggcattgtctgtcccgatctggctccaagactctcagtcttcaacaaatccttttggctgtctattaaaaatatttaccaaatccatcctcttctcaccacctccactgccagcactatcaccagtcacctagactactgcagtagccagctccttgctggtcccctgcttccacattcaggccctagaccccattgtacactcagcattcaggggcttcctgttaaatcctaacacggtttgtgtttctcctctgcttgcaaccctgtcatgccttcctcctcactcagcgttgaagccaaagtccttaccatggcctacaaggtcctgcgtggtctaacctccgagtcccctttctgacctcacctccagcttctcttcttgctctctccacactaaccacaccagcccccttgtagaccttgaacaaatcaggtacattcccacctcaggacctttgccctggctgtttcctttggagttcctcagatatctagctggctccctccctcatctccttcaagtctttgtcagaggcccctgtctctggggacttttcctgacccgtttaatcttgcctactcacccccaactcccagccctcccagtctccttcccgagaagccctccatgagagaggatatagtccagtatagaggggaggtagcgacctctacccctctctgccctcctgaccccagcccccattctgcaaggatcttggctttcagcagccgtagcatttccctctcacaccctgggcctgcccaaggggccagctcacattctcggccaccatcctcacttcgtttgcctcctatatctctggccactctctttcatggagtgagtgacagtaagggacagatggtctggggaaggtataaggagaatgcagcccacacctctgatcctgagagagaaaactagcccccttttccaggagggggacaggtgctggggcagggaacaatgcctctgctgatagaactggcctggtttataattacgcaggaggtgtagggaacattccgacccaagtctgcagggagcaaggggttattaactatgggaacatcagtgcaagggatcattaaccttaggaccatcactgcaaggggtcattaaccttggggccatcactagaatcagctccccaggactccttcctgacatgcatgctcctcaccccctcccttgctccctcccacatgccgtgacatctgttaaacacctgctgttcacagggtccctgcaggcctccaagcaggggacctcatcccaccttggtgcctcccctggctgtccaacacacccaagccatttttgggtctcagatgtgtcccaccaactcagaagcctcaaccagcgaaagttttgttttgaactaatggtggggagggttgggtgttttttttttttttttaattgttgttggctgatttttttaaggtctttttttttctattctttttttttttttttcttgtcttcacaaagccaggccatcaggcccattctgggcttttccagaagggtgagtctgagttgaggaaagaggccctcctttttacgagggcttagaaggttgggggaggaaagggggcaaaggggtgaaggggtggatcttggccaccagatttgtaccatgtaaataaaaagccctttccaatttctcttccccaggtctgaagccagtcttgtagagggctggagtggttgttggacgactagaaccctgggctttgcagggtgctgggagctggaagtcttcaccatggcctgtcaggagaagcccctgggggctggtctaccatgctgaccagtggttgaatagagtgcctgctgaggtcaagagatgcagccgccaattcctggacaacctaaaagcctcacaagcttcaagtctccaaggactctccaaatcccaggatctccctgccatcacatcctagaatttaaaacctgagaacatcaagttcaggaaagcttggggatttcaaagcccagcaccaaagaaagcgggacccacactcgccagctctgtgatcttgggcaagttgcttgactacttatacctccgtttccctcatctgtataacaggaatacaataatgatgagatggagctcaaggggccatggtgaggattgaacatgatcacttgtgagacatgttcagcactgtatctgacccatggaaaattcaagataaacatcagctactgagatgatggcggatatttggaatcctaaatccttggaaactggggctttttgaagtaaaagaccccaaaggctgagggcctcagaagcatcaggccatgatgttcctgaaacaagagggtcagggtcccaatgggcctctggggttcatcgtgaggatggatgcattaatattggggacctgctagggaccttcccagtgggacagtggctgggtcagggcactcaagccctaaaacgtgatgaggcgagacttttctctctttcctcattcagtaactgtcagtagattctgggagccagggattctccgactcttcaagtccatgaattttaggggatgacagtgggctctccgctttctcctccatgaagtaacttacatgcccctcaccctctgtgggaggggtgttgcagggggtgcagaactcccctcgccgggtagttcaagcaatggggaccatatcaattccatctatagggaaactgaggcctggagtagggcgaggcctctgggaacccagccctattctgtctctttccctggcatttcccatccacacatagagcttcagattctctttctttccccagagaccctcaaatatcctctcactcacagaatggtgtctctgcctgcctcgggttggccctgtgatttattttagttcttttcccttgttttttttttttcaaactctatacacttttgttttaaaaactgtggtttctcatgagccctattatctcattgatacctctcacctctgtggtgaggggaagaaatcatattttcagatgactcgtaaagggcaaagaaaaaaacccaaaatttcaaaatttccgtttaagtctcataatcaagaaaaggagaaacacagagagagagaaaaaaaaaactatgagaacccccccccaccccgtgattatcagcgcacacactcatcgaaaaaaatttggattattagaagagagaggtctgcggcttccacaccgtacagcgtggtttttcttctcggtataaaagcaaagttgtttttgatacgtgacagtttcccacaagccaggctgatccttttctgtcagtccacttcaccaaggtgagtgtccctgctctcccctaccagatgtgggccccattggaggagatggcagggaggtaggcacggcgggggggtcaggggccctctggtacagtgggatgtacccagctaccgtgattccagccaggtaaggtctttaaaaaaataataatagaataaatggcagaagacttaaaggtgaagtacttaatgcatgggcaggggcaaaaataaatgaattcatcaattgatacgtagatggataggatttttaaaatatgtcagctgccagtctttatggatttcagagctttgaacaacttgaaatgctgtccaggtgcaactgaaaatttcaactgcatctctctcatctctttgtctcttagctcttgatgcctctcatccttctctgtctctctgctcaccctgtcttgctcttttacatgtttctctgcctctctttctcccgccatctgtctgtcgctacactcagactctctttccccgcatctctcctggcctctgaccatctcccctatctctgtctcctccatcttgaccacactccatcgatctcctttcctccatctctcccgctctcttttcttgccttcccccacctgccttcccagccagcatccagcctagagctttgtacacagctggcgtttaataatagtaatgtcgccgaggacctttacattttatgagagtgagcatcagttctgttcaccctagtagcaggaggattgcaaggtgccggggcaagctgagcacttaactgaactttgcttgtatcgctttagaggagacccttggggcgggggggcagggagcacttcacaccattgtcaaccgtagtttagctgtgtggacctaccccaggactgcatgtgtgtgaccagagtccatattcaggaagcaaacaggttgttcagggctggggtgagctcgattctgcaggcttagcacagcgtttggcacaaagtaagtgctcacgaagtgttagctattagtatttctgtaaccaaattagaatcatgctatatattggttttgttcctgctttattcaattaacagtagtgtttttgaagcttactaaaaattgtttgaacacatgatctttcatgatggacaagactgtcctcacatcagcatgaactttgattgatttgaccaagtgccgattgttggacattccggttgtttctcgtttttttctataaacatccctgactgcttccttggattcctgaaaagggagttgctggggcaaagggggcgtgcatttttaaagtttatgaccctctctgctaattctccttccaaaaggttgtcctattttatgctccctctacttaagctaaccctaggtgagtattattatgttttaattatttcccaacatgacaggtaagaaaaacacattatcacattgttgaaatttgcatcttgtgattacttttactattcattggccattcatgcttttttttttttttttttttggttgtctggtcatgtccttactcctaatagggtgttcatcttatttttcccttattgatttgccacagctctttatttggaatggttattaacctttcatcagccattacatatatagcaaatattttccccaattcatcatttgctttttttctatttgtttatggtgttttttgtgatgcttatgatggttttatacagtcaaataggttagtctttttttctgtggcttctgtctctggttttgtgcttagaaagtcctttcctacttgaaaatgagataaatgttcacctatgttggcttctagtctcttttatggcttcattttttccatttactatagaggttaagagtgtgggtactggagccagactgtctgggacaaacccagcgtcaccccaagccctatgtgtgatttttagccaggcacttaacctctccatacctccatttcctcatatgtactgcaatggttataatagtaccttcctcaggagtctttgtttagattaaaatttttaaccacagtaaatacttagcacaaggcctgacacacaataaacccaagatcagcattaggtgttaaaacttatatcttgaatggatctgggcattttagggtatatgatgatggtgacatttcaaactgggcagggaggggttgttgggataatggactgactattcactcaataactttatcttctccctaattatctcagacacatttgttaaaccatactccatggtcctccagtttgaaatgccacattcatcacaaattcagttctctccatatgtgggtccatgtccaagctttctattctgttctcttccccagtatctgttcttataccagggccacactgttttgctgattgttgctttgcaatacaattcaatacccagccatgggtgtccctggcaccttgcccttctttattcttgattatttcaggcagcatcagttgaaccagccagagaccagcaaatgttcttatttgaggcaatcctcctctcgcacacatgcactctggctctccatgcatgtgtccatttctctcaatgtctctcactatctcttgttctctcttgctcgctctttgtgtgtgtctctttgtctctatgtatccctatctctcagccagtcccctggatagaggggcaattgtcaacttgaagccctgcagacacctaatgacttaaccagacagcgtagaagggccctggcccttgtctactccacgcctctccgtgctcagtgtagaagggcaaattgaagaccagagatctcagggcctcaccgaaatgcagcggcagagttgaaatccaagcctagatctcaggactctaggtgggaccctggttctggctctctccccaactgaaggcctcagtttacccctcagcacccagaagggggaaggggaacctgggctaccattcccccttctgccttctcacacgttggaccccaacttcccacaggttggacgatccacgatcacagtgtggggcccagcctcacaagagctgggctaggtgaggccccggactccataggtcaggaggcctagttggccagagcgtggtgatgatggaggcatgtcagtcagtcaggctgtgtgtccccagagctggtgctggtccccgaaaaccttgattgtggggcccctctagagagtctgatgatgggctctgtattggcgaaggctgaggcttttccagctccccccatgaggcccagaccaaaggcacaccagcctcaacctcctcctccccctgttgccatctctggcggagtggccatgtatttgggaacgttgttccagagtggacagggagactgaggccctagggaggctggctctgtttccaggcctggtaggcaagaggccctatgaagcagcaagctgcctgactttcagatggttccaaggagtttggacaccagggacactggcctacacatactgagactttgggaccgtagaccccacagtctgtggttttgagattctaggatcctttaaatctaagaaatgctgttctatgattctgaggtcctggtgttatactatttgaagaccccaggggtcccagtatctgtggagcctgcctggcactctcagagcttcaaacctgggtcctctccacaacccaagaagggccaggtcttcagagctaggggcttgtcatagtggccagatggacatcacctaccacatccaccagcacccatgtcaccccacctgggccaagcctgctgcaggacagggcagccagttctcggaacgaaacctgtggggtggggtatctgccctcttctcttcctccgtggtgtcgatgaagcccggcgcatccggccgccatgacgtcaatggcggaaaaatctgggcaagtcgggggctgtgacaacagggcccagatgcagaccccgatatgaaaacataatctgtgtcccagaaacatcccccattcagcttctgagaaacccagtcagaaagggacgtcccaacagacagtgcaggaagccggctgcccagcccggccctctaggtcctctacccccagacagatcatctccatgtccctgtctgagaatgtatctatgctttgctgagtcaggccatcccacatgtgtttggggagaattcttagctctggccaagtgtccaggcagcttcagaagtgaccacaggccagccacatgggccaggccagagtggtggaaaacatccatttgcaccgaaatcggtattagtttgttctggctgctataacaaagtaccacaactgagtggcttcagcaacagaaattgatcatctcacagttctggaggccagagtccaagatcaaggtgttgccagggttggttccttctgggggccataagggagaagctgctccaggcctctcccccagcttctggtggttgctggcaatctttgttatttcttggcttgaaggagcatcaccccatctctggcttcattcattcactcaccttctcatctcaccagtgctctcccaggcccttgttcggagcctccacagacccacactcctgtttctcacgcagtaatgttctaagcccccaggagactaagaacttaatacctggattctcacactcatctccctcagcaccacagctctgacaaccacccccaggaggtgacagcaaagaaaggaaggagcaactgctcccccagaacccttctatactcccccgggctgctctcagcagctgtgtgcccaactcagtgctgtgaggtggaacggggagatggagacacacacacacacacaccagagagtttataaaatgtgcacacggaaacacttcctaaagaaagaagtggagttctcaagtcactatgggactacggaactcggcatctgagcatccccttctgtataatggggttggctgggcagtcccttccagctctggcttcctctcagaccaggattataggatcctgaaaagccagtgcttccctcagggagtggaaggttctggggctcagcagggggcccggagccattgtggagggctttcaaggtgaggacaatagaagagcaggtcttgcgtggcttggacagggaaagaggagaaggagtgggcatttgaggcagggggtgtagcatgagccaggcttgagggccagaaattggggtgaactctgatgggggctgggtagagaagcttctacaggccccagctcaagagaccccatctctcctcctctctgtcacttgccatgctggatccgtgcatgatcacactcctggactcgcctccttgccctgagatccagacccccgtattcagctgccccctcagctcctccactcacatatttaatgccagactcttcatgtctatctacacctgcacttttgcacccaatccaactccccgccatgtcccccatctcaggtaatgtcagctcggtccttccagctgctcaagctaaaacccatgtcactttgactctccctcttgcccactacatccaagctgctagcactgctcctgatccagcttcagattaagtctcagaatctacccacttctcgccttctccactgccaccagcccattctgtgccagcatcatcacttgccaggactgttacaatagcctcctcactagccccactcacagcagccagatgaatcttttgagtccatgcctagtcactggggcaaaataggactccgaggagaaagtccgagaccagctccggcaagatgagcaaacacagcctgtgcagggtgcagggagggctagaggcctgaggcttgaaacagctctcaagtggagggggaaacaaccattgccctcatagaggacacatccacaccagggctgtgctagcgtgggcaggcaagccaggtgctggacctctgcacgtggggcatgtgtgggtatgtacatgtacctgtgttcttggtgtgtgtgtgtgtgtgtgtgtgtgtgtgtgtctagagctggggtgcaactatggggcccctcgggacatgtcccagccaatgcctgctttgaccagaggagtgtccacgtggctcaggtggtcgagtatctcataccgccctagcacacgtgtgactcctttcccctattgtctacgcagcctgcccttggacaaggacccgatgcccaaccccaggcctggcaagccctcggccccttccttggcccttggcccatccccaggagcctcgcccagctggagggctgcacccaaagcctcagacctgctgggggcccggggcccagggggaaccttccagggccgagatcttcgaggcggggcccatgcctcctcttcttccttgaaccccatgccaccatcgcagctgcaggtgaggccctgggcccaggatggggcaggcagggtggggtacctggacctacaggtgccgacctttactgtggcactgggcgggaggggggctggctggggcacaggaagtggtttctgggtcccaggcaagtctgtgacttatgcagatgttgcagggccaagaaaatccccacctgccaggcctcagagattggaggctctccccgacctcccaatccctgtctcaggagaggaggaggccgtattgtagtcccatgagcatagctatgtgtccccatccccatgtgacaagagaagaggactggggccaagtaggtgaggtgacagggctgaggccagctctgcaacttattagctgtttgatctttaaaaagttactcgatctccatgagcctcagtttccatacgtgtaaaagggggatgatcatagcatctaccatgtgggcttgcagtgcagagtatttgaattagacacagaacagtgaggatcaggatggcctctcacccacctgcctttctgcccagctgcccacactgcccctagtcatggtggcaccctccggggcacggctgggccccttgccccacttacaggcactcctccaggacaggccacatttcatgcaccaggtatggacggtgaatgggcagggaggagggagcaggtgggagaactgtggggaggggccccgagtcaggctgaaccacagcccacatgtgccccccagctctcaacggtggatgcccacgcccggacccctgtgctgcaggtgcaccccctggagagcccagccatgatcagcctcacaccacccaccaccgccactggggtcttctccctcaaggcccggcctggcctcccacctggtaacacctcagcccgtaccccatggcttcacagaacccccaagtccccagatccttggctgtgagcagtgtaggctattctgaattgcagtactctgggggtcaaaggtgtcaggtctcagaggcttggaaactccaccctccaaaaaacgtcaggtgcagaaccttaaagatgcagaatgtcaaaatcacaaaaccacagagctttacaaagctagtcaaaatgtcagcacctgcgaatggccgtctttaagcttctctgccagaagcctgggactttggggacagcagagccccctgggagtcagggttttcgaggctcaggagggtgggaagctcaaaatgagaggccttgtgggccaagctccagagcccagcccacagcctccataggtgccctgtccccacccacagggatcaacgtggccagcctggaatgggtgtccagggagccggcactgctctgcaccttcccaaatcccagtgcacccaggaaggacaggtcagtggacagggctgggaaggatcctcgccctcctatcccctcccctgacaccctctgtccccccagcaccctttcggctgtgccccagagctcctacccactgctggcaaatggtgtctgcaagtggcccggatgtgagaaggtcttcgaagagccagaggacttcctcaagtgagtggcccaggcctgtgccagtctaccggccctggcttgtggggagaggtctagggtgcagatctcagctcaggcttcatcccaataagtagtaagatgcaagagctaaactctgagactgtgggttcaaatcccagctccatccctgactggctgtgtgaccttggacaaattacttagcttctctcgacctcagttttctcgtatgtataataagaaacgtttgtgctgttatttacccccattttacagacaaggagactgaggccaaagaggttaagtgtcttgatcaaaatctcccagttcctgagtgacagagctgggatttgaacccatgtagccaggctctagaatctgcactcctgctttgccctgctactcctcatgccaacatgccagccttattccactgttcccaaagttctagctcctctagatggctgctgctgcctcccctcagtccccccatatgtctctctctctctctctctctctctctctctctctctctctctctctctctttctctctctctcacacacacacacacacaaatacacaccacactacacacaacccttagcagcaaccccacatgtcctgtcctccttgcagccaggcctttgcacaggccgtccctccacccagaatgctttgcccactctcacctccctggcccattctcaactcaccacacttccaacattatctccagcactctggccaggctcaagtggtgagttcaggcctgacatgcagtaggtgctgaggggcatgtgttaagggaacgaggggtgtgagagggagactgaggtagagaggggaggggagctggggctcagaggagagaactcccagagggtctgggccctccccattcagagcattgagccagaccaggcctgtcgtggtcacctgcatggaatcttctccctacttaggcactgccaggcggaccatcttctggatgagaagggcagggcacaatgtctcctccagagagagatggtacagtctctggagcagcaggtaatgccagggcggtggagggtaagggatagggatagtgcgcaaaaccttctgtccaccatgtgccagaaaccaagttcacctgggacgagggctggtataaaggaaggaagaggagcgggcactcccagggaagaccgtagcctgggcaaagatgtggcagagaagggccaggctgaggcctcatgtttgtgccatttcacagctggtgctggagaaggagaagctgagtgccatgcaggcccacctggctgggaaaatggcactgaccaaggcttcatctgtggtgagcgaccccaggactggtggtggcagactcagactgctggggggcagggaggaggtctgcacggtgcagggaacctaacctcacattcaggtcctgagagctaggggcccctgtccccagctccaaacatgcccagacctggaaatctgtccccttctacttacaaaccctctgaccccggctgggcgtggtggctcacgcctgtaatcccagcactttgggaggccgaggcgggtggatcacgaggtcaggagttcaagaccagcctcgccaagatggtgaaaccctgtgtctactaaaagtacaaaaaattagccaggcgtggtggcaggtgtctgtagtcccaactacttgggaggctgaggcagagaattgcttgaacctgggaggcggagtttgcagtgagctgagatcataccactgcactccagcctaggcgacagatcaagactccgtctcaagaaaaaaaaaaaaaaaaaaccctctgactctaagatccccaaacactgtgatcctgagttgttaaagcaaatgcaaatagccagacttgccagatgcaggctgtgtgccagcaggaccagctatgtaacctgcagggccccttgttcagatttcaagatggcgaccacagagcattaaacaaagcacagggtgccacataaccacataggtcacacgcccatgaagccagccctggaggccaggcactgtttctgagcgctttgctggtggtaatttatttctcatgatgcgaatgtacagatgaggaatattgaggccaggggggtttaggtgactttcccaaggtcacagttgggtggtaaagagccctattcaaccccagttcatggtcccagcatcagtggccacatacgacatccgcacctgtgctctaataaatacggctcatgctgttttgtgggattccacctcagactggaatttagaagagggcgtccttgctttgaaaaacactgatttaaaaataaagtggagccaggcgcagtggctcatgcctgtaatcccagcactttgggaggctgaagcgggtggatcacatgaggtcaggagttcgagaccagcctggctaacatggtgaaaccccatctctaccaaaaatacaaaaattagctgggcgtagtgacgggcacctgtagtcccagctactcgggaggctgaggcagaagacttgcttgaatctgggaggtgggggttgcagtgagccgagattgcaccactgcactccagcctgggcgacagagcaagactcagtatcaaaaaaaataaaaaacataaaatagaaagtaaaaagtgggaagtttaagcctctgggtcaccagcctctccccctcacccaggcatcatccgacaagggctcctgctgcatcgtagctgctggcagccaaggccctgtcgtcccagcctggtctggcccccgggaggcccctgacagcctgtttgctgtccggaggcacctgtggggtagccatggaaacagcacattcccaggtaagaatggtccttgcactacacggtgcccccaagctcctaatcctgacaggctctgggtggagggtgcaaaggagctccatgctgccccttcccaccaccaccaccactgcagctgccgccactcagcctttgggaaaatgcatccgctcacaaaagcttcctttcgggatgtccgtggcctgaaagccccccatatggtctcgagtgtcgggcccctagccctgactcccttggggattggggccatgcctcacccactctggactccagctactatattcggccatcagaagggagggaccctgctaagtaattccaggagcacctcctttcctcccctgaccaaggaaaatcggggtggattcgcccgagctcacctatccactgctctccaccaggcctggcctgtgggcttagcagggatcagagaccttgactgtcatcctggctctgccatttaacctcttgcatcctttggtgtgcaagttactccgcttcttttcaacctcggggagaactattttggcagaagtggtgcaaagaataaatgatacaacttatgtcaggtgctcagcaaacagtacctgtgcccgtggacacgggtgttgacggtgagatctcaggcctgtagactcaccttgtagggggaggggacagggagctagctaggaggtcctgcatggggcttgattcatccccaccctctgacagagttcctccacaacatggactacttcaagttccacaacatgcgaccccctttcacctacgccacgctcatccgctgggtaagcagggcagctcggccccaaggaggaggaagacaaagatggggtgggggacctgcctcccaaactcctgtctccctctgagtgccctcagagtgggttcctccattcccaagccccagccccaaggatccccaagccgtgcctcaaatgtgacccctcatgctggcttcaccccaaacctgtccgcaaatccaaacctaaaccaccatccaggccagagcatgccaaattctgaccctaaacctacccctttccagatgtccacctcagccccatacctaaccctctcctggacccataaaatagcctaaagctaaccccatctctgcaccttgccctaaacgtaccccagctcttactctaactccttccccagcctttatgccaacccaaccccatctccttccctggccccaacgtaccccagtatgtcaatacacccccaactgggcaccattcccaacctttccttgtaacacccatttgatccttaacttcatcaccccatcccaactccttcatctcagcctccccaatgccttctcagaaccttcatcctagcgccacacctaaccccaaacctgaacctcacccctacatgataccagatattccccgactgtctctgaactgaaaccctgacctagccccatcctgactgatagcctcactgcaatcatcatcgctgactctgtaatcccattcctgaatccaaactgatcaaattccctgaccctcagcctcactccacaccgaaccccacaactaacctcatccttgccctgagcctaaccacctaaccatgtccctgacacgtaagatactcgataattcaaaccatctctggcttctgacctaaagccaagtcatcccatccctcacccctagaccccccacctgagtccaccccagcctgactcttaacccaccccttccctgacccttaagttggcctggccctttaccccttccaaatccttgaccccacttctgacccttcaccttccccaaccctgaaatgtcacctccacagagaaccccaactccaactccatcccagacctttcacctcacttcagccctagccctgaacaagaccccactcccaacctcagtcctgatcccttacctaatcccagaacaaccatacccacacccatctaaccctgcccaacccgacacttcaccccttttctaaccccatctttgaccccatgcttcaccccacatctagtcctgtccctgattacctgcccctacaattccgcccccatgtcagatggctcggggtaggtcatagcccctctaaaccccaagtttggggaatgtgccccttaccccaccccccaacttccaggccatcctggaggctccagagaagcagcggacactcaatgagatctaccactggttcacacgcatgtttgccttcttcagaaaccatcctgccacctggaaggtgagctcctctgaggtggcggtgactgggatggcctcaagtgccatcgcagctcaaagtgggcaggcctgggtctgggctcataggcacattggggaggaacgggatgtgggttgttggtggtggctgctggcctcagaggttgacgcccacctgctccctgtccccggccttccacagaacgccatccgccacaacctgagtctgcacaagtgctttgtgcgggtggagagcgagaagggggctgtgtggaccgtggatgagctggagttccgcaagaaacggagccagaggcccagcaggtgttccaaccctacacctggcccctgacctcaagatcaaggaaaggaggatggacgaacaggggccaaactggtgggaggcagaggtggtgggggcagggatgataggccctggatgtgcccacagggaccaagaagtgaggtttccactgtcttgcctgccagggcccctgttcccccgctggcagccaccccctcccccatcatatcctttgccccaaggctgctcagaggggccccggtcctggccccagcccccacctccgccccagacacaccccccagtcgagccctgcagccaaacagagccttcacaaccagccacacagagcctgcctcagctgctcgcacagattacttcagggctggaaaagtcacacagacacacaaaatgtcacaatcctgtccctcactcaacacaaaccccaaaacacagagagcctgcctcagtacactcaaacaacctcaaagctgcatcatcacacaatcacacacaagcacagccctgacaacccacacaccccaaggcacgcacccacagccagcctcagggcccacaggggcactgtcaacacaggggtgtgcccagaggcctacacagaagcagcgtcagtaccctcaggatctgaggtcccaacacgtgctcgctcacacacacggcctgttagaattcacctgtgtatctcacgcatatgcacacgcacagccccccagtgggtctcttgagtcccgtgcagacacacacagccacacacactgccttgccaaaaataccccgtgtctcccctgccactcacctcactcccattccctgagccctgatccatgcctcagcttagactgcagaggaactactcatttatttgggatccaaggcccccaacccacagtaccgtccccaataaactgcagccgagctccccacatgctggactatcaccccatataagggttgcggtcagtgggcaggggtctgggtccaaggccgcagcaggaggaactggacagcggaggaagtagctagggcatgtgcttggccactgcctccagcaccccaaatccctgcctgaggctggggagagacctctgccggcggctcctcaggcctcccggacccggcctaggaggccagcgttctcctggcggagggctcggtagtcctcccggatcttctccaggttgctgagggtcttcttgcccagctctgtctcgatctgaggcaatgtgaacacatgccccctcagcacacacagcccctttcccagctcctgctcaccagcccccatcacagccactctgggcccctcccaccaactccaacagcctgctctgtcccatggccaggcctcgtgtggtgttccctctacccaaagcatccttcgccatgtggcaggattccccctacatctttaagctgaagcctctgcccatggccctgggaggcagacaggagggcccttggggtggaagctggggctcacagtaggccacttgcctgtcccaggtcacaggcactaaggggcagggctgggtgtccagccatcggctgtgtgtggctccacagcctctgtcagcataacctgaggaactgtccccccggcccgccttggctccccatcctgcccccaggcctcacctgctcctcgaggtctcgaacctcccgcatgatggtgcctgtgtcctcgatggtctggatgagctggctgcagttctggggacaacaggagcagaaggcttgcacccagtcccacccacccccagcagccccaccccaggcacatgtctcccctcacctcgtgcagagcagctagatacttataggccttccgaacagcatcgtccttcttggcatcctgaccagacacagggacctcaaaggtatcagtgggctgcccttgaccatctccatgccctaagaaggccaccctctcccaccaccccactagcttcatcctccatgaaacaaagccagccctgggtatcagtgcacctccagcctcgcacagggcctgggtctggaccccagccagccaattagcagatgcacaaggcagcagcccagcctcaccccactcacccccgcccaacctgccccacaccttgaacacaagctcatcagtcaccgcaaacgtccggtccagcttcccagatagggagttgatttccttctgaagctccttcgtatcagacaagatctggcagacaccatggcagccatgagcccctgcctggggcaggctggctagcagtggagggtcctcatgtgtaccagacagggactgtgtcactgtgtcaggggtgactgggatggattgtgtgtgactattctgtgttagagtgtgactggacagctctgcctgagggtgtgaggtccctgtgcggccacactatgcctgacagcccacatgacccaccctccatggccctggcagtgtaccttggtgatctcttccttctgcttccggatgttgcccacgatctccaggatgcgctgggtgtaggccagccgggacacatctctgggcagagtctccagctctgacatctaggcagggatatagcaggcactgccccaggaccatccccccaccctcctaagctacccaggtccctcacacaggccttaccagctgcttatagacctcctccttcctgcgggcctcttcagcagccgcccggacactctggtgcagttcttggatctctgccagccgtcgagaagattccagctgccatgagcccacaggcagaagacagtgagcagagcatagggatggccccctagagagggaccgagcctgccctggcccgcccacagcccagggccccactgcttacctctctgcaatcctgcagctttcggaggtggcggtactcagcgaggagtgggacccggtgcttctcccactgacccgccaagtggatgacccgctgggcactattctccaccacaagctggtgggggatgggtacatgtcacacaggctgggccctccaaccccaccccaccccaccctgcccctctccgcccagctacagccccaaccccacctgcagcttggcaaggttggcagtcccatcgggcagcagctccaccgcgcggctcttcaggcgcagggcctgctcacgctctgctgtactgagcttgctgtgccggcactcagactctgcctggccggtggatacccagtcacatgccacagcccccatggagctccacagatgactgtacacccctgtggcccccacaggcctctctaacagctccacgctggtgccaaggaccccgaggaccccctaatcccctgtccatgcagacccgtgggtaccccacagatgcccacagaccctccgaggacccctcaatcccctgcccatgcagacccgcggtgccccatagatgcccacagaccctcaccctggcctgattctcatagccaccctcaagaggcccacagatccctaatggctcccaggaacccttctgccatgtgcagacctctacagagcacctcttgccccatctagtccctcacaccccgaggccctccttctgacctagcccaacgcgcagcccctcctccgccccttacctgcacaaagctgacgcccagggtcttcatgtcggcctcaacctcctcaatgctgcggttcactccttccagctgctcccgaagggactcgagctcctgttcctgagctgcccacgtgacctgggaggcccaggccagtcagggttggggtgtcaggcccagtagacaagcaagggcctgggacacccccctccaaaccactctgctcacctgttcaggccgccgggaggtggctggcacatctgacacctgagtggcctgggcctggggctcctaaggggagtgacgaggggcatcctggctgccagggaaggcccttcctcacgtggcccagcctcagcctcccctgagaactgcccccagtgcggcatgcatgcccactgaagcaccgatggtggccagactgtgactatgtgggtaaaggcaccatctgcaacctcgggccagagtgcttgctcgtggagaaatctccctgaccctgtcacagctcctacccacctgccccatctctcaagcctcaaatgcccatgagaaggatggggggccctcagagtgaacatcttaggacagaagatatgctcaaaggaaactgcctgaggaaagggggtgttgccccaagaacacccccacacctttgcatggttcccacctatccacattttctccagtcaagtccctaataagctaggggacccctctgggtacccatcccacagtggggcgagggcctgtccagtgggaacacaggaacctgtgtggataaaggtgtggtgctgacacaaaaagccaccctccaagcctgccacgcccatccacacatctcatgtcctcaggcgcacccaccagatggaaggtgaacttctctgagtgcgtgaagcgggagcccttaggagcaccagtcttggccccagcaccccaggcctgcagcagttctcccaggtcccgggcttgtatgggggccccaagcaggccccagctttggcgcagatgctcagtcagttgcttctgcagccgctgccgctgagcccgtgtgtcctcctggggagaaaaggcgggggaagcaggaaggtgtaggggcccacctagcacccaaggccctgcctcctccaaggaccccctgacaagagtatacagacaagtcacccccaccctccagccttcccactaaggcaggccctgctctactctcctgctccaccagcctgggatctcctcgaggacaggggtctcctcttgctcacagacatacttctctccacccactagatccccatgctggagaaggatgtgggaagagaggggggtgggcctagagcccccaaatccaagagaagcatagacaggatatcgggggacagggcagagacagggaatcaaaggtaccaagcacagaaagaggcagagagagagaggcaagagagggacaacagagtttcaagataatgggaaaatctgattatgaactcaagtattggatggtattaagatatcattgttggccgggtacagtggctcatgcctataatcctagccctttgaaaggccaaggtaggtagatcacctgaggtcaggagatcaagaccagcctggccaacatggtaaaaccccgactctactaaaaatacaaaacttagtgtgctcctgtaattccagctacttgggggctgaggcaggagaatggcttgaacccaggaagtggaggttgcagtgaagcgacatcacgccattgcactccagcctgggcaacagagagagactccgtctcaaaaacaaaacaaaaaaaaacaaaaaacaaaacaaaacaaaacaaaaaaaaacccacaagatattattgttaacttcattagccatgaaaatggtccagtggttaccttgaaaactgaatgtccttatgagttaagagatgtagtcctaagtatttagagctgaaatgacatgatgtctgagatttgctttaaaataatacagcaacaaagaaaaagttgggagagaaaagatgaagaaaagttggcaaaatggtacataggattcactagaatattctctctacatttatgtttgaaaattactacagatataaaaacaaaaacagacagccaggcgtggtggctcacgcctgtaatcacaacactttgggaggccgaggcagatggatcatgaggtcaagagatcgagaccatcctggccaacatggtgaaaccctgtctctactaaaaatacaaaaattagctgggcgtggtggtgcatgcctgtagtcctagctatgtgggaggctgaggcaggagaatcacttgaacccaggaggcagaggttgcagtgagctgagatcgtaccactgtactccagcctgggtgacagagcgagactccatctcaaaaaataataataatgataaaaaaataaaaatgtaaaaagacacagaggtgaagacagaaagagaggacagataaaaaagtggacagaccaggagggggccgacacagaggtggagaaaaagaggggcagacagagatgtggacacagaggaagaggagacagataaagaggcagacagaaggggaggggggccaaatacagaggtggacagagaggaagaggggacagatgtaaaggtggacagaaggggaggggtactgatacctgggtgaacacagaggaagagggaacagaaataggagagcagaatggagggagggaaaaagagaagtggacagagaggaaaaggggacagataaagaaatggacagagggagagggtgacagagaggtggacagagagaaggaggggacagatgcagaggtggacagaggaagaggggacagataagtggacagaggggaagaggggacagatacagagatggatagagaagaagaggggacaaagaggttgacagagaagaagagggggctcggcatggtggctcatgcctgtaatcccagcactttggaaggccaaggtgggtggattgcttcaggtcaggagttcgagaccagcctggtcaacatggcaaaaccccatctctacaaaaaatacaaaaattagccgggcgcacgcacctgtagacccagctactcagatgcctgaggtgggaagattgcttgagcccgggaatttgaggctgccttgagccctgatcatgccattgtagtccagcctgggtgacagagcgagacaccgtctcaaaaaaaaagaagaagagaggacagataaagagatggacagaaggggaggagggacaaatacagaggtggacagagaggaagaagggagagataaggggacagagggaaggggcaacagatacagaggtggacagagaggaagaggagagagattaagaagtaaacagaggcagaggggtgacagatatataggtggacagcaaggaaggggagagatacagaggtggacagagcagaaggggacacagataaaaaggtgcacagagaagaagaggggacagataaagaagtagacagaggagaagggggaacagatagatagacagagcaagagaggaattcagtacagaaacgaggagacagagaggtaagaaagaggagcagcaaaaacacagaactagaataatggggacaggcagaaattgtgcaaaaacctagaaaccagaaaaatgaacatcagtgacaagtgcagaaacagagaaagattagggccgggtgcggtggctcatgcctgtaatcccaacactttgggaggccaaggtgggcagatcacctgaggtcaggaattcgagaccagcctagccaacatggcaaaaccctgtctctactaaaaatataaaaattagccaggtgtggtggtgcaagcctgtaatcccagctacttgggaggctgaggcaggagaatcgcttgaacccgggagatggaggttgcagtgtgctgagatcacgccactgcactccagcctgggtgacagagcaagactccaaatgaatgaatgaattaatgaatgatgaaggcaggtagccaatctggattgctccagttgccaggaatctcaagcacattattcagtctaactactgccctgagaggagagcactattactaccccaaattttagcacaggaaaccaaggctctgaggagggatactgacttgtcccaggttctccttttttctgactccagtgttctttcaggtggggagctaggtaagcacacacagaggggaaacaatggaagggagggacaaagtggggaaggagagcagaggaccagcgggagtgtcagtgagcagcagcccagacagcagggagccaggcatctggctgtacctggggtgggaggcgggatgtccggtggacccagtcctcatcccctggccggtcccggcccgtctgctggcagagctgcagggcatggtgttcgaggagcgaggccacccttccaacaggctgaggcacctgggtagggactggaagcagcaggggactcgcctggaactcccgtggctctggaggcaggaacagagtcagctggccctgccgcatggcaacgctatgaggttcccccccaccttcctcctcacccctccccacagcctcatgctcaccacctctggaactcaattctggcacgaccagcctgctggcatggaaaggcttctggagggccgagccctggtgggagagcaggctcagaatctccagggtgaagtgggatgagggttgccaggggtagggggccaaaaccctgggcacccagacggggacaagagaagatccatgggagtcaggggtctcacctggaggtgctgcagcttgggagtgcgaaggtggggcgggacccaaggcagtgccagctggtcccgaatttggctcccaatggcccggaggagaatagctgagtcacctatgggggatagggaggaagtgaatcagatgtcaatgctgcaaatccaaaagggcataccctaggagaccagcctccactcctgacccccatccagagatacacatctatccagcttgcgttctcacgttcagtcattcaacaaacaccgagcacctactatgtacaggtcgctgttctagacactagggctacttcgtggaacaaactggataaaggtccctgccctcagggagccggcaagctagcagaggagagagatcatgaataggatcctgaataccatccagactgcagccaggtggggatcaggagagggctgcggagaggaggttaacctcaaagaggtaagggagtgaaccatgagggtacctaggggaaaggtaaccaacgatacaaaggtgcagaggcgggagtgtactggggtatgtttgagtagcacccaggaggcccaagtggttagagcgaagtgagagagagggagggcacaggggttgagtcagggaggcccctccccgcaccaacgcaccaccggggtcagctcaacctcagccccctgccccctgccctgtagcccctctctgatgcctaatcctcctgcctagctctcctgaaggcacataccgccacccctacccatcaacctttttaccacctctacctctctcagccctacagcccctagaaggccctcctctcccctcaccgcccccgcccacatcccagacacccagtacctgcaggctggtctgcatcctcagaggcatcggtgggcagacgctcagccaagaagagaagcaggtctcggaggtcaggctcactggggtagaggaagttctgatagccaagctccaagggatagcccaggtcctgagggttggtgggcggctatcaggaagcaggcagggtcctcctgccctgggagacttgggcctaggctgaaaacgctcccactttctcactaaccaccaccctcccaacctcccccagctccccaaggcctctgggccctggggggagtcacagagtgatgatagtcaacgctacagagaacaagaaacaagattaaagctctggcctttctatgactcaaaatccagaggccataaaagaaaagatgggtacttttgaatacatgaaaagaaagaaaatatttaaagaaaatagaataagcaaagtcaaaagttaatgacaagttgggaaaaaatatttggagcccatatcataggtaaagagcaaatctacctattatagaaagagtgcctaaaaataaacaggacaaaaagaccagaagcacaatagctcagaacaaaaggactcatgagggttctgatggggactgaggaaacaggccaggagagaaagaaagcctttttcctttttttttttttttttttgagacagggtctcgctctgtcgctcaggctggagtgcagtagcgtgatcttggctcactggaacctctgcctcctgggctcaagtgatcctcccacgcagcctcccgagtagctgggattacaggtgcatgccaccacacccggctaatttttgtattttcagtgtagacagggctacaccatgttggccaggctggtctcaaactcctgggctcaagcaatctgcccacctcagccacccaaagtgctgggattacaggtgggaatcaccacacccggcctaggaaagcctttttcttccagagttgccactgctttggaactgcatagactctgaaagcagacttcctggattcaaacccaagctttgcctcttaccaactatacgacctcaggcagatcacttaatccctctgtgcttcactttcttcatctgaaagagggtataccaacagtacatatagcagaaggttgtcctgagaattaaatgagttaacaccatgttacttaccacagggcctggcacagagtacacttagaagccatcattattctatacttaggagtatactgggtcacaatgcaagatatatttattttggaggctcaaggtcaaataagtataaccactggcttttaaggtattttactttggattttttccacaatatgcaatcaaagagctgtgactgatatagaaactcattccaggagtggggaaggtgccaaaatatggaggtggctaaggtgcagaaactgttgccaggagcagggcatatgaagaaaagatgccagaacatggcagtgctgagttgcgggggggctacagggacagcacacagctggattaagagaactccttttgcctgctgctgataaaccaaggctgctgggggccagacaaccatatgtacctgttttttatttttttggaaacaagagtcttgctctgtcgctcaggctggagtgcagtggtgcaatctcgactcactggaacctccgcctcctgggttcaagcgattctcctgcctcagcctcctgagtagctgggattacaggcacacaccaccacaccaggctaatttttgtatttttagtagagacagggtttcgccaggttggccaggctggtctcaaactcctgacctctggtgagatctgcccgcctccacctcccaaagtgctggaattacaggagccaccgtccccagtctttttttttttttttttttttggagatggggtttcactctgtttcccaagctagagtgcagtggcgcaatcacagcccactgcagcctggacctcccaggctcaagcaatcctcctacctcagcctcccacatagctgggaccacaggcgtgtgccaccatgcccagctattttttttttattttttgtagagatgggggtctcactatgttgcccaggctgatctcgagctcctgggctcaactgatcctcccacctcagactcccaaagtgctgggattacatgcaagagccaacgtgcccagcccacatgtacctcctggccactggaaaagccatagtcactaacccccactaaaatcaatgtaagcaaaagcaggtgaacaaaatccaagagagacagcactgagggaagaacagagaactgcaggaagcctgagcccccacctcaacacctcctgctgtgtactctcctctgcaaacagaagacataacttcccccctattaagtgctaaccttaagaatacatacagtcctgggccaggggacagactgcctgcctcataaggccaccaagagccccagagagaacaatgtgacaactcctgagagctgggtgaacctgagagcgaagggatggatggagctctgagacctgttgctaagagacagaaactgcataagcaaggcccaaatttaacaactctagccacccagtcccctatatctaaatgaaagttttcacggtagttactctatcgtccctccaccaccatatacttcctgggtcagttcaaagtgtttccattcactatgtattcacaggttccagatcggacctatccaataatagtaatcccatttatgcaaagcttattataaccagcttttcacacattaactcatgtttaatcctcacagcaaccctatacagtagctacaattcttatacccattttacacatgtggaaacttagcctcaaaaaggttaagagagccagacgcggtggctcacacctgtaatcccaacactttgggaggctgaggtgggtggatcacaaggtcaggagttcgagaccagcctggccaagatggtgaaaccctgtctccactaaaaatacaaaaaaattagccgggcacagtggcagacacctgtaatcccagccactcggcaggctgaggcaggagaattgctggaacccaggaggcggaggaggttgcagtaagccgagattgtgccactgcactccagcctgggcttcaaaaaaaaaaaagactggcccaaagtcacagagtgagtgagccagggggagtggcattacttgcagctcttgaatacaggaactggactcctggactcagctctatactgggaatgggtgagtgtttcatcagaatggctctttaccaggcacagtggtgcacgcctgtagtcccaactactcaggaggccaaggcgggaagattgcttgaggccaggagcttaagaccagcctgggcaacatctctacaaaagcgagaccccatctctacgaaaaatttaaaaattctcgggcagggtggcatgtgcctatagtcctagctactagtgaggcagaggcaggagaatctcttgaggccaggagttcaagaccagcctgggcaatatagcaagacacttacctctaaaaaaattaaaatattttttaaaagaaaagcactttatttattctgtcacagagacattgttggaattgctcttagcagaggcaggatatgtggttcccacagaggtaatatagcagacactcttttgggtaaccagcatgcctttctttgggtaatcatccttatcccaactccac

SEQ ID NO: 2 - DNA, 38392 bp, Homo sapiens
gtggagttgggataaggatgattacccaaagaaaggcatgctggttacccaaaagagtgtctgctatattacctctgtgggaaccacatatcctgcctctgctaagagcaattccaacaatgtctctgtgacagaataaataaagtgcttttcttttaaaaaatattttaatttttttagaggtaagtgtcttgctatattgcccaggctggtcttgaactcctggcctcaagagattctcctgcctctgcctcactagtagctaggactataggcacatgccaccctgcccgagaatttttaaatttttcgtagagatggggtctcgcttttgtagagatgttgcccaggctggtcttaagctcctggcctcaagcaatcttcccgccttggcctcctgagtagttgggactacaggcgtgcaccactgtgcctggtaaagagccattctgatgaaacactcacccattcccagtatagagctgagtccaggagtccagttcctgtattcaagagctgcaagtaatgccactccccctggctcactcactctgtgactttgggccagtcttttttttttttgaagcccaggctggagtgcagtggcacaatctcggcttactgcaacctcctccgcctcctgggttccagcaattctcctgcctcagcctgccgagtggctgggattacaggtgtctgccactgtgcccggctaatttttttgtatttttagtggagacagggtttcaccatcttggccaggctggtctcgaactcctgaccttgtgatccacccacctcagcctcccaaagtgttgggattacaggtgtgagccaccgcgtctggctctcttaacctttttgaggctaagtttccacatgtgtaaaatgggtataagaattgtagctactgtatagggttgctgtgaggattaaacatgagttaatgtgtgaaaagctggttataataagctttgcataaatgggattactattattggataggtccgatctggaacctgtgaatacatagtgaatggaaacactttgaactgacccaggaagtatatggtggtggagggacgatagagtaactaccgtgaaaactttcatttagatataggggactgggtggctagagttgttaaatttgggccttgcttatgcagtttctgtctcttagcaacaggtctcagagctccatccatcccttcgctctcaggttcacccagctctcaggagttgtcacattgttctctctggggctcttggtggccttatgaggcaggcagtctgtcccctggcccaggactgtatgtattcttaaggttagcacttaataggggggaagttatgtcttctgtttgcagaggagagtacacagcaggaggtgttgaggtgggggctcaggcttcctgcagttctctgttcttccctcagtgctgtctctcttggattttgttcacctgcttttgcttacattgattttagtgggggttagtgactatggcttttccagtggccaggaggtacatgtgggctgggcacgttggctcttgcatgtaatcccagcactttgggagtctgaggtgggaggatcagttgagcccaggagctcgagatcagcctgggcaacatagtgagacccccatctctacaaaaaataaaaaaaaaatagctgggcatggtggcacacgcctgtggtcccagctatgtgggaggctgaggtaggaggattgcttgagcctgggaggtccaggctgcagtgggctgtgattgcgccactgcactctagcttgggaaacagagtgaaaccccatctccaaaaaaaaaaaaaaaaaaaaagactggggacggtggctcctgtaattccagcactttgggaggtggaggcgggcagatctcaccagaggtcaggagtttgagaccagcctggccaacctggcgaaaccctgtctctactaaaaatacaaaaattagcctggtgtggtggtgtgtgcctgtaatcccagctactcaggaggctgaggcaggagaatcgcttgaacccaggaggcggaggttccagtgagtcgagattgcaccactgcactccagcctgagcgacagagcaagactcttgtttccaaaaaaataaaaaacaggtacatatggttgtctggcccccagcagccttggtttatcagcagcaggcaaaaggagttctcttaatccagctgtgtgctgtccctgtagcccccccgcaactcagcactgccatgttctggcatcttttcttcatatgccctgctcctggcaacagtttctgcaccttagccacctccatattttggcaccttccccactcctggaatgagtttctatatcagtcacagctctttgattgcatattgtggaaaaaatccaaagtaaaataccttaaaagccagtggttatacttatttgaccttgagcctccaaaataaatatatcttgcattgtgacccagtatactcctaagtatagaataatgatggcttctaagtgtactctgtgccaggccctgtggtaagtaacatggtgttaactcatttaattctcaggacaaccttctgctatatgtactgttggtataccctctttcagatgaagaaagtgaagcacagagggattaagtgatctgcctgaggtcgtatagttggtaagaggcaaagcttgggtttgaatccaggaagtctgctttcagagtctatgcagttccaaagcagtggcaactctggaagaaaaaggctttcctaggccgggtgtggtgattcccacctgtaatcccagcactttgggtggctgaggtgggcagattgcttgagcccaggagtttgagaccagcctggccaacatggtgtagccctgtctacactgaaaatacaaaaattagccgggtgtggtggcatgcacctgtaatcccagctactcgggaggctgcgtgggaggatcacttgagcccaggaggcagaggttccagtgagccaagatcacgctactgcactccagcctgagcgacagagcgagaccctgtctcaaaaaaaaaaaaaaaaaaaggaaaaaggctttctttctctcctggcctgtttcctcagtccccatcagaaccctcatgagtccttttgttctgagctattgtgcttctggtctttttgtcctgtttatttttaggcactctttctataataggtagatttgctctttacctatgatatgggctccaaatattttttcccaacttgtcattaacttttgactttgcttattctattttctttaaatattttctttcttttcatgtattcaaaagtacccatcttttcttttatggcctctggattttgagtcatagaaaggccagagctttaatcttgtttcttgttctctgtagcgttgactatcatcactctgtgactccccccagggcccagaggccttggggagctgggggaggttgggagggtggtggttagtgagaaagtgggagcgttttcagcctaggcccaagtctcccagggcaggaggaccctgcctgcttcctgatagccgcccaccaaccctcaggacctgggctatcccttggagcttggctatcagaacttcctctaccccagtgagcctgacctccgagacctgcttctcttcttggctgagcgtctgcccaccgatgcctctgaggatgcagaccagcctgcaggtactgggtgtctgggatgtgggcgggggcggtgaggggagaggagggccttctaggggctgtagggctgagagaggtagaggtggtaaaaaggttgatgggtaggggtggcggtatgtgccttcaggagagctaggcaggaggattaggcatcagagaggggctacagggcagggggcagggggctgaggttgagctgaccccggtggtgcgttggtgcggggaggggcctccctgactcaacccctgtgccctccctctctctcacttcgctctaaccacttgggcctcctgggtgctactcaaacataccccagtacactcccgcctctgcacctttgtatcgttggttacctttcccctaggtaccctcatggttcactcccttacctctttgaggttaacctcctctccgcagccctctcctgatccccacctggctgcagtctggatggtattcaggatcctattcatgatctctctcctctgctagcttgccggctccctgagggcagggacctttatccagtttgttccacgaagtagccctagtgtctagaacagcgacctgtacatagtaggtgctcggtgtttgttgaatgactgaacgtgagaacgcaagctggatagatgtgtatctctggatgggggtcaggagtggaggctggtctcctagggtatgcccttttggatttgcagcattgacatctgattcacttcctccctatcccccataggtgactcagctattctcctccgggccattgggagccaaattcgggaccagctggcactgccttgggtcccgccccaccttcgcactcccaagctgcagcacctccaggtgagacccctgactcccatggatcttctcttgtccccgtctgggtgcccagggttttggccccctacccctggcaaccctcatcccacttcaccctggagattctgagcctgctctcccaccagggctcggccctccagaagcctttccatgccagcaggctggtcgtgccagaattgagttccagaggtggtgagcatgaggctgtggggaggggtgaggaggaaggtgggggggaacctcatagcgttgccatgcggcagggccagctgactctgttcctgcctccagagccacgggagttccaggcgagtcccctgctgcttccagtccctacccaggtgcctcagcctgttggaagggtggcctcgctcctcgaacaccatgccctgcagctctgccagcagacgggccgggaccggccaggggatgaggactgggtccaccggacatcccgcctcccaccccaggtacagccagatgcctggctccctgctgtctgggctgctgctcactgacactcccgctggtcctctgctctccttccccactttgtccctcccttccattgtttcccctctgtgtgtgcttacctagctccccacctgaaagaacactggagtcagaaaaaaggagaacctgggacaagtcagtatccctcctcagagccttggtttcctgtgctaaaatttggggtagtaatagtgctctcctctcagggcagtagttagactgaataatgtgcttgagattcctggcaactggagcaatccagattggctacctgccttcatcattcattaattcattcattcatttggagtcttgctctgtcacccaggctggagtgcagtggcgtgatctcagcacactgcaacctccatctcccgggttcaagcgattctcctgcctcagcctcccaagtagctgggattacaggcttgcaccaccacacctggctaatttttatatttttagtagagacagggttttgccatgttggctaggctggtctcgaattcctgacctcaggtgatctgcccaccttggcctcccaaagtgttgggattacaggcatgagccaccgcacccggccctaatctttctctgtttctgcacttgtcactgatgttcatttttctggtttctaggtttttgcacaatttctgcctgtccccattattctagttctgtgtttttgctgctcctctttcttacctctctgtctcctcgtttctgtactgaattcctctcttgctctgtctatctatctgttcccccttctcctctgtctacttctttatctgtcccctcttcttctctgtgcacctttttatctgtgtccccttctgctctgtccacctctgtatctctccccttccttgctgtccacctatatatctgtcacccctctgcctctgtttacttcttaatctctctcctcttcctctctgtccacctctgtatctgttgccccttccctctgtccccttatctctcccttcttcctctctgtccacctctgtatttgtccctcctccccttctgtccatctctttatctgtcctctcttcttctttttttttgagacggtgtctcgctctgtcacccaggctggactacaatggcatgatcagggctcaaggcagcctcaaattcccgggctcaagcaatcttcccacctcaggcatctgagtagctgggtctacaggtgcgtgcgcccggctaatttttgtattttttgtagagatggggttttgccatgttgaccaggctggtctcgaactcctgacctgaagcaatccacccaccttggccttccaaagtgctgggattacaggcatgagccaccatgccgagccccctcttcttctctgtcaacctctttgtcccctcttcttctctatccatctctgtatctgtcccctcttcccctctgtccacttatctgtcccctcttcctctgtccacctctgcatctgtcccctccttctctctgtccacctctctgtcaccctctccctctgtccatttctttatctgtccccttttcctctctgtccacttctctttttccctccctccattctgctctcctatttctgttccctcttcctctgtgttcacccaggtatcagtacccctccccttctgtccacctttacatctgtcccctcttcctctctgtccacctctgtatttggcccccctccccttctgtctgcctctttatctgtctcctcttcctctgtgtccacatctctgtctgcccctctttttctccacctctgtgtcggccccctcctggtctgtccacttttttatctgtcctctctttctgtcttcacctctgtgtctttttacatttttatttttttatcattattattattttttgagatggagtctcgctctgtcacccaggctggagtacagtggtacgatctcagctcactgcaacctctgcctcctgggttcaagtgattctcctgcctcagcctcccacatagctaggactacaggcatgcaccaccacgcccagctaatttttgtatttttagtagagacagggtttcaccatgttggccaggatggtctcgatctcttgacctcatgatccatctgcctcggcctcccaaagtgttgtgattacaggcgtgagccaccacgcctggctgtctgtttttgtttttatatctgtagtaattttcaaacataaatgtagagagaatattctagtgaatcctatgtaccattttgccaacttttcttcatcttttctctcccaactttttctttgttgctgtattattttaaagcaaatctcagacatcatgtcatttcagctctaaatacttaggactacatctcttaactcataaggacattcagttttcaaggtaaccactggaccattttcatggctaatgaagttaacaataatatcttgtgggtttttttttgttttgttttgttttgttttttgtttttttttgttttgtttttgagacggagtctctctctgttgcccaggctggagtgcaatggcgtgatgtcgcttcactgcaacctccacttcctgggttcaagccattctcctgcctcagcccccaagtagctggaattacaggagcacactaagttttgtatttttagtagagtcggggttttaccatgttggccaggctggtcttgatctcctgacctcaggtgatctacctaccttggcctttcaaagggctaggattataggcatgagccactgtacccggccaacaatgatatcttaataccatccaatacttgagttcataatcagattttcccattatcttgaaactctgttgtccctctcttgcctctctctctctgcctctttctgtgcttggtacctttgattccctgtctctgccctgtcccccgatatcctgtctatgcttctcttggatttgggggctctaggcccacccccctctcttcccacatccttctccagcatggggatctagtgggtggagagaagtatgtctgtgagcaagaggagacccctgtcctcgaggagatcccaggctggtggagcaggagagtagagcagggcctgccttagtgggaaggctggagggtgggggtgacttgtctgtatactcttgtcagggggtccttggaggaggcagggccttgggtgctaggtgggcccctacaccttcctgcttcccccgccttttctccccaggaggacacacgggctcagcggcagcggctgcagaagcaactgactgagcatctgcgccaaagctggggcctgcttggggcccccatacaagcccgggacctgggagaactgctgcaggcctggggtgctggggccaagactggtgctcctaagggctcccgcttcacgcactcagagaagttcaccttccatctggtgggtgcgcctgaggacatgagatgtgtggatgggcgtggcaggcttggagggtggctttttgtgtcagcaccacacctttatccacacaggttcctgtgttcccactggacaggccctcgccccactgtgggatgggtacccagaggggtcccctagcttattagggacttgactggagaaaatgtggataggtgggaaccatgcaaaggtgtgggggtgttcttggggcaacaccccctttcctcaggcagtttcctttgagcatatcttctgtcctaagatgttcactctgagggccccccatccttctcatgggcatttgaggcttgagagatggggcaggtgggtaggagctgtgacagggtcagggagatttctccacgagcaagcactctggcccgaggttgcagatggtgcctttacccacatagtcacagtctggccaccatcggtgcttcagtgggcatgcatgccgcactgggggcagttctcaggggaggctgaggctgggccacgtgaggaagggccttccctggcagccaggatgcccctcgtcactccccttaggagccccaggcccaggccactcaggtgtcagatgtgccagccacctcccggcggcctgaacaggtgagcagagtggtttggaggggggtgtcccaggcccttgcttgtctactgggcctgacaccccaaccctgactggcctgggcctcccaggtcacgtgggcagctcaggaacaggagctcgagtcccttcgggagcagctggaaggagtgaaccgcagcattgaggaggttgaggccgacatgaagaccctgggcgtcagctttgtgcaggtaaggggcggaggaggggctgcgcgttgggctaggtcagaaggagggcctcggggtgtgagggactagatggggcaagaggtgctctgtagaggtctgcacatggcagaagggttcctgggagccattagggatctgtgggcctcttgagggtggctatgagaatcaggccagggtgagggtctgtgggcatctatggggcaccgcgggtctgcatgggcaggggattgaggggtcctcggagggtctgtgggcatctgtggggtacccacgggtctgcatggacaggggattagggggtcctcggggtccttggcaccagcgtggagctgttagagaggcctgtgggggccacaggggtgtacagtcatctgtggagctccatgggggctgtggcatgtgactgggtatccaccggccaggcagagtctgagtgccggcacagcaagctcagtacagcagagcgtgagcaggccctgcgcctgaagagccgcgcggtggagctgctgcccgatgggactgccaaccttgccaagctgcaggtggggttggggctgtagctgggcggagaggggcagggtggggtggggtggggttggagggcccagcctgtgtgacatgtacccatcccccaccagcttgtggtggagaatagtgcccagcgggtcatccacttggcgggtcagtgggagaagcaccgggtcccactcctcgctgagtaccgccacctccgaaagctgcaggattgcagagaggtaagcagtggggccctgggctgtgggcgggccagggcaggctcggtccctctctagggggccatccctatgctctgctcactgtcttctgcctgtgggctcatggcagctggaatcttctcgacggctggcagagatccaagaactgcaccagagtgtccgggcggctgctgaagaggcccgcaggaaggaggaggtctataagcagctggtaaggcctgtgtgagggacctgggtagcttaggagggtggggggatggtcctggggcagtgcctgctatatccctgcctagatgtcagagctggagactctgcccagagatgtgtcccggctggcctacacccagcgcatcctggagatcgtgggcaacatccggaagcagaaggaagagatcaccaaggtacactgccagggccatggagggtgggtcatgtgggctgtcaggcatagtgtggccgcacagggacctcacaccctcaggcagagctgtccagtcacactctaacacagaatagtcacacacaatccatcccagtcacccctgacacagtgacacagtccctgtctggtacacatgaggaccctccactgctagccagcctgccccaggcaggggctcatggctgccatggtgtctgccagatcttgtctgatacgaaggagcttcagaaggaaatcaactccctatctgggaagctggaccggacgtttgcggtgactgatgagcttgtgttcaaggtgtggggcaggttgggcgggggtgagtggggtgaggctgggctgctgccttgtgcatctgctaattggctggctggggtccagacccaggccctgtgcgaggctggaggtgcactgatacccagggctggctttgtttcatggaggatgaagctagtggggtggtgggagagggtggccttcttagggcatggagatggtcaagggcagcccactgatacctttgaggtccctgtgtctggtcaggatgccaagaaggacgatgctgttcggaaggcctataagtatctagctgctctgcacgaggtgaggggagacatgtgcctggggtggggctgctgggggtgggtgggactgggtgcaagccttctgctcctgttgtccccagaactgcagccagctcatccagaccatcgaggacacaggcaccatcatgcgggaggttcgagacctcgaggagcaggtgaggcctgggggcaggatggggagccaaggcgggccggggggacagttcctcaggttatgctgacagaggctgtggagccacacacagccgatggctggacacccagccctgccccttagtgcctgtgacctgggacaggcaagtggcctactgtgagccccagcttccaccccaagggccctcctgtctgcctcccagggccatgggcagaggcttcagcttaaagatgtagggggaatcctgccacatggcgaaggatgctttgggtagagggaacaccacacgaggcctggccatgggacagagcaggctgttggagttggtgggaggggcccagagtggctgtgatgggggctggtgagcaggagctgggaaaggggctgtgtgtgctgagggggcatgtgttcacattgcctcagatcgagacagagctgggcaagaagaccctcagcaacctggagaagatccgggaggactaccgagccctccgccaggagaacgctggcctcctaggccgggtccgggaggcctgaggagccgccggcagaggtctctccccagcctcaggcagggatttggggtgctggaggcagtggccaagcacatgccctagctacttcctccgctgtccagttcctcctgctgcggccttggacccagacccctgcccactgaccgcaacccttatatggggtgatagtccagcatgtggggagctcggctgcagtttattggggacggtactgtgggttgggggccttggatcccaaataaatgagtagttcctctgcagtctaagctgaggcatggatcagggctcagggaatgggagtgaggtgagtggcaggggagacacggggtatttttggcaaggcagtgtgtgtggctgtgtgtgtctgcacgggactcaagagacccactggggggctgtgcgtgtgcatatgcgtgagatacacaggtgaattctaacaggccgtgtgtgtgagcgagcacgtgttgggacctcagatcctgagggtactgacgctgcttctgtgtaggcctctgggcacacccctgtgttgacagtgcccctgtgggccctgaggctggctgtgggtgcgtgccttggggtgtgtgggttgtcagggctgtgcttgtgtgtgattgtgtgatgatgcagctttgaggttgtttgagtgtactgaggcaggctctctgtgttttggggtttgtgttgagtgagggacaggattgtgacattttgtgtgtctgtgtgacttttccagccctgaagtaatctgtgcgagcagctgaggcaggctctgtgtggctggttgtgaaggctctgtttggctgcagggctcgactggggggtgtgtctggggcggaggtgggggctggggccaggaccggggcccctctgagcagccttggggcaaaggatatgatgggggagggggtggctgccagcgggggaacaggggccctggcaggcaagacagtggaaacctcacttcttggtccctgtgggcacatccagggcctatcatccctgcccccaccacctctgcctcccaccagtttggcccctgttcgtccatcctcctttccttgatcttgaggtcaggggccaggtgtagggttggaacacctgctgggcctctggctccgtttcttgcggaactccagctcatccacggtccacacagcccccttctcgctctccacccgcacaaagcacttgtgcagactcaggttgtggcggatggcgttctgtggaaggccggggacagggagcaggtgggcgtcaacctctgaggccagcagccaccaccaacaacccacatcccgttcctccccaatgtgcctatgagcccagacccaggcctgcccactttgagctgcgatggcacttgaggccatcccagtcaccgccacctcagaggagctcaccttccaggtggcaggatggtttctgaagaaggcaaacatgcgtgtgaaccagtggtagatctcattgagtgtccgctgcttctctggagcctccaggatggcctggaagttggggggtggggtaaggggcacattccccaaacttggggtttagaggggctatgacctaccccgagccatctgacatgggggcggaattgtaggggcaggtaatcagggacaggactagatgtggggtgaagcatggggtcaaagatggggttagaaaaggggtgaagtgtcgggttgggcagggttagatgggtgtgggtatggttgttctgggattaggtaagggatcaggactgaggttgggagtggggtcttgttcagggctagggctgaagtgaggtgaaaggtctgggatggagttggagttggggttctctgtggaggtgacatttcagggttggggaaggtgaagggtcagaagtggggtcaaggatttggaaggggtaaagggccaggccaacttaagggtcagggaaggggtgggttaagagtcaggctggggtggactcaggtggggggtctaggggtgagggatgggatgacttggctttaggtcagaagccagagatggtttgaattatcgagtatcttacgtgtcagggacatggttaggtggttaggctcagggcaaggatgaggttagttgtggggttcggtgtggagtgaggctgagggtcagggaatttgatcagtttggattcaggaatgggattacagagtcagcgatgatgattgcagtgaggctatcagtcaggatggggctaggtcagggtttcagttcagagacagtcggggaatatctggtatcatgtaggggtgaggttcaggtttggggttaggtgtggcgctaggatgaaggttctgagaaggcattggggaggctgagatgaaggagttgggatggggtgatgaagttaaggatcaaatgggtgttacaaggaaaggttgggaatggtgcccagttgggggtgtattgacatactggggtacgttggggccagggaaggagatggggttgggttggcataaaggctggggaaggagttagagtaagagctggggtacgtttagggcaaggtgcagagatggggttagctttaggctattttatgggtccaggagagggttaggtatggggctgaggtggacatctggaaaggggtaggtttagggtcagaatttggcatgctctggcctggatggtggtttaggtttggatttgcggacaggtttggggtgaagccagcatgaggggtcacatttgaggcacggcttggggatccttggggctggggcttgggaatggaggaacccactctgagggcactcagagggagacaggagtttgggaggcaggtcccccaccccatctttgtcttcctcctccttggggccgagctgccctgcttacccagcggatgagcgtggcgtaggtgaaagggggtcgcatgttgtggaacttgaagtagtccatgttgtggaggaactctgtcagagggtggggatgaatcaagccccatgcaggacctcctagctagctccctgtcccctccccctacaaggtgagtctacaggcctgagatctcaccgtcaacacccgtgtccacgggcacaggtactgtttgctgagcacctgacataagttgtatcatttattctttgcaccacttctgccaaaatagttctccccgaggttgaaaagaagcggagtaacttgcacaccaaaggatgcaagaggttaaatggcagagccaggatgacagtcaaggtctctgatccctgctaagcccacaggccaggcctggtggagagcagtggataggtgagctcgggcgaatccaccccgattttccttggtcaggggaggaaaggaggtgctcctggaattacttagcagggtccctcccttctgatggccgaatatagtagctggagtccagagtgggtgaggcatggccccaatccccaagggagtcagggctaggggcccgacactcgagaccatatggggggctttcaggccacggacatcccgaaaggaagcttttgtgagcggatgcattttcccaaaggctgagtggcggcagctgcagtggtggtggtggtgggaaggggcagcatggagctcctttgcaccctccacccagagcctgtcaggattaggagcttgggggcaccgtgtagtgcaaggaccattcttacctgggaatgtgctgtttccatggctaccccacaggtgcctccggacagcaaacaggctgtcaggggcctcccgggggccagaccaggctgggacgacagggccttggctgccagcagctacgatgcagcaggagcccttgtcggatgatgcctgggtgagggggagaggctggtgacccagaggcttaaacttcccactttttactttctattttatgttttttattttttttgatactgagtcttgctctgtcgcccaggctggagtgcagtggtgcaatctcggctcactgcaacccccacctcccagattcaagcaagtcttctgcctcagcctcccgagtagctgggactacaggtgcccgtcactacgcccagctaatttttgtatttttggtagagatggggtttcaccatgttagccaggctggtctcgaactcctgacctcatgtgatccacccgcttcagcctcccaaagtgctgggattacaggcatgagccactgcgcctggctccactttatttttaaatcagtgtttttcaaagcaaggacgccctcttctaaattccagtctgaggtggaatcccacaaaacagcatgagccgtatttattagagcacaggtgcggatgtcgtatgtggccactgatgctgggaccatgaactggggttgaatagggctctttaccacccaactgtgaccttgggaaagtcacctaaacccccctggcctcaatattcctcatctgtacattcgcatcatgagaaataaattaccaccagcaaagcgctcagaaacagtgcctggcctccagggctggcttcatgggcgtgtgacctatgtggttatgtggcaccctgtgctttgtttaatgctctgtggtcgccatcttgaaatctgaacaaggggccctgcaggttacatagctggtcctgctggcacacagcctgcatctggcaagtctggctatttgcatttgctttaacaactcaggatcacagtgtttggggatcttagagtcagagggttttttttttttttttttcttgagacggagtcttgatctgtcgcctaggctggagtgcagtggtatgatctcagctcactgcaaactccgcctcccaggttcaagcaattctctgcctcagcctcccaagtagttgggactacagacacctgccaccacgcctggctaattttttgtacttttagtagacacagggtttcaccatcttggcgaggctggtcttgaactcctgacctcgtgatccacccgcctcggcctcccaaagtgctgggattacaggcgtgagccaccacgcccagccggggtcagagggtttgtaagtagaaggggacagatttccaggtctgggcatgtttggagctggggacaggggcccctagctctcaggacctgaatgtgaggttaggttccctgcaccgtgcagacctcctccctgccccccagcagtctgagtctgccaccaccagtcctggggtcgctcaccacagatgaagccttggtcagtgccattttcccagccaggtgggcctgcatggcactcagcttctccttctccagcaccagctgtgaaatggcacaaacatgaggcctcagcctggcccttctctgccacatctttgcccaggctacggtcttccctgggagtgcccgctcctcttccttcctttataccagccctcgtcccaggtgaacttggtttctggcacatggtggacagaaggttttgcgcactatccctatcccttaccctccaccgccctggcattacctgctgctccagagactgtaccatctctctctggaggagacattgtgccctgcccttctcatccagaagatggtccgcctggcagtgcctaagtagggagaagattccatgcaggtgaccacgacaggcctggtctggctcaatgctctgaatggggagggcccagaccctctgggagttctctcctctgagccccagctcccctcccctctctacctcagtctccctctcacacccctcgttcccttaacacatgcccctcagcacctactgcatgtcaggcctgaactcaccacttgagcctggccagagtgctggagataatgttggaagtgtggtgagttgagaatgggccagggaggtgagagtgggcaaagcattctgggtggagggacggcctgtgcaaaggcctggctgcaaggaggacaggacatgtggggttgctgctaagggttgtgtgtagtgtggtgtgtatttgtgtgtgtgtgtgtgtgagagagagagaaagagagagagagagagagagagagagagagagagagagagagagagagagacatatggggggactgaggggaggcagcagcagccatctagaggagctagaactttgggaacagtggaataaggctggcatgttggcatgaggagtagcagggcaaagcaggagtgcagattctagagcctggctacatgggttcaaatcccagctctgtcactcaggaactgggagattttgatcaagacacttaacctctttggcctcagtctccttgtctgtaaaatgggggtaaataacagcacaaacgtttcttattatacatacgagaaaactgaggtcgagagaagctaagtaatttgtccaaggtcacacagccagtcagggatggagctgggatttgaacccacagtctcagagtttagctcttgcatcttactacttattgggatgaagcctgagctgagatctgcaccctagacctctccccacaagccagggccggtagactggcacaggcctgggccactcacttgaggaagtcctctggctcttcgaagaccttctcacatccgggccacttgcagacaccatttgccagcagtgggtaggagctctggggcacagccgaaagggtgctggggggacagagggtgtcaggggaggggataggagggcgaggatccttcccagccctgtccactgacctgtccttcctgggtgcactgggatttgggaaggtgcagagcagtgccggctccctggacacccattccaggctggccacgttgatccctgtgggtggggacagggcacctatggaggctgtgggctgggctctggagcttggcccacaaggcctctcattttgagcttcccaccctcctgagcctcgaaaaccctgactcccagggggctctgctgtccccaaagtcccaggcttctggcagagaagcttaaagacggccattcgcaggtgctgacattttgactagctttgtaaagctctgtggttttgtgattttgacattctgcatctttaaggttctgcacctgacgttttttggagggtggagtttccaagcctctgagacctgacacctttgacccccagagtactgcaattcagaatagcctacactgctcacagccaaggatctggggacttgggggttctgtgaagccatggggtacgggctgaggtgttaccaggtgggaggccaggccgggccttgagggagaagaccccagtggcggtggtgggtggtgtgaggctgatcatggctgggctctccagggggtgcacctgcagcacaggggtccgggcgtgggcatccaccgttgagagctggggggcacatgtgggctgtggttcagcctgactcggggcccctccccacagttctcccacctgctccctcctccctgcccattcaccgtccatacctggtgcatgaaatgtggcctgtcctggaggagtgcctgtaagtggggcaaggggcccagccgtgccccggagggtgccaccatgactaggggcagtgtgggcagctgggcagaaaggcaggtgggtgagaggccatcctgatcctcactgttctgtgtctaattcaaatactctgcactgcaagcccacatggtagatgctatgatcatcccccttttacacgtatggaaactgaggctcatggagatcgagtaactttttaaagatcaaacagctaataagttgcagagctggcctcagccctgtcacctcacctacttggccccagtcctcttctcttgtcacatggggatggggacacatagctatgctcatgggactacaatacggcctcctcctctcctgagacagggattgggaggtcggggagagcctccaatctctgaggcctggcaggtggggattttcttggccctgcaacatctgcataagtcacagacttgcctgggacccagaaaccacttcctgtgccccagccagcccccctcccgcccagtgccacagtaaaggtcggcacctgtaggtccaggtaccccaccctgcctgccccatcctgggcccagggcctcacctgcagctgcgatggtggcatggggttcaaggaagaagaggaggcatgggccccgcctcgaagatctcggccctggaaggttccccctgggccccgggcccccagcaggtctgaggctttgggtgcagccctccagctgggcgaggctcctggggatgggccaagggccaaggaaggggccgagggcttgccaggcctggggttgggcatcgggtccttgtccaagggcaggctgcgtagacaataggggaaaggagtcacacgtgtgctagggcggtatgagatactcgaccacctgagccacgtggacactcctctggtcaaagcaggcattggctgggacatgtcccgaggggccccatagttgcaccccagctctagacacacacacacacacacacacacacacacaccaagaacacaggtacatgtacatacccacacatgccccacgtgcagaggtccagcacctggcttgcctgcccacgctagcacagccctggtgtggatgtgtcctctatgagggcaatggttgtttccccctccacttgagagctgtttcaagcctcaggcctctagccctccctgcaccctgcacaggctgtgtttgctcatcttgccggagctggtctcggactttctcctcggagtcctattttgccccagtgactaggcatggactcaaaagattcatctggctgctgtgagtggggctagtgaggaggctattgtaacagtcctggcaagtgatgatgctggcacagaatgggctggtggcagtggagaaggcgagaagtgggtagattctgagacttaatctgaagctggatcaggagcagtgctagcagcttggatgtagtgggcaagagggagagtcaaagtgacatgggttttagcttgagcagctggaaggaccgagctgacattacctgagatgggggacatggcggggagttggattgggtgcaaaagtgcaggtgtagatagacatgaagagtctggcattaaatatgtgagtggaggagctgagggggcagctgaatacgggggtctggatctcagggcaaggaggcgagtccaggagtgtgatcatgcacggatccagcatggcaagtgacagagaggaggagagatggggtctcttgagctggggcctgtagaagcttctctacccagcccccatcagagttcaccccaatttctggccctcaagcctggctcatgctacaccccctgcctcaaatgcccactccttctcctctttccctgtccaagccacgcaagacctgctcttctattgtcctcaccttgaaagccctccacaatggctccgggccccctgctgagccccagaaccttccactccctgagggaagcactggcttttcaggatcctataatcctggtctgagaggaagccagagctggaagggactgcccagccaaccccattatacagaaggggatgctcagatgccgagttccgtagtcccatagtgacttgagaactccacttctttctttaggaagtgtttccgtgtgcacattttataaactctctggtgtgtgtgtgtgtgtgtctccatctccccgttccacctcacagcactgagttgggcacacagctgctgagagcagcccgggggagtatagaagggttctgggggagcagttgctccttcctttctttgctgtcacctcctgggggtggttgtcagagctgtggtgctgagggagatgagtgtgagaatccaggtattaagttcttagtctcctgggggcttagaacattactgcgtgagaaacaggagtgtgggtctgtggaggctccgaacaagggcctgggagagcactggtgagatgagaaggtgagtgaatgaatgaagccagagatggggtgatgctccttcaagccaagaaataacaaagattgccagcaaccaccagaagctgggggagaggcctggagcagcttctcccttatggcccccagaaggaaccaaccctggcaacaccttgatcttggactctggcctccagaactgtgagatgatcaatttctgttgctgaagccactcagttgtggtactttgttatagcagccagaacaaactaataccgatttcggtgcaaatggatgttttccaccactctggcctggcccatgtggctggcctgtggtcacttctgaagctgcctggacacttggccagagctaagaattctccccaaacacatgtgggatggcctgactcagcaaagcatagatacattctcagacagggacatggagatgatctgtctgggggtagaggacctagagggccgggctgggcagccggcttcctgcactgtctgttgggacgtccctttctgactgggtttctcagaagctgaatgggggatgtttctgggacacagattatgttttcatatcggggtctgcatctgggccctgttgtcacagcccccgacttgcccagatttttccgccattgacgtcatggcggccggatgcgccgggcttcatcgacaccacggaggaagagaagagggcagataccccaccccacaggtttcgttccgagaactggctgccctgtcctgcagcaggcttggcccaggtggggtgacatgggtgctggtggatgtggtaggtgatgtccatctggccactatgacaagcccctagctctgaagacctggcccttcttgggttgtggagaggacccaggtttgaagctctgagagtgccaggcaggctccacagatactgggacccctggggtcttcaaatagtataacaccaggacctcagaatcatagaacagcatttcttagatttaaaggatcctagaatctcaaaaccacagactgtggggtctacggtcccaaagtctcagtatgtgtaggccagtgtccctggtgtccaaactccttggaaccatctgaaagtcaggcagcttgctgcttcatagggcctcttgcctaccaggcctggaaacagagccagcctccctagggcctcagtctccctgtccactctggaacaacgttcccaaatacatggccactccgccagagatggcaacagggggaggaggaggttgaggctggtgtgcctttggtctgggcctcatggggggagctggaaaagcctcagccttcgccaatacagagcccatcatcagactctctagaggggccccacaatcaaggttttcggggaccagcaccagctctggggacacacagcctgactgactgacatgcctccatcatcaccacgctctggccaactaggcctcctgacctatggagtccggggcctcacctagcccagctcttgtgaggctgggccccacactgtgatcgtggatcgtccaacctgtgggaagttggggtccaacgtgtgagaaggcagaagggggaatggtagcccaggttccccttcccccttctgggtgctgaggggtaaactgaggccttcagttggggagagagccagaaccagggtcccacctagagtcctgagatctaggcttggatttcaactctgccgctgcatttcggtgaggccctgagatctctggtcttcaatttgcccttctacactgagcacggagaggcgtggagtagacaagggccagggcccttctacgctgtctggttaagtcattaggtgtctgcagggcttcaagttgacaattgcccctctatccaggggactggctgagagatagggatacatagagacaaagagacacacacaaagagcgagcaagagagaacaagagatagtgagagacattgagagaaatggacacatgcatggagagccagagtgcatgtgtgcgagaggaggattgcctcaaataagaacatttgctggtctctggctggttcaactgatgctgcctgaaataatcaagaataaagaagggcaaggtgccagggacacccatggctgggtattgaattgtattgcaaagcaacaatcagcaaaacagtgtggccctggtataagaacagatactggggaagagaacagaatagaaagcttggacatggacccacatatggagagaactgaatttgtgatgaatgtggcatttcaaactggaggaccatggagtatggtttaacaaatgtgtctgagataattagggagaagataaagttattgagtgaatagtcagtccattatcccaacaacccctccctgcccagtttgaaatgtcaccatcatcatataccctaaaatgcccagatccattcaagatataagttttaacacctaatgctgatcttgggtttattgtgtgtcaggccttgtgctaagtatttactgtggttaaaaattttaatctaaacaaagactcctgaggaaggtactattataaccattgcagtacatatgaggaaatggaggtatggagaggttaagtgcctggctaaaaatcacacatagggcttggggtgacgctgggtttgtcccagacagtctggctccagtacccacactcttaacctctatagtaaatggaaaaaatgaagccataaaagagactagaagccaacataggtgaacatttatctcattttcaagtaggaaaggactttctaagcacaaaaccagagacagaagccacagaaaaaaagactaacctatttgactgtataaaaccatcataagcatcacaaaaaacaccataaacaaatagaaaaaaagcaaatgatgaattggggaaaatatttgctatatatgtaatggctgatgaaaggttaataaccattccaaataaagagctgtggcaaatcaataagggaaaaataagatgaacaccctattaggagtaaggacatgaccagacaaccaaaaaaaaaaaaaaaaaaaagcatgaatggccaatgaatagtaaaagtaatcacaagatgcaaatttcaacaatgtgataatgtgtttttcttacctgtcatgttgggaaataattaaaacataataatactcacctagggttagcttaagtagagggagcataaaataggacaaccttttggaaggagaattagcagagagggtcataaactttaaaaatgcacgccccctttgccccagcaactcccttttcaggaatccaaggaagcagtcagggatgtttatagaaaaaaacgagaaacaaccggaatgtccaacaatcggcacttggtcaaatcaatcaaagttcatgctgatgtgaggacagtcttgtccatcatgaaagatcatgtgttcaaacaatttttagtaagcttcaaaaacactactgttaattgaataaagcaggaacaaaaccaatatatagcatgattctaatttggttacagaaatactaatagctaacacttcgtgagcacttactttgtgccaaacgctgtgctaagcctgcagaatcgagctcaccccagccctgaacaacctgtttgcttcctgaatatggactctggtcacacacatgcagtcctggggtaggtccacacagctaaactacggttgacaatggtgtgaagtgctccctgcccccccgccccaagggtctcctctaaagcgatacaagcaaagttcagttaagtgctcagcttgccccggcaccttgcaatcctcctgctactagggtgaacagaactgatgctcactctcataaaatgtaaaggtcctcggcgacattactattattaaacgccagctgtgtacaaagctctaggctggatgctggctgggaaggcaggtgggggaaggcaagaaaagagagcgggagagatggaggaaaggagatcgatggagtgtggtcaagatggaggagacagagataggggagatggtcagaggccaggagagatgcggggaaagagagtctgagtgtagcgacagacagatggcgggagaaagagaggcagagaaacatgtaaaagagcaagacagggtgagcagagagacagagaaggatgagaggcatcaagagctaagagacaaagagatgagagagatgcagttgaaattttcagttgcacctggacagcatttcaagttgttcaaagctctgaaatccataaagactggcagctgacatattttaaaaatcctatccatctacgtatcaattgatgaattcatttatttttgcccctgcccatgcattaagtacttcacctttaagtcttctgccatttattctattattatttttttaaagaccttacctggctggaatcacggtagctgggtacatcccactgtaccagagggcccctgacccccccgccgtgcctacctccctgccatctcctccaatggggcccacatctggtaggggagagcagggacactcaccttggtgaagtggactgacagaaaaggatcagcctggcttgtgggaaactgtcacgtatcaaaaacaactttgcttttataccgagaagaaaaaccacgctgtacggtgtggaagccgcagacctctctcttctaataatccaaatttttttcgatgagtgtgtgcgctgataatcacggggtgggggggggttctcatagttttttttttctctctctctgtgtttctccttttcttgattatgagacttaaacggaaattttgaaattttgggtttttttctttgccctttacgagtcatctgaaaatatgatttcttcccctcaccacagaggtgagaggtatcaatgagataatagggctcatgagaaaccacagtttttaaaacaaaagtgtatagagtttgaaaaaaaaaaaacaagggaaaagaactaaaataaatcacagggccaacccgaggcaggcagagacaccattctgtgagtgagaggatatttgagggtctctggggaaagaaagagaatctgaagctctatgtgtggatgggaaatgccagggaaagagacagaatagggctgggttcccagaggcctcgccctactccaggcctcagtttccctatagatggaattgatatggtccccattgcttgaactacccggcgaggggagttctgcaccccctgcaacacccctcccacagagggtgaggggcatgtaagttacttcatggaggagaaagcggagagcccactgtcatcccctaaaattcatggacttgaagagtcggagaatccctggctcccagaatctactgacagttactgaatgaggaaagagagaaaagtctcgcctcatcacgttttagggcttgagtgccctgacccagccactgtcccactgggaaggtccctagcaggtccccaatattaatgcatccatcctcacgatgaaccccagaggcccattgggaccctgaccctcttgtttcaggaacatcatggcctgatgcttctgaggccctcagcctttggggtcttttacttcaaaaagccccagtttccaaggatttaggattccaaatatccgccatcatctcagtagctgatgtttatcttgaattttccatgggtcagatacagtgctgaacatgtctcacaagtgatcatgttcaatcctcaccatggccccttgagctccatctcatcattattgtattcctgttatacagatgagggaaacggaggtataagtagtcaagcaacttgcccaagatcacagagctggcgagtgtgggtcccgctttctttggtgctgggctttgaaatccccaagctttcctgaacttgatgttctcaggttttaaattctaggatgtgatggcagggagatcctgggatttggagagtccttggagacttgaagcttgtgaggcttttaggttgtccaggaattggcggctgcatctcttgacctcagcaggcactctattcaaccactggtcagcatggtagaccagcccccaggggcttctcctgacaggccatggtgaagacttccagctcccagcaccctgcaaagcccagggttctagtcgtccaacaaccactccagccctctacaagactggcttcagacctggggaagagaaattggaaagggctttttatttacatggtacaaatctggtggccaagatccaccccttcacccctttgccccctttcctcccccaaccttctaagccctcgtaaaaaggagggcctctttcctcaactcagactcacccttctggaaaagcccagaatgggcctgatggcctggctttgtgaagacaagaaaaaaaaaaaaaaagaatagaaaaaaaaagaccttaaaaaaatcagccaacaacaattaaaaaaaaaaaaaaaacacccaaccctccccaccattagttcaaaacaaaactttcgctggttgaggcttctgagttggtgggacacatctgagacccaaaaatggcttgggtgtgttggacagccaggggaggcaccaaggtgggatgaggtcccctgcttggaggcctgcagggaccctgtgaacagcaggtgtttaacagatgtcacggcatgtgggagggagcaagggagggggtgaggagcatgcatgtcaggaaggagtcctggggagctgattctagtgatggccccaaggttaatgaccccttgcagtgatggtcctaaggttaatgatcccttgcactgatgttcccatagttaataaccccttgctccctgcagacttgggtcggaatgttccctacacctcctgcgtaattataaaccaggccagttctatcagcagaggcattgttccctgccccagcacctgtccccctcctggaaaagggggctagttttctctctcaggatcagaggtgtgggctgcattctccttataccttccccagaccatctgtcccttactgtcactcactccatgaaagagagtggccagagatataggaggcaaacgaagtgaggatggtggccgagaatgtgagctggccccttgggcaggcccagggtgtgagagggaaatgctacggctgctgaaagccaagatccttgcagaatgggggctggggtcaggagggcagagaggggtagaggtcgctacctcccctctatactggactatatcctctctcatggagggcttctcgggaaggagactgggagggctgggagttgggggtgagtaggcaagattaaacgggtcaggaaaagtccccagagacaggggcctctgacaaagacttgaaggagatgagggagggagccagctagatatctgaggaactccaaaggaaacagccagggcaaaggtcctgaggtgggaatgtacctgatttgttcaaggtctacaagggggctggtgtggttagtgtggagagagcaagaagagaagctggaggtgaggtcagaaaggggactcggaggttagaccacgcaggaccttgtaggccatggtaaggactttggcttcaacgctgagtgaggaggaaggcatgacagggttgcaagcagaggagaaacacaaaccgtgttaggatttaacaggaagcccctgaatgctgagtgtacaatggggtctagggcctgaatgtggaagcaggggaccagcaaggagctggctactgcagtagtctaggtgactggtgatagtgctggcagtggaggtggtgagaagaggatggatttggtaaatatttttaatagacagccaaaaggatttgttgaagactgagagtcttggagccagatcgggacagacaatgcccaaaccaggtgggcaggaaggagtccctggactatttgccagcttgaacttttaggtgagaaaaaaataaagttctgtcttgcttaagcccccattattttatgatttttctgttacttgcagctgaacatattcatttctaactcatggacatcctgaacatggagacctggggagaggggctgctggaaggatcacctccctcctaggatgctgtgaggttctaatgagataacagcatgctcagaacctggcactcagtaggtgttcagtaaatcttcccaggatggagaaggaatgtatgaatggatgtgttcagcggacaaaagctgcagttgagttcccacagaaggtgagaccccaaagggagagcgaaaggagtttactagatggaagcagcagaaggaacagcactcttgggagagggaacagtagaagcagagatggggggacagaaagaagggaggtgaggcccctgtggggtgtggagtgtcaggttgggcaagaaggacagggctttgattgtgattccattagtcagaagctacccatatgcccaatcaacttctggtagcacacagtcaggtcagtgtttgctgagctgaaatttaaaaaagtgaatccttcagaaagttaaatttcctattcggccattcattcaacaatagtatcaagtcctggagagtgcttgcggctaacaatcaggggcattcttggcttgtggcactgctcaagaaaaggttgtagttgggcagggaggacccagtaagtaactaactgcaacaggacagtcattttcactttcctagttcacacaccaaggtgtggtctaggccttcaggggctctgggtattcctggggcaatggggagtcacggagggttagggagagggtaaccccatccctgagaagcacatttttcctaatggctgcctgcgttctatggttctgctgtccggccacccaatacctcagactctgtctacacagcgtcctcctctccagcctccttattggctactcatgcctcccttcacaccacctacactgcccccgtcggctctgcttttttccccatcttgcctccaagtcctccctccgtcccgctgcactatctagcctcggcattggctcatcccatactagtactgtcctttgaggtctctacgccttcaccctggctccctcattggctatccgccagctctcgtcctcgctcccgccttcagcctccacctccattggctcggctccctacacacccgcctcttggtctccttttagccttcgtattggctagctccaccttggcaccaccccttcgaagccgcagtgcacgctcacaagcctccccattggctcgctgcagccattgtcgtcatcccacgcgtggctctccattggctgttctctctctctagctaccgttccaccgcctacgcaacccgcgggatctcccactttttgggcctctgcgttcgttcccggctgccctcatcgcctgtagccattccacttttcccaccgcccacatgcctctctcgctcagacttccgcattagctgtctgcttctgttttcttcatcatggatttcgcaccacccccattccggcctctccattgattcctcgatcatcccgccccctacaccgcccactcccgggcatccccattggctgcgtgcttctccggctctcaattcgctgtacgtcatccgtgcatggctgcccattggccctctgcaatacttgtcttcatctcaccgcctatgcccccgtgagccgtacccctccgcgctggccttcccattggctgcccgccccttcaggccctgcccccgccggtcccgccgccggtgccgtcggtgccgccgccgccgccgatatggcgcgtacggcccctgtggagcccccgctgcggcattccgcgcccccctcgccggccgcgggtgagccccgcacctcggtcgaggcggcggtggccccgcggagggtgctgttcgccgacgaggccttggggctgccgctggcgcagttgcgccgctaccggccgtggggcgggcccggggcgggcaagatggcggcggcggccgggcaagatggcggcggcggcggcggggccgacgaggacgacgatggcgaggatggggatgaaggggaggaggaagaggaggcttgccccgagccctcaccgctgtgccccgtccccgctggcggggggttttacctggtccccacattttcgctgccgcccgcgccgggccgtctggagcgcttggggcgcgtcatggtggagctggaggcgctgctgccgcctcccggagcggtccccgggggtgccggggtgtgggtgcctgggggccgcccgccggtgctgcgcgggttggtacgcgtgctgaaccgctccttcgagaaggcggtgcacgtgcgggcctcacacgacggctgggcttccttttgcgaccacccagcgcgctacgtcccgcgcagcccgccgtgggcaggagcgggaggaacaggagcaggagatcccatcctggatccggggctcggcctgggtcccggccaggcatccgcctcctcgcccgacgacggcggccgcaccgaccgctttgccttccagctgccctttgctgagggcgcgggcgatggggcgcgcctcgacttcgtggtgcgctatgagacccctgagggcactttctgggccaacaaccacggccgcaactacacagtcctgctccggatcgcacccgctcccacacccactgatgccgaagggctgccccagcagcagcagctgccgcagctggagccacagcccgagtgccagggtcccgtggaggctgaggccaggcagctgaagagctgcatgaagccggtgaggcgcaggtaatgtcagccagcgccacctccgccaacgcagggctgtgtctgggatggaggacaagcattccggcccaggaacccctcaggcctgctctccaggacagggaggagggtgcattgagtcagtcagtcaaagagtgatggaggtcaaacacgtgctaggcactgttttaactggggttttattcctccatttattgagttccactgtaaagccctgaacaagacagacatctaccctaccctcaaggattcatacaggctcctatgggagacagtttgaaaaaacaagcaagcaagcagataggataaatagggacaaagttagctgctgaagggagtaaggggatagattgggagggaatgactgtgtcagacatgctgttaaagggagggcctttgaggaggtgagtcccgaatgatgataaagaagagttatgcagatacggtggggaggtgggggagagtttgtaggaaaaggaacagggaggacttttctgaggaggtttcatttaaactaagtcctggatgatgaataacagttatgtgcatatatggaacaagggtgttctaggtagaggaaacagcaagtgcaaagtcctggggtggaaatgagcttggtgtgaatgatcagcagtgtgctggagtggagagaactgcaatgacatagtgtggaccaagggctttgccagtggggggtagagcagattctctttctgacagagcaggaaaccaggattccagaggtggagaaactggttgaggcagtgatggcacctggctcttccagttcacccatgcctgaccttgaagcctgtgcactctactgttaacgctgtaatctacttttgagtcctgtggaggcgaggggctgagcccatgctctcacaagaaagcagtggctctagcagagagacagaaccagatgggtactggacttgaagtttttgtcccttgtttttttgccacaccacctgtgatcatttagggacagggagaaataatcagttataccccagggggccccagaagatttccctaggtttcctctatcaagctatgagttctttaagggcagcagctagtcctgattctttttgcggtcacctaagtctggcccaggatcactagattctccctaaaatgtatacatttccctgttcctgggaggactgggaatggaaatgggaaaatgctttttggaccttgtatgtatacgcttggtcagaagcccctggctgcagtaagacatttgtgggttctgctggttctggtaaggccttaggctgtgagtggttcagaaaggtctagctccggtctggtgggcagatgtgcctgggtaactgagcaggcaggcaggtacccactcacccacctgtgagccccaccataatctgagacttcatttaaagggggcaggcagcatggtttttcttacagcattaagagtgtggattctggcatagattgcctgggttcaaatcctggcgctgccacttactggccttgtgaccttggccaacgcatttaactacaccatgcctcaggaccctcacctgtaaaacagaattatagcatctactttacgggataagagtaaaggtgctcagaaccgagtctggctcaaagtagtatcatacaggtgttagctagtgtcagtatttagggagccacacctacagtttcctggattcctctcctaaattcggctccgcccatcagctgtgtggccttgcctccgtttccttctctgctaagggaaatgacagtcactttgcatggttggattgaatgcagcaaacatgggcaaggtaactgaagcatggtggtaactgcaaaagataactggccagcatttactgatttctgtgctatgaacatcagatccattctctccgtgaggcctgctgtgcatgctgtgttgtgtaggtgctatgattatccccatttagtagaggggagacaggtagctcagagagatgagccagcttgctcaaagcctctcagctagtgagtgacagggccagggaagaaatgctagggacatttatttttttctatttttttttttttaaactggtcctctagaaagcgtggcatgattcagggcaaattctggatttcactcttggtgttcccagcatgtcgtgctttccttttacctttttttttttttttgctttatcgaggtatacctacataaagtgtactgatattctgtgtatagcccagtggatttgtacatatgtatgcacttgtgtagccaccacccagatgaagatactgagcaggtccagtaccccagagctaccttcatttctatcactttcccaagctgtcatccccgccggctgtcatgggaaccctgtctgtaagatgcgacagtttgggtaaaggagtttggtcattttaaagagtgtgaaaggcagagaacagagaaatcaaaaccttgcagggccaaggtgggtggagagggtgtttttcttttaacatacatgggcggttttaaggagaaattgaagcagcctgttcagacaattgttttggtatctggccccaggtctgtggttcctaacatgacttgtgatattattttaagtgggcagatggctttttgatagcttctttatctttcgatctcagctcttgcaaaggggaggttggtgctcattgcaagatcagcgataagggtttctttgtaggtcggtggctttcttggtgagtacatttcaacatattattgttttagaacctgtgtgctgccagtgacttgcagcactgttgaagactagccaccctttgtgacctagccctcttgggaaatggcggaggatctcagggtatatcccttacctgtgggagccctatcagagggcttcctgttgaggaaatgttggctgtaggccctctgtgcactgagcacagccacatcaggtgagggcatgggagaagtccgtggtagccatcaggatagagttcagaaacccaaatggctgctttccctgggttgctggaccaggcatttggtaactctaaagcttagagatgattcatcgacaagcatttattgactgcctactgtgtgctgggcacagtgctaggttccagcagggaaagagatgcagagtggtcctaagatgtcacagggcttgtgggatggagtacagaggatttgttgtatgagacctggctgagcccctgctcttcgccaggcacttcactgagtactatattttcatgcaaggtctggtttaattccgacaacattccctgtgaagtagagggttttaaatttctctttcctggatgagcaaactgaggctcccagagtccaaagtcctagggctggtgtggggaaaagccctcctgatcttccttggcacttgacactaccctttggaagtgtcctattcttcttaaaagtaaagaccaagagagcctcaccatggtcttcaagcaccctcccatcccattccccaatctggcctccactggctcatagtcttaacaccagtggtctttctgagctcctgtcaccatggtctttctgttactccaaagggcctcgctcctttctgctgcagggcctttgcccctgctgtttccttcaccaggaacatttatcccgtaccccttgcagtctcctccagtgttgatccctcagttctaagaggacttccccaggggagcctgtccaccccagtgtcctcgggcccctggctttttcatagcactcatcagcccagcacgtgctaagctttgttagagaatgtcccatggcagagcagatgaacatcgccaccagtcgaggggtcatcggccaccctgcctagcagttctactatatttttttgatccactcgtttctcctctgaagtgactctttcaaatgttctttaccttcagactttctctcctgcttcaaaaaacaaaacagaagccataagaatggaactccctataacttgtggcccccaagtctgcacgctgatttccctcccctgtgttacagatgacgaggagtcccttcttgctcaggccacttctccctcctgtgctctgggtcccagtttctgctacttgctctagaatctgacatcatcagtcaccttttctctcctggcaggttttctgctgccctccttgcttgatcctctattcacctttgcctgtgccagcatcccttctgtctccgctgaccccacgttctctccctcctgcttctggccagcacctcatcaccctccccttcactgctgacccctgcagagttgcctgtacttgccttctgcacttgctcacccccgtaagtgttagcccccggcatctgccagattctgcaggtggttttttagttttcctcttgaagtggttgaccactcctacttaaaacactttgtcttcccttgccttgagaccacactctgctggttttcctcttaactctctggcccttctctttctcctggctcttcccttagcttcatgtatccaaactcggcatctccacttgactgatggcccaaataattcctcaaactcaccttgtcggggactgcattcatcacctctcccacagtgttcccaagcagcctctcactcccctacctccccacttgctcgttttgcttttcagcatccttaagtaagccctgcctgaccctgtagattgggccagggacccttattctagggcattctttccttttctaaaggcactgatcgcagtttgtagttatatctttattagggggttgctggatgactctctgccccgctagactgtaagctccgtgaggggtagggacatggtctgctttcattcaccactgtattcctgcaggcctgccacagtgcctggcacttagcaggtgctcaataaatgtttgttgaaataatgagtttgagtatttttttaatgtcttcctccatactgaattgtaagcttcctagttgggtttgctcaccatggtgtctccaggatccgtcactggggctgatgcacaggaaggcccactgtctttcagtgcacctataactgaagggatggggatccaacctgctatctgagttggcagcctcaggggaaaccagaataactggagttgaacgggacaagtcaggggcatcttagttttctgtagagtgaggaattaatgtgaacgtgatcctcttttatgccacagaaaacttggtagggcattatggttaaggacatgggcctgaggccacgtgctaagaaagtggcagagctgggatctgagcctgtgtggtcctgctctagtgctccagctcttagctactgtaccaggctgggtgatgcattttaccagcagggcaacactgggcaagttgctttcctttcagagcttcagtttccctcaatggaaatttggagggggttactgttaagtgctttataggtacttttcaaatatttctttgatctgctgaacaactcactgatgtaggtattattatcccctccttagagatgaggtaactgaggcacagagaggttaagtaacttgccccaggtcacacagctgataggtggcagagctggaattgttcaaaattgcatatcctaaccctttattgagttgtgaaatcaatttactgggtttcaacaagcattaaaaagaaaaaggaaatagcataagaaatgccagtgtatcaccacatgcagtaaaggtaagtattgtttcactcgaagaacaaccatttttcagttatttatatgtctgtttacacgtgtgggtgtgctgggttatgatgtagaatggatttcttactatgggtcgtggccaaagaatgaagtcatggctgttgaagaagctcatggcacgagaaactgctctccctctaccccactggatcacccgcaagtcccagagttgaggctgacacacttgttggggaaggcaaagcagtgccccacataacttggtggct

SEQ ID NO: 3 - DNA, 39569 bp, Mus musculus
tgtgcttgcccgaactgggtcatgtgctgagccccaaagggaaacacgcacagcccagctcccatggagacaatctgatgatgctgtctggggggggggggggggggcgtggcttcaagatacttggaattctggtcagcttaagtcgtgtgctttgggggggtgaggtgaggaggctgtgacatcatcaagttatgtaggactctgccctgctttctctgagtgtcagcctcaactctaggacttgtgtgcattggagggcagcttaccatgcatgcttcaagcttcatctaactgacactcccgtggccacagcccagggtgagaaaaccatttcacctcataagccagcacattcacgagtaaatacagacacagacacactgagaactgaaacacttgctcttcaaagtaatactcacctctactgcatgtcaaactgcgctgggctatctcctataccatttgccaatgtttgttggaagccagcaaactgatcttgcatctcaataaatgcccagaaaatgcaatgttgaatagtcccagctctaccacaaatcagctgtgacccgggacaaatttcctcatctcttgtgccctagtctcctcatctataaggaagaaatggtagtaatacttcagggagcttttcgatggactgaggaaacatgcaaagcaccaataaagtgcttaaaactaagtcttttggaatagcgctggggctctgaaaaaaggaagcaacttgtccggccattcccagctgtaggccccatccagcagcctagcgctgcagttctcaactggagcactagcagaactacacaggctcacatccctgctctgccactttgctgtgcagcctccagcccacaaccttaaccatgatggcctaccagttgtctgtagaacaaagggacactttctcatgaaatcctctctccagaccacttagatgattcccaccccacccatttcaactctattgttctcatttctgtgaggctgccaatagctacccattcattcagttacaggtatacctaaaacctgtgcatcagggatagtgacaggagacacactggtgagcaaacccagcaatgaaatttagaatttgatgtggagacatttgaaaaaatactcaaactcgttctttcaacaaatatttattgagcacctactaagtgccatgcactaaggcaggcctgtgaaaatacagtggtcaccaatgcagagcatgtccctacccctcacggagcttacagtctagcattgcagtcacccattaatcccctaataaaggccttactacagacggaagccagtgcctttagaaaaggaaggaacatgctagaacactaggccctggcacagactagaatcagcaagggcttaaggatgcttagaaagcaagtgcatgggtatggaataagaggttgtttgggggcactgagtgggagacagccaagcttgagaagactaaggattcagtcaagcagacaccaagtttagtagttgaggctgacagaacaggagaaagggccagagattttgaagaaagcaagtagagggcggtcccaaagccagaggggaccgagtaggagcagttagccctttcaagaagaaaacaacggagcctttcagtgtggccaaagccagggactaataaaactgcagacaaagcaagtgctgttgactcttcaggggagggggacaagggtgatcatcaagtactgaccagaggcaaagggcaaggtggctcagcaattaagagagagaccctggcctgaggctaggtcaacagaggaccaggtgagacagacctggaaaaaaagcctgatgaaagacaaatggggcttatggttgcagcctctggacaaatggcagaaaatgaagctctggagtcaagaacagaaactggcctgaaatgggaacaagggaccccctcctcatgtacaatgtgaggggtgttggtgttcagacgtgggggctctaaggagcaggcattccattcttatggtttctattgtgtttgaagaagcaaaaggcagagtgtaatgataaagaacacttgacgggatcccatgaaagaggagccgagggtggatcaaaggacacacaggacaatggggcaggatggaagatggtccttaacttgggggaaggctcacatgctggcctatgtggcattttccaacttgacttgctgatcagtgctatgaataaaactggggacttaaggaggctaagctgcgcaagcttccttccctaaggaaaccctcttagaactgaggagtctccatgaggagaatctgaggggtaaacacattcttggtgaagcaaacagtatgagcgacaaccccaaagcaggagtaacagaagggatgtggcgacaagagctcgggagcagaaaccaatataaagccagactagatgctaacagaggctgaagcaggcatcggtgagggtgtgtaagggccagccagatttttgttggtctttatttttaagaggaataggatacttcctcagagtataaagccaagacacaccagaagggctccttcccatatcagtccaatcactgaggactcaaaacctctgtgctcacccagaagagggatttaaaggaatctagctcacagaaaacgctgttgagcacaaatgaaactatacaaaaatactcagcaaagtgcccagcaaggaaagggggcttggccacatatcacttggtagggtctcacataacccttgccccctggctctaccccaagctcctgggagtcttaggaccagtctgtgtcttctctgcttgttcctagcactgtgctcagcacataacaggctctaccaaaaatgctgctgatggattctctctaaacctactgagtactgcaaacctggtcctgcaagctagggaaagcagccagctcagcctctggactacatcctcatggctgccaatcatctcttctgaccctacctgccaagggccagctgcacagtgggcctgtggccaacgattctgaagccctctacagcaggcctcccacagataagaaaagggatcccctgaggtccaccaccatttccccagagggctggatcacggggggtagctattcttcaacagcacttcaaatcagcagcagcacacaggccttaaaacaataataagttgaaatgtatttgctaggaaagtcaccgacctacaaagaaaaccttatcgctgatctagcagcgcacaccagcctcccctttgcaagagctgagatcaaaagataaagaagctatcaaaaagccatctgcccacttaaaataacatctcaagtcacgttgggaaccacaaacatggggccagctaccaaaacaattgtctaaatgaactacttcaatttctccttaaaaccacccatgtattttaaaagaaaaacaccctctccacccaccttggcacggcaaggttttgatttgtctgttcccttcctttcacattcttgaaaatgaccaaacttcagtactcaactgtcttatcttccagaaagggctcccacaactgccgatggaataagaagtgattgaaatgcaggcgattctgggggcactggaactgggtggcggctacatacacatacatgtgcaattcttccgagccatgccctcgggggtcagtaccgtccacttgtgtatatctcaataaaacacgaagcacacgtaacaggtacaggggggaaaggaagaactaagagcgccaacagtgaaatgcggactttgtttttaaactagcatccctaacatttcctccctggcctggctatttactagctgagtgactctgagcaagctcgagcacctctccgagccccccaccccaccccatttcccatgaactaggactcaatatagtgcctacagtcaacagcacattcagctgacctcaagaggagaatgtccctaccactcttaacagagattaagaaatgctgcccaccagaccttttacagctacaattatgcctcagttaccttccctacgggtactgcatccaattcaaccacacaatgggaaagccattcctctctgaccaatgaggaaactgagacaagagtacacaacaaagctgagtttgggaaaggatacatggactgtagtgagcatctaagcttcgatgctaattaccagcactatggcactacttggaactaggctcgatcctgagtgcttctgctcatcccgtgaggtctgtgccataacttcctgttttacagatgagggtgtttatctacggcacgatgcagctaagaattggatacggtcacactaaaaagtggcaggcttagggtttgaacccaggtaatcgaatggcagaatctaaatgcttcaaggtccatccacgaagagctaaacctttcacagcctaagcccttaccacaaccagcagatcccacagcaccctgctccatcatgcagcttcgaagggacaaaagggcaacctccccttcccatttctcataggagcaggaaaatgtatgcatttcataggggctctaactgaccccgggcattaggcctagctggagcccttgacaaacgtatagccctggtaaagacctagaaaagcattatatcagtcagtttacaagaggtgtgcaaaaaaaaaaaaaaagaagagcgatgtgaccttcaagtccgcttctcatctgtttccgcctctgccaaggctaatgtttttatgtgagaatagagcctcgctccctaaactccactggaggcctcagactaccagaggaacagtttttaaaaaaaaggatgcatagacttcaaagccagaaatggttgaaactaaaaagccaagtaccaccacttcctcaaccagtttctctaactctggcttcctgctgtggcagataggaatcagactgactccccacgccgggagacccttagtccacaccttcgcacgtcatgttctctccactccagcacactggctgacagtcatacgaaacccagaaccacctcaggactttgctgtccccactatctacatctacctcccctgtatgtgcatcactgctccgtaccactctggactcaagtttaaatgccacctcctcagaaagagtcctacctggtccaaactctaccaactcgctcgtccataactcttcgttatcaccgtctgggactcttcacaagagctcaccctcaacacgtctgcagcagccactccctccagagccttacagtattttcctctcagcactaaccttagccctatttatcttatctgcttgtttgcttttgcattctgtttcccagaggagcctttgcgggatggttggggacagggaaggtgtctgtcttgttcagggccttatagtggaactcaataaatggatgataccccagaatttaaaacagtgcctagcacatgtttggcctgcactactctttgaccgaatgcaccctcctgcctgtcctggagagcaggcctgggggagggggaagtgctgggatgggaggcttctacatccagccctgtgttggtggaggtggcgctggcagacattacctgcgcctcaccggcttcatgcagctcttcagctgcctggcctcagcctccacaggaccctggcactcaggctgtggctccagctgctgcagctgctgctgctggggcagcccttcggcatcagtgggtgtgggagcgggtgcgatccggagcaggacagtgtagttgcggccatggttgttggcccagaaagtgccctcgggggtctcatagcgcaccacgaagtcgaggcgcgccccatcgctcgcgccctcagcaaagggcagctggaaggcaaagcggtcagtgcagccaccgtcgtcgggtgaggaggctgacatctggccagggcccaggcctagcccgggatccaggaggggatctcctgctcctgttcctcccactcctgccccaggcgggctgcgtgggacatagcgggctgggtggtcgcagaaggtagcccaaccgtcgtgtgaggcccgcacgtgcaccgccttctcgaaggagcggttcagcacgcgcaccaacccgcgcaccactggcgggcgtcccccaggcacccacaccccggaacccccgggaaccgctccaggaggcggcagcagcgcctccaactccaccatcacgcgccccaaccgctccagacggcccagcgcgggcggcaacgaaaatgtgggcaccaggtaaaaccccccgccagcgggaacggggcacggcggagagggatcgggaaaagcctcctcttcctcctccccttcatccccatcctcgccatcgtcttcctcatcagccccgccaccgccgccatcttgcccggtcgccgccgccatcttgcccgccccgggcccgccccacggccggtagcggcgtagctgcgccagaggcagccccagggcctcgtcagcgaacagcaccctccgcggggccaccgccgcctcagccgaggcgcggggctctcccgcagccggcgacgggggcgcgggatgccgcagcggtggctccacaggggccgtgcgcgccatatcggcggcggcggcggcggcaccgacggcaccggcggtgggaccggcgggggcagggcctgaaaaggcgggcagccaatgagaaagccagaacaggggggtggggctccagtggagcgtaggcggtgagctagagacaggtacggccaacagccaatggacagccacgcgggagtgacgtacaggtgattgacaagcaggagaagctagcaaccaatgaggacgcccgcgcgtgggcgggatggaaggcgggatgataacggaatcaatggagaggcctgagtagggttaatgcgggcccgaagatgtagcagcaggagtatgacaattagtgggaaagtctgagcacgaagggcatggtaggcggcgggaagatgaaatggctacaagcaatgggggcaacggggagcgaacccagaggtccaaaaactgggagatccgcaggttgcgtaggcggtgagacgtaagacagataaaatgaacagccaatggagaactgcacgcgaatgatgtagagacagaatgacgataatagttgcaatgagccaatggaggagtctagtgagcgcacactatggcttcaagaggtggtaacaaggtagatctagccaatacagagactgaacagagacgggaaggctgtgtgtgagcagacatggaggcggggctgtagcgggcgggggggggggggagcactaaggcatgtgaggagtgaaggtgggagcgagaaagaaatggggatccagggtgaaggctgttatatctcaaaggacagtgccagtatgggattaaccaaagctgaaactagagaaatgtagccagaaggaaactttggaggcaagatgggaactcatacccacggatggtagtgtaggtgctgtgaaggaaagcatgagtagccaataaataggctgagttggaagaaggtgcataggctgagcctgagctattgagtgattgagcgcagaatcagaattcattcaaccagtaagatcggacctctggggaatggctttacctttccctaatcttccatgactccccatggctccacgaatacccagagcccctaaaagcccagactgcaccggattgtgagaccaaagcaaaacagttctatcagttactgggtgtgtcctgctggccccacaccaccacacacacctcccagccttattgtgaccaatgcaactagccatgaacgttcttaactgttccttaaagtccccagttgagcattgatgttcttcaggacttggcactattgcatgaatcaatcgcaaaataggaaatagaacctttttggaagaattagctttttccaactcacacttagcacacattgactgatagtatgtcatcacaagcttatcagctaatgtacattcaaatcagagtcctgcccttcttgctcattttgacactttgcaccccacagtggctttcttctcccccccccccactttcccaatctcctctgcttagagtgctgtcccatctgtttctttcatctagtgaattctttccattctccctctgagatggcacctcctatgggaatgacctggactttgccatcgtgttcattcacatatcccccactcccatttactaacttagtaagacttagtgtttgccatatgccaggttcagggagtgcttttatctaaccctcataagacccctaacaggaaggcccccacagtctctctgctcctcctgtctgtgtccagggtcatgaaaggaatatgtccagctacaagtagcagaagaataatggcataatgaaggtagaacttttttttctcatctgaaagttcaaggcagcaagtgctctcaggactccatcctatctgcccattttgggtatcaactgtgccccggtcttgcctcagagtctcattcttcagcaaatcctgcaggttatctacccaacgcattttccaagcaggatatggtgatgtatgcctgtaatcccagcactcaaggggctgaggcaggagaatcacggaattccaagcctaggctacaagtgtgaccttgtctaaaaaataaaaagggttaagtgtagctcagcggtaaaaaccacttcctagaaagtgcatgggccccatctctagcatcattttttttaaatcccaaatccaccttttcactaccactccatcaacaggaccagcaccagtcccagtcccctggactactgtagtcacctccccctggttggtctccatcccatgttctaccccctattccatattcagccatctaagacatcctcttaagtcctaacagcaatgtctctcctctgctcccaacaccctctggcttcctctacactaagaggaagagccaaccttcaccatgtcgtaagcgcacaagccagctagccccgtctgaccttcctcctgttctctcccttccagtcatgtcactccaaccacacaagactccttgctgaccctgtacatatccagcacactcacctcaggacacccacactgacccttctctcctggatctgcagatctccccatcactctcttcttcatctatgcctgctctttgtcaaagatccctttccctgggaatgctccccctgacctgttaaatcctgccccattcaccatcaactcctagccctcccagtttgcttccccaggaacctacatgagccaatatagtaatggtggagaggaaataccaccctctgacaagcaaaaccctagccaccatgctgcaaagaccctagctttacacttcagtaaccttaacactcccgcacccacagccccattcaaatagcctcctggaaacctgtgtcacttacccctcatttacttatcctgccacctctctgaccaagttttcgcagaatggcaggaagatggtgacgaggatataaaggaagatgcagaccaaaccatggaccctgagaaaatgagtacctattccaaaaagagacaggtgacagggcaggggactagaactgtctcagagacatagaagatacagggactagttgggcccaagtgtacagggagcagggaccattaactttggggcatagctacagtcagctgcccattacctgttaggtatgctcttcacccctcccctattccctcccacacacaaccacaactgttaagctcctaagatccatgcagacctccaaagtaagaggacctcatcccacctctgcccctccctccctctcaactcaggacctcccccggcttccaggcaccacacaggccatgtttggtcttagatgtgtcccaccaacttagaagccccaaccagtgaaagttttgctttgaactaatgataggaagggttgagggttttttttttttaattgttgttgttgttggctggtatttttgggtcttttttttttctattcactttgttttcccctcttgtctttataaagccaagccatcagttccagtcttgttatttccaaaaaggtgagttaagatgaggaaagtcagtctcttttttgttgttgttgttggggcggggggaggtgctcagaagatagccgaaagggacaaaaagtgcaaatgagggaaagagcaaaggagtgtgggaattgtttactaggttagcatcatgtgaataaaaacgtatttctactttctcttcctcaggcctgaagccagtcttgcaaagaggtggtggtggccatgcagttggatacctggaactcttagctctctgcaggatgccagggcaccaaaggctggaagccttagccgtgccttgtcaggaaaaactctgtggaggctcgtctgtagtaaacagtggttacagggagccggtctgtgccaaatcgaggacacgcagctgccagatcttgaatacaaaccttaaaacctcacaaacatcaagttccagaggagtctccaagtcctagaacttctatgacactgttggcttcaggaaaactggtcacttcagagcccaatgctaaggacccctatttcccaaaattgtgatcttaagcaagctgcacctccattttgcccatcggtctaaaaacaatacagccatgatgagatggacctcagagggtgagaagtgtttggctctgtctggaatgtagaaaattctagttaaatgttggctaccaaaattatgacagctgtttagaatcctaaacctttgcaaacgggagtgtttctttccttttgtttgtggttttggttttttgtttttgtttttttgtgttttttgtttttttctttttctttttacacggaatctggctatatagccccaagcaaccttaaactcttgattcttctgcctcagtttctggggtgctgggattactggtatgtgatactggatgaaactggaacttttcagagtagactgttacaaagtttagaatcatcaggctatggctatattgttcctgacaggactaggaccctgggccgctatgtgtatggtttttttgtttgtttgttttaacaacccagagccttgtgcgtgttaaacaagcactctggcactgagctgcaatggccagcctttcttccccttgcccttcttggtgatgctggctgcattaacagccactggggctgttcccaggtgggtggctgctgggtcagggcactcagcacaaacatgatgtggggctcactcagagactcgcagcagcttctgggagccagccattctgagactctctgattctgtgaatttgtggggggagtacagcccacttttttctccatgaattgctttccatgcctcttgccttctgtggaaagaaaggctacaggagtggccagctctgccaagccttggcaacatgatggtggtgatcatatgcatgcttgctaaggaaatactgaggtttggagcagaaggaagcctctggagacagagcactaccccacctctcccctggctgcttcccattcacatggcaggcttcagatcccttcttctgttcaacccagcgatcctccaacgtctcacaaacacaatgctgtctctacctgcctcgggatgcctttgtgatttgacttattttccctcagttttttttttctgactctacacacttttgtttaagaaattgtggtttctcatgagccctgttatctcattgataccttttacctctgtggtgaggggaagaaatcatattttcagatgacttgtaaagggcaaagaaaaaacccaaaatttcaaaatttccgtttaagtctcataagaaaagaataaacaaagtaagagagcaaagaaaaaaaaactacaagaaccccccccccaccctgcaattatcagcacacacactcatcaaaaaaaaattggattattagaagagcgaggtctgcggcttccacgccgtggtttttcttctcggtataaaagcaaagttgtttttgataatgtggcagtttcccacaagccaggctgatccccctctagcagtccacttcaccaaggtgagcgagtgtccctgctctcccccaccagacacagctctgctggcgaaagtggcagagaggtattgagggtgggtgtcaggagcccaccagtacagctggaaacacccagccactccaggtaaggactttggaaactaataccattcatcctaaatgccagataggtggagcagttggtccttagacaggggcaaaaagaagtactttgattgtttgatgcacagataaacaggatttttttttaacatatgtctatcaactgctggtctccaggaatgccggagctttaggcaactcaagatgctgtccagctataactagaaactagaagtgcatctcttgtttcttttcctcctgctgtcttccatttcttctcctgtctccccctgcttctttgcctgtctctgccttccatcagtgcccagtctctgtctctttcccaggctctgactatatgcctgtctgtctcttccagcctggccagccacagtccctttctttcctcccgctctctgactctcggctcatcttccttcagctgcttttgcacccggtattgagcgcagatatttgtacacaactggcgcttaataataatggcttaagagctctgttttccaagaacgggcattagttctgtgtgtcttaggtttgtgagctgtcaggtcagtcttagcatttaactgaccttctgcttgtgtcacgcaagataacaccctcagtcagccacagtttagcaaaggactatatgactgtgagcagaatccatgtgcaaggagagcaggcagttcaggacgagggtgagctggtctctgcaggtttagtgctgtggcactgtgcctggtatatggtgagttctcactgtttgctattagcatttttaaacaaattagaatcgtgctatagattggatttgtttctgctctgttcaagcgataccatttttgtagcatactaaaataacgaacacgtgatcttttatgtctgccgtgactgtcctcacatcaccatgaatttgattacctgaattaagtgctgatggtgggatatttgggtttcttctgattctaaaactccatacctgactccatggatcctgaaaatggagtagctggggaagaaggggtgtacatcttaaggggttttgccctctctacaaattgcttttccaaaacgttgtcttattttctgttgtttctattcaagttaattttaggtgtgtgttaccatttttaatccttccccatcataagaaaaatgacaagtattaaaattttgcattttggttacttttaatgaccactgaccatttgtgctctgtaggctagagttttatgatcacattcttcatcctactaaattgctcatgatttttcaaaattgctaatagctcttaatttagaaaggataataactattggctatatgtatatgacacatatttccctgaaattcatcatttgtgtgtatgtgtattttaattgtattcatttacttagtttatgagcatgcatgttcttcctgcatgtgcaccatatgtgtgcctggtgcccacagaggccagaagatggtgtgggatctcatgggactggagttacagatggttacgtgggtgctggcgcttatgtggcttctttctatggttttgtgtttaaaagccttttaccacttgaaaatgagaagctacctcctctacaagagcagcagtgctcttacccatggagccatctctccagccctatttgtatggggggggggggtcttctgagacaaggtctcactctatagccctgactggcctaaaactcactgtatagaccaggctgacctcaaactcacaaagacccatccatctgcctctgccttctgagaagtgggatagaagacatacaccaccacggcgggcaatcacttgctttttttccctatttattgtgctttgtaatgcatgtgtcttttaggtctttagattactcttttcttgtggggcttctgtgtatggttttgtgttttaagtcttttgcacttgaaaatgagataactgttcaccccatgttggcttccagtctcctttatggcttcattttttccatttactgcagaggtcaaaagtgtgggtatgggagccagactgtctggaacaacctagcctcaactcaagtcatctgtgtgaattttacccaggctcttaacctctctgtacctccatttcctcgtatgtactgtgatgattataacagtacctacctcagaggatctttctgaggattatttttattaatgatggtaggtgctcagcacaaggccaaacaacaatgatagacattaaaacgtatctctctagtgggtctggaaattattctagagcgtctgatgacagcgacatttcaagtgggcagggaggtattggtgggaaagtgggctatctacccagtcactttattttcccctaattgtctcagaatcatttgttaatctgtcctgcactgttcctcatgttgaaatgttgtgttcatcacaaattccattccctctgtgcatgggtctctgccacggttttctactctaatctgctccttagtgtttattcttgtacaaagcccacactatttttctgatgttgctttgcaaaacaattcaataccagccatgggtgtctctggcacctagcagcatcagtcctccagccagaggccagtgattattttcagtcctttctctcactccctctctctctgtctctgcatgtctgtctgtctgtatatgtctctgtcttgttcattctttctctgtcacttttcctctaaactgctctcactgtctctctctatgagcttgattcctattccatctcatgtttctctctatatatttctctatctgtatctcttctatatctgtattcacacacatatgatatatatatatatatctcaatatatatatatatatatatatatatatatatatatatatatatatatatatcaatatatatatctcataccataccatacatacatacggctatatagctccataagatttaccccagccacgagacagaaagatgctggccttcctccacctcgtactcttccctccccagtctagaagggcaaactgggctcagagatgagcagcccccacccccaggcctcacagagatgttgtgtcagagttaaatccaagagcagatctcagaattctcagtgggaccttgactttggcaattccacattgcaggccttagtttacctctcaggacccaggaggccattaacaggagacctgaggtgcccttccctcttctacatcctcatgagttggatccagtccataaccatagcatggggccaaatctcacaagctctggtctatgtgaggttctgggccccatgagtcagaagtcctagcggaccaaagaacactagtaacgatggagaaatatcagttaagtatgaaccctcagagttcatactgcattccttgggacaaccattctggggcccttccaaaaagcctggtggtgtgctctttccatgagggccaggccaaatgtcttcttcctcttgtccctgtatctggaagaatgttataatttggggaaagttgtcccaggagagcgggtctggagccatatgtaagtgaccatttatcagtcatagacacttgctcagcattctgtatgtacgaactttgcaagatggctcctgttactgtcccaaattagacaggaggacagaaagaccccagccttcctccatcacatactcttcccagtctagaagggcaaactgggctcagagatggacaggaaggcccctttgtcccaagagggcaaagcctgaccccagatcaggacagtagagggttttccaatcctctgtcataatggagctcaggagggagggaggctgacattccagagccagcaagaggccttatggagttttaagcttcctggctttaggtggttcccatttctttgggctctgggacatcaatacacacagtaagaaggtggatccatgcaccctacagagtctgtgttcttgagattctaaaatccgttggctttgagaaatgatatcgtacagttctgagtttctgttactacagcatttgaagactcaagggggtctcaatatccatgaggcctgcctaatactcaccaagcatccaaccttgggcccctctggcatccaagaaagacagaatcgatagaacttgggttttgcatggtagccagatggacgtcacctaccacatccgctagcacccacatcaccctacctgggcctatccggctacaggatagactagccacttctcggaacgaaacctgtggggtagattatctgcccccttctcttcctccttgttgccgatgaagcccaatgcatccggccgccatgacgtcaatggcagaaaaatctggccaagttcaggttgtgacaacagggcccagatgtagaccccgataggaaaacatattctatgtcccagaaacaacctccatacagcttctaagaaacagtcaaacaggaacgccccaacagacagtgcaggaagctggctggccagcccagccctccaggtccctagtaccactagacagaccatatccaattcaggtcctctttctgagaatgtactgatgcatcacacagtcacaccagttccacaagtatttaaggaggagatttcttataagttctgaccaaacataaagagcacttcaaaagtgaccatggtccagccatatgggttaagccaatatagtggaaaattctactcaccaaacctgatccgcatttgcttgagctactgtaatgaagtatcacaaactgggggacttacatagcatagaattatcatgttagcgttctggaggctataagaccaagatgaagacgtcagcagggttgattcctcctgtaagtcctggcctccttctcatctctgatgctttcctttgctgttctttcttggaggagcatcacctcatggctgcctgcctgcagtctttcagctcatcgcatcacggttctaggaagccagtctcagcttccacagacccagactcctcttttcatgctaatgttttagcccgtgacacactagtcttaatacctaggttctcatataaatctctcaactctgataagccccagacatgatagcaaagaagatgcaattgccttccaaaacccttccgtgcttcccccaggctgttctcagaagctacatgcccaacacatgtagtatatagtagaacggagaatgacatattcacatgcacacacaaacacagcagggaaaatgtacatatatatacttcctagagaaaaatgaggcagtatcagcctgaaatggtggtttataatcccagtactcagaatgcagaaacaaggagttcaaggacagcctgggtatataaggagttccagactacaagaaaccctatctaaaaagaaaaggaggtcccaggccatgagaagactatagaattctgaacctggctatcctcttaattaaaatcagggtagaattctatagtcagttcaagatctggttccctctctgactggaagtataggatcctgaaaaacgaaagccacacttttaagggactgtaaggtagtgaggctcagcacagggacctgggtcaccatgtagagctttgaagaggaaatcagaagactgcagtatggctaagggaagaagtggacttccaagcttggcagagattggagctagtttgaggagcgcccagggaccctcaatcaagcaaccctatccctctttttttcctggcacctgccacgccaattccaagacagaagaaagcttagagaagacagacccatgctgtggccctgagctctgcagtactgaattcagctgcaagtcttccctgcctctactgcttacctttgcatttagccacatctgactatcactgtatactctgctcctccatcctctaccctccatctccagtaatgctcctgttgtagctgcttctgccaaaaacctagacatcatcttgaccctttctctcatctcctccatccaagctcccggcaacttctcctgactctgccttcagacgagacttggaagacagtcacatctcagcagctcctctgccgttatccaggttggtagcagcaacaccactcgcctcactattgcagtacacttcccactagcacagttccctggagccttcctgctcacagcatccaactgaatcttgtgaggctatgcccaagtcattggaataaaaagatgagaagagagtccaagacaagccccagtagaatcagcaaagactatgtggcctgcacagagtgcagggggtactggagggtcccacaaaccaactccccatcaccccacattcacgacagagtggtatggtgtatgtaagcaagtgaggtgctggacatgtgcatgtgtagaatatatccatcaatctgtgttcctgctgtcagggtagcatatatgtatgtaagacagaccagaggtgtagttatgaggctatcttgcaccacccctggaatgcatgtgactccattccactgttatccctgcagcctgcctctgacaagaacccaatgcccaaccctaggccagccaagcctatggctccttccttggcccttggcccatccccaggagtcttgccaagctggaagactgcacccaagggctcagaacttctagggaccaggggctctgggggacccttccaaggtcgggacctgcgaagtggggcccacacctcttcttccttgaaccccctgccaccatcccagctgcaggtgaggcccggggcccagaatggggtaagcagggtggggtacttgggcctataggtgtcgacctttactgtggcatgtggcgggggggggggggggggctggggcacaggaagtggtttatgggtcccaggcaagtctgacttatgcagatattgcagggccaagaaaatccccactctccaggcttcagagattcaaggctttccccacccctcccaatcctcatcccgataggagaccttatgattccatggacatagccatgtatcctcatcccactgtgacgagatggctggggcccaagaaggtaacagtgttggggccagctctaccccttgaaactgttggaccttgatacattcactctccacgagcctcagattccactgatgtgaactggatagttccattgttgctaccgtgtgagactttagtaaagagctaatgaatgagacacagaactattaagatgaggctcatggcatctcatggcatctcccttctctctccagctgcctacagtgcccctagtcatggtggcaccgtctggggcccgactaggtccctcaccccacctacaggcccttctccaggacagaccacacttcatgcatcaggtatggaatcggagcaggctgggaggagggaacaaagaggacagctgtggagcagagccccaagccccgctgagccatggtccatgtgttccccagctctccactgtggatgcccatgcccagacccctgtgctccaagtgcgtccactggacaacccagccatgatcagcctcccaccaccttctgctgccactggggtcttctccctcaaggcccggcctggcctgccacctggtaacaccttcacagtatctccaagttctctaatctttgagcatgtgcaatgtaaacttttctgaattatagccctatggaggtatagaagggtcttaagagtcacggaaactccaacctccaaaaaaaaaaatatcagacttagaaccttgaagacatagaatgcaaaaaaaaccacaaatcgctattatcagtcaaaatgccatcacttaccaatgggcatctttaggctgttatgtcagaagcccttgactgtgggaacagcagagtactatgagacagagtcttcaaggctcaggaaggggaggggccttctggaacaagctgtagagtctaacctgcagctccagaagtaccctgtctctacccacagggatcaatgtggccagtctggaatgggtgtccagggagccagctctactctgcaccttcccacgctcgggtacacccaggaaagacaggtgagttggcagggctggcaagaaacggcccctgcccacacctcaccccacccctgcacctattcctctgctgacatcccatattctcccatccccagcaaccttttggctgcaccccaaggatcctacccactgctggcaaatggagtctgcaagtggcctggttgtgagaaggtcttcgaggagccagaagagtttctcaagtgagtagcctgaccctacccacagagttctgctgtctaggcttcacgtctcaactcaccatcctctcaatggatgataataagaatcataaagattcagactccatccctccctggctctgtgatcttgggcaagttatgggtctctaggcccagtttacctcgcatgtatgaagagacataataataaaggtatgtgctcatagttaccttcctgttacacgcagaaggatctaaggccacagagaattaagggtcaatcaagctcacacaggacctaagtgatgaatcttgaatatgaacacaggcagccaggttccagagcccacacgcctaactgctttgtcccgcttcccctcacacaaaacacattcctgatcctccaatttctgttcctctagatgactatagagctcttgcctctctgctctctatctgctgtccctccccttctgtatcttgctagtcacccctaacttttggcaatggtgcgtgtttgcgtggccaggcctttgcatgggctgtgcctgacacctgaaatgccatacccctgcatacctcctgtctaacgtcatcccagcattttggccagactcaaagggtaaataagctcaggcctggcagcccagagttgctgaagcacatgtgtttaaggcaagcaagggggtgggggggggagcactgagcatagagaaatctcccaaagggtctaggccgtccctaactgatacactaagccaagaggcctgacccaccatggtcagctacatggaatcttctccttactcaggcactgccaagcagatcatctcctggatgagaaaggcaaggcccagtgcctcctccagagagaagtggtgcagtctctggagcagcaggtaatgcctgcagggtgtggctgcggggtgtggctgcgggaaagaaggatgggagggaggaccctgtgagggaaggcatgggcaaaagtgtgcctgagaacgaccaggtggaagccccactttggtgtacatccccacagctggagctggaaaaggagaagctgggagctatgcaggcccacctggctgggaagatggcgctggccaaggctccatctgtggtgagtaccccaagtccagaggcagcagacttcaactgctgaggggcaagacaggagcccataaggaccaaatgtcttcttctcacatgcaagccctgccctgtacagaccattcccacctaattaatatgccagatccaaagacacgcctactctgcttacaaaccttctgacctccaaaacattatgattctgccttttcagggcacatacagaaggcagtgaactcacagggccactgcaaaaaaggaaaatggagggccttatgttcaaatttcaagataagctcagaacatcgaacagtgtgtgaccacacatttcacatacccagtctcaggctgatatgagtcttatactataacagaggtagctaccaccatcatcctaatgcacaaatgaggacaacttaggtcaggaagatttagttgatgctcccaggttcacagttggtgctaggggattccaattctgcccctgctcaccccagccctagcatctatggcttcatcgcatgctcatgcctgtactctaagatgctgctttacagagctccaccagagcctgcaattgactatagggtggtgcccttctcaaaagcattgaccttactggacacagtggcatgcacctgtagtcctggctactggagaggctgaaggaggagcacttgaaccctcaagttcaaaaccagcctggtcaacacagagacaccctgactcttctaaaacacaaagaaacacggttggggagaaacttgagagggaaaagtgattgccatacaaggataaggacctgagttttgctgggtggtggtggcggcggcgcatgcctttgatcccagcacttgggaggcagaggcaggtggatctctgtgagttggaagccagcctggtctataaagctagttccagaacagccagagctacacggagaaaccctgtcttgaacacctctgacagaaaaaggacctgagtttagatgccagcacccacaccagatgcagcactgtaaatctgtaatcccagcatgtgtacacacaccacacatacaaatcagatagaaatatgaccaaatcaggaaatgcaaattgtaaaataaagtggggttggggaactggacagatagctcagggattaagagagcttgctgctctttcaggggaccagagtttggttcccagcaccctcagagccgctcacagctatctctaactccagttccagtggatccaatgcacttttctgccttccacaggtaccaggcacacatgcgatgcccagacatgcatgcaggcaaaactcccgtatacctaaaataaaatgcaagctgacttggcagtaatctcagcccatcctgtgctacatagtacatgttagactagcctgtactacatgctacatagtacatgttagactagcctgtactacatgctacatagtacatgttagactagcctgtactacagagcaagagcccacctacataaatatccaaccaagcaagcaatcattttttaaagtaaaatggaagactcagtgtggtggcgcacgcacgcctttaatcctagaactcgggaggcagatgcaggcagatctctgtgagttcgaagccagtctggtctacagagcctggtctatacactgagctccaggacagccaagactacacagagaaaccctgtctggaagaaaaaaaaaatatatatatatatatatatatatatacataaaataaaaagtggaagccagatgtggtggcacacacttataatcctagcactccagaggtagaactaggctagaaggtgcaaggccaactagagatatatagtgagactgtctcagacaaaacgaaaatgaataggcaaacactcaggaggcagaggaagtgcatctctgagagctgcaggccagtcagggctacatagtaagaccctgtcaataataataataatggcaataataattttaagaccaaaataaatagacatggatgaagggggaaaggaatgagaagaaggaagataagcgatgagggaggagatagggtgaaagtggtctgtatgtattacatacatgtacaaaattgtctaaaaacaagtttaactaataagaaaatacaaactaatgtttgaaaggctacaatgaaatgacaagcttaagtgtctcgattaccacacccctcccaacccctcaggcctcaatggacaagagctcttgctgcatcgtagccaccagtactcagggcagtgtgctcccggcctggtctgctcctcgggaggctccagacggcggcctgtttgcagtgcggaggcacctctggggaagccatggcaatagttccttcccaggtcagtggagtccacaccccagtgccagggggtacaaaggagctcccccacccccctcacccccactaagagctgggaggaaactgcacctgagtttattaggcttagaagccctcaactgttataaatgcatagccttgggccccgtgttttgggggattggagccaggcctgacctatttggcatctgctacttcattcagtcaccatgagggaggagcctggccaagtgagtccaaagagccctctcttccgtccccacctccaggaagtcaggtgcactcaaccaagctaaccaaccctctcccacctgtcaggcctgggttgtgagtttaccagggaccatagatatttggtgtcaggctggctatgccacttgagctgcttacatgcctttgatgtacaaattacttgactcctttttaaagtgaggagagctatttggcaggagtactgcaaagaagacacagcttacggcgggtactcagtaaacagtactatgtgtgagcatagactgtccctccccccttggtgctagtggtaggaattgagaccttggattcctgatgcagacaaaggtggggtagggggtgaggaggccaaaggctctgatctatgccaaccttctgcagagttcttccacaacatggactacttcaagtaccacaatatgcgaccccctttcacctatgccacccttatccgatgggtaagcagggcaatagaggcccagcagctggtgggcggcagggggggagttgtggtggggagtgcttgcctcctacattgcaccaagagcagaattcacccattaacaaacctcagctctgaggagccccaagatgtgatccttcttgatagcttcacctcagatctagccctcaacccaaaactactgcaagccaggtcagtgcaaagcaaactgtaacactacaaactaccctttcctttgtccaccctatctctaacatcacccttgacctcatgcctcaccctattctttctccttccccttgacccacaattacaaagctatcatagctcagagggccgagagtaggctgctccctcagccacaaccctgaggaacatgccccttattccacctgactccaacttccaggccatcctggaagccccggagaggcagaggacactcaatgaaatctaccattggtttactcgcatgttcgcctacttcagaaaccaccccgccacctggaaggtgagttcctctgtacacactggcagctgggatggctccaaggatggttagcctggggctagacatgtggggaaggagcaggtcagtctcagactcaggatgactgtcaaccctgtccctgactggggtcccggtcccccttccacagaatgccatccgccacaacctgagcctgcacaagtgctttgtgcgagtggagagcgagaagggagcagtgtggaccgtagatgaatttgagtttcgcaagaagaggagccaacgccccaacaagtgctccaatccctgcccttgacctcaaaaccaagaaaaggtgggcgggggagggggccaaaaccatgagactgaggctgtgggggcaaggaggcaagtcctacgtgtacctatggaaaccgggcgatgatgtgcctgctatcagggcctctgctccctatctagctgccctcctagatcatatcatctgccttacagctgagaggggtgccaatcccagcctagcccctagttccaacctagccccaagatgaactttccagtcaaagagccctcacaaccagctatacatatctgccttggccactgccaagcagaaagatgacagacaccatcctaatatttactcaacccaaaccctaaaacatgaagagcctgccttggtacattcgtgaactttcaaagttagtcatgcagtcacacatgactgcagtcctactgactcacaccccaaagcactcacccacaacatctggaaccacgggcactatcacacataggtgtatatacagacccttacacagcaacagcactggaaccttcacaattacatccccccaaaccacacaggcataactgatcatacgcagcctcaagcaatgcccaaaatacaagtcagacacagcttgtcagaacacgctcgtgtgcacgtacacacatgcagcccctccactctatctcctgagttccatgaatacacaccgactctccaagatgtaccccacgtctcacttgccactgaccccagttccctacccacaagccccaatccatgcctaagcgtggcccacagaagaacttctcttttatttgggatccaaggcccctggcccccagtgcccatccaataaactgtggtcagctggacaatcaccctgatcagatatgggaacatataagcagacagctgggtttaagatcccagcaggagaaagcggataccaaatgaaagagagtgctagaacaggtgcctcagcactgtctccagcaccccaaattcctgcctgtggttaggagacatccatcagggctctaggcctctcggacccggcccaagaggccagcattctcctggcgaagggctcggtagtcctcacagatcttctccaggttgctcaaagtcttcttgcccatctctgtctcaatctaagaaaacaggatgcacacttcttcagcccctgcaggctgcccctctactgaactcctccctgctcctcctattcccgtaacagcagcctgttccttcccatcactgggcttctgggtatgtccttccctccactccacctaaagcagcaacttctgccatgggctctgggaggcattaggagccgcaagctaaaagccagggctcagagtaggctactggctagcttcaggtcccaggcacagtgggcacgaaggcaaagcctctagctgttagttgtctggtttcaaagactctcagcgcaaaacaaggaactatcccctggcctgtctccattccccttaccagtcccaggtctcacctgctcctcaagatctcgaacttccctcatgatagtgcctgtgtcctcaatggtctggatgagctgactgcaattctggagacagcaagaatacaaggcttgcacctatgctggccctctccagccaacccaccaggcacatggctcccctcacctcatgcagggcagctaggtacttgtaggctttccgaacagcatcatccttcttagcatcctgataagacaaaggggatctccgagatatcagcaagccattcccccttttccactactctatgcccctataagaccaccctttactagtactttgccttcatcctccacagagcaaagctaggccccaagcaacagtgcacctaaaggactcacagaggggcaggcaacaactcagtcccgcctccaccctcccggaggccagcctgctccataccttgaacacaagctcatcagtcactgcaaatgtccggtcgagcttcccagagagagagttgatttccttctgcagttcctttgtgtccgacaagatctggtagaaaccagggtaactatcagtgcacatcttgggcaaggtagctgatcagtgataacactcacgtgcctatacttacatccagtcagggcccatgtcgctgtgttggggtgactattatgtgttggagtgtgcctgaacagctctgcctagtagtgagcataaagtccctgtgtgatcacccctatgcttgtctgcctacatgagccatcaatcagagccacagtgacatcataccttagtgatctcttccttctgcttccggatgttgcccacaatctccaggatgcgctgagtataggccagccgggacacatcttttggcagagtctccagctctgacacctaggtgggaacatggcaggcgtgagcccaagccctataccacaaccacccttacaacccagggccctaaagtaggccttaccagctgcttatagacctcctccttccggcgagcctcctctgcagctgctcgaacactgtggtgcagctcctggatttctgccagccgtcgagacgattccagctagcaggaacccataggcagaaggcagtgagcagagctcagaaacagccccctccctcagccccctccctatctatcagggcagtccatctacactcagcccactgtgccacttacctccctacagtcctggagtcttctgaggtggcggtactcagcaagaagtgggacccggtgtttctcccactggcttgctagatggatgagcctctgagcgctgctctccaccacaagctggcaggagtcaaggatatgtcaagatgggctggatccatctacccacccctctcagcccaaccccaaaccccagcccacctgcagtttggcgaggttggcagccccatcaggcagcaattccaccgtcctgctcttcaggcgcagggcctgctcctgctcggccacactgagttcactttgtcggcactcggtttccacctggtacactcacagccaagctcccagtcatacacacagcccacgatcccagtgagcccattatggccctggcccagctcaagacctcagagaactccaaggcccctacctactacaggctttggcatcttcagctctgtactgacagccagaggctctgagaagccctgtaaggccctgcccctacacatcctccttgatcccctgatgcccatagctcctatgttcccctacaaagcctgactgatgccagacctataggcctatatagtctatatagacctatagtctagcaagccatcaaccctacatgtttctttgcataagttctccttagccttcaacaataccaaaggtctctaggatgctccataaacgattatggcatctatagatctctagatgtcagatcatctctcaaggccccagttctgacctggtccagcccaagtccctctctaagcccctcacctgcacaaggttgattcccagggtcttcatgtcagcttcaacctcttcaatgttgtggttcacactcgccagctgctcacgaagggactctaactcctgctcttgagctgcccgtgtgtcctgagaaacacacgccagtctaggtggagctaccaagtccagaagacaggcaatagcccagctgactctatgtgtgtgtctgtctgtctgtctgtctgtctgtcttggtctccttacctgttcaagcctttgagaggtagctggtacatctgccacctgagctgcctggacctggggctcctatgggtagaaaaagcaacctgactatcacacaaagttctatccctcccaggccagcctcaaacccccaaagcaccctcaagcactgtacccatgtccactcaaccactgacagttttcagattgttactacaagagaataaagtgccatctgtaactgctgattagagtgcctgaccacaaggaaacctccctgacaaccccgaccctataacctcatgattctatacccaccctgaccatcctgactctacaactaccatgacactataaccacctgaccatctggaccctatatccaccctgaccctacaacctcttcatgattctatacccaccctgaccaccctgaccttacaaccgccatgaccctataatcacctgaccacccggaccctatgtccaccctgaccctataactactctgactccataacgaccttgcccaaaatgtccacaagaaagatgagtgtctaaggagaaaagatgtttccaaagggaaaaaatttccaaaggaaagcccaaggaaagatggactttgtactaggagcacttcacactcttacacaagtcccacctatctgcctttcctccactaaagtctcaagaagctaggggagccatctagacaccctgtcctagttggagaggacctactcagtgggcaccagatcctctgtcagtaacagtggtatttataaagaaagcaatccggacacgccctgtccactctagcctacccaccagatggaaggtaaacttctctgaatgggtgaagcgggagcctttgggcacaccagtcatagccctagcaccccaggtctgcagcatctctcctaggtctcggacttgtgtcggggctccaagtgggccccagctttgacgcagatgttcaatcagctgcttgtgcagtctctgctgtggagcccgggaatcctcctggaaaggacagagggcaagaggaaggcatacctgctggtccctagggctggaacttcccaccactgtaggtcccagccctggcctaggagtgccctctctccacagctgcacttctctacccagtcacccctgaccctggggaagaaagtgactagagaggaaactgagcctggagctttcaaattagaaagagacagaaagatatggacagcatagacacaggaaaaaaaaagtaccaggccaaaaaaaatctagagttggggacaggaagataaagaaattagagttaacaatagagactgtgtcagtattaaatggtgctaagaaatcattcatttcattcagtataaaaacagtacagtggttccattaacaaaaatgttcctgtgagtaatgacacatctgagtactcagagctgaaattatgtgacagtttgggttcgctaggatttgatcctgaacacgaaaccaggttctaccatgaaactgtagtccaagctctgagattttctctaaaaccacagtggggaagctaaaggagaataaaagaagggctagaagacaagtatcattagagcgattcctctatatttacacatcaaacttcctgtaagtgtaaagaagagacgggagctgggtgtggtggcacatgcttttagtctcggcgctcaggaggcagaagcaagggcattatacattttgatgccagcttgggttatctagtgagacgctgtctcaaatctcatcccccacccccactcccacccccaccccccaaaaaagcagactgggcagggagggagaaagaataagcaaatggcaatcagggcggcagggacagatagaaaggcaaaactggaagtggacaggaagaaggtagaaagaagagaccagcagagaagtagatagggaggaagcgaggacagagaaagacatggaatggactgaggcggagaaagaaaaggaagaaataggcaaaagtgagacagagaaagatgaaggctacaaacagggagacagaaaggttgatagagtgcatcagagaactacagcacaagacagtgacaggaggagatggtgcagtcacctagagccagacaaaggagaatcactgacaaatgcacagtcagacaaactgaaaggctcaggccctgtccccacagggaatgcccccaacagtcccaggtaaaactcatgcaaggtcactactctacacccccatttttcagaaaagaagagcaggcaggaagggcttggtgtaggttctgcacttcttatccactctttcaggcagggagccaggcaggtatacacagagaagcaatgaagagagggccagaatggggggaaacgagatgcagagaacaaacaggagccgccagaaacaggagcctctcagggagagctgaactcaggcggtacctgggatgggacgcgggatgcccagcgcacccggtcttcatctcctgggcaatccctgttcacatgctggcagagctggctggcatggtgttcaaggagtgaggctgccctcccctgaagctggggcacctgtgtgggggctggtagcagcaggggactggcctggaactcccatagctctgaaggcagagacagtgtcagccatttgtcctcgcataccagtgttcacacaaggctctcccctcctcgcttagattcacacagctgcatcctcacctccgctggaattcaactcaggtagaaccaacctgctggagtggaacggctgctggagggctgagccctgtggggaaagcaaagtcagtgcctccagaatgaggtactaatgaaagggacaacaacctgatcaaacagatgacagacaaagaaggcaaggaggggacaagtccaaacggaggtggggattcccacctggaggcgctgcaccttgggagttcgaaggagaggtgggacccagggcagggccagctggtcccggatttggctcccaatggcccgaaggaaaatagccgagtcacctatgagggggcgaggggggtgggtagggaaggagtaacatgctaccaatctgggaagccagccataacacctgatccctcacctccagatgcagatggattcaactaccattctcagccactcagcactcactgagcgttaactacataggagtaccagttacccggttaaagaccacctcaggaaaaccaaaatgaggtctccatcttcatgagtcagcaagagaacagaaaaggaacttcaagaataggaccactagcaccatctattctaagcaggaaagagaaggatggtaaaggggagccggaacgtctcaacgaacagccagagaaagacctccttgacataacagagcagaagccacagaacactgaggatagatttaaccttttgacacttgggcatgatgttgtcatctacgaagttcatgctcaagaacagtgcaaccaagtcacaccaaaaaaaaaaaatctcctaacattttaaacacgtttacagttccagggtgggtggcgtttatagccatctttagcagcatgtgccccatgctttggactcacctggtagggagctgactatgaagagaactgagggaagaataattcagggaccaaaatatcctgaggctagctctcacctggtacatttggagaccactaagaacacccatgtgagaagactggagttagtgagtgtgcgagggacagggtaagctgggaacccagtcctcacgctgcttgtcttgggtccatctgttctctgacctctgatccacccaattctccagaagatatgccctgccccctacccttcctgacacttctctcaggcccctatcaccctgggaacacagtccatttccccagtcctataggaccccatacctgcaggctggtctgcgtcctcagaggcatcgctgggtagtcgctcagccaagaaaagaagcagatctcgaaggtcaggctcactgggatagaggaagttctgatagccaagctccaagggatagcccaggtcctgggggttagcaagtataagcacataatgatgctgaggataaaaaaaaaaacagacccccatctgccaagcagggaggtgcctcctgctctggaagccctgtgactaccataccggctctgtcgccttcactagccatcaccctcccacttttcccctgcatccccaaggtatccaggccccagtgacagctacaaagccaccctagacagtattacaagatcaaaaaacaaacaaaaaaccagacgttaaagctcagaagacagccagggctatacataaaaaccctgtctcaaaaagcagaaacaacaacaaaaccaaaaaaagcatagcattgctaccgaaatatgacgcaaaatccaaaggccacaagaggacacaggatctctgccctgtgaaaagtcaagagagcactgacgcttaggaaagcaatatccagagcctttgagagggaagccatagcccaatctattatataagcagtgcctaaaaataaacagaacaagggatgtggctcagagggcttgcttaacatgagaagaccctgggttccatccctagcactaacacaatcgtcatcatcgtcaccaccaccaccatcatcaacaacaacaacaacaacagacaaaatatatatatatcagcaaacacacagccagaaaggacggactctcaagagttcaagataggttcaaagacatacagaccctgaaagcaaacttcctggactcaaactcaagctctgcatgttaccgactgtgtgacccaaggccaatacttctctgtacttcagttctgtcatgtgaaaagaaaagtataccagtggctagagacatggctctgtggttaggagcactagctgttcttccaaaggacctgggttctgttcccagcaaccacatggtggctcacaaccatctgtaacttcagtttcatgggtgtgatggcctcttctgacatccaccattaccaggcacacaaatggcacatatatatacactcaggcaaaagcactcatatgcagaaaatttaaaaaaaaataaatccaaataagtaaaatgctttcagtatctttcaaaatgacactaaaagtactcatctcagacagttgtcacaaagattgagttataagcatgttaccacagtgcctggtacaaaatattgactcaaaagaagtcattccgatgagtattcatgcattctgtcaaaagaaagttatatccgaggatcatggccacacacgtataaaaacaacctgcttctatgctacgttatttaggaattttttatttgatatctgcaatcaaagacttgtgactgatacgaaaactcattccaggagtgtgctgttgtggtggtttgaataagaatcgcctcataggttcatagatttgtatgcttggtctcctgggagtgggtactatttgaaagggttagaaggtgtggtgttgttagagaaaatgtgtcactgggggtgggctttgaggttttagaagcccatgccaaccaagactagagtctttcttcctgccgccttgggatccacatgtagaagtctcagctaccacatctgcctgtgtactgccatgctccttgccacgatgataatggtctagacctctaaaactgtaagtaagcctcaatcaattgctttctcttataagagttgtcatggtcatagtgtctcttcacagcaacagagcacatactaagacacctatatatagtaagagatgccaaaaagagagaggtggcttaggtacagaaatagacaccagaagcaaggtatatacagaggaagacaccagaacacacagtgctgaattggagacactttctggttgttctggcaaaccatggctactgagctggacaattacatatgatatatatatatacatacatatatatacatatatatatatatatatatatatatatacatacatatatatatatttgtgtgtatgtgtatatatgtatgtatgtgtgtatgtatctatatgtatgtatgtatgtatatatacatatatgtatatacatatatagagatatatagatatatatatcccttaaccaccaggttctctactccacaatgaaatcaacaggagccacaagatcaaaaggcagacagcactgagaaggggaacatcagagaaagcctcagcccaccaccttggtgcttcccaccgagttcctttcaggcccagtagaagacataatttctttcgtctttgaaggccatcttccagaacatggtcccagatcaggggtggactgacagtttcatgggaccatggtctagaccatgtctagagtcctagacagaagaaagtgagagctcttgatagctaggcaaacctgagagtaatgagcaggataggcagagccaacagggttactgctcagaccaaaactgcataaacagtggtccaaggcgaacaactgtgatgacctgtcccctttagtatactggatggatactctacagatctaccatagacttacagcaatttattgagtattctggaaaaatcaacaatcactccatagccacaggctgctgggatacaggctgccaaagtatgtgatcaactattcctatagcaactcagtttttgctttgtgcatgctggagacttgaacccaagacctcatacatatgaagtacaaactctgaaactgagctacacactggttcactttggctttcacacacagccaacacagagaaactgaggaccaaaaaggttaaaaggcaggttcaaagctgcaaagacagtgagctacaagaaaaggtagacctctctgctcttgaccacagtaaatgggcacagctctgaagtgaagaggggtgggtgcttcatgagagcatcatttttggaactatgagaagcacaatacaatggaacagacaatgaccttcctcttccccagtcccattgatgaaacaagtaatcgcaggtccgataggatgcccatgaggtctgggcagagctagtcagagctttatttaggagaatgtaacccagtcaaggtcttccttcagccctaataaataggtaaatggcctactatgtgacagtggagtgagattttgatgtcaagcttagaaggtggctgttaacattagcctgagcacaaaccgaatcagctcatttaatccacacaagctcattatatcatctccatttcacaaataaggagaaggcatagaacagttagggtcacacagaaagcgtgaactgaactaggtagggtctgaactagtcacacagtttggctacagaggcagcagctttagctatacaaagggacagagaagaaggcaagtgtcaaagaacttggcgactttgtgaaaaaggaaggaagacagtgtgcacactgggaggagggcactcaccatgcaggcctgggccagactcatggccaggcggaagcgggcagacatggctggtggtagcaagtgactgaggccagagcccacatcaggattaatcactcgaaggcatcggaccacagcctctacgaccagctcagtggtgaaagctcgcagagtctgcacttctggaggaactgccctaaaaaggaaagcaccaggcttgagtagttaggaaacaaagtacagacttctagagagggaatgctctagaatccaggtcggggcagggaacaaccaaggcttcaacagatcctgggtgctggtgactatgacctttacttagtcctaagacctcggtgaatgagggtgacctgaattcagaaaagtctcaaactcccctacacttcaaagtttccaacctctgggatctgcaaaagtgaaaatggtccaagtggcacagtctccatatttctgggcaccaggacattgttctttgcatggcaaggcctcctagatctacgaggtttgggaaagctacataggaagaggctggagttttcagaagtctcaaatgtcagggtcaataaatagaaataaaaaatcgggcatcctaaattttggcatcaaggacttttaggtccctcaaatagtgcatcctttgtgttcctgtgttaccaagtgctgctactgtcagaatgtagggccctggtattttgataagtcctgggagtttcaggagttattgttcgaagatcaagttgccagtctcaggaattctggagactctgggtgccagactcctgtgttatcagtttcctggtgtgggtgtcctggaacctctagatatcaggatcccagcatatgcaggtctcagtttgtaaggtgtctgagtcctcgaggttttacccaatgtccacatcaaagtatttaggaaagtcatgatgttagagtgtaagcagggaggaggaggagaggcttcggaatcctgtaagtttgggcctttgggtgtcaaggtcttcattttaaggttcccgggtaatgggggtcctaggatttggagtcccggatgtgagcaattggaggcgactgggggttgcgtacttacgtgcccgcctggcgcaaggaatggatgaggattcggtcagcctcctccatggtggagttaattctaactccggggctgggtctaggaccagatcagagaaattggagctctccgcgctgctctcggcgcggcgaggacagagagtcacgtgccgcgcgaggaacattgggaaatgtagttctaaggagtgagcgttgcgcaggcagcggcgctggaggcggggtgtgaattacgtaatggctcctggaagttgtagttctttcacttgtagtcccatggtctcctccaagggaaaaaaaaaggaaatgggctggggagttgagagacaggacagagaaaaattttcatttataagacacgttcatcttccaagctataaaagtttatacgtgtacaaaatgactgttcccccgtgtcttgctagcctcatctgtaaagtgagaatttggataataccttcttcctagggttaagacataattgctacgactggggatgtgactcaggatagcctcacaacctgagttctctccctgagatccacatggtggaaggcaggaaatgacttgataagagtctgaattccacgtgtgcactgtgacacatttatgctcgtgagcacacacaaaaggatcataaatagattttaaataaataaaacaaacgtcattgctcgagtaaacctacttaaccaccaaccacaacaaactgaggtcgatcctccctgggacccaagagacataaaaagagaatggactcctacaaaatgtcctctgacatctacacatgtgcagcagtaccactatcatgcacacaaaatagatggaaaaagcaaagaattactagaccaggcgtagtggtaaacatctgtaatctcagcacctgtcccaagtgtagattgggctacagaaggagatcacctccttatgaaaccattccttattgaacagcctcttttgtctctactatccagtagtgctaacatttgtcataatcacacatacacatcacatacttgactcagtttctgaactaagctctctctctctctctctctctctctctctctctctctctctctctctctctttctcctctcgttgtgctatcctgtcttgctttggtttggttttcagacaacaaaatcttgcaatgtagcccaggctggcctcaaaattgtaataataatatttctttctcccaagtgctaggattaaaggcttgtaccaccgcccctgactgtattctatttttaattactgtagatttacaatgagtcttgatatcatatatggcaagccctcccatcttgttgtcttgttctttttcaaaatggatttggcttttttgttttttggttttggggttttttgttgttggtggtggtgttttggtattttgtttttgtttttgtttttattttttgtcatttgtctcaaagactgtcaattccaaagaaaactatgctgagattttgtttggtatagctaatgcagaatgccaagaagatcactttggggaactttacagcatcactaaatgttacatatttctccattttatgtccctttgatatttactatctgacttttttcctagagataaatatatatatatattaggtttttcctatgtacctcaagtgttatatgctattggaaaattataccttttttttttcgtattttggtttctgcctgcttggtgcagatatcgatttactatacacttaaccagtgcctttccccttgccaatctcagacctacaaatatcccatttgctccccctgttcaccctcccaactgacaccatttttccccgccccgtgaccttaatctctctaaggctgggagaggagagggaggactgtgtgcagatggtccttatatctcctgaggaggatgtcggaatctgaagtcgggaaaggtgagagaagccatccacccctgaagacccttgaagtgaccctgggctctggtccaccctcatcctctcacct

SEQ ID NO: 4 - DNA, 39569 bp, Mus musculus
aggtgagaggatgagggtggaccagagcccagggtcacttcaagggtcttcaggggtggatggcttctctcacctttcccgacttcagattccgacatcctcctcaggagatataaggaccatctgcacacagtcctccctctcctctcccagccttagagagattaaggtcacggggcggggaaaaatggtgtcagttgggagggtgaacagggggagcaaatgggatatttgtaggtctgagattggcaaggggaaaggcactggttaagtgtatagtaaatcgatatctgcaccaagcaggcagaaaccaaaatacgaaaaaaaaaaggtataattttccaatagcatataacacttgaggtacataggaaaaacctaatatatatatatatttatctctaggaaaaaagtcagatagtaaatatcaaagggacataaaatggagaaatatgtaacatttagtgatgctgtaaagttccccaaagtgatcttcttggcattctgcattagctataccaaacaaaatctcagcatagttttctttggaattgacagtctttgagacaaatgacaaaaaataaaaacaaaaacaaaaacaaaataccaaaacaccaccaccaacaacaaaaaaccccaaaaccaaaaaacaaaaaagccaaatccattttgaaaaagaacaagacaacaagatgggagggcttgccatatatgatatcaagactcattgtaaatctacagtaattaaaaatagaatacagtcaggggcggtggtacaagcctttaatcctagcacttgggagaaagaaatattattattacaattttgaggccagcctgggctacattgcaagattttgttgtctgaaaaccaaaccaaagcaagacaggatagcacaacgagaggagaaagagagagagagagagagagagagagagagagagagagagagagagagagagcttagttcagaaactgagtcaagtatgtgatgtgtatgtgtgattatgacaaatgttagcactactggatagtagagacaaaagaggctgttcaataaggaatggtttcataaggaggtgatctccttctgtagcccaatctacacttgggacaggtgctgagattacagatgtttaccactacgcctggtctagtaattctttgctttttccatctattttgtgtgcatgatagtggtactgctgcacatgtgtagatgtcagaggacattttgtaggagtccattctctttttatgtctcttgggtcccagggaggatcgacctcagtttgttgtggttggtggttaagtaggtttactcgagcaatgacgtttgttttatttatttaaaatctatttatgatccttttgtgtgtgctcacgagcataaatgtgtcacagtgcacacgtggaattcagactcttatcaagtcatttcctgccttccaccatgtggatctcagggagagaactcaggttgtgaggctatcctgagtcacatccccagtcgtagcaattatgtcttaaccctaggaagaaggtattatccaaattctcactttacagatgaggctagcaagacacgggggaacagtcattttgtacacgtataaacttttatagcttggaagatgaacgtgtcttataaatgaaaatttttctctgtcctgtctctcaactccccagcccatttcctttttttttcccttggaggagaccatgggactacaagtgaaagaactacaacttccaggagccattacgtaattcacaccccgcctccagcgccgctgcctgcgcaacgctcactccttagaactacatttcccaatgttcctcgcgcggcacgtgactctctgtcctcgccgcgccgagagcagcgcggagagctccaatttctctgatctggtcctagacccagccccggagttagaattaactccaccatggaggaggctgaccgaatcctcatccattccttgcgccaggcgggcacgtaagtacgcaacccccagtcgcctccaattgctcacatccgggactccaaatcctaggacccccattacccgggaaccttaaaatgaagaccttgacacccaaaggcccaaacttacaggattccgaagcctctcctcctcctccctgcttacactctaacatcatgactttcctaaatactttgatgtggacattgggtaaaacctcgaggactcagacaccttacaaactgagacctgcatatgctgggatcctgatatctagaggttccaggacacccacaccaggaaactgataacacaggagtctggcacccagagtctccagaattcctgagactggcaacttgatcttcgaacaataactcctgaaactcccaggacttatcaaaataccagggccctacattctgacagtagcagcacttggtaacacaggaacacaaaggatgcactatttgagggacctaaaagtccttgatgccaaaatttaggatgcccgattttttatttctatttattgaccctgacatttgagacttctgaaaactccagcctcttcctatgtagctttcccaaacctcgtagatctaggaggccttgccatgcaaagaacaatgtcctggtgcccagaaatatggagactgtgccacttggaccattttcacttttgcagatcccagaggttggaaactttgaagtgtaggggagtttgagacttttctgaattcaggtcaccctcattcaccgaggtcttaggactaagtaaaggtcatagtcaccagcacccaggatctgttgaagccttggttgttccctgccccgacctggattctagagcattccctctctagaagtctgtactttgtttcctaactactcaagcctggtgctttcctttttagggcagttcctccagaagtgcagactctgcgagctttcaccactgagctggtcgtagaggctgtggtccgatgccttcgagtgattaatcctgatgtgggctctggcctcagtcacttgctaccaccagccatgtctgcccgcttccgcctggccatgagtctggcccaggcctgcatggtgagtgccctcctcccagtgtgcacactgtcttccttcctttttcacaaagtcgccaagttctttgacacttgccttcttctctgtccctttgtatagctaaagctgctgcctctgtagccaaactgtgtgactagttcagaccctacctagttcagttcacgctttctgtgtgaccctaactgttctatgccttctccttatttgtgaaatggagatgatataatgagcttgtgtggattaaatgagctgattcggtttgtgctcaggctaatgttaacagccaccttctaagcttgacatcaaaatctcactccactgtcacatagtaggccatttacctatttattagggctgaaggaagaccttgactgggttacattctcctaaataaagctctgactagctctgcccagacctcatgggcatcctatcggacctgcgattacttgtttcatcaatgggactggggaagaggaaggtcattgtctgttccattgtattgtgcttctcatagttccaaaaatgatgctctcatgaagcacccacccctcttcacttcagagctgtgcccatttactgtggtcaagagcagagaggtctaccttttcttgtagctcactgtctttgcagctttgaacctgccttttaacctttttggtcctcagtttctctgtgttggctgtgtgtgaaagccaaagtgaaccagtgtgtagctcagtttcagagtttgtacttcatatgtatgaggtcttgggttcaagtctccagcatgcacaaagcaaaaactgagttgctataggaatagttgatcacatactttggcagcctgtatcccagcagcctgtggctatggagtgattgttgatttttccagaatactcaataaattgctgtaagtctatggtagatctgtagagtatccatccagtatactaaaggggacaggtcatcacagttgttcgccttggaccactgtttatgcagttttggtctgagcagtaaccctgttggctctgcctatcctgctcattactctcaggtttgcctagctatcaagagctctcactttcttctgtctaggactctagacatggtctagaccatggtcccatgaaactgtcagtccacccctgatctgggaccatgttctggaagatggccttcaaagacgaaagaaattatgtcttctactgggcctgaaaggaactcggtgggaagcaccaaggtggtgggctgaggctttctctgatgttccccttctcagtgctgtctgccttttgatcttgtggctcctgttgatttcattgtggagtagagaacctggtggttaagggatatatatatctatatatctctatatatgtatatacatatatgtatatatacatacatacatacatatagatacatacacacatacatacatatatacacatacacacaaatatatatatatgtatgtatatatatatatatatatatatatatatgtatatatatgtatgtatatatatatatcatatgtaattgtccagctcagtagccatggtttgccagaacaaccagaaagtgtctccaattcagcactgtgtgttctggtgtcttcctctgtatataccttgcttctggtgtctatttctgtacctaagccacctctctctttttggcatctcttactatatataggtgtcttagtatgtgctctgttgctgtgaagagacactatgaccatgacaactcttataagagaaagcaattgattgaggcttacttacagttttagaggtctagaccattatcatcgtggcaaggagcatggcagtacacaggcagatgtggtagctgagacttctacatgtggatcccaaggcggcaggaagaaagactctagtcttggttggcatgggcttctaaaacctcaaagcccacccccagtgacacattttctctaacaacaccacaccttctaaccctttcaaatagtacccactcccaggagaccaagcatacaaatctatgaacctatgaggcgattcttattcaaaccaccacaacagcacactcctggaatgagttttcgtatcagtcacaagtctttgattgcagatatcaaataaaaaattcctaaataacgtagcatagaagcaggttgtttttatacgtgtgtggccatgatcctcggatataactttcttttgacagaatgcatgaatactcatcggaatgacttcttttgagtcaatattttgtaccaggcactgtggtaacatgcttataactcaatctttgtgacaactgtctgagatgagtacttttagtgtcattttgaaagatactgaaagcattttacttatttggatttatttttttttaaattttctgcatatgagtgcttttgcctgagtgtatatatatgtgccatttgtgtgcctggtaatggtggatgtcagaagaggccatcacacccatgaaactgaagttacagatggttgtgagccaccatgtggttgctgggaacagaacccaggtcctttggaagaacagctagtgctcctaaccacagagccatgtctctagccactggtatacttttcttttcacatgacagaactgaagtacagagaagtattggccttgggtcacacagtcggtaacatgcagagcttgagtttgagtccaggaagtttgctttcagggtctgtatgtctttgaacctatcttgaactcttgagagtccgtcctttctggctgtgtgtttgctgatatatatatattttgtctgttgttgttgttgttgttgatgatggtggtggtggtgacgatgatgacgattgtgttagtgctagggatggaacccagggtcttctcatgttaagcaagccctctgagccacatcccttgttctgtttatttttaggcactgcttatataatagattgggctatggcttccctctcaaaggctctggatattgctttcctaagcgtcagtgctctcttgacttttcacagggcagagatcctgtgtcctcttgtggcctttggattttgcgtcatatttcggtagcaatgctatgctttttttggttttgttgttgtttctgctttttgagacagggtttttatgtatagccctggctgtcttctgagctttaacgtctggttttttgtttgttttttgatcttgtaatactgtctagggtggctttgtagctgtcactggggcctggataccttggggatgcaggggaaaagtgggagggtgatggctagtgaaggcgacagagccggtatggtagtcacagggcttccagagcaggaggcacctccctgcttggcagatgggggtctgtttttttttttatcctcagcatcattatgtgcttatacttgctaacccccaggacctgggctatcccttggagcttggctatcagaacttcctctatcccagtgagcctgaccttcgagatctgcttcttttcttggctgagcgactacccagcgatgcctctgaggacgcagaccagcctgcaggtatggggtcctataggactggggaaatggactgtgttcccagggtgataggggcctgagagaagtgtcaggaagggtagggggcagggcatatcttctggagaattgggtggatcagaggtcagagaacagatggacccaagacaagcagcgtgaggactgggttcccagcttaccctgtccctcgcacactcactaactccagtcttctcacatgggtgttcttagtggtctccaaatgtaccaggtgagagctagcctcaggatattttggtccctgaattattcttccctcagttctcttcatagtcagctccctaccaggtgagtccaaagcatggggcacatgctgctaaagatggctataaacgccacccaccctggaactgtaaacgtgtttaaaatgttaggagattttttttttttggtgtgacttggttgcactgttcttgagcatgaacttcgtagatgacaacatcatgcccaagtgtcaaaaggttaaatctatcctcagtgttctgtggcttctgctctgttatgtcaaggaggtctttctctggctgttcgttgagacgttccggctcccctttaccatccttctctttcctgcttagaatagatggtgctagtggtcctattcttgaagttccttttctgttctcttgctgactcatgaagatggagacctcattttggttttcctgaggtggtctttaaccgggtaactggtactcctatgtagttaacgctcagtgagtgctgagtggctgagaatggtagttgaatccatctgcatctggaggtgagggatcaggtgttatggctggcttcccagattggtagcatgttactccttccctacccacccccctcgccccctcataggtgactcggctattttccttcgggccattgggagccaaatccgggaccagctggccctgccctgggtcccacctctccttcgaactcccaaggtgcagcgcctccaggtgggaatccccacctccgtttggacttgtcccctccttgccttctttgtctgtcatctgtttgatcaggttgttgtccctttcattagtacctcattctggaggcactgactttgctttccccacagggctcagccctccagcagccgttccactccagcaggttggttctacctgagttgaattccagcggaggtgaggatgcagctgtgtgaatctaagcgaggaggggagagccttgtgtgaacactggtatgcgaggacaaatggctgacactgtctctgccttcagagctatgggagttccaggccagtcccctgctgctaccagcccccacacaggtgccccagcttcaggggagggcagcctcactccttgaacaccatgccagccagctctgccagcatgtgaacagggattgcccaggagatgaagaccgggtgcgctgggcatcccgcgtcccatcccaggtaccgcctgagttcagctctccctgagaggctcctgtttctggcggctcctgtttgttctctgcatctcgtttccccccattctggccctctcttcattgcttctctgtgtatacctgcctggctccctgcctgaaagagtggataagaagtgcagaacctacaccaagcccttcctgcctgctcttcttttctgaaaaatgggggtgtagagtagtgaccttgcatgagttttacctgggactgttgggggcattccctgtggggacagggcctgagcctttcagtttgtctgactgtgcatttgtcagtgattctcctttgtctggctctaggtgactgcaccatctcctcctgtcactgtcttgtgctgtagttctctgatgcactctatcaacctttctgtctccctgtttgtagccttcatctttctctgtctcacttttgcctatttcttccttttctttctccgcctcagtccattccatgtctttctctgtcctcgcttcctccctatctacttctctgctggtctcttctttctaccttcttcctgtccacttccagttttgcctttctatctgtccctgccgccctgattgccatttgcttattctttctccctccctgcccagtctgcttttttggggggtgggggtgggagtgggggtgggggatgagatttgagacagcgtctcactagataacccaagctggcatcaaaatgtataatgcccttgcttctgcctcctgagcgccgagactaaaagcatgtgccaccacacccagctcccgtctcttctttacacttacaggaagtttgatgtgtaaatatagaggaatcgctctaatgatacttgtcttctagcccttcttttattctcctttagcttccccactgtggttttagagaaaatctcagagcttggactacagtttcatggtagaacctggtttcgtgttcaggatcaaatcctagcgaacccaaactgtcacataatttcagctctgagtactcagatgtgtcattactcacaggaacatttttgttaatggaaccactgtactgtttttatactgaatgaaatgaatgatttcttagcaccatttaatactgacacagtctctattgttaactctaatttctttatcttcctgtccccaactctagattttttttggcctggtactttttttttcctgtgtctatgctgtccatatctttctgtctctttctaatttgaaagctccaggctcagtttcctctctagtcactttcttccccagggtcaggggtgactgggtagagaagtgcagctgtggagagagggcactcctaggccagggctgggacctacagtggtgggaagttccagccctagggaccagcaggtatgccttcctcttgccctctgtcctttccaggaggattcccgggctccacagcagagactgcacaagcagctgattgaacatctgcgtcaaagctggggcccacttggagccccgacacaagtccgagacctaggagagatgctgcagacctggggtgctagggctatgactggtgtgcccaaaggctcccgcttcacccattcagagaagtttaccttccatctggtgggtaggctagagtggacagggcgtgtccggattgctttctttataaataccactgttactgacagaggatctggtgcccactgagtaggtcctctccaactaggacagggtgtctagatggctcccctagcttcttgagactttagtggaggaaaggcagataggtgggacttgtgtaagagtgtgaagtgctcctagtacaaagtccatctttccttgggctttcctttggaaattttttccctttggaaacatcttttctccttagacactcatctttcttgtggacattttgggcaaggtcgttatggagtcagagtagttatagggtcagggtggacatagggtccgggtggtcaggtgattatagggtcatggcggttgtaaggtcagggtggtcagggtgggtatagaatcatgaagaggttgtagggtcagggtggatatagggtccagatggtcaggtggttatagtgtcatggtagttgtagagtcaggatggtcagggtgggtatagaatcatgaggttatagggtcggggttgtcagggaggtttccttgtggtcaggcactctaatcagcagttacagatggcactttattctcttgtagtaacaatctgaaaactgtcagtggttgagtggacatgggtacagtgcttgagggtgctttgggggtttgaggctggcctgggagggatagaactttgtgtgatagtcaggttgctttttctacccataggagccccaggtccaggcagctcaggtggcagatgtaccagctacctctcaaaggcttgaacaggtaaggagaccaagacagacagacagacagacagacagacacacacatagagtcagctgggctattgcctgtcttctggacttggtagctccacctagactggcgtgtgtttctcaggacacacgggcagctcaagagcaggagttagagtcccttcgtgagcagctggcgagtgtgaaccacaacattgaagaggttgaagctgacatgaagaccctgggaatcaaccttgtgcaggtgaggggcttagagagggacttgggctggaccaggtcagaactggggccttgagagatgatctgacatctagagatctatagatgccataatcgtttatggagcatcctagagacctttggtattgttgaaggctaaggagaacttatgcaaagaaacatgtagggttgatggcttgctagactataggtctatatagactatataggcctataggtctggcatcagtcaggctttgtaggggaacataggagctatgggcatcaggggatcaaggaggatgtgtaggggcagggccttacagggcttctcagagcctctggctgtcagtacagagctgaagatgccaaagcctgtagtaggtaggggccttggagttctctgaggtcttgagctgggccagggccataatgggctcactgggatcgtgggctgtgtgtatgactgggagcttggctgtgagtgtaccaggtggaaaccgagtgccgacaaagtgaactcagtgtggccgagcaggagcaggccctgcgcctgaagagcaggacggtggaattgctgcctgatggggctgccaacctcgccaaactgcaggtgggctggggtttggggttgggctgagaggggtgggtagatggatccagcccatcttgacatatccttgactcctgccagcttgtggtggagagcagcgctcagaggctcatccatctagcaagccagtgggagaaacaccgggtcccacttcttgctgagtaccgccacctcagaagactccaggactgtagggaggtaagtggcacagtgggctgagtgtagatggactgccctgatagatagggagggggctgagggagggggctgtttctgagctctgctcactgccttctgcctatgggttcctgctagctggaatcgtctcgacggctggcagaaatccaggagctgcaccacagtgttcgagcagctgcagaggaggctcgccggaaggaggaggtctataagcagctggtaaggcctactttagggccctgggttgtaagggtggttgtggtatagggcttgggctcacgcctgccatgttcccacctaggtgtcagagctggagactctgccaaaagatgtgtcccggctggcctatactcagcgcatcctggagattgtgggcaacatccggaagcagaaggaagagatcactaaggtatgatgtcactgtggctctgattgatggctcatgtaggcagacaagcataggggtgatcacacagggactttatgctcactactaggcagagctgttcaggcacactccaacacataatagtcaccccaacacagcgacatgggccctgactggatgtaagtataggcacgtgagtgttatcactgatcagctaccttgcccaagatgtgcactgatagttaccctggtttctaccagatcttgtcggacacaaaggaactgcagaaggaaatcaactctctctctgggaagctcgaccggacatttgcagtgactgatgagcttgtgttcaaggtatggagcaggctggcctccgggagggtggaggcgggactgagttgttgcctgcccctctgtgagtcctttaggtgcactgttgcttggggcctagctttgctctgtggaggatgaaggcaaagtactagtaaagggtggtcttataggggcatagagtagtggaaaagggggaatggcttgctgatatctcggagatcccctttgtcttatcaggatgctaagaaggatgatgctgttcggaaagcctacaagtacctagctgccctgcatgaggtgaggggagccatgtgcctggtgggttggctggagagggccagcataggtgcaagccttgtattcttgctgtctccagaattgcagtcagctcatccagaccattgaggacacaggcactatcatgagggaagttcgagatcttgaggagcaggtgagacctgggactggtaaggggaatggagacaggccaggggatagttccttgttttgcgctgagagtctttgaaaccagacaactaacagctagaggctttgccttcgtgcccactgtgcctgggacctgaagctagccagtagcctactctgagccctggcttttagcttgcggctcctaatgcctcccagagcccatggcagaagttgctgctttaggtggagtggagggaaggacatacccagaagcccagtgatgggaaggaacaggctgctgttacgggaataggaggagcagggaggagttcagtagaggggcagcctgcaggggctgaagaagtgtgcatcctgttttcttagattgagacagagatgggcaagaagactttgagcaacctggagaagatctgtgaggactaccgagcccttcgccaggagaatgctggcctcttgggccgggtccgagaggcctagagccctgatggatgtctcctaaccacaggcaggaatttggggtgctggagacagtgctgaggcacctgttctagcactctctttcatttggtatccgctttctcctgctgggatcttaaacccagctgtctgcttatatgttcccatatctgatcagggtgattgtccagctgaccacagtttattggatgggcactgggggccaggggccttggatcccaaataaaagagaagttcttctgtgggccacgcttaggcatggattggggcttgtgggtagggaactggggtcagtggcaagtgagacgtggggtacatcttggagagtcggtgtgtattcatggaactcaggagatagagtggaggggctgcatgtgtgtacgtgcacacgagcgtgttctgacaagctgtgtctgacttgtattttgggcattgcttgaggctgcgtatgatcagttatgcctgtgtggtttggggggatgtaattgtgaaggttccagtgctgttgctgtgtaagggtctgtatatacacctatgtgtgatagtgcccgtggttccagatgttgtgggtgagtgctttggggtgtgagtcagtaggactgcagtcatgtgtgactgcatgactaactttgaaagttcacgaatgtaccaaggcaggctcttcatgttttagggtttgggttgagtaaatattaggatggtgtctgtcatctttctgcttggcagtggccaaggcagatatgtatagctggttgtgagggctctttgactggaaagttcatcttggggctaggttggaactaggggctaggctgggattggcacccctctcagctgtaaggcagatgatatgatctaggagggcagctagatagggagcagaggccctgatagcaggcacatcatcgcccggtttccataggtacacgtaggacttgcctccttgcccccacagcctcagtctcatggttttggccccctcccccgcccaccttttcttggttttgaggtcaagggcagggattggagcacttgttggggcgttggctcctcttcttgcgaaactcaaattcatctacggtccacactgctcccttctcgctctccactcgcacaaagcacttgtgcaggctcaggttgtggcggatggcattctgtggaagggggaccgggaccccagtcagggacagggttgacagtcatcctgagtctgagactgacctgctccttccccacatgtctagccccaggctaaccatccttggagccatcccagctgccagtgtgtacagaggaactcaccttccaggtggcggggtggtttctgaagtaggcgaacatgcgagtaaaccaatggtagatttcattgagtgtcctctgcctctccggggcttccaggatggcctggaagttggagtcaggtggaataaggggcatgttcctcagggttgtggctgagggagcagcctactctcggccctctgagctatgatagctttgtaattgtgggtcaaggggaaggagaaagaatagggtgaggcatgaggtcaagggtgatgttagagatagggtggacaaaggaaagggtagtttgtagtgttacagtttgctttgcactgacctggcttgcagtagttttgggttgagggctagatctgaggtgaagctatcaagaaggatcacatcttggggctcctcagagctgaggtttgttaatgggtgaattctgctcttggtgcaatgtaggaggcaagcactccccaccacaactccccccctgccgcccaccagctgctgggcctctattgccctgcttacccatcggataagggtggcataggtgaaagggggtcgcatattgtggtacttgaagtagtccatgttgtggaagaactctgcagaaggttggcatagatcagagcctttggcctcctcaccccctaccccacctttgtctgcatcaggaatccaaggtctcaattcctaccactagcaccaaggggggagggacagtctatgctcacacatagtactgtttactgagtacccgccgtaagctgtgtcttctttgcagtactcctgccaaatagctctcctcactttaaaaaggagtcaagtaatttgtacatcaaaggcatgtaagcagctcaagtggcatagccagcctgacaccaaatatctatggtccctggtaaactcacaacccaggcctgacaggtgggagagggttggttagcttggttgagtgcacctgacttcctggaggtggggacggaagagagggctctttggactcacttggccaggctcctccctcatggtgactgaatgaagtagcagatgccaaataggtcaggcctggctccaatcccccaaaacacggggcccaaggctatgcatttataacagttgagggcttctaagcctaataaactcaggtgcagtttcctcccagctcttagtgggggtgaggggggtgggggagctcctttgtaccccctggcactggggtgtggactccactgacctgggaaggaactattgccatggcttccccagaggtgcctccgcactgcaaacaggccgccgtctggagcctcccgaggagcagaccaggccgggagcacactgccctgagtactggtggctacgatgcagcaagagctcttgtccattgaggcctgaggggttgggaggggtgtggtaatcgagacacttaagcttgtcatttcattgtagcctttcaaacattagtttgtattttcttattagttaaacttgtttttagacaattttgtacatgtatgtaatacatacagaccactttcaccctatctcctccctcatcgcttatcttccttcttctcattcctttcccccttcatccatgtctatttattttggtcttaaaattattattgccattattattattattgacagggtcttactatgtagccctgactggcctgcagctctcagagatgcacttcctctgcctcctgagtgtttgcctattcattttcgttttgtctgagacagtctcactatatatctctagttggccttgcaccttctagcctagttctacctctggagtgctaggattataagtgtgtgccaccacatctggcttccactttttattttatgtatatatatatatatatatatatatattttttttttcttccagacagggtttctctgtgtagtcttggctgtcctggagctcagtgtatagaccaggctctgtagaccagactggcttcgaactcacagagatctgcctgcatctgcctcccgagttctaggattaaaggcgtgcgtgcgccaccacactgagtcttccattttactttaaaaaatgattgcttgcttggttggatatttatgtaggtgggctcttgctctgtagtacaggctagtctaacatgtactatgtagcatgtagtacaggctagtctaacatgtactatgtagcatgtagtacaggctagtctaacatgtactatgtagcacaggatgggctgagattactgccaagtcagcttgcattttattttaggtatacgggagttttgcctgcatgcatgtctgggcatcgcatgtgtgcctggtacctgtggaaggcagaaaagtgcattggatccactggaactggagttagagatagctgtgagcggctctgagggtgctgggaaccaaactctggtcccctgaaagagcagcaagctctcttaatccctgagctatctgtccagttccccaaccccactttattttacaatttgcatttcctgatttggtcatatttctatctgatttgtatgtgtggtgtgtgtacacatgctgggattacagatttacagtgctgcatctggtgtgggtgctggcatctaaactcaggtcctttttctgtcagaggtgttcaagacagggtttctccgtgtagctctggctgttctggaactagctttatagaccaggctggcttccaactcacagagatccacctgcctctgcctcccaagtgctgggatcaaaggcatgcgccgccgccaccaccacccagcaaaactcaggtccttatccttgtatggcaatcacttttccctctcaagtttctccccaaccgtgtttctttgtgttttagaagagtcagggtgtctctgtgttgaccaggctggttttgaacttgagggttcaagtgctcctccttcagcctctccagtagccaggactacaggtgcatgccactgtgtccagtaaggtcaatgcttttgagaagggcaccaccctatagtcaattgcaggctctggtggagctctgtaaagcagcatcttagagtacaggcatgagcatgcgatgaagccatagatgctagggctggggtgagcaggggcagaattggaatcccctagcaccaactgtgaacctgggagcatcaactaaatcttcctgacctaagttgtcctcatttgtgcattaggatgatggtggtagctacctctgttatagtataagactcatatcagcctgagactgggtatgtgaaatgtgtggtcacacactgttcgatgttctgagcttatcttgaaatttgaacataaggccctccattttccttttttgcagtggccctgtgagttcactgccttctgtatgtgccctgaaaaggcagaatcataatgttttggaggtcagaaggtttgtaagcagagtaggcgtgtctttggatctggcatattaattaggtgggaatggtctgtacagggcagggcttgcatgtgagaagaagacatttggtccttatgggctcctgtcttgcccctcagcagttgaagtctgctgcctctggacttggggtactcaccacagatggagccttggccagcgccatcttcccagccaggtgggcctgcatagctcccagcttctccttttccagctccagctgtggggatgtacaccaaagtggggcttccacctggtcgttctcaggcacacttttgcccatgccttccctcacagggtcctccctcccatccttctttcccgcagccacaccccgcagccacaccctgcaggcattacctgctgctccagagactgcaccacttctctctggaggaggcactgggccttgcctttctcatccaggagatgatctgcttggcagtgcctgagtaaggagaagattccatgtagctgaccatggtgggtcaggcctcttggcttagtgtatcagttagggacggcctagaccctttgggagatttctctatgctcagtgctcccccccccacccccttgcttgccttaaacacatgtgcttcagcaactctgggctgccaggcctgagcttatttaccctttgagtctggccaaaatgctgggatgacgttagacaggaggtatgcaggggtatggcatttcaggtgtcaggcacagcccatgcaaaggcctggccacgcaaacacgcaccattgccaaaagttaggggtgactagcaagatacagaaggggagggacagcagatagagagcagagaggcaagagctctatagtcatctagaggaacagaaattggaggatcaggaatgtgttttgtgtgaggggaagcgggacaaagcagttaggcgtgtgggctctggaacctggctgcctgtgttcatattcaagattcatcacttaggtcctgtgtgagcttgattgacccttaattctctgtggccttagatccttctgcgtgtaacaggaaggtaactatgagcacatacctttattattatgtctcttcatacatgcgaggtaaactgggcctagagacccataacttgcccaagatcacagagccagggagggatggagtctgaatctttatgattcttattatcatccattgagaggatggtgagttgagacgtgaagcctagacagcagaactctgtgggtagggtcaggctactcacttgagaaactcttctggctcctcgaagaccttctcacaaccaggccacttgcagactccatttgccagcagtgggtaggatccttggggtgcagccaaaaggttgctggggatgggagaatatgggatgtcagcagaggaataggtgcaggggtggggtgaggtgtgggcaggggccgtttcttgccagccctgccaactcacctgtctttcctgggtgtacccgagcgtgggaaggtgcagagtagagctggctccctggacacccattccagactggccacattgatccctgtgggtagagacagggtacttctggagctgcaggttagactctacagcttgttccagaaggcccctccccttcctgagccttgaagactctgtctcatagtactctgctgttcccacagtcaagggcttctgacataacagcctaaagatgcccattggtaagtgatggcattttgactgataatagcgatttgtggttttttttgcattctatgtcttcaaggttctaagtctgatatttttttttttggaggttggagtttccgtgactcttaagacccttctatacctccatagggctataattcagaaaagtttacattgcacatgctcaaagattagagaacttggagatactgtgaaggtgttaccaggtggcaggccaggccgggccttgagggagaagaccccagtggcagcagaaggtggtgggaggctgatcatggctgggttgtccagtggacgcacttggagcacaggggtctgggcatgggcatccacagtggagagctggggaacacatggaccatggctcagcggggcttggggctctgctccacagctgtcctctttgttccctcctcccagcctgctccgattccatacctgatgcatgaagtgtggtctgtcctggagaagggcctgtaggtggggtgagggacctagtcgggccccagacggtgccaccatgactaggggcactgtaggcagctggagagagaagggagatgccatgagatgccatgagcctcatcttaatagttctgtgtctcattcattagctctttactaaagtctcacacggtagcaacaatggaactatccagttcacatcagtggaatctgaggctcgtggagagtgaatgtatcaaggtccaacagtttcaaggggtagagctggccccaacactgttaccttcttgggccccagccatctcgtcacagtgggatgaggatacatggctatgtccatggaatcataaggtctcctatcgggatgaggattgggaggggtggggaaagccttgaatctctgaagcctggagagtggggattttcttggccctgcaatatctgcataagtcagacttgcctgggacccataaaccacttcctgtgccccagcccccccccccccccccgccacatgccacagtaaaggtcgacacctataggcccaagtaccccaccctgcttaccccattctgggccccgggcctcacctgcagctgggatggtggcagggggttcaaggaagaagaggtgtgggccccacttcgcaggtcccgaccttggaagggtcccccagagcccctggtccctagaagttctgagcccttgggtgcagtcttccagcttggcaagactcctggggatgggccaagggccaaggaaggagccataggcttggctggcctagggttgggcattgggttcttgtcagaggcaggctgcagggataacagtggaatggagtcacatgcattccaggggtggtgcaagatagcctcataactacacctctggtctgtcttacatacatatatgctaccctgacagcaggaacacagattgatggatatattctacacatgcacatgtccagcacctcacttgcttacatacaccataccactctgtcgtgaatgtggggtgatggggagttggtttgtgggaccctccagtaccccctgcactctgtgcaggccacatagtctttgctgattctactggggcttgtcttggactctcttctcatctttttattccaatgacttgggcatagcctcacaagattcagttggatgctgtgagcaggaaggctccagggaactgtgctagtgggaagtgtactgcaatagtgaggcgagtggtgttgctgctaccaacctggataacggcagaggagctgctgagatgtgactgtcttccaagtctcgtctgaaggcagagtcaggagaagttgccgggagcttggatggaggagatgagagaaagggtcaagatgatgtctaggtttttggcagaagcagctacaacaggagcattactggagatggagggtagaggatggaggagcagagtatacagtgatagtcagatgtggctaaatgcaaaggtaagcagtagaggcagggaagacttgcagctgaattcagtactgcagagctcagggccacagcatgggtctgtcttctctaagctttcttctgtcttggaattggcgtggcaggtgccaggaaaaaaagagggatagggttgcttgattgagggtccctgggcgctcctcaaactagctccaatctctgccaagcttggaagtccacttcttcccttagccatactgcagtcttctgatttcctcttcaaagctctacatggtgacccaggtccctgtgctgagcctcactaccttacagtcccttaaaagtgtggctttcgtttttcaggatcctatacttccagtcagagagggaaccagatcttgaactgactatagaattctaccctgattttaattaagaggatagccaggttcagaattctatagtcttctcatggcctgggacctccttttctttttagatagggtttcttgtagtctggaactccttatatacccaggctgtccttgaactccttgtttctgcattctgagtactgggattataaaccaccatttcaggctgatactgcctcatttttctctaggaagtatatatatgtacattttccctgctgtgtttgtgtgtgcatgtgaatatgtcattctccgttctactatatactacatgtgttgggcatgtagcttctgagaacagcctgggggaagcacggaagggttttggaaggcaattgcatcttctttgctatcatgtctggggcttatcagagttgagagatttatatgagaacctaggtattaagactagtgtgtcacgggctaaaacattagcatgaaaagaggagtctgggtctgtggaagctgagactggcttcctagaaccgtgatgcgatgagctgaaagactgcaggcaggcagccatgaggtgatgctcctccaagaaagaacagcaaaggaaagcatcagagatgagaaggaggccaggacttacaggaggaatcaaccctgctgacgtcttcatcttggtcttatagcctccagaacgctaacatgataattctatgctatgtaagtcccccagtttgtgatacttcattacagtagctcaagcaaatgcggatcaggtttggtgagtagaattttccactatattggcttaacccatatggctggaccatggtcacttttgaagtgctctttatgtttggtcagaacttataagaaatctcctccttaaatacttgtggaactggtgtgactgtgtgatgcatcagtacattctcagaaagaggacctgaattggatatggtctgtctagtggtactagggacctggagggctgggctggccagccagcttcctgcactgtctgttggggcgttcctgtttgactgtttcttagaagctgtatggaggttgtttctgggacatagaatatgttttcctatcggggtctacatctgggccctgttgtcacaacctgaacttggccagatttttctgccattgacgtcatggcggccggatgcattgggcttcatcggcaacaaggaggaagagaagggggcagataatctaccccacaggtttcgttccgagaagtggctagtctatcctgtagccggataggcccaggtagggtgatgtgggtgctagcggatgtggtaggtgacgtccatctggctaccatgcaaaacccaagttctatcgattctgtctttcttggatgccagaggggcccaaggttggatgcttggtgagtattaggcaggcctcatggatattgagacccccttgagtcttcaaatgctgtagtaacagaaactcagaactgtacgatatcatttctcaaagccaacggattttagaatctcaagaacacagactctgtagggtgcatggatccaccttcttactgtgtgtattgatgtcccagagcccaaagaaatgggaaccacctaaagccaggaagcttaaaactccataaggcctcttgctggctctggaatgtcagcctccctccctcctgagctccattatgacagaggattggaaaaccctctactgtcctgatctggggtcaggctttgccctcttgggacaaaggggccttcctgtccatctctgagcccagtttgcccttctagactgggaagagtatgtgatggaggaaggctggggtctttctgtcctcctgtctaatttgggacagtaacaggagccatcttgcaaagttcgtacatacagaatgctgagcaagtgtctatgactgataaatggtcacttacatatggctccagacccgctctcctgggacaactttccccaaattataacattcttccagatacagggacaagaggaagaagacatttggcctggccctcatggaaagagcacaccaccaggctttttggaagggccccagaatggttgtcccaaggaatgcagtatgaactctgagggttcatacttaactgatatttctccatcgttactagtgttctttggtccgctaggacttctgactcatggggcccagaacctcacatagaccagagcttgtgagatttggccccatgctatggttatggactggatccaactcatgaggatgtagaagagggaagggcacctcaggtctcctgttaatggcctcctgggtcctgagaggtaaactaaggcctgcaatgtggaattgccaaagtcaaggtcccactgagaattctgagatctgctcttggatttaactctgacacaacatctctgtgaggcctgggggtgggggctgctcatctctgagcccagtttgcccttctagactggggagggaagagtacgaggtggaggaaggccagcatctttctgtctcgtggctggggtaaatcttatggagctatatagccgtatgtatgtatggtatggtatgagatatatatattgatatatatatatatatatatatatatatatatatatatatatatatatatattgagatatatatatatatatcatatgtgtgtgaatacagatatagaagagatacagatagagaaatatatagagagaaacatgagatggaataggaatcaagctcatagagagagacagtgagagcagtttagaggaaaagtgacagagaaagaatgaacaagacagagacatatacagacagacagacatgcagagacagagagagagggagtgagagaaaggactgaaaataatcactggcctctggctggaggactgatgctgctaggtgccagagacacccatggctggtattgaattgttttgcaaagcaacatcagaaaaatagtgtgggctttgtacaagaataaacactaaggagcagattagagtagaaaaccgtggcagagacccatgcacagagggaatggaatttgtgatgaacacaacatttcaacatgaggaacagtgcaggacagattaacaaatgattctgagacaattaggggaaaataaagtgactgggtagatagcccactttcccaccaatacctccctgcccacttgaaatgtcgctgtcatcagacgctctagaataatttccagacccactagagagatacgttttaatgtctatcattgttgtttggccttgtgctgagcacctaccatcattaataaaaataatcctcagaaagatcctctgaggtaggtactgttataatcatcacagtacatacgaggaaatggaggtacagagaggttaagagcctgggtaaaattcacacagatgacttgagttgaggctaggttgttccagacagtctggctcccatacccacacttttgacctctgcagtaaatggaaaaaatgaagccataaaggagactggaagccaacatggggtgaacagttatctcattttcaagtgcaaaagacttaaaacacaaaaccatacacagaagccccacaagaaaagagtaatctaaagacctaaaagacacatgcattacaaagcacaataaatagggaaaaaaagcaagtgattgcccgccgtggtggtgtatgtcttctatcccacttctcagaaggcagaggcagatggatgggtctttgtgagtttgaggtcagcctggtctatacagtgagttttaggccagtcagggctatagagtgagaccttgtctcagaagaccccccccccccatacaaatagggctggagagatggctccatgggtaagagcactgctgctcttgtagaggaggtagcttctcattttcaagtggtaaaaggcttttaaacacaaaaccatagaaagaagccacataagcgccagcacccacgtaaccatctgtaactccagtcccatgagatcccacaccatcttctggcctctgtgggcaccaggcacacatatggtgcacatgcaggaagaacatgcatgctcataaactaagtaaatgaatacaattaaaatacacatacacacaaatgatgaatttcagggaaatatgtgtcatatacatatagccaatagttattatcctttctaaattaagagctattagcaattttgaaaaatcatgagcaatttagtaggatgaagaatgtgatcataaaactctagcctacagagcacaaatggtcagtggtcattaaaagtaaccaaaatgcaaaattttaatacttgtcatttttcttatgatggggaaggattaaaaatggtaacacacacctaaaattaacttgaatagaaacaacagaaaataagacaacgttttggaaaagcaatttgtagagagggcaaaaccccttaagatgtacaccccttcttccccagctactccattttcaggatccatggagtcaggtatggagttttagaatcagaagaaacccaaatatcccaccatcagcacttaattcaggtaatcaaattcatggtgatgtgaggacagtcacggcagacataaaagatcacgtgttcgttattttagtatgctacaaaaatggtatcgcttgaacagagcagaaacaaatccaatctatagcacgattctaatttgtttaaaaatgctaatagcaaacagtgagaactcaccatataccaggcacagtgccacagcactaaacctgcagagaccagctcaccctcgtcctgaactgcctgctctccttgcacatggattctgctcacagtcatatagtcctttgctaaactgtggctgactgagggtgttatcttgcgtgacacaagcagaaggtcagttaaatgctaagactgacctgacagctcacaaacctaagacacacagaactaatgcccgttcttggaaaacagagctcttaagccattattattaagcgccagttgtgtacaaatatctgcgctcaataccgggtgcaaaagcagctgaaggaagatgagccgagagtcagagagcgggaggaaagaaagggactgtggctggccaggctggaagagacagacaggcatatagtcagagcctgggaaagagacagagactgggcactgatggaaggcagagacaggcaaagaagcagggggagacaggagaagaaatggaagacagcaggaggaaaagaaacaagagatgcacttctagtttctagttatagctggacagcatcttgagttgcctaaagctccggcattcctggagaccagcagttgatagacatatgttaaaaaaaaatcctgtttatctgtgcatcaaacaatcaaagtacttctttttgcccctgtctaaggaccaactgctccacctatctggcatttaggatgaatggtattagtttccaaagtccttacctggagtggctgggtgtttccagctgtactggtgggctcctgacacccaccctcaatacctctctgccactttcgccagcagagctgtgtctggtgggggagagcagggacactcgctcaccttggtgaagtggactgctagagggggatcagcctggcttgtgggaaactgccacattatcaaaaacaactttgcttttataccgagaagaaaaaccacggcgtggaagccgcagacctcgctcttctaataatccaatttttttttgatgagtgtgtgtgctgataattgcagggtggggggggggttcttgtagtttttttttctttgctctcttactttgtttattcttttcttatgagacttaaacggaaattttgaaattttgggttttttctttgccctttacaagtcatctgaaaatatgatttcttcccctcaccacagaggtaaaaggtatcaatgagataacagggctcatgagaaaccacaatttcttaaacaaaagtgtgtagagtcagaaaaaaaaaactgagggaaaataagtcaaatcacaaaggcatcccgaggcaggtagagacagcattgtgtttgtgagacgttggaggatcgctgggttgaacagaagaagggatctgaagcctgccatgtgaatgggaagcagccaggggagaggtggggtagtgctctgtctccagaggcttccttctgctccaaacctcagtatttccttagcaagcatgcatatgatcaccaccatcatgttgccaaggcttggcagagctggccactcctgtagcctttctttccacagaaggcaagaggcatggaaagcaattcatggagaaaaaagtgggctgtactccccccacaaattcacagaatcagagagtctcagaatggctggctcccagaagctgctgcgagtctctgagtgagccccacatcatgtttgtgctgagtgccctgacccagcagccacccacctgggaacagccccagtggctgttaatgcagccagcatcaccaagaagggcaaggggaagaaaggctggccattgcagctcagtgccagagtgcttgtttaacacgcacaaggctctgggttgttaaaacaaacaaacaaaaaaaccatacacatagcggcccagggtcctagtcctgtcaggaacaatatagccatagcctgatgattctaaactttgtaacagtctactctgaaaagttccagtttcatccagtatcacataccagtaatcccagcaccccagaaactgaggcagaagaatcaagagtttaaggttgcttggggctatatagccagattccgtgtaaaaagaaaaagaaaaaaacaaaaaacacaaaaaaacaaaaacaaaaaaccaaaaccacaaacaaaaggaaagaaacactcccgtttgcaaaggtttaggattctaaacagctgtcataattttggtagccaacatttaactagaattttctacattccagacagagccaaacacttctcaccctctgaggtccatctcatcatggctgtattgtttttagaccgatgggcaaaatggaggtgcagcttgcttaagatcacaattttgggaaataggggtccttagcattgggctctgaagtgaccagttttcctgaagccaacagtgtcatagaagttctaggacttggagactcctctggaacttgatgtttgtgaggttttaaggtttgtattcaagatctggcagctgcgtgtcctcgatttggcacagaccggctccctgtaaccactgtttactacagacgagcctccacagagtttttcctgacaaggcacggctaaggcttccagcctttggtgccctggcatcctgcagagagctaagagttccaggtatccaactgcatggccaccaccacctctttgcaagactggcttcaggcctgaggaagagaaagtagaaatacgtttttattcacatgatgctaacctagtaaacaattcccacactcctttgctctttccctcatttgcactttttgtccctttcggctatcttctgagcacctccccccgccccaacaacaacaacaaaaaagagactgactttcctcatcttaactcacctttttggaaataacaagactggaactgatggcttggctttataaagacaagaggggaaaacaaagtgaatagaaaaaaaaaagacccaaaaataccagccaacaacaacaacaattaaaaaaaaaaaaccctcaacccttcctatcattagttcaaagcaaaactttcactggttggggcttctaagttggtgggacacatctaagaccaaacatggcctgtgtggtgcctggaagccgggggaggtcctgagttgagagggagggaggggcagaggtgggatgaggtcctcttactttggaggtctgcatggatcttaggagcttaacagttgtggttgtgtgtgggagggaataggggaggggtgaagagcatacctaacaggtaatgggcagctgactgtagctatgccccaaagttaatggtccctgctccctgtacacttgggcccaactagtccctgtatcttctatgtctctgagacagttctagtcccctgccctgtcacctgtctctttttggaataggtactcattttctcagggtccatggtttggtctgcatcttcctttatatcctcgtcaccatcttcctgccattctgcgaaaacttggtcagagaggtggcaggataagtaaatgaggggtaagtgacacaggtttccaggaggctatttgaatggggctgtgggtgcgggagtgttaaggttactgaagtgtaaagctagggtctttgcagcatggtggctagggttttgcttgtcagagggtggtatttcctctccaccattactatattggctcatgtaggttcctggggaagcaaactgggagggctaggagttgatggtgaatggggcaggatttaacaggtcagggggagcattcccagggaaagggatctttgacaaagagcaggcatagatgaagaagagagtgatggggagatctgcagatccaggagagaagggtcagtgtgggtgtcctgaggtgagtgtgctggatatgtacagggtcagcaaggagtcttgtgtggttggagtgacatgactggaagggagagaacaggaggaaggtcagacggggctagctggcttgtgcgcttacgacatggtgaaggttggctcttcctcttagtgtagaggaagccagagggtgttgggagcagaggagagacattgctgttaggacttaagaggatgtcttagatggctgaatatggaatagggggtagaacatgggatggagaccaaccagggggaggtgactacagtagtccaggggactgggactggtgctggtcctgttgatggagtggtagtgaaaaggtggatttgggatttaaaaaaaatgatgctagagatggggcccatgcactttctaggaagtggtttttaccgctgagctacacttaaccctttttattttttagacaaggtcacacttgtagcctaggcttggaattccgtgattctcctgcctcagccccttgagtgctgggattacaggcatacatcaccatatcctgcttggaaaatgcgttgggtagataacctgcaggatttgctgaagaatgagactctgaggcaagaccggggcacagttgatacccaaaatgggcagataggatggagtcctgagagcacttgctgccttgaactttcagatgagaaaaaaaagttctaccttcattatgccattattcttctgctacttgtagctggacatattcctttcatgaccctggacacagacaggaggagcagagagactgtgggggccttcctgttaggggtcttatgagggttagataaaagcactccctgaacctggcatatggcaaacactaagtcttactaagttagtaaatgggagtgggggatatgtgaatgaacacgatggcaaagtccaggtcattcccataggaggtgccatctcagagggagaatggaaagaattcactagatgaaagaaacagatgggacagcactctaagcagaggagattgggaaagtgggggggggggagaagaaagccactgtggggtgcaaagtgtcaaaatgagcaagaagggcaggactctgatttgaatgtacattagctgataagcttgtgatgacatactatcagtcaatgtgtgctaagtgtgagttggaaaaagctaattcttccaaaaaggttctatttcctattttgcgattgattcatgcaatagtgccaagtcctgaagaacatcaatgctcaactggggactttaaggaacagttaagaacgttcatggctagttgcattggtcacaataaggctgggaggtgtgtgtggtggtgtggggccagcaggacacacccagtaactgatagaactgttttgctttggtctcacaatccggtgcagtctgggcttttaggggctctgggtattcgtggagccatggggagtcatggaagattagggaaaggtaaagccattccccagaggtccgatcttactggttgaatgaattctgattctgcgctcaatcactcaatagctcaggctcagcctatgcaccttcttccaactcagcctatttattggctactcatgctttccttcacagcacctacactaccatccgtgggtatgagttcccatcttgcctccaaagtttccttctggctacatttctctagtttcagctttggttaatcccatactggcactgtcctttgagatataacagccttcaccctggatccccatttctttctcgctcccaccttcactcctcacatgccttagtgctcccccccccccccgcccgctacagccccgcctccatgtctgctcacacacagccttcccgtctctgttcagtctctgtattggctagatctaccttgttaccacctcttgaagccatagtgtgcgctcactagactcctccattggctcattgcaactattatcgtcattctgtctctacatcattcgcgtgcagttctccattggctgttcattttatctgtcttacgtctcaccgcctacgcaacctgcggatctcccagtttttggacctctgggttcgctccccgttgcccccattgcttgtagccatttcatcttcccgccgcctaccatgcccttcgtgctcagactttcccactaattgtcatactcctgctgctacatcttcgggcccgcattaaccctactcaggcctctccattgattccgttatcatcccgccttccatcccgcccacgcgcgggcgtcctcattggttgctagcttctcctgcttgtcaatcacctgtacgtcactcccgcgtggctgtccattggctgttggccgtacctgtctctagctcaccgcctacgctccactggagccccacccccctgttctggctttctcattggctgcccgccttttcaggccctgcccccgccggtcccaccgccggtgccgtcggtgccgccgccgccgccgccgatatggcgcgcacggcccctgtggagccaccgctgcggcatcccgcgcccccgtcgccggctgcgggagagccccgcgcctcggctgaggcggcggtggccccgcggagggtgctgttcgctgacgaggccctggggctgcctctggcgcagctacgccgctaccggccgtggggcgggcccggggcgggcaagatggcggcggcgaccgggcaagatggcggcggtggcggggctgatgaggaagacgatggcgaggatggggatgaaggggaggaggaagaggaggcttttcccgatccctctccgccgtgccccgttcccgctggcggggggttttacctggtgcccacattttcgttgccgcccgcgctgggccgtctggagcggttggggcgcgtgatggtggagttggaggcgctgctgccgcctcctggagcggttcccgggggttccggggtgtgggtgcctgggggacgcccgccagtggtgcgcgggttggtgcgcgtgctgaaccgctccttcgagaaggcggtgcacgtgcgggcctcacacgacggttgggctaccttctgcgaccacccagcccgctatgtcccacgcagcccgcctggggcaggagtgggaggaacaggagcaggagatcccctcctggatcccgggctaggcctgggccctggccagatgtcagcctcctcacccgacgacggtggctgcactgaccgctttgccttccagctgccctttgctgagggcgcgagcgatggggcgcgcctcgacttcgtggtgcgctatgagacccccgagggcactttctgggccaacaaccatggccgcaactacactgtcctgctccggatcgcacccgctcccacacccactgatgccgaagggctgccccagcagcagcagctgcagcagctggagccacagcctgagtgccagggtcctgtggaggctgaggccaggcagctgaagagctgcatgaagccggtgaggcgcaggtaatgtctgccagcgccacctccaccaacacagggctggatgtagaagcctcccatcccagcacttccccctcccccaggcctgctctccaggacaggcaggagggtgcattcggtcaaagagtagtgcaggccaaacatgtgctaggcactgttttaaattctggggtatcatccatttattgagttccactataaggccctgaacaagacagacaccttccctgtccccaaccatcccgcaaaggctcctctgggaaacagaatgcaaaagcaaacaagcagataagataaatagggctaaggttagtgctgagaggaaaatactgtaaggctctggagggagtggctgctgcagacgtgttgagggtgagctcttgtgaagagtcccagacggtgataacgaagagttatggacgagcgagttggtagagtttggaccaggtaggactctttctgaggaggtggcatttaaacttgagtccagagtggtacggagcagtgatgcacatacaggggaggtagatgtagatagtggggacagcaaagtcctgaggtggttctgggtttcgtatgactgtcagccagtgtgctggagtggagagaacatgacgtgcgaaggtgtggactaagggtctcccggcgtggggagtcagtctgattcctatctgccacagcaggaagccagagttagagaaactggttgaggaagtggtggtacttggctttttagtttcaaccatttctggctttgaagtctatgcatccttttttttaaaaactgttcctctggtagtctgaggcctccagtggagtttagggagcgaggctctattctcacataaaaacattagccttggcagaggcggaaacagatgagaagcggacttgaaggtcacatcgctcttctttttttttttttttgcacacctcttgtaaactgactgatataatgcttttctaggtctttaccagggctatacgtttgtcaagggctccagctaggcctaatgcccggggtcagttagagcccctatgaaatgcatacattttcctgctcctatgagaaatgggaaggggaggttgcccttttgtcccttcgaagctgcatgatggagcagggtgctgtgggatctgctggttgtggtaagggcttaggctgtgaaaggtttagctcttcgtggatggaccttgaagcatttagattctgccattcgattacctgggttcaaaccctaagcctgccactttttagtgtgaccgtatccaattcttagctgcatcgtgccgtagataaacaccctcatctgtaaaacaggaagttatggcacagacctcacgggatgagcagaagcactcaggatcgagcctagttccaagtagtgccatagtgctggtaattagcatcgaagcttagatgctcactacagtccatgtatcctttcccaaactcagctttgttgtgtactcttgtctcagtttcctcattggtcagagaggaatggctttcccattgtgtggttgaattggatgcagtacccgtagggaaggtaactgaggcataattgtagctgtaaaaggtctggtgggcagcatttcttaatctctgttaagagtggtagggacattctcctcttgaggtcagctgaatgtgctgttgactgtaggcactatattgagtcctagttcatgggaaatggggtggggtggggggctcggagaggtgctcgagcttgctcagagtcactcagctagtaaatagccaggccagggaggaaatgttagggatgctagtttaaaaacaaagtccgcatttcactgttggcgctcttagttcttcctttcccccctgtacctgttacgtgtgcttcgtgttttattgagatatacacaagtggacggtactgacccccgagggcatggctcggaagaattgcacatgtatgtgtatgtagccgccacccagttccagtgcccccagaatcgcctgcatttcaatcacttcttattccatcggcagttgtgggagccctttctggaagataagacagttgagtactgaagtttggtcattttcaagaatgtgaaaggaagggaacagacaaatcaaaaccttgccgtgccaaggtgggtggagagggtgtttttcttttaaaatacatgggtggttttaaggagaaattgaagtagttcatttagacaattgttttggtagctggccccatgtttgtggttcccaacgtgacttgagatgttattttaagtgggcagatggctttttgatagcttctttatcttttgatctcagctcttgcaaaggggaggctggtgtgcgctgctagatcagcgataaggttttctttgtaggtcggtgactttcctagcaaatacatttcaacttattattgttttaaggcctgtgtgctgctgctgatttgaagtgctgttgaagaatagctaccccccgtgatccagccctctggggaaatggtggtggacctcaggggatcccttttcttatctgtgggaggcctgctgtagagggcttcagaatcgttggccacaggcccactgtgcagctggcccttggcaggtagggtcagaagagatgattggcagccatgaggatgtagtccagaggctgagctggctgctttccctagcttgcaggaccaggtttgcagtactcagtaggtttagagagaatccatcagcagcatttttggtagagcctgttatgtgctgagcacagtgctaggaacaagcagagaagacacagactggtcctaagactcccaggagcttggggtagagccagggggcaagggttatgtgagaccctaccaagtgatatgtggccaagccccctttccttgctgggcactttgctgagtatttttgtatagtttcatttgtgctcaacagcgttttctgtgagctagattcctttaaatccctcttctgggtgagcacagaggttttgagtcctcagtgattggactgatatgggaaggagcccttctggtgtgtcttggctttatactctgaggaagtatcctattcctcttaaaaataaagaccaacaaaaatctggctggcccttacacaccctcaccgatgcctgcttcagcctctgttagcatctagtctggctttatattggtttctgctcccgagctcttgtcgccacatcccttctgttactcctgctttggggttgtcgctcatactgtttgcttcaccaagaatgtgtttacccctcagattctcctcatggagactcctcagttctaagagggtttccttagggaaggaagcttgcgcagcttagcctccttaagtccccagttttattcatagcactgatcagcaagtcaagttggaaaatgccacataggccagcatgtgagccttcccccaagttaaggaccatcttccatcctgccccattgtcctgtgtgtcctttgatccaccctcggctcctctttcatgggatcccgtcaagtgttctttatcattacactctgccttttgcttcttcaaacacaatagaaaccataagaatggaatgcctgctccttagagcccccacgtctgaacaccaacacccctcacattgtacatgaggagggggtcccttgttcccatttcaggccagtttctgttcttgactccagagcttcattttctgccatttgtccagaggctgcaaccataagccccatttgtctttcatcaggctttttttccaggtctgtctcacctggtcctctgttgacctagcctcaggccagggtctctctcttaattgctgagccaccttgccctttgcctctggtcagtacttgatgatcacccttgtccccctcccctgaagagtcaacagcacttgctttgtctgcagttttattagtccctggctttggccacactgaaaggctccgttgttttcttcttgaaagggctaactgctcctactcggtcccctctggctttgggaccgccctctacttgctttcttcaaaatctctggccctttctcctgttctgtcagcctcaactactaaacttggtgtctgcttgactgaatccttagtcttctcaagcttggctgtctcccactcagtgcccccaaacaacctcttattccatacccatgcacttgctttctaagcatccttaagcccttgctgattctagtctgtgccagggcctagtgttctagcatgttccttccttttctaaaggcactggcttccgtctgtagtaaggcctttattaggggattaatgggtgactgcaatgctagactgtaagctccgtgaggggtagggacatgctctgcattggtgaccactgtattttcacaggcctgccttagtgcatggcacttagtaggtgctcaataaatatttgttgaaagaacgagtttgagtattttttcaaatgtctccacatcaaattctaaatttcattgctgggtttgctcaccagtgtgtctcctgtcactatccctgatgcacaggttttaggtatacctgtaactgaatgaatgggtagctattggcagcctcacagaaatgagaacaatagagttgaaatgggtggggtgggaatcatctaagtggtctggagagaggatttcatgagaaagtgtccctttgttctacagacaactggtaggccatcatggttaaggttgtgggctggaggctgcacagcaaagtggcagagcagggatgtgagcctgtgtagttctgctagtgctccagttgagaactgcagcgctaggctgctggatggggcctacagctgggaatggccggacaagttgcttccttttttcagagccccagcgctattccaaaagacttagttttaagcactttattggtgctttgcatgtttcctcagtccatcgaaaagctccctgaagtattactaccatttcttccttatagatgaggagactagggcacaagagatgaggaaatttgtcccgggtcacagctgatttgtggtagagctgggactattcaacattgcattttctgggcatttattgagatgcaagatcagtttgctggcttccaacaaacattggcaaatggtataggagatagcccagcgcagtttgacatgcagtagaggtgagtattactttgaagagcaagtgtttcagttctcagtgtgtctgtgtctgtatttactcgtgaatgtgctggcttatgaggtgaaatggttttctcaccctgggctgtggccacgggagtgtcagttagatgaagcttgaagcatgcatggtaagctgccctccaatgcacacaagtcctagagttgaggctgacactcagagaaagcagggcagagtcctacataacttgatgatgtcacagcctcctcacctcacccccccaaagcacacgacttaagctgaccagaattccaagtatcttgaagccacgccccccccccccccccccagacagcatcatcagattgtctccatgggagctgggctgtgcgtgtttccctttggggctcagcacatgacccagttcgggcaagcaca

SEQ ID NO: 5 - DNA, 54306 bp, Homo sapiens
tggactgcaggtggaagaactacagttcccagcagctattgcaagctcaacctccgtgcacactcaccccaggcctcacatccggcatgcgccgtgctcgctcacagaactacactttccaactctccccacacgacccgtgacactctgtggaccgcgagcacggagcagggtttctacagctgctccccactttctcggacccggtcctggacccagcccccgactccgacacggctccaccatggaggaggcggaccgaatcctcatccattcgctgcgccaggccggcacgtaaggacagagcccccgcccacccccgaagcccacatccgggactctaaagcccaggaccccgtttcccgggaaccttaaaacccgggatcctgacattcagggctccaactccaggatcctaagaccctcacccccttacacacacacacacacacacacacacacacacgcacacacacacacgcacacacacaccgccctccctgacaccgacatcagaggcctcccaaatcctttaaccatgatatttggtacacccaaagctctgggacccagacaccttgagacgttacaaccttgaaacctcaagacccggaaccctgtaatctggggaatcttaacatcagttccctgagaccctgttatctggagaccctaagacacctgtgccctaagaaccagggagcgtaaaaccccaggaccctggcactcggggactccaaaaaatccctggaccagatacttgggatccttcaaactccagttccccaaacacctggggcttaaaaaaacccaggattctttttttttttttccttttccgagatggagtctcgctctgtcgcctaggctggagtgcagtggggtgatctcagctcactgcagcctccgcctcccaggttcaagtgattctcctgcctcagcctcccaagtagctggtattacagccgtgcgccaccttgcccggctaatttttgtatttttagcagagacagggtttcaccatgttggtcaggctggtctccaactcctgacctcaagtgatctgcccgcctccgcctcccaaagtgctgggattacaggtgtgagccaccacgcccagccaaaaaaacccagaattctaaaatctgacatcagcatttggtcaccctgacgcacgaagactcctccgttcagaggccctaaaaacccaggatgccaacatctagggagtctgatttttgtattgcttgaaactaggtggtcttgatattcagggatcttgatacccagggaccctgacatttggaacttctgaaaacagcagcctcctaaaatctagtcttctcaaaactctagcagctcaatatgtatgcaaagaacatactatctgggaaccaagaaacccagagattgtgccacctggaccctttcaccttcccagactcccaaattttgatatttttctaaactgagttctcttccacccaccattctcctactccaagatcttaggacttgaggatttccctagttcctggttttccaaatggaagtcacagtcaccaacatccaggatctgtctgaactgtaggcatcctccctgccccgaccctggtactagtgtttccaaaaggctgcagggctcagcctgatccctgttgcctgactattcctgtgatcaagctggtccccttcttcagggcagttcctccagatgtgcagaccttgcgcgccttcaccactgagctggttgtagaggctgtggtccgctgcctgcgtgtgatcaaccctgcggtgggctctggcctcagccctctgctgcctcttgccatgtctgcccggttccgcctggccatgagcctggctcaggcctgcatggtgagtggccctcctcctaatgcacacatcctctttcttcctcttttacaaagtaaccaagttcctttgcaacacttgcctttcctctgcaacacttgcctttcctctgcaacacttgcctttcctctgtcatttttcctgcggcttagttttcattagtggttaaggctgctgactgtactgccaaactgcctgagtagtttagatcctagccccaccacttggtaactgtgtgaccctaacccttctgggccccagttttcctatttgtgaaatggagatgataaatgtagtgcttttatgaggagcaaatgagtttatccagtttgcacctgggctgctcctggcttctatgttttaaatttagctgcaaaataccacccccaccccatagtatccatttcctagttccagaaaatactctgtctgggtcatatactcctaaactaatcactctgtgctctgattggcccagtctggatgacatggtcattccttttttttttttttttttgagatggagtctcactttgtcgcccaagctggagtgcagtggtgcgatcttggctcactgcaacctctgcctcccgggttcaagcaattctcctgcctcagcctcccgagtagctgggactacaggcgtgtgccaccacacccaactaattttcatgtttttagtagagacggggtttcaccatgttggccaggatggttttaatctcttgacctcatgatccacctgccttggcctcccaaagtgctgggattacaggagtgagccaccgtgcccagccttttcttttctttttttcttttttttttttttttgatgtgaagtctctctctgtcacccaagctggaatgcagtggcgtgatctcagctcacggctcactgcaacctccgtctcctgggttcaagtgattctcctgcctcagcctcccgagtagctgggactacaggcatgcaccaccatgctcagttaatttttgtatttttagtacagacggggtttcactatgttggctaggctggtcttgaactcctgacctcgtgatctgcccacctcggcctcccaaagtgctgagattacaggcgtgagccactgcgcccggccgacacggtcattcctataggacactgtgattagccactccttcaggatcctgtggagttgggataaggatgattacccaaagaaaggcatgctggttacccaaaagagtgtctgctatattacctctgtgggaaccacatatcctgcctctgctaagagcaattccaacaatgtctctgtgacagaataaataaagtgcttttcttttaaaaaatattttaatttttttagaggtaagtgtcttgctatattgcccaggctggtcttgaactcctggcctcaagagattctcctgcctctgcctcactagtagctaggactataggcacatgccaccctgcccgagaatttttaaatttttcgtagagatggggtctcgcttttgtagagatgttgcccaggctggtcttaagctcctggcctcaagcaatcttcccgccttggcctcctgagtagttgggactacaggcgtgcaccactgtgcctggtaaagagccattctgatgaaacactcacccattcccagtatagagctgagtccaggagtccagttcctgtattcaagagctgcaagtaatgccactccccctggctcactcactctgtgactttgggccagtcttttttttttttgaagcccaggctggagtgcagtggcacaatctcggcttactgcaacctcctccgcctcctgggttccagcaattctcctgcctcagcctgccgagtggctgggattacaggtgtctgccactgtgcccggctaatttttttgtatttttagtggagacagggtttcaccatcttggccaggctggtctcgaactcctgaccttgtgatccacccacctcagcctcccaaagtgttgggattacaggtgtgagccaccgcgtctggctctcttaacctttttgaggctaagtttccacatgtgtaaaatgggtataagaattgtagctactgtatagggttgctgtgaggattaaacatgagttaatgtgtgaaaagctggttataataagctttgcataaatgggattactattattggataggtccgatctggaacctgtgaatacatagtgaatggaaacactttgaactgacccaggaagtatatggtggtggagggacgatagagtaactaccgtgaaaactttcatttagatataggggactgggtggctagagttgttaaatttgggccttgcttatgcagtttctgtctcttagcaacaggtctcagagctccatccatcccttcgctctcaggttcacccagctctcaggagttgtcacattgttctctctggggctcttggtggccttatgaggcaggcagtctgtcccctggcccaggactgtatgtattcttaaggttagcacttaataggggggaagttatgtcttctgtttgcagaggagagtacacagcaggaggtgttgaggtgggggctcaggcttcctgcagttctctgttcttccctcagtgctgtctctcttggattttgttcacctgcttttgcttacattgattttagtgggggttagtgactatggcttttccagtggccaggaggtacatgtgggctgggcacgttggctcttgcatgtaatcccagcactttgggagtctgaggtgggaggatcagttgagcccaggagctcgagatcagcctgggcaacatagtgagacccccatctctacaaaaaataaaaaaaaaatagctgggcatggtggcacacgcctgtggtcccagctatgtgggaggctgaggtaggaggattgcttgagcctgggaggtccaggctgcagtgggctgtgattgcgccactgcactctagcttgggaaacagagtgaaaccccatctccaaaaaaaaaaaaaaaaaaaaagactggggacggtggctcctgtaattccagcactttgggaggtggaggcgggcagatctcaccagaggtcaggagtttgagaccagcctggccaacctggcgaaaccctgtctctactaaaaatacaaaaattagcctggtgtggtggtgtgtgcctgtaatcccagctactcaggaggctgaggcaggagaatcgcttgaacccaggaggcggaggttccagtgagtcgagattgcaccactgcactccagcctgagcgacagagcaagactcttgtttccaaaaaaataaaaaacaggtacatatggttgtctggcccccagcagccttggtttatcagcagcaggcaaaaggagttctcttaatccagctgtgtgctgtccctgtagcccccccgcaactcagcactgccatgttctggcatcttttcttcatatgccctgctcctggcaacagtttctgcaccttagccacctccatattttggcaccttccccactcctggaatgagtttctatatcagtcacagctctttgattgcatattgtggaaaaaatccaaagtaaaataccttaaaagccagtggttatacttatttgaccttgagcctccaaaataaatatatcttgcattgtgacccagtatactcctaagtatagaataatgatggcttctaagtgtactctgtgccaggccctgtggtaagtaacatggtgttaactcatttaattctcaggacaaccttctgctatatgtactgttggtataccctctttcagatgaagaaagtgaagcacagagggattaagtgatctgcctgaggtcgtatagttggtaagaggcaaagcttgggtttgaatccaggaagtctgctttcagagtctatgcagttccaaagcagtggcaactctggaagaaaaaggctttcctaggccgggtgtggtgattcccacctgtaatcccagcactttgggtggctgaggtgggcagattgcttgagcccaggagtttgagaccagcctggccaacatggtgtagccctgtctacactgaaaatacaaaaattagccgggtgtggtggcatgcacctgtaatcccagctactcgggaggctgcgtgggaggatcacttgagcccaggaggcagaggttccagtgagccaagatcacgctactgcactccagcctgagcgacagagcgagaccctgtctcaaaaaaaaaaaaaaaaaaaggaaaaaggctttctttctctcctggcctgtttcctcagtccccatcagaaccctcatgagtccttttgttctgagctattgtgcttctggtctttttgtcctgtttatttttaggcactctttctataataggtagatttgctctttacctatgatatgggctccaaatattttttcccaacttgtcattaacttttgactttgcttattctattttctttaaatattttctttcttttcatgtattcaaaagtacccatcttttcttttatggcctctggattttgagtcatagaaaggccagagctttaatcttgtttcttgttctctgtagcgttgactatcatcactctgtgactccccccagggcccagaggccttggggagctgggggaggttgggagggtggtggttagtgagaaagtgggagcgttttcagcctaggcccaagtctcccagggcaggaggaccctgcctgcttcctgatagccgcccaccaaccctcaggacctgggctatcccttggagcttggctatcagaacttcctctaccccagtgagcctgacctccgagacctgcttctcttcttggctgagcgtctgcccaccgatgcctctgaggatgcagaccagcctgcaggtactgggtgtctgggatgtgggcgggggcggtgaggggagaggagggccttctaggggctgtagggctgagagaggtagaggtggtaaaaaggttgatgggtaggggtggcggtatgtgccttcaggagagctaggcaggaggattaggcatcagagaggggctacagggcagggggcagggggctgaggttgagctgaccccggtggtgcgttggtgcggggaggggcctccctgactcaacccctgtgccctccctctctctcacttcgctctaaccacttgggcctcctgggtgctactcaaacataccccagtacactcccgcctctgcacctttgtatcgttggttacctttcccctaggtaccctcatggttcactcccttacctctttgaggttaacctcctctccgcagccctctcctgatccccacctggctgcagtctggatggtattcaggatcctattcatgatctctctcctctgctagcttgccggctccctgagggcagggacctttatccagtttgttccacgaagtagccctagtgtctagaacagcgacctgtacatagtaggtgctcggtgtttgttgaatgactgaacgtgagaacgcaagctggatagatgtgtatctctggatgggggtcaggagtggaggctggtctcctagggtatgcccttttggatttgcagcattgacatctgattcacttcctccctatcccccataggtgactcagctattctcctccgggccattgggagccaaattcgggaccagctggcactgccttgggtcccgccccaccttcgcactcccaagctgcagcacctccaggtgagacccctgactcccatggatcttctcttgtccccgtctgggtgcccagggttttggccccctacccctggcaaccctcatcccacttcaccctggagattctgagcctgctctcccaccagggctcggccctccagaagcctttccatgccagcaggctggtcgtgccagaattgagttccagaggtggtgagcatgaggctgtggggaggggtgaggaggaaggtgggggggaacctcatagcgttgccatgcggcagggccagctgactctgttcctgcctccagagccacgggagttccaggcgagtcccctgctgcttccagtccctacccaggtgcctcagcctgttggaagggtggcctcgctcctcgaacaccatgccctgcagctctgccagcagacgggccgggaccggccaggggatgaggactgggtccaccggacatcccgcctcccaccccaggtacagccagatgcctggctccctgctgtctgggctgctgctcactgacactcccgctggtcctctgctctccttccccactttgtccctcccttccattgtttcccctctgtgtgtgcttacctagctccccacctgaaagaacactggagtcagaaaaaaggagaacctgggacaagtcagtatccctcctcagagccttggtttcctgtgctaaaatttggggtagtaatagtgctctcctctcagggcagtagttagactgaataatgtgcttgagattcctggcaactggagcaatccagattggctacctgccttcatcattcattaattcattcattcatttggagtcttgctctgtcacccaggctggagtgcagtggcgtgatctcagcacactgcaacctccatctcccgggttcaagcgattctcctgcctcagcctcccaagtagctgggattacaggcttgcaccaccacacctggctaatttttatatttttagtagagacagggttttgccatgttggctaggctggtctcgaattcctgacctcaggtgatctgcccaccttggcctcccaaagtgttgggattacaggcatgagccaccgcacccggccctaatctttctctgtttctgcacttgtcactgatgttcatttttctggtttctaggtttttgcacaatttctgcctgtccccattattctagttctgtgtttttgctgctcctctttcttacctctctgtctcctcgtttctgtactgaattcctctcttgctctgtctatctatctgttcccccttctcctctgtctacttctttatctgtcccctcttcttctctgtgcacctttttatctgtgtccccttctgctctgtccacctctgtatctctccccttccttgctgtccacctatatatctgtcacccctctgcctctgtttacttcttaatctctctcctcttcctctctgtccacctctgtatctgttgccccttccctctgtccccttatctctcccttcttcctctctgtccacctctgtatttgtccctcctccccttctgtccatctctttatctgtcctctcttcttctttttttttgagacggtgtctcgctctgtcacccaggctggactacaatggcatgatcagggctcaaggcagcctcaaattcccgggctcaagcaatcttcccacctcaggcatctgagtagctgggtctacaggtgcgtgcgcccggctaatttttgtattttttgtagagatggggttttgccatgttgaccaggctggtctcgaactcctgacctgaagcaatccacccaccttggccttccaaagtgctgggattacaggcatgagccaccatgccgagccccctcttcttctctgtcaacctctttgtcccctcttcttctctatccatctctgtatctgtcccctcttcccctctgtccacttatctgtcccctcttcctctgtccacctctgcatctgtcccctccttctctctgtccacctctctgtcaccctctccctctgtccatttctttatctgtccccttttcctctctgtccacttctctttttccctccctccattctgctctcctatttctgttccctcttcctctgtgttcacccaggtatcagtacccctccccttctgtccacctttacatctgtcccctcttcctctctgtccacctctgtatttggcccccctccccttctgtctgcctctttatctgtctcctcttcctctgtgtccacatctctgtctgcccctctttttctccacctctgtgtcggccccctcctggtctgtccacttttttatctgtcctctctttctgtcttcacctctgtgtctttttacatttttatttttttatcattattattattttttgagatggagtctcgctctgtcacccaggctggagtacagtggtacgatctcagctcactgcaacctctgcctcctgggttcaagtgattctcctgcctcagcctcccacatagctaggactacaggcatgcaccaccacgcccagctaatttttgtatttttagtagagacagggtttcaccatgttggccaggatggtctcgatctcttgacctcatgatccatctgcctcggcctcccaaagtgttgtgattacaggcgtgagccaccacgcctggctgtctgtttttgtttttatatctgtagtaattttcaaacataaatgtagagagaatattctagtgaatcctatgtaccattttgccaacttttcttcatcttttctctcccaactttttctttgttgctgtattattttaaagcaaatctcagacatcatgtcatttcagctctaaatacttaggactacatctcttaactcataaggacattcagttttcaaggtaaccactggaccattttcatggctaatgaagttaacaataatatcttgtgggtttttttttgttttgttttgttttgttttttgtttttttttgttttgtttttgagacggagtctctctctgttgcccaggctggagtgcaatggcgtgatgtcgcttcactgcaacctccacttcctgggttcaagccattctcctgcctcagcccccaagtagctggaattacaggagcacactaagttttgtatttttagtagagtcggggttttaccatgttggccaggctggtcttgatctcctgacctcaggtgatctacctaccttggcctttcaaagggctaggattataggcatgagccactgtacccggccaacaatgatatcttaataccatccaatacttgagttcataatcagattttcccattatcttgaaactctgttgtccctctcttgcctctctctctctgcctctttctgtgcttggtacctttgattccctgtctctgccctgtcccccgatatcctgtctatgcttctcttggatttgggggctctaggcccacccccctctcttcccacatccttctccagcatggggatctagtgggtggagagaagtatgtctgtgagcaagaggagacccctgtcctcgaggagatcccaggctggtggagcaggagagtagagcagggcctgccttagtgggaaggctggagggtgggggtgacttgtctgtatactcttgtcagggggtccttggaggaggcagggccttgggtgctaggtgggcccctacaccttcctgcttcccccgccttttctccccaggaggacacacgggctcagcggcagcggctgcagaagcaactgactgagcatctgcgccaaagctggggcctgcttggggcccccatacaagcccgggacctgggagaactgctgcaggcctggggtgctggggccaagactggtgctcctaagggctcccgcttcacgcactcagagaagttcaccttccatctggtgggtgcgcctgaggacatgagatgtgtggatgggcgtggcaggcttggagggtggctttttgtgtcagcaccacacctttatccacacaggttcctgtgttcccactggacaggccctcgccccactgtgggatgggtacccagaggggtcccctagcttattagggacttgactggagaaaatgtggataggtgggaaccatgcaaaggtgtgggggtgttcttggggcaacaccccctttcctcaggcagtttcctttgagcatatcttctgtcctaagatgttcactctgagggccccccatccttctcatgggcatttgaggcttgagagatggggcaggtgggtaggagctgtgacagggtcagggagatttctccacgagcaagcactctggcccgaggttgcagatggtgcctttacccacatagtcacagtctggccaccatcggtgcttcagtgggcatgcatgccgcactgggggcagttctcaggggaggctgaggctgggccacgtgaggaagggccttccctggcagccaggatgcccctcgtcactccccttaggagccccaggcccaggccactcaggtgtcagatgtgccagccacctcccggcggcctgaacaggtgagcagagtggtttggaggggggtgtcccaggcccttgcttgtctactgggcctgacaccccaaccctgactggcctgggcctcccaggtcacgtgggcagctcaggaacaggagctcgagtcccttcgggagcagctggaaggagtgaaccgcagcattgaggaggttgaggccgacatgaagaccctgggcgtcagctttgtgcaggtaaggggcggaggaggggctgcgcgttgggctaggtcagaaggagggcctcggggtgtgagggactagatggggcaagaggtgctctgtagaggtctgcacatggcagaagggttcctgggagccattagggatctgtgggcctcttgagggtggctatgagaatcaggccagggtgagggtctgtgggcatctatggggcaccgcgggtctgcatgggcaggggattgaggggtcctcggagggtctgtgggcatctgtggggtacccacgggtctgcatggacaggggattagggggtcctcggggtccttggcaccagcgtggagctgttagagaggcctgtgggggccacaggggtgtacagtcatctgtggagctccatgggggctgtggcatgtgactgggtatccaccggccaggcagagtctgagtgccggcacagcaagctcagtacagcagagcgtgagcaggccctgcgcctgaagagccgcgcggtggagctgctgcccgatgggactgccaaccttgccaagctgcaggtggggttggggctgtagctgggcggagaggggcagggtggggtggggtggggttggagggcccagcctgtgtgacatgtacccatcccccaccagcttgtggtggagaatagtgcccagcgggtcatccacttggcgggtcagtgggagaagcaccgggtcccactcctcgctgagtaccgccacctccgaaagctgcaggattgcagagaggtaagcagtggggccctgggctgtgggcgggccagggcaggctcggtccctctctagggggccatccctatgctctgctcactgtcttctgcctgtgggctcatggcagctggaatcttctcgacggctggcagagatccaagaactgcaccagagtgtccgggcggctgctgaagaggcccgcaggaaggaggaggtctataagcagctggtaaggcctgtgtgagggacctgggtagcttaggagggtggggggatggtcctggggcagtgcctgctatatccctgcctagatgtcagagctggagactctgcccagagatgtgtcccggctggcctacacccagcgcatcctggagatcgtgggcaacatccggaagcagaaggaagagatcaccaaggtacactgccagggccatggagggtgggtcatgtgggctgtcaggcatagtgtggccgcacagggacctcacaccctcaggcagagctgtccagtcacactctaacacagaatagtcacacacaatccatcccagtcacccctgacacagtgacacagtccctgtctggtacacatgaggaccctccactgctagccagcctgccccaggcaggggctcatggctgccatggtgtctgccagatcttgtctgatacgaaggagcttcagaaggaaatcaactccctatctgggaagctggaccggacgtttgcggtgactgatgagcttgtgttcaaggtgtggggcaggttgggcgggggtgagtggggtgaggctgggctgctgccttgtgcatctgctaattggctggctggggtccagacccaggccctgtgcgaggctggaggtgcactgatacccagggctggctttgtttcatggaggatgaagctagtggggtggtgggagagggtggccttcttagggcatggagatggtcaagggcagcccactgatacctttgaggtccctgtgtctggtcaggatgccaagaaggacgatgctgttcggaaggcctataagtatctagctgctctgcacgaggtgaggggagacatgtgcctggggtggggctgctgggggtgggtgggactgggtgcaagccttctgctcctgttgtccccagaactgcagccagctcatccagaccatcgaggacacaggcaccatcatgcgggaggttcgagacctcgaggagcaggtgaggcctgggggcaggatggggagccaaggcgggccggggggacagttcctcaggttatgctgacagaggctgtggagccacacacagccgatggctggacacccagccctgccccttagtgcctgtgacctgggacaggcaagtggcctactgtgagccccagcttccaccccaagggccctcctgtctgcctcccagggccatgggcagaggcttcagcttaaagatgtagggggaatcctgccacatggcgaaggatgctttgggtagagggaacaccacacgaggcctggccatgggacagagcaggctgttggagttggtgggaggggcccagagtggctgtgatgggggctggtgagcaggagctgggaaaggggctgtgtgtgctgagggggcatgtgttcacattgcctcagatcgagacagagctgggcaagaagaccctcagcaacctggagaagatccgggaggactaccgagccctccgccaggagaacgctggcctcctaggccgggtccgggaggcctgaggagccgccggcagaggtctctccccagcctcaggcagggatttggggtgctggaggcagtggccaagcacatgccctagctacttcctccgctgtccagttcctcctgctgcggccttggacccagacccctgcccactgaccgcaacccttatatggggtgatagtccagcatgtggggagctcggctgcagtttattggggacggtactgtgggttgggggccttggatcccaaataaatgagtagttcctctgcagtctaagctgaggcatggatcagggctcagggaatgggagtgaggtgagtggcaggggagacacggggtatttttggcaaggcagtgtgtgtggctgtgtgtgtctgcacgggactcaagagacccactggggggctgtgcgtgtgcatatgcgtgagatacacaggtgaattctaacaggccgtgtgtgtgagcgagcacgtgttgggacctcagatcctgagggtactgacgctgcttctgtgtaggcctctgggcacacccctgtgttgacagtgcccctgtgggccctgaggctggctgtgggtgcgtgccttggggtgtgtgggttgtcagggctgtgcttgtgtgtgattgtgtgatgatgcagctttgaggttgtttgagtgtactgaggcaggctctctgtgttttggggtttgtgttgagtgagggacaggattgtgacattttgtgtgtctgtgtgacttttccagccctgaagtaatctgtgcgagcagctgaggcaggctctgtgtggctggttgtgaaggctctgtttggctgcagggctcgactggggggtgtgtctggggcggaggtgggggctggggccaggaccggggcccctctgagcagccttggggcaaaggatatgatgggggagggggtggctgccagcgggggaacaggggccctggcaggcaagacagtggaaacctcacttcttggtccctgtgggcacatccagggcctatcatccctgcccccaccacctctgcctcccaccagtttggcccctgttcgtccatcctcctttccttgatcttgaggtcaggggccaggtgtagggttggaacacctgctgggcctctggctccgtttcttgcggaactccagctcatccacggtccacacagcccccttctcgctctccacccgcacaaagcacttgtgcagactcaggttgtggcggatggcgttctgtggaaggccggggacagggagcaggtgggcgtcaacctctgaggccagcagccaccaccaacaacccacatcccgttcctccccaatgtgcctatgagcccagacccaggcctgcccactttgagctgcgatggcacttgaggccatcccagtcaccgccacctcagaggagctcaccttccaggtggcaggatggtttctgaagaaggcaaacatgcgtgtgaaccagtggtagatctcattgagtgtccgctgcttctctggagcctccaggatggcctggaagttggggggtggggtaaggggcacattccccaaacttggggtttagaggggctatgacctaccccgagccatctgacatgggggcggaattgtaggggcaggtaatcagggacaggactagatgtggggtgaagcatggggtcaaagatggggttagaaaaggggtgaagtgtcgggttgggcagggttagatgggtgtgggtatggttgttctgggattaggtaagggatcaggactgaggttgggagtggggtcttgttcagggctagggctgaagtgaggtgaaaggtctgggatggagttggagttggggttctctgtggaggtgacatttcagggttggggaaggtgaagggtcagaagtggggtcaaggatttggaaggggtaaagggccaggccaacttaagggtcagggaaggggtgggttaagagtcaggctggggtggactcaggtggggggtctaggggtgagggatgggatgacttggctttaggtcagaagccagagatggtttgaattatcgagtatcttacgtgtcagggacatggttaggtggttaggctcagggcaaggatgaggttagttgtggggttcggtgtggagtgaggctgagggtcagggaatttgatcagtttggattcaggaatgggattacagagtcagcgatgatgattgcagtgaggctatcagtcaggatggggctaggtcagggtttcagttcagagacagtcggggaatatctggtatcatgtaggggtgaggttcaggtttggggttaggtgtggcgctaggatgaaggttctgagaaggcattggggaggctgagatgaaggagttgggatggggtgatgaagttaaggatcaaatgggtgttacaaggaaaggttgggaatggtgcccagttgggggtgtattgacatactggggtacgttggggccagggaaggagatggggttgggttggcataaaggctggggaaggagttagagtaagagctggggtacgtttagggcaaggtgcagagatggggttagctttaggctattttatgggtccaggagagggttaggtatggggctgaggtggacatctggaaaggggtaggtttagggtcagaatttggcatgctctggcctggatggtggtttaggtttggatttgcggacaggtttggggtgaagccagcatgaggggtcacatttgaggcacggcttggggatccttggggctggggcttgggaatggaggaacccactctgagggcactcagagggagacaggagtttgggaggcaggtcccccaccccatctttgtcttcctcctccttggggccgagctgccctgcttacccagcggatgagcgtggcgtaggtgaaagggggtcgcatgttgtggaacttgaagtagtccatgttgtggaggaactctgtcagagggtggggatgaatcaagccccatgcaggacctcctagctagctccctgtcccctccccctacaaggtgagtctacaggcctgagatctcaccgtcaacacccgtgtccacgggcacaggtactgtttgctgagcacctgacataagttgtatcatttattctttgcaccacttctgccaaaatagttctccccgaggttgaaaagaagcggagtaacttgcacaccaaaggatgcaagaggttaaatggcagagccaggatgacagtcaaggtctctgatccctgctaagcccacaggccaggcctggtggagagcagtggataggtgagctcgggcgaatccaccccgattttccttggtcaggggaggaaaggaggtgctcctggaattacttagcagggtccctcccttctgatggccgaatatagtagctggagtccagagtgggtgaggcatggccccaatccccaagggagtcagggctaggggcccgacactcgagaccatatggggggctttcaggccacggacatcccgaaaggaagcttttgtgagcggatgcattttcccaaaggctgagtggcggcagctgcagtggtggtggtggtgggaaggggcagcatggagctcctttgcaccctccacccagagcctgtcaggattaggagcttgggggcaccgtgtagtgcaaggaccattcttacctgggaatgtgctgtttccatggctaccccacaggtgcctccggacagcaaacaggctgtcaggggcctcccgggggccagaccaggctgggacgacagggccttggctgccagcagctacgatgcagcaggagcccttgtcggatgatgcctgggtgagggggagaggctggtgacccagaggcttaaacttcccactttttactttctattttatgttttttattttttttgatactgagtcttgctctgtcgcccaggctggagtgcagtggtgcaatctcggctcactgcaacccccacctcccagattcaagcaagtcttctgcctcagcctcccgagtagctgggactacaggtgcccgtcactacgcccagctaatttttgtatttttggtagagatggggtttcaccatgttagccaggctggtctcgaactcctgacctcatgtgatccacccgcttcagcctcccaaagtgctgggattacaggcatgagccactgcgcctggctccactttatttttaaatcagtgtttttcaaagcaaggacgccctcttctaaattccagtctgaggtggaatcccacaaaacagcatgagccgtatttattagagcacaggtgcggatgtcgtatgtggccactgatgctgggaccatgaactggggttgaatagggctctttaccacccaactgtgaccttgggaaagtcacctaaacccccctggcctcaatattcctcatctgtacattcgcatcatgagaaataaattaccaccagcaaagcgctcagaaacagtgcctggcctccagggctggcttcatgggcgtgtgacctatgtggttatgtggcaccctgtgctttgtttaatgctctgtggtcgccatcttgaaatctgaacaaggggccctgcaggttacatagctggtcctgctggcacacagcctgcatctggcaagtctggctatttgcatttgctttaacaactcaggatcacagtgtttggggatcttagagtcagagggttttttttttttttttttcttgagacggagtcttgatctgtcgcctaggctggagtgcagtggtatgatctcagctcactgcaaactccgcctcccaggttcaagcaattctctgcctcagcctcccaagtagttgggactacagacacctgccaccacgcctggctaattttttgtacttttagtagacacagggtttcaccatcttggcgaggctggtcttgaactcctgacctcgtgatccacccgcctcggcctcccaaagtgctgggattacaggcgtgagccaccacgcccagccggggtcagagggtttgtaagtagaaggggacagatttccaggtctgggcatgtttggagctggggacaggggcccctagctctcaggacctgaatgtgaggttaggttccctgcaccgtgcagacctcctccctgccccccagcagtctgagtctgccaccaccagtcctggggtcgctcaccacagatgaagccttggtcagtgccattttcccagccaggtgggcctgcatggcactcagcttctccttctccagcaccagctgtgaaatggcacaaacatgaggcctcagcctggcccttctctgccacatctttgcccaggctacggtcttccctgggagtgcccgctcctcttccttcctttataccagccctcgtcccaggtgaacttggtttctggcacatggtggacagaaggttttgcgcactatccctatcccttaccctccaccgccctggcattacctgctgctccagagactgtaccatctctctctggaggagacattgtgccctgcccttctcatccagaagatggtccgcctggcagtgcctaagtagggagaagattccatgcaggtgaccacgacaggcctggtctggctcaatgctctgaatggggagggcccagaccctctgggagttctctcctctgagccccagctcccctcccctctctacctcagtctccctctcacacccctcgttcccttaacacatgcccctcagcacctactgcatgtcaggcctgaactcaccacttgagcctggccagagtgctggagataatgttggaagtgtggtgagttgagaatgggccagggaggtgagagtgggcaaagcattctgggtggagggacggcctgtgcaaaggcctggctgcaaggaggacaggacatgtggggttgctgctaagggttgtgtgtagtgtggtgtgtatttgtgtgtgtgtgtgtgtgagagagagagaaagagagagagagagagagagagagagagagagagagagagagagagagagacatatggggggactgaggggaggcagcagcagccatctagaggagctagaactttgggaacagtggaataaggctggcatgttggcatgaggagtagcagggcaaagcaggagtgcagattctagagcctggctacatgggttcaaatcccagctctgtcactcaggaactgggagattttgatcaagacacttaacctctttggcctcagtctccttgtctgtaaaatgggggtaaataacagcacaaacgtttcttattatacatacgagaaaactgaggtcgagagaagctaagtaatttgtccaaggtcacacagccagtcagggatggagctgggatttgaacccacagtctcagagtttagctcttgcatcttactacttattgggatgaagcctgagctgagatctgcaccctagacctctccccacaagccagggccggtagactggcacaggcctgggccactcacttgaggaagtcctctggctcttcgaagaccttctcacatccgggccacttgcagacaccatttgccagcagtgggtaggagctctggggcacagccgaaagggtgctggggggacagagggtgtcaggggaggggataggagggcgaggatccttcccagccctgtccactgacctgtccttcctgggtgcactgggatttgggaaggtgcagagcagtgccggctccctggacacccattccaggctggccacgttgatccctgtgggtggggacagggcacctatggaggctgtgggctgggctctggagcttggcccacaaggcctctcattttgagcttcccaccctcctgagcctcgaaaaccctgactcccagggggctctgctgtccccaaagtcccaggcttctggcagagaagcttaaagacggccattcgcaggtgctgacattttgactagctttgtaaagctctgtggttttgtgattttgacattctgcatctttaaggttctgcacctgacgttttttggagggtggagtttccaagcctctgagacctgacacctttgacccccagagtactgcaattcagaatagcctacactgctcacagccaaggatctggggacttgggggttctgtgaagccatggggtacgggctgaggtgttaccaggtgggaggccaggccgggccttgagggagaagaccccagtggcggtggtgggtggtgtgaggctgatcatggctgggctctccagggggtgcacctgcagcacaggggtccgggcgtgggcatccaccgttgagagctggggggcacatgtgggctgtggttcagcctgactcggggcccctccccacagttctcccacctgctccctcctccctgcccattcaccgtccatacctggtgcatgaaatgtggcctgtcctggaggagtgcctgtaagtggggcaaggggcccagccgtgccccggagggtgccaccatgactaggggcagtgtgggcagctgggcagaaaggcaggtgggtgagaggccatcctgatcctcactgttctgtgtctaattcaaatactctgcactgcaagcccacatggtagatgctatgatcatcccccttttacacgtatggaaactgaggctcatggagatcgagtaactttttaaagatcaaacagctaataagttgcagagctggcctcagccctgtcacctcacctacttggccccagtcctcttctcttgtcacatggggatggggacacatagctatgctcatgggactacaatacggcctcctcctctcctgagacagggattgggaggtcggggagagcctccaatctctgaggcctggcaggtggggattttcttggccctgcaacatctgcataagtcacagacttgcctgggacccagaaaccacttcctgtgccccagccagcccccctcccgcccagtgccacagtaaaggtcggcacctgtaggtccaggtaccccaccctgcctgccccatcctgggcccagggcctcacctgcagctgcgatggtggcatggggttcaaggaagaagaggaggcatgggccccgcctcgaagatctcggccctggaaggttccccctgggccccgggcccccagcaggtctgaggctttgggtgcagccctccagctgggcgaggctcctggggatgggccaagggccaaggaaggggccgagggcttgccaggcctggggttgggcatcgggtccttgtccaagggcaggctgcgtagacaataggggaaaggagtcacacgtgtgctagggcggtatgagatactcgaccacctgagccacgtggacactcctctggtcaaagcaggcattggctgggacatgtcccgaggggccccatagttgcaccccagctctagacacacacacacacacacacacacacacacaccaagaacacaggtacatgtacatacccacacatgccccacgtgcagaggtccagcacctggcttgcctgcccacgctagcacagccctggtgtggatgtgtcctctatgagggcaatggttgtttccccctccacttgagagctgtttcaagcctcaggcctctagccctccctgcaccctgcacaggctgtgtttgctcatcttgccggagctggtctcggactttctcctcggagtcctattttgccccagtgactaggcatggactcaaaagattcatctggctgctgtgagtggggctagtgaggaggctattgtaacagtcctggcaagtgatgatgctggcacagaatgggctggtggcagtggagaaggcgagaagtgggtagattctgagacttaatctgaagctggatcaggagcagtgctagcagcttggatgtagtgggcaagagggagagtcaaagtgacatgggttttagcttgagcagctggaaggaccgagctgacattacctgagatgggggacatggcggggagttggattgggtgcaaaagtgcaggtgtagatagacatgaagagtctggcattaaatatgtgagtggaggagctgagggggcagctgaatacgggggtctggatctcagggcaaggaggcgagtccaggagtgtgatcatgcacggatccagcatggcaagtgacagagaggaggagagatggggtctcttgagctggggcctgtagaagcttctctacccagcccccatcagagttcaccccaatttctggccctcaagcctggctcatgctacaccccctgcctcaaatgcccactccttctcctctttccctgtccaagccacgcaagacctgctcttctattgtcctcaccttgaaagccctccacaatggctccgggccccctgctgagccccagaaccttccactccctgagggaagcactggcttttcaggatcctataatcctggtctgagaggaagccagagctggaagggactgcccagccaaccccattatacagaaggggatgctcagatgccgagttccgtagtcccatagtgacttgagaactccacttctttctttaggaagtgtttccgtgtgcacattttataaactctctggtgtgtgtgtgtgtgtgtctccatctccccgttccacctcacagcactgagttgggcacacagctgctgagagcagcccgggggagtatagaagggttctgggggagcagttgctccttcctttctttgctgtcacctcctgggggtggttgtcagagctgtggtgctgagggagatgagtgtgagaatccaggtattaagttcttagtctcctgggggcttagaacattactgcgtgagaaacaggagtgtgggtctgtggaggctccgaacaagggcctgggagagcactggtgagatgagaaggtgagtgaatgaatgaagccagagatggggtgatgctccttcaagccaagaaataacaaagattgccagcaaccaccagaagctgggggagaggcctggagcagcttctcccttatggcccccagaaggaaccaaccctggcaacaccttgatcttggactctggcctccagaactgtgagatgatcaatttctgttgctgaagccactcagttgtggtactttgttatagcagccagaacaaactaataccgatttcggtgcaaatggatgttttccaccactctggcctggcccatgtggctggcctgtggtcacttctgaagctgcctggacacttggccagagctaagaattctccccaaacacatgtgggatggcctgactcagcaaagcatagatacattctcagacagggacatggagatgatctgtctgggggtagaggacctagagggccgggctgggcagccggcttcctgcactgtctgttgggacgtccctttctgactgggtttctcagaagctgaatgggggatgtttctgggacacagattatgttttcatatcggggtctgcatctgggccctgttgtcacagcccccgacttgcccagatttttccgccattgacgtcatggcggccggatgcgccgggcttcatcgacaccacggaggaagagaagagggcagataccccaccccacaggtttcgttccgagaactggctgccctgtcctgcagcaggcttggcccaggtggggtgacatgggtgctggtggatgtggtaggtgatgtccatctggccactatgacaagcccctagctctgaagacctggcccttcttgggttgtggagaggacccaggtttgaagctctgagagtgccaggcaggctccacagatactgggacccctggggtcttcaaatagtataacaccaggacctcagaatcatagaacagcatttcttagatttaaaggatcctagaatctcaaaaccacagactgtggggtctacggtcccaaagtctcagtatgtgtaggccagtgtccctggtgtccaaactccttggaaccatctgaaagtcaggcagcttgctgcttcatagggcctcttgcctaccaggcctggaaacagagccagcctccctagggcctcagtctccctgtccactctggaacaacgttcccaaatacatggccactccgccagagatggcaacagggggaggaggaggttgaggctggtgtgcctttggtctgggcctcatggggggagctggaaaagcctcagccttcgccaatacagagcccatcatcagactctctagaggggccccacaatcaaggttttcggggaccagcaccagctctggggacacacagcctgactgactgacatgcctccatcatcaccacgctctggccaactaggcctcctgacctatggagtccggggcctcacctagcccagctcttgtgaggctgggccccacactgtgatcgtggatcgtccaacctgtgggaagttggggtccaacgtgtgagaaggcagaagggggaatggtagcccaggttccccttcccccttctgggtgctgaggggtaaactgaggccttcagttggggagagagccagaaccagggtcccacctagagtcctgagatctaggcttggatttcaactctgccgctgcatttcggtgaggccctgagatctctggtcttcaatttgcccttctacactgagcacggagaggcgtggagtagacaagggccagggcccttctacgctgtctggttaagtcattaggtgtctgcagggcttcaagttgacaattgcccctctatccaggggactggctgagagatagggatacatagagacaaagagacacacacaaagagcgagcaagagagaacaagagatagtgagagacattgagagaaatggacacatgcatggagagccagagtgcatgtgtgcgagaggaggattgcctcaaataagaacatttgctggtctctggctggttcaactgatgctgcctgaaataatcaagaataaagaagggcaaggtgccagggacacccatggctgggtattgaattgtattgcaaagcaacaatcagcaaaacagtgtggccctggtataagaacagatactggggaagagaacagaatagaaagcttggacatggacccacatatggagagaactgaatttgtgatgaatgtggcatttcaaactggaggaccatggagtatggtttaacaaatgtgtctgagataattagggagaagataaagttattgagtgaatagtcagtccattatcccaacaacccctccctgcccagtttgaaatgtcaccatcatcatataccctaaaatgcccagatccattcaagatataagttttaacacctaatgctgatcttgggtttattgtgtgtcaggccttgtgctaagtatttactgtggttaaaaattttaatctaaacaaagactcctgaggaaggtactattataaccattgcagtacatatgaggaaatggaggtatggagaggttaagtgcctggctaaaaatcacacatagggcttggggtgacgctgggtttgtcccagacagtctggctccagtacccacactcttaacctctatagtaaatggaaaaaatgaagccataaaagagactagaagccaacataggtgaacatttatctcattttcaagtaggaaaggactttctaagcacaaaaccagagacagaagccacagaaaaaaagactaacctatttgactgtataaaaccatcataagcatcacaaaaaacaccataaacaaatagaaaaaaagcaaatgatgaattggggaaaatatttgctatatatgtaatggctgatgaaaggttaataaccattccaaataaagagctgtggcaaatcaataagggaaaaataagatgaacaccctattaggagtaaggacatgaccagacaaccaaaaaaaaaaaaaaaaaaaagcatgaatggccaatgaatagtaaaagtaatcacaagatgcaaatttcaacaatgtgataatgtgtttttcttacctgtcatgttgggaaataattaaaacataataatactcacctagggttagcttaagtagagggagcataaaataggacaaccttttggaaggagaattagcagagagggtcataaactttaaaaatgcacgccccctttgccccagcaactcccttttcaggaatccaaggaagcagtcagggatgtttatagaaaaaaacgagaaacaaccggaatgtccaacaatcggcacttggtcaaatcaatcaaagttcatgctgatgtgaggacagtcttgtccatcatgaaagatcatgtgttcaaacaatttttagtaagcttcaaaaacactactgttaattgaataaagcaggaacaaaaccaatatatagcatgattctaatttggttacagaaatactaatagctaacacttcgtgagcacttactttgtgccaaacgctgtgctaagcctgcagaatcgagctcaccccagccctgaacaacctgtttgcttcctgaatatggactctggtcacacacatgcagtcctggggtaggtccacacagctaaactacggttgacaatggtgtgaagtgctccctgcccccccgccccaagggtctcctctaaagcgatacaagcaaagttcagttaagtgctcagcttgccccggcaccttgcaatcctcctgctactagggtgaacagaactgatgctcactctcataaaatgtaaaggtcctcggcgacattactattattaaacgccagctgtgtacaaagctctaggctggatgctggctgggaaggcaggtgggggaaggcaagaaaagagagcgggagagatggaggaaaggagatcgatggagtgtggtcaagatggaggagacagagataggggagatggtcagaggccaggagagatgcggggaaagagagtctgagtgtagcgacagacagatggcgggagaaagagaggcagagaaacatgtaaaagagcaagacagggtgagcagagagacagagaaggatgagaggcatcaagagctaagagacaaagagatgagagagatgcagttgaaattttcagttgcacctggacagcatttcaagttgttcaaagctctgaaatccataaagactggcagctgacatattttaaaaatcctatccatctacgtatcaattgatgaattcatttatttttgcccctgcccatgcattaagtacttcacctttaagtcttctgccatttattctattattatttttttaaagaccttacctggctggaatcacggtagctgggtacatcccactgtaccagagggcccctgacccccccgccgtgcctacctccctgccatctcctccaatggggcccacatctggtaggggagagcagggacactcaccttggtgaagtggactgacagaaaaggatcagcctggcttgtgggaaactgtcacgtatcaaaaacaactttgcttttataccgagaagaaaaaccacgctgtacggtgtggaagccgcagacctctctcttctaataatccaaatttttttcgatgagtgtgtgcgctgataatcacggggtgggggggggttctcatagttttttttttctctctctctgtgtttctccttttcttgattatgagacttaaacggaaattttgaaattttgggtttttttctttgccctttacgagtcatctgaaaatatgatttcttcccctcaccacagaggtgagaggtatcaatgagataatagggctcatgagaaaccacagtttttaaaacaaaagtgtatagagtttgaaaaaaaaaaaacaagggaaaagaactaaaataaatcacagggccaacccgaggcaggcagagacaccattctgtgagtgagaggatatttgagggtctctggggaaagaaagagaatctgaagctctatgtgtggatgggaaatgccagggaaagagacagaatagggctgggttcccagaggcctcgccctactccaggcctcagtttccctatagatggaattgatatggtccccattgcttgaactacccggcgaggggagttctgcaccccctgcaacacccctcccacagagggtgaggggcatgtaagttacttcatggaggagaaagcggagagcccactgtcatcccctaaaattcatggacttgaagagtcggagaatccctggctcccagaatctactgacagttactgaatgaggaaagagagaaaagtctcgcctcatcacgttttagggcttgagtgccctgacccagccactgtcccactgggaaggtccctagcaggtccccaatattaatgcatccatcctcacgatgaaccccagaggcccattgggaccctgaccctcttgtttcaggaacatcatggcctgatgcttctgaggccctcagcctttggggtcttttacttcaaaaagccccagtttccaaggatttaggattccaaatatccgccatcatctcagtagctgatgtttatcttgaattttccatgggtcagatacagtgctgaacatgtctcacaagtgatcatgttcaatcctcaccatggccccttgagctccatctcatcattattgtattcctgttatacagatgagggaaacggaggtataagtagtcaagcaacttgcccaagatcacagagctggcgagtgtgggtcccgctttctttggtgctgggctttgaaatccccaagctttcctgaacttgatgttctcaggttttaaattctaggatgtgatggcagggagatcctgggatttggagagtccttggagacttgaagcttgtgaggcttttaggttgtccaggaattggcggctgcatctcttgacctcagcaggcactctattcaaccactggtcagcatggtagaccagcccccaggggcttctcctgacaggccatggtgaagacttccagctcccagcaccctgcaaagcccagggttctagtcgtccaacaaccactccagccctctacaagactggcttcagacctggggaagagaaattggaaagggctttttatttacatggtacaaatctggtggccaagatccaccccttcacccctttgccccctttcctcccccaaccttctaagccctcgtaaaaaggagggcctctttcctcaactcagactcacccttctggaaaagcccagaatgggcctgatggcctggctttgtgaagacaagaaaaaaaaaaaaaaagaatagaaaaaaaaagaccttaaaaaaatcagccaacaacaattaaaaaaaaaaaaaaaacacccaaccctccccaccattagttcaaaacaaaactttcgctggttgaggcttctgagttggtgggacacatctgagacccaaaaatggcttgggtgtgttggacagccaggggaggcaccaaggtgggatgaggtcccctgcttggaggcctgcagggaccctgtgaacagcaggtgtttaacagatgtcacggcatgtgggagggagcaagggagggggtgaggagcatgcatgtcaggaaggagtcctggggagctgattctagtgatggccccaaggttaatgaccccttgcagtgatggtcctaaggttaatgatcccttgcactgatgttcccatagttaataaccccttgctccctgcagacttgggtcggaatgttccctacacctcctgcgtaattataaaccaggccagttctatcagcagaggcattgttccctgccccagcacctgtccccctcctggaaaagggggctagttttctctctcaggatcagaggtgtgggctgcattctccttataccttccccagaccatctgtcccttactgtcactcactccatgaaagagagtggccagagatataggaggcaaacgaagtgaggatggtggccgagaatgtgagctggccccttgggcaggcccagggtgtgagagggaaatgctacggctgctgaaagccaagatccttgcagaatgggggctggggtcaggagggcagagaggggtagaggtcgctacctcccctctatactggactatatcctctctcatggagggcttctcgggaaggagactgggagggctgggagttgggggtgagtaggcaagattaaacgggtcaggaaaagtccccagagacaggggcctctgacaaagacttgaaggagatgagggagggagccagctagatatctgaggaactccaaaggaaacagccagggcaaaggtcctgaggtgggaatgtacctgatttgttcaaggtctacaagggggctggtgtggttagtgtggagagagcaagaagagaagctggaggtgaggtcagaaaggggactcggaggttagaccacgcaggaccttgtaggccatggtaaggactttggcttcaacgctgagtgaggaggaaggcatgacagggttgcaagcagaggagaaacacaaaccgtgttaggatttaacaggaagcccctgaatgctgagtgtacaatggggtctagggcctgaatgtggaagcaggggaccagcaaggagctggctactgcagtagtctaggtgactggtgatagtgctggcagtggaggtggtgagaagaggatggatttggtaaatatttttaatagacagccaaaaggatttgttgaagactgagagtcttggagccagatcgggacagacaatgcccaaaccaggtgggcaggaaggagtccctggactatttgccagcttgaacttttaggtgagaaaaaaataaagttctgtcttgcttaagcccccattattttatgatttttctgttacttgcagctgaacatattcatttctaactcatggacatcctgaacatggagacctggggagaggggctgctggaaggatcacctccctcctaggatgctgtgaggttctaatgagataacagcatgctcagaacctggcactcagtaggtgttcagtaaatcttcccaggatggagaaggaatgtatgaatggatgtgttcagcggacaaaagctgcagttgagttcccacagaaggtgagaccccaaagggagagcgaaaggagtttactagatggaagcagcagaaggaacagcactcttgggagagggaacagtagaagcagagatggggggacagaaagaagggaggtgaggcccctgtggggtgtggagtgtcaggttgggcaagaaggacagggctttgattgtgattccattagtcagaagctacccatatgcccaatcaacttctggtagcacacagtcaggtcagtgtttgctgagctgaaatttaaaaaagtgaatccttcagaaagttaaatttcctattcggccattcattcaacaatagtatcaagtcctggagagtgcttgcggctaacaatcaggggcattcttggcttgtggcactgctcaagaaaaggttgtagttgggcagggaggacccagtaagtaactaactgcaacaggacagtcattttcactttcctagttcacacaccaaggtgtggtctaggccttcaggggctctgggtattcctggggcaatggggagtcacggagggttagggagagggtaaccccatccctgagaagcacatttttcctaatggctgcctgcgttctatggttctgctgtccggccacccaatacctcagactctgtctacacagcgtcctcctctccagcctccttattggctactcatgcctcccttcacaccacctacactgcccccgtcggctctgcttttttccccatcttgcctccaagtcctccctccgtcccgctgcactatctagcctcggcattggctcatcccatactagtactgtcctttgaggtctctacgccttcaccctggctccctcattggctatccgccagctctcgtcctcgctcccgccttcagcctccacctccattggctcggctccctacacacccgcctcttggtctccttttagccttcgtattggctagctccaccttggcaccaccccttcgaagccgcagtgcacgctcacaagcctccccattggctcgctgcagccattgtcgtcatcccacgcgtggctctccattggctgttctctctctctagctaccgttccaccgcctacgcaacccgcgggatctcccactttttgggcctctgcgttcgttcccggctgccctcatcgcctgtagccattccacttttcccaccgcccacatgcctctctcgctcagacttccgcattagctgtctgcttctgttttcttcatcatggatttcgcaccacccccattccggcctctccattgattcctcgatcatcccgccccctacaccgcccactcccgggcatccccattggctgcgtgcttctccggctctcaattcgctgtacgtcatccgtgcatggctgcccattggccctctgcaatacttgtcttcatctcaccgcctatgcccccgtgagccgtacccctccgcgctggccttcccattggctgcccgccccttcaggccctgcccccgccggtcccgccgccggtgccgtcggtgccgccgccgccgccgatatggcgcgtacggcccctgtggagcccccgctgcggcattccgcgcccccctcgccggccgcgggtgagccccgcacctcggtcgaggcggcggtggccccgcggagggtgctgttcgccgacgaggccttggggctgccgctggcgcagttgcgccgctaccggccgtggggcgggcccggggcgggcaagatggcggcggcggccgggcaagatggcggcggcggcggcggggccgacgaggacgacgatggcgaggatggggatgaaggggaggaggaagaggaggcttgccccgagccctcaccgctgtgccccgtccccgctggcggggggttttacctggtccccacattttcgctgccgcccgcgccgggccgtctggagcgcttggggcgcgtcatggtggagctggaggcgctgctgccgcctcccggagcggtccccgggggtgccggggtgtgggtgcctgggggccgcccgccggtgctgcgcgggttggtacgcgtgctgaaccgctccttcgagaaggcggtgcacgtgcgggcctcacacgacggctgggcttccttttgcgaccacccagcgcgctacgtcccgcgcagcccgccgtgggcaggagcgggaggaacaggagcaggagatcccatcctggatccggggctcggcctgggtcccggccaggcatccgcctcctcgcccgacgacggcggccgcaccgaccgctttgccttccagctgccctttgctgagggcgcgggcgatggggcgcgcctcgacttcgtggtgcgctatgagacccctgagggcactttctgggccaacaaccacggccgcaactacacagtcctgctccggatcgcacccgctcccacacccactgatgccgaagggctgccccagcagcagcagctgccgcagctggagccacagcccgagtgccagggtcccgtggaggctgaggccaggcagctgaagagctgcatgaagccggtgaggcgcaggtaatgtcagccagcgccacctccgccaacgcagggctgtgtctgggatggaggacaagcattccggcccaggaacccctcaggcctgctctccaggacagggaggagggtgcattgagtcagtcagtcaaagagtgatggaggtcaaacacgtgctaggcactgttttaactggggttttattcctccatttattgagttccactgtaaagccctgaacaagacagacatctaccctaccctcaaggattcatacaggctcctatgggagacagtttgaaaaaacaagcaagcaagcagataggataaatagggacaaagttagctgctgaagggagtaaggggatagattgggagggaatgactgtgtcagacatgctgttaaagggagggcctttgaggaggtgagtcccgaatgatgataaagaagagttatgcagatacggtggggaggtgggggagagtttgtaggaaaaggaacagggaggacttttctgaggaggtttcatttaaactaagtcctggatgatgaataacagttatgtgcatatatggaacaagggtgttctaggtagaggaaacagcaagtgcaaagtcctggggtggaaatgagcttggtgtgaatgatcagcagtgtgctggagtggagagaactgcaatgacatagtgtggaccaagggctttgccagtggggggtagagcagattctctttctgacagagcaggaaaccaggattccagaggtggagaaactggttgaggcagtgatggcacctggctcttccagttcacccatgcctgaccttgaagcctgtgcactctactgttaacgctgtaatctacttttgagtcctgtggaggcgaggggctgagcccatgctctcacaagaaagcagtggctctagcagagagacagaaccagatgggtactggacttgaagtttttgtcccttgtttttttgccacaccacctgtgatcatttagggacagggagaaataatcagttataccccagggggccccagaagatttccctaggtttcctctatcaagctatgagttctttaagggcagcagctagtcctgattctttttgcggtcacctaagtctggcccaggatcactagattctccctaaaatgtatacatttccctgttcctgggaggactgggaatggaaatgggaaaatgctttttggaccttgtatgtatacgcttggtcagaagcccctggctgcagtaagacatttgtgggttctgctggttctggtaaggccttaggctgtgagtggttcagaaaggtctagctccggtctggtgggcagatgtgcctgggtaactgagcaggcaggcaggtacccactcacccacctgtgagccccaccataatctgagacttcatttaaagggggcaggcagcatggtttttcttacagcattaagagtgtggattctggcatagattgcctgggttcaaatcctggcgctgccacttactggccttgtgaccttggccaacgcatttaactacaccatgcctcaggaccctcacctgtaaaacagaattatagcatctactttacgggataagagtaaaggtgctcagaaccgagtctggctcaaagtagtatcatacaggtgttagctagtgtcagtatttagggagccacacctacagtttcctggattcctctcctaaattcggctccgcccatcagctgtgtggccttgcctccgtttccttctctgctaagggaaatgacagtcactttgcatggttggattgaatgcagcaaacatgggcaaggtaactgaagcatggtggtaactgcaaaagataactggccagcatttactgatttctgtgctatgaacatcagatccattctctccgtgaggcctgctgtgcatgctgtgttgtgtaggtgctatgattatccccatttagtagaggggagacaggtagctcagagagatgagccagcttgctcaaagcctctcagctagtgagtgacagggccagggaagaaatgctagggacatttatttttttctatttttttttttttaaactggtcctctagaaagcgtggcatgattcagggcaaattctggatttcactcttggtgttcccagcatgtcgtgctttccttttacctttttttttttttttgctttatcgaggtatacctacataaagtgtactgatattctgtgtatagcccagtggatttgtacatatgtatgcacttgtgtagccaccacccagatgaagatactgagcaggtccagtaccccagagctaccttcatttctatcactttcccaagctgtcatccccgccggctgtcatgggaaccctgtctgtaagatgcgacagtttgggtaaaggagtttggtcattttaaagagtgtgaaaggcagagaacagagaaatcaaaaccttgcagggccaaggtgggtggagagggtgtttttcttttaacatacatgggcggttttaaggagaaattgaagcagcctgttcagacaattgttttggtatctggccccaggtctgtggttcctaacatgacttgtgatattattttaagtgggcagatggctttttgatagcttctttatctttcgatctcagctcttgcaaaggggaggttggtgctcattgcaagatcagcgataagggtttctttgtaggtcggtggctttcttggtgagtacatttcaacatattattgttttagaacctgtgtgctgccagtgacttgcagcactgttgaagactagccaccctttgtgacctagccctcttgggaaatggcggaggatctcagggtatatcccttacctgtgggagccctatcagagggcttcctgttgaggaaatgttggctgtaggccctctgtgcactgagcacagccacatcaggtgagggcatgggagaagtccgtggtagccatcaggatagagttcagaaacccaaatggctgctttccctgggttgctggaccaggcatttggtaactctaaagcttagagatgattcatcgacaagcatttattgactgcctactgtgtgctgggcacagtgctaggttccagcagggaaagagatgcagagtggtcctaagatgtcacagggcttgtgggatggagtacagaggatttgttgtatgagacctggctgagcccctgctcttcgccaggcacttcactgagtactatattttcatgcaaggtctggtttaattccgacaacattccctgtgaagtagagggttttaaatttctctttcctggatgagcaaactgaggctcccagagtccaaagtcctagggctggtgtggggaaaagccctcctgatcttccttggcacttgacactaccctttggaagtgtcctattcttcttaaaagtaaagaccaagagagcctcaccatggtcttcaagcaccctcccatcccattccccaatctggcctccactggctcatagtcttaacaccagtggtctttctgagctcctgtcaccatggtctttctgttactccaaagggcctcgctcctttctgctgcagggcctttgcccctgctgtttccttcaccaggaacatttatcccgtaccccttgcagtctcctccagtgttgatccctcagttctaagaggacttccccaggggagcctgtccaccccagtgtcctcgggcccctggctttttcatagcactcatcagcccagcacgtgctaagctttgttagagaatgtcccatggcagagcagatgaacatcgccaccagtcgaggggtcatcggccaccctgcctagcagttctactatatttttttgatccactcgtttctcctctgaagtgactctttcaaatgttctttaccttcagactttctctcctgcttcaaaaaacaaaacagaagccataagaatggaactccctataacttgtggcccccaagtctgcacgctgatttccctcccctgtgttacagatgacgaggagtcccttcttgctcaggccacttctccctcctgtgctctgggtcccagtttctgctacttgctctagaatctgacatcatcagtcaccttttctctcctggcaggttttctgctgccctccttgcttgatcctctattcacctttgcctgtgccagcatcccttctgtctccgctgaccccacgttctctccctcctgcttctggccagcacctcatcaccctccccttcactgctgacccctgcagagttgcctgtacttgccttctgcacttgctcacccccgtaagtgttagcccccggcatctgccagattctgcaggtggttttttagttttcctcttgaagtggttgaccactcctacttaaaacactttgtcttcccttgccttgagaccacactctgctggttttcctcttaactctctggcccttctctttctcctggctcttcccttagcttcatgtatccaaactcggcatctccacttgactgatggcccaaataattcctcaaactcaccttgtcggggactgcattcatcacctctcccacagtgttcccaagcagcctctcactcccctacctccccacttgctcgttttgcttttcagcatccttaagtaagccctgcctgaccctgtagattgggccagggacccttattctagggcattctttccttttctaaaggcactgatcgcagtttgtagttatatctttattagggggttgctggatgactctctgccccgctagactgtaagctccgtgaggggtagggacatggtctgctttcattcaccactgtattcctgcaggcctgccacagtgcctggcacttagcaggtgctcaataaatgtttgttgaaataatgagtttgagtatttttttaatgtcttcctccatactgaattgtaagcttcctagttgggtttgctcaccatggtgtctccaggatccgtcactggggctgatgcacaggaaggcccactgtctttcagtgcacctataactgaagggatggggatccaacctgctatctgagttggcagcctcaggggaaaccagaataactggagttgaacgggacaagtcaggggcatcttagttttctgtagagtgaggaattaatgtgaacgtgatcctcttttatgccacagaaaacttggtagggcattatggttaaggacatgggcctgaggccacgtgctaagaaagtggcagagctgggatctgagcctgtgtggtcctgctctagtgctccagctcttagctactgtaccaggctgggtgatgcattttaccagcagggcaacactgggcaagttgctttcctttcagagcttcagtttccctcaatggaaatttggagggggttactgttaagtgctttataggtacttttcaaatatttctttgatctgctgaacaactcactgatgtaggtattattatcccctccttagagatgaggtaactgaggcacagagaggttaagtaacttgccccaggtcacacagctgataggtggcagagctggaattgttcaaaattgcatatcctaaccctttattgagttgtgaaatcaatttactgggtttcaacaagcattaaaaagaaaaaggaaatagcataagaaatgccagtgtatcaccacatgcagtaaaggtaagtattgtttcactcgaagaacaaccatttttcagttatttatatgtctgtttacacgtgtgggtgtgctgggttatgatgtagaatggatttcttactatgggtcgtggccaaagaatgaagtcatggctgttgaagaagctcatggcacgagaaactgctctccctctaccccactggatcacccgcaagtcccagagttgaggctgacacacttgttggggaaggcaaagcagtgccccacataacttggtggctttcacagccaccttcaaaccctgttcttttcagaaagcagatggctcagggtaactgcaattctgagtatcgtggggcaggtttctgaagccactcatccccccggaaagtcagcgttatcttcaggttgactacatgggagccggggtctgctgagtttccctttgggtttcagtgcctgacccactttgggctggcaaaattctttgaaaacatgaatgctgggggtgctccagaggactcgggtggtggtggcaatggcagtctgtgactgctctgaaagtctgctttgcttttctccacagggcttgtcagccctcacccgctcgcttactctgtgactggcgaatcacctttcttggctttcttggctggcctaggccggggccaacaccacctctttccaaatcctcaccctctggtctcctcggggcctatcagcttggcagccattgtgtttcctgatggccggaggaatttgcacgcccaggagactggcgtgcaggcctgagatggccccttttagtcgacaccagcttgactagtgctcactagcacccaaatgatgcatgtccaagattttccagatctgtgtgccctggcccctatggctcactgcccttgaggggatgccacgtggtacttgtggggctggtgccaaaagaacaggtttccttcttgaaaacgagcaggcatactgcaggtacagttttgttcttaatcttctccctccccatttttctaagaacccctcttctctgttaccgatcagtgagtcagtatacatttgtacttgatttctcttactatcctcatgttgattgaagtcatagctgcccttgagtttttactgtgaaagacggttcaaagataacttgtttctttttaagcccacaatttcaaactctcttcaaagtggagccctcctggagtgtttgttaccagcgtggttgtgtagtcagtgagtgtagagatgcagttccttgagttttagtttttgcatttgtaaaaaggaagggtgttgttttgaaggatagatgtgaaggttttcaaatgccttggtgtgtcaatgagaggggcccatggtggaggaggtgaacaatacatgcttgtgctttctgctttcatatctgactttggagaacgacttgtttgcttctgtcgatgttgtggatcttgggattggctcaatggcgtgacctgctttttggatgttctcgccctcctcagccatggaaagggtgctctgggggctgaaggattgattgtgtatttgtttttctttctccttcctccaactgaattgtggagtcctttacctgctggctagctgattcctgagtgttctcctttttctgtctcacatctatgactgcagtggcttttagaagcctgtttgtaatatatgtccggactaggccagatggaggagaaggcttgcctgctactgcgcacaggtgggagggctggctttctgtctgtctgtgggccttcttgaagaggcttggtttagaagatcctaggaggaggatgttttctgtcatgaaggactatggtaacaaaaagaagtaagttagtgcagcctggcagaaattgtgttgaaacaaaagtccaaagacctggattttaggaccacggaggggattggtgtgagaccaagctggtttgctctgaatctctctttctcatctgtgatgtgtgggaggtggcagctgggctcccagagtcacccaccctaggccctgtagtattctgattcaagtacctctggtgggatttgtgagtcctagacagtagagaaagacagacggtcccttctagactctagatccgtatatatggttcaaatgttctccccgagggtgtttatagaaagcagttcttgcagccattctgtgtctagtggcctcctagccacgcatgtcccaggcccatggaggtagggaaatggggaatgaatatgtgggcaaaggcaggtccaaagaaaagcctgcatgaaggaggagggagggatcttgtctagtattgatgcctccctctatctacttctagaaaggatggagatgggttgggtaagaccccagtctccctcatccaagaagcagcagctgactgggtaagagccaaaaggcctgggttgtgatgtgaagtgtatgaccttgagccatttactcagcctctgttttatcctctgtaaaatggagacaatagtactgcctgcttcagaggattacaagtacctgtctcatagggtgattgtgaggattgaattaacacatgttgcccaggcaccgtggctcatgcctgtagtactaggacttcgggaggctgagatgggaggatcgcttgagtccaggagttcacgaccagcctggtcaacgtaggaagaccccatctctaaaaacaaaatacaaaaaaacaaaaacaaaaaccaaaaaaccccaaaaacttctttaaaaaaatgtgaagcacttagaacagtgtgtaatgccatagtaggtactatgtatgggtcagatggtgatactcgtttctgtgaaggtaattggttatgggttttcaaaaagtttcaaccaggccgggcacggtggctcatgcctgtaaccccagcacattgggaggccgaggagggtggatcacctgaggtcaggagtttgagaccagcctggccaacatggcgaaaccccgtctctattaaaaatacaaaaattagctggctgtgatggtgggtacctgtaatccctgatacttgagaggctgaggcaggagaatcacttgaacctgggaggcagaggttgcagtgagccgagatcatgctattgcactccagcctggcgacagaacgagactccatctcaaaaaaaaaaatttttcaaccattgtcagaagtatcaagaatgtcacattgcctcttaggaagaaaaaggtgtgggcattcgccccagctcctctcaggttttagtcaatgcttccctcatttaccttaatctgtagacacttgatactcattttcagaataagaacagtgacttctccatgatgagatgccacccctgggaggacccacctgaaatgcactcggcttatgccactcagggatctgactggcctggtgaaggaggagcaagacccataaatatctacagttgattcaatcccagctgtgtgtcaggccctgatttctggctgtccatcctcattcctcttgactgccctgtgcttagtgcacatcctgactccccggggctctgttttatgagtgaggaggtgaagcgacctgccaggctgatacggggacgagagggttagcatagggacccaggcctctgtgacctccctcccagtctccatttgcattccttcctctgcctcacagtcttgtctacctgccatttcttagaaaaggtgtttttgttttgttttgttttgttttgtttttgtgagataatctctcactctgtcgcccaggctggagtgcagtggtgtgatttcggctcactgcaatctctacctcttgggttcaagcgattttcctgcctcagcctcccaggtagttgggattacaggcgcccaccaccacgcccagctaatttttatatttttagtagagacggagtttcaccatgttggccaggctggtcttgaattcctgacctcaggtgatccacctgcctcggcctcccaaactgttgggattacagatgtgagccaccgcgtctggccctttttttttttttgagactgagtttcactcttgtcccctaggctggagtgcaatggcgcgatcttggctcactgcaacctccgcctcccaggttcaaatgattctcctgcctcggcctcccaagtagttgggactatgggcgtgcaccgccatgcccagctaattttttgtatttttagtagagacagggtttcatcatgttgcccaggctggtcttgaactcctaacctcaagtggtctccctgcctcggcctcccaaagtgctggaattacaggtgtaagccaccacgcccagccgaaaagatgggttcttctatcttttctctttccatagccaggaatgtatcctaaagaaatgatacaagtgtcgataaaactatgcccaatgctgtttgctggtttgctttgcaacctctaaatgaaagaacttagctgctcagtaggaagggaatggtatgatatgagtattaagcagccatttgaaatgtttgcaaaagtgtataatgatgtttcttactgttaaatggacaaagctagctgtgaaattatgtctgtagaatctaaatgatttcgtagaatatctggaaggaaattttccagaatggtaacagtagttgtctctggctgatgtgtgattgtttttcttgcttctttagactttcctgtattttgcgaattttctataatgaggctgtaggacttttaggatgaggggataaacaaaggcagcagaagagaaaacagcagctgtcaggtgaaggtgggctagcacagaggctcagaaggtgccagtgggtggcagaagtgacctctcagggtattattagatccatgtactctctcctctgccctgcaggcctgccgaggaggaactgaagacgaagaacatggatgataacacctttgccatgggtaagcaattggcaagcttcggaagttttagcttgtatttaccatgtctttcttcctactgtttttctttctataaaaatgaaaaaggctgggctcagtggctcatgcctgtaatcccagcactttgggaggctgaggcaggaggattgcttgaggccaggagttcgagatgagcctgggcaacatagtgagacctcatctcttaaaaaaaaaaaaaaaagacgggcatgctggcatgcatccgtagtccctgctactcgggaggctgagctgggaggatcatttgagcctgggaggttgatgctgcagtgagtcatgattgtgccactgcaccccagccttggtgacacatcgagaccctatctcaaaaaaaaaatgaaggggtaccctctgctttagattgtcacagaaagcttcagaggcaaaactgccagttggctaggatggcagattttcttaacaaaaccatacctacttgtatgcctgtcttgcccaatgctgcctttctcttccctctagcagagcatcctgatgtccaggagtcagtgggtccactggtagcccccacccctctccgtccatggccccagatgacacttcaggtaagtgggtccttgcagccttggagtagacagcccaataggaggctcacagtgtgactattgctgggctgggtggtggggcccactagctctgggtcctccctgggttggagggagggcacaaaactcagaacctgatgggggagggggagaatgcagttactcagctgggcttgtagaaatgtcatttgttaatttagcaaaaatttatggagtgcttgttctgtgctaagcactgttacaaacatgcaaaaacgctctttgagggggcttatgtgttagtagggtgagacatgataaagtaatagaatatatggtactttaggtgatgatgagtgataaggaaaaatagaaaggaatagggagtgggtgagagactctgtgtgtgtgtgtgtgtgtgtgtgtgtgtgtgtgtgtgtgtgtgtgtgttgtgggcgggggtcggttgcaactttagattgggtggcctgggaaggctttagtgattagtgagatctgagcgaagatctgaggaaggtgagagagtgagccacgtggataactaagggaagaacatcccaggcgagtgtgaagttcctgaggtgaggccatgactaacgtgtgtgagggacagtgtagaagccagcgcagcaggggcagaacgagggagggggagagtggtgcggggtgagggagagaggtggctgaggacagattgggtggtgcctcacaggccatggtgaagactttggcttttactccgagtgagggggagccgcaagagcattgtggacggaggagggatgtaatctgatttaggatttaacaggctccctctggctgctgcttggaaaatagacgtcagagtaagggtggaaacaggcgactcgtgaaggggaggccactgcagtggtccaggcgagagtgatggtaggtaggggaggtagagacattttggagggtgtgtgtgtgtgtgtgtgtgtgtgtgtgaactttttaattacaaaaagtttcaaacatacaaaagtaaaatagtataatgaacctacgtacaccatcccccagcttcagtaaatatcaacacgtgctcattcttattttatctgtaccccgtctcctccctcccattccctctggaattattttggaagacatccagacatcatcccatccataaatacttctgtttgtatctcagaaaattaagaactcttttttgtttttttttttgagacagagtctcactctgtcacctaggctggagtgcagtggtgtgatctcagcttactgcaacctctgcctcctgggttcaagcaagtacatccagctaatttttgtatttttagtagagacgggatccgttgccttggcctcccaaagtgctgggattacaggtgtgagccatcacgtctggccagaaaattaagaattcttaaccccacaatactatcatcacaccttagaaaataaacggtaattcctcagtatcatcaagtatttggtcagtgttcaagttttcttctctcataagtgtttaggatccaaacaaagttgacatgttgcatttgattgatgtgtctctttagatttttaaaatctcccccactttgtttctttgcaatttgttggttgaagaaactttgcttgtcctgtagaattttccagtctgggtctggctgattacatccaggtggaaatacatttcttactccatttttattaatttattaattatattaattaatgtaatcttattaaatttatttaatttatcaaattgtattaaacgaatgtatttaatcttttattattaaattaactagaattaactctatttaattctattattcccacttcctttattagctagaattcttctctaaagaaaaactgtcccacaccagctatttggctactttgagatatagtttgtgcagaaaaagcagtgtaaatatttaattttttccattttatttaccagttttcagagaagtactactacaaaggtgaccaataaaaggatttttggttttgtgtcattatgaactcatgaattctaaacatatttgaatgagtttcaatccattgcacttatttgtttgctttttttgatgcttaaattgaactatccctggctagtaggagcttattgagatgggctactctgtccttttgacacgccctcatcattctgtgagcctttctcacatcttccatgacaatatgtgctaggttcatcctgtactctccctgccccaagcctggaaacagccatttctttcttgcttttcttttctttattttctttttctttttctttcttttctttcctttcctttctttccttacctttcctttctttctttcctttcctttgtctctctctttctttcttttcttttactttatttttctttcctttctttcctctctctctctctttctttcttttttctttttctttcttttttttttttttttttttgagtcagagtctttctctgtcgcccaggctggagtgcagtggcacaatctcggttcactgcaacctctgccttctgggttcaagcaattctcctgtctcagcctcttgagtagctgggattacaggcacatgccaccacacccggctgatttttgtatttttgcagagatggggtttcaccatgttggccaggctggtcttgaactcctgacctgcctggtgatccacctgccttggcctcccaaagtgctgggattacaggcgtgagccactgagcctggccagaaacagctatttctttaaggagcactgattcctttcagtggagagtggcattcaaaggccaagatttgggggctcggcatgcttgctgctactagattggtcattgtttctaggccctttcaaaagatggagctaggaaataattgttttttaaagagaagatgatacatcatgggttcatatggacatcctggctatgttttgggatttttttgcattttattttttttaaaatttttttaatttttaatttttgaggggacatagtaagtgtatatatttatggagatgttttgatataggcatgcattgtgtaataatcacatcatggagaatgaggtatgcatctcctcaagcatttatcctgtgtgttacaaacaatccacttacactctttattttttttttttttgagacaaagtctctgtcgcccaggctgcagtgcagtggcacagtctcggctcactgcaatctctgccctctgggttcaagtgattctcctgcctcagcctcttgagattacaggcgcacaacaccacgcccagctaatttttgtatttttggtagagacggggtttcaccatgttggccaggctggtctcgaactcctagtttcatgtgatccgcccgccttggcttcctaaagtgcttggattacaggtgagagccactgtgcctggctacttacacttttagttattttaactggctctgttttgaaggtaagccagcagtatttagtgatgatcattcaccaaatattcacacccaccgaattcctcagctttataatctgcaagaagccctgttttactgcatccaattgtgttattttaccatagatgacagtctttggagtctagacagtgacagagggcgctttaaggcatttttatatagaaacccctgtggggctggctgtgggctgtcacacttcttactgtctctgcttgttccatcccctcctctgcttcattcccttgctttttctctgcccccttgccccggccatggctccaggtttctgacgttccgatgactggcaaccccgcagaagaaggtgatgtccccagaagcagtccacctgtggcttttacagaggtcctccaggcaccggccatcaggattcccccctcctcccctctctgtggcctgggtggctcccccagagaccaggcctcagggcccgatgcgagcgagggggccaccgggcctttcctggagcccagtcagcagcaggcagaggccacatggggagtatcgagtgagaatggaggggggctggaggctgtgagtgggtcagaggagctgctcggtgaggacaccatcgaccaggagctggagcagctctacctgtctcacctgagccgcctacgggctgctgtggctgcgggtggggcagggggtggtggggagggctccacagatggagggatgtcccccagccatcccctgggcatactgacggaccgcgacctgatcttgaagtggcctggccctgagcgggccctgaacagcgccctggctgaggagatcacgctgcactatgcccggctggggcgtggcgtggagctcatcaaggacaccgaagaccctgatgatgaaggggagggtgaagaggggctctctgtcacaccctccagcccagaaggggacagccccaaggaatcgcctccagaaatcctctccggggcccgttctgtggtagccacgatgggagatgtgtggctcccatgggcagagggctcaggatgtgacggccctgtggttctgggtacagagggtcagttcattggggatcctgagaaagggatgggcaaggacaccagctctttgcacatgaatagggtgatagctggggtgactgagtccctgggggaggccgggacagaagcccagatagaggtcaccagtgagtgggcaggcagcttggatcccatatctggcaaggagccagcctctcccgtccttctgcaggggcaaaatcccaccctcctcagtcccttgggggccgaagtctgtctctctagtgtagccaggcctcatgtgagctcccaggatgaaaaggatgcaggcccaagccttgaacccccaaagaagtctcccaccctagcagtccctgcagaatgtgtgtgtgcactgcctcctcagctccgggggcccttgacccagactctgggggtcctggccgggctagtggtggtccctgtggctctgaacagcggtgtgtccctcctggtgcttgcgctgtgcctctctctggcttggttctcataggctctgcttgtgggatcagcagaggcttaagatgggatacatggcctgtgcagtgaggggacctgggtcctttgcttctgagaatgctcaactgaaagagaggccttctcatccccaagctctccagtcaacacagggctccctgtggtgacaccagtggagatgagggaacgggtagatggtgtgagtgaggggaacttttagagtggaactgggcatgtcctccgcctaccccccgagcctgtatttatttttgtataattctctggatgagggagagtggtcgtgagctggtcttggggcacaattacccagagatatatttattaacagccaacctgtgcaacctgctggagctttatttttaatttaatttatatagagtacctattattatatgccacaatagagctctatgagaaacagtgtcttgcggtgtagtgttctcctgtttgggcatgagtgtgcagggtggtcactttctgtgggaggatcacagtggggagttgggggtgggacgtggtcgcctgctgctgcttcaacatgtctttccttgaagatgtgtgtctcctcgtctcgtggtcctaatccatatggttctttgtcttttccacattctgcctgtgggaccctacaggtgtgtatttggatggtggtggtgggagccagggaggaagagtggcagccacatgagggtttggtgtcagtcacatggttgcagtggtagctgtggtctcctgtggatgtggggacatcagttgtgaatcagccacaaggttttgaggttactgaaaaaacagcctttgacaccagcagggagaccccttagtccctgagataaggaaggcctcagaaaggaaagaggagttaatgtactgcagtacttggtagcacagttgctgtccacagacatcacatttctactaaaaacaggaagcccagaagctttgaaagaaagatatatatttattgcatgcaaataaaaaactgctcaacaaaataaaacaccacatatttatttacttccctttacagcaaaacctattggaagaaatatctatacgagctttcttcagttcttctatgatgcctttctgaaatagccccaatcagatcttttttgcccaaccatttcagcaaaactgctgaagatattcacattgttatagccatggttaagtctcagatgtcatcttacttgggatattggcagcatttgacatagttgatcatctctaccttgcaaccctttcttcacttggtttccaagataccacactctcctcatttcccttcttcctcactggccactgtgcaaagctgtcagttctcttgaaactgctttgtaggttcaatgcaaatccaaccacaattccaatagagttttgcctgtgtgtagatcatgacacattaattcttaaatttatgtagaagtgccaagactagccaggacactgatacttattgtaatggtatattcagatggcacgatatttttgcaagagtagacaaatcgaccaataaaaaaacagtgatctcggaaacagtgtagacacactcgtgtagacacagaactggtgaccaaggaagtgtgttagaccagtggggaaatgattggattttgaataaatagaacaattggttacccgcattgaaaaatatgaacttggatccctactttacaacacaaataaaaataattctaagtgggtttaaagcctaaatgcgaagggcaaaaccaaagcgctttaagaatacaatgaggcagggccgggtgctgtggctcactcttgtaatcccagcactttgggaggtctagatgggcggatcaggagtttgagaccaccagcctggccaacatggtgaaaccccgtctctactaaaaatacaaaaattagctgggcatccacctgtagtcccagctgtttgggaggctgaggcgggacaatcgtttgaactcagggggcagaggttgcagtgagccgagatggcaccactgcactccagcctgggccacagatcgagactccatctcaaaaacaaaacaaaacaaaaaacaaggcaaaacaccttcgtatactcatggtagcaaagtttttcttcatcacgacacagaaacaaccataaatgaaaattacgaaacattcagtgaccttaaaattaggaatgtccattgatcaaaagacaccataaagagagtgaaaaccttatgtagtaggttgctatgaataaaagcaaaacaaaaaggagtgaaaacacaagtgaaaaattgggaggagataatggaatcacatataactgatgaagggctcaaaccttagatgccaataagcatctaaataaattgtggtatattcgcagaatggaatattgtataatgagaatggaagatccataactgcacgaaagcatacagatgaatcacaaaaagccaaaaaaaagcttccacactgatccatttatgcaaagttcacaagcaggcaaaactcatgaattaccacctaaatggtgacattgtaaagaaaagcgaggggctgattaccagagtcaggatagtgttcacctctggcagagggagggatgtggctgagaaggggcccagagga

SEQ ID NO: 6 - DNA, 21598 bp, Homo sapiens
acactgccagggccatggagggtgggtcatgtgggctgtcaggcatagtgtggccgcacagggacctcacaccctcaggcagagctgtccagtcacactctaacacagaatagtcacacacaatccatcccagtcacccctgacacagtgacacagtccctgtctggtacacatgaggaccctccactgctagccagcctgccccaggcaggggctcatggctgccatggtgtctgccagatcttgtctgatacgaaggagcttcagaaggaaatcaactccctatctgggaagctggaccggacgtttgcggtgactgatgagcttgtgttcaaggtgtggggcaggttgggcgggggtgagtggggtgaggctgggctgctgccttgtgcatctgctaattggctggctggggtccagacccaggccctgtgcgaggctggaggtgcactgatacccagggctggctttgtttcatggaggatgaagctagtggggtggtgggagagggtggccttcttagggcatggagatggtcaagggcagcccactgatacctttgaggtccctgtgtctggtcaggatgccaagaaggacgatgctgttcggaaggcctataagtatctagctgctctgcacgaggtgaggggagacatgtgcctggggtggggctgctgggggtgggtgggactgggtgcaagccttctgctcctgttgtccccagaactgcagccagctcatccagaccatcgaggacacaggcaccatcatgcgggaggttcgagacctcgaggagcaggtgaggcctgggggcaggatggggagccaaggcgggccggggggacagttcctcaggttatgctgacagaggctgtggagccacacacagccgatggctggacacccagccctgccccttagtgcctgtgacctgggacaggcaagtggcctactgtgagccccagcttccaccccaagggccctcctgtctgcctcccagggccatgggcagaggcttcagcttaaagatgtagggggaatcctgccacatggcgaaggatgctttgggtagagggaacaccacacgaggcctggccatgggacagagcaggctgttggagttggtgggaggggcccagagtggctgtgatgggggctggtgagcaggagctgggaaaggggctgtgtgtgctgagggggcatgtgttcacattgcctcagatcgagacagagctgggcaagaagaccctcagcaacctggagaagatccgggaggactaccgagccctccgccaggagaacgctggcctcctaggccgggtccgggaggcctgaggagccgccggcagaggtctctccccagcctcaggcagggatttggggtgctggaggcagtggccaagcacatgccctagctacttcctccgctgtccagttcctcctgctgcggccttggacccagacccctgcccactgaccgcaacccttatatggggtgatagtccagcatgtggggagctcggctgcagtttattggggacggtactgtgggttgggggccttggatcccaaataaatgagtagttcctctgcagtctaagctgaggcatggatcagggctcagggaatgggagtgaggtgagtggcaggggagacacggggtatttttggcaaggcagtgtgtgtggctgtgtgtgtctgcacgggactcaagagacccactggggggctgtgcgtgtgcatatgcgtgagatacacaggtgaattctaacaggccgtgtgtgtgagcgagcacgtgttgggacctcagatcctgagggtactgacgctgcttctgtgtaggcctctgggcacacccctgtgttgacagtgcccctgtgggccctgaggctggctgtgggtgcgtgccttggggtgtgtgggttgtcagggctgtgcttgtgtgtgattgtgtgatgatgcagctttgaggttgtttgagtgtactgaggcaggctctctgtgttttggggtttgtgttgagtgagggacaggattgtgacattttgtgtgtctgtgtgacttttccagccctgaagtaatctgtgcgagcagctgaggcaggctctgtgtggctggttgtgaaggctctgtttggctgcagggctcgactggggggtgtgtctggggcggaggtgggggctggggccaggaccggggcccctctgagcagccttggggcaaaggatatgatgggggagggggtggctgccagcgggggaacaggggccctggcaggcaagacagtggaaacctcacttcttggtccctgtgggcacatccagggcctatcatccctgcccccaccacctctgcctcccaccagtttggcccctgttcgtccatcctcctttccttgatcttgaggtcaggggccaggtgtagggttggaacacctgctgggcctctggctccgtttcttgcggaactccagctcatccacggtccacacagcccccttctcgctctccacccgcacaaagcacttgtgcagactcaggttgtggcggatggcgttctgtggaaggccggggacagggagcaggtgggcgtcaacctctgaggccagcagccaccaccaacaacccacatcccgttcctccccaatgtgcctatgagcccagacccaggcctgcccactttgagctgcgatggcacttgaggccatcccagtcaccgccacctcagaggagctcaccttccaggtggcaggatggtttctgaagaaggcaaacatgcgtgtgaaccagtggtagatctcattgagtgtccgctgcttctctggagcctccaggatggcctggaagttggggggtggggtaaggggcacattccccaaacttggggtttagaggggctatgacctaccccgagccatctgacatgggggcggaattgtaggggcaggtaatcagggacaggactagatgtggggtgaagcatggggtcaaagatggggttagaaaaggggtgaagtgtcgggttgggcagggttagatgggtgtgggtatggttgttctgggattaggtaagggatcaggactgaggttgggagtggggtcttgttcagggctagggctgaagtgaggtgaaaggtctgggatggagttggagttggggttctctgtggaggtgacatttcagggttggggaaggtgaagggtcagaagtggggtcaaggatttggaaggggtaaagggccaggccaacttaagggtcagggaaggggtgggttaagagtcaggctggggtggactcaggtggggggtctaggggtgagggatgggatgacttggctttaggtcagaagccagagatggtttgaattatcgagtatcttacgtgtcagggacatggttaggtggttaggctcagggcaaggatgaggttagttgtggggttcggtgtggagtgaggctgagggtcagggaatttgatcagtttggattcaggaatgggattacagagtcagcgatgatgattgcagtgaggctatcagtcaggatggggctaggtcagggtttcagttcagagacagtcggggaatatctggtatcatgtaggggtgaggttcaggtttggggttaggtgtggcgctaggatgaaggttctgagaaggcattggggaggctgagatgaaggagttgggatggggtgatgaagttaaggatcaaatgggtgttacaaggaaaggttgggaatggtgcccagttgggggtgtattgacatactggggtacgttggggccagggaaggagatggggttgggttggcataaaggctggggaaggagttagagtaagagctggggtacgtttagggcaaggtgcagagatggggttagctttaggctattttatgggtccaggagagggttaggtatggggctgaggtggacatctggaaaggggtaggtttagggtcagaatttggcatgctctggcctggatggtggtttaggtttggatttgcggacaggtttggggtgaagccagcatgaggggtcacatttgaggcacggcttggggatccttggggctggggcttgggaatggaggaacccactctgagggcactcagagggagacaggagtttgggaggcaggtcccccaccccatctttgtcttcctcctccttggggccgagctgccctgcttacccagcggatgagcgtggcgtaggtgaaagggggtcgcatgttgtggaacttgaagtagtccatgttgtggaggaactctgtcagagggtggggatgaatcaagccccatgcaggacctcctagctagctccctgtcccctccccctacaaggtgagtctacaggcctgagatctcaccgtcaacacccgtgtccacgggcacaggtactgtttgctgagcacctgacataagttgtatcatttattctttgcaccacttctgccaaaatagttctccccgaggttgaaaagaagcggagtaacttgcacaccaaaggatgcaagaggttaaatggcagagccaggatgacagtcaaggtctctgatccctgctaagcccacaggccaggcctggtggagagcagtggataggtgagctcgggcgaatccaccccgattttccttggtcaggggaggaaaggaggtgctcctggaattacttagcagggtccctcccttctgatggccgaatatagtagctggagtccagagtgggtgaggcatggccccaatccccaagggagtcagggctaggggcccgacactcgagaccatatggggggctttcaggccacggacatcccgaaaggaagcttttgtgagcggatgcattttcccaaaggctgagtggcggcagctgcagtggtggtggtggtgggaaggggcagcatggagctcctttgcaccctccacccagagcctgtcaggattaggagcttgggggcaccgtgtagtgcaaggaccattcttacctgggaatgtgctgtttccatggctaccccacaggtgcctccggacagcaaacaggctgtcaggggcctcccgggggccagaccaggctgggacgacagggccttggctgccagcagctacgatgcagcaggagcccttgtcggatgatgcctgggtgagggggagaggctggtgacccagaggcttaaacttcccactttttactttctattttatgttttttattttttttgatactgagtcttgctctgtcgcccaggctggagtgcagtggtgcaatctcggctcactgcaacccccacctcccagattcaagcaagtcttctgcctcagcctcccgagtagctgggactacaggtgcccgtcactacgcccagctaatttttgtatttttggtagagatggggtttcaccatgttagccaggctggtctcgaactcctgacctcatgtgatccacccgcttcagcctcccaaagtgctgggattacaggcatgagccactgcgcctggctccactttatttttaaatcagtgtttttcaaagcaaggacgccctcttctaaattccagtctgaggtggaatcccacaaaacagcatgagccgtatttattagagcacaggtgcggatgtcgtatgtggccactgatgctgggaccatgaactggggttgaatagggctctttaccacccaactgtgaccttgggaaagtcacctaaacccccctggcctcaatattcctcatctgtacattcgcatcatgagaaataaattaccaccagcaaagcgctcagaaacagtgcctggcctccagggctggcttcatgggcgtgtgacctatgtggttatgtggcaccctgtgctttgtttaatgctctgtggtcgccatcttgaaatctgaacaaggggccctgcaggttacatagctggtcctgctggcacacagcctgcatctggcaagtctggctatttgcatttgctttaacaactcaggatcacagtgtttggggatcttagagtcagagggttttttttttttttttttcttgagacggagtcttgatctgtcgcctaggctggagtgcagtggtatgatctcagctcactgcaaactccgcctcccaggttcaagcaattctctgcctcagcctcccaagtagttgggactacagacacctgccaccacgcctggctaattttttgtacttttagtagacacagggtttcaccatcttggcgaggctggtcttgaactcctgacctcgtgatccacccgcctcggcctcccaaagtgctgggattacaggcgtgagccaccacgcccagccggggtcagagggtttgtaagtagaaggggacagatttccaggtctgggcatgtttggagctggggacaggggcccctagctctcaggacctgaatgtgaggttaggttccctgcaccgtgcagacctcctccctgccccccagcagtctgagtctgccaccaccagtcctggggtcgctcaccacagatgaagccttggtcagtgccattttcccagccaggtgggcctgcatggcactcagcttctccttctccagcaccagctgtgaaatggcacaaacatgaggcctcagcctggcccttctctgccacatctttgcccaggctacggtcttccctgggagtgcccgctcctcttccttcctttataccagccctcgtcccaggtgaacttggtttctggcacatggtggacagaaggttttgcgcactatccctatcccttaccctccaccgccctggcattacctgctgctccagagactgtaccatctctctctggaggagacattgtgccctgcccttctcatccagaagatggtccgcctggcagtgcctaagtagggagaagattccatgcaggtgaccacgacaggcctggtctggctcaatgctctgaatggggagggcccagaccctctgggagttctctcctctgagccccagctcccctcccctctctacctcagtctccctctcacacccctcgttcccttaacacatgcccctcagcacctactgcatgtcaggcctgaactcaccacttgagcctggccagagtgctggagataatgttggaagtgtggtgagttgagaatgggccagggaggtgagagtgggcaaagcattctgggtggagggacggcctgtgcaaaggcctggctgcaaggaggacaggacatgtggggttgctgctaagggttgtgtgtagtgtggtgtgtatttgtgtgtgtgtgtgtgtgagagagagagaaagagagagagagagagagagagagagagagagagagagagagagagagagacatatggggggactgaggggaggcagcagcagccatctagaggagctagaactttgggaacagtggaataaggctggcatgttggcatgaggagtagcagggcaaagcaggagtgcagattctagagcctggctacatgggttcaaatcccagctctgtcactcaggaactgggagattttgatcaagacacttaacctctttggcctcagtctccttgtctgtaaaatgggggtaaataacagcacaaacgtttcttattatacatacgagaaaactgaggtcgagagaagctaagtaatttgtccaaggtcacacagccagtcagggatggagctgggatttgaacccacagtctcagagtttagctcttgcatcttactacttattgggatgaagcctgagctgagatctgcaccctagacctctccccacaagccagggccggtagactggcacaggcctgggccactcacttgaggaagtcctctggctcttcgaagaccttctcacatccgggccacttgcagacaccatttgccagcagtgggtaggagctctggggcacagccgaaagggtgctggggggacagagggtgtcaggggaggggataggagggcgaggatccttcccagccctgtccactgacctgtccttcctgggtgcactgggatttgggaaggtgcagagcagtgccggctccctggacacccattccaggctggccacgttgatccctgtgggtggggacagggcacctatggaggctgtgggctgggctctggagcttggcccacaaggcctctcattttgagcttcccaccctcctgagcctcgaaaaccctgactcccagggggctctgctgtccccaaagtcccaggcttctggcagagaagcttaaagacggccattcgcaggtgctgacattttgactagctttgtaaagctctgtggttttgtgattttgacattctgcatctttaaggttctgcacctgacgttttttggagggtggagtttccaagcctctgagacctgacacctttgacccccagagtactgcaattcagaatagcctacactgctcacagccaaggatctggggacttgggggttctgtgaagccatggggtacgggctgaggtgttaccaggtgggaggccaggccgggccttgagggagaagaccccagtggcggtggtgggtggtgtgaggctgatcatggctgggctctccagggggtgcacctgcagcacaggggtccgggcgtgggcatccaccgttgagagctggggggcacatgtgggctgtggttcagcctgactcggggcccctccccacagttctcccacctgctccctcctccctgcccattcaccgtccatacctggtgcatgaaatgtggcctgtcctggaggagtgcctgtaagtggggcaaggggcccagccgtgccccggagggtgccaccatgactaggggcagtgtgggcagctgggcagaaaggcaggtgggtgagaggccatcctgatcctcactgttctgtgtctaattcaaatactctgcactgcaagcccacatggtagatgctatgatcatcccccttttacacgtatggaaactgaggctcatggagatcgagtaactttttaaagatcaaacagctaataagttgcagagctggcctcagccctgtcacctcacctacttggccccagtcctcttctcttgtcacatggggatggggacacatagctatgctcatgggactacaatacggcctcctcctctcctgagacagggattgggaggtcggggagagcctccaatctctgaggcctggcaggtggggattttcttggccctgcaacatctgcataagtcacagacttgcctgggacccagaaaccacttcctgtgccccagccagcccccctcccgcccagtgccacagtaaaggtcggcacctgtaggtccaggtaccccaccctgcctgccccatcctgggcccagggcctcacctgcagctgcgatggtggcatggggttcaaggaagaagaggaggcatgggccccgcctcgaagatctcggccctggaaggttccccctgggccccgggcccccagcaggtctgaggctttgggtgcagccctccagctgggcgaggctcctggggatgggccaagggccaaggaaggggccgagggcttgccaggcctggggttgggcatcgggtccttgtccaagggcaggctgcgtagacaataggggaaaggagtcacacgtgtgctagggcggtatgagatactcgaccacctgagccacgtggacactcctctggtcaaagcaggcattggctgggacatgtcccgaggggccccatagttgcaccccagctctagacacacacacacacacacacacacacacacaccaagaacacaggtacatgtacatacccacacatgccccacgtgcagaggtccagcacctggcttgcctgcccacgctagcacagccctggtgtggatgtgtcctctatgagggcaatggttgtttccccctccacttgagagctgtttcaagcctcaggcctctagccctccctgcaccctgcacaggctgtgtttgctcatcttgccggagctggtctcggactttctcctcggagtcctattttgccccagtgactaggcatggactcaaaagattcatctggctgctgtgagtggggctagtgaggaggctattgtaacagtcctggcaagtgatgatgctggcacagaatgggctggtggcagtggagaaggcgagaagtgggtagattctgagacttaatctgaagctggatcaggagcagtgctagcagcttggatgtagtgggcaagagggagagtcaaagtgacatgggttttagcttgagcagctggaaggaccgagctgacattacctgagatgggggacatggcggggagttggattgggtgcaaaagtgcaggtgtagatagacatgaagagtctggcattaaatatgtgagtggaggagctgagggggcagctgaatacgggggtctggatctcagggcaaggaggcgagtccaggagtgtgatcatgcacggatccagcatggcaagtgacagagaggaggagagatggggtctcttgagctggggcctgtagaagcttctctacccagcccccatcagagttcaccccaatttctggccctcaagcctggctcatgctacaccccctgcctcaaatgcccactccttctcctctttccctgtccaagccacgcaagacctgctcttctattgtcctcaccttgaaagccctccacaatggctccgggccccctgctgagccccagaaccttccactccctgagggaagcactggcttttcaggatcctataatcctggtctgagaggaagccagagctggaagggactgcccagccaaccccattatacagaaggggatgctcagatgccgagttccgtagtcccatagtgacttgagaactccacttctttctttaggaagtgtttccgtgtgcacattttataaactctctggtgtgtgtgtgtgtgtgtctccatctccccgttccacctcacagcactgagttgggcacacagctgctgagagcagcccgggggagtatagaagggttctgggggagcagttgctccttcctttctttgctgtcacctcctgggggtggttgtcagagctgtggtgctgagggagatgagtgtgagaatccaggtattaagttcttagtctcctgggggcttagaacattactgcgtgagaaacaggagtgtgggtctgtggaggctccgaacaagggcctgggagagcactggtgagatgagaaggtgagtgaatgaatgaagccagagatggggtgatgctccttcaagccaagaaataacaaagattgccagcaaccaccagaagctgggggagaggcctggagcagcttctcccttatggcccccagaaggaaccaaccctggcaacaccttgatcttggactctggcctccagaactgtgagatgatcaatttctgttgctgaagccactcagttgtggtactttgttatagcagccagaacaaactaataccgatttcggtgcaaatggatgttttccaccactctggcctggcccatgtggctggcctgtggtcacttctgaagctgcctggacacttggccagagctaagaattctccccaaacacatgtgggatggcctgactcagcaaagcatagatacattctcagacagggacatggagatgatctgtctgggggtagaggacctagagggccgggctgggcagccggcttcctgcactgtctgttgggacgtccctttctgactgggtttctcagaagctgaatgggggatgtttctgggacacagattatgttttcatatcggggtctgcatctgggccctgttgtcacagcccccgacttgcccagatttttccgccattgacgtcatggcggccggatgcgccgggcttcatcgacaccacggaggaagagaagagggcagataccccaccccacaggtttcgttccgagaactggctgccctgtcctgcagcaggcttggcccaggtggggtgacatgggtgctggtggatgtggtaggtgatgtccatctggccactatgacaagcccctagctctgaagacctggcccttcttgggttgtggagaggacccaggtttgaagctctgagagtgccaggcaggctccacagatactgggacccctggggtcttcaaatagtataacaccaggacctcagaatcatagaacagcatttcttagatttaaaggatcctagaatctcaaaaccacagactgtggggtctacggtcccaaagtctcagtatgtgtaggccagtgtccctggtgtccaaactccttggaaccatctgaaagtcaggcagcttgctgcttcatagggcctcttgcctaccaggcctggaaacagagccagcctccctagggcctcagtctccctgtccactctggaacaacgttcccaaatacatggccactccgccagagatggcaacagggggaggaggaggttgaggctggtgtgcctttggtctgggcctcatggggggagctggaaaagcctcagccttcgccaatacagagcccatcatcagactctctagaggggccccacaatcaaggttttcggggaccagcaccagctctggggacacacagcctgactgactgacatgcctccatcatcaccacgctctggccaactaggcctcctgacctatggagtccggggcctcacctagcccagctcttgtgaggctgggccccacactgtgatcgtggatcgtccaacctgtgggaagttggggtccaacgtgtgagaaggcagaagggggaatggtagcccaggttccccttcccccttctgggtgctgaggggtaaactgaggccttcagttggggagagagccagaaccagggtcccacctagagtcctgagatctaggcttggatttcaactctgccgctgcatttcggtgaggccctgagatctctggtcttcaatttgcccttctacactgagcacggagaggcgtggagtagacaagggccagggcccttctacgctgtctggttaagtcattaggtgtctgcagggcttcaagttgacaattgcccctctatccaggggactggctgagagatagggatacatagagacaaagagacacacacaaagagcgagcaagagagaacaagagatagtgagagacattgagagaaatggacacatgcatggagagccagagtgcatgtgtgcgagaggaggattgcctcaaataagaacatttgctggtctctggctggttcaactgatgctgcctgaaataatcaagaataaagaagggcaaggtgccagggacacccatggctgggtattgaattgtattgcaaagcaacaatcagcaaaacagtgtggccctggtataagaacagatactggggaagagaacagaatagaaagcttggacatggacccacatatggagagaactgaatttgtgatgaatgtggcatttcaaactggaggaccatggagtatggtttaacaaatgtgtctgagataattagggagaagataaagttattgagtgaatagtcagtccattatcccaacaacccctccctgcccagtttgaaatgtcaccatcatcatataccctaaaatgcccagatccattcaagatataagttttaacacctaatgctgatcttgggtttattgtgtgtcaggccttgtgctaagtatttactgtggttaaaaattttaatctaaacaaagactcctgaggaaggtactattataaccattgcagtacatatgaggaaatggaggtatggagaggttaagtgcctggctaaaaatcacacatagggcttggggtgacgctgggtttgtcccagacagtctggctccagtacccacactcttaacctctatagtaaatggaaaaaatgaagccataaaagagactagaagccaacataggtgaacatttatctcattttcaagtaggaaaggactttctaagcacaaaaccagagacagaagccacagaaaaaaagactaacctatttgactgtataaaaccatcataagcatcacaaaaaacaccataaacaaatagaaaaaaagcaaatgatgaattggggaaaatatttgctatatatgtaatggctgatgaaaggttaataaccattccaaataaagagctgtggcaaatcaataagggaaaaataagatgaacaccctattaggagtaaggacatgaccagacaaccaaaaaaaaaaaaaaaaaaaagcatgaatggccaatgaatagtaaaagtaatcacaagatgcaaatttcaacaatgtgataatgtgtttttcttacctgtcatgttgggaaataattaaaacataataatactcacctagggttagcttaagtagagggagcataaaataggacaaccttttggaaggagaattagcagagagggtcataaactttaaaaatgcacgccccctttgccccagcaactcccttttcaggaatccaaggaagcagtcagggatgtttatagaaaaaaacgagaaacaaccggaatgtccaacaatcggcacttggtcaaatcaatcaaagttcatgctgatgtgaggacagtcttgtccatcatgaaagatcatgtgttcaaacaatttttagtaagcttcaaaaacactactgttaattgaataaagcaggaacaaaaccaatatatagcatgattctaatttggttacagaaatactaatagctaacacttcgtgagcacttactttgtgccaaacgctgtgctaagcctgcagaatcgagctcaccccagccctgaacaacctgtttgcttcctgaatatggactctggtcacacacatgcagtcctggggtaggtccacacagctaaactacggttgacaatggtgtgaagtgctccctgcccccccgccccaagggtctcctctaaagcgatacaagcaaagttcagttaagtgctcagcttgccccggcaccttgcaatcctcctgctactagggtgaacagaactgatgctcactctcataaaatgtaaaggtcctcggcgacattactattattaaacgccagctgtgtacaaagctctaggctggatgctggctgggaaggcaggtgggggaaggcaagaaaagagagcgggagagatggaggaaaggagatcgatggagtgtggtcaagatggaggagacagagataggggagatggtcagaggccaggagagatgcggggaaagagagtctgagtgtagcgacagacagatggcgggagaaagagaggcagagaaacatgtaaaagagcaagacagggtgagcagagagacagagaaggatgagaggcatcaagagctaagagacaaagagatgagagagatgcagttgaaattttcagttgcacctggacagcatttcaagttgttcaaagctctgaaatccataaagactggcagctgacatattttaaaaatcctatccatctacgtatcaattgatgaattcatttatttttgcccctgcccatgcattaagtacttcacctttaagtcttctgccatttattctattattatttttttaaagaccttacctggctggaatcacggtagctgggtacatcccactgtaccagagggcccctgacccccccgccgtgcctacctccctgccatctcctccaatggggcccacatctggtaggggagagcagggacactcaccttggtgaagtggactgacagaaaaggatcagcctggcttgtgggaaactgtcacgtatcaaaaacaactttgcttttataccgagaagaaaaaccacgctgtacggtgtggaagccgcagacctctctcttctaataatccaaatttttttcgatgagtgtgtgcgctgataatcacggggtgggggggggttctcatagttttttttttctctctctctgtgtttctccttttcttgattatgagacttaaacggaaattttgaaattttgggtttttttctttgccctttacgagtcatctgaaaatatgatttcttcccctcaccacagaggtgagaggtatcaatgagataatagggctcatgagaaaccacagtttttaaaacaaaagtgtatagagtttgaaaaaaaaaaaacaagggaaaagaactaaaataaatcacagggccaacccgaggcaggcagagacaccattctgtgagtgagaggatatttgagggtctctggggaaagaaagagaatctgaagctctatgtgtggatgggaaatgccagggaaagagacagaatagggctgggttcccagaggcctcgccctactccaggcctcagtttccctatagatggaattgatatggtccccattgcttgaactacccggcgaggggagttctgcaccccctgcaacacccctcccacagagggtgaggggcatgtaagttacttcatggaggagaaagcggagagcccactgtcatcccctaaaattcatggacttgaagagtcggagaatccctggctcccagaatctactgacagttactgaatgaggaaagagagaaaagtctcgcctcatcacgttttagggcttgagtgccctgacccagccactgtcccactgggaaggtccctagcaggtccccaatattaatgcatccatcctcacgatgaaccccagaggcccattgggaccctgaccctcttgtttcaggaacatcatggcctgatgcttctgaggccctcagcctttggggtcttttacttcaaaaagccccagtttccaaggatttaggattccaaatatccgccatcatctcagtagctgatgtttatcttgaattttccatgggtcagatacagtgctgaacatgtctcacaagtgatcatgttcaatcctcaccatggccccttgagctccatctcatcattattgtattcctgttatacagatgagggaaacggaggtataagtagtcaagcaacttgcccaagatcacagagctggcgagtgtgggtcccgctttctttggtgctgggctttgaaatccccaagctttcctgaacttgatgttctcaggttttaaattctaggatgtgatggcagggagatcctgggatttggagagtccttggagacttgaagcttgtgaggcttttaggttgtccaggaattggcggctgcatctcttgacctcagcaggcactctattcaaccactggtcagcatggtagaccagcccccaggggcttctcctgacaggccatggtgaagacttccagctcccagcaccctgcaaagcccagggttctagtcgtccaacaaccactccagccctctacaagactggcttcagacctggggaagagaaattggaaagggctttttatttacatggtacaaatctggtggccaagatccaccccttcacccctttgccccctttcctcccccaaccttctaagccctcgtaaaaaggagggcctctttcctcaactcagactcacccttctggaaaagcccagaatgggcctgatggcctggctttgtgaagacaagaaaaaaaaaaaaaaagaatagaaaaaaaaagaccttaaaaaaatcagccaacaacaattaaaaaaaaaaaaaaaacacccaaccctccccaccattagttcaaaacaaaactttcgctggttgaggcttctgagttggtgggacacatctgagacccaaaaatggcttgggtgtgttggacagccaggggaggcaccaaggtgggatgaggtcccctgcttggaggcctgcagggaccctgtgaacagcaggtgtttaacagatgtcacggcatgtgggagggagcaagggagggggtgaggagcatgcatgtcaggaaggagtcctggggagctgattctagtgatggccccaaggttaatgaccccttgcagtgatggtcctaaggttaatgatcccttgcactgatgttcccatagttaataaccccttgctccctgcagacttgggtcggaatgttccctacacctcctgcgtaattataaaccaggccagttctatcagcagaggcattgttccctgccccagcacctgtccccctcctggaaaagggggctagttttctctctcaggatcagaggtgtgggctgcattctccttataccttccccagaccatctgtcccttactgtcactcactccatgaaagagagtggccagagatataggaggcaaacgaagtgaggatggtggccgagaatgtgagctggccccttgggcaggcccagggtgtgagagggaaatgctacggctgctgaaagccaagatccttgcagaatgggggctggggtcaggagggcagagaggggtagaggtcgctacctcccctctatactggactatatcctctctcatggagggcttctcgggaaggagactgggagggctgggagttgggggtgagtaggcaagattaaacgggtcaggaaaagtccccagagacaggggcctctgacaaagacttgaaggagatgagggagggagccagctagatatctgaggaactccaaaggaaacagccagggcaaaggtcctgaggtgggaatgtacctgatttgttcaaggtctacaagggggctggtgtggttagtgtggagagagcaagaagagaagctggaggtgaggtcagaaaggggactcggaggttagaccacgcaggaccttgtaggccatggtaaggactttggcttcaacgctgagtgaggaggaaggcatgacagggttgcaagcagaggagaaacacaaaccgtgttaggatttaacaggaagcccctgaatgctgagtgtacaatggggtctagggcctgaatgtggaagcaggggaccagcaaggagctggctactgcagtagtctaggtgactggtgatagtgctggcagtggaggtggtgagaagaggatggatttggtaaatatttttaatagacagccaaaaggatttgttgaagactgagagtcttggagccagatcgggacagacaatgcccaaaccaggtgggcaggaaggagtccctggactatttgccagcttgaacttttaggtgagaaaaaaataaagttctgtcttgcttaagcccccattattttatgatttttctgttacttgcagctgaacatattcatttctaactcatggacatcctgaacatggagacctggggagaggggctgctggaaggatcacctccctcctaggatgctgtgaggttctaatgagataacagcatgctcagaacctggcactcagtaggtgttcagtaaatcttcccaggatggagaaggaatgtatgaatggatgtgttcagcggacaaaagctgcagttgagttcccacagaaggtgagaccccaaagggagagcgaaaggagtttactagatggaagcagcagaaggaacagcactcttgggagagggaacagtagaagcagagatggggggacagaaagaagggaggtgaggcccctgtggggtgtggagtgtcaggttgggcaagaaggacagggctttgattgtgattccattagtcagaagctacccatatgcccaatcaacttctggtagcacacagtcaggtcagtgtttgctgagctgaaatttaaaaaagtgaatccttcagaaagttaaatttcctattcggccattcattcaacaatagtatcaagtcctggagagtgcttgcggctaacaatcaggggcattcttggcttgtggcactgctcaagaaaaggttgtagttgggcagggaggacccagtaagtaactaactgcaacaggacagtcattttcactttcctagttcacacaccaaggtgtggtctaggccttcaggggctctgggtattcctggggcaatggggagtcacggagggttagggagagggtaaccccatccctgagaagcacatttttcctaatggctgcctgcgttctatggttctgctgtccggccacccaatacctcagactctgtctacacagcgtcctcctctccagcctccttattggctactcatgcctcccttcacaccacctacactgcccccgtcggctctgcttttttccccatcttgcctccaagtcctccctccgtcccgctgcactatctagcctcggcattggctcatcccatactagtactgtcctttgaggtctctacgccttcaccctggctccctcattggctatccgccagctctcgtcctcgctcccgccttcagcctccacctccattggctcggctccctacacacccgcctcttggtctccttttagccttcgtattggctagctccaccttggcaccaccccttcgaagccgcagtgcacgctcacaagcctccccattggctcgctgcagccattgtcgtcatcccacgcgtggctctccattggctgttctctctctctagctaccgttccaccgcctacgcaacccgcgggatctcccactttttgggcctctgcgttcgttcccggctgccctcatcgcctgtagccattccacttttcccaccgcccacatgcctctctcgctcagacttccgcattagctgtctgcttctgttttcttcatcatggatttcgcaccacccccattccggcctctccattgattcctcgatcatcccgccccctacaccgcccactcccgggcatccccattggctgcgtgcttctccggctctcaattcgctgtacgtcatccgtgcatggctgcccattggccctctgcaatacttgtcttcatctcaccgcctatgcccccgtgagccgtacccctccgcgctggccttcccattggctgcccgccccttcaggccctgcccccgccggtcccgccgccggtgccgtcggtgccgccgccgccgccgatatggcgcgtacggcccctgtggagcccccgctgcggcattccgcgcccccctcgccggccgcgggtgagccccgcacctcggtcgaggcggcggtggccccgcggagggtgctgttcgccgacgaggccttggggctgccgctggcgcagttgcgccgctaccggccgtggggcgggcccggggcgggcaagatggcggcggcggccgggcaagatggcggcggcggcggcggggccgacgaggacgacgatggcgaggatggggatgaaggggaggaggaagaggaggcttgccccgagccctcaccgctgtgccccgtccccgctggcggggggttttacctggtccccacattttcgctgccgcccgcgccgggccgtctggagcgcttggggcgcgtcatggtggagctggaggcgctgctgccgcctcccggagcggtccccgggggtgccggggtgtgggtgcctgggggccgcccgccggtgctgcgcgggttggtacgcgtgctgaaccgctccttcgagaaggcggtgcacgtgcgggcctcacacgacggctgggcttccttttgcgaccacccagcgcgctacgtcccgcgcagcccgccgtgggcaggagcgggaggaacaggagcaggagatcccatcct

SEQ ID NO: 7 - DNA, 15714 bp, Homo sapiens
gcacagggacctcacaccctcaggcagagctgtccagtcacactctaacacagaatagtcacacacaatccatcccagtcacccctgacacagtgacacagtccctgtctggtacacatgaggaccctccactgctagccagcctgccccaggcaggggctcatggctgccatggtgtctgccagatcttgtctgatacgaaggagcttcagaaggaaatcaactccctatctgggaagctggaccggacgtttgcggtgactgatgagcttgtgttcaaggtgtggggcaggttgggcgggggtgagtggggtgaggctgggctgctgccttgtgcatctgctaattggctggctggggtccagacccaggccctgtgcgaggctggaggtgcactgatacccagggctggctttgtttcatggaggatgaagctagtggggtggtgggagagggtggccttcttagggcatggagatggtcaagggcagcccactgatacctttgaggtccctgtgtctggtcaggatgccaagaaggacgatgctgttcggaaggcctataagtatctagctgctctgcacgaggtgaggggagacatgtgcctggggtggggctgctgggggtgggtgggactgggtgcaagccttctgctcctgttgtccccagaactgcagccagctcatccagaccatcgaggacacaggcaccatcatgcgggaggttcgagacctcgaggagcaggtgaggcctgggggcaggatggggagccaaggcgggccggggggacagttcctcaggttatgctgacagaggctgtggagccacacacagccgatggctggacacccagccctgccccttagtgcctgtgacctgggacaggcaagtggcctactgtgagccccagcttccaccccaagggccctcctgtctgcctcccagggccatgggcagaggcttcagcttaaagatgtagggggaatcctgccacatggcgaaggatgctttgggtagagggaacaccacacgaggcctggccatgggacagagcaggctgttggagttggtgggaggggcccagagtggctgtgatgggggctggtgagcaggagctgggaaaggggctgtgtgtgctgagggggcatgtgttcacattgcctcagatcgagacagagctgggcaagaagaccctcagcaacctggagaagatccgggaggactaccgagccctccgccaggagaacgctggcctcctaggccgggtccgggaggcctgaggagccgccggcagaggtctctccccagcctcaggcagggatttggggtgctggaggcagtggccaagcacatgccctagctacttcctccgctgtccagttcctcctgctgcggccttggacccagacccctgcccactgaccgcaacccttatatggggtgatagtccagcatgtggggagctcggctgcagtttattggggacggtactgtgggttgggggccttggatcccaaataaatgagtagttcctctgcagtctaagctgaggcatggatcagggctcagggaatgggagtgaggtgagtggcaggggagacacggggtatttttggcaaggcagtgtgtgtggctgtgtgtgtctgcacgggactcaagagacccactggggggctgtgcgtgtgcatatgcgtgagatacacaggtgaattctaacaggccgtgtgtgtgagcgagcacgtgttgggacctcagatcctgagggtactgacgctgcttctgtgtaggcctctgggcacacccctgtgttgacagtgcccctgtgggccctgaggctggctgtgggtgcgtgccttggggtgtgtgggttgtcagggctgtgcttgtgtgtgattgtgtgatgatgcagctttgaggttgtttgagtgtactgaggcaggctctctgtgttttggggtttgtgttgagtgagggacaggattgtgacattttgtgtgtctgtgtgacttttccagccctgaagtaatctgtgcgagcagctgaggcaggctctgtgtggctggttgtgaaggctctgtttggctgcagggctcgactggggggtgtgtctggggcggaggtgggggctggggccaggaccggggcccctctgagcagccttggggcaaaggatatgatgggggagggggtggctgccagcgggggaacaggggccctggcaggcaagacagtggaaacctcacttcttggtccctgtgggcacatccagggcctatcatccctgcccccaccacctctgcctcccaccagtttggcccctgttcgtccatcctcctttccttgatcttgaggtcaggggccaggtgtagggttggaacacctgctgggcctctggctccgtttcttgcggaactccagctcatccacggtccacacagcccccttctcgctctccacccgcacaaagcacttgtgcagactcaggttgtggcggatggcgttctgtggaaggccggggacagggagcaggtgggcgtcaacctctgaggccagcagccaccaccaacaacccacatcccgttcctccccaatgtgcctatgagcccagacccaggcctgcccactttgagctgcgatggcacttgaggccatcccagtcaccgccacctcagaggagctcaccttccaggtggcaggatggtttctgaagaaggcaaacatgcgtgtgaaccagtggtagatctcattgagtgtccgctgcttctctggagcctccaggatggcctggaagttggggggtggggtaaggggcacattccccaaacttggggtttagaggggctatgacctaccccgagccatctgacatgggggcggaattgtaggggcaggtaatcagggacaggactagatgtggggtgaagcatggggtcaaagatggggttagaaaaggggtgaagtgtcgggttgggcagggttagatgggtgtgggtatggttgttctgggattaggtaagggatcaggactgaggttgggagtggggtcttgttcagggctagggctgaagtgaggtgaaaggtctgggatggagttggagttggggttctctgtggaggtgacatttcagggttggggaaggtgaagggtcagaagtggggtcaaggatttggaaggggtaaagggccaggccaacttaagggtcagggaaggggtgggttaagagtcaggctggggtggactcaggtggggggtctaggggtgagggatgggatgacttggctttaggtcagaagccagagatggtttgaattatcgagtatcttacgtgtcagggacatggttaggtggttaggctcagggcaaggatgaggttagttgtggggttcggtgtggagtgaggctgagggtcagggaatttgatcagtttggattcaggaatgggattacagagtcagcgatgatgattgcagtgaggctatcagtcaggatggggctaggtcagggtttcagttcagagacagtcggggaatatctggtatcatgtaggggtgaggttcaggtttggggttaggtgtggcgctaggatgaaggttctgagaaggcattggggaggctgagatgaaggagttgggatggggtgatgaagttaaggatcaaatgggtgttacaaggaaaggttgggaatggtgcccagttgggggtgtattgacatactggggtacgttggggccagggaaggagatggggttgggttggcataaaggctggggaaggagttagagtaagagctggggtacgtttagggcaaggtgcagagatggggttagctttaggctattttatgggtccaggagagggttaggtatggggctgaggtggacatctggaaaggggtaggtttagggtcagaatttggcatgctctggcctggatggtggtttaggtttggatttgcggacaggtttggggtgaagccagcatgaggggtcacatttgaggcacggcttggggatccttggggctggggcttgggaatggaggaacccactctgagggcactcagagggagacaggagtttgggaggcaggtcccccaccccatctttgtcttcctcctccttggggccgagctgccctgcttacccagcggatgagcgtggcgtaggtgaaagggggtcgcatgttgtggaacttgaagtagtccatgttgtggaggaactctgtcagagggtggggatgaatcaagccccatgcaggacctcctagctagctccctgtcccctccccctacaaggtgagtctacaggcctgagatctcaccgtcaacacccgtgtccacgggcacaggtactgtttgctgagcacctgacataagttgtatcatttattctttgcaccacttctgccaaaatagttctccccgaggttgaaaagaagcggagtaacttgcacaccaaaggatgcaagaggttaaatggcagagccaggatgacagtcaaggtctctgatccctgctaagcccacaggccaggcctggtggagagcagtggataggtgagctcgggcgaatccaccccgattttccttggtcaggggaggaaaggaggtgctcctggaattacttagcagggtccctcccttctgatggccgaatatagtagctggagtccagagtgggtgaggcatggccccaatccccaagggagtcagggctaggggcccgacactcgagaccatatggggggctttcaggccacggacatcccgaaaggaagcttttgtgagcggatgcattttcccaaaggctgagtggcggcagctgcagtggtggtggtggtgggaaggggcagcatggagctcctttgcaccctccacccagagcctgtcaggattaggagcttgggggcaccgtgtagtgcaaggaccattcttacctgggaatgtgctgtttccatggctaccccacaggtgcctccggacagcaaacaggctgtcaggggcctcccgggggccagaccaggctgggacgacagggccttggctgccagcagctacgatgcagcaggagcccttgtcggatgatgcctgggtgagggggagaggctggtgacccagaggcttaaacttcccactttttactttctattttatgttttttattttttttgatactgagtcttgctctgtcgcccaggctggagtgcagtggtgcaatctcggctcactgcaacccccacctcccagattcaagcaagtcttctgcctcagcctcccgagtagctgggactacaggtgcccgtcactacgcccagctaatttttgtatttttggtagagatggggtttcaccatgttagccaggctggtctcgaactcctgacctcatgtgatccacccgcttcagcctcccaaagtgctgggattacaggcatgagccactgcgcctggctccactttatttttaaatcagtgtttttcaaagcaaggacgccctcttctaaattccagtctgaggtggaatcccacaaaacagcatgagccgtatttattagagcacaggtgcggatgtcgtatgtggccactgatgctgggaccatgaactggggttgaatagggctctttaccacccaactgtgaccttgggaaagtcacctaaacccccctggcctcaatattcctcatctgtacattcgcatcatgagaaataaattaccaccagcaaagcgctcagaaacagtgcctggcctccagggctggcttcatgggcgtgtgacctatgtggttatgtggcaccctgtgctttgtttaatgctctgtggtcgccatcttgaaatctgaacaaggggccctgcaggttacatagctggtcctgctggcacacagcctgcatctggcaagtctggctatttgcatttgctttaacaactcaggatcacagtgtttggggatcttagagtcagagggttttttttttttttttttcttgagacggagtcttgatctgtcgcctaggctggagtgcagtggtatgatctcagctcactgcaaactccgcctcccaggttcaagcaattctctgcctcagcctcccaagtagttgggactacagacacctgccaccacgcctggctaattttttgtacttttagtagacacagggtttcaccatcttggcgaggctggtcttgaactcctgacctcgtgatccacccgcctcggcctcccaaagtgctgggattacaggcgtgagccaccacgcccagccggggtcagagggtttgtaagtagaaggggacagatttccaggtctgggcatgtttggagctggggacaggggcccctagctctcaggacctgaatgtgaggttaggttccctgcaccgtgcagacctcctccctgccccccagcagtctgagtctgccaccaccagtcctggggtcgctcaccacagatgaagccttggtcagtgccattttcccagccaggtgggcctgcatggcactcagcttctccttctccagcaccagctgtgaaatggcacaaacatgaggcctcagcctggcccttctctgccacatctttgcccaggctacggtcttccctgggagtgcccgctcctcttccttcctttataccagccctcgtcccaggtgaacttggtttctggcacatggtggacagaaggttttgcgcactatccctatcccttaccctccaccgccctggcattacctgctgctccagagactgtaccatctctctctggaggagacattgtgccctgcccttctcatccagaagatggtccgcctggcagtgcctaagtagggagaagattccatgcaggtgaccacgacaggcctggtctggctcaatgctctgaatggggagggcccagaccctctgggagttctctcctctgagccccagctcccctcccctctctacctcagtctccctctcacacccctcgttcccttaacacatgcccctcagcacctactgcatgtcaggcctgaactcaccacttgagcctggccagagtgctggagataatgttggaagtgtggtgagttgagaatgggccagggaggtgagagtgggcaaagcattctgggtggagggacggcctgtgcaaaggcctggctgcaaggaggacaggacatgtggggttgctgctaagggttgtgtgtagtgtggtgtgtatttgtgtgtgtgtgtgtgtgagagagagagaaagagagagagagagagagagagagagagagagagagagagagagagagagacatatggggggactgaggggaggcagcagcagccatctagaggagctagaactttgggaacagtggaataaggctggcatgttggcatgaggagtagcagggcaaagcaggagtgcagattctagagcctggctacatgggttcaaatcccagctctgtcactcaggaactgggagattttgatcaagacacttaacctctttggcctcagtctccttgtctgtaaaatgggggtaaataacagcacaaacgtttcttattatacatacgagaaaactgaggtcgagagaagctaagtaatttgtccaaggtcacacagccagtcagggatggagctgggatttgaacccacagtctcagagtttagctcttgcatcttactacttattgggatgaagcctgagctgagatctgcaccctagacctctccccacaagccagggccggtagactggcacaggcctgggccactcacttgaggaagtcctctggctcttcgaagaccttctcacatccgggccacttgcagacaccatttgccagcagtgggtaggagctctggggcacagccgaaagggtgctggggggacagagggtgtcaggggaggggataggagggcgaggatccttcccagccctgtccactgacctgtccttcctgggtgcactgggatttgggaaggtgcagagcagtgccggctccctggacacccattccaggctggccacgttgatccctgtgggtggggacagggcacctatggaggctgtgggctgggctctggagcttggcccacaaggcctctcattttgagcttcccaccctcctgagcctcgaaaaccctgactcccagggggctctgctgtccccaaagtcccaggcttctggcagagaagcttaaagacggccattcgcaggtgctgacattttgactagctttgtaaagctctgtggttttgtgattttgacattctgcatctttaaggttctgcacctgacgttttttggagggtggagtttccaagcctctgagacctgacacctttgacccccagagtactgcaattcagaatagcctacactgctcacagccaaggatctggggacttgggggttctgtgaagccatggggtacgggctgaggtgttaccaggtgggaggccaggccgggccttgagggagaagaccccagtggcggtggtgggtggtgtgaggctgatcatggctgggctctccagggggtgcacctgcagcacaggggtccgggcgtgggcatccaccgttgagagctggggggcacatgtgggctgtggttcagcctgactcggggcccctccccacagttctcccacctgctccctcctccctgcccattcaccgtccatacctggtgcatgaaatgtggcctgtcctggaggagtgcctgtaagtggggcaaggggcccagccgtgccccggagggtgccaccatgactaggggcagtgtgggcagctgggcagaaaggcaggtgggtgagaggccatcctgatcctcactgttctgtgtctaattcaaatactctgcactgcaagcccacatggtagatgctatgatcatcccccttttacacgtatggaaactgaggctcatggagatcgagtaactttttaaagatcaaacagctaataagttgcagagctggcctcagccctgtcacctcacctacttggccccagtcctcttctcttgtcacatggggatggggacacatagctatgctcatgggactacaatacggcctcctcctctcctgagacagggattgggaggtcggggagagcctccaatctctgaggcctggcaggtggggattttcttggccctgcaacatctgcataagtcacagacttgcctgggacccagaaaccacttcctgtgccccagccagcccccctcccgcccagtgccacagtaaaggtcggcacctgtaggtccaggtaccccaccctgcctgccccatcctgggcccagggcctcacctgcagctgcgatggtggcatggggttcaaggaagaagaggaggcatgggccccgcctcgaagatctcggccctggaaggttccccctgggccccgggcccccagcaggtctgaggctttgggtgcagccctccagctgggcgaggctcctggggatgggccaagggccaaggaaggggccgagggcttgccaggcctggggttgggcatcgggtccttgtccaagggcaggctgcgtagacaataggggaaaggagtcacacgtgtgctagggcggtatgagatactcgaccacctgagccacgtggacactcctctggtcaaagcaggcattggctgggacatgtcccgaggggccccatagttgcaccccagctctagacacacacacacacacacacacacacacacaccaagaacacaggtacatgtacatacccacacatgccccacgtgcagaggtccagcacctggcttgcctgcccacgctagcacagccctggtgtggatgtgtcctctatgagggcaatggttgtttccccctccacttgagagctgtttcaagcctcaggcctctagccctccctgcaccctgcacaggctgtgtttgctcatcttgccggagctggtctcggactttctcctcggagtcctattttgccccagtgactaggcatggactcaaaagattcatctggctgctgtgagtggggctagtgaggaggctattgtaacagtcctggcaagtgatgatgctggcacagaatgggctggtggcagtggagaaggcgagaagtgggtagattctgagacttaatctgaagctggatcaggagcagtgctagcagcttggatgtagtgggcaagagggagagtcaaagtgacatgggttttagcttgagcagctggaaggaccgagctgacattacctgagatgggggacatggcggggagttggattgggtgcaaaagtgcaggtgtagatagacatgaagagtctggcattaaatatgtgagtggaggagctgagggggcagctgaatacgggggtctggatctcagggcaaggaggcgagtccaggagtgtgatcatgcacggatccagcatggcaagtgacagagaggaggagagatggggtctcttgagctggggcctgtagaagcttctctacccagcccccatcagagttcaccccaatttctggccctcaagcctggctcatgctacaccccctgcctcaaatgcccactccttctcctctttccctgtccaagccacgcaagacctgctcttctattgtcctcaccttgaaagccctccacaatggctccgggccccctgctgagccccagaaccttccactccctgagggaagcactggcttttcaggatcctataatcctggtctgagaggaagccagagctggaagggactgcccagccaaccccattatacagaaggggatgctcagatgccgagttccgtagtcccatagtgacttgagaactccacttctttctttaggaagtgtttccgtgtgcacattttataaactctctggtgtgtgtgtgtgtgtgtctccatctccccgttccacctcacagcactgagttgggcacacagctgctgagagcagcccgggggagtatagaagggttctgggggagcagttgctccttcctttctttgctgtcacctcctgggggtggttgtcagagctgtggtgctgagggagatgagtgtgagaatccaggtattaagttcttagtctcctgggggcttagaacattactgcgtgagaaacaggagtgtgggtctgtggaggctccgaacaagggcctgggagagcactggtgagatgagaaggtgagtgaatgaatgaagccagagatggggtgatgctccttcaagccaagaaataacaaagattgccagcaaccaccagaagctgggggagaggcctggagcagcttctcccttatggcccccagaaggaaccaaccctggcaacaccttgatcttggactctggcctccagaactgtgagatgatcaatttctgttgctgaagccactcagttgtggtactttgttatagcagccagaacaaactaataccgatttcggtgcaaatggatgttttccaccactctggcctggcccatgtggctggcctgtggtcacttctgaagctgcctggacacttggccagagctaagaattctccccaaacacatgtgggatggcctgactcagcaaagcatagatacattctcagacagggacatggagatgatctgtctgggggtagaggacctagagggccgggctgggcagccggcttcctgcactgtctgttgggacgtccctttctgactgggtttctcagaagctgaatgggggatgtttctgggacacagattatgttttcatatcggggtctgcatctgggccctgttgtcacagcccccgacttgcccagatttttccgccattgacgtcatggcggccggatgcgccgggcttcatcgacaccacggaggaagagaagagggcagataccccaccccacaggtttcgttccgagaactggctgccctgtcctgcagcaggcttggcccaggtggggtgacatgggtgctggtggatgtggtaggtgatgtccatctggccactatgacaagcccctagctctgaagacctggcccttcttgggttgtggagaggacccaggtttgaagctctgagagtgccaggcaggctccacagatactgggacccctggggtcttcaaatagtataacaccaggacctcagaatcatagaacagcatttcttagatttaaaggatcctagaatctcaaaaccacagactgtggggtctacggtcccaaagtctcagtatgtgtaggccagtgtccctggtgtccaaactccttggaaccatctgaaagtcaggcagcttgctgcttcatagggcctcttgcctaccaggcctggaaacagagccagcctccctagggcctcagtctccctgtccactctggaacaacgttcccaaatacatggccactccgccagagatggcaacagggggaggaggaggttgaggctggtgtgcctttggtctgggcctcatggggggagctggaaaagcctcagccttcgccaatacagagcccatcatcagactctctagaggggccccacaatcaaggttttcggggaccagcaccagctctggggacacacagcctgactgactgacatgcctccatcatcaccacgctctggccaactaggcctcctgacctatggagtccggggcctcacctagcccagctcttgtgaggctgggccccacactgtgatcgtggatcgtccaacctgtgggaagttggggtccaacgtgtgagaaggcagaagggggaatggtagcccaggttccccttcccccttctgggtgctgaggggtaaactgaggccttcagttggggagagagccagaaccagggtcccacctagagtcctgagatctaggcttggatttcaactctgccgctgcatttcggtgaggccctgagatctctggtcttcaatttgcccttctacactgagcacggagaggcgtggagtagacaagggccagggcccttctacgctgtctggttaagtcattaggtgtctgcagggcttcaagttgacaattgcccctctatccaggggactggctgagagatagggatacatagagacaaagagacacacacaaagagcgagcaagagagaacaagagatagtgagagacattgagagaaatggacacatgcatggagagccagagtgcatgtgtgcgagaggaggattgcctcaaataagaacatttgctggtctctggctggttcaactgatgctgcctgaaataatcaagaataaagaagggcaaggtgccagggacacccatggctgggtattgaattgtattgcaaagcaacaatcagcaaaacagtgtggccctggtataagaacagatactggggaagagaacagaatagaaagcttggacatggacccacatatggagagaactgaatttgtgatgaatgtggcatttcaaactggaggaccatggagtatggtttaacaaatgtgtctgagataattagggagaagataaagttattgagtgaatagtcagtccattatcccaacaacccctccctgcccagtttgaaatgtcaccatcatcatataccctaaaatgcccagatccattcaagatataagttttaacacctaatgctgatcttgggtttattgtgtgtcaggccttgtgctaagtatttactgtggttaaaaattttaatctaaacaaagactcctgaggaaggtactattataaccattgcagtacatatgaggaaatggaggtatggagaggttaagtgcctggctaaaaatcacacatagggcttggggtgacgctgggtttgtcccagacagtctggctccagtacccacactcttaacctctatagtaaatggaaaaaatgaagccataaaagagactagaagccaacataggtgaacatttatctcattttcaagtaggaaaggactttctaagcacaaaaccagagacagaagccacagaaaaaaagactaacctatttgactgtataaaaccatcataagcatcacaaaaaacaccataaacaaatagaaaaaaagcaaatgatgaattggggaaaatatttgctatatatgtaatggctgatgaaaggttaataaccattccaaataaagagctgtggcaaatcaataagggaaaaataagatgaacaccctattaggagtaaggacatgaccagacaaccaaaaaaaaaaaaaaaaaaaagcatgaatggccaatgaatagtaaaagtaatcacaagatgcaaatttcaacaatgtgataatgtgtttttcttacctgtcatgttgggaaataattaaaacataataatactcacctagggttagcttaagtagagggagcataaaataggacaaccttttggaaggagaattagcagagagggtcataaactttaaaaatgcacgccccctttgccccagcaactcccttttcaggaatccaaggaagcagtcagggatgtttatagaaaaaaacgagaaacaaccggaatgtccaacaatcggcacttggtcaaatcaatcaaagttcatgctgatgtgaggacagtcttgtccatcatgaaagatcatgtgttcaaacaatttttagtaagcttcaaaaacactactgttaattgaataaagcaggaacaaaaccaatatatagcatgattctaatttggttacagaaatactaatagctaacacttcgtgagcacttactttgtgccaaacgctgtgctaagcctgcagaatcgagctcaccccagccctgaacaacctgtttgcttcctgaatatggactctggtcacacacatgcagtcctggggtaggtccacacagctaaactacggttgacaatggtgtgaagtgctccctgcccccccgccccaagggtctcctctaaagcgatacaagcaaagttcagttaagtgctcagcttgccccggcaccttgcaatcctcctgctactagggtgaacagaactgatgctcactctcataaaatgtaaaggtcctcggcgacattactattattaaacgccagctgtgtacaaagctctaggctggatgctggctgggaaggcaggtgggggaaggcaagaaaagagagcgggagagatggaggaaaggagatcgatggagtgtggtcaagatggaggagacagagataggggagatggtcagaggccaggagagatgcggggaaagagagtctgagtgtagcgacagacagatggcgggagaaagagaggcagagaaacatgtaaaagagcaagacagggtgagcagagagacagagaaggatgagaggcatcaagagctaagagacaaagagatgagagagatgcagttgaaattttcagttgcacctggacagcatttcaagttgttcaaagctctgaaatccataaagactggcagctgacatattttaaaaatcctatccatctacgtatcaattgatgaattcatttatttttgcccctgcccatgcattaagtacttcacctttaagtcttctgccatttattctattattatttttttaaagaccttacctggctggaatcacggtagctgggtacatcccactgtaccagagggcccctgacccccccgccgtgcctacctccctgccatctcctccaatggggcccacatctggtaggggagagcagggacactcaccttggtgaagtggactgacagaaaaggatcagcc

SEQ ID NO: 8 - DNA, 47 bp, Homo sapiens
acagaagccataagaatggaactccctataacttgtggcccccaagt

SEQ ID NO: 9 - DNA, 49 bp, Homo sapiens
gaacatcgccaccagtcgaggggtcatcggccaccctgcctagcagttc

SEQ ID NO: 10 - DNA, 39 bp, Homo sapiens
atgacatagtgtggaccaagggctttgccagtggggggt

SEQ ID NO: 11 - DNA, 47 bp, Homo sapiens
atttaaactaagtcctggatgatgaataacagttatgtgcatatatg

SEQ ID NO: 12 - DNA, 42 bp, Homo sapiens
gcaagcagataggataaatagggacaaagttagctgctgaag

SEQ ID NO: 13 - DNA, 99 bp, Homo sapiens
gtgagaccccaaagggagagcgaaaggagtttactagatggaagcagcagaaggaacagcactcttgggagagggaacagtagaagcagagatgggggg

SEQ ID NO: 14 - DNA, 47 bp, Homo sapiens
aagacttgaaggagatgagggagggagccagctagatatctgaggaa

SEQ ID NO: 15 - DNA, 52 bp, Homo sapiens
aagagcaagacagggtgagcagagagacagagaaggatgagaggcatcaaga

SEQ ID NO: 16 - DNA, 24 bp, Homo sapiens
agcaagagagaacaagagatagtg

SEQ ID NO: 17 - DNA, 33 bp, Homo sapiens
agcagctggaaggaccgagctgacattacctga

SEQ ID NO: 18 - DNA, 49 bp, Homo sapiens
acatacgagaaaactgaggtcgagagaagctaagtaatttgtccaaggt

SEQ ID NO: 19 - DNA, 43 bp, Homo sapiens
gctacatgggttcaaatcccagctctgtcactcaggaactggg

SEQ ID NO: 20 - DNA, 80 bp, Homo sapiens
gtgtggtgtgtatttgtgtgtgtgtgtgtgtgagagagagagaaagagagagagagagagagagagagagagagagagag

SEQ ID NO: 21 - DNA, 53 bp, Homo sapiens
ggctgcagggctcgactggggggtgtgtctggggcggaggtgggggctggggc

SEQ ID NO: 22 - DNA, 46 bp, Homo sapiens
gatcgagacagagctgggcaagaagaccctcagcaacctggagaag

SEQ ID NO: 23 - DNA, 47 bp, Homo sapiens
ccagaccatcgaggacacaggcaccatcatgcgggaggttcgagacc

SEQ ID NO: 24 - DNA, 47 bp, Homo sapiens
gatacccagggctggctttgtttcatggaggatgaagctagtggggt

SEQ ID NO: 25 - DNA, 32 bp, Homo sapiens
ctatctgggaagctggaccggacgtttgcggt

SEQ ID NO: 26 - DNA, 44 bp, Homo sapiens
tggtcctggggcagtgcctgctatatccctgcctagatgtcaga

SEQ ID NO: 27 - DNA, 4047 bp, Homo sapiens
tatgattatccccatttagtagaggggagacaggtagctcagagagatgagccagcttgctcaaagcctctcagctagtgagtgacagggccagggaagaaatgctagggacatttatttttttctatttttttttttttaaactggtcctctagaaagcgtggcatgattcagggcaaattctggatttcactcttggtgttcccagcatgtcgtgctttccttttacctttttttttttttttgctttatcgaggtatacctacataaagtgtactgatattctgtgtatagcccagtggatttgtacatatgtatgcacttgtgtagccaccacccagatgaagatactgagcaggtccagtaccccagagctaccttcatttctatcactttcccaagctgtcatccccgccggctgtcatgggaaccctgtctgtaagatgcgacagtttgggtaaaggagtttggtcattttaaagagtgtgaaaggcagagaacagagaaatcaaaaccttgcagggccaaggtgggtggagagggtgtttttcttttaacatacatgggcggttttaaggagaaattgaagcagcctgttcagacaattgttttggtatctggccccaggtctgtggttcctaacatgacttgtgatattattttaagtgggcagatggctttttgatagcttctttatctttcgatctcagctcttgcaaaggggaggttggtgctcattgcaagatcagcgataagggtttctttgtaggtcggtggctttcttggtgagtacatttcaacatattattgttttagaacctgtgtgctgccagtgacttgcagcactgttgaagactagccaccctttgtgacctagccctcttgggaaatggcggaggatctcagggtatatcccttacctgtgggagccctatcagagggcttcctgttgaggaaatgttggctgtaggccctctgtgcactgagcacagccacatcaggtgagggcatgggagaagtccgtggtagccatcaggatagagttcagaaacccaaatggctgctttccctgggttgctggaccaggcatttggtaactctaaagcttagagatgattcatcgacaagcatttattgactgcctactgtgtgctgggcacagtgctaggttccagcagggaaagagatgcagagtggtcctaagatgtcacagggcttgtgggatggagtacagaggatttgttgtatgagacctggctgagcccctgctcttcgccaggcacttcactgagtactatattttcatgcaaggtctggtttaattccgacaacattccctgtgaagtagagggttttaaatttctctttcctggatgagcaaactgaggctcccagagtccaaagtcctagggctggtgtggggaaaagccctcctgatcttccttggcacttgacactaccctttggaagtgtcctattcttcttaaaagtaaagaccaagagagcctcaccatggtcttcaagcaccctcccatcccattccccaatctggcctccactggctcatagtcttaacaccagtggtctttctgagctcctgtcaccatggtctttctgttactccaaagggcctcgctcctttctgctgcagggcctttgcccctgctgtttccttcaccaggaacatttatcccgtaccccttgcagtctcctccagtgttgatccctcagttctaagaggacttccccaggggagcctgtccaccccagtgtcctcgggcccctggctttttcatagcactcatcagcccagcacgtgctaagctttgttagagaatgtcccatggcagagcagatgaacatcgccaccagtcgaggggtcatcggccaccctgcctagcagttctactatatttttttgatccactcgtttctcctctgaagtgactctttcaaatgttctttaccttcagactttctctcctgcttcaaaaaacaaaacagaagccataagaatggaactccctataacttgtggcccccaagtctgcacgctgatttccctcccctgtgttacagatgacgaggagtcccttcttgctcaggccacttctccctcctgtgctctgggtcccagtttctgctacttgctctagaatctgacatcatcagtcaccttttctctcctggcaggttttctgctgccctccttgcttgatcctctattcacctttgcctgtgccagcatcccttctgtctccgctgaccccacgttctctccctcctgcttctggccagcacctcatcaccctccccttcactgctgacccctgcagagttgcctgtacttgccttctgcacttgctcacccccgtaagtgttagcccccggcatctgccagattctgcaggtggttttttagttttcctcttgaagtggttgaccactcctacttaaaacactttgtcttcccttgccttgagaccacactctgctggttttcctcttaactctctggcccttctctttctcctggctcttcccttagcttcatgtatccaaactcggcatctccacttgactgatggcccaaataattcctcaaactcaccttgtcggggactgcattcatcacctctcccacagtgttcccaagcagcctctcactcccctacctccccacttgctcgttttgcttttcagcatccttaagtaagccctgcctgaccctgtagattgggccagggacccttattctagggcattctttccttttctaaaggcactgatcgcagtttgtagttatatctttattagggggttgctggatgactctctgccccgctagactgtaagctccgtgaggggtagggacatggtctgctttcattcaccactgtattcctgcaggcctgccacagtgcctggcacttagcaggtgctcaataaatgtttgttgaaataatgagtttgagtatttttttaatgtcttcctccatactgaattgtaagcttcctagttgggtttgctcaccatggtgtctccaggatccgtcactggggctgatgcacaggaaggcccactgtctttcagtgcacctataactgaagggatggggatccaacctgctatctgagttggcagcctcaggggaaaccagaataactggagttgaacgggacaagtcaggggcatcttagttttctgtagagtgaggaattaatgtgaacgtgatcctcttttatgccacagaaaacttggtagggcattatggttaaggacatgggcctgaggccacgtgctaagaaagtggcagagctgggatctgagcctgtgtggtcctgctctagtgctccagctcttagctactgtaccaggctgggtgatgcattttaccagcagggcaacactgggcaagttgctttcctttcagagcttcagtttccctcaatggaaatttggagggggttactgttaagtgctttataggtacttttcaaatatttctttgatctgctgaacaactcactgatgtaggtattattatcccctccttagagatgaggtaactgaggcacagagaggttaagtaacttgccccaggtcacacagctgataggtggcagagctggaattgttcaaaattgcatatcctaaccctttattgagttgtgaaatcaatttactgggtttcaacaagcattaaaaagaaaaaggaaatagcataagaaatgccagtgtatcaccacatgcagtaaaggtaagtattgtttcactcgaagaacaaccatttttcagttatttatatgtctgtttacacgtgtgggtgtgctgggttatgatgtagaatggatttcttactatgggtcgtggccaaagaatgaagtcatggctgttgaagaagctcatggcacgagaaactgctctccctctaccccactggatcacccgcaagtcccagagttgaggctgacacacttgttggggaaggcaaagcagtgccccacataacttggtggctttcacagccaccttcaaaccctgtt

SEQ ID NO: 28 - DNA, 4049 bp, Homo sapiens
aatgcagcaaacatgggcaaggtaactgaagcatggtggtaactgcaaaagataactggccagcatttactgatttctgtgctatgaacatcagatccattctctccgtgaggcctgctgtgcatgctgtgttgtgtaggtgctatgattatccccatttagtagaggggagacaggtagctcagagagatgagccagcttgctcaaagcctctcagctagtgagtgacagggccagggaagaaatgctagggacatttatttttttctatttttttttttttaaactggtcctctagaaagcgtggcatgattcagggcaaattctggatttcactcttggtgttcccagcatgtcgtgctttccttttacctttttttttttttttgctttatcgaggtatacctacataaagtgtactgatattctgtgtatagcccagtggatttgtacatatgtatgcacttgtgtagccaccacccagatgaagatactgagcaggtccagtaccccagagctaccttcatttctatcactttcccaagctgtcatccccgccggctgtcatgggaaccctgtctgtaagatgcgacagtttgggtaaaggagtttggtcattttaaagagtgtgaaaggcagagaacagagaaatcaaaaccttgcagggccaaggtgggtggagagggtgtttttcttttaacatacatgggcggttttaaggagaaattgaagcagcctgttcagacaattgttttggtatctggccccaggtctgtggttcctaacatgacttgtgatattattttaagtgggcagatggctttttgatagcttctttatctttcgatctcagctcttgcaaaggggaggttggtgctcattgcaagatcagcgataagggtttctttgtaggtcggtggctttcttggtgagtacatttcaacatattattgttttagaacctgtgtgctgccagtgacttgcagcactgttgaagactagccaccctttgtgacctagccctcttgggaaatggcggaggatctcagggtatatcccttacctgtgggagccctatcagagggcttcctgttgaggaaatgttggctgtaggccctctgtgcactgagcacagccacatcaggtgagggcatgggagaagtccgtggtagccatcaggatagagttcagaaacccaaatggctgctttccctgggttgctggaccaggcatttggtaactctaaagcttagagatgattcatcgacaagcatttattgactgcctactgtgtgctgggcacagtgctaggttccagcagggaaagagatgcagagtggtcctaagatgtcacagggcttgtgggatggagtacagaggatttgttgtatgagacctggctgagcccctgctcttcgccaggcacttcactgagtactatattttcatgcaaggtctggtttaattccgacaacattccctgtgaagtagagggttttaaatttctctttcctggatgagcaaactgaggctcccagagtccaaagtcctagggctggtgtggggaaaagccctcctgatcttccttggcacttgacactaccctttggaagtgtcctattcttcttaaaagtaaagaccaagagagcctcaccatggtcttcaagcaccctcccatcccattccccaatctggcctccactggctcatagtcttaacaccagtggtctttctgagctcctgtcaccatggtctttctgttactccaaagggcctcgctcctttctgctgcagggcctttgcccctgctgtttccttcaccaggaacatttatcccgtaccccttgcagtctcctccagtgttgatccctcagttctaagaggacttccccaggggagcctgtccaccccagtgtcctcgggcccctggctttttcatagcactcatcagcccagcacgtgctaagctttgttagagaatgtcccatggcagagcagatgaacatcgccaccagtcgaggggtcatcggccaccctgcctagcagttctactatatttttttgatccactcgtttctcctctgaagtgactctttcaaatgttctttaccttcagactttctctcctgcttcaaaaaacaaaacagaagccataagaatggaactccctataacttgtggcccccaagtctgcacgctgatttccctcccctgtgttacagatgacgaggagtcccttcttgctcaggccacttctccctcctgtgctctgggtcccagtttctgctacttgctctagaatctgacatcatcagtcaccttttctctcctggcaggttttctgctgccctccttgcttgatcctctattcacctttgcctgtgccagcatcccttctgtctccgctgaccccacgttctctccctcctgcttctggccagcacctcatcaccctccccttcactgctgacccctgcagagttgcctgtacttgccttctgcacttgctcacccccgtaagtgttagcccccggcatctgccagattctgcaggtggttttttagttttcctcttgaagtggttgaccactcctacttaaaacactttgtcttcccttgccttgagaccacactctgctggttttcctcttaactctctggcccttctctttctcctggctcttcccttagcttcatgtatccaaactcggcatctccacttgactgatggcccaaataattcctcaaactcaccttgtcggggactgcattcatcacctctcccacagtgttcccaagcagcctctcactcccctacctccccacttgctcgttttgcttttcagcatccttaagtaagccctgcctgaccctgtagattgggccagggacccttattctagggcattctttccttttctaaaggcactgatcgcagtttgtagttatatctttattagggggttgctggatgactctctgccccgctagactgtaagctccgtgaggggtagggacatggtctgctttcattcaccactgtattcctgcaggcctgccacagtgcctggcacttagcaggtgctcaataaatgtttgttgaaataatgagtttgagtatttttttaatgtcttcctccatactgaattgtaagcttcctagttgggtttgctcaccatggtgtctccaggatccgtcactggggctgatgcacaggaaggcccactgtctttcagtgcacctataactgaagggatggggatccaacctgctatctgagttggcagcctcaggggaaaccagaataactggagttgaacgggacaagtcaggggcatcttagttttctgtagagtgaggaattaatgtgaacgtgatcctcttttatgccacagaaaacttggtagggcattatggttaaggacatgggcctgaggccacgtgctaagaaagtggcagagctgggatctgagcctgtgtggtcctgctctagtgctccagctcttagctactgtaccaggctgggtgatgcattttaccagcagggcaacactgggcaagttgctttcctttcagagcttcagtttccctcaatggaaatttggagggggttactgttaagtgctttataggtacttttcaaatatttctttgatctgctgaacaactcactgatgtaggtattattatcccctccttagagatgaggtaactgaggcacagagaggttaagtaacttgccccaggtcacacagctgataggtggcagagctggaattgttcaaaattgcatatcctaaccctttattgagttgtgaaatcaatttactgggtttcaacaagcattaaaaagaaaaaggaaatagcataagaaatgccagtgtatcaccacatgcagtaaaggtaagtattgtttcactcgaagaacaaccatttttcagttatttatatgtctgtttacacgtgtgggtgtgctgggttatgatgtagaatggatttcttactatgggtcgtggccaaagaatgaagtcatggctgttgaagaagc

SEQ ID NO: 29 - DNA, 4039 bp, Homo sapiens
agacttccgcattagctgtctgcttctgttttcttcatcatggatttcgcaccacccccattccggcctctccattgattcctcgatcatcccgccccctacaccgcccactcccgggcatccccattggctgcgtgcttctccggctctcaattcgctgtacgtcatccgtgcatggctgcccattggccctctgcaatacttgtcttcatctcaccgcctatgcccccgtgagccgtacccctccgcgctggccttcccattggctgcccgccccttcaggccctgcccccgccggtcccgccgccggtgccgtcggtgccgccgccgccgccgatatggcgcgtacggcccctgtggagcccccgctgcggcattccgcgcccccctcgccggccgcgggtgagccccgcacctcggtcgaggcggcggtggccccgcggagggtgctgttcgccgacgaggccttggggctgccgctggcgcagttgcgccgctaccggccgtggggcgggcccggggcgggcaagatggcggcggcggccgggcaagatggcggcggcggcggcggggccgacgaggacgacgatggcgaggatggggatgaaggggaggaggaagaggaggcttgccccgagccctcaccgctgtgccccgtccccgctggcggggggttttacctggtccccacattttcgctgccgcccgcgccgggccgtctggagcgcttggggcgcgtcatggtggagctggaggcgctgctgccgcctcccggagcggtccccgggggtgccggggtgtgggtgcctgggggccgcccgccggtgctgcgcgggttggtacgcgtgctgaaccgctccttcgagaaggcggtgcacgtgcgggcctcacacgacggctgggcttccttttgcgaccacccagcgcgctacgtcccgcgcagcccgccgtgggcaggagcgggaggaacaggagcaggagatcccatcctggatccggggctcggcctgggtcccggccaggcatccgcctcctcgcccgacgacggcggccgcaccgaccgctttgccttccagctgccctttgctgagggcgcgggcgatggggcgcgcctcgacttcgtggtgcgctatgagacccctgagggcactttctgggccaacaaccacggccgcaactacacagtcctgctccggatcgcacccgctcccacacccactgatgccgaagggctgccccagcagcagcagctgccgcagctggagccacagcccgagtgccagggtcccgtggaggctgaggccaggcagctgaagagctgcatgaagccggtgaggcgcaggtaatgtcagccagcgccacctccgccaacgcagggctgtgtctgggatggaggacaagcattccggcccaggaacccctcaggcctgctctccaggacagggaggagggtgcattgagtcagtcagtcaaagagtgatggaggtcaaacacgtgctaggcactgttttaactggggttttattcctccatttattgagttccactgtaaagccctgaacaagacagacatctaccctaccctcaaggattcatacaggctcctatgggagacagtttgaaaaaacaagcaagcaagcagataggataaatagggacaaagttagctgctgaagggagtaaggggatagattgggagggaatgactgtgtcagacatgctgttaaagggagggcctttgaggaggtgagtcccgaatgatgataaagaagagttatgcagatacggtggggaggtgggggagagtttgtaggaaaaggaacagggaggacttttctgaggaggtttcatttaaactaagtcctggatgatgaataacagttatgtgcatatatggaacaagggtgttctaggtagaggaaacagcaagtgcaaagtcctggggtggaaatgagcttggtgtgaatgatcagcagtgtgctggagtggagagaactgcaatgacatagtgtggaccaagggctttgccagtggggggtagagcagattctctttctgacagagcaggaaaccaggattccagaggtggagaaactggttgaggcagtgatggcacctggctcttccagttcacccatgcctgaccttgaagcctgtgcactctactgttaacgctgtaatctacttttgagtcctgtggaggcgaggggctgagcccatgctctcacaagaaagcagtggctctagcagagagacagaaccagatgggtactggacttgaagtttttgtcccttgtttttttgccacaccacctgtgatcatttagggacagggagaaataatcagttataccccagggggccccagaagatttccctaggtttcctctatcaagctatgagttctttaagggcagcagctagtcctgattctttttgcggtcacctaagtctggcccaggatcactagattctccctaaaatgtatacatttccctgttcctgggaggactgggaatggaaatgggaaaatgctttttggaccttgtatgtatacgcttggtcagaagcccctggctgcagtaagacatttgtgggttctgctggttctggtaaggccttaggctgtgagtggttcagaaaggtctagctccggtctggtgggcagatgtgcctgggtaactgagcaggcaggcaggtacccactcacccacctgtgagccccaccataatctgagacttcatttaaagggggcaggcagcatggtttttcttacagcattaagagtgtggattctggcatagattgcctgggttcaaatcctggcgctgccacttactggccttgtgaccttggccaacgcatttaactacaccatgcctcaggaccctcacctgtaaaacagaattatagcatctactttacgggataagagtaaaggtgctcagaaccgagtctggctcaaagtagtatcatacaggtgttagctagtgtcagtatttagggagccacacctacagtttcctggattcctctcctaaattcggctccgcccatcagctgtgtggccttgcctccgtttccttctctgctaagggaaatgacagtcactttgcatggttggattgaatgcagcaaacatgggcaaggtaactgaagcatggtggtaactgcaaaagataactggccagcatttactgatttctgtgctatgaacatcagatccattctctccgtgaggcctgctgtgcatgctgtgttgtgtaggtgctatgattatccccatttagtagaggggagacaggtagctcagagagatgagccagcttgctcaaagcctctcagctagtgagtgacagggccagggaagaaatgctagggacatttatttttttctatttttttttttttaaactggtcctctagaaagcgtggcatgattcagggcaaattctggatttcactcttggtgttcccagcatgtcgtgctttccttttacctttttttttttttttgctttatcgaggtatacctacataaagtgtactgatattctgtgtatagcccagtggatttgtacatatgtatgcacttgtgtagccaccacccagatgaagatactgagcaggtccagtaccccagagctaccttcatttctatcactttcccaagctgtcatccccgccggctgtcatgggaaccctgtctgtaagatgcgacagtttgggtaaaggagtttggtcattttaaagagtgtgaaaggcagagaacagagaaatcaaaaccttgcagggccaaggtgggtggagagggtgtttttcttttaacatacatgggcggttttaaggagaaattgaagcagcctgttcagacaattgttttggtatctggccccaggtctgtggttcctaacatgacttgtgatattattttaagtgggcagatggctttttgatagcttctttatctttcgatctcagctcttgcaaaggggaggttggtgctcattgcaagatcagcgataagggtttctttgt

SEQ ID NO: 30 - DNA, 4047 bp, Homo sapiens
tccattggctgttctctctctctagctaccgttccaccgcctacgcaacccgcgggatctcccactttttgggcctctgcgttcgttcccggctgccctcatcgcctgtagccattccacttttcccaccgcccacatgcctctctcgctcagacttccgcattagctgtctgcttctgttttcttcatcatggatttcgcaccacccccattccggcctctccattgattcctcgatcatcccgccccctacaccgcccactcccgggcatccccattggctgcgtgcttctccggctctcaattcgctgtacgtcatccgtgcatggctgcccattggccctctgcaatacttgtcttcatctcaccgcctatgcccccgtgagccgtacccctccgcgctggccttcccattggctgcccgccccttcaggccctgcccccgccggtcccgccgccggtgccgtcggtgccgccgccgccgccgatatggcgcgtacggcccctgtggagcccccgctgcggcattccgcgcccccctcgccggccgcgggtgagccccgcacctcggtcgaggcggcggtggccccgcggagggtgctgttcgccgacgaggccttggggctgccgctggcgcagttgcgccgctaccggccgtggggcgggcccggggcgggcaagatggcggcggcggccgggcaagatggcggcggcggcggcggggccgacgaggacgacgatggcgaggatggggatgaaggggaggaggaagaggaggcttgccccgagccctcaccgctgtgccccgtccccgctggcggggggttttacctggtccccacattttcgctgccgcccgcgccgggccgtctggagcgcttggggcgcgtcatggtggagctggaggcgctgctgccgcctcccggagcggtccccgggggtgccggggtgtgggtgcctgggggccgcccgccggtgctgcgcgggttggtacgcgtgctgaaccgctccttcgagaaggcggtgcacgtgcgggcctcacacgacggctgggcttccttttgcgaccacccagcgcgctacgtcccgcgcagcccgccgtgggcaggagcgggaggaacaggagcaggagatcccatcctggatccggggctcggcctgggtcccggccaggcatccgcctcctcgcccgacgacggcggccgcaccgaccgctttgccttccagctgccctttgctgagggcgcgggcgatggggcgcgcctcgacttcgtggtgcgctatgagacccctgagggcactttctgggccaacaaccacggccgcaactacacagtcctgctccggatcgcacccgctcccacacccactgatgccgaagggctgccccagcagcagcagctgccgcagctggagccacagcccgagtgccagggtcccgtggaggctgaggccaggcagctgaagagctgcatgaagccggtgaggcgcaggtaatgtcagccagcgccacctccgccaacgcagggctgtgtctgggatggaggacaagcattccggcccaggaacccctcaggcctgctctccaggacagggaggagggtgcattgagtcagtcagtcaaagagtgatggaggtcaaacacgtgctaggcactgttttaactggggttttattcctccatttattgagttccactgtaaagccctgaacaagacagacatctaccctaccctcaaggattcatacaggctcctatgggagacagtttgaaaaaacaagcaagcaagcagataggataaatagggacaaagttagctgctgaagggagtaaggggatagattgggagggaatgactgtgtcagacatgctgttaaagggagggcctttgaggaggtgagtcccgaatgatgataaagaagagttatgcagatacggtggggaggtgggggagagtttgtaggaaaaggaacagggaggacttttctgaggaggtttcatttaaactaagtcctggatgatgaataacagttatgtgcatatatggaacaagggtgttctaggtagaggaaacagcaagtgcaaagtcctggggtggaaatgagcttggtgtgaatgatcagcagtgtgctggagtggagagaactgcaatgacatagtgtggaccaagggctttgccagtggggggtagagcagattctctttctgacagagcaggaaaccaggattccagaggtggagaaactggttgaggcagtgatggcacctggctcttccagttcacccatgcctgaccttgaagcctgtgcactctactgttaacgctgtaatctacttttgagtcctgtggaggcgaggggctgagcccatgctctcacaagaaagcagtggctctagcagagagacagaaccagatgggtactggacttgaagtttttgtcccttgtttttttgccacaccacctgtgatcatttagggacagggagaaataatcagttataccccagggggccccagaagatttccctaggtttcctctatcaagctatgagttctttaagggcagcagctagtcctgattctttttgcggtcacctaagtctggcccaggatcactagattctccctaaaatgtatacatttccctgttcctgggaggactgggaatggaaatgggaaaatgctttttggaccttgtatgtatacgcttggtcagaagcccctggctgcagtaagacatttgtgggttctgctggttctggtaaggccttaggctgtgagtggttcagaaaggtctagctccggtctggtgggcagatgtgcctgggtaactgagcaggcaggcaggtacccactcacccacctgtgagccccaccataatctgagacttcatttaaagggggcaggcagcatggtttttcttacagcattaagagtgtggattctggcatagattgcctgggttcaaatcctggcgctgccacttactggccttgtgaccttggccaacgcatttaactacaccatgcctcaggaccctcacctgtaaaacagaattatagcatctactttacgggataagagtaaaggtgctcagaaccgagtctggctcaaagtagtatcatacaggtgttagctagtgtcagtatttagggagccacacctacagtttcctggattcctctcctaaattcggctccgcccatcagctgtgtggccttgcctccgtttccttctctgctaagggaaatgacagtcactttgcatggttggattgaatgcagcaaacatgggcaaggtaactgaagcatggtggtaactgcaaaagataactggccagcatttactgatttctgtgctatgaacatcagatccattctctccgtgaggcctgctgtgcatgctgtgttgtgtaggtgctatgattatccccatttagtagaggggagacaggtagctcagagagatgagccagcttgctcaaagcctctcagctagtgagtgacagggccagggaagaaatgctagggacatttatttttttctatttttttttttttaaactggtcctctagaaagcgtggcatgattcagggcaaattctggatttcactcttggtgttcccagcatgtcgtgctttccttttacctttttttttttttttgctttatcgaggtatacctacataaagtgtactgatattctgtgtatagcccagtggatttgtacatatgtatgcacttgtgtagccaccacccagatgaagatactgagcaggtccagtaccccagagctaccttcatttctatcactttcccaagctgtcatccccgccggctgtcatgggaaccctgtctgtaagatgcgacagtttgggtaaaggagtttggtcattttaaagagtgtgaaaggcagagaacagagaaatcaaaaccttgcagggccaaggtgggtggagagggtgtttttcttttaacatacatgggcggttttaaggagaaattgaagcagcctgttcagacaattgttttggtatctggccc

SEQ ID NO: 31 - DNA, 4042 bp, Homo sapiens
ctccctcattggctatccgccagctctcgtcctcgctcccgccttcagcctccacctccattggctcggctccctacacacccgcctcttggtctccttttagccttcgtattggctagctccaccttggcaccaccccttcgaagccgcagtgcacgctcacaagcctccccattggctcgctgcagccattgtcgtcatcccacgcgtggctctccattggctgttctctctctctagctaccgttccaccgcctacgcaacccgcgggatctcccactttttgggcctctgcgttcgttcccggctgccctcatcgcctgtagccattccacttttcccaccgcccacatgcctctctcgctcagacttccgcattagctgtctgcttctgttttcttcatcatggatttcgcaccacccccattccggcctctccattgattcctcgatcatcccgccccctacaccgcccactcccgggcatccccattggctgcgtgcttctccggctctcaattcgctgtacgtcatccgtgcatggctgcccattggccctctgcaatacttgtcttcatctcaccgcctatgcccccgtgagccgtacccctccgcgctggccttcccattggctgcccgccccttcaggccctgcccccgccggtcccgccgccggtgccgtcggtgccgccgccgccgccgatatggcgcgtacggcccctgtggagcccccgctgcggcattccgcgcccccctcgccggccgcgggtgagccccgcacctcggtcgaggcggcggtggccccgcggagggtgctgttcgccgacgaggccttggggctgccgctggcgcagttgcgccgctaccggccgtggggcgggcccggggcgggcaagatggcggcggcggccgggcaagatggcggcggcggcggcggggccgacgaggacgacgatggcgaggatggggatgaaggggaggaggaagaggaggcttgccccgagccctcaccgctgtgccccgtccccgctggcggggggttttacctggtccccacattttcgctgccgcccgcgccgggccgtctggagcgcttggggcgcgtcatggtggagctggaggcgctgctgccgcctcccggagcggtccccgggggtgccggggtgtgggtgcctgggggccgcccgccggtgctgcgcgggttggtacgcgtgctgaaccgctccttcgagaaggcggtgcacgtgcgggcctcacacgacggctgggcttccttttgcgaccacccagcgcgctacgtcccgcgcagcccgccgtgggcaggagcgggaggaacaggagcaggagatcccatcctggatccggggctcggcctgggtcccggccaggcatccgcctcctcgcccgacgacggcggccgcaccgaccgctttgccttccagctgccctttgctgagggcgcgggcgatggggcgcgcctcgacttcgtggtgcgctatgagacccctgagggcactttctgggccaacaaccacggccgcaactacacagtcctgctccggatcgcacccgctcccacacccactgatgccgaagggctgccccagcagcagcagctgccgcagctggagccacagcccgagtgccagggtcccgtggaggctgaggccaggcagctgaagagctgcatgaagccggtgaggcgcaggtaatgtcagccagcgccacctccgccaacgcagggctgtgtctgggatggaggacaagcattccggcccaggaacccctcaggcctgctctccaggacagggaggagggtgcattgagtcagtcagtcaaagagtgatggaggtcaaacacgtgctaggcactgttttaactggggttttattcctccatttattgagttccactgtaaagccctgaacaagacagacatctaccctaccctcaaggattcatacaggctcctatgggagacagtttgaaaaaacaagcaagcaagcagataggataaatagggacaaagttagctgctgaagggagtaaggggatagattgggagggaatgactgtgtcagacatgctgttaaagggagggcctttgaggaggtgagtcccgaatgatgataaagaagagttatgcagatacggtggggaggtgggggagagtttgtaggaaaaggaacagggaggacttttctgaggaggtttcatttaaactaagtcctggatgatgaataacagttatgtgcatatatggaacaagggtgttctaggtagaggaaacagcaagtgcaaagtcctggggtggaaatgagcttggtgtgaatgatcagcagtgtgctggagtggagagaactgcaatgacatagtgtggaccaagggctttgccagtggggggtagagcagattctctttctgacagagcaggaaaccaggattccagaggtggagaaactggttgaggcagtgatggcacctggctcttccagttcacccatgcctgaccttgaagcctgtgcactctactgttaacgctgtaatctacttttgagtcctgtggaggcgaggggctgagcccatgctctcacaagaaagcagtggctctagcagagagacagaaccagatgggtactggacttgaagtttttgtcccttgtttttttgccacaccacctgtgatcatttagggacagggagaaataatcagttataccccagggggccccagaagatttccctaggtttcctctatcaagctatgagttctttaagggcagcagctagtcctgattctttttgcggtcacctaagtctggcccaggatcactagattctccctaaaatgtatacatttccctgttcctgggaggactgggaatggaaatgggaaaatgctttttggaccttgtatgtatacgcttggtcagaagcccctggctgcagtaagacatttgtgggttctgctggttctggtaaggccttaggctgtgagtggttcagaaaggtctagctccggtctggtgggcagatgtgcctgggtaactgagcaggcaggcaggtacccactcacccacctgtgagccccaccataatctgagacttcatttaaagggggcaggcagcatggtttttcttacagcattaagagtgtggattctggcatagattgcctgggttcaaatcctggcgctgccacttactggccttgtgaccttggccaacgcatttaactacaccatgcctcaggaccctcacctgtaaaacagaattatagcatctactttacgggataagagtaaaggtgctcagaaccgagtctggctcaaagtagtatcatacaggtgttagctagtgtcagtatttagggagccacacctacagtttcctggattcctctcctaaattcggctccgcccatcagctgtgtggccttgcctccgtttccttctctgctaagggaaatgacagtcactttgcatggttggattgaatgcagcaaacatgggcaaggtaactgaagcatggtggtaactgcaaaagataactggccagcatttactgatttctgtgctatgaacatcagatccattctctccgtgaggcctgctgtgcatgctgtgttgtgtaggtgctatgattatccccatttagtagaggggagacaggtagctcagagagatgagccagcttgctcaaagcctctcagctagtgagtgacagggccagggaagaaatgctagggacatttatttttttctatttttttttttttaaactggtcctctagaaagcgtggcatgattcagggcaaattctggatttcactcttggtgttcccagcatgtcgtgctttccttttacctttttttttttttttgctttatcgaggtatacctacataaagtgtactgatattctgtgtatagcccagtggatttgtacatatgtatgcacttgtgtagccaccacccagatgaagatactgagcaggtccagtaccccagagctaccttcatttctatcactttcccaagct

SEQ ID NO: 32 - DNA, 4099 bp, Homo sapiens
ggtacaaatctggtggccaagatccaccccttcacccctttgccccctttcctcccccaaccttctaagccctcgtaaaaaggagggcctctttcctcaactcagactcacccttctggaaaagcccagaatgggcctgatggcctggctttgtgaagacaagaaaaaaaaaaaaaaagaatagaaaaaaaaagaccttaaaaaaatcagccaacaacaattaaaaaaaaaaaaaaaacacccaaccctccccaccattagttcaaaacaaaactttcgctggttgaggcttctgagttggtgggacacatctgagacccaaaaatggcttgggtgtgttggacagccaggggaggcaccaaggtgggatgaggtcccctgcttggaggcctgcagggaccctgtgaacagcaggtgtttaacagatgtcacggcatgtgggagggagcaagggagggggtgaggagcatgcatgtcaggaaggagtcctggggagctgattctagtgatggccccaaggttaatgaccccttgcagtgatggtcctaaggttaatgatcccttgcactgatgttcccatagttaataaccccttgctccctgcagacttgggtcggaatgttccctacacctcctgcgtaattataaaccaggccagttctatcagcagaggcattgttccctgccccagcacctgtccccctcctggaaaagggggctagttttctctctcaggatcagaggtgtgggctgcattctccttataccttccccagaccatctgtcccttactgtcactcactccatgaaagagagtggccagagatataggaggcaaacgaagtgaggatggtggccgagaatgtgagctggccccttgggcaggcccagggtgtgagagggaaatgctacggctgctgaaagccaagatccttgcagaatgggggctggggtcaggagggcagagaggggtagaggtcgctacctcccctctatactggactatatcctctctcatggagggcttctcgggaaggagactgggagggctgggagttgggggtgagtaggcaagattaaacgggtcaggaaaagtccccagagacaggggcctctgacaaagacttgaaggagatgagggagggagccagctagatatctgaggaactccaaaggaaacagccagggcaaaggtcctgaggtgggaatgtacctgatttgttcaaggtctacaagggggctggtgtggttagtgtggagagagcaagaagagaagctggaggtgaggtcagaaaggggactcggaggttagaccacgcaggaccttgtaggccatggtaaggactttggcttcaacgctgagtgaggaggaaggcatgacagggttgcaagcagaggagaaacacaaaccgtgttaggatttaacaggaagcccctgaatgctgagtgtacaatggggtctagggcctgaatgtggaagcaggggaccagcaaggagctggctactgcagtagtctaggtgactggtgatagtgctggcagtggaggtggtgagaagaggatggatttggtaaatatttttaatagacagccaaaaggatttgttgaagactgagagtcttggagccagatcgggacagacaatgcccaaaccaggtgggcaggaaggagtccctggactatttgccagcttgaacttttaggtgagaaaaaaataaagttctgtcttgcttaagcccccattattttatgatttttctgttacttgcagctgaacatattcatttctaactcatggacatcctgaacatggagacctggggagaggggctgctggaaggatcacctccctcctaggatgctgtgaggttctaatgagataacagcatgctcagaacctggcactcagtaggtgttcagtaaatcttcccaggatggagaaggaatgtatgaatggatgtgttcagcggacaaaagctgcagttgagttcccacagaaggtgagaccccaaagggagagcgaaaggagtttactagatggaagcagcagaaggaacagcactcttgggagagggaacagtagaagcagagatggggggacagaaagaagggaggtgaggcccctgtggggtgtggagtgtcaggttgggcaagaaggacagggctttgattgtgattccattagtcagaagctacccatatgcccaatcaacttctggtagcacacagtcaggtcagtgtttgctgagctgaaatttaaaaaagtgaatccttcagaaagttaaatttcctattcggccattcattcaacaatagtatcaagtcctggagagtgcttgcggctaacaatcaggggcattcttggcttgtggcactgctcaagaaaaggttgtagttgggcagggaggacccagtaagtaactaactgcaacaggacagtcattttcactttcctagttcacacaccaaggtgtggtctaggccttcaggggctctgggtattcctggggcaatggggagtcacggagggttagggagagggtaaccccatccctgagaagcacatttttcctaatggctgcctgcgttctatggttctgctgtccggccacccaatacctcagactctgtctacacagcgtcctcctctccagcctccttattggctactcatgcctcccttcacaccacctacactgcccccgtcggctctgcttttttccccatcttgcctccaagtcctccctccgtcccgctgcactatctagcctcggcattggctcatcccatactagtactgtcctttgaggtctctacgccttcaccctggctccctcattggctatccgccagctctcgtcctcgctcccgccttcagcctccacctccattggctcggctccctacacacccgcctcttggtctccttttagccttcgtattggctagctccaccttggcaccaccccttcgaagccgcagtgcacgctcacaagcctccccattggctcgctgcagccattgtcgtcatcccacgcgtggctctccattggctgttctctctctctagctaccgttccaccgcctacgcaacccgcgggatctcccactttttgggcctctgcgttcgttcccggctgccctcatcgcctgtagccattccacttttcccaccgcccacatgcctctctcgctcagacttccgcattagctgtctgcttctgttttcttcatcatggatttcgcaccacccccattccggcctctccattgattcctcgatcatcccgccccctacaccgcccactcccgggcatccccattggctgcgtgcttctccggctctcaattcgctgtacgtcatccgtgcatggctgcccattggccctctgcaatacttgtcttcatctcaccgcctatgcccccgtgagccgtacccctccgcgctggccttcccattggctgcccgccccttcaggccctgcccccgccggtcccgccgccggtgccgtcggtgccgccgccgccgccgatatggcgcgtacggcccctgtggagcccccgctgcggcattccgcgcccccctcgccggccgcgggtgagccccgcacctcggtcgaggcggcggtggccccgcggagggtgctgttcgccgacgaggccttggggctgccgctggcgcagttgcgccgctaccggccgtggggcgggcccggggcgggcaagatggcggcggcggccgggcaagatggcggcggcggcggcggggccgacgaggacgacgatggcgaggatggggatgaaggggaggaggaagaggaggcttgccccgagccctcaccgctgtgccccgtccccgctggcggggggttttacctggtccccacattttcgctgccgcccgcgccgggccgtctggagcgcttggggcgcgtcatggtggagctggaggcgctgctgccgcctcccggagcggtccccgggggtgccggggtgtgggtgcctgggggccgcccgccggtgctgcgcgggttggtacgcgtgctgaaccgctccttcgagaaggcggtgcacgtgcgggcctcacacgacggctggg

SEQ ID NO: 33 - DNA, 4047 bp, Homo sapiens
cctggctcccagaatctactgacagttactgaatgaggaaagagagaaaagtctcgcctcatcacgttttagggcttgagtgccctgacccagccactgtcccactgggaaggtccctagcaggtccccaatattaatgcatccatcctcacgatgaaccccagaggcccattgggaccctgaccctcttgtttcaggaacatcatggcctgatgcttctgaggccctcagcctttggggtcttttacttcaaaaagccccagtttccaaggatttaggattccaaatatccgccatcatctcagtagctgatgtttatcttgaattttccatgggtcagatacagtgctgaacatgtctcacaagtgatcatgttcaatcctcaccatggccccttgagctccatctcatcattattgtattcctgttatacagatgagggaaacggaggtataagtagtcaagcaacttgcccaagatcacagagctggcgagtgtgggtcccgctttctttggtgctgggctttgaaatccccaagctttcctgaacttgatgttctcaggttttaaattctaggatgtgatggcagggagatcctgggatttggagagtccttggagacttgaagcttgtgaggcttttaggttgtccaggaattggcggctgcatctcttgacctcagcaggcactctattcaaccactggtcagcatggtagaccagcccccaggggcttctcctgacaggccatggtgaagacttccagctcccagcaccctgcaaagcccagggttctagtcgtccaacaaccactccagccctctacaagactggcttcagacctggggaagagaaattggaaagggctttttatttacatggtacaaatctggtggccaagatccaccccttcacccctttgccccctttcctcccccaaccttctaagccctcgtaaaaaggagggcctctttcctcaactcagactcacccttctggaaaagcccagaatgggcctgatggcctggctttgtgaagacaagaaaaaaaaaaaaaaagaatagaaaaaaaaagaccttaaaaaaatcagccaacaacaattaaaaaaaaaaaaaaaacacccaaccctccccaccattagttcaaaacaaaactttcgctggttgaggcttctgagttggtgggacacatctgagacccaaaaatggcttgggtgtgttggacagccaggggaggcaccaaggtgggatgaggtcccctgcttggaggcctgcagggaccctgtgaacagcaggtgtttaacagatgtcacggcatgtgggagggagcaagggagggggtgaggagcatgcatgtcaggaaggagtcctggggagctgattctagtgatggccccaaggttaatgaccccttgcagtgatggtcctaaggttaatgatcccttgcactgatgttcccatagttaataaccccttgctccctgcagacttgggtcggaatgttccctacacctcctgcgtaattataaaccaggccagttctatcagcagaggcattgttccctgccccagcacctgtccccctcctggaaaagggggctagttttctctctcaggatcagaggtgtgggctgcattctccttataccttccccagaccatctgtcccttactgtcactcactccatgaaagagagtggccagagatataggaggcaaacgaagtgaggatggtggccgagaatgtgagctggccccttgggcaggcccagggtgtgagagggaaatgctacggctgctgaaagccaagatccttgcagaatgggggctggggtcaggagggcagagaggggtagaggtcgctacctcccctctatactggactatatcctctctcatggagggcttctcgggaaggagactgggagggctgggagttgggggtgagtaggcaagattaaacgggtcaggaaaagtccccagagacaggggcctctgacaaagacttgaaggagatgagggagggagccagctagatatctgaggaactccaaaggaaacagccagggcaaaggtcctgaggtgggaatgtacctgatttgttcaaggtctacaagggggctggtgtggttagtgtggagagagcaagaagagaagctggaggtgaggtcagaaaggggactcggaggttagaccacgcaggaccttgtaggccatggtaaggactttggcttcaacgctgagtgaggaggaaggcatgacagggttgcaagcagaggagaaacacaaaccgtgttaggatttaacaggaagcccctgaatgctgagtgtacaatggggtctagggcctgaatgtggaagcaggggaccagcaaggagctggctactgcagtagtctaggtgactggtgatagtgctggcagtggaggtggtgagaagaggatggatttggtaaatatttttaatagacagccaaaaggatttgttgaagactgagagtcttggagccagatcgggacagacaatgcccaaaccaggtgggcaggaaggagtccctggactatttgccagcttgaacttttaggtgagaaaaaaataaagttctgtcttgcttaagcccccattattttatgatttttctgttacttgcagctgaacatattcatttctaactcatggacatcctgaacatggagacctggggagaggggctgctggaaggatcacctccctcctaggatgctgtgaggttctaatgagataacagcatgctcagaacctggcactcagtaggtgttcagtaaatcttcccaggatggagaaggaatgtatgaatggatgtgttcagcggacaaaagctgcagttgagttcccacagaaggtgagaccccaaagggagagcgaaaggagtttactagatggaagcagcagaaggaacagcactcttgggagagggaacagtagaagcagagatggggggacagaaagaagggaggtgaggcccctgtggggtgtggagtgtcaggttgggcaagaaggacagggctttgattgtgattccattagtcagaagctacccatatgcccaatcaacttctggtagcacacagtcaggtcagtgtttgctgagctgaaatttaaaaaagtgaatccttcagaaagttaaatttcctattcggccattcattcaacaatagtatcaagtcctggagagtgcttgcggctaacaatcaggggcattcttggcttgtggcactgctcaagaaaaggttgtagttgggcagggaggacccagtaagtaactaactgcaacaggacagtcattttcactttcctagttcacacaccaaggtgtggtctaggccttcaggggctctgggtattcctggggcaatggggagtcacggagggttagggagagggtaaccccatccctgagaagcacatttttcctaatggctgcctgcgttctatggttctgctgtccggccacccaatacctcagactctgtctacacagcgtcctcctctccagcctccttattggctactcatgcctcccttcacaccacctacactgcccccgtcggctctgcttttttccccatcttgcctccaagtcctccctccgtcccgctgcactatctagcctcggcattggctcatcccatactagtactgtcctttgaggtctctacgccttcaccctggctccctcattggctatccgccagctctcgtcctcgctcccgccttcagcctccacctccattggctcggctccctacacacccgcctcttggtctccttttagccttcgtattggctagctccaccttggcaccaccccttcgaagccgcagtgcacgctcacaagcctccccattggctcgctgcagccattgtcgtcatcccacgcgtggctctccattggctgttctctctctctagctaccgttccaccgcctacgcaacccgcgggatctcccactttttgggcctctgcgttcgttcccggctgccctcatcgcctgtagccattccactt

SEQ ID NO: 34 - DNA, 4052 bp, Homo sapiens
tgccagggacacccatggctgggtattgaattgtattgcaaagcaacaatcagcaaaacagtgtggccctggtataagaacagatactggggaagagaacagaatagaaagcttggacatggacccacatatggagagaactgaatttgtgatgaatgtggcatttcaaactggaggaccatggagtatggtttaacaaatgtgtctgagataattagggagaagataaagttattgagtgaatagtcagtccattatcccaacaacccctccctgcccagtttgaaatgtcaccatcatcatataccctaaaatgcccagatccattcaagatataagttttaacacctaatgctgatcttgggtttattgtgtgtcaggccttgtgctaagtatttactgtggttaaaaattttaatctaaacaaagactcctgaggaaggtactattataaccattgcagtacatatgaggaaatggaggtatggagaggttaagtgcctggctaaaaatcacacatagggcttggggtgacgctgggtttgtcccagacagtctggctccagtacccacactcttaacctctatagtaaatggaaaaaatgaagccataaaagagactagaagccaacataggtgaacatttatctcattttcaagtaggaaaggactttctaagcacaaaaccagagacagaagccacagaaaaaaagactaacctatttgactgtataaaaccatcataagcatcacaaaaaacaccataaacaaatagaaaaaaagcaaatgatgaattggggaaaatatttgctatatatgtaatggctgatgaaaggttaataaccattccaaataaagagctgtggcaaatcaataagggaaaaataagatgaacaccctattaggagtaaggacatgaccagacaaccaaaaaaaaaaaaaaaaaaaagcatgaatggccaatgaatagtaaaagtaatcacaagatgcaaatttcaacaatgtgataatgtgtttttcttacctgtcatgttgggaaataattaaaacataataatactcacctagggttagcttaagtagagggagcataaaataggacaaccttttggaaggagaattagcagagagggtcataaactttaaaaatgcacgccccctttgccccagcaactcccttttcaggaatccaaggaagcagtcagggatgtttatagaaaaaaacgagaaacaaccggaatgtccaacaatcggcacttggtcaaatcaatcaaagttcatgctgatgtgaggacagtcttgtccatcatgaaagatcatgtgttcaaacaatttttagtaagcttcaaaaacactactgttaattgaataaagcaggaacaaaaccaatatatagcatgattctaatttggttacagaaatactaatagctaacacttcgtgagcacttactttgtgccaaacgctgtgctaagcctgcagaatcgagctcaccccagccctgaacaacctgtttgcttcctgaatatggactctggtcacacacatgcagtcctggggtaggtccacacagctaaactacggttgacaatggtgtgaagtgctccctgcccccccgccccaagggtctcctctaaagcgatacaagcaaagttcagttaagtgctcagcttgccccggcaccttgcaatcctcctgctactagggtgaacagaactgatgctcactctcataaaatgtaaaggtcctcggcgacattactattattaaacgccagctgtgtacaaagctctaggctggatgctggctgggaaggcaggtgggggaaggcaagaaaagagagcgggagagatggaggaaaggagatcgatggagtgtggtcaagatggaggagacagagataggggagatggtcagaggccaggagagatgcggggaaagagagtctgagtgtagcgacagacagatggcgggagaaagagaggcagagaaacatgtaaaagagcaagacagggtgagcagagagacagagaaggatgagaggcatcaagagctaagagacaaagagatgagagagatgcagttgaaattttcagttgcacctggacagcatttcaagttgttcaaagctctgaaatccataaagactggcagctgacatattttaaaaatcctatccatctacgtatcaattgatgaattcatttatttttgcccctgcccatgcattaagtacttcacctttaagtcttctgccatttattctattattatttttttaaagaccttacctggctggaatcacggtagctgggtacatcccactgtaccagagggcccctgacccccccgccgtgcctacctccctgccatctcctccaatggggcccacatctggtaggggagagcagggacactcaccttggtgaagtggactgacagaaaaggatcagcctggcttgtgggaaactgtcacgtatcaaaaacaactttgcttttataccgagaagaaaaaccacgctgtacggtgtggaagccgcagacctctctcttctaataatccaaatttttttcgatgagtgtgtgcgctgataatcacggggtgggggggggttctcatagttttttttttctctctctctgtgtttctccttttcttgattatgagacttaaacggaaattttgaaattttgggtttttttctttgccctttacgagtcatctgaaaatatgatttcttcccctcaccacagaggtgagaggtatcaatgagataatagggctcatgagaaaccacagtttttaaaacaaaagtgtatagagtttgaaaaaaaaaaaacaagggaaaagaactaaaataaatcacagggccaacccgaggcaggcagagacaccattctgtgagtgagaggatatttgagggtctctggggaaagaaagagaatctgaagctctatgtgtggatgggaaatgccagggaaagagacagaatagggctgggttcccagaggcctcgccctactccaggcctcagtttccctatagatggaattgatatggtccccattgcttgaactacccggcgaggggagttctgcaccccctgcaacacccctcccacagagggtgaggggcatgtaagttacttcatggaggagaaagcggagagcccactgtcatcccctaaaattcatggacttgaagagtcggagaatccctggctcccagaatctactgacagttactgaatgaggaaagagagaaaagtctcgcctcatcacgttttagggcttgagtgccctgacccagccactgtcccactgggaaggtccctagcaggtccccaatattaatgcatccatcctcacgatgaaccccagaggcccattgggaccctgaccctcttgtttcaggaacatcatggcctgatgcttctgaggccctcagcctttggggtcttttacttcaaaaagccccagtttccaaggatttaggattccaaatatccgccatcatctcagtagctgatgtttatcttgaattttccatgggtcagatacagtgctgaacatgtctcacaagtgatcatgttcaatcctcaccatggccccttgagctccatctcatcattattgtattcctgttatacagatgagggaaacggaggtataagtagtcaagcaacttgcccaagatcacagagctggcgagtgtgggtcccgctttctttggtgctgggctttgaaatccccaagctttcctgaacttgatgttctcaggttttaaattctaggatgtgatggcagggagatcctgggatttggagagtccttggagacttgaagcttgtgaggcttttaggttgtccaggaattggcggctgcatctcttgacctcagcaggcactctattcaaccactggtcagcatggtagaccagcccccaggggcttctcctgacaggccatggtgaagacttccagctcccagcaccctgcaaagcccagggttctagtcgtccaacaaccactccagccctctacaagactggc

SEQ ID NO: 35 - DNA, 4024 bp, Homo sapiens
ggcttagaacattactgcgtgagaaacaggagtgtgggtctgtggaggctccgaacaagggcctgggagagcactggtgagatgagaaggtgagtgaatgaatgaagccagagatggggtgatgctccttcaagccaagaaataacaaagattgccagcaaccaccagaagctgggggagaggcctggagcagcttctcccttatggcccccagaaggaaccaaccctggcaacaccttgatcttggactctggcctccagaactgtgagatgatcaatttctgttgctgaagccactcagttgtggtactttgttatagcagccagaacaaactaataccgatttcggtgcaaatggatgttttccaccactctggcctggcccatgtggctggcctgtggtcacttctgaagctgcctggacacttggccagagctaagaattctccccaaacacatgtgggatggcctgactcagcaaagcatagatacattctcagacagggacatggagatgatctgtctgggggtagaggacctagagggccgggctgggcagccggcttcctgcactgtctgttgggacgtccctttctgactgggtttctcagaagctgaatgggggatgtttctgggacacagattatgttttcatatcggggtctgcatctgggccctgttgtcacagcccccgacttgcccagatttttccgccattgacgtcatggcggccggatgcgccgggcttcatcgacaccacggaggaagagaagagggcagataccccaccccacaggtttcgttccgagaactggctgccctgtcctgcagcaggcttggcccaggtggggtgacatgggtgctggtggatgtggtaggtgatgtccatctggccactatgacaagcccctagctctgaagacctggcccttcttgggttgtggagaggacccaggtttgaagctctgagagtgccaggcaggctccacagatactgggacccctggggtcttcaaatagtataacaccaggacctcagaatcatagaacagcatttcttagatttaaaggatcctagaatctcaaaaccacagactgtggggtctacggtcccaaagtctcagtatgtgtaggccagtgtccctggtgtccaaactccttggaaccatctgaaagtcaggcagcttgctgcttcatagggcctcttgcctaccaggcctggaaacagagccagcctccctagggcctcagtctccctgtccactctggaacaacgttcccaaatacatggccactccgccagagatggcaacagggggaggaggaggttgaggctggtgtgcctttggtctgggcctcatggggggagctggaaaagcctcagccttcgccaatacagagcccatcatcagactctctagaggggccccacaatcaaggttttcggggaccagcaccagctctggggacacacagcctgactgactgacatgcctccatcatcaccacgctctggccaactaggcctcctgacctatggagtccggggcctcacctagcccagctcttgtgaggctgggccccacactgtgatcgtggatcgtccaacctgtgggaagttggggtccaacgtgtgagaaggcagaagggggaatggtagcccaggttccccttcccccttctgggtgctgaggggtaaactgaggccttcagttggggagagagccagaaccagggtcccacctagagtcctgagatctaggcttggatttcaactctgccgctgcatttcggtgaggccctgagatctctggtcttcaatttgcccttctacactgagcacggagaggcgtggagtagacaagggccagggcccttctacgctgtctggttaagtcattaggtgtctgcagggcttcaagttgacaattgcccctctatccaggggactggctgagagatagggatacatagagacaaagagacacacacaaagagcgagcaagagagaacaagagatagtgagagacattgagagaaatggacacatgcatggagagccagagtgcatgtgtgcgagaggaggattgcctcaaataagaacatttgctggtctctggctggttcaactgatgctgcctgaaataatcaagaataaagaagggcaaggtgccagggacacccatggctgggtattgaattgtattgcaaagcaacaatcagcaaaacagtgtggccctggtataagaacagatactggggaagagaacagaatagaaagcttggacatggacccacatatggagagaactgaatttgtgatgaatgtggcatttcaaactggaggaccatggagtatggtttaacaaatgtgtctgagataattagggagaagataaagttattgagtgaatagtcagtccattatcccaacaacccctccctgcccagtttgaaatgtcaccatcatcatataccctaaaatgcccagatccattcaagatataagttttaacacctaatgctgatcttgggtttattgtgtgtcaggccttgtgctaagtatttactgtggttaaaaattttaatctaaacaaagactcctgaggaaggtactattataaccattgcagtacatatgaggaaatggaggtatggagaggttaagtgcctggctaaaaatcacacatagggcttggggtgacgctgggtttgtcccagacagtctggctccagtacccacactcttaacctctatagtaaatggaaaaaatgaagccataaaagagactagaagccaacataggtgaacatttatctcattttcaagtaggaaaggactttctaagcacaaaaccagagacagaagccacagaaaaaaagactaacctatttgactgtataaaaccatcataagcatcacaaaaaacaccataaacaaatagaaaaaaagcaaatgatgaattggggaaaatatttgctatatatgtaatggctgatgaaaggttaataaccattccaaataaagagctgtggcaaatcaataagggaaaaataagatgaacaccctattaggagtaaggacatgaccagacaaccaaaaaaaaaaaaaaaaaaaagcatgaatggccaatgaatagtaaaagtaatcacaagatgcaaatttcaacaatgtgataatgtgtttttcttacctgtcatgttgggaaataattaaaacataataatactcacctagggttagcttaagtagagggagcataaaataggacaaccttttggaaggagaattagcagagagggtcataaactttaaaaatgcacgccccctttgccccagcaactcccttttcaggaatccaaggaagcagtcagggatgtttatagaaaaaaacgagaaacaaccggaatgtccaacaatcggcacttggtcaaatcaatcaaagttcatgctgatgtgaggacagtcttgtccatcatgaaagatcatgtgttcaaacaatttttagtaagcttcaaaaacactactgttaattgaataaagcaggaacaaaaccaatatatagcatgattctaatttggttacagaaatactaatagctaacacttcgtgagcacttactttgtgccaaacgctgtgctaagcctgcagaatcgagctcaccccagccctgaacaacctgtttgcttcctgaatatggactctggtcacacacatgcagtcctggggtaggtccacacagctaaactacggttgacaatggtgtgaagtgctccctgcccccccgccccaagggtctcctctaaagcgatacaagcaaagttcagttaagtgctcagcttgccccggcaccttgcaatcctcctgctactagggtgaacagaactgatgctcactctcataaaatgtaaaggtcctcggcgacattactattattaaacgccagctgtgtacaaagctctaggctggatgctggctgggaaggcaggtgggggaaggcaagaaaagagagcgggagagatg

SEQ ID NO: 36 - DNA, 4033 bp, Homo sapiens
gctgacattttgactagctttgtaaagctctgtggttttgtgattttgacattctgcatctttaaggttctgcacctgacgttttttggagggtggagtttccaagcctctgagacctgacacctttgacccccagagtactgcaattcagaatagcctacactgctcacagccaaggatctggggacttgggggttctgtgaagccatggggtacgggctgaggtgttaccaggtgggaggccaggccgggccttgagggagaagaccccagtggcggtggtgggtggtgtgaggctgatcatggctgggctctccagggggtgcacctgcagcacaggggtccgggcgtgggcatccaccgttgagagctggggggcacatgtgggctgtggttcagcctgactcggggcccctccccacagttctcccacctgctccctcctccctgcccattcaccgtccatacctggtgcatgaaatgtggcctgtcctggaggagtgcctgtaagtggggcaaggggcccagccgtgccccggagggtgccaccatgactaggggcagtgtgggcagctgggcagaaaggcaggtgggtgagaggccatcctgatcctcactgttctgtgtctaattcaaatactctgcactgcaagcccacatggtagatgctatgatcatcccccttttacacgtatggaaactgaggctcatggagatcgagtaactttttaaagatcaaacagctaataagttgcagagctggcctcagccctgtcacctcacctacttggccccagtcctcttctcttgtcacatggggatggggacacatagctatgctcatgggactacaatacggcctcctcctctcctgagacagggattgggaggtcggggagagcctccaatctctgaggcctggcaggtggggattttcttggccctgcaacatctgcataagtcacagacttgcctgggacccagaaaccacttcctgtgccccagccagcccccctcccgcccagtgccacagtaaaggtcggcacctgtaggtccaggtaccccaccctgcctgccccatcctgggcccagggcctcacctgcagctgcgatggtggcatggggttcaaggaagaagaggaggcatgggccccgcctcgaagatctcggccctggaaggttccccctgggccccgggcccccagcaggtctgaggctttgggtgcagccctccagctgggcgaggctcctggggatgggccaagggccaaggaaggggccgagggcttgccaggcctggggttgggcatcgggtccttgtccaagggcaggctgcgtagacaataggggaaaggagtcacacgtgtgctagggcggtatgagatactcgaccacctgagccacgtggacactcctctggtcaaagcaggcattggctgggacatgtcccgaggggccccatagttgcaccccagctctagacacacacacacacacacacacacacacacaccaagaacacaggtacatgtacatacccacacatgccccacgtgcagaggtccagcacctggcttgcctgcccacgctagcacagccctggtgtggatgtgtcctctatgagggcaatggttgtttccccctccacttgagagctgtttcaagcctcaggcctctagccctccctgcaccctgcacaggctgtgtttgctcatcttgccggagctggtctcggactttctcctcggagtcctattttgccccagtgactaggcatggactcaaaagattcatctggctgctgtgagtggggctagtgaggaggctattgtaacagtcctggcaagtgatgatgctggcacagaatgggctggtggcagtggagaaggcgagaagtgggtagattctgagacttaatctgaagctggatcaggagcagtgctagcagcttggatgtagtgggcaagagggagagtcaaagtgacatgggttttagcttgagcagctggaaggaccgagctgacattacctgagatgggggacatggcggggagttggattgggtgcaaaagtgcaggtgtagatagacatgaagagtctggcattaaatatgtgagtggaggagctgagggggcagctgaatacgggggtctggatctcagggcaaggaggcgagtccaggagtgtgatcatgcacggatccagcatggcaagtgacagagaggaggagagatggggtctcttgagctggggcctgtagaagcttctctacccagcccccatcagagttcaccccaatttctggccctcaagcctggctcatgctacaccccctgcctcaaatgcccactccttctcctctttccctgtccaagccacgcaagacctgctcttctattgtcctcaccttgaaagccctccacaatggctccgggccccctgctgagccccagaaccttccactccctgagggaagcactggcttttcaggatcctataatcctggtctgagaggaagccagagctggaagggactgcccagccaaccccattatacagaaggggatgctcagatgccgagttccgtagtcccatagtgacttgagaactccacttctttctttaggaagtgtttccgtgtgcacattttataaactctctggtgtgtgtgtgtgtgtgtctccatctccccgttccacctcacagcactgagttgggcacacagctgctgagagcagcccgggggagtatagaagggttctgggggagcagttgctccttcctttctttgctgtcacctcctgggggtggttgtcagagctgtggtgctgagggagatgagtgtgagaatccaggtattaagttcttagtctcctgggggcttagaacattactgcgtgagaaacaggagtgtgggtctgtggaggctccgaacaagggcctgggagagcactggtgagatgagaaggtgagtgaatgaatgaagccagagatggggtgatgctccttcaagccaagaaataacaaagattgccagcaaccaccagaagctgggggagaggcctggagcagcttctcccttatggcccccagaaggaaccaaccctggcaacaccttgatcttggactctggcctccagaactgtgagatgatcaatttctgttgctgaagccactcagttgtggtactttgttatagcagccagaacaaactaataccgatttcggtgcaaatggatgttttccaccactctggcctggcccatgtggctggcctgtggtcacttctgaagctgcctggacacttggccagagctaagaattctccccaaacacatgtgggatggcctgactcagcaaagcatagatacattctcagacagggacatggagatgatctgtctgggggtagaggacctagagggccgggctgggcagccggcttcctgcactgtctgttgggacgtccctttctgactgggtttctcagaagctgaatgggggatgtttctgggacacagattatgttttcatatcggggtctgcatctgggccctgttgtcacagcccccgacttgcccagatttttccgccattgacgtcatggcggccggatgcgccgggcttcatcgacaccacggaggaagagaagagggcagataccccaccccacaggtttcgttccgagaactggctgccctgtcctgcagcaggcttggcccaggtggggtgacatgggtgctggtggatgtggtaggtgatgtccatctggccactatgacaagcccctagctctgaagacctggcccttcttgggttgtggagaggacccaggtttgaagctctgagagtgccaggcaggctccacagatactgggacccctggggtcttcaaatagtataacaccaggacctcagaatcatagaacagcatttcttagatttaaaggatcctagaatctcaaaaccacagactgtggggtctacggtcccaaagtctcagtatgtgtaggccagtgtccctggtgtccaa

SEQ ID NO: 37 - DNA, 4049 bp, Homo sapiens
gcacaggtgcggatgtcgtatgtggccactgatgctgggaccatgaactggggttgaatagggctctttaccacccaactgtgaccttgggaaagtcacctaaacccccctggcctcaatattcctcatctgtacattcgcatcatgagaaataaattaccaccagcaaagcgctcagaaacagtgcctggcctccagggctggcttcatgggcgtgtgacctatgtggttatgtggcaccctgtgctttgtttaatgctctgtggtcgccatcttgaaatctgaacaaggggccctgcaggttacatagctggtcctgctggcacacagcctgcatctggcaagtctggctatttgcatttgctttaacaactcaggatcacagtgtttggggatcttagagtcagagggttttttttttttttttttcttgagacggagtcttgatctgtcgcctaggctggagtgcagtggtatgatctcagctcactgcaaactccgcctcccaggttcaagcaattctctgcctcagcctcccaagtagttgggactacagacacctgccaccacgcctggctaattttttgtacttttagtagacacagggtttcaccatcttggcgaggctggtcttgaactcctgacctcgtgatccacccgcctcggcctcccaaagtgctgggattacaggcgtgagccaccacgcccagccggggtcagagggtttgtaagtagaaggggacagatttccaggtctgggcatgtttggagctggggacaggggcccctagctctcaggacctgaatgtgaggttaggttccctgcaccgtgcagacctcctccctgccccccagcagtctgagtctgccaccaccagtcctggggtcgctcaccacagatgaagccttggtcagtgccattttcccagccaggtgggcctgcatggcactcagcttctccttctccagcaccagctgtgaaatggcacaaacatgaggcctcagcctggcccttctctgccacatctttgcccaggctacggtcttccctgggagtgcccgctcctcttccttcctttataccagccctcgtcccaggtgaacttggtttctggcacatggtggacagaaggttttgcgcactatccctatcccttaccctccaccgccctggcattacctgctgctccagagactgtaccatctctctctggaggagacattgtgccctgcccttctcatccagaagatggtccgcctggcagtgcctaagtagggagaagattccatgcaggtgaccacgacaggcctggtctggctcaatgctctgaatggggagggcccagaccctctgggagttctctcctctgagccccagctcccctcccctctctacctcagtctccctctcacacccctcgttcccttaacacatgcccctcagcacctactgcatgtcaggcctgaactcaccacttgagcctggccagagtgctggagataatgttggaagtgtggtgagttgagaatgggccagggaggtgagagtgggcaaagcattctgggtggagggacggcctgtgcaaaggcctggctgcaaggaggacaggacatgtggggttgctgctaagggttgtgtgtagtgtggtgtgtatttgtgtgtgtgtgtgtgtgagagagagagaaagagagagagagagagagagagagagagagagagagagagagagagagagacatatggggggactgaggggaggcagcagcagccatctagaggagctagaactttgggaacagtggaataaggctggcatgttggcatgaggagtagcagggcaaagcaggagtgcagattctagagcctggctacatgggttcaaatcccagctctgtcactcaggaactgggagattttgatcaagacacttaacctctttggcctcagtctccttgtctgtaaaatgggggtaaataacagcacaaacgtttcttattatacatacgagaaaactgaggtcgagagaagctaagtaatttgtccaaggtcacacagccagtcagggatggagctgggatttgaacccacagtctcagagtttagctcttgcatcttactacttattgggatgaagcctgagctgagatctgcaccctagacctctccccacaagccagggccggtagactggcacaggcctgggccactcacttgaggaagtcctctggctcttcgaagaccttctcacatccgggccacttgcagacaccatttgccagcagtgggtaggagctctggggcacagccgaaagggtgctggggggacagagggtgtcaggggaggggataggagggcgaggatccttcccagccctgtccactgacctgtccttcctgggtgcactgggatttgggaaggtgcagagcagtgccggctccctggacacccattccaggctggccacgttgatccctgtgggtggggacagggcacctatggaggctgtgggctgggctctggagcttggcccacaaggcctctcattttgagcttcccaccctcctgagcctcgaaaaccctgactcccagggggctctgctgtccccaaagtcccaggcttctggcagagaagcttaaagacggccattcgcaggtgctgacattttgactagctttgtaaagctctgtggttttgtgattttgacattctgcatctttaaggttctgcacctgacgttttttggagggtggagtttccaagcctctgagacctgacacctttgacccccagagtactgcaattcagaatagcctacactgctcacagccaaggatctggggacttgggggttctgtgaagccatggggtacgggctgaggtgttaccaggtgggaggccaggccgggccttgagggagaagaccccagtggcggtggtgggtggtgtgaggctgatcatggctgggctctccagggggtgcacctgcagcacaggggtccgggcgtgggcatccaccgttgagagctggggggcacatgtgggctgtggttcagcctgactcggggcccctccccacagttctcccacctgctccctcctccctgcccattcaccgtccatacctggtgcatgaaatgtggcctgtcctggaggagtgcctgtaagtggggcaaggggcccagccgtgccccggagggtgccaccatgactaggggcagtgtgggcagctgggcagaaaggcaggtgggtgagaggccatcctgatcctcactgttctgtgtctaattcaaatactctgcactgcaagcccacatggtagatgctatgatcatcccccttttacacgtatggaaactgaggctcatggagatcgagtaactttttaaagatcaaacagctaataagttgcagagctggcctcagccctgtcacctcacctacttggccccagtcctcttctcttgtcacatggggatggggacacatagctatgctcatgggactacaatacggcctcctcctctcctgagacagggattgggaggtcggggagagcctccaatctctgaggcctggcaggtggggattttcttggccctgcaacatctgcataagtcacagacttgcctgggacccagaaaccacttcctgtgccccagccagcccccctcccgcccagtgccacagtaaaggtcggcacctgtaggtccaggtaccccaccctgcctgccccatcctgggcccagggcctcacctgcagctgcgatggtggcatggggttcaaggaagaagaggaggcatgggccccgcctcgaagatctcggccctggaaggttccccctgggccccgggcccccagcaggtctgaggctttgggtgcagccctccagctgggcgaggctcctggggatgggccaagggccaaggaaggggccgagggcttgccaggcctggggttgggcatcgggtccttgtccaagggcaggctgcgtagacaataggggaaaggagtcacacgtgtgctagggcggtatgagatactcgac

SEQ ID NO: 38 - DNA, 4043 bp, Homo sapiens
attacaggcatgagccactgcgcctggctccactttatttttaaatcagtgtttttcaaagcaaggacgccctcttctaaattccagtctgaggtggaatcccacaaaacagcatgagccgtatttattagagcacaggtgcggatgtcgtatgtggccactgatgctgggaccatgaactggggttgaatagggctctttaccacccaactgtgaccttgggaaagtcacctaaacccccctggcctcaatattcctcatctgtacattcgcatcatgagaaataaattaccaccagcaaagcgctcagaaacagtgcctggcctccagggctggcttcatgggcgtgtgacctatgtggttatgtggcaccctgtgctttgtttaatgctctgtggtcgccatcttgaaatctgaacaaggggccctgcaggttacatagctggtcctgctggcacacagcctgcatctggcaagtctggctatttgcatttgctttaacaactcaggatcacagtgtttggggatcttagagtcagagggttttttttttttttttttcttgagacggagtcttgatctgtcgcctaggctggagtgcagtggtatgatctcagctcactgcaaactccgcctcccaggttcaagcaattctctgcctcagcctcccaagtagttgggactacagacacctgccaccacgcctggctaattttttgtacttttagtagacacagggtttcaccatcttggcgaggctggtcttgaactcctgacctcgtgatccacccgcctcggcctcccaaagtgctgggattacaggcgtgagccaccacgcccagccggggtcagagggtttgtaagtagaaggggacagatttccaggtctgggcatgtttggagctggggacaggggcccctagctctcaggacctgaatgtgaggttaggttccctgcaccgtgcagacctcctccctgccccccagcagtctgagtctgccaccaccagtcctggggtcgctcaccacagatgaagccttggtcagtgccattttcccagccaggtgggcctgcatggcactcagcttctccttctccagcaccagctgtgaaatggcacaaacatgaggcctcagcctggcccttctctgccacatctttgcccaggctacggtcttccctgggagtgcccgctcctcttccttcctttataccagccctcgtcccaggtgaacttggtttctggcacatggtggacagaaggttttgcgcactatccctatcccttaccctccaccgccctggcattacctgctgctccagagactgtaccatctctctctggaggagacattgtgccctgcccttctcatccagaagatggtccgcctggcagtgcctaagtagggagaagattccatgcaggtgaccacgacaggcctggtctggctcaatgctctgaatggggagggcccagaccctctgggagttctctcctctgagccccagctcccctcccctctctacctcagtctccctctcacacccctcgttcccttaacacatgcccctcagcacctactgcatgtcaggcctgaactcaccacttgagcctggccagagtgctggagataatgttggaagtgtggtgagttgagaatgggccagggaggtgagagtgggcaaagcattctgggtggagggacggcctgtgcaaaggcctggctgcaaggaggacaggacatgtggggttgctgctaagggttgtgtgtagtgtggtgtgtatttgtgtgtgtgtgtgtgtgagagagagagaaagagagagagagagagagagagagagagagagagagagagagagagagagacatatggggggactgaggggaggcagcagcagccatctagaggagctagaactttgggaacagtggaataaggctggcatgttggcatgaggagtagcagggcaaagcaggagtgcagattctagagcctggctacatgggttcaaatcccagctctgtcactcaggaactgggagattttgatcaagacacttaacctctttggcctcagtctccttgtctgtaaaatgggggtaaataacagcacaaacgtttcttattatacatacgagaaaactgaggtcgagagaagctaagtaatttgtccaaggtcacacagccagtcagggatggagctgggatttgaacccacagtctcagagtttagctcttgcatcttactacttattgggatgaagcctgagctgagatctgcaccctagacctctccccacaagccagggccggtagactggcacaggcctgggccactcacttgaggaagtcctctggctcttcgaagaccttctcacatccgggccacttgcagacaccatttgccagcagtgggtaggagctctggggcacagccgaaagggtgctggggggacagagggtgtcaggggaggggataggagggcgaggatccttcccagccctgtccactgacctgtccttcctgggtgcactgggatttgggaaggtgcagagcagtgccggctccctggacacccattccaggctggccacgttgatccctgtgggtggggacagggcacctatggaggctgtgggctgggctctggagcttggcccacaaggcctctcattttgagcttcccaccctcctgagcctcgaaaaccctgactcccagggggctctgctgtccccaaagtcccaggcttctggcagagaagcttaaagacggccattcgcaggtgctgacattttgactagctttgtaaagctctgtggttttgtgattttgacattctgcatctttaaggttctgcacctgacgttttttggagggtggagtttccaagcctctgagacctgacacctttgacccccagagtactgcaattcagaatagcctacactgctcacagccaaggatctggggacttgggggttctgtgaagccatggggtacgggctgaggtgttaccaggtgggaggccaggccgggccttgagggagaagaccccagtggcggtggtgggtggtgtgaggctgatcatggctgggctctccagggggtgcacctgcagcacaggggtccgggcgtgggcatccaccgttgagagctggggggcacatgtgggctgtggttcagcctgactcggggcccctccccacagttctcccacctgctccctcctccctgcccattcaccgtccatacctggtgcatgaaatgtggcctgtcctggaggagtgcctgtaagtggggcaaggggcccagccgtgccccggagggtgccaccatgactaggggcagtgtgggcagctgggcagaaaggcaggtgggtgagaggccatcctgatcctcactgttctgtgtctaattcaaatactctgcactgcaagcccacatggtagatgctatgatcatcccccttttacacgtatggaaactgaggctcatggagatcgagtaactttttaaagatcaaacagctaataagttgcagagctggcctcagccctgtcacctcacctacttggccccagtcctcttctcttgtcacatggggatggggacacatagctatgctcatgggactacaatacggcctcctcctctcctgagacagggattgggaggtcggggagagcctccaatctctgaggcctggcaggtggggattttcttggccctgcaacatctgcataagtcacagacttgcctgggacccagaaaccacttcctgtgccccagccagcccccctcccgcccagtgccacagtaaaggtcggcacctgtaggtccaggtaccccaccctgcctgccccatcctgggcccagggcctcacctgcagctgcgatggtggcatggggttcaaggaagaagaggaggcatgggccccgcctcgaagatctcggccctggaaggttccccctgggccccgggcccccagcaggtctgaggctttgggtgcagccctccagctgggcgaggctcctggg

SEQ ID NO: 39 - DNA, 4080 bp, Homo sapiens
gctggagtgcagtggtgcaatctcggctcactgcaacccccacctcccagattcaagcaagtcttctgcctcagcctcccgagtagctgggactacaggtgcccgtcactacgcccagctaatttttgtatttttggtagagatggggtttcaccatgttagccaggctggtctcgaactcctgacctcatgtgatccacccgcttcagcctcccaaagtgctgggattacaggcatgagccactgcgcctggctccactttatttttaaatcagtgtttttcaaagcaaggacgccctcttctaaattccagtctgaggtggaatcccacaaaacagcatgagccgtatttattagagcacaggtgcggatgtcgtatgtggccactgatgctgggaccatgaactggggttgaatagggctctttaccacccaactgtgaccttgggaaagtcacctaaacccccctggcctcaatattcctcatctgtacattcgcatcatgagaaataaattaccaccagcaaagcgctcagaaacagtgcctggcctccagggctggcttcatgggcgtgtgacctatgtggttatgtggcaccctgtgctttgtttaatgctctgtggtcgccatcttgaaatctgaacaaggggccctgcaggttacatagctggtcctgctggcacacagcctgcatctggcaagtctggctatttgcatttgctttaacaactcaggatcacagtgtttggggatcttagagtcagagggttttttttttttttttttcttgagacggagtcttgatctgtcgcctaggctggagtgcagtggtatgatctcagctcactgcaaactccgcctcccaggttcaagcaattctctgcctcagcctcccaagtagttgggactacagacacctgccaccacgcctggctaattttttgtacttttagtagacacagggtttcaccatcttggcgaggctggtcttgaactcctgacctcgtgatccacccgcctcggcctcccaaagtgctgggattacaggcgtgagccaccacgcccagccggggtcagagggtttgtaagtagaaggggacagatttccaggtctgggcatgtttggagctggggacaggggcccctagctctcaggacctgaatgtgaggttaggttccctgcaccgtgcagacctcctccctgccccccagcagtctgagtctgccaccaccagtcctggggtcgctcaccacagatgaagccttggtcagtgccattttcccagccaggtgggcctgcatggcactcagcttctccttctccagcaccagctgtgaaatggcacaaacatgaggcctcagcctggcccttctctgccacatctttgcccaggctacggtcttccctgggagtgcccgctcctcttccttcctttataccagccctcgtcccaggtgaacttggtttctggcacatggtggacagaaggttttgcgcactatccctatcccttaccctccaccgccctggcattacctgctgctccagagactgtaccatctctctctggaggagacattgtgccctgcccttctcatccagaagatggtccgcctggcagtgcctaagtagggagaagattccatgcaggtgaccacgacaggcctggtctggctcaatgctctgaatggggagggcccagaccctctgggagttctctcctctgagccccagctcccctcccctctctacctcagtctccctctcacacccctcgttcccttaacacatgcccctcagcacctactgcatgtcaggcctgaactcaccacttgagcctggccagagtgctggagataatgttggaagtgtggtgagttgagaatgggccagggaggtgagagtgggcaaagcattctgggtggagggacggcctgtgcaaaggcctggctgcaaggaggacaggacatgtggggttgctgctaagggttgtgtgtagtgtggtgtgtatttgtgtgtgtgtgtgtgtgagagagagagaaagagagagagagagagagagagagagagagagagagagagagagagagagacatatggggggactgaggggaggcagcagcagccatctagaggagctagaactttgggaacagtggaataaggctggcatgttggcatgaggagtagcagggcaaagcaggagtgcagattctagagcctggctacatgggttcaaatcccagctctgtcactcaggaactgggagattttgatcaagacacttaacctctttggcctcagtctccttgtctgtaaaatgggggtaaataacagcacaaacgtttcttattatacatacgagaaaactgaggtcgagagaagctaagtaatttgtccaaggtcacacagccagtcagggatggagctgggatttgaacccacagtctcagagtttagctcttgcatcttactacttattgggatgaagcctgagctgagatctgcaccctagacctctccccacaagccagggccggtagactggcacaggcctgggccactcacttgaggaagtcctctggctcttcgaagaccttctcacatccgggccacttgcagacaccatttgccagcagtgggtaggagctctggggcacagccgaaagggtgctggggggacagagggtgtcaggggaggggataggagggcgaggatccttcccagccctgtccactgacctgtccttcctgggtgcactgggatttgggaaggtgcagagcagtgccggctccctggacacccattccaggctggccacgttgatccctgtgggtggggacagggcacctatggaggctgtgggctgggctctggagcttggcccacaaggcctctcattttgagcttcccaccctcctgagcctcgaaaaccctgactcccagggggctctgctgtccccaaagtcccaggcttctggcagagaagcttaaagacggccattcgcaggtgctgacattttgactagctttgtaaagctctgtggttttgtgattttgacattctgcatctttaaggttctgcacctgacgttttttggagggtggagtttccaagcctctgagacctgacacctttgacccccagagtactgcaattcagaatagcctacactgctcacagccaaggatctggggacttgggggttctgtgaagccatggggtacgggctgaggtgttaccaggtgggaggccaggccgggccttgagggagaagaccccagtggcggtggtgggtggtgtgaggctgatcatggctgggctctccagggggtgcacctgcagcacaggggtccgggcgtgggcatccaccgttgagagctggggggcacatgtgggctgtggttcagcctgactcggggcccctccccacagttctcccacctgctccctcctccctgcccattcaccgtccatacctggtgcatgaaatgtggcctgtcctggaggagtgcctgtaagtggggcaaggggcccagccgtgccccggagggtgccaccatgactaggggcagtgtgggcagctgggcagaaaggcaggtgggtgagaggccatcctgatcctcactgttctgtgtctaattcaaatactctgcactgcaagcccacatggtagatgctatgatcatcccccttttacacgtatggaaactgaggctcatggagatcgagtaactttttaaagatcaaacagctaataagttgcagagctggcctcagccctgtcacctcacctacttggccccagtcctcttctcttgtcacatggggatggggacacatagctatgctcatgggactacaatacggcctcctcctctcctgagacagggattgggaggtcggggagagcctccaatctctgaggcctggcaggtggggattttcttggccctgcaacatctgcataagtcacagacttgcctgggacccagaaaccacttcctgtgccccagccagcccccctcccgcccagtgccacagtaaaggtcggcacctgtaggtccaggtacccc

SEQ ID NO: 40 - DNA, 4053 bp, Homo sapiens
acccctgacacagtgacacagtccctgtctggtacacatgaggaccctccactgctagccagcctgccccaggcaggggctcatggctgccatggtgtctgccagatcttgtctgatacgaaggagcttcagaaggaaatcaactccctatctgggaagctggaccggacgtttgcggtgactgatgagcttgtgttcaaggtgtggggcaggttgggcgggggtgagtggggtgaggctgggctgctgccttgtgcatctgctaattggctggctggggtccagacccaggccctgtgcgaggctggaggtgcactgatacccagggctggctttgtttcatggaggatgaagctagtggggtggtgggagagggtggccttcttagggcatggagatggtcaagggcagcccactgatacctttgaggtccctgtgtctggtcaggatgccaagaaggacgatgctgttcggaaggcctataagtatctagctgctctgcacgaggtgaggggagacatgtgcctggggtggggctgctgggggtgggtgggactgggtgcaagccttctgctcctgttgtccccagaactgcagccagctcatccagaccatcgaggacacaggcaccatcatgcgggaggttcgagacctcgaggagcaggtgaggcctgggggcaggatggggagccaaggcgggccggggggacagttcctcaggttatgctgacagaggctgtggagccacacacagccgatggctggacacccagccctgccccttagtgcctgtgacctgggacaggcaagtggcctactgtgagccccagcttccaccccaagggccctcctgtctgcctcccagggccatgggcagaggcttcagcttaaagatgtagggggaatcctgccacatggcgaaggatgctttgggtagagggaacaccacacgaggcctggccatgggacagagcaggctgttggagttggtgggaggggcccagagtggctgtgatgggggctggtgagcaggagctgggaaaggggctgtgtgtgctgagggggcatgtgttcacattgcctcagatcgagacagagctgggcaagaagaccctcagcaacctggagaagatccgggaggactaccgagccctccgccaggagaacgctggcctcctaggccgggtccgggaggcctgaggagccgccggcagaggtctctccccagcctcaggcagggatttggggtgctggaggcagtggccaagcacatgccctagctacttcctccgctgtccagttcctcctgctgcggccttggacccagacccctgcccactgaccgcaacccttatatggggtgatagtccagcatgtggggagctcggctgcagtttattggggacggtactgtgggttgggggccttggatcccaaataaatgagtagttcctctgcagtctaagctgaggcatggatcagggctcagggaatgggagtgaggtgagtggcaggggagacacggggtatttttggcaaggcagtgtgtgtggctgtgtgtgtctgcacgggactcaagagacccactggggggctgtgcgtgtgcatatgcgtgagatacacaggtgaattctaacaggccgtgtgtgtgagcgagcacgtgttgggacctcagatcctgagggtactgacgctgcttctgtgtaggcctctgggcacacccctgtgttgacagtgcccctgtgggccctgaggctggctgtgggtgcgtgccttggggtgtgtgggttgtcagggctgtgcttgtgtgtgattgtgtgatgatgcagctttgaggttgtttgagtgtactgaggcaggctctctgtgttttggggtttgtgttgagtgagggacaggattgtgacattttgtgtgtctgtgtgacttttccagccctgaagtaatctgtgcgagcagctgaggcaggctctgtgtggctggttgtgaaggctctgtttggctgcagggctcgactggggggtgtgtctggggcggaggtgggggctggggccaggaccggggcccctctgagcagccttggggcaaaggatatgatgggggagggggtggctgccagcgggggaacaggggccctggcaggcaagacagtggaaacctcacttcttggtccctgtgggcacatccagggcctatcatccctgcccccaccacctctgcctcccaccagtttggcccctgttcgtccatcctcctttccttgatcttgaggtcaggggccaggtgtagggttggaacacctgctgggcctctggctccgtttcttgcggaactccagctcatccacggtccacacagcccccttctcgctctccacccgcacaaagcacttgtgcagactcaggttgtggcggatggcgttctgtggaaggccggggacagggagcaggtgggcgtcaacctctgaggccagcagccaccaccaacaacccacatcccgttcctccccaatgtgcctatgagcccagacccaggcctgcccactttgagctgcgatggcacttgaggccatcccagtcaccgccacctcagaggagctcaccttccaggtggcaggatggtttctgaagaaggcaaacatgcgtgtgaaccagtggtagatctcattgagtgtccgctgcttctctggagcctccaggatggcctggaagttggggggtggggtaaggggcacattccccaaacttggggtttagaggggctatgacctaccccgagccatctgacatgggggcggaattgtaggggcaggtaatcagggacaggactagatgtggggtgaagcatggggtcaaagatggggttagaaaaggggtgaagtgtcgggttgggcagggttagatgggtgtgggtatggttgttctgggattaggtaagggatcaggactgaggttgggagtggggtcttgttcagggctagggctgaagtgaggtgaaaggtctgggatggagttggagttggggttctctgtggaggtgacatttcagggttggggaaggtgaagggtcagaagtggggtcaaggatttggaaggggtaaagggccaggccaacttaagggtcagggaaggggtgggttaagagtcaggctggggtggactcaggtggggggtctaggggtgagggatgggatgacttggctttaggtcagaagccagagatggtttgaattatcgagtatcttacgtgtcagggacatggttaggtggttaggctcagggcaaggatgaggttagttgtggggttcggtgtggagtgaggctgagggtcagggaatttgatcagtttggattcaggaatgggattacagagtcagcgatgatgattgcagtgaggctatcagtcaggatggggctaggtcagggtttcagttcagagacagtcggggaatatctggtatcatgtaggggtgaggttcaggtttggggttaggtgtggcgctaggatgaaggttctgagaaggcattggggaggctgagatgaaggagttgggatggggtgatgaagttaaggatcaaatgggtgttacaaggaaaggttgggaatggtgcccagttgggggtgtattgacatactggggtacgttggggccagggaaggagatggggttgggttggcataaaggctggggaaggagttagagtaagagctggggtacgtttagggcaaggtgcagagatggggttagctttaggctattttatgggtccaggagagggttaggtatggggctgaggtggacatctggaaaggggtaggtttagggtcagaatttggcatgctctggcctggatggtggtttaggtttggatttgcggacaggtttggggtgaagccagcatgaggggtcacatttgaggcacggcttggggatccttggggctggggcttgggaatggaggaacccactctgagggcactcagagggagacaggagtttgggaggcaggtcccccaccccatctttgtcttcctcctccttggggccgagct

SEQ ID NO: 41 - DNA, 4046 bp, Homo sapiens
gctccatgggggctgtggcatgtgactgggtatccaccggccaggcagagtctgagtgccggcacagcaagctcagtacagcagagcgtgagcaggccctgcgcctgaagagccgcgcggtggagctgctgcccgatgggactgccaaccttgccaagctgcaggtggggttggggctgtagctgggcggagaggggcagggtggggtggggtggggttggagggcccagcctgtgtgacatgtacccatcccccaccagcttgtggtggagaatagtgcccagcgggtcatccacttggcgggtcagtgggagaagcaccgggtcccactcctcgctgagtaccgccacctccgaaagctgcaggattgcagagaggtaagcagtggggccctgggctgtgggcgggccagggcaggctcggtccctctctagggggccatccctatgctctgctcactgtcttctgcctgtgggctcatggcagctggaatcttctcgacggctggcagagatccaagaactgcaccagagtgtccgggcggctgctgaagaggcccgcaggaaggaggaggtctataagcagctggtaaggcctgtgtgagggacctgggtagcttaggagggtggggggatggtcctggggcagtgcctgctatatccctgcctagatgtcagagctggagactctgcccagagatgtgtcccggctggcctacacccagcgcatcctggagatcgtgggcaacatccggaagcagaaggaagagatcaccaaggtacactgccagggccatggagggtgggtcatgtgggctgtcaggcatagtgtggccgcacagggacctcacaccctcaggcagagctgtccagtcacactctaacacagaatagtcacacacaatccatcccagtcacccctgacacagtgacacagtccctgtctggtacacatgaggaccctccactgctagccagcctgccccaggcaggggctcatggctgccatggtgtctgccagatcttgtctgatacgaaggagcttcagaaggaaatcaactccctatctgggaagctggaccggacgtttgcggtgactgatgagcttgtgttcaaggtgtggggcaggttgggcgggggtgagtggggtgaggctgggctgctgccttgtgcatctgctaattggctggctggggtccagacccaggccctgtgcgaggctggaggtgcactgatacccagggctggctttgtttcatggaggatgaagctagtggggtggtgggagagggtggccttcttagggcatggagatggtcaagggcagcccactgatacctttgaggtccctgtgtctggtcaggatgccaagaaggacgatgctgttcggaaggcctataagtatctagctgctctgcacgaggtgaggggagacatgtgcctggggtggggctgctgggggtgggtgggactgggtgcaagccttctgctcctgttgtccccagaactgcagccagctcatccagaccatcgaggacacaggcaccatcatgcgggaggttcgagacctcgaggagcaggtgaggcctgggggcaggatggggagccaaggcgggccggggggacagttcctcaggttatgctgacagaggctgtggagccacacacagccgatggctggacacccagccctgccccttagtgcctgtgacctgggacaggcaagtggcctactgtgagccccagcttccaccccaagggccctcctgtctgcctcccagggccatgggcagaggcttcagcttaaagatgtagggggaatcctgccacatggcgaaggatgctttgggtagagggaacaccacacgaggcctggccatgggacagagcaggctgttggagttggtgggaggggcccagagtggctgtgatgggggctggtgagcaggagctgggaaaggggctgtgtgtgctgagggggcatgtgttcacattgcctcagatcgagacagagctgggcaagaagaccctcagcaacctggagaagatccgggaggactaccgagccctccgccaggagaacgctggcctcctaggccgggtccgggaggcctgaggagccgccggcagaggtctctccccagcctcaggcagggatttggggtgctggaggcagtggccaagcacatgccctagctacttcctccgctgtccagttcctcctgctgcggccttggacccagacccctgcccactgaccgcaacccttatatggggtgatagtccagcatgtggggagctcggctgcagtttattggggacggtactgtgggttgggggccttggatcccaaataaatgagtagttcctctgcagtctaagctgaggcatggatcagggctcagggaatgggagtgaggtgagtggcaggggagacacggggtatttttggcaaggcagtgtgtgtggctgtgtgtgtctgcacgggactcaagagacccactggggggctgtgcgtgtgcatatgcgtgagatacacaggtgaattctaacaggccgtgtgtgtgagcgagcacgtgttgggacctcagatcctgagggtactgacgctgcttctgtgtaggcctctgggcacacccctgtgttgacagtgcccctgtgggccctgaggctggctgtgggtgcgtgccttggggtgtgtgggttgtcagggctgtgcttgtgtgtgattgtgtgatgatgcagctttgaggttgtttgagtgtactgaggcaggctctctgtgttttggggtttgtgttgagtgagggacaggattgtgacattttgtgtgtctgtgtgacttttccagccctgaagtaatctgtgcgagcagctgaggcaggctctgtgtggctggttgtgaaggctctgtttggctgcagggctcgactggggggtgtgtctggggcggaggtgggggctggggccaggaccggggcccctctgagcagccttggggcaaaggatatgatgggggagggggtggctgccagcgggggaacaggggccctggcaggcaagacagtggaaacctcacttcttggtccctgtgggcacatccagggcctatcatccctgcccccaccacctctgcctcccaccagtttggcccctgttcgtccatcctcctttccttgatcttgaggtcaggggccaggtgtagggttggaacacctgctgggcctctggctccgtttcttgcggaactccagctcatccacggtccacacagcccccttctcgctctccacccgcacaaagcacttgtgcagactcaggttgtggcggatggcgttctgtggaaggccggggacagggagcaggtgggcgtcaacctctgaggccagcagccaccaccaacaacccacatcccgttcctccccaatgtgcctatgagcccagacccaggcctgcccactttgagctgcgatggcacttgaggccatcccagtcaccgccacctcagaggagctcaccttccaggtggcaggatggtttctgaagaaggcaaacatgcgtgtgaaccagtggtagatctcattgagtgtccgctgcttctctggagcctccaggatggcctggaagttggggggtggggtaaggggcacattccccaaacttggggtttagaggggctatgacctaccccgagccatctgacatgggggcggaattgtaggggcaggtaatcagggacaggactagatgtggggtgaagcatggggtcaaagatggggttagaaaaggggtgaagtgtcgggttgggcagggttagatgggtgtgggtatggttgttctgggattaggtaagggatcaggactgaggttgggagtggggtcttgttcagggctagggctgaagtgaggtgaaaggtctgggatggagttggagttggggttctctgtggaggtgacatttcagggttggggaaggtgaagggtcagaagtggggtcaaggatttggaaggggtaaagggccaggccaacttaagggtcagggaagg

SEQ ID NO: 42 - DNA, 4047 bp, Homo sapiens
aacaggagctcgagtcccttcgggagcagctggaaggagtgaaccgcagcattgaggaggttgaggccgacatgaagaccctgggcgtcagctttgtgcaggtaaggggcggaggaggggctgcgcgttgggctaggtcagaaggagggcctcggggtgtgagggactagatggggcaagaggtgctctgtagaggtctgcacatggcagaagggttcctgggagccattagggatctgtgggcctcttgagggtggctatgagaatcaggccagggtgagggtctgtgggcatctatggggcaccgcgggtctgcatgggcaggggattgaggggtcctcggagggtctgtgggcatctgtggggtacccacgggtctgcatggacaggggattagggggtcctcggggtccttggcaccagcgtggagctgttagagaggcctgtgggggccacaggggtgtacagtcatctgtggagctccatgggggctgtggcatgtgactgggtatccaccggccaggcagagtctgagtgccggcacagcaagctcagtacagcagagcgtgagcaggccctgcgcctgaagagccgcgcggtggagctgctgcccgatgggactgccaaccttgccaagctgcaggtggggttggggctgtagctgggcggagaggggcagggtggggtggggtggggttggagggcccagcctgtgtgacatgtacccatcccccaccagcttgtggtggagaatagtgcccagcgggtcatccacttggcgggtcagtgggagaagcaccgggtcccactcctcgctgagtaccgccacctccgaaagctgcaggattgcagagaggtaagcagtggggccctgggctgtgggcgggccagggcaggctcggtccctctctagggggccatccctatgctctgctcactgtcttctgcctgtgggctcatggcagctggaatcttctcgacggctggcagagatccaagaactgcaccagagtgtccgggcggctgctgaagaggcccgcaggaaggaggaggtctataagcagctggtaaggcctgtgtgagggacctgggtagcttaggagggtggggggatggtcctggggcagtgcctgctatatccctgcctagatgtcagagctggagactctgcccagagatgtgtcccggctggcctacacccagcgcatcctggagatcgtgggcaacatccggaagcagaaggaagagatcaccaaggtacactgccagggccatggagggtgggtcatgtgggctgtcaggcatagtgtggccgcacagggacctcacaccctcaggcagagctgtccagtcacactctaacacagaatagtcacacacaatccatcccagtcacccctgacacagtgacacagtccctgtctggtacacatgaggaccctccactgctagccagcctgccccaggcaggggctcatggctgccatggtgtctgccagatcttgtctgatacgaaggagcttcagaaggaaatcaactccctatctgggaagctggaccggacgtttgcggtgactgatgagcttgtgttcaaggtgtggggcaggttgggcgggggtgagtggggtgaggctgggctgctgccttgtgcatctgctaattggctggctggggtccagacccaggccctgtgcgaggctggaggtgcactgatacccagggctggctttgtttcatggaggatgaagctagtggggtggtgggagagggtggccttcttagggcatggagatggtcaagggcagcccactgatacctttgaggtccctgtgtctggtcaggatgccaagaaggacgatgctgttcggaaggcctataagtatctagctgctctgcacgaggtgaggggagacatgtgcctggggtggggctgctgggggtgggtgggactgggtgcaagccttctgctcctgttgtccccagaactgcagccagctcatccagaccatcgaggacacaggcaccatcatgcgggaggttcgagacctcgaggagcaggtgaggcctgggggcaggatggggagccaaggcgggccggggggacagttcctcaggttatgctgacagaggctgtggagccacacacagccgatggctggacacccagccctgccccttagtgcctgtgacctgggacaggcaagtggcctactgtgagccccagcttccaccccaagggccctcctgtctgcctcccagggccatgggcagaggcttcagcttaaagatgtagggggaatcctgccacatggcgaaggatgctttgggtagagggaacaccacacgaggcctggccatgggacagagcaggctgttggagttggtgggaggggcccagagtggctgtgatgggggctggtgagcaggagctgggaaaggggctgtgtgtgctgagggggcatgtgttcacattgcctcagatcgagacagagctgggcaagaagaccctcagcaacctggagaagatccgggaggactaccgagccctccgccaggagaacgctggcctcctaggccgggtccgggaggcctgaggagccgccggcagaggtctctccccagcctcaggcagggatttggggtgctggaggcagtggccaagcacatgccctagctacttcctccgctgtccagttcctcctgctgcggccttggacccagacccctgcccactgaccgcaacccttatatggggtgatagtccagcatgtggggagctcggctgcagtttattggggacggtactgtgggttgggggccttggatcccaaataaatgagtagttcctctgcagtctaagctgaggcatggatcagggctcagggaatgggagtgaggtgagtggcaggggagacacggggtatttttggcaaggcagtgtgtgtggctgtgtgtgtctgcacgggactcaagagacccactggggggctgtgcgtgtgcatatgcgtgagatacacaggtgaattctaacaggccgtgtgtgtgagcgagcacgtgttgggacctcagatcctgagggtactgacgctgcttctgtgtaggcctctgggcacacccctgtgttgacagtgcccctgtgggccctgaggctggctgtgggtgcgtgccttggggtgtgtgggttgtcagggctgtgcttgtgtgtgattgtgtgatgatgcagctttgaggttgtttgagtgtactgaggcaggctctctgtgttttggggtttgtgttgagtgagggacaggattgtgacattttgtgtgtctgtgtgacttttccagccctgaagtaatctgtgcgagcagctgaggcaggctctgtgtggctggttgtgaaggctctgtttggctgcagggctcgactggggggtgtgtctggggcggaggtgggggctggggccaggaccggggcccctctgagcagccttggggcaaaggatatgatgggggagggggtggctgccagcgggggaacaggggccctggcaggcaagacagtggaaacctcacttcttggtccctgtgggcacatccagggcctatcatccctgcccccaccacctctgcctcccaccagtttggcccctgttcgtccatcctcctttccttgatcttgaggtcaggggccaggtgtagggttggaacacctgctgggcctctggctccgtttcttgcggaactccagctcatccacggtccacacagcccccttctcgctctccacccgcacaaagcacttgtgcagactcaggttgtggcggatggcgttctgtggaaggccggggacagggagcaggtgggcgtcaacctctgaggccagcagccaccaccaacaacccacatcccgttcctccccaatgtgcctatgagcccagacccaggcctgcccactttgagctgcgatggcacttgaggccatcccagtcaccgccacctcagaggagctcaccttccaggtggcaggatggtttctgaagaaggcaaacatgcgtgtgaacca

SEQ ID NO: 43 - DNA, 4047 bp, Homo sapiens
ggtgcttcagtgggcatgcatgccgcactgggggcagttctcaggggaggctgaggctgggccacgtgaggaagggccttccctggcagccaggatgcccctcgtcactccccttaggagccccaggcccaggccactcaggtgtcagatgtgccagccacctcccggcggcctgaacaggtgagcagagtggtttggaggggggtgtcccaggcccttgcttgtctactgggcctgacaccccaaccctgactggcctgggcctcccaggtcacgtgggcagctcaggaacaggagctcgagtcccttcgggagcagctggaaggagtgaaccgcagcattgaggaggttgaggccgacatgaagaccctgggcgtcagctttgtgcaggtaaggggcggaggaggggctgcgcgttgggctaggtcagaaggagggcctcggggtgtgagggactagatggggcaagaggtgctctgtagaggtctgcacatggcagaagggttcctgggagccattagggatctgtgggcctcttgagggtggctatgagaatcaggccagggtgagggtctgtgggcatctatggggcaccgcgggtctgcatgggcaggggattgaggggtcctcggagggtctgtgggcatctgtggggtacccacgggtctgcatggacaggggattagggggtcctcggggtccttggcaccagcgtggagctgttagagaggcctgtgggggccacaggggtgtacagtcatctgtggagctccatgggggctgtggcatgtgactgggtatccaccggccaggcagagtctgagtgccggcacagcaagctcagtacagcagagcgtgagcaggccctgcgcctgaagagccgcgcggtggagctgctgcccgatgggactgccaaccttgccaagctgcaggtggggttggggctgtagctgggcggagaggggcagggtggggtggggtggggttggagggcccagcctgtgtgacatgtacccatcccccaccagcttgtggtggagaatagtgcccagcgggtcatccacttggcgggtcagtgggagaagcaccgggtcccactcctcgctgagtaccgccacctccgaaagctgcaggattgcagagaggtaagcagtggggccctgggctgtgggcgggccagggcaggctcggtccctctctagggggccatccctatgctctgctcactgtcttctgcctgtgggctcatggcagctggaatcttctcgacggctggcagagatccaagaactgcaccagagtgtccgggcggctgctgaagaggcccgcaggaaggaggaggtctataagcagctggtaaggcctgtgtgagggacctgggtagcttaggagggtggggggatggtcctggggcagtgcctgctatatccctgcctagatgtcagagctggagactctgcccagagatgtgtcccggctggcctacacccagcgcatcctggagatcgtgggcaacatccggaagcagaaggaagagatcaccaaggtacactgccagggccatggagggtgggtcatgtgggctgtcaggcatagtgtggccgcacagggacctcacaccctcaggcagagctgtccagtcacactctaacacagaatagtcacacacaatccatcccagtcacccctgacacagtgacacagtccctgtctggtacacatgaggaccctccactgctagccagcctgccccaggcaggggctcatggctgccatggtgtctgccagatcttgtctgatacgaaggagcttcagaaggaaatcaactccctatctgggaagctggaccggacgtttgcggtgactgatgagcttgtgttcaaggtgtggggcaggttgggcgggggtgagtggggtgaggctgggctgctgccttgtgcatctgctaattggctggctggggtccagacccaggccctgtgcgaggctggaggtgcactgatacccagggctggctttgtttcatggaggatgaagctagtggggtggtgggagagggtggccttcttagggcatggagatggtcaagggcagcccactgatacctttgaggtccctgtgtctggtcaggatgccaagaaggacgatgctgttcggaaggcctataagtatctagctgctctgcacgaggtgaggggagacatgtgcctggggtggggctgctgggggtgggtgggactgggtgcaagccttctgctcctgttgtccccagaactgcagccagctcatccagaccatcgaggacacaggcaccatcatgcgggaggttcgagacctcgaggagcaggtgaggcctgggggcaggatggggagccaaggcgggccggggggacagttcctcaggttatgctgacagaggctgtggagccacacacagccgatggctggacacccagccctgccccttagtgcctgtgacctgggacaggcaagtggcctactgtgagccccagcttccaccccaagggccctcctgtctgcctcccagggccatgggcagaggcttcagcttaaagatgtagggggaatcctgccacatggcgaaggatgctttgggtagagggaacaccacacgaggcctggccatgggacagagcaggctgttggagttggtgggaggggcccagagtggctgtgatgggggctggtgagcaggagctgggaaaggggctgtgtgtgctgagggggcatgtgttcacattgcctcagatcgagacagagctgggcaagaagaccctcagcaacctggagaagatccgggaggactaccgagccctccgccaggagaacgctggcctcctaggccgggtccgggaggcctgaggagccgccggcagaggtctctccccagcctcaggcagggatttggggtgctggaggcagtggccaagcacatgccctagctacttcctccgctgtccagttcctcctgctgcggccttggacccagacccctgcccactgaccgcaacccttatatggggtgatagtccagcatgtggggagctcggctgcagtttattggggacggtactgtgggttgggggccttggatcccaaataaatgagtagttcctctgcagtctaagctgaggcatggatcagggctcagggaatgggagtgaggtgagtggcaggggagacacggggtatttttggcaaggcagtgtgtgtggctgtgtgtgtctgcacgggactcaagagacccactggggggctgtgcgtgtgcatatgcgtgagatacacaggtgaattctaacaggccgtgtgtgtgagcgagcacgtgttgggacctcagatcctgagggtactgacgctgcttctgtgtaggcctctgggcacacccctgtgttgacagtgcccctgtgggccctgaggctggctgtgggtgcgtgccttggggtgtgtgggttgtcagggctgtgcttgtgtgtgattgtgtgatgatgcagctttgaggttgtttgagtgtactgaggcaggctctctgtgttttggggtttgtgttgagtgagggacaggattgtgacattttgtgtgtctgtgtgacttttccagccctgaagtaatctgtgcgagcagctgaggcaggctctgtgtggctggttgtgaaggctctgtttggctgcagggctcgactggggggtgtgtctggggcggaggtgggggctggggccaggaccggggcccctctgagcagccttggggcaaaggatatgatgggggagggggtggctgccagcgggggaacaggggccctggcaggcaagacagtggaaacctcacttcttggtccctgtgggcacatccagggcctatcatccctgcccccaccacctctgcctcccaccagtttggcccctgttcgtccatcctcctttccttgatcttgaggtcaggggccaggtgtagggttggaacacctgctgggcctctggctccgtttcttgcggaactccagctcatccacggtccacacagccccct

SEQ ID NO: 44 - DNA, 4032 bp, Homo sapiens
atgttcactctgagggccccccatccttctcatgggcatttgaggcttgagagatggggcaggtgggtaggagctgtgacagggtcagggagatttctccacgagcaagcactctggcccgaggttgcagatggtgcctttacccacatagtcacagtctggccaccatcggtgcttcagtgggcatgcatgccgcactgggggcagttctcaggggaggctgaggctgggccacgtgaggaagggccttccctggcagccaggatgcccctcgtcactccccttaggagccccaggcccaggccactcaggtgtcagatgtgccagccacctcccggcggcctgaacaggtgagcagagtggtttggaggggggtgtcccaggcccttgcttgtctactgggcctgacaccccaaccctgactggcctgggcctcccaggtcacgtgggcagctcaggaacaggagctcgagtcccttcgggagcagctggaaggagtgaaccgcagcattgaggaggttgaggccgacatgaagaccctgggcgtcagctttgtgcaggtaaggggcggaggaggggctgcgcgttgggctaggtcagaaggagggcctcggggtgtgagggactagatggggcaagaggtgctctgtagaggtctgcacatggcagaagggttcctgggagccattagggatctgtgggcctcttgagggtggctatgagaatcaggccagggtgagggtctgtgggcatctatggggcaccgcgggtctgcatgggcaggggattgaggggtcctcggagggtctgtgggcatctgtggggtacccacgggtctgcatggacaggggattagggggtcctcggggtccttggcaccagcgtggagctgttagagaggcctgtgggggccacaggggtgtacagtcatctgtggagctccatgggggctgtggcatgtgactgggtatccaccggccaggcagagtctgagtgccggcacagcaagctcagtacagcagagcgtgagcaggccctgcgcctgaagagccgcgcggtggagctgctgcccgatgggactgccaaccttgccaagctgcaggtggggttggggctgtagctgggcggagaggggcagggtggggtggggtggggttggagggcccagcctgtgtgacatgtacccatcccccaccagcttgtggtggagaatagtgcccagcgggtcatccacttggcgggtcagtgggagaagcaccgggtcccactcctcgctgagtaccgccacctccgaaagctgcaggattgcagagaggtaagcagtggggccctgggctgtgggcgggccagggcaggctcggtccctctctagggggccatccctatgctctgctcactgtcttctgcctgtgggctcatggcagctggaatcttctcgacggctggcagagatccaagaactgcaccagagtgtccgggcggctgctgaagaggcccgcaggaaggaggaggtctataagcagctggtaaggcctgtgtgagggacctgggtagcttaggagggtggggggatggtcctggggcagtgcctgctatatccctgcctagatgtcagagctggagactctgcccagagatgtgtcccggctggcctacacccagcgcatcctggagatcgtgggcaacatccggaagcagaaggaagagatcaccaaggtacactgccagggccatggagggtgggtcatgtgggctgtcaggcatagtgtggccgcacagggacctcacaccctcaggcagagctgtccagtcacactctaacacagaatagtcacacacaatccatcccagtcacccctgacacagtgacacagtccctgtctggtacacatgaggaccctccactgctagccagcctgccccaggcaggggctcatggctgccatggtgtctgccagatcttgtctgatacgaaggagcttcagaaggaaatcaactccctatctgggaagctggaccggacgtttgcggtgactgatgagcttgtgttcaaggtgtggggcaggttgggcgggggtgagtggggtgaggctgggctgctgccttgtgcatctgctaattggctggctggggtccagacccaggccctgtgcgaggctggaggtgcactgatacccagggctggctttgtttcatggaggatgaagctagtggggtggtgggagagggtggccttcttagggcatggagatggtcaagggcagcccactgatacctttgaggtccctgtgtctggtcaggatgccaagaaggacgatgctgttcggaaggcctataagtatctagctgctctgcacgaggtgaggggagacatgtgcctggggtggggctgctgggggtgggtgggactgggtgcaagccttctgctcctgttgtccccagaactgcagccagctcatccagaccatcgaggacacaggcaccatcatgcgggaggttcgagacctcgaggagcaggtgaggcctgggggcaggatggggagccaaggcgggccggggggacagttcctcaggttatgctgacagaggctgtggagccacacacagccgatggctggacacccagccctgccccttagtgcctgtgacctgggacaggcaagtggcctactgtgagccccagcttccaccccaagggccctcctgtctgcctcccagggccatgggcagaggcttcagcttaaagatgtagggggaatcctgccacatggcgaaggatgctttgggtagagggaacaccacacgaggcctggccatgggacagagcaggctgttggagttggtgggaggggcccagagtggctgtgatgggggctggtgagcaggagctgggaaaggggctgtgtgtgctgagggggcatgtgttcacattgcctcagatcgagacagagctgggcaagaagaccctcagcaacctggagaagatccgggaggactaccgagccctccgccaggagaacgctggcctcctaggccgggtccgggaggcctgaggagccgccggcagaggtctctccccagcctcaggcagggatttggggtgctggaggcagtggccaagcacatgccctagctacttcctccgctgtccagttcctcctgctgcggccttggacccagacccctgcccactgaccgcaacccttatatggggtgatagtccagcatgtggggagctcggctgcagtttattggggacggtactgtgggttgggggccttggatcccaaataaatgagtagttcctctgcagtctaagctgaggcatggatcagggctcagggaatgggagtgaggtgagtggcaggggagacacggggtatttttggcaaggcagtgtgtgtggctgtgtgtgtctgcacgggactcaagagacccactggggggctgtgcgtgtgcatatgcgtgagatacacaggtgaattctaacaggccgtgtgtgtgagcgagcacgtgttgggacctcagatcctgagggtactgacgctgcttctgtgtaggcctctgggcacacccctgtgttgacagtgcccctgtgggccctgaggctggctgtgggtgcgtgccttggggtgtgtgggttgtcagggctgtgcttgtgtgtgattgtgtgatgatgcagctttgaggttgtttgagtgtactgaggcaggctctctgtgttttggggtttgtgttgagtgagggacaggattgtgacattttgtgtgtctgtgtgacttttccagccctgaagtaatctgtgcgagcagctgaggcaggctctgtgtggctggttgtgaaggctctgtttggctgcagggctcgactggggggtgtgtctggggcggaggtgggggctggggccaggaccggggcccctctgagcagccttggggcaaaggatatgatgggggagggggtggctgccagcgggggaacaggggccctggcaggcaagacagtggaaacctcacttcttggtccctgtgg

SEQ ID NO: 45 - DNA, 4044 bp, Homo sapiens
tctgcgccaaagctggggcctgcttggggcccccatacaagcccgggacctgggagaactgctgcaggcctggggtgctggggccaagactggtgctcctaagggctcccgcttcacgcactcagagaagttcaccttccatctggtgggtgcgcctgaggacatgagatgtgtggatgggcgtggcaggcttggagggtggctttttgtgtcagcaccacacctttatccacacaggttcctgtgttcccactggacaggccctcgccccactgtgggatgggtacccagaggggtcccctagcttattagggacttgactggagaaaatgtggataggtgggaaccatgcaaaggtgtgggggtgttcttggggcaacaccccctttcctcaggcagtttcctttgagcatatcttctgtcctaagatgttcactctgagggccccccatccttctcatgggcatttgaggcttgagagatggggcaggtgggtaggagctgtgacagggtcagggagatttctccacgagcaagcactctggcccgaggttgcagatggtgcctttacccacatagtcacagtctggccaccatcggtgcttcagtgggcatgcatgccgcactgggggcagttctcaggggaggctgaggctgggccacgtgaggaagggccttccctggcagccaggatgcccctcgtcactccccttaggagccccaggcccaggccactcaggtgtcagatgtgccagccacctcccggcggcctgaacaggtgagcagagtggtttggaggggggtgtcccaggcccttgcttgtctactgggcctgacaccccaaccctgactggcctgggcctcccaggtcacgtgggcagctcaggaacaggagctcgagtcccttcgggagcagctggaaggagtgaaccgcagcattgaggaggttgaggccgacatgaagaccctgggcgtcagctttgtgcaggtaaggggcggaggaggggctgcgcgttgggctaggtcagaaggagggcctcggggtgtgagggactagatggggcaagaggtgctctgtagaggtctgcacatggcagaagggttcctgggagccattagggatctgtgggcctcttgagggtggctatgagaatcaggccagggtgagggtctgtgggcatctatggggcaccgcgggtctgcatgggcaggggattgaggggtcctcggagggtctgtgggcatctgtggggtacccacgggtctgcatggacaggggattagggggtcctcggggtccttggcaccagcgtggagctgttagagaggcctgtgggggccacaggggtgtacagtcatctgtggagctccatgggggctgtggcatgtgactgggtatccaccggccaggcagagtctgagtgccggcacagcaagctcagtacagcagagcgtgagcaggccctgcgcctgaagagccgcgcggtggagctgctgcccgatgggactgccaaccttgccaagctgcaggtggggttggggctgtagctgggcggagaggggcagggtggggtggggtggggttggagggcccagcctgtgtgacatgtacccatcccccaccagcttgtggtggagaatagtgcccagcgggtcatccacttggcgggtcagtgggagaagcaccgggtcccactcctcgctgagtaccgccacctccgaaagctgcaggattgcagagaggtaagcagtggggccctgggctgtgggcgggccagggcaggctcggtccctctctagggggccatccctatgctctgctcactgtcttctgcctgtgggctcatggcagctggaatcttctcgacggctggcagagatccaagaactgcaccagagtgtccgggcggctgctgaagaggcccgcaggaaggaggaggtctataagcagctggtaaggcctgtgtgagggacctgggtagcttaggagggtggggggatggtcctggggcagtgcctgctatatccctgcctagatgtcagagctggagactctgcccagagatgtgtcccggctggcctacacccagcgcatcctggagatcgtgggcaacatccggaagcagaaggaagagatcaccaaggtacactgccagggccatggagggtgggtcatgtgggctgtcaggcatagtgtggccgcacagggacctcacaccctcaggcagagctgtccagtcacactctaacacagaatagtcacacacaatccatcccagtcacccctgacacagtgacacagtccctgtctggtacacatgaggaccctccactgctagccagcctgccccaggcaggggctcatggctgccatggtgtctgccagatcttgtctgatacgaaggagcttcagaaggaaatcaactccctatctgggaagctggaccggacgtttgcggtgactgatgagcttgtgttcaaggtgtggggcaggttgggcgggggtgagtggggtgaggctgggctgctgccttgtgcatctgctaattggctggctggggtccagacccaggccctgtgcgaggctggaggtgcactgatacccagggctggctttgtttcatggaggatgaagctagtggggtggtgggagagggtggccttcttagggcatggagatggtcaagggcagcccactgatacctttgaggtccctgtgtctggtcaggatgccaagaaggacgatgctgttcggaaggcctataagtatctagctgctctgcacgaggtgaggggagacatgtgcctggggtggggctgctgggggtgggtgggactgggtgcaagccttctgctcctgttgtccccagaactgcagccagctcatccagaccatcgaggacacaggcaccatcatgcgggaggttcgagacctcgaggagcaggtgaggcctgggggcaggatggggagccaaggcgggccggggggacagttcctcaggttatgctgacagaggctgtggagccacacacagccgatggctggacacccagccctgccccttagtgcctgtgacctgggacaggcaagtggcctactgtgagccccagcttccaccccaagggccctcctgtctgcctcccagggccatgggcagaggcttcagcttaaagatgtagggggaatcctgccacatggcgaaggatgctttgggtagagggaacaccacacgaggcctggccatgggacagagcaggctgttggagttggtgggaggggcccagagtggctgtgatgggggctggtgagcaggagctgggaaaggggctgtgtgtgctgagggggcatgtgttcacattgcctcagatcgagacagagctgggcaagaagaccctcagcaacctggagaagatccgggaggactaccgagccctccgccaggagaacgctggcctcctaggccgggtccgggaggcctgaggagccgccggcagaggtctctccccagcctcaggcagggatttggggtgctggaggcagtggccaagcacatgccctagctacttcctccgctgtccagttcctcctgctgcggccttggacccagacccctgcccactgaccgcaacccttatatggggtgatagtccagcatgtggggagctcggctgcagtttattggggacggtactgtgggttgggggccttggatcccaaataaatgagtagttcctctgcagtctaagctgaggcatggatcagggctcagggaatgggagtgaggtgagtggcaggggagacacggggtatttttggcaaggcagtgtgtgtggctgtgtgtgtctgcacgggactcaagagacccactggggggctgtgcgtgtgcatatgcgtgagatacacaggtgaattctaacaggccgtgtgtgtgagcgagcacgtgttgggacctcagatcctgagggtactgacgctgcttctgtgtaggcctctgggcacacccctgtgttgacagtgcccctgtgggccctgaggctggctgt

SEQ ID NO: 46 - DNA, 54306 bp, Homo sapiens
tcctctgggccccttctcagccacatccctccctctgccagaggtgaacactatcctgactctggtaatcagcccctcgcttttctttacaatgtcaccatttaggtggtaattcatgagttttgcctgcttgtgaactttgcataaatggatcagtgtggaagcttttttttggctttttgtgattcatctgtatgctttcgtgcagttatggatcttccattctcattatacaatattccattctgcgaatataccacaatttatttagatgcttattggcatctaaggtttgagcccttcatcagttatatgtgattccattatctcctcccaatttttcacttgtgttttcactcctttttgttttgcttttattcatagcaacctactacataaggttttcactctctttatggtgtcttttgatcaatggacattcctaattttaaggtcactgaatgtttcgtaattttcatttatggttgtttctgtgtcgtgatgaagaaaaactttgctaccatgagtatacgaaggtgttttgccttgttttttgttttgttttgtttttgagatggagtctcgatctgtggcccaggctggagtgcagtggtgccatctcggctcactgcaacctctgccccctgagttcaaacgattgtcccgcctcagcctcccaaacagctgggactacaggtggatgcccagctaatttttgtatttttagtagagacggggtttcaccatgttggccaggctggtggtctcaaactcctgatccgcccatctagacctcccaaagtgctgggattacaagagtgagccacagcacccggccctgcctcattgtattcttaaagcgctttggttttgcccttcgcatttaggctttaaacccacttagaattatttttatttgtgttgtaaagtagggatccaagttcatatttttcaatgcgggtaaccaattgttctatttattcaaaatccaatcatttccccactggtctaacacacttccttggtcaccagttctgtgtctacacgagtgtgtctacactgtttccgagatcactgtttttttattggtcgatttgtctactcttgcaaaaatatcgtgccatctgaatataccattacaataagtatcagtgtcctggctagtcttggcacttctacataaatttaagaattaatgtgtcatgatctacacacaggcaaaactctattggaattgtggttggatttgcattgaacctacaaagcagtttcaagagaactgacagctttgcacagtggccagtgaggaagaagggaaatgaggagagtgtggtatcttggaaaccaagtgaagaaagggttgcaaggtagagatgatcaactatgtcaaatgctgccaatatcccaagtaagatgacatctgagacttaaccatggctataacaatgtgaatatcttcagcagttttgctgaaatggttgggcaaaaaagatctgattggggctatttcagaaaggcatcatagaagaactgaagaaagctcgtatagatatttcttccaataggttttgctgtaaagggaagtaaataaatatgtggtgttttattttgttgagcagttttttatttgcatgcaataaatatatatctttctttcaaagcttctgggcttcctgtttttagtagaaatgtgatgtctgtggacagcaactgtgctaccaagtactgcagtacattaactcctctttcctttctgaggccttccttatctcagggactaaggggtctccctgctggtgtcaaaggctgttttttcagtaacctcaaaaccttgtggctgattcacaactgatgtccccacatccacaggagaccacagctaccactgcaaccatgtgactgacaccaaaccctcatgtggctgccactcttcctccctggctcccaccaccaccatccaaatacacacctgtagggtcccacaggcagaatgtggaaaagacaaagaaccatatggattaggaccacgagacgaggagacacacatcttcaaggaaagacatgttgaagcagcagcaggcgaccacgtcccacccccaactccccactgtgatcctcccacagaaagtgaccaccctgcacactcatgcccaaacaggagaacactacaccgcaagacactgtttctcatagagctctattgtggcatataataataggtactctatataaattaaattaaaaataaagctccagcaggttgcacaggttggctgttaataaatatatctctgggtaattgtgccccaagaccagctcacgaccactctccctcatccagagaattatacaaaaataaatacaggctcggggggtaggcggaggacatgcccagttccactctaaaagttcccctcactcacaccatctacccgttccctcatctccactggtgtcaccacagggagccctgtgttgactggagagcttggggatgagaaggcctctctttcagttgagcattctcagaagcaaaggacccaggtcccctcactgcacaggccatgtatcccatcttaagcctctgctgatcccacaagcagagcctatgagaaccaagccagagagaggcacagcgcaagcaccaggagggacacaccgctgttcagagccacagggaccaccactagcccggccaggacccccagagtctgggtcaagggcccccggagctgaggaggcagtgcacacacacattctgcagggactgctagggtgggagacttctttgggggttcaaggcttgggcctgcatccttttcatcctgggagctcacatgaggcctggctacactagagagacagacttcggcccccaagggactgaggagggtgggattttgcccctgcagaaggacgggagaggctggctccttgccagatatgggatccaagctgcctgcccactcactggtgacctctatctgggcttctgtcccggcctcccccagggactcagtcaccccagctatcaccctattcatgtgcaaagagctggtgtccttgcccatccctttctcaggatccccaatgaactgaccctctgtacccagaaccacagggccgtcacatcctgagccctctgcccatgggagccacacatctcccatcgtggctaccacagaacgggccccggagaggatttctggaggcgattccttggggctgtccccttctgggctggagggtgtgacagagagcccctcttcaccctccccttcatcatcagggtcttcggtgtccttgatgagctccacgccacgccccagccgggcatagtgcagcgtgatctcctcagccagggcgctgttcagggcccgctcagggccaggccacttcaagatcaggtcgcggtccgtcagtatgcccaggggatggctgggggacatccctccatctgtggagccctccccaccaccccctgccccacccgcagccacagcagcccgtaggcggctcaggtgagacaggtagagctgctccagctcctggtcgatggtgtcctcaccgagcagctcctctgacccactcacagcctccagcccccctccattctcactcgatactccccatgtggcctctgcctgctgctgactgggctccaggaaaggcccggtggccccctcgctcgcatcgggccctgaggcctggtctctgggggagccacccaggccacagagaggggaggaggggggaatcctgatggccggtgcctggaggacctctgtaaaagccacaggtggactgcttctggggacatcaccttcttctgcggggttgccagtcatcggaacgtcagaaacctggagccatggccggggcaagggggcagagaaaaagcaagggaatgaagcagaggaggggatggaacaagcagagacagtaagaagtgtgacagcccacagccagccccacaggggtttctatataaaaatgccttaaagcgccctctgtcactgtctagactccaaagactgtcatctatggtaaaataacacaattggatgcagtaaaacagggcttcttgcagattataaagctgaggaattcggtgggtgtgaatatttggtgaatgatcatcactaaatactgctggcttaccttcaaaacagagccagttaaaataactaaaagtgtaagtagccaggcacagtggctctcacctgtaatccaagcactttaggaagccaaggcgggcggatcacatgaaactaggagttcgagaccagcctggccaacatggtgaaaccccgtctctaccaaaaatacaaaaattagctgggcgtggtgttgtgcgcctgtaatctcaagaggctgaggcaggagaatcacttgaacccagagggcagagattgcagtgagccgagactgtgccactgcactgcagcctgggcgacagagactttgtctcaaaaaaaaaaaaaataaagagtgtaagtggattgtttgtaacacacaggataaatgcttgaggagatgcatacctcattctccatgatgtgattattacacaatgcatgcctatatcaaaacatctccataaatatatacacttactatgtcccctcaaaaattaaaaattaaaaaaattttaaaaaaaataaaatgcaaaaaaatcccaaaacatagccaggatgtccatatgaacccatgatgtatcatcttctctttaaaaaacaattatttcctagctccatcttttgaaagggcctagaaacaatgaccaatctagtagcagcaagcatgccgagcccccaaatcttggcctttgaatgccactctccactgaaaggaatcagtgctccttaaagaaatagctgtttctggccaggctcagtggctcacgcctgtaatcccagcactttgggaggccaaggcaggtggatcaccaggcaggtcaggagttcaagaccagcctggccaacatggtgaaaccccatctctgcaaaaatacaaaaatcagccgggtgtggtggcatgtgcctgtaatcccagctactcaagaggctgagacaggagaattgcttgaacccagaaggcagaggttgcagtgaaccgagattgtgccactgcactccagcctgggcgacagagaaagactctgactcaaaaaaaaaaaaaaaaaaaagaaagaaaaagaaaaaagaaagaaagagagagagagaggaaagaaaggaaagaaaaataaagtaaaagaaaagaaagaaagagagagacaaaggaaaggaaagaaagaaaggaaaggtaaggaaagaaaggaaaggaaagaaaagaaagaaaaagaaaaagaaaataaagaaaagaaaagcaagaaagaaatggctgtttccaggcttggggcagggagagtacaggatgaacctagcacatattgtcatggaagatgtgagaaaggctcacagaatgatgagggcgtgtcaaaaggacagagtagcccatctcaataagctcctactagccagggatagttcaatttaagcatcaaaaaaagcaaacaaataagtgcaatggattgaaactcattcaaatatgtttagaattcatgagttcataatgacacaaaaccaaaaatccttttattggtcacctttgtagtagtacttctctgaaaactggtaaataaaatggaaaaaattaaatatttacactgctttttctgcacaaactatatctcaaagtagccaaatagctggtgtgggacagtttttctttagagaagaattctagctaataaaggaagtgggaataatagaattaaatagagttaattctagttaatttaataataaaagattaaatacattcgtttaatacaatttgataaattaaataaatttaataagattacattaattaatataattaataaattaataaaaatggagtaagaaatgtatttccacctggatgtaatcagccagacccagactggaaaattctacaggacaagcaaagtttcttcaaccaacaaattgcaaagaaacaaagtgggggagattttaaaaatctaaagagacacatcaatcaaatgcaacatgtcaactttgtttggatcctaaacacttatgagagaagaaaacttgaacactgaccaaatacttgatgatactgaggaattaccgtttattttctaaggtgtgatgatagtattgtggggttaagaattcttaattttctggccagacgtgatggctcacacctgtaatcccagcactttgggaggccaaggcaacggatcccgtctctactaaaaatacaaaaattagctggatgtacttgcttgaacccaggaggcagaggttgcagtaagctgagatcacaccactgcactccagcctaggtgacagagtgagactctgtctcaaaaaaaaaaacaaaaaagagttcttaattttctgagatacaaacagaagtatttatggatgggatgatgtctggatgtcttccaaaataattccagagggaatgggagggaggagacggggtacagataaaataagaatgagcacgtgttgatatttactgaagctgggggatggtgtacgtaggttcattatactattttacttttgtatgtttgaaactttttgtaattaaaaagttcacacacacacacacacacacacacacaccctccaaaatgtctctacctcccctacctaccatcactctcgcctggaccactgcagtggcctccccttcacgagtcgcctgtttccacccttactctgacgtctattttccaagcagcagccagagggagcctgttaaatcctaaatcagattacatccctcctccgtccacaatgctcttgcggctccccctcactcggagtaaaagccaaagtcttcaccatggcctgtgaggcaccacccaatctgtcctcagccacctctctccctcaccccgcaccactctccccctccctcgttctgcccctgctgcgctggcttctacactgtccctcacacacgttagtcatggcctcacctcaggaacttcacactcgcctgggatgttcttcccttagttatccacgtggctcactctctcaccttcctcagatcttcgctcagatctcactaatcactaaagccttcccaggccacccaatctaaagttgcaaccgacccccgcccacaacacacacacacacacacacacacacacacacacacacacacacacacagagtctctcacccactccctattcctttctatttttccttatcactcatcatcacctaaagtaccatatattctattactttatcatgtctcaccctactaacacataagccccctcaaagagcgtttttgcatgtttgtaacagtgcttagcacagaacaagcactccataaatttttgctaaattaacaaatgacatttctacaagcccagctgagtaactgcattctccccctcccccatcaggttctgagttttgtgccctccctccaacccagggaggacccagagctagtgggccccaccacccagcccagcaatagtcacactgtgagcctcctattgggctgtctactccaaggctgcaaggacccacttacctgaagtgtcatctggggccatggacggagaggggtgggggctaccagtggacccactgactcctggacatcaggatgctctgctagagggaagagaaaggcagcattgggcaagacaggcatacaagtaggtatggttttgttaagaaaatctgccatcctagccaactggcagttttgcctctgaagctttctgtgacaatctaaagcagagggtaccccttcattttttttttgagatagggtctcgatgtgtcaccaaggctggggtgcagtggcacaatcatgactcactgcagcatcaacctcccaggctcaaatgatcctcccagctcagcctcccgagtagcagggactacggatgcatgccagcatgcccgtcttttttttttttttttaagagatgaggtctcactatgttgcccaggctcatctcgaactcctggcctcaagcaatcctcctgcctcagcctcccaaagtgctgggattacaggcatgagccactgagcccagcctttttcatttttatagaaagaaaaacagtaggaagaaagacatggtaaatacaagctaaaacttccgaagcttgccaattgcttacccatggcaaaggtgttatcatccatgttcttcgtcttcagttcctcctcggcaggcctgcagggcagaggagagagtacatggatctaataataccctgagaggtcacttctgccacccactggcaccttctgagcctctgtgctagcccaccttcacctgacagctgctgttttctcttctgctgcctttgtttatcccctcatcctaaaagtcctacagcctcattatagaaaattcgcaaaatacaggaaagtctaaagaagcaagaaaaacaatcacacatcagccagagacaactactgttaccattctggaaaatttccttccagatattctacgaaatcatttagattctacagacataatttcacagctagctttgtccatttaacagtaagaaacatcattatacacttttgcaaacatttcaaatggctgcttaatactcatatcataccattcccttcctactgagcagctaagttctttcatttagaggttgcaaagcaaaccagcaaacagcattgggcatagttttatcgacacttgtatcatttctttaggatacattcctggctatggaaagagaaaagatagaagaacccatcttttcggctgggcgtggtggcttacacctgtaattccagcactttgggaggccgaggcagggagaccacttgaggttaggagttcaagaccagcctgggcaacatgatgaaaccctgtctctactaaaaatacaaaaaattagctgggcatggcggtgcacgcccatagtcccaactacttgggaggccgaggcaggagaatcatttgaacctgggaggcggaggttgcagtgagccaagatcgcgccattgcactccagcctaggggacaagagtgaaactcagtctcaaaaaaaaaaaaagggccagacgcggtggctcacatctgtaatcccaacagtttgggaggccgaggcaggtggatcacctgaggtcaggaattcaagaccagcctggccaacatggtgaaactccgtctctactaaaaatataaaaattagctgggcgtggtggtgggcgcctgtaatcccaactacctgggaggctgaggcaggaaaatcgcttgaacccaagaggtagagattgcagtgagccgaaatcacaccactgcactccagcctgggcgacagagtgagagattatctcacaaaaacaaaacaaaacaaaacaaaacaaaaacaccttttctaagaaatggcaggtagacaagactgtgaggcagaggaaggaatgcaaatggagactgggagggaggtcacagaggcctgggtccctatgctaaccctctcgtccccgtatcagcctggcaggtcgcttcacctcctcactcataaaacagagccccggggagtcaggatgtgcactaagcacagggcagtcaagaggaatgaggatggacagccagaaatcagggcctgacacacagctgggattgaatcaactgtagatatttatgggtcttgctcctccttcaccaggccagtcagatccctgagtggcataagccgagtgcatttcaggtgggtcctcccaggggtggcatctcatcatggagaagtcactgttcttattctgaaaatgagtatcaagtgtctacagattaaggtaaatgagggaagcattgactaaaacctgagaggagctggggcgaatgcccacacctttttcttcctaagaggcaatgtgacattcttgatacttctgacaatggttgaaaaatttttttttttgagatggagtctcgttctgtcgccaggctggagtgcaatagcatgatctcggctcactgcaacctctgcctcccaggttcaagtgattctcctgcctcagcctctcaagtatcagggattacaggtacccaccatcacagccagctaatttttgtatttttaatagagacggggtttcgccatgttggccaggctggtctcaaactcctgacctcaggtgatccaccctcctcggcctcccaatgtgctggggttacaggcatgagccaccgtgcccggcctggttgaaactttttgaaaacccataaccaattaccttcacagaaacgagtatcaccatctgacccatacatagtacctactatggcattacacactgttctaagtgcttcacatttttttaaagaagtttttggggttttttggtttttgtttttgtttttttgtattttgtttttagagatggggtcttcctacgttgaccaggctggtcgtgaactcctggactcaagcgatcctcccatctcagcctcccgaagtcctagtactacaggcatgagccacggtgcctgggcaacatgtgttaattcaatcctcacaatcaccctatgagacaggtacttgtaatcctctgaagcaggcagtactattgtctccattttacagaggataaaacagaggctgagtaaatggctcaaggtcatacacttcacatcacaacccaggccttttggctcttacccagtcagctgctgcttcttggatgagggagactggggtcttacccaacccatctccatcctttctagaagtagatagagggaggcatcaatactagacaagatccctccctcctccttcatgcaggcttttctttggacctgcctttgcccacatattcattccccatttccctacctccatgggcctgggacatgcgtggctaggaggccactagacacagaatggctgcaagaactgctttctataaacaccctcggggagaacatttgaaccatatatacggatctagagtctagaagggaccgtctgtctttctctactgtctaggactcacaaatcccaccagaggtacttgaatcagaatactacagggcctagggtgggtgactctgggagcccagctgccacctcccacacatcacagatgagaaagagagattcagagcaaaccagcttggtctcacaccaatcccctccgtggtcctaaaatccaggtctttggacttttgtttcaacacaatttctgccaggctgcactaacttacttctttttgttaccatagtccttcatgacagaaaacatcctcctcctaggatcttctaaaccaagcctcttcaagaaggcccacagacagacagaaagccagccctcccacctgtgcgcagtagcaggcaagccttctcctccatctggcctagtccggacatatattacaaacaggcttctaaaagccactgcagtcatagatgtgagacagaaaaaggagaacactcaggaatcagctagccagcaggtaaaggactccacaattcagttggaggaaggagaaagaaaaacaaatacacaatcaatccttcagcccccagagcaccctttccatggctgaggagggcgagaacatccaaaaagcaggtcacgccattgagccaatcccaagatccacaacatcgacagaagcaaacaagtcgttctccaaagtcagatatgaaagcagaaagcacaagcatgtattgttcacctcctccaccatgggcccctctcattgacacaccaaggcatttgaaaaccttcacatctatccttcaaaacaacacccttcctttttacaaatgcaaaaactaaaactcaaggaactgcatctctacactcactgactacacaaccacgctggtaacaaacactccaggagggctccactttgaagagagtttgaaattgtgggcttaaaaagaaacaagttatctttgaaccgtctttcacagtaaaaactcaagggcagctatgacttcaatcaacatgaggatagtaagagaaatcaagtacaaatgtatactgactcactgatcggtaacagagaagaggggttcttagaaaaatggggagggagaagattaagaacaaaactgtacctgcagtatgcctgctcgttttcaagaaggaaacctgttcttttggcaccagccccacaagtaccacgtggcatcccctcaagggcagtgagccataggggccagggcacacagatctggaaaatcttggacatgcatcatttgggtgctagtgagcactagtcaagctggtgtcgactaaaaggggccatctcaggcctgcacgccagtctcctgggcgtgcaaattcctccggccatcaggaaacacaatggctgccaagctgataggccccgaggagaccagagggtgaggatttggaaagaggtggtgttggccccggcctaggccagccaagaaagccaagaaaggtgattcgccagtcacagagtaagcgagcgggtgagggctgacaagccctgtggagaaaagcaaagcagactttcagagcagtcacagactgccattgccaccaccacccgagtcctctggagcacccccagcattcatgttttcaaagaattttgccagcccaaagtgggtcaggcactgaaacccaaagggaaactcagcagaccccggctcccatgtagtcaacctgaagataacgctgactttccggggggatgagtggcttcagaaacctgccccacgatactcagaattgcagttaccctgagccatctgctttctgaaaagaacagggtttgaaggtggctgtgaaagccaccaagttatgtggggcactgctttgccttccccaacaagtgtgtcagcctcaactctgggacttgcgggtgatccagtggggtagagggagagcagtttctcgtgccatgagcttcttcaacagccatgacttcattctttggccacgacccatagtaagaaatccattctacatcataacccagcacacccacacgtgtaaacagacatataaataactgaaaaatggttgttcttcgagtgaaacaatacttacctttactgcatgtggtgatacactggcatttcttatgctatttcctttttctttttaatgcttgttgaaacccagtaaattgatttcacaactcaataaagggttaggatatgcaattttgaacaattccagctctgccacctatcagctgtgtgacctggggcaagttacttaacctctctgtgcctcagttacctcatctctaaggaggggataataatacctacatcagtgagttgttcagcagatcaaagaaatatttgaaaagtacctataaagcacttaacagtaaccccctccaaatttccattgagggaaactgaagctctgaaaggaaagcaacttgcccagtgttgccctgctggtaaaatgcatcacccagcctggtacagtagctaagagctggagcactagagcaggaccacacaggctcagatcccagctctgccactttcttagcacgtggcctcaggcccatgtccttaaccataatgccctaccaagttttctgtggcataaaagaggatcacgttcacattaattcctcactctacagaaaactaagatgcccctgacttgtcccgttcaactccagttattctggtttcccctgaggctgccaactcagatagcaggttggatccccatcccttcagttataggtgcactgaaagacagtgggccttcctgtgcatcagccccagtgacggatcctggagacaccatggtgagcaaacccaactaggaagcttacaattcagtatggaggaagacattaaaaaaatactcaaactcattatttcaacaaacatttattgagcacctgctaagtgccaggcactgtggcaggcctgcaggaatacagtggtgaatgaaagcagaccatgtccctacccctcacggagcttacagtctagcggggcagagagtcatccagcaaccccctaataaagatataactacaaactgcgatcagtgcctttagaaaaggaaagaatgccctagaataagggtccctggcccaatctacagggtcaggcagggcttacttaaggatgctgaaaagcaaaacgagcaagtggggaggtaggggagtgagaggctgcttgggaacactgtgggagaggtgatgaatgcagtccccgacaaggtgagtttgaggaattatttgggccatcagtcaagtggagatgccgagtttggatacatgaagctaagggaagagccaggagaaagagaagggccagagagttaagaggaaaaccagcagagtgtggtctcaaggcaagggaagacaaagtgttttaagtaggagtggtcaaccacttcaagaggaaaactaaaaaaccacctgcagaatctggcagatgccgggggctaacacttacgggggtgagcaagtgcagaaggcaagtacaggcaactctgcaggggtcagcagtgaaggggagggtgatgaggtgctggccagaagcaggagggagagaacgtggggtcagcggagacagaagggatgctggcacaggcaaaggtgaatagaggatcaagcaaggagggcagcagaaaacctgccaggagagaaaaggtgactgatgatgtcagattctagagcaagtagcagaaactgggacccagagcacaggagggagaagtggcctgagcaagaagggactcctcgtcatctgtaacacaggggagggaaatcagcgtgcagacttgggggccacaagttatagggagttccattcttatggcttctgttttgttttttgaagcaggagagaaagtctgaaggtaaagaacatttgaaagagtcacttcagaggagaaacgagtggatcaaaaaaatatagtagaactgctaggcagggtggccgatgacccctcgactggtggcgatgttcatctgctctgccatgggacattctctaacaaagcttagcacgtgctgggctgatgagtgctatgaaaaagccaggggcccgaggacactggggtggacaggctcccctggggaagtcctcttagaactgagggatcaacactggaggagactgcaaggggtacgggataaatgttcctggtgaaggaaacagcaggggcaaaggccctgcagcagaaaggagcgaggccctttggagtaacagaaagaccatggtgacaggagctcagaaagaccactggtgttaagactatgagccagtggaggccagattggggaatgggatgggagggtgcttgaagaccatggtgaggctctcttggtctttacttttaagaagaataggacacttccaaagggtagtgtcaagtgccaaggaagatcaggagggcttttccccacaccagccctaggactttggactctgggagcctcagtttgctcatccaggaaagagaaatttaaaaccctctacttcacagggaatgttgtcggaattaaaccagaccttgcatgaaaatatagtactcagtgaagtgcctggcgaagagcaggggctcagccaggtctcatacaacaaatcctctgtactccatcccacaagccctgtgacatcttaggaccactctgcatctctttccctgctggaacctagcactgtgcccagcacacagtaggcagtcaataaatgcttgtcgatgaatcatctctaagctttagagttaccaaatgcctggtccagcaacccagggaaagcagccatttgggtttctgaactctatcctgatggctaccacggacttctcccatgccctcacctgatgtggctgtgctcagtgcacagagggcctacagccaacatttcctcaacaggaagccctctgatagggctcccacaggtaagggatataccctgagatcctccgccatttcccaagagggctaggtcacaaagggtggctagtcttcaacagtgctgcaagtcactggcagcacacaggttctaaaacaataatatgttgaaatgtactcaccaagaaagccaccgacctacaaagaaacccttatcgctgatcttgcaatgagcaccaacctcccctttgcaagagctgagatcgaaagataaagaagctatcaaaaagccatctgcccacttaaaataatatcacaagtcatgttaggaaccacagacctggggccagataccaaaacaattgtctgaacaggctgcttcaatttctccttaaaaccgcccatgtatgttaaaagaaaaacaccctctccacccaccttggccctgcaaggttttgatttctctgttctctgcctttcacactctttaaaatgaccaaactcctttacccaaactgtcgcatcttacagacagggttcccatgacagccggcggggatgacagcttgggaaagtgatagaaatgaaggtagctctggggtactggacctgctcagtatcttcatctgggtggtggctacacaagtgcatacatatgtacaaatccactgggctatacacagaatatcagtacactttatgtaggtatacctcgataaagcaaaaaaaaaaaaaaaggtaaaaggaaagcacgacatgctgggaacaccaagagtgaaatccagaatttgccctgaatcatgccacgctttctagaggaccagtttaaaaaaaaaaaaatagaaaaaaataaatgtccctagcatttcttccctggccctgtcactcactagctgagaggctttgagcaagctggctcatctctctgagctacctgtctcccctctactaaatggggataatcatagcacctacacaacacagcatgcacagcaggcctcacggagagaatggatctgatgttcatagcacagaaatcagtaaatgctggccagttatcttttgcagttaccaccatgcttcagttaccttgcccatgtttgctgcattcaatccaaccatgcaaagtgactgtcatttcccttagcagagaaggaaacggaggcaaggccacacagctgatgggcggagccgaatttaggagaggaatccaggaaactgtaggtgtggctccctaaatactgacactagctaacacctgtatgatactactttgagccagactcggttctgagcacctttactcttatcccgtaaagtagatgctataattctgttttacaggtgagggtcctgaggcatggtgtagttaaatgcgttggccaaggtcacaaggccagtaagtggcagcgccaggatttgaacccaggcaatctatgccagaatccacactcttaatgctgtaagaaaaaccatgctgcctgccccctttaaatgaagtctcagattatggtggggctcacaggtgggtgagtgggtacctgcctgcctgctcagttacccaggcacatctgcccaccagaccggagctagacctttctgaaccactcacagcctaaggccttaccagaaccagcagaacccacaaatgtcttactgcagccaggggcttctgaccaagcgtatacatacaaggtccaaaaagcattttcccatttccattcccagtcctcccaggaacagggaaatgtatacattttagggagaatctagtgatcctgggccagacttaggtgaccgcaaaaagaatcaggactagctgctgcccttaaagaactcatagcttgatagaggaaacctagggaaatcttctggggccccctggggtataactgattatttctccctgtccctaaatgatcacaggtggtgtggcaaaaaaacaagggacaaaaacttcaagtccagtacccatctggttctgtctctctgctagagccactgctttcttgtgagagcatgggctcagcccctcgcctccacaggactcaaaagtagattacagcgttaacagtagagtgcacaggcttcaaggtcaggcatgggtgaactggaagagccaggtgccatcactgcctcaaccagtttctccacctctggaatcctggtttcctgctctgtcagaaagagaatctgctctaccccccactggcaaagcccttggtccacactatgtcattgcagttctctccactccagcacactgctgatcattcacaccaagctcatttccaccccaggactttgcacttgctgtttcctctacctagaacacccttgttccatatatgcacataactgttattcatcatccaggacttagtttaaatgaaacctcctcagaaaagtcctccctgttccttttcctacaaactctcccccacctccccaccgtatctgcataactcttctttatcatcattcgggactcacctcctcaaaggccctccctttaacagcatgtctgacacagtcattccctcccaatctatccccttactcccttcagcagctaactttgtccctatttatcctatctgcttgcttgcttgttttttcaaactgtctcccataggagcctgtatgaatccttgagggtagggtagatgtctgtcttgttcagggctttacagtggaactcaataaatggaggaataaaaccccagttaaaacagtgcctagcacgtgtttgacctccatcactctttgactgactgactcaatgcaccctcctccctgtcctggagagcaggcctgaggggttcctgggccggaatgcttgtcctccatcccagacacagccctgcgttggcggaggtggcgctggctgacattacctgcgcctcaccggcttcatgcagctcttcagctgcctggcctcagcctccacgggaccctggcactcgggctgtggctccagctgcggcagctgctgctgctggggcagcccttcggcatcagtgggtgtgggagcgggtgcgatccggagcaggactgtgtagttgcggccgtggttgttggcccagaaagtgccctcaggggtctcatagcgcaccacgaagtcgaggcgcgccccatcgcccgcgccctcagcaaagggcagctggaaggcaaagcggtcggtgcggccgccgtcgtcgggcgaggaggcggatgcctggccgggacccaggccgagccccggatccaggatgggatctcctgctcctgttcctcccgctcctgcccacggcgggctgcgcgggacgtagcgcgctgggtggtcgcaaaaggaagcccagccgtcgtgtgaggcccgcacgtgcaccgccttctcgaaggagcggttcagcacgcgtaccaacccgcgcagcaccggcgggcggcccccaggcacccacaccccggcacccccggggaccgctccgggaggcggcagcagcgcctccagctccaccatgacgcgccccaagcgctccagacggcccggcgcgggcggcagcgaaaatgtggggaccaggtaaaaccccccgccagcggggacggggcacagcggtgagggctcggggcaagcctcctcttcctcctccccttcatccccatcctcgccatcgtcgtcctcgtcggccccgccgccgccgccgccatcttgcccggccgccgccgccatcttgcccgccccgggcccgccccacggccggtagcggcgcaactgcgccagcggcagccccaaggcctcgtcggcgaacagcaccctccgcggggccaccgccgcctcgaccgaggtgcggggctcacccgcggccggcgaggggggcgcggaatgccgcagcgggggctccacaggggccgtacgcgccatatcggcggcggcggcggcaccgacggcaccggcggcgggaccggcgggggcagggcctgaaggggcgggcagccaatgggaaggccagcgcggaggggtacggctcacgggggcataggcggtgagatgaagacaagtattgcagagggccaatgggcagccatgcacggatgacgtacagcgaattgagagccggagaagcacgcagccaatggggatgcccgggagtgggcggtgtagggggcgggatgatcgaggaatcaatggagaggccggaatgggggtggtgcgaaatccatgatgaagaaaacagaagcagacagctaatgcggaagtctgagcgagagaggcatgtgggcggtgggaaaagtggaatggctacaggcgatgagggcagccgggaacgaacgcagaggcccaaaaagtgggagatcccgcgggttgcgtaggcggtggaacggtagctagagagagagaacagccaatggagagccacgcgtgggatgacgacaatggctgcagcgagccaatggggaggcttgtgagcgtgcactgcggcttcgaaggggtggtgccaaggtggagctagccaatacgaaggctaaaaggagaccaagaggcgggtgtgtagggagccgagccaatggaggtggaggctgaaggcgggagcgaggacgagagctggcggatagccaatgagggagccagggtgaaggcgtagagacctcaaaggacagtactagtatgggatgagccaatgccgaggctagatagtgcagcgggacggagggaggacttggaggcaagatggggaaaaaagcagagccgacgggggcagtgtaggtggtgtgaagggaggcatgagtagccaataaggaggctggagaggaggacgctgtgtagacagagtctgaggtattgggtggccggacagcagaaccatagaacgcaggcagccattaggaaaaatgtgcttctcagggatggggttaccctctccctaaccctccgtgactccccattgccccaggaatacccagagcccctgaaggcctagaccacaccttggtgtgtgaactaggaaagtgaaaatgactgtcctgttgcagttagttacttactgggtcctccctgcccaactacaaccttttcttgagcagtgccacaagccaagaatgcccctgattgttagccgcaagcactctccaggacttgatactattgttgaatgaatggccgaataggaaatttaactttctgaaggattcacttttttaaatttcagctcagcaaacactgacctgactgtgtgctaccagaagttgattgggcatatgggtagcttctgactaatggaatcacaatcaaagccctgtccttcttgcccaacctgacactccacaccccacaggggcctcacctcccttctttctgtccccccatctctgcttctactgttccctctcccaagagtgctgttccttctgctgcttccatctagtaaactcctttcgctctccctttggggtctcaccttctgtgggaactcaactgcagcttttgtccgctgaacacatccattcatacattccttctccatcctgggaagatttactgaacacctactgagtgccaggttctgagcatgctgttatctcattagaacctcacagcatcctaggagggaggtgatccttccagcagcccctctccccaggtctccatgttcaggatgtccatgagttagaaatgaatatgttcagctgcaagtaacagaaaaatcataaaataatgggggcttaagcaagacagaactttatttttttctcacctaaaagttcaagctggcaaatagtccagggactccttcctgcccacctggtttgggcattgtctgtcccgatctggctccaagactctcagtcttcaacaaatccttttggctgtctattaaaaatatttaccaaatccatcctcttctcaccacctccactgccagcactatcaccagtcacctagactactgcagtagccagctccttgctggtcccctgcttccacattcaggccctagaccccattgtacactcagcattcaggggcttcctgttaaatcctaacacggtttgtgtttctcctctgcttgcaaccctgtcatgccttcctcctcactcagcgttgaagccaaagtccttaccatggcctacaaggtcctgcgtggtctaacctccgagtcccctttctgacctcacctccagcttctcttcttgctctctccacactaaccacaccagcccccttgtagaccttgaacaaatcaggtacattcccacctcaggacctttgccctggctgtttcctttggagttcctcagatatctagctggctccctccctcatctccttcaagtctttgtcagaggcccctgtctctggggacttttcctgacccgtttaatcttgcctactcacccccaactcccagccctcccagtctccttcccgagaagccctccatgagagaggatatagtccagtatagaggggaggtagcgacctctacccctctctgccctcctgaccccagcccccattctgcaaggatcttggctttcagcagccgtagcatttccctctcacaccctgggcctgcccaaggggccagctcacattctcggccaccatcctcacttcgtttgcctcctatatctctggccactctctttcatggagtgagtgacagtaagggacagatggtctggggaaggtataaggagaatgcagcccacacctctgatcctgagagagaaaactagcccccttttccaggagggggacaggtgctggggcagggaacaatgcctctgctgatagaactggcctggtttataattacgcaggaggtgtagggaacattccgacccaagtctgcagggagcaaggggttattaactatgggaacatcagtgcaagggatcattaaccttaggaccatcactgcaaggggtcattaaccttggggccatcactagaatcagctccccaggactccttcctgacatgcatgctcctcaccccctcccttgctccctcccacatgccgtgacatctgttaaacacctgctgttcacagggtccctgcaggcctccaagcaggggacctcatcccaccttggtgcctcccctggctgtccaacacacccaagccatttttgggtctcagatgtgtcccaccaactcagaagcctcaaccagcgaaagttttgttttgaactaatggtggggagggttgggtgttttttttttttttttaattgttgttggctgatttttttaaggtctttttttttctattctttttttttttttttcttgtcttcacaaagccaggccatcaggcccattctgggcttttccagaagggtgagtctgagttgaggaaagaggccctcctttttacgagggcttagaaggttgggggaggaaagggggcaaaggggtgaaggggtggatcttggccaccagatttgtaccatgtaaataaaaagccctttccaatttctcttccccaggtctgaagccagtcttgtagagggctggagtggttgttggacgactagaaccctgggctttgcagggtgctgggagctggaagtcttcaccatggcctgtcaggagaagcccctgggggctggtctaccatgctgaccagtggttgaatagagtgcctgctgaggtcaagagatgcagccgccaattcctggacaacctaaaagcctcacaagcttcaagtctccaaggactctccaaatcccaggatctccctgccatcacatcctagaatttaaaacctgagaacatcaagttcaggaaagcttggggatttcaaagcccagcaccaaagaaagcgggacccacactcgccagctctgtgatcttgggcaagttgcttgactacttatacctccgtttccctcatctgtataacaggaatacaataatgatgagatggagctcaaggggccatggtgaggattgaacatgatcacttgtgagacatgttcagcactgtatctgacccatggaaaattcaagataaacatcagctactgagatgatggcggatatttggaatcctaaatccttggaaactggggctttttgaagtaaaagaccccaaaggctgagggcctcagaagcatcaggccatgatgttcctgaaacaagagggtcagggtcccaatgggcctctggggttcatcgtgaggatggatgcattaatattggggacctgctagggaccttcccagtgggacagtggctgggtcagggcactcaagccctaaaacgtgatgaggcgagacttttctctctttcctcattcagtaactgtcagtagattctgggagccagggattctccgactcttcaagtccatgaattttaggggatgacagtgggctctccgctttctcctccatgaagtaacttacatgcccctcaccctctgtgggaggggtgttgcagggggtgcagaactcccctcgccgggtagttcaagcaatggggaccatatcaattccatctatagggaaactgaggcctggagtagggcgaggcctctgggaacccagccctattctgtctctttccctggcatttcccatccacacatagagcttcagattctctttctttccccagagaccctcaaatatcctctcactcacagaatggtgtctctgcctgcctcgggttggccctgtgatttattttagttcttttcccttgttttttttttttcaaactctatacacttttgttttaaaaactgtggtttctcatgagccctattatctcattgatacctctcacctctgtggtgaggggaagaaatcatattttcagatgactcgtaaagggcaaagaaaaaaacccaaaatttcaaaatttccgtttaagtctcataatcaagaaaaggagaaacacagagagagagaaaaaaaaaactatgagaacccccccccaccccgtgattatcagcgcacacactcatcgaaaaaaatttggattattagaagagagaggtctgcggcttccacaccgtacagcgtggtttttcttctcggtataaaagcaaagttgtttttgatacgtgacagtttcccacaagccaggctgatccttttctgtcagtccacttcaccaaggtgagtgtccctgctctcccctaccagatgtgggccccattggaggagatggcagggaggtaggcacggcgggggggtcaggggccctctggtacagtgggatgtacccagctaccgtgattccagccaggtaaggtctttaaaaaaataataatagaataaatggcagaagacttaaaggtgaagtacttaatgcatgggcaggggcaaaaataaatgaattcatcaattgatacgtagatggataggatttttaaaatatgtcagctgccagtctttatggatttcagagctttgaacaacttgaaatgctgtccaggtgcaactgaaaatttcaactgcatctctctcatctctttgtctcttagctcttgatgcctctcatccttctctgtctctctgctcaccctgtcttgctcttttacatgtttctctgcctctctttctcccgccatctgtctgtcgctacactcagactctctttccccgcatctctcctggcctctgaccatctcccctatctctgtctcctccatcttgaccacactccatcgatctcctttcctccatctctcccgctctcttttcttgccttcccccacctgccttcccagccagcatccagcctagagctttgtacacagctggcgtttaataatagtaatgtcgccgaggacctttacattttatgagagtgagcatcagttctgttcaccctagtagcaggaggattgcaaggtgccggggcaagctgagcacttaactgaactttgcttgtatcgctttagaggagacccttggggcgggggggcagggagcacttcacaccattgtcaaccgtagtttagctgtgtggacctaccccaggactgcatgtgtgtgaccagagtccatattcaggaagcaaacaggttgttcagggctggggtgagctcgattctgcaggcttagcacagcgtttggcacaaagtaagtgctcacgaagtgttagctattagtatttctgtaaccaaattagaatcatgctatatattggttttgttcctgctttattcaattaacagtagtgtttttgaagcttactaaaaattgtttgaacacatgatctttcatgatggacaagactgtcctcacatcagcatgaactttgattgatttgaccaagtgccgattgttggacattccggttgtttctcgtttttttctataaacatccctgactgcttccttggattcctgaaaagggagttgctggggcaaagggggcgtgcatttttaaagtttatgaccctctctgctaattctccttccaaaaggttgtcctattttatgctccctctacttaagctaaccctaggtgagtattattatgttttaattatttcccaacatgacaggtaagaaaaacacattatcacattgttgaaatttgcatcttgtgattacttttactattcattggccattcatgcttttttttttttttttttttggttgtctggtcatgtccttactcctaatagggtgttcatcttatttttcccttattgatttgccacagctctttatttggaatggttattaacctttcatcagccattacatatatagcaaatattttccccaattcatcatttgctttttttctatttgtttatggtgttttttgtgatgcttatgatggttttatacagtcaaataggttagtctttttttctgtggcttctgtctctggttttgtgcttagaaagtcctttcctacttgaaaatgagataaatgttcacctatgttggcttctagtctcttttatggcttcattttttccatttactatagaggttaagagtgtgggtactggagccagactgtctgggacaaacccagcgtcaccccaagccctatgtgtgatttttagccaggcacttaacctctccatacctccatttcctcatatgtactgcaatggttataatagtaccttcctcaggagtctttgtttagattaaaatttttaaccacagtaaatacttagcacaaggcctgacacacaataaacccaagatcagcattaggtgttaaaacttatatcttgaatggatctgggcattttagggtatatgatgatggtgacatttcaaactgggcagggaggggttgttgggataatggactgactattcactcaataactttatcttctccctaattatctcagacacatttgttaaaccatactccatggtcctccagtttgaaatgccacattcatcacaaattcagttctctccatatgtgggtccatgtccaagctttctattctgttctcttccccagtatctgttcttataccagggccacactgttttgctgattgttgctttgcaatacaattcaatacccagccatgggtgtccctggcaccttgcccttctttattcttgattatttcaggcagcatcagttgaaccagccagagaccagcaaatgttcttatttgaggcaatcctcctctcgcacacatgcactctggctctccatgcatgtgtccatttctctcaatgtctctcactatctcttgttctctcttgctcgctctttgtgtgtgtctctttgtctctatgtatccctatctctcagccagtcccctggatagaggggcaattgtcaacttgaagccctgcagacacctaatgacttaaccagacagcgtagaagggccctggcccttgtctactccacgcctctccgtgctcagtgtagaagggcaaattgaagaccagagatctcagggcctcaccgaaatgcagcggcagagttgaaatccaagcctagatctcaggactctaggtgggaccctggttctggctctctccccaactgaaggcctcagtttacccctcagcacccagaagggggaaggggaacctgggctaccattcccccttctgccttctcacacgttggaccccaacttcccacaggttggacgatccacgatcacagtgtggggcccagcctcacaagagctgggctaggtgaggccccggactccataggtcaggaggcctagttggccagagcgtggtgatgatggaggcatgtcagtcagtcaggctgtgtgtccccagagctggtgctggtccccgaaaaccttgattgtggggcccctctagagagtctgatgatgggctctgtattggcgaaggctgaggcttttccagctccccccatgaggcccagaccaaaggcacaccagcctcaacctcctcctccccctgttgccatctctggcggagtggccatgtatttgggaacgttgttccagagtggacagggagactgaggccctagggaggctggctctgtttccaggcctggtaggcaagaggccctatgaagcagcaagctgcctgactttcagatggttccaaggagtttggacaccagggacactggcctacacatactgagactttgggaccgtagaccccacagtctgtggttttgagattctaggatcctttaaatctaagaaatgctgttctatgattctgaggtcctggtgttatactatttgaagaccccaggggtcccagtatctgtggagcctgcctggcactctcagagcttcaaacctgggtcctctccacaacccaagaagggccaggtcttcagagctaggggcttgtcatagtggccagatggacatcacctaccacatccaccagcacccatgtcaccccacctgggccaagcctgctgcaggacagggcagccagttctcggaacgaaacctgtggggtggggtatctgccctcttctcttcctccgtggtgtcgatgaagcccggcgcatccggccgccatgacgtcaatggcggaaaaatctgggcaagtcgggggctgtgacaacagggcccagatgcagaccccgatatgaaaacataatctgtgtcccagaaacatcccccattcagcttctgagaaacccagtcagaaagggacgtcccaacagacagtgcaggaagccggctgcccagcccggccctctaggtcctctacccccagacagatcatctccatgtccctgtctgagaatgtatctatgctttgctgagtcaggccatcccacatgtgtttggggagaattcttagctctggccaagtgtccaggcagcttcagaagtgaccacaggccagccacatgggccaggccagagtggtggaaaacatccatttgcaccgaaatcggtattagtttgttctggctgctataacaaagtaccacaactgagtggcttcagcaacagaaattgatcatctcacagttctggaggccagagtccaagatcaaggtgttgccagggttggttccttctgggggccataagggagaagctgctccaggcctctcccccagcttctggtggttgctggcaatctttgttatttcttggcttgaaggagcatcaccccatctctggcttcattcattcactcaccttctcatctcaccagtgctctcccaggcccttgttcggagcctccacagacccacactcctgtttctcacgcagtaatgttctaagcccccaggagactaagaacttaatacctggattctcacactcatctccctcagcaccacagctctgacaaccacccccaggaggtgacagcaaagaaaggaaggagcaactgctcccccagaacccttctatactcccccgggctgctctcagcagctgtgtgcccaactcagtgctgtgaggtggaacggggagatggagacacacacacacacacaccagagagtttataaaatgtgcacacggaaacacttcctaaagaaagaagtggagttctcaagtcactatgggactacggaactcggcatctgagcatccccttctgtataatggggttggctgggcagtcccttccagctctggcttcctctcagaccaggattataggatcctgaaaagccagtgcttccctcagggagtggaaggttctggggctcagcagggggcccggagccattgtggagggctttcaaggtgaggacaatagaagagcaggtcttgcgtggcttggacagggaaagaggagaaggagtgggcatttgaggcagggggtgtagcatgagccaggcttgagggccagaaattggggtgaactctgatgggggctgggtagagaagcttctacaggccccagctcaagagaccccatctctcctcctctctgtcacttgccatgctggatccgtgcatgatcacactcctggactcgcctccttgccctgagatccagacccccgtattcagctgccccctcagctcctccactcacatatttaatgccagactcttcatgtctatctacacctgcacttttgcacccaatccaactccccgccatgtcccccatctcaggtaatgtcagctcggtccttccagctgctcaagctaaaacccatgtcactttgactctccctcttgcccactacatccaagctgctagcactgctcctgatccagcttcagattaagtctcagaatctacccacttctcgccttctccactgccaccagcccattctgtgccagcatcatcacttgccaggactgttacaatagcctcctcactagccccactcacagcagccagatgaatcttttgagtccatgcctagtcactggggcaaaataggactccgaggagaaagtccgagaccagctccggcaagatgagcaaacacagcctgtgcagggtgcagggagggctagaggcctgaggcttgaaacagctctcaagtggagggggaaacaaccattgccctcatagaggacacatccacaccagggctgtgctagcgtgggcaggcaagccaggtgctggacctctgcacgtggggcatgtgtgggtatgtacatgtacctgtgttcttggtgtgtgtgtgtgtgtgtgtgtgtgtgtgtgtctagagctggggtgcaactatggggcccctcgggacatgtcccagccaatgcctgctttgaccagaggagtgtccacgtggctcaggtggtcgagtatctcataccgccctagcacacgtgtgactcctttcccctattgtctacgcagcctgcccttggacaaggacccgatgcccaaccccaggcctggcaagccctcggccccttccttggcccttggcccatccccaggagcctcgcccagctggagggctgcacccaaagcctcagacctgctgggggcccggggcccagggggaaccttccagggccgagatcttcgaggcggggcccatgcctcctcttcttccttgaaccccatgccaccatcgcagctgcaggtgaggccctgggcccaggatggggcaggcagggtggggtacctggacctacaggtgccgacctttactgtggcactgggcgggaggggggctggctggggcacaggaagtggtttctgggtcccaggcaagtctgtgacttatgcagatgttgcagggccaagaaaatccccacctgccaggcctcagagattggaggctctccccgacctcccaatccctgtctcaggagaggaggaggccgtattgtagtcccatgagcatagctatgtgtccccatccccatgtgacaagagaagaggactggggccaagtaggtgaggtgacagggctgaggccagctctgcaacttattagctgtttgatctttaaaaagttactcgatctccatgagcctcagtttccatacgtgtaaaagggggatgatcatagcatctaccatgtgggcttgcagtgcagagtatttgaattagacacagaacagtgaggatcaggatggcctctcacccacctgcctttctgcccagctgcccacactgcccctagtcatggtggcaccctccggggcacggctgggccccttgccccacttacaggcactcctccaggacaggccacatttcatgcaccaggtatggacggtgaatgggcagggaggagggagcaggtgggagaactgtggggaggggccccgagtcaggctgaaccacagcccacatgtgccccccagctctcaacggtggatgcccacgcccggacccctgtgctgcaggtgcaccccctggagagcccagccatgatcagcctcacaccacccaccaccgccactggggtcttctccctcaaggcccggcctggcctcccacctggtaacacctcagcccgtaccccatggcttcacagaacccccaagtccccagatccttggctgtgagcagtgtaggctattctgaattgcagtactctgggggtcaaaggtgtcaggtctcagaggcttggaaactccaccctccaaaaaacgtcaggtgcagaaccttaaagatgcagaatgtcaaaatcacaaaaccacagagctttacaaagctagtcaaaatgtcagcacctgcgaatggccgtctttaagcttctctgccagaagcctgggactttggggacagcagagccccctgggagtcagggttttcgaggctcaggagggtgggaagctcaaaatgagaggccttgtgggccaagctccagagcccagcccacagcctccataggtgccctgtccccacccacagggatcaacgtggccagcctggaatgggtgtccagggagccggcactgctctgcaccttcccaaatcccagtgcacccaggaaggacaggtcagtggacagggctgggaaggatcctcgccctcctatcccctcccctgacaccctctgtccccccagcaccctttcggctgtgccccagagctcctacccactgctggcaaatggtgtctgcaagtggcccggatgtgagaaggtcttcgaagagccagaggacttcctcaagtgagtggcccaggcctgtgccagtctaccggccctggcttgtggggagaggtctagggtgcagatctcagctcaggcttcatcccaataagtagtaagatgcaagagctaaactctgagactgtgggttcaaatcccagctccatccctgactggctgtgtgaccttggacaaattacttagcttctctcgacctcagttttctcgtatgtataataagaaacgtttgtgctgttatttacccccattttacagacaaggagactgaggccaaagaggttaagtgtcttgatcaaaatctcccagttcctgagtgacagagctgggatttgaacccatgtagccaggctctagaatctgcactcctgctttgccctgctactcctcatgccaacatgccagccttattccactgttcccaaagttctagctcctctagatggctgctgctgcctcccctcagtccccccatatgtctctctctctctctctctctctctctctctctctctctctctctctctctttctctctctctcacacacacacacacacaaatacacaccacactacacacaacccttagcagcaaccccacatgtcctgtcctccttgcagccaggcctttgcacaggccgtccctccacccagaatgctttgcccactctcacctccctggcccattctcaactcaccacacttccaacattatctccagcactctggccaggctcaagtggtgagttcaggcctgacatgcagtaggtgctgaggggcatgtgttaagggaacgaggggtgtgagagggagactgaggtagagaggggaggggagctggggctcagaggagagaactcccagagggtctgggccctccccattcagagcattgagccagaccaggcctgtcgtggtcacctgcatggaatcttctccctacttaggcactgccaggcggaccatcttctggatgagaagggcagggcacaatgtctcctccagagagagatggtacagtctctggagcagcaggtaatgccagggcggtggagggtaagggatagggatagtgcgcaaaaccttctgtccaccatgtgccagaaaccaagttcacctgggacgagggctggtataaaggaaggaagaggagcgggcactcccagggaagaccgtagcctgggcaaagatgtggcagagaagggccaggctgaggcctcatgtttgtgccatttcacagctggtgctggagaaggagaagctgagtgccatgcaggcccacctggctgggaaaatggcactgaccaaggcttcatctgtggtgagcgaccccaggactggtggtggcagactcagactgctggggggcagggaggaggtctgcacggtgcagggaacctaacctcacattcaggtcctgagagctaggggcccctgtccccagctccaaacatgcccagacctggaaatctgtccccttctacttacaaaccctctgaccccggctgggcgtggtggctcacgcctgtaatcccagcactttgggaggccgaggcgggtggatcacgaggtcaggagttcaagaccagcctcgccaagatggtgaaaccctgtgtctactaaaagtacaaaaaattagccaggcgtggtggcaggtgtctgtagtcccaactacttgggaggctgaggcagagaattgcttgaacctgggaggcggagtttgcagtgagctgagatcataccactgcactccagcctaggcgacagatcaagactccgtctcaagaaaaaaaaaaaaaaaaaaccctctgactctaagatccccaaacactgtgatcctgagttgttaaagcaaatgcaaatagccagacttgccagatgcaggctgtgtgccagcaggaccagctatgtaacctgcagggccccttgttcagatttcaagatggcgaccacagagcattaaacaaagcacagggtgccacataaccacataggtcacacgcccatgaagccagccctggaggccaggcactgtttctgagcgctttgctggtggtaatttatttctcatgatgcgaatgtacagatgaggaatattgaggccaggggggtttaggtgactttcccaaggtcacagttgggtggtaaagagccctattcaaccccagttcatggtcccagcatcagtggccacatacgacatccgcacctgtgctctaataaatacggctcatgctgttttgtgggattccacctcagactggaatttagaagagggcgtccttgctttgaaaaacactgatttaaaaataaagtggagccaggcgcagtggctcatgcctgtaatcccagcactttgggaggctgaagcgggtggatcacatgaggtcaggagttcgagaccagcctggctaacatggtgaaaccccatctctaccaaaaatacaaaaattagctgggcgtagtgacgggcacctgtagtcccagctactcgggaggctgaggcagaagacttgcttgaatctgggaggtgggggttgcagtgagccgagattgcaccactgcactccagcctgggcgacagagcaagactcagtatcaaaaaaaataaaaaacataaaatagaaagtaaaaagtgggaagtttaagcctctgggtcaccagcctctccccctcacccaggcatcatccgacaagggctcctgctgcatcgtagctgctggcagccaaggccctgtcgtcccagcctggtctggcccccgggaggcccctgacagcctgtttgctgtccggaggcacctgtggggtagccatggaaacagcacattcccaggtaagaatggtccttgcactacacggtgcccccaagctcctaatcctgacaggctctgggtggagggtgcaaaggagctccatgctgccccttcccaccaccaccaccactgcagctgccgccactcagcctttgggaaaatgcatccgctcacaaaagcttcctttcgggatgtccgtggcctgaaagccccccatatggtctcgagtgtcgggcccctagccctgactcccttggggattggggccatgcctcacccactctggactccagctactatattcggccatcagaagggagggaccctgctaagtaattccaggagcacctcctttcctcccctgaccaaggaaaatcggggtggattcgcccgagctcacctatccactgctctccaccaggcctggcctgtgggcttagcagggatcagagaccttgactgtcatcctggctctgccatttaacctcttgcatcctttggtgtgcaagttactccgcttcttttcaacctcggggagaactattttggcagaagtggtgcaaagaataaatgatacaacttatgtcaggtgctcagcaaacagtacctgtgcccgtggacacgggtgttgacggtgagatctcaggcctgtagactcaccttgtagggggaggggacagggagctagctaggaggtcctgcatggggcttgattcatccccaccctctgacagagttcctccacaacatggactacttcaagttccacaacatgcgaccccctttcacctacgccacgctcatccgctgggtaagcagggcagctcggccccaaggaggaggaagacaaagatggggtgggggacctgcctcccaaactcctgtctccctctgagtgccctcagagtgggttcctccattcccaagccccagccccaaggatccccaagccgtgcctcaaatgtgacccctcatgctggcttcaccccaaacctgtccgcaaatccaaacctaaaccaccatccaggccagagcatgccaaattctgaccctaaacctacccctttccagatgtccacctcagccccatacctaaccctctcctggacccataaaatagcctaaagctaaccccatctctgcaccttgccctaaacgtaccccagctcttactctaactccttccccagcctttatgccaacccaaccccatctccttccctggccccaacgtaccccagtatgtcaatacacccccaactgggcaccattcccaacctttccttgtaacacccatttgatccttaacttcatcaccccatcccaactccttcatctcagcctccccaatgccttctcagaaccttcatcctagcgccacacctaaccccaaacctgaacctcacccctacatgataccagatattccccgactgtctctgaactgaaaccctgacctagccccatcctgactgatagcctcactgcaatcatcatcgctgactctgtaatcccattcctgaatccaaactgatcaaattccctgaccctcagcctcactccacaccgaaccccacaactaacctcatccttgccctgagcctaaccacctaaccatgtccctgacacgtaagatactcgataattcaaaccatctctggcttctgacctaaagccaagtcatcccatccctcacccctagaccccccacctgagtccaccccagcctgactcttaacccaccccttccctgacccttaagttggcctggccctttaccccttccaaatccttgaccccacttctgacccttcaccttccccaaccctgaaatgtcacctccacagagaaccccaactccaactccatcccagacctttcacctcacttcagccctagccctgaacaagaccccactcccaacctcagtcctgatcccttacctaatcccagaacaaccatacccacacccatctaaccctgcccaacccgacacttcaccccttttctaaccccatctttgaccccatgcttcaccccacatctagtcctgtccctgattacctgcccctacaattccgcccccatgtcagatggctcggggtaggtcatagcccctctaaaccccaagtttggggaatgtgccccttaccccaccccccaacttccaggccatcctggaggctccagagaagcagcggacactcaatgagatctaccactggttcacacgcatgtttgccttcttcagaaaccatcctgccacctggaaggtgagctcctctgaggtggcggtgactgggatggcctcaagtgccatcgcagctcaaagtgggcaggcctgggtctgggctcataggcacattggggaggaacgggatgtgggttgttggtggtggctgctggcctcagaggttgacgcccacctgctccctgtccccggccttccacagaacgccatccgccacaacctgagtctgcacaagtgctttgtgcgggtggagagcgagaagggggctgtgtggaccgtggatgagctggagttccgcaagaaacggagccagaggcccagcaggtgttccaaccctacacctggcccctgacctcaagatcaaggaaaggaggatggacgaacaggggccaaactggtgggaggcagaggtggtgggggcagggatgataggccctggatgtgcccacagggaccaagaagtgaggtttccactgtcttgcctgccagggcccctgttcccccgctggcagccaccccctcccccatcatatcctttgccccaaggctgctcagaggggccccggtcctggccccagcccccacctccgccccagacacaccccccagtcgagccctgcagccaaacagagccttcacaaccagccacacagagcctgcctcagctgctcgcacagattacttcagggctggaaaagtcacacagacacacaaaatgtcacaatcctgtccctcactcaacacaaaccccaaaacacagagagcctgcctcagtacactcaaacaacctcaaagctgcatcatcacacaatcacacacaagcacagccctgacaacccacacaccccaaggcacgcacccacagccagcctcagggcccacaggggcactgtcaacacaggggtgtgcccagaggcctacacagaagcagcgtcagtaccctcaggatctgaggtcccaacacgtgctcgctcacacacacggcctgttagaattcacctgtgtatctcacgcatatgcacacgcacagccccccagtgggtctcttgagtcccgtgcagacacacacagccacacacactgccttgccaaaaataccccgtgtctcccctgccactcacctcactcccattccctgagccctgatccatgcctcagcttagactgcagaggaactactcatttatttgggatccaaggcccccaacccacagtaccgtccccaataaactgcagccgagctccccacatgctggactatcaccccatataagggttgcggtcagtgggcaggggtctgggtccaaggccgcagcaggaggaactggacagcggaggaagtagctagggcatgtgcttggccactgcctccagcaccccaaatccctgcctgaggctggggagagacctctgccggcggctcctcaggcctcccggacccggcctaggaggccagcgttctcctggcggagggctcggtagtcctcccggatcttctccaggttgctgagggtcttcttgcccagctctgtctcgatctgaggcaatgtgaacacatgccccctcagcacacacagcccctttcccagctcctgctcaccagcccccatcacagccactctgggcccctcccaccaactccaacagcctgctctgtcccatggccaggcctcgtgtggtgttccctctacccaaagcatccttcgccatgtggcaggattccccctacatctttaagctgaagcctctgcccatggccctgggaggcagacaggagggcccttggggtggaagctggggctcacagtaggccacttgcctgtcccaggtcacaggcactaaggggcagggctgggtgtccagccatcggctgtgtgtggctccacagcctctgtcagcataacctgaggaactgtccccccggcccgccttggctccccatcctgcccccaggcctcacctgctcctcgaggtctcgaacctcccgcatgatggtgcctgtgtcctcgatggtctggatgagctggctgcagttctggggacaacaggagcagaaggcttgcacccagtcccacccacccccagcagccccaccccaggcacatgtctcccctcacctcgtgcagagcagctagatacttataggccttccgaacagcatcgtccttcttggcatcctgaccagacacagggacctcaaaggtatcagtgggctgcccttgaccatctccatgccctaagaaggccaccctctcccaccaccccactagcttcatcctccatgaaacaaagccagccctgggtatcagtgcacctccagcctcgcacagggcctgggtctggaccccagccagccaattagcagatgcacaaggcagcagcccagcctcaccccactcacccccgcccaacctgccccacaccttgaacacaagctcatcagtcaccgcaaacgtccggtccagcttcccagatagggagttgatttccttctgaagctccttcgtatcagacaagatctggcagacaccatggcagccatgagcccctgcctggggcaggctggctagcagtggagggtcctcatgtgtaccagacagggactgtgtcactgtgtcaggggtgactgggatggattgtgtgtgactattctgtgttagagtgtgactggacagctctgcctgagggtgtgaggtccctgtgcggccacactatgcctgacagcccacatgacccaccctccatggccctggcagtgtaccttggtgatctcttccttctgcttccggatgttgcccacgatctccaggatgcgctgggtgtaggccagccgggacacatctctgggcagagtctccagctctgacatctaggcagggatatagcaggcactgccccaggaccatccccccaccctcctaagctacccaggtccctcacacaggccttaccagctgcttatagacctcctccttcctgcgggcctcttcagcagccgcccggacactctggtgcagttcttggatctctgccagccgtcgagaagattccagctgccatgagcccacaggcagaagacagtgagcagagcatagggatggccccctagagagggaccgagcctgccctggcccgcccacagcccagggccccactgcttacctctctgcaatcctgcagctttcggaggtggcggtactcagcgaggagtgggacccggtgcttctcccactgacccgccaagtggatgacccgctgggcactattctccaccacaagctggtgggggatgggtacatgtcacacaggctgggccctccaaccccaccccaccccaccctgcccctctccgcccagctacagccccaaccccacctgcagcttggcaaggttggcagtcccatcgggcagcagctccaccgcgcggctcttcaggcgcagggcctgctcacgctctgctgtactgagcttgctgtgccggcactcagactctgcctggccggtggatacccagtcacatgccacagcccccatggagctccacagatgactgtacacccctgtggcccccacaggcctctctaacagctccacgctggtgccaaggaccccgaggaccccctaatcccctgtccatgcagacccgtgggtaccccacagatgcccacagaccctccgaggacccctcaatcccctgcccatgcagacccgcggtgccccatagatgcccacagaccctcaccctggcctgattctcatagccaccctcaagaggcccacagatccctaatggctcccaggaacccttctgccatgtgcagacctctacagagcacctcttgccccatctagtccctcacaccccgaggccctccttctgacctagcccaacgcgcagcccctcctccgccccttacctgcacaaagctgacgcccagggtcttcatgtcggcctcaacctcctcaatgctgcggttcactccttccagctgctcccgaagggactcgagctcctgttcctgagctgcccacgtgacctgggaggcccaggccagtcagggttggggtgtcaggcccagtagacaagcaagggcctgggacacccccctccaaaccactctgctcacctgttcaggccgccgggaggtggctggcacatctgacacctgagtggcctgggcctggggctcctaaggggagtgacgaggggcatcctggctgccagggaaggcccttcctcacgtggcccagcctcagcctcccctgagaactgcccccagtgcggcatgcatgcccactgaagcaccgatggtggccagactgtgactatgtgggtaaaggcaccatctgcaacctcgggccagagtgcttgctcgtggagaaatctccctgaccctgtcacagctcctacccacctgccccatctctcaagcctcaaatgcccatgagaaggatggggggccctcagagtgaacatcttaggacagaagatatgctcaaaggaaactgcctgaggaaagggggtgttgccccaagaacacccccacacctttgcatggttcccacctatccacattttctccagtcaagtccctaataagctaggggacccctctgggtacccatcccacagtggggcgagggcctgtccagtgggaacacaggaacctgtgtggataaaggtgtggtgctgacacaaaaagccaccctccaagcctgccacgcccatccacacatctcatgtcctcaggcgcacccaccagatggaaggtgaacttctctgagtgcgtgaagcgggagcccttaggagcaccagtcttggccccagcaccccaggcctgcagcagttctcccaggtcccgggcttgtatgggggccccaagcaggccccagctttggcgcagatgctcagtcagttgcttctgcagccgctgccgctgagcccgtgtgtcctcctggggagaaaaggcgggggaagcaggaaggtgtaggggcccacctagcacccaaggccctgcctcctccaaggaccccctgacaagagtatacagacaagtcacccccaccctccagccttcccactaaggcaggccctgctctactctcctgctccaccagcctgggatctcctcgaggacaggggtctcctcttgctcacagacatacttctctccacccactagatccccatgctggagaaggatgtgggaagagaggggggtgggcctagagcccccaaatccaagagaagcatagacaggatatcgggggacagggcagagacagggaatcaaaggtaccaagcacagaaagaggcagagagagagaggcaagagagggacaacagagtttcaagataatgggaaaatctgattatgaactcaagtattggatggtattaagatatcattgttggccgggtacagtggctcatgcctataatcctagccctttgaaaggccaaggtaggtagatcacctgaggtcaggagatcaagaccagcctggccaacatggtaaaaccccgactctactaaaaatacaaaacttagtgtgctcctgtaattccagctacttgggggctgaggcaggagaatggcttgaacccaggaagtggaggttgcagtgaagcgacatcacgccattgcactccagcctgggcaacagagagagactccgtctcaaaaacaaaacaaaaaaaaacaaaaaacaaaacaaaacaaaacaaaaaaaaacccacaagatattattgttaacttcattagccatgaaaatggtccagtggttaccttgaaaactgaatgtccttatgagttaagagatgtagtcctaagtatttagagctgaaatgacatgatgtctgagatttgctttaaaataatacagcaacaaagaaaaagttgggagagaaaagatgaagaaaagttggcaaaatggtacataggattcactagaatattctctctacatttatgtttgaaaattactacagatataaaaacaaaaacagacagccaggcgtggtggctcacgcctgtaatcacaacactttgggaggccgaggcagatggatcatgaggtcaagagatcgagaccatcctggccaacatggtgaaaccctgtctctactaaaaatacaaaaattagctgggcgtggtggtgcatgcctgtagtcctagctatgtgggaggctgaggcaggagaatcacttgaacccaggaggcagaggttgcagtgagctgagatcgtaccactgtactccagcctgggtgacagagcgagactccatctcaaaaaataataataatgataaaaaaataaaaatgtaaaaagacacagaggtgaagacagaaagagaggacagataaaaaagtggacagaccaggagggggccgacacagaggtggagaaaaagaggggcagacagagatgtggacacagaggaagaggagacagataaagaggcagacagaaggggaggggggccaaatacagaggtggacagagaggaagaggggacagatgtaaaggtggacagaaggggaggggtactgatacctgggtgaacacagaggaagagggaacagaaataggagagcagaatggagggagggaaaaagagaagtggacagagaggaaaaggggacagataaagaaatggacagagggagagggtgacagagaggtggacagagagaaggaggggacagatgcagaggtggacagaggaagaggggacagataagtggacagaggggaagaggggacagatacagagatggatagagaagaagaggggacaaagaggttgacagagaagaagagggggctcggcatggtggctcatgcctgtaatcccagcactttggaaggccaaggtgggtggattgcttcaggtcaggagttcgagaccagcctggtcaacatggcaaaaccccatctctacaaaaaatacaaaaattagccgggcgcacgcacctgtagacccagctactcagatgcctgaggtgggaagattgcttgagcccgggaatttgaggctgccttgagccctgatcatgccattgtagtccagcctgggtgacagagcgagacaccgtctcaaaaaaaaagaagaagagaggacagataaagagatggacagaaggggaggagggacaaatacagaggtggacagagaggaagaagggagagataaggggacagagggaaggggcaacagatacagaggtggacagagaggaagaggagagagattaagaagtaaacagaggcagaggggtgacagatatataggtggacagcaaggaaggggagagatacagaggtggacagagcagaaggggacacagataaaaaggtgcacagagaagaagaggggacagataaagaagtagacagaggagaagggggaacagatagatagacagagcaagagaggaattcagtacagaaacgaggagacagagaggtaagaaagaggagcagcaaaaacacagaactagaataatggggacaggcagaaattgtgcaaaaacctagaaaccagaaaaatgaacatcagtgacaagtgcagaaacagagaaagattagggccgggtgcggtggctcatgcctgtaatcccaacactttgggaggccaaggtgggcagatcacctgaggtcaggaattcgagaccagcctagccaacatggcaaaaccctgtctctactaaaaatataaaaattagccaggtgtggtggtgcaagcctgtaatcccagctacttgggaggctgaggcaggagaatcgcttgaacccgggagatggaggttgcagtgtgctgagatcacgccactgcactccagcctgggtgacagagcaagactccaaatgaatgaatgaattaatgaatgatgaaggcaggtagccaatctggattgctccagttgccaggaatctcaagcacattattcagtctaactactgccctgagaggagagcactattactaccccaaattttagcacaggaaaccaaggctctgaggagggatactgacttgtcccaggttctccttttttctgactccagtgttctttcaggtggggagctaggtaagcacacacagaggggaaacaatggaagggagggacaaagtggggaaggagagcagaggaccagcgggagtgtcagtgagcagcagcccagacagcagggagccaggcatctggctgtacctggggtgggaggcgggatgtccggtggacccagtcctcatcccctggccggtcccggcccgtctgctggcagagctgcagggcatggtgttcgaggagcgaggccacccttccaacaggctgaggcacctgggtagggactggaagcagcaggggactcgcctggaactcccgtggctctggaggcaggaacagagtcagctggccctgccgcatggcaacgctatgaggttcccccccaccttcctcctcacccctccccacagcctcatgctcaccacctctggaactcaattctggcacgaccagcctgctggcatggaaaggcttctggagggccgagccctggtgggagagcaggctcagaatctccagggtgaagtgggatgagggttgccaggggtagggggccaaaaccctgggcacccagacggggacaagagaagatccatgggagtcaggggtctcacctggaggtgctgcagcttgggagtgcgaaggtggggcgggacccaaggcagtgccagctggtcccgaatttggctcccaatggcccggaggagaatagctgagtcacctatgggggatagggaggaagtgaatcagatgtcaatgctgcaaatccaaaagggcataccctaggagaccagcctccactcctgacccccatccagagatacacatctatccagcttgcgttctcacgttcagtcattcaacaaacaccgagcacctactatgtacaggtcgctgttctagacactagggctacttcgtggaacaaactggataaaggtccctgccctcagggagccggcaagctagcagaggagagagatcatgaataggatcctgaataccatccagactgcagccaggtggggatcaggagagggctgcggagaggaggttaacctcaaagaggtaagggagtgaaccatgagggtacctaggggaaaggtaaccaacgatacaaaggtgcagaggcgggagtgtactggggtatgtttgagtagcacccaggaggcccaagtggttagagcgaagtgagagagagggagggcacaggggttgagtcagggaggcccctccccgcaccaacgcaccaccggggtcagctcaacctcagccccctgccccctgccctgtagcccctctctgatgcctaatcctcctgcctagctctcctgaaggcacataccgccacccctacccatcaacctttttaccacctctacctctctcagccctacagcccctagaaggccctcctctcccctcaccgcccccgcccacatcccagacacccagtacctgcaggctggtctgcatcctcagaggcatcggtgggcagacgctcagccaagaagagaagcaggtctcggaggtcaggctcactggggtagaggaagttctgatagccaagctccaagggatagcccaggtcctgagggttggtgggcggctatcaggaagcaggcagggtcctcctgccctgggagacttgggcctaggctgaaaacgctcccactttctcactaaccaccaccctcccaacctcccccagctccccaaggcctctgggccctggggggagtcacagagtgatgatagtcaacgctacagagaacaagaaacaagattaaagctctggcctttctatgactcaaaatccagaggccataaaagaaaagatgggtacttttgaatacatgaaaagaaagaaaatatttaaagaaaatagaataagcaaagtcaaaagttaatgacaagttgggaaaaaatatttggagcccatatcataggtaaagagcaaatctacctattatagaaagagtgcctaaaaataaacaggacaaaaagaccagaagcacaatagctcagaacaaaaggactcatgagggttctgatggggactgaggaaacaggccaggagagaaagaaagcctttttcctttttttttttttttttttgagacagggtctcgctctgtcgctcaggctggagtgcagtagcgtgatcttggctcactggaacctctgcctcctgggctcaagtgatcctcccacgcagcctcccgagtagctgggattacaggtgcatgccaccacacccggctaatttttgtattttcagtgtagacagggctacaccatgttggccaggctggtctcaaactcctgggctcaagcaatctgcccacctcagccacccaaagtgctgggattacaggtgggaatcaccacacccggcctaggaaagcctttttcttccagagttgccactgctttggaactgcatagactctgaaagcagacttcctggattcaaacccaagctttgcctcttaccaactatacgacctcaggcagatcacttaatccctctgtgcttcactttcttcatctgaaagagggtataccaacagtacatatagcagaaggttgtcctgagaattaaatgagttaacaccatgttacttaccacagggcctggcacagagtacacttagaagccatcattattctatacttaggagtatactgggtcacaatgcaagatatatttattttggaggctcaaggtcaaataagtataaccactggcttttaaggtattttactttggattttttccacaatatgcaatcaaagagctgtgactgatatagaaactcattccaggagtggggaaggtgccaaaatatggaggtggctaaggtgcagaaactgttgccaggagcagggcatatgaagaaaagatgccagaacatggcagtgctgagttgcgggggggctacagggacagcacacagctggattaagagaactccttttgcctgctgctgataaaccaaggctgctgggggccagacaaccatatgtacctgttttttatttttttggaaacaagagtcttgctctgtcgctcaggctggagtgcagtggtgcaatctcgactcactggaacctccgcctcctgggttcaagcgattctcctgcctcagcctcctgagtagctgggattacaggcacacaccaccacaccaggctaatttttgtatttttagtagagacagggtttcgccaggttggccaggctggtctcaaactcctgacctctggtgagatctgcccgcctccacctcccaaagtgctggaattacaggagccaccgtccccagtctttttttttttttttttttttggagatggggtttcactctgtttcccaagctagagtgcagtggcgcaatcacagcccactgcagcctggacctcccaggctcaagcaatcctcctacctcagcctcccacatagctgggaccacaggcgtgtgccaccatgcccagctattttttttttattttttgtagagatgggggtctcactatgttgcccaggctgatctcgagctcctgggctcaactgatcctcccacctcagactcccaaagtgctgggattacatgcaagagccaacgtgcccagcccacatgtacctcctggccactggaaaagccatagtcactaacccccactaaaatcaatgtaagcaaaagcaggtgaacaaaatccaagagagacagcactgagggaagaacagagaactgcaggaagcctgagcccccacctcaacacctcctgctgtgtactctcctctgcaaacagaagacataacttcccccctattaagtgctaaccttaagaatacatacagtcctgggccaggggacagactgcctgcctcataaggccaccaagagccccagagagaacaatgtgacaactcctgagagctgggtgaacctgagagcgaagggatggatggagctctgagacctgttgctaagagacagaaactgcataagcaaggcccaaatttaacaactctagccacccagtcccctatatctaaatgaaagttttcacggtagttactctatcgtccctccaccaccatatacttcctgggtcagttcaaagtgtttccattcactatgtattcacaggttccagatcggacctatccaataatagtaatcccatttatgcaaagcttattataaccagcttttcacacattaactcatgtttaatcctcacagcaaccctatacagtagctacaattcttatacccattttacacatgtggaaacttagcctcaaaaaggttaagagagccagacgcggtggctcacacctgtaatcccaacactttgggaggctgaggtgggtggatcacaaggtcaggagttcgagaccagcctggccaagatggtgaaaccctgtctccactaaaaatacaaaaaaattagccgggcacagtggcagacacctgtaatcccagccactcggcaggctgaggcaggagaattgctggaacccaggaggcggaggaggttgcagtaagccgagattgtgccactgcactccagcctgggcttcaaaaaaaaaaaagactggcccaaagtcacagagtgagtgagccagggggagtggcattacttgcagctcttgaatacaggaactggactcctggactcagctctatactgggaatgggtgagtgtttcatcagaatggctctttaccaggcacagtggtgcacgcctgtagtcccaactactcaggaggccaaggcgggaagattgcttgaggccaggagcttaagaccagcctgggcaacatctctacaaaagcgagaccccatctctacgaaaaatttaaaaattctcgggcagggtggcatgtgcctatagtcctagctactagtgaggcagaggcaggagaatctcttgaggccaggagttcaagaccagcctgggcaatatagcaagacacttacctctaaaaaaattaaaatattttttaaaagaaaagcactttatttattctgtcacagagacattgttggaattgctcttagcagaggcaggatatgtggttcccacagaggtaatatagcagacactcttttgggtaaccagcatgcctttctttgggtaatcatccttatcccaactccacaggatcctgaaggagtggctaatcacagtgtcctataggaatgaccgtgtcggccgggcgcagtggctcacgcctgtaatctcagcactttgggaggccgaggtgggcagatcacgaggtcaggagttcaagaccagcctagccaacatagtgaaaccccgtctgtactaaaaatacaaaaattaactgagcatggtggtgcatgcctgtagtcccagctactcgggaggctgaggcaggagaatcacttgaacccaggagacggaggttgcagtgagccgtgagctgagatcacgccactgcattccagcttgggtgacagagagagacttcacatcaaaaaaaaaaaaaaaagaaaaaaagaaaagaaaaggctgggcacggtggctcactcctgtaatcccagcactttgggaggccaaggcaggtggatcatgaggtcaagagattaaaaccatcctggccaacatggtgaaaccccgtctctactaaaaacatgaaaattagttgggtgtggtggcacacgcctgtagtcccagctactcgggaggctgaggcaggagaattgcttgaacccgggaggcagaggttgcagtgagccaagatcgcaccactgcactccagcttgggcgacaaagtgagactccatctcaaaaaaaaaaaaaaaaaaggaatgaccatgtcatccagactgggccaatcagagcacagagtgattagtttaggagtatatgacccagacagagtattttctggaactaggaaatggatactatggggtgggggtggtattttgcagctaaatttaaaacatagaagccaggagcagcccaggtgcaaactggataaactcatttgctcctcataaaagcactacatttatcatctccatttcacaaataggaaaactggggcccagaagggttagggtcacacagttaccaagtggtggggctaggatctaaactactcaggcagtttggcagtacagtcagcagccttaaccactaatgaaaactaagccgcaggaaaaatgacagaggaaaggcaagtgttgcagaggaaaggcaagtgttgcagaggaaaggcaagtgttgcaaaggaacttggttactttgtaaaagaggaagaaagaggatgtgtgcattaggaggagggccactcaccatgcaggcctgagccaggctcatggccaggcggaaccgggcagacatggcaagaggcagcagagggctgaggccagagcccaccgcagggttgatcacacgcaggcagcggaccacagcctctacaaccagctcagtggtgaaggcgcgcaaggtctgcacatctggaggaactgccctgaagaaggggaccagcttgatcacaggaatagtcaggcaacagggatcaggctgagccctgcagccttttggaaacactagtaccagggtcggggcagggaggatgcctacagttcagacagatcctggatgttggtgactgtgacttccatttggaaaaccaggaactagggaaatcctcaagtcctaagatcttggagtaggagaatggtgggtggaagagaactcagtttagaaaaatatcaaaatttgggagtctgggaaggtgaaagggtccaggtggcacaatctctgggtttcttggttcccagatagtatgttctttgcatacatattgagctgctagagttttgagaagactagattttaggaggctgctgttttcagaagttccaaatgtcagggtccctgggtatcaagatccctgaatatcaagaccacctagtttcaagcaatacaaaaatcagactccctagatgttggcatcctgggtttttagggcctctgaacggaggagtcttcgtgcgtcagggtgaccaaatgctgatgtcagattttagaattctgggtttttttggctgggcgtggtggctcacacctgtaatcccagcactttgggaggcggaggcgggcagatcacttgaggtcaggagttggagaccagcctgaccaacatggtgaaaccctgtctctgctaaaaatacaaaaattagccgggcaaggtggcgcacggctgtaataccagctacttgggaggctgaggcaggagaatcacttgaacctgggaggcggaggctgcagtgagctgagatcaccccactgcactccagcctaggcgacagagcgagactccatctcggaaaaggaaaaaaaaaaaaagaatcctgggtttttttaagccccaggtgtttggggaactggagtttgaaggatcccaagtatctggtccagggattttttggagtccccgagtgccagggtcctggggttttacgctccctggttcttagggcacaggtgtcttagggtctccagataacagggtctcagggaactgatgttaagattccccagattacagggttccgggtcttgaggtttcaaggttgtaacgtctcaaggtgtctgggtcccagagctttgggtgtaccaaatatcatggttaaaggatttgggaggcctctgatgtcggtgtcagggagggcggtgtgtgtgtgcgtgtgtgtgtgtgcgtgtgtgtgtgtgtgtgtgtgtgtgtgtgtgtaagggggtgagggtcttaggatcctggagttggagccctgaatgtcaggatcccgggttttaaggttcccgggaaacggggtcctgggctttagagtcccggatgtgggcttcgggggtgggcgggggctctgtccttacgtgccggcctggcgcagcgaatggatgaggattcggtccgcctcctccatggtggagccgtgtcggagtcgggggctgggtccaggaccgggtccgagaaagtggggagcagctgtagaaaccctgctccgtgctcgcggtccacagagtgtcacgggtcgtgtggggagagttggaaagtgtagttctgtgagcgagcacggcgcatgccggatgtgaggcctggggtgagtgtgcacggaggttgagcttgcaatagctgctgggaactgtagttcttccacctgcagtcca

SEQ ID NO: 47 - DNA, 21598 bp, Homo sapiens
aggatgggatctcctgctcctgttcctcccgctcctgcccacggcgggctgcgcgggacgtagcgcgctgggtggtcgcaaaaggaagcccagccgtcgtgtgaggcccgcacgtgcaccgccttctcgaaggagcggttcagcacgcgtaccaacccgcgcagcaccggcgggcggcccccaggcacccacaccccggcacccccggggaccgctccgggaggcggcagcagcgcctccagctccaccatgacgcgccccaagcgctccagacggcccggcgcgggcggcagcgaaaatgtggggaccaggtaaaaccccccgccagcggggacggggcacagcggtgagggctcggggcaagcctcctcttcctcctccccttcatccccatcctcgccatcgtcgtcctcgtcggccccgccgccgccgccgccatcttgcccggccgccgccgccatcttgcccgccccgggcccgccccacggccggtagcggcgcaactgcgccagcggcagccccaaggcctcgtcggcgaacagcaccctccgcggggccaccgccgcctcgaccgaggtgcggggctcacccgcggccggcgaggggggcgcggaatgccgcagcgggggctccacaggggccgtacgcgccatatcggcggcggcggcggcaccgacggcaccggcggcgggaccggcgggggcagggcctgaaggggcgggcagccaatgggaaggccagcgcggaggggtacggctcacgggggcataggcggtgagatgaagacaagtattgcagagggccaatgggcagccatgcacggatgacgtacagcgaattgagagccggagaagcacgcagccaatggggatgcccgggagtgggcggtgtagggggcgggatgatcgaggaatcaatggagaggccggaatgggggtggtgcgaaatccatgatgaagaaaacagaagcagacagctaatgcggaagtctgagcgagagaggcatgtgggcggtgggaaaagtggaatggctacaggcgatgagggcagccgggaacgaacgcagaggcccaaaaagtgggagatcccgcgggttgcgtaggcggtggaacggtagctagagagagagaacagccaatggagagccacgcgtgggatgacgacaatggctgcagcgagccaatggggaggcttgtgagcgtgcactgcggcttcgaaggggtggtgccaaggtggagctagccaatacgaaggctaaaaggagaccaagaggcgggtgtgtagggagccgagccaatggaggtggaggctgaaggcgggagcgaggacgagagctggcggatagccaatgagggagccagggtgaaggcgtagagacctcaaaggacagtactagtatgggatgagccaatgccgaggctagatagtgcagcgggacggagggaggacttggaggcaagatggggaaaaaagcagagccgacgggggcagtgtaggtggtgtgaagggaggcatgagtagccaataaggaggctggagaggaggacgctgtgtagacagagtctgaggtattgggtggccggacagcagaaccatagaacgcaggcagccattaggaaaaatgtgcttctcagggatggggttaccctctccctaaccctccgtgactccccattgccccaggaatacccagagcccctgaaggcctagaccacaccttggtgtgtgaactaggaaagtgaaaatgactgtcctgttgcagttagttacttactgggtcctccctgcccaactacaaccttttcttgagcagtgccacaagccaagaatgcccctgattgttagccgcaagcactctccaggacttgatactattgttgaatgaatggccgaataggaaatttaactttctgaaggattcacttttttaaatttcagctcagcaaacactgacctgactgtgtgctaccagaagttgattgggcatatgggtagcttctgactaatggaatcacaatcaaagccctgtccttcttgcccaacctgacactccacaccccacaggggcctcacctcccttctttctgtccccccatctctgcttctactgttccctctcccaagagtgctgttccttctgctgcttccatctagtaaactcctttcgctctccctttggggtctcaccttctgtgggaactcaactgcagcttttgtccgctgaacacatccattcatacattccttctccatcctgggaagatttactgaacacctactgagtgccaggttctgagcatgctgttatctcattagaacctcacagcatcctaggagggaggtgatccttccagcagcccctctccccaggtctccatgttcaggatgtccatgagttagaaatgaatatgttcagctgcaagtaacagaaaaatcataaaataatgggggcttaagcaagacagaactttatttttttctcacctaaaagttcaagctggcaaatagtccagggactccttcctgcccacctggtttgggcattgtctgtcccgatctggctccaagactctcagtcttcaacaaatccttttggctgtctattaaaaatatttaccaaatccatcctcttctcaccacctccactgccagcactatcaccagtcacctagactactgcagtagccagctccttgctggtcccctgcttccacattcaggccctagaccccattgtacactcagcattcaggggcttcctgttaaatcctaacacggtttgtgtttctcctctgcttgcaaccctgtcatgccttcctcctcactcagcgttgaagccaaagtccttaccatggcctacaaggtcctgcgtggtctaacctccgagtcccctttctgacctcacctccagcttctcttcttgctctctccacactaaccacaccagcccccttgtagaccttgaacaaatcaggtacattcccacctcaggacctttgccctggctgtttcctttggagttcctcagatatctagctggctccctccctcatctccttcaagtctttgtcagaggcccctgtctctggggacttttcctgacccgtttaatcttgcctactcacccccaactcccagccctcccagtctccttcccgagaagccctccatgagagaggatatagtccagtatagaggggaggtagcgacctctacccctctctgccctcctgaccccagcccccattctgcaaggatcttggctttcagcagccgtagcatttccctctcacaccctgggcctgcccaaggggccagctcacattctcggccaccatcctcacttcgtttgcctcctatatctctggccactctctttcatggagtgagtgacagtaagggacagatggtctggggaaggtataaggagaatgcagcccacacctctgatcctgagagagaaaactagcccccttttccaggagggggacaggtgctggggcagggaacaatgcctctgctgatagaactggcctggtttataattacgcaggaggtgtagggaacattccgacccaagtctgcagggagcaaggggttattaactatgggaacatcagtgcaagggatcattaaccttaggaccatcactgcaaggggtcattaaccttggggccatcactagaatcagctccccaggactccttcctgacatgcatgctcctcaccccctcccttgctccctcccacatgccgtgacatctgttaaacacctgctgttcacagggtccctgcaggcctccaagcaggggacctcatcccaccttggtgcctcccctggctgtccaacacacccaagccatttttgggtctcagatgtgtcccaccaactcagaagcctcaaccagcgaaagttttgttttgaactaatggtggggagggttgggtgttttttttttttttttaattgttgttggctgatttttttaaggtctttttttttctattctttttttttttttttcttgtcttcacaaagccaggccatcaggcccattctgggcttttccagaagggtgagtctgagttgaggaaagaggccctcctttttacgagggcttagaaggttgggggaggaaagggggcaaaggggtgaaggggtggatcttggccaccagatttgtaccatgtaaataaaaagccctttccaatttctcttccccaggtctgaagccagtcttgtagagggctggagtggttgttggacgactagaaccctgggctttgcagggtgctgggagctggaagtcttcaccatggcctgtcaggagaagcccctgggggctggtctaccatgctgaccagtggttgaatagagtgcctgctgaggtcaagagatgcagccgccaattcctggacaacctaaaagcctcacaagcttcaagtctccaaggactctccaaatcccaggatctccctgccatcacatcctagaatttaaaacctgagaacatcaagttcaggaaagcttggggatttcaaagcccagcaccaaagaaagcgggacccacactcgccagctctgtgatcttgggcaagttgcttgactacttatacctccgtttccctcatctgtataacaggaatacaataatgatgagatggagctcaaggggccatggtgaggattgaacatgatcacttgtgagacatgttcagcactgtatctgacccatggaaaattcaagataaacatcagctactgagatgatggcggatatttggaatcctaaatccttggaaactggggctttttgaagtaaaagaccccaaaggctgagggcctcagaagcatcaggccatgatgttcctgaaacaagagggtcagggtcccaatgggcctctggggttcatcgtgaggatggatgcattaatattggggacctgctagggaccttcccagtgggacagtggctgggtcagggcactcaagccctaaaacgtgatgaggcgagacttttctctctttcctcattcagtaactgtcagtagattctgggagccagggattctccgactcttcaagtccatgaattttaggggatgacagtgggctctccgctttctcctccatgaagtaacttacatgcccctcaccctctgtgggaggggtgttgcagggggtgcagaactcccctcgccgggtagttcaagcaatggggaccatatcaattccatctatagggaaactgaggcctggagtagggcgaggcctctgggaacccagccctattctgtctctttccctggcatttcccatccacacatagagcttcagattctctttctttccccagagaccctcaaatatcctctcactcacagaatggtgtctctgcctgcctcgggttggccctgtgatttattttagttcttttcccttgttttttttttttcaaactctatacacttttgttttaaaaactgtggtttctcatgagccctattatctcattgatacctctcacctctgtggtgaggggaagaaatcatattttcagatgactcgtaaagggcaaagaaaaaaacccaaaatttcaaaatttccgtttaagtctcataatcaagaaaaggagaaacacagagagagagaaaaaaaaaactatgagaacccccccccaccccgtgattatcagcgcacacactcatcgaaaaaaatttggattattagaagagagaggtctgcggcttccacaccgtacagcgtggtttttcttctcggtataaaagcaaagttgtttttgatacgtgacagtttcccacaagccaggctgatccttttctgtcagtccacttcaccaaggtgagtgtccctgctctcccctaccagatgtgggccccattggaggagatggcagggaggtaggcacggcgggggggtcaggggccctctggtacagtgggatgtacccagctaccgtgattccagccaggtaaggtctttaaaaaaataataatagaataaatggcagaagacttaaaggtgaagtacttaatgcatgggcaggggcaaaaataaatgaattcatcaattgatacgtagatggataggatttttaaaatatgtcagctgccagtctttatggatttcagagctttgaacaacttgaaatgctgtccaggtgcaactgaaaatttcaactgcatctctctcatctctttgtctcttagctcttgatgcctctcatccttctctgtctctctgctcaccctgtcttgctcttttacatgtttctctgcctctctttctcccgccatctgtctgtcgctacactcagactctctttccccgcatctctcctggcctctgaccatctcccctatctctgtctcctccatcttgaccacactccatcgatctcctttcctccatctctcccgctctcttttcttgccttcccccacctgccttcccagccagcatccagcctagagctttgtacacagctggcgtttaataatagtaatgtcgccgaggacctttacattttatgagagtgagcatcagttctgttcaccctagtagcaggaggattgcaaggtgccggggcaagctgagcacttaactgaactttgcttgtatcgctttagaggagacccttggggcgggggggcagggagcacttcacaccattgtcaaccgtagtttagctgtgtggacctaccccaggactgcatgtgtgtgaccagagtccatattcaggaagcaaacaggttgttcagggctggggtgagctcgattctgcaggcttagcacagcgtttggcacaaagtaagtgctcacgaagtgttagctattagtatttctgtaaccaaattagaatcatgctatatattggttttgttcctgctttattcaattaacagtagtgtttttgaagcttactaaaaattgtttgaacacatgatctttcatgatggacaagactgtcctcacatcagcatgaactttgattgatttgaccaagtgccgattgttggacattccggttgtttctcgtttttttctataaacatccctgactgcttccttggattcctgaaaagggagttgctggggcaaagggggcgtgcatttttaaagtttatgaccctctctgctaattctccttccaaaaggttgtcctattttatgctccctctacttaagctaaccctaggtgagtattattatgttttaattatttcccaacatgacaggtaagaaaaacacattatcacattgttgaaatttgcatcttgtgattacttttactattcattggccattcatgcttttttttttttttttttttggttgtctggtcatgtccttactcctaatagggtgttcatcttatttttcccttattgatttgccacagctctttatttggaatggttattaacctttcatcagccattacatatatagcaaatattttccccaattcatcatttgctttttttctatttgtttatggtgttttttgtgatgcttatgatggttttatacagtcaaataggttagtctttttttctgtggcttctgtctctggttttgtgcttagaaagtcctttcctacttgaaaatgagataaatgttcacctatgttggcttctagtctcttttatggcttcattttttccatttactatagaggttaagagtgtgggtactggagccagactgtctgggacaaacccagcgtcaccccaagccctatgtgtgatttttagccaggcacttaacctctccatacctccatttcctcatatgtactgcaatggttataatagtaccttcctcaggagtctttgtttagattaaaatttttaaccacagtaaatacttagcacaaggcctgacacacaataaacccaagatcagcattaggtgttaaaacttatatcttgaatggatctgggcattttagggtatatgatgatggtgacatttcaaactgggcagggaggggttgttgggataatggactgactattcactcaataactttatcttctccctaattatctcagacacatttgttaaaccatactccatggtcctccagtttgaaatgccacattcatcacaaattcagttctctccatatgtgggtccatgtccaagctttctattctgttctcttccccagtatctgttcttataccagggccacactgttttgctgattgttgctttgcaatacaattcaatacccagccatgggtgtccctggcaccttgcccttctttattcttgattatttcaggcagcatcagttgaaccagccagagaccagcaaatgttcttatttgaggcaatcctcctctcgcacacatgcactctggctctccatgcatgtgtccatttctctcaatgtctctcactatctcttgttctctcttgctcgctctttgtgtgtgtctctttgtctctatgtatccctatctctcagccagtcccctggatagaggggcaattgtcaacttgaagccctgcagacacctaatgacttaaccagacagcgtagaagggccctggcccttgtctactccacgcctctccgtgctcagtgtagaagggcaaattgaagaccagagatctcagggcctcaccgaaatgcagcggcagagttgaaatccaagcctagatctcaggactctaggtgggaccctggttctggctctctccccaactgaaggcctcagtttacccctcagcacccagaagggggaaggggaacctgggctaccattcccccttctgccttctcacacgttggaccccaacttcccacaggttggacgatccacgatcacagtgtggggcccagcctcacaagagctgggctaggtgaggccccggactccataggtcaggaggcctagttggccagagcgtggtgatgatggaggcatgtcagtcagtcaggctgtgtgtccccagagctggtgctggtccccgaaaaccttgattgtggggcccctctagagagtctgatgatgggctctgtattggcgaaggctgaggcttttccagctccccccatgaggcccagaccaaaggcacaccagcctcaacctcctcctccccctgttgccatctctggcggagtggccatgtatttgggaacgttgttccagagtggacagggagactgaggccctagggaggctggctctgtttccaggcctggtaggcaagaggccctatgaagcagcaagctgcctgactttcagatggttccaaggagtttggacaccagggacactggcctacacatactgagactttgggaccgtagaccccacagtctgtggttttgagattctaggatcctttaaatctaagaaatgctgttctatgattctgaggtcctggtgttatactatttgaagaccccaggggtcccagtatctgtggagcctgcctggcactctcagagcttcaaacctgggtcctctccacaacccaagaagggccaggtcttcagagctaggggcttgtcatagtggccagatggacatcacctaccacatccaccagcacccatgtcaccccacctgggccaagcctgctgcaggacagggcagccagttctcggaacgaaacctgtggggtggggtatctgccctcttctcttcctccgtggtgtcgatgaagcccggcgcatccggccgccatgacgtcaatggcggaaaaatctgggcaagtcgggggctgtgacaacagggcccagatgcagaccccgatatgaaaacataatctgtgtcccagaaacatcccccattcagcttctgagaaacccagtcagaaagggacgtcccaacagacagtgcaggaagccggctgcccagcccggccctctaggtcctctacccccagacagatcatctccatgtccctgtctgagaatgtatctatgctttgctgagtcaggccatcccacatgtgtttggggagaattcttagctctggccaagtgtccaggcagcttcagaagtgaccacaggccagccacatgggccaggccagagtggtggaaaacatccatttgcaccgaaatcggtattagtttgttctggctgctataacaaagtaccacaactgagtggcttcagcaacagaaattgatcatctcacagttctggaggccagagtccaagatcaaggtgttgccagggttggttccttctgggggccataagggagaagctgctccaggcctctcccccagcttctggtggttgctggcaatctttgttatttcttggcttgaaggagcatcaccccatctctggcttcattcattcactcaccttctcatctcaccagtgctctcccaggcccttgttcggagcctccacagacccacactcctgtttctcacgcagtaatgttctaagcccccaggagactaagaacttaatacctggattctcacactcatctccctcagcaccacagctctgacaaccacccccaggaggtgacagcaaagaaaggaaggagcaactgctcccccagaacccttctatactcccccgggctgctctcagcagctgtgtgcccaactcagtgctgtgaggtggaacggggagatggagacacacacacacacacaccagagagtttataaaatgtgcacacggaaacacttcctaaagaaagaagtggagttctcaagtcactatgggactacggaactcggcatctgagcatccccttctgtataatggggttggctgggcagtcccttccagctctggcttcctctcagaccaggattataggatcctgaaaagccagtgcttccctcagggagtggaaggttctggggctcagcagggggcccggagccattgtggagggctttcaaggtgaggacaatagaagagcaggtcttgcgtggcttggacagggaaagaggagaaggagtgggcatttgaggcagggggtgtagcatgagccaggcttgagggccagaaattggggtgaactctgatgggggctgggtagagaagcttctacaggccccagctcaagagaccccatctctcctcctctctgtcacttgccatgctggatccgtgcatgatcacactcctggactcgcctccttgccctgagatccagacccccgtattcagctgccccctcagctcctccactcacatatttaatgccagactcttcatgtctatctacacctgcacttttgcacccaatccaactccccgccatgtcccccatctcaggtaatgtcagctcggtccttccagctgctcaagctaaaacccatgtcactttgactctccctcttgcccactacatccaagctgctagcactgctcctgatccagcttcagattaagtctcagaatctacccacttctcgccttctccactgccaccagcccattctgtgccagcatcatcacttgccaggactgttacaatagcctcctcactagccccactcacagcagccagatgaatcttttgagtccatgcctagtcactggggcaaaataggactccgaggagaaagtccgagaccagctccggcaagatgagcaaacacagcctgtgcagggtgcagggagggctagaggcctgaggcttgaaacagctctcaagtggagggggaaacaaccattgccctcatagaggacacatccacaccagggctgtgctagcgtgggcaggcaagccaggtgctggacctctgcacgtggggcatgtgtgggtatgtacatgtacctgtgttcttggtgtgtgtgtgtgtgtgtgtgtgtgtgtgtgtctagagctggggtgcaactatggggcccctcgggacatgtcccagccaatgcctgctttgaccagaggagtgtccacgtggctcaggtggtcgagtatctcataccgccctagcacacgtgtgactcctttcccctattgtctacgcagcctgcccttggacaaggacccgatgcccaaccccaggcctggcaagccctcggccccttccttggcccttggcccatccccaggagcctcgcccagctggagggctgcacccaaagcctcagacctgctgggggcccggggcccagggggaaccttccagggccgagatcttcgaggcggggcccatgcctcctcttcttccttgaaccccatgccaccatcgcagctgcaggtgaggccctgggcccaggatggggcaggcagggtggggtacctggacctacaggtgccgacctttactgtggcactgggcgggaggggggctggctggggcacaggaagtggtttctgggtcccaggcaagtctgtgacttatgcagatgttgcagggccaagaaaatccccacctgccaggcctcagagattggaggctctccccgacctcccaatccctgtctcaggagaggaggaggccgtattgtagtcccatgagcatagctatgtgtccccatccccatgtgacaagagaagaggactggggccaagtaggtgaggtgacagggctgaggccagctctgcaacttattagctgtttgatctttaaaaagttactcgatctccatgagcctcagtttccatacgtgtaaaagggggatgatcatagcatctaccatgtgggcttgcagtgcagagtatttgaattagacacagaacagtgaggatcaggatggcctctcacccacctgcctttctgcccagctgcccacactgcccctagtcatggtggcaccctccggggcacggctgggccccttgccccacttacaggcactcctccaggacaggccacatttcatgcaccaggtatggacggtgaatgggcagggaggagggagcaggtgggagaactgtggggaggggccccgagtcaggctgaaccacagcccacatgtgccccccagctctcaacggtggatgcccacgcccggacccctgtgctgcaggtgcaccccctggagagcccagccatgatcagcctcacaccacccaccaccgccactggggtcttctccctcaaggcccggcctggcctcccacctggtaacacctcagcccgtaccccatggcttcacagaacccccaagtccccagatccttggctgtgagcagtgtaggctattctgaattgcagtactctgggggtcaaaggtgtcaggtctcagaggcttggaaactccaccctccaaaaaacgtcaggtgcagaaccttaaagatgcagaatgtcaaaatcacaaaaccacagagctttacaaagctagtcaaaatgtcagcacctgcgaatggccgtctttaagcttctctgccagaagcctgggactttggggacagcagagccccctgggagtcagggttttcgaggctcaggagggtgggaagctcaaaatgagaggccttgtgggccaagctccagagcccagcccacagcctccataggtgccctgtccccacccacagggatcaacgtggccagcctggaatgggtgtccagggagccggcactgctctgcaccttcccaaatcccagtgcacccaggaaggacaggtcagtggacagggctgggaaggatcctcgccctcctatcccctcccctgacaccctctgtccccccagcaccctttcggctgtgccccagagctcctacccactgctggcaaatggtgtctgcaagtggcccggatgtgagaaggtcttcgaagagccagaggacttcctcaagtgagtggcccaggcctgtgccagtctaccggccctggcttgtggggagaggtctagggtgcagatctcagctcaggcttcatcccaataagtagtaagatgcaagagctaaactctgagactgtgggttcaaatcccagctccatccctgactggctgtgtgaccttggacaaattacttagcttctctcgacctcagttttctcgtatgtataataagaaacgtttgtgctgttatttacccccattttacagacaaggagactgaggccaaagaggttaagtgtcttgatcaaaatctcccagttcctgagtgacagagctgggatttgaacccatgtagccaggctctagaatctgcactcctgctttgccctgctactcctcatgccaacatgccagccttattccactgttcccaaagttctagctcctctagatggctgctgctgcctcccctcagtccccccatatgtctctctctctctctctctctctctctctctctctctctctctctctctctttctctctctctcacacacacacacacacaaatacacaccacactacacacaacccttagcagcaaccccacatgtcctgtcctccttgcagccaggcctttgcacaggccgtccctccacccagaatgctttgcccactctcacctccctggcccattctcaactcaccacacttccaacattatctccagcactctggccaggctcaagtggtgagttcaggcctgacatgcagtaggtgctgaggggcatgtgttaagggaacgaggggtgtgagagggagactgaggtagagaggggaggggagctggggctcagaggagagaactcccagagggtctgggccctccccattcagagcattgagccagaccaggcctgtcgtggtcacctgcatggaatcttctccctacttaggcactgccaggcggaccatcttctggatgagaagggcagggcacaatgtctcctccagagagagatggtacagtctctggagcagcaggtaatgccagggcggtggagggtaagggatagggatagtgcgcaaaaccttctgtccaccatgtgccagaaaccaagttcacctgggacgagggctggtataaaggaaggaagaggagcgggcactcccagggaagaccgtagcctgggcaaagatgtggcagagaagggccaggctgaggcctcatgtttgtgccatttcacagctggtgctggagaaggagaagctgagtgccatgcaggcccacctggctgggaaaatggcactgaccaaggcttcatctgtggtgagcgaccccaggactggtggtggcagactcagactgctggggggcagggaggaggtctgcacggtgcagggaacctaacctcacattcaggtcctgagagctaggggcccctgtccccagctccaaacatgcccagacctggaaatctgtccccttctacttacaaaccctctgaccccggctgggcgtggtggctcacgcctgtaatcccagcactttgggaggccgaggcgggtggatcacgaggtcaggagttcaagaccagcctcgccaagatggtgaaaccctgtgtctactaaaagtacaaaaaattagccaggcgtggtggcaggtgtctgtagtcccaactacttgggaggctgaggcagagaattgcttgaacctgggaggcggagtttgcagtgagctgagatcataccactgcactccagcctaggcgacagatcaagactccgtctcaagaaaaaaaaaaaaaaaaaaccctctgactctaagatccccaaacactgtgatcctgagttgttaaagcaaatgcaaatagccagacttgccagatgcaggctgtgtgccagcaggaccagctatgtaacctgcagggccccttgttcagatttcaagatggcgaccacagagcattaaacaaagcacagggtgccacataaccacataggtcacacgcccatgaagccagccctggaggccaggcactgtttctgagcgctttgctggtggtaatttatttctcatgatgcgaatgtacagatgaggaatattgaggccaggggggtttaggtgactttcccaaggtcacagttgggtggtaaagagccctattcaaccccagttcatggtcccagcatcagtggccacatacgacatccgcacctgtgctctaataaatacggctcatgctgttttgtgggattccacctcagactggaatttagaagagggcgtccttgctttgaaaaacactgatttaaaaataaagtggagccaggcgcagtggctcatgcctgtaatcccagcactttgggaggctgaagcgggtggatcacatgaggtcaggagttcgagaccagcctggctaacatggtgaaaccccatctctaccaaaaatacaaaaattagctgggcgtagtgacgggcacctgtagtcccagctactcgggaggctgaggcagaagacttgcttgaatctgggaggtgggggttgcagtgagccgagattgcaccactgcactccagcctgggcgacagagcaagactcagtatcaaaaaaaataaaaaacataaaatagaaagtaaaaagtgggaagtttaagcctctgggtcaccagcctctccccctcacccaggcatcatccgacaagggctcctgctgcatcgtagctgctggcagccaaggccctgtcgtcccagcctggtctggcccccgggaggcccctgacagcctgtttgctgtccggaggcacctgtggggtagccatggaaacagcacattcccaggtaagaatggtccttgcactacacggtgcccccaagctcctaatcctgacaggctctgggtggagggtgcaaaggagctccatgctgccccttcccaccaccaccaccactgcagctgccgccactcagcctttgggaaaatgcatccgctcacaaaagcttcctttcgggatgtccgtggcctgaaagccccccatatggtctcgagtgtcgggcccctagccctgactcccttggggattggggccatgcctcacccactctggactccagctactatattcggccatcagaagggagggaccctgctaagtaattccaggagcacctcctttcctcccctgaccaaggaaaatcggggtggattcgcccgagctcacctatccactgctctccaccaggcctggcctgtgggcttagcagggatcagagaccttgactgtcatcctggctctgccatttaacctcttgcatcctttggtgtgcaagttactccgcttcttttcaacctcggggagaactattttggcagaagtggtgcaaagaataaatgatacaacttatgtcaggtgctcagcaaacagtacctgtgcccgtggacacgggtgttgacggtgagatctcaggcctgtagactcaccttgtagggggaggggacagggagctagctaggaggtcctgcatggggcttgattcatccccaccctctgacagagttcctccacaacatggactacttcaagttccacaacatgcgaccccctttcacctacgccacgctcatccgctgggtaagcagggcagctcggccccaaggaggaggaagacaaagatggggtgggggacctgcctcccaaactcctgtctccctctgagtgccctcagagtgggttcctccattcccaagccccagccccaaggatccccaagccgtgcctcaaatgtgacccctcatgctggcttcaccccaaacctgtccgcaaatccaaacctaaaccaccatccaggccagagcatgccaaattctgaccctaaacctacccctttccagatgtccacctcagccccatacctaaccctctcctggacccataaaatagcctaaagctaaccccatctctgcaccttgccctaaacgtaccccagctcttactctaactccttccccagcctttatgccaacccaaccccatctccttccctggccccaacgtaccccagtatgtcaatacacccccaactgggcaccattcccaacctttccttgtaacacccatttgatccttaacttcatcaccccatcccaactccttcatctcagcctccccaatgccttctcagaaccttcatcctagcgccacacctaaccccaaacctgaacctcacccctacatgataccagatattccccgactgtctctgaactgaaaccctgacctagccccatcctgactgatagcctcactgcaatcatcatcgctgactctgtaatcccattcctgaatccaaactgatcaaattccctgaccctcagcctcactccacaccgaaccccacaactaacctcatccttgccctgagcctaaccacctaaccatgtccctgacacgtaagatactcgataattcaaaccatctctggcttctgacctaaagccaagtcatcccatccctcacccctagaccccccacctgagtccaccccagcctgactcttaacccaccccttccctgacccttaagttggcctggccctttaccccttccaaatccttgaccccacttctgacccttcaccttccccaaccctgaaatgtcacctccacagagaaccccaactccaactccatcccagacctttcacctcacttcagccctagccctgaacaagaccccactcccaacctcagtcctgatcccttacctaatcccagaacaaccatacccacacccatctaaccctgcccaacccgacacttcaccccttttctaaccccatctttgaccccatgcttcaccccacatctagtcctgtccctgattacctgcccctacaattccgcccccatgtcagatggctcggggtaggtcatagcccctctaaaccccaagtttggggaatgtgccccttaccccaccccccaacttccaggccatcctggaggctccagagaagcagcggacactcaatgagatctaccactggttcacacgcatgtttgccttcttcagaaaccatcctgccacctggaaggtgagctcctctgaggtggcggtgactgggatggcctcaagtgccatcgcagctcaaagtgggcaggcctgggtctgggctcataggcacattggggaggaacgggatgtgggttgttggtggtggctgctggcctcagaggttgacgcccacctgctccctgtccccggccttccacagaacgccatccgccacaacctgagtctgcacaagtgctttgtgcgggtggagagcgagaagggggctgtgtggaccgtggatgagctggagttccgcaagaaacggagccagaggcccagcaggtgttccaaccctacacctggcccctgacctcaagatcaaggaaaggaggatggacgaacaggggccaaactggtgggaggcagaggtggtgggggcagggatgataggccctggatgtgcccacagggaccaagaagtgaggtttccactgtcttgcctgccagggcccctgttcccccgctggcagccaccccctcccccatcatatcctttgccccaaggctgctcagaggggccccggtcctggccccagcccccacctccgccccagacacaccccccagtcgagccctgcagccaaacagagccttcacaaccagccacacagagcctgcctcagctgctcgcacagattacttcagggctggaaaagtcacacagacacacaaaatgtcacaatcctgtccctcactcaacacaaaccccaaaacacagagagcctgcctcagtacactcaaacaacctcaaagctgcatcatcacacaatcacacacaagcacagccctgacaacccacacaccccaaggcacgcacccacagccagcctcagggcccacaggggcactgtcaacacaggggtgtgcccagaggcctacacagaagcagcgtcagtaccctcaggatctgaggtcccaacacgtgctcgctcacacacacggcctgttagaattcacctgtgtatctcacgcatatgcacacgcacagccccccagtgggtctcttgagtcccgtgcagacacacacagccacacacactgccttgccaaaaataccccgtgtctcccctgccactcacctcactcccattccctgagccctgatccatgcctcagcttagactgcagaggaactactcatttatttgggatccaaggcccccaacccacagtaccgtccccaataaactgcagccgagctccccacatgctggactatcaccccatataagggttgcggtcagtgggcaggggtctgggtccaaggccgcagcaggaggaactggacagcggaggaagtagctagggcatgtgcttggccactgcctccagcaccccaaatccctgcctgaggctggggagagacctctgccggcggctcctcaggcctcccggacccggcctaggaggccagcgttctcctggcggagggctcggtagtcctcccggatcttctccaggttgctgagggtcttcttgcccagctctgtctcgatctgaggcaatgtgaacacatgccccctcagcacacacagcccctttcccagctcctgctcaccagcccccatcacagccactctgggcccctcccaccaactccaacagcctgctctgtcccatggccaggcctcgtgtggtgttccctctacccaaagcatccttcgccatgtggcaggattccccctacatctttaagctgaagcctctgcccatggccctgggaggcagacaggagggcccttggggtggaagctggggctcacagtaggccacttgcctgtcccaggtcacaggcactaaggggcagggctgggtgtccagccatcggctgtgtgtggctccacagcctctgtcagcataacctgaggaactgtccccccggcccgccttggctccccatcctgcccccaggcctcacctgctcctcgaggtctcgaacctcccgcatgatggtgcctgtgtcctcgatggtctggatgagctggctgcagttctggggacaacaggagcagaaggcttgcacccagtcccacccacccccagcagccccaccccaggcacatgtctcccctcacctcgtgcagagcagctagatacttataggccttccgaacagcatcgtccttcttggcatcctgaccagacacagggacctcaaaggtatcagtgggctgcccttgaccatctccatgccctaagaaggccaccctctcccaccaccccactagcttcatcctccatgaaacaaagccagccctgggtatcagtgcacctccagcctcgcacagggcctgggtctggaccccagccagccaattagcagatgcacaaggcagcagcccagcctcaccccactcacccccgcccaacctgccccacaccttgaacacaagctcatcagtcaccgcaaacgtccggtccagcttcccagatagggagttgatttccttctgaagctccttcgtatcagacaagatctggcagacaccatggcagccatgagcccctgcctggggcaggctggctagcagtggagggtcctcatgtgtaccagacagggactgtgtcactgtgtcaggggtgactgggatggattgtgtgtgactattctgtgttagagtgtgactggacagctctgcctgagggtgtgaggtccctgtgcggccacactatgcctgacagcccacatgacccaccctccatggccctggcagtgt

SEQ ID NO: 48 - DNA, 49 bp, Homo sapiens
acctccatcactctttgactgactgactcaatgcaccctcctccctgtc

SEQ ID NO: 49 - DNA, 55 bp, Homo sapiens
atgcttgtcctccatcccagacacagccctgcgttggcggaggtggcgctggctg

SEQ ID NO: 50 - DNA, 38 bp, Homo sapiens
tggacagggagactgaggccctagggaggctggctctg

SEQ ID NO: 51 - DNA, 25 bp, Homo sapiens
gggacaggcagaaattgtgcaaaaa

SEQ ID NO: 52 - DNA, 65 bp, Homo sapiens
tcagtctaactactgccctgagaggagagcactattactaccccaaattttagcacaggaaacca

SEQ ID NO: 53 - DNA, 42 bp, Homo sapiens
gagggccgagccctggtgggagagcaggctcagaatctccag

SEQ ID NO: 54 - DNA, 4049 bp, Homo sapiens
cgacatgctgggaacaccaagagtgaaatccagaatttgccctgaatcatgccacgctttctagaggaccagtttaaaaaaaaaaaaatagaaaaaaataaatgtccctagcatttcttccctggccctgtcactcactagctgagaggctttgagcaagctggctcatctctctgagctacctgtctcccctctactaaatggggataatcatagcacctacacaacacagcatgcacagcaggcctcacggagagaatggatctgatgttcatagcacagaaatcagtaaatgctggccagttatcttttgcagttaccaccatgcttcagttaccttgcccatgtttgctgcattcaatccaaccatgcaaagtgactgtcatttcccttagcagagaaggaaacggaggcaaggccacacagctgatgggcggagccgaatttaggagaggaatccaggaaactgtaggtgtggctccctaaatactgacactagctaacacctgtatgatactactttgagccagactcggttctgagcacctttactcttatcccgtaaagtagatgctataattctgttttacaggtgagggtcctgaggcatggtgtagttaaatgcgttggccaaggtcacaaggccagtaagtggcagcgccaggatttgaacccaggcaatctatgccagaatccacactcttaatgctgtaagaaaaaccatgctgcctgccccctttaaatgaagtctcagattatggtggggctcacaggtgggtgagtgggtacctgcctgcctgctcagttacccaggcacatctgcccaccagaccggagctagacctttctgaaccactcacagcctaaggccttaccagaaccagcagaacccacaaatgtcttactgcagccaggggcttctgaccaagcgtatacatacaaggtccaaaaagcattttcccatttccattcccagtcctcccaggaacagggaaatgtatacattttagggagaatctagtgatcctgggccagacttaggtgaccgcaaaaagaatcaggactagctgctgcccttaaagaactcatagcttgatagaggaaacctagggaaatcttctggggccccctggggtataactgattatttctccctgtccctaaatgatcacaggtggtgtggcaaaaaaacaagggacaaaaacttcaagtccagtacccatctggttctgtctctctgctagagccactgctttcttgtgagagcatgggctcagcccctcgcctccacaggactcaaaagtagattacagcgttaacagtagagtgcacaggcttcaaggtcaggcatgggtgaactggaagagccaggtgccatcactgcctcaaccagtttctccacctctggaatcctggtttcctgctctgtcagaaagagaatctgctctaccccccactggcaaagcccttggtccacactatgtcattgcagttctctccactccagcacactgctgatcattcacaccaagctcatttccaccccaggactttgcacttgctgtttcctctacctagaacacccttgttccatatatgcacataactgttattcatcatccaggacttagtttaaatgaaacctcctcagaaaagtcctccctgttccttttcctacaaactctcccccacctccccaccgtatctgcataactcttctttatcatcattcgggactcacctcctcaaaggccctccctttaacagcatgtctgacacagtcattccctcccaatctatccccttactcccttcagcagctaactttgtccctatttatcctatctgcttgcttgcttgttttttcaaactgtctcccataggagcctgtatgaatccttgagggtagggtagatgtctgtcttgttcagggctttacagtggaactcaataaatggaggaataaaaccccagttaaaacagtgcctagcacgtgtttgacctccatcactctttgactgactgactcaatgcaccctcctccctgtcctggagagcaggcctgaggggttcctgggccggaatgcttgtcctccatcccagacacagccctgcgttggcggaggtggcgctggctgacattacctgcgcctcaccggcttcatgcagctcttcagctgcctggcctcagcctccacgggaccctggcactcgggctgtggctccagctgcggcagctgctgctgctggggcagcccttcggcatcagtgggtgtgggagcgggtgcgatccggagcaggactgtgtagttgcggccgtggttgttggcccagaaagtgccctcaggggtctcatagcgcaccacgaagtcgaggcgcgccccatcgcccgcgccctcagcaaagggcagctggaaggcaaagcggtcggtgcggccgccgtcgtcgggcgaggaggcggatgcctggccgggacccaggccgagccccggatccaggatgggatctcctgctcctgttcctcccgctcctgcccacggcgggctgcgcgggacgtagcgcgctgggtggtcgcaaaaggaagcccagccgtcgtgtgaggcccgcacgtgcaccgccttctcgaaggagcggttcagcacgcgtaccaacccgcgcagcaccggcgggcggcccccaggcacccacaccccggcacccccggggaccgctccgggaggcggcagcagcgcctccagctccaccatgacgcgccccaagcgctccagacggcccggcgcgggcggcagcgaaaatgtggggaccaggtaaaaccccccgccagcggggacggggcacagcggtgagggctcggggcaagcctcctcttcctcctccccttcatccccatcctcgccatcgtcgtcctcgtcggccccgccgccgccgccgccatcttgcccggccgccgccgccatcttgcccgccccgggcccgccccacggccggtagcggcgcaactgcgccagcggcagccccaaggcctcgtcggcgaacagcaccctccgcggggccaccgccgcctcgaccgaggtgcggggctcacccgcggccggcgaggggggcgcggaatgccgcagcgggggctccacaggggccgtacgcgccatatcggcggcggcggcggcaccgacggcaccggcggcgggaccggcgggggcagggcctgaaggggcgggcagccaatgggaaggccagcgcggaggggtacggctcacgggggcataggcggtgagatgaagacaagtattgcagagggccaatgggcagccatgcacggatgacgtacagcgaattgagagccggagaagcacgcagccaatggggatgcccgggagtgggcggtgtagggggcgggatgatcgaggaatcaatggagaggccggaatgggggtggtgcgaaatccatgatgaagaaaacagaagcagacagctaatgcggaagtctgagcgagagaggcatgtgggcggtgggaaaagtggaatggctacaggcgatgagggcagccgggaacgaacgcagaggcccaaaaagtgggagatcccgcgggttgcgtaggcggtggaacggtagctagagagagagaacagccaatggagagccacgcgtgggatgacgacaatggctgcagcgagccaatggggaggcttgtgagcgtgcactgcggcttcgaaggggtggtgccaaggtggagctagccaatacgaaggctaaaaggagaccaagaggcgggtgtgtagggagccgagccaatggaggtggaggctgaaggcgggagcgaggacgagagctggcggatagccaatgagggagccagggtgaaggcgtagagacctcaaaggacagtactagtatgggatgagccaatgccgaggctagatagtgcagcgggacggagggaggacttggaggcaagatggggaaaaaagcagagccgacgggggcagtgtaggtggtgtgaagggaggcatgagtagccaataaggaggctggagaggaggacgctgtg

SEQ ID NO: 55 - DNA, 4055 bp, Homo sapiens
aaaaatagaaaaaaataaatgtccctagcatttcttccctggccctgtcactcactagctgagaggctttgagcaagctggctcatctctctgagctacctgtctcccctctactaaatggggataatcatagcacctacacaacacagcatgcacagcaggcctcacggagagaatggatctgatgttcatagcacagaaatcagtaaatgctggccagttatcttttgcagttaccaccatgcttcagttaccttgcccatgtttgctgcattcaatccaaccatgcaaagtgactgtcatttcccttagcagagaaggaaacggaggcaaggccacacagctgatgggcggagccgaatttaggagaggaatccaggaaactgtaggtgtggctccctaaatactgacactagctaacacctgtatgatactactttgagccagactcggttctgagcacctttactcttatcccgtaaagtagatgctataattctgttttacaggtgagggtcctgaggcatggtgtagttaaatgcgttggccaaggtcacaaggccagtaagtggcagcgccaggatttgaacccaggcaatctatgccagaatccacactcttaatgctgtaagaaaaaccatgctgcctgccccctttaaatgaagtctcagattatggtggggctcacaggtgggtgagtgggtacctgcctgcctgctcagttacccaggcacatctgcccaccagaccggagctagacctttctgaaccactcacagcctaaggccttaccagaaccagcagaacccacaaatgtcttactgcagccaggggcttctgaccaagcgtatacatacaaggtccaaaaagcattttcccatttccattcccagtcctcccaggaacagggaaatgtatacattttagggagaatctagtgatcctgggccagacttaggtgaccgcaaaaagaatcaggactagctgctgcccttaaagaactcatagcttgatagaggaaacctagggaaatcttctggggccccctggggtataactgattatttctccctgtccctaaatgatcacaggtggtgtggcaaaaaaacaagggacaaaaacttcaagtccagtacccatctggttctgtctctctgctagagccactgctttcttgtgagagcatgggctcagcccctcgcctccacaggactcaaaagtagattacagcgttaacagtagagtgcacaggcttcaaggtcaggcatgggtgaactggaagagccaggtgccatcactgcctcaaccagtttctccacctctggaatcctggtttcctgctctgtcagaaagagaatctgctctaccccccactggcaaagcccttggtccacactatgtcattgcagttctctccactccagcacactgctgatcattcacaccaagctcatttccaccccaggactttgcacttgctgtttcctctacctagaacacccttgttccatatatgcacataactgttattcatcatccaggacttagtttaaatgaaacctcctcagaaaagtcctccctgttccttttcctacaaactctcccccacctccccaccgtatctgcataactcttctttatcatcattcgggactcacctcctcaaaggccctccctttaacagcatgtctgacacagtcattccctcccaatctatccccttactcccttcagcagctaactttgtccctatttatcctatctgcttgcttgcttgttttttcaaactgtctcccataggagcctgtatgaatccttgagggtagggtagatgtctgtcttgttcagggctttacagtggaactcaataaatggaggaataaaaccccagttaaaacagtgcctagcacgtgtttgacctccatcactctttgactgactgactcaatgcaccctcctccctgtcctggagagcaggcctgaggggttcctgggccggaatgcttgtcctccatcccagacacagccctgcgttggcggaggtggcgctggctgacattacctgcgcctcaccggcttcatgcagctcttcagctgcctggcctcagcctccacgggaccctggcactcgggctgtggctccagctgcggcagctgctgctgctggggcagcccttcggcatcagtgggtgtgggagcgggtgcgatccggagcaggactgtgtagttgcggccgtggttgttggcccagaaagtgccctcaggggtctcatagcgcaccacgaagtcgaggcgcgccccatcgcccgcgccctcagcaaagggcagctggaaggcaaagcggtcggtgcggccgccgtcgtcgggcgaggaggcggatgcctggccgggacccaggccgagccccggatccaggatgggatctcctgctcctgttcctcccgctcctgcccacggcgggctgcgcgggacgtagcgcgctgggtggtcgcaaaaggaagcccagccgtcgtgtgaggcccgcacgtgcaccgccttctcgaaggagcggttcagcacgcgtaccaacccgcgcagcaccggcgggcggcccccaggcacccacaccccggcacccccggggaccgctccgggaggcggcagcagcgcctccagctccaccatgacgcgccccaagcgctccagacggcccggcgcgggcggcagcgaaaatgtggggaccaggtaaaaccccccgccagcggggacggggcacagcggtgagggctcggggcaagcctcctcttcctcctccccttcatccccatcctcgccatcgtcgtcctcgtcggccccgccgccgccgccgccatcttgcccggccgccgccgccatcttgcccgccccgggcccgccccacggccggtagcggcgcaactgcgccagcggcagccccaaggcctcgtcggcgaacagcaccctccgcggggccaccgccgcctcgaccgaggtgcggggctcacccgcggccggcgaggggggcgcggaatgccgcagcgggggctccacaggggccgtacgcgccatatcggcggcggcggcggcaccgacggcaccggcggcgggaccggcgggggcagggcctgaaggggcgggcagccaatgggaaggccagcgcggaggggtacggctcacgggggcataggcggtgagatgaagacaagtattgcagagggccaatgggcagccatgcacggatgacgtacagcgaattgagagccggagaagcacgcagccaatggggatgcccgggagtgggcggtgtagggggcgggatgatcgaggaatcaatggagaggccggaatgggggtggtgcgaaatccatgatgaagaaaacagaagcagacagctaatgcggaagtctgagcgagagaggcatgtgggcggtgggaaaagtggaatggctacaggcgatgagggcagccgggaacgaacgcagaggcccaaaaagtgggagatcccgcgggttgcgtaggcggtggaacggtagctagagagagagaacagccaatggagagccacgcgtgggatgacgacaatggctgcagcgagccaatggggaggcttgtgagcgtgcactgcggcttcgaaggggtggtgccaaggtggagctagccaatacgaaggctaaaaggagaccaagaggcgggtgtgtagggagccgagccaatggaggtggaggctgaaggcgggagcgaggacgagagctggcggatagccaatgagggagccagggtgaaggcgtagagacctcaaaggacagtactagtatgggatgagccaatgccgaggctagatagtgcagcgggacggagggaggacttggaggcaagatggggaaaaaagcagagccgacgggggcagtgtaggtggtgtgaagggaggcatgagtagccaataaggaggctggagaggaggacgctgtgtagacagagtctgaggtattgggtggccggacagcagaaccatagaacgcaggcagccattaggaaaaatgtgcttctcagggatgggg

SEQ ID NO: 56 - DNA, 4038 bp, Homo sapiens
tatgctccctctacttaagctaaccctaggtgagtattattatgttttaattatttcccaacatgacaggtaagaaaaacacattatcacattgttgaaatttgcatcttgtgattacttttactattcattggccattcatgcttttttttttttttttttttggttgtctggtcatgtccttactcctaatagggtgttcatcttatttttcccttattgatttgccacagctctttatttggaatggttattaacctttcatcagccattacatatatagcaaatattttccccaattcatcatttgctttttttctatttgtttatggtgttttttgtgatgcttatgatggttttatacagtcaaataggttagtctttttttctgtggcttctgtctctggttttgtgcttagaaagtcctttcctacttgaaaatgagataaatgttcacctatgttggcttctagtctcttttatggcttcattttttccatttactatagaggttaagagtgtgggtactggagccagactgtctgggacaaacccagcgtcaccccaagccctatgtgtgatttttagccaggcacttaacctctccatacctccatttcctcatatgtactgcaatggttataatagtaccttcctcaggagtctttgtttagattaaaatttttaaccacagtaaatacttagcacaaggcctgacacacaataaacccaagatcagcattaggtgttaaaacttatatcttgaatggatctgggcattttagggtatatgatgatggtgacatttcaaactgggcagggaggggttgttgggataatggactgactattcactcaataactttatcttctccctaattatctcagacacatttgttaaaccatactccatggtcctccagtttgaaatgccacattcatcacaaattcagttctctccatatgtgggtccatgtccaagctttctattctgttctcttccccagtatctgttcttataccagggccacactgttttgctgattgttgctttgcaatacaattcaatacccagccatgggtgtccctggcaccttgcccttctttattcttgattatttcaggcagcatcagttgaaccagccagagaccagcaaatgttcttatttgaggcaatcctcctctcgcacacatgcactctggctctccatgcatgtgtccatttctctcaatgtctctcactatctcttgttctctcttgctcgctctttgtgtgtgtctctttgtctctatgtatccctatctctcagccagtcccctggatagaggggcaattgtcaacttgaagccctgcagacacctaatgacttaaccagacagcgtagaagggccctggcccttgtctactccacgcctctccgtgctcagtgtagaagggcaaattgaagaccagagatctcagggcctcaccgaaatgcagcggcagagttgaaatccaagcctagatctcaggactctaggtgggaccctggttctggctctctccccaactgaaggcctcagtttacccctcagcacccagaagggggaaggggaacctgggctaccattcccccttctgccttctcacacgttggaccccaacttcccacaggttggacgatccacgatcacagtgtggggcccagcctcacaagagctgggctaggtgaggccccggactccataggtcaggaggcctagttggccagagcgtggtgatgatggaggcatgtcagtcagtcaggctgtgtgtccccagagctggtgctggtccccgaaaaccttgattgtggggcccctctagagagtctgatgatgggctctgtattggcgaaggctgaggcttttccagctccccccatgaggcccagaccaaaggcacaccagcctcaacctcctcctccccctgttgccatctctggcggagtggccatgtatttgggaacgttgttccagagtggacagggagactgaggccctagggaggctggctctgtttccaggcctggtaggcaagaggccctatgaagcagcaagctgcctgactttcagatggttccaaggagtttggacaccagggacactggcctacacatactgagactttgggaccgtagaccccacagtctgtggttttgagattctaggatcctttaaatctaagaaatgctgttctatgattctgaggtcctggtgttatactatttgaagaccccaggggtcccagtatctgtggagcctgcctggcactctcagagcttcaaacctgggtcctctccacaacccaagaagggccaggtcttcagagctaggggcttgtcatagtggccagatggacatcacctaccacatccaccagcacccatgtcaccccacctgggccaagcctgctgcaggacagggcagccagttctcggaacgaaacctgtggggtggggtatctgccctcttctcttcctccgtggtgtcgatgaagcccggcgcatccggccgccatgacgtcaatggcggaaaaatctgggcaagtcgggggctgtgacaacagggcccagatgcagaccccgatatgaaaacataatctgtgtcccagaaacatcccccattcagcttctgagaaacccagtcagaaagggacgtcccaacagacagtgcaggaagccggctgcccagcccggccctctaggtcctctacccccagacagatcatctccatgtccctgtctgagaatgtatctatgctttgctgagtcaggccatcccacatgtgtttggggagaattcttagctctggccaagtgtccaggcagcttcagaagtgaccacaggccagccacatgggccaggccagagtggtggaaaacatccatttgcaccgaaatcggtattagtttgttctggctgctataacaaagtaccacaactgagtggcttcagcaacagaaattgatcatctcacagttctggaggccagagtccaagatcaaggtgttgccagggttggttccttctgggggccataagggagaagctgctccaggcctctcccccagcttctggtggttgctggcaatctttgttatttcttggcttgaaggagcatcaccccatctctggcttcattcattcactcaccttctcatctcaccagtgctctcccaggcccttgttcggagcctccacagacccacactcctgtttctcacgcagtaatgttctaagcccccaggagactaagaacttaatacctggattctcacactcatctccctcagcaccacagctctgacaaccacccccaggaggtgacagcaaagaaaggaaggagcaactgctcccccagaacccttctatactcccccgggctgctctcagcagctgtgtgcccaactcagtgctgtgaggtggaacggggagatggagacacacacacacacacaccagagagtttataaaatgtgcacacggaaacacttcctaaagaaagaagtggagttctcaagtcactatgggactacggaactcggcatctgagcatccccttctgtataatggggttggctgggcagtcccttccagctctggcttcctctcagaccaggattataggatcctgaaaagccagtgcttccctcagggagtggaaggttctggggctcagcagggggcccggagccattgtggagggctttcaaggtgaggacaatagaagagcaggtcttgcgtggcttggacagggaaagaggagaaggagtgggcatttgaggcagggggtgtagcatgagccaggcttgagggccagaaattggggtgaactctgatgggggctgggtagagaagcttctacaggccccagctcaagagaccccatctctcctcctctctgtcacttgccatgctggatccgtgcatgatcacactcctggactcgcctccttgccctgagatccagacccccgtattcagctgccccctcagctcctccactcacatatttaa

SEQ ID NO: 57 - DNA, 4025 bp, Homo sapiens
catggtaaaaccccgactctactaaaaatacaaaacttagtgtgctcctgtaattccagctacttgggggctgaggcaggagaatggcttgaacccaggaagtggaggttgcagtgaagcgacatcacgccattgcactccagcctgggcaacagagagagactccgtctcaaaaacaaaacaaaaaaaaacaaaaaacaaaacaaaacaaaacaaaaaaaaacccacaagatattattgttaacttcattagccatgaaaatggtccagtggttaccttgaaaactgaatgtccttatgagttaagagatgtagtcctaagtatttagagctgaaatgacatgatgtctgagatttgctttaaaataatacagcaacaaagaaaaagttgggagagaaaagatgaagaaaagttggcaaaatggtacataggattcactagaatattctctctacatttatgtttgaaaattactacagatataaaaacaaaaacagacagccaggcgtggtggctcacgcctgtaatcacaacactttgggaggccgaggcagatggatcatgaggtcaagagatcgagaccatcctggccaacatggtgaaaccctgtctctactaaaaatacaaaaattagctgggcgtggtggtgcatgcctgtagtcctagctatgtgggaggctgaggcaggagaatcacttgaacccaggaggcagaggttgcagtgagctgagatcgtaccactgtactccagcctgggtgacagagcgagactccatctcaaaaaataataataatgataaaaaaataaaaatgtaaaaagacacagaggtgaagacagaaagagaggacagataaaaaagtggacagaccaggagggggccgacacagaggtggagaaaaagaggggcagacagagatgtggacacagaggaagaggagacagataaagaggcagacagaaggggaggggggccaaatacagaggtggacagagaggaagaggggacagatgtaaaggtggacagaaggggaggggtactgatacctgggtgaacacagaggaagagggaacagaaataggagagcagaatggagggagggaaaaagagaagtggacagagaggaaaaggggacagataaagaaatggacagagggagagggtgacagagaggtggacagagagaaggaggggacagatgcagaggtggacagaggaagaggggacagataagtggacagaggggaagaggggacagatacagagatggatagagaagaagaggggacaaagaggttgacagagaagaagagggggctcggcatggtggctcatgcctgtaatcccagcactttggaaggccaaggtgggtggattgcttcaggtcaggagttcgagaccagcctggtcaacatggcaaaaccccatctctacaaaaaatacaaaaattagccgggcgcacgcacctgtagacccagctactcagatgcctgaggtgggaagattgcttgagcccgggaatttgaggctgccttgagccctgatcatgccattgtagtccagcctgggtgacagagcgagacaccgtctcaaaaaaaaagaagaagagaggacagataaagagatggacagaaggggaggagggacaaatacagaggtggacagagaggaagaagggagagataaggggacagagggaaggggcaacagatacagaggtggacagagaggaagaggagagagattaagaagtaaacagaggcagaggggtgacagatatataggtggacagcaaggaaggggagagatacagaggtggacagagcagaaggggacacagataaaaaggtgcacagagaagaagaggggacagataaagaagtagacagaggagaagggggaacagatagatagacagagcaagagaggaattcagtacagaaacgaggagacagagaggtaagaaagaggagcagcaaaaacacagaactagaataatggggacaggcagaaattgtgcaaaaacctagaaaccagaaaaatgaacatcagtgacaagtgcagaaacagagaaagattagggccgggtgcggtggctcatgcctgtaatcccaacactttgggaggccaaggtgggcagatcacctgaggtcaggaattcgagaccagcctagccaacatggcaaaaccctgtctctactaaaaatataaaaattagccaggtgtggtggtgcaagcctgtaatcccagctacttgggaggctgaggcaggagaatcgcttgaacccgggagatggaggttgcagtgtgctgagatcacgccactgcactccagcctgggtgacagagcaagactccaaatgaatgaatgaattaatgaatgatgaaggcaggtagccaatctggattgctccagttgccaggaatctcaagcacattattcagtctaactactgccctgagaggagagcactattactaccccaaattttagcacaggaaaccaaggctctgaggagggatactgacttgtcccaggttctccttttttctgactccagtgttctttcaggtggggagctaggtaagcacacacagaggggaaacaatggaagggagggacaaagtggggaaggagagcagaggaccagcgggagtgtcagtgagcagcagcccagacagcagggagccaggcatctggctgtacctggggtgggaggcgggatgtccggtggacccagtcctcatcccctggccggtcccggcccgtctgctggcagagctgcagggcatggtgttcgaggagcgaggccacccttccaacaggctgaggcacctgggtagggactggaagcagcaggggactcgcctggaactcccgtggctctggaggcaggaacagagtcagctggccctgccgcatggcaacgctatgaggttcccccccaccttcctcctcacccctccccacagcctcatgctcaccacctctggaactcaattctggcacgaccagcctgctggcatggaaaggcttctggagggccgagccctggtgggagagcaggctcagaatctccagggtgaagtgggatgagggttgccaggggtagggggccaaaaccctgggcacccagacggggacaagagaagatccatgggagtcaggggtctcacctggaggtgctgcagcttgggagtgcgaaggtggggcgggacccaaggcagtgccagctggtcccgaatttggctcccaatggcccggaggagaatagctgagtcacctatgggggatagggaggaagtgaatcagatgtcaatgctgcaaatccaaaagggcataccctaggagaccagcctccactcctgacccccatccagagatacacatctatccagcttgcgttctcacgttcagtcattcaacaaacaccgagcacctactatgtacaggtcgctgttctagacactagggctacttcgtggaacaaactggataaaggtccctgccctcagggagccggcaagctagcagaggagagagatcatgaataggatcctgaataccatccagactgcagccaggtggggatcaggagagggctgcggagaggaggttaacctcaaagaggtaagggagtgaaccatgagggtacctaggggaaaggtaaccaacgatacaaaggtgcagaggcgggagtgtactggggtatgtttgagtagcacccaggaggcccaagtggttagagcgaagtgagagagagggagggcacaggggttgagtcagggaggcccctccccgcaccaacgcaccaccggggtcagctcaacctcagccccctgccccctgccctgtagcccctctctgatgcctaatcctcctgcctagctctcctgaaggcacataccgccacccctacccatcaacctttttaccacctctacctctctcagccctacagcccctagaaggccctcctctcccctcaccgcccccgcccacatcccagacacccagtacctgc

SEQ ID NO: 58 - DNA, 4065 bp, Homo sapiens
gaatattctctctacatttatgtttgaaaattactacagatataaaaacaaaaacagacagccaggcgtggtggctcacgcctgtaatcacaacactttgggaggccgaggcagatggatcatgaggtcaagagatcgagaccatcctggccaacatggtgaaaccctgtctctactaaaaatacaaaaattagctgggcgtggtggtgcatgcctgtagtcctagctatgtgggaggctgaggcaggagaatcacttgaacccaggaggcagaggttgcagtgagctgagatcgtaccactgtactccagcctgggtgacagagcgagactccatctcaaaaaataataataatgataaaaaaataaaaatgtaaaaagacacagaggtgaagacagaaagagaggacagataaaaaagtggacagaccaggagggggccgacacagaggtggagaaaaagaggggcagacagagatgtggacacagaggaagaggagacagataaagaggcagacagaaggggaggggggccaaatacagaggtggacagagaggaagaggggacagatgtaaaggtggacagaaggggaggggtactgatacctgggtgaacacagaggaagagggaacagaaataggagagcagaatggagggagggaaaaagagaagtggacagagaggaaaaggggacagataaagaaatggacagagggagagggtgacagagaggtggacagagagaaggaggggacagatgcagaggtggacagaggaagaggggacagataagtggacagaggggaagaggggacagatacagagatggatagagaagaagaggggacaaagaggttgacagagaagaagagggggctcggcatggtggctcatgcctgtaatcccagcactttggaaggccaaggtgggtggattgcttcaggtcaggagttcgagaccagcctggtcaacatggcaaaaccccatctctacaaaaaatacaaaaattagccgggcgcacgcacctgtagacccagctactcagatgcctgaggtgggaagattgcttgagcccgggaatttgaggctgccttgagccctgatcatgccattgtagtccagcctgggtgacagagcgagacaccgtctcaaaaaaaaagaagaagagaggacagataaagagatggacagaaggggaggagggacaaatacagaggtggacagagaggaagaagggagagataaggggacagagggaaggggcaacagatacagaggtggacagagaggaagaggagagagattaagaagtaaacagaggcagaggggtgacagatatataggtggacagcaaggaaggggagagatacagaggtggacagagcagaaggggacacagataaaaaggtgcacagagaagaagaggggacagataaagaagtagacagaggagaagggggaacagatagatagacagagcaagagaggaattcagtacagaaacgaggagacagagaggtaagaaagaggagcagcaaaaacacagaactagaataatggggacaggcagaaattgtgcaaaaacctagaaaccagaaaaatgaacatcagtgacaagtgcagaaacagagaaagattagggccgggtgcggtggctcatgcctgtaatcccaacactttgggaggccaaggtgggcagatcacctgaggtcaggaattcgagaccagcctagccaacatggcaaaaccctgtctctactaaaaatataaaaattagccaggtgtggtggtgcaagcctgtaatcccagctacttgggaggctgaggcaggagaatcgcttgaacccgggagatggaggttgcagtgtgctgagatcacgccactgcactccagcctgggtgacagagcaagactccaaatgaatgaatgaattaatgaatgatgaaggcaggtagccaatctggattgctccagttgccaggaatctcaagcacattattcagtctaactactgccctgagaggagagcactattactaccccaaattttagcacaggaaaccaaggctctgaggagggatactgacttgtcccaggttctccttttttctgactccagtgttctttcaggtggggagctaggtaagcacacacagaggggaaacaatggaagggagggacaaagtggggaaggagagcagaggaccagcgggagtgtcagtgagcagcagcccagacagcagggagccaggcatctggctgtacctggggtgggaggcgggatgtccggtggacccagtcctcatcccctggccggtcccggcccgtctgctggcagagctgcagggcatggtgttcgaggagcgaggccacccttccaacaggctgaggcacctgggtagggactggaagcagcaggggactcgcctggaactcccgtggctctggaggcaggaacagagtcagctggccctgccgcatggcaacgctatgaggttcccccccaccttcctcctcacccctccccacagcctcatgctcaccacctctggaactcaattctggcacgaccagcctgctggcatggaaaggcttctggagggccgagccctggtgggagagcaggctcagaatctccagggtgaagtgggatgagggttgccaggggtagggggccaaaaccctgggcacccagacggggacaagagaagatccatgggagtcaggggtctcacctggaggtgctgcagcttgggagtgcgaaggtggggcgggacccaaggcagtgccagctggtcccgaatttggctcccaatggcccggaggagaatagctgagtcacctatgggggatagggaggaagtgaatcagatgtcaatgctgcaaatccaaaagggcataccctaggagaccagcctccactcctgacccccatccagagatacacatctatccagcttgcgttctcacgttcagtcattcaacaaacaccgagcacctactatgtacaggtcgctgttctagacactagggctacttcgtggaacaaactggataaaggtccctgccctcagggagccggcaagctagcagaggagagagatcatgaataggatcctgaataccatccagactgcagccaggtggggatcaggagagggctgcggagaggaggttaacctcaaagaggtaagggagtgaaccatgagggtacctaggggaaaggtaaccaacgatacaaaggtgcagaggcgggagtgtactggggtatgtttgagtagcacccaggaggcccaagtggttagagcgaagtgagagagagggagggcacaggggttgagtcagggaggcccctccccgcaccaacgcaccaccggggtcagctcaacctcagccccctgccccctgccctgtagcccctctctgatgcctaatcctcctgcctagctctcctgaaggcacataccgccacccctacccatcaacctttttaccacctctacctctctcagccctacagcccctagaaggccctcctctcccctcaccgcccccgcccacatcccagacacccagtacctgcaggctggtctgcatcctcagaggcatcggtgggcagacgctcagccaagaagagaagcaggtctcggaggtcaggctcactggggtagaggaagttctgatagccaagctccaagggatagcccaggtcctgagggttggtgggcggctatcaggaagcaggcagggtcctcctgccctgggagacttgggcctaggctgaaaacgctcccactttctcactaaccaccaccctcccaacctcccccagctccccaaggcctctgggccctggggggagtcacagagtgatgatagtcaacgctacagagaacaagaaacaagattaaagctctggcctttctatgactcaaaatccagaggccataaaagaaaagatgggtacttttgaatacatgaaaagaaagaaaatatttaaagaaaatagaataagcaaagtcaaaagttaatgacaagttgggaaaaaatatttggagcccata

SEQ ID NO: 59 - DNA, 4042 bp, Homo sapiens
tgatacctgggtgaacacagaggaagagggaacagaaataggagagcagaatggagggagggaaaaagagaagtggacagagaggaaaaggggacagataaagaaatggacagagggagagggtgacagagaggtggacagagagaaggaggggacagatgcagaggtggacagaggaagaggggacagataagtggacagaggggaagaggggacagatacagagatggatagagaagaagaggggacaaagaggttgacagagaagaagagggggctcggcatggtggctcatgcctgtaatcccagcactttggaaggccaaggtgggtggattgcttcaggtcaggagttcgagaccagcctggtcaacatggcaaaaccccatctctacaaaaaatacaaaaattagccgggcgcacgcacctgtagacccagctactcagatgcctgaggtgggaagattgcttgagcccgggaatttgaggctgccttgagccctgatcatgccattgtagtccagcctgggtgacagagcgagacaccgtctcaaaaaaaaagaagaagagaggacagataaagagatggacagaaggggaggagggacaaatacagaggtggacagagaggaagaagggagagataaggggacagagggaaggggcaacagatacagaggtggacagagaggaagaggagagagattaagaagtaaacagaggcagaggggtgacagatatataggtggacagcaaggaaggggagagatacagaggtggacagagcagaaggggacacagataaaaaggtgcacagagaagaagaggggacagataaagaagtagacagaggagaagggggaacagatagatagacagagcaagagaggaattcagtacagaaacgaggagacagagaggtaagaaagaggagcagcaaaaacacagaactagaataatggggacaggcagaaattgtgcaaaaacctagaaaccagaaaaatgaacatcagtgacaagtgcagaaacagagaaagattagggccgggtgcggtggctcatgcctgtaatcccaacactttgggaggccaaggtgggcagatcacctgaggtcaggaattcgagaccagcctagccaacatggcaaaaccctgtctctactaaaaatataaaaattagccaggtgtggtggtgcaagcctgtaatcccagctacttgggaggctgaggcaggagaatcgcttgaacccgggagatggaggttgcagtgtgctgagatcacgccactgcactccagcctgggtgacagagcaagactccaaatgaatgaatgaattaatgaatgatgaaggcaggtagccaatctggattgctccagttgccaggaatctcaagcacattattcagtctaactactgccctgagaggagagcactattactaccccaaattttagcacaggaaaccaaggctctgaggagggatactgacttgtcccaggttctccttttttctgactccagtgttctttcaggtggggagctaggtaagcacacacagaggggaaacaatggaagggagggacaaagtggggaaggagagcagaggaccagcgggagtgtcagtgagcagcagcccagacagcagggagccaggcatctggctgtacctggggtgggaggcgggatgtccggtggacccagtcctcatcccctggccggtcccggcccgtctgctggcagagctgcagggcatggtgttcgaggagcgaggccacccttccaacaggctgaggcacctgggtagggactggaagcagcaggggactcgcctggaactcccgtggctctggaggcaggaacagagtcagctggccctgccgcatggcaacgctatgaggttcccccccaccttcctcctcacccctccccacagcctcatgctcaccacctctggaactcaattctggcacgaccagcctgctggcatggaaaggcttctggagggccgagccctggtgggagagcaggctcagaatctccagggtgaagtgggatgagggttgccaggggtagggggccaaaaccctgggcacccagacggggacaagagaagatccatgggagtcaggggtctcacctggaggtgctgcagcttgggagtgcgaaggtggggcgggacccaaggcagtgccagctggtcccgaatttggctcccaatggcccggaggagaatagctgagtcacctatgggggatagggaggaagtgaatcagatgtcaatgctgcaaatccaaaagggcataccctaggagaccagcctccactcctgacccccatccagagatacacatctatccagcttgcgttctcacgttcagtcattcaacaaacaccgagcacctactatgtacaggtcgctgttctagacactagggctacttcgtggaacaaactggataaaggtccctgccctcagggagccggcaagctagcagaggagagagatcatgaataggatcctgaataccatccagactgcagccaggtggggatcaggagagggctgcggagaggaggttaacctcaaagaggtaagggagtgaaccatgagggtacctaggggaaaggtaaccaacgatacaaaggtgcagaggcgggagtgtactggggtatgtttgagtagcacccaggaggcccaagtggttagagcgaagtgagagagagggagggcacaggggttgagtcagggaggcccctccccgcaccaacgcaccaccggggtcagctcaacctcagccccctgccccctgccctgtagcccctctctgatgcctaatcctcctgcctagctctcctgaaggcacataccgccacccctacccatcaacctttttaccacctctacctctctcagccctacagcccctagaaggccctcctctcccctcaccgcccccgcccacatcccagacacccagtacctgcaggctggtctgcatcctcagaggcatcggtgggcagacgctcagccaagaagagaagcaggtctcggaggtcaggctcactggggtagaggaagttctgatagccaagctccaagggatagcccaggtcctgagggttggtgggcggctatcaggaagcaggcagggtcctcctgccctgggagacttgggcctaggctgaaaacgctcccactttctcactaaccaccaccctcccaacctcccccagctccccaaggcctctgggccctggggggagtcacagagtgatgatagtcaacgctacagagaacaagaaacaagattaaagctctggcctttctatgactcaaaatccagaggccataaaagaaaagatgggtacttttgaatacatgaaaagaaagaaaatatttaaagaaaatagaataagcaaagtcaaaagttaatgacaagttgggaaaaaatatttggagcccatatcataggtaaagagcaaatctacctattatagaaagagtgcctaaaaataaacaggacaaaaagaccagaagcacaatagctcagaacaaaaggactcatgagggttctgatggggactgaggaaacaggccaggagagaaagaaagcctttttcctttttttttttttttttttgagacagggtctcgctctgtcgctcaggctggagtgcagtagcgtgatcttggctcactggaacctctgcctcctgggctcaagtgatcctcccacgcagcctcccgagtagctgggattacaggtgcatgccaccacacccggctaatttttgtattttcagtgtagacagggctacaccatgttggccaggctggtctcaaactcctgggctcaagcaatctgcccacctcagccacccaaagtgctgggattacaggtgggaatcaccacacccggcctaggaaagcctttttcttccagagttgccactgctttggaactgcatagactctgaaagcagacttcctggattcaaacccaagctttgcctcttaccaactatacgacctcaggcagat

SEQ ID NO: 60 - DNA, 15 bp, Homo sapiens
cataacttggtggct

SEQ ID NO: 61 - DNA, 15 bp, Homo sapiens
acataacttggtggc

SEQ ID NO: 62 - DNA, 15 bp, Homo sapiens
cacataacttggtgg

SEQ ID NO: 63 - DNA, 15 bp, Homo sapiens
ccacataacttggtg

SEQ ID NO: 64 - DNA, 15 bp, Homo sapiens
cccacataacttggt

SEQ ID NO: 65 - DNA, 15 bp, Homo sapiens
ccccacataacttgg

SEQ ID NO: 66 - DNA, 15 bp, Homo sapiens
gccccacataacttg

SEQ ID NO: 67 - DNA, 15 bp, Homo sapiens
tgccccacataactt

SEQ ID NO: 68 - DNA, 15 bp, Homo sapiens
gtgccccacataact

SEQ ID NO: 69 - DNA, 15 bp, Homo sapiens
agtgccccacataac

SEQ ID NO: 70 - DNA, 15 bp, Homo sapiens
cagtgccccacataa

SEQ ID NO: 71 - DNA, 15 bp, Homo sapiens
gcagtgccccacata

SEQ ID NO: 72 - DNA, 15 bp, Homo sapiens
agcagtgccccacat

SEQ ID NO: 73 - DNA, 15 bp, Homo sapiens
aagcagtgccccaca

SEQ ID NO: 74 - DNA, 15 bp, Homo sapiens
aaagcagtgccccac

SEQ ID NO: 75 - DNA, 15 bp, Homo sapiens
caaagcagtgcccca

SEQ ID NO: 76 - DNA, 15 bp, Homo sapiens
gcaaagcagtgcccc

SEQ ID NO: 77 - DNA, 15 bp, Homo sapiens
ggcaaagcagtgccc

SEQ ID NO: 78 - DNA, 15 bp, Homo sapiens
aggcaaagcagtgcc

SEQ ID NO: 79 - DNA, 15 bp, Homo sapiens
aaggcaaagcagtgc

SEQ ID NO: 80 - DNA, 15 bp, Homo sapiens
gaaggcaaagcagtg

SEQ ID NO: 81 - DNA, 15 bp, Homo sapiens
ggaaggcaaagcagt

SEQ ID NO: 82 - DNA, 15 bp, Homo sapiens
gggaaggcaaagcag

SEQ ID NO: 83 - DNA, 15 bp, Homo sapiens
ggggaaggcaaagca

SEQ ID NO: 84 - DNA, 15 bp, Homo sapiens
tggggaaggcaaagc

SEQ ID NO: 85 - DNA, 15 bp, Homo sapiens
ttggggaaggcaaag

SEQ ID NO: 86 - DNA, 15 bp, Homo sapiens
gttggggaaggcaaa

SEQ ID NO: 87 - DNA, 15 bp, Homo sapiens
tgttggggaaggcaa

SEQ ID NO: 88 - DNA, 15 bp, Homo sapiens
ttgttggggaaggca

SEQ ID NO: 89 - DNA, 15 bp, Homo sapiens
cttgttggggaaggc

SEQ ID NO: 90 - DNA, 15 bp, Homo sapiens
acttgttggggaagg

SEQ ID NO: 91 - DNA, 15 bp, Homo sapiens
cacttgttggggaag

SEQ ID NO: 92 - DNA, 15 bp, Homo sapiens
acacttgttggggaa

SEQ ID NO: 93 - DNA, 15 bp, Homo sapiens
cacacttgttgggga

SEQ ID NO: 94 - DNA, 15 bp, Homo sapiens
acacacttgttgggg

SEQ ID NO: 95 - DNA, 15 bp, Homo sapiens
gacacacttgttggg

SEQ ID NO: 96 - DNA, 15 bp, Homo sapiens
tgacacacttgttgg

SEQ ID NO: 97 - DNA, 15 bp, Homo sapiens
ctgacacacttgttg

SEQ ID NO: 98 - DNA, 15 bp, Homo sapiens
gctgacacacttgtt

SEQ ID NO: 99 - DNA, 15 bp, Homo sapiens
ggctgacacacttgt

SEQ ID NO: 100 - DNA, 15 bp, Homo sapiens
aggctgacacacttg

SEQ ID NO: 101 - DNA, 15 bp, Homo sapiens
gaggctgacacactt

SEQ ID NO: 102 - DNA, 15 bp, Homo sapiens
tgaggctgacacact

SEQ ID NO: 103 - DNA, 15 bp, Homo sapiens
ttgaggctgacacac

SEQ ID NO: 104 - DNA, 15 bp, Homo sapiens
gttgaggctgacaca

SEQ ID NO: 105 - DNA, 15 bp, Homo sapiens
agttgaggctgacac

SEQ ID NO: 106 - DNA, 15 bp, Homo sapiens
gagttgaggctgaca

SEQ ID NO: 107 - DNA, 15 bp, Homo sapiens
agagttgaggctgac

SEQ ID NO: 108 - DNA, 15 bp, Homo sapiens
cagagttgaggctga

SEQ ID NO: 109 - DNA, 15 bp, Homo sapiens
ccagagttgaggctg

SEQ ID NO: 110 - DNA, 15 bp, Homo sapiens
cccagagttgaggct

SEQ ID NO: 111 - DNA, 15 bp, Homo sapiens
tcccagagttgaggc

SEQ ID NO: 112 - DNA, 15 bp, Homo sapiens
gtcccagagttgagg

SEQ ID NO: 113 - DNA, 15 bp, Homo sapiens
agtcccagagttgag

SEQ ID NO: 114 - DNA, 15 bp, Homo sapiens
aagtcccagagttga

SEQ ID NO: 115 - DNA, 15 bp, Homo sapiens
caagtcccagagttg

SEQ ID NO: 116 - DNA, 15 bp, Homo sapiens
gcaagtcccagagtt

SEQ ID NO: 117 - DNA, 15 bp, Homo sapiens
cgcaagtcccagagt

SEQ ID NO: 118 - DNA, 15 bp, Homo sapiens
ccgcaagtcccagag

SEQ ID NO: 119 - DNA, 15 bp, Homo sapiens
cccgcaagtcccaga

SEQ ID NO: 120 - DNA, 15 bp, Homo sapiens
acccgcaagtcccag

SEQ ID NO: 121 - DNA, 15 bp, Homo sapiens
cacccgcaagtccca

SEQ ID NO: 122 - DNA, 15 bp, Homo sapiens
tcacccgcaagtccc

SEQ ID NO: 123 - DNA, 15 bp, Homo sapiens
atcacccgcaagtcc

SEQ ID NO: 124 - DNA, 15 bp, Homo sapiens
gatcacccgcaagtc

SEQ ID NO: 125 - DNA, 15 bp, Homo sapiens
ggatcacccgcaagt

SEQ ID NO: 126 - DNA, 15 bp, Homo sapiens
tggatcacccgcaag

SEQ ID NO: 127 - DNA, 15 bp, Homo sapiens
ctggatcacccgcaa

SEQ ID NO: 128 - DNA, 15 bp, Homo sapiens
actggatcacccgca

SEQ ID NO: 129 - DNA, 15 bp, Homo sapiens
cactggatcacccgc

SEQ ID NO: 130 - DNA, 15 bp, Homo sapiens
ccactggatcacccg

SEQ ID NO: 131 - DNA, 15 bp, Homo sapiens
cccactggatcaccc

SEQ ID NO: 132 - DNA, 15 bp, Homo sapiens
ccccactggatcacc

SEQ ID NO: 133 - DNA, 15 bp, Homo sapiens
accccactggatcac

SEQ ID NO: 134 - DNA, 15 bp, Homo sapiens
taccccactggatca

SEQ ID NO: 135 - DNA, 15 bp, Homo sapiens
ctaccccactggatc

SEQ ID NO: 136 - DNA, 15 bp, Homo sapiens
tctaccccactggat

SEQ ID NO: 137 - DNA, 15 bp, Homo sapiens
ctctaccccactgga

SEQ ID NO: 138 - DNA, 15 bp, Homo sapiens
cctctaccccactgg

SEQ ID NO: 139 - DNA, 15 bp, Homo sapiens
ccctctaccccactg

SEQ ID NO: 140 - DNA, 15 bp, Homo sapiens
tccctctaccccact

SEQ ID NO: 141 - DNA, 15 bp, Homo sapiens
ctccctctaccccac

SEQ ID NO: 142 - DNA, 15 bp, Homo sapiens
tctccctctacccca

SEQ ID NO: 143 - DNA, 15 bp, Homo sapiens
ctctccctctacccc

SEQ ID NO: 144 - DNA, 15 bp, Homo sapiens
gctctccctctaccc

SEQ ID NO: 145 - DNA, 15 bp, Homo sapiens
tgctctccctctacc

SEQ ID NO: 146 - DNA, 15 bp, Homo sapiens
ctgctctccctctac

SEQ ID NO: 147 - DNA, 15 bp, Homo sapiens
actgctctccctcta

SEQ ID NO: 148 - DNA, 15 bp, Homo sapiens
aactgctctccctct

SEQ ID NO: 149 - DNA, 15 bp, Homo sapiens
aaactgctctccctc

SEQ ID NO: 150 - DNA, 15 bp, Homo sapiens
gaaactgctctccct

SEQ ID NO: 151 - DNA, 15 bp, Homo sapiens
agaaactgctctccc

SEQ ID NO: 152 - DNA, 15 bp, Homo sapiens
gagaaactgctctcc

SEQ ID NO: 153 - DNA, 15 bp, Homo sapiens
cgagaaactgctctc

SEQ ID NO: 154 - DNA, 15 bp, Homo sapiens
acgagaaactgctct

SEQ ID NO: 155 - DNA, 15 bp, Homo sapiens
cacgagaaactgctc

SEQ ID NO: 156 - DNA, 15 bp, Homo sapiens
gcacgagaaactgct

SEQ ID NO: 157 - DNA, 15 bp, Homo sapiens
ggcacgagaaactgc

SEQ ID NO: 158 - DNA, 15 bp, Homo sapiens
tggcacgagaaactg

SEQ ID NO: 159 - DNA, 15 bp, Homo sapiens
atggcacgagaaact

SEQ ID NO: 160 - DNA, 15 bp, Homo sapiens
catggcacgagaaac

SEQ ID NO: 161 - DNA, 15 bp, Homo sapiens
tcatggcacgagaaa

SEQ ID NO: 162 - DNA, 15 bp, Homo sapiens
ctcatggcacgagaa

SEQ ID NO: 163 - DNA, 15 bp, Homo sapiens
gctcatggcacgaga

SEQ ID NO: 164 - DNA, 15 bp, Homo sapiens
agctcatggcacgag

SEQ ID NO: 165 - DNA, 15 bp, Homo sapiens
aagctcatggcacga

SEQ ID NO: 166 - DNA, 15 bp, Homo sapiens
gaagctcatggcacg

SEQ ID NO: 167 - DNA, 15 bp, Homo sapiens
agaagctcatggcac

SEQ ID NO: 168 - DNA, 15 bp, Homo sapiens
aagaagctcatggca

SEQ ID NO: 169 - DNA, 15 bp, Homo sapiens
gaagaagctcatggc

SEQ ID NO: 170 - DNA, 15 bp, Homo sapiens
tgaagaagctcatgg

SEQ ID NO: 171 - DNA, 15 bp, Homo sapiens
ttgaagaagctcatg

SEQ ID NO: 172 - DNA, 15 bp, Homo sapiens
gttgaagaagctcat

SEQ ID NO: 173 - DNA, 15 bp, Homo sapiens
tgttgaagaagctca

SEQ ID NO: 174 - DNA, 15 bp, Homo sapiens
ctgttgaagaagctc

SEQ ID NO: 175 - DNA, 15 bp, Homo sapiens
gctgttgaagaagct

SEQ ID NO: 176 - DNA, 15 bp, Homo sapiens
ggctgttgaagaagc

SEQ ID NO: 177 - DNA, 15 bp, Homo sapiens
tggctgttgaagaag

SEQ ID NO: 178 - DNA, 15 bp, Homo sapiens
atggctgttgaagaa

SEQ ID NO: 179 - DNA, 15 bp, Homo sapiens
catggctgttgaaga

SEQ ID NO: 180 - DNA, 15 bp, Homo sapiens
tcatggctgttgaag

SEQ ID NO: 181 - DNA, 15 bp, Homo sapiens
gtcatggctgttgaa

SEQ ID NO: 182 - DNA, 15 bp, Homo sapiens
agtcatggctgttga

SEQ ID NO: 183 - DNA, 15 bp, Homo sapiens
aagtcatggctgttg

SEQ ID NO: 184 - DNA, 15 bp, Homo sapiens
gaagtcatggctgtt

SEQ ID NO: 185 - DNA, 15 bp, Homo sapiens
tgaagtcatggctgt

SEQ ID NO: 186 - DNA, 15 bp, Homo sapiens
atgaagtcatggctg

SEQ ID NO: 187 - DNA, 15 bp, Homo sapiens
aatgaagtcatggct

SEQ ID NO: 188 - DNA, 15 bp, Homo sapiens
gaatgaagtcatggc

SEQ ID NO: 189 - DNA, 15 bp, Homo sapiens
agaatgaagtcatgg

SEQ ID NO: 190 - DNA, 15 bp, Homo sapiens
aagaatgaagtcatg

SEQ ID NO: 191 - DNA, 15 bp, Homo sapiens
aaagaatgaagtcat

SEQ ID NO: 192 - DNA, 15 bp, Homo sapiens
caaagaatgaagtca

SEQ ID NO: 193 - DNA, 15 bp, Homo sapiens
ccaaagaatgaagtc

SEQ ID NO: 194 - DNA, 15 bp, Homo sapiens
gccaaagaatgaagt

SEQ ID NO: 195 - DNA, 15 bp, Homo sapiens
ggccaaagaatgaag

SEQ ID NO: 196 - DNA, 15 bp, Homo sapiens
tggccaaagaatgaa

SEQ ID NO: 197 - DNA, 15 bp, Homo sapiens
gtggccaaagaatga

SEQ ID NO: 198 - DNA, 15 bp, Homo sapiens
cgtggccaaagaatg

SEQ ID NO: 199 - DNA, 15 bp, Homo sapiens
tcgtggccaaagaat

SEQ ID NO: 200 - DNA, 15 bp, Homo sapiens
gtcgtggccaaagaa

SEQ ID NO: 201 - DNA, 15 bp, Homo sapiens
ggtcgtggccaaaga

SEQ ID NO: 202 - DNA, 15 bp, Homo sapiens
gggtcgtggccaaag

SEQ ID NO: 203 - DNA, 15 bp, Homo sapiens
tgggtcgtggccaaa

SEQ ID NO: 204 - DNA, 15 bp, Homo sapiens
atgggtcgtggccaa

SEQ ID NO: 205 - DNA, 15 bp, Homo sapiens
tatgggtcgtggcca

SEQ ID NO: 206 - DNA, 15 bp, Homo sapiens
ctatgggtcgtggcc

SEQ ID NO: 207 - DNA, 15 bp, Homo sapiens
actatgggtcgtggc

SEQ ID NO: 208 - DNA, 15 bp, Homo sapiens
tactatgggtcgtgg

SEQ ID NO: 209 - DNA, 15 bp, Homo sapiens
ttactatgggtcgtg

SEQ ID NO: 210 - DNA, 15 bp, Homo sapiens
cttactatgggtcgt

SEQ ID NO: 211 - DNA, 15 bp, Homo sapiens
tcttactatgggtcg

SEQ ID NO: 212 - DNA, 15 bp, Homo sapiens
ttcttactatgggtc

SEQ ID NO: 213 - DNA, 15 bp, Homo sapiens
tttcttactatgggt

SEQ ID NO: 214 - DNA, 15 bp, Homo sapiens
atttcttactatggg

SEQ ID NO: 215 - DNA, 15 bp, Homo sapiens
gatttcttactatgg

SEQ ID NO: 216 - DNA, 15 bp, Homo sapiens
ggatttcttactatg

SEQ ID NO: 217 - DNA, 15 bp, Homo sapiens
tggatttcttactat

SEQ ID NO: 218 - DNA, 15 bp, Homo sapiens
atggatttcttacta

SEQ ID NO: 219 - DNA, 15 bp, Homo sapiens
aatggatttcttact

SEQ ID NO: 220 - DNA, 15 bp, Homo sapiens
gaatggatttcttac

SEQ ID NO: 221 - DNA, 15 bp, Homo sapiens
agaatggatttctta

SEQ ID NO: 222 - DNA, 15 bp, Homo sapiens
tagaatggatttctt

SEQ ID NO: 223 - DNA, 15 bp, Homo sapiens
gtagaatggatttct

SEQ ID NO: 224 - DNA, 15 bp, Homo sapiens
tgtagaatggatttc

SEQ ID NO: 225 - DNA, 15 bp, Homo sapiens
atgtagaatggattt

SEQ ID NO: 226 - DNA, 15 bp, Homo sapiens
gatgtagaatggatt

SEQ ID NO: 227 - DNA, 15 bp, Homo sapiens
tgatgtagaatggat

SEQ ID NO: 228 - DNA, 15 bp, Homo sapiens
atgatgtagaatgga

SEQ ID NO: 229 - DNA, 15 bp, Homo sapiens
tatgatgtagaatgg

SEQ ID NO: 230 - DNA, 15 bp, Homo sapiens
ttatgatgtagaatg

SEQ ID NO: 231 - DNA, 15 bp, Homo sapiens
gttatgatgtagaat

SEQ ID NO: 232 - DNA, 15 bp, Homo sapiens
ggttatgatgtagaa

SEQ ID NO: 233 - DNA, 15 bp, Homo sapiens
gggttatgatgtaga

SEQ ID NO: 234 - DNA, 15 bp, Homo sapiens
tgggttatgatgtag

SEQ ID NO: 235 - DNA, 15 bp, Homo sapiens
ctgggttatgatgta

SEQ ID NO: 236 - DNA, 15 bp, Homo sapiens
gctgggttatgatgt

SEQ ID NO: 237 - DNA, 15 bp, Homo sapiens
tgctgggttatgatg

SEQ ID NO: 238 - DNA, 15 bp, Homo sapiens
gtgctgggttatgat

SEQ ID NO: 239 - DNA, 15 bp, Homo sapiens
tgtgctgggttatga

SEQ ID NO: 240 - DNA, 15 bp, Homo sapiens
gtgtgctgggttatg

SEQ ID NO: 241 - DNA, 15 bp, Homo sapiens
ggtgtgctgggttat

SEQ ID NO: 242 - DNA, 15 bp, Homo sapiens
gggtgtgctgggtta

SEQ ID NO: 243 - DNA, 15 bp, Homo sapiens
tgggtgtgctgggtt

SEQ ID NO: 244 - DNA, 15 bp, Homo sapiens
gtgggtgtgctgggt

SEQ ID NO: 245 - DNA, 15 bp, Homo sapiens
tgtgggtgtgctggg

SEQ ID NO: 246 - DNA, 15 bp, Homo sapiens
gtgtgggtgtgctgg

SEQ ID NO: 247 - DNA, 15 bp, Homo sapiens
cgtgtgggtgtgctg

SEQ ID NO: 248 - DNA, 15 bp, Homo sapiens
acgtgtgggtgtgct

SEQ ID NO: 249 - DNA, 15 bp, Homo sapiens
cacgtgtgggtgtgc

SEQ ID NO: 250 - DNA, 15 bp, Homo sapiens
acacgtgtgggtgtg

SEQ ID NO: 251 - DNA, 15 bp, Homo sapiens
tacacgtgtgggtgt

SEQ ID NO: 252 - DNA, 15 bp, Homo sapiens
ttacacgtgtgggtg

SEQ ID NO: 253 - DNA, 15 bp, Homo sapiens
tttacacgtgtgggt

SEQ ID NO: 254 - DNA, 15 bp, Homo sapiens
gtttacacgtgtggg

SEQ ID NO: 255 - DNA, 15 bp, Homo sapiens
tgtttacacgtgtgg

SEQ ID NO: 256 - DNA, 15 bp, Homo sapiens
ctgtttacacgtgtg

SEQ ID NO: 257 - DNA, 15 bp, Homo sapiens
tctgtttacacgtgt

SEQ ID NO: 258 - DNA, 15 bp, Homo sapiens
gtctgtttacacgtg

SEQ ID NO: 259 - DNA, 15 bp, Homo sapiens
tgtctgtttacacgt

SEQ ID NO: 260 - DNA, 15 bp, Homo sapiens
atgtctgtttacacg

SEQ ID NO: 261 - DNA, 15 bp, Homo sapiens
tatgtctgtttacac

SEQ ID NO: 262 - DNA, 15 bp, Homo sapiens
atatgtctgtttaca

SEQ ID NO: 263 - DNA, 15 bp, Homo sapiens
tatatgtctgtttac

SEQ ID NO: 264 - DNA, 15 bp, Homo sapiens
ttatatgtctgttta

SEQ ID NO: 265 - DNA, 15 bp, Homo sapiens
tttatatgtctgttt

SEQ ID NO: 266 - DNA, 15 bp, Homo sapiens
atttatatgtctgtt

SEQ ID NO: 267 - DNA, 15 bp, Homo sapiens
tatttatatgtctgt

SEQ ID NO: 268 - DNA, 15 bp, Homo sapiens
ttatttatatgtctg

SEQ ID NO: 269 - DNA, 15 bp, Homo sapiens
gttatttatatgtct

SEQ ID NO: 270 - DNA, 15 bp, Homo sapiens
agttatttatatgtc

SEQ ID NO: 271 - DNA, 15 bp, Homo sapiens
cagttatttatatgt

SEQ ID NO: 272 - DNA, 15 bp, Homo sapiens
tcagttatttatatg

SEQ ID NO: 273 - DNA, 15 bp, Homo sapiens
ttcagttatttatat

SEQ ID NO: 274 - DNA, 15 bp, Homo sapiens
tttcagttatttata

SEQ ID NO: 275 - DNA, 15 bp, Homo sapiens
ttttcagttatttat

SEQ ID NO: 276 - DNA, 15 bp, Homo sapiens
tttttcagttattta

SEQ ID NO: 277 - DNA, 15 bp, Homo sapiens
atttttcagttattt

SEQ ID NO: 278 - DNA, 15 bp, Homo sapiens
catttttcagttatt

SEQ ID NO: 279 - DNA, 15 bp, Homo sapiens
ccatttttcagttat

SEQ ID NO: 280 - DNA, 15 bp, Homo sapiens
accatttttcagtta

SEQ ID NO: 281 - DNA, 15 bp, Homo sapiens
aaccatttttcagtt

SEQ ID NO: 282 - DNA, 15 bp, Homo sapiens
caaccatttttcagt

SEQ ID NO: 283 - DNA, 15 bp, Homo sapiens
acaaccatttttcag

SEQ ID NO: 284 - DNA, 15 bp, Homo sapiens
aacaaccatttttca

SEQ ID NO: 285 - DNA, 15 bp, Homo sapiens
gaacaaccatttttc

SEQ ID NO: 286 - DNA, 15 bp, Homo sapiens
agaacaaccattttt

SEQ ID NO: 287 - DNA, 15 bp, Homo sapiens
aagaacaaccatttt

SEQ ID NO: 288 - DNA, 15 bp, Homo sapiens
gaagaacaaccattt

SEQ ID NO: 289 - DNA, 15 bp, Homo sapiens
cgaagaacaaccatt

SEQ ID NO: 290 - DNA, 15 bp, Homo sapiens
tcgaagaacaaccat

SEQ ID NO: 291 - DNA, 15 bp, Homo sapiens
ctcgaagaacaacca

SEQ ID NO: 292 - DNA, 15 bp, Homo sapiens
actcgaagaacaacc

SEQ ID NO: 293 - DNA, 15 bp, Homo sapiens
cactcgaagaacaac

SEQ ID NO: 294 - DNA, 15 bp, Homo sapiens
tcactcgaagaacaa

SEQ ID NO: 295 - DNA, 15 bp, Homo sapiens
ttcactcgaagaaca

SEQ ID NO: 296 - DNA, 15 bp, Homo sapiens
tttcactcgaagaac

SEQ ID NO: 297 - DNA, 15 bp, Homo sapiens
gtttcactcgaagaa

SEQ ID NO: 298 - DNA, 15 bp, Homo sapiens
tgtttcactcgaaga

SEQ ID NO: 299 - DNA, 15 bp, Homo sapiens
ttgtttcactcgaag

SEQ ID NO: 300 - DNA, 15 bp, Homo sapiens
attgtttcactcgaa

SEQ ID NO: 301 - DNA, 15 bp, Homo sapiens
tattgtttcactcga

SEQ ID NO: 302 - DNA, 15 bp, Homo sapiens
gtattgtttcactcg

SEQ ID NO: 303 - DNA, 15 bp, Homo sapiens
agtattgtttcactc

SEQ ID NO: 304 - DNA, 15 bp, Homo sapiens
aagtattgtttcact

SEQ ID NO: 305 - DNA, 15 bp, Homo sapiens
taagtattgtttcac

SEQ ID NO: 306 - DNA, 15 bp, Homo sapiens
gtaagtattgtttca

SEQ ID NO: 307 - DNA, 15 bp, Homo sapiens
ggtaagtattgtttc

SEQ ID NO: 308 - DNA, 15 bp, Homo sapiens
aggtaagtattgttt

SEQ ID NO: 309 - DNA, 15 bp, Homo sapiens
aaggtaagtattgtt

SEQ ID NO: 310 - DNA, 15 bp, Homo sapiens
aaaggtaagtattgt

SEQ ID NO: 311 - DNA, 15 bp, Homo sapiens
taaaggtaagtattg

SEQ ID NO: 312 - DNA, 15 bp, Homo sapiens
gtaaaggtaagtatt

SEQ ID NO: 313 - DNA, 15 bp, Homo sapiens
agtaaaggtaagtat

SEQ ID NO: 314 - DNA, 15 bp, Homo sapiens
cagtaaaggtaagta

SEQ ID NO: 315 - DNA, 15 bp, Homo sapiens
gcagtaaaggtaagt

SEQ ID NO: 316 - DNA, 15 bp, Homo sapiens
tgcagtaaaggtaag

SEQ ID NO: 317 - DNA, 15 bp, Homo sapiens
atgcagtaaaggtaa

SEQ ID NO: 318 - DNA, 15 bp, Homo sapiens
catgcagtaaaggta

SEQ ID NO: 319 - DNA, 15 bp, Homo sapiens
acatgcagtaaaggt

SEQ ID NO: 320 - DNA, 15 bp, Homo sapiens
cacatgcagtaaagg

SEQ ID NO: 321 - DNA, 15 bp, Homo sapiens
ccacatgcagtaaag

SEQ ID NO: 322 - DNA, 15 bp, Homo sapiens
accacatgcagtaaa

SEQ ID NO: 323 - DNA, 15 bp, Homo sapiens
caccacatgcagtaa

SEQ ID NO: 324 - DNA, 15 bp, Homo sapiens
tcaccacatgcagta

SEQ ID NO: 325 - DNA, 15 bp, Homo sapiens
atcaccacatgcagt

SEQ ID NO: 326 - DNA, 15 bp, Homo sapiens
tatcaccacatgcag

SEQ ID NO: 327 - DNA, 15 bp, Homo sapiens
gtatcaccacatgca

SEQ ID NO: 328 - DNA, 15 bp, Homo sapiens
tgtatcaccacatgc

SEQ ID NO: 329 - DNA, 15 bp, Homo sapiens
gtgtatcaccacatg

SEQ ID NO: 330 - DNA, 15 bp, Homo sapiens
agtgtatcaccacat

SEQ ID NO: 331 - DNA, 15 bp, Homo sapiens
cagtgtatcaccaca

SEQ ID NO: 332 - DNA, 15 bp, Homo sapiens
ccagtgtatcaccac

SEQ ID NO: 333 - DNA, 15 bp, Homo sapiens
gccagtgtatcacca

SEQ ID NO: 334 - DNA, 15 bp, Homo sapiens
tgccagtgtatcacc

SEQ ID NO: 335 - DNA, 15 bp, Homo sapiens
atgccagtgtatcac

SEQ ID NO: 336 - DNA, 15 bp, Homo sapiens
aatgccagtgtatca

SEQ ID NO: 337 - DNA, 15 bp, Homo sapiens
aaatgccagtgtatc

SEQ ID NO: 338 - DNA, 15 bp, Homo sapiens
gaaatgccagtgtat

SEQ ID NO: 339 - DNA, 15 bp, Homo sapiens
agaaatgccagtgta

SEQ ID NO: 340 - DNA, 15 bp, Homo sapiens
aagaaatgccagtgt

SEQ ID NO: 341 - DNA, 15 bp, Homo sapiens
taagaaatgccagtg

SEQ ID NO: 342 - DNA, 15 bp, Homo sapiens
ataagaaatgccagt

SEQ ID NO: 343 - DNA, 15 bp, Homo sapiens
cataagaaatgccag

SEQ ID NO: 344 - DNA, 15 bp, Homo sapiens
gcataagaaatgcca

SEQ ID NO: 345 - DNA, 15 bp, Homo sapiens
agcataagaaatgcc

SEQ ID NO: 346 - DNA, 15 bp, Homo sapiens
tagcataagaaatgc

SEQ ID NO: 347 - DNA, 15 bp, Homo sapiens
atagcataagaaatg

SEQ ID NO: 348 - DNA, 15 bp, Homo sapiens
aatagcataagaaat

SEQ ID NO: 349 - DNA, 15 bp, Homo sapiens
aaatagcataagaaa

SEQ ID NO: 350 - DNA, 15 bp, Homo sapiens
gaaatagcataagaa

SEQ ID NO: 351 - DNA, 15 bp, Homo sapiens
ggaaatagcataaga

SEQ ID NO: 352 - DNA, 15 bp, Homo sapiens
aggaaatagcataag

SEQ ID NO: 353 - DNA, 15 bp, Homo sapiens
aaggaaatagcataa

SEQ ID NO: 354 - DNA, 15 bp, Homo sapiens
aaaggaaatagcata

SEQ ID NO: 355 - DNA, 15 bp, Homo sapiens
aaaaggaaatagcat

SEQ ID NO: 356 - DNA, 15 bp, Homo sapiens
aaaaaggaaatagca

SEQ ID NO: 357 - DNA, 15 bp, Homo sapiens
gaaaaaggaaatagc

SEQ ID NO: 358 - DNA, 15 bp, Homo sapiens
agaaaaaggaaatag

SEQ ID NO: 359 - DNA, 15 bp, Homo sapiens
aagaaaaaggaaata

SEQ ID NO: 360 - DNA, 15 bp, Homo sapiens
aaagaaaaaggaaat

SEQ ID NO: 361 - DNA, 15 bp, Homo sapiens
aaaagaaaaaggaaa

SEQ ID NO: 362 - DNA, 15 bp, Homo sapiens
aaaaagaaaaaggaa

SEQ ID NO: 363 - DNA, 15 bp, Homo sapiens
taaaaagaaaaagga

SEQ ID NO: 364 - DNA, 15 bp, Homo sapiens
ttaaaaagaaaaagg

SEQ ID NO: 365 - DNA, 15 bp, Homo sapiens
attaaaaagaaaaag

SEQ ID NO: 366 - DNA, 15 bp, Homo sapiens
cattaaaaagaaaaa

SEQ ID NO: 367 - DNA, 15 bp, Homo sapiens
gcattaaaaagaaaa

SEQ ID NO: 368 - DNA, 15 bp, Homo sapiens
agcattaaaaagaaa

SEQ ID NO: 369 - DNA, 15 bp, Homo sapiens
aagcattaaaaagaa

SEQ ID NO: 370 - DNA, 15 bp, Homo sapiens
caagcattaaaaaga

SEQ ID NO: 371 - DNA, 15 bp, Homo sapiens
acaagcattaaaaag

SEQ ID NO: 372 - DNA, 15 bp, Homo sapiens
aacaagcattaaaaa

SEQ ID NO: 373 - DNA, 15 bp, Homo sapiens
caacaagcattaaaa

SEQ ID NO: 374 - DNA, 15 bp, Homo sapiens
tcaacaagcattaaa

SEQ ID NO: 375 - DNA, 15 bp, Homo sapiens
ttcaacaagcattaa

SEQ ID NO: 376 - DNA, 15 bp, Homo sapiens
tttcaacaagcatta

SEQ ID NO: 377 - DNA, 15 bp, Homo sapiens
gtttcaacaagcatt

SEQ ID NO: 378 - DNA, 15 bp, Homo sapiens
ggtttcaacaagcat

SEQ ID NO: 379 - DNA, 15 bp, Homo sapiens
gggtttcaacaagca

SEQ ID NO: 380 - DNA, 15 bp, Homo sapiens
tgggtttcaacaagc

SEQ ID NO: 381 - DNA, 15 bp, Homo sapiens
ctgggtttcaacaag

SEQ ID NO: 382 - DNA, 15 bp, Homo sapiens
actgggtttcaacaa

SEQ ID NO: 383 - DNA, 15 bp, Homo sapiens
tactgggtttcaaca

SEQ ID NO: 384 - DNA, 15 bp, Homo sapiens
ttactgggtttcaac

SEQ ID NO: 385 - DNA, 15 bp, Homo sapiens
tttactgggtttcaa

SEQ ID NO: 386 - DNA, 15 bp, Homo sapiens
atttactgggtttca

SEQ ID NO: 387 - DNA, 15 bp, Homo sapiens
aatttactgggtttc

SEQ ID NO: 388 - DNA, 15 bp, Homo sapiens
caatttactgggttt

SEQ ID NO: 389 - DNA, 15 bp, Homo sapiens
tcaatttactgggtt

SEQ ID NO: 390 - DNA, 15 bp, Homo sapiens
atcaatttactgggt

SEQ ID NO: 391 - DNA, 15 bp, Homo sapiens
aatcaatttactggg

SEQ ID NO: 392 - DNA, 15 bp, Homo sapiens
aaatcaatttactgg

SEQ ID NO: 393 - DNA, 15 bp, Homo sapiens
gaaatcaatttactg

SEQ ID NO: 394 - DNA, 15 bp, Homo sapiens
tgaaatcaatttact

SEQ ID NO: 395 - DNA, 15 bp, Homo sapiens
gtgaaatcaatttac

SEQ ID NO: 396 - DNA, 15 bp, Homo sapiens
tgtgaaatcaattta

SEQ ID NO: 397 - DNA, 15 bp, Homo sapiens
ttgtgaaatcaattt

SEQ ID NO: 398 - DNA, 15 bp, Homo sapiens
gttgtgaaatcaatt

SEQ ID NO: 399 - DNA, 15 bp, Homo sapiens
agttgtgaaatcaat

SEQ ID NO: 400 - DNA, 15 bp, Homo sapiens
gagttgtgaaatcaa

SEQ ID NO: 401 - DNA, 15 bp, Homo sapiens
tgagttgtgaaatca

SEQ ID NO: 402 - DNA, 15 bp, Homo sapiens
ttgagttgtgaaatc

SEQ ID NO: 403 - DNA, 15 bp, Homo sapiens
attgagttgtgaaat

SEQ ID NO: 404 - DNA, 15 bp, Homo sapiens
tattgagttgtgaaa

SEQ ID NO: 405 - DNA, 15 bp, Homo sapiens
ttattgagttgtgaa

SEQ ID NO: 406 - DNA, 15 bp, Homo sapiens
tttattgagttgtga

SEQ ID NO: 407 - DNA, 15 bp, Homo sapiens
ctttattgagttgtg

SEQ ID NO: 408 - DNA, 15 bp, Homo sapiens
cctttattgagttgt

SEQ ID NO: 409 - DNA, 15 bp, Homo sapiens
ccctttattgagttg

SEQ ID NO: 410 - DNA, 15 bp, Homo sapiens
accctttattgagtt

SEQ ID NO: 411 - DNA, 15 bp, Homo sapiens
aaccctttattgagt

SEQ ID NO: 412 - DNA, 15 bp, Homo sapiens
taaccctttattgag

SEQ ID NO: 413 - DNA, 15 bp, Homo sapiens
ctaaccctttattga

SEQ ID NO: 414 - DNA, 15 bp, Homo sapiens
cctaaccctttattg

SEQ ID NO: 415 - DNA, 15 bp, Homo sapiens
tcctaaccctttatt

SEQ ID NO: 416 - DNA, 15 bp, Homo sapiens
atcctaaccctttat

SEQ ID NO: 417 - DNA, 15 bp, Homo sapiens
tatcctaacccttta

SEQ ID NO: 418 - DNA, 15 bp, Homo sapiens
atatcctaacccttt

SEQ ID NO: 419 - DNA, 15 bp, Homo sapiens
catatcctaaccctt

SEQ ID NO: 420 - DNA, 15 bp, Homo sapiens
gcatatcctaaccct

SEQ ID NO: 421 - DNA, 15 bp, Homo sapiens
tgcatatcctaaccc

SEQ ID NO: 422 - DNA, 15 bp, Homo sapiens
ttgcatatcctaacc

SEQ ID NO: 423 - DNA, 15 bp, Homo sapiens
attgcatatcctaac

SEQ ID NO: 424 - DNA, 15 bp, Homo sapiens
aattgcatatcctaa

SEQ ID NO: 425 - DNA, 15 bp, Homo sapiens
aaattgcatatccta

SEQ ID NO: 426 - DNA, 15 bp, Homo sapiens
aaaattgcatatcct

SEQ ID NO: 427 - DNA, 15 bp, Homo sapiens
caaaattgcatatcc

SEQ ID NO: 428 - DNA, 15 bp, Homo sapiens
tcaaaattgcatatc

SEQ ID NO: 429 - DNA, 15 bp, Homo sapiens
ttcaaaattgcatat

SEQ ID NO: 430 - DNA, 15 bp, Homo sapiens
gttcaaaattgcata

SEQ ID NO: 431 - DNA, 15 bp, Homo sapiens
tgttcaaaattgcat

SEQ ID NO: 432 - DNA, 15 bp, Homo sapiens
ttgttcaaaattgca

SEQ ID NO: 433 - DNA, 15 bp, Homo sapiens
attgttcaaaattgc

SEQ ID NO: 434 - DNA, 15 bp, Homo sapiens
aattgttcaaaattg

SEQ ID NO: 435 - DNA, 15 bp, Homo sapiens
gaattgttcaaaatt

SEQ ID NO: 436 - DNA, 15 bp, Homo sapiens
ggaattgttcaaaat

SEQ ID NO: 437 - DNA, 15 bp, Homo sapiens
tggaattgttcaaaa

SEQ ID NO: 438 - DNA, 15 bp, Homo sapiens
ctggaattgttcaaa

SEQ ID NO: 439 - DNA, 15 bp, Homo sapiens
gctggaattgttcaa

SEQ ID NO: 440 - DNA, 15 bp, Homo sapiens
agctggaattgttca

SEQ ID NO: 441 - DNA, 15 bp, Homo sapiens
gagctggaattgttc

SEQ ID NO: 442 - DNA, 15 bp, Homo sapiens
agagctggaattgtt

SEQ ID NO: 443 - DNA, 15 bp, Homo sapiens
cagagctggaattgt

SEQ ID NO: 444 - DNA, 15 bp, Homo sapiens
gcagagctggaattg

SEQ ID NO: 445 - DNA, 15 bp, Homo sapiens
ggcagagctggaatt

SEQ ID NO: 446 - DNA, 15 bp, Homo sapiens
tggcagagctggaat

SEQ ID NO: 447 - DNA, 15 bp, Homo sapiens
gtggcagagctggaa

SEQ ID NO: 448 - DNA, 15 bp, Homo sapiens
ggtggcagagctgga

SEQ ID NO: 449 - DNA, 15 bp, Homo sapiens
aggtggcagagctgg

SEQ ID NO: 450 - DNA, 15 bp, Homo sapiens
taggtggcagagctg

SEQ ID NO: 451 - DNA, 15 bp, Homo sapiens
ataggtggcagagct

SEQ ID NO: 452 - DNA, 15 bp, Homo sapiens
gataggtggcagagc

SEQ ID NO: 453 - DNA, 15 bp, Homo sapiens
tgataggtggcagag

SEQ ID NO: 454 - DNA, 15 bp, Homo sapiens
ctgataggtggcaga

SEQ ID NO: 455 - DNA, 15 bp, Homo sapiens
gctgataggtggcag

SEQ ID NO: 456 - DNA, 15 bp, Homo sapiens
agctgataggtggca

SEQ ID NO: 457 - DNA, 15 bp, Homo sapiens
cagctgataggtggc

SEQ ID NO: 458 - DNA, 15 bp, Homo sapiens
acagctgataggtgg

SEQ ID NO: 459 - DNA, 15 bp, Homo sapiens
cacagctgataggtg

SEQ ID NO: 460 - DNA, 15 bp, Homo sapiens
acacagctgataggt

SEQ ID NO: 461 - DNA, 15 bp, Homo sapiens
cacacagctgatagg

SEQ ID NO: 462 - DNA, 15 bp, Homo sapiens
tcacacagctgatag

SEQ ID NO: 463 - DNA, 15 bp, Homo sapiens
gtcacacagctgata

SEQ ID NO: 464 - DNA, 15 bp, Homo sapiens
ggtcacacagctgat

SEQ ID NO: 465 - DNA, 15 bp, Homo sapiens
aggtcacacagctga

SEQ ID NO: 466 - DNA, 15 bp, Homo sapiens
caggtcacacagctg

SEQ ID NO: 467 - DNA, 15 bp, Homo sapiens
ccaggtcacacagct

SEQ ID NO: 468 - DNA, 15 bp, Homo sapiens
cccaggtcacacagc

SEQ ID NO: 469 - DNA, 15 bp, Homo sapiens
ccccaggtcacacag

SEQ ID NO: 470 - DNA, 15 bp, Homo sapiens
gccccaggtcacaca

SEQ ID NO: 471 - DNA, 15 bp, Homo sapiens
tgccccaggtcacac

SEQ ID NO: 472 - DNA, 15 bp, Homo sapiens
ttgccccaggtcaca

SEQ ID NO: 473 - DNA, 15 bp, Homo sapiens
cttgccccaggtcac

SEQ ID NO: 474 - DNA, 15 bp, Homo sapiens
acttgccccaggtca

SEQ ID NO: 475 - DNA, 15 bp, Homo sapiens
aacttgccccaggtc

SEQ ID NO: 476 - DNA, 15 bp, Homo sapiens
taacttgccccaggt

SEQ ID NO: 477 - DNA, 15 bp, Homo sapiens
gtaacttgccccagg

SEQ ID NO: 478 - DNA, 15 bp, Homo sapiens
agtaacttgccccag

SEQ ID NO: 479 - DNA, 15 bp, Homo sapiens
aagtaacttgcccca

SEQ ID NO: 480 - DNA, 15 bp, Homo sapiens
taagtaacttgcccc

SEQ ID NO: 481 - DNA, 15 bp, Homo sapiens
ttaagtaacttgccc

SEQ ID NO: 482 - DNA, 15 bp, Homo sapiens
gttaagtaacttgcc

SEQ ID NO: 483 - DNA, 15 bp, Homo sapiens
ggttaagtaacttgc

SEQ ID NO: 484 - DNA, 15 bp, Homo sapiens
aggttaagtaacttg

SEQ ID NO: 485 - DNA, 15 bp, Homo sapiens
gaggttaagtaactt

SEQ ID NO: 486 - DNA, 15 bp, Homo sapiens
agaggttaagtaact

SEQ ID NO: 487 - DNA, 15 bp, Homo sapiens
gagaggttaagtaac

SEQ ID NO: 488 - DNA, 15 bp, Homo sapiens
agagaggttaagtaa

SEQ ID NO: 489 - DNA, 15 bp, Homo sapiens
cagagaggttaagta

SEQ ID NO: 490 - DNA, 15 bp, Homo sapiens
acagagaggttaagt

SEQ ID NO: 491 - DNA, 15 bp, Homo sapiens
cacagagaggttaag

SEQ ID NO: 492 - DNA, 15 bp, Homo sapiens
gcacagagaggttaa

SEQ ID NO: 493 - DNA, 15 bp, Homo sapiens
ggcacagagaggtta

SEQ ID NO: 494 - DNA, 15 bp, Homo sapiens
aggcacagagaggtt

SEQ ID NO: 495 - DNA, 15 bp, Homo sapiens
gaggcacagagaggt

SEQ ID NO: 496 - DNA, 15 bp, Homo sapiens
tgaggcacagagagg

SEQ ID NO: 497 - DNA, 15 bp, Homo sapiens
ctgaggcacagagag

SEQ ID NO: 498 - DNA, 15 bp, Homo sapiens
actgaggcacagaga

SEQ ID NO: 499 - DNA, 15 bp, Homo sapiens
aactgaggcacagag

SEQ ID NO: 500 - DNA, 15 bp, Homo sapiens
taactgaggcacaga

SEQ ID NO: 501 - DNA, 15 bp, Homo sapiens
gtaactgaggcacag

SEQ ID NO: 502 - DNA, 15 bp, Homo sapiens
ggtaactgaggcaca

SEQ ID NO: 503 - DNA, 15 bp, Homo sapiens
aggtaactgaggcac

SEQ ID NO: 504 - DNA, 15 bp, Homo sapiens
gaggtaactgaggca

SEQ ID NO: 505 - DNA, 15 bp, Homo sapiens
tgaggtaactgaggc

SEQ ID NO: 506 - DNA, 15 bp, Homo sapiens
atgaggtaactgagg

SEQ ID NO: 507 - DNA, 15 bp, Homo sapiens
gatgaggtaactgag

SEQ ID NO: 508 - DNA, 15 bp, Homo sapiens
agatgaggtaactga

SEQ ID NO: 509 - DNA, 15 bp, Homo sapiens
gagatgaggtaactg

SEQ ID NO: 510 - DNA, 15 bp, Homo sapiens
agagatgaggtaact

SEQ ID NO: 511 - DNA, 15 bp, Homo sapiens
tagagatgaggtaac

SEQ ID NO: 512 - DNA, 15 bp, Homo sapiens
ttagagatgaggtaa

SEQ ID NO: 513 - DNA, 15 bp, Homo sapiens
cttagagatgaggta

SEQ ID NO: 514 - DNA, 15 bp, Homo sapiens
ccttagagatgaggt

SEQ ID NO: 515 - DNA, 15 bp, Homo sapiens
tccttagagatgagg

SEQ ID NO: 516 - DNA, 15 bp, Homo sapiens
ctccttagagatgag

SEQ ID NO: 517 - DNA, 15 bp, Homo sapiens
cctccttagagatga

SEQ ID NO: 518 - DNA, 15 bp, Homo sapiens
ccctccttagagatg

SEQ ID NO: 519 - DNA, 15 bp, Homo sapiens
cccctccttagagat

SEQ ID NO: 520 - DNA, 15 bp, Homo sapiens
tcccctccttagaga

SEQ ID NO: 521 - DNA, 15 bp, Homo sapiens
atcccctccttagag

SEQ ID NO: 522 - DNA, 15 bp, Homo sapiens
tatcccctccttaga

SEQ ID NO: 523 - DNA, 15 bp, Homo sapiens
ttatcccctccttag

SEQ ID NO: 524 - DNA, 15 bp, Homo sapiens
attatcccctcctta

SEQ ID NO: 525 - DNA, 15 bp, Homo sapiens
tattatcccctcctt

SEQ ID NO: 526 - DNA, 15 bp, Homo sapiens
ttattatcccctcct

SEQ ID NO: 527 - DNA, 15 bp, Homo sapiens
attattatcccctcc

SEQ ID NO: 528 - DNA, 15 bp, Homo sapiens
tattattatcccctc

SEQ ID NO: 529 - DNA, 15 bp, Homo sapiens
gtattattatcccct

SEQ ID NO: 530 - DNA, 15 bp, Homo sapiens
ggtattattatcccc

SEQ ID NO: 531 - DNA, 15 bp, Homo sapiens
aggtattattatccc

SEQ ID NO: 532 - DNA, 15 bp, Homo sapiens
taggtattattatcc

SEQ ID NO: 533 - DNA, 15 bp, Homo sapiens
gtaggtattattatc

SEQ ID NO: 534 - DNA, 15 bp, Homo sapiens
tgtaggtattattat

SEQ ID NO: 535 - DNA, 15 bp, Homo sapiens
atgtaggtattatta

SEQ ID NO: 536 - DNA, 15 bp, Homo sapiens
gatgtaggtattatt

SEQ ID NO: 537 - DNA, 15 bp, Homo sapiens
tgatgtaggtattat

SEQ ID NO: 538 - DNA, 15 bp, Homo sapiens
ctgatgtaggtatta

SEQ ID NO: 539 - DNA, 15 bp, Homo sapiens
actgatgtaggtatt

SEQ ID NO: 540 - DNA, 15 bp, Homo sapiens
cactgatgtaggtat

SEQ ID NO: 541 - DNA, 15 bp, Homo sapiens
tcactgatgtaggta

SEQ ID NO: 542 - DNA, 15 bp, Homo sapiens
ctcactgatgtaggt

SEQ ID NO: 543 - DNA, 15 bp, Homo sapiens
actcactgatgtagg

SEQ ID NO: 544 - DNA, 15 bp, Homo sapiens
aactcactgatgtag

SEQ ID NO: 545 - DNA, 15 bp, Homo sapiens
caactcactgatgta

SEQ ID NO: 546 - DNA, 15 bp, Homo sapiens
acaactcactgatgt

SEQ ID NO: 547 - DNA, 15 bp, Homo sapiens
aacaactcactgatg

SEQ ID NO: 548 - DNA, 15 bp, Homo sapiens
gaacaactcactgat

SEQ ID NO: 549 - DNA, 15 bp, Homo sapiens
tgaacaactcactga

SEQ ID NO: 550 - DNA, 15 bp, Homo sapiens
ctgaacaactcactg

SEQ ID NO: 551 - DNA, 15 bp, Homo sapiens
gctgaacaactcact

SEQ ID NO: 552 - DNA, 15 bp, Homo sapiens
tgctgaacaactcac

SEQ ID NO: 553 - DNA, 15 bp, Homo sapiens
ctgctgaacaactca

SEQ ID NO: 554 - DNA, 15 bp, Homo sapiens
tctgctgaacaactc

SEQ ID NO: 555 - DNA, 15 bp, Homo sapiens
atctgctgaacaact

SEQ ID NO: 556 - DNA, 15 bp, Homo sapiens
gatctgctgaacaac

SEQ ID NO: 557 - DNA, 15 bp, Homo sapiens
tgatctgctgaacaa

SEQ ID NO: 558 - DNA, 15 bp, Homo sapiens
ttgatctgctgaaca

SEQ ID NO: 559 - DNA, 15 bp, Homo sapiens
tttgatctgctgaac

SEQ ID NO: 560 - DNA, 15 bp, Homo sapiens
ctttgatctgctgaa

SEQ ID NO: 561 - DNA, 15 bp, Homo sapiens
tctttgatctgctga

SEQ ID NO: 562 - DNA, 15 bp, Homo sapiens
ttctttgatctgctg

SEQ ID NO: 563 - DNA, 15 bp, Homo sapiens
tttctttgatctgct

SEQ ID NO: 564 - DNA, 15 bp, Homo sapiens
atttctttgatctgc

SEQ ID NO: 565 - DNA, 15 bp, Homo sapiens
tatttctttgatctg

SEQ ID NO: 566 - DNA, 15 bp, Homo sapiens
atatttctttgatct

SEQ ID NO: 567 - DNA, 15 bp, Homo sapiens
aatatttctttgatc

SEQ ID NO: 568 - DNA, 15 bp, Homo sapiens
aaatatttctttgat

SEQ ID NO: 569 - DNA, 15 bp, Homo sapiens
caaatatttctttga

SEQ ID NO: 570 - DNA, 15 bp, Homo sapiens
tcaaatatttctttg

SEQ ID NO: 571 - DNA, 15 bp, Homo sapiens
ttcaaatatttcttt

SEQ ID NO: 572 - DNA, 15 bp, Homo sapiens
tttcaaatatttctt

SEQ ID NO: 573 - DNA, 15 bp, Homo sapiens
ttttcaaatatttct

SEQ ID NO: 574 - DNA, 15 bp, Homo sapiens
cttttcaaatatttc

SEQ ID NO: 575 - DNA, 15 bp, Homo sapiens
acttttcaaatattt

SEQ ID NO: 576 - DNA, 15 bp, Homo sapiens
tacttttcaaatatt

SEQ ID NO: 577 - DNA, 15 bp, Homo sapiens
gtacttttcaaatat

SEQ ID NO: 578 - DNA, 15 bp, Homo sapiens
ggtacttttcaaata

SEQ ID NO: 579 - DNA, 15 bp, Homo sapiens
aggtacttttcaaat

SEQ ID NO: 580 - DNA, 15 bp, Homo sapiens
taggtacttttcaaa

SEQ ID NO: 581 - DNA, 15 bp, Homo sapiens
ataggtacttttcaa

SEQ ID NO: 582 - DNA, 15 bp, Homo sapiens
tataggtacttttca

SEQ ID NO: 583 - DNA, 15 bp, Homo sapiens
ttataggtacttttc

SEQ ID NO: 584 - DNA, 15 bp, Homo sapiens
tttataggtactttt

SEQ ID NO: 585 - DNA, 15 bp, Homo sapiens
ctttataggtacttt

SEQ ID NO: 586 - DNA, 15 bp, Homo sapiens
gctttataggtactt

SEQ ID NO: 587 - DNA, 15 bp, Homo sapiens
tgctttataggtact

SEQ ID NO: 588 - DNA, 15 bp, Homo sapiens
gtgctttataggtac

SEQ ID NO: 589 - DNA, 15 bp, Homo sapiens
agtgctttataggta

SEQ ID NO: 590 - DNA, 15 bp, Homo sapiens
aagtgctttataggt

SEQ ID NO: 591 - DNA, 15 bp, Homo sapiens
taagtgctttatagg

SEQ ID NO: 592 - DNA, 15 bp, Homo sapiens
ttaagtgctttatag

SEQ ID NO: 593 - DNA, 15 bp, Homo sapiens
gttaagtgctttata

SEQ ID NO: 594 - DNA, 15 bp, Homo sapiens
tgttaagtgctttat

SEQ ID NO: 595 - DNA, 15 bp, Homo sapiens
ctgttaagtgcttta

SEQ ID NO: 596 - DNA, 15 bp, Homo sapiens
actgttaagtgcttt

SEQ ID NO: 597 - DNA, 15 bp, Homo sapiens
tactgttaagtgctt

SEQ ID NO: 598 - DNA, 15 bp, Homo sapiens
ttactgttaagtgct

SEQ ID NO: 599 - DNA, 15 bp, Homo sapiens
gttactgttaagtgc

SEQ ID NO: 600 - DNA, 15 bp, Homo sapiens
ggttactgttaagtg

SEQ ID NO: 601 - DNA, 15 bp, Homo sapiens
gggttactgttaagt

SEQ ID NO: 602 - DNA, 15 bp, Homo sapiens
ggggttactgttaag

SEQ ID NO: 603 - DNA, 15 bp, Homo sapiens
gggggttactgttaa

SEQ ID NO: 604 - DNA, 15 bp, Homo sapiens
agggggttactgtta

SEQ ID NO: 605 - DNA, 15 bp, Homo sapiens
gagggggttactgtt

SEQ ID NO: 606 - DNA, 15 bp, Homo sapiens
ggagggggttactgt

SEQ ID NO: 607 - DNA, 15 bp, Homo sapiens
tggagggggttactg

SEQ ID NO: 608 - DNA, 15 bp, Homo sapiens
ttggagggggttact

SEQ ID NO: 609 - DNA, 15 bp, Homo sapiens
tttggagggggttac

SEQ ID NO: 610 - DNA, 15 bp, Homo sapiens
atttggagggggtta

SEQ ID NO: 611 - DNA, 15 bp, Homo sapiens
aatttggagggggtt

SEQ ID NO: 612 - DNA, 15 bp, Homo sapiens
aaatttggagggggt

SEQ ID NO: 613 - DNA, 15 bp, Homo sapiens
gaaatttggaggggg

SEQ ID NO: 614 - DNA, 15 bp, Homo sapiens
ggaaatttggagggg

SEQ ID NO: 615 - DNA, 15 bp, Homo sapiens
tggaaatttggaggg

SEQ ID NO: 616 - DNA, 15 bp, Homo sapiens
atggaaatttggagg

SEQ ID NO: 617 - DNA, 15 bp, Homo sapiens
aatggaaatttggag

SEQ ID NO: 618 - DNA, 15 bp, Homo sapiens
caatggaaatttgga

SEQ ID NO: 619 - DNA, 15 bp, Homo sapiens
tcaatggaaatttgg

SEQ ID NO: 620 - DNA, 15 bp, Homo sapiens
ctcaatggaaatttg

SEQ ID NO: 621 - DNA, 15 bp, Homo sapiens
cctcaatggaaattt

SEQ ID NO: 622 - DNA, 15 bp, Homo sapiens
ccctcaatggaaatt

SEQ ID NO: 623 - DNA, 15 bp, Homo sapiens
tccctcaatggaaat

SEQ ID NO: 624 - DNA, 15 bp, Homo sapiens
ttccctcaatggaaa

SEQ ID NO: 625 - DNA, 15 bp, Homo sapiens
tttccctcaatggaa

SEQ ID NO: 626 - DNA, 15 bp, Homo sapiens
gtttccctcaatgga

SEQ ID NO: 627 - DNA, 15 bp, Homo sapiens
agtttccctcaatgg

SEQ ID NO: 628 - DNA, 15 bp, Homo sapiens
cagtttccctcaatg

SEQ ID NO: 629 - DNA, 15 bp, Homo sapiens
tcagtttccctcaat

SEQ ID NO: 630 - DNA, 15 bp, Homo sapiens
ttcagtttccctcaa

SEQ ID NO: 631 - DNA, 15 bp, Homo sapiens
cttcagtttccctca

SEQ ID NO: 632 - DNA, 15 bp, Homo sapiens
gcttcagtttccctc

SEQ ID NO: 633 - DNA, 15 bp, Homo sapiens
agcttcagtttccct

SEQ ID NO: 634 - DNA, 15 bp, Homo sapiens
gagcttcagtttccc

SEQ ID NO: 635 - DNA, 15 bp, Homo sapiens
agagcttcagtttcc

SEQ ID NO: 636 - DNA, 15 bp, Homo sapiens
cagagcttcagtttc

SEQ ID NO: 637 - DNA, 15 bp, Homo sapiens
tcagagcttcagttt

SEQ ID NO: 638 - DNA, 15 bp, Homo sapiens
ttcagagcttcagtt

SEQ ID NO: 639 - DNA, 15 bp, Homo sapiens
tttcagagcttcagt

SEQ ID NO: 640 - DNA, 15 bp, Homo sapiens
ctttcagagcttcag

SEQ ID NO: 641 - DNA, 15 bp, Homo sapiens
cctttcagagcttca

SEQ ID NO: 642 - DNA, 15 bp, Homo sapiens
tcctttcagagcttc

SEQ ID NO: 643 - DNA, 15 bp, Homo sapiens
ttcctttcagagctt

SEQ ID NO: 644 - DNA, 15 bp, Homo sapiens
tttcctttcagagct

SEQ ID NO: 645 - DNA, 15 bp, Homo sapiens
ctttcctttcagagc

SEQ ID NO: 646 - DNA, 15 bp, Homo sapiens
gctttcctttcagag

SEQ ID NO: 647 - DNA, 15 bp, Homo sapiens
tgctttcctttcaga

SEQ ID NO: 648 - DNA, 15 bp, Homo sapiens
ttgctttcctttcag

SEQ ID NO: 649 - DNA, 15 bp, Homo sapiens
gttgctttcctttca

SEQ ID NO: 650 - DNA, 15 bp, Homo sapiens
agttgctttcctttc

SEQ ID NO: 651 - DNA, 15 bp, Homo sapiens
aagttgctttccttt

SEQ ID NO: 652 - DNA, 15 bp, Homo sapiens
caagttgctttcctt

SEQ ID NO: 653 - DNA, 15 bp, Homo sapiens
gcaagttgctttcct

SEQ ID NO: 654 - DNA, 15 bp, Homo sapiens
ggcaagttgctttcc

SEQ ID NO: 655 - DNA, 15 bp, Homo sapiens
gggcaagttgctttc

SEQ ID NO: 656 - DNA, 15 bp, Homo sapiens
tgggcaagttgcttt

SEQ ID NO: 657 - DNA, 15 bp, Homo sapiens
ctgggcaagttgctt

SEQ ID NO: 658 - DNA, 15 bp, Homo sapiens
actgggcaagttgct

SEQ ID NO: 659 - DNA, 15 bp, Homo sapiens
cactgggcaagttgc

SEQ ID NO: 660 - DNA, 15 bp, Homo sapiens
acactgggcaagttg

SEQ ID NO: 661 - DNA, 15 bp, Homo sapiens
aacactgggcaagtt

SEQ ID NO: 662 - DNA, 15 bp, Homo sapiens
caacactgggcaagt

SEQ ID NO: 663 - DNA, 15 bp, Homo sapiens
gcaacactgggcaag

SEQ ID NO: 664 - DNA, 15 bp, Homo sapiens
ggcaacactgggcaa

SEQ ID NO: 665 - DNA, 15 bp, Homo sapiens
gggcaacactgggca

SEQ ID NO: 666 - DNA, 15 bp, Homo sapiens
agggcaacactgggc

SEQ ID NO: 667 - DNA, 15 bp, Homo sapiens
cagggcaacactggg

SEQ ID NO: 668 - DNA, 15 bp, Homo sapiens
gcagggcaacactgg

SEQ ID NO: 669 - DNA, 15 bp, Homo sapiens
agcagggcaacactg

SEQ ID NO: 670 - DNA, 15 bp, Homo sapiens
cagcagggcaacact

SEQ ID NO: 671 - DNA, 15 bp, Homo sapiens
ccagcagggcaacac

SEQ ID NO: 672 - DNA, 15 bp, Homo sapiens
accagcagggcaaca

SEQ ID NO: 673 - DNA, 15 bp, Homo sapiens
taccagcagggcaac

SEQ ID NO: 674 - DNA, 15 bp, Homo sapiens
ttaccagcagggcaa

SEQ ID NO: 675 - DNA, 15 bp, Homo sapiens
tttaccagcagggca

SEQ ID NO: 676 - DNA, 15 bp, Homo sapiens
ttttaccagcagggc

SEQ ID NO: 677 - DNA, 15 bp, Homo sapiens
attttaccagcaggg

SEQ ID NO: 678 - DNA, 15 bp, Homo sapiens
cattttaccagcagg

SEQ ID NO: 679 - DNA, 15 bp, Homo sapiens
gcattttaccagcag

SEQ ID NO: 680 - DNA, 15 bp, Homo sapiens
tgcattttaccagca

SEQ ID NO: 681 - DNA, 15 bp, Homo sapiens
atgcattttaccagc

SEQ ID NO: 682 - DNA, 15 bp, Homo sapiens
gatgcattttaccag

SEQ ID NO: 683 - DNA, 15 bp, Homo sapiens
tgatgcattttacca

SEQ ID NO: 684 - DNA, 15 bp, Homo sapiens
gtgatgcattttacc

SEQ ID NO: 685 - DNA, 15 bp, Homo sapiens
ggtgatgcattttac

SEQ ID NO: 686 - DNA, 15 bp, Homo sapiens
gggtgatgcatttta

SEQ ID NO: 687 - DNA, 15 bp, Homo sapiens
tgggtgatgcatttt

SEQ ID NO: 688 - DNA, 15 bp, Homo sapiens
ctgggtgatgcattt

SEQ ID NO: 689 - DNA, 15 bp, Homo sapiens
gctgggtgatgcatt

SEQ ID NO: 690 - DNA, 15 bp, Homo sapiens
ggctgggtgatgcat

SEQ ID NO: 691 - DNA, 15 bp, Homo sapiens
aggctgggtgatgca

SEQ ID NO: 692 - DNA, 15 bp, Homo sapiens
caggctgggtgatgc

SEQ ID NO: 693 - DNA, 15 bp, Homo sapiens
ccaggctgggtgatg

SEQ ID NO: 694 - DNA, 15 bp, Homo sapiens
accaggctgggtgat

SEQ ID NO: 695 - DNA, 15 bp, Homo sapiens
taccaggctgggtga

SEQ ID NO: 696 - DNA, 15 bp, Homo sapiens
gtaccaggctgggtg

SEQ ID NO: 697 - DNA, 15 bp, Homo sapiens
tgtaccaggctgggt

SEQ ID NO: 698 - DNA, 15 bp, Homo sapiens
ctgtaccaggctggg

SEQ ID NO: 699 - DNA, 15 bp, Homo sapiens
actgtaccaggctgg

SEQ ID NO: 700 - DNA, 15 bp, Homo sapiens
tactgtaccaggctg

SEQ ID NO: 701 - DNA, 15 bp, Homo sapiens
ctactgtaccaggct

SEQ ID NO: 702 - DNA, 15 bp, Homo sapiens
gctactgtaccaggc

SEQ ID NO: 703 - DNA, 15 bp, Homo sapiens
agctactgtaccagg

SEQ ID NO: 704 - DNA, 15 bp, Homo sapiens
tagctactgtaccag

SEQ ID NO: 705 - DNA, 15 bp, Homo sapiens
ttagctactgtacca

SEQ ID NO: 706 - DNA, 15 bp, Homo sapiens
cttagctactgtacc

SEQ ID NO: 707 - DNA, 15 bp, Homo sapiens
tcttagctactgtac

SEQ ID NO: 708 - DNA, 15 bp, Homo sapiens
ctcttagctactgta

SEQ ID NO: 709 - DNA, 15 bp, Homo sapiens
gctcttagctactgt

SEQ ID NO: 710 - DNA, 15 bp, Homo sapiens
agctcttagctactg

SEQ ID NO: 711 - DNA, 15 bp, Homo sapiens
cagctcttagctact

SEQ ID NO: 712 - DNA, 15 bp, Homo sapiens
ccagctcttagctac

SEQ ID NO: 713 - DNA, 15 bp, Homo sapiens
tccagctcttagcta

SEQ ID NO: 714 - DNA, 15 bp, Homo sapiens
ctccagctcttagct

SEQ ID NO: 715 - DNA, 15 bp, Homo sapiens
gctccagctcttagc

SEQ ID NO: 716 - DNA, 15 bp, Homo sapiens
tgctccagctcttag

SEQ ID NO: 717 - DNA, 15 bp, Homo sapiens
gtgctccagctctta

SEQ ID NO: 718 - DNA, 15 bp, Homo sapiens
agtgctccagctctt

SEQ ID NO: 719 - DNA, 15 bp, Homo sapiens
tagtgctccagctct

SEQ ID NO: 720 - DNA, 15 bp, Homo sapiens
ctagtgctccagctc

SEQ ID NO: 721 - DNA, 15 bp, Homo sapiens
tctagtgctccagct

SEQ ID NO: 722 - DNA, 15 bp, Homo sapiens
ctctagtgctccagc

SEQ ID NO: 723 - DNA, 15 bp, Homo sapiens
gctctagtgctccag

SEQ ID NO: 724 - DNA, 15 bp, Homo sapiens
tgctctagtgctcca

SEQ ID NO: 725 - DNA, 15 bp, Homo sapiens
ctgctctagtgctcc

SEQ ID NO: 726 - DNA, 15 bp, Homo sapiens
cctgctctagtgctc

SEQ ID NO: 727 - DNA, 15 bp, Homo sapiens
tcctgctctagtgct

SEQ ID NO: 728 - DNA, 15 bp, Homo sapiens
gtcctgctctagtgc

SEQ ID NO: 729 - DNA, 15 bp, Homo sapiens
ggtcctgctctagtg

SEQ ID NO: 730 - DNA, 15 bp, Homo sapiens
tggtcctgctctagt

SEQ ID NO: 731 - DNA, 15 bp, Homo sapiens
gtggtcctgctctag

SEQ ID NO: 732 - DNA, 15 bp, Homo sapiens
tgtggtcctgctcta

SEQ ID NO: 733 - DNA, 15 bp, Homo sapiens
gtgtggtcctgctct

SEQ ID NO: 734 - DNA, 15 bp, Homo sapiens
tgtgtggtcctgctc

SEQ ID NO: 735 - DNA, 15 bp, Homo sapiens
ctgtgtggtcctgct

SEQ ID NO: 736 - DNA, 15 bp, Homo sapiens
cctgtgtggtcctgc

SEQ ID NO: 737 - DNA, 15 bp, Homo sapiens
gcctgtgtggtcctg

SEQ ID NO: 738 - DNA, 15 bp, Homo sapiens
agcctgtgtggtcct

SEQ ID NO: 739 - DNA, 15 bp, Homo sapiens
gagcctgtgtggtcc

SEQ ID NO: 740 - DNA, 15 bp, Homo sapiens
tgagcctgtgtggtc

SEQ ID NO: 741 - DNA, 15 bp, Homo sapiens
ctgagcctgtgtggt

SEQ ID NO: 742 - DNA, 15 bp, Homo sapiens
tctgagcctgtgtgg

SEQ ID NO: 743 - DNA, 15 bp, Homo sapiens
atctgagcctgtgtg

SEQ ID NO: 744 - DNA, 15 bp, Homo sapiens
gatctgagcctgtgt

SEQ ID NO: 745 - DNA, 15 bp, Homo sapiens
ggatctgagcctgtg

SEQ ID NO: 746 - DNA, 15 bp, Homo sapiens
gggatctgagcctgt

SEQ ID NO: 747 - DNA, 15 bp, Homo sapiens
tgggatctgagcctg

SEQ ID NO: 748 - DNA, 15 bp, Homo sapiens
ctgggatctgagcct

SEQ ID NO: 749 - DNA, 15 bp, Homo sapiens
gctgggatctgagcc

SEQ ID NO: 750 - DNA, 15 bp, Homo sapiens
agctgggatctgagc

SEQ ID NO: 751 - DNA, 15 bp, Homo sapiens
gagctgggatctgag

SEQ ID NO: 752 - DNA, 15 bp, Homo sapiens
agagctgggatctga

SEQ ID NO: 753 - DNA, 15 bp, Homo sapiens
cagagctgggatctg

SEQ ID NO: 754 - DNA, 15 bp, Homo sapiens
gcagagctgggatct

SEQ ID NO: 755 - DNA, 15 bp, Homo sapiens
ggcagagctgggatc

SEQ ID NO: 756 - DNA, 15 bp, Homo sapiens
tggcagagctgggat

SEQ ID NO: 757 - DNA, 15 bp, Homo sapiens
gtggcagagctggga

SEQ ID NO: 758 - DNA, 15 bp, Homo sapiens
agtggcagagctggg

SEQ ID NO: 759 - DNA, 15 bp, Homo sapiens
aagtggcagagctgg

SEQ ID NO: 760 - DNA, 15 bp, Homo sapiens
aaagtggcagagctg

SEQ ID NO: 761 - DNA, 15 bp, Homo sapiens
gaaagtggcagagct

SEQ ID NO: 762 - DNA, 15 bp, Homo sapiens
agaaagtggcagagc

SEQ ID NO: 763 - DNA, 15 bp, Homo sapiens
aagaaagtggcagag

SEQ ID NO: 764 - DNA, 15 bp, Homo sapiens
taagaaagtggcaga

SEQ ID NO: 765 - DNA, 15 bp, Homo sapiens
ctaagaaagtggcag

SEQ ID NO: 766 - DNA, 15 bp, Homo sapiens
gctaagaaagtggca

SEQ ID NO: 767 - DNA, 15 bp, Homo sapiens
tgctaagaaagtggc

SEQ ID NO: 768 - DNA, 15 bp, Homo sapiens
gtgctaagaaagtgg

SEQ ID NO: 769 - DNA, 15 bp, Homo sapiens
cgtgctaagaaagtg

SEQ ID NO: 770 - DNA, 15 bp, Homo sapiens
acgtgctaagaaagt

SEQ ID NO: 771 - DNA, 15 bp, Homo sapiens
cacgtgctaagaaag

SEQ ID NO: 772 - DNA, 15 bp, Homo sapiens
ccacgtgctaagaaa

SEQ ID NO: 773 - DNA, 15 bp, Homo sapiens
gccacgtgctaagaa

SEQ ID NO: 774 - DNA, 15 bp, Homo sapiens
ggccacgtgctaaga

SEQ ID NO: 775 - DNA, 15 bp, Homo sapiens
aggccacgtgctaag

SEQ ID NO: 776 - DNA, 15 bp, Homo sapiens
gaggccacgtgctaa

SEQ ID NO: 777 - DNA, 15 bp, Homo sapiens
tgaggccacgtgcta

SEQ ID NO: 778 - DNA, 15 bp, Homo sapiens
ctgaggccacgtgct

SEQ ID NO: 779 - DNA, 15 bp, Homo sapiens
cctgaggccacgtgc

SEQ ID NO: 780 - DNA, 15 bp, Homo sapiens
gcctgaggccacgtg

SEQ ID NO: 781 - DNA, 15 bp, Homo sapiens
ggcctgaggccacgt

SEQ ID NO: 782 - DNA, 15 bp, Homo sapiens
gggcctgaggccacg

SEQ ID NO: 783 - DNA, 15 bp, Homo sapiens
tgggcctgaggccac

SEQ ID NO: 784 - DNA, 15 bp, Homo sapiens
atgggcctgaggcca

SEQ ID NO: 785 - DNA, 15 bp, Homo sapiens
catgggcctgaggcc

SEQ ID NO: 786 - DNA, 15 bp, Homo sapiens
acatgggcctgaggc

SEQ ID NO: 787 - DNA, 15 bp, Homo sapiens
gacatgggcctgagg

SEQ ID NO: 788 - DNA, 15 bp, Homo sapiens
ggacatgggcctgag

SEQ ID NO: 789 - DNA, 15 bp, Homo sapiens
aggacatgggcctga

SEQ ID NO: 790 - DNA, 15 bp, Homo sapiens
aaggacatgggcctg

SEQ ID NO: 791 - DNA, 15 bp, Homo sapiens
taaggacatgggcct

SEQ ID NO: 792 - DNA, 15 bp, Homo sapiens
ttaaggacatgggcc

SEQ ID NO: 793 - DNA, 15 bp, Homo sapiens
gttaaggacatgggc

SEQ ID NO: 794 - DNA, 15 bp, Homo sapiens
ggttaaggacatggg

SEQ ID NO: 795 - DNA, 15 bp, Homo sapiens
tggttaaggacatgg

SEQ ID NO: 796 - DNA, 15 bp, Homo sapiens
atggttaaggacatg

SEQ ID NO: 797 - DNA, 15 bp, Homo sapiens
tatggttaaggacat

SEQ ID NO: 798 - DNA, 15 bp, Homo sapiens
ttatggttaaggaca

SEQ ID NO: 799 - DNA, 15 bp, Homo sapiens
attatggttaaggac

SEQ ID NO: 800 - DNA, 15 bp, Homo sapiens
cattatggttaagga

SEQ ID NO: 801 - DNA, 15 bp, Homo sapiens
gcattatggttaagg

SEQ ID NO: 802 - DNA, 15 bp, Homo sapiens
ggcattatggttaag

SEQ ID NO: 803 - DNA, 15 bp, Homo sapiens
gggcattatggttaa

SEQ ID NO: 804 - DNA, 15 bp, Homo sapiens
agggcattatggtta

SEQ ID NO: 805 - DNA, 15 bp, Homo sapiens
tagggcattatggtt

SEQ ID NO: 806 - DNA, 15 bp, Homo sapiens
gtagggcattatggt

SEQ ID NO: 807 - DNA, 15 bp, Homo sapiens
ggtagggcattatgg

SEQ ID NO: 808 - DNA, 15 bp, Homo sapiens
tggtagggcattatg

SEQ ID NO: 809 - DNA, 15 bp, Homo sapiens
ttggtagggcattat

SEQ ID NO: 810 - DNA, 15 bp, Homo sapiens
cttggtagggcatta

SEQ ID NO: 811 - DNA, 15 bp, Homo sapiens
acttggtagggcatt

SEQ ID NO: 812 - DNA, 15 bp, Homo sapiens
aacttggtagggcat

SEQ ID NO: 813 - DNA, 15 bp, Homo sapiens
aaacttggtagggca

SEQ ID NO: 814 - DNA, 15 bp, Homo sapiens
aaaacttggtagggc

SEQ ID NO: 815 - DNA, 15 bp, Homo sapiens
gaaaacttggtaggg

SEQ ID NO: 816 - DNA, 15 bp, Homo sapiens
agaaaacttggtagg

SEQ ID NO: 817 - DNA, 15 bp, Homo sapiens
cagaaaacttggtag

SEQ ID NO: 818 - DNA, 15 bp, Homo sapiens
acagaaaacttggta

SEQ ID NO: 819 - DNA, 15 bp, Homo sapiens
cacagaaaacttggt

SEQ ID NO: 820 - DNA, 15 bp, Homo sapiens
ccacagaaaacttgg

SEQ ID NO: 821 - DNA, 15 bp, Homo sapiens
gccacagaaaacttg

SEQ ID NO: 822 - DNA, 15 bp, Homo sapiens
tgccacagaaaactt

SEQ ID NO: 823 - DNA, 15 bp, Homo sapiens
atgccacagaaaact

SEQ ID NO: 824 - DNA, 15 bp, Homo sapiens
tatgccacagaaaac

SEQ ID NO: 825 - DNA, 15 bp, Homo sapiens
ttatgccacagaaaa

SEQ ID NO: 826 - DNA, 15 bp, Homo sapiens
tttatgccacagaaa

SEQ ID NO: 827 - DNA, 15 bp, Homo sapiens
ttttatgccacagaa

SEQ ID NO: 828 - DNA, 15 bp, Homo sapiens
cttttatgccacaga

SEQ ID NO: 829 - DNA, 15 bp, Homo sapiens
tcttttatgccacag

SEQ ID NO: 830 - DNA, 15 bp, Homo sapiens
ctcttttatgccaca

SEQ ID NO: 831 - DNA, 15 bp, Homo sapiens
cctcttttatgccac

SEQ ID NO: 832 - DNA, 15 bp, Homo sapiens
tcctcttttatgcca

SEQ ID NO: 833 - DNA, 15 bp, Homo sapiens
atcctcttttatgcc

SEQ ID NO: 834 - DNA, 15 bp, Homo sapiens
gatcctcttttatgc

SEQ ID NO: 835 - DNA, 15 bp, Homo sapiens
tgatcctcttttatg

SEQ ID NO: 836 - DNA, 15 bp, Homo sapiens
gtgatcctcttttat

SEQ ID NO: 837 - DNA, 15 bp, Homo sapiens
cgtgatcctctttta

SEQ ID NO: 838 - DNA, 15 bp, Homo sapiens
acgtgatcctctttt

SEQ ID NO: 839 - DNA, 15 bp, Homo sapiens
aacgtgatcctcttt

SEQ ID NO: 840 - DNA, 15 bp, Homo sapiens
gaacgtgatcctctt

SEQ ID NO: 841 - DNA, 15 bp, Homo sapiens
tgaacgtgatcctct

SEQ ID NO: 842 - DNA, 15 bp, Homo sapiens
gtgaacgtgatcctc

SEQ ID NO: 843 - DNA, 15 bp, Homo sapiens
tgtgaacgtgatcct

SEQ ID NO: 844 - DNA, 15 bp, Homo sapiens
atgtgaacgtgatcc

SEQ ID NO: 845 - DNA, 15 bp, Homo sapiens
aatgtgaacgtgatc

SEQ ID NO: 846 - DNA, 15 bp, Homo sapiens
taatgtgaacgtgat

SEQ ID NO: 847 - DNA, 15 bp, Homo sapiens
ttaatgtgaacgtga

SEQ ID NO: 848 - DNA, 15 bp, Homo sapiens
attaatgtgaacgtg

SEQ ID NO: 849 - DNA, 15 bp, Homo sapiens
aattaatgtgaacgt

SEQ ID NO: 850 - DNA, 15 bp, Homo sapiens
gaattaatgtgaacg

SEQ ID NO: 851 - DNA, 15 bp, Homo sapiens
ggaattaatgtgaac

SEQ ID NO: 852 - DNA, 15 bp, Homo sapiens
aggaattaatgtgaa

SEQ ID NO: 853 - DNA, 15 bp, Homo sapiens
gaggaattaatgtga

SEQ ID NO: 854 - DNA, 15 bp, Homo sapiens
tgaggaattaatgtg

SEQ ID NO: 855 - DNA, 15 bp, Homo sapiens
gtgaggaattaatgt

SEQ ID NO: 856 - DNA, 15 bp, Homo sapiens
agtgaggaattaatg

SEQ ID NO: 857 - DNA, 15 bp, Homo sapiens
gagtgaggaattaat

SEQ ID NO: 858 - DNA, 15 bp, Homo sapiens
agagtgaggaattaa

SEQ ID NO: 859 - DNA, 15 bp, Homo sapiens
tagagtgaggaatta

SEQ ID NO: 860 - DNA, 15 bp, Homo sapiens
gtagagtgaggaatt

SEQ ID NO: 861 - DNA, 15 bp, Homo sapiens
tgtagagtgaggaat

SEQ ID NO: 862 - DNA, 15 bp, Homo sapiens
ctgtagagtgaggaa

SEQ ID NO: 863 - DNA, 15 bp, Homo sapiens
tctgtagagtgagga

SEQ ID NO: 864 - DNA, 15 bp, Homo sapiens
ttctgtagagtgagg

SEQ ID NO: 865 - DNA, 15 bp, Homo sapiens
tttctgtagagtgag

SEQ ID NO: 866 - DNA, 15 bp, Homo sapiens
ttttctgtagagtga

SEQ ID NO: 867 - DNA, 15 bp, Homo sapiens
gttttctgtagagtg

SEQ ID NO: 868 - DNA, 15 bp, Homo sapiens
agttttctgtagagt

SEQ ID NO: 869 - DNA, 15 bp, Homo sapiens
tagttttctgtagag

SEQ ID NO: 870 - DNA, 15 bp, Homo sapiens
ttagttttctgtaga

SEQ ID NO: 871 - DNA, 15 bp, Homo sapiens
cttagttttctgtag

SEQ ID NO: 872 - DNA, 15 bp, Homo sapiens
tcttagttttctgta

SEQ ID NO: 873 - DNA, 15 bp, Homo sapiens
atcttagttttctgt

SEQ ID NO: 874 - DNA, 15 bp, Homo sapiens
catcttagttttctg

SEQ ID NO: 875 - DNA, 15 bp, Homo sapiens
gcatcttagttttct

SEQ ID NO: 876 - DNA, 15 bp, Homo sapiens
ggcatcttagttttc

SEQ ID NO: 877 - DNA, 15 bp, Homo sapiens
gggcatcttagtttt

SEQ ID NO: 878 - DNA, 15 bp, Homo sapiens
ggggcatcttagttt

SEQ ID NO: 879 - DNA, 15 bp, Homo sapiens
aggggcatcttagtt

SEQ ID NO: 880 - DNA, 15 bp, Homo sapiens
caggggcatcttagt

SEQ ID NO: 881 - DNA, 15 bp, Homo sapiens
tcaggggcatcttag

SEQ ID NO: 882 - DNA, 15 bp, Homo sapiens
gtcaggggcatctta

SEQ ID NO: 883 - DNA, 15 bp, Homo sapiens
agtcaggggcatctt

SEQ ID NO: 884 - DNA, 15 bp, Homo sapiens
aagtcaggggcatct

SEQ ID NO: 885 - DNA, 15 bp, Homo sapiens
caagtcaggggcatc

SEQ ID NO: 886 - DNA, 15 bp, Homo sapiens
acaagtcaggggcat

SEQ ID NO: 887 - DNA, 15 bp, Homo sapiens
gacaagtcaggggca

SEQ ID NO: 888 - DNA, 15 bp, Homo sapiens
ggacaagtcaggggc

SEQ ID NO: 889 - DNA, 15 bp, Homo sapiens
gggacaagtcagggg

SEQ ID NO: 890 - DNA, 15 bp, Homo sapiens
cgggacaagtcaggg

SEQ ID NO: 891 - DNA, 15 bp, Homo sapiens
acgggacaagtcagg

SEQ ID NO: 892 - DNA, 15 bp, Homo sapiens
aacgggacaagtcag

SEQ ID NO: 893 - DNA, 15 bp, Homo sapiens
gaacgggacaagtca

SEQ ID NO: 894 - DNA, 15 bp, Homo sapiens
tgaacgggacaagtc

SEQ ID NO: 895 - DNA, 15 bp, Homo sapiens
ttgaacgggacaagt

SEQ ID NO: 896 - DNA, 15 bp, Homo sapiens
gttgaacgggacaag

SEQ ID NO: 897 - DNA, 15 bp, Homo sapiens
agttgaacgggacaa

SEQ ID NO: 898 - DNA, 15 bp, Homo sapiens
gagttgaacgggaca

SEQ ID NO: 899 - DNA, 15 bp, Homo sapiens
ggagttgaacgggac

SEQ ID NO: 900 - DNA, 15 bp, Homo sapiens
tggagttgaacggga

SEQ ID NO: 901 - DNA, 15 bp, Homo sapiens
ctggagttgaacggg

SEQ ID NO: 902 - DNA, 15 bp, Homo sapiens
actggagttgaacgg

SEQ ID NO: 903 - DNA, 15 bp, Homo sapiens
aactggagttgaacg

SEQ ID NO: 904 - DNA, 15 bp, Homo sapiens
taactggagttgaac

SEQ ID NO: 905 - DNA, 15 bp, Homo sapiens
ataactggagttgaa

SEQ ID NO: 906 - DNA, 15 bp, Homo sapiens
aataactggagttga

SEQ ID NO: 907 - DNA, 15 bp, Homo sapiens
gaataactggagttg

SEQ ID NO: 908 - DNA, 15 bp, Homo sapiens
agaataactggagtt

SEQ ID NO: 909 - DNA, 15 bp, Homo sapiens
cagaataactggagt

SEQ ID NO: 910 - DNA, 15 bp, Homo sapiens
ccagaataactggag

SEQ ID NO: 911 - DNA, 15 bp, Homo sapiens
accagaataactgga

SEQ ID NO: 912 - DNA, 15 bp, Homo sapiens
aaccagaataactgg

SEQ ID NO: 913 - DNA, 15 bp, Homo sapiens
aaaccagaataactg

SEQ ID NO: 914 - DNA, 15 bp, Homo sapiens
gaaaccagaataact

SEQ ID NO: 915 - DNA, 15 bp, Homo sapiens
ggaaaccagaataac

SEQ ID NO: 916 - DNA, 15 bp, Homo sapiens
gggaaaccagaataa

SEQ ID NO: 917 - DNA, 15 bp, Homo sapiens
ggggaaaccagaata

SEQ ID NO: 918 - DNA, 15 bp, Homo sapiens
aggggaaaccagaat

SEQ ID NO: 919 - DNA, 15 bp, Homo sapiens
caggggaaaccagaa

SEQ ID NO: 920 - DNA, 15 bp, Homo sapiens
tcaggggaaaccaga

SEQ ID NO: 921 - DNA, 15 bp, Homo sapiens
ctcaggggaaaccag

SEQ ID NO: 922 - DNA, 15 bp, Homo sapiens
cctcaggggaaacca

SEQ ID NO: 923 - DNA, 15 bp, Homo sapiens
gcctcaggggaaacc

SEQ ID NO: 924 - DNA, 15 bp, Homo sapiens
agcctcaggggaaac

SEQ ID NO: 925 - DNA, 15 bp, Homo sapiens
cagcctcaggggaaa

SEQ ID NO: 926 - DNA, 15 bp, Homo sapiens
gcagcctcaggggaa

SEQ ID NO: 927 - DNA, 15 bp, Homo sapiens
ggcagcctcagggga

SEQ ID NO: 928 - DNA, 15 bp, Homo sapiens
tggcagcctcagggg

SEQ ID NO: 929 - DNA, 15 bp, Homo sapiens
ttggcagcctcaggg

SEQ ID NO: 930 - DNA, 15 bp, Homo sapiens
gttggcagcctcagg

SEQ ID NO: 931 - DNA, 15 bp, Homo sapiens
agttggcagcctcag

SEQ ID NO: 932 - DNA, 15 bp, Homo sapiens
gagttggcagcctca

SEQ ID NO: 933 - DNA, 15 bp, Homo sapiens
tgagttggcagcctc

SEQ ID NO: 934 - DNA, 15 bp, Homo sapiens
ctgagttggcagcct

SEQ ID NO: 935 - DNA, 15 bp, Homo sapiens
tctgagttggcagcc

SEQ ID NO: 936 - DNA, 15 bp, Homo sapiens
atctgagttggcagc

SEQ ID NO: 937 - DNA, 15 bp, Homo sapiens
tatctgagttggcag

SEQ ID NO: 938 - DNA, 15 bp, Homo sapiens
ctatctgagttggca

SEQ ID NO: 939 - DNA, 15 bp, Homo sapiens
gctatctgagttggc

SEQ ID NO: 940 - DNA, 15 bp, Homo sapiens
tgctatctgagttgg

SEQ ID NO: 941 - DNA, 15 bp, Homo sapiens
ctgctatctgagttg

SEQ ID NO: 942 - DNA, 15 bp, Homo sapiens
cctgctatctgagtt

SEQ ID NO: 943 - DNA, 15 bp, Homo sapiens
acctgctatctgagt

SEQ ID NO: 944 - DNA, 15 bp, Homo sapiens
aacctgctatctgag

SEQ ID NO: 945 - DNA, 15 bp, Homo sapiens
caacctgctatctga

SEQ ID NO: 946 - DNA, 15 bp, Homo sapiens
ccaacctgctatctg

SEQ ID NO: 947 - DNA, 15 bp, Homo sapiens
tccaacctgctatct

SEQ ID NO: 948 - DNA, 15 bp, Homo sapiens
atccaacctgctatc

SEQ ID NO: 949 - DNA, 15 bp, Homo sapiens
gatccaacctgctat

SEQ ID NO: 950 - DNA, 15 bp, Homo sapiens
ggatccaacctgcta

SEQ ID NO: 951 - DNA, 15 bp, Homo sapiens
gggatccaacctgct

SEQ ID NO: 952 - DNA, 15 bp, Homo sapiens
ggggatccaacctgc

SEQ ID NO: 953 - DNA, 15 bp, Homo sapiens
tggggatccaacctg

SEQ ID NO: 954 - DNA, 15 bp, Homo sapiens
atggggatccaacct

SEQ ID NO: 955 - DNA, 15 bp, Homo sapiens
gatggggatccaacc

SEQ ID NO: 956 - DNA, 15 bp, Homo sapiens
ggatggggatccaac

SEQ ID NO: 957 - DNA, 15 bp, Homo sapiens
gggatggggatccaa

SEQ ID NO: 958 - DNA, 15 bp, Homo sapiens
agggatggggatcca

SEQ ID NO: 959 - DNA, 15 bp, Homo sapiens
aagggatggggatcc

SEQ ID NO: 960 - DNA, 15 bp, Homo sapiens
gaagggatggggatc

SEQ ID NO: 961 - DNA, 15 bp, Homo sapiens
tgaagggatggggat

SEQ ID NO: 962 - DNA, 15 bp, Homo sapiens
ctgaagggatgggga

SEQ ID NO: 963 - DNA, 15 bp, Homo sapiens
actgaagggatgggg

SEQ ID NO: 964 - DNA, 15 bp, Homo sapiens
aactgaagggatggg

SEQ ID NO: 965 - DNA, 15 bp, Homo sapiens
taactgaagggatgg

SEQ ID NO: 966 - DNA, 15 bp, Homo sapiens
ataactgaagggatg

SEQ ID NO: 967 - DNA, 15 bp, Homo sapiens
tataactgaagggat

SEQ ID NO: 968 - DNA, 15 bp, Homo sapiens
ctataactgaaggga

SEQ ID NO: 969 - DNA, 15 bp, Homo sapiens
cctataactgaaggg

SEQ ID NO: 970 - DNA, 15 bp, Homo sapiens
acctataactgaagg

SEQ ID NO: 971 - DNA, 15 bp, Homo sapiens
cacctataactgaag

SEQ ID NO: 972 - DNA, 15 bp, Homo sapiens
gcacctataactgaa

SEQ ID NO: 973 - DNA, 15 bp, Homo sapiens
tgcacctataactga

SEQ ID NO: 974 - DNA, 15 bp, Homo sapiens
gtgcacctataactg

SEQ ID NO: 975 - DNA, 15 bp, Homo sapiens
agtgcacctataact

SEQ ID NO: 976 - DNA, 15 bp, Homo sapiens
cagtgcacctataac

SEQ ID NO: 977 - DNA, 15 bp, Homo sapiens
tcagtgcacctataa

SEQ ID NO: 978 - DNA, 15 bp, Homo sapiens
ttcagtgcacctata

SEQ ID NO: 979 - DNA, 15 bp, Homo sapiens
tttcagtgcacctat

SEQ ID NO: 980 - DNA, 15 bp, Homo sapiens
ctttcagtgcaccta

SEQ ID NO: 981 - DNA, 15 bp, Homo sapiens
tctttcagtgcacct

SEQ ID NO: 982 - DNA, 15 bp, Homo sapiens
gtctttcagtgcacc

SEQ ID NO: 983 - DNA, 15 bp, Homo sapiens
tgtctttcagtgcac

SEQ ID NO: 984 - DNA, 15 bp, Homo sapiens
ctgtctttcagtgca

SEQ ID NO: 985 - DNA, 15 bp, Homo sapiens
actgtctttcagtgc

SEQ ID NO: 986 - DNA, 15 bp, Homo sapiens
cactgtctttcagtg

SEQ ID NO: 987 - DNA, 15 bp, Homo sapiens
ccactgtctttcagt

SEQ ID NO: 988 - DNA, 15 bp, Homo sapiens
cccactgtctttcag

SEQ ID NO: 989 - DNA, 15 bp, Homo sapiens
gcccactgtctttca

SEQ ID NO: 990 - DNA, 15 bp, Homo sapiens
ggcccactgtctttc

SEQ ID NO: 991 - DNA, 15 bp, Homo sapiens
aggcccactgtcttt

SEQ ID NO: 992 - DNA, 15 bp, Homo sapiens
aaggcccactgtctt

SEQ ID NO: 993 - DNA, 15 bp, Homo sapiens
gaaggcccactgtct

SEQ ID NO: 994 - DNA, 15 bp, Homo sapiens
ggaaggcccactgtc

SEQ ID NO: 995 - DNA, 15 bp, Homo sapiens
aggaaggcccactgt

SEQ ID NO: 996 - DNA, 15 bp, Homo sapiens
caggaaggcccactg

SEQ ID NO: 997 - DNA, 15 bp, Homo sapiens
acaggaaggcccact

SEQ ID NO: 998 - DNA, 15 bp, Homo sapiens
cacaggaaggcccac

SEQ ID NO: 999 - DNA, 15 bp, Homo sapiens
gcacaggaaggccca

SEQ ID NO: 1000 - DNA, 15 bp, Homo sapiens
tgcacaggaaggccc

SEQ ID NO: 1001 - DNA, 15 bp, Homo sapiens
atgcacaggaaggcc

SEQ ID NO: 1002 - DNA, 15 bp, Homo sapiens
gatgcacaggaaggc

SEQ ID NO: 1003 - DNA, 15 bp, Homo sapiens
tgatgcacaggaagg

SEQ ID NO: 1004 - DNA, 15 bp, Homo sapiens
ctgatgcacaggaag

SEQ ID NO: 1005 - DNA, 15 bp, Homo sapiens
gctgatgcacaggaa

SEQ ID NO: 1006 - DNA, 15 bp, Homo sapiens
ggctgatgcacagga

SEQ ID NO: 1007 - DNA, 15 bp, Homo sapiens
gggctgatgcacagg

SEQ ID NO: 1008 - DNA, 15 bp, Homo sapiens
ggggctgatgcacag

SEQ ID NO: 1009 - DNA, 15 bp, Homo sapiens
tggggctgatgcaca

SEQ ID NO: 1010 - DNA, 15 bp, Homo sapiens
ctggggctgatgcac

SEQ ID NO: 1011 - DNA, 15 bp, Homo sapiens
actggggctgatgca

SEQ ID NO: 1012 - DNA, 15 bp, Homo sapiens
cactggggctgatgc

SEQ ID NO: 1013 - DNA, 15 bp, Homo sapiens
tcactggggctgatg

SEQ ID NO: 1014 - DNA, 15 bp, Homo sapiens
gtcactggggctgat

SEQ ID NO: 1015 - DNA, 15 bp, Homo sapiens
cgtcactggggctga

SEQ ID NO: 1016 - DNA, 15 bp, Homo sapiens
ccgtcactggggctg

SEQ ID NO: 1017 - DNA, 15 bp, Homo sapiens
tccgtcactggggct

SEQ ID NO: 1018 - DNA, 15 bp, Homo sapiens
atccgtcactggggc

SEQ ID NO: 1019 - DNA, 15 bp, Homo sapiens
gatccgtcactgggg

SEQ ID NO: 1020 - DNA, 15 bp, Homo sapiens
ggatccgtcactggg

SEQ ID NO: 1021 - DNA, 15 bp, Homo sapiens
aggatccgtcactgg

SEQ ID NO: 1022 - DNA, 15 bp, Homo sapiens
caggatccgtcactg

SEQ ID NO: 1023 - DNA, 15 bp, Homo sapiens
ccaggatccgtcact

SEQ ID NO: 1024 - DNA, 15 bp, Homo sapiens
tccaggatccgtcac

SEQ ID NO: 1025 - DNA, 15 bp, Homo sapiens
ctccaggatccgtca

SEQ ID NO: 1026 - DNA, 15 bp, Homo sapiens
tctccaggatccgtc

SEQ ID NO: 1027 - DNA, 15 bp, Homo sapiens
gtctccaggatccgt

SEQ ID NO: 1028 - DNA, 15 bp, Homo sapiens
tgtctccaggatccg

SEQ ID NO: 1029 - DNA, 15 bp, Homo sapiens
gtgtctccaggatcc

SEQ ID NO: 1030 - DNA, 15 bp, Homo sapiens
ggtgtctccaggatc

SEQ ID NO: 1031 - DNA, 15 bp, Homo sapiens
tggtgtctccaggat

SEQ ID NO: 1032 - DNA, 15 bp, Homo sapiens
atggtgtctccagga

SEQ ID NO: 1033 - DNA, 15 bp, Homo sapiens
catggtgtctccagg

SEQ ID NO: 1034 - DNA, 15 bp, Homo sapiens
ccatggtgtctccag

SEQ ID NO: 1035 - DNA, 15 bp, Homo sapiens
accatggtgtctcca

SEQ ID NO: 1036 - DNA, 15 bp, Homo sapiens
caccatggtgtctcc

SEQ ID NO: 1037 - DNA, 15 bp, Homo sapiens
tcaccatggtgtctc

SEQ ID NO: 1038 - DNA, 15 bp, Homo sapiens
ctcaccatggtgtct

SEQ ID NO: 1039 - DNA, 15 bp, Homo sapiens
gctcaccatggtgtc

SEQ ID NO: 1040 - DNA, 15 bp, Homo sapiens
tgctcaccatggtgt

SEQ ID NO: 1041 - DNA, 15 bp, Homo sapiens
ttgctcaccatggtg

SEQ ID NO: 1042 - DNA, 15 bp, Homo sapiens
tttgctcaccatggt

SEQ ID NO: 1043 - DNA, 15 bp, Homo sapiens
gtttgctcaccatgg

SEQ ID NO: 1044 - DNA, 15 bp, Homo sapiens
ggtttgctcaccatg

SEQ ID NO: 1045 - DNA, 15 bp, Homo sapiens
gggtttgctcaccat

SEQ ID NO: 1046 - DNA, 15 bp, Homo sapiens
tgggtttgctcacca

SEQ ID NO: 1047 - DNA, 15 bp, Homo sapiens
ttgggtttgctcacc

SEQ ID NO: 1048 - DNA, 15 bp, Homo sapiens
gttgggtttgctcac

SEQ ID NO: 1049 - DNA, 15 bp, Homo sapiens
agttgggtttgctca

SEQ ID NO: 1050 - DNA, 15 bp, Homo sapiens
tagttgggtttgctc

SEQ ID NO: 1051 - DNA, 15 bp, Homo sapiens
ctagttgggtttgct

SEQ ID NO: 1052 - DNA, 15 bp, Homo sapiens
cctagttgggtttgc

SEQ ID NO: 1053 - DNA, 15 bp, Homo sapiens
tcctagttgggtttg

SEQ ID NO: 1054 - DNA, 15 bp, Homo sapiens
ttcctagttgggttt

SEQ ID NO: 1055 - DNA, 15 bp, Homo sapiens
cttcctagttgggtt

SEQ ID NO: 1056 - DNA, 15 bp, Homo sapiens
gcttcctagttgggt

SEQ ID NO: 1057 - DNA, 15 bp, Homo sapiens
agcttcctagttggg

SEQ ID NO: 1058 - DNA, 15 bp, Homo sapiens
aagcttcctagttgg

SEQ ID NO: 1059 - DNA, 15 bp, Homo sapiens
taagcttcctagttg

SEQ ID NO: 1060 - DNA, 15 bp, Homo sapiens
gtaagcttcctagtt

SEQ ID NO: 1061 - DNA, 15 bp, Homo sapiens
tgtaagcttcctagt

SEQ ID NO: 1062 - DNA, 15 bp, Homo sapiens
ttgtaagcttcctag

SEQ ID NO: 1063 - DNA, 15 bp, Homo sapiens
attgtaagcttccta

SEQ ID NO: 1064 - DNA, 15 bp, Homo sapiens
aattgtaagcttcct

SEQ ID NO: 1065 - DNA, 15 bp, Homo sapiens
gaattgtaagcttcc

SEQ ID NO: 1066 - DNA, 15 bp, Homo sapiens
tgaattgtaagcttc

SEQ ID NO: 1067 - DNA, 15 bp, Homo sapiens
ctgaattgtaagctt

SEQ ID NO: 1068 - DNA, 15 bp, Homo sapiens
actgaattgtaagct

SEQ ID NO: 1069 - DNA, 15 bp, Homo sapiens
tactgaattgtaagc

SEQ ID NO: 1070 - DNA, 15 bp, Homo sapiens
atactgaattgtaag

SEQ ID NO: 1071 - DNA, 15 bp, Homo sapiens
catactgaattgtaa

SEQ ID NO: 1072 - DNA, 15 bp, Homo sapiens
ccatactgaattgta

SEQ ID NO: 1073 - DNA, 15 bp, Homo sapiens
tccatactgaattgt

SEQ ID NO: 1074 - DNA, 15 bp, Homo sapiens
ctccatactgaattg

SEQ ID NO: 1075 - DNA, 15 bp, Homo sapiens
cctccatactgaatt

SEQ ID NO: 1076 - DNA, 15 bp, Homo sapiens
tcctccatactgaat

SEQ ID NO: 1077 - DNA, 15 bp, Homo sapiens
ttcctccatactgaa

SEQ ID NO: 1078 - DNA, 15 bp, Homo sapiens
cttcctccatactga

SEQ ID NO: 1079 - DNA, 15 bp, Homo sapiens
tcttcctccatactg

SEQ ID NO: 1080 - DNA, 15 bp, Homo sapiens
gtcttcctccatact

SEQ ID NO: 1081 - DNA, 15 bp, Homo sapiens
tgtcttcctccatac

SEQ ID NO: 1082 - DNA, 15 bp, Homo sapiens
atgtcttcctccata

SEQ ID NO: 1083 - DNA, 15 bp, Homo sapiens
aatgtcttcctccat

SEQ ID NO: 1084 - DNA, 15 bp, Homo sapiens
taatgtcttcctcca

SEQ ID NO: 1085 - DNA, 15 bp, Homo sapiens
ttaatgtcttcctcc

SEQ ID NO: 1086 - DNA, 15 bp, Homo sapiens
tttaatgtcttcctc

SEQ ID NO: 1087 - DNA, 15 bp, Homo sapiens
ttttaatgtcttcct

SEQ ID NO: 1088 - DNA, 15 bp, Homo sapiens
tttttaatgtcttcc

SEQ ID NO: 1089 - DNA, 15 bp, Homo sapiens
ttttttaatgtcttc

SEQ ID NO: 1090 - DNA, 15 bp, Homo sapiens
tttttttaatgtctt

SEQ ID NO: 1091 - DNA, 15 bp, Homo sapiens
atttttttaatgtct

SEQ ID NO: 1092 - DNA, 15 bp, Homo sapiens
tatttttttaatgtc

SEQ ID NO: 1093 - DNA, 15 bp, Homo sapiens
gtatttttttaatgt

SEQ ID NO: 1094 - DNA, 15 bp, Homo sapiens
agtatttttttaatg

SEQ ID NO: 1095 - DNA, 15 bp, Homo sapiens
gagtatttttttaat

SEQ ID NO: 1096 - DNA, 15 bp, Homo sapiens
tgagtatttttttaa

SEQ ID NO: 1097 - DNA, 15 bp, Homo sapiens
ttgagtattttttta

SEQ ID NO: 1098 - DNA, 15 bp, Homo sapiens
tttgagtattttttt

SEQ ID NO: 1099 - DNA, 15 bp, Homo sapiens
gtttgagtatttttt

SEQ ID NO: 1100 - DNA, 15 bp, Homo sapiens
agtttgagtattttt

SEQ ID NO: 1101 - DNA, 15 bp, Homo sapiens
gagtttgagtatttt

SEQ ID NO: 1102 - DNA, 15 bp, Homo sapiens
tgagtttgagtattt

SEQ ID NO: 1103 - DNA, 15 bp, Homo sapiens
atgagtttgagtatt

SEQ ID NO: 1104 - DNA, 15 bp, Homo sapiens
aatgagtttgagtat

SEQ ID NO: 1105 - DNA, 15 bp, Homo sapiens
taatgagtttgagta

SEQ ID NO: 1106 - DNA, 15 bp, Homo sapiens
ataatgagtttgagt

SEQ ID NO: 1107 - DNA, 15 bp, Homo sapiens
aataatgagtttgag

SEQ ID NO: 1108 - DNA, 15 bp, Homo sapiens
aaataatgagtttga

SEQ ID NO: 1109 - DNA, 15 bp, Homo sapiens
gaaataatgagtttg

SEQ ID NO: 1110 - DNA, 15 bp, Homo sapiens
tgaaataatgagttt

SEQ ID NO: 1111 - DNA, 15 bp, Homo sapiens
ttgaaataatgagtt

SEQ ID NO: 1112 - DNA, 15 bp, Homo sapiens
gttgaaataatgagt

SEQ ID NO: 1113 - DNA, 15 bp, Homo sapiens
tgttgaaataatgag

SEQ ID NO: 1114 - DNA, 15 bp, Homo sapiens
ttgttgaaataatga

SEQ ID NO: 1115 - DNA, 15 bp, Homo sapiens
tttgttgaaataatg

SEQ ID NO: 1116 - DNA, 15 bp, Homo sapiens
gtttgttgaaataat

SEQ ID NO: 1117 - DNA, 15 bp, Homo sapiens
tgtttgttgaaataa

SEQ ID NO: 1118 - DNA, 15 bp, Homo sapiens
atgtttgttgaaata

SEQ ID NO: 1119 - DNA, 15 bp, Homo sapiens
aatgtttgttgaaat

SEQ ID NO: 1120 - DNA, 15 bp, Homo sapiens
aaatgtttgttgaaa

SEQ ID NO: 1121 - DNA, 15 bp, Homo sapiens
taaatgtttgttgaa

SEQ ID NO: 1122 - DNA, 15 bp, Homo sapiens
ataaatgtttgttga

SEQ ID NO: 1123 - DNA, 15 bp, Homo sapiens
aataaatgtttgttg

SEQ ID NO: 1124 - DNA, 15 bp, Homo sapiens
caataaatgtttgtt

SEQ ID NO: 1125 - DNA, 15 bp, Homo sapiens
tcaataaatgtttgt

SEQ ID NO: 1126 - DNA, 15 bp, Homo sapiens
ctcaataaatgtttg

SEQ ID NO: 1127 - DNA, 15 bp, Homo sapiens
gctcaataaatgttt

SEQ ID NO: 1128 - DNA, 15 bp, Homo sapiens
tgctcaataaatgtt

SEQ ID NO: 1129 - DNA, 15 bp, Homo sapiens
gtgctcaataaatgt

SEQ ID NO: 1130 - DNA, 15 bp, Homo sapiens
ggtgctcaataaatg

SEQ ID NO: 1131 - DNA, 15 bp, Homo sapiens
aggtgctcaataaat

SEQ ID NO: 1132 - DNA, 15 bp, Homo sapiens
caggtgctcaataaa

SEQ ID NO: 1133 - DNA, 15 bp, Homo sapiens
gcaggtgctcaataa

SEQ ID NO: 1134 - DNA, 15 bp, Homo sapiens
agcaggtgctcaata

SEQ ID NO: 1135 - DNA, 15 bp, Homo sapiens
tagcaggtgctcaat

SEQ ID NO: 1136 - DNA, 15 bp, Homo sapiens
ttagcaggtgctcaa

SEQ ID NO: 1137 - DNA, 15 bp, Homo sapiens
cttagcaggtgctca

SEQ ID NO: 1138 - DNA, 15 bp, Homo sapiens
acttagcaggtgctc

SEQ ID NO: 1139 - DNA, 15 bp, Homo sapiens
cacttagcaggtgct

SEQ ID NO: 1140 - DNA, 15 bp, Homo sapiens
gcacttagcaggtgc

SEQ ID NO: 1141 - DNA, 15 bp, Homo sapiens
ggcacttagcaggtg

SEQ ID NO: 1142 - DNA, 15 bp, Homo sapiens
tggcacttagcaggt

SEQ ID NO: 1143 - DNA, 15 bp, Homo sapiens
ctggcacttagcagg

SEQ ID NO: 1144 - DNA, 15 bp, Homo sapiens
cctggcacttagcag

SEQ ID NO: 1145 - DNA, 15 bp, Homo sapiens
gcctggcacttagca

SEQ ID NO: 1146 - DNA, 15 bp, Homo sapiens
tgcctggcacttagc

SEQ ID NO: 1147 - DNA, 15 bp, Homo sapiens
gtgcctggcacttag

SEQ ID NO: 1148 - DNA, 15 bp, Homo sapiens
agtgcctggcactta

SEQ ID NO: 1149 - DNA, 15 bp, Homo sapiens
cagtgcctggcactt

SEQ ID NO: 1150 - DNA, 15 bp, Homo sapiens
acagtgcctggcact

SEQ ID NO: 1151 - DNA, 15 bp, Homo sapiens
cacagtgcctggcac

SEQ ID NO: 1152 - DNA, 15 bp, Homo sapiens
ccacagtgcctggca

SEQ ID NO: 1153 - DNA, 15 bp, Homo sapiens
gccacagtgcctggc

SEQ ID NO: 1154 - DNA, 15 bp, Homo sapiens
tgccacagtgcctgg

SEQ ID NO: 1155 - DNA, 15 bp, Homo sapiens
ctgccacagtgcctg

SEQ ID NO: 1156 - DNA, 15 bp, Homo sapiens
cctgccacagtgcct

SEQ ID NO: 1157 - DNA, 15 bp, Homo sapiens
gcctgccacagtgcc

SEQ ID NO: 1158 - DNA, 15 bp, Homo sapiens
ggcctgccacagtgc

SEQ ID NO: 1159 - DNA, 15 bp, Homo sapiens
aggcctgccacagtg

SEQ ID NO: 1160 - DNA, 15 bp, Homo sapiens
caggcctgccacagt

SEQ ID NO: 1161 - DNA, 15 bp, Homo sapiens
gcaggcctgccacag

SEQ ID NO: 1162 - DNA, 15 bp, Homo sapiens
tgcaggcctgccaca

SEQ ID NO: 1163 - DNA, 15 bp, Homo sapiens
ctgcaggcctgccac

SEQ ID NO: 1164 - DNA, 15 bp, Homo sapiens
cctgcaggcctgcca

SEQ ID NO: 1165 - DNA, 15 bp, Homo sapiens
tcctgcaggcctgcc

SEQ ID NO: 1166 - DNA, 15 bp, Homo sapiens
ttcctgcaggcctgc

SEQ ID NO: 1167 - DNA, 15 bp, Homo sapiens
attcctgcaggcctg

SEQ ID NO: 1168 - DNA, 15 bp, Homo sapiens
tattcctgcaggcct

SEQ ID NO: 1169 - DNA, 15 bp, Homo sapiens
gtattcctgcaggcc

SEQ ID NO: 1170 - DNA, 15 bp, Homo sapiens
tgtattcctgcaggc

SEQ ID NO: 1171 - DNA, 15 bp, Homo sapiens
ctgtattcctgcagg

SEQ ID NO: 1172 - DNA, 15 bp, Homo sapiens
actgtattcctgcag

SEQ ID NO: 1173 - DNA, 15 bp, Homo sapiens
cactgtattcctgca

SEQ ID NO: 1174 - DNA, 15 bp, Homo sapiens
ccactgtattcctgc

SEQ ID NO: 1175 - DNA, 15 bp, Homo sapiens
accactgtattcctg

SEQ ID NO: 1176 - DNA, 15 bp, Homo sapiens
caccactgtattcct

SEQ ID NO: 1177 - DNA, 15 bp, Homo sapiens
tcaccactgtattcc

SEQ ID NO: 1178 - DNA, 15 bp, Homo sapiens
ttcaccactgtattc

SEQ ID NO: 1179 - DNA, 15 bp, Homo sapiens
attcaccactgtatt

SEQ ID NO: 1180 - DNA, 15 bp, Homo sapiens
cattcaccactgtat

SEQ ID NO: 1181 - DNA, 15 bp, Homo sapiens
tcattcaccactgta

SEQ ID NO: 1182 - DNA, 15 bp, Homo sapiens
ttcattcaccactgt

SEQ ID NO: 1183 - DNA, 15 bp, Homo sapiens
tttcattcaccactg

SEQ ID NO: 1184 - DNA, 15 bp, Homo sapiens
ctttcattcaccact

SEQ ID NO: 1185 - DNA, 15 bp, Homo sapiens
gctttcattcaccac

SEQ ID NO: 1186 - DNA, 15 bp, Homo sapiens
tgctttcattcacca

SEQ ID NO: 1187 - DNA, 15 bp, Homo sapiens
ctgctttcattcacc

SEQ ID NO: 1188 - DNA, 15 bp, Homo sapiens
tctgctttcattcac

SEQ ID NO: 1189 - DNA, 15 bp, Homo sapiens
gtctgctttcattca

SEQ ID NO: 1190 - DNA, 15 bp, Homo sapiens
ggtctgctttcattc

SEQ ID NO: 1191 - DNA, 15 bp, Homo sapiens
tggtctgctttcatt

SEQ ID NO: 1192 - DNA, 15 bp, Homo sapiens
atggtctgctttcat

SEQ ID NO: 1193 - DNA, 15 bp, Homo sapiens
catggtctgctttca

SEQ ID NO: 1194 - DNA, 15 bp, Homo sapiens
acatggtctgctttc

SEQ ID NO: 1195 - DNA, 15 bp, Homo sapiens
gacatggtctgcttt

SEQ ID NO: 1196 - DNA, 15 bp, Homo sapiens
ggacatggtctgctt

SEQ ID NO: 1197 - DNA, 15 bp, Homo sapiens
gggacatggtctgct

SEQ ID NO: 1198 - DNA, 15 bp, Homo sapiens
agggacatggtctgc

SEQ ID NO: 1199 - DNA, 15 bp, Homo sapiens
tagggacatggtctg

SEQ ID NO: 1200 - DNA, 15 bp, Homo sapiens
gtagggacatggtct

SEQ ID NO: 1201 - DNA, 15 bp, Homo sapiens
ggtagggacatggtc

SEQ ID NO: 1202 - DNA, 15 bp, Homo sapiens
gggtagggacatggt

SEQ ID NO: 1203 - DNA, 15 bp, Homo sapiens
ggggtagggacatgg

SEQ ID NO: 1204 - DNA, 15 bp, Homo sapiens
aggggtagggacatg

SEQ ID NO: 1205 - DNA, 15 bp, Homo sapiens
gaggggtagggacat

SEQ ID NO: 1206 - DNA, 15 bp, Homo sapiens
tgaggggtagggaca

SEQ ID NO: 1207 - DNA, 15 bp, Homo sapiens
gtgaggggtagggac

SEQ ID NO: 1208 - DNA, 15 bp, Homo sapiens
cgtgaggggtaggga

SEQ ID NO: 1209 - DNA, 15 bp, Homo sapiens
ccgtgaggggtaggg

SEQ ID NO: 1210 - DNA, 15 bp, Homo sapiens
tccgtgaggggtagg

SEQ ID NO: 1211 - DNA, 15 bp, Homo sapiens
ctccgtgaggggtag

SEQ ID NO: 1212 - DNA, 15 bp, Homo sapiens
gctccgtgaggggta

SEQ ID NO: 1213 - DNA, 15 bp, Homo sapiens
agctccgtgaggggt

SEQ ID NO: 1214 - DNA, 15 bp, Homo sapiens
aagctccgtgagggg

SEQ ID NO: 1215 - DNA, 15 bp, Homo sapiens
taagctccgtgaggg

SEQ ID NO: 1216 - DNA, 15 bp, Homo sapiens
gtaagctccgtgagg

SEQ ID NO: 1217 - DNA, 15 bp, Homo sapiens
tgtaagctccgtgag

SEQ ID NO: 1218 - DNA, 15 bp, Homo sapiens
ctgtaagctccgtga

SEQ ID NO: 1219 - DNA, 15 bp, Homo sapiens
actgtaagctccgtg

SEQ ID NO: 1220 - DNA, 15 bp, Homo sapiens
gactgtaagctccgt

SEQ ID NO: 1221 - DNA, 15 bp, Homo sapiens
agactgtaagctccg

SEQ ID NO: 1222 - DNA, 15 bp, Homo sapiens
tagactgtaagctcc

SEQ ID NO: 1223 - DNA, 15 bp, Homo sapiens
ctagactgtaagctc

SEQ ID NO: 1224 - DNA, 15 bp, Homo sapiens
gctagactgtaagct

SEQ ID NO: 1225 - DNA, 15 bp, Homo sapiens
cgctagactgtaagc

SEQ ID NO: 1226 - DNA, 15 bp, Homo sapiens
ccgctagactgtaag

SEQ ID NO: 1227 - DNA, 15 bp, Homo sapiens
cccgctagactgtaa

SEQ ID NO: 1228 - DNA, 15 bp, Homo sapiens
ccccgctagactgta

SEQ ID NO: 1229 - DNA, 15 bp, Homo sapiens
gccccgctagactgt

SEQ ID NO: 1230 - DNA, 15 bp, Homo sapiens
tgccccgctagactg

SEQ ID NO: 1231 - DNA, 15 bp, Homo sapiens
ctgccccgctagact

SEQ ID NO: 1232 - DNA, 15 bp, Homo sapiens
tctgccccgctagac

SEQ ID NO: 1233 - DNA, 15 bp, Homo sapiens
ctctgccccgctaga

SEQ ID NO: 1234 - DNA, 15 bp, Homo sapiens
tctctgccccgctag

SEQ ID NO: 1235 - DNA, 15 bp, Homo sapiens
ctctctgccccgcta

SEQ ID NO: 1236 - DNA, 15 bp, Homo sapiens
actctctgccccgct

SEQ ID NO: 1237 - DNA, 15 bp, Homo sapiens
gactctctgccccgc

SEQ ID NO: 1238 - DNA, 15 bp, Homo sapiens
tgactctctgccccg

SEQ ID NO: 1239 - DNA, 15 bp, Homo sapiens
atgactctctgcccc

SEQ ID NO: 1240 - DNA, 15 bp, Homo sapiens
gatgactctctgccc

SEQ ID NO: 1241 - DNA, 15 bp, Homo sapiens
ggatgactctctgcc

SEQ ID NO: 1242 - DNA, 15 bp, Homo sapiens
tggatgactctctgc

SEQ ID NO: 1243 - DNA, 15 bp, Homo sapiens
ctggatgactctctg

SEQ ID NO: 1244 - DNA, 15 bp, Homo sapiens
gctggatgactctct

SEQ ID NO: 1245 - DNA, 15 bp, Homo sapiens
tgctggatgactctc

SEQ ID NO: 1246 - DNA, 15 bp, Homo sapiens
ttgctggatgactct

SEQ ID NO: 1247 - DNA, 15 bp, Homo sapiens
gttgctggatgactc

SEQ ID NO: 1248 - DNA, 15 bp, Homo sapiens
ggttgctggatgact

SEQ ID NO: 1249 - DNA, 15 bp, Homo sapiens
gggttgctggatgac

SEQ ID NO: 1250 - DNA, 15 bp, Homo sapiens
ggggttgctggatga

SEQ ID NO: 1251 - DNA, 15 bp, Homo sapiens
gggggttgctggatg

SEQ ID NO: 1252 - DNA, 15 bp, Homo sapiens
agggggttgctggat

SEQ ID NO: 1253 - DNA, 15 bp, Homo sapiens
tagggggttgctgga

SEQ ID NO: 1254 - DNA, 15 bp, Homo sapiens
ttagggggttgctgg

SEQ ID NO: 1255 - DNA, 15 bp, Homo sapiens
attagggggttgctg

SEQ ID NO: 1256 - DNA, 15 bp, Homo sapiens
tattagggggttgct

SEQ ID NO: 1257 - DNA, 15 bp, Homo sapiens
ttattagggggttgc

SEQ ID NO: 1258 - DNA, 15 bp, Homo sapiens
tttattagggggttg

SEQ ID NO: 1259 - DNA, 15 bp, Homo sapiens
ctttattagggggtt

SEQ ID NO: 1260 - DNA, 15 bp, Homo sapiens
tctttattagggggt

SEQ ID NO: 1261 - DNA, 15 bp, Homo sapiens
atctttattaggggg

SEQ ID NO: 1262 - DNA, 15 bp, Homo sapiens
tatctttattagggg

SEQ ID NO: 1263 - DNA, 15 bp, Homo sapiens
atatctttattaggg

SEQ ID NO: 1264 - DNA, 15 bp, Homo sapiens
tatatctttattagg

SEQ ID NO: 1265 - DNA, 15 bp, Homo sapiens
ttatatctttattag

SEQ ID NO: 1266 - DNA, 15 bp, Homo sapiens
gttatatctttatta

SEQ ID NO: 1267 - DNA, 15 bp, Homo sapiens
agttatatctttatt

SEQ ID NO: 1268 - DNA, 15 bp, Homo sapiens
tagttatatctttat

SEQ ID NO: 1269 - DNA, 15 bp, Homo sapiens
gtagttatatcttta

SEQ ID NO: 1270 - DNA, 15 bp, Homo sapiens
tgtagttatatcttt

SEQ ID NO: 1271 - DNA, 15 bp, Homo sapiens
ttgtagttatatctt

SEQ ID NO: 1272 - DNA, 15 bp, Homo sapiens
tttgtagttatatct

SEQ ID NO: 1273 - DNA, 15 bp, Homo sapiens
gtttgtagttatatc

SEQ ID NO: 1274 - DNA, 15 bp, Homo sapiens
agtttgtagttatat

SEQ ID NO: 1275 - DNA, 15 bp, Homo sapiens
cagtttgtagttata

SEQ ID NO: 1276 - DNA, 15 bp, Homo sapiens
gcagtttgtagttat

SEQ ID NO: 1277 - DNA, 15 bp, Homo sapiens
cgcagtttgtagtta

SEQ ID NO: 1278 - DNA, 15 bp, Homo sapiens
tcgcagtttgtagtt

SEQ ID NO: 1279 - DNA, 15 bp, Homo sapiens
atcgcagtttgtagt

SEQ ID NO: 1280 - DNA, 15 bp, Homo sapiens
gatcgcagtttgtag

SEQ ID NO: 1281 - DNA, 15 bp, Homo sapiens
tgatcgcagtttgta

SEQ ID NO: 1282 - DNA, 15 bp, Homo sapiens
ctgatcgcagtttgt

SEQ ID NO: 1283 - DNA, 15 bp, Homo sapiens
actgatcgcagtttg

SEQ ID NO: 1284 - DNA, 15 bp, Homo sapiens
cactgatcgcagttt

SEQ ID NO: 1285 - DNA, 15 bp, Homo sapiens
gcactgatcgcagtt

SEQ ID NO: 1286 - DNA, 15 bp, Homo sapiens
ggcactgatcgcagt

SEQ ID NO: 1287 - DNA, 15 bp, Homo sapiens
aggcactgatcgcag

SEQ ID NO: 1288 - DNA, 15 bp, Homo sapiens
aaggcactgatcgca

SEQ ID NO: 1289 - DNA, 15 bp, Homo sapiens
aaaggcactgatcgc

SEQ ID NO: 1290 - DNA, 15 bp, Homo sapiens
taaaggcactgatcg

SEQ ID NO: 1291 - DNA, 15 bp, Homo sapiens
ctaaaggcactgatc

SEQ ID NO: 1292 - DNA, 15 bp, Homo sapiens
tctaaaggcactgat

SEQ ID NO: 1293 - DNA, 15 bp, Homo sapiens
ttctaaaggcactga

SEQ ID NO: 1294 - DNA, 15 bp, Homo sapiens
tttctaaaggcactg

SEQ ID NO: 1295 - DNA, 15 bp, Homo sapiens
ttttctaaaggcact

SEQ ID NO: 1296 - DNA, 15 bp, Homo sapiens
cttttctaaaggcac

SEQ ID NO: 1297 - DNA, 15 bp, Homo sapiens
ccttttctaaaggca

SEQ ID NO: 1298 - DNA, 15 bp, Homo sapiens
tccttttctaaaggc

SEQ ID NO: 1299 - DNA, 15 bp, Homo sapiens
ttccttttctaaagg

SEQ ID NO: 1300 - DNA, 15 bp, Homo sapiens
tttccttttctaaag

SEQ ID NO: 1301 - DNA, 15 bp, Homo sapiens
ctttccttttctaaa

SEQ ID NO: 1302 - DNA, 15 bp, Homo sapiens
tctttccttttctaa

SEQ ID NO: 1303 - DNA, 15 bp, Homo sapiens
ttctttccttttcta

SEQ ID NO: 1304 - DNA, 15 bp, Homo sapiens
attctttccttttct

SEQ ID NO: 1305 - DNA, 15 bp, Homo sapiens
cattctttccttttc

SEQ ID NO: 1306 - DNA, 15 bp, Homo sapiens
gcattctttcctttt

SEQ ID NO: 1307 - DNA, 15 bp, Homo sapiens
ggcattctttccttt

SEQ ID NO: 1308 - DNA, 15 bp, Homo sapiens
gggcattctttcctt

SEQ ID NO: 1309 - DNA, 15 bp, Homo sapiens
agggcattctttcct

SEQ ID NO: 1310 - DNA, 15 bp, Homo sapiens
tagggcattctttcc

SEQ ID NO: 1311 - DNA, 15 bp, Homo sapiens
ctagggcattctttc

SEQ ID NO: 1312 - DNA, 15 bp, Homo sapiens
tctagggcattcttt

SEQ ID NO: 1313 - DNA, 15 bp, Homo sapiens
ttctagggcattctt

SEQ ID NO: 1314 - DNA, 15 bp, Homo sapiens
attctagggcattct

SEQ ID NO: 1315 - DNA, 15 bp, Homo sapiens
tattctagggcattc

SEQ ID NO: 1316 - DNA, 15 bp, Homo sapiens
ttattctagggcatt

SEQ ID NO: 1317 - DNA, 15 bp, Homo sapiens
cttattctagggcat

SEQ ID NO: 1318 - DNA, 15 bp, Homo sapiens
ccttattctagggca

SEQ ID NO: 1319 - DNA, 15 bp, Homo sapiens
cccttattctagggc

SEQ ID NO: 1320 - DNA, 15 bp, Homo sapiens
acccttattctaggg

SEQ ID NO: 1321 - DNA, 15 bp, Homo sapiens
gacccttattctagg

SEQ ID NO: 1322 - DNA, 15 bp, Homo sapiens
ggacccttattctag

SEQ ID NO: 1323 - DNA, 15 bp, Homo sapiens
gggacccttattcta

SEQ ID NO: 1324 - DNA, 15 bp, Homo sapiens
agggacccttattct

SEQ ID NO: 1325 - DNA, 15 bp, Homo sapiens
cagggacccttattc

SEQ ID NO: 1326 - DNA, 15 bp, Homo sapiens
ccagggacccttatt

SEQ ID NO: 1327 - DNA, 15 bp, Homo sapiens
gccagggacccttat

SEQ ID NO: 1328 - DNA, 15 bp, Homo sapiens
ggccagggaccctta

SEQ ID NO: 1329 - DNA, 15 bp, Homo sapiens
gggccagggaccctt

SEQ ID NO: 1330 - DNA, 15 bp, Homo sapiens
tgggccagggaccct

SEQ ID NO: 1331 - DNA, 15 bp, Homo sapiens
ttgggccagggaccc

SEQ ID NO: 1332 - DNA, 15 bp, Homo sapiens
attgggccagggacc

SEQ ID NO: 1333 - DNA, 15 bp, Homo sapiens
gattgggccagggac

SEQ ID NO: 1334 - DNA, 15 bp, Homo sapiens
agattgggccaggga

SEQ ID NO: 1335 - DNA, 15 bp, Homo sapiens
tagattgggccaggg

SEQ ID NO: 1336 - DNA, 15 bp, Homo sapiens
gtagattgggccagg

SEQ ID NO: 1337 - DNA, 15 bp, Homo sapiens
tgtagattgggccag

SEQ ID NO: 1338 - DNA, 15 bp, Homo sapiens
ctgtagattgggcca

SEQ ID NO: 1339 - DNA, 15 bp, Homo sapiens
cctgtagattgggcc

SEQ ID NO: 1340 - DNA, 15 bp, Homo sapiens
ccctgtagattgggc

SEQ ID NO: 1341 - DNA, 15 bp, Homo sapiens
accctgtagattggg

SEQ ID NO: 1342 - DNA, 15 bp, Homo sapiens
gaccctgtagattgg

SEQ ID NO: 1343 - DNA, 15 bp, Homo sapiens
tgaccctgtagattg

SEQ ID NO: 1344 - DNA, 15 bp, Homo sapiens
ctgaccctgtagatt

SEQ ID NO: 1345 - DNA, 15 bp, Homo sapiens
cctgaccctgtagat

SEQ ID NO: 1346 - DNA, 15 bp, Homo sapiens
gcctgaccctgtaga

SEQ ID NO: 1347 - DNA, 15 bp, Homo sapiens
tgcctgaccctgtag

SEQ ID NO: 1348 - DNA, 15 bp, Homo sapiens
ctgcctgaccctgta

SEQ ID NO: 1349 - DNA, 15 bp, Homo sapiens
cctgcctgaccctgt

SEQ ID NO: 1350 - DNA, 15 bp, Homo sapiens
ccctgcctgaccctg

SEQ ID NO: 1351 - DNA, 15 bp, Homo sapiens
gccctgcctgaccct

SEQ ID NO: 1352 - DNA, 15 bp, Homo sapiens
agccctgcctgaccc

SEQ ID NO: 1353 - DNA, 15 bp, Homo sapiens
aagccctgcctgacc

SEQ ID NO: 1354 - DNA, 15 bp, Homo sapiens
taagccctgcctgac

SEQ ID NO: 1355 - DNA, 15 bp, Homo sapiens
gtaagccctgcctga

SEQ ID NO: 1356 - DNA, 15 bp, Homo sapiens
agtaagccctgcctg

SEQ ID NO: 1357 - DNA, 15 bp, Homo sapiens
aagtaagccctgcct

SEQ ID NO: 1358 - DNA, 15 bp, Homo sapiens
taagtaagccctgcc

SEQ ID NO: 1359 - DNA, 15 bp, Homo sapiens
ttaagtaagccctgc

SEQ ID NO: 1360 - DNA, 15 bp, Homo sapiens
cttaagtaagccctg

SEQ ID NO: 1361 - DNA, 15 bp, Homo sapiens
ccttaagtaagccct

SEQ ID NO: 1362 - DNA, 15 bp, Homo sapiens
tccttaagtaagccc

SEQ ID NO: 1363 - DNA, 15 bp, Homo sapiens
atccttaagtaagcc

SEQ ID NO: 1364 - DNA, 15 bp, Homo sapiens
catccttaagtaagc

SEQ ID NO: 1365 - DNA, 15 bp, Homo sapiens
gcatccttaagtaag

SEQ ID NO: 1366 - DNA, 15 bp, Homo sapiens
agcatccttaagtaa

SEQ ID NO: 1367 - DNA, 15 bp, Homo sapiens
cagcatccttaagta

SEQ ID NO: 1368 - DNA, 15 bp, Homo sapiens
tcagcatccttaagt

SEQ ID NO: 1369 - DNA, 15 bp, Homo sapiens
ttcagcatccttaag

SEQ ID NO: 1370 - DNA, 15 bp, Homo sapiens
tttcagcatccttaa

SEQ ID NO: 1371 - DNA, 15 bp, Homo sapiens
ttttcagcatcctta

SEQ ID NO: 1372 - DNA, 15 bp, Homo sapiens
cttttcagcatcctt

SEQ ID NO: 1373 - DNA, 15 bp, Homo sapiens
gcttttcagcatcct

SEQ ID NO: 1374 - DNA, 15 bp, Homo sapiens
tgcttttcagcatcc

SEQ ID NO: 1375 - DNA, 15 bp, Homo sapiens
ttgcttttcagcatc

SEQ ID NO: 1376 - DNA, 15 bp, Homo sapiens
tttgcttttcagcat

SEQ ID NO: 1377 - DNA, 15 bp, Homo sapiens
ttttgcttttcagca

SEQ ID NO: 1378 - DNA, 15 bp, Homo sapiens
gttttgcttttcagc

SEQ ID NO: 1379 - DNA, 15 bp, Homo sapiens
cgttttgcttttcag

SEQ ID NO: 1380 - DNA, 15 bp, Homo sapiens
tcgttttgcttttca

SEQ ID NO: 1381 - DNA, 15 bp, Homo sapiens
ctcgttttgcttttc

SEQ ID NO: 1382 - DNA, 15 bp, Homo sapiens
gctcgttttgctttt

SEQ ID NO: 1383 - DNA, 15 bp, Homo sapiens
tgctcgttttgcttt

SEQ ID NO: 1384 - DNA, 15 bp, Homo sapiens
ttgctcgttttgctt

SEQ ID NO: 1385 - DNA, 15 bp, Homo sapiens
cttgctcgttttgct

SEQ ID NO: 1386 - DNA, 15 bp, Homo sapiens
acttgctcgttttgc

SEQ ID NO: 1387 - DNA, 15 bp, Homo sapiens
cacttgctcgttttg

SEQ ID NO: 1388 - DNA, 15 bp, Homo sapiens
ccacttgctcgtttt

SEQ ID NO: 1389 - DNA, 15 bp, Homo sapiens
cccacttgctcgttt

SEQ ID NO: 1390 - DNA, 15 bp, Homo sapiens
ccccacttgctcgtt

SEQ ID NO: 1391 - DNA, 15 bp, Homo sapiens
tccccacttgctcgt

SEQ ID NO: 1392 - DNA, 15 bp, Homo sapiens
ctccccacttgctcg

SEQ ID NO: 1393 - DNA, 15 bp, Homo sapiens
cctccccacttgctc

SEQ ID NO: 1394 - DNA, 15 bp, Homo sapiens
acctccccacttgct

SEQ ID NO: 1395 - DNA, 15 bp, Homo sapiens
tacctccccacttgc

SEQ ID NO: 1396 - DNA, 15 bp, Homo sapiens
ctacctccccacttg

SEQ ID NO: 1397 - DNA, 15 bp, Homo sapiens
cctacctccccactt

SEQ ID NO: 1398 - DNA, 15 bp, Homo sapiens
ccctacctccccact

SEQ ID NO: 1399 - DNA, 15 bp, Homo sapiens
cccctacctccccac

SEQ ID NO: 1400 - DNA, 15 bp, Homo sapiens
tcccctacctcccca

SEQ ID NO: 1401 - DNA, 15 bp, Homo sapiens
ctcccctacctcccc

SEQ ID NO: 1402 - DNA, 15 bp, Homo sapiens
actcccctacctccc

SEQ ID NO: 1403 - DNA, 15 bp, Homo sapiens
cactcccctacctcc

SEQ ID NO: 1404 - DNA, 15 bp, Homo sapiens
tcactcccctacctc

SEQ ID NO: 1405 - DNA, 15 bp, Homo sapiens
ctcactcccctacct

SEQ ID NO: 1406 - DNA, 15 bp, Homo sapiens
tctcactcccctacc

SEQ ID NO: 1407 - DNA, 15 bp, Homo sapiens
ctctcactcccctac

SEQ ID NO: 1408 - DNA, 15 bp, Homo sapiens
cctctcactccccta

SEQ ID NO: 1409 - DNA, 15 bp, Homo sapiens
gcctctcactcccct

SEQ ID NO: 1410 - DNA, 15 bp, Homo sapiens
agcctctcactcccc

SEQ ID NO: 1411 - DNA, 15 bp, Homo sapiens
cagcctctcactccc

SEQ ID NO: 1412 - DNA, 15 bp, Homo sapiens
gcagcctctcactcc

SEQ ID NO: 1413 - DNA, 15 bp, Homo sapiens
agcagcctctcactc

SEQ ID NO: 1414 - DNA, 15 bp, Homo sapiens
aagcagcctctcact

SEQ ID NO: 1415 - DNA, 15 bp, Homo sapiens
caagcagcctctcac

SEQ ID NO: 1416 - DNA, 15 bp, Homo sapiens
ccaagcagcctctca

SEQ ID NO: 1417 - DNA, 15 bp, Homo sapiens
cccaagcagcctctc

SEQ ID NO: 1418 - DNA, 15 bp, Homo sapiens
tcccaagcagcctct

SEQ ID NO: 1419 - DNA, 15 bp, Homo sapiens
ttcccaagcagcctc

SEQ ID NO: 1420 - DNA, 15 bp, Homo sapiens
gttcccaagcagcct

SEQ ID NO: 1421 - DNA, 15 bp, Homo sapiens
tgttcccaagcagcc

SEQ ID NO: 1422 - DNA, 15 bp, Homo sapiens
gtgttcccaagcagc

SEQ ID NO: 1423 - DNA, 15 bp, Homo sapiens
agtgttcccaagcag

SEQ ID NO: 1424 - DNA, 15 bp, Homo sapiens
cagtgttcccaagca

SEQ ID NO: 1425 - DNA, 15 bp, Homo sapiens
acagtgttcccaagc

SEQ ID NO: 1426 - DNA, 15 bp, Homo sapiens
cacagtgttcccaag

SEQ ID NO: 1427 - DNA, 15 bp, Homo sapiens
ccacagtgttcccaa

SEQ ID NO: 1428 - DNA, 15 bp, Homo sapiens
cccacagtgttccca

SEQ ID NO: 1429 - DNA, 15 bp, Homo sapiens
tcccacagtgttccc

SEQ ID NO: 1430 - DNA, 15 bp, Homo sapiens
ctcccacagtgttcc

SEQ ID NO: 1431 - DNA, 15 bp, Homo sapiens
tctcccacagtgttc

SEQ ID NO: 1432 - DNA, 15 bp, Homo sapiens
ctctcccacagtgtt

SEQ ID NO: 1433 - DNA, 15 bp, Homo sapiens
cctctcccacagtgt

SEQ ID NO: 1434 - DNA, 15 bp, Homo sapiens
acctctcccacagtg

SEQ ID NO: 1435 - DNA, 15 bp, Homo sapiens
cacctctcccacagt

SEQ ID NO: 1436 - DNA, 15 bp, Homo sapiens
tcacctctcccacag

SEQ ID NO: 1437 - DNA, 15 bp, Homo sapiens
atcacctctcccaca

SEQ ID NO: 1438 - DNA, 15 bp, Homo sapiens
catcacctctcccac

SEQ ID NO: 1439 - DNA, 15 bp, Homo sapiens
tcatcacctctccca

SEQ ID NO: 1440 - DNA, 15 bp, Homo sapiens
ttcatcacctctccc

SEQ ID NO: 1441 - DNA, 15 bp, Homo sapiens
attcatcacctctcc

SEQ ID NO: 1442 - DNA, 15 bp, Homo sapiens
cattcatcacctctc

SEQ ID NO: 1443 - DNA, 15 bp, Homo sapiens
gcattcatcacctct

SEQ ID NO: 1444 - DNA, 15 bp, Homo sapiens
tgcattcatcacctc

SEQ ID NO: 1445 - DNA, 15 bp, Homo sapiens
ctgcattcatcacct

SEQ ID NO: 1446 - DNA, 15 bp, Homo sapiens
actgcattcatcacc

SEQ ID NO: 1447 - DNA, 15 bp, Homo sapiens
gactgcattcatcac

SEQ ID NO: 1448 - DNA, 15 bp, Homo sapiens
ggactgcattcatca

SEQ ID NO: 1449 - DNA, 15 bp, Homo sapiens
gggactgcattcatc

SEQ ID NO: 1450 - DNA, 15 bp, Homo sapiens
ggggactgcattcat

SEQ ID NO: 1451 - DNA, 15 bp, Homo sapiens
cggggactgcattca

SEQ ID NO: 1452 - DNA, 15 bp, Homo sapiens
tcggggactgcattc

SEQ ID NO: 1453 - DNA, 15 bp, Homo sapiens
gtcggggactgcatt

SEQ ID NO: 1454 - DNA, 15 bp, Homo sapiens
tgtcggggactgcat

SEQ ID NO: 1455 - DNA, 15 bp, Homo sapiens
ttgtcggggactgca

SEQ ID NO: 1456 - DNA, 15 bp, Homo sapiens
cttgtcggggactgc

SEQ ID NO: 1457 - DNA, 15 bp, Homo sapiens
ccttgtcggggactg

SEQ ID NO: 1458 - DNA, 15 bp, Homo sapiens
accttgtcggggact

SEQ ID NO: 1459 - DNA, 15 bp, Homo sapiens
caccttgtcggggac

SEQ ID NO: 1460 - DNA, 15 bp, Homo sapiens
tcaccttgtcgggga

SEQ ID NO: 1461 - DNA, 15 bp, Homo sapiens
ctcaccttgtcgggg

SEQ ID NO: 1462 - DNA, 15 bp, Homo sapiens
actcaccttgtcggg

SEQ ID NO: 1463 - DNA, 15 bp, Homo sapiens
aactcaccttgtcgg

SEQ ID NO: 1464 - DNA, 15 bp, Homo sapiens
aaactcaccttgtcg

SEQ ID NO: 1465 - DNA, 15 bp, Homo sapiens
caaactcaccttgtc

SEQ ID NO: 1466 - DNA, 15 bp, Homo sapiens
tcaaactcaccttgt

SEQ ID NO: 1467 - DNA, 15 bp, Homo sapiens
ctcaaactcaccttg

SEQ ID NO: 1468 - DNA, 15 bp, Homo sapiens
cctcaaactcacctt

SEQ ID NO: 1469 - DNA, 15 bp, Homo sapiens
tcctcaaactcacct

SEQ ID NO: 1470 - DNA, 15 bp, Homo sapiens
ttcctcaaactcacc

SEQ ID NO: 1471 - DNA, 15 bp, Homo sapiens
attcctcaaactcac

SEQ ID NO: 1472 - DNA, 15 bp, Homo sapiens
aattcctcaaactca

SEQ ID NO: 1473 - DNA, 15 bp, Homo sapiens
taattcctcaaactc

SEQ ID NO: 1474 - DNA, 15 bp, Homo sapiens
ataattcctcaaact

SEQ ID NO: 1475 - DNA, 15 bp, Homo sapiens
aataattcctcaaac

SEQ ID NO: 1476 - DNA, 15 bp, Homo sapiens
aaataattcctcaaa

SEQ ID NO: 1477 - DNA, 15 bp, Homo sapiens
caaataattcctcaa

SEQ ID NO: 1478 - DNA, 15 bp, Homo sapiens
ccaaataattcctca

SEQ ID NO: 1479 - DNA, 15 bp, Homo sapiens
cccaaataattcctc

SEQ ID NO: 1480 - DNA, 15 bp, Homo sapiens
gcccaaataattcct

SEQ ID NO: 1481 - DNA, 15 bp, Homo sapiens
ggcccaaataattcc

SEQ ID NO: 1482 - DNA, 15 bp, Homo sapiens
tggcccaaataattc

SEQ ID NO: 1483 - DNA, 15 bp, Homo sapiens
atggcccaaataatt

SEQ ID NO: 1484 - DNA, 15 bp, Homo sapiens
gatggcccaaataat

SEQ ID NO: 1485 - DNA, 15 bp, Homo sapiens
tgatggcccaaataa

SEQ ID NO: 1486 - DNA, 15 bp, Homo sapiens
ctgatggcccaaata

SEQ ID NO: 1487 - DNA, 15 bp, Homo sapiens
actgatggcccaaat

SEQ ID NO: 1488 - DNA, 15 bp, Homo sapiens
gactgatggcccaaa

SEQ ID NO: 1489 - DNA, 15 bp, Homo sapiens
tgactgatggcccaa

SEQ ID NO: 1490 - DNA, 15 bp, Homo sapiens
ttgactgatggccca

SEQ ID NO: 1491 - DNA, 15 bp, Homo sapiens
cttgactgatggccc

SEQ ID NO: 1492 - DNA, 15 bp, Homo sapiens
acttgactgatggcc

SEQ ID NO: 1493 - DNA, 15 bp, Homo sapiens
cacttgactgatggc

SEQ ID NO: 1494 - DNA, 15 bp, Homo sapiens
ccacttgactgatgg

SEQ ID NO: 1495 - DNA, 15 bp, Homo sapiens
tccacttgactgatg

SEQ ID NO: 1496 - DNA, 15 bp, Homo sapiens
ctccacttgactgat

SEQ ID NO: 1497 - DNA, 15 bp, Homo sapiens
tctccacttgactga

SEQ ID NO: 1498 - DNA, 15 bp, Homo sapiens
atctccacttgactg

SEQ ID NO: 1499 - DNA, 15 bp, Homo sapiens
catctccacttgact

SEQ ID NO: 1500 - DNA, 15 bp, Homo sapiens
gcatctccacttgac

SEQ ID NO: 1501 - DNA, 15 bp, Homo sapiens
ggcatctccacttga

SEQ ID NO: 1502 - DNA, 15 bp, Homo sapiens
cggcatctccacttg

SEQ ID NO: 1503 - DNA, 15 bp, Homo sapiens
tcggcatctccactt

SEQ ID NO: 1504 - DNA, 15 bp, Homo sapiens
ctcggcatctccact

SEQ ID NO: 1505 - DNA, 15 bp, Homo sapiens
actcggcatctccac

SEQ ID NO: 1506 - DNA, 15 bp, Homo sapiens
aactcggcatctcca

SEQ ID NO: 1507 - DNA, 15 bp, Homo sapiens
aaactcggcatctcc

SEQ ID NO: 1508 - DNA, 15 bp, Homo sapiens
caaactcggcatctc

SEQ ID NO: 1509 - DNA, 15 bp, Homo sapiens
ccaaactcggcatct

SEQ ID NO: 1510 - DNA, 15 bp, Homo sapiens
tccaaactcggcatc

SEQ ID NO: 1511 - DNA, 15 bp, Homo sapiens
atccaaactcggcat

SEQ ID NO: 1512 - DNA, 15 bp, Homo sapiens
tatccaaactcggca

SEQ ID NO: 1513 - DNA, 15 bp, Homo sapiens
gtatccaaactcggc

SEQ ID NO: 1514 - DNA, 15 bp, Homo sapiens
tgtatccaaactcgg

SEQ ID NO: 1515 - DNA, 15 bp, Homo sapiens
atgtatccaaactcg

SEQ ID NO: 1516 - DNA, 15 bp, Homo sapiens
catgtatccaaactc

SEQ ID NO: 1517 - DNA, 15 bp, Homo sapiens
tcatgtatccaaact

SEQ ID NO: 1518 - DNA, 15 bp, Homo sapiens
ttcatgtatccaaac

SEQ ID NO: 1519 - DNA, 15 bp, Homo sapiens
cttcatgtatccaaa

SEQ ID NO: 1520 - DNA, 15 bp, Homo sapiens
gcttcatgtatccaa

SEQ ID NO: 1521 - DNA, 15 bp, Homo sapiens
agcttcatgtatcca

SEQ ID NO: 1522 - DNA, 15 bp, Homo sapiens
tagcttcatgtatcc

SEQ ID NO: 1523 - DNA, 15 bp, Homo sapiens
ttagcttcatgtatc

SEQ ID NO: 1524 - DNA, 15 bp, Homo sapiens
cttagcttcatgtat

SEQ ID NO: 1525 - DNA, 15 bp, Homo sapiens
ccttagcttcatgta

SEQ ID NO: 1526 - DNA, 15 bp, Homo sapiens
cccttagcttcatgt

SEQ ID NO: 1527 - DNA, 15 bp, Homo sapiens
tcccttagcttcatg

SEQ ID NO: 1528 - DNA, 15 bp, Homo sapiens
ttcccttagcttcat

SEQ ID NO: 1529 - DNA, 15 bp, Homo sapiens
cttcccttagcttca

SEQ ID NO: 1530 - DNA, 15 bp, Homo sapiens
tcttcccttagcttc

SEQ ID NO: 1531 - DNA, 15 bp, Homo sapiens
ctcttcccttagctt

SEQ ID NO: 1532 - DNA, 15 bp, Homo sapiens
gctcttcccttagct

SEQ ID NO: 1533 - DNA, 15 bp, Homo sapiens
ggctcttcccttagc

SEQ ID NO: 1534 - DNA, 15 bp, Homo sapiens
tggctcttcccttag

SEQ ID NO: 1535 - DNA, 15 bp, Homo sapiens
ctggctcttccctta

SEQ ID NO: 1536 - DNA, 15 bp, Homo sapiens
cctggctcttccctt

SEQ ID NO: 1537 - DNA, 15 bp, Homo sapiens
tcctggctcttccct

SEQ ID NO: 1538 - DNA, 15 bp, Homo sapiens
ctcctggctcttccc

SEQ ID NO: 1539 - DNA, 15 bp, Homo sapiens
tctcctggctcttcc

SEQ ID NO: 1540 - DNA, 15 bp, Homo sapiens
ttctcctggctcttc

SEQ ID NO: 1541 - DNA, 15 bp, Homo sapiens
tttctcctggctctt

SEQ ID NO: 1542 - DNA, 15 bp, Homo sapiens
ctttctcctggctct

SEQ ID NO: 1543 - DNA, 15 bp, Homo sapiens
tctttctcctggctc

SEQ ID NO: 1544 - DNA, 15 bp, Homo sapiens
ctctttctcctggct

SEQ ID NO: 1545 - DNA, 15 bp, Homo sapiens
tctctttctcctggc

SEQ ID NO: 1546 - DNA, 15 bp, Homo sapiens
ttctctttctcctgg

SEQ ID NO: 1547 - DNA, 15 bp, Homo sapiens
cttctctttctcctg

SEQ ID NO: 1548 - DNA, 15 bp, Homo sapiens
ccttctctttctcct

SEQ ID NO: 1549 - DNA, 15 bp, Homo sapiens
cccttctctttctcc

SEQ ID NO: 1550 - DNA, 15 bp, Homo sapiens
gcccttctctttctc

SEQ ID NO: 1551 - DNA, 15 bp, Homo sapiens
ggcccttctctttct

SEQ ID NO: 1552 - DNA, 15 bp, Homo sapiens
tggcccttctctttc

SEQ ID NO: 1553 - DNA, 15 bp, Homo sapiens
ctggcccttctcttt

SEQ ID NO: 1554 - DNA, 15 bp, Homo sapiens
tctggcccttctctt

SEQ ID NO: 1555 - DNA, 15 bp, Homo sapiens
ctctggcccttctct

SEQ ID NO: 1556 - DNA, 15 bp, Homo sapiens
tctctggcccttctc

SEQ ID NO: 1557 - DNA, 15 bp, Homo sapiens
ctctctggcccttct

SEQ ID NO: 1558 - DNA, 15 bp, Homo sapiens
actctctggcccttc

SEQ ID NO: 1559 - DNA, 15 bp, Homo sapiens
aactctctggccctt

SEQ ID NO: 1560 - DNA, 15 bp, Homo sapiens
taactctctggccct

SEQ ID NO: 1561 - DNA, 15 bp, Homo sapiens
ttaactctctggccc

SEQ ID NO: 1562 - DNA, 15 bp, Homo sapiens
cttaactctctggcc

SEQ ID NO: 1563 - DNA, 15 bp, Homo sapiens
tcttaactctctggc

SEQ ID NO: 1564 - DNA, 15 bp, Homo sapiens
ctcttaactctctgg

SEQ ID NO: 1565 - DNA, 15 bp, Homo sapiens
cctcttaactctctg

SEQ ID NO: 1566 - DNA, 15 bp, Homo sapiens
tcctcttaactctct

SEQ ID NO: 1567 - DNA, 15 bp, Homo sapiens
ttcctcttaactctc

SEQ ID NO: 1568 - DNA, 15 bp, Homo sapiens
tttcctcttaactct

SEQ ID NO: 1569 - DNA, 15 bp, Homo sapiens
ttttcctcttaactc

SEQ ID NO: 1570 - DNA, 15 bp, Homo sapiens
gttttcctcttaact

SEQ ID NO: 1571 - DNA, 15 bp, Homo sapiens
ggttttcctcttaac

SEQ ID NO: 1572 - DNA, 15 bp, Homo sapiens
tggttttcctcttaa

SEQ ID NO: 1573 - DNA, 15 bp, Homo sapiens
ctggttttcctctta

SEQ ID NO: 1574 - DNA, 15 bp, Homo sapiens
gctggttttcctctt

SEQ ID NO: 1575 - DNA, 15 bp, Homo sapiens
tgctggttttcctct

SEQ ID NO: 1576 - DNA, 15 bp, Homo sapiens
ctgctggttttcctc

SEQ ID NO: 1577 - DNA, 15 bp, Homo sapiens
tctgctggttttcct

SEQ ID NO: 1578 - DNA, 15 bp, Homo sapiens
ctctgctggttttcc

SEQ ID NO: 1579 - DNA, 15 bp, Homo sapiens
actctgctggttttc

SEQ ID NO: 1580 - DNA, 15 bp, Homo sapiens
cactctgctggtttt

SEQ ID NO: 1581 - DNA, 15 bp, Homo sapiens
acactctgctggttt

SEQ ID NO: 1582 - DNA, 15 bp, Homo sapiens
cacactctgctggtt

SEQ ID NO: 1583 - DNA, 15 bp, Homo sapiens
ccacactctgctggt

SEQ ID NO: 1584 - DNA, 15 bp, Homo sapiens
accacactctgctgg

SEQ ID NO: 1585 - DNA, 15 bp, Homo sapiens
gaccacactctgctg

SEQ ID NO: 1586 - DNA, 15 bp, Homo sapiens
agaccacactctgct

SEQ ID NO: 1587 - DNA, 15 bp, Homo sapiens
gagaccacactctgc

SEQ ID NO: 1588 - DNA, 15 bp, Homo sapiens
tgagaccacactctg

SEQ ID NO: 1589 - DNA, 15 bp, Homo sapiens
ttgagaccacactct

SEQ ID NO: 1590 - DNA, 15 bp, Homo sapiens
cttgagaccacactc

SEQ ID NO: 1591 - DNA, 15 bp, Homo sapiens
ccttgagaccacact

SEQ ID NO: 1592 - DNA, 15 bp, Homo sapiens
gccttgagaccacac

SEQ ID NO: 1593 - DNA, 15 bp, Homo sapiens
tgccttgagaccaca

SEQ ID NO: 1594 - DNA, 15 bp, Homo sapiens
ttgccttgagaccac

SEQ ID NO: 1595 - DNA, 15 bp, Homo sapiens
cttgccttgagacca

SEQ ID NO: 1596 - DNA, 15 bp, Homo sapiens
ccttgccttgagacc

SEQ ID NO: 1597 - DNA, 15 bp, Homo sapiens
cccttgccttgagac

SEQ ID NO: 1598 - DNA, 15 bp, Homo sapiens
tcccttgccttgaga

SEQ ID NO: 1599 - DNA, 15 bp, Homo sapiens
ttcccttgccttgag

SEQ ID NO: 1600 - DNA, 15 bp, Homo sapiens
cttcccttgccttga

SEQ ID NO: 1601 - DNA, 15 bp, Homo sapiens
tcttcccttgccttg

SEQ ID NO: 1602 - DNA, 15 bp, Homo sapiens
gtcttcccttgcctt

SEQ ID NO: 1603 - DNA, 15 bp, Homo sapiens
tgtcttcccttgcct

SEQ ID NO: 1604 - DNA, 15 bp, Homo sapiens
ttgtcttcccttgcc

SEQ ID NO: 1605 - DNA, 15 bp, Homo sapiens
tttgtcttcccttgc

SEQ ID NO: 1606 - DNA, 15 bp, Homo sapiens
ctttgtcttcccttg

SEQ ID NO: 1607 - DNA, 15 bp, Homo sapiens
actttgtcttccctt

SEQ ID NO: 1608 - DNA, 15 bp, Homo sapiens
cactttgtcttccct

SEQ ID NO: 1609 - DNA, 15 bp, Homo sapiens
acactttgtcttccc

SEQ ID NO: 1610 - DNA, 15 bp, Homo sapiens
aacactttgtcttcc

SEQ ID NO: 1611 - DNA, 15 bp, Homo sapiens
aaacactttgtcttc

SEQ ID NO: 1612 - DNA, 15 bp, Homo sapiens
aaaacactttgtctt

SEQ ID NO: 1613 - DNA, 15 bp, Homo sapiens
taaaacactttgtct

SEQ ID NO: 1614 - DNA, 15 bp, Homo sapiens
ttaaaacactttgtc

SEQ ID NO: 1615 - DNA, 15 bp, Homo sapiens
cttaaaacactttgt

SEQ ID NO: 1616 - DNA, 15 bp, Homo sapiens
acttaaaacactttg

SEQ ID NO: 1617 - DNA, 15 bp, Homo sapiens
tacttaaaacacttt

SEQ ID NO: 1618 - DNA, 15 bp, Homo sapiens
ctacttaaaacactt

SEQ ID NO: 1619 - DNA, 15 bp, Homo sapiens
cctacttaaaacact

SEQ ID NO: 1620 - DNA, 15 bp, Homo sapiens
tcctacttaaaacac

SEQ ID NO: 1621 - DNA, 15 bp, Homo sapiens
ctcctacttaaaaca

SEQ ID NO: 1622 - DNA, 15 bp, Homo sapiens
actcctacttaaaac

SEQ ID NO: 1623 - DNA, 15 bp, Homo sapiens
cactcctacttaaaa

SEQ ID NO: 1624 - DNA, 15 bp, Homo sapiens
ccactcctacttaaa

SEQ ID NO: 1625 - DNA, 15 bp, Homo sapiens
accactcctacttaa

SEQ ID NO: 1626 - DNA, 15 bp, Homo sapiens
gaccactcctactta

SEQ ID NO: 1627 - DNA, 15 bp, Homo sapiens
tgaccactcctactt

SEQ ID NO: 1628 - DNA, 15 bp, Homo sapiens
ttgaccactcctact

SEQ ID NO: 1629 - DNA, 15 bp, Homo sapiens
gttgaccactcctac

SEQ ID NO: 1630 - DNA, 15 bp, Homo sapiens
ggttgaccactccta

SEQ ID NO: 1631 - DNA, 15 bp, Homo sapiens
tggttgaccactcct

SEQ ID NO: 1632 - DNA, 15 bp, Homo sapiens
gtggttgaccactcc

SEQ ID NO: 1633 - DNA, 15 bp, Homo sapiens
agtggttgaccactc

SEQ ID NO: 1634 - DNA, 15 bp, Homo sapiens
aagtggttgaccact

SEQ ID NO: 1635 - DNA, 15 bp, Homo sapiens
gaagtggttgaccac

SEQ ID NO: 1636 - DNA, 15 bp, Homo sapiens
tgaagtggttgacca

SEQ ID NO: 1637 - DNA, 15 bp, Homo sapiens
ttgaagtggttgacc

SEQ ID NO: 1638 - DNA, 15 bp, Homo sapiens
cttgaagtggttgac

SEQ ID NO: 1639 - DNA, 15 bp, Homo sapiens
tcttgaagtggttga

SEQ ID NO: 1640 - DNA, 15 bp, Homo sapiens
ctcttgaagtggttg

SEQ ID NO: 1641 - DNA, 15 bp, Homo sapiens
cctcttgaagtggtt

SEQ ID NO: 1642 - DNA, 15 bp, Homo sapiens
tcctcttgaagtggt

SEQ ID NO: 1643 - DNA, 15 bp, Homo sapiens
ttcctcttgaagtgg

SEQ ID NO: 1644 - DNA, 15 bp, Homo sapiens
tttcctcttgaagtg

SEQ ID NO: 1645 - DNA, 15 bp, Homo sapiens
ttttcctcttgaagt

SEQ ID NO: 1646 - DNA, 15 bp, Homo sapiens
gttttcctcttgaag

SEQ ID NO: 1647 - DNA, 15 bp, Homo sapiens
agttttcctcttgaa

SEQ ID NO: 1648 - DNA, 15 bp, Homo sapiens
tagttttcctcttga

SEQ ID NO: 1649 - DNA, 15 bp, Homo sapiens
ttagttttcctcttg

SEQ ID NO: 1650 - DNA, 15 bp, Homo sapiens
tttagttttcctctt

SEQ ID NO: 1651 - DNA, 15 bp, Homo sapiens
ttttagttttcctct

SEQ ID NO: 1652 - DNA, 15 bp, Homo sapiens
tttttagttttcctc

SEQ ID NO: 1653 - DNA, 15 bp, Homo sapiens
ttttttagttttcct

SEQ ID NO: 1654 - DNA, 15 bp, Homo sapiens
gttttttagttttcc

SEQ ID NO: 1655 - DNA, 15 bp, Homo sapiens
ggttttttagttttc

SEQ ID NO: 1656 - DNA, 15 bp, Homo sapiens
tggttttttagtttt

SEQ ID NO: 1657 - DNA, 15 bp, Homo sapiens
gtggttttttagttt

SEQ ID NO: 1658 - DNA, 15 bp, Homo sapiens
ggtggttttttagtt

SEQ ID NO: 1659 - DNA, 15 bp, Homo sapiens
aggtggttttttagt

SEQ ID NO: 1660 - DNA, 15 bp, Homo sapiens
caggtggttttttag

SEQ ID NO: 1661 - DNA, 15 bp, Homo sapiens
gcaggtggtttttta

SEQ ID NO: 1662 - DNA, 15 bp, Homo sapiens
tgcaggtggtttttt

SEQ ID NO: 1663 - DNA, 15 bp, Homo sapiens
ctgcaggtggttttt

SEQ ID NO: 1664 - DNA, 15 bp, Homo sapiens
tctgcaggtggtttt

SEQ ID NO: 1665 - DNA, 15 bp, Homo sapiens
ttctgcaggtggttt

SEQ ID NO: 1666 - DNA, 15 bp, Homo sapiens
attctgcaggtggtt

SEQ ID NO: 1667 - DNA, 15 bp, Homo sapiens
gattctgcaggtggt

SEQ ID NO: 1668 - DNA, 15 bp, Homo sapiens
agattctgcaggtgg

SEQ ID NO: 1669 - DNA, 15 bp, Homo sapiens
cagattctgcaggtg

SEQ ID NO: 1670 - DNA, 15 bp, Homo sapiens
ccagattctgcaggt

SEQ ID NO: 1671 - DNA, 15 bp, Homo sapiens
gccagattctgcagg

SEQ ID NO: 1672 - DNA, 15 bp, Homo sapiens
tgccagattctgcag

SEQ ID NO: 1673 - DNA, 15 bp, Homo sapiens
ctgccagattctgca

SEQ ID NO: 1674 - DNA, 15 bp, Homo sapiens
tctgccagattctgc

SEQ ID NO: 1675 - DNA, 15 bp, Homo sapiens
atctgccagattctg

SEQ ID NO: 1676 - DNA, 15 bp, Homo sapiens
catctgccagattct

SEQ ID NO: 1677 - DNA, 15 bp, Homo sapiens
gcatctgccagattc

SEQ ID NO: 1678 - DNA, 15 bp, Homo sapiens
ggcatctgccagatt

SEQ ID NO: 1679 - DNA, 15 bp, Homo sapiens
cggcatctgccagat

SEQ ID NO: 1680 - DNA, 15 bp, Homo sapiens
ccggcatctgccaga

SEQ ID NO: 1681 - DNA, 15 bp, Homo sapiens
cccggcatctgccag

SEQ ID NO: 1682 - DNA, 15 bp, Homo sapiens
ccccggcatctgcca

SEQ ID NO: 1683 - DNA, 15 bp, Homo sapiens
cccccggcatctgcc

SEQ ID NO: 1684 - DNA, 15 bp, Homo sapiens
gcccccggcatctgc

SEQ ID NO: 1685 - DNA, 15 bp, Homo sapiens
agcccccggcatctg

SEQ ID NO: 1686 - DNA, 15 bp, Homo sapiens
tagcccccggcatct

SEQ ID NO: 1687 - DNA, 15 bp, Homo sapiens
ttagcccccggcatc

SEQ ID NO: 1688 - DNA, 15 bp, Homo sapiens
gttagcccccggcat

SEQ ID NO: 1689 - DNA, 15 bp, Homo sapiens
tgttagcccccggca

SEQ ID NO: 1690 - DNA, 15 bp, Homo sapiens
gtgttagcccccggc

SEQ ID NO: 1691 - DNA, 15 bp, Homo sapiens
agtgttagcccccgg

SEQ ID NO: 1692 - DNA, 15 bp, Homo sapiens
aagtgttagcccccg

SEQ ID NO: 1693 - DNA, 15 bp, Homo sapiens
taagtgttagccccc

SEQ ID NO: 1694 - DNA, 15 bp, Homo sapiens
gtaagtgttagcccc

SEQ ID NO: 1695 - DNA, 15 bp, Homo sapiens
cgtaagtgttagccc

SEQ ID NO: 1696 - DNA, 15 bp, Homo sapiens
ccgtaagtgttagcc

SEQ ID NO: 1697 - DNA, 15 bp, Homo sapiens
cccgtaagtgttagc

SEQ ID NO: 1698 - DNA, 15 bp, Homo sapiens
ccccgtaagtgttag

SEQ ID NO: 1699 - DNA, 15 bp, Homo sapiens
cccccgtaagtgtta

SEQ ID NO: 1700 - DNA, 15 bp, Homo sapiens
acccccgtaagtgtt

SEQ ID NO: 1701 - DNA, 15 bp, Homo sapiens
cacccccgtaagtgt

SEQ ID NO: 1702 - DNA, 15 bp, Homo sapiens
tcacccccgtaagtg

SEQ ID NO: 1703 - DNA, 15 bp, Homo sapiens
ctcacccccgtaagt

SEQ ID NO: 1704 - DNA, 15 bp, Homo sapiens
gctcacccccgtaag

SEQ ID NO: 1705 - DNA, 15 bp, Homo sapiens
tgctcacccccgtaa

SEQ ID NO: 1706 - DNA, 15 bp, Homo sapiens
ttgctcacccccgta

SEQ ID NO: 1707 - DNA, 15 bp, Homo sapiens
cttgctcacccccgt

SEQ ID NO: 1708 - DNA, 15 bp, Homo sapiens
acttgctcacccccg

SEQ ID NO: 1709 - DNA, 15 bp, Homo sapiens
cacttgctcaccccc

SEQ ID NO: 1710 - DNA, 15 bp, Homo sapiens
gcacttgctcacccc

SEQ ID NO: 1711 - DNA, 15 bp, Homo sapiens
tgcacttgctcaccc

SEQ ID NO: 1712 - DNA, 15 bp, Homo sapiens
ctgcacttgctcacc

SEQ ID NO: 1713 - DNA, 15 bp, Homo sapiens
tctgcacttgctcac

SEQ ID NO: 1714 - DNA, 15 bp, Homo sapiens
ttctgcacttgctca

SEQ ID NO: 1715 - DNA, 15 bp, Homo sapiens
cttctgcacttgctc

SEQ ID NO: 1716 - DNA, 15 bp, Homo sapiens
ccttctgcacttgct

SEQ ID NO: 1717 - DNA, 15 bp, Homo sapiens
gccttctgcacttgc

SEQ ID NO: 1718 - DNA, 15 bp, Homo sapiens
tgccttctgcacttg

SEQ ID NO: 1719 - DNA, 15 bp, Homo sapiens
ttgccttctgcactt

SEQ ID NO: 1720 - DNA, 15 bp, Homo sapiens
cttgccttctgcact

SEQ ID NO: 1721 - DNA, 15 bp, Homo sapiens
acttgccttctgcac

SEQ ID NO: 1722 - DNA, 15 bp, Homo sapiens
tacttgccttctgca

SEQ ID NO: 1723 - DNA, 15 bp, Homo sapiens
gtacttgccttctgc

SEQ ID NO: 1724 - DNA, 15 bp, Homo sapiens
tgtacttgccttctg

SEQ ID NO: 1725 - DNA, 15 bp, Homo sapiens
ctgtacttgccttct

SEQ ID NO: 1726 - DNA, 15 bp, Homo sapiens
cctgtacttgccttc

SEQ ID NO: 1727 - DNA, 15 bp, Homo sapiens
gcctgtacttgcctt

SEQ ID NO: 1728 - DNA, 15 bp, Homo sapiens
tgcctgtacttgcct

SEQ ID NO: 1729 - DNA, 15 bp, Homo sapiens
ttgcctgtacttgcc

SEQ ID NO: 1730 - DNA, 15 bp, Homo sapiens
gttgcctgtacttgc

SEQ ID NO: 1731 - DNA, 15 bp, Homo sapiens
agttgcctgtacttg

SEQ ID NO: 1732 - DNA, 15 bp, Homo sapiens
gagttgcctgtactt

SEQ ID NO: 1733 - DNA, 15 bp, Homo sapiens
agagttgcctgtact

SEQ ID NO: 1734 - DNA, 15 bp, Homo sapiens
cagagttgcctgtac

SEQ ID NO: 1735 - DNA, 15 bp, Homo sapiens
gcagagttgcctgta

SEQ ID NO: 1736 - DNA, 15 bp, Homo sapiens
tgcagagttgcctgt

SEQ ID NO: 1737 - DNA, 15 bp, Homo sapiens
ctgcagagttgcctg

SEQ ID NO: 1738 - DNA, 15 bp, Homo sapiens
cctgcagagttgcct

SEQ ID NO: 1739 - DNA, 15 bp, Homo sapiens
ccctgcagagttgcc

SEQ ID NO: 1740 - DNA, 15 bp, Homo sapiens
cccctgcagagttgc

SEQ ID NO: 1741 - DNA, 15 bp, Homo sapiens
acccctgcagagttg

SEQ ID NO: 1742 - DNA, 15 bp, Homo sapiens
gacccctgcagagtt

SEQ ID NO: 1743 - DNA, 15 bp, Homo sapiens
tgacccctgcagagt

SEQ ID NO: 1744 - DNA, 15 bp, Homo sapiens
ctgacccctgcagag

SEQ ID NO: 1745 - DNA, 15 bp, Homo sapiens
gctgacccctgcaga

SEQ ID NO: 1746 - DNA, 15 bp, Homo sapiens
tgctgacccctgcag

SEQ ID NO: 1747 - DNA, 15 bp, Homo sapiens
ctgctgacccctgca

SEQ ID NO: 1748 - DNA, 15 bp, Homo sapiens
actgctgacccctgc

SEQ ID NO: 1749 - DNA, 15 bp, Homo sapiens
cactgctgacccctg

SEQ ID NO: 1750 - DNA, 15 bp, Homo sapiens
tcactgctgacccct

SEQ ID NO: 1751 - DNA, 15 bp, Homo sapiens
ttcactgctgacccc

SEQ ID NO: 1752 - DNA, 15 bp, Homo sapiens
cttcactgctgaccc

SEQ ID NO: 1753 - DNA, 15 bp, Homo sapiens
ccttcactgctgacc

SEQ ID NO: 1754 - DNA, 15 bp, Homo sapiens
cccttcactgctgac

SEQ ID NO: 1755 - DNA, 15 bp, Homo sapiens
ccccttcactgctga

SEQ ID NO: 1756 - DNA, 15 bp, Homo sapiens
tccccttcactgctg

SEQ ID NO: 1757 - DNA, 15 bp, Homo sapiens
ctccccttcactgct

SEQ ID NO: 1758 - DNA, 15 bp, Homo sapiens
cctccccttcactgc

SEQ ID NO: 1759 - DNA, 15 bp, Homo sapiens
ccctccccttcactg

SEQ ID NO: 1760 - DNA, 15 bp, Homo sapiens
accctccccttcact

SEQ ID NO: 1761 - DNA, 15 bp, Homo sapiens
caccctccccttcac

SEQ ID NO: 1762 - DNA, 15 bp, Homo sapiens
tcaccctccccttca

SEQ ID NO: 1763 - DNA, 15 bp, Homo sapiens
atcaccctccccttc

SEQ ID NO: 1764 - DNA, 15 bp, Homo sapiens
catcaccctcccctt

SEQ ID NO: 1765 - DNA, 15 bp, Homo sapiens
tcatcaccctcccct

SEQ ID NO: 1766 - DNA, 15 bp, Homo sapiens
ctcatcaccctcccc

SEQ ID NO: 1767 - DNA, 15 bp, Homo sapiens
cctcatcaccctccc

SEQ ID NO: 1768 - DNA, 15 bp, Homo sapiens
acctcatcaccctcc

SEQ ID NO: 1769 - DNA, 15 bp, Homo sapiens
cacctcatcaccctc

SEQ ID NO: 1770 - DNA, 15 bp, Homo sapiens
gcacctcatcaccct

SEQ ID NO: 1771 - DNA, 15 bp, Homo sapiens
agcacctcatcaccc

SEQ ID NO: 1772 - DNA, 15 bp, Homo sapiens
cagcacctcatcacc

SEQ ID NO: 1773 - DNA, 15 bp, Homo sapiens
ccagcacctcatcac

SEQ ID NO: 1774 - DNA, 15 bp, Homo sapiens
gccagcacctcatca

SEQ ID NO: 1775 - DNA, 15 bp, Homo sapiens
ggccagcacctcatc

SEQ ID NO: 1776 - DNA, 15 bp, Homo sapiens
tggccagcacctcat

SEQ ID NO: 1777 - DNA, 15 bp, Homo sapiens
ctggccagcacctca

SEQ ID NO: 1778 - DNA, 15 bp, Homo sapiens
tctggccagcacctc

SEQ ID NO: 1779 - DNA, 15 bp, Homo sapiens
ttctggccagcacct

SEQ ID NO: 1780 - DNA, 15 bp, Homo sapiens
cttctggccagcacc

SEQ ID NO: 1781 - DNA, 15 bp, Homo sapiens
gcttctggccagcac

SEQ ID NO: 1782 - DNA, 15 bp, Homo sapiens
tgcttctggccagca

SEQ ID NO: 1783 - DNA, 15 bp, Homo sapiens
ctgcttctggccagc

SEQ ID NO: 1784 - DNA, 15 bp, Homo sapiens
cctgcttctggccag

SEQ ID NO: 1785 - DNA, 15 bp, Homo sapiens
tcctgcttctggcca

SEQ ID NO: 1786 - DNA, 15 bp, Homo sapiens
ctcctgcttctggcc

SEQ ID NO: 1787 - DNA, 15 bp, Homo sapiens
cctcctgcttctggc

SEQ ID NO: 1788 - DNA, 15 bp, Homo sapiens
ccctcctgcttctgg

SEQ ID NO: 1789 - DNA, 15 bp, Homo sapiens
tccctcctgcttctg

SEQ ID NO: 1790 - DNA, 15 bp, Homo sapiens
ctccctcctgcttct

SEQ ID NO: 1791 - DNA, 15 bp, Homo sapiens
tctccctcctgcttc

SEQ ID NO: 1792 - DNA, 15 bp, Homo sapiens
ctctccctcctgctt

SEQ ID NO: 1793 - DNA, 15 bp, Homo sapiens
tctctccctcctgct

SEQ ID NO: 1794 - DNA, 15 bp, Homo sapiens
ttctctccctcctgc

SEQ ID NO: 1795 - DNA, 15 bp, Homo sapiens
gttctctccctcctg

SEQ ID NO: 1796 - DNA, 15 bp, Homo sapiens
cgttctctccctcct

SEQ ID NO: 1797 - DNA, 15 bp, Homo sapiens
acgttctctccctcc

SEQ ID NO: 1798 - DNA, 15 bp, Homo sapiens
cacgttctctccctc

SEQ ID NO: 1799 - DNA, 15 bp, Homo sapiens
ccacgttctctccct

SEQ ID NO: 1800 - DNA, 15 bp, Homo sapiens
cccacgttctctccc

SEQ ID NO: 1801 - DNA, 15 bp, Homo sapiens
ccccacgttctctcc

SEQ ID NO: 1802 - DNA, 15 bp, Homo sapiens
accccacgttctctc

SEQ ID NO: 1803 - DNA, 15 bp, Homo sapiens
gaccccacgttctct

SEQ ID NO: 1804 - DNA, 15 bp, Homo sapiens
tgaccccacgttctc

SEQ ID NO: 1805 - DNA, 15 bp, Homo sapiens
ctgaccccacgttct

SEQ ID NO: 1806 - DNA, 15 bp, Homo sapiens
gctgaccccacgttc

SEQ ID NO: 1807 - DNA, 15 bp, Homo sapiens
cgctgaccccacgtt

SEQ ID NO: 1808 - DNA, 15 bp, Homo sapiens
ccgctgaccccacgt

SEQ ID NO: 1809 - DNA, 15 bp, Homo sapiens
tccgctgaccccacg

SEQ ID NO: 1810 - DNA, 15 bp, Homo sapiens
ctccgctgaccccac

SEQ ID NO: 1811 - DNA, 15 bp, Homo sapiens
tctccgctgacccca

SEQ ID NO: 1812 - DNA, 15 bp, Homo sapiens
gtctccgctgacccc

SEQ ID NO: 1813 - DNA, 15 bp, Homo sapiens
tgtctccgctgaccc

SEQ ID NO: 1814 - DNA, 15 bp, Homo sapiens
ctgtctccgctgacc

SEQ ID NO: 1815 - DNA, 15 bp, Homo sapiens
tctgtctccgctgac

SEQ ID NO: 1816 - DNA, 15 bp, Homo sapiens
ttctgtctccgctga

SEQ ID NO: 1817 - DNA, 15 bp, Homo sapiens
cttctgtctccgctg

SEQ ID NO: 1818 - DNA, 15 bp, Homo sapiens
ccttctgtctccgct

SEQ ID NO: 1819 - DNA, 15 bp, Homo sapiens
cccttctgtctccgc

SEQ ID NO: 1820 - DNA, 15 bp, Homo sapiens
tcccttctgtctccg

SEQ ID NO: 1821 - DNA, 15 bp, Homo sapiens
atcccttctgtctcc

SEQ ID NO: 1822 - DNA, 15 bp, Homo sapiens
catcccttctgtctc

SEQ ID NO: 1823 - DNA, 15 bp, Homo sapiens
gcatcccttctgtct

SEQ ID NO: 1824 - DNA, 15 bp, Homo sapiens
agcatcccttctgtc

SEQ ID NO: 1825 - DNA, 15 bp, Homo sapiens
cagcatcccttctgt

SEQ ID NO: 1826 - DNA, 15 bp, Homo sapiens
ccagcatcccttctg

SEQ ID NO: 1827 - DNA, 15 bp, Homo sapiens
gccagcatcccttct

SEQ ID NO: 1828 - DNA, 15 bp, Homo sapiens
tgccagcatcccttc

SEQ ID NO: 1829 - DNA, 15 bp, Homo sapiens
gtgccagcatccctt

SEQ ID NO: 1830 - DNA, 15 bp, Homo sapiens
tgtgccagcatccct

SEQ ID NO: 1831 - DNA, 15 bp, Homo sapiens
ctgtgccagcatccc

SEQ ID NO: 1832 - DNA, 15 bp, Homo sapiens
cctgtgccagcatcc

SEQ ID NO: 1833 - DNA, 15 bp, Homo sapiens
gcctgtgccagcatc

SEQ ID NO: 1834 - DNA, 15 bp, Homo sapiens
tgcctgtgccagcat

SEQ ID NO: 1835 - DNA, 15 bp, Homo sapiens
ttgcctgtgccagca

SEQ ID NO: 1836 - DNA, 15 bp, Homo sapiens
tttgcctgtgccagc

SEQ ID NO: 1837 - DNA, 15 bp, Homo sapiens
ctttgcctgtgccag

SEQ ID NO: 1838 - DNA, 15 bp, Homo sapiens
cctttgcctgtgcca

SEQ ID NO: 1839 - DNA, 15 bp, Homo sapiens
acctttgcctgtgcc

SEQ ID NO: 1840 - DNA, 15 bp, Homo sapiens
cacctttgcctgtgc

SEQ ID NO: 1841 - DNA, 15 bp, Homo sapiens
tcacctttgcctgtg

SEQ ID NO: 1842 - DNA, 15 bp, Homo sapiens
ttcacctttgcctgt

SEQ ID NO: 1843 - DNA, 15 bp, Homo sapiens
attcacctttgcctg

SEQ ID NO: 1844 - DNA, 15 bp, Homo sapiens
tattcacctttgcct

SEQ ID NO: 1845 - DNA, 15 bp, Homo sapiens
ctattcacctttgcc

SEQ ID NO: 1846 - DNA, 15 bp, Homo sapiens
tctattcacctttgc

SEQ ID NO: 1847 - DNA, 15 bp, Homo sapiens
ctctattcacctttg

SEQ ID NO: 1848 - DNA, 15 bp, Homo sapiens
cctctattcaccttt

SEQ ID NO: 1849 - DNA, 15 bp, Homo sapiens
tcctctattcacctt

SEQ ID NO: 1850 - DNA, 15 bp, Homo sapiens
atcctctattcacct

SEQ ID NO: 1851 - DNA, 15 bp, Homo sapiens
gatcctctattcacc

SEQ ID NO: 1852 - DNA, 15 bp, Homo sapiens
tgatcctctattcac

SEQ ID NO: 1853 - DNA, 15 bp, Homo sapiens
ttgatcctctattca

SEQ ID NO: 1854 - DNA, 15 bp, Homo sapiens
cttgatcctctattc

SEQ ID NO: 1855 - DNA, 15 bp, Homo sapiens
gcttgatcctctatt

SEQ ID NO: 1856 - DNA, 15 bp, Homo sapiens
tgcttgatcctctat

SEQ ID NO: 1857 - DNA, 15 bp, Homo sapiens
ttgcttgatcctcta

SEQ ID NO: 1858 - DNA, 15 bp, Homo sapiens
cttgcttgatcctct

SEQ ID NO: 1859 - DNA, 15 bp, Homo sapiens
ccttgcttgatcctc

SEQ ID NO: 1860 - DNA, 15 bp, Homo sapiens
tccttgcttgatcct

SEQ ID NO: 1861 - DNA, 15 bp, Homo sapiens
ctccttgcttgatcc

SEQ ID NO: 1862 - DNA, 15 bp, Homo sapiens
cctccttgcttgatc

SEQ ID NO: 1863 - DNA, 15 bp, Homo sapiens
ccctccttgcttgat

SEQ ID NO: 1864 - DNA, 15 bp, Homo sapiens
gccctccttgcttga

SEQ ID NO: 1865 - DNA, 15 bp, Homo sapiens
tgccctccttgcttg

SEQ ID NO: 1866 - DNA, 15 bp, Homo sapiens
ctgccctccttgctt

SEQ ID NO: 1867 - DNA, 15 bp, Homo sapiens
gctgccctccttgct

SEQ ID NO: 1868 - DNA, 15 bp, Homo sapiens
tgctgccctccttgc

SEQ ID NO: 1869 - DNA, 15 bp, Homo sapiens
ctgctgccctccttg

SEQ ID NO: 1870 - DNA, 15 bp, Homo sapiens
tctgctgccctcctt

SEQ ID NO: 1871 - DNA, 15 bp, Homo sapiens
ttctgctgccctcct

SEQ ID NO: 1872 - DNA, 15 bp, Homo sapiens
tttctgctgccctcc

SEQ ID NO: 1873 - DNA, 15 bp, Homo sapiens
ttttctgctgccctc

SEQ ID NO: 1874 - DNA, 15 bp, Homo sapiens
gttttctgctgccct

SEQ ID NO: 1875 - DNA, 15 bp, Homo sapiens
ggttttctgctgccc

SEQ ID NO: 1876 - DNA, 15 bp, Homo sapiens
aggttttctgctgcc

SEQ ID NO: 1877 - DNA, 15 bp, Homo sapiens
caggttttctgctgc

SEQ ID NO: 1878 - DNA, 15 bp, Homo sapiens
gcaggttttctgctg

SEQ ID NO: 1879 - DNA, 15 bp, Homo sapiens
ggcaggttttctgct

SEQ ID NO: 1880 - DNA, 15 bp, Homo sapiens
tggcaggttttctgc

SEQ ID NO: 1881 - DNA, 15 bp, Homo sapiens
ctggcaggttttctg

SEQ ID NO: 1882 - DNA, 15 bp, Homo sapiens
cctggcaggttttct

SEQ ID NO: 1883 - DNA, 15 bp, Homo sapiens
tcctggcaggttttc

SEQ ID NO: 1884 - DNA, 15 bp, Homo sapiens
ctcctggcaggtttt

SEQ ID NO: 1885 - DNA, 15 bp, Homo sapiens
tctcctggcaggttt

SEQ ID NO: 1886 - DNA, 15 bp, Homo sapiens
ctctcctggcaggtt

SEQ ID NO: 1887 - DNA, 15 bp, Homo sapiens
tctctcctggcaggt

SEQ ID NO: 1888 - DNA, 15 bp, Homo sapiens
ttctctcctggcagg

SEQ ID NO: 1889 - DNA, 15 bp, Homo sapiens
tttctctcctggcag

SEQ ID NO: 1890 - DNA, 15 bp, Homo sapiens
ttttctctcctggca

SEQ ID NO: 1891 - DNA, 15 bp, Homo sapiens
cttttctctcctggc

SEQ ID NO: 1892 - DNA, 15 bp, Homo sapiens
ccttttctctcctgg

SEQ ID NO: 1893 - DNA, 15 bp, Homo sapiens
accttttctctcctg

SEQ ID NO: 1894 - DNA, 15 bp, Homo sapiens
caccttttctctcct

SEQ ID NO: 1895 - DNA, 15 bp, Homo sapiens
tcaccttttctctcc

SEQ ID NO: 1896 - DNA, 15 bp, Homo sapiens
gtcaccttttctctc

SEQ ID NO: 1897 - DNA, 15 bp, Homo sapiens
agtcaccttttctct

SEQ ID NO: 1898 - DNA, 15 bp, Homo sapiens
cagtcaccttttctc

SEQ ID NO: 1899 - DNA, 15 bp, Homo sapiens
tcagtcaccttttct

SEQ ID NO: 1900 - DNA, 15 bp, Homo sapiens
atcagtcaccttttc

SEQ ID NO: 1901 - DNA, 15 bp, Homo sapiens
catcagtcacctttt

SEQ ID NO: 1902 - DNA, 15 bp, Homo sapiens
tcatcagtcaccttt

SEQ ID NO: 1903 - DNA, 15 bp, Homo sapiens
atcatcagtcacctt

SEQ ID NO: 1904 - DNA, 15 bp, Homo sapiens
catcatcagtcacct

SEQ ID NO: 1905 - DNA, 15 bp, Homo sapiens
acatcatcagtcacc

SEQ ID NO: 1906 - DNA, 15 bp, Homo sapiens
gacatcatcagtcac

SEQ ID NO: 1907 - DNA, 15 bp, Homo sapiens
tgacatcatcagtca

SEQ ID NO: 1908 - DNA, 15 bp, Homo sapiens
ctgacatcatcagtc

SEQ ID NO: 1909 - DNA, 15 bp, Homo sapiens
tctgacatcatcagt

SEQ ID NO: 1910 - DNA, 15 bp, Homo sapiens
atctgacatcatcag

SEQ ID NO: 1911 - DNA, 15 bp, Homo sapiens
aatctgacatcatca

SEQ ID NO: 1912 - DNA, 15 bp, Homo sapiens
gaatctgacatcatc

SEQ ID NO: 1913 - DNA, 15 bp, Homo sapiens
agaatctgacatcat

SEQ ID NO: 1914 - DNA, 15 bp, Homo sapiens
tagaatctgacatca

SEQ ID NO: 1915 - DNA, 15 bp, Homo sapiens
ctagaatctgacatc

SEQ ID NO: 1916 - DNA, 15 bp, Homo sapiens
tctagaatctgacat

SEQ ID NO: 1917 - DNA, 15 bp, Homo sapiens
ctctagaatctgaca

SEQ ID NO: 1918 - DNA, 15 bp, Homo sapiens
gctctagaatctgac

SEQ ID NO: 1919 - DNA, 15 bp, Homo sapiens
tgctctagaatctga

SEQ ID NO: 1920 - DNA, 15 bp, Homo sapiens
ttgctctagaatctg

SEQ ID NO: 1921 - DNA, 15 bp, Homo sapiens
cttgctctagaatct

SEQ ID NO: 1922 - DNA, 15 bp, Homo sapiens
acttgctctagaatc

SEQ ID NO: 1923 - DNA, 15 bp, Homo sapiens
tacttgctctagaat

SEQ ID NO: 1924 - DNA, 15 bp, Homo sapiens
ctacttgctctagaa

SEQ ID NO: 1925 - DNA, 15 bp, Homo sapiens
gctacttgctctaga

SEQ ID NO: 1926 - DNA, 15 bp, Homo sapiens
tgctacttgctctag

SEQ ID NO: 1927 - DNA, 15 bp, Homo sapiens
ctgctacttgctcta

SEQ ID NO: 1928 - DNA, 15 bp, Homo sapiens
tctgctacttgctct

SEQ ID NO: 1929 - DNA, 15 bp, Homo sapiens
ttctgctacttgctc

SEQ ID NO: 1930 - DNA, 15 bp, Homo sapiens
tttctgctacttgct

SEQ ID NO: 1931 - DNA, 15 bp, Homo sapiens
gtttctgctacttgc

SEQ ID NO: 1932 - DNA, 15 bp, Homo sapiens
agtttctgctacttg

SEQ ID NO: 1933 - DNA, 15 bp, Homo sapiens
cagtttctgctactt

SEQ ID NO: 1934 - DNA, 15 bp, Homo sapiens
ccagtttctgctact

SEQ ID NO: 1935 - DNA, 15 bp, Homo sapiens
cccagtttctgctac

SEQ ID NO: 1936 - DNA, 15 bp, Homo sapiens
tcccagtttctgcta

SEQ ID NO: 1937 - DNA, 15 bp, Homo sapiens
gtcccagtttctgct

SEQ ID NO: 1938 - DNA, 15 bp, Homo sapiens
ggtcccagtttctgc

SEQ ID NO: 1939 - DNA, 15 bp, Homo sapiens
gggtcccagtttctg

SEQ ID NO: 1940 - DNA, 15 bp, Homo sapiens
tgggtcccagtttct

SEQ ID NO: 1941 - DNA, 15 bp, Homo sapiens
ctgggtcccagtttc

SEQ ID NO: 1942 - DNA, 15 bp, Homo sapiens
tctgggtcccagttt

SEQ ID NO: 1943 - DNA, 15 bp, Homo sapiens
ctctgggtcccagtt

SEQ ID NO: 1944 - DNA, 15 bp, Homo sapiens
gctctgggtcccagt

SEQ ID NO: 1945 - DNA, 15 bp, Homo sapiens
tgctctgggtcccag

SEQ ID NO: 1946 - DNA, 15 bp, Homo sapiens
gtgctctgggtccca

SEQ ID NO: 1947 - DNA, 15 bp, Homo sapiens
tgtgctctgggtccc

SEQ ID NO: 1948 - DNA, 15 bp, Homo sapiens
ctgtgctctgggtcc

SEQ ID NO: 1949 - DNA, 15 bp, Homo sapiens
cctgtgctctgggtc

SEQ ID NO: 1950 - DNA, 15 bp, Homo sapiens
tcctgtgctctgggt

SEQ ID NO: 1951 - DNA, 15 bp, Homo sapiens
ctcctgtgctctggg

SEQ ID NO: 1952 - DNA, 15 bp, Homo sapiens
cctcctgtgctctgg

SEQ ID NO: 1953 - DNA, 15 bp, Homo sapiens
ccctcctgtgctctg

SEQ ID NO: 1954 - DNA, 15 bp, Homo sapiens
tccctcctgtgctct

SEQ ID NO: 1955 - DNA, 15 bp, Homo sapiens
ctccctcctgtgctc

SEQ ID NO: 1956 - DNA, 15 bp, Homo sapiens
tctccctcctgtgct

SEQ ID NO: 1957 - DNA, 15 bp, Homo sapiens
ttctccctcctgtgc

SEQ ID NO: 1958 - DNA, 15 bp, Homo sapiens
cttctccctcctgtg

SEQ ID NO: 1959 - DNA, 15 bp, Homo sapiens
acttctccctcctgt

SEQ ID NO: 1960 - DNA, 15 bp, Homo sapiens
cacttctccctcctg

SEQ ID NO: 1961 - DNA, 15 bp, Homo sapiens
ccacttctccctcct

SEQ ID NO: 1962 - DNA, 15 bp, Homo sapiens
gccacttctccctcc

SEQ ID NO: 1963 - DNA, 15 bp, Homo sapiens
ggccacttctccctc

SEQ ID NO: 1964 - DNA, 15 bp, Homo sapiens
aggccacttctccct

SEQ ID NO: 1965 - DNA, 15 bp, Homo sapiens
caggccacttctccc

SEQ ID NO: 1966 - DNA, 15 bp, Homo sapiens
tcaggccacttctcc

SEQ ID NO: 1967 - DNA, 15 bp, Homo sapiens
ctcaggccacttctc

SEQ ID NO: 1968 - DNA, 15 bp, Homo sapiens
gctcaggccacttct

SEQ ID NO: 1969 - DNA, 15 bp, Homo sapiens
tgctcaggccacttc

SEQ ID NO: 1970 - DNA, 15 bp, Homo sapiens
ttgctcaggccactt

SEQ ID NO: 1971 - DNA, 15 bp, Homo sapiens
cttgctcaggccact

SEQ ID NO: 1972 - DNA, 15 bp, Homo sapiens
tcttgctcaggccac

SEQ ID NO: 1973 - DNA, 15 bp, Homo sapiens
ttcttgctcaggcca

SEQ ID NO: 1974 - DNA, 15 bp, Homo sapiens
cttcttgctcaggcc

SEQ ID NO: 1975 - DNA, 15 bp, Homo sapiens
ccttcttgctcaggc

SEQ ID NO: 1976 - DNA, 15 bp, Homo sapiens
cccttcttgctcagg

SEQ ID NO: 1977 - DNA, 15 bp, Homo sapiens
tcccttcttgctcag

SEQ ID NO: 1978 - DNA, 15 bp, Homo sapiens
gtcccttcttgctca

SEQ ID NO: 1979 - DNA, 15 bp, Homo sapiens
agtcccttcttgctc

SEQ ID NO: 1980 - DNA, 15 bp, Homo sapiens
gagtcccttcttgct

SEQ ID NO: 1981 - DNA, 15 bp, Homo sapiens
ggagtcccttcttgc

SEQ ID NO: 1982 - DNA, 15 bp, Homo sapiens
aggagtcccttcttg

SEQ ID NO: 1983 - DNA, 15 bp, Homo sapiens
gaggagtcccttctt

SEQ ID NO: 1984 - DNA, 15 bp, Homo sapiens
cgaggagtcccttct

SEQ ID NO: 1985 - DNA, 15 bp, Homo sapiens
acgaggagtcccttc

SEQ ID NO: 1986 - DNA, 15 bp, Homo sapiens
gacgaggagtccctt

SEQ ID NO: 1987 - DNA, 15 bp, Homo sapiens
tgacgaggagtccct

SEQ ID NO: 1988 - DNA, 15 bp, Homo sapiens
atgacgaggagtccc

SEQ ID NO: 1989 - DNA, 15 bp, Homo sapiens
gatgacgaggagtcc

SEQ ID NO: 1990 - DNA, 15 bp, Homo sapiens
agatgacgaggagtc

SEQ ID NO: 1991 - DNA, 15 bp, Homo sapiens
cagatgacgaggagt

SEQ ID NO: 1992 - DNA, 15 bp, Homo sapiens
acagatgacgaggag

SEQ ID NO: 1993 - DNA, 15 bp, Homo sapiens
tacagatgacgagga

SEQ ID NO: 1994 - DNA, 15 bp, Homo sapiens
ttacagatgacgagg

SEQ ID NO: 1995 - DNA, 15 bp, Homo sapiens
gttacagatgacgag

SEQ ID NO: 1996 - DNA, 15 bp, Homo sapiens
tgttacagatgacga

SEQ ID NO: 1997 - DNA, 15 bp, Homo sapiens
gtgttacagatgacg

SEQ ID NO: 1998 - DNA, 15 bp, Homo sapiens
tgtgttacagatgac

SEQ ID NO: 1999 - DNA, 15 bp, Homo sapiens
ctgtgttacagatga

SEQ ID NO: 2000 - DNA, 15 bp, Homo sapiens
cctgtgttacagatg

SEQ ID NO: 2001 - DNA, 15 bp, Homo sapiens
ccctgtgttacagat

SEQ ID NO: 2002 - DNA, 15 bp, Homo sapiens
cccctgtgttacaga

SEQ ID NO: 2003 - DNA, 15 bp, Homo sapiens
tcccctgtgttacag

SEQ ID NO: 2004 - DNA, 15 bp, Homo sapiens
ctcccctgtgttaca

SEQ ID NO: 2005 - DNA, 15 bp, Homo sapiens
cctcccctgtgttac

SEQ ID NO: 2006 - DNA, 15 bp, Homo sapiens
ccctcccctgtgtta

SEQ ID NO: 2007 - DNA, 15 bp, Homo sapiens
tccctcccctgtgtt

SEQ ID NO: 2008 - DNA, 15 bp, Homo sapiens
ttccctcccctgtgt

SEQ ID NO: 2009 - DNA, 15 bp, Homo sapiens
tttccctcccctgtg

SEQ ID NO: 2010 - DNA, 15 bp, Homo sapiens
atttccctcccctgt

SEQ ID NO: 2011 - DNA, 15 bp, Homo sapiens
gatttccctcccctg

SEQ ID NO: 2012 - DNA, 15 bp, Homo sapiens
tgatttccctcccct

SEQ ID NO: 2013 - DNA, 15 bp, Homo sapiens
ctgatttccctcccc

SEQ ID NO: 2014 - DNA, 15 bp, Homo sapiens
gctgatttccctccc

SEQ ID NO: 2015 - DNA, 15 bp, Homo sapiens
cgctgatttccctcc

SEQ ID NO: 2016 - DNA, 15 bp, Homo sapiens
acgctgatttccctc

SEQ ID NO: 2017 - DNA, 15 bp, Homo sapiens
cacgctgatttccct

SEQ ID NO: 2018 - DNA, 15 bp, Homo sapiens
gcacgctgatttccc

SEQ ID NO: 2019 - DNA, 15 bp, Homo sapiens
tgcacgctgatttcc

SEQ ID NO: 2020 - DNA, 15 bp, Homo sapiens
ctgcacgctgatttc

SEQ ID NO: 2021 - DNA, 15 bp, Homo sapiens
tctgcacgctgattt

SEQ ID NO: 2022 - DNA, 15 bp, Homo sapiens
gtctgcacgctgatt

SEQ ID NO: 2023 - DNA, 15 bp, Homo sapiens
agtctgcacgctgat

SEQ ID NO: 2024 - DNA, 15 bp, Homo sapiens
aagtctgcacgctga

SEQ ID NO: 2025 - DNA, 15 bp, Homo sapiens
caagtctgcacgctg

SEQ ID NO: 2026 - DNA, 15 bp, Homo sapiens
ccaagtctgcacgct

SEQ ID NO: 2027 - DNA, 15 bp, Homo sapiens
cccaagtctgcacgc

SEQ ID NO: 2028 - DNA, 15 bp, Homo sapiens
ccccaagtctgcacg

SEQ ID NO: 2029 - DNA, 15 bp, Homo sapiens
cccccaagtctgcac

SEQ ID NO: 2030 - DNA, 15 bp, Homo sapiens
gcccccaagtctgca

SEQ ID NO: 2031 - DNA, 15 bp, Homo sapiens
ggcccccaagtctgc

SEQ ID NO: 2032 - DNA, 15 bp, Homo sapiens
tggcccccaagtctg

SEQ ID NO: 2033 - DNA, 15 bp, Homo sapiens
gtggcccccaagtct

SEQ ID NO: 2034 - DNA, 15 bp, Homo sapiens
tgtggcccccaagtc

SEQ ID NO: 2035 - DNA, 15 bp, Homo sapiens
ttgtggcccccaagt

SEQ ID NO: 2036 - DNA, 15 bp, Homo sapiens
cttgtggcccccaag

SEQ ID NO: 2037 - DNA, 15 bp, Homo sapiens
acttgtggcccccaa

SEQ ID NO: 2038 - DNA, 15 bp, Homo sapiens
aacttgtggccccca

SEQ ID NO: 2039 - DNA, 15 bp, Homo sapiens
taacttgtggccccc

SEQ ID NO: 2040 - DNA, 15 bp, Homo sapiens
ataacttgtggcccc

SEQ ID NO: 2041 - DNA, 15 bp, Homo sapiens
tataacttgtggccc

SEQ ID NO: 2042 - DNA, 15 bp, Homo sapiens
ctataacttgtggcc

SEQ ID NO: 2043 - DNA, 15 bp, Homo sapiens
cctataacttgtggc

SEQ ID NO: 2044 - DNA, 15 bp, Homo sapiens
ccctataacttgtgg

SEQ ID NO: 2045 - DNA, 15 bp, Homo sapiens
tccctataacttgtg

SEQ ID NO: 2046 - DNA, 15 bp, Homo sapiens
ctccctataacttgt

SEQ ID NO: 2047 - DNA, 15 bp, Homo sapiens
actccctataacttg

SEQ ID NO: 2048 - DNA, 15 bp, Homo sapiens
aactccctataactt

SEQ ID NO: 2049 - DNA, 15 bp, Homo sapiens
gaactccctataact

SEQ ID NO: 2050 - DNA, 15 bp, Homo sapiens
ggaactccctataac

SEQ ID NO: 2051 - DNA, 15 bp, Homo sapiens
tggaactccctataa

SEQ ID NO: 2052 - DNA, 15 bp, Homo sapiens
atggaactccctata

SEQ ID NO: 2053 - DNA, 15 bp, Homo sapiens
aatggaactccctat

SEQ ID NO: 2054 - DNA, 15 bp, Homo sapiens
gaatggaactcccta

SEQ ID NO: 2055 - DNA, 15 bp, Homo sapiens
agaatggaactccct

SEQ ID NO: 2056 - DNA, 15 bp, Homo sapiens
aagaatggaactccc

SEQ ID NO: 2057 - DNA, 15 bp, Homo sapiens
taagaatggaactcc

SEQ ID NO: 2058 - DNA, 15 bp, Homo sapiens
ataagaatggaactc

SEQ ID NO: 2059 - DNA, 15 bp, Homo sapiens
cataagaatggaact

SEQ ID NO: 2060 - DNA, 15 bp, Homo sapiens
ccataagaatggaac

SEQ ID NO: 2061 - DNA, 15 bp, Homo sapiens
gccataagaatggaa

SEQ ID NO: 2062 - DNA, 15 bp, Homo sapiens
agccataagaatgga

SEQ ID NO: 2063 - DNA, 15 bp, Homo sapiens
aagccataagaatgg

SEQ ID NO: 2064 - DNA, 15 bp, Homo sapiens
gaagccataagaatg

SEQ ID NO: 2065 - DNA, 15 bp, Homo sapiens
agaagccataagaat

SEQ ID NO: 2066 - DNA, 15 bp, Homo sapiens
cagaagccataagaa

SEQ ID NO: 2067 - DNA, 15 bp, Homo sapiens
acagaagccataaga

SEQ ID NO: 2068 - DNA, 15 bp, Homo sapiens
aacagaagccataag

SEQ ID NO: 2069 - DNA, 15 bp, Homo sapiens
aaacagaagccataa

SEQ ID NO: 2070 - DNA, 15 bp, Homo sapiens
aaaacagaagccata

SEQ ID NO: 2071 - DNA, 15 bp, Homo sapiens
caaaacagaagccat

SEQ ID NO: 2072 - DNA, 15 bp, Homo sapiens
acaaaacagaagcca

SEQ ID NO: 2073 - DNA, 15 bp, Homo sapiens
aacaaaacagaagcc

SEQ ID NO: 2074 - DNA, 15 bp, Homo sapiens
aaacaaaacagaagc

SEQ ID NO: 2075 - DNA, 15 bp, Homo sapiens
aaaacaaaacagaag

SEQ ID NO: 2076 - DNA, 15 bp, Homo sapiens
aaaaacaaaacagaa

SEQ ID NO: 2077 - DNA, 15 bp, Homo sapiens
aaaaaacaaaacaga

SEQ ID NO: 2078 - DNA, 15 bp, Homo sapiens
caaaaaacaaaacag

SEQ ID NO: 2079 - DNA, 15 bp, Homo sapiens
tcaaaaaacaaaaca

SEQ ID NO: 2080 - DNA, 15 bp, Homo sapiens
ttcaaaaaacaaaac

SEQ ID NO: 2081 - DNA, 15 bp, Homo sapiens
cttcaaaaaacaaaa

SEQ ID NO: 2082 - DNA, 15 bp, Homo sapiens
gcttcaaaaaacaaa

SEQ ID NO: 2083 - DNA, 15 bp, Homo sapiens
tgcttcaaaaaacaa

SEQ ID NO: 2084 - DNA, 15 bp, Homo sapiens
ctgcttcaaaaaaca

SEQ ID NO: 2085 - DNA, 15 bp, Homo sapiens
cctgcttcaaaaaac

SEQ ID NO: 2086 - DNA, 15 bp, Homo sapiens
tcctgcttcaaaaaa

SEQ ID NO: 2087 - DNA, 15 bp, Homo sapiens
ctcctgcttcaaaaa

SEQ ID NO: 2088 - DNA, 15 bp, Homo sapiens
tctcctgcttcaaaa

SEQ ID NO: 2089 - DNA, 15 bp, Homo sapiens
ctctcctgcttcaaa

SEQ ID NO: 2090 - DNA, 15 bp, Homo sapiens
tctctcctgcttcaa

SEQ ID NO: 2091 - DNA, 15 bp, Homo sapiens
ttctctcctgcttca

SEQ ID NO: 2092 - DNA, 15 bp, Homo sapiens
tttctctcctgcttc

SEQ ID NO: 2093 - DNA, 15 bp, Homo sapiens
ctttctctcctgctt

SEQ ID NO: 2094 - DNA, 15 bp, Homo sapiens
actttctctcctgct

SEQ ID NO: 2095 - DNA, 15 bp, Homo sapiens
gactttctctcctgc

SEQ ID NO: 2096 - DNA, 15 bp, Homo sapiens
agactttctctcctg

SEQ ID NO: 2097 - DNA, 15 bp, Homo sapiens
cagactttctctcct

SEQ ID NO: 2098 - DNA, 15 bp, Homo sapiens
tcagactttctctcc

SEQ ID NO: 2099 - DNA, 15 bp, Homo sapiens
ttcagactttctctc

SEQ ID NO: 2100 - DNA, 15 bp, Homo sapiens
cttcagactttctct

SEQ ID NO: 2101 - DNA, 15 bp, Homo sapiens
ccttcagactttctc

SEQ ID NO: 2102 - DNA, 15 bp, Homo sapiens
accttcagactttct

SEQ ID NO: 2103 - DNA, 15 bp, Homo sapiens
taccttcagactttc

SEQ ID NO: 2104 - DNA, 15 bp, Homo sapiens
ttaccttcagacttt

SEQ ID NO: 2105 - DNA, 15 bp, Homo sapiens
tttaccttcagactt

SEQ ID NO: 2106 - DNA, 15 bp, Homo sapiens
ctttaccttcagact

SEQ ID NO: 2107 - DNA, 15 bp, Homo sapiens
tctttaccttcagac

SEQ ID NO: 2108 - DNA, 15 bp, Homo sapiens
ttctttaccttcaga

SEQ ID NO: 2109 - DNA, 15 bp, Homo sapiens
gttctttaccttcag

SEQ ID NO: 2110 - DNA, 15 bp, Homo sapiens
tgttctttaccttca

SEQ ID NO: 2111 - DNA, 15 bp, Homo sapiens
atgttctttaccttc

SEQ ID NO: 2112 - DNA, 15 bp, Homo sapiens
aatgttctttacctt

SEQ ID NO: 2113 - DNA, 15 bp, Homo sapiens
aaatgttctttacct

SEQ ID NO: 2114 - DNA, 15 bp, Homo sapiens
caaatgttctttacc

SEQ ID NO: 2115 - DNA, 15 bp, Homo sapiens
tcaaatgttctttac

SEQ ID NO: 2116 - DNA, 15 bp, Homo sapiens
ttcaaatgttcttta

SEQ ID NO: 2117 - DNA, 15 bp, Homo sapiens
tttcaaatgttcttt

SEQ ID NO: 2118 - DNA, 15 bp, Homo sapiens
ctttcaaatgttctt

SEQ ID NO: 2119 - DNA, 15 bp, Homo sapiens
tctttcaaatgttct

SEQ ID NO: 2120 - DNA, 15 bp, Homo sapiens
ctctttcaaatgttc

SEQ ID NO: 2121 - DNA, 15 bp, Homo sapiens
actctttcaaatgtt

SEQ ID NO: 2122 - DNA, 15 bp, Homo sapiens
gactctttcaaatgt

SEQ ID NO: 2123 - DNA, 15 bp, Homo sapiens
tgactctttcaaatg

SEQ ID NO: 2124 - DNA, 15 bp, Homo sapiens
gtgactctttcaaat

SEQ ID NO: 2125 - DNA, 15 bp, Homo sapiens
agtgactctttcaaa

SEQ ID NO: 2126 - DNA, 15 bp, Homo sapiens
aagtgactctttcaa

SEQ ID NO: 2127 - DNA, 15 bp, Homo sapiens
gaagtgactctttca

SEQ ID NO: 2128 - DNA, 15 bp, Homo sapiens
tgaagtgactctttc

SEQ ID NO: 2129 - DNA, 15 bp, Homo sapiens
ctgaagtgactcttt

SEQ ID NO: 2130 - DNA, 15 bp, Homo sapiens
tctgaagtgactctt

SEQ ID NO: 2131 - DNA, 15 bp, Homo sapiens
ctctgaagtgactct

SEQ ID NO: 2132 - DNA, 15 bp, Homo sapiens
cctctgaagtgactc

SEQ ID NO: 2133 - DNA, 15 bp, Homo sapiens
tcctctgaagtgact

SEQ ID NO: 2134 - DNA, 15 bp, Homo sapiens
ctcctctgaagtgac

SEQ ID NO: 2135 - DNA, 15 bp, Homo sapiens
tctcctctgaagtga

SEQ ID NO: 2136 - DNA, 15 bp, Homo sapiens
ttctcctctgaagtg

SEQ ID NO: 2137 - DNA, 15 bp, Homo sapiens
tttctcctctgaagt

SEQ ID NO: 2138 - DNA, 15 bp, Homo sapiens
gtttctcctctgaag

SEQ ID NO: 2139 - DNA, 15 bp, Homo sapiens
cgtttctcctctgaa

SEQ ID NO: 2140 - DNA, 15 bp, Homo sapiens
tcgtttctcctctga

SEQ ID NO: 2141 - DNA, 15 bp, Homo sapiens
ctcgtttctcctctg

SEQ ID NO: 2142 - DNA, 15 bp, Homo sapiens
actcgtttctcctct

SEQ ID NO: 2143 - DNA, 15 bp, Homo sapiens
cactcgtttctcctc

SEQ ID NO: 2144 - DNA, 15 bp, Homo sapiens
ccactcgtttctcct

SEQ ID NO: 2145 - DNA, 15 bp, Homo sapiens
tccactcgtttctcc

SEQ ID NO: 2146 - DNA, 15 bp, Homo sapiens
atccactcgtttctc

SEQ ID NO: 2147 - DNA, 15 bp, Homo sapiens
gatccactcgtttct

SEQ ID NO: 2148 - DNA, 15 bp, Homo sapiens
tgatccactcgtttc

SEQ ID NO: 2149 - DNA, 15 bp, Homo sapiens
ttgatccactcgttt

SEQ ID NO: 2150 - DNA, 15 bp, Homo sapiens
tttgatccactcgtt

SEQ ID NO: 2151 - DNA, 15 bp, Homo sapiens
ttttgatccactcgt

SEQ ID NO: 2152 - DNA, 15 bp, Homo sapiens
tttttgatccactcg

SEQ ID NO: 2153 - DNA, 15 bp, Homo sapiens
ttttttgatccactc

SEQ ID NO: 2154 - DNA, 15 bp, Homo sapiens
tttttttgatccact

SEQ ID NO: 2155 - DNA, 15 bp, Homo sapiens
atttttttgatccac

SEQ ID NO: 2156 - DNA, 15 bp, Homo sapiens
tatttttttgatcca

SEQ ID NO: 2157 - DNA, 15 bp, Homo sapiens
atatttttttgatcc

SEQ ID NO: 2158 - DNA, 15 bp, Homo sapiens
tatatttttttgatc

SEQ ID NO: 2159 - DNA, 15 bp, Homo sapiens
ctatatttttttgat

SEQ ID NO: 2160 - DNA, 15 bp, Homo sapiens
actatatttttttga

SEQ ID NO: 2161 - DNA, 15 bp, Homo sapiens
tactatatttttttg

SEQ ID NO: 2162 - DNA, 15 bp, Homo sapiens
ctactatattttttt

SEQ ID NO: 2163 - DNA, 15 bp, Homo sapiens
tctactatatttttt

SEQ ID NO: 2164 - DNA, 15 bp, Homo sapiens
ttctactatattttt

SEQ ID NO: 2165 - DNA, 15 bp, Homo sapiens
gttctactatatttt

SEQ ID NO: 2166 - DNA, 15 bp, Homo sapiens
agttctactatattt

SEQ ID NO: 2167 - DNA, 15 bp, Homo sapiens
cagttctactatatt

SEQ ID NO: 2168 - DNA, 15 bp, Homo sapiens
gcagttctactatat

SEQ ID NO: 2169 - DNA, 15 bp, Homo sapiens
agcagttctactata

SEQ ID NO: 2170 - DNA, 15 bp, Homo sapiens
tagcagttctactat

SEQ ID NO: 2171 - DNA, 15 bp, Homo sapiens
ctagcagttctacta

SEQ ID NO: 2172 - DNA, 15 bp, Homo sapiens
cctagcagttctact

SEQ ID NO: 2173 - DNA, 15 bp, Homo sapiens
gcctagcagttctac

SEQ ID NO: 2174 - DNA, 15 bp, Homo sapiens
tgcctagcagttcta

SEQ ID NO: 2175 - DNA, 15 bp, Homo sapiens
ctgcctagcagttct

SEQ ID NO: 2176 - DNA, 15 bp, Homo sapiens
cctgcctagcagttc

SEQ ID NO: 2177 - DNA, 15 bp, Homo sapiens
ccctgcctagcagtt

SEQ ID NO: 2178 - DNA, 15 bp, Homo sapiens
accctgcctagcagt

SEQ ID NO: 2179 - DNA, 15 bp, Homo sapiens
caccctgcctagcag

SEQ ID NO: 2180 - DNA, 15 bp, Homo sapiens
ccaccctgcctagca

SEQ ID NO: 2181 - DNA, 15 bp, Homo sapiens
gccaccctgcctagc

SEQ ID NO: 2182 - DNA, 15 bp, Homo sapiens
ggccaccctgcctag

SEQ ID NO: 2183 - DNA, 15 bp, Homo sapiens
cggccaccctgccta

SEQ ID NO: 2184 - DNA, 15 bp, Homo sapiens
tcggccaccctgcct

SEQ ID NO: 2185 - DNA, 15 bp, Homo sapiens
atcggccaccctgcc

SEQ ID NO: 2186 - DNA, 15 bp, Homo sapiens
catcggccaccctgc

SEQ ID NO: 2187 - DNA, 15 bp, Homo sapiens
tcatcggccaccctg

SEQ ID NO: 2188 - DNA, 15 bp, Homo sapiens
gtcatcggccaccct

SEQ ID NO: 2189 - DNA, 15 bp, Homo sapiens
ggtcatcggccaccc

SEQ ID NO: 2190 - DNA, 15 bp, Homo sapiens
gggtcatcggccacc

SEQ ID NO: 2191 - DNA, 15 bp, Homo sapiens
ggggtcatcggccac

SEQ ID NO: 2192 - DNA, 15 bp, Homo sapiens
aggggtcatcggcca

SEQ ID NO: 2193 - DNA, 15 bp, Homo sapiens
gaggggtcatcggcc

SEQ ID NO: 2194 - DNA, 15 bp, Homo sapiens
cgaggggtcatcggc

SEQ ID NO: 2195 - DNA, 15 bp, Homo sapiens
tcgaggggtcatcgg

SEQ ID NO: 2196 - DNA, 15 bp, Homo sapiens
gtcgaggggtcatcg

SEQ ID NO: 2197 - DNA, 15 bp, Homo sapiens
agtcgaggggtcatc

SEQ ID NO: 2198 - DNA, 15 bp, Homo sapiens
cagtcgaggggtcat

SEQ ID NO: 2199 - DNA, 15 bp, Homo sapiens
ccagtcgaggggtca

SEQ ID NO: 2200 - DNA, 15 bp, Homo sapiens
accagtcgaggggtc

SEQ ID NO: 2201 - DNA, 15 bp, Homo sapiens
caccagtcgaggggt

SEQ ID NO: 2202 - DNA, 15 bp, Homo sapiens
ccaccagtcgagggg

SEQ ID NO: 2203 - DNA, 15 bp, Homo sapiens
gccaccagtcgaggg

SEQ ID NO: 2204 - DNA, 15 bp, Homo sapiens
cgccaccagtcgagg

SEQ ID NO: 2205 - DNA, 15 bp, Homo sapiens
tcgccaccagtcgag

SEQ ID NO: 2206 - DNA, 15 bp, Homo sapiens
atcgccaccagtcga

SEQ ID NO: 2207 - DNA, 15 bp, Homo sapiens
catcgccaccagtcg

SEQ ID NO: 2208 - DNA, 15 bp, Homo sapiens
acatcgccaccagtc

SEQ ID NO: 2209 - DNA, 15 bp, Homo sapiens
aacatcgccaccagt

SEQ ID NO: 2210 - DNA, 15 bp, Homo sapiens
gaacatcgccaccag

SEQ ID NO: 2211 - DNA, 15 bp, Homo sapiens
tgaacatcgccacca

SEQ ID NO: 2212 - DNA, 15 bp, Homo sapiens
atgaacatcgccacc

SEQ ID NO: 2213 - DNA, 15 bp, Homo sapiens
gatgaacatcgccac

SEQ ID NO: 2214 - DNA, 15 bp, Homo sapiens
agatgaacatcgcca

SEQ ID NO: 2215 - DNA, 15 bp, Homo sapiens
cagatgaacatcgcc

SEQ ID NO: 2216 - DNA, 15 bp, Homo sapiens
gcagatgaacatcgc

SEQ ID NO: 2217 - DNA, 15 bp, Homo sapiens
agcagatgaacatcg

SEQ ID NO: 2218 - DNA, 15 bp, Homo sapiens
gagcagatgaacatc

SEQ ID NO: 2219 - DNA, 15 bp, Homo sapiens
agagcagatgaacat

SEQ ID NO: 2220 - DNA, 15 bp, Homo sapiens
cagagcagatgaaca

SEQ ID NO: 2221 - DNA, 15 bp, Homo sapiens
gcagagcagatgaac

SEQ ID NO: 2222 - DNA, 15 bp, Homo sapiens
ggcagagcagatgaa

SEQ ID NO: 2223 - DNA, 15 bp, Homo sapiens
tggcagagcagatga

SEQ ID NO: 2224 - DNA, 15 bp, Homo sapiens
atggcagagcagatg

SEQ ID NO: 2225 - DNA, 15 bp, Homo sapiens
catggcagagcagat

SEQ ID NO: 2226 - DNA, 15 bp, Homo sapiens
ccatggcagagcaga

SEQ ID NO: 2227 - DNA, 15 bp, Homo sapiens
cccatggcagagcag

SEQ ID NO: 2228 - DNA, 15 bp, Homo sapiens
tcccatggcagagca

SEQ ID NO: 2229 - DNA, 15 bp, Homo sapiens
gtcccatggcagagc

SEQ ID NO: 2230 - DNA, 15 bp, Homo sapiens
tgtcccatggcagag

SEQ ID NO: 2231 - DNA, 15 bp, Homo sapiens
atgtcccatggcaga

SEQ ID NO: 2232 - DNA, 15 bp, Homo sapiens
aatgtcccatggcag

SEQ ID NO: 2233 - DNA, 15 bp, Homo sapiens
gaatgtcccatggca

SEQ ID NO: 2234 - DNA, 15 bp, Homo sapiens
agaatgtcccatggc

SEQ ID NO: 2235 - DNA, 15 bp, Homo sapiens
gagaatgtcccatgg

SEQ ID NO: 2236 - DNA, 15 bp, Homo sapiens
agagaatgtcccatg

SEQ ID NO: 2237 - DNA, 15 bp, Homo sapiens
tagagaatgtcccat

SEQ ID NO: 2238 - DNA, 15 bp, Homo sapiens
ttagagaatgtccca

SEQ ID NO: 2239 - DNA, 15 bp, Homo sapiens
gttagagaatgtccc

SEQ ID NO: 2240 - DNA, 15 bp, Homo sapiens
tgttagagaatgtcc

SEQ ID NO: 2241 - DNA, 15 bp, Homo sapiens
ttgttagagaatgtc

SEQ ID NO: 2242 - DNA, 15 bp, Homo sapiens
tttgttagagaatgt

SEQ ID NO: 2243 - DNA, 15 bp, Homo sapiens
ctttgttagagaatg

SEQ ID NO: 2244 - DNA, 15 bp, Homo sapiens
gctttgttagagaat

SEQ ID NO: 2245 - DNA, 15 bp, Homo sapiens
agctttgttagagaa

SEQ ID NO: 2246 - DNA, 15 bp, Homo sapiens
aagctttgttagaga

SEQ ID NO: 2247 - DNA, 15 bp, Homo sapiens
taagctttgttagag

SEQ ID NO: 2248 - DNA, 15 bp, Homo sapiens
ctaagctttgttaga

SEQ ID NO: 2249 - DNA, 15 bp, Homo sapiens
gctaagctttgttag

SEQ ID NO: 2250 - DNA, 15 bp, Homo sapiens
tgctaagctttgtta

SEQ ID NO: 2251 - DNA, 15 bp, Homo sapiens
gtgctaagctttgtt

SEQ ID NO: 2252 - DNA, 15 bp, Homo sapiens
cgtgctaagctttgt

SEQ ID NO: 2253 - DNA, 15 bp, Homo sapiens
acgtgctaagctttg

SEQ ID NO: 2254 - DNA, 15 bp, Homo sapiens
cacgtgctaagcttt

SEQ ID NO: 2255 - DNA, 15 bp, Homo sapiens
gcacgtgctaagctt

SEQ ID NO: 2256 - DNA, 15 bp, Homo sapiens
agcacgtgctaagct

SEQ ID NO: 2257 - DNA, 15 bp, Homo sapiens
cagcacgtgctaagc

SEQ ID NO: 2258 - DNA, 15 bp, Homo sapiens
ccagcacgtgctaag

SEQ ID NO: 2259 - DNA, 15 bp, Homo sapiens
cccagcacgtgctaa

SEQ ID NO: 2260 - DNA, 15 bp, Homo sapiens
gcccagcacgtgcta

SEQ ID NO: 2261 - DNA, 15 bp, Homo sapiens
agcccagcacgtgct

SEQ ID NO: 2262 - DNA, 15 bp, Homo sapiens
cagcccagcacgtgc

SEQ ID NO: 2263 - DNA, 15 bp, Homo sapiens
tcagcccagcacgtg

SEQ ID NO: 2264 - DNA, 15 bp, Homo sapiens
atcagcccagcacgt

SEQ ID NO: 2265 - DNA, 15 bp, Homo sapiens
catcagcccagcacg

SEQ ID NO: 2266 - DNA, 15 bp, Homo sapiens
tcatcagcccagcac

SEQ ID NO: 2267 - DNA, 15 bp, Homo sapiens
ctcatcagcccagca

SEQ ID NO: 2268 - DNA, 15 bp, Homo sapiens
actcatcagcccagc

SEQ ID NO: 2269 - DNA, 15 bp, Homo sapiens
cactcatcagcccag

SEQ ID NO: 2270 - DNA, 15 bp, Homo sapiens
gcactcatcagccca

SEQ ID NO: 2271 - DNA, 15 bp, Homo sapiens
agcactcatcagccc

SEQ ID NO: 2272 - DNA, 15 bp, Homo sapiens
tagcactcatcagcc

SEQ ID NO: 2273 - DNA, 15 bp, Homo sapiens
atagcactcatcagc

SEQ ID NO: 2274 - DNA, 15 bp, Homo sapiens
catagcactcatcag

SEQ ID NO: 2275 - DNA, 15 bp, Homo sapiens
tcatagcactcatca

SEQ ID NO: 2276 - DNA, 15 bp, Homo sapiens
ttcatagcactcatc

SEQ ID NO: 2277 - DNA, 15 bp, Homo sapiens
tttcatagcactcat

SEQ ID NO: 2278 - DNA, 15 bp, Homo sapiens
ttttcatagcactca

SEQ ID NO: 2279 - DNA, 15 bp, Homo sapiens
tttttcatagcactc

SEQ ID NO: 2280 - DNA, 15 bp, Homo sapiens
ctttttcatagcact

SEQ ID NO: 2281 - DNA, 15 bp, Homo sapiens
gctttttcatagcac

SEQ ID NO: 2282 - DNA, 15 bp, Homo sapiens
ggctttttcatagca

SEQ ID NO: 2283 - DNA, 15 bp, Homo sapiens
tggctttttcatagc

SEQ ID NO: 2284 - DNA, 15 bp, Homo sapiens
ctggctttttcatag

SEQ ID NO: 2285 - DNA, 15 bp, Homo sapiens
cctggctttttcata

SEQ ID NO: 2286 - DNA, 15 bp, Homo sapiens
ccctggctttttcat

SEQ ID NO: 2287 - DNA, 15 bp, Homo sapiens
cccctggctttttca

SEQ ID NO: 2288 - DNA, 15 bp, Homo sapiens
gcccctggctttttc

SEQ ID NO: 2289 - DNA, 15 bp, Homo sapiens
ggcccctggcttttt

SEQ ID NO: 2290 - DNA, 15 bp, Homo sapiens
gggcccctggctttt

SEQ ID NO: 2291 - DNA, 15 bp, Homo sapiens
cgggcccctggcttt

SEQ ID NO: 2292 - DNA, 15 bp, Homo sapiens
tcgggcccctggctt

SEQ ID NO: 2293 - DNA, 15 bp, Homo sapiens
ctcgggcccctggct

SEQ ID NO: 2294 - DNA, 15 bp, Homo sapiens
cctcgggcccctggc

SEQ ID NO: 2295 - DNA, 15 bp, Homo sapiens
tcctcgggcccctgg

SEQ ID NO: 2296 - DNA, 15 bp, Homo sapiens
gtcctcgggcccctg

SEQ ID NO: 2297 - DNA, 15 bp, Homo sapiens
tgtcctcgggcccct

SEQ ID NO: 2298 - DNA, 15 bp, Homo sapiens
gtgtcctcgggcccc

SEQ ID NO: 2299 - DNA, 15 bp, Homo sapiens
agtgtcctcgggccc

SEQ ID NO: 2300 - DNA, 15 bp, Homo sapiens
cagtgtcctcgggcc

SEQ ID NO: 2301 - DNA, 15 bp, Homo sapiens
ccagtgtcctcgggc

SEQ ID NO: 2302 - DNA, 15 bp, Homo sapiens
cccagtgtcctcggg

SEQ ID NO: 2303 - DNA, 15 bp, Homo sapiens
ccccagtgtcctcgg

SEQ ID NO: 2304 - DNA, 15 bp, Homo sapiens
accccagtgtcctcg

SEQ ID NO: 2305 - DNA, 15 bp, Homo sapiens
caccccagtgtcctc

SEQ ID NO: 2306 - DNA, 15 bp, Homo sapiens
ccaccccagtgtcct

SEQ ID NO: 2307 - DNA, 15 bp, Homo sapiens
tccaccccagtgtcc

SEQ ID NO: 2308 - DNA, 15 bp, Homo sapiens
gtccaccccagtgtc

SEQ ID NO: 2309 - DNA, 15 bp, Homo sapiens
tgtccaccccagtgt

SEQ ID NO: 2310 - DNA, 15 bp, Homo sapiens
ctgtccaccccagtg

SEQ ID NO: 2311 - DNA, 15 bp, Homo sapiens
cctgtccaccccagt

SEQ ID NO: 2312 - DNA, 15 bp, Homo sapiens
gcctgtccaccccag

SEQ ID NO: 2313 - DNA, 15 bp, Homo sapiens
agcctgtccacccca

SEQ ID NO: 2314 - DNA, 15 bp, Homo sapiens
gagcctgtccacccc

SEQ ID NO: 2315 - DNA, 15 bp, Homo sapiens
ggagcctgtccaccc

SEQ ID NO: 2316 - DNA, 15 bp, Homo sapiens
gggagcctgtccacc

SEQ ID NO: 2317 - DNA, 15 bp, Homo sapiens
ggggagcctgtccac

SEQ ID NO: 2318 - DNA, 15 bp, Homo sapiens
aggggagcctgtcca

SEQ ID NO: 2319 - DNA, 15 bp, Homo sapiens
caggggagcctgtcc

SEQ ID NO: 2320 - DNA, 15 bp, Homo sapiens
ccaggggagcctgtc

SEQ ID NO: 2321 - DNA, 15 bp, Homo sapiens
cccaggggagcctgt

SEQ ID NO: 2322 - DNA, 15 bp, Homo sapiens
ccccaggggagcctg

SEQ ID NO: 2323 - DNA, 15 bp, Homo sapiens
tccccaggggagcct

SEQ ID NO: 2324 - DNA, 15 bp, Homo sapiens
ttccccaggggagcc

SEQ ID NO: 2325 - DNA, 15 bp, Homo sapiens
cttccccaggggagc

SEQ ID NO: 2326 - DNA, 15 bp, Homo sapiens
acttccccaggggag

SEQ ID NO: 2327 - DNA, 15 bp, Homo sapiens
gacttccccagggga

SEQ ID NO: 2328 - DNA, 15 bp, Homo sapiens
ggacttccccagggg

SEQ ID NO: 2329 - DNA, 15 bp, Homo sapiens
aggacttccccaggg

SEQ ID NO: 2330 - DNA, 15 bp, Homo sapiens
gaggacttccccagg

SEQ ID NO: 2331 - DNA, 15 bp, Homo sapiens
agaggacttccccag

SEQ ID NO: 2332 - DNA, 15 bp, Homo sapiens
aagaggacttcccca

SEQ ID NO: 2333 - DNA, 15 bp, Homo sapiens
taagaggacttcccc

SEQ ID NO: 2334 - DNA, 15 bp, Homo sapiens
ctaagaggacttccc

SEQ ID NO: 2335 - DNA, 15 bp, Homo sapiens
tctaagaggacttcc

SEQ ID NO: 2336 - DNA, 15 bp, Homo sapiens
ttctaagaggacttc

SEQ ID NO: 2337 - DNA, 15 bp, Homo sapiens
gttctaagaggactt

SEQ ID NO: 2338 - DNA, 15 bp, Homo sapiens
agttctaagaggact

SEQ ID NO: 2339 - DNA, 15 bp, Homo sapiens
cagttctaagaggac

SEQ ID NO: 2340 - DNA, 15 bp, Homo sapiens
tcagttctaagagga

SEQ ID NO: 2341 - DNA, 15 bp, Homo sapiens
ctcagttctaagagg

SEQ ID NO: 2342 - DNA, 15 bp, Homo sapiens
cctcagttctaagag

SEQ ID NO: 2343 - DNA, 15 bp, Homo sapiens
ccctcagttctaaga

SEQ ID NO: 2344 - DNA, 15 bp, Homo sapiens
tccctcagttctaag

SEQ ID NO: 2345 - DNA, 15 bp, Homo sapiens
atccctcagttctaa

SEQ ID NO: 2346 - DNA, 15 bp, Homo sapiens
gatccctcagttcta

SEQ ID NO: 2347 - DNA, 15 bp, Homo sapiens
tgatccctcagttct

SEQ ID NO: 2348 - DNA, 15 bp, Homo sapiens
ttgatccctcagttc

SEQ ID NO: 2349 - DNA, 15 bp, Homo sapiens
gttgatccctcagtt

SEQ ID NO: 2350 - DNA, 15 bp, Homo sapiens
tgttgatccctcagt

SEQ ID NO: 2351 - DNA, 15 bp, Homo sapiens
gtgttgatccctcag

SEQ ID NO: 2352 - DNA, 15 bp, Homo sapiens
agtgttgatccctca

SEQ ID NO: 2353 - DNA, 15 bp, Homo sapiens
cagtgttgatccctc

SEQ ID NO: 2354 - DNA, 15 bp, Homo sapiens
ccagtgttgatccct

SEQ ID NO: 2355 - DNA, 15 bp, Homo sapiens
tccagtgttgatccc

SEQ ID NO: 2356 - DNA, 15 bp, Homo sapiens
ctccagtgttgatcc

SEQ ID NO: 2357 - DNA, 15 bp, Homo sapiens
cctccagtgttgatc

SEQ ID NO: 2358 - DNA, 15 bp, Homo sapiens
tcctccagtgttgat

SEQ ID NO: 2359 - DNA, 15 bp, Homo sapiens
ctcctccagtgttga

SEQ ID NO: 2360 - DNA, 15 bp, Homo sapiens
tctcctccagtgttg

SEQ ID NO: 2361 - DNA, 15 bp, Homo sapiens
gtctcctccagtgtt

SEQ ID NO: 2362 - DNA, 15 bp, Homo sapiens
agtctcctccagtgt

SEQ ID NO: 2363 - DNA, 15 bp, Homo sapiens
cagtctcctccagtg

SEQ ID NO: 2364 - DNA, 15 bp, Homo sapiens
gcagtctcctccagt

SEQ ID NO: 2365 - DNA, 15 bp, Homo sapiens
tgcagtctcctccag

SEQ ID NO: 2366 - DNA, 15 bp, Homo sapiens
ttgcagtctcctcca

SEQ ID NO: 2367 - DNA, 15 bp, Homo sapiens
cttgcagtctcctcc

SEQ ID NO: 2368 - DNA, 15 bp, Homo sapiens
ccttgcagtctcctc

SEQ ID NO: 2369 - DNA, 15 bp, Homo sapiens
cccttgcagtctcct

SEQ ID NO: 2370 - DNA, 15 bp, Homo sapiens
ccccttgcagtctcc

SEQ ID NO: 2371 - DNA, 15 bp, Homo sapiens
accccttgcagtctc

SEQ ID NO: 2372 - DNA, 15 bp, Homo sapiens
taccccttgcagtct

SEQ ID NO: 2373 - DNA, 15 bp, Homo sapiens
gtaccccttgcagtc

SEQ ID NO: 2374 - DNA, 15 bp, Homo sapiens
cgtaccccttgcagt

SEQ ID NO: 2375 - DNA, 15 bp, Homo sapiens
ccgtaccccttgcag

SEQ ID NO: 2376 - DNA, 15 bp, Homo sapiens
cccgtaccccttgca

SEQ ID NO: 2377 - DNA, 15 bp, Homo sapiens
tcccgtaccccttgc

SEQ ID NO: 2378 - DNA, 15 bp, Homo sapiens
atcccgtaccccttg

SEQ ID NO: 2379 - DNA, 15 bp, Homo sapiens
tatcccgtacccctt

SEQ ID NO: 2380 - DNA, 15 bp, Homo sapiens
ttatcccgtacccct

SEQ ID NO: 2381 - DNA, 15 bp, Homo sapiens
tttatcccgtacccc

SEQ ID NO: 2382 - DNA, 15 bp, Homo sapiens
atttatcccgtaccc

SEQ ID NO: 2383 - DNA, 15 bp, Homo sapiens
catttatcccgtacc

SEQ ID NO: 2384 - DNA, 15 bp, Homo sapiens
acatttatcccgtac

SEQ ID NO: 2385 - DNA, 15 bp, Homo sapiens
aacatttatcccgta

SEQ ID NO: 2386 - DNA, 15 bp, Homo sapiens
gaacatttatcccgt

SEQ ID NO: 2387 - DNA, 15 bp, Homo sapiens
ggaacatttatcccg

SEQ ID NO: 2388 - DNA, 15 bp, Homo sapiens
aggaacatttatccc

SEQ ID NO: 2389 - DNA, 15 bp, Homo sapiens
caggaacatttatcc

SEQ ID NO: 2390 - DNA, 15 bp, Homo sapiens
ccaggaacatttatc

SEQ ID NO: 2391 - DNA, 15 bp, Homo sapiens
accaggaacatttat

SEQ ID NO: 2392 - DNA, 15 bp, Homo sapiens
caccaggaacattta

SEQ ID NO: 2393 - DNA, 15 bp, Homo sapiens
tcaccaggaacattt

SEQ ID NO: 2394 - DNA, 15 bp, Homo sapiens
ttcaccaggaacatt

SEQ ID NO: 2395 - DNA, 15 bp, Homo sapiens
cttcaccaggaacat

SEQ ID NO: 2396 - DNA, 15 bp, Homo sapiens
ccttcaccaggaaca

SEQ ID NO: 2397 - DNA, 15 bp, Homo sapiens
tccttcaccaggaac

SEQ ID NO: 2398 - DNA, 15 bp, Homo sapiens
ttccttcaccaggaa

SEQ ID NO: 2399 - DNA, 15 bp, Homo sapiens
tttccttcaccagga

SEQ ID NO: 2400 - DNA, 15 bp, Homo sapiens
gtttccttcaccagg

SEQ ID NO: 2401 - DNA, 15 bp, Homo sapiens
tgtttccttcaccag

SEQ ID NO: 2402 - DNA, 15 bp, Homo sapiens
ctgtttccttcacca

SEQ ID NO: 2403 - DNA, 15 bp, Homo sapiens
gctgtttccttcacc

SEQ ID NO: 2404 - DNA, 15 bp, Homo sapiens
tgctgtttccttcac

SEQ ID NO: 2405 - DNA, 15 bp, Homo sapiens
ctgctgtttccttca

SEQ ID NO: 2406 - DNA, 15 bp, Homo sapiens
cctgctgtttccttc

SEQ ID NO: 2407 - DNA, 15 bp, Homo sapiens
ccctgctgtttcctt

SEQ ID NO: 2408 - DNA, 15 bp, Homo sapiens
cccctgctgtttcct

SEQ ID NO: 2409 - DNA, 15 bp, Homo sapiens
gcccctgctgtttcc

SEQ ID NO: 2410 - DNA, 15 bp, Homo sapiens
tgcccctgctgtttc

SEQ ID NO: 2411 - DNA, 15 bp, Homo sapiens
ttgcccctgctgttt

SEQ ID NO: 2412 - DNA, 15 bp, Homo sapiens
tttgcccctgctgtt

SEQ ID NO: 2413 - DNA, 15 bp, Homo sapiens
ctttgcccctgctgt

SEQ ID NO: 2414 - DNA, 15 bp, Homo sapiens
cctttgcccctgctg

SEQ ID NO: 2415 - DNA, 15 bp, Homo sapiens
gcctttgcccctgct

SEQ ID NO: 2416 - DNA, 15 bp, Homo sapiens
ggcctttgcccctgc

SEQ ID NO: 2417 - DNA, 15 bp, Homo sapiens
gggcctttgcccctg

SEQ ID NO: 2418 - DNA, 15 bp, Homo sapiens
agggcctttgcccct

SEQ ID NO: 2419 - DNA, 15 bp, Homo sapiens
cagggcctttgcccc

SEQ ID NO: 2420 - DNA, 15 bp, Homo sapiens
gcagggcctttgccc

SEQ ID NO: 2421 - DNA, 15 bp, Homo sapiens
tgcagggcctttgcc

SEQ ID NO: 2422 - DNA, 15 bp, Homo sapiens
ctgcagggcctttgc

SEQ ID NO: 2423 - DNA, 15 bp, Homo sapiens
gctgcagggcctttg

SEQ ID NO: 2424 - DNA, 15 bp, Homo sapiens
tgctgcagggccttt

SEQ ID NO: 2425 - DNA, 15 bp, Homo sapiens
ctgctgcagggcctt

SEQ ID NO: 2426 - DNA, 15 bp, Homo sapiens
tctgctgcagggcct

SEQ ID NO: 2427 - DNA, 15 bp, Homo sapiens
ttctgctgcagggcc

SEQ ID NO: 2428 - DNA, 15 bp, Homo sapiens
tttctgctgcagggc

SEQ ID NO: 2429 - DNA, 15 bp, Homo sapiens
ctttctgctgcaggg

SEQ ID NO: 2430 - DNA, 15 bp, Homo sapiens
cctttctgctgcagg

SEQ ID NO: 2431 - DNA, 15 bp, Homo sapiens
tcctttctgctgcag

SEQ ID NO: 2432 - DNA, 15 bp, Homo sapiens
ctcctttctgctgca

SEQ ID NO: 2433 - DNA, 15 bp, Homo sapiens
gctcctttctgctgc

SEQ ID NO: 2434 - DNA, 15 bp, Homo sapiens
cgctcctttctgctg

SEQ ID NO: 2435 - DNA, 15 bp, Homo sapiens
tcgctcctttctgct

SEQ ID NO: 2436 - DNA, 15 bp, Homo sapiens
ctcgctcctttctgc

SEQ ID NO: 2437 - DNA, 15 bp, Homo sapiens
cctcgctcctttctg

SEQ ID NO: 2438 - DNA, 15 bp, Homo sapiens
gcctcgctcctttct

SEQ ID NO: 2439 - DNA, 15 bp, Homo sapiens
ggcctcgctcctttc

SEQ ID NO: 2440 - DNA, 15 bp, Homo sapiens
gggcctcgctccttt

SEQ ID NO: 2441 - DNA, 15 bp, Homo sapiens
agggcctcgctcctt

SEQ ID NO: 2442 - DNA, 15 bp, Homo sapiens
aagggcctcgctcct

SEQ ID NO: 2443 - DNA, 15 bp, Homo sapiens
aaagggcctcgctcc

SEQ ID NO: 2444 - DNA, 15 bp, Homo sapiens
caaagggcctcgctc

SEQ ID NO: 2445 - DNA, 15 bp, Homo sapiens
ccaaagggcctcgct

SEQ ID NO: 2446 - DNA, 15 bp, Homo sapiens
tccaaagggcctcgc

SEQ ID NO: 2447 - DNA, 15 bp, Homo sapiens
ctccaaagggcctcg

SEQ ID NO: 2448 - DNA, 15 bp, Homo sapiens
actccaaagggcctc

SEQ ID NO: 2449 - DNA, 15 bp, Homo sapiens
tactccaaagggcct

SEQ ID NO: 2450 - DNA, 15 bp, Homo sapiens
ttactccaaagggcc

SEQ ID NO: 2451 - DNA, 15 bp, Homo sapiens
gttactccaaagggc

SEQ ID NO: 2452 - DNA, 15 bp, Homo sapiens
tgttactccaaaggg

SEQ ID NO: 2453 - DNA, 15 bp, Homo sapiens
ctgttactccaaagg

SEQ ID NO: 2454 - DNA, 15 bp, Homo sapiens
tctgttactccaaag

SEQ ID NO: 2455 - DNA, 15 bp, Homo sapiens
ttctgttactccaaa

SEQ ID NO: 2456 - DNA, 15 bp, Homo sapiens
tttctgttactccaa

SEQ ID NO: 2457 - DNA, 15 bp, Homo sapiens
ctttctgttactcca

SEQ ID NO: 2458 - DNA, 15 bp, Homo sapiens
tctttctgttactcc

SEQ ID NO: 2459 - DNA, 15 bp, Homo sapiens
gtctttctgttactc

SEQ ID NO: 2460 - DNA, 15 bp, Homo sapiens
ggtctttctgttact

SEQ ID NO: 2461 - DNA, 15 bp, Homo sapiens
tggtctttctgttac

SEQ ID NO: 2462 - DNA, 15 bp, Homo sapiens
atggtctttctgtta

SEQ ID NO: 2463 - DNA, 15 bp, Homo sapiens
catggtctttctgtt

SEQ ID NO: 2464 - DNA, 15 bp, Homo sapiens
ccatggtctttctgt

SEQ ID NO: 2465 - DNA, 15 bp, Homo sapiens
accatggtctttctg

SEQ ID NO: 2466 - DNA, 15 bp, Homo sapiens
caccatggtctttct

SEQ ID NO: 2467 - DNA, 15 bp, Homo sapiens
tcaccatggtctttc

SEQ ID NO: 2468 - DNA, 15 bp, Homo sapiens
gtcaccatggtcttt

SEQ ID NO: 2469 - DNA, 15 bp, Homo sapiens
tgtcaccatggtctt

SEQ ID NO: 2470 - DNA, 15 bp, Homo sapiens
ctgtcaccatggtct

SEQ ID NO: 2471 - DNA, 15 bp, Homo sapiens
cctgtcaccatggtc

SEQ ID NO: 2472 - DNA, 15 bp, Homo sapiens
tcctgtcaccatggt

SEQ ID NO: 2473 - DNA, 15 bp, Homo sapiens
ctcctgtcaccatgg

SEQ ID NO: 2474 - DNA, 15 bp, Homo sapiens
gctcctgtcaccatg

SEQ ID NO: 2475 - DNA, 15 bp, Homo sapiens
agctcctgtcaccat

SEQ ID NO: 2476 - DNA, 15 bp, Homo sapiens
gagctcctgtcacca

SEQ ID NO: 2477 - DNA, 15 bp, Homo sapiens
tgagctcctgtcacc

SEQ ID NO: 2478 - DNA, 15 bp, Homo sapiens
ctgagctcctgtcac

SEQ ID NO: 2479 - DNA, 15 bp, Homo sapiens
tctgagctcctgtca

SEQ ID NO: 2480 - DNA, 15 bp, Homo sapiens
ttctgagctcctgtc

SEQ ID NO: 2481 - DNA, 15 bp, Homo sapiens
tttctgagctcctgt

SEQ ID NO: 2482 - DNA, 15 bp, Homo sapiens
ctttctgagctcctg

SEQ ID NO: 2483 - DNA, 15 bp, Homo sapiens
tctttctgagctcct

SEQ ID NO: 2484 - DNA, 15 bp, Homo sapiens
gtctttctgagctcc

SEQ ID NO: 2485 - DNA, 15 bp, Homo sapiens
ggtctttctgagctc

SEQ ID NO: 2486 - DNA, 15 bp, Homo sapiens
tggtctttctgagct

SEQ ID NO: 2487 - DNA, 15 bp, Homo sapiens
gtggtctttctgagc

SEQ ID NO: 2488 - DNA, 15 bp, Homo sapiens
agtggtctttctgag

SEQ ID NO: 2489 - DNA, 15 bp, Homo sapiens
cagtggtctttctga

SEQ ID NO: 2490 - DNA, 15 bp, Homo sapiens
ccagtggtctttctg

SEQ ID NO: 2491 - DNA, 15 bp, Homo sapiens
accagtggtctttct

SEQ ID NO: 2492 - DNA, 15 bp, Homo sapiens
caccagtggtctttc

SEQ ID NO: 2493 - DNA, 15 bp, Homo sapiens
acaccagtggtcttt

SEQ ID NO: 2494 - DNA, 15 bp, Homo sapiens
aacaccagtggtctt

SEQ ID NO: 2495 - DNA, 15 bp, Homo sapiens
taacaccagtggtct

SEQ ID NO: 2496 - DNA, 15 bp, Homo sapiens
ttaacaccagtggtc

SEQ ID NO: 2497 - DNA, 15 bp, Homo sapiens
cttaacaccagtggt

SEQ ID NO: 2498 - DNA, 15 bp, Homo sapiens
tcttaacaccagtgg

SEQ ID NO: 2499 - DNA, 15 bp, Homo sapiens
gtcttaacaccagtg

SEQ ID NO: 2500 - DNA, 15 bp, Homo sapiens
agtcttaacaccagt

SEQ ID NO: 2501 - DNA, 15 bp, Homo sapiens
tagtcttaacaccag

SEQ ID NO: 2502 - DNA, 15 bp, Homo sapiens
atagtcttaacacca

SEQ ID NO: 2503 - DNA, 15 bp, Homo sapiens
catagtcttaacacc

SEQ ID NO: 2504 - DNA, 15 bp, Homo sapiens
tcatagtcttaacac

SEQ ID NO: 2505 - DNA, 15 bp, Homo sapiens
ctcatagtcttaaca

SEQ ID NO: 2506 - DNA, 15 bp, Homo sapiens
gctcatagtcttaac

SEQ ID NO: 2507 - DNA, 15 bp, Homo sapiens
ggctcatagtcttaa

SEQ ID NO: 2508 - DNA, 15 bp, Homo sapiens
tggctcatagtctta

SEQ ID NO: 2509 - DNA, 15 bp, Homo sapiens
ctggctcatagtctt

SEQ ID NO: 2510 - DNA, 15 bp, Homo sapiens
actggctcatagtct

SEQ ID NO: 2511 - DNA, 15 bp, Homo sapiens
cactggctcatagtc

SEQ ID NO: 2512 - DNA, 15 bp, Homo sapiens
ccactggctcatagt

SEQ ID NO: 2513 - DNA, 15 bp, Homo sapiens
tccactggctcatag

SEQ ID NO: 2514 - DNA, 15 bp, Homo sapiens
ctccactggctcata

SEQ ID NO: 2515 - DNA, 15 bp, Homo sapiens
cctccactggctcat

SEQ ID NO: 2516 - DNA, 15 bp, Homo sapiens
gcctccactggctca

SEQ ID NO: 2517 - DNA, 15 bp, Homo sapiens
ggcctccactggctc

SEQ ID NO: 2518 - DNA, 15 bp, Homo sapiens
tggcctccactggct

SEQ ID NO: 2519 - DNA, 15 bp, Homo sapiens
ctggcctccactggc

SEQ ID NO: 2520 - DNA, 15 bp, Homo sapiens
tctggcctccactgg

SEQ ID NO: 2521 - DNA, 15 bp, Homo sapiens
atctggcctccactg

SEQ ID NO: 2522 - DNA, 15 bp, Homo sapiens
aatctggcctccact

SEQ ID NO: 2523 - DNA, 15 bp, Homo sapiens
caatctggcctccac

SEQ ID NO: 2524 - DNA, 15 bp, Homo sapiens
ccaatctggcctcca

SEQ ID NO: 2525 - DNA, 15 bp, Homo sapiens
cccaatctggcctcc

SEQ ID NO: 2526 - DNA, 15 bp, Homo sapiens
ccccaatctggcctc

SEQ ID NO: 2527 - DNA, 15 bp, Homo sapiens
tccccaatctggcct

SEQ ID NO: 2528 - DNA, 15 bp, Homo sapiens
ttccccaatctggcc

SEQ ID NO: 2529 - DNA, 15 bp, Homo sapiens
attccccaatctggc

SEQ ID NO: 2530 - DNA, 15 bp, Homo sapiens
cattccccaatctgg

SEQ ID NO: 2531 - DNA, 15 bp, Homo sapiens
ccattccccaatctg

SEQ ID NO: 2532 - DNA, 15 bp, Homo sapiens
cccattccccaatct

SEQ ID NO: 2533 - DNA, 15 bp, Homo sapiens
tcccattccccaatc

SEQ ID NO: 2534 - DNA, 15 bp, Homo sapiens
atcccattccccaat

SEQ ID NO: 2535 - DNA, 15 bp, Homo sapiens
catcccattccccaa

SEQ ID NO: 2536 - DNA, 15 bp, Homo sapiens
ccatcccattcccca

SEQ ID NO: 2537 - DNA, 15 bp, Homo sapiens
cccatcccattcccc

SEQ ID NO: 2538 - DNA, 15 bp, Homo sapiens
tcccatcccattccc

SEQ ID NO: 2539 - DNA, 15 bp, Homo sapiens
ctcccatcccattcc

SEQ ID NO: 2540 - DNA, 15 bp, Homo sapiens
cctcccatcccattc

SEQ ID NO: 2541 - DNA, 15 bp, Homo sapiens
ccctcccatcccatt

SEQ ID NO: 2542 - DNA, 15 bp, Homo sapiens
accctcccatcccat

SEQ ID NO: 2543 - DNA, 15 bp, Homo sapiens
caccctcccatccca

SEQ ID NO: 2544 - DNA, 15 bp, Homo sapiens
gcaccctcccatccc

SEQ ID NO: 2545 - DNA, 15 bp, Homo sapiens
agcaccctcccatcc

SEQ ID NO: 2546 - DNA, 15 bp, Homo sapiens
aagcaccctcccatc

SEQ ID NO: 2547 - DNA, 15 bp, Homo sapiens
caagcaccctcccat

SEQ ID NO: 2548 - DNA, 15 bp, Homo sapiens
tcaagcaccctccca

SEQ ID NO: 2549 - DNA, 15 bp, Homo sapiens
ttcaagcaccctccc

SEQ ID NO: 2550 - DNA, 15 bp, Homo sapiens
cttcaagcaccctcc

SEQ ID NO: 2551 - DNA, 15 bp, Homo sapiens
tcttcaagcaccctc

SEQ ID NO: 2552 - DNA, 15 bp, Homo sapiens
gtcttcaagcaccct

SEQ ID NO: 2553 - DNA, 15 bp, Homo sapiens
ggtcttcaagcaccc

SEQ ID NO: 2554 - DNA, 15 bp, Homo sapiens
tggtcttcaagcacc

SEQ ID NO: 2555 - DNA, 15 bp, Homo sapiens
atggtcttcaagcac

SEQ ID NO: 2556 - DNA, 15 bp, Homo sapiens
catggtcttcaagca

SEQ ID NO: 2557 - DNA, 15 bp, Homo sapiens
ccatggtcttcaagc

SEQ ID NO: 2558 - DNA, 15 bp, Homo sapiens
accatggtcttcaag

SEQ ID NO: 2559 - DNA, 15 bp, Homo sapiens
caccatggtcttcaa

SEQ ID NO: 2560 - DNA, 15 bp, Homo sapiens
tcaccatggtcttca

SEQ ID NO: 2561 - DNA, 15 bp, Homo sapiens
ctcaccatggtcttc

SEQ ID NO: 2562 - DNA, 15 bp, Homo sapiens
cctcaccatggtctt

SEQ ID NO: 2563 - DNA, 15 bp, Homo sapiens
gcctcaccatggtct

SEQ ID NO: 2564 - DNA, 15 bp, Homo sapiens
agcctcaccatggtc

SEQ ID NO: 2565 - DNA, 15 bp, Homo sapiens
gagcctcaccatggt

SEQ ID NO: 2566 - DNA, 15 bp, Homo sapiens
agagcctcaccatgg

SEQ ID NO: 2567 - DNA, 15 bp, Homo sapiens
gagagcctcaccatg

SEQ ID NO: 2568 - DNA, 15 bp, Homo sapiens
agagagcctcaccat

SEQ ID NO: 2569 - DNA, 15 bp, Homo sapiens
aagagagcctcacca

SEQ ID NO: 2570 - DNA, 15 bp, Homo sapiens
caagagagcctcacc

SEQ ID NO: 2571 - DNA, 15 bp, Homo sapiens
ccaagagagcctcac

SEQ ID NO: 2572 - DNA, 15 bp, Homo sapiens
accaagagagcctca

SEQ ID NO: 2573 - DNA, 15 bp, Homo sapiens
gaccaagagagcctc

SEQ ID NO: 2574 - DNA, 15 bp, Homo sapiens
agaccaagagagcct

SEQ ID NO: 2575 - DNA, 15 bp, Homo sapiens
aagaccaagagagcc

SEQ ID NO: 2576 - DNA, 15 bp, Homo sapiens
aaagaccaagagagc

SEQ ID NO: 2577 - DNA, 15 bp, Homo sapiens
taaagaccaagagag

SEQ ID NO: 2578 - DNA, 15 bp, Homo sapiens
gtaaagaccaagaga

SEQ ID NO: 2579 - DNA, 15 bp, Homo sapiens
agtaaagaccaagag

SEQ ID NO: 2580 - DNA, 15 bp, Homo sapiens
aagtaaagaccaaga

SEQ ID NO: 2581 - DNA, 15 bp, Homo sapiens
aaagtaaagaccaag

SEQ ID NO: 2582 - DNA, 15 bp, Homo sapiens
aaaagtaaagaccaa

SEQ ID NO: 2583 - DNA, 15 bp, Homo sapiens
taaaagtaaagacca

SEQ ID NO: 2584 - DNA, 15 bp, Homo sapiens
ttaaaagtaaagacc

SEQ ID NO: 2585 - DNA, 15 bp, Homo sapiens
cttaaaagtaaagac

SEQ ID NO: 2586 - DNA, 15 bp, Homo sapiens
tcttaaaagtaaaga

SEQ ID NO: 2587 - DNA, 15 bp, Homo sapiens
ttcttaaaagtaaag

SEQ ID NO: 2588 - DNA, 15 bp, Homo sapiens
cttcttaaaagtaaa

SEQ ID NO: 2589 - DNA, 15 bp, Homo sapiens
tcttcttaaaagtaa

SEQ ID NO: 2590 - DNA, 15 bp, Homo sapiens
ttcttcttaaaagta

SEQ ID NO: 2591 - DNA, 15 bp, Homo sapiens
attcttcttaaaagt

SEQ ID NO: 2592 - DNA, 15 bp, Homo sapiens
tattcttcttaaaag

SEQ ID NO: 2593 - DNA, 15 bp, Homo sapiens
ctattcttcttaaaa

SEQ ID NO: 2594 - DNA, 15 bp, Homo sapiens
cctattcttcttaaa

SEQ ID NO: 2595 - DNA, 15 bp, Homo sapiens
tcctattcttcttaa

SEQ ID NO: 2596 - DNA, 15 bp, Homo sapiens
gtcctattcttctta

SEQ ID NO: 2597 - DNA, 15 bp, Homo sapiens
tgtcctattcttctt

SEQ ID NO: 2598 - DNA, 15 bp, Homo sapiens
gtgtcctattcttct

SEQ ID NO: 2599 - DNA, 15 bp, Homo sapiens
agtgtcctattcttc

SEQ ID NO: 2600 - DNA, 15 bp, Homo sapiens
aagtgtcctattctt

SEQ ID NO: 2601 - DNA, 15 bp, Homo sapiens
gaagtgtcctattct

SEQ ID NO: 2602 - DNA, 15 bp, Homo sapiens
ggaagtgtcctattc

SEQ ID NO: 2603 - DNA, 15 bp, Homo sapiens
tggaagtgtcctatt

SEQ ID NO: 2604 - DNA, 15 bp, Homo sapiens
ttggaagtgtcctat

SEQ ID NO: 2605 - DNA, 15 bp, Homo sapiens
tttggaagtgtccta

SEQ ID NO: 2606 - DNA, 15 bp, Homo sapiens
ctttggaagtgtcct

SEQ ID NO: 2607 - DNA, 15 bp, Homo sapiens
cctttggaagtgtcc

SEQ ID NO: 2608 - DNA, 15 bp, Homo sapiens
ccctttggaagtgtc

SEQ ID NO: 2609 - DNA, 15 bp, Homo sapiens
accctttggaagtgt

SEQ ID NO: 2610 - DNA, 15 bp, Homo sapiens
taccctttggaagtg

SEQ ID NO: 2611 - DNA, 15 bp, Homo sapiens
ctaccctttggaagt

SEQ ID NO: 2612 - DNA, 15 bp, Homo sapiens
actaccctttggaag

SEQ ID NO: 2613 - DNA, 15 bp, Homo sapiens
cactaccctttggaa

SEQ ID NO: 2614 - DNA, 15 bp, Homo sapiens
acactaccctttgga

SEQ ID NO: 2615 - DNA, 15 bp, Homo sapiens
gacactaccctttgg

SEQ ID NO: 2616 - DNA, 15 bp, Homo sapiens
tgacactaccctttg

SEQ ID NO: 2617 - DNA, 15 bp, Homo sapiens
ttgacactacccttt

SEQ ID NO: 2618 - DNA, 15 bp, Homo sapiens
cttgacactaccctt

SEQ ID NO: 2619 - DNA, 15 bp, Homo sapiens
acttgacactaccct

SEQ ID NO: 2620 - DNA, 15 bp, Homo sapiens
cacttgacactaccc

SEQ ID NO: 2621 - DNA, 15 bp, Homo sapiens
gcacttgacactacc

SEQ ID NO: 2622 - DNA, 15 bp, Homo sapiens
ggcacttgacactac

SEQ ID NO: 2623 - DNA, 15 bp, Homo sapiens
tggcacttgacacta

SEQ ID NO: 2624 - DNA, 15 bp, Homo sapiens
ttggcacttgacact

SEQ ID NO: 2625 - DNA, 15 bp, Homo sapiens
cttggcacttgacac

SEQ ID NO: 2626 - DNA, 15 bp, Homo sapiens
ccttggcacttgaca

SEQ ID NO: 2627 - DNA, 15 bp, Homo sapiens
tccttggcacttgac

SEQ ID NO: 2628 - DNA, 15 bp, Homo sapiens
ttccttggcacttga

SEQ ID NO: 2629 - DNA, 15 bp, Homo sapiens
cttccttggcacttg

SEQ ID NO: 2630 - DNA, 15 bp, Homo sapiens
tcttccttggcactt

SEQ ID NO: 2631 - DNA, 15 bp, Homo sapiens
atcttccttggcact

SEQ ID NO: 2632 - DNA, 15 bp, Homo sapiens
gatcttccttggcac

SEQ ID NO: 2633 - DNA, 15 bp, Homo sapiens
tgatcttccttggca

SEQ ID NO: 2634 - DNA, 15 bp, Homo sapiens
ctgatcttccttggc

SEQ ID NO: 2635 - DNA, 15 bp, Homo sapiens
cctgatcttccttgg

SEQ ID NO: 2636 - DNA, 15 bp, Homo sapiens
tcctgatcttccttg

SEQ ID NO: 2637 - DNA, 15 bp, Homo sapiens
ctcctgatcttcctt

SEQ ID NO: 2638 - DNA, 15 bp, Homo sapiens
cctcctgatcttcct

SEQ ID NO: 2639 - DNA, 15 bp, Homo sapiens
ccctcctgatcttcc

SEQ ID NO: 2640 - DNA, 15 bp, Homo sapiens
gccctcctgatcttc

SEQ ID NO: 2641 - DNA, 15 bp, Homo sapiens
agccctcctgatctt

SEQ ID NO: 2642 - DNA, 15 bp, Homo sapiens
aagccctcctgatct

SEQ ID NO: 2643 - DNA, 15 bp, Homo sapiens
aaagccctcctgatc

SEQ ID NO: 2644 - DNA, 15 bp, Homo sapiens
aaaagccctcctgat

SEQ ID NO: 2645 - DNA, 15 bp, Homo sapiens
gaaaagccctcctga

SEQ ID NO: 2646 - DNA, 15 bp, Homo sapiens
ggaaaagccctcctg

SEQ ID NO: 2647 - DNA, 15 bp, Homo sapiens
gggaaaagccctcct

SEQ ID NO: 2648 - DNA, 15 bp, Homo sapiens
ggggaaaagccctcc

SEQ ID NO: 2649 - DNA, 15 bp, Homo sapiens
tggggaaaagccctc

SEQ ID NO: 2650 - DNA, 15 bp, Homo sapiens
gtggggaaaagccct

SEQ ID NO: 2651 - DNA, 15 bp, Homo sapiens
tgtggggaaaagccc

SEQ ID NO: 2652 - DNA, 15 bp, Homo sapiens
gtgtggggaaaagcc

SEQ ID NO: 2653 - DNA, 15 bp, Homo sapiens
ggtgtggggaaaagc

SEQ ID NO: 2654 - DNA, 15 bp, Homo sapiens
tggtgtggggaaaag

SEQ ID NO: 2655 - DNA, 15 bp, Homo sapiens
ctggtgtggggaaaa

SEQ ID NO: 2656 - DNA, 15 bp, Homo sapiens
gctggtgtggggaaa

SEQ ID NO: 2657 - DNA, 15 bp, Homo sapiens
ggctggtgtggggaa

SEQ ID NO: 2658 - DNA, 15 bp, Homo sapiens
gggctggtgtgggga

SEQ ID NO: 2659 - DNA, 15 bp, Homo sapiens
agggctggtgtgggg

SEQ ID NO: 2660 - DNA, 15 bp, Homo sapiens
tagggctggtgtggg

SEQ ID NO: 2661 - DNA, 15 bp, Homo sapiens
ctagggctggtgtgg

SEQ ID NO: 2662 - DNA, 15 bp, Homo sapiens
cctagggctggtgtg

SEQ ID NO: 2663 - DNA, 15 bp, Homo sapiens
tcctagggctggtgt

SEQ ID NO: 2664 - DNA, 15 bp, Homo sapiens
gtcctagggctggtg

SEQ ID NO: 2665 - DNA, 15 bp, Homo sapiens
agtcctagggctggt

SEQ ID NO: 2666 - DNA, 15 bp, Homo sapiens
aagtcctagggctgg

SEQ ID NO: 2667 - DNA, 15 bp, Homo sapiens
aaagtcctagggctg

SEQ ID NO: 2668 - DNA, 15 bp, Homo sapiens
caaagtcctagggct

SEQ ID NO: 2669 - DNA, 15 bp, Homo sapiens
ccaaagtcctagggc

SEQ ID NO: 2670 - DNA, 15 bp, Homo sapiens
tccaaagtcctaggg

SEQ ID NO: 2671 - DNA, 15 bp, Homo sapiens
gtccaaagtcctagg

SEQ ID NO: 2672 - DNA, 15 bp, Homo sapiens
agtccaaagtcctag

SEQ ID NO: 2673 - DNA, 15 bp, Homo sapiens
gagtccaaagtccta

SEQ ID NO: 2674 - DNA, 15 bp, Homo sapiens
agagtccaaagtcct

SEQ ID NO: 2675 - DNA, 15 bp, Homo sapiens
cagagtccaaagtcc

SEQ ID NO: 2676 - DNA, 15 bp, Homo sapiens
ccagagtccaaagtc

SEQ ID NO: 2677 - DNA, 15 bp, Homo sapiens
cccagagtccaaagt

SEQ ID NO: 2678 - DNA, 15 bp, Homo sapiens
tcccagagtccaaag

SEQ ID NO: 2679 - DNA, 15 bp, Homo sapiens
ctcccagagtccaaa

SEQ ID NO: 2680 - DNA, 15 bp, Homo sapiens
gctcccagagtccaa

SEQ ID NO: 2681 - DNA, 15 bp, Homo sapiens
ggctcccagagtcca

SEQ ID NO: 2682 - DNA, 15 bp, Homo sapiens
aggctcccagagtcc

SEQ ID NO: 2683 - DNA, 15 bp, Homo sapiens
gaggctcccagagtc

SEQ ID NO: 2684 - DNA, 15 bp, Homo sapiens
tgaggctcccagagt

SEQ ID NO: 2685 - DNA, 15 bp, Homo sapiens
ctgaggctcccagag

SEQ ID NO: 2686 - DNA, 15 bp, Homo sapiens
actgaggctcccaga

SEQ ID NO: 2687 - DNA, 15 bp, Homo sapiens
aactgaggctcccag

SEQ ID NO: 2688 - DNA, 15 bp, Homo sapiens
aaactgaggctccca

SEQ ID NO: 2689 - DNA, 15 bp, Homo sapiens
caaactgaggctccc

SEQ ID NO: 2690 - DNA, 15 bp, Homo sapiens
gcaaactgaggctcc

SEQ ID NO: 2691 - DNA, 15 bp, Homo sapiens
agcaaactgaggctc

SEQ ID NO: 2692 - DNA, 15 bp, Homo sapiens
gagcaaactgaggct

SEQ ID NO: 2693 - DNA, 15 bp, Homo sapiens
tgagcaaactgaggc

SEQ ID NO: 2694 - DNA, 15 bp, Homo sapiens
atgagcaaactgagg

SEQ ID NO: 2695 - DNA, 15 bp, Homo sapiens
gatgagcaaactgag

SEQ ID NO: 2696 - DNA, 15 bp, Homo sapiens
ggatgagcaaactga

SEQ ID NO: 2697 - DNA, 15 bp, Homo sapiens
tggatgagcaaactg

SEQ ID NO: 2698 - DNA, 15 bp, Homo sapiens
ctggatgagcaaact

SEQ ID NO: 2699 - DNA, 15 bp, Homo sapiens
cctggatgagcaaac

SEQ ID NO: 2700 - DNA, 15 bp, Homo sapiens
tcctggatgagcaaa

SEQ ID NO: 2701 - DNA, 15 bp, Homo sapiens
ttcctggatgagcaa

SEQ ID NO: 2702 - DNA, 15 bp, Homo sapiens
tttcctggatgagca

SEQ ID NO: 2703 - DNA, 15 bp, Homo sapiens
ctttcctggatgagc

SEQ ID NO: 2704 - DNA, 15 bp, Homo sapiens
tctttcctggatgag

SEQ ID NO: 2705 - DNA, 15 bp, Homo sapiens
ctctttcctggatga

SEQ ID NO: 2706 - DNA, 15 bp, Homo sapiens
tctctttcctggatg

SEQ ID NO: 2707 - DNA, 15 bp, Homo sapiens
ttctctttcctggat

SEQ ID NO: 2708 - DNA, 15 bp, Homo sapiens
tttctctttcctgga

SEQ ID NO: 2709 - DNA, 15 bp, Homo sapiens
atttctctttcctgg

SEQ ID NO: 2710 - DNA, 15 bp, Homo sapiens
aatttctctttcctg

SEQ ID NO: 2711 - DNA, 15 bp, Homo sapiens
aaatttctctttcct

SEQ ID NO: 2712 - DNA, 15 bp, Homo sapiens
taaatttctctttcc

SEQ ID NO: 2713 - DNA, 15 bp, Homo sapiens
ttaaatttctctttc

SEQ ID NO: 2714 - DNA, 15 bp, Homo sapiens
tttaaatttctcttt

SEQ ID NO: 2715 - DNA, 15 bp, Homo sapiens
ttttaaatttctctt

SEQ ID NO: 2716 - DNA, 15 bp, Homo sapiens
gttttaaatttctct

SEQ ID NO: 2717 - DNA, 15 bp, Homo sapiens
ggttttaaatttctc

SEQ ID NO: 2718 - DNA, 15 bp, Homo sapiens
gggttttaaatttct

SEQ ID NO: 2719 - DNA, 15 bp, Homo sapiens
agggttttaaatttc

SEQ ID NO: 2720 - DNA, 15 bp, Homo sapiens
gagggttttaaattt

SEQ ID NO: 2721 - DNA, 15 bp, Homo sapiens
agagggttttaaatt

SEQ ID NO: 2722 - DNA, 15 bp, Homo sapiens
tagagggttttaaat

SEQ ID NO: 2723 - DNA, 15 bp, Homo sapiens
gtagagggttttaaa

SEQ ID NO: 2724 - DNA, 15 bp, Homo sapiens
agtagagggttttaa

SEQ ID NO: 2725 - DNA, 15 bp, Homo sapiens
aagtagagggtttta

SEQ ID NO: 2726 - DNA, 15 bp, Homo sapiens
gaagtagagggtttt

SEQ ID NO: 2727 - DNA, 15 bp, Homo sapiens
tgaagtagagggttt

SEQ ID NO: 2728 - DNA, 15 bp, Homo sapiens
gtgaagtagagggtt

SEQ ID NO: 2729 - DNA, 15 bp, Homo sapiens
tgtgaagtagagggt

SEQ ID NO: 2730 - DNA, 15 bp, Homo sapiens
ctgtgaagtagaggg

SEQ ID NO: 2731 - DNA, 15 bp, Homo sapiens
cctgtgaagtagagg

SEQ ID NO: 2732 - DNA, 15 bp, Homo sapiens
ccctgtgaagtagag

SEQ ID NO: 2733 - DNA, 15 bp, Homo sapiens
tccctgtgaagtaga

SEQ ID NO: 2734 - DNA, 15 bp, Homo sapiens
ttccctgtgaagtag

SEQ ID NO: 2735 - DNA, 15 bp, Homo sapiens
attccctgtgaagta

SEQ ID NO: 2736 - DNA, 15 bp, Homo sapiens
cattccctgtgaagt

SEQ ID NO: 2737 - DNA, 15 bp, Homo sapiens
acattccctgtgaag

SEQ ID NO: 2738 - DNA, 15 bp, Homo sapiens
aacattccctgtgaa

SEQ ID NO: 2739 - DNA, 15 bp, Homo sapiens
caacattccctgtga

SEQ ID NO: 2740 - DNA, 15 bp, Homo sapiens
acaacattccctgtg

SEQ ID NO: 2741 - DNA, 15 bp, Homo sapiens
gacaacattccctgt

SEQ ID NO: 2742 - DNA, 15 bp, Homo sapiens
cgacaacattccctg

SEQ ID NO: 2743 - DNA, 15 bp, Homo sapiens
ccgacaacattccct

SEQ ID NO: 2744 - DNA, 15 bp, Homo sapiens
tccgacaacattccc

SEQ ID NO: 2745 - DNA, 15 bp, Homo sapiens
ttccgacaacattcc

SEQ ID NO: 2746 - DNA, 15 bp, Homo sapiens
attccgacaacattc

SEQ ID NO: 2747 - DNA, 15 bp, Homo sapiens
aattccgacaacatt

SEQ ID NO: 2748 - DNA, 15 bp, Homo sapiens
taattccgacaacat

SEQ ID NO: 2749 - DNA, 15 bp, Homo sapiens
ttaattccgacaaca

SEQ ID NO: 2750 - DNA, 15 bp, Homo sapiens
tttaattccgacaac

SEQ ID NO: 2751 - DNA, 15 bp, Homo sapiens
gtttaattccgacaa

SEQ ID NO: 2752 - DNA, 15 bp, Homo sapiens
ggtttaattccgaca

SEQ ID NO: 2753 - DNA, 15 bp, Homo sapiens
tggtttaattccgac

SEQ ID NO: 2754 - DNA, 15 bp, Homo sapiens
ctggtttaattccga

SEQ ID NO: 2755 - DNA, 15 bp, Homo sapiens
tctggtttaattccg

SEQ ID NO: 2756 - DNA, 15 bp, Homo sapiens
gtctggtttaattcc

SEQ ID NO: 2757 - DNA, 15 bp, Homo sapiens
ggtctggtttaattc

SEQ ID NO: 2758 - DNA, 15 bp, Homo sapiens
aggtctggtttaatt

SEQ ID NO: 2759 - DNA, 15 bp, Homo sapiens
aaggtctggtttaat

SEQ ID NO: 2760 - DNA, 15 bp, Homo sapiens
caaggtctggtttaa

SEQ ID NO: 2761 - DNA, 15 bp, Homo sapiens
gcaaggtctggttta

SEQ ID NO: 2762 - DNA, 15 bp, Homo sapiens
tgcaaggtctggttt

SEQ ID NO: 2763 - DNA, 15 bp, Homo sapiens
atgcaaggtctggtt

SEQ ID NO: 2764 - DNA, 15 bp, Homo sapiens
catgcaaggtctggt

SEQ ID NO: 2765 - DNA, 15 bp, Homo sapiens
tcatgcaaggtctgg

SEQ ID NO: 2766 - DNA, 15 bp, Homo sapiens
ttcatgcaaggtctg

SEQ ID NO: 2767 - DNA, 15 bp, Homo sapiens
tttcatgcaaggtct

SEQ ID NO: 2768 - DNA, 15 bp, Homo sapiens
ttttcatgcaaggtc

SEQ ID NO: 2769 - DNA, 15 bp, Homo sapiens
attttcatgcaaggt

SEQ ID NO: 2770 - DNA, 15 bp, Homo sapiens
tattttcatgcaagg

SEQ ID NO: 2771 - DNA, 15 bp, Homo sapiens
atattttcatgcaag

SEQ ID NO: 2772 - DNA, 15 bp, Homo sapiens
tatattttcatgcaa

SEQ ID NO: 2773 - DNA, 15 bp, Homo sapiens
ctatattttcatgca

SEQ ID NO: 2774 - DNA, 15 bp, Homo sapiens
actatattttcatgc

SEQ ID NO: 2775 - DNA, 15 bp, Homo sapiens
tactatattttcatg

SEQ ID NO: 2776 - DNA, 15 bp, Homo sapiens
gtactatattttcat

SEQ ID NO: 2777 - DNA, 15 bp, Homo sapiens
agtactatattttca

SEQ ID NO: 2778 - DNA, 15 bp, Homo sapiens
gagtactatattttc

SEQ ID NO: 2779 - DNA, 15 bp, Homo sapiens
tgagtactatatttt

SEQ ID NO: 2780 - DNA, 15 bp, Homo sapiens
ctgagtactatattt

SEQ ID NO: 2781 - DNA, 15 bp, Homo sapiens
actgagtactatatt

SEQ ID NO: 2782 - DNA, 15 bp, Homo sapiens
cactgagtactatat

SEQ ID NO: 2783 - DNA, 15 bp, Homo sapiens
tcactgagtactata

SEQ ID NO: 2784 - DNA, 15 bp, Homo sapiens
ttcactgagtactat

SEQ ID NO: 2785 - DNA, 15 bp, Homo sapiens
cttcactgagtacta

SEQ ID NO: 2786 - DNA, 15 bp, Homo sapiens
acttcactgagtact

SEQ ID NO: 2787 - DNA, 15 bp, Homo sapiens
cacttcactgagtac

SEQ ID NO: 2788 - DNA, 15 bp, Homo sapiens
gcacttcactgagta

SEQ ID NO: 2789 - DNA, 15 bp, Homo sapiens
ggcacttcactgagt

SEQ ID NO: 2790 - DNA, 15 bp, Homo sapiens
aggcacttcactgag

SEQ ID NO: 2791 - DNA, 15 bp, Homo sapiens
caggcacttcactga

SEQ ID NO: 2792 - DNA, 15 bp, Homo sapiens
ccaggcacttcactg

SEQ ID NO: 2793 - DNA, 15 bp, Homo sapiens
gccaggcacttcact

SEQ ID NO: 2794 - DNA, 15 bp, Homo sapiens
cgccaggcacttcac

SEQ ID NO: 2795 - DNA, 15 bp, Homo sapiens
tcgccaggcacttca

SEQ ID NO: 2796 - DNA, 15 bp, Homo sapiens
ttcgccaggcacttc

SEQ ID NO: 2797 - DNA, 15 bp, Homo sapiens
cttcgccaggcactt

SEQ ID NO: 2798 - DNA, 15 bp, Homo sapiens
tcttcgccaggcact

SEQ ID NO: 2799 - DNA, 15 bp, Homo sapiens
ctcttcgccaggcac

SEQ ID NO: 2800 - DNA, 15 bp, Homo sapiens
gctcttcgccaggca

SEQ ID NO: 2801 - DNA, 15 bp, Homo sapiens
tgctcttcgccaggc

SEQ ID NO: 2802 - DNA, 15 bp, Homo sapiens
ctgctcttcgccagg

SEQ ID NO: 2803 - DNA, 15 bp, Homo sapiens
cctgctcttcgccag

SEQ ID NO: 2804 - DNA, 15 bp, Homo sapiens
ccctgctcttcgcca

SEQ ID NO: 2805 - DNA, 15 bp, Homo sapiens
cccctgctcttcgcc

SEQ ID NO: 2806 - DNA, 15 bp, Homo sapiens
gcccctgctcttcgc

SEQ ID NO: 2807 - DNA, 15 bp, Homo sapiens
agcccctgctcttcg

SEQ ID NO: 2808 - DNA, 15 bp, Homo sapiens
gagcccctgctcttc

SEQ ID NO: 2809 - DNA, 15 bp, Homo sapiens
tgagcccctgctctt

SEQ ID NO: 2810 - DNA, 15 bp, Homo sapiens
ctgagcccctgctct

SEQ ID NO: 2811 - DNA, 15 bp, Homo sapiens
gctgagcccctgctc

SEQ ID NO: 2812 - DNA, 15 bp, Homo sapiens
ggctgagcccctgct

SEQ ID NO: 2813 - DNA, 15 bp, Homo sapiens
tggctgagcccctgc

SEQ ID NO: 2814 - DNA, 15 bp, Homo sapiens
ctggctgagcccctg

SEQ ID NO: 2815 - DNA, 15 bp, Homo sapiens
cctggctgagcccct

SEQ ID NO: 2816 - DNA, 15 bp, Homo sapiens
acctggctgagcccc

SEQ ID NO: 2817 - DNA, 15 bp, Homo sapiens
gacctggctgagccc

SEQ ID NO: 2818 - DNA, 15 bp, Homo sapiens
agacctggctgagcc

SEQ ID NO: 2819 - DNA, 15 bp, Homo sapiens
gagacctggctgagc

SEQ ID NO: 2820 - DNA, 15 bp, Homo sapiens
tgagacctggctgag

SEQ ID NO: 2821 - DNA, 15 bp, Homo sapiens
atgagacctggctga

SEQ ID NO: 2822 - DNA, 15 bp, Homo sapiens
tatgagacctggctg

SEQ ID NO: 2823 - DNA, 15 bp, Homo sapiens
gtatgagacctggct

SEQ ID NO: 2824 - DNA, 15 bp, Homo sapiens
tgtatgagacctggc

SEQ ID NO: 2825 - DNA, 15 bp, Homo sapiens
ttgtatgagacctgg

SEQ ID NO: 2826 - DNA, 15 bp, Homo sapiens
gttgtatgagacctg

SEQ ID NO: 2827 - DNA, 15 bp, Homo sapiens
tgttgtatgagacct

SEQ ID NO: 2828 - DNA, 15 bp, Homo sapiens
ttgttgtatgagacc

SEQ ID NO: 2829 - DNA, 15 bp, Homo sapiens
tttgttgtatgagac

SEQ ID NO: 2830 - DNA, 15 bp, Homo sapiens
atttgttgtatgaga

SEQ ID NO: 2831 - DNA, 15 bp, Homo sapiens
gatttgttgtatgag

SEQ ID NO: 2832 - DNA, 15 bp, Homo sapiens
ggatttgttgtatga

SEQ ID NO: 2833 - DNA, 15 bp, Homo sapiens
aggatttgttgtatg

SEQ ID NO: 2834 - DNA, 15 bp, Homo sapiens
gaggatttgttgtat

SEQ ID NO: 2835 - DNA, 15 bp, Homo sapiens
agaggatttgttgta

SEQ ID NO: 2836 - DNA, 15 bp, Homo sapiens
cagaggatttgttgt

SEQ ID NO: 2837 - DNA, 15 bp, Homo sapiens
acagaggatttgttg

SEQ ID NO: 2838 - DNA, 15 bp, Homo sapiens
tacagaggatttgtt

SEQ ID NO: 2839 - DNA, 15 bp, Homo sapiens
gtacagaggatttgt

SEQ ID NO: 2840 - DNA, 15 bp, Homo sapiens
agtacagaggatttg

SEQ ID NO: 2841 - DNA, 15 bp, Homo sapiens
gagtacagaggattt

SEQ ID NO: 2842 - DNA, 15 bp, Homo sapiens
ggagtacagaggatt

SEQ ID NO: 2843 - DNA, 15 bp, Homo sapiens
tggagtacagaggat

SEQ ID NO: 2844 - DNA, 15 bp, Homo sapiens
atggagtacagagga

SEQ ID NO: 2845 - DNA, 15 bp, Homo sapiens
gatggagtacagagg

SEQ ID NO: 2846 - DNA, 15 bp, Homo sapiens
ggatggagtacagag

SEQ ID NO: 2847 - DNA, 15 bp, Homo sapiens
gggatggagtacaga

SEQ ID NO: 2848 - DNA, 15 bp, Homo sapiens
tgggatggagtacag

SEQ ID NO: 2849 - DNA, 15 bp, Homo sapiens
gtgggatggagtaca

SEQ ID NO: 2850 - DNA, 15 bp, Homo sapiens
tgtgggatggagtac

SEQ ID NO: 2851 - DNA, 15 bp, Homo sapiens
ttgtgggatggagta

SEQ ID NO: 2852 - DNA, 15 bp, Homo sapiens
cttgtgggatggagt

SEQ ID NO: 2853 - DNA, 15 bp, Homo sapiens
gcttgtgggatggag

SEQ ID NO: 2854 - DNA, 15 bp, Homo sapiens
ggcttgtgggatgga

SEQ ID NO: 2855 - DNA, 15 bp, Homo sapiens
gggcttgtgggatgg

SEQ ID NO: 2856 - DNA, 15 bp, Homo sapiens
agggcttgtgggatg

SEQ ID NO: 2857 - DNA, 15 bp, Homo sapiens
cagggcttgtgggat

SEQ ID NO: 2858 - DNA, 15 bp, Homo sapiens
acagggcttgtggga

SEQ ID NO: 2859 - DNA, 15 bp, Homo sapiens
cacagggcttgtggg

SEQ ID NO: 2860 - DNA, 15 bp, Homo sapiens
tcacagggcttgtgg

SEQ ID NO: 2861 - DNA, 15 bp, Homo sapiens
gtcacagggcttgtg

SEQ ID NO: 2862 - DNA, 15 bp, Homo sapiens
tgtcacagggcttgt

SEQ ID NO: 2863 - DNA, 15 bp, Homo sapiens
atgtcacagggcttg

SEQ ID NO: 2864 - DNA, 15 bp, Homo sapiens
gatgtcacagggctt

SEQ ID NO: 2865 - DNA, 15 bp, Homo sapiens
agatgtcacagggct

SEQ ID NO: 2866 - DNA, 15 bp, Homo sapiens
aagatgtcacagggc

SEQ ID NO: 2867 - DNA, 15 bp, Homo sapiens
taagatgtcacaggg

SEQ ID NO: 2868 - DNA, 15 bp, Homo sapiens
ctaagatgtcacagg

SEQ ID NO: 2869 - DNA, 15 bp, Homo sapiens
cctaagatgtcacag

SEQ ID NO: 2870 - DNA, 15 bp, Homo sapiens
tcctaagatgtcaca

SEQ ID NO: 2871 - DNA, 15 bp, Homo sapiens
gtcctaagatgtcac

SEQ ID NO: 2872 - DNA, 15 bp, Homo sapiens
ggtcctaagatgtca

SEQ ID NO: 2873 - DNA, 15 bp, Homo sapiens
tggtcctaagatgtc

SEQ ID NO: 2874 - DNA, 15 bp, Homo sapiens
gtggtcctaagatgt

SEQ ID NO: 2875 - DNA, 15 bp, Homo sapiens
agtggtcctaagatg

SEQ ID NO: 2876 - DNA, 15 bp, Homo sapiens
gagtggtcctaagat

SEQ ID NO: 2877 - DNA, 15 bp, Homo sapiens
agagtggtcctaaga

SEQ ID NO: 2878 - DNA, 15 bp, Homo sapiens
cagagtggtcctaag

SEQ ID NO: 2879 - DNA, 15 bp, Homo sapiens
gcagagtggtcctaa

SEQ ID NO: 2880 - DNA, 15 bp, Homo sapiens
tgcagagtggtccta

SEQ ID NO: 2881 - DNA, 15 bp, Homo sapiens
atgcagagtggtcct

SEQ ID NO: 2882 - DNA, 15 bp, Homo sapiens
gatgcagagtggtcc

SEQ ID NO: 2883 - DNA, 15 bp, Homo sapiens
agatgcagagtggtc

SEQ ID NO: 2884 - DNA, 15 bp, Homo sapiens
gagatgcagagtggt

SEQ ID NO: 2885 - DNA, 15 bp, Homo sapiens
agagatgcagagtgg

SEQ ID NO: 2886 - DNA, 15 bp, Homo sapiens
aagagatgcagagtg

SEQ ID NO: 2887 - DNA, 15 bp, Homo sapiens
aaagagatgcagagt

SEQ ID NO: 2888 - DNA, 15 bp, Homo sapiens
gaaagagatgcagag

SEQ ID NO: 2889 - DNA, 15 bp, Homo sapiens
ggaaagagatgcaga

SEQ ID NO: 2890 - DNA, 15 bp, Homo sapiens
gggaaagagatgcag

SEQ ID NO: 2891 - DNA, 15 bp, Homo sapiens
agggaaagagatgca

SEQ ID NO: 2892 - DNA, 15 bp, Homo sapiens
cagggaaagagatgc

SEQ ID NO: 2893 - DNA, 15 bp, Homo sapiens
gcagggaaagagatg

SEQ ID NO: 2894 - DNA, 15 bp, Homo sapiens
agcagggaaagagat

SEQ ID NO: 2895 - DNA, 15 bp, Homo sapiens
cagcagggaaagaga

SEQ ID NO: 2896 - DNA, 15 bp, Homo sapiens
ccagcagggaaagag

SEQ ID NO: 2897 - DNA, 15 bp, Homo sapiens
tccagcagggaaaga

SEQ ID NO: 2898 - DNA, 15 bp, Homo sapiens
ttccagcagggaaag

SEQ ID NO: 2899 - DNA, 15 bp, Homo sapiens
gttccagcagggaaa

SEQ ID NO: 2900 - DNA, 15 bp, Homo sapiens
ggttccagcagggaa

SEQ ID NO: 2901 - DNA, 15 bp, Homo sapiens
aggttccagcaggga

SEQ ID NO: 2902 - DNA, 15 bp, Homo sapiens
taggttccagcaggg

SEQ ID NO: 2903 - DNA, 15 bp, Homo sapiens
ctaggttccagcagg

SEQ ID NO: 2904 - DNA, 15 bp, Homo sapiens
gctaggttccagcag

SEQ ID NO: 2905 - DNA, 15 bp, Homo sapiens
tgctaggttccagca

SEQ ID NO: 2906 - DNA, 15 bp, Homo sapiens
gtgctaggttccagc

SEQ ID NO: 2907 - DNA, 15 bp, Homo sapiens
agtgctaggttccag

SEQ ID NO: 2908 - DNA, 15 bp, Homo sapiens
cagtgctaggttcca

SEQ ID NO: 2909 - DNA, 15 bp, Homo sapiens
acagtgctaggttcc

SEQ ID NO: 2910 - DNA, 15 bp, Homo sapiens
cacagtgctaggttc

SEQ ID NO: 2911 - DNA, 15 bp, Homo sapiens
gcacagtgctaggtt

SEQ ID NO: 2912 - DNA, 15 bp, Homo sapiens
ggcacagtgctaggt

SEQ ID NO: 2913 - DNA, 15 bp, Homo sapiens
gggcacagtgctagg

SEQ ID NO: 2914 - DNA, 15 bp, Homo sapiens
tgggcacagtgctag

SEQ ID NO: 2915 - DNA, 15 bp, Homo sapiens
ctgggcacagtgcta

SEQ ID NO: 2916 - DNA, 15 bp, Homo sapiens
gctgggcacagtgct

SEQ ID NO: 2917 - DNA, 15 bp, Homo sapiens
tgctgggcacagtgc

SEQ ID NO: 2918 - DNA, 15 bp, Homo sapiens
gtgctgggcacagtg

SEQ ID NO: 2919 - DNA, 15 bp, Homo sapiens
tgtgctgggcacagt

SEQ ID NO: 2920 - DNA, 15 bp, Homo sapiens
gtgtgctgggcacag

SEQ ID NO: 2921 - DNA, 15 bp, Homo sapiens
tgtgtgctgggcaca

SEQ ID NO: 2922 - DNA, 15 bp, Homo sapiens
ctgtgtgctgggcac

SEQ ID NO: 2923 - DNA, 15 bp, Homo sapiens
actgtgtgctgggca

SEQ ID NO: 2924 - DNA, 15 bp, Homo sapiens
tactgtgtgctgggc

SEQ ID NO: 2925 - DNA, 15 bp, Homo sapiens
ctactgtgtgctggg

SEQ ID NO: 2926 - DNA, 15 bp, Homo sapiens
cctactgtgtgctgg

SEQ ID NO: 2927 - DNA, 15 bp, Homo sapiens
gcctactgtgtgctg

SEQ ID NO: 2928 - DNA, 15 bp, Homo sapiens
tgcctactgtgtgct

SEQ ID NO: 2929 - DNA, 15 bp, Homo sapiens
ctgcctactgtgtgc

SEQ ID NO: 2930 - DNA, 15 bp, Homo sapiens
actgcctactgtgtg

SEQ ID NO: 2931 - DNA, 15 bp, Homo sapiens
gactgcctactgtgt

SEQ ID NO: 2932 - DNA, 15 bp, Homo sapiens
tgactgcctactgtg

SEQ ID NO: 2933 - DNA, 15 bp, Homo sapiens
ttgactgcctactgt

SEQ ID NO: 2934 - DNA, 15 bp, Homo sapiens
attgactgcctactg

SEQ ID NO: 2935 - DNA, 15 bp, Homo sapiens
tattgactgcctact

SEQ ID NO: 2936 - DNA, 15 bp, Homo sapiens
ttattgactgcctac

SEQ ID NO: 2937 - DNA, 15 bp, Homo sapiens
tttattgactgccta

SEQ ID NO: 2938 - DNA, 15 bp, Homo sapiens
atttattgactgcct

SEQ ID NO: 2939 - DNA, 15 bp, Homo sapiens
catttattgactgcc

SEQ ID NO: 2940 - DNA, 15 bp, Homo sapiens
gcatttattgactgc

SEQ ID NO: 2941 - DNA, 15 bp, Homo sapiens
agcatttattgactg

SEQ ID NO: 2942 - DNA, 15 bp, Homo sapiens
aagcatttattgact

SEQ ID NO: 2943 - DNA, 15 bp, Homo sapiens
caagcatttattgac

SEQ ID NO: 2944 - DNA, 15 bp, Homo sapiens
acaagcatttattga

SEQ ID NO: 2945 - DNA, 15 bp, Homo sapiens
gacaagcatttattg

SEQ ID NO: 2946 - DNA, 15 bp, Homo sapiens
cgacaagcatttatt

SEQ ID NO: 2947 - DNA, 15 bp, Homo sapiens
tcgacaagcatttat

SEQ ID NO: 2948 - DNA, 15 bp, Homo sapiens
atcgacaagcattta

SEQ ID NO: 2949 - DNA, 15 bp, Homo sapiens
catcgacaagcattt

SEQ ID NO: 2950 - DNA, 15 bp, Homo sapiens
tcatcgacaagcatt

SEQ ID NO: 2951 - DNA, 15 bp, Homo sapiens
ttcatcgacaagcat

SEQ ID NO: 2952 - DNA, 15 bp, Homo sapiens
attcatcgacaagca

SEQ ID NO: 2953 - DNA, 15 bp, Homo sapiens
gattcatcgacaagc

SEQ ID NO: 2954 - DNA, 15 bp, Homo sapiens
tgattcatcgacaag

SEQ ID NO: 2955 - DNA, 15 bp, Homo sapiens
atgattcatcgacaa

SEQ ID NO: 2956 - DNA, 15 bp, Homo sapiens
gatgattcatcgaca

SEQ ID NO: 2957 - DNA, 15 bp, Homo sapiens
agatgattcatcgac

SEQ ID NO: 2958 - DNA, 15 bp, Homo sapiens
gagatgattcatcga

SEQ ID NO: 2959 - DNA, 15 bp, Homo sapiens
agagatgattcatcg

SEQ ID NO: 2960 - DNA, 15 bp, Homo sapiens
tagagatgattcatc

SEQ ID NO: 2961 - DNA, 15 bp, Homo sapiens
ttagagatgattcat

SEQ ID NO: 2962 - DNA, 15 bp, Homo sapiens
cttagagatgattca

SEQ ID NO: 2963 - DNA, 15 bp, Homo sapiens
gcttagagatgattc

SEQ ID NO: 2964 - DNA, 15 bp, Homo sapiens
agcttagagatgatt

SEQ ID NO: 2965 - DNA, 15 bp, Homo sapiens
aagcttagagatgat

SEQ ID NO: 2966 - DNA, 15 bp, Homo sapiens
aaagcttagagatga

SEQ ID NO: 2967 - DNA, 15 bp, Homo sapiens
taaagcttagagatg

SEQ ID NO: 2968 - DNA, 15 bp, Homo sapiens
ctaaagcttagagat

SEQ ID NO: 2969 - DNA, 15 bp, Homo sapiens
tctaaagcttagaga

SEQ ID NO: 2970 - DNA, 15 bp, Homo sapiens
ctctaaagcttagag

SEQ ID NO: 2971 - DNA, 15 bp, Homo sapiens
actctaaagcttaga

SEQ ID NO: 2972 - DNA, 15 bp, Homo sapiens
aactctaaagcttag

SEQ ID NO: 2973 - DNA, 15 bp, Homo sapiens
taactctaaagctta

SEQ ID NO: 2974 - DNA, 15 bp, Homo sapiens
gtaactctaaagctt

SEQ ID NO: 2975 - DNA, 15 bp, Homo sapiens
ggtaactctaaagct

SEQ ID NO: 2976 - DNA, 15 bp, Homo sapiens
tggtaactctaaagc

SEQ ID NO: 2977 - DNA, 15 bp, Homo sapiens
ttggtaactctaaag

SEQ ID NO: 2978 - DNA, 15 bp, Homo sapiens
tttggtaactctaaa

SEQ ID NO: 2979 - DNA, 15 bp, Homo sapiens
atttggtaactctaa

SEQ ID NO: 2980 - DNA, 15 bp, Homo sapiens
catttggtaactcta

SEQ ID NO: 2981 - DNA, 15 bp, Homo sapiens
gcatttggtaactct

SEQ ID NO: 2982 - DNA, 15 bp, Homo sapiens
ggcatttggtaactc

SEQ ID NO: 2983 - DNA, 15 bp, Homo sapiens
aggcatttggtaact

SEQ ID NO: 2984 - DNA, 15 bp, Homo sapiens
caggcatttggtaac

SEQ ID NO: 2985 - DNA, 15 bp, Homo sapiens
ccaggcatttggtaa

SEQ ID NO: 2986 - DNA, 15 bp, Homo sapiens
accaggcatttggta

SEQ ID NO: 2987 - DNA, 15 bp, Homo sapiens
gaccaggcatttggt

SEQ ID NO: 2988 - DNA, 15 bp, Homo sapiens
ggaccaggcatttgg

SEQ ID NO: 2989 - DNA, 15 bp, Homo sapiens
tggaccaggcatttg

SEQ ID NO: 2990 - DNA, 15 bp, Homo sapiens
ctggaccaggcattt

SEQ ID NO: 2991 - DNA, 15 bp, Homo sapiens
gctggaccaggcatt

SEQ ID NO: 2992 - DNA, 15 bp, Homo sapiens
tgctggaccaggcat

SEQ ID NO: 2993 - DNA, 15 bp, Homo sapiens
ttgctggaccaggca

SEQ ID NO: 2994 - DNA, 15 bp, Homo sapiens
gttgctggaccaggc

SEQ ID NO: 2995 - DNA, 15 bp, Homo sapiens
ggttgctggaccagg

SEQ ID NO: 2996 - DNA, 15 bp, Homo sapiens
gggttgctggaccag

SEQ ID NO: 2997 - DNA, 15 bp, Homo sapiens
tgggttgctggacca

SEQ ID NO: 2998 - DNA, 15 bp, Homo sapiens
ctgggttgctggacc

SEQ ID NO: 2999 - DNA, 15 bp, Homo sapiens
cctgggttgctggac

SEQ ID NO: 3000 - DNA, 15 bp, Homo sapiens
ccctgggttgctgga

SEQ ID NO: 3001 - DNA, 15 bp, Homo sapiens
tccctgggttgctgg

SEQ ID NO: 3002 - DNA, 15 bp, Homo sapiens
ttccctgggttgctg

SEQ ID NO: 3003 - DNA, 15 bp, Homo sapiens
tttccctgggttgct

SEQ ID NO: 3004 - DNA, 15 bp, Homo sapiens
ctttccctgggttgc

SEQ ID NO: 3005 - DNA, 15 bp, Homo sapiens
gctttccctgggttg

SEQ ID NO: 3006 - DNA, 15 bp, Homo sapiens
tgctttccctgggtt

SEQ ID NO: 3007 - DNA, 15 bp, Homo sapiens
ctgctttccctgggt

SEQ ID NO: 3008 - DNA, 15 bp, Homo sapiens
gctgctttccctggg

SEQ ID NO: 3009 - DNA, 15 bp, Homo sapiens
ggctgctttccctgg

SEQ ID NO: 3010 - DNA, 15 bp, Homo sapiens
tggctgctttccctg

SEQ ID NO: 3011 - DNA, 15 bp, Homo sapiens
atggctgctttccct

SEQ ID NO: 3012 - DNA, 15 bp, Homo sapiens
aatggctgctttccc

SEQ ID NO: 3013 - DNA, 15 bp, Homo sapiens
aaatggctgctttcc

SEQ ID NO: 3014 - DNA, 15 bp, Homo sapiens
caaatggctgctttc

SEQ ID NO: 3015 - DNA, 15 bp, Homo sapiens
ccaaatggctgcttt

SEQ ID NO: 3016 - DNA, 15 bp, Homo sapiens
cccaaatggctgctt

SEQ ID NO: 3017 - DNA, 15 bp, Homo sapiens
acccaaatggctgct

SEQ ID NO: 3018 - DNA, 15 bp, Homo sapiens
aacccaaatggctgc

SEQ ID NO: 3019 - DNA, 15 bp, Homo sapiens
aaacccaaatggctg

SEQ ID NO: 3020 - DNA, 15 bp, Homo sapiens
gaaacccaaatggct

SEQ ID NO: 3021 - DNA, 15 bp, Homo sapiens
agaaacccaaatggc

SEQ ID NO: 3022 - DNA, 15 bp, Homo sapiens
cagaaacccaaatgg

SEQ ID NO: 3023 - DNA, 15 bp, Homo sapiens
tcagaaacccaaatg

SEQ ID NO: 3024 - DNA, 15 bp, Homo sapiens
ttcagaaacccaaat

SEQ ID NO: 3025 - DNA, 15 bp, Homo sapiens
gttcagaaacccaaa

SEQ ID NO: 3026 - DNA, 15 bp, Homo sapiens
agttcagaaacccaa

SEQ ID NO: 3027 - DNA, 15 bp, Homo sapiens
gagttcagaaaccca

SEQ ID NO: 3028 - DNA, 15 bp, Homo sapiens
agagttcagaaaccc

SEQ ID NO: 3029 - DNA, 15 bp, Homo sapiens
tagagttcagaaacc

SEQ ID NO: 3030 - DNA, 15 bp, Homo sapiens
atagagttcagaaac

SEQ ID NO: 3031 - DNA, 15 bp, Homo sapiens
gatagagttcagaaa

SEQ ID NO: 3032 - DNA, 15 bp, Homo sapiens
ggatagagttcagaa

SEQ ID NO: 3033 - DNA, 15 bp, Homo sapiens
aggatagagttcaga

SEQ ID NO: 3034 - DNA, 15 bp, Homo sapiens
caggatagagttcag

SEQ ID NO: 3035 - DNA, 15 bp, Homo sapiens
tcaggatagagttca

SEQ ID NO: 3036 - DNA, 15 bp, Homo sapiens
atcaggatagagttc

SEQ ID NO: 3037 - DNA, 15 bp, Homo sapiens
catcaggatagagtt

SEQ ID NO: 3038 - DNA, 15 bp, Homo sapiens
ccatcaggatagagt

SEQ ID NO: 3039 - DNA, 15 bp, Homo sapiens
gccatcaggatagag

SEQ ID NO: 3040 - DNA, 15 bp, Homo sapiens
agccatcaggataga

SEQ ID NO: 3041 - DNA, 15 bp, Homo sapiens
tagccatcaggatag

SEQ ID NO: 3042 - DNA, 15 bp, Homo sapiens
gtagccatcaggata

SEQ ID NO: 3043 - DNA, 15 bp, Homo sapiens
ggtagccatcaggat

SEQ ID NO: 3044 - DNA, 15 bp, Homo sapiens
tggtagccatcagga

SEQ ID NO: 3045 - DNA, 15 bp, Homo sapiens
gtggtagccatcagg

SEQ ID NO: 3046 - DNA, 15 bp, Homo sapiens
cgtggtagccatcag

SEQ ID NO: 3047 - DNA, 15 bp, Homo sapiens
ccgtggtagccatca

SEQ ID NO: 3048 - DNA, 15 bp, Homo sapiens
tccgtggtagccatc

SEQ ID NO: 3049 - DNA, 15 bp, Homo sapiens
gtccgtggtagccat

SEQ ID NO: 3050 - DNA, 15 bp, Homo sapiens
agtccgtggtagcca

SEQ ID NO: 3051 - DNA, 15 bp, Homo sapiens
aagtccgtggtagcc

SEQ ID NO: 3052 - DNA, 15 bp, Homo sapiens
gaagtccgtggtagc

SEQ ID NO: 3053 - DNA, 15 bp, Homo sapiens
agaagtccgtggtag

SEQ ID NO: 3054 - DNA, 15 bp, Homo sapiens
gagaagtccgtggta

SEQ ID NO: 3055 - DNA, 15 bp, Homo sapiens
ggagaagtccgtggt

SEQ ID NO: 3056 - DNA, 15 bp, Homo sapiens
gggagaagtccgtgg

SEQ ID NO: 3057 - DNA, 15 bp, Homo sapiens
tgggagaagtccgtg

SEQ ID NO: 3058 - DNA, 15 bp, Homo sapiens
atgggagaagtccgt

SEQ ID NO: 3059 - DNA, 15 bp, Homo sapiens
catgggagaagtccg

SEQ ID NO: 3060 - DNA, 15 bp, Homo sapiens
gcatgggagaagtcc

SEQ ID NO: 3061 - DNA, 15 bp, Homo sapiens
ggcatgggagaagtc

SEQ ID NO: 3062 - DNA, 15 bp, Homo sapiens
gggcatgggagaagt

SEQ ID NO: 3063 - DNA, 15 bp, Homo sapiens
agggcatgggagaag

SEQ ID NO: 3064 - DNA, 15 bp, Homo sapiens
gagggcatgggagaa

SEQ ID NO: 3065 - DNA, 15 bp, Homo sapiens
tgagggcatgggaga

SEQ ID NO: 3066 - DNA, 15 bp, Homo sapiens
gtgagggcatgggag

SEQ ID NO: 3067 - DNA, 15 bp, Homo sapiens
ggtgagggcatggga

SEQ ID NO: 3068 - DNA, 15 bp, Homo sapiens
aggtgagggcatggg

SEQ ID NO: 3069 - DNA, 15 bp, Homo sapiens
caggtgagggcatgg

SEQ ID NO: 3070 - DNA, 15 bp, Homo sapiens
tcaggtgagggcatg

SEQ ID NO: 3071 - DNA, 15 bp, Homo sapiens
atcaggtgagggcat

SEQ ID NO: 3072 - DNA, 15 bp, Homo sapiens
catcaggtgagggca

SEQ ID NO: 3073 - DNA, 15 bp, Homo sapiens
acatcaggtgagggc

SEQ ID NO: 3074 - DNA, 15 bp, Homo sapiens
cacatcaggtgaggg

SEQ ID NO: 3075 - DNA, 15 bp, Homo sapiens
ccacatcaggtgagg

SEQ ID NO: 3076 - DNA, 15 bp, Homo sapiens
gccacatcaggtgag

SEQ ID NO: 3077 - DNA, 15 bp, Homo sapiens
agccacatcaggtga

SEQ ID NO: 3078 - DNA, 15 bp, Homo sapiens
cagccacatcaggtg

SEQ ID NO: 3079 - DNA, 15 bp, Homo sapiens
acagccacatcaggt

SEQ ID NO: 3080 - DNA, 15 bp, Homo sapiens
cacagccacatcagg

SEQ ID NO: 3081 - DNA, 15 bp, Homo sapiens
gcacagccacatcag

SEQ ID NO: 3082 - DNA, 15 bp, Homo sapiens
agcacagccacatca

SEQ ID NO: 3083 - DNA, 15 bp, Homo sapiens
gagcacagccacatc

SEQ ID NO: 3084 - DNA, 15 bp, Homo sapiens
tgagcacagccacat

SEQ ID NO: 3085 - DNA, 15 bp, Homo sapiens
ctgagcacagccaca

SEQ ID NO: 3086 - DNA, 15 bp, Homo sapiens
actgagcacagccac

SEQ ID NO: 3087 - DNA, 15 bp, Homo sapiens
cactgagcacagcca

SEQ ID NO: 3088 - DNA, 15 bp, Homo sapiens
gcactgagcacagcc

SEQ ID NO: 3089 - DNA, 15 bp, Homo sapiens
tgcactgagcacagc

SEQ ID NO: 3090 - DNA, 15 bp, Homo sapiens
gtgcactgagcacag

SEQ ID NO: 3091 - DNA, 15 bp, Homo sapiens
tgtgcactgagcaca

SEQ ID NO: 3092 - DNA, 15 bp, Homo sapiens
ctgtgcactgagcac

SEQ ID NO: 3093 - DNA, 15 bp, Homo sapiens
tctgtgcactgagca

SEQ ID NO: 3094 - DNA, 15 bp, Homo sapiens
ctctgtgcactgagc

SEQ ID NO: 3095 - DNA, 15 bp, Homo sapiens
cctctgtgcactgag

SEQ ID NO: 3096 - DNA, 15 bp, Homo sapiens
ccctctgtgcactga

SEQ ID NO: 3097 - DNA, 15 bp, Homo sapiens
gccctctgtgcactg

SEQ ID NO: 3098 - DNA, 15 bp, Homo sapiens
ggccctctgtgcact

SEQ ID NO: 3099 - DNA, 15 bp, Homo sapiens
aggccctctgtgcac

SEQ ID NO: 3100 - DNA, 15 bp, Homo sapiens
taggccctctgtgca

SEQ ID NO: 3101 - DNA, 15 bp, Homo sapiens
gtaggccctctgtgc

SEQ ID NO: 3102 - DNA, 15 bp, Homo sapiens
tgtaggccctctgtg

SEQ ID NO: 3103 - DNA, 15 bp, Homo sapiens
ctgtaggccctctgt

SEQ ID NO: 3104 - DNA, 15 bp, Homo sapiens
gctgtaggccctctg

SEQ ID NO: 3105 - DNA, 15 bp, Homo sapiens
ggctgtaggccctct

SEQ ID NO: 3106 - DNA, 15 bp, Homo sapiens
tggctgtaggccctc

SEQ ID NO: 3107 - DNA, 15 bp, Homo sapiens
ttggctgtaggccct

SEQ ID NO: 3108 - DNA, 15 bp, Homo sapiens
gttggctgtaggccc

SEQ ID NO: 3109 - DNA, 15 bp, Homo sapiens
tgttggctgtaggcc

SEQ ID NO: 3110 - DNA, 15 bp, Homo sapiens
atgttggctgtaggc

SEQ ID NO: 3111 - DNA, 15 bp, Homo sapiens
aatgttggctgtagg

SEQ ID NO: 3112 - DNA, 15 bp, Homo sapiens
aaatgttggctgtag

SEQ ID NO: 3113 - DNA, 15 bp, Homo sapiens
gaaatgttggctgta

SEQ ID NO: 3114 - DNA, 15 bp, Homo sapiens
ggaaatgttggctgt

SEQ ID NO: 3115 - DNA, 15 bp, Homo sapiens
aggaaatgttggctg

SEQ ID NO: 3116 - DNA, 15 bp, Homo sapiens
gaggaaatgttggct

SEQ ID NO: 3117 - DNA, 15 bp, Homo sapiens
tgaggaaatgttggc

SEQ ID NO: 3118 - DNA, 15 bp, Homo sapiens
ttgaggaaatgttgg

SEQ ID NO: 3119 - DNA, 15 bp, Homo sapiens
gttgaggaaatgttg

SEQ ID NO: 3120 - DNA, 15 bp, Homo sapiens
tgttgaggaaatgtt

SEQ ID NO: 3121 - DNA, 15 bp, Homo sapiens
ctgttgaggaaatgt

SEQ ID NO: 3122 - DNA, 15 bp, Homo sapiens
cctgttgaggaaatg

SEQ ID NO: 3123 - DNA, 15 bp, Homo sapiens
tcctgttgaggaaat

SEQ ID NO: 3124 - DNA, 15 bp, Homo sapiens
ttcctgttgaggaaa

SEQ ID NO: 3125 - DNA, 15 bp, Homo sapiens
cttcctgttgaggaa

SEQ ID NO: 3126 - DNA, 15 bp, Homo sapiens
gcttcctgttgagga

SEQ ID NO: 3127 - DNA, 15 bp, Homo sapiens
ggcttcctgttgagg

SEQ ID NO: 3128 - DNA, 15 bp, Homo sapiens
gggcttcctgttgag

SEQ ID NO: 3129 - DNA, 15 bp, Homo sapiens
agggcttcctgttga

SEQ ID NO: 3130 - DNA, 15 bp, Homo sapiens
gagggcttcctgttg

SEQ ID NO: 3131 - DNA, 15 bp, Homo sapiens
agagggcttcctgtt

SEQ ID NO: 3132 - DNA, 15 bp, Homo sapiens
cagagggcttcctgt

SEQ ID NO: 3133 - DNA, 15 bp, Homo sapiens
tcagagggcttcctg

SEQ ID NO: 3134 - DNA, 15 bp, Homo sapiens
atcagagggcttcct

SEQ ID NO: 3135 - DNA, 15 bp, Homo sapiens
tatcagagggcttcc

SEQ ID NO: 3136 - DNA, 15 bp, Homo sapiens
ctatcagagggcttc

SEQ ID NO: 3137 - DNA, 15 bp, Homo sapiens
cctatcagagggctt

SEQ ID NO: 3138 - DNA, 15 bp, Homo sapiens
ccctatcagagggct

SEQ ID NO: 3139 - DNA, 15 bp, Homo sapiens
gccctatcagagggc

SEQ ID NO: 3140 - DNA, 15 bp, Homo sapiens
agccctatcagaggg

SEQ ID NO: 3141 - DNA, 15 bp, Homo sapiens
gagccctatcagagg

SEQ ID NO: 3142 - DNA, 15 bp, Homo sapiens
ggagccctatcagag

SEQ ID NO: 3143 - DNA, 15 bp, Homo sapiens
gggagccctatcaga

SEQ ID NO: 3144 - DNA, 15 bp, Homo sapiens
tgggagccctatcag

SEQ ID NO: 3145 - DNA, 15 bp, Homo sapiens
gtgggagccctatca

SEQ ID NO: 3146 - DNA, 15 bp, Homo sapiens
tgtgggagccctatc

SEQ ID NO: 3147 - DNA, 15 bp, Homo sapiens
ctgtgggagccctat

SEQ ID NO: 3148 - DNA, 15 bp, Homo sapiens
cctgtgggagcccta

SEQ ID NO: 3149 - DNA, 15 bp, Homo sapiens
acctgtgggagccct

SEQ ID NO: 3150 - DNA, 15 bp, Homo sapiens
tacctgtgggagccc

SEQ ID NO: 3151 - DNA, 15 bp, Homo sapiens
ttacctgtgggagcc

SEQ ID NO: 3152 - DNA, 15 bp, Homo sapiens
cttacctgtgggagc

SEQ ID NO: 3153 - DNA, 15 bp, Homo sapiens
ccttacctgtgggag

SEQ ID NO: 3154 - DNA, 15 bp, Homo sapiens
cccttacctgtggga

SEQ ID NO: 3155 - DNA, 15 bp, Homo sapiens
tcccttacctgtggg

SEQ ID NO: 3156 - DNA, 15 bp, Homo sapiens
atcccttacctgtgg

SEQ ID NO: 3157 - DNA, 15 bp, Homo sapiens
tatcccttacctgtg

SEQ ID NO: 3158 - DNA, 15 bp, Homo sapiens
atatcccttacctgt

SEQ ID NO: 3159 - DNA, 15 bp, Homo sapiens
tatatcccttacctg

SEQ ID NO: 3160 - DNA, 15 bp, Homo sapiens
gtatatcccttacct

SEQ ID NO: 3161 - DNA, 15 bp, Homo sapiens
ggtatatcccttacc

SEQ ID NO: 3162 - DNA, 15 bp, Homo sapiens
gggtatatcccttac

SEQ ID NO: 3163 - DNA, 15 bp, Homo sapiens
agggtatatccctta

SEQ ID NO: 3164 - DNA, 15 bp, Homo sapiens
cagggtatatccctt

SEQ ID NO: 3165 - DNA, 15 bp, Homo sapiens
tcagggtatatccct

SEQ ID NO: 3166 - DNA, 15 bp, Homo sapiens
ctcagggtatatccc

SEQ ID NO: 3167 - DNA, 15 bp, Homo sapiens
tctcagggtatatcc

SEQ ID NO: 3168 - DNA, 15 bp, Homo sapiens
atctcagggtatatc

SEQ ID NO: 3169 - DNA, 15 bp, Homo sapiens
gatctcagggtatat

SEQ ID NO: 3170 - DNA, 15 bp, Homo sapiens
ggatctcagggtata

SEQ ID NO: 3171 - DNA, 15 bp, Homo sapiens
aggatctcagggtat

SEQ ID NO: 3172 - DNA, 15 bp, Homo sapiens
gaggatctcagggta

SEQ ID NO: 3173 - DNA, 15 bp, Homo sapiens
ggaggatctcagggt

SEQ ID NO: 3174 - DNA, 15 bp, Homo sapiens
cggaggatctcaggg

SEQ ID NO: 3175 - DNA, 15 bp, Homo sapiens
gcggaggatctcagg

SEQ ID NO: 3176 - DNA, 15 bp, Homo sapiens
ggcggaggatctcag

SEQ ID NO: 3177 - DNA, 15 bp, Homo sapiens
tggcggaggatctca

SEQ ID NO: 3178 - DNA, 15 bp, Homo sapiens
atggcggaggatctc

SEQ ID NO: 3179 - DNA, 15 bp, Homo sapiens
aatggcggaggatct

SEQ ID NO: 3180 - DNA, 15 bp, Homo sapiens
aaatggcggaggatc

SEQ ID NO: 3181 - DNA, 15 bp, Homo sapiens
gaaatggcggaggat

SEQ ID NO: 3182 - DNA, 15 bp, Homo sapiens
ggaaatggcggagga

SEQ ID NO: 3183 - DNA, 15 bp, Homo sapiens
gggaaatggcggagg

SEQ ID NO: 3184 - DNA, 15 bp, Homo sapiens
tgggaaatggcggag

SEQ ID NO: 3185 - DNA, 15 bp, Homo sapiens
ttgggaaatggcgga

SEQ ID NO: 3186 - DNA, 15 bp, Homo sapiens
cttgggaaatggcgg

SEQ ID NO: 3187 - DNA, 15 bp, Homo sapiens
tcttgggaaatggcg

SEQ ID NO: 3188 - DNA, 15 bp, Homo sapiens
ctcttgggaaatggc

SEQ ID NO: 3189 - DNA, 15 bp, Homo sapiens
cctcttgggaaatgg

SEQ ID NO: 3190 - DNA, 15 bp, Homo sapiens
ccctcttgggaaatg

SEQ ID NO: 3191 - DNA, 15 bp, Homo sapiens
gccctcttgggaaat

SEQ ID NO: 3192 - DNA, 15 bp, Homo sapiens
agccctcttgggaaa

SEQ ID NO: 3193 - DNA, 15 bp, Homo sapiens
tagccctcttgggaa

SEQ ID NO: 3194 - DNA, 15 bp, Homo sapiens
ctagccctcttggga

SEQ ID NO: 3195 - DNA, 15 bp, Homo sapiens
cctagccctcttggg

SEQ ID NO: 3196 - DNA, 15 bp, Homo sapiens
acctagccctcttgg

SEQ ID NO: 3197 - DNA, 15 bp, Homo sapiens
gacctagccctcttg

SEQ ID NO: 3198 - DNA, 15 bp, Homo sapiens
tgacctagccctctt

SEQ ID NO: 3199 - DNA, 15 bp, Homo sapiens
gtgacctagccctct

SEQ ID NO: 3200 - DNA, 15 bp, Homo sapiens
tgtgacctagccctc

SEQ ID NO: 3201 - DNA, 15 bp, Homo sapiens
ttgtgacctagccct

SEQ ID NO: 3202 - DNA, 15 bp, Homo sapiens
tttgtgacctagccc

SEQ ID NO: 3203 - DNA, 15 bp, Homo sapiens
ctttgtgacctagcc

SEQ ID NO: 3204 - DNA, 15 bp, Homo sapiens
cctttgtgacctagc

SEQ ID NO: 3205 - DNA, 15 bp, Homo sapiens
ccctttgtgacctag

SEQ ID NO: 3206 - DNA, 15 bp, Homo sapiens
accctttgtgaccta

SEQ ID NO: 3207 - DNA, 15 bp, Homo sapiens
caccctttgtgacct

SEQ ID NO: 3208 - DNA, 15 bp, Homo sapiens
ccaccctttgtgacc

SEQ ID NO: 3209 - DNA, 15 bp, Homo sapiens
gccaccctttgtgac

SEQ ID NO: 3210 - DNA, 15 bp, Homo sapiens
agccaccctttgtga

SEQ ID NO: 3211 - DNA, 15 bp, Homo sapiens
tagccaccctttgtg

SEQ ID NO: 3212 - DNA, 15 bp, Homo sapiens
ctagccaccctttgt

SEQ ID NO: 3213 - DNA, 15 bp, Homo sapiens
actagccaccctttg

SEQ ID NO: 3214 - DNA, 15 bp, Homo sapiens
gactagccacccttt

SEQ ID NO: 3215 - DNA, 15 bp, Homo sapiens
agactagccaccctt

SEQ ID NO: 3216 - DNA, 15 bp, Homo sapiens
aagactagccaccct

SEQ ID NO: 3217 - DNA, 15 bp, Homo sapiens
gaagactagccaccc

SEQ ID NO: 3218 - DNA, 15 bp, Homo sapiens
tgaagactagccacc

SEQ ID NO: 3219 - DNA, 15 bp, Homo sapiens
ttgaagactagccac

SEQ ID NO: 3220 - DNA, 15 bp, Homo sapiens
gttgaagactagcca

SEQ ID NO: 3221 - DNA, 15 bp, Homo sapiens
tgttgaagactagcc

SEQ ID NO: 3222 - DNA, 15 bp, Homo sapiens
ctgttgaagactagc

SEQ ID NO: 3223 - DNA, 15 bp, Homo sapiens
actgttgaagactag

SEQ ID NO: 3224 - DNA, 15 bp, Homo sapiens
cactgttgaagacta

SEQ ID NO: 3225 - DNA, 15 bp, Homo sapiens
gcactgttgaagact

SEQ ID NO: 3226 - DNA, 15 bp, Homo sapiens
agcactgttgaagac

SEQ ID NO: 3227 - DNA, 15 bp, Homo sapiens
cagcactgttgaaga

SEQ ID NO: 3228 - DNA, 15 bp, Homo sapiens
gcagcactgttgaag

SEQ ID NO: 3229 - DNA, 15 bp, Homo sapiens
tgcagcactgttgaa

SEQ ID NO: 3230 - DNA, 15 bp, Homo sapiens
ttgcagcactgttga

SEQ ID NO: 3231 - DNA, 15 bp, Homo sapiens
cttgcagcactgttg

SEQ ID NO: 3232 - DNA, 15 bp, Homo sapiens
acttgcagcactgtt

SEQ ID NO: 3233 - DNA, 15 bp, Homo sapiens
gacttgcagcactgt

SEQ ID NO: 3234 - DNA, 15 bp, Homo sapiens
tgacttgcagcactg

SEQ ID NO: 3235 - DNA, 15 bp, Homo sapiens
gtgacttgcagcact

SEQ ID NO: 3236 - DNA, 15 bp, Homo sapiens
agtgacttgcagcac

SEQ ID NO: 3237 - DNA, 15 bp, Homo sapiens
cagtgacttgcagca

SEQ ID NO: 3238 - DNA, 15 bp, Homo sapiens
ccagtgacttgcagc

SEQ ID NO: 3239 - DNA, 15 bp, Homo sapiens
gccagtgacttgcag

SEQ ID NO: 3240 - DNA, 15 bp, Homo sapiens
tgccagtgacttgca

SEQ ID NO: 3241 - DNA, 15 bp, Homo sapiens
ctgccagtgacttgc

SEQ ID NO: 3242 - DNA, 15 bp, Homo sapiens
gctgccagtgacttg

SEQ ID NO: 3243 - DNA, 15 bp, Homo sapiens
tgctgccagtgactt

SEQ ID NO: 3244 - DNA, 15 bp, Homo sapiens
gtgctgccagtgact

SEQ ID NO: 3245 - DNA, 15 bp, Homo sapiens
tgtgctgccagtgac

SEQ ID NO: 3246 - DNA, 15 bp, Homo sapiens
gtgtgctgccagtga

SEQ ID NO: 3247 - DNA, 15 bp, Homo sapiens
tgtgtgctgccagtg

SEQ ID NO: 3248 - DNA, 15 bp, Homo sapiens
ctgtgtgctgccagt

SEQ ID NO: 3249 - DNA, 15 bp, Homo sapiens
cctgtgtgctgccag

SEQ ID NO: 3250 - DNA, 15 bp, Homo sapiens
acctgtgtgctgcca

SEQ ID NO: 3251 - DNA, 15 bp, Homo sapiens
aacctgtgtgctgcc

SEQ ID NO: 3252 - DNA, 15 bp, Homo sapiens
gaacctgtgtgctgc

SEQ ID NO: 3253 - DNA, 15 bp, Homo sapiens
agaacctgtgtgctg

SEQ ID NO: 3254 - DNA, 15 bp, Homo sapiens
tagaacctgtgtgct

SEQ ID NO: 3255 - DNA, 15 bp, Homo sapiens
ttagaacctgtgtgc

SEQ ID NO: 3256 - DNA, 15 bp, Homo sapiens
tttagaacctgtgtg

SEQ ID NO: 3257 - DNA, 15 bp, Homo sapiens
ttttagaacctgtgt

SEQ ID NO: 3258 - DNA, 15 bp, Homo sapiens
gttttagaacctgtg

SEQ ID NO: 3259 - DNA, 15 bp, Homo sapiens
tgttttagaacctgt

SEQ ID NO: 3260 - DNA, 15 bp, Homo sapiens
ttgttttagaacctg

SEQ ID NO: 3261 - DNA, 15 bp, Homo sapiens
attgttttagaacct

SEQ ID NO: 3262 - DNA, 15 bp, Homo sapiens
tattgttttagaacc

SEQ ID NO: 3263 - DNA, 15 bp, Homo sapiens
ttattgttttagaac

SEQ ID NO: 3264 - DNA, 15 bp, Homo sapiens
attattgttttagaa

SEQ ID NO: 3265 - DNA, 15 bp, Homo sapiens
tattattgttttaga

SEQ ID NO: 3266 - DNA, 15 bp, Homo sapiens
atattattgttttag

SEQ ID NO: 3267 - DNA, 15 bp, Homo sapiens
catattattgtttta

SEQ ID NO: 3268 - DNA, 15 bp, Homo sapiens
acatattattgtttt

SEQ ID NO: 3269 - DNA, 15 bp, Homo sapiens
aacatattattgttt

SEQ ID NO: 3270 - DNA, 15 bp, Homo sapiens
caacatattattgtt

SEQ ID NO: 3271 - DNA, 15 bp, Homo sapiens
tcaacatattattgt

SEQ ID NO: 3272 - DNA, 15 bp, Homo sapiens
ttcaacatattattg

SEQ ID NO: 3273 - DNA, 15 bp, Homo sapiens
tttcaacatattatt

SEQ ID NO: 3274 - DNA, 15 bp, Homo sapiens
atttcaacatattat

SEQ ID NO: 3275 - DNA, 15 bp, Homo sapiens
catttcaacatatta

SEQ ID NO: 3276 - DNA, 15 bp, Homo sapiens
acatttcaacatatt

SEQ ID NO: 3277 - DNA, 15 bp, Homo sapiens
tacatttcaacatat

SEQ ID NO: 3278 - DNA, 15 bp, Homo sapiens
gtacatttcaacata

SEQ ID NO: 3279 - DNA, 15 bp, Homo sapiens
agtacatttcaacat

SEQ ID NO: 3280 - DNA, 15 bp, Homo sapiens
gagtacatttcaaca

SEQ ID NO: 3281 - DNA, 15 bp, Homo sapiens
tgagtacatttcaac

SEQ ID NO: 3282 - DNA, 15 bp, Homo sapiens
gtgagtacatttcaa

SEQ ID NO: 3283 - DNA, 15 bp, Homo sapiens
ggtgagtacatttca

SEQ ID NO: 3284 - DNA, 15 bp, Homo sapiens
tggtgagtacatttc

SEQ ID NO: 3285 - DNA, 15 bp, Homo sapiens
ttggtgagtacattt

SEQ ID NO: 3286 - DNA, 15 bp, Homo sapiens
cttggtgagtacatt

SEQ ID NO: 3287 - DNA, 15 bp, Homo sapiens
tcttggtgagtacat

SEQ ID NO: 3288 - DNA, 15 bp, Homo sapiens
ttcttggtgagtaca

SEQ ID NO: 3289 - DNA, 15 bp, Homo sapiens
tttcttggtgagtac

SEQ ID NO: 3290 - DNA, 15 bp, Homo sapiens
ctttcttggtgagta

SEQ ID NO: 3291 - DNA, 15 bp, Homo sapiens
gctttcttggtgagt

SEQ ID NO: 3292 - DNA, 15 bp, Homo sapiens
ggctttcttggtgag

SEQ ID NO: 3293 - DNA, 15 bp, Homo sapiens
tggctttcttggtga

SEQ ID NO: 3294 - DNA, 15 bp, Homo sapiens
gtggctttcttggtg

SEQ ID NO: 3295 - DNA, 15 bp, Homo sapiens
ggtggctttcttggt

SEQ ID NO: 3296 - DNA, 15 bp, Homo sapiens
cggtggctttcttgg

SEQ ID NO: 3297 - DNA, 15 bp, Homo sapiens
tcggtggctttcttg

SEQ ID NO: 3298 - DNA, 15 bp, Homo sapiens
gtcggtggctttctt

SEQ ID NO: 3299 - DNA, 15 bp, Homo sapiens
ggtcggtggctttct

SEQ ID NO: 3300 - DNA, 15 bp, Homo sapiens
aggtcggtggctttc

SEQ ID NO: 3301 - DNA, 15 bp, Homo sapiens
taggtcggtggcttt

SEQ ID NO: 3302 - DNA, 15 bp, Homo sapiens
gtaggtcggtggctt

SEQ ID NO: 3303 - DNA, 15 bp, Homo sapiens
tgtaggtcggtggct

SEQ ID NO: 3304 - DNA, 15 bp, Homo sapiens
ttgtaggtcggtggc

SEQ ID NO: 3305 - DNA, 15 bp, Homo sapiens
tttgtaggtcggtgg

SEQ ID NO: 3306 - DNA, 15 bp, Homo sapiens
ctttgtaggtcggtg

SEQ ID NO: 3307 - DNA, 15 bp, Homo sapiens
tctttgtaggtcggt

SEQ ID NO: 3308 - DNA, 15 bp, Homo sapiens
ttctttgtaggtcgg

SEQ ID NO: 3309 - DNA, 15 bp, Homo sapiens
tttctttgtaggtcg

SEQ ID NO: 3310 - DNA, 15 bp, Homo sapiens
gtttctttgtaggtc

SEQ ID NO: 3311 - DNA, 15 bp, Homo sapiens
ggtttctttgtaggt

SEQ ID NO: 3312 - DNA, 15 bp, Homo sapiens
gggtttctttgtagg

SEQ ID NO: 3313 - DNA, 15 bp, Homo sapiens
agggtttctttgtag

SEQ ID NO: 3314 - DNA, 15 bp, Homo sapiens
aagggtttctttgta

SEQ ID NO: 3315 - DNA, 15 bp, Homo sapiens
taagggtttctttgt

SEQ ID NO: 3316 - DNA, 15 bp, Homo sapiens
ataagggtttctttg

SEQ ID NO: 3317 - DNA, 15 bp, Homo sapiens
gataagggtttcttt

SEQ ID NO: 3318 - DNA, 15 bp, Homo sapiens
cgataagggtttctt

SEQ ID NO: 3319 - DNA, 15 bp, Homo sapiens
gcgataagggtttct

SEQ ID NO: 3320 - DNA, 15 bp, Homo sapiens
agcgataagggtttc

SEQ ID NO: 3321 - DNA, 15 bp, Homo sapiens
cagcgataagggttt

SEQ ID NO: 3322 - DNA, 15 bp, Homo sapiens
tcagcgataagggtt

SEQ ID NO: 3323 - DNA, 15 bp, Homo sapiens
atcagcgataagggt

SEQ ID NO: 3324 - DNA, 15 bp, Homo sapiens
gatcagcgataaggg

SEQ ID NO: 3325 - DNA, 15 bp, Homo sapiens
agatcagcgataagg

SEQ ID NO: 3326 - DNA, 15 bp, Homo sapiens
aagatcagcgataag

SEQ ID NO: 3327 - DNA, 15 bp, Homo sapiens
caagatcagcgataa

SEQ ID NO: 3328 - DNA, 15 bp, Homo sapiens
gcaagatcagcgata

SEQ ID NO: 3329 - DNA, 15 bp, Homo sapiens
tgcaagatcagcgat

SEQ ID NO: 3330 - DNA, 15 bp, Homo sapiens
ttgcaagatcagcga

SEQ ID NO: 3331 - DNA, 15 bp, Homo sapiens
attgcaagatcagcg

SEQ ID NO: 3332 - DNA, 15 bp, Homo sapiens
cattgcaagatcagc

SEQ ID NO: 3333 - DNA, 15 bp, Homo sapiens
tcattgcaagatcag

SEQ ID NO: 3334 - DNA, 15 bp, Homo sapiens
ctcattgcaagatca

SEQ ID NO: 3335 - DNA, 15 bp, Homo sapiens
gctcattgcaagatc

SEQ ID NO: 3336 - DNA, 15 bp, Homo sapiens
tgctcattgcaagat

SEQ ID NO: 3337 - DNA, 15 bp, Homo sapiens
gtgctcattgcaaga

SEQ ID NO: 3338 - DNA, 15 bp, Homo sapiens
ggtgctcattgcaag

SEQ ID NO: 3339 - DNA, 15 bp, Homo sapiens
tggtgctcattgcaa

SEQ ID NO: 3340 - DNA, 15 bp, Homo sapiens
ttggtgctcattgca

SEQ ID NO: 3341 - DNA, 15 bp, Homo sapiens
gttggtgctcattgc

SEQ ID NO: 3342 - DNA, 15 bp, Homo sapiens
ggttggtgctcattg

SEQ ID NO: 3343 - DNA, 15 bp, Homo sapiens
aggttggtgctcatt

SEQ ID NO: 3344 - DNA, 15 bp, Homo sapiens
gaggttggtgctcat

SEQ ID NO: 3345 - DNA, 15 bp, Homo sapiens
ggaggttggtgctca

SEQ ID NO: 3346 - DNA, 15 bp, Homo sapiens
gggaggttggtgctc

SEQ ID NO: 3347 - DNA, 15 bp, Homo sapiens
ggggaggttggtgct

SEQ ID NO: 3348 - DNA, 15 bp, Homo sapiens
aggggaggttggtgc

SEQ ID NO: 3349 - DNA, 15 bp, Homo sapiens
aaggggaggttggtg

SEQ ID NO: 3350 - DNA, 15 bp, Homo sapiens
aaaggggaggttggt

SEQ ID NO: 3351 - DNA, 15 bp, Homo sapiens
caaaggggaggttgg

SEQ ID NO: 3352 - DNA, 15 bp, Homo sapiens
gcaaaggggaggttg

SEQ ID NO: 3353 - DNA, 15 bp, Homo sapiens
tgcaaaggggaggtt

SEQ ID NO: 3354 - DNA, 15 bp, Homo sapiens
ttgcaaaggggaggt

SEQ ID NO: 3355 - DNA, 15 bp, Homo sapiens
cttgcaaaggggagg

SEQ ID NO: 3356 - DNA, 15 bp, Homo sapiens
tcttgcaaaggggag

SEQ ID NO: 3357 - DNA, 15 bp, Homo sapiens
ctcttgcaaagggga

SEQ ID NO: 3358 - DNA, 15 bp, Homo sapiens
gctcttgcaaagggg

SEQ ID NO: 3359 - DNA, 15 bp, Homo sapiens
agctcttgcaaaggg

SEQ ID NO: 3360 - DNA, 15 bp, Homo sapiens
cagctcttgcaaagg

SEQ ID NO: 3361 - DNA, 15 bp, Homo sapiens
tcagctcttgcaaag

SEQ ID NO: 3362 - DNA, 15 bp, Homo sapiens
ctcagctcttgcaaa

SEQ ID NO: 3363 - DNA, 15 bp, Homo sapiens
tctcagctcttgcaa

SEQ ID NO: 3364 - DNA, 15 bp, Homo sapiens
atctcagctcttgca

SEQ ID NO: 3365 - DNA, 15 bp, Homo sapiens
gatctcagctcttgc

SEQ ID NO: 3366 - DNA, 15 bp, Homo sapiens
cgatctcagctcttg

SEQ ID NO: 3367 - DNA, 15 bp, Homo sapiens
tcgatctcagctctt

SEQ ID NO: 3368 - DNA, 15 bp, Homo sapiens
ttcgatctcagctct

SEQ ID NO: 3369 - DNA, 15 bp, Homo sapiens
tttcgatctcagctc

SEQ ID NO: 3370 - DNA, 15 bp, Homo sapiens
ctttcgatctcagct

SEQ ID NO: 3371 - DNA, 15 bp, Homo sapiens
tctttcgatctcagc

SEQ ID NO: 3372 - DNA, 15 bp, Homo sapiens
atctttcgatctcag

SEQ ID NO: 3373 - DNA, 15 bp, Homo sapiens
tatctttcgatctca

SEQ ID NO: 3374 - DNA, 15 bp, Homo sapiens
ttatctttcgatctc

SEQ ID NO: 3375 - DNA, 15 bp, Homo sapiens
tttatctttcgatct

SEQ ID NO: 3376 - DNA, 15 bp, Homo sapiens
ctttatctttcgatc

SEQ ID NO: 3377 - DNA, 15 bp, Homo sapiens
tctttatctttcgat

SEQ ID NO: 3378 - DNA, 15 bp, Homo sapiens
ttctttatctttcga

SEQ ID NO: 3379 - DNA, 15 bp, Homo sapiens
cttctttatctttcg

SEQ ID NO: 3380 - DNA, 15 bp, Homo sapiens
gcttctttatctttc

SEQ ID NO: 3381 - DNA, 15 bp, Homo sapiens
agcttctttatcttt

SEQ ID NO: 3382 - DNA, 15 bp, Homo sapiens
tagcttctttatctt

SEQ ID NO: 3383 - DNA, 15 bp, Homo sapiens
atagcttctttatct

SEQ ID NO: 3384 - DNA, 15 bp, Homo sapiens
gatagcttctttatc

SEQ ID NO: 3385 - DNA, 15 bp, Homo sapiens
tgatagcttctttat

SEQ ID NO: 3386 - DNA, 15 bp, Homo sapiens
ttgatagcttcttta

SEQ ID NO: 3387 - DNA, 15 bp, Homo sapiens
tttgatagcttcttt

SEQ ID NO: 3388 - DNA, 15 bp, Homo sapiens
ttttgatagcttctt

SEQ ID NO: 3389 - DNA, 15 bp, Homo sapiens
tttttgatagcttct

SEQ ID NO: 3390 - DNA, 15 bp, Homo sapiens
ctttttgatagcttc

SEQ ID NO: 3391 - DNA, 15 bp, Homo sapiens
gctttttgatagctt

SEQ ID NO: 3392 - DNA, 15 bp, Homo sapiens
ggctttttgatagct

SEQ ID NO: 3393 - DNA, 15 bp, Homo sapiens
tggctttttgatagc

SEQ ID NO: 3394 - DNA, 15 bp, Homo sapiens
atggctttttgatag

SEQ ID NO: 3395 - DNA, 15 bp, Homo sapiens
gatggctttttgata

SEQ ID NO: 3396 - DNA, 15 bp, Homo sapiens
agatggctttttgat

SEQ ID NO: 3397 - DNA, 15 bp, Homo sapiens
cagatggctttttga

SEQ ID NO: 3398 - DNA, 15 bp, Homo sapiens
gcagatggctttttg

SEQ ID NO: 3399 - DNA, 15 bp, Homo sapiens
ggcagatggcttttt

SEQ ID NO: 3400 - DNA, 15 bp, Homo sapiens
gggcagatggctttt

SEQ ID NO: 3401 - DNA, 15 bp, Homo sapiens
tgggcagatggcttt

SEQ ID NO: 3402 - DNA, 15 bp, Homo sapiens
gtgggcagatggctt

SEQ ID NO: 3403 - DNA, 15 bp, Homo sapiens
agtgggcagatggct

SEQ ID NO: 3404 - DNA, 15 bp, Homo sapiens
aagtgggcagatggc

SEQ ID NO: 3405 - DNA, 15 bp, Homo sapiens
taagtgggcagatgg

SEQ ID NO: 3406 - DNA, 15 bp, Homo sapiens
ttaagtgggcagatg

SEQ ID NO: 3407 - DNA, 15 bp, Homo sapiens
tttaagtgggcagat

SEQ ID NO: 3408 - DNA, 15 bp, Homo sapiens
ttttaagtgggcaga

SEQ ID NO: 3409 - DNA, 15 bp, Homo sapiens
attttaagtgggcag

SEQ ID NO: 3410 - DNA, 15 bp, Homo sapiens
tattttaagtgggca

SEQ ID NO: 3411 - DNA, 15 bp, Homo sapiens
ttattttaagtgggc

SEQ ID NO: 3412 - DNA, 15 bp, Homo sapiens
attattttaagtggg

SEQ ID NO: 3413 - DNA, 15 bp, Homo sapiens
tattattttaagtgg

SEQ ID NO: 3414 - DNA, 15 bp, Homo sapiens
atattattttaagtg

SEQ ID NO: 3415 - DNA, 15 bp, Homo sapiens
gtgctttccttttac

SEQ ID NO: 3416 - DNA, 15 bp, Homo sapiens
cgtgctttcctttta

SEQ ID NO: 3417 - DNA, 15 bp, Homo sapiens
tcgtgctttcctttt

SEQ ID NO: 3418 - DNA, 15 bp, Homo sapiens
gtcgtgctttccttt

SEQ ID NO: 3419 - DNA, 15 bp, Homo sapiens
tgtcgtgctttcctt

SEQ ID NO: 3420 - DNA, 15 bp, Homo sapiens
atgtcgtgctttcct

SEQ ID NO: 3421 - DNA, 15 bp, Homo sapiens
catgtcgtgctttcc

SEQ ID NO: 3422 - DNA, 15 bp, Homo sapiens
gcatgtcgtgctttc

SEQ ID NO: 3423 - DNA, 15 bp, Homo sapiens
agcatgtcgtgcttt

SEQ ID NO: 3424 - DNA, 15 bp, Homo sapiens
cagcatgtcgtgctt

SEQ ID NO: 3425 - DNA, 15 bp, Homo sapiens
ccagcatgtcgtgct

SEQ ID NO: 3426 - DNA, 15 bp, Homo sapiens
cccagcatgtcgtgc

SEQ ID NO: 3427 - DNA, 15 bp, Homo sapiens
tcccagcatgtcgtg

SEQ ID NO: 3428 - DNA, 15 bp, Homo sapiens
ttcccagcatgtcgt

SEQ ID NO: 3429 - DNA, 15 bp, Homo sapiens
gttcccagcatgtcg

SEQ ID NO: 3430 - DNA, 15 bp, Homo sapiens
tgttcccagcatgtc

SEQ ID NO: 3431 - DNA, 15 bp, Homo sapiens
gtgttcccagcatgt

SEQ ID NO: 3432 - DNA, 15 bp, Homo sapiens
ggtgttcccagcatg

SEQ ID NO: 3433 - DNA, 15 bp, Homo sapiens
tggtgttcccagcat

SEQ ID NO: 3434 - DNA, 15 bp, Homo sapiens
ttggtgttcccagca

SEQ ID NO: 3435 - DNA, 15 bp, Homo sapiens
cttggtgttcccagc

SEQ ID NO: 3436 - DNA, 15 bp, Homo sapiens
tcttggtgttcccag

SEQ ID NO: 3437 - DNA, 15 bp, Homo sapiens
ctcttggtgttccca

SEQ ID NO: 3438 - DNA, 15 bp, Homo sapiens
actcttggtgttccc

SEQ ID NO: 3439 - DNA, 15 bp, Homo sapiens
cactcttggtgttcc

SEQ ID NO: 3440 - DNA, 15 bp, Homo sapiens
tcactcttggtgttc

SEQ ID NO: 3441 - DNA, 15 bp, Homo sapiens
ttcactcttggtgtt

SEQ ID NO: 3442 - DNA, 15 bp, Homo sapiens
tttcactcttggtgt

SEQ ID NO: 3443 - DNA, 15 bp, Homo sapiens
atttcactcttggtg

SEQ ID NO: 3444 - DNA, 15 bp, Homo sapiens
gatttcactcttggt

SEQ ID NO: 3445 - DNA, 15 bp, Homo sapiens
ggatttcactcttgg

SEQ ID NO: 3446 - DNA, 15 bp, Homo sapiens
tggatttcactcttg

SEQ ID NO: 3447 - DNA, 15 bp, Homo sapiens
ctggatttcactctt

SEQ ID NO: 3448 - DNA, 15 bp, Homo sapiens
tctggatttcactct

SEQ ID NO: 3449 - DNA, 15 bp, Homo sapiens
ttctggatttcactc

SEQ ID NO: 3450 - DNA, 15 bp, Homo sapiens
attctggatttcact

SEQ ID NO: 3451 - DNA, 15 bp, Homo sapiens
aattctggatttcac

SEQ ID NO: 3452 - DNA, 15 bp, Homo sapiens
aaattctggatttca

SEQ ID NO: 3453 - DNA, 15 bp, Homo sapiens
caaattctggatttc

SEQ ID NO: 3454 - DNA, 15 bp, Homo sapiens
gcaaattctggattt

SEQ ID NO: 3455 - DNA, 15 bp, Homo sapiens
ggcaaattctggatt

SEQ ID NO: 3456 - DNA, 15 bp, Homo sapiens
gggcaaattctggat

SEQ ID NO: 3457 - DNA, 15 bp, Homo sapiens
agggcaaattctgga

SEQ ID NO: 3458 - DNA, 15 bp, Homo sapiens
cagggcaaattctgg

SEQ ID NO: 3459 - DNA, 15 bp, Homo sapiens
tcagggcaaattctg

SEQ ID NO: 3460 - DNA, 15 bp, Homo sapiens
ttcagggcaaattct

SEQ ID NO: 3461 - DNA, 15 bp, Homo sapiens
attcagggcaaattc

SEQ ID NO: 3462 - DNA, 15 bp, Homo sapiens
gattcagggcaaatt

SEQ ID NO: 3463 - DNA, 15 bp, Homo sapiens
tgattcagggcaaat

SEQ ID NO: 3464 - DNA, 15 bp, Homo sapiens
atgattcagggcaaa

SEQ ID NO: 3465 - DNA, 15 bp, Homo sapiens
catgattcagggcaa

SEQ ID NO: 3466 - DNA, 15 bp, Homo sapiens
gcatgattcagggca

SEQ ID NO: 3467 - DNA, 15 bp, Homo sapiens
ggcatgattcagggc

SEQ ID NO: 3468 - DNA, 15 bp, Homo sapiens
tggcatgattcaggg

SEQ ID NO: 3469 - DNA, 15 bp, Homo sapiens
gtggcatgattcagg

SEQ ID NO: 3470 - DNA, 15 bp, Homo sapiens
cgtggcatgattcag

SEQ ID NO: 3471 - DNA, 15 bp, Homo sapiens
gcgtggcatgattca

SEQ ID NO: 3472 - DNA, 15 bp, Homo sapiens
agcgtggcatgattc

SEQ ID NO: 3473 - DNA, 15 bp, Homo sapiens
aagcgtggcatgatt

SEQ ID NO: 3474 - DNA, 15 bp, Homo sapiens
aaagcgtggcatgat

SEQ ID NO: 3475 - DNA, 15 bp, Homo sapiens
gaaagcgtggcatga

SEQ ID NO: 3476 - DNA, 15 bp, Homo sapiens
agaaagcgtggcatg

SEQ ID NO: 3477 - DNA, 15 bp, Homo sapiens
tagaaagcgtggcat

SEQ ID NO: 3478 - DNA, 15 bp, Homo sapiens
ctagaaagcgtggca

SEQ ID NO: 3479 - DNA, 15 bp, Homo sapiens
tctagaaagcgtggc

SEQ ID NO: 3480 - DNA, 15 bp, Homo sapiens
ctctagaaagcgtgg

SEQ ID NO: 3481 - DNA, 15 bp, Homo sapiens
cctctagaaagcgtg

SEQ ID NO: 3482 - DNA, 15 bp, Homo sapiens
tcctctagaaagcgt

SEQ ID NO: 3483 - DNA, 15 bp, Homo sapiens
gtcctctagaaagcg

SEQ ID NO: 3484 - DNA, 15 bp, Homo sapiens
ggtcctctagaaagc

SEQ ID NO: 3485 - DNA, 15 bp, Homo sapiens
tggtcctctagaaag

SEQ ID NO: 3486 - DNA, 15 bp, Homo sapiens
ctggtcctctagaaa

SEQ ID NO: 3487 - DNA, 15 bp, Homo sapiens
actggtcctctagaa

SEQ ID NO: 3488 - DNA, 15 bp, Homo sapiens
aactggtcctctaga

SEQ ID NO: 3489 - DNA, 15 bp, Homo sapiens
aaactggtcctctag

SEQ ID NO: 3490 - DNA, 15 bp, Homo sapiens
taaactggtcctcta

SEQ ID NO: 3491 - DNA, 15 bp, Homo sapiens
ttaaactggtcctct

SEQ ID NO: 3492 - DNA, 15 bp, Homo sapiens
tttaaactggtcctc

SEQ ID NO: 3493 - DNA, 15 bp, Homo sapiens
ttttaaactggtcct

SEQ ID NO: 3494 - DNA, 15 bp, Homo sapiens
tttttaaactggtcc

SEQ ID NO: 3495 - DNA, 15 bp, Homo sapiens
ttttttaaactggtc

SEQ ID NO: 3496 - DNA, 15 bp, Homo sapiens
tttttttaaactggt

SEQ ID NO: 3497 - DNA, 15 bp, Homo sapiens
ttttttttaaactgg

SEQ ID NO: 3498 - DNA, 15 bp, Homo sapiens
tttttttttaaactg

SEQ ID NO: 3499 - DNA, 15 bp, Homo sapiens
ttttttttttaaact

SEQ ID NO: 3500 - DNA, 15 bp, Homo sapiens
tttttttttttaaac

SEQ ID NO: 3501 - DNA, 15 bp, Homo sapiens
ttttttttttttaaa

SEQ ID NO: 3502 - DNA, 15 bp, Homo sapiens
attttttttttttta

SEQ ID NO: 3503 - DNA, 15 bp, Homo sapiens
tattttttttttttt

SEQ ID NO: 3504 - DNA, 15 bp, Homo sapiens
ctatttttttttttt

SEQ ID NO: 3505 - DNA, 15 bp, Homo sapiens
tctattttttttttt

SEQ ID NO: 3506 - DNA, 15 bp, Homo sapiens
ttctatttttttttt

SEQ ID NO: 3507 - DNA, 15 bp, Homo sapiens
tttctattttttttt

SEQ ID NO: 3508 - DNA, 15 bp, Homo sapiens
ttttctatttttttt

SEQ ID NO: 3509 - DNA, 15 bp, Homo sapiens
tttttctattttttt

SEQ ID NO: 3510 - DNA, 15 bp, Homo sapiens
ttttttctatttttt

SEQ ID NO: 3511 - DNA, 15 bp, Homo sapiens
tttttttctattttt

SEQ ID NO: 3512 - DNA, 15 bp, Homo sapiens
atttttttctatttt

SEQ ID NO: 3513 - DNA, 15 bp, Homo sapiens
tatttttttctattt

SEQ ID NO: 3514 - DNA, 15 bp, Homo sapiens
ttatttttttctatt

SEQ ID NO: 3515 - DNA, 15 bp, Homo sapiens
tttatttttttctat

SEQ ID NO: 3516 - DNA, 15 bp, Homo sapiens
atttatttttttcta

SEQ ID NO: 3517 - DNA, 15 bp, Homo sapiens
catttatttttttct

SEQ ID NO: 3518 - DNA, 15 bp, Homo sapiens
acatttatttttttc

SEQ ID NO: 3519 - DNA, 15 bp, Homo sapiens
gacatttattttttt

SEQ ID NO: 3520 - DNA, 15 bp, Homo sapiens
ggacatttatttttt

SEQ ID NO: 3521 - DNA, 15 bp, Homo sapiens
gggacatttattttt

SEQ ID NO: 3522 - DNA, 15 bp, Homo sapiens
agggacatttatttt

SEQ ID NO: 3523 - DNA, 15 bp, Homo sapiens
tagggacatttattt

SEQ ID NO: 3524 - DNA, 15 bp, Homo sapiens
ctagggacatttatt

SEQ ID NO: 3525 - DNA, 15 bp, Homo sapiens
gctagggacatttat

SEQ ID NO: 3526 - DNA, 15 bp, Homo sapiens
tgctagggacattta

SEQ ID NO: 3527 - DNA, 15 bp, Homo sapiens
atgctagggacattt

SEQ ID NO: 3528 - DNA, 15 bp, Homo sapiens
aatgctagggacatt

SEQ ID NO: 3529 - DNA, 15 bp, Homo sapiens
aaatgctagggacat

SEQ ID NO: 3530 - DNA, 15 bp, Homo sapiens
gaaatgctagggaca

SEQ ID NO: 3531 - DNA, 15 bp, Homo sapiens
agaaatgctagggac

SEQ ID NO: 3532 - DNA, 15 bp, Homo sapiens
aagaaatgctaggga

SEQ ID NO: 3533 - DNA, 15 bp, Homo sapiens
gaagaaatgctaggg

SEQ ID NO: 3534 - DNA, 15 bp, Homo sapiens
ggaagaaatgctagg

SEQ ID NO: 3535 - DNA, 15 bp, Homo sapiens
gggaagaaatgctag

SEQ ID NO: 3536 - DNA, 15 bp, Homo sapiens
agggaagaaatgcta

SEQ ID NO: 3537 - DNA, 15 bp, Homo sapiens
cagggaagaaatgct

SEQ ID NO: 3538 - DNA, 15 bp, Homo sapiens
ccagggaagaaatgc

SEQ ID NO: 3539 - DNA, 15 bp, Homo sapiens
gccagggaagaaatg

SEQ ID NO: 3540 - DNA, 15 bp, Homo sapiens
ggccagggaagaaat

SEQ ID NO: 3541 - DNA, 15 bp, Homo sapiens
gggccagggaagaaa

SEQ ID NO: 3542 - DNA, 15 bp, Homo sapiens
agggccagggaagaa

SEQ ID NO: 3543 - DNA, 15 bp, Homo sapiens
cagggccagggaaga

SEQ ID NO: 3544 - DNA, 15 bp, Homo sapiens
acagggccagggaag

SEQ ID NO: 3545 - DNA, 15 bp, Homo sapiens
gacagggccagggaa

SEQ ID NO: 3546 - DNA, 15 bp, Homo sapiens
tgacagggccaggga

SEQ ID NO: 3547 - DNA, 15 bp, Homo sapiens
gtgacagggccaggg

SEQ ID NO: 3548 - DNA, 15 bp, Homo sapiens
agtgacagggccagg

SEQ ID NO: 3549 - DNA, 15 bp, Homo sapiens
gagtgacagggccag

SEQ ID NO: 3550 - DNA, 15 bp, Homo sapiens
tgagtgacagggcca

SEQ ID NO: 3551 - DNA, 15 bp, Homo sapiens
gtgagtgacagggcc

SEQ ID NO: 3552 - DNA, 15 bp, Homo sapiens
agtgagtgacagggc

SEQ ID NO: 3553 - DNA, 15 bp, Homo sapiens
tagtgagtgacaggg

SEQ ID NO: 3554 - DNA, 15 bp, Homo sapiens
ctagtgagtgacagg

SEQ ID NO: 3555 - DNA, 15 bp, Homo sapiens
gctagtgagtgacag

SEQ ID NO: 3556 - DNA, 15 bp, Homo sapiens
agctagtgagtgaca

SEQ ID NO: 3557 - DNA, 15 bp, Homo sapiens
cagctagtgagtgac

SEQ ID NO: 3558 - DNA, 15 bp, Homo sapiens
tcagctagtgagtga

SEQ ID NO: 3559 - DNA, 15 bp, Homo sapiens
ctcagctagtgagtg

SEQ ID NO: 3560 - DNA, 15 bp, Homo sapiens
tctcagctagtgagt

SEQ ID NO: 3561 - DNA, 15 bp, Homo sapiens
ctctcagctagtgag

SEQ ID NO: 3562 - DNA, 15 bp, Homo sapiens
cctctcagctagtga

SEQ ID NO: 3563 - DNA, 15 bp, Homo sapiens
gcctctcagctagtg

SEQ ID NO: 3564 - DNA, 15 bp, Homo sapiens
agcctctcagctagt

SEQ ID NO: 3565 - DNA, 15 bp, Homo sapiens
aagcctctcagctag

SEQ ID NO: 3566 - DNA, 15 bp, Homo sapiens
aaagcctctcagcta

SEQ ID NO: 3567 - DNA, 15 bp, Homo sapiens
caaagcctctcagct

SEQ ID NO: 3568 - DNA, 15 bp, Homo sapiens
tcaaagcctctcagc

SEQ ID NO: 3569 - DNA, 15 bp, Homo sapiens
ctcaaagcctctcag

SEQ ID NO: 3570 - DNA, 15 bp, Homo sapiens
gctcaaagcctctca

SEQ ID NO: 3571 - DNA, 15 bp, Homo sapiens
tgctcaaagcctctc

SEQ ID NO: 3572 - DNA, 15 bp, Homo sapiens
ttgctcaaagcctct

SEQ ID NO: 3573 - DNA, 15 bp, Homo sapiens
cttgctcaaagcctc

SEQ ID NO: 3574 - DNA, 15 bp, Homo sapiens
gcttgctcaaagcct

SEQ ID NO: 3575 - DNA, 15 bp, Homo sapiens
agcttgctcaaagcc

SEQ ID NO: 3576 - DNA, 15 bp, Homo sapiens
cagcttgctcaaagc

SEQ ID NO: 3577 - DNA, 15 bp, Homo sapiens
ccagcttgctcaaag

SEQ ID NO: 3578 - DNA, 15 bp, Homo sapiens
gccagcttgctcaaa

SEQ ID NO: 3579 - DNA, 15 bp, Homo sapiens
agccagcttgctcaa

SEQ ID NO: 3580 - DNA, 15 bp, Homo sapiens
gagccagcttgctca

SEQ ID NO: 3581 - DNA, 15 bp, Homo sapiens
tgagccagcttgctc

SEQ ID NO: 3582 - DNA, 15 bp, Homo sapiens
atgagccagcttgct

SEQ ID NO: 3583 - DNA, 15 bp, Homo sapiens
gatgagccagcttgc

SEQ ID NO: 3584 - DNA, 15 bp, Homo sapiens
agatgagccagcttg

SEQ ID NO: 3585 - DNA, 15 bp, Homo sapiens
gagatgagccagctt

SEQ ID NO: 3586 - DNA, 15 bp, Homo sapiens
agagatgagccagct

SEQ ID NO: 3587 - DNA, 15 bp, Homo sapiens
gagagatgagccagc

SEQ ID NO: 3588 - DNA, 15 bp, Homo sapiens
agagagatgagccag

SEQ ID NO: 3589 - DNA, 15 bp, Homo sapiens
cagagagatgagcca

SEQ ID NO: 3590 - DNA, 15 bp, Homo sapiens
tcagagagatgagcc

SEQ ID NO: 3591 - DNA, 15 bp, Homo sapiens
ctcagagagatgagc

SEQ ID NO: 3592 - DNA, 15 bp, Homo sapiens
gctcagagagatgag

SEQ ID NO: 3593 - DNA, 15 bp, Homo sapiens
agctcagagagatga

SEQ ID NO: 3594 - DNA, 15 bp, Homo sapiens
tagctcagagagatg

SEQ ID NO: 3595 - DNA, 15 bp, Homo sapiens
gtagctcagagagat

SEQ ID NO: 3596 - DNA, 15 bp, Homo sapiens
ggtagctcagagaga

SEQ ID NO: 3597 - DNA, 15 bp, Homo sapiens
aggtagctcagagag

SEQ ID NO: 3598 - DNA, 15 bp, Homo sapiens
caggtagctcagaga

SEQ ID NO: 3599 - DNA, 15 bp, Homo sapiens
acaggtagctcagag

SEQ ID NO: 3600 - DNA, 15 bp, Homo sapiens
gacaggtagctcaga

SEQ ID NO: 3601 - DNA, 15 bp, Homo sapiens
agacaggtagctcag

SEQ ID NO: 3602 - DNA, 15 bp, Homo sapiens
gagacaggtagctca

SEQ ID NO: 3603 - DNA, 15 bp, Homo sapiens
ggagacaggtagctc

SEQ ID NO: 3604 - DNA, 15 bp, Homo sapiens
gggagacaggtagct

SEQ ID NO: 3605 - DNA, 15 bp, Homo sapiens
ggggagacaggtagc

SEQ ID NO: 3606 - DNA, 15 bp, Homo sapiens
aggggagacaggtag

SEQ ID NO: 3607 - DNA, 15 bp, Homo sapiens
gaggggagacaggta

SEQ ID NO: 3608 - DNA, 15 bp, Homo sapiens
agaggggagacaggt

SEQ ID NO: 3609 - DNA, 15 bp, Homo sapiens
tagaggggagacagg

SEQ ID NO: 3610 - DNA, 15 bp, Homo sapiens
gtagaggggagacag

SEQ ID NO: 3611 - DNA, 15 bp, Homo sapiens
agtagaggggagaca

SEQ ID NO: 3612 - DNA, 15 bp, Homo sapiens
tagtagaggggagac

SEQ ID NO: 3613 - DNA, 15 bp, Homo sapiens
ttagtagaggggaga

SEQ ID NO: 3614 - DNA, 15 bp, Homo sapiens
tttagtagaggggag

SEQ ID NO: 3615 - DNA, 15 bp, Homo sapiens
atttagtagagggga

SEQ ID NO: 3616 - DNA, 15 bp, Homo sapiens
catttagtagagggg

SEQ ID NO: 3617 - DNA, 15 bp, Homo sapiens
ccatttagtagaggg

SEQ ID NO: 3618 - DNA, 15 bp, Homo sapiens
cccatttagtagagg

SEQ ID NO: 3619 - DNA, 15 bp, Homo sapiens
ccccatttagtagag

SEQ ID NO: 3620 - DNA, 15 bp, Homo sapiens
tccccatttagtaga

SEQ ID NO: 3621 - DNA, 15 bp, Homo sapiens
atccccatttagtag

SEQ ID NO: 3622 - DNA, 15 bp, Homo sapiens
tatccccatttagta

SEQ ID NO: 3623 - DNA, 15 bp, Homo sapiens
ttatccccatttagt

SEQ ID NO: 3624 - DNA, 15 bp, Homo sapiens
attatccccatttag

SEQ ID NO: 3625 - DNA, 15 bp, Homo sapiens
gattatccccattta

SEQ ID NO: 3626 - DNA, 15 bp, Homo sapiens
tgattatccccattt

SEQ ID NO: 3627 - DNA, 15 bp, Homo sapiens
atgattatccccatt

SEQ ID NO: 3628 - DNA, 15 bp, Homo sapiens
tatgattatccccat

SEQ ID NO: 3629 - DNA, 15 bp, Homo sapiens
ctatgattatcccca

SEQ ID NO: 3630 - DNA, 15 bp, Homo sapiens
gctatgattatcccc

SEQ ID NO: 3631 - DNA, 15 bp, Homo sapiens
tgctatgattatccc

SEQ ID NO: 3632 - DNA, 15 bp, Homo sapiens
gtgctatgattatcc

SEQ ID NO: 3633 - DNA, 15 bp, Homo sapiens
ggtgctatgattatc

SEQ ID NO: 3634 - DNA, 15 bp, Homo sapiens
aggtgctatgattat

SEQ ID NO: 3635 - DNA, 15 bp, Homo sapiens
taggtgctatgatta

SEQ ID NO: 3636 - DNA, 15 bp, Homo sapiens
gtaggtgctatgatt

SEQ ID NO: 3637 - DNA, 15 bp, Homo sapiens
tgtaggtgctatgat

SEQ ID NO: 3638 - DNA, 15 bp, Homo sapiens
gtgtaggtgctatga

SEQ ID NO: 3639 - DNA, 15 bp, Homo sapiens
tgtgtaggtgctatg

SEQ ID NO: 3640 - DNA, 15 bp, Homo sapiens
ttgtgtaggtgctat

SEQ ID NO: 3641 - DNA, 15 bp, Homo sapiens
gttgtgtaggtgcta

SEQ ID NO: 3642 - DNA, 15 bp, Homo sapiens
tgttgtgtaggtgct

SEQ ID NO: 3643 - DNA, 15 bp, Homo sapiens
gtgttgtgtaggtgc

SEQ ID NO: 3644 - DNA, 15 bp, Homo sapiens
tgtgttgtgtaggtg

SEQ ID NO: 3645 - DNA, 15 bp, Homo sapiens
ctgtgttgtgtaggt

SEQ ID NO: 3646 - DNA, 15 bp, Homo sapiens
gctgtgttgtgtagg

SEQ ID NO: 3647 - DNA, 15 bp, Homo sapiens
tgctgtgttgtgtag

SEQ ID NO: 3648 - DNA, 15 bp, Homo sapiens
atgctgtgttgtgta

SEQ ID NO: 3649 - DNA, 15 bp, Homo sapiens
catgctgtgttgtgt

SEQ ID NO: 3650 - DNA, 15 bp, Homo sapiens
gcatgctgtgttgtg

SEQ ID NO: 3651 - DNA, 15 bp, Homo sapiens
tgcatgctgtgttgt

SEQ ID NO: 3652 - DNA, 15 bp, Homo sapiens
gtgcatgctgtgttg

SEQ ID NO: 3653 - DNA, 15 bp, Homo sapiens
tgtgcatgctgtgtt

SEQ ID NO: 3654 - DNA, 15 bp, Homo sapiens
ctgtgcatgctgtgt

SEQ ID NO: 3655 - DNA, 15 bp, Homo sapiens
gctgtgcatgctgtg

SEQ ID NO: 3656 - DNA, 15 bp, Homo sapiens
tgctgtgcatgctgt

SEQ ID NO: 3657 - DNA, 15 bp, Homo sapiens
ctgctgtgcatgctg

SEQ ID NO: 3658 - DNA, 15 bp, Homo sapiens
cctgctgtgcatgct

SEQ ID NO: 3659 - DNA, 15 bp, Homo sapiens
gcctgctgtgcatgc

SEQ ID NO: 3660 - DNA, 15 bp, Homo sapiens
ggcctgctgtgcatg

SEQ ID NO: 3661 - DNA, 15 bp, Homo sapiens
aggcctgctgtgcat

SEQ ID NO: 3662 - DNA, 15 bp, Homo sapiens
gaggcctgctgtgca

SEQ ID NO: 3663 - DNA, 15 bp, Homo sapiens
tgaggcctgctgtgc

SEQ ID NO: 3664 - DNA, 15 bp, Homo sapiens
gtgaggcctgctgtg

SEQ ID NO: 3665 - DNA, 15 bp, Homo sapiens
cgtgaggcctgctgt

SEQ ID NO: 3666 - DNA, 15 bp, Homo sapiens
ccgtgaggcctgctg

SEQ ID NO: 3667 - DNA, 15 bp, Homo sapiens
tccgtgaggcctgct

SEQ ID NO: 3668 - DNA, 15 bp, Homo sapiens
ctccgtgaggcctgc

SEQ ID NO: 3669 - DNA, 15 bp, Homo sapiens
tctccgtgaggcctg

SEQ ID NO: 3670 - DNA, 15 bp, Homo sapiens
ctctccgtgaggcct

SEQ ID NO: 3671 - DNA, 15 bp, Homo sapiens
tctctccgtgaggcc

SEQ ID NO: 3672 - DNA, 15 bp, Homo sapiens
ttctctccgtgaggc

SEQ ID NO: 3673 - DNA, 15 bp, Homo sapiens
attctctccgtgagg

SEQ ID NO: 3674 - DNA, 15 bp, Homo sapiens
cattctctccgtgag

SEQ ID NO: 3675 - DNA, 15 bp, Homo sapiens
ccattctctccgtga

SEQ ID NO: 3676 - DNA, 15 bp, Homo sapiens
tccattctctccgtg

SEQ ID NO: 3677 - DNA, 15 bp, Homo sapiens
atccattctctccgt

SEQ ID NO: 3678 - DNA, 15 bp, Homo sapiens
gatccattctctccg

SEQ ID NO: 3679 - DNA, 15 bp, Homo sapiens
agatccattctctcc

SEQ ID NO: 3680 - DNA, 15 bp, Homo sapiens
cagatccattctctc

SEQ ID NO: 3681 - DNA, 15 bp, Homo sapiens
tcagatccattctct

SEQ ID NO: 3682 - DNA, 15 bp, Homo sapiens
atcagatccattctc

SEQ ID NO: 3683 - DNA, 15 bp, Homo sapiens
catcagatccattct

SEQ ID NO: 3684 - DNA, 15 bp, Homo sapiens
acatcagatccattc

SEQ ID NO: 3685 - DNA, 15 bp, Homo sapiens
aacatcagatccatt

SEQ ID NO: 3686 - DNA, 15 bp, Homo sapiens
gaacatcagatccat

SEQ ID NO: 3687 - DNA, 15 bp, Homo sapiens
tgaacatcagatcca

SEQ ID NO: 3688 - DNA, 15 bp, Homo sapiens
atgaacatcagatcc

SEQ ID NO: 3689 - DNA, 15 bp, Homo sapiens
tatgaacatcagatc

SEQ ID NO: 3690 - DNA, 15 bp, Homo sapiens
ctatgaacatcagat

SEQ ID NO: 3691 - DNA, 15 bp, Homo sapiens
gctatgaacatcaga

SEQ ID NO: 3692 - DNA, 15 bp, Homo sapiens
tgctatgaacatcag

SEQ ID NO: 3693 - DNA, 15 bp, Homo sapiens
gtgctatgaacatca

SEQ ID NO: 3694 - DNA, 15 bp, Homo sapiens
tgtgctatgaacatc

SEQ ID NO: 3695 - DNA, 15 bp, Homo sapiens
ctgtgctatgaacat

SEQ ID NO: 3696 - DNA, 15 bp, Homo sapiens
tctgtgctatgaaca

SEQ ID NO: 3697 - DNA, 15 bp, Homo sapiens
ttctgtgctatgaac

SEQ ID NO: 3698 - DNA, 15 bp, Homo sapiens
tttctgtgctatgaa

SEQ ID NO: 3699 - DNA, 15 bp, Homo sapiens
atttctgtgctatga

SEQ ID NO: 3700 - DNA, 15 bp, Homo sapiens
gatttctgtgctatg

SEQ ID NO: 3701 - DNA, 15 bp, Homo sapiens
tgatttctgtgctat

SEQ ID NO: 3702 - DNA, 15 bp, Homo sapiens
ctgatttctgtgcta

SEQ ID NO: 3703 - DNA, 15 bp, Homo sapiens
actgatttctgtgct

SEQ ID NO: 3704 - DNA, 15 bp, Homo sapiens
tactgatttctgtgc

SEQ ID NO: 3705 - DNA, 15 bp, Homo sapiens
ttactgatttctgtg

SEQ ID NO: 3706 - DNA, 15 bp, Homo sapiens
tttactgatttctgt

SEQ ID NO: 3707 - DNA, 15 bp, Homo sapiens
atttactgatttctg

SEQ ID NO: 3708 - DNA, 15 bp, Homo sapiens
catttactgatttct

SEQ ID NO: 3709 - DNA, 15 bp, Homo sapiens
gcatttactgatttc

SEQ ID NO: 3710 - DNA, 15 bp, Homo sapiens
agcatttactgattt

SEQ ID NO: 3711 - DNA, 15 bp, Homo sapiens
cagcatttactgatt

SEQ ID NO: 3712 - DNA, 15 bp, Homo sapiens
ccagcatttactgat

SEQ ID NO: 3713 - DNA, 15 bp, Homo sapiens
gccagcatttactga

SEQ ID NO: 3714 - DNA, 15 bp, Homo sapiens
ggccagcatttactg

SEQ ID NO: 3715 - DNA, 15 bp, Homo sapiens
tggccagcatttact

SEQ ID NO: 3716 - DNA, 15 bp, Homo sapiens
ctggccagcatttac

SEQ ID NO: 3717 - DNA, 15 bp, Homo sapiens
actggccagcattta

SEQ ID NO: 3718 - DNA, 15 bp, Homo sapiens
aactggccagcattt

SEQ ID NO: 3719 - DNA, 15 bp, Homo sapiens
taactggccagcatt

SEQ ID NO: 3720 - DNA, 15 bp, Homo sapiens
ataactggccagcat

SEQ ID NO: 3721 - DNA, 15 bp, Homo sapiens
gataactggccagca

SEQ ID NO: 3722 - DNA, 15 bp, Homo sapiens
agataactggccagc

SEQ ID NO: 3723 - DNA, 15 bp, Homo sapiens
aagataactggccag

SEQ ID NO: 3724 - DNA, 15 bp, Homo sapiens
aaagataactggcca

SEQ ID NO: 3725 - DNA, 15 bp, Homo sapiens
aaaagataactggcc

SEQ ID NO: 3726 - DNA, 15 bp, Homo sapiens
caaaagataactggc

SEQ ID NO: 3727 - DNA, 15 bp, Homo sapiens
gcaaaagataactgg

SEQ ID NO: 3728 - DNA, 15 bp, Homo sapiens
tgcaaaagataactg

SEQ ID NO: 3729 - DNA, 15 bp, Homo sapiens
ctgcaaaagataact

SEQ ID NO: 3730 - DNA, 15 bp, Homo sapiens
actgcaaaagataac

SEQ ID NO: 3731 - DNA, 15 bp, Homo sapiens
aactgcaaaagataa

SEQ ID NO: 3732 - DNA, 15 bp, Homo sapiens
taactgcaaaagata

SEQ ID NO: 3733 - DNA, 15 bp, Homo sapiens
gtaactgcaaaagat

SEQ ID NO: 3734 - DNA, 15 bp, Homo sapiens
ggtaactgcaaaaga

SEQ ID NO: 3735 - DNA, 15 bp, Homo sapiens
tggtaactgcaaaag

SEQ ID NO: 3736 - DNA, 15 bp, Homo sapiens
gtggtaactgcaaaa

SEQ ID NO: 3737 - DNA, 15 bp, Homo sapiens
ggtggtaactgcaaa

SEQ ID NO: 3738 - DNA, 15 bp, Homo sapiens
tggtggtaactgcaa

SEQ ID NO: 3739 - DNA, 15 bp, Homo sapiens
atggtggtaactgca

SEQ ID NO: 3740 - DNA, 15 bp, Homo sapiens
catggtggtaactgc

SEQ ID NO: 3741 - DNA, 15 bp, Homo sapiens
gcatggtggtaactg

SEQ ID NO: 3742 - DNA, 15 bp, Homo sapiens
agcatggtggtaact

SEQ ID NO: 3743 - DNA, 15 bp, Homo sapiens
aagcatggtggtaac

SEQ ID NO: 3744 - DNA, 15 bp, Homo sapiens
gaagcatggtggtaa

SEQ ID NO: 3745 - DNA, 15 bp, Homo sapiens
tgaagcatggtggta

SEQ ID NO: 3746 - DNA, 15 bp, Homo sapiens
ctgaagcatggtggt

SEQ ID NO: 3747 - DNA, 15 bp, Homo sapiens
actgaagcatggtgg

SEQ ID NO: 3748 - DNA, 15 bp, Homo sapiens
aactgaagcatggtg

SEQ ID NO: 3749 - DNA, 15 bp, Homo sapiens
taactgaagcatggt

SEQ ID NO: 3750 - DNA, 15 bp, Homo sapiens
gtaactgaagcatgg

SEQ ID NO: 3751 - DNA, 15 bp, Homo sapiens
ggtaactgaagcatg

SEQ ID NO: 3752 - DNA, 15 bp, Homo sapiens
aggtaactgaagcat

SEQ ID NO: 3753 - DNA, 15 bp, Homo sapiens
aaggtaactgaagca

SEQ ID NO: 3754 - DNA, 15 bp, Homo sapiens
caaggtaactgaagc

SEQ ID NO: 3755 - DNA, 15 bp, Homo sapiens
gcaaggtaactgaag

SEQ ID NO: 3756 - DNA, 15 bp, Homo sapiens
ggcaaggtaactgaa

SEQ ID NO: 3757 - DNA, 15 bp, Homo sapiens
gggcaaggtaactga

SEQ ID NO: 3758 - DNA, 15 bp, Homo sapiens
tgggcaaggtaactg

SEQ ID NO: 3759 - DNA, 15 bp, Homo sapiens
atgggcaaggtaact

SEQ ID NO: 3760 - DNA, 15 bp, Homo sapiens
catgggcaaggtaac

SEQ ID NO: 3761 - DNA, 15 bp, Homo sapiens
acatgggcaaggtaa

SEQ ID NO: 3762 - DNA, 15 bp, Homo sapiens
aacatgggcaaggta

SEQ ID NO: 3763 - DNA, 15 bp, Homo sapiens
aaacatgggcaaggt

SEQ ID NO: 3764 - DNA, 15 bp, Homo sapiens
caaacatgggcaagg

SEQ ID NO: 3765 - DNA, 15 bp, Homo sapiens
gcaaacatgggcaag

SEQ ID NO: 3766 - DNA, 15 bp, Homo sapiens
agcaaacatgggcaa

SEQ ID NO: 3767 - DNA, 15 bp, Homo sapiens
cagcaaacatgggca

SEQ ID NO: 3768 - DNA, 15 bp, Homo sapiens
gcagcaaacatgggc

SEQ ID NO: 3769 - DNA, 15 bp, Homo sapiens
tgcagcaaacatggg

SEQ ID NO: 3770 - DNA, 15 bp, Homo sapiens
atgcagcaaacatgg

SEQ ID NO: 3771 - DNA, 15 bp, Homo sapiens
aatgcagcaaacatg

SEQ ID NO: 3772 - DNA, 15 bp, Homo sapiens
gaatgcagcaaacat

SEQ ID NO: 3773 - DNA, 15 bp, Homo sapiens
tgaatgcagcaaaca

SEQ ID NO: 3774 - DNA, 15 bp, Homo sapiens
ttgaatgcagcaaac

SEQ ID NO: 3775 - DNA, 15 bp, Homo sapiens
attgaatgcagcaaa

SEQ ID NO: 3776 - DNA, 15 bp, Homo sapiens
gattgaatgcagcaa

SEQ ID NO: 3777 - DNA, 15 bp, Homo sapiens
ggattgaatgcagca

SEQ ID NO: 3778 - DNA, 15 bp, Homo sapiens
tggattgaatgcagc

SEQ ID NO: 3779 - DNA, 15 bp, Homo sapiens
ttggattgaatgcag

SEQ ID NO: 3780 - DNA, 15 bp, Homo sapiens
gttggattgaatgca

SEQ ID NO: 3781 - DNA, 15 bp, Homo sapiens
ggttggattgaatgc

SEQ ID NO: 3782 - DNA, 15 bp, Homo sapiens
tggttggattgaatg

SEQ ID NO: 3783 - DNA, 15 bp, Homo sapiens
atggttggattgaat

SEQ ID NO: 3784 - DNA, 15 bp, Homo sapiens
catggttggattgaa

SEQ ID NO: 3785 - DNA, 15 bp, Homo sapiens
gcatggttggattga

SEQ ID NO: 3786 - DNA, 15 bp, Homo sapiens
tgcatggttggattg

SEQ ID NO: 3787 - DNA, 15 bp, Homo sapiens
ttgcatggttggatt

SEQ ID NO: 3788 - DNA, 15 bp, Homo sapiens
tttgcatggttggat

SEQ ID NO: 3789 - DNA, 15 bp, Homo sapiens
ctttgcatggttgga

SEQ ID NO: 3790 - DNA, 15 bp, Homo sapiens
actttgcatggttgg

SEQ ID NO: 3791 - DNA, 15 bp, Homo sapiens
cactttgcatggttg

SEQ ID NO: 3792 - DNA, 15 bp, Homo sapiens
tcactttgcatggtt

SEQ ID NO: 3793 - DNA, 15 bp, Homo sapiens
gtcactttgcatggt

SEQ ID NO: 3794 - DNA, 15 bp, Homo sapiens
agtcactttgcatgg

SEQ ID NO: 3795 - DNA, 15 bp, Homo sapiens
cagtcactttgcatg

SEQ ID NO: 3796 - DNA, 15 bp, Homo sapiens
acagtcactttgcat

SEQ ID NO: 3797 - DNA, 15 bp, Homo sapiens
gacagtcactttgca

SEQ ID NO: 3798 - DNA, 15 bp, Homo sapiens
tgacagtcactttgc

SEQ ID NO: 3799 - DNA, 15 bp, Homo sapiens
atgacagtcactttg

SEQ ID NO: 3800 - DNA, 15 bp, Homo sapiens
aatgacagtcacttt

SEQ ID NO: 3801 - DNA, 15 bp, Homo sapiens
aaatgacagtcactt

SEQ ID NO: 3802 - DNA, 15 bp, Homo sapiens
gaaatgacagtcact

SEQ ID NO: 3803 - DNA, 15 bp, Homo sapiens
ggaaatgacagtcac

SEQ ID NO: 3804 - DNA, 15 bp, Homo sapiens
gggaaatgacagtca

SEQ ID NO: 3805 - DNA, 15 bp, Homo sapiens
agggaaatgacagtc

SEQ ID NO: 3806 - DNA, 15 bp, Homo sapiens
aagggaaatgacagt

SEQ ID NO: 3807 - DNA, 15 bp, Homo sapiens
taagggaaatgacag

SEQ ID NO: 3808 - DNA, 15 bp, Homo sapiens
ctaagggaaatgaca

SEQ ID NO: 3809 - DNA, 15 bp, Homo sapiens
gctaagggaaatgac

SEQ ID NO: 3810 - DNA, 15 bp, Homo sapiens
tgctaagggaaatga

SEQ ID NO: 3811 - DNA, 15 bp, Homo sapiens
ctgctaagggaaatg

SEQ ID NO: 3812 - DNA, 15 bp, Homo sapiens
tctgctaagggaaat

SEQ ID NO: 3813 - DNA, 15 bp, Homo sapiens
ctctgctaagggaaa

SEQ ID NO: 3814 - DNA, 15 bp, Homo sapiens
tctctgctaagggaa

SEQ ID NO: 3815 - DNA, 15 bp, Homo sapiens
ttctctgctaaggga

SEQ ID NO: 3816 - DNA, 15 bp, Homo sapiens
cttctctgctaaggg

SEQ ID NO: 3817 - DNA, 15 bp, Homo sapiens
ccttctctgctaagg

SEQ ID NO: 3818 - DNA, 15 bp, Homo sapiens
tccttctctgctaag

SEQ ID NO: 3819 - DNA, 15 bp, Homo sapiens
ttccttctctgctaa

SEQ ID NO: 3820 - DNA, 15 bp, Homo sapiens
tttccttctctgcta

SEQ ID NO: 3821 - DNA, 15 bp, Homo sapiens
gtttccttctctgct

SEQ ID NO: 3822 - DNA, 15 bp, Homo sapiens
cgtttccttctctgc

SEQ ID NO: 3823 - DNA, 15 bp, Homo sapiens
ccgtttccttctctg

SEQ ID NO: 3824 - DNA, 15 bp, Homo sapiens
tccgtttccttctct

SEQ ID NO: 3825 - DNA, 15 bp, Homo sapiens
ctccgtttccttctc

SEQ ID NO: 3826 - DNA, 15 bp, Homo sapiens
cctccgtttccttct

SEQ ID NO: 3827 - DNA, 15 bp, Homo sapiens
gcctccgtttccttc

SEQ ID NO: 3828 - DNA, 15 bp, Homo sapiens
tgcctccgtttcctt

SEQ ID NO: 3829 - DNA, 15 bp, Homo sapiens
ttgcctccgtttcct

SEQ ID NO: 3830 - DNA, 15 bp, Homo sapiens
cttgcctccgtttcc

SEQ ID NO: 3831 - DNA, 15 bp, Homo sapiens
ccttgcctccgtttc

SEQ ID NO: 3832 - DNA, 15 bp, Homo sapiens
gccttgcctccgttt

SEQ ID NO: 3833 - DNA, 15 bp, Homo sapiens
ggccttgcctccgtt

SEQ ID NO: 3834 - DNA, 15 bp, Homo sapiens
tggccttgcctccgt

SEQ ID NO: 3835 - DNA, 15 bp, Homo sapiens
gtggccttgcctccg

SEQ ID NO: 3836 - DNA, 15 bp, Homo sapiens
tgtggccttgcctcc

SEQ ID NO: 3837 - DNA, 15 bp, Homo sapiens
gtgtggccttgcctc

SEQ ID NO: 3838 - DNA, 15 bp, Homo sapiens
tgtgtggccttgcct

SEQ ID NO: 3839 - DNA, 15 bp, Homo sapiens
ctgtgtggccttgcc

SEQ ID NO: 3840 - DNA, 15 bp, Homo sapiens
gctgtgtggccttgc

SEQ ID NO: 3841 - DNA, 15 bp, Homo sapiens
agctgtgtggccttg

SEQ ID NO: 3842 - DNA, 15 bp, Homo sapiens
cagctgtgtggcctt

SEQ ID NO: 3843 - DNA, 15 bp, Homo sapiens
tcagctgtgtggcct

SEQ ID NO: 3844 - DNA, 15 bp, Homo sapiens
atcagctgtgtggcc

SEQ ID NO: 3845 - DNA, 15 bp, Homo sapiens
catcagctgtgtggc

SEQ ID NO: 3846 - DNA, 15 bp, Homo sapiens
ccatcagctgtgtgg

SEQ ID NO: 3847 - DNA, 15 bp, Homo sapiens
cccatcagctgtgtg

SEQ ID NO: 3848 - DNA, 15 bp, Homo sapiens
gcccatcagctgtgt

SEQ ID NO: 3849 - DNA, 15 bp, Homo sapiens
cgcccatcagctgtg

SEQ ID NO: 3850 - DNA, 15 bp, Homo sapiens
ccgcccatcagctgt

SEQ ID NO: 3851 - DNA, 15 bp, Homo sapiens
tccgcccatcagctg

SEQ ID NO: 3852 - DNA, 15 bp, Homo sapiens
ctccgcccatcagct

SEQ ID NO: 3853 - DNA, 15 bp, Homo sapiens
gctccgcccatcagc

SEQ ID NO: 3854 - DNA, 15 bp, Homo sapiens
ggctccgcccatcag

SEQ ID NO: 3855 - DNA, 15 bp, Homo sapiens
cggctccgcccatca

SEQ ID NO: 3856 - DNA, 15 bp, Homo sapiens
tcggctccgcccatc

SEQ ID NO: 3857 - DNA, 15 bp, Homo sapiens
ttcggctccgcccat

SEQ ID NO: 3858 - DNA, 15 bp, Homo sapiens
attcggctccgccca

SEQ ID NO: 3859 - DNA, 15 bp, Homo sapiens
aattcggctccgccc

SEQ ID NO: 3860 - DNA, 15 bp, Homo sapiens
aaattcggctccgcc

SEQ ID NO: 3861 - DNA, 15 bp, Homo sapiens
taaattcggctccgc

SEQ ID NO: 3862 - DNA, 15 bp, Homo sapiens
ctaaattcggctccg

SEQ ID NO: 3863 - DNA, 15 bp, Homo sapiens
cctaaattcggctcc

SEQ ID NO: 3864 - DNA, 15 bp, Homo sapiens
tcctaaattcggctc

SEQ ID NO: 3865 - DNA, 15 bp, Homo sapiens
ctcctaaattcggct

SEQ ID NO: 3866 - DNA, 15 bp, Homo sapiens
tctcctaaattcggc

SEQ ID NO: 3867 - DNA, 15 bp, Homo sapiens
ctctcctaaattcgg

SEQ ID NO: 3868 - DNA, 15 bp, Homo sapiens
cctctcctaaattcg

SEQ ID NO: 3869 - DNA, 15 bp, Homo sapiens
tcctctcctaaattc

SEQ ID NO: 3870 - DNA, 15 bp, Homo sapiens
ttcctctcctaaatt

SEQ ID NO: 3871 - DNA, 15 bp, Homo sapiens
attcctctcctaaat

SEQ ID NO: 3872 - DNA, 15 bp, Homo sapiens
gattcctctcctaaa

SEQ ID NO: 3873 - DNA, 15 bp, Homo sapiens
ggattcctctcctaa

SEQ ID NO: 3874 - DNA, 15 bp, Homo sapiens
tggattcctctccta

SEQ ID NO: 3875 - DNA, 15 bp, Homo sapiens
ctggattcctctcct

SEQ ID NO: 3876 - DNA, 15 bp, Homo sapiens
cctggattcctctcc

SEQ ID NO: 3877 - DNA, 15 bp, Homo sapiens
tcctggattcctctc

SEQ ID NO: 3878 - DNA, 15 bp, Homo sapiens
ttcctggattcctct

SEQ ID NO: 3879 - DNA, 15 bp, Homo sapiens
tttcctggattcctc

SEQ ID NO: 3880 - DNA, 15 bp, Homo sapiens
gtttcctggattcct

SEQ ID NO: 3881 - DNA, 15 bp, Homo sapiens
agtttcctggattcc

SEQ ID NO: 3882 - DNA, 15 bp, Homo sapiens
cagtttcctggattc

SEQ ID NO: 3883 - DNA, 15 bp, Homo sapiens
acagtttcctggatt

SEQ ID NO: 3884 - DNA, 15 bp, Homo sapiens
tacagtttcctggat

SEQ ID NO: 3885 - DNA, 15 bp, Homo sapiens
ctacagtttcctgga

SEQ ID NO: 3886 - DNA, 15 bp, Homo sapiens
cctacagtttcctgg

SEQ ID NO: 3887 - DNA, 15 bp, Homo sapiens
acctacagtttcctg

SEQ ID NO: 3888 - DNA, 15 bp, Homo sapiens
cacctacagtttcct

SEQ ID NO: 3889 - DNA, 15 bp, Homo sapiens
acacctacagtttcc

SEQ ID NO: 3890 - DNA, 15 bp, Homo sapiens
cacacctacagtttc

SEQ ID NO: 3891 - DNA, 15 bp, Homo sapiens
ccacacctacagttt

SEQ ID NO: 3892 - DNA, 15 bp, Homo sapiens
gccacacctacagtt

SEQ ID NO: 3893 - DNA, 15 bp, Homo sapiens
agccacacctacagt

SEQ ID NO: 3894 - DNA, 15 bp, Homo sapiens
gagccacacctacag

SEQ ID NO: 3895 - DNA, 15 bp, Homo sapiens
ggagccacacctaca

SEQ ID NO: 3896 - DNA, 15 bp, Homo sapiens
gggagccacacctac

SEQ ID NO: 3897 - DNA, 15 bp, Homo sapiens
agggagccacaccta

SEQ ID NO: 3898 - DNA, 15 bp, Homo sapiens
tagggagccacacct

SEQ ID NO: 3899 - DNA, 15 bp, Homo sapiens
ttagggagccacacc

SEQ ID NO: 3900 - DNA, 15 bp, Homo sapiens
tttagggagccacac

SEQ ID NO: 3901 - DNA, 15 bp, Homo sapiens
atttagggagccaca

SEQ ID NO: 3902 - DNA, 15 bp, Homo sapiens
tatttagggagccac

SEQ ID NO: 3903 - DNA, 15 bp, Homo sapiens
gtatttagggagcca

SEQ ID NO: 3904 - DNA, 15 bp, Homo sapiens
agtatttagggagcc

SEQ ID NO: 3905 - DNA, 15 bp, Homo sapiens
cagtatttagggagc

SEQ ID NO: 3906 - DNA, 15 bp, Homo sapiens
tcagtatttagggag

SEQ ID NO: 3907 - DNA, 15 bp, Homo sapiens
gtcagtatttaggga

SEQ ID NO: 3908 - DNA, 15 bp, Homo sapiens
tgtcagtatttaggg

SEQ ID NO: 3909 - DNA, 15 bp, Homo sapiens
gtgtcagtatttagg

SEQ ID NO: 3910 - DNA, 15 bp, Homo sapiens
agtgtcagtatttag

SEQ ID NO: 3911 - DNA, 15 bp, Homo sapiens
tagtgtcagtattta

SEQ ID NO: 3912 - DNA, 15 bp, Homo sapiens
ctagtgtcagtattt

SEQ ID NO: 3913 - DNA, 15 bp, Homo sapiens
gctagtgtcagtatt

SEQ ID NO: 3914 - DNA, 15 bp, Homo sapiens
agctagtgtcagtat

SEQ ID NO: 3915 - DNA, 15 bp, Homo sapiens
tagctagtgtcagta

SEQ ID NO: 3916 - DNA, 15 bp, Homo sapiens
ttagctagtgtcagt

SEQ ID NO: 3917 - DNA, 15 bp, Homo sapiens
gttagctagtgtcag

SEQ ID NO: 3918 - DNA, 15 bp, Homo sapiens
tgttagctagtgtca

SEQ ID NO: 3919 - DNA, 15 bp, Homo sapiens
gtgttagctagtgtc

SEQ ID NO: 3920 - DNA, 15 bp, Homo sapiens
ggtgttagctagtgt

SEQ ID NO: 3921 - DNA, 15 bp, Homo sapiens
aggtgttagctagtg

SEQ ID NO: 3922 - DNA, 15 bp, Homo sapiens
caggtgttagctagt

SEQ ID NO: 3923 - DNA, 15 bp, Homo sapiens
acaggtgttagctag

SEQ ID NO: 3924 - DNA, 15 bp, Homo sapiens
tacaggtgttagcta

SEQ ID NO: 3925 - DNA, 15 bp, Homo sapiens
atacaggtgttagct

SEQ ID NO: 3926 - DNA, 15 bp, Homo sapiens
catacaggtgttagc

SEQ ID NO: 3927 - DNA, 15 bp, Homo sapiens
tcatacaggtgttag

SEQ ID NO: 3928 - DNA, 15 bp, Homo sapiens
atcatacaggtgtta

SEQ ID NO: 3929 - DNA, 15 bp, Homo sapiens
tatcatacaggtgtt

SEQ ID NO: 3930 - DNA, 15 bp, Homo sapiens
gtatcatacaggtgt

SEQ ID NO: 3931 - DNA, 15 bp, Homo sapiens
agtatcatacaggtg

SEQ ID NO: 3932 - DNA, 15 bp, Homo sapiens
tagtatcatacaggt

SEQ ID NO: 3933 - DNA, 15 bp, Homo sapiens
gtagtatcatacagg

SEQ ID NO: 3934 - DNA, 15 bp, Homo sapiens
agtagtatcatacag

SEQ ID NO: 3935 - DNA, 15 bp, Homo sapiens
aagtagtatcataca

SEQ ID NO: 3936 - DNA, 15 bp, Homo sapiens
aaagtagtatcatac

SEQ ID NO: 3937 - DNA, 15 bp, Homo sapiens
caaagtagtatcata

SEQ ID NO: 3938 - DNA, 15 bp, Homo sapiens
tcaaagtagtatcat

SEQ ID NO: 3939 - DNA, 15 bp, Homo sapiens
ctcaaagtagtatca

SEQ ID NO: 3940 - DNA, 15 bp, Homo sapiens
gctcaaagtagtatc

SEQ ID NO: 3941 - DNA, 15 bp, Homo sapiens
ggctcaaagtagtat

SEQ ID NO: 3942 - DNA, 15 bp, Homo sapiens
tggctcaaagtagta

SEQ ID NO: 3943 - DNA, 15 bp, Homo sapiens
ctggctcaaagtagt

SEQ ID NO: 3944 - DNA, 15 bp, Homo sapiens
tctggctcaaagtag

SEQ ID NO: 3945 - DNA, 15 bp, Homo sapiens
gtctggctcaaagta

SEQ ID NO: 3946 - DNA, 15 bp, Homo sapiens
agtctggctcaaagt

SEQ ID NO: 3947 - DNA, 15 bp, Homo sapiens
gagtctggctcaaag

SEQ ID NO: 3948 - DNA, 15 bp, Homo sapiens
cgagtctggctcaaa

SEQ ID NO: 3949 - DNA, 15 bp, Homo sapiens
ccgagtctggctcaa

SEQ ID NO: 3950 - DNA, 15 bp, Homo sapiens
accgagtctggctca

SEQ ID NO: 3951 - DNA, 15 bp, Homo sapiens
aaccgagtctggctc

SEQ ID NO: 3952 - DNA, 15 bp, Homo sapiens
gaaccgagtctggct

SEQ ID NO: 3953 - DNA, 15 bp, Homo sapiens
agaaccgagtctggc

SEQ ID NO: 3954 - DNA, 15 bp, Homo sapiens
cagaaccgagtctgg

SEQ ID NO: 3955 - DNA, 15 bp, Homo sapiens
tcagaaccgagtctg

SEQ ID NO: 3956 - DNA, 15 bp, Homo sapiens
ctcagaaccgagtct

SEQ ID NO: 3957 - DNA, 15 bp, Homo sapiens
gctcagaaccgagtc

SEQ ID NO: 3958 - DNA, 15 bp, Homo sapiens
tgctcagaaccgagt

SEQ ID NO: 3959 - DNA, 15 bp, Homo sapiens
gtgctcagaaccgag

SEQ ID NO: 3960 - DNA, 15 bp, Homo sapiens
ggtgctcagaaccga

SEQ ID NO: 3961 - DNA, 15 bp, Homo sapiens
aggtgctcagaaccg

SEQ ID NO: 3962 - DNA, 15 bp, Homo sapiens
aaggtgctcagaacc

SEQ ID NO: 3963 - DNA, 15 bp, Homo sapiens
aaaggtgctcagaac

SEQ ID NO: 3964 - DNA, 15 bp, Homo sapiens
taaaggtgctcagaa

SEQ ID NO: 3965 - DNA, 15 bp, Homo sapiens
gtaaaggtgctcaga

SEQ ID NO: 3966 - DNA, 15 bp, Homo sapiens
agtaaaggtgctcag

SEQ ID NO: 3967 - DNA, 15 bp, Homo sapiens
gagtaaaggtgctca

SEQ ID NO: 3968 - DNA, 15 bp, Homo sapiens
agagtaaaggtgctc

SEQ ID NO: 3969 - DNA, 15 bp, Homo sapiens
aagagtaaaggtgct

SEQ ID NO: 3970 - DNA, 15 bp, Homo sapiens
taagagtaaaggtgc

SEQ ID NO: 3971 - DNA, 15 bp, Homo sapiens
ataagagtaaaggtg

SEQ ID NO: 3972 - DNA, 15 bp, Homo sapiens
gataagagtaaaggt

SEQ ID NO: 3973 - DNA, 15 bp, Homo sapiens
ggataagagtaaagg

SEQ ID NO: 3974 - DNA, 15 bp, Homo sapiens
gggataagagtaaag

SEQ ID NO: 3975 - DNA, 15 bp, Homo sapiens
cgggataagagtaaa

SEQ ID NO: 3976 - DNA, 15 bp, Homo sapiens
acgggataagagtaa

SEQ ID NO: 3977 - DNA, 15 bp, Homo sapiens
tacgggataagagta

SEQ ID NO: 3978 - DNA, 15 bp, Homo sapiens
ttacgggataagagt

SEQ ID NO: 3979 - DNA, 15 bp, Homo sapiens
tttacgggataagag

SEQ ID NO: 3980 - DNA, 15 bp, Homo sapiens
ctttacgggataaga

SEQ ID NO: 3981 - DNA, 15 bp, Homo sapiens
actttacgggataag

SEQ ID NO: 3982 - DNA, 15 bp, Homo sapiens
tactttacgggataa

SEQ ID NO: 3983 - DNA, 15 bp, Homo sapiens
ctactttacgggata

SEQ ID NO: 3984 - DNA, 15 bp, Homo sapiens
tctactttacgggat

SEQ ID NO: 3985 - DNA, 15 bp, Homo sapiens
atctactttacggga

SEQ ID NO: 3986 - DNA, 15 bp, Homo sapiens
catctactttacggg

SEQ ID NO: 3987 - DNA, 15 bp, Homo sapiens
gcatctactttacgg

SEQ ID NO: 3988 - DNA, 15 bp, Homo sapiens
agcatctactttacg

SEQ ID NO: 3989 - DNA, 15 bp, Homo sapiens
tagcatctactttac

SEQ ID NO: 3990 - DNA, 15 bp, Homo sapiens
atagcatctacttta

SEQ ID NO: 3991 - DNA, 15 bp, Homo sapiens
tatagcatctacttt

SEQ ID NO: 3992 - DNA, 15 bp, Homo sapiens
ttatagcatctactt

SEQ ID NO: 3993 - DNA, 15 bp, Homo sapiens
attatagcatctact

SEQ ID NO: 3994 - DNA, 15 bp, Homo sapiens
aattatagcatctac

SEQ ID NO: 3995 - DNA, 15 bp, Homo sapiens
gaattatagcatcta

SEQ ID NO: 3996 - DNA, 15 bp, Homo sapiens
agaattatagcatct

SEQ ID NO: 3997 - DNA, 15 bp, Homo sapiens
cagaattatagcatc

SEQ ID NO: 3998 - DNA, 15 bp, Homo sapiens
acagaattatagcat

SEQ ID NO: 3999 - DNA, 15 bp, Homo sapiens
aacagaattatagca

SEQ ID NO: 4000 - DNA, 15 bp, Homo sapiens
aaacagaattatagc

SEQ ID NO: 4001 - DNA, 15 bp, Homo sapiens
aaaacagaattatag

SEQ ID NO: 4002 - DNA, 15 bp, Homo sapiens
taaaacagaattata

SEQ ID NO: 4003 - DNA, 15 bp, Homo sapiens
gtaaaacagaattat

SEQ ID NO: 4004 - DNA, 15 bp, Homo sapiens
tgtaaaacagaatta

SEQ ID NO: 4005 - DNA, 15 bp, Homo sapiens
ctgtaaaacagaatt

SEQ ID NO: 4006 - DNA, 15 bp, Homo sapiens
cctgtaaaacagaat

SEQ ID NO: 4007 - DNA, 15 bp, Homo sapiens
acctgtaaaacagaa

SEQ ID NO: 4008 - DNA, 15 bp, Homo sapiens
cacctgtaaaacaga

SEQ ID NO: 4009 - DNA, 15 bp, Homo sapiens
tcacctgtaaaacag

SEQ ID NO: 4010 - DNA, 15 bp, Homo sapiens
ctcacctgtaaaaca

SEQ ID NO: 4011 - DNA, 15 bp, Homo sapiens
cctcacctgtaaaac

SEQ ID NO: 4012 - DNA, 15 bp, Homo sapiens
ccctcacctgtaaaa

SEQ ID NO: 4013 - DNA, 15 bp, Homo sapiens
accctcacctgtaaa

SEQ ID NO: 4014 - DNA, 15 bp, Homo sapiens
gaccctcacctgtaa

SEQ ID NO: 4015 - DNA, 15 bp, Homo sapiens
ggaccctcacctgta

SEQ ID NO: 4016 - DNA, 15 bp, Homo sapiens
aggaccctcacctgt

SEQ ID NO: 4017 - DNA, 15 bp, Homo sapiens
caggaccctcacctg

SEQ ID NO: 4018 - DNA, 15 bp, Homo sapiens
tcaggaccctcacct

SEQ ID NO: 4019 - DNA, 15 bp, Homo sapiens
ctcaggaccctcacc

SEQ ID NO: 4020 - DNA, 15 bp, Homo sapiens
cctcaggaccctcac

SEQ ID NO: 4021 - DNA, 15 bp, Homo sapiens
gcctcaggaccctca

SEQ ID NO: 4022 - DNA, 15 bp, Homo sapiens
tgcctcaggaccctc

SEQ ID NO: 4023 - DNA, 15 bp, Homo sapiens
atgcctcaggaccct

SEQ ID NO: 4024 - DNA, 15 bp, Homo sapiens
catgcctcaggaccc

SEQ ID NO: 4025 - DNA, 15 bp, Homo sapiens
ccatgcctcaggacc

SEQ ID NO: 4026 - DNA, 15 bp, Homo sapiens
accatgcctcaggac

SEQ ID NO: 4027 - DNA, 15 bp, Homo sapiens
caccatgcctcagga

SEQ ID NO: 4028 - DNA, 15 bp, Homo sapiens
acaccatgcctcagg

SEQ ID NO: 4029 - DNA, 15 bp, Homo sapiens
tacaccatgcctcag

SEQ ID NO: 4030 - DNA, 15 bp, Homo sapiens
ctacaccatgcctca

SEQ ID NO: 4031 - DNA, 15 bp, Homo sapiens
actacaccatgcctc

SEQ ID NO: 4032 - DNA, 15 bp, Homo sapiens
aactacaccatgcct

SEQ ID NO: 4033 - DNA, 15 bp, Homo sapiens
taactacaccatgcc

SEQ ID NO: 4034 - DNA, 15 bp, Homo sapiens
ttaactacaccatgc

SEQ ID NO: 4035 - DNA, 15 bp, Homo sapiens
tttaactacaccatg

SEQ ID NO: 4036 - DNA, 15 bp, Homo sapiens
atttaactacaccat

SEQ ID NO: 4037 - DNA, 15 bp, Homo sapiens
catttaactacacca

SEQ ID NO: 4038 - DNA, 15 bp, Homo sapiens
gcatttaactacacc

SEQ ID NO: 4039 - DNA, 15 bp, Homo sapiens
cgcatttaactacac

SEQ ID NO: 4040 - DNA, 15 bp, Homo sapiens
acgcatttaactaca

SEQ ID NO: 4041 - DNA, 15 bp, Homo sapiens
aacgcatttaactac

SEQ ID NO: 4042 - DNA, 15 bp, Homo sapiens
caacgcatttaacta

SEQ ID NO: 4043 - DNA, 15 bp, Homo sapiens
ccaacgcatttaact

SEQ ID NO: 4044 - DNA, 15 bp, Homo sapiens
gccaacgcatttaac

SEQ ID NO: 4045 - DNA, 15 bp, Homo sapiens
ggccaacgcatttaa

SEQ ID NO: 4046 - DNA, 15 bp, Homo sapiens
tggccaacgcattta

SEQ ID NO: 4047 - DNA, 15 bp, Homo sapiens
ttggccaacgcattt

SEQ ID NO: 4048 - DNA, 15 bp, Homo sapiens
cttggccaacgcatt

SEQ ID NO: 4049 - DNA, 15 bp, Homo sapiens
ccttggccaacgcat

SEQ ID NO: 4050 - DNA, 15 bp, Homo sapiens
accttggccaacgca

SEQ ID NO: 4051 - DNA, 15 bp, Homo sapiens
gaccttggccaacgc

SEQ ID NO: 4052 - DNA, 15 bp, Homo sapiens
tgaccttggccaacg

SEQ ID NO: 4053 - DNA, 15 bp, Homo sapiens
gtgaccttggccaac

SEQ ID NO: 4054 - DNA, 15 bp, Homo sapiens
tgtgaccttggccaa

SEQ ID NO: 4055 - DNA, 15 bp, Homo sapiens
ttgtgaccttggcca

SEQ ID NO: 4056 - DNA, 15 bp, Homo sapiens
cttgtgaccttggcc

SEQ ID NO: 4057 - DNA, 15 bp, Homo sapiens
ccttgtgaccttggc

SEQ ID NO: 4058 - DNA, 15 bp, Homo sapiens
gccttgtgaccttgg

SEQ ID NO: 4059 - DNA, 15 bp, Homo sapiens
ggccttgtgaccttg

SEQ ID NO: 4060 - DNA, 15 bp, Homo sapiens
tggccttgtgacctt

SEQ ID NO: 4061 - DNA, 15 bp, Homo sapiens
ctggccttgtgacct

SEQ ID NO: 4062 - DNA, 15 bp, Homo sapiens
actggccttgtgacc

SEQ ID NO: 4063 - DNA, 15 bp, Homo sapiens
tactggccttgtgac

SEQ ID NO: 4064 - DNA, 15 bp, Homo sapiens
ttactggccttgtga

SEQ ID NO: 4065 - DNA, 15 bp, Homo sapiens
cttactggccttgtg

SEQ ID NO: 4066 - DNA, 15 bp, Homo sapiens
acttactggccttgt

SEQ ID NO: 4067 - DNA, 15 bp, Homo sapiens
cacttactggccttg

SEQ ID NO: 4068 - DNA, 15 bp, Homo sapiens
ccacttactggcctt

SEQ ID NO: 4069 - DNA, 15 bp, Homo sapiens
gccacttactggcct

SEQ ID NO: 4070 - DNA, 15 bp, Homo sapiens
tgccacttactggcc

SEQ ID NO: 4071 - DNA, 15 bp, Homo sapiens
ctgccacttactggc

SEQ ID NO: 4072 - DNA, 15 bp, Homo sapiens
gctgccacttactgg

SEQ ID NO: 4073 - DNA, 15 bp, Homo sapiens
cgctgccacttactg

SEQ ID NO: 4074 - DNA, 15 bp, Homo sapiens
gcgctgccacttact

SEQ ID NO: 4075 - DNA, 15 bp, Homo sapiens
ggcgctgccacttac

SEQ ID NO: 4076 - DNA, 15 bp, Homo sapiens
tggcgctgccactta

SEQ ID NO: 4077 - DNA, 15 bp, Homo sapiens
ctggcgctgccactt

SEQ ID NO: 4078 - DNA, 15 bp, Homo sapiens
cctggcgctgccact

SEQ ID NO: 4079 - DNA, 15 bp, Homo sapiens
tcctggcgctgccac

SEQ ID NO: 4080 - DNA, 15 bp, Homo sapiens
atcctggcgctgcca

SEQ ID NO: 4081 - DNA, 15 bp, Homo sapiens
aatcctggcgctgcc

SEQ ID NO: 4082 - DNA, 15 bp, Homo sapiens
aaatcctggcgctgc

SEQ ID NO: 4083 - DNA, 15 bp, Homo sapiens
caaatcctggcgctg

SEQ ID NO: 4084 - DNA, 15 bp, Homo sapiens
tcaaatcctggcgct

SEQ ID NO: 4085 - DNA, 15 bp, Homo sapiens
ttcaaatcctggcgc

SEQ ID NO: 4086 - DNA, 15 bp, Homo sapiens
gttcaaatcctggcg

SEQ ID NO: 4087 - DNA, 15 bp, Homo sapiens
ggttcaaatcctggc

SEQ ID NO: 4088 - DNA, 15 bp, Homo sapiens
gggttcaaatcctgg

SEQ ID NO: 4089 - DNA, 15 bp, Homo sapiens
tgggttcaaatcctg

SEQ ID NO: 4090 - DNA, 15 bp, Homo sapiens
ctgggttcaaatcct

SEQ ID NO: 4091 - DNA, 15 bp, Homo sapiens
cctgggttcaaatcc

SEQ ID NO: 4092 - DNA, 15 bp, Homo sapiens
gcctgggttcaaatc

SEQ ID NO: 4093 - DNA, 15 bp, Homo sapiens
tgcctgggttcaaat

SEQ ID NO: 4094 - DNA, 15 bp, Homo sapiens
ttgcctgggttcaaa

SEQ ID NO: 4095 - DNA, 15 bp, Homo sapiens
attgcctgggttcaa

SEQ ID NO: 4096 - DNA, 15 bp, Homo sapiens
gattgcctgggttca

SEQ ID NO: 4097 - DNA, 15 bp, Homo sapiens
agattgcctgggttc

SEQ ID NO: 4098 - DNA, 15 bp, Homo sapiens
tagattgcctgggtt

SEQ ID NO: 4099 - DNA, 15 bp, Homo sapiens
atagattgcctgggt

SEQ ID NO: 4100 - DNA, 15 bp, Homo sapiens
catagattgcctggg

SEQ ID NO: 4101 - DNA, 15 bp, Homo sapiens
gcatagattgcctgg

SEQ ID NO: 4102 - DNA, 15 bp, Homo sapiens
ggcatagattgcctg

SEQ ID NO: 4103 - DNA, 15 bp, Homo sapiens
tggcatagattgcct

SEQ ID NO: 4104 - DNA, 15 bp, Homo sapiens
ctggcatagattgcc

SEQ ID NO: 4105 - DNA, 15 bp, Homo sapiens
tctggcatagattgc

SEQ ID NO: 4106 - DNA, 15 bp, Homo sapiens
ttctggcatagattg

SEQ ID NO: 4107 - DNA, 15 bp, Homo sapiens
attctggcatagatt

SEQ ID NO: 4108 - DNA, 15 bp, Homo sapiens
gattctggcatagat

SEQ ID NO: 4109 - DNA, 15 bp, Homo sapiens
ggattctggcataga

SEQ ID NO: 4110 - DNA, 15 bp, Homo sapiens
tggattctggcatag

SEQ ID NO: 4111 - DNA, 15 bp, Homo sapiens
gtggattctggcata

SEQ ID NO: 4112 - DNA, 15 bp, Homo sapiens
tgtggattctggcat

SEQ ID NO: 4113 - DNA, 15 bp, Homo sapiens
gtgtggattctggca

SEQ ID NO: 4114 - DNA, 15 bp, Homo sapiens
agtgtggattctggc

SEQ ID NO: 4115 - DNA, 15 bp, Homo sapiens
gagtgtggattctgg

SEQ ID NO: 4116 - DNA, 15 bp, Homo sapiens
agagtgtggattctg

SEQ ID NO: 4117 - DNA, 15 bp, Homo sapiens
aagagtgtggattct

SEQ ID NO: 4118 - DNA, 15 bp, Homo sapiens
taagagtgtggattc

SEQ ID NO: 4119 - DNA, 15 bp, Homo sapiens
ttaagagtgtggatt

SEQ ID NO: 4120 - DNA, 15 bp, Homo sapiens
attaagagtgtggat

SEQ ID NO: 4121 - DNA, 15 bp, Homo sapiens
cattaagagtgtgga

SEQ ID NO: 4122 - DNA, 15 bp, Homo sapiens
gcattaagagtgtgg

SEQ ID NO: 4123 - DNA, 15 bp, Homo sapiens
agcattaagagtgtg

SEQ ID NO: 4124 - DNA, 15 bp, Homo sapiens
cagcattaagagtgt

SEQ ID NO: 4125 - DNA, 15 bp, Homo sapiens
acagcattaagagtg

SEQ ID NO: 4126 - DNA, 15 bp, Homo sapiens
tacagcattaagagt

SEQ ID NO: 4127 - DNA, 15 bp, Homo sapiens
ttacagcattaagag

SEQ ID NO: 4128 - DNA, 15 bp, Homo sapiens
cttacagcattaaga

SEQ ID NO: 4129 - DNA, 15 bp, Homo sapiens
tcttacagcattaag

SEQ ID NO: 4130 - DNA, 15 bp, Homo sapiens
ttcttacagcattaa

SEQ ID NO: 4131 - DNA, 15 bp, Homo sapiens
tttcttacagcatta

SEQ ID NO: 4132 - DNA, 15 bp, Homo sapiens
ttttcttacagcatt

SEQ ID NO: 4133 - DNA, 15 bp, Homo sapiens
tttttcttacagcat

SEQ ID NO: 4134 - DNA, 15 bp, Homo sapiens
gtttttcttacagca

SEQ ID NO: 4135 - DNA, 15 bp, Homo sapiens
ggtttttcttacagc

SEQ ID NO: 4136 - DNA, 15 bp, Homo sapiens
tggtttttcttacag

SEQ ID NO: 4137 - DNA, 15 bp, Homo sapiens
atggtttttcttaca

SEQ ID NO: 4138 - DNA, 15 bp, Homo sapiens
catggtttttcttac

SEQ ID NO: 4139 - DNA, 15 bp, Homo sapiens
gcatggtttttctta

SEQ ID NO: 4140 - DNA, 15 bp, Homo sapiens
agcatggtttttctt

SEQ ID NO: 4141 - DNA, 15 bp, Homo sapiens
cagcatggtttttct

SEQ ID NO: 4142 - DNA, 15 bp, Homo sapiens
gcagcatggtttttc

SEQ ID NO: 4143 - DNA, 15 bp, Homo sapiens
ggcagcatggttttt

SEQ ID NO: 4144 - DNA, 15 bp, Homo sapiens
aggcagcatggtttt

SEQ ID NO: 4145 - DNA, 15 bp, Homo sapiens
caggcagcatggttt

SEQ ID NO: 4146 - DNA, 15 bp, Homo sapiens
gcaggcagcatggtt

SEQ ID NO: 4147 - DNA, 15 bp, Homo sapiens
ggcaggcagcatggt

SEQ ID NO: 4148 - DNA, 15 bp, Homo sapiens
gggcaggcagcatgg

SEQ ID NO: 4149 - DNA, 15 bp, Homo sapiens
ggggcaggcagcatg

SEQ ID NO: 4150 - DNA, 15 bp, Homo sapiens
gggggcaggcagcat

SEQ ID NO: 4151 - DNA, 15 bp, Homo sapiens
agggggcaggcagca

SEQ ID NO: 4152 - DNA, 15 bp, Homo sapiens
aagggggcaggcagc

SEQ ID NO: 4153 - DNA, 15 bp, Homo sapiens
aaagggggcaggcag

SEQ ID NO: 4154 - DNA, 15 bp, Homo sapiens
taaagggggcaggca

SEQ ID NO: 4155 - DNA, 15 bp, Homo sapiens
ttaaagggggcaggc

SEQ ID NO: 4156 - DNA, 15 bp, Homo sapiens
tttaaagggggcagg

SEQ ID NO: 4157 - DNA, 15 bp, Homo sapiens
atttaaagggggcag

SEQ ID NO: 4158 - DNA, 15 bp, Homo sapiens
catttaaagggggca

SEQ ID NO: 4159 - DNA, 15 bp, Homo sapiens
tcatttaaagggggc

SEQ ID NO: 4160 - DNA, 15 bp, Homo sapiens
ttcatttaaaggggg

SEQ ID NO: 4161 - DNA, 15 bp, Homo sapiens
cttcatttaaagggg

SEQ ID NO: 4162 - DNA, 15 bp, Homo sapiens
acttcatttaaaggg

SEQ ID NO: 4163 - DNA, 15 bp, Homo sapiens
gacttcatttaaagg

SEQ ID NO: 4164 - DNA, 15 bp, Homo sapiens
agacttcatttaaag

SEQ ID NO: 4165 - DNA, 15 bp, Homo sapiens
gagacttcatttaaa

SEQ ID NO: 4166 - DNA, 15 bp, Homo sapiens
tgagacttcatttaa

SEQ ID NO: 4167 - DNA, 15 bp, Homo sapiens
ctgagacttcattta

SEQ ID NO: 4168 - DNA, 15 bp, Homo sapiens
tctgagacttcattt

SEQ ID NO: 4169 - DNA, 15 bp, Homo sapiens
atctgagacttcatt

SEQ ID NO: 4170 - DNA, 15 bp, Homo sapiens
aatctgagacttcat

SEQ ID NO: 4171 - DNA, 15 bp, Homo sapiens
taatctgagacttca

SEQ ID NO: 4172 - DNA, 15 bp, Homo sapiens
ataatctgagacttc

SEQ ID NO: 4173 - DNA, 15 bp, Homo sapiens
cataatctgagactt

SEQ ID NO: 4174 - DNA, 15 bp, Homo sapiens
ccataatctgagact

SEQ ID NO: 4175 - DNA, 15 bp, Homo sapiens
accataatctgagac

SEQ ID NO: 4176 - DNA, 15 bp, Homo sapiens
caccataatctgaga

SEQ ID NO: 4177 - DNA, 15 bp, Homo sapiens
ccaccataatctgag

SEQ ID NO: 4178 - DNA, 15 bp, Homo sapiens
cccaccataatctga

SEQ ID NO: 4179 - DNA, 15 bp, Homo sapiens
ccccaccataatctg

SEQ ID NO: 4180 - DNA, 15 bp, Homo sapiens
gccccaccataatct

SEQ ID NO: 4181 - DNA, 15 bp, Homo sapiens
agccccaccataatc

SEQ ID NO: 4182 - DNA, 15 bp, Homo sapiens
gagccccaccataat

SEQ ID NO: 4183 - DNA, 15 bp, Homo sapiens
tgagccccaccataa

SEQ ID NO: 4184 - DNA, 15 bp, Homo sapiens
gtgagccccaccata

SEQ ID NO: 4185 - DNA, 15 bp, Homo sapiens
tgtgagccccaccat

SEQ ID NO: 4186 - DNA, 15 bp, Homo sapiens
ctgtgagccccacca

SEQ ID NO: 4187 - DNA, 15 bp, Homo sapiens
cctgtgagccccacc

SEQ ID NO: 4188 - DNA, 15 bp, Homo sapiens
acctgtgagccccac

SEQ ID NO: 4189 - DNA, 15 bp, Homo sapiens
cacctgtgagcccca

SEQ ID NO: 4190 - DNA, 15 bp, Homo sapiens
ccacctgtgagcccc

SEQ ID NO: 4191 - DNA, 15 bp, Homo sapiens
cccacctgtgagccc

SEQ ID NO: 4192 - DNA, 15 bp, Homo sapiens
acccacctgtgagcc

SEQ ID NO: 4193 - DNA, 15 bp, Homo sapiens
cacccacctgtgagc

SEQ ID NO: 4194 - DNA, 15 bp, Homo sapiens
tcacccacctgtgag

SEQ ID NO: 4195 - DNA, 15 bp, Homo sapiens
ctcacccacctgtga

SEQ ID NO: 4196 - DNA, 15 bp, Homo sapiens
actcacccacctgtg

SEQ ID NO: 4197 - DNA, 15 bp, Homo sapiens
cactcacccacctgt

SEQ ID NO: 4198 - DNA, 15 bp, Homo sapiens
ccactcacccacctg

SEQ ID NO: 4199 - DNA, 15 bp, Homo sapiens
cccactcacccacct

SEQ ID NO: 4200 - DNA, 15 bp, Homo sapiens
acccactcacccacc

SEQ ID NO: 4201 - DNA, 15 bp, Homo sapiens
tacccactcacccac

SEQ ID NO: 4202 - DNA, 15 bp, Homo sapiens
gtacccactcaccca

SEQ ID NO: 4203 - DNA, 15 bp, Homo sapiens
ggtacccactcaccc

SEQ ID NO: 4204 - DNA, 15 bp, Homo sapiens
aggtacccactcacc

SEQ ID NO: 4205 - DNA, 15 bp, Homo sapiens
caggtacccactcac

SEQ ID NO: 4206 - DNA, 15 bp, Homo sapiens
gcaggtacccactca

SEQ ID NO: 4207 - DNA, 15 bp, Homo sapiens
ggcaggtacccactc

SEQ ID NO: 4208 - DNA, 15 bp, Homo sapiens
aggcaggtacccact

SEQ ID NO: 4209 - DNA, 15 bp, Homo sapiens
caggcaggtacccac

SEQ ID NO: 4210 - DNA, 15 bp, Homo sapiens
gcaggcaggtaccca

SEQ ID NO: 4211 - DNA, 15 bp, Homo sapiens
ggcaggcaggtaccc

SEQ ID NO: 4212 - DNA, 15 bp, Homo sapiens
aggcaggcaggtacc

SEQ ID NO: 4213 - DNA, 15 bp, Homo sapiens
caggcaggcaggtac

SEQ ID NO: 4214 - DNA, 15 bp, Homo sapiens
gcaggcaggcaggta

SEQ ID NO: 4215 - DNA, 15 bp, Homo sapiens
agcaggcaggcaggt

SEQ ID NO: 4216 - DNA, 15 bp, Homo sapiens
gagcaggcaggcagg

SEQ ID NO: 4217 - DNA, 15 bp, Homo sapiens
tgagcaggcaggcag

SEQ ID NO: 4218 - DNA, 15 bp, Homo sapiens
ctgagcaggcaggca

SEQ ID NO: 4219 - DNA, 15 bp, Homo sapiens
actgagcaggcaggc

SEQ ID NO: 4220 - DNA, 15 bp, Homo sapiens
aactgagcaggcagg

SEQ ID NO: 4221 - DNA, 15 bp, Homo sapiens
taactgagcaggcag

SEQ ID NO: 4222 - DNA, 15 bp, Homo sapiens
gtaactgagcaggca

SEQ ID NO: 4223 - DNA, 15 bp, Homo sapiens
ggtaactgagcaggc

SEQ ID NO: 4224 - DNA, 15 bp, Homo sapiens
gggtaactgagcagg

SEQ ID NO: 4225 - DNA, 15 bp, Homo sapiens
tgggtaactgagcag

SEQ ID NO: 4226 - DNA, 15 bp, Homo sapiens
ctgggtaactgagca

SEQ ID NO: 4227 - DNA, 15 bp, Homo sapiens
cctgggtaactgagc

SEQ ID NO: 4228 - DNA, 15 bp, Homo sapiens
gcctgggtaactgag

SEQ ID NO: 4229 - DNA, 15 bp, Homo sapiens
tgcctgggtaactga

SEQ ID NO: 4230 - DNA, 15 bp, Homo sapiens
gtgcctgggtaactg

SEQ ID NO: 4231 - DNA, 15 bp, Homo sapiens
tgtgcctgggtaact

SEQ ID NO: 4232 - DNA, 15 bp, Homo sapiens
atgtgcctgggtaac

SEQ ID NO: 4233 - DNA, 15 bp, Homo sapiens
gatgtgcctgggtaa

SEQ ID NO: 4234 - DNA, 15 bp, Homo sapiens
agatgtgcctgggta

SEQ ID NO: 4235 - DNA, 15 bp, Homo sapiens
cagatgtgcctgggt

SEQ ID NO: 4236 - DNA, 15 bp, Homo sapiens
gcagatgtgcctggg

SEQ ID NO: 4237 - DNA, 15 bp, Homo sapiens
ggcagatgtgcctgg

SEQ ID NO: 4238 - DNA, 15 bp, Homo sapiens
gggcagatgtgcctg

SEQ ID NO: 4239 - DNA, 15 bp, Homo sapiens
tgggcagatgtgcct

SEQ ID NO: 4240 - DNA, 15 bp, Homo sapiens
gtgggcagatgtgcc

SEQ ID NO: 4241 - DNA, 15 bp, Homo sapiens
ggtgggcagatgtgc

SEQ ID NO: 4242 - DNA, 15 bp, Homo sapiens
tggtgggcagatgtg

SEQ ID NO: 4243 - DNA, 15 bp, Homo sapiens
ctggtgggcagatgt

SEQ ID NO: 4244 - DNA, 15 bp, Homo sapiens
tctggtgggcagatg

SEQ ID NO: 4245 - DNA, 15 bp, Homo sapiens
gtctggtgggcagat

SEQ ID NO: 4246 - DNA, 15 bp, Homo sapiens
ggtctggtgggcaga

SEQ ID NO: 4247 - DNA, 15 bp, Homo sapiens
cggtctggtgggcag

SEQ ID NO: 4248 - DNA, 15 bp, Homo sapiens
ccggtctggtgggca

SEQ ID NO: 4249 - DNA, 15 bp, Homo sapiens
tccggtctggtgggc

SEQ ID NO: 4250 - DNA, 15 bp, Homo sapiens
ctccggtctggtggg

SEQ ID NO: 4251 - DNA, 15 bp, Homo sapiens
gctccggtctggtgg

SEQ ID NO: 4252 - DNA, 15 bp, Homo sapiens
agctccggtctggtg

SEQ ID NO: 4253 - DNA, 15 bp, Homo sapiens
tagctccggtctggt

SEQ ID NO: 4254 - DNA, 15 bp, Homo sapiens
ctagctccggtctgg

SEQ ID NO: 4255 - DNA, 15 bp, Homo sapiens
tctagctccggtctg

SEQ ID NO: 4256 - DNA, 15 bp, Homo sapiens
gtctagctccggtct

SEQ ID NO: 4257 - DNA, 15 bp, Homo sapiens
ggtctagctccggtc

SEQ ID NO: 4258 - DNA, 15 bp, Homo sapiens
aggtctagctccggt

SEQ ID NO: 4259 - DNA, 15 bp, Homo sapiens
aaggtctagctccgg

SEQ ID NO: 4260 - DNA, 15 bp, Homo sapiens
aaaggtctagctccg

SEQ ID NO: 4261 - DNA, 15 bp, Homo sapiens
gaaaggtctagctcc

SEQ ID NO: 4262 - DNA, 15 bp, Homo sapiens
agaaaggtctagctc

SEQ ID NO: 4263 - DNA, 15 bp, Homo sapiens
cagaaaggtctagct

SEQ ID NO: 4264 - DNA, 15 bp, Homo sapiens
tcagaaaggtctagc

SEQ ID NO: 4265 - DNA, 15 bp, Homo sapiens
ttcagaaaggtctag

SEQ ID NO: 4266 - DNA, 15 bp, Homo sapiens
gttcagaaaggtcta

SEQ ID NO: 4267 - DNA, 15 bp, Homo sapiens
ggttcagaaaggtct

SEQ ID NO: 4268 - DNA, 15 bp, Homo sapiens
tggttcagaaaggtc

SEQ ID NO: 4269 - DNA, 15 bp, Homo sapiens
gtggttcagaaaggt

SEQ ID NO: 4270 - DNA, 15 bp, Homo sapiens
agtggttcagaaagg

SEQ ID NO: 4271 - DNA, 15 bp, Homo sapiens
gagtggttcagaaag

SEQ ID NO: 4272 - DNA, 15 bp, Homo sapiens
tgagtggttcagaaa

SEQ ID NO: 4273 - DNA, 15 bp, Homo sapiens
gtgagtggttcagaa

SEQ ID NO: 4274 - DNA, 15 bp, Homo sapiens
tgtgagtggttcaga

SEQ ID NO: 4275 - DNA, 15 bp, Homo sapiens
ctgtgagtggttcag

SEQ ID NO: 4276 - DNA, 15 bp, Homo sapiens
gctgtgagtggttca

SEQ ID NO: 4277 - DNA, 15 bp, Homo sapiens
ggctgtgagtggttc

SEQ ID NO: 4278 - DNA, 15 bp, Homo sapiens
aggctgtgagtggtt

SEQ ID NO: 4279 - DNA, 15 bp, Homo sapiens
taggctgtgagtggt

SEQ ID NO: 4280 - DNA, 15 bp, Homo sapiens
ttaggctgtgagtgg

SEQ ID NO: 4281 - DNA, 15 bp, Homo sapiens
cttaggctgtgagtg

SEQ ID NO: 4282 - DNA, 15 bp, Homo sapiens
ccttaggctgtgagt

SEQ ID NO: 4283 - DNA, 15 bp, Homo sapiens
gccttaggctgtgag

SEQ ID NO: 4284 - DNA, 15 bp, Homo sapiens
ggccttaggctgtga

SEQ ID NO: 4285 - DNA, 15 bp, Homo sapiens
aggccttaggctgtg

SEQ ID NO: 4286 - DNA, 15 bp, Homo sapiens
aaggccttaggctgt

SEQ ID NO: 4287 - DNA, 15 bp, Homo sapiens
taaggccttaggctg

SEQ ID NO: 4288 - DNA, 15 bp, Homo sapiens
gtaaggccttaggct

SEQ ID NO: 4289 - DNA, 15 bp, Homo sapiens
ggtaaggccttaggc

SEQ ID NO: 4290 - DNA, 15 bp, Homo sapiens
tggtaaggccttagg

SEQ ID NO: 4291 - DNA, 15 bp, Homo sapiens
ctggtaaggccttag

SEQ ID NO: 4292 - DNA, 15 bp, Homo sapiens
tctggtaaggcctta

SEQ ID NO: 4293 - DNA, 15 bp, Homo sapiens
ttctggtaaggcctt

SEQ ID NO: 4294 - DNA, 15 bp, Homo sapiens
gttctggtaaggcct

SEQ ID NO: 4295 - DNA, 15 bp, Homo sapiens
ggttctggtaaggcc

SEQ ID NO: 4296 - DNA, 15 bp, Homo sapiens
tggttctggtaaggc

SEQ ID NO: 4297 - DNA, 15 bp, Homo sapiens
ctggttctggtaagg

SEQ ID NO: 4298 - DNA, 15 bp, Homo sapiens
gctggttctggtaag

SEQ ID NO: 4299 - DNA, 15 bp, Homo sapiens
tgctggttctggtaa

SEQ ID NO: 4300 - DNA, 15 bp, Homo sapiens
ctgctggttctggta

SEQ ID NO: 4301 - DNA, 15 bp, Homo sapiens
tctgctggttctggt

SEQ ID NO: 4302 - DNA, 15 bp, Homo sapiens
ttctgctggttctgg

SEQ ID NO: 4303 - DNA, 15 bp, Homo sapiens
gttctgctggttctg

SEQ ID NO: 4304 - DNA, 15 bp, Homo sapiens
ggttctgctggttct

SEQ ID NO: 4305 - DNA, 15 bp, Homo sapiens
gggttctgctggttc

SEQ ID NO: 4306 - DNA, 15 bp, Homo sapiens
tgggttctgctggtt

SEQ ID NO: 4307 - DNA, 15 bp, Homo sapiens
gtgggttctgctggt

SEQ ID NO: 4308 - DNA, 15 bp, Homo sapiens
tgtgggttctgctgg

SEQ ID NO: 4309 - DNA, 15 bp, Homo sapiens
ttgtgggttctgctg

SEQ ID NO: 4310 - DNA, 15 bp, Homo sapiens
tttgtgggttctgct

SEQ ID NO: 4311 - DNA, 15 bp, Homo sapiens
atttgtgggttctgc

SEQ ID NO: 4312 - DNA, 15 bp, Homo sapiens
catttgtgggttctg

SEQ ID NO: 4313 - DNA, 15 bp, Homo sapiens
acatttgtgggttct

SEQ ID NO: 4314 - DNA, 15 bp, Homo sapiens
gacatttgtgggttc

SEQ ID NO: 4315 - DNA, 15 bp, Homo sapiens
agacatttgtgggtt

SEQ ID NO: 4316 - DNA, 15 bp, Homo sapiens
aagacatttgtgggt

SEQ ID NO: 4317 - DNA, 15 bp, Homo sapiens
taagacatttgtggg

SEQ ID NO: 4318 - DNA, 15 bp, Homo sapiens
gtaagacatttgtgg

SEQ ID NO: 4319 - DNA, 15 bp, Homo sapiens
agtaagacatttgtg

SEQ ID NO: 4320 - DNA, 15 bp, Homo sapiens
cagtaagacatttgt

SEQ ID NO: 4321 - DNA, 15 bp, Homo sapiens
gcagtaagacatttg

SEQ ID NO: 4322 - DNA, 15 bp, Homo sapiens
tgcagtaagacattt

SEQ ID NO: 4323 - DNA, 15 bp, Homo sapiens
ctgcagtaagacatt

SEQ ID NO: 4324 - DNA, 15 bp, Homo sapiens
gctgcagtaagacat

SEQ ID NO: 4325 - DNA, 15 bp, Homo sapiens
ggctgcagtaagaca

SEQ ID NO: 4326 - DNA, 15 bp, Homo sapiens
tggctgcagtaagac

SEQ ID NO: 4327 - DNA, 15 bp, Homo sapiens
ctggctgcagtaaga

SEQ ID NO: 4328 - DNA, 15 bp, Homo sapiens
cctggctgcagtaag

SEQ ID NO: 4329 - DNA, 15 bp, Homo sapiens
ccctggctgcagtaa

SEQ ID NO: 4330 - DNA, 15 bp, Homo sapiens
cccctggctgcagta

SEQ ID NO: 4331 - DNA, 15 bp, Homo sapiens
gcccctggctgcagt

SEQ ID NO: 4332 - DNA, 15 bp, Homo sapiens
agcccctggctgcag

SEQ ID NO: 4333 - DNA, 15 bp, Homo sapiens
aagcccctggctgca

SEQ ID NO: 4334 - DNA, 15 bp, Homo sapiens
gaagcccctggctgc

SEQ ID NO: 4335 - DNA, 15 bp, Homo sapiens
agaagcccctggctg

SEQ ID NO: 4336 - DNA, 15 bp, Homo sapiens
cagaagcccctggct

SEQ ID NO: 4337 - DNA, 15 bp, Homo sapiens
tcagaagcccctggc

SEQ ID NO: 4338 - DNA, 15 bp, Homo sapiens
gtcagaagcccctgg

SEQ ID NO: 4339 - DNA, 15 bp, Homo sapiens
ggtcagaagcccctg

SEQ ID NO: 4340 - DNA, 15 bp, Homo sapiens
tggtcagaagcccct

SEQ ID NO: 4341 - DNA, 15 bp, Homo sapiens
ttggtcagaagcccc

SEQ ID NO: 4342 - DNA, 15 bp, Homo sapiens
cttggtcagaagccc

SEQ ID NO: 4343 - DNA, 15 bp, Homo sapiens
gcttggtcagaagcc

SEQ ID NO: 4344 - DNA, 15 bp, Homo sapiens
cgcttggtcagaagc

SEQ ID NO: 4345 - DNA, 15 bp, Homo sapiens
acgcttggtcagaag

SEQ ID NO: 4346 - DNA, 15 bp, Homo sapiens
tacgcttggtcagaa

SEQ ID NO: 4347 - DNA, 15 bp, Homo sapiens
atacgcttggtcaga

SEQ ID NO: 4348 - DNA, 15 bp, Homo sapiens
tatacgcttggtcag

SEQ ID NO: 4349 - DNA, 15 bp, Homo sapiens
gtatacgcttggtca

SEQ ID NO: 4350 - DNA, 15 bp, Homo sapiens
tgtatacgcttggtc

SEQ ID NO: 4351 - DNA, 15 bp, Homo sapiens
atgtatacgcttggt

SEQ ID NO: 4352 - DNA, 15 bp, Homo sapiens
tatgtatacgcttgg

SEQ ID NO: 4353 - DNA, 15 bp, Homo sapiens
gtatgtatacgcttg

SEQ ID NO: 4354 - DNA, 15 bp, Homo sapiens
tgtatgtatacgctt

SEQ ID NO: 4355 - DNA, 15 bp, Homo sapiens
ttgtatgtatacgct

SEQ ID NO: 4356 - DNA, 15 bp, Homo sapiens
cttgtatgtatacgc

SEQ ID NO: 4357 - DNA, 15 bp, Homo sapiens
ccttgtatgtatacg

SEQ ID NO: 4358 - DNA, 15 bp, Homo sapiens
accttgtatgtatac

SEQ ID NO: 4359 - DNA, 15 bp, Homo sapiens
gaccttgtatgtata

SEQ ID NO: 4360 - DNA, 15 bp, Homo sapiens
ggaccttgtatgtat

SEQ ID NO: 4361 - DNA, 15 bp, Homo sapiens
tggaccttgtatgta

SEQ ID NO: 4362 - DNA, 15 bp, Homo sapiens
ttggaccttgtatgt

SEQ ID NO: 4363 - DNA, 15 bp, Homo sapiens
tttggaccttgtatg

SEQ ID NO: 4364 - DNA, 15 bp, Homo sapiens
ttttggaccttgtat

SEQ ID NO: 4365 - DNA, 15 bp, Homo sapiens
tttttggaccttgta

SEQ ID NO: 4366 - DNA, 15 bp, Homo sapiens
ctttttggaccttgt

SEQ ID NO: 4367 - DNA, 15 bp, Homo sapiens
gctttttggaccttg

SEQ ID NO: 4368 - DNA, 15 bp, Homo sapiens
tgctttttggacctt

SEQ ID NO: 4369 - DNA, 15 bp, Homo sapiens
atgctttttggacct

SEQ ID NO: 4370 - DNA, 15 bp, Homo sapiens
aatgctttttggacc

SEQ ID NO: 4371 - DNA, 15 bp, Homo sapiens
aaatgctttttggac

SEQ ID NO: 4372 - DNA, 15 bp, Homo sapiens
aaaatgctttttgga

SEQ ID NO: 4373 - DNA, 15 bp, Homo sapiens
gaaaatgctttttgg

SEQ ID NO: 4374 - DNA, 15 bp, Homo sapiens
ggaaaatgctttttg

SEQ ID NO: 4375 - DNA, 15 bp, Homo sapiens
gggaaaatgcttttt

SEQ ID NO: 4376 - DNA, 15 bp, Homo sapiens
tgggaaaatgctttt

SEQ ID NO: 4377 - DNA, 15 bp, Homo sapiens
atgggaaaatgcttt

SEQ ID NO: 4378 - DNA, 15 bp, Homo sapiens
aatgggaaaatgctt

SEQ ID NO: 4379 - DNA, 15 bp, Homo sapiens
aaatgggaaaatgct

SEQ ID NO: 4380 - DNA, 15 bp, Homo sapiens
gaaatgggaaaatgc

SEQ ID NO: 4381 - DNA, 15 bp, Homo sapiens
ggaaatgggaaaatg

SEQ ID NO: 4382 - DNA, 15 bp, Homo sapiens
tggaaatgggaaaat

SEQ ID NO: 4383 - DNA, 15 bp, Homo sapiens
atggaaatgggaaaa

SEQ ID NO: 4384 - DNA, 15 bp, Homo sapiens
aatggaaatgggaaa

SEQ ID NO: 4385 - DNA, 15 bp, Homo sapiens
gaatggaaatgggaa

SEQ ID NO: 4386 - DNA, 15 bp, Homo sapiens
ggaatggaaatggga

SEQ ID NO: 4387 - DNA, 15 bp, Homo sapiens
gggaatggaaatggg

SEQ ID NO: 4388 - DNA, 15 bp, Homo sapiens
tgggaatggaaatgg

SEQ ID NO: 4389 - DNA, 15 bp, Homo sapiens
ctgggaatggaaatg

SEQ ID NO: 4390 - DNA, 15 bp, Homo sapiens
actgggaatggaaat

SEQ ID NO: 4391 - DNA, 15 bp, Homo sapiens
gactgggaatggaaa

SEQ ID NO: 4392 - DNA, 15 bp, Homo sapiens
ggactgggaatggaa

SEQ ID NO: 4393 - DNA, 15 bp, Homo sapiens
aggactgggaatgga

SEQ ID NO: 4394 - DNA, 15 bp, Homo sapiens
gaggactgggaatgg

SEQ ID NO: 4395 - DNA, 15 bp, Homo sapiens
ggaggactgggaatg

SEQ ID NO: 4396 - DNA, 15 bp, Homo sapiens
gggaggactgggaat

SEQ ID NO: 4397 - DNA, 15 bp, Homo sapiens
tgggaggactgggaa

SEQ ID NO: 4398 - DNA, 15 bp, Homo sapiens
ctgggaggactggga

SEQ ID NO: 4399 - DNA, 15 bp, Homo sapiens
cctgggaggactggg

SEQ ID NO: 4400 - DNA, 15 bp, Homo sapiens
tcctgggaggactgg

SEQ ID NO: 4401 - DNA, 15 bp, Homo sapiens
ttcctgggaggactg

SEQ ID NO: 4402 - DNA, 15 bp, Homo sapiens
gttcctgggaggact

SEQ ID NO: 4403 - DNA, 15 bp, Homo sapiens
tgttcctgggaggac

SEQ ID NO: 4404 - DNA, 15 bp, Homo sapiens
ctgttcctgggagga

SEQ ID NO: 4405 - DNA, 15 bp, Homo sapiens
cctgttcctgggagg

SEQ ID NO: 4406 - DNA, 15 bp, Homo sapiens
ccctgttcctgggag

SEQ ID NO: 4407 - DNA, 15 bp, Homo sapiens
tccctgttcctggga

SEQ ID NO: 4408 - DNA, 15 bp, Homo sapiens
ttccctgttcctggg

SEQ ID NO: 4409 - DNA, 15 bp, Homo sapiens
tttccctgttcctgg

SEQ ID NO: 4410 - DNA, 15 bp, Homo sapiens
atttccctgttcctg

SEQ ID NO: 4411 - DNA, 15 bp, Homo sapiens
catttccctgttcct

SEQ ID NO: 4412 - DNA, 15 bp, Homo sapiens
acatttccctgttcc

SEQ ID NO: 4413 - DNA, 15 bp, Homo sapiens
tacatttccctgttc

SEQ ID NO: 4414 - DNA, 15 bp, Homo sapiens
atacatttccctgtt

SEQ ID NO: 4415 - DNA, 15 bp, Homo sapiens
tatacatttccctgt

SEQ ID NO: 4416 - DNA, 15 bp, Homo sapiens
gtatacatttccctg

SEQ ID NO: 4417 - DNA, 15 bp, Homo sapiens
tgtatacatttccct

SEQ ID NO: 4418 - DNA, 15 bp, Homo sapiens
atgtatacatttccc

SEQ ID NO: 4419 - DNA, 15 bp, Homo sapiens
aatgtatacatttcc

SEQ ID NO: 4420 - DNA, 15 bp, Homo sapiens
aaatgtatacatttc

SEQ ID NO: 4421 - DNA, 15 bp, Homo sapiens
aaaatgtatacattt

SEQ ID NO: 4422 - DNA, 15 bp, Homo sapiens
taaaatgtatacatt

SEQ ID NO: 4423 - DNA, 15 bp, Homo sapiens
ctaaaatgtatacat

SEQ ID NO: 4424 - DNA, 15 bp, Homo sapiens
cctaaaatgtataca

SEQ ID NO: 4425 - DNA, 15 bp, Homo sapiens
ccctaaaatgtatac

SEQ ID NO: 4426 - DNA, 15 bp, Homo sapiens
tccctaaaatgtata

SEQ ID NO: 4427 - DNA, 15 bp, Homo sapiens
ctccctaaaatgtat

SEQ ID NO: 4428 - DNA, 15 bp, Homo sapiens
tctccctaaaatgta

SEQ ID NO: 4429 - DNA, 15 bp, Homo sapiens
ttctccctaaaatgt

SEQ ID NO: 4430 - DNA, 15 bp, Homo sapiens
attctccctaaaatg

SEQ ID NO: 4431 - DNA, 15 bp, Homo sapiens
gattctccctaaaat

SEQ ID NO: 4432 - DNA, 15 bp, Homo sapiens
agattctccctaaaa

SEQ ID NO: 4433 - DNA, 15 bp, Homo sapiens
tagattctccctaaa

SEQ ID NO: 4434 - DNA, 15 bp, Homo sapiens
ctagattctccctaa

SEQ ID NO: 4435 - DNA, 15 bp, Homo sapiens
actagattctcccta

SEQ ID NO: 4436 - DNA, 15 bp, Homo sapiens
cactagattctccct

SEQ ID NO: 4437 - DNA, 15 bp, Homo sapiens
tcactagattctccc

SEQ ID NO: 4438 - DNA, 15 bp, Homo sapiens
atcactagattctcc

SEQ ID NO: 4439 - DNA, 15 bp, Homo sapiens
gatcactagattctc

SEQ ID NO: 4440 - DNA, 15 bp, Homo sapiens
ggatcactagattct

SEQ ID NO: 4441 - DNA, 15 bp, Homo sapiens
aggatcactagattc

SEQ ID NO: 4442 - DNA, 15 bp, Homo sapiens
caggatcactagatt

SEQ ID NO: 4443 - DNA, 15 bp, Homo sapiens
ccaggatcactagat

SEQ ID NO: 4444 - DNA, 15 bp, Homo sapiens
cccaggatcactaga

SEQ ID NO: 4445 - DNA, 15 bp, Homo sapiens
gcccaggatcactag

SEQ ID NO: 4446 - DNA, 15 bp, Homo sapiens
ggcccaggatcacta

SEQ ID NO: 4447 - DNA, 15 bp, Homo sapiens
tggcccaggatcact

SEQ ID NO: 4448 - DNA, 15 bp, Homo sapiens
ctggcccaggatcac

SEQ ID NO: 4449 - DNA, 15 bp, Homo sapiens
tctggcccaggatca

SEQ ID NO: 4450 - DNA, 15 bp, Homo sapiens
gtctggcccaggatc

SEQ ID NO: 4451 - DNA, 15 bp, Homo sapiens
agtctggcccaggat

SEQ ID NO: 4452 - DNA, 15 bp, Homo sapiens
aagtctggcccagga

SEQ ID NO: 4453 - DNA, 15 bp, Homo sapiens
taagtctggcccagg

SEQ ID NO: 4454 - DNA, 15 bp, Homo sapiens
ctaagtctggcccag

SEQ ID NO: 4455 - DNA, 15 bp, Homo sapiens
cctaagtctggccca

SEQ ID NO: 4456 - DNA, 15 bp, Homo sapiens
acctaagtctggccc

SEQ ID NO: 4457 - DNA, 15 bp, Homo sapiens
cacctaagtctggcc

SEQ ID NO: 4458 - DNA, 15 bp, Homo sapiens
tcacctaagtctggc

SEQ ID NO: 4459 - DNA, 15 bp, Homo sapiens
gtcacctaagtctgg

SEQ ID NO: 4460 - DNA, 15 bp, Homo sapiens
ggtcacctaagtctg

SEQ ID NO: 4461 - DNA, 15 bp, Homo sapiens
cggtcacctaagtct

SEQ ID NO: 4462 - DNA, 15 bp, Homo sapiens
gcggtcacctaagtc

SEQ ID NO: 4463 - DNA, 15 bp, Homo sapiens
tgcggtcacctaagt

SEQ ID NO: 4464 - DNA, 15 bp, Homo sapiens
ttgcggtcacctaag

SEQ ID NO: 4465 - DNA, 15 bp, Homo sapiens
tttgcggtcacctaa

SEQ ID NO: 4466 - DNA, 15 bp, Homo sapiens
ttttgcggtcaccta

SEQ ID NO: 4467 - DNA, 15 bp, Homo sapiens
tttttgcggtcacct

SEQ ID NO: 4468 - DNA, 15 bp, Homo sapiens
ctttttgcggtcacc

SEQ ID NO: 4469 - DNA, 15 bp, Homo sapiens
tctttttgcggtcac

SEQ ID NO: 4470 - DNA, 15 bp, Homo sapiens
ttctttttgcggtca

SEQ ID NO: 4471 - DNA, 15 bp, Homo sapiens
attctttttgcggtc

SEQ ID NO: 4472 - DNA, 15 bp, Homo sapiens
gattctttttgcggt

SEQ ID NO: 4473 - DNA, 15 bp, Homo sapiens
tgattctttttgcgg

SEQ ID NO: 4474 - DNA, 15 bp, Homo sapiens
ctgattctttttgcg

SEQ ID NO: 4475 - DNA, 15 bp, Homo sapiens
cctgattctttttgc

SEQ ID NO: 4476 - DNA, 15 bp, Homo sapiens
tcctgattctttttg

SEQ ID NO: 4477 - DNA, 15 bp, Homo sapiens
gtcctgattcttttt

SEQ ID NO: 4478 - DNA, 15 bp, Homo sapiens
agtcctgattctttt

SEQ ID NO: 4479 - DNA, 15 bp, Homo sapiens
tagtcctgattcttt

SEQ ID NO: 4480 - DNA, 15 bp, Homo sapiens
ctagtcctgattctt

SEQ ID NO: 4481 - DNA, 15 bp, Homo sapiens
gctagtcctgattct

SEQ ID NO: 4482 - DNA, 15 bp, Homo sapiens
agctagtcctgattc

SEQ ID NO: 4483 - DNA, 15 bp, Homo sapiens
cagctagtcctgatt

SEQ ID NO: 4484 - DNA, 15 bp, Homo sapiens
gcagctagtcctgat

SEQ ID NO: 4485 - DNA, 15 bp, Homo sapiens
agcagctagtcctga

SEQ ID NO: 4486 - DNA, 15 bp, Homo sapiens
cagcagctagtcctg

SEQ ID NO: 4487 - DNA, 15 bp, Homo sapiens
gcagcagctagtcct

SEQ ID NO: 4488 - DNA, 15 bp, Homo sapiens
ggcagcagctagtcc

SEQ ID NO: 4489 - DNA, 15 bp, Homo sapiens
gggcagcagctagtc

SEQ ID NO: 4490 - DNA, 15 bp, Homo sapiens
agggcagcagctagt

SEQ ID NO: 4491 - DNA, 15 bp, Homo sapiens
aagggcagcagctag

SEQ ID NO: 4492 - DNA, 15 bp, Homo sapiens
taagggcagcagcta

SEQ ID NO: 4493 - DNA, 15 bp, Homo sapiens
ttaagggcagcagct

SEQ ID NO: 4494 - DNA, 15 bp, Homo sapiens
tttaagggcagcagc

SEQ ID NO: 4495 - DNA, 15 bp, Homo sapiens
ctttaagggcagcag

SEQ ID NO: 4496 - DNA, 15 bp, Homo sapiens
tctttaagggcagca

SEQ ID NO: 4497 - DNA, 15 bp, Homo sapiens
ttctttaagggcagc

SEQ ID NO: 4498 - DNA, 15 bp, Homo sapiens
gttctttaagggcag

SEQ ID NO: 4499 - DNA, 15 bp, Homo sapiens
agttctttaagggca

SEQ ID NO: 4500 - DNA, 15 bp, Homo sapiens
gagttctttaagggc

SEQ ID NO: 4501 - DNA, 15 bp, Homo sapiens
tgagttctttaaggg

SEQ ID NO: 4502 - DNA, 15 bp, Homo sapiens
atgagttctttaagg

SEQ ID NO: 4503 - DNA, 15 bp, Homo sapiens
tatgagttctttaag

SEQ ID NO: 4504 - DNA, 15 bp, Homo sapiens
ctatgagttctttaa

SEQ ID NO: 4505 - DNA, 15 bp, Homo sapiens
gctatgagttcttta

SEQ ID NO: 4506 - DNA, 15 bp, Homo sapiens
agctatgagttcttt

SEQ ID NO: 4507 - DNA, 15 bp, Homo sapiens
aagctatgagttctt

SEQ ID NO: 4508 - DNA, 15 bp, Homo sapiens
caagctatgagttct

SEQ ID NO: 4509 - DNA, 15 bp, Homo sapiens
tcaagctatgagttc

SEQ ID NO: 4510 - DNA, 15 bp, Homo sapiens
atcaagctatgagtt

SEQ ID NO: 4511 - DNA, 15 bp, Homo sapiens
tatcaagctatgagt

SEQ ID NO: 4512 - DNA, 15 bp, Homo sapiens
ctatcaagctatgag

SEQ ID NO: 4513 - DNA, 15 bp, Homo sapiens
tctatcaagctatga

SEQ ID NO: 4514 - DNA, 15 bp, Homo sapiens
ctctatcaagctatg

SEQ ID NO: 4515 - DNA, 15 bp, Homo sapiens
cctctatcaagctat

SEQ ID NO: 4516 - DNA, 15 bp, Homo sapiens
tcctctatcaagcta

SEQ ID NO: 4517 - DNA, 15 bp, Homo sapiens
ttcctctatcaagct

SEQ ID NO: 4518 - DNA, 15 bp, Homo sapiens
tttcctctatcaagc

SEQ ID NO: 4519 - DNA, 15 bp, Homo sapiens
gtttcctctatcaag

SEQ ID NO: 4520 - DNA, 15 bp, Homo sapiens
ggtttcctctatcaa

SEQ ID NO: 4521 - DNA, 15 bp, Homo sapiens
aggtttcctctatca

SEQ ID NO: 4522 - DNA, 15 bp, Homo sapiens
taggtttcctctatc

SEQ ID NO: 4523 - DNA, 15 bp, Homo sapiens
ctaggtttcctctat

SEQ ID NO: 4524 - DNA, 15 bp, Homo sapiens
cctaggtttcctcta

SEQ ID NO: 4525 - DNA, 15 bp, Homo sapiens
ccctaggtttcctct

SEQ ID NO: 4526 - DNA, 15 bp, Homo sapiens
tccctaggtttcctc

SEQ ID NO: 4527 - DNA, 15 bp, Homo sapiens
ttccctaggtttcct

SEQ ID NO: 4528 - DNA, 15 bp, Homo sapiens
tttccctaggtttcc

SEQ ID NO: 4529 - DNA, 15 bp, Homo sapiens
atttccctaggtttc

SEQ ID NO: 4530 - DNA, 15 bp, Homo sapiens
gatttccctaggttt

SEQ ID NO: 4531 - DNA, 15 bp, Homo sapiens
agatttccctaggtt

SEQ ID NO: 4532 - DNA, 15 bp, Homo sapiens
aagatttccctaggt

SEQ ID NO: 4533 - DNA, 15 bp, Homo sapiens
gaagatttccctagg

SEQ ID NO: 4534 - DNA, 15 bp, Homo sapiens
agaagatttccctag

SEQ ID NO: 4535 - DNA, 15 bp, Homo sapiens
cagaagatttcccta

SEQ ID NO: 4536 - DNA, 15 bp, Homo sapiens
ccagaagatttccct

SEQ ID NO: 4537 - DNA, 15 bp, Homo sapiens
cccagaagatttccc

SEQ ID NO: 4538 - DNA, 15 bp, Homo sapiens
ccccagaagatttcc

SEQ ID NO: 4539 - DNA, 15 bp, Homo sapiens
gccccagaagatttc

SEQ ID NO: 4540 - DNA, 15 bp, Homo sapiens
ggccccagaagattt

SEQ ID NO: 4541 - DNA, 15 bp, Homo sapiens
gggccccagaagatt

SEQ ID NO: 4542 - DNA, 15 bp, Homo sapiens
ggggccccagaagat

SEQ ID NO: 4543 - DNA, 15 bp, Homo sapiens
gggggccccagaaga

SEQ ID NO: 4544 - DNA, 15 bp, Homo sapiens
agggggccccagaag

SEQ ID NO: 4545 - DNA, 15 bp, Homo sapiens
cagggggccccagaa

SEQ ID NO: 4546 - DNA, 15 bp, Homo sapiens
ccagggggccccaga

SEQ ID NO: 4547 - DNA, 15 bp, Homo sapiens
cccagggggccccag

SEQ ID NO: 4548 - DNA, 15 bp, Homo sapiens
ccccagggggcccca

SEQ ID NO: 4549 - DNA, 15 bp, Homo sapiens
accccagggggcccc

SEQ ID NO: 4550 - DNA, 15 bp, Homo sapiens
taccccagggggccc

SEQ ID NO: 4551 - DNA, 15 bp, Homo sapiens
ataccccagggggcc

SEQ ID NO: 4552 - DNA, 15 bp, Homo sapiens
tataccccagggggc

SEQ ID NO: 4553 - DNA, 15 bp, Homo sapiens
ttataccccaggggg

SEQ ID NO: 4554 - DNA, 15 bp, Homo sapiens
gttataccccagggg

SEQ ID NO: 4555 - DNA, 15 bp, Homo sapiens
agttataccccaggg

SEQ ID NO: 4556 - DNA, 15 bp, Homo sapiens
cagttataccccagg

SEQ ID NO: 4557 - DNA, 15 bp, Homo sapiens
tcagttataccccag

SEQ ID NO: 4558 - DNA, 15 bp, Homo sapiens
atcagttatacccca

SEQ ID NO: 4559 - DNA, 15 bp, Homo sapiens
aatcagttatacccc

SEQ ID NO: 4560 - DNA, 15 bp, Homo sapiens
taatcagttataccc

SEQ ID NO: 4561 - DNA, 15 bp, Homo sapiens
ataatcagttatacc

SEQ ID NO: 4562 - DNA, 15 bp, Homo sapiens
aataatcagttatac

SEQ ID NO: 4563 - DNA, 15 bp, Homo sapiens
aaataatcagttata

SEQ ID NO: 4564 - DNA, 15 bp, Homo sapiens
gaaataatcagttat

SEQ ID NO: 4565 - DNA, 15 bp, Homo sapiens
agaaataatcagtta

SEQ ID NO: 4566 - DNA, 15 bp, Homo sapiens
gagaaataatcagtt

SEQ ID NO: 4567 - DNA, 15 bp, Homo sapiens
ggagaaataatcagt

SEQ ID NO: 4568 - DNA, 15 bp, Homo sapiens
gggagaaataatcag

SEQ ID NO: 4569 - DNA, 15 bp, Homo sapiens
agggagaaataatca

SEQ ID NO: 4570 - DNA, 15 bp, Homo sapiens
cagggagaaataatc

SEQ ID NO: 4571 - DNA, 15 bp, Homo sapiens
acagggagaaataat

SEQ ID NO: 4572 - DNA, 15 bp, Homo sapiens
gacagggagaaataa

SEQ ID NO: 4573 - DNA, 15 bp, Homo sapiens
ggacagggagaaata

SEQ ID NO: 4574 - DNA, 15 bp, Homo sapiens
gggacagggagaaat

SEQ ID NO: 4575 - DNA, 15 bp, Homo sapiens
agggacagggagaaa

SEQ ID NO: 4576 - DNA, 15 bp, Homo sapiens
tagggacagggagaa

SEQ ID NO: 4577 - DNA, 15 bp, Homo sapiens
ttagggacagggaga

SEQ ID NO: 4578 - DNA, 15 bp, Homo sapiens
tttagggacagggag

SEQ ID NO: 4579 - DNA, 15 bp, Homo sapiens
atttagggacaggga

SEQ ID NO: 4580 - DNA, 15 bp, Homo sapiens
catttagggacaggg

SEQ ID NO: 4581 - DNA, 15 bp, Homo sapiens
tcatttagggacagg

SEQ ID NO: 4582 - DNA, 15 bp, Homo sapiens
atcatttagggacag

SEQ ID NO: 4583 - DNA, 15 bp, Homo sapiens
gatcatttagggaca

SEQ ID NO: 4584 - DNA, 15 bp, Homo sapiens
tgatcatttagggac

SEQ ID NO: 4585 - DNA, 15 bp, Homo sapiens
gtgatcatttaggga

SEQ ID NO: 4586 - DNA, 15 bp, Homo sapiens
tgtgatcatttaggg

SEQ ID NO: 4587 - DNA, 15 bp, Homo sapiens
ctgtgatcatttagg

SEQ ID NO: 4588 - DNA, 15 bp, Homo sapiens
cctgtgatcatttag

SEQ ID NO: 4589 - DNA, 15 bp, Homo sapiens
acctgtgatcattta

SEQ ID NO: 4590 - DNA, 15 bp, Homo sapiens
cacctgtgatcattt

SEQ ID NO: 4591 - DNA, 15 bp, Homo sapiens
ccacctgtgatcatt

SEQ ID NO: 4592 - DNA, 15 bp, Homo sapiens
accacctgtgatcat

SEQ ID NO: 4593 - DNA, 15 bp, Homo sapiens
caccacctgtgatca

SEQ ID NO: 4594 - DNA, 15 bp, Homo sapiens
acaccacctgtgatc

SEQ ID NO: 4595 - DNA, 15 bp, Homo sapiens
cacaccacctgtgat

SEQ ID NO: 4596 - DNA, 15 bp, Homo sapiens
ccacaccacctgtga

SEQ ID NO: 4597 - DNA, 15 bp, Homo sapiens
gccacaccacctgtg

SEQ ID NO: 4598 - DNA, 15 bp, Homo sapiens
tgccacaccacctgt

SEQ ID NO: 4599 - DNA, 15 bp, Homo sapiens
ttgccacaccacctg

SEQ ID NO: 4600 - DNA, 15 bp, Homo sapiens
tttgccacaccacct

SEQ ID NO: 4601 - DNA, 15 bp, Homo sapiens
ttttgccacaccacc

SEQ ID NO: 4602 - DNA, 15 bp, Homo sapiens
tttttgccacaccac

SEQ ID NO: 4603 - DNA, 15 bp, Homo sapiens
ttttttgccacacca

SEQ ID NO: 4604 - DNA, 15 bp, Homo sapiens
tttttttgccacacc

SEQ ID NO: 4605 - DNA, 15 bp, Homo sapiens
gtttttttgccacac

SEQ ID NO: 4606 - DNA, 15 bp, Homo sapiens
tgtttttttgccaca

SEQ ID NO: 4607 - DNA, 15 bp, Homo sapiens
ttgtttttttgccac

SEQ ID NO: 4608 - DNA, 15 bp, Homo sapiens
cttgtttttttgcca

SEQ ID NO: 4609 - DNA, 15 bp, Homo sapiens
ccttgtttttttgcc

SEQ ID NO: 4610 - DNA, 15 bp, Homo sapiens
cccttgtttttttgc

SEQ ID NO: 4611 - DNA, 15 bp, Homo sapiens
tcccttgtttttttg

SEQ ID NO: 4612 - DNA, 15 bp, Homo sapiens
gtcccttgttttttt

SEQ ID NO: 4613 - DNA, 15 bp, Homo sapiens
tgtcccttgtttttt

SEQ ID NO: 4614 - DNA, 15 bp, Homo sapiens
ttgtcccttgttttt

SEQ ID NO: 4615 - DNA, 15 bp, Homo sapiens
tttgtcccttgtttt

SEQ ID NO: 4616 - DNA, 15 bp, Homo sapiens
ttttgtcccttgttt

SEQ ID NO: 4617 - DNA, 15 bp, Homo sapiens
tttttgtcccttgtt

SEQ ID NO: 4618 - DNA, 15 bp, Homo sapiens
gtttttgtcccttgt

SEQ ID NO: 4619 - DNA, 15 bp, Homo sapiens
agtttttgtcccttg

SEQ ID NO: 4620 - DNA, 15 bp, Homo sapiens
aagtttttgtccctt

SEQ ID NO: 4621 - DNA, 15 bp, Homo sapiens
gaagtttttgtccct

SEQ ID NO: 4622 - DNA, 15 bp, Homo sapiens
tgaagtttttgtccc

SEQ ID NO: 4623 - DNA, 15 bp, Homo sapiens
ttgaagtttttgtcc

SEQ ID NO: 4624 - DNA, 15 bp, Homo sapiens
cttgaagtttttgtc

SEQ ID NO: 4625 - DNA, 15 bp, Homo sapiens
acttgaagtttttgt

SEQ ID NO: 4626 - DNA, 15 bp, Homo sapiens
gacttgaagtttttg

SEQ ID NO: 4627 - DNA, 15 bp, Homo sapiens
ggacttgaagttttt

SEQ ID NO: 4628 - DNA, 15 bp, Homo sapiens
tggacttgaagtttt

SEQ ID NO: 4629 - DNA, 15 bp, Homo sapiens
ctggacttgaagttt

SEQ ID NO: 4630 - DNA, 15 bp, Homo sapiens
actggacttgaagtt

SEQ ID NO: 4631 - DNA, 15 bp, Homo sapiens
tactggacttgaagt

SEQ ID NO: 4632 - DNA, 15 bp, Homo sapiens
gtactggacttgaag

SEQ ID NO: 4633 - DNA, 15 bp, Homo sapiens
ggtactggacttgaa

SEQ ID NO: 4634 - DNA, 15 bp, Homo sapiens
gggtactggacttga

SEQ ID NO: 4635 - DNA, 15 bp, Homo sapiens
tgggtactggacttg

SEQ ID NO: 4636 - DNA, 15 bp, Homo sapiens
atgggtactggactt

SEQ ID NO: 4637 - DNA, 15 bp, Homo sapiens
gatgggtactggact

SEQ ID NO: 4638 - DNA, 15 bp, Homo sapiens
agatgggtactggac

SEQ ID NO: 4639 - DNA, 15 bp, Homo sapiens
cagatgggtactgga

SEQ ID NO: 4640 - DNA, 15 bp, Homo sapiens
ccagatgggtactgg

SEQ ID NO: 4641 - DNA, 15 bp, Homo sapiens
accagatgggtactg

SEQ ID NO: 4642 - DNA, 15 bp, Homo sapiens
aaccagatgggtact

SEQ ID NO: 4643 - DNA, 15 bp, Homo sapiens
gaaccagatgggtac

SEQ ID NO: 4644 - DNA, 15 bp, Homo sapiens
agaaccagatgggta

SEQ ID NO: 4645 - DNA, 15 bp, Homo sapiens
cagaaccagatgggt

SEQ ID NO: 4646 - DNA, 15 bp, Homo sapiens
acagaaccagatggg

SEQ ID NO: 4647 - DNA, 15 bp, Homo sapiens
gacagaaccagatgg

SEQ ID NO: 4648 - DNA, 15 bp, Homo sapiens
agacagaaccagatg

SEQ ID NO: 4649 - DNA, 15 bp, Homo sapiens
gagacagaaccagat

SEQ ID NO: 4650 - DNA, 15 bp, Homo sapiens
agagacagaaccaga

SEQ ID NO: 4651 - DNA, 15 bp, Homo sapiens
gagagacagaaccag

SEQ ID NO: 4652 - DNA, 15 bp, Homo sapiens
agagagacagaacca

SEQ ID NO: 4653 - DNA, 15 bp, Homo sapiens
cagagagacagaacc

SEQ ID NO: 4654 - DNA, 15 bp, Homo sapiens
gcagagagacagaac

SEQ ID NO: 4655 - DNA, 15 bp, Homo sapiens
agcagagagacagaa

SEQ ID NO: 4656 - DNA, 15 bp, Homo sapiens
tagcagagagacaga

SEQ ID NO: 4657 - DNA, 15 bp, Homo sapiens
ctagcagagagacag

SEQ ID NO: 4658 - DNA, 15 bp, Homo sapiens
tctagcagagagaca

SEQ ID NO: 4659 - DNA, 15 bp, Homo sapiens
ctctagcagagagac

SEQ ID NO: 4660 - DNA, 15 bp, Homo sapiens
gctctagcagagaga

SEQ ID NO: 4661 - DNA, 15 bp, Homo sapiens
ggctctagcagagag

SEQ ID NO: 4662 - DNA, 15 bp, Homo sapiens
tggctctagcagaga

SEQ ID NO: 4663 - DNA, 15 bp, Homo sapiens
gtggctctagcagag

SEQ ID NO: 4664 - DNA, 15 bp, Homo sapiens
agtggctctagcaga

SEQ ID NO: 4665 - DNA, 15 bp, Homo sapiens
cagtggctctagcag

SEQ ID NO: 4666 - DNA, 15 bp, Homo sapiens
gcagtggctctagca

SEQ ID NO: 4667 - DNA, 15 bp, Homo sapiens
agcagtggctctagc

SEQ ID NO: 4668 - DNA, 15 bp, Homo sapiens
aagcagtggctctag

SEQ ID NO: 4669 - DNA, 15 bp, Homo sapiens
aaagcagtggctcta

SEQ ID NO: 4670 - DNA, 15 bp, Homo sapiens
gaaagcagtggctct

SEQ ID NO: 4671 - DNA, 15 bp, Homo sapiens
agaaagcagtggctc

SEQ ID NO: 4672 - DNA, 15 bp, Homo sapiens
aagaaagcagtggct

SEQ ID NO: 4673 - DNA, 15 bp, Homo sapiens
caagaaagcagtggc

SEQ ID NO: 4674 - DNA, 15 bp, Homo sapiens
acaagaaagcagtgg

SEQ ID NO: 4675 - DNA, 15 bp, Homo sapiens
cacaagaaagcagtg

SEQ ID NO: 4676 - DNA, 15 bp, Homo sapiens
tcacaagaaagcagt

SEQ ID NO: 4677 - DNA, 15 bp, Homo sapiens
ctcacaagaaagcag

SEQ ID NO: 4678 - DNA, 15 bp, Homo sapiens
tctcacaagaaagca

SEQ ID NO: 4679 - DNA, 15 bp, Homo sapiens
ctctcacaagaaagc

SEQ ID NO: 4680 - DNA, 15 bp, Homo sapiens
gctctcacaagaaag

SEQ ID NO: 4681 - DNA, 15 bp, Homo sapiens
tgctctcacaagaaa

SEQ ID NO: 4682 - DNA, 15 bp, Homo sapiens
atgctctcacaagaa

SEQ ID NO: 4683 - DNA, 15 bp, Homo sapiens
catgctctcacaaga

SEQ ID NO: 4684 - DNA, 15 bp, Homo sapiens
ccatgctctcacaag

SEQ ID NO: 4685 - DNA, 15 bp, Homo sapiens
cccatgctctcacaa

SEQ ID NO: 4686 - DNA, 15 bp, Homo sapiens
gcccatgctctcaca

SEQ ID NO: 4687 - DNA, 15 bp, Homo sapiens
agcccatgctctcac

SEQ ID NO: 4688 - DNA, 15 bp, Homo sapiens
gagcccatgctctca

SEQ ID NO: 4689 - DNA, 15 bp, Homo sapiens
tgagcccatgctctc

SEQ ID NO: 4690 - DNA, 15 bp, Homo sapiens
ctgagcccatgctct

SEQ ID NO: 4691 - DNA, 15 bp, Homo sapiens
gctgagcccatgctc

SEQ ID NO: 4692 - DNA, 15 bp, Homo sapiens
ggctgagcccatgct

SEQ ID NO: 4693 - DNA, 15 bp, Homo sapiens
gggctgagcccatgc

SEQ ID NO: 4694 - DNA, 15 bp, Homo sapiens
ggggctgagcccatg

SEQ ID NO: 4695 - DNA, 15 bp, Homo sapiens
aggggctgagcccat

SEQ ID NO: 4696 - DNA, 15 bp, Homo sapiens
gaggggctgagccca

SEQ ID NO: 4697 - DNA, 15 bp, Homo sapiens
cgaggggctgagccc

SEQ ID NO: 4698 - DNA, 15 bp, Homo sapiens
gcgaggggctgagcc

SEQ ID NO: 4699 - DNA, 15 bp, Homo sapiens
ggcgaggggctgagc

SEQ ID NO: 4700 - DNA, 15 bp, Homo sapiens
aggcgaggggctgag

SEQ ID NO: 4701 - DNA, 15 bp, Homo sapiens
gaggcgaggggctga

SEQ ID NO: 4702 - DNA, 15 bp, Homo sapiens
ggaggcgaggggctg

SEQ ID NO: 4703 - DNA, 15 bp, Homo sapiens
tggaggcgaggggct

SEQ ID NO: 4704 - DNA, 15 bp, Homo sapiens
gtggaggcgaggggc

SEQ ID NO: 4705 - DNA, 15 bp, Homo sapiens
tgtggaggcgagggg

SEQ ID NO: 4706 - DNA, 15 bp, Homo sapiens
ctgtggaggcgaggg

SEQ ID NO: 4707 - DNA, 15 bp, Homo sapiens
cctgtggaggcgagg

SEQ ID NO: 4708 - DNA, 15 bp, Homo sapiens
tcctgtggaggcgag

SEQ ID NO: 4709 - DNA, 15 bp, Homo sapiens
gtcctgtggaggcga

SEQ ID NO: 4710 - DNA, 15 bp, Homo sapiens
agtcctgtggaggcg

SEQ ID NO: 4711 - DNA, 15 bp, Homo sapiens
gagtcctgtggaggc

SEQ ID NO: 4712 - DNA, 15 bp, Homo sapiens
tgagtcctgtggagg

SEQ ID NO: 4713 - DNA, 15 bp, Homo sapiens
ttgagtcctgtggag

SEQ ID NO: 4714 - DNA, 15 bp, Homo sapiens
tttgagtcctgtgga

SEQ ID NO: 4715 - DNA, 15 bp, Homo sapiens
ttttgagtcctgtgg

SEQ ID NO: 4716 - DNA, 15 bp, Homo sapiens
cttttgagtcctgtg

SEQ ID NO: 4717 - DNA, 15 bp, Homo sapiens
acttttgagtcctgt

SEQ ID NO: 4718 - DNA, 15 bp, Homo sapiens
tacttttgagtcctg

SEQ ID NO: 4719 - DNA, 15 bp, Homo sapiens
ctacttttgagtcct

SEQ ID NO: 4720 - DNA, 15 bp, Homo sapiens
tctacttttgagtcc

SEQ ID NO: 4721 - DNA, 15 bp, Homo sapiens
atctacttttgagtc

SEQ ID NO: 4722 - DNA, 15 bp, Homo sapiens
aatctacttttgagt

SEQ ID NO: 4723 - DNA, 15 bp, Homo sapiens
taatctacttttgag

SEQ ID NO: 4724 - DNA, 15 bp, Homo sapiens
gtaatctacttttga

SEQ ID NO: 4725 - DNA, 15 bp, Homo sapiens
tgtaatctacttttg

SEQ ID NO: 4726 - DNA, 15 bp, Homo sapiens
ctgtaatctactttt

SEQ ID NO: 4727 - DNA, 15 bp, Homo sapiens
gctgtaatctacttt

SEQ ID NO: 4728 - DNA, 15 bp, Homo sapiens
cgctgtaatctactt

SEQ ID NO: 4729 - DNA, 15 bp, Homo sapiens
acgctgtaatctact

SEQ ID NO: 4730 - DNA, 15 bp, Homo sapiens
aacgctgtaatctac

SEQ ID NO: 4731 - DNA, 15 bp, Homo sapiens
taacgctgtaatcta

SEQ ID NO: 4732 - DNA, 15 bp, Homo sapiens
ttaacgctgtaatct

SEQ ID NO: 4733 - DNA, 15 bp, Homo sapiens
gttaacgctgtaatc

SEQ ID NO: 4734 - DNA, 15 bp, Homo sapiens
tgttaacgctgtaat

SEQ ID NO: 4735 - DNA, 15 bp, Homo sapiens
ctgttaacgctgtaa

SEQ ID NO: 4736 - DNA, 15 bp, Homo sapiens
actgttaacgctgta

SEQ ID NO: 4737 - DNA, 15 bp, Homo sapiens
tactgttaacgctgt

SEQ ID NO: 4738 - DNA, 15 bp, Homo sapiens
ctactgttaacgctg

SEQ ID NO: 4739 - DNA, 15 bp, Homo sapiens
tctactgttaacgct

SEQ ID NO: 4740 - DNA, 15 bp, Homo sapiens
ctctactgttaacgc

SEQ ID NO: 4741 - DNA, 15 bp, Homo sapiens
actctactgttaacg

SEQ ID NO: 4742 - DNA, 15 bp, Homo sapiens
cactctactgttaac

SEQ ID NO: 4743 - DNA, 15 bp, Homo sapiens
gcactctactgttaa

SEQ ID NO: 4744 - DNA, 15 bp, Homo sapiens
tgcactctactgtta

SEQ ID NO: 4745 - DNA, 15 bp, Homo sapiens
gtgcactctactgtt

SEQ ID NO: 4746 - DNA, 15 bp, Homo sapiens
tgtgcactctactgt

SEQ ID NO: 4747 - DNA, 15 bp, Homo sapiens
ctgtgcactctactg

SEQ ID NO: 4748 - DNA, 15 bp, Homo sapiens
cctgtgcactctact

SEQ ID NO: 4749 - DNA, 15 bp, Homo sapiens
gcctgtgcactctac

SEQ ID NO: 4750 - DNA, 15 bp, Homo sapiens
agcctgtgcactcta

SEQ ID NO: 4751 - DNA, 15 bp, Homo sapiens
aagcctgtgcactct

SEQ ID NO: 4752 - DNA, 15 bp, Homo sapiens
gaagcctgtgcactc

SEQ ID NO: 4753 - DNA, 15 bp, Homo sapiens
tgaagcctgtgcact

SEQ ID NO: 4754 - DNA, 15 bp, Homo sapiens
ttgaagcctgtgcac

SEQ ID NO: 4755 - DNA, 15 bp, Homo sapiens
cttgaagcctgtgca

SEQ ID NO: 4756 - DNA, 15 bp, Homo sapiens
ccttgaagcctgtgc

SEQ ID NO: 4757 - DNA, 15 bp, Homo sapiens
accttgaagcctgtg

SEQ ID NO: 4758 - DNA, 15 bp, Homo sapiens
gaccttgaagcctgt

SEQ ID NO: 4759 - DNA, 15 bp, Homo sapiens
tgaccttgaagcctg

SEQ ID NO: 4760 - DNA, 15 bp, Homo sapiens
ctgaccttgaagcct

SEQ ID NO: 4761 - DNA, 15 bp, Homo sapiens
cctgaccttgaagcc

SEQ ID NO: 4762 - DNA, 15 bp, Homo sapiens
gcctgaccttgaagc

SEQ ID NO: 4763 - DNA, 15 bp, Homo sapiens
tgcctgaccttgaag

SEQ ID NO: 4764 - DNA, 15 bp, Homo sapiens
atgcctgaccttgaa

SEQ ID NO: 4765 - DNA, 15 bp, Homo sapiens
catgcctgaccttga

SEQ ID NO: 4766 - DNA, 15 bp, Homo sapiens
ccatgcctgaccttg

SEQ ID NO: 4767 - DNA, 15 bp, Homo sapiens
cccatgcctgacctt

SEQ ID NO: 4768 - DNA, 15 bp, Homo sapiens
acccatgcctgacct

SEQ ID NO: 4769 - DNA, 15 bp, Homo sapiens
cacccatgcctgacc

SEQ ID NO: 4770 - DNA, 15 bp, Homo sapiens
tcacccatgcctgac

SEQ ID NO: 4771 - DNA, 15 bp, Homo sapiens
ttcacccatgcctga

SEQ ID NO: 4772 - DNA, 15 bp, Homo sapiens
gttcacccatgcctg

SEQ ID NO: 4773 - DNA, 15 bp, Homo sapiens
agttcacccatgcct

SEQ ID NO: 4774 - DNA, 15 bp, Homo sapiens
cagttcacccatgcc

SEQ ID NO: 4775 - DNA, 15 bp, Homo sapiens
ccagttcacccatgc

SEQ ID NO: 4776 - DNA, 15 bp, Homo sapiens
tccagttcacccatg

SEQ ID NO: 4777 - DNA, 15 bp, Homo sapiens
ttccagttcacccat

SEQ ID NO: 4778 - DNA, 15 bp, Homo sapiens
cttccagttcaccca

SEQ ID NO: 4779 - DNA, 15 bp, Homo sapiens
tcttccagttcaccc

SEQ ID NO: 4780 - DNA, 15 bp, Homo sapiens
ctcttccagttcacc

SEQ ID NO: 4781 - DNA, 15 bp, Homo sapiens
gctcttccagttcac

SEQ ID NO: 4782 - DNA, 15 bp, Homo sapiens
ggctcttccagttca

SEQ ID NO: 4783 - DNA, 15 bp, Homo sapiens
tggctcttccagttc

SEQ ID NO: 4784 - DNA, 15 bp, Homo sapiens
ctggctcttccagtt

SEQ ID NO: 4785 - DNA, 15 bp, Homo sapiens
cctggctcttccagt

SEQ ID NO: 4786 - DNA, 15 bp, Homo sapiens
acctggctcttccag

SEQ ID NO: 4787 - DNA, 15 bp, Homo sapiens
cacctggctcttcca

SEQ ID NO: 4788 - DNA, 15 bp, Homo sapiens
gcacctggctcttcc

SEQ ID NO: 4789 - DNA, 15 bp, Homo sapiens
ggcacctggctcttc

SEQ ID NO: 4790 - DNA, 15 bp, Homo sapiens
tggcacctggctctt

SEQ ID NO: 4791 - DNA, 15 bp, Homo sapiens
atggcacctggctct

SEQ ID NO: 4792 - DNA, 15 bp, Homo sapiens
gatggcacctggctc

SEQ ID NO: 4793 - DNA, 15 bp, Homo sapiens
tgatggcacctggct

SEQ ID NO: 4794 - DNA, 15 bp, Homo sapiens
gtgatggcacctggc

SEQ ID NO: 4795 - DNA, 15 bp, Homo sapiens
agtgatggcacctgg

SEQ ID NO: 4796 - DNA, 15 bp, Homo sapiens
cagtgatggcacctg

SEQ ID NO: 4797 - DNA, 15 bp, Homo sapiens
gcagtgatggcacct

SEQ ID NO: 4798 - DNA, 15 bp, Homo sapiens
ggcagtgatggcacc

SEQ ID NO: 4799 - DNA, 15 bp, Homo sapiens
aggcagtgatggcac

SEQ ID NO: 4800 - DNA, 15 bp, Homo sapiens
gaggcagtgatggca

SEQ ID NO: 4801 - DNA, 15 bp, Homo sapiens
tgaggcagtgatggc

SEQ ID NO: 4802 - DNA, 15 bp, Homo sapiens
ttgaggcagtgatgg

SEQ ID NO: 4803 - DNA, 15 bp, Homo sapiens
gttgaggcagtgatg

SEQ ID NO: 4804 - DNA, 15 bp, Homo sapiens
ggttgaggcagtgat

SEQ ID NO: 4805 - DNA, 15 bp, Homo sapiens
tggttgaggcagtga

SEQ ID NO: 4806 - DNA, 15 bp, Homo sapiens
ctggttgaggcagtg

SEQ ID NO: 4807 - DNA, 15 bp, Homo sapiens
actggttgaggcagt

SEQ ID NO: 4808 - DNA, 15 bp, Homo sapiens
aactggttgaggcag

SEQ ID NO: 4809 - DNA, 15 bp, Homo sapiens
aaactggttgaggca

SEQ ID NO: 4810 - DNA, 15 bp, Homo sapiens
gaaactggttgaggc

SEQ ID NO: 4811 - DNA, 15 bp, Homo sapiens
agaaactggttgagg

SEQ ID NO: 4812 - DNA, 15 bp, Homo sapiens
gagaaactggttgag

SEQ ID NO: 4813 - DNA, 15 bp, Homo sapiens
ggagaaactggttga

SEQ ID NO: 4814 - DNA, 15 bp, Homo sapiens
tggagaaactggttg

SEQ ID NO: 4815 - DNA, 15 bp, Homo sapiens
gtggagaaactggtt

SEQ ID NO: 4816 - DNA, 15 bp, Homo sapiens
ggtggagaaactggt

SEQ ID NO: 4817 - DNA, 15 bp, Homo sapiens
aggtggagaaactgg

SEQ ID NO: 4818 - DNA, 15 bp, Homo sapiens
gaggtggagaaactg

SEQ ID NO: 4819 - DNA, 15 bp, Homo sapiens
agaggtggagaaact

SEQ ID NO: 4820 - DNA, 15 bp, Homo sapiens
cagaggtggagaaac

SEQ ID NO: 4821 - DNA, 15 bp, Homo sapiens
ccagaggtggagaaa

SEQ ID NO: 4822 - DNA, 15 bp, Homo sapiens
tccagaggtggagaa

SEQ ID NO: 4823 - DNA, 15 bp, Homo sapiens
ttccagaggtggaga

SEQ ID NO: 4824 - DNA, 15 bp, Homo sapiens
attccagaggtggag

SEQ ID NO: 4825 - DNA, 15 bp, Homo sapiens
gattccagaggtgga

SEQ ID NO: 4826 - DNA, 15 bp, Homo sapiens
ggattccagaggtgg

SEQ ID NO: 4827 - DNA, 15 bp, Homo sapiens
aggattccagaggtg

SEQ ID NO: 4828 - DNA, 15 bp, Homo sapiens
caggattccagaggt

SEQ ID NO: 4829 - DNA, 15 bp, Homo sapiens
ccaggattccagagg

SEQ ID NO: 4830 - DNA, 15 bp, Homo sapiens
accaggattccagag

SEQ ID NO: 4831 - DNA, 15 bp, Homo sapiens
aaccaggattccaga

SEQ ID NO: 4832 - DNA, 15 bp, Homo sapiens
aaaccaggattccag

SEQ ID NO: 4833 - DNA, 15 bp, Homo sapiens
gaaaccaggattcca

SEQ ID NO: 4834 - DNA, 15 bp, Homo sapiens
ggaaaccaggattcc

SEQ ID NO: 4835 - DNA, 15 bp, Homo sapiens
aggaaaccaggattc

SEQ ID NO: 4836 - DNA, 15 bp, Homo sapiens
caggaaaccaggatt

SEQ ID NO: 4837 - DNA, 15 bp, Homo sapiens
gcaggaaaccaggat

SEQ ID NO: 4838 - DNA, 15 bp, Homo sapiens
agcaggaaaccagga

SEQ ID NO: 4839 - DNA, 15 bp, Homo sapiens
gagcaggaaaccagg

SEQ ID NO: 4840 - DNA, 15 bp, Homo sapiens
agagcaggaaaccag

SEQ ID NO: 4841 - DNA, 15 bp, Homo sapiens
cagagcaggaaacca

SEQ ID NO: 4842 - DNA, 15 bp, Homo sapiens
acagagcaggaaacc

SEQ ID NO: 4843 - DNA, 15 bp, Homo sapiens
gacagagcaggaaac

SEQ ID NO: 4844 - DNA, 15 bp, Homo sapiens
tgacagagcaggaaa

SEQ ID NO: 4845 - DNA, 15 bp, Homo sapiens
ctgacagagcaggaa

SEQ ID NO: 4846 - DNA, 15 bp, Homo sapiens
tctgacagagcagga

SEQ ID NO: 4847 - DNA, 15 bp, Homo sapiens
ttctgacagagcagg

SEQ ID NO: 4848 - DNA, 15 bp, Homo sapiens
tttctgacagagcag

SEQ ID NO: 4849 - DNA, 15 bp, Homo sapiens
ctttctgacagagca

SEQ ID NO: 4850 - DNA, 15 bp, Homo sapiens
tctttctgacagagc

SEQ ID NO: 4851 - DNA, 15 bp, Homo sapiens
ctctttctgacagag

SEQ ID NO: 4852 - DNA, 15 bp, Homo sapiens
tctctttctgacaga

SEQ ID NO: 4853 - DNA, 15 bp, Homo sapiens
ttctctttctgacag

SEQ ID NO: 4854 - DNA, 15 bp, Homo sapiens
attctctttctgaca

SEQ ID NO: 4855 - DNA, 15 bp, Homo sapiens
gattctctttctgac

SEQ ID NO: 4856 - DNA, 15 bp, Homo sapiens
agattctctttctga

SEQ ID NO: 4857 - DNA, 15 bp, Homo sapiens
cagattctctttctg

SEQ ID NO: 4858 - DNA, 15 bp, Homo sapiens
gcagattctctttct

SEQ ID NO: 4859 - DNA, 15 bp, Homo sapiens
agcagattctctttc

SEQ ID NO: 4860 - DNA, 15 bp, Homo sapiens
gagcagattctcttt

SEQ ID NO: 4861 - DNA, 15 bp, Homo sapiens
agagcagattctctt

SEQ ID NO: 4862 - DNA, 15 bp, Homo sapiens
tagagcagattctct

SEQ ID NO: 4863 - DNA, 15 bp, Homo sapiens
gtagagcagattctc

SEQ ID NO: 4864 - DNA, 15 bp, Homo sapiens
ggtagagcagattct

SEQ ID NO: 4865 - DNA, 15 bp, Homo sapiens
gggtagagcagattc

SEQ ID NO: 4866 - DNA, 15 bp, Homo sapiens
ggggtagagcagatt

SEQ ID NO: 4867 - DNA, 15 bp, Homo sapiens
gggggtagagcagat

SEQ ID NO: 4868 - DNA, 15 bp, Homo sapiens
ggggggtagagcaga

SEQ ID NO: 4869 - DNA, 15 bp, Homo sapiens
tggggggtagagcag

SEQ ID NO: 4870 - DNA, 15 bp, Homo sapiens
gtggggggtagagca

SEQ ID NO: 4871 - DNA, 15 bp, Homo sapiens
agtggggggtagagc

SEQ ID NO: 4872 - DNA, 15 bp, Homo sapiens
cagtggggggtagag

SEQ ID NO: 4873 - DNA, 15 bp, Homo sapiens
ccagtggggggtaga

SEQ ID NO: 4874 - DNA, 15 bp, Homo sapiens
gccagtggggggtag

SEQ ID NO: 4875 - DNA, 15 bp, Homo sapiens
tgccagtggggggta

SEQ ID NO: 4876 - DNA, 15 bp, Homo sapiens
ttgccagtggggggt

SEQ ID NO: 4877 - DNA, 15 bp, Homo sapiens
tttgccagtgggggg

SEQ ID NO: 4878 - DNA, 15 bp, Homo sapiens
ctttgccagtggggg

SEQ ID NO: 4879 - DNA, 15 bp, Homo sapiens
gctttgccagtgggg

SEQ ID NO: 4880 - DNA, 15 bp, Homo sapiens
ggctttgccagtggg

SEQ ID NO: 4881 - DNA, 15 bp, Homo sapiens
gggctttgccagtgg

SEQ ID NO: 4882 - DNA, 15 bp, Homo sapiens
agggctttgccagtg

SEQ ID NO: 4883 - DNA, 15 bp, Homo sapiens
aagggctttgccagt

SEQ ID NO: 4884 - DNA, 15 bp, Homo sapiens
caagggctttgccag

SEQ ID NO: 4885 - DNA, 15 bp, Homo sapiens
ccaagggctttgcca

SEQ ID NO: 4886 - DNA, 15 bp, Homo sapiens
accaagggctttgcc

SEQ ID NO: 4887 - DNA, 15 bp, Homo sapiens
gaccaagggctttgc

SEQ ID NO: 4888 - DNA, 15 bp, Homo sapiens
ggaccaagggctttg

SEQ ID NO: 4889 - DNA, 15 bp, Homo sapiens
tggaccaagggcttt

SEQ ID NO: 4890 - DNA, 15 bp, Homo sapiens
gtggaccaagggctt

SEQ ID NO: 4891 - DNA, 15 bp, Homo sapiens
tgtggaccaagggct

SEQ ID NO: 4892 - DNA, 15 bp, Homo sapiens
gtgtggaccaagggc

SEQ ID NO: 4893 - DNA, 15 bp, Homo sapiens
agtgtggaccaaggg

SEQ ID NO: 4894 - DNA, 15 bp, Homo sapiens
tagtgtggaccaagg

SEQ ID NO: 4895 - DNA, 15 bp, Homo sapiens
atagtgtggaccaag

SEQ ID NO: 4896 - DNA, 15 bp, Homo sapiens
catagtgtggaccaa

SEQ ID NO: 4897 - DNA, 15 bp, Homo sapiens
acatagtgtggacca

SEQ ID NO: 4898 - DNA, 15 bp, Homo sapiens
gacatagtgtggacc

SEQ ID NO: 4899 - DNA, 15 bp, Homo sapiens
tgacatagtgtggac

SEQ ID NO: 4900 - DNA, 15 bp, Homo sapiens
atgacatagtgtgga

SEQ ID NO: 4901 - DNA, 15 bp, Homo sapiens
aatgacatagtgtgg

SEQ ID NO: 4902 - DNA, 15 bp, Homo sapiens
caatgacatagtgtg

SEQ ID NO: 4903 - DNA, 15 bp, Homo sapiens
gcaatgacatagtgt

SEQ ID NO: 4904 - DNA, 15 bp, Homo sapiens
tgcaatgacatagtg

SEQ ID NO: 4905 - DNA, 15 bp, Homo sapiens
ctgcaatgacatagt

SEQ ID NO: 4906 - DNA, 15 bp, Homo sapiens
actgcaatgacatag

SEQ ID NO: 4907 - DNA, 15 bp, Homo sapiens
aactgcaatgacata

SEQ ID NO: 4908 - DNA, 15 bp, Homo sapiens
gaactgcaatgacat

SEQ ID NO: 4909 - DNA, 15 bp, Homo sapiens
agaactgcaatgaca

SEQ ID NO: 4910 - DNA, 15 bp, Homo sapiens
gagaactgcaatgac

SEQ ID NO: 4911 - DNA, 15 bp, Homo sapiens
agagaactgcaatga

SEQ ID NO: 4912 - DNA, 15 bp, Homo sapiens
gagagaactgcaatg

SEQ ID NO: 4913 - DNA, 15 bp, Homo sapiens
ggagagaactgcaat

SEQ ID NO: 4914 - DNA, 15 bp, Homo sapiens
tggagagaactgcaa

SEQ ID NO: 4915 - DNA, 15 bp, Homo sapiens
gtggagagaactgca

SEQ ID NO: 4916 - DNA, 15 bp, Homo sapiens
agtggagagaactgc

SEQ ID NO: 4917 - DNA, 15 bp, Homo sapiens
gagtggagagaactg

SEQ ID NO: 4918 - DNA, 15 bp, Homo sapiens
ggagtggagagaact

SEQ ID NO: 4919 - DNA, 15 bp, Homo sapiens
tggagtggagagaac

SEQ ID NO: 4920 - DNA, 15 bp, Homo sapiens
ctggagtggagagaa

SEQ ID NO: 4921 - DNA, 15 bp, Homo sapiens
gctggagtggagaga

SEQ ID NO: 4922 - DNA, 15 bp, Homo sapiens
tgctggagtggagag

SEQ ID NO: 4923 - DNA, 15 bp, Homo sapiens
gtgctggagtggaga

SEQ ID NO: 4924 - DNA, 15 bp, Homo sapiens
tgtgctggagtggag

SEQ ID NO: 4925 - DNA, 15 bp, Homo sapiens
gtgtgctggagtgga

SEQ ID NO: 4926 - DNA, 15 bp, Homo sapiens
agtgtgctggagtgg

SEQ ID NO: 4927 - DNA, 15 bp, Homo sapiens
cagtgtgctggagtg

SEQ ID NO: 4928 - DNA, 15 bp, Homo sapiens
gcagtgtgctggagt

SEQ ID NO: 4929 - DNA, 15 bp, Homo sapiens
agcagtgtgctggag

SEQ ID NO: 4930 - DNA, 15 bp, Homo sapiens
cagcagtgtgctgga

SEQ ID NO: 4931 - DNA, 15 bp, Homo sapiens
tcagcagtgtgctgg

SEQ ID NO: 4932 - DNA, 15 bp, Homo sapiens
atcagcagtgtgctg

SEQ ID NO: 4933 - DNA, 15 bp, Homo sapiens
gatcagcagtgtgct

SEQ ID NO: 4934 - DNA, 15 bp, Homo sapiens
tgatcagcagtgtgc

SEQ ID NO: 4935 - DNA, 15 bp, Homo sapiens
atgatcagcagtgtg

SEQ ID NO: 4936 - DNA, 15 bp, Homo sapiens
aatgatcagcagtgt

SEQ ID NO: 4937 - DNA, 15 bp, Homo sapiens
gaatgatcagcagtg

SEQ ID NO: 4938 - DNA, 15 bp, Homo sapiens
tgaatgatcagcagt

SEQ ID NO: 4939 - DNA, 15 bp, Homo sapiens
gtgaatgatcagcag

SEQ ID NO: 4940 - DNA, 15 bp, Homo sapiens
tgtgaatgatcagca

SEQ ID NO: 4941 - DNA, 15 bp, Homo sapiens
gtgtgaatgatcagc

SEQ ID NO: 4942 - DNA, 15 bp, Homo sapiens
ggtgtgaatgatcag

SEQ ID NO: 4943 - DNA, 15 bp, Homo sapiens
tggtgtgaatgatca

SEQ ID NO: 4944 - DNA, 15 bp, Homo sapiens
ttggtgtgaatgatc

SEQ ID NO: 4945 - DNA, 15 bp, Homo sapiens
cttggtgtgaatgat

SEQ ID NO: 4946 - DNA, 15 bp, Homo sapiens
gcttggtgtgaatga

SEQ ID NO: 4947 - DNA, 15 bp, Homo sapiens
agcttggtgtgaatg

SEQ ID NO: 4948 - DNA, 15 bp, Homo sapiens
gagcttggtgtgaat

SEQ ID NO: 4949 - DNA, 15 bp, Homo sapiens
tgagcttggtgtgaa

SEQ ID NO: 4950 - DNA, 15 bp, Homo sapiens
atgagcttggtgtga

SEQ ID NO: 4951 - DNA, 15 bp, Homo sapiens
aatgagcttggtgtg

SEQ ID NO: 4952 - DNA, 15 bp, Homo sapiens
aaatgagcttggtgt

SEQ ID NO: 4953 - DNA, 15 bp, Homo sapiens
gaaatgagcttggtg

SEQ ID NO: 4954 - DNA, 15 bp, Homo sapiens
ggaaatgagcttggt

SEQ ID NO: 4955 - DNA, 15 bp, Homo sapiens
tggaaatgagcttgg

SEQ ID NO: 4956 - DNA, 15 bp, Homo sapiens
gtggaaatgagcttg

SEQ ID NO: 4957 - DNA, 15 bp, Homo sapiens
ggtggaaatgagctt

SEQ ID NO: 4958 - DNA, 15 bp, Homo sapiens
gggtggaaatgagct

SEQ ID NO: 4959 - DNA, 15 bp, Homo sapiens
ggggtggaaatgagc

SEQ ID NO: 4960 - DNA, 15 bp, Homo sapiens
tggggtggaaatgag

SEQ ID NO: 4961 - DNA, 15 bp, Homo sapiens
ctggggtggaaatga

SEQ ID NO: 4962 - DNA, 15 bp, Homo sapiens
cctggggtggaaatg

SEQ ID NO: 4963 - DNA, 15 bp, Homo sapiens
tcctggggtggaaat

SEQ ID NO: 4964 - DNA, 15 bp, Homo sapiens
gtcctggggtggaaa

SEQ ID NO: 4965 - DNA, 15 bp, Homo sapiens
agtcctggggtggaa

SEQ ID NO: 4966 - DNA, 15 bp, Homo sapiens
aagtcctggggtgga

SEQ ID NO: 4967 - DNA, 15 bp, Homo sapiens
aaagtcctggggtgg

SEQ ID NO: 4968 - DNA, 15 bp, Homo sapiens
caaagtcctggggtg

SEQ ID NO: 4969 - DNA, 15 bp, Homo sapiens
gcaaagtcctggggt

SEQ ID NO: 4970 - DNA, 15 bp, Homo sapiens
tgcaaagtcctgggg

SEQ ID NO: 4971 - DNA, 15 bp, Homo sapiens
gtgcaaagtcctggg

SEQ ID NO: 4972 - DNA, 15 bp, Homo sapiens
agtgcaaagtcctgg

SEQ ID NO: 4973 - DNA, 15 bp, Homo sapiens
aagtgcaaagtcctg

SEQ ID NO: 4974 - DNA, 15 bp, Homo sapiens
caagtgcaaagtcct

SEQ ID NO: 4975 - DNA, 15 bp, Homo sapiens
gcaagtgcaaagtcc

SEQ ID NO: 4976 - DNA, 15 bp, Homo sapiens
agcaagtgcaaagtc

SEQ ID NO: 4977 - DNA, 15 bp, Homo sapiens
cagcaagtgcaaagt

SEQ ID NO: 4978 - DNA, 15 bp, Homo sapiens
acagcaagtgcaaag

SEQ ID NO: 4979 - DNA, 15 bp, Homo sapiens
aacagcaagtgcaaa

SEQ ID NO: 4980 - DNA, 15 bp, Homo sapiens
aaacagcaagtgcaa

SEQ ID NO: 4981 - DNA, 15 bp, Homo sapiens
gaaacagcaagtgca

SEQ ID NO: 4982 - DNA, 15 bp, Homo sapiens
ggaaacagcaagtgc

SEQ ID NO: 4983 - DNA, 15 bp, Homo sapiens
aggaaacagcaagtg

SEQ ID NO: 4984 - DNA, 15 bp, Homo sapiens
gaggaaacagcaagt

SEQ ID NO: 4985 - DNA, 15 bp, Homo sapiens
agaggaaacagcaag

SEQ ID NO: 4986 - DNA, 15 bp, Homo sapiens
tagaggaaacagcaa

SEQ ID NO: 4987 - DNA, 15 bp, Homo sapiens
gtagaggaaacagca

SEQ ID NO: 4988 - DNA, 15 bp, Homo sapiens
ggtagaggaaacagc

SEQ ID NO: 4989 - DNA, 15 bp, Homo sapiens
aggtagaggaaacag

SEQ ID NO: 4990 - DNA, 15 bp, Homo sapiens
taggtagaggaaaca

SEQ ID NO: 4991 - DNA, 15 bp, Homo sapiens
ctaggtagaggaaac

SEQ ID NO: 4992 - DNA, 15 bp, Homo sapiens
tctaggtagaggaaa

SEQ ID NO: 4993 - DNA, 15 bp, Homo sapiens
ttctaggtagaggaa

SEQ ID NO: 4994 - DNA, 15 bp, Homo sapiens
gttctaggtagagga

SEQ ID NO: 4995 - DNA, 15 bp, Homo sapiens
tgttctaggtagagg

SEQ ID NO: 4996 - DNA, 15 bp, Homo sapiens
gtgttctaggtagag

SEQ ID NO: 4997 - DNA, 15 bp, Homo sapiens
ggtgttctaggtaga

SEQ ID NO: 4998 - DNA, 15 bp, Homo sapiens
gggtgttctaggtag

SEQ ID NO: 4999 - DNA, 15 bp, Homo sapiens
agggtgttctaggta

SEQ ID NO: 5000 - DNA, 15 bp, Homo sapiens
aagggtgttctaggt

SEQ ID NO: 5001 - DNA, 15 bp, Homo sapiens
caagggtgttctagg

SEQ ID NO: 5002 - DNA, 15 bp, Homo sapiens
acaagggtgttctag

SEQ ID NO: 5003 - DNA, 15 bp, Homo sapiens
aacaagggtgttcta

SEQ ID NO: 5004 - DNA, 15 bp, Homo sapiens
gaacaagggtgttct

SEQ ID NO: 5005 - DNA, 15 bp, Homo sapiens
ggaacaagggtgttc

SEQ ID NO: 5006 - DNA, 15 bp, Homo sapiens
tggaacaagggtgtt

SEQ ID NO: 5007 - DNA, 15 bp, Homo sapiens
atggaacaagggtgt

SEQ ID NO: 5008 - DNA, 15 bp, Homo sapiens
tatggaacaagggtg

SEQ ID NO: 5009 - DNA, 15 bp, Homo sapiens
atatggaacaagggt

SEQ ID NO: 5010 - DNA, 15 bp, Homo sapiens
tatatggaacaaggg

SEQ ID NO: 5011 - DNA, 15 bp, Homo sapiens
atatatggaacaagg

SEQ ID NO: 5012 - DNA, 15 bp, Homo sapiens
catatatggaacaag

SEQ ID NO: 5013 - DNA, 15 bp, Homo sapiens
gcatatatggaacaa

SEQ ID NO: 5014 - DNA, 15 bp, Homo sapiens
tgcatatatggaaca

SEQ ID NO: 5015 - DNA, 15 bp, Homo sapiens
gtgcatatatggaac

SEQ ID NO: 5016 - DNA, 15 bp, Homo sapiens
tgtgcatatatggaa

SEQ ID NO: 5017 - DNA, 15 bp, Homo sapiens
atgtgcatatatgga

SEQ ID NO: 5018 - DNA, 15 bp, Homo sapiens
tatgtgcatatatgg

SEQ ID NO: 5019 - DNA, 15 bp, Homo sapiens
ttatgtgcatatatg

SEQ ID NO: 5020 - DNA, 15 bp, Homo sapiens
gttatgtgcatatat

SEQ ID NO: 5021 - DNA, 15 bp, Homo sapiens
agttatgtgcatata

SEQ ID NO: 5022 - DNA, 15 bp, Homo sapiens
cagttatgtgcatat

SEQ ID NO: 5023 - DNA, 15 bp, Homo sapiens
acagttatgtgcata

SEQ ID NO: 5024 - DNA, 15 bp, Homo sapiens
aacagttatgtgcat

SEQ ID NO: 5025 - DNA, 15 bp, Homo sapiens
taacagttatgtgca

SEQ ID NO: 5026 - DNA, 15 bp, Homo sapiens
ataacagttatgtgc

SEQ ID NO: 5027 - DNA, 15 bp, Homo sapiens
aataacagttatgtg

SEQ ID NO: 5028 - DNA, 15 bp, Homo sapiens
gaataacagttatgt

SEQ ID NO: 5029 - DNA, 15 bp, Homo sapiens
tgaataacagttatg

SEQ ID NO: 5030 - DNA, 15 bp, Homo sapiens
atgaataacagttat

SEQ ID NO: 5031 - DNA, 15 bp, Homo sapiens
gatgaataacagtta

SEQ ID NO: 5032 - DNA, 15 bp, Homo sapiens
tgatgaataacagtt

SEQ ID NO: 5033 - DNA, 15 bp, Homo sapiens
atgatgaataacagt

SEQ ID NO: 5034 - DNA, 15 bp, Homo sapiens
gatgatgaataacag

SEQ ID NO: 5035 - DNA, 15 bp, Homo sapiens
ggatgatgaataaca

SEQ ID NO: 5036 - DNA, 15 bp, Homo sapiens
tggatgatgaataac

SEQ ID NO: 5037 - DNA, 15 bp, Homo sapiens
ctggatgatgaataa

SEQ ID NO: 5038 - DNA, 15 bp, Homo sapiens
cctggatgatgaata

SEQ ID NO: 5039 - DNA, 15 bp, Homo sapiens
tcctggatgatgaat

SEQ ID NO: 5040 - DNA, 15 bp, Homo sapiens
gtcctggatgatgaa

SEQ ID NO: 5041 - DNA, 15 bp, Homo sapiens
agtcctggatgatga

SEQ ID NO: 5042 - DNA, 15 bp, Homo sapiens
aagtcctggatgatg

SEQ ID NO: 5043 - DNA, 15 bp, Homo sapiens
taagtcctggatgat

SEQ ID NO: 5044 - DNA, 15 bp, Homo sapiens
ctaagtcctggatga

SEQ ID NO: 5045 - DNA, 15 bp, Homo sapiens
actaagtcctggatg

SEQ ID NO: 5046 - DNA, 15 bp, Homo sapiens
aactaagtcctggat

SEQ ID NO: 5047 - DNA, 15 bp, Homo sapiens
aaactaagtcctgga

SEQ ID NO: 5048 - DNA, 15 bp, Homo sapiens
taaactaagtcctgg

SEQ ID NO: 5049 - DNA, 15 bp, Homo sapiens
ttaaactaagtcctg

SEQ ID NO: 5050 - DNA, 15 bp, Homo sapiens
tttaaactaagtcct

SEQ ID NO: 5051 - DNA, 15 bp, Homo sapiens
atttaaactaagtcc

SEQ ID NO: 5052 - DNA, 15 bp, Homo sapiens
catttaaactaagtc

SEQ ID NO: 5053 - DNA, 15 bp, Homo sapiens
tcatttaaactaagt

SEQ ID NO: 5054 - DNA, 15 bp, Homo sapiens
ttcatttaaactaag

SEQ ID NO: 5055 - DNA, 15 bp, Homo sapiens
tttcatttaaactaa

SEQ ID NO: 5056 - DNA, 15 bp, Homo sapiens
gtttcatttaaacta

SEQ ID NO: 5057 - DNA, 15 bp, Homo sapiens
ggtttcatttaaact

SEQ ID NO: 5058 - DNA, 15 bp, Homo sapiens
aggtttcatttaaac

SEQ ID NO: 5059 - DNA, 15 bp, Homo sapiens
gaggtttcatttaaa

SEQ ID NO: 5060 - DNA, 15 bp, Homo sapiens
ggaggtttcatttaa

SEQ ID NO: 5061 - DNA, 15 bp, Homo sapiens
aggaggtttcattta

SEQ ID NO: 5062 - DNA, 15 bp, Homo sapiens
gaggaggtttcattt

SEQ ID NO: 5063 - DNA, 15 bp, Homo sapiens
tgaggaggtttcatt

SEQ ID NO: 5064 - DNA, 15 bp, Homo sapiens
ctgaggaggtttcat

SEQ ID NO: 5065 - DNA, 15 bp, Homo sapiens
tctgaggaggtttca

SEQ ID NO: 5066 - DNA, 15 bp, Homo sapiens
ttctgaggaggtttc

SEQ ID NO: 5067 - DNA, 15 bp, Homo sapiens
tttctgaggaggttt

SEQ ID NO: 5068 - DNA, 15 bp, Homo sapiens
ttttctgaggaggtt

SEQ ID NO: 5069 - DNA, 15 bp, Homo sapiens
cttttctgaggaggt

SEQ ID NO: 5070 - DNA, 15 bp, Homo sapiens
acttttctgaggagg

SEQ ID NO: 5071 - DNA, 15 bp, Homo sapiens
gacttttctgaggag

SEQ ID NO: 5072 - DNA, 15 bp, Homo sapiens
ggacttttctgagga

SEQ ID NO: 5073 - DNA, 15 bp, Homo sapiens
aggacttttctgagg

SEQ ID NO: 5074 - DNA, 15 bp, Homo sapiens
gaggacttttctgag

SEQ ID NO: 5075 - DNA, 15 bp, Homo sapiens
ggaggacttttctga

SEQ ID NO: 5076 - DNA, 15 bp, Homo sapiens
gggaggacttttctg

SEQ ID NO: 5077 - DNA, 15 bp, Homo sapiens
agggaggacttttct

SEQ ID NO: 5078 - DNA, 15 bp, Homo sapiens
cagggaggacttttc

SEQ ID NO: 5079 - DNA, 15 bp, Homo sapiens
acagggaggactttt

SEQ ID NO: 5080 - DNA, 15 bp, Homo sapiens
aacagggaggacttt

SEQ ID NO: 5081 - DNA, 15 bp, Homo sapiens
gaacagggaggactt

SEQ ID NO: 5082 - DNA, 15 bp, Homo sapiens
ggaacagggaggact

SEQ ID NO: 5083 - DNA, 15 bp, Homo sapiens
aggaacagggaggac

SEQ ID NO: 5084 - DNA, 15 bp, Homo sapiens
aaggaacagggagga

SEQ ID NO: 5085 - DNA, 15 bp, Homo sapiens
aaaggaacagggagg

SEQ ID NO: 5086 - DNA, 15 bp, Homo sapiens
aaaaggaacagggag

SEQ ID NO: 5087 - DNA, 15 bp, Homo sapiens
gaaaaggaacaggga

SEQ ID NO: 5088 - DNA, 15 bp, Homo sapiens
ggaaaaggaacaggg

SEQ ID NO: 5089 - DNA, 15 bp, Homo sapiens
aggaaaaggaacagg

SEQ ID NO: 5090 - DNA, 15 bp, Homo sapiens
taggaaaaggaacag

SEQ ID NO: 5091 - DNA, 15 bp, Homo sapiens
gtaggaaaaggaaca

SEQ ID NO: 5092 - DNA, 15 bp, Homo sapiens
tgtaggaaaaggaac

SEQ ID NO: 5093 - DNA, 15 bp, Homo sapiens
ttgtaggaaaaggaa

SEQ ID NO: 5094 - DNA, 15 bp, Homo sapiens
tttgtaggaaaagga

SEQ ID NO: 5095 - DNA, 15 bp, Homo sapiens
gtttgtaggaaaagg

SEQ ID NO: 5096 - DNA, 15 bp, Homo sapiens
agtttgtaggaaaag

SEQ ID NO: 5097 - DNA, 15 bp, Homo sapiens
gagtttgtaggaaaa

SEQ ID NO: 5098 - DNA, 15 bp, Homo sapiens
agagtttgtaggaaa

SEQ ID NO: 5099 - DNA, 15 bp, Homo sapiens
gagagtttgtaggaa

SEQ ID NO: 5100 - DNA, 15 bp, Homo sapiens
ggagagtttgtagga

SEQ ID NO: 5101 - DNA, 15 bp, Homo sapiens
gggagagtttgtagg

SEQ ID NO: 5102 - DNA, 15 bp, Homo sapiens
ggggagagtttgtag

SEQ ID NO: 5103 - DNA, 15 bp, Homo sapiens
gggggagagtttgta

SEQ ID NO: 5104 - DNA, 15 bp, Homo sapiens
tgggggagagtttgt

SEQ ID NO: 5105 - DNA, 15 bp, Homo sapiens
gtgggggagagtttg

SEQ ID NO: 5106 - DNA, 15 bp, Homo sapiens
ggtgggggagagttt

SEQ ID NO: 5107 - DNA, 15 bp, Homo sapiens
aggtgggggagagtt

SEQ ID NO: 5108 - DNA, 15 bp, Homo sapiens
gaggtgggggagagt

SEQ ID NO: 5109 - DNA, 15 bp, Homo sapiens
ggaggtgggggagag

SEQ ID NO: 5110 - DNA, 15 bp, Homo sapiens
gggaggtgggggaga

SEQ ID NO: 5111 - DNA, 15 bp, Homo sapiens
ggggaggtgggggag

SEQ ID NO: 5112 - DNA, 15 bp, Homo sapiens
tggggaggtggggga

SEQ ID NO: 5113 - DNA, 15 bp, Homo sapiens
gtggggaggtggggg

SEQ ID NO: 5114 - DNA, 15 bp, Homo sapiens
ggtggggaggtgggg

SEQ ID NO: 5115 - DNA, 15 bp, Homo sapiens
cggtggggaggtggg

SEQ ID NO: 5116 - DNA, 15 bp, Homo sapiens
acggtggggaggtgg

SEQ ID NO: 5117 - DNA, 15 bp, Homo sapiens
tacggtggggaggtg

SEQ ID NO: 5118 - DNA, 15 bp, Homo sapiens
atacggtggggaggt

SEQ ID NO: 5119 - DNA, 15 bp, Homo sapiens
gatacggtggggagg

SEQ ID NO: 5120 - DNA, 15 bp, Homo sapiens
agatacggtggggag

SEQ ID NO: 5121 - DNA, 15 bp, Homo sapiens
cagatacggtgggga

SEQ ID NO: 5122 - DNA, 15 bp, Homo sapiens
gcagatacggtgggg

SEQ ID NO: 5123 - DNA, 15 bp, Homo sapiens
tgcagatacggtggg

SEQ ID NO: 5124 - DNA, 15 bp, Homo sapiens
atgcagatacggtgg

SEQ ID NO: 5125 - DNA, 15 bp, Homo sapiens
tatgcagatacggtg

SEQ ID NO: 5126 - DNA, 15 bp, Homo sapiens
ttatgcagatacggt

SEQ ID NO: 5127 - DNA, 15 bp, Homo sapiens
gttatgcagatacgg

SEQ ID NO: 5128 - DNA, 15 bp, Homo sapiens
agttatgcagatacg

SEQ ID NO: 5129 - DNA, 15 bp, Homo sapiens
gagttatgcagatac

SEQ ID NO: 5130 - DNA, 15 bp, Homo sapiens
agagttatgcagata

SEQ ID NO: 5131 - DNA, 15 bp, Homo sapiens
aagagttatgcagat

SEQ ID NO: 5132 - DNA, 15 bp, Homo sapiens
gaagagttatgcaga

SEQ ID NO: 5133 - DNA, 15 bp, Homo sapiens
agaagagttatgcag

SEQ ID NO: 5134 - DNA, 15 bp, Homo sapiens
aagaagagttatgca

SEQ ID NO: 5135 - DNA, 15 bp, Homo sapiens
aaagaagagttatgc

SEQ ID NO: 5136 - DNA, 15 bp, Homo sapiens
taaagaagagttatg

SEQ ID NO: 5137 - DNA, 15 bp, Homo sapiens
ataaagaagagttat

SEQ ID NO: 5138 - DNA, 15 bp, Homo sapiens
gataaagaagagtta

SEQ ID NO: 5139 - DNA, 15 bp, Homo sapiens
tgataaagaagagtt

SEQ ID NO: 5140 - DNA, 15 bp, Homo sapiens
atgataaagaagagt

SEQ ID NO: 5141 - DNA, 15 bp, Homo sapiens
gatgataaagaagag

SEQ ID NO: 5142 - DNA, 15 bp, Homo sapiens
tgatgataaagaaga

SEQ ID NO: 5143 - DNA, 15 bp, Homo sapiens
atgatgataaagaag

SEQ ID NO: 5144 - DNA, 15 bp, Homo sapiens
aatgatgataaagaa

SEQ ID NO: 5145 - DNA, 15 bp, Homo sapiens
gaatgatgataaaga

SEQ ID NO: 5146 - DNA, 15 bp, Homo sapiens
cgaatgatgataaag

SEQ ID NO: 5147 - DNA, 15 bp, Homo sapiens
ccgaatgatgataaa

SEQ ID NO: 5148 - DNA, 15 bp, Homo sapiens
cccgaatgatgataa

SEQ ID NO: 5149 - DNA, 15 bp, Homo sapiens
tcccgaatgatgata

SEQ ID NO: 5150 - DNA, 15 bp, Homo sapiens
gtcccgaatgatgat

SEQ ID NO: 5151 - DNA, 15 bp, Homo sapiens
agtcccgaatgatga

SEQ ID NO: 5152 - DNA, 15 bp, Homo sapiens
gagtcccgaatgatg

SEQ ID NO: 5153 - DNA, 15 bp, Homo sapiens
tgagtcccgaatgat

SEQ ID NO: 5154 - DNA, 15 bp, Homo sapiens
gtgagtcccgaatga

SEQ ID NO: 5155 - DNA, 15 bp, Homo sapiens
ggtgagtcccgaatg

SEQ ID NO: 5156 - DNA, 15 bp, Homo sapiens
aggtgagtcccgaat

SEQ ID NO: 5157 - DNA, 15 bp, Homo sapiens
gaggtgagtcccgaa

SEQ ID NO: 5158 - DNA, 15 bp, Homo sapiens
ggaggtgagtcccga

SEQ ID NO: 5159 - DNA, 15 bp, Homo sapiens
aggaggtgagtcccg

SEQ ID NO: 5160 - DNA, 15 bp, Homo sapiens
gaggaggtgagtccc

SEQ ID NO: 5161 - DNA, 15 bp, Homo sapiens
tgaggaggtgagtcc

SEQ ID NO: 5162 - DNA, 15 bp, Homo sapiens
ttgaggaggtgagtc

SEQ ID NO: 5163 - DNA, 15 bp, Homo sapiens
tttgaggaggtgagt

SEQ ID NO: 5164 - DNA, 15 bp, Homo sapiens
ctttgaggaggtgag

SEQ ID NO: 5165 - DNA, 15 bp, Homo sapiens
cctttgaggaggtga

SEQ ID NO: 5166 - DNA, 15 bp, Homo sapiens
gcctttgaggaggtg

SEQ ID NO: 5167 - DNA, 15 bp, Homo sapiens
ggcctttgaggaggt

SEQ ID NO: 5168 - DNA, 15 bp, Homo sapiens
gggcctttgaggagg

SEQ ID NO: 5169 - DNA, 15 bp, Homo sapiens
agggcctttgaggag

SEQ ID NO: 5170 - DNA, 15 bp, Homo sapiens
gagggcctttgagga

SEQ ID NO: 5171 - DNA, 15 bp, Homo sapiens
ggagggcctttgagg

SEQ ID NO: 5172 - DNA, 15 bp, Homo sapiens
gggagggcctttgag

SEQ ID NO: 5173 - DNA, 15 bp, Homo sapiens
agggagggcctttga

SEQ ID NO: 5174 - DNA, 15 bp, Homo sapiens
aagggagggcctttg

SEQ ID NO: 5175 - DNA, 15 bp, Homo sapiens
aaagggagggccttt

SEQ ID NO: 5176 - DNA, 15 bp, Homo sapiens
taaagggagggcctt

SEQ ID NO: 5177 - DNA, 15 bp, Homo sapiens
ttaaagggagggcct

SEQ ID NO: 5178 - DNA, 15 bp, Homo sapiens
gttaaagggagggcc

SEQ ID NO: 5179 - DNA, 15 bp, Homo sapiens
tgttaaagggagggc

SEQ ID NO: 5180 - DNA, 15 bp, Homo sapiens
ctgttaaagggaggg

SEQ ID NO: 5181 - DNA, 15 bp, Homo sapiens
gctgttaaagggagg

SEQ ID NO: 5182 - DNA, 15 bp, Homo sapiens
tgctgttaaagggag

SEQ ID NO: 5183 - DNA, 15 bp, Homo sapiens
atgctgttaaaggga

SEQ ID NO: 5184 - DNA, 15 bp, Homo sapiens
catgctgttaaaggg

SEQ ID NO: 5185 - DNA, 15 bp, Homo sapiens
acatgctgttaaagg

SEQ ID NO: 5186 - DNA, 15 bp, Homo sapiens
gacatgctgttaaag

SEQ ID NO: 5187 - DNA, 15 bp, Homo sapiens
agacatgctgttaaa

SEQ ID NO: 5188 - DNA, 15 bp, Homo sapiens
cagacatgctgttaa

SEQ ID NO: 5189 - DNA, 15 bp, Homo sapiens
tcagacatgctgtta

SEQ ID NO: 5190 - DNA, 15 bp, Homo sapiens
gtcagacatgctgtt

SEQ ID NO: 5191 - DNA, 15 bp, Homo sapiens
tgtcagacatgctgt

SEQ ID NO: 5192 - DNA, 15 bp, Homo sapiens
gtgtcagacatgctg

SEQ ID NO: 5193 - DNA, 15 bp, Homo sapiens
tgtgtcagacatgct

SEQ ID NO: 5194 - DNA, 15 bp, Homo sapiens
ctgtgtcagacatgc

SEQ ID NO: 5195 - DNA, 15 bp, Homo sapiens
actgtgtcagacatg

SEQ ID NO: 5196 - DNA, 15 bp, Homo sapiens
gactgtgtcagacat

SEQ ID NO: 5197 - DNA, 15 bp, Homo sapiens
tgactgtgtcagaca

SEQ ID NO: 5198 - DNA, 15 bp, Homo sapiens
atgactgtgtcagac

SEQ ID NO: 5199 - DNA, 15 bp, Homo sapiens
aatgactgtgtcaga

SEQ ID NO: 5200 - DNA, 15 bp, Homo sapiens
gaatgactgtgtcag

SEQ ID NO: 5201 - DNA, 15 bp, Homo sapiens
ggaatgactgtgtca

SEQ ID NO: 5202 - DNA, 15 bp, Homo sapiens
gggaatgactgtgtc

SEQ ID NO: 5203 - DNA, 15 bp, Homo sapiens
agggaatgactgtgt

SEQ ID NO: 5204 - DNA, 15 bp, Homo sapiens
gagggaatgactgtg

SEQ ID NO: 5205 - DNA, 15 bp, Homo sapiens
ggagggaatgactgt

SEQ ID NO: 5206 - DNA, 15 bp, Homo sapiens
gggagggaatgactg

SEQ ID NO: 5207 - DNA, 15 bp, Homo sapiens
tgggagggaatgact

SEQ ID NO: 5208 - DNA, 15 bp, Homo sapiens
ttgggagggaatgac

SEQ ID NO: 5209 - DNA, 15 bp, Homo sapiens
attgggagggaatga

SEQ ID NO: 5210 - DNA, 15 bp, Homo sapiens
gattgggagggaatg

SEQ ID NO: 5211 - DNA, 15 bp, Homo sapiens
agattgggagggaat

SEQ ID NO: 5212 - DNA, 15 bp, Homo sapiens
tagattgggagggaa

SEQ ID NO: 5213 - DNA, 15 bp, Homo sapiens
atagattgggaggga

SEQ ID NO: 5214 - DNA, 15 bp, Homo sapiens
gatagattgggaggg

SEQ ID NO: 5215 - DNA, 15 bp, Homo sapiens
ggatagattgggagg

SEQ ID NO: 5216 - DNA, 15 bp, Homo sapiens
gggatagattgggag

SEQ ID NO: 5217 - DNA, 15 bp, Homo sapiens
ggggatagattggga

SEQ ID NO: 5218 - DNA, 15 bp, Homo sapiens
aggggatagattggg

SEQ ID NO: 5219 - DNA, 15 bp, Homo sapiens
aaggggatagattgg

SEQ ID NO: 5220 - DNA, 15 bp, Homo sapiens
taaggggatagattg

SEQ ID NO: 5221 - DNA, 15 bp, Homo sapiens
gtaaggggatagatt

SEQ ID NO: 5222 - DNA, 15 bp, Homo sapiens
agtaaggggatagat

SEQ ID NO: 5223 - DNA, 15 bp, Homo sapiens
gagtaaggggataga

SEQ ID NO: 5224 - DNA, 15 bp, Homo sapiens
ggagtaaggggatag

SEQ ID NO: 5225 - DNA, 15 bp, Homo sapiens
gggagtaaggggata

SEQ ID NO: 5226 - DNA, 15 bp, Homo sapiens
agggagtaaggggat

SEQ ID NO: 5227 - DNA, 15 bp, Homo sapiens
aagggagtaagggga

SEQ ID NO: 5228 - DNA, 15 bp, Homo sapiens
gaagggagtaagggg

SEQ ID NO: 5229 - DNA, 15 bp, Homo sapiens
tgaagggagtaaggg

SEQ ID NO: 5230 - DNA, 15 bp, Homo sapiens
ctgaagggagtaagg

SEQ ID NO: 5231 - DNA, 15 bp, Homo sapiens
gctgaagggagtaag

SEQ ID NO: 5232 - DNA, 15 bp, Homo sapiens
tgctgaagggagtaa

SEQ ID NO: 5233 - DNA, 15 bp, Homo sapiens
ctgctgaagggagta

SEQ ID NO: 5234 - DNA, 15 bp, Homo sapiens
gctgctgaagggagt

SEQ ID NO: 5235 - DNA, 15 bp, Homo sapiens
agctgctgaagggag

SEQ ID NO: 5236 - DNA, 15 bp, Homo sapiens
tagctgctgaaggga

SEQ ID NO: 5237 - DNA, 15 bp, Homo sapiens
ttagctgctgaaggg

SEQ ID NO: 5238 - DNA, 15 bp, Homo sapiens
gttagctgctgaagg

SEQ ID NO: 5239 - DNA, 15 bp, Homo sapiens
agttagctgctgaag

SEQ ID NO: 5240 - DNA, 15 bp, Homo sapiens
aagttagctgctgaa

SEQ ID NO: 5241 - DNA, 15 bp, Homo sapiens
aaagttagctgctga

SEQ ID NO: 5242 - DNA, 15 bp, Homo sapiens
caaagttagctgctg

SEQ ID NO: 5243 - DNA, 15 bp, Homo sapiens
acaaagttagctgct

SEQ ID NO: 5244 - DNA, 15 bp, Homo sapiens
gacaaagttagctgc

SEQ ID NO: 5245 - DNA, 15 bp, Homo sapiens
ggacaaagttagctg

SEQ ID NO: 5246 - DNA, 15 bp, Homo sapiens
gggacaaagttagct

SEQ ID NO: 5247 - DNA, 15 bp, Homo sapiens
agggacaaagttagc

SEQ ID NO: 5248 - DNA, 15 bp, Homo sapiens
tagggacaaagttag

SEQ ID NO: 5249 - DNA, 15 bp, Homo sapiens
atagggacaaagtta

SEQ ID NO: 5250 - DNA, 15 bp, Homo sapiens
aatagggacaaagtt

SEQ ID NO: 5251 - DNA, 15 bp, Homo sapiens
aaatagggacaaagt

SEQ ID NO: 5252 - DNA, 15 bp, Homo sapiens
taaatagggacaaag

SEQ ID NO: 5253 - DNA, 15 bp, Homo sapiens
ataaatagggacaaa

SEQ ID NO: 5254 - DNA, 15 bp, Homo sapiens
gataaatagggacaa

SEQ ID NO: 5255 - DNA, 15 bp, Homo sapiens
ggataaatagggaca

SEQ ID NO: 5256 - DNA, 15 bp, Homo sapiens
aggataaatagggac

SEQ ID NO: 5257 - DNA, 15 bp, Homo sapiens
taggataaataggga

SEQ ID NO: 5258 - DNA, 15 bp, Homo sapiens
ataggataaataggg

SEQ ID NO: 5259 - DNA, 15 bp, Homo sapiens
gataggataaatagg

SEQ ID NO: 5260 - DNA, 15 bp, Homo sapiens
agataggataaatag

SEQ ID NO: 5261 - DNA, 15 bp, Homo sapiens
cagataggataaata

SEQ ID NO: 5262 - DNA, 15 bp, Homo sapiens
gcagataggataaat

SEQ ID NO: 5263 - DNA, 15 bp, Homo sapiens
agcagataggataaa

SEQ ID NO: 5264 - DNA, 15 bp, Homo sapiens
aagcagataggataa

SEQ ID NO: 5265 - DNA, 15 bp, Homo sapiens
caagcagataggata

SEQ ID NO: 5266 - DNA, 15 bp, Homo sapiens
gcaagcagataggat

SEQ ID NO: 5267 - DNA, 15 bp, Homo sapiens
agcaagcagatagga

SEQ ID NO: 5268 - DNA, 15 bp, Homo sapiens
aagcaagcagatagg

SEQ ID NO: 5269 - DNA, 15 bp, Homo sapiens
caagcaagcagatag

SEQ ID NO: 5270 - DNA, 15 bp, Homo sapiens
gcaagcaagcagata

SEQ ID NO: 5271 - DNA, 15 bp, Homo sapiens
agcaagcaagcagat

SEQ ID NO: 5272 - DNA, 15 bp, Homo sapiens
aagcaagcaagcaga

SEQ ID NO: 5273 - DNA, 15 bp, Homo sapiens
caagcaagcaagcag

SEQ ID NO: 5274 - DNA, 15 bp, Homo sapiens
acaagcaagcaagca

SEQ ID NO: 5275 - DNA, 15 bp, Homo sapiens
aacaagcaagcaagc

SEQ ID NO: 5276 - DNA, 15 bp, Homo sapiens
aaacaagcaagcaag

SEQ ID NO: 5277 - DNA, 15 bp, Homo sapiens
aaaacaagcaagcaa

SEQ ID NO: 5278 - DNA, 15 bp, Homo sapiens
aaaaacaagcaagca

SEQ ID NO: 5279 - DNA, 15 bp, Homo sapiens
aaaaaacaagcaagc

SEQ ID NO: 5280 - DNA, 15 bp, Homo sapiens
gaaaaaacaagcaag

SEQ ID NO: 5281 - DNA, 15 bp, Homo sapiens
tgaaaaaacaagcaa

SEQ ID NO: 5282 - DNA, 15 bp, Homo sapiens
ttgaaaaaacaagca

SEQ ID NO: 5283 - DNA, 15 bp, Homo sapiens
tttgaaaaaacaagc

SEQ ID NO: 5284 - DNA, 15 bp, Homo sapiens
gtttgaaaaaacaag

SEQ ID NO: 5285 - DNA, 15 bp, Homo sapiens
agtttgaaaaaacaa

SEQ ID NO: 5286 - DNA, 15 bp, Homo sapiens
cagtttgaaaaaaca

SEQ ID NO: 5287 - DNA, 15 bp, Homo sapiens
acagtttgaaaaaac

SEQ ID NO: 5288 - DNA, 15 bp, Homo sapiens
gacagtttgaaaaaa

SEQ ID NO: 5289 - DNA, 15 bp, Homo sapiens
agacagtttgaaaaa

SEQ ID NO: 5290 - DNA, 15 bp, Homo sapiens
gagacagtttgaaaa

SEQ ID NO: 5291 - DNA, 15 bp, Homo sapiens
ggagacagtttgaaa

SEQ ID NO: 5292 - DNA, 15 bp, Homo sapiens
gggagacagtttgaa

SEQ ID NO: 5293 - DNA, 15 bp, Homo sapiens
tgggagacagtttga

SEQ ID NO: 5294 - DNA, 15 bp, Homo sapiens
atgggagacagtttg

SEQ ID NO: 5295 - DNA, 15 bp, Homo sapiens
tatgggagacagttt

SEQ ID NO: 5296 - DNA, 15 bp, Homo sapiens
ctatgggagacagtt

SEQ ID NO: 5297 - DNA, 15 bp, Homo sapiens
cctatgggagacagt

SEQ ID NO: 5298 - DNA, 15 bp, Homo sapiens
tcctatgggagacag

SEQ ID NO: 5299 - DNA, 15 bp, Homo sapiens
ctcctatgggagaca

SEQ ID NO: 5300 - DNA, 15 bp, Homo sapiens
gctcctatgggagac

SEQ ID NO: 5301 - DNA, 15 bp, Homo sapiens
ggctcctatgggaga

SEQ ID NO: 5302 - DNA, 15 bp, Homo sapiens
aggctcctatgggag

SEQ ID NO: 5303 - DNA, 15 bp, Homo sapiens
caggctcctatggga

SEQ ID NO: 5304 - DNA, 15 bp, Homo sapiens
acaggctcctatggg

SEQ ID NO: 5305 - DNA, 15 bp, Homo sapiens
tacaggctcctatgg

SEQ ID NO: 5306 - DNA, 15 bp, Homo sapiens
atacaggctcctatg

SEQ ID NO: 5307 - DNA, 15 bp, Homo sapiens
catacaggctcctat

SEQ ID NO: 5308 - DNA, 15 bp, Homo sapiens
tcatacaggctccta

SEQ ID NO: 5309 - DNA, 15 bp, Homo sapiens
ttcatacaggctcct

SEQ ID NO: 5310 - DNA, 15 bp, Homo sapiens
attcatacaggctcc

SEQ ID NO: 5311 - DNA, 15 bp, Homo sapiens
gattcatacaggctc

SEQ ID NO: 5312 - DNA, 15 bp, Homo sapiens
ggattcatacaggct

SEQ ID NO: 5313 - DNA, 15 bp, Homo sapiens
aggattcatacaggc

SEQ ID NO: 5314 - DNA, 15 bp, Homo sapiens
aaggattcatacagg

SEQ ID NO: 5315 - DNA, 15 bp, Homo sapiens
caaggattcatacag

SEQ ID NO: 5316 - DNA, 15 bp, Homo sapiens
tcaaggattcataca

SEQ ID NO: 5317 - DNA, 15 bp, Homo sapiens
ctcaaggattcatac

SEQ ID NO: 5318 - DNA, 15 bp, Homo sapiens
cctcaaggattcata

SEQ ID NO: 5319 - DNA, 15 bp, Homo sapiens
ccctcaaggattcat

SEQ ID NO: 5320 - DNA, 15 bp, Homo sapiens
accctcaaggattca

SEQ ID NO: 5321 - DNA, 15 bp, Homo sapiens
taccctcaaggattc

SEQ ID NO: 5322 - DNA, 15 bp, Homo sapiens
ctaccctcaaggatt

SEQ ID NO: 5323 - DNA, 15 bp, Homo sapiens
cctaccctcaaggat

SEQ ID NO: 5324 - DNA, 15 bp, Homo sapiens
ccctaccctcaagga

SEQ ID NO: 5325 - DNA, 15 bp, Homo sapiens
accctaccctcaagg

SEQ ID NO: 5326 - DNA, 15 bp, Homo sapiens
taccctaccctcaag

SEQ ID NO: 5327 - DNA, 15 bp, Homo sapiens
ctaccctaccctcaa

SEQ ID NO: 5328 - DNA, 15 bp, Homo sapiens
tctaccctaccctca

SEQ ID NO: 5329 - DNA, 15 bp, Homo sapiens
atctaccctaccctc

SEQ ID NO: 5330 - DNA, 15 bp, Homo sapiens
catctaccctaccct

SEQ ID NO: 5331 - DNA, 15 bp, Homo sapiens
acatctaccctaccc

SEQ ID NO: 5332 - DNA, 15 bp, Homo sapiens
gacatctaccctacc

SEQ ID NO: 5333 - DNA, 15 bp, Homo sapiens
agacatctaccctac

SEQ ID NO: 5334 - DNA, 15 bp, Homo sapiens
cagacatctacccta

SEQ ID NO: 5335 - DNA, 15 bp, Homo sapiens
acagacatctaccct

SEQ ID NO: 5336 - DNA, 15 bp, Homo sapiens
gacagacatctaccc

SEQ ID NO: 5337 - DNA, 15 bp, Homo sapiens
agacagacatctacc

SEQ ID NO: 5338 - DNA, 15 bp, Homo sapiens
aagacagacatctac

SEQ ID NO: 5339 - DNA, 15 bp, Homo sapiens
caagacagacatcta

SEQ ID NO: 5340 - DNA, 15 bp, Homo sapiens
acaagacagacatct

SEQ ID NO: 5341 - DNA, 15 bp, Homo sapiens
aacaagacagacatc

SEQ ID NO: 5342 - DNA, 15 bp, Homo sapiens
gaacaagacagacat

SEQ ID NO: 5343 - DNA, 15 bp, Homo sapiens
tgaacaagacagaca

SEQ ID NO: 5344 - DNA, 15 bp, Homo sapiens
ctgaacaagacagac

SEQ ID NO: 5345 - DNA, 15 bp, Homo sapiens
cctgaacaagacaga

SEQ ID NO: 5346 - DNA, 15 bp, Homo sapiens
ccctgaacaagacag

SEQ ID NO: 5347 - DNA, 15 bp, Homo sapiens
gccctgaacaagaca

SEQ ID NO: 5348 - DNA, 15 bp, Homo sapiens
aagccctgaacaaga

SEQ ID NO: 5349 - DNA, 15 bp, Homo sapiens
aaagccctgaacaag

SEQ ID NO: 5350 - DNA, 15 bp, Homo sapiens
taaagccctgaacaa

SEQ ID NO: 5351 - DNA, 15 bp, Homo sapiens
gtaaagccctgaaca

SEQ ID NO: 5352 - DNA, 15 bp, Homo sapiens
tgtaaagccctgaac

SEQ ID NO: 5353 - DNA, 15 bp, Homo sapiens
ctgtaaagccctgaa

SEQ ID NO: 5354 - DNA, 15 bp, Homo sapiens
actgtaaagccctga

SEQ ID NO: 5355 - DNA, 15 bp, Homo sapiens
cactgtaaagccctg

SEQ ID NO: 5356 - DNA, 15 bp, Homo sapiens
ccactgtaaagccct

SEQ ID NO: 5357 - DNA, 15 bp, Homo sapiens
tccactgtaaagccc

SEQ ID NO: 5358 - DNA, 15 bp, Homo sapiens
ttccactgtaaagcc

SEQ ID NO: 5359 - DNA, 15 bp, Homo sapiens
gttccactgtaaagc

SEQ ID NO: 5360 - DNA, 15 bp, Homo sapiens
agttccactgtaaag

SEQ ID NO: 5361 - DNA, 15 bp, Homo sapiens
gagttccactgtaaa

SEQ ID NO: 5362 - DNA, 15 bp, Homo sapiens
tgagttccactgtaa

SEQ ID NO: 5363 - DNA, 15 bp, Homo sapiens
ttgagttccactgta

SEQ ID NO: 5364 - DNA, 15 bp, Homo sapiens
attgagttccactgt

SEQ ID NO: 5365 - DNA, 15 bp, Homo sapiens
tattgagttccactg

SEQ ID NO: 5366 - DNA, 15 bp, Homo sapiens
ttattgagttccact

SEQ ID NO: 5367 - DNA, 15 bp, Homo sapiens
tttattgagttccac

SEQ ID NO: 5368 - DNA, 15 bp, Homo sapiens
atttattgagttcca

SEQ ID NO: 5369 - DNA, 15 bp, Homo sapiens
catttattgagttcc

SEQ ID NO: 5370 - DNA, 15 bp, Homo sapiens
ccatttattgagttc

SEQ ID NO: 5371 - DNA, 15 bp, Homo sapiens
tccatttattgagtt

SEQ ID NO: 5372 - DNA, 15 bp, Homo sapiens
ctccatttattgagt

SEQ ID NO: 5373 - DNA, 15 bp, Homo sapiens
cctccatttattgag

SEQ ID NO: 5374 - DNA, 15 bp, Homo sapiens
tcctccatttattga

SEQ ID NO: 5375 - DNA, 15 bp, Homo sapiens
ttcctccatttattg

SEQ ID NO: 5376 - DNA, 15 bp, Homo sapiens
attcctccatttatt

SEQ ID NO: 5377 - DNA, 15 bp, Homo sapiens
tattcctccatttat

SEQ ID NO: 5378 - DNA, 15 bp, Homo sapiens
ttattcctccattta

SEQ ID NO: 5379 - DNA, 15 bp, Homo sapiens
tttattcctccattt

SEQ ID NO: 5380 - DNA, 15 bp, Homo sapiens
ttttattcctccatt

SEQ ID NO: 5381 - DNA, 15 bp, Homo sapiens
gttttattcctccat

SEQ ID NO: 5382 - DNA, 15 bp, Homo sapiens
ggttttattcctcca

SEQ ID NO: 5383 - DNA, 15 bp, Homo sapiens
gggttttattcctcc

SEQ ID NO: 5384 - DNA, 15 bp, Homo sapiens
ggggttttattcctc

SEQ ID NO: 5385 - DNA, 15 bp, Homo sapiens
tggggttttattcct

SEQ ID NO: 5386 - DNA, 15 bp, Homo sapiens
ctggggttttattcc

SEQ ID NO: 5387 - DNA, 15 bp, Homo sapiens
actggggttttattc

SEQ ID NO: 5388 - DNA, 15 bp, Homo sapiens
aactggggttttatt

SEQ ID NO: 5389 - DNA, 15 bp, Homo sapiens
taactggggttttat

SEQ ID NO: 5390 - DNA, 15 bp, Homo sapiens
ttaactggggtttta

SEQ ID NO: 5391 - DNA, 15 bp, Homo sapiens
tttaactggggtttt

SEQ ID NO: 5392 - DNA, 15 bp, Homo sapiens
ttttaactggggttt

SEQ ID NO: 5393 - DNA, 15 bp, Homo sapiens
gttttaactggggtt

SEQ ID NO: 5394 - DNA, 15 bp, Homo sapiens
tgttttaactggggt

SEQ ID NO: 5395 - DNA, 15 bp, Homo sapiens
ctgttttaactgggg

SEQ ID NO: 5396 - DNA, 15 bp, Homo sapiens
actgttttaactggg

SEQ ID NO: 5397 - DNA, 15 bp, Homo sapiens
cactgttttaactgg

SEQ ID NO: 5398 - DNA, 15 bp, Homo sapiens
gcactgttttaactg

SEQ ID NO: 5399 - DNA, 15 bp, Homo sapiens
ggcactgttttaact

SEQ ID NO: 5400 - DNA, 15 bp, Homo sapiens
aggcactgttttaac

SEQ ID NO: 5401 - DNA, 15 bp, Homo sapiens
taggcactgttttaa

SEQ ID NO: 5402 - DNA, 15 bp, Homo sapiens
ctaggcactgtttta

SEQ ID NO: 5403 - DNA, 15 bp, Homo sapiens
gctaggcactgtttt

SEQ ID NO: 5404 - DNA, 15 bp, Homo sapiens
tgctaggcactgttt

SEQ ID NO: 5405 - DNA, 15 bp, Homo sapiens
gtgctaggcactgtt

SEQ ID NO: 5406 - DNA, 15 bp, Homo sapiens
cgtgctaggcactgt

SEQ ID NO: 5407 - DNA, 15 bp, Homo sapiens
acgtgctaggcactg

SEQ ID NO: 5408 - DNA, 15 bp, Homo sapiens
cacgtgctaggcact

SEQ ID NO: 5409 - DNA, 15 bp, Homo sapiens
acacgtgctaggcac

SEQ ID NO: 5410 - DNA, 15 bp, Homo sapiens
aacacgtgctaggca

SEQ ID NO: 5411 - DNA, 15 bp, Homo sapiens
aaacacgtgctaggc

SEQ ID NO: 5412 - DNA, 15 bp, Homo sapiens
caaacacgtgctagg

SEQ ID NO: 5413 - DNA, 15 bp, Homo sapiens
tcaaacacgtgctag

SEQ ID NO: 5414 - DNA, 15 bp, Homo sapiens
gtcaaacacgtgcta

SEQ ID NO: 5415 - DNA, 15 bp, Homo sapiens
ggtcaaacacgtgct

SEQ ID NO: 5416 - DNA, 15 bp, Homo sapiens
aggtcaaacacgtgc

SEQ ID NO: 5417 - DNA, 15 bp, Homo sapiens
gaggtcaaacacgtg

SEQ ID NO: 5418 - DNA, 15 bp, Homo sapiens
ggaggtcaaacacgt

SEQ ID NO: 5419 - DNA, 15 bp, Homo sapiens
tggaggtcaaacacg

SEQ ID NO: 5420 - DNA, 15 bp, Homo sapiens
atggaggtcaaacac

SEQ ID NO: 5421 - DNA, 15 bp, Homo sapiens
gatggaggtcaaaca

SEQ ID NO: 5422 - DNA, 15 bp, Homo sapiens
tgatggaggtcaaac

SEQ ID NO: 5423 - DNA, 15 bp, Homo sapiens
gtgatggaggtcaaa

SEQ ID NO: 5424 - DNA, 15 bp, Homo sapiens
agtgatggaggtcaa

SEQ ID NO: 5425 - DNA, 15 bp, Homo sapiens
gagtgatggaggtca

SEQ ID NO: 5426 - DNA, 15 bp, Homo sapiens
agagtgatggaggtc

SEQ ID NO: 5427 - DNA, 15 bp, Homo sapiens
aagagtgatggaggt

SEQ ID NO: 5428 - DNA, 15 bp, Homo sapiens
aaagagtgatggagg

SEQ ID NO: 5429 - DNA, 15 bp, Homo sapiens
caaagagtgatggag

SEQ ID NO: 5430 - DNA, 15 bp, Homo sapiens
tcaaagagtgatgga

SEQ ID NO: 5431 - DNA, 15 bp, Homo sapiens
gtcaaagagtgatgg

SEQ ID NO: 5432 - DNA, 15 bp, Homo sapiens
agtcaaagagtgatg

SEQ ID NO: 5433 - DNA, 15 bp, Homo sapiens
cagtcaaagagtgat

SEQ ID NO: 5434 - DNA, 15 bp, Homo sapiens
tcagtcaaagagtga

SEQ ID NO: 5435 - DNA, 15 bp, Homo sapiens
gtcagtcaaagagtg

SEQ ID NO: 5436 - DNA, 15 bp, Homo sapiens
agtcagtcaaagagt

SEQ ID NO: 5437 - DNA, 15 bp, Homo sapiens
cagtcagtcaaagag

SEQ ID NO: 5438 - DNA, 15 bp, Homo sapiens
tcagtcagtcaaaga

SEQ ID NO: 5439 - DNA, 15 bp, Homo sapiens
gtcagtcagtcaaag

SEQ ID NO: 5440 - DNA, 15 bp, Homo sapiens
agtcagtcagtcaaa

SEQ ID NO: 5441 - DNA, 15 bp, Homo sapiens
gagtcagtcagtcaa

SEQ ID NO: 5442 - DNA, 15 bp, Homo sapiens
tgagtcagtcagtca

SEQ ID NO: 5443 - DNA, 15 bp, Homo sapiens
ttgagtcagtcagtc

SEQ ID NO: 5444 - DNA, 15 bp, Homo sapiens
attgagtcagtcagt

SEQ ID NO: 5445 - DNA, 15 bp, Homo sapiens
cattgagtcagtcag

SEQ ID NO: 5446 - DNA, 15 bp, Homo sapiens
gcattgagtcagtca

SEQ ID NO: 5447 - DNA, 15 bp, Homo sapiens
tgcattgagtcagtc

SEQ ID NO: 5448 - DNA, 15 bp, Homo sapiens
gtgcattgagtcagt

SEQ ID NO: 5449 - DNA, 15 bp, Homo sapiens
ggtgcattgagtcag

SEQ ID NO: 5450 - DNA, 15 bp, Homo sapiens
gggtgcattgagtca

SEQ ID NO: 5451 - DNA, 15 bp, Homo sapiens
agggtgcattgagtc

SEQ ID NO: 5452 - DNA, 15 bp, Homo sapiens
gagggtgcattgagt

SEQ ID NO: 5453 - DNA, 15 bp, Homo sapiens
ggagggtgcattgag

SEQ ID NO: 5454 - DNA, 15 bp, Homo sapiens
aggagggtgcattga

SEQ ID NO: 5455 - DNA, 15 bp, Homo sapiens
gaggagggtgcattg

SEQ ID NO: 5456 - DNA, 15 bp, Homo sapiens
ggaggagggtgcatt

SEQ ID NO: 5457 - DNA, 15 bp, Homo sapiens
gggaggagggtgcat

SEQ ID NO: 5458 - DNA, 15 bp, Homo sapiens
agggaggagggtgca

SEQ ID NO: 5459 - DNA, 15 bp, Homo sapiens
cagggaggagggtgc

SEQ ID NO: 5460 - DNA, 15 bp, Homo sapiens
acagggaggagggtg

SEQ ID NO: 5461 - DNA, 15 bp, Homo sapiens
gacagggaggagggt

SEQ ID NO: 5462 - DNA, 15 bp, Homo sapiens
ggacagggaggaggg

SEQ ID NO: 5463 - DNA, 15 bp, Homo sapiens
aggacagggaggagg

SEQ ID NO: 5464 - DNA, 15 bp, Homo sapiens
caggacagggaggag

SEQ ID NO: 5465 - DNA, 15 bp, Homo sapiens
ccaggacagggagga

SEQ ID NO: 5466 - DNA, 15 bp, Homo sapiens
tccaggacagggagg

SEQ ID NO: 5467 - DNA, 15 bp, Homo sapiens
ctccaggacagggag

SEQ ID NO: 5468 - DNA, 15 bp, Homo sapiens
tctccaggacaggga

SEQ ID NO: 5469 - DNA, 15 bp, Homo sapiens
ctctccaggacaggg

SEQ ID NO: 5470 - DNA, 15 bp, Homo sapiens
gctctccaggacagg

SEQ ID NO: 5471 - DNA, 15 bp, Homo sapiens
tgctctccaggacag

SEQ ID NO: 5472 - DNA, 15 bp, Homo sapiens
ctgctctccaggaca

SEQ ID NO: 5473 - DNA, 15 bp, Homo sapiens
cctgctctccaggac

SEQ ID NO: 5474 - DNA, 15 bp, Homo sapiens
gcctgctctccagga

SEQ ID NO: 5475 - DNA, 15 bp, Homo sapiens
ggcctgctctccagg

SEQ ID NO: 5476 - DNA, 15 bp, Homo sapiens
aggcctgctctccag

SEQ ID NO: 5477 - DNA, 15 bp, Homo sapiens
caggcctgctctcca

SEQ ID NO: 5478 - DNA, 15 bp, Homo sapiens
tcaggcctgctctcc

SEQ ID NO: 5479 - DNA, 15 bp, Homo sapiens
ctcaggcctgctctc

SEQ ID NO: 5480 - DNA, 15 bp, Homo sapiens
cctcaggcctgctct

SEQ ID NO: 5481 - DNA, 15 bp, Homo sapiens
ccctcaggcctgctc

SEQ ID NO: 5482 - DNA, 15 bp, Homo sapiens
cccctcaggcctgct

SEQ ID NO: 5483 - DNA, 15 bp, Homo sapiens
acccctcaggcctgc

SEQ ID NO: 5484 - DNA, 15 bp, Homo sapiens
aacccctcaggcctg

SEQ ID NO: 5485 - DNA, 15 bp, Homo sapiens
gaacccctcaggcct

SEQ ID NO: 5486 - DNA, 15 bp, Homo sapiens
ggaacccctcaggcc

SEQ ID NO: 5487 - DNA, 15 bp, Homo sapiens
aggaacccctcaggc

SEQ ID NO: 5488 - DNA, 15 bp, Homo sapiens
caggaacccctcagg

SEQ ID NO: 5489 - DNA, 15 bp, Homo sapiens
ccaggaacccctcag

SEQ ID NO: 5490 - DNA, 15 bp, Homo sapiens
cccaggaacccctca

SEQ ID NO: 5491 - DNA, 15 bp, Homo sapiens
gcccaggaacccctc

SEQ ID NO: 5492 - DNA, 15 bp, Homo sapiens
ggcccaggaacccct

SEQ ID NO: 5493 - DNA, 15 bp, Homo sapiens
cggcccaggaacccc

SEQ ID NO: 5494 - DNA, 15 bp, Homo sapiens
ccggcccaggaaccc

SEQ ID NO: 5495 - DNA, 15 bp, Homo sapiens
tccggcccaggaacc

SEQ ID NO: 5496 - DNA, 15 bp, Homo sapiens
ttccggcccaggaac

SEQ ID NO: 5497 - DNA, 15 bp, Homo sapiens
attccggcccaggaa

SEQ ID NO: 5498 - DNA, 15 bp, Homo sapiens
cattccggcccagga

SEQ ID NO: 5499 - DNA, 15 bp, Homo sapiens
gcattccggcccagg

SEQ ID NO: 5500 - DNA, 15 bp, Homo sapiens
agcattccggcccag

SEQ ID NO: 5501 - DNA, 15 bp, Homo sapiens
aagcattccggccca

SEQ ID NO: 5502 - DNA, 15 bp, Homo sapiens
caagcattccggccc

SEQ ID NO: 5503 - DNA, 15 bp, Homo sapiens
acaagcattccggcc

SEQ ID NO: 5504 - DNA, 15 bp, Homo sapiens
gacaagcattccggc

SEQ ID NO: 5505 - DNA, 15 bp, Homo sapiens
ggacaagcattccgg

SEQ ID NO: 5506 - DNA, 15 bp, Homo sapiens
aggacaagcattccg

SEQ ID NO: 5507 - DNA, 15 bp, Homo sapiens
gaggacaagcattcc

SEQ ID NO: 5508 - DNA, 15 bp, Homo sapiens
ggaggacaagcattc

SEQ ID NO: 5509 - DNA, 15 bp, Homo sapiens
tggaggacaagcatt

SEQ ID NO: 5510 - DNA, 15 bp, Homo sapiens
atggaggacaagcat

SEQ ID NO: 5511 - DNA, 15 bp, Homo sapiens
gatggaggacaagca

SEQ ID NO: 5512 - DNA, 15 bp, Homo sapiens
ggatggaggacaagc

SEQ ID NO: 5513 - DNA, 15 bp, Homo sapiens
gggatggaggacaag

SEQ ID NO: 5514 - DNA, 15 bp, Homo sapiens
tgggatggaggacaa

SEQ ID NO: 5515 - DNA, 15 bp, Homo sapiens
ctgggatggaggaca

SEQ ID NO: 5516 - DNA, 15 bp, Homo sapiens
tctgggatggaggac

SEQ ID NO: 5517 - DNA, 15 bp, Homo sapiens
gtctgggatggagga

SEQ ID NO: 5518 - DNA, 15 bp, Homo sapiens
tgtctgggatggagg

SEQ ID NO: 5519 - DNA, 15 bp, Homo sapiens
gtgtctgggatggag

SEQ ID NO: 5520 - DNA, 15 bp, Homo sapiens
tgtgtctgggatgga

SEQ ID NO: 5521 - DNA, 15 bp, Homo sapiens
ctgtgtctgggatgg

SEQ ID NO: 5522 - DNA, 15 bp, Homo sapiens
gctgtgtctgggatg

SEQ ID NO: 5523 - DNA, 15 bp, Homo sapiens
ggctgtgtctgggat

SEQ ID NO: 5524 - DNA, 15 bp, Homo sapiens
gggctgtgtctggga

SEQ ID NO: 5525 - DNA, 15 bp, Homo sapiens
agggctgtgtctggg

SEQ ID NO: 5526 - DNA, 15 bp, Homo sapiens
cagggctgtgtctgg

SEQ ID NO: 5527 - DNA, 15 bp, Homo sapiens
gcagggctgtgtctg

SEQ ID NO: 5528 - DNA, 15 bp, Homo sapiens
cgcagggctgtgtct

SEQ ID NO: 5529 - DNA, 15 bp, Homo sapiens
acgcagggctgtgtc

SEQ ID NO: 5530 - DNA, 15 bp, Homo sapiens
aacgcagggctgtgt

SEQ ID NO: 5531 - DNA, 15 bp, Homo sapiens
caacgcagggctgtg

SEQ ID NO: 5532 - DNA, 15 bp, Homo sapiens
ccaacgcagggctgt

SEQ ID NO: 5533 - DNA, 15 bp, Homo sapiens
gccaacgcagggctg

SEQ ID NO: 5534 - DNA, 15 bp, Homo sapiens
cgccaacgcagggct

SEQ ID NO: 5535 - DNA, 15 bp, Homo sapiens
ccgccaacgcagggc

SEQ ID NO: 5536 - DNA, 15 bp, Homo sapiens
tccgccaacgcaggg

SEQ ID NO: 5537 - DNA, 15 bp, Homo sapiens
ctccgccaacgcagg

SEQ ID NO: 5538 - DNA, 15 bp, Homo sapiens
cctccgccaacgcag

SEQ ID NO: 5539 - DNA, 15 bp, Homo sapiens
acctccgccaacgca

SEQ ID NO: 5540 - DNA, 15 bp, Homo sapiens
cacctccgccaacgc

SEQ ID NO: 5541 - DNA, 15 bp, Homo sapiens
ccacctccgccaacg

SEQ ID NO: 5542 - DNA, 15 bp, Homo sapiens
gccacctccgccaac

SEQ ID NO: 5543 - DNA, 15 bp, Homo sapiens
cgccacctccgccaa

SEQ ID NO: 5544 - DNA, 15 bp, Homo sapiens
gcgccacctccgcca

SEQ ID NO: 5545 - DNA, 15 bp, Homo sapiens
agcgccacctccgcc

SEQ ID NO: 5546 - DNA, 15 bp, Homo sapiens
cagcgccacctccgc

SEQ ID NO: 5547 - DNA, 15 bp, Homo sapiens
ccagcgccacctccg

SEQ ID NO: 5548 - DNA, 15 bp, Homo sapiens
gccagcgccacctcc

SEQ ID NO: 5549 - DNA, 15 bp, Homo sapiens
agccagcgccacctc

SEQ ID NO: 5550 - DNA, 15 bp, Homo sapiens
cagccagcgccacct

SEQ ID NO: 5551 - DNA, 15 bp, Homo sapiens
tcagccagcgccacc

SEQ ID NO: 5552 - DNA, 15 bp, Homo sapiens
gtcagccagcgccac

SEQ ID NO: 5553 - DNA, 15 bp, Homo sapiens
tgtcagccagcgcca

SEQ ID NO: 5554 - DNA, 15 bp, Homo sapiens
atgtcagccagcgcc

SEQ ID NO: 5555 - DNA, 15 bp, Homo sapiens
aatgtcagccagcgc

SEQ ID NO: 5556 - DNA, 15 bp, Homo sapiens
taatgtcagccagcg

SEQ ID NO: 5557 - DNA, 15 bp, Homo sapiens
gtaatgtcagccagc

SEQ ID NO: 5558 - DNA, 15 bp, Homo sapiens
ggtaatgtcagccag

SEQ ID NO: 5559 - DNA, 15 bp, Homo sapiens
aggtaatgtcagcca

SEQ ID NO: 5560 - DNA, 15 bp, Homo sapiens
caggtaatgtcagcc

SEQ ID NO: 5561 - DNA, 15 bp, Homo sapiens
gcaggtaatgtcagc

SEQ ID NO: 5562 - DNA, 15 bp, Homo sapiens
cgcaggtaatgtcag

SEQ ID NO: 5563 - DNA, 15 bp, Homo sapiens
gcgcaggtaatgtca

SEQ ID NO: 5564 - DNA, 15 bp, Homo sapiens
ggcgcaggtaatgtc

SEQ ID NO: 5565 - DNA, 15 bp, Homo sapiens
aggcgcaggtaatgt

SEQ ID NO: 5566 - DNA, 15 bp, Homo sapiens
gaggcgcaggtaatg

SEQ ID NO: 5567 - DNA, 15 bp, Homo sapiens
tgaggcgcaggtaat

SEQ ID NO: 5568 - DNA, 15 bp, Homo sapiens
gtgaggcgcaggtaa

SEQ ID NO: 5569 - DNA, 15 bp, Homo sapiens
ggtgaggcgcaggta

SEQ ID NO: 5570 - DNA, 15 bp, Homo sapiens
cggtgaggcgcaggt

SEQ ID NO: 5571 - DNA, 15 bp, Homo sapiens
ccggtgaggcgcagg

SEQ ID NO: 5572 - DNA, 15 bp, Homo sapiens
gccggtgaggcgcag

SEQ ID NO: 5573 - DNA, 15 bp, Homo sapiens
agccggtgaggcgca

SEQ ID NO: 5574 - DNA, 15 bp, Homo sapiens
aagccggtgaggcgc

SEQ ID NO: 5575 - DNA, 15 bp, Homo sapiens
gaagccggtgaggcg

SEQ ID NO: 5576 - DNA, 15 bp, Homo sapiens
tgaagccggtgaggc

SEQ ID NO: 5577 - DNA, 15 bp, Homo sapiens
atgaagccggtgagg

SEQ ID NO: 5578 - DNA, 15 bp, Homo sapiens
catgaagccggtgag

SEQ ID NO: 5579 - DNA, 15 bp, Homo sapiens
gcatgaagccggtga

SEQ ID NO: 5580 - DNA, 15 bp, Homo sapiens
tgcatgaagccggtg

SEQ ID NO: 5581 - DNA, 15 bp, Homo sapiens
ctgcatgaagccggt

SEQ ID NO: 5582 - DNA, 15 bp, Homo sapiens
gctgcatgaagccgg

SEQ ID NO: 5583 - DNA, 15 bp, Homo sapiens
agctgcatgaagccg

SEQ ID NO: 5584 - DNA, 15 bp, Homo sapiens
gagctgcatgaagcc

SEQ ID NO: 5585 - DNA, 15 bp, Homo sapiens
agagctgcatgaagc

SEQ ID NO: 5586 - DNA, 15 bp, Homo sapiens
aagagctgcatgaag

SEQ ID NO: 5587 - DNA, 15 bp, Homo sapiens
gaagagctgcatgaa

SEQ ID NO: 5588 - DNA, 15 bp, Homo sapiens
tgaagagctgcatga

SEQ ID NO: 5589 - DNA, 15 bp, Homo sapiens
ctgaagagctgcatg

SEQ ID NO: 5590 - DNA, 15 bp, Homo sapiens
gctgaagagctgcat

SEQ ID NO: 5591 - DNA, 15 bp, Homo sapiens
agctgaagagctgca

SEQ ID NO: 5592 - DNA, 15 bp, Homo sapiens
cagctgaagagctgc

SEQ ID NO: 5593 - DNA, 15 bp, Homo sapiens
gcagctgaagagctg

SEQ ID NO: 5594 - DNA, 15 bp, Homo sapiens
ggcagctgaagagct

SEQ ID NO: 5595 - DNA, 15 bp, Homo sapiens
aggcagctgaagagc

SEQ ID NO: 5596 - DNA, 15 bp, Homo sapiens
caggcagctgaagag

SEQ ID NO: 5597 - DNA, 15 bp, Homo sapiens
ccaggcagctgaaga

SEQ ID NO: 5598 - DNA, 15 bp, Homo sapiens
gccaggcagctgaag

SEQ ID NO: 5599 - DNA, 15 bp, Homo sapiens
ggccaggcagctgaa

SEQ ID NO: 5600 - DNA, 15 bp, Homo sapiens
aggccaggcagctga

SEQ ID NO: 5601 - DNA, 15 bp, Homo sapiens
gaggccaggcagctg

SEQ ID NO: 5602 - DNA, 15 bp, Homo sapiens
tgaggccaggcagct

SEQ ID NO: 5603 - DNA, 15 bp, Homo sapiens
ctgaggccaggcagc

SEQ ID NO: 5604 - DNA, 15 bp, Homo sapiens
gctgaggccaggcag

SEQ ID NO: 5605 - DNA, 15 bp, Homo sapiens
ggctgaggccaggca

SEQ ID NO: 5606 - DNA, 15 bp, Homo sapiens
aggctgaggccaggc

SEQ ID NO: 5607 - DNA, 15 bp, Homo sapiens
gaggctgaggccagg

SEQ ID NO: 5608 - DNA, 15 bp, Homo sapiens
ggaggctgaggccag

SEQ ID NO: 5609 - DNA, 15 bp, Homo sapiens
tggaggctgaggcca

SEQ ID NO: 5610 - DNA, 15 bp, Homo sapiens
gtggaggctgaggcc

SEQ ID NO: 5611 - DNA, 15 bp, Homo sapiens
cgtggaggctgaggc

SEQ ID NO: 5612 - DNA, 15 bp, Homo sapiens
ccgtggaggctgagg

SEQ ID NO: 5613 - DNA, 15 bp, Homo sapiens
cccgtggaggctgag

SEQ ID NO: 5614 - DNA, 15 bp, Homo sapiens
tcccgtggaggctga

SEQ ID NO: 5615 - DNA, 15 bp, Homo sapiens
gtcccgtggaggctg

SEQ ID NO: 5616 - DNA, 15 bp, Homo sapiens
ggtcccgtggaggct

SEQ ID NO: 5617 - DNA, 15 bp, Homo sapiens
gggtcccgtggaggc

SEQ ID NO: 5618 - DNA, 15 bp, Homo sapiens
agggtcccgtggagg

SEQ ID NO: 5619 - DNA, 15 bp, Homo sapiens
cagggtcccgtggag

SEQ ID NO: 5620 - DNA, 15 bp, Homo sapiens
ccagggtcccgtgga

SEQ ID NO: 5621 - DNA, 15 bp, Homo sapiens
gccagggtcccgtgg

SEQ ID NO: 5622 - DNA, 15 bp, Homo sapiens
tgccagggtcccgtg

SEQ ID NO: 5623 - DNA, 15 bp, Homo sapiens
gtgccagggtcccgt

SEQ ID NO: 5624 - DNA, 15 bp, Homo sapiens
agtgccagggtcccg

SEQ ID NO: 5625 - DNA, 15 bp, Homo sapiens
gagtgccagggtccc

SEQ ID NO: 5626 - DNA, 15 bp, Homo sapiens
cgagtgccagggtcc

SEQ ID NO: 5627 - DNA, 15 bp, Homo sapiens
ccgagtgccagggtc

SEQ ID NO: 5628 - DNA, 15 bp, Homo sapiens
cccgagtgccagggt

SEQ ID NO: 5629 - DNA, 15 bp, Homo sapiens
gcccgagtgccaggg

SEQ ID NO: 5630 - DNA, 15 bp, Homo sapiens
agcccgagtgccagg

SEQ ID NO: 5631 - DNA, 15 bp, Homo sapiens
cagcccgagtgccag

SEQ ID NO: 5632 - DNA, 15 bp, Homo sapiens
acagcccgagtgcca

SEQ ID NO: 5633 - DNA, 15 bp, Homo sapiens
cacagcccgagtgcc

SEQ ID NO: 5634 - DNA, 15 bp, Homo sapiens
ccacagcccgagtgc

SEQ ID NO: 5635 - DNA, 15 bp, Homo sapiens
gccacagcccgagtg

SEQ ID NO: 5636 - DNA, 15 bp, Homo sapiens
agccacagcccgagt

SEQ ID NO: 5637 - DNA, 15 bp, Homo sapiens
gagccacagcccgag

SEQ ID NO: 5638 - DNA, 15 bp, Homo sapiens
ggagccacagcccga

SEQ ID NO: 5639 - DNA, 15 bp, Homo sapiens
tggagccacagcccg

SEQ ID NO: 5640 - DNA, 15 bp, Homo sapiens
ctggagccacagccc

SEQ ID NO: 5641 - DNA, 15 bp, Homo sapiens
gctggagccacagcc

SEQ ID NO: 5642 - DNA, 15 bp, Homo sapiens
agctggagccacagc

SEQ ID NO: 5643 - DNA, 15 bp, Homo sapiens
cagctggagccacag

SEQ ID NO: 5644 - DNA, 15 bp, Homo sapiens
gcagctggagccaca

SEQ ID NO: 5645 - DNA, 15 bp, Homo sapiens
cgcagctggagccac

SEQ ID NO: 5646 - DNA, 15 bp, Homo sapiens
ccgcagctggagcca

SEQ ID NO: 5647 - DNA, 15 bp, Homo sapiens
gccgcagctggagcc

SEQ ID NO: 5648 - DNA, 15 bp, Homo sapiens
tgccgcagctggagc

SEQ ID NO: 5649 - DNA, 15 bp, Homo sapiens
ctgccgcagctggag

SEQ ID NO: 5650 - DNA, 15 bp, Homo sapiens
gctgccgcagctgga

SEQ ID NO: 5651 - DNA, 15 bp, Homo sapiens
agctgccgcagctgg

SEQ ID NO: 5652 - DNA, 15 bp, Homo sapiens
cagctgccgcagctg

SEQ ID NO: 5653 - DNA, 15 bp, Homo sapiens
gcagctgccgcagct

SEQ ID NO: 5654 - DNA, 15 bp, Homo sapiens
agcagctgccgcagc

SEQ ID NO: 5655 - DNA, 15 bp, Homo sapiens
cagcagctgccgcag

SEQ ID NO: 5656 - DNA, 15 bp, Homo sapiens
gcagcagctgccgca

SEQ ID NO: 5657 - DNA, 15 bp, Homo sapiens
agcagcagctgccgc

SEQ ID NO: 5658 - DNA, 15 bp, Homo sapiens
cagcagcagctgccg

SEQ ID NO: 5659 - DNA, 15 bp, Homo sapiens
gcagcagcagctgcc

SEQ ID NO: 5660 - DNA, 15 bp, Homo sapiens
agcagcagcagctgc

SEQ ID NO: 5661 - DNA, 15 bp, Homo sapiens
cagcagcagcagctg

SEQ ID NO: 5662 - DNA, 15 bp, Homo sapiens
ccagcagcagcagct

SEQ ID NO: 5663 - DNA, 15 bp, Homo sapiens
cccagcagcagcagc

SEQ ID NO: 5664 - DNA, 15 bp, Homo sapiens
ccccagcagcagcag

SEQ ID NO: 5665 - DNA, 15 bp, Homo sapiens
gccccagcagcagca

SEQ ID NO: 5666 - DNA, 15 bp, Homo sapiens
tgccccagcagcagc

SEQ ID NO: 5667 - DNA, 15 bp, Homo sapiens
ctgccccagcagcag

SEQ ID NO: 5668 - DNA, 15 bp, Homo sapiens
gctgccccagcagca

SEQ ID NO: 5669 - DNA, 15 bp, Homo sapiens
ggctgccccagcagc

SEQ ID NO: 5670 - DNA, 15 bp, Homo sapiens
gggctgccccagcag

SEQ ID NO: 5671 - DNA, 15 bp, Homo sapiens
agggctgccccagca

SEQ ID NO: 5672 - DNA, 15 bp, Homo sapiens
aagggctgccccagc

SEQ ID NO: 5673 - DNA, 15 bp, Homo sapiens
gaagggctgccccag

SEQ ID NO: 5674 - DNA, 15 bp, Homo sapiens
cgaagggctgcccca

SEQ ID NO: 5675 - DNA, 15 bp, Homo sapiens
ccgaagggctgcccc

SEQ ID NO: 5676 - DNA, 15 bp, Homo sapiens
gccgaagggctgccc

SEQ ID NO: 5677 - DNA, 15 bp, Homo sapiens
tgccgaagggctgcc

SEQ ID NO: 5678 - DNA, 15 bp, Homo sapiens
atgccgaagggctgc

SEQ ID NO: 5679 - DNA, 15 bp, Homo sapiens
gatgccgaagggctg

SEQ ID NO: 5680 - DNA, 15 bp, Homo sapiens
tgatgccgaagggct

SEQ ID NO: 5681 - DNA, 15 bp, Homo sapiens
ctgatgccgaagggc

SEQ ID NO: 5682 - DNA, 15 bp, Homo sapiens
actgatgccgaaggg

SEQ ID NO: 5683 - DNA, 15 bp, Homo sapiens
cactgatgccgaagg

SEQ ID NO: 5684 - DNA, 15 bp, Homo sapiens
ccactgatgccgaag

SEQ ID NO: 5685 - DNA, 15 bp, Homo sapiens
cccactgatgccgaa

SEQ ID NO: 5686 - DNA, 15 bp, Homo sapiens
acccactgatgccga

SEQ ID NO: 5687 - DNA, 15 bp, Homo sapiens
cacccactgatgccg

SEQ ID NO: 5688 - DNA, 15 bp, Homo sapiens
acacccactgatgcc

SEQ ID NO: 5689 - DNA, 15 bp, Homo sapiens
cacacccactgatgc

SEQ ID NO: 5690 - DNA, 15 bp, Homo sapiens
ccacacccactgatg

SEQ ID NO: 5691 - DNA, 15 bp, Homo sapiens
cccacacccactgat

SEQ ID NO: 5692 - DNA, 15 bp, Homo sapiens
tcccacacccactga

SEQ ID NO: 5693 - DNA, 15 bp, Homo sapiens
ctcccacacccactg

SEQ ID NO: 5694 - DNA, 15 bp, Homo sapiens
gctcccacacccact

SEQ ID NO: 5695 - DNA, 15 bp, Homo sapiens
cgctcccacacccac

SEQ ID NO: 5696 - DNA, 15 bp, Homo sapiens
ccgctcccacaccca

SEQ ID NO: 5697 - DNA, 15 bp, Homo sapiens
cccgctcccacaccc

SEQ ID NO: 5698 - DNA, 15 bp, Homo sapiens
acccgctcccacacc

SEQ ID NO: 5699 - DNA, 15 bp, Homo sapiens
cacccgctcccacac

SEQ ID NO: 5700 - DNA, 15 bp, Homo sapiens
gcacccgctcccaca

SEQ ID NO: 5701 - DNA, 15 bp, Homo sapiens
cgcacccgctcccac

SEQ ID NO: 5702 - DNA, 15 bp, Homo sapiens
tcgcacccgctccca

SEQ ID NO: 5703 - DNA, 15 bp, Homo sapiens
atcgcacccgctccc

SEQ ID NO: 5704 - DNA, 15 bp, Homo sapiens
gatcgcacccgctcc

SEQ ID NO: 5705 - DNA, 15 bp, Homo sapiens
ggatcgcacccgctc

SEQ ID NO: 5706 - DNA, 15 bp, Homo sapiens
cggatcgcacccgct

SEQ ID NO: 5707 - DNA, 15 bp, Homo sapiens
ccggatcgcacccgc

SEQ ID NO: 5708 - DNA, 15 bp, Homo sapiens
tccggatcgcacccg

SEQ ID NO: 5709 - DNA, 15 bp, Homo sapiens
ctccggatcgcaccc

SEQ ID NO: 5710 - DNA, 15 bp, Homo sapiens
gctccggatcgcacc

SEQ ID NO: 5711 - DNA, 15 bp, Homo sapiens
tgctccggatcgcac

SEQ ID NO: 5712 - DNA, 15 bp, Homo sapiens
ctgctccggatcgca

SEQ ID NO: 5713 - DNA, 15 bp, Homo sapiens
cctgctccggatcgc

SEQ ID NO: 5714 - DNA, 15 bp, Homo sapiens
tcctgctccggatcg

SEQ ID NO: 5715 - DNA, 15 bp, Homo sapiens
gtcctgctccggatc

SEQ ID NO: 5716 - DNA, 15 bp, Homo sapiens
agtcctgctccggat

SEQ ID NO: 5717 - DNA, 15 bp, Homo sapiens
cagtcctgctccgga

SEQ ID NO: 5718 - DNA, 15 bp, Homo sapiens
acagtcctgctccgg

SEQ ID NO: 5719 - DNA, 15 bp, Homo sapiens
cacagtcctgctccg

SEQ ID NO: 5720 - DNA, 15 bp, Homo sapiens
acacagtcctgctcc

SEQ ID NO: 5721 - DNA, 15 bp, Homo sapiens
tacacagtcctgctc

SEQ ID NO: 5722 - DNA, 15 bp, Homo sapiens
ctacacagtcctgct

SEQ ID NO: 5723 - DNA, 15 bp, Homo sapiens
actacacagtcctgc

SEQ ID NO: 5724 - DNA, 15 bp, Homo sapiens
aactacacagtcctg

SEQ ID NO: 5725 - DNA, 15 bp, Homo sapiens
caactacacagtcct

SEQ ID NO: 5726 - DNA, 15 bp, Homo sapiens
gcaactacacagtcc

SEQ ID NO: 5727 - DNA, 15 bp, Homo sapiens
cgcaactacacagtc

SEQ ID NO: 5728 - DNA, 15 bp, Homo sapiens
ccgcaactacacagt

SEQ ID NO: 5729 - DNA, 15 bp, Homo sapiens
gccgcaactacacag

SEQ ID NO: 5730 - DNA, 15 bp, Homo sapiens
ggccgcaactacaca

SEQ ID NO: 5731 - DNA, 15 bp, Homo sapiens
cggccgcaactacac

SEQ ID NO: 5732 - DNA, 15 bp, Homo sapiens
acggccgcaactaca

SEQ ID NO: 5733 - DNA, 15 bp, Homo sapiens
cacggccgcaactac

SEQ ID NO: 5734 - DNA, 15 bp, Homo sapiens
ccacggccgcaacta

SEQ ID NO: 5735 - DNA, 15 bp, Homo sapiens
accacggccgcaact

SEQ ID NO: 5736 - DNA, 15 bp, Homo sapiens
aaccacggccgcaac

SEQ ID NO: 5737 - DNA, 15 bp, Homo sapiens
caaccacggccgcaa

SEQ ID NO: 5738 - DNA, 15 bp, Homo sapiens
acaaccacggccgca

SEQ ID NO: 5739 - DNA, 15 bp, Homo sapiens
aacaaccacggccgc

SEQ ID NO: 5740 - DNA, 15 bp, Homo sapiens
caacaaccacggccg

SEQ ID NO: 5741 - DNA, 15 bp, Homo sapiens
ccaacaaccacggcc

SEQ ID NO: 5742 - DNA, 15 bp, Homo sapiens
gccaacaaccacggc

SEQ ID NO: 5743 - DNA, 15 bp, Homo sapiens
ggccaacaaccacgg

SEQ ID NO: 5744 - DNA, 15 bp, Homo sapiens
gggccaacaaccacg

SEQ ID NO: 5745 - DNA, 15 bp, Homo sapiens
tgggccaacaaccac

SEQ ID NO: 5746 - DNA, 15 bp, Homo sapiens
ctgggccaacaacca

SEQ ID NO: 5747 - DNA, 15 bp, Homo sapiens
tctgggccaacaacc

SEQ ID NO: 5748 - DNA, 15 bp, Homo sapiens
ttctgggccaacaac

SEQ ID NO: 5749 - DNA, 15 bp, Homo sapiens
tttctgggccaacaa

SEQ ID NO: 5750 - DNA, 15 bp, Homo sapiens
ctttctgggccaaca

SEQ ID NO: 5751 - DNA, 15 bp, Homo sapiens
actttctgggccaac

SEQ ID NO: 5752 - DNA, 15 bp, Homo sapiens
cactttctgggccaa

SEQ ID NO: 5753 - DNA, 15 bp, Homo sapiens
gcactttctgggcca

SEQ ID NO: 5754 - DNA, 15 bp, Homo sapiens
ggcactttctgggcc

SEQ ID NO: 5755 - DNA, 15 bp, Homo sapiens
gggcactttctgggc

SEQ ID NO: 5756 - DNA, 15 bp, Homo sapiens
agggcactttctggg

SEQ ID NO: 5757 - DNA, 15 bp, Homo sapiens
gagggcactttctgg

SEQ ID NO: 5758 - DNA, 15 bp, Homo sapiens
tgagggcactttctg

SEQ ID NO: 5759 - DNA, 15 bp, Homo sapiens
ctgagggcactttct

SEQ ID NO: 5760 - DNA, 15 bp, Homo sapiens
cctgagggcactttc

SEQ ID NO: 5761 - DNA, 15 bp, Homo sapiens
ccctgagggcacttt

SEQ ID NO: 5762 - DNA, 15 bp, Homo sapiens
cccctgagggcactt

SEQ ID NO: 5763 - DNA, 15 bp, Homo sapiens
acccctgagggcact

SEQ ID NO: 5764 - DNA, 15 bp, Homo sapiens
gacccctgagggcac

SEQ ID NO: 5765 - DNA, 15 bp, Homo sapiens
agacccctgagggca

SEQ ID NO: 5766 - DNA, 15 bp, Homo sapiens
gagacccctgagggc

SEQ ID NO: 5767 - DNA, 15 bp, Homo sapiens
tgagacccctgaggg

SEQ ID NO: 5768 - DNA, 15 bp, Homo sapiens
atgagacccctgagg

SEQ ID NO: 5769 - DNA, 15 bp, Homo sapiens
tatgagacccctgag

SEQ ID NO: 5770 - DNA, 15 bp, Homo sapiens
ctatgagacccctga

SEQ ID NO: 5771 - DNA, 15 bp, Homo sapiens
gctatgagacccctg

SEQ ID NO: 5772 - DNA, 15 bp, Homo sapiens
cgctatgagacccct

SEQ ID NO: 5773 - DNA, 15 bp, Homo sapiens
gcgctatgagacccc

SEQ ID NO: 5774 - DNA, 15 bp, Homo sapiens
tgcgctatgagaccc

SEQ ID NO: 5775 - DNA, 15 bp, Homo sapiens
gtgcgctatgagacc

SEQ ID NO: 5776 - DNA, 15 bp, Homo sapiens
ggtgcgctatgagac

SEQ ID NO: 5777 - DNA, 15 bp, Homo sapiens
tggtgcgctatgaga

SEQ ID NO: 5778 - DNA, 15 bp, Homo sapiens
gtggtgcgctatgag

SEQ ID NO: 5779 - DNA, 15 bp, Homo sapiens
cgtggtgcgctatga

SEQ ID NO: 5780 - DNA, 15 bp, Homo sapiens
tcgtggtgcgctatg

SEQ ID NO: 5781 - DNA, 15 bp, Homo sapiens
ttcgtggtgcgctat

SEQ ID NO: 5782 - DNA, 15 bp, Homo sapiens
cttcgtggtgcgcta

SEQ ID NO: 5783 - DNA, 15 bp, Homo sapiens
acttcgtggtgcgct

SEQ ID NO: 5784 - DNA, 15 bp, Homo sapiens
gacttcgtggtgcgc

SEQ ID NO: 5785 - DNA, 15 bp, Homo sapiens
cgacttcgtggtgcg

SEQ ID NO: 5786 - DNA, 15 bp, Homo sapiens
tcgacttcgtggtgc

SEQ ID NO: 5787 - DNA, 15 bp, Homo sapiens
ctcgacttcgtggtg

SEQ ID NO: 5788 - DNA, 15 bp, Homo sapiens
cctcgacttcgtggt

SEQ ID NO: 5789 - DNA, 15 bp, Homo sapiens
gcctcgacttcgtgg

SEQ ID NO: 5790 - DNA, 15 bp, Homo sapiens
cgcctcgacttcgtg

SEQ ID NO: 5791 - DNA, 15 bp, Homo sapiens
gcgcctcgacttcgt

SEQ ID NO: 5792 - DNA, 15 bp, Homo sapiens
cgcgcctcgacttcg

SEQ ID NO: 5793 - DNA, 15 bp, Homo sapiens
gcgcgcctcgacttc

SEQ ID NO: 5794 - DNA, 15 bp, Homo sapiens
ggcgcgcctcgactt

SEQ ID NO: 5795 - DNA, 15 bp, Homo sapiens
gggcgcgcctcgact

SEQ ID NO: 5796 - DNA, 15 bp, Homo sapiens
ggggcgcgcctcgac

SEQ ID NO: 5797 - DNA, 15 bp, Homo sapiens
tggggcgcgcctcga

SEQ ID NO: 5798 - DNA, 15 bp, Homo sapiens
atggggcgcgcctcg

SEQ ID NO: 5799 - DNA, 15 bp, Homo sapiens
gatggggcgcgcctc

SEQ ID NO: 5800 - DNA, 15 bp, Homo sapiens
cgatggggcgcgcct

SEQ ID NO: 5801 - DNA, 15 bp, Homo sapiens
gcgatggggcgcgcc

SEQ ID NO: 5802 - DNA, 15 bp, Homo sapiens
ggcgatggggcgcgc

SEQ ID NO: 5803 - DNA, 15 bp, Homo sapiens
gggcgatggggcgcg

SEQ ID NO: 5804 - DNA, 15 bp, Homo sapiens
cgggcgatggggcgc

SEQ ID NO: 5805 - DNA, 15 bp, Homo sapiens
gcgggcgatggggcg

SEQ ID NO: 5806 - DNA, 15 bp, Homo sapiens
cgcgggcgatggggc

SEQ ID NO: 5807 - DNA, 15 bp, Homo sapiens
gcgcgggcgatgggg

SEQ ID NO: 5808 - DNA, 15 bp, Homo sapiens
ggcgcgggcgatggg

SEQ ID NO: 5809 - DNA, 15 bp, Homo sapiens
gggcgcgggcgatgg

SEQ ID NO: 5810 - DNA, 15 bp, Homo sapiens
agggcgcgggcgatg

SEQ ID NO: 5811 - DNA, 15 bp, Homo sapiens
gagggcgcgggcgat

SEQ ID NO: 5812 - DNA, 15 bp, Homo sapiens
tgagggcgcgggcga

SEQ ID NO: 5813 - DNA, 15 bp, Homo sapiens
ctgagggcgcgggcg

SEQ ID NO: 5814 - DNA, 15 bp, Homo sapiens
gctgagggcgcgggc

SEQ ID NO: 5815 - DNA, 15 bp, Homo sapiens
tgctgagggcgcggg

SEQ ID NO: 5816 - DNA, 15 bp, Homo sapiens
ttgctgagggcgcgg

SEQ ID NO: 5817 - DNA, 15 bp, Homo sapiens
tttgctgagggcgcg

SEQ ID NO: 5818 - DNA, 15 bp, Homo sapiens
ctttgctgagggcgc

SEQ ID NO: 5819 - DNA, 15 bp, Homo sapiens
cctttgctgagggcg

SEQ ID NO: 5820 - DNA, 15 bp, Homo sapiens
ccctttgctgagggc

SEQ ID NO: 5821 - DNA, 15 bp, Homo sapiens
gccctttgctgaggg

SEQ ID NO: 5822 - DNA, 15 bp, Homo sapiens
tgccctttgctgagg

SEQ ID NO: 5823 - DNA, 15 bp, Homo sapiens
ctgccctttgctgag

SEQ ID NO: 5824 - DNA, 15 bp, Homo sapiens
gctgccctttgctga

SEQ ID NO: 5825 - DNA, 15 bp, Homo sapiens
agctgccctttgctg

SEQ ID NO: 5826 - DNA, 15 bp, Homo sapiens
cagctgccctttgct

SEQ ID NO: 5827 - DNA, 15 bp, Homo sapiens
ccagctgccctttgc

SEQ ID NO: 5828 - DNA, 15 bp, Homo sapiens
tccagctgccctttg

SEQ ID NO: 5829 - DNA, 15 bp, Homo sapiens
ttccagctgcccttt

SEQ ID NO: 5830 - DNA, 15 bp, Homo sapiens
cttccagctgccctt

SEQ ID NO: 5831 - DNA, 15 bp, Homo sapiens
ccttccagctgccct

SEQ ID NO: 5832 - DNA, 15 bp, Homo sapiens
gccttccagctgccc

SEQ ID NO: 5833 - DNA, 15 bp, Homo sapiens
tgccttccagctgcc

SEQ ID NO: 5834 - DNA, 15 bp, Homo sapiens
ttgccttccagctgc

SEQ ID NO: 5835 - DNA, 15 bp, Homo sapiens
tttgccttccagctg

SEQ ID NO: 5836 - DNA, 15 bp, Homo sapiens
ctttgccttccagct

SEQ ID NO: 5837 - DNA, 15 bp, Homo sapiens
gctttgccttccagc

SEQ ID NO: 5838 - DNA, 15 bp, Homo sapiens
cgctttgccttccag

SEQ ID NO: 5839 - DNA, 15 bp, Homo sapiens
ccgctttgccttcca

SEQ ID NO: 5840 - DNA, 15 bp, Homo sapiens
accgctttgccttcc

SEQ ID NO: 5841 - DNA, 15 bp, Homo sapiens
gaccgctttgccttc

SEQ ID NO: 5842 - DNA, 15 bp, Homo sapiens
cgaccgctttgcctt

SEQ ID NO: 5843 - DNA, 15 bp, Homo sapiens
ccgaccgctttgcct

SEQ ID NO: 5844 - DNA, 15 bp, Homo sapiens
accgaccgctttgcc

SEQ ID NO: 5845 - DNA, 15 bp, Homo sapiens
caccgaccgctttgc

SEQ ID NO: 5846 - DNA, 15 bp, Homo sapiens
gcaccgaccgctttg

SEQ ID NO: 5847 - DNA, 15 bp, Homo sapiens
cgcaccgaccgcttt

SEQ ID NO: 5848 - DNA, 15 bp, Homo sapiens
ccgcaccgaccgctt

SEQ ID NO: 5849 - DNA, 15 bp, Homo sapiens
gccgcaccgaccgct

SEQ ID NO: 5850 - DNA, 15 bp, Homo sapiens
ggccgcaccgaccgc

SEQ ID NO: 5851 - DNA, 15 bp, Homo sapiens
cggccgcaccgaccg

SEQ ID NO: 5852 - DNA, 15 bp, Homo sapiens
gcggccgcaccgacc

SEQ ID NO: 5853 - DNA, 15 bp, Homo sapiens
ggcggccgcaccgac

SEQ ID NO: 5854 - DNA, 15 bp, Homo sapiens
cggcggccgcaccga

SEQ ID NO: 5855 - DNA, 15 bp, Homo sapiens
acggcggccgcaccg

SEQ ID NO: 5856 - DNA, 15 bp, Homo sapiens
gacggcggccgcacc

SEQ ID NO: 5857 - DNA, 15 bp, Homo sapiens
cgacggcggccgcac

SEQ ID NO: 5858 - DNA, 15 bp, Homo sapiens
acgacggcggccgca

SEQ ID NO: 5859 - DNA, 15 bp, Homo sapiens
gacgacggcggccgc

SEQ ID NO: 5860 - DNA, 15 bp, Homo sapiens
cgacgacggcggccg

SEQ ID NO: 5861 - DNA, 15 bp, Homo sapiens
ccgacgacggcggcc

SEQ ID NO: 5862 - DNA, 15 bp, Homo sapiens
cccgacgacggcggc

SEQ ID NO: 5863 - DNA, 15 bp, Homo sapiens
gcccgacgacggcgg

SEQ ID NO: 5864 - DNA, 15 bp, Homo sapiens
cgcccgacgacggcg

SEQ ID NO: 5865 - DNA, 15 bp, Homo sapiens
tcgcccgacgacggc

SEQ ID NO: 5866 - DNA, 15 bp, Homo sapiens
ctcgcccgacgacgg

SEQ ID NO: 5867 - DNA, 15 bp, Homo sapiens
cctcgcccgacgacg

SEQ ID NO: 5868 - DNA, 15 bp, Homo sapiens
tcctcgcccgacgac

SEQ ID NO: 5869 - DNA, 15 bp, Homo sapiens
ctcctcgcccgacga

SEQ ID NO: 5870 - DNA, 15 bp, Homo sapiens
cctcctcgcccgacg

SEQ ID NO: 5871 - DNA, 15 bp, Homo sapiens
gcctcctcgcccgac

SEQ ID NO: 5872 - DNA, 15 bp, Homo sapiens
cgcctcctcgcccga

SEQ ID NO: 5873 - DNA, 15 bp, Homo sapiens
ccgcctcctcgcccg

SEQ ID NO: 5874 - DNA, 15 bp, Homo sapiens
tccgcctcctcgccc

SEQ ID NO: 5875 - DNA, 15 bp, Homo sapiens
atccgcctcctcgcc

SEQ ID NO: 5876 - DNA, 15 bp, Homo sapiens
catccgcctcctcgc

SEQ ID NO: 5877 - DNA, 15 bp, Homo sapiens
gcatccgcctcctcg

SEQ ID NO: 5878 - DNA, 15 bp, Homo sapiens
ggcatccgcctcctc

SEQ ID NO: 5879 - DNA, 15 bp, Homo sapiens
aggcatccgcctcct

SEQ ID NO: 5880 - DNA, 15 bp, Homo sapiens
caggcatccgcctcc

SEQ ID NO: 5881 - DNA, 15 bp, Homo sapiens
ccaggcatccgcctc

SEQ ID NO: 5882 - DNA, 15 bp, Homo sapiens
gccaggcatccgcct

SEQ ID NO: 5883 - DNA, 15 bp, Homo sapiens
ggccaggcatccgcc

SEQ ID NO: 5884 - DNA, 15 bp, Homo sapiens
cggccaggcatccgc

SEQ ID NO: 5885 - DNA, 15 bp, Homo sapiens
ccggccaggcatccg

SEQ ID NO: 5886 - DNA, 15 bp, Homo sapiens
cccggccaggcatcc

SEQ ID NO: 5887 - DNA, 15 bp, Homo sapiens
tcccggccaggcatc

SEQ ID NO: 5888 - DNA, 15 bp, Homo sapiens
gtcccggccaggcat

SEQ ID NO: 5889 - DNA, 15 bp, Homo sapiens
ggtcccggccaggca

SEQ ID NO: 5890 - DNA, 15 bp, Homo sapiens
gggtcccggccaggc

SEQ ID NO: 5891 - DNA, 15 bp, Homo sapiens
tgggtcccggccagg

SEQ ID NO: 5892 - DNA, 15 bp, Homo sapiens
ctgggtcccggccag

SEQ ID NO: 5893 - DNA, 15 bp, Homo sapiens
cctgggtcccggcca

SEQ ID NO: 5894 - DNA, 15 bp, Homo sapiens
gcctgggtcccggcc

SEQ ID NO: 5895 - DNA, 15 bp, Homo sapiens
ggcctgggtcccggc

SEQ ID NO: 5896 - DNA, 15 bp, Homo sapiens
cggcctgggtcccgg

SEQ ID NO: 5897 - DNA, 15 bp, Homo sapiens
tcggcctgggtcccg

SEQ ID NO: 5898 - DNA, 15 bp, Homo sapiens
ctcggcctgggtccc

SEQ ID NO: 5899 - DNA, 15 bp, Homo sapiens
gctcggcctgggtcc

SEQ ID NO: 5900 - DNA, 15 bp, Homo sapiens
ggctcggcctgggtc

SEQ ID NO: 5901 - DNA, 15 bp, Homo sapiens
gggctcggcctgggt

SEQ ID NO: 5902 - DNA, 15 bp, Homo sapiens
ggggctcggcctggg

SEQ ID NO: 5903 - DNA, 15 bp, Homo sapiens
cggggctcggcctgg

SEQ ID NO: 5904 - DNA, 15 bp, Homo sapiens
ccggggctcggcctg

SEQ ID NO: 5905 - DNA, 15 bp, Homo sapiens
tccggggctcggcct

SEQ ID NO: 5906 - DNA, 15 bp, Homo sapiens
atccggggctcggcc

SEQ ID NO: 5907 - DNA, 15 bp, Homo sapiens
gatccggggctcggc

SEQ ID NO: 5908 - DNA, 15 bp, Homo sapiens
ggatccggggctcgg

SEQ ID NO: 5909 - DNA, 15 bp, Homo sapiens
tggatccggggctcg

SEQ ID NO: 5910 - DNA, 15 bp, Homo sapiens
ctggatccggggctc

SEQ ID NO: 5911 - DNA, 15 bp, Homo sapiens
cctggatccggggct

SEQ ID NO: 5912 - DNA, 15 bp, Homo sapiens
tcctggatccggggc

SEQ ID NO: 5913 - DNA, 15 bp, Homo sapiens
atcctggatccgggg

SEQ ID NO: 5914 - DNA, 15 bp, Homo sapiens
catcctggatccggg

SEQ ID NO: 5915 - DNA, 15 bp, Homo sapiens
ccatcctggatccgg

SEQ ID NO: 5916 - DNA, 15 bp, Homo sapiens
cccatcctggatccg

SEQ ID NO: 5917 - DNA, 15 bp, Homo sapiens
tcccatcctggatcc

SEQ ID NO: 5918 - DNA, 15 bp, Homo sapiens
atcccatcctggatc

SEQ ID NO: 5919 - DNA, 15 bp, Homo sapiens
gatcccatcctggat

SEQ ID NO: 5920 - DNA, 15 bp, Homo sapiens
agatcccatcctgga

SEQ ID NO: 5921 - DNA, 15 bp, Homo sapiens
gagatcccatcctgg

SEQ ID NO: 5922 - DNA, 15 bp, Homo sapiens
ggagatcccatcctg

SEQ ID NO: 5923 - DNA, 15 bp, Homo sapiens
aggagatcccatcct

SEQ ID NO: 5924 - DNA, 15 bp, Homo sapiens
caggagatcccatcc

SEQ ID NO: 5925 - DNA, 15 bp, Homo sapiens
gcaggagatcccatc

SEQ ID NO: 5926 - DNA, 15 bp, Homo sapiens
agcaggagatcccat

SEQ ID NO: 5927 - DNA, 15 bp, Homo sapiens
gagcaggagatccca

SEQ ID NO: 5928 - DNA, 15 bp, Homo sapiens
ggagcaggagatccc

SEQ ID NO: 5929 - DNA, 15 bp, Homo sapiens
aggagcaggagatcc

SEQ ID NO: 5930 - DNA, 15 bp, Homo sapiens
caggagcaggagatc

SEQ ID NO: 5931 - DNA, 15 bp, Homo sapiens
acaggagcaggagat

SEQ ID NO: 5932 - DNA, 15 bp, Homo sapiens
aacaggagcaggaga

SEQ ID NO: 5933 - DNA, 15 bp, Homo sapiens
gaacaggagcaggag

SEQ ID NO: 5934 - DNA, 15 bp, Homo sapiens
ggaacaggagcagga

SEQ ID NO: 5935 - DNA, 15 bp, Homo sapiens
aggaacaggagcagg

SEQ ID NO: 5936 - DNA, 15 bp, Homo sapiens
gaggaacaggagcag

SEQ ID NO: 5937 - DNA, 15 bp, Homo sapiens
ggaggaacaggagca

SEQ ID NO: 5938 - DNA, 15 bp, Homo sapiens
gggaggaacaggagc

SEQ ID NO: 5939 - DNA, 15 bp, Homo sapiens
cgggaggaacaggag

SEQ ID NO: 5940 - DNA, 15 bp, Homo sapiens
gcgggaggaacagga

SEQ ID NO: 5941 - DNA, 15 bp, Homo sapiens
agcgggaggaacagg

SEQ ID NO: 5942 - DNA, 15 bp, Homo sapiens
gagcgggaggaacag

SEQ ID NO: 5943 - DNA, 15 bp, Homo sapiens
ggagcgggaggaaca

SEQ ID NO: 5944 - DNA, 15 bp, Homo sapiens
aggagcgggaggaac

SEQ ID NO: 5945 - DNA, 15 bp, Homo sapiens
caggagcgggaggaa

SEQ ID NO: 5946 - DNA, 15 bp, Homo sapiens
gcaggagcgggagga

SEQ ID NO: 5947 - DNA, 15 bp, Homo sapiens
ggcaggagcgggagg

SEQ ID NO: 5948 - DNA, 15 bp, Homo sapiens
gggcaggagcgggag

SEQ ID NO: 5949 - DNA, 15 bp, Homo sapiens
tgggcaggagcggga

SEQ ID NO: 5950 - DNA, 15 bp, Homo sapiens
gtgggcaggagcggg

SEQ ID NO: 5951 - DNA, 15 bp, Homo sapiens
cgtgggcaggagcgg

SEQ ID NO: 5952 - DNA, 15 bp, Homo sapiens
ccgtgggcaggagcg

SEQ ID NO: 5953 - DNA, 15 bp, Homo sapiens
gccgtgggcaggagc

SEQ ID NO: 5954 - DNA, 15 bp, Homo sapiens
cgccgtgggcaggag

SEQ ID NO: 5955 - DNA, 15 bp, Homo sapiens
ccgccgtgggcagga

SEQ ID NO: 5956 - DNA, 15 bp, Homo sapiens
cccgccgtgggcagg

SEQ ID NO: 5957 - DNA, 15 bp, Homo sapiens
gcccgccgtgggcag

SEQ ID NO: 5958 - DNA, 15 bp, Homo sapiens
agcccgccgtgggca

SEQ ID NO: 5959 - DNA, 15 bp, Homo sapiens
cagcccgccgtgggc

SEQ ID NO: 5960 - DNA, 15 bp, Homo sapiens
gcagcccgccgtggg

SEQ ID NO: 5961 - DNA, 15 bp, Homo sapiens
cgcagcccgccgtgg

SEQ ID NO: 5962 - DNA, 15 bp, Homo sapiens
gcgcagcccgccgtg

SEQ ID NO: 5963 - DNA, 15 bp, Homo sapiens
cgcgcagcccgccgt

SEQ ID NO: 5964 - DNA, 15 bp, Homo sapiens
ccgcgcagcccgccg

SEQ ID NO: 5965 - DNA, 15 bp, Homo sapiens
cccgcgcagcccgcc

SEQ ID NO: 5966 - DNA, 15 bp, Homo sapiens
tcccgcgcagcccgc

SEQ ID NO: 5967 - DNA, 15 bp, Homo sapiens
gtcccgcgcagcccg

SEQ ID NO: 5968 - DNA, 15 bp, Homo sapiens
cgtcccgcgcagccc

SEQ ID NO: 5969 - DNA, 15 bp, Homo sapiens
acgtcccgcgcagcc

SEQ ID NO: 5970 - DNA, 15 bp, Homo sapiens
tacgtcccgcgcagc

SEQ ID NO: 5971 - DNA, 15 bp, Homo sapiens
ctacgtcccgcgcag

SEQ ID NO: 5972 - DNA, 15 bp, Homo sapiens
gctacgtcccgcgca

SEQ ID NO: 5973 - DNA, 15 bp, Homo sapiens
cgctacgtcccgcgc

SEQ ID NO: 5974 - DNA, 15 bp, Homo sapiens
gcgctacgtcccgcg

SEQ ID NO: 5975 - DNA, 15 bp, Homo sapiens
cgcgctacgtcccgc

SEQ ID NO: 5976 - DNA, 15 bp, Homo sapiens
gcgcgctacgtcccg

SEQ ID NO: 5977 - DNA, 15 bp, Homo sapiens
agcgcgctacgtccc

SEQ ID NO: 5978 - DNA, 15 bp, Homo sapiens
cagcgcgctacgtcc

SEQ ID NO: 5979 - DNA, 15 bp, Homo sapiens
ccagcgcgctacgtc

SEQ ID NO: 5980 - DNA, 15 bp, Homo sapiens
cccagcgcgctacgt

SEQ ID NO: 5981 - DNA, 15 bp, Homo sapiens
acccagcgcgctacg

SEQ ID NO: 5982 - DNA, 15 bp, Homo sapiens
cacccagcgcgctac

SEQ ID NO: 5983 - DNA, 15 bp, Homo sapiens
ccacccagcgcgcta

SEQ ID NO: 5984 - DNA, 15 bp, Homo sapiens
accacccagcgcgct

SEQ ID NO: 5985 - DNA, 15 bp, Homo sapiens
gaccacccagcgcgc

SEQ ID NO: 5986 - DNA, 15 bp, Homo sapiens
cgaccacccagcgcg

SEQ ID NO: 5987 - DNA, 15 bp, Homo sapiens
gcgaccacccagcgc

SEQ ID NO: 5988 - DNA, 15 bp, Homo sapiens
tgcgaccacccagcg

SEQ ID NO: 5989 - DNA, 15 bp, Homo sapiens
ttgcgaccacccagc

SEQ ID NO: 5990 - DNA, 15 bp, Homo sapiens
tttgcgaccacccag

SEQ ID NO: 5991 - DNA, 15 bp, Homo sapiens
ttttgcgaccaccca

SEQ ID NO: 5992 - DNA, 15 bp, Homo sapiens
cttttgcgaccaccc

SEQ ID NO: 5993 - DNA, 15 bp, Homo sapiens
ccttttgcgaccacc

SEQ ID NO: 5994 - DNA, 15 bp, Homo sapiens
tccttttgcgaccac

SEQ ID NO: 5995 - DNA, 15 bp, Homo sapiens
ttccttttgcgacca

SEQ ID NO: 5996 - DNA, 15 bp, Homo sapiens
cttccttttgcgacc

SEQ ID NO: 5997 - DNA, 15 bp, Homo sapiens
gcttccttttgcgac

SEQ ID NO: 5998 - DNA, 15 bp, Homo sapiens
ggcttccttttgcga

SEQ ID NO: 5999 - DNA, 15 bp, Homo sapiens
gggcttccttttgcg

SEQ ID NO: 6000 - DNA, 15 bp, Homo sapiens
tgggcttccttttgc

SEQ ID NO: 6001 - DNA, 15 bp, Homo sapiens
ctgggcttccttttg

SEQ ID NO: 6002 - DNA, 15 bp, Homo sapiens
gctgggcttcctttt

SEQ ID NO: 6003 - DNA, 15 bp, Homo sapiens
ggctgggcttccttt

SEQ ID NO: 6004 - DNA, 15 bp, Homo sapiens
cggctgggcttcctt

SEQ ID NO: 6005 - DNA, 15 bp, Homo sapiens
acggctgggcttcct

SEQ ID NO: 6006 - DNA, 15 bp, Homo sapiens
gacggctgggcttcc

SEQ ID NO: 6007 - DNA, 15 bp, Homo sapiens
cgacggctgggcttc

SEQ ID NO: 6008 - DNA, 15 bp, Homo sapiens
acgacggctgggctt

SEQ ID NO: 6009 - DNA, 15 bp, Homo sapiens
cacgacggctgggct

SEQ ID NO: 6010 - DNA, 15 bp, Homo sapiens
acacgacggctgggc

SEQ ID NO: 6011 - DNA, 15 bp, Homo sapiens
cacacgacggctggg

SEQ ID NO: 6012 - DNA, 15 bp, Homo sapiens
tcacacgacggctgg

SEQ ID NO: 6013 - DNA, 15 bp, Homo sapiens
ctcacacgacggctg

SEQ ID NO: 6014 - DNA, 15 bp, Homo sapiens
cctcacacgacggct

SEQ ID NO: 6015 - DNA, 15 bp, Homo sapiens
gcctcacacgacggc

SEQ ID NO: 6016 - DNA, 15 bp, Homo sapiens
ggcctcacacgacgg

SEQ ID NO: 6017 - DNA, 15 bp, Homo sapiens
gggcctcacacgacg

SEQ ID NO: 6018 - DNA, 15 bp, Homo sapiens
cgggcctcacacgac

SEQ ID NO: 6019 - DNA, 15 bp, Homo sapiens
gcgggcctcacacga

SEQ ID NO: 6020 - DNA, 15 bp, Homo sapiens
tgcgggcctcacacg

SEQ ID NO: 6021 - DNA, 15 bp, Homo sapiens
gtgcgggcctcacac

SEQ ID NO: 6022 - DNA, 15 bp, Homo sapiens
cgtgcgggcctcaca

SEQ ID NO: 6023 - DNA, 15 bp, Homo sapiens
acgtgcgggcctcac

SEQ ID NO: 6024 - DNA, 15 bp, Homo sapiens
cacgtgcgggcctca

SEQ ID NO: 6025 - DNA, 15 bp, Homo sapiens
gcacgtgcgggcctc

SEQ ID NO: 6026 - DNA, 15 bp, Homo sapiens
tgcacgtgcgggcct

SEQ ID NO: 6027 - DNA, 15 bp, Homo sapiens
gtgcacgtgcgggcc

SEQ ID NO: 6028 - DNA, 15 bp, Homo sapiens
ggtgcacgtgcgggc

SEQ ID NO: 6029 - DNA, 15 bp, Homo sapiens
cggtgcacgtgcggg

SEQ ID NO: 6030 - DNA, 15 bp, Homo sapiens
gcggtgcacgtgcgg

SEQ ID NO: 6031 - DNA, 15 bp, Homo sapiens
ggcggtgcacgtgcg

SEQ ID NO: 6032 - DNA, 15 bp, Homo sapiens
aggcggtgcacgtgc

SEQ ID NO: 6033 - DNA, 15 bp, Homo sapiens
aaggcggtgcacgtg

SEQ ID NO: 6034 - DNA, 15 bp, Homo sapiens
gaaggcggtgcacgt

SEQ ID NO: 6035 - DNA, 15 bp, Homo sapiens
agaaggcggtgcacg

SEQ ID NO: 6036 - DNA, 15 bp, Homo sapiens
gagaaggcggtgcac

SEQ ID NO: 6037 - DNA, 15 bp, Homo sapiens
cgagaaggcggtgca

SEQ ID NO: 6038 - DNA, 15 bp, Homo sapiens
tcgagaaggcggtgc

SEQ ID NO: 6039 - DNA, 15 bp, Homo sapiens
ttcgagaaggcggtg

SEQ ID NO: 6040 - DNA, 15 bp, Homo sapiens
cttcgagaaggcggt

SEQ ID NO: 6041 - DNA, 15 bp, Homo sapiens
ccttcgagaaggcgg

SEQ ID NO: 6042 - DNA, 15 bp, Homo sapiens
tccttcgagaaggcg

SEQ ID NO: 6043 - DNA, 15 bp, Homo sapiens
ctccttcgagaaggc

SEQ ID NO: 6044 - DNA, 15 bp, Homo sapiens
gctccttcgagaagg

SEQ ID NO: 6045 - DNA, 15 bp, Homo sapiens
cgctccttcgagaag

SEQ ID NO: 6046 - DNA, 15 bp, Homo sapiens
ccgctccttcgagaa

SEQ ID NO: 6047 - DNA, 15 bp, Homo sapiens
accgctccttcgaga

SEQ ID NO: 6048 - DNA, 15 bp, Homo sapiens
aaccgctccttcgag

SEQ ID NO: 6049 - DNA, 15 bp, Homo sapiens
gaaccgctccttcga

SEQ ID NO: 6050 - DNA, 15 bp, Homo sapiens
tgaaccgctccttcg

SEQ ID NO: 6051 - DNA, 15 bp, Homo sapiens
ctgaaccgctccttc

SEQ ID NO: 6052 - DNA, 15 bp, Homo sapiens
gctgaaccgctcctt

SEQ ID NO: 6053 - DNA, 15 bp, Homo sapiens
tgctgaaccgctcct

SEQ ID NO: 6054 - DNA, 15 bp, Homo sapiens
gtgctgaaccgctcc

SEQ ID NO: 6055 - DNA, 15 bp, Homo sapiens
cgtgctgaaccgctc

SEQ ID NO: 6056 - DNA, 15 bp, Homo sapiens
gcgtgctgaaccgct

SEQ ID NO: 6057 - DNA, 15 bp, Homo sapiens
cgcgtgctgaaccgc

SEQ ID NO: 6058 - DNA, 15 bp, Homo sapiens
acgcgtgctgaaccg

SEQ ID NO: 6059 - DNA, 15 bp, Homo sapiens
tacgcgtgctgaacc

SEQ ID NO: 6060 - DNA, 15 bp, Homo sapiens
gtacgcgtgctgaac

SEQ ID NO: 6061 - DNA, 15 bp, Homo sapiens
ggtacgcgtgctgaa

SEQ ID NO: 6062 - DNA, 15 bp, Homo sapiens
tggtacgcgtgctga

SEQ ID NO: 6063 - DNA, 15 bp, Homo sapiens
ttggtacgcgtgctg

SEQ ID NO: 6064 - DNA, 15 bp, Homo sapiens
gttggtacgcgtgct

SEQ ID NO: 6065 - DNA, 15 bp, Homo sapiens
ggttggtacgcgtgc

SEQ ID NO: 6066 - DNA, 15 bp, Homo sapiens
gggttggtacgcgtg

SEQ ID NO: 6067 - DNA, 15 bp, Homo sapiens
cgggttggtacgcgt

SEQ ID NO: 6068 - DNA, 15 bp, Homo sapiens
gcgggttggtacgcg

SEQ ID NO: 6069 - DNA, 15 bp, Homo sapiens
cgcgggttggtacgc

SEQ ID NO: 6070 - DNA, 15 bp, Homo sapiens
gcgcgggttggtacg

SEQ ID NO: 6071 - DNA, 15 bp, Homo sapiens
tgcgcgggttggtac

SEQ ID NO: 6072 - DNA, 15 bp, Homo sapiens
ctgcgcgggttggta

SEQ ID NO: 6073 - DNA, 15 bp, Homo sapiens
gctgcgcgggttggt

SEQ ID NO: 6074 - DNA, 15 bp, Homo sapiens
tgctgcgcgggttgg

SEQ ID NO: 6075 - DNA, 15 bp, Homo sapiens
gtgctgcgcgggttg

SEQ ID NO: 6076 - DNA, 15 bp, Homo sapiens
ggtgctgcgcgggtt

SEQ ID NO: 6077 - DNA, 15 bp, Homo sapiens
cggtgctgcgcgggt

SEQ ID NO: 6078 - DNA, 15 bp, Homo sapiens
ccggtgctgcgcggg

SEQ ID NO: 6079 - DNA, 15 bp, Homo sapiens
gccggtgctgcgcgg

SEQ ID NO: 6080 - DNA, 15 bp, Homo sapiens
cgccggtgctgcgcg

SEQ ID NO: 6081 - DNA, 15 bp, Homo sapiens
ccgccggtgctgcgc

SEQ ID NO: 6082 - DNA, 15 bp, Homo sapiens
cccgccggtgctgcg

SEQ ID NO: 6083 - DNA, 15 bp, Homo sapiens
gcccgccggtgctgc

SEQ ID NO: 6084 - DNA, 15 bp, Homo sapiens
cgcccgccggtgctg

SEQ ID NO: 6085 - DNA, 15 bp, Homo sapiens
ccgcccgccggtgct

SEQ ID NO: 6086 - DNA, 15 bp, Homo sapiens
gccgcccgccggtgc

SEQ ID NO: 6087 - DNA, 15 bp, Homo sapiens
ggccgcccgccggtg

SEQ ID NO: 6088 - DNA, 15 bp, Homo sapiens
gggccgcccgccggt

SEQ ID NO: 6089 - DNA, 15 bp, Homo sapiens
ggggccgcccgccgg

SEQ ID NO: 6090 - DNA, 15 bp, Homo sapiens
gggggccgcccgccg

SEQ ID NO: 6091 - DNA, 15 bp, Homo sapiens
tgggggccgcccgcc

SEQ ID NO: 6092 - DNA, 15 bp, Homo sapiens
ctgggggccgcccgc

SEQ ID NO: 6093 - DNA, 15 bp, Homo sapiens
cctgggggccgcccg

SEQ ID NO: 6094 - DNA, 15 bp, Homo sapiens
gcctgggggccgccc

SEQ ID NO: 6095 - DNA, 15 bp, Homo sapiens
tgcctgggggccgcc

SEQ ID NO: 6096 - DNA, 15 bp, Homo sapiens
gtgcctgggggccgc

SEQ ID NO: 6097 - DNA, 15 bp, Homo sapiens
ggtgcctgggggccg

SEQ ID NO: 6098 - DNA, 15 bp, Homo sapiens
gggtgcctgggggcc

SEQ ID NO: 6099 - DNA, 15 bp, Homo sapiens
tgggtgcctgggggc

SEQ ID NO: 6100 - DNA, 15 bp, Homo sapiens
gtgggtgcctggggg

SEQ ID NO: 6101 - DNA, 15 bp, Homo sapiens
tgtgggtgcctgggg

SEQ ID NO: 6102 - DNA, 15 bp, Homo sapiens
gtgtgggtgcctggg

SEQ ID NO: 6103 - DNA, 15 bp, Homo sapiens
ggtgtgggtgcctgg

SEQ ID NO: 6104 - DNA, 15 bp, Homo sapiens
gggtgtgggtgcctg

SEQ ID NO: 6105 - DNA, 15 bp, Homo sapiens
ggggtgtgggtgcct

SEQ ID NO: 6106 - DNA, 15 bp, Homo sapiens
cggggtgtgggtgcc

SEQ ID NO: 6107 - DNA, 15 bp, Homo sapiens
ccggggtgtgggtgc

SEQ ID NO: 6108 - DNA, 15 bp, Homo sapiens
gccggggtgtgggtg

SEQ ID NO: 6109 - DNA, 15 bp, Homo sapiens
tgccggggtgtgggt

SEQ ID NO: 6110 - DNA, 15 bp, Homo sapiens
gtgccggggtgtggg

SEQ ID NO: 6111 - DNA, 15 bp, Homo sapiens
ggtgccggggtgtgg

SEQ ID NO: 6112 - DNA, 15 bp, Homo sapiens
gggtgccggggtgtg

SEQ ID NO: 6113 - DNA, 15 bp, Homo sapiens
ggggtgccggggtgt

SEQ ID NO: 6114 - DNA, 15 bp, Homo sapiens
gggggtgccggggtg

SEQ ID NO: 6115 - DNA, 15 bp, Homo sapiens
cgggggtgccggggt

SEQ ID NO: 6116 - DNA, 15 bp, Homo sapiens
ccgggggtgccgggg

SEQ ID NO: 6117 - DNA, 15 bp, Homo sapiens
cccgggggtgccggg

SEQ ID NO: 6118 - DNA, 15 bp, Homo sapiens
ccccgggggtgccgg

SEQ ID NO: 6119 - DNA, 15 bp, Homo sapiens
tccccgggggtgccg

SEQ ID NO: 6120 - DNA, 15 bp, Homo sapiens
gtccccgggggtgcc

SEQ ID NO: 6121 - DNA, 15 bp, Homo sapiens
ggtccccgggggtgc

SEQ ID NO: 6122 - DNA, 15 bp, Homo sapiens
cggtccccgggggtg

SEQ ID NO: 6123 - DNA, 15 bp, Homo sapiens
gcggtccccgggggt

SEQ ID NO: 6124 - DNA, 15 bp, Homo sapiens
agcggtccccggggg

SEQ ID NO: 6125 - DNA, 15 bp, Homo sapiens
gagcggtccccgggg

SEQ ID NO: 6126 - DNA, 15 bp, Homo sapiens
ggagcggtccccggg

SEQ ID NO: 6127 - DNA, 15 bp, Homo sapiens
cggagcggtccccgg

SEQ ID NO: 6128 - DNA, 15 bp, Homo sapiens
ccggagcggtccccg

SEQ ID NO: 6129 - DNA, 15 bp, Homo sapiens
cccggagcggtcccc

SEQ ID NO: 6130 - DNA, 15 bp, Homo sapiens
tcccggagcggtccc

SEQ ID NO: 6131 - DNA, 15 bp, Homo sapiens
ctcccggagcggtcc

SEQ ID NO: 6132 - DNA, 15 bp, Homo sapiens
cctcccggagcggtc

SEQ ID NO: 6133 - DNA, 15 bp, Homo sapiens
gcctcccggagcggt

SEQ ID NO: 6134 - DNA, 15 bp, Homo sapiens
cgcctcccggagcgg

SEQ ID NO: 6135 - DNA, 15 bp, Homo sapiens
ccgcctcccggagcg

SEQ ID NO: 6136 - DNA, 15 bp, Homo sapiens
gccgcctcccggagc

SEQ ID NO: 6137 - DNA, 15 bp, Homo sapiens
tgccgcctcccggag

SEQ ID NO: 6138 - DNA, 15 bp, Homo sapiens
ctgccgcctcccgga

SEQ ID NO: 6139 - DNA, 15 bp, Homo sapiens
gctgccgcctcccgg

SEQ ID NO: 6140 - DNA, 15 bp, Homo sapiens
tgctgccgcctcccg

SEQ ID NO: 6141 - DNA, 15 bp, Homo sapiens
ctgctgccgcctccc

SEQ ID NO: 6142 - DNA, 15 bp, Homo sapiens
gctgctgccgcctcc

SEQ ID NO: 6143 - DNA, 15 bp, Homo sapiens
cgctgctgccgcctc

SEQ ID NO: 6144 - DNA, 15 bp, Homo sapiens
gcgctgctgccgcct

SEQ ID NO: 6145 - DNA, 15 bp, Homo sapiens
ggcgctgctgccgcc

SEQ ID NO: 6146 - DNA, 15 bp, Homo sapiens
aggcgctgctgccgc

SEQ ID NO: 6147 - DNA, 15 bp, Homo sapiens
gaggcgctgctgccg

SEQ ID NO: 6148 - DNA, 15 bp, Homo sapiens
ggaggcgctgctgcc

SEQ ID NO: 6149 - DNA, 15 bp, Homo sapiens
tggaggcgctgctgc

SEQ ID NO: 6150 - DNA, 15 bp, Homo sapiens
ctggaggcgctgctg

SEQ ID NO: 6151 - DNA, 15 bp, Homo sapiens
gctggaggcgctgct

SEQ ID NO: 6152 - DNA, 15 bp, Homo sapiens
agctggaggcgctgc

SEQ ID NO: 6153 - DNA, 15 bp, Homo sapiens
gagctggaggcgctg

SEQ ID NO: 6154 - DNA, 15 bp, Homo sapiens
ggagctggaggcgct

SEQ ID NO: 6155 - DNA, 15 bp, Homo sapiens
tggagctggaggcgc

SEQ ID NO: 6156 - DNA, 15 bp, Homo sapiens
gtggagctggaggcg

SEQ ID NO: 6157 - DNA, 15 bp, Homo sapiens
ggtggagctggaggc

SEQ ID NO: 6158 - DNA, 15 bp, Homo sapiens
tggtggagctggagg

SEQ ID NO: 6159 - DNA, 15 bp, Homo sapiens
atggtggagctggag

SEQ ID NO: 6160 - DNA, 15 bp, Homo sapiens
catggtggagctgga

SEQ ID NO: 6161 - DNA, 15 bp, Homo sapiens
tcatggtggagctgg

SEQ ID NO: 6162 - DNA, 15 bp, Homo sapiens
gtcatggtggagctg

SEQ ID NO: 6163 - DNA, 15 bp, Homo sapiens
cgtcatggtggagct

SEQ ID NO: 6164 - DNA, 15 bp, Homo sapiens
gcgtcatggtggagc

SEQ ID NO: 6165 - DNA, 15 bp, Homo sapiens
cgcgtcatggtggag

SEQ ID NO: 6166 - DNA, 15 bp, Homo sapiens
gcgcgtcatggtgga

SEQ ID NO: 6167 - DNA, 15 bp, Homo sapiens
ggcgcgtcatggtgg

SEQ ID NO: 6168 - DNA, 15 bp, Homo sapiens
gggcgcgtcatggtg

SEQ ID NO: 6169 - DNA, 15 bp, Homo sapiens
ggggcgcgtcatggt

SEQ ID NO: 6170 - DNA, 15 bp, Homo sapiens
tggggcgcgtcatgg

SEQ ID NO: 6171 - DNA, 15 bp, Homo sapiens
ttggggcgcgtcatg

SEQ ID NO: 6172 - DNA, 15 bp, Homo sapiens
cttggggcgcgtcat

SEQ ID NO: 6173 - DNA, 15 bp, Homo sapiens
gcttggggcgcgtca

SEQ ID NO: 6174 - DNA, 15 bp, Homo sapiens
cgcttggggcgcgtc

SEQ ID NO: 6175 - DNA, 15 bp, Homo sapiens
gcgcttggggcgcgt

SEQ ID NO: 6176 - DNA, 15 bp, Homo sapiens
agcgcttggggcgcg

SEQ ID NO: 6177 - DNA, 15 bp, Homo sapiens
gagcgcttggggcgc

SEQ ID NO: 6178 - DNA, 15 bp, Homo sapiens
ggagcgcttggggcg

SEQ ID NO: 6179 - DNA, 15 bp, Homo sapiens
tggagcgcttggggc

SEQ ID NO: 6180 - DNA, 15 bp, Homo sapiens
ctggagcgcttgggg

SEQ ID NO: 6181 - DNA, 15 bp, Homo sapiens
tctggagcgcttggg

SEQ ID NO: 6182 - DNA, 15 bp, Homo sapiens
gtctggagcgcttgg

SEQ ID NO: 6183 - DNA, 15 bp, Homo sapiens
cgtctggagcgcttg

SEQ ID NO: 6184 - DNA, 15 bp, Homo sapiens
ccgtctggagcgctt

SEQ ID NO: 6185 - DNA, 15 bp, Homo sapiens
gccgtctggagcgct

SEQ ID NO: 6186 - DNA, 15 bp, Homo sapiens
ggccgtctggagcgc

SEQ ID NO: 6187 - DNA, 15 bp, Homo sapiens
gggccgtctggagcg

SEQ ID NO: 6188 - DNA, 15 bp, Homo sapiens
cgggccgtctggagc

SEQ ID NO: 6189 - DNA, 15 bp, Homo sapiens
ccgggccgtctggag

SEQ ID NO: 6190 - DNA, 15 bp, Homo sapiens
gccgggccgtctgga

SEQ ID NO: 6191 - DNA, 15 bp, Homo sapiens
cgccgggccgtctgg

SEQ ID NO: 6192 - DNA, 15 bp, Homo sapiens
gcgccgggccgtctg

SEQ ID NO: 6193 - DNA, 15 bp, Homo sapiens
cgcgccgggccgtct

SEQ ID NO: 6194 - DNA, 15 bp, Homo sapiens
ccgcgccgggccgtc

SEQ ID NO: 6195 - DNA, 15 bp, Homo sapiens
cccgcgccgggccgt

SEQ ID NO: 6196 - DNA, 15 bp, Homo sapiens
gcccgcgccgggccg

SEQ ID NO: 6197 - DNA, 15 bp, Homo sapiens
cgcccgcgccgggcc

SEQ ID NO: 6198 - DNA, 15 bp, Homo sapiens
ccgcccgcgccgggc

SEQ ID NO: 6199 - DNA, 15 bp, Homo sapiens
gccgcccgcgccggg

SEQ ID NO: 6200 - DNA, 15 bp, Homo sapiens
tgccgcccgcgccgg

SEQ ID NO: 6201 - DNA, 15 bp, Homo sapiens
ctgccgcccgcgccg

SEQ ID NO: 6202 - DNA, 15 bp, Homo sapiens
gctgccgcccgcgcc

SEQ ID NO: 6203 - DNA, 15 bp, Homo sapiens
cgctgccgcccgcgc

SEQ ID NO: 6204 - DNA, 15 bp, Homo sapiens
tcgctgccgcccgcg

SEQ ID NO: 6205 - DNA, 15 bp, Homo sapiens
ttcgctgccgcccgc

SEQ ID NO: 6206 - DNA, 15 bp, Homo sapiens
tttcgctgccgcccg

SEQ ID NO: 6207 - DNA, 15 bp, Homo sapiens
ttttcgctgccgccc

SEQ ID NO: 6208 - DNA, 15 bp, Homo sapiens
attttcgctgccgcc

SEQ ID NO: 6209 - DNA, 15 bp, Homo sapiens
cattttcgctgccgc

SEQ ID NO: 6210 - DNA, 15 bp, Homo sapiens
acattttcgctgccg

SEQ ID NO: 6211 - DNA, 15 bp, Homo sapiens
cacattttcgctgcc

SEQ ID NO: 6212 - DNA, 15 bp, Homo sapiens
ccacattttcgctgc

SEQ ID NO: 6213 - DNA, 15 bp, Homo sapiens
cccacattttcgctg

SEQ ID NO: 6214 - DNA, 15 bp, Homo sapiens
ccccacattttcgct

SEQ ID NO: 6215 - DNA, 15 bp, Homo sapiens
tccccacattttcgc

SEQ ID NO: 6216 - DNA, 15 bp, Homo sapiens
gtccccacattttcg

SEQ ID NO: 6217 - DNA, 15 bp, Homo sapiens
ggtccccacattttc

SEQ ID NO: 6218 - DNA, 15 bp, Homo sapiens
tggtccccacatttt

SEQ ID NO: 6219 - DNA, 15 bp, Homo sapiens
ctggtccccacattt

SEQ ID NO: 6220 - DNA, 15 bp, Homo sapiens
cctggtccccacatt

SEQ ID NO: 6221 - DNA, 15 bp, Homo sapiens
acctggtccccacat

SEQ ID NO: 6222 - DNA, 15 bp, Homo sapiens
tacctggtccccaca

SEQ ID NO: 6223 - DNA, 15 bp, Homo sapiens
ttacctggtccccac

SEQ ID NO: 6224 - DNA, 15 bp, Homo sapiens
tttacctggtcccca

SEQ ID NO: 6225 - DNA, 15 bp, Homo sapiens
ttttacctggtcccc

SEQ ID NO: 6226 - DNA, 15 bp, Homo sapiens
gttttacctggtccc

SEQ ID NO: 6227 - DNA, 15 bp, Homo sapiens
ggttttacctggtcc

SEQ ID NO: 6228 - DNA, 15 bp, Homo sapiens
gggttttacctggtc

SEQ ID NO: 6229 - DNA, 15 bp, Homo sapiens
ggggttttacctggt

SEQ ID NO: 6230 - DNA, 15 bp, Homo sapiens
gggggttttacctgg

SEQ ID NO: 6231 - DNA, 15 bp, Homo sapiens
ggggggttttacctg

SEQ ID NO: 6232 - DNA, 15 bp, Homo sapiens
cggggggttttacct

SEQ ID NO: 6233 - DNA, 15 bp, Homo sapiens
gcggggggttttacc

SEQ ID NO: 6234 - DNA, 15 bp, Homo sapiens
ggcggggggttttac

SEQ ID NO: 6235 - DNA, 15 bp, Homo sapiens
tggcggggggtttta

SEQ ID NO: 6236 - DNA, 15 bp, Homo sapiens
ctggcggggggtttt

SEQ ID NO: 6237 - DNA, 15 bp, Homo sapiens
gctggcggggggttt

SEQ ID NO: 6238 - DNA, 15 bp, Homo sapiens
cgctggcggggggtt

SEQ ID NO: 6239 - DNA, 15 bp, Homo sapiens
ccgctggcggggggt

SEQ ID NO: 6240 - DNA, 15 bp, Homo sapiens
cccgctggcgggggg

SEQ ID NO: 6241 - DNA, 15 bp, Homo sapiens
ccccgctggcggggg

SEQ ID NO: 6242 - DNA, 15 bp, Homo sapiens
tccccgctggcgggg

SEQ ID NO: 6243 - DNA, 15 bp, Homo sapiens
gtccccgctggcggg

SEQ ID NO: 6244 - DNA, 15 bp, Homo sapiens
cgtccccgctggcgg

SEQ ID NO: 6245 - DNA, 15 bp, Homo sapiens
ccgtccccgctggcg

SEQ ID NO: 6246 - DNA, 15 bp, Homo sapiens
cccgtccccgctggc

SEQ ID NO: 6247 - DNA, 15 bp, Homo sapiens
ccccgtccccgctgg

SEQ ID NO: 6248 - DNA, 15 bp, Homo sapiens
gccccgtccccgctg

SEQ ID NO: 6249 - DNA, 15 bp, Homo sapiens
tgccccgtccccgct

SEQ ID NO: 6250 - DNA, 15 bp, Homo sapiens
gtgccccgtccccgc

SEQ ID NO: 6251 - DNA, 15 bp, Homo sapiens
tgtgccccgtccccg

SEQ ID NO: 6252 - DNA, 15 bp, Homo sapiens
ctgtgccccgtcccc

SEQ ID NO: 6253 - DNA, 15 bp, Homo sapiens
gctgtgccccgtccc

SEQ ID NO: 6254 - DNA, 15 bp, Homo sapiens
cgctgtgccccgtcc

SEQ ID NO: 6255 - DNA, 15 bp, Homo sapiens
ccgctgtgccccgtc

SEQ ID NO: 6256 - DNA, 15 bp, Homo sapiens
accgctgtgccccgt

SEQ ID NO: 6257 - DNA, 15 bp, Homo sapiens
caccgctgtgccccg

SEQ ID NO: 6258 - DNA, 15 bp, Homo sapiens
tcaccgctgtgcccc

SEQ ID NO: 6259 - DNA, 15 bp, Homo sapiens
ctcaccgctgtgccc

SEQ ID NO: 6260 - DNA, 15 bp, Homo sapiens
cctcaccgctgtgcc

SEQ ID NO: 6261 - DNA, 15 bp, Homo sapiens
ccctcaccgctgtgc

SEQ ID NO: 6262 - DNA, 15 bp, Homo sapiens
gccctcaccgctgtg

SEQ ID NO: 6263 - DNA, 15 bp, Homo sapiens
agccctcaccgctgt

SEQ ID NO: 6264 - DNA, 15 bp, Homo sapiens
gagccctcaccgctg

SEQ ID NO: 6265 - DNA, 15 bp, Homo sapiens
cgagccctcaccgct

SEQ ID NO: 6266 - DNA, 15 bp, Homo sapiens
ccgagccctcaccgc

SEQ ID NO: 6267 - DNA, 15 bp, Homo sapiens
cccgagccctcaccg

SEQ ID NO: 6268 - DNA, 15 bp, Homo sapiens
ccccgagccctcacc

SEQ ID NO: 6269 - DNA, 15 bp, Homo sapiens
gccccgagccctcac

SEQ ID NO: 6270 - DNA, 15 bp, Homo sapiens
tgccccgagccctca

SEQ ID NO: 6271 - DNA, 15 bp, Homo sapiens
ttgccccgagccctc

SEQ ID NO: 6272 - DNA, 15 bp, Homo sapiens
cttgccccgagccct

SEQ ID NO: 6273 - DNA, 15 bp, Homo sapiens
gcttgccccgagccc

SEQ ID NO: 6274 - DNA, 15 bp, Homo sapiens
ggcttgccccgagcc

SEQ ID NO: 6275 - DNA, 15 bp, Homo sapiens
aggcttgccccgagc

SEQ ID NO: 6276 - DNA, 15 bp, Homo sapiens
gaggcttgccccgag

SEQ ID NO: 6277 - DNA, 15 bp, Homo sapiens
ggaggcttgccccga

SEQ ID NO: 6278 - DNA, 15 bp, Homo sapiens
aggaggcttgccccg

SEQ ID NO: 6279 - DNA, 15 bp, Homo sapiens
gaggaggcttgcccc

SEQ ID NO: 6280 - DNA, 15 bp, Homo sapiens
agaggaggcttgccc

SEQ ID NO: 6281 - DNA, 15 bp, Homo sapiens
aagaggaggcttgcc

SEQ ID NO: 6282 - DNA, 15 bp, Homo sapiens
gaagaggaggcttgc

SEQ ID NO: 6283 - DNA, 15 bp, Homo sapiens
ggaagaggaggcttg

SEQ ID NO: 6284 - DNA, 15 bp, Homo sapiens
aggaagaggaggctt

SEQ ID NO: 6285 - DNA, 15 bp, Homo sapiens
gaggaagaggaggct

SEQ ID NO: 6286 - DNA, 15 bp, Homo sapiens
ggaggaagaggaggc

SEQ ID NO: 6287 - DNA, 15 bp, Homo sapiens
aggaggaagaggagg

SEQ ID NO: 6288 - DNA, 15 bp, Homo sapiens
gaggaggaagaggag

SEQ ID NO: 6289 - DNA, 15 bp, Homo sapiens
ggaggaggaagagga

SEQ ID NO: 6290 - DNA, 15 bp, Homo sapiens
gggaggaggaagagg

SEQ ID NO: 6291 - DNA, 15 bp, Homo sapiens
ggggaggaggaagag

SEQ ID NO: 6292 - DNA, 15 bp, Homo sapiens
aggggaggaggaaga

SEQ ID NO: 6293 - DNA, 15 bp, Homo sapiens
aaggggaggaggaag

SEQ ID NO: 6294 - DNA, 15 bp, Homo sapiens
gaaggggaggaggaa

SEQ ID NO: 6295 - DNA, 15 bp, Homo sapiens
tgaaggggaggagga

SEQ ID NO: 6296 - DNA, 15 bp, Homo sapiens
atgaaggggaggagg

SEQ ID NO: 6297 - DNA, 15 bp, Homo sapiens
gatgaaggggaggag

SEQ ID NO: 6298 - DNA, 15 bp, Homo sapiens
ggatgaaggggagga

SEQ ID NO: 6299 - DNA, 15 bp, Homo sapiens
gggatgaaggggagg

SEQ ID NO: 6300 - DNA, 15 bp, Homo sapiens
ggggatgaaggggag

SEQ ID NO: 6301 - DNA, 15 bp, Homo sapiens
tggggatgaagggga

SEQ ID NO: 6302 - DNA, 15 bp, Homo sapiens
atggggatgaagggg

SEQ ID NO: 6303 - DNA, 15 bp, Homo sapiens
gatggggatgaaggg

SEQ ID NO: 6304 - DNA, 15 bp, Homo sapiens
ggatggggatgaagg

SEQ ID NO: 6305 - DNA, 15 bp, Homo sapiens
aggatggggatgaag

SEQ ID NO: 6306 - DNA, 15 bp, Homo sapiens
gaggatggggatgaa

SEQ ID NO: 6307 - DNA, 15 bp, Homo sapiens
cgaggatggggatga

SEQ ID NO: 6308 - DNA, 15 bp, Homo sapiens
gcgaggatggggatg

SEQ ID NO: 6309 - DNA, 15 bp, Homo sapiens
ggcgaggatggggat

SEQ ID NO: 6310 - DNA, 15 bp, Homo sapiens
tggcgaggatgggga

SEQ ID NO: 6311 - DNA, 15 bp, Homo sapiens
atggcgaggatgggg

SEQ ID NO: 6312 - DNA, 15 bp, Homo sapiens
gatggcgaggatggg

SEQ ID NO: 6313 - DNA, 15 bp, Homo sapiens
cgatggcgaggatgg

SEQ ID NO: 6314 - DNA, 15 bp, Homo sapiens
acgatggcgaggatg

SEQ ID NO: 6315 - DNA, 15 bp, Homo sapiens
gacgatggcgaggat

SEQ ID NO: 6316 - DNA, 15 bp, Homo sapiens
cgacgatggcgagga

SEQ ID NO: 6317 - DNA, 15 bp, Homo sapiens
acgacgatggcgagg

SEQ ID NO: 6318 - DNA, 15 bp, Homo sapiens
gacgacgatggcgag

SEQ ID NO: 6319 - DNA, 15 bp, Homo sapiens
ggacgacgatggcga

SEQ ID NO: 6320 - DNA, 15 bp, Homo sapiens
aggacgacgatggcg

SEQ ID NO: 6321 - DNA, 15 bp, Homo sapiens
gaggacgacgatggc

SEQ ID NO: 6322 - DNA, 15 bp, Homo sapiens
cgaggacgacgatgg

SEQ ID NO: 6323 - DNA, 15 bp, Homo sapiens
acgaggacgacgatg

SEQ ID NO: 6324 - DNA, 15 bp, Homo sapiens
gacgaggacgacgat

SEQ ID NO: 6325 - DNA, 15 bp, Homo sapiens
cgacgaggacgacga

SEQ ID NO: 6326 - DNA, 15 bp, Homo sapiens
ccgacgaggacgacg

SEQ ID NO: 6327 - DNA, 15 bp, Homo sapiens
gccgacgaggacgac

SEQ ID NO: 6328 - DNA, 15 bp, Homo sapiens
ggccgacgaggacga

SEQ ID NO: 6329 - DNA, 15 bp, Homo sapiens
gggccgacgaggacg

SEQ ID NO: 6330 - DNA, 15 bp, Homo sapiens
ggggccgacgaggac

SEQ ID NO: 6331 - DNA, 15 bp, Homo sapiens
cggggccgacgagga

SEQ ID NO: 6332 - DNA, 15 bp, Homo sapiens
gcggggccgacgagg

SEQ ID NO: 6333 - DNA, 15 bp, Homo sapiens
ggcggggccgacgag

SEQ ID NO: 6334 - DNA, 15 bp, Homo sapiens
cggcggggccgacga

SEQ ID NO: 6335 - DNA, 15 bp, Homo sapiens
gcggcggggccgacg

SEQ ID NO: 6336 - DNA, 15 bp, Homo sapiens
ggcggcggggccgac

SEQ ID NO: 6337 - DNA, 15 bp, Homo sapiens
cggcggcggggccga

SEQ ID NO: 6338 - DNA, 15 bp, Homo sapiens
gcggcggcggggccg

SEQ ID NO: 6339 - DNA, 15 bp, Homo sapiens
ggcggcggcggggcc

SEQ ID NO: 6340 - DNA, 15 bp, Homo sapiens
cggcggcggcggggc

SEQ ID NO: 6341 - DNA, 15 bp, Homo sapiens
gcggcggcggcgggg

SEQ ID NO: 6342 - DNA, 15 bp, Homo sapiens
ggcggcggcggcggg

SEQ ID NO: 6343 - DNA, 15 bp, Homo sapiens
gcggcggcggcggcg

SEQ ID NO: 6344 - DNA, 15 bp, Homo sapiens
tggcggcggcggcgg

SEQ ID NO: 6345 - DNA, 15 bp, Homo sapiens
atggcggcggcggcg

SEQ ID NO: 6346 - DNA, 15 bp, Homo sapiens
gatggcggcggcggc

SEQ ID NO: 6347 - DNA, 15 bp, Homo sapiens
agatggcggcggcgg

SEQ ID NO: 6348 - DNA, 15 bp, Homo sapiens
aagatggcggcggcg

SEQ ID NO: 6349 - DNA, 15 bp, Homo sapiens
caagatggcggcggc

SEQ ID NO: 6350 - DNA, 15 bp, Homo sapiens
gcaagatggcggcgg

SEQ ID NO: 6351 - DNA, 15 bp, Homo sapiens
ggcaagatggcggcg

SEQ ID NO: 6352 - DNA, 15 bp, Homo sapiens
gggcaagatggcggc

SEQ ID NO: 6353 - DNA, 15 bp, Homo sapiens
cgggcaagatggcgg

SEQ ID NO: 6354 - DNA, 15 bp, Homo sapiens
ccgggcaagatggcg

SEQ ID NO: 6355 - DNA, 15 bp, Homo sapiens
gccgggcaagatggc

SEQ ID NO: 6356 - DNA, 15 bp, Homo sapiens
ggccgggcaagatgg

SEQ ID NO: 6357 - DNA, 15 bp, Homo sapiens
cggccgggcaagatg

SEQ ID NO: 6358 - DNA, 15 bp, Homo sapiens
gcggccgggcaagat

SEQ ID NO: 6359 - DNA, 15 bp, Homo sapiens
ggcggccgggcaaga

SEQ ID NO: 6360 - DNA, 15 bp, Homo sapiens
cggcggccgggcaag

SEQ ID NO: 6361 - DNA, 15 bp, Homo sapiens
gcggcggccgggcaa

SEQ ID NO: 6362 - DNA, 15 bp, Homo sapiens
ggcggcggccgggca

SEQ ID NO: 6363 - DNA, 15 bp, Homo sapiens
cggcggcggccgggc

SEQ ID NO: 6364 - DNA, 15 bp, Homo sapiens
gcggcggcggccggg

SEQ ID NO: 6365 - DNA, 15 bp, Homo sapiens
ggcggcggcggccgg

SEQ ID NO: 6366 - DNA, 15 bp, Homo sapiens
tggcggcggcggccg

SEQ ID NO: 6367 - DNA, 15 bp, Homo sapiens
atggcggcggcggcc

SEQ ID NO: 6368 - DNA, 15 bp, Homo sapiens
gcgggcaagatggcg

SEQ ID NO: 6369 - DNA, 15 bp, Homo sapiens
ggcgggcaagatggc

SEQ ID NO: 6370 - DNA, 15 bp, Homo sapiens
gggcgggcaagatgg

SEQ ID NO: 6371 - DNA, 15 bp, Homo sapiens
ggggcgggcaagatg

SEQ ID NO: 6372 - DNA, 15 bp, Homo sapiens
cggggcgggcaagat

SEQ ID NO: 6373 - DNA, 15 bp, Homo sapiens
ccggggcgggcaaga

SEQ ID NO: 6374 - DNA, 15 bp, Homo sapiens
cccggggcgggcaag

SEQ ID NO: 6375 - DNA, 15 bp, Homo sapiens
gcccggggcgggcaa

SEQ ID NO: 6376 - DNA, 15 bp, Homo sapiens
ggcccggggcgggca

SEQ ID NO: 6377 - DNA, 15 bp, Homo sapiens
gggcccggggcgggc

SEQ ID NO: 6378 - DNA, 15 bp, Homo sapiens
cgggcccggggcggg

SEQ ID NO: 6379 - DNA, 15 bp, Homo sapiens
gcgggcccggggcgg

SEQ ID NO: 6380 - DNA, 15 bp, Homo sapiens
ggcgggcccggggcg

SEQ ID NO: 6381 - DNA, 15 bp, Homo sapiens
gggcgggcccggggc

SEQ ID NO: 6382 - DNA, 15 bp, Homo sapiens
ggggcgggcccgggg

SEQ ID NO: 6383 - DNA, 15 bp, Homo sapiens
tggggcgggcccggg

SEQ ID NO: 6384 - DNA, 15 bp, Homo sapiens
gtggggcgggcccgg

SEQ ID NO: 6385 - DNA, 15 bp, Homo sapiens
cgtggggcgggcccg

SEQ ID NO: 6386 - DNA, 15 bp, Homo sapiens
ccgtggggcgggccc

SEQ ID NO: 6387 - DNA, 15 bp, Homo sapiens
gccgtggggcgggcc

SEQ ID NO: 6388 - DNA, 15 bp, Homo sapiens
ggccgtggggcgggc

SEQ ID NO: 6389 - DNA, 15 bp, Homo sapiens
cggccgtggggcggg

SEQ ID NO: 6390 - DNA, 15 bp, Homo sapiens
ccggccgtggggcgg

SEQ ID NO: 6391 - DNA, 15 bp, Homo sapiens
accggccgtggggcg

SEQ ID NO: 6392 - DNA, 15 bp, Homo sapiens
taccggccgtggggc

SEQ ID NO: 6393 - DNA, 15 bp, Homo sapiens
ctaccggccgtgggg

SEQ ID NO: 6394 - DNA, 15 bp, Homo sapiens
gctaccggccgtggg

SEQ ID NO: 6395 - DNA, 15 bp, Homo sapiens
cgctaccggccgtgg

SEQ ID NO: 6396 - DNA, 15 bp, Homo sapiens
ccgctaccggccgtg

SEQ ID NO: 6397 - DNA, 15 bp, Homo sapiens
gccgctaccggccgt

SEQ ID NO: 6398 - DNA, 15 bp, Homo sapiens
cgccgctaccggccg

SEQ ID NO: 6399 - DNA, 15 bp, Homo sapiens
gcgccgctaccggcc

SEQ ID NO: 6400 - DNA, 15 bp, Homo sapiens
tgcgccgctaccggc

SEQ ID NO: 6401 - DNA, 15 bp, Homo sapiens
ttgcgccgctaccgg

SEQ ID NO: 6402 - DNA, 15 bp, Homo sapiens
gttgcgccgctaccg

SEQ ID NO: 6403 - DNA, 15 bp, Homo sapiens
agttgcgccgctacc

SEQ ID NO: 6404 - DNA, 15 bp, Homo sapiens
cagttgcgccgctac

SEQ ID NO: 6405 - DNA, 15 bp, Homo sapiens
gcagttgcgccgcta

SEQ ID NO: 6406 - DNA, 15 bp, Homo sapiens
cgcagttgcgccgct

SEQ ID NO: 6407 - DNA, 15 bp, Homo sapiens
gcgcagttgcgccgc

SEQ ID NO: 6408 - DNA, 15 bp, Homo sapiens
ggcgcagttgcgccg

SEQ ID NO: 6409 - DNA, 15 bp, Homo sapiens
tggcgcagttgcgcc

SEQ ID NO: 6410 - DNA, 15 bp, Homo sapiens
ctggcgcagttgcgc

SEQ ID NO: 6411 - DNA, 15 bp, Homo sapiens
gctggcgcagttgcg

SEQ ID NO: 6412 - DNA, 15 bp, Homo sapiens
cgctggcgcagttgc

SEQ ID NO: 6413 - DNA, 15 bp, Homo sapiens
ccgctggcgcagttg

SEQ ID NO: 6414 - DNA, 15 bp, Homo sapiens
gccgctggcgcagtt

SEQ ID NO: 6415 - DNA, 15 bp, Homo sapiens
tgccgctggcgcagt

SEQ ID NO: 6416 - DNA, 15 bp, Homo sapiens
ctgccgctggcgcag

SEQ ID NO: 6417 - DNA, 15 bp, Homo sapiens
gctgccgctggcgca

SEQ ID NO: 6418 - DNA, 15 bp, Homo sapiens
ggctgccgctggcgc

SEQ ID NO: 6419 - DNA, 15 bp, Homo sapiens
gggctgccgctggcg

SEQ ID NO: 6420 - DNA, 15 bp, Homo sapiens
ggggctgccgctggc

SEQ ID NO: 6421 - DNA, 15 bp, Homo sapiens
tggggctgccgctgg

SEQ ID NO: 6422 - DNA, 15 bp, Homo sapiens
ttggggctgccgctg

SEQ ID NO: 6423 - DNA, 15 bp, Homo sapiens
cttggggctgccgct

SEQ ID NO: 6424 - DNA, 15 bp, Homo sapiens
ccttggggctgccgc

SEQ ID NO: 6425 - DNA, 15 bp, Homo sapiens
gccttggggctgccg

SEQ ID NO: 6426 - DNA, 15 bp, Homo sapiens
ggccttggggctgcc

SEQ ID NO: 6427 - DNA, 15 bp, Homo sapiens
aggccttggggctgc

SEQ ID NO: 6428 - DNA, 15 bp, Homo sapiens
gaggccttggggctg

SEQ ID NO: 6429 - DNA, 15 bp, Homo sapiens
cgaggccttggggct

SEQ ID NO: 6430 - DNA, 15 bp, Homo sapiens
acgaggccttggggc

SEQ ID NO: 6431 - DNA, 15 bp, Homo sapiens
gacgaggccttgggg

SEQ ID NO: 6432 - DNA, 15 bp, Homo sapiens
cgacgaggccttggg

SEQ ID NO: 6433 - DNA, 15 bp, Homo sapiens
ccgacgaggccttgg

SEQ ID NO: 6434 - DNA, 15 bp, Homo sapiens
gccgacgaggccttg

SEQ ID NO: 6435 - DNA, 15 bp, Homo sapiens
cgccgacgaggcctt

SEQ ID NO: 6436 - DNA, 15 bp, Homo sapiens
tcgccgacgaggcct

SEQ ID NO: 6437 - DNA, 15 bp, Homo sapiens
ttcgccgacgaggcc

SEQ ID NO: 6438 - DNA, 15 bp, Homo sapiens
gttcgccgacgaggc

SEQ ID NO: 6439 - DNA, 15 bp, Homo sapiens
tgttcgccgacgagg

SEQ ID NO: 6440 - DNA, 15 bp, Homo sapiens
ctgttcgccgacgag

SEQ ID NO: 6441 - DNA, 15 bp, Homo sapiens
gctgttcgccgacga

SEQ ID NO: 6442 - DNA, 15 bp, Homo sapiens
tgctgttcgccgacg

SEQ ID NO: 6443 - DNA, 15 bp, Homo sapiens
gtgctgttcgccgac

SEQ ID NO: 6444 - DNA, 15 bp, Homo sapiens
ggtgctgttcgccga

SEQ ID NO: 6445 - DNA, 15 bp, Homo sapiens
gggtgctgttcgccg

SEQ ID NO: 6446 - DNA, 15 bp, Homo sapiens
agggtgctgttcgcc

SEQ ID NO: 6447 - DNA, 15 bp, Homo sapiens
gagggtgctgttcgc

SEQ ID NO: 6448 - DNA, 15 bp, Homo sapiens
ggagggtgctgttcg

SEQ ID NO: 6449 - DNA, 15 bp, Homo sapiens
cggagggtgctgttc

SEQ ID NO: 6450 - DNA, 15 bp, Homo sapiens
gcggagggtgctgtt

SEQ ID NO: 6451 - DNA, 15 bp, Homo sapiens
cgcggagggtgctgt

SEQ ID NO: 6452 - DNA, 15 bp, Homo sapiens
ccgcggagggtgctg

SEQ ID NO: 6453 - DNA, 15 bp, Homo sapiens
cccgcggagggtgct

SEQ ID NO: 6454 - DNA, 15 bp, Homo sapiens
ccccgcggagggtgc

SEQ ID NO: 6455 - DNA, 15 bp, Homo sapiens
gccccgcggagggtg

SEQ ID NO: 6456 - DNA, 15 bp, Homo sapiens
ggccccgcggagggt

SEQ ID NO: 6457 - DNA, 15 bp, Homo sapiens
tggccccgcggaggg

SEQ ID NO: 6458 - DNA, 15 bp, Homo sapiens
gtggccccgcggagg

SEQ ID NO: 6459 - DNA, 15 bp, Homo sapiens
ggtggccccgcggag

SEQ ID NO: 6460 - DNA, 15 bp, Homo sapiens
cggtggccccgcgga

SEQ ID NO: 6461 - DNA, 15 bp, Homo sapiens
gcggtggccccgcgg

SEQ ID NO: 6462 - DNA, 15 bp, Homo sapiens
ggcggtggccccgcg

SEQ ID NO: 6463 - DNA, 15 bp, Homo sapiens
cggcggtggccccgc

SEQ ID NO: 6464 - DNA, 15 bp, Homo sapiens
gcggcggtggccccg

SEQ ID NO: 6465 - DNA, 15 bp, Homo sapiens
ggcggcggtggcccc

SEQ ID NO: 6466 - DNA, 15 bp, Homo sapiens
aggcggcggtggccc

SEQ ID NO: 6467 - DNA, 15 bp, Homo sapiens
gaggcggcggtggcc

SEQ ID NO: 6468 - DNA, 15 bp, Homo sapiens
cgaggcggcggtggc

SEQ ID NO: 6469 - DNA, 15 bp, Homo sapiens
tcgaggcggcggtgg

SEQ ID NO: 6470 - DNA, 15 bp, Homo sapiens
gtcgaggcggcggtg

SEQ ID NO: 6471 - DNA, 15 bp, Homo sapiens
ggtcgaggcggcggt

SEQ ID NO: 6472 - DNA, 15 bp, Homo sapiens
cggtcgaggcggcgg

SEQ ID NO: 6473 - DNA, 15 bp, Homo sapiens
tcggtcgaggcggcg

SEQ ID NO: 6474 - DNA, 15 bp, Homo sapiens
ctcggtcgaggcggc

SEQ ID NO: 6475 - DNA, 15 bp, Homo sapiens
cctcggtcgaggcgg

SEQ ID NO: 6476 - DNA, 15 bp, Homo sapiens
acctcggtcgaggcg

SEQ ID NO: 6477 - DNA, 15 bp, Homo sapiens
cacctcggtcgaggc

SEQ ID NO: 6478 - DNA, 15 bp, Homo sapiens
gcacctcggtcgagg

SEQ ID NO: 6479 - DNA, 15 bp, Homo sapiens
cgcacctcggtcgag

SEQ ID NO: 6480 - DNA, 15 bp, Homo sapiens
ccgcacctcggtcga

SEQ ID NO: 6481 - DNA, 15 bp, Homo sapiens
cccgcacctcggtcg

SEQ ID NO: 6482 - DNA, 15 bp, Homo sapiens
ccccgcacctcggtc

SEQ ID NO: 6483 - DNA, 15 bp, Homo sapiens
gccccgcacctcggt

SEQ ID NO: 6484 - DNA, 15 bp, Homo sapiens
agccccgcacctcgg

SEQ ID NO: 6485 - DNA, 15 bp, Homo sapiens
gagccccgcacctcg

SEQ ID NO: 6486 - DNA, 15 bp, Homo sapiens
tgagccccgcacctc

SEQ ID NO: 6487 - DNA, 15 bp, Homo sapiens
gtgagccccgcacct

SEQ ID NO: 6488 - DNA, 15 bp, Homo sapiens
ggtgagccccgcacc

SEQ ID NO: 6489 - DNA, 15 bp, Homo sapiens
gggtgagccccgcac

SEQ ID NO: 6490 - DNA, 15 bp, Homo sapiens
cgggtgagccccgca

SEQ ID NO: 6491 - DNA, 15 bp, Homo sapiens
gcgggtgagccccgc

SEQ ID NO: 6492 - DNA, 15 bp, Homo sapiens
cgcgggtgagccccg

SEQ ID NO: 6493 - DNA, 15 bp, Homo sapiens
ccgcgggtgagcccc

SEQ ID NO: 6494 - DNA, 15 bp, Homo sapiens
gccgcgggtgagccc

SEQ ID NO: 6495 - DNA, 15 bp, Homo sapiens
ggccgcgggtgagcc

SEQ ID NO: 6496 - DNA, 15 bp, Homo sapiens
cggccgcgggtgagc

SEQ ID NO: 6497 - DNA, 15 bp, Homo sapiens
ccggccgcgggtgag

SEQ ID NO: 6498 - DNA, 15 bp, Homo sapiens
gccggccgcgggtga

SEQ ID NO: 6499 - DNA, 15 bp, Homo sapiens
cgccggccgcgggtg

SEQ ID NO: 6500 - DNA, 15 bp, Homo sapiens
tcgccggccgcgggt

SEQ ID NO: 6501 - DNA, 15 bp, Homo sapiens
ctcgccggccgcggg

SEQ ID NO: 6502 - DNA, 15 bp, Homo sapiens
cctcgccggccgcgg

SEQ ID NO: 6503 - DNA, 15 bp, Homo sapiens
ccctcgccggccgcg

SEQ ID NO: 6504 - DNA, 15 bp, Homo sapiens
cccctcgccggccgc

SEQ ID NO: 6505 - DNA, 15 bp, Homo sapiens
ccccctcgccggccg

SEQ ID NO: 6506 - DNA, 15 bp, Homo sapiens
cccccctcgccggcc

SEQ ID NO: 6507 - DNA, 15 bp, Homo sapiens
gcccccctcgccggc

SEQ ID NO: 6508 - DNA, 15 bp, Homo sapiens
cgcccccctcgccgg

SEQ ID NO: 6509 - DNA, 15 bp, Homo sapiens
gcgcccccctcgccg

SEQ ID NO: 6510 - DNA, 15 bp, Homo sapiens
cgcgcccccctcgcc

SEQ ID NO: 6511 - DNA, 15 bp, Homo sapiens
ccgcgcccccctcgc

SEQ ID NO: 6512 - DNA, 15 bp, Homo sapiens
tccgcgcccccctcg

SEQ ID NO: 6513 - DNA, 15 bp, Homo sapiens
ttccgcgcccccctc

SEQ ID NO: 6514 - DNA, 15 bp, Homo sapiens
attccgcgcccccct

SEQ ID NO: 6515 - DNA, 15 bp, Homo sapiens
cattccgcgcccccc

SEQ ID NO: 6516 - DNA, 15 bp, Homo sapiens
gcattccgcgccccc

SEQ ID NO: 6517 - DNA, 15 bp, Homo sapiens
ggcattccgcgcccc

SEQ ID NO: 6518 - DNA, 15 bp, Homo sapiens
cggcattccgcgccc

SEQ ID NO: 6519 - DNA, 15 bp, Homo sapiens
gcggcattccgcgcc

SEQ ID NO: 6520 - DNA, 15 bp, Homo sapiens
tgcggcattccgcgc

SEQ ID NO: 6521 - DNA, 15 bp, Homo sapiens
ctgcggcattccgcg

SEQ ID NO: 6522 - DNA, 15 bp, Homo sapiens
gctgcggcattccgc

SEQ ID NO: 6523 - DNA, 15 bp, Homo sapiens
cgctgcggcattccg

SEQ ID NO: 6524 - DNA, 15 bp, Homo sapiens
ccgctgcggcattcc

SEQ ID NO: 6525 - DNA, 15 bp, Homo sapiens
cccgctgcggcattc

SEQ ID NO: 6526 - DNA, 15 bp, Homo sapiens
ccccgctgcggcatt

SEQ ID NO: 6527 - DNA, 15 bp, Homo sapiens
cccccgctgcggcat

SEQ ID NO: 6528 - DNA, 15 bp, Homo sapiens
gcccccgctgcggca

SEQ ID NO: 6529 - DNA, 15 bp, Homo sapiens
agcccccgctgcggc

SEQ ID NO: 6530 - DNA, 15 bp, Homo sapiens
gagcccccgctgcgg

SEQ ID NO: 6531 - DNA, 15 bp, Homo sapiens
ggagcccccgctgcg

SEQ ID NO: 6532 - DNA, 15 bp, Homo sapiens
tggagcccccgctgc

SEQ ID NO: 6533 - DNA, 15 bp, Homo sapiens
gtggagcccccgctg

SEQ ID NO: 6534 - DNA, 15 bp, Homo sapiens
tgtggagcccccgct

SEQ ID NO: 6535 - DNA, 15 bp, Homo sapiens
ctgtggagcccccgc

SEQ ID NO: 6536 - DNA, 15 bp, Homo sapiens
cctgtggagcccccg

SEQ ID NO: 6537 - DNA, 15 bp, Homo sapiens
ccctgtggagccccc

SEQ ID NO: 6538 - DNA, 15 bp, Homo sapiens
cccctgtggagcccc

SEQ ID NO: 6539 - DNA, 15 bp, Homo sapiens
gcccctgtggagccc

SEQ ID NO: 6540 - DNA, 15 bp, Homo sapiens
ggcccctgtggagcc

SEQ ID NO: 6541 - DNA, 15 bp, Homo sapiens
cggcccctgtggagc

SEQ ID NO: 6542 - DNA, 15 bp, Homo sapiens
acggcccctgtggag

SEQ ID NO: 6543 - DNA, 15 bp, Homo sapiens
tacggcccctgtgga

SEQ ID NO: 6544 - DNA, 15 bp, Homo sapiens
gtacggcccctgtgg

SEQ ID NO: 6545 - DNA, 15 bp, Homo sapiens
cgtacggcccctgtg

SEQ ID NO: 6546 - DNA, 15 bp, Homo sapiens
gcgtacggcccctgt

SEQ ID NO: 6547 - DNA, 15 bp, Homo sapiens
cgcgtacggcccctg

SEQ ID NO: 6548 - DNA, 15 bp, Homo sapiens
gcgcgtacggcccct

SEQ ID NO: 6549 - DNA, 15 bp, Homo sapiens
ggcgcgtacggcccc

SEQ ID NO: 6550 - DNA, 15 bp, Homo sapiens
tggcgcgtacggccc

SEQ ID NO: 6551 - DNA, 15 bp, Homo sapiens
atggcgcgtacggcc

SEQ ID NO: 6552 - DNA, 15 bp, Homo sapiens
tatggcgcgtacggc

SEQ ID NO: 6553 - DNA, 15 bp, Homo sapiens
atatggcgcgtacgg

SEQ ID NO: 6554 - DNA, 15 bp, Homo sapiens
gatatggcgcgtacg

SEQ ID NO: 6555 - DNA, 15 bp, Homo sapiens
cgatatggcgcgtac

SEQ ID NO: 6556 - DNA, 15 bp, Homo sapiens
ccgatatggcgcgta

SEQ ID NO: 6557 - DNA, 15 bp, Homo sapiens
gccgatatggcgcgt

SEQ ID NO: 6558 - DNA, 15 bp, Homo sapiens
cgccgatatggcgcg

SEQ ID NO: 6559 - DNA, 15 bp, Homo sapiens
ccgccgatatggcgc

SEQ ID NO: 6560 - DNA, 15 bp, Homo sapiens
gccgccgatatggcg

SEQ ID NO: 6561 - DNA, 15 bp, Homo sapiens
cgccgccgatatggc

SEQ ID NO: 6562 - DNA, 15 bp, Homo sapiens
ccgccgccgatatgg

SEQ ID NO: 6563 - DNA, 15 bp, Homo sapiens
gccgccgccgatatg

SEQ ID NO: 6564 - DNA, 15 bp, Homo sapiens
cgccgccgccgatat

SEQ ID NO: 6565 - DNA, 15 bp, Homo sapiens
ccgccgccgccgata

SEQ ID NO: 6566 - DNA, 15 bp, Homo sapiens
gccgccgccgccgat

SEQ ID NO: 6567 - DNA, 15 bp, Homo sapiens
cgccgccgccgccga

SEQ ID NO: 6568 - DNA, 15 bp, Homo sapiens
tgccgccgccgccgc

SEQ ID NO: 6569 - DNA, 15 bp, Homo sapiens
gtgccgccgccgccg

SEQ ID NO: 6570 - DNA, 15 bp, Homo sapiens
ggtgccgccgccgcc

SEQ ID NO: 6571 - DNA, 15 bp, Homo sapiens
cggtgccgccgccgc

SEQ ID NO: 6572 - DNA, 15 bp, Homo sapiens
tcggtgccgccgccg

SEQ ID NO: 6573 - DNA, 15 bp, Homo sapiens
gtcggtgccgccgcc

SEQ ID NO: 6574 - DNA, 15 bp, Homo sapiens
cgtcggtgccgccgc

SEQ ID NO: 6575 - DNA, 15 bp, Homo sapiens
ccgtcggtgccgccg

SEQ ID NO: 6576 - DNA, 15 bp, Homo sapiens
gccgtcggtgccgcc

SEQ ID NO: 6577 - DNA, 15 bp, Homo sapiens
tgccgtcggtgccgc

SEQ ID NO: 6578 - DNA, 15 bp, Homo sapiens
gtgccgtcggtgccg

SEQ ID NO: 6579 - DNA, 15 bp, Homo sapiens
ggtgccgtcggtgcc

SEQ ID NO: 6580 - DNA, 15 bp, Homo sapiens
cggtgccgtcggtgc

SEQ ID NO: 6581 - DNA, 15 bp, Homo sapiens
ccggtgccgtcggtg

SEQ ID NO: 6582 - DNA, 15 bp, Homo sapiens
gccggtgccgtcggt

SEQ ID NO: 6583 - DNA, 15 bp, Homo sapiens
cgccggtgccgtcgg

SEQ ID NO: 6584 - DNA, 15 bp, Homo sapiens
ccgccggtgccgtcg

SEQ ID NO: 6585 - DNA, 15 bp, Homo sapiens
gccgccggtgccgtc

SEQ ID NO: 6586 - DNA, 15 bp, Homo sapiens
cgccgccggtgccgt

SEQ ID NO: 6587 - DNA, 15 bp, Homo sapiens
ccgccgccggtgccg

SEQ ID NO: 6588 - DNA, 15 bp, Homo sapiens
cccgccgccggtgcc

SEQ ID NO: 6589 - DNA, 15 bp, Homo sapiens
tcccgccgccggtgc

SEQ ID NO: 6590 - DNA, 15 bp, Homo sapiens
gtcccgccgccggtg

SEQ ID NO: 6591 - DNA, 15 bp, Homo sapiens
ggtcccgccgccggt

SEQ ID NO: 6592 - DNA, 15 bp, Homo sapiens
cggtcccgccgccgg

SEQ ID NO: 6593 - DNA, 15 bp, Homo sapiens
ccggtcccgccgccg

SEQ ID NO: 6594 - DNA, 15 bp, Homo sapiens
gccggtcccgccgcc

SEQ ID NO: 6595 - DNA, 15 bp, Homo sapiens
cgccggtcccgccgc

SEQ ID NO: 6596 - DNA, 15 bp, Homo sapiens
ccgccggtcccgccg

SEQ ID NO: 6597 - DNA, 15 bp, Homo sapiens
cccgccggtcccgcc

SEQ ID NO: 6598 - DNA, 15 bp, Homo sapiens
ccccgccggtcccgc

SEQ ID NO: 6599 - DNA, 15 bp, Homo sapiens
cccccgccggtcccg

SEQ ID NO: 6600 - DNA, 15 bp, Homo sapiens
gcccccgccggtccc

SEQ ID NO: 6601 - DNA, 15 bp, Homo sapiens
tgcccccgccggtcc

SEQ ID NO: 6602 - DNA, 15 bp, Homo sapiens
ctgcccccgccggtc

SEQ ID NO: 6603 - DNA, 15 bp, Homo sapiens
cctgcccccgccggt

SEQ ID NO: 6604 - DNA, 15 bp, Homo sapiens
ccctgcccccgccgg

SEQ ID NO: 6605 - DNA, 15 bp, Homo sapiens
gccctgcccccgccg

SEQ ID NO: 6606 - DNA, 15 bp, Homo sapiens
ggccctgcccccgcc

SEQ ID NO: 6607 - DNA, 15 bp, Homo sapiens
aggccctgcccccgc

SEQ ID NO: 6608 - DNA, 15 bp, Homo sapiens
caggccctgcccccg

SEQ ID NO: 6609 - DNA, 15 bp, Homo sapiens
tcaggccctgccccc

SEQ ID NO: 6610 - DNA, 15 bp, Homo sapiens
ttcaggccctgcccc

SEQ ID NO: 6611 - DNA, 15 bp, Homo sapiens
cttcaggccctgccc

SEQ ID NO: 6612 - DNA, 15 bp, Homo sapiens
ccttcaggccctgcc

SEQ ID NO: 6613 - DNA, 15 bp, Homo sapiens
cccttcaggccctgc

SEQ ID NO: 6614 - DNA, 15 bp, Homo sapiens
ccccttcaggccctg

SEQ ID NO: 6615 - DNA, 15 bp, Homo sapiens
gccccttcaggccct

SEQ ID NO: 6616 - DNA, 15 bp, Homo sapiens
cgccccttcaggccc

SEQ ID NO: 6617 - DNA, 15 bp, Homo sapiens
ccgccccttcaggcc

SEQ ID NO: 6618 - DNA, 15 bp, Homo sapiens
cccgccccttcaggc

SEQ ID NO: 6619 - DNA, 15 bp, Homo sapiens
gcccgccccttcagg

SEQ ID NO: 6620 - DNA, 15 bp, Homo sapiens
tgcccgccccttcag

SEQ ID NO: 6621 - DNA, 15 bp, Homo sapiens
ctgcccgccccttca

SEQ ID NO: 6622 - DNA, 15 bp, Homo sapiens
gctgcccgccccttc

SEQ ID NO: 6623 - DNA, 15 bp, Homo sapiens
ggctgcccgcccctt

SEQ ID NO: 6624 - DNA, 15 bp, Homo sapiens
tggctgcccgcccct

SEQ ID NO: 6625 - DNA, 15 bp, Homo sapiens
ttggctgcccgcccc

SEQ ID NO: 6626 - DNA, 15 bp, Homo sapiens
attggctgcccgccc

SEQ ID NO: 6627 - DNA, 15 bp, Homo sapiens
cattggctgcccgcc

SEQ ID NO: 6628 - DNA, 15 bp, Homo sapiens
ccattggctgcccgc

SEQ ID NO: 6629 - DNA, 15 bp, Homo sapiens
cccattggctgcccg

SEQ ID NO: 6630 - DNA, 15 bp, Homo sapiens
tcccattggctgccc

SEQ ID NO: 6631 - DNA, 15 bp, Homo sapiens
ttcccattggctgcc

SEQ ID NO: 6632 - DNA, 15 bp, Homo sapiens
cttcccattggctgc

SEQ ID NO: 6633 - DNA, 15 bp, Homo sapiens
ccttcccattggctg

SEQ ID NO: 6634 - DNA, 15 bp, Homo sapiens
gccttcccattggct

SEQ ID NO: 6635 - DNA, 15 bp, Homo sapiens
ggccttcccattggc

SEQ ID NO: 6636 - DNA, 15 bp, Homo sapiens
tggccttcccattgg

SEQ ID NO: 6637 - DNA, 15 bp, Homo sapiens
ctggccttcccattg

SEQ ID NO: 6638 - DNA, 15 bp, Homo sapiens
gctggccttcccatt

SEQ ID NO: 6639 - DNA, 15 bp, Homo sapiens
cgctggccttcccat

SEQ ID NO: 6640 - DNA, 15 bp, Homo sapiens
gcgctggccttccca

SEQ ID NO: 6641 - DNA, 15 bp, Homo sapiens
cgcgctggccttccc

SEQ ID NO: 6642 - DNA, 15 bp, Homo sapiens
ccgcgctggccttcc

SEQ ID NO: 6643 - DNA, 15 bp, Homo sapiens
tccgcgctggccttc

SEQ ID NO: 6644 - DNA, 15 bp, Homo sapiens
ctccgcgctggcctt

SEQ ID NO: 6645 - DNA, 15 bp, Homo sapiens
cctccgcgctggcct

SEQ ID NO: 6646 - DNA, 15 bp, Homo sapiens
ccctccgcgctggcc

SEQ ID NO: 6647 - DNA, 15 bp, Homo sapiens
cccctccgcgctggc

SEQ ID NO: 6648 - DNA, 15 bp, Homo sapiens
acccctccgcgctgg

SEQ ID NO: 6649 - DNA, 15 bp, Homo sapiens
tacccctccgcgctg

SEQ ID NO: 6650 - DNA, 15 bp, Homo sapiens
gtacccctccgcgct

SEQ ID NO: 6651 - DNA, 15 bp, Homo sapiens
cgtacccctccgcgc

SEQ ID NO: 6652 - DNA, 15 bp, Homo sapiens
ccgtacccctccgcg

SEQ ID NO: 6653 - DNA, 15 bp, Homo sapiens
gccgtacccctccgc

SEQ ID NO: 6654 - DNA, 15 bp, Homo sapiens
agccgtacccctccg

SEQ ID NO: 6655 - DNA, 15 bp, Homo sapiens
gagccgtacccctcc

SEQ ID NO: 6656 - DNA, 15 bp, Homo sapiens
tgagccgtacccctc

SEQ ID NO: 6657 - DNA, 15 bp, Homo sapiens
gtgagccgtacccct

SEQ ID NO: 6658 - DNA, 15 bp, Homo sapiens
cgtgagccgtacccc

SEQ ID NO: 6659 - DNA, 15 bp, Homo sapiens
ccgtgagccgtaccc

SEQ ID NO: 6660 - DNA, 15 bp, Homo sapiens
cccgtgagccgtacc

SEQ ID NO: 6661 - DNA, 15 bp, Homo sapiens
ccccgtgagccgtac

SEQ ID NO: 6662 - DNA, 15 bp, Homo sapiens
cccccgtgagccgta

SEQ ID NO: 6663 - DNA, 15 bp, Homo sapiens
gcccccgtgagccgt

SEQ ID NO: 6664 - DNA, 15 bp, Homo sapiens
tgcccccgtgagccg

SEQ ID NO: 6665 - DNA, 15 bp, Homo sapiens
atgcccccgtgagcc

SEQ ID NO: 6666 - DNA, 15 bp, Homo sapiens
tatgcccccgtgagc

SEQ ID NO: 6667 - DNA, 15 bp, Homo sapiens
ctatgcccccgtgag

SEQ ID NO: 6668 - DNA, 15 bp, Homo sapiens
cctatgcccccgtga

SEQ ID NO: 6669 - DNA, 15 bp, Homo sapiens
gcctatgcccccgtg

SEQ ID NO: 6670 - DNA, 15 bp, Homo sapiens
cgcctatgcccccgt

SEQ ID NO: 6671 - DNA, 15 bp, Homo sapiens
ccgcctatgcccccg

SEQ ID NO: 6672 - DNA, 15 bp, Homo sapiens
accgcctatgccccc

SEQ ID NO: 6673 - DNA, 15 bp, Homo sapiens
caccgcctatgcccc

SEQ ID NO: 6674 - DNA, 15 bp, Homo sapiens
tcaccgcctatgccc

SEQ ID NO: 6675 - DNA, 15 bp, Homo sapiens
ctcaccgcctatgcc

SEQ ID NO: 6676 - DNA, 15 bp, Homo sapiens
tctcaccgcctatgc

SEQ ID NO: 6677 - DNA, 15 bp, Homo sapiens
atctcaccgcctatg

SEQ ID NO: 6678 - DNA, 15 bp, Homo sapiens
catctcaccgcctat

SEQ ID NO: 6679 - DNA, 15 bp, Homo sapiens
tcatctcaccgccta

SEQ ID NO: 6680 - DNA, 15 bp, Homo sapiens
ttcatctcaccgcct

SEQ ID NO: 6681 - DNA, 15 bp, Homo sapiens
cttcatctcaccgcc

SEQ ID NO: 6682 - DNA, 15 bp, Homo sapiens
tcttcatctcaccgc

SEQ ID NO: 6683 - DNA, 15 bp, Homo sapiens
gtcttcatctcaccg

SEQ ID NO: 6684 - DNA, 15 bp, Homo sapiens
tgtcttcatctcacc

SEQ ID NO: 6685 - DNA, 15 bp, Homo sapiens
ttgtcttcatctcac

SEQ ID NO: 6686 - DNA, 15 bp, Homo sapiens
cttgtcttcatctca

SEQ ID NO: 6687 - DNA, 15 bp, Homo sapiens
acttgtcttcatctc

SEQ ID NO: 6688 - DNA, 15 bp, Homo sapiens
tacttgtcttcatct

SEQ ID NO: 6689 - DNA, 15 bp, Homo sapiens
atacttgtcttcatc

SEQ ID NO: 6690 - DNA, 15 bp, Homo sapiens
aatacttgtcttcat

SEQ ID NO: 6691 - DNA, 15 bp, Homo sapiens
caatacttgtcttca

SEQ ID NO: 6692 - DNA, 15 bp, Homo sapiens
gcaatacttgtcttc

SEQ ID NO: 6693 - DNA, 15 bp, Homo sapiens
tgcaatacttgtctt

SEQ ID NO: 6694 - DNA, 15 bp, Homo sapiens
ctgcaatacttgtct

SEQ ID NO: 6695 - DNA, 15 bp, Homo sapiens
tctgcaatacttgtc

SEQ ID NO: 6696 - DNA, 15 bp, Homo sapiens
ctctgcaatacttgt

SEQ ID NO: 6697 - DNA, 15 bp, Homo sapiens
cctctgcaatacttg

SEQ ID NO: 6698 - DNA, 15 bp, Homo sapiens
ccctctgcaatactt

SEQ ID NO: 6699 - DNA, 15 bp, Homo sapiens
gccctctgcaatact

SEQ ID NO: 6700 - DNA, 15 bp, Homo sapiens
ggccctctgcaatac

SEQ ID NO: 6701 - DNA, 15 bp, Homo sapiens
tggccctctgcaata

SEQ ID NO: 6702 - DNA, 15 bp, Homo sapiens
ttggccctctgcaat

SEQ ID NO: 6703 - DNA, 15 bp, Homo sapiens
attggccctctgcaa

SEQ ID NO: 6704 - DNA, 15 bp, Homo sapiens
cattggccctctgca

SEQ ID NO: 6705 - DNA, 15 bp, Homo sapiens
ccattggccctctgc

SEQ ID NO: 6706 - DNA, 15 bp, Homo sapiens
cccattggccctctg

SEQ ID NO: 6707 - DNA, 15 bp, Homo sapiens
gcccattggccctct

SEQ ID NO: 6708 - DNA, 15 bp, Homo sapiens
tgcccattggccctc

SEQ ID NO: 6709 - DNA, 15 bp, Homo sapiens
ctgcccattggccct

SEQ ID NO: 6710 - DNA, 15 bp, Homo sapiens
gctgcccattggccc

SEQ ID NO: 6711 - DNA, 15 bp, Homo sapiens
ggctgcccattggcc

SEQ ID NO: 6712 - DNA, 15 bp, Homo sapiens
tggctgcccattggc

SEQ ID NO: 6713 - DNA, 15 bp, Homo sapiens
atggctgcccattgg

SEQ ID NO: 6714 - DNA, 15 bp, Homo sapiens
catggctgcccattg

SEQ ID NO: 6715 - DNA, 15 bp, Homo sapiens
gcatggctgcccatt

SEQ ID NO: 6716 - DNA, 15 bp, Homo sapiens
tgcatggctgcccat

SEQ ID NO: 6717 - DNA, 15 bp, Homo sapiens
gtgcatggctgccca

SEQ ID NO: 6718 - DNA, 15 bp, Homo sapiens
cgtgcatggctgccc

SEQ ID NO: 6719 - DNA, 15 bp, Homo sapiens
ccgtgcatggctgcc

SEQ ID NO: 6720 - DNA, 15 bp, Homo sapiens
tccgtgcatggctgc

SEQ ID NO: 6721 - DNA, 15 bp, Homo sapiens
atccgtgcatggctg

SEQ ID NO: 6722 - DNA, 15 bp, Homo sapiens
catccgtgcatggct

SEQ ID NO: 6723 - DNA, 15 bp, Homo sapiens
tcatccgtgcatggc

SEQ ID NO: 6724 - DNA, 15 bp, Homo sapiens
gtcatccgtgcatgg

SEQ ID NO: 6725 - DNA, 15 bp, Homo sapiens
cgtcatccgtgcatg

SEQ ID NO: 6726 - DNA, 15 bp, Homo sapiens
acgtcatccgtgcat

SEQ ID NO: 6727 - DNA, 15 bp, Homo sapiens
tacgtcatccgtgca

SEQ ID NO: 6728 - DNA, 15 bp, Homo sapiens
gtacgtcatccgtgc

SEQ ID NO: 6729 - DNA, 15 bp, Homo sapiens
tgtacgtcatccgtg

SEQ ID NO: 6730 - DNA, 15 bp, Homo sapiens
ctgtacgtcatccgt

SEQ ID NO: 6731 - DNA, 15 bp, Homo sapiens
gctgtacgtcatccg

SEQ ID NO: 6732 - DNA, 15 bp, Homo sapiens
cgctgtacgtcatcc

SEQ ID NO: 6733 - DNA, 15 bp, Homo sapiens
tcgctgtacgtcatc

SEQ ID NO: 6734 - DNA, 15 bp, Homo sapiens
ttcgctgtacgtcat

SEQ ID NO: 6735 - DNA, 15 bp, Homo sapiens
attcgctgtacgtca

SEQ ID NO: 6736 - DNA, 15 bp, Homo sapiens
aattcgctgtacgtc

SEQ ID NO: 6737 - DNA, 15 bp, Homo sapiens
caattcgctgtacgt

SEQ ID NO: 6738 - DNA, 15 bp, Homo sapiens
tcaattcgctgtacg

SEQ ID NO: 6739 - DNA, 15 bp, Homo sapiens
ctcaattcgctgtac

SEQ ID NO: 6740 - DNA, 15 bp, Homo sapiens
tctcaattcgctgta

SEQ ID NO: 6741 - DNA, 15 bp, Homo sapiens
ctctcaattcgctgt

SEQ ID NO: 6742 - DNA, 15 bp, Homo sapiens
gctctcaattcgctg

SEQ ID NO: 6743 - DNA, 15 bp, Homo sapiens
ggctctcaattcgct

SEQ ID NO: 6744 - DNA, 15 bp, Homo sapiens
cggctctcaattcgc

SEQ ID NO: 6745 - DNA, 15 bp, Homo sapiens
ccggctctcaattcg

SEQ ID NO: 6746 - DNA, 15 bp, Homo sapiens
tccggctctcaattc

SEQ ID NO: 6747 - DNA, 15 bp, Homo sapiens
ctccggctctcaatt

SEQ ID NO: 6748 - DNA, 15 bp, Homo sapiens
tctccggctctcaat

SEQ ID NO: 6749 - DNA, 15 bp, Homo sapiens
ttctccggctctcaa

SEQ ID NO: 6750 - DNA, 15 bp, Homo sapiens
cttctccggctctca

SEQ ID NO: 6751 - DNA, 15 bp, Homo sapiens
gcttctccggctctc

SEQ ID NO: 6752 - DNA, 15 bp, Homo sapiens
tgcttctccggctct

SEQ ID NO: 6753 - DNA, 15 bp, Homo sapiens
gtgcttctccggctc

SEQ ID NO: 6754 - DNA, 15 bp, Homo sapiens
cgtgcttctccggct

SEQ ID NO: 6755 - DNA, 15 bp, Homo sapiens
gcgtgcttctccggc

SEQ ID NO: 6756 - DNA, 15 bp, Homo sapiens
tgcgtgcttctccgg

SEQ ID NO: 6757 - DNA, 15 bp, Homo sapiens
ctgcgtgcttctccg

SEQ ID NO: 6758 - DNA, 15 bp, Homo sapiens
gctgcgtgcttctcc

SEQ ID NO: 6759 - DNA, 15 bp, Homo sapiens
ggctgcgtgcttctc

SEQ ID NO: 6760 - DNA, 15 bp, Homo sapiens
tggctgcgtgcttct

SEQ ID NO: 6761 - DNA, 15 bp, Homo sapiens
ttggctgcgtgcttc

SEQ ID NO: 6762 - DNA, 15 bp, Homo sapiens
attggctgcgtgctt

SEQ ID NO: 6763 - DNA, 15 bp, Homo sapiens
cattggctgcgtgct

SEQ ID NO: 6764 - DNA, 15 bp, Homo sapiens
ccattggctgcgtgc

SEQ ID NO: 6765 - DNA, 15 bp, Homo sapiens
cccattggctgcgtg

SEQ ID NO: 6766 - DNA, 15 bp, Homo sapiens
ccccattggctgcgt

SEQ ID NO: 6767 - DNA, 15 bp, Homo sapiens
tccccattggctgcg

SEQ ID NO: 6768 - DNA, 15 bp, Homo sapiens
atccccattggctgc

SEQ ID NO: 6769 - DNA, 15 bp, Homo sapiens
catccccattggctg

SEQ ID NO: 6770 - DNA, 15 bp, Homo sapiens
gcatccccattggct

SEQ ID NO: 6771 - DNA, 15 bp, Homo sapiens
ggcatccccattggc

SEQ ID NO: 6772 - DNA, 15 bp, Homo sapiens
gggcatccccattgg

SEQ ID NO: 6773 - DNA, 15 bp, Homo sapiens
cgggcatccccattg

SEQ ID NO: 6774 - DNA, 15 bp, Homo sapiens
ccgggcatccccatt

SEQ ID NO: 6775 - DNA, 15 bp, Homo sapiens
cccgggcatccccat

SEQ ID NO: 6776 - DNA, 15 bp, Homo sapiens
tcccgggcatcccca

SEQ ID NO: 6777 - DNA, 15 bp, Homo sapiens
ctcccgggcatcccc

SEQ ID NO: 6778 - DNA, 15 bp, Homo sapiens
actcccgggcatccc

SEQ ID NO: 6779 - DNA, 15 bp, Homo sapiens
cactcccgggcatcc

SEQ ID NO: 6780 - DNA, 15 bp, Homo sapiens
ccactcccgggcatc

SEQ ID NO: 6781 - DNA, 15 bp, Homo sapiens
cccactcccgggcat

SEQ ID NO: 6782 - DNA, 15 bp, Homo sapiens
gcccactcccgggca

SEQ ID NO: 6783 - DNA, 15 bp, Homo sapiens
cgcccactcccgggc

SEQ ID NO: 6784 - DNA, 15 bp, Homo sapiens
ccgcccactcccggg

SEQ ID NO: 6785 - DNA, 15 bp, Homo sapiens
accgcccactcccgg

SEQ ID NO: 6786 - DNA, 15 bp, Homo sapiens
caccgcccactcccg

SEQ ID NO: 6787 - DNA, 15 bp, Homo sapiens
acaccgcccactccc

SEQ ID NO: 6788 - DNA, 15 bp, Homo sapiens
tacaccgcccactcc

SEQ ID NO: 6789 - DNA, 15 bp, Homo sapiens
ctacaccgcccactc

SEQ ID NO: 6790 - DNA, 15 bp, Homo sapiens
cctacaccgcccact

SEQ ID NO: 6791 - DNA, 15 bp, Homo sapiens
ccctacaccgcccac

SEQ ID NO: 6792 - DNA, 15 bp, Homo sapiens
cccctacaccgccca

SEQ ID NO: 6793 - DNA, 15 bp, Homo sapiens
ccccctacaccgccc

SEQ ID NO: 6794 - DNA, 15 bp, Homo sapiens
gccccctacaccgcc

SEQ ID NO: 6795 - DNA, 15 bp, Homo sapiens
cgccccctacaccgc

SEQ ID NO: 6796 - DNA, 15 bp, Homo sapiens
ccgccccctacaccg

SEQ ID NO: 6797 - DNA, 15 bp, Homo sapiens
cccgccccctacacc

SEQ ID NO: 6798 - DNA, 15 bp, Homo sapiens
tcccgccccctacac

SEQ ID NO: 6799 - DNA, 15 bp, Homo sapiens
atcccgccccctaca

SEQ ID NO: 6800 - DNA, 15 bp, Homo sapiens
catcccgccccctac

SEQ ID NO: 6801 - DNA, 15 bp, Homo sapiens
tcatcccgcccccta

SEQ ID NO: 6802 - DNA, 15 bp, Homo sapiens
atcatcccgccccct

SEQ ID NO: 6803 - DNA, 15 bp, Homo sapiens
gatcatcccgccccc

SEQ ID NO: 6804 - DNA, 15 bp, Homo sapiens
cgatcatcccgcccc

SEQ ID NO: 6805 - DNA, 15 bp, Homo sapiens
tcgatcatcccgccc

SEQ ID NO: 6806 - DNA, 15 bp, Homo sapiens
ctcgatcatcccgcc

SEQ ID NO: 6807 - DNA, 15 bp, Homo sapiens
cctcgatcatcccgc

SEQ ID NO: 6808 - DNA, 15 bp, Homo sapiens
tcctcgatcatcccg

SEQ ID NO: 6809 - DNA, 15 bp, Homo sapiens
ttcctcgatcatccc

SEQ ID NO: 6810 - DNA, 15 bp, Homo sapiens
attcctcgatcatcc

SEQ ID NO: 6811 - DNA, 15 bp, Homo sapiens
gattcctcgatcatc

SEQ ID NO: 6812 - DNA, 15 bp, Homo sapiens
tgattcctcgatcat

SEQ ID NO: 6813 - DNA, 15 bp, Homo sapiens
ttgattcctcgatca

SEQ ID NO: 6814 - DNA, 15 bp, Homo sapiens
attgattcctcgatc

SEQ ID NO: 6815 - DNA, 15 bp, Homo sapiens
cattgattcctcgat

SEQ ID NO: 6816 - DNA, 15 bp, Homo sapiens
ccattgattcctcga

SEQ ID NO: 6817 - DNA, 15 bp, Homo sapiens
tccattgattcctcg

SEQ ID NO: 6818 - DNA, 15 bp, Homo sapiens
ctccattgattcctc

SEQ ID NO: 6819 - DNA, 15 bp, Homo sapiens
tctccattgattcct

SEQ ID NO: 6820 - DNA, 15 bp, Homo sapiens
ctctccattgattcc

SEQ ID NO: 6821 - DNA, 15 bp, Homo sapiens
cctctccattgattc

SEQ ID NO: 6822 - DNA, 15 bp, Homo sapiens
gcctctccattgatt

SEQ ID NO: 6823 - DNA, 15 bp, Homo sapiens
ggcctctccattgat

SEQ ID NO: 6824 - DNA, 15 bp, Homo sapiens
cggcctctccattga

SEQ ID NO: 6825 - DNA, 15 bp, Homo sapiens
ccggcctctccattg

SEQ ID NO: 6826 - DNA, 15 bp, Homo sapiens
tccggcctctccatt

SEQ ID NO: 6827 - DNA, 15 bp, Homo sapiens
ttccggcctctccat

SEQ ID NO: 6828 - DNA, 15 bp, Homo sapiens
attccggcctctcca

SEQ ID NO: 6829 - DNA, 15 bp, Homo sapiens
cattccggcctctcc

SEQ ID NO: 6830 - DNA, 15 bp, Homo sapiens
ccattccggcctctc

SEQ ID NO: 6831 - DNA, 15 bp, Homo sapiens
cccattccggcctct

SEQ ID NO: 6832 - DNA, 15 bp, Homo sapiens
ccccattccggcctc

SEQ ID NO: 6833 - DNA, 15 bp, Homo sapiens
cccccattccggcct

SEQ ID NO: 6834 - DNA, 15 bp, Homo sapiens
acccccattccggcc

SEQ ID NO: 6835 - DNA, 15 bp, Homo sapiens
cacccccattccggc

SEQ ID NO: 6836 - DNA, 15 bp, Homo sapiens
ccacccccattccgg

SEQ ID NO: 6837 - DNA, 15 bp, Homo sapiens
accacccccattccg

SEQ ID NO: 6838 - DNA, 15 bp, Homo sapiens
caccacccccattcc

SEQ ID NO: 6839 - DNA, 15 bp, Homo sapiens
gcaccacccccattc

SEQ ID NO: 6840 - DNA, 15 bp, Homo sapiens
cgcaccacccccatt

SEQ ID NO: 6841 - DNA, 15 bp, Homo sapiens
tcgcaccacccccat

SEQ ID NO: 6842 - DNA, 15 bp, Homo sapiens
ttcgcaccaccccca

SEQ ID NO: 6843 - DNA, 15 bp, Homo sapiens
tttcgcaccaccccc

SEQ ID NO: 6844 - DNA, 15 bp, Homo sapiens
atttcgcaccacccc

SEQ ID NO: 6845 - DNA, 15 bp, Homo sapiens
gatttcgcaccaccc

SEQ ID NO: 6846 - DNA, 15 bp, Homo sapiens
ggatttcgcaccacc

SEQ ID NO: 6847 - DNA, 15 bp, Homo sapiens
tggatttcgcaccac

SEQ ID NO: 6848 - DNA, 15 bp, Homo sapiens
atggatttcgcacca

SEQ ID NO: 6849 - DNA, 15 bp, Homo sapiens
catggatttcgcacc

SEQ ID NO: 6850 - DNA, 15 bp, Homo sapiens
tcatggatttcgcac

SEQ ID NO: 6851 - DNA, 15 bp, Homo sapiens
atcatggatttcgca

SEQ ID NO: 6852 - DNA, 15 bp, Homo sapiens
catcatggatttcgc

SEQ ID NO: 6853 - DNA, 15 bp, Homo sapiens
tcatcatggatttcg

SEQ ID NO: 6854 - DNA, 15 bp, Homo sapiens
ttcatcatggatttc

SEQ ID NO: 6855 - DNA, 15 bp, Homo sapiens
cttcatcatggattt

SEQ ID NO: 6856 - DNA, 15 bp, Homo sapiens
tcttcatcatggatt

SEQ ID NO: 6857 - DNA, 15 bp, Homo sapiens
ttcttcatcatggat

SEQ ID NO: 6858 - DNA, 15 bp, Homo sapiens
tttcttcatcatgga

SEQ ID NO: 6859 - DNA, 15 bp, Homo sapiens
ttttcttcatcatgg

SEQ ID NO: 6860 - DNA, 15 bp, Homo sapiens
gttttcttcatcatg

SEQ ID NO: 6861 - DNA, 15 bp, Homo sapiens
tgttttcttcatcat

SEQ ID NO: 6862 - DNA, 15 bp, Homo sapiens
ctgttttcttcatca

SEQ ID NO: 6863 - DNA, 15 bp, Homo sapiens
tctgttttcttcatc

SEQ ID NO: 6864 - DNA, 15 bp, Homo sapiens
ttctgttttcttcat

SEQ ID NO: 6865 - DNA, 15 bp, Homo sapiens
cttctgttttcttca

SEQ ID NO: 6866 - DNA, 15 bp, Homo sapiens
gcttctgttttcttc

SEQ ID NO: 6867 - DNA, 15 bp, Homo sapiens
tgcttctgttttctt

SEQ ID NO: 6868 - DNA, 15 bp, Homo sapiens
ctgcttctgttttct

SEQ ID NO: 6869 - DNA, 15 bp, Homo sapiens
tctgcttctgttttc

SEQ ID NO: 6870 - DNA, 15 bp, Homo sapiens
gtctgcttctgtttt

SEQ ID NO: 6871 - DNA, 15 bp, Homo sapiens
tgtctgcttctgttt

SEQ ID NO: 6872 - DNA, 15 bp, Homo sapiens
ctgtctgcttctgtt

SEQ ID NO: 6873 - DNA, 15 bp, Homo sapiens
gctgtctgcttctgt

SEQ ID NO: 6874 - DNA, 15 bp, Homo sapiens
agctgtctgcttctg

SEQ ID NO: 6875 - DNA, 15 bp, Homo sapiens
tagctgtctgcttct

SEQ ID NO: 6876 - DNA, 15 bp, Homo sapiens
ttagctgtctgcttc

SEQ ID NO: 6877 - DNA, 15 bp, Homo sapiens
attagctgtctgctt

SEQ ID NO: 6878 - DNA, 15 bp, Homo sapiens
cattagctgtctgct

SEQ ID NO: 6879 - DNA, 15 bp, Homo sapiens
gcattagctgtctgc

SEQ ID NO: 6880 - DNA, 15 bp, Homo sapiens
cgcattagctgtctg

SEQ ID NO: 6881 - DNA, 15 bp, Homo sapiens
ccgcattagctgtct

SEQ ID NO: 6882 - DNA, 15 bp, Homo sapiens
tccgcattagctgtc

SEQ ID NO: 6883 - DNA, 15 bp, Homo sapiens
ttccgcattagctgt

SEQ ID NO: 6884 - DNA, 15 bp, Homo sapiens
cttccgcattagctg

SEQ ID NO: 6885 - DNA, 15 bp, Homo sapiens
acttccgcattagct

SEQ ID NO: 6886 - DNA, 15 bp, Homo sapiens
gacttccgcattagc

SEQ ID NO: 6887 - DNA, 15 bp, Homo sapiens
agacttccgcattag

SEQ ID NO: 6888 - DNA, 15 bp, Homo sapiens
cagacttccgcatta

SEQ ID NO: 6889 - DNA, 15 bp, Homo sapiens
tcagacttccgcatt

SEQ ID NO: 6890 - DNA, 15 bp, Homo sapiens
ctcagacttccgcat

SEQ ID NO: 6891 - DNA, 15 bp, Homo sapiens
gctcagacttccgca

SEQ ID NO: 6892 - DNA, 15 bp, Homo sapiens
cgctcagacttccgc

SEQ ID NO: 6893 - DNA, 15 bp, Homo sapiens
tcgctcagacttccg

SEQ ID NO: 6894 - DNA, 15 bp, Homo sapiens
ctcgctcagacttcc

SEQ ID NO: 6895 - DNA, 15 bp, Homo sapiens
tctcgctcagacttc

SEQ ID NO: 6896 - DNA, 15 bp, Homo sapiens
ctctcgctcagactt

SEQ ID NO: 6897 - DNA, 15 bp, Homo sapiens
tctctcgctcagact

SEQ ID NO: 6898 - DNA, 15 bp, Homo sapiens
ctctctcgctcagac

SEQ ID NO: 6899 - DNA, 15 bp, Homo sapiens
cctctctcgctcaga

SEQ ID NO: 6900 - DNA, 15 bp, Homo sapiens
gcctctctcgctcag

SEQ ID NO: 6901 - DNA, 15 bp, Homo sapiens
tgcctctctcgctca

SEQ ID NO: 6902 - DNA, 15 bp, Homo sapiens
atgcctctctcgctc

SEQ ID NO: 6903 - DNA, 15 bp, Homo sapiens
catgcctctctcgct

SEQ ID NO: 6904 - DNA, 15 bp, Homo sapiens
acatgcctctctcgc

SEQ ID NO: 6905 - DNA, 15 bp, Homo sapiens
cacatgcctctctcg

SEQ ID NO: 6906 - DNA, 15 bp, Homo sapiens
ccacatgcctctctc

SEQ ID NO: 6907 - DNA, 15 bp, Homo sapiens
cccacatgcctctct

SEQ ID NO: 6908 - DNA, 15 bp, Homo sapiens
gcccacatgcctctc

SEQ ID NO: 6909 - DNA, 15 bp, Homo sapiens
cgcccacatgcctct

SEQ ID NO: 6910 - DNA, 15 bp, Homo sapiens
ccgcccacatgcctc

SEQ ID NO: 6911 - DNA, 15 bp, Homo sapiens
accgcccacatgcct

SEQ ID NO: 6912 - DNA, 15 bp, Homo sapiens
caccgcccacatgcc

SEQ ID NO: 6913 - DNA, 15 bp, Homo sapiens
ccaccgcccacatgc

SEQ ID NO: 6914 - DNA, 15 bp, Homo sapiens
cccaccgcccacatg

SEQ ID NO: 6915 - DNA, 15 bp, Homo sapiens
tcccaccgcccacat

SEQ ID NO: 6916 - DNA, 15 bp, Homo sapiens
ttcccaccgcccaca

SEQ ID NO: 6917 - DNA, 15 bp, Homo sapiens
tttcccaccgcccac

SEQ ID NO: 6918 - DNA, 15 bp, Homo sapiens
ttttcccaccgccca

SEQ ID NO: 6919 - DNA, 15 bp, Homo sapiens
cttttcccaccgccc

SEQ ID NO: 6920 - DNA, 15 bp, Homo sapiens
acttttcccaccgcc

SEQ ID NO: 6921 - DNA, 15 bp, Homo sapiens
cacttttcccaccgc

SEQ ID NO: 6922 - DNA, 15 bp, Homo sapiens
ccacttttcccaccg

SEQ ID NO: 6923 - DNA, 15 bp, Homo sapiens
tccacttttcccacc

SEQ ID NO: 6924 - DNA, 15 bp, Homo sapiens
ttccacttttcccac

SEQ ID NO: 6925 - DNA, 15 bp, Homo sapiens
attccacttttccca

SEQ ID NO: 6926 - DNA, 15 bp, Homo sapiens
cattccacttttccc

SEQ ID NO: 6927 - DNA, 15 bp, Homo sapiens
ccattccacttttcc

SEQ ID NO: 6928 - DNA, 15 bp, Homo sapiens
gccattccacttttc

SEQ ID NO: 6929 - DNA, 15 bp, Homo sapiens
agccattccactttt

SEQ ID NO: 6930 - DNA, 15 bp, Homo sapiens
tagccattccacttt

SEQ ID NO: 6931 - DNA, 15 bp, Homo sapiens
gtagccattccactt

SEQ ID NO: 6932 - DNA, 15 bp, Homo sapiens
tgtagccattccact

SEQ ID NO: 6933 - DNA, 15 bp, Homo sapiens
ctgtagccattccac

SEQ ID NO: 6934 - DNA, 15 bp, Homo sapiens
cctgtagccattcca

SEQ ID NO: 6935 - DNA, 15 bp, Homo sapiens
gcctgtagccattcc

SEQ ID NO: 6936 - DNA, 15 bp, Homo sapiens
cgcctgtagccattc

SEQ ID NO: 6937 - DNA, 15 bp, Homo sapiens
tcgcctgtagccatt

SEQ ID NO: 6938 - DNA, 15 bp, Homo sapiens
atcgcctgtagccat

SEQ ID NO: 6939 - DNA, 15 bp, Homo sapiens
catcgcctgtagcca

SEQ ID NO: 6940 - DNA, 15 bp, Homo sapiens
tcatcgcctgtagcc

SEQ ID NO: 6941 - DNA, 15 bp, Homo sapiens
ctcatcgcctgtagc

SEQ ID NO: 6942 - DNA, 15 bp, Homo sapiens
cctcatcgcctgtag

SEQ ID NO: 6943 - DNA, 15 bp, Homo sapiens
ccctcatcgcctgta

SEQ ID NO: 6944 - DNA, 15 bp, Homo sapiens
gccctcatcgcctgt

SEQ ID NO: 6945 - DNA, 15 bp, Homo sapiens
tgccctcatcgcctg

SEQ ID NO: 6946 - DNA, 15 bp, Homo sapiens
ctgccctcatcgcct

SEQ ID NO: 6947 - DNA, 15 bp, Homo sapiens
gctgccctcatcgcc

SEQ ID NO: 6948 - DNA, 15 bp, Homo sapiens
ggctgccctcatcgc

SEQ ID NO: 6949 - DNA, 15 bp, Homo sapiens
cggctgccctcatcg

SEQ ID NO: 6950 - DNA, 15 bp, Homo sapiens
ccggctgccctcatc

SEQ ID NO: 6951 - DNA, 15 bp, Homo sapiens
cccggctgccctcat

SEQ ID NO: 6952 - DNA, 15 bp, Homo sapiens
tcccggctgccctca

SEQ ID NO: 6953 - DNA, 15 bp, Homo sapiens
ttcccggctgccctc

SEQ ID NO: 6954 - DNA, 15 bp, Homo sapiens
gttcccggctgccct

SEQ ID NO: 6955 - DNA, 15 bp, Homo sapiens
cgttcccggctgccc

SEQ ID NO: 6956 - DNA, 15 bp, Homo sapiens
tcgttcccggctgcc

SEQ ID NO: 6957 - DNA, 15 bp, Homo sapiens
ttcgttcccggctgc

SEQ ID NO: 6958 - DNA, 15 bp, Homo sapiens
gttcgttcccggctg

SEQ ID NO: 6959 - DNA, 15 bp, Homo sapiens
cgttcgttcccggct

SEQ ID NO: 6960 - DNA, 15 bp, Homo sapiens
gcgttcgttcccggc

SEQ ID NO: 6961 - DNA, 15 bp, Homo sapiens
tgcgttcgttcccgg

SEQ ID NO: 6962 - DNA, 15 bp, Homo sapiens
ctgcgttcgttcccg

SEQ ID NO: 6963 - DNA, 15 bp, Homo sapiens
tctgcgttcgttccc

SEQ ID NO: 6964 - DNA, 15 bp, Homo sapiens
ctctgcgttcgttcc

SEQ ID NO: 6965 - DNA, 15 bp, Homo sapiens
cctctgcgttcgttc

SEQ ID NO: 6966 - DNA, 15 bp, Homo sapiens
gcctctgcgttcgtt

SEQ ID NO: 6967 - DNA, 15 bp, Homo sapiens
ggcctctgcgttcgt

SEQ ID NO: 6968 - DNA, 15 bp, Homo sapiens
gggcctctgcgttcg

SEQ ID NO: 6969 - DNA, 15 bp, Homo sapiens
tgggcctctgcgttc

SEQ ID NO: 6970 - DNA, 15 bp, Homo sapiens
ttgggcctctgcgtt

SEQ ID NO: 6971 - DNA, 15 bp, Homo sapiens
tttgggcctctgcgt

SEQ ID NO: 6972 - DNA, 15 bp, Homo sapiens
ttttgggcctctgcg

SEQ ID NO: 6973 - DNA, 15 bp, Homo sapiens
tttttgggcctctgc

SEQ ID NO: 6974 - DNA, 15 bp, Homo sapiens
ctttttgggcctctg

SEQ ID NO: 6975 - DNA, 15 bp, Homo sapiens
actttttgggcctct

SEQ ID NO: 6976 - DNA, 15 bp, Homo sapiens
cactttttgggcctc

SEQ ID NO: 6977 - DNA, 15 bp, Homo sapiens
ccactttttgggcct

SEQ ID NO: 6978 - DNA, 15 bp, Homo sapiens
cccactttttgggcc

SEQ ID NO: 6979 - DNA, 15 bp, Homo sapiens
tcccactttttgggc

SEQ ID NO: 6980 - DNA, 15 bp, Homo sapiens
ctcccactttttggg

SEQ ID NO: 6981 - DNA, 15 bp, Homo sapiens
tctcccactttttgg

SEQ ID NO: 6982 - DNA, 15 bp, Homo sapiens
atctcccactttttg

SEQ ID NO: 6983 - DNA, 15 bp, Homo sapiens
gatctcccacttttt

SEQ ID NO: 6984 - DNA, 15 bp, Homo sapiens
ggatctcccactttt

SEQ ID NO: 6985 - DNA, 15 bp, Homo sapiens
gggatctcccacttt

SEQ ID NO: 6986 - DNA, 15 bp, Homo sapiens
cgggatctcccactt

SEQ ID NO: 6987 - DNA, 15 bp, Homo sapiens
gcgggatctcccact

SEQ ID NO: 6988 - DNA, 15 bp, Homo sapiens
cgcgggatctcccac

SEQ ID NO: 6989 - DNA, 15 bp, Homo sapiens
ccgcgggatctccca

SEQ ID NO: 6990 - DNA, 15 bp, Homo sapiens
cccgcgggatctccc

SEQ ID NO: 6991 - DNA, 15 bp, Homo sapiens
acccgcgggatctcc

SEQ ID NO: 6992 - DNA, 15 bp, Homo sapiens
aacccgcgggatctc

SEQ ID NO: 6993 - DNA, 15 bp, Homo sapiens
caacccgcgggatct

SEQ ID NO: 6994 - DNA, 15 bp, Homo sapiens
gcaacccgcgggatc

SEQ ID NO: 6995 - DNA, 15 bp, Homo sapiens
cgcaacccgcgggat

SEQ ID NO: 6996 - DNA, 15 bp, Homo sapiens
acgcaacccgcggga

SEQ ID NO: 6997 - DNA, 15 bp, Homo sapiens
tacgcaacccgcggg

SEQ ID NO: 6998 - DNA, 15 bp, Homo sapiens
ctacgcaacccgcgg

SEQ ID NO: 6999 - DNA, 15 bp, Homo sapiens
cctacgcaacccgcg

SEQ ID NO: 7000 - DNA, 15 bp, Homo sapiens
gcctacgcaacccgc

SEQ ID NO: 7001 - DNA, 15 bp, Homo sapiens
cgcctacgcaacccg

SEQ ID NO: 7002 - DNA, 15 bp, Homo sapiens
ccgcctacgcaaccc

SEQ ID NO: 7003 - DNA, 15 bp, Homo sapiens
accgcctacgcaacc

SEQ ID NO: 7004 - DNA, 15 bp, Homo sapiens
caccgcctacgcaac

SEQ ID NO: 7005 - DNA, 15 bp, Homo sapiens
ccaccgcctacgcaa

SEQ ID NO: 7006 - DNA, 15 bp, Homo sapiens
tccaccgcctacgca

SEQ ID NO: 7007 - DNA, 15 bp, Homo sapiens
ttccaccgcctacgc

SEQ ID NO: 7008 - DNA, 15 bp, Homo sapiens
gttccaccgcctacg

SEQ ID NO: 7009 - DNA, 15 bp, Homo sapiens
cgttccaccgcctac

SEQ ID NO: 7010 - DNA, 15 bp, Homo sapiens
ccgttccaccgccta

SEQ ID NO: 7011 - DNA, 15 bp, Homo sapiens
accgttccaccgcct

SEQ ID NO: 7012 - DNA, 15 bp, Homo sapiens
taccgttccaccgcc

SEQ ID NO: 7013 - DNA, 15 bp, Homo sapiens
ctaccgttccaccgc

SEQ ID NO: 7014 - DNA, 15 bp, Homo sapiens
gctaccgttccaccg

SEQ ID NO: 7015 - DNA, 15 bp, Homo sapiens
agctaccgttccacc

SEQ ID NO: 7016 - DNA, 15 bp, Homo sapiens
tagctaccgttccac

SEQ ID NO: 7017 - DNA, 15 bp, Homo sapiens
ctagctaccgttcca

SEQ ID NO: 7018 - DNA, 15 bp, Homo sapiens
tctagctaccgttcc

SEQ ID NO: 7019 - DNA, 15 bp, Homo sapiens
ctctagctaccgttc

SEQ ID NO: 7020 - DNA, 15 bp, Homo sapiens
tctctagctaccgtt

SEQ ID NO: 7021 - DNA, 15 bp, Homo sapiens
ctctctagctaccgt

SEQ ID NO: 7022 - DNA, 15 bp, Homo sapiens
tctctctagctaccg

SEQ ID NO: 7023 - DNA, 15 bp, Homo sapiens
ctctctctagctacc

SEQ ID NO: 7024 - DNA, 15 bp, Homo sapiens
tctctctctagctac

SEQ ID NO: 7025 - DNA, 15 bp, Homo sapiens
ctctctctctagcta

SEQ ID NO: 7026 - DNA, 15 bp, Homo sapiens
tctctctctctagct

SEQ ID NO: 7027 - DNA, 15 bp, Homo sapiens
ttctctctctctagc

SEQ ID NO: 7028 - DNA, 15 bp, Homo sapiens
gttctctctctctag

SEQ ID NO: 7029 - DNA, 15 bp, Homo sapiens
tgttctctctctcta

SEQ ID NO: 7030 - DNA, 15 bp, Homo sapiens
ctgttctctctctct

SEQ ID NO: 7031 - DNA, 15 bp, Homo sapiens
gctgttctctctctc

SEQ ID NO: 7032 - DNA, 15 bp, Homo sapiens
ggctgttctctctct

SEQ ID NO: 7033 - DNA, 15 bp, Homo sapiens
tggctgttctctctc

SEQ ID NO: 7034 - DNA, 15 bp, Homo sapiens
ttggctgttctctct

SEQ ID NO: 7035 - DNA, 15 bp, Homo sapiens
attggctgttctctc

SEQ ID NO: 7036 - DNA, 15 bp, Homo sapiens
cattggctgttctct

SEQ ID NO: 7037 - DNA, 15 bp, Homo sapiens
ccattggctgttctc

SEQ ID NO: 7038 - DNA, 15 bp, Homo sapiens
tccattggctgttct

SEQ ID NO: 7039 - DNA, 15 bp, Homo sapiens
ctccattggctgttc

SEQ ID NO: 7040 - DNA, 15 bp, Homo sapiens
tctccattggctgtt

SEQ ID NO: 7041 - DNA, 15 bp, Homo sapiens
ctctccattggctgt

SEQ ID NO: 7042 - DNA, 15 bp, Homo sapiens
gctctccattggctg

SEQ ID NO: 7043 - DNA, 15 bp, Homo sapiens
ggctctccattggct

SEQ ID NO: 7044 - DNA, 15 bp, Homo sapiens
tggctctccattggc

SEQ ID NO: 7045 - DNA, 15 bp, Homo sapiens
gtggctctccattgg

SEQ ID NO: 7046 - DNA, 15 bp, Homo sapiens
cgtggctctccattg

SEQ ID NO: 7047 - DNA, 15 bp, Homo sapiens
gcgtggctctccatt

SEQ ID NO: 7048 - DNA, 15 bp, Homo sapiens
cgcgtggctctccat

SEQ ID NO: 7049 - DNA, 15 bp, Homo sapiens
acgcgtggctctcca

SEQ ID NO: 7050 - DNA, 15 bp, Homo sapiens
cacgcgtggctctcc

SEQ ID NO: 7051 - DNA, 15 bp, Homo sapiens
ccacgcgtggctctc

SEQ ID NO: 7052 - DNA, 15 bp, Homo sapiens
cccacgcgtggctct

SEQ ID NO: 7053 - DNA, 15 bp, Homo sapiens
tcccacgcgtggctc

SEQ ID NO: 7054 - DNA, 15 bp, Homo sapiens
atcccacgcgtggct

SEQ ID NO: 7055 - DNA, 15 bp, Homo sapiens
catcccacgcgtggc

SEQ ID NO: 7056 - DNA, 15 bp, Homo sapiens
tcatcccacgcgtgg

SEQ ID NO: 7057 - DNA, 15 bp, Homo sapiens
gtcatcccacgcgtg

SEQ ID NO: 7058 - DNA, 15 bp, Homo sapiens
cgtcatcccacgcgt

SEQ ID NO: 7059 - DNA, 15 bp, Homo sapiens
tcgtcatcccacgcg

SEQ ID NO: 7060 - DNA, 15 bp, Homo sapiens
gtcgtcatcccacgc

SEQ ID NO: 7061 - DNA, 15 bp, Homo sapiens
tgtcgtcatcccacg

SEQ ID NO: 7062 - DNA, 15 bp, Homo sapiens
ttgtcgtcatcccac

SEQ ID NO: 7063 - DNA, 15 bp, Homo sapiens
attgtcgtcatccca

SEQ ID NO: 7064 - DNA, 15 bp, Homo sapiens
cattgtcgtcatccc

SEQ ID NO: 7065 - DNA, 15 bp, Homo sapiens
ccattgtcgtcatcc

SEQ ID NO: 7066 - DNA, 15 bp, Homo sapiens
gccattgtcgtcatc

SEQ ID NO: 7067 - DNA, 15 bp, Homo sapiens
agccattgtcgtcat

SEQ ID NO: 7068 - DNA, 15 bp, Homo sapiens
cagccattgtcgtca

SEQ ID NO: 7069 - DNA, 15 bp, Homo sapiens
gcagccattgtcgtc

SEQ ID NO: 7070 - DNA, 15 bp, Homo sapiens
tgcagccattgtcgt

SEQ ID NO: 7071 - DNA, 15 bp, Homo sapiens
ctgcagccattgtcg

SEQ ID NO: 7072 - DNA, 15 bp, Homo sapiens
gctgcagccattgtc

SEQ ID NO: 7073 - DNA, 15 bp, Homo sapiens
cgctgcagccattgt

SEQ ID NO: 7074 - DNA, 15 bp, Homo sapiens
tcgctgcagccattg

SEQ ID NO: 7075 - DNA, 15 bp, Homo sapiens
ctcgctgcagccatt

SEQ ID NO: 7076 - DNA, 15 bp, Homo sapiens
gctcgctgcagccat

SEQ ID NO: 7077 - DNA, 15 bp, Homo sapiens
ggctcgctgcagcca

SEQ ID NO: 7078 - DNA, 15 bp, Homo sapiens
tggctcgctgcagcc

SEQ ID NO: 7079 - DNA, 15 bp, Homo sapiens
ttggctcgctgcagc

SEQ ID NO: 7080 - DNA, 15 bp, Homo sapiens
attggctcgctgcag

SEQ ID NO: 7081 - DNA, 15 bp, Homo sapiens
cattggctcgctgca

SEQ ID NO: 7082 - DNA, 15 bp, Homo sapiens
ccattggctcgctgc

SEQ ID NO: 7083 - DNA, 15 bp, Homo sapiens
cccattggctcgctg

SEQ ID NO: 7084 - DNA, 15 bp, Homo sapiens
ccccattggctcgct

SEQ ID NO: 7085 - DNA, 15 bp, Homo sapiens
tccccattggctcgc

SEQ ID NO: 7086 - DNA, 15 bp, Homo sapiens
ctccccattggctcg

SEQ ID NO: 7087 - DNA, 15 bp, Homo sapiens
cctccccattggctc

SEQ ID NO: 7088 - DNA, 15 bp, Homo sapiens
gcctccccattggct

SEQ ID NO: 7089 - DNA, 15 bp, Homo sapiens
agcctccccattggc

SEQ ID NO: 7090 - DNA, 15 bp, Homo sapiens
aagcctccccattgg

SEQ ID NO: 7091 - DNA, 15 bp, Homo sapiens
caagcctccccattg

SEQ ID NO: 7092 - DNA, 15 bp, Homo sapiens
acaagcctccccatt

SEQ ID NO: 7093 - DNA, 15 bp, Homo sapiens
cacaagcctccccat

SEQ ID NO: 7094 - DNA, 15 bp, Homo sapiens
tcacaagcctcccca

SEQ ID NO: 7095 - DNA, 15 bp, Homo sapiens
ctcacaagcctcccc

SEQ ID NO: 7096 - DNA, 15 bp, Homo sapiens
gctcacaagcctccc

SEQ ID NO: 7097 - DNA, 15 bp, Homo sapiens
cgctcacaagcctcc

SEQ ID NO: 7098 - DNA, 15 bp, Homo sapiens
acgctcacaagcctc

SEQ ID NO: 7099 - DNA, 15 bp, Homo sapiens
cacgctcacaagcct

SEQ ID NO: 7100 - DNA, 15 bp, Homo sapiens
gcacgctcacaagcc

SEQ ID NO: 7101 - DNA, 15 bp, Homo sapiens
tgcacgctcacaagc

SEQ ID NO: 7102 - DNA, 15 bp, Homo sapiens
gtgcacgctcacaag

SEQ ID NO: 7103 - DNA, 15 bp, Homo sapiens
agtgcacgctcacaa

SEQ ID NO: 7104 - DNA, 15 bp, Homo sapiens
cagtgcacgctcaca

SEQ ID NO: 7105 - DNA, 15 bp, Homo sapiens
gcagtgcacgctcac

SEQ ID NO: 7106 - DNA, 15 bp, Homo sapiens
cgcagtgcacgctca

SEQ ID NO: 7107 - DNA, 15 bp, Homo sapiens
ccgcagtgcacgctc

SEQ ID NO: 7108 - DNA, 15 bp, Homo sapiens
gccgcagtgcacgct

SEQ ID NO: 7109 - DNA, 15 bp, Homo sapiens
agccgcagtgcacgc

SEQ ID NO: 7110 - DNA, 15 bp, Homo sapiens
aagccgcagtgcacg

SEQ ID NO: 7111 - DNA, 15 bp, Homo sapiens
gaagccgcagtgcac

SEQ ID NO: 7112 - DNA, 15 bp, Homo sapiens
cgaagccgcagtgca

SEQ ID NO: 7113 - DNA, 15 bp, Homo sapiens
tcgaagccgcagtgc

SEQ ID NO: 7114 - DNA, 15 bp, Homo sapiens
ttcgaagccgcagtg

SEQ ID NO: 7115 - DNA, 15 bp, Homo sapiens
cttcgaagccgcagt

SEQ ID NO: 7116 - DNA, 15 bp, Homo sapiens
ccttcgaagccgcag

SEQ ID NO: 7117 - DNA, 15 bp, Homo sapiens
cccttcgaagccgca

SEQ ID NO: 7118 - DNA, 15 bp, Homo sapiens
ccccttcgaagccgc

SEQ ID NO: 7119 - DNA, 15 bp, Homo sapiens
accccttcgaagccg

SEQ ID NO: 7120 - DNA, 15 bp, Homo sapiens
caccccttcgaagcc

SEQ ID NO: 7121 - DNA, 15 bp, Homo sapiens
ccaccccttcgaagc

SEQ ID NO: 7122 - DNA, 15 bp, Homo sapiens
accaccccttcgaag

SEQ ID NO: 7123 - DNA, 15 bp, Homo sapiens
caccaccccttcgaa

SEQ ID NO: 7124 - DNA, 15 bp, Homo sapiens
gcaccaccccttcga

SEQ ID NO: 7125 - DNA, 15 bp, Homo sapiens
ggcaccaccccttcg

SEQ ID NO: 7126 - DNA, 15 bp, Homo sapiens
tggcaccaccccttc

SEQ ID NO: 7127 - DNA, 15 bp, Homo sapiens
ttggcaccacccctt

SEQ ID NO: 7128 - DNA, 15 bp, Homo sapiens
cttggcaccacccct

SEQ ID NO: 7129 - DNA, 15 bp, Homo sapiens
ccttggcaccacccc

SEQ ID NO: 7130 - DNA, 15 bp, Homo sapiens
accttggcaccaccc

SEQ ID NO: 7131 - DNA, 15 bp, Homo sapiens
caccttggcaccacc

SEQ ID NO: 7132 - DNA, 15 bp, Homo sapiens
ccaccttggcaccac

SEQ ID NO: 7133 - DNA, 15 bp, Homo sapiens
tccaccttggcacca

SEQ ID NO: 7134 - DNA, 15 bp, Homo sapiens
ctccaccttggcacc

SEQ ID NO: 7135 - DNA, 15 bp, Homo sapiens
gctccaccttggcac

SEQ ID NO: 7136 - DNA, 15 bp, Homo sapiens
agctccaccttggca

SEQ ID NO: 7137 - DNA, 15 bp, Homo sapiens
tagctccaccttggc

SEQ ID NO: 7138 - DNA, 15 bp, Homo sapiens
ctagctccaccttgg

SEQ ID NO: 7139 - DNA, 15 bp, Homo sapiens
gctagctccaccttg

SEQ ID NO: 7140 - DNA, 15 bp, Homo sapiens
ggctagctccacctt

SEQ ID NO: 7141 - DNA, 15 bp, Homo sapiens
tggctagctccacct

SEQ ID NO: 7142 - DNA, 15 bp, Homo sapiens
ttggctagctccacc

SEQ ID NO: 7143 - DNA, 15 bp, Homo sapiens
attggctagctccac

SEQ ID NO: 7144 - DNA, 15 bp, Homo sapiens
tattggctagctcca

SEQ ID NO: 7145 - DNA, 15 bp, Homo sapiens
gtattggctagctcc

SEQ ID NO: 7146 - DNA, 15 bp, Homo sapiens
cgtattggctagctc

SEQ ID NO: 7147 - DNA, 15 bp, Homo sapiens
tcgtattggctagct

SEQ ID NO: 7148 - DNA, 15 bp, Homo sapiens
ttcgtattggctagc

SEQ ID NO: 7149 - DNA, 15 bp, Homo sapiens
cttcgtattggctag

SEQ ID NO: 7150 - DNA, 15 bp, Homo sapiens
ccttcgtattggcta

SEQ ID NO: 7151 - DNA, 15 bp, Homo sapiens
gccttcgtattggct

SEQ ID NO: 7152 - DNA, 15 bp, Homo sapiens
agccttcgtattggc

SEQ ID NO: 7153 - DNA, 15 bp, Homo sapiens
tagccttcgtattgg

SEQ ID NO: 7154 - DNA, 15 bp, Homo sapiens
ttagccttcgtattg

SEQ ID NO: 7155 - DNA, 15 bp, Homo sapiens
tttagccttcgtatt

SEQ ID NO: 7156 - DNA, 15 bp, Homo sapiens
ttttagccttcgtat

SEQ ID NO: 7157 - DNA, 15 bp, Homo sapiens
cttttagccttcgta

SEQ ID NO: 7158 - DNA, 15 bp, Homo sapiens
ccttttagccttcgt

SEQ ID NO: 7159 - DNA, 15 bp, Homo sapiens
tccttttagccttcg

SEQ ID NO: 7160 - DNA, 15 bp, Homo sapiens
ctccttttagccttc

SEQ ID NO: 7161 - DNA, 15 bp, Homo sapiens
tctccttttagcctt

SEQ ID NO: 7162 - DNA, 15 bp, Homo sapiens
gtctccttttagcct

SEQ ID NO: 7163 - DNA, 15 bp, Homo sapiens
ggtctccttttagcc

SEQ ID NO: 7164 - DNA, 15 bp, Homo sapiens
tggtctccttttagc

SEQ ID NO: 7165 - DNA, 15 bp, Homo sapiens
ttggtctccttttag

SEQ ID NO: 7166 - DNA, 15 bp, Homo sapiens
cttggtctcctttta

SEQ ID NO: 7167 - DNA, 15 bp, Homo sapiens
tcttggtctcctttt

SEQ ID NO: 7168 - DNA, 15 bp, Homo sapiens
ctcttggtctccttt

SEQ ID NO: 7169 - DNA, 15 bp, Homo sapiens
cctcttggtctcctt

SEQ ID NO: 7170 - DNA, 15 bp, Homo sapiens
gcctcttggtctcct

SEQ ID NO: 7171 - DNA, 15 bp, Homo sapiens
cgcctcttggtctcc

SEQ ID NO: 7172 - DNA, 15 bp, Homo sapiens
ccgcctcttggtctc

SEQ ID NO: 7173 - DNA, 15 bp, Homo sapiens
cccgcctcttggtct

SEQ ID NO: 7174 - DNA, 15 bp, Homo sapiens
acccgcctcttggtc

SEQ ID NO: 7175 - DNA, 15 bp, Homo sapiens
cacccgcctcttggt

SEQ ID NO: 7176 - DNA, 15 bp, Homo sapiens
acacccgcctcttgg

SEQ ID NO: 7177 - DNA, 15 bp, Homo sapiens
cacacccgcctcttg

SEQ ID NO: 7178 - DNA, 15 bp, Homo sapiens
acacacccgcctctt

SEQ ID NO: 7179 - DNA, 15 bp, Homo sapiens
tacacacccgcctct

SEQ ID NO: 7180 - DNA, 15 bp, Homo sapiens
ctacacacccgcctc

SEQ ID NO: 7181 - DNA, 15 bp, Homo sapiens
cctacacacccgcct

SEQ ID NO: 7182 - DNA, 15 bp, Homo sapiens
ccctacacacccgcc

SEQ ID NO: 7183 - DNA, 15 bp, Homo sapiens
tccctacacacccgc

SEQ ID NO: 7184 - DNA, 15 bp, Homo sapiens
ctccctacacacccg

SEQ ID NO: 7185 - DNA, 15 bp, Homo sapiens
gctccctacacaccc

SEQ ID NO: 7186 - DNA, 15 bp, Homo sapiens
ggctccctacacacc

SEQ ID NO: 7187 - DNA, 15 bp, Homo sapiens
cggctccctacacac

SEQ ID NO: 7188 - DNA, 15 bp, Homo sapiens
tcggctccctacaca

SEQ ID NO: 7189 - DNA, 15 bp, Homo sapiens
ctcggctccctacac

SEQ ID NO: 7190 - DNA, 15 bp, Homo sapiens
gctcggctccctaca

SEQ ID NO: 7191 - DNA, 15 bp, Homo sapiens
ggctcggctccctac

SEQ ID NO: 7192 - DNA, 15 bp, Homo sapiens
tggctcggctcccta

SEQ ID NO: 7193 - DNA, 15 bp, Homo sapiens
ttggctcggctccct

SEQ ID NO: 7194 - DNA, 15 bp, Homo sapiens
attggctcggctccc

SEQ ID NO: 7195 - DNA, 15 bp, Homo sapiens
cattggctcggctcc

SEQ ID NO: 7196 - DNA, 15 bp, Homo sapiens
ccattggctcggctc

SEQ ID NO: 7197 - DNA, 15 bp, Homo sapiens
tccattggctcggct

SEQ ID NO: 7198 - DNA, 15 bp, Homo sapiens
ctccattggctcggc

SEQ ID NO: 7199 - DNA, 15 bp, Homo sapiens
cctccattggctcgg

SEQ ID NO: 7200 - DNA, 15 bp, Homo sapiens
acctccattggctcg

SEQ ID NO: 7201 - DNA, 15 bp, Homo sapiens
cacctccattggctc

SEQ ID NO: 7202 - DNA, 15 bp, Homo sapiens
ccacctccattggct

SEQ ID NO: 7203 - DNA, 15 bp, Homo sapiens
tccacctccattggc

SEQ ID NO: 7204 - DNA, 15 bp, Homo sapiens
ctccacctccattgg

SEQ ID NO: 7205 - DNA, 15 bp, Homo sapiens
cctccacctccattg

SEQ ID NO: 7206 - DNA, 15 bp, Homo sapiens
gcctccacctccatt

SEQ ID NO: 7207 - DNA, 15 bp, Homo sapiens
agcctccacctccat

SEQ ID NO: 7208 - DNA, 15 bp, Homo sapiens
cagcctccacctcca

SEQ ID NO: 7209 - DNA, 15 bp, Homo sapiens
tcagcctccacctcc

SEQ ID NO: 7210 - DNA, 15 bp, Homo sapiens
ttcagcctccacctc

SEQ ID NO: 7211 - DNA, 15 bp, Homo sapiens
cttcagcctccacct

SEQ ID NO: 7212 - DNA, 15 bp, Homo sapiens
ccttcagcctccacc

SEQ ID NO: 7213 - DNA, 15 bp, Homo sapiens
gccttcagcctccac

SEQ ID NO: 7214 - DNA, 15 bp, Homo sapiens
cgccttcagcctcca

SEQ ID NO: 7215 - DNA, 15 bp, Homo sapiens
ccgccttcagcctcc

SEQ ID NO: 7216 - DNA, 15 bp, Homo sapiens
cccgccttcagcctc

SEQ ID NO: 7217 - DNA, 15 bp, Homo sapiens
tcccgccttcagcct

SEQ ID NO: 7218 - DNA, 15 bp, Homo sapiens
ctcccgccttcagcc

SEQ ID NO: 7219 - DNA, 15 bp, Homo sapiens
gctcccgccttcagc

SEQ ID NO: 7220 - DNA, 15 bp, Homo sapiens
cgctcccgccttcag

SEQ ID NO: 7221 - DNA, 15 bp, Homo sapiens
tcgctcccgccttca

SEQ ID NO: 7222 - DNA, 15 bp, Homo sapiens
ctcgctcccgccttc

SEQ ID NO: 7223 - DNA, 15 bp, Homo sapiens
cctcgctcccgcctt

SEQ ID NO: 7224 - DNA, 15 bp, Homo sapiens
tcctcgctcccgcct

SEQ ID NO: 7225 - DNA, 15 bp, Homo sapiens
gtcctcgctcccgcc

SEQ ID NO: 7226 - DNA, 15 bp, Homo sapiens
cgtcctcgctcccgc

SEQ ID NO: 7227 - DNA, 15 bp, Homo sapiens
tcgtcctcgctcccg

SEQ ID NO: 7228 - DNA, 15 bp, Homo sapiens
ctcgtcctcgctccc

SEQ ID NO: 7229 - DNA, 15 bp, Homo sapiens
tctcgtcctcgctcc

SEQ ID NO: 7230 - DNA, 15 bp, Homo sapiens
ctctcgtcctcgctc

SEQ ID NO: 7231 - DNA, 15 bp, Homo sapiens
gctctcgtcctcgct

SEQ ID NO: 7232 - DNA, 15 bp, Homo sapiens
agctctcgtcctcgc

SEQ ID NO: 7233 - DNA, 15 bp, Homo sapiens
cagctctcgtcctcg

SEQ ID NO: 7234 - DNA, 15 bp, Homo sapiens
ccagctctcgtcctc

SEQ ID NO: 7235 - DNA, 15 bp, Homo sapiens
gccagctctcgtcct

SEQ ID NO: 7236 - DNA, 15 bp, Homo sapiens
cgccagctctcgtcc

SEQ ID NO: 7237 - DNA, 15 bp, Homo sapiens
ccgccagctctcgtc

SEQ ID NO: 7238 - DNA, 15 bp, Homo sapiens
tccgccagctctcgt

SEQ ID NO: 7239 - DNA, 15 bp, Homo sapiens
atccgccagctctcg

SEQ ID NO: 7240 - DNA, 15 bp, Homo sapiens
tatccgccagctctc

SEQ ID NO: 7241 - DNA, 15 bp, Homo sapiens
ctatccgccagctct

SEQ ID NO: 7242 - DNA, 15 bp, Homo sapiens
gctatccgccagctc

SEQ ID NO: 7243 - DNA, 15 bp, Homo sapiens
ggctatccgccagct

SEQ ID NO: 7244 - DNA, 15 bp, Homo sapiens
tggctatccgccagc

SEQ ID NO: 7245 - DNA, 15 bp, Homo sapiens
ttggctatccgccag

SEQ ID NO: 7246 - DNA, 15 bp, Homo sapiens
attggctatccgcca

SEQ ID NO: 7247 - DNA, 15 bp, Homo sapiens
cattggctatccgcc

SEQ ID NO: 7248 - DNA, 15 bp, Homo sapiens
tcattggctatccgc

SEQ ID NO: 7249 - DNA, 15 bp, Homo sapiens
ctcattggctatccg

SEQ ID NO: 7250 - DNA, 15 bp, Homo sapiens
cctcattggctatcc

SEQ ID NO: 7251 - DNA, 15 bp, Homo sapiens
ccctcattggctatc

SEQ ID NO: 7252 - DNA, 15 bp, Homo sapiens
tccctcattggctat

SEQ ID NO: 7253 - DNA, 15 bp, Homo sapiens
ctccctcattggcta

SEQ ID NO: 7254 - DNA, 15 bp, Homo sapiens
gctccctcattggct

SEQ ID NO: 7255 - DNA, 15 bp, Homo sapiens
ggctccctcattggc

SEQ ID NO: 7256 - DNA, 15 bp, Homo sapiens
tggctccctcattgg

SEQ ID NO: 7257 - DNA, 15 bp, Homo sapiens
ctggctccctcattg

SEQ ID NO: 7258 - DNA, 15 bp, Homo sapiens
cctggctccctcatt

SEQ ID NO: 7259 - DNA, 15 bp, Homo sapiens
ccctggctccctcat

SEQ ID NO: 7260 - DNA, 15 bp, Homo sapiens
accctggctccctca

SEQ ID NO: 7261 - DNA, 15 bp, Homo sapiens
caccctggctccctc

SEQ ID NO: 7262 - DNA, 15 bp, Homo sapiens
tcaccctggctccct

SEQ ID NO: 7263 - DNA, 15 bp, Homo sapiens
ttcaccctggctccc

SEQ ID NO: 7264 - DNA, 15 bp, Homo sapiens
cttcaccctggctcc

SEQ ID NO: 7265 - DNA, 15 bp, Homo sapiens
ccttcaccctggctc

SEQ ID NO: 7266 - DNA, 15 bp, Homo sapiens
gccttcaccctggct

SEQ ID NO: 7267 - DNA, 15 bp, Homo sapiens
cgccttcaccctggc

SEQ ID NO: 7268 - DNA, 15 bp, Homo sapiens
acgccttcaccctgg

SEQ ID NO: 7269 - DNA, 15 bp, Homo sapiens
tacgccttcaccctg

SEQ ID NO: 7270 - DNA, 15 bp, Homo sapiens
ctacgccttcaccct

SEQ ID NO: 7271 - DNA, 15 bp, Homo sapiens
tctacgccttcaccc

SEQ ID NO: 7272 - DNA, 15 bp, Homo sapiens
ctctacgccttcacc

SEQ ID NO: 7273 - DNA, 15 bp, Homo sapiens
tctctacgccttcac

SEQ ID NO: 7274 - DNA, 15 bp, Homo sapiens
gtctctacgccttca

SEQ ID NO: 7275 - DNA, 15 bp, Homo sapiens
ggtctctacgccttc

SEQ ID NO: 7276 - DNA, 15 bp, Homo sapiens
aggtctctacgcctt

SEQ ID NO: 7277 - DNA, 15 bp, Homo sapiens
gaggtctctacgcct

SEQ ID NO: 7278 - DNA, 15 bp, Homo sapiens
tgaggtctctacgcc

SEQ ID NO: 7279 - DNA, 15 bp, Homo sapiens
ttgaggtctctacgc

SEQ ID NO: 7280 - DNA, 15 bp, Homo sapiens
tttgaggtctctacg

SEQ ID NO: 7281 - DNA, 15 bp, Homo sapiens
ctttgaggtctctac

SEQ ID NO: 7282 - DNA, 15 bp, Homo sapiens
cctttgaggtctcta

SEQ ID NO: 7283 - DNA, 15 bp, Homo sapiens
tcctttgaggtctct

SEQ ID NO: 7284 - DNA, 15 bp, Homo sapiens
gtcctttgaggtctc

SEQ ID NO: 7285 - DNA, 15 bp, Homo sapiens
tgtcctttgaggtct

SEQ ID NO: 7286 - DNA, 15 bp, Homo sapiens
ctgtcctttgaggtc

SEQ ID NO: 7287 - DNA, 15 bp, Homo sapiens
actgtcctttgaggt

SEQ ID NO: 7288 - DNA, 15 bp, Homo sapiens
tactgtcctttgagg

SEQ ID NO: 7289 - DNA, 15 bp, Homo sapiens
gtactgtcctttgag

SEQ ID NO: 7290 - DNA, 15 bp, Homo sapiens
agtactgtcctttga

SEQ ID NO: 7291 - DNA, 15 bp, Homo sapiens
tagtactgtcctttg

SEQ ID NO: 7292 - DNA, 15 bp, Homo sapiens
ctagtactgtccttt

SEQ ID NO: 7293 - DNA, 15 bp, Homo sapiens
actagtactgtcctt

SEQ ID NO: 7294 - DNA, 15 bp, Homo sapiens
tactagtactgtcct

SEQ ID NO: 7295 - DNA, 15 bp, Homo sapiens
atactagtactgtcc

SEQ ID NO: 7296 - DNA, 15 bp, Homo sapiens
catactagtactgtc

SEQ ID NO: 7297 - DNA, 15 bp, Homo sapiens
ccatactagtactgt

SEQ ID NO: 7298 - DNA, 15 bp, Homo sapiens
cccatactagtactg

SEQ ID NO: 7299 - DNA, 15 bp, Homo sapiens
tcccatactagtact

SEQ ID NO: 7300 - DNA, 15 bp, Homo sapiens
atcccatactagtac

SEQ ID NO: 7301 - DNA, 15 bp, Homo sapiens
catcccatactagta

SEQ ID NO: 7302 - DNA, 15 bp, Homo sapiens
tcatcccatactagt

SEQ ID NO: 7303 - DNA, 15 bp, Homo sapiens
ctcatcccatactag

SEQ ID NO: 7304 - DNA, 15 bp, Homo sapiens
gctcatcccatacta

SEQ ID NO: 7305 - DNA, 15 bp, Homo sapiens
ggctcatcccatact

SEQ ID NO: 7306 - DNA, 15 bp, Homo sapiens
tggctcatcccatac

SEQ ID NO: 7307 - DNA, 15 bp, Homo sapiens
ttggctcatcccata

SEQ ID NO: 7308 - DNA, 15 bp, Homo sapiens
attggctcatcccat

SEQ ID NO: 7309 - DNA, 15 bp, Homo sapiens
cattggctcatccca

SEQ ID NO: 7310 - DNA, 15 bp, Homo sapiens
gcattggctcatccc

SEQ ID NO: 7311 - DNA, 15 bp, Homo sapiens
ggcattggctcatcc

SEQ ID NO: 7312 - DNA, 15 bp, Homo sapiens
cggcattggctcatc

SEQ ID NO: 7313 - DNA, 15 bp, Homo sapiens
tcggcattggctcat

SEQ ID NO: 7314 - DNA, 15 bp, Homo sapiens
ctcggcattggctca

SEQ ID NO: 7315 - DNA, 15 bp, Homo sapiens
cctcggcattggctc

SEQ ID NO: 7316 - DNA, 15 bp, Homo sapiens
gcctcggcattggct

SEQ ID NO: 7317 - DNA, 15 bp, Homo sapiens
agcctcggcattggc

SEQ ID NO: 7318 - DNA, 15 bp, Homo sapiens
tagcctcggcattgg

SEQ ID NO: 7319 - DNA, 15 bp, Homo sapiens
ctagcctcggcattg

SEQ ID NO: 7320 - DNA, 15 bp, Homo sapiens
tctagcctcggcatt

SEQ ID NO: 7321 - DNA, 15 bp, Homo sapiens
atctagcctcggcat

SEQ ID NO: 7322 - DNA, 15 bp, Homo sapiens
tatctagcctcggca

SEQ ID NO: 7323 - DNA, 15 bp, Homo sapiens
ctatctagcctcggc

SEQ ID NO: 7324 - DNA, 15 bp, Homo sapiens
actatctagcctcgg

SEQ ID NO: 7325 - DNA, 15 bp, Homo sapiens
cactatctagcctcg

SEQ ID NO: 7326 - DNA, 15 bp, Homo sapiens
gcactatctagcctc

SEQ ID NO: 7327 - DNA, 15 bp, Homo sapiens
tgcactatctagcct

SEQ ID NO: 7328 - DNA, 15 bp, Homo sapiens
ctgcactatctagcc

SEQ ID NO: 7329 - DNA, 15 bp, Homo sapiens
gctgcactatctagc

SEQ ID NO: 7330 - DNA, 15 bp, Homo sapiens
cgctgcactatctag

SEQ ID NO: 7331 - DNA, 15 bp, Homo sapiens
ccgctgcactatcta

SEQ ID NO: 7332 - DNA, 15 bp, Homo sapiens
cccgctgcactatct

SEQ ID NO: 7333 - DNA, 15 bp, Homo sapiens
tcccgctgcactatc

SEQ ID NO: 7334 - DNA, 15 bp, Homo sapiens
gtcccgctgcactat

SEQ ID NO: 7335 - DNA, 15 bp, Homo sapiens
cgtcccgctgcacta

SEQ ID NO: 7336 - DNA, 15 bp, Homo sapiens
ccgtcccgctgcact

SEQ ID NO: 7337 - DNA, 15 bp, Homo sapiens
tccgtcccgctgcac

SEQ ID NO: 7338 - DNA, 15 bp, Homo sapiens
ctccgtcccgctgca

SEQ ID NO: 7339 - DNA, 15 bp, Homo sapiens
cctccgtcccgctgc

SEQ ID NO: 7340 - DNA, 15 bp, Homo sapiens
ccctccgtcccgctg

SEQ ID NO: 7341 - DNA, 15 bp, Homo sapiens
tccctccgtcccgct

SEQ ID NO: 7342 - DNA, 15 bp, Homo sapiens
ctccctccgtcccgc

SEQ ID NO: 7343 - DNA, 15 bp, Homo sapiens
cctccctccgtcccg

SEQ ID NO: 7344 - DNA, 15 bp, Homo sapiens
tcctccctccgtccc

SEQ ID NO: 7345 - DNA, 15 bp, Homo sapiens
gtcctccctccgtcc

SEQ ID NO: 7346 - DNA, 15 bp, Homo sapiens
agtcctccctccgtc

SEQ ID NO: 7347 - DNA, 15 bp, Homo sapiens
aagtcctccctccgt

SEQ ID NO: 7348 - DNA, 15 bp, Homo sapiens
caagtcctccctccg

SEQ ID NO: 7349 - DNA, 15 bp, Homo sapiens
ccaagtcctccctcc

SEQ ID NO: 7350 - DNA, 15 bp, Homo sapiens
tccaagtcctccctc

SEQ ID NO: 7351 - DNA, 15 bp, Homo sapiens
ctccaagtcctccct

SEQ ID NO: 7352 - DNA, 15 bp, Homo sapiens
cctccaagtcctccc

SEQ ID NO: 7353 - DNA, 15 bp, Homo sapiens
gcctccaagtcctcc

SEQ ID NO: 7354 - DNA, 15 bp, Homo sapiens
tgcctccaagtcctc

SEQ ID NO: 7355 - DNA, 15 bp, Homo sapiens
ttgcctccaagtcct

SEQ ID NO: 7356 - DNA, 15 bp, Homo sapiens
cttgcctccaagtcc

SEQ ID NO: 7357 - DNA, 15 bp, Homo sapiens
tcttgcctccaagtc

SEQ ID NO: 7358 - DNA, 15 bp, Homo sapiens
atcttgcctccaagt

SEQ ID NO: 7359 - DNA, 15 bp, Homo sapiens
catcttgcctccaag

SEQ ID NO: 7360 - DNA, 15 bp, Homo sapiens
ccatcttgcctccaa

SEQ ID NO: 7361 - DNA, 15 bp, Homo sapiens
cccatcttgcctcca

SEQ ID NO: 7362 - DNA, 15 bp, Homo sapiens
ccccatcttgcctcc

SEQ ID NO: 7363 - DNA, 15 bp, Homo sapiens
tccccatcttgcctc

SEQ ID NO: 7364 - DNA, 15 bp, Homo sapiens
ttccccatcttgcct

SEQ ID NO: 7365 - DNA, 15 bp, Homo sapiens
tttccccatcttgcc

SEQ ID NO: 7366 - DNA, 15 bp, Homo sapiens
ttttccccatcttgc

SEQ ID NO: 7367 - DNA, 15 bp, Homo sapiens
tttttccccatcttg

SEQ ID NO: 7368 - DNA, 15 bp, Homo sapiens
ttttttccccatctt

SEQ ID NO: 7369 - DNA, 15 bp, Homo sapiens
cttttttccccatct

SEQ ID NO: 7370 - DNA, 15 bp, Homo sapiens
gcttttttccccatc

SEQ ID NO: 7371 - DNA, 15 bp, Homo sapiens
tgcttttttccccat

SEQ ID NO: 7372 - DNA, 15 bp, Homo sapiens
ctgcttttttcccca

SEQ ID NO: 7373 - DNA, 15 bp, Homo sapiens
tctgcttttttcccc

SEQ ID NO: 7374 - DNA, 15 bp, Homo sapiens
ctctgcttttttccc

SEQ ID NO: 7375 - DNA, 15 bp, Homo sapiens
gctctgcttttttcc

SEQ ID NO: 7376 - DNA, 15 bp, Homo sapiens
ggctctgcttttttc

SEQ ID NO: 7377 - DNA, 15 bp, Homo sapiens
cggctctgctttttt

SEQ ID NO: 7378 - DNA, 15 bp, Homo sapiens
tcggctctgcttttt

SEQ ID NO: 7379 - DNA, 15 bp, Homo sapiens
gtcggctctgctttt

SEQ ID NO: 7380 - DNA, 15 bp, Homo sapiens
cgtcggctctgcttt

SEQ ID NO: 7381 - DNA, 15 bp, Homo sapiens
ccgtcggctctgctt

SEQ ID NO: 7382 - DNA, 15 bp, Homo sapiens
cccgtcggctctgct

SEQ ID NO: 7383 - DNA, 15 bp, Homo sapiens
ccccgtcggctctgc

SEQ ID NO: 7384 - DNA, 15 bp, Homo sapiens
cccccgtcggctctg

SEQ ID NO: 7385 - DNA, 15 bp, Homo sapiens
gcccccgtcggctct

SEQ ID NO: 7386 - DNA, 15 bp, Homo sapiens
tgcccccgtcggctc

SEQ ID NO: 7387 - DNA, 15 bp, Homo sapiens
ctgcccccgtcggct

SEQ ID NO: 7388 - DNA, 15 bp, Homo sapiens
actgcccccgtcggc

SEQ ID NO: 7389 - DNA, 15 bp, Homo sapiens
cactgcccccgtcgg

SEQ ID NO: 7390 - DNA, 15 bp, Homo sapiens
acactgcccccgtcg

SEQ ID NO: 7391 - DNA, 15 bp, Homo sapiens
tacactgcccccgtc

SEQ ID NO: 7392 - DNA, 15 bp, Homo sapiens
ctacactgcccccgt

SEQ ID NO: 7393 - DNA, 15 bp, Homo sapiens
cctacactgcccccg

SEQ ID NO: 7394 - DNA, 15 bp, Homo sapiens
acctacactgccccc

SEQ ID NO: 7395 - DNA, 15 bp, Homo sapiens
cacctacactgcccc

SEQ ID NO: 7396 - DNA, 15 bp, Homo sapiens
ccacctacactgccc

SEQ ID NO: 7397 - DNA, 15 bp, Homo sapiens
accacctacactgcc

SEQ ID NO: 7398 - DNA, 15 bp, Homo sapiens
caccacctacactgc

SEQ ID NO: 7399 - DNA, 15 bp, Homo sapiens
acaccacctacactg

SEQ ID NO: 7400 - DNA, 15 bp, Homo sapiens
cacaccacctacact

SEQ ID NO: 7401 - DNA, 15 bp, Homo sapiens
tcacaccacctacac

SEQ ID NO: 7402 - DNA, 15 bp, Homo sapiens
ttcacaccacctaca

SEQ ID NO: 7403 - DNA, 15 bp, Homo sapiens
cttcacaccacctac

SEQ ID NO: 7404 - DNA, 15 bp, Homo sapiens
ccttcacaccaccta

SEQ ID NO: 7405 - DNA, 15 bp, Homo sapiens
cccttcacaccacct

SEQ ID NO: 7406 - DNA, 15 bp, Homo sapiens
tcccttcacaccacc

SEQ ID NO: 7407 - DNA, 15 bp, Homo sapiens
ctcccttcacaccac

SEQ ID NO: 7408 - DNA, 15 bp, Homo sapiens
cctcccttcacacca

SEQ ID NO: 7409 - DNA, 15 bp, Homo sapiens
gcctcccttcacacc

SEQ ID NO: 7410 - DNA, 15 bp, Homo sapiens
tgcctcccttcacac

SEQ ID NO: 7411 - DNA, 15 bp, Homo sapiens
atgcctcccttcaca

SEQ ID NO: 7412 - DNA, 15 bp, Homo sapiens
catgcctcccttcac

SEQ ID NO: 7413 - DNA, 15 bp, Homo sapiens
tcatgcctcccttca

SEQ ID NO: 7414 - DNA, 15 bp, Homo sapiens
ctcatgcctcccttc

SEQ ID NO: 7415 - DNA, 15 bp, Homo sapiens
actcatgcctccctt

SEQ ID NO: 7416 - DNA, 15 bp, Homo sapiens
tactcatgcctccct

SEQ ID NO: 7417 - DNA, 15 bp, Homo sapiens
ctactcatgcctccc

SEQ ID NO: 7418 - DNA, 15 bp, Homo sapiens
gctactcatgcctcc

SEQ ID NO: 7419 - DNA, 15 bp, Homo sapiens
ggctactcatgcctc

SEQ ID NO: 7420 - DNA, 15 bp, Homo sapiens
tggctactcatgcct

SEQ ID NO: 7421 - DNA, 15 bp, Homo sapiens
ttggctactcatgcc

SEQ ID NO: 7422 - DNA, 15 bp, Homo sapiens
attggctactcatgc

SEQ ID NO: 7423 - DNA, 15 bp, Homo sapiens
tattggctactcatg

SEQ ID NO: 7424 - DNA, 15 bp, Homo sapiens
ttattggctactcat

SEQ ID NO: 7425 - DNA, 15 bp, Homo sapiens
cttattggctactca

SEQ ID NO: 7426 - DNA, 15 bp, Homo sapiens
ccttattggctactc

SEQ ID NO: 7427 - DNA, 15 bp, Homo sapiens
tccttattggctact

SEQ ID NO: 7428 - DNA, 15 bp, Homo sapiens
ctccttattggctac

SEQ ID NO: 7429 - DNA, 15 bp, Homo sapiens
cctccttattggcta

SEQ ID NO: 7430 - DNA, 15 bp, Homo sapiens
gcctccttattggct

SEQ ID NO: 7431 - DNA, 15 bp, Homo sapiens
agcctccttattggc

SEQ ID NO: 7432 - DNA, 15 bp, Homo sapiens
cagcctccttattgg

SEQ ID NO: 7433 - DNA, 15 bp, Homo sapiens
ccagcctccttattg

SEQ ID NO: 7434 - DNA, 15 bp, Homo sapiens
tccagcctccttatt

SEQ ID NO: 7435 - DNA, 15 bp, Homo sapiens
ctccagcctccttat

SEQ ID NO: 7436 - DNA, 15 bp, Homo sapiens
tctccagcctcctta

SEQ ID NO: 7437 - DNA, 15 bp, Homo sapiens
ctctccagcctcctt

SEQ ID NO: 7438 - DNA, 15 bp, Homo sapiens
cctctccagcctcct

SEQ ID NO: 7439 - DNA, 15 bp, Homo sapiens
tcctctccagcctcc

SEQ ID NO: 7440 - DNA, 15 bp, Homo sapiens
ctcctctccagcctc

SEQ ID NO: 7441 - DNA, 15 bp, Homo sapiens
cctcctctccagcct

SEQ ID NO: 7442 - DNA, 15 bp, Homo sapiens
tcctcctctccagcc

SEQ ID NO: 7443 - DNA, 15 bp, Homo sapiens
gtcctcctctccagc

SEQ ID NO: 7444 - DNA, 15 bp, Homo sapiens
cgtcctcctctccag

SEQ ID NO: 7445 - DNA, 15 bp, Homo sapiens
gcgtcctcctctcca

SEQ ID NO: 7446 - DNA, 15 bp, Homo sapiens
agcgtcctcctctcc

SEQ ID NO: 7447 - DNA, 15 bp, Homo sapiens
cagcgtcctcctctc

SEQ ID NO: 7448 - DNA, 15 bp, Homo sapiens
acagcgtcctcctct

SEQ ID NO: 7449 - DNA, 15 bp, Homo sapiens
cacagcgtcctcctc

SEQ ID NO: 7450 - DNA, 15 bp, Homo sapiens
acacagcgtcctcct

SEQ ID NO: 7451 - DNA, 15 bp, Homo sapiens
tacacagcgtcctcc

SEQ ID NO: 7452 - DNA, 15 bp, Homo sapiens
ctacacagcgtcctc

SEQ ID NO: 7453 - DNA, 15 bp, Homo sapiens
tctacacagcgtcct

SEQ ID NO: 7454 - DNA, 15 bp, Homo sapiens
gtctacacagcgtcc

SEQ ID NO: 7455 - DNA, 15 bp, Homo sapiens
tgtctacacagcgtc

SEQ ID NO: 7456 - DNA, 15 bp, Homo sapiens
ctgtctacacagcgt

SEQ ID NO: 7457 - DNA, 15 bp, Homo sapiens
tctgtctacacagcg

SEQ ID NO: 7458 - DNA, 15 bp, Homo sapiens
ctctgtctacacagc

SEQ ID NO: 7459 - DNA, 15 bp, Homo sapiens
actctgtctacacag

SEQ ID NO: 7460 - DNA, 15 bp, Homo sapiens
gactctgtctacaca

SEQ ID NO: 7461 - DNA, 15 bp, Homo sapiens
agactctgtctacac

SEQ ID NO: 7462 - DNA, 15 bp, Homo sapiens
cagactctgtctaca

SEQ ID NO: 7463 - DNA, 15 bp, Homo sapiens
tcagactctgtctac

SEQ ID NO: 7464 - DNA, 15 bp, Homo sapiens
ctcagactctgtcta

SEQ ID NO: 7465 - DNA, 15 bp, Homo sapiens
cctcagactctgtct

SEQ ID NO: 7466 - DNA, 15 bp, Homo sapiens
acctcagactctgtc

SEQ ID NO: 7467 - DNA, 15 bp, Homo sapiens
tacctcagactctgt

SEQ ID NO: 7468 - DNA, 15 bp, Homo sapiens
atacctcagactctg

SEQ ID NO: 7469 - DNA, 15 bp, Homo sapiens
aatacctcagactct

SEQ ID NO: 7470 - DNA, 15 bp, Homo sapiens
caatacctcagactc

SEQ ID NO: 7471 - DNA, 15 bp, Homo sapiens
ccaatacctcagact

SEQ ID NO: 7472 - DNA, 15 bp, Homo sapiens
cccaatacctcagac

SEQ ID NO: 7473 - DNA, 15 bp, Homo sapiens
acccaatacctcaga

SEQ ID NO: 7474 - DNA, 15 bp, Homo sapiens
cacccaatacctcag

SEQ ID NO: 7475 - DNA, 15 bp, Homo sapiens
ccacccaatacctca

SEQ ID NO: 7476 - DNA, 15 bp, Homo sapiens
gccacccaatacctc

SEQ ID NO: 7477 - DNA, 15 bp, Homo sapiens
ggccacccaatacct

SEQ ID NO: 7478 - DNA, 15 bp, Homo sapiens
cggccacccaatacc

SEQ ID NO: 7479 - DNA, 15 bp, Homo sapiens
ccggccacccaatac

SEQ ID NO: 7480 - DNA, 15 bp, Homo sapiens
tccggccacccaata

SEQ ID NO: 7481 - DNA, 15 bp, Homo sapiens
gtccggccacccaat

SEQ ID NO: 7482 - DNA, 15 bp, Homo sapiens
tgtccggccacccaa

SEQ ID NO: 7483 - DNA, 15 bp, Homo sapiens
ctgtccggccaccca

SEQ ID NO: 7484 - DNA, 15 bp, Homo sapiens
gctgtccggccaccc

SEQ ID NO: 7485 - DNA, 15 bp, Homo sapiens
tgctgtccggccacc

SEQ ID NO: 7486 - DNA, 15 bp, Homo sapiens
ctgctgtccggccac

SEQ ID NO: 7487 - DNA, 15 bp, Homo sapiens
tctgctgtccggcca

SEQ ID NO: 7488 - DNA, 15 bp, Homo sapiens
ttctgctgtccggcc

SEQ ID NO: 7489 - DNA, 15 bp, Homo sapiens
gttctgctgtccggc

SEQ ID NO: 7490 - DNA, 15 bp, Homo sapiens
ggttctgctgtccgg

SEQ ID NO: 7491 - DNA, 15 bp, Homo sapiens
tggttctgctgtccg

SEQ ID NO: 7492 - DNA, 15 bp, Homo sapiens
atggttctgctgtcc

SEQ ID NO: 7493 - DNA, 15 bp, Homo sapiens
tatggttctgctgtc

SEQ ID NO: 7494 - DNA, 15 bp, Homo sapiens
ctatggttctgctgt

SEQ ID NO: 7495 - DNA, 15 bp, Homo sapiens
tctatggttctgctg

SEQ ID NO: 7496 - DNA, 15 bp, Homo sapiens
ttctatggttctgct

SEQ ID NO: 7497 - DNA, 15 bp, Homo sapiens
gttctatggttctgc

SEQ ID NO: 7498 - DNA, 15 bp, Homo sapiens
cgttctatggttctg

SEQ ID NO: 7499 - DNA, 15 bp, Homo sapiens
gcgttctatggttct

SEQ ID NO: 7500 - DNA, 15 bp, Homo sapiens
tgcgttctatggttc

SEQ ID NO: 7501 - DNA, 15 bp, Homo sapiens
ctgcgttctatggtt

SEQ ID NO: 7502 - DNA, 15 bp, Homo sapiens
cctgcgttctatggt

SEQ ID NO: 7503 - DNA, 15 bp, Homo sapiens
gcctgcgttctatgg

SEQ ID NO: 7504 - DNA, 15 bp, Homo sapiens
tgcctgcgttctatg

SEQ ID NO: 7505 - DNA, 15 bp, Homo sapiens
ctgcctgcgttctat

SEQ ID NO: 7506 - DNA, 15 bp, Homo sapiens
gctgcctgcgttcta

SEQ ID NO: 7507 - DNA, 15 bp, Homo sapiens
ggctgcctgcgttct

SEQ ID NO: 7508 - DNA, 15 bp, Homo sapiens
tggctgcctgcgttc

SEQ ID NO: 7509 - DNA, 15 bp, Homo sapiens
atggctgcctgcgtt

SEQ ID NO: 7510 - DNA, 15 bp, Homo sapiens
aatggctgcctgcgt

SEQ ID NO: 7511 - DNA, 15 bp, Homo sapiens
taatggctgcctgcg

SEQ ID NO: 7512 - DNA, 15 bp, Homo sapiens
ctaatggctgcctgc

SEQ ID NO: 7513 - DNA, 15 bp, Homo sapiens
cctaatggctgcctg

SEQ ID NO: 7514 - DNA, 15 bp, Homo sapiens
tcctaatggctgcct

SEQ ID NO: 7515 - DNA, 15 bp, Homo sapiens
ttcctaatggctgcc

SEQ ID NO: 7516 - DNA, 15 bp, Homo sapiens
tttcctaatggctgc

SEQ ID NO: 7517 - DNA, 15 bp, Homo sapiens
ttttcctaatggctg

SEQ ID NO: 7518 - DNA, 15 bp, Homo sapiens
tttttcctaatggct

SEQ ID NO: 7519 - DNA, 15 bp, Homo sapiens
atttttcctaatggc

SEQ ID NO: 7520 - DNA, 15 bp, Homo sapiens
catttttcctaatgg

SEQ ID NO: 7521 - DNA, 15 bp, Homo sapiens
acatttttcctaatg

SEQ ID NO: 7522 - DNA, 15 bp, Homo sapiens
cacatttttcctaat

SEQ ID NO: 7523 - DNA, 15 bp, Homo sapiens
gcacatttttcctaa

SEQ ID NO: 7524 - DNA, 15 bp, Homo sapiens
agcacatttttccta

SEQ ID NO: 7525 - DNA, 15 bp, Homo sapiens
aagcacatttttcct

SEQ ID NO: 7526 - DNA, 15 bp, Homo sapiens
gaagcacatttttcc

SEQ ID NO: 7527 - DNA, 15 bp, Homo sapiens
agaagcacatttttc

SEQ ID NO: 7528 - DNA, 15 bp, Homo sapiens
gagaagcacattttt

SEQ ID NO: 7529 - DNA, 15 bp, Homo sapiens
tgagaagcacatttt

SEQ ID NO: 7530 - DNA, 15 bp, Homo sapiens
ctgagaagcacattt

SEQ ID NO: 7531 - DNA, 15 bp, Homo sapiens
cctgagaagcacatt

SEQ ID NO: 7532 - DNA, 15 bp, Homo sapiens
ccctgagaagcacat

SEQ ID NO: 7533 - DNA, 15 bp, Homo sapiens
tccctgagaagcaca

SEQ ID NO: 7534 - DNA, 15 bp, Homo sapiens
atccctgagaagcac

SEQ ID NO: 7535 - DNA, 15 bp, Homo sapiens
catccctgagaagca

SEQ ID NO: 7536 - DNA, 15 bp, Homo sapiens
ccatccctgagaagc

SEQ ID NO: 7537 - DNA, 15 bp, Homo sapiens
cccatccctgagaag

SEQ ID NO: 7538 - DNA, 15 bp, Homo sapiens
ccccatccctgagaa

SEQ ID NO: 7539 - DNA, 15 bp, Homo sapiens
accccatccctgaga

SEQ ID NO: 7540 - DNA, 15 bp, Homo sapiens
aaccccatccctgag

SEQ ID NO: 7541 - DNA, 15 bp, Homo sapiens
taaccccatccctga

SEQ ID NO: 7542 - DNA, 15 bp, Homo sapiens
gtaaccccatccctg

SEQ ID NO: 7543 - DNA, 15 bp, Homo sapiens
ggtaaccccatccct

SEQ ID NO: 7544 - DNA, 15 bp, Homo sapiens
gggtaaccccatccc

SEQ ID NO: 7545 - DNA, 15 bp, Homo sapiens
agggtaaccccatcc

SEQ ID NO: 7546 - DNA, 15 bp, Homo sapiens
gagggtaaccccatc

SEQ ID NO: 7547 - DNA, 15 bp, Homo sapiens
agagggtaaccccat

SEQ ID NO: 7548 - DNA, 15 bp, Homo sapiens
gagagggtaacccca

SEQ ID NO: 7549 - DNA, 15 bp, Homo sapiens
ggagagggtaacccc

SEQ ID NO: 7550 - DNA, 15 bp, Homo sapiens
gggagagggtaaccc

SEQ ID NO: 7551 - DNA, 15 bp, Homo sapiens
agggagagggtaacc

SEQ ID NO: 7552 - DNA, 15 bp, Homo sapiens
tagggagagggtaac

SEQ ID NO: 7553 - DNA, 15 bp, Homo sapiens
ttagggagagggtaa

SEQ ID NO: 7554 - DNA, 15 bp, Homo sapiens
aaaataggacaacct

SEQ ID NO: 7555 - DNA, 15 bp, Homo sapiens
taaaataggacaacc

SEQ ID NO: 7556 - DNA, 15 bp, Homo sapiens
ataaaataggacaac

SEQ ID NO: 7557 - DNA, 15 bp, Homo sapiens
cataaaataggacaa

SEQ ID NO: 7558 - DNA, 15 bp, Homo sapiens
gcataaaataggaca

SEQ ID NO: 7559 - DNA, 15 bp, Homo sapiens
agcataaaataggac

SEQ ID NO: 7560 - DNA, 15 bp, Homo sapiens
gagcataaaatagga

SEQ ID NO: 7561 - DNA, 15 bp, Homo sapiens
ggagcataaaatagg

SEQ ID NO: 7562 - DNA, 15 bp, Homo sapiens
gggagcataaaatag

SEQ ID NO: 7563 - DNA, 15 bp, Homo sapiens
agggagcataaaata

SEQ ID NO: 7564 - DNA, 15 bp, Homo sapiens
gagggagcataaaat

SEQ ID NO: 7565 - DNA, 15 bp, Homo sapiens
agagggagcataaaa

SEQ ID NO: 7566 - DNA, 15 bp, Homo sapiens
tagagggagcataaa

SEQ ID NO: 7567 - DNA, 15 bp, Homo sapiens
gtagagggagcataa

SEQ ID NO: 7568 - DNA, 15 bp, Homo sapiens
agtagagggagcata

SEQ ID NO: 7569 - DNA, 15 bp, Homo sapiens
aagtagagggagcat

SEQ ID NO: 7570 - DNA, 15 bp, Homo sapiens
taagtagagggagca

SEQ ID NO: 7571 - DNA, 15 bp, Homo sapiens
ttaagtagagggagc

SEQ ID NO: 7572 - DNA, 15 bp, Homo sapiens
cttaagtagagggag

SEQ ID NO: 7573 - DNA, 15 bp, Homo sapiens
gcttaagtagaggga

SEQ ID NO: 7574 - DNA, 15 bp, Homo sapiens
agcttaagtagaggg

SEQ ID NO: 7575 - DNA, 15 bp, Homo sapiens
tagcttaagtagagg

SEQ ID NO: 7576 - DNA, 15 bp, Homo sapiens
ttagcttaagtagag

SEQ ID NO: 7577 - DNA, 15 bp, Homo sapiens
gttagcttaagtaga

SEQ ID NO: 7578 - DNA, 15 bp, Homo sapiens
ggttagcttaagtag

SEQ ID NO: 7579 - DNA, 15 bp, Homo sapiens
gggttagcttaagta

SEQ ID NO: 7580 - DNA, 15 bp, Homo sapiens
agggttagcttaagt

SEQ ID NO: 7581 - DNA, 15 bp, Homo sapiens
tagggttagcttaag

SEQ ID NO: 7582 - DNA, 15 bp, Homo sapiens
ctagggttagcttaa

SEQ ID NO: 7583 - DNA, 15 bp, Homo sapiens
cctagggttagctta

SEQ ID NO: 7584 - DNA, 15 bp, Homo sapiens
acctagggttagctt

SEQ ID NO: 7585 - DNA, 15 bp, Homo sapiens
cacctagggttagct

SEQ ID NO: 7586 - DNA, 15 bp, Homo sapiens
tcacctagggttagc

SEQ ID NO: 7587 - DNA, 15 bp, Homo sapiens
ctcacctagggttag

SEQ ID NO: 7588 - DNA, 15 bp, Homo sapiens
actcacctagggtta

SEQ ID NO: 7589 - DNA, 15 bp, Homo sapiens
tactcacctagggtt

SEQ ID NO: 7590 - DNA, 15 bp, Homo sapiens
atactcacctagggt

SEQ ID NO: 7591 - DNA, 15 bp, Homo sapiens
aatactcacctaggg

SEQ ID NO: 7592 - DNA, 15 bp, Homo sapiens
taatactcacctagg

SEQ ID NO: 7593 - DNA, 15 bp, Homo sapiens
ataatactcacctag

SEQ ID NO: 7594 - DNA, 15 bp, Homo sapiens
aataatactcaccta

SEQ ID NO: 7595 - DNA, 15 bp, Homo sapiens
taataatactcacct

SEQ ID NO: 7596 - DNA, 15 bp, Homo sapiens
ataataatactcacc

SEQ ID NO: 7597 - DNA, 15 bp, Homo sapiens
cataataatactcac

SEQ ID NO: 7598 - DNA, 15 bp, Homo sapiens
acataataatactca

SEQ ID NO: 7599 - DNA, 15 bp, Homo sapiens
aacataataatactc

SEQ ID NO: 7600 - DNA, 15 bp, Homo sapiens
aaacataataatact

SEQ ID NO: 7601 - DNA, 15 bp, Homo sapiens
aaaacataataatac

SEQ ID NO: 7602 - DNA, 15 bp, Homo sapiens
taaaacataataata

SEQ ID NO: 7603 - DNA, 15 bp, Homo sapiens
ttaaaacataataat

SEQ ID NO: 7604 - DNA, 15 bp, Homo sapiens
attaaaacataataa

SEQ ID NO: 7605 - DNA, 15 bp, Homo sapiens
aattaaaacataata

SEQ ID NO: 7606 - DNA, 15 bp, Homo sapiens
taattaaaacataat

SEQ ID NO: 7607 - DNA, 15 bp, Homo sapiens
ataattaaaacataa

SEQ ID NO: 7608 - DNA, 15 bp, Homo sapiens
aataattaaaacata

SEQ ID NO: 7609 - DNA, 15 bp, Homo sapiens
aaataattaaaacat

SEQ ID NO: 7610 - DNA, 15 bp, Homo sapiens
gaaataattaaaaca

SEQ ID NO: 7611 - DNA, 15 bp, Homo sapiens
ggaaataattaaaac

SEQ ID NO: 7612 - DNA, 15 bp, Homo sapiens
gggaaataattaaaa

SEQ ID NO: 7613 - DNA, 15 bp, Homo sapiens
tgggaaataattaaa

SEQ ID NO: 7614 - DNA, 15 bp, Homo sapiens
ttgggaaataattaa

SEQ ID NO: 7615 - DNA, 15 bp, Homo sapiens
gttgggaaataatta

SEQ ID NO: 7616 - DNA, 15 bp, Homo sapiens
tgttgggaaataatt

SEQ ID NO: 7617 - DNA, 15 bp, Homo sapiens
atgttgggaaataat

SEQ ID NO: 7618 - DNA, 15 bp, Homo sapiens
catgttgggaaataa

SEQ ID NO: 7619 - DNA, 15 bp, Homo sapiens
tcatgttgggaaata

SEQ ID NO: 7620 - DNA, 15 bp, Homo sapiens
gtcatgttgggaaat

SEQ ID NO: 7621 - DNA, 15 bp, Homo sapiens
tgtcatgttgggaaa

SEQ ID NO: 7622 - DNA, 15 bp, Homo sapiens
ctgtcatgttgggaa

SEQ ID NO: 7623 - DNA, 15 bp, Homo sapiens
cctgtcatgttggga

SEQ ID NO: 7624 - DNA, 15 bp, Homo sapiens
acctgtcatgttggg

SEQ ID NO: 7625 - DNA, 15 bp, Homo sapiens
tacctgtcatgttgg

SEQ ID NO: 7626 - DNA, 15 bp, Homo sapiens
ttacctgtcatgttg

SEQ ID NO: 7627 - DNA, 15 bp, Homo sapiens
cttacctgtcatgtt

SEQ ID NO: 7628 - DNA, 15 bp, Homo sapiens
tcttacctgtcatgt

SEQ ID NO: 7629 - DNA, 15 bp, Homo sapiens
ttcttacctgtcatg

SEQ ID NO: 7630 - DNA, 15 bp, Homo sapiens
tttcttacctgtcat

SEQ ID NO: 7631 - DNA, 15 bp, Homo sapiens
ttttcttacctgtca

SEQ ID NO: 7632 - DNA, 15 bp, Homo sapiens
tttttcttacctgtc

SEQ ID NO: 7633 - DNA, 15 bp, Homo sapiens
gtttttcttacctgt

SEQ ID NO: 7634 - DNA, 15 bp, Homo sapiens
tgtttttcttacctg

SEQ ID NO: 7635 - DNA, 15 bp, Homo sapiens
gtgtttttcttacct

SEQ ID NO: 7636 - DNA, 15 bp, Homo sapiens
tgtgtttttcttacc

SEQ ID NO: 7637 - DNA, 15 bp, Homo sapiens
atgtgtttttcttac

SEQ ID NO: 7638 - DNA, 15 bp, Homo sapiens
aatgtgtttttctta

SEQ ID NO: 7639 - DNA, 15 bp, Homo sapiens
taatgtgtttttctt

SEQ ID NO: 7640 - DNA, 15 bp, Homo sapiens
ataatgtgtttttct

SEQ ID NO: 7641 - DNA, 15 bp, Homo sapiens
gataatgtgtttttc

SEQ ID NO: 7642 - DNA, 15 bp, Homo sapiens
tgataatgtgttttt

SEQ ID NO: 7643 - DNA, 15 bp, Homo sapiens
gtgataatgtgtttt

SEQ ID NO: 7644 - DNA, 15 bp, Homo sapiens
tgtgataatgtgttt

SEQ ID NO: 7645 - DNA, 15 bp, Homo sapiens
atgtgataatgtgtt

SEQ ID NO: 7646 - DNA, 15 bp, Homo sapiens
aatgtgataatgtgt

SEQ ID NO: 7647 - DNA, 15 bp, Homo sapiens
caatgtgataatgtg

SEQ ID NO: 7648 - DNA, 15 bp, Homo sapiens
acaatgtgataatgt

SEQ ID NO: 7649 - DNA, 15 bp, Homo sapiens
aacaatgtgataatg

SEQ ID NO: 7650 - DNA, 15 bp, Homo sapiens
caacaatgtgataat

SEQ ID NO: 7651 - DNA, 15 bp, Homo sapiens
tcaacaatgtgataa

SEQ ID NO: 7652 - DNA, 15 bp, Homo sapiens
ttcaacaatgtgata

SEQ ID NO: 7653 - DNA, 15 bp, Homo sapiens
tttcaacaatgtgat

SEQ ID NO: 7654 - DNA, 15 bp, Homo sapiens
atttcaacaatgtga

SEQ ID NO: 7655 - DNA, 15 bp, Homo sapiens
aatttcaacaatgtg

SEQ ID NO: 7656 - DNA, 15 bp, Homo sapiens
aaatttcaacaatgt

SEQ ID NO: 7657 - DNA, 15 bp, Homo sapiens
caaatttcaacaatg

SEQ ID NO: 7658 - DNA, 15 bp, Homo sapiens
gcaaatttcaacaat

SEQ ID NO: 7659 - DNA, 15 bp, Homo sapiens
tgcaaatttcaacaa

SEQ ID NO: 7660 - DNA, 15 bp, Homo sapiens
atgcaaatttcaaca

SEQ ID NO: 7661 - DNA, 15 bp, Homo sapiens
gatgcaaatttcaac

SEQ ID NO: 7662 - DNA, 15 bp, Homo sapiens
agatgcaaatttcaa

SEQ ID NO: 7663 - DNA, 15 bp, Homo sapiens
aagatgcaaatttca

SEQ ID NO: 7664 - DNA, 15 bp, Homo sapiens
caagatgcaaatttc

SEQ ID NO: 7665 - DNA, 15 bp, Homo sapiens
acaagatgcaaattt

SEQ ID NO: 7666 - DNA, 15 bp, Homo sapiens
cacaagatgcaaatt

SEQ ID NO: 7667 - DNA, 15 bp, Homo sapiens
tcacaagatgcaaat

SEQ ID NO: 7668 - DNA, 15 bp, Homo sapiens
atcacaagatgcaaa

SEQ ID NO: 7669 - DNA, 15 bp, Homo sapiens
aatcacaagatgcaa

SEQ ID NO: 7670 - DNA, 15 bp, Homo sapiens
taatcacaagatgca

SEQ ID NO: 7671 - DNA, 15 bp, Homo sapiens
gtaatcacaagatgc

SEQ ID NO: 7672 - DNA, 15 bp, Homo sapiens
agtaatcacaagatg

SEQ ID NO: 7673 - DNA, 15 bp, Homo sapiens
aagtaatcacaagat

SEQ ID NO: 7674 - DNA, 15 bp, Homo sapiens
aaagtaatcacaaga

SEQ ID NO: 7675 - DNA, 15 bp, Homo sapiens
aaaagtaatcacaag

SEQ ID NO: 7676 - DNA, 15 bp, Homo sapiens
taaaagtaatcacaa

SEQ ID NO: 7677 - DNA, 15 bp, Homo sapiens
gtaaaagtaatcaca

SEQ ID NO: 7678 - DNA, 15 bp, Homo sapiens
agtaaaagtaatcac

SEQ ID NO: 7679 - DNA, 15 bp, Homo sapiens
tagtaaaagtaatca

SEQ ID NO: 7680 - DNA, 15 bp, Homo sapiens
atagtaaaagtaatc

SEQ ID NO: 7681 - DNA, 15 bp, Homo sapiens
aatagtaaaagtaat

SEQ ID NO: 7682 - DNA, 15 bp, Homo sapiens
gaatagtaaaagtaa

SEQ ID NO: 7683 - DNA, 15 bp, Homo sapiens
tgaatagtaaaagta

SEQ ID NO: 7684 - DNA, 15 bp, Homo sapiens
atgaatagtaaaagt

SEQ ID NO: 7685 - DNA, 15 bp, Homo sapiens
aatgaatagtaaaag

SEQ ID NO: 7686 - DNA, 15 bp, Homo sapiens
caatgaatagtaaaa

SEQ ID NO: 7687 - DNA, 15 bp, Homo sapiens
ccaatgaatagtaaa

SEQ ID NO: 7688 - DNA, 15 bp, Homo sapiens
gccaatgaatagtaa

SEQ ID NO: 7689 - DNA, 15 bp, Homo sapiens
ggccaatgaatagta

SEQ ID NO: 7690 - DNA, 15 bp, Homo sapiens
tggccaatgaatagt

SEQ ID NO: 7691 - DNA, 15 bp, Homo sapiens
atggccaatgaatag

SEQ ID NO: 7692 - DNA, 15 bp, Homo sapiens
aatggccaatgaata

SEQ ID NO: 7693 - DNA, 15 bp, Homo sapiens
gaatggccaatgaat

SEQ ID NO: 7694 - DNA, 15 bp, Homo sapiens
tgaatggccaatgaa

SEQ ID NO: 7695 - DNA, 15 bp, Homo sapiens
atgaatggccaatga

SEQ ID NO: 7696 - DNA, 15 bp, Homo sapiens
catgaatggccaatg

SEQ ID NO: 7697 - DNA, 15 bp, Homo sapiens
gcatgaatggccaat

SEQ ID NO: 7698 - DNA, 15 bp, Homo sapiens
agcatgaatggccaa

SEQ ID NO: 7699 - DNA, 15 bp, Homo sapiens
aagcatgaatggcca

SEQ ID NO: 7700 - DNA, 15 bp, Homo sapiens
aaagcatgaatggcc

SEQ ID NO: 7701 - DNA, 15 bp, Homo sapiens
aaaagcatgaatggc

SEQ ID NO: 7702 - DNA, 15 bp, Homo sapiens
aaaaagcatgaatgg

SEQ ID NO: 7703 - DNA, 15 bp, Homo sapiens
aaaaaagcatgaatg

SEQ ID NO: 7704 - DNA, 15 bp, Homo sapiens
aaaaaaagcatgaat

SEQ ID NO: 7705 - DNA, 15 bp, Homo sapiens
aaaaaaaagcatgaa

SEQ ID NO: 7706 - DNA, 15 bp, Homo sapiens
aaaaaaaaagcatga

SEQ ID NO: 7707 - DNA, 15 bp, Homo sapiens
aaaaaaaaaagcatg

SEQ ID NO: 7708 - DNA, 15 bp, Homo sapiens
aaaaaaaaaaagcat

SEQ ID NO: 7709 - DNA, 15 bp, Homo sapiens
aaaaaaaaaaaagca

SEQ ID NO: 7710 - DNA, 15 bp, Homo sapiens
aaaaaaaaaaaaagc

SEQ ID NO: 7711 - DNA, 15 bp, Homo sapiens
ccaaaaaaaaaaaaa

SEQ ID NO: 7712 - DNA, 15 bp, Homo sapiens
accaaaaaaaaaaaa

SEQ ID NO: 7713 - DNA, 15 bp, Homo sapiens
aaccaaaaaaaaaaa

SEQ ID NO: 7714 - DNA, 15 bp, Homo sapiens
caaccaaaaaaaaaa

SEQ ID NO: 7715 - DNA, 15 bp, Homo sapiens
acaaccaaaaaaaaa

SEQ ID NO: 7716 - DNA, 15 bp, Homo sapiens
gacaaccaaaaaaaa

SEQ ID NO: 7717 - DNA, 15 bp, Homo sapiens
agacaaccaaaaaaa

SEQ ID NO: 7718 - DNA, 15 bp, Homo sapiens
cagacaaccaaaaaa

SEQ ID NO: 7719 - DNA, 15 bp, Homo sapiens
ccagacaaccaaaaa

SEQ ID NO: 7720 - DNA, 15 bp, Homo sapiens
accagacaaccaaaa

SEQ ID NO: 7721 - DNA, 15 bp, Homo sapiens
gaccagacaaccaaa

SEQ ID NO: 7722 - DNA, 15 bp, Homo sapiens
tgaccagacaaccaa

SEQ ID NO: 7723 - DNA, 15 bp, Homo sapiens
atgaccagacaacca

SEQ ID NO: 7724 - DNA, 15 bp, Homo sapiens
catgaccagacaacc

SEQ ID NO: 7725 - DNA, 15 bp, Homo sapiens
acatgaccagacaac

SEQ ID NO: 7726 - DNA, 15 bp, Homo sapiens
gacatgaccagacaa

SEQ ID NO: 7727 - DNA, 15 bp, Homo sapiens
ggacatgaccagaca

SEQ ID NO: 7728 - DNA, 15 bp, Homo sapiens
aggacatgaccagac

SEQ ID NO: 7729 - DNA, 15 bp, Homo sapiens
aaggacatgaccaga

SEQ ID NO: 7730 - DNA, 15 bp, Homo sapiens
taaggacatgaccag

SEQ ID NO: 7731 - DNA, 15 bp, Homo sapiens
gtaaggacatgacca

SEQ ID NO: 7732 - DNA, 15 bp, Homo sapiens
agtaaggacatgacc

SEQ ID NO: 7733 - DNA, 15 bp, Homo sapiens
gagtaaggacatgac

SEQ ID NO: 7734 - DNA, 15 bp, Homo sapiens
ggagtaaggacatga

SEQ ID NO: 7735 - DNA, 15 bp, Homo sapiens
aggagtaaggacatg

SEQ ID NO: 7736 - DNA, 15 bp, Homo sapiens
taggagtaaggacat

SEQ ID NO: 7737 - DNA, 15 bp, Homo sapiens
ttaggagtaaggaca

SEQ ID NO: 7738 - DNA, 15 bp, Homo sapiens
attaggagtaaggac

SEQ ID NO: 7739 - DNA, 15 bp, Homo sapiens
tattaggagtaagga

SEQ ID NO: 7740 - DNA, 15 bp, Homo sapiens
ctattaggagtaagg

SEQ ID NO: 7741 - DNA, 15 bp, Homo sapiens
cctattaggagtaag

SEQ ID NO: 7742 - DNA, 15 bp, Homo sapiens
ccctattaggagtaa

SEQ ID NO: 7743 - DNA, 15 bp, Homo sapiens
accctattaggagta

SEQ ID NO: 7744 - DNA, 15 bp, Homo sapiens
caccctattaggagt

SEQ ID NO: 7745 - DNA, 15 bp, Homo sapiens
acaccctattaggag

SEQ ID NO: 7746 - DNA, 15 bp, Homo sapiens
aacaccctattagga

SEQ ID NO: 7747 - DNA, 15 bp, Homo sapiens
gaacaccctattagg

SEQ ID NO: 7748 - DNA, 15 bp, Homo sapiens
tgaacaccctattag

SEQ ID NO: 7749 - DNA, 15 bp, Homo sapiens
atgaacaccctatta

SEQ ID NO: 7750 - DNA, 15 bp, Homo sapiens
gatgaacaccctatt

SEQ ID NO: 7751 - DNA, 15 bp, Homo sapiens
agatgaacaccctat

SEQ ID NO: 7752 - DNA, 15 bp, Homo sapiens
aagatgaacacccta

SEQ ID NO: 7753 - DNA, 15 bp, Homo sapiens
taagatgaacaccct

SEQ ID NO: 7754 - DNA, 15 bp, Homo sapiens
ataagatgaacaccc

SEQ ID NO: 7755 - DNA, 15 bp, Homo sapiens
aataagatgaacacc

SEQ ID NO: 7756 - DNA, 15 bp, Homo sapiens
aaataagatgaacac

SEQ ID NO: 7757 - DNA, 15 bp, Homo sapiens
aaaataagatgaaca

SEQ ID NO: 7758 - DNA, 15 bp, Homo sapiens
aaaaataagatgaac

SEQ ID NO: 7759 - DNA, 15 bp, Homo sapiens
gaaaaataagatgaa

SEQ ID NO: 7760 - DNA, 15 bp, Homo sapiens
ggaaaaataagatga

SEQ ID NO: 7761 - DNA, 15 bp, Homo sapiens
gggaaaaataagatg

SEQ ID NO: 7762 - DNA, 15 bp, Homo sapiens
agggaaaaataagat

SEQ ID NO: 7763 - DNA, 15 bp, Homo sapiens
aagggaaaaataaga

SEQ ID NO: 7764 - DNA, 15 bp, Homo sapiens
taagggaaaaataag

SEQ ID NO: 7765 - DNA, 15 bp, Homo sapiens
ataagggaaaaataa

SEQ ID NO: 7766 - DNA, 15 bp, Homo sapiens
aataagggaaaaata

SEQ ID NO: 7767 - DNA, 15 bp, Homo sapiens
caataagggaaaaat

SEQ ID NO: 7768 - DNA, 15 bp, Homo sapiens
tcaataagggaaaaa

SEQ ID NO: 7769 - DNA, 15 bp, Homo sapiens
atcaataagggaaaa

SEQ ID NO: 7770 - DNA, 15 bp, Homo sapiens
aatcaataagggaaa

SEQ ID NO: 7771 - DNA, 15 bp, Homo sapiens
aaatcaataagggaa

SEQ ID NO: 7772 - DNA, 15 bp, Homo sapiens
caaatcaataaggga

SEQ ID NO: 7773 - DNA, 15 bp, Homo sapiens
gcaaatcaataaggg

SEQ ID NO: 7774 - DNA, 15 bp, Homo sapiens
ggcaaatcaataagg

SEQ ID NO: 7775 - DNA, 15 bp, Homo sapiens
tggcaaatcaataag

SEQ ID NO: 7776 - DNA, 15 bp, Homo sapiens
gtggcaaatcaataa

SEQ ID NO: 7777 - DNA, 15 bp, Homo sapiens
tgtggcaaatcaata

SEQ ID NO: 7778 - DNA, 15 bp, Homo sapiens
ctgtggcaaatcaat

SEQ ID NO: 7779 - DNA, 15 bp, Homo sapiens
gctgtggcaaatcaa

SEQ ID NO: 7780 - DNA, 15 bp, Homo sapiens
agctgtggcaaatca

SEQ ID NO: 7781 - DNA, 15 bp, Homo sapiens
gagctgtggcaaatc

SEQ ID NO: 7782 - DNA, 15 bp, Homo sapiens
agagctgtggcaaat

SEQ ID NO: 7783 - DNA, 15 bp, Homo sapiens
aagagctgtggcaaa

SEQ ID NO: 7784 - DNA, 15 bp, Homo sapiens
aaagagctgtggcaa

SEQ ID NO: 7785 - DNA, 15 bp, Homo sapiens
taaagagctgtggca

SEQ ID NO: 7786 - DNA, 15 bp, Homo sapiens
ataaagagctgtggc

SEQ ID NO: 7787 - DNA, 15 bp, Homo sapiens
aataaagagctgtgg

SEQ ID NO: 7788 - DNA, 15 bp, Homo sapiens
aaataaagagctgtg

SEQ ID NO: 7789 - DNA, 15 bp, Homo sapiens
caaataaagagctgt

SEQ ID NO: 7790 - DNA, 15 bp, Homo sapiens
ccaaataaagagctg

SEQ ID NO: 7791 - DNA, 15 bp, Homo sapiens
tccaaataaagagct

SEQ ID NO: 7792 - DNA, 15 bp, Homo sapiens
ttccaaataaagagc

SEQ ID NO: 7793 - DNA, 15 bp, Homo sapiens
attccaaataaagag

SEQ ID NO: 7794 - DNA, 15 bp, Homo sapiens
cattccaaataaaga

SEQ ID NO: 7795 - DNA, 15 bp, Homo sapiens
ccattccaaataaag

SEQ ID NO: 7796 - DNA, 15 bp, Homo sapiens
accattccaaataaa

SEQ ID NO: 7797 - DNA, 15 bp, Homo sapiens
aaccattccaaataa

SEQ ID NO: 7798 - DNA, 15 bp, Homo sapiens
taaccattccaaata

SEQ ID NO: 7799 - DNA, 15 bp, Homo sapiens
ataaccattccaaat

SEQ ID NO: 7800 - DNA, 15 bp, Homo sapiens
aataaccattccaaa

SEQ ID NO: 7801 - DNA, 15 bp, Homo sapiens
taataaccattccaa

SEQ ID NO: 7802 - DNA, 15 bp, Homo sapiens
ttaataaccattcca

SEQ ID NO: 7803 - DNA, 15 bp, Homo sapiens
gttaataaccattcc

SEQ ID NO: 7804 - DNA, 15 bp, Homo sapiens
ggttaataaccattc

SEQ ID NO: 7805 - DNA, 15 bp, Homo sapiens
aggttaataaccatt

SEQ ID NO: 7806 - DNA, 15 bp, Homo sapiens
aaggttaataaccat

SEQ ID NO: 7807 - DNA, 15 bp, Homo sapiens
aaaggttaataacca

SEQ ID NO: 7808 - DNA, 15 bp, Homo sapiens
gaaaggttaataacc

SEQ ID NO: 7809 - DNA, 15 bp, Homo sapiens
tgaaaggttaataac

SEQ ID NO: 7810 - DNA, 15 bp, Homo sapiens
atgaaaggttaataa

SEQ ID NO: 7811 - DNA, 15 bp, Homo sapiens
gatgaaaggttaata

SEQ ID NO: 7812 - DNA, 15 bp, Homo sapiens
tgatgaaaggttaat

SEQ ID NO: 7813 - DNA, 15 bp, Homo sapiens
ctgatgaaaggttaa

SEQ ID NO: 7814 - DNA, 15 bp, Homo sapiens
gctgatgaaaggtta

SEQ ID NO: 7815 - DNA, 15 bp, Homo sapiens
ggctgatgaaaggtt

SEQ ID NO: 7816 - DNA, 15 bp, Homo sapiens
tggctgatgaaaggt

SEQ ID NO: 7817 - DNA, 15 bp, Homo sapiens
atggctgatgaaagg

SEQ ID NO: 7818 - DNA, 15 bp, Homo sapiens
aatggctgatgaaag

SEQ ID NO: 7819 - DNA, 15 bp, Homo sapiens
taatggctgatgaaa

SEQ ID NO: 7820 - DNA, 15 bp, Homo sapiens
gtaatggctgatgaa

SEQ ID NO: 7821 - DNA, 15 bp, Homo sapiens
tgtaatggctgatga

SEQ ID NO: 7822 - DNA, 15 bp, Homo sapiens
atgtaatggctgatg

SEQ ID NO: 7823 - DNA, 15 bp, Homo sapiens
tatgtaatggctgat

SEQ ID NO: 7824 - DNA, 15 bp, Homo sapiens
atatgtaatggctga

SEQ ID NO: 7825 - DNA, 15 bp, Homo sapiens
tatatgtaatggctg

SEQ ID NO: 7826 - DNA, 15 bp, Homo sapiens
atatatgtaatggct

SEQ ID NO: 7827 - DNA, 15 bp, Homo sapiens
tatatatgtaatggc

SEQ ID NO: 7828 - DNA, 15 bp, Homo sapiens
ctatatatgtaatgg

SEQ ID NO: 7829 - DNA, 15 bp, Homo sapiens
gctatatatgtaatg

SEQ ID NO: 7830 - DNA, 15 bp, Homo sapiens
tgctatatatgtaat

SEQ ID NO: 7831 - DNA, 15 bp, Homo sapiens
ttgctatatatgtaa

SEQ ID NO: 7832 - DNA, 15 bp, Homo sapiens
tttgctatatatgta

SEQ ID NO: 7833 - DNA, 15 bp, Homo sapiens
atttgctatatatgt

SEQ ID NO: 7834 - DNA, 15 bp, Homo sapiens
tatttgctatatatg

SEQ ID NO: 7835 - DNA, 15 bp, Homo sapiens
atatttgctatatat

SEQ ID NO: 7836 - DNA, 15 bp, Homo sapiens
aatatttgctatata

SEQ ID NO: 7837 - DNA, 15 bp, Homo sapiens
aaatatttgctatat

SEQ ID NO: 7838 - DNA, 15 bp, Homo sapiens
aaaatatttgctata

SEQ ID NO: 7839 - DNA, 15 bp, Homo sapiens
gaaaatatttgctat

SEQ ID NO: 7840 - DNA, 15 bp, Homo sapiens
ggaaaatatttgcta

SEQ ID NO: 7841 - DNA, 15 bp, Homo sapiens
gggaaaatatttgct

SEQ ID NO: 7842 - DNA, 15 bp, Homo sapiens
ggggaaaatatttgc

SEQ ID NO: 7843 - DNA, 15 bp, Homo sapiens
tggggaaaatatttg

SEQ ID NO: 7844 - DNA, 15 bp, Homo sapiens
ttggggaaaatattt

SEQ ID NO: 7845 - DNA, 15 bp, Homo sapiens
attggggaaaatatt

SEQ ID NO: 7846 - DNA, 15 bp, Homo sapiens
aattggggaaaatat

SEQ ID NO: 7847 - DNA, 15 bp, Homo sapiens
gaattggggaaaata

SEQ ID NO: 7848 - DNA, 15 bp, Homo sapiens
tgaattggggaaaat

SEQ ID NO: 7849 - DNA, 15 bp, Homo sapiens
atgaattggggaaaa

SEQ ID NO: 7850 - DNA, 15 bp, Homo sapiens
gatgaattggggaaa

SEQ ID NO: 7851 - DNA, 15 bp, Homo sapiens
tgatgaattggggaa

SEQ ID NO: 7852 - DNA, 15 bp, Homo sapiens
atgatgaattgggga

SEQ ID NO: 7853 - DNA, 15 bp, Homo sapiens
aatgatgaattgggg

SEQ ID NO: 7854 - DNA, 15 bp, Homo sapiens
aaatgatgaattggg

SEQ ID NO: 7855 - DNA, 15 bp, Homo sapiens
caaatgatgaattgg

SEQ ID NO: 7856 - DNA, 15 bp, Homo sapiens
gcaaatgatgaattg

SEQ ID NO: 7857 - DNA, 15 bp, Homo sapiens
agcaaatgatgaatt

SEQ ID NO: 7858 - DNA, 15 bp, Homo sapiens
aagcaaatgatgaat

SEQ ID NO: 7859 - DNA, 15 bp, Homo sapiens
aaagcaaatgatgaa

SEQ ID NO: 7860 - DNA, 15 bp, Homo sapiens
aaaagcaaatgatga

SEQ ID NO: 7861 - DNA, 15 bp, Homo sapiens
aaaaagcaaatgatg

SEQ ID NO: 7862 - DNA, 15 bp, Homo sapiens
aaaaaagcaaatgat

SEQ ID NO: 7863 - DNA, 15 bp, Homo sapiens
aaaaaaagcaaatga

SEQ ID NO: 7864 - DNA, 15 bp, Homo sapiens
gaaaaaaagcaaatg

SEQ ID NO: 7865 - DNA, 15 bp, Homo sapiens
agaaaaaaagcaaat

SEQ ID NO: 7866 - DNA, 15 bp, Homo sapiens
tagaaaaaaagcaaa

SEQ ID NO: 7867 - DNA, 15 bp, Homo sapiens
atagaaaaaaagcaa

SEQ ID NO: 7868 - DNA, 15 bp, Homo sapiens
aatagaaaaaaagca

SEQ ID NO: 7869 - DNA, 15 bp, Homo sapiens
aaatagaaaaaaagc

SEQ ID NO: 7870 - DNA, 15 bp, Homo sapiens
caaatagaaaaaaag

SEQ ID NO: 7871 - DNA, 15 bp, Homo sapiens
acaaatagaaaaaaa

SEQ ID NO: 7872 - DNA, 15 bp, Homo sapiens
aacaaatagaaaaaa

SEQ ID NO: 7873 - DNA, 15 bp, Homo sapiens
aaacaaatagaaaaa

SEQ ID NO: 7874 - DNA, 15 bp, Homo sapiens
taaacaaatagaaaa

SEQ ID NO: 7875 - DNA, 15 bp, Homo sapiens
ataaacaaatagaaa

SEQ ID NO: 7876 - DNA, 15 bp, Homo sapiens
cataaacaaatagaa

SEQ ID NO: 7877 - DNA, 15 bp, Homo sapiens
ccataaacaaataga

SEQ ID NO: 7878 - DNA, 15 bp, Homo sapiens
accataaacaaatag

SEQ ID NO: 7879 - DNA, 15 bp, Homo sapiens
caccataaacaaata

SEQ ID NO: 7880 - DNA, 15 bp, Homo sapiens
acaccataaacaaat

SEQ ID NO: 7881 - DNA, 15 bp, Homo sapiens
aacaccataaacaaa

SEQ ID NO: 7882 - DNA, 15 bp, Homo sapiens
aaacaccataaacaa

SEQ ID NO: 7883 - DNA, 15 bp, Homo sapiens
aaaacaccataaaca

SEQ ID NO: 7884 - DNA, 15 bp, Homo sapiens
aaaaacaccataaac

SEQ ID NO: 7885 - DNA, 15 bp, Homo sapiens
aaaaaacaccataaa

SEQ ID NO: 7886 - DNA, 15 bp, Homo sapiens
caaaaaacaccataa

SEQ ID NO: 7887 - DNA, 15 bp, Homo sapiens
acaaaaaacaccata

SEQ ID NO: 7888 - DNA, 15 bp, Homo sapiens
cacaaaaaacaccat

SEQ ID NO: 7889 - DNA, 15 bp, Homo sapiens
tcacaaaaaacacca

SEQ ID NO: 7890 - DNA, 15 bp, Homo sapiens
atcacaaaaaacacc

SEQ ID NO: 7891 - DNA, 15 bp, Homo sapiens
catcacaaaaaacac

SEQ ID NO: 7892 - DNA, 15 bp, Homo sapiens
gcatcacaaaaaaca

SEQ ID NO: 7893 - DNA, 15 bp, Homo sapiens
agcatcacaaaaaac

SEQ ID NO: 7894 - DNA, 15 bp, Homo sapiens
aagcatcacaaaaaa

SEQ ID NO: 7895 - DNA, 15 bp, Homo sapiens
taagcatcacaaaaa

SEQ ID NO: 7896 - DNA, 15 bp, Homo sapiens
ataagcatcacaaaa

SEQ ID NO: 7897 - DNA, 15 bp, Homo sapiens
cataagcatcacaaa

SEQ ID NO: 7898 - DNA, 15 bp, Homo sapiens
tcataagcatcacaa

SEQ ID NO: 7899 - DNA, 15 bp, Homo sapiens
atcataagcatcaca

SEQ ID NO: 7900 - DNA, 15 bp, Homo sapiens
catcataagcatcac

SEQ ID NO: 7901 - DNA, 15 bp, Homo sapiens
ccatcataagcatca

SEQ ID NO: 7902 - DNA, 15 bp, Homo sapiens
accatcataagcatc

SEQ ID NO: 7903 - DNA, 15 bp, Homo sapiens
aaccatcataagcat

SEQ ID NO: 7904 - DNA, 15 bp, Homo sapiens
aaaccatcataagca

SEQ ID NO: 7905 - DNA, 15 bp, Homo sapiens
aaaaccatcataagc

SEQ ID NO: 7906 - DNA, 15 bp, Homo sapiens
taaaaccatcataag

SEQ ID NO: 7907 - DNA, 15 bp, Homo sapiens
ataaaaccatcataa

SEQ ID NO: 7908 - DNA, 15 bp, Homo sapiens
tataaaaccatcata

SEQ ID NO: 7909 - DNA, 15 bp, Homo sapiens
gtataaaaccatcat

SEQ ID NO: 7910 - DNA, 15 bp, Homo sapiens
tgtataaaaccatca

SEQ ID NO: 7911 - DNA, 15 bp, Homo sapiens
ctgtataaaaccatc

SEQ ID NO: 7912 - DNA, 15 bp, Homo sapiens
actgtataaaaccat

SEQ ID NO: 7913 - DNA, 15 bp, Homo sapiens
gactgtataaaacca

SEQ ID NO: 7914 - DNA, 15 bp, Homo sapiens
tgactgtataaaacc

SEQ ID NO: 7915 - DNA, 15 bp, Homo sapiens
ttgactgtataaaac

SEQ ID NO: 7916 - DNA, 15 bp, Homo sapiens
tttgactgtataaaa

SEQ ID NO: 7917 - DNA, 15 bp, Homo sapiens
atttgactgtataaa

SEQ ID NO: 7918 - DNA, 15 bp, Homo sapiens
tatttgactgtataa

SEQ ID NO: 7919 - DNA, 15 bp, Homo sapiens
ctatttgactgtata

SEQ ID NO: 7920 - DNA, 15 bp, Homo sapiens
cctatttgactgtat

SEQ ID NO: 7921 - DNA, 15 bp, Homo sapiens
acctatttgactgta

SEQ ID NO: 7922 - DNA, 15 bp, Homo sapiens
aacctatttgactgt

SEQ ID NO: 7923 - DNA, 15 bp, Homo sapiens
taacctatttgactg

SEQ ID NO: 7924 - DNA, 15 bp, Homo sapiens
ctaacctatttgact

SEQ ID NO: 7925 - DNA, 15 bp, Homo sapiens
actaacctatttgac

SEQ ID NO: 7926 - DNA, 15 bp, Homo sapiens
gactaacctatttga

SEQ ID NO: 7927 - DNA, 15 bp, Homo sapiens
agactaacctatttg

SEQ ID NO: 7928 - DNA, 15 bp, Homo sapiens
aagactaacctattt

SEQ ID NO: 7929 - DNA, 15 bp, Homo sapiens
aaagactaacctatt

SEQ ID NO: 7930 - DNA, 15 bp, Homo sapiens
aaaagactaacctat

SEQ ID NO: 7931 - DNA, 15 bp, Homo sapiens
aaaaagactaaccta

SEQ ID NO: 7932 - DNA, 15 bp, Homo sapiens
aaaaaagactaacct

SEQ ID NO: 7933 - DNA, 15 bp, Homo sapiens
aaaaaaagactaacc

SEQ ID NO: 7934 - DNA, 15 bp, Homo sapiens
gaaaaaaagactaac

SEQ ID NO: 7935 - DNA, 15 bp, Homo sapiens
agaaaaaaagactaa

SEQ ID NO: 7936 - DNA, 15 bp, Homo sapiens
cagaaaaaaagacta

SEQ ID NO: 7937 - DNA, 15 bp, Homo sapiens
acagaaaaaaagact

SEQ ID NO: 7938 - DNA, 15 bp, Homo sapiens
cacagaaaaaaagac

SEQ ID NO: 7939 - DNA, 15 bp, Homo sapiens
ccacagaaaaaaaga

SEQ ID NO: 7940 - DNA, 15 bp, Homo sapiens
gccacagaaaaaaag

SEQ ID NO: 7941 - DNA, 15 bp, Homo sapiens
agccacagaaaaaaa

SEQ ID NO: 7942 - DNA, 15 bp, Homo sapiens
aagccacagaaaaaa

SEQ ID NO: 7943 - DNA, 15 bp, Homo sapiens
gaagccacagaaaaa

SEQ ID NO: 7944 - DNA, 15 bp, Homo sapiens
agaagccacagaaaa

SEQ ID NO: 7945 - DNA, 15 bp, Homo sapiens
cagaagccacagaaa

SEQ ID NO: 7946 - DNA, 15 bp, Homo sapiens
acagaagccacagaa

SEQ ID NO: 7947 - DNA, 15 bp, Homo sapiens
gacagaagccacaga

SEQ ID NO: 7948 - DNA, 15 bp, Homo sapiens
agacagaagccacag

SEQ ID NO: 7949 - DNA, 15 bp, Homo sapiens
gagacagaagccaca

SEQ ID NO: 7950 - DNA, 15 bp, Homo sapiens
agagacagaagccac

SEQ ID NO: 7951 - DNA, 15 bp, Homo sapiens
cagagacagaagcca

SEQ ID NO: 7952 - DNA, 15 bp, Homo sapiens
ccagagacagaagcc

SEQ ID NO: 7953 - DNA, 15 bp, Homo sapiens
accagagacagaagc

SEQ ID NO: 7954 - DNA, 15 bp, Homo sapiens
aaccagagacagaag

SEQ ID NO: 7955 - DNA, 15 bp, Homo sapiens
aaaccagagacagaa

SEQ ID NO: 7956 - DNA, 15 bp, Homo sapiens
aaaaccagagacaga

SEQ ID NO: 7957 - DNA, 15 bp, Homo sapiens
caaaaccagagacag

SEQ ID NO: 7958 - DNA, 15 bp, Homo sapiens
acaaaaccagagaca

SEQ ID NO: 7959 - DNA, 15 bp, Homo sapiens
cacaaaaccagagac

SEQ ID NO: 7960 - DNA, 15 bp, Homo sapiens
gcacaaaaccagaga

SEQ ID NO: 7961 - DNA, 15 bp, Homo sapiens
agcacaaaaccagag

SEQ ID NO: 7962 - DNA, 15 bp, Homo sapiens
aagcacaaaaccaga

SEQ ID NO: 7963 - DNA, 15 bp, Homo sapiens
taagcacaaaaccag

SEQ ID NO: 7964 - DNA, 15 bp, Homo sapiens
ctaagcacaaaacca

SEQ ID NO: 7965 - DNA, 15 bp, Homo sapiens
tctaagcacaaaacc

SEQ ID NO: 7966 - DNA, 15 bp, Homo sapiens
ttctaagcacaaaac

SEQ ID NO: 7967 - DNA, 15 bp, Homo sapiens
tttctaagcacaaaa

SEQ ID NO: 7968 - DNA, 15 bp, Homo sapiens
ctttctaagcacaaa

SEQ ID NO: 7969 - DNA, 15 bp, Homo sapiens
actttctaagcacaa

SEQ ID NO: 7970 - DNA, 15 bp, Homo sapiens
gactttctaagcaca

SEQ ID NO: 7971 - DNA, 15 bp, Homo sapiens
ggactttctaagcac

SEQ ID NO: 7972 - DNA, 15 bp, Homo sapiens
aggactttctaagca

SEQ ID NO: 7973 - DNA, 15 bp, Homo sapiens
aaggactttctaagc

SEQ ID NO: 7974 - DNA, 15 bp, Homo sapiens
aaaggactttctaag

SEQ ID NO: 7975 - DNA, 15 bp, Homo sapiens
gaaaggactttctaa

SEQ ID NO: 7976 - DNA, 15 bp, Homo sapiens
ggaaaggactttcta

SEQ ID NO: 7977 - DNA, 15 bp, Homo sapiens
aggaaaggactttct

SEQ ID NO: 7978 - DNA, 15 bp, Homo sapiens
taggaaaggactttc

SEQ ID NO: 7979 - DNA, 15 bp, Homo sapiens
gtaggaaaggacttt

SEQ ID NO: 7980 - DNA, 15 bp, Homo sapiens
agtaggaaaggactt

SEQ ID NO: 7981 - DNA, 15 bp, Homo sapiens
aagtaggaaaggact

SEQ ID NO: 7982 - DNA, 15 bp, Homo sapiens
caagtaggaaaggac

SEQ ID NO: 7983 - DNA, 15 bp, Homo sapiens
tcaagtaggaaagga

SEQ ID NO: 7984 - DNA, 15 bp, Homo sapiens
ttcaagtaggaaagg

SEQ ID NO: 7985 - DNA, 15 bp, Homo sapiens
tttcaagtaggaaag

SEQ ID NO: 7986 - DNA, 15 bp, Homo sapiens
ttttcaagtaggaaa

SEQ ID NO: 7987 - DNA, 15 bp, Homo sapiens
attttcaagtaggaa

SEQ ID NO: 7988 - DNA, 15 bp, Homo sapiens
cattttcaagtagga

SEQ ID NO: 7989 - DNA, 15 bp, Homo sapiens
tcattttcaagtagg

SEQ ID NO: 7990 - DNA, 15 bp, Homo sapiens
ctcattttcaagtag

SEQ ID NO: 7991 - DNA, 15 bp, Homo sapiens
tctcattttcaagta

SEQ ID NO: 7992 - DNA, 15 bp, Homo sapiens
atctcattttcaagt

SEQ ID NO: 7993 - DNA, 15 bp, Homo sapiens
tatctcattttcaag

SEQ ID NO: 7994 - DNA, 15 bp, Homo sapiens
ttatctcattttcaa

SEQ ID NO: 7995 - DNA, 15 bp, Homo sapiens
tttatctcattttca

SEQ ID NO: 7996 - DNA, 15 bp, Homo sapiens
atttatctcattttc

SEQ ID NO: 7997 - DNA, 15 bp, Homo sapiens
catttatctcatttt

SEQ ID NO: 7998 - DNA, 15 bp, Homo sapiens
acatttatctcattt

SEQ ID NO: 7999 - DNA, 15 bp, Homo sapiens
aacatttatctcatt

SEQ ID NO: 8000 - DNA, 15 bp, Homo sapiens
gaacatttatctcat

SEQ ID NO: 8001 - DNA, 15 bp, Homo sapiens
tgaacatttatctca

SEQ ID NO: 8002 - DNA, 15 bp, Homo sapiens
gtgaacatttatctc

SEQ ID NO: 8003 - DNA, 15 bp, Homo sapiens
ggtgaacatttatct

SEQ ID NO: 8004 - DNA, 15 bp, Homo sapiens
aggtgaacatttatc

SEQ ID NO: 8005 - DNA, 15 bp, Homo sapiens
taggtgaacatttat

SEQ ID NO: 8006 - DNA, 15 bp, Homo sapiens
ataggtgaacattta

SEQ ID NO: 8007 - DNA, 15 bp, Homo sapiens
cataggtgaacattt

SEQ ID NO: 8008 - DNA, 15 bp, Homo sapiens
acataggtgaacatt

SEQ ID NO: 8009 - DNA, 15 bp, Homo sapiens
aacataggtgaacat

SEQ ID NO: 8010 - DNA, 15 bp, Homo sapiens
caacataggtgaaca

SEQ ID NO: 8011 - DNA, 15 bp, Homo sapiens
ccaacataggtgaac

SEQ ID NO: 8012 - DNA, 15 bp, Homo sapiens
gccaacataggtgaa

SEQ ID NO: 8013 - DNA, 15 bp, Homo sapiens
agccaacataggtga

SEQ ID NO: 8014 - DNA, 15 bp, Homo sapiens
aagccaacataggtg

SEQ ID NO: 8015 - DNA, 15 bp, Homo sapiens
gaagccaacataggt

SEQ ID NO: 8016 - DNA, 15 bp, Homo sapiens
agaagccaacatagg

SEQ ID NO: 8017 - DNA, 15 bp, Homo sapiens
tagaagccaacatag

SEQ ID NO: 8018 - DNA, 15 bp, Homo sapiens
ctagaagccaacata

SEQ ID NO: 8019 - DNA, 15 bp, Homo sapiens
actagaagccaacat

SEQ ID NO: 8020 - DNA, 15 bp, Homo sapiens
gactagaagccaaca

SEQ ID NO: 8021 - DNA, 15 bp, Homo sapiens
agactagaagccaac

SEQ ID NO: 8022 - DNA, 15 bp, Homo sapiens
gagactagaagccaa

SEQ ID NO: 8023 - DNA, 15 bp, Homo sapiens
agagactagaagcca

SEQ ID NO: 8024 - DNA, 15 bp, Homo sapiens
aagagactagaagcc

SEQ ID NO: 8025 - DNA, 15 bp, Homo sapiens
aaagagactagaagc

SEQ ID NO: 8026 - DNA, 15 bp, Homo sapiens
aaaagagactagaag

SEQ ID NO: 8027 - DNA, 15 bp, Homo sapiens
taaaagagactagaa

SEQ ID NO: 8028 - DNA, 15 bp, Homo sapiens
ataaaagagactaga

SEQ ID NO: 8029 - DNA, 15 bp, Homo sapiens
cataaaagagactag

SEQ ID NO: 8030 - DNA, 15 bp, Homo sapiens
ccataaaagagacta

SEQ ID NO: 8031 - DNA, 15 bp, Homo sapiens
gccataaaagagact

SEQ ID NO: 8032 - DNA, 15 bp, Homo sapiens
agccataaaagagac

SEQ ID NO: 8033 - DNA, 15 bp, Homo sapiens
aagccataaaagaga

SEQ ID NO: 8034 - DNA, 15 bp, Homo sapiens
gaagccataaaagag

SEQ ID NO: 8035 - DNA, 15 bp, Homo sapiens
tgaagccataaaaga

SEQ ID NO: 8036 - DNA, 15 bp, Homo sapiens
atgaagccataaaag

SEQ ID NO: 8037 - DNA, 15 bp, Homo sapiens
aatgaagccataaaa

SEQ ID NO: 8038 - DNA, 15 bp, Homo sapiens
aaatgaagccataaa

SEQ ID NO: 8039 - DNA, 15 bp, Homo sapiens
aaaatgaagccataa

SEQ ID NO: 8040 - DNA, 15 bp, Homo sapiens
aaaaatgaagccata

SEQ ID NO: 8041 - DNA, 15 bp, Homo sapiens
aaaaaatgaagccat

SEQ ID NO: 8042 - DNA, 15 bp, Homo sapiens
gaaaaaatgaagcca

SEQ ID NO: 8043 - DNA, 15 bp, Homo sapiens
ggaaaaaatgaagcc

SEQ ID NO: 8044 - DNA, 15 bp, Homo sapiens
tggaaaaaatgaagc

SEQ ID NO: 8045 - DNA, 15 bp, Homo sapiens
atggaaaaaatgaag

SEQ ID NO: 8046 - DNA, 15 bp, Homo sapiens
aatggaaaaaatgaa

SEQ ID NO: 8047 - DNA, 15 bp, Homo sapiens
aaatggaaaaaatga

SEQ ID NO: 8048 - DNA, 15 bp, Homo sapiens
taaatggaaaaaatg

SEQ ID NO: 8049 - DNA, 15 bp, Homo sapiens
gtaaatggaaaaaat

SEQ ID NO: 8050 - DNA, 15 bp, Homo sapiens
agtaaatggaaaaaa

SEQ ID NO: 8051 - DNA, 15 bp, Homo sapiens
tagtaaatggaaaaa

SEQ ID NO: 8052 - DNA, 15 bp, Homo sapiens
atagtaaatggaaaa

SEQ ID NO: 8053 - DNA, 15 bp, Homo sapiens
tatagtaaatggaaa

SEQ ID NO: 8054 - DNA, 15 bp, Homo sapiens
ctatagtaaatggaa

SEQ ID NO: 8055 - DNA, 15 bp, Homo sapiens
tctatagtaaatgga

SEQ ID NO: 8056 - DNA, 15 bp, Homo sapiens
ctctatagtaaatgg

SEQ ID NO: 8057 - DNA, 15 bp, Homo sapiens
cctctatagtaaatg

SEQ ID NO: 8058 - DNA, 15 bp, Homo sapiens
acctctatagtaaat

SEQ ID NO: 8059 - DNA, 15 bp, Homo sapiens
aacctctatagtaaa

SEQ ID NO: 8060 - DNA, 15 bp, Homo sapiens
taacctctatagtaa

SEQ ID NO: 8061 - DNA, 15 bp, Homo sapiens
ttaacctctatagta

SEQ ID NO: 8062 - DNA, 15 bp, Homo sapiens
cttaacctctatagt

SEQ ID NO: 8063 - DNA, 15 bp, Homo sapiens
tcttaacctctatag

SEQ ID NO: 8064 - DNA, 15 bp, Homo sapiens
ctcttaacctctata

SEQ ID NO: 8065 - DNA, 15 bp, Homo sapiens
actcttaacctctat

SEQ ID NO: 8066 - DNA, 15 bp, Homo sapiens
cactcttaacctcta

SEQ ID NO: 8067 - DNA, 15 bp, Homo sapiens
acactcttaacctct

SEQ ID NO: 8068 - DNA, 15 bp, Homo sapiens
cacactcttaacctc

SEQ ID NO: 8069 - DNA, 15 bp, Homo sapiens
ccacactcttaacct

SEQ ID NO: 8070 - DNA, 15 bp, Homo sapiens
cccacactcttaacc

SEQ ID NO: 8071 - DNA, 15 bp, Homo sapiens
acccacactcttaac

SEQ ID NO: 8072 - DNA, 15 bp, Homo sapiens
tacccacactcttaa

SEQ ID NO: 8073 - DNA, 15 bp, Homo sapiens
gtacccacactctta

SEQ ID NO: 8074 - DNA, 15 bp, Homo sapiens
agtacccacactctt

SEQ ID NO: 8075 - DNA, 15 bp, Homo sapiens
cagtacccacactct

SEQ ID NO: 8076 - DNA, 15 bp, Homo sapiens
ccagtacccacactc

SEQ ID NO: 8077 - DNA, 15 bp, Homo sapiens
tccagtacccacact

SEQ ID NO: 8078 - DNA, 15 bp, Homo sapiens
ctccagtacccacac

SEQ ID NO: 8079 - DNA, 15 bp, Homo sapiens
gctccagtacccaca

SEQ ID NO: 8080 - DNA, 15 bp, Homo sapiens
ggctccagtacccac

SEQ ID NO: 8081 - DNA, 15 bp, Homo sapiens
tggctccagtaccca

SEQ ID NO: 8082 - DNA, 15 bp, Homo sapiens
ctggctccagtaccc

SEQ ID NO: 8083 - DNA, 15 bp, Homo sapiens
tctggctccagtacc

SEQ ID NO: 8084 - DNA, 15 bp, Homo sapiens
gtctggctccagtac

SEQ ID NO: 8085 - DNA, 15 bp, Homo sapiens
agtctggctccagta

SEQ ID NO: 8086 - DNA, 15 bp, Homo sapiens
cagtctggctccagt

SEQ ID NO: 8087 - DNA, 15 bp, Homo sapiens
acagtctggctccag

SEQ ID NO: 8088 - DNA, 15 bp, Homo sapiens
gacagtctggctcca

SEQ ID NO: 8089 - DNA, 15 bp, Homo sapiens
agacagtctggctcc

SEQ ID NO: 8090 - DNA, 15 bp, Homo sapiens
cagacagtctggctc

SEQ ID NO: 8091 - DNA, 15 bp, Homo sapiens
ccagacagtctggct

SEQ ID NO: 8092 - DNA, 15 bp, Homo sapiens
cccagacagtctggc

SEQ ID NO: 8093 - DNA, 15 bp, Homo sapiens
tcccagacagtctgg

SEQ ID NO: 8094 - DNA, 15 bp, Homo sapiens
gtcccagacagtctg

SEQ ID NO: 8095 - DNA, 15 bp, Homo sapiens
tgtcccagacagtct

SEQ ID NO: 8096 - DNA, 15 bp, Homo sapiens
ttgtcccagacagtc

SEQ ID NO: 8097 - DNA, 15 bp, Homo sapiens
tttgtcccagacagt

SEQ ID NO: 8098 - DNA, 15 bp, Homo sapiens
gtttgtcccagacag

SEQ ID NO: 8099 - DNA, 15 bp, Homo sapiens
ggtttgtcccagaca

SEQ ID NO: 8100 - DNA, 15 bp, Homo sapiens
gggtttgtcccagac

SEQ ID NO: 8101 - DNA, 15 bp, Homo sapiens
tgggtttgtcccaga

SEQ ID NO: 8102 - DNA, 15 bp, Homo sapiens
ctgggtttgtcccag

SEQ ID NO: 8103 - DNA, 15 bp, Homo sapiens
gctgggtttgtccca

SEQ ID NO: 8104 - DNA, 15 bp, Homo sapiens
cgctgggtttgtccc

SEQ ID NO: 8105 - DNA, 15 bp, Homo sapiens
acgctgggtttgtcc

SEQ ID NO: 8106 - DNA, 15 bp, Homo sapiens
gacgctgggtttgtc

SEQ ID NO: 8107 - DNA, 15 bp, Homo sapiens
tgacgctgggtttgt

SEQ ID NO: 8108 - DNA, 15 bp, Homo sapiens
gtgacgctgggtttg

SEQ ID NO: 8109 - DNA, 15 bp, Homo sapiens
ggtgacgctgggttt

SEQ ID NO: 8110 - DNA, 15 bp, Homo sapiens
gggtgacgctgggtt

SEQ ID NO: 8111 - DNA, 15 bp, Homo sapiens
ggggtgacgctgggt

SEQ ID NO: 8112 - DNA, 15 bp, Homo sapiens
tggggtgacgctggg

SEQ ID NO: 8113 - DNA, 15 bp, Homo sapiens
ttggggtgacgctgg

SEQ ID NO: 8114 - DNA, 15 bp, Homo sapiens
cttggggtgacgctg

SEQ ID NO: 8115 - DNA, 15 bp, Homo sapiens
gcttggggtgacgct

SEQ ID NO: 8116 - DNA, 15 bp, Homo sapiens
ggcttggggtgacgc

SEQ ID NO: 8117 - DNA, 15 bp, Homo sapiens
gggcttggggtgacg

SEQ ID NO: 8118 - DNA, 15 bp, Homo sapiens
agggcttggggtgac

SEQ ID NO: 8119 - DNA, 15 bp, Homo sapiens
tagggcttggggtga

SEQ ID NO: 8120 - DNA, 15 bp, Homo sapiens
atagggcttggggtg

SEQ ID NO: 8121 - DNA, 15 bp, Homo sapiens
catagggcttggggt

SEQ ID NO: 8122 - DNA, 15 bp, Homo sapiens
acatagggcttgggg

SEQ ID NO: 8123 - DNA, 15 bp, Homo sapiens
cacatagggcttggg

SEQ ID NO: 8124 - DNA, 15 bp, Homo sapiens
acacatagggcttgg

SEQ ID NO: 8125 - DNA, 15 bp, Homo sapiens
cacacatagggcttg

SEQ ID NO: 8126 - DNA, 15 bp, Homo sapiens
tcacacatagggctt

SEQ ID NO: 8127 - DNA, 15 bp, Homo sapiens
atcacacatagggct

SEQ ID NO: 8128 - DNA, 15 bp, Homo sapiens
aatcacacatagggc

SEQ ID NO: 8129 - DNA, 15 bp, Homo sapiens
aaatcacacataggg

SEQ ID NO: 8130 - DNA, 15 bp, Homo sapiens
aaaatcacacatagg

SEQ ID NO: 8131 - DNA, 15 bp, Homo sapiens
aaaaatcacacatag

SEQ ID NO: 8132 - DNA, 15 bp, Homo sapiens
taaaaatcacacata

SEQ ID NO: 8133 - DNA, 15 bp, Homo sapiens
ctaaaaatcacacat

SEQ ID NO: 8134 - DNA, 15 bp, Homo sapiens
gctaaaaatcacaca

SEQ ID NO: 8135 - DNA, 15 bp, Homo sapiens
ggctaaaaatcacac

SEQ ID NO: 8136 - DNA, 15 bp, Homo sapiens
tggctaaaaatcaca

SEQ ID NO: 8137 - DNA, 15 bp, Homo sapiens
ctggctaaaaatcac

SEQ ID NO: 8138 - DNA, 15 bp, Homo sapiens
cctggctaaaaatca

SEQ ID NO: 8139 - DNA, 15 bp, Homo sapiens
gcctggctaaaaatc

SEQ ID NO: 8140 - DNA, 15 bp, Homo sapiens
tgcctggctaaaaat

SEQ ID NO: 8141 - DNA, 15 bp, Homo sapiens
gtgcctggctaaaaa

SEQ ID NO: 8142 - DNA, 15 bp, Homo sapiens
agtgcctggctaaaa

SEQ ID NO: 8143 - DNA, 15 bp, Homo sapiens
aagtgcctggctaaa

SEQ ID NO: 8144 - DNA, 15 bp, Homo sapiens
taagtgcctggctaa

SEQ ID NO: 8145 - DNA, 15 bp, Homo sapiens
ttaagtgcctggcta

SEQ ID NO: 8146 - DNA, 15 bp, Homo sapiens
gttaagtgcctggct

SEQ ID NO: 8147 - DNA, 15 bp, Homo sapiens
ggttaagtgcctggc

SEQ ID NO: 8148 - DNA, 15 bp, Homo sapiens
aggttaagtgcctgg

SEQ ID NO: 8149 - DNA, 15 bp, Homo sapiens
gaggttaagtgcctg

SEQ ID NO: 8150 - DNA, 15 bp, Homo sapiens
agaggttaagtgcct

SEQ ID NO: 8151 - DNA, 15 bp, Homo sapiens
gagaggttaagtgcc

SEQ ID NO: 8152 - DNA, 15 bp, Homo sapiens
ggagaggttaagtgc

SEQ ID NO: 8153 - DNA, 15 bp, Homo sapiens
tggagaggttaagtg

SEQ ID NO: 8154 - DNA, 15 bp, Homo sapiens
atggagaggttaagt

SEQ ID NO: 8155 - DNA, 15 bp, Homo sapiens
tatggagaggttaag

SEQ ID NO: 8156 - DNA, 15 bp, Homo sapiens
gtatggagaggttaa

SEQ ID NO: 8157 - DNA, 15 bp, Homo sapiens
ggtatggagaggtta

SEQ ID NO: 8158 - DNA, 15 bp, Homo sapiens
aggtatggagaggtt

SEQ ID NO: 8159 - DNA, 15 bp, Homo sapiens
gaggtatggagaggt

SEQ ID NO: 8160 - DNA, 15 bp, Homo sapiens
ggaggtatggagagg

SEQ ID NO: 8161 - DNA, 15 bp, Homo sapiens
tggaggtatggagag

SEQ ID NO: 8162 - DNA, 15 bp, Homo sapiens
atggaggtatggaga

SEQ ID NO: 8163 - DNA, 15 bp, Homo sapiens
aatggaggtatggag

SEQ ID NO: 8164 - DNA, 15 bp, Homo sapiens
aaatggaggtatgga

SEQ ID NO: 8165 - DNA, 15 bp, Homo sapiens
gaaatggaggtatgg

SEQ ID NO: 8166 - DNA, 15 bp, Homo sapiens
ggaaatggaggtatg

SEQ ID NO: 8167 - DNA, 15 bp, Homo sapiens
aggaaatggaggtat

SEQ ID NO: 8168 - DNA, 15 bp, Homo sapiens
gaggaaatggaggta

SEQ ID NO: 8169 - DNA, 15 bp, Homo sapiens
tgaggaaatggaggt

SEQ ID NO: 8170 - DNA, 15 bp, Homo sapiens
atgaggaaatggagg

SEQ ID NO: 8171 - DNA, 15 bp, Homo sapiens
tatgaggaaatggag

SEQ ID NO: 8172 - DNA, 15 bp, Homo sapiens
atatgaggaaatgga

SEQ ID NO: 8173 - DNA, 15 bp, Homo sapiens
catatgaggaaatgg

SEQ ID NO: 8174 - DNA, 15 bp, Homo sapiens
acatatgaggaaatg

SEQ ID NO: 8175 - DNA, 15 bp, Homo sapiens
tacatatgaggaaat

SEQ ID NO: 8176 - DNA, 15 bp, Homo sapiens
gtacatatgaggaaa

SEQ ID NO: 8177 - DNA, 15 bp, Homo sapiens
agtacatatgaggaa

SEQ ID NO: 8178 - DNA, 15 bp, Homo sapiens
cagtacatatgagga

SEQ ID NO: 8179 - DNA, 15 bp, Homo sapiens
gcagtacatatgagg

SEQ ID NO: 8180 - DNA, 15 bp, Homo sapiens
tgcagtacatatgag

SEQ ID NO: 8181 - DNA, 15 bp, Homo sapiens
ttgcagtacatatga

SEQ ID NO: 8182 - DNA, 15 bp, Homo sapiens
attgcagtacatatg

SEQ ID NO: 8183 - DNA, 15 bp, Homo sapiens
cattgcagtacatat

SEQ ID NO: 8184 - DNA, 15 bp, Homo sapiens
ccattgcagtacata

SEQ ID NO: 8185 - DNA, 15 bp, Homo sapiens
accattgcagtacat

SEQ ID NO: 8186 - DNA, 15 bp, Homo sapiens
aaccattgcagtaca

SEQ ID NO: 8187 - DNA, 15 bp, Homo sapiens
taaccattgcagtac

SEQ ID NO: 8188 - DNA, 15 bp, Homo sapiens
ataaccattgcagta

SEQ ID NO: 8189 - DNA, 15 bp, Homo sapiens
tataaccattgcagt

SEQ ID NO: 8190 - DNA, 15 bp, Homo sapiens
ttataaccattgcag

SEQ ID NO: 8191 - DNA, 15 bp, Homo sapiens
attataaccattgca

SEQ ID NO: 8192 - DNA, 15 bp, Homo sapiens
tattataaccattgc

SEQ ID NO: 8193 - DNA, 15 bp, Homo sapiens
ctattataaccattg

SEQ ID NO: 8194 - DNA, 15 bp, Homo sapiens
actattataaccatt

SEQ ID NO: 8195 - DNA, 15 bp, Homo sapiens
tactattataaccat

SEQ ID NO: 8196 - DNA, 15 bp, Homo sapiens
gtactattataacca

SEQ ID NO: 8197 - DNA, 15 bp, Homo sapiens
ggtactattataacc

SEQ ID NO: 8198 - DNA, 15 bp, Homo sapiens
aggtactattataac

SEQ ID NO: 8199 - DNA, 15 bp, Homo sapiens
aaggtactattataa

SEQ ID NO: 8200 - DNA, 15 bp, Homo sapiens
gaaggtactattata

SEQ ID NO: 8201 - DNA, 15 bp, Homo sapiens
ggaaggtactattat

SEQ ID NO: 8202 - DNA, 15 bp, Homo sapiens
aggaaggtactatta

SEQ ID NO: 8203 - DNA, 15 bp, Homo sapiens
gaggaaggtactatt

SEQ ID NO: 8204 - DNA, 15 bp, Homo sapiens
tgaggaaggtactat

SEQ ID NO: 8205 - DNA, 15 bp, Homo sapiens
ctgaggaaggtacta

SEQ ID NO: 8206 - DNA, 15 bp, Homo sapiens
cctgaggaaggtact

SEQ ID NO: 8207 - DNA, 15 bp, Homo sapiens
tcctgaggaaggtac

SEQ ID NO: 8208 - DNA, 15 bp, Homo sapiens
ctcctgaggaaggta

SEQ ID NO: 8209 - DNA, 15 bp, Homo sapiens
actcctgaggaaggt

SEQ ID NO: 8210 - DNA, 15 bp, Homo sapiens
gactcctgaggaagg

SEQ ID NO: 8211 - DNA, 15 bp, Homo sapiens
agactcctgaggaag

SEQ ID NO: 8212 - DNA, 15 bp, Homo sapiens
aagactcctgaggaa

SEQ ID NO: 8213 - DNA, 15 bp, Homo sapiens
aaagactcctgagga

SEQ ID NO: 8214 - DNA, 15 bp, Homo sapiens
caaagactcctgagg

SEQ ID NO: 8215 - DNA, 15 bp, Homo sapiens
acaaagactcctgag

SEQ ID NO: 8216 - DNA, 15 bp, Homo sapiens
aacaaagactcctga

SEQ ID NO: 8217 - DNA, 15 bp, Homo sapiens
aaacaaagactcctg

SEQ ID NO: 8218 - DNA, 15 bp, Homo sapiens
taaacaaagactcct

SEQ ID NO: 8219 - DNA, 15 bp, Homo sapiens
ctaaacaaagactcc

SEQ ID NO: 8220 - DNA, 15 bp, Homo sapiens
tctaaacaaagactc

SEQ ID NO: 8221 - DNA, 15 bp, Homo sapiens
atctaaacaaagact

SEQ ID NO: 8222 - DNA, 15 bp, Homo sapiens
aatctaaacaaagac

SEQ ID NO: 8223 - DNA, 15 bp, Homo sapiens
taatctaaacaaaga

SEQ ID NO: 8224 - DNA, 15 bp, Homo sapiens
ttaatctaaacaaag

SEQ ID NO: 8225 - DNA, 15 bp, Homo sapiens
tttaatctaaacaaa

SEQ ID NO: 8226 - DNA, 15 bp, Homo sapiens
ttttaatctaaacaa

SEQ ID NO: 8227 - DNA, 15 bp, Homo sapiens
attttaatctaaaca

SEQ ID NO: 8228 - DNA, 15 bp, Homo sapiens
aattttaatctaaac

SEQ ID NO: 8229 - DNA, 15 bp, Homo sapiens
aaattttaatctaaa

SEQ ID NO: 8230 - DNA, 15 bp, Homo sapiens
aaaattttaatctaa

SEQ ID NO: 8231 - DNA, 15 bp, Homo sapiens
aaaaattttaatcta

SEQ ID NO: 8232 - DNA, 15 bp, Homo sapiens
taaaaattttaatct

SEQ ID NO: 8233 - DNA, 15 bp, Homo sapiens
ttaaaaattttaatc

SEQ ID NO: 8234 - DNA, 15 bp, Homo sapiens
gttaaaaattttaat

SEQ ID NO: 8235 - DNA, 15 bp, Homo sapiens
ggttaaaaattttaa

SEQ ID NO: 8236 - DNA, 15 bp, Homo sapiens
tggttaaaaatttta

SEQ ID NO: 8237 - DNA, 15 bp, Homo sapiens
gtggttaaaaatttt

SEQ ID NO: 8238 - DNA, 15 bp, Homo sapiens
tgtggttaaaaattt

SEQ ID NO: 8239 - DNA, 15 bp, Homo sapiens
ctgtggttaaaaatt

SEQ ID NO: 8240 - DNA, 15 bp, Homo sapiens
actgtggttaaaaat

SEQ ID NO: 8241 - DNA, 15 bp, Homo sapiens
tactgtggttaaaaa

SEQ ID NO: 8242 - DNA, 15 bp, Homo sapiens
ttactgtggttaaaa

SEQ ID NO: 8243 - DNA, 15 bp, Homo sapiens
tttactgtggttaaa

SEQ ID NO: 8244 - DNA, 15 bp, Homo sapiens
atttactgtggttaa

SEQ ID NO: 8245 - DNA, 15 bp, Homo sapiens
tatttactgtggtta

SEQ ID NO: 8246 - DNA, 15 bp, Homo sapiens
gtatttactgtggtt

SEQ ID NO: 8247 - DNA, 15 bp, Homo sapiens
agtatttactgtggt

SEQ ID NO: 8248 - DNA, 15 bp, Homo sapiens
aagtatttactgtgg

SEQ ID NO: 8249 - DNA, 15 bp, Homo sapiens
taagtatttactgtg

SEQ ID NO: 8250 - DNA, 15 bp, Homo sapiens
ctaagtatttactgt

SEQ ID NO: 8251 - DNA, 15 bp, Homo sapiens
gctaagtatttactg

SEQ ID NO: 8252 - DNA, 15 bp, Homo sapiens
tgctaagtatttact

SEQ ID NO: 8253 - DNA, 15 bp, Homo sapiens
gtgctaagtatttac

SEQ ID NO: 8254 - DNA, 15 bp, Homo sapiens
tgtgctaagtattta

SEQ ID NO: 8255 - DNA, 15 bp, Homo sapiens
ttgtgctaagtattt

SEQ ID NO: 8256 - DNA, 15 bp, Homo sapiens
cttgtgctaagtatt

SEQ ID NO: 8257 - DNA, 15 bp, Homo sapiens
ccttgtgctaagtat

SEQ ID NO: 8258 - DNA, 15 bp, Homo sapiens
gccttgtgctaagta

SEQ ID NO: 8259 - DNA, 15 bp, Homo sapiens
ggccttgtgctaagt

SEQ ID NO: 8260 - DNA, 15 bp, Homo sapiens
aggccttgtgctaag

SEQ ID NO: 8261 - DNA, 15 bp, Homo sapiens
caggccttgtgctaa

SEQ ID NO: 8262 - DNA, 15 bp, Homo sapiens
tcaggccttgtgcta

SEQ ID NO: 8263 - DNA, 15 bp, Homo sapiens
gtcaggccttgtgct

SEQ ID NO: 8264 - DNA, 15 bp, Homo sapiens
tgtcaggccttgtgc

SEQ ID NO: 8265 - DNA, 15 bp, Homo sapiens
gtgtcaggccttgtg

SEQ ID NO: 8266 - DNA, 15 bp, Homo sapiens
tgtgtcaggccttgt

SEQ ID NO: 8267 - DNA, 15 bp, Homo sapiens
gtgtgtcaggccttg

SEQ ID NO: 8268 - DNA, 15 bp, Homo sapiens
tgtgtgtcaggcctt

SEQ ID NO: 8269 - DNA, 15 bp, Homo sapiens
ttgtgtgtcaggcct

SEQ ID NO: 8270 - DNA, 15 bp, Homo sapiens
attgtgtgtcaggcc

SEQ ID NO: 8271 - DNA, 15 bp, Homo sapiens
tattgtgtgtcaggc

SEQ ID NO: 8272 - DNA, 15 bp, Homo sapiens
ttattgtgtgtcagg

SEQ ID NO: 8273 - DNA, 15 bp, Homo sapiens
tttattgtgtgtcag

SEQ ID NO: 8274 - DNA, 15 bp, Homo sapiens
gtttattgtgtgtca

SEQ ID NO: 8275 - DNA, 15 bp, Homo sapiens
ggtttattgtgtgtc

SEQ ID NO: 8276 - DNA, 15 bp, Homo sapiens
gggtttattgtgtgt

SEQ ID NO: 8277 - DNA, 15 bp, Homo sapiens
tgggtttattgtgtg

SEQ ID NO: 8278 - DNA, 15 bp, Homo sapiens
ttgggtttattgtgt

SEQ ID NO: 8279 - DNA, 15 bp, Homo sapiens
cttgggtttattgtg

SEQ ID NO: 8280 - DNA, 15 bp, Homo sapiens
tcttgggtttattgt

SEQ ID NO: 8281 - DNA, 15 bp, Homo sapiens
atcttgggtttattg

SEQ ID NO: 8282 - DNA, 15 bp, Homo sapiens
gatcttgggtttatt

SEQ ID NO: 8283 - DNA, 15 bp, Homo sapiens
tgatcttgggtttat

SEQ ID NO: 8284 - DNA, 15 bp, Homo sapiens
ctgatcttgggttta

SEQ ID NO: 8285 - DNA, 15 bp, Homo sapiens
gctgatcttgggttt

SEQ ID NO: 8286 - DNA, 15 bp, Homo sapiens
tgctgatcttgggtt

SEQ ID NO: 8287 - DNA, 15 bp, Homo sapiens
atgctgatcttgggt

SEQ ID NO: 8288 - DNA, 15 bp, Homo sapiens
aatgctgatcttggg

SEQ ID NO: 8289 - DNA, 15 bp, Homo sapiens
taatgctgatcttgg

SEQ ID NO: 8290 - DNA, 15 bp, Homo sapiens
ctaatgctgatcttg

SEQ ID NO: 8291 - DNA, 15 bp, Homo sapiens
cctaatgctgatctt

SEQ ID NO: 8292 - DNA, 15 bp, Homo sapiens
acctaatgctgatct

SEQ ID NO: 8293 - DNA, 15 bp, Homo sapiens
cacctaatgctgatc

SEQ ID NO: 8294 - DNA, 15 bp, Homo sapiens
acacctaatgctgat

SEQ ID NO: 8295 - DNA, 15 bp, Homo sapiens
aacacctaatgctga

SEQ ID NO: 8296 - DNA, 15 bp, Homo sapiens
taacacctaatgctg

SEQ ID NO: 8297 - DNA, 15 bp, Homo sapiens
ttaacacctaatgct

SEQ ID NO: 8298 - DNA, 15 bp, Homo sapiens
tttaacacctaatgc

SEQ ID NO: 8299 - DNA, 15 bp, Homo sapiens
ttttaacacctaatg

SEQ ID NO: 8300 - DNA, 15 bp, Homo sapiens
gttttaacacctaat

SEQ ID NO: 8301 - DNA, 15 bp, Homo sapiens
agttttaacacctaa

SEQ ID NO: 8302 - DNA, 15 bp, Homo sapiens
aagttttaacaccta

SEQ ID NO: 8303 - DNA, 15 bp, Homo sapiens
taagttttaacacct

SEQ ID NO: 8304 - DNA, 15 bp, Homo sapiens
ataagttttaacacc

SEQ ID NO: 8305 - DNA, 15 bp, Homo sapiens
tataagttttaacac

SEQ ID NO: 8306 - DNA, 15 bp, Homo sapiens
atataagttttaaca

SEQ ID NO: 8307 - DNA, 15 bp, Homo sapiens
gatataagttttaac

SEQ ID NO: 8308 - DNA, 15 bp, Homo sapiens
agatataagttttaa

SEQ ID NO: 8309 - DNA, 15 bp, Homo sapiens
aagatataagtttta

SEQ ID NO: 8310 - DNA, 15 bp, Homo sapiens
caagatataagtttt

SEQ ID NO: 8311 - DNA, 15 bp, Homo sapiens
tcaagatataagttt

SEQ ID NO: 8312 - DNA, 15 bp, Homo sapiens
ttcaagatataagtt

SEQ ID NO: 8313 - DNA, 15 bp, Homo sapiens
attcaagatataagt

SEQ ID NO: 8314 - DNA, 15 bp, Homo sapiens
cattcaagatataag

SEQ ID NO: 8315 - DNA, 15 bp, Homo sapiens
ccattcaagatataa

SEQ ID NO: 8316 - DNA, 15 bp, Homo sapiens
tccattcaagatata

SEQ ID NO: 8317 - DNA, 15 bp, Homo sapiens
atccattcaagatat

SEQ ID NO: 8318 - DNA, 15 bp, Homo sapiens
gatccattcaagata

SEQ ID NO: 8319 - DNA, 15 bp, Homo sapiens
agatccattcaagat

SEQ ID NO: 8320 - DNA, 15 bp, Homo sapiens
cagatccattcaaga

SEQ ID NO: 8321 - DNA, 15 bp, Homo sapiens
ccagatccattcaag

SEQ ID NO: 8322 - DNA, 15 bp, Homo sapiens
cccagatccattcaa

SEQ ID NO: 8323 - DNA, 15 bp, Homo sapiens
gcccagatccattca

SEQ ID NO: 8324 - DNA, 15 bp, Homo sapiens
tgcccagatccattc

SEQ ID NO: 8325 - DNA, 15 bp, Homo sapiens
atgcccagatccatt

SEQ ID NO: 8326 - DNA, 15 bp, Homo sapiens
aatgcccagatccat

SEQ ID NO: 8327 - DNA, 15 bp, Homo sapiens
aaatgcccagatcca

SEQ ID NO: 8328 - DNA, 15 bp, Homo sapiens
aaaatgcccagatcc

SEQ ID NO: 8329 - DNA, 15 bp, Homo sapiens
taaaatgcccagatc

SEQ ID NO: 8330 - DNA, 15 bp, Homo sapiens
ctaaaatgcccagat

SEQ ID NO: 8331 - DNA, 15 bp, Homo sapiens
cctaaaatgcccaga

SEQ ID NO: 8332 - DNA, 15 bp, Homo sapiens
ccctaaaatgcccag

SEQ ID NO: 8333 - DNA, 15 bp, Homo sapiens
accctaaaatgccca

SEQ ID NO: 8334 - DNA, 15 bp, Homo sapiens
taccctaaaatgccc

SEQ ID NO: 8335 - DNA, 15 bp, Homo sapiens
ataccctaaaatgcc

SEQ ID NO: 8336 - DNA, 15 bp, Homo sapiens
tataccctaaaatgc

SEQ ID NO: 8337 - DNA, 15 bp, Homo sapiens
atataccctaaaatg

SEQ ID NO: 8338 - DNA, 15 bp, Homo sapiens
catataccctaaaat

SEQ ID NO: 8339 - DNA, 15 bp, Homo sapiens
tcatataccctaaaa

SEQ ID NO: 8340 - DNA, 15 bp, Homo sapiens
atcatataccctaaa

SEQ ID NO: 8341 - DNA, 15 bp, Homo sapiens
catcatataccctaa

SEQ ID NO: 8342 - DNA, 15 bp, Homo sapiens
tcatcatatacccta

SEQ ID NO: 8343 - DNA, 15 bp, Homo sapiens
atcatcatataccct

SEQ ID NO: 8344 - DNA, 15 bp, Homo sapiens
catcatcatataccc

SEQ ID NO: 8345 - DNA, 15 bp, Homo sapiens
ccatcatcatatacc

SEQ ID NO: 8346 - DNA, 15 bp, Homo sapiens
accatcatcatatac

SEQ ID NO: 8347 - DNA, 15 bp, Homo sapiens
caccatcatcatata

SEQ ID NO: 8348 - DNA, 15 bp, Homo sapiens
tcaccatcatcatat

SEQ ID NO: 8349 - DNA, 15 bp, Homo sapiens
gtcaccatcatcata

SEQ ID NO: 8350 - DNA, 15 bp, Homo sapiens
tgtcaccatcatcat

SEQ ID NO: 8351 - DNA, 15 bp, Homo sapiens
atgtcaccatcatca

SEQ ID NO: 8352 - DNA, 15 bp, Homo sapiens
aatgtcaccatcatc

SEQ ID NO: 8353 - DNA, 15 bp, Homo sapiens
aaatgtcaccatcat

SEQ ID NO: 8354 - DNA, 15 bp, Homo sapiens
gaaatgtcaccatca

SEQ ID NO: 8355 - DNA, 15 bp, Homo sapiens
tgaaatgtcaccatc

SEQ ID NO: 8356 - DNA, 15 bp, Homo sapiens
ttgaaatgtcaccat

SEQ ID NO: 8357 - DNA, 15 bp, Homo sapiens
tttgaaatgtcacca

SEQ ID NO: 8358 - DNA, 15 bp, Homo sapiens
gtttgaaatgtcacc

SEQ ID NO: 8359 - DNA, 15 bp, Homo sapiens
agtttgaaatgtcac

SEQ ID NO: 8360 - DNA, 15 bp, Homo sapiens
cagtttgaaatgtca

SEQ ID NO: 8361 - DNA, 15 bp, Homo sapiens
ccagtttgaaatgtc

SEQ ID NO: 8362 - DNA, 15 bp, Homo sapiens
cccagtttgaaatgt

SEQ ID NO: 8363 - DNA, 15 bp, Homo sapiens
gcccagtttgaaatg

SEQ ID NO: 8364 - DNA, 15 bp, Homo sapiens
tgcccagtttgaaat

SEQ ID NO: 8365 - DNA, 15 bp, Homo sapiens
ctgcccagtttgaaa

SEQ ID NO: 8366 - DNA, 15 bp, Homo sapiens
cctgcccagtttgaa

SEQ ID NO: 8367 - DNA, 15 bp, Homo sapiens
ccctgcccagtttga

SEQ ID NO: 8368 - DNA, 15 bp, Homo sapiens
tccctgcccagtttg

SEQ ID NO: 8369 - DNA, 15 bp, Homo sapiens
ctccctgcccagttt

SEQ ID NO: 8370 - DNA, 15 bp, Homo sapiens
cctccctgcccagtt

SEQ ID NO: 8371 - DNA, 15 bp, Homo sapiens
ccctccctgcccagt

SEQ ID NO: 8372 - DNA, 15 bp, Homo sapiens
cccctccctgcccag

SEQ ID NO: 8373 - DNA, 15 bp, Homo sapiens
acccctccctgccca

SEQ ID NO: 8374 - DNA, 15 bp, Homo sapiens
aacccctccctgccc

SEQ ID NO: 8375 - DNA, 15 bp, Homo sapiens
caacccctccctgcc

SEQ ID NO: 8376 - DNA, 15 bp, Homo sapiens
acaacccctccctgc

SEQ ID NO: 8377 - DNA, 15 bp, Homo sapiens
aacaacccctccctg

SEQ ID NO: 8378 - DNA, 15 bp, Homo sapiens
caacaacccctccct

SEQ ID NO: 8379 - DNA, 15 bp, Homo sapiens
ccaacaacccctccc

SEQ ID NO: 8380 - DNA, 15 bp, Homo sapiens
cccaacaacccctcc

SEQ ID NO: 8381 - DNA, 15 bp, Homo sapiens
tcccaacaacccctc

SEQ ID NO: 8382 - DNA, 15 bp, Homo sapiens
atcccaacaacccct

SEQ ID NO: 8383 - DNA, 15 bp, Homo sapiens
tatcccaacaacccc

SEQ ID NO: 8384 - DNA, 15 bp, Homo sapiens
ttatcccaacaaccc

SEQ ID NO: 8385 - DNA, 15 bp, Homo sapiens
attatcccaacaacc

SEQ ID NO: 8386 - DNA, 15 bp, Homo sapiens
cattatcccaacaac

SEQ ID NO: 8387 - DNA, 15 bp, Homo sapiens
ccattatcccaacaa

SEQ ID NO: 8388 - DNA, 15 bp, Homo sapiens
tccattatcccaaca

SEQ ID NO: 8389 - DNA, 15 bp, Homo sapiens
gtccattatcccaac

SEQ ID NO: 8390 - DNA, 15 bp, Homo sapiens
agtccattatcccaa

SEQ ID NO: 8391 - DNA, 15 bp, Homo sapiens
cagtccattatccca

SEQ ID NO: 8392 - DNA, 15 bp, Homo sapiens
tcagtccattatccc

SEQ ID NO: 8393 - DNA, 15 bp, Homo sapiens
gtcagtccattatcc

SEQ ID NO: 8394 - DNA, 15 bp, Homo sapiens
agtcagtccattatc

SEQ ID NO: 8395 - DNA, 15 bp, Homo sapiens
tagtcagtccattat

SEQ ID NO: 8396 - DNA, 15 bp, Homo sapiens
atagtcagtccatta

SEQ ID NO: 8397 - DNA, 15 bp, Homo sapiens
aatagtcagtccatt

SEQ ID NO: 8398 - DNA, 15 bp, Homo sapiens
gaatagtcagtccat

SEQ ID NO: 8399 - DNA, 15 bp, Homo sapiens
tgaatagtcagtcca

SEQ ID NO: 8400 - DNA, 15 bp, Homo sapiens
gtgaatagtcagtcc

SEQ ID NO: 8401 - DNA, 15 bp, Homo sapiens
agtgaatagtcagtc

SEQ ID NO: 8402 - DNA, 15 bp, Homo sapiens
gagtgaatagtcagt

SEQ ID NO: 8403 - DNA, 15 bp, Homo sapiens
tgagtgaatagtcag

SEQ ID NO: 8404 - DNA, 15 bp, Homo sapiens
ttgagtgaatagtca

SEQ ID NO: 8405 - DNA, 15 bp, Homo sapiens
attgagtgaatagtc

SEQ ID NO: 8406 - DNA, 15 bp, Homo sapiens
tattgagtgaatagt

SEQ ID NO: 8407 - DNA, 15 bp, Homo sapiens
ttattgagtgaatag

SEQ ID NO: 8408 - DNA, 15 bp, Homo sapiens
gttattgagtgaata

SEQ ID NO: 8409 - DNA, 15 bp, Homo sapiens
agttattgagtgaat

SEQ ID NO: 8410 - DNA, 15 bp, Homo sapiens
aagttattgagtgaa

SEQ ID NO: 8411 - DNA, 15 bp, Homo sapiens
aaagttattgagtga

SEQ ID NO: 8412 - DNA, 15 bp, Homo sapiens
taaagttattgagtg

SEQ ID NO: 8413 - DNA, 15 bp, Homo sapiens
ataaagttattgagt

SEQ ID NO: 8414 - DNA, 15 bp, Homo sapiens
gataaagttattgag

SEQ ID NO: 8415 - DNA, 15 bp, Homo sapiens
agataaagttattga

SEQ ID NO: 8416 - DNA, 15 bp, Homo sapiens
aagataaagttattg

SEQ ID NO: 8417 - DNA, 15 bp, Homo sapiens
gaagataaagttatt

SEQ ID NO: 8418 - DNA, 15 bp, Homo sapiens
agaagataaagttat

SEQ ID NO: 8419 - DNA, 15 bp, Homo sapiens
gagaagataaagtta

SEQ ID NO: 8420 - DNA, 15 bp, Homo sapiens
ggagaagataaagtt

SEQ ID NO: 8421 - DNA, 15 bp, Homo sapiens
gggagaagataaagt

SEQ ID NO: 8422 - DNA, 15 bp, Homo sapiens
agggagaagataaag

SEQ ID NO: 8423 - DNA, 15 bp, Homo sapiens
tagggagaagataaa

SEQ ID NO: 8424 - DNA, 15 bp, Homo sapiens
ttagggagaagataa

SEQ ID NO: 8425 - DNA, 15 bp, Homo sapiens
attagggagaagata

SEQ ID NO: 8426 - DNA, 15 bp, Homo sapiens
aattagggagaagat

SEQ ID NO: 8427 - DNA, 15 bp, Homo sapiens
taattagggagaaga

SEQ ID NO: 8428 - DNA, 15 bp, Homo sapiens
ataattagggagaag

SEQ ID NO: 8429 - DNA, 15 bp, Homo sapiens
gataattagggagaa

SEQ ID NO: 8430 - DNA, 15 bp, Homo sapiens
agataattagggaga

SEQ ID NO: 8431 - DNA, 15 bp, Homo sapiens
gagataattagggag

SEQ ID NO: 8432 - DNA, 15 bp, Homo sapiens
tgagataattaggga

SEQ ID NO: 8433 - DNA, 15 bp, Homo sapiens
ctgagataattaggg

SEQ ID NO: 8434 - DNA, 15 bp, Homo sapiens
tctgagataattagg

SEQ ID NO: 8435 - DNA, 15 bp, Homo sapiens
gtctgagataattag

SEQ ID NO: 8436 - DNA, 15 bp, Homo sapiens
tgtctgagataatta

SEQ ID NO: 8437 - DNA, 15 bp, Homo sapiens
gtgtctgagataatt

SEQ ID NO: 8438 - DNA, 15 bp, Homo sapiens
tgtgtctgagataat

SEQ ID NO: 8439 - DNA, 15 bp, Homo sapiens
atgtgtctgagataa

SEQ ID NO: 8440 - DNA, 15 bp, Homo sapiens
aatgtgtctgagata

SEQ ID NO: 8441 - DNA, 15 bp, Homo sapiens
aaatgtgtctgagat

SEQ ID NO: 8442 - DNA, 15 bp, Homo sapiens
caaatgtgtctgaga

SEQ ID NO: 8443 - DNA, 15 bp, Homo sapiens
acaaatgtgtctgag

SEQ ID NO: 8444 - DNA, 15 bp, Homo sapiens
aacaaatgtgtctga

SEQ ID NO: 8445 - DNA, 15 bp, Homo sapiens
taacaaatgtgtctg

SEQ ID NO: 8446 - DNA, 15 bp, Homo sapiens
ttaacaaatgtgtct

SEQ ID NO: 8447 - DNA, 15 bp, Homo sapiens
tttaacaaatgtgtc

SEQ ID NO: 8448 - DNA, 15 bp, Homo sapiens
gtttaacaaatgtgt

SEQ ID NO: 8449 - DNA, 15 bp, Homo sapiens
ggtttaacaaatgtg

SEQ ID NO: 8450 - DNA, 15 bp, Homo sapiens
tggtttaacaaatgt

SEQ ID NO: 8451 - DNA, 15 bp, Homo sapiens
atggtttaacaaatg

SEQ ID NO: 8452 - DNA, 15 bp, Homo sapiens
tatggtttaacaaat

SEQ ID NO: 8453 - DNA, 15 bp, Homo sapiens
gtatggtttaacaaa

SEQ ID NO: 8454 - DNA, 15 bp, Homo sapiens
agtatggtttaacaa

SEQ ID NO: 8455 - DNA, 15 bp, Homo sapiens
gagtatggtttaaca

SEQ ID NO: 8456 - DNA, 15 bp, Homo sapiens
ggagtatggtttaac

SEQ ID NO: 8457 - DNA, 15 bp, Homo sapiens
tggagtatggtttaa

SEQ ID NO: 8458 - DNA, 15 bp, Homo sapiens
atggagtatggttta

SEQ ID NO: 8459 - DNA, 15 bp, Homo sapiens
catggagtatggttt

SEQ ID NO: 8460 - DNA, 15 bp, Homo sapiens
ccatggagtatggtt

SEQ ID NO: 8461 - DNA, 15 bp, Homo sapiens
accatggagtatggt

SEQ ID NO: 8462 - DNA, 15 bp, Homo sapiens
gaccatggagtatgg

SEQ ID NO: 8463 - DNA, 15 bp, Homo sapiens
ggaccatggagtatg

SEQ ID NO: 8464 - DNA, 15 bp, Homo sapiens
aggaccatggagtat

SEQ ID NO: 8465 - DNA, 15 bp, Homo sapiens
gaggaccatggagta

SEQ ID NO: 8466 - DNA, 15 bp, Homo sapiens
ggaggaccatggagt

SEQ ID NO: 8467 - DNA, 15 bp, Homo sapiens
tggaggaccatggag

SEQ ID NO: 8468 - DNA, 15 bp, Homo sapiens
ctggaggaccatgga

SEQ ID NO: 8469 - DNA, 15 bp, Homo sapiens
actggaggaccatgg

SEQ ID NO: 8470 - DNA, 15 bp, Homo sapiens
aactggaggaccatg

SEQ ID NO: 8471 - DNA, 15 bp, Homo sapiens
aaactggaggaccat

SEQ ID NO: 8472 - DNA, 15 bp, Homo sapiens
caaactggaggacca

SEQ ID NO: 8473 - DNA, 15 bp, Homo sapiens
tcaaactggaggacc

SEQ ID NO: 8474 - DNA, 15 bp, Homo sapiens
ttcaaactggaggac

SEQ ID NO: 8475 - DNA, 15 bp, Homo sapiens
tttcaaactggagga

SEQ ID NO: 8476 - DNA, 15 bp, Homo sapiens
atttcaaactggagg

SEQ ID NO: 8477 - DNA, 15 bp, Homo sapiens
catttcaaactggag

SEQ ID NO: 8478 - DNA, 15 bp, Homo sapiens
gcatttcaaactgga

SEQ ID NO: 8479 - DNA, 15 bp, Homo sapiens
ggcatttcaaactgg

SEQ ID NO: 8480 - DNA, 15 bp, Homo sapiens
tggcatttcaaactg

SEQ ID NO: 8481 - DNA, 15 bp, Homo sapiens
gtggcatttcaaact

SEQ ID NO: 8482 - DNA, 15 bp, Homo sapiens
tgtggcatttcaaac

SEQ ID NO: 8483 - DNA, 15 bp, Homo sapiens
atgtggcatttcaaa

SEQ ID NO: 8484 - DNA, 15 bp, Homo sapiens
aatgtggcatttcaa

SEQ ID NO: 8485 - DNA, 15 bp, Homo sapiens
gaatgtggcatttca

SEQ ID NO: 8486 - DNA, 15 bp, Homo sapiens
tgaatgtggcatttc

SEQ ID NO: 8487 - DNA, 15 bp, Homo sapiens
atgaatgtggcattt

SEQ ID NO: 8488 - DNA, 15 bp, Homo sapiens
gatgaatgtggcatt

SEQ ID NO: 8489 - DNA, 15 bp, Homo sapiens
tgatgaatgtggcat

SEQ ID NO: 8490 - DNA, 15 bp, Homo sapiens
gtgatgaatgtggca

SEQ ID NO: 8491 - DNA, 15 bp, Homo sapiens
tgtgatgaatgtggc

SEQ ID NO: 8492 - DNA, 15 bp, Homo sapiens
ttgtgatgaatgtgg

SEQ ID NO: 8493 - DNA, 15 bp, Homo sapiens
tttgtgatgaatgtg

SEQ ID NO: 8494 - DNA, 15 bp, Homo sapiens
atttgtgatgaatgt

SEQ ID NO: 8495 - DNA, 15 bp, Homo sapiens
aatttgtgatgaatg

SEQ ID NO: 8496 - DNA, 15 bp, Homo sapiens
gaatttgtgatgaat

SEQ ID NO: 8497 - DNA, 15 bp, Homo sapiens
tgaatttgtgatgaa

SEQ ID NO: 8498 - DNA, 15 bp, Homo sapiens
ctgaatttgtgatga

SEQ ID NO: 8499 - DNA, 15 bp, Homo sapiens
actgaatttgtgatg

SEQ ID NO: 8500 - DNA, 15 bp, Homo sapiens
aactgaatttgtgat

SEQ ID NO: 8501 - DNA, 15 bp, Homo sapiens
gaactgaatttgtga

SEQ ID NO: 8502 - DNA, 15 bp, Homo sapiens
agaactgaatttgtg

SEQ ID NO: 8503 - DNA, 15 bp, Homo sapiens
gagaactgaatttgt

SEQ ID NO: 8504 - DNA, 15 bp, Homo sapiens
agagaactgaatttg

SEQ ID NO: 8505 - DNA, 15 bp, Homo sapiens
gagagaactgaattt

SEQ ID NO: 8506 - DNA, 15 bp, Homo sapiens
ggagagaactgaatt

SEQ ID NO: 8507 - DNA, 15 bp, Homo sapiens
tggagagaactgaat

SEQ ID NO: 8508 - DNA, 15 bp, Homo sapiens
atggagagaactgaa

SEQ ID NO: 8509 - DNA, 15 bp, Homo sapiens
tatggagagaactga

SEQ ID NO: 8510 - DNA, 15 bp, Homo sapiens
atatggagagaactg

SEQ ID NO: 8511 - DNA, 15 bp, Homo sapiens
catatggagagaact

SEQ ID NO: 8512 - DNA, 15 bp, Homo sapiens
acatatggagagaac

SEQ ID NO: 8513 - DNA, 15 bp, Homo sapiens
cacatatggagagaa

SEQ ID NO: 8514 - DNA, 15 bp, Homo sapiens
ccacatatggagaga

SEQ ID NO: 8515 - DNA, 15 bp, Homo sapiens
cccacatatggagag

SEQ ID NO: 8516 - DNA, 15 bp, Homo sapiens
acccacatatggaga

SEQ ID NO: 8517 - DNA, 15 bp, Homo sapiens
gacccacatatggag

SEQ ID NO: 8518 - DNA, 15 bp, Homo sapiens
ggacccacatatgga

SEQ ID NO: 8519 - DNA, 15 bp, Homo sapiens
tggacccacatatgg

SEQ ID NO: 8520 - DNA, 15 bp, Homo sapiens
atggacccacatatg

SEQ ID NO: 8521 - DNA, 15 bp, Homo sapiens
catggacccacatat

SEQ ID NO: 8522 - DNA, 15 bp, Homo sapiens
acatggacccacata

SEQ ID NO: 8523 - DNA, 15 bp, Homo sapiens
gacatggacccacat

SEQ ID NO: 8524 - DNA, 15 bp, Homo sapiens
ggacatggacccaca

SEQ ID NO: 8525 - DNA, 15 bp, Homo sapiens
tggacatggacccac

SEQ ID NO: 8526 - DNA, 15 bp, Homo sapiens
ttggacatggaccca

SEQ ID NO: 8527 - DNA, 15 bp, Homo sapiens
cttggacatggaccc

SEQ ID NO: 8528 - DNA, 15 bp, Homo sapiens
gcttggacatggacc

SEQ ID NO: 8529 - DNA, 15 bp, Homo sapiens
agcttggacatggac

SEQ ID NO: 8530 - DNA, 15 bp, Homo sapiens
aagcttggacatgga

SEQ ID NO: 8531 - DNA, 15 bp, Homo sapiens
aaagcttggacatgg

SEQ ID NO: 8532 - DNA, 15 bp, Homo sapiens
gaaagcttggacatg

SEQ ID NO: 8533 - DNA, 15 bp, Homo sapiens
agaaagcttggacat

SEQ ID NO: 8534 - DNA, 15 bp, Homo sapiens
tagaaagcttggaca

SEQ ID NO: 8535 - DNA, 15 bp, Homo sapiens
atagaaagcttggac

SEQ ID NO: 8536 - DNA, 15 bp, Homo sapiens
aatagaaagcttgga

SEQ ID NO: 8537 - DNA, 15 bp, Homo sapiens
gaatagaaagcttgg

SEQ ID NO: 8538 - DNA, 15 bp, Homo sapiens
agaatagaaagcttg

SEQ ID NO: 8539 - DNA, 15 bp, Homo sapiens
cagaatagaaagctt

SEQ ID NO: 8540 - DNA, 15 bp, Homo sapiens
acagaatagaaagct

SEQ ID NO: 8541 - DNA, 15 bp, Homo sapiens
aacagaatagaaagc

SEQ ID NO: 8542 - DNA, 15 bp, Homo sapiens
gaacagaatagaaag

SEQ ID NO: 8543 - DNA, 15 bp, Homo sapiens
agaacagaatagaaa

SEQ ID NO: 8544 - DNA, 15 bp, Homo sapiens
gagaacagaatagaa

SEQ ID NO: 8545 - DNA, 15 bp, Homo sapiens
agagaacagaataga

SEQ ID NO: 8546 - DNA, 15 bp, Homo sapiens
aagagaacagaatag

SEQ ID NO: 8547 - DNA, 15 bp, Homo sapiens
gaagagaacagaata

SEQ ID NO: 8548 - DNA, 15 bp, Homo sapiens
ggaagagaacagaat

SEQ ID NO: 8549 - DNA, 15 bp, Homo sapiens
gggaagagaacagaa

SEQ ID NO: 8550 - DNA, 15 bp, Homo sapiens
ggggaagagaacaga

SEQ ID NO: 8551 - DNA, 15 bp, Homo sapiens
tggggaagagaacag

SEQ ID NO: 8552 - DNA, 15 bp, Homo sapiens
ctggggaagagaaca

SEQ ID NO: 8553 - DNA, 15 bp, Homo sapiens
actggggaagagaac

SEQ ID NO: 8554 - DNA, 15 bp, Homo sapiens
tactggggaagagaa

SEQ ID NO: 8555 - DNA, 15 bp, Homo sapiens
atactggggaagaga

SEQ ID NO: 8556 - DNA, 15 bp, Homo sapiens
gatactggggaagag

SEQ ID NO: 8557 - DNA, 15 bp, Homo sapiens
agatactggggaaga

SEQ ID NO: 8558 - DNA, 15 bp, Homo sapiens
cagatactggggaag

SEQ ID NO: 8559 - DNA, 15 bp, Homo sapiens
acagatactggggaa

SEQ ID NO: 8560 - DNA, 15 bp, Homo sapiens
aacagatactgggga

SEQ ID NO: 8561 - DNA, 15 bp, Homo sapiens
gaacagatactgggg

SEQ ID NO: 8562 - DNA, 15 bp, Homo sapiens
agaacagatactggg

SEQ ID NO: 8563 - DNA, 15 bp, Homo sapiens
aagaacagatactgg

SEQ ID NO: 8564 - DNA, 15 bp, Homo sapiens
taagaacagatactg

SEQ ID NO: 8565 - DNA, 15 bp, Homo sapiens
ataagaacagatact

SEQ ID NO: 8566 - DNA, 15 bp, Homo sapiens
tataagaacagatac

SEQ ID NO: 8567 - DNA, 15 bp, Homo sapiens
gtataagaacagata

SEQ ID NO: 8568 - DNA, 15 bp, Homo sapiens
ggtataagaacagat

SEQ ID NO: 8569 - DNA, 15 bp, Homo sapiens
tggtataagaacaga

SEQ ID NO: 8570 - DNA, 15 bp, Homo sapiens
ctggtataagaacag

SEQ ID NO: 8571 - DNA, 15 bp, Homo sapiens
cctggtataagaaca

SEQ ID NO: 8572 - DNA, 15 bp, Homo sapiens
ccctggtataagaac

SEQ ID NO: 8573 - DNA, 15 bp, Homo sapiens
gccctggtataagaa

SEQ ID NO: 8574 - DNA, 15 bp, Homo sapiens
ggccctggtataaga

SEQ ID NO: 8575 - DNA, 15 bp, Homo sapiens
tggccctggtataag

SEQ ID NO: 8576 - DNA, 15 bp, Homo sapiens
gtggccctggtataa

SEQ ID NO: 8577 - DNA, 15 bp, Homo sapiens
tgtggccctggtata

SEQ ID NO: 8578 - DNA, 15 bp, Homo sapiens
gtgtggccctggtat

SEQ ID NO: 8579 - DNA, 15 bp, Homo sapiens
agtgtggccctggta

SEQ ID NO: 8580 - DNA, 15 bp, Homo sapiens
cagtgtggccctggt

SEQ ID NO: 8581 - DNA, 15 bp, Homo sapiens
acagtgtggccctgg

SEQ ID NO: 8582 - DNA, 15 bp, Homo sapiens
aacagtgtggccctg

SEQ ID NO: 8583 - DNA, 15 bp, Homo sapiens
aaacagtgtggccct

SEQ ID NO: 8584 - DNA, 15 bp, Homo sapiens
aaaacagtgtggccc

SEQ ID NO: 8585 - DNA, 15 bp, Homo sapiens
caaaacagtgtggcc

SEQ ID NO: 8586 - DNA, 15 bp, Homo sapiens
gcaaaacagtgtggc

SEQ ID NO: 8587 - DNA, 15 bp, Homo sapiens
agcaaaacagtgtgg

SEQ ID NO: 8588 - DNA, 15 bp, Homo sapiens
cagcaaaacagtgtg

SEQ ID NO: 8589 - DNA, 15 bp, Homo sapiens
tcagcaaaacagtgt

SEQ ID NO: 8590 - DNA, 15 bp, Homo sapiens
atcagcaaaacagtg

SEQ ID NO: 8591 - DNA, 15 bp, Homo sapiens
aatcagcaaaacagt

SEQ ID NO: 8592 - DNA, 15 bp, Homo sapiens
caatcagcaaaacag

SEQ ID NO: 8593 - DNA, 15 bp, Homo sapiens
acaatcagcaaaaca

SEQ ID NO: 8594 - DNA, 15 bp, Homo sapiens
aacaatcagcaaaac

SEQ ID NO: 8595 - DNA, 15 bp, Homo sapiens
caacaatcagcaaaa

SEQ ID NO: 8596 - DNA, 15 bp, Homo sapiens
gcaacaatcagcaaa

SEQ ID NO: 8597 - DNA, 15 bp, Homo sapiens
agcaacaatcagcaa

SEQ ID NO: 8598 - DNA, 15 bp, Homo sapiens
aagcaacaatcagca

SEQ ID NO: 8599 - DNA, 15 bp, Homo sapiens
aaagcaacaatcagc

SEQ ID NO: 8600 - DNA, 15 bp, Homo sapiens
caaagcaacaatcag

SEQ ID NO: 8601 - DNA, 15 bp, Homo sapiens
gcaaagcaacaatca

SEQ ID NO: 8602 - DNA, 15 bp, Homo sapiens
tgcaaagcaacaatc

SEQ ID NO: 8603 - DNA, 15 bp, Homo sapiens
ttgcaaagcaacaat

SEQ ID NO: 8604 - DNA, 15 bp, Homo sapiens
attgcaaagcaacaa

SEQ ID NO: 8605 - DNA, 15 bp, Homo sapiens
tattgcaaagcaaca

SEQ ID NO: 8606 - DNA, 15 bp, Homo sapiens
gtattgcaaagcaac

SEQ ID NO: 8607 - DNA, 15 bp, Homo sapiens
tgtattgcaaagcaa

SEQ ID NO: 8608 - DNA, 15 bp, Homo sapiens
ttgtattgcaaagca

SEQ ID NO: 8609 - DNA, 15 bp, Homo sapiens
attgtattgcaaagc

SEQ ID NO: 8610 - DNA, 15 bp, Homo sapiens
aattgtattgcaaag

SEQ ID NO: 8611 - DNA, 15 bp, Homo sapiens
gaattgtattgcaaa

SEQ ID NO: 8612 - DNA, 15 bp, Homo sapiens
tgaattgtattgcaa

SEQ ID NO: 8613 - DNA, 15 bp, Homo sapiens
ttgaattgtattgca

SEQ ID NO: 8614 - DNA, 15 bp, Homo sapiens
attgaattgtattgc

SEQ ID NO: 8615 - DNA, 15 bp, Homo sapiens
tattgaattgtattg

SEQ ID NO: 8616 - DNA, 15 bp, Homo sapiens
gtattgaattgtatt

SEQ ID NO: 8617 - DNA, 15 bp, Homo sapiens
ggtattgaattgtat

SEQ ID NO: 8618 - DNA, 15 bp, Homo sapiens
gggtattgaattgta

SEQ ID NO: 8619 - DNA, 15 bp, Homo sapiens
tgggtattgaattgt

SEQ ID NO: 8620 - DNA, 15 bp, Homo sapiens
ctgggtattgaattg

SEQ ID NO: 8621 - DNA, 15 bp, Homo sapiens
gctgggtattgaatt

SEQ ID NO: 8622 - DNA, 15 bp, Homo sapiens
ggctgggtattgaat

SEQ ID NO: 8623 - DNA, 15 bp, Homo sapiens
tggctgggtattgaa

SEQ ID NO: 8624 - DNA, 15 bp, Homo sapiens
atggctgggtattga

SEQ ID NO: 8625 - DNA, 15 bp, Homo sapiens
catggctgggtattg

SEQ ID NO: 8626 - DNA, 15 bp, Homo sapiens
ccatggctgggtatt

SEQ ID NO: 8627 - DNA, 15 bp, Homo sapiens
cccatggctgggtat

SEQ ID NO: 8628 - DNA, 15 bp, Homo sapiens
acccatggctgggta

SEQ ID NO: 8629 - DNA, 15 bp, Homo sapiens
cacccatggctgggt

SEQ ID NO: 8630 - DNA, 15 bp, Homo sapiens
acacccatggctggg

SEQ ID NO: 8631 - DNA, 15 bp, Homo sapiens
gacacccatggctgg

SEQ ID NO: 8632 - DNA, 15 bp, Homo sapiens
ggacacccatggctg

SEQ ID NO: 8633 - DNA, 15 bp, Homo sapiens
gggacacccatggct

SEQ ID NO: 8634 - DNA, 15 bp, Homo sapiens
agggacacccatggc

SEQ ID NO: 8635 - DNA, 15 bp, Homo sapiens
cagggacacccatgg

SEQ ID NO: 8636 - DNA, 15 bp, Homo sapiens
ccagggacacccatg

SEQ ID NO: 8637 - DNA, 15 bp, Homo sapiens
gccagggacacccat

SEQ ID NO: 8638 - DNA, 15 bp, Homo sapiens
tgccagggacaccca

SEQ ID NO: 8639 - DNA, 15 bp, Homo sapiens
gtgccagggacaccc

SEQ ID NO: 8640 - DNA, 15 bp, Homo sapiens
ggtgccagggacacc

SEQ ID NO: 8641 - DNA, 15 bp, Homo sapiens
aggtgccagggacac

SEQ ID NO: 8642 - DNA, 15 bp, Homo sapiens
aaggtgccagggaca

SEQ ID NO: 8643 - DNA, 15 bp, Homo sapiens
caaggtgccagggac

SEQ ID NO: 8644 - DNA, 15 bp, Homo sapiens
gcaaggtgccaggga

SEQ ID NO: 8645 - DNA, 15 bp, Homo sapiens
ggcaaggtgccaggg

SEQ ID NO: 8646 - DNA, 15 bp, Homo sapiens
gggcaaggtgccagg

SEQ ID NO: 8647 - DNA, 15 bp, Homo sapiens
agggcaaggtgccag

SEQ ID NO: 8648 - DNA, 15 bp, Homo sapiens
aagggcaaggtgcca

SEQ ID NO: 8649 - DNA, 15 bp, Homo sapiens
gaagggcaaggtgcc

SEQ ID NO: 8650 - DNA, 15 bp, Homo sapiens
agaagggcaaggtgc

SEQ ID NO: 8651 - DNA, 15 bp, Homo sapiens
aagaagggcaaggtg

SEQ ID NO: 8652 - DNA, 15 bp, Homo sapiens
aaagaagggcaaggt

SEQ ID NO: 8653 - DNA, 15 bp, Homo sapiens
taaagaagggcaagg

SEQ ID NO: 8654 - DNA, 15 bp, Homo sapiens
ataaagaagggcaag

SEQ ID NO: 8655 - DNA, 15 bp, Homo sapiens
aataaagaagggcaa

SEQ ID NO: 8656 - DNA, 15 bp, Homo sapiens
gaataaagaagggca

SEQ ID NO: 8657 - DNA, 15 bp, Homo sapiens
agaataaagaagggc

SEQ ID NO: 8658 - DNA, 15 bp, Homo sapiens
aagaataaagaaggg

SEQ ID NO: 8659 - DNA, 15 bp, Homo sapiens
caagaataaagaagg

SEQ ID NO: 8660 - DNA, 15 bp, Homo sapiens
tcaagaataaagaag

SEQ ID NO: 8661 - DNA, 15 bp, Homo sapiens
atcaagaataaagaa

SEQ ID NO: 8662 - DNA, 15 bp, Homo sapiens
aatcaagaataaaga

SEQ ID NO: 8663 - DNA, 15 bp, Homo sapiens
taatcaagaataaag

SEQ ID NO: 8664 - DNA, 15 bp, Homo sapiens
ataatcaagaataaa

SEQ ID NO: 8665 - DNA, 15 bp, Homo sapiens
aataatcaagaataa

SEQ ID NO: 8666 - DNA, 15 bp, Homo sapiens
aaataatcaagaata

SEQ ID NO: 8667 - DNA, 15 bp, Homo sapiens
gaaataatcaagaat

SEQ ID NO: 8668 - DNA, 15 bp, Homo sapiens
tgaaataatcaagaa

SEQ ID NO: 8669 - DNA, 15 bp, Homo sapiens
ctgaaataatcaaga

SEQ ID NO: 8670 - DNA, 15 bp, Homo sapiens
cctgaaataatcaag

SEQ ID NO: 8671 - DNA, 15 bp, Homo sapiens
gcctgaaataatcaa

SEQ ID NO: 8672 - DNA, 15 bp, Homo sapiens
tgcctgaaataatca

SEQ ID NO: 8673 - DNA, 15 bp, Homo sapiens
ctgcctgaaataatc

SEQ ID NO: 8674 - DNA, 15 bp, Homo sapiens
gctgcctgaaataat

SEQ ID NO: 8675 - DNA, 15 bp, Homo sapiens
tgctgcctgaaataa

SEQ ID NO: 8676 - DNA, 15 bp, Homo sapiens
atgctgcctgaaata

SEQ ID NO: 8677 - DNA, 15 bp, Homo sapiens
gatgctgcctgaaat

SEQ ID NO: 8678 - DNA, 15 bp, Homo sapiens
tgatgctgcctgaaa

SEQ ID NO: 8679 - DNA, 15 bp, Homo sapiens
ctgatgctgcctgaa

SEQ ID NO: 8680 - DNA, 15 bp, Homo sapiens
actgatgctgcctga

SEQ ID NO: 8681 - DNA, 15 bp, Homo sapiens
aactgatgctgcctg

SEQ ID NO: 8682 - DNA, 15 bp, Homo sapiens
caactgatgctgcct

SEQ ID NO: 8683 - DNA, 15 bp, Homo sapiens
tcaactgatgctgcc

SEQ ID NO: 8684 - DNA, 15 bp, Homo sapiens
ttcaactgatgctgc

SEQ ID NO: 8685 - DNA, 15 bp, Homo sapiens
gttcaactgatgctg

SEQ ID NO: 8686 - DNA, 15 bp, Homo sapiens
ggttcaactgatgct

SEQ ID NO: 8687 - DNA, 15 bp, Homo sapiens
tggttcaactgatgc

SEQ ID NO: 8688 - DNA, 15 bp, Homo sapiens
ctggttcaactgatg

SEQ ID NO: 8689 - DNA, 15 bp, Homo sapiens
gctggttcaactgat

SEQ ID NO: 8690 - DNA, 15 bp, Homo sapiens
ggctggttcaactga

SEQ ID NO: 8691 - DNA, 15 bp, Homo sapiens
tggctggttcaactg

SEQ ID NO: 8692 - DNA, 15 bp, Homo sapiens
ctggctggttcaact

SEQ ID NO: 8693 - DNA, 15 bp, Homo sapiens
tctggctggttcaac

SEQ ID NO: 8694 - DNA, 15 bp, Homo sapiens
ctctggctggttcaa

SEQ ID NO: 8695 - DNA, 15 bp, Homo sapiens
tctctggctggttca

SEQ ID NO: 8696 - DNA, 15 bp, Homo sapiens
gtctctggctggttc

SEQ ID NO: 8697 - DNA, 15 bp, Homo sapiens
ggtctctggctggtt

SEQ ID NO: 8698 - DNA, 15 bp, Homo sapiens
tggtctctggctggt

SEQ ID NO: 8699 - DNA, 15 bp, Homo sapiens
ctggtctctggctgg

SEQ ID NO: 8700 - DNA, 15 bp, Homo sapiens
gctggtctctggctg

SEQ ID NO: 8701 - DNA, 15 bp, Homo sapiens
tgctggtctctggct

SEQ ID NO: 8702 - DNA, 15 bp, Homo sapiens
ttgctggtctctggc

SEQ ID NO: 8703 - DNA, 15 bp, Homo sapiens
tttgctggtctctgg

SEQ ID NO: 8704 - DNA, 15 bp, Homo sapiens
atttgctggtctctg

SEQ ID NO: 8705 - DNA, 15 bp, Homo sapiens
catttgctggtctct

SEQ ID NO: 8706 - DNA, 15 bp, Homo sapiens
acatttgctggtctc

SEQ ID NO: 8707 - DNA, 15 bp, Homo sapiens
aacatttgctggtct

SEQ ID NO: 8708 - DNA, 15 bp, Homo sapiens
gaacatttgctggtc

SEQ ID NO: 8709 - DNA, 15 bp, Homo sapiens
agaacatttgctggt

SEQ ID NO: 8710 - DNA, 15 bp, Homo sapiens
aagaacatttgctgg

SEQ ID NO: 8711 - DNA, 15 bp, Homo sapiens
taagaacatttgctg

SEQ ID NO: 8712 - DNA, 15 bp, Homo sapiens
ataagaacatttgct

SEQ ID NO: 8713 - DNA, 15 bp, Homo sapiens
aataagaacatttgc

SEQ ID NO: 8714 - DNA, 15 bp, Homo sapiens
aaataagaacatttg

SEQ ID NO: 8715 - DNA, 15 bp, Homo sapiens
caaataagaacattt

SEQ ID NO: 8716 - DNA, 15 bp, Homo sapiens
tcaaataagaacatt

SEQ ID NO: 8717 - DNA, 15 bp, Homo sapiens
ctcaaataagaacat

SEQ ID NO: 8718 - DNA, 15 bp, Homo sapiens
cctcaaataagaaca

SEQ ID NO: 8719 - DNA, 15 bp, Homo sapiens
gcctcaaataagaac

SEQ ID NO: 8720 - DNA, 15 bp, Homo sapiens
tgcctcaaataagaa

SEQ ID NO: 8721 - DNA, 15 bp, Homo sapiens
ttgcctcaaataaga

SEQ ID NO: 8722 - DNA, 15 bp, Homo sapiens
attgcctcaaataag

SEQ ID NO: 8723 - DNA, 15 bp, Homo sapiens
gattgcctcaaataa

SEQ ID NO: 8724 - DNA, 15 bp, Homo sapiens
ggattgcctcaaata

SEQ ID NO: 8725 - DNA, 15 bp, Homo sapiens
aggattgcctcaaat

SEQ ID NO: 8726 - DNA, 15 bp, Homo sapiens
gaggattgcctcaaa

SEQ ID NO: 8727 - DNA, 15 bp, Homo sapiens
ggaggattgcctcaa

SEQ ID NO: 8728 - DNA, 15 bp, Homo sapiens
aggaggattgcctca

SEQ ID NO: 8729 - DNA, 15 bp, Homo sapiens
gaggaggattgcctc

SEQ ID NO: 8730 - DNA, 15 bp, Homo sapiens
agaggaggattgcct

SEQ ID NO: 8731 - DNA, 15 bp, Homo sapiens
gagaggaggattgcc

SEQ ID NO: 8732 - DNA, 15 bp, Homo sapiens
cgagaggaggattgc

SEQ ID NO: 8733 - DNA, 15 bp, Homo sapiens
gcgagaggaggattg

SEQ ID NO: 8734 - DNA, 15 bp, Homo sapiens
tgcgagaggaggatt

SEQ ID NO: 8735 - DNA, 15 bp, Homo sapiens
gtgcgagaggaggat

SEQ ID NO: 8736 - DNA, 15 bp, Homo sapiens
tgtgcgagaggagga

SEQ ID NO: 8737 - DNA, 15 bp, Homo sapiens
gtgtgcgagaggagg

SEQ ID NO: 8738 - DNA, 15 bp, Homo sapiens
tgtgtgcgagaggag

SEQ ID NO: 8739 - DNA, 15 bp, Homo sapiens
atgtgtgcgagagga

SEQ ID NO: 8740 - DNA, 15 bp, Homo sapiens
catgtgtgcgagagg

SEQ ID NO: 8741 - DNA, 15 bp, Homo sapiens
gcatgtgtgcgagag

SEQ ID NO: 8742 - DNA, 15 bp, Homo sapiens
tgcatgtgtgcgaga

SEQ ID NO: 8743 - DNA, 15 bp, Homo sapiens
gtgcatgtgtgcgag

SEQ ID NO: 8744 - DNA, 15 bp, Homo sapiens
agtgcatgtgtgcga

SEQ ID NO: 8745 - DNA, 15 bp, Homo sapiens
gagtgcatgtgtgcg

SEQ ID NO: 8746 - DNA, 15 bp, Homo sapiens
agagtgcatgtgtgc

SEQ ID NO: 8747 - DNA, 15 bp, Homo sapiens
cagagtgcatgtgtg

SEQ ID NO: 8748 - DNA, 15 bp, Homo sapiens
ccagagtgcatgtgt

SEQ ID NO: 8749 - DNA, 15 bp, Homo sapiens
gccagagtgcatgtg

SEQ ID NO: 8750 - DNA, 15 bp, Homo sapiens
agccagagtgcatgt

SEQ ID NO: 8751 - DNA, 15 bp, Homo sapiens
gagccagagtgcatg

SEQ ID NO: 8752 - DNA, 15 bp, Homo sapiens
agagccagagtgcat

SEQ ID NO: 8753 - DNA, 15 bp, Homo sapiens
gagagccagagtgca

SEQ ID NO: 8754 - DNA, 15 bp, Homo sapiens
ggagagccagagtgc

SEQ ID NO: 8755 - DNA, 15 bp, Homo sapiens
tggagagccagagtg

SEQ ID NO: 8756 - DNA, 15 bp, Homo sapiens
atggagagccagagt

SEQ ID NO: 8757 - DNA, 15 bp, Homo sapiens
catggagagccagag

SEQ ID NO: 8758 - DNA, 15 bp, Homo sapiens
gcatggagagccaga

SEQ ID NO: 8759 - DNA, 15 bp, Homo sapiens
tgcatggagagccag

SEQ ID NO: 8760 - DNA, 15 bp, Homo sapiens
atgcatggagagcca

SEQ ID NO: 8761 - DNA, 15 bp, Homo sapiens
catgcatggagagcc

SEQ ID NO: 8762 - DNA, 15 bp, Homo sapiens
acatgcatggagagc

SEQ ID NO: 8763 - DNA, 15 bp, Homo sapiens
cacatgcatggagag

SEQ ID NO: 8764 - DNA, 15 bp, Homo sapiens
acacatgcatggaga

SEQ ID NO: 8765 - DNA, 15 bp, Homo sapiens
gacacatgcatggag

SEQ ID NO: 8766 - DNA, 15 bp, Homo sapiens
ggacacatgcatgga

SEQ ID NO: 8767 - DNA, 15 bp, Homo sapiens
tggacacatgcatgg

SEQ ID NO: 8768 - DNA, 15 bp, Homo sapiens
atggacacatgcatg

SEQ ID NO: 8769 - DNA, 15 bp, Homo sapiens
aatggacacatgcat

SEQ ID NO: 8770 - DNA, 15 bp, Homo sapiens
aaatggacacatgca

SEQ ID NO: 8771 - DNA, 15 bp, Homo sapiens
gaaatggacacatgc

SEQ ID NO: 8772 - DNA, 15 bp, Homo sapiens
agaaatggacacatg

SEQ ID NO: 8773 - DNA, 15 bp, Homo sapiens
gagaaatggacacat

SEQ ID NO: 8774 - DNA, 15 bp, Homo sapiens
agagaaatggacaca

SEQ ID NO: 8775 - DNA, 15 bp, Homo sapiens
gagagaaatggacac

SEQ ID NO: 8776 - DNA, 15 bp, Homo sapiens
tgagagaaatggaca

SEQ ID NO: 8777 - DNA, 15 bp, Homo sapiens
ttgagagaaatggac

SEQ ID NO: 8778 - DNA, 15 bp, Homo sapiens
attgagagaaatgga

SEQ ID NO: 8779 - DNA, 15 bp, Homo sapiens
cattgagagaaatgg

SEQ ID NO: 8780 - DNA, 15 bp, Homo sapiens
acattgagagaaatg

SEQ ID NO: 8781 - DNA, 15 bp, Homo sapiens
gacattgagagaaat

SEQ ID NO: 8782 - DNA, 15 bp, Homo sapiens
agacattgagagaaa

SEQ ID NO: 8783 - DNA, 15 bp, Homo sapiens
gagacattgagagaa

SEQ ID NO: 8784 - DNA, 15 bp, Homo sapiens
agagacattgagaga

SEQ ID NO: 8785 - DNA, 15 bp, Homo sapiens
gagagacattgagag

SEQ ID NO: 8786 - DNA, 15 bp, Homo sapiens
tgagagacattgaga

SEQ ID NO: 8787 - DNA, 15 bp, Homo sapiens
gtgagagacattgag

SEQ ID NO: 8788 - DNA, 15 bp, Homo sapiens
agtgagagacattga

SEQ ID NO: 8789 - DNA, 15 bp, Homo sapiens
tagtgagagacattg

SEQ ID NO: 8790 - DNA, 15 bp, Homo sapiens
atagtgagagacatt

SEQ ID NO: 8791 - DNA, 15 bp, Homo sapiens
gatagtgagagacat

SEQ ID NO: 8792 - DNA, 15 bp, Homo sapiens
agatagtgagagaca

SEQ ID NO: 8793 - DNA, 15 bp, Homo sapiens
gagatagtgagagac

SEQ ID NO: 8794 - DNA, 15 bp, Homo sapiens
agagatagtgagaga

SEQ ID NO: 8795 - DNA, 15 bp, Homo sapiens
aagagatagtgagag

SEQ ID NO: 8796 - DNA, 15 bp, Homo sapiens
caagagatagtgaga

SEQ ID NO: 8797 - DNA, 15 bp, Homo sapiens
acaagagatagtgag

SEQ ID NO: 8798 - DNA, 15 bp, Homo sapiens
aacaagagatagtga

SEQ ID NO: 8799 - DNA, 15 bp, Homo sapiens
gaacaagagatagtg

SEQ ID NO: 8800 - DNA, 15 bp, Homo sapiens
agaacaagagatagt

SEQ ID NO: 8801 - DNA, 15 bp, Homo sapiens
gagaacaagagatag

SEQ ID NO: 8802 - DNA, 15 bp, Homo sapiens
agagaacaagagata

SEQ ID NO: 8803 - DNA, 15 bp, Homo sapiens
gagagaacaagagat

SEQ ID NO: 8804 - DNA, 15 bp, Homo sapiens
agagagaacaagaga

SEQ ID NO: 8805 - DNA, 15 bp, Homo sapiens
aagagagaacaagag

SEQ ID NO: 8806 - DNA, 15 bp, Homo sapiens
caagagagaacaaga

SEQ ID NO: 8807 - DNA, 15 bp, Homo sapiens
gcaagagagaacaag

SEQ ID NO: 8808 - DNA, 15 bp, Homo sapiens
agcaagagagaacaa

SEQ ID NO: 8809 - DNA, 15 bp, Homo sapiens
gagcaagagagaaca

SEQ ID NO: 8810 - DNA, 15 bp, Homo sapiens
cgagcaagagagaac

SEQ ID NO: 8811 - DNA, 15 bp, Homo sapiens
gcgagcaagagagaa

SEQ ID NO: 8812 - DNA, 15 bp, Homo sapiens
agcgagcaagagaga

SEQ ID NO: 8813 - DNA, 15 bp, Homo sapiens
gagcgagcaagagag

SEQ ID NO: 8814 - DNA, 15 bp, Homo sapiens
agagcgagcaagaga

SEQ ID NO: 8815 - DNA, 15 bp, Homo sapiens
aagagcgagcaagag

SEQ ID NO: 8816 - DNA, 15 bp, Homo sapiens
aaagagcgagcaaga

SEQ ID NO: 8817 - DNA, 15 bp, Homo sapiens
caaagagcgagcaag

SEQ ID NO: 8818 - DNA, 15 bp, Homo sapiens
acaaagagcgagcaa

SEQ ID NO: 8819 - DNA, 15 bp, Homo sapiens
cacaaagagcgagca

SEQ ID NO: 8820 - DNA, 15 bp, Homo sapiens
acacaaagagcgagc

SEQ ID NO: 8821 - DNA, 15 bp, Homo sapiens
cacacaaagagcgag

SEQ ID NO: 8822 - DNA, 15 bp, Homo sapiens
acacacaaagagcga

SEQ ID NO: 8823 - DNA, 15 bp, Homo sapiens
cacacacaaagagcg

SEQ ID NO: 8824 - DNA, 15 bp, Homo sapiens
acacacacaaagagc

SEQ ID NO: 8825 - DNA, 15 bp, Homo sapiens
gacacacacaaagag

SEQ ID NO: 8826 - DNA, 15 bp, Homo sapiens
agacacacacaaaga

SEQ ID NO: 8827 - DNA, 15 bp, Homo sapiens
gagacacacacaaag

SEQ ID NO: 8828 - DNA, 15 bp, Homo sapiens
agagacacacacaaa

SEQ ID NO: 8829 - DNA, 15 bp, Homo sapiens
aagagacacacacaa

SEQ ID NO: 8830 - DNA, 15 bp, Homo sapiens
aaagagacacacaca

SEQ ID NO: 8831 - DNA, 15 bp, Homo sapiens
caaagagacacacac

SEQ ID NO: 8832 - DNA, 15 bp, Homo sapiens
acaaagagacacaca

SEQ ID NO: 8833 - DNA, 15 bp, Homo sapiens
gacaaagagacacac

SEQ ID NO: 8834 - DNA, 15 bp, Homo sapiens
agacaaagagacaca

SEQ ID NO: 8835 - DNA, 15 bp, Homo sapiens
gagacaaagagacac

SEQ ID NO: 8836 - DNA, 15 bp, Homo sapiens
agagacaaagagaca

SEQ ID NO: 8837 - DNA, 15 bp, Homo sapiens
tagagacaaagagac

SEQ ID NO: 8838 - DNA, 15 bp, Homo sapiens
atagagacaaagaga

SEQ ID NO: 8839 - DNA, 15 bp, Homo sapiens
catagagacaaagag

SEQ ID NO: 8840 - DNA, 15 bp, Homo sapiens
acatagagacaaaga

SEQ ID NO: 8841 - DNA, 15 bp, Homo sapiens
tacatagagacaaag

SEQ ID NO: 8842 - DNA, 15 bp, Homo sapiens
atacatagagacaaa

SEQ ID NO: 8843 - DNA, 15 bp, Homo sapiens
gatacatagagacaa

SEQ ID NO: 8844 - DNA, 15 bp, Homo sapiens
ggatacatagagaca

SEQ ID NO: 8845 - DNA, 15 bp, Homo sapiens
gggatacatagagac

SEQ ID NO: 8846 - DNA, 15 bp, Homo sapiens
agggatacatagaga

SEQ ID NO: 8847 - DNA, 15 bp, Homo sapiens
tagggatacatagag

SEQ ID NO: 8848 - DNA, 15 bp, Homo sapiens
atagggatacataga

SEQ ID NO: 8849 - DNA, 15 bp, Homo sapiens
gatagggatacatag

SEQ ID NO: 8850 - DNA, 15 bp, Homo sapiens
agatagggatacata

SEQ ID NO: 8851 - DNA, 15 bp, Homo sapiens
gagatagggatacat

SEQ ID NO: 8852 - DNA, 15 bp, Homo sapiens
agagatagggataca

SEQ ID NO: 8853 - DNA, 15 bp, Homo sapiens
gagagatagggatac

SEQ ID NO: 8854 - DNA, 15 bp, Homo sapiens
tgagagatagggata

SEQ ID NO: 8855 - DNA, 15 bp, Homo sapiens
ctgagagatagggat

SEQ ID NO: 8856 - DNA, 15 bp, Homo sapiens
gctgagagataggga

SEQ ID NO: 8857 - DNA, 15 bp, Homo sapiens
ggctgagagataggg

SEQ ID NO: 8858 - DNA, 15 bp, Homo sapiens
tggctgagagatagg

SEQ ID NO: 8859 - DNA, 15 bp, Homo sapiens
ctggctgagagatag

SEQ ID NO: 8860 - DNA, 15 bp, Homo sapiens
actggctgagagata

SEQ ID NO: 8861 - DNA, 15 bp, Homo sapiens
gactggctgagagat

SEQ ID NO: 8862 - DNA, 15 bp, Homo sapiens
ggactggctgagaga

SEQ ID NO: 8863 - DNA, 15 bp, Homo sapiens
gggactggctgagag

SEQ ID NO: 8864 - DNA, 15 bp, Homo sapiens
ggggactggctgaga

SEQ ID NO: 8865 - DNA, 15 bp, Homo sapiens
aggggactggctgag

SEQ ID NO: 8866 - DNA, 15 bp, Homo sapiens
caggggactggctga

SEQ ID NO: 8867 - DNA, 15 bp, Homo sapiens
ccaggggactggctg

SEQ ID NO: 8868 - DNA, 15 bp, Homo sapiens
tccaggggactggct

SEQ ID NO: 8869 - DNA, 15 bp, Homo sapiens
atccaggggactggc

SEQ ID NO: 8870 - DNA, 15 bp, Homo sapiens
tatccaggggactgg

SEQ ID NO: 8871 - DNA, 15 bp, Homo sapiens
ctatccaggggactg

SEQ ID NO: 8872 - DNA, 15 bp, Homo sapiens
tctatccaggggact

SEQ ID NO: 8873 - DNA, 15 bp, Homo sapiens
ctctatccaggggac

SEQ ID NO: 8874 - DNA, 15 bp, Homo sapiens
cctctatccagggga

SEQ ID NO: 8875 - DNA, 15 bp, Homo sapiens
ccctctatccagggg

SEQ ID NO: 8876 - DNA, 15 bp, Homo sapiens
cccctctatccaggg

SEQ ID NO: 8877 - DNA, 15 bp, Homo sapiens
gcccctctatccagg

SEQ ID NO: 8878 - DNA, 15 bp, Homo sapiens
tgcccctctatccag

SEQ ID NO: 8879 - DNA, 15 bp, Homo sapiens
ttgcccctctatcca

SEQ ID NO: 8880 - DNA, 15 bp, Homo sapiens
attgcccctctatcc

SEQ ID NO: 8881 - DNA, 15 bp, Homo sapiens
aattgcccctctatc

SEQ ID NO: 8882 - DNA, 15 bp, Homo sapiens
caattgcccctctat

SEQ ID NO: 8883 - DNA, 15 bp, Homo sapiens
acaattgcccctcta

SEQ ID NO: 8884 - DNA, 15 bp, Homo sapiens
gacaattgcccctct

SEQ ID NO: 8885 - DNA, 15 bp, Homo sapiens
tgacaattgcccctc

SEQ ID NO: 8886 - DNA, 15 bp, Homo sapiens
ttgacaattgcccct

SEQ ID NO: 8887 - DNA, 15 bp, Homo sapiens
gttgacaattgcccc

SEQ ID NO: 8888 - DNA, 15 bp, Homo sapiens
agttgacaattgccc

SEQ ID NO: 8889 - DNA, 15 bp, Homo sapiens
aagttgacaattgcc

SEQ ID NO: 8890 - DNA, 15 bp, Homo sapiens
caagttgacaattgc

SEQ ID NO: 8891 - DNA, 15 bp, Homo sapiens
tcaagttgacaattg

SEQ ID NO: 8892 - DNA, 15 bp, Homo sapiens
ttcaagttgacaatt

SEQ ID NO: 8893 - DNA, 15 bp, Homo sapiens
cttcaagttgacaat

SEQ ID NO: 8894 - DNA, 15 bp, Homo sapiens
gcttcaagttgacaa

SEQ ID NO: 8895 - DNA, 15 bp, Homo sapiens
ggcttcaagttgaca

SEQ ID NO: 8896 - DNA, 15 bp, Homo sapiens
gggcttcaagttgac

SEQ ID NO: 8897 - DNA, 15 bp, Homo sapiens
agggcttcaagttga

SEQ ID NO: 8898 - DNA, 15 bp, Homo sapiens
cagggcttcaagttg

SEQ ID NO: 8899 - DNA, 15 bp, Homo sapiens
gcagggcttcaagtt

SEQ ID NO: 8900 - DNA, 15 bp, Homo sapiens
tgcagggcttcaagt

SEQ ID NO: 8901 - DNA, 15 bp, Homo sapiens
ctgcagggcttcaag

SEQ ID NO: 8902 - DNA, 15 bp, Homo sapiens
tctgcagggcttcaa

SEQ ID NO: 8903 - DNA, 15 bp, Homo sapiens
gtctgcagggcttca

SEQ ID NO: 8904 - DNA, 15 bp, Homo sapiens
tgtctgcagggcttc

SEQ ID NO: 8905 - DNA, 15 bp, Homo sapiens
gtgtctgcagggctt

SEQ ID NO: 8906 - DNA, 15 bp, Homo sapiens
ggtgtctgcagggct

SEQ ID NO: 8907 - DNA, 15 bp, Homo sapiens
aggtgtctgcagggc

SEQ ID NO: 8908 - DNA, 15 bp, Homo sapiens
taggtgtctgcaggg

SEQ ID NO: 8909 - DNA, 15 bp, Homo sapiens
ttaggtgtctgcagg

SEQ ID NO: 8910 - DNA, 15 bp, Homo sapiens
attaggtgtctgcag

SEQ ID NO: 8911 - DNA, 15 bp, Homo sapiens
cattaggtgtctgca

SEQ ID NO: 8912 - DNA, 15 bp, Homo sapiens
tcattaggtgtctgc

SEQ ID NO: 8913 - DNA, 15 bp, Homo sapiens
gtcattaggtgtctg

SEQ ID NO: 8914 - DNA, 15 bp, Homo sapiens
agtcattaggtgtct

SEQ ID NO: 8915 - DNA, 15 bp, Homo sapiens
aagtcattaggtgtc

SEQ ID NO: 8916 - DNA, 15 bp, Homo sapiens
taagtcattaggtgt

SEQ ID NO: 8917 - DNA, 15 bp, Homo sapiens
ttaagtcattaggtg

SEQ ID NO: 8918 - DNA, 15 bp, Homo sapiens
gttaagtcattaggt

SEQ ID NO: 8919 - DNA, 15 bp, Homo sapiens
ggttaagtcattagg

SEQ ID NO: 8920 - DNA, 15 bp, Homo sapiens
tggttaagtcattag

SEQ ID NO: 8921 - DNA, 15 bp, Homo sapiens
ctggttaagtcatta

SEQ ID NO: 8922 - DNA, 15 bp, Homo sapiens
tctggttaagtcatt

SEQ ID NO: 8923 - DNA, 15 bp, Homo sapiens
gtctggttaagtcat

SEQ ID NO: 8924 - DNA, 15 bp, Homo sapiens
tgtctggttaagtca

SEQ ID NO: 8925 - DNA, 15 bp, Homo sapiens
ctgtctggttaagtc

SEQ ID NO: 8926 - DNA, 15 bp, Homo sapiens
gctgtctggttaagt

SEQ ID NO: 8927 - DNA, 15 bp, Homo sapiens
cgctgtctggttaag

SEQ ID NO: 8928 - DNA, 15 bp, Homo sapiens
acgctgtctggttaa

SEQ ID NO: 8929 - DNA, 15 bp, Homo sapiens
tacgctgtctggtta

SEQ ID NO: 8930 - DNA, 15 bp, Homo sapiens
ctacgctgtctggtt

SEQ ID NO: 8931 - DNA, 15 bp, Homo sapiens
tctacgctgtctggt

SEQ ID NO: 8932 - DNA, 15 bp, Homo sapiens
ttctacgctgtctgg

SEQ ID NO: 8933 - DNA, 15 bp, Homo sapiens
cttctacgctgtctg

SEQ ID NO: 8934 - DNA, 15 bp, Homo sapiens
ccttctacgctgtct

SEQ ID NO: 8935 - DNA, 15 bp, Homo sapiens
cccttctacgctgtc

SEQ ID NO: 8936 - DNA, 15 bp, Homo sapiens
gcccttctacgctgt

SEQ ID NO: 8937 - DNA, 15 bp, Homo sapiens
ggcccttctacgctg

SEQ ID NO: 8938 - DNA, 15 bp, Homo sapiens
gggcccttctacgct

SEQ ID NO: 8939 - DNA, 15 bp, Homo sapiens
agggcccttctacgc

SEQ ID NO: 8940 - DNA, 15 bp, Homo sapiens
cagggcccttctacg

SEQ ID NO: 8941 - DNA, 15 bp, Homo sapiens
ccagggcccttctac

SEQ ID NO: 8942 - DNA, 15 bp, Homo sapiens
gccagggcccttcta

SEQ ID NO: 8943 - DNA, 15 bp, Homo sapiens
ggccagggcccttct

SEQ ID NO: 8944 - DNA, 15 bp, Homo sapiens
gggccagggcccttc

SEQ ID NO: 8945 - DNA, 15 bp, Homo sapiens
agggccagggccctt

SEQ ID NO: 8946 - DNA, 15 bp, Homo sapiens
aagggccagggccct

SEQ ID NO: 8947 - DNA, 15 bp, Homo sapiens
caagggccagggccc

SEQ ID NO: 8948 - DNA, 15 bp, Homo sapiens
acaagggccagggcc

SEQ ID NO: 8949 - DNA, 15 bp, Homo sapiens
gacaagggccagggc

SEQ ID NO: 8950 - DNA, 15 bp, Homo sapiens
agacaagggccaggg

SEQ ID NO: 8951 - DNA, 15 bp, Homo sapiens
tagacaagggccagg

SEQ ID NO: 8952 - DNA, 15 bp, Homo sapiens
gtagacaagggccag

SEQ ID NO: 8953 - DNA, 15 bp, Homo sapiens
agtagacaagggcca

SEQ ID NO: 8954 - DNA, 15 bp, Homo sapiens
gagtagacaagggcc

SEQ ID NO: 8955 - DNA, 15 bp, Homo sapiens
ggagtagacaagggc

SEQ ID NO: 8956 - DNA, 15 bp, Homo sapiens
tggagtagacaaggg

SEQ ID NO: 8957 - DNA, 15 bp, Homo sapiens
gtggagtagacaagg

SEQ ID NO: 8958 - DNA, 15 bp, Homo sapiens
cgtggagtagacaag

SEQ ID NO: 8959 - DNA, 15 bp, Homo sapiens
gcgtggagtagacaa

SEQ ID NO: 8960 - DNA, 15 bp, Homo sapiens
ggcgtggagtagaca

SEQ ID NO: 8961 - DNA, 15 bp, Homo sapiens
aggcgtggagtagac

SEQ ID NO: 8962 - DNA, 15 bp, Homo sapiens
gaggcgtggagtaga

SEQ ID NO: 8963 - DNA, 15 bp, Homo sapiens
agaggcgtggagtag

SEQ ID NO: 8964 - DNA, 15 bp, Homo sapiens
gagaggcgtggagta

SEQ ID NO: 8965 - DNA, 15 bp, Homo sapiens
ggagaggcgtggagt

SEQ ID NO: 8966 - DNA, 15 bp, Homo sapiens
cggagaggcgtggag

SEQ ID NO: 8967 - DNA, 15 bp, Homo sapiens
acggagaggcgtgga

SEQ ID NO: 8968 - DNA, 15 bp, Homo sapiens
cacggagaggcgtgg

SEQ ID NO: 8969 - DNA, 15 bp, Homo sapiens
gcacggagaggcgtg

SEQ ID NO: 8970 - DNA, 15 bp, Homo sapiens
agcacggagaggcgt

SEQ ID NO: 8971 - DNA, 15 bp, Homo sapiens
gagcacggagaggcg

SEQ ID NO: 8972 - DNA, 15 bp, Homo sapiens
tgagcacggagaggc

SEQ ID NO: 8973 - DNA, 15 bp, Homo sapiens
ctgagcacggagagg

SEQ ID NO: 8974 - DNA, 15 bp, Homo sapiens
actgagcacggagag

SEQ ID NO: 8975 - DNA, 15 bp, Homo sapiens
cactgagcacggaga

SEQ ID NO: 8976 - DNA, 15 bp, Homo sapiens
acactgagcacggag

SEQ ID NO: 8977 - DNA, 15 bp, Homo sapiens
tacactgagcacgga

SEQ ID NO: 8978 - DNA, 15 bp, Homo sapiens
ctacactgagcacgg

SEQ ID NO: 8979 - DNA, 15 bp, Homo sapiens
tctacactgagcacg

SEQ ID NO: 8980 - DNA, 15 bp, Homo sapiens
ttctacactgagcac

SEQ ID NO: 8981 - DNA, 15 bp, Homo sapiens
cttctacactgagca

SEQ ID NO: 8982 - DNA, 15 bp, Homo sapiens
ccttctacactgagc

SEQ ID NO: 8983 - DNA, 15 bp, Homo sapiens
cccttctacactgag

SEQ ID NO: 8984 - DNA, 15 bp, Homo sapiens
gcccttctacactga

SEQ ID NO: 8985 - DNA, 15 bp, Homo sapiens
tgcccttctacactg

SEQ ID NO: 8986 - DNA, 15 bp, Homo sapiens
ttgcccttctacact

SEQ ID NO: 8987 - DNA, 15 bp, Homo sapiens
tttgcccttctacac

SEQ ID NO: 8988 - DNA, 15 bp, Homo sapiens
atttgcccttctaca

SEQ ID NO: 8989 - DNA, 15 bp, Homo sapiens
aatttgcccttctac

SEQ ID NO: 8990 - DNA, 15 bp, Homo sapiens
caatttgcccttcta

SEQ ID NO: 8991 - DNA, 15 bp, Homo sapiens
tcaatttgcccttct

SEQ ID NO: 8992 - DNA, 15 bp, Homo sapiens
ttcaatttgcccttc

SEQ ID NO: 8993 - DNA, 15 bp, Homo sapiens
cttcaatttgccctt

SEQ ID NO: 8994 - DNA, 15 bp, Homo sapiens
tcttcaatttgccct

SEQ ID NO: 8995 - DNA, 15 bp, Homo sapiens
gtcttcaatttgccc

SEQ ID NO: 8996 - DNA, 15 bp, Homo sapiens
ggtcttcaatttgcc

SEQ ID NO: 8997 - DNA, 15 bp, Homo sapiens
tggtcttcaatttgc

SEQ ID NO: 8998 - DNA, 15 bp, Homo sapiens
ctggtcttcaatttg

SEQ ID NO: 8999 - DNA, 15 bp, Homo sapiens
tctggtcttcaattt

SEQ ID NO: 9000 - DNA, 15 bp, Homo sapiens
ctctggtcttcaatt

SEQ ID NO: 9001 - DNA, 15 bp, Homo sapiens
tctctggtcttcaat

SEQ ID NO: 9002 - DNA, 15 bp, Homo sapiens
atctctggtcttcaa

SEQ ID NO: 9003 - DNA, 15 bp, Homo sapiens
gatctctggtcttca

SEQ ID NO: 9004 - DNA, 15 bp, Homo sapiens
agatctctggtcttc

SEQ ID NO: 9005 - DNA, 15 bp, Homo sapiens
gagatctctggtctt

SEQ ID NO: 9006 - DNA, 15 bp, Homo sapiens
tgagatctctggtct

SEQ ID NO: 9007 - DNA, 15 bp, Homo sapiens
ctgagatctctggtc

SEQ ID NO: 9008 - DNA, 15 bp, Homo sapiens
cctgagatctctggt

SEQ ID NO: 9009 - DNA, 15 bp, Homo sapiens
ccctgagatctctgg

SEQ ID NO: 9010 - DNA, 15 bp, Homo sapiens
gccctgagatctctg

SEQ ID NO: 9011 - DNA, 15 bp, Homo sapiens
ggccctgagatctct

SEQ ID NO: 9012 - DNA, 15 bp, Homo sapiens
aggccctgagatctc

SEQ ID NO: 9013 - DNA, 15 bp, Homo sapiens
gaggccctgagatct

SEQ ID NO: 9014 - DNA, 15 bp, Homo sapiens
tgaggccctgagatc

SEQ ID NO: 9015 - DNA, 15 bp, Homo sapiens
gtgaggccctgagat

SEQ ID NO: 9016 - DNA, 15 bp, Homo sapiens
ggtgaggccctgaga

SEQ ID NO: 9017 - DNA, 15 bp, Homo sapiens
cggtgaggccctgag

SEQ ID NO: 9018 - DNA, 15 bp, Homo sapiens
tcggtgaggccctga

SEQ ID NO: 9019 - DNA, 15 bp, Homo sapiens
ttcggtgaggccctg

SEQ ID NO: 9020 - DNA, 15 bp, Homo sapiens
tttcggtgaggccct

SEQ ID NO: 9021 - DNA, 15 bp, Homo sapiens
atttcggtgaggccc

SEQ ID NO: 9022 - DNA, 15 bp, Homo sapiens
catttcggtgaggcc

SEQ ID NO: 9023 - DNA, 15 bp, Homo sapiens
gcatttcggtgaggc

SEQ ID NO: 9024 - DNA, 15 bp, Homo sapiens
tgcatttcggtgagg

SEQ ID NO: 9025 - DNA, 15 bp, Homo sapiens
ctgcatttcggtgag

SEQ ID NO: 9026 - DNA, 15 bp, Homo sapiens
gctgcatttcggtga

SEQ ID NO: 9027 - DNA, 15 bp, Homo sapiens
cgctgcatttcggtg

SEQ ID NO: 9028 - DNA, 15 bp, Homo sapiens
ccgctgcatttcggt

SEQ ID NO: 9029 - DNA, 15 bp, Homo sapiens
gccgctgcatttcgg

SEQ ID NO: 9030 - DNA, 15 bp, Homo sapiens
tgccgctgcatttcg

SEQ ID NO: 9031 - DNA, 15 bp, Homo sapiens
ctgccgctgcatttc

SEQ ID NO: 9032 - DNA, 15 bp, Homo sapiens
tctgccgctgcattt

SEQ ID NO: 9033 - DNA, 15 bp, Homo sapiens
ctctgccgctgcatt

SEQ ID NO: 9034 - DNA, 15 bp, Homo sapiens
actctgccgctgcat

SEQ ID NO: 9035 - DNA, 15 bp, Homo sapiens
aactctgccgctgca

SEQ ID NO: 9036 - DNA, 15 bp, Homo sapiens
caactctgccgctgc

SEQ ID NO: 9037 - DNA, 15 bp, Homo sapiens
tcaactctgccgctg

SEQ ID NO: 9038 - DNA, 15 bp, Homo sapiens
ttcaactctgccgct

SEQ ID NO: 9039 - DNA, 15 bp, Homo sapiens
tttcaactctgccgc

SEQ ID NO: 9040 - DNA, 15 bp, Homo sapiens
atttcaactctgccg

SEQ ID NO: 9041 - DNA, 15 bp, Homo sapiens
gatttcaactctgcc

SEQ ID NO: 9042 - DNA, 15 bp, Homo sapiens
ggatttcaactctgc

SEQ ID NO: 9043 - DNA, 15 bp, Homo sapiens
tggatttcaactctg

SEQ ID NO: 9044 - DNA, 15 bp, Homo sapiens
ttggatttcaactct

SEQ ID NO: 9045 - DNA, 15 bp, Homo sapiens
cttggatttcaactc

SEQ ID NO: 9046 - DNA, 15 bp, Homo sapiens
gcttggatttcaact

SEQ ID NO: 9047 - DNA, 15 bp, Homo sapiens
ggcttggatttcaac

SEQ ID NO: 9048 - DNA, 15 bp, Homo sapiens
aggcttggatttcaa

SEQ ID NO: 9049 - DNA, 15 bp, Homo sapiens
taggcttggatttca

SEQ ID NO: 9050 - DNA, 15 bp, Homo sapiens
ctaggcttggatttc

SEQ ID NO: 9051 - DNA, 15 bp, Homo sapiens
tctaggcttggattt

SEQ ID NO: 9052 - DNA, 15 bp, Homo sapiens
atctaggcttggatt

SEQ ID NO: 9053 - DNA, 15 bp, Homo sapiens
gatctaggcttggat

SEQ ID NO: 9054 - DNA, 15 bp, Homo sapiens
agatctaggcttgga

SEQ ID NO: 9055 - DNA, 15 bp, Homo sapiens
gagatctaggcttgg

SEQ ID NO: 9056 - DNA, 15 bp, Homo sapiens
tgagatctaggcttg

SEQ ID NO: 9057 - DNA, 15 bp, Homo sapiens
ctgagatctaggctt

SEQ ID NO: 9058 - DNA, 15 bp, Homo sapiens
cctgagatctaggct

SEQ ID NO: 9059 - DNA, 15 bp, Homo sapiens
tcctgagatctaggc

SEQ ID NO: 9060 - DNA, 15 bp, Homo sapiens
gtcctgagatctagg

SEQ ID NO: 9061 - DNA, 15 bp, Homo sapiens
agtcctgagatctag

SEQ ID NO: 9062 - DNA, 15 bp, Homo sapiens
gagtcctgagatcta

SEQ ID NO: 9063 - DNA, 15 bp, Homo sapiens
agagtcctgagatct

SEQ ID NO: 9064 - DNA, 15 bp, Homo sapiens
tagagtcctgagatc

SEQ ID NO: 9065 - DNA, 15 bp, Homo sapiens
ctagagtcctgagat

SEQ ID NO: 9066 - DNA, 15 bp, Homo sapiens
cctagagtcctgaga

SEQ ID NO: 9067 - DNA, 15 bp, Homo sapiens
acctagagtcctgag

SEQ ID NO: 9068 - DNA, 15 bp, Homo sapiens
cacctagagtcctga

SEQ ID NO: 9069 - DNA, 15 bp, Homo sapiens
ccacctagagtcctg

SEQ ID NO: 9070 - DNA, 15 bp, Homo sapiens
cccacctagagtcct

SEQ ID NO: 9071 - DNA, 15 bp, Homo sapiens
tcccacctagagtcc

SEQ ID NO: 9072 - DNA, 15 bp, Homo sapiens
gtcccacctagagtc

SEQ ID NO: 9073 - DNA, 15 bp, Homo sapiens
ggtcccacctagagt

SEQ ID NO: 9074 - DNA, 15 bp, Homo sapiens
gggtcccacctagag

SEQ ID NO: 9075 - DNA, 15 bp, Homo sapiens
agggtcccacctaga

SEQ ID NO: 9076 - DNA, 15 bp, Homo sapiens
cagggtcccacctag

SEQ ID NO: 9077 - DNA, 15 bp, Homo sapiens
ccagggtcccaccta

SEQ ID NO: 9078 - DNA, 15 bp, Homo sapiens
accagggtcccacct

SEQ ID NO: 9079 - DNA, 15 bp, Homo sapiens
aaccagggtcccacc

SEQ ID NO: 9080 - DNA, 15 bp, Homo sapiens
gaaccagggtcccac

SEQ ID NO: 9081 - DNA, 15 bp, Homo sapiens
agaaccagggtccca

SEQ ID NO: 9082 - DNA, 15 bp, Homo sapiens
cagaaccagggtccc

SEQ ID NO: 9083 - DNA, 15 bp, Homo sapiens
ccagaaccagggtcc

SEQ ID NO: 9084 - DNA, 15 bp, Homo sapiens
gccagaaccagggtc

SEQ ID NO: 9085 - DNA, 15 bp, Homo sapiens
agccagaaccagggt

SEQ ID NO: 9086 - DNA, 15 bp, Homo sapiens
gagccagaaccaggg

SEQ ID NO: 9087 - DNA, 15 bp, Homo sapiens
agagccagaaccagg

SEQ ID NO: 9088 - DNA, 15 bp, Homo sapiens
gagagccagaaccag

SEQ ID NO: 9089 - DNA, 15 bp, Homo sapiens
agagagccagaacca

SEQ ID NO: 9090 - DNA, 15 bp, Homo sapiens
gagagagccagaacc

SEQ ID NO: 9091 - DNA, 15 bp, Homo sapiens
ggagagagccagaac

SEQ ID NO: 9092 - DNA, 15 bp, Homo sapiens
gggagagagccagaa

SEQ ID NO: 9093 - DNA, 15 bp, Homo sapiens
ggggagagagccaga

SEQ ID NO: 9094 - DNA, 15 bp, Homo sapiens
tggggagagagccag

SEQ ID NO: 9095 - DNA, 15 bp, Homo sapiens
ttggggagagagcca

SEQ ID NO: 9096 - DNA, 15 bp, Homo sapiens
gttggggagagagcc

SEQ ID NO: 9097 - DNA, 15 bp, Homo sapiens
agttggggagagagc

SEQ ID NO: 9098 - DNA, 15 bp, Homo sapiens
cagttggggagagag

SEQ ID NO: 9099 - DNA, 15 bp, Homo sapiens
tcagttggggagaga

SEQ ID NO: 9100 - DNA, 15 bp, Homo sapiens
ttcagttggggagag

SEQ ID NO: 9101 - DNA, 15 bp, Homo sapiens
cttcagttggggaga

SEQ ID NO: 9102 - DNA, 15 bp, Homo sapiens
ccttcagttggggag

SEQ ID NO: 9103 - DNA, 15 bp, Homo sapiens
gccttcagttgggga

SEQ ID NO: 9104 - DNA, 15 bp, Homo sapiens
ggccttcagttgggg

SEQ ID NO: 9105 - DNA, 15 bp, Homo sapiens
aggccttcagttggg

SEQ ID NO: 9106 - DNA, 15 bp, Homo sapiens
gaggccttcagttgg

SEQ ID NO: 9107 - DNA, 15 bp, Homo sapiens
tgaggccttcagttg

SEQ ID NO: 9108 - DNA, 15 bp, Homo sapiens
ctgaggccttcagtt

SEQ ID NO: 9109 - DNA, 15 bp, Homo sapiens
actgaggccttcagt

SEQ ID NO: 9110 - DNA, 15 bp, Homo sapiens
aactgaggccttcag

SEQ ID NO: 9111 - DNA, 15 bp, Homo sapiens
aaactgaggccttca

SEQ ID NO: 9112 - DNA, 15 bp, Homo sapiens
taaactgaggccttc

SEQ ID NO: 9113 - DNA, 15 bp, Homo sapiens
gtaaactgaggcctt

SEQ ID NO: 9114 - DNA, 15 bp, Homo sapiens
ggtaaactgaggcct

SEQ ID NO: 9115 - DNA, 15 bp, Homo sapiens
gggtaaactgaggcc

SEQ ID NO: 9116 - DNA, 15 bp, Homo sapiens
ggggtaaactgaggc

SEQ ID NO: 9117 - DNA, 15 bp, Homo sapiens
aggggtaaactgagg

SEQ ID NO: 9118 - DNA, 15 bp, Homo sapiens
gaggggtaaactgag

SEQ ID NO: 9119 - DNA, 15 bp, Homo sapiens
tgaggggtaaactga

SEQ ID NO: 9120 - DNA, 15 bp, Homo sapiens
ctgaggggtaaactg

SEQ ID NO: 9121 - DNA, 15 bp, Homo sapiens
gctgaggggtaaact

SEQ ID NO: 9122 - DNA, 15 bp, Homo sapiens
tgctgaggggtaaac

SEQ ID NO: 9123 - DNA, 15 bp, Homo sapiens
gtgctgaggggtaaa

SEQ ID NO: 9124 - DNA, 15 bp, Homo sapiens
ggtgctgaggggtaa

SEQ ID NO: 9125 - DNA, 15 bp, Homo sapiens
gggtgctgaggggta

SEQ ID NO: 9126 - DNA, 15 bp, Homo sapiens
tgggtgctgaggggt

SEQ ID NO: 9127 - DNA, 15 bp, Homo sapiens
ctgggtgctgagggg

SEQ ID NO: 9128 - DNA, 15 bp, Homo sapiens
tctgggtgctgaggg

SEQ ID NO: 9129 - DNA, 15 bp, Homo sapiens
ttctgggtgctgagg

SEQ ID NO: 9130 - DNA, 15 bp, Homo sapiens
cttctgggtgctgag

SEQ ID NO: 9131 - DNA, 15 bp, Homo sapiens
ccttctgggtgctga

SEQ ID NO: 9132 - DNA, 15 bp, Homo sapiens
cccttctgggtgctg

SEQ ID NO: 9133 - DNA, 15 bp, Homo sapiens
ccccttctgggtgct

SEQ ID NO: 9134 - DNA, 15 bp, Homo sapiens
cccccttctgggtgc

SEQ ID NO: 9135 - DNA, 15 bp, Homo sapiens
tcccccttctgggtg

SEQ ID NO: 9136 - DNA, 15 bp, Homo sapiens
ttcccccttctgggt

SEQ ID NO: 9137 - DNA, 15 bp, Homo sapiens
cttcccccttctggg

SEQ ID NO: 9138 - DNA, 15 bp, Homo sapiens
ccttcccccttctgg

SEQ ID NO: 9139 - DNA, 15 bp, Homo sapiens
cccttcccccttctg

SEQ ID NO: 9140 - DNA, 15 bp, Homo sapiens
ccccttcccccttct

SEQ ID NO: 9141 - DNA, 15 bp, Homo sapiens
tccccttcccccttc

SEQ ID NO: 9142 - DNA, 15 bp, Homo sapiens
ttccccttccccctt

SEQ ID NO: 9143 - DNA, 15 bp, Homo sapiens
gttccccttccccct

SEQ ID NO: 9144 - DNA, 15 bp, Homo sapiens
ggttccccttccccc

SEQ ID NO: 9145 - DNA, 15 bp, Homo sapiens
aggttccccttcccc

SEQ ID NO: 9146 - DNA, 15 bp, Homo sapiens
caggttccccttccc

SEQ ID NO: 9147 - DNA, 15 bp, Homo sapiens
ccaggttccccttcc

SEQ ID NO: 9148 - DNA, 15 bp, Homo sapiens
cccaggttccccttc

SEQ ID NO: 9149 - DNA, 15 bp, Homo sapiens
gcccaggttcccctt

SEQ ID NO: 9150 - DNA, 15 bp, Homo sapiens
agcccaggttcccct

SEQ ID NO: 9151 - DNA, 15 bp, Homo sapiens
tagcccaggttcccc

SEQ ID NO: 9152 - DNA, 15 bp, Homo sapiens
gtagcccaggttccc

SEQ ID NO: 9153 - DNA, 15 bp, Homo sapiens
ggtagcccaggttcc

SEQ ID NO: 9154 - DNA, 15 bp, Homo sapiens
tggtagcccaggttc

SEQ ID NO: 9155 - DNA, 15 bp, Homo sapiens
atggtagcccaggtt

SEQ ID NO: 9156 - DNA, 15 bp, Homo sapiens
aatggtagcccaggt

SEQ ID NO: 9157 - DNA, 15 bp, Homo sapiens
gaatggtagcccagg

SEQ ID NO: 9158 - DNA, 15 bp, Homo sapiens
ggaatggtagcccag

SEQ ID NO: 9159 - DNA, 15 bp, Homo sapiens
gggaatggtagccca

SEQ ID NO: 9160 - DNA, 15 bp, Homo sapiens
ggggaatggtagccc

SEQ ID NO: 9161 - DNA, 15 bp, Homo sapiens
gggggaatggtagcc

SEQ ID NO: 9162 - DNA, 15 bp, Homo sapiens
agggggaatggtagc

SEQ ID NO: 9163 - DNA, 15 bp, Homo sapiens
aagggggaatggtag

SEQ ID NO: 9164 - DNA, 15 bp, Homo sapiens
gaagggggaatggta

SEQ ID NO: 9165 - DNA, 15 bp, Homo sapiens
agaagggggaatggt

SEQ ID NO: 9166 - DNA, 15 bp, Homo sapiens
cagaagggggaatgg

SEQ ID NO: 9167 - DNA, 15 bp, Homo sapiens
gcagaagggggaatg

SEQ ID NO: 9168 - DNA, 15 bp, Homo sapiens
ggcagaagggggaat

SEQ ID NO: 9169 - DNA, 15 bp, Homo sapiens
aggcagaagggggaa

SEQ ID NO: 9170 - DNA, 15 bp, Homo sapiens
aaggcagaaggggga

SEQ ID NO: 9171 - DNA, 15 bp, Homo sapiens
gaaggcagaaggggg

SEQ ID NO: 9172 - DNA, 15 bp, Homo sapiens
agaaggcagaagggg

SEQ ID NO: 9173 - DNA, 15 bp, Homo sapiens
gagaaggcagaaggg

SEQ ID NO: 9174 - DNA, 15 bp, Homo sapiens
tgagaaggcagaagg

SEQ ID NO: 9175 - DNA, 15 bp, Homo sapiens
gtgagaaggcagaag

SEQ ID NO: 9176 - DNA, 15 bp, Homo sapiens
tgtgagaaggcagaa

SEQ ID NO: 9177 - DNA, 15 bp, Homo sapiens
gtgtgagaaggcaga

SEQ ID NO: 9178 - DNA, 15 bp, Homo sapiens
cgtgtgagaaggcag

SEQ ID NO: 9179 - DNA, 15 bp, Homo sapiens
acgtgtgagaaggca

SEQ ID NO: 9180 - DNA, 15 bp, Homo sapiens
aacgtgtgagaaggc

SEQ ID NO: 9181 - DNA, 15 bp, Homo sapiens
caacgtgtgagaagg

SEQ ID NO: 9182 - DNA, 15 bp, Homo sapiens
ccaacgtgtgagaag

SEQ ID NO: 9183 - DNA, 15 bp, Homo sapiens
tccaacgtgtgagaa

SEQ ID NO: 9184 - DNA, 15 bp, Homo sapiens
gtccaacgtgtgaga

SEQ ID NO: 9185 - DNA, 15 bp, Homo sapiens
ggtccaacgtgtgag

SEQ ID NO: 9186 - DNA, 15 bp, Homo sapiens
gggtccaacgtgtga

SEQ ID NO: 9187 - DNA, 15 bp, Homo sapiens
ggggtccaacgtgtg

SEQ ID NO: 9188 - DNA, 15 bp, Homo sapiens
tggggtccaacgtgt

SEQ ID NO: 9189 - DNA, 15 bp, Homo sapiens
ttggggtccaacgtg

SEQ ID NO: 9190 - DNA, 15 bp, Homo sapiens
gttggggtccaacgt

SEQ ID NO: 9191 - DNA, 15 bp, Homo sapiens
agttggggtccaacg

SEQ ID NO: 9192 - DNA, 15 bp, Homo sapiens
aagttggggtccaac

SEQ ID NO: 9193 - DNA, 15 bp, Homo sapiens
gaagttggggtccaa

SEQ ID NO: 9194 - DNA, 15 bp, Homo sapiens
ggaagttggggtcca

SEQ ID NO: 9195 - DNA, 15 bp, Homo sapiens
gggaagttggggtcc

SEQ ID NO: 9196 - DNA, 15 bp, Homo sapiens
tgggaagttggggtc

SEQ ID NO: 9197 - DNA, 15 bp, Homo sapiens
gtgggaagttggggt

SEQ ID NO: 9198 - DNA, 15 bp, Homo sapiens
tgtgggaagttgggg

SEQ ID NO: 9199 - DNA, 15 bp, Homo sapiens
ctgtgggaagttggg

SEQ ID NO: 9200 - DNA, 15 bp, Homo sapiens
cctgtgggaagttgg

SEQ ID NO: 9201 - DNA, 15 bp, Homo sapiens
acctgtgggaagttg

SEQ ID NO: 9202 - DNA, 15 bp, Homo sapiens
aacctgtgggaagtt

SEQ ID NO: 9203 - DNA, 15 bp, Homo sapiens
caacctgtgggaagt

SEQ ID NO: 9204 - DNA, 15 bp, Homo sapiens
ccaacctgtgggaag

SEQ ID NO: 9205 - DNA, 15 bp, Homo sapiens
tccaacctgtgggaa

SEQ ID NO: 9206 - DNA, 15 bp, Homo sapiens
gtccaacctgtggga

SEQ ID NO: 9207 - DNA, 15 bp, Homo sapiens
cgtccaacctgtggg

SEQ ID NO: 9208 - DNA, 15 bp, Homo sapiens
tcgtccaacctgtgg

SEQ ID NO: 9209 - DNA, 15 bp, Homo sapiens
atcgtccaacctgtg

SEQ ID NO: 9210 - DNA, 15 bp, Homo sapiens
gatcgtccaacctgt

SEQ ID NO: 9211 - DNA, 15 bp, Homo sapiens
ggatcgtccaacctg

SEQ ID NO: 9212 - DNA, 15 bp, Homo sapiens
tggatcgtccaacct

SEQ ID NO: 9213 - DNA, 15 bp, Homo sapiens
gtggatcgtccaacc

SEQ ID NO: 9214 - DNA, 15 bp, Homo sapiens
cgtggatcgtccaac

SEQ ID NO: 9215 - DNA, 15 bp, Homo sapiens
tcgtggatcgtccaa

SEQ ID NO: 9216 - DNA, 15 bp, Homo sapiens
atcgtggatcgtcca

SEQ ID NO: 9217 - DNA, 15 bp, Homo sapiens
gatcgtggatcgtcc

SEQ ID NO: 9218 - DNA, 15 bp, Homo sapiens
tgatcgtggatcgtc

SEQ ID NO: 9219 - DNA, 15 bp, Homo sapiens
gtgatcgtggatcgt

SEQ ID NO: 9220 - DNA, 15 bp, Homo sapiens
tgtgatcgtggatcg

SEQ ID NO: 9221 - DNA, 15 bp, Homo sapiens
ctgtgatcgtggatc

SEQ ID NO: 9222 - DNA, 15 bp, Homo sapiens
actgtgatcgtggat

SEQ ID NO: 9223 - DNA, 15 bp, Homo sapiens
cactgtgatcgtgga

SEQ ID NO: 9224 - DNA, 15 bp, Homo sapiens
acactgtgatcgtgg

SEQ ID NO: 9225 - DNA, 15 bp, Homo sapiens
cacactgtgatcgtg

SEQ ID NO: 9226 - DNA, 15 bp, Homo sapiens
ccacactgtgatcgt

SEQ ID NO: 9227 - DNA, 15 bp, Homo sapiens
cccacactgtgatcg

SEQ ID NO: 9228 - DNA, 15 bp, Homo sapiens
ccccacactgtgatc

SEQ ID NO: 9229 - DNA, 15 bp, Homo sapiens
gccccacactgtgat

SEQ ID NO: 9230 - DNA, 15 bp, Homo sapiens
ggccccacactgtga

SEQ ID NO: 9231 - DNA, 15 bp, Homo sapiens
gggccccacactgtg

SEQ ID NO: 9232 - DNA, 15 bp, Homo sapiens
tgggccccacactgt

SEQ ID NO: 9233 - DNA, 15 bp, Homo sapiens
ctgggccccacactg

SEQ ID NO: 9234 - DNA, 15 bp, Homo sapiens
gctgggccccacact

SEQ ID NO: 9235 - DNA, 15 bp, Homo sapiens
ggctgggccccacac

SEQ ID NO: 9236 - DNA, 15 bp, Homo sapiens
aggctgggccccaca

SEQ ID NO: 9237 - DNA, 15 bp, Homo sapiens
gaggctgggccccac

SEQ ID NO: 9238 - DNA, 15 bp, Homo sapiens
tgaggctgggcccca

SEQ ID NO: 9239 - DNA, 15 bp, Homo sapiens
gtgaggctgggcccc

SEQ ID NO: 9240 - DNA, 15 bp, Homo sapiens
tgtgaggctgggccc

SEQ ID NO: 9241 - DNA, 15 bp, Homo sapiens
ttgtgaggctgggcc

SEQ ID NO: 9242 - DNA, 15 bp, Homo sapiens
cttgtgaggctgggc

SEQ ID NO: 9243 - DNA, 15 bp, Homo sapiens
tcttgtgaggctggg

SEQ ID NO: 9244 - DNA, 15 bp, Homo sapiens
ctcttgtgaggctgg

SEQ ID NO: 9245 - DNA, 15 bp, Homo sapiens
gctcttgtgaggctg

SEQ ID NO: 9246 - DNA, 15 bp, Homo sapiens
agctcttgtgaggct

SEQ ID NO: 9247 - DNA, 15 bp, Homo sapiens
cagctcttgtgaggc

SEQ ID NO: 9248 - DNA, 15 bp, Homo sapiens
ccagctcttgtgagg

SEQ ID NO: 9249 - DNA, 15 bp, Homo sapiens
cccagctcttgtgag

SEQ ID NO: 9250 - DNA, 15 bp, Homo sapiens
gcccagctcttgtga

SEQ ID NO: 9251 - DNA, 15 bp, Homo sapiens
agcccagctcttgtg

SEQ ID NO: 9252 - DNA, 15 bp, Homo sapiens
tagcccagctcttgt

SEQ ID NO: 9253 - DNA, 15 bp, Homo sapiens
ctagcccagctcttg

SEQ ID NO: 9254 - DNA, 15 bp, Homo sapiens
cctagcccagctctt

SEQ ID NO: 9255 - DNA, 15 bp, Homo sapiens
acctagcccagctct

SEQ ID NO: 9256 - DNA, 15 bp, Homo sapiens
cacctagcccagctc

SEQ ID NO: 9257 - DNA, 15 bp, Homo sapiens
tcacctagcccagct

SEQ ID NO: 9258 - DNA, 15 bp, Homo sapiens
ctcacctagcccagc

SEQ ID NO: 9259 - DNA, 15 bp, Homo sapiens
cctcacctagcccag

SEQ ID NO: 9260 - DNA, 15 bp, Homo sapiens
gcctcacctagccca

SEQ ID NO: 9261 - DNA, 15 bp, Homo sapiens
ggcctcacctagccc

SEQ ID NO: 9262 - DNA, 15 bp, Homo sapiens
gggcctcacctagcc

SEQ ID NO: 9263 - DNA, 15 bp, Homo sapiens
ggggcctcacctagc

SEQ ID NO: 9264 - DNA, 15 bp, Homo sapiens
cggggcctcacctag

SEQ ID NO: 9265 - DNA, 15 bp, Homo sapiens
ccggggcctcaccta

SEQ ID NO: 9266 - DNA, 15 bp, Homo sapiens
tccggggcctcacct

SEQ ID NO: 9267 - DNA, 15 bp, Homo sapiens
gtccggggcctcacc

SEQ ID NO: 9268 - DNA, 15 bp, Homo sapiens
agtccggggcctcac

SEQ ID NO: 9269 - DNA, 15 bp, Homo sapiens
gagtccggggcctca

SEQ ID NO: 9270 - DNA, 15 bp, Homo sapiens
ggagtccggggcctc

SEQ ID NO: 9271 - DNA, 15 bp, Homo sapiens
tggagtccggggcct

SEQ ID NO: 9272 - DNA, 15 bp, Homo sapiens
atggagtccggggcc

SEQ ID NO: 9273 - DNA, 15 bp, Homo sapiens
tatggagtccggggc

SEQ ID NO: 9274 - DNA, 15 bp, Homo sapiens
ctatggagtccgggg

SEQ ID NO: 9275 - DNA, 15 bp, Homo sapiens
cctatggagtccggg

SEQ ID NO: 9276 - DNA, 15 bp, Homo sapiens
acctatggagtccgg

SEQ ID NO: 9277 - DNA, 15 bp, Homo sapiens
gacctatggagtccg

SEQ ID NO: 9278 - DNA, 15 bp, Homo sapiens
tgacctatggagtcc

SEQ ID NO: 9279 - DNA, 15 bp, Homo sapiens
ctgacctatggagtc

SEQ ID NO: 9280 - DNA, 15 bp, Homo sapiens
cctgacctatggagt

SEQ ID NO: 9281 - DNA, 15 bp, Homo sapiens
tcctgacctatggag

SEQ ID NO: 9282 - DNA, 15 bp, Homo sapiens
ctcctgacctatgga

SEQ ID NO: 9283 - DNA, 15 bp, Homo sapiens
cctcctgacctatgg

SEQ ID NO: 9284 - DNA, 15 bp, Homo sapiens
gcctcctgacctatg

SEQ ID NO: 9285 - DNA, 15 bp, Homo sapiens
ggcctcctgacctat

SEQ ID NO: 9286 - DNA, 15 bp, Homo sapiens
aggcctcctgaccta

SEQ ID NO: 9287 - DNA, 15 bp, Homo sapiens
taggcctcctgacct

SEQ ID NO: 9288 - DNA, 15 bp, Homo sapiens
ctaggcctcctgacc

SEQ ID NO: 9289 - DNA, 15 bp, Homo sapiens
actaggcctcctgac

SEQ ID NO: 9290 - DNA, 15 bp, Homo sapiens
aactaggcctcctga

SEQ ID NO: 9291 - DNA, 15 bp, Homo sapiens
caactaggcctcctg

SEQ ID NO: 9292 - DNA, 15 bp, Homo sapiens
ccaactaggcctcct

SEQ ID NO: 9293 - DNA, 15 bp, Homo sapiens
gccaactaggcctcc

SEQ ID NO: 9294 - DNA, 15 bp, Homo sapiens
ggccaactaggcctc

SEQ ID NO: 9295 - DNA, 15 bp, Homo sapiens
tggccaactaggcct

SEQ ID NO: 9296 - DNA, 15 bp, Homo sapiens
ctggccaactaggcc

SEQ ID NO: 9297 - DNA, 15 bp, Homo sapiens
tctggccaactaggc

SEQ ID NO: 9298 - DNA, 15 bp, Homo sapiens
ctctggccaactagg

SEQ ID NO: 9299 - DNA, 15 bp, Homo sapiens
gctctggccaactag

SEQ ID NO: 9300 - DNA, 15 bp, Homo sapiens
cgctctggccaacta

SEQ ID NO: 9301 - DNA, 15 bp, Homo sapiens
acgctctggccaact

SEQ ID NO: 9302 - DNA, 15 bp, Homo sapiens
cacgctctggccaac

SEQ ID NO: 9303 - DNA, 15 bp, Homo sapiens
ccacgctctggccaa

SEQ ID NO: 9304 - DNA, 15 bp, Homo sapiens
accacgctctggcca

SEQ ID NO: 9305 - DNA, 15 bp, Homo sapiens
caccacgctctggcc

SEQ ID NO: 9306 - DNA, 15 bp, Homo sapiens
tcaccacgctctggc

SEQ ID NO: 9307 - DNA, 15 bp, Homo sapiens
atcaccacgctctgg

SEQ ID NO: 9308 - DNA, 15 bp, Homo sapiens
catcaccacgctctg

SEQ ID NO: 9309 - DNA, 15 bp, Homo sapiens
tcatcaccacgctct

SEQ ID NO: 9310 - DNA, 15 bp, Homo sapiens
atcatcaccacgctc

SEQ ID NO: 9311 - DNA, 15 bp, Homo sapiens
catcatcaccacgct

SEQ ID NO: 9312 - DNA, 15 bp, Homo sapiens
ccatcatcaccacgc

SEQ ID NO: 9313 - DNA, 15 bp, Homo sapiens
tccatcatcaccacg

SEQ ID NO: 9314 - DNA, 15 bp, Homo sapiens
ctccatcatcaccac

SEQ ID NO: 9315 - DNA, 15 bp, Homo sapiens
cctccatcatcacca

SEQ ID NO: 9316 - DNA, 15 bp, Homo sapiens
gcctccatcatcacc

SEQ ID NO: 9317 - DNA, 15 bp, Homo sapiens
tgcctccatcatcac

SEQ ID NO: 9318 - DNA, 15 bp, Homo sapiens
atgcctccatcatca

SEQ ID NO: 9319 - DNA, 15 bp, Homo sapiens
catgcctccatcatc

SEQ ID NO: 9320 - DNA, 15 bp, Homo sapiens
acatgcctccatcat

SEQ ID NO: 9321 - DNA, 15 bp, Homo sapiens
gacatgcctccatca

SEQ ID NO: 9322 - DNA, 15 bp, Homo sapiens
tgacatgcctccatc

SEQ ID NO: 9323 - DNA, 15 bp, Homo sapiens
ctgacatgcctccat

SEQ ID NO: 9324 - DNA, 15 bp, Homo sapiens
actgacatgcctcca

SEQ ID NO: 9325 - DNA, 15 bp, Homo sapiens
gactgacatgcctcc

SEQ ID NO: 9326 - DNA, 15 bp, Homo sapiens
tgactgacatgcctc

SEQ ID NO: 9327 - DNA, 15 bp, Homo sapiens
ctgactgacatgcct

SEQ ID NO: 9328 - DNA, 15 bp, Homo sapiens
actgactgacatgcc

SEQ ID NO: 9329 - DNA, 15 bp, Homo sapiens
gactgactgacatgc

SEQ ID NO: 9330 - DNA, 15 bp, Homo sapiens
tgactgactgacatg

SEQ ID NO: 9331 - DNA, 15 bp, Homo sapiens
ctgactgactgacat

SEQ ID NO: 9332 - DNA, 15 bp, Homo sapiens
cctgactgactgaca

SEQ ID NO: 9333 - DNA, 15 bp, Homo sapiens
gcctgactgactgac

SEQ ID NO: 9334 - DNA, 15 bp, Homo sapiens
agcctgactgactga

SEQ ID NO: 9335 - DNA, 15 bp, Homo sapiens
cagcctgactgactg

SEQ ID NO: 9336 - DNA, 15 bp, Homo sapiens
acagcctgactgact

SEQ ID NO: 9337 - DNA, 15 bp, Homo sapiens
cacagcctgactgac

SEQ ID NO: 9338 - DNA, 15 bp, Homo sapiens
acacagcctgactga

SEQ ID NO: 9339 - DNA, 15 bp, Homo sapiens
cacacagcctgactg

SEQ ID NO: 9340 - DNA, 15 bp, Homo sapiens
acacacagcctgact

SEQ ID NO: 9341 - DNA, 15 bp, Homo sapiens
gacacacagcctgac

SEQ ID NO: 9342 - DNA, 15 bp, Homo sapiens
ggacacacagcctga

SEQ ID NO: 9343 - DNA, 15 bp, Homo sapiens
gggacacacagcctg

SEQ ID NO: 9344 - DNA, 15 bp, Homo sapiens
ggggacacacagcct

SEQ ID NO: 9345 - DNA, 15 bp, Homo sapiens
tggggacacacagcc

SEQ ID NO: 9346 - DNA, 15 bp, Homo sapiens
ctggggacacacagc

SEQ ID NO: 9347 - DNA, 15 bp, Homo sapiens
tctggggacacacag

SEQ ID NO: 9348 - DNA, 15 bp, Homo sapiens
ctctggggacacaca

SEQ ID NO: 9349 - DNA, 15 bp, Homo sapiens
gctctggggacacac

SEQ ID NO: 9350 - DNA, 15 bp, Homo sapiens
agctctggggacaca

SEQ ID NO: 9351 - DNA, 15 bp, Homo sapiens
cagctctggggacac

SEQ ID NO: 9352 - DNA, 15 bp, Homo sapiens
ccagctctggggaca

SEQ ID NO: 9353 - DNA, 15 bp, Homo sapiens
accagctctggggac

SEQ ID NO: 9354 - DNA, 15 bp, Homo sapiens
caccagctctgggga

SEQ ID NO: 9355 - DNA, 15 bp, Homo sapiens
gcaccagctctgggg

SEQ ID NO: 9356 - DNA, 15 bp, Homo sapiens
agcaccagctctggg

SEQ ID NO: 9357 - DNA, 15 bp, Homo sapiens
cagcaccagctctgg

SEQ ID NO: 9358 - DNA, 15 bp, Homo sapiens
ccagcaccagctctg

SEQ ID NO: 9359 - DNA, 15 bp, Homo sapiens
accagcaccagctct

SEQ ID NO: 9360 - DNA, 15 bp, Homo sapiens
gaccagcaccagctc

SEQ ID NO: 9361 - DNA, 15 bp, Homo sapiens
ggaccagcaccagct

SEQ ID NO: 9362 - DNA, 15 bp, Homo sapiens
gggaccagcaccagc

SEQ ID NO: 9363 - DNA, 15 bp, Homo sapiens
ggggaccagcaccag

SEQ ID NO: 9364 - DNA, 15 bp, Homo sapiens
cggggaccagcacca

SEQ ID NO: 9365 - DNA, 15 bp, Homo sapiens
tcggggaccagcacc

SEQ ID NO: 9366 - DNA, 15 bp, Homo sapiens
ttcggggaccagcac

SEQ ID NO: 9367 - DNA, 15 bp, Homo sapiens
tttcggggaccagca

SEQ ID NO: 9368 - DNA, 15 bp, Homo sapiens
ttttcggggaccagc

SEQ ID NO: 9369 - DNA, 15 bp, Homo sapiens
gttttcggggaccag

SEQ ID NO: 9370 - DNA, 15 bp, Homo sapiens
ggttttcggggacca

SEQ ID NO: 9371 - DNA, 15 bp, Homo sapiens
aggttttcggggacc

SEQ ID NO: 9372 - DNA, 15 bp, Homo sapiens
aaggttttcggggac

SEQ ID NO: 9373 - DNA, 15 bp, Homo sapiens
caaggttttcgggga

SEQ ID NO: 9374 - DNA, 15 bp, Homo sapiens
tcaaggttttcgggg

SEQ ID NO: 9375 - DNA, 15 bp, Homo sapiens
atcaaggttttcggg

SEQ ID NO: 9376 - DNA, 15 bp, Homo sapiens
aatcaaggttttcgg

SEQ ID NO: 9377 - DNA, 15 bp, Homo sapiens
caatcaaggttttcg

SEQ ID NO: 9378 - DNA, 15 bp, Homo sapiens
acaatcaaggttttc

SEQ ID NO: 9379 - DNA, 15 bp, Homo sapiens
cacaatcaaggtttt

SEQ ID NO: 9380 - DNA, 15 bp, Homo sapiens
ccacaatcaaggttt

SEQ ID NO: 9381 - DNA, 15 bp, Homo sapiens
cccacaatcaaggtt

SEQ ID NO: 9382 - DNA, 15 bp, Homo sapiens
ccccacaatcaaggt

SEQ ID NO: 9383 - DNA, 15 bp, Homo sapiens
gccccacaatcaagg

SEQ ID NO: 9384 - DNA, 15 bp, Homo sapiens
ggccccacaatcaag

SEQ ID NO: 9385 - DNA, 15 bp, Homo sapiens
gggccccacaatcaa

SEQ ID NO: 9386 - DNA, 15 bp, Homo sapiens
ggggccccacaatca

SEQ ID NO: 9387 - DNA, 15 bp, Homo sapiens
aggggccccacaatc

SEQ ID NO: 9388 - DNA, 15 bp, Homo sapiens
gaggggccccacaat

SEQ ID NO: 9389 - DNA, 15 bp, Homo sapiens
agaggggccccacaa

SEQ ID NO: 9390 - DNA, 15 bp, Homo sapiens
tagaggggccccaca

SEQ ID NO: 9391 - DNA, 15 bp, Homo sapiens
ctagaggggccccac

SEQ ID NO: 9392 - DNA, 15 bp, Homo sapiens
tctagaggggcccca

SEQ ID NO: 9393 - DNA, 15 bp, Homo sapiens
ctctagaggggcccc

SEQ ID NO: 9394 - DNA, 15 bp, Homo sapiens
tctctagaggggccc

SEQ ID NO: 9395 - DNA, 15 bp, Homo sapiens
ctctctagaggggcc

SEQ ID NO: 9396 - DNA, 15 bp, Homo sapiens
actctctagaggggc

SEQ ID NO: 9397 - DNA, 15 bp, Homo sapiens
gactctctagagggg

SEQ ID NO: 9398 - DNA, 15 bp, Homo sapiens
agactctctagaggg

SEQ ID NO: 9399 - DNA, 15 bp, Homo sapiens
cagactctctagagg

SEQ ID NO: 9400 - DNA, 15 bp, Homo sapiens
tcagactctctagag

SEQ ID NO: 9401 - DNA, 15 bp, Homo sapiens
atcagactctctaga

SEQ ID NO: 9402 - DNA, 15 bp, Homo sapiens
catcagactctctag

SEQ ID NO: 9403 - DNA, 15 bp, Homo sapiens
tcatcagactctcta

SEQ ID NO: 9404 - DNA, 15 bp, Homo sapiens
atcatcagactctct

SEQ ID NO: 9405 - DNA, 15 bp, Homo sapiens
catcatcagactctc

SEQ ID NO: 9406 - DNA, 15 bp, Homo sapiens
ccatcatcagactct

SEQ ID NO: 9407 - DNA, 15 bp, Homo sapiens
cccatcatcagactc

SEQ ID NO: 9408 - DNA, 15 bp, Homo sapiens
gcccatcatcagact

SEQ ID NO: 9409 - DNA, 15 bp, Homo sapiens
agcccatcatcagac

SEQ ID NO: 9410 - DNA, 15 bp, Homo sapiens
gagcccatcatcaga

SEQ ID NO: 9411 - DNA, 15 bp, Homo sapiens
agagcccatcatcag

SEQ ID NO: 9412 - DNA, 15 bp, Homo sapiens
cagagcccatcatca

SEQ ID NO: 9413 - DNA, 15 bp, Homo sapiens
acagagcccatcatc

SEQ ID NO: 9414 - DNA, 15 bp, Homo sapiens
tacagagcccatcat

SEQ ID NO: 9415 - DNA, 15 bp, Homo sapiens
atacagagcccatca

SEQ ID NO: 9416 - DNA, 15 bp, Homo sapiens
aatacagagcccatc

SEQ ID NO: 9417 - DNA, 15 bp, Homo sapiens
caatacagagcccat

SEQ ID NO: 9418 - DNA, 15 bp, Homo sapiens
ccaatacagagccca

SEQ ID NO: 9419 - DNA, 15 bp, Homo sapiens
gccaatacagagccc

SEQ ID NO: 9420 - DNA, 15 bp, Homo sapiens
cgccaatacagagcc

SEQ ID NO: 9421 - DNA, 15 bp, Homo sapiens
tcgccaatacagagc

SEQ ID NO: 9422 - DNA, 15 bp, Homo sapiens
ttcgccaatacagag

SEQ ID NO: 9423 - DNA, 15 bp, Homo sapiens
cttcgccaatacaga

SEQ ID NO: 9424 - DNA, 15 bp, Homo sapiens
ccttcgccaatacag

SEQ ID NO: 9425 - DNA, 15 bp, Homo sapiens
gccttcgccaataca

SEQ ID NO: 9426 - DNA, 15 bp, Homo sapiens
agccttcgccaatac

SEQ ID NO: 9427 - DNA, 15 bp, Homo sapiens
cagccttcgccaata

SEQ ID NO: 9428 - DNA, 15 bp, Homo sapiens
tcagccttcgccaat

SEQ ID NO: 9429 - DNA, 15 bp, Homo sapiens
ctcagccttcgccaa

SEQ ID NO: 9430 - DNA, 15 bp, Homo sapiens
cctcagccttcgcca

SEQ ID NO: 9431 - DNA, 15 bp, Homo sapiens
gcctcagccttcgcc

SEQ ID NO: 9432 - DNA, 15 bp, Homo sapiens
agcctcagccttcgc

SEQ ID NO: 9433 - DNA, 15 bp, Homo sapiens
aagcctcagccttcg

SEQ ID NO: 9434 - DNA, 15 bp, Homo sapiens
aaagcctcagccttc

SEQ ID NO: 9435 - DNA, 15 bp, Homo sapiens
aaaagcctcagcctt

SEQ ID NO: 9436 - DNA, 15 bp, Homo sapiens
gaaaagcctcagcct

SEQ ID NO: 9437 - DNA, 15 bp, Homo sapiens
ggaaaagcctcagcc

SEQ ID NO: 9438 - DNA, 15 bp, Homo sapiens
tggaaaagcctcagc

SEQ ID NO: 9439 - DNA, 15 bp, Homo sapiens
ctggaaaagcctcag

SEQ ID NO: 9440 - DNA, 15 bp, Homo sapiens
gctggaaaagcctca

SEQ ID NO: 9441 - DNA, 15 bp, Homo sapiens
agctggaaaagcctc

SEQ ID NO: 9442 - DNA, 15 bp, Homo sapiens
gagctggaaaagcct

SEQ ID NO: 9443 - DNA, 15 bp, Homo sapiens
ggagctggaaaagcc

SEQ ID NO: 9444 - DNA, 15 bp, Homo sapiens
gggagctggaaaagc

SEQ ID NO: 9445 - DNA, 15 bp, Homo sapiens
ggggagctggaaaag

SEQ ID NO: 9446 - DNA, 15 bp, Homo sapiens
gggggagctggaaaa

SEQ ID NO: 9447 - DNA, 15 bp, Homo sapiens
ggggggagctggaaa

SEQ ID NO: 9448 - DNA, 15 bp, Homo sapiens
tggggggagctggaa

SEQ ID NO: 9449 - DNA, 15 bp, Homo sapiens
atggggggagctgga

SEQ ID NO: 9450 - DNA, 15 bp, Homo sapiens
catggggggagctgg

SEQ ID NO: 9451 - DNA, 15 bp, Homo sapiens
tcatggggggagctg

SEQ ID NO: 9452 - DNA, 15 bp, Homo sapiens
ctcatggggggagct

SEQ ID NO: 9453 - DNA, 15 bp, Homo sapiens
cctcatggggggagc

SEQ ID NO: 9454 - DNA, 15 bp, Homo sapiens
gcctcatggggggag

SEQ ID NO: 9455 - DNA, 15 bp, Homo sapiens
ggcctcatgggggga

SEQ ID NO: 9456 - DNA, 15 bp, Homo sapiens
gggcctcatgggggg

SEQ ID NO: 9457 - DNA, 15 bp, Homo sapiens
tgggcctcatggggg

SEQ ID NO: 9458 - DNA, 15 bp, Homo sapiens
ctgggcctcatgggg

SEQ ID NO: 9459 - DNA, 15 bp, Homo sapiens
tctgggcctcatggg

SEQ ID NO: 9460 - DNA, 15 bp, Homo sapiens
gtctgggcctcatgg

SEQ ID NO: 9461 - DNA, 15 bp, Homo sapiens
ggtctgggcctcatg

SEQ ID NO: 9462 - DNA, 15 bp, Homo sapiens
tggtctgggcctcat

SEQ ID NO: 9463 - DNA, 15 bp, Homo sapiens
ttggtctgggcctca

SEQ ID NO: 9464 - DNA, 15 bp, Homo sapiens
tttggtctgggcctc

SEQ ID NO: 9465 - DNA, 15 bp, Homo sapiens
ctttggtctgggcct

SEQ ID NO: 9466 - DNA, 15 bp, Homo sapiens
cctttggtctgggcc

SEQ ID NO: 9467 - DNA, 15 bp, Homo sapiens
gcctttggtctgggc

SEQ ID NO: 9468 - DNA, 15 bp, Homo sapiens
tgcctttggtctggg

SEQ ID NO: 9469 - DNA, 15 bp, Homo sapiens
gtgcctttggtctgg

SEQ ID NO: 9470 - DNA, 15 bp, Homo sapiens
tgtgcctttggtctg

SEQ ID NO: 9471 - DNA, 15 bp, Homo sapiens
gtgtgcctttggtct

SEQ ID NO: 9472 - DNA, 15 bp, Homo sapiens
ggtgtgcctttggtc

SEQ ID NO: 9473 - DNA, 15 bp, Homo sapiens
tggtgtgcctttggt

SEQ ID NO: 9474 - DNA, 15 bp, Homo sapiens
ctggtgtgcctttgg

SEQ ID NO: 9475 - DNA, 15 bp, Homo sapiens
gctggtgtgcctttg

SEQ ID NO: 9476 - DNA, 15 bp, Homo sapiens
ggctggtgtgccttt

SEQ ID NO: 9477 - DNA, 15 bp, Homo sapiens
aggctggtgtgcctt

SEQ ID NO: 9478 - DNA, 15 bp, Homo sapiens
gaggctggtgtgcct

SEQ ID NO: 9479 - DNA, 15 bp, Homo sapiens
tgaggctggtgtgcc

SEQ ID NO: 9480 - DNA, 15 bp, Homo sapiens
ttgaggctggtgtgc

SEQ ID NO: 9481 - DNA, 15 bp, Homo sapiens
gttgaggctggtgtg

SEQ ID NO: 9482 - DNA, 15 bp, Homo sapiens
ggttgaggctggtgt

SEQ ID NO: 9483 - DNA, 15 bp, Homo sapiens
aggttgaggctggtg

SEQ ID NO: 9484 - DNA, 15 bp, Homo sapiens
gaggttgaggctggt

SEQ ID NO: 9485 - DNA, 15 bp, Homo sapiens
ggaggttgaggctgg

SEQ ID NO: 9486 - DNA, 15 bp, Homo sapiens
aggaggttgaggctg

SEQ ID NO: 9487 - DNA, 15 bp, Homo sapiens
gaggaggttgaggct

SEQ ID NO: 9488 - DNA, 15 bp, Homo sapiens
ggaggaggttgaggc

SEQ ID NO: 9489 - DNA, 15 bp, Homo sapiens
aggaggaggttgagg

SEQ ID NO: 9490 - DNA, 15 bp, Homo sapiens
gaggaggaggttgag

SEQ ID NO: 9491 - DNA, 15 bp, Homo sapiens
ggaggaggaggttga

SEQ ID NO: 9492 - DNA, 15 bp, Homo sapiens
gggaggaggaggttg

SEQ ID NO: 9493 - DNA, 15 bp, Homo sapiens
ggggaggaggaggtt

SEQ ID NO: 9494 - DNA, 15 bp, Homo sapiens
gggggaggaggaggt

SEQ ID NO: 9495 - DNA, 15 bp, Homo sapiens
agggggaggaggagg

SEQ ID NO: 9496 - DNA, 15 bp, Homo sapiens
cagggggaggaggag

SEQ ID NO: 9497 - DNA, 15 bp, Homo sapiens
acagggggaggagga

SEQ ID NO: 9498 - DNA, 15 bp, Homo sapiens
aacagggggaggagg

SEQ ID NO: 9499 - DNA, 15 bp, Homo sapiens
caacagggggaggag

SEQ ID NO: 9500 - DNA, 15 bp, Homo sapiens
gcaacagggggagga

SEQ ID NO: 9501 - DNA, 15 bp, Homo sapiens
ggcaacagggggagg

SEQ ID NO: 9502 - DNA, 15 bp, Homo sapiens
tggcaacagggggag

SEQ ID NO: 9503 - DNA, 15 bp, Homo sapiens
atggcaacaggggga

SEQ ID NO: 9504 - DNA, 15 bp, Homo sapiens
gatggcaacaggggg

SEQ ID NO: 9505 - DNA, 15 bp, Homo sapiens
agatggcaacagggg

SEQ ID NO: 9506 - DNA, 15 bp, Homo sapiens
gagatggcaacaggg

SEQ ID NO: 9507 - DNA, 15 bp, Homo sapiens
agagatggcaacagg

SEQ ID NO: 9508 - DNA, 15 bp, Homo sapiens
cagagatggcaacag

SEQ ID NO: 9509 - DNA, 15 bp, Homo sapiens
ccagagatggcaaca

SEQ ID NO: 9510 - DNA, 15 bp, Homo sapiens
gccagagatggcaac

SEQ ID NO: 9511 - DNA, 15 bp, Homo sapiens
cgccagagatggcaa

SEQ ID NO: 9512 - DNA, 15 bp, Homo sapiens
ccgccagagatggca

SEQ ID NO: 9513 - DNA, 15 bp, Homo sapiens
tccgccagagatggc

SEQ ID NO: 9514 - DNA, 15 bp, Homo sapiens
ctccgccagagatgg

SEQ ID NO: 9515 - DNA, 15 bp, Homo sapiens
actccgccagagatg

SEQ ID NO: 9516 - DNA, 15 bp, Homo sapiens
cactccgccagagat

SEQ ID NO: 9517 - DNA, 15 bp, Homo sapiens
ccactccgccagaga

SEQ ID NO: 9518 - DNA, 15 bp, Homo sapiens
gccactccgccagag

SEQ ID NO: 9519 - DNA, 15 bp, Homo sapiens
ggccactccgccaga

SEQ ID NO: 9520 - DNA, 15 bp, Homo sapiens
tggccactccgccag

SEQ ID NO: 9521 - DNA, 15 bp, Homo sapiens
atggccactccgcca

SEQ ID NO: 9522 - DNA, 15 bp, Homo sapiens
catggccactccgcc

SEQ ID NO: 9523 - DNA, 15 bp, Homo sapiens
acatggccactccgc

SEQ ID NO: 9524 - DNA, 15 bp, Homo sapiens
tacatggccactccg

SEQ ID NO: 9525 - DNA, 15 bp, Homo sapiens
atacatggccactcc

SEQ ID NO: 9526 - DNA, 15 bp, Homo sapiens
aatacatggccactc

SEQ ID NO: 9527 - DNA, 15 bp, Homo sapiens
aaatacatggccact

SEQ ID NO: 9528 - DNA, 15 bp, Homo sapiens
caaatacatggccac

SEQ ID NO: 9529 - DNA, 15 bp, Homo sapiens
ccaaatacatggcca

SEQ ID NO: 9530 - DNA, 15 bp, Homo sapiens
cccaaatacatggcc

SEQ ID NO: 9531 - DNA, 15 bp, Homo sapiens
tcccaaatacatggc

SEQ ID NO: 9532 - DNA, 15 bp, Homo sapiens
ttcccaaatacatgg

SEQ ID NO: 9533 - DNA, 15 bp, Homo sapiens
gttcccaaatacatg

SEQ ID NO: 9534 - DNA, 15 bp, Homo sapiens
cgttcccaaatacat

SEQ ID NO: 9535 - DNA, 15 bp, Homo sapiens
acgttcccaaataca

SEQ ID NO: 9536 - DNA, 15 bp, Homo sapiens
aacgttcccaaatac

SEQ ID NO: 9537 - DNA, 15 bp, Homo sapiens
caacgttcccaaata

SEQ ID NO: 9538 - DNA, 15 bp, Homo sapiens
acaacgttcccaaat

SEQ ID NO: 9539 - DNA, 15 bp, Homo sapiens
aacaacgttcccaaa

SEQ ID NO: 9540 - DNA, 15 bp, Homo sapiens
gaacaacgttcccaa

SEQ ID NO: 9541 - DNA, 15 bp, Homo sapiens
ggaacaacgttccca

SEQ ID NO: 9542 - DNA, 15 bp, Homo sapiens
tggaacaacgttccc

SEQ ID NO: 9543 - DNA, 15 bp, Homo sapiens
ctggaacaacgttcc

SEQ ID NO: 9544 - DNA, 15 bp, Homo sapiens
tctggaacaacgttc

SEQ ID NO: 9545 - DNA, 15 bp, Homo sapiens
ctctggaacaacgtt

SEQ ID NO: 9546 - DNA, 15 bp, Homo sapiens
actctggaacaacgt

SEQ ID NO: 9547 - DNA, 15 bp, Homo sapiens
cactctggaacaacg

SEQ ID NO: 9548 - DNA, 15 bp, Homo sapiens
ccactctggaacaac

SEQ ID NO: 9549 - DNA, 15 bp, Homo sapiens
tccactctggaacaa

SEQ ID NO: 9550 - DNA, 15 bp, Homo sapiens
gtccactctggaaca

SEQ ID NO: 9551 - DNA, 15 bp, Homo sapiens
tgtccactctggaac

SEQ ID NO: 9552 - DNA, 15 bp, Homo sapiens
ctgtccactctggaa

SEQ ID NO: 9553 - DNA, 15 bp, Homo sapiens
cctgtccactctgga

SEQ ID NO: 9554 - DNA, 15 bp, Homo sapiens
ccctgtccactctgg

SEQ ID NO: 9555 - DNA, 15 bp, Homo sapiens
tccctgtccactctg

SEQ ID NO: 9556 - DNA, 15 bp, Homo sapiens
ctccctgtccactct

SEQ ID NO: 9557 - DNA, 15 bp, Homo sapiens
tctccctgtccactc

SEQ ID NO: 9558 - DNA, 15 bp, Homo sapiens
gtctccctgtccact

SEQ ID NO: 9559 - DNA, 15 bp, Homo sapiens
agtctccctgtccac

SEQ ID NO: 9560 - DNA, 15 bp, Homo sapiens
cagtctccctgtcca

SEQ ID NO: 9561 - DNA, 15 bp, Homo sapiens
tcagtctccctgtcc

SEQ ID NO: 9562 - DNA, 15 bp, Homo sapiens
ctcagtctccctgtc

SEQ ID NO: 9563 - DNA, 15 bp, Homo sapiens
cctcagtctccctgt

SEQ ID NO: 9564 - DNA, 15 bp, Homo sapiens
gcctcagtctccctg

SEQ ID NO: 9565 - DNA, 15 bp, Homo sapiens
ggcctcagtctccct

SEQ ID NO: 9566 - DNA, 15 bp, Homo sapiens
gggcctcagtctccc

SEQ ID NO: 9567 - DNA, 15 bp, Homo sapiens
agggcctcagtctcc

SEQ ID NO: 9568 - DNA, 15 bp, Homo sapiens
tagggcctcagtctc

SEQ ID NO: 9569 - DNA, 15 bp, Homo sapiens
ctagggcctcagtct

SEQ ID NO: 9570 - DNA, 15 bp, Homo sapiens
cctagggcctcagtc

SEQ ID NO: 9571 - DNA, 15 bp, Homo sapiens
ccctagggcctcagt

SEQ ID NO: 9572 - DNA, 15 bp, Homo sapiens
tccctagggcctcag

SEQ ID NO: 9573 - DNA, 15 bp, Homo sapiens
ctccctagggcctca

SEQ ID NO: 9574 - DNA, 15 bp, Homo sapiens
cctccctagggcctc

SEQ ID NO: 9575 - DNA, 15 bp, Homo sapiens
gcctccctagggcct

SEQ ID NO: 9576 - DNA, 15 bp, Homo sapiens
agcctccctagggcc

SEQ ID NO: 9577 - DNA, 15 bp, Homo sapiens
cagcctccctagggc

SEQ ID NO: 9578 - DNA, 15 bp, Homo sapiens
ccagcctccctaggg

SEQ ID NO: 9579 - DNA, 15 bp, Homo sapiens
gccagcctccctagg

SEQ ID NO: 9580 - DNA, 15 bp, Homo sapiens
agccagcctccctag

SEQ ID NO: 9581 - DNA, 15 bp, Homo sapiens
gagccagcctcccta

SEQ ID NO: 9582 - DNA, 15 bp, Homo sapiens
agagccagcctccct

SEQ ID NO: 9583 - DNA, 15 bp, Homo sapiens
cagagccagcctccc

SEQ ID NO: 9584 - DNA, 15 bp, Homo sapiens
acagagccagcctcc

SEQ ID NO: 9585 - DNA, 15 bp, Homo sapiens
aacagagccagcctc

SEQ ID NO: 9586 - DNA, 15 bp, Homo sapiens
aaacagagccagcct

SEQ ID NO: 9587 - DNA, 15 bp, Homo sapiens
gaaacagagccagcc

SEQ ID NO: 9588 - DNA, 15 bp, Homo sapiens
ggaaacagagccagc

SEQ ID NO: 9589 - DNA, 15 bp, Homo sapiens
tggaaacagagccag

SEQ ID NO: 9590 - DNA, 15 bp, Homo sapiens
ctggaaacagagcca

SEQ ID NO: 9591 - DNA, 15 bp, Homo sapiens
cctggaaacagagcc

SEQ ID NO: 9592 - DNA, 15 bp, Homo sapiens
gcctggaaacagagc

SEQ ID NO: 9593 - DNA, 15 bp, Homo sapiens
ggcctggaaacagag

SEQ ID NO: 9594 - DNA, 15 bp, Homo sapiens
aggcctggaaacaga

SEQ ID NO: 9595 - DNA, 15 bp, Homo sapiens
caggcctggaaacag

SEQ ID NO: 9596 - DNA, 15 bp, Homo sapiens
ccaggcctggaaaca

SEQ ID NO: 9597 - DNA, 15 bp, Homo sapiens
accaggcctggaaac

SEQ ID NO: 9598 - DNA, 15 bp, Homo sapiens
taccaggcctggaaa

SEQ ID NO: 9599 - DNA, 15 bp, Homo sapiens
ctaccaggcctggaa

SEQ ID NO: 9600 - DNA, 15 bp, Homo sapiens
cctaccaggcctgga

SEQ ID NO: 9601 - DNA, 15 bp, Homo sapiens
gcctaccaggcctgg

SEQ ID NO: 9602 - DNA, 15 bp, Homo sapiens
tgcctaccaggcctg

SEQ ID NO: 9603 - DNA, 15 bp, Homo sapiens
ttgcctaccaggcct

SEQ ID NO: 9604 - DNA, 15 bp, Homo sapiens
cttgcctaccaggcc

SEQ ID NO: 9605 - DNA, 15 bp, Homo sapiens
tcttgcctaccaggc

SEQ ID NO: 9606 - DNA, 15 bp, Homo sapiens
ctcttgcctaccagg

SEQ ID NO: 9607 - DNA, 15 bp, Homo sapiens
cctcttgcctaccag

SEQ ID NO: 9608 - DNA, 15 bp, Homo sapiens
gcctcttgcctacca

SEQ ID NO: 9609 - DNA, 15 bp, Homo sapiens
ggcctcttgcctacc

SEQ ID NO: 9610 - DNA, 15 bp, Homo sapiens
gggcctcttgcctac

SEQ ID NO: 9611 - DNA, 15 bp, Homo sapiens
agggcctcttgccta

SEQ ID NO: 9612 - DNA, 15 bp, Homo sapiens
tagggcctcttgcct

SEQ ID NO: 9613 - DNA, 15 bp, Homo sapiens
atagggcctcttgcc

SEQ ID NO: 9614 - DNA, 15 bp, Homo sapiens
catagggcctcttgc

SEQ ID NO: 9615 - DNA, 15 bp, Homo sapiens
tcatagggcctcttg

SEQ ID NO: 9616 - DNA, 15 bp, Homo sapiens
ttcatagggcctctt

SEQ ID NO: 9617 - DNA, 15 bp, Homo sapiens
cttcatagggcctct

SEQ ID NO: 9618 - DNA, 15 bp, Homo sapiens
gcttcatagggcctc

SEQ ID NO: 9619 - DNA, 15 bp, Homo sapiens
tgcttcatagggcct

SEQ ID NO: 9620 - DNA, 15 bp, Homo sapiens
ctgcttcatagggcc

SEQ ID NO: 9621 - DNA, 15 bp, Homo sapiens
gctgcttcatagggc

SEQ ID NO: 9622 - DNA, 15 bp, Homo sapiens
tgctgcttcataggg

SEQ ID NO: 9623 - DNA, 15 bp, Homo sapiens
ttgctgcttcatagg

SEQ ID NO: 9624 - DNA, 15 bp, Homo sapiens
cttgctgcttcatag

SEQ ID NO: 9625 - DNA, 15 bp, Homo sapiens
gcttgctgcttcata

SEQ ID NO: 9626 - DNA, 15 bp, Homo sapiens
agcttgctgcttcat

SEQ ID NO: 9627 - DNA, 15 bp, Homo sapiens
cagcttgctgcttca

SEQ ID NO: 9628 - DNA, 15 bp, Homo sapiens
gcagcttgctgcttc

SEQ ID NO: 9629 - DNA, 15 bp, Homo sapiens
ggcagcttgctgctt

SEQ ID NO: 9630 - DNA, 15 bp, Homo sapiens
aggcagcttgctgct

SEQ ID NO: 9631 - DNA, 15 bp, Homo sapiens
caggcagcttgctgc

SEQ ID NO: 9632 - DNA, 15 bp, Homo sapiens
tcaggcagcttgctg

SEQ ID NO: 9633 - DNA, 15 bp, Homo sapiens
gtcaggcagcttgct

SEQ ID NO: 9634 - DNA, 15 bp, Homo sapiens
agtcaggcagcttgc

SEQ ID NO: 9635 - DNA, 15 bp, Homo sapiens
aagtcaggcagcttg

SEQ ID NO: 9636 - DNA, 15 bp, Homo sapiens
aaagtcaggcagctt

SEQ ID NO: 9637 - DNA, 15 bp, Homo sapiens
gaaagtcaggcagct

SEQ ID NO: 9638 - DNA, 15 bp, Homo sapiens
tgaaagtcaggcagc

SEQ ID NO: 9639 - DNA, 15 bp, Homo sapiens
ctgaaagtcaggcag

SEQ ID NO: 9640 - DNA, 15 bp, Homo sapiens
tctgaaagtcaggca

SEQ ID NO: 9641 - DNA, 15 bp, Homo sapiens
atctgaaagtcaggc

SEQ ID NO: 9642 - DNA, 15 bp, Homo sapiens
catctgaaagtcagg

SEQ ID NO: 9643 - DNA, 15 bp, Homo sapiens
ccatctgaaagtcag

SEQ ID NO: 9644 - DNA, 15 bp, Homo sapiens
accatctgaaagtca

SEQ ID NO: 9645 - DNA, 15 bp, Homo sapiens
aaccatctgaaagtc

SEQ ID NO: 9646 - DNA, 15 bp, Homo sapiens
gaaccatctgaaagt

SEQ ID NO: 9647 - DNA, 15 bp, Homo sapiens
ggaaccatctgaaag

SEQ ID NO: 9648 - DNA, 15 bp, Homo sapiens
tggaaccatctgaaa

SEQ ID NO: 9649 - DNA, 15 bp, Homo sapiens
ttggaaccatctgaa

SEQ ID NO: 9650 - DNA, 15 bp, Homo sapiens
cttggaaccatctga

SEQ ID NO: 9651 - DNA, 15 bp, Homo sapiens
ccttggaaccatctg

SEQ ID NO: 9652 - DNA, 15 bp, Homo sapiens
tccttggaaccatct

SEQ ID NO: 9653 - DNA, 15 bp, Homo sapiens
ctccttggaaccatc

SEQ ID NO: 9654 - DNA, 15 bp, Homo sapiens
actccttggaaccat

SEQ ID NO: 9655 - DNA, 15 bp, Homo sapiens
aactccttggaacca

SEQ ID NO: 9656 - DNA, 15 bp, Homo sapiens
aaactccttggaacc

SEQ ID NO: 9657 - DNA, 15 bp, Homo sapiens
caaactccttggaac

SEQ ID NO: 9658 - DNA, 15 bp, Homo sapiens
ccaaactccttggaa

SEQ ID NO: 9659 - DNA, 15 bp, Homo sapiens
tccaaactccttgga

SEQ ID NO: 9660 - DNA, 15 bp, Homo sapiens
gtccaaactccttgg

SEQ ID NO: 9661 - DNA, 15 bp, Homo sapiens
tgtccaaactccttg

SEQ ID NO: 9662 - DNA, 15 bp, Homo sapiens
gtgtccaaactcctt

SEQ ID NO: 9663 - DNA, 15 bp, Homo sapiens
ggtgtccaaactcct

SEQ ID NO: 9664 - DNA, 15 bp, Homo sapiens
tggtgtccaaactcc

SEQ ID NO: 9665 - DNA, 15 bp, Homo sapiens
ctggtgtccaaactc

SEQ ID NO: 9666 - DNA, 15 bp, Homo sapiens
cctggtgtccaaact

SEQ ID NO: 9667 - DNA, 15 bp, Homo sapiens
ccctggtgtccaaac

SEQ ID NO: 9668 - DNA, 15 bp, Homo sapiens
tccctggtgtccaaa

SEQ ID NO: 9669 - DNA, 15 bp, Homo sapiens
gtccctggtgtccaa

SEQ ID NO: 9670 - DNA, 15 bp, Homo sapiens
tgtccctggtgtcca

SEQ ID NO: 9671 - DNA, 15 bp, Homo sapiens
gtgtccctggtgtcc

SEQ ID NO: 9672 - DNA, 15 bp, Homo sapiens
agtgtccctggtgtc

SEQ ID NO: 9673 - DNA, 15 bp, Homo sapiens
cagtgtccctggtgt

SEQ ID NO: 9674 - DNA, 15 bp, Homo sapiens
ccagtgtccctggtg

SEQ ID NO: 9675 - DNA, 15 bp, Homo sapiens
gccagtgtccctggt

SEQ ID NO: 9676 - DNA, 15 bp, Homo sapiens
ggccagtgtccctgg

SEQ ID NO: 9677 - DNA, 15 bp, Homo sapiens
aggccagtgtccctg

SEQ ID NO: 9678 - DNA, 15 bp, Homo sapiens
taggccagtgtccct

SEQ ID NO: 9679 - DNA, 15 bp, Homo sapiens
gtaggccagtgtccc

SEQ ID NO: 9680 - DNA, 15 bp, Homo sapiens
tgtaggccagtgtcc

SEQ ID NO: 9681 - DNA, 15 bp, Homo sapiens
gtgtaggccagtgtc

SEQ ID NO: 9682 - DNA, 15 bp, Homo sapiens
tgtgtaggccagtgt

SEQ ID NO: 9683 - DNA, 15 bp, Homo sapiens
atgtgtaggccagtg

SEQ ID NO: 9684 - DNA, 15 bp, Homo sapiens
tatgtgtaggccagt

SEQ ID NO: 9685 - DNA, 15 bp, Homo sapiens
gtatgtgtaggccag

SEQ ID NO: 9686 - DNA, 15 bp, Homo sapiens
agtatgtgtaggcca

SEQ ID NO: 9687 - DNA, 15 bp, Homo sapiens
cagtatgtgtaggcc

SEQ ID NO: 9688 - DNA, 15 bp, Homo sapiens
tcagtatgtgtaggc

SEQ ID NO: 9689 - DNA, 15 bp, Homo sapiens
ctcagtatgtgtagg

SEQ ID NO: 9690 - DNA, 15 bp, Homo sapiens
tctcagtatgtgtag

SEQ ID NO: 9691 - DNA, 15 bp, Homo sapiens
gtctcagtatgtgta

SEQ ID NO: 9692 - DNA, 15 bp, Homo sapiens
agtctcagtatgtgt

SEQ ID NO: 9693 - DNA, 15 bp, Homo sapiens
aagtctcagtatgtg

SEQ ID NO: 9694 - DNA, 15 bp, Homo sapiens
aaagtctcagtatgt

SEQ ID NO: 9695 - DNA, 15 bp, Homo sapiens
caaagtctcagtatg

SEQ ID NO: 9696 - DNA, 15 bp, Homo sapiens
ccaaagtctcagtat

SEQ ID NO: 9697 - DNA, 15 bp, Homo sapiens
cccaaagtctcagta

SEQ ID NO: 9698 - DNA, 15 bp, Homo sapiens
tcccaaagtctcagt

SEQ ID NO: 9699 - DNA, 15 bp, Homo sapiens
gtcccaaagtctcag

SEQ ID NO: 9700 - DNA, 15 bp, Homo sapiens
ggtcccaaagtctca

SEQ ID NO: 9701 - DNA, 15 bp, Homo sapiens
cggtcccaaagtctc

SEQ ID NO: 9702 - DNA, 15 bp, Homo sapiens
acggtcccaaagtct

SEQ ID NO: 9703 - DNA, 15 bp, Homo sapiens
tacggtcccaaagtc

SEQ ID NO: 9704 - DNA, 15 bp, Homo sapiens
ctacggtcccaaagt

SEQ ID NO: 9705 - DNA, 15 bp, Homo sapiens
tctacggtcccaaag

SEQ ID NO: 9706 - DNA, 15 bp, Homo sapiens
gtctacggtcccaaa

SEQ ID NO: 9707 - DNA, 15 bp, Homo sapiens
ggtctacggtcccaa

SEQ ID NO: 9708 - DNA, 15 bp, Homo sapiens
gggtctacggtccca

SEQ ID NO: 9709 - DNA, 15 bp, Homo sapiens
ggggtctacggtccc

SEQ ID NO: 9710 - DNA, 15 bp, Homo sapiens
tggggtctacggtcc

SEQ ID NO: 9711 - DNA, 15 bp, Homo sapiens
gtggggtctacggtc

SEQ ID NO: 9712 - DNA, 15 bp, Homo sapiens
tgtggggtctacggt

SEQ ID NO: 9713 - DNA, 15 bp, Homo sapiens
ctgtggggtctacgg

SEQ ID NO: 9714 - DNA, 15 bp, Homo sapiens
actgtggggtctacg

SEQ ID NO: 9715 - DNA, 15 bp, Homo sapiens
gactgtggggtctac

SEQ ID NO: 9716 - DNA, 15 bp, Homo sapiens
agactgtggggtcta

SEQ ID NO: 9717 - DNA, 15 bp, Homo sapiens
cagactgtggggtct

SEQ ID NO: 9718 - DNA, 15 bp, Homo sapiens
acagactgtggggtc

SEQ ID NO: 9719 - DNA, 15 bp, Homo sapiens
cacagactgtggggt

SEQ ID NO: 9720 - DNA, 15 bp, Homo sapiens
ccacagactgtgggg

SEQ ID NO: 9721 - DNA, 15 bp, Homo sapiens
accacagactgtggg

SEQ ID NO: 9722 - DNA, 15 bp, Homo sapiens
aaccacagactgtgg

SEQ ID NO: 9723 - DNA, 15 bp, Homo sapiens
aaaccacagactgtg

SEQ ID NO: 9724 - DNA, 15 bp, Homo sapiens
aaaaccacagactgt

SEQ ID NO: 9725 - DNA, 15 bp, Homo sapiens
caaaaccacagactg

SEQ ID NO: 9726 - DNA, 15 bp, Homo sapiens
tcaaaaccacagact

SEQ ID NO: 9727 - DNA, 15 bp, Homo sapiens
ctcaaaaccacagac

SEQ ID NO: 9728 - DNA, 15 bp, Homo sapiens
tctcaaaaccacaga

SEQ ID NO: 9729 - DNA, 15 bp, Homo sapiens
atctcaaaaccacag

SEQ ID NO: 9730 - DNA, 15 bp, Homo sapiens
aatctcaaaaccaca

SEQ ID NO: 9731 - DNA, 15 bp, Homo sapiens
gaatctcaaaaccac

SEQ ID NO: 9732 - DNA, 15 bp, Homo sapiens
agaatctcaaaacca

SEQ ID NO: 9733 - DNA, 15 bp, Homo sapiens
tagaatctcaaaacc

SEQ ID NO: 9734 - DNA, 15 bp, Homo sapiens
ctagaatctcaaaac

SEQ ID NO: 9735 - DNA, 15 bp, Homo sapiens
cctagaatctcaaaa

SEQ ID NO: 9736 - DNA, 15 bp, Homo sapiens
tcctagaatctcaaa

SEQ ID NO: 9737 - DNA, 15 bp, Homo sapiens
atcctagaatctcaa

SEQ ID NO: 9738 - DNA, 15 bp, Homo sapiens
gatcctagaatctca

SEQ ID NO: 9739 - DNA, 15 bp, Homo sapiens
ggatcctagaatctc

SEQ ID NO: 9740 - DNA, 15 bp, Homo sapiens
aggatcctagaatct

SEQ ID NO: 9741 - DNA, 15 bp, Homo sapiens
aaggatcctagaatc

SEQ ID NO: 9742 - DNA, 15 bp, Homo sapiens
aaaggatcctagaat

SEQ ID NO: 9743 - DNA, 15 bp, Homo sapiens
taaaggatcctagaa

SEQ ID NO: 9744 - DNA, 15 bp, Homo sapiens
ttaaaggatcctaga

SEQ ID NO: 9745 - DNA, 15 bp, Homo sapiens
tttaaaggatcctag

SEQ ID NO: 9746 - DNA, 15 bp, Homo sapiens
atttaaaggatccta

SEQ ID NO: 9747 - DNA, 15 bp, Homo sapiens
gatttaaaggatcct

SEQ ID NO: 9748 - DNA, 15 bp, Homo sapiens
agatttaaaggatcc

SEQ ID NO: 9749 - DNA, 15 bp, Homo sapiens
tagatttaaaggatc

SEQ ID NO: 9750 - DNA, 15 bp, Homo sapiens
ttagatttaaaggat

SEQ ID NO: 9751 - DNA, 15 bp, Homo sapiens
cttagatttaaagga

SEQ ID NO: 9752 - DNA, 15 bp, Homo sapiens
tcttagatttaaagg

SEQ ID NO: 9753 - DNA, 15 bp, Homo sapiens
ttcttagatttaaag

SEQ ID NO: 9754 - DNA, 15 bp, Homo sapiens
tttcttagatttaaa

SEQ ID NO: 9755 - DNA, 15 bp, Homo sapiens
atttcttagatttaa

SEQ ID NO: 9756 - DNA, 15 bp, Homo sapiens
catttcttagattta

SEQ ID NO: 9757 - DNA, 15 bp, Homo sapiens
gcatttcttagattt

SEQ ID NO: 9758 - DNA, 15 bp, Homo sapiens
agcatttcttagatt

SEQ ID NO: 9759 - DNA, 15 bp, Homo sapiens
cagcatttcttagat

SEQ ID NO: 9760 - DNA, 15 bp, Homo sapiens
acagcatttcttaga

SEQ ID NO: 9761 - DNA, 15 bp, Homo sapiens
aacagcatttcttag

SEQ ID NO: 9762 - DNA, 15 bp, Homo sapiens
gaacagcatttctta

SEQ ID NO: 9763 - DNA, 15 bp, Homo sapiens
agaacagcatttctt

SEQ ID NO: 9764 - DNA, 15 bp, Homo sapiens
tagaacagcatttct

SEQ ID NO: 9765 - DNA, 15 bp, Homo sapiens
atagaacagcatttc

SEQ ID NO: 9766 - DNA, 15 bp, Homo sapiens
catagaacagcattt

SEQ ID NO: 9767 - DNA, 15 bp, Homo sapiens
tcatagaacagcatt

SEQ ID NO: 9768 - DNA, 15 bp, Homo sapiens
atcatagaacagcat

SEQ ID NO: 9769 - DNA, 15 bp, Homo sapiens
aatcatagaacagca

SEQ ID NO: 9770 - DNA, 15 bp, Homo sapiens
gaatcatagaacagc

SEQ ID NO: 9771 - DNA, 15 bp, Homo sapiens
agaatcatagaacag

SEQ ID NO: 9772 - DNA, 15 bp, Homo sapiens
cagaatcatagaaca

SEQ ID NO: 9773 - DNA, 15 bp, Homo sapiens
tcagaatcatagaac

SEQ ID NO: 9774 - DNA, 15 bp, Homo sapiens
ctcagaatcatagaa

SEQ ID NO: 9775 - DNA, 15 bp, Homo sapiens
cctcagaatcataga

SEQ ID NO: 9776 - DNA, 15 bp, Homo sapiens
acctcagaatcatag

SEQ ID NO: 9777 - DNA, 15 bp, Homo sapiens
gacctcagaatcata

SEQ ID NO: 9778 - DNA, 15 bp, Homo sapiens
ggacctcagaatcat

SEQ ID NO: 9779 - DNA, 15 bp, Homo sapiens
aggacctcagaatca

SEQ ID NO: 9780 - DNA, 15 bp, Homo sapiens
caggacctcagaatc

SEQ ID NO: 9781 - DNA, 15 bp, Homo sapiens
ccaggacctcagaat

SEQ ID NO: 9782 - DNA, 15 bp, Homo sapiens
accaggacctcagaa

SEQ ID NO: 9783 - DNA, 15 bp, Homo sapiens
caccaggacctcaga

SEQ ID NO: 9784 - DNA, 15 bp, Homo sapiens
acaccaggacctcag

SEQ ID NO: 9785 - DNA, 15 bp, Homo sapiens
aacaccaggacctca

SEQ ID NO: 9786 - DNA, 15 bp, Homo sapiens
taacaccaggacctc

SEQ ID NO: 9787 - DNA, 15 bp, Homo sapiens
ataacaccaggacct

SEQ ID NO: 9788 - DNA, 15 bp, Homo sapiens
tataacaccaggacc

SEQ ID NO: 9789 - DNA, 15 bp, Homo sapiens
gtataacaccaggac

SEQ ID NO: 9790 - DNA, 15 bp, Homo sapiens
agtataacaccagga

SEQ ID NO: 9791 - DNA, 15 bp, Homo sapiens
tagtataacaccagg

SEQ ID NO: 9792 - DNA, 15 bp, Homo sapiens
atagtataacaccag

SEQ ID NO: 9793 - DNA, 15 bp, Homo sapiens
aatagtataacacca

SEQ ID NO: 9794 - DNA, 15 bp, Homo sapiens
aaatagtataacacc

SEQ ID NO: 9795 - DNA, 15 bp, Homo sapiens
caaatagtataacac

SEQ ID NO: 9796 - DNA, 15 bp, Homo sapiens
tcaaatagtataaca

SEQ ID NO: 9797 - DNA, 15 bp, Homo sapiens
ttcaaatagtataac

SEQ ID NO: 9798 - DNA, 15 bp, Homo sapiens
cttcaaatagtataa

SEQ ID NO: 9799 - DNA, 15 bp, Homo sapiens
tcttcaaatagtata

SEQ ID NO: 9800 - DNA, 15 bp, Homo sapiens
gtcttcaaatagtat

SEQ ID NO: 9801 - DNA, 15 bp, Homo sapiens
ggtcttcaaatagta

SEQ ID NO: 9802 - DNA, 15 bp, Homo sapiens
gggtcttcaaatagt

SEQ ID NO: 9803 - DNA, 15 bp, Homo sapiens
ggggtcttcaaatag

SEQ ID NO: 9804 - DNA, 15 bp, Homo sapiens
tggggtcttcaaata

SEQ ID NO: 9805 - DNA, 15 bp, Homo sapiens
ctggggtcttcaaat

SEQ ID NO: 9806 - DNA, 15 bp, Homo sapiens
cctggggtcttcaaa

SEQ ID NO: 9807 - DNA, 15 bp, Homo sapiens
ccctggggtcttcaa

SEQ ID NO: 9808 - DNA, 15 bp, Homo sapiens
cccctggggtcttca

SEQ ID NO: 9809 - DNA, 15 bp, Homo sapiens
acccctggggtcttc

SEQ ID NO: 9810 - DNA, 15 bp, Homo sapiens
gacccctggggtctt

SEQ ID NO: 9811 - DNA, 15 bp, Homo sapiens
ggacccctggggtct

SEQ ID NO: 9812 - DNA, 15 bp, Homo sapiens
gggacccctggggtc

SEQ ID NO: 9813 - DNA, 15 bp, Homo sapiens
tgggacccctggggt

SEQ ID NO: 9814 - DNA, 15 bp, Homo sapiens
ctgggacccctgggg

SEQ ID NO: 9815 - DNA, 15 bp, Homo sapiens
actgggacccctggg

SEQ ID NO: 9816 - DNA, 15 bp, Homo sapiens
tactgggacccctgg

SEQ ID NO: 9817 - DNA, 15 bp, Homo sapiens
atactgggacccctg

SEQ ID NO: 9818 - DNA, 15 bp, Homo sapiens
gatactgggacccct

SEQ ID NO: 9819 - DNA, 15 bp, Homo sapiens
agatactgggacccc

SEQ ID NO: 9820 - DNA, 15 bp, Homo sapiens
cagatactgggaccc

SEQ ID NO: 9821 - DNA, 15 bp, Homo sapiens
acagatactgggacc

SEQ ID NO: 9822 - DNA, 15 bp, Homo sapiens
cacagatactgggac

SEQ ID NO: 9823 - DNA, 15 bp, Homo sapiens
ccacagatactggga

SEQ ID NO: 9824 - DNA, 15 bp, Homo sapiens
tccacagatactggg

SEQ ID NO: 9825 - DNA, 15 bp, Homo sapiens
ctccacagatactgg

SEQ ID NO: 9826 - DNA, 15 bp, Homo sapiens
gctccacagatactg

SEQ ID NO: 9827 - DNA, 15 bp, Homo sapiens
ggctccacagatact

SEQ ID NO: 9828 - DNA, 15 bp, Homo sapiens
aggctccacagatac

SEQ ID NO: 9829 - DNA, 15 bp, Homo sapiens
caggctccacagata

SEQ ID NO: 9830 - DNA, 15 bp, Homo sapiens
gcaggctccacagat

SEQ ID NO: 9831 - DNA, 15 bp, Homo sapiens
ggcaggctccacaga

SEQ ID NO: 9832 - DNA, 15 bp, Homo sapiens
aggcaggctccacag

SEQ ID NO: 9833 - DNA, 15 bp, Homo sapiens
caggcaggctccaca

SEQ ID NO: 9834 - DNA, 15 bp, Homo sapiens
ccaggcaggctccac

SEQ ID NO: 9835 - DNA, 15 bp, Homo sapiens
gccaggcaggctcca

SEQ ID NO: 9836 - DNA, 15 bp, Homo sapiens
tgccaggcaggctcc

SEQ ID NO: 9837 - DNA, 15 bp, Homo sapiens
gtgccaggcaggctc

SEQ ID NO: 9838 - DNA, 15 bp, Homo sapiens
agtgccaggcaggct

SEQ ID NO: 9839 - DNA, 15 bp, Homo sapiens
gagtgccaggcaggc

SEQ ID NO: 9840 - DNA, 15 bp, Homo sapiens
agagtgccaggcagg

SEQ ID NO: 9841 - DNA, 15 bp, Homo sapiens
gagagtgccaggcag

SEQ ID NO: 9842 - DNA, 15 bp, Homo sapiens
tgagagtgccaggca

SEQ ID NO: 9843 - DNA, 15 bp, Homo sapiens
ctgagagtgccaggc

SEQ ID NO: 9844 - DNA, 15 bp, Homo sapiens
tctgagagtgccagg

SEQ ID NO: 9845 - DNA, 15 bp, Homo sapiens
ctctgagagtgccag

SEQ ID NO: 9846 - DNA, 15 bp, Homo sapiens
gctctgagagtgcca

SEQ ID NO: 9847 - DNA, 15 bp, Homo sapiens
agctctgagagtgcc

SEQ ID NO: 9848 - DNA, 15 bp, Homo sapiens
aagctctgagagtgc

SEQ ID NO: 9849 - DNA, 15 bp, Homo sapiens
gaagctctgagagtg

SEQ ID NO: 9850 - DNA, 15 bp, Homo sapiens
tgaagctctgagagt

SEQ ID NO: 9851 - DNA, 15 bp, Homo sapiens
ttgaagctctgagag

SEQ ID NO: 9852 - DNA, 15 bp, Homo sapiens
tttgaagctctgaga

SEQ ID NO: 9853 - DNA, 15 bp, Homo sapiens
gtttgaagctctgag

SEQ ID NO: 9854 - DNA, 15 bp, Homo sapiens
ggtttgaagctctga

SEQ ID NO: 9855 - DNA, 15 bp, Homo sapiens
aggtttgaagctctg

SEQ ID NO: 9856 - DNA, 15 bp, Homo sapiens
caggtttgaagctct

SEQ ID NO: 9857 - DNA, 15 bp, Homo sapiens
ccaggtttgaagctc

SEQ ID NO: 9858 - DNA, 15 bp, Homo sapiens
cccaggtttgaagct

SEQ ID NO: 9859 - DNA, 15 bp, Homo sapiens
acccaggtttgaagc

SEQ ID NO: 9860 - DNA, 15 bp, Homo sapiens
gacccaggtttgaag

SEQ ID NO: 9861 - DNA, 15 bp, Homo sapiens
ggacccaggtttgaa

SEQ ID NO: 9862 - DNA, 15 bp, Homo sapiens
aggacccaggtttga

SEQ ID NO: 9863 - DNA, 15 bp, Homo sapiens
gaggacccaggtttg

SEQ ID NO: 9864 - DNA, 15 bp, Homo sapiens
agaggacccaggttt

SEQ ID NO: 9865 - DNA, 15 bp, Homo sapiens
gagaggacccaggtt

SEQ ID NO: 9866 - DNA, 15 bp, Homo sapiens
ggagaggacccaggt

SEQ ID NO: 9867 - DNA, 15 bp, Homo sapiens
tggagaggacccagg

SEQ ID NO: 9868 - DNA, 15 bp, Homo sapiens
gtggagaggacccag

SEQ ID NO: 9869 - DNA, 15 bp, Homo sapiens
tgtggagaggaccca

SEQ ID NO: 9870 - DNA, 15 bp, Homo sapiens
ttgtggagaggaccc

SEQ ID NO: 9871 - DNA, 15 bp, Homo sapiens
gttgtggagaggacc

SEQ ID NO: 9872 - DNA, 15 bp, Homo sapiens
ggttgtggagaggac

SEQ ID NO: 9873 - DNA, 15 bp, Homo sapiens
gggttgtggagagga

SEQ ID NO: 9874 - DNA, 15 bp, Homo sapiens
tgggttgtggagagg

SEQ ID NO: 9875 - DNA, 15 bp, Homo sapiens
ttgggttgtggagag

SEQ ID NO: 9876 - DNA, 15 bp, Homo sapiens
cttgggttgtggaga

SEQ ID NO: 9877 - DNA, 15 bp, Homo sapiens
tcttgggttgtggag

SEQ ID NO: 9878 - DNA, 15 bp, Homo sapiens
ttcttgggttgtgga

SEQ ID NO: 9879 - DNA, 15 bp, Homo sapiens
cttcttgggttgtgg

SEQ ID NO: 9880 - DNA, 15 bp, Homo sapiens
ccttcttgggttgtg

SEQ ID NO: 9881 - DNA, 15 bp, Homo sapiens
cccttcttgggttgt

SEQ ID NO: 9882 - DNA, 15 bp, Homo sapiens
gcccttcttgggttg

SEQ ID NO: 9883 - DNA, 15 bp, Homo sapiens
ggcccttcttgggtt

SEQ ID NO: 9884 - DNA, 15 bp, Homo sapiens
tggcccttcttgggt

SEQ ID NO: 9885 - DNA, 15 bp, Homo sapiens
ctggcccttcttggg

SEQ ID NO: 9886 - DNA, 15 bp, Homo sapiens
cctggcccttcttgg

SEQ ID NO: 9887 - DNA, 15 bp, Homo sapiens
acctggcccttcttg

SEQ ID NO: 9888 - DNA, 15 bp, Homo sapiens
gacctggcccttctt

SEQ ID NO: 9889 - DNA, 15 bp, Homo sapiens
agacctggcccttct

SEQ ID NO: 9890 - DNA, 15 bp, Homo sapiens
aagacctggcccttc

SEQ ID NO: 9891 - DNA, 15 bp, Homo sapiens
gaagacctggccctt

SEQ ID NO: 9892 - DNA, 15 bp, Homo sapiens
tgaagacctggccct

SEQ ID NO: 9893 - DNA, 15 bp, Homo sapiens
ctgaagacctggccc

SEQ ID NO: 9894 - DNA, 15 bp, Homo sapiens
tctgaagacctggcc

SEQ ID NO: 9895 - DNA, 15 bp, Homo sapiens
ctctgaagacctggc

SEQ ID NO: 9896 - DNA, 15 bp, Homo sapiens
gctctgaagacctgg

SEQ ID NO: 9897 - DNA, 15 bp, Homo sapiens
agctctgaagacctg

SEQ ID NO: 9898 - DNA, 15 bp, Homo sapiens
tagctctgaagacct

SEQ ID NO: 9899 - DNA, 15 bp, Homo sapiens
ctagctctgaagacc

SEQ ID NO: 9900 - DNA, 15 bp, Homo sapiens
cctagctctgaagac

SEQ ID NO: 9901 - DNA, 15 bp, Homo sapiens
ccctagctctgaaga

SEQ ID NO: 9902 - DNA, 15 bp, Homo sapiens
cccctagctctgaag

SEQ ID NO: 9903 - DNA, 15 bp, Homo sapiens
gcccctagctctgaa

SEQ ID NO: 9904 - DNA, 15 bp, Homo sapiens
agcccctagctctga

SEQ ID NO: 9905 - DNA, 15 bp, Homo sapiens
aagcccctagctctg

SEQ ID NO: 9906 - DNA, 15 bp, Homo sapiens
caagcccctagctct

SEQ ID NO: 9907 - DNA, 15 bp, Homo sapiens
acaagcccctagctc

SEQ ID NO: 9908 - DNA, 15 bp, Homo sapiens
gacaagcccctagct

SEQ ID NO: 9909 - DNA, 15 bp, Homo sapiens
tgacaagcccctagc

SEQ ID NO: 9910 - DNA, 15 bp, Homo sapiens
atgacaagcccctag

SEQ ID NO: 9911 - DNA, 15 bp, Homo sapiens
tatgacaagccccta

SEQ ID NO: 9912 - DNA, 15 bp, Homo sapiens
ctatgacaagcccct

SEQ ID NO: 9913 - DNA, 15 bp, Homo sapiens
actatgacaagcccc

SEQ ID NO: 9914 - DNA, 15 bp, Homo sapiens
cactatgacaagccc

SEQ ID NO: 9915 - DNA, 15 bp, Homo sapiens
ccactatgacaagcc

SEQ ID NO: 9916 - DNA, 15 bp, Homo sapiens
gccactatgacaagc

SEQ ID NO: 9917 - DNA, 15 bp, Homo sapiens
ggccactatgacaag

SEQ ID NO: 9918 - DNA, 15 bp, Homo sapiens
tggccactatgacaa

SEQ ID NO: 9919 - DNA, 15 bp, Homo sapiens
ctggccactatgaca

SEQ ID NO: 9920 - DNA, 15 bp, Homo sapiens
tctggccactatgac

SEQ ID NO: 9921 - DNA, 15 bp, Homo sapiens
atctggccactatga

SEQ ID NO: 9922 - DNA, 15 bp, Homo sapiens
catctggccactatg

SEQ ID NO: 9923 - DNA, 15 bp, Homo sapiens
ccatctggccactat

SEQ ID NO: 9924 - DNA, 15 bp, Homo sapiens
tccatctggccacta

SEQ ID NO: 9925 - DNA, 15 bp, Homo sapiens
gtccatctggccact

SEQ ID NO: 9926 - DNA, 15 bp, Homo sapiens
tgtccatctggccac

SEQ ID NO: 9927 - DNA, 15 bp, Homo sapiens
atgtccatctggcca

SEQ ID NO: 9928 - DNA, 15 bp, Homo sapiens
gatgtccatctggcc

SEQ ID NO: 9929 - DNA, 15 bp, Homo sapiens
tgatgtccatctggc

SEQ ID NO: 9930 - DNA, 15 bp, Homo sapiens
gtgatgtccatctgg

SEQ ID NO: 9931 - DNA, 15 bp, Homo sapiens
ggtgatgtccatctg

SEQ ID NO: 9932 - DNA, 15 bp, Homo sapiens
aggtgatgtccatct

SEQ ID NO: 9933 - DNA, 15 bp, Homo sapiens
taggtgatgtccatc

SEQ ID NO: 9934 - DNA, 15 bp, Homo sapiens
gtaggtgatgtccat

SEQ ID NO: 9935 - DNA, 15 bp, Homo sapiens
ggtaggtgatgtcca

SEQ ID NO: 9936 - DNA, 15 bp, Homo sapiens
tggtaggtgatgtcc

SEQ ID NO: 9937 - DNA, 15 bp, Homo sapiens
gtggtaggtgatgtc

SEQ ID NO: 9938 - DNA, 15 bp, Homo sapiens
tgtggtaggtgatgt

SEQ ID NO: 9939 - DNA, 15 bp, Homo sapiens
atgtggtaggtgatg

SEQ ID NO: 9940 - DNA, 15 bp, Homo sapiens
gatgtggtaggtgat

SEQ ID NO: 9941 - DNA, 15 bp, Homo sapiens
ggatgtggtaggtga

SEQ ID NO: 9942 - DNA, 15 bp, Homo sapiens
tggatgtggtaggtg

SEQ ID NO: 9943 - DNA, 15 bp, Homo sapiens
gtggatgtggtaggt

SEQ ID NO: 9944 - DNA, 15 bp, Homo sapiens
ggtggatgtggtagg

SEQ ID NO: 9945 - DNA, 15 bp, Homo sapiens
tggtggatgtggtag

SEQ ID NO: 9946 - DNA, 15 bp, Homo sapiens
ctggtggatgtggta

SEQ ID NO: 9947 - DNA, 15 bp, Homo sapiens
gctggtggatgtggt

SEQ ID NO: 9948 - DNA, 15 bp, Homo sapiens
tgctggtggatgtgg

SEQ ID NO: 9949 - DNA, 15 bp, Homo sapiens
gtgctggtggatgtg

SEQ ID NO: 9950 - DNA, 15 bp, Homo sapiens
ggtgctggtggatgt

SEQ ID NO: 9951 - DNA, 15 bp, Homo sapiens
gggtgctggtggatg

SEQ ID NO: 9952 - DNA, 15 bp, Homo sapiens
tgggtgctggtggat

SEQ ID NO: 9953 - DNA, 15 bp, Homo sapiens
atgggtgctggtgga

SEQ ID NO: 9954 - DNA, 15 bp, Homo sapiens
catgggtgctggtgg

SEQ ID NO: 9955 - DNA, 15 bp, Homo sapiens
acatgggtgctggtg

SEQ ID NO: 9956 - DNA, 15 bp, Homo sapiens
gacatgggtgctggt

SEQ ID NO: 9957 - DNA, 15 bp, Homo sapiens
tgacatgggtgctgg

SEQ ID NO: 9958 - DNA, 15 bp, Homo sapiens
gtgacatgggtgctg

SEQ ID NO: 9959 - DNA, 15 bp, Homo sapiens
ggtgacatgggtgct

SEQ ID NO: 9960 - DNA, 15 bp, Homo sapiens
gggtgacatgggtgc

SEQ ID NO: 9961 - DNA, 15 bp, Homo sapiens
ggggtgacatgggtg

SEQ ID NO: 9962 - DNA, 15 bp, Homo sapiens
tggggtgacatgggt

SEQ ID NO: 9963 - DNA, 15 bp, Homo sapiens
gtggggtgacatggg

SEQ ID NO: 9964 - DNA, 15 bp, Homo sapiens
ggtggggtgacatgg

SEQ ID NO: 9965 - DNA, 15 bp, Homo sapiens
aggtggggtgacatg

SEQ ID NO: 9966 - DNA, 15 bp, Homo sapiens
caggtggggtgacat

SEQ ID NO: 9967 - DNA, 15 bp, Homo sapiens
ccaggtggggtgaca

SEQ ID NO: 9968 - DNA, 15 bp, Homo sapiens
cccaggtggggtgac

SEQ ID NO: 9969 - DNA, 15 bp, Homo sapiens
gcccaggtggggtga

SEQ ID NO: 9970 - DNA, 15 bp, Homo sapiens
ggcccaggtggggtg

SEQ ID NO: 9971 - DNA, 15 bp, Homo sapiens
tggcccaggtggggt

SEQ ID NO: 9972 - DNA, 15 bp, Homo sapiens
ttggcccaggtgggg

SEQ ID NO: 9973 - DNA, 15 bp, Homo sapiens
cttggcccaggtggg

SEQ ID NO: 9974 - DNA, 15 bp, Homo sapiens
gcttggcccaggtgg

SEQ ID NO: 9975 - DNA, 15 bp, Homo sapiens
ggcttggcccaggtg

SEQ ID NO: 9976 - DNA, 15 bp, Homo sapiens
aggcttggcccaggt

SEQ ID NO: 9977 - DNA, 15 bp, Homo sapiens
caggcttggcccagg

SEQ ID NO: 9978 - DNA, 15 bp, Homo sapiens
gcaggcttggcccag

SEQ ID NO: 9979 - DNA, 15 bp, Homo sapiens
agcaggcttggccca

SEQ ID NO: 9980 - DNA, 15 bp, Homo sapiens
cagcaggcttggccc

SEQ ID NO: 9981 - DNA, 15 bp, Homo sapiens
gcagcaggcttggcc

SEQ ID NO: 9982 - DNA, 15 bp, Homo sapiens
tgcagcaggcttggc

SEQ ID NO: 9983 - DNA, 15 bp, Homo sapiens
ctgcagcaggcttgg

SEQ ID NO: 9984 - DNA, 15 bp, Homo sapiens
cctgcagcaggcttg

SEQ ID NO: 9985 - DNA, 15 bp, Homo sapiens
tcctgcagcaggctt

SEQ ID NO: 9986 - DNA, 15 bp, Homo sapiens
gtcctgcagcaggct

SEQ ID NO: 9987 - DNA, 15 bp, Homo sapiens
tgtcctgcagcaggc

SEQ ID NO: 9988 - DNA, 15 bp, Homo sapiens
ctgtcctgcagcagg

SEQ ID NO: 9989 - DNA, 15 bp, Homo sapiens
cctgtcctgcagcag

SEQ ID NO: 9990 - DNA, 15 bp, Homo sapiens
ccctgtcctgcagca

SEQ ID NO: 9991 - DNA, 15 bp, Homo sapiens
gccctgtcctgcagc

SEQ ID NO: 9992 - DNA, 15 bp, Homo sapiens
tgccctgtcctgcag

SEQ ID NO: 9993 - DNA, 15 bp, Homo sapiens
ctgccctgtcctgca

SEQ ID NO: 9994 - DNA, 15 bp, Homo sapiens
gctgccctgtcctgc

SEQ ID NO: 9995 - DNA, 15 bp, Homo sapiens
ggctgccctgtcctg

SEQ ID NO: 9996 - DNA, 15 bp, Homo sapiens
tggctgccctgtcct

SEQ ID NO: 9997 - DNA, 15 bp, Homo sapiens
ctggctgccctgtcc

SEQ ID NO: 9998 - DNA, 15 bp, Homo sapiens
actggctgccctgtc

SEQ ID NO: 9999 - DNA, 15 bp, Homo sapiens
aactggctgccctgt

SEQ ID NO: 10000 - DNA, 15 bp, Homo sapiens
gaactggctgccctg

SEQ ID NO: 10001 - DNA, 15 bp, Homo sapiens
agaactggctgccct

SEQ ID NO: 10002 - DNA, 15 bp, Homo sapiens
gagaactggctgccc

SEQ ID NO: 10003 - DNA, 15 bp, Homo sapiens
cgagaactggctgcc

SEQ ID NO: 10004 - DNA, 15 bp, Homo sapiens
ccgagaactggctgc

SEQ ID NO: 10005 - DNA, 15 bp, Homo sapiens
tccgagaactggctg

SEQ ID NO: 10006 - DNA, 15 bp, Homo sapiens
ttccgagaactggct

SEQ ID NO: 10007 - DNA, 15 bp, Homo sapiens
gttccgagaactggc

SEQ ID NO: 10008 - DNA, 15 bp, Homo sapiens
cgttccgagaactgg

SEQ ID NO: 10009 - DNA, 15 bp, Homo sapiens
tcgttccgagaactg

SEQ ID NO: 10010 - DNA, 15 bp, Homo sapiens
ttcgttccgagaact

SEQ ID NO: 10011 - DNA, 15 bp, Homo sapiens
tttcgttccgagaac

SEQ ID NO: 10012 - DNA, 15 bp, Homo sapiens
gtttcgttccgagaa

SEQ ID NO: 10013 - DNA, 15 bp, Homo sapiens
ggtttcgttccgaga

SEQ ID NO: 10014 - DNA, 15 bp, Homo sapiens
aggtttcgttccgag

SEQ ID NO: 10015 - DNA, 15 bp, Homo sapiens
caggtttcgttccga

SEQ ID NO: 10016 - DNA, 15 bp, Homo sapiens
acaggtttcgttccg

SEQ ID NO: 10017 - DNA, 15 bp, Homo sapiens
cacaggtttcgttcc

SEQ ID NO: 10018 - DNA, 15 bp, Homo sapiens
ccacaggtttcgttc

SEQ ID NO: 10019 - DNA, 15 bp, Homo sapiens
cccacaggtttcgtt

SEQ ID NO: 10020 - DNA, 15 bp, Homo sapiens
ccccacaggtttcgt

SEQ ID NO: 10021 - DNA, 15 bp, Homo sapiens
accccacaggtttcg

SEQ ID NO: 10022 - DNA, 15 bp, Homo sapiens
caccccacaggtttc

SEQ ID NO: 10023 - DNA, 15 bp, Homo sapiens
ccaccccacaggttt

SEQ ID NO: 10024 - DNA, 15 bp, Homo sapiens
cccaccccacaggtt

SEQ ID NO: 10025 - DNA, 15 bp, Homo sapiens
ccccaccccacaggt

SEQ ID NO: 10026 - DNA, 15 bp, Homo sapiens
accccaccccacagg

SEQ ID NO: 10027 - DNA, 15 bp, Homo sapiens
taccccaccccacag

SEQ ID NO: 10028 - DNA, 15 bp, Homo sapiens
ataccccaccccaca

SEQ ID NO: 10029 - DNA, 15 bp, Homo sapiens
gataccccaccccac

SEQ ID NO: 10030 - DNA, 15 bp, Homo sapiens
agataccccacccca

SEQ ID NO: 10031 - DNA, 15 bp, Homo sapiens
cagataccccacccc

SEQ ID NO: 10032 - DNA, 15 bp, Homo sapiens
gcagataccccaccc

SEQ ID NO: 10033 - DNA, 15 bp, Homo sapiens
ggcagataccccacc

SEQ ID NO: 10034 - DNA, 15 bp, Homo sapiens
gggcagataccccac

SEQ ID NO: 10035 - DNA, 15 bp, Homo sapiens
agggcagatacccca

SEQ ID NO: 10036 - DNA, 15 bp, Homo sapiens
gagggcagatacccc

SEQ ID NO: 10037 - DNA, 15 bp, Homo sapiens
agagggcagataccc

SEQ ID NO: 10038 - DNA, 15 bp, Homo sapiens
aagagggcagatacc

SEQ ID NO: 10039 - DNA, 15 bp, Homo sapiens
gaagagggcagatac

SEQ ID NO: 10040 - DNA, 15 bp, Homo sapiens
agaagagggcagata

SEQ ID NO: 10041 - DNA, 15 bp, Homo sapiens
gagaagagggcagat

SEQ ID NO: 10042 - DNA, 15 bp, Homo sapiens
agagaagagggcaga

SEQ ID NO: 10043 - DNA, 15 bp, Homo sapiens
aagagaagagggcag

SEQ ID NO: 10044 - DNA, 15 bp, Homo sapiens
gaagagaagagggca

SEQ ID NO: 10045 - DNA, 15 bp, Homo sapiens
ggaagagaagagggc

SEQ ID NO: 10046 - DNA, 15 bp, Homo sapiens
aggaagagaagaggg

SEQ ID NO: 10047 - DNA, 15 bp, Homo sapiens
gaggaagagaagagg

SEQ ID NO: 10048 - DNA, 15 bp, Homo sapiens
ggaggaagagaagag

SEQ ID NO: 10049 - DNA, 15 bp, Homo sapiens
cggaggaagagaaga

SEQ ID NO: 10050 - DNA, 15 bp, Homo sapiens
acggaggaagagaag

SEQ ID NO: 10051 - DNA, 15 bp, Homo sapiens
cacggaggaagagaa

SEQ ID NO: 10052 - DNA, 15 bp, Homo sapiens
ccacggaggaagaga

SEQ ID NO: 10053 - DNA, 15 bp, Homo sapiens
accacggaggaagag

SEQ ID NO: 10054 - DNA, 15 bp, Homo sapiens
caccacggaggaaga

SEQ ID NO: 10055 - DNA, 15 bp, Homo sapiens
acaccacggaggaag

SEQ ID NO: 10056 - DNA, 15 bp, Homo sapiens
gacaccacggaggaa

SEQ ID NO: 10057 - DNA, 15 bp, Homo sapiens
cgacaccacggagga

SEQ ID NO: 10058 - DNA, 15 bp, Homo sapiens
tcgacaccacggagg

SEQ ID NO: 10059 - DNA, 15 bp, Homo sapiens
atcgacaccacggag

SEQ ID NO: 10060 - DNA, 15 bp, Homo sapiens
catcgacaccacgga

SEQ ID NO: 10061 - DNA, 15 bp, Homo sapiens
tcatcgacaccacgg

SEQ ID NO: 10062 - DNA, 15 bp, Homo sapiens
ttcatcgacaccacg

SEQ ID NO: 10063 - DNA, 15 bp, Homo sapiens
cttcatcgacaccac

SEQ ID NO: 10064 - DNA, 15 bp, Homo sapiens
gcttcatcgacacca

SEQ ID NO: 10065 - DNA, 15 bp, Homo sapiens
ggcttcatcgacacc

SEQ ID NO: 10066 - DNA, 15 bp, Homo sapiens
gggcttcatcgacac

SEQ ID NO: 10067 - DNA, 15 bp, Homo sapiens
cgggcttcatcgaca

SEQ ID NO: 10068 - DNA, 15 bp, Homo sapiens
ccgggcttcatcgac

SEQ ID NO: 10069 - DNA, 15 bp, Homo sapiens
gccgggcttcatcga

SEQ ID NO: 10070 - DNA, 15 bp, Homo sapiens
cgccgggcttcatcg

SEQ ID NO: 10071 - DNA, 15 bp, Homo sapiens
gcgccgggcttcatc

SEQ ID NO: 10072 - DNA, 15 bp, Homo sapiens
tgcgccgggcttcat

SEQ ID NO: 10073 - DNA, 15 bp, Homo sapiens
atgcgccgggcttca

SEQ ID NO: 10074 - DNA, 15 bp, Homo sapiens
gatgcgccgggcttc

SEQ ID NO: 10075 - DNA, 15 bp, Homo sapiens
ggatgcgccgggctt

SEQ ID NO: 10076 - DNA, 15 bp, Homo sapiens
cggatgcgccgggct

SEQ ID NO: 10077 - DNA, 15 bp, Homo sapiens
ccggatgcgccgggc

SEQ ID NO: 10078 - DNA, 15 bp, Homo sapiens
gccggatgcgccggg

SEQ ID NO: 10079 - DNA, 15 bp, Homo sapiens
ggccggatgcgccgg

SEQ ID NO: 10080 - DNA, 15 bp, Homo sapiens
cggccggatgcgccg

SEQ ID NO: 10081 - DNA, 15 bp, Homo sapiens
gcggccggatgcgcc

SEQ ID NO: 10082 - DNA, 15 bp, Homo sapiens
ggcggccggatgcgc

SEQ ID NO: 10083 - DNA, 15 bp, Homo sapiens
tggcggccggatgcg

SEQ ID NO: 10084 - DNA, 15 bp, Homo sapiens
atggcggccggatgc

SEQ ID NO: 10085 - DNA, 15 bp, Homo sapiens
catggcggccggatg

SEQ ID NO: 10086 - DNA, 15 bp, Homo sapiens
tcatggcggccggat

SEQ ID NO: 10087 - DNA, 15 bp, Homo sapiens
gtcatggcggccgga

SEQ ID NO: 10088 - DNA, 15 bp, Homo sapiens
cgtcatggcggccgg

SEQ ID NO: 10089 - DNA, 15 bp, Homo sapiens
acgtcatggcggccg

SEQ ID NO: 10090 - DNA, 15 bp, Homo sapiens
gacgtcatggcggcc

SEQ ID NO: 10091 - DNA, 15 bp, Homo sapiens
tgacgtcatggcggc

SEQ ID NO: 10092 - DNA, 15 bp, Homo sapiens
ttgacgtcatggcgg

SEQ ID NO: 10093 - DNA, 15 bp, Homo sapiens
attgacgtcatggcg

SEQ ID NO: 10094 - DNA, 15 bp, Homo sapiens
cattgacgtcatggc

SEQ ID NO: 10095 - DNA, 15 bp, Homo sapiens
ccattgacgtcatgg

SEQ ID NO: 10096 - DNA, 15 bp, Homo sapiens
gccattgacgtcatg

SEQ ID NO: 10097 - DNA, 15 bp, Homo sapiens
cgccattgacgtcat

SEQ ID NO: 10098 - DNA, 15 bp, Homo sapiens
ccgccattgacgtca

SEQ ID NO: 10099 - DNA, 15 bp, Homo sapiens
tccgccattgacgtc

SEQ ID NO: 10100 - DNA, 15 bp, Homo sapiens
ttccgccattgacgt

SEQ ID NO: 10101 - DNA, 15 bp, Homo sapiens
tttccgccattgacg

SEQ ID NO: 10102 - DNA, 15 bp, Homo sapiens
ttttccgccattgac

SEQ ID NO: 10103 - DNA, 15 bp, Homo sapiens
tttttccgccattga

SEQ ID NO: 10104 - DNA, 15 bp, Homo sapiens
atttttccgccattg

SEQ ID NO: 10105 - DNA, 15 bp, Homo sapiens
gatttttccgccatt

SEQ ID NO: 10106 - DNA, 15 bp, Homo sapiens
agatttttccgccat

SEQ ID NO: 10107 - DNA, 15 bp, Homo sapiens
cagatttttccgcca

SEQ ID NO: 10108 - DNA, 15 bp, Homo sapiens
ccagatttttccgcc

SEQ ID NO: 10109 - DNA, 15 bp, Homo sapiens
cccagatttttccgc

SEQ ID NO: 10110 - DNA, 15 bp, Homo sapiens
gcccagatttttccg

SEQ ID NO: 10111 - DNA, 15 bp, Homo sapiens
tgcccagatttttcc

SEQ ID NO: 10112 - DNA, 15 bp, Homo sapiens
ttgcccagatttttc

SEQ ID NO: 10113 - DNA, 15 bp, Homo sapiens
cttgcccagattttt

SEQ ID NO: 10114 - DNA, 15 bp, Homo sapiens
acttgcccagatttt

SEQ ID NO: 10115 - DNA, 15 bp, Homo sapiens
gacttgcccagattt

SEQ ID NO: 10116 - DNA, 15 bp, Homo sapiens
cgacttgcccagatt

SEQ ID NO: 10117 - DNA, 15 bp, Homo sapiens
ccgacttgcccagat

SEQ ID NO: 10118 - DNA, 15 bp, Homo sapiens
cccgacttgcccaga

SEQ ID NO: 10119 - DNA, 15 bp, Homo sapiens
ccccgacttgcccag

SEQ ID NO: 10120 - DNA, 15 bp, Homo sapiens
cccccgacttgccca

SEQ ID NO: 10121 - DNA, 15 bp, Homo sapiens
gcccccgacttgccc

SEQ ID NO: 10122 - DNA, 15 bp, Homo sapiens
agcccccgacttgcc

SEQ ID NO: 10123 - DNA, 15 bp, Homo sapiens
cagcccccgacttgc

SEQ ID NO: 10124 - DNA, 15 bp, Homo sapiens
acagcccccgacttg

SEQ ID NO: 10125 - DNA, 15 bp, Homo sapiens
cacagcccccgactt

SEQ ID NO: 10126 - DNA, 15 bp, Homo sapiens
tcacagcccccgact

SEQ ID NO: 10127 - DNA, 15 bp, Homo sapiens
gtcacagcccccgac

SEQ ID NO: 10128 - DNA, 15 bp, Homo sapiens
tgtcacagcccccga

SEQ ID NO: 10129 - DNA, 15 bp, Homo sapiens
ttgtcacagcccccg

SEQ ID NO: 10130 - DNA, 15 bp, Homo sapiens
gttgtcacagccccc

SEQ ID NO: 10131 - DNA, 15 bp, Homo sapiens
tgttgtcacagcccc

SEQ ID NO: 10132 - DNA, 15 bp, Homo sapiens
ctgttgtcacagccc

SEQ ID NO: 10133 - DNA, 15 bp, Homo sapiens
cctgttgtcacagcc

SEQ ID NO: 10134 - DNA, 15 bp, Homo sapiens
ccctgttgtcacagc

SEQ ID NO: 10135 - DNA, 15 bp, Homo sapiens
gccctgttgtcacag

SEQ ID NO: 10136 - DNA, 15 bp, Homo sapiens
ggccctgttgtcaca

SEQ ID NO: 10137 - DNA, 15 bp, Homo sapiens
gggccctgttgtcac

SEQ ID NO: 10138 - DNA, 15 bp, Homo sapiens
tgggccctgttgtca

SEQ ID NO: 10139 - DNA, 15 bp, Homo sapiens
ctgggccctgttgtc

SEQ ID NO: 10140 - DNA, 15 bp, Homo sapiens
tctgggccctgttgt

SEQ ID NO: 10141 - DNA, 15 bp, Homo sapiens
atctgggccctgttg

SEQ ID NO: 10142 - DNA, 15 bp, Homo sapiens
catctgggccctgtt

SEQ ID NO: 10143 - DNA, 15 bp, Homo sapiens
gcatctgggccctgt

SEQ ID NO: 10144 - DNA, 15 bp, Homo sapiens
tgcatctgggccctg

SEQ ID NO: 10145 - DNA, 15 bp, Homo sapiens
ctgcatctgggccct

SEQ ID NO: 10146 - DNA, 15 bp, Homo sapiens
tctgcatctgggccc

SEQ ID NO: 10147 - DNA, 15 bp, Homo sapiens
gtctgcatctgggcc

SEQ ID NO: 10148 - DNA, 15 bp, Homo sapiens
ggtctgcatctgggc

SEQ ID NO: 10149 - DNA, 15 bp, Homo sapiens
gggtctgcatctggg

SEQ ID NO: 10150 - DNA, 15 bp, Homo sapiens
ggggtctgcatctgg

SEQ ID NO: 10151 - DNA, 15 bp, Homo sapiens
cggggtctgcatctg

SEQ ID NO: 10152 - DNA, 15 bp, Homo sapiens
tcggggtctgcatct

SEQ ID NO: 10153 - DNA, 15 bp, Homo sapiens
atcggggtctgcatc

SEQ ID NO: 10154 - DNA, 15 bp, Homo sapiens
tatcggggtctgcat

SEQ ID NO: 10155 - DNA, 15 bp, Homo sapiens
atatcggggtctgca

SEQ ID NO: 10156 - DNA, 15 bp, Homo sapiens
catatcggggtctgc

SEQ ID NO: 10157 - DNA, 15 bp, Homo sapiens
tcatatcggggtctg

SEQ ID NO: 10158 - DNA, 15 bp, Homo sapiens
ttcatatcggggtct

SEQ ID NO: 10159 - DNA, 15 bp, Homo sapiens
tttcatatcggggtc

SEQ ID NO: 10160 - DNA, 15 bp, Homo sapiens
ttttcatatcggggt

SEQ ID NO: 10161 - DNA, 15 bp, Homo sapiens
gttttcatatcgggg

SEQ ID NO: 10162 - DNA, 15 bp, Homo sapiens
tgttttcatatcggg

SEQ ID NO: 10163 - DNA, 15 bp, Homo sapiens
atgttttcatatcgg

SEQ ID NO: 10164 - DNA, 15 bp, Homo sapiens
tatgttttcatatcg

SEQ ID NO: 10165 - DNA, 15 bp, Homo sapiens
ttatgttttcatatc

SEQ ID NO: 10166 - DNA, 15 bp, Homo sapiens
attatgttttcatat

SEQ ID NO: 10167 - DNA, 15 bp, Homo sapiens
gattatgttttcata

SEQ ID NO: 10168 - DNA, 15 bp, Homo sapiens
agattatgttttcat

SEQ ID NO: 10169 - DNA, 15 bp, Homo sapiens
cagattatgttttca

SEQ ID NO: 10170 - DNA, 15 bp, Homo sapiens
acagattatgttttc

SEQ ID NO: 10171 - DNA, 15 bp, Homo sapiens
cacagattatgtttt

SEQ ID NO: 10172 - DNA, 15 bp, Homo sapiens
acacagattatgttt

SEQ ID NO: 10173 - DNA, 15 bp, Homo sapiens
gacacagattatgtt

SEQ ID NO: 10174 - DNA, 15 bp, Homo sapiens
ggacacagattatgt

SEQ ID NO: 10175 - DNA, 15 bp, Homo sapiens
gggacacagattatg

SEQ ID NO: 10176 - DNA, 15 bp, Homo sapiens
tgggacacagattat

SEQ ID NO: 10177 - DNA, 15 bp, Homo sapiens
ctgggacacagatta

SEQ ID NO: 10178 - DNA, 15 bp, Homo sapiens
tctgggacacagatt

SEQ ID NO: 10179 - DNA, 15 bp, Homo sapiens
ttctgggacacagat

SEQ ID NO: 10180 - DNA, 15 bp, Homo sapiens
tttctgggacacaga

SEQ ID NO: 10181 - DNA, 15 bp, Homo sapiens
gtttctgggacacag

SEQ ID NO: 10182 - DNA, 15 bp, Homo sapiens
tgtttctgggacaca

SEQ ID NO: 10183 - DNA, 15 bp, Homo sapiens
atgtttctgggacac

SEQ ID NO: 10184 - DNA, 15 bp, Homo sapiens
gatgtttctgggaca

SEQ ID NO: 10185 - DNA, 15 bp, Homo sapiens
ggatgtttctgggac

SEQ ID NO: 10186 - DNA, 15 bp, Homo sapiens
gggatgtttctggga

SEQ ID NO: 10187 - DNA, 15 bp, Homo sapiens
ggggatgtttctggg

SEQ ID NO: 10188 - DNA, 15 bp, Homo sapiens
gggggatgtttctgg

SEQ ID NO: 10189 - DNA, 15 bp, Homo sapiens
tgggggatgtttctg

SEQ ID NO: 10190 - DNA, 15 bp, Homo sapiens
atgggggatgtttct

SEQ ID NO: 10191 - DNA, 15 bp, Homo sapiens
aatgggggatgtttc

SEQ ID NO: 10192 - DNA, 15 bp, Homo sapiens
gaatgggggatgttt

SEQ ID NO: 10193 - DNA, 15 bp, Homo sapiens
tgaatgggggatgtt

SEQ ID NO: 10194 - DNA, 15 bp, Homo sapiens
ctgaatgggggatgt

SEQ ID NO: 10195 - DNA, 15 bp, Homo sapiens
gctgaatgggggatg

SEQ ID NO: 10196 - DNA, 15 bp, Homo sapiens
agctgaatgggggat

SEQ ID NO: 10197 - DNA, 15 bp, Homo sapiens
aagctgaatggggga

SEQ ID NO: 10198 - DNA, 15 bp, Homo sapiens
gaagctgaatggggg

SEQ ID NO: 10199 - DNA, 15 bp, Homo sapiens
agaagctgaatgggg

SEQ ID NO: 10200 - DNA, 15 bp, Homo sapiens
cagaagctgaatggg

SEQ ID NO: 10201 - DNA, 15 bp, Homo sapiens
tcagaagctgaatgg

SEQ ID NO: 10202 - DNA, 15 bp, Homo sapiens
ctcagaagctgaatg

SEQ ID NO: 10203 - DNA, 15 bp, Homo sapiens
tctcagaagctgaat

SEQ ID NO: 10204 - DNA, 15 bp, Homo sapiens
ttctcagaagctgaa

SEQ ID NO: 10205 - DNA, 15 bp, Homo sapiens
tttctcagaagctga

SEQ ID NO: 10206 - DNA, 15 bp, Homo sapiens
gtttctcagaagctg

SEQ ID NO: 10207 - DNA, 15 bp, Homo sapiens
ggtttctcagaagct

SEQ ID NO: 10208 - DNA, 15 bp, Homo sapiens
gggtttctcagaagc

SEQ ID NO: 10209 - DNA, 15 bp, Homo sapiens
tgggtttctcagaag

SEQ ID NO: 10210 - DNA, 15 bp, Homo sapiens
ctgggtttctcagaa

SEQ ID NO: 10211 - DNA, 15 bp, Homo sapiens
actgggtttctcaga

SEQ ID NO: 10212 - DNA, 15 bp, Homo sapiens
gactgggtttctcag

SEQ ID NO: 10213 - DNA, 15 bp, Homo sapiens
tgactgggtttctca

SEQ ID NO: 10214 - DNA, 15 bp, Homo sapiens
ctgactgggtttctc

SEQ ID NO: 10215 - DNA, 15 bp, Homo sapiens
tctgactgggtttct

SEQ ID NO: 10216 - DNA, 15 bp, Homo sapiens
ttctgactgggtttc

SEQ ID NO: 10217 - DNA, 15 bp, Homo sapiens
tttctgactgggttt

SEQ ID NO: 10218 - DNA, 15 bp, Homo sapiens
ctttctgactgggtt

SEQ ID NO: 10219 - DNA, 15 bp, Homo sapiens
cctttctgactgggt

SEQ ID NO: 10220 - DNA, 15 bp, Homo sapiens
ccctttctgactggg

SEQ ID NO: 10221 - DNA, 15 bp, Homo sapiens
tccctttctgactgg

SEQ ID NO: 10222 - DNA, 15 bp, Homo sapiens
gtccctttctgactg

SEQ ID NO: 10223 - DNA, 15 bp, Homo sapiens
cgtccctttctgact

SEQ ID NO: 10224 - DNA, 15 bp, Homo sapiens
acgtccctttctgac

SEQ ID NO: 10225 - DNA, 15 bp, Homo sapiens
gacgtccctttctga

SEQ ID NO: 10226 - DNA, 15 bp, Homo sapiens
ggacgtccctttctg

SEQ ID NO: 10227 - DNA, 15 bp, Homo sapiens
gggacgtccctttct

SEQ ID NO: 10228 - DNA, 15 bp, Homo sapiens
tgggacgtccctttc

SEQ ID NO: 10229 - DNA, 15 bp, Homo sapiens
ttgggacgtcccttt

SEQ ID NO: 10230 - DNA, 15 bp, Homo sapiens
gttgggacgtccctt

SEQ ID NO: 10231 - DNA, 15 bp, Homo sapiens
tgttgggacgtccct

SEQ ID NO: 10232 - DNA, 15 bp, Homo sapiens
ctgttgggacgtccc

SEQ ID NO: 10233 - DNA, 15 bp, Homo sapiens
tctgttgggacgtcc

SEQ ID NO: 10234 - DNA, 15 bp, Homo sapiens
gtctgttgggacgtc

SEQ ID NO: 10235 - DNA, 15 bp, Homo sapiens
tgtctgttgggacgt

SEQ ID NO: 10236 - DNA, 15 bp, Homo sapiens
ctgtctgttgggacg

SEQ ID NO: 10237 - DNA, 15 bp, Homo sapiens
actgtctgttgggac

SEQ ID NO: 10238 - DNA, 15 bp, Homo sapiens
cactgtctgttggga

SEQ ID NO: 10239 - DNA, 15 bp, Homo sapiens
gcactgtctgttggg

SEQ ID NO: 10240 - DNA, 15 bp, Homo sapiens
tgcactgtctgttgg

SEQ ID NO: 10241 - DNA, 15 bp, Homo sapiens
ctgcactgtctgttg

SEQ ID NO: 10242 - DNA, 15 bp, Homo sapiens
cctgcactgtctgtt

SEQ ID NO: 10243 - DNA, 15 bp, Homo sapiens
tcctgcactgtctgt

SEQ ID NO: 10244 - DNA, 15 bp, Homo sapiens
ttcctgcactgtctg

SEQ ID NO: 10245 - DNA, 15 bp, Homo sapiens
cttcctgcactgtct

SEQ ID NO: 10246 - DNA, 15 bp, Homo sapiens
gcttcctgcactgtc

SEQ ID NO: 10247 - DNA, 15 bp, Homo sapiens
ggcttcctgcactgt

SEQ ID NO: 10248 - DNA, 15 bp, Homo sapiens
cggcttcctgcactg

SEQ ID NO: 10249 - DNA, 15 bp, Homo sapiens
ccggcttcctgcact

SEQ ID NO: 10250 - DNA, 15 bp, Homo sapiens
gccggcttcctgcac

SEQ ID NO: 10251 - DNA, 15 bp, Homo sapiens
agccggcttcctgca

SEQ ID NO: 10252 - DNA, 15 bp, Homo sapiens
cagccggcttcctgc

SEQ ID NO: 10253 - DNA, 15 bp, Homo sapiens
gcagccggcttcctg

SEQ ID NO: 10254 - DNA, 15 bp, Homo sapiens
ggcagccggcttcct

SEQ ID NO: 10255 - DNA, 15 bp, Homo sapiens
gggcagccggcttcc

SEQ ID NO: 10256 - DNA, 15 bp, Homo sapiens
tgggcagccggcttc

SEQ ID NO: 10257 - DNA, 15 bp, Homo sapiens
ctgggcagccggctt

SEQ ID NO: 10258 - DNA, 15 bp, Homo sapiens
gctgggcagccggct

SEQ ID NO: 10259 - DNA, 15 bp, Homo sapiens
ggctgggcagccggc

SEQ ID NO: 10260 - DNA, 15 bp, Homo sapiens
gggctgggcagccgg

SEQ ID NO: 10261 - DNA, 15 bp, Homo sapiens
cgggctgggcagccg

SEQ ID NO: 10262 - DNA, 15 bp, Homo sapiens
ccgggctgggcagcc

SEQ ID NO: 10263 - DNA, 15 bp, Homo sapiens
gccgggctgggcagc

SEQ ID NO: 10264 - DNA, 15 bp, Homo sapiens
ggccgggctgggcag

SEQ ID NO: 10265 - DNA, 15 bp, Homo sapiens
gggccgggctgggca

SEQ ID NO: 10266 - DNA, 15 bp, Homo sapiens
agggccgggctgggc

SEQ ID NO: 10267 - DNA, 15 bp, Homo sapiens
gagggccgggctggg

SEQ ID NO: 10268 - DNA, 15 bp, Homo sapiens
agagggccgggctgg

SEQ ID NO: 10269 - DNA, 15 bp, Homo sapiens
tagagggccgggctg

SEQ ID NO: 10270 - DNA, 15 bp, Homo sapiens
ctagagggccgggct

SEQ ID NO: 10271 - DNA, 15 bp, Homo sapiens
cctagagggccgggc

SEQ ID NO: 10272 - DNA, 15 bp, Homo sapiens
acctagagggccggg

SEQ ID NO: 10273 - DNA, 15 bp, Homo sapiens
gacctagagggccgg

SEQ ID NO: 10274 - DNA, 15 bp, Homo sapiens
ggacctagagggccg

SEQ ID NO: 10275 - DNA, 15 bp, Homo sapiens
aggacctagagggcc

SEQ ID NO: 10276 - DNA, 15 bp, Homo sapiens
gaggacctagagggc

SEQ ID NO: 10277 - DNA, 15 bp, Homo sapiens
agaggacctagaggg

SEQ ID NO: 10278 - DNA, 15 bp, Homo sapiens
tagaggacctagagg

SEQ ID NO: 10279 - DNA, 15 bp, Homo sapiens
gtagaggacctagag

SEQ ID NO: 10280 - DNA, 15 bp, Homo sapiens
ggtagaggacctaga

SEQ ID NO: 10281 - DNA, 15 bp, Homo sapiens
gggtagaggacctag

SEQ ID NO: 10282 - DNA, 15 bp, Homo sapiens
ggggtagaggaccta

SEQ ID NO: 10283 - DNA, 15 bp, Homo sapiens
gggggtagaggacct

SEQ ID NO: 10284 - DNA, 15 bp, Homo sapiens
tgggggtagaggacc

SEQ ID NO: 10285 - DNA, 15 bp, Homo sapiens
ctgggggtagaggac

SEQ ID NO: 10286 - DNA, 15 bp, Homo sapiens
tctgggggtagagga

SEQ ID NO: 10287 - DNA, 15 bp, Homo sapiens
gtctgggggtagagg

SEQ ID NO: 10288 - DNA, 15 bp, Homo sapiens
tgtctgggggtagag

SEQ ID NO: 10289 - DNA, 15 bp, Homo sapiens
ctgtctgggggtaga

SEQ ID NO: 10290 - DNA, 15 bp, Homo sapiens
tctgtctgggggtag

SEQ ID NO: 10291 - DNA, 15 bp, Homo sapiens
atctgtctgggggta

SEQ ID NO: 10292 - DNA, 15 bp, Homo sapiens
gatctgtctgggggt

SEQ ID NO: 10293 - DNA, 15 bp, Homo sapiens
tgatctgtctggggg

SEQ ID NO: 10294 - DNA, 15 bp, Homo sapiens
atgatctgtctgggg

SEQ ID NO: 10295 - DNA, 15 bp, Homo sapiens
gatgatctgtctggg

SEQ ID NO: 10296 - DNA, 15 bp, Homo sapiens
agatgatctgtctgg

SEQ ID NO: 10297 - DNA, 15 bp, Homo sapiens
gagatgatctgtctg

SEQ ID NO: 10298 - DNA, 15 bp, Homo sapiens
ggagatgatctgtct

SEQ ID NO: 10299 - DNA, 15 bp, Homo sapiens
tggagatgatctgtc

SEQ ID NO: 10300 - DNA, 15 bp, Homo sapiens
atggagatgatctgt

SEQ ID NO: 10301 - DNA, 15 bp, Homo sapiens
catggagatgatctg

SEQ ID NO: 10302 - DNA, 15 bp, Homo sapiens
acatggagatgatct

SEQ ID NO: 10303 - DNA, 15 bp, Homo sapiens
gacatggagatgatc

SEQ ID NO: 10304 - DNA, 15 bp, Homo sapiens
ggacatggagatgat

SEQ ID NO: 10305 - DNA, 15 bp, Homo sapiens
gggacatggagatga

SEQ ID NO: 10306 - DNA, 15 bp, Homo sapiens
agggacatggagatg

SEQ ID NO: 10307 - DNA, 15 bp, Homo sapiens
cagggacatggagat

SEQ ID NO: 10308 - DNA, 15 bp, Homo sapiens
acagggacatggaga

SEQ ID NO: 10309 - DNA, 15 bp, Homo sapiens
gacagggacatggag

SEQ ID NO: 10310 - DNA, 15 bp, Homo sapiens
agacagggacatgga

SEQ ID NO: 10311 - DNA, 15 bp, Homo sapiens
cagacagggacatgg

SEQ ID NO: 10312 - DNA, 15 bp, Homo sapiens
tcagacagggacatg

SEQ ID NO: 10313 - DNA, 15 bp, Homo sapiens
ctcagacagggacat

SEQ ID NO: 10314 - DNA, 15 bp, Homo sapiens
tctcagacagggaca

SEQ ID NO: 10315 - DNA, 15 bp, Homo sapiens
ttctcagacagggac

SEQ ID NO: 10316 - DNA, 15 bp, Homo sapiens
attctcagacaggga

SEQ ID NO: 10317 - DNA, 15 bp, Homo sapiens
cattctcagacaggg

SEQ ID NO: 10318 - DNA, 15 bp, Homo sapiens
acattctcagacagg

SEQ ID NO: 10319 - DNA, 15 bp, Homo sapiens
tacattctcagacag

SEQ ID NO: 10320 - DNA, 15 bp, Homo sapiens
atacattctcagaca

SEQ ID NO: 10321 - DNA, 15 bp, Homo sapiens
gatacattctcagac

SEQ ID NO: 10322 - DNA, 15 bp, Homo sapiens
agatacattctcaga

SEQ ID NO: 10323 - DNA, 15 bp, Homo sapiens
tagatacattctcag

SEQ ID NO: 10324 - DNA, 15 bp, Homo sapiens
atagatacattctca

SEQ ID NO: 10325 - DNA, 15 bp, Homo sapiens
catagatacattctc

SEQ ID NO: 10326 - DNA, 15 bp, Homo sapiens
gcatagatacattct

SEQ ID NO: 10327 - DNA, 15 bp, Homo sapiens
agcatagatacattc

SEQ ID NO: 10328 - DNA, 15 bp, Homo sapiens
aagcatagatacatt

SEQ ID NO: 10329 - DNA, 15 bp, Homo sapiens
aaagcatagatacat

SEQ ID NO: 10330 - DNA, 15 bp, Homo sapiens
caaagcatagataca

SEQ ID NO: 10331 - DNA, 15 bp, Homo sapiens
gcaaagcatagatac

SEQ ID NO: 10332 - DNA, 15 bp, Homo sapiens
agcaaagcatagata

SEQ ID NO: 10333 - DNA, 15 bp, Homo sapiens
cagcaaagcatagat

SEQ ID NO: 10334 - DNA, 15 bp, Homo sapiens
tcagcaaagcataga

SEQ ID NO: 10335 - DNA, 15 bp, Homo sapiens
ctcagcaaagcatag

SEQ ID NO: 10336 - DNA, 15 bp, Homo sapiens
actcagcaaagcata

SEQ ID NO: 10337 - DNA, 15 bp, Homo sapiens
gactcagcaaagcat

SEQ ID NO: 10338 - DNA, 15 bp, Homo sapiens
tgactcagcaaagca

SEQ ID NO: 10339 - DNA, 15 bp, Homo sapiens
ctgactcagcaaagc

SEQ ID NO: 10340 - DNA, 15 bp, Homo sapiens
cctgactcagcaaag

SEQ ID NO: 10341 - DNA, 15 bp, Homo sapiens
gcctgactcagcaaa

SEQ ID NO: 10342 - DNA, 15 bp, Homo sapiens
ggcctgactcagcaa

SEQ ID NO: 10343 - DNA, 15 bp, Homo sapiens
tggcctgactcagca

SEQ ID NO: 10344 - DNA, 15 bp, Homo sapiens
atggcctgactcagc

SEQ ID NO: 10345 - DNA, 15 bp, Homo sapiens
gatggcctgactcag

SEQ ID NO: 10346 - DNA, 15 bp, Homo sapiens
ggatggcctgactca

SEQ ID NO: 10347 - DNA, 15 bp, Homo sapiens
gggatggcctgactc

SEQ ID NO: 10348 - DNA, 15 bp, Homo sapiens
tgggatggcctgact

SEQ ID NO: 10349 - DNA, 15 bp, Homo sapiens
gtgggatggcctgac

SEQ ID NO: 10350 - DNA, 15 bp, Homo sapiens
tgtgggatggcctga

SEQ ID NO: 10351 - DNA, 15 bp, Homo sapiens
atgtgggatggcctg

SEQ ID NO: 10352 - DNA, 15 bp, Homo sapiens
catgtgggatggcct

SEQ ID NO: 10353 - DNA, 15 bp, Homo sapiens
acatgtgggatggcc

SEQ ID NO: 10354 - DNA, 15 bp, Homo sapiens
cacatgtgggatggc

SEQ ID NO: 10355 - DNA, 15 bp, Homo sapiens
acacatgtgggatgg

SEQ ID NO: 10356 - DNA, 15 bp, Homo sapiens
aacacatgtgggatg

SEQ ID NO: 10357 - DNA, 15 bp, Homo sapiens
aaacacatgtgggat

SEQ ID NO: 10358 - DNA, 15 bp, Homo sapiens
caaacacatgtggga

SEQ ID NO: 10359 - DNA, 15 bp, Homo sapiens
ccaaacacatgtggg

SEQ ID NO: 10360 - DNA, 15 bp, Homo sapiens
cccaaacacatgtgg

SEQ ID NO: 10361 - DNA, 15 bp, Homo sapiens
ccccaaacacatgtg

SEQ ID NO: 10362 - DNA, 15 bp, Homo sapiens
tccccaaacacatgt

SEQ ID NO: 10363 - DNA, 15 bp, Homo sapiens
ctccccaaacacatg

SEQ ID NO: 10364 - DNA, 15 bp, Homo sapiens
tctccccaaacacat

SEQ ID NO: 10365 - DNA, 15 bp, Homo sapiens
ttctccccaaacaca

SEQ ID NO: 10366 - DNA, 15 bp, Homo sapiens
attctccccaaacac

SEQ ID NO: 10367 - DNA, 15 bp, Homo sapiens
aattctccccaaaca

SEQ ID NO: 10368 - DNA, 15 bp, Homo sapiens
gaattctccccaaac

SEQ ID NO: 10369 - DNA, 15 bp, Homo sapiens
agaattctccccaaa

SEQ ID NO: 10370 - DNA, 15 bp, Homo sapiens
aagaattctccccaa

SEQ ID NO: 10371 - DNA, 15 bp, Homo sapiens
taagaattctcccca

SEQ ID NO: 10372 - DNA, 15 bp, Homo sapiens
ctaagaattctcccc

SEQ ID NO: 10373 - DNA, 15 bp, Homo sapiens
gctaagaattctccc

SEQ ID NO: 10374 - DNA, 15 bp, Homo sapiens
agctaagaattctcc

SEQ ID NO: 10375 - DNA, 15 bp, Homo sapiens
gagctaagaattctc

SEQ ID NO: 10376 - DNA, 15 bp, Homo sapiens
agagctaagaattct

SEQ ID NO: 10377 - DNA, 15 bp, Homo sapiens
cagagctaagaattc

SEQ ID NO: 10378 - DNA, 15 bp, Homo sapiens
ccagagctaagaatt

SEQ ID NO: 10379 - DNA, 15 bp, Homo sapiens
gccagagctaagaat

SEQ ID NO: 10380 - DNA, 15 bp, Homo sapiens
ggccagagctaagaa

SEQ ID NO: 10381 - DNA, 15 bp, Homo sapiens
tggccagagctaaga

SEQ ID NO: 10382 - DNA, 15 bp, Homo sapiens
ttggccagagctaag

SEQ ID NO: 10383 - DNA, 15 bp, Homo sapiens
cttggccagagctaa

SEQ ID NO: 10384 - DNA, 15 bp, Homo sapiens
acttggccagagcta

SEQ ID NO: 10385 - DNA, 15 bp, Homo sapiens
cacttggccagagct

SEQ ID NO: 10386 - DNA, 15 bp, Homo sapiens
acacttggccagagc

SEQ ID NO: 10387 - DNA, 15 bp, Homo sapiens
gacacttggccagag

SEQ ID NO: 10388 - DNA, 15 bp, Homo sapiens
ggacacttggccaga

SEQ ID NO: 10389 - DNA, 15 bp, Homo sapiens
tggacacttggccag

SEQ ID NO: 10390 - DNA, 15 bp, Homo sapiens
ctggacacttggcca

SEQ ID NO: 10391 - DNA, 15 bp, Homo sapiens
cctggacacttggcc

SEQ ID NO: 10392 - DNA, 15 bp, Homo sapiens
gcctggacacttggc

SEQ ID NO: 10393 - DNA, 15 bp, Homo sapiens
tgcctggacacttgg

SEQ ID NO: 10394 - DNA, 15 bp, Homo sapiens
ctgcctggacacttg

SEQ ID NO: 10395 - DNA, 15 bp, Homo sapiens
gctgcctggacactt

SEQ ID NO: 10396 - DNA, 15 bp, Homo sapiens
agctgcctggacact

SEQ ID NO: 10397 - DNA, 15 bp, Homo sapiens
aagctgcctggacac

SEQ ID NO: 10398 - DNA, 15 bp, Homo sapiens
gaagctgcctggaca

SEQ ID NO: 10399 - DNA, 15 bp, Homo sapiens
tgaagctgcctggac

SEQ ID NO: 10400 - DNA, 15 bp, Homo sapiens
ctgaagctgcctgga

SEQ ID NO: 10401 - DNA, 15 bp, Homo sapiens
tctgaagctgcctgg

SEQ ID NO: 10402 - DNA, 15 bp, Homo sapiens
ttctgaagctgcctg

SEQ ID NO: 10403 - DNA, 15 bp, Homo sapiens
cttctgaagctgcct

SEQ ID NO: 10404 - DNA, 15 bp, Homo sapiens
acttctgaagctgcc

SEQ ID NO: 10405 - DNA, 15 bp, Homo sapiens
cacttctgaagctgc

SEQ ID NO: 10406 - DNA, 15 bp, Homo sapiens
tcacttctgaagctg

SEQ ID NO: 10407 - DNA, 15 bp, Homo sapiens
gtcacttctgaagct

SEQ ID NO: 10408 - DNA, 15 bp, Homo sapiens
ggtcacttctgaagc

SEQ ID NO: 10409 - DNA, 15 bp, Homo sapiens
tggtcacttctgaag

SEQ ID NO: 10410 - DNA, 15 bp, Homo sapiens
gtggtcacttctgaa

SEQ ID NO: 10411 - DNA, 15 bp, Homo sapiens
tgtggtcacttctga

SEQ ID NO: 10412 - DNA, 15 bp, Homo sapiens
ctgtggtcacttctg

SEQ ID NO: 10413 - DNA, 15 bp, Homo sapiens
cctgtggtcacttct

SEQ ID NO: 10414 - DNA, 15 bp, Homo sapiens
gcctgtggtcacttc

SEQ ID NO: 10415 - DNA, 15 bp, Homo sapiens
ggcctgtggtcactt

SEQ ID NO: 10416 - DNA, 15 bp, Homo sapiens
tggcctgtggtcact

SEQ ID NO: 10417 - DNA, 15 bp, Homo sapiens
ctggcctgtggtcac

SEQ ID NO: 10418 - DNA, 15 bp, Homo sapiens
gctggcctgtggtca

SEQ ID NO: 10419 - DNA, 15 bp, Homo sapiens
ggctggcctgtggtc

SEQ ID NO: 10420 - DNA, 15 bp, Homo sapiens
tggctggcctgtggt

SEQ ID NO: 10421 - DNA, 15 bp, Homo sapiens
gtggctggcctgtgg

SEQ ID NO: 10422 - DNA, 15 bp, Homo sapiens
tgtggctggcctgtg

SEQ ID NO: 10423 - DNA, 15 bp, Homo sapiens
atgtggctggcctgt

SEQ ID NO: 10424 - DNA, 15 bp, Homo sapiens
catgtggctggcctg

SEQ ID NO: 10425 - DNA, 15 bp, Homo sapiens
ccatgtggctggcct

SEQ ID NO: 10426 - DNA, 15 bp, Homo sapiens
cccatgtggctggcc

SEQ ID NO: 10427 - DNA, 15 bp, Homo sapiens
gcccatgtggctggc

SEQ ID NO: 10428 - DNA, 15 bp, Homo sapiens
ggcccatgtggctgg

SEQ ID NO: 10429 - DNA, 15 bp, Homo sapiens
tggcccatgtggctg

SEQ ID NO: 10430 - DNA, 15 bp, Homo sapiens
ctggcccatgtggct

SEQ ID NO: 10431 - DNA, 15 bp, Homo sapiens
cctggcccatgtggc

SEQ ID NO: 10432 - DNA, 15 bp, Homo sapiens
gcctggcccatgtgg

SEQ ID NO: 10433 - DNA, 15 bp, Homo sapiens
ggcctggcccatgtg

SEQ ID NO: 10434 - DNA, 15 bp, Homo sapiens
tggcctggcccatgt

SEQ ID NO: 10435 - DNA, 15 bp, Homo sapiens
ctggcctggcccatg

SEQ ID NO: 10436 - DNA, 15 bp, Homo sapiens
tctggcctggcccat

SEQ ID NO: 10437 - DNA, 15 bp, Homo sapiens
ctctggcctggccca

SEQ ID NO: 10438 - DNA, 15 bp, Homo sapiens
actctggcctggccc

SEQ ID NO: 10439 - DNA, 15 bp, Homo sapiens
cactctggcctggcc

SEQ ID NO: 10440 - DNA, 15 bp, Homo sapiens
ccactctggcctggc

SEQ ID NO: 10441 - DNA, 15 bp, Homo sapiens
accactctggcctgg

SEQ ID NO: 10442 - DNA, 15 bp, Homo sapiens
caccactctggcctg

SEQ ID NO: 10443 - DNA, 15 bp, Homo sapiens
ccaccactctggcct

SEQ ID NO: 10444 - DNA, 15 bp, Homo sapiens
tccaccactctggcc

SEQ ID NO: 10445 - DNA, 15 bp, Homo sapiens
ttccaccactctggc

SEQ ID NO: 10446 - DNA, 15 bp, Homo sapiens
tttccaccactctgg

SEQ ID NO: 10447 - DNA, 15 bp, Homo sapiens
ttttccaccactctg

SEQ ID NO: 10448 - DNA, 15 bp, Homo sapiens
gttttccaccactct

SEQ ID NO: 10449 - DNA, 15 bp, Homo sapiens
tgttttccaccactc

SEQ ID NO: 10450 - DNA, 15 bp, Homo sapiens
atgttttccaccact

SEQ ID NO: 10451 - DNA, 15 bp, Homo sapiens
gatgttttccaccac

SEQ ID NO: 10452 - DNA, 15 bp, Homo sapiens
ggatgttttccacca

SEQ ID NO: 10453 - DNA, 15 bp, Homo sapiens
tggatgttttccacc

SEQ ID NO: 10454 - DNA, 15 bp, Homo sapiens
atggatgttttccac

SEQ ID NO: 10455 - DNA, 15 bp, Homo sapiens
aatggatgttttcca

SEQ ID NO: 10456 - DNA, 15 bp, Homo sapiens
aaatggatgttttcc

SEQ ID NO: 10457 - DNA, 15 bp, Homo sapiens
caaatggatgttttc

SEQ ID NO: 10458 - DNA, 15 bp, Homo sapiens
gcaaatggatgtttt

SEQ ID NO: 10459 - DNA, 15 bp, Homo sapiens
tgcaaatggatgttt

SEQ ID NO: 10460 - DNA, 15 bp, Homo sapiens
gtgcaaatggatgtt

SEQ ID NO: 10461 - DNA, 15 bp, Homo sapiens
ggtgcaaatggatgt

SEQ ID NO: 10462 - DNA, 15 bp, Homo sapiens
cggtgcaaatggatg

SEQ ID NO: 10463 - DNA, 15 bp, Homo sapiens
tcggtgcaaatggat

SEQ ID NO: 10464 - DNA, 15 bp, Homo sapiens
ttcggtgcaaatgga

SEQ ID NO: 10465 - DNA, 15 bp, Homo sapiens
tttcggtgcaaatgg

SEQ ID NO: 10466 - DNA, 15 bp, Homo sapiens
atttcggtgcaaatg

SEQ ID NO: 10467 - DNA, 15 bp, Homo sapiens
gatttcggtgcaaat

SEQ ID NO: 10468 - DNA, 15 bp, Homo sapiens
cgatttcggtgcaaa

SEQ ID NO: 10469 - DNA, 15 bp, Homo sapiens
ccgatttcggtgcaa

SEQ ID NO: 10470 - DNA, 15 bp, Homo sapiens
accgatttcggtgca

SEQ ID NO: 10471 - DNA, 15 bp, Homo sapiens
taccgatttcggtgc

SEQ ID NO: 10472 - DNA, 15 bp, Homo sapiens
ataccgatttcggtg

SEQ ID NO: 10473 - DNA, 15 bp, Homo sapiens
aataccgatttcggt

SEQ ID NO: 10474 - DNA, 15 bp, Homo sapiens
taataccgatttcgg

SEQ ID NO: 10475 - DNA, 15 bp, Homo sapiens
ctaataccgatttcg

SEQ ID NO: 10476 - DNA, 15 bp, Homo sapiens
actaataccgatttc

SEQ ID NO: 10477 - DNA, 15 bp, Homo sapiens
aactaataccgattt

SEQ ID NO: 10478 - DNA, 15 bp, Homo sapiens
aaactaataccgatt

SEQ ID NO: 10479 - DNA, 15 bp, Homo sapiens
caaactaataccgat

SEQ ID NO: 10480 - DNA, 15 bp, Homo sapiens
acaaactaataccga

SEQ ID NO: 10481 - DNA, 15 bp, Homo sapiens
aacaaactaataccg

SEQ ID NO: 10482 - DNA, 15 bp, Homo sapiens
gaacaaactaatacc

SEQ ID NO: 10483 - DNA, 15 bp, Homo sapiens
agaacaaactaatac

SEQ ID NO: 10484 - DNA, 15 bp, Homo sapiens
cagaacaaactaata

SEQ ID NO: 10485 - DNA, 15 bp, Homo sapiens
ccagaacaaactaat

SEQ ID NO: 10486 - DNA, 15 bp, Homo sapiens
gccagaacaaactaa

SEQ ID NO: 10487 - DNA, 15 bp, Homo sapiens
agccagaacaaacta

SEQ ID NO: 10488 - DNA, 15 bp, Homo sapiens
cagccagaacaaact

SEQ ID NO: 10489 - DNA, 15 bp, Homo sapiens
gcagccagaacaaac

SEQ ID NO: 10490 - DNA, 15 bp, Homo sapiens
agcagccagaacaaa

SEQ ID NO: 10491 - DNA, 15 bp, Homo sapiens
tagcagccagaacaa

SEQ ID NO: 10492 - DNA, 15 bp, Homo sapiens
atagcagccagaaca

SEQ ID NO: 10493 - DNA, 15 bp, Homo sapiens
tatagcagccagaac

SEQ ID NO: 10494 - DNA, 15 bp, Homo sapiens
ttatagcagccagaa

SEQ ID NO: 10495 - DNA, 15 bp, Homo sapiens
gttatagcagccaga

SEQ ID NO: 10496 - DNA, 15 bp, Homo sapiens
tgttatagcagccag

SEQ ID NO: 10497 - DNA, 15 bp, Homo sapiens
ttgttatagcagcca

SEQ ID NO: 10498 - DNA, 15 bp, Homo sapiens
tttgttatagcagcc

SEQ ID NO: 10499 - DNA, 15 bp, Homo sapiens
ctttgttatagcagc

SEQ ID NO: 10500 - DNA, 15 bp, Homo sapiens
actttgttatagcag

SEQ ID NO: 10501 - DNA, 15 bp, Homo sapiens
tactttgttatagca

SEQ ID NO: 10502 - DNA, 15 bp, Homo sapiens
gtactttgttatagc

SEQ ID NO: 10503 - DNA, 15 bp, Homo sapiens
ggtactttgttatag

SEQ ID NO: 10504 - DNA, 15 bp, Homo sapiens
tggtactttgttata

SEQ ID NO: 10505 - DNA, 15 bp, Homo sapiens
gtggtactttgttat

SEQ ID NO: 10506 - DNA, 15 bp, Homo sapiens
tgtggtactttgtta

SEQ ID NO: 10507 - DNA, 15 bp, Homo sapiens
ttgtggtactttgtt

SEQ ID NO: 10508 - DNA, 15 bp, Homo sapiens
gttgtggtactttgt

SEQ ID NO: 10509 - DNA, 15 bp, Homo sapiens
agttgtggtactttg

SEQ ID NO: 10510 - DNA, 15 bp, Homo sapiens
cagttgtggtacttt

SEQ ID NO: 10511 - DNA, 15 bp, Homo sapiens
tcagttgtggtactt

SEQ ID NO: 10512 - DNA, 15 bp, Homo sapiens
ctcagttgtggtact

SEQ ID NO: 10513 - DNA, 15 bp, Homo sapiens
actcagttgtggtac

SEQ ID NO: 10514 - DNA, 15 bp, Homo sapiens
cactcagttgtggta

SEQ ID NO: 10515 - DNA, 15 bp, Homo sapiens
ccactcagttgtggt

SEQ ID NO: 10516 - DNA, 15 bp, Homo sapiens
gccactcagttgtgg

SEQ ID NO: 10517 - DNA, 15 bp, Homo sapiens
agccactcagttgtg

SEQ ID NO: 10518 - DNA, 15 bp, Homo sapiens
aagccactcagttgt

SEQ ID NO: 10519 - DNA, 15 bp, Homo sapiens
gaagccactcagttg

SEQ ID NO: 10520 - DNA, 15 bp, Homo sapiens
tgaagccactcagtt

SEQ ID NO: 10521 - DNA, 15 bp, Homo sapiens
ctgaagccactcagt

SEQ ID NO: 10522 - DNA, 15 bp, Homo sapiens
gctgaagccactcag

SEQ ID NO: 10523 - DNA, 15 bp, Homo sapiens
tgctgaagccactca

SEQ ID NO: 10524 - DNA, 15 bp, Homo sapiens
ttgctgaagccactc

SEQ ID NO: 10525 - DNA, 15 bp, Homo sapiens
gttgctgaagccact

SEQ ID NO: 10526 - DNA, 15 bp, Homo sapiens
tgttgctgaagccac

SEQ ID NO: 10527 - DNA, 15 bp, Homo sapiens
ctgttgctgaagcca

SEQ ID NO: 10528 - DNA, 15 bp, Homo sapiens
tctgttgctgaagcc

SEQ ID NO: 10529 - DNA, 15 bp, Homo sapiens
ttctgttgctgaagc

SEQ ID NO: 10530 - DNA, 15 bp, Homo sapiens
tttctgttgctgaag

SEQ ID NO: 10531 - DNA, 15 bp, Homo sapiens
atttctgttgctgaa

SEQ ID NO: 10532 - DNA, 15 bp, Homo sapiens
aatttctgttgctga

SEQ ID NO: 10533 - DNA, 15 bp, Homo sapiens
caatttctgttgctg

SEQ ID NO: 10534 - DNA, 15 bp, Homo sapiens
tcaatttctgttgct

SEQ ID NO: 10535 - DNA, 15 bp, Homo sapiens
atcaatttctgttgc

SEQ ID NO: 10536 - DNA, 15 bp, Homo sapiens
gatcaatttctgttg

SEQ ID NO: 10537 - DNA, 15 bp, Homo sapiens
tgatcaatttctgtt

SEQ ID NO: 10538 - DNA, 15 bp, Homo sapiens
atgatcaatttctgt

SEQ ID NO: 10539 - DNA, 15 bp, Homo sapiens
gatgatcaatttctg

SEQ ID NO: 10540 - DNA, 15 bp, Homo sapiens
agatgatcaatttct

SEQ ID NO: 10541 - DNA, 15 bp, Homo sapiens
gagatgatcaatttc

SEQ ID NO: 10542 - DNA, 15 bp, Homo sapiens
tgagatgatcaattt

SEQ ID NO: 10543 - DNA, 15 bp, Homo sapiens
gtgagatgatcaatt

SEQ ID NO: 10544 - DNA, 15 bp, Homo sapiens
tgtgagatgatcaat

SEQ ID NO: 10545 - DNA, 15 bp, Homo sapiens
ctgtgagatgatcaa

SEQ ID NO: 10546 - DNA, 15 bp, Homo sapiens
actgtgagatgatca

SEQ ID NO: 10547 - DNA, 15 bp, Homo sapiens
aactgtgagatgatc

SEQ ID NO: 10548 - DNA, 15 bp, Homo sapiens
gaactgtgagatgat

SEQ ID NO: 10549 - DNA, 15 bp, Homo sapiens
agaactgtgagatga

SEQ ID NO: 10550 - DNA, 15 bp, Homo sapiens
cagaactgtgagatg

SEQ ID NO: 10551 - DNA, 15 bp, Homo sapiens
ccagaactgtgagat

SEQ ID NO: 10552 - DNA, 15 bp, Homo sapiens
tccagaactgtgaga

SEQ ID NO: 10553 - DNA, 15 bp, Homo sapiens
ctccagaactgtgag

SEQ ID NO: 10554 - DNA, 15 bp, Homo sapiens
cctccagaactgtga

SEQ ID NO: 10555 - DNA, 15 bp, Homo sapiens
gcctccagaactgtg

SEQ ID NO: 10556 - DNA, 15 bp, Homo sapiens
ggcctccagaactgt

SEQ ID NO: 10557 - DNA, 15 bp, Homo sapiens
tggcctccagaactg

SEQ ID NO: 10558 - DNA, 15 bp, Homo sapiens
ctggcctccagaact

SEQ ID NO: 10559 - DNA, 15 bp, Homo sapiens
tctggcctccagaac

SEQ ID NO: 10560 - DNA, 15 bp, Homo sapiens
ctctggcctccagaa

SEQ ID NO: 10561 - DNA, 15 bp, Homo sapiens
actctggcctccaga

SEQ ID NO: 10562 - DNA, 15 bp, Homo sapiens
gactctggcctccag

SEQ ID NO: 10563 - DNA, 15 bp, Homo sapiens
ggactctggcctcca

SEQ ID NO: 10564 - DNA, 15 bp, Homo sapiens
tggactctggcctcc

SEQ ID NO: 10565 - DNA, 15 bp, Homo sapiens
ttggactctggcctc

SEQ ID NO: 10566 - DNA, 15 bp, Homo sapiens
cttggactctggcct

SEQ ID NO: 10567 - DNA, 15 bp, Homo sapiens
tcttggactctggcc

SEQ ID NO: 10568 - DNA, 15 bp, Homo sapiens
atcttggactctggc

SEQ ID NO: 10569 - DNA, 15 bp, Homo sapiens
gatcttggactctgg

SEQ ID NO: 10570 - DNA, 15 bp, Homo sapiens
tgatcttggactctg

SEQ ID NO: 10571 - DNA, 15 bp, Homo sapiens
ttgatcttggactct

SEQ ID NO: 10572 - DNA, 15 bp, Homo sapiens
cttgatcttggactc

SEQ ID NO: 10573 - DNA, 15 bp, Homo sapiens
ccttgatcttggact

SEQ ID NO: 10574 - DNA, 15 bp, Homo sapiens
accttgatcttggac

SEQ ID NO: 10575 - DNA, 15 bp, Homo sapiens
caccttgatcttgga

SEQ ID NO: 10576 - DNA, 15 bp, Homo sapiens
acaccttgatcttgg

SEQ ID NO: 10577 - DNA, 15 bp, Homo sapiens
aacaccttgatcttg

SEQ ID NO: 10578 - DNA, 15 bp, Homo sapiens
caacaccttgatctt

SEQ ID NO: 10579 - DNA, 15 bp, Homo sapiens
gcaacaccttgatct

SEQ ID NO: 10580 - DNA, 15 bp, Homo sapiens
ggcaacaccttgatc

SEQ ID NO: 10581 - DNA, 15 bp, Homo sapiens
tggcaacaccttgat

SEQ ID NO: 10582 - DNA, 15 bp, Homo sapiens
ctggcaacaccttga

SEQ ID NO: 10583 - DNA, 15 bp, Homo sapiens
cctggcaacaccttg

SEQ ID NO: 10584 - DNA, 15 bp, Homo sapiens
ccctggcaacacctt

SEQ ID NO: 10585 - DNA, 15 bp, Homo sapiens
accctggcaacacct

SEQ ID NO: 10586 - DNA, 15 bp, Homo sapiens
aaccctggcaacacc

SEQ ID NO: 10587 - DNA, 15 bp, Homo sapiens
caaccctggcaacac

SEQ ID NO: 10588 - DNA, 15 bp, Homo sapiens
ccaaccctggcaaca

SEQ ID NO: 10589 - DNA, 15 bp, Homo sapiens
accaaccctggcaac

SEQ ID NO: 10590 - DNA, 15 bp, Homo sapiens
aaccaaccctggcaa

SEQ ID NO: 10591 - DNA, 15 bp, Homo sapiens
gaaccaaccctggca

SEQ ID NO: 10592 - DNA, 15 bp, Homo sapiens
ggaaccaaccctggc

SEQ ID NO: 10593 - DNA, 15 bp, Homo sapiens
aggaaccaaccctgg

SEQ ID NO: 10594 - DNA, 15 bp, Homo sapiens
aaggaaccaaccctg

SEQ ID NO: 10595 - DNA, 15 bp, Homo sapiens
gaaggaaccaaccct

SEQ ID NO: 10596 - DNA, 15 bp, Homo sapiens
agaaggaaccaaccc

SEQ ID NO: 10597 - DNA, 15 bp, Homo sapiens
cagaaggaaccaacc

SEQ ID NO: 10598 - DNA, 15 bp, Homo sapiens
ccagaaggaaccaac

SEQ ID NO: 10599 - DNA, 15 bp, Homo sapiens
cccagaaggaaccaa

SEQ ID NO: 10600 - DNA, 15 bp, Homo sapiens
ccccagaaggaacca

SEQ ID NO: 10601 - DNA, 15 bp, Homo sapiens
cccccagaaggaacc

SEQ ID NO: 10602 - DNA, 15 bp, Homo sapiens
gcccccagaaggaac

SEQ ID NO: 10603 - DNA, 15 bp, Homo sapiens
ggcccccagaaggaa

SEQ ID NO: 10604 - DNA, 15 bp, Homo sapiens
tggcccccagaagga

SEQ ID NO: 10605 - DNA, 15 bp, Homo sapiens
atggcccccagaagg

SEQ ID NO: 10606 - DNA, 15 bp, Homo sapiens
tatggcccccagaag

SEQ ID NO: 10607 - DNA, 15 bp, Homo sapiens
ttatggcccccagaa

SEQ ID NO: 10608 - DNA, 15 bp, Homo sapiens
cttatggcccccaga

SEQ ID NO: 10609 - DNA, 15 bp, Homo sapiens
ccttatggcccccag

SEQ ID NO: 10610 - DNA, 15 bp, Homo sapiens
cccttatggccccca

SEQ ID NO: 10611 - DNA, 15 bp, Homo sapiens
tcccttatggccccc

SEQ ID NO: 10612 - DNA, 15 bp, Homo sapiens
ctcccttatggcccc

SEQ ID NO: 10613 - DNA, 15 bp, Homo sapiens
tctcccttatggccc

SEQ ID NO: 10614 - DNA, 15 bp, Homo sapiens
ttctcccttatggcc

SEQ ID NO: 10615 - DNA, 15 bp, Homo sapiens
cttctcccttatggc

SEQ ID NO: 10616 - DNA, 15 bp, Homo sapiens
gcttctcccttatgg

SEQ ID NO: 10617 - DNA, 15 bp, Homo sapiens
agcttctcccttatg

SEQ ID NO: 10618 - DNA, 15 bp, Homo sapiens
cagcttctcccttat

SEQ ID NO: 10619 - DNA, 15 bp, Homo sapiens
gcagcttctccctta

SEQ ID NO: 10620 - DNA, 15 bp, Homo sapiens
agcagcttctccctt

SEQ ID NO: 10621 - DNA, 15 bp, Homo sapiens
gagcagcttctccct

SEQ ID NO: 10622 - DNA, 15 bp, Homo sapiens
ggagcagcttctccc

SEQ ID NO: 10623 - DNA, 15 bp, Homo sapiens
tggagcagcttctcc

SEQ ID NO: 10624 - DNA, 15 bp, Homo sapiens
ctggagcagcttctc

SEQ ID NO: 10625 - DNA, 15 bp, Homo sapiens
cctggagcagcttct

SEQ ID NO: 10626 - DNA, 15 bp, Homo sapiens
gcctggagcagcttc

SEQ ID NO: 10627 - DNA, 15 bp, Homo sapiens
ggcctggagcagctt

SEQ ID NO: 10628 - DNA, 15 bp, Homo sapiens
aggcctggagcagct

SEQ ID NO: 10629 - DNA, 15 bp, Homo sapiens
gaggcctggagcagc

SEQ ID NO: 10630 - DNA, 15 bp, Homo sapiens
agaggcctggagcag

SEQ ID NO: 10631 - DNA, 15 bp, Homo sapiens
gagaggcctggagca

SEQ ID NO: 10632 - DNA, 15 bp, Homo sapiens
ggagaggcctggagc

SEQ ID NO: 10633 - DNA, 15 bp, Homo sapiens
gggagaggcctggag

SEQ ID NO: 10634 - DNA, 15 bp, Homo sapiens
ggggagaggcctgga

SEQ ID NO: 10635 - DNA, 15 bp, Homo sapiens
gggggagaggcctgg

SEQ ID NO: 10636 - DNA, 15 bp, Homo sapiens
tgggggagaggcctg

SEQ ID NO: 10637 - DNA, 15 bp, Homo sapiens
ctgggggagaggcct

SEQ ID NO: 10638 - DNA, 15 bp, Homo sapiens
gctgggggagaggcc

SEQ ID NO: 10639 - DNA, 15 bp, Homo sapiens
agctgggggagaggc

SEQ ID NO: 10640 - DNA, 15 bp, Homo sapiens
aagctgggggagagg

SEQ ID NO: 10641 - DNA, 15 bp, Homo sapiens
gaagctgggggagag

SEQ ID NO: 10642 - DNA, 15 bp, Homo sapiens
agaagctgggggaga

SEQ ID NO: 10643 - DNA, 15 bp, Homo sapiens
cagaagctgggggag

SEQ ID NO: 10644 - DNA, 15 bp, Homo sapiens
ccagaagctggggga

SEQ ID NO: 10645 - DNA, 15 bp, Homo sapiens
accagaagctggggg

SEQ ID NO: 10646 - DNA, 15 bp, Homo sapiens
caccagaagctgggg

SEQ ID NO: 10647 - DNA, 15 bp, Homo sapiens
ccaccagaagctggg

SEQ ID NO: 10648 - DNA, 15 bp, Homo sapiens
accaccagaagctgg

SEQ ID NO: 10649 - DNA, 15 bp, Homo sapiens
aaccaccagaagctg

SEQ ID NO: 10650 - DNA, 15 bp, Homo sapiens
caaccaccagaagct

SEQ ID NO: 10651 - DNA, 15 bp, Homo sapiens
gcaaccaccagaagc

SEQ ID NO: 10652 - DNA, 15 bp, Homo sapiens
agcaaccaccagaag

SEQ ID NO: 10653 - DNA, 15 bp, Homo sapiens
cagcaaccaccagaa

SEQ ID NO: 10654 - DNA, 15 bp, Homo sapiens
ccagcaaccaccaga

SEQ ID NO: 10655 - DNA, 15 bp, Homo sapiens
gccagcaaccaccag

SEQ ID NO: 10656 - DNA, 15 bp, Homo sapiens
tgccagcaaccacca

SEQ ID NO: 10657 - DNA, 15 bp, Homo sapiens
ttgccagcaaccacc

SEQ ID NO: 10658 - DNA, 15 bp, Homo sapiens
attgccagcaaccac

SEQ ID NO: 10659 - DNA, 15 bp, Homo sapiens
gattgccagcaacca

SEQ ID NO: 10660 - DNA, 15 bp, Homo sapiens
agattgccagcaacc

SEQ ID NO: 10661 - DNA, 15 bp, Homo sapiens
aagattgccagcaac

SEQ ID NO: 10662 - DNA, 15 bp, Homo sapiens
aaagattgccagcaa

SEQ ID NO: 10663 - DNA, 15 bp, Homo sapiens
caaagattgccagca

SEQ ID NO: 10664 - DNA, 15 bp, Homo sapiens
acaaagattgccagc

SEQ ID NO: 10665 - DNA, 15 bp, Homo sapiens
aacaaagattgccag

SEQ ID NO: 10666 - DNA, 15 bp, Homo sapiens
taacaaagattgcca

SEQ ID NO: 10667 - DNA, 15 bp, Homo sapiens
ataacaaagattgcc

SEQ ID NO: 10668 - DNA, 15 bp, Homo sapiens
aataacaaagattgc

SEQ ID NO: 10669 - DNA, 15 bp, Homo sapiens
aaataacaaagattg

SEQ ID NO: 10670 - DNA, 15 bp, Homo sapiens
gaaataacaaagatt

SEQ ID NO: 10671 - DNA, 15 bp, Homo sapiens
agaaataacaaagat

SEQ ID NO: 10672 - DNA, 15 bp, Homo sapiens
aagaaataacaaaga

SEQ ID NO: 10673 - DNA, 15 bp, Homo sapiens
caagaaataacaaag

SEQ ID NO: 10674 - DNA, 15 bp, Homo sapiens
ccaagaaataacaaa

SEQ ID NO: 10675 - DNA, 15 bp, Homo sapiens
gccaagaaataacaa

SEQ ID NO: 10676 - DNA, 15 bp, Homo sapiens
agccaagaaataaca

SEQ ID NO: 10677 - DNA, 15 bp, Homo sapiens
aagccaagaaataac

SEQ ID NO: 10678 - DNA, 15 bp, Homo sapiens
caagccaagaaataa

SEQ ID NO: 10679 - DNA, 15 bp, Homo sapiens
tcaagccaagaaata

SEQ ID NO: 10680 - DNA, 15 bp, Homo sapiens
ttcaagccaagaaat

SEQ ID NO: 10681 - DNA, 15 bp, Homo sapiens
cttcaagccaagaaa

SEQ ID NO: 10682 - DNA, 15 bp, Homo sapiens
ccttcaagccaagaa

SEQ ID NO: 10683 - DNA, 15 bp, Homo sapiens
tccttcaagccaaga

SEQ ID NO: 10684 - DNA, 15 bp, Homo sapiens
ctccttcaagccaag

SEQ ID NO: 10685 - DNA, 15 bp, Homo sapiens
gctccttcaagccaa

SEQ ID NO: 10686 - DNA, 15 bp, Homo sapiens
tgctccttcaagcca

SEQ ID NO: 10687 - DNA, 15 bp, Homo sapiens
atgctccttcaagcc

SEQ ID NO: 10688 - DNA, 15 bp, Homo sapiens
gatgctccttcaagc

SEQ ID NO: 10689 - DNA, 15 bp, Homo sapiens
tgatgctccttcaag

SEQ ID NO: 10690 - DNA, 15 bp, Homo sapiens
gtgatgctccttcaa

SEQ ID NO: 10691 - DNA, 15 bp, Homo sapiens
ggtgatgctccttca

SEQ ID NO: 10692 - DNA, 15 bp, Homo sapiens
gggtgatgctccttc

SEQ ID NO: 10693 - DNA, 15 bp, Homo sapiens
ggggtgatgctcctt

SEQ ID NO: 10694 - DNA, 15 bp, Homo sapiens
tggggtgatgctcct

SEQ ID NO: 10695 - DNA, 15 bp, Homo sapiens
atggggtgatgctcc

SEQ ID NO: 10696 - DNA, 15 bp, Homo sapiens
gatggggtgatgctc

SEQ ID NO: 10697 - DNA, 15 bp, Homo sapiens
agatggggtgatgct

SEQ ID NO: 10698 - DNA, 15 bp, Homo sapiens
gagatggggtgatgc

SEQ ID NO: 10699 - DNA, 15 bp, Homo sapiens
agagatggggtgatg

SEQ ID NO: 10700 - DNA, 15 bp, Homo sapiens
cagagatggggtgat

SEQ ID NO: 10701 - DNA, 15 bp, Homo sapiens
ccagagatggggtga

SEQ ID NO: 10702 - DNA, 15 bp, Homo sapiens
gccagagatggggtg

SEQ ID NO: 10703 - DNA, 15 bp, Homo sapiens
agccagagatggggt

SEQ ID NO: 10704 - DNA, 15 bp, Homo sapiens
aagccagagatgggg

SEQ ID NO: 10705 - DNA, 15 bp, Homo sapiens
gaagccagagatggg

SEQ ID NO: 10706 - DNA, 15 bp, Homo sapiens
tgaagccagagatgg

SEQ ID NO: 10707 - DNA, 15 bp, Homo sapiens
atgaagccagagatg

SEQ ID NO: 10708 - DNA, 15 bp, Homo sapiens
aatgaagccagagat

SEQ ID NO: 10709 - DNA, 15 bp, Homo sapiens
gaatgaagccagaga

SEQ ID NO: 10710 - DNA, 15 bp, Homo sapiens
tgaatgaagccagag

SEQ ID NO: 10711 - DNA, 15 bp, Homo sapiens
atgaatgaagccaga

SEQ ID NO: 10712 - DNA, 15 bp, Homo sapiens
aatgaatgaagccag

SEQ ID NO: 10713 - DNA, 15 bp, Homo sapiens
gaatgaatgaagcca

SEQ ID NO: 10714 - DNA, 15 bp, Homo sapiens
tgaatgaatgaagcc

SEQ ID NO: 10715 - DNA, 15 bp, Homo sapiens
gtgaatgaatgaagc

SEQ ID NO: 10716 - DNA, 15 bp, Homo sapiens
agtgaatgaatgaag

SEQ ID NO: 10717 - DNA, 15 bp, Homo sapiens
gagtgaatgaatgaa

SEQ ID NO: 10718 - DNA, 15 bp, Homo sapiens
tgagtgaatgaatga

SEQ ID NO: 10719 - DNA, 15 bp, Homo sapiens
gtgagtgaatgaatg

SEQ ID NO: 10720 - DNA, 15 bp, Homo sapiens
ggtgagtgaatgaat

SEQ ID NO: 10721 - DNA, 15 bp, Homo sapiens
aggtgagtgaatgaa

SEQ ID NO: 10722 - DNA, 15 bp, Homo sapiens
aaggtgagtgaatga

SEQ ID NO: 10723 - DNA, 15 bp, Homo sapiens
gaaggtgagtgaatg

SEQ ID NO: 10724 - DNA, 15 bp, Homo sapiens
agaaggtgagtgaat

SEQ ID NO: 10725 - DNA, 15 bp, Homo sapiens
gagaaggtgagtgaa

SEQ ID NO: 10726 - DNA, 15 bp, Homo sapiens
tgagaaggtgagtga

SEQ ID NO: 10727 - DNA, 15 bp, Homo sapiens
atgagaaggtgagtg

SEQ ID NO: 10728 - DNA, 15 bp, Homo sapiens
gatgagaaggtgagt

SEQ ID NO: 10729 - DNA, 15 bp, Homo sapiens
agatgagaaggtgag

SEQ ID NO: 10730 - DNA, 15 bp, Homo sapiens
gagatgagaaggtga

SEQ ID NO: 10731 - DNA, 15 bp, Homo sapiens
tgagatgagaaggtg

SEQ ID NO: 10732 - DNA, 15 bp, Homo sapiens
gtgagatgagaaggt

SEQ ID NO: 10733 - DNA, 15 bp, Homo sapiens
ggtgagatgagaagg

SEQ ID NO: 10734 - DNA, 15 bp, Homo sapiens
tggtgagatgagaag

SEQ ID NO: 10735 - DNA, 15 bp, Homo sapiens
ctggtgagatgagaa

SEQ ID NO: 10736 - DNA, 15 bp, Homo sapiens
actggtgagatgaga

SEQ ID NO: 10737 - DNA, 15 bp, Homo sapiens
cactggtgagatgag

SEQ ID NO: 10738 - DNA, 15 bp, Homo sapiens
gcactggtgagatga

SEQ ID NO: 10739 - DNA, 15 bp, Homo sapiens
agcactggtgagatg

SEQ ID NO: 10740 - DNA, 15 bp, Homo sapiens
gagcactggtgagat

SEQ ID NO: 10741 - DNA, 15 bp, Homo sapiens
agagcactggtgaga

SEQ ID NO: 10742 - DNA, 15 bp, Homo sapiens
gagagcactggtgag

SEQ ID NO: 10743 - DNA, 15 bp, Homo sapiens
ggagagcactggtga

SEQ ID NO: 10744 - DNA, 15 bp, Homo sapiens
gggagagcactggtg

SEQ ID NO: 10745 - DNA, 15 bp, Homo sapiens
tgggagagcactggt

SEQ ID NO: 10746 - DNA, 15 bp, Homo sapiens
ctgggagagcactgg

SEQ ID NO: 10747 - DNA, 15 bp, Homo sapiens
cctgggagagcactg

SEQ ID NO: 10748 - DNA, 15 bp, Homo sapiens
gcctgggagagcact

SEQ ID NO: 10749 - DNA, 15 bp, Homo sapiens
ggcctgggagagcac

SEQ ID NO: 10750 - DNA, 15 bp, Homo sapiens
gggcctgggagagca

SEQ ID NO: 10751 - DNA, 15 bp, Homo sapiens
agggcctgggagagc

SEQ ID NO: 10752 - DNA, 15 bp, Homo sapiens
aagggcctgggagag

SEQ ID NO: 10753 - DNA, 15 bp, Homo sapiens
caagggcctgggaga

SEQ ID NO: 10754 - DNA, 15 bp, Homo sapiens
acaagggcctgggag

SEQ ID NO: 10755 - DNA, 15 bp, Homo sapiens
aacaagggcctggga

SEQ ID NO: 10756 - DNA, 15 bp, Homo sapiens
gaacaagggcctggg

SEQ ID NO: 10757 - DNA, 15 bp, Homo sapiens
cgaacaagggcctgg

SEQ ID NO: 10758 - DNA, 15 bp, Homo sapiens
ccgaacaagggcctg

SEQ ID NO: 10759 - DNA, 15 bp, Homo sapiens
tccgaacaagggcct

SEQ ID NO: 10760 - DNA, 15 bp, Homo sapiens
ctccgaacaagggcc

SEQ ID NO: 10761 - DNA, 15 bp, Homo sapiens
gctccgaacaagggc

SEQ ID NO: 10762 - DNA, 15 bp, Homo sapiens
ggctccgaacaaggg

SEQ ID NO: 10763 - DNA, 15 bp, Homo sapiens
aggctccgaacaagg

SEQ ID NO: 10764 - DNA, 15 bp, Homo sapiens
gaggctccgaacaag

SEQ ID NO: 10765 - DNA, 15 bp, Homo sapiens
ggaggctccgaacaa

SEQ ID NO: 10766 - DNA, 15 bp, Homo sapiens
tggaggctccgaaca

SEQ ID NO: 10767 - DNA, 15 bp, Homo sapiens
gtggaggctccgaac

SEQ ID NO: 10768 - DNA, 15 bp, Homo sapiens
tgtggaggctccgaa

SEQ ID NO: 10769 - DNA, 15 bp, Homo sapiens
ctgtggaggctccga

SEQ ID NO: 10770 - DNA, 15 bp, Homo sapiens
tctgtggaggctccg

SEQ ID NO: 10771 - DNA, 15 bp, Homo sapiens
gtctgtggaggctcc

SEQ ID NO: 10772 - DNA, 15 bp, Homo sapiens
ggtctgtggaggctc

SEQ ID NO: 10773 - DNA, 15 bp, Homo sapiens
gggtctgtggaggct

SEQ ID NO: 10774 - DNA, 15 bp, Homo sapiens
tgggtctgtggaggc

SEQ ID NO: 10775 - DNA, 15 bp, Homo sapiens
gtgggtctgtggagg

SEQ ID NO: 10776 - DNA, 15 bp, Homo sapiens
tgtgggtctgtggag

SEQ ID NO: 10777 - DNA, 15 bp, Homo sapiens
gtgtgggtctgtgga

SEQ ID NO: 10778 - DNA, 15 bp, Homo sapiens
agtgtgggtctgtgg

SEQ ID NO: 10779 - DNA, 15 bp, Homo sapiens
gagtgtgggtctgtg

SEQ ID NO: 10780 - DNA, 15 bp, Homo sapiens
ggagtgtgggtctgt

SEQ ID NO: 10781 - DNA, 15 bp, Homo sapiens
aggagtgtgggtctg

SEQ ID NO: 10782 - DNA, 15 bp, Homo sapiens
caggagtgtgggtct

SEQ ID NO: 10783 - DNA, 15 bp, Homo sapiens
acaggagtgtgggtc

SEQ ID NO: 10784 - DNA, 15 bp, Homo sapiens
aacaggagtgtgggt

SEQ ID NO: 10785 - DNA, 15 bp, Homo sapiens
aaacaggagtgtggg

SEQ ID NO: 10786 - DNA, 15 bp, Homo sapiens
gaaacaggagtgtgg

SEQ ID NO: 10787 - DNA, 15 bp, Homo sapiens
agaaacaggagtgtg

SEQ ID NO: 10788 - DNA, 15 bp, Homo sapiens
gagaaacaggagtgt

SEQ ID NO: 10789 - DNA, 15 bp, Homo sapiens
tgagaaacaggagtg

SEQ ID NO: 10790 - DNA, 15 bp, Homo sapiens
gtgagaaacaggagt

SEQ ID NO: 10791 - DNA, 15 bp, Homo sapiens
cgtgagaaacaggag

SEQ ID NO: 10792 - DNA, 15 bp, Homo sapiens
gcgtgagaaacagga

SEQ ID NO: 10793 - DNA, 15 bp, Homo sapiens
tgcgtgagaaacagg

SEQ ID NO: 10794 - DNA, 15 bp, Homo sapiens
ctgcgtgagaaacag

SEQ ID NO: 10795 - DNA, 15 bp, Homo sapiens
actgcgtgagaaaca

SEQ ID NO: 10796 - DNA, 15 bp, Homo sapiens
tactgcgtgagaaac

SEQ ID NO: 10797 - DNA, 15 bp, Homo sapiens
ttactgcgtgagaaa

SEQ ID NO: 10798 - DNA, 15 bp, Homo sapiens
attactgcgtgagaa

SEQ ID NO: 10799 - DNA, 15 bp, Homo sapiens
cattactgcgtgaga

SEQ ID NO: 10800 - DNA, 15 bp, Homo sapiens
acattactgcgtgag

SEQ ID NO: 10801 - DNA, 15 bp, Homo sapiens
aacattactgcgtga

SEQ ID NO: 10802 - DNA, 15 bp, Homo sapiens
gaacattactgcgtg

SEQ ID NO: 10803 - DNA, 15 bp, Homo sapiens
agaacattactgcgt

SEQ ID NO: 10804 - DNA, 15 bp, Homo sapiens
tagaacattactgcg

SEQ ID NO: 10805 - DNA, 15 bp, Homo sapiens
ttagaacattactgc

SEQ ID NO: 10806 - DNA, 15 bp, Homo sapiens
cttagaacattactg

SEQ ID NO: 10807 - DNA, 15 bp, Homo sapiens
gcttagaacattact

SEQ ID NO: 10808 - DNA, 15 bp, Homo sapiens
ggcttagaacattac

SEQ ID NO: 10809 - DNA, 15 bp, Homo sapiens
gggcttagaacatta

SEQ ID NO: 10810 - DNA, 15 bp, Homo sapiens
ggggcttagaacatt

SEQ ID NO: 10811 - DNA, 15 bp, Homo sapiens
gggggcttagaacat

SEQ ID NO: 10812 - DNA, 15 bp, Homo sapiens
tgggggcttagaaca

SEQ ID NO: 10813 - DNA, 15 bp, Homo sapiens
ctgggggcttagaac

SEQ ID NO: 10814 - DNA, 15 bp, Homo sapiens
cctgggggcttagaa

SEQ ID NO: 10815 - DNA, 15 bp, Homo sapiens
tcctgggggcttaga

SEQ ID NO: 10816 - DNA, 15 bp, Homo sapiens
ctcctgggggcttag

SEQ ID NO: 10817 - DNA, 15 bp, Homo sapiens
tctcctgggggctta

SEQ ID NO: 10818 - DNA, 15 bp, Homo sapiens
gtctcctgggggctt

SEQ ID NO: 10819 - DNA, 15 bp, Homo sapiens
agtctcctgggggct

SEQ ID NO: 10820 - DNA, 15 bp, Homo sapiens
tagtctcctgggggc

SEQ ID NO: 10821 - DNA, 15 bp, Homo sapiens
ttagtctcctggggg

SEQ ID NO: 10822 - DNA, 15 bp, Homo sapiens
cttagtctcctgggg

SEQ ID NO: 10823 - DNA, 15 bp, Homo sapiens
tcttagtctcctggg

SEQ ID NO: 10824 - DNA, 15 bp, Homo sapiens
ttcttagtctcctgg

SEQ ID NO: 10825 - DNA, 15 bp, Homo sapiens
gttcttagtctcctg

SEQ ID NO: 10826 - DNA, 15 bp, Homo sapiens
agttcttagtctcct

SEQ ID NO: 10827 - DNA, 15 bp, Homo sapiens
aagttcttagtctcc

SEQ ID NO: 10828 - DNA, 15 bp, Homo sapiens
taagttcttagtctc

SEQ ID NO: 10829 - DNA, 15 bp, Homo sapiens
ttaagttcttagtct

SEQ ID NO: 10830 - DNA, 15 bp, Homo sapiens
attaagttcttagtc

SEQ ID NO: 10831 - DNA, 15 bp, Homo sapiens
tattaagttcttagt

SEQ ID NO: 10832 - DNA, 15 bp, Homo sapiens
gtattaagttcttag

SEQ ID NO: 10833 - DNA, 15 bp, Homo sapiens
ggtattaagttctta

SEQ ID NO: 10834 - DNA, 15 bp, Homo sapiens
aggtattaagttctt

SEQ ID NO: 10835 - DNA, 15 bp, Homo sapiens
caggtattaagttct

SEQ ID NO: 10836 - DNA, 15 bp, Homo sapiens
ccaggtattaagttc

SEQ ID NO: 10837 - DNA, 15 bp, Homo sapiens
tccaggtattaagtt

SEQ ID NO: 10838 - DNA, 15 bp, Homo sapiens
atccaggtattaagt

SEQ ID NO: 10839 - DNA, 15 bp, Homo sapiens
aatccaggtattaag

SEQ ID NO: 10840 - DNA, 15 bp, Homo sapiens
gaatccaggtattaa

SEQ ID NO: 10841 - DNA, 15 bp, Homo sapiens
agaatccaggtatta

SEQ ID NO: 10842 - DNA, 15 bp, Homo sapiens
gagaatccaggtatt

SEQ ID NO: 10843 - DNA, 15 bp, Homo sapiens
tgagaatccaggtat

SEQ ID NO: 10844 - DNA, 15 bp, Homo sapiens
gtgagaatccaggta

SEQ ID NO: 10845 - DNA, 15 bp, Homo sapiens
tgtgagaatccaggt

SEQ ID NO: 10846 - DNA, 15 bp, Homo sapiens
gtgtgagaatccagg

SEQ ID NO: 10847 - DNA, 15 bp, Homo sapiens
agtgtgagaatccag

SEQ ID NO: 10848 - DNA, 15 bp, Homo sapiens
gagtgtgagaatcca

SEQ ID NO: 10849 - DNA, 15 bp, Homo sapiens
tgagtgtgagaatcc

SEQ ID NO: 10850 - DNA, 15 bp, Homo sapiens
atgagtgtgagaatc

SEQ ID NO: 10851 - DNA, 15 bp, Homo sapiens
gatgagtgtgagaat

SEQ ID NO: 10852 - DNA, 15 bp, Homo sapiens
agatgagtgtgagaa

SEQ ID NO: 10853 - DNA, 15 bp, Homo sapiens
gagatgagtgtgaga

SEQ ID NO: 10854 - DNA, 15 bp, Homo sapiens
ggagatgagtgtgag

SEQ ID NO: 10855 - DNA, 15 bp, Homo sapiens
gggagatgagtgtga

SEQ ID NO: 10856 - DNA, 15 bp, Homo sapiens
agggagatgagtgtg

SEQ ID NO: 10857 - DNA, 15 bp, Homo sapiens
gagggagatgagtgt

SEQ ID NO: 10858 - DNA, 15 bp, Homo sapiens
tgagggagatgagtg

SEQ ID NO: 10859 - DNA, 15 bp, Homo sapiens
ctgagggagatgagt

SEQ ID NO: 10860 - DNA, 15 bp, Homo sapiens
gctgagggagatgag

SEQ ID NO: 10861 - DNA, 15 bp, Homo sapiens
tgctgagggagatga

SEQ ID NO: 10862 - DNA, 15 bp, Homo sapiens
gtgctgagggagatg

SEQ ID NO: 10863 - DNA, 15 bp, Homo sapiens
ggtgctgagggagat

SEQ ID NO: 10864 - DNA, 15 bp, Homo sapiens
tggtgctgagggaga

SEQ ID NO: 10865 - DNA, 15 bp, Homo sapiens
gtggtgctgagggag

SEQ ID NO: 10866 - DNA, 15 bp, Homo sapiens
tgtggtgctgaggga

SEQ ID NO: 10867 - DNA, 15 bp, Homo sapiens
ctgtggtgctgaggg

SEQ ID NO: 10868 - DNA, 15 bp, Homo sapiens
gctgtggtgctgagg

SEQ ID NO: 10869 - DNA, 15 bp, Homo sapiens
agctgtggtgctgag

SEQ ID NO: 10870 - DNA, 15 bp, Homo sapiens
gagctgtggtgctga

SEQ ID NO: 10871 - DNA, 15 bp, Homo sapiens
agagctgtggtgctg

SEQ ID NO: 10872 - DNA, 15 bp, Homo sapiens
cagagctgtggtgct

SEQ ID NO: 10873 - DNA, 15 bp, Homo sapiens
tcagagctgtggtgc

SEQ ID NO: 10874 - DNA, 15 bp, Homo sapiens
gtcagagctgtggtg

SEQ ID NO: 10875 - DNA, 15 bp, Homo sapiens
tgtcagagctgtggt

SEQ ID NO: 10876 - DNA, 15 bp, Homo sapiens
ttgtcagagctgtgg

SEQ ID NO: 10877 - DNA, 15 bp, Homo sapiens
gttgtcagagctgtg

SEQ ID NO: 10878 - DNA, 15 bp, Homo sapiens
ggttgtcagagctgt

SEQ ID NO: 10879 - DNA, 15 bp, Homo sapiens
tggttgtcagagctg

SEQ ID NO: 10880 - DNA, 15 bp, Homo sapiens
gtggttgtcagagct

SEQ ID NO: 10881 - DNA, 15 bp, Homo sapiens
ggtggttgtcagagc

SEQ ID NO: 10882 - DNA, 15 bp, Homo sapiens
gggtggttgtcagag

SEQ ID NO: 10883 - DNA, 15 bp, Homo sapiens
ggggtggttgtcaga

SEQ ID NO: 10884 - DNA, 15 bp, Homo sapiens
gggggtggttgtcag

SEQ ID NO: 10885 - DNA, 15 bp, Homo sapiens
tgggggtggttgtca

SEQ ID NO: 10886 - DNA, 15 bp, Homo sapiens
ctgggggtggttgtc

SEQ ID NO: 10887 - DNA, 15 bp, Homo sapiens
cctgggggtggttgt

SEQ ID NO: 10888 - DNA, 15 bp, Homo sapiens
tcctgggggtggttg

SEQ ID NO: 10889 - DNA, 15 bp, Homo sapiens
ctcctgggggtggtt

SEQ ID NO: 10890 - DNA, 15 bp, Homo sapiens
cctcctgggggtggt

SEQ ID NO: 10891 - DNA, 15 bp, Homo sapiens
acctcctgggggtgg

SEQ ID NO: 10892 - DNA, 15 bp, Homo sapiens
cacctcctgggggtg

SEQ ID NO: 10893 - DNA, 15 bp, Homo sapiens
tcacctcctgggggt

SEQ ID NO: 10894 - DNA, 15 bp, Homo sapiens
gtcacctcctggggg

SEQ ID NO: 10895 - DNA, 15 bp, Homo sapiens
tgtcacctcctgggg

SEQ ID NO: 10896 - DNA, 15 bp, Homo sapiens
ctgtcacctcctggg

SEQ ID NO: 10897 - DNA, 15 bp, Homo sapiens
gctgtcacctcctgg

SEQ ID NO: 10898 - DNA, 15 bp, Homo sapiens
tgctgtcacctcctg

SEQ ID NO: 10899 - DNA, 15 bp, Homo sapiens
ttgctgtcacctcct

SEQ ID NO: 10900 - DNA, 15 bp, Homo sapiens
tttgctgtcacctcc

SEQ ID NO: 10901 - DNA, 15 bp, Homo sapiens
ctttgctgtcacctc

SEQ ID NO: 10902 - DNA, 15 bp, Homo sapiens
tctttgctgtcacct

SEQ ID NO: 10903 - DNA, 15 bp, Homo sapiens
ttctttgctgtcacc

SEQ ID NO: 10904 - DNA, 15 bp, Homo sapiens
tttctttgctgtcac

SEQ ID NO: 10905 - DNA, 15 bp, Homo sapiens
ctttctttgctgtca

SEQ ID NO: 10906 - DNA, 15 bp, Homo sapiens
cctttctttgctgtc

SEQ ID NO: 10907 - DNA, 15 bp, Homo sapiens
tcctttctttgctgt

SEQ ID NO: 10908 - DNA, 15 bp, Homo sapiens
ttcctttctttgctg

SEQ ID NO: 10909 - DNA, 15 bp, Homo sapiens
cttcctttctttgct

SEQ ID NO: 10910 - DNA, 15 bp, Homo sapiens
ccttcctttctttgc

SEQ ID NO: 10911 - DNA, 15 bp, Homo sapiens
tccttcctttctttg

SEQ ID NO: 10912 - DNA, 15 bp, Homo sapiens
ctccttcctttcttt

SEQ ID NO: 10913 - DNA, 15 bp, Homo sapiens
gctccttcctttctt

SEQ ID NO: 10914 - DNA, 15 bp, Homo sapiens
tgctccttcctttct

SEQ ID NO: 10915 - DNA, 15 bp, Homo sapiens
ttgctccttcctttc

SEQ ID NO: 10916 - DNA, 15 bp, Homo sapiens
gttgctccttccttt

SEQ ID NO: 10917 - DNA, 15 bp, Homo sapiens
agttgctccttcctt

SEQ ID NO: 10918 - DNA, 15 bp, Homo sapiens
cagttgctccttcct

SEQ ID NO: 10919 - DNA, 15 bp, Homo sapiens
gcagttgctccttcc

SEQ ID NO: 10920 - DNA, 15 bp, Homo sapiens
agcagttgctccttc

SEQ ID NO: 10921 - DNA, 15 bp, Homo sapiens
gagcagttgctcctt

SEQ ID NO: 10922 - DNA, 15 bp, Homo sapiens
ggagcagttgctcct

SEQ ID NO: 10923 - DNA, 15 bp, Homo sapiens
gggagcagttgctcc

SEQ ID NO: 10924 - DNA, 15 bp, Homo sapiens
ggggagcagttgctc

SEQ ID NO: 10925 - DNA, 15 bp, Homo sapiens
gggggagcagttgct

SEQ ID NO: 10926 - DNA, 15 bp, Homo sapiens
tgggggagcagttgc

SEQ ID NO: 10927 - DNA, 15 bp, Homo sapiens
ctgggggagcagttg

SEQ ID NO: 10928 - DNA, 15 bp, Homo sapiens
tctgggggagcagtt

SEQ ID NO: 10929 - DNA, 15 bp, Homo sapiens
ttctgggggagcagt

SEQ ID NO: 10930 - DNA, 15 bp, Homo sapiens
gttctgggggagcag

SEQ ID NO: 10931 - DNA, 15 bp, Homo sapiens
ggttctgggggagca

SEQ ID NO: 10932 - DNA, 15 bp, Homo sapiens
gggttctgggggagc

SEQ ID NO: 10933 - DNA, 15 bp, Homo sapiens
agggttctgggggag

SEQ ID NO: 10934 - DNA, 15 bp, Homo sapiens
aagggttctggggga

SEQ ID NO: 10935 - DNA, 15 bp, Homo sapiens
gaagggttctggggg

SEQ ID NO: 10936 - DNA, 15 bp, Homo sapiens
agaagggttctgggg

SEQ ID NO: 10937 - DNA, 15 bp, Homo sapiens
tagaagggttctggg

SEQ ID NO: 10938 - DNA, 15 bp, Homo sapiens
atagaagggttctgg

SEQ ID NO: 10939 - DNA, 15 bp, Homo sapiens
tatagaagggttctg

SEQ ID NO: 10940 - DNA, 15 bp, Homo sapiens
gtatagaagggttct

SEQ ID NO: 10941 - DNA, 15 bp, Homo sapiens
agtatagaagggttc

SEQ ID NO: 10942 - DNA, 15 bp, Homo sapiens
gagtatagaagggtt

SEQ ID NO: 10943 - DNA, 15 bp, Homo sapiens
ggagtatagaagggt

SEQ ID NO: 10944 - DNA, 15 bp, Homo sapiens
gggagtatagaaggg

SEQ ID NO: 10945 - DNA, 15 bp, Homo sapiens
ggggagtatagaagg

SEQ ID NO: 10946 - DNA, 15 bp, Homo sapiens
gggggagtatagaag

SEQ ID NO: 10947 - DNA, 15 bp, Homo sapiens
cgggggagtatagaa

SEQ ID NO: 10948 - DNA, 15 bp, Homo sapiens
ccgggggagtataga

SEQ ID NO: 10949 - DNA, 15 bp, Homo sapiens
cccgggggagtatag

SEQ ID NO: 10950 - DNA, 15 bp, Homo sapiens
gcccgggggagtata

SEQ ID NO: 10951 - DNA, 15 bp, Homo sapiens
agcccgggggagtat

SEQ ID NO: 10952 - DNA, 15 bp, Homo sapiens
cagcccgggggagta

SEQ ID NO: 10953 - DNA, 15 bp, Homo sapiens
gcagcccgggggagt

SEQ ID NO: 10954 - DNA, 15 bp, Homo sapiens
agcagcccgggggag

SEQ ID NO: 10955 - DNA, 15 bp, Homo sapiens
gagcagcccggggga

SEQ ID NO: 10956 - DNA, 15 bp, Homo sapiens
agagcagcccggggg

SEQ ID NO: 10957 - DNA, 15 bp, Homo sapiens
gagagcagcccgggg

SEQ ID NO: 10958 - DNA, 15 bp, Homo sapiens
tgagagcagcccggg

SEQ ID NO: 10959 - DNA, 15 bp, Homo sapiens
ctgagagcagcccgg

SEQ ID NO: 10960 - DNA, 15 bp, Homo sapiens
gctgagagcagcccg

SEQ ID NO: 10961 - DNA, 15 bp, Homo sapiens
tgctgagagcagccc

SEQ ID NO: 10962 - DNA, 15 bp, Homo sapiens
ctgctgagagcagcc

SEQ ID NO: 10963 - DNA, 15 bp, Homo sapiens
gctgctgagagcagc

SEQ ID NO: 10964 - DNA, 15 bp, Homo sapiens
agctgctgagagcag

SEQ ID NO: 10965 - DNA, 15 bp, Homo sapiens
cagctgctgagagca

SEQ ID NO: 10966 - DNA, 15 bp, Homo sapiens
acagctgctgagagc

SEQ ID NO: 10967 - DNA, 15 bp, Homo sapiens
cacagctgctgagag

SEQ ID NO: 10968 - DNA, 15 bp, Homo sapiens
acacagctgctgaga

SEQ ID NO: 10969 - DNA, 15 bp, Homo sapiens
cacacagctgctgag

SEQ ID NO: 10970 - DNA, 15 bp, Homo sapiens
gcacacagctgctga

SEQ ID NO: 10971 - DNA, 15 bp, Homo sapiens
ggcacacagctgctg

SEQ ID NO: 10972 - DNA, 15 bp, Homo sapiens
gggcacacagctgct

SEQ ID NO: 10973 - DNA, 15 bp, Homo sapiens
tgggcacacagctgc

SEQ ID NO: 10974 - DNA, 15 bp, Homo sapiens
ttgggcacacagctg

SEQ ID NO: 10975 - DNA, 15 bp, Homo sapiens
gttgggcacacagct

SEQ ID NO: 10976 - DNA, 15 bp, Homo sapiens
agttgggcacacagc

SEQ ID NO: 10977 - DNA, 15 bp, Homo sapiens
gagttgggcacacag

SEQ ID NO: 10978 - DNA, 15 bp, Homo sapiens
tgagttgggcacaca

SEQ ID NO: 10979 - DNA, 15 bp, Homo sapiens
ctgagttgggcacac

SEQ ID NO: 10980 - DNA, 15 bp, Homo sapiens
actgagttgggcaca

SEQ ID NO: 10981 - DNA, 15 bp, Homo sapiens
cactgagttgggcac

SEQ ID NO: 10982 - DNA, 15 bp, Homo sapiens
gcactgagttgggca

SEQ ID NO: 10983 - DNA, 15 bp, Homo sapiens
agcactgagttgggc

SEQ ID NO: 10984 - DNA, 15 bp, Homo sapiens
cagcactgagttggg

SEQ ID NO: 10985 - DNA, 15 bp, Homo sapiens
acagcactgagttgg

SEQ ID NO: 10986 - DNA, 15 bp, Homo sapiens
cacagcactgagttg

SEQ ID NO: 10987 - DNA, 15 bp, Homo sapiens
tcacagcactgagtt

SEQ ID NO: 10988 - DNA, 15 bp, Homo sapiens
ctcacagcactgagt

SEQ ID NO: 10989 - DNA, 15 bp, Homo sapiens
cctcacagcactgag

SEQ ID NO: 10990 - DNA, 15 bp, Homo sapiens
acctcacagcactga

SEQ ID NO: 10991 - DNA, 15 bp, Homo sapiens
cacctcacagcactg

SEQ ID NO: 10992 - DNA, 15 bp, Homo sapiens
ccacctcacagcact

SEQ ID NO: 10993 - DNA, 15 bp, Homo sapiens
tccacctcacagcac

SEQ ID NO: 10994 - DNA, 15 bp, Homo sapiens
ttccacctcacagca

SEQ ID NO: 10995 - DNA, 15 bp, Homo sapiens
gttccacctcacagc

SEQ ID NO: 10996 - DNA, 15 bp, Homo sapiens
cgttccacctcacag

SEQ ID NO: 10997 - DNA, 15 bp, Homo sapiens
ccgttccacctcaca

SEQ ID NO: 10998 - DNA, 15 bp, Homo sapiens
cccgttccacctcac

SEQ ID NO: 10999 - DNA, 15 bp, Homo sapiens
ccccgttccacctca

SEQ ID NO: 11000 - DNA, 15 bp, Homo sapiens
tccccgttccacctc

SEQ ID NO: 11001 - DNA, 15 bp, Homo sapiens
ctccccgttccacct

SEQ ID NO: 11002 - DNA, 15 bp, Homo sapiens
tctccccgttccacc

SEQ ID NO: 11003 - DNA, 15 bp, Homo sapiens
atctccccgttccac

SEQ ID NO: 11004 - DNA, 15 bp, Homo sapiens
catctccccgttcca

SEQ ID NO: 11005 - DNA, 15 bp, Homo sapiens
ccatctccccgttcc

SEQ ID NO: 11006 - DNA, 15 bp, Homo sapiens
tccatctccccgttc

SEQ ID NO: 11007 - DNA, 15 bp, Homo sapiens
ctccatctccccgtt

SEQ ID NO: 11008 - DNA, 15 bp, Homo sapiens
tctccatctccccgt

SEQ ID NO: 11009 - DNA, 15 bp, Homo sapiens
gtctccatctccccg

SEQ ID NO: 11010 - DNA, 15 bp, Homo sapiens
tgtctccatctcccc

SEQ ID NO: 11011 - DNA, 15 bp, Homo sapiens
gtgtctccatctccc

SEQ ID NO: 11012 - DNA, 15 bp, Homo sapiens
tgtgtctccatctcc

SEQ ID NO: 11013 - DNA, 15 bp, Homo sapiens
gtgtgtctccatctc

SEQ ID NO: 11014 - DNA, 15 bp, Homo sapiens
tgtgtgtctccatct

SEQ ID NO: 11015 - DNA, 15 bp, Homo sapiens
gtgtgtgtctccatc

SEQ ID NO: 11016 - DNA, 15 bp, Homo sapiens
tgtgtgtgtctccat

SEQ ID NO: 11017 - DNA, 15 bp, Homo sapiens
gtgtgtgtgtctcca

SEQ ID NO: 11018 - DNA, 15 bp, Homo sapiens
tgtgtgtgtgtctcc

SEQ ID NO: 11019 - DNA, 15 bp, Homo sapiens
gtgtgtgtgtgtctc

SEQ ID NO: 11020 - DNA, 15 bp, Homo sapiens
ctggtgtgtgtgtgt

SEQ ID NO: 11021 - DNA, 15 bp, Homo sapiens
tctggtgtgtgtgtg

SEQ ID NO: 11022 - DNA, 15 bp, Homo sapiens
ctctggtgtgtgtgt

SEQ ID NO: 11023 - DNA, 15 bp, Homo sapiens
tctctggtgtgtgtg

SEQ ID NO: 11024 - DNA, 15 bp, Homo sapiens
ctctctggtgtgtgt

SEQ ID NO: 11025 - DNA, 15 bp, Homo sapiens
actctctggtgtgtg

SEQ ID NO: 11026 - DNA, 15 bp, Homo sapiens
aactctctggtgtgt

SEQ ID NO: 11027 - DNA, 15 bp, Homo sapiens
aaactctctggtgtg

SEQ ID NO: 11028 - DNA, 15 bp, Homo sapiens
taaactctctggtgt

SEQ ID NO: 11029 - DNA, 15 bp, Homo sapiens
ataaactctctggtg

SEQ ID NO: 11030 - DNA, 15 bp, Homo sapiens
tataaactctctggt

SEQ ID NO: 11031 - DNA, 15 bp, Homo sapiens
ttataaactctctgg

SEQ ID NO: 11032 - DNA, 15 bp, Homo sapiens
tttataaactctctg

SEQ ID NO: 11033 - DNA, 15 bp, Homo sapiens
ttttataaactctct

SEQ ID NO: 11034 - DNA, 15 bp, Homo sapiens
attttataaactctc

SEQ ID NO: 11035 - DNA, 15 bp, Homo sapiens
cattttataaactct

SEQ ID NO: 11036 - DNA, 15 bp, Homo sapiens
acattttataaactc

SEQ ID NO: 11037 - DNA, 15 bp, Homo sapiens
cacattttataaact

SEQ ID NO: 11038 - DNA, 15 bp, Homo sapiens
gcacattttataaac

SEQ ID NO: 11039 - DNA, 15 bp, Homo sapiens
tgcacattttataaa

SEQ ID NO: 11040 - DNA, 15 bp, Homo sapiens
gtgcacattttataa

SEQ ID NO: 11041 - DNA, 15 bp, Homo sapiens
tgtgcacattttata

SEQ ID NO: 11042 - DNA, 15 bp, Homo sapiens
gtgtgcacattttat

SEQ ID NO: 11043 - DNA, 15 bp, Homo sapiens
cgtgtgcacatttta

SEQ ID NO: 11044 - DNA, 15 bp, Homo sapiens
ccgtgtgcacatttt

SEQ ID NO: 11045 - DNA, 15 bp, Homo sapiens
tccgtgtgcacattt

SEQ ID NO: 11046 - DNA, 15 bp, Homo sapiens
ttccgtgtgcacatt

SEQ ID NO: 11047 - DNA, 15 bp, Homo sapiens
tttccgtgtgcacat

SEQ ID NO: 11048 - DNA, 15 bp, Homo sapiens
gtttccgtgtgcaca

SEQ ID NO: 11049 - DNA, 15 bp, Homo sapiens
tgtttccgtgtgcac

SEQ ID NO: 11050 - DNA, 15 bp, Homo sapiens
gtgtttccgtgtgca

SEQ ID NO: 11051 - DNA, 15 bp, Homo sapiens
agtgtttccgtgtgc

SEQ ID NO: 11052 - DNA, 15 bp, Homo sapiens
aagtgtttccgtgtg

SEQ ID NO: 11053 - DNA, 15 bp, Homo sapiens
gaagtgtttccgtgt

SEQ ID NO: 11054 - DNA, 15 bp, Homo sapiens
ggaagtgtttccgtg

SEQ ID NO: 11055 - DNA, 15 bp, Homo sapiens
aggaagtgtttccgt

SEQ ID NO: 11056 - DNA, 15 bp, Homo sapiens
taggaagtgtttccg

SEQ ID NO: 11057 - DNA, 15 bp, Homo sapiens
ttaggaagtgtttcc

SEQ ID NO: 11058 - DNA, 15 bp, Homo sapiens
tttaggaagtgtttc

SEQ ID NO: 11059 - DNA, 15 bp, Homo sapiens
ctttaggaagtgttt

SEQ ID NO: 11060 - DNA, 15 bp, Homo sapiens
tctttaggaagtgtt

SEQ ID NO: 11061 - DNA, 15 bp, Homo sapiens
ttctttaggaagtgt

SEQ ID NO: 11062 - DNA, 15 bp, Homo sapiens
tttctttaggaagtg

SEQ ID NO: 11063 - DNA, 15 bp, Homo sapiens
ctttctttaggaagt

SEQ ID NO: 11064 - DNA, 15 bp, Homo sapiens
tctttctttaggaag

SEQ ID NO: 11065 - DNA, 15 bp, Homo sapiens
ttctttctttaggaa

SEQ ID NO: 11066 - DNA, 15 bp, Homo sapiens
cttctttctttagga

SEQ ID NO: 11067 - DNA, 15 bp, Homo sapiens
acttctttctttagg

SEQ ID NO: 11068 - DNA, 15 bp, Homo sapiens
cacttctttctttag

SEQ ID NO: 11069 - DNA, 15 bp, Homo sapiens
ccacttctttcttta

SEQ ID NO: 11070 - DNA, 15 bp, Homo sapiens
tccacttctttcttt

SEQ ID NO: 11071 - DNA, 15 bp, Homo sapiens
ctccacttctttctt

SEQ ID NO: 11072 - DNA, 15 bp, Homo sapiens
actccacttctttct

SEQ ID NO: 11073 - DNA, 15 bp, Homo sapiens
aactccacttctttc

SEQ ID NO: 11074 - DNA, 15 bp, Homo sapiens
gaactccacttcttt

SEQ ID NO: 11075 - DNA, 15 bp, Homo sapiens
agaactccacttctt

SEQ ID NO: 11076 - DNA, 15 bp, Homo sapiens
gagaactccacttct

SEQ ID NO: 11077 - DNA, 15 bp, Homo sapiens
tgagaactccacttc

SEQ ID NO: 11078 - DNA, 15 bp, Homo sapiens
ttgagaactccactt

SEQ ID NO: 11079 - DNA, 15 bp, Homo sapiens
cttgagaactccact

SEQ ID NO: 11080 - DNA, 15 bp, Homo sapiens
acttgagaactccac

SEQ ID NO: 11081 - DNA, 15 bp, Homo sapiens
gacttgagaactcca

SEQ ID NO: 11082 - DNA, 15 bp, Homo sapiens
tgacttgagaactcc

SEQ ID NO: 11083 - DNA, 15 bp, Homo sapiens
gtgacttgagaactc

SEQ ID NO: 11084 - DNA, 15 bp, Homo sapiens
agtgacttgagaact

SEQ ID NO: 11085 - DNA, 15 bp, Homo sapiens
tagtgacttgagaac

SEQ ID NO: 11086 - DNA, 15 bp, Homo sapiens
atagtgacttgagaa

SEQ ID NO: 11087 - DNA, 15 bp, Homo sapiens
catagtgacttgaga

SEQ ID NO: 11088 - DNA, 15 bp, Homo sapiens
ccatagtgacttgag

SEQ ID NO: 11089 - DNA, 15 bp, Homo sapiens
cccatagtgacttga

SEQ ID NO: 11090 - DNA, 15 bp, Homo sapiens
tcccatagtgacttg

SEQ ID NO: 11091 - DNA, 15 bp, Homo sapiens
gtcccatagtgactt

SEQ ID NO: 11092 - DNA, 15 bp, Homo sapiens
agtcccatagtgact

SEQ ID NO: 11093 - DNA, 15 bp, Homo sapiens
tagtcccatagtgac

SEQ ID NO: 11094 - DNA, 15 bp, Homo sapiens
gtagtcccatagtga

SEQ ID NO: 11095 - DNA, 15 bp, Homo sapiens
cgtagtcccatagtg

SEQ ID NO: 11096 - DNA, 15 bp, Homo sapiens
ccgtagtcccatagt

SEQ ID NO: 11097 - DNA, 15 bp, Homo sapiens
tccgtagtcccatag

SEQ ID NO: 11098 - DNA, 15 bp, Homo sapiens
ttccgtagtcccata

SEQ ID NO: 11099 - DNA, 15 bp, Homo sapiens
gttccgtagtcccat

SEQ ID NO: 11100 - DNA, 15 bp, Homo sapiens
agttccgtagtccca

SEQ ID NO: 11101 - DNA, 15 bp, Homo sapiens
gagttccgtagtccc

SEQ ID NO: 11102 - DNA, 15 bp, Homo sapiens
cgagttccgtagtcc

SEQ ID NO: 11103 - DNA, 15 bp, Homo sapiens
ccgagttccgtagtc

SEQ ID NO: 11104 - DNA, 15 bp, Homo sapiens
gccgagttccgtagt

SEQ ID NO: 11105 - DNA, 15 bp, Homo sapiens
tgccgagttccgtag

SEQ ID NO: 11106 - DNA, 15 bp, Homo sapiens
atgccgagttccgta

SEQ ID NO: 11107 - DNA, 15 bp, Homo sapiens
gatgccgagttccgt

SEQ ID NO: 11108 - DNA, 15 bp, Homo sapiens
agatgccgagttccg

SEQ ID NO: 11109 - DNA, 15 bp, Homo sapiens
cagatgccgagttcc

SEQ ID NO: 11110 - DNA, 15 bp, Homo sapiens
tcagatgccgagttc

SEQ ID NO: 11111 - DNA, 15 bp, Homo sapiens
ctcagatgccgagtt

SEQ ID NO: 11112 - DNA, 15 bp, Homo sapiens
gctcagatgccgagt

SEQ ID NO: 11113 - DNA, 15 bp, Homo sapiens
tgctcagatgccgag

SEQ ID NO: 11114 - DNA, 15 bp, Homo sapiens
atgctcagatgccga

SEQ ID NO: 11115 - DNA, 15 bp, Homo sapiens
gatgctcagatgccg

SEQ ID NO: 11116 - DNA, 15 bp, Homo sapiens
ggatgctcagatgcc

SEQ ID NO: 11117 - DNA, 15 bp, Homo sapiens
gggatgctcagatgc

SEQ ID NO: 11118 - DNA, 15 bp, Homo sapiens
ggggatgctcagatg

SEQ ID NO: 11119 - DNA, 15 bp, Homo sapiens
aggggatgctcagat

SEQ ID NO: 11120 - DNA, 15 bp, Homo sapiens
aaggggatgctcaga

SEQ ID NO: 11121 - DNA, 15 bp, Homo sapiens
gaaggggatgctcag

SEQ ID NO: 11122 - DNA, 15 bp, Homo sapiens
agaaggggatgctca

SEQ ID NO: 11123 - DNA, 15 bp, Homo sapiens
cagaaggggatgctc

SEQ ID NO: 11124 - DNA, 15 bp, Homo sapiens
acagaaggggatgct

SEQ ID NO: 11125 - DNA, 15 bp, Homo sapiens
tacagaaggggatgc

SEQ ID NO: 11126 - DNA, 15 bp, Homo sapiens
atacagaaggggatg

SEQ ID NO: 11127 - DNA, 15 bp, Homo sapiens
tatacagaaggggat

SEQ ID NO: 11128 - DNA, 15 bp, Homo sapiens
ttatacagaagggga

SEQ ID NO: 11129 - DNA, 15 bp, Homo sapiens
attatacagaagggg

SEQ ID NO: 11130 - DNA, 15 bp, Homo sapiens
cattatacagaaggg

SEQ ID NO: 11131 - DNA, 15 bp, Homo sapiens
ccattatacagaagg

SEQ ID NO: 11132 - DNA, 15 bp, Homo sapiens
cccattatacagaag

SEQ ID NO: 11133 - DNA, 15 bp, Homo sapiens
ccccattatacagaa

SEQ ID NO: 11134 - DNA, 15 bp, Homo sapiens
accccattatacaga

SEQ ID NO: 11135 - DNA, 15 bp, Homo sapiens
aaccccattatacag

SEQ ID NO: 11136 - DNA, 15 bp, Homo sapiens
caaccccattataca

SEQ ID NO: 11137 - DNA, 15 bp, Homo sapiens
ccaaccccattatac

SEQ ID NO: 11138 - DNA, 15 bp, Homo sapiens
gccaaccccattata

SEQ ID NO: 11139 - DNA, 15 bp, Homo sapiens
agccaaccccattat

SEQ ID NO: 11140 - DNA, 15 bp, Homo sapiens
cagccaaccccatta

SEQ ID NO: 11141 - DNA, 15 bp, Homo sapiens
ccagccaaccccatt

SEQ ID NO: 11142 - DNA, 15 bp, Homo sapiens
cccagccaaccccat

SEQ ID NO: 11143 - DNA, 15 bp, Homo sapiens
gcccagccaacccca

SEQ ID NO: 11144 - DNA, 15 bp, Homo sapiens
tgcccagccaacccc

SEQ ID NO: 11145 - DNA, 15 bp, Homo sapiens
ctgcccagccaaccc

SEQ ID NO: 11146 - DNA, 15 bp, Homo sapiens
actgcccagccaacc

SEQ ID NO: 11147 - DNA, 15 bp, Homo sapiens
gactgcccagccaac

SEQ ID NO: 11148 - DNA, 15 bp, Homo sapiens
ggactgcccagccaa

SEQ ID NO: 11149 - DNA, 15 bp, Homo sapiens
gggactgcccagcca

SEQ ID NO: 11150 - DNA, 15 bp, Homo sapiens
agggactgcccagcc

SEQ ID NO: 11151 - DNA, 15 bp, Homo sapiens
aagggactgcccagc

SEQ ID NO: 11152 - DNA, 15 bp, Homo sapiens
gaagggactgcccag

SEQ ID NO: 11153 - DNA, 15 bp, Homo sapiens
ggaagggactgccca

SEQ ID NO: 11154 - DNA, 15 bp, Homo sapiens
tggaagggactgccc

SEQ ID NO: 11155 - DNA, 15 bp, Homo sapiens
ctggaagggactgcc

SEQ ID NO: 11156 - DNA, 15 bp, Homo sapiens
gctggaagggactgc

SEQ ID NO: 11157 - DNA, 15 bp, Homo sapiens
agctggaagggactg

SEQ ID NO: 11158 - DNA, 15 bp, Homo sapiens
gagctggaagggact

SEQ ID NO: 11159 - DNA, 15 bp, Homo sapiens
agagctggaagggac

SEQ ID NO: 11160 - DNA, 15 bp, Homo sapiens
cagagctggaaggga

SEQ ID NO: 11161 - DNA, 15 bp, Homo sapiens
ccagagctggaaggg

SEQ ID NO: 11162 - DNA, 15 bp, Homo sapiens
gccagagctggaagg

SEQ ID NO: 11163 - DNA, 15 bp, Homo sapiens
agccagagctggaag

SEQ ID NO: 11164 - DNA, 15 bp, Homo sapiens
aagccagagctggaa

SEQ ID NO: 11165 - DNA, 15 bp, Homo sapiens
gaagccagagctgga

SEQ ID NO: 11166 - DNA, 15 bp, Homo sapiens
ggaagccagagctgg

SEQ ID NO: 11167 - DNA, 15 bp, Homo sapiens
aggaagccagagctg

SEQ ID NO: 11168 - DNA, 15 bp, Homo sapiens
gaggaagccagagct

SEQ ID NO: 11169 - DNA, 15 bp, Homo sapiens
agaggaagccagagc

SEQ ID NO: 11170 - DNA, 15 bp, Homo sapiens
gagaggaagccagag

SEQ ID NO: 11171 - DNA, 15 bp, Homo sapiens
tgagaggaagccaga

SEQ ID NO: 11172 - DNA, 15 bp, Homo sapiens
ctgagaggaagccag

SEQ ID NO: 11173 - DNA, 15 bp, Homo sapiens
tctgagaggaagcca

SEQ ID NO: 11174 - DNA, 15 bp, Homo sapiens
gtctgagaggaagcc

SEQ ID NO: 11175 - DNA, 15 bp, Homo sapiens
ggtctgagaggaagc

SEQ ID NO: 11176 - DNA, 15 bp, Homo sapiens
tggtctgagaggaag

SEQ ID NO: 11177 - DNA, 15 bp, Homo sapiens
ctggtctgagaggaa

SEQ ID NO: 11178 - DNA, 15 bp, Homo sapiens
cctggtctgagagga

SEQ ID NO: 11179 - DNA, 15 bp, Homo sapiens
tcctggtctgagagg

SEQ ID NO: 11180 - DNA, 15 bp, Homo sapiens
atcctggtctgagag

SEQ ID NO: 11181 - DNA, 15 bp, Homo sapiens
aatcctggtctgaga

SEQ ID NO: 11182 - DNA, 15 bp, Homo sapiens
taatcctggtctgag

SEQ ID NO: 11183 - DNA, 15 bp, Homo sapiens
ataatcctggtctga

SEQ ID NO: 11184 - DNA, 15 bp, Homo sapiens
tataatcctggtctg

SEQ ID NO: 11185 - DNA, 15 bp, Homo sapiens
ctataatcctggtct

SEQ ID NO: 11186 - DNA, 15 bp, Homo sapiens
cctataatcctggtc

SEQ ID NO: 11187 - DNA, 15 bp, Homo sapiens
tcctataatcctggt

SEQ ID NO: 11188 - DNA, 15 bp, Homo sapiens
atcctataatcctgg

SEQ ID NO: 11189 - DNA, 15 bp, Homo sapiens
gatcctataatcctg

SEQ ID NO: 11190 - DNA, 15 bp, Homo sapiens
ggatcctataatcct

SEQ ID NO: 11191 - DNA, 15 bp, Homo sapiens
aggatcctataatcc

SEQ ID NO: 11192 - DNA, 15 bp, Homo sapiens
caggatcctataatc

SEQ ID NO: 11193 - DNA, 15 bp, Homo sapiens
tcaggatcctataat

SEQ ID NO: 11194 - DNA, 15 bp, Homo sapiens
ttcaggatcctataa

SEQ ID NO: 11195 - DNA, 15 bp, Homo sapiens
tttcaggatcctata

SEQ ID NO: 11196 - DNA, 15 bp, Homo sapiens
ttttcaggatcctat

SEQ ID NO: 11197 - DNA, 15 bp, Homo sapiens
cttttcaggatccta

SEQ ID NO: 11198 - DNA, 15 bp, Homo sapiens
gcttttcaggatcct

SEQ ID NO: 11199 - DNA, 15 bp, Homo sapiens
ggcttttcaggatcc

SEQ ID NO: 11200 - DNA, 15 bp, Homo sapiens
tggcttttcaggatc

SEQ ID NO: 11201 - DNA, 15 bp, Homo sapiens
ctggcttttcaggat

SEQ ID NO: 11202 - DNA, 15 bp, Homo sapiens
actggcttttcagga

SEQ ID NO: 11203 - DNA, 15 bp, Homo sapiens
cactggcttttcagg

SEQ ID NO: 11204 - DNA, 15 bp, Homo sapiens
gcactggcttttcag

SEQ ID NO: 11205 - DNA, 15 bp, Homo sapiens
agcactggcttttca

SEQ ID NO: 11206 - DNA, 15 bp, Homo sapiens
aagcactggcttttc

SEQ ID NO: 11207 - DNA, 15 bp, Homo sapiens
gaagcactggctttt

SEQ ID NO: 11208 - DNA, 15 bp, Homo sapiens
ggaagcactggcttt

SEQ ID NO: 11209 - DNA, 15 bp, Homo sapiens
gggaagcactggctt

SEQ ID NO: 11210 - DNA, 15 bp, Homo sapiens
agggaagcactggct

SEQ ID NO: 11211 - DNA, 15 bp, Homo sapiens
gagggaagcactggc

SEQ ID NO: 11212 - DNA, 15 bp, Homo sapiens
tgagggaagcactgg

SEQ ID NO: 11213 - DNA, 15 bp, Homo sapiens
ctgagggaagcactg

SEQ ID NO: 11214 - DNA, 15 bp, Homo sapiens
cctgagggaagcact

SEQ ID NO: 11215 - DNA, 15 bp, Homo sapiens
ccctgagggaagcac

SEQ ID NO: 11216 - DNA, 15 bp, Homo sapiens
tccctgagggaagca

SEQ ID NO: 11217 - DNA, 15 bp, Homo sapiens
ctccctgagggaagc

SEQ ID NO: 11218 - DNA, 15 bp, Homo sapiens
actccctgagggaag

SEQ ID NO: 11219 - DNA, 15 bp, Homo sapiens
cactccctgagggaa

SEQ ID NO: 11220 - DNA, 15 bp, Homo sapiens
ccactccctgaggga

SEQ ID NO: 11221 - DNA, 15 bp, Homo sapiens
tccactccctgaggg

SEQ ID NO: 11222 - DNA, 15 bp, Homo sapiens
ttccactccctgagg

SEQ ID NO: 11223 - DNA, 15 bp, Homo sapiens
cttccactccctgag

SEQ ID NO: 11224 - DNA, 15 bp, Homo sapiens
ccttccactccctga

SEQ ID NO: 11225 - DNA, 15 bp, Homo sapiens
accttccactccctg

SEQ ID NO: 11226 - DNA, 15 bp, Homo sapiens
aaccttccactccct

SEQ ID NO: 11227 - DNA, 15 bp, Homo sapiens
gaaccttccactccc

SEQ ID NO: 11228 - DNA, 15 bp, Homo sapiens
agaaccttccactcc

SEQ ID NO: 11229 - DNA, 15 bp, Homo sapiens
cagaaccttccactc

SEQ ID NO: 11230 - DNA, 15 bp, Homo sapiens
ccagaaccttccact

SEQ ID NO: 11231 - DNA, 15 bp, Homo sapiens
cccagaaccttccac

SEQ ID NO: 11232 - DNA, 15 bp, Homo sapiens
ccccagaaccttcca

SEQ ID NO: 11233 - DNA, 15 bp, Homo sapiens
gccccagaaccttcc

SEQ ID NO: 11234 - DNA, 15 bp, Homo sapiens
agccccagaaccttc

SEQ ID NO: 11235 - DNA, 15 bp, Homo sapiens
gagccccagaacctt

SEQ ID NO: 11236 - DNA, 15 bp, Homo sapiens
tgagccccagaacct

SEQ ID NO: 11237 - DNA, 15 bp, Homo sapiens
ctgagccccagaacc

SEQ ID NO: 11238 - DNA, 15 bp, Homo sapiens
gctgagccccagaac

SEQ ID NO: 11239 - DNA, 15 bp, Homo sapiens
tgctgagccccagaa

SEQ ID NO: 11240 - DNA, 15 bp, Homo sapiens
ctgctgagccccaga

SEQ ID NO: 11241 - DNA, 15 bp, Homo sapiens
cctgctgagccccag

SEQ ID NO: 11242 - DNA, 15 bp, Homo sapiens
ccctgctgagcccca

SEQ ID NO: 11243 - DNA, 15 bp, Homo sapiens
cccctgctgagcccc

SEQ ID NO: 11244 - DNA, 15 bp, Homo sapiens
ccccctgctgagccc

SEQ ID NO: 11245 - DNA, 15 bp, Homo sapiens
gccccctgctgagcc

SEQ ID NO: 11246 - DNA, 15 bp, Homo sapiens
ggccccctgctgagc

SEQ ID NO: 11247 - DNA, 15 bp, Homo sapiens
gggccccctgctgag

SEQ ID NO: 11248 - DNA, 15 bp, Homo sapiens
cgggccccctgctga

SEQ ID NO: 11249 - DNA, 15 bp, Homo sapiens
ccgggccccctgctg

SEQ ID NO: 11250 - DNA, 15 bp, Homo sapiens
tccgggccccctgct

SEQ ID NO: 11251 - DNA, 15 bp, Homo sapiens
ctccgggccccctgc

SEQ ID NO: 11252 - DNA, 15 bp, Homo sapiens
gctccgggccccctg

SEQ ID NO: 11253 - DNA, 15 bp, Homo sapiens
ggctccgggccccct

SEQ ID NO: 11254 - DNA, 15 bp, Homo sapiens
tggctccgggccccc

SEQ ID NO: 11255 - DNA, 15 bp, Homo sapiens
atggctccgggcccc

SEQ ID NO: 11256 - DNA, 15 bp, Homo sapiens
aatggctccgggccc

SEQ ID NO: 11257 - DNA, 15 bp, Homo sapiens
caatggctccgggcc

SEQ ID NO: 11258 - DNA, 15 bp, Homo sapiens
acaatggctccgggc

SEQ ID NO: 11259 - DNA, 15 bp, Homo sapiens
cacaatggctccggg

SEQ ID NO: 11260 - DNA, 15 bp, Homo sapiens
ccacaatggctccgg

SEQ ID NO: 11261 - DNA, 15 bp, Homo sapiens
tccacaatggctccg

SEQ ID NO: 11262 - DNA, 15 bp, Homo sapiens
ctccacaatggctcc

SEQ ID NO: 11263 - DNA, 15 bp, Homo sapiens
cctccacaatggctc

SEQ ID NO: 11264 - DNA, 15 bp, Homo sapiens
ccctccacaatggct

SEQ ID NO: 11265 - DNA, 15 bp, Homo sapiens
gccctccacaatggc

SEQ ID NO: 11266 - DNA, 15 bp, Homo sapiens
agccctccacaatgg

SEQ ID NO: 11267 - DNA, 15 bp, Homo sapiens
aagccctccacaatg

SEQ ID NO: 11268 - DNA, 15 bp, Homo sapiens
aaagccctccacaat

SEQ ID NO: 11269 - DNA, 15 bp, Homo sapiens
gaaagccctccacaa

SEQ ID NO: 11270 - DNA, 15 bp, Homo sapiens
tgaaagccctccaca

SEQ ID NO: 11271 - DNA, 15 bp, Homo sapiens
ttgaaagccctccac

SEQ ID NO: 11272 - DNA, 15 bp, Homo sapiens
cttgaaagccctcca

SEQ ID NO: 11273 - DNA, 15 bp, Homo sapiens
ccttgaaagccctcc

SEQ ID NO: 11274 - DNA, 15 bp, Homo sapiens
accttgaaagccctc

SEQ ID NO: 11275 - DNA, 15 bp, Homo sapiens
caccttgaaagccct

SEQ ID NO: 11276 - DNA, 15 bp, Homo sapiens
tcaccttgaaagccc

SEQ ID NO: 11277 - DNA, 15 bp, Homo sapiens
ctcaccttgaaagcc

SEQ ID NO: 11278 - DNA, 15 bp, Homo sapiens
cctcaccttgaaagc

SEQ ID NO: 11279 - DNA, 15 bp, Homo sapiens
tcctcaccttgaaag

SEQ ID NO: 11280 - DNA, 15 bp, Homo sapiens
gtcctcaccttgaaa

SEQ ID NO: 11281 - DNA, 15 bp, Homo sapiens
tgtcctcaccttgaa

SEQ ID NO: 11282 - DNA, 15 bp, Homo sapiens
ttgtcctcaccttga

SEQ ID NO: 11283 - DNA, 15 bp, Homo sapiens
attgtcctcaccttg

SEQ ID NO: 11284 - DNA, 15 bp, Homo sapiens
tattgtcctcacctt

SEQ ID NO: 11285 - DNA, 15 bp, Homo sapiens
ctattgtcctcacct

SEQ ID NO: 11286 - DNA, 15 bp, Homo sapiens
tctattgtcctcacc

SEQ ID NO: 11287 - DNA, 15 bp, Homo sapiens
ttctattgtcctcac

SEQ ID NO: 11288 - DNA, 15 bp, Homo sapiens
cttctattgtcctca

SEQ ID NO: 11289 - DNA, 15 bp, Homo sapiens
tcttctattgtcctc

SEQ ID NO: 11290 - DNA, 15 bp, Homo sapiens
ctcttctattgtcct

SEQ ID NO: 11291 - DNA, 15 bp, Homo sapiens
gctcttctattgtcc

SEQ ID NO: 11292 - DNA, 15 bp, Homo sapiens
tgctcttctattgtc

SEQ ID NO: 11293 - DNA, 15 bp, Homo sapiens
ctgctcttctattgt

SEQ ID NO: 11294 - DNA, 15 bp, Homo sapiens
cctgctcttctattg

SEQ ID NO: 11295 - DNA, 15 bp, Homo sapiens
acctgctcttctatt

SEQ ID NO: 11296 - DNA, 15 bp, Homo sapiens
gacctgctcttctat

SEQ ID NO: 11297 - DNA, 15 bp, Homo sapiens
agacctgctcttcta

SEQ ID NO: 11298 - DNA, 15 bp, Homo sapiens
aagacctgctcttct

SEQ ID NO: 11299 - DNA, 15 bp, Homo sapiens
caagacctgctcttc

SEQ ID NO: 11300 - DNA, 15 bp, Homo sapiens
gcaagacctgctctt

SEQ ID NO: 11301 - DNA, 15 bp, Homo sapiens
cgcaagacctgctct

SEQ ID NO: 11302 - DNA, 15 bp, Homo sapiens
acgcaagacctgctc

SEQ ID NO: 11303 - DNA, 15 bp, Homo sapiens
cacgcaagacctgct

SEQ ID NO: 11304 - DNA, 15 bp, Homo sapiens
ccacgcaagacctgc

SEQ ID NO: 11305 - DNA, 15 bp, Homo sapiens
gccacgcaagacctg

SEQ ID NO: 11306 - DNA, 15 bp, Homo sapiens
agccacgcaagacct

SEQ ID NO: 11307 - DNA, 15 bp, Homo sapiens
aagccacgcaagacc

SEQ ID NO: 11308 - DNA, 15 bp, Homo sapiens
caagccacgcaagac

SEQ ID NO: 11309 - DNA, 15 bp, Homo sapiens
ccaagccacgcaaga

SEQ ID NO: 11310 - DNA, 15 bp, Homo sapiens
tccaagccacgcaag

SEQ ID NO: 11311 - DNA, 15 bp, Homo sapiens
gtccaagccacgcaa

SEQ ID NO: 11312 - DNA, 15 bp, Homo sapiens
tgtccaagccacgca

SEQ ID NO: 11313 - DNA, 15 bp, Homo sapiens
ctgtccaagccacgc

SEQ ID NO: 11314 - DNA, 15 bp, Homo sapiens
cctgtccaagccacg

SEQ ID NO: 11315 - DNA, 15 bp, Homo sapiens
ccctgtccaagccac

SEQ ID NO: 11316 - DNA, 15 bp, Homo sapiens
tccctgtccaagcca

SEQ ID NO: 11317 - DNA, 15 bp, Homo sapiens
ttccctgtccaagcc

SEQ ID NO: 11318 - DNA, 15 bp, Homo sapiens
tttccctgtccaagc

SEQ ID NO: 11319 - DNA, 15 bp, Homo sapiens
ctttccctgtccaag

SEQ ID NO: 11320 - DNA, 15 bp, Homo sapiens
tctttccctgtccaa

SEQ ID NO: 11321 - DNA, 15 bp, Homo sapiens
ctctttccctgtcca

SEQ ID NO: 11322 - DNA, 15 bp, Homo sapiens
cctctttccctgtcc

SEQ ID NO: 11323 - DNA, 15 bp, Homo sapiens
tcctctttccctgtc

SEQ ID NO: 11324 - DNA, 15 bp, Homo sapiens
ctcctctttccctgt

SEQ ID NO: 11325 - DNA, 15 bp, Homo sapiens
tctcctctttccctg

SEQ ID NO: 11326 - DNA, 15 bp, Homo sapiens
ttctcctctttccct

SEQ ID NO: 11327 - DNA, 15 bp, Homo sapiens
cttctcctctttccc

SEQ ID NO: 11328 - DNA, 15 bp, Homo sapiens
ccttctcctctttcc

SEQ ID NO: 11329 - DNA, 15 bp, Homo sapiens
tccttctcctctttc

SEQ ID NO: 11330 - DNA, 15 bp, Homo sapiens
ctccttctcctcttt

SEQ ID NO: 11331 - DNA, 15 bp, Homo sapiens
actccttctcctctt

SEQ ID NO: 11332 - DNA, 15 bp, Homo sapiens
cactccttctcctct

SEQ ID NO: 11333 - DNA, 15 bp, Homo sapiens
ccactccttctcctc

SEQ ID NO: 11334 - DNA, 15 bp, Homo sapiens
cccactccttctcct

SEQ ID NO: 11335 - DNA, 15 bp, Homo sapiens
gcccactccttctcc

SEQ ID NO: 11336 - DNA, 15 bp, Homo sapiens
tgcccactccttctc

SEQ ID NO: 11337 - DNA, 15 bp, Homo sapiens
atgcccactccttct

SEQ ID NO: 11338 - DNA, 15 bp, Homo sapiens
aatgcccactccttc

SEQ ID NO: 11339 - DNA, 15 bp, Homo sapiens
aaatgcccactcctt

SEQ ID NO: 11340 - DNA, 15 bp, Homo sapiens
caaatgcccactcct

SEQ ID NO: 11341 - DNA, 15 bp, Homo sapiens
tcaaatgcccactcc

SEQ ID NO: 11342 - DNA, 15 bp, Homo sapiens
ctcaaatgcccactc

SEQ ID NO: 11343 - DNA, 15 bp, Homo sapiens
cctcaaatgcccact

SEQ ID NO: 11344 - DNA, 15 bp, Homo sapiens
gcctcaaatgcccac

SEQ ID NO: 11345 - DNA, 15 bp, Homo sapiens
tgcctcaaatgccca

SEQ ID NO: 11346 - DNA, 15 bp, Homo sapiens
ctgcctcaaatgccc

SEQ ID NO: 11347 - DNA, 15 bp, Homo sapiens
cctgcctcaaatgcc

SEQ ID NO: 11348 - DNA, 15 bp, Homo sapiens
ccctgcctcaaatgc

SEQ ID NO: 11349 - DNA, 15 bp, Homo sapiens
cccctgcctcaaatg

SEQ ID NO: 11350 - DNA, 15 bp, Homo sapiens
ccccctgcctcaaat

SEQ ID NO: 11351 - DNA, 15 bp, Homo sapiens
accccctgcctcaaa

SEQ ID NO: 11352 - DNA, 15 bp, Homo sapiens
caccccctgcctcaa

SEQ ID NO: 11353 - DNA, 15 bp, Homo sapiens
acaccccctgcctca

SEQ ID NO: 11354 - DNA, 15 bp, Homo sapiens
tacaccccctgcctc

SEQ ID NO: 11355 - DNA, 15 bp, Homo sapiens
ctacaccccctgcct

SEQ ID NO: 11356 - DNA, 15 bp, Homo sapiens
gctacaccccctgcc

SEQ ID NO: 11357 - DNA, 15 bp, Homo sapiens
tgctacaccccctgc

SEQ ID NO: 11358 - DNA, 15 bp, Homo sapiens
atgctacaccccctg

SEQ ID NO: 11359 - DNA, 15 bp, Homo sapiens
catgctacaccccct

SEQ ID NO: 11360 - DNA, 15 bp, Homo sapiens
tcatgctacaccccc

SEQ ID NO: 11361 - DNA, 15 bp, Homo sapiens
ctcatgctacacccc

SEQ ID NO: 11362 - DNA, 15 bp, Homo sapiens
gctcatgctacaccc

SEQ ID NO: 11363 - DNA, 15 bp, Homo sapiens
ggctcatgctacacc

SEQ ID NO: 11364 - DNA, 15 bp, Homo sapiens
tggctcatgctacac

SEQ ID NO: 11365 - DNA, 15 bp, Homo sapiens
ctggctcatgctaca

SEQ ID NO: 11366 - DNA, 15 bp, Homo sapiens
cctggctcatgctac

SEQ ID NO: 11367 - DNA, 15 bp, Homo sapiens
gcctggctcatgcta

SEQ ID NO: 11368 - DNA, 15 bp, Homo sapiens
agcctggctcatgct

SEQ ID NO: 11369 - DNA, 15 bp, Homo sapiens
aagcctggctcatgc

SEQ ID NO: 11370 - DNA, 15 bp, Homo sapiens
caagcctggctcatg

SEQ ID NO: 11371 - DNA, 15 bp, Homo sapiens
tcaagcctggctcat

SEQ ID NO: 11372 - DNA, 15 bp, Homo sapiens
ctcaagcctggctca

SEQ ID NO: 11373 - DNA, 15 bp, Homo sapiens
cctcaagcctggctc

SEQ ID NO: 11374 - DNA, 15 bp, Homo sapiens
ccctcaagcctggct

SEQ ID NO: 11375 - DNA, 15 bp, Homo sapiens
gccctcaagcctggc

SEQ ID NO: 11376 - DNA, 15 bp, Homo sapiens
ggccctcaagcctgg

SEQ ID NO: 11377 - DNA, 15 bp, Homo sapiens
tggccctcaagcctg

SEQ ID NO: 11378 - DNA, 15 bp, Homo sapiens
ctggccctcaagcct

SEQ ID NO: 11379 - DNA, 15 bp, Homo sapiens
tctggccctcaagcc

SEQ ID NO: 11380 - DNA, 15 bp, Homo sapiens
ttctggccctcaagc

SEQ ID NO: 11381 - DNA, 15 bp, Homo sapiens
tttctggccctcaag

SEQ ID NO: 11382 - DNA, 15 bp, Homo sapiens
atttctggccctcaa

SEQ ID NO: 11383 - DNA, 15 bp, Homo sapiens
aatttctggccctca

SEQ ID NO: 11384 - DNA, 15 bp, Homo sapiens
caatttctggccctc

SEQ ID NO: 11385 - DNA, 15 bp, Homo sapiens
ccaatttctggccct

SEQ ID NO: 11386 - DNA, 15 bp, Homo sapiens
cccaatttctggccc

SEQ ID NO: 11387 - DNA, 15 bp, Homo sapiens
ccccaatttctggcc

SEQ ID NO: 11388 - DNA, 15 bp, Homo sapiens
accccaatttctggc

SEQ ID NO: 11389 - DNA, 15 bp, Homo sapiens
caccccaatttctgg

SEQ ID NO: 11390 - DNA, 15 bp, Homo sapiens
tcaccccaatttctg

SEQ ID NO: 11391 - DNA, 15 bp, Homo sapiens
ttcaccccaatttct

SEQ ID NO: 11392 - DNA, 15 bp, Homo sapiens
gttcaccccaatttc

SEQ ID NO: 11393 - DNA, 15 bp, Homo sapiens
agttcaccccaattt

SEQ ID NO: 11394 - DNA, 15 bp, Homo sapiens
gagttcaccccaatt

SEQ ID NO: 11395 - DNA, 15 bp, Homo sapiens
agagttcaccccaat

SEQ ID NO: 11396 - DNA, 15 bp, Homo sapiens
cagagttcaccccaa

SEQ ID NO: 11397 - DNA, 15 bp, Homo sapiens
tcagagttcacccca

SEQ ID NO: 11398 - DNA, 15 bp, Homo sapiens
atcagagttcacccc

SEQ ID NO: 11399 - DNA, 15 bp, Homo sapiens
catcagagttcaccc

SEQ ID NO: 11400 - DNA, 15 bp, Homo sapiens
ccatcagagttcacc

SEQ ID NO: 11401 - DNA, 15 bp, Homo sapiens
cccatcagagttcac

SEQ ID NO: 11402 - DNA, 15 bp, Homo sapiens
ccccatcagagttca

SEQ ID NO: 11403 - DNA, 15 bp, Homo sapiens
cccccatcagagttc

SEQ ID NO: 11404 - DNA, 15 bp, Homo sapiens
gcccccatcagagtt

SEQ ID NO: 11405 - DNA, 15 bp, Homo sapiens
agcccccatcagagt

SEQ ID NO: 11406 - DNA, 15 bp, Homo sapiens
cagcccccatcagag

SEQ ID NO: 11407 - DNA, 15 bp, Homo sapiens
ccagcccccatcaga

SEQ ID NO: 11408 - DNA, 15 bp, Homo sapiens
cccagcccccatcag

SEQ ID NO: 11409 - DNA, 15 bp, Homo sapiens
acccagcccccatca

SEQ ID NO: 11410 - DNA, 15 bp, Homo sapiens
tacccagcccccatc

SEQ ID NO: 11411 - DNA, 15 bp, Homo sapiens
ctacccagcccccat

SEQ ID NO: 11412 - DNA, 15 bp, Homo sapiens
tctacccagccccca

SEQ ID NO: 11413 - DNA, 15 bp, Homo sapiens
ctctacccagccccc

SEQ ID NO: 11414 - DNA, 15 bp, Homo sapiens
tctctacccagcccc

SEQ ID NO: 11415 - DNA, 15 bp, Homo sapiens
ttctctacccagccc

SEQ ID NO: 11416 - DNA, 15 bp, Homo sapiens
cttctctacccagcc

SEQ ID NO: 11417 - DNA, 15 bp, Homo sapiens
gcttctctacccagc

SEQ ID NO: 11418 - DNA, 15 bp, Homo sapiens
agcttctctacccag

SEQ ID NO: 11419 - DNA, 15 bp, Homo sapiens
aagcttctctaccca

SEQ ID NO: 11420 - DNA, 15 bp, Homo sapiens
gaagcttctctaccc

SEQ ID NO: 11421 - DNA, 15 bp, Homo sapiens
agaagcttctctacc

SEQ ID NO: 11422 - DNA, 15 bp, Homo sapiens
tagaagcttctctac

SEQ ID NO: 11423 - DNA, 15 bp, Homo sapiens
gtagaagcttctcta

SEQ ID NO: 11424 - DNA, 15 bp, Homo sapiens
tgtagaagcttctct

SEQ ID NO: 11425 - DNA, 15 bp, Homo sapiens
ctgtagaagcttctc

SEQ ID NO: 11426 - DNA, 15 bp, Homo sapiens
cctgtagaagcttct

SEQ ID NO: 11427 - DNA, 15 bp, Homo sapiens
gcctgtagaagcttc

SEQ ID NO: 11428 - DNA, 15 bp, Homo sapiens
ggcctgtagaagctt

SEQ ID NO: 11429 - DNA, 15 bp, Homo sapiens
gggcctgtagaagct

SEQ ID NO: 11430 - DNA, 15 bp, Homo sapiens
ggggcctgtagaagc

SEQ ID NO: 11431 - DNA, 15 bp, Homo sapiens
tggggcctgtagaag

SEQ ID NO: 11432 - DNA, 15 bp, Homo sapiens
ctggggcctgtagaa

SEQ ID NO: 11433 - DNA, 15 bp, Homo sapiens
gctggggcctgtaga

SEQ ID NO: 11434 - DNA, 15 bp, Homo sapiens
agctggggcctgtag

SEQ ID NO: 11435 - DNA, 15 bp, Homo sapiens
gagctggggcctgta

SEQ ID NO: 11436 - DNA, 15 bp, Homo sapiens
tgagctggggcctgt

SEQ ID NO: 11437 - DNA, 15 bp, Homo sapiens
ttgagctggggcctg

SEQ ID NO: 11438 - DNA, 15 bp, Homo sapiens
cttgagctggggcct

SEQ ID NO: 11439 - DNA, 15 bp, Homo sapiens
tcttgagctggggcc

SEQ ID NO: 11440 - DNA, 15 bp, Homo sapiens
ctcttgagctggggc

SEQ ID NO: 11441 - DNA, 15 bp, Homo sapiens
tctcttgagctgggg

SEQ ID NO: 11442 - DNA, 15 bp, Homo sapiens
gtctcttgagctggg

SEQ ID NO: 11443 - DNA, 15 bp, Homo sapiens
ggtctcttgagctgg

SEQ ID NO: 11444 - DNA, 15 bp, Homo sapiens
gggtctcttgagctg

SEQ ID NO: 11445 - DNA, 15 bp, Homo sapiens
ggggtctcttgagct

SEQ ID NO: 11446 - DNA, 15 bp, Homo sapiens
tggggtctcttgagc

SEQ ID NO: 11447 - DNA, 15 bp, Homo sapiens
atggggtctcttgag

SEQ ID NO: 11448 - DNA, 15 bp, Homo sapiens
gatggggtctcttga

SEQ ID NO: 11449 - DNA, 15 bp, Homo sapiens
agatggggtctcttg

SEQ ID NO: 11450 - DNA, 15 bp, Homo sapiens
gagatggggtctctt

SEQ ID NO: 11451 - DNA, 15 bp, Homo sapiens
agagatggggtctct

SEQ ID NO: 11452 - DNA, 15 bp, Homo sapiens
gagagatggggtctc

SEQ ID NO: 11453 - DNA, 15 bp, Homo sapiens
ggagagatggggtct

SEQ ID NO: 11454 - DNA, 15 bp, Homo sapiens
aggagagatggggtc

SEQ ID NO: 11455 - DNA, 15 bp, Homo sapiens
gaggagagatggggt

SEQ ID NO: 11456 - DNA, 15 bp, Homo sapiens
ggaggagagatgggg

SEQ ID NO: 11457 - DNA, 15 bp, Homo sapiens
aggaggagagatggg

SEQ ID NO: 11458 - DNA, 15 bp, Homo sapiens
gaggaggagagatgg

SEQ ID NO: 11459 - DNA, 15 bp, Homo sapiens
agaggaggagagatg

SEQ ID NO: 11460 - DNA, 15 bp, Homo sapiens
gagaggaggagagat

SEQ ID NO: 11461 - DNA, 15 bp, Homo sapiens
agagaggaggagaga

SEQ ID NO: 11462 - DNA, 15 bp, Homo sapiens
cagagaggaggagag

SEQ ID NO: 11463 - DNA, 15 bp, Homo sapiens
acagagaggaggaga

SEQ ID NO: 11464 - DNA, 15 bp, Homo sapiens
gacagagaggaggag

SEQ ID NO: 11465 - DNA, 15 bp, Homo sapiens
tgacagagaggagga

SEQ ID NO: 11466 - DNA, 15 bp, Homo sapiens
gtgacagagaggagg

SEQ ID NO: 11467 - DNA, 15 bp, Homo sapiens
agtgacagagaggag

SEQ ID NO: 11468 - DNA, 15 bp, Homo sapiens
aagtgacagagagga

SEQ ID NO: 11469 - DNA, 15 bp, Homo sapiens
caagtgacagagagg

SEQ ID NO: 11470 - DNA, 15 bp, Homo sapiens
gcaagtgacagagag

SEQ ID NO: 11471 - DNA, 15 bp, Homo sapiens
ggcaagtgacagaga

SEQ ID NO: 11472 - DNA, 15 bp, Homo sapiens
tggcaagtgacagag

SEQ ID NO: 11473 - DNA, 15 bp, Homo sapiens
atggcaagtgacaga

SEQ ID NO: 11474 - DNA, 15 bp, Homo sapiens
catggcaagtgacag

SEQ ID NO: 11475 - DNA, 15 bp, Homo sapiens
gcatggcaagtgaca

SEQ ID NO: 11476 - DNA, 15 bp, Homo sapiens
agcatggcaagtgac

SEQ ID NO: 11477 - DNA, 15 bp, Homo sapiens
cagcatggcaagtga

SEQ ID NO: 11478 - DNA, 15 bp, Homo sapiens
ccagcatggcaagtg

SEQ ID NO: 11479 - DNA, 15 bp, Homo sapiens
tccagcatggcaagt

SEQ ID NO: 11480 - DNA, 15 bp, Homo sapiens
atccagcatggcaag

SEQ ID NO: 11481 - DNA, 15 bp, Homo sapiens
gatccagcatggcaa

SEQ ID NO: 11482 - DNA, 15 bp, Homo sapiens
ggatccagcatggca

SEQ ID NO: 11483 - DNA, 15 bp, Homo sapiens
cggatccagcatggc

SEQ ID NO: 11484 - DNA, 15 bp, Homo sapiens
acggatccagcatgg

SEQ ID NO: 11485 - DNA, 15 bp, Homo sapiens
cacggatccagcatg

SEQ ID NO: 11486 - DNA, 15 bp, Homo sapiens
gcacggatccagcat

SEQ ID NO: 11487 - DNA, 15 bp, Homo sapiens
tgcacggatccagca

SEQ ID NO: 11488 - DNA, 15 bp, Homo sapiens
atgcacggatccagc

SEQ ID NO: 11489 - DNA, 15 bp, Homo sapiens
catgcacggatccag

SEQ ID NO: 11490 - DNA, 15 bp, Homo sapiens
tcatgcacggatcca

SEQ ID NO: 11491 - DNA, 15 bp, Homo sapiens
atcatgcacggatcc

SEQ ID NO: 11492 - DNA, 15 bp, Homo sapiens
gatcatgcacggatc

SEQ ID NO: 11493 - DNA, 15 bp, Homo sapiens
tgatcatgcacggat

SEQ ID NO: 11494 - DNA, 15 bp, Homo sapiens
gtgatcatgcacgga

SEQ ID NO: 11495 - DNA, 15 bp, Homo sapiens
tgtgatcatgcacgg

SEQ ID NO: 11496 - DNA, 15 bp, Homo sapiens
gtgtgatcatgcacg

SEQ ID NO: 11497 - DNA, 15 bp, Homo sapiens
agtgtgatcatgcac

SEQ ID NO: 11498 - DNA, 15 bp, Homo sapiens
gagtgtgatcatgca

SEQ ID NO: 11499 - DNA, 15 bp, Homo sapiens
ggagtgtgatcatgc

SEQ ID NO: 11500 - DNA, 15 bp, Homo sapiens
aggagtgtgatcatg

SEQ ID NO: 11501 - DNA, 15 bp, Homo sapiens
caggagtgtgatcat

SEQ ID NO: 11502 - DNA, 15 bp, Homo sapiens
ccaggagtgtgatca

SEQ ID NO: 11503 - DNA, 15 bp, Homo sapiens
tccaggagtgtgatc

SEQ ID NO: 11504 - DNA, 15 bp, Homo sapiens
gtccaggagtgtgat

SEQ ID NO: 11505 - DNA, 15 bp, Homo sapiens
agtccaggagtgtga

SEQ ID NO: 11506 - DNA, 15 bp, Homo sapiens
gagtccaggagtgtg

SEQ ID NO: 11507 - DNA, 15 bp, Homo sapiens
cgagtccaggagtgt

SEQ ID NO: 11508 - DNA, 15 bp, Homo sapiens
gcgagtccaggagtg

SEQ ID NO: 11509 - DNA, 15 bp, Homo sapiens
ggcgagtccaggagt

SEQ ID NO: 11510 - DNA, 15 bp, Homo sapiens
aggcgagtccaggag

SEQ ID NO: 11511 - DNA, 15 bp, Homo sapiens
gaggcgagtccagga

SEQ ID NO: 11512 - DNA, 15 bp, Homo sapiens
ggaggcgagtccagg

SEQ ID NO: 11513 - DNA, 15 bp, Homo sapiens
aggaggcgagtccag

SEQ ID NO: 11514 - DNA, 15 bp, Homo sapiens
aaggaggcgagtcca

SEQ ID NO: 11515 - DNA, 15 bp, Homo sapiens
caaggaggcgagtcc

SEQ ID NO: 11516 - DNA, 15 bp, Homo sapiens
gcaaggaggcgagtc

SEQ ID NO: 11517 - DNA, 15 bp, Homo sapiens
ggcaaggaggcgagt

SEQ ID NO: 11518 - DNA, 15 bp, Homo sapiens
gggcaaggaggcgag

SEQ ID NO: 11519 - DNA, 15 bp, Homo sapiens
agggcaaggaggcga

SEQ ID NO: 11520 - DNA, 15 bp, Homo sapiens
cagggcaaggaggcg

SEQ ID NO: 11521 - DNA, 15 bp, Homo sapiens
tcagggcaaggaggc

SEQ ID NO: 11522 - DNA, 15 bp, Homo sapiens
ctcagggcaaggagg

SEQ ID NO: 11523 - DNA, 15 bp, Homo sapiens
tctcagggcaaggag

SEQ ID NO: 11524 - DNA, 15 bp, Homo sapiens
atctcagggcaagga

SEQ ID NO: 11525 - DNA, 15 bp, Homo sapiens
gatctcagggcaagg

SEQ ID NO: 11526 - DNA, 15 bp, Homo sapiens
ggatctcagggcaag

SEQ ID NO: 11527 - DNA, 15 bp, Homo sapiens
tggatctcagggcaa

SEQ ID NO: 11528 - DNA, 15 bp, Homo sapiens
ctggatctcagggca

SEQ ID NO: 11529 - DNA, 15 bp, Homo sapiens
tctggatctcagggc

SEQ ID NO: 11530 - DNA, 15 bp, Homo sapiens
gtctggatctcaggg

SEQ ID NO: 11531 - DNA, 15 bp, Homo sapiens
ggtctggatctcagg

SEQ ID NO: 11532 - DNA, 15 bp, Homo sapiens
gggtctggatctcag

SEQ ID NO: 11533 - DNA, 15 bp, Homo sapiens
ggggtctggatctca

SEQ ID NO: 11534 - DNA, 15 bp, Homo sapiens
gggggtctggatctc

SEQ ID NO: 11535 - DNA, 15 bp, Homo sapiens
cgggggtctggatct

SEQ ID NO: 11536 - DNA, 15 bp, Homo sapiens
acgggggtctggatc

SEQ ID NO: 11537 - DNA, 15 bp, Homo sapiens
tacgggggtctggat

SEQ ID NO: 11538 - DNA, 15 bp, Homo sapiens
atacgggggtctgga

SEQ ID NO: 11539 - DNA, 15 bp, Homo sapiens
aatacgggggtctgg

SEQ ID NO: 11540 - DNA, 15 bp, Homo sapiens
gaatacgggggtctg

SEQ ID NO: 11541 - DNA, 15 bp, Homo sapiens
tgaatacgggggtct

SEQ ID NO: 11542 - DNA, 15 bp, Homo sapiens
ctgaatacgggggtc

SEQ ID NO: 11543 - DNA, 15 bp, Homo sapiens
gctgaatacgggggt

SEQ ID NO: 11544 - DNA, 15 bp, Homo sapiens
agctgaatacggggg

SEQ ID NO: 11545 - DNA, 15 bp, Homo sapiens
cagctgaatacgggg

SEQ ID NO: 11546 - DNA, 15 bp, Homo sapiens
gcagctgaatacggg

SEQ ID NO: 11547 - DNA, 15 bp, Homo sapiens
ggcagctgaatacgg

SEQ ID NO: 11548 - DNA, 15 bp, Homo sapiens
gggcagctgaatacg

SEQ ID NO: 11549 - DNA, 15 bp, Homo sapiens
ggggcagctgaatac

SEQ ID NO: 11550 - DNA, 15 bp, Homo sapiens
gggggcagctgaata

SEQ ID NO: 11551 - DNA, 15 bp, Homo sapiens
agggggcagctgaat

SEQ ID NO: 11552 - DNA, 15 bp, Homo sapiens
gagggggcagctgaa

SEQ ID NO: 11553 - DNA, 15 bp, Homo sapiens
tgagggggcagctga

SEQ ID NO: 11554 - DNA, 15 bp, Homo sapiens
ctgagggggcagctg

SEQ ID NO: 11555 - DNA, 15 bp, Homo sapiens
gctgagggggcagct

SEQ ID NO: 11556 - DNA, 15 bp, Homo sapiens
agctgagggggcagc

SEQ ID NO: 11557 - DNA, 15 bp, Homo sapiens
gagctgagggggcag

SEQ ID NO: 11558 - DNA, 15 bp, Homo sapiens
ggagctgagggggca

SEQ ID NO: 11559 - DNA, 15 bp, Homo sapiens
aggagctgagggggc

SEQ ID NO: 11560 - DNA, 15 bp, Homo sapiens
gaggagctgaggggg

SEQ ID NO: 11561 - DNA, 15 bp, Homo sapiens
ggaggagctgagggg

SEQ ID NO: 11562 - DNA, 15 bp, Homo sapiens
tggaggagctgaggg

SEQ ID NO: 11563 - DNA, 15 bp, Homo sapiens
gtggaggagctgagg

SEQ ID NO: 11564 - DNA, 15 bp, Homo sapiens
agtggaggagctgag

SEQ ID NO: 11565 - DNA, 15 bp, Homo sapiens
gagtggaggagctga

SEQ ID NO: 11566 - DNA, 15 bp, Homo sapiens
tgagtggaggagctg

SEQ ID NO: 11567 - DNA, 15 bp, Homo sapiens
gtgagtggaggagct

SEQ ID NO: 11568 - DNA, 15 bp, Homo sapiens
tgtgagtggaggagc

SEQ ID NO: 11569 - DNA, 15 bp, Homo sapiens
atgtgagtggaggag

SEQ ID NO: 11570 - DNA, 15 bp, Homo sapiens
tatgtgagtggagga

SEQ ID NO: 11571 - DNA, 15 bp, Homo sapiens
atatgtgagtggagg

SEQ ID NO: 11572 - DNA, 15 bp, Homo sapiens
aatatgtgagtggag

SEQ ID NO: 11573 - DNA, 15 bp, Homo sapiens
aaatatgtgagtgga

SEQ ID NO: 11574 - DNA, 15 bp, Homo sapiens
taaatatgtgagtgg

SEQ ID NO: 11575 - DNA, 15 bp, Homo sapiens
ttaaatatgtgagtg

SEQ ID NO: 11576 - DNA, 15 bp, Homo sapiens
attaaatatgtgagt

SEQ ID NO: 11577 - DNA, 15 bp, Homo sapiens
cattaaatatgtgag

SEQ ID NO: 11578 - DNA, 15 bp, Homo sapiens
gcattaaatatgtga

SEQ ID NO: 11579 - DNA, 15 bp, Homo sapiens
ggcattaaatatgtg

SEQ ID NO: 11580 - DNA, 15 bp, Homo sapiens
tggcattaaatatgt

SEQ ID NO: 11581 - DNA, 15 bp, Homo sapiens
ctggcattaaatatg

SEQ ID NO: 11582 - DNA, 15 bp, Homo sapiens
tctggcattaaatat

SEQ ID NO: 11583 - DNA, 15 bp, Homo sapiens
gtctggcattaaata

SEQ ID NO: 11584 - DNA, 15 bp, Homo sapiens
agtctggcattaaat

SEQ ID NO: 11585 - DNA, 15 bp, Homo sapiens
gagtctggcattaaa

SEQ ID NO: 11586 - DNA, 15 bp, Homo sapiens
agagtctggcattaa

SEQ ID NO: 11587 - DNA, 15 bp, Homo sapiens
aagagtctggcatta

SEQ ID NO: 11588 - DNA, 15 bp, Homo sapiens
gaagagtctggcatt

SEQ ID NO: 11589 - DNA, 15 bp, Homo sapiens
tgaagagtctggcat

SEQ ID NO: 11590 - DNA, 15 bp, Homo sapiens
atgaagagtctggca

SEQ ID NO: 11591 - DNA, 15 bp, Homo sapiens
gttggccaggctggt

SEQ ID NO: 11592 - DNA, 15 bp, Homo sapiens
tgttggccaggctgg

SEQ ID NO: 11593 - DNA, 15 bp, Homo sapiens
atgttggccaggctg

SEQ ID NO: 11594 - DNA, 15 bp, Homo sapiens
catgttggccaggct

SEQ ID NO: 11595 - DNA, 15 bp, Homo sapiens
ccatgttggccaggc

SEQ ID NO: 11596 - DNA, 15 bp, Homo sapiens
accatgttggccagg

SEQ ID NO: 11597 - DNA, 15 bp, Homo sapiens
taccatgttggccag

SEQ ID NO: 11598 - DNA, 15 bp, Homo sapiens
ttaccatgttggcca

SEQ ID NO: 11599 - DNA, 15 bp, Homo sapiens
tttaccatgttggcc

SEQ ID NO: 11600 - DNA, 15 bp, Homo sapiens
ttttaccatgttggc

SEQ ID NO: 11601 - DNA, 15 bp, Homo sapiens
gttttaccatgttgg

SEQ ID NO: 11602 - DNA, 15 bp, Homo sapiens
ggttttaccatgttg

SEQ ID NO: 11603 - DNA, 15 bp, Homo sapiens
gggttttaccatgtt

SEQ ID NO: 11604 - DNA, 15 bp, Homo sapiens
ggggttttaccatgt

SEQ ID NO: 11605 - DNA, 15 bp, Homo sapiens
cggggttttaccatg

SEQ ID NO: 11606 - DNA, 15 bp, Homo sapiens
tcggggttttaccat

SEQ ID NO: 11607 - DNA, 15 bp, Homo sapiens
gtcggggttttacca

SEQ ID NO: 11608 - DNA, 15 bp, Homo sapiens
agtcggggttttacc

SEQ ID NO: 11609 - DNA, 15 bp, Homo sapiens
gagtcggggttttac

SEQ ID NO: 11610 - DNA, 15 bp, Homo sapiens
agagtcggggtttta

SEQ ID NO: 11611 - DNA, 15 bp, Homo sapiens
tagagtcggggtttt

SEQ ID NO: 11612 - DNA, 15 bp, Homo sapiens
gtagagtcggggttt

SEQ ID NO: 11613 - DNA, 15 bp, Homo sapiens
agtagagtcggggtt

SEQ ID NO: 11614 - DNA, 15 bp, Homo sapiens
tagtagagtcggggt

SEQ ID NO: 11615 - DNA, 15 bp, Homo sapiens
ttagtagagtcgggg

SEQ ID NO: 11616 - DNA, 15 bp, Homo sapiens
tttagtagagtcggg

SEQ ID NO: 11617 - DNA, 15 bp, Homo sapiens
ttttagtagagtcgg

SEQ ID NO: 11618 - DNA, 15 bp, Homo sapiens
tttttagtagagtcg

SEQ ID NO: 11619 - DNA, 15 bp, Homo sapiens
atttttagtagagtc

SEQ ID NO: 11620 - DNA, 15 bp, Homo sapiens
tatttttagtagagt

SEQ ID NO: 11621 - DNA, 15 bp, Homo sapiens
gtatttttagtagag

SEQ ID NO: 11622 - DNA, 15 bp, Homo sapiens
tgtatttttagtaga

SEQ ID NO: 11623 - DNA, 15 bp, Homo sapiens
ttgtatttttagtag

SEQ ID NO: 11624 - DNA, 15 bp, Homo sapiens
tttgtatttttagta

SEQ ID NO: 11625 - DNA, 15 bp, Homo sapiens
ttttgtatttttagt

SEQ ID NO: 11626 - DNA, 15 bp, Homo sapiens
gttttgtatttttag

SEQ ID NO: 11627 - DNA, 15 bp, Homo sapiens
agttttgtattttta

SEQ ID NO: 11628 - DNA, 15 bp, Homo sapiens
aagttttgtattttt

SEQ ID NO: 11629 - DNA, 15 bp, Homo sapiens
taagttttgtatttt

SEQ ID NO: 11630 - DNA, 15 bp, Homo sapiens
ctaagttttgtattt

SEQ ID NO: 11631 - DNA, 15 bp, Homo sapiens
actaagttttgtatt

SEQ ID NO: 11632 - DNA, 15 bp, Homo sapiens
cactaagttttgtat

SEQ ID NO: 11633 - DNA, 15 bp, Homo sapiens
acactaagttttgta

SEQ ID NO: 11634 - DNA, 15 bp, Homo sapiens
cacactaagttttgt

SEQ ID NO: 11635 - DNA, 15 bp, Homo sapiens
gcacactaagttttg

SEQ ID NO: 11636 - DNA, 15 bp, Homo sapiens
agcacactaagtttt

SEQ ID NO: 11637 - DNA, 15 bp, Homo sapiens
gagcacactaagttt

SEQ ID NO: 11638 - DNA, 15 bp, Homo sapiens
ggagcacactaagtt

SEQ ID NO: 11639 - DNA, 15 bp, Homo sapiens
aggagcacactaagt

SEQ ID NO: 11640 - DNA, 15 bp, Homo sapiens
caggagcacactaag

SEQ ID NO: 11641 - DNA, 15 bp, Homo sapiens
acaggagcacactaa

SEQ ID NO: 11642 - DNA, 15 bp, Homo sapiens
tacaggagcacacta

SEQ ID NO: 11643 - DNA, 15 bp, Homo sapiens
ttacaggagcacact

SEQ ID NO: 11644 - DNA, 15 bp, Homo sapiens
attacaggagcacac

SEQ ID NO: 11645 - DNA, 15 bp, Homo sapiens
aattacaggagcaca

SEQ ID NO: 11646 - DNA, 15 bp, Homo sapiens
gaattacaggagcac

SEQ ID NO: 11647 - DNA, 15 bp, Homo sapiens
ggaattacaggagca

SEQ ID NO: 11648 - DNA, 15 bp, Homo sapiens
tggaattacaggagc

SEQ ID NO: 11649 - DNA, 15 bp, Homo sapiens
ctggaattacaggag

SEQ ID NO: 11650 - DNA, 15 bp, Homo sapiens
gctggaattacagga

SEQ ID NO: 11651 - DNA, 15 bp, Homo sapiens
agctggaattacagg

SEQ ID NO: 11652 - DNA, 15 bp, Homo sapiens
tagctggaattacag

SEQ ID NO: 11653 - DNA, 15 bp, Homo sapiens
gtagctggaattaca

SEQ ID NO: 11654 - DNA, 15 bp, Homo sapiens
agtagctggaattac

SEQ ID NO: 11655 - DNA, 15 bp, Homo sapiens
aagtagctggaatta

SEQ ID NO: 11656 - DNA, 15 bp, Homo sapiens
caagtagctggaatt

SEQ ID NO: 11657 - DNA, 15 bp, Homo sapiens
ccaagtagctggaat

SEQ ID NO: 11658 - DNA, 15 bp, Homo sapiens
cccaagtagctggaa

SEQ ID NO: 11659 - DNA, 15 bp, Homo sapiens
ccccaagtagctgga

SEQ ID NO: 11660 - DNA, 15 bp, Homo sapiens
cccccaagtagctgg

SEQ ID NO: 11661 - DNA, 15 bp, Homo sapiens
gcccccaagtagctg

SEQ ID NO: 11662 - DNA, 15 bp, Homo sapiens
agcccccaagtagct

SEQ ID NO: 11663 - DNA, 15 bp, Homo sapiens
cagcccccaagtagc

SEQ ID NO: 11664 - DNA, 15 bp, Homo sapiens
tcagcccccaagtag

SEQ ID NO: 11665 - DNA, 15 bp, Homo sapiens
ctcagcccccaagta

SEQ ID NO: 11666 - DNA, 15 bp, Homo sapiens
cctcagcccccaagt

SEQ ID NO: 11667 - DNA, 15 bp, Homo sapiens
gcctcagcccccaag

SEQ ID NO: 11668 - DNA, 15 bp, Homo sapiens
tgcctcagcccccaa

SEQ ID NO: 11669 - DNA, 15 bp, Homo sapiens
ctgcctcagccccca

SEQ ID NO: 11670 - DNA, 15 bp, Homo sapiens
cctgcctcagccccc

SEQ ID NO: 11671 - DNA, 15 bp, Homo sapiens
tcctgcctcagcccc

SEQ ID NO: 11672 - DNA, 15 bp, Homo sapiens
ctcctgcctcagccc

SEQ ID NO: 11673 - DNA, 15 bp, Homo sapiens
tctcctgcctcagcc

SEQ ID NO: 11674 - DNA, 15 bp, Homo sapiens
ttctcctgcctcagc

SEQ ID NO: 11675 - DNA, 15 bp, Homo sapiens
attctcctgcctcag

SEQ ID NO: 11676 - DNA, 15 bp, Homo sapiens
cattctcctgcctca

SEQ ID NO: 11677 - DNA, 15 bp, Homo sapiens
ccattctcctgcctc

SEQ ID NO: 11678 - DNA, 15 bp, Homo sapiens
gccattctcctgcct

SEQ ID NO: 11679 - DNA, 15 bp, Homo sapiens
agccattctcctgcc

SEQ ID NO: 11680 - DNA, 15 bp, Homo sapiens
aagccattctcctgc

SEQ ID NO: 11681 - DNA, 15 bp, Homo sapiens
caagccattctcctg

SEQ ID NO: 11682 - DNA, 15 bp, Homo sapiens
tcaagccattctcct

SEQ ID NO: 11683 - DNA, 15 bp, Homo sapiens
ttcaagccattctcc

SEQ ID NO: 11684 - DNA, 15 bp, Homo sapiens
gttcaagccattctc

SEQ ID NO: 11685 - DNA, 15 bp, Homo sapiens
ggttcaagccattct

SEQ ID NO: 11686 - DNA, 15 bp, Homo sapiens
gggttcaagccattc

SEQ ID NO: 11687 - DNA, 15 bp, Homo sapiens
tgggttcaagccatt

SEQ ID NO: 11688 - DNA, 15 bp, Homo sapiens
ctgggttcaagccat

SEQ ID NO: 11689 - DNA, 15 bp, Homo sapiens
cctgggttcaagcca

SEQ ID NO: 11690 - DNA, 15 bp, Homo sapiens
tcctgggttcaagcc

SEQ ID NO: 11691 - DNA, 15 bp, Homo sapiens
ttcctgggttcaagc

SEQ ID NO: 11692 - DNA, 15 bp, Homo sapiens
cttcctgggttcaag

SEQ ID NO: 11693 - DNA, 15 bp, Homo sapiens
acttcctgggttcaa

SEQ ID NO: 11694 - DNA, 15 bp, Homo sapiens
cacttcctgggttca

SEQ ID NO: 11695 - DNA, 15 bp, Homo sapiens
ccacttcctgggttc

SEQ ID NO: 11696 - DNA, 15 bp, Homo sapiens
tccacttcctgggtt

SEQ ID NO: 11697 - DNA, 15 bp, Homo sapiens
ctccacttcctgggt

SEQ ID NO: 11698 - DNA, 15 bp, Homo sapiens
cctccacttcctggg

SEQ ID NO: 11699 - DNA, 15 bp, Homo sapiens
acctccacttcctgg

SEQ ID NO: 11700 - DNA, 15 bp, Homo sapiens
aacctccacttcctg

SEQ ID NO: 11701 - DNA, 15 bp, Homo sapiens
caacctccacttcct

SEQ ID NO: 11702 - DNA, 15 bp, Homo sapiens
gcaacctccacttcc

SEQ ID NO: 11703 - DNA, 15 bp, Homo sapiens
tgcaacctccacttc

SEQ ID NO: 11704 - DNA, 15 bp, Homo sapiens
ctgcaacctccactt

SEQ ID NO: 11705 - DNA, 15 bp, Homo sapiens
actgcaacctccact

SEQ ID NO: 11706 - DNA, 15 bp, Homo sapiens
cactgcaacctccac

SEQ ID NO: 11707 - DNA, 15 bp, Homo sapiens
tcactgcaacctcca

SEQ ID NO: 11708 - DNA, 15 bp, Homo sapiens
ttcactgcaacctcc

SEQ ID NO: 11709 - DNA, 15 bp, Homo sapiens
cttcactgcaacctc

SEQ ID NO: 11710 - DNA, 15 bp, Homo sapiens
gcttcactgcaacct

SEQ ID NO: 11711 - DNA, 15 bp, Homo sapiens
cgcttcactgcaacc

SEQ ID NO: 11712 - DNA, 15 bp, Homo sapiens
tcgcttcactgcaac

SEQ ID NO: 11713 - DNA, 15 bp, Homo sapiens
gtcgcttcactgcaa

SEQ ID NO: 11714 - DNA, 15 bp, Homo sapiens
tgtcgcttcactgca

SEQ ID NO: 11715 - DNA, 15 bp, Homo sapiens
atgtcgcttcactgc

SEQ ID NO: 11716 - DNA, 15 bp, Homo sapiens
gatgtcgcttcactg

SEQ ID NO: 11717 - DNA, 15 bp, Homo sapiens
tgatgtcgcttcact

SEQ ID NO: 11718 - DNA, 15 bp, Homo sapiens
gtgatgtcgcttcac

SEQ ID NO: 11719 - DNA, 15 bp, Homo sapiens
cgtgatgtcgcttca

SEQ ID NO: 11720 - DNA, 15 bp, Homo sapiens
gcgtgatgtcgcttc

SEQ ID NO: 11721 - DNA, 15 bp, Homo sapiens
ggcgtgatgtcgctt

SEQ ID NO: 11722 - DNA, 15 bp, Homo sapiens
tggcgtgatgtcgct

SEQ ID NO: 11723 - DNA, 15 bp, Homo sapiens
atggcgtgatgtcgc

SEQ ID NO: 11724 - DNA, 15 bp, Homo sapiens
aatggcgtgatgtcg

SEQ ID NO: 11725 - DNA, 15 bp, Homo sapiens
caatggcgtgatgtc

SEQ ID NO: 11726 - DNA, 15 bp, Homo sapiens
gcaatggcgtgatgt

SEQ ID NO: 11727 - DNA, 15 bp, Homo sapiens
tgcaatggcgtgatg

SEQ ID NO: 11728 - DNA, 15 bp, Homo sapiens
gtgcaatggcgtgat

SEQ ID NO: 11729 - DNA, 15 bp, Homo sapiens
agtgcaatggcgtga

SEQ ID NO: 11730 - DNA, 15 bp, Homo sapiens
gagtgcaatggcgtg

SEQ ID NO: 11731 - DNA, 15 bp, Homo sapiens
ggagtgcaatggcgt

SEQ ID NO: 11732 - DNA, 15 bp, Homo sapiens
tggagtgcaatggcg

SEQ ID NO: 11733 - DNA, 15 bp, Homo sapiens
ctggagtgcaatggc

SEQ ID NO: 11734 - DNA, 15 bp, Homo sapiens
gctggagtgcaatgg

SEQ ID NO: 11735 - DNA, 15 bp, Homo sapiens
ggctggagtgcaatg

SEQ ID NO: 11736 - DNA, 15 bp, Homo sapiens
aggctggagtgcaat

SEQ ID NO: 11737 - DNA, 15 bp, Homo sapiens
caggctggagtgcaa

SEQ ID NO: 11738 - DNA, 15 bp, Homo sapiens
tgcccaggctggagt

SEQ ID NO: 11739 - DNA, 15 bp, Homo sapiens
ttgcccaggctggag

SEQ ID NO: 11740 - DNA, 15 bp, Homo sapiens
gttgcccaggctgga

SEQ ID NO: 11741 - DNA, 15 bp, Homo sapiens
tgttgcccaggctgg

SEQ ID NO: 11742 - DNA, 15 bp, Homo sapiens
ctgttgcccaggctg

SEQ ID NO: 11743 - DNA, 15 bp, Homo sapiens
tctgttgcccaggct

SEQ ID NO: 11744 - DNA, 15 bp, Homo sapiens
ctctgttgcccaggc

SEQ ID NO: 11745 - DNA, 15 bp, Homo sapiens
tctctgttgcccagg

SEQ ID NO: 11746 - DNA, 15 bp, Homo sapiens
ctctctgttgcccag

SEQ ID NO: 11747 - DNA, 15 bp, Homo sapiens
tctctctgttgccca

SEQ ID NO: 11748 - DNA, 15 bp, Homo sapiens
ctctctctgttgccc

SEQ ID NO: 11749 - DNA, 15 bp, Homo sapiens
tctctctctgttgcc

SEQ ID NO: 11750 - DNA, 15 bp, Homo sapiens
gtctctctctgttgc

SEQ ID NO: 11751 - DNA, 15 bp, Homo sapiens
agtctctctctgttg

SEQ ID NO: 11752 - DNA, 15 bp, Homo sapiens
gagtctctctctgtt

SEQ ID NO: 11753 - DNA, 15 bp, Homo sapiens
ggagtctctctctgt

SEQ ID NO: 11754 - DNA, 15 bp, Homo sapiens
cggagtctctctctg

SEQ ID NO: 11755 - DNA, 15 bp, Homo sapiens
acggagtctctctct

SEQ ID NO: 11756 - DNA, 15 bp, Homo sapiens
gacggagtctctctc

SEQ ID NO: 11757 - DNA, 15 bp, Homo sapiens
agacggagtctctct

SEQ ID NO: 11758 - DNA, 15 bp, Homo sapiens
gagacggagtctctc

SEQ ID NO: 11759 - DNA, 15 bp, Homo sapiens
tgagacggagtctct

SEQ ID NO: 11760 - DNA, 15 bp, Homo sapiens
ttgagacggagtctc

SEQ ID NO: 11761 - DNA, 15 bp, Homo sapiens
tttgagacggagtct

SEQ ID NO: 11762 - DNA, 15 bp, Homo sapiens
ttttgagacggagtc

SEQ ID NO: 11763 - DNA, 15 bp, Homo sapiens
tttttgagacggagt

SEQ ID NO: 11764 - DNA, 15 bp, Homo sapiens
gtttttgagacggag

SEQ ID NO: 11765 - DNA, 15 bp, Homo sapiens
tgtttttgagacgga

SEQ ID NO: 11766 - DNA, 15 bp, Homo sapiens
ttgtttttgagacgg

SEQ ID NO: 11767 - DNA, 15 bp, Homo sapiens
tttgtttttgagacg

SEQ ID NO: 11768 - DNA, 15 bp, Homo sapiens
ttttgtttttgagac

SEQ ID NO: 11769 - DNA, 15 bp, Homo sapiens
gttttgtttttgaga

SEQ ID NO: 11770 - DNA, 15 bp, Homo sapiens
tgttttgtttttgag

SEQ ID NO: 11771 - DNA, 15 bp, Homo sapiens
ttgttttgtttttga

SEQ ID NO: 11772 - DNA, 15 bp, Homo sapiens
tttgttttgtttttg

SEQ ID NO: 11773 - DNA, 15 bp, Homo sapiens
ttttgttttgttttt

SEQ ID NO: 11774 - DNA, 15 bp, Homo sapiens
tttttgttttgtttt

SEQ ID NO: 11775 - DNA, 15 bp, Homo sapiens
ttttttgttttgttt

SEQ ID NO: 11776 - DNA, 15 bp, Homo sapiens
tttttttgttttgtt

SEQ ID NO: 11777 - DNA, 15 bp, Homo sapiens
ttttttttgttttgt

SEQ ID NO: 11778 - DNA, 15 bp, Homo sapiens
tttttttttgttttg

SEQ ID NO: 11779 - DNA, 15 bp, Homo sapiens
gtttttttttgtttt

SEQ ID NO: 11780 - DNA, 15 bp, Homo sapiens
tgtttttttttgttt

SEQ ID NO: 11781 - DNA, 15 bp, Homo sapiens
ttgtttttttttgtt

SEQ ID NO: 11782 - DNA, 15 bp, Homo sapiens
tttgtttttttttgt

SEQ ID NO: 11783 - DNA, 15 bp, Homo sapiens
ttttgtttttttttg

SEQ ID NO: 11784 - DNA, 15 bp, Homo sapiens
tttttgttttttttt

SEQ ID NO: 11785 - DNA, 15 bp, Homo sapiens
ttttttgtttttttt

SEQ ID NO: 11786 - DNA, 15 bp, Homo sapiens
gttttttgttttttt

SEQ ID NO: 11787 - DNA, 15 bp, Homo sapiens
tgttttttgtttttt

SEQ ID NO: 11788 - DNA, 15 bp, Homo sapiens
ttgttttttgttttt

SEQ ID NO: 11789 - DNA, 15 bp, Homo sapiens
tttgttttttgtttt

SEQ ID NO: 11790 - DNA, 15 bp, Homo sapiens
ttttgttttttgttt

SEQ ID NO: 11791 - DNA, 15 bp, Homo sapiens
gttttgttttttgtt

SEQ ID NO: 11792 - DNA, 15 bp, Homo sapiens
tgttttgttttttgt

SEQ ID NO: 11793 - DNA, 15 bp, Homo sapiens
ttgttttgttttttg

SEQ ID NO: 11794 - DNA, 15 bp, Homo sapiens
tttgttttgtttttt

SEQ ID NO: 11795 - DNA, 15 bp, Homo sapiens
gttttgttttgtttt

SEQ ID NO: 11796 - DNA, 15 bp, Homo sapiens
tgttttgttttgttt

SEQ ID NO: 11797 - DNA, 15 bp, Homo sapiens
ttgttttgttttgtt

SEQ ID NO: 11798 - DNA, 15 bp, Homo sapiens
tttgttttgttttgt

SEQ ID NO: 11799 - DNA, 15 bp, Homo sapiens
ttttgttttgttttg

SEQ ID NO: 11800 - DNA, 15 bp, Homo sapiens
ggtttttttttgttt

SEQ ID NO: 11801 - DNA, 15 bp, Homo sapiens
gggtttttttttgtt

SEQ ID NO: 11802 - DNA, 15 bp, Homo sapiens
tgggtttttttttgt

SEQ ID NO: 11803 - DNA, 15 bp, Homo sapiens
gtgggtttttttttg

SEQ ID NO: 11804 - DNA, 15 bp, Homo sapiens
tgtgggttttttttt

SEQ ID NO: 11805 - DNA, 15 bp, Homo sapiens
ttgtgggtttttttt

SEQ ID NO: 11806 - DNA, 15 bp, Homo sapiens
cttgtgggttttttt

SEQ ID NO: 11807 - DNA, 15 bp, Homo sapiens
tcttgtgggtttttt

SEQ ID NO: 11808 - DNA, 15 bp, Homo sapiens
atcttgtgggttttt

SEQ ID NO: 11809 - DNA, 15 bp, Homo sapiens
tatcttgtgggtttt

SEQ ID NO: 11810 - DNA, 15 bp, Homo sapiens
atatcttgtgggttt

SEQ ID NO: 11811 - DNA, 15 bp, Homo sapiens
aatatcttgtgggtt

SEQ ID NO: 11812 - DNA, 15 bp, Homo sapiens
taatatcttgtgggt

SEQ ID NO: 11813 - DNA, 15 bp, Homo sapiens
ataatatcttgtggg

SEQ ID NO: 11814 - DNA, 15 bp, Homo sapiens
aataatatcttgtgg

SEQ ID NO: 11815 - DNA, 15 bp, Homo sapiens
caataatatcttgtg

SEQ ID NO: 11816 - DNA, 15 bp, Homo sapiens
acaataatatcttgt

SEQ ID NO: 11817 - DNA, 15 bp, Homo sapiens
aacaataatatcttg

SEQ ID NO: 11818 - DNA, 15 bp, Homo sapiens
taacaataatatctt

SEQ ID NO: 11819 - DNA, 15 bp, Homo sapiens
ttaacaataatatct

SEQ ID NO: 11820 - DNA, 15 bp, Homo sapiens
gttaacaataatatc

SEQ ID NO: 11821 - DNA, 15 bp, Homo sapiens
agttaacaataatat

SEQ ID NO: 11822 - DNA, 15 bp, Homo sapiens
aagttaacaataata

SEQ ID NO: 11823 - DNA, 15 bp, Homo sapiens
gaagttaacaataat

SEQ ID NO: 11824 - DNA, 15 bp, Homo sapiens
tgaagttaacaataa

SEQ ID NO: 11825 - DNA, 15 bp, Homo sapiens
atgaagttaacaata

SEQ ID NO: 11826 - DNA, 15 bp, Homo sapiens
aatgaagttaacaat

SEQ ID NO: 11827 - DNA, 15 bp, Homo sapiens
taatgaagttaacaa

SEQ ID NO: 11828 - DNA, 15 bp, Homo sapiens
ctaatgaagttaaca

SEQ ID NO: 11829 - DNA, 15 bp, Homo sapiens
gctaatgaagttaac

SEQ ID NO: 11830 - DNA, 15 bp, Homo sapiens
ggctaatgaagttaa

SEQ ID NO: 11831 - DNA, 15 bp, Homo sapiens
tggctaatgaagtta

SEQ ID NO: 11832 - DNA, 15 bp, Homo sapiens
atggctaatgaagtt

SEQ ID NO: 11833 - DNA, 15 bp, Homo sapiens
catggctaatgaagt

SEQ ID NO: 11834 - DNA, 15 bp, Homo sapiens
tcatggctaatgaag

SEQ ID NO: 11835 - DNA, 15 bp, Homo sapiens
ttcatggctaatgaa

SEQ ID NO: 11836 - DNA, 15 bp, Homo sapiens
tttcatggctaatga

SEQ ID NO: 11837 - DNA, 15 bp, Homo sapiens
ttttcatggctaatg

SEQ ID NO: 11838 - DNA, 15 bp, Homo sapiens
attttcatggctaat

SEQ ID NO: 11839 - DNA, 15 bp, Homo sapiens
cattttcatggctaa

SEQ ID NO: 11840 - DNA, 15 bp, Homo sapiens
ccattttcatggcta

SEQ ID NO: 11841 - DNA, 15 bp, Homo sapiens
accattttcatggct

SEQ ID NO: 11842 - DNA, 15 bp, Homo sapiens
gaccattttcatggc

SEQ ID NO: 11843 - DNA, 15 bp, Homo sapiens
ggaccattttcatgg

SEQ ID NO: 11844 - DNA, 15 bp, Homo sapiens
tggaccattttcatg

SEQ ID NO: 11845 - DNA, 15 bp, Homo sapiens
ctggaccattttcat

SEQ ID NO: 11846 - DNA, 15 bp, Homo sapiens
actggaccattttca

SEQ ID NO: 11847 - DNA, 15 bp, Homo sapiens
cactggaccattttc

SEQ ID NO: 11848 - DNA, 15 bp, Homo sapiens
ccactggaccatttt

SEQ ID NO: 11849 - DNA, 15 bp, Homo sapiens
accactggaccattt

SEQ ID NO: 11850 - DNA, 15 bp, Homo sapiens
aaccactggaccatt

SEQ ID NO: 11851 - DNA, 15 bp, Homo sapiens
taaccactggaccat

SEQ ID NO: 11852 - DNA, 15 bp, Homo sapiens
gtaaccactggacca

SEQ ID NO: 11853 - DNA, 15 bp, Homo sapiens
ggtaaccactggacc

SEQ ID NO: 11854 - DNA, 15 bp, Homo sapiens
aggtaaccactggac

SEQ ID NO: 11855 - DNA, 15 bp, Homo sapiens
aaggtaaccactgga

SEQ ID NO: 11856 - DNA, 15 bp, Homo sapiens
caaggtaaccactgg

SEQ ID NO: 11857 - DNA, 15 bp, Homo sapiens
tcaaggtaaccactg

SEQ ID NO: 11858 - DNA, 15 bp, Homo sapiens
ttcaaggtaaccact

SEQ ID NO: 11859 - DNA, 15 bp, Homo sapiens
tttcaaggtaaccac

SEQ ID NO: 11860 - DNA, 15 bp, Homo sapiens
ttttcaaggtaacca

SEQ ID NO: 11861 - DNA, 15 bp, Homo sapiens
gttttcaaggtaacc

SEQ ID NO: 11862 - DNA, 15 bp, Homo sapiens
agttttcaaggtaac

SEQ ID NO: 11863 - DNA, 15 bp, Homo sapiens
cagttttcaaggtaa

SEQ ID NO: 11864 - DNA, 15 bp, Homo sapiens
tcagttttcaaggta

SEQ ID NO: 11865 - DNA, 15 bp, Homo sapiens
ttcagttttcaaggt

SEQ ID NO: 11866 - DNA, 15 bp, Homo sapiens
attcagttttcaagg

SEQ ID NO: 11867 - DNA, 15 bp, Homo sapiens
cattcagttttcaag

SEQ ID NO: 11868 - DNA, 15 bp, Homo sapiens
acattcagttttcaa

SEQ ID NO: 11869 - DNA, 15 bp, Homo sapiens
gacattcagttttca

SEQ ID NO: 11870 - DNA, 15 bp, Homo sapiens
ggacattcagttttc

SEQ ID NO: 11871 - DNA, 15 bp, Homo sapiens
aggacattcagtttt

SEQ ID NO: 11872 - DNA, 15 bp, Homo sapiens
aaggacattcagttt

SEQ ID NO: 11873 - DNA, 15 bp, Homo sapiens
taaggacattcagtt

SEQ ID NO: 11874 - DNA, 15 bp, Homo sapiens
ataaggacattcagt

SEQ ID NO: 11875 - DNA, 15 bp, Homo sapiens
cataaggacattcag

SEQ ID NO: 11876 - DNA, 15 bp, Homo sapiens
tcataaggacattca

SEQ ID NO: 11877 - DNA, 15 bp, Homo sapiens
ctcataaggacattc

SEQ ID NO: 11878 - DNA, 15 bp, Homo sapiens
actcataaggacatt

SEQ ID NO: 11879 - DNA, 15 bp, Homo sapiens
aactcataaggacat

SEQ ID NO: 11880 - DNA, 15 bp, Homo sapiens
taactcataaggaca

SEQ ID NO: 11881 - DNA, 15 bp, Homo sapiens
ttaactcataaggac

SEQ ID NO: 11882 - DNA, 15 bp, Homo sapiens
cttaactcataagga

SEQ ID NO: 11883 - DNA, 15 bp, Homo sapiens
tcttaactcataagg

SEQ ID NO: 11884 - DNA, 15 bp, Homo sapiens
ctcttaactcataag

SEQ ID NO: 11885 - DNA, 15 bp, Homo sapiens
tctcttaactcataa

SEQ ID NO: 11886 - DNA, 15 bp, Homo sapiens
atctcttaactcata

SEQ ID NO: 11887 - DNA, 15 bp, Homo sapiens
catctcttaactcat

SEQ ID NO: 11888 - DNA, 15 bp, Homo sapiens
acatctcttaactca

SEQ ID NO: 11889 - DNA, 15 bp, Homo sapiens
tacatctcttaactc

SEQ ID NO: 11890 - DNA, 15 bp, Homo sapiens
ctacatctcttaact

SEQ ID NO: 11891 - DNA, 15 bp, Homo sapiens
actacatctcttaac

SEQ ID NO: 11892 - DNA, 15 bp, Homo sapiens
gactacatctcttaa

SEQ ID NO: 11893 - DNA, 15 bp, Homo sapiens
ggactacatctctta

SEQ ID NO: 11894 - DNA, 15 bp, Homo sapiens
aggactacatctctt

SEQ ID NO: 11895 - DNA, 15 bp, Homo sapiens
taggactacatctct

SEQ ID NO: 11896 - DNA, 15 bp, Homo sapiens
ttaggactacatctc

SEQ ID NO: 11897 - DNA, 15 bp, Homo sapiens
cttaggactacatct

SEQ ID NO: 11898 - DNA, 15 bp, Homo sapiens
acttaggactacatc

SEQ ID NO: 11899 - DNA, 15 bp, Homo sapiens
tacttaggactacat

SEQ ID NO: 11900 - DNA, 15 bp, Homo sapiens
atacttaggactaca

SEQ ID NO: 11901 - DNA, 15 bp, Homo sapiens
aatacttaggactac

SEQ ID NO: 11902 - DNA, 15 bp, Homo sapiens
aaatacttaggacta

SEQ ID NO: 11903 - DNA, 15 bp, Homo sapiens
taaatacttaggact

SEQ ID NO: 11904 - DNA, 15 bp, Homo sapiens
ctaaatacttaggac

SEQ ID NO: 11905 - DNA, 15 bp, Homo sapiens
tctaaatacttagga

SEQ ID NO: 11906 - DNA, 15 bp, Homo sapiens
ctctaaatacttagg

SEQ ID NO: 11907 - DNA, 15 bp, Homo sapiens
gctctaaatacttag

SEQ ID NO: 11908 - DNA, 15 bp, Homo sapiens
agctctaaatactta

SEQ ID NO: 11909 - DNA, 15 bp, Homo sapiens
cagctctaaatactt

SEQ ID NO: 11910 - DNA, 15 bp, Homo sapiens
tcagctctaaatact

SEQ ID NO: 11911 - DNA, 15 bp, Homo sapiens
ttcagctctaaatac

SEQ ID NO: 11912 - DNA, 15 bp, Homo sapiens
tttcagctctaaata

SEQ ID NO: 11913 - DNA, 15 bp, Homo sapiens
atttcagctctaaat

SEQ ID NO: 11914 - DNA, 15 bp, Homo sapiens
catttcagctctaaa

SEQ ID NO: 11915 - DNA, 15 bp, Homo sapiens
tcatttcagctctaa

SEQ ID NO: 11916 - DNA, 15 bp, Homo sapiens
gtcatttcagctcta

SEQ ID NO: 11917 - DNA, 15 bp, Homo sapiens
tgtcatttcagctct

SEQ ID NO: 11918 - DNA, 15 bp, Homo sapiens
atgtcatttcagctc

SEQ ID NO: 11919 - DNA, 15 bp, Homo sapiens
catgtcatttcagct

SEQ ID NO: 11920 - DNA, 15 bp, Homo sapiens
tcatgtcatttcagc

SEQ ID NO: 11921 - DNA, 15 bp, Homo sapiens
atcatgtcatttcag

SEQ ID NO: 11922 - DNA, 15 bp, Homo sapiens
catcatgtcatttca

SEQ ID NO: 11923 - DNA, 15 bp, Homo sapiens
acatcatgtcatttc

SEQ ID NO: 11924 - DNA, 15 bp, Homo sapiens
gacatcatgtcattt

SEQ ID NO: 11925 - DNA, 15 bp, Homo sapiens
agacatcatgtcatt

SEQ ID NO: 11926 - DNA, 15 bp, Homo sapiens
cagacatcatgtcat

SEQ ID NO: 11927 - DNA, 15 bp, Homo sapiens
tcagacatcatgtca

SEQ ID NO: 11928 - DNA, 15 bp, Homo sapiens
ctcagacatcatgtc

SEQ ID NO: 11929 - DNA, 15 bp, Homo sapiens
tctcagacatcatgt

SEQ ID NO: 11930 - DNA, 15 bp, Homo sapiens
atctcagacatcatg

SEQ ID NO: 11931 - DNA, 15 bp, Homo sapiens
aatctcagacatcat

SEQ ID NO: 11932 - DNA, 15 bp, Homo sapiens
aaatctcagacatca

SEQ ID NO: 11933 - DNA, 15 bp, Homo sapiens
caaatctcagacatc

SEQ ID NO: 11934 - DNA, 15 bp, Homo sapiens
gcaaatctcagacat

SEQ ID NO: 11935 - DNA, 15 bp, Homo sapiens
agcaaatctcagaca

SEQ ID NO: 11936 - DNA, 15 bp, Homo sapiens
aagcaaatctcagac

SEQ ID NO: 11937 - DNA, 15 bp, Homo sapiens
aaagcaaatctcaga

SEQ ID NO: 11938 - DNA, 15 bp, Homo sapiens
taaagcaaatctcag

SEQ ID NO: 11939 - DNA, 15 bp, Homo sapiens
ttaaagcaaatctca

SEQ ID NO: 11940 - DNA, 15 bp, Homo sapiens
tttaaagcaaatctc

SEQ ID NO: 11941 - DNA, 15 bp, Homo sapiens
ttttaaagcaaatct

SEQ ID NO: 11942 - DNA, 15 bp, Homo sapiens
attttaaagcaaatc

SEQ ID NO: 11943 - DNA, 15 bp, Homo sapiens
tattttaaagcaaat

SEQ ID NO: 11944 - DNA, 15 bp, Homo sapiens
ttattttaaagcaaa

SEQ ID NO: 11945 - DNA, 15 bp, Homo sapiens
attattttaaagcaa

SEQ ID NO: 11946 - DNA, 15 bp, Homo sapiens
tattattttaaagca

SEQ ID NO: 11947 - DNA, 15 bp, Homo sapiens
gtattattttaaagc

SEQ ID NO: 11948 - DNA, 15 bp, Homo sapiens
tgtattattttaaag

SEQ ID NO: 11949 - DNA, 15 bp, Homo sapiens
ctgtattattttaaa

SEQ ID NO: 11950 - DNA, 15 bp, Homo sapiens
gctgtattattttaa

SEQ ID NO: 11951 - DNA, 15 bp, Homo sapiens
tgctgtattatttta

SEQ ID NO: 11952 - DNA, 15 bp, Homo sapiens
ttgctgtattatttt

SEQ ID NO: 11953 - DNA, 15 bp, Homo sapiens
gttgctgtattattt

SEQ ID NO: 11954 - DNA, 15 bp, Homo sapiens
tgttgctgtattatt

SEQ ID NO: 11955 - DNA, 15 bp, Homo sapiens
ttgttgctgtattat

SEQ ID NO: 11956 - DNA, 15 bp, Homo sapiens
tttgttgctgtatta

SEQ ID NO: 11957 - DNA, 15 bp, Homo sapiens
ctttgttgctgtatt

SEQ ID NO: 11958 - DNA, 15 bp, Homo sapiens
tctttgttgctgtat

SEQ ID NO: 11959 - DNA, 15 bp, Homo sapiens
ttctttgttgctgta

SEQ ID NO: 11960 - DNA, 15 bp, Homo sapiens
tttctttgttgctgt

SEQ ID NO: 11961 - DNA, 15 bp, Homo sapiens
ttttctttgttgctg

SEQ ID NO: 11962 - DNA, 15 bp, Homo sapiens
tttttctttgttgct

SEQ ID NO: 11963 - DNA, 15 bp, Homo sapiens
ctttttctttgttgc

SEQ ID NO: 11964 - DNA, 15 bp, Homo sapiens
actttttctttgttg

SEQ ID NO: 11965 - DNA, 15 bp, Homo sapiens
aactttttctttgtt

SEQ ID NO: 11966 - DNA, 15 bp, Homo sapiens
caactttttctttgt

SEQ ID NO: 11967 - DNA, 15 bp, Homo sapiens
ccaactttttctttg

SEQ ID NO: 11968 - DNA, 15 bp, Homo sapiens
cccaactttttcttt

SEQ ID NO: 11969 - DNA, 15 bp, Homo sapiens
tcccaactttttctt

SEQ ID NO: 11970 - DNA, 15 bp, Homo sapiens
ctcccaactttttct

SEQ ID NO: 11971 - DNA, 15 bp, Homo sapiens
tctcccaactttttc

SEQ ID NO: 11972 - DNA, 15 bp, Homo sapiens
ctctcccaacttttt

SEQ ID NO: 11973 - DNA, 15 bp, Homo sapiens
tctctcccaactttt

SEQ ID NO: 11974 - DNA, 15 bp, Homo sapiens
ttctctcccaacttt

SEQ ID NO: 11975 - DNA, 15 bp, Homo sapiens
tttctctcccaactt

SEQ ID NO: 11976 - DNA, 15 bp, Homo sapiens
ttttctctcccaact

SEQ ID NO: 11977 - DNA, 15 bp, Homo sapiens
cttttctctcccaac

SEQ ID NO: 11978 - DNA, 15 bp, Homo sapiens
tcttttctctcccaa

SEQ ID NO: 11979 - DNA, 15 bp, Homo sapiens
atcttttctctccca

SEQ ID NO: 11980 - DNA, 15 bp, Homo sapiens
catcttttctctccc

SEQ ID NO: 11981 - DNA, 15 bp, Homo sapiens
tcatcttttctctcc

SEQ ID NO: 11982 - DNA, 15 bp, Homo sapiens
ttcatcttttctctc

SEQ ID NO: 11983 - DNA, 15 bp, Homo sapiens
cttcatcttttctct

SEQ ID NO: 11984 - DNA, 15 bp, Homo sapiens
tcttcatcttttctc

SEQ ID NO: 11985 - DNA, 15 bp, Homo sapiens
ttcttcatcttttct

SEQ ID NO: 11986 - DNA, 15 bp, Homo sapiens
tttcttcatcttttc

SEQ ID NO: 11987 - DNA, 15 bp, Homo sapiens
ttttcttcatctttt

SEQ ID NO: 11988 - DNA, 15 bp, Homo sapiens
cttttcttcatcttt

SEQ ID NO: 11989 - DNA, 15 bp, Homo sapiens
acttttcttcatctt

SEQ ID NO: 11990 - DNA, 15 bp, Homo sapiens
aacttttcttcatct

SEQ ID NO: 11991 - DNA, 15 bp, Homo sapiens
caacttttcttcatc

SEQ ID NO: 11992 - DNA, 15 bp, Homo sapiens
ccaacttttcttcat

SEQ ID NO: 11993 - DNA, 15 bp, Homo sapiens
gccaacttttcttca

SEQ ID NO: 11994 - DNA, 15 bp, Homo sapiens
tgccaacttttcttc

SEQ ID NO: 11995 - DNA, 15 bp, Homo sapiens
ttgccaacttttctt

SEQ ID NO: 11996 - DNA, 15 bp, Homo sapiens
tttgccaacttttct

SEQ ID NO: 11997 - DNA, 15 bp, Homo sapiens
ttttgccaacttttc

SEQ ID NO: 11998 - DNA, 15 bp, Homo sapiens
attttgccaactttt

SEQ ID NO: 11999 - DNA, 15 bp, Homo sapiens
cattttgccaacttt

SEQ ID NO: 12000 - DNA, 15 bp, Homo sapiens
ccattttgccaactt

SEQ ID NO: 12001 - DNA, 15 bp, Homo sapiens
accattttgccaact

SEQ ID NO: 12002 - DNA, 15 bp, Homo sapiens
taccattttgccaac

SEQ ID NO: 12003 - DNA, 15 bp, Homo sapiens
gtaccattttgccaa

SEQ ID NO: 12004 - DNA, 15 bp, Homo sapiens
tgtaccattttgcca

SEQ ID NO: 12005 - DNA, 15 bp, Homo sapiens
atgtaccattttgcc

SEQ ID NO: 12006 - DNA, 15 bp, Homo sapiens
tatgtaccattttgc

SEQ ID NO: 12007 - DNA, 15 bp, Homo sapiens
ctatgtaccattttg

SEQ ID NO: 12008 - DNA, 15 bp, Homo sapiens
cctatgtaccatttt

SEQ ID NO: 12009 - DNA, 15 bp, Homo sapiens
tcctatgtaccattt

SEQ ID NO: 12010 - DNA, 15 bp, Homo sapiens
atcctatgtaccatt

SEQ ID NO: 12011 - DNA, 15 bp, Homo sapiens
aatcctatgtaccat

SEQ ID NO: 12012 - DNA, 15 bp, Homo sapiens
gaatcctatgtacca

SEQ ID NO: 12013 - DNA, 15 bp, Homo sapiens
tgaatcctatgtacc

SEQ ID NO: 12014 - DNA, 15 bp, Homo sapiens
gtgaatcctatgtac

SEQ ID NO: 12015 - DNA, 15 bp, Homo sapiens
agtgaatcctatgta

SEQ ID NO: 12016 - DNA, 15 bp, Homo sapiens
tagtgaatcctatgt

SEQ ID NO: 12017 - DNA, 15 bp, Homo sapiens
ctagtgaatcctatg

SEQ ID NO: 12018 - DNA, 15 bp, Homo sapiens
tctagtgaatcctat

SEQ ID NO: 12019 - DNA, 15 bp, Homo sapiens
ttctagtgaatccta

SEQ ID NO: 12020 - DNA, 15 bp, Homo sapiens
attctagtgaatcct

SEQ ID NO: 12021 - DNA, 15 bp, Homo sapiens
tattctagtgaatcc

SEQ ID NO: 12022 - DNA, 15 bp, Homo sapiens
atattctagtgaatc

SEQ ID NO: 12023 - DNA, 15 bp, Homo sapiens
aatattctagtgaat

SEQ ID NO: 12024 - DNA, 15 bp, Homo sapiens
gaatattctagtgaa

SEQ ID NO: 12025 - DNA, 15 bp, Homo sapiens
agaatattctagtga

SEQ ID NO: 12026 - DNA, 15 bp, Homo sapiens
gagaatattctagtg

SEQ ID NO: 12027 - DNA, 15 bp, Homo sapiens
agagaatattctagt

SEQ ID NO: 12028 - DNA, 15 bp, Homo sapiens
gagagaatattctag

SEQ ID NO: 12029 - DNA, 15 bp, Homo sapiens
agagagaatattcta

SEQ ID NO: 12030 - DNA, 15 bp, Homo sapiens
tagagagaatattct

SEQ ID NO: 12031 - DNA, 15 bp, Homo sapiens
gtagagagaatattc

SEQ ID NO: 12032 - DNA, 15 bp, Homo sapiens
tgtagagagaatatt

SEQ ID NO: 12033 - DNA, 15 bp, Homo sapiens
atgtagagagaatat

SEQ ID NO: 12034 - DNA, 15 bp, Homo sapiens
aatgtagagagaata

SEQ ID NO: 12035 - DNA, 15 bp, Homo sapiens
aaatgtagagagaat

SEQ ID NO: 12036 - DNA, 15 bp, Homo sapiens
taaatgtagagagaa

SEQ ID NO: 12037 - DNA, 15 bp, Homo sapiens
ataaatgtagagaga

SEQ ID NO: 12038 - DNA, 15 bp, Homo sapiens
cataaatgtagagag

SEQ ID NO: 12039 - DNA, 15 bp, Homo sapiens
acataaatgtagaga

SEQ ID NO: 12040 - DNA, 15 bp, Homo sapiens
aacataaatgtagag

SEQ ID NO: 12041 - DNA, 15 bp, Homo sapiens
aaacataaatgtaga

SEQ ID NO: 12042 - DNA, 15 bp, Homo sapiens
caaacataaatgtag

SEQ ID NO: 12043 - DNA, 15 bp, Homo sapiens
tcaaacataaatgta

SEQ ID NO: 12044 - DNA, 15 bp, Homo sapiens
ttcaaacataaatgt

SEQ ID NO: 12045 - DNA, 15 bp, Homo sapiens
tttcaaacataaatg

SEQ ID NO: 12046 - DNA, 15 bp, Homo sapiens
ttttcaaacataaat

SEQ ID NO: 12047 - DNA, 15 bp, Homo sapiens
attttcaaacataaa

SEQ ID NO: 12048 - DNA, 15 bp, Homo sapiens
aattttcaaacataa

SEQ ID NO: 12049 - DNA, 15 bp, Homo sapiens
taattttcaaacata

SEQ ID NO: 12050 - DNA, 15 bp, Homo sapiens
gtaattttcaaacat

SEQ ID NO: 12051 - DNA, 15 bp, Homo sapiens
agtaattttcaaaca

SEQ ID NO: 12052 - DNA, 15 bp, Homo sapiens
tagtaattttcaaac

SEQ ID NO: 12053 - DNA, 15 bp, Homo sapiens
gtagtaattttcaaa

SEQ ID NO: 12054 - DNA, 15 bp, Homo sapiens
tgtagtaattttcaa

SEQ ID NO: 12055 - DNA, 15 bp, Homo sapiens
ctgtagtaattttca

SEQ ID NO: 12056 - DNA, 15 bp, Homo sapiens
tctgtagtaattttc

SEQ ID NO: 12057 - DNA, 15 bp, Homo sapiens
atctgtagtaatttt

SEQ ID NO: 12058 - DNA, 15 bp, Homo sapiens
tatctgtagtaattt

SEQ ID NO: 12059 - DNA, 15 bp, Homo sapiens
atatctgtagtaatt

SEQ ID NO: 12060 - DNA, 15 bp, Homo sapiens
tatatctgtagtaat

SEQ ID NO: 12061 - DNA, 15 bp, Homo sapiens
ttatatctgtagtaa

SEQ ID NO: 12062 - DNA, 15 bp, Homo sapiens
tttatatctgtagta

SEQ ID NO: 12063 - DNA, 15 bp, Homo sapiens
ttttatatctgtagt

SEQ ID NO: 12064 - DNA, 15 bp, Homo sapiens
tttttatatctgtag

SEQ ID NO: 12065 - DNA, 15 bp, Homo sapiens
gtttttatatctgta

SEQ ID NO: 12066 - DNA, 15 bp, Homo sapiens
tgtttttatatctgt

SEQ ID NO: 12067 - DNA, 15 bp, Homo sapiens
ttgtttttatatctg

SEQ ID NO: 12068 - DNA, 15 bp, Homo sapiens
tttgtttttatatct

SEQ ID NO: 12069 - DNA, 15 bp, Homo sapiens
ttttgtttttatatc

SEQ ID NO: 12070 - DNA, 15 bp, Homo sapiens
tttttgtttttatat

SEQ ID NO: 12071 - DNA, 15 bp, Homo sapiens
gtttttgtttttata

SEQ ID NO: 12072 - DNA, 15 bp, Homo sapiens
tgtttttgtttttat

SEQ ID NO: 12073 - DNA, 15 bp, Homo sapiens
ctgtttttgttttta

SEQ ID NO: 12074 - DNA, 15 bp, Homo sapiens
tctgtttttgttttt

SEQ ID NO: 12075 - DNA, 15 bp, Homo sapiens
gtctgtttttgtttt

SEQ ID NO: 12076 - DNA, 15 bp, Homo sapiens
tgtctgtttttgttt

SEQ ID NO: 12077 - DNA, 15 bp, Homo sapiens
ctgtctgtttttgtt

SEQ ID NO: 12078 - DNA, 15 bp, Homo sapiens
gctgtctgtttttgt

SEQ ID NO: 12079 - DNA, 15 bp, Homo sapiens
ggctgtctgtttttg

SEQ ID NO: 12080 - DNA, 15 bp, Homo sapiens
tggctgtctgttttt

SEQ ID NO: 12081 - DNA, 15 bp, Homo sapiens
ctggctgtctgtttt

SEQ ID NO: 12082 - DNA, 15 bp, Homo sapiens
cctggctgtctgttt

SEQ ID NO: 12083 - DNA, 15 bp, Homo sapiens
gcctggctgtctgtt

SEQ ID NO: 12084 - DNA, 15 bp, Homo sapiens
cgcctggctgtctgt

SEQ ID NO: 12085 - DNA, 15 bp, Homo sapiens
acgcctggctgtctg

SEQ ID NO: 12086 - DNA, 15 bp, Homo sapiens
cacgcctggctgtct

SEQ ID NO: 12087 - DNA, 15 bp, Homo sapiens
ccacgcctggctgtc

SEQ ID NO: 12088 - DNA, 15 bp, Homo sapiens
accacgcctggctgt

SEQ ID NO: 12089 - DNA, 15 bp, Homo sapiens
caccacgcctggctg

SEQ ID NO: 12090 - DNA, 15 bp, Homo sapiens
agccaccacgcctgg

SEQ ID NO: 12091 - DNA, 15 bp, Homo sapiens
gagccaccacgcctg

SEQ ID NO: 12092 - DNA, 15 bp, Homo sapiens
tgagccaccacgcct

SEQ ID NO: 12093 - DNA, 15 bp, Homo sapiens
tgattacaggcgtga

SEQ ID NO: 12094 - DNA, 15 bp, Homo sapiens
gtgattacaggcgtg

SEQ ID NO: 12095 - DNA, 15 bp, Homo sapiens
tgtgattacaggcgt

SEQ ID NO: 12096 - DNA, 15 bp, Homo sapiens
ttgtgattacaggcg

SEQ ID NO: 12097 - DNA, 15 bp, Homo sapiens
gttgtgattacaggc

SEQ ID NO: 12098 - DNA, 15 bp, Homo sapiens
tgttgtgattacagg

SEQ ID NO: 12099 - DNA, 15 bp, Homo sapiens
gtgttgtgattacag

SEQ ID NO: 12100 - DNA, 15 bp, Homo sapiens
agtgttgtgattaca

SEQ ID NO: 12101 - DNA, 15 bp, Homo sapiens
aagtgttgtgattac

SEQ ID NO: 12102 - DNA, 15 bp, Homo sapiens
aaagtgttgtgatta

SEQ ID NO: 12103 - DNA, 15 bp, Homo sapiens
caaagtgttgtgatt

SEQ ID NO: 12104 - DNA, 15 bp, Homo sapiens
ccaaagtgttgtgat

SEQ ID NO: 12105 - DNA, 15 bp, Homo sapiens
cccaaagtgttgtga

SEQ ID NO: 12106 - DNA, 15 bp, Homo sapiens
tcccaaagtgttgtg

SEQ ID NO: 12107 - DNA, 15 bp, Homo sapiens
ctcccaaagtgttgt

SEQ ID NO: 12108 - DNA, 15 bp, Homo sapiens
cctcccaaagtgttg

SEQ ID NO: 12109 - DNA, 15 bp, Homo sapiens
gcctcccaaagtgtt

SEQ ID NO: 12110 - DNA, 15 bp, Homo sapiens
ggcctcccaaagtgt

SEQ ID NO: 12111 - DNA, 15 bp, Homo sapiens
tgcctcggcctccca

SEQ ID NO: 12112 - DNA, 15 bp, Homo sapiens
ctgcctcggcctccc

SEQ ID NO: 12113 - DNA, 15 bp, Homo sapiens
tctgcctcggcctcc

SEQ ID NO: 12114 - DNA, 15 bp, Homo sapiens
atctgcctcggcctc

SEQ ID NO: 12115 - DNA, 15 bp, Homo sapiens
catctgcctcggcct

SEQ ID NO: 12116 - DNA, 15 bp, Homo sapiens
ccatctgcctcggcc

SEQ ID NO: 12117 - DNA, 15 bp, Homo sapiens
tccatctgcctcggc

SEQ ID NO: 12118 - DNA, 15 bp, Homo sapiens
atccatctgcctcgg

SEQ ID NO: 12119 - DNA, 15 bp, Homo sapiens
gatccatctgcctcg

SEQ ID NO: 12120 - DNA, 15 bp, Homo sapiens
tgatccatctgcctc

SEQ ID NO: 12121 - DNA, 15 bp, Homo sapiens
atgatccatctgcct

SEQ ID NO: 12122 - DNA, 15 bp, Homo sapiens
catgatccatctgcc

SEQ ID NO: 12123 - DNA, 15 bp, Homo sapiens
tcatgatccatctgc

SEQ ID NO: 12124 - DNA, 15 bp, Homo sapiens
ctcatgatccatctg

SEQ ID NO: 12125 - DNA, 15 bp, Homo sapiens
cctcatgatccatct

SEQ ID NO: 12126 - DNA, 15 bp, Homo sapiens
acctcatgatccatc

SEQ ID NO: 12127 - DNA, 15 bp, Homo sapiens
gacctcatgatccat

SEQ ID NO: 12128 - DNA, 15 bp, Homo sapiens
tgacctcatgatcca

SEQ ID NO: 12129 - DNA, 15 bp, Homo sapiens
ttgacctcatgatcc

SEQ ID NO: 12130 - DNA, 15 bp, Homo sapiens
cttgacctcatgatc

SEQ ID NO: 12131 - DNA, 15 bp, Homo sapiens
tcttgacctcatgat

SEQ ID NO: 12132 - DNA, 15 bp, Homo sapiens
ctcttgacctcatga

SEQ ID NO: 12133 - DNA, 15 bp, Homo sapiens
tctcttgacctcatg

SEQ ID NO: 12134 - DNA, 15 bp, Homo sapiens
atctcttgacctcat

SEQ ID NO: 12135 - DNA, 15 bp, Homo sapiens
gatctcttgacctca

SEQ ID NO: 12136 - DNA, 15 bp, Homo sapiens
cgatctcttgacctc

SEQ ID NO: 12137 - DNA, 15 bp, Homo sapiens
tcgatctcttgacct

SEQ ID NO: 12138 - DNA, 15 bp, Homo sapiens
ctcgatctcttgacc

SEQ ID NO: 12139 - DNA, 15 bp, Homo sapiens
tctcgatctcttgac

SEQ ID NO: 12140 - DNA, 15 bp, Homo sapiens
gtctcgatctcttga

SEQ ID NO: 12141 - DNA, 15 bp, Homo sapiens
ggtctcgatctcttg

SEQ ID NO: 12142 - DNA, 15 bp, Homo sapiens
tggtctcgatctctt

SEQ ID NO: 12143 - DNA, 15 bp, Homo sapiens
atggtctcgatctct

SEQ ID NO: 12144 - DNA, 15 bp, Homo sapiens
gatggtctcgatctc

SEQ ID NO: 12145 - DNA, 15 bp, Homo sapiens
ggatggtctcgatct

SEQ ID NO: 12146 - DNA, 15 bp, Homo sapiens
aggatggtctcgatc

SEQ ID NO: 12147 - DNA, 15 bp, Homo sapiens
caggatggtctcgat

SEQ ID NO: 12148 - DNA, 15 bp, Homo sapiens
ccaggatggtctcga

SEQ ID NO: 12149 - DNA, 15 bp, Homo sapiens
gccaggatggtctcg

SEQ ID NO: 12150 - DNA, 15 bp, Homo sapiens
ggccaggatggtctc

SEQ ID NO: 12151 - DNA, 15 bp, Homo sapiens
tggccaggatggtct

SEQ ID NO: 12152 - DNA, 15 bp, Homo sapiens
ttggccaggatggtc

SEQ ID NO: 12153 - DNA, 15 bp, Homo sapiens
gttggccaggatggt

SEQ ID NO: 12154 - DNA, 15 bp, Homo sapiens
tgttggccaggatgg

SEQ ID NO: 12155 - DNA, 15 bp, Homo sapiens
atgttggccaggatg

SEQ ID NO: 12156 - DNA, 15 bp, Homo sapiens
catgttggccaggat

SEQ ID NO: 12157 - DNA, 15 bp, Homo sapiens
ccatgttggccagga

SEQ ID NO: 12158 - DNA, 15 bp, Homo sapiens
caccatgttggccag

SEQ ID NO: 12159 - DNA, 15 bp, Homo sapiens
tcaccatgttggcca

SEQ ID NO: 12160 - DNA, 15 bp, Homo sapiens
ttcaccatgttggcc

SEQ ID NO: 12161 - DNA, 15 bp, Homo sapiens
tttcaccatgttggc

SEQ ID NO: 12162 - DNA, 15 bp, Homo sapiens
gtttcaccatgttgg

SEQ ID NO: 12163 - DNA, 15 bp, Homo sapiens
ggtttcaccatgttg

SEQ ID NO: 12164 - DNA, 15 bp, Homo sapiens
agggtttcaccatgt

SEQ ID NO: 12165 - DNA, 15 bp, Homo sapiens
cagggtttcaccatg

SEQ ID NO: 12166 - DNA, 15 bp, Homo sapiens
gacagggtttcacca

SEQ ID NO: 12167 - DNA, 15 bp, Homo sapiens
agacagggtttcacc

SEQ ID NO: 12168 - DNA, 15 bp, Homo sapiens
gagacagggtttcac

SEQ ID NO: 12169 - DNA, 15 bp, Homo sapiens
agagacagggtttca

SEQ ID NO: 12170 - DNA, 15 bp, Homo sapiens
tagagacagggtttc

SEQ ID NO: 12171 - DNA, 15 bp, Homo sapiens
gtagagacagggttt

SEQ ID NO: 12172 - DNA, 15 bp, Homo sapiens
agtagagacagggtt

SEQ ID NO: 12173 - DNA, 15 bp, Homo sapiens
tagtagagacagggt

SEQ ID NO: 12174 - DNA, 15 bp, Homo sapiens
ttagtagagacaggg

SEQ ID NO: 12175 - DNA, 15 bp, Homo sapiens
tttagtagagacagg

SEQ ID NO: 12176 - DNA, 15 bp, Homo sapiens
ttttagtagagacag

SEQ ID NO: 12177 - DNA, 15 bp, Homo sapiens
tttttagtagagaca

SEQ ID NO: 12178 - DNA, 15 bp, Homo sapiens
atttttagtagagac

SEQ ID NO: 12179 - DNA, 15 bp, Homo sapiens
tatttttagtagaga

SEQ ID NO: 12180 - DNA, 15 bp, Homo sapiens
tttttgtatttttag

SEQ ID NO: 12181 - DNA, 15 bp, Homo sapiens
atttttgtattttta

SEQ ID NO: 12182 - DNA, 15 bp, Homo sapiens
cacgcccagctaatt

SEQ ID NO: 12183 - DNA, 15 bp, Homo sapiens
ccacgcccagctaat

SEQ ID NO: 12184 - DNA, 15 bp, Homo sapiens
accacgcccagctaa

SEQ ID NO: 12185 - DNA, 15 bp, Homo sapiens
caccacgcccagcta

SEQ ID NO: 12186 - DNA, 15 bp, Homo sapiens
ccaccacgcccagct

SEQ ID NO: 12187 - DNA, 15 bp, Homo sapiens
accaccacgcccagc

SEQ ID NO: 12188 - DNA, 15 bp, Homo sapiens
caccaccacgcccag

SEQ ID NO: 12189 - DNA, 15 bp, Homo sapiens
gcaccaccacgccca

SEQ ID NO: 12190 - DNA, 15 bp, Homo sapiens
tgcaccaccacgccc

SEQ ID NO: 12191 - DNA, 15 bp, Homo sapiens
atgcaccaccacgcc

SEQ ID NO: 12192 - DNA, 15 bp, Homo sapiens
catgcaccaccacgc

SEQ ID NO: 12193 - DNA, 15 bp, Homo sapiens
gcatgcaccaccacg

SEQ ID NO: 12194 - DNA, 15 bp, Homo sapiens
ggcatgcaccaccac

SEQ ID NO: 12195 - DNA, 15 bp, Homo sapiens
aggcatgcaccacca

SEQ ID NO: 12196 - DNA, 15 bp, Homo sapiens
caggcatgcaccacc

SEQ ID NO: 12197 - DNA, 15 bp, Homo sapiens
acaggcatgcaccac

SEQ ID NO: 12198 - DNA, 15 bp, Homo sapiens
tacaggcatgcacca

SEQ ID NO: 12199 - DNA, 15 bp, Homo sapiens
ctacaggcatgcacc

SEQ ID NO: 12200 - DNA, 15 bp, Homo sapiens
actacaggcatgcac

SEQ ID NO: 12201 - DNA, 15 bp, Homo sapiens
gactacaggcatgca

SEQ ID NO: 12202 - DNA, 15 bp, Homo sapiens
ggactacaggcatgc

SEQ ID NO: 12203 - DNA, 15 bp, Homo sapiens
aggactacaggcatg

SEQ ID NO: 12204 - DNA, 15 bp, Homo sapiens
taggactacaggcat

SEQ ID NO: 12205 - DNA, 15 bp, Homo sapiens
ctaggactacaggca

SEQ ID NO: 12206 - DNA, 15 bp, Homo sapiens
gctaggactacaggc

SEQ ID NO: 12207 - DNA, 15 bp, Homo sapiens
agctaggactacagg

SEQ ID NO: 12208 - DNA, 15 bp, Homo sapiens
tagctaggactacag

SEQ ID NO: 12209 - DNA, 15 bp, Homo sapiens
atagctaggactaca

SEQ ID NO: 12210 - DNA, 15 bp, Homo sapiens
catagctaggactac

SEQ ID NO: 12211 - DNA, 15 bp, Homo sapiens
acatagctaggacta

SEQ ID NO: 12212 - DNA, 15 bp, Homo sapiens
cacatagctaggact

SEQ ID NO: 12213 - DNA, 15 bp, Homo sapiens
ccacatagctaggac

SEQ ID NO: 12214 - DNA, 15 bp, Homo sapiens
cccacatagctagga

SEQ ID NO: 12215 - DNA, 15 bp, Homo sapiens
tcccacatagctagg

SEQ ID NO: 12216 - DNA, 15 bp, Homo sapiens
ctcccacatagctag

SEQ ID NO: 12217 - DNA, 15 bp, Homo sapiens
cctcccacatagcta

SEQ ID NO: 12218 - DNA, 15 bp, Homo sapiens
gcctcccacatagct

SEQ ID NO: 12219 - DNA, 15 bp, Homo sapiens
agcctcccacatagc

SEQ ID NO: 12220 - DNA, 15 bp, Homo sapiens
cagcctcccacatag

SEQ ID NO: 12221 - DNA, 15 bp, Homo sapiens
tcagcctcccacata

SEQ ID NO: 12222 - DNA, 15 bp, Homo sapiens
ctcagcctcccacat

SEQ ID NO: 12223 - DNA, 15 bp, Homo sapiens
cctcagcctcccaca

SEQ ID NO: 12224 - DNA, 15 bp, Homo sapiens
gcctcagcctcccac

SEQ ID NO: 12225 - DNA, 15 bp, Homo sapiens
cctgcctcagcctcc

SEQ ID NO: 12226 - DNA, 15 bp, Homo sapiens
tcctgcctcagcctc

SEQ ID NO: 12227 - DNA, 15 bp, Homo sapiens
ctcctgcctcagcct

SEQ ID NO: 12228 - DNA, 15 bp, Homo sapiens
gattctcctgcctca

SEQ ID NO: 12229 - DNA, 15 bp, Homo sapiens
tgattctcctgcctc

SEQ ID NO: 12230 - DNA, 15 bp, Homo sapiens
gtgattctcctgcct

SEQ ID NO: 12231 - DNA, 15 bp, Homo sapiens
agtgattctcctgcc

SEQ ID NO: 12232 - DNA, 15 bp, Homo sapiens
aagtgattctcctgc

SEQ ID NO: 12233 - DNA, 15 bp, Homo sapiens
caagtgattctcctg

SEQ ID NO: 12234 - DNA, 15 bp, Homo sapiens
tcaagtgattctcct

SEQ ID NO: 12235 - DNA, 15 bp, Homo sapiens
ttcaagtgattctcc

SEQ ID NO: 12236 - DNA, 15 bp, Homo sapiens
gttcaagtgattctc

SEQ ID NO: 12237 - DNA, 15 bp, Homo sapiens
ggttcaagtgattct

SEQ ID NO: 12238 - DNA, 15 bp, Homo sapiens
gggttcaagtgattc

SEQ ID NO: 12239 - DNA, 15 bp, Homo sapiens
tgggttcaagtgatt

SEQ ID NO: 12240 - DNA, 15 bp, Homo sapiens
ctgggttcaagtgat

SEQ ID NO: 12241 - DNA, 15 bp, Homo sapiens
cctgggttcaagtga

SEQ ID NO: 12242 - DNA, 15 bp, Homo sapiens
tcctgggttcaagtg

SEQ ID NO: 12243 - DNA, 15 bp, Homo sapiens
ctcctgggttcaagt

SEQ ID NO: 12244 - DNA, 15 bp, Homo sapiens
cctcctgggttcaag

SEQ ID NO: 12245 - DNA, 15 bp, Homo sapiens
gcctcctgggttcaa

SEQ ID NO: 12246 - DNA, 15 bp, Homo sapiens
tgcctcctgggttca

SEQ ID NO: 12247 - DNA, 15 bp, Homo sapiens
ctgcctcctgggttc

SEQ ID NO: 12248 - DNA, 15 bp, Homo sapiens
tctgcctcctgggtt

SEQ ID NO: 12249 - DNA, 15 bp, Homo sapiens
ctctgcctcctgggt

SEQ ID NO: 12250 - DNA, 15 bp, Homo sapiens
cctctgcctcctggg

SEQ ID NO: 12251 - DNA, 15 bp, Homo sapiens
acctctgcctcctgg

SEQ ID NO: 12252 - DNA, 15 bp, Homo sapiens
aacctctgcctcctg

SEQ ID NO: 12253 - DNA, 15 bp, Homo sapiens
caacctctgcctcct

SEQ ID NO: 12254 - DNA, 15 bp, Homo sapiens
gcaacctctgcctcc

SEQ ID NO: 12255 - DNA, 15 bp, Homo sapiens
tgcaacctctgcctc

SEQ ID NO: 12256 - DNA, 15 bp, Homo sapiens
ctgcaacctctgcct

SEQ ID NO: 12257 - DNA, 15 bp, Homo sapiens
actgcaacctctgcc

SEQ ID NO: 12258 - DNA, 15 bp, Homo sapiens
cactgcaacctctgc

SEQ ID NO: 12259 - DNA, 15 bp, Homo sapiens
tcactgcaacctctg

SEQ ID NO: 12260 - DNA, 15 bp, Homo sapiens
ctcactgcaacctct

SEQ ID NO: 12261 - DNA, 15 bp, Homo sapiens
gctcactgcaacctc

SEQ ID NO: 12262 - DNA, 15 bp, Homo sapiens
agctcactgcaacct

SEQ ID NO: 12263 - DNA, 15 bp, Homo sapiens
cagctcactgcaacc

SEQ ID NO: 12264 - DNA, 15 bp, Homo sapiens
tcagctcactgcaac

SEQ ID NO: 12265 - DNA, 15 bp, Homo sapiens
cgatctcagctcact

SEQ ID NO: 12266 - DNA, 15 bp, Homo sapiens
acgatctcagctcac

SEQ ID NO: 12267 - DNA, 15 bp, Homo sapiens
tacgatctcagctca

SEQ ID NO: 12268 - DNA, 15 bp, Homo sapiens
gtacgatctcagctc

SEQ ID NO: 12269 - DNA, 15 bp, Homo sapiens
ggtacgatctcagct

SEQ ID NO: 12270 - DNA, 15 bp, Homo sapiens
tggtacgatctcagc

SEQ ID NO: 12271 - DNA, 15 bp, Homo sapiens
gtggtacgatctcag

SEQ ID NO: 12272 - DNA, 15 bp, Homo sapiens
agtggtacgatctca

SEQ ID NO: 12273 - DNA, 15 bp, Homo sapiens
cagtggtacgatctc

SEQ ID NO: 12274 - DNA, 15 bp, Homo sapiens
acagtggtacgatct

SEQ ID NO: 12275 - DNA, 15 bp, Homo sapiens
tacagtggtacgatc

SEQ ID NO: 12276 - DNA, 15 bp, Homo sapiens
gtacagtggtacgat

SEQ ID NO: 12277 - DNA, 15 bp, Homo sapiens
agtacagtggtacga

SEQ ID NO: 12278 - DNA, 15 bp, Homo sapiens
gagtacagtggtacg

SEQ ID NO: 12279 - DNA, 15 bp, Homo sapiens
ggagtacagtggtac

SEQ ID NO: 12280 - DNA, 15 bp, Homo sapiens
tggagtacagtggta

SEQ ID NO: 12281 - DNA, 15 bp, Homo sapiens
ctggagtacagtggt

SEQ ID NO: 12282 - DNA, 15 bp, Homo sapiens
gctggagtacagtgg

SEQ ID NO: 12283 - DNA, 15 bp, Homo sapiens
ggctggagtacagtg

SEQ ID NO: 12284 - DNA, 15 bp, Homo sapiens
aggctggagtacagt

SEQ ID NO: 12285 - DNA, 15 bp, Homo sapiens
caggctggagtacag

SEQ ID NO: 12286 - DNA, 15 bp, Homo sapiens
ccaggctggagtaca

SEQ ID NO: 12287 - DNA, 15 bp, Homo sapiens
cccaggctggagtac

SEQ ID NO: 12288 - DNA, 15 bp, Homo sapiens
acccaggctggagta

SEQ ID NO: 12289 - DNA, 15 bp, Homo sapiens
cacccaggctggagt

SEQ ID NO: 12290 - DNA, 15 bp, Homo sapiens
tcacccaggctggag

SEQ ID NO: 12291 - DNA, 15 bp, Homo sapiens
gtcacccaggctgga

SEQ ID NO: 12292 - DNA, 15 bp, Homo sapiens
tgtcacccaggctgg

SEQ ID NO: 12293 - DNA, 15 bp, Homo sapiens
ctgtcacccaggctg

SEQ ID NO: 12294 - DNA, 15 bp, Homo sapiens
tctgtcacccaggct

SEQ ID NO: 12295 - DNA, 15 bp, Homo sapiens
ctctgtcacccaggc

SEQ ID NO: 12296 - DNA, 15 bp, Homo sapiens
gctctgtcacccagg

SEQ ID NO: 12297 - DNA, 15 bp, Homo sapiens
cgctctgtcacccag

SEQ ID NO: 12298 - DNA, 15 bp, Homo sapiens
tcgctctgtcaccca

SEQ ID NO: 12299 - DNA, 15 bp, Homo sapiens
ctcgctctgtcaccc

SEQ ID NO: 12300 - DNA, 15 bp, Homo sapiens
tctcgctctgtcacc

SEQ ID NO: 12301 - DNA, 15 bp, Homo sapiens
gtctcgctctgtcac

SEQ ID NO: 12302 - DNA, 15 bp, Homo sapiens
agtctcgctctgtca

SEQ ID NO: 12303 - DNA, 15 bp, Homo sapiens
gagtctcgctctgtc

SEQ ID NO: 12304 - DNA, 15 bp, Homo sapiens
ggagtctcgctctgt

SEQ ID NO: 12305 - DNA, 15 bp, Homo sapiens
tggagtctcgctctg

SEQ ID NO: 12306 - DNA, 15 bp, Homo sapiens
atggagtctcgctct

SEQ ID NO: 12307 - DNA, 15 bp, Homo sapiens
gatggagtctcgctc

SEQ ID NO: 12308 - DNA, 15 bp, Homo sapiens
agatggagtctcgct

SEQ ID NO: 12309 - DNA, 15 bp, Homo sapiens
gagatggagtctcgc

SEQ ID NO: 12310 - DNA, 15 bp, Homo sapiens
tgagatggagtctcg

SEQ ID NO: 12311 - DNA, 15 bp, Homo sapiens
ttgagatggagtctc

SEQ ID NO: 12312 - DNA, 15 bp, Homo sapiens
tttgagatggagtct

SEQ ID NO: 12313 - DNA, 15 bp, Homo sapiens
ttttgagatggagtc

SEQ ID NO: 12314 - DNA, 15 bp, Homo sapiens
tttttgagatggagt

SEQ ID NO: 12315 - DNA, 15 bp, Homo sapiens
ttttttgagatggag

SEQ ID NO: 12316 - DNA, 15 bp, Homo sapiens
attttttgagatgga

SEQ ID NO: 12317 - DNA, 15 bp, Homo sapiens
tattttttgagatgg

SEQ ID NO: 12318 - DNA, 15 bp, Homo sapiens
ttattttttgagatg

SEQ ID NO: 12319 - DNA, 15 bp, Homo sapiens
attattttttgagat

SEQ ID NO: 12320 - DNA, 15 bp, Homo sapiens
tattattttttgaga

SEQ ID NO: 12321 - DNA, 15 bp, Homo sapiens
ttattattttttgag

SEQ ID NO: 12322 - DNA, 15 bp, Homo sapiens
attattattttttga

SEQ ID NO: 12323 - DNA, 15 bp, Homo sapiens
tattattattttttg

SEQ ID NO: 12324 - DNA, 15 bp, Homo sapiens
ttattattatttttt

SEQ ID NO: 12325 - DNA, 15 bp, Homo sapiens
attattattattttt

SEQ ID NO: 12326 - DNA, 15 bp, Homo sapiens
cattattattatttt

SEQ ID NO: 12327 - DNA, 15 bp, Homo sapiens
tcattattattattt

SEQ ID NO: 12328 - DNA, 15 bp, Homo sapiens
atcattattattatt

SEQ ID NO: 12329 - DNA, 15 bp, Homo sapiens
tatcattattattat

SEQ ID NO: 12330 - DNA, 15 bp, Homo sapiens
ttatcattattatta

SEQ ID NO: 12331 - DNA, 15 bp, Homo sapiens
tttatcattattatt

SEQ ID NO: 12332 - DNA, 15 bp, Homo sapiens
ttttatcattattat

SEQ ID NO: 12333 - DNA, 15 bp, Homo sapiens
tttttatcattatta

SEQ ID NO: 12334 - DNA, 15 bp, Homo sapiens
ttttttatcattatt

SEQ ID NO: 12335 - DNA, 15 bp, Homo sapiens
tttttttatcattat

SEQ ID NO: 12336 - DNA, 15 bp, Homo sapiens
atttttttatcatta

SEQ ID NO: 12337 - DNA, 15 bp, Homo sapiens
tatttttttatcatt

SEQ ID NO: 12338 - DNA, 15 bp, Homo sapiens
ttatttttttatcat

SEQ ID NO: 12339 - DNA, 15 bp, Homo sapiens
tttatttttttatca

SEQ ID NO: 12340 - DNA, 15 bp, Homo sapiens
ttttatttttttatc

SEQ ID NO: 12341 - DNA, 15 bp, Homo sapiens
tttttatttttttat

SEQ ID NO: 12342 - DNA, 15 bp, Homo sapiens
atttttattttttta

SEQ ID NO: 12343 - DNA, 15 bp, Homo sapiens
catttttattttttt

SEQ ID NO: 12344 - DNA, 15 bp, Homo sapiens
acatttttatttttt

SEQ ID NO: 12345 - DNA, 15 bp, Homo sapiens
tacatttttattttt

SEQ ID NO: 12346 - DNA, 15 bp, Homo sapiens
ttacatttttatttt

SEQ ID NO: 12347 - DNA, 15 bp, Homo sapiens
tttacatttttattt

SEQ ID NO: 12348 - DNA, 15 bp, Homo sapiens
ttttacatttttatt

SEQ ID NO: 12349 - DNA, 15 bp, Homo sapiens
tttttacatttttat

SEQ ID NO: 12350 - DNA, 15 bp, Homo sapiens
ctttttacattttta

SEQ ID NO: 12351 - DNA, 15 bp, Homo sapiens
tctttttacattttt

SEQ ID NO: 12352 - DNA, 15 bp, Homo sapiens
gtctttttacatttt

SEQ ID NO: 12353 - DNA, 15 bp, Homo sapiens
tgtctttttacattt

SEQ ID NO: 12354 - DNA, 15 bp, Homo sapiens
gtgtctttttacatt

SEQ ID NO: 12355 - DNA, 15 bp, Homo sapiens
tgtgtctttttacat

SEQ ID NO: 12356 - DNA, 15 bp, Homo sapiens
ctgtgtctttttaca

SEQ ID NO: 12357 - DNA, 15 bp, Homo sapiens
tctgtgtctttttac

SEQ ID NO: 12358 - DNA, 15 bp, Homo sapiens
ctctgtgtcttttta

SEQ ID NO: 12359 - DNA, 15 bp, Homo sapiens
cctctgtgtcttttt

SEQ ID NO: 12360 - DNA, 15 bp, Homo sapiens
acctctgtgtctttt

SEQ ID NO: 12361 - DNA, 15 bp, Homo sapiens
cacctctgtgtcttt

SEQ ID NO: 12362 - DNA, 15 bp, Homo sapiens
tcacctctgtgtctt

SEQ ID NO: 12363 - DNA, 15 bp, Homo sapiens
ttcacctctgtgtct

SEQ ID NO: 12364 - DNA, 15 bp, Homo sapiens
cttcacctctgtgtc

SEQ ID NO: 12365 - DNA, 15 bp, Homo sapiens
tcttcacctctgtgt

SEQ ID NO: 12366 - DNA, 15 bp, Homo sapiens
gtcttcacctctgtg

SEQ ID NO: 12367 - DNA, 15 bp, Homo sapiens
tgtcttcacctctgt

SEQ ID NO: 12368 - DNA, 15 bp, Homo sapiens
ctgtcttcacctctg

SEQ ID NO: 12369 - DNA, 15 bp, Homo sapiens
tctgtcttcacctct

SEQ ID NO: 12370 - DNA, 15 bp, Homo sapiens
ttctgtcttcacctc

SEQ ID NO: 12371 - DNA, 15 bp, Homo sapiens
tttctgtcttcacct

SEQ ID NO: 12372 - DNA, 15 bp, Homo sapiens
ctttctgtcttcacc

SEQ ID NO: 12373 - DNA, 15 bp, Homo sapiens
tctttctgtcttcac

SEQ ID NO: 12374 - DNA, 15 bp, Homo sapiens
ctctttctgtcttca

SEQ ID NO: 12375 - DNA, 15 bp, Homo sapiens
tctctttctgtcttc

SEQ ID NO: 12376 - DNA, 15 bp, Homo sapiens
ctctctttctgtctt

SEQ ID NO: 12377 - DNA, 15 bp, Homo sapiens
cctctctttctgtct

SEQ ID NO: 12378 - DNA, 15 bp, Homo sapiens
tcctctctttctgtc

SEQ ID NO: 12379 - DNA, 15 bp, Homo sapiens
gtcctctctttctgt

SEQ ID NO: 12380 - DNA, 15 bp, Homo sapiens
tgtcctctctttctg

SEQ ID NO: 12381 - DNA, 15 bp, Homo sapiens
ctgtcctctctttct

SEQ ID NO: 12382 - DNA, 15 bp, Homo sapiens
tctgtcctctctttc

SEQ ID NO: 12383 - DNA, 15 bp, Homo sapiens
atctgtcctctcttt

SEQ ID NO: 12384 - DNA, 15 bp, Homo sapiens
tatctgtcctctctt

SEQ ID NO: 12385 - DNA, 15 bp, Homo sapiens
ttatctgtcctctct

SEQ ID NO: 12386 - DNA, 15 bp, Homo sapiens
tttatctgtcctctc

SEQ ID NO: 12387 - DNA, 15 bp, Homo sapiens
ttttatctgtcctct

SEQ ID NO: 12388 - DNA, 15 bp, Homo sapiens
tttttatctgtcctc

SEQ ID NO: 12389 - DNA, 15 bp, Homo sapiens
ttttttatctgtcct

SEQ ID NO: 12390 - DNA, 15 bp, Homo sapiens
cttttttatctgtcc

SEQ ID NO: 12391 - DNA, 15 bp, Homo sapiens
acttttttatctgtc

SEQ ID NO: 12392 - DNA, 15 bp, Homo sapiens
cacttttttatctgt

SEQ ID NO: 12393 - DNA, 15 bp, Homo sapiens
ccacttttttatctg

SEQ ID NO: 12394 - DNA, 15 bp, Homo sapiens
tccacttttttatct

SEQ ID NO: 12395 - DNA, 15 bp, Homo sapiens
gtccacttttttatc

SEQ ID NO: 12396 - DNA, 15 bp, Homo sapiens
tgtccacttttttat

SEQ ID NO: 12397 - DNA, 15 bp, Homo sapiens
ctgtccactttttta

SEQ ID NO: 12398 - DNA, 15 bp, Homo sapiens
tctgtccactttttt

SEQ ID NO: 12399 - DNA, 15 bp, Homo sapiens
gtctgtccacttttt

SEQ ID NO: 12400 - DNA, 15 bp, Homo sapiens
ggtctgtccactttt

SEQ ID NO: 12401 - DNA, 15 bp, Homo sapiens
tggtctgtccacttt

SEQ ID NO: 12402 - DNA, 15 bp, Homo sapiens
ctggtctgtccactt

SEQ ID NO: 12403 - DNA, 15 bp, Homo sapiens
cctggtctgtccact

SEQ ID NO: 12404 - DNA, 15 bp, Homo sapiens
tcctggtctgtccac

SEQ ID NO: 12405 - DNA, 15 bp, Homo sapiens
ctcctggtctgtcca

SEQ ID NO: 12406 - DNA, 15 bp, Homo sapiens
cctcctggtctgtcc

SEQ ID NO: 12407 - DNA, 15 bp, Homo sapiens
ccctcctggtctgtc

SEQ ID NO: 12408 - DNA, 15 bp, Homo sapiens
cccctcctggtctgt

SEQ ID NO: 12409 - DNA, 15 bp, Homo sapiens
ccccctcctggtctg

SEQ ID NO: 12410 - DNA, 15 bp, Homo sapiens
gccccctcctggtct

SEQ ID NO: 12411 - DNA, 15 bp, Homo sapiens
ggccccctcctggtc

SEQ ID NO: 12412 - DNA, 15 bp, Homo sapiens
cggccccctcctggt

SEQ ID NO: 12413 - DNA, 15 bp, Homo sapiens
tcggccccctcctgg

SEQ ID NO: 12414 - DNA, 15 bp, Homo sapiens
gtcggccccctcctg

SEQ ID NO: 12415 - DNA, 15 bp, Homo sapiens
tgtcggccccctcct

SEQ ID NO: 12416 - DNA, 15 bp, Homo sapiens
gtgtcggccccctcc

SEQ ID NO: 12417 - DNA, 15 bp, Homo sapiens
tgtgtcggccccctc

SEQ ID NO: 12418 - DNA, 15 bp, Homo sapiens
ctgtgtcggccccct

SEQ ID NO: 12419 - DNA, 15 bp, Homo sapiens
tctgtgtcggccccc

SEQ ID NO: 12420 - DNA, 15 bp, Homo sapiens
ctctgtgtcggcccc

SEQ ID NO: 12421 - DNA, 15 bp, Homo sapiens
cctctgtgtcggccc

SEQ ID NO: 12422 - DNA, 15 bp, Homo sapiens
acctctgtgtcggcc

SEQ ID NO: 12423 - DNA, 15 bp, Homo sapiens
cacctctgtgtcggc

SEQ ID NO: 12424 - DNA, 15 bp, Homo sapiens
ccacctctgtgtcgg

SEQ ID NO: 12425 - DNA, 15 bp, Homo sapiens
tccacctctgtgtcg

SEQ ID NO: 12426 - DNA, 15 bp, Homo sapiens
ctccacctctgtgtc

SEQ ID NO: 12427 - DNA, 15 bp, Homo sapiens
tctccacctctgtgt

SEQ ID NO: 12428 - DNA, 15 bp, Homo sapiens
ttctccacctctgtg

SEQ ID NO: 12429 - DNA, 15 bp, Homo sapiens
tttctccacctctgt

SEQ ID NO: 12430 - DNA, 15 bp, Homo sapiens
ttttctccacctctg

SEQ ID NO: 12431 - DNA, 15 bp, Homo sapiens
tttttctccacctct

SEQ ID NO: 12432 - DNA, 15 bp, Homo sapiens
ctttttctccacctc

SEQ ID NO: 12433 - DNA, 15 bp, Homo sapiens
tctttttctccacct

SEQ ID NO: 12434 - DNA, 15 bp, Homo sapiens
ctctttttctccacc

SEQ ID NO: 12435 - DNA, 15 bp, Homo sapiens
cctctttttctccac

SEQ ID NO: 12436 - DNA, 15 bp, Homo sapiens
ccctctttttctcca

SEQ ID NO: 12437 - DNA, 15 bp, Homo sapiens
cccctctttttctcc

SEQ ID NO: 12438 - DNA, 15 bp, Homo sapiens
gcccctctttttctc

SEQ ID NO: 12439 - DNA, 15 bp, Homo sapiens
tgcccctctttttct

SEQ ID NO: 12440 - DNA, 15 bp, Homo sapiens
ctgcccctctttttc

SEQ ID NO: 12441 - DNA, 15 bp, Homo sapiens
tctgcccctcttttt

SEQ ID NO: 12442 - DNA, 15 bp, Homo sapiens
gtctgcccctctttt

SEQ ID NO: 12443 - DNA, 15 bp, Homo sapiens
tgtctgcccctcttt

SEQ ID NO: 12444 - DNA, 15 bp, Homo sapiens
ctgtctgcccctctt

SEQ ID NO: 12445 - DNA, 15 bp, Homo sapiens
tctgtctgcccctct

SEQ ID NO: 12446 - DNA, 15 bp, Homo sapiens
ctctgtctgcccctc

SEQ ID NO: 12447 - DNA, 15 bp, Homo sapiens
tctctgtctgcccct

SEQ ID NO: 12448 - DNA, 15 bp, Homo sapiens
atctctgtctgcccc

SEQ ID NO: 12449 - DNA, 15 bp, Homo sapiens
catctctgtctgccc

SEQ ID NO: 12450 - DNA, 15 bp, Homo sapiens
acatctctgtctgcc

SEQ ID NO: 12451 - DNA, 15 bp, Homo sapiens
cacatctctgtctgc

SEQ ID NO: 12452 - DNA, 15 bp, Homo sapiens
ccacatctctgtctg

SEQ ID NO: 12453 - DNA, 15 bp, Homo sapiens
tccacatctctgtct

SEQ ID NO: 12454 - DNA, 15 bp, Homo sapiens
gtccacatctctgtc

SEQ ID NO: 12455 - DNA, 15 bp, Homo sapiens
tgtccacatctctgt

SEQ ID NO: 12456 - DNA, 15 bp, Homo sapiens
gtgtccacatctctg

SEQ ID NO: 12457 - DNA, 15 bp, Homo sapiens
tgtgtccacatctct

SEQ ID NO: 12458 - DNA, 15 bp, Homo sapiens
ctgtgtccacatctc

SEQ ID NO: 12459 - DNA, 15 bp, Homo sapiens
tctgtgtccacatct

SEQ ID NO: 12460 - DNA, 15 bp, Homo sapiens
ctctgtgtccacatc

SEQ ID NO: 12461 - DNA, 15 bp, Homo sapiens
cctctgtgtccacat

SEQ ID NO: 12462 - DNA, 15 bp, Homo sapiens
tcctctgtgtccaca

SEQ ID NO: 12463 - DNA, 15 bp, Homo sapiens
ttcctctgtgtccac

SEQ ID NO: 12464 - DNA, 15 bp, Homo sapiens
cttcctctgtgtcca

SEQ ID NO: 12465 - DNA, 15 bp, Homo sapiens
tcttcctctgtgtcc

SEQ ID NO: 12466 - DNA, 15 bp, Homo sapiens
ctcttcctctgtgtc

SEQ ID NO: 12467 - DNA, 15 bp, Homo sapiens
cctcttcctctgtgt

SEQ ID NO: 12468 - DNA, 15 bp, Homo sapiens
tcctcttcctctgtg

SEQ ID NO: 12469 - DNA, 15 bp, Homo sapiens
ctcctcttcctctgt

SEQ ID NO: 12470 - DNA, 15 bp, Homo sapiens
tctcctcttcctctg

SEQ ID NO: 12471 - DNA, 15 bp, Homo sapiens
gtctcctcttcctct

SEQ ID NO: 12472 - DNA, 15 bp, Homo sapiens
tgtctcctcttcctc

SEQ ID NO: 12473 - DNA, 15 bp, Homo sapiens
ctgtctcctcttcct

SEQ ID NO: 12474 - DNA, 15 bp, Homo sapiens
tctgtctcctcttcc

SEQ ID NO: 12475 - DNA, 15 bp, Homo sapiens
atctgtctcctcttc

SEQ ID NO: 12476 - DNA, 15 bp, Homo sapiens
tatctgtctcctctt

SEQ ID NO: 12477 - DNA, 15 bp, Homo sapiens
ttatctgtctcctct

SEQ ID NO: 12478 - DNA, 15 bp, Homo sapiens
tttatctgtctcctc

SEQ ID NO: 12479 - DNA, 15 bp, Homo sapiens
ctttatctgtctcct

SEQ ID NO: 12480 - DNA, 15 bp, Homo sapiens
tctttatctgtctcc

SEQ ID NO: 12481 - DNA, 15 bp, Homo sapiens
ctctttatctgtctc

SEQ ID NO: 12482 - DNA, 15 bp, Homo sapiens
cctctttatctgtct

SEQ ID NO: 12483 - DNA, 15 bp, Homo sapiens
gcctctttatctgtc

SEQ ID NO: 12484 - DNA, 15 bp, Homo sapiens
tgcctctttatctgt

SEQ ID NO: 12485 - DNA, 15 bp, Homo sapiens
ctgcctctttatctg

SEQ ID NO: 12486 - DNA, 15 bp, Homo sapiens
tctgcctctttatct

SEQ ID NO: 12487 - DNA, 15 bp, Homo sapiens
gtctgcctctttatc

SEQ ID NO: 12488 - DNA, 15 bp, Homo sapiens
tgtctgcctctttat

SEQ ID NO: 12489 - DNA, 15 bp, Homo sapiens
ctgtctgcctcttta

SEQ ID NO: 12490 - DNA, 15 bp, Homo sapiens
tctgtctgcctcttt

SEQ ID NO: 12491 - DNA, 15 bp, Homo sapiens
ttctgtctgcctctt

SEQ ID NO: 12492 - DNA, 15 bp, Homo sapiens
cttctgtctgcctct

SEQ ID NO: 12493 - DNA, 15 bp, Homo sapiens
ccttctgtctgcctc

SEQ ID NO: 12494 - DNA, 15 bp, Homo sapiens
cccttctgtctgcct

SEQ ID NO: 12495 - DNA, 15 bp, Homo sapiens
ccccttctgtctgcc

SEQ ID NO: 12496 - DNA, 15 bp, Homo sapiens
tccccttctgtctgc

SEQ ID NO: 12497 - DNA, 15 bp, Homo sapiens
ctccccttctgtctg

SEQ ID NO: 12498 - DNA, 15 bp, Homo sapiens
cctccccttctgtct

SEQ ID NO: 12499 - DNA, 15 bp, Homo sapiens
ccctccccttctgtc

SEQ ID NO: 12500 - DNA, 15 bp, Homo sapiens
cccctccccttctgt

SEQ ID NO: 12501 - DNA, 15 bp, Homo sapiens
ccccctccccttctg

SEQ ID NO: 12502 - DNA, 15 bp, Homo sapiens
cccccctccccttct

SEQ ID NO: 12503 - DNA, 15 bp, Homo sapiens
gcccccctccccttc

SEQ ID NO: 12504 - DNA, 15 bp, Homo sapiens
ggcccccctcccctt

SEQ ID NO: 12505 - DNA, 15 bp, Homo sapiens
tggcccccctcccct

SEQ ID NO: 12506 - DNA, 15 bp, Homo sapiens
ttggcccccctcccc

SEQ ID NO: 12507 - DNA, 15 bp, Homo sapiens
tttggcccccctccc

SEQ ID NO: 12508 - DNA, 15 bp, Homo sapiens
atttggcccccctcc

SEQ ID NO: 12509 - DNA, 15 bp, Homo sapiens
tatttggcccccctc

SEQ ID NO: 12510 - DNA, 15 bp, Homo sapiens
gtatttggcccccct

SEQ ID NO: 12511 - DNA, 15 bp, Homo sapiens
tgtatttggcccccc

SEQ ID NO: 12512 - DNA, 15 bp, Homo sapiens
ctgtatttggccccc

SEQ ID NO: 12513 - DNA, 15 bp, Homo sapiens
tctgtatttggcccc

SEQ ID NO: 12514 - DNA, 15 bp, Homo sapiens
ctctgtatttggccc

SEQ ID NO: 12515 - DNA, 15 bp, Homo sapiens
cctctgtatttggcc

SEQ ID NO: 12516 - DNA, 15 bp, Homo sapiens
acctctgtatttggc

SEQ ID NO: 12517 - DNA, 15 bp, Homo sapiens
cacctctgtatttgg

SEQ ID NO: 12518 - DNA, 15 bp, Homo sapiens
ccacctctgtatttg

SEQ ID NO: 12519 - DNA, 15 bp, Homo sapiens
tccacctctgtattt

SEQ ID NO: 12520 - DNA, 15 bp, Homo sapiens
gtccacctctgtatt

SEQ ID NO: 12521 - DNA, 15 bp, Homo sapiens
tgtccacctctgtat

SEQ ID NO: 12522 - DNA, 15 bp, Homo sapiens
ctgtccacctctgta

SEQ ID NO: 12523 - DNA, 15 bp, Homo sapiens
tctgtccacctctgt

SEQ ID NO: 12524 - DNA, 15 bp, Homo sapiens
ctctgtccacctctg

SEQ ID NO: 12525 - DNA, 15 bp, Homo sapiens
tctctgtccacctct

SEQ ID NO: 12526 - DNA, 15 bp, Homo sapiens
ctctctgtccacctc

SEQ ID NO: 12527 - DNA, 15 bp, Homo sapiens
cctctctgtccacct

SEQ ID NO: 12528 - DNA, 15 bp, Homo sapiens
tcctctctgtccacc

SEQ ID NO: 12529 - DNA, 15 bp, Homo sapiens
ttcctctctgtccac

SEQ ID NO: 12530 - DNA, 15 bp, Homo sapiens
cttcctctctgtcca

SEQ ID NO: 12531 - DNA, 15 bp, Homo sapiens
tcttcctctctgtcc

SEQ ID NO: 12532 - DNA, 15 bp, Homo sapiens
ctcttcctctctgtc

SEQ ID NO: 12533 - DNA, 15 bp, Homo sapiens
cctcttcctctctgt

SEQ ID NO: 12534 - DNA, 15 bp, Homo sapiens
ccctcttcctctctg

SEQ ID NO: 12535 - DNA, 15 bp, Homo sapiens
cccctcttcctctct

SEQ ID NO: 12536 - DNA, 15 bp, Homo sapiens
tcccctcttcctctc

SEQ ID NO: 12537 - DNA, 15 bp, Homo sapiens
gtcccctcttcctct

SEQ ID NO: 12538 - DNA, 15 bp, Homo sapiens
tgtcccctcttcctc

SEQ ID NO: 12539 - DNA, 15 bp, Homo sapiens
ctgtcccctcttcct

SEQ ID NO: 12540 - DNA, 15 bp, Homo sapiens
tctgtcccctcttcc

SEQ ID NO: 12541 - DNA, 15 bp, Homo sapiens
atctgtcccctcttc

SEQ ID NO: 12542 - DNA, 15 bp, Homo sapiens
catctgtcccctctt

SEQ ID NO: 12543 - DNA, 15 bp, Homo sapiens
acatctgtcccctct

SEQ ID NO: 12544 - DNA, 15 bp, Homo sapiens
tacatctgtcccctc

SEQ ID NO: 12545 - DNA, 15 bp, Homo sapiens
ttacatctgtcccct

SEQ ID NO: 12546 - DNA, 15 bp, Homo sapiens
tttacatctgtcccc

SEQ ID NO: 12547 - DNA, 15 bp, Homo sapiens
ctttacatctgtccc

SEQ ID NO: 12548 - DNA, 15 bp, Homo sapiens
cctttacatctgtcc

SEQ ID NO: 12549 - DNA, 15 bp, Homo sapiens
acctttacatctgtc

SEQ ID NO: 12550 - DNA, 15 bp, Homo sapiens
cacctttacatctgt

SEQ ID NO: 12551 - DNA, 15 bp, Homo sapiens
ccacctttacatctg

SEQ ID NO: 12552 - DNA, 15 bp, Homo sapiens
tccacctttacatct

SEQ ID NO: 12553 - DNA, 15 bp, Homo sapiens
gtccacctttacatc

SEQ ID NO: 12554 - DNA, 15 bp, Homo sapiens
tgtccacctttacat

SEQ ID NO: 12555 - DNA, 15 bp, Homo sapiens
ctgtccacctttaca

SEQ ID NO: 12556 - DNA, 15 bp, Homo sapiens
tctgtccacctttac

SEQ ID NO: 12557 - DNA, 15 bp, Homo sapiens
ttctgtccaccttta

SEQ ID NO: 12558 - DNA, 15 bp, Homo sapiens
cttctgtccaccttt

SEQ ID NO: 12559 - DNA, 15 bp, Homo sapiens
ccttctgtccacctt

SEQ ID NO: 12560 - DNA, 15 bp, Homo sapiens
cccttctgtccacct

SEQ ID NO: 12561 - DNA, 15 bp, Homo sapiens
ccccttctgtccacc

SEQ ID NO: 12562 - DNA, 15 bp, Homo sapiens
tccccttctgtccac

SEQ ID NO: 12563 - DNA, 15 bp, Homo sapiens
ctccccttctgtcca

SEQ ID NO: 12564 - DNA, 15 bp, Homo sapiens
cctccccttctgtcc

SEQ ID NO: 12565 - DNA, 15 bp, Homo sapiens
acccctccccttctg

SEQ ID NO: 12566 - DNA, 15 bp, Homo sapiens
tacccctccccttct

SEQ ID NO: 12567 - DNA, 15 bp, Homo sapiens
gtacccctccccttc

SEQ ID NO: 12568 - DNA, 15 bp, Homo sapiens
agtacccctcccctt

SEQ ID NO: 12569 - DNA, 15 bp, Homo sapiens
cagtacccctcccct

SEQ ID NO: 12570 - DNA, 15 bp, Homo sapiens
tcagtacccctcccc

SEQ ID NO: 12571 - DNA, 15 bp, Homo sapiens
atcagtacccctccc

SEQ ID NO: 12572 - DNA, 15 bp, Homo sapiens
tatcagtacccctcc

SEQ ID NO: 12573 - DNA, 15 bp, Homo sapiens
gtatcagtacccctc

SEQ ID NO: 12574 - DNA, 15 bp, Homo sapiens
ggtatcagtacccct

SEQ ID NO: 12575 - DNA, 15 bp, Homo sapiens
aggtatcagtacccc

SEQ ID NO: 12576 - DNA, 15 bp, Homo sapiens
caggtatcagtaccc

SEQ ID NO: 12577 - DNA, 15 bp, Homo sapiens
ccaggtatcagtacc

SEQ ID NO: 12578 - DNA, 15 bp, Homo sapiens
cccaggtatcagtac

SEQ ID NO: 12579 - DNA, 15 bp, Homo sapiens
acccaggtatcagta

SEQ ID NO: 12580 - DNA, 15 bp, Homo sapiens
cacccaggtatcagt

SEQ ID NO: 12581 - DNA, 15 bp, Homo sapiens
tcacccaggtatcag

SEQ ID NO: 12582 - DNA, 15 bp, Homo sapiens
ttcacccaggtatca

SEQ ID NO: 12583 - DNA, 15 bp, Homo sapiens
gttcacccaggtatc

SEQ ID NO: 12584 - DNA, 15 bp, Homo sapiens
tgttcacccaggtat

SEQ ID NO: 12585 - DNA, 15 bp, Homo sapiens
gtgttcacccaggta

SEQ ID NO: 12586 - DNA, 15 bp, Homo sapiens
tgtgttcacccaggt

SEQ ID NO: 12587 - DNA, 15 bp, Homo sapiens
ctgtgttcacccagg

SEQ ID NO: 12588 - DNA, 15 bp, Homo sapiens
tctgtgttcacccag

SEQ ID NO: 12589 - DNA, 15 bp, Homo sapiens
ctctgtgttcaccca

SEQ ID NO: 12590 - DNA, 15 bp, Homo sapiens
cctctgtgttcaccc

SEQ ID NO: 12591 - DNA, 15 bp, Homo sapiens
tcctctgtgttcacc

SEQ ID NO: 12592 - DNA, 15 bp, Homo sapiens
ttcctctgtgttcac

SEQ ID NO: 12593 - DNA, 15 bp, Homo sapiens
cttcctctgtgttca

SEQ ID NO: 12594 - DNA, 15 bp, Homo sapiens
tcttcctctgtgttc

SEQ ID NO: 12595 - DNA, 15 bp, Homo sapiens
ctcttcctctgtgtt

SEQ ID NO: 12596 - DNA, 15 bp, Homo sapiens
ccctcttcctctgtg

SEQ ID NO: 12597 - DNA, 15 bp, Homo sapiens
tccctcttcctctgt

SEQ ID NO: 12598 - DNA, 15 bp, Homo sapiens
ttccctcttcctctg

SEQ ID NO: 12599 - DNA, 15 bp, Homo sapiens
gttccctcttcctct

SEQ ID NO: 12600 - DNA, 15 bp, Homo sapiens
tgttccctcttcctc

SEQ ID NO: 12601 - DNA, 15 bp, Homo sapiens
ctgttccctcttcct

SEQ ID NO: 12602 - DNA, 15 bp, Homo sapiens
tctgttccctcttcc

SEQ ID NO: 12603 - DNA, 15 bp, Homo sapiens
ttctgttccctcttc

SEQ ID NO: 12604 - DNA, 15 bp, Homo sapiens
tttctgttccctctt

SEQ ID NO: 12605 - DNA, 15 bp, Homo sapiens
atttctgttccctct

SEQ ID NO: 12606 - DNA, 15 bp, Homo sapiens
tatttctgttccctc

SEQ ID NO: 12607 - DNA, 15 bp, Homo sapiens
ctatttctgttccct

SEQ ID NO: 12608 - DNA, 15 bp, Homo sapiens
cctatttctgttccc

SEQ ID NO: 12609 - DNA, 15 bp, Homo sapiens
tcctatttctgttcc

SEQ ID NO: 12610 - DNA, 15 bp, Homo sapiens
ctcctatttctgttc

SEQ ID NO: 12611 - DNA, 15 bp, Homo sapiens
tctcctatttctgtt

SEQ ID NO: 12612 - DNA, 15 bp, Homo sapiens
ctctcctatttctgt

SEQ ID NO: 12613 - DNA, 15 bp, Homo sapiens
gctctcctatttctg

SEQ ID NO: 12614 - DNA, 15 bp, Homo sapiens
tgctctcctatttct

SEQ ID NO: 12615 - DNA, 15 bp, Homo sapiens
ctgctctcctatttc

SEQ ID NO: 12616 - DNA, 15 bp, Homo sapiens
tctgctctcctattt

SEQ ID NO: 12617 - DNA, 15 bp, Homo sapiens
ttctgctctcctatt

SEQ ID NO: 12618 - DNA, 15 bp, Homo sapiens
attctgctctcctat

SEQ ID NO: 12619 - DNA, 15 bp, Homo sapiens
cattctgctctccta

SEQ ID NO: 12620 - DNA, 15 bp, Homo sapiens
ccattctgctctcct

SEQ ID NO: 12621 - DNA, 15 bp, Homo sapiens
tccattctgctctcc

SEQ ID NO: 12622 - DNA, 15 bp, Homo sapiens
ctccattctgctctc

SEQ ID NO: 12623 - DNA, 15 bp, Homo sapiens
cctccattctgctct

SEQ ID NO: 12624 - DNA, 15 bp, Homo sapiens
ccctccattctgctc

SEQ ID NO: 12625 - DNA, 15 bp, Homo sapiens
tccctccattctgct

SEQ ID NO: 12626 - DNA, 15 bp, Homo sapiens
ctccctccattctgc

SEQ ID NO: 12627 - DNA, 15 bp, Homo sapiens
cctccctccattctg

SEQ ID NO: 12628 - DNA, 15 bp, Homo sapiens
ccctccctccattct

SEQ ID NO: 12629 - DNA, 15 bp, Homo sapiens
tccctccctccattc

SEQ ID NO: 12630 - DNA, 15 bp, Homo sapiens
ttccctccctccatt

SEQ ID NO: 12631 - DNA, 15 bp, Homo sapiens
tttccctccctccat

SEQ ID NO: 12632 - DNA, 15 bp, Homo sapiens
ttttccctccctcca

SEQ ID NO: 12633 - DNA, 15 bp, Homo sapiens
tttttccctccctcc

SEQ ID NO: 12634 - DNA, 15 bp, Homo sapiens
ctttttccctccctc

SEQ ID NO: 12635 - DNA, 15 bp, Homo sapiens
tctttttccctccct

SEQ ID NO: 12636 - DNA, 15 bp, Homo sapiens
ctctttttccctccc

SEQ ID NO: 12637 - DNA, 15 bp, Homo sapiens
tctctttttccctcc

SEQ ID NO: 12638 - DNA, 15 bp, Homo sapiens
ttctctttttccctc

SEQ ID NO: 12639 - DNA, 15 bp, Homo sapiens
cttctctttttccct

SEQ ID NO: 12640 - DNA, 15 bp, Homo sapiens
acttctctttttccc

SEQ ID NO: 12641 - DNA, 15 bp, Homo sapiens
cacttctctttttcc

SEQ ID NO: 12642 - DNA, 15 bp, Homo sapiens
ccacttctctttttc

SEQ ID NO: 12643 - DNA, 15 bp, Homo sapiens
tccacttctcttttt

SEQ ID NO: 12644 - DNA, 15 bp, Homo sapiens
gtccacttctctttt

SEQ ID NO: 12645 - DNA, 15 bp, Homo sapiens
tgtccacttctcttt

SEQ ID NO: 12646 - DNA, 15 bp, Homo sapiens
ctgtccacttctctt

SEQ ID NO: 12647 - DNA, 15 bp, Homo sapiens
tctgtccacttctct

SEQ ID NO: 12648 - DNA, 15 bp, Homo sapiens
ctctgtccacttctc

SEQ ID NO: 12649 - DNA, 15 bp, Homo sapiens
tctctgtccacttct

SEQ ID NO: 12650 - DNA, 15 bp, Homo sapiens
ctctctgtccacttc

SEQ ID NO: 12651 - DNA, 15 bp, Homo sapiens
cctctctgtccactt

SEQ ID NO: 12652 - DNA, 15 bp, Homo sapiens
tcctctctgtccact

SEQ ID NO: 12653 - DNA, 15 bp, Homo sapiens
tttcctctctgtcca

SEQ ID NO: 12654 - DNA, 15 bp, Homo sapiens
ttttcctctctgtcc

SEQ ID NO: 12655 - DNA, 15 bp, Homo sapiens
cttttcctctctgtc

SEQ ID NO: 12656 - DNA, 15 bp, Homo sapiens
ccttttcctctctgt

SEQ ID NO: 12657 - DNA, 15 bp, Homo sapiens
cccttttcctctctg

SEQ ID NO: 12658 - DNA, 15 bp, Homo sapiens
ccccttttcctctct

SEQ ID NO: 12659 - DNA, 15 bp, Homo sapiens
tccccttttcctctc

SEQ ID NO: 12660 - DNA, 15 bp, Homo sapiens
gtccccttttcctct

SEQ ID NO: 12661 - DNA, 15 bp, Homo sapiens
tgtccccttttcctc

SEQ ID NO: 12662 - DNA, 15 bp, Homo sapiens
ctgtccccttttcct

SEQ ID NO: 12663 - DNA, 15 bp, Homo sapiens
tctgtccccttttcc

SEQ ID NO: 12664 - DNA, 15 bp, Homo sapiens
atctgtccccttttc

SEQ ID NO: 12665 - DNA, 15 bp, Homo sapiens
tatctgtcccctttt

SEQ ID NO: 12666 - DNA, 15 bp, Homo sapiens
ttatctgtccccttt

SEQ ID NO: 12667 - DNA, 15 bp, Homo sapiens
tttatctgtcccctt

SEQ ID NO: 12668 - DNA, 15 bp, Homo sapiens
ctttatctgtcccct

SEQ ID NO: 12669 - DNA, 15 bp, Homo sapiens
tctttatctgtcccc

SEQ ID NO: 12670 - DNA, 15 bp, Homo sapiens
ttctttatctgtccc

SEQ ID NO: 12671 - DNA, 15 bp, Homo sapiens
tttctttatctgtcc

SEQ ID NO: 12672 - DNA, 15 bp, Homo sapiens
atttctttatctgtc

SEQ ID NO: 12673 - DNA, 15 bp, Homo sapiens
catttctttatctgt

SEQ ID NO: 12674 - DNA, 15 bp, Homo sapiens
ccatttctttatctg

SEQ ID NO: 12675 - DNA, 15 bp, Homo sapiens
tccatttctttatct

SEQ ID NO: 12676 - DNA, 15 bp, Homo sapiens
gtccatttctttatc

SEQ ID NO: 12677 - DNA, 15 bp, Homo sapiens
tgtccatttctttat

SEQ ID NO: 12678 - DNA, 15 bp, Homo sapiens
ctgtccatttcttta

SEQ ID NO: 12679 - DNA, 15 bp, Homo sapiens
tctgtccatttcttt

SEQ ID NO: 12680 - DNA, 15 bp, Homo sapiens
ctctgtccatttctt

SEQ ID NO: 12681 - DNA, 15 bp, Homo sapiens
cctctgtccatttct

SEQ ID NO: 12682 - DNA, 15 bp, Homo sapiens
ccctctgtccatttc

SEQ ID NO: 12683 - DNA, 15 bp, Homo sapiens
tccctctgtccattt

SEQ ID NO: 12684 - DNA, 15 bp, Homo sapiens
ctccctctgtccatt

SEQ ID NO: 12685 - DNA, 15 bp, Homo sapiens
tctccctctgtccat

SEQ ID NO: 12686 - DNA, 15 bp, Homo sapiens
ctctccctctgtcca

SEQ ID NO: 12687 - DNA, 15 bp, Homo sapiens
cctctccctctgtcc

SEQ ID NO: 12688 - DNA, 15 bp, Homo sapiens
ccctctccctctgtc

SEQ ID NO: 12689 - DNA, 15 bp, Homo sapiens
accctctccctctgt

SEQ ID NO: 12690 - DNA, 15 bp, Homo sapiens
caccctctccctctg

SEQ ID NO: 12691 - DNA, 15 bp, Homo sapiens
tcaccctctccctct

SEQ ID NO: 12692 - DNA, 15 bp, Homo sapiens
gtcaccctctccctc

SEQ ID NO: 12693 - DNA, 15 bp, Homo sapiens
tgtcaccctctccct

SEQ ID NO: 12694 - DNA, 15 bp, Homo sapiens
ctgtcaccctctccc

SEQ ID NO: 12695 - DNA, 15 bp, Homo sapiens
tctgtcaccctctcc

SEQ ID NO: 12696 - DNA, 15 bp, Homo sapiens
ctctgtcaccctctc

SEQ ID NO: 12697 - DNA, 15 bp, Homo sapiens
tctctgtcaccctct

SEQ ID NO: 12698 - DNA, 15 bp, Homo sapiens
ctctctgtcaccctc

SEQ ID NO: 12699 - DNA, 15 bp, Homo sapiens
cctctctgtcaccct

SEQ ID NO: 12700 - DNA, 15 bp, Homo sapiens
acctctctgtcaccc

SEQ ID NO: 12701 - DNA, 15 bp, Homo sapiens
cacctctctgtcacc

SEQ ID NO: 12702 - DNA, 15 bp, Homo sapiens
ccacctctctgtcac

SEQ ID NO: 12703 - DNA, 15 bp, Homo sapiens
tccacctctctgtca

SEQ ID NO: 12704 - DNA, 15 bp, Homo sapiens
gtccacctctctgtc

SEQ ID NO: 12705 - DNA, 15 bp, Homo sapiens
tgtccacctctctgt

SEQ ID NO: 12706 - DNA, 15 bp, Homo sapiens
ctgtccacctctctg

SEQ ID NO: 12707 - DNA, 15 bp, Homo sapiens
tctgtccacctctct

SEQ ID NO: 12708 - DNA, 15 bp, Homo sapiens
ctctgtccacctctc

SEQ ID NO: 12709 - DNA, 15 bp, Homo sapiens
tctctctgtccacct

SEQ ID NO: 12710 - DNA, 15 bp, Homo sapiens
ttctctctgtccacc

SEQ ID NO: 12711 - DNA, 15 bp, Homo sapiens
cttctctctgtccac

SEQ ID NO: 12712 - DNA, 15 bp, Homo sapiens
ccttctctctgtcca

SEQ ID NO: 12713 - DNA, 15 bp, Homo sapiens
tccttctctctgtcc

SEQ ID NO: 12714 - DNA, 15 bp, Homo sapiens
ctccttctctctgtc

SEQ ID NO: 12715 - DNA, 15 bp, Homo sapiens
cctccttctctctgt

SEQ ID NO: 12716 - DNA, 15 bp, Homo sapiens
ccctccttctctctg

SEQ ID NO: 12717 - DNA, 15 bp, Homo sapiens
cccctccttctctct

SEQ ID NO: 12718 - DNA, 15 bp, Homo sapiens
tcccctccttctctc

SEQ ID NO: 12719 - DNA, 15 bp, Homo sapiens
gtcccctccttctct

SEQ ID NO: 12720 - DNA, 15 bp, Homo sapiens
tgtcccctccttctc

SEQ ID NO: 12721 - DNA, 15 bp, Homo sapiens
ctgtcccctccttct

SEQ ID NO: 12722 - DNA, 15 bp, Homo sapiens
tctgtcccctccttc

SEQ ID NO: 12723 - DNA, 15 bp, Homo sapiens
atctgtcccctcctt

SEQ ID NO: 12724 - DNA, 15 bp, Homo sapiens
catctgtcccctcct

SEQ ID NO: 12725 - DNA, 15 bp, Homo sapiens
gcatctgtcccctcc

SEQ ID NO: 12726 - DNA, 15 bp, Homo sapiens
tgcatctgtcccctc

SEQ ID NO: 12727 - DNA, 15 bp, Homo sapiens
ctgcatctgtcccct

SEQ ID NO: 12728 - DNA, 15 bp, Homo sapiens
tctgcatctgtcccc

SEQ ID NO: 12729 - DNA, 15 bp, Homo sapiens
ctctgcatctgtccc

SEQ ID NO: 12730 - DNA, 15 bp, Homo sapiens
cctctgcatctgtcc

SEQ ID NO: 12731 - DNA, 15 bp, Homo sapiens
acctctgcatctgtc

SEQ ID NO: 12732 - DNA, 15 bp, Homo sapiens
cacctctgcatctgt

SEQ ID NO: 12733 - DNA, 15 bp, Homo sapiens
ccacctctgcatctg

SEQ ID NO: 12734 - DNA, 15 bp, Homo sapiens
tccacctctgcatct

SEQ ID NO: 12735 - DNA, 15 bp, Homo sapiens
gtccacctctgcatc

SEQ ID NO: 12736 - DNA, 15 bp, Homo sapiens
tgtccacctctgcat

SEQ ID NO: 12737 - DNA, 15 bp, Homo sapiens
ctgtccacctctgca

SEQ ID NO: 12738 - DNA, 15 bp, Homo sapiens
tctgtccacctctgc

SEQ ID NO: 12739 - DNA, 15 bp, Homo sapiens
cctctgtccacctct

SEQ ID NO: 12740 - DNA, 15 bp, Homo sapiens
tcctctgtccacctc

SEQ ID NO: 12741 - DNA, 15 bp, Homo sapiens
ttcctctgtccacct

SEQ ID NO: 12742 - DNA, 15 bp, Homo sapiens
cttcctctgtccacc

SEQ ID NO: 12743 - DNA, 15 bp, Homo sapiens
tcttcctctgtccac

SEQ ID NO: 12744 - DNA, 15 bp, Homo sapiens
ctcttcctctgtcca

SEQ ID NO: 12745 - DNA, 15 bp, Homo sapiens
cctcttcctctgtcc

SEQ ID NO: 12746 - DNA, 15 bp, Homo sapiens
ccctcttcctctgtc

SEQ ID NO: 12747 - DNA, 15 bp, Homo sapiens
cccctcttcctctgt

SEQ ID NO: 12748 - DNA, 15 bp, Homo sapiens
tcccctcttcctctg

SEQ ID NO: 12749 - DNA, 15 bp, Homo sapiens
tatctgtcccctctt

SEQ ID NO: 12750 - DNA, 15 bp, Homo sapiens
ttatctgtcccctct

SEQ ID NO: 12751 - DNA, 15 bp, Homo sapiens
cttatctgtcccctc

SEQ ID NO: 12752 - DNA, 15 bp, Homo sapiens
acttatctgtcccct

SEQ ID NO: 12753 - DNA, 15 bp, Homo sapiens
cacttatctgtcccc

SEQ ID NO: 12754 - DNA, 15 bp, Homo sapiens
ccacttatctgtccc

SEQ ID NO: 12755 - DNA, 15 bp, Homo sapiens
tccacttatctgtcc

SEQ ID NO: 12756 - DNA, 15 bp, Homo sapiens
gtccacttatctgtc

SEQ ID NO: 12757 - DNA, 15 bp, Homo sapiens
tgtccacttatctgt

SEQ ID NO: 12758 - DNA, 15 bp, Homo sapiens
ctgtccacttatctg

SEQ ID NO: 12759 - DNA, 15 bp, Homo sapiens
tctgtccacttatct

SEQ ID NO: 12760 - DNA, 15 bp, Homo sapiens
ctctgtccacttatc

SEQ ID NO: 12761 - DNA, 15 bp, Homo sapiens
cctctgtccacttat

SEQ ID NO: 12762 - DNA, 15 bp, Homo sapiens
ccctctgtccactta

SEQ ID NO: 12763 - DNA, 15 bp, Homo sapiens
cccctctgtccactt

SEQ ID NO: 12764 - DNA, 15 bp, Homo sapiens
tcccctctgtccact

SEQ ID NO: 12765 - DNA, 15 bp, Homo sapiens
ttcccctctgtccac

SEQ ID NO: 12766 - DNA, 15 bp, Homo sapiens
cttcccctctgtcca

SEQ ID NO: 12767 - DNA, 15 bp, Homo sapiens
tcttcccctctgtcc

SEQ ID NO: 12768 - DNA, 15 bp, Homo sapiens
ctcttcccctctgtc

SEQ ID NO: 12769 - DNA, 15 bp, Homo sapiens
cctcttcccctctgt

SEQ ID NO: 12770 - DNA, 15 bp, Homo sapiens
ccctcttcccctctg

SEQ ID NO: 12771 - DNA, 15 bp, Homo sapiens
cccctcttcccctct

SEQ ID NO: 12772 - DNA, 15 bp, Homo sapiens
tcccctcttcccctc

SEQ ID NO: 12773 - DNA, 15 bp, Homo sapiens
gtcccctcttcccct

SEQ ID NO: 12774 - DNA, 15 bp, Homo sapiens
tgtcccctcttcccc

SEQ ID NO: 12775 - DNA, 15 bp, Homo sapiens
ctgtcccctcttccc

SEQ ID NO: 12776 - DNA, 15 bp, Homo sapiens
gtatctgtcccctct

SEQ ID NO: 12777 - DNA, 15 bp, Homo sapiens
tgtatctgtcccctc

SEQ ID NO: 12778 - DNA, 15 bp, Homo sapiens
ctgtatctgtcccct

SEQ ID NO: 12779 - DNA, 15 bp, Homo sapiens
tctgtatctgtcccc

SEQ ID NO: 12780 - DNA, 15 bp, Homo sapiens
ctctgtatctgtccc

SEQ ID NO: 12781 - DNA, 15 bp, Homo sapiens
tctctgtatctgtcc

SEQ ID NO: 12782 - DNA, 15 bp, Homo sapiens
atctctgtatctgtc

SEQ ID NO: 12783 - DNA, 15 bp, Homo sapiens
catctctgtatctgt

SEQ ID NO: 12784 - DNA, 15 bp, Homo sapiens
ccatctctgtatctg

SEQ ID NO: 12785 - DNA, 15 bp, Homo sapiens
tccatctctgtatct

SEQ ID NO: 12786 - DNA, 15 bp, Homo sapiens
atccatctctgtatc

SEQ ID NO: 12787 - DNA, 15 bp, Homo sapiens
tatccatctctgtat

SEQ ID NO: 12788 - DNA, 15 bp, Homo sapiens
ctatccatctctgta

SEQ ID NO: 12789 - DNA, 15 bp, Homo sapiens
tctatccatctctgt

SEQ ID NO: 12790 - DNA, 15 bp, Homo sapiens
ctctatccatctctg

SEQ ID NO: 12791 - DNA, 15 bp, Homo sapiens
tctctatccatctct

SEQ ID NO: 12792 - DNA, 15 bp, Homo sapiens
ttctctatccatctc

SEQ ID NO: 12793 - DNA, 15 bp, Homo sapiens
cttctctatccatct

SEQ ID NO: 12794 - DNA, 15 bp, Homo sapiens
tcttctctatccatc

SEQ ID NO: 12795 - DNA, 15 bp, Homo sapiens
ttcttctctatccat

SEQ ID NO: 12796 - DNA, 15 bp, Homo sapiens
cttcttctctatcca

SEQ ID NO: 12797 - DNA, 15 bp, Homo sapiens
tcttcttctctatcc

SEQ ID NO: 12798 - DNA, 15 bp, Homo sapiens
ctcttcttctctatc

SEQ ID NO: 12799 - DNA, 15 bp, Homo sapiens
cctcttcttctctat

SEQ ID NO: 12800 - DNA, 15 bp, Homo sapiens
ccctcttcttctcta

SEQ ID NO: 12801 - DNA, 15 bp, Homo sapiens
cccctcttcttctct

SEQ ID NO: 12802 - DNA, 15 bp, Homo sapiens
tcccctcttcttctc

SEQ ID NO: 12803 - DNA, 15 bp, Homo sapiens
gtcccctcttcttct

SEQ ID NO: 12804 - DNA, 15 bp, Homo sapiens
tgtcccctcttcttc

SEQ ID NO: 12805 - DNA, 15 bp, Homo sapiens
ttgtcccctcttctt

SEQ ID NO: 12806 - DNA, 15 bp, Homo sapiens
tttgtcccctcttct

SEQ ID NO: 12807 - DNA, 15 bp, Homo sapiens
ctttgtcccctcttc

SEQ ID NO: 12808 - DNA, 15 bp, Homo sapiens
tctttgtcccctctt

SEQ ID NO: 12809 - DNA, 15 bp, Homo sapiens
ctctttgtcccctct

SEQ ID NO: 12810 - DNA, 15 bp, Homo sapiens
cctctttgtcccctc

SEQ ID NO: 12811 - DNA, 15 bp, Homo sapiens
acctctttgtcccct

SEQ ID NO: 12812 - DNA, 15 bp, Homo sapiens
aacctctttgtcccc

SEQ ID NO: 12813 - DNA, 15 bp, Homo sapiens
caacctctttgtccc

SEQ ID NO: 12814 - DNA, 15 bp, Homo sapiens
tcaacctctttgtcc

SEQ ID NO: 12815 - DNA, 15 bp, Homo sapiens
gtcaacctctttgtc

SEQ ID NO: 12816 - DNA, 15 bp, Homo sapiens
tgtcaacctctttgt

SEQ ID NO: 12817 - DNA, 15 bp, Homo sapiens
ctgtcaacctctttg

SEQ ID NO: 12818 - DNA, 15 bp, Homo sapiens
tctgtcaacctcttt

SEQ ID NO: 12819 - DNA, 15 bp, Homo sapiens
ctctgtcaacctctt

SEQ ID NO: 12820 - DNA, 15 bp, Homo sapiens
tctctgtcaacctct

SEQ ID NO: 12821 - DNA, 15 bp, Homo sapiens
ttctctgtcaacctc

SEQ ID NO: 12822 - DNA, 15 bp, Homo sapiens
cttctctgtcaacct

SEQ ID NO: 12823 - DNA, 15 bp, Homo sapiens
tcttctctgtcaacc

SEQ ID NO: 12824 - DNA, 15 bp, Homo sapiens
ttcttctctgtcaac

SEQ ID NO: 12825 - DNA, 15 bp, Homo sapiens
cttcttctctgtcaa

SEQ ID NO: 12826 - DNA, 15 bp, Homo sapiens
tcttcttctctgtca

SEQ ID NO: 12827 - DNA, 15 bp, Homo sapiens
ctcttcttctctgtc

SEQ ID NO: 12828 - DNA, 15 bp, Homo sapiens
cctcttcttctctgt

SEQ ID NO: 12829 - DNA, 15 bp, Homo sapiens
ccctcttcttctctg

SEQ ID NO: 12830 - DNA, 15 bp, Homo sapiens
ccccctcttcttctc

SEQ ID NO: 12831 - DNA, 15 bp, Homo sapiens
gccccctcttcttct

SEQ ID NO: 12832 - DNA, 15 bp, Homo sapiens
agccccctcttcttc

SEQ ID NO: 12833 - DNA, 15 bp, Homo sapiens
gagccccctcttctt

SEQ ID NO: 12834 - DNA, 15 bp, Homo sapiens
cgagccccctcttct

SEQ ID NO: 12835 - DNA, 15 bp, Homo sapiens
ccgagccccctcttc

SEQ ID NO: 12836 - DNA, 15 bp, Homo sapiens
gccgagccccctctt

SEQ ID NO: 12837 - DNA, 15 bp, Homo sapiens
tgccgagccccctct

SEQ ID NO: 12838 - DNA, 15 bp, Homo sapiens
atgccgagccccctc

SEQ ID NO: 12839 - DNA, 15 bp, Homo sapiens
catgccgagccccct

SEQ ID NO: 12840 - DNA, 15 bp, Homo sapiens
ccatgccgagccccc

SEQ ID NO: 12841 - DNA, 15 bp, Homo sapiens
accatgccgagcccc

SEQ ID NO: 12842 - DNA, 15 bp, Homo sapiens
caccatgccgagccc

SEQ ID NO: 12843 - DNA, 15 bp, Homo sapiens
ccaccatgccgagcc

SEQ ID NO: 12844 - DNA, 15 bp, Homo sapiens
gccaccatgccgagc

SEQ ID NO: 12845 - DNA, 15 bp, Homo sapiens
agccaccatgccgag

SEQ ID NO: 12846 - DNA, 15 bp, Homo sapiens
gagccaccatgccga

SEQ ID NO: 12847 - DNA, 15 bp, Homo sapiens
tgagccaccatgccg

SEQ ID NO: 12848 - DNA, 15 bp, Homo sapiens
atgagccaccatgcc

SEQ ID NO: 12849 - DNA, 15 bp, Homo sapiens
catgagccaccatgc

SEQ ID NO: 12850 - DNA, 15 bp, Homo sapiens
gcatgagccaccatg

SEQ ID NO: 12851 - DNA, 15 bp, Homo sapiens
ggcatgagccaccat

SEQ ID NO: 12852 - DNA, 15 bp, Homo sapiens
aggcatgagccacca

SEQ ID NO: 12853 - DNA, 15 bp, Homo sapiens
caggcatgagccacc

SEQ ID NO: 12854 - DNA, 15 bp, Homo sapiens
tccaaagtgctggga

SEQ ID NO: 12855 - DNA, 15 bp, Homo sapiens
ttccaaagtgctggg

SEQ ID NO: 12856 - DNA, 15 bp, Homo sapiens
cttccaaagtgctgg

SEQ ID NO: 12857 - DNA, 15 bp, Homo sapiens
ccttccaaagtgctg

SEQ ID NO: 12858 - DNA, 15 bp, Homo sapiens
gccttccaaagtgct

SEQ ID NO: 12859 - DNA, 15 bp, Homo sapiens
ggccttccaaagtgc

SEQ ID NO: 12860 - DNA, 15 bp, Homo sapiens
tggccttccaaagtg

SEQ ID NO: 12861 - DNA, 15 bp, Homo sapiens
ttggccttccaaagt

SEQ ID NO: 12862 - DNA, 15 bp, Homo sapiens
cttggccttccaaag

SEQ ID NO: 12863 - DNA, 15 bp, Homo sapiens
ccttggccttccaaa

SEQ ID NO: 12864 - DNA, 15 bp, Homo sapiens
accttggccttccaa

SEQ ID NO: 12865 - DNA, 15 bp, Homo sapiens
caccttggccttcca

SEQ ID NO: 12866 - DNA, 15 bp, Homo sapiens
ccaccttggccttcc

SEQ ID NO: 12867 - DNA, 15 bp, Homo sapiens
cccaccttggccttc

SEQ ID NO: 12868 - DNA, 15 bp, Homo sapiens
acccaccttggcctt

SEQ ID NO: 12869 - DNA, 15 bp, Homo sapiens
cacccaccttggcct

SEQ ID NO: 12870 - DNA, 15 bp, Homo sapiens
atccacccaccttgg

SEQ ID NO: 12871 - DNA, 15 bp, Homo sapiens
aatccacccaccttg

SEQ ID NO: 12872 - DNA, 15 bp, Homo sapiens
caatccacccacctt

SEQ ID NO: 12873 - DNA, 15 bp, Homo sapiens
gcaatccacccacct

SEQ ID NO: 12874 - DNA, 15 bp, Homo sapiens
agcaatccacccacc

SEQ ID NO: 12875 - DNA, 15 bp, Homo sapiens
aagcaatccacccac

SEQ ID NO: 12876 - DNA, 15 bp, Homo sapiens
gaagcaatccaccca

SEQ ID NO: 12877 - DNA, 15 bp, Homo sapiens
tgaagcaatccaccc

SEQ ID NO: 12878 - DNA, 15 bp, Homo sapiens
ctgaagcaatccacc

SEQ ID NO: 12879 - DNA, 15 bp, Homo sapiens
cctgaagcaatccac

SEQ ID NO: 12880 - DNA, 15 bp, Homo sapiens
acctgaagcaatcca

SEQ ID NO: 12881 - DNA, 15 bp, Homo sapiens
gacctgaagcaatcc

SEQ ID NO: 12882 - DNA, 15 bp, Homo sapiens
tgacctgaagcaatc

SEQ ID NO: 12883 - DNA, 15 bp, Homo sapiens
ctgacctgaagcaat

SEQ ID NO: 12884 - DNA, 15 bp, Homo sapiens
cctgacctgaagcaa

SEQ ID NO: 12885 - DNA, 15 bp, Homo sapiens
tcctgacctgaagca

SEQ ID NO: 12886 - DNA, 15 bp, Homo sapiens
ctcctgacctgaagc

SEQ ID NO: 12887 - DNA, 15 bp, Homo sapiens
actcctgacctgaag

SEQ ID NO: 12888 - DNA, 15 bp, Homo sapiens
aactcctgacctgaa

SEQ ID NO: 12889 - DNA, 15 bp, Homo sapiens
gaactcctgacctga

SEQ ID NO: 12890 - DNA, 15 bp, Homo sapiens
cgaactcctgacctg

SEQ ID NO: 12891 - DNA, 15 bp, Homo sapiens
accaggctggtctcg

SEQ ID NO: 12892 - DNA, 15 bp, Homo sapiens
gaccaggctggtctc

SEQ ID NO: 12893 - DNA, 15 bp, Homo sapiens
tgaccaggctggtct

SEQ ID NO: 12894 - DNA, 15 bp, Homo sapiens
ttgaccaggctggtc

SEQ ID NO: 12895 - DNA, 15 bp, Homo sapiens
gttgaccaggctggt

SEQ ID NO: 12896 - DNA, 15 bp, Homo sapiens
tgttgaccaggctgg

SEQ ID NO: 12897 - DNA, 15 bp, Homo sapiens
atgttgaccaggctg

SEQ ID NO: 12898 - DNA, 15 bp, Homo sapiens
catgttgaccaggct

SEQ ID NO: 12899 - DNA, 15 bp, Homo sapiens
ccatgttgaccaggc

SEQ ID NO: 12900 - DNA, 15 bp, Homo sapiens
gccatgttgaccagg

SEQ ID NO: 12901 - DNA, 15 bp, Homo sapiens
tgccatgttgaccag

SEQ ID NO: 12902 - DNA, 15 bp, Homo sapiens
ttgccatgttgacca

SEQ ID NO: 12903 - DNA, 15 bp, Homo sapiens
tttgccatgttgacc

SEQ ID NO: 12904 - DNA, 15 bp, Homo sapiens
ttttgccatgttgac

SEQ ID NO: 12905 - DNA, 15 bp, Homo sapiens
gttttgccatgttga

SEQ ID NO: 12906 - DNA, 15 bp, Homo sapiens
ggttttgccatgttg

SEQ ID NO: 12907 - DNA, 15 bp, Homo sapiens
gggttttgccatgtt

SEQ ID NO: 12908 - DNA, 15 bp, Homo sapiens
ggggttttgccatgt

SEQ ID NO: 12909 - DNA, 15 bp, Homo sapiens
tggggttttgccatg

SEQ ID NO: 12910 - DNA, 15 bp, Homo sapiens
atggggttttgccat

SEQ ID NO: 12911 - DNA, 15 bp, Homo sapiens
gatggggttttgcca

SEQ ID NO: 12912 - DNA, 15 bp, Homo sapiens
agatggggttttgcc

SEQ ID NO: 12913 - DNA, 15 bp, Homo sapiens
gagatggggttttgc

SEQ ID NO: 12914 - DNA, 15 bp, Homo sapiens
agagatggggttttg

SEQ ID NO: 12915 - DNA, 15 bp, Homo sapiens
tagagatggggtttt

SEQ ID NO: 12916 - DNA, 15 bp, Homo sapiens
tgtagagatggggtt

SEQ ID NO: 12917 - DNA, 15 bp, Homo sapiens
ttgtagagatggggt

SEQ ID NO: 12918 - DNA, 15 bp, Homo sapiens
tttgtagagatgggg

SEQ ID NO: 12919 - DNA, 15 bp, Homo sapiens
ttttgtagagatggg

SEQ ID NO: 12920 - DNA, 15 bp, Homo sapiens
tttttgtagagatgg

SEQ ID NO: 12921 - DNA, 15 bp, Homo sapiens
ttttttgtagagatg

SEQ ID NO: 12922 - DNA, 15 bp, Homo sapiens
attttttgtagagat

SEQ ID NO: 12923 - DNA, 15 bp, Homo sapiens
tattttttgtagaga

SEQ ID NO: 12924 - DNA, 15 bp, Homo sapiens
gtattttttgtagag

SEQ ID NO: 12925 - DNA, 15 bp, Homo sapiens
tgtattttttgtaga

SEQ ID NO: 12926 - DNA, 15 bp, Homo sapiens
ttgtattttttgtag

SEQ ID NO: 12927 - DNA, 15 bp, Homo sapiens
tttgtattttttgta

SEQ ID NO: 12928 - DNA, 15 bp, Homo sapiens
ttttgtattttttgt

SEQ ID NO: 12929 - DNA, 15 bp, Homo sapiens
tttttgtattttttg

SEQ ID NO: 12930 - DNA, 15 bp, Homo sapiens
atttttgtatttttt

SEQ ID NO: 12931 - DNA, 15 bp, Homo sapiens
ggctaatttttgtat

SEQ ID NO: 12932 - DNA, 15 bp, Homo sapiens
cggctaatttttgta

SEQ ID NO: 12933 - DNA, 15 bp, Homo sapiens
ccggctaatttttgt

SEQ ID NO: 12934 - DNA, 15 bp, Homo sapiens
cccggctaatttttg

SEQ ID NO: 12935 - DNA, 15 bp, Homo sapiens
gcccggctaattttt

SEQ ID NO: 12936 - DNA, 15 bp, Homo sapiens
cgcccggctaatttt

SEQ ID NO: 12937 - DNA, 15 bp, Homo sapiens
gcgcccggctaattt

SEQ ID NO: 12938 - DNA, 15 bp, Homo sapiens
tgcgcccggctaatt

SEQ ID NO: 12939 - DNA, 15 bp, Homo sapiens
gtgcgcccggctaat

SEQ ID NO: 12940 - DNA, 15 bp, Homo sapiens
cgtgcgcccggctaa

SEQ ID NO: 12941 - DNA, 15 bp, Homo sapiens
gcgtgcgcccggcta

SEQ ID NO: 12942 - DNA, 15 bp, Homo sapiens
tgcgtgcgcccggct

SEQ ID NO: 12943 - DNA, 15 bp, Homo sapiens
gtgcgtgcgcccggc

SEQ ID NO: 12944 - DNA, 15 bp, Homo sapiens
ggtgcgtgcgcccgg

SEQ ID NO: 12945 - DNA, 15 bp, Homo sapiens
aggtgcgtgcgcccg

SEQ ID NO: 12946 - DNA, 15 bp, Homo sapiens
caggtgcgtgcgccc

SEQ ID NO: 12947 - DNA, 15 bp, Homo sapiens
acaggtgcgtgcgcc

SEQ ID NO: 12948 - DNA, 15 bp, Homo sapiens
tacaggtgcgtgcgc

SEQ ID NO: 12949 - DNA, 15 bp, Homo sapiens
ctacaggtgcgtgcg

SEQ ID NO: 12950 - DNA, 15 bp, Homo sapiens
tctacaggtgcgtgc

SEQ ID NO: 12951 - DNA, 15 bp, Homo sapiens
gtctacaggtgcgtg

SEQ ID NO: 12952 - DNA, 15 bp, Homo sapiens
ggtctacaggtgcgt

SEQ ID NO: 12953 - DNA, 15 bp, Homo sapiens
gggtctacaggtgcg

SEQ ID NO: 12954 - DNA, 15 bp, Homo sapiens
tgggtctacaggtgc

SEQ ID NO: 12955 - DNA, 15 bp, Homo sapiens
ctgggtctacaggtg

SEQ ID NO: 12956 - DNA, 15 bp, Homo sapiens
gctgggtctacaggt

SEQ ID NO: 12957 - DNA, 15 bp, Homo sapiens
agctgggtctacagg

SEQ ID NO: 12958 - DNA, 15 bp, Homo sapiens
tagctgggtctacag

SEQ ID NO: 12959 - DNA, 15 bp, Homo sapiens
gtagctgggtctaca

SEQ ID NO: 12960 - DNA, 15 bp, Homo sapiens
agtagctgggtctac

SEQ ID NO: 12961 - DNA, 15 bp, Homo sapiens
gagtagctgggtcta

SEQ ID NO: 12962 - DNA, 15 bp, Homo sapiens
tgagtagctgggtct

SEQ ID NO: 12963 - DNA, 15 bp, Homo sapiens
ctgagtagctgggtc

SEQ ID NO: 12964 - DNA, 15 bp, Homo sapiens
tctgagtagctgggt

SEQ ID NO: 12965 - DNA, 15 bp, Homo sapiens
atctgagtagctggg

SEQ ID NO: 12966 - DNA, 15 bp, Homo sapiens
catctgagtagctgg

SEQ ID NO: 12967 - DNA, 15 bp, Homo sapiens
gcatctgagtagctg

SEQ ID NO: 12968 - DNA, 15 bp, Homo sapiens
ggcatctgagtagct

SEQ ID NO: 12969 - DNA, 15 bp, Homo sapiens
aggcatctgagtagc

SEQ ID NO: 12970 - DNA, 15 bp, Homo sapiens
caggcatctgagtag

SEQ ID NO: 12971 - DNA, 15 bp, Homo sapiens
tcaggcatctgagta

SEQ ID NO: 12972 - DNA, 15 bp, Homo sapiens
ctcaggcatctgagt

SEQ ID NO: 12973 - DNA, 15 bp, Homo sapiens
cctcaggcatctgag

SEQ ID NO: 12974 - DNA, 15 bp, Homo sapiens
acctcaggcatctga

SEQ ID NO: 12975 - DNA, 15 bp, Homo sapiens
cacctcaggcatctg

SEQ ID NO: 12976 - DNA, 15 bp, Homo sapiens
ccacctcaggcatct

SEQ ID NO: 12977 - DNA, 15 bp, Homo sapiens
cccacctcaggcatc

SEQ ID NO: 12978 - DNA, 15 bp, Homo sapiens
tcccacctcaggcat

SEQ ID NO: 12979 - DNA, 15 bp, Homo sapiens
ttcccacctcaggca

SEQ ID NO: 12980 - DNA, 15 bp, Homo sapiens
cttcccacctcaggc

SEQ ID NO: 12981 - DNA, 15 bp, Homo sapiens
tcttcccacctcagg

SEQ ID NO: 12982 - DNA, 15 bp, Homo sapiens
atcttcccacctcag

SEQ ID NO: 12983 - DNA, 15 bp, Homo sapiens
aatcttcccacctca

SEQ ID NO: 12984 - DNA, 15 bp, Homo sapiens
caatcttcccacctc

SEQ ID NO: 12985 - DNA, 15 bp, Homo sapiens
gcaatcttcccacct

SEQ ID NO: 12986 - DNA, 15 bp, Homo sapiens
agcaatcttcccacc

SEQ ID NO: 12987 - DNA, 15 bp, Homo sapiens
aagcaatcttcccac

SEQ ID NO: 12988 - DNA, 15 bp, Homo sapiens
caagcaatcttccca

SEQ ID NO: 12989 - DNA, 15 bp, Homo sapiens
tcaagcaatcttccc

SEQ ID NO: 12990 - DNA, 15 bp, Homo sapiens
ctcaagcaatcttcc

SEQ ID NO: 12991 - DNA, 15 bp, Homo sapiens
gctcaagcaatcttc

SEQ ID NO: 12992 - DNA, 15 bp, Homo sapiens
ggctcaagcaatctt

SEQ ID NO: 12993 - DNA, 15 bp, Homo sapiens
gggctcaagcaatct

SEQ ID NO: 12994 - DNA, 15 bp, Homo sapiens
cgggctcaagcaatc

SEQ ID NO: 12995 - DNA, 15 bp, Homo sapiens
ccgggctcaagcaat

SEQ ID NO: 12996 - DNA, 15 bp, Homo sapiens
cccgggctcaagcaa

SEQ ID NO: 12997 - DNA, 15 bp, Homo sapiens
tcccgggctcaagca

SEQ ID NO: 12998 - DNA, 15 bp, Homo sapiens
ttcccgggctcaagc

SEQ ID NO: 12999 - DNA, 15 bp, Homo sapiens
attcccgggctcaag

SEQ ID NO: 13000 - DNA, 15 bp, Homo sapiens
aattcccgggctcaa

SEQ ID NO: 13001 - DNA, 15 bp, Homo sapiens
aaattcccgggctca

SEQ ID NO: 13002 - DNA, 15 bp, Homo sapiens
caaattcccgggctc

SEQ ID NO: 13003 - DNA, 15 bp, Homo sapiens
tcaaattcccgggct

SEQ ID NO: 13004 - DNA, 15 bp, Homo sapiens
ctcaaattcccgggc

SEQ ID NO: 13005 - DNA, 15 bp, Homo sapiens
cctcaaattcccggg

SEQ ID NO: 13006 - DNA, 15 bp, Homo sapiens
gcctcaaattcccgg

SEQ ID NO: 13007 - DNA, 15 bp, Homo sapiens
agcctcaaattcccg

SEQ ID NO: 13008 - DNA, 15 bp, Homo sapiens
cagcctcaaattccc

SEQ ID NO: 13009 - DNA, 15 bp, Homo sapiens
gcagcctcaaattcc

SEQ ID NO: 13010 - DNA, 15 bp, Homo sapiens
ggcagcctcaaattc

SEQ ID NO: 13011 - DNA, 15 bp, Homo sapiens
aggcagcctcaaatt

SEQ ID NO: 13012 - DNA, 15 bp, Homo sapiens
aaggcagcctcaaat

SEQ ID NO: 13013 - DNA, 15 bp, Homo sapiens
caaggcagcctcaaa

SEQ ID NO: 13014 - DNA, 15 bp, Homo sapiens
tcaaggcagcctcaa

SEQ ID NO: 13015 - DNA, 15 bp, Homo sapiens
ctcaaggcagcctca

SEQ ID NO: 13016 - DNA, 15 bp, Homo sapiens
gctcaaggcagcctc

SEQ ID NO: 13017 - DNA, 15 bp, Homo sapiens
ggctcaaggcagcct

SEQ ID NO: 13018 - DNA, 15 bp, Homo sapiens
gggctcaaggcagcc

SEQ ID NO: 13019 - DNA, 15 bp, Homo sapiens
agggctcaaggcagc

SEQ ID NO: 13020 - DNA, 15 bp, Homo sapiens
cagggctcaaggcag

SEQ ID NO: 13021 - DNA, 15 bp, Homo sapiens
tcagggctcaaggca

SEQ ID NO: 13022 - DNA, 15 bp, Homo sapiens
atcagggctcaaggc

SEQ ID NO: 13023 - DNA, 15 bp, Homo sapiens
gatcagggctcaagg

SEQ ID NO: 13024 - DNA, 15 bp, Homo sapiens
tgatcagggctcaag

SEQ ID NO: 13025 - DNA, 15 bp, Homo sapiens
atgatcagggctcaa

SEQ ID NO: 13026 - DNA, 15 bp, Homo sapiens
catgatcagggctca

SEQ ID NO: 13027 - DNA, 15 bp, Homo sapiens
gcatgatcagggctc

SEQ ID NO: 13028 - DNA, 15 bp, Homo sapiens
ggcatgatcagggct

SEQ ID NO: 13029 - DNA, 15 bp, Homo sapiens
tggcatgatcagggc

SEQ ID NO: 13030 - DNA, 15 bp, Homo sapiens
atggcatgatcaggg

SEQ ID NO: 13031 - DNA, 15 bp, Homo sapiens
aatggcatgatcagg

SEQ ID NO: 13032 - DNA, 15 bp, Homo sapiens
caatggcatgatcag

SEQ ID NO: 13033 - DNA, 15 bp, Homo sapiens
acaatggcatgatca

SEQ ID NO: 13034 - DNA, 15 bp, Homo sapiens
tacaatggcatgatc

SEQ ID NO: 13035 - DNA, 15 bp, Homo sapiens
ctacaatggcatgat

SEQ ID NO: 13036 - DNA, 15 bp, Homo sapiens
actacaatggcatga

SEQ ID NO: 13037 - DNA, 15 bp, Homo sapiens
gactacaatggcatg

SEQ ID NO: 13038 - DNA, 15 bp, Homo sapiens
ggactacaatggcat

SEQ ID NO: 13039 - DNA, 15 bp, Homo sapiens
tggactacaatggca

SEQ ID NO: 13040 - DNA, 15 bp, Homo sapiens
ctggactacaatggc

SEQ ID NO: 13041 - DNA, 15 bp, Homo sapiens
gctggactacaatgg

SEQ ID NO: 13042 - DNA, 15 bp, Homo sapiens
ggctggactacaatg

SEQ ID NO: 13043 - DNA, 15 bp, Homo sapiens
aggctggactacaat

SEQ ID NO: 13044 - DNA, 15 bp, Homo sapiens
caggctggactacaa

SEQ ID NO: 13045 - DNA, 15 bp, Homo sapiens
ccaggctggactaca

SEQ ID NO: 13046 - DNA, 15 bp, Homo sapiens
cccaggctggactac

SEQ ID NO: 13047 - DNA, 15 bp, Homo sapiens
acccaggctggacta

SEQ ID NO: 13048 - DNA, 15 bp, Homo sapiens
cacccaggctggact

SEQ ID NO: 13049 - DNA, 15 bp, Homo sapiens
tcacccaggctggac

SEQ ID NO: 13050 - DNA, 15 bp, Homo sapiens
tgtctcgctctgtca

SEQ ID NO: 13051 - DNA, 15 bp, Homo sapiens
gtgtctcgctctgtc

SEQ ID NO: 13052 - DNA, 15 bp, Homo sapiens
ggtgtctcgctctgt

SEQ ID NO: 13053 - DNA, 15 bp, Homo sapiens
cggtgtctcgctctg

SEQ ID NO: 13054 - DNA, 15 bp, Homo sapiens
acggtgtctcgctct

SEQ ID NO: 13055 - DNA, 15 bp, Homo sapiens
gacggtgtctcgctc

SEQ ID NO: 13056 - DNA, 15 bp, Homo sapiens
agacggtgtctcgct

SEQ ID NO: 13057 - DNA, 15 bp, Homo sapiens
gagacggtgtctcgc

SEQ ID NO: 13058 - DNA, 15 bp, Homo sapiens
tgagacggtgtctcg

SEQ ID NO: 13059 - DNA, 15 bp, Homo sapiens
ttgagacggtgtctc

SEQ ID NO: 13060 - DNA, 15 bp, Homo sapiens
tttgagacggtgtct

SEQ ID NO: 13061 - DNA, 15 bp, Homo sapiens
ttttgagacggtgtc

SEQ ID NO: 13062 - DNA, 15 bp, Homo sapiens
tttttgagacggtgt

SEQ ID NO: 13063 - DNA, 15 bp, Homo sapiens
ttttttgagacggtg

SEQ ID NO: 13064 - DNA, 15 bp, Homo sapiens
tttttttgagacggt

SEQ ID NO: 13065 - DNA, 15 bp, Homo sapiens
ttttttttgagacgg

SEQ ID NO: 13066 - DNA, 15 bp, Homo sapiens
tttttttttgagacg

SEQ ID NO: 13067 - DNA, 15 bp, Homo sapiens
ctttttttttgagac

SEQ ID NO: 13068 - DNA, 15 bp, Homo sapiens
tctttttttttgaga

SEQ ID NO: 13069 - DNA, 15 bp, Homo sapiens
ttctttttttttgag

SEQ ID NO: 13070 - DNA, 15 bp, Homo sapiens
cttctttttttttga

SEQ ID NO: 13071 - DNA, 15 bp, Homo sapiens
tcttctttttttttg

SEQ ID NO: 13072 - DNA, 15 bp, Homo sapiens
ttcttcttttttttt

SEQ ID NO: 13073 - DNA, 15 bp, Homo sapiens
cttcttctttttttt

SEQ ID NO: 13074 - DNA, 15 bp, Homo sapiens
tcttcttcttttttt

SEQ ID NO: 13075 - DNA, 15 bp, Homo sapiens
ctcttcttctttttt

SEQ ID NO: 13076 - DNA, 15 bp, Homo sapiens
tctcttcttcttttt

SEQ ID NO: 13077 - DNA, 15 bp, Homo sapiens
ctctcttcttctttt

SEQ ID NO: 13078 - DNA, 15 bp, Homo sapiens
cctctcttcttcttt

SEQ ID NO: 13079 - DNA, 15 bp, Homo sapiens
tcctctcttcttctt

SEQ ID NO: 13080 - DNA, 15 bp, Homo sapiens
gtcctctcttcttct

SEQ ID NO: 13081 - DNA, 15 bp, Homo sapiens
tgtcctctcttcttc

SEQ ID NO: 13082 - DNA, 15 bp, Homo sapiens
ctgtcctctcttctt

SEQ ID NO: 13083 - DNA, 15 bp, Homo sapiens
tctgtcctctcttct

SEQ ID NO: 13084 - DNA, 15 bp, Homo sapiens
atctgtcctctcttc

SEQ ID NO: 13085 - DNA, 15 bp, Homo sapiens
ctttatctgtcctct

SEQ ID NO: 13086 - DNA, 15 bp, Homo sapiens
tctttatctgtcctc

SEQ ID NO: 13087 - DNA, 15 bp, Homo sapiens
ctctttatctgtcct

SEQ ID NO: 13088 - DNA, 15 bp, Homo sapiens
tctctttatctgtcc

SEQ ID NO: 13089 - DNA, 15 bp, Homo sapiens
atctctttatctgtc

SEQ ID NO: 13090 - DNA, 15 bp, Homo sapiens
catctctttatctgt

SEQ ID NO: 13091 - DNA, 15 bp, Homo sapiens
ccatctctttatctg

SEQ ID NO: 13092 - DNA, 15 bp, Homo sapiens
tccatctctttatct

SEQ ID NO: 13093 - DNA, 15 bp, Homo sapiens
gtccatctctttatc

SEQ ID NO: 13094 - DNA, 15 bp, Homo sapiens
tgtccatctctttat

SEQ ID NO: 13095 - DNA, 15 bp, Homo sapiens
ctgtccatctcttta

SEQ ID NO: 13096 - DNA, 15 bp, Homo sapiens
tctgtccatctcttt

SEQ ID NO: 13097 - DNA, 15 bp, Homo sapiens
ttctgtccatctctt

SEQ ID NO: 13098 - DNA, 15 bp, Homo sapiens
cttctgtccatctct

SEQ ID NO: 13099 - DNA, 15 bp, Homo sapiens
ccttctgtccatctc

SEQ ID NO: 13100 - DNA, 15 bp, Homo sapiens
cccttctgtccatct

SEQ ID NO: 13101 - DNA, 15 bp, Homo sapiens
ccccttctgtccatc

SEQ ID NO: 13102 - DNA, 15 bp, Homo sapiens
tccccttctgtccat

SEQ ID NO: 13103 - DNA, 15 bp, Homo sapiens
tcctccccttctgtc

SEQ ID NO: 13104 - DNA, 15 bp, Homo sapiens
ctcctccccttctgt

SEQ ID NO: 13105 - DNA, 15 bp, Homo sapiens
cctcctccccttctg

SEQ ID NO: 13106 - DNA, 15 bp, Homo sapiens
ccctcctccccttct

SEQ ID NO: 13107 - DNA, 15 bp, Homo sapiens
tccctcctccccttc

SEQ ID NO: 13108 - DNA, 15 bp, Homo sapiens
gtccctcctcccctt

SEQ ID NO: 13109 - DNA, 15 bp, Homo sapiens
tgtccctcctcccct

SEQ ID NO: 13110 - DNA, 15 bp, Homo sapiens
ttgtccctcctcccc

SEQ ID NO: 13111 - DNA, 15 bp, Homo sapiens
tttgtccctcctccc

SEQ ID NO: 13112 - DNA, 15 bp, Homo sapiens
atttgtccctcctcc

SEQ ID NO: 13113 - DNA, 15 bp, Homo sapiens
tatttgtccctcctc

SEQ ID NO: 13114 - DNA, 15 bp, Homo sapiens
gtatttgtccctcct

SEQ ID NO: 13115 - DNA, 15 bp, Homo sapiens
tgtatttgtccctcc

SEQ ID NO: 13116 - DNA, 15 bp, Homo sapiens
ctgtatttgtccctc

SEQ ID NO: 13117 - DNA, 15 bp, Homo sapiens
tctgtatttgtccct

SEQ ID NO: 13118 - DNA, 15 bp, Homo sapiens
ctctgtatttgtccc

SEQ ID NO: 13119 - DNA, 15 bp, Homo sapiens
cctctgtatttgtcc

SEQ ID NO: 13120 - DNA, 15 bp, Homo sapiens
acctctgtatttgtc

SEQ ID NO: 13121 - DNA, 15 bp, Homo sapiens
cacctctgtatttgt

SEQ ID NO: 13122 - DNA, 15 bp, Homo sapiens
ttcttcctctctgtc

SEQ ID NO: 13123 - DNA, 15 bp, Homo sapiens
cttcttcctctctgt

SEQ ID NO: 13124 - DNA, 15 bp, Homo sapiens
ccttcttcctctctg

SEQ ID NO: 13125 - DNA, 15 bp, Homo sapiens
cccttcttcctctct

SEQ ID NO: 13126 - DNA, 15 bp, Homo sapiens
tcccttcttcctctc

SEQ ID NO: 13127 - DNA, 15 bp, Homo sapiens
ctcccttcttcctct

SEQ ID NO: 13128 - DNA, 15 bp, Homo sapiens
tctcccttcttcctc

SEQ ID NO: 13129 - DNA, 15 bp, Homo sapiens
ctctcccttcttcct

SEQ ID NO: 13130 - DNA, 15 bp, Homo sapiens
tctctcccttcttcc

SEQ ID NO: 13131 - DNA, 15 bp, Homo sapiens
atctctcccttcttc

SEQ ID NO: 13132 - DNA, 15 bp, Homo sapiens
tatctctcccttctt

SEQ ID NO: 13133 - DNA, 15 bp, Homo sapiens
ttatctctcccttct

SEQ ID NO: 13134 - DNA, 15 bp, Homo sapiens
cttatctctcccttc

SEQ ID NO: 13135 - DNA, 15 bp, Homo sapiens
ccttatctctccctt

SEQ ID NO: 13136 - DNA, 15 bp, Homo sapiens
cccttatctctccct

SEQ ID NO: 13137 - DNA, 15 bp, Homo sapiens
ccccttatctctccc

SEQ ID NO: 13138 - DNA, 15 bp, Homo sapiens
tccccttatctctcc

SEQ ID NO: 13139 - DNA, 15 bp, Homo sapiens
gtccccttatctctc

SEQ ID NO: 13140 - DNA, 15 bp, Homo sapiens
tgtccccttatctct

SEQ ID NO: 13141 - DNA, 15 bp, Homo sapiens
ctgtccccttatctc

SEQ ID NO: 13142 - DNA, 15 bp, Homo sapiens
tctgtccccttatct

SEQ ID NO: 13143 - DNA, 15 bp, Homo sapiens
ctctgtccccttatc

SEQ ID NO: 13144 - DNA, 15 bp, Homo sapiens
cctctgtccccttat

SEQ ID NO: 13145 - DNA, 15 bp, Homo sapiens
ccctctgtcccctta

SEQ ID NO: 13146 - DNA, 15 bp, Homo sapiens
tccctctgtcccctt

SEQ ID NO: 13147 - DNA, 15 bp, Homo sapiens
ttccctctgtcccct

SEQ ID NO: 13148 - DNA, 15 bp, Homo sapiens
cttccctctgtcccc

SEQ ID NO: 13149 - DNA, 15 bp, Homo sapiens
ccttccctctgtccc

SEQ ID NO: 13150 - DNA, 15 bp, Homo sapiens
cccttccctctgtcc

SEQ ID NO: 13151 - DNA, 15 bp, Homo sapiens
ccccttccctctgtc

SEQ ID NO: 13152 - DNA, 15 bp, Homo sapiens
gccccttccctctgt

SEQ ID NO: 13153 - DNA, 15 bp, Homo sapiens
tgccccttccctctg

SEQ ID NO: 13154 - DNA, 15 bp, Homo sapiens
ttgccccttccctct

SEQ ID NO: 13155 - DNA, 15 bp, Homo sapiens
gttgccccttccctc

SEQ ID NO: 13156 - DNA, 15 bp, Homo sapiens
tgttgccccttccct

SEQ ID NO: 13157 - DNA, 15 bp, Homo sapiens
ctgttgccccttccc

SEQ ID NO: 13158 - DNA, 15 bp, Homo sapiens
tctgttgccccttcc

SEQ ID NO: 13159 - DNA, 15 bp, Homo sapiens
atctgttgccccttc

SEQ ID NO: 13160 - DNA, 15 bp, Homo sapiens
tatctgttgcccctt

SEQ ID NO: 13161 - DNA, 15 bp, Homo sapiens
gtatctgttgcccct

SEQ ID NO: 13162 - DNA, 15 bp, Homo sapiens
tgtatctgttgcccc

SEQ ID NO: 13163 - DNA, 15 bp, Homo sapiens
ctgtatctgttgccc

SEQ ID NO: 13164 - DNA, 15 bp, Homo sapiens
tctgtatctgttgcc

SEQ ID NO: 13165 - DNA, 15 bp, Homo sapiens
ctctgtatctgttgc

SEQ ID NO: 13166 - DNA, 15 bp, Homo sapiens
cctctgtatctgttg

SEQ ID NO: 13167 - DNA, 15 bp, Homo sapiens
acctctgtatctgtt

SEQ ID NO: 13168 - DNA, 15 bp, Homo sapiens
cacctctgtatctgt

SEQ ID NO: 13169 - DNA, 15 bp, Homo sapiens
ccacctctgtatctg

SEQ ID NO: 13170 - DNA, 15 bp, Homo sapiens
tccacctctgtatct

SEQ ID NO: 13171 - DNA, 15 bp, Homo sapiens
gtccacctctgtatc

SEQ ID NO: 13172 - DNA, 15 bp, Homo sapiens
tcctcttcctctctg

SEQ ID NO: 13173 - DNA, 15 bp, Homo sapiens
ctcctcttcctctct

SEQ ID NO: 13174 - DNA, 15 bp, Homo sapiens
tctcctcttcctctc

SEQ ID NO: 13175 - DNA, 15 bp, Homo sapiens
ctctcctcttcctct

SEQ ID NO: 13176 - DNA, 15 bp, Homo sapiens
tctctcctcttcctc

SEQ ID NO: 13177 - DNA, 15 bp, Homo sapiens
ctctctcctcttcct

SEQ ID NO: 13178 - DNA, 15 bp, Homo sapiens
tctctctcctcttcc

SEQ ID NO: 13179 - DNA, 15 bp, Homo sapiens
atctctctcctcttc

SEQ ID NO: 13180 - DNA, 15 bp, Homo sapiens
aatctctctcctctt

SEQ ID NO: 13181 - DNA, 15 bp, Homo sapiens
taatctctctcctct

SEQ ID NO: 13182 - DNA, 15 bp, Homo sapiens
ttaatctctctcctc

SEQ ID NO: 13183 - DNA, 15 bp, Homo sapiens
cttaatctctctcct

SEQ ID NO: 13184 - DNA, 15 bp, Homo sapiens
tcttaatctctctcc

SEQ ID NO: 13185 - DNA, 15 bp, Homo sapiens
ttcttaatctctctc

SEQ ID NO: 13186 - DNA, 15 bp, Homo sapiens
cttcttaatctctct

SEQ ID NO: 13187 - DNA, 15 bp, Homo sapiens
acttcttaatctctc

SEQ ID NO: 13188 - DNA, 15 bp, Homo sapiens
tacttcttaatctct

SEQ ID NO: 13189 - DNA, 15 bp, Homo sapiens
ttacttcttaatctc

SEQ ID NO: 13190 - DNA, 15 bp, Homo sapiens
tttacttcttaatct

SEQ ID NO: 13191 - DNA, 15 bp, Homo sapiens
gtttacttcttaatc

SEQ ID NO: 13192 - DNA, 15 bp, Homo sapiens
tgtttacttcttaat

SEQ ID NO: 13193 - DNA, 15 bp, Homo sapiens
ctgtttacttcttaa

SEQ ID NO: 13194 - DNA, 15 bp, Homo sapiens
tctgtttacttctta

SEQ ID NO: 13195 - DNA, 15 bp, Homo sapiens
ctctgtttacttctt

SEQ ID NO: 13196 - DNA, 15 bp, Homo sapiens
cctctgtttacttct

SEQ ID NO: 13197 - DNA, 15 bp, Homo sapiens
gcctctgtttacttc

SEQ ID NO: 13198 - DNA, 15 bp, Homo sapiens
tgcctctgtttactt

SEQ ID NO: 13199 - DNA, 15 bp, Homo sapiens
ctgcctctgtttact

SEQ ID NO: 13200 - DNA, 15 bp, Homo sapiens
tctgcctctgtttac

SEQ ID NO: 13201 - DNA, 15 bp, Homo sapiens
ctctgcctctgttta

SEQ ID NO: 13202 - DNA, 15 bp, Homo sapiens
cctctgcctctgttt

SEQ ID NO: 13203 - DNA, 15 bp, Homo sapiens
ccctctgcctctgtt

SEQ ID NO: 13204 - DNA, 15 bp, Homo sapiens
cccctctgcctctgt

SEQ ID NO: 13205 - DNA, 15 bp, Homo sapiens
acccctctgcctctg

SEQ ID NO: 13206 - DNA, 15 bp, Homo sapiens
cacccctctgcctct

SEQ ID NO: 13207 - DNA, 15 bp, Homo sapiens
tcacccctctgcctc

SEQ ID NO: 13208 - DNA, 15 bp, Homo sapiens
gtcacccctctgcct

SEQ ID NO: 13209 - DNA, 15 bp, Homo sapiens
tgtcacccctctgcc

SEQ ID NO: 13210 - DNA, 15 bp, Homo sapiens
ctgtcacccctctgc

SEQ ID NO: 13211 - DNA, 15 bp, Homo sapiens
tctgtcacccctctg

SEQ ID NO: 13212 - DNA, 15 bp, Homo sapiens
atctgtcacccctct

SEQ ID NO: 13213 - DNA, 15 bp, Homo sapiens
tatctgtcacccctc

SEQ ID NO: 13214 - DNA, 15 bp, Homo sapiens
atatctgtcacccct

SEQ ID NO: 13215 - DNA, 15 bp, Homo sapiens
tatatctgtcacccc

SEQ ID NO: 13216 - DNA, 15 bp, Homo sapiens
atatatctgtcaccc

SEQ ID NO: 13217 - DNA, 15 bp, Homo sapiens
tatatatctgtcacc

SEQ ID NO: 13218 - DNA, 15 bp, Homo sapiens
ctatatatctgtcac

SEQ ID NO: 13219 - DNA, 15 bp, Homo sapiens
cctatatatctgtca

SEQ ID NO: 13220 - DNA, 15 bp, Homo sapiens
acctatatatctgtc

SEQ ID NO: 13221 - DNA, 15 bp, Homo sapiens
cacctatatatctgt

SEQ ID NO: 13222 - DNA, 15 bp, Homo sapiens
ccacctatatatctg

SEQ ID NO: 13223 - DNA, 15 bp, Homo sapiens
tccacctatatatct

SEQ ID NO: 13224 - DNA, 15 bp, Homo sapiens
gtccacctatatatc

SEQ ID NO: 13225 - DNA, 15 bp, Homo sapiens
tgtccacctatatat

SEQ ID NO: 13226 - DNA, 15 bp, Homo sapiens
ctgtccacctatata

SEQ ID NO: 13227 - DNA, 15 bp, Homo sapiens
gctgtccacctatat

SEQ ID NO: 13228 - DNA, 15 bp, Homo sapiens
tgctgtccacctata

SEQ ID NO: 13229 - DNA, 15 bp, Homo sapiens
ttgctgtccacctat

SEQ ID NO: 13230 - DNA, 15 bp, Homo sapiens
cttgctgtccaccta

SEQ ID NO: 13231 - DNA, 15 bp, Homo sapiens
ccttgctgtccacct

SEQ ID NO: 13232 - DNA, 15 bp, Homo sapiens
tccttgctgtccacc

SEQ ID NO: 13233 - DNA, 15 bp, Homo sapiens
ttccttgctgtccac

SEQ ID NO: 13234 - DNA, 15 bp, Homo sapiens
cttccttgctgtcca

SEQ ID NO: 13235 - DNA, 15 bp, Homo sapiens
ccttccttgctgtcc

SEQ ID NO: 13236 - DNA, 15 bp, Homo sapiens
cccttccttgctgtc

SEQ ID NO: 13237 - DNA, 15 bp, Homo sapiens
ccccttccttgctgt

SEQ ID NO: 13238 - DNA, 15 bp, Homo sapiens
tccccttccttgctg

SEQ ID NO: 13239 - DNA, 15 bp, Homo sapiens
ctccccttccttgct

SEQ ID NO: 13240 - DNA, 15 bp, Homo sapiens
tctccccttccttgc

SEQ ID NO: 13241 - DNA, 15 bp, Homo sapiens
ctctccccttccttg

SEQ ID NO: 13242 - DNA, 15 bp, Homo sapiens
tctctccccttcctt

SEQ ID NO: 13243 - DNA, 15 bp, Homo sapiens
atctctccccttcct

SEQ ID NO: 13244 - DNA, 15 bp, Homo sapiens
tatctctccccttcc

SEQ ID NO: 13245 - DNA, 15 bp, Homo sapiens
gtatctctccccttc

SEQ ID NO: 13246 - DNA, 15 bp, Homo sapiens
tgtatctctcccctt

SEQ ID NO: 13247 - DNA, 15 bp, Homo sapiens
ctgtatctctcccct

SEQ ID NO: 13248 - DNA, 15 bp, Homo sapiens
tctgtatctctcccc

SEQ ID NO: 13249 - DNA, 15 bp, Homo sapiens
ctctgtatctctccc

SEQ ID NO: 13250 - DNA, 15 bp, Homo sapiens
cctctgtatctctcc

SEQ ID NO: 13251 - DNA, 15 bp, Homo sapiens
acctctgtatctctc

SEQ ID NO: 13252 - DNA, 15 bp, Homo sapiens
cacctctgtatctct

SEQ ID NO: 13253 - DNA, 15 bp, Homo sapiens
ccacctctgtatctc

SEQ ID NO: 13254 - DNA, 15 bp, Homo sapiens
gctctgtccacctct

SEQ ID NO: 13255 - DNA, 15 bp, Homo sapiens
tgctctgtccacctc

SEQ ID NO: 13256 - DNA, 15 bp, Homo sapiens
ctgctctgtccacct

SEQ ID NO: 13257 - DNA, 15 bp, Homo sapiens
tctgctctgtccacc

SEQ ID NO: 13258 - DNA, 15 bp, Homo sapiens
ttctgctctgtccac

SEQ ID NO: 13259 - DNA, 15 bp, Homo sapiens
cttctgctctgtcca

SEQ ID NO: 13260 - DNA, 15 bp, Homo sapiens
ccttctgctctgtcc

SEQ ID NO: 13261 - DNA, 15 bp, Homo sapiens
cccttctgctctgtc

SEQ ID NO: 13262 - DNA, 15 bp, Homo sapiens
ccccttctgctctgt

SEQ ID NO: 13263 - DNA, 15 bp, Homo sapiens
tccccttctgctctg

SEQ ID NO: 13264 - DNA, 15 bp, Homo sapiens
gtccccttctgctct

SEQ ID NO: 13265 - DNA, 15 bp, Homo sapiens
tgtccccttctgctc

SEQ ID NO: 13266 - DNA, 15 bp, Homo sapiens
gtgtccccttctgct

SEQ ID NO: 13267 - DNA, 15 bp, Homo sapiens
tgtgtccccttctgc

SEQ ID NO: 13268 - DNA, 15 bp, Homo sapiens
ctgtgtccccttctg

SEQ ID NO: 13269 - DNA, 15 bp, Homo sapiens
tctgtgtccccttct

SEQ ID NO: 13270 - DNA, 15 bp, Homo sapiens
atctgtgtccccttc

SEQ ID NO: 13271 - DNA, 15 bp, Homo sapiens
tatctgtgtcccctt

SEQ ID NO: 13272 - DNA, 15 bp, Homo sapiens
ttatctgtgtcccct

SEQ ID NO: 13273 - DNA, 15 bp, Homo sapiens
tttatctgtgtcccc

SEQ ID NO: 13274 - DNA, 15 bp, Homo sapiens
ttttatctgtgtccc

SEQ ID NO: 13275 - DNA, 15 bp, Homo sapiens
tttttatctgtgtcc

SEQ ID NO: 13276 - DNA, 15 bp, Homo sapiens
ctttttatctgtgtc

SEQ ID NO: 13277 - DNA, 15 bp, Homo sapiens
cctttttatctgtgt

SEQ ID NO: 13278 - DNA, 15 bp, Homo sapiens
acctttttatctgtg

SEQ ID NO: 13279 - DNA, 15 bp, Homo sapiens
cacctttttatctgt

SEQ ID NO: 13280 - DNA, 15 bp, Homo sapiens
gcacctttttatctg

SEQ ID NO: 13281 - DNA, 15 bp, Homo sapiens
tgcacctttttatct

SEQ ID NO: 13282 - DNA, 15 bp, Homo sapiens
gtgcacctttttatc

SEQ ID NO: 13283 - DNA, 15 bp, Homo sapiens
tgtgcacctttttat

SEQ ID NO: 13284 - DNA, 15 bp, Homo sapiens
ctgtgcaccttttta

SEQ ID NO: 13285 - DNA, 15 bp, Homo sapiens
tctgtgcaccttttt

SEQ ID NO: 13286 - DNA, 15 bp, Homo sapiens
ctctgtgcacctttt

SEQ ID NO: 13287 - DNA, 15 bp, Homo sapiens
tctctgtgcaccttt

SEQ ID NO: 13288 - DNA, 15 bp, Homo sapiens
ttctctgtgcacctt

SEQ ID NO: 13289 - DNA, 15 bp, Homo sapiens
cttctctgtgcacct

SEQ ID NO: 13290 - DNA, 15 bp, Homo sapiens
tcttctctgtgcacc

SEQ ID NO: 13291 - DNA, 15 bp, Homo sapiens
ttcttctctgtgcac

SEQ ID NO: 13292 - DNA, 15 bp, Homo sapiens
cttcttctctgtgca

SEQ ID NO: 13293 - DNA, 15 bp, Homo sapiens
tcttcttctctgtgc

SEQ ID NO: 13294 - DNA, 15 bp, Homo sapiens
ctcttcttctctgtg

SEQ ID NO: 13295 - DNA, 15 bp, Homo sapiens
ctgtcccctcttctt

SEQ ID NO: 13296 - DNA, 15 bp, Homo sapiens
tctgtcccctcttct

SEQ ID NO: 13297 - DNA, 15 bp, Homo sapiens
tttatctgtcccctc

SEQ ID NO: 13298 - DNA, 15 bp, Homo sapiens
cttctttatctgtcc

SEQ ID NO: 13299 - DNA, 15 bp, Homo sapiens
acttctttatctgtc

SEQ ID NO: 13300 - DNA, 15 bp, Homo sapiens
tacttctttatctgt

SEQ ID NO: 13301 - DNA, 15 bp, Homo sapiens
ctacttctttatctg

SEQ ID NO: 13302 - DNA, 15 bp, Homo sapiens
tctacttctttatct

SEQ ID NO: 13303 - DNA, 15 bp, Homo sapiens
gtctacttctttatc

SEQ ID NO: 13304 - DNA, 15 bp, Homo sapiens
tgtctacttctttat

SEQ ID NO: 13305 - DNA, 15 bp, Homo sapiens
ctgtctacttcttta

SEQ ID NO: 13306 - DNA, 15 bp, Homo sapiens
tctgtctacttcttt

SEQ ID NO: 13307 - DNA, 15 bp, Homo sapiens
ctctgtctacttctt

SEQ ID NO: 13308 - DNA, 15 bp, Homo sapiens
cctctgtctacttct

SEQ ID NO: 13309 - DNA, 15 bp, Homo sapiens
tcctctgtctacttc

SEQ ID NO: 13310 - DNA, 15 bp, Homo sapiens
ctcctctgtctactt

SEQ ID NO: 13311 - DNA, 15 bp, Homo sapiens
tctcctctgtctact

SEQ ID NO: 13312 - DNA, 15 bp, Homo sapiens
ttctcctctgtctac

SEQ ID NO: 13313 - DNA, 15 bp, Homo sapiens
cttctcctctgtcta

SEQ ID NO: 13314 - DNA, 15 bp, Homo sapiens
ccttctcctctgtct

SEQ ID NO: 13315 - DNA, 15 bp, Homo sapiens
cccttctcctctgtc

SEQ ID NO: 13316 - DNA, 15 bp, Homo sapiens
ccccttctcctctgt

SEQ ID NO: 13317 - DNA, 15 bp, Homo sapiens
cccccttctcctctg

SEQ ID NO: 13318 - DNA, 15 bp, Homo sapiens
tcccccttctcctct

SEQ ID NO: 13319 - DNA, 15 bp, Homo sapiens
ttcccccttctcctc

SEQ ID NO: 13320 - DNA, 15 bp, Homo sapiens
gttcccccttctcct

SEQ ID NO: 13321 - DNA, 15 bp, Homo sapiens
tgttcccccttctcc

SEQ ID NO: 13322 - DNA, 15 bp, Homo sapiens
ctgttcccccttctc

SEQ ID NO: 13323 - DNA, 15 bp, Homo sapiens
tctgttcccccttct

SEQ ID NO: 13324 - DNA, 15 bp, Homo sapiens
atctgttcccccttc

SEQ ID NO: 13325 - DNA, 15 bp, Homo sapiens
tatctgttccccctt

SEQ ID NO: 13326 - DNA, 15 bp, Homo sapiens
ctatctgttccccct

SEQ ID NO: 13327 - DNA, 15 bp, Homo sapiens
tctatctgttccccc

SEQ ID NO: 13328 - DNA, 15 bp, Homo sapiens
atctatctgttcccc

SEQ ID NO: 13329 - DNA, 15 bp, Homo sapiens
tatctatctgttccc

SEQ ID NO: 13330 - DNA, 15 bp, Homo sapiens
ctatctatctgttcc

SEQ ID NO: 13331 - DNA, 15 bp, Homo sapiens
tctatctatctgttc

SEQ ID NO: 13332 - DNA, 15 bp, Homo sapiens
gtctatctatctgtt

SEQ ID NO: 13333 - DNA, 15 bp, Homo sapiens
tgtctatctatctgt

SEQ ID NO: 13334 - DNA, 15 bp, Homo sapiens
ctgtctatctatctg

SEQ ID NO: 13335 - DNA, 15 bp, Homo sapiens
tctgtctatctatct

SEQ ID NO: 13336 - DNA, 15 bp, Homo sapiens
ctctgtctatctatc

SEQ ID NO: 13337 - DNA, 15 bp, Homo sapiens
gctctgtctatctat

SEQ ID NO: 13338 - DNA, 15 bp, Homo sapiens
tgctctgtctatcta

SEQ ID NO: 13339 - DNA, 15 bp, Homo sapiens
ttgctctgtctatct

SEQ ID NO: 13340 - DNA, 15 bp, Homo sapiens
cttgctctgtctatc

SEQ ID NO: 13341 - DNA, 15 bp, Homo sapiens
tcttgctctgtctat

SEQ ID NO: 13342 - DNA, 15 bp, Homo sapiens
ctcttgctctgtcta

SEQ ID NO: 13343 - DNA, 15 bp, Homo sapiens
tctcttgctctgtct

SEQ ID NO: 13344 - DNA, 15 bp, Homo sapiens
ctctcttgctctgtc

SEQ ID NO: 13345 - DNA, 15 bp, Homo sapiens
cctctcttgctctgt

SEQ ID NO: 13346 - DNA, 15 bp, Homo sapiens
tcctctcttgctctg

SEQ ID NO: 13347 - DNA, 15 bp, Homo sapiens
ttcctctcttgctct

SEQ ID NO: 13348 - DNA, 15 bp, Homo sapiens
attcctctcttgctc

SEQ ID NO: 13349 - DNA, 15 bp, Homo sapiens
aattcctctcttgct

SEQ ID NO: 13350 - DNA, 15 bp, Homo sapiens
gaattcctctcttgc

SEQ ID NO: 13351 - DNA, 15 bp, Homo sapiens
tgaattcctctcttg

SEQ ID NO: 13352 - DNA, 15 bp, Homo sapiens
ctgaattcctctctt

SEQ ID NO: 13353 - DNA, 15 bp, Homo sapiens
actgaattcctctct

SEQ ID NO: 13354 - DNA, 15 bp, Homo sapiens
tactgaattcctctc

SEQ ID NO: 13355 - DNA, 15 bp, Homo sapiens
gtactgaattcctct

SEQ ID NO: 13356 - DNA, 15 bp, Homo sapiens
tgtactgaattcctc

SEQ ID NO: 13357 - DNA, 15 bp, Homo sapiens
ctgtactgaattcct

SEQ ID NO: 13358 - DNA, 15 bp, Homo sapiens
tctgtactgaattcc

SEQ ID NO: 13359 - DNA, 15 bp, Homo sapiens
ttctgtactgaattc

SEQ ID NO: 13360 - DNA, 15 bp, Homo sapiens
tttctgtactgaatt

SEQ ID NO: 13361 - DNA, 15 bp, Homo sapiens
gtttctgtactgaat

SEQ ID NO: 13362 - DNA, 15 bp, Homo sapiens
cgtttctgtactgaa

SEQ ID NO: 13363 - DNA, 15 bp, Homo sapiens
tcgtttctgtactga

SEQ ID NO: 13364 - DNA, 15 bp, Homo sapiens
ctcgtttctgtactg

SEQ ID NO: 13365 - DNA, 15 bp, Homo sapiens
cctcgtttctgtact

SEQ ID NO: 13366 - DNA, 15 bp, Homo sapiens
tcctcgtttctgtac

SEQ ID NO: 13367 - DNA, 15 bp, Homo sapiens
ctcctcgtttctgta

SEQ ID NO: 13368 - DNA, 15 bp, Homo sapiens
tctcctcgtttctgt

SEQ ID NO: 13369 - DNA, 15 bp, Homo sapiens
gtctcctcgtttctg

SEQ ID NO: 13370 - DNA, 15 bp, Homo sapiens
tgtctcctcgtttct

SEQ ID NO: 13371 - DNA, 15 bp, Homo sapiens
ctgtctcctcgtttc

SEQ ID NO: 13372 - DNA, 15 bp, Homo sapiens
tctgtctcctcgttt

SEQ ID NO: 13373 - DNA, 15 bp, Homo sapiens
ctctgtctcctcgtt

SEQ ID NO: 13374 - DNA, 15 bp, Homo sapiens
tctctgtctcctcgt

SEQ ID NO: 13375 - DNA, 15 bp, Homo sapiens
ctctctgtctcctcg

SEQ ID NO: 13376 - DNA, 15 bp, Homo sapiens
cctctctgtctcctc

SEQ ID NO: 13377 - DNA, 15 bp, Homo sapiens
acctctctgtctcct

SEQ ID NO: 13378 - DNA, 15 bp, Homo sapiens
tacctctctgtctcc

SEQ ID NO: 13379 - DNA, 15 bp, Homo sapiens
ttacctctctgtctc

SEQ ID NO: 13380 - DNA, 15 bp, Homo sapiens
cttacctctctgtct

SEQ ID NO: 13381 - DNA, 15 bp, Homo sapiens
tcttacctctctgtc

SEQ ID NO: 13382 - DNA, 15 bp, Homo sapiens
ttcttacctctctgt

SEQ ID NO: 13383 - DNA, 15 bp, Homo sapiens
tttcttacctctctg

SEQ ID NO: 13384 - DNA, 15 bp, Homo sapiens
ctttcttacctctct

SEQ ID NO: 13385 - DNA, 15 bp, Homo sapiens
tctttcttacctctc

SEQ ID NO: 13386 - DNA, 15 bp, Homo sapiens
ctctttcttacctct

SEQ ID NO: 13387 - DNA, 15 bp, Homo sapiens
cctctttcttacctc

SEQ ID NO: 13388 - DNA, 15 bp, Homo sapiens
tcctctttcttacct

SEQ ID NO: 13389 - DNA, 15 bp, Homo sapiens
ctcctctttcttacc

SEQ ID NO: 13390 - DNA, 15 bp, Homo sapiens
gctcctctttcttac

SEQ ID NO: 13391 - DNA, 15 bp, Homo sapiens
tgctcctctttctta

SEQ ID NO: 13392 - DNA, 15 bp, Homo sapiens
ctgctcctctttctt

SEQ ID NO: 13393 - DNA, 15 bp, Homo sapiens
gctgctcctctttct

SEQ ID NO: 13394 - DNA, 15 bp, Homo sapiens
tgctgctcctctttc

SEQ ID NO: 13395 - DNA, 15 bp, Homo sapiens
ttgctgctcctcttt

SEQ ID NO: 13396 - DNA, 15 bp, Homo sapiens
tttgctgctcctctt

SEQ ID NO: 13397 - DNA, 15 bp, Homo sapiens
ttttgctgctcctct

SEQ ID NO: 13398 - DNA, 15 bp, Homo sapiens
tttttgctgctcctc

SEQ ID NO: 13399 - DNA, 15 bp, Homo sapiens
gtttttgctgctcct

SEQ ID NO: 13400 - DNA, 15 bp, Homo sapiens
tgtttttgctgctcc

SEQ ID NO: 13401 - DNA, 15 bp, Homo sapiens
gtgtttttgctgctc

SEQ ID NO: 13402 - DNA, 15 bp, Homo sapiens
tgtgtttttgctgct

SEQ ID NO: 13403 - DNA, 15 bp, Homo sapiens
ctgtgtttttgctgc

SEQ ID NO: 13404 - DNA, 15 bp, Homo sapiens
tctgtgtttttgctg

SEQ ID NO: 13405 - DNA, 15 bp, Homo sapiens
ttctgtgtttttgct

SEQ ID NO: 13406 - DNA, 15 bp, Homo sapiens
gttctgtgtttttgc

SEQ ID NO: 13407 - DNA, 15 bp, Homo sapiens
agttctgtgtttttg

SEQ ID NO: 13408 - DNA, 15 bp, Homo sapiens
tagttctgtgttttt

SEQ ID NO: 13409 - DNA, 15 bp, Homo sapiens
ctagttctgtgtttt

SEQ ID NO: 13410 - DNA, 15 bp, Homo sapiens
tctagttctgtgttt

SEQ ID NO: 13411 - DNA, 15 bp, Homo sapiens
ttctagttctgtgtt

SEQ ID NO: 13412 - DNA, 15 bp, Homo sapiens
attctagttctgtgt

SEQ ID NO: 13413 - DNA, 15 bp, Homo sapiens
tattctagttctgtg

SEQ ID NO: 13414 - DNA, 15 bp, Homo sapiens
ttattctagttctgt

SEQ ID NO: 13415 - DNA, 15 bp, Homo sapiens
attattctagttctg

SEQ ID NO: 13416 - DNA, 15 bp, Homo sapiens
cattattctagttct

SEQ ID NO: 13417 - DNA, 15 bp, Homo sapiens
ccattattctagttc

SEQ ID NO: 13418 - DNA, 15 bp, Homo sapiens
cccattattctagtt

SEQ ID NO: 13419 - DNA, 15 bp, Homo sapiens
ccccattattctagt

SEQ ID NO: 13420 - DNA, 15 bp, Homo sapiens
tccccattattctag

SEQ ID NO: 13421 - DNA, 15 bp, Homo sapiens
gtccccattattcta

SEQ ID NO: 13422 - DNA, 15 bp, Homo sapiens
tgtccccattattct

SEQ ID NO: 13423 - DNA, 15 bp, Homo sapiens
ctgtccccattattc

SEQ ID NO: 13424 - DNA, 15 bp, Homo sapiens
cctgtccccattatt

SEQ ID NO: 13425 - DNA, 15 bp, Homo sapiens
gcctgtccccattat

SEQ ID NO: 13426 - DNA, 15 bp, Homo sapiens
tgcctgtccccatta

SEQ ID NO: 13427 - DNA, 15 bp, Homo sapiens
ctgcctgtccccatt

SEQ ID NO: 13428 - DNA, 15 bp, Homo sapiens
tctgcctgtccccat

SEQ ID NO: 13429 - DNA, 15 bp, Homo sapiens
ttctgcctgtcccca

SEQ ID NO: 13430 - DNA, 15 bp, Homo sapiens
tttctgcctgtcccc

SEQ ID NO: 13431 - DNA, 15 bp, Homo sapiens
atttctgcctgtccc

SEQ ID NO: 13432 - DNA, 15 bp, Homo sapiens
aatttctgcctgtcc

SEQ ID NO: 13433 - DNA, 15 bp, Homo sapiens
caatttctgcctgtc

SEQ ID NO: 13434 - DNA, 15 bp, Homo sapiens
acaatttctgcctgt

SEQ ID NO: 13435 - DNA, 15 bp, Homo sapiens
cacaatttctgcctg

SEQ ID NO: 13436 - DNA, 15 bp, Homo sapiens
gcacaatttctgcct

SEQ ID NO: 13437 - DNA, 15 bp, Homo sapiens
tgcacaatttctgcc

SEQ ID NO: 13438 - DNA, 15 bp, Homo sapiens
ttgcacaatttctgc

SEQ ID NO: 13439 - DNA, 15 bp, Homo sapiens
tttgcacaatttctg

SEQ ID NO: 13440 - DNA, 15 bp, Homo sapiens
ttttgcacaatttct

SEQ ID NO: 13441 - DNA, 15 bp, Homo sapiens
tttttgcacaatttc

SEQ ID NO: 13442 - DNA, 15 bp, Homo sapiens
gtttttgcacaattt

SEQ ID NO: 13443 - DNA, 15 bp, Homo sapiens
ggtttttgcacaatt

SEQ ID NO: 13444 - DNA, 15 bp, Homo sapiens
aggtttttgcacaat

SEQ ID NO: 13445 - DNA, 15 bp, Homo sapiens
taggtttttgcacaa

SEQ ID NO: 13446 - DNA, 15 bp, Homo sapiens
ctaggtttttgcaca

SEQ ID NO: 13447 - DNA, 15 bp, Homo sapiens
tctaggtttttgcac

SEQ ID NO: 13448 - DNA, 15 bp, Homo sapiens
ttctaggtttttgca

SEQ ID NO: 13449 - DNA, 15 bp, Homo sapiens
tttctaggtttttgc

SEQ ID NO: 13450 - DNA, 15 bp, Homo sapiens
gtttctaggtttttg

SEQ ID NO: 13451 - DNA, 15 bp, Homo sapiens
ggtttctaggttttt

SEQ ID NO: 13452 - DNA, 15 bp, Homo sapiens
tggtttctaggtttt

SEQ ID NO: 13453 - DNA, 15 bp, Homo sapiens
ctggtttctaggttt

SEQ ID NO: 13454 - DNA, 15 bp, Homo sapiens
tctggtttctaggtt

SEQ ID NO: 13455 - DNA, 15 bp, Homo sapiens
ttctggtttctaggt

SEQ ID NO: 13456 - DNA, 15 bp, Homo sapiens
tttctggtttctagg

SEQ ID NO: 13457 - DNA, 15 bp, Homo sapiens
ttttctggtttctag

SEQ ID NO: 13458 - DNA, 15 bp, Homo sapiens
tttttctggtttcta

SEQ ID NO: 13459 - DNA, 15 bp, Homo sapiens
atttttctggtttct

SEQ ID NO: 13460 - DNA, 15 bp, Homo sapiens
catttttctggtttc

SEQ ID NO: 13461 - DNA, 15 bp, Homo sapiens
tcatttttctggttt

SEQ ID NO: 13462 - DNA, 15 bp, Homo sapiens
ttcatttttctggtt

SEQ ID NO: 13463 - DNA, 15 bp, Homo sapiens
gttcatttttctggt

SEQ ID NO: 13464 - DNA, 15 bp, Homo sapiens
tgttcatttttctgg

SEQ ID NO: 13465 - DNA, 15 bp, Homo sapiens
atgttcatttttctg

SEQ ID NO: 13466 - DNA, 15 bp, Homo sapiens
gatgttcatttttct

SEQ ID NO: 13467 - DNA, 15 bp, Homo sapiens
tgatgttcatttttc

SEQ ID NO: 13468 - DNA, 15 bp, Homo sapiens
ctgatgttcattttt

SEQ ID NO: 13469 - DNA, 15 bp, Homo sapiens
actgatgttcatttt

SEQ ID NO: 13470 - DNA, 15 bp, Homo sapiens
cactgatgttcattt

SEQ ID NO: 13471 - DNA, 15 bp, Homo sapiens
tcactgatgttcatt

SEQ ID NO: 13472 - DNA, 15 bp, Homo sapiens
gtcactgatgttcat

SEQ ID NO: 13473 - DNA, 15 bp, Homo sapiens
tgtcactgatgttca

SEQ ID NO: 13474 - DNA, 15 bp, Homo sapiens
ttgtcactgatgttc

SEQ ID NO: 13475 - DNA, 15 bp, Homo sapiens
cttgtcactgatgtt

SEQ ID NO: 13476 - DNA, 15 bp, Homo sapiens
acttgtcactgatgt

SEQ ID NO: 13477 - DNA, 15 bp, Homo sapiens
cacttgtcactgatg

SEQ ID NO: 13478 - DNA, 15 bp, Homo sapiens
gcacttgtcactgat

SEQ ID NO: 13479 - DNA, 15 bp, Homo sapiens
tgcacttgtcactga

SEQ ID NO: 13480 - DNA, 15 bp, Homo sapiens
ctgcacttgtcactg

SEQ ID NO: 13481 - DNA, 15 bp, Homo sapiens
tctgcacttgtcact

SEQ ID NO: 13482 - DNA, 15 bp, Homo sapiens
ttctgcacttgtcac

SEQ ID NO: 13483 - DNA, 15 bp, Homo sapiens
tttctgcacttgtca

SEQ ID NO: 13484 - DNA, 15 bp, Homo sapiens
gtttctgcacttgtc

SEQ ID NO: 13485 - DNA, 15 bp, Homo sapiens
tgtttctgcacttgt

SEQ ID NO: 13486 - DNA, 15 bp, Homo sapiens
ctgtttctgcacttg

SEQ ID NO: 13487 - DNA, 15 bp, Homo sapiens
tctgtttctgcactt

SEQ ID NO: 13488 - DNA, 15 bp, Homo sapiens
ctctgtttctgcact

SEQ ID NO: 13489 - DNA, 15 bp, Homo sapiens
tctctgtttctgcac

SEQ ID NO: 13490 - DNA, 15 bp, Homo sapiens
ttctctgtttctgca

SEQ ID NO: 13491 - DNA, 15 bp, Homo sapiens
tttctctgtttctgc

SEQ ID NO: 13492 - DNA, 15 bp, Homo sapiens
ctttctctgtttctg

SEQ ID NO: 13493 - DNA, 15 bp, Homo sapiens
tctttctctgtttct

SEQ ID NO: 13494 - DNA, 15 bp, Homo sapiens
atctttctctgtttc

SEQ ID NO: 13495 - DNA, 15 bp, Homo sapiens
aatctttctctgttt

SEQ ID NO: 13496 - DNA, 15 bp, Homo sapiens
taatctttctctgtt

SEQ ID NO: 13497 - DNA, 15 bp, Homo sapiens
ctaatctttctctgt

SEQ ID NO: 13498 - DNA, 15 bp, Homo sapiens
cctaatctttctctg

SEQ ID NO: 13499 - DNA, 15 bp, Homo sapiens
ccctaatctttctct

SEQ ID NO: 13500 - DNA, 15 bp, Homo sapiens
gccctaatctttctc

SEQ ID NO: 13501 - DNA, 15 bp, Homo sapiens
ggccctaatctttct

SEQ ID NO: 13502 - DNA, 15 bp, Homo sapiens
cggccctaatctttc

SEQ ID NO: 13503 - DNA, 15 bp, Homo sapiens
ccggccctaatcttt

SEQ ID NO: 13504 - DNA, 15 bp, Homo sapiens
cccggccctaatctt

SEQ ID NO: 13505 - DNA, 15 bp, Homo sapiens
acccggccctaatct

SEQ ID NO: 13506 - DNA, 15 bp, Homo sapiens
cacccggccctaatc

SEQ ID NO: 13507 - DNA, 15 bp, Homo sapiens
gcacccggccctaat

SEQ ID NO: 13508 - DNA, 15 bp, Homo sapiens
cgcacccggccctaa

SEQ ID NO: 13509 - DNA, 15 bp, Homo sapiens
ccgcacccggcccta

SEQ ID NO: 13510 - DNA, 15 bp, Homo sapiens
accgcacccggccct

SEQ ID NO: 13511 - DNA, 15 bp, Homo sapiens
caccgcacccggccc

SEQ ID NO: 13512 - DNA, 15 bp, Homo sapiens
ccaccgcacccggcc

SEQ ID NO: 13513 - DNA, 15 bp, Homo sapiens
gccaccgcacccggc

SEQ ID NO: 13514 - DNA, 15 bp, Homo sapiens
agccaccgcacccgg

SEQ ID NO: 13515 - DNA, 15 bp, Homo sapiens
gagccaccgcacccg

SEQ ID NO: 13516 - DNA, 15 bp, Homo sapiens
tgagccaccgcaccc

SEQ ID NO: 13517 - DNA, 15 bp, Homo sapiens
atgagccaccgcacc

SEQ ID NO: 13518 - DNA, 15 bp, Homo sapiens
catgagccaccgcac

SEQ ID NO: 13519 - DNA, 15 bp, Homo sapiens
gcatgagccaccgca

SEQ ID NO: 13520 - DNA, 15 bp, Homo sapiens
ggcatgagccaccgc

SEQ ID NO: 13521 - DNA, 15 bp, Homo sapiens
aggcatgagccaccg

SEQ ID NO: 13522 - DNA, 15 bp, Homo sapiens
ttgggattacaggca

SEQ ID NO: 13523 - DNA, 15 bp, Homo sapiens
gttgggattacaggc

SEQ ID NO: 13524 - DNA, 15 bp, Homo sapiens
tgttgggattacagg

SEQ ID NO: 13525 - DNA, 15 bp, Homo sapiens
gtgttgggattacag

SEQ ID NO: 13526 - DNA, 15 bp, Homo sapiens
agtgttgggattaca

SEQ ID NO: 13527 - DNA, 15 bp, Homo sapiens
aagtgttgggattac

SEQ ID NO: 13528 - DNA, 15 bp, Homo sapiens
aaagtgttgggatta

SEQ ID NO: 13529 - DNA, 15 bp, Homo sapiens
caaagtgttgggatt

SEQ ID NO: 13530 - DNA, 15 bp, Homo sapiens
ccaaagtgttgggat

SEQ ID NO: 13531 - DNA, 15 bp, Homo sapiens
cccaaagtgttggga

SEQ ID NO: 13532 - DNA, 15 bp, Homo sapiens
tcccaaagtgttggg

SEQ ID NO: 13533 - DNA, 15 bp, Homo sapiens
ctcccaaagtgttgg

SEQ ID NO: 13534 - DNA, 15 bp, Homo sapiens
tggcctcccaaagtg

SEQ ID NO: 13535 - DNA, 15 bp, Homo sapiens
ttggcctcccaaagt

SEQ ID NO: 13536 - DNA, 15 bp, Homo sapiens
cttggcctcccaaag

SEQ ID NO: 13537 - DNA, 15 bp, Homo sapiens
ccttggcctcccaaa

SEQ ID NO: 13538 - DNA, 15 bp, Homo sapiens
accttggcctcccaa

SEQ ID NO: 13539 - DNA, 15 bp, Homo sapiens
caccttggcctccca

SEQ ID NO: 13540 - DNA, 15 bp, Homo sapiens
ccaccttggcctccc

SEQ ID NO: 13541 - DNA, 15 bp, Homo sapiens
cccaccttggcctcc

SEQ ID NO: 13542 - DNA, 15 bp, Homo sapiens
gcccaccttggcctc

SEQ ID NO: 13543 - DNA, 15 bp, Homo sapiens
tgcccaccttggcct

SEQ ID NO: 13544 - DNA, 15 bp, Homo sapiens
ctgcccaccttggcc

SEQ ID NO: 13545 - DNA, 15 bp, Homo sapiens
tctgcccaccttggc

SEQ ID NO: 13546 - DNA, 15 bp, Homo sapiens
atctgcccaccttgg

SEQ ID NO: 13547 - DNA, 15 bp, Homo sapiens
gatctgcccaccttg

SEQ ID NO: 13548 - DNA, 15 bp, Homo sapiens
tgatctgcccacctt

SEQ ID NO: 13549 - DNA, 15 bp, Homo sapiens
gtgatctgcccacct

SEQ ID NO: 13550 - DNA, 15 bp, Homo sapiens
ggtgatctgcccacc

SEQ ID NO: 13551 - DNA, 15 bp, Homo sapiens
aggtgatctgcccac

SEQ ID NO: 13552 - DNA, 15 bp, Homo sapiens
caggtgatctgccca

SEQ ID NO: 13553 - DNA, 15 bp, Homo sapiens
tcaggtgatctgccc

SEQ ID NO: 13554 - DNA, 15 bp, Homo sapiens
ctcaggtgatctgcc

SEQ ID NO: 13555 - DNA, 15 bp, Homo sapiens
cctcaggtgatctgc

SEQ ID NO: 13556 - DNA, 15 bp, Homo sapiens
acctcaggtgatctg

SEQ ID NO: 13557 - DNA, 15 bp, Homo sapiens
ttcctgacctcaggt

SEQ ID NO: 13558 - DNA, 15 bp, Homo sapiens
attcctgacctcagg

SEQ ID NO: 13559 - DNA, 15 bp, Homo sapiens
aattcctgacctcag

SEQ ID NO: 13560 - DNA, 15 bp, Homo sapiens
gaattcctgacctca

SEQ ID NO: 13561 - DNA, 15 bp, Homo sapiens
cgaattcctgacctc

SEQ ID NO: 13562 - DNA, 15 bp, Homo sapiens
tcgaattcctgacct

SEQ ID NO: 13563 - DNA, 15 bp, Homo sapiens
ctcgaattcctgacc

SEQ ID NO: 13564 - DNA, 15 bp, Homo sapiens
tctcgaattcctgac

SEQ ID NO: 13565 - DNA, 15 bp, Homo sapiens
gtctcgaattcctga

SEQ ID NO: 13566 - DNA, 15 bp, Homo sapiens
ggtctcgaattcctg

SEQ ID NO: 13567 - DNA, 15 bp, Homo sapiens
tggtctcgaattcct

SEQ ID NO: 13568 - DNA, 15 bp, Homo sapiens
ctggtctcgaattcc

SEQ ID NO: 13569 - DNA, 15 bp, Homo sapiens
gctggtctcgaattc

SEQ ID NO: 13570 - DNA, 15 bp, Homo sapiens
ggctggtctcgaatt

SEQ ID NO: 13571 - DNA, 15 bp, Homo sapiens
aggctggtctcgaat

SEQ ID NO: 13572 - DNA, 15 bp, Homo sapiens
taggctggtctcgaa

SEQ ID NO: 13573 - DNA, 15 bp, Homo sapiens
ctaggctggtctcga

SEQ ID NO: 13574 - DNA, 15 bp, Homo sapiens
gctaggctggtctcg

SEQ ID NO: 13575 - DNA, 15 bp, Homo sapiens
ggctaggctggtctc

SEQ ID NO: 13576 - DNA, 15 bp, Homo sapiens
tggctaggctggtct

SEQ ID NO: 13577 - DNA, 15 bp, Homo sapiens
ttggctaggctggtc

SEQ ID NO: 13578 - DNA, 15 bp, Homo sapiens
gttggctaggctggt

SEQ ID NO: 13579 - DNA, 15 bp, Homo sapiens
tgttggctaggctgg

SEQ ID NO: 13580 - DNA, 15 bp, Homo sapiens
atgttggctaggctg

SEQ ID NO: 13581 - DNA, 15 bp, Homo sapiens
catgttggctaggct

SEQ ID NO: 13582 - DNA, 15 bp, Homo sapiens
ccatgttggctaggc

SEQ ID NO: 13583 - DNA, 15 bp, Homo sapiens
gccatgttggctagg

SEQ ID NO: 13584 - DNA, 15 bp, Homo sapiens
tgccatgttggctag

SEQ ID NO: 13585 - DNA, 15 bp, Homo sapiens
ttgccatgttggcta

SEQ ID NO: 13586 - DNA, 15 bp, Homo sapiens
tttgccatgttggct

SEQ ID NO: 13587 - DNA, 15 bp, Homo sapiens
ttttgccatgttggc

SEQ ID NO: 13588 - DNA, 15 bp, Homo sapiens
gttttgccatgttgg

SEQ ID NO: 13589 - DNA, 15 bp, Homo sapiens
agggttttgccatgt

SEQ ID NO: 13590 - DNA, 15 bp, Homo sapiens
cagggttttgccatg

SEQ ID NO: 13591 - DNA, 15 bp, Homo sapiens
acagggttttgccat

SEQ ID NO: 13592 - DNA, 15 bp, Homo sapiens
gacagggttttgcca

SEQ ID NO: 13593 - DNA, 15 bp, Homo sapiens
agacagggttttgcc

SEQ ID NO: 13594 - DNA, 15 bp, Homo sapiens
gagacagggttttgc

SEQ ID NO: 13595 - DNA, 15 bp, Homo sapiens
agagacagggttttg

SEQ ID NO: 13596 - DNA, 15 bp, Homo sapiens
tagagacagggtttt

SEQ ID NO: 13597 - DNA, 15 bp, Homo sapiens
atatttttagtagag

SEQ ID NO: 13598 - DNA, 15 bp, Homo sapiens
tatatttttagtaga

SEQ ID NO: 13599 - DNA, 15 bp, Homo sapiens
ttatatttttagtag

SEQ ID NO: 13600 - DNA, 15 bp, Homo sapiens
tttatatttttagta

SEQ ID NO: 13601 - DNA, 15 bp, Homo sapiens
ttttatatttttagt

SEQ ID NO: 13602 - DNA, 15 bp, Homo sapiens
tttttatatttttag

SEQ ID NO: 13603 - DNA, 15 bp, Homo sapiens
atttttatattttta

SEQ ID NO: 13604 - DNA, 15 bp, Homo sapiens
aatttttatattttt

SEQ ID NO: 13605 - DNA, 15 bp, Homo sapiens
taatttttatatttt

SEQ ID NO: 13606 - DNA, 15 bp, Homo sapiens
ctaatttttatattt

SEQ ID NO: 13607 - DNA, 15 bp, Homo sapiens
gctaatttttatatt

SEQ ID NO: 13608 - DNA, 15 bp, Homo sapiens
ggctaatttttatat

SEQ ID NO: 13609 - DNA, 15 bp, Homo sapiens
tggctaatttttata

SEQ ID NO: 13610 - DNA, 15 bp, Homo sapiens
ctggctaatttttat

SEQ ID NO: 13611 - DNA, 15 bp, Homo sapiens
cctggctaattttta

SEQ ID NO: 13612 - DNA, 15 bp, Homo sapiens
acctggctaattttt

SEQ ID NO: 13613 - DNA, 15 bp, Homo sapiens
cacctggctaatttt

SEQ ID NO: 13614 - DNA, 15 bp, Homo sapiens
acacctggctaattt

SEQ ID NO: 13615 - DNA, 15 bp, Homo sapiens
cacacctggctaatt

SEQ ID NO: 13616 - DNA, 15 bp, Homo sapiens
ccacacctggctaat

SEQ ID NO: 13617 - DNA, 15 bp, Homo sapiens
accacacctggctaa

SEQ ID NO: 13618 - DNA, 15 bp, Homo sapiens
caccacacctggcta

SEQ ID NO: 13619 - DNA, 15 bp, Homo sapiens
ccaccacacctggct

SEQ ID NO: 13620 - DNA, 15 bp, Homo sapiens
accaccacacctggc

SEQ ID NO: 13621 - DNA, 15 bp, Homo sapiens
caccaccacacctgg

SEQ ID NO: 13622 - DNA, 15 bp, Homo sapiens
gcaccaccacacctg

SEQ ID NO: 13623 - DNA, 15 bp, Homo sapiens
tgcaccaccacacct

SEQ ID NO: 13624 - DNA, 15 bp, Homo sapiens
ttgcaccaccacacc

SEQ ID NO: 13625 - DNA, 15 bp, Homo sapiens
cttgcaccaccacac

SEQ ID NO: 13626 - DNA, 15 bp, Homo sapiens
gcttgcaccaccaca

SEQ ID NO: 13627 - DNA, 15 bp, Homo sapiens
ggcttgcaccaccac

SEQ ID NO: 13628 - DNA, 15 bp, Homo sapiens
aggcttgcaccacca

SEQ ID NO: 13629 - DNA, 15 bp, Homo sapiens
caggcttgcaccacc

SEQ ID NO: 13630 - DNA, 15 bp, Homo sapiens
acaggcttgcaccac

SEQ ID NO: 13631 - DNA, 15 bp, Homo sapiens
tacaggcttgcacca

SEQ ID NO: 13632 - DNA, 15 bp, Homo sapiens
ttacaggcttgcacc

SEQ ID NO: 13633 - DNA, 15 bp, Homo sapiens
attacaggcttgcac

SEQ ID NO: 13634 - DNA, 15 bp, Homo sapiens
gattacaggcttgca

SEQ ID NO: 13635 - DNA, 15 bp, Homo sapiens
ggattacaggcttgc

SEQ ID NO: 13636 - DNA, 15 bp, Homo sapiens
gggattacaggcttg

SEQ ID NO: 13637 - DNA, 15 bp, Homo sapiens
tgggattacaggctt

SEQ ID NO: 13638 - DNA, 15 bp, Homo sapiens
ctgggattacaggct

SEQ ID NO: 13639 - DNA, 15 bp, Homo sapiens
agctgggattacagg

SEQ ID NO: 13640 - DNA, 15 bp, Homo sapiens
tagctgggattacag

SEQ ID NO: 13641 - DNA, 15 bp, Homo sapiens
gtagctgggattaca

SEQ ID NO: 13642 - DNA, 15 bp, Homo sapiens
agtagctgggattac

SEQ ID NO: 13643 - DNA, 15 bp, Homo sapiens
aagtagctgggatta

SEQ ID NO: 13644 - DNA, 15 bp, Homo sapiens
caagtagctgggatt

SEQ ID NO: 13645 - DNA, 15 bp, Homo sapiens
ccaagtagctgggat

SEQ ID NO: 13646 - DNA, 15 bp, Homo sapiens
cccaagtagctggga

SEQ ID NO: 13647 - DNA, 15 bp, Homo sapiens
tcccaagtagctggg

SEQ ID NO: 13648 - DNA, 15 bp, Homo sapiens
ctcccaagtagctgg

SEQ ID NO: 13649 - DNA, 15 bp, Homo sapiens
cctcccaagtagctg

SEQ ID NO: 13650 - DNA, 15 bp, Homo sapiens
gcctcccaagtagct

SEQ ID NO: 13651 - DNA, 15 bp, Homo sapiens
agcctcccaagtagc

SEQ ID NO: 13652 - DNA, 15 bp, Homo sapiens
cgattctcctgcctc

SEQ ID NO: 13653 - DNA, 15 bp, Homo sapiens
gcgattctcctgcct

SEQ ID NO: 13654 - DNA, 15 bp, Homo sapiens
agcgattctcctgcc

SEQ ID NO: 13655 - DNA, 15 bp, Homo sapiens
aagcgattctcctgc

SEQ ID NO: 13656 - DNA, 15 bp, Homo sapiens
caagcgattctcctg

SEQ ID NO: 13657 - DNA, 15 bp, Homo sapiens
tcaagcgattctcct

SEQ ID NO: 13658 - DNA, 15 bp, Homo sapiens
ttcaagcgattctcc

SEQ ID NO: 13659 - DNA, 15 bp, Homo sapiens
gttcaagcgattctc

SEQ ID NO: 13660 - DNA, 15 bp, Homo sapiens
ggttcaagcgattct

SEQ ID NO: 13661 - DNA, 15 bp, Homo sapiens
gggttcaagcgattc

SEQ ID NO: 13662 - DNA, 15 bp, Homo sapiens
cgggttcaagcgatt

SEQ ID NO: 13663 - DNA, 15 bp, Homo sapiens
ccgggttcaagcgat

SEQ ID NO: 13664 - DNA, 15 bp, Homo sapiens
cccgggttcaagcga

SEQ ID NO: 13665 - DNA, 15 bp, Homo sapiens
tcccgggttcaagcg

SEQ ID NO: 13666 - DNA, 15 bp, Homo sapiens
ctcccgggttcaagc

SEQ ID NO: 13667 - DNA, 15 bp, Homo sapiens
tctcccgggttcaag

SEQ ID NO: 13668 - DNA, 15 bp, Homo sapiens
atctcccgggttcaa

SEQ ID NO: 13669 - DNA, 15 bp, Homo sapiens
catctcccgggttca

SEQ ID NO: 13670 - DNA, 15 bp, Homo sapiens
ccatctcccgggttc

SEQ ID NO: 13671 - DNA, 15 bp, Homo sapiens
tccatctcccgggtt

SEQ ID NO: 13672 - DNA, 15 bp, Homo sapiens
ctccatctcccgggt

SEQ ID NO: 13673 - DNA, 15 bp, Homo sapiens
cctccatctcccggg

SEQ ID NO: 13674 - DNA, 15 bp, Homo sapiens
acctccatctcccgg

SEQ ID NO: 13675 - DNA, 15 bp, Homo sapiens
aacctccatctcccg

SEQ ID NO: 13676 - DNA, 15 bp, Homo sapiens
caacctccatctccc

SEQ ID NO: 13677 - DNA, 15 bp, Homo sapiens
gcaacctccatctcc

SEQ ID NO: 13678 - DNA, 15 bp, Homo sapiens
tgcaacctccatctc

SEQ ID NO: 13679 - DNA, 15 bp, Homo sapiens
ctgcaacctccatct

SEQ ID NO: 13680 - DNA, 15 bp, Homo sapiens
actgcaacctccatc

SEQ ID NO: 13681 - DNA, 15 bp, Homo sapiens
cactgcaacctccat

SEQ ID NO: 13682 - DNA, 15 bp, Homo sapiens
acactgcaacctcca

SEQ ID NO: 13683 - DNA, 15 bp, Homo sapiens
cacactgcaacctcc

SEQ ID NO: 13684 - DNA, 15 bp, Homo sapiens
gcacactgcaacctc

SEQ ID NO: 13685 - DNA, 15 bp, Homo sapiens
agcacactgcaacct

SEQ ID NO: 13686 - DNA, 15 bp, Homo sapiens
cagcacactgcaacc

SEQ ID NO: 13687 - DNA, 15 bp, Homo sapiens
tcagcacactgcaac

SEQ ID NO: 13688 - DNA, 15 bp, Homo sapiens
ctcagcacactgcaa

SEQ ID NO: 13689 - DNA, 15 bp, Homo sapiens
tctcagcacactgca

SEQ ID NO: 13690 - DNA, 15 bp, Homo sapiens
atctcagcacactgc

SEQ ID NO: 13691 - DNA, 15 bp, Homo sapiens
gatctcagcacactg

SEQ ID NO: 13692 - DNA, 15 bp, Homo sapiens
tgatctcagcacact

SEQ ID NO: 13693 - DNA, 15 bp, Homo sapiens
gtgatctcagcacac

SEQ ID NO: 13694 - DNA, 15 bp, Homo sapiens
cgtgatctcagcaca

SEQ ID NO: 13695 - DNA, 15 bp, Homo sapiens
gcgtgatctcagcac

SEQ ID NO: 13696 - DNA, 15 bp, Homo sapiens
ggcgtgatctcagca

SEQ ID NO: 13697 - DNA, 15 bp, Homo sapiens
tggcgtgatctcagc

SEQ ID NO: 13698 - DNA, 15 bp, Homo sapiens
gtggcgtgatctcag

SEQ ID NO: 13699 - DNA, 15 bp, Homo sapiens
agtggcgtgatctca

SEQ ID NO: 13700 - DNA, 15 bp, Homo sapiens
cagtggcgtgatctc

SEQ ID NO: 13701 - DNA, 15 bp, Homo sapiens
gcagtggcgtgatct

SEQ ID NO: 13702 - DNA, 15 bp, Homo sapiens
tgcagtggcgtgatc

SEQ ID NO: 13703 - DNA, 15 bp, Homo sapiens
gtgcagtggcgtgat

SEQ ID NO: 13704 - DNA, 15 bp, Homo sapiens
agtgcagtggcgtga

SEQ ID NO: 13705 - DNA, 15 bp, Homo sapiens
gagtgcagtggcgtg

SEQ ID NO: 13706 - DNA, 15 bp, Homo sapiens
ggagtgcagtggcgt

SEQ ID NO: 13707 - DNA, 15 bp, Homo sapiens
tggagtgcagtggcg

SEQ ID NO: 13708 - DNA, 15 bp, Homo sapiens
ctggagtgcagtggc

SEQ ID NO: 13709 - DNA, 15 bp, Homo sapiens
acccaggctggagtg

SEQ ID NO: 13710 - DNA, 15 bp, Homo sapiens
tgctctgtcacccag

SEQ ID NO: 13711 - DNA, 15 bp, Homo sapiens
ttgctctgtcaccca

SEQ ID NO: 13712 - DNA, 15 bp, Homo sapiens
cttgctctgtcaccc

SEQ ID NO: 13713 - DNA, 15 bp, Homo sapiens
tcttgctctgtcacc

SEQ ID NO: 13714 - DNA, 15 bp, Homo sapiens
gtcttgctctgtcac

SEQ ID NO: 13715 - DNA, 15 bp, Homo sapiens
agtcttgctctgtca

SEQ ID NO: 13716 - DNA, 15 bp, Homo sapiens
ggagtcttgctctgt

SEQ ID NO: 13717 - DNA, 15 bp, Homo sapiens
tggagtcttgctctg

SEQ ID NO: 13718 - DNA, 15 bp, Homo sapiens
ttggagtcttgctct

SEQ ID NO: 13719 - DNA, 15 bp, Homo sapiens
tttggagtcttgctc

SEQ ID NO: 13720 - DNA, 15 bp, Homo sapiens
atttggagtcttgct

SEQ ID NO: 13721 - DNA, 15 bp, Homo sapiens
catttggagtcttgc

SEQ ID NO: 13722 - DNA, 15 bp, Homo sapiens
tcatttggagtcttg

SEQ ID NO: 13723 - DNA, 15 bp, Homo sapiens
ttcatttggagtctt

SEQ ID NO: 13724 - DNA, 15 bp, Homo sapiens
attcatttggagtct

SEQ ID NO: 13725 - DNA, 15 bp, Homo sapiens
cattcatttggagtc

SEQ ID NO: 13726 - DNA, 15 bp, Homo sapiens
tcattcatttggagt

SEQ ID NO: 13727 - DNA, 15 bp, Homo sapiens
ttcattcatttggag

SEQ ID NO: 13728 - DNA, 15 bp, Homo sapiens
attcattcatttgga

SEQ ID NO: 13729 - DNA, 15 bp, Homo sapiens
cattcattcatttgg

SEQ ID NO: 13730 - DNA, 15 bp, Homo sapiens
tcattcattcatttg

SEQ ID NO: 13731 - DNA, 15 bp, Homo sapiens
ttcattcattcattt

SEQ ID NO: 13732 - DNA, 15 bp, Homo sapiens
attcattcattcatt

SEQ ID NO: 13733 - DNA, 15 bp, Homo sapiens
aattcattcattcat

SEQ ID NO: 13734 - DNA, 15 bp, Homo sapiens
taattcattcattca

SEQ ID NO: 13735 - DNA, 15 bp, Homo sapiens
ttaattcattcattc

SEQ ID NO: 13736 - DNA, 15 bp, Homo sapiens
attaattcattcatt

SEQ ID NO: 13737 - DNA, 15 bp, Homo sapiens
cattaattcattcat

SEQ ID NO: 13738 - DNA, 15 bp, Homo sapiens
tcattaattcattca

SEQ ID NO: 13739 - DNA, 15 bp, Homo sapiens
ttcattaattcattc

SEQ ID NO: 13740 - DNA, 15 bp, Homo sapiens
attcattaattcatt

SEQ ID NO: 13741 - DNA, 15 bp, Homo sapiens
cattcattaattcat

SEQ ID NO: 13742 - DNA, 15 bp, Homo sapiens
tcattcattaattca

SEQ ID NO: 13743 - DNA, 15 bp, Homo sapiens
atcattcattaattc

SEQ ID NO: 13744 - DNA, 15 bp, Homo sapiens
catcattcattaatt

SEQ ID NO: 13745 - DNA, 15 bp, Homo sapiens
tcatcattcattaat

SEQ ID NO: 13746 - DNA, 15 bp, Homo sapiens
ttcatcattcattaa

SEQ ID NO: 13747 - DNA, 15 bp, Homo sapiens
cttcatcattcatta

SEQ ID NO: 13748 - DNA, 15 bp, Homo sapiens
ccttcatcattcatt

SEQ ID NO: 13749 - DNA, 15 bp, Homo sapiens
gccttcatcattcat

SEQ ID NO: 13750 - DNA, 15 bp, Homo sapiens
tgccttcatcattca

SEQ ID NO: 13751 - DNA, 15 bp, Homo sapiens
ctgccttcatcattc

SEQ ID NO: 13752 - DNA, 15 bp, Homo sapiens
cctgccttcatcatt

SEQ ID NO: 13753 - DNA, 15 bp, Homo sapiens
acctgccttcatcat

SEQ ID NO: 13754 - DNA, 15 bp, Homo sapiens
tacctgccttcatca

SEQ ID NO: 13755 - DNA, 15 bp, Homo sapiens
ctacctgccttcatc

SEQ ID NO: 13756 - DNA, 15 bp, Homo sapiens
gctacctgccttcat

SEQ ID NO: 13757 - DNA, 15 bp, Homo sapiens
ggctacctgccttca

SEQ ID NO: 13758 - DNA, 15 bp, Homo sapiens
tggctacctgccttc

SEQ ID NO: 13759 - DNA, 15 bp, Homo sapiens
ttggctacctgcctt

SEQ ID NO: 13760 - DNA, 15 bp, Homo sapiens
attggctacctgcct

SEQ ID NO: 13761 - DNA, 15 bp, Homo sapiens
gattggctacctgcc

SEQ ID NO: 13762 - DNA, 15 bp, Homo sapiens
agattggctacctgc

SEQ ID NO: 13763 - DNA, 15 bp, Homo sapiens
cagattggctacctg

SEQ ID NO: 13764 - DNA, 15 bp, Homo sapiens
ccagattggctacct

SEQ ID NO: 13765 - DNA, 15 bp, Homo sapiens
tccagattggctacc

SEQ ID NO: 13766 - DNA, 15 bp, Homo sapiens
atccagattggctac

SEQ ID NO: 13767 - DNA, 15 bp, Homo sapiens
aatccagattggcta

SEQ ID NO: 13768 - DNA, 15 bp, Homo sapiens
caatccagattggct

SEQ ID NO: 13769 - DNA, 15 bp, Homo sapiens
gcaatccagattggc

SEQ ID NO: 13770 - DNA, 15 bp, Homo sapiens
agcaatccagattgg

SEQ ID NO: 13771 - DNA, 15 bp, Homo sapiens
gagcaatccagattg

SEQ ID NO: 13772 - DNA, 15 bp, Homo sapiens
ggagcaatccagatt

SEQ ID NO: 13773 - DNA, 15 bp, Homo sapiens
tggagcaatccagat

SEQ ID NO: 13774 - DNA, 15 bp, Homo sapiens
ctggagcaatccaga

SEQ ID NO: 13775 - DNA, 15 bp, Homo sapiens
actggagcaatccag

SEQ ID NO: 13776 - DNA, 15 bp, Homo sapiens
aactggagcaatcca

SEQ ID NO: 13777 - DNA, 15 bp, Homo sapiens
caactggagcaatcc

SEQ ID NO: 13778 - DNA, 15 bp, Homo sapiens
gcaactggagcaatc

SEQ ID NO: 13779 - DNA, 15 bp, Homo sapiens
ggcaactggagcaat

SEQ ID NO: 13780 - DNA, 15 bp, Homo sapiens
tggcaactggagcaa

SEQ ID NO: 13781 - DNA, 15 bp, Homo sapiens
ctggcaactggagca

SEQ ID NO: 13782 - DNA, 15 bp, Homo sapiens
cctggcaactggagc

SEQ ID NO: 13783 - DNA, 15 bp, Homo sapiens
tcctggcaactggag

SEQ ID NO: 13784 - DNA, 15 bp, Homo sapiens
ttcctggcaactgga

SEQ ID NO: 13785 - DNA, 15 bp, Homo sapiens
attcctggcaactgg

SEQ ID NO: 13786 - DNA, 15 bp, Homo sapiens
gattcctggcaactg

SEQ ID NO: 13787 - DNA, 15 bp, Homo sapiens
agattcctggcaact

SEQ ID NO: 13788 - DNA, 15 bp, Homo sapiens
gagattcctggcaac

SEQ ID NO: 13789 - DNA, 15 bp, Homo sapiens
tgagattcctggcaa

SEQ ID NO: 13790 - DNA, 15 bp, Homo sapiens
ttgagattcctggca

SEQ ID NO: 13791 - DNA, 15 bp, Homo sapiens
cttgagattcctggc

SEQ ID NO: 13792 - DNA, 15 bp, Homo sapiens
gcttgagattcctgg

SEQ ID NO: 13793 - DNA, 15 bp, Homo sapiens
tgcttgagattcctg

SEQ ID NO: 13794 - DNA, 15 bp, Homo sapiens
gtgcttgagattcct

SEQ ID NO: 13795 - DNA, 15 bp, Homo sapiens
tgtgcttgagattcc

SEQ ID NO: 13796 - DNA, 15 bp, Homo sapiens
atgtgcttgagattc

SEQ ID NO: 13797 - DNA, 15 bp, Homo sapiens
aatgtgcttgagatt

SEQ ID NO: 13798 - DNA, 15 bp, Homo sapiens
taatgtgcttgagat

SEQ ID NO: 13799 - DNA, 15 bp, Homo sapiens
ataatgtgcttgaga

SEQ ID NO: 13800 - DNA, 15 bp, Homo sapiens
aataatgtgcttgag

SEQ ID NO: 13801 - DNA, 15 bp, Homo sapiens
gaataatgtgcttga

SEQ ID NO: 13802 - DNA, 15 bp, Homo sapiens
tgaataatgtgcttg

SEQ ID NO: 13803 - DNA, 15 bp, Homo sapiens
ctgaataatgtgctt

SEQ ID NO: 13804 - DNA, 15 bp, Homo sapiens
actgaataatgtgct

SEQ ID NO: 13805 - DNA, 15 bp, Homo sapiens
gactgaataatgtgc

SEQ ID NO: 13806 - DNA, 15 bp, Homo sapiens
agactgaataatgtg

SEQ ID NO: 13807 - DNA, 15 bp, Homo sapiens
tagactgaataatgt

SEQ ID NO: 13808 - DNA, 15 bp, Homo sapiens
ttagactgaataatg

SEQ ID NO: 13809 - DNA, 15 bp, Homo sapiens
gttagactgaataat

SEQ ID NO: 13810 - DNA, 15 bp, Homo sapiens
agttagactgaataa

SEQ ID NO: 13811 - DNA, 15 bp, Homo sapiens
tagttagactgaata

SEQ ID NO: 13812 - DNA, 15 bp, Homo sapiens
gtagttagactgaat

SEQ ID NO: 13813 - DNA, 15 bp, Homo sapiens
agtagttagactgaa

SEQ ID NO: 13814 - DNA, 15 bp, Homo sapiens
cagtagttagactga

SEQ ID NO: 13815 - DNA, 15 bp, Homo sapiens
gcagtagttagactg

SEQ ID NO: 13816 - DNA, 15 bp, Homo sapiens
ggcagtagttagact

SEQ ID NO: 13817 - DNA, 15 bp, Homo sapiens
gggcagtagttagac

SEQ ID NO: 13818 - DNA, 15 bp, Homo sapiens
agggcagtagttaga

SEQ ID NO: 13819 - DNA, 15 bp, Homo sapiens
cagggcagtagttag

SEQ ID NO: 13820 - DNA, 15 bp, Homo sapiens
tcagggcagtagtta

SEQ ID NO: 13821 - DNA, 15 bp, Homo sapiens
ctcagggcagtagtt

SEQ ID NO: 13822 - DNA, 15 bp, Homo sapiens
tctcagggcagtagt

SEQ ID NO: 13823 - DNA, 15 bp, Homo sapiens
ctctcagggcagtag

SEQ ID NO: 13824 - DNA, 15 bp, Homo sapiens
cctctcagggcagta

SEQ ID NO: 13825 - DNA, 15 bp, Homo sapiens
tcctctcagggcagt

SEQ ID NO: 13826 - DNA, 15 bp, Homo sapiens
ctcctctcagggcag

SEQ ID NO: 13827 - DNA, 15 bp, Homo sapiens
tctcctctcagggca

SEQ ID NO: 13828 - DNA, 15 bp, Homo sapiens
ctctcctctcagggc

SEQ ID NO: 13829 - DNA, 15 bp, Homo sapiens
gctctcctctcaggg

SEQ ID NO: 13830 - DNA, 15 bp, Homo sapiens
tgctctcctctcagg

SEQ ID NO: 13831 - DNA, 15 bp, Homo sapiens
gtgctctcctctcag

SEQ ID NO: 13832 - DNA, 15 bp, Homo sapiens
agtgctctcctctca

SEQ ID NO: 13833 - DNA, 15 bp, Homo sapiens
tagtgctctcctctc

SEQ ID NO: 13834 - DNA, 15 bp, Homo sapiens
atagtgctctcctct

SEQ ID NO: 13835 - DNA, 15 bp, Homo sapiens
aatagtgctctcctc

SEQ ID NO: 13836 - DNA, 15 bp, Homo sapiens
taatagtgctctcct

SEQ ID NO: 13837 - DNA, 15 bp, Homo sapiens
gtaatagtgctctcc

SEQ ID NO: 13838 - DNA, 15 bp, Homo sapiens
agtaatagtgctctc

SEQ ID NO: 13839 - DNA, 15 bp, Homo sapiens
tagtaatagtgctct

SEQ ID NO: 13840 - DNA, 15 bp, Homo sapiens
gtagtaatagtgctc

SEQ ID NO: 13841 - DNA, 15 bp, Homo sapiens
ggtagtaatagtgct

SEQ ID NO: 13842 - DNA, 15 bp, Homo sapiens
gggtagtaatagtgc

SEQ ID NO: 13843 - DNA, 15 bp, Homo sapiens
ggggtagtaatagtg

SEQ ID NO: 13844 - DNA, 15 bp, Homo sapiens
tggggtagtaatagt

SEQ ID NO: 13845 - DNA, 15 bp, Homo sapiens
ttggggtagtaatag

SEQ ID NO: 13846 - DNA, 15 bp, Homo sapiens
tttggggtagtaata

SEQ ID NO: 13847 - DNA, 15 bp, Homo sapiens
atttggggtagtaat

SEQ ID NO: 13848 - DNA, 15 bp, Homo sapiens
aatttggggtagtaa

SEQ ID NO: 13849 - DNA, 15 bp, Homo sapiens
aaatttggggtagta

SEQ ID NO: 13850 - DNA, 15 bp, Homo sapiens
aaaatttggggtagt

SEQ ID NO: 13851 - DNA, 15 bp, Homo sapiens
taaaatttggggtag

SEQ ID NO: 13852 - DNA, 15 bp, Homo sapiens
ctaaaatttggggta

SEQ ID NO: 13853 - DNA, 15 bp, Homo sapiens
gctaaaatttggggt

SEQ ID NO: 13854 - DNA, 15 bp, Homo sapiens
tgctaaaatttgggg

SEQ ID NO: 13855 - DNA, 15 bp, Homo sapiens
gtgctaaaatttggg

SEQ ID NO: 13856 - DNA, 15 bp, Homo sapiens
tgtgctaaaatttgg

SEQ ID NO: 13857 - DNA, 15 bp, Homo sapiens
ctgtgctaaaatttg

SEQ ID NO: 13858 - DNA, 15 bp, Homo sapiens
cctgtgctaaaattt

SEQ ID NO: 13859 - DNA, 15 bp, Homo sapiens
tcctgtgctaaaatt

SEQ ID NO: 13860 - DNA, 15 bp, Homo sapiens
ttcctgtgctaaaat

SEQ ID NO: 13861 - DNA, 15 bp, Homo sapiens
tttcctgtgctaaaa

SEQ ID NO: 13862 - DNA, 15 bp, Homo sapiens
gtttcctgtgctaaa

SEQ ID NO: 13863 - DNA, 15 bp, Homo sapiens
ggtttcctgtgctaa

SEQ ID NO: 13864 - DNA, 15 bp, Homo sapiens
tggtttcctgtgcta

SEQ ID NO: 13865 - DNA, 15 bp, Homo sapiens
ttggtttcctgtgct

SEQ ID NO: 13866 - DNA, 15 bp, Homo sapiens
cttggtttcctgtgc

SEQ ID NO: 13867 - DNA, 15 bp, Homo sapiens
ccttggtttcctgtg

SEQ ID NO: 13868 - DNA, 15 bp, Homo sapiens
gccttggtttcctgt

SEQ ID NO: 13869 - DNA, 15 bp, Homo sapiens
agccttggtttcctg

SEQ ID NO: 13870 - DNA, 15 bp, Homo sapiens
gagccttggtttcct

SEQ ID NO: 13871 - DNA, 15 bp, Homo sapiens
agagccttggtttcc

SEQ ID NO: 13872 - DNA, 15 bp, Homo sapiens
cagagccttggtttc

SEQ ID NO: 13873 - DNA, 15 bp, Homo sapiens
tcagagccttggttt

SEQ ID NO: 13874 - DNA, 15 bp, Homo sapiens
ctcagagccttggtt

SEQ ID NO: 13875 - DNA, 15 bp, Homo sapiens
cctcagagccttggt

SEQ ID NO: 13876 - DNA, 15 bp, Homo sapiens
tcctcagagccttgg

SEQ ID NO: 13877 - DNA, 15 bp, Homo sapiens
ctcctcagagccttg

SEQ ID NO: 13878 - DNA, 15 bp, Homo sapiens
cctcctcagagcctt

SEQ ID NO: 13879 - DNA, 15 bp, Homo sapiens
ccctcctcagagcct

SEQ ID NO: 13880 - DNA, 15 bp, Homo sapiens
tccctcctcagagcc

SEQ ID NO: 13881 - DNA, 15 bp, Homo sapiens
atccctcctcagagc

SEQ ID NO: 13882 - DNA, 15 bp, Homo sapiens
tatccctcctcagag

SEQ ID NO: 13883 - DNA, 15 bp, Homo sapiens
gtatccctcctcaga

SEQ ID NO: 13884 - DNA, 15 bp, Homo sapiens
agtatccctcctcag

SEQ ID NO: 13885 - DNA, 15 bp, Homo sapiens
cagtatccctcctca

SEQ ID NO: 13886 - DNA, 15 bp, Homo sapiens
tcagtatccctcctc

SEQ ID NO: 13887 - DNA, 15 bp, Homo sapiens
gtcagtatccctcct

SEQ ID NO: 13888 - DNA, 15 bp, Homo sapiens
agtcagtatccctcc

SEQ ID NO: 13889 - DNA, 15 bp, Homo sapiens
aagtcagtatccctc

SEQ ID NO: 13890 - DNA, 15 bp, Homo sapiens
caagtcagtatccct

SEQ ID NO: 13891 - DNA, 15 bp, Homo sapiens
acaagtcagtatccc

SEQ ID NO: 13892 - DNA, 15 bp, Homo sapiens
gacaagtcagtatcc

SEQ ID NO: 13893 - DNA, 15 bp, Homo sapiens
ggacaagtcagtatc

SEQ ID NO: 13894 - DNA, 15 bp, Homo sapiens
gggacaagtcagtat

SEQ ID NO: 13895 - DNA, 15 bp, Homo sapiens
tgggacaagtcagta

SEQ ID NO: 13896 - DNA, 15 bp, Homo sapiens
ctgggacaagtcagt

SEQ ID NO: 13897 - DNA, 15 bp, Homo sapiens
cctgggacaagtcag

SEQ ID NO: 13898 - DNA, 15 bp, Homo sapiens
acctgggacaagtca

SEQ ID NO: 13899 - DNA, 15 bp, Homo sapiens
aacctgggacaagtc

SEQ ID NO: 13900 - DNA, 15 bp, Homo sapiens
gaacctgggacaagt

SEQ ID NO: 13901 - DNA, 15 bp, Homo sapiens
agaacctgggacaag

SEQ ID NO: 13902 - DNA, 15 bp, Homo sapiens
gagaacctgggacaa

SEQ ID NO: 13903 - DNA, 15 bp, Homo sapiens
ggagaacctgggaca

SEQ ID NO: 13904 - DNA, 15 bp, Homo sapiens
aggagaacctgggac

SEQ ID NO: 13905 - DNA, 15 bp, Homo sapiens
aaggagaacctggga

SEQ ID NO: 13906 - DNA, 15 bp, Homo sapiens
aaaggagaacctggg

SEQ ID NO: 13907 - DNA, 15 bp, Homo sapiens
aaaaggagaacctgg

SEQ ID NO: 13908 - DNA, 15 bp, Homo sapiens
aaaaaggagaacctg

SEQ ID NO: 13909 - DNA, 15 bp, Homo sapiens
aaaaaaggagaacct

SEQ ID NO: 13910 - DNA, 15 bp, Homo sapiens
gaaaaaaggagaacc

SEQ ID NO: 13911 - DNA, 15 bp, Homo sapiens
agaaaaaaggagaac

SEQ ID NO: 13912 - DNA, 15 bp, Homo sapiens
cagaaaaaaggagaa

SEQ ID NO: 13913 - DNA, 15 bp, Homo sapiens
tcagaaaaaaggaga

SEQ ID NO: 13914 - DNA, 15 bp, Homo sapiens
gtcagaaaaaaggag

SEQ ID NO: 13915 - DNA, 15 bp, Homo sapiens
agtcagaaaaaagga

SEQ ID NO: 13916 - DNA, 15 bp, Homo sapiens
gagtcagaaaaaagg

SEQ ID NO: 13917 - DNA, 15 bp, Homo sapiens
ggagtcagaaaaaag

SEQ ID NO: 13918 - DNA, 15 bp, Homo sapiens
tggagtcagaaaaaa

SEQ ID NO: 13919 - DNA, 15 bp, Homo sapiens
ctggagtcagaaaaa

SEQ ID NO: 13920 - DNA, 15 bp, Homo sapiens
actggagtcagaaaa

SEQ ID NO: 13921 - DNA, 15 bp, Homo sapiens
cactggagtcagaaa

SEQ ID NO: 13922 - DNA, 15 bp, Homo sapiens
acactggagtcagaa

SEQ ID NO: 13923 - DNA, 15 bp, Homo sapiens
aacactggagtcaga

SEQ ID NO: 13924 - DNA, 15 bp, Homo sapiens
gaacactggagtcag

SEQ ID NO: 13925 - DNA, 15 bp, Homo sapiens
agaacactggagtca

SEQ ID NO: 13926 - DNA, 15 bp, Homo sapiens
aagaacactggagtc

SEQ ID NO: 13927 - DNA, 15 bp, Homo sapiens
aaagaacactggagt

SEQ ID NO: 13928 - DNA, 15 bp, Homo sapiens
gaaagaacactggag

SEQ ID NO: 13929 - DNA, 15 bp, Homo sapiens
tgaaagaacactgga

SEQ ID NO: 13930 - DNA, 15 bp, Homo sapiens
ctgaaagaacactgg

SEQ ID NO: 13931 - DNA, 15 bp, Homo sapiens
cctgaaagaacactg

SEQ ID NO: 13932 - DNA, 15 bp, Homo sapiens
acctgaaagaacact

SEQ ID NO: 13933 - DNA, 15 bp, Homo sapiens
cacctgaaagaacac

SEQ ID NO: 13934 - DNA, 15 bp, Homo sapiens
ccacctgaaagaaca

SEQ ID NO: 13935 - DNA, 15 bp, Homo sapiens
cccacctgaaagaac

SEQ ID NO: 13936 - DNA, 15 bp, Homo sapiens
ccccacctgaaagaa

SEQ ID NO: 13937 - DNA, 15 bp, Homo sapiens
tccccacctgaaaga

SEQ ID NO: 13938 - DNA, 15 bp, Homo sapiens
ctccccacctgaaag

SEQ ID NO: 13939 - DNA, 15 bp, Homo sapiens
gctccccacctgaaa

SEQ ID NO: 13940 - DNA, 15 bp, Homo sapiens
agctccccacctgaa

SEQ ID NO: 13941 - DNA, 15 bp, Homo sapiens
tagctccccacctga

SEQ ID NO: 13942 - DNA, 15 bp, Homo sapiens
ctagctccccacctg

SEQ ID NO: 13943 - DNA, 15 bp, Homo sapiens
cctagctccccacct

SEQ ID NO: 13944 - DNA, 15 bp, Homo sapiens
acctagctccccacc

SEQ ID NO: 13945 - DNA, 15 bp, Homo sapiens
tacctagctccccac

SEQ ID NO: 13946 - DNA, 15 bp, Homo sapiens
ttacctagctcccca

SEQ ID NO: 13947 - DNA, 15 bp, Homo sapiens
cttacctagctcccc

SEQ ID NO: 13948 - DNA, 15 bp, Homo sapiens
gcttacctagctccc

SEQ ID NO: 13949 - DNA, 15 bp, Homo sapiens
tgcttacctagctcc

SEQ ID NO: 13950 - DNA, 15 bp, Homo sapiens
gtgcttacctagctc

SEQ ID NO: 13951 - DNA, 15 bp, Homo sapiens
tgtgcttacctagct

SEQ ID NO: 13952 - DNA, 15 bp, Homo sapiens
gtgtgcttacctagc

SEQ ID NO: 13953 - DNA, 15 bp, Homo sapiens
tgtgtgcttacctag

SEQ ID NO: 13954 - DNA, 15 bp, Homo sapiens
gtgtgtgcttaccta

SEQ ID NO: 13955 - DNA, 15 bp, Homo sapiens
tgtgtgtgcttacct

SEQ ID NO: 13956 - DNA, 15 bp, Homo sapiens
ctgtgtgtgcttacc

SEQ ID NO: 13957 - DNA, 15 bp, Homo sapiens
tctgtgtgtgcttac

SEQ ID NO: 13958 - DNA, 15 bp, Homo sapiens
ctctgtgtgtgctta

SEQ ID NO: 13959 - DNA, 15 bp, Homo sapiens
cctctgtgtgtgctt

SEQ ID NO: 13960 - DNA, 15 bp, Homo sapiens
ccctctgtgtgtgct

SEQ ID NO: 13961 - DNA, 15 bp, Homo sapiens
cccctctgtgtgtgc

SEQ ID NO: 13962 - DNA, 15 bp, Homo sapiens
tcccctctgtgtgtg

SEQ ID NO: 13963 - DNA, 15 bp, Homo sapiens
ttcccctctgtgtgt

SEQ ID NO: 13964 - DNA, 15 bp, Homo sapiens
tttcccctctgtgtg

SEQ ID NO: 13965 - DNA, 15 bp, Homo sapiens
gtttcccctctgtgt

SEQ ID NO: 13966 - DNA, 15 bp, Homo sapiens
tgtttcccctctgtg

SEQ ID NO: 13967 - DNA, 15 bp, Homo sapiens
ttgtttcccctctgt

SEQ ID NO: 13968 - DNA, 15 bp, Homo sapiens
attgtttcccctctg

SEQ ID NO: 13969 - DNA, 15 bp, Homo sapiens
cattgtttcccctct

SEQ ID NO: 13970 - DNA, 15 bp, Homo sapiens
ccattgtttcccctc

SEQ ID NO: 13971 - DNA, 15 bp, Homo sapiens
tccattgtttcccct

SEQ ID NO: 13972 - DNA, 15 bp, Homo sapiens
ttccattgtttcccc

SEQ ID NO: 13973 - DNA, 15 bp, Homo sapiens
cttccattgtttccc

SEQ ID NO: 13974 - DNA, 15 bp, Homo sapiens
ccttccattgtttcc

SEQ ID NO: 13975 - DNA, 15 bp, Homo sapiens
cccttccattgtttc

SEQ ID NO: 13976 - DNA, 15 bp, Homo sapiens
tcccttccattgttt

SEQ ID NO: 13977 - DNA, 15 bp, Homo sapiens
ctcccttccattgtt

SEQ ID NO: 13978 - DNA, 15 bp, Homo sapiens
cctcccttccattgt

SEQ ID NO: 13979 - DNA, 15 bp, Homo sapiens
ccctcccttccattg

SEQ ID NO: 13980 - DNA, 15 bp, Homo sapiens
tccctcccttccatt

SEQ ID NO: 13981 - DNA, 15 bp, Homo sapiens
gtccctcccttccat

SEQ ID NO: 13982 - DNA, 15 bp, Homo sapiens
tgtccctcccttcca

SEQ ID NO: 13983 - DNA, 15 bp, Homo sapiens
ttgtccctcccttcc

SEQ ID NO: 13984 - DNA, 15 bp, Homo sapiens
tttgtccctcccttc

SEQ ID NO: 13985 - DNA, 15 bp, Homo sapiens
ctttgtccctccctt

SEQ ID NO: 13986 - DNA, 15 bp, Homo sapiens
actttgtccctccct

SEQ ID NO: 13987 - DNA, 15 bp, Homo sapiens
cactttgtccctccc

SEQ ID NO: 13988 - DNA, 15 bp, Homo sapiens
ccactttgtccctcc

SEQ ID NO: 13989 - DNA, 15 bp, Homo sapiens
cccactttgtccctc

SEQ ID NO: 13990 - DNA, 15 bp, Homo sapiens
ccccactttgtccct

SEQ ID NO: 13991 - DNA, 15 bp, Homo sapiens
tccccactttgtccc

SEQ ID NO: 13992 - DNA, 15 bp, Homo sapiens
ttccccactttgtcc

SEQ ID NO: 13993 - DNA, 15 bp, Homo sapiens
cttccccactttgtc

SEQ ID NO: 13994 - DNA, 15 bp, Homo sapiens
ccttccccactttgt

SEQ ID NO: 13995 - DNA, 15 bp, Homo sapiens
tccttccccactttg

SEQ ID NO: 13996 - DNA, 15 bp, Homo sapiens
ctccttccccacttt

SEQ ID NO: 13997 - DNA, 15 bp, Homo sapiens
tctccttccccactt

SEQ ID NO: 13998 - DNA, 15 bp, Homo sapiens
ctctccttccccact

SEQ ID NO: 13999 - DNA, 15 bp, Homo sapiens
gctctccttccccac

SEQ ID NO: 14000 - DNA, 15 bp, Homo sapiens
tgctctccttcccca

SEQ ID NO: 14001 - DNA, 15 bp, Homo sapiens
ctgctctccttcccc

SEQ ID NO: 14002 - DNA, 15 bp, Homo sapiens
tctgctctccttccc

SEQ ID NO: 14003 - DNA, 15 bp, Homo sapiens
ctctgctctccttcc

SEQ ID NO: 14004 - DNA, 15 bp, Homo sapiens
cctctgctctccttc

SEQ ID NO: 14005 - DNA, 15 bp, Homo sapiens
tcctctgctctcctt

SEQ ID NO: 14006 - DNA, 15 bp, Homo sapiens
gtcctctgctctcct

SEQ ID NO: 14007 - DNA, 15 bp, Homo sapiens
ggtcctctgctctcc

SEQ ID NO: 14008 - DNA, 15 bp, Homo sapiens
tggtcctctgctctc

SEQ ID NO: 14009 - DNA, 15 bp, Homo sapiens
ctggtcctctgctct

SEQ ID NO: 14010 - DNA, 15 bp, Homo sapiens
gctggtcctctgctc

SEQ ID NO: 14011 - DNA, 15 bp, Homo sapiens
cgctggtcctctgct

SEQ ID NO: 14012 - DNA, 15 bp, Homo sapiens
ccgctggtcctctgc

SEQ ID NO: 14013 - DNA, 15 bp, Homo sapiens
cccgctggtcctctg

SEQ ID NO: 14014 - DNA, 15 bp, Homo sapiens
tcccgctggtcctct

SEQ ID NO: 14015 - DNA, 15 bp, Homo sapiens
ctcccgctggtcctc

SEQ ID NO: 14016 - DNA, 15 bp, Homo sapiens
actcccgctggtcct

SEQ ID NO: 14017 - DNA, 15 bp, Homo sapiens
cactcccgctggtcc

SEQ ID NO: 14018 - DNA, 15 bp, Homo sapiens
acactcccgctggtc

SEQ ID NO: 14019 - DNA, 15 bp, Homo sapiens
gacactcccgctggt

SEQ ID NO: 14020 - DNA, 15 bp, Homo sapiens
tgacactcccgctgg

SEQ ID NO: 14021 - DNA, 15 bp, Homo sapiens
ctgacactcccgctg

SEQ ID NO: 14022 - DNA, 15 bp, Homo sapiens
actgacactcccgct

SEQ ID NO: 14023 - DNA, 15 bp, Homo sapiens
cactgacactcccgc

SEQ ID NO: 14024 - DNA, 15 bp, Homo sapiens
tcactgacactcccg

SEQ ID NO: 14025 - DNA, 15 bp, Homo sapiens
ctcactgacactccc

SEQ ID NO: 14026 - DNA, 15 bp, Homo sapiens
gctcactgacactcc

SEQ ID NO: 14027 - DNA, 15 bp, Homo sapiens
tgctcactgacactc

SEQ ID NO: 14028 - DNA, 15 bp, Homo sapiens
ctgctcactgacact

SEQ ID NO: 14029 - DNA, 15 bp, Homo sapiens
gctgctcactgacac

SEQ ID NO: 14030 - DNA, 15 bp, Homo sapiens
tgctgctcactgaca

SEQ ID NO: 14031 - DNA, 15 bp, Homo sapiens
ctgctgctcactgac

SEQ ID NO: 14032 - DNA, 15 bp, Homo sapiens
gctgctgctcactga

SEQ ID NO: 14033 - DNA, 15 bp, Homo sapiens
ggctgctgctcactg

SEQ ID NO: 14034 - DNA, 15 bp, Homo sapiens
gggctgctgctcact

SEQ ID NO: 14035 - DNA, 15 bp, Homo sapiens
tgggctgctgctcac

SEQ ID NO: 14036 - DNA, 15 bp, Homo sapiens
ctgggctgctgctca

SEQ ID NO: 14037 - DNA, 15 bp, Homo sapiens
tctgggctgctgctc

SEQ ID NO: 14038 - DNA, 15 bp, Homo sapiens
gtctgggctgctgct

SEQ ID NO: 14039 - DNA, 15 bp, Homo sapiens
tgtctgggctgctgc

SEQ ID NO: 14040 - DNA, 15 bp, Homo sapiens
ctgtctgggctgctg

SEQ ID NO: 14041 - DNA, 15 bp, Homo sapiens
gctgtctgggctgct

SEQ ID NO: 14042 - DNA, 15 bp, Homo sapiens
tgctgtctgggctgc

SEQ ID NO: 14043 - DNA, 15 bp, Homo sapiens
ctgctgtctgggctg

SEQ ID NO: 14044 - DNA, 15 bp, Homo sapiens
cctgctgtctgggct

SEQ ID NO: 14045 - DNA, 15 bp, Homo sapiens
ccctgctgtctgggc

SEQ ID NO: 14046 - DNA, 15 bp, Homo sapiens
tccctgctgtctggg

SEQ ID NO: 14047 - DNA, 15 bp, Homo sapiens
ctccctgctgtctgg

SEQ ID NO: 14048 - DNA, 15 bp, Homo sapiens
gctccctgctgtctg

SEQ ID NO: 14049 - DNA, 15 bp, Homo sapiens
ggctccctgctgtct

SEQ ID NO: 14050 - DNA, 15 bp, Homo sapiens
tggctccctgctgtc

SEQ ID NO: 14051 - DNA, 15 bp, Homo sapiens
ctggctccctgctgt

SEQ ID NO: 14052 - DNA, 15 bp, Homo sapiens
cctggctccctgctg

SEQ ID NO: 14053 - DNA, 15 bp, Homo sapiens
gcctggctccctgct

SEQ ID NO: 14054 - DNA, 15 bp, Homo sapiens
tgcctggctccctgc

SEQ ID NO: 14055 - DNA, 15 bp, Homo sapiens
atgcctggctccctg

SEQ ID NO: 14056 - DNA, 15 bp, Homo sapiens
gatgcctggctccct

SEQ ID NO: 14057 - DNA, 15 bp, Homo sapiens
agatgcctggctccc

SEQ ID NO: 14058 - DNA, 15 bp, Homo sapiens
cagatgcctggctcc

SEQ ID NO: 14059 - DNA, 15 bp, Homo sapiens
ccagatgcctggctc

SEQ ID NO: 14060 - DNA, 15 bp, Homo sapiens
gccagatgcctggct

SEQ ID NO: 14061 - DNA, 15 bp, Homo sapiens
agccagatgcctggc

SEQ ID NO: 14062 - DNA, 15 bp, Homo sapiens
cagccagatgcctgg

SEQ ID NO: 14063 - DNA, 15 bp, Homo sapiens
acagccagatgcctg

SEQ ID NO: 14064 - DNA, 15 bp, Homo sapiens
tacagccagatgcct

SEQ ID NO: 14065 - DNA, 15 bp, Homo sapiens
gtacagccagatgcc

SEQ ID NO: 14066 - DNA, 15 bp, Homo sapiens
ggtacagccagatgc

SEQ ID NO: 14067 - DNA, 15 bp, Homo sapiens
aggtacagccagatg

SEQ ID NO: 14068 - DNA, 15 bp, Homo sapiens
caggtacagccagat

SEQ ID NO: 14069 - DNA, 15 bp, Homo sapiens
ccaggtacagccaga

SEQ ID NO: 14070 - DNA, 15 bp, Homo sapiens
cccaggtacagccag

SEQ ID NO: 14071 - DNA, 15 bp, Homo sapiens
ccccaggtacagcca

SEQ ID NO: 14072 - DNA, 15 bp, Homo sapiens
accccaggtacagcc

SEQ ID NO: 14073 - DNA, 15 bp, Homo sapiens
caccccaggtacagc

SEQ ID NO: 14074 - DNA, 15 bp, Homo sapiens
ccaccccaggtacag

SEQ ID NO: 14075 - DNA, 15 bp, Homo sapiens
cccaccccaggtaca

SEQ ID NO: 14076 - DNA, 15 bp, Homo sapiens
tcccaccccaggtac

SEQ ID NO: 14077 - DNA, 15 bp, Homo sapiens
ctcccaccccaggta

SEQ ID NO: 14078 - DNA, 15 bp, Homo sapiens
cctcccaccccaggt

SEQ ID NO: 14079 - DNA, 15 bp, Homo sapiens
gcctcccaccccagg

SEQ ID NO: 14080 - DNA, 15 bp, Homo sapiens
cgcctcccaccccag

SEQ ID NO: 14081 - DNA, 15 bp, Homo sapiens
ccgcctcccacccca

SEQ ID NO: 14082 - DNA, 15 bp, Homo sapiens
cccgcctcccacccc

SEQ ID NO: 14083 - DNA, 15 bp, Homo sapiens
tcccgcctcccaccc

SEQ ID NO: 14084 - DNA, 15 bp, Homo sapiens
atcccgcctcccacc

SEQ ID NO: 14085 - DNA, 15 bp, Homo sapiens
catcccgcctcccac

SEQ ID NO: 14086 - DNA, 15 bp, Homo sapiens
acatcccgcctccca

SEQ ID NO: 14087 - DNA, 15 bp, Homo sapiens
gacatcccgcctccc

SEQ ID NO: 14088 - DNA, 15 bp, Homo sapiens
ggacatcccgcctcc

SEQ ID NO: 14089 - DNA, 15 bp, Homo sapiens
cggacatcccgcctc

SEQ ID NO: 14090 - DNA, 15 bp, Homo sapiens
ccggacatcccgcct

SEQ ID NO: 14091 - DNA, 15 bp, Homo sapiens
accggacatcccgcc

SEQ ID NO: 14092 - DNA, 15 bp, Homo sapiens
caccggacatcccgc

SEQ ID NO: 14093 - DNA, 15 bp, Homo sapiens
ccaccggacatcccg

SEQ ID NO: 14094 - DNA, 15 bp, Homo sapiens
tccaccggacatccc

SEQ ID NO: 14095 - DNA, 15 bp, Homo sapiens
gtccaccggacatcc

SEQ ID NO: 14096 - DNA, 15 bp, Homo sapiens
ggtccaccggacatc

SEQ ID NO: 14097 - DNA, 15 bp, Homo sapiens
gggtccaccggacat

SEQ ID NO: 14098 - DNA, 15 bp, Homo sapiens
tgggtccaccggaca

SEQ ID NO: 14099 - DNA, 15 bp, Homo sapiens
ctgggtccaccggac

SEQ ID NO: 14100 - DNA, 15 bp, Homo sapiens
actgggtccaccgga

SEQ ID NO: 14101 - DNA, 15 bp, Homo sapiens
gactgggtccaccgg

SEQ ID NO: 14102 - DNA, 15 bp, Homo sapiens
ggactgggtccaccg

SEQ ID NO: 14103 - DNA, 15 bp, Homo sapiens
aggactgggtccacc

SEQ ID NO: 14104 - DNA, 15 bp, Homo sapiens
gaggactgggtccac

SEQ ID NO: 14105 - DNA, 15 bp, Homo sapiens
tgaggactgggtcca

SEQ ID NO: 14106 - DNA, 15 bp, Homo sapiens
atgaggactgggtcc

SEQ ID NO: 14107 - DNA, 15 bp, Homo sapiens
gatgaggactgggtc

SEQ ID NO: 14108 - DNA, 15 bp, Homo sapiens
ggatgaggactgggt

SEQ ID NO: 14109 - DNA, 15 bp, Homo sapiens
gggatgaggactggg

SEQ ID NO: 14110 - DNA, 15 bp, Homo sapiens
ggggatgaggactgg

SEQ ID NO: 14111 - DNA, 15 bp, Homo sapiens
aggggatgaggactg

SEQ ID NO: 14112 - DNA, 15 bp, Homo sapiens
caggggatgaggact

SEQ ID NO: 14113 - DNA, 15 bp, Homo sapiens
ccaggggatgaggac

SEQ ID NO: 14114 - DNA, 15 bp, Homo sapiens
gccaggggatgagga

SEQ ID NO: 14115 - DNA, 15 bp, Homo sapiens
ggccaggggatgagg

SEQ ID NO: 14116 - DNA, 15 bp, Homo sapiens
cggccaggggatgag

SEQ ID NO: 14117 - DNA, 15 bp, Homo sapiens
ccggccaggggatga

SEQ ID NO: 14118 - DNA, 15 bp, Homo sapiens
accggccaggggatg

SEQ ID NO: 14119 - DNA, 15 bp, Homo sapiens
gaccggccaggggat

SEQ ID NO: 14120 - DNA, 15 bp, Homo sapiens
ggaccggccagggga

SEQ ID NO: 14121 - DNA, 15 bp, Homo sapiens
gggaccggccagggg

SEQ ID NO: 14122 - DNA, 15 bp, Homo sapiens
cgggaccggccaggg

SEQ ID NO: 14123 - DNA, 15 bp, Homo sapiens
ccgggaccggccagg

SEQ ID NO: 14124 - DNA, 15 bp, Homo sapiens
gccgggaccggccag

SEQ ID NO: 14125 - DNA, 15 bp, Homo sapiens
ggccgggaccggcca

SEQ ID NO: 14126 - DNA, 15 bp, Homo sapiens
gggccgggaccggcc

SEQ ID NO: 14127 - DNA, 15 bp, Homo sapiens
cgggccgggaccggc

SEQ ID NO: 14128 - DNA, 15 bp, Homo sapiens
acgggccgggaccgg

SEQ ID NO: 14129 - DNA, 15 bp, Homo sapiens
gacgggccgggaccg

SEQ ID NO: 14130 - DNA, 15 bp, Homo sapiens
agacgggccgggacc

SEQ ID NO: 14131 - DNA, 15 bp, Homo sapiens
cagacgggccgggac

SEQ ID NO: 14132 - DNA, 15 bp, Homo sapiens
gcagacgggccggga

SEQ ID NO: 14133 - DNA, 15 bp, Homo sapiens
agcagacgggccggg

SEQ ID NO: 14134 - DNA, 15 bp, Homo sapiens
cagcagacgggccgg

SEQ ID NO: 14135 - DNA, 15 bp, Homo sapiens
ccagcagacgggccg

SEQ ID NO: 14136 - DNA, 15 bp, Homo sapiens
gccagcagacgggcc

SEQ ID NO: 14137 - DNA, 15 bp, Homo sapiens
tgccagcagacgggc

SEQ ID NO: 14138 - DNA, 15 bp, Homo sapiens
ctgccagcagacggg

SEQ ID NO: 14139 - DNA, 15 bp, Homo sapiens
tctgccagcagacgg

SEQ ID NO: 14140 - DNA, 15 bp, Homo sapiens
ctctgccagcagacg

SEQ ID NO: 14141 - DNA, 15 bp, Homo sapiens
gctctgccagcagac

SEQ ID NO: 14142 - DNA, 15 bp, Homo sapiens
agctctgccagcaga

SEQ ID NO: 14143 - DNA, 15 bp, Homo sapiens
cagctctgccagcag

SEQ ID NO: 14144 - DNA, 15 bp, Homo sapiens
gcagctctgccagca

SEQ ID NO: 14145 - DNA, 15 bp, Homo sapiens
tgcagctctgccagc

SEQ ID NO: 14146 - DNA, 15 bp, Homo sapiens
ctgcagctctgccag

SEQ ID NO: 14147 - DNA, 15 bp, Homo sapiens
cctgcagctctgcca

SEQ ID NO: 14148 - DNA, 15 bp, Homo sapiens
ccctgcagctctgcc

SEQ ID NO: 14149 - DNA, 15 bp, Homo sapiens
gccctgcagctctgc

SEQ ID NO: 14150 - DNA, 15 bp, Homo sapiens
tgccctgcagctctg

SEQ ID NO: 14151 - DNA, 15 bp, Homo sapiens
atgccctgcagctct

SEQ ID NO: 14152 - DNA, 15 bp, Homo sapiens
catgccctgcagctc

SEQ ID NO: 14153 - DNA, 15 bp, Homo sapiens
ccatgccctgcagct

SEQ ID NO: 14154 - DNA, 15 bp, Homo sapiens
accatgccctgcagc

SEQ ID NO: 14155 - DNA, 15 bp, Homo sapiens
caccatgccctgcag

SEQ ID NO: 14156 - DNA, 15 bp, Homo sapiens
acaccatgccctgca

SEQ ID NO: 14157 - DNA, 15 bp, Homo sapiens
aacaccatgccctgc

SEQ ID NO: 14158 - DNA, 15 bp, Homo sapiens
gaacaccatgccctg

SEQ ID NO: 14159 - DNA, 15 bp, Homo sapiens
cgaacaccatgccct

SEQ ID NO: 14160 - DNA, 15 bp, Homo sapiens
tcgaacaccatgccc

SEQ ID NO: 14161 - DNA, 15 bp, Homo sapiens
ctcgaacaccatgcc

SEQ ID NO: 14162 - DNA, 15 bp, Homo sapiens
cctcgaacaccatgc

SEQ ID NO: 14163 - DNA, 15 bp, Homo sapiens
tcctcgaacaccatg

SEQ ID NO: 14164 - DNA, 15 bp, Homo sapiens
ctcctcgaacaccat

SEQ ID NO: 14165 - DNA, 15 bp, Homo sapiens
gctcctcgaacacca

SEQ ID NO: 14166 - DNA, 15 bp, Homo sapiens
cgctcctcgaacacc

SEQ ID NO: 14167 - DNA, 15 bp, Homo sapiens
tcgctcctcgaacac

SEQ ID NO: 14168 - DNA, 15 bp, Homo sapiens
ctcgctcctcgaaca

SEQ ID NO: 14169 - DNA, 15 bp, Homo sapiens
cctcgctcctcgaac

SEQ ID NO: 14170 - DNA, 15 bp, Homo sapiens
gcctcgctcctcgaa

SEQ ID NO: 14171 - DNA, 15 bp, Homo sapiens
ggcctcgctcctcga

SEQ ID NO: 14172 - DNA, 15 bp, Homo sapiens
tggcctcgctcctcg

SEQ ID NO: 14173 - DNA, 15 bp, Homo sapiens
gtggcctcgctcctc

SEQ ID NO: 14174 - DNA, 15 bp, Homo sapiens
ggtggcctcgctcct

SEQ ID NO: 14175 - DNA, 15 bp, Homo sapiens
gggtggcctcgctcc

SEQ ID NO: 14176 - DNA, 15 bp, Homo sapiens
agggtggcctcgctc

SEQ ID NO: 14177 - DNA, 15 bp, Homo sapiens
aagggtggcctcgct

SEQ ID NO: 14178 - DNA, 15 bp, Homo sapiens
gaagggtggcctcgc

SEQ ID NO: 14179 - DNA, 15 bp, Homo sapiens
ggaagggtggcctcg

SEQ ID NO: 14180 - DNA, 15 bp, Homo sapiens
tggaagggtggcctc

SEQ ID NO: 14181 - DNA, 15 bp, Homo sapiens
ttggaagggtggcct

SEQ ID NO: 14182 - DNA, 15 bp, Homo sapiens
gttggaagggtggcc

SEQ ID NO: 14183 - DNA, 15 bp, Homo sapiens
tgttggaagggtggc

SEQ ID NO: 14184 - DNA, 15 bp, Homo sapiens
ctgttggaagggtgg

SEQ ID NO: 14185 - DNA, 15 bp, Homo sapiens
cctgttggaagggtg

SEQ ID NO: 14186 - DNA, 15 bp, Homo sapiens
gcctgttggaagggt

SEQ ID NO: 14187 - DNA, 15 bp, Homo sapiens
agcctgttggaaggg

SEQ ID NO: 14188 - DNA, 15 bp, Homo sapiens
cagcctgttggaagg

SEQ ID NO: 14189 - DNA, 15 bp, Homo sapiens
tcagcctgttggaag

SEQ ID NO: 14190 - DNA, 15 bp, Homo sapiens
ctcagcctgttggaa

SEQ ID NO: 14191 - DNA, 15 bp, Homo sapiens
cctcagcctgttgga

SEQ ID NO: 14192 - DNA, 15 bp, Homo sapiens
gcctcagcctgttgg

SEQ ID NO: 14193 - DNA, 15 bp, Homo sapiens
tgcctcagcctgttg

SEQ ID NO: 14194 - DNA, 15 bp, Homo sapiens
gtgcctcagcctgtt

SEQ ID NO: 14195 - DNA, 15 bp, Homo sapiens
ggtgcctcagcctgt

SEQ ID NO: 14196 - DNA, 15 bp, Homo sapiens
aggtgcctcagcctg

SEQ ID NO: 14197 - DNA, 15 bp, Homo sapiens
caggtgcctcagcct

SEQ ID NO: 14198 - DNA, 15 bp, Homo sapiens
ccaggtgcctcagcc

SEQ ID NO: 14199 - DNA, 15 bp, Homo sapiens
cccaggtgcctcagc

SEQ ID NO: 14200 - DNA, 15 bp, Homo sapiens
acccaggtgcctcag

SEQ ID NO: 14201 - DNA, 15 bp, Homo sapiens
tacccaggtgcctca

SEQ ID NO: 14202 - DNA, 15 bp, Homo sapiens
ctacccaggtgcctc

SEQ ID NO: 14203 - DNA, 15 bp, Homo sapiens
cctacccaggtgcct

SEQ ID NO: 14204 - DNA, 15 bp, Homo sapiens
ccctacccaggtgcc

SEQ ID NO: 14205 - DNA, 15 bp, Homo sapiens
tccctacccaggtgc

SEQ ID NO: 14206 - DNA, 15 bp, Homo sapiens
gtccctacccaggtg

SEQ ID NO: 14207 - DNA, 15 bp, Homo sapiens
agtccctacccaggt

SEQ ID NO: 14208 - DNA, 15 bp, Homo sapiens
cagtccctacccagg

SEQ ID NO: 14209 - DNA, 15 bp, Homo sapiens
ccagtccctacccag

SEQ ID NO: 14210 - DNA, 15 bp, Homo sapiens
tccagtccctaccca

SEQ ID NO: 14211 - DNA, 15 bp, Homo sapiens
ttccagtccctaccc

SEQ ID NO: 14212 - DNA, 15 bp, Homo sapiens
cttccagtccctacc

SEQ ID NO: 14213 - DNA, 15 bp, Homo sapiens
gcttccagtccctac

SEQ ID NO: 14214 - DNA, 15 bp, Homo sapiens
tgcttccagtcccta

SEQ ID NO: 14215 - DNA, 15 bp, Homo sapiens
ctgcttccagtccct

SEQ ID NO: 14216 - DNA, 15 bp, Homo sapiens
gctgcttccagtccc

SEQ ID NO: 14217 - DNA, 15 bp, Homo sapiens
tgctgcttccagtcc

SEQ ID NO: 14218 - DNA, 15 bp, Homo sapiens
ctgctgcttccagtc

SEQ ID NO: 14219 - DNA, 15 bp, Homo sapiens
cctgctgcttccagt

SEQ ID NO: 14220 - DNA, 15 bp, Homo sapiens
ccctgctgcttccag

SEQ ID NO: 14221 - DNA, 15 bp, Homo sapiens
cccctgctgcttcca

SEQ ID NO: 14222 - DNA, 15 bp, Homo sapiens
tcccctgctgcttcc

SEQ ID NO: 14223 - DNA, 15 bp, Homo sapiens
gtcccctgctgcttc

SEQ ID NO: 14224 - DNA, 15 bp, Homo sapiens
agtcccctgctgctt

SEQ ID NO: 14225 - DNA, 15 bp, Homo sapiens
gagtcccctgctgct

SEQ ID NO: 14226 - DNA, 15 bp, Homo sapiens
cgagtcccctgctgc

SEQ ID NO: 14227 - DNA, 15 bp, Homo sapiens
gcgagtcccctgctg

SEQ ID NO: 14228 - DNA, 15 bp, Homo sapiens
ggcgagtcccctgct

SEQ ID NO: 14229 - DNA, 15 bp, Homo sapiens
aggcgagtcccctgc

SEQ ID NO: 14230 - DNA, 15 bp, Homo sapiens
caggcgagtcccctg

SEQ ID NO: 14231 - DNA, 15 bp, Homo sapiens
ccaggcgagtcccct

SEQ ID NO: 14232 - DNA, 15 bp, Homo sapiens
tccaggcgagtcccc

SEQ ID NO: 14233 - DNA, 15 bp, Homo sapiens
ttccaggcgagtccc

SEQ ID NO: 14234 - DNA, 15 bp, Homo sapiens
gttccaggcgagtcc

SEQ ID NO: 14235 - DNA, 15 bp, Homo sapiens
agttccaggcgagtc

SEQ ID NO: 14236 - DNA, 15 bp, Homo sapiens
gagttccaggcgagt

SEQ ID NO: 14237 - DNA, 15 bp, Homo sapiens
ggagttccaggcgag

SEQ ID NO: 14238 - DNA, 15 bp, Homo sapiens
gggagttccaggcga

SEQ ID NO: 14239 - DNA, 15 bp, Homo sapiens
cgggagttccaggcg

SEQ ID NO: 14240 - DNA, 15 bp, Homo sapiens
acgggagttccaggc

SEQ ID NO: 14241 - DNA, 15 bp, Homo sapiens
cacgggagttccagg

SEQ ID NO: 14242 - DNA, 15 bp, Homo sapiens
ccacgggagttccag

SEQ ID NO: 14243 - DNA, 15 bp, Homo sapiens
gccacgggagttcca

SEQ ID NO: 14244 - DNA, 15 bp, Homo sapiens
agccacgggagttcc

SEQ ID NO: 14245 - DNA, 15 bp, Homo sapiens
gagccacgggagttc

SEQ ID NO: 14246 - DNA, 15 bp, Homo sapiens
agagccacgggagtt

SEQ ID NO: 14247 - DNA, 15 bp, Homo sapiens
cagagccacgggagt

SEQ ID NO: 14248 - DNA, 15 bp, Homo sapiens
ccagagccacgggag

SEQ ID NO: 14249 - DNA, 15 bp, Homo sapiens
tccagagccacggga

SEQ ID NO: 14250 - DNA, 15 bp, Homo sapiens
ctccagagccacggg

SEQ ID NO: 14251 - DNA, 15 bp, Homo sapiens
cctccagagccacgg

SEQ ID NO: 14252 - DNA, 15 bp, Homo sapiens
gcctccagagccacg

SEQ ID NO: 14253 - DNA, 15 bp, Homo sapiens
tgcctccagagccac

SEQ ID NO: 14254 - DNA, 15 bp, Homo sapiens
ctgcctccagagcca

SEQ ID NO: 14255 - DNA, 15 bp, Homo sapiens
cctgcctccagagcc

SEQ ID NO: 14256 - DNA, 15 bp, Homo sapiens
tcctgcctccagagc

SEQ ID NO: 14257 - DNA, 15 bp, Homo sapiens
ttcctgcctccagag

SEQ ID NO: 14258 - DNA, 15 bp, Homo sapiens
gttcctgcctccaga

SEQ ID NO: 14259 - DNA, 15 bp, Homo sapiens
tgttcctgcctccag

SEQ ID NO: 14260 - DNA, 15 bp, Homo sapiens
ctgttcctgcctcca

SEQ ID NO: 14261 - DNA, 15 bp, Homo sapiens
tctgttcctgcctcc

SEQ ID NO: 14262 - DNA, 15 bp, Homo sapiens
ctctgttcctgcctc

SEQ ID NO: 14263 - DNA, 15 bp, Homo sapiens
actctgttcctgcct

SEQ ID NO: 14264 - DNA, 15 bp, Homo sapiens
gactctgttcctgcc

SEQ ID NO: 14265 - DNA, 15 bp, Homo sapiens
tgactctgttcctgc

SEQ ID NO: 14266 - DNA, 15 bp, Homo sapiens
ctgactctgttcctg

SEQ ID NO: 14267 - DNA, 15 bp, Homo sapiens
gctgactctgttcct

SEQ ID NO: 14268 - DNA, 15 bp, Homo sapiens
agctgactctgttcc

SEQ ID NO: 14269 - DNA, 15 bp, Homo sapiens
cagctgactctgttc

SEQ ID NO: 14270 - DNA, 15 bp, Homo sapiens
ccagctgactctgtt

SEQ ID NO: 14271 - DNA, 15 bp, Homo sapiens
gccagctgactctgt

SEQ ID NO: 14272 - DNA, 15 bp, Homo sapiens
ggccagctgactctg

SEQ ID NO: 14273 - DNA, 15 bp, Homo sapiens
gggccagctgactct

SEQ ID NO: 14274 - DNA, 15 bp, Homo sapiens
agggccagctgactc

SEQ ID NO: 14275 - DNA, 15 bp, Homo sapiens
cagggccagctgact

SEQ ID NO: 14276 - DNA, 15 bp, Homo sapiens
gcagggccagctgac

SEQ ID NO: 14277 - DNA, 15 bp, Homo sapiens
ggcagggccagctga

SEQ ID NO: 14278 - DNA, 15 bp, Homo sapiens
cggcagggccagctg

SEQ ID NO: 14279 - DNA, 15 bp, Homo sapiens
gcggcagggccagct

SEQ ID NO: 14280 - DNA, 15 bp, Homo sapiens
tgcggcagggccagc

SEQ ID NO: 14281 - DNA, 15 bp, Homo sapiens
atgcggcagggccag

SEQ ID NO: 14282 - DNA, 15 bp, Homo sapiens
catgcggcagggcca

SEQ ID NO: 14283 - DNA, 15 bp, Homo sapiens
ccatgcggcagggcc

SEQ ID NO: 14284 - DNA, 15 bp, Homo sapiens
gccatgcggcagggc

SEQ ID NO: 14285 - DNA, 15 bp, Homo sapiens
tgccatgcggcaggg

SEQ ID NO: 14286 - DNA, 15 bp, Homo sapiens
ttgccatgcggcagg

SEQ ID NO: 14287 - DNA, 15 bp, Homo sapiens
gttgccatgcggcag

SEQ ID NO: 14288 - DNA, 15 bp, Homo sapiens
cgttgccatgcggca

SEQ ID NO: 14289 - DNA, 15 bp, Homo sapiens
gcgttgccatgcggc

SEQ ID NO: 14290 - DNA, 15 bp, Homo sapiens
agcgttgccatgcgg

SEQ ID NO: 14291 - DNA, 15 bp, Homo sapiens
tagcgttgccatgcg

SEQ ID NO: 14292 - DNA, 15 bp, Homo sapiens
atagcgttgccatgc

SEQ ID NO: 14293 - DNA, 15 bp, Homo sapiens
catagcgttgccatg

SEQ ID NO: 14294 - DNA, 15 bp, Homo sapiens
tcatagcgttgccat

SEQ ID NO: 14295 - DNA, 15 bp, Homo sapiens
ctcatagcgttgcca

SEQ ID NO: 14296 - DNA, 15 bp, Homo sapiens
cctcatagcgttgcc

SEQ ID NO: 14297 - DNA, 15 bp, Homo sapiens
acctcatagcgttgc

SEQ ID NO: 14298 - DNA, 15 bp, Homo sapiens
aacctcatagcgttg

SEQ ID NO: 14299 - DNA, 15 bp, Homo sapiens
gaacctcatagcgtt

SEQ ID NO: 14300 - DNA, 15 bp, Homo sapiens
ggaacctcatagcgt

SEQ ID NO: 14301 - DNA, 15 bp, Homo sapiens
gggaacctcatagcg

SEQ ID NO: 14302 - DNA, 15 bp, Homo sapiens
ggggaacctcatagc

SEQ ID NO: 14303 - DNA, 15 bp, Homo sapiens
gggggaacctcatag

SEQ ID NO: 14304 - DNA, 15 bp, Homo sapiens
ggggggaacctcata

SEQ ID NO: 14305 - DNA, 15 bp, Homo sapiens
gggggggaacctcat

SEQ ID NO: 14306 - DNA, 15 bp, Homo sapiens
tgggggggaacctca

SEQ ID NO: 14307 - DNA, 15 bp, Homo sapiens
gtgggggggaacctc

SEQ ID NO: 14308 - DNA, 15 bp, Homo sapiens
ggtgggggggaacct

SEQ ID NO: 14309 - DNA, 15 bp, Homo sapiens
aggtgggggggaacc

SEQ ID NO: 14310 - DNA, 15 bp, Homo sapiens
aaggtgggggggaac

SEQ ID NO: 14311 - DNA, 15 bp, Homo sapiens
gaaggtgggggggaa

SEQ ID NO: 14312 - DNA, 15 bp, Homo sapiens
ggaaggtggggggga

SEQ ID NO: 14313 - DNA, 15 bp, Homo sapiens
aggaaggtggggggg

SEQ ID NO: 14314 - DNA, 15 bp, Homo sapiens
gaggaaggtgggggg

SEQ ID NO: 14315 - DNA, 15 bp, Homo sapiens
ggaggaaggtggggg

SEQ ID NO: 14316 - DNA, 15 bp, Homo sapiens
aggaggaaggtgggg

SEQ ID NO: 14317 - DNA, 15 bp, Homo sapiens
gaggaggaaggtggg

SEQ ID NO: 14318 - DNA, 15 bp, Homo sapiens
tgaggaggaaggtgg

SEQ ID NO: 14319 - DNA, 15 bp, Homo sapiens
gtgaggaggaaggtg

SEQ ID NO: 14320 - DNA, 15 bp, Homo sapiens
ggtgaggaggaaggt

SEQ ID NO: 14321 - DNA, 15 bp, Homo sapiens
gggtgaggaggaagg

SEQ ID NO: 14322 - DNA, 15 bp, Homo sapiens
ggggtgaggaggaag

SEQ ID NO: 14323 - DNA, 15 bp, Homo sapiens
aggggtgaggaggaa

SEQ ID NO: 14324 - DNA, 15 bp, Homo sapiens
gaggggtgaggagga

SEQ ID NO: 14325 - DNA, 15 bp, Homo sapiens
ggaggggtgaggagg

SEQ ID NO: 14326 - DNA, 15 bp, Homo sapiens
gggaggggtgaggag

SEQ ID NO: 14327 - DNA, 15 bp, Homo sapiens
ggggaggggtgagga

SEQ ID NO: 14328 - DNA, 15 bp, Homo sapiens
tggggaggggtgagg

SEQ ID NO: 14329 - DNA, 15 bp, Homo sapiens
gtggggaggggtgag

SEQ ID NO: 14330 - DNA, 15 bp, Homo sapiens
tgtggggaggggtga

SEQ ID NO: 14331 - DNA, 15 bp, Homo sapiens
ctgtggggaggggtg

SEQ ID NO: 14332 - DNA, 15 bp, Homo sapiens
gctgtggggaggggt

SEQ ID NO: 14333 - DNA, 15 bp, Homo sapiens
ggctgtggggagggg

SEQ ID NO: 14334 - DNA, 15 bp, Homo sapiens
aggctgtggggaggg

SEQ ID NO: 14335 - DNA, 15 bp, Homo sapiens
gaggctgtggggagg

SEQ ID NO: 14336 - DNA, 15 bp, Homo sapiens
tgaggctgtggggag

SEQ ID NO: 14337 - DNA, 15 bp, Homo sapiens
atgaggctgtgggga

SEQ ID NO: 14338 - DNA, 15 bp, Homo sapiens
catgaggctgtgggg

SEQ ID NO: 14339 - DNA, 15 bp, Homo sapiens
gcatgaggctgtggg

SEQ ID NO: 14340 - DNA, 15 bp, Homo sapiens
agcatgaggctgtgg

SEQ ID NO: 14341 - DNA, 15 bp, Homo sapiens
gagcatgaggctgtg

SEQ ID NO: 14342 - DNA, 15 bp, Homo sapiens
tgagcatgaggctgt

SEQ ID NO: 14343 - DNA, 15 bp, Homo sapiens
gtgagcatgaggctg

SEQ ID NO: 14344 - DNA, 15 bp, Homo sapiens
ggtgagcatgaggct

SEQ ID NO: 14345 - DNA, 15 bp, Homo sapiens
tggtgagcatgaggc

SEQ ID NO: 14346 - DNA, 15 bp, Homo sapiens
gtggtgagcatgagg

SEQ ID NO: 14347 - DNA, 15 bp, Homo sapiens
ggtggtgagcatgag

SEQ ID NO: 14348 - DNA, 15 bp, Homo sapiens
aggtggtgagcatga

SEQ ID NO: 14349 - DNA, 15 bp, Homo sapiens
gaggtggtgagcatg

SEQ ID NO: 14350 - DNA, 15 bp, Homo sapiens
agaggtggtgagcat

SEQ ID NO: 14351 - DNA, 15 bp, Homo sapiens
cagaggtggtgagca

SEQ ID NO: 14352 - DNA, 15 bp, Homo sapiens
ccagaggtggtgagc

SEQ ID NO: 14353 - DNA, 15 bp, Homo sapiens
tccagaggtggtgag

SEQ ID NO: 14354 - DNA, 15 bp, Homo sapiens
ttccagaggtggtga

SEQ ID NO: 14355 - DNA, 15 bp, Homo sapiens
gttccagaggtggtg

SEQ ID NO: 14356 - DNA, 15 bp, Homo sapiens
agttccagaggtggt

SEQ ID NO: 14357 - DNA, 15 bp, Homo sapiens
gagttccagaggtgg

SEQ ID NO: 14358 - DNA, 15 bp, Homo sapiens
tgagttccagaggtg

SEQ ID NO: 14359 - DNA, 15 bp, Homo sapiens
ttgagttccagaggt

SEQ ID NO: 14360 - DNA, 15 bp, Homo sapiens
attgagttccagagg

SEQ ID NO: 14361 - DNA, 15 bp, Homo sapiens
aattgagttccagag

SEQ ID NO: 14362 - DNA, 15 bp, Homo sapiens
gaattgagttccaga

SEQ ID NO: 14363 - DNA, 15 bp, Homo sapiens
agaattgagttccag

SEQ ID NO: 14364 - DNA, 15 bp, Homo sapiens
cagaattgagttcca

SEQ ID NO: 14365 - DNA, 15 bp, Homo sapiens
ccagaattgagttcc

SEQ ID NO: 14366 - DNA, 15 bp, Homo sapiens
gccagaattgagttc

SEQ ID NO: 14367 - DNA, 15 bp, Homo sapiens
tgccagaattgagtt

SEQ ID NO: 14368 - DNA, 15 bp, Homo sapiens
gtgccagaattgagt

SEQ ID NO: 14369 - DNA, 15 bp, Homo sapiens
cgtgccagaattgag

SEQ ID NO: 14370 - DNA, 15 bp, Homo sapiens
tcgtgccagaattga

SEQ ID NO: 14371 - DNA, 15 bp, Homo sapiens
gtcgtgccagaattg

SEQ ID NO: 14372 - DNA, 15 bp, Homo sapiens
ggtcgtgccagaatt

SEQ ID NO: 14373 - DNA, 15 bp, Homo sapiens
tggtcgtgccagaat

SEQ ID NO: 14374 - DNA, 15 bp, Homo sapiens
ctggtcgtgccagaa

SEQ ID NO: 14375 - DNA, 15 bp, Homo sapiens
gctggtcgtgccaga

SEQ ID NO: 14376 - DNA, 15 bp, Homo sapiens
ggctggtcgtgccag

SEQ ID NO: 14377 - DNA, 15 bp, Homo sapiens
aggctggtcgtgcca

SEQ ID NO: 14378 - DNA, 15 bp, Homo sapiens
caggctggtcgtgcc

SEQ ID NO: 14379 - DNA, 15 bp, Homo sapiens
gcaggctggtcgtgc

SEQ ID NO: 14380 - DNA, 15 bp, Homo sapiens
agcaggctggtcgtg

SEQ ID NO: 14381 - DNA, 15 bp, Homo sapiens
cagcaggctggtcgt

SEQ ID NO: 14382 - DNA, 15 bp, Homo sapiens
ccagcaggctggtcg

SEQ ID NO: 14383 - DNA, 15 bp, Homo sapiens
gccagcaggctggtc

SEQ ID NO: 14384 - DNA, 15 bp, Homo sapiens
tgccagcaggctggt

SEQ ID NO: 14385 - DNA, 15 bp, Homo sapiens
atgccagcaggctgg

SEQ ID NO: 14386 - DNA, 15 bp, Homo sapiens
catgccagcaggctg

SEQ ID NO: 14387 - DNA, 15 bp, Homo sapiens
ccatgccagcaggct

SEQ ID NO: 14388 - DNA, 15 bp, Homo sapiens
tccatgccagcaggc

SEQ ID NO: 14389 - DNA, 15 bp, Homo sapiens
ttccatgccagcagg

SEQ ID NO: 14390 - DNA, 15 bp, Homo sapiens
tttccatgccagcag

SEQ ID NO: 14391 - DNA, 15 bp, Homo sapiens
ctttccatgccagca

SEQ ID NO: 14392 - DNA, 15 bp, Homo sapiens
cctttccatgccagc

SEQ ID NO: 14393 - DNA, 15 bp, Homo sapiens
gcctttccatgccag

SEQ ID NO: 14394 - DNA, 15 bp, Homo sapiens
agcctttccatgcca

SEQ ID NO: 14395 - DNA, 15 bp, Homo sapiens
aagcctttccatgcc

SEQ ID NO: 14396 - DNA, 15 bp, Homo sapiens
gaagcctttccatgc

SEQ ID NO: 14397 - DNA, 15 bp, Homo sapiens
agaagcctttccatg

SEQ ID NO: 14398 - DNA, 15 bp, Homo sapiens
cagaagcctttccat

SEQ ID NO: 14399 - DNA, 15 bp, Homo sapiens
ccagaagcctttcca

SEQ ID NO: 14400 - DNA, 15 bp, Homo sapiens
tccagaagcctttcc

SEQ ID NO: 14401 - DNA, 15 bp, Homo sapiens
ctccagaagcctttc

SEQ ID NO: 14402 - DNA, 15 bp, Homo sapiens
cctccagaagccttt

SEQ ID NO: 14403 - DNA, 15 bp, Homo sapiens
ccctccagaagcctt

SEQ ID NO: 14404 - DNA, 15 bp, Homo sapiens
gccctccagaagcct

SEQ ID NO: 14405 - DNA, 15 bp, Homo sapiens
ggccctccagaagcc

SEQ ID NO: 14406 - DNA, 15 bp, Homo sapiens
cggccctccagaagc

SEQ ID NO: 14407 - DNA, 15 bp, Homo sapiens
tcggccctccagaag

SEQ ID NO: 14408 - DNA, 15 bp, Homo sapiens
ctcggccctccagaa

SEQ ID NO: 14409 - DNA, 15 bp, Homo sapiens
gctcggccctccaga

SEQ ID NO: 14410 - DNA, 15 bp, Homo sapiens
ggctcggccctccag

SEQ ID NO: 14411 - DNA, 15 bp, Homo sapiens
gggctcggccctcca

SEQ ID NO: 14412 - DNA, 15 bp, Homo sapiens
agggctcggccctcc

SEQ ID NO: 14413 - DNA, 15 bp, Homo sapiens
cagggctcggccctc

SEQ ID NO: 14414 - DNA, 15 bp, Homo sapiens
ccagggctcggccct

SEQ ID NO: 14415 - DNA, 15 bp, Homo sapiens
accagggctcggccc

SEQ ID NO: 14416 - DNA, 15 bp, Homo sapiens
caccagggctcggcc

SEQ ID NO: 14417 - DNA, 15 bp, Homo sapiens
ccaccagggctcggc

SEQ ID NO: 14418 - DNA, 15 bp, Homo sapiens
cccaccagggctcgg

SEQ ID NO: 14419 - DNA, 15 bp, Homo sapiens
tcccaccagggctcg

SEQ ID NO: 14420 - DNA, 15 bp, Homo sapiens
ctcccaccagggctc

SEQ ID NO: 14421 - DNA, 15 bp, Homo sapiens
tctcccaccagggct

SEQ ID NO: 14422 - DNA, 15 bp, Homo sapiens
ctctcccaccagggc

SEQ ID NO: 14423 - DNA, 15 bp, Homo sapiens
gctctcccaccaggg

SEQ ID NO: 14424 - DNA, 15 bp, Homo sapiens
tgctctcccaccagg

SEQ ID NO: 14425 - DNA, 15 bp, Homo sapiens
ctgctctcccaccag

SEQ ID NO: 14426 - DNA, 15 bp, Homo sapiens
cctgctctcccacca

SEQ ID NO: 14427 - DNA, 15 bp, Homo sapiens
gcctgctctcccacc

SEQ ID NO: 14428 - DNA, 15 bp, Homo sapiens
agcctgctctcccac

SEQ ID NO: 14429 - DNA, 15 bp, Homo sapiens
gagcctgctctccca

SEQ ID NO: 14430 - DNA, 15 bp, Homo sapiens
tgagcctgctctccc

SEQ ID NO: 14431 - DNA, 15 bp, Homo sapiens
ctgagcctgctctcc

SEQ ID NO: 14432 - DNA, 15 bp, Homo sapiens
tctgagcctgctctc

SEQ ID NO: 14433 - DNA, 15 bp, Homo sapiens
ttctgagcctgctct

SEQ ID NO: 14434 - DNA, 15 bp, Homo sapiens
attctgagcctgctc

SEQ ID NO: 14435 - DNA, 15 bp, Homo sapiens
gattctgagcctgct

SEQ ID NO: 14436 - DNA, 15 bp, Homo sapiens
agattctgagcctgc

SEQ ID NO: 14437 - DNA, 15 bp, Homo sapiens
gagattctgagcctg

SEQ ID NO: 14438 - DNA, 15 bp, Homo sapiens
ggagattctgagcct

SEQ ID NO: 14439 - DNA, 15 bp, Homo sapiens
tggagattctgagcc

SEQ ID NO: 14440 - DNA, 15 bp, Homo sapiens
ctggagattctgagc

SEQ ID NO: 14441 - DNA, 15 bp, Homo sapiens
cctggagattctgag

SEQ ID NO: 14442 - DNA, 15 bp, Homo sapiens
ccctggagattctga

SEQ ID NO: 14443 - DNA, 15 bp, Homo sapiens
accctggagattctg

SEQ ID NO: 14444 - DNA, 15 bp, Homo sapiens
caccctggagattct

SEQ ID NO: 14445 - DNA, 15 bp, Homo sapiens
tcaccctggagattc

SEQ ID NO: 14446 - DNA, 15 bp, Homo sapiens
ttcaccctggagatt

SEQ ID NO: 14447 - DNA, 15 bp, Homo sapiens
cttcaccctggagat

SEQ ID NO: 14448 - DNA, 15 bp, Homo sapiens
acttcaccctggaga

SEQ ID NO: 14449 - DNA, 15 bp, Homo sapiens
cacttcaccctggag

SEQ ID NO: 14450 - DNA, 15 bp, Homo sapiens
ccacttcaccctgga

SEQ ID NO: 14451 - DNA, 15 bp, Homo sapiens
cccacttcaccctgg

SEQ ID NO: 14452 - DNA, 15 bp, Homo sapiens
tcccacttcaccctg

SEQ ID NO: 14453 - DNA, 15 bp, Homo sapiens
atcccacttcaccct

SEQ ID NO: 14454 - DNA, 15 bp, Homo sapiens
catcccacttcaccc

SEQ ID NO: 14455 - DNA, 15 bp, Homo sapiens
tcatcccacttcacc

SEQ ID NO: 14456 - DNA, 15 bp, Homo sapiens
ctcatcccacttcac

SEQ ID NO: 14457 - DNA, 15 bp, Homo sapiens
cctcatcccacttca

SEQ ID NO: 14458 - DNA, 15 bp, Homo sapiens
ccctcatcccacttc

SEQ ID NO: 14459 - DNA, 15 bp, Homo sapiens
accctcatcccactt

SEQ ID NO: 14460 - DNA, 15 bp, Homo sapiens
aaccctcatcccact

SEQ ID NO: 14461 - DNA, 15 bp, Homo sapiens
caaccctcatcccac

SEQ ID NO: 14462 - DNA, 15 bp, Homo sapiens
gcaaccctcatccca

SEQ ID NO: 14463 - DNA, 15 bp, Homo sapiens
ggcaaccctcatccc

SEQ ID NO: 14464 - DNA, 15 bp, Homo sapiens
tggcaaccctcatcc

SEQ ID NO: 14465 - DNA, 15 bp, Homo sapiens
ctggcaaccctcatc

SEQ ID NO: 14466 - DNA, 15 bp, Homo sapiens
cctggcaaccctcat

SEQ ID NO: 14467 - DNA, 15 bp, Homo sapiens
ccctggcaaccctca

SEQ ID NO: 14468 - DNA, 15 bp, Homo sapiens
cccctggcaaccctc

SEQ ID NO: 14469 - DNA, 15 bp, Homo sapiens
acccctggcaaccct

SEQ ID NO: 14470 - DNA, 15 bp, Homo sapiens
tacccctggcaaccc

SEQ ID NO: 14471 - DNA, 15 bp, Homo sapiens
ctacccctggcaacc

SEQ ID NO: 14472 - DNA, 15 bp, Homo sapiens
cctacccctggcaac

SEQ ID NO: 14473 - DNA, 15 bp, Homo sapiens
ccctacccctggcaa

SEQ ID NO: 14474 - DNA, 15 bp, Homo sapiens
cccctacccctggca

SEQ ID NO: 14475 - DNA, 15 bp, Homo sapiens
ccccctacccctggc

SEQ ID NO: 14476 - DNA, 15 bp, Homo sapiens
gccccctacccctgg

SEQ ID NO: 14477 - DNA, 15 bp, Homo sapiens
ggccccctacccctg

SEQ ID NO: 14478 - DNA, 15 bp, Homo sapiens
tggccccctacccct

SEQ ID NO: 14479 - DNA, 15 bp, Homo sapiens
ttggccccctacccc

SEQ ID NO: 14480 - DNA, 15 bp, Homo sapiens
tttggccccctaccc

SEQ ID NO: 14481 - DNA, 15 bp, Homo sapiens
ttttggccccctacc

SEQ ID NO: 14482 - DNA, 15 bp, Homo sapiens
gttttggccccctac

SEQ ID NO: 14483 - DNA, 15 bp, Homo sapiens
ggttttggcccccta

SEQ ID NO: 14484 - DNA, 15 bp, Homo sapiens
gggttttggccccct

SEQ ID NO: 14485 - DNA, 15 bp, Homo sapiens
agggttttggccccc

SEQ ID NO: 14486 - DNA, 15 bp, Homo sapiens
cagggttttggcccc

SEQ ID NO: 14487 - DNA, 15 bp, Homo sapiens
ccagggttttggccc

SEQ ID NO: 14488 - DNA, 15 bp, Homo sapiens
cccagggttttggcc

SEQ ID NO: 14489 - DNA, 15 bp, Homo sapiens
gcccagggttttggc

SEQ ID NO: 14490 - DNA, 15 bp, Homo sapiens
tgcccagggttttgg

SEQ ID NO: 14491 - DNA, 15 bp, Homo sapiens
gtgcccagggttttg

SEQ ID NO: 14492 - DNA, 15 bp, Homo sapiens
ggtgcccagggtttt

SEQ ID NO: 14493 - DNA, 15 bp, Homo sapiens
gggtgcccagggttt

SEQ ID NO: 14494 - DNA, 15 bp, Homo sapiens
tgggtgcccagggtt

SEQ ID NO: 14495 - DNA, 15 bp, Homo sapiens
ctgggtgcccagggt

SEQ ID NO: 14496 - DNA, 15 bp, Homo sapiens
tctgggtgcccaggg

SEQ ID NO: 14497 - DNA, 15 bp, Homo sapiens
gtctgggtgcccagg

SEQ ID NO: 14498 - DNA, 15 bp, Homo sapiens
cgtctgggtgcccag

SEQ ID NO: 14499 - DNA, 15 bp, Homo sapiens
ccgtctgggtgccca

SEQ ID NO: 14500 - DNA, 15 bp, Homo sapiens
cccgtctgggtgccc

SEQ ID NO: 14501 - DNA, 15 bp, Homo sapiens
ccccgtctgggtgcc

SEQ ID NO: 14502 - DNA, 15 bp, Homo sapiens
tccccgtctgggtgc

SEQ ID NO: 14503 - DNA, 15 bp, Homo sapiens
gtccccgtctgggtg

SEQ ID NO: 14504 - DNA, 15 bp, Homo sapiens
tgtccccgtctgggt

SEQ ID NO: 14505 - DNA, 15 bp, Homo sapiens
ttgtccccgtctggg

SEQ ID NO: 14506 - DNA, 15 bp, Homo sapiens
cttgtccccgtctgg

SEQ ID NO: 14507 - DNA, 15 bp, Homo sapiens
tcttgtccccgtctg

SEQ ID NO: 14508 - DNA, 15 bp, Homo sapiens
ctcttgtccccgtct

SEQ ID NO: 14509 - DNA, 15 bp, Homo sapiens
tctcttgtccccgtc

SEQ ID NO: 14510 - DNA, 15 bp, Homo sapiens
ttctcttgtccccgt

SEQ ID NO: 14511 - DNA, 15 bp, Homo sapiens
cttctcttgtccccg

SEQ ID NO: 14512 - DNA, 15 bp, Homo sapiens
tcttctcttgtcccc

SEQ ID NO: 14513 - DNA, 15 bp, Homo sapiens
atcttctcttgtccc

SEQ ID NO: 14514 - DNA, 15 bp, Homo sapiens
gatcttctcttgtcc

SEQ ID NO: 14515 - DNA, 15 bp, Homo sapiens
ggatcttctcttgtc

SEQ ID NO: 14516 - DNA, 15 bp, Homo sapiens
tggatcttctcttgt

SEQ ID NO: 14517 - DNA, 15 bp, Homo sapiens
atggatcttctcttg

SEQ ID NO: 14518 - DNA, 15 bp, Homo sapiens
catggatcttctctt

SEQ ID NO: 14519 - DNA, 15 bp, Homo sapiens
ccatggatcttctct

SEQ ID NO: 14520 - DNA, 15 bp, Homo sapiens
cccatggatcttctc

SEQ ID NO: 14521 - DNA, 15 bp, Homo sapiens
tcccatggatcttct

SEQ ID NO: 14522 - DNA, 15 bp, Homo sapiens
ctcccatggatcttc

SEQ ID NO: 14523 - DNA, 15 bp, Homo sapiens
actcccatggatctt

SEQ ID NO: 14524 - DNA, 15 bp, Homo sapiens
gactcccatggatct

SEQ ID NO: 14525 - DNA, 15 bp, Homo sapiens
tgactcccatggatc

SEQ ID NO: 14526 - DNA, 15 bp, Homo sapiens
ctgactcccatggat

SEQ ID NO: 14527 - DNA, 15 bp, Homo sapiens
cctgactcccatgga

SEQ ID NO: 14528 - DNA, 15 bp, Homo sapiens
ccctgactcccatgg

SEQ ID NO: 14529 - DNA, 15 bp, Homo sapiens
cccctgactcccatg

SEQ ID NO: 14530 - DNA, 15 bp, Homo sapiens
acccctgactcccat

SEQ ID NO: 14531 - DNA, 15 bp, Homo sapiens
gacccctgactccca

SEQ ID NO: 14532 - DNA, 15 bp, Homo sapiens
agacccctgactccc

SEQ ID NO: 14533 - DNA, 15 bp, Homo sapiens
gagacccctgactcc

SEQ ID NO: 14534 - DNA, 15 bp, Homo sapiens
tgagacccctgactc

SEQ ID NO: 14535 - DNA, 15 bp, Homo sapiens
gtgagacccctgact

SEQ ID NO: 14536 - DNA, 15 bp, Homo sapiens
ggtgagacccctgac

SEQ ID NO: 14537 - DNA, 15 bp, Homo sapiens
aggtgagacccctga

SEQ ID NO: 14538 - DNA, 15 bp, Homo sapiens
caggtgagacccctg

SEQ ID NO: 14539 - DNA, 15 bp, Homo sapiens
ccaggtgagacccct

SEQ ID NO: 14540 - DNA, 15 bp, Homo sapiens
tccaggtgagacccc

SEQ ID NO: 14541 - DNA, 15 bp, Homo sapiens
ctccaggtgagaccc

SEQ ID NO: 14542 - DNA, 15 bp, Homo sapiens
cctccaggtgagacc

SEQ ID NO: 14543 - DNA, 15 bp, Homo sapiens
acctccaggtgagac

SEQ ID NO: 14544 - DNA, 15 bp, Homo sapiens
cacctccaggtgaga

SEQ ID NO: 14545 - DNA, 15 bp, Homo sapiens
gcacctccaggtgag

SEQ ID NO: 14546 - DNA, 15 bp, Homo sapiens
agcacctccaggtga

SEQ ID NO: 14547 - DNA, 15 bp, Homo sapiens
cagcacctccaggtg

SEQ ID NO: 14548 - DNA, 15 bp, Homo sapiens
gcagcacctccaggt

SEQ ID NO: 14549 - DNA, 15 bp, Homo sapiens
tgcagcacctccagg

SEQ ID NO: 14550 - DNA, 15 bp, Homo sapiens
ctgcagcacctccag

SEQ ID NO: 14551 - DNA, 15 bp, Homo sapiens
gctgcagcacctcca

SEQ ID NO: 14552 - DNA, 15 bp, Homo sapiens
agctgcagcacctcc

SEQ ID NO: 14553 - DNA, 15 bp, Homo sapiens
aagctgcagcacctc

SEQ ID NO: 14554 - DNA, 15 bp, Homo sapiens
caagctgcagcacct

SEQ ID NO: 14555 - DNA, 15 bp, Homo sapiens
ccaagctgcagcacc

SEQ ID NO: 14556 - DNA, 15 bp, Homo sapiens
cccaagctgcagcac

SEQ ID NO: 14557 - DNA, 15 bp, Homo sapiens
tcccaagctgcagca

SEQ ID NO: 14558 - DNA, 15 bp, Homo sapiens
ctcccaagctgcagc

SEQ ID NO: 14559 - DNA, 15 bp, Homo sapiens
actcccaagctgcag

SEQ ID NO: 14560 - DNA, 15 bp, Homo sapiens
cactcccaagctgca

SEQ ID NO: 14561 - DNA, 15 bp, Homo sapiens
gcactcccaagctgc

SEQ ID NO: 14562 - DNA, 15 bp, Homo sapiens
cgcactcccaagctg

SEQ ID NO: 14563 - DNA, 15 bp, Homo sapiens
tcgcactcccaagct

SEQ ID NO: 14564 - DNA, 15 bp, Homo sapiens
ttcgcactcccaagc

SEQ ID NO: 14565 - DNA, 15 bp, Homo sapiens
cttcgcactcccaag

SEQ ID NO: 14566 - DNA, 15 bp, Homo sapiens
ccttcgcactcccaa

SEQ ID NO: 14567 - DNA, 15 bp, Homo sapiens
accttcgcactccca

SEQ ID NO: 14568 - DNA, 15 bp, Homo sapiens
caccttcgcactccc

SEQ ID NO: 14569 - DNA, 15 bp, Homo sapiens
ccaccttcgcactcc

SEQ ID NO: 14570 - DNA, 15 bp, Homo sapiens
cccaccttcgcactc

SEQ ID NO: 14571 - DNA, 15 bp, Homo sapiens
ccccaccttcgcact

SEQ ID NO: 14572 - DNA, 15 bp, Homo sapiens
gccccaccttcgcac

SEQ ID NO: 14573 - DNA, 15 bp, Homo sapiens
cgccccaccttcgca

SEQ ID NO: 14574 - DNA, 15 bp, Homo sapiens
ccgccccaccttcgc

SEQ ID NO: 14575 - DNA, 15 bp, Homo sapiens
cccgccccaccttcg

SEQ ID NO: 14576 - DNA, 15 bp, Homo sapiens
tcccgccccaccttc

SEQ ID NO: 14577 - DNA, 15 bp, Homo sapiens
gtcccgccccacctt

SEQ ID NO: 14578 - DNA, 15 bp, Homo sapiens
ggtcccgccccacct

SEQ ID NO: 14579 - DNA, 15 bp, Homo sapiens
gggtcccgccccacc

SEQ ID NO: 14580 - DNA, 15 bp, Homo sapiens
tgggtcccgccccac

SEQ ID NO: 14581 - DNA, 15 bp, Homo sapiens
ttgggtcccgcccca

SEQ ID NO: 14582 - DNA, 15 bp, Homo sapiens
cttgggtcccgcccc

SEQ ID NO: 14583 - DNA, 15 bp, Homo sapiens
ccttgggtcccgccc

SEQ ID NO: 14584 - DNA, 15 bp, Homo sapiens
gccttgggtcccgcc

SEQ ID NO: 14585 - DNA, 15 bp, Homo sapiens
tgccttgggtcccgc

SEQ ID NO: 14586 - DNA, 15 bp, Homo sapiens
ctgccttgggtcccg

SEQ ID NO: 14587 - DNA, 15 bp, Homo sapiens
actgccttgggtccc

SEQ ID NO: 14588 - DNA, 15 bp, Homo sapiens
cactgccttgggtcc

SEQ ID NO: 14589 - DNA, 15 bp, Homo sapiens
gcactgccttgggtc

SEQ ID NO: 14590 - DNA, 15 bp, Homo sapiens
ggcactgccttgggt

SEQ ID NO: 14591 - DNA, 15 bp, Homo sapiens
tggcactgccttggg

SEQ ID NO: 14592 - DNA, 15 bp, Homo sapiens
ctggcactgccttgg

SEQ ID NO: 14593 - DNA, 15 bp, Homo sapiens
gctggcactgccttg

SEQ ID NO: 14594 - DNA, 15 bp, Homo sapiens
agctggcactgcctt

SEQ ID NO: 14595 - DNA, 15 bp, Homo sapiens
cagctggcactgcct

SEQ ID NO: 14596 - DNA, 15 bp, Homo sapiens
ccagctggcactgcc

SEQ ID NO: 14597 - DNA, 15 bp, Homo sapiens
accagctggcactgc

SEQ ID NO: 14598 - DNA, 15 bp, Homo sapiens
gaccagctggcactg

SEQ ID NO: 14599 - DNA, 15 bp, Homo sapiens
ggaccagctggcact

SEQ ID NO: 14600 - DNA, 15 bp, Homo sapiens
gggaccagctggcac

SEQ ID NO: 14601 - DNA, 15 bp, Homo sapiens
cgggaccagctggca

SEQ ID NO: 14602 - DNA, 15 bp, Homo sapiens
tcgggaccagctggc

SEQ ID NO: 14603 - DNA, 15 bp, Homo sapiens
ttcgggaccagctgg

SEQ ID NO: 14604 - DNA, 15 bp, Homo sapiens
attcgggaccagctg

SEQ ID NO: 14605 - DNA, 15 bp, Homo sapiens
aattcgggaccagct

SEQ ID NO: 14606 - DNA, 15 bp, Homo sapiens
aaattcgggaccagc

SEQ ID NO: 14607 - DNA, 15 bp, Homo sapiens
caaattcgggaccag

SEQ ID NO: 14608 - DNA, 15 bp, Homo sapiens
ccaaattcgggacca

SEQ ID NO: 14609 - DNA, 15 bp, Homo sapiens
gccaaattcgggacc

SEQ ID NO: 14610 - DNA, 15 bp, Homo sapiens
agccaaattcgggac

SEQ ID NO: 14611 - DNA, 15 bp, Homo sapiens
gagccaaattcggga

SEQ ID NO: 14612 - DNA, 15 bp, Homo sapiens
ggagccaaattcggg

SEQ ID NO: 14613 - DNA, 15 bp, Homo sapiens
gggagccaaattcgg

SEQ ID NO: 14614 - DNA, 15 bp, Homo sapiens
tgggagccaaattcg

SEQ ID NO: 14615 - DNA, 15 bp, Homo sapiens
ttgggagccaaattc

SEQ ID NO: 14616 - DNA, 15 bp, Homo sapiens
attgggagccaaatt

SEQ ID NO: 14617 - DNA, 15 bp, Homo sapiens
cattgggagccaaat

SEQ ID NO: 14618 - DNA, 15 bp, Homo sapiens
ccattgggagccaaa

SEQ ID NO: 14619 - DNA, 15 bp, Homo sapiens
gccattgggagccaa

SEQ ID NO: 14620 - DNA, 15 bp, Homo sapiens
ggccattgggagcca

SEQ ID NO: 14621 - DNA, 15 bp, Homo sapiens
gggccattgggagcc

SEQ ID NO: 14622 - DNA, 15 bp, Homo sapiens
cgggccattgggagc

SEQ ID NO: 14623 - DNA, 15 bp, Homo sapiens
ccgggccattgggag

SEQ ID NO: 14624 - DNA, 15 bp, Homo sapiens
tccgggccattggga

SEQ ID NO: 14625 - DNA, 15 bp, Homo sapiens
ctccgggccattggg

SEQ ID NO: 14626 - DNA, 15 bp, Homo sapiens
cctccgggccattgg

SEQ ID NO: 14627 - DNA, 15 bp, Homo sapiens
tcctccgggccattg

SEQ ID NO: 14628 - DNA, 15 bp, Homo sapiens
ctcctccgggccatt

SEQ ID NO: 14629 - DNA, 15 bp, Homo sapiens
tctcctccgggccat

SEQ ID NO: 14630 - DNA, 15 bp, Homo sapiens
ttctcctccgggcca

SEQ ID NO: 14631 - DNA, 15 bp, Homo sapiens
attctcctccgggcc

SEQ ID NO: 14632 - DNA, 15 bp, Homo sapiens
tattctcctccgggc

SEQ ID NO: 14633 - DNA, 15 bp, Homo sapiens
ctattctcctccggg

SEQ ID NO: 14634 - DNA, 15 bp, Homo sapiens
gctattctcctccgg

SEQ ID NO: 14635 - DNA, 15 bp, Homo sapiens
agctattctcctccg

SEQ ID NO: 14636 - DNA, 15 bp, Homo sapiens
cagctattctcctcc

SEQ ID NO: 14637 - DNA, 15 bp, Homo sapiens
tcagctattctcctc

SEQ ID NO: 14638 - DNA, 15 bp, Homo sapiens
ctcagctattctcct

SEQ ID NO: 14639 - DNA, 15 bp, Homo sapiens
actcagctattctcc

SEQ ID NO: 14640 - DNA, 15 bp, Homo sapiens
gactcagctattctc

SEQ ID NO: 14641 - DNA, 15 bp, Homo sapiens
tgactcagctattct

SEQ ID NO: 14642 - DNA, 15 bp, Homo sapiens
gtgactcagctattc

SEQ ID NO: 14643 - DNA, 15 bp, Homo sapiens
ggtgactcagctatt

SEQ ID NO: 14644 - DNA, 15 bp, Homo sapiens
aggtgactcagctat

SEQ ID NO: 14645 - DNA, 15 bp, Homo sapiens
taggtgactcagcta

SEQ ID NO: 14646 - DNA, 15 bp, Homo sapiens
ataggtgactcagct

SEQ ID NO: 14647 - DNA, 15 bp, Homo sapiens
cataggtgactcagc

SEQ ID NO: 14648 - DNA, 15 bp, Homo sapiens
ccataggtgactcag

SEQ ID NO: 14649 - DNA, 15 bp, Homo sapiens
cccataggtgactca

SEQ ID NO: 14650 - DNA, 15 bp, Homo sapiens
ccccataggtgactc

SEQ ID NO: 14651 - DNA, 15 bp, Homo sapiens
cccccataggtgact

SEQ ID NO: 14652 - DNA, 15 bp, Homo sapiens
tcccccataggtgac

SEQ ID NO: 14653 - DNA, 15 bp, Homo sapiens
atcccccataggtga

SEQ ID NO: 14654 - DNA, 15 bp, Homo sapiens
tatcccccataggtg

SEQ ID NO: 14655 - DNA, 15 bp, Homo sapiens
ctatcccccataggt

SEQ ID NO: 14656 - DNA, 15 bp, Homo sapiens
cctatcccccatagg

SEQ ID NO: 14657 - DNA, 15 bp, Homo sapiens
ccctatcccccatag

SEQ ID NO: 14658 - DNA, 15 bp, Homo sapiens
tccctatcccccata

SEQ ID NO: 14659 - DNA, 15 bp, Homo sapiens
ctccctatcccccat

SEQ ID NO: 14660 - DNA, 15 bp, Homo sapiens
cctccctatccccca

SEQ ID NO: 14661 - DNA, 15 bp, Homo sapiens
tcctccctatccccc

SEQ ID NO: 14662 - DNA, 15 bp, Homo sapiens
ttcctccctatcccc

SEQ ID NO: 14663 - DNA, 15 bp, Homo sapiens
cttcctccctatccc

SEQ ID NO: 14664 - DNA, 15 bp, Homo sapiens
acttcctccctatcc

SEQ ID NO: 14665 - DNA, 15 bp, Homo sapiens
cacttcctccctatc

SEQ ID NO: 14666 - DNA, 15 bp, Homo sapiens
tcacttcctccctat

SEQ ID NO: 14667 - DNA, 15 bp, Homo sapiens
ttcacttcctcccta

SEQ ID NO: 14668 - DNA, 15 bp, Homo sapiens
attcacttcctccct

SEQ ID NO: 14669 - DNA, 15 bp, Homo sapiens
gattcacttcctccc

SEQ ID NO: 14670 - DNA, 15 bp, Homo sapiens
tgattcacttcctcc

SEQ ID NO: 14671 - DNA, 15 bp, Homo sapiens
ctgattcacttcctc

SEQ ID NO: 14672 - DNA, 15 bp, Homo sapiens
tctgattcacttcct

SEQ ID NO: 14673 - DNA, 15 bp, Homo sapiens
atctgattcacttcc

SEQ ID NO: 14674 - DNA, 15 bp, Homo sapiens
catctgattcacttc

SEQ ID NO: 14675 - DNA, 15 bp, Homo sapiens
acatctgattcactt

SEQ ID NO: 14676 - DNA, 15 bp, Homo sapiens
gacatctgattcact

SEQ ID NO: 14677 - DNA, 15 bp, Homo sapiens
tgacatctgattcac

SEQ ID NO: 14678 - DNA, 15 bp, Homo sapiens
ttgacatctgattca

SEQ ID NO: 14679 - DNA, 15 bp, Homo sapiens
attgacatctgattc

SEQ ID NO: 14680 - DNA, 15 bp, Homo sapiens
cattgacatctgatt

SEQ ID NO: 14681 - DNA, 15 bp, Homo sapiens
gcattgacatctgat

SEQ ID NO: 14682 - DNA, 15 bp, Homo sapiens
agcattgacatctga

SEQ ID NO: 14683 - DNA, 15 bp, Homo sapiens
cagcattgacatctg

SEQ ID NO: 14684 - DNA, 15 bp, Homo sapiens
gcagcattgacatct

SEQ ID NO: 14685 - DNA, 15 bp, Homo sapiens
tgcagcattgacatc

SEQ ID NO: 14686 - DNA, 15 bp, Homo sapiens
ttgcagcattgacat

SEQ ID NO: 14687 - DNA, 15 bp, Homo sapiens
tttgcagcattgaca

SEQ ID NO: 14688 - DNA, 15 bp, Homo sapiens
atttgcagcattgac

SEQ ID NO: 14689 - DNA, 15 bp, Homo sapiens
gatttgcagcattga

SEQ ID NO: 14690 - DNA, 15 bp, Homo sapiens
ggatttgcagcattg

SEQ ID NO: 14691 - DNA, 15 bp, Homo sapiens
tggatttgcagcatt

SEQ ID NO: 14692 - DNA, 15 bp, Homo sapiens
ttggatttgcagcat

SEQ ID NO: 14693 - DNA, 15 bp, Homo sapiens
tttggatttgcagca

SEQ ID NO: 14694 - DNA, 15 bp, Homo sapiens
ttttggatttgcagc

SEQ ID NO: 14695 - DNA, 15 bp, Homo sapiens
cttttggatttgcag

SEQ ID NO: 14696 - DNA, 15 bp, Homo sapiens
ccttttggatttgca

SEQ ID NO: 14697 - DNA, 15 bp, Homo sapiens
cccttttggatttgc

SEQ ID NO: 14698 - DNA, 15 bp, Homo sapiens
gcccttttggatttg

SEQ ID NO: 14699 - DNA, 15 bp, Homo sapiens
tgcccttttggattt

SEQ ID NO: 14700 - DNA, 15 bp, Homo sapiens
atgcccttttggatt

SEQ ID NO: 14701 - DNA, 15 bp, Homo sapiens
tatgcccttttggat

SEQ ID NO: 14702 - DNA, 15 bp, Homo sapiens
gtatgcccttttgga

SEQ ID NO: 14703 - DNA, 15 bp, Homo sapiens
ggtatgcccttttgg

SEQ ID NO: 14704 - DNA, 15 bp, Homo sapiens
gggtatgcccttttg

SEQ ID NO: 14705 - DNA, 15 bp, Homo sapiens
agggtatgccctttt

SEQ ID NO: 14706 - DNA, 15 bp, Homo sapiens
tagggtatgcccttt

SEQ ID NO: 14707 - DNA, 15 bp, Homo sapiens
ctagggtatgccctt

SEQ ID NO: 14708 - DNA, 15 bp, Homo sapiens
cctagggtatgccct

SEQ ID NO: 14709 - DNA, 15 bp, Homo sapiens
tcctagggtatgccc

SEQ ID NO: 14710 - DNA, 15 bp, Homo sapiens
ctcctagggtatgcc

SEQ ID NO: 14711 - DNA, 15 bp, Homo sapiens
tctcctagggtatgc

SEQ ID NO: 14712 - DNA, 15 bp, Homo sapiens
gtctcctagggtatg

SEQ ID NO: 14713 - DNA, 15 bp, Homo sapiens
ggtctcctagggtat

SEQ ID NO: 14714 - DNA, 15 bp, Homo sapiens
tggtctcctagggta

SEQ ID NO: 14715 - DNA, 15 bp, Homo sapiens
ctggtctcctagggt

SEQ ID NO: 14716 - DNA, 15 bp, Homo sapiens
gctggtctcctaggg

SEQ ID NO: 14717 - DNA, 15 bp, Homo sapiens
ggctggtctcctagg

SEQ ID NO: 14718 - DNA, 15 bp, Homo sapiens
aggctggtctcctag

SEQ ID NO: 14719 - DNA, 15 bp, Homo sapiens
gaggctggtctccta

SEQ ID NO: 14720 - DNA, 15 bp, Homo sapiens
ggaggctggtctcct

SEQ ID NO: 14721 - DNA, 15 bp, Homo sapiens
tggaggctggtctcc

SEQ ID NO: 14722 - DNA, 15 bp, Homo sapiens
gtggaggctggtctc

SEQ ID NO: 14723 - DNA, 15 bp, Homo sapiens
agtggaggctggtct

SEQ ID NO: 14724 - DNA, 15 bp, Homo sapiens
gagtggaggctggtc

SEQ ID NO: 14725 - DNA, 15 bp, Homo sapiens
ggagtggaggctggt

SEQ ID NO: 14726 - DNA, 15 bp, Homo sapiens
aggagtggaggctgg

SEQ ID NO: 14727 - DNA, 15 bp, Homo sapiens
caggagtggaggctg

SEQ ID NO: 14728 - DNA, 15 bp, Homo sapiens
tcaggagtggaggct

SEQ ID NO: 14729 - DNA, 15 bp, Homo sapiens
gtcaggagtggaggc

SEQ ID NO: 14730 - DNA, 15 bp, Homo sapiens
ggtcaggagtggagg

SEQ ID NO: 14731 - DNA, 15 bp, Homo sapiens
gggtcaggagtggag

SEQ ID NO: 14732 - DNA, 15 bp, Homo sapiens
ggggtcaggagtgga

SEQ ID NO: 14733 - DNA, 15 bp, Homo sapiens
gggggtcaggagtgg

SEQ ID NO: 14734 - DNA, 15 bp, Homo sapiens
tgggggtcaggagtg

SEQ ID NO: 14735 - DNA, 15 bp, Homo sapiens
atgggggtcaggagt

SEQ ID NO: 14736 - DNA, 15 bp, Homo sapiens
gatgggggtcaggag

SEQ ID NO: 14737 - DNA, 15 bp, Homo sapiens
ggatgggggtcagga

SEQ ID NO: 14738 - DNA, 15 bp, Homo sapiens
tggatgggggtcagg

SEQ ID NO: 14739 - DNA, 15 bp, Homo sapiens
ctggatgggggtcag

SEQ ID NO: 14740 - DNA, 15 bp, Homo sapiens
tctggatgggggtca

SEQ ID NO: 14741 - DNA, 15 bp, Homo sapiens
ctctggatgggggtc

SEQ ID NO: 14742 - DNA, 15 bp, Homo sapiens
tctctggatgggggt

SEQ ID NO: 14743 - DNA, 15 bp, Homo sapiens
atctctggatggggg

SEQ ID NO: 14744 - DNA, 15 bp, Homo sapiens
tatctctggatgggg

SEQ ID NO: 14745 - DNA, 15 bp, Homo sapiens
gtatctctggatggg

SEQ ID NO: 14746 - DNA, 15 bp, Homo sapiens
tgtatctctggatgg

SEQ ID NO: 14747 - DNA, 15 bp, Homo sapiens
gtgtatctctggatg

SEQ ID NO: 14748 - DNA, 15 bp, Homo sapiens
tgtgtatctctggat

SEQ ID NO: 14749 - DNA, 15 bp, Homo sapiens
atgtgtatctctgga

SEQ ID NO: 14750 - DNA, 15 bp, Homo sapiens
gatgtgtatctctgg

SEQ ID NO: 14751 - DNA, 15 bp, Homo sapiens
agatgtgtatctctg

SEQ ID NO: 14752 - DNA, 15 bp, Homo sapiens
tagatgtgtatctct

SEQ ID NO: 14753 - DNA, 15 bp, Homo sapiens
atagatgtgtatctc

SEQ ID NO: 14754 - DNA, 15 bp, Homo sapiens
gatagatgtgtatct

SEQ ID NO: 14755 - DNA, 15 bp, Homo sapiens
ggatagatgtgtatc

SEQ ID NO: 14756 - DNA, 15 bp, Homo sapiens
tggatagatgtgtat

SEQ ID NO: 14757 - DNA, 15 bp, Homo sapiens
ctggatagatgtgta

SEQ ID NO: 14758 - DNA, 15 bp, Homo sapiens
gctggatagatgtgt

SEQ ID NO: 14759 - DNA, 15 bp, Homo sapiens
agctggatagatgtg

SEQ ID NO: 14760 - DNA, 15 bp, Homo sapiens
aagctggatagatgt

SEQ ID NO: 14761 - DNA, 15 bp, Homo sapiens
caagctggatagatg

SEQ ID NO: 14762 - DNA, 15 bp, Homo sapiens
gcaagctggatagat

SEQ ID NO: 14763 - DNA, 15 bp, Homo sapiens
cgcaagctggataga

SEQ ID NO: 14764 - DNA, 15 bp, Homo sapiens
acgcaagctggatag

SEQ ID NO: 14765 - DNA, 15 bp, Homo sapiens
aacgcaagctggata

SEQ ID NO: 14766 - DNA, 15 bp, Homo sapiens
gaacgcaagctggat

SEQ ID NO: 14767 - DNA, 15 bp, Homo sapiens
agaacgcaagctgga

SEQ ID NO: 14768 - DNA, 15 bp, Homo sapiens
gagaacgcaagctgg

SEQ ID NO: 14769 - DNA, 15 bp, Homo sapiens
tgagaacgcaagctg

SEQ ID NO: 14770 - DNA, 15 bp, Homo sapiens
gtgagaacgcaagct

SEQ ID NO: 14771 - DNA, 15 bp, Homo sapiens
cgtgagaacgcaagc

SEQ ID NO: 14772 - DNA, 15 bp, Homo sapiens
acgtgagaacgcaag

SEQ ID NO: 14773 - DNA, 15 bp, Homo sapiens
aacgtgagaacgcaa

SEQ ID NO: 14774 - DNA, 15 bp, Homo sapiens
gaacgtgagaacgca

SEQ ID NO: 14775 - DNA, 15 bp, Homo sapiens
tgaacgtgagaacgc

SEQ ID NO: 14776 - DNA, 15 bp, Homo sapiens
ctgaacgtgagaacg

SEQ ID NO: 14777 - DNA, 15 bp, Homo sapiens
actgaacgtgagaac

SEQ ID NO: 14778 - DNA, 15 bp, Homo sapiens
gactgaacgtgagaa

SEQ ID NO: 14779 - DNA, 15 bp, Homo sapiens
tgactgaacgtgaga

SEQ ID NO: 14780 - DNA, 15 bp, Homo sapiens
atgactgaacgtgag

SEQ ID NO: 14781 - DNA, 15 bp, Homo sapiens
aatgactgaacgtga

SEQ ID NO: 14782 - DNA, 15 bp, Homo sapiens
gaatgactgaacgtg

SEQ ID NO: 14783 - DNA, 15 bp, Homo sapiens
tgaatgactgaacgt

SEQ ID NO: 14784 - DNA, 15 bp, Homo sapiens
ttgaatgactgaacg

SEQ ID NO: 14785 - DNA, 15 bp, Homo sapiens
gttgaatgactgaac

SEQ ID NO: 14786 - DNA, 15 bp, Homo sapiens
tgttgaatgactgaa

SEQ ID NO: 14787 - DNA, 15 bp, Homo sapiens
ttgttgaatgactga

SEQ ID NO: 14788 - DNA, 15 bp, Homo sapiens
tttgttgaatgactg

SEQ ID NO: 14789 - DNA, 15 bp, Homo sapiens
gtttgttgaatgact

SEQ ID NO: 14790 - DNA, 15 bp, Homo sapiens
tgtttgttgaatgac

SEQ ID NO: 14791 - DNA, 15 bp, Homo sapiens
gtgtttgttgaatga

SEQ ID NO: 14792 - DNA, 15 bp, Homo sapiens
ggtgtttgttgaatg

SEQ ID NO: 14793 - DNA, 15 bp, Homo sapiens
cggtgtttgttgaat

SEQ ID NO: 14794 - DNA, 15 bp, Homo sapiens
tcggtgtttgttgaa

SEQ ID NO: 14795 - DNA, 15 bp, Homo sapiens
ctcggtgtttgttga

SEQ ID NO: 14796 - DNA, 15 bp, Homo sapiens
gctcggtgtttgttg

SEQ ID NO: 14797 - DNA, 15 bp, Homo sapiens
tgctcggtgtttgtt

SEQ ID NO: 14798 - DNA, 15 bp, Homo sapiens
gtgctcggtgtttgt

SEQ ID NO: 14799 - DNA, 15 bp, Homo sapiens
ggtgctcggtgtttg

SEQ ID NO: 14800 - DNA, 15 bp, Homo sapiens
aggtgctcggtgttt

SEQ ID NO: 14801 - DNA, 15 bp, Homo sapiens
taggtgctcggtgtt

SEQ ID NO: 14802 - DNA, 15 bp, Homo sapiens
gtaggtgctcggtgt

SEQ ID NO: 14803 - DNA, 15 bp, Homo sapiens
agtaggtgctcggtg

SEQ ID NO: 14804 - DNA, 15 bp, Homo sapiens
tagtaggtgctcggt

SEQ ID NO: 14805 - DNA, 15 bp, Homo sapiens
atagtaggtgctcgg

SEQ ID NO: 14806 - DNA, 15 bp, Homo sapiens
catagtaggtgctcg

SEQ ID NO: 14807 - DNA, 15 bp, Homo sapiens
acatagtaggtgctc

SEQ ID NO: 14808 - DNA, 15 bp, Homo sapiens
tacatagtaggtgct

SEQ ID NO: 14809 - DNA, 15 bp, Homo sapiens
gtacatagtaggtgc

SEQ ID NO: 14810 - DNA, 15 bp, Homo sapiens
tgtacatagtaggtg

SEQ ID NO: 14811 - DNA, 15 bp, Homo sapiens
ctgtacatagtaggt

SEQ ID NO: 14812 - DNA, 15 bp, Homo sapiens
cctgtacatagtagg

SEQ ID NO: 14813 - DNA, 15 bp, Homo sapiens
acctgtacatagtag

SEQ ID NO: 14814 - DNA, 15 bp, Homo sapiens
gacctgtacatagta

SEQ ID NO: 14815 - DNA, 15 bp, Homo sapiens
cgacctgtacatagt

SEQ ID NO: 14816 - DNA, 15 bp, Homo sapiens
gcgacctgtacatag

SEQ ID NO: 14817 - DNA, 15 bp, Homo sapiens
agcgacctgtacata

SEQ ID NO: 14818 - DNA, 15 bp, Homo sapiens
cagcgacctgtacat

SEQ ID NO: 14819 - DNA, 15 bp, Homo sapiens
acagcgacctgtaca

SEQ ID NO: 14820 - DNA, 15 bp, Homo sapiens
aacagcgacctgtac

SEQ ID NO: 14821 - DNA, 15 bp, Homo sapiens
gaacagcgacctgta

SEQ ID NO: 14822 - DNA, 15 bp, Homo sapiens
agaacagcgacctgt

SEQ ID NO: 14823 - DNA, 15 bp, Homo sapiens
tagaacagcgacctg

SEQ ID NO: 14824 - DNA, 15 bp, Homo sapiens
ctagaacagcgacct

SEQ ID NO: 14825 - DNA, 15 bp, Homo sapiens
tctagaacagcgacc

SEQ ID NO: 14826 - DNA, 15 bp, Homo sapiens
gtctagaacagcgac

SEQ ID NO: 14827 - DNA, 15 bp, Homo sapiens
tgtctagaacagcga

SEQ ID NO: 14828 - DNA, 15 bp, Homo sapiens
gtgtctagaacagcg

SEQ ID NO: 14829 - DNA, 15 bp, Homo sapiens
agtgtctagaacagc

SEQ ID NO: 14830 - DNA, 15 bp, Homo sapiens
tagtgtctagaacag

SEQ ID NO: 14831 - DNA, 15 bp, Homo sapiens
ctagtgtctagaaca

SEQ ID NO: 14832 - DNA, 15 bp, Homo sapiens
cctagtgtctagaac

SEQ ID NO: 14833 - DNA, 15 bp, Homo sapiens
ccctagtgtctagaa

SEQ ID NO: 14834 - DNA, 15 bp, Homo sapiens
gccctagtgtctaga

SEQ ID NO: 14835 - DNA, 15 bp, Homo sapiens
agccctagtgtctag

SEQ ID NO: 14836 - DNA, 15 bp, Homo sapiens
tagccctagtgtcta

SEQ ID NO: 14837 - DNA, 15 bp, Homo sapiens
gtagccctagtgtct

SEQ ID NO: 14838 - DNA, 15 bp, Homo sapiens
agtagccctagtgtc

SEQ ID NO: 14839 - DNA, 15 bp, Homo sapiens
aagtagccctagtgt

SEQ ID NO: 14840 - DNA, 15 bp, Homo sapiens
gaagtagccctagtg

SEQ ID NO: 14841 - DNA, 15 bp, Homo sapiens
cgaagtagccctagt

SEQ ID NO: 14842 - DNA, 15 bp, Homo sapiens
acgaagtagccctag

SEQ ID NO: 14843 - DNA, 15 bp, Homo sapiens
cacgaagtagcccta

SEQ ID NO: 14844 - DNA, 15 bp, Homo sapiens
ccacgaagtagccct

SEQ ID NO: 14845 - DNA, 15 bp, Homo sapiens
tccacgaagtagccc

SEQ ID NO: 14846 - DNA, 15 bp, Homo sapiens
ttccacgaagtagcc

SEQ ID NO: 14847 - DNA, 15 bp, Homo sapiens
gttccacgaagtagc

SEQ ID NO: 14848 - DNA, 15 bp, Homo sapiens
tgttccacgaagtag

SEQ ID NO: 14849 - DNA, 15 bp, Homo sapiens
ttgttccacgaagta

SEQ ID NO: 14850 - DNA, 15 bp, Homo sapiens
tttgttccacgaagt

SEQ ID NO: 14851 - DNA, 15 bp, Homo sapiens
gtttgttccacgaag

SEQ ID NO: 14852 - DNA, 15 bp, Homo sapiens
agtttgttccacgaa

SEQ ID NO: 14853 - DNA, 15 bp, Homo sapiens
cagtttgttccacga

SEQ ID NO: 14854 - DNA, 15 bp, Homo sapiens
ccagtttgttccacg

SEQ ID NO: 14855 - DNA, 15 bp, Homo sapiens
tccagtttgttccac

SEQ ID NO: 14856 - DNA, 15 bp, Homo sapiens
atccagtttgttcca

SEQ ID NO: 14857 - DNA, 15 bp, Homo sapiens
tatccagtttgttcc

SEQ ID NO: 14858 - DNA, 15 bp, Homo sapiens
ttatccagtttgttc

SEQ ID NO: 14859 - DNA, 15 bp, Homo sapiens
tttatccagtttgtt

SEQ ID NO: 14860 - DNA, 15 bp, Homo sapiens
ctttatccagtttgt

SEQ ID NO: 14861 - DNA, 15 bp, Homo sapiens
cctttatccagtttg

SEQ ID NO: 14862 - DNA, 15 bp, Homo sapiens
acctttatccagttt

SEQ ID NO: 14863 - DNA, 15 bp, Homo sapiens
gacctttatccagtt

SEQ ID NO: 14864 - DNA, 15 bp, Homo sapiens
ggacctttatccagt

SEQ ID NO: 14865 - DNA, 15 bp, Homo sapiens
gggacctttatccag

SEQ ID NO: 14866 - DNA, 15 bp, Homo sapiens
agggacctttatcca

SEQ ID NO: 14867 - DNA, 15 bp, Homo sapiens
cagggacctttatcc

SEQ ID NO: 14868 - DNA, 15 bp, Homo sapiens
gcagggacctttatc

SEQ ID NO: 14869 - DNA, 15 bp, Homo sapiens
ggcagggacctttat

SEQ ID NO: 14870 - DNA, 15 bp, Homo sapiens
gggcagggaccttta

SEQ ID NO: 14871 - DNA, 15 bp, Homo sapiens
agggcagggaccttt

SEQ ID NO: 14872 - DNA, 15 bp, Homo sapiens
gagggcagggacctt

SEQ ID NO: 14873 - DNA, 15 bp, Homo sapiens
tgagggcagggacct

SEQ ID NO: 14874 - DNA, 15 bp, Homo sapiens
ctgagggcagggacc

SEQ ID NO: 14875 - DNA, 15 bp, Homo sapiens
cctgagggcagggac

SEQ ID NO: 14876 - DNA, 15 bp, Homo sapiens
ccctgagggcaggga

SEQ ID NO: 14877 - DNA, 15 bp, Homo sapiens
tccctgagggcaggg

SEQ ID NO: 14878 - DNA, 15 bp, Homo sapiens
ctccctgagggcagg

SEQ ID NO: 14879 - DNA, 15 bp, Homo sapiens
gctccctgagggcag

SEQ ID NO: 14880 - DNA, 15 bp, Homo sapiens
ggctccctgagggca

SEQ ID NO: 14881 - DNA, 15 bp, Homo sapiens
cggctccctgagggc

SEQ ID NO: 14882 - DNA, 15 bp, Homo sapiens
ccggctccctgaggg

SEQ ID NO: 14883 - DNA, 15 bp, Homo sapiens
gccggctccctgagg

SEQ ID NO: 14884 - DNA, 15 bp, Homo sapiens
tgccggctccctgag

SEQ ID NO: 14885 - DNA, 15 bp, Homo sapiens
ttgccggctccctga

SEQ ID NO: 14886 - DNA, 15 bp, Homo sapiens
cttgccggctccctg

SEQ ID NO: 14887 - DNA, 15 bp, Homo sapiens
gcttgccggctccct

SEQ ID NO: 14888 - DNA, 15 bp, Homo sapiens
agcttgccggctccc

SEQ ID NO: 14889 - DNA, 15 bp, Homo sapiens
tagcttgccggctcc

SEQ ID NO: 14890 - DNA, 15 bp, Homo sapiens
ctagcttgccggctc

SEQ ID NO: 14891 - DNA, 15 bp, Homo sapiens
gctagcttgccggct

SEQ ID NO: 14892 - DNA, 15 bp, Homo sapiens
tgctagcttgccggc

SEQ ID NO: 14893 - DNA, 15 bp, Homo sapiens
ctgctagcttgccgg

SEQ ID NO: 14894 - DNA, 15 bp, Homo sapiens
tctgctagcttgccg

SEQ ID NO: 14895 - DNA, 15 bp, Homo sapiens
ctctgctagcttgcc

SEQ ID NO: 14896 - DNA, 15 bp, Homo sapiens
cctctgctagcttgc

SEQ ID NO: 14897 - DNA, 15 bp, Homo sapiens
tcctctgctagcttg

SEQ ID NO: 14898 - DNA, 15 bp, Homo sapiens
ctcctctgctagctt

SEQ ID NO: 14899 - DNA, 15 bp, Homo sapiens
tctcctctgctagct

SEQ ID NO: 14900 - DNA, 15 bp, Homo sapiens
ctctcctctgctagc

SEQ ID NO: 14901 - DNA, 15 bp, Homo sapiens
tctctcctctgctag

SEQ ID NO: 14902 - DNA, 15 bp, Homo sapiens
ctctctcctctgcta

SEQ ID NO: 14903 - DNA, 15 bp, Homo sapiens
tctctctcctctgct

SEQ ID NO: 14904 - DNA, 15 bp, Homo sapiens
atctctctcctctgc

SEQ ID NO: 14905 - DNA, 15 bp, Homo sapiens
gatctctctcctctg

SEQ ID NO: 14906 - DNA, 15 bp, Homo sapiens
tgatctctctcctct

SEQ ID NO: 14907 - DNA, 15 bp, Homo sapiens
atgatctctctcctc

SEQ ID NO: 14908 - DNA, 15 bp, Homo sapiens
catgatctctctcct

SEQ ID NO: 14909 - DNA, 15 bp, Homo sapiens
tcatgatctctctcc

SEQ ID NO: 14910 - DNA, 15 bp, Homo sapiens
ttcatgatctctctc

SEQ ID NO: 14911 - DNA, 15 bp, Homo sapiens
attcatgatctctct

SEQ ID NO: 14912 - DNA, 15 bp, Homo sapiens
tattcatgatctctc

SEQ ID NO: 14913 - DNA, 15 bp, Homo sapiens
ctattcatgatctct

SEQ ID NO: 14914 - DNA, 15 bp, Homo sapiens
cctattcatgatctc

SEQ ID NO: 14915 - DNA, 15 bp, Homo sapiens
tcctattcatgatct

SEQ ID NO: 14916 - DNA, 15 bp, Homo sapiens
atcctattcatgatc

SEQ ID NO: 14917 - DNA, 15 bp, Homo sapiens
gatcctattcatgat

SEQ ID NO: 14918 - DNA, 15 bp, Homo sapiens
ggatcctattcatga

SEQ ID NO: 14919 - DNA, 15 bp, Homo sapiens
aggatcctattcatg

SEQ ID NO: 14920 - DNA, 15 bp, Homo sapiens
caggatcctattcat

SEQ ID NO: 14921 - DNA, 15 bp, Homo sapiens
tcaggatcctattca

SEQ ID NO: 14922 - DNA, 15 bp, Homo sapiens
ttcaggatcctattc

SEQ ID NO: 14923 - DNA, 15 bp, Homo sapiens
attcaggatcctatt

SEQ ID NO: 14924 - DNA, 15 bp, Homo sapiens
tattcaggatcctat

SEQ ID NO: 14925 - DNA, 15 bp, Homo sapiens
gtattcaggatccta

SEQ ID NO: 14926 - DNA, 15 bp, Homo sapiens
ggtattcaggatcct

SEQ ID NO: 14927 - DNA, 15 bp, Homo sapiens
tggtattcaggatcc

SEQ ID NO: 14928 - DNA, 15 bp, Homo sapiens
atggtattcaggatc

SEQ ID NO: 14929 - DNA, 15 bp, Homo sapiens
gatggtattcaggat

SEQ ID NO: 14930 - DNA, 15 bp, Homo sapiens
ggatggtattcagga

SEQ ID NO: 14931 - DNA, 15 bp, Homo sapiens
tggatggtattcagg

SEQ ID NO: 14932 - DNA, 15 bp, Homo sapiens
ctggatggtattcag

SEQ ID NO: 14933 - DNA, 15 bp, Homo sapiens
tctggatggtattca

SEQ ID NO: 14934 - DNA, 15 bp, Homo sapiens
gtctggatggtattc

SEQ ID NO: 14935 - DNA, 15 bp, Homo sapiens
agtctggatggtatt

SEQ ID NO: 14936 - DNA, 15 bp, Homo sapiens
cagtctggatggtat

SEQ ID NO: 14937 - DNA, 15 bp, Homo sapiens
gcagtctggatggta

SEQ ID NO: 14938 - DNA, 15 bp, Homo sapiens
tgcagtctggatggt

SEQ ID NO: 14939 - DNA, 15 bp, Homo sapiens
ctgcagtctggatgg

SEQ ID NO: 14940 - DNA, 15 bp, Homo sapiens
gctgcagtctggatg

SEQ ID NO: 14941 - DNA, 15 bp, Homo sapiens
ggctgcagtctggat

SEQ ID NO: 14942 - DNA, 15 bp, Homo sapiens
tggctgcagtctgga

SEQ ID NO: 14943 - DNA, 15 bp, Homo sapiens
ctggctgcagtctgg

SEQ ID NO: 14944 - DNA, 15 bp, Homo sapiens
cctggctgcagtctg

SEQ ID NO: 14945 - DNA, 15 bp, Homo sapiens
acctggctgcagtct

SEQ ID NO: 14946 - DNA, 15 bp, Homo sapiens
cacctggctgcagtc

SEQ ID NO: 14947 - DNA, 15 bp, Homo sapiens
ccacctggctgcagt

SEQ ID NO: 14948 - DNA, 15 bp, Homo sapiens
cccacctggctgcag

SEQ ID NO: 14949 - DNA, 15 bp, Homo sapiens
ccccacctggctgca

SEQ ID NO: 14950 - DNA, 15 bp, Homo sapiens
tccccacctggctgc

SEQ ID NO: 14951 - DNA, 15 bp, Homo sapiens
atccccacctggctg

SEQ ID NO: 14952 - DNA, 15 bp, Homo sapiens
gatccccacctggct

SEQ ID NO: 14953 - DNA, 15 bp, Homo sapiens
tgatccccacctggc

SEQ ID NO: 14954 - DNA, 15 bp, Homo sapiens
ctgatccccacctgg

SEQ ID NO: 14955 - DNA, 15 bp, Homo sapiens
cctgatccccacctg

SEQ ID NO: 14956 - DNA, 15 bp, Homo sapiens
tcctgatccccacct

SEQ ID NO: 14957 - DNA, 15 bp, Homo sapiens
ctcctgatccccacc

SEQ ID NO: 14958 - DNA, 15 bp, Homo sapiens
tctcctgatccccac

SEQ ID NO: 14959 - DNA, 15 bp, Homo sapiens
ctctcctgatcccca

SEQ ID NO: 14960 - DNA, 15 bp, Homo sapiens
cctctcctgatcccc

SEQ ID NO: 14961 - DNA, 15 bp, Homo sapiens
ccctctcctgatccc

SEQ ID NO: 14962 - DNA, 15 bp, Homo sapiens
gccctctcctgatcc

SEQ ID NO: 14963 - DNA, 15 bp, Homo sapiens
agccctctcctgatc

SEQ ID NO: 14964 - DNA, 15 bp, Homo sapiens
cagccctctcctgat

SEQ ID NO: 14965 - DNA, 15 bp, Homo sapiens
gcagccctctcctga

SEQ ID NO: 14966 - DNA, 15 bp, Homo sapiens
cgcagccctctcctg

SEQ ID NO: 14967 - DNA, 15 bp, Homo sapiens
ccgcagccctctcct

SEQ ID NO: 14968 - DNA, 15 bp, Homo sapiens
tccgcagccctctcc

SEQ ID NO: 14969 - DNA, 15 bp, Homo sapiens
ctccgcagccctctc

SEQ ID NO: 14970 - DNA, 15 bp, Homo sapiens
tctccgcagccctct

SEQ ID NO: 14971 - DNA, 15 bp, Homo sapiens
ctctccgcagccctc

SEQ ID NO: 14972 - DNA, 15 bp, Homo sapiens
cctctccgcagccct

SEQ ID NO: 14973 - DNA, 15 bp, Homo sapiens
tcctctccgcagccc

SEQ ID NO: 14974 - DNA, 15 bp, Homo sapiens
ctcctctccgcagcc

SEQ ID NO: 14975 - DNA, 15 bp, Homo sapiens
cctcctctccgcagc

SEQ ID NO: 14976 - DNA, 15 bp, Homo sapiens
acctcctctccgcag

SEQ ID NO: 14977 - DNA, 15 bp, Homo sapiens
aacctcctctccgca

SEQ ID NO: 14978 - DNA, 15 bp, Homo sapiens
taacctcctctccgc

SEQ ID NO: 14979 - DNA, 15 bp, Homo sapiens
ttaacctcctctccg

SEQ ID NO: 14980 - DNA, 15 bp, Homo sapiens
gttaacctcctctcc

SEQ ID NO: 14981 - DNA, 15 bp, Homo sapiens
ggttaacctcctctc

SEQ ID NO: 14982 - DNA, 15 bp, Homo sapiens
aggttaacctcctct

SEQ ID NO: 14983 - DNA, 15 bp, Homo sapiens
gaggttaacctcctc

SEQ ID NO: 14984 - DNA, 15 bp, Homo sapiens
tgaggttaacctcct

SEQ ID NO: 14985 - DNA, 15 bp, Homo sapiens
ttgaggttaacctcc

SEQ ID NO: 14986 - DNA, 15 bp, Homo sapiens
tttgaggttaacctc

SEQ ID NO: 14987 - DNA, 15 bp, Homo sapiens
ctttgaggttaacct

SEQ ID NO: 14988 - DNA, 15 bp, Homo sapiens
tctttgaggttaacc

SEQ ID NO: 14989 - DNA, 15 bp, Homo sapiens
ctctttgaggttaac

SEQ ID NO: 14990 - DNA, 15 bp, Homo sapiens
cctctttgaggttaa

SEQ ID NO: 14991 - DNA, 15 bp, Homo sapiens
acctctttgaggtta

SEQ ID NO: 14992 - DNA, 15 bp, Homo sapiens
tacctctttgaggtt

SEQ ID NO: 14993 - DNA, 15 bp, Homo sapiens
ttacctctttgaggt

SEQ ID NO: 14994 - DNA, 15 bp, Homo sapiens
cttacctctttgagg

SEQ ID NO: 14995 - DNA, 15 bp, Homo sapiens
ccttacctctttgag

SEQ ID NO: 14996 - DNA, 15 bp, Homo sapiens
cccttacctctttga

SEQ ID NO: 14997 - DNA, 15 bp, Homo sapiens
tcccttacctctttg

SEQ ID NO: 14998 - DNA, 15 bp, Homo sapiens
ctcccttacctcttt

SEQ ID NO: 14999 - DNA, 15 bp, Homo sapiens
actcccttacctctt

SEQ ID NO: 15000 - DNA, 15 bp, Homo sapiens
cactcccttacctct

SEQ ID NO: 15001 - DNA, 15 bp, Homo sapiens
tcactcccttacctc

SEQ ID NO: 15002 - DNA, 15 bp, Homo sapiens
ttcactcccttacct

SEQ ID NO: 15003 - DNA, 15 bp, Homo sapiens
gttcactcccttacc

SEQ ID NO: 15004 - DNA, 15 bp, Homo sapiens
ggttcactcccttac

SEQ ID NO: 15005 - DNA, 15 bp, Homo sapiens
tggttcactccctta

SEQ ID NO: 15006 - DNA, 15 bp, Homo sapiens
atggttcactccctt

SEQ ID NO: 15007 - DNA, 15 bp, Homo sapiens
catggttcactccct

SEQ ID NO: 15008 - DNA, 15 bp, Homo sapiens
tcatggttcactccc

SEQ ID NO: 15009 - DNA, 15 bp, Homo sapiens
ctcatggttcactcc

SEQ ID NO: 15010 - DNA, 15 bp, Homo sapiens
cctcatggttcactc

SEQ ID NO: 15011 - DNA, 15 bp, Homo sapiens
ccctcatggttcact

SEQ ID NO: 15012 - DNA, 15 bp, Homo sapiens
accctcatggttcac

SEQ ID NO: 15013 - DNA, 15 bp, Homo sapiens
taccctcatggttca

SEQ ID NO: 15014 - DNA, 15 bp, Homo sapiens
gtaccctcatggttc

SEQ ID NO: 15015 - DNA, 15 bp, Homo sapiens
ggtaccctcatggtt

SEQ ID NO: 15016 - DNA, 15 bp, Homo sapiens
aggtaccctcatggt

SEQ ID NO: 15017 - DNA, 15 bp, Homo sapiens
taggtaccctcatgg

SEQ ID NO: 15018 - DNA, 15 bp, Homo sapiens
ctaggtaccctcatg

SEQ ID NO: 15019 - DNA, 15 bp, Homo sapiens
cctaggtaccctcat

SEQ ID NO: 15020 - DNA, 15 bp, Homo sapiens
ccctaggtaccctca

SEQ ID NO: 15021 - DNA, 15 bp, Homo sapiens
cccctaggtaccctc

SEQ ID NO: 15022 - DNA, 15 bp, Homo sapiens
tcccctaggtaccct

SEQ ID NO: 15023 - DNA, 15 bp, Homo sapiens
ttcccctaggtaccc

SEQ ID NO: 15024 - DNA, 15 bp, Homo sapiens
tttcccctaggtacc

SEQ ID NO: 15025 - DNA, 15 bp, Homo sapiens
ctttcccctaggtac

SEQ ID NO: 15026 - DNA, 15 bp, Homo sapiens
cctttcccctaggta

SEQ ID NO: 15027 - DNA, 15 bp, Homo sapiens
acctttcccctaggt

SEQ ID NO: 15028 - DNA, 15 bp, Homo sapiens
tacctttcccctagg

SEQ ID NO: 15029 - DNA, 15 bp, Homo sapiens
ttacctttcccctag

SEQ ID NO: 15030 - DNA, 15 bp, Homo sapiens
gttacctttccccta

SEQ ID NO: 15031 - DNA, 15 bp, Homo sapiens
ggttacctttcccct

SEQ ID NO: 15032 - DNA, 15 bp, Homo sapiens
tggttacctttcccc

SEQ ID NO: 15033 - DNA, 15 bp, Homo sapiens
ttggttacctttccc

SEQ ID NO: 15034 - DNA, 15 bp, Homo sapiens
gttggttacctttcc

SEQ ID NO: 15035 - DNA, 15 bp, Homo sapiens
cgttggttacctttc

SEQ ID NO: 15036 - DNA, 15 bp, Homo sapiens
tcgttggttaccttt

SEQ ID NO: 15037 - DNA, 15 bp, Homo sapiens
atcgttggttacctt

SEQ ID NO: 15038 - DNA, 15 bp, Homo sapiens
tatcgttggttacct

SEQ ID NO: 15039 - DNA, 15 bp, Homo sapiens
gtatcgttggttacc

SEQ ID NO: 15040 - DNA, 15 bp, Homo sapiens
tgtatcgttggttac

SEQ ID NO: 15041 - DNA, 15 bp, Homo sapiens
ttgtatcgttggtta

SEQ ID NO: 15042 - DNA, 15 bp, Homo sapiens
tttgtatcgttggtt

SEQ ID NO: 15043 - DNA, 15 bp, Homo sapiens
ctttgtatcgttggt

SEQ ID NO: 15044 - DNA, 15 bp, Homo sapiens
cctttgtatcgttgg

SEQ ID NO: 15045 - DNA, 15 bp, Homo sapiens
acctttgtatcgttg

SEQ ID NO: 15046 - DNA, 15 bp, Homo sapiens
cacctttgtatcgtt

SEQ ID NO: 15047 - DNA, 15 bp, Homo sapiens
gcacctttgtatcgt

SEQ ID NO: 15048 - DNA, 15 bp, Homo sapiens
tgcacctttgtatcg

SEQ ID NO: 15049 - DNA, 15 bp, Homo sapiens
ctgcacctttgtatc

SEQ ID NO: 15050 - DNA, 15 bp, Homo sapiens
tctgcacctttgtat

SEQ ID NO: 15051 - DNA, 15 bp, Homo sapiens
ctctgcacctttgta

SEQ ID NO: 15052 - DNA, 15 bp, Homo sapiens
cctctgcacctttgt

SEQ ID NO: 15053 - DNA, 15 bp, Homo sapiens
gcctctgcacctttg

SEQ ID NO: 15054 - DNA, 15 bp, Homo sapiens
cgcctctgcaccttt

SEQ ID NO: 15055 - DNA, 15 bp, Homo sapiens
ccgcctctgcacctt

SEQ ID NO: 15056 - DNA, 15 bp, Homo sapiens
cccgcctctgcacct

SEQ ID NO: 15057 - DNA, 15 bp, Homo sapiens
tcccgcctctgcacc

SEQ ID NO: 15058 - DNA, 15 bp, Homo sapiens
ctcccgcctctgcac

SEQ ID NO: 15059 - DNA, 15 bp, Homo sapiens
actcccgcctctgca

SEQ ID NO: 15060 - DNA, 15 bp, Homo sapiens
cactcccgcctctgc

SEQ ID NO: 15061 - DNA, 15 bp, Homo sapiens
acactcccgcctctg

SEQ ID NO: 15062 - DNA, 15 bp, Homo sapiens
tacactcccgcctct

SEQ ID NO: 15063 - DNA, 15 bp, Homo sapiens
gtacactcccgcctc

SEQ ID NO: 15064 - DNA, 15 bp, Homo sapiens
agtacactcccgcct

SEQ ID NO: 15065 - DNA, 15 bp, Homo sapiens
cagtacactcccgcc

SEQ ID NO: 15066 - DNA, 15 bp, Homo sapiens
ccagtacactcccgc

SEQ ID NO: 15067 - DNA, 15 bp, Homo sapiens
cccagtacactcccg

SEQ ID NO: 15068 - DNA, 15 bp, Homo sapiens
ccccagtacactccc

SEQ ID NO: 15069 - DNA, 15 bp, Homo sapiens
accccagtacactcc

SEQ ID NO: 15070 - DNA, 15 bp, Homo sapiens
taccccagtacactc

SEQ ID NO: 15071 - DNA, 15 bp, Homo sapiens
ataccccagtacact

SEQ ID NO: 15072 - DNA, 15 bp, Homo sapiens
cataccccagtacac

SEQ ID NO: 15073 - DNA, 15 bp, Homo sapiens
acataccccagtaca

SEQ ID NO: 15074 - DNA, 15 bp, Homo sapiens
aacataccccagtac

SEQ ID NO: 15075 - DNA, 15 bp, Homo sapiens
aaacataccccagta

SEQ ID NO: 15076 - DNA, 15 bp, Homo sapiens
caaacataccccagt

SEQ ID NO: 15077 - DNA, 15 bp, Homo sapiens
tcaaacataccccag

SEQ ID NO: 15078 - DNA, 15 bp, Homo sapiens
ctcaaacatacccca

SEQ ID NO: 15079 - DNA, 15 bp, Homo sapiens
actcaaacatacccc

SEQ ID NO: 15080 - DNA, 15 bp, Homo sapiens
tactcaaacataccc

SEQ ID NO: 15081 - DNA, 15 bp, Homo sapiens
ctactcaaacatacc

SEQ ID NO: 15082 - DNA, 15 bp, Homo sapiens
gctactcaaacatac

SEQ ID NO: 15083 - DNA, 15 bp, Homo sapiens
tgctactcaaacata

SEQ ID NO: 15084 - DNA, 15 bp, Homo sapiens
gtgctactcaaacat

SEQ ID NO: 15085 - DNA, 15 bp, Homo sapiens
ggtgctactcaaaca

SEQ ID NO: 15086 - DNA, 15 bp, Homo sapiens
gggtgctactcaaac

SEQ ID NO: 15087 - DNA, 15 bp, Homo sapiens
tgggtgctactcaaa

SEQ ID NO: 15088 - DNA, 15 bp, Homo sapiens
ctgggtgctactcaa

SEQ ID NO: 15089 - DNA, 15 bp, Homo sapiens
cctgggtgctactca

SEQ ID NO: 15090 - DNA, 15 bp, Homo sapiens
tcctgggtgctactc

SEQ ID NO: 15091 - DNA, 15 bp, Homo sapiens
ctcctgggtgctact

SEQ ID NO: 15092 - DNA, 15 bp, Homo sapiens
cctcctgggtgctac

SEQ ID NO: 15093 - DNA, 15 bp, Homo sapiens
gcctcctgggtgcta

SEQ ID NO: 15094 - DNA, 15 bp, Homo sapiens
ggcctcctgggtgct

SEQ ID NO: 15095 - DNA, 15 bp, Homo sapiens
gggcctcctgggtgc

SEQ ID NO: 15096 - DNA, 15 bp, Homo sapiens
tgggcctcctgggtg

SEQ ID NO: 15097 - DNA, 15 bp, Homo sapiens
ttgggcctcctgggt

SEQ ID NO: 15098 - DNA, 15 bp, Homo sapiens
cttgggcctcctggg

SEQ ID NO: 15099 - DNA, 15 bp, Homo sapiens
acttgggcctcctgg

SEQ ID NO: 15100 - DNA, 15 bp, Homo sapiens
cacttgggcctcctg

SEQ ID NO: 15101 - DNA, 15 bp, Homo sapiens
ccacttgggcctcct

SEQ ID NO: 15102 - DNA, 15 bp, Homo sapiens
accacttgggcctcc

SEQ ID NO: 15103 - DNA, 15 bp, Homo sapiens
aaccacttgggcctc

SEQ ID NO: 15104 - DNA, 15 bp, Homo sapiens
taaccacttgggcct

SEQ ID NO: 15105 - DNA, 15 bp, Homo sapiens
ctaaccacttgggcc

SEQ ID NO: 15106 - DNA, 15 bp, Homo sapiens
tctaaccacttgggc

SEQ ID NO: 15107 - DNA, 15 bp, Homo sapiens
ctctaaccacttggg

SEQ ID NO: 15108 - DNA, 15 bp, Homo sapiens
gctctaaccacttgg

SEQ ID NO: 15109 - DNA, 15 bp, Homo sapiens
cgctctaaccacttg

SEQ ID NO: 15110 - DNA, 15 bp, Homo sapiens
tcgctctaaccactt

SEQ ID NO: 15111 - DNA, 15 bp, Homo sapiens
ttcgctctaaccact

SEQ ID NO: 15112 - DNA, 15 bp, Homo sapiens
cttcgctctaaccac

SEQ ID NO: 15113 - DNA, 15 bp, Homo sapiens
acttcgctctaacca

SEQ ID NO: 15114 - DNA, 15 bp, Homo sapiens
cacttcgctctaacc

SEQ ID NO: 15115 - DNA, 15 bp, Homo sapiens
tcacttcgctctaac

SEQ ID NO: 15116 - DNA, 15 bp, Homo sapiens
ctcacttcgctctaa

SEQ ID NO: 15117 - DNA, 15 bp, Homo sapiens
tctcacttcgctcta

SEQ ID NO: 15118 - DNA, 15 bp, Homo sapiens
ctctcacttcgctct

SEQ ID NO: 15119 - DNA, 15 bp, Homo sapiens
tctctcacttcgctc

SEQ ID NO: 15120 - DNA, 15 bp, Homo sapiens
ctctctcacttcgct

SEQ ID NO: 15121 - DNA, 15 bp, Homo sapiens
tctctctcacttcgc

SEQ ID NO: 15122 - DNA, 15 bp, Homo sapiens
ctctctctcacttcg

SEQ ID NO: 15123 - DNA, 15 bp, Homo sapiens
cctctctctcacttc

SEQ ID NO: 15124 - DNA, 15 bp, Homo sapiens
ccctctctctcactt

SEQ ID NO: 15125 - DNA, 15 bp, Homo sapiens
tccctctctctcact

SEQ ID NO: 15126 - DNA, 15 bp, Homo sapiens
ctccctctctctcac

SEQ ID NO: 15127 - DNA, 15 bp, Homo sapiens
cctccctctctctca

SEQ ID NO: 15128 - DNA, 15 bp, Homo sapiens
ccctccctctctctc

SEQ ID NO: 15129 - DNA, 15 bp, Homo sapiens
gccctccctctctct

SEQ ID NO: 15130 - DNA, 15 bp, Homo sapiens
tgccctccctctctc

SEQ ID NO: 15131 - DNA, 15 bp, Homo sapiens
gtgccctccctctct

SEQ ID NO: 15132 - DNA, 15 bp, Homo sapiens
tgtgccctccctctc

SEQ ID NO: 15133 - DNA, 15 bp, Homo sapiens
ctgtgccctccctct

SEQ ID NO: 15134 - DNA, 15 bp, Homo sapiens
cctgtgccctccctc

SEQ ID NO: 15135 - DNA, 15 bp, Homo sapiens
ccctgtgccctccct

SEQ ID NO: 15136 - DNA, 15 bp, Homo sapiens
cccctgtgccctccc

SEQ ID NO: 15137 - DNA, 15 bp, Homo sapiens
acccctgtgccctcc

SEQ ID NO: 15138 - DNA, 15 bp, Homo sapiens
aacccctgtgccctc

SEQ ID NO: 15139 - DNA, 15 bp, Homo sapiens
caacccctgtgccct

SEQ ID NO: 15140 - DNA, 15 bp, Homo sapiens
tcaacccctgtgccc

SEQ ID NO: 15141 - DNA, 15 bp, Homo sapiens
ctcaacccctgtgcc

SEQ ID NO: 15142 - DNA, 15 bp, Homo sapiens
actcaacccctgtgc

SEQ ID NO: 15143 - DNA, 15 bp, Homo sapiens
gactcaacccctgtg

SEQ ID NO: 15144 - DNA, 15 bp, Homo sapiens
tgactcaacccctgt

SEQ ID NO: 15145 - DNA, 15 bp, Homo sapiens
ctgactcaacccctg

SEQ ID NO: 15146 - DNA, 15 bp, Homo sapiens
cctgactcaacccct

SEQ ID NO: 15147 - DNA, 15 bp, Homo sapiens
ccctgactcaacccc

SEQ ID NO: 15148 - DNA, 15 bp, Homo sapiens
tccctgactcaaccc

SEQ ID NO: 15149 - DNA, 15 bp, Homo sapiens
ctccctgactcaacc

SEQ ID NO: 15150 - DNA, 15 bp, Homo sapiens
cctccctgactcaac

SEQ ID NO: 15151 - DNA, 15 bp, Homo sapiens
gcctccctgactcaa

SEQ ID NO: 15152 - DNA, 15 bp, Homo sapiens
ggcctccctgactca

SEQ ID NO: 15153 - DNA, 15 bp, Homo sapiens
gggcctccctgactc

SEQ ID NO: 15154 - DNA, 15 bp, Homo sapiens
ggggcctccctgact

SEQ ID NO: 15155 - DNA, 15 bp, Homo sapiens
aggggcctccctgac

SEQ ID NO: 15156 - DNA, 15 bp, Homo sapiens
gaggggcctccctga

SEQ ID NO: 15157 - DNA, 15 bp, Homo sapiens
ggaggggcctccctg

SEQ ID NO: 15158 - DNA, 15 bp, Homo sapiens
gggaggggcctccct

SEQ ID NO: 15159 - DNA, 15 bp, Homo sapiens
ggggaggggcctccc

SEQ ID NO: 15160 - DNA, 15 bp, Homo sapiens
cggggaggggcctcc

SEQ ID NO: 15161 - DNA, 15 bp, Homo sapiens
gcggggaggggcctc

SEQ ID NO: 15162 - DNA, 15 bp, Homo sapiens
tgcggggaggggcct

SEQ ID NO: 15163 - DNA, 15 bp, Homo sapiens
gtgcggggaggggcc

SEQ ID NO: 15164 - DNA, 15 bp, Homo sapiens
ggtgcggggaggggc

SEQ ID NO: 15165 - DNA, 15 bp, Homo sapiens
tggtgcggggagggg

SEQ ID NO: 15166 - DNA, 15 bp, Homo sapiens
ttggtgcggggaggg

SEQ ID NO: 15167 - DNA, 15 bp, Homo sapiens
gttggtgcggggagg

SEQ ID NO: 15168 - DNA, 15 bp, Homo sapiens
cgttggtgcggggag

SEQ ID NO: 15169 - DNA, 15 bp, Homo sapiens
gcgttggtgcgggga

SEQ ID NO: 15170 - DNA, 15 bp, Homo sapiens
tgcgttggtgcgggg

SEQ ID NO: 15171 - DNA, 15 bp, Homo sapiens
gtgcgttggtgcggg

SEQ ID NO: 15172 - DNA, 15 bp, Homo sapiens
ggtgcgttggtgcgg

SEQ ID NO: 15173 - DNA, 15 bp, Homo sapiens
tggtgcgttggtgcg

SEQ ID NO: 15174 - DNA, 15 bp, Homo sapiens
gtggtgcgttggtgc

SEQ ID NO: 15175 - DNA, 15 bp, Homo sapiens
ggtggtgcgttggtg

SEQ ID NO: 15176 - DNA, 15 bp, Homo sapiens
cggtggtgcgttggt

SEQ ID NO: 15177 - DNA, 15 bp, Homo sapiens
ccggtggtgcgttgg

SEQ ID NO: 15178 - DNA, 15 bp, Homo sapiens
cccggtggtgcgttg

SEQ ID NO: 15179 - DNA, 15 bp, Homo sapiens
ccccggtggtgcgtt

SEQ ID NO: 15180 - DNA, 15 bp, Homo sapiens
accccggtggtgcgt

SEQ ID NO: 15181 - DNA, 15 bp, Homo sapiens
gaccccggtggtgcg

SEQ ID NO: 15182 - DNA, 15 bp, Homo sapiens
tgaccccggtggtgc

SEQ ID NO: 15183 - DNA, 15 bp, Homo sapiens
ctgaccccggtggtg

SEQ ID NO: 15184 - DNA, 15 bp, Homo sapiens
gctgaccccggtggt

SEQ ID NO: 15185 - DNA, 15 bp, Homo sapiens
agctgaccccggtgg

SEQ ID NO: 15186 - DNA, 15 bp, Homo sapiens
gagctgaccccggtg

SEQ ID NO: 15187 - DNA, 15 bp, Homo sapiens
tgagctgaccccggt

SEQ ID NO: 15188 - DNA, 15 bp, Homo sapiens
ttgagctgaccccgg

SEQ ID NO: 15189 - DNA, 15 bp, Homo sapiens
gttgagctgaccccg

SEQ ID NO: 15190 - DNA, 15 bp, Homo sapiens
ggttgagctgacccc

SEQ ID NO: 15191 - DNA, 15 bp, Homo sapiens
aggttgagctgaccc

SEQ ID NO: 15192 - DNA, 15 bp, Homo sapiens
gaggttgagctgacc

SEQ ID NO: 15193 - DNA, 15 bp, Homo sapiens
tgaggttgagctgac

SEQ ID NO: 15194 - DNA, 15 bp, Homo sapiens
ctgaggttgagctga

SEQ ID NO: 15195 - DNA, 15 bp, Homo sapiens
gctgaggttgagctg

SEQ ID NO: 15196 - DNA, 15 bp, Homo sapiens
ggctgaggttgagct

SEQ ID NO: 15197 - DNA, 15 bp, Homo sapiens
gggctgaggttgagc

SEQ ID NO: 15198 - DNA, 15 bp, Homo sapiens
ggggctgaggttgag

SEQ ID NO: 15199 - DNA, 15 bp, Homo sapiens
gggggctgaggttga

SEQ ID NO: 15200 - DNA, 15 bp, Homo sapiens
agggggctgaggttg

SEQ ID NO: 15201 - DNA, 15 bp, Homo sapiens
cagggggctgaggtt

SEQ ID NO: 15202 - DNA, 15 bp, Homo sapiens
gcagggggctgaggt

SEQ ID NO: 15203 - DNA, 15 bp, Homo sapiens
ggcagggggctgagg

SEQ ID NO: 15204 - DNA, 15 bp, Homo sapiens
gggcagggggctgag

SEQ ID NO: 15205 - DNA, 15 bp, Homo sapiens
ggggcagggggctga

SEQ ID NO: 15206 - DNA, 15 bp, Homo sapiens
gggggcagggggctg

SEQ ID NO: 15207 - DNA, 15 bp, Homo sapiens
agggggcagggggct

SEQ ID NO: 15208 - DNA, 15 bp, Homo sapiens
cagggggcagggggc

SEQ ID NO: 15209 - DNA, 15 bp, Homo sapiens
gcagggggcaggggg

SEQ ID NO: 15210 - DNA, 15 bp, Homo sapiens
ggcagggggcagggg

SEQ ID NO: 15211 - DNA, 15 bp, Homo sapiens
gggcagggggcaggg

SEQ ID NO: 15212 - DNA, 15 bp, Homo sapiens
agggcagggggcagg

SEQ ID NO: 15213 - DNA, 15 bp, Homo sapiens
cagggcagggggcag

SEQ ID NO: 15214 - DNA, 15 bp, Homo sapiens
acagggcagggggca

SEQ ID NO: 15215 - DNA, 15 bp, Homo sapiens
tacagggcagggggc

SEQ ID NO: 15216 - DNA, 15 bp, Homo sapiens
ctacagggcaggggg

SEQ ID NO: 15217 - DNA, 15 bp, Homo sapiens
gctacagggcagggg

SEQ ID NO: 15218 - DNA, 15 bp, Homo sapiens
ggctacagggcaggg

SEQ ID NO: 15219 - DNA, 15 bp, Homo sapiens
gggctacagggcagg

SEQ ID NO: 15220 - DNA, 15 bp, Homo sapiens
ggggctacagggcag

SEQ ID NO: 15221 - DNA, 15 bp, Homo sapiens
aggggctacagggca

SEQ ID NO: 15222 - DNA, 15 bp, Homo sapiens
gaggggctacagggc

SEQ ID NO: 15223 - DNA, 15 bp, Homo sapiens
agaggggctacaggg

SEQ ID NO: 15224 - DNA, 15 bp, Homo sapiens
gagaggggctacagg

SEQ ID NO: 15225 - DNA, 15 bp, Homo sapiens
agagaggggctacag

SEQ ID NO: 15226 - DNA, 15 bp, Homo sapiens
cagagaggggctaca

SEQ ID NO: 15227 - DNA, 15 bp, Homo sapiens
tcagagaggggctac

SEQ ID NO: 15228 - DNA, 15 bp, Homo sapiens
atcagagaggggcta

SEQ ID NO: 15229 - DNA, 15 bp, Homo sapiens
catcagagaggggct

SEQ ID NO: 15230 - DNA, 15 bp, Homo sapiens
gcatcagagaggggc

SEQ ID NO: 15231 - DNA, 15 bp, Homo sapiens
ggcatcagagagggg

SEQ ID NO: 15232 - DNA, 15 bp, Homo sapiens
aggcatcagagaggg

SEQ ID NO: 15233 - DNA, 15 bp, Homo sapiens
taggcatcagagagg

SEQ ID NO: 15234 - DNA, 15 bp, Homo sapiens
ttaggcatcagagag

SEQ ID NO: 15235 - DNA, 15 bp, Homo sapiens
attaggcatcagaga

SEQ ID NO: 15236 - DNA, 15 bp, Homo sapiens
gattaggcatcagag

SEQ ID NO: 15237 - DNA, 15 bp, Homo sapiens
ggattaggcatcaga

SEQ ID NO: 15238 - DNA, 15 bp, Homo sapiens
aggattaggcatcag

SEQ ID NO: 15239 - DNA, 15 bp, Homo sapiens
gaggattaggcatca

SEQ ID NO: 15240 - DNA, 15 bp, Homo sapiens
ggaggattaggcatc

SEQ ID NO: 15241 - DNA, 15 bp, Homo sapiens
aggaggattaggcat

SEQ ID NO: 15242 - DNA, 15 bp, Homo sapiens
caggaggattaggca

SEQ ID NO: 15243 - DNA, 15 bp, Homo sapiens
gcaggaggattaggc

SEQ ID NO: 15244 - DNA, 15 bp, Homo sapiens
ggcaggaggattagg

SEQ ID NO: 15245 - DNA, 15 bp, Homo sapiens
aggcaggaggattag

SEQ ID NO: 15246 - DNA, 15 bp, Homo sapiens
taggcaggaggatta

SEQ ID NO: 15247 - DNA, 15 bp, Homo sapiens
ctaggcaggaggatt

SEQ ID NO: 15248 - DNA, 15 bp, Homo sapiens
gctaggcaggaggat

SEQ ID NO: 15249 - DNA, 15 bp, Homo sapiens
agctaggcaggagga

SEQ ID NO: 15250 - DNA, 15 bp, Homo sapiens
gagctaggcaggagg

SEQ ID NO: 15251 - DNA, 15 bp, Homo sapiens
agagctaggcaggag

SEQ ID NO: 15252 - DNA, 15 bp, Homo sapiens
gagagctaggcagga

SEQ ID NO: 15253 - DNA, 15 bp, Homo sapiens
ggagagctaggcagg

SEQ ID NO: 15254 - DNA, 15 bp, Homo sapiens
aggagagctaggcag

SEQ ID NO: 15255 - DNA, 15 bp, Homo sapiens
caggagagctaggca

SEQ ID NO: 15256 - DNA, 15 bp, Homo sapiens
tcaggagagctaggc

SEQ ID NO: 15257 - DNA, 15 bp, Homo sapiens
ttcaggagagctagg

SEQ ID NO: 15258 - DNA, 15 bp, Homo sapiens
cttcaggagagctag

SEQ ID NO: 15259 - DNA, 15 bp, Homo sapiens
ccttcaggagagcta

SEQ ID NO: 15260 - DNA, 15 bp, Homo sapiens
gccttcaggagagct

SEQ ID NO: 15261 - DNA, 15 bp, Homo sapiens
tgccttcaggagagc

SEQ ID NO: 15262 - DNA, 15 bp, Homo sapiens
gtgccttcaggagag

SEQ ID NO: 15263 - DNA, 15 bp, Homo sapiens
tgtgccttcaggaga

SEQ ID NO: 15264 - DNA, 15 bp, Homo sapiens
atgtgccttcaggag

SEQ ID NO: 15265 - DNA, 15 bp, Homo sapiens
tatgtgccttcagga

SEQ ID NO: 15266 - DNA, 15 bp, Homo sapiens
gtatgtgccttcagg

SEQ ID NO: 15267 - DNA, 15 bp, Homo sapiens
ggtatgtgccttcag

SEQ ID NO: 15268 - DNA, 15 bp, Homo sapiens
cggtatgtgccttca

SEQ ID NO: 15269 - DNA, 15 bp, Homo sapiens
gcggtatgtgccttc

SEQ ID NO: 15270 - DNA, 15 bp, Homo sapiens
ggcggtatgtgcctt

SEQ ID NO: 15271 - DNA, 15 bp, Homo sapiens
tggcggtatgtgcct

SEQ ID NO: 15272 - DNA, 15 bp, Homo sapiens
gtggcggtatgtgcc

SEQ ID NO: 15273 - DNA, 15 bp, Homo sapiens
ggtggcggtatgtgc

SEQ ID NO: 15274 - DNA, 15 bp, Homo sapiens
gggtggcggtatgtg

SEQ ID NO: 15275 - DNA, 15 bp, Homo sapiens
ggggtggcggtatgt

SEQ ID NO: 15276 - DNA, 15 bp, Homo sapiens
aggggtggcggtatg

SEQ ID NO: 15277 - DNA, 15 bp, Homo sapiens
taggggtggcggtat

SEQ ID NO: 15278 - DNA, 15 bp, Homo sapiens
gtaggggtggcggta

SEQ ID NO: 15279 - DNA, 15 bp, Homo sapiens
ggtaggggtggcggt

SEQ ID NO: 15280 - DNA, 15 bp, Homo sapiens
gggtaggggtggcgg

SEQ ID NO: 15281 - DNA, 15 bp, Homo sapiens
tgggtaggggtggcg

SEQ ID NO: 15282 - DNA, 15 bp, Homo sapiens
atgggtaggggtggc

SEQ ID NO: 15283 - DNA, 15 bp, Homo sapiens
gatgggtaggggtgg

SEQ ID NO: 15284 - DNA, 15 bp, Homo sapiens
tgatgggtaggggtg

SEQ ID NO: 15285 - DNA, 15 bp, Homo sapiens
ttgatgggtaggggt

SEQ ID NO: 15286 - DNA, 15 bp, Homo sapiens
gttgatgggtagggg

SEQ ID NO: 15287 - DNA, 15 bp, Homo sapiens
ggttgatgggtaggg

SEQ ID NO: 15288 - DNA, 15 bp, Homo sapiens
aggttgatgggtagg

SEQ ID NO: 15289 - DNA, 15 bp, Homo sapiens
aaggttgatgggtag

SEQ ID NO: 15290 - DNA, 15 bp, Homo sapiens
aaaggttgatgggta

SEQ ID NO: 15291 - DNA, 15 bp, Homo sapiens
aaaaggttgatgggt

SEQ ID NO: 15292 - DNA, 15 bp, Homo sapiens
aaaaaggttgatggg

SEQ ID NO: 15293 - DNA, 15 bp, Homo sapiens
taaaaaggttgatgg

SEQ ID NO: 15294 - DNA, 15 bp, Homo sapiens
gtaaaaaggttgatg

SEQ ID NO: 15295 - DNA, 15 bp, Homo sapiens
ggtaaaaaggttgat

SEQ ID NO: 15296 - DNA, 15 bp, Homo sapiens
tggtaaaaaggttga

SEQ ID NO: 15297 - DNA, 15 bp, Homo sapiens
gtggtaaaaaggttg

SEQ ID NO: 15298 - DNA, 15 bp, Homo sapiens
ggtggtaaaaaggtt

SEQ ID NO: 15299 - DNA, 15 bp, Homo sapiens
aggtggtaaaaaggt

SEQ ID NO: 15300 - DNA, 15 bp, Homo sapiens
gaggtggtaaaaagg

SEQ ID NO: 15301 - DNA, 15 bp, Homo sapiens
agaggtggtaaaaag

SEQ ID NO: 15302 - DNA, 15 bp, Homo sapiens
tagaggtggtaaaaa

SEQ ID NO: 15303 - DNA, 15 bp, Homo sapiens
gtagaggtggtaaaa

SEQ ID NO: 15304 - DNA, 15 bp, Homo sapiens
ggtagaggtggtaaa

SEQ ID NO: 15305 - DNA, 15 bp, Homo sapiens
aggtagaggtggtaa

SEQ ID NO: 15306 - DNA, 15 bp, Homo sapiens
gaggtagaggtggta

SEQ ID NO: 15307 - DNA, 15 bp, Homo sapiens
agaggtagaggtggt

SEQ ID NO: 15308 - DNA, 15 bp, Homo sapiens
gagaggtagaggtgg

SEQ ID NO: 15309 - DNA, 15 bp, Homo sapiens
agagaggtagaggtg

SEQ ID NO: 15310 - DNA, 15 bp, Homo sapiens
gagagaggtagaggt

SEQ ID NO: 15311 - DNA, 15 bp, Homo sapiens
tgagagaggtagagg

SEQ ID NO: 15312 - DNA, 15 bp, Homo sapiens
ctgagagaggtagag

SEQ ID NO: 15313 - DNA, 15 bp, Homo sapiens
gctgagagaggtaga

SEQ ID NO: 15314 - DNA, 15 bp, Homo sapiens
ggctgagagaggtag

SEQ ID NO: 15315 - DNA, 15 bp, Homo sapiens
gggctgagagaggta

SEQ ID NO: 15316 - DNA, 15 bp, Homo sapiens
agggctgagagaggt

SEQ ID NO: 15317 - DNA, 15 bp, Homo sapiens
tagggctgagagagg

SEQ ID NO: 15318 - DNA, 15 bp, Homo sapiens
gtagggctgagagag

SEQ ID NO: 15319 - DNA, 15 bp, Homo sapiens
tgtagggctgagaga

SEQ ID NO: 15320 - DNA, 15 bp, Homo sapiens
ctgtagggctgagag

SEQ ID NO: 15321 - DNA, 15 bp, Homo sapiens
gctgtagggctgaga

SEQ ID NO: 15322 - DNA, 15 bp, Homo sapiens
ggctgtagggctgag

SEQ ID NO: 15323 - DNA, 15 bp, Homo sapiens
gggctgtagggctga

SEQ ID NO: 15324 - DNA, 15 bp, Homo sapiens
ggggctgtagggctg

SEQ ID NO: 15325 - DNA, 15 bp, Homo sapiens
aggggctgtagggct

SEQ ID NO: 15326 - DNA, 15 bp, Homo sapiens
taggggctgtagggc

SEQ ID NO: 15327 - DNA, 15 bp, Homo sapiens
ctaggggctgtaggg

SEQ ID NO: 15328 - DNA, 15 bp, Homo sapiens
tctaggggctgtagg

SEQ ID NO: 15329 - DNA, 15 bp, Homo sapiens
ttctaggggctgtag

SEQ ID NO: 15330 - DNA, 15 bp, Homo sapiens
cttctaggggctgta

SEQ ID NO: 15331 - DNA, 15 bp, Homo sapiens
ccttctaggggctgt

SEQ ID NO: 15332 - DNA, 15 bp, Homo sapiens
gccttctaggggctg

SEQ ID NO: 15333 - DNA, 15 bp, Homo sapiens
ggccttctaggggct

SEQ ID NO: 15334 - DNA, 15 bp, Homo sapiens
gggccttctaggggc

SEQ ID NO: 15335 - DNA, 15 bp, Homo sapiens
agggccttctagggg

SEQ ID NO: 15336 - DNA, 15 bp, Homo sapiens
gagggccttctaggg

SEQ ID NO: 15337 - DNA, 15 bp, Homo sapiens
ggagggccttctagg

SEQ ID NO: 15338 - DNA, 15 bp, Homo sapiens
aggagggccttctag

SEQ ID NO: 15339 - DNA, 15 bp, Homo sapiens
gaggagggccttcta

SEQ ID NO: 15340 - DNA, 15 bp, Homo sapiens
agaggagggccttct

SEQ ID NO: 15341 - DNA, 15 bp, Homo sapiens
gagaggagggccttc

SEQ ID NO: 15342 - DNA, 15 bp, Homo sapiens
ggagaggagggcctt

SEQ ID NO: 15343 - DNA, 15 bp, Homo sapiens
gggagaggagggcct

SEQ ID NO: 15344 - DNA, 15 bp, Homo sapiens
ggggagaggagggcc

SEQ ID NO: 15345 - DNA, 15 bp, Homo sapiens
aggggagaggagggc

SEQ ID NO: 15346 - DNA, 15 bp, Homo sapiens
gaggggagaggaggg

SEQ ID NO: 15347 - DNA, 15 bp, Homo sapiens
tgaggggagaggagg

SEQ ID NO: 15348 - DNA, 15 bp, Homo sapiens
gtgaggggagaggag

SEQ ID NO: 15349 - DNA, 15 bp, Homo sapiens
ggtgaggggagagga

SEQ ID NO: 15350 - DNA, 15 bp, Homo sapiens
cggtgaggggagagg

SEQ ID NO: 15351 - DNA, 15 bp, Homo sapiens
gcggtgaggggagag

SEQ ID NO: 15352 - DNA, 15 bp, Homo sapiens
ggcggtgaggggaga

SEQ ID NO: 15353 - DNA, 15 bp, Homo sapiens
gggcggtgaggggag

SEQ ID NO: 15354 - DNA, 15 bp, Homo sapiens
ggggcggtgagggga

SEQ ID NO: 15355 - DNA, 15 bp, Homo sapiens
gggggcggtgagggg

SEQ ID NO: 15356 - DNA, 15 bp, Homo sapiens
cgggggcggtgaggg

SEQ ID NO: 15357 - DNA, 15 bp, Homo sapiens
gcgggggcggtgagg

SEQ ID NO: 15358 - DNA, 15 bp, Homo sapiens
ggcgggggcggtgag

SEQ ID NO: 15359 - DNA, 15 bp, Homo sapiens
gggcgggggcggtga

SEQ ID NO: 15360 - DNA, 15 bp, Homo sapiens
tgggcgggggcggtg

SEQ ID NO: 15361 - DNA, 15 bp, Homo sapiens
gtgggcgggggcggt

SEQ ID NO: 15362 - DNA, 15 bp, Homo sapiens
tgtgggcgggggcgg

SEQ ID NO: 15363 - DNA, 15 bp, Homo sapiens
atgtgggcgggggcg

SEQ ID NO: 15364 - DNA, 15 bp, Homo sapiens
gatgtgggcgggggc

SEQ ID NO: 15365 - DNA, 15 bp, Homo sapiens
ggatgtgggcggggg

SEQ ID NO: 15366 - DNA, 15 bp, Homo sapiens
gggatgtgggcgggg

SEQ ID NO: 15367 - DNA, 15 bp, Homo sapiens
tgggatgtgggcggg

SEQ ID NO: 15368 - DNA, 15 bp, Homo sapiens
ctgggatgtgggcgg

SEQ ID NO: 15369 - DNA, 15 bp, Homo sapiens
tctgggatgtgggcg

SEQ ID NO: 15370 - DNA, 15 bp, Homo sapiens
gtctgggatgtgggc

SEQ ID NO: 15371 - DNA, 15 bp, Homo sapiens
tgtctgggatgtggg

SEQ ID NO: 15372 - DNA, 15 bp, Homo sapiens
gtgtctgggatgtgg

SEQ ID NO: 15373 - DNA, 15 bp, Homo sapiens
ggtgtctgggatgtg

SEQ ID NO: 15374 - DNA, 15 bp, Homo sapiens
gggtgtctgggatgt

SEQ ID NO: 15375 - DNA, 15 bp, Homo sapiens
tgggtgtctgggatg

SEQ ID NO: 15376 - DNA, 15 bp, Homo sapiens
ctgggtgtctgggat

SEQ ID NO: 15377 - DNA, 15 bp, Homo sapiens
actgggtgtctggga

SEQ ID NO: 15378 - DNA, 15 bp, Homo sapiens
tactgggtgtctggg

SEQ ID NO: 15379 - DNA, 15 bp, Homo sapiens
gtactgggtgtctgg

SEQ ID NO: 15380 - DNA, 15 bp, Homo sapiens
ggtactgggtgtctg

SEQ ID NO: 15381 - DNA, 15 bp, Homo sapiens
aggtactgggtgtct

SEQ ID NO: 15382 - DNA, 15 bp, Homo sapiens
caggtactgggtgtc

SEQ ID NO: 15383 - DNA, 15 bp, Homo sapiens
gcaggtactgggtgt

SEQ ID NO: 15384 - DNA, 15 bp, Homo sapiens
tgcaggtactgggtg

SEQ ID NO: 15385 - DNA, 15 bp, Homo sapiens
ctgcaggtactgggt

SEQ ID NO: 15386 - DNA, 15 bp, Homo sapiens
cctgcaggtactggg

SEQ ID NO: 15387 - DNA, 15 bp, Homo sapiens
gcctgcaggtactgg

SEQ ID NO: 15388 - DNA, 15 bp, Homo sapiens
agcctgcaggtactg

SEQ ID NO: 15389 - DNA, 15 bp, Homo sapiens
cagcctgcaggtact

SEQ ID NO: 15390 - DNA, 15 bp, Homo sapiens
ccagcctgcaggtac

SEQ ID NO: 15391 - DNA, 15 bp, Homo sapiens
accagcctgcaggta

SEQ ID NO: 15392 - DNA, 15 bp, Homo sapiens
gaccagcctgcaggt

SEQ ID NO: 15393 - DNA, 15 bp, Homo sapiens
agaccagcctgcagg

SEQ ID NO: 15394 - DNA, 15 bp, Homo sapiens
cagaccagcctgcag

SEQ ID NO: 15395 - DNA, 15 bp, Homo sapiens
gcagaccagcctgca

SEQ ID NO: 15396 - DNA, 15 bp, Homo sapiens
tgcagaccagcctgc

SEQ ID NO: 15397 - DNA, 15 bp, Homo sapiens
atgcagaccagcctg

SEQ ID NO: 15398 - DNA, 15 bp, Homo sapiens
gatgcagaccagcct

SEQ ID NO: 15399 - DNA, 15 bp, Homo sapiens
ggatgcagaccagcc

SEQ ID NO: 15400 - DNA, 15 bp, Homo sapiens
aggatgcagaccagc

SEQ ID NO: 15401 - DNA, 15 bp, Homo sapiens
gaggatgcagaccag

SEQ ID NO: 15402 - DNA, 15 bp, Homo sapiens
tgaggatgcagacca

SEQ ID NO: 15403 - DNA, 15 bp, Homo sapiens
ctgaggatgcagacc

SEQ ID NO: 15404 - DNA, 15 bp, Homo sapiens
tctgaggatgcagac

SEQ ID NO: 15405 - DNA, 15 bp, Homo sapiens
ctctgaggatgcaga

SEQ ID NO: 15406 - DNA, 15 bp, Homo sapiens
cctctgaggatgcag

SEQ ID NO: 15407 - DNA, 15 bp, Homo sapiens
gcctctgaggatgca

SEQ ID NO: 15408 - DNA, 15 bp, Homo sapiens
tgcctctgaggatgc

SEQ ID NO: 15409 - DNA, 15 bp, Homo sapiens
atgcctctgaggatg

SEQ ID NO: 15410 - DNA, 15 bp, Homo sapiens
gatgcctctgaggat

SEQ ID NO: 15411 - DNA, 15 bp, Homo sapiens
cgatgcctctgagga

SEQ ID NO: 15412 - DNA, 15 bp, Homo sapiens
ccgatgcctctgagg

SEQ ID NO: 15413 - DNA, 15 bp, Homo sapiens
accgatgcctctgag

SEQ ID NO: 15414 - DNA, 15 bp, Homo sapiens
caccgatgcctctga

SEQ ID NO: 15415 - DNA, 15 bp, Homo sapiens
ccaccgatgcctctg

SEQ ID NO: 15416 - DNA, 15 bp, Homo sapiens
cccaccgatgcctct

SEQ ID NO: 15417 - DNA, 15 bp, Homo sapiens
gcccaccgatgcctc

SEQ ID NO: 15418 - DNA, 15 bp, Homo sapiens
tgcccaccgatgcct

SEQ ID NO: 15419 - DNA, 15 bp, Homo sapiens
ctgcccaccgatgcc

SEQ ID NO: 15420 - DNA, 15 bp, Homo sapiens
tctgcccaccgatgc

SEQ ID NO: 15421 - DNA, 15 bp, Homo sapiens
gtctgcccaccgatg

SEQ ID NO: 15422 - DNA, 15 bp, Homo sapiens
cgtctgcccaccgat

SEQ ID NO: 15423 - DNA, 15 bp, Homo sapiens
gcgtctgcccaccga

SEQ ID NO: 15424 - DNA, 15 bp, Homo sapiens
agcgtctgcccaccg

SEQ ID NO: 15425 - DNA, 15 bp, Homo sapiens
gagcgtctgcccacc

SEQ ID NO: 15426 - DNA, 15 bp, Homo sapiens
tgagcgtctgcccac

SEQ ID NO: 15427 - DNA, 15 bp, Homo sapiens
ctgagcgtctgccca

SEQ ID NO: 15428 - DNA, 15 bp, Homo sapiens
gctgagcgtctgccc

SEQ ID NO: 15429 - DNA, 15 bp, Homo sapiens
ggctgagcgtctgcc

SEQ ID NO: 15430 - DNA, 15 bp, Homo sapiens
tggctgagcgtctgc

SEQ ID NO: 15431 - DNA, 15 bp, Homo sapiens
ttggctgagcgtctg

SEQ ID NO: 15432 - DNA, 15 bp, Homo sapiens
cttggctgagcgtct

SEQ ID NO: 15433 - DNA, 15 bp, Homo sapiens
tcttggctgagcgtc

SEQ ID NO: 15434 - DNA, 15 bp, Homo sapiens
ttcttggctgagcgt

SEQ ID NO: 15435 - DNA, 15 bp, Homo sapiens
cttcttggctgagcg

SEQ ID NO: 15436 - DNA, 15 bp, Homo sapiens
tcttcttggctgagc

SEQ ID NO: 15437 - DNA, 15 bp, Homo sapiens
ctcttcttggctgag

SEQ ID NO: 15438 - DNA, 15 bp, Homo sapiens
tctcttcttggctga

SEQ ID NO: 15439 - DNA, 15 bp, Homo sapiens
ttctcttcttggctg

SEQ ID NO: 15440 - DNA, 15 bp, Homo sapiens
cttctcttcttggct

SEQ ID NO: 15441 - DNA, 15 bp, Homo sapiens
gcttctcttcttggc

SEQ ID NO: 15442 - DNA, 15 bp, Homo sapiens
tgcttctcttcttgg

SEQ ID NO: 15443 - DNA, 15 bp, Homo sapiens
ctgcttctcttcttg

SEQ ID NO: 15444 - DNA, 15 bp, Homo sapiens
cctgcttctcttctt

SEQ ID NO: 15445 - DNA, 15 bp, Homo sapiens
acctgcttctcttct

SEQ ID NO: 15446 - DNA, 15 bp, Homo sapiens
gacctgcttctcttc

SEQ ID NO: 15447 - DNA, 15 bp, Homo sapiens
agacctgcttctctt

SEQ ID NO: 15448 - DNA, 15 bp, Homo sapiens
gagacctgcttctct

SEQ ID NO: 15449 - DNA, 15 bp, Homo sapiens
cgagacctgcttctc

SEQ ID NO: 15450 - DNA, 15 bp, Homo sapiens
ccgagacctgcttct

SEQ ID NO: 15451 - DNA, 15 bp, Homo sapiens
tccgagacctgcttc

SEQ ID NO: 15452 - DNA, 15 bp, Homo sapiens
ctccgagacctgctt

SEQ ID NO: 15453 - DNA, 15 bp, Homo sapiens
cctccgagacctgct

SEQ ID NO: 15454 - DNA, 15 bp, Homo sapiens
acctccgagacctgc

SEQ ID NO: 15455 - DNA, 15 bp, Homo sapiens
gacctccgagacctg

SEQ ID NO: 15456 - DNA, 15 bp, Homo sapiens
tgacctccgagacct

SEQ ID NO: 15457 - DNA, 15 bp, Homo sapiens
ctgacctccgagacc

SEQ ID NO: 15458 - DNA, 15 bp, Homo sapiens
cctgacctccgagac

SEQ ID NO: 15459 - DNA, 15 bp, Homo sapiens
gcctgacctccgaga

SEQ ID NO: 15460 - DNA, 15 bp, Homo sapiens
agcctgacctccgag

SEQ ID NO: 15461 - DNA, 15 bp, Homo sapiens
gagcctgacctccga

SEQ ID NO: 15462 - DNA, 15 bp, Homo sapiens
tgagcctgacctccg

SEQ ID NO: 15463 - DNA, 15 bp, Homo sapiens
gtgagcctgacctcc

SEQ ID NO: 15464 - DNA, 15 bp, Homo sapiens
agtgagcctgacctc

SEQ ID NO: 15465 - DNA, 15 bp, Homo sapiens
cagtgagcctgacct

SEQ ID NO: 15466 - DNA, 15 bp, Homo sapiens
ccagtgagcctgacc

SEQ ID NO: 15467 - DNA, 15 bp, Homo sapiens
cccagtgagcctgac

SEQ ID NO: 15468 - DNA, 15 bp, Homo sapiens
ccccagtgagcctga

SEQ ID NO: 15469 - DNA, 15 bp, Homo sapiens
accccagtgagcctg

SEQ ID NO: 15470 - DNA, 15 bp, Homo sapiens
taccccagtgagcct

SEQ ID NO: 15471 - DNA, 15 bp, Homo sapiens
ctaccccagtgagcc

SEQ ID NO: 15472 - DNA, 15 bp, Homo sapiens
tctaccccagtgagc

SEQ ID NO: 15473 - DNA, 15 bp, Homo sapiens
ctctaccccagtgag

SEQ ID NO: 15474 - DNA, 15 bp, Homo sapiens
cctctaccccagtga

SEQ ID NO: 15475 - DNA, 15 bp, Homo sapiens
tcctctaccccagtg

SEQ ID NO: 15476 - DNA, 15 bp, Homo sapiens
ttcctctaccccagt

SEQ ID NO: 15477 - DNA, 15 bp, Homo sapiens
cttcctctaccccag

SEQ ID NO: 15478 - DNA, 15 bp, Homo sapiens
acttcctctacccca

SEQ ID NO: 15479 - DNA, 15 bp, Homo sapiens
aacttcctctacccc

SEQ ID NO: 15480 - DNA, 15 bp, Homo sapiens
gaacttcctctaccc

SEQ ID NO: 15481 - DNA, 15 bp, Homo sapiens
agaacttcctctacc

SEQ ID NO: 15482 - DNA, 15 bp, Homo sapiens
cagaacttcctctac

SEQ ID NO: 15483 - DNA, 15 bp, Homo sapiens
tcagaacttcctcta

SEQ ID NO: 15484 - DNA, 15 bp, Homo sapiens
atcagaacttcctct

SEQ ID NO: 15485 - DNA, 15 bp, Homo sapiens
tatcagaacttcctc

SEQ ID NO: 15486 - DNA, 15 bp, Homo sapiens
ctatcagaacttcct

SEQ ID NO: 15487 - DNA, 15 bp, Homo sapiens
gctatcagaacttcc

SEQ ID NO: 15488 - DNA, 15 bp, Homo sapiens
ggctatcagaacttc

SEQ ID NO: 15489 - DNA, 15 bp, Homo sapiens
tggctatcagaactt

SEQ ID NO: 15490 - DNA, 15 bp, Homo sapiens
ttggctatcagaact

SEQ ID NO: 15491 - DNA, 15 bp, Homo sapiens
cttggctatcagaac

SEQ ID NO: 15492 - DNA, 15 bp, Homo sapiens
gcttggctatcagaa

SEQ ID NO: 15493 - DNA, 15 bp, Homo sapiens
agcttggctatcaga

SEQ ID NO: 15494 - DNA, 15 bp, Homo sapiens
gagcttggctatcag

SEQ ID NO: 15495 - DNA, 15 bp, Homo sapiens
ggagcttggctatca

SEQ ID NO: 15496 - DNA, 15 bp, Homo sapiens
tggagcttggctatc

SEQ ID NO: 15497 - DNA, 15 bp, Homo sapiens
ttggagcttggctat

SEQ ID NO: 15498 - DNA, 15 bp, Homo sapiens
cttggagcttggcta

SEQ ID NO: 15499 - DNA, 15 bp, Homo sapiens
ccttggagcttggct

SEQ ID NO: 15500 - DNA, 15 bp, Homo sapiens
cccttggagcttggc

SEQ ID NO: 15501 - DNA, 15 bp, Homo sapiens
tcccttggagcttgg

SEQ ID NO: 15502 - DNA, 15 bp, Homo sapiens
atcccttggagcttg

SEQ ID NO: 15503 - DNA, 15 bp, Homo sapiens
tatcccttggagctt

SEQ ID NO: 15504 - DNA, 15 bp, Homo sapiens
ctatcccttggagct

SEQ ID NO: 15505 - DNA, 15 bp, Homo sapiens
gctatcccttggagc

SEQ ID NO: 15506 - DNA, 15 bp, Homo sapiens
ggctatcccttggag

SEQ ID NO: 15507 - DNA, 15 bp, Homo sapiens
gggctatcccttgga

SEQ ID NO: 15508 - DNA, 15 bp, Homo sapiens
tgggctatcccttgg

SEQ ID NO: 15509 - DNA, 15 bp, Homo sapiens
ctgggctatcccttg

SEQ ID NO: 15510 - DNA, 15 bp, Homo sapiens
cctgggctatccctt

SEQ ID NO: 15511 - DNA, 15 bp, Homo sapiens
acctgggctatccct

SEQ ID NO: 15512 - DNA, 15 bp, Homo sapiens
gacctgggctatccc

SEQ ID NO: 15513 - DNA, 15 bp, Homo sapiens
ggacctgggctatcc

SEQ ID NO: 15514 - DNA, 15 bp, Homo sapiens
aggacctgggctatc

SEQ ID NO: 15515 - DNA, 15 bp, Homo sapiens
caggacctgggctat

SEQ ID NO: 15516 - DNA, 15 bp, Homo sapiens
tcaggacctgggcta

SEQ ID NO: 15517 - DNA, 15 bp, Homo sapiens
ctcaggacctgggct

SEQ ID NO: 15518 - DNA, 15 bp, Homo sapiens
cctcaggacctgggc

SEQ ID NO: 15519 - DNA, 15 bp, Homo sapiens
ccctcaggacctggg

SEQ ID NO: 15520 - DNA, 15 bp, Homo sapiens
accctcaggacctgg

SEQ ID NO: 15521 - DNA, 15 bp, Homo sapiens
aaccctcaggacctg

SEQ ID NO: 15522 - DNA, 15 bp, Homo sapiens
caaccctcaggacct

SEQ ID NO: 15523 - DNA, 15 bp, Homo sapiens
ccaaccctcaggacc

SEQ ID NO: 15524 - DNA, 15 bp, Homo sapiens
accaaccctcaggac

SEQ ID NO: 15525 - DNA, 15 bp, Homo sapiens
caccaaccctcagga

SEQ ID NO: 15526 - DNA, 15 bp, Homo sapiens
ccaccaaccctcagg

SEQ ID NO: 15527 - DNA, 15 bp, Homo sapiens
cccaccaaccctcag

SEQ ID NO: 15528 - DNA, 15 bp, Homo sapiens
gcccaccaaccctca

SEQ ID NO: 15529 - DNA, 15 bp, Homo sapiens
cgcccaccaaccctc

SEQ ID NO: 15530 - DNA, 15 bp, Homo sapiens
ccgcccaccaaccct

SEQ ID NO: 15531 - DNA, 15 bp, Homo sapiens
gccgcccaccaaccc

SEQ ID NO: 15532 - DNA, 15 bp, Homo sapiens
agccgcccaccaacc

SEQ ID NO: 15533 - DNA, 15 bp, Homo sapiens
tagccgcccaccaac

SEQ ID NO: 15534 - DNA, 15 bp, Homo sapiens
atagccgcccaccaa

SEQ ID NO: 15535 - DNA, 15 bp, Homo sapiens
gatagccgcccacca

SEQ ID NO: 15536 - DNA, 15 bp, Homo sapiens
tgatagccgcccacc

SEQ ID NO: 15537 - DNA, 15 bp, Homo sapiens
ctgatagccgcccac

SEQ ID NO: 15538 - DNA, 15 bp, Homo sapiens
cctgatagccgccca

SEQ ID NO: 15539 - DNA, 15 bp, Homo sapiens
tcctgatagccgccc

SEQ ID NO: 15540 - DNA, 15 bp, Homo sapiens
ttcctgatagccgcc

SEQ ID NO: 15541 - DNA, 15 bp, Homo sapiens
cttcctgatagccgc

SEQ ID NO: 15542 - DNA, 15 bp, Homo sapiens
gcttcctgatagccg

SEQ ID NO: 15543 - DNA, 15 bp, Homo sapiens
tgcttcctgatagcc

SEQ ID NO: 15544 - DNA, 15 bp, Homo sapiens
ctgcttcctgatagc

SEQ ID NO: 15545 - DNA, 15 bp, Homo sapiens
cctgcttcctgatag

SEQ ID NO: 15546 - DNA, 15 bp, Homo sapiens
gcctgcttcctgata

SEQ ID NO: 15547 - DNA, 15 bp, Homo sapiens
tgcctgcttcctgat

SEQ ID NO: 15548 - DNA, 15 bp, Homo sapiens
ctgcctgcttcctga

SEQ ID NO: 15549 - DNA, 15 bp, Homo sapiens
cctgcctgcttcctg

SEQ ID NO: 15550 - DNA, 15 bp, Homo sapiens
ccctgcctgcttcct

SEQ ID NO: 15551 - DNA, 15 bp, Homo sapiens
accctgcctgcttcc

SEQ ID NO: 15552 - DNA, 15 bp, Homo sapiens
gaccctgcctgcttc

SEQ ID NO: 15553 - DNA, 15 bp, Homo sapiens
ggaccctgcctgctt

SEQ ID NO: 15554 - DNA, 15 bp, Homo sapiens
aggaccctgcctgct

SEQ ID NO: 15555 - DNA, 15 bp, Homo sapiens
gaggaccctgcctgc

SEQ ID NO: 15556 - DNA, 15 bp, Homo sapiens
ggaggaccctgcctg

SEQ ID NO: 15557 - DNA, 15 bp, Homo sapiens
aggaggaccctgcct

SEQ ID NO: 15558 - DNA, 15 bp, Homo sapiens
caggaggaccctgcc

SEQ ID NO: 15559 - DNA, 15 bp, Homo sapiens
gcaggaggaccctgc

SEQ ID NO: 15560 - DNA, 15 bp, Homo sapiens
ggcaggaggaccctg

SEQ ID NO: 15561 - DNA, 15 bp, Homo sapiens
gggcaggaggaccct

SEQ ID NO: 15562 - DNA, 15 bp, Homo sapiens
agggcaggaggaccc

SEQ ID NO: 15563 - DNA, 15 bp, Homo sapiens
cagggcaggaggacc

SEQ ID NO: 15564 - DNA, 15 bp, Homo sapiens
ccagggcaggaggac

SEQ ID NO: 15565 - DNA, 15 bp, Homo sapiens
cccagggcaggagga

SEQ ID NO: 15566 - DNA, 15 bp, Homo sapiens
tcccagggcaggagg

SEQ ID NO: 15567 - DNA, 15 bp, Homo sapiens
ctcccagggcaggag

SEQ ID NO: 15568 - DNA, 15 bp, Homo sapiens
tctcccagggcagga

SEQ ID NO: 15569 - DNA, 15 bp, Homo sapiens
gtctcccagggcagg

SEQ ID NO: 15570 - DNA, 15 bp, Homo sapiens
agtctcccagggcag

SEQ ID NO: 15571 - DNA, 15 bp, Homo sapiens
aagtctcccagggca

SEQ ID NO: 15572 - DNA, 15 bp, Homo sapiens
caagtctcccagggc

SEQ ID NO: 15573 - DNA, 15 bp, Homo sapiens
ccaagtctcccaggg

SEQ ID NO: 15574 - DNA, 15 bp, Homo sapiens
cccaagtctcccagg

SEQ ID NO: 15575 - DNA, 15 bp, Homo sapiens
gcccaagtctcccag

SEQ ID NO: 15576 - DNA, 15 bp, Homo sapiens
ggcccaagtctccca

SEQ ID NO: 15577 - DNA, 15 bp, Homo sapiens
aggcccaagtctccc

SEQ ID NO: 15578 - DNA, 15 bp, Homo sapiens
taggcccaagtctcc

SEQ ID NO: 15579 - DNA, 15 bp, Homo sapiens
ctaggcccaagtctc

SEQ ID NO: 15580 - DNA, 15 bp, Homo sapiens
cctaggcccaagtct

SEQ ID NO: 15581 - DNA, 15 bp, Homo sapiens
gcctaggcccaagtc

SEQ ID NO: 15582 - DNA, 15 bp, Homo sapiens
agcctaggcccaagt

SEQ ID NO: 15583 - DNA, 15 bp, Homo sapiens
cagcctaggcccaag

SEQ ID NO: 15584 - DNA, 15 bp, Homo sapiens
tcagcctaggcccaa

SEQ ID NO: 15585 - DNA, 15 bp, Homo sapiens
ttcagcctaggccca

SEQ ID NO: 15586 - DNA, 15 bp, Homo sapiens
tttcagcctaggccc

SEQ ID NO: 15587 - DNA, 15 bp, Homo sapiens
ttttcagcctaggcc

SEQ ID NO: 15588 - DNA, 15 bp, Homo sapiens
gttttcagcctaggc

SEQ ID NO: 15589 - DNA, 15 bp, Homo sapiens
cgttttcagcctagg

SEQ ID NO: 15590 - DNA, 15 bp, Homo sapiens
gcgttttcagcctag

SEQ ID NO: 15591 - DNA, 15 bp, Homo sapiens
agcgttttcagccta

SEQ ID NO: 15592 - DNA, 15 bp, Homo sapiens
gagcgttttcagcct

SEQ ID NO: 15593 - DNA, 15 bp, Homo sapiens
ggagcgttttcagcc

SEQ ID NO: 15594 - DNA, 15 bp, Homo sapiens
gggagcgttttcagc

SEQ ID NO: 15595 - DNA, 15 bp, Homo sapiens
tgggagcgttttcag

SEQ ID NO: 15596 - DNA, 15 bp, Homo sapiens
gtgggagcgttttca

SEQ ID NO: 15597 - DNA, 15 bp, Homo sapiens
agtgggagcgttttc

SEQ ID NO: 15598 - DNA, 15 bp, Homo sapiens
aagtgggagcgtttt

SEQ ID NO: 15599 - DNA, 15 bp, Homo sapiens
aaagtgggagcgttt

SEQ ID NO: 15600 - DNA, 15 bp, Homo sapiens
gaaagtgggagcgtt

SEQ ID NO: 15601 - DNA, 15 bp, Homo sapiens
agaaagtgggagcgt

SEQ ID NO: 15602 - DNA, 15 bp, Homo sapiens
gagaaagtgggagcg

SEQ ID NO: 15603 - DNA, 15 bp, Homo sapiens
tgagaaagtgggagc

SEQ ID NO: 15604 - DNA, 15 bp, Homo sapiens
gtgagaaagtgggag

SEQ ID NO: 15605 - DNA, 15 bp, Homo sapiens
agtgagaaagtggga

SEQ ID NO: 15606 - DNA, 15 bp, Homo sapiens
tagtgagaaagtggg

SEQ ID NO: 15607 - DNA, 15 bp, Homo sapiens
ttagtgagaaagtgg

SEQ ID NO: 15608 - DNA, 15 bp, Homo sapiens
gttagtgagaaagtg

SEQ ID NO: 15609 - DNA, 15 bp, Homo sapiens
ggttagtgagaaagt

SEQ ID NO: 15610 - DNA, 15 bp, Homo sapiens
tggttagtgagaaag

SEQ ID NO: 15611 - DNA, 15 bp, Homo sapiens
gtggttagtgagaaa

SEQ ID NO: 15612 - DNA, 15 bp, Homo sapiens
ggtggttagtgagaa

SEQ ID NO: 15613 - DNA, 15 bp, Homo sapiens
tggtggttagtgaga

SEQ ID NO: 15614 - DNA, 15 bp, Homo sapiens
gtggtggttagtgag

SEQ ID NO: 15615 - DNA, 15 bp, Homo sapiens
ggtggtggttagtga

SEQ ID NO: 15616 - DNA, 15 bp, Homo sapiens
gggtggtggttagtg

SEQ ID NO: 15617 - DNA, 15 bp, Homo sapiens
agggtggtggttagt

SEQ ID NO: 15618 - DNA, 15 bp, Homo sapiens
gagggtggtggttag

SEQ ID NO: 15619 - DNA, 15 bp, Homo sapiens
ggagggtggtggtta

SEQ ID NO: 15620 - DNA, 15 bp, Homo sapiens
gggagggtggtggtt

SEQ ID NO: 15621 - DNA, 15 bp, Homo sapiens
tgggagggtggtggt

SEQ ID NO: 15622 - DNA, 15 bp, Homo sapiens
ttgggagggtggtgg

SEQ ID NO: 15623 - DNA, 15 bp, Homo sapiens
gttgggagggtggtg

SEQ ID NO: 15624 - DNA, 15 bp, Homo sapiens
ggttgggagggtggt

SEQ ID NO: 15625 - DNA, 15 bp, Homo sapiens
aggttgggagggtgg

SEQ ID NO: 15626 - DNA, 15 bp, Homo sapiens
gaggttgggagggtg

SEQ ID NO: 15627 - DNA, 15 bp, Homo sapiens
ggaggttgggagggt

SEQ ID NO: 15628 - DNA, 15 bp, Homo sapiens
gggaggttgggaggg

SEQ ID NO: 15629 - DNA, 15 bp, Homo sapiens
ggggaggttgggagg

SEQ ID NO: 15630 - DNA, 15 bp, Homo sapiens
gggggaggttgggag

SEQ ID NO: 15631 - DNA, 15 bp, Homo sapiens
tgggggaggttggga

SEQ ID NO: 15632 - DNA, 15 bp, Homo sapiens
ctgggggaggttggg

SEQ ID NO: 15633 - DNA, 15 bp, Homo sapiens
gctgggggaggttgg

SEQ ID NO: 15634 - DNA, 15 bp, Homo sapiens
agctgggggaggttg

SEQ ID NO: 15635 - DNA, 15 bp, Homo sapiens
gagctgggggaggtt

SEQ ID NO: 15636 - DNA, 15 bp, Homo sapiens
ggagctgggggaggt

SEQ ID NO: 15637 - DNA, 15 bp, Homo sapiens
gggagctgggggagg

SEQ ID NO: 15638 - DNA, 15 bp, Homo sapiens
ggggagctgggggag

SEQ ID NO: 15639 - DNA, 15 bp, Homo sapiens
tggggagctggggga

SEQ ID NO: 15640 - DNA, 15 bp, Homo sapiens
ttggggagctggggg

SEQ ID NO: 15641 - DNA, 15 bp, Homo sapiens
cttggggagctgggg

SEQ ID NO: 15642 - DNA, 15 bp, Homo sapiens
ccttggggagctggg

SEQ ID NO: 15643 - DNA, 15 bp, Homo sapiens
gccttggggagctgg

SEQ ID NO: 15644 - DNA, 15 bp, Homo sapiens
ggccttggggagctg

SEQ ID NO: 15645 - DNA, 15 bp, Homo sapiens
aggccttggggagct

SEQ ID NO: 15646 - DNA, 15 bp, Homo sapiens
gaggccttggggagc

SEQ ID NO: 15647 - DNA, 15 bp, Homo sapiens
agaggccttggggag

SEQ ID NO: 15648 - DNA, 15 bp, Homo sapiens
cagaggccttgggga

SEQ ID NO: 15649 - DNA, 15 bp, Homo sapiens
ccagaggccttgggg

SEQ ID NO: 15650 - DNA, 15 bp, Homo sapiens
cccagaggccttggg

SEQ ID NO: 15651 - DNA, 15 bp, Homo sapiens
gcccagaggccttgg

SEQ ID NO: 15652 - DNA, 15 bp, Homo sapiens
ggcccagaggccttg

SEQ ID NO: 15653 - DNA, 15 bp, Homo sapiens
gggcccagaggcctt

SEQ ID NO: 15654 - DNA, 15 bp, Homo sapiens
agggcccagaggcct

SEQ ID NO: 15655 - DNA, 15 bp, Homo sapiens
cagggcccagaggcc

SEQ ID NO: 15656 - DNA, 15 bp, Homo sapiens
ccagggcccagaggc

SEQ ID NO: 15657 - DNA, 15 bp, Homo sapiens
cccagggcccagagg

SEQ ID NO: 15658 - DNA, 15 bp, Homo sapiens
ccccagggcccagag

SEQ ID NO: 15659 - DNA, 15 bp, Homo sapiens
cccccagggcccaga

SEQ ID NO: 15660 - DNA, 15 bp, Homo sapiens
ccccccagggcccag

SEQ ID NO: 15661 - DNA, 15 bp, Homo sapiens
tccccccagggccca

SEQ ID NO: 15662 - DNA, 15 bp, Homo sapiens
ctccccccagggccc

SEQ ID NO: 15663 - DNA, 15 bp, Homo sapiens
actccccccagggcc

SEQ ID NO: 15664 - DNA, 15 bp, Homo sapiens
gactccccccagggc

SEQ ID NO: 15665 - DNA, 15 bp, Homo sapiens
tgactccccccaggg

SEQ ID NO: 15666 - DNA, 15 bp, Homo sapiens
gtgactccccccagg

SEQ ID NO: 15667 - DNA, 15 bp, Homo sapiens
tgtgactccccccag

SEQ ID NO: 15668 - DNA, 15 bp, Homo sapiens
ctgtgactcccccca

SEQ ID NO: 15669 - DNA, 15 bp, Homo sapiens
tctgtgactcccccc

SEQ ID NO: 15670 - DNA, 15 bp, Homo sapiens
ctctgtgactccccc

SEQ ID NO: 15671 - DNA, 15 bp, Homo sapiens
actctgtgactcccc

SEQ ID NO: 15672 - DNA, 15 bp, Homo sapiens
cactctgtgactccc

SEQ ID NO: 15673 - DNA, 15 bp, Homo sapiens
tcactctgtgactcc

SEQ ID NO: 15674 - DNA, 15 bp, Homo sapiens
atcactctgtgactc

SEQ ID NO: 15675 - DNA, 15 bp, Homo sapiens
catcactctgtgact

SEQ ID NO: 15676 - DNA, 15 bp, Homo sapiens
tcatcactctgtgac

SEQ ID NO: 15677 - DNA, 15 bp, Homo sapiens
atcatcactctgtga

SEQ ID NO: 15678 - DNA, 15 bp, Homo sapiens
tatcatcactctgtg

SEQ ID NO: 15679 - DNA, 15 bp, Homo sapiens
ctatcatcactctgt

SEQ ID NO: 15680 - DNA, 15 bp, Homo sapiens
actatcatcactctg

SEQ ID NO: 15681 - DNA, 15 bp, Homo sapiens
gactatcatcactct

SEQ ID NO: 15682 - DNA, 15 bp, Homo sapiens
tgactatcatcactc

SEQ ID NO: 15683 - DNA, 15 bp, Homo sapiens
ttgactatcatcact

SEQ ID NO: 15684 - DNA, 15 bp, Homo sapiens
gttgactatcatcac

SEQ ID NO: 15685 - DNA, 15 bp, Homo sapiens
cgttgactatcatca

SEQ ID NO: 15686 - DNA, 15 bp, Homo sapiens
gcgttgactatcatc

SEQ ID NO: 15687 - DNA, 15 bp, Homo sapiens
agcgttgactatcat

SEQ ID NO: 15688 - DNA, 15 bp, Homo sapiens
tagcgttgactatca

SEQ ID NO: 15689 - DNA, 15 bp, Homo sapiens
gtagcgttgactatc

SEQ ID NO: 15690 - DNA, 15 bp, Homo sapiens
tgtagcgttgactat

SEQ ID NO: 15691 - DNA, 15 bp, Homo sapiens
ctgtagcgttgacta

SEQ ID NO: 15692 - DNA, 15 bp, Homo sapiens
tctgtagcgttgact

SEQ ID NO: 15693 - DNA, 15 bp, Homo sapiens
ctctgtagcgttgac

SEQ ID NO: 15694 - DNA, 15 bp, Homo sapiens
tctctgtagcgttga

SEQ ID NO: 15695 - DNA, 15 bp, Homo sapiens
ttctctgtagcgttg

SEQ ID NO: 15696 - DNA, 15 bp, Homo sapiens
gttctctgtagcgtt

SEQ ID NO: 15697 - DNA, 15 bp, Homo sapiens
tgttctctgtagcgt

SEQ ID NO: 15698 - DNA, 15 bp, Homo sapiens
ttgttctctgtagcg

SEQ ID NO: 15699 - DNA, 15 bp, Homo sapiens
cttgttctctgtagc

SEQ ID NO: 15700 - DNA, 15 bp, Homo sapiens
tcttgttctctgtag

SEQ ID NO: 15701 - DNA, 15 bp, Homo sapiens
ttcttgttctctgta

SEQ ID NO: 15702 - DNA, 15 bp, Homo sapiens
tttcttgttctctgt

SEQ ID NO: 15703 - DNA, 15 bp, Homo sapiens
gtttcttgttctctg

SEQ ID NO: 15704 - DNA, 15 bp, Homo sapiens
tgtttcttgttctct

SEQ ID NO: 15705 - DNA, 15 bp, Homo sapiens
ttgtttcttgttctc

SEQ ID NO: 15706 - DNA, 15 bp, Homo sapiens
cttgtttcttgttct

SEQ ID NO: 15707 - DNA, 15 bp, Homo sapiens
tcttgtttcttgttc

SEQ ID NO: 15708 - DNA, 15 bp, Homo sapiens
atcttgtttcttgtt

SEQ ID NO: 15709 - DNA, 15 bp, Homo sapiens
aatcttgtttcttgt

SEQ ID NO: 15710 - DNA, 15 bp, Homo sapiens
taatcttgtttcttg

SEQ ID NO: 15711 - DNA, 15 bp, Homo sapiens
ttaatcttgtttctt

SEQ ID NO: 15712 - DNA, 15 bp, Homo sapiens
tttaatcttgtttct

SEQ ID NO: 15713 - DNA, 15 bp, Homo sapiens
ctttaatcttgtttc

SEQ ID NO: 15714 - DNA, 15 bp, Homo sapiens
gctttaatcttgttt

SEQ ID NO: 15715 - DNA, 15 bp, Homo sapiens
agctttaatcttgtt

SEQ ID NO: 15716 - DNA, 15 bp, Homo sapiens
gagctttaatcttgt

SEQ ID NO: 15717 - DNA, 15 bp, Homo sapiens
agagctttaatcttg

SEQ ID NO: 15718 - DNA, 15 bp, Homo sapiens
cagagctttaatctt

SEQ ID NO: 15719 - DNA, 15 bp, Homo sapiens
ccagagctttaatct

SEQ ID NO: 15720 - DNA, 15 bp, Homo sapiens
gccagagctttaatc

SEQ ID NO: 15721 - DNA, 15 bp, Homo sapiens
ggccagagctttaat

SEQ ID NO: 15722 - DNA, 15 bp, Homo sapiens
aggccagagctttaa

SEQ ID NO: 15723 - DNA, 15 bp, Homo sapiens
aaggccagagcttta

SEQ ID NO: 15724 - DNA, 15 bp, Homo sapiens
aaaggccagagcttt

SEQ ID NO: 15725 - DNA, 15 bp, Homo sapiens
gaaaggccagagctt

SEQ ID NO: 15726 - DNA, 15 bp, Homo sapiens
agaaaggccagagct

SEQ ID NO: 15727 - DNA, 15 bp, Homo sapiens
tagaaaggccagagc

SEQ ID NO: 15728 - DNA, 15 bp, Homo sapiens
atagaaaggccagag

SEQ ID NO: 15729 - DNA, 15 bp, Homo sapiens
catagaaaggccaga

SEQ ID NO: 15730 - DNA, 15 bp, Homo sapiens
tcatagaaaggccag

SEQ ID NO: 15731 - DNA, 15 bp, Homo sapiens
gtcatagaaaggcca

SEQ ID NO: 15732 - DNA, 15 bp, Homo sapiens
agtcatagaaaggcc

SEQ ID NO: 15733 - DNA, 15 bp, Homo sapiens
gagtcatagaaaggc

SEQ ID NO: 15734 - DNA, 15 bp, Homo sapiens
tgagtcatagaaagg

SEQ ID NO: 15735 - DNA, 15 bp, Homo sapiens
ttgagtcatagaaag

SEQ ID NO: 15736 - DNA, 15 bp, Homo sapiens
tttgagtcatagaaa

SEQ ID NO: 15737 - DNA, 15 bp, Homo sapiens
ttttgagtcatagaa

SEQ ID NO: 15738 - DNA, 15 bp, Homo sapiens
attttgagtcataga

SEQ ID NO: 15739 - DNA, 15 bp, Homo sapiens
gattttgagtcatag

SEQ ID NO: 15740 - DNA, 15 bp, Homo sapiens
ggattttgagtcata

SEQ ID NO: 15741 - DNA, 15 bp, Homo sapiens
tggattttgagtcat

SEQ ID NO: 15742 - DNA, 15 bp, Homo sapiens
ctggattttgagtca

SEQ ID NO: 15743 - DNA, 15 bp, Homo sapiens
tctggattttgagtc

SEQ ID NO: 15744 - DNA, 15 bp, Homo sapiens
ctctggattttgagt

SEQ ID NO: 15745 - DNA, 15 bp, Homo sapiens
cctctggattttgag

SEQ ID NO: 15746 - DNA, 15 bp, Homo sapiens
gcctctggattttga

SEQ ID NO: 15747 - DNA, 15 bp, Homo sapiens
ggcctctggattttg

SEQ ID NO: 15748 - DNA, 15 bp, Homo sapiens
tggcctctggatttt

SEQ ID NO: 15749 - DNA, 15 bp, Homo sapiens
atggcctctggattt

SEQ ID NO: 15750 - DNA, 15 bp, Homo sapiens
tatggcctctggatt

SEQ ID NO: 15751 - DNA, 15 bp, Homo sapiens
ttatggcctctggat

SEQ ID NO: 15752 - DNA, 15 bp, Homo sapiens
tttatggcctctgga

SEQ ID NO: 15753 - DNA, 15 bp, Homo sapiens
ttttatggcctctgg

SEQ ID NO: 15754 - DNA, 15 bp, Homo sapiens
cttttatggcctctg

SEQ ID NO: 15755 - DNA, 15 bp, Homo sapiens
tcttttatggcctct

SEQ ID NO: 15756 - DNA, 15 bp, Homo sapiens
ttcttttatggcctc

SEQ ID NO: 15757 - DNA, 15 bp, Homo sapiens
tttcttttatggcct

SEQ ID NO: 15758 - DNA, 15 bp, Homo sapiens
ttttcttttatggcc

SEQ ID NO: 15759 - DNA, 15 bp, Homo sapiens
cttttcttttatggc

SEQ ID NO: 15760 - DNA, 15 bp, Homo sapiens
tcttttcttttatgg

SEQ ID NO: 15761 - DNA, 15 bp, Homo sapiens
atcttttcttttatg

SEQ ID NO: 15762 - DNA, 15 bp, Homo sapiens
catcttttcttttat

SEQ ID NO: 15763 - DNA, 15 bp, Homo sapiens
ccatcttttctttta

SEQ ID NO: 15764 - DNA, 15 bp, Homo sapiens
cccatcttttctttt

SEQ ID NO: 15765 - DNA, 15 bp, Homo sapiens
acccatcttttcttt

SEQ ID NO: 15766 - DNA, 15 bp, Homo sapiens
tacccatcttttctt

SEQ ID NO: 15767 - DNA, 15 bp, Homo sapiens
gtacccatcttttct

SEQ ID NO: 15768 - DNA, 15 bp, Homo sapiens
agtacccatcttttc

SEQ ID NO: 15769 - DNA, 15 bp, Homo sapiens
aagtacccatctttt

SEQ ID NO: 15770 - DNA, 15 bp, Homo sapiens
aaagtacccatcttt

SEQ ID NO: 15771 - DNA, 15 bp, Homo sapiens
aaaagtacccatctt

SEQ ID NO: 15772 - DNA, 15 bp, Homo sapiens
caaaagtacccatct

SEQ ID NO: 15773 - DNA, 15 bp, Homo sapiens
tcaaaagtacccatc

SEQ ID NO: 15774 - DNA, 15 bp, Homo sapiens
ttcaaaagtacccat

SEQ ID NO: 15775 - DNA, 15 bp, Homo sapiens
attcaaaagtaccca

SEQ ID NO: 15776 - DNA, 15 bp, Homo sapiens
tattcaaaagtaccc

SEQ ID NO: 15777 - DNA, 15 bp, Homo sapiens
gtattcaaaagtacc

SEQ ID NO: 15778 - DNA, 15 bp, Homo sapiens
tgtattcaaaagtac

SEQ ID NO: 15779 - DNA, 15 bp, Homo sapiens
atgtattcaaaagta

SEQ ID NO: 15780 - DNA, 15 bp, Homo sapiens
catgtattcaaaagt

SEQ ID NO: 15781 - DNA, 15 bp, Homo sapiens
tcatgtattcaaaag

SEQ ID NO: 15782 - DNA, 15 bp, Homo sapiens
ttcatgtattcaaaa

SEQ ID NO: 15783 - DNA, 15 bp, Homo sapiens
tttcatgtattcaaa

SEQ ID NO: 15784 - DNA, 15 bp, Homo sapiens
ttttcatgtattcaa

SEQ ID NO: 15785 - DNA, 15 bp, Homo sapiens
cttttcatgtattca

SEQ ID NO: 15786 - DNA, 15 bp, Homo sapiens
tcttttcatgtattc

SEQ ID NO: 15787 - DNA, 15 bp, Homo sapiens
ttcttttcatgtatt

SEQ ID NO: 15788 - DNA, 15 bp, Homo sapiens
tttcttttcatgtat

SEQ ID NO: 15789 - DNA, 15 bp, Homo sapiens
ctttcttttcatgta

SEQ ID NO: 15790 - DNA, 15 bp, Homo sapiens
tctttcttttcatgt

SEQ ID NO: 15791 - DNA, 15 bp, Homo sapiens
ttctttcttttcatg

SEQ ID NO: 15792 - DNA, 15 bp, Homo sapiens
tttctttcttttcat

SEQ ID NO: 15793 - DNA, 15 bp, Homo sapiens
ttttctttcttttca

SEQ ID NO: 15794 - DNA, 15 bp, Homo sapiens
attttctttcttttc

SEQ ID NO: 15795 - DNA, 15 bp, Homo sapiens
tattttctttctttt

SEQ ID NO: 15796 - DNA, 15 bp, Homo sapiens
atattttctttcttt

SEQ ID NO: 15797 - DNA, 15 bp, Homo sapiens
aatattttctttctt

SEQ ID NO: 15798 - DNA, 15 bp, Homo sapiens
aaatattttctttct

SEQ ID NO: 15799 - DNA, 15 bp, Homo sapiens
taaatattttctttc

SEQ ID NO: 15800 - DNA, 15 bp, Homo sapiens
ttaaatattttcttt

SEQ ID NO: 15801 - DNA, 15 bp, Homo sapiens
tttaaatattttctt

SEQ ID NO: 15802 - DNA, 15 bp, Homo sapiens
ctttaaatattttct

SEQ ID NO: 15803 - DNA, 15 bp, Homo sapiens
tctttaaatattttc

SEQ ID NO: 15804 - DNA, 15 bp, Homo sapiens
ttctttaaatatttt

SEQ ID NO: 15805 - DNA, 15 bp, Homo sapiens
tttctttaaatattt

SEQ ID NO: 15806 - DNA, 15 bp, Homo sapiens
ttttctttaaatatt

SEQ ID NO: 15807 - DNA, 15 bp, Homo sapiens
attttctttaaatat

SEQ ID NO: 15808 - DNA, 15 bp, Homo sapiens
tattttctttaaata

SEQ ID NO: 15809 - DNA, 15 bp, Homo sapiens
ctattttctttaaat

SEQ ID NO: 15810 - DNA, 15 bp, Homo sapiens
tctattttctttaaa

SEQ ID NO: 15811 - DNA, 15 bp, Homo sapiens
ttctattttctttaa

SEQ ID NO: 15812 - DNA, 15 bp, Homo sapiens
attctattttcttta

SEQ ID NO: 15813 - DNA, 15 bp, Homo sapiens
tattctattttcttt

SEQ ID NO: 15814 - DNA, 15 bp, Homo sapiens
ttattctattttctt

SEQ ID NO: 15815 - DNA, 15 bp, Homo sapiens
cttattctattttct

SEQ ID NO: 15816 - DNA, 15 bp, Homo sapiens
gcttattctattttc

SEQ ID NO: 15817 - DNA, 15 bp, Homo sapiens
tgcttattctatttt

SEQ ID NO: 15818 - DNA, 15 bp, Homo sapiens
ttgcttattctattt

SEQ ID NO: 15819 - DNA, 15 bp, Homo sapiens
tttgcttattctatt

SEQ ID NO: 15820 - DNA, 15 bp, Homo sapiens
ctttgcttattctat

SEQ ID NO: 15821 - DNA, 15 bp, Homo sapiens
actttgcttattcta

SEQ ID NO: 15822 - DNA, 15 bp, Homo sapiens
gactttgcttattct

SEQ ID NO: 15823 - DNA, 15 bp, Homo sapiens
tgactttgcttattc

SEQ ID NO: 15824 - DNA, 15 bp, Homo sapiens
ttgactttgcttatt

SEQ ID NO: 15825 - DNA, 15 bp, Homo sapiens
tttgactttgcttat

SEQ ID NO: 15826 - DNA, 15 bp, Homo sapiens
ttttgactttgctta

SEQ ID NO: 15827 - DNA, 15 bp, Homo sapiens
cttttgactttgctt

SEQ ID NO: 15828 - DNA, 15 bp, Homo sapiens
acttttgactttgct

SEQ ID NO: 15829 - DNA, 15 bp, Homo sapiens
aacttttgactttgc

SEQ ID NO: 15830 - DNA, 15 bp, Homo sapiens
taacttttgactttg

SEQ ID NO: 15831 - DNA, 15 bp, Homo sapiens
ttaacttttgacttt

SEQ ID NO: 15832 - DNA, 15 bp, Homo sapiens
attaacttttgactt

SEQ ID NO: 15833 - DNA, 15 bp, Homo sapiens
cattaacttttgact

SEQ ID NO: 15834 - DNA, 15 bp, Homo sapiens
tcattaacttttgac

SEQ ID NO: 15835 - DNA, 15 bp, Homo sapiens
gtcattaacttttga

SEQ ID NO: 15836 - DNA, 15 bp, Homo sapiens
tgtcattaacttttg

SEQ ID NO: 15837 - DNA, 15 bp, Homo sapiens
ttgtcattaactttt

SEQ ID NO: 15838 - DNA, 15 bp, Homo sapiens
cttgtcattaacttt

SEQ ID NO: 15839 - DNA, 15 bp, Homo sapiens
acttgtcattaactt

SEQ ID NO: 15840 - DNA, 15 bp, Homo sapiens
aacttgtcattaact

SEQ ID NO: 15841 - DNA, 15 bp, Homo sapiens
caacttgtcattaac

SEQ ID NO: 15842 - DNA, 15 bp, Homo sapiens
ccaacttgtcattaa

SEQ ID NO: 15843 - DNA, 15 bp, Homo sapiens
cccaacttgtcatta

SEQ ID NO: 15844 - DNA, 15 bp, Homo sapiens
tcccaacttgtcatt

SEQ ID NO: 15845 - DNA, 15 bp, Homo sapiens
ttcccaacttgtcat

SEQ ID NO: 15846 - DNA, 15 bp, Homo sapiens
tttcccaacttgtca

SEQ ID NO: 15847 - DNA, 15 bp, Homo sapiens
ttttcccaacttgtc

SEQ ID NO: 15848 - DNA, 15 bp, Homo sapiens
tttttcccaacttgt

SEQ ID NO: 15849 - DNA, 15 bp, Homo sapiens
ttttttcccaacttg

SEQ ID NO: 15850 - DNA, 15 bp, Homo sapiens
attttttcccaactt

SEQ ID NO: 15851 - DNA, 15 bp, Homo sapiens
tattttttcccaact

SEQ ID NO: 15852 - DNA, 15 bp, Homo sapiens
atattttttcccaac

SEQ ID NO: 15853 - DNA, 15 bp, Homo sapiens
aatattttttcccaa

SEQ ID NO: 15854 - DNA, 15 bp, Homo sapiens
aaatattttttccca

SEQ ID NO: 15855 - DNA, 15 bp, Homo sapiens
caaatattttttccc

SEQ ID NO: 15856 - DNA, 15 bp, Homo sapiens
ccaaatattttttcc

SEQ ID NO: 15857 - DNA, 15 bp, Homo sapiens
tccaaatattttttc

SEQ ID NO: 15858 - DNA, 15 bp, Homo sapiens
ctccaaatatttttt

SEQ ID NO: 15859 - DNA, 15 bp, Homo sapiens
gctccaaatattttt

SEQ ID NO: 15860 - DNA, 15 bp, Homo sapiens
ggctccaaatatttt

SEQ ID NO: 15861 - DNA, 15 bp, Homo sapiens
gggctccaaatattt

SEQ ID NO: 15862 - DNA, 15 bp, Homo sapiens
tgggctccaaatatt

SEQ ID NO: 15863 - DNA, 15 bp, Homo sapiens
atgggctccaaatat

SEQ ID NO: 15864 - DNA, 15 bp, Homo sapiens
tatgggctccaaata

SEQ ID NO: 15865 - DNA, 15 bp, Homo sapiens
atatgggctccaaat

SEQ ID NO: 15866 - DNA, 15 bp, Homo sapiens
gatatgggctccaaa

SEQ ID NO: 15867 - DNA, 15 bp, Homo sapiens
tgatatgggctccaa

SEQ ID NO: 15868 - DNA, 15 bp, Homo sapiens
atgatatgggctcca

SEQ ID NO: 15869 - DNA, 15 bp, Homo sapiens
tatgatatgggctcc

SEQ ID NO: 15870 - DNA, 15 bp, Homo sapiens
ctatgatatgggctc

SEQ ID NO: 15871 - DNA, 15 bp, Homo sapiens
cctatgatatgggct

SEQ ID NO: 15872 - DNA, 15 bp, Homo sapiens
acctatgatatgggc

SEQ ID NO: 15873 - DNA, 15 bp, Homo sapiens
tacctatgatatggg

SEQ ID NO: 15874 - DNA, 15 bp, Homo sapiens
ttacctatgatatgg

SEQ ID NO: 15875 - DNA, 15 bp, Homo sapiens
tttacctatgatatg

SEQ ID NO: 15876 - DNA, 15 bp, Homo sapiens
ctttacctatgatat

SEQ ID NO: 15877 - DNA, 15 bp, Homo sapiens
tctttacctatgata

SEQ ID NO: 15878 - DNA, 15 bp, Homo sapiens
ctctttacctatgat

SEQ ID NO: 15879 - DNA, 15 bp, Homo sapiens
gctctttacctatga

SEQ ID NO: 15880 - DNA, 15 bp, Homo sapiens
tgctctttacctatg

SEQ ID NO: 15881 - DNA, 15 bp, Homo sapiens
ttgctctttacctat

SEQ ID NO: 15882 - DNA, 15 bp, Homo sapiens
tttgctctttaccta

SEQ ID NO: 15883 - DNA, 15 bp, Homo sapiens
atttgctctttacct

SEQ ID NO: 15884 - DNA, 15 bp, Homo sapiens
gatttgctctttacc

SEQ ID NO: 15885 - DNA, 15 bp, Homo sapiens
agatttgctctttac

SEQ ID NO: 15886 - DNA, 15 bp, Homo sapiens
tagatttgctcttta

SEQ ID NO: 15887 - DNA, 15 bp, Homo sapiens
gtagatttgctcttt

SEQ ID NO: 15888 - DNA, 15 bp, Homo sapiens
ggtagatttgctctt

SEQ ID NO: 15889 - DNA, 15 bp, Homo sapiens
aggtagatttgctct

SEQ ID NO: 15890 - DNA, 15 bp, Homo sapiens
taggtagatttgctc

SEQ ID NO: 15891 - DNA, 15 bp, Homo sapiens
ataggtagatttgct

SEQ ID NO: 15892 - DNA, 15 bp, Homo sapiens
aataggtagatttgc

SEQ ID NO: 15893 - DNA, 15 bp, Homo sapiens
taataggtagatttg

SEQ ID NO: 15894 - DNA, 15 bp, Homo sapiens
ataataggtagattt

SEQ ID NO: 15895 - DNA, 15 bp, Homo sapiens
tataataggtagatt

SEQ ID NO: 15896 - DNA, 15 bp, Homo sapiens
ctataataggtagat

SEQ ID NO: 15897 - DNA, 15 bp, Homo sapiens
tctataataggtaga

SEQ ID NO: 15898 - DNA, 15 bp, Homo sapiens
ttctataataggtag

SEQ ID NO: 15899 - DNA, 15 bp, Homo sapiens
tttctataataggta

SEQ ID NO: 15900 - DNA, 15 bp, Homo sapiens
ctttctataataggt

SEQ ID NO: 15901 - DNA, 15 bp, Homo sapiens
tctttctataatagg

SEQ ID NO: 15902 - DNA, 15 bp, Homo sapiens
ctctttctataatag

SEQ ID NO: 15903 - DNA, 15 bp, Homo sapiens
actctttctataata

SEQ ID NO: 15904 - DNA, 15 bp, Homo sapiens
cactctttctataat

SEQ ID NO: 15905 - DNA, 15 bp, Homo sapiens
gcactctttctataa

SEQ ID NO: 15906 - DNA, 15 bp, Homo sapiens
ggcactctttctata

SEQ ID NO: 15907 - DNA, 15 bp, Homo sapiens
aggcactctttctat

SEQ ID NO: 15908 - DNA, 15 bp, Homo sapiens
taggcactctttcta

SEQ ID NO: 15909 - DNA, 15 bp, Homo sapiens
ttaggcactctttct

SEQ ID NO: 15910 - DNA, 15 bp, Homo sapiens
tttaggcactctttc

SEQ ID NO: 15911 - DNA, 15 bp, Homo sapiens
ttttaggcactcttt

SEQ ID NO: 15912 - DNA, 15 bp, Homo sapiens
tttttaggcactctt

SEQ ID NO: 15913 - DNA, 15 bp, Homo sapiens
atttttaggcactct

SEQ ID NO: 15914 - DNA, 15 bp, Homo sapiens
tatttttaggcactc

SEQ ID NO: 15915 - DNA, 15 bp, Homo sapiens
ttatttttaggcact

SEQ ID NO: 15916 - DNA, 15 bp, Homo sapiens
tttatttttaggcac

SEQ ID NO: 15917 - DNA, 15 bp, Homo sapiens
gtttatttttaggca

SEQ ID NO: 15918 - DNA, 15 bp, Homo sapiens
tgtttatttttaggc

SEQ ID NO: 15919 - DNA, 15 bp, Homo sapiens
ctgtttatttttagg

SEQ ID NO: 15920 - DNA, 15 bp, Homo sapiens
cctgtttatttttag

SEQ ID NO: 15921 - DNA, 15 bp, Homo sapiens
tcctgtttattttta

SEQ ID NO: 15922 - DNA, 15 bp, Homo sapiens
gtcctgtttattttt

SEQ ID NO: 15923 - DNA, 15 bp, Homo sapiens
tgtcctgtttatttt

SEQ ID NO: 15924 - DNA, 15 bp, Homo sapiens
ttgtcctgtttattt

SEQ ID NO: 15925 - DNA, 15 bp, Homo sapiens
tttgtcctgtttatt

SEQ ID NO: 15926 - DNA, 15 bp, Homo sapiens
ttttgtcctgtttat

SEQ ID NO: 15927 - DNA, 15 bp, Homo sapiens
tttttgtcctgttta

SEQ ID NO: 15928 - DNA, 15 bp, Homo sapiens
ctttttgtcctgttt

SEQ ID NO: 15929 - DNA, 15 bp, Homo sapiens
tctttttgtcctgtt

SEQ ID NO: 15930 - DNA, 15 bp, Homo sapiens
gtctttttgtcctgt

SEQ ID NO: 15931 - DNA, 15 bp, Homo sapiens
ggtctttttgtcctg

SEQ ID NO: 15932 - DNA, 15 bp, Homo sapiens
tggtctttttgtcct

SEQ ID NO: 15933 - DNA, 15 bp, Homo sapiens
ctggtctttttgtcc

SEQ ID NO: 15934 - DNA, 15 bp, Homo sapiens
tctggtctttttgtc

SEQ ID NO: 15935 - DNA, 15 bp, Homo sapiens
ttctggtctttttgt

SEQ ID NO: 15936 - DNA, 15 bp, Homo sapiens
cttctggtctttttg

SEQ ID NO: 15937 - DNA, 15 bp, Homo sapiens
gcttctggtcttttt

SEQ ID NO: 15938 - DNA, 15 bp, Homo sapiens
tgcttctggtctttt

SEQ ID NO: 15939 - DNA, 15 bp, Homo sapiens
gtgcttctggtcttt

SEQ ID NO: 15940 - DNA, 15 bp, Homo sapiens
tgtgcttctggtctt

SEQ ID NO: 15941 - DNA, 15 bp, Homo sapiens
ttgtgcttctggtct

SEQ ID NO: 15942 - DNA, 15 bp, Homo sapiens
attgtgcttctggtc

SEQ ID NO: 15943 - DNA, 15 bp, Homo sapiens
tattgtgcttctggt

SEQ ID NO: 15944 - DNA, 15 bp, Homo sapiens
ctattgtgcttctgg

SEQ ID NO: 15945 - DNA, 15 bp, Homo sapiens
gctattgtgcttctg

SEQ ID NO: 15946 - DNA, 15 bp, Homo sapiens
agctattgtgcttct

SEQ ID NO: 15947 - DNA, 15 bp, Homo sapiens
gagctattgtgcttc

SEQ ID NO: 15948 - DNA, 15 bp, Homo sapiens
tgagctattgtgctt

SEQ ID NO: 15949 - DNA, 15 bp, Homo sapiens
ctgagctattgtgct

SEQ ID NO: 15950 - DNA, 15 bp, Homo sapiens
tctgagctattgtgc

SEQ ID NO: 15951 - DNA, 15 bp, Homo sapiens
ttctgagctattgtg

SEQ ID NO: 15952 - DNA, 15 bp, Homo sapiens
gttctgagctattgt

SEQ ID NO: 15953 - DNA, 15 bp, Homo sapiens
tgttctgagctattg

SEQ ID NO: 15954 - DNA, 15 bp, Homo sapiens
ttgttctgagctatt

SEQ ID NO: 15955 - DNA, 15 bp, Homo sapiens
tttgttctgagctat

SEQ ID NO: 15956 - DNA, 15 bp, Homo sapiens
ttttgttctgagcta

SEQ ID NO: 15957 - DNA, 15 bp, Homo sapiens
cttttgttctgagct

SEQ ID NO: 15958 - DNA, 15 bp, Homo sapiens
ccttttgttctgagc

SEQ ID NO: 15959 - DNA, 15 bp, Homo sapiens
tccttttgttctgag

SEQ ID NO: 15960 - DNA, 15 bp, Homo sapiens
gtccttttgttctga

SEQ ID NO: 15961 - DNA, 15 bp, Homo sapiens
agtccttttgttctg

SEQ ID NO: 15962 - DNA, 15 bp, Homo sapiens
gagtccttttgttct

SEQ ID NO: 15963 - DNA, 15 bp, Homo sapiens
tgagtccttttgttc

SEQ ID NO: 15964 - DNA, 15 bp, Homo sapiens
atgagtccttttgtt

SEQ ID NO: 15965 - DNA, 15 bp, Homo sapiens
catgagtccttttgt

SEQ ID NO: 15966 - DNA, 15 bp, Homo sapiens
tcatgagtccttttg

SEQ ID NO: 15967 - DNA, 15 bp, Homo sapiens
ctcatgagtcctttt

SEQ ID NO: 15968 - DNA, 15 bp, Homo sapiens
cctcatgagtccttt

SEQ ID NO: 15969 - DNA, 15 bp, Homo sapiens
ccctcatgagtcctt

SEQ ID NO: 15970 - DNA, 15 bp, Homo sapiens
accctcatgagtcct

SEQ ID NO: 15971 - DNA, 15 bp, Homo sapiens
aaccctcatgagtcc

SEQ ID NO: 15972 - DNA, 15 bp, Homo sapiens
gaaccctcatgagtc

SEQ ID NO: 15973 - DNA, 15 bp, Homo sapiens
agaaccctcatgagt

SEQ ID NO: 15974 - DNA, 15 bp, Homo sapiens
cagaaccctcatgag

SEQ ID NO: 15975 - DNA, 15 bp, Homo sapiens
tcagaaccctcatga

SEQ ID NO: 15976 - DNA, 15 bp, Homo sapiens
atcagaaccctcatg

SEQ ID NO: 15977 - DNA, 15 bp, Homo sapiens
catcagaaccctcat

SEQ ID NO: 15978 - DNA, 15 bp, Homo sapiens
ccatcagaaccctca

SEQ ID NO: 15979 - DNA, 15 bp, Homo sapiens
cccatcagaaccctc

SEQ ID NO: 15980 - DNA, 15 bp, Homo sapiens
ccccatcagaaccct

SEQ ID NO: 15981 - DNA, 15 bp, Homo sapiens
tccccatcagaaccc

SEQ ID NO: 15982 - DNA, 15 bp, Homo sapiens
gtccccatcagaacc

SEQ ID NO: 15983 - DNA, 15 bp, Homo sapiens
agtccccatcagaac

SEQ ID NO: 15984 - DNA, 15 bp, Homo sapiens
cagtccccatcagaa

SEQ ID NO: 15985 - DNA, 15 bp, Homo sapiens
tcagtccccatcaga

SEQ ID NO: 15986 - DNA, 15 bp, Homo sapiens
ctcagtccccatcag

SEQ ID NO: 15987 - DNA, 15 bp, Homo sapiens
cctcagtccccatca

SEQ ID NO: 15988 - DNA, 15 bp, Homo sapiens
tcctcagtccccatc

SEQ ID NO: 15989 - DNA, 15 bp, Homo sapiens
ttcctcagtccccat

SEQ ID NO: 15990 - DNA, 15 bp, Homo sapiens
tttcctcagtcccca

SEQ ID NO: 15991 - DNA, 15 bp, Homo sapiens
gtttcctcagtcccc

SEQ ID NO: 15992 - DNA, 15 bp, Homo sapiens
tgtttcctcagtccc

SEQ ID NO: 15993 - DNA, 15 bp, Homo sapiens
ctgtttcctcagtcc

SEQ ID NO: 15994 - DNA, 15 bp, Homo sapiens
cctgtttcctcagtc

SEQ ID NO: 15995 - DNA, 15 bp, Homo sapiens
gcctgtttcctcagt

SEQ ID NO: 15996 - DNA, 15 bp, Homo sapiens
ggcctgtttcctcag

SEQ ID NO: 15997 - DNA, 15 bp, Homo sapiens
tggcctgtttcctca

SEQ ID NO: 15998 - DNA, 15 bp, Homo sapiens
ctggcctgtttcctc

SEQ ID NO: 15999 - DNA, 15 bp, Homo sapiens
cctggcctgtttcct

SEQ ID NO: 16000 - DNA, 15 bp, Homo sapiens
tcctggcctgtttcc

SEQ ID NO: 16001 - DNA, 15 bp, Homo sapiens
ctcctggcctgtttc

SEQ ID NO: 16002 - DNA, 15 bp, Homo sapiens
tctcctggcctgttt

SEQ ID NO: 16003 - DNA, 15 bp, Homo sapiens
ctctcctggcctgtt

SEQ ID NO: 16004 - DNA, 15 bp, Homo sapiens
tctctcctggcctgt

SEQ ID NO: 16005 - DNA, 15 bp, Homo sapiens
ttctctcctggcctg

SEQ ID NO: 16006 - DNA, 15 bp, Homo sapiens
tttctctcctggcct

SEQ ID NO: 16007 - DNA, 15 bp, Homo sapiens
ctttctctcctggcc

SEQ ID NO: 16008 - DNA, 15 bp, Homo sapiens
tctttctctcctggc

SEQ ID NO: 16009 - DNA, 15 bp, Homo sapiens
ttctttctctcctgg

SEQ ID NO: 16010 - DNA, 15 bp, Homo sapiens
tttctttctctcctg

SEQ ID NO: 16011 - DNA, 15 bp, Homo sapiens
ctttctttctctcct

SEQ ID NO: 16012 - DNA, 15 bp, Homo sapiens
gctttctttctctcc

SEQ ID NO: 16013 - DNA, 15 bp, Homo sapiens
ggctttctttctctc

SEQ ID NO: 16014 - DNA, 15 bp, Homo sapiens
aggctttctttctct

SEQ ID NO: 16015 - DNA, 15 bp, Homo sapiens
aaggctttctttctc

SEQ ID NO: 16016 - DNA, 15 bp, Homo sapiens
aaaggctttctttct

SEQ ID NO: 16017 - DNA, 15 bp, Homo sapiens
aaaaggctttctttc

SEQ ID NO: 16018 - DNA, 15 bp, Homo sapiens
aaaaaggctttcttt

SEQ ID NO: 16019 - DNA, 15 bp, Homo sapiens
gaaaaaggctttctt

SEQ ID NO: 16020 - DNA, 15 bp, Homo sapiens
ggaaaaaggctttct

SEQ ID NO: 16021 - DNA, 15 bp, Homo sapiens
aggaaaaaggctttc

SEQ ID NO: 16022 - DNA, 15 bp, Homo sapiens
aaggaaaaaggcttt

SEQ ID NO: 16023 - DNA, 15 bp, Homo sapiens
aaaggaaaaaggctt

SEQ ID NO: 16024 - DNA, 15 bp, Homo sapiens
aaaaggaaaaaggct

SEQ ID NO: 16025 - DNA, 15 bp, Homo sapiens
aaaaaggaaaaaggc

SEQ ID NO: 16026 - DNA, 15 bp, Homo sapiens
aaaaaaggaaaaagg

SEQ ID NO: 16027 - DNA, 15 bp, Homo sapiens
aaaaaaaggaaaaag

SEQ ID NO: 16028 - DNA, 15 bp, Homo sapiens
aaaaaaaaggaaaaa

SEQ ID NO: 16029 - DNA, 15 bp, Homo sapiens
aaaaaaaaaggaaaa

SEQ ID NO: 16030 - DNA, 15 bp, Homo sapiens
aaaaaaaaaaggaaa

SEQ ID NO: 16031 - DNA, 15 bp, Homo sapiens
aaaaaaaaaaaggaa

SEQ ID NO: 16032 - DNA, 15 bp, Homo sapiens
aaaaaaaaaaaagga

SEQ ID NO: 16033 - DNA, 15 bp, Homo sapiens
tcaaaaaaaaaaaaa

SEQ ID NO: 16034 - DNA, 15 bp, Homo sapiens
ctcaaaaaaaaaaaa

SEQ ID NO: 16035 - DNA, 15 bp, Homo sapiens
tctcaaaaaaaaaaa

SEQ ID NO: 16036 - DNA, 15 bp, Homo sapiens
gtctcaaaaaaaaaa

SEQ ID NO: 16037 - DNA, 15 bp, Homo sapiens
tgtctcaaaaaaaaa

SEQ ID NO: 16038 - DNA, 15 bp, Homo sapiens
ctgtctcaaaaaaaa

SEQ ID NO: 16039 - DNA, 15 bp, Homo sapiens
cctgtctcaaaaaaa

SEQ ID NO: 16040 - DNA, 15 bp, Homo sapiens
ccctgtctcaaaaaa

SEQ ID NO: 16041 - DNA, 15 bp, Homo sapiens
accctgtctcaaaaa

SEQ ID NO: 16042 - DNA, 15 bp, Homo sapiens
gaccctgtctcaaaa

SEQ ID NO: 16043 - DNA, 15 bp, Homo sapiens
agaccctgtctcaaa

SEQ ID NO: 16044 - DNA, 15 bp, Homo sapiens
gagaccctgtctcaa

SEQ ID NO: 16045 - DNA, 15 bp, Homo sapiens
cgagaccctgtctca

SEQ ID NO: 16046 - DNA, 15 bp, Homo sapiens
gcgagaccctgtctc

SEQ ID NO: 16047 - DNA, 15 bp, Homo sapiens
agcgagaccctgtct

SEQ ID NO: 16048 - DNA, 15 bp, Homo sapiens
gagcgagaccctgtc

SEQ ID NO: 16049 - DNA, 15 bp, Homo sapiens
agagcgagaccctgt

SEQ ID NO: 16050 - DNA, 15 bp, Homo sapiens
cagagcgagaccctg

SEQ ID NO: 16051 - DNA, 15 bp, Homo sapiens
acagagcgagaccct

SEQ ID NO: 16052 - DNA, 15 bp, Homo sapiens
gacagagcgagaccc

SEQ ID NO: 16053 - DNA, 15 bp, Homo sapiens
cgacagagcgagacc

SEQ ID NO: 16054 - DNA, 15 bp, Homo sapiens
gcgacagagcgagac

SEQ ID NO: 16055 - DNA, 15 bp, Homo sapiens
agcgacagagcgaga

SEQ ID NO: 16056 - DNA, 15 bp, Homo sapiens
gagcgacagagcgag

SEQ ID NO: 16057 - DNA, 15 bp, Homo sapiens
tgagcgacagagcga

SEQ ID NO: 16058 - DNA, 15 bp, Homo sapiens
ctgagcgacagagcg

SEQ ID NO: 16059 - DNA, 15 bp, Homo sapiens
cctgagcgacagagc

SEQ ID NO: 16060 - DNA, 15 bp, Homo sapiens
gcctgagcgacagag

SEQ ID NO: 16061 - DNA, 15 bp, Homo sapiens
agcctgagcgacaga

SEQ ID NO: 16062 - DNA, 15 bp, Homo sapiens
cagcctgagcgacag

SEQ ID NO: 16063 - DNA, 15 bp, Homo sapiens
ccagcctgagcgaca

SEQ ID NO: 16064 - DNA, 15 bp, Homo sapiens
tccagcctgagcgac

SEQ ID NO: 16065 - DNA, 15 bp, Homo sapiens
ctccagcctgagcga

SEQ ID NO: 16066 - DNA, 15 bp, Homo sapiens
actccagcctgagcg

SEQ ID NO: 16067 - DNA, 15 bp, Homo sapiens
cactccagcctgagc

SEQ ID NO: 16068 - DNA, 15 bp, Homo sapiens
gcactccagcctgag

SEQ ID NO: 16069 - DNA, 15 bp, Homo sapiens
tgcactccagcctga

SEQ ID NO: 16070 - DNA, 15 bp, Homo sapiens
tactgcactccagcc

SEQ ID NO: 16071 - DNA, 15 bp, Homo sapiens
ctactgcactccagc

SEQ ID NO: 16072 - DNA, 15 bp, Homo sapiens
gctactgcactccag

SEQ ID NO: 16073 - DNA, 15 bp, Homo sapiens
cgctactgcactcca

SEQ ID NO: 16074 - DNA, 15 bp, Homo sapiens
acgctactgcactcc

SEQ ID NO: 16075 - DNA, 15 bp, Homo sapiens
cacgctactgcactc

SEQ ID NO: 16076 - DNA, 15 bp, Homo sapiens
tcacgctactgcact

SEQ ID NO: 16077 - DNA, 15 bp, Homo sapiens
atcacgctactgcac

SEQ ID NO: 16078 - DNA, 15 bp, Homo sapiens
gatcacgctactgca

SEQ ID NO: 16079 - DNA, 15 bp, Homo sapiens
agatcacgctactgc

SEQ ID NO: 16080 - DNA, 15 bp, Homo sapiens
aagatcacgctactg

SEQ ID NO: 16081 - DNA, 15 bp, Homo sapiens
caagatcacgctact

SEQ ID NO: 16082 - DNA, 15 bp, Homo sapiens
ccaagatcacgctac

SEQ ID NO: 16083 - DNA, 15 bp, Homo sapiens
gccaagatcacgcta

SEQ ID NO: 16084 - DNA, 15 bp, Homo sapiens
agccaagatcacgct

SEQ ID NO: 16085 - DNA, 15 bp, Homo sapiens
gagccaagatcacgc

SEQ ID NO: 16086 - DNA, 15 bp, Homo sapiens
tgagccaagatcacg

SEQ ID NO: 16087 - DNA, 15 bp, Homo sapiens
gtgagccaagatcac

SEQ ID NO: 16088 - DNA, 15 bp, Homo sapiens
agtgagccaagatca

SEQ ID NO: 16089 - DNA, 15 bp, Homo sapiens
cagtgagccaagatc

SEQ ID NO: 16090 - DNA, 15 bp, Homo sapiens
ccagtgagccaagat

SEQ ID NO: 16091 - DNA, 15 bp, Homo sapiens
tccagtgagccaaga

SEQ ID NO: 16092 - DNA, 15 bp, Homo sapiens
ttccagtgagccaag

SEQ ID NO: 16093 - DNA, 15 bp, Homo sapiens
gttccagtgagccaa

SEQ ID NO: 16094 - DNA, 15 bp, Homo sapiens
ggttccagtgagcca

SEQ ID NO: 16095 - DNA, 15 bp, Homo sapiens
aggttccagtgagcc

SEQ ID NO: 16096 - DNA, 15 bp, Homo sapiens
gaggttccagtgagc

SEQ ID NO: 16097 - DNA, 15 bp, Homo sapiens
agaggttccagtgag

SEQ ID NO: 16098 - DNA, 15 bp, Homo sapiens
cagaggttccagtga

SEQ ID NO: 16099 - DNA, 15 bp, Homo sapiens
gcagaggttccagtg

SEQ ID NO: 16100 - DNA, 15 bp, Homo sapiens
ggcagaggttccagt

SEQ ID NO: 16101 - DNA, 15 bp, Homo sapiens
aggcagaggttccag

SEQ ID NO: 16102 - DNA, 15 bp, Homo sapiens
gaggcagaggttcca

SEQ ID NO: 16103 - DNA, 15 bp, Homo sapiens
ggaggcagaggttcc

SEQ ID NO: 16104 - DNA, 15 bp, Homo sapiens
aggaggcagaggttc

SEQ ID NO: 16105 - DNA, 15 bp, Homo sapiens
caggaggcagaggtt

SEQ ID NO: 16106 - DNA, 15 bp, Homo sapiens
ccaggaggcagaggt

SEQ ID NO: 16107 - DNA, 15 bp, Homo sapiens
cccaggaggcagagg

SEQ ID NO: 16108 - DNA, 15 bp, Homo sapiens
gcccaggaggcagag

SEQ ID NO: 16109 - DNA, 15 bp, Homo sapiens
agcccaggaggcaga

SEQ ID NO: 16110 - DNA, 15 bp, Homo sapiens
gagcccaggaggcag

SEQ ID NO: 16111 - DNA, 15 bp, Homo sapiens
tgagcccaggaggca

SEQ ID NO: 16112 - DNA, 15 bp, Homo sapiens
ttgagcccaggaggc

SEQ ID NO: 16113 - DNA, 15 bp, Homo sapiens
cttgagcccaggagg

SEQ ID NO: 16114 - DNA, 15 bp, Homo sapiens
acttgagcccaggag

SEQ ID NO: 16115 - DNA, 15 bp, Homo sapiens
cacttgagcccagga

SEQ ID NO: 16116 - DNA, 15 bp, Homo sapiens
tcacttgagcccagg

SEQ ID NO: 16117 - DNA, 15 bp, Homo sapiens
atcacttgagcccag

SEQ ID NO: 16118 - DNA, 15 bp, Homo sapiens
gatcacttgagccca

SEQ ID NO: 16119 - DNA, 15 bp, Homo sapiens
ggatcacttgagccc

SEQ ID NO: 16120 - DNA, 15 bp, Homo sapiens
aggatcacttgagcc

SEQ ID NO: 16121 - DNA, 15 bp, Homo sapiens
gaggatcacttgagc

SEQ ID NO: 16122 - DNA, 15 bp, Homo sapiens
ggaggatcacttgag

SEQ ID NO: 16123 - DNA, 15 bp, Homo sapiens
gggaggatcacttga

SEQ ID NO: 16124 - DNA, 15 bp, Homo sapiens
tgggaggatcacttg

SEQ ID NO: 16125 - DNA, 15 bp, Homo sapiens
gtgggaggatcactt

SEQ ID NO: 16126 - DNA, 15 bp, Homo sapiens
cgtgggaggatcact

SEQ ID NO: 16127 - DNA, 15 bp, Homo sapiens
gcgtgggaggatcac

SEQ ID NO: 16128 - DNA, 15 bp, Homo sapiens
tgcgtgggaggatca

SEQ ID NO: 16129 - DNA, 15 bp, Homo sapiens
ctgcgtgggaggatc

SEQ ID NO: 16130 - DNA, 15 bp, Homo sapiens
gctgcgtgggaggat

SEQ ID NO: 16131 - DNA, 15 bp, Homo sapiens
ggctgcgtgggagga

SEQ ID NO: 16132 - DNA, 15 bp, Homo sapiens
aggctgcgtgggagg

SEQ ID NO: 16133 - DNA, 15 bp, Homo sapiens
gaggctgcgtgggag

SEQ ID NO: 16134 - DNA, 15 bp, Homo sapiens
ggaggctgcgtggga

SEQ ID NO: 16135 - DNA, 15 bp, Homo sapiens
gggaggctgcgtggg

SEQ ID NO: 16136 - DNA, 15 bp, Homo sapiens
cgggaggctgcgtgg

SEQ ID NO: 16137 - DNA, 15 bp, Homo sapiens
tcgggaggctgcgtg

SEQ ID NO: 16138 - DNA, 15 bp, Homo sapiens
ctcgggaggctgcgt

SEQ ID NO: 16139 - DNA, 15 bp, Homo sapiens
actcgggaggctgcg

SEQ ID NO: 16140 - DNA, 15 bp, Homo sapiens
tactcgggaggctgc

SEQ ID NO: 16141 - DNA, 15 bp, Homo sapiens
atcccagctactcgg

SEQ ID NO: 16142 - DNA, 15 bp, Homo sapiens
aatcccagctactcg

SEQ ID NO: 16143 - DNA, 15 bp, Homo sapiens
taatcccagctactc

SEQ ID NO: 16144 - DNA, 15 bp, Homo sapiens
gtaatcccagctact

SEQ ID NO: 16145 - DNA, 15 bp, Homo sapiens
tgtaatcccagctac

SEQ ID NO: 16146 - DNA, 15 bp, Homo sapiens
ctgtaatcccagcta

SEQ ID NO: 16147 - DNA, 15 bp, Homo sapiens
cctgtaatcccagct

SEQ ID NO: 16148 - DNA, 15 bp, Homo sapiens
acctgtaatcccagc

SEQ ID NO: 16149 - DNA, 15 bp, Homo sapiens
cacctgtaatcccag

SEQ ID NO: 16150 - DNA, 15 bp, Homo sapiens
gcacctgtaatccca

SEQ ID NO: 16151 - DNA, 15 bp, Homo sapiens
tgcacctgtaatccc

SEQ ID NO: 16152 - DNA, 15 bp, Homo sapiens
atgcacctgtaatcc

SEQ ID NO: 16153 - DNA, 15 bp, Homo sapiens
catgcacctgtaatc

SEQ ID NO: 16154 - DNA, 15 bp, Homo sapiens
gcatgcacctgtaat

SEQ ID NO: 16155 - DNA, 15 bp, Homo sapiens
ggcatgcacctgtaa

SEQ ID NO: 16156 - DNA, 15 bp, Homo sapiens
tggcatgcacctgta

SEQ ID NO: 16157 - DNA, 15 bp, Homo sapiens
gtggcatgcacctgt

SEQ ID NO: 16158 - DNA, 15 bp, Homo sapiens
ggtggcatgcacctg

SEQ ID NO: 16159 - DNA, 15 bp, Homo sapiens
tggtggcatgcacct

SEQ ID NO: 16160 - DNA, 15 bp, Homo sapiens
gtggtggcatgcacc

SEQ ID NO: 16161 - DNA, 15 bp, Homo sapiens
tgtggtggcatgcac

SEQ ID NO: 16162 - DNA, 15 bp, Homo sapiens
gtgtggtggcatgca

SEQ ID NO: 16163 - DNA, 15 bp, Homo sapiens
ggtgtggtggcatgc

SEQ ID NO: 16164 - DNA, 15 bp, Homo sapiens
gggtgtggtggcatg

SEQ ID NO: 16165 - DNA, 15 bp, Homo sapiens
cgggtgtggtggcat

SEQ ID NO: 16166 - DNA, 15 bp, Homo sapiens
ccgggtgtggtggca

SEQ ID NO: 16167 - DNA, 15 bp, Homo sapiens
gccgggtgtggtggc

SEQ ID NO: 16168 - DNA, 15 bp, Homo sapiens
agccgggtgtggtgg

SEQ ID NO: 16169 - DNA, 15 bp, Homo sapiens
tagccgggtgtggtg

SEQ ID NO: 16170 - DNA, 15 bp, Homo sapiens
ttagccgggtgtggt

SEQ ID NO: 16171 - DNA, 15 bp, Homo sapiens
attagccgggtgtgg

SEQ ID NO: 16172 - DNA, 15 bp, Homo sapiens
aattagccgggtgtg

SEQ ID NO: 16173 - DNA, 15 bp, Homo sapiens
aaattagccgggtgt

SEQ ID NO: 16174 - DNA, 15 bp, Homo sapiens
aaaattagccgggtg

SEQ ID NO: 16175 - DNA, 15 bp, Homo sapiens
aaaaattagccgggt

SEQ ID NO: 16176 - DNA, 15 bp, Homo sapiens
caaaaattagccggg

SEQ ID NO: 16177 - DNA, 15 bp, Homo sapiens
acaaaaattagccgg

SEQ ID NO: 16178 - DNA, 15 bp, Homo sapiens
tacaaaaattagccg

SEQ ID NO: 16179 - DNA, 15 bp, Homo sapiens
atacaaaaattagcc

SEQ ID NO: 16180 - DNA, 15 bp, Homo sapiens
gaaaatacaaaaatt

SEQ ID NO: 16181 - DNA, 15 bp, Homo sapiens
tgaaaatacaaaaat

SEQ ID NO: 16182 - DNA, 15 bp, Homo sapiens
ctgaaaatacaaaaa

SEQ ID NO: 16183 - DNA, 15 bp, Homo sapiens
actgaaaatacaaaa

SEQ ID NO: 16184 - DNA, 15 bp, Homo sapiens
cactgaaaatacaaa

SEQ ID NO: 16185 - DNA, 15 bp, Homo sapiens
acactgaaaatacaa

SEQ ID NO: 16186 - DNA, 15 bp, Homo sapiens
tacactgaaaataca

SEQ ID NO: 16187 - DNA, 15 bp, Homo sapiens
ctacactgaaaatac

SEQ ID NO: 16188 - DNA, 15 bp, Homo sapiens
tctacactgaaaata

SEQ ID NO: 16189 - DNA, 15 bp, Homo sapiens
gtctacactgaaaat

SEQ ID NO: 16190 - DNA, 15 bp, Homo sapiens
tgtctacactgaaaa

SEQ ID NO: 16191 - DNA, 15 bp, Homo sapiens
ctgtctacactgaaa

SEQ ID NO: 16192 - DNA, 15 bp, Homo sapiens
cctgtctacactgaa

SEQ ID NO: 16193 - DNA, 15 bp, Homo sapiens
ccctgtctacactga

SEQ ID NO: 16194 - DNA, 15 bp, Homo sapiens
gccctgtctacactg

SEQ ID NO: 16195 - DNA, 15 bp, Homo sapiens
agccctgtctacact

SEQ ID NO: 16196 - DNA, 15 bp, Homo sapiens
tagccctgtctacac

SEQ ID NO: 16197 - DNA, 15 bp, Homo sapiens
gtagccctgtctaca

SEQ ID NO: 16198 - DNA, 15 bp, Homo sapiens
tgtagccctgtctac

SEQ ID NO: 16199 - DNA, 15 bp, Homo sapiens
gtgtagccctgtcta

SEQ ID NO: 16200 - DNA, 15 bp, Homo sapiens
ggtgtagccctgtct

SEQ ID NO: 16201 - DNA, 15 bp, Homo sapiens
tggtgtagccctgtc

SEQ ID NO: 16202 - DNA, 15 bp, Homo sapiens
atggtgtagccctgt

SEQ ID NO: 16203 - DNA, 15 bp, Homo sapiens
catggtgtagccctg

SEQ ID NO: 16204 - DNA, 15 bp, Homo sapiens
acatggtgtagccct

SEQ ID NO: 16205 - DNA, 15 bp, Homo sapiens
aacatggtgtagccc

SEQ ID NO: 16206 - DNA, 15 bp, Homo sapiens
caacatggtgtagcc

SEQ ID NO: 16207 - DNA, 15 bp, Homo sapiens
ccaacatggtgtagc

SEQ ID NO: 16208 - DNA, 15 bp, Homo sapiens
gccaacatggtgtag

SEQ ID NO: 16209 - DNA, 15 bp, Homo sapiens
ggccaacatggtgta

SEQ ID NO: 16210 - DNA, 15 bp, Homo sapiens
tggccaacatggtgt

SEQ ID NO: 16211 - DNA, 15 bp, Homo sapiens
ctggccaacatggtg

SEQ ID NO: 16212 - DNA, 15 bp, Homo sapiens
cctggccaacatggt

SEQ ID NO: 16213 - DNA, 15 bp, Homo sapiens
gcctggccaacatgg

SEQ ID NO: 16214 - DNA, 15 bp, Homo sapiens
agcctggccaacatg

SEQ ID NO: 16215 - DNA, 15 bp, Homo sapiens
cagcctggccaacat

SEQ ID NO: 16216 - DNA, 15 bp, Homo sapiens
ccagcctggccaaca

SEQ ID NO: 16217 - DNA, 15 bp, Homo sapiens
accagcctggccaac

SEQ ID NO: 16218 - DNA, 15 bp, Homo sapiens
gaccagcctggccaa

SEQ ID NO: 16219 - DNA, 15 bp, Homo sapiens
agaccagcctggcca

SEQ ID NO: 16220 - DNA, 15 bp, Homo sapiens
gagaccagcctggcc

SEQ ID NO: 16221 - DNA, 15 bp, Homo sapiens
tgagaccagcctggc

SEQ ID NO: 16222 - DNA, 15 bp, Homo sapiens
ttgagaccagcctgg

SEQ ID NO: 16223 - DNA, 15 bp, Homo sapiens
tttgagaccagcctg

SEQ ID NO: 16224 - DNA, 15 bp, Homo sapiens
gtttgagaccagcct

SEQ ID NO: 16225 - DNA, 15 bp, Homo sapiens
agtttgagaccagcc

SEQ ID NO: 16226 - DNA, 15 bp, Homo sapiens
gagtttgagaccagc

SEQ ID NO: 16227 - DNA, 15 bp, Homo sapiens
ggagtttgagaccag

SEQ ID NO: 16228 - DNA, 15 bp, Homo sapiens
aggagtttgagacca

SEQ ID NO: 16229 - DNA, 15 bp, Homo sapiens
caggagtttgagacc

SEQ ID NO: 16230 - DNA, 15 bp, Homo sapiens
ccaggagtttgagac

SEQ ID NO: 16231 - DNA, 15 bp, Homo sapiens
cccaggagtttgaga

SEQ ID NO: 16232 - DNA, 15 bp, Homo sapiens
gcccaggagtttgag

SEQ ID NO: 16233 - DNA, 15 bp, Homo sapiens
agcccaggagtttga

SEQ ID NO: 16234 - DNA, 15 bp, Homo sapiens
gagcccaggagtttg

SEQ ID NO: 16235 - DNA, 15 bp, Homo sapiens
tgagcccaggagttt

SEQ ID NO: 16236 - DNA, 15 bp, Homo sapiens
ttgagcccaggagtt

SEQ ID NO: 16237 - DNA, 15 bp, Homo sapiens
cttgagcccaggagt

SEQ ID NO: 16238 - DNA, 15 bp, Homo sapiens
gcttgagcccaggag

SEQ ID NO: 16239 - DNA, 15 bp, Homo sapiens
tgcttgagcccagga

SEQ ID NO: 16240 - DNA, 15 bp, Homo sapiens
ttgcttgagcccagg

SEQ ID NO: 16241 - DNA, 15 bp, Homo sapiens
attgcttgagcccag

SEQ ID NO: 16242 - DNA, 15 bp, Homo sapiens
gattgcttgagccca

SEQ ID NO: 16243 - DNA, 15 bp, Homo sapiens
agattgcttgagccc

SEQ ID NO: 16244 - DNA, 15 bp, Homo sapiens
cagattgcttgagcc

SEQ ID NO: 16245 - DNA, 15 bp, Homo sapiens
gcagattgcttgagc

SEQ ID NO: 16246 - DNA, 15 bp, Homo sapiens
ggcagattgcttgag

SEQ ID NO: 16247 - DNA, 15 bp, Homo sapiens
gggcagattgcttga

SEQ ID NO: 16248 - DNA, 15 bp, Homo sapiens
tgggcagattgcttg

SEQ ID NO: 16249 - DNA, 15 bp, Homo sapiens
gtgggcagattgctt

SEQ ID NO: 16250 - DNA, 15 bp, Homo sapiens
ggtgggcagattgct

SEQ ID NO: 16251 - DNA, 15 bp, Homo sapiens
aggtgggcagattgc

SEQ ID NO: 16252 - DNA, 15 bp, Homo sapiens
gaggtgggcagattg

SEQ ID NO: 16253 - DNA, 15 bp, Homo sapiens
tgaggtgggcagatt

SEQ ID NO: 16254 - DNA, 15 bp, Homo sapiens
ctgaggtgggcagat

SEQ ID NO: 16255 - DNA, 15 bp, Homo sapiens
gctgaggtgggcaga

SEQ ID NO: 16256 - DNA, 15 bp, Homo sapiens
ggctgaggtgggcag

SEQ ID NO: 16257 - DNA, 15 bp, Homo sapiens
tggctgaggtgggca

SEQ ID NO: 16258 - DNA, 15 bp, Homo sapiens
gtggctgaggtgggc

SEQ ID NO: 16259 - DNA, 15 bp, Homo sapiens
ggtggctgaggtggg

SEQ ID NO: 16260 - DNA, 15 bp, Homo sapiens
gggtggctgaggtgg

SEQ ID NO: 16261 - DNA, 15 bp, Homo sapiens
tgggtggctgaggtg

SEQ ID NO: 16262 - DNA, 15 bp, Homo sapiens
ttgggtggctgaggt

SEQ ID NO: 16263 - DNA, 15 bp, Homo sapiens
tttgggtggctgagg

SEQ ID NO: 16264 - DNA, 15 bp, Homo sapiens
ctttgggtggctgag

SEQ ID NO: 16265 - DNA, 15 bp, Homo sapiens
actttgggtggctga

SEQ ID NO: 16266 - DNA, 15 bp, Homo sapiens
cactttgggtggctg

SEQ ID NO: 16267 - DNA, 15 bp, Homo sapiens
gcactttgggtggct

SEQ ID NO: 16268 - DNA, 15 bp, Homo sapiens
agcactttgggtggc

SEQ ID NO: 16269 - DNA, 15 bp, Homo sapiens
cagcactttgggtgg

SEQ ID NO: 16270 - DNA, 15 bp, Homo sapiens
ccagcactttgggtg

SEQ ID NO: 16271 - DNA, 15 bp, Homo sapiens
cccagcactttgggt

SEQ ID NO: 16272 - DNA, 15 bp, Homo sapiens
ccacctgtaatccca

SEQ ID NO: 16273 - DNA, 15 bp, Homo sapiens
cccacctgtaatccc

SEQ ID NO: 16274 - DNA, 15 bp, Homo sapiens
tcccacctgtaatcc

SEQ ID NO: 16275 - DNA, 15 bp, Homo sapiens
ttcccacctgtaatc

SEQ ID NO: 16276 - DNA, 15 bp, Homo sapiens
attcccacctgtaat

SEQ ID NO: 16277 - DNA, 15 bp, Homo sapiens
gattcccacctgtaa

SEQ ID NO: 16278 - DNA, 15 bp, Homo sapiens
tgattcccacctgta

SEQ ID NO: 16279 - DNA, 15 bp, Homo sapiens
gtgattcccacctgt

SEQ ID NO: 16280 - DNA, 15 bp, Homo sapiens
ggtgattcccacctg

SEQ ID NO: 16281 - DNA, 15 bp, Homo sapiens
tggtgattcccacct

SEQ ID NO: 16282 - DNA, 15 bp, Homo sapiens
gtggtgattcccacc

SEQ ID NO: 16283 - DNA, 15 bp, Homo sapiens
tgtggtgattcccac

SEQ ID NO: 16284 - DNA, 15 bp, Homo sapiens
gtgtggtgattccca

SEQ ID NO: 16285 - DNA, 15 bp, Homo sapiens
ggtgtggtgattccc

SEQ ID NO: 16286 - DNA, 15 bp, Homo sapiens
gggtgtggtgattcc

SEQ ID NO: 16287 - DNA, 15 bp, Homo sapiens
cgggtgtggtgattc

SEQ ID NO: 16288 - DNA, 15 bp, Homo sapiens
ccgggtgtggtgatt

SEQ ID NO: 16289 - DNA, 15 bp, Homo sapiens
gccgggtgtggtgat

SEQ ID NO: 16290 - DNA, 15 bp, Homo sapiens
ggccgggtgtggtga

SEQ ID NO: 16291 - DNA, 15 bp, Homo sapiens
aggccgggtgtggtg

SEQ ID NO: 16292 - DNA, 15 bp, Homo sapiens
taggccgggtgtggt

SEQ ID NO: 16293 - DNA, 15 bp, Homo sapiens
ctaggccgggtgtgg

SEQ ID NO: 16294 - DNA, 15 bp, Homo sapiens
cctaggccgggtgtg

SEQ ID NO: 16295 - DNA, 15 bp, Homo sapiens
tcctaggccgggtgt

SEQ ID NO: 16296 - DNA, 15 bp, Homo sapiens
ttcctaggccgggtg

SEQ ID NO: 16297 - DNA, 15 bp, Homo sapiens
tttcctaggccgggt

SEQ ID NO: 16298 - DNA, 15 bp, Homo sapiens
ctttcctaggccggg

SEQ ID NO: 16299 - DNA, 15 bp, Homo sapiens
gctttcctaggccgg

SEQ ID NO: 16300 - DNA, 15 bp, Homo sapiens
ggctttcctaggccg

SEQ ID NO: 16301 - DNA, 15 bp, Homo sapiens
aggctttcctaggcc

SEQ ID NO: 16302 - DNA, 15 bp, Homo sapiens
aaggctttcctaggc

SEQ ID NO: 16303 - DNA, 15 bp, Homo sapiens
aaaggctttcctagg

SEQ ID NO: 16304 - DNA, 15 bp, Homo sapiens
aaaaggctttcctag

SEQ ID NO: 16305 - DNA, 15 bp, Homo sapiens
aaaaaggctttccta

SEQ ID NO: 16306 - DNA, 15 bp, Homo sapiens
gaaaaaggctttcct

SEQ ID NO: 16307 - DNA, 15 bp, Homo sapiens
agaaaaaggctttcc

SEQ ID NO: 16308 - DNA, 15 bp, Homo sapiens
aagaaaaaggctttc

SEQ ID NO: 16309 - DNA, 15 bp, Homo sapiens
gaagaaaaaggcttt

SEQ ID NO: 16310 - DNA, 15 bp, Homo sapiens
ggaagaaaaaggctt

SEQ ID NO: 16311 - DNA, 15 bp, Homo sapiens
tggaagaaaaaggct

SEQ ID NO: 16312 - DNA, 15 bp, Homo sapiens
ctggaagaaaaaggc

SEQ ID NO: 16313 - DNA, 15 bp, Homo sapiens
tctggaagaaaaagg

SEQ ID NO: 16314 - DNA, 15 bp, Homo sapiens
ctctggaagaaaaag

SEQ ID NO: 16315 - DNA, 15 bp, Homo sapiens
actctggaagaaaaa

SEQ ID NO: 16316 - DNA, 15 bp, Homo sapiens
aactctggaagaaaa

SEQ ID NO: 16317 - DNA, 15 bp, Homo sapiens
caactctggaagaaa

SEQ ID NO: 16318 - DNA, 15 bp, Homo sapiens
gcaactctggaagaa

SEQ ID NO: 16319 - DNA, 15 bp, Homo sapiens
ggcaactctggaaga

SEQ ID NO: 16320 - DNA, 15 bp, Homo sapiens
tggcaactctggaag

SEQ ID NO: 16321 - DNA, 15 bp, Homo sapiens
gtggcaactctggaa

SEQ ID NO: 16322 - DNA, 15 bp, Homo sapiens
agtggcaactctgga

SEQ ID NO: 16323 - DNA, 15 bp, Homo sapiens
cagtggcaactctgg

SEQ ID NO: 16324 - DNA, 15 bp, Homo sapiens
gcagtggcaactctg

SEQ ID NO: 16325 - DNA, 15 bp, Homo sapiens
agcagtggcaactct

SEQ ID NO: 16326 - DNA, 15 bp, Homo sapiens
aagcagtggcaactc

SEQ ID NO: 16327 - DNA, 15 bp, Homo sapiens
aaagcagtggcaact

SEQ ID NO: 16328 - DNA, 15 bp, Homo sapiens
caaagcagtggcaac

SEQ ID NO: 16329 - DNA, 15 bp, Homo sapiens
ccaaagcagtggcaa

SEQ ID NO: 16330 - DNA, 15 bp, Homo sapiens
tccaaagcagtggca

SEQ ID NO: 16331 - DNA, 15 bp, Homo sapiens
ttccaaagcagtggc

SEQ ID NO: 16332 - DNA, 15 bp, Homo sapiens
gttccaaagcagtgg

SEQ ID NO: 16333 - DNA, 15 bp, Homo sapiens
agttccaaagcagtg

SEQ ID NO: 16334 - DNA, 15 bp, Homo sapiens
cagttccaaagcagt

SEQ ID NO: 16335 - DNA, 15 bp, Homo sapiens
gcagttccaaagcag

SEQ ID NO: 16336 - DNA, 15 bp, Homo sapiens
tgcagttccaaagca

SEQ ID NO: 16337 - DNA, 15 bp, Homo sapiens
atgcagttccaaagc

SEQ ID NO: 16338 - DNA, 15 bp, Homo sapiens
tatgcagttccaaag

SEQ ID NO: 16339 - DNA, 15 bp, Homo sapiens
ctatgcagttccaaa

SEQ ID NO: 16340 - DNA, 15 bp, Homo sapiens
tctatgcagttccaa

SEQ ID NO: 16341 - DNA, 15 bp, Homo sapiens
gtctatgcagttcca

SEQ ID NO: 16342 - DNA, 15 bp, Homo sapiens
agtctatgcagttcc

SEQ ID NO: 16343 - DNA, 15 bp, Homo sapiens
gagtctatgcagttc

SEQ ID NO: 16344 - DNA, 15 bp, Homo sapiens
agagtctatgcagtt

SEQ ID NO: 16345 - DNA, 15 bp, Homo sapiens
cagagtctatgcagt

SEQ ID NO: 16346 - DNA, 15 bp, Homo sapiens
tcagagtctatgcag

SEQ ID NO: 16347 - DNA, 15 bp, Homo sapiens
ttcagagtctatgca

SEQ ID NO: 16348 - DNA, 15 bp, Homo sapiens
tttcagagtctatgc

SEQ ID NO: 16349 - DNA, 15 bp, Homo sapiens
ctttcagagtctatg

SEQ ID NO: 16350 - DNA, 15 bp, Homo sapiens
gctttcagagtctat

SEQ ID NO: 16351 - DNA, 15 bp, Homo sapiens
tgctttcagagtcta

SEQ ID NO: 16352 - DNA, 15 bp, Homo sapiens
ctgctttcagagtct

SEQ ID NO: 16353 - DNA, 15 bp, Homo sapiens
tctgctttcagagtc

SEQ ID NO: 16354 - DNA, 15 bp, Homo sapiens
gtctgctttcagagt

SEQ ID NO: 16355 - DNA, 15 bp, Homo sapiens
agtctgctttcagag

SEQ ID NO: 16356 - DNA, 15 bp, Homo sapiens
aagtctgctttcaga

SEQ ID NO: 16357 - DNA, 15 bp, Homo sapiens
gaagtctgctttcag

SEQ ID NO: 16358 - DNA, 15 bp, Homo sapiens
ggaagtctgctttca

SEQ ID NO: 16359 - DNA, 15 bp, Homo sapiens
aggaagtctgctttc

SEQ ID NO: 16360 - DNA, 15 bp, Homo sapiens
caggaagtctgcttt

SEQ ID NO: 16361 - DNA, 15 bp, Homo sapiens
ccaggaagtctgctt

SEQ ID NO: 16362 - DNA, 15 bp, Homo sapiens
tccaggaagtctgct

SEQ ID NO: 16363 - DNA, 15 bp, Homo sapiens
atccaggaagtctgc

SEQ ID NO: 16364 - DNA, 15 bp, Homo sapiens
aatccaggaagtctg

SEQ ID NO: 16365 - DNA, 15 bp, Homo sapiens
gaatccaggaagtct

SEQ ID NO: 16366 - DNA, 15 bp, Homo sapiens
tgaatccaggaagtc

SEQ ID NO: 16367 - DNA, 15 bp, Homo sapiens
ttgaatccaggaagt

SEQ ID NO: 16368 - DNA, 15 bp, Homo sapiens
tttgaatccaggaag

SEQ ID NO: 16369 - DNA, 15 bp, Homo sapiens
gtttgaatccaggaa

SEQ ID NO: 16370 - DNA, 15 bp, Homo sapiens
ggtttgaatccagga

SEQ ID NO: 16371 - DNA, 15 bp, Homo sapiens
gggtttgaatccagg

SEQ ID NO: 16372 - DNA, 15 bp, Homo sapiens
tgggtttgaatccag

SEQ ID NO: 16373 - DNA, 15 bp, Homo sapiens
ttgggtttgaatcca

SEQ ID NO: 16374 - DNA, 15 bp, Homo sapiens
cttgggtttgaatcc

SEQ ID NO: 16375 - DNA, 15 bp, Homo sapiens
gcttgggtttgaatc

SEQ ID NO: 16376 - DNA, 15 bp, Homo sapiens
agcttgggtttgaat

SEQ ID NO: 16377 - DNA, 15 bp, Homo sapiens
aagcttgggtttgaa

SEQ ID NO: 16378 - DNA, 15 bp, Homo sapiens
aaagcttgggtttga

SEQ ID NO: 16379 - DNA, 15 bp, Homo sapiens
caaagcttgggtttg

SEQ ID NO: 16380 - DNA, 15 bp, Homo sapiens
gcaaagcttgggttt

SEQ ID NO: 16381 - DNA, 15 bp, Homo sapiens
ggcaaagcttgggtt

SEQ ID NO: 16382 - DNA, 15 bp, Homo sapiens
aggcaaagcttgggt

SEQ ID NO: 16383 - DNA, 15 bp, Homo sapiens
gaggcaaagcttggg

SEQ ID NO: 16384 - DNA, 15 bp, Homo sapiens
agaggcaaagcttgg

SEQ ID NO: 16385 - DNA, 15 bp, Homo sapiens
aagaggcaaagcttg

SEQ ID NO: 16386 - DNA, 15 bp, Homo sapiens
taagaggcaaagctt

SEQ ID NO: 16387 - DNA, 15 bp, Homo sapiens
gtaagaggcaaagct

SEQ ID NO: 16388 - DNA, 15 bp, Homo sapiens
ggtaagaggcaaagc

SEQ ID NO: 16389 - DNA, 15 bp, Homo sapiens
tggtaagaggcaaag

SEQ ID NO: 16390 - DNA, 15 bp, Homo sapiens
ttggtaagaggcaaa

SEQ ID NO: 16391 - DNA, 15 bp, Homo sapiens
gttggtaagaggcaa

SEQ ID NO: 16392 - DNA, 15 bp, Homo sapiens
agttggtaagaggca

SEQ ID NO: 16393 - DNA, 15 bp, Homo sapiens
tagttggtaagaggc

SEQ ID NO: 16394 - DNA, 15 bp, Homo sapiens
atagttggtaagagg

SEQ ID NO: 16395 - DNA, 15 bp, Homo sapiens
tatagttggtaagag

SEQ ID NO: 16396 - DNA, 15 bp, Homo sapiens
gtatagttggtaaga

SEQ ID NO: 16397 - DNA, 15 bp, Homo sapiens
cgtatagttggtaag

SEQ ID NO: 16398 - DNA, 15 bp, Homo sapiens
tcgtatagttggtaa

SEQ ID NO: 16399 - DNA, 15 bp, Homo sapiens
gtcgtatagttggta

SEQ ID NO: 16400 - DNA, 15 bp, Homo sapiens
ggtcgtatagttggt

SEQ ID NO: 16401 - DNA, 15 bp, Homo sapiens
aggtcgtatagttgg

SEQ ID NO: 16402 - DNA, 15 bp, Homo sapiens
gaggtcgtatagttg

SEQ ID NO: 16403 - DNA, 15 bp, Homo sapiens
tgaggtcgtatagtt

SEQ ID NO: 16404 - DNA, 15 bp, Homo sapiens
ctgaggtcgtatagt

SEQ ID NO: 16405 - DNA, 15 bp, Homo sapiens
cctgaggtcgtatag

SEQ ID NO: 16406 - DNA, 15 bp, Homo sapiens
gcctgaggtcgtata

SEQ ID NO: 16407 - DNA, 15 bp, Homo sapiens
tgcctgaggtcgtat

SEQ ID NO: 16408 - DNA, 15 bp, Homo sapiens
ctgcctgaggtcgta

SEQ ID NO: 16409 - DNA, 15 bp, Homo sapiens
tctgcctgaggtcgt

SEQ ID NO: 16410 - DNA, 15 bp, Homo sapiens
atctgcctgaggtcg

SEQ ID NO: 16411 - DNA, 15 bp, Homo sapiens
gatctgcctgaggtc

SEQ ID NO: 16412 - DNA, 15 bp, Homo sapiens
tgatctgcctgaggt

SEQ ID NO: 16413 - DNA, 15 bp, Homo sapiens
gtgatctgcctgagg

SEQ ID NO: 16414 - DNA, 15 bp, Homo sapiens
agtgatctgcctgag

SEQ ID NO: 16415 - DNA, 15 bp, Homo sapiens
aagtgatctgcctga

SEQ ID NO: 16416 - DNA, 15 bp, Homo sapiens
taagtgatctgcctg

SEQ ID NO: 16417 - DNA, 15 bp, Homo sapiens
ttaagtgatctgcct

SEQ ID NO: 16418 - DNA, 15 bp, Homo sapiens
attaagtgatctgcc

SEQ ID NO: 16419 - DNA, 15 bp, Homo sapiens
gattaagtgatctgc

SEQ ID NO: 16420 - DNA, 15 bp, Homo sapiens
ggattaagtgatctg

SEQ ID NO: 16421 - DNA, 15 bp, Homo sapiens
gggattaagtgatct

SEQ ID NO: 16422 - DNA, 15 bp, Homo sapiens
agggattaagtgatc

SEQ ID NO: 16423 - DNA, 15 bp, Homo sapiens
gagggattaagtgat

SEQ ID NO: 16424 - DNA, 15 bp, Homo sapiens
agagggattaagtga

SEQ ID NO: 16425 - DNA, 15 bp, Homo sapiens
cagagggattaagtg

SEQ ID NO: 16426 - DNA, 15 bp, Homo sapiens
tttttttttttttaa

SEQ ID NO: 16427 - DNA, 15 bp, Homo sapiens
agccctgaacaagac

SEQ ID NO: 16428 - DNA, 15 bp, Homo sapiens
cggcggcggcggcgg

SEQ ID NO: 16429 - DNA, 15 bp, Homo sapiens
ggcggcggcggcggc

SEQ ID NO: 16430 - DNA, 15 bp, Homo sapiens
ccgccgccgccgccg

SEQ ID NO: 16431 - DNA, 15 bp, Homo sapiens
gccgccgccgccgcc

SEQ ID NO: 16432 - DNA, 15 bp, Homo sapiens
caaaaaaaaaaaaaa

SEQ ID NO: 16433 - DNA, 15 bp, Homo sapiens
tgtgtgtgtgtgtct

SEQ ID NO: 16434 - DNA, 15 bp, Homo sapiens
gtgtgtgtgtgtgtc

SEQ ID NO: 16435 - DNA, 15 bp, Homo sapiens
tgtgtgtgtgtgtgt

SEQ ID NO: 16436 - DNA, 15 bp, Homo sapiens
gtgtgtgtgtgtgtg

SEQ ID NO: 16437 - DNA, 15 bp, Homo sapiens
ggtgtgtgtgtgtgt

SEQ ID NO: 16438 - DNA, 15 bp, Homo sapiens
tggtgtgtgtgtgtg

SEQ ID NO: 16439 - DNA, 15 bp, Homo sapiens
ccacccaccttggcc

SEQ ID NO: 16440 - DNA, 15 bp, Homo sapiens
tccacccaccttggc

SEQ ID NO: 16441 - DNA, 15 bp, Homo sapiens
aaaaaaaaaaaaagg

SEQ ID NO: 16442 - DNA, 15 bp, Homo sapiens
ctgcactccagcctg

SEQ ID NO: 16443 - DNA, 15 bp, Homo sapiens
actgcactccagcct

SEQ ID NO: 16444 - DNA, 15 bp, Homo sapiens
ctactcgggaggctg

SEQ ID NO: 16445 - DNA, 15 bp, Homo sapiens
gctactcgggaggct

SEQ ID NO: 16446 - DNA, 15 bp, Homo sapiens
agctactcgggaggc

SEQ ID NO: 16447 - DNA, 15 bp, Homo sapiens
cagctactcgggagg

SEQ ID NO: 16448 - DNA, 15 bp, Homo sapiens
ccagctactcgggag

SEQ ID NO: 16449 - DNA, 15 bp, Homo sapiens
cccagctactcggga

SEQ ID NO: 16450 - DNA, 15 bp, Homo sapiens
tcccagctactcggg

SEQ ID NO: 16451 - DNA, 15 bp, Homo sapiens
aatacaaaaattagc

SEQ ID NO: 16452 - DNA, 15 bp, Homo sapiens
aaatacaaaaattag

SEQ ID NO: 16453 - DNA, 15 bp, Homo sapiens
aaaatacaaaaatta

SEQ ID NO: 16454 - DNA, 15 bp, Homo sapiens
tcccagcactttggg

SEQ ID NO: 16455 - DNA, 15 bp, Homo sapiens
atcccagcactttgg

SEQ ID NO: 16456 - DNA, 15 bp, Homo sapiens
aatcccagcactttg

SEQ ID NO: 16457 - DNA, 15 bp, Homo sapiens
taatcccagcacttt

SEQ ID NO: 16458 - DNA, 15 bp, Homo sapiens
gtaatcccagcactt

SEQ ID NO: 16459 - DNA, 15 bp, Homo sapiens
tgtaatcccagcact

SEQ ID NO: 16460 - DNA, 15 bp, Homo sapiens
ctgtaatcccagcac

SEQ ID NO: 16461 - DNA, 15 bp, Homo sapiens
cctgtaatcccagca

SEQ ID NO: 16462 - DNA, 15 bp, Homo sapiens
agccaccaagttatg

SEQ ID NO: 16463 - DNA, 15 bp, Homo sapiens
gccaccaagttatgt

SEQ ID NO: 16464 - DNA, 15 bp, Homo sapiens
ccaccaagttatgtg

SEQ ID NO: 16465 - DNA, 15 bp, Homo sapiens
caccaagttatgtgg

SEQ ID NO: 16466 - DNA, 15 bp, Homo sapiens
accaagttatgtggg

SEQ ID NO: 16467 - DNA, 15 bp, Homo sapiens
ccaagttatgtgggg

SEQ ID NO: 16468 - DNA, 15 bp, Homo sapiens
caagttatgtggggc

SEQ ID NO: 16469 - DNA, 15 bp, Homo sapiens
aagttatgtggggca

SEQ ID NO: 16470 - DNA, 15 bp, Homo sapiens
agttatgtggggcac

SEQ ID NO: 16471 - DNA, 15 bp, Homo sapiens
gttatgtggggcact

SEQ ID NO: 16472 - DNA, 15 bp, Homo sapiens
ttatgtggggcactg

SEQ ID NO: 16473 - DNA, 15 bp, Homo sapiens
tatgtggggcactgc

SEQ ID NO: 16474 - DNA, 15 bp, Homo sapiens
atgtggggcactgct

SEQ ID NO: 16475 - DNA, 15 bp, Homo sapiens
tgtggggcactgctt

SEQ ID NO: 16476 - DNA, 15 bp, Homo sapiens
gtggggcactgcttt

SEQ ID NO: 16477 - DNA, 15 bp, Homo sapiens
tggggcactgctttg

SEQ ID NO: 16478 - DNA, 15 bp, Homo sapiens
ggggcactgctttgc

SEQ ID NO: 16479 - DNA, 15 bp, Homo sapiens
gggcactgctttgcc

SEQ ID NO: 16480 - DNA, 15 bp, Homo sapiens
ggcactgctttgcct

SEQ ID NO: 16481 - DNA, 15 bp, Homo sapiens
gcactgctttgcctt

SEQ ID NO: 16482 - DNA, 15 bp, Homo sapiens
cactgctttgccttc

SEQ ID NO: 16483 - DNA, 15 bp, Homo sapiens
actgctttgccttcc

SEQ ID NO: 16484 - DNA, 15 bp, Homo sapiens
ctgctttgccttccc

SEQ ID NO: 16485 - DNA, 15 bp, Homo sapiens
tgctttgccttcccc

SEQ ID NO: 16486 - DNA, 15 bp, Homo sapiens
gctttgccttcccca

SEQ ID NO: 16487 - DNA, 15 bp, Homo sapiens
ctttgccttccccaa

SEQ ID NO: 16488 - DNA, 15 bp, Homo sapiens
tttgccttccccaac

SEQ ID NO: 16489 - DNA, 15 bp, Homo sapiens
ttgccttccccaaca

SEQ ID NO: 16490 - DNA, 15 bp, Homo sapiens
tgccttccccaacaa

SEQ ID NO: 16491 - DNA, 15 bp, Homo sapiens
gccttccccaacaag

SEQ ID NO: 16492 - DNA, 15 bp, Homo sapiens
ccttccccaacaagt

SEQ ID NO: 16493 - DNA, 15 bp, Homo sapiens
cttccccaacaagtg

SEQ ID NO: 16494 - DNA, 15 bp, Homo sapiens
ttccccaacaagtgt

SEQ ID NO: 16495 - DNA, 15 bp, Homo sapiens
tccccaacaagtgtg

SEQ ID NO: 16496 - DNA, 15 bp, Homo sapiens
ccccaacaagtgtgt

SEQ ID NO: 16497 - DNA, 15 bp, Homo sapiens
cccaacaagtgtgtc

SEQ ID NO: 16498 - DNA, 15 bp, Homo sapiens
ccaacaagtgtgtca

SEQ ID NO: 16499 - DNA, 15 bp, Homo sapiens
caacaagtgtgtcag

SEQ ID NO: 16500 - DNA, 15 bp, Homo sapiens
aacaagtgtgtcagc

SEQ ID NO: 16501 - DNA, 15 bp, Homo sapiens
acaagtgtgtcagcc

SEQ ID NO: 16502 - DNA, 15 bp, Homo sapiens
caagtgtgtcagcct

SEQ ID NO: 16503 - DNA, 15 bp, Homo sapiens
aagtgtgtcagcctc

SEQ ID NO: 16504 - DNA, 15 bp, Homo sapiens
agtgtgtcagcctca

SEQ ID NO: 16505 - DNA, 15 bp, Homo sapiens
gtgtgtcagcctcaa

SEQ ID NO: 16506 - DNA, 15 bp, Homo sapiens
tgtgtcagcctcaac

SEQ ID NO: 16507 - DNA, 15 bp, Homo sapiens
gtgtcagcctcaact

SEQ ID NO: 16508 - DNA, 15 bp, Homo sapiens
tgtcagcctcaactc

SEQ ID NO: 16509 - DNA, 15 bp, Homo sapiens
gtcagcctcaactct

SEQ ID NO: 16510 - DNA, 15 bp, Homo sapiens
tcagcctcaactctg

SEQ ID NO: 16511 - DNA, 15 bp, Homo sapiens
cagcctcaactctgg

SEQ ID NO: 16512 - DNA, 15 bp, Homo sapiens
agcctcaactctggg

SEQ ID NO: 16513 - DNA, 15 bp, Homo sapiens
gcctcaactctggga

SEQ ID NO: 16514 - DNA, 15 bp, Homo sapiens
cctcaactctgggac

SEQ ID NO: 16515 - DNA, 15 bp, Homo sapiens
ctcaactctgggact

SEQ ID NO: 16516 - DNA, 15 bp, Homo sapiens
tcaactctgggactt

SEQ ID NO: 16517 - DNA, 15 bp, Homo sapiens
caactctgggacttg

SEQ ID NO: 16518 - DNA, 15 bp, Homo sapiens
aactctgggacttgc

SEQ ID NO: 16519 - DNA, 15 bp, Homo sapiens
actctgggacttgcg

SEQ ID NO: 16520 - DNA, 15 bp, Homo sapiens
ctctgggacttgcgg

SEQ ID NO: 16521 - DNA, 15 bp, Homo sapiens
tctgggacttgcggg

SEQ ID NO: 16522 - DNA, 15 bp, Homo sapiens
ctgggacttgcgggt

SEQ ID NO: 16523 - DNA, 15 bp, Homo sapiens
tgggacttgcgggtg

SEQ ID NO: 16524 - DNA, 15 bp, Homo sapiens
gggacttgcgggtga

SEQ ID NO: 16525 - DNA, 15 bp, Homo sapiens
ggacttgcgggtgat

SEQ ID NO: 16526 - DNA, 15 bp, Homo sapiens
gacttgcgggtgatc

SEQ ID NO: 16527 - DNA, 15 bp, Homo sapiens
acttgcgggtgatcc

SEQ ID NO: 16528 - DNA, 15 bp, Homo sapiens
cttgcgggtgatcca

SEQ ID NO: 16529 - DNA, 15 bp, Homo sapiens
ttgcgggtgatccag

SEQ ID NO: 16530 - DNA, 15 bp, Homo sapiens
tgcgggtgatccagt

SEQ ID NO: 16531 - DNA, 15 bp, Homo sapiens
gcgggtgatccagtg

SEQ ID NO: 16532 - DNA, 15 bp, Homo sapiens
cgggtgatccagtgg

SEQ ID NO: 16533 - DNA, 15 bp, Homo sapiens
gggtgatccagtggg

SEQ ID NO: 16534 - DNA, 15 bp, Homo sapiens
ggtgatccagtgggg

SEQ ID NO: 16535 - DNA, 15 bp, Homo sapiens
gtgatccagtggggt

SEQ ID NO: 16536 - DNA, 15 bp, Homo sapiens
tgatccagtggggta

SEQ ID NO: 16537 - DNA, 15 bp, Homo sapiens
gatccagtggggtag

SEQ ID NO: 16538 - DNA, 15 bp, Homo sapiens
atccagtggggtaga

SEQ ID NO: 16539 - DNA, 15 bp, Homo sapiens
tccagtggggtagag

SEQ ID NO: 16540 - DNA, 15 bp, Homo sapiens
ccagtggggtagagg

SEQ ID NO: 16541 - DNA, 15 bp, Homo sapiens
cagtggggtagaggg

SEQ ID NO: 16542 - DNA, 15 bp, Homo sapiens
agtggggtagaggga

SEQ ID NO: 16543 - DNA, 15 bp, Homo sapiens
gtggggtagagggag

SEQ ID NO: 16544 - DNA, 15 bp, Homo sapiens
tggggtagagggaga

SEQ ID NO: 16545 - DNA, 15 bp, Homo sapiens
ggggtagagggagag

SEQ ID NO: 16546 - DNA, 15 bp, Homo sapiens
gggtagagggagagc

SEQ ID NO: 16547 - DNA, 15 bp, Homo sapiens
ggtagagggagagca

SEQ ID NO: 16548 - DNA, 15 bp, Homo sapiens
gtagagggagagcag

SEQ ID NO: 16549 - DNA, 15 bp, Homo sapiens
tagagggagagcagt

SEQ ID NO: 16550 - DNA, 15 bp, Homo sapiens
agagggagagcagtt

SEQ ID NO: 16551 - DNA, 15 bp, Homo sapiens
gagggagagcagttt

SEQ ID NO: 16552 - DNA, 15 bp, Homo sapiens
agggagagcagtttc

SEQ ID NO: 16553 - DNA, 15 bp, Homo sapiens
gggagagcagtttct

SEQ ID NO: 16554 - DNA, 15 bp, Homo sapiens
ggagagcagtttctc

SEQ ID NO: 16555 - DNA, 15 bp, Homo sapiens
gagagcagtttctcg

SEQ ID NO: 16556 - DNA, 15 bp, Homo sapiens
agagcagtttctcgt

SEQ ID NO: 16557 - DNA, 15 bp, Homo sapiens
gagcagtttctcgtg

SEQ ID NO: 16558 - DNA, 15 bp, Homo sapiens
agcagtttctcgtgc

SEQ ID NO: 16559 - DNA, 15 bp, Homo sapiens
gcagtttctcgtgcc

SEQ ID NO: 16560 - DNA, 15 bp, Homo sapiens
cagtttctcgtgcca

SEQ ID NO: 16561 - DNA, 15 bp, Homo sapiens
agtttctcgtgccat

SEQ ID NO: 16562 - DNA, 15 bp, Homo sapiens
gtttctcgtgccatg

SEQ ID NO: 16563 - DNA, 15 bp, Homo sapiens
tttctcgtgccatga

SEQ ID NO: 16564 - DNA, 15 bp, Homo sapiens
ttctcgtgccatgag

SEQ ID NO: 16565 - DNA, 15 bp, Homo sapiens
tctcgtgccatgagc

SEQ ID NO: 16566 - DNA, 15 bp, Homo sapiens
ctcgtgccatgagct

SEQ ID NO: 16567 - DNA, 15 bp, Homo sapiens
tcgtgccatgagctt

SEQ ID NO: 16568 - DNA, 15 bp, Homo sapiens
cgtgccatgagcttc

SEQ ID NO: 16569 - DNA, 15 bp, Homo sapiens
gtgccatgagcttct

SEQ ID NO: 16570 - DNA, 15 bp, Homo sapiens
tgccatgagcttctt

SEQ ID NO: 16571 - DNA, 15 bp, Homo sapiens
gccatgagcttcttc

SEQ ID NO: 16572 - DNA, 15 bp, Homo sapiens
ccatgagcttcttca

SEQ ID NO: 16573 - DNA, 15 bp, Homo sapiens
catgagcttcttcaa

SEQ ID NO: 16574 - DNA, 15 bp, Homo sapiens
atgagcttcttcaac

SEQ ID NO: 16575 - DNA, 15 bp, Homo sapiens
tgagcttcttcaaca

SEQ ID NO: 16576 - DNA, 15 bp, Homo sapiens
gagcttcttcaacag

SEQ ID NO: 16577 - DNA, 15 bp, Homo sapiens
agcttcttcaacagc

SEQ ID NO: 16578 - DNA, 15 bp, Homo sapiens
gcttcttcaacagcc

SEQ ID NO: 16579 - DNA, 15 bp, Homo sapiens
cttcttcaacagcca

SEQ ID NO: 16580 - DNA, 15 bp, Homo sapiens
ttcttcaacagccat

SEQ ID NO: 16581 - DNA, 15 bp, Homo sapiens
tcttcaacagccatg

SEQ ID NO: 16582 - DNA, 15 bp, Homo sapiens
cttcaacagccatga

SEQ ID NO: 16583 - DNA, 15 bp, Homo sapiens
ttcaacagccatgac

SEQ ID NO: 16584 - DNA, 15 bp, Homo sapiens
tcaacagccatgact

SEQ ID NO: 16585 - DNA, 15 bp, Homo sapiens
caacagccatgactt

SEQ ID NO: 16586 - DNA, 15 bp, Homo sapiens
aacagccatgacttc

SEQ ID NO: 16587 - DNA, 15 bp, Homo sapiens
acagccatgacttca

SEQ ID NO: 16588 - DNA, 15 bp, Homo sapiens
cagccatgacttcat

SEQ ID NO: 16589 - DNA, 15 bp, Homo sapiens
agccatgacttcatt

SEQ ID NO: 16590 - DNA, 15 bp, Homo sapiens
gccatgacttcattc

SEQ ID NO: 16591 - DNA, 15 bp, Homo sapiens
ccatgacttcattct

SEQ ID NO: 16592 - DNA, 15 bp, Homo sapiens
catgacttcattctt

SEQ ID NO: 16593 - DNA, 15 bp, Homo sapiens
atgacttcattcttt

SEQ ID NO: 16594 - DNA, 15 bp, Homo sapiens
tgacttcattctttg

SEQ ID NO: 16595 - DNA, 15 bp, Homo sapiens
gacttcattctttgg

SEQ ID NO: 16596 - DNA, 15 bp, Homo sapiens
acttcattctttggc

SEQ ID NO: 16597 - DNA, 15 bp, Homo sapiens
cttcattctttggcc

SEQ ID NO: 16598 - DNA, 15 bp, Homo sapiens
ttcattctttggcca

SEQ ID NO: 16599 - DNA, 15 bp, Homo sapiens
tcattctttggccac

SEQ ID NO: 16600 - DNA, 15 bp, Homo sapiens
cattctttggccacg

SEQ ID NO: 16601 - DNA, 15 bp, Homo sapiens
attctttggccacga

SEQ ID NO: 16602 - DNA, 15 bp, Homo sapiens
ttctttggccacgac

SEQ ID NO: 16603 - DNA, 15 bp, Homo sapiens
tctttggccacgacc

SEQ ID NO: 16604 - DNA, 15 bp, Homo sapiens
ctttggccacgaccc

SEQ ID NO: 16605 - DNA, 15 bp, Homo sapiens
tttggccacgaccca

SEQ ID NO: 16606 - DNA, 15 bp, Homo sapiens
ttggccacgacccat

SEQ ID NO: 16607 - DNA, 15 bp, Homo sapiens
tggccacgacccata

SEQ ID NO: 16608 - DNA, 15 bp, Homo sapiens
ggccacgacccatag

SEQ ID NO: 16609 - DNA, 15 bp, Homo sapiens
gccacgacccatagt

SEQ ID NO: 16610 - DNA, 15 bp, Homo sapiens
ccacgacccatagta

SEQ ID NO: 16611 - DNA, 15 bp, Homo sapiens
cacgacccatagtaa

SEQ ID NO: 16612 - DNA, 15 bp, Homo sapiens
acgacccatagtaag

SEQ ID NO: 16613 - DNA, 15 bp, Homo sapiens
cgacccatagtaaga

SEQ ID NO: 16614 - DNA, 15 bp, Homo sapiens
gacccatagtaagaa

SEQ ID NO: 16615 - DNA, 15 bp, Homo sapiens
acccatagtaagaaa

SEQ ID NO: 16616 - DNA, 15 bp, Homo sapiens
cccatagtaagaaat

SEQ ID NO: 16617 - DNA, 15 bp, Homo sapiens
ccatagtaagaaatc

SEQ ID NO: 16618 - DNA, 15 bp, Homo sapiens
catagtaagaaatcc

SEQ ID NO: 16619 - DNA, 15 bp, Homo sapiens
atagtaagaaatcca

SEQ ID NO: 16620 - DNA, 15 bp, Homo sapiens
tagtaagaaatccat

SEQ ID NO: 16621 - DNA, 15 bp, Homo sapiens
agtaagaaatccatt

SEQ ID NO: 16622 - DNA, 15 bp, Homo sapiens
gtaagaaatccattc

SEQ ID NO: 16623 - DNA, 15 bp, Homo sapiens
taagaaatccattct

SEQ ID NO: 16624 - DNA, 15 bp, Homo sapiens
aagaaatccattcta

SEQ ID NO: 16625 - DNA, 15 bp, Homo sapiens
agaaatccattctac

SEQ ID NO: 16626 - DNA, 15 bp, Homo sapiens
gaaatccattctaca

SEQ ID NO: 16627 - DNA, 15 bp, Homo sapiens
aaatccattctacat

SEQ ID NO: 16628 - DNA, 15 bp, Homo sapiens
aatccattctacatc

SEQ ID NO: 16629 - DNA, 15 bp, Homo sapiens
atccattctacatca

SEQ ID NO: 16630 - DNA, 15 bp, Homo sapiens
tccattctacatcat

SEQ ID NO: 16631 - DNA, 15 bp, Homo sapiens
ccattctacatcata

SEQ ID NO: 16632 - DNA, 15 bp, Homo sapiens
cattctacatcataa

SEQ ID NO: 16633 - DNA, 15 bp, Homo sapiens
attctacatcataac

SEQ ID NO: 16634 - DNA, 15 bp, Homo sapiens
ttctacatcataacc

SEQ ID NO: 16635 - DNA, 15 bp, Homo sapiens
tctacatcataaccc

SEQ ID NO: 16636 - DNA, 15 bp, Homo sapiens
ctacatcataaccca

SEQ ID NO: 16637 - DNA, 15 bp, Homo sapiens
tacatcataacccag

SEQ ID NO: 16638 - DNA, 15 bp, Homo sapiens
acatcataacccagc

SEQ ID NO: 16639 - DNA, 15 bp, Homo sapiens
catcataacccagca

SEQ ID NO: 16640 - DNA, 15 bp, Homo sapiens
atcataacccagcac

SEQ ID NO: 16641 - DNA, 15 bp, Homo sapiens
tcataacccagcaca

SEQ ID NO: 16642 - DNA, 15 bp, Homo sapiens
cataacccagcacac

SEQ ID NO: 16643 - DNA, 15 bp, Homo sapiens
ataacccagcacacc

SEQ ID NO: 16644 - DNA, 15 bp, Homo sapiens
taacccagcacaccc

SEQ ID NO: 16645 - DNA, 15 bp, Homo sapiens
aacccagcacaccca

SEQ ID NO: 16646 - DNA, 15 bp, Homo sapiens
acccagcacacccac

SEQ ID NO: 16647 - DNA, 15 bp, Homo sapiens
cccagcacacccaca

SEQ ID NO: 16648 - DNA, 15 bp, Homo sapiens
ccagcacacccacac

SEQ ID NO: 16649 - DNA, 15 bp, Homo sapiens
cagcacacccacacg

SEQ ID NO: 16650 - DNA, 15 bp, Homo sapiens
agcacacccacacgt

SEQ ID NO: 16651 - DNA, 15 bp, Homo sapiens
gcacacccacacgtg

SEQ ID NO: 16652 - DNA, 15 bp, Homo sapiens
cacacccacacgtgt

SEQ ID NO: 16653 - DNA, 15 bp, Homo sapiens
acacccacacgtgta

SEQ ID NO: 16654 - DNA, 15 bp, Homo sapiens
cacccacacgtgtaa

SEQ ID NO: 16655 - DNA, 15 bp, Homo sapiens
acccacacgtgtaaa

SEQ ID NO: 16656 - DNA, 15 bp, Homo sapiens
cccacacgtgtaaac

SEQ ID NO: 16657 - DNA, 15 bp, Homo sapiens
ccacacgtgtaaaca

SEQ ID NO: 16658 - DNA, 15 bp, Homo sapiens
cacacgtgtaaacag

SEQ ID NO: 16659 - DNA, 15 bp, Homo sapiens
acacgtgtaaacaga

SEQ ID NO: 16660 - DNA, 15 bp, Homo sapiens
cacgtgtaaacagac

SEQ ID NO: 16661 - DNA, 15 bp, Homo sapiens
acgtgtaaacagaca

SEQ ID NO: 16662 - DNA, 15 bp, Homo sapiens
cgtgtaaacagacat

SEQ ID NO: 16663 - DNA, 15 bp, Homo sapiens
gtgtaaacagacata

SEQ ID NO: 16664 - DNA, 15 bp, Homo sapiens
tgtaaacagacatat

SEQ ID NO: 16665 - DNA, 15 bp, Homo sapiens
gtaaacagacatata

SEQ ID NO: 16666 - DNA, 15 bp, Homo sapiens
taaacagacatataa

SEQ ID NO: 16667 - DNA, 15 bp, Homo sapiens
aaacagacatataaa

SEQ ID NO: 16668 - DNA, 15 bp, Homo sapiens
aacagacatataaat

SEQ ID NO: 16669 - DNA, 15 bp, Homo sapiens
acagacatataaata

SEQ ID NO: 16670 - DNA, 15 bp, Homo sapiens
cagacatataaataa

SEQ ID NO: 16671 - DNA, 15 bp, Homo sapiens
agacatataaataac

SEQ ID NO: 16672 - DNA, 15 bp, Homo sapiens
gacatataaataact

SEQ ID NO: 16673 - DNA, 15 bp, Homo sapiens
acatataaataactg

SEQ ID NO: 16674 - DNA, 15 bp, Homo sapiens
catataaataactga

SEQ ID NO: 16675 - DNA, 15 bp, Homo sapiens
atataaataactgaa

SEQ ID NO: 16676 - DNA, 15 bp, Homo sapiens
tataaataactgaaa

SEQ ID NO: 16677 - DNA, 15 bp, Homo sapiens
ataaataactgaaaa

SEQ ID NO: 16678 - DNA, 15 bp, Homo sapiens
taaataactgaaaaa

SEQ ID NO: 16679 - DNA, 15 bp, Homo sapiens
aaataactgaaaaat

SEQ ID NO: 16680 - DNA, 15 bp, Homo sapiens
aataactgaaaaatg

SEQ ID NO: 16681 - DNA, 15 bp, Homo sapiens
ataactgaaaaatgg

SEQ ID NO: 16682 - DNA, 15 bp, Homo sapiens
taactgaaaaatggt

SEQ ID NO: 16683 - DNA, 15 bp, Homo sapiens
aactgaaaaatggtt

SEQ ID NO: 16684 - DNA, 15 bp, Homo sapiens
actgaaaaatggttg

SEQ ID NO: 16685 - DNA, 15 bp, Homo sapiens
ctgaaaaatggttgt

SEQ ID NO: 16686 - DNA, 15 bp, Homo sapiens
tgaaaaatggttgtt

SEQ ID NO: 16687 - DNA, 15 bp, Homo sapiens
gaaaaatggttgttc

SEQ ID NO: 16688 - DNA, 15 bp, Homo sapiens
aaaaatggttgttct

SEQ ID NO: 16689 - DNA, 15 bp, Homo sapiens
aaaatggttgttctt

SEQ ID NO: 16690 - DNA, 15 bp, Homo sapiens
aaatggttgttcttc

SEQ ID NO: 16691 - DNA, 15 bp, Homo sapiens
aatggttgttcttcg

SEQ ID NO: 16692 - DNA, 15 bp, Homo sapiens
atggttgttcttcga

SEQ ID NO: 16693 - DNA, 15 bp, Homo sapiens
tggttgttcttcgag

SEQ ID NO: 16694 - DNA, 15 bp, Homo sapiens
ggttgttcttcgagt

SEQ ID NO: 16695 - DNA, 15 bp, Homo sapiens
gttgttcttcgagtg

SEQ ID NO: 16696 - DNA, 15 bp, Homo sapiens
ttgttcttcgagtga

SEQ ID NO: 16697 - DNA, 15 bp, Homo sapiens
tgttcttcgagtgaa

SEQ ID NO: 16698 - DNA, 15 bp, Homo sapiens
gttcttcgagtgaaa

SEQ ID NO: 16699 - DNA, 15 bp, Homo sapiens
ttcttcgagtgaaac

SEQ ID NO: 16700 - DNA, 15 bp, Homo sapiens
tcttcgagtgaaaca

SEQ ID NO: 16701 - DNA, 15 bp, Homo sapiens
cttcgagtgaaacaa

SEQ ID NO: 16702 - DNA, 15 bp, Homo sapiens
ttcgagtgaaacaat

SEQ ID NO: 16703 - DNA, 15 bp, Homo sapiens
tcgagtgaaacaata

SEQ ID NO: 16704 - DNA, 15 bp, Homo sapiens
cgagtgaaacaatac

SEQ ID NO: 16705 - DNA, 15 bp, Homo sapiens
gagtgaaacaatact

SEQ ID NO: 16706 - DNA, 15 bp, Homo sapiens
agtgaaacaatactt

SEQ ID NO: 16707 - DNA, 15 bp, Homo sapiens
gtgaaacaatactta

SEQ ID NO: 16708 - DNA, 15 bp, Homo sapiens
tgaaacaatacttac

SEQ ID NO: 16709 - DNA, 15 bp, Homo sapiens
gaaacaatacttacc

SEQ ID NO: 16710 - DNA, 15 bp, Homo sapiens
aaacaatacttacct

SEQ ID NO: 16711 - DNA, 15 bp, Homo sapiens
aacaatacttacctt

SEQ ID NO: 16712 - DNA, 15 bp, Homo sapiens
acaatacttaccttt

SEQ ID NO: 16713 - DNA, 15 bp, Homo sapiens
caatacttaccttta

SEQ ID NO: 16714 - DNA, 15 bp, Homo sapiens
aatacttacctttac

SEQ ID NO: 16715 - DNA, 15 bp, Homo sapiens
atacttacctttact

SEQ ID NO: 16716 - DNA, 15 bp, Homo sapiens
tacttacctttactg

SEQ ID NO: 16717 - DNA, 15 bp, Homo sapiens
acttacctttactgc

SEQ ID NO: 16718 - DNA, 15 bp, Homo sapiens
cttacctttactgca

SEQ ID NO: 16719 - DNA, 15 bp, Homo sapiens
ttacctttactgcat

SEQ ID NO: 16720 - DNA, 15 bp, Homo sapiens
tacctttactgcatg

SEQ ID NO: 16721 - DNA, 15 bp, Homo sapiens
acctttactgcatgt

SEQ ID NO: 16722 - DNA, 15 bp, Homo sapiens
cctttactgcatgtg

SEQ ID NO: 16723 - DNA, 15 bp, Homo sapiens
ctttactgcatgtgg

SEQ ID NO: 16724 - DNA, 15 bp, Homo sapiens
tttactgcatgtggt

SEQ ID NO: 16725 - DNA, 15 bp, Homo sapiens
ttactgcatgtggtg

SEQ ID NO: 16726 - DNA, 15 bp, Homo sapiens
tactgcatgtggtga

SEQ ID NO: 16727 - DNA, 15 bp, Homo sapiens
actgcatgtggtgat

SEQ ID NO: 16728 - DNA, 15 bp, Homo sapiens
ctgcatgtggtgata

SEQ ID NO: 16729 - DNA, 15 bp, Homo sapiens
tgcatgtggtgatac

SEQ ID NO: 16730 - DNA, 15 bp, Homo sapiens
gcatgtggtgataca

SEQ ID NO: 16731 - DNA, 15 bp, Homo sapiens
catgtggtgatacac

SEQ ID NO: 16732 - DNA, 15 bp, Homo sapiens
atgtggtgatacact

SEQ ID NO: 16733 - DNA, 15 bp, Homo sapiens
tgtggtgatacactg

SEQ ID NO: 16734 - DNA, 15 bp, Homo sapiens
gtggtgatacactgg

SEQ ID NO: 16735 - DNA, 15 bp, Homo sapiens
tggtgatacactggc

SEQ ID NO: 16736 - DNA, 15 bp, Homo sapiens
ggtgatacactggca

SEQ ID NO: 16737 - DNA, 15 bp, Homo sapiens
gtgatacactggcat

SEQ ID NO: 16738 - DNA, 15 bp, Homo sapiens
tgatacactggcatt

SEQ ID NO: 16739 - DNA, 15 bp, Homo sapiens
gatacactggcattt

SEQ ID NO: 16740 - DNA, 15 bp, Homo sapiens
atacactggcatttc

SEQ ID NO: 16741 - DNA, 15 bp, Homo sapiens
tacactggcatttct

SEQ ID NO: 16742 - DNA, 15 bp, Homo sapiens
acactggcatttctt

SEQ ID NO: 16743 - DNA, 15 bp, Homo sapiens
cactggcatttctta

SEQ ID NO: 16744 - DNA, 15 bp, Homo sapiens
actggcatttcttat

SEQ ID NO: 16745 - DNA, 15 bp, Homo sapiens
ctggcatttcttatg

SEQ ID NO: 16746 - DNA, 15 bp, Homo sapiens
tggcatttcttatgc

SEQ ID NO: 16747 - DNA, 15 bp, Homo sapiens
ggcatttcttatgct

SEQ ID NO: 16748 - DNA, 15 bp, Homo sapiens
gcatttcttatgcta

SEQ ID NO: 16749 - DNA, 15 bp, Homo sapiens
catttcttatgctat

SEQ ID NO: 16750 - DNA, 15 bp, Homo sapiens
atttcttatgctatt

SEQ ID NO: 16751 - DNA, 15 bp, Homo sapiens
tttcttatgctattt

SEQ ID NO: 16752 - DNA, 15 bp, Homo sapiens
ttcttatgctatttc

SEQ ID NO: 16753 - DNA, 15 bp, Homo sapiens
tcttatgctatttcc

SEQ ID NO: 16754 - DNA, 15 bp, Homo sapiens
cttatgctatttcct

SEQ ID NO: 16755 - DNA, 15 bp, Homo sapiens
ttatgctatttcctt

SEQ ID NO: 16756 - DNA, 15 bp, Homo sapiens
tatgctatttccttt

SEQ ID NO: 16757 - DNA, 15 bp, Homo sapiens
atgctatttcctttt

SEQ ID NO: 16758 - DNA, 15 bp, Homo sapiens
tgctatttccttttt

SEQ ID NO: 16759 - DNA, 15 bp, Homo sapiens
gctatttcctttttc

SEQ ID NO: 16760 - DNA, 15 bp, Homo sapiens
ctatttcctttttct

SEQ ID NO: 16761 - DNA, 15 bp, Homo sapiens
tatttcctttttctt

SEQ ID NO: 16762 - DNA, 15 bp, Homo sapiens
atttcctttttcttt

SEQ ID NO: 16763 - DNA, 15 bp, Homo sapiens
tttcctttttctttt

SEQ ID NO: 16764 - DNA, 15 bp, Homo sapiens
ttcctttttcttttt

SEQ ID NO: 16765 - DNA, 15 bp, Homo sapiens
tcctttttcttttta

SEQ ID NO: 16766 - DNA, 15 bp, Homo sapiens
cctttttctttttaa

SEQ ID NO: 16767 - DNA, 15 bp, Homo sapiens
ctttttctttttaat

SEQ ID NO: 16768 - DNA, 15 bp, Homo sapiens
tttttctttttaatg

SEQ ID NO: 16769 - DNA, 15 bp, Homo sapiens
ttttctttttaatgc

SEQ ID NO: 16770 - DNA, 15 bp, Homo sapiens
tttctttttaatgct

SEQ ID NO: 16771 - DNA, 15 bp, Homo sapiens
ttctttttaatgctt

SEQ ID NO: 16772 - DNA, 15 bp, Homo sapiens
tctttttaatgcttg

SEQ ID NO: 16773 - DNA, 15 bp, Homo sapiens
ctttttaatgcttgt

SEQ ID NO: 16774 - DNA, 15 bp, Homo sapiens
tttttaatgcttgtt

SEQ ID NO: 16775 - DNA, 15 bp, Homo sapiens
ttttaatgcttgttg

SEQ ID NO: 16776 - DNA, 15 bp, Homo sapiens
tttaatgcttgttga

SEQ ID NO: 16777 - DNA, 15 bp, Homo sapiens
ttaatgcttgttgaa

SEQ ID NO: 16778 - DNA, 15 bp, Homo sapiens
taatgcttgttgaaa

SEQ ID NO: 16779 - DNA, 15 bp, Homo sapiens
aatgcttgttgaaac

SEQ ID NO: 16780 - DNA, 15 bp, Homo sapiens
atgcttgttgaaacc

SEQ ID NO: 16781 - DNA, 15 bp, Homo sapiens
tgcttgttgaaaccc

SEQ ID NO: 16782 - DNA, 15 bp, Homo sapiens
gcttgttgaaaccca

SEQ ID NO: 16783 - DNA, 15 bp, Homo sapiens
cttgttgaaacccag

SEQ ID NO: 16784 - DNA, 15 bp, Homo sapiens
ttgttgaaacccagt

SEQ ID NO: 16785 - DNA, 15 bp, Homo sapiens
tgttgaaacccagta

SEQ ID NO: 16786 - DNA, 15 bp, Homo sapiens
gttgaaacccagtaa

SEQ ID NO: 16787 - DNA, 15 bp, Homo sapiens
ttgaaacccagtaaa

SEQ ID NO: 16788 - DNA, 15 bp, Homo sapiens
tgaaacccagtaaat

SEQ ID NO: 16789 - DNA, 15 bp, Homo sapiens
gaaacccagtaaatt

SEQ ID NO: 16790 - DNA, 15 bp, Homo sapiens
aaacccagtaaattg

SEQ ID NO: 16791 - DNA, 15 bp, Homo sapiens
aacccagtaaattga

SEQ ID NO: 16792 - DNA, 15 bp, Homo sapiens
acccagtaaattgat

SEQ ID NO: 16793 - DNA, 15 bp, Homo sapiens
cccagtaaattgatt

SEQ ID NO: 16794 - DNA, 15 bp, Homo sapiens
ccagtaaattgattt

SEQ ID NO: 16795 - DNA, 15 bp, Homo sapiens
cagtaaattgatttc

SEQ ID NO: 16796 - DNA, 15 bp, Homo sapiens
agtaaattgatttca

SEQ ID NO: 16797 - DNA, 15 bp, Homo sapiens
gtaaattgatttcac

SEQ ID NO: 16798 - DNA, 15 bp, Homo sapiens
taaattgatttcaca

SEQ ID NO: 16799 - DNA, 15 bp, Homo sapiens
aaattgatttcacaa

SEQ ID NO: 16800 - DNA, 15 bp, Homo sapiens
aattgatttcacaac

SEQ ID NO: 16801 - DNA, 15 bp, Homo sapiens
attgatttcacaact

SEQ ID NO: 16802 - DNA, 15 bp, Homo sapiens
ttgatttcacaactc

SEQ ID NO: 16803 - DNA, 15 bp, Homo sapiens
tgatttcacaactca

SEQ ID NO: 16804 - DNA, 15 bp, Homo sapiens
gatttcacaactcaa

SEQ ID NO: 16805 - DNA, 15 bp, Homo sapiens
atttcacaactcaat

SEQ ID NO: 16806 - DNA, 15 bp, Homo sapiens
tttcacaactcaata

SEQ ID NO: 16807 - DNA, 15 bp, Homo sapiens
ttcacaactcaataa

SEQ ID NO: 16808 - DNA, 15 bp, Homo sapiens
tcacaactcaataaa

SEQ ID NO: 16809 - DNA, 15 bp, Homo sapiens
cacaactcaataaag

SEQ ID NO: 16810 - DNA, 15 bp, Homo sapiens
acaactcaataaagg

SEQ ID NO: 16811 - DNA, 15 bp, Homo sapiens
caactcaataaaggg

SEQ ID NO: 16812 - DNA, 15 bp, Homo sapiens
aactcaataaagggt

SEQ ID NO: 16813 - DNA, 15 bp, Homo sapiens
actcaataaagggtt

SEQ ID NO: 16814 - DNA, 15 bp, Homo sapiens
ctcaataaagggtta

SEQ ID NO: 16815 - DNA, 15 bp, Homo sapiens
tcaataaagggttag

SEQ ID NO: 16816 - DNA, 15 bp, Homo sapiens
caataaagggttagg

SEQ ID NO: 16817 - DNA, 15 bp, Homo sapiens
aataaagggttagga

SEQ ID NO: 16818 - DNA, 15 bp, Homo sapiens
ataaagggttaggat

SEQ ID NO: 16819 - DNA, 15 bp, Homo sapiens
taaagggttaggata

SEQ ID NO: 16820 - DNA, 15 bp, Homo sapiens
aaagggttaggatat

SEQ ID NO: 16821 - DNA, 15 bp, Homo sapiens
aagggttaggatatg

SEQ ID NO: 16822 - DNA, 15 bp, Homo sapiens
agggttaggatatgc

SEQ ID NO: 16823 - DNA, 15 bp, Homo sapiens
gggttaggatatgca

SEQ ID NO: 16824 - DNA, 15 bp, Homo sapiens
ggttaggatatgcaa

SEQ ID NO: 16825 - DNA, 15 bp, Homo sapiens
gttaggatatgcaat

SEQ ID NO: 16826 - DNA, 15 bp, Homo sapiens
ttaggatatgcaatt

SEQ ID NO: 16827 - DNA, 15 bp, Homo sapiens
taggatatgcaattt

SEQ ID NO: 16828 - DNA, 15 bp, Homo sapiens
aggatatgcaatttt

SEQ ID NO: 16829 - DNA, 15 bp, Homo sapiens
ggatatgcaattttg

SEQ ID NO: 16830 - DNA, 15 bp, Homo sapiens
gatatgcaattttga

SEQ ID NO: 16831 - DNA, 15 bp, Homo sapiens
atatgcaattttgaa

SEQ ID NO: 16832 - DNA, 15 bp, Homo sapiens
tatgcaattttgaac

SEQ ID NO: 16833 - DNA, 15 bp, Homo sapiens
atgcaattttgaaca

SEQ ID NO: 16834 - DNA, 15 bp, Homo sapiens
tgcaattttgaacaa

SEQ ID NO: 16835 - DNA, 15 bp, Homo sapiens
gcaattttgaacaat

SEQ ID NO: 16836 - DNA, 15 bp, Homo sapiens
caattttgaacaatt

SEQ ID NO: 16837 - DNA, 15 bp, Homo sapiens
aattttgaacaattc

SEQ ID NO: 16838 - DNA, 15 bp, Homo sapiens
attttgaacaattcc

SEQ ID NO: 16839 - DNA, 15 bp, Homo sapiens
ttttgaacaattcca

SEQ ID NO: 16840 - DNA, 15 bp, Homo sapiens
tttgaacaattccag

SEQ ID NO: 16841 - DNA, 15 bp, Homo sapiens
ttgaacaattccagc

SEQ ID NO: 16842 - DNA, 15 bp, Homo sapiens
tgaacaattccagct

SEQ ID NO: 16843 - DNA, 15 bp, Homo sapiens
gaacaattccagctc

SEQ ID NO: 16844 - DNA, 15 bp, Homo sapiens
aacaattccagctct

SEQ ID NO: 16845 - DNA, 15 bp, Homo sapiens
acaattccagctctg

SEQ ID NO: 16846 - DNA, 15 bp, Homo sapiens
caattccagctctgc

SEQ ID NO: 16847 - DNA, 15 bp, Homo sapiens
aattccagctctgcc

SEQ ID NO: 16848 - DNA, 15 bp, Homo sapiens
attccagctctgcca

SEQ ID NO: 16849 - DNA, 15 bp, Homo sapiens
ttccagctctgccac

SEQ ID NO: 16850 - DNA, 15 bp, Homo sapiens
tccagctctgccacc

SEQ ID NO: 16851 - DNA, 15 bp, Homo sapiens
ccagctctgccacct

SEQ ID NO: 16852 - DNA, 15 bp, Homo sapiens
cagctctgccaccta

SEQ ID NO: 16853 - DNA, 15 bp, Homo sapiens
agctctgccacctat

SEQ ID NO: 16854 - DNA, 15 bp, Homo sapiens
gctctgccacctatc

SEQ ID NO: 16855 - DNA, 15 bp, Homo sapiens
ctctgccacctatca

SEQ ID NO: 16856 - DNA, 15 bp, Homo sapiens
tctgccacctatcag

SEQ ID NO: 16857 - DNA, 15 bp, Homo sapiens
ctgccacctatcagc

SEQ ID NO: 16858 - DNA, 15 bp, Homo sapiens
tgccacctatcagct

SEQ ID NO: 16859 - DNA, 15 bp, Homo sapiens
gccacctatcagctg

SEQ ID NO: 16860 - DNA, 15 bp, Homo sapiens
ccacctatcagctgt

SEQ ID NO: 16861 - DNA, 15 bp, Homo sapiens
cacctatcagctgtg

SEQ ID NO: 16862 - DNA, 15 bp, Homo sapiens
acctatcagctgtgt

SEQ ID NO: 16863 - DNA, 15 bp, Homo sapiens
cctatcagctgtgtg

SEQ ID NO: 16864 - DNA, 15 bp, Homo sapiens
ctatcagctgtgtga

SEQ ID NO: 16865 - DNA, 15 bp, Homo sapiens
tatcagctgtgtgac

SEQ ID NO: 16866 - DNA, 15 bp, Homo sapiens
atcagctgtgtgacc

SEQ ID NO: 16867 - DNA, 15 bp, Homo sapiens
tcagctgtgtgacct

SEQ ID NO: 16868 - DNA, 15 bp, Homo sapiens
cagctgtgtgacctg

SEQ ID NO: 16869 - DNA, 15 bp, Homo sapiens
agctgtgtgacctgg

SEQ ID NO: 16870 - DNA, 15 bp, Homo sapiens
gctgtgtgacctggg

SEQ ID NO: 16871 - DNA, 15 bp, Homo sapiens
ctgtgtgacctgggg

SEQ ID NO: 16872 - DNA, 15 bp, Homo sapiens
tgtgtgacctggggc

SEQ ID NO: 16873 - DNA, 15 bp, Homo sapiens
gtgtgacctggggca

SEQ ID NO: 16874 - DNA, 15 bp, Homo sapiens
tgtgacctggggcaa

SEQ ID NO: 16875 - DNA, 15 bp, Homo sapiens
gtgacctggggcaag

SEQ ID NO: 16876 - DNA, 15 bp, Homo sapiens
tgacctggggcaagt

SEQ ID NO: 16877 - DNA, 15 bp, Homo sapiens
gacctggggcaagtt

SEQ ID NO: 16878 - DNA, 15 bp, Homo sapiens
acctggggcaagtta

SEQ ID NO: 16879 - DNA, 15 bp, Homo sapiens
cctggggcaagttac

SEQ ID NO: 16880 - DNA, 15 bp, Homo sapiens
ctggggcaagttact

SEQ ID NO: 16881 - DNA, 15 bp, Homo sapiens
tggggcaagttactt

SEQ ID NO: 16882 - DNA, 15 bp, Homo sapiens
ggggcaagttactta

SEQ ID NO: 16883 - DNA, 15 bp, Homo sapiens
gggcaagttacttaa

SEQ ID NO: 16884 - DNA, 15 bp, Homo sapiens
ggcaagttacttaac

SEQ ID NO: 16885 - DNA, 15 bp, Homo sapiens
gcaagttacttaacc

SEQ ID NO: 16886 - DNA, 15 bp, Homo sapiens
caagttacttaacct

SEQ ID NO: 16887 - DNA, 15 bp, Homo sapiens
aagttacttaacctc

SEQ ID NO: 16888 - DNA, 15 bp, Homo sapiens
agttacttaacctct

SEQ ID NO: 16889 - DNA, 15 bp, Homo sapiens
gttacttaacctctc

SEQ ID NO: 16890 - DNA, 15 bp, Homo sapiens
ttacttaacctctct

SEQ ID NO: 16891 - DNA, 15 bp, Homo sapiens
tacttaacctctctg

SEQ ID NO: 16892 - DNA, 15 bp, Homo sapiens
acttaacctctctgt

SEQ ID NO: 16893 - DNA, 15 bp, Homo sapiens
cttaacctctctgtg

SEQ ID NO: 16894 - DNA, 15 bp, Homo sapiens
ttaacctctctgtgc

SEQ ID NO: 16895 - DNA, 15 bp, Homo sapiens
taacctctctgtgcc

SEQ ID NO: 16896 - DNA, 15 bp, Homo sapiens
aacctctctgtgcct

SEQ ID NO: 16897 - DNA, 15 bp, Homo sapiens
acctctctgtgcctc

SEQ ID NO: 16898 - DNA, 15 bp, Homo sapiens
cctctctgtgcctca

SEQ ID NO: 16899 - DNA, 15 bp, Homo sapiens
ctctctgtgcctcag

SEQ ID NO: 16900 - DNA, 15 bp, Homo sapiens
tctctgtgcctcagt

SEQ ID NO: 16901 - DNA, 15 bp, Homo sapiens
ctctgtgcctcagtt

SEQ ID NO: 16902 - DNA, 15 bp, Homo sapiens
tctgtgcctcagtta

SEQ ID NO: 16903 - DNA, 15 bp, Homo sapiens
ctgtgcctcagttac

SEQ ID NO: 16904 - DNA, 15 bp, Homo sapiens
tgtgcctcagttacc

SEQ ID NO: 16905 - DNA, 15 bp, Homo sapiens
gtgcctcagttacct

SEQ ID NO: 16906 - DNA, 15 bp, Homo sapiens
tgcctcagttacctc

SEQ ID NO: 16907 - DNA, 15 bp, Homo sapiens
gcctcagttacctca

SEQ ID NO: 16908 - DNA, 15 bp, Homo sapiens
cctcagttacctcat

SEQ ID NO: 16909 - DNA, 15 bp, Homo sapiens
ctcagttacctcatc

SEQ ID NO: 16910 - DNA, 15 bp, Homo sapiens
tcagttacctcatct

SEQ ID NO: 16911 - DNA, 15 bp, Homo sapiens
cagttacctcatctc

SEQ ID NO: 16912 - DNA, 15 bp, Homo sapiens
agttacctcatctct

SEQ ID NO: 16913 - DNA, 15 bp, Homo sapiens
gttacctcatctcta

SEQ ID NO: 16914 - DNA, 15 bp, Homo sapiens
ttacctcatctctaa

SEQ ID NO: 16915 - DNA, 15 bp, Homo sapiens
tacctcatctctaag

SEQ ID NO: 16916 - DNA, 15 bp, Homo sapiens
acctcatctctaagg

SEQ ID NO: 16917 - DNA, 15 bp, Homo sapiens
cctcatctctaagga

SEQ ID NO: 16918 - DNA, 15 bp, Homo sapiens
ctcatctctaaggag

SEQ ID NO: 16919 - DNA, 15 bp, Homo sapiens
tcatctctaaggagg

SEQ ID NO: 16920 - DNA, 15 bp, Homo sapiens
catctctaaggaggg

SEQ ID NO: 16921 - DNA, 15 bp, Homo sapiens
atctctaaggagggg

SEQ ID NO: 16922 - DNA, 15 bp, Homo sapiens
tctctaaggagggga

SEQ ID NO: 16923 - DNA, 15 bp, Homo sapiens
ctctaaggaggggat

SEQ ID NO: 16924 - DNA, 15 bp, Homo sapiens
tctaaggaggggata

SEQ ID NO: 16925 - DNA, 15 bp, Homo sapiens
ctaaggaggggataa

SEQ ID NO: 16926 - DNA, 15 bp, Homo sapiens
taaggaggggataat

SEQ ID NO: 16927 - DNA, 15 bp, Homo sapiens
aaggaggggataata

SEQ ID NO: 16928 - DNA, 15 bp, Homo sapiens
aggaggggataataa

SEQ ID NO: 16929 - DNA, 15 bp, Homo sapiens
ggaggggataataat

SEQ ID NO: 16930 - DNA, 15 bp, Homo sapiens
gaggggataataata

SEQ ID NO: 16931 - DNA, 15 bp, Homo sapiens
aggggataataatac

SEQ ID NO: 16932 - DNA, 15 bp, Homo sapiens
ggggataataatacc

SEQ ID NO: 16933 - DNA, 15 bp, Homo sapiens
gggataataatacct

SEQ ID NO: 16934 - DNA, 15 bp, Homo sapiens
ggataataataccta

SEQ ID NO: 16935 - DNA, 15 bp, Homo sapiens
gataataatacctac

SEQ ID NO: 16936 - DNA, 15 bp, Homo sapiens
ataataatacctaca

SEQ ID NO: 16937 - DNA, 15 bp, Homo sapiens
taataatacctacat

SEQ ID NO: 16938 - DNA, 15 bp, Homo sapiens
aataatacctacatc

SEQ ID NO: 16939 - DNA, 15 bp, Homo sapiens
ataatacctacatca

SEQ ID NO: 16940 - DNA, 15 bp, Homo sapiens
taatacctacatcag

SEQ ID NO: 16941 - DNA, 15 bp, Homo sapiens
aatacctacatcagt

SEQ ID NO: 16942 - DNA, 15 bp, Homo sapiens
atacctacatcagtg

SEQ ID NO: 16943 - DNA, 15 bp, Homo sapiens
tacctacatcagtga

SEQ ID NO: 16944 - DNA, 15 bp, Homo sapiens
acctacatcagtgag

SEQ ID NO: 16945 - DNA, 15 bp, Homo sapiens
cctacatcagtgagt

SEQ ID NO: 16946 - DNA, 15 bp, Homo sapiens
ctacatcagtgagtt

SEQ ID NO: 16947 - DNA, 15 bp, Homo sapiens
tacatcagtgagttg

SEQ ID NO: 16948 - DNA, 15 bp, Homo sapiens
acatcagtgagttgt

SEQ ID NO: 16949 - DNA, 15 bp, Homo sapiens
catcagtgagttgtt

SEQ ID NO: 16950 - DNA, 15 bp, Homo sapiens
atcagtgagttgttc

SEQ ID NO: 16951 - DNA, 15 bp, Homo sapiens
tcagtgagttgttca

SEQ ID NO: 16952 - DNA, 15 bp, Homo sapiens
cagtgagttgttcag

SEQ ID NO: 16953 - DNA, 15 bp, Homo sapiens
agtgagttgttcagc

SEQ ID NO: 16954 - DNA, 15 bp, Homo sapiens
gtgagttgttcagca

SEQ ID NO: 16955 - DNA, 15 bp, Homo sapiens
tgagttgttcagcag

SEQ ID NO: 16956 - DNA, 15 bp, Homo sapiens
gagttgttcagcaga

SEQ ID NO: 16957 - DNA, 15 bp, Homo sapiens
agttgttcagcagat

SEQ ID NO: 16958 - DNA, 15 bp, Homo sapiens
gttgttcagcagatc

SEQ ID NO: 16959 - DNA, 15 bp, Homo sapiens
ttgttcagcagatca

SEQ ID NO: 16960 - DNA, 15 bp, Homo sapiens
tgttcagcagatcaa

SEQ ID NO: 16961 - DNA, 15 bp, Homo sapiens
gttcagcagatcaaa

SEQ ID NO: 16962 - DNA, 15 bp, Homo sapiens
ttcagcagatcaaag

SEQ ID NO: 16963 - DNA, 15 bp, Homo sapiens
tcagcagatcaaaga

SEQ ID NO: 16964 - DNA, 15 bp, Homo sapiens
cagcagatcaaagaa

SEQ ID NO: 16965 - DNA, 15 bp, Homo sapiens
agcagatcaaagaaa

SEQ ID NO: 16966 - DNA, 15 bp, Homo sapiens
gcagatcaaagaaat

SEQ ID NO: 16967 - DNA, 15 bp, Homo sapiens
cagatcaaagaaata

SEQ ID NO: 16968 - DNA, 15 bp, Homo sapiens
agatcaaagaaatat

SEQ ID NO: 16969 - DNA, 15 bp, Homo sapiens
gatcaaagaaatatt

SEQ ID NO: 16970 - DNA, 15 bp, Homo sapiens
atcaaagaaatattt

SEQ ID NO: 16971 - DNA, 15 bp, Homo sapiens
tcaaagaaatatttg

SEQ ID NO: 16972 - DNA, 15 bp, Homo sapiens
caaagaaatatttga

SEQ ID NO: 16973 - DNA, 15 bp, Homo sapiens
aaagaaatatttgaa

SEQ ID NO: 16974 - DNA, 15 bp, Homo sapiens
aagaaatatttgaaa

SEQ ID NO: 16975 - DNA, 15 bp, Homo sapiens
agaaatatttgaaaa

SEQ ID NO: 16976 - DNA, 15 bp, Homo sapiens
gaaatatttgaaaag

SEQ ID NO: 16977 - DNA, 15 bp, Homo sapiens
aaatatttgaaaagt

SEQ ID NO: 16978 - DNA, 15 bp, Homo sapiens
aatatttgaaaagta

SEQ ID NO: 16979 - DNA, 15 bp, Homo sapiens
atatttgaaaagtac

SEQ ID NO: 16980 - DNA, 15 bp, Homo sapiens
tatttgaaaagtacc

SEQ ID NO: 16981 - DNA, 15 bp, Homo sapiens
atttgaaaagtacct

SEQ ID NO: 16982 - DNA, 15 bp, Homo sapiens
tttgaaaagtaccta

SEQ ID NO: 16983 - DNA, 15 bp, Homo sapiens
ttgaaaagtacctat

SEQ ID NO: 16984 - DNA, 15 bp, Homo sapiens
tgaaaagtacctata

SEQ ID NO: 16985 - DNA, 15 bp, Homo sapiens
gaaaagtacctataa

SEQ ID NO: 16986 - DNA, 15 bp, Homo sapiens
aaaagtacctataaa

SEQ ID NO: 16987 - DNA, 15 bp, Homo sapiens
aaagtacctataaag

SEQ ID NO: 16988 - DNA, 15 bp, Homo sapiens
aagtacctataaagc

SEQ ID NO: 16989 - DNA, 15 bp, Homo sapiens
agtacctataaagca

SEQ ID NO: 16990 - DNA, 15 bp, Homo sapiens
gtacctataaagcac

SEQ ID NO: 16991 - DNA, 15 bp, Homo sapiens
tacctataaagcact

SEQ ID NO: 16992 - DNA, 15 bp, Homo sapiens
acctataaagcactt

SEQ ID NO: 16993 - DNA, 15 bp, Homo sapiens
cctataaagcactta

SEQ ID NO: 16994 - DNA, 15 bp, Homo sapiens
ctataaagcacttaa

SEQ ID NO: 16995 - DNA, 15 bp, Homo sapiens
tataaagcacttaac

SEQ ID NO: 16996 - DNA, 15 bp, Homo sapiens
ataaagcacttaaca

SEQ ID NO: 16997 - DNA, 15 bp, Homo sapiens
taaagcacttaacag

SEQ ID NO: 16998 - DNA, 15 bp, Homo sapiens
aaagcacttaacagt

SEQ ID NO: 16999 - DNA, 15 bp, Homo sapiens
aagcacttaacagta

SEQ ID NO: 17000 - DNA, 15 bp, Homo sapiens
agcacttaacagtaa

SEQ ID NO: 17001 - DNA, 15 bp, Homo sapiens
gcacttaacagtaac

SEQ ID NO: 17002 - DNA, 15 bp, Homo sapiens
cacttaacagtaacc

SEQ ID NO: 17003 - DNA, 15 bp, Homo sapiens
acttaacagtaaccc

SEQ ID NO: 17004 - DNA, 15 bp, Homo sapiens
cttaacagtaacccc

SEQ ID NO: 17005 - DNA, 15 bp, Homo sapiens
ttaacagtaaccccc

SEQ ID NO: 17006 - DNA, 15 bp, Homo sapiens
taacagtaaccccct

SEQ ID NO: 17007 - DNA, 15 bp, Homo sapiens
aacagtaaccccctc

SEQ ID NO: 17008 - DNA, 15 bp, Homo sapiens
acagtaaccccctcc

SEQ ID NO: 17009 - DNA, 15 bp, Homo sapiens
cagtaaccccctcca

SEQ ID NO: 17010 - DNA, 15 bp, Homo sapiens
agtaaccccctccaa

SEQ ID NO: 17011 - DNA, 15 bp, Homo sapiens
gtaaccccctccaaa

SEQ ID NO: 17012 - DNA, 15 bp, Homo sapiens
taaccccctccaaat

SEQ ID NO: 17013 - DNA, 15 bp, Homo sapiens
aaccccctccaaatt

SEQ ID NO: 17014 - DNA, 15 bp, Homo sapiens
accccctccaaattt

SEQ ID NO: 17015 - DNA, 15 bp, Homo sapiens
ccccctccaaatttc

SEQ ID NO: 17016 - DNA, 15 bp, Homo sapiens
cccctccaaatttcc

SEQ ID NO: 17017 - DNA, 15 bp, Homo sapiens
ccctccaaatttcca

SEQ ID NO: 17018 - DNA, 15 bp, Homo sapiens
cctccaaatttccat

SEQ ID NO: 17019 - DNA, 15 bp, Homo sapiens
ctccaaatttccatt

SEQ ID NO: 17020 - DNA, 15 bp, Homo sapiens
tccaaatttccattg

SEQ ID NO: 17021 - DNA, 15 bp, Homo sapiens
ccaaatttccattga

SEQ ID NO: 17022 - DNA, 15 bp, Homo sapiens
caaatttccattgag

SEQ ID NO: 17023 - DNA, 15 bp, Homo sapiens
aaatttccattgagg

SEQ ID NO: 17024 - DNA, 15 bp, Homo sapiens
aatttccattgaggg

SEQ ID NO: 17025 - DNA, 15 bp, Homo sapiens
atttccattgaggga

SEQ ID NO: 17026 - DNA, 15 bp, Homo sapiens
tttccattgagggaa

SEQ ID NO: 17027 - DNA, 15 bp, Homo sapiens
ttccattgagggaaa

SEQ ID NO: 17028 - DNA, 15 bp, Homo sapiens
tccattgagggaaac

SEQ ID NO: 17029 - DNA, 15 bp, Homo sapiens
ccattgagggaaact

SEQ ID NO: 17030 - DNA, 15 bp, Homo sapiens
cattgagggaaactg

SEQ ID NO: 17031 - DNA, 15 bp, Homo sapiens
attgagggaaactga

SEQ ID NO: 17032 - DNA, 15 bp, Homo sapiens
ttgagggaaactgaa

SEQ ID NO: 17033 - DNA, 15 bp, Homo sapiens
tgagggaaactgaag

SEQ ID NO: 17034 - DNA, 15 bp, Homo sapiens
gagggaaactgaagc

SEQ ID NO: 17035 - DNA, 15 bp, Homo sapiens
agggaaactgaagct

SEQ ID NO: 17036 - DNA, 15 bp, Homo sapiens
gggaaactgaagctc

SEQ ID NO: 17037 - DNA, 15 bp, Homo sapiens
ggaaactgaagctct

SEQ ID NO: 17038 - DNA, 15 bp, Homo sapiens
gaaactgaagctctg

SEQ ID NO: 17039 - DNA, 15 bp, Homo sapiens
aaactgaagctctga

SEQ ID NO: 17040 - DNA, 15 bp, Homo sapiens
aactgaagctctgaa

SEQ ID NO: 17041 - DNA, 15 bp, Homo sapiens
actgaagctctgaaa

SEQ ID NO: 17042 - DNA, 15 bp, Homo sapiens
ctgaagctctgaaag

SEQ ID NO: 17043 - DNA, 15 bp, Homo sapiens
tgaagctctgaaagg

SEQ ID NO: 17044 - DNA, 15 bp, Homo sapiens
gaagctctgaaagga

SEQ ID NO: 17045 - DNA, 15 bp, Homo sapiens
aagctctgaaaggaa

SEQ ID NO: 17046 - DNA, 15 bp, Homo sapiens
agctctgaaaggaaa

SEQ ID NO: 17047 - DNA, 15 bp, Homo sapiens
gctctgaaaggaaag

SEQ ID NO: 17048 - DNA, 15 bp, Homo sapiens
ctctgaaaggaaagc

SEQ ID NO: 17049 - DNA, 15 bp, Homo sapiens
tctgaaaggaaagca

SEQ ID NO: 17050 - DNA, 15 bp, Homo sapiens
ctgaaaggaaagcaa

SEQ ID NO: 17051 - DNA, 15 bp, Homo sapiens
tgaaaggaaagcaac

SEQ ID NO: 17052 - DNA, 15 bp, Homo sapiens
gaaaggaaagcaact

SEQ ID NO: 17053 - DNA, 15 bp, Homo sapiens
aaaggaaagcaactt

SEQ ID NO: 17054 - DNA, 15 bp, Homo sapiens
aaggaaagcaacttg

SEQ ID NO: 17055 - DNA, 15 bp, Homo sapiens
aggaaagcaacttgc

SEQ ID NO: 17056 - DNA, 15 bp, Homo sapiens
ggaaagcaacttgcc

SEQ ID NO: 17057 - DNA, 15 bp, Homo sapiens
gaaagcaacttgccc

SEQ ID NO: 17058 - DNA, 15 bp, Homo sapiens
aaagcaacttgccca

SEQ ID NO: 17059 - DNA, 15 bp, Homo sapiens
aagcaacttgcccag

SEQ ID NO: 17060 - DNA, 15 bp, Homo sapiens
agcaacttgcccagt

SEQ ID NO: 17061 - DNA, 15 bp, Homo sapiens
gcaacttgcccagtg

SEQ ID NO: 17062 - DNA, 15 bp, Homo sapiens
caacttgcccagtgt

SEQ ID NO: 17063 - DNA, 15 bp, Homo sapiens
aacttgcccagtgtt

SEQ ID NO: 17064 - DNA, 15 bp, Homo sapiens
acttgcccagtgttg

SEQ ID NO: 17065 - DNA, 15 bp, Homo sapiens
cttgcccagtgttgc

SEQ ID NO: 17066 - DNA, 15 bp, Homo sapiens
ttgcccagtgttgcc

SEQ ID NO: 17067 - DNA, 15 bp, Homo sapiens
tgcccagtgttgccc

SEQ ID NO: 17068 - DNA, 15 bp, Homo sapiens
gcccagtgttgccct

SEQ ID NO: 17069 - DNA, 15 bp, Homo sapiens
cccagtgttgccctg

SEQ ID NO: 17070 - DNA, 15 bp, Homo sapiens
ccagtgttgccctgc

SEQ ID NO: 17071 - DNA, 15 bp, Homo sapiens
cagtgttgccctgct

SEQ ID NO: 17072 - DNA, 15 bp, Homo sapiens
agtgttgccctgctg

SEQ ID NO: 17073 - DNA, 15 bp, Homo sapiens
gtgttgccctgctgg

SEQ ID NO: 17074 - DNA, 15 bp, Homo sapiens
tgttgccctgctggt

SEQ ID NO: 17075 - DNA, 15 bp, Homo sapiens
gttgccctgctggta

SEQ ID NO: 17076 - DNA, 15 bp, Homo sapiens
ttgccctgctggtaa

SEQ ID NO: 17077 - DNA, 15 bp, Homo sapiens
tgccctgctggtaaa

SEQ ID NO: 17078 - DNA, 15 bp, Homo sapiens
gccctgctggtaaaa

SEQ ID NO: 17079 - DNA, 15 bp, Homo sapiens
ccctgctggtaaaat

SEQ ID NO: 17080 - DNA, 15 bp, Homo sapiens
cctgctggtaaaatg

SEQ ID NO: 17081 - DNA, 15 bp, Homo sapiens
ctgctggtaaaatgc

SEQ ID NO: 17082 - DNA, 15 bp, Homo sapiens
tgctggtaaaatgca

SEQ ID NO: 17083 - DNA, 15 bp, Homo sapiens
gctggtaaaatgcat

SEQ ID NO: 17084 - DNA, 15 bp, Homo sapiens
ctggtaaaatgcatc

SEQ ID NO: 17085 - DNA, 15 bp, Homo sapiens
tggtaaaatgcatca

SEQ ID NO: 17086 - DNA, 15 bp, Homo sapiens
ggtaaaatgcatcac

SEQ ID NO: 17087 - DNA, 15 bp, Homo sapiens
gtaaaatgcatcacc

SEQ ID NO: 17088 - DNA, 15 bp, Homo sapiens
taaaatgcatcaccc

SEQ ID NO: 17089 - DNA, 15 bp, Homo sapiens
aaaatgcatcaccca

SEQ ID NO: 17090 - DNA, 15 bp, Homo sapiens
aaatgcatcacccag

SEQ ID NO: 17091 - DNA, 15 bp, Homo sapiens
aatgcatcacccagc

SEQ ID NO: 17092 - DNA, 15 bp, Homo sapiens
atgcatcacccagcc

SEQ ID NO: 17093 - DNA, 15 bp, Homo sapiens
tgcatcacccagcct

SEQ ID NO: 17094 - DNA, 15 bp, Homo sapiens
gcatcacccagcctg

SEQ ID NO: 17095 - DNA, 15 bp, Homo sapiens
catcacccagcctgg

SEQ ID NO: 17096 - DNA, 15 bp, Homo sapiens
atcacccagcctggt

SEQ ID NO: 17097 - DNA, 15 bp, Homo sapiens
tcacccagcctggta

SEQ ID NO: 17098 - DNA, 15 bp, Homo sapiens
cacccagcctggtac

SEQ ID NO: 17099 - DNA, 15 bp, Homo sapiens
acccagcctggtaca

SEQ ID NO: 17100 - DNA, 15 bp, Homo sapiens
cccagcctggtacag

SEQ ID NO: 17101 - DNA, 15 bp, Homo sapiens
ccagcctggtacagt

SEQ ID NO: 17102 - DNA, 15 bp, Homo sapiens
cagcctggtacagta

SEQ ID NO: 17103 - DNA, 15 bp, Homo sapiens
agcctggtacagtag

SEQ ID NO: 17104 - DNA, 15 bp, Homo sapiens
gcctggtacagtagc

SEQ ID NO: 17105 - DNA, 15 bp, Homo sapiens
cctggtacagtagct

SEQ ID NO: 17106 - DNA, 15 bp, Homo sapiens
ctggtacagtagcta

SEQ ID NO: 17107 - DNA, 15 bp, Homo sapiens
tggtacagtagctaa

SEQ ID NO: 17108 - DNA, 15 bp, Homo sapiens
ggtacagtagctaag

SEQ ID NO: 17109 - DNA, 15 bp, Homo sapiens
gtacagtagctaaga

SEQ ID NO: 17110 - DNA, 15 bp, Homo sapiens
tacagtagctaagag

SEQ ID NO: 17111 - DNA, 15 bp, Homo sapiens
acagtagctaagagc

SEQ ID NO: 17112 - DNA, 15 bp, Homo sapiens
cagtagctaagagct

SEQ ID NO: 17113 - DNA, 15 bp, Homo sapiens
agtagctaagagctg

SEQ ID NO: 17114 - DNA, 15 bp, Homo sapiens
gtagctaagagctgg

SEQ ID NO: 17115 - DNA, 15 bp, Homo sapiens
tagctaagagctgga

SEQ ID NO: 17116 - DNA, 15 bp, Homo sapiens
agctaagagctggag

SEQ ID NO: 17117 - DNA, 15 bp, Homo sapiens
gctaagagctggagc

SEQ ID NO: 17118 - DNA, 15 bp, Homo sapiens
ctaagagctggagca

SEQ ID NO: 17119 - DNA, 15 bp, Homo sapiens
taagagctggagcac

SEQ ID NO: 17120 - DNA, 15 bp, Homo sapiens
aagagctggagcact

SEQ ID NO: 17121 - DNA, 15 bp, Homo sapiens
agagctggagcacta

SEQ ID NO: 17122 - DNA, 15 bp, Homo sapiens
gagctggagcactag

SEQ ID NO: 17123 - DNA, 15 bp, Homo sapiens
agctggagcactaga

SEQ ID NO: 17124 - DNA, 15 bp, Homo sapiens
gctggagcactagag

SEQ ID NO: 17125 - DNA, 15 bp, Homo sapiens
ctggagcactagagc

SEQ ID NO: 17126 - DNA, 15 bp, Homo sapiens
tggagcactagagca

SEQ ID NO: 17127 - DNA, 15 bp, Homo sapiens
ggagcactagagcag

SEQ ID NO: 17128 - DNA, 15 bp, Homo sapiens
gagcactagagcagg

SEQ ID NO: 17129 - DNA, 15 bp, Homo sapiens
agcactagagcagga

SEQ ID NO: 17130 - DNA, 15 bp, Homo sapiens
gcactagagcaggac

SEQ ID NO: 17131 - DNA, 15 bp, Homo sapiens
cactagagcaggacc

SEQ ID NO: 17132 - DNA, 15 bp, Homo sapiens
actagagcaggacca

SEQ ID NO: 17133 - DNA, 15 bp, Homo sapiens
ctagagcaggaccac

SEQ ID NO: 17134 - DNA, 15 bp, Homo sapiens
tagagcaggaccaca

SEQ ID NO: 17135 - DNA, 15 bp, Homo sapiens
agagcaggaccacac

SEQ ID NO: 17136 - DNA, 15 bp, Homo sapiens
gagcaggaccacaca

SEQ ID NO: 17137 - DNA, 15 bp, Homo sapiens
agcaggaccacacag

SEQ ID NO: 17138 - DNA, 15 bp, Homo sapiens
gcaggaccacacagg

SEQ ID NO: 17139 - DNA, 15 bp, Homo sapiens
caggaccacacaggc

SEQ ID NO: 17140 - DNA, 15 bp, Homo sapiens
aggaccacacaggct

SEQ ID NO: 17141 - DNA, 15 bp, Homo sapiens
ggaccacacaggctc

SEQ ID NO: 17142 - DNA, 15 bp, Homo sapiens
gaccacacaggctca

SEQ ID NO: 17143 - DNA, 15 bp, Homo sapiens
accacacaggctcag

SEQ ID NO: 17144 - DNA, 15 bp, Homo sapiens
ccacacaggctcaga

SEQ ID NO: 17145 - DNA, 15 bp, Homo sapiens
cacacaggctcagat

SEQ ID NO: 17146 - DNA, 15 bp, Homo sapiens
acacaggctcagatc

SEQ ID NO: 17147 - DNA, 15 bp, Homo sapiens
cacaggctcagatcc

SEQ ID NO: 17148 - DNA, 15 bp, Homo sapiens
acaggctcagatccc

SEQ ID NO: 17149 - DNA, 15 bp, Homo sapiens
caggctcagatccca

SEQ ID NO: 17150 - DNA, 15 bp, Homo sapiens
aggctcagatcccag

SEQ ID NO: 17151 - DNA, 15 bp, Homo sapiens
ggctcagatcccagc

SEQ ID NO: 17152 - DNA, 15 bp, Homo sapiens
gctcagatcccagct

SEQ ID NO: 17153 - DNA, 15 bp, Homo sapiens
ctcagatcccagctc

SEQ ID NO: 17154 - DNA, 15 bp, Homo sapiens
tcagatcccagctct

SEQ ID NO: 17155 - DNA, 15 bp, Homo sapiens
cagatcccagctctg

SEQ ID NO: 17156 - DNA, 15 bp, Homo sapiens
agatcccagctctgc

SEQ ID NO: 17157 - DNA, 15 bp, Homo sapiens
gatcccagctctgcc

SEQ ID NO: 17158 - DNA, 15 bp, Homo sapiens
atcccagctctgcca

SEQ ID NO: 17159 - DNA, 15 bp, Homo sapiens
tcccagctctgccac

SEQ ID NO: 17160 - DNA, 15 bp, Homo sapiens
cccagctctgccact

SEQ ID NO: 17161 - DNA, 15 bp, Homo sapiens
ccagctctgccactt

SEQ ID NO: 17162 - DNA, 15 bp, Homo sapiens
cagctctgccacttt

SEQ ID NO: 17163 - DNA, 15 bp, Homo sapiens
agctctgccactttc

SEQ ID NO: 17164 - DNA, 15 bp, Homo sapiens
gctctgccactttct

SEQ ID NO: 17165 - DNA, 15 bp, Homo sapiens
ctctgccactttctt

SEQ ID NO: 17166 - DNA, 15 bp, Homo sapiens
tctgccactttctta

SEQ ID NO: 17167 - DNA, 15 bp, Homo sapiens
ctgccactttcttag

SEQ ID NO: 17168 - DNA, 15 bp, Homo sapiens
tgccactttcttagc

SEQ ID NO: 17169 - DNA, 15 bp, Homo sapiens
gccactttcttagca

SEQ ID NO: 17170 - DNA, 15 bp, Homo sapiens
ccactttcttagcac

SEQ ID NO: 17171 - DNA, 15 bp, Homo sapiens
cactttcttagcacg

SEQ ID NO: 17172 - DNA, 15 bp, Homo sapiens
actttcttagcacgt

SEQ ID NO: 17173 - DNA, 15 bp, Homo sapiens
ctttcttagcacgtg

SEQ ID NO: 17174 - DNA, 15 bp, Homo sapiens
tttcttagcacgtgg

SEQ ID NO: 17175 - DNA, 15 bp, Homo sapiens
ttcttagcacgtggc

SEQ ID NO: 17176 - DNA, 15 bp, Homo sapiens
tcttagcacgtggcc

SEQ ID NO: 17177 - DNA, 15 bp, Homo sapiens
cttagcacgtggcct

SEQ ID NO: 17178 - DNA, 15 bp, Homo sapiens
ttagcacgtggcctc

SEQ ID NO: 17179 - DNA, 15 bp, Homo sapiens
tagcacgtggcctca

SEQ ID NO: 17180 - DNA, 15 bp, Homo sapiens
agcacgtggcctcag

SEQ ID NO: 17181 - DNA, 15 bp, Homo sapiens
gcacgtggcctcagg

SEQ ID NO: 17182 - DNA, 15 bp, Homo sapiens
cacgtggcctcaggc

SEQ ID NO: 17183 - DNA, 15 bp, Homo sapiens
acgtggcctcaggcc

SEQ ID NO: 17184 - DNA, 15 bp, Homo sapiens
cgtggcctcaggccc

SEQ ID NO: 17185 - DNA, 15 bp, Homo sapiens
gtggcctcaggccca

SEQ ID NO: 17186 - DNA, 15 bp, Homo sapiens
tggcctcaggcccat

SEQ ID NO: 17187 - DNA, 15 bp, Homo sapiens
ggcctcaggcccatg

SEQ ID NO: 17188 - DNA, 15 bp, Homo sapiens
gcctcaggcccatgt

SEQ ID NO: 17189 - DNA, 15 bp, Homo sapiens
cctcaggcccatgtc

SEQ ID NO: 17190 - DNA, 15 bp, Homo sapiens
ctcaggcccatgtcc

SEQ ID NO: 17191 - DNA, 15 bp, Homo sapiens
tcaggcccatgtcct

SEQ ID NO: 17192 - DNA, 15 bp, Homo sapiens
caggcccatgtcctt

SEQ ID NO: 17193 - DNA, 15 bp, Homo sapiens
aggcccatgtcctta

SEQ ID NO: 17194 - DNA, 15 bp, Homo sapiens
ggcccatgtccttaa

SEQ ID NO: 17195 - DNA, 15 bp, Homo sapiens
gcccatgtccttaac

SEQ ID NO: 17196 - DNA, 15 bp, Homo sapiens
cccatgtccttaacc

SEQ ID NO: 17197 - DNA, 15 bp, Homo sapiens
ccatgtccttaacca

SEQ ID NO: 17198 - DNA, 15 bp, Homo sapiens
catgtccttaaccat

SEQ ID NO: 17199 - DNA, 15 bp, Homo sapiens
atgtccttaaccata

SEQ ID NO: 17200 - DNA, 15 bp, Homo sapiens
tgtccttaaccataa

SEQ ID NO: 17201 - DNA, 15 bp, Homo sapiens
gtccttaaccataat

SEQ ID NO: 17202 - DNA, 15 bp, Homo sapiens
tccttaaccataatg

SEQ ID NO: 17203 - DNA, 15 bp, Homo sapiens
ccttaaccataatgc

SEQ ID NO: 17204 - DNA, 15 bp, Homo sapiens
cttaaccataatgcc

SEQ ID NO: 17205 - DNA, 15 bp, Homo sapiens
ttaaccataatgccc

SEQ ID NO: 17206 - DNA, 15 bp, Homo sapiens
taaccataatgccct

SEQ ID NO: 17207 - DNA, 15 bp, Homo sapiens
aaccataatgcccta

SEQ ID NO: 17208 - DNA, 15 bp, Homo sapiens
accataatgccctac

SEQ ID NO: 17209 - DNA, 15 bp, Homo sapiens
ccataatgccctacc

SEQ ID NO: 17210 - DNA, 15 bp, Homo sapiens
cataatgccctacca

SEQ ID NO: 17211 - DNA, 15 bp, Homo sapiens
ataatgccctaccaa

SEQ ID NO: 17212 - DNA, 15 bp, Homo sapiens
taatgccctaccaag

SEQ ID NO: 17213 - DNA, 15 bp, Homo sapiens
aatgccctaccaagt

SEQ ID NO: 17214 - DNA, 15 bp, Homo sapiens
atgccctaccaagtt

SEQ ID NO: 17215 - DNA, 15 bp, Homo sapiens
tgccctaccaagttt

SEQ ID NO: 17216 - DNA, 15 bp, Homo sapiens
gccctaccaagtttt

SEQ ID NO: 17217 - DNA, 15 bp, Homo sapiens
ccctaccaagttttc

SEQ ID NO: 17218 - DNA, 15 bp, Homo sapiens
cctaccaagttttct

SEQ ID NO: 17219 - DNA, 15 bp, Homo sapiens
ctaccaagttttctg

SEQ ID NO: 17220 - DNA, 15 bp, Homo sapiens
taccaagttttctgt

SEQ ID NO: 17221 - DNA, 15 bp, Homo sapiens
accaagttttctgtg

SEQ ID NO: 17222 - DNA, 15 bp, Homo sapiens
ccaagttttctgtgg

SEQ ID NO: 17223 - DNA, 15 bp, Homo sapiens
caagttttctgtggc

SEQ ID NO: 17224 - DNA, 15 bp, Homo sapiens
aagttttctgtggca

SEQ ID NO: 17225 - DNA, 15 bp, Homo sapiens
agttttctgtggcat

SEQ ID NO: 17226 - DNA, 15 bp, Homo sapiens
gttttctgtggcata

SEQ ID NO: 17227 - DNA, 15 bp, Homo sapiens
ttttctgtggcataa

SEQ ID NO: 17228 - DNA, 15 bp, Homo sapiens
tttctgtggcataaa

SEQ ID NO: 17229 - DNA, 15 bp, Homo sapiens
ttctgtggcataaaa

SEQ ID NO: 17230 - DNA, 15 bp, Homo sapiens
tctgtggcataaaag

SEQ ID NO: 17231 - DNA, 15 bp, Homo sapiens
ctgtggcataaaaga

SEQ ID NO: 17232 - DNA, 15 bp, Homo sapiens
tgtggcataaaagag

SEQ ID NO: 17233 - DNA, 15 bp, Homo sapiens
gtggcataaaagagg

SEQ ID NO: 17234 - DNA, 15 bp, Homo sapiens
tggcataaaagagga

SEQ ID NO: 17235 - DNA, 15 bp, Homo sapiens
ggcataaaagaggat

SEQ ID NO: 17236 - DNA, 15 bp, Homo sapiens
gcataaaagaggatc

SEQ ID NO: 17237 - DNA, 15 bp, Homo sapiens
cataaaagaggatca

SEQ ID NO: 17238 - DNA, 15 bp, Homo sapiens
ataaaagaggatcac

SEQ ID NO: 17239 - DNA, 15 bp, Homo sapiens
taaaagaggatcacg

SEQ ID NO: 17240 - DNA, 15 bp, Homo sapiens
aaaagaggatcacgt

SEQ ID NO: 17241 - DNA, 15 bp, Homo sapiens
aaagaggatcacgtt

SEQ ID NO: 17242 - DNA, 15 bp, Homo sapiens
aagaggatcacgttc

SEQ ID NO: 17243 - DNA, 15 bp, Homo sapiens
agaggatcacgttca

SEQ ID NO: 17244 - DNA, 15 bp, Homo sapiens
gaggatcacgttcac

SEQ ID NO: 17245 - DNA, 15 bp, Homo sapiens
aggatcacgttcaca

SEQ ID NO: 17246 - DNA, 15 bp, Homo sapiens
ggatcacgttcacat

SEQ ID NO: 17247 - DNA, 15 bp, Homo sapiens
gatcacgttcacatt

SEQ ID NO: 17248 - DNA, 15 bp, Homo sapiens
atcacgttcacatta

SEQ ID NO: 17249 - DNA, 15 bp, Homo sapiens
tcacgttcacattaa

SEQ ID NO: 17250 - DNA, 15 bp, Homo sapiens
cacgttcacattaat

SEQ ID NO: 17251 - DNA, 15 bp, Homo sapiens
acgttcacattaatt

SEQ ID NO: 17252 - DNA, 15 bp, Homo sapiens
cgttcacattaattc

SEQ ID NO: 17253 - DNA, 15 bp, Homo sapiens
gttcacattaattcc

SEQ ID NO: 17254 - DNA, 15 bp, Homo sapiens
ttcacattaattcct

SEQ ID NO: 17255 - DNA, 15 bp, Homo sapiens
tcacattaattcctc

SEQ ID NO: 17256 - DNA, 15 bp, Homo sapiens
cacattaattcctca

SEQ ID NO: 17257 - DNA, 15 bp, Homo sapiens
acattaattcctcac

SEQ ID NO: 17258 - DNA, 15 bp, Homo sapiens
cattaattcctcact

SEQ ID NO: 17259 - DNA, 15 bp, Homo sapiens
attaattcctcactc

SEQ ID NO: 17260 - DNA, 15 bp, Homo sapiens
ttaattcctcactct

SEQ ID NO: 17261 - DNA, 15 bp, Homo sapiens
taattcctcactcta

SEQ ID NO: 17262 - DNA, 15 bp, Homo sapiens
aattcctcactctac

SEQ ID NO: 17263 - DNA, 15 bp, Homo sapiens
attcctcactctaca

SEQ ID NO: 17264 - DNA, 15 bp, Homo sapiens
ttcctcactctacag

SEQ ID NO: 17265 - DNA, 15 bp, Homo sapiens
tcctcactctacaga

SEQ ID NO: 17266 - DNA, 15 bp, Homo sapiens
cctcactctacagaa

SEQ ID NO: 17267 - DNA, 15 bp, Homo sapiens
ctcactctacagaaa

SEQ ID NO: 17268 - DNA, 15 bp, Homo sapiens
tcactctacagaaaa

SEQ ID NO: 17269 - DNA, 15 bp, Homo sapiens
cactctacagaaaac

SEQ ID NO: 17270 - DNA, 15 bp, Homo sapiens
actctacagaaaact

SEQ ID NO: 17271 - DNA, 15 bp, Homo sapiens
ctctacagaaaacta

SEQ ID NO: 17272 - DNA, 15 bp, Homo sapiens
tctacagaaaactaa

SEQ ID NO: 17273 - DNA, 15 bp, Homo sapiens
ctacagaaaactaag

SEQ ID NO: 17274 - DNA, 15 bp, Homo sapiens
tacagaaaactaaga

SEQ ID NO: 17275 - DNA, 15 bp, Homo sapiens
acagaaaactaagat

SEQ ID NO: 17276 - DNA, 15 bp, Homo sapiens
cagaaaactaagatg

SEQ ID NO: 17277 - DNA, 15 bp, Homo sapiens
agaaaactaagatgc

SEQ ID NO: 17278 - DNA, 15 bp, Homo sapiens
gaaaactaagatgcc

SEQ ID NO: 17279 - DNA, 15 bp, Homo sapiens
aaaactaagatgccc

SEQ ID NO: 17280 - DNA, 15 bp, Homo sapiens
aaactaagatgcccc

SEQ ID NO: 17281 - DNA, 15 bp, Homo sapiens
aactaagatgcccct

SEQ ID NO: 17282 - DNA, 15 bp, Homo sapiens
actaagatgcccctg

SEQ ID NO: 17283 - DNA, 15 bp, Homo sapiens
ctaagatgcccctga

SEQ ID NO: 17284 - DNA, 15 bp, Homo sapiens
taagatgcccctgac

SEQ ID NO: 17285 - DNA, 15 bp, Homo sapiens
aagatgcccctgact

SEQ ID NO: 17286 - DNA, 15 bp, Homo sapiens
agatgcccctgactt

SEQ ID NO: 17287 - DNA, 15 bp, Homo sapiens
gatgcccctgacttg

SEQ ID NO: 17288 - DNA, 15 bp, Homo sapiens
atgcccctgacttgt

SEQ ID NO: 17289 - DNA, 15 bp, Homo sapiens
tgcccctgacttgtc

SEQ ID NO: 17290 - DNA, 15 bp, Homo sapiens
gcccctgacttgtcc

SEQ ID NO: 17291 - DNA, 15 bp, Homo sapiens
cccctgacttgtccc

SEQ ID NO: 17292 - DNA, 15 bp, Homo sapiens
ccctgacttgtcccg

SEQ ID NO: 17293 - DNA, 15 bp, Homo sapiens
cctgacttgtcccgt

SEQ ID NO: 17294 - DNA, 15 bp, Homo sapiens
ctgacttgtcccgtt

SEQ ID NO: 17295 - DNA, 15 bp, Homo sapiens
tgacttgtcccgttc

SEQ ID NO: 17296 - DNA, 15 bp, Homo sapiens
gacttgtcccgttca

SEQ ID NO: 17297 - DNA, 15 bp, Homo sapiens
acttgtcccgttcaa

SEQ ID NO: 17298 - DNA, 15 bp, Homo sapiens
cttgtcccgttcaac

SEQ ID NO: 17299 - DNA, 15 bp, Homo sapiens
ttgtcccgttcaact

SEQ ID NO: 17300 - DNA, 15 bp, Homo sapiens
tgtcccgttcaactc

SEQ ID NO: 17301 - DNA, 15 bp, Homo sapiens
gtcccgttcaactcc

SEQ ID NO: 17302 - DNA, 15 bp, Homo sapiens
tcccgttcaactcca

SEQ ID NO: 17303 - DNA, 15 bp, Homo sapiens
cccgttcaactccag

SEQ ID NO: 17304 - DNA, 15 bp, Homo sapiens
ccgttcaactccagt

SEQ ID NO: 17305 - DNA, 15 bp, Homo sapiens
cgttcaactccagtt

SEQ ID NO: 17306 - DNA, 15 bp, Homo sapiens
gttcaactccagtta

SEQ ID NO: 17307 - DNA, 15 bp, Homo sapiens
ttcaactccagttat

SEQ ID NO: 17308 - DNA, 15 bp, Homo sapiens
tcaactccagttatt

SEQ ID NO: 17309 - DNA, 15 bp, Homo sapiens
caactccagttattc

SEQ ID NO: 17310 - DNA, 15 bp, Homo sapiens
aactccagttattct

SEQ ID NO: 17311 - DNA, 15 bp, Homo sapiens
actccagttattctg

SEQ ID NO: 17312 - DNA, 15 bp, Homo sapiens
ctccagttattctgg

SEQ ID NO: 17313 - DNA, 15 bp, Homo sapiens
tccagttattctggt

SEQ ID NO: 17314 - DNA, 15 bp, Homo sapiens
ccagttattctggtt

SEQ ID NO: 17315 - DNA, 15 bp, Homo sapiens
cagttattctggttt

SEQ ID NO: 17316 - DNA, 15 bp, Homo sapiens
agttattctggtttc

SEQ ID NO: 17317 - DNA, 15 bp, Homo sapiens
gttattctggtttcc

SEQ ID NO: 17318 - DNA, 15 bp, Homo sapiens
ttattctggtttccc

SEQ ID NO: 17319 - DNA, 15 bp, Homo sapiens
tattctggtttcccc

SEQ ID NO: 17320 - DNA, 15 bp, Homo sapiens
attctggtttcccct

SEQ ID NO: 17321 - DNA, 15 bp, Homo sapiens
ttctggtttcccctg

SEQ ID NO: 17322 - DNA, 15 bp, Homo sapiens
tctggtttcccctga

SEQ ID NO: 17323 - DNA, 15 bp, Homo sapiens
ctggtttcccctgag

SEQ ID NO: 17324 - DNA, 15 bp, Homo sapiens
tggtttcccctgagg

SEQ ID NO: 17325 - DNA, 15 bp, Homo sapiens
ggtttcccctgaggc

SEQ ID NO: 17326 - DNA, 15 bp, Homo sapiens
gtttcccctgaggct

SEQ ID NO: 17327 - DNA, 15 bp, Homo sapiens
tttcccctgaggctg

SEQ ID NO: 17328 - DNA, 15 bp, Homo sapiens
ttcccctgaggctgc

SEQ ID NO: 17329 - DNA, 15 bp, Homo sapiens
tcccctgaggctgcc

SEQ ID NO: 17330 - DNA, 15 bp, Homo sapiens
cccctgaggctgcca

SEQ ID NO: 17331 - DNA, 15 bp, Homo sapiens
ccctgaggctgccaa

SEQ ID NO: 17332 - DNA, 15 bp, Homo sapiens
cctgaggctgccaac

SEQ ID NO: 17333 - DNA, 15 bp, Homo sapiens
ctgaggctgccaact

SEQ ID NO: 17334 - DNA, 15 bp, Homo sapiens
tgaggctgccaactc

SEQ ID NO: 17335 - DNA, 15 bp, Homo sapiens
gaggctgccaactca

SEQ ID NO: 17336 - DNA, 15 bp, Homo sapiens
aggctgccaactcag

SEQ ID NO: 17337 - DNA, 15 bp, Homo sapiens
ggctgccaactcaga

SEQ ID NO: 17338 - DNA, 15 bp, Homo sapiens
gctgccaactcagat

SEQ ID NO: 17339 - DNA, 15 bp, Homo sapiens
ctgccaactcagata

SEQ ID NO: 17340 - DNA, 15 bp, Homo sapiens
tgccaactcagatag

SEQ ID NO: 17341 - DNA, 15 bp, Homo sapiens
gccaactcagatagc

SEQ ID NO: 17342 - DNA, 15 bp, Homo sapiens
ccaactcagatagca

SEQ ID NO: 17343 - DNA, 15 bp, Homo sapiens
caactcagatagcag

SEQ ID NO: 17344 - DNA, 15 bp, Homo sapiens
aactcagatagcagg

SEQ ID NO: 17345 - DNA, 15 bp, Homo sapiens
actcagatagcaggt

SEQ ID NO: 17346 - DNA, 15 bp, Homo sapiens
ctcagatagcaggtt

SEQ ID NO: 17347 - DNA, 15 bp, Homo sapiens
tcagatagcaggttg

SEQ ID NO: 17348 - DNA, 15 bp, Homo sapiens
cagatagcaggttgg

SEQ ID NO: 17349 - DNA, 15 bp, Homo sapiens
agatagcaggttgga

SEQ ID NO: 17350 - DNA, 15 bp, Homo sapiens
gatagcaggttggat

SEQ ID NO: 17351 - DNA, 15 bp, Homo sapiens
atagcaggttggatc

SEQ ID NO: 17352 - DNA, 15 bp, Homo sapiens
tagcaggttggatcc

SEQ ID NO: 17353 - DNA, 15 bp, Homo sapiens
agcaggttggatccc

SEQ ID NO: 17354 - DNA, 15 bp, Homo sapiens
gcaggttggatcccc

SEQ ID NO: 17355 - DNA, 15 bp, Homo sapiens
caggttggatcccca

SEQ ID NO: 17356 - DNA, 15 bp, Homo sapiens
aggttggatccccat

SEQ ID NO: 17357 - DNA, 15 bp, Homo sapiens
ggttggatccccatc

SEQ ID NO: 17358 - DNA, 15 bp, Homo sapiens
gttggatccccatcc

SEQ ID NO: 17359 - DNA, 15 bp, Homo sapiens
ttggatccccatccc

SEQ ID NO: 17360 - DNA, 15 bp, Homo sapiens
tggatccccatccct

SEQ ID NO: 17361 - DNA, 15 bp, Homo sapiens
ggatccccatccctt

SEQ ID NO: 17362 - DNA, 15 bp, Homo sapiens
gatccccatcccttc

SEQ ID NO: 17363 - DNA, 15 bp, Homo sapiens
atccccatcccttca

SEQ ID NO: 17364 - DNA, 15 bp, Homo sapiens
tccccatcccttcag

SEQ ID NO: 17365 - DNA, 15 bp, Homo sapiens
ccccatcccttcagt

SEQ ID NO: 17366 - DNA, 15 bp, Homo sapiens
cccatcccttcagtt

SEQ ID NO: 17367 - DNA, 15 bp, Homo sapiens
ccatcccttcagtta

SEQ ID NO: 17368 - DNA, 15 bp, Homo sapiens
catcccttcagttat

SEQ ID NO: 17369 - DNA, 15 bp, Homo sapiens
atcccttcagttata

SEQ ID NO: 17370 - DNA, 15 bp, Homo sapiens
tcccttcagttatag

SEQ ID NO: 17371 - DNA, 15 bp, Homo sapiens
cccttcagttatagg

SEQ ID NO: 17372 - DNA, 15 bp, Homo sapiens
ccttcagttataggt

SEQ ID NO: 17373 - DNA, 15 bp, Homo sapiens
cttcagttataggtg

SEQ ID NO: 17374 - DNA, 15 bp, Homo sapiens
ttcagttataggtgc

SEQ ID NO: 17375 - DNA, 15 bp, Homo sapiens
tcagttataggtgca

SEQ ID NO: 17376 - DNA, 15 bp, Homo sapiens
cagttataggtgcac

SEQ ID NO: 17377 - DNA, 15 bp, Homo sapiens
agttataggtgcact

SEQ ID NO: 17378 - DNA, 15 bp, Homo sapiens
gttataggtgcactg

SEQ ID NO: 17379 - DNA, 15 bp, Homo sapiens
ttataggtgcactga

SEQ ID NO: 17380 - DNA, 15 bp, Homo sapiens
tataggtgcactgaa

SEQ ID NO: 17381 - DNA, 15 bp, Homo sapiens
ataggtgcactgaaa

SEQ ID NO: 17382 - DNA, 15 bp, Homo sapiens
taggtgcactgaaag

SEQ ID NO: 17383 - DNA, 15 bp, Homo sapiens
aggtgcactgaaaga

SEQ ID NO: 17384 - DNA, 15 bp, Homo sapiens
ggtgcactgaaagac

SEQ ID NO: 17385 - DNA, 15 bp, Homo sapiens
gtgcactgaaagaca

SEQ ID NO: 17386 - DNA, 15 bp, Homo sapiens
tgcactgaaagacag

SEQ ID NO: 17387 - DNA, 15 bp, Homo sapiens
gcactgaaagacagt

SEQ ID NO: 17388 - DNA, 15 bp, Homo sapiens
cactgaaagacagtg

SEQ ID NO: 17389 - DNA, 15 bp, Homo sapiens
actgaaagacagtgg

SEQ ID NO: 17390 - DNA, 15 bp, Homo sapiens
ctgaaagacagtggg

SEQ ID NO: 17391 - DNA, 15 bp, Homo sapiens
tgaaagacagtgggc

SEQ ID NO: 17392 - DNA, 15 bp, Homo sapiens
gaaagacagtgggcc

SEQ ID NO: 17393 - DNA, 15 bp, Homo sapiens
aaagacagtgggcct

SEQ ID NO: 17394 - DNA, 15 bp, Homo sapiens
aagacagtgggcctt

SEQ ID NO: 17395 - DNA, 15 bp, Homo sapiens
agacagtgggccttc

SEQ ID NO: 17396 - DNA, 15 bp, Homo sapiens
gacagtgggccttcc

SEQ ID NO: 17397 - DNA, 15 bp, Homo sapiens
acagtgggccttcct

SEQ ID NO: 17398 - DNA, 15 bp, Homo sapiens
cagtgggccttcctg

SEQ ID NO: 17399 - DNA, 15 bp, Homo sapiens
agtgggccttcctgt

SEQ ID NO: 17400 - DNA, 15 bp, Homo sapiens
gtgggccttcctgtg

SEQ ID NO: 17401 - DNA, 15 bp, Homo sapiens
tgggccttcctgtgc

SEQ ID NO: 17402 - DNA, 15 bp, Homo sapiens
gggccttcctgtgca

SEQ ID NO: 17403 - DNA, 15 bp, Homo sapiens
ggccttcctgtgcat

SEQ ID NO: 17404 - DNA, 15 bp, Homo sapiens
gccttcctgtgcatc

SEQ ID NO: 17405 - DNA, 15 bp, Homo sapiens
ccttcctgtgcatca

SEQ ID NO: 17406 - DNA, 15 bp, Homo sapiens
cttcctgtgcatcag

SEQ ID NO: 17407 - DNA, 15 bp, Homo sapiens
ttcctgtgcatcagc

SEQ ID NO: 17408 - DNA, 15 bp, Homo sapiens
tcctgtgcatcagcc

SEQ ID NO: 17409 - DNA, 15 bp, Homo sapiens
cctgtgcatcagccc

SEQ ID NO: 17410 - DNA, 15 bp, Homo sapiens
ctgtgcatcagcccc

SEQ ID NO: 17411 - DNA, 15 bp, Homo sapiens
tgtgcatcagcccca

SEQ ID NO: 17412 - DNA, 15 bp, Homo sapiens
gtgcatcagccccag

SEQ ID NO: 17413 - DNA, 15 bp, Homo sapiens
tgcatcagccccagt

SEQ ID NO: 17414 - DNA, 15 bp, Homo sapiens
gcatcagccccagtg

SEQ ID NO: 17415 - DNA, 15 bp, Homo sapiens
catcagccccagtga

SEQ ID NO: 17416 - DNA, 15 bp, Homo sapiens
atcagccccagtgac

SEQ ID NO: 17417 - DNA, 15 bp, Homo sapiens
tcagccccagtgacg

SEQ ID NO: 17418 - DNA, 15 bp, Homo sapiens
cagccccagtgacgg

SEQ ID NO: 17419 - DNA, 15 bp, Homo sapiens
agccccagtgacgga

SEQ ID NO: 17420 - DNA, 15 bp, Homo sapiens
gccccagtgacggat

SEQ ID NO: 17421 - DNA, 15 bp, Homo sapiens
ccccagtgacggatc

SEQ ID NO: 17422 - DNA, 15 bp, Homo sapiens
cccagtgacggatcc

SEQ ID NO: 17423 - DNA, 15 bp, Homo sapiens
ccagtgacggatcct

SEQ ID NO: 17424 - DNA, 15 bp, Homo sapiens
cagtgacggatcctg

SEQ ID NO: 17425 - DNA, 15 bp, Homo sapiens
agtgacggatcctgg

SEQ ID NO: 17426 - DNA, 15 bp, Homo sapiens
gtgacggatcctgga

SEQ ID NO: 17427 - DNA, 15 bp, Homo sapiens
tgacggatcctggag

SEQ ID NO: 17428 - DNA, 15 bp, Homo sapiens
gacggatcctggaga

SEQ ID NO: 17429 - DNA, 15 bp, Homo sapiens
acggatcctggagac

SEQ ID NO: 17430 - DNA, 15 bp, Homo sapiens
cggatcctggagaca

SEQ ID NO: 17431 - DNA, 15 bp, Homo sapiens
ggatcctggagacac

SEQ ID NO: 17432 - DNA, 15 bp, Homo sapiens
gatcctggagacacc

SEQ ID NO: 17433 - DNA, 15 bp, Homo sapiens
atcctggagacacca

SEQ ID NO: 17434 - DNA, 15 bp, Homo sapiens
tcctggagacaccat

SEQ ID NO: 17435 - DNA, 15 bp, Homo sapiens
cctggagacaccatg

SEQ ID NO: 17436 - DNA, 15 bp, Homo sapiens
ctggagacaccatgg

SEQ ID NO: 17437 - DNA, 15 bp, Homo sapiens
tggagacaccatggt

SEQ ID NO: 17438 - DNA, 15 bp, Homo sapiens
ggagacaccatggtg

SEQ ID NO: 17439 - DNA, 15 bp, Homo sapiens
gagacaccatggtga

SEQ ID NO: 17440 - DNA, 15 bp, Homo sapiens
agacaccatggtgag

SEQ ID NO: 17441 - DNA, 15 bp, Homo sapiens
gacaccatggtgagc

SEQ ID NO: 17442 - DNA, 15 bp, Homo sapiens
acaccatggtgagca

SEQ ID NO: 17443 - DNA, 15 bp, Homo sapiens
caccatggtgagcaa

SEQ ID NO: 17444 - DNA, 15 bp, Homo sapiens
accatggtgagcaaa

SEQ ID NO: 17445 - DNA, 15 bp, Homo sapiens
ccatggtgagcaaac

SEQ ID NO: 17446 - DNA, 15 bp, Homo sapiens
catggtgagcaaacc

SEQ ID NO: 17447 - DNA, 15 bp, Homo sapiens
atggtgagcaaaccc

SEQ ID NO: 17448 - DNA, 15 bp, Homo sapiens
tggtgagcaaaccca

SEQ ID NO: 17449 - DNA, 15 bp, Homo sapiens
ggtgagcaaacccaa

SEQ ID NO: 17450 - DNA, 15 bp, Homo sapiens
gtgagcaaacccaac

SEQ ID NO: 17451 - DNA, 15 bp, Homo sapiens
tgagcaaacccaact

SEQ ID NO: 17452 - DNA, 15 bp, Homo sapiens
gagcaaacccaacta

SEQ ID NO: 17453 - DNA, 15 bp, Homo sapiens
agcaaacccaactag

SEQ ID NO: 17454 - DNA, 15 bp, Homo sapiens
gcaaacccaactagg

SEQ ID NO: 17455 - DNA, 15 bp, Homo sapiens
caaacccaactagga

SEQ ID NO: 17456 - DNA, 15 bp, Homo sapiens
aaacccaactaggaa

SEQ ID NO: 17457 - DNA, 15 bp, Homo sapiens
aacccaactaggaag

SEQ ID NO: 17458 - DNA, 15 bp, Homo sapiens
acccaactaggaagc

SEQ ID NO: 17459 - DNA, 15 bp, Homo sapiens
cccaactaggaagct

SEQ ID NO: 17460 - DNA, 15 bp, Homo sapiens
ccaactaggaagctt

SEQ ID NO: 17461 - DNA, 15 bp, Homo sapiens
caactaggaagctta

SEQ ID NO: 17462 - DNA, 15 bp, Homo sapiens
aactaggaagcttac

SEQ ID NO: 17463 - DNA, 15 bp, Homo sapiens
actaggaagcttaca

SEQ ID NO: 17464 - DNA, 15 bp, Homo sapiens
ctaggaagcttacaa

SEQ ID NO: 17465 - DNA, 15 bp, Homo sapiens
taggaagcttacaat

SEQ ID NO: 17466 - DNA, 15 bp, Homo sapiens
aggaagcttacaatt

SEQ ID NO: 17467 - DNA, 15 bp, Homo sapiens
ggaagcttacaattc

SEQ ID NO: 17468 - DNA, 15 bp, Homo sapiens
gaagcttacaattca

SEQ ID NO: 17469 - DNA, 15 bp, Homo sapiens
aagcttacaattcag

SEQ ID NO: 17470 - DNA, 15 bp, Homo sapiens
agcttacaattcagt

SEQ ID NO: 17471 - DNA, 15 bp, Homo sapiens
gcttacaattcagta

SEQ ID NO: 17472 - DNA, 15 bp, Homo sapiens
cttacaattcagtat

SEQ ID NO: 17473 - DNA, 15 bp, Homo sapiens
ttacaattcagtatg

SEQ ID NO: 17474 - DNA, 15 bp, Homo sapiens
tacaattcagtatgg

SEQ ID NO: 17475 - DNA, 15 bp, Homo sapiens
acaattcagtatgga

SEQ ID NO: 17476 - DNA, 15 bp, Homo sapiens
caattcagtatggag

SEQ ID NO: 17477 - DNA, 15 bp, Homo sapiens
aattcagtatggagg

SEQ ID NO: 17478 - DNA, 15 bp, Homo sapiens
attcagtatggagga

SEQ ID NO: 17479 - DNA, 15 bp, Homo sapiens
ttcagtatggaggaa

SEQ ID NO: 17480 - DNA, 15 bp, Homo sapiens
tcagtatggaggaag

SEQ ID NO: 17481 - DNA, 15 bp, Homo sapiens
cagtatggaggaaga

SEQ ID NO: 17482 - DNA, 15 bp, Homo sapiens
agtatggaggaagac

SEQ ID NO: 17483 - DNA, 15 bp, Homo sapiens
gtatggaggaagaca

SEQ ID NO: 17484 - DNA, 15 bp, Homo sapiens
tatggaggaagacat

SEQ ID NO: 17485 - DNA, 15 bp, Homo sapiens
atggaggaagacatt

SEQ ID NO: 17486 - DNA, 15 bp, Homo sapiens
tggaggaagacatta

SEQ ID NO: 17487 - DNA, 15 bp, Homo sapiens
ggaggaagacattaa

SEQ ID NO: 17488 - DNA, 15 bp, Homo sapiens
gaggaagacattaaa

SEQ ID NO: 17489 - DNA, 15 bp, Homo sapiens
aggaagacattaaaa

SEQ ID NO: 17490 - DNA, 15 bp, Homo sapiens
ggaagacattaaaaa

SEQ ID NO: 17491 - DNA, 15 bp, Homo sapiens
gaagacattaaaaaa

SEQ ID NO: 17492 - DNA, 15 bp, Homo sapiens
aagacattaaaaaaa

SEQ ID NO: 17493 - DNA, 15 bp, Homo sapiens
agacattaaaaaaat

SEQ ID NO: 17494 - DNA, 15 bp, Homo sapiens
gacattaaaaaaata

SEQ ID NO: 17495 - DNA, 15 bp, Homo sapiens
acattaaaaaaatac

SEQ ID NO: 17496 - DNA, 15 bp, Homo sapiens
cattaaaaaaatact

SEQ ID NO: 17497 - DNA, 15 bp, Homo sapiens
attaaaaaaatactc

SEQ ID NO: 17498 - DNA, 15 bp, Homo sapiens
ttaaaaaaatactca

SEQ ID NO: 17499 - DNA, 15 bp, Homo sapiens
taaaaaaatactcaa

SEQ ID NO: 17500 - DNA, 15 bp, Homo sapiens
aaaaaaatactcaaa

SEQ ID NO: 17501 - DNA, 15 bp, Homo sapiens
aaaaaatactcaaac

SEQ ID NO: 17502 - DNA, 15 bp, Homo sapiens
aaaaatactcaaact

SEQ ID NO: 17503 - DNA, 15 bp, Homo sapiens
aaaatactcaaactc

SEQ ID NO: 17504 - DNA, 15 bp, Homo sapiens
aaatactcaaactca

SEQ ID NO: 17505 - DNA, 15 bp, Homo sapiens
aatactcaaactcat

SEQ ID NO: 17506 - DNA, 15 bp, Homo sapiens
atactcaaactcatt

SEQ ID NO: 17507 - DNA, 15 bp, Homo sapiens
tactcaaactcatta

SEQ ID NO: 17508 - DNA, 15 bp, Homo sapiens
actcaaactcattat

SEQ ID NO: 17509 - DNA, 15 bp, Homo sapiens
ctcaaactcattatt

SEQ ID NO: 17510 - DNA, 15 bp, Homo sapiens
tcaaactcattattt

SEQ ID NO: 17511 - DNA, 15 bp, Homo sapiens
caaactcattatttc

SEQ ID NO: 17512 - DNA, 15 bp, Homo sapiens
aaactcattatttca

SEQ ID NO: 17513 - DNA, 15 bp, Homo sapiens
aactcattatttcaa

SEQ ID NO: 17514 - DNA, 15 bp, Homo sapiens
actcattatttcaac

SEQ ID NO: 17515 - DNA, 15 bp, Homo sapiens
ctcattatttcaaca

SEQ ID NO: 17516 - DNA, 15 bp, Homo sapiens
tcattatttcaacaa

SEQ ID NO: 17517 - DNA, 15 bp, Homo sapiens
cattatttcaacaaa

SEQ ID NO: 17518 - DNA, 15 bp, Homo sapiens
attatttcaacaaac

SEQ ID NO: 17519 - DNA, 15 bp, Homo sapiens
ttatttcaacaaaca

SEQ ID NO: 17520 - DNA, 15 bp, Homo sapiens
tatttcaacaaacat

SEQ ID NO: 17521 - DNA, 15 bp, Homo sapiens
atttcaacaaacatt

SEQ ID NO: 17522 - DNA, 15 bp, Homo sapiens
tttcaacaaacattt

SEQ ID NO: 17523 - DNA, 15 bp, Homo sapiens
ttcaacaaacattta

SEQ ID NO: 17524 - DNA, 15 bp, Homo sapiens
tcaacaaacatttat

SEQ ID NO: 17525 - DNA, 15 bp, Homo sapiens
caacaaacatttatt

SEQ ID NO: 17526 - DNA, 15 bp, Homo sapiens
aacaaacatttattg

SEQ ID NO: 17527 - DNA, 15 bp, Homo sapiens
acaaacatttattga

SEQ ID NO: 17528 - DNA, 15 bp, Homo sapiens
caaacatttattgag

SEQ ID NO: 17529 - DNA, 15 bp, Homo sapiens
aaacatttattgagc

SEQ ID NO: 17530 - DNA, 15 bp, Homo sapiens
aacatttattgagca

SEQ ID NO: 17531 - DNA, 15 bp, Homo sapiens
acatttattgagcac

SEQ ID NO: 17532 - DNA, 15 bp, Homo sapiens
catttattgagcacc

SEQ ID NO: 17533 - DNA, 15 bp, Homo sapiens
atttattgagcacct

SEQ ID NO: 17534 - DNA, 15 bp, Homo sapiens
tttattgagcacctg

SEQ ID NO: 17535 - DNA, 15 bp, Homo sapiens
ttattgagcacctgc

SEQ ID NO: 17536 - DNA, 15 bp, Homo sapiens
tattgagcacctgct

SEQ ID NO: 17537 - DNA, 15 bp, Homo sapiens
attgagcacctgcta

SEQ ID NO: 17538 - DNA, 15 bp, Homo sapiens
ttgagcacctgctaa

SEQ ID NO: 17539 - DNA, 15 bp, Homo sapiens
tgagcacctgctaag

SEQ ID NO: 17540 - DNA, 15 bp, Homo sapiens
gagcacctgctaagt

SEQ ID NO: 17541 - DNA, 15 bp, Homo sapiens
agcacctgctaagtg

SEQ ID NO: 17542 - DNA, 15 bp, Homo sapiens
gcacctgctaagtgc

SEQ ID NO: 17543 - DNA, 15 bp, Homo sapiens
cacctgctaagtgcc

SEQ ID NO: 17544 - DNA, 15 bp, Homo sapiens
acctgctaagtgcca

SEQ ID NO: 17545 - DNA, 15 bp, Homo sapiens
cctgctaagtgccag

SEQ ID NO: 17546 - DNA, 15 bp, Homo sapiens
ctgctaagtgccagg

SEQ ID NO: 17547 - DNA, 15 bp, Homo sapiens
tgctaagtgccaggc

SEQ ID NO: 17548 - DNA, 15 bp, Homo sapiens
gctaagtgccaggca

SEQ ID NO: 17549 - DNA, 15 bp, Homo sapiens
ctaagtgccaggcac

SEQ ID NO: 17550 - DNA, 15 bp, Homo sapiens
taagtgccaggcact

SEQ ID NO: 17551 - DNA, 15 bp, Homo sapiens
aagtgccaggcactg

SEQ ID NO: 17552 - DNA, 15 bp, Homo sapiens
agtgccaggcactgt

SEQ ID NO: 17553 - DNA, 15 bp, Homo sapiens
gtgccaggcactgtg

SEQ ID NO: 17554 - DNA, 15 bp, Homo sapiens
tgccaggcactgtgg

SEQ ID NO: 17555 - DNA, 15 bp, Homo sapiens
gccaggcactgtggc

SEQ ID NO: 17556 - DNA, 15 bp, Homo sapiens
ccaggcactgtggca

SEQ ID NO: 17557 - DNA, 15 bp, Homo sapiens
caggcactgtggcag

SEQ ID NO: 17558 - DNA, 15 bp, Homo sapiens
aggcactgtggcagg

SEQ ID NO: 17559 - DNA, 15 bp, Homo sapiens
ggcactgtggcaggc

SEQ ID NO: 17560 - DNA, 15 bp, Homo sapiens
gcactgtggcaggcc

SEQ ID NO: 17561 - DNA, 15 bp, Homo sapiens
cactgtggcaggcct

SEQ ID NO: 17562 - DNA, 15 bp, Homo sapiens
actgtggcaggcctg

SEQ ID NO: 17563 - DNA, 15 bp, Homo sapiens
ctgtggcaggcctgc

SEQ ID NO: 17564 - DNA, 15 bp, Homo sapiens
tgtggcaggcctgca

SEQ ID NO: 17565 - DNA, 15 bp, Homo sapiens
gtggcaggcctgcag

SEQ ID NO: 17566 - DNA, 15 bp, Homo sapiens
tggcaggcctgcagg

SEQ ID NO: 17567 - DNA, 15 bp, Homo sapiens
ggcaggcctgcagga

SEQ ID NO: 17568 - DNA, 15 bp, Homo sapiens
gcaggcctgcaggaa

SEQ ID NO: 17569 - DNA, 15 bp, Homo sapiens
caggcctgcaggaat

SEQ ID NO: 17570 - DNA, 15 bp, Homo sapiens
aggcctgcaggaata

SEQ ID NO: 17571 - DNA, 15 bp, Homo sapiens
ggcctgcaggaatac

SEQ ID NO: 17572 - DNA, 15 bp, Homo sapiens
gcctgcaggaataca

SEQ ID NO: 17573 - DNA, 15 bp, Homo sapiens
cctgcaggaatacag

SEQ ID NO: 17574 - DNA, 15 bp, Homo sapiens
ctgcaggaatacagt

SEQ ID NO: 17575 - DNA, 15 bp, Homo sapiens
tgcaggaatacagtg

SEQ ID NO: 17576 - DNA, 15 bp, Homo sapiens
gcaggaatacagtgg

SEQ ID NO: 17577 - DNA, 15 bp, Homo sapiens
caggaatacagtggt

SEQ ID NO: 17578 - DNA, 15 bp, Homo sapiens
aggaatacagtggtg

SEQ ID NO: 17579 - DNA, 15 bp, Homo sapiens
ggaatacagtggtga

SEQ ID NO: 17580 - DNA, 15 bp, Homo sapiens
gaatacagtggtgaa

SEQ ID NO: 17581 - DNA, 15 bp, Homo sapiens
aatacagtggtgaat

SEQ ID NO: 17582 - DNA, 15 bp, Homo sapiens
atacagtggtgaatg

SEQ ID NO: 17583 - DNA, 15 bp, Homo sapiens
tacagtggtgaatga

SEQ ID NO: 17584 - DNA, 15 bp, Homo sapiens
acagtggtgaatgaa

SEQ ID NO: 17585 - DNA, 15 bp, Homo sapiens
cagtggtgaatgaaa

SEQ ID NO: 17586 - DNA, 15 bp, Homo sapiens
agtggtgaatgaaag

SEQ ID NO: 17587 - DNA, 15 bp, Homo sapiens
gtggtgaatgaaagc

SEQ ID NO: 17588 - DNA, 15 bp, Homo sapiens
tggtgaatgaaagca

SEQ ID NO: 17589 - DNA, 15 bp, Homo sapiens
ggtgaatgaaagcag

SEQ ID NO: 17590 - DNA, 15 bp, Homo sapiens
gtgaatgaaagcaga

SEQ ID NO: 17591 - DNA, 15 bp, Homo sapiens
tgaatgaaagcagac

SEQ ID NO: 17592 - DNA, 15 bp, Homo sapiens
gaatgaaagcagacc

SEQ ID NO: 17593 - DNA, 15 bp, Homo sapiens
aatgaaagcagacca

SEQ ID NO: 17594 - DNA, 15 bp, Homo sapiens
atgaaagcagaccat

SEQ ID NO: 17595 - DNA, 15 bp, Homo sapiens
tgaaagcagaccatg

SEQ ID NO: 17596 - DNA, 15 bp, Homo sapiens
gaaagcagaccatgt

SEQ ID NO: 17597 - DNA, 15 bp, Homo sapiens
aaagcagaccatgtc

SEQ ID NO: 17598 - DNA, 15 bp, Homo sapiens
aagcagaccatgtcc

SEQ ID NO: 17599 - DNA, 15 bp, Homo sapiens
agcagaccatgtccc

SEQ ID NO: 17600 - DNA, 15 bp, Homo sapiens
gcagaccatgtccct

SEQ ID NO: 17601 - DNA, 15 bp, Homo sapiens
cagaccatgtcccta

SEQ ID NO: 17602 - DNA, 15 bp, Homo sapiens
agaccatgtccctac

SEQ ID NO: 17603 - DNA, 15 bp, Homo sapiens
gaccatgtccctacc

SEQ ID NO: 17604 - DNA, 15 bp, Homo sapiens
accatgtccctaccc

SEQ ID NO: 17605 - DNA, 15 bp, Homo sapiens
ccatgtccctacccc

SEQ ID NO: 17606 - DNA, 15 bp, Homo sapiens
catgtccctacccct

SEQ ID NO: 17607 - DNA, 15 bp, Homo sapiens
atgtccctacccctc

SEQ ID NO: 17608 - DNA, 15 bp, Homo sapiens
tgtccctacccctca

SEQ ID NO: 17609 - DNA, 15 bp, Homo sapiens
gtccctacccctcac

SEQ ID NO: 17610 - DNA, 15 bp, Homo sapiens
tccctacccctcacg

SEQ ID NO: 17611 - DNA, 15 bp, Homo sapiens
ccctacccctcacgg

SEQ ID NO: 17612 - DNA, 15 bp, Homo sapiens
cctacccctcacgga

SEQ ID NO: 17613 - DNA, 15 bp, Homo sapiens
ctacccctcacggag

SEQ ID NO: 17614 - DNA, 15 bp, Homo sapiens
tacccctcacggagc

SEQ ID NO: 17615 - DNA, 15 bp, Homo sapiens
acccctcacggagct

SEQ ID NO: 17616 - DNA, 15 bp, Homo sapiens
cccctcacggagctt

SEQ ID NO: 17617 - DNA, 15 bp, Homo sapiens
ccctcacggagctta

SEQ ID NO: 17618 - DNA, 15 bp, Homo sapiens
cctcacggagcttac

SEQ ID NO: 17619 - DNA, 15 bp, Homo sapiens
ctcacggagcttaca

SEQ ID NO: 17620 - DNA, 15 bp, Homo sapiens
tcacggagcttacag

SEQ ID NO: 17621 - DNA, 15 bp, Homo sapiens
cacggagcttacagt

SEQ ID NO: 17622 - DNA, 15 bp, Homo sapiens
acggagcttacagtc

SEQ ID NO: 17623 - DNA, 15 bp, Homo sapiens
cggagcttacagtct

SEQ ID NO: 17624 - DNA, 15 bp, Homo sapiens
ggagcttacagtcta

SEQ ID NO: 17625 - DNA, 15 bp, Homo sapiens
gagcttacagtctag

SEQ ID NO: 17626 - DNA, 15 bp, Homo sapiens
agcttacagtctagc

SEQ ID NO: 17627 - DNA, 15 bp, Homo sapiens
gcttacagtctagcg

SEQ ID NO: 17628 - DNA, 15 bp, Homo sapiens
cttacagtctagcgg

SEQ ID NO: 17629 - DNA, 15 bp, Homo sapiens
ttacagtctagcggg

SEQ ID NO: 17630 - DNA, 15 bp, Homo sapiens
tacagtctagcgggg

SEQ ID NO: 17631 - DNA, 15 bp, Homo sapiens
acagtctagcggggc

SEQ ID NO: 17632 - DNA, 15 bp, Homo sapiens
cagtctagcggggca

SEQ ID NO: 17633 - DNA, 15 bp, Homo sapiens
agtctagcggggcag

SEQ ID NO: 17634 - DNA, 15 bp, Homo sapiens
gtctagcggggcaga

SEQ ID NO: 17635 - DNA, 15 bp, Homo sapiens
tctagcggggcagag

SEQ ID NO: 17636 - DNA, 15 bp, Homo sapiens
ctagcggggcagaga

SEQ ID NO: 17637 - DNA, 15 bp, Homo sapiens
tagcggggcagagag

SEQ ID NO: 17638 - DNA, 15 bp, Homo sapiens
agcggggcagagagt

SEQ ID NO: 17639 - DNA, 15 bp, Homo sapiens
gcggggcagagagtc

SEQ ID NO: 17640 - DNA, 15 bp, Homo sapiens
cggggcagagagtca

SEQ ID NO: 17641 - DNA, 15 bp, Homo sapiens
ggggcagagagtcat

SEQ ID NO: 17642 - DNA, 15 bp, Homo sapiens
gggcagagagtcatc

SEQ ID NO: 17643 - DNA, 15 bp, Homo sapiens
ggcagagagtcatcc

SEQ ID NO: 17644 - DNA, 15 bp, Homo sapiens
gcagagagtcatcca

SEQ ID NO: 17645 - DNA, 15 bp, Homo sapiens
cagagagtcatccag

SEQ ID NO: 17646 - DNA, 15 bp, Homo sapiens
agagagtcatccagc

SEQ ID NO: 17647 - DNA, 15 bp, Homo sapiens
gagagtcatccagca

SEQ ID NO: 17648 - DNA, 15 bp, Homo sapiens
agagtcatccagcaa

SEQ ID NO: 17649 - DNA, 15 bp, Homo sapiens
gagtcatccagcaac

SEQ ID NO: 17650 - DNA, 15 bp, Homo sapiens
agtcatccagcaacc

SEQ ID NO: 17651 - DNA, 15 bp, Homo sapiens
gtcatccagcaaccc

SEQ ID NO: 17652 - DNA, 15 bp, Homo sapiens
tcatccagcaacccc

SEQ ID NO: 17653 - DNA, 15 bp, Homo sapiens
catccagcaaccccc

SEQ ID NO: 17654 - DNA, 15 bp, Homo sapiens
atccagcaaccccct

SEQ ID NO: 17655 - DNA, 15 bp, Homo sapiens
tccagcaacccccta

SEQ ID NO: 17656 - DNA, 15 bp, Homo sapiens
ccagcaaccccctaa

SEQ ID NO: 17657 - DNA, 15 bp, Homo sapiens
cagcaaccccctaat

SEQ ID NO: 17658 - DNA, 15 bp, Homo sapiens
agcaaccccctaata

SEQ ID NO: 17659 - DNA, 15 bp, Homo sapiens
gcaaccccctaataa

SEQ ID NO: 17660 - DNA, 15 bp, Homo sapiens
caaccccctaataaa

SEQ ID NO: 17661 - DNA, 15 bp, Homo sapiens
aaccccctaataaag

SEQ ID NO: 17662 - DNA, 15 bp, Homo sapiens
accccctaataaaga

SEQ ID NO: 17663 - DNA, 15 bp, Homo sapiens
ccccctaataaagat

SEQ ID NO: 17664 - DNA, 15 bp, Homo sapiens
cccctaataaagata

SEQ ID NO: 17665 - DNA, 15 bp, Homo sapiens
ccctaataaagatat

SEQ ID NO: 17666 - DNA, 15 bp, Homo sapiens
cctaataaagatata

SEQ ID NO: 17667 - DNA, 15 bp, Homo sapiens
ctaataaagatataa

SEQ ID NO: 17668 - DNA, 15 bp, Homo sapiens
taataaagatataac

SEQ ID NO: 17669 - DNA, 15 bp, Homo sapiens
aataaagatataact

SEQ ID NO: 17670 - DNA, 15 bp, Homo sapiens
ataaagatataacta

SEQ ID NO: 17671 - DNA, 15 bp, Homo sapiens
taaagatataactac

SEQ ID NO: 17672 - DNA, 15 bp, Homo sapiens
aaagatataactaca

SEQ ID NO: 17673 - DNA, 15 bp, Homo sapiens
aagatataactacaa

SEQ ID NO: 17674 - DNA, 15 bp, Homo sapiens
agatataactacaaa

SEQ ID NO: 17675 - DNA, 15 bp, Homo sapiens
gatataactacaaac

SEQ ID NO: 17676 - DNA, 15 bp, Homo sapiens
atataactacaaact

SEQ ID NO: 17677 - DNA, 15 bp, Homo sapiens
tataactacaaactg

SEQ ID NO: 17678 - DNA, 15 bp, Homo sapiens
ataactacaaactgc

SEQ ID NO: 17679 - DNA, 15 bp, Homo sapiens
taactacaaactgcg

SEQ ID NO: 17680 - DNA, 15 bp, Homo sapiens
aactacaaactgcga

SEQ ID NO: 17681 - DNA, 15 bp, Homo sapiens
actacaaactgcgat

SEQ ID NO: 17682 - DNA, 15 bp, Homo sapiens
ctacaaactgcgatc

SEQ ID NO: 17683 - DNA, 15 bp, Homo sapiens
tacaaactgcgatca

SEQ ID NO: 17684 - DNA, 15 bp, Homo sapiens
acaaactgcgatcag

SEQ ID NO: 17685 - DNA, 15 bp, Homo sapiens
caaactgcgatcagt

SEQ ID NO: 17686 - DNA, 15 bp, Homo sapiens
aaactgcgatcagtg

SEQ ID NO: 17687 - DNA, 15 bp, Homo sapiens
aactgcgatcagtgc

SEQ ID NO: 17688 - DNA, 15 bp, Homo sapiens
actgcgatcagtgcc

SEQ ID NO: 17689 - DNA, 15 bp, Homo sapiens
ctgcgatcagtgcct

SEQ ID NO: 17690 - DNA, 15 bp, Homo sapiens
tgcgatcagtgcctt

SEQ ID NO: 17691 - DNA, 15 bp, Homo sapiens
gcgatcagtgccttt

SEQ ID NO: 17692 - DNA, 15 bp, Homo sapiens
cgatcagtgccttta

SEQ ID NO: 17693 - DNA, 15 bp, Homo sapiens
gatcagtgcctttag

SEQ ID NO: 17694 - DNA, 15 bp, Homo sapiens
atcagtgcctttaga

SEQ ID NO: 17695 - DNA, 15 bp, Homo sapiens
tcagtgcctttagaa

SEQ ID NO: 17696 - DNA, 15 bp, Homo sapiens
cagtgcctttagaaa

SEQ ID NO: 17697 - DNA, 15 bp, Homo sapiens
agtgcctttagaaaa

SEQ ID NO: 17698 - DNA, 15 bp, Homo sapiens
gtgcctttagaaaag

SEQ ID NO: 17699 - DNA, 15 bp, Homo sapiens
tgcctttagaaaagg

SEQ ID NO: 17700 - DNA, 15 bp, Homo sapiens
gcctttagaaaagga

SEQ ID NO: 17701 - DNA, 15 bp, Homo sapiens
cctttagaaaaggaa

SEQ ID NO: 17702 - DNA, 15 bp, Homo sapiens
ctttagaaaaggaaa

SEQ ID NO: 17703 - DNA, 15 bp, Homo sapiens
tttagaaaaggaaag

SEQ ID NO: 17704 - DNA, 15 bp, Homo sapiens
ttagaaaaggaaaga

SEQ ID NO: 17705 - DNA, 15 bp, Homo sapiens
tagaaaaggaaagaa

SEQ ID NO: 17706 - DNA, 15 bp, Homo sapiens
agaaaaggaaagaat

SEQ ID NO: 17707 - DNA, 15 bp, Homo sapiens
gaaaaggaaagaatg

SEQ ID NO: 17708 - DNA, 15 bp, Homo sapiens
aaaaggaaagaatgc

SEQ ID NO: 17709 - DNA, 15 bp, Homo sapiens
aaaggaaagaatgcc

SEQ ID NO: 17710 - DNA, 15 bp, Homo sapiens
aaggaaagaatgccc

SEQ ID NO: 17711 - DNA, 15 bp, Homo sapiens
aggaaagaatgccct

SEQ ID NO: 17712 - DNA, 15 bp, Homo sapiens
ggaaagaatgcccta

SEQ ID NO: 17713 - DNA, 15 bp, Homo sapiens
gaaagaatgccctag

SEQ ID NO: 17714 - DNA, 15 bp, Homo sapiens
aaagaatgccctaga

SEQ ID NO: 17715 - DNA, 15 bp, Homo sapiens
aagaatgccctagaa

SEQ ID NO: 17716 - DNA, 15 bp, Homo sapiens
agaatgccctagaat

SEQ ID NO: 17717 - DNA, 15 bp, Homo sapiens
gaatgccctagaata

SEQ ID NO: 17718 - DNA, 15 bp, Homo sapiens
aatgccctagaataa

SEQ ID NO: 17719 - DNA, 15 bp, Homo sapiens
atgccctagaataag

SEQ ID NO: 17720 - DNA, 15 bp, Homo sapiens
tgccctagaataagg

SEQ ID NO: 17721 - DNA, 15 bp, Homo sapiens
gccctagaataaggg

SEQ ID NO: 17722 - DNA, 15 bp, Homo sapiens
ccctagaataagggt

SEQ ID NO: 17723 - DNA, 15 bp, Homo sapiens
cctagaataagggtc

SEQ ID NO: 17724 - DNA, 15 bp, Homo sapiens
ctagaataagggtcc

SEQ ID NO: 17725 - DNA, 15 bp, Homo sapiens
tagaataagggtccc

SEQ ID NO: 17726 - DNA, 15 bp, Homo sapiens
agaataagggtccct

SEQ ID NO: 17727 - DNA, 15 bp, Homo sapiens
gaataagggtccctg

SEQ ID NO: 17728 - DNA, 15 bp, Homo sapiens
aataagggtccctgg

SEQ ID NO: 17729 - DNA, 15 bp, Homo sapiens
ataagggtccctggc

SEQ ID NO: 17730 - DNA, 15 bp, Homo sapiens
taagggtccctggcc

SEQ ID NO: 17731 - DNA, 15 bp, Homo sapiens
aagggtccctggccc

SEQ ID NO: 17732 - DNA, 15 bp, Homo sapiens
agggtccctggccca

SEQ ID NO: 17733 - DNA, 15 bp, Homo sapiens
gggtccctggcccaa

SEQ ID NO: 17734 - DNA, 15 bp, Homo sapiens
ggtccctggcccaat

SEQ ID NO: 17735 - DNA, 15 bp, Homo sapiens
gtccctggcccaatc

SEQ ID NO: 17736 - DNA, 15 bp, Homo sapiens
tccctggcccaatct

SEQ ID NO: 17737 - DNA, 15 bp, Homo sapiens
ccctggcccaatcta

SEQ ID NO: 17738 - DNA, 15 bp, Homo sapiens
cctggcccaatctac

SEQ ID NO: 17739 - DNA, 15 bp, Homo sapiens
ctggcccaatctaca

SEQ ID NO: 17740 - DNA, 15 bp, Homo sapiens
tggcccaatctacag

SEQ ID NO: 17741 - DNA, 15 bp, Homo sapiens
ggcccaatctacagg

SEQ ID NO: 17742 - DNA, 15 bp, Homo sapiens
gcccaatctacaggg

SEQ ID NO: 17743 - DNA, 15 bp, Homo sapiens
cccaatctacagggt

SEQ ID NO: 17744 - DNA, 15 bp, Homo sapiens
ccaatctacagggtc

SEQ ID NO: 17745 - DNA, 15 bp, Homo sapiens
caatctacagggtca

SEQ ID NO: 17746 - DNA, 15 bp, Homo sapiens
aatctacagggtcag

SEQ ID NO: 17747 - DNA, 15 bp, Homo sapiens
atctacagggtcagg

SEQ ID NO: 17748 - DNA, 15 bp, Homo sapiens
tctacagggtcaggc

SEQ ID NO: 17749 - DNA, 15 bp, Homo sapiens
ctacagggtcaggca

SEQ ID NO: 17750 - DNA, 15 bp, Homo sapiens
tacagggtcaggcag

SEQ ID NO: 17751 - DNA, 15 bp, Homo sapiens
acagggtcaggcagg

SEQ ID NO: 17752 - DNA, 15 bp, Homo sapiens
cagggtcaggcaggg

SEQ ID NO: 17753 - DNA, 15 bp, Homo sapiens
agggtcaggcagggc

SEQ ID NO: 17754 - DNA, 15 bp, Homo sapiens
gggtcaggcagggct

SEQ ID NO: 17755 - DNA, 15 bp, Homo sapiens
ggtcaggcagggctt

SEQ ID NO: 17756 - DNA, 15 bp, Homo sapiens
gtcaggcagggctta

SEQ ID NO: 17757 - DNA, 15 bp, Homo sapiens
tcaggcagggcttac

SEQ ID NO: 17758 - DNA, 15 bp, Homo sapiens
caggcagggcttact

SEQ ID NO: 17759 - DNA, 15 bp, Homo sapiens
aggcagggcttactt

SEQ ID NO: 17760 - DNA, 15 bp, Homo sapiens
ggcagggcttactta

SEQ ID NO: 17761 - DNA, 15 bp, Homo sapiens
gcagggcttacttaa

SEQ ID NO: 17762 - DNA, 15 bp, Homo sapiens
cagggcttacttaag

SEQ ID NO: 17763 - DNA, 15 bp, Homo sapiens
agggcttacttaagg

SEQ ID NO: 17764 - DNA, 15 bp, Homo sapiens
gggcttacttaagga

SEQ ID NO: 17765 - DNA, 15 bp, Homo sapiens
ggcttacttaaggat

SEQ ID NO: 17766 - DNA, 15 bp, Homo sapiens
gcttacttaaggatg

SEQ ID NO: 17767 - DNA, 15 bp, Homo sapiens
cttacttaaggatgc

SEQ ID NO: 17768 - DNA, 15 bp, Homo sapiens
ttacttaaggatgct

SEQ ID NO: 17769 - DNA, 15 bp, Homo sapiens
tacttaaggatgctg

SEQ ID NO: 17770 - DNA, 15 bp, Homo sapiens
acttaaggatgctga

SEQ ID NO: 17771 - DNA, 15 bp, Homo sapiens
cttaaggatgctgaa

SEQ ID NO: 17772 - DNA, 15 bp, Homo sapiens
ttaaggatgctgaaa

SEQ ID NO: 17773 - DNA, 15 bp, Homo sapiens
taaggatgctgaaaa

SEQ ID NO: 17774 - DNA, 15 bp, Homo sapiens
aaggatgctgaaaag

SEQ ID NO: 17775 - DNA, 15 bp, Homo sapiens
aggatgctgaaaagc

SEQ ID NO: 17776 - DNA, 15 bp, Homo sapiens
ggatgctgaaaagca

SEQ ID NO: 17777 - DNA, 15 bp, Homo sapiens
gatgctgaaaagcaa

SEQ ID NO: 17778 - DNA, 15 bp, Homo sapiens
atgctgaaaagcaaa

SEQ ID NO: 17779 - DNA, 15 bp, Homo sapiens
tgctgaaaagcaaaa

SEQ ID NO: 17780 - DNA, 15 bp, Homo sapiens
gctgaaaagcaaaac

SEQ ID NO: 17781 - DNA, 15 bp, Homo sapiens
ctgaaaagcaaaacg

SEQ ID NO: 17782 - DNA, 15 bp, Homo sapiens
tgaaaagcaaaacga

SEQ ID NO: 17783 - DNA, 15 bp, Homo sapiens
gaaaagcaaaacgag

SEQ ID NO: 17784 - DNA, 15 bp, Homo sapiens
aaaagcaaaacgagc

SEQ ID NO: 17785 - DNA, 15 bp, Homo sapiens
aaagcaaaacgagca

SEQ ID NO: 17786 - DNA, 15 bp, Homo sapiens
aagcaaaacgagcaa

SEQ ID NO: 17787 - DNA, 15 bp, Homo sapiens
agcaaaacgagcaag

SEQ ID NO: 17788 - DNA, 15 bp, Homo sapiens
gcaaaacgagcaagt

SEQ ID NO: 17789 - DNA, 15 bp, Homo sapiens
caaaacgagcaagtg

SEQ ID NO: 17790 - DNA, 15 bp, Homo sapiens
aaaacgagcaagtgg

SEQ ID NO: 17791 - DNA, 15 bp, Homo sapiens
aaacgagcaagtggg

SEQ ID NO: 17792 - DNA, 15 bp, Homo sapiens
aacgagcaagtgggg

SEQ ID NO: 17793 - DNA, 15 bp, Homo sapiens
acgagcaagtgggga

SEQ ID NO: 17794 - DNA, 15 bp, Homo sapiens
cgagcaagtggggag

SEQ ID NO: 17795 - DNA, 15 bp, Homo sapiens
gagcaagtggggagg

SEQ ID NO: 17796 - DNA, 15 bp, Homo sapiens
agcaagtggggaggt

SEQ ID NO: 17797 - DNA, 15 bp, Homo sapiens
gcaagtggggaggta

SEQ ID NO: 17798 - DNA, 15 bp, Homo sapiens
caagtggggaggtag

SEQ ID NO: 17799 - DNA, 15 bp, Homo sapiens
aagtggggaggtagg

SEQ ID NO: 17800 - DNA, 15 bp, Homo sapiens
agtggggaggtaggg

SEQ ID NO: 17801 - DNA, 15 bp, Homo sapiens
gtggggaggtagggg

SEQ ID NO: 17802 - DNA, 15 bp, Homo sapiens
tggggaggtagggga

SEQ ID NO: 17803 - DNA, 15 bp, Homo sapiens
ggggaggtaggggag

SEQ ID NO: 17804 - DNA, 15 bp, Homo sapiens
gggaggtaggggagt

SEQ ID NO: 17805 - DNA, 15 bp, Homo sapiens
ggaggtaggggagtg

SEQ ID NO: 17806 - DNA, 15 bp, Homo sapiens
gaggtaggggagtga

SEQ ID NO: 17807 - DNA, 15 bp, Homo sapiens
aggtaggggagtgag

SEQ ID NO: 17808 - DNA, 15 bp, Homo sapiens
ggtaggggagtgaga

SEQ ID NO: 17809 - DNA, 15 bp, Homo sapiens
gtaggggagtgagag

SEQ ID NO: 17810 - DNA, 15 bp, Homo sapiens
taggggagtgagagg

SEQ ID NO: 17811 - DNA, 15 bp, Homo sapiens
aggggagtgagaggc

SEQ ID NO: 17812 - DNA, 15 bp, Homo sapiens
ggggagtgagaggct

SEQ ID NO: 17813 - DNA, 15 bp, Homo sapiens
gggagtgagaggctg

SEQ ID NO: 17814 - DNA, 15 bp, Homo sapiens
ggagtgagaggctgc

SEQ ID NO: 17815 - DNA, 15 bp, Homo sapiens
gagtgagaggctgct

SEQ ID NO: 17816 - DNA, 15 bp, Homo sapiens
agtgagaggctgctt

SEQ ID NO: 17817 - DNA, 15 bp, Homo sapiens
gtgagaggctgcttg

SEQ ID NO: 17818 - DNA, 15 bp, Homo sapiens
tgagaggctgcttgg

SEQ ID NO: 17819 - DNA, 15 bp, Homo sapiens
gagaggctgcttggg

SEQ ID NO: 17820 - DNA, 15 bp, Homo sapiens
agaggctgcttggga

SEQ ID NO: 17821 - DNA, 15 bp, Homo sapiens
gaggctgcttgggaa

SEQ ID NO: 17822 - DNA, 15 bp, Homo sapiens
aggctgcttgggaac

SEQ ID NO: 17823 - DNA, 15 bp, Homo sapiens
ggctgcttgggaaca

SEQ ID NO: 17824 - DNA, 15 bp, Homo sapiens
gctgcttgggaacac

SEQ ID NO: 17825 - DNA, 15 bp, Homo sapiens
ctgcttgggaacact

SEQ ID NO: 17826 - DNA, 15 bp, Homo sapiens
tgcttgggaacactg

SEQ ID NO: 17827 - DNA, 15 bp, Homo sapiens
gcttgggaacactgt

SEQ ID NO: 17828 - DNA, 15 bp, Homo sapiens
cttgggaacactgtg

SEQ ID NO: 17829 - DNA, 15 bp, Homo sapiens
ttgggaacactgtgg

SEQ ID NO: 17830 - DNA, 15 bp, Homo sapiens
tgggaacactgtggg

SEQ ID NO: 17831 - DNA, 15 bp, Homo sapiens
gggaacactgtggga

SEQ ID NO: 17832 - DNA, 15 bp, Homo sapiens
ggaacactgtgggag

SEQ ID NO: 17833 - DNA, 15 bp, Homo sapiens
gaacactgtgggaga

SEQ ID NO: 17834 - DNA, 15 bp, Homo sapiens
aacactgtgggagag

SEQ ID NO: 17835 - DNA, 15 bp, Homo sapiens
acactgtgggagagg

SEQ ID NO: 17836 - DNA, 15 bp, Homo sapiens
cactgtgggagaggt

SEQ ID NO: 17837 - DNA, 15 bp, Homo sapiens
actgtgggagaggtg

SEQ ID NO: 17838 - DNA, 15 bp, Homo sapiens
ctgtgggagaggtga

SEQ ID NO: 17839 - DNA, 15 bp, Homo sapiens
tgtgggagaggtgat

SEQ ID NO: 17840 - DNA, 15 bp, Homo sapiens
gtgggagaggtgatg

SEQ ID NO: 17841 - DNA, 15 bp, Homo sapiens
tgggagaggtgatga

SEQ ID NO: 17842 - DNA, 15 bp, Homo sapiens
gggagaggtgatgaa

SEQ ID NO: 17843 - DNA, 15 bp, Homo sapiens
ggagaggtgatgaat

SEQ ID NO: 17844 - DNA, 15 bp, Homo sapiens
gagaggtgatgaatg

SEQ ID NO: 17845 - DNA, 15 bp, Homo sapiens
agaggtgatgaatgc

SEQ ID NO: 17846 - DNA, 15 bp, Homo sapiens
gaggtgatgaatgca

SEQ ID NO: 17847 - DNA, 15 bp, Homo sapiens
aggtgatgaatgcag

SEQ ID NO: 17848 - DNA, 15 bp, Homo sapiens
ggtgatgaatgcagt

SEQ ID NO: 17849 - DNA, 15 bp, Homo sapiens
gtgatgaatgcagtc

SEQ ID NO: 17850 - DNA, 15 bp, Homo sapiens
tgatgaatgcagtcc

SEQ ID NO: 17851 - DNA, 15 bp, Homo sapiens
gatgaatgcagtccc

SEQ ID NO: 17852 - DNA, 15 bp, Homo sapiens
atgaatgcagtcccc

SEQ ID NO: 17853 - DNA, 15 bp, Homo sapiens
tgaatgcagtccccg

SEQ ID NO: 17854 - DNA, 15 bp, Homo sapiens
gaatgcagtccccga

SEQ ID NO: 17855 - DNA, 15 bp, Homo sapiens
aatgcagtccccgac

SEQ ID NO: 17856 - DNA, 15 bp, Homo sapiens
atgcagtccccgaca

SEQ ID NO: 17857 - DNA, 15 bp, Homo sapiens
tgcagtccccgacaa

SEQ ID NO: 17858 - DNA, 15 bp, Homo sapiens
gcagtccccgacaag

SEQ ID NO: 17859 - DNA, 15 bp, Homo sapiens
cagtccccgacaagg

SEQ ID NO: 17860 - DNA, 15 bp, Homo sapiens
agtccccgacaaggt

SEQ ID NO: 17861 - DNA, 15 bp, Homo sapiens
gtccccgacaaggtg

SEQ ID NO: 17862 - DNA, 15 bp, Homo sapiens
tccccgacaaggtga

SEQ ID NO: 17863 - DNA, 15 bp, Homo sapiens
ccccgacaaggtgag

SEQ ID NO: 17864 - DNA, 15 bp, Homo sapiens
cccgacaaggtgagt

SEQ ID NO: 17865 - DNA, 15 bp, Homo sapiens
ccgacaaggtgagtt

SEQ ID NO: 17866 - DNA, 15 bp, Homo sapiens
cgacaaggtgagttt

SEQ ID NO: 17867 - DNA, 15 bp, Homo sapiens
gacaaggtgagtttg

SEQ ID NO: 17868 - DNA, 15 bp, Homo sapiens
acaaggtgagtttga

SEQ ID NO: 17869 - DNA, 15 bp, Homo sapiens
caaggtgagtttgag

SEQ ID NO: 17870 - DNA, 15 bp, Homo sapiens
aaggtgagtttgagg

SEQ ID NO: 17871 - DNA, 15 bp, Homo sapiens
aggtgagtttgagga

SEQ ID NO: 17872 - DNA, 15 bp, Homo sapiens
ggtgagtttgaggaa

SEQ ID NO: 17873 - DNA, 15 bp, Homo sapiens
gtgagtttgaggaat

SEQ ID NO: 17874 - DNA, 15 bp, Homo sapiens
tgagtttgaggaatt

SEQ ID NO: 17875 - DNA, 15 bp, Homo sapiens
gagtttgaggaatta

SEQ ID NO: 17876 - DNA, 15 bp, Homo sapiens
agtttgaggaattat

SEQ ID NO: 17877 - DNA, 15 bp, Homo sapiens
gtttgaggaattatt

SEQ ID NO: 17878 - DNA, 15 bp, Homo sapiens
tttgaggaattattt

SEQ ID NO: 17879 - DNA, 15 bp, Homo sapiens
ttgaggaattatttg

SEQ ID NO: 17880 - DNA, 15 bp, Homo sapiens
tgaggaattatttgg

SEQ ID NO: 17881 - DNA, 15 bp, Homo sapiens
gaggaattatttggg

SEQ ID NO: 17882 - DNA, 15 bp, Homo sapiens
aggaattatttgggc

SEQ ID NO: 17883 - DNA, 15 bp, Homo sapiens
ggaattatttgggcc

SEQ ID NO: 17884 - DNA, 15 bp, Homo sapiens
gaattatttgggcca

SEQ ID NO: 17885 - DNA, 15 bp, Homo sapiens
aattatttgggccat

SEQ ID NO: 17886 - DNA, 15 bp, Homo sapiens
attatttgggccatc

SEQ ID NO: 17887 - DNA, 15 bp, Homo sapiens
ttatttgggccatca

SEQ ID NO: 17888 - DNA, 15 bp, Homo sapiens
tatttgggccatcag

SEQ ID NO: 17889 - DNA, 15 bp, Homo sapiens
atttgggccatcagt

SEQ ID NO: 17890 - DNA, 15 bp, Homo sapiens
tttgggccatcagtc

SEQ ID NO: 17891 - DNA, 15 bp, Homo sapiens
ttgggccatcagtca

SEQ ID NO: 17892 - DNA, 15 bp, Homo sapiens
tgggccatcagtcaa

SEQ ID NO: 17893 - DNA, 15 bp, Homo sapiens
gggccatcagtcaag

SEQ ID NO: 17894 - DNA, 15 bp, Homo sapiens
ggccatcagtcaagt

SEQ ID NO: 17895 - DNA, 15 bp, Homo sapiens
gccatcagtcaagtg

SEQ ID NO: 17896 - DNA, 15 bp, Homo sapiens
ccatcagtcaagtgg

SEQ ID NO: 17897 - DNA, 15 bp, Homo sapiens
catcagtcaagtgga

SEQ ID NO: 17898 - DNA, 15 bp, Homo sapiens
atcagtcaagtggag

SEQ ID NO: 17899 - DNA, 15 bp, Homo sapiens
tcagtcaagtggaga

SEQ ID NO: 17900 - DNA, 15 bp, Homo sapiens
cagtcaagtggagat

SEQ ID NO: 17901 - DNA, 15 bp, Homo sapiens
agtcaagtggagatg

SEQ ID NO: 17902 - DNA, 15 bp, Homo sapiens
gtcaagtggagatgc

SEQ ID NO: 17903 - DNA, 15 bp, Homo sapiens
tcaagtggagatgcc

SEQ ID NO: 17904 - DNA, 15 bp, Homo sapiens
caagtggagatgccg

SEQ ID NO: 17905 - DNA, 15 bp, Homo sapiens
aagtggagatgccga

SEQ ID NO: 17906 - DNA, 15 bp, Homo sapiens
agtggagatgccgag

SEQ ID NO: 17907 - DNA, 15 bp, Homo sapiens
gtggagatgccgagt

SEQ ID NO: 17908 - DNA, 15 bp, Homo sapiens
tggagatgccgagtt

SEQ ID NO: 17909 - DNA, 15 bp, Homo sapiens
ggagatgccgagttt

SEQ ID NO: 17910 - DNA, 15 bp, Homo sapiens
gagatgccgagtttg

SEQ ID NO: 17911 - DNA, 15 bp, Homo sapiens
agatgccgagtttgg

SEQ ID NO: 17912 - DNA, 15 bp, Homo sapiens
gatgccgagtttgga

SEQ ID NO: 17913 - DNA, 15 bp, Homo sapiens
atgccgagtttggat

SEQ ID NO: 17914 - DNA, 15 bp, Homo sapiens
tgccgagtttggata

SEQ ID NO: 17915 - DNA, 15 bp, Homo sapiens
gccgagtttggatac

SEQ ID NO: 17916 - DNA, 15 bp, Homo sapiens
ccgagtttggataca

SEQ ID NO: 17917 - DNA, 15 bp, Homo sapiens
cgagtttggatacat

SEQ ID NO: 17918 - DNA, 15 bp, Homo sapiens
gagtttggatacatg

SEQ ID NO: 17919 - DNA, 15 bp, Homo sapiens
agtttggatacatga

SEQ ID NO: 17920 - DNA, 15 bp, Homo sapiens
gtttggatacatgaa

SEQ ID NO: 17921 - DNA, 15 bp, Homo sapiens
tttggatacatgaag

SEQ ID NO: 17922 - DNA, 15 bp, Homo sapiens
ttggatacatgaagc

SEQ ID NO: 17923 - DNA, 15 bp, Homo sapiens
tggatacatgaagct

SEQ ID NO: 17924 - DNA, 15 bp, Homo sapiens
ggatacatgaagcta

SEQ ID NO: 17925 - DNA, 15 bp, Homo sapiens
gatacatgaagctaa

SEQ ID NO: 17926 - DNA, 15 bp, Homo sapiens
atacatgaagctaag

SEQ ID NO: 17927 - DNA, 15 bp, Homo sapiens
tacatgaagctaagg

SEQ ID NO: 17928 - DNA, 15 bp, Homo sapiens
acatgaagctaaggg

SEQ ID NO: 17929 - DNA, 15 bp, Homo sapiens
catgaagctaaggga

SEQ ID NO: 17930 - DNA, 15 bp, Homo sapiens
atgaagctaagggaa

SEQ ID NO: 17931 - DNA, 15 bp, Homo sapiens
tgaagctaagggaag

SEQ ID NO: 17932 - DNA, 15 bp, Homo sapiens
gaagctaagggaaga

SEQ ID NO: 17933 - DNA, 15 bp, Homo sapiens
aagctaagggaagag

SEQ ID NO: 17934 - DNA, 15 bp, Homo sapiens
agctaagggaagagc

SEQ ID NO: 17935 - DNA, 15 bp, Homo sapiens
gctaagggaagagcc

SEQ ID NO: 17936 - DNA, 15 bp, Homo sapiens
ctaagggaagagcca

SEQ ID NO: 17937 - DNA, 15 bp, Homo sapiens
taagggaagagccag

SEQ ID NO: 17938 - DNA, 15 bp, Homo sapiens
aagggaagagccagg

SEQ ID NO: 17939 - DNA, 15 bp, Homo sapiens
agggaagagccagga

SEQ ID NO: 17940 - DNA, 15 bp, Homo sapiens
gggaagagccaggag

SEQ ID NO: 17941 - DNA, 15 bp, Homo sapiens
ggaagagccaggaga

SEQ ID NO: 17942 - DNA, 15 bp, Homo sapiens
gaagagccaggagaa

SEQ ID NO: 17943 - DNA, 15 bp, Homo sapiens
aagagccaggagaaa

SEQ ID NO: 17944 - DNA, 15 bp, Homo sapiens
agagccaggagaaag

SEQ ID NO: 17945 - DNA, 15 bp, Homo sapiens
gagccaggagaaaga

SEQ ID NO: 17946 - DNA, 15 bp, Homo sapiens
agccaggagaaagag

SEQ ID NO: 17947 - DNA, 15 bp, Homo sapiens
gccaggagaaagaga

SEQ ID NO: 17948 - DNA, 15 bp, Homo sapiens
ccaggagaaagagaa

SEQ ID NO: 17949 - DNA, 15 bp, Homo sapiens
caggagaaagagaag

SEQ ID NO: 17950 - DNA, 15 bp, Homo sapiens
aggagaaagagaagg

SEQ ID NO: 17951 - DNA, 15 bp, Homo sapiens
ggagaaagagaaggg

SEQ ID NO: 17952 - DNA, 15 bp, Homo sapiens
gagaaagagaagggc

SEQ ID NO: 17953 - DNA, 15 bp, Homo sapiens
agaaagagaagggcc

SEQ ID NO: 17954 - DNA, 15 bp, Homo sapiens
gaaagagaagggcca

SEQ ID NO: 17955 - DNA, 15 bp, Homo sapiens
aaagagaagggccag

SEQ ID NO: 17956 - DNA, 15 bp, Homo sapiens
aagagaagggccaga

SEQ ID NO: 17957 - DNA, 15 bp, Homo sapiens
agagaagggccagag

SEQ ID NO: 17958 - DNA, 15 bp, Homo sapiens
gagaagggccagaga

SEQ ID NO: 17959 - DNA, 15 bp, Homo sapiens
agaagggccagagag

SEQ ID NO: 17960 - DNA, 15 bp, Homo sapiens
gaagggccagagagt

SEQ ID NO: 17961 - DNA, 15 bp, Homo sapiens
aagggccagagagtt

SEQ ID NO: 17962 - DNA, 15 bp, Homo sapiens
agggccagagagtta

SEQ ID NO: 17963 - DNA, 15 bp, Homo sapiens
gggccagagagttaa

SEQ ID NO: 17964 - DNA, 15 bp, Homo sapiens
ggccagagagttaag

SEQ ID NO: 17965 - DNA, 15 bp, Homo sapiens
gccagagagttaaga

SEQ ID NO: 17966 - DNA, 15 bp, Homo sapiens
ccagagagttaagag

SEQ ID NO: 17967 - DNA, 15 bp, Homo sapiens
cagagagttaagagg

SEQ ID NO: 17968 - DNA, 15 bp, Homo sapiens
agagagttaagagga

SEQ ID NO: 17969 - DNA, 15 bp, Homo sapiens
gagagttaagaggaa

SEQ ID NO: 17970 - DNA, 15 bp, Homo sapiens
agagttaagaggaaa

SEQ ID NO: 17971 - DNA, 15 bp, Homo sapiens
gagttaagaggaaaa

SEQ ID NO: 17972 - DNA, 15 bp, Homo sapiens
agttaagaggaaaac

SEQ ID NO: 17973 - DNA, 15 bp, Homo sapiens
gttaagaggaaaacc

SEQ ID NO: 17974 - DNA, 15 bp, Homo sapiens
ttaagaggaaaacca

SEQ ID NO: 17975 - DNA, 15 bp, Homo sapiens
taagaggaaaaccag

SEQ ID NO: 17976 - DNA, 15 bp, Homo sapiens
aagaggaaaaccagc

SEQ ID NO: 17977 - DNA, 15 bp, Homo sapiens
agaggaaaaccagca

SEQ ID NO: 17978 - DNA, 15 bp, Homo sapiens
gaggaaaaccagcag

SEQ ID NO: 17979 - DNA, 15 bp, Homo sapiens
aggaaaaccagcaga

SEQ ID NO: 17980 - DNA, 15 bp, Homo sapiens
ggaaaaccagcagag

SEQ ID NO: 17981 - DNA, 15 bp, Homo sapiens
gaaaaccagcagagt

SEQ ID NO: 17982 - DNA, 15 bp, Homo sapiens
aaaaccagcagagtg

SEQ ID NO: 17983 - DNA, 15 bp, Homo sapiens
aaaccagcagagtgt

SEQ ID NO: 17984 - DNA, 15 bp, Homo sapiens
aaccagcagagtgtg

SEQ ID NO: 17985 - DNA, 15 bp, Homo sapiens
accagcagagtgtgg

SEQ ID NO: 17986 - DNA, 15 bp, Homo sapiens
ccagcagagtgtggt

SEQ ID NO: 17987 - DNA, 15 bp, Homo sapiens
cagcagagtgtggtc

SEQ ID NO: 17988 - DNA, 15 bp, Homo sapiens
agcagagtgtggtct

SEQ ID NO: 17989 - DNA, 15 bp, Homo sapiens
gcagagtgtggtctc

SEQ ID NO: 17990 - DNA, 15 bp, Homo sapiens
cagagtgtggtctca

SEQ ID NO: 17991 - DNA, 15 bp, Homo sapiens
agagtgtggtctcaa

SEQ ID NO: 17992 - DNA, 15 bp, Homo sapiens
gagtgtggtctcaag

SEQ ID NO: 17993 - DNA, 15 bp, Homo sapiens
agtgtggtctcaagg

SEQ ID NO: 17994 - DNA, 15 bp, Homo sapiens
gtgtggtctcaaggc

SEQ ID NO: 17995 - DNA, 15 bp, Homo sapiens
tgtggtctcaaggca

SEQ ID NO: 17996 - DNA, 15 bp, Homo sapiens
gtggtctcaaggcaa

SEQ ID NO: 17997 - DNA, 15 bp, Homo sapiens
tggtctcaaggcaag

SEQ ID NO: 17998 - DNA, 15 bp, Homo sapiens
ggtctcaaggcaagg

SEQ ID NO: 17999 - DNA, 15 bp, Homo sapiens
gtctcaaggcaaggg

SEQ ID NO: 18000 - DNA, 15 bp, Homo sapiens
tctcaaggcaaggga

SEQ ID NO: 18001 - DNA, 15 bp, Homo sapiens
ctcaaggcaagggaa

SEQ ID NO: 18002 - DNA, 15 bp, Homo sapiens
tcaaggcaagggaag

SEQ ID NO: 18003 - DNA, 15 bp, Homo sapiens
caaggcaagggaaga

SEQ ID NO: 18004 - DNA, 15 bp, Homo sapiens
aaggcaagggaagac

SEQ ID NO: 18005 - DNA, 15 bp, Homo sapiens
aggcaagggaagaca

SEQ ID NO: 18006 - DNA, 15 bp, Homo sapiens
ggcaagggaagacaa

SEQ ID NO: 18007 - DNA, 15 bp, Homo sapiens
gcaagggaagacaaa

SEQ ID NO: 18008 - DNA, 15 bp, Homo sapiens
caagggaagacaaag

SEQ ID NO: 18009 - DNA, 15 bp, Homo sapiens
aagggaagacaaagt

SEQ ID NO: 18010 - DNA, 15 bp, Homo sapiens
agggaagacaaagtg

SEQ ID NO: 18011 - DNA, 15 bp, Homo sapiens
gggaagacaaagtgt

SEQ ID NO: 18012 - DNA, 15 bp, Homo sapiens
ggaagacaaagtgtt

SEQ ID NO: 18013 - DNA, 15 bp, Homo sapiens
gaagacaaagtgttt

SEQ ID NO: 18014 - DNA, 15 bp, Homo sapiens
aagacaaagtgtttt

SEQ ID NO: 18015 - DNA, 15 bp, Homo sapiens
agacaaagtgtttta

SEQ ID NO: 18016 - DNA, 15 bp, Homo sapiens
gacaaagtgttttaa

SEQ ID NO: 18017 - DNA, 15 bp, Homo sapiens
acaaagtgttttaag

SEQ ID NO: 18018 - DNA, 15 bp, Homo sapiens
caaagtgttttaagt

SEQ ID NO: 18019 - DNA, 15 bp, Homo sapiens
aaagtgttttaagta

SEQ ID NO: 18020 - DNA, 15 bp, Homo sapiens
aagtgttttaagtag

SEQ ID NO: 18021 - DNA, 15 bp, Homo sapiens
agtgttttaagtagg

SEQ ID NO: 18022 - DNA, 15 bp, Homo sapiens
gtgttttaagtagga

SEQ ID NO: 18023 - DNA, 15 bp, Homo sapiens
tgttttaagtaggag

SEQ ID NO: 18024 - DNA, 15 bp, Homo sapiens
gttttaagtaggagt

SEQ ID NO: 18025 - DNA, 15 bp, Homo sapiens
ttttaagtaggagtg

SEQ ID NO: 18026 - DNA, 15 bp, Homo sapiens
tttaagtaggagtgg

SEQ ID NO: 18027 - DNA, 15 bp, Homo sapiens
ttaagtaggagtggt

SEQ ID NO: 18028 - DNA, 15 bp, Homo sapiens
taagtaggagtggtc

SEQ ID NO: 18029 - DNA, 15 bp, Homo sapiens
aagtaggagtggtca

SEQ ID NO: 18030 - DNA, 15 bp, Homo sapiens
agtaggagtggtcaa

SEQ ID NO: 18031 - DNA, 15 bp, Homo sapiens
gtaggagtggtcaac

SEQ ID NO: 18032 - DNA, 15 bp, Homo sapiens
taggagtggtcaacc

SEQ ID NO: 18033 - DNA, 15 bp, Homo sapiens
aggagtggtcaacca

SEQ ID NO: 18034 - DNA, 15 bp, Homo sapiens
ggagtggtcaaccac

SEQ ID NO: 18035 - DNA, 15 bp, Homo sapiens
gagtggtcaaccact

SEQ ID NO: 18036 - DNA, 15 bp, Homo sapiens
agtggtcaaccactt

SEQ ID NO: 18037 - DNA, 15 bp, Homo sapiens
gtggtcaaccacttc

SEQ ID NO: 18038 - DNA, 15 bp, Homo sapiens
tggtcaaccacttca

SEQ ID NO: 18039 - DNA, 15 bp, Homo sapiens
ggtcaaccacttcaa

SEQ ID NO: 18040 - DNA, 15 bp, Homo sapiens
gtcaaccacttcaag

SEQ ID NO: 18041 - DNA, 15 bp, Homo sapiens
tcaaccacttcaaga

SEQ ID NO: 18042 - DNA, 15 bp, Homo sapiens
caaccacttcaagag

SEQ ID NO: 18043 - DNA, 15 bp, Homo sapiens
aaccacttcaagagg

SEQ ID NO: 18044 - DNA, 15 bp, Homo sapiens
accacttcaagagga

SEQ ID NO: 18045 - DNA, 15 bp, Homo sapiens
ccacttcaagaggaa

SEQ ID NO: 18046 - DNA, 15 bp, Homo sapiens
cacttcaagaggaaa

SEQ ID NO: 18047 - DNA, 15 bp, Homo sapiens
acttcaagaggaaaa

SEQ ID NO: 18048 - DNA, 15 bp, Homo sapiens
cttcaagaggaaaac

SEQ ID NO: 18049 - DNA, 15 bp, Homo sapiens
ttcaagaggaaaact

SEQ ID NO: 18050 - DNA, 15 bp, Homo sapiens
tcaagaggaaaacta

SEQ ID NO: 18051 - DNA, 15 bp, Homo sapiens
caagaggaaaactaa

SEQ ID NO: 18052 - DNA, 15 bp, Homo sapiens
aagaggaaaactaaa

SEQ ID NO: 18053 - DNA, 15 bp, Homo sapiens
agaggaaaactaaaa

SEQ ID NO: 18054 - DNA, 15 bp, Homo sapiens
gaggaaaactaaaaa

SEQ ID NO: 18055 - DNA, 15 bp, Homo sapiens
aggaaaactaaaaaa

SEQ ID NO: 18056 - DNA, 15 bp, Homo sapiens
ggaaaactaaaaaac

SEQ ID NO: 18057 - DNA, 15 bp, Homo sapiens
gaaaactaaaaaacc

SEQ ID NO: 18058 - DNA, 15 bp, Homo sapiens
aaaactaaaaaacca

SEQ ID NO: 18059 - DNA, 15 bp, Homo sapiens
aaactaaaaaaccac

SEQ ID NO: 18060 - DNA, 15 bp, Homo sapiens
aactaaaaaaccacc

SEQ ID NO: 18061 - DNA, 15 bp, Homo sapiens
actaaaaaaccacct

SEQ ID NO: 18062 - DNA, 15 bp, Homo sapiens
ctaaaaaaccacctg

SEQ ID NO: 18063 - DNA, 15 bp, Homo sapiens
taaaaaaccacctgc

SEQ ID NO: 18064 - DNA, 15 bp, Homo sapiens
aaaaaaccacctgca

SEQ ID NO: 18065 - DNA, 15 bp, Homo sapiens
aaaaaccacctgcag

SEQ ID NO: 18066 - DNA, 15 bp, Homo sapiens
aaaaccacctgcaga

SEQ ID NO: 18067 - DNA, 15 bp, Homo sapiens
aaaccacctgcagaa

SEQ ID NO: 18068 - DNA, 15 bp, Homo sapiens
aaccacctgcagaat

SEQ ID NO: 18069 - DNA, 15 bp, Homo sapiens
accacctgcagaatc

SEQ ID NO: 18070 - DNA, 15 bp, Homo sapiens
ccacctgcagaatct

SEQ ID NO: 18071 - DNA, 15 bp, Homo sapiens
cacctgcagaatctg

SEQ ID NO: 18072 - DNA, 15 bp, Homo sapiens
acctgcagaatctgg

SEQ ID NO: 18073 - DNA, 15 bp, Homo sapiens
cctgcagaatctggc

SEQ ID NO: 18074 - DNA, 15 bp, Homo sapiens
ctgcagaatctggca

SEQ ID NO: 18075 - DNA, 15 bp, Homo sapiens
tgcagaatctggcag

SEQ ID NO: 18076 - DNA, 15 bp, Homo sapiens
gcagaatctggcaga

SEQ ID NO: 18077 - DNA, 15 bp, Homo sapiens
cagaatctggcagat

SEQ ID NO: 18078 - DNA, 15 bp, Homo sapiens
agaatctggcagatg

SEQ ID NO: 18079 - DNA, 15 bp, Homo sapiens
gaatctggcagatgc

SEQ ID NO: 18080 - DNA, 15 bp, Homo sapiens
aatctggcagatgcc

SEQ ID NO: 18081 - DNA, 15 bp, Homo sapiens
atctggcagatgccg

SEQ ID NO: 18082 - DNA, 15 bp, Homo sapiens
tctggcagatgccgg

SEQ ID NO: 18083 - DNA, 15 bp, Homo sapiens
ctggcagatgccggg

SEQ ID NO: 18084 - DNA, 15 bp, Homo sapiens
tggcagatgccgggg

SEQ ID NO: 18085 - DNA, 15 bp, Homo sapiens
ggcagatgccggggg

SEQ ID NO: 18086 - DNA, 15 bp, Homo sapiens
gcagatgccgggggc

SEQ ID NO: 18087 - DNA, 15 bp, Homo sapiens
cagatgccgggggct

SEQ ID NO: 18088 - DNA, 15 bp, Homo sapiens
agatgccgggggcta

SEQ ID NO: 18089 - DNA, 15 bp, Homo sapiens
gatgccgggggctaa

SEQ ID NO: 18090 - DNA, 15 bp, Homo sapiens
atgccgggggctaac

SEQ ID NO: 18091 - DNA, 15 bp, Homo sapiens
tgccgggggctaaca

SEQ ID NO: 18092 - DNA, 15 bp, Homo sapiens
gccgggggctaacac

SEQ ID NO: 18093 - DNA, 15 bp, Homo sapiens
ccgggggctaacact

SEQ ID NO: 18094 - DNA, 15 bp, Homo sapiens
cgggggctaacactt

SEQ ID NO: 18095 - DNA, 15 bp, Homo sapiens
gggggctaacactta

SEQ ID NO: 18096 - DNA, 15 bp, Homo sapiens
ggggctaacacttac

SEQ ID NO: 18097 - DNA, 15 bp, Homo sapiens
gggctaacacttacg

SEQ ID NO: 18098 - DNA, 15 bp, Homo sapiens
ggctaacacttacgg

SEQ ID NO: 18099 - DNA, 15 bp, Homo sapiens
gctaacacttacggg

SEQ ID NO: 18100 - DNA, 15 bp, Homo sapiens
ctaacacttacgggg

SEQ ID NO: 18101 - DNA, 15 bp, Homo sapiens
taacacttacggggg

SEQ ID NO: 18102 - DNA, 15 bp, Homo sapiens
aacacttacgggggt

SEQ ID NO: 18103 - DNA, 15 bp, Homo sapiens
acacttacgggggtg

SEQ ID NO: 18104 - DNA, 15 bp, Homo sapiens
cacttacgggggtga

SEQ ID NO: 18105 - DNA, 15 bp, Homo sapiens
acttacgggggtgag

SEQ ID NO: 18106 - DNA, 15 bp, Homo sapiens
cttacgggggtgagc

SEQ ID NO: 18107 - DNA, 15 bp, Homo sapiens
ttacgggggtgagca

SEQ ID NO: 18108 - DNA, 15 bp, Homo sapiens
tacgggggtgagcaa

SEQ ID NO: 18109 - DNA, 15 bp, Homo sapiens
acgggggtgagcaag

SEQ ID NO: 18110 - DNA, 15 bp, Homo sapiens
cgggggtgagcaagt

SEQ ID NO: 18111 - DNA, 15 bp, Homo sapiens
gggggtgagcaagtg

SEQ ID NO: 18112 - DNA, 15 bp, Homo sapiens
ggggtgagcaagtgc

SEQ ID NO: 18113 - DNA, 15 bp, Homo sapiens
gggtgagcaagtgca

SEQ ID NO: 18114 - DNA, 15 bp, Homo sapiens
ggtgagcaagtgcag

SEQ ID NO: 18115 - DNA, 15 bp, Homo sapiens
gtgagcaagtgcaga

SEQ ID NO: 18116 - DNA, 15 bp, Homo sapiens
tgagcaagtgcagaa

SEQ ID NO: 18117 - DNA, 15 bp, Homo sapiens
gagcaagtgcagaag

SEQ ID NO: 18118 - DNA, 15 bp, Homo sapiens
agcaagtgcagaagg

SEQ ID NO: 18119 - DNA, 15 bp, Homo sapiens
gcaagtgcagaaggc

SEQ ID NO: 18120 - DNA, 15 bp, Homo sapiens
caagtgcagaaggca

SEQ ID NO: 18121 - DNA, 15 bp, Homo sapiens
aagtgcagaaggcaa

SEQ ID NO: 18122 - DNA, 15 bp, Homo sapiens
agtgcagaaggcaag

SEQ ID NO: 18123 - DNA, 15 bp, Homo sapiens
gtgcagaaggcaagt

SEQ ID NO: 18124 - DNA, 15 bp, Homo sapiens
tgcagaaggcaagta

SEQ ID NO: 18125 - DNA, 15 bp, Homo sapiens
gcagaaggcaagtac

SEQ ID NO: 18126 - DNA, 15 bp, Homo sapiens
cagaaggcaagtaca

SEQ ID NO: 18127 - DNA, 15 bp, Homo sapiens
agaaggcaagtacag

SEQ ID NO: 18128 - DNA, 15 bp, Homo sapiens
gaaggcaagtacagg

SEQ ID NO: 18129 - DNA, 15 bp, Homo sapiens
aaggcaagtacaggc

SEQ ID NO: 18130 - DNA, 15 bp, Homo sapiens
aggcaagtacaggca

SEQ ID NO: 18131 - DNA, 15 bp, Homo sapiens
ggcaagtacaggcaa

SEQ ID NO: 18132 - DNA, 15 bp, Homo sapiens
gcaagtacaggcaac

SEQ ID NO: 18133 - DNA, 15 bp, Homo sapiens
caagtacaggcaact

SEQ ID NO: 18134 - DNA, 15 bp, Homo sapiens
aagtacaggcaactc

SEQ ID NO: 18135 - DNA, 15 bp, Homo sapiens
agtacaggcaactct

SEQ ID NO: 18136 - DNA, 15 bp, Homo sapiens
gtacaggcaactctg

SEQ ID NO: 18137 - DNA, 15 bp, Homo sapiens
tacaggcaactctgc

SEQ ID NO: 18138 - DNA, 15 bp, Homo sapiens
acaggcaactctgca

SEQ ID NO: 18139 - DNA, 15 bp, Homo sapiens
caggcaactctgcag

SEQ ID NO: 18140 - DNA, 15 bp, Homo sapiens
aggcaactctgcagg

SEQ ID NO: 18141 - DNA, 15 bp, Homo sapiens
ggcaactctgcaggg

SEQ ID NO: 18142 - DNA, 15 bp, Homo sapiens
gcaactctgcagggg

SEQ ID NO: 18143 - DNA, 15 bp, Homo sapiens
caactctgcaggggt

SEQ ID NO: 18144 - DNA, 15 bp, Homo sapiens
aactctgcaggggtc

SEQ ID NO: 18145 - DNA, 15 bp, Homo sapiens
actctgcaggggtca

SEQ ID NO: 18146 - DNA, 15 bp, Homo sapiens
ctctgcaggggtcag

SEQ ID NO: 18147 - DNA, 15 bp, Homo sapiens
tctgcaggggtcagc

SEQ ID NO: 18148 - DNA, 15 bp, Homo sapiens
ctgcaggggtcagca

SEQ ID NO: 18149 - DNA, 15 bp, Homo sapiens
tgcaggggtcagcag

SEQ ID NO: 18150 - DNA, 15 bp, Homo sapiens
gcaggggtcagcagt

SEQ ID NO: 18151 - DNA, 15 bp, Homo sapiens
caggggtcagcagtg

SEQ ID NO: 18152 - DNA, 15 bp, Homo sapiens
aggggtcagcagtga

SEQ ID NO: 18153 - DNA, 15 bp, Homo sapiens
ggggtcagcagtgaa

SEQ ID NO: 18154 - DNA, 15 bp, Homo sapiens
gggtcagcagtgaag

SEQ ID NO: 18155 - DNA, 15 bp, Homo sapiens
ggtcagcagtgaagg

SEQ ID NO: 18156 - DNA, 15 bp, Homo sapiens
gtcagcagtgaaggg

SEQ ID NO: 18157 - DNA, 15 bp, Homo sapiens
tcagcagtgaagggg

SEQ ID NO: 18158 - DNA, 15 bp, Homo sapiens
cagcagtgaagggga

SEQ ID NO: 18159 - DNA, 15 bp, Homo sapiens
agcagtgaaggggag

SEQ ID NO: 18160 - DNA, 15 bp, Homo sapiens
gcagtgaaggggagg

SEQ ID NO: 18161 - DNA, 15 bp, Homo sapiens
cagtgaaggggaggg

SEQ ID NO: 18162 - DNA, 15 bp, Homo sapiens
agtgaaggggagggt

SEQ ID NO: 18163 - DNA, 15 bp, Homo sapiens
gtgaaggggagggtg

SEQ ID NO: 18164 - DNA, 15 bp, Homo sapiens
tgaaggggagggtga

SEQ ID NO: 18165 - DNA, 15 bp, Homo sapiens
gaaggggagggtgat

SEQ ID NO: 18166 - DNA, 15 bp, Homo sapiens
aaggggagggtgatg

SEQ ID NO: 18167 - DNA, 15 bp, Homo sapiens
aggggagggtgatga

SEQ ID NO: 18168 - DNA, 15 bp, Homo sapiens
ggggagggtgatgag

SEQ ID NO: 18169 - DNA, 15 bp, Homo sapiens
gggagggtgatgagg

SEQ ID NO: 18170 - DNA, 15 bp, Homo sapiens
ggagggtgatgaggt

SEQ ID NO: 18171 - DNA, 15 bp, Homo sapiens
gagggtgatgaggtg

SEQ ID NO: 18172 - DNA, 15 bp, Homo sapiens
agggtgatgaggtgc

SEQ ID NO: 18173 - DNA, 15 bp, Homo sapiens
gggtgatgaggtgct

SEQ ID NO: 18174 - DNA, 15 bp, Homo sapiens
ggtgatgaggtgctg

SEQ ID NO: 18175 - DNA, 15 bp, Homo sapiens
gtgatgaggtgctgg

SEQ ID NO: 18176 - DNA, 15 bp, Homo sapiens
tgatgaggtgctggc

SEQ ID NO: 18177 - DNA, 15 bp, Homo sapiens
gatgaggtgctggcc

SEQ ID NO: 18178 - DNA, 15 bp, Homo sapiens
atgaggtgctggcca

SEQ ID NO: 18179 - DNA, 15 bp, Homo sapiens
tgaggtgctggccag

SEQ ID NO: 18180 - DNA, 15 bp, Homo sapiens
gaggtgctggccaga

SEQ ID NO: 18181 - DNA, 15 bp, Homo sapiens
aggtgctggccagaa

SEQ ID NO: 18182 - DNA, 15 bp, Homo sapiens
ggtgctggccagaag

SEQ ID NO: 18183 - DNA, 15 bp, Homo sapiens
gtgctggccagaagc

SEQ ID NO: 18184 - DNA, 15 bp, Homo sapiens
tgctggccagaagca

SEQ ID NO: 18185 - DNA, 15 bp, Homo sapiens
gctggccagaagcag

SEQ ID NO: 18186 - DNA, 15 bp, Homo sapiens
ctggccagaagcagg

SEQ ID NO: 18187 - DNA, 15 bp, Homo sapiens
tggccagaagcagga

SEQ ID NO: 18188 - DNA, 15 bp, Homo sapiens
ggccagaagcaggag

SEQ ID NO: 18189 - DNA, 15 bp, Homo sapiens
gccagaagcaggagg

SEQ ID NO: 18190 - DNA, 15 bp, Homo sapiens
ccagaagcaggaggg

SEQ ID NO: 18191 - DNA, 15 bp, Homo sapiens
cagaagcaggaggga

SEQ ID NO: 18192 - DNA, 15 bp, Homo sapiens
agaagcaggagggag

SEQ ID NO: 18193 - DNA, 15 bp, Homo sapiens
gaagcaggagggaga

SEQ ID NO: 18194 - DNA, 15 bp, Homo sapiens
aagcaggagggagag

SEQ ID NO: 18195 - DNA, 15 bp, Homo sapiens
agcaggagggagaga

SEQ ID NO: 18196 - DNA, 15 bp, Homo sapiens
gcaggagggagagaa

SEQ ID NO: 18197 - DNA, 15 bp, Homo sapiens
caggagggagagaac

SEQ ID NO: 18198 - DNA, 15 bp, Homo sapiens
aggagggagagaacg

SEQ ID NO: 18199 - DNA, 15 bp, Homo sapiens
ggagggagagaacgt

SEQ ID NO: 18200 - DNA, 15 bp, Homo sapiens
gagggagagaacgtg

SEQ ID NO: 18201 - DNA, 15 bp, Homo sapiens
agggagagaacgtgg

SEQ ID NO: 18202 - DNA, 15 bp, Homo sapiens
gggagagaacgtggg

SEQ ID NO: 18203 - DNA, 15 bp, Homo sapiens
ggagagaacgtgggg

SEQ ID NO: 18204 - DNA, 15 bp, Homo sapiens
gagagaacgtggggt

SEQ ID NO: 18205 - DNA, 15 bp, Homo sapiens
agagaacgtggggtc

SEQ ID NO: 18206 - DNA, 15 bp, Homo sapiens
gagaacgtggggtca

SEQ ID NO: 18207 - DNA, 15 bp, Homo sapiens
agaacgtggggtcag

SEQ ID NO: 18208 - DNA, 15 bp, Homo sapiens
gaacgtggggtcagc

SEQ ID NO: 18209 - DNA, 15 bp, Homo sapiens
aacgtggggtcagcg

SEQ ID NO: 18210 - DNA, 15 bp, Homo sapiens
acgtggggtcagcgg

SEQ ID NO: 18211 - DNA, 15 bp, Homo sapiens
cgtggggtcagcgga

SEQ ID NO: 18212 - DNA, 15 bp, Homo sapiens
gtggggtcagcggag

SEQ ID NO: 18213 - DNA, 15 bp, Homo sapiens
tggggtcagcggaga

SEQ ID NO: 18214 - DNA, 15 bp, Homo sapiens
ggggtcagcggagac

SEQ ID NO: 18215 - DNA, 15 bp, Homo sapiens
gggtcagcggagaca

SEQ ID NO: 18216 - DNA, 15 bp, Homo sapiens
ggtcagcggagacag

SEQ ID NO: 18217 - DNA, 15 bp, Homo sapiens
gtcagcggagacaga

SEQ ID NO: 18218 - DNA, 15 bp, Homo sapiens
tcagcggagacagaa

SEQ ID NO: 18219 - DNA, 15 bp, Homo sapiens
cagcggagacagaag

SEQ ID NO: 18220 - DNA, 15 bp, Homo sapiens
agcggagacagaagg

SEQ ID NO: 18221 - DNA, 15 bp, Homo sapiens
gcggagacagaaggg

SEQ ID NO: 18222 - DNA, 15 bp, Homo sapiens
cggagacagaaggga

SEQ ID NO: 18223 - DNA, 15 bp, Homo sapiens
ggagacagaagggat

SEQ ID NO: 18224 - DNA, 15 bp, Homo sapiens
gagacagaagggatg

SEQ ID NO: 18225 - DNA, 15 bp, Homo sapiens
agacagaagggatgc

SEQ ID NO: 18226 - DNA, 15 bp, Homo sapiens
gacagaagggatgct

SEQ ID NO: 18227 - DNA, 15 bp, Homo sapiens
acagaagggatgctg

SEQ ID NO: 18228 - DNA, 15 bp, Homo sapiens
cagaagggatgctgg

SEQ ID NO: 18229 - DNA, 15 bp, Homo sapiens
agaagggatgctggc

SEQ ID NO: 18230 - DNA, 15 bp, Homo sapiens
gaagggatgctggca

SEQ ID NO: 18231 - DNA, 15 bp, Homo sapiens
aagggatgctggcac

SEQ ID NO: 18232 - DNA, 15 bp, Homo sapiens
agggatgctggcaca

SEQ ID NO: 18233 - DNA, 15 bp, Homo sapiens
gggatgctggcacag

SEQ ID NO: 18234 - DNA, 15 bp, Homo sapiens
ggatgctggcacagg

SEQ ID NO: 18235 - DNA, 15 bp, Homo sapiens
gatgctggcacaggc

SEQ ID NO: 18236 - DNA, 15 bp, Homo sapiens
atgctggcacaggca

SEQ ID NO: 18237 - DNA, 15 bp, Homo sapiens
tgctggcacaggcaa

SEQ ID NO: 18238 - DNA, 15 bp, Homo sapiens
gctggcacaggcaaa

SEQ ID NO: 18239 - DNA, 15 bp, Homo sapiens
ctggcacaggcaaag

SEQ ID NO: 18240 - DNA, 15 bp, Homo sapiens
tggcacaggcaaagg

SEQ ID NO: 18241 - DNA, 15 bp, Homo sapiens
ggcacaggcaaaggt

SEQ ID NO: 18242 - DNA, 15 bp, Homo sapiens
gcacaggcaaaggtg

SEQ ID NO: 18243 - DNA, 15 bp, Homo sapiens
cacaggcaaaggtga

SEQ ID NO: 18244 - DNA, 15 bp, Homo sapiens
acaggcaaaggtgaa

SEQ ID NO: 18245 - DNA, 15 bp, Homo sapiens
caggcaaaggtgaat

SEQ ID NO: 18246 - DNA, 15 bp, Homo sapiens
aggcaaaggtgaata

SEQ ID NO: 18247 - DNA, 15 bp, Homo sapiens
ggcaaaggtgaatag

SEQ ID NO: 18248 - DNA, 15 bp, Homo sapiens
gcaaaggtgaataga

SEQ ID NO: 18249 - DNA, 15 bp, Homo sapiens
caaaggtgaatagag

SEQ ID NO: 18250 - DNA, 15 bp, Homo sapiens
aaaggtgaatagagg

SEQ ID NO: 18251 - DNA, 15 bp, Homo sapiens
aaggtgaatagagga

SEQ ID NO: 18252 - DNA, 15 bp, Homo sapiens
aggtgaatagaggat

SEQ ID NO: 18253 - DNA, 15 bp, Homo sapiens
ggtgaatagaggatc

SEQ ID NO: 18254 - DNA, 15 bp, Homo sapiens
gtgaatagaggatca

SEQ ID NO: 18255 - DNA, 15 bp, Homo sapiens
tgaatagaggatcaa

SEQ ID NO: 18256 - DNA, 15 bp, Homo sapiens
gaatagaggatcaag

SEQ ID NO: 18257 - DNA, 15 bp, Homo sapiens
aatagaggatcaagc

SEQ ID NO: 18258 - DNA, 15 bp, Homo sapiens
atagaggatcaagca

SEQ ID NO: 18259 - DNA, 15 bp, Homo sapiens
tagaggatcaagcaa

SEQ ID NO: 18260 - DNA, 15 bp, Homo sapiens
agaggatcaagcaag

SEQ ID NO: 18261 - DNA, 15 bp, Homo sapiens
gaggatcaagcaagg

SEQ ID NO: 18262 - DNA, 15 bp, Homo sapiens
aggatcaagcaagga

SEQ ID NO: 18263 - DNA, 15 bp, Homo sapiens
ggatcaagcaaggag

SEQ ID NO: 18264 - DNA, 15 bp, Homo sapiens
gatcaagcaaggagg

SEQ ID NO: 18265 - DNA, 15 bp, Homo sapiens
atcaagcaaggaggg

SEQ ID NO: 18266 - DNA, 15 bp, Homo sapiens
tcaagcaaggagggc

SEQ ID NO: 18267 - DNA, 15 bp, Homo sapiens
caagcaaggagggca

SEQ ID NO: 18268 - DNA, 15 bp, Homo sapiens
aagcaaggagggcag

SEQ ID NO: 18269 - DNA, 15 bp, Homo sapiens
agcaaggagggcagc

SEQ ID NO: 18270 - DNA, 15 bp, Homo sapiens
gcaaggagggcagca

SEQ ID NO: 18271 - DNA, 15 bp, Homo sapiens
caaggagggcagcag

SEQ ID NO: 18272 - DNA, 15 bp, Homo sapiens
aaggagggcagcaga

SEQ ID NO: 18273 - DNA, 15 bp, Homo sapiens
aggagggcagcagaa

SEQ ID NO: 18274 - DNA, 15 bp, Homo sapiens
ggagggcagcagaaa

SEQ ID NO: 18275 - DNA, 15 bp, Homo sapiens
gagggcagcagaaaa

SEQ ID NO: 18276 - DNA, 15 bp, Homo sapiens
agggcagcagaaaac

SEQ ID NO: 18277 - DNA, 15 bp, Homo sapiens
gggcagcagaaaacc

SEQ ID NO: 18278 - DNA, 15 bp, Homo sapiens
ggcagcagaaaacct

SEQ ID NO: 18279 - DNA, 15 bp, Homo sapiens
gcagcagaaaacctg

SEQ ID NO: 18280 - DNA, 15 bp, Homo sapiens
cagcagaaaacctgc

SEQ ID NO: 18281 - DNA, 15 bp, Homo sapiens
agcagaaaacctgcc

SEQ ID NO: 18282 - DNA, 15 bp, Homo sapiens
gcagaaaacctgcca

SEQ ID NO: 18283 - DNA, 15 bp, Homo sapiens
cagaaaacctgccag

SEQ ID NO: 18284 - DNA, 15 bp, Homo sapiens
agaaaacctgccagg

SEQ ID NO: 18285 - DNA, 15 bp, Homo sapiens
gaaaacctgccagga

SEQ ID NO: 18286 - DNA, 15 bp, Homo sapiens
aaaacctgccaggag

SEQ ID NO: 18287 - DNA, 15 bp, Homo sapiens
aaacctgccaggaga

SEQ ID NO: 18288 - DNA, 15 bp, Homo sapiens
aacctgccaggagag

SEQ ID NO: 18289 - DNA, 15 bp, Homo sapiens
acctgccaggagaga

SEQ ID NO: 18290 - DNA, 15 bp, Homo sapiens
cctgccaggagagaa

SEQ ID NO: 18291 - DNA, 15 bp, Homo sapiens
ctgccaggagagaaa

SEQ ID NO: 18292 - DNA, 15 bp, Homo sapiens
tgccaggagagaaaa

SEQ ID NO: 18293 - DNA, 15 bp, Homo sapiens
gccaggagagaaaag

SEQ ID NO: 18294 - DNA, 15 bp, Homo sapiens
ccaggagagaaaagg

SEQ ID NO: 18295 - DNA, 15 bp, Homo sapiens
caggagagaaaaggt

SEQ ID NO: 18296 - DNA, 15 bp, Homo sapiens
aggagagaaaaggtg

SEQ ID NO: 18297 - DNA, 15 bp, Homo sapiens
ggagagaaaaggtga

SEQ ID NO: 18298 - DNA, 15 bp, Homo sapiens
gagagaaaaggtgac

SEQ ID NO: 18299 - DNA, 15 bp, Homo sapiens
agagaaaaggtgact

SEQ ID NO: 18300 - DNA, 15 bp, Homo sapiens
gagaaaaggtgactg

SEQ ID NO: 18301 - DNA, 15 bp, Homo sapiens
agaaaaggtgactga

SEQ ID NO: 18302 - DNA, 15 bp, Homo sapiens
gaaaaggtgactgat

SEQ ID NO: 18303 - DNA, 15 bp, Homo sapiens
aaaaggtgactgatg

SEQ ID NO: 18304 - DNA, 15 bp, Homo sapiens
aaaggtgactgatga

SEQ ID NO: 18305 - DNA, 15 bp, Homo sapiens
aaggtgactgatgat

SEQ ID NO: 18306 - DNA, 15 bp, Homo sapiens
aggtgactgatgatg

SEQ ID NO: 18307 - DNA, 15 bp, Homo sapiens
ggtgactgatgatgt

SEQ ID NO: 18308 - DNA, 15 bp, Homo sapiens
gtgactgatgatgtc

SEQ ID NO: 18309 - DNA, 15 bp, Homo sapiens
tgactgatgatgtca

SEQ ID NO: 18310 - DNA, 15 bp, Homo sapiens
gactgatgatgtcag

SEQ ID NO: 18311 - DNA, 15 bp, Homo sapiens
actgatgatgtcaga

SEQ ID NO: 18312 - DNA, 15 bp, Homo sapiens
ctgatgatgtcagat

SEQ ID NO: 18313 - DNA, 15 bp, Homo sapiens
tgatgatgtcagatt

SEQ ID NO: 18314 - DNA, 15 bp, Homo sapiens
gatgatgtcagattc

SEQ ID NO: 18315 - DNA, 15 bp, Homo sapiens
atgatgtcagattct

SEQ ID NO: 18316 - DNA, 15 bp, Homo sapiens
tgatgtcagattcta

SEQ ID NO: 18317 - DNA, 15 bp, Homo sapiens
gatgtcagattctag

SEQ ID NO: 18318 - DNA, 15 bp, Homo sapiens
atgtcagattctaga

SEQ ID NO: 18319 - DNA, 15 bp, Homo sapiens
tgtcagattctagag

SEQ ID NO: 18320 - DNA, 15 bp, Homo sapiens
gtcagattctagagc

SEQ ID NO: 18321 - DNA, 15 bp, Homo sapiens
tcagattctagagca

SEQ ID NO: 18322 - DNA, 15 bp, Homo sapiens
cagattctagagcaa

SEQ ID NO: 18323 - DNA, 15 bp, Homo sapiens
agattctagagcaag

SEQ ID NO: 18324 - DNA, 15 bp, Homo sapiens
gattctagagcaagt

SEQ ID NO: 18325 - DNA, 15 bp, Homo sapiens
attctagagcaagta

SEQ ID NO: 18326 - DNA, 15 bp, Homo sapiens
ttctagagcaagtag

SEQ ID NO: 18327 - DNA, 15 bp, Homo sapiens
tctagagcaagtagc

SEQ ID NO: 18328 - DNA, 15 bp, Homo sapiens
ctagagcaagtagca

SEQ ID NO: 18329 - DNA, 15 bp, Homo sapiens
tagagcaagtagcag

SEQ ID NO: 18330 - DNA, 15 bp, Homo sapiens
agagcaagtagcaga

SEQ ID NO: 18331 - DNA, 15 bp, Homo sapiens
gagcaagtagcagaa

SEQ ID NO: 18332 - DNA, 15 bp, Homo sapiens
agcaagtagcagaaa

SEQ ID NO: 18333 - DNA, 15 bp, Homo sapiens
gcaagtagcagaaac

SEQ ID NO: 18334 - DNA, 15 bp, Homo sapiens
caagtagcagaaact

SEQ ID NO: 18335 - DNA, 15 bp, Homo sapiens
aagtagcagaaactg

SEQ ID NO: 18336 - DNA, 15 bp, Homo sapiens
agtagcagaaactgg

SEQ ID NO: 18337 - DNA, 15 bp, Homo sapiens
gtagcagaaactggg

SEQ ID NO: 18338 - DNA, 15 bp, Homo sapiens
tagcagaaactggga

SEQ ID NO: 18339 - DNA, 15 bp, Homo sapiens
agcagaaactgggac

SEQ ID NO: 18340 - DNA, 15 bp, Homo sapiens
gcagaaactgggacc

SEQ ID NO: 18341 - DNA, 15 bp, Homo sapiens
cagaaactgggaccc

SEQ ID NO: 18342 - DNA, 15 bp, Homo sapiens
agaaactgggaccca

SEQ ID NO: 18343 - DNA, 15 bp, Homo sapiens
gaaactgggacccag

SEQ ID NO: 18344 - DNA, 15 bp, Homo sapiens
aaactgggacccaga

SEQ ID NO: 18345 - DNA, 15 bp, Homo sapiens
aactgggacccagag

SEQ ID NO: 18346 - DNA, 15 bp, Homo sapiens
actgggacccagagc

SEQ ID NO: 18347 - DNA, 15 bp, Homo sapiens
ctgggacccagagca

SEQ ID NO: 18348 - DNA, 15 bp, Homo sapiens
tgggacccagagcac

SEQ ID NO: 18349 - DNA, 15 bp, Homo sapiens
gggacccagagcaca

SEQ ID NO: 18350 - DNA, 15 bp, Homo sapiens
ggacccagagcacag

SEQ ID NO: 18351 - DNA, 15 bp, Homo sapiens
gacccagagcacagg

SEQ ID NO: 18352 - DNA, 15 bp, Homo sapiens
acccagagcacagga

SEQ ID NO: 18353 - DNA, 15 bp, Homo sapiens
cccagagcacaggag

SEQ ID NO: 18354 - DNA, 15 bp, Homo sapiens
ccagagcacaggagg

SEQ ID NO: 18355 - DNA, 15 bp, Homo sapiens
cagagcacaggaggg

SEQ ID NO: 18356 - DNA, 15 bp, Homo sapiens
agagcacaggaggga

SEQ ID NO: 18357 - DNA, 15 bp, Homo sapiens
gagcacaggagggag

SEQ ID NO: 18358 - DNA, 15 bp, Homo sapiens
agcacaggagggaga

SEQ ID NO: 18359 - DNA, 15 bp, Homo sapiens
gcacaggagggagaa

SEQ ID NO: 18360 - DNA, 15 bp, Homo sapiens
cacaggagggagaag

SEQ ID NO: 18361 - DNA, 15 bp, Homo sapiens
acaggagggagaagt

SEQ ID NO: 18362 - DNA, 15 bp, Homo sapiens
caggagggagaagtg

SEQ ID NO: 18363 - DNA, 15 bp, Homo sapiens
aggagggagaagtgg

SEQ ID NO: 18364 - DNA, 15 bp, Homo sapiens
ggagggagaagtggc

SEQ ID NO: 18365 - DNA, 15 bp, Homo sapiens
gagggagaagtggcc

SEQ ID NO: 18366 - DNA, 15 bp, Homo sapiens
agggagaagtggcct

SEQ ID NO: 18367 - DNA, 15 bp, Homo sapiens
gggagaagtggcctg

SEQ ID NO: 18368 - DNA, 15 bp, Homo sapiens
ggagaagtggcctga

SEQ ID NO: 18369 - DNA, 15 bp, Homo sapiens
gagaagtggcctgag

SEQ ID NO: 18370 - DNA, 15 bp, Homo sapiens
agaagtggcctgagc

SEQ ID NO: 18371 - DNA, 15 bp, Homo sapiens
gaagtggcctgagca

SEQ ID NO: 18372 - DNA, 15 bp, Homo sapiens
aagtggcctgagcaa

SEQ ID NO: 18373 - DNA, 15 bp, Homo sapiens
agtggcctgagcaag

SEQ ID NO: 18374 - DNA, 15 bp, Homo sapiens
gtggcctgagcaaga

SEQ ID NO: 18375 - DNA, 15 bp, Homo sapiens
tggcctgagcaagaa

SEQ ID NO: 18376 - DNA, 15 bp, Homo sapiens
ggcctgagcaagaag

SEQ ID NO: 18377 - DNA, 15 bp, Homo sapiens
gcctgagcaagaagg

SEQ ID NO: 18378 - DNA, 15 bp, Homo sapiens
cctgagcaagaaggg

SEQ ID NO: 18379 - DNA, 15 bp, Homo sapiens
ctgagcaagaaggga

SEQ ID NO: 18380 - DNA, 15 bp, Homo sapiens
tgagcaagaagggac

SEQ ID NO: 18381 - DNA, 15 bp, Homo sapiens
gagcaagaagggact

SEQ ID NO: 18382 - DNA, 15 bp, Homo sapiens
agcaagaagggactc

SEQ ID NO: 18383 - DNA, 15 bp, Homo sapiens
gcaagaagggactcc

SEQ ID NO: 18384 - DNA, 15 bp, Homo sapiens
caagaagggactcct

SEQ ID NO: 18385 - DNA, 15 bp, Homo sapiens
aagaagggactcctc

SEQ ID NO: 18386 - DNA, 15 bp, Homo sapiens
agaagggactcctcg

SEQ ID NO: 18387 - DNA, 15 bp, Homo sapiens
gaagggactcctcgt

SEQ ID NO: 18388 - DNA, 15 bp, Homo sapiens
aagggactcctcgtc

SEQ ID NO: 18389 - DNA, 15 bp, Homo sapiens
agggactcctcgtca

SEQ ID NO: 18390 - DNA, 15 bp, Homo sapiens
gggactcctcgtcat

SEQ ID NO: 18391 - DNA, 15 bp, Homo sapiens
ggactcctcgtcatc

SEQ ID NO: 18392 - DNA, 15 bp, Homo sapiens
gactcctcgtcatct

SEQ ID NO: 18393 - DNA, 15 bp, Homo sapiens
actcctcgtcatctg

SEQ ID NO: 18394 - DNA, 15 bp, Homo sapiens
ctcctcgtcatctgt

SEQ ID NO: 18395 - DNA, 15 bp, Homo sapiens
tcctcgtcatctgta

SEQ ID NO: 18396 - DNA, 15 bp, Homo sapiens
cctcgtcatctgtaa

SEQ ID NO: 18397 - DNA, 15 bp, Homo sapiens
ctcgtcatctgtaac

SEQ ID NO: 18398 - DNA, 15 bp, Homo sapiens
tcgtcatctgtaaca

SEQ ID NO: 18399 - DNA, 15 bp, Homo sapiens
cgtcatctgtaacac

SEQ ID NO: 18400 - DNA, 15 bp, Homo sapiens
gtcatctgtaacaca

SEQ ID NO: 18401 - DNA, 15 bp, Homo sapiens
tcatctgtaacacag

SEQ ID NO: 18402 - DNA, 15 bp, Homo sapiens
catctgtaacacagg

SEQ ID NO: 18403 - DNA, 15 bp, Homo sapiens
atctgtaacacaggg

SEQ ID NO: 18404 - DNA, 15 bp, Homo sapiens
tctgtaacacagggg

SEQ ID NO: 18405 - DNA, 15 bp, Homo sapiens
ctgtaacacagggga

SEQ ID NO: 18406 - DNA, 15 bp, Homo sapiens
tgtaacacaggggag

SEQ ID NO: 18407 - DNA, 15 bp, Homo sapiens
gtaacacaggggagg

SEQ ID NO: 18408 - DNA, 15 bp, Homo sapiens
taacacaggggaggg

SEQ ID NO: 18409 - DNA, 15 bp, Homo sapiens
aacacaggggaggga

SEQ ID NO: 18410 - DNA, 15 bp, Homo sapiens
acacaggggagggaa

SEQ ID NO: 18411 - DNA, 15 bp, Homo sapiens
cacaggggagggaaa

SEQ ID NO: 18412 - DNA, 15 bp, Homo sapiens
acaggggagggaaat

SEQ ID NO: 18413 - DNA, 15 bp, Homo sapiens
caggggagggaaatc

SEQ ID NO: 18414 - DNA, 15 bp, Homo sapiens
aggggagggaaatca

SEQ ID NO: 18415 - DNA, 15 bp, Homo sapiens
ggggagggaaatcag

SEQ ID NO: 18416 - DNA, 15 bp, Homo sapiens
gggagggaaatcagc

SEQ ID NO: 18417 - DNA, 15 bp, Homo sapiens
ggagggaaatcagcg

SEQ ID NO: 18418 - DNA, 15 bp, Homo sapiens
gagggaaatcagcgt

SEQ ID NO: 18419 - DNA, 15 bp, Homo sapiens
agggaaatcagcgtg

SEQ ID NO: 18420 - DNA, 15 bp, Homo sapiens
gggaaatcagcgtgc

SEQ ID NO: 18421 - DNA, 15 bp, Homo sapiens
ggaaatcagcgtgca

SEQ ID NO: 18422 - DNA, 15 bp, Homo sapiens
gaaatcagcgtgcag

SEQ ID NO: 18423 - DNA, 15 bp, Homo sapiens
aaatcagcgtgcaga

SEQ ID NO: 18424 - DNA, 15 bp, Homo sapiens
aatcagcgtgcagac

SEQ ID NO: 18425 - DNA, 15 bp, Homo sapiens
atcagcgtgcagact

SEQ ID NO: 18426 - DNA, 15 bp, Homo sapiens
tcagcgtgcagactt

SEQ ID NO: 18427 - DNA, 15 bp, Homo sapiens
cagcgtgcagacttg

SEQ ID NO: 18428 - DNA, 15 bp, Homo sapiens
agcgtgcagacttgg

SEQ ID NO: 18429 - DNA, 15 bp, Homo sapiens
gcgtgcagacttggg

SEQ ID NO: 18430 - DNA, 15 bp, Homo sapiens
cgtgcagacttgggg

SEQ ID NO: 18431 - DNA, 15 bp, Homo sapiens
gtgcagacttggggg

SEQ ID NO: 18432 - DNA, 15 bp, Homo sapiens
tgcagacttgggggc

SEQ ID NO: 18433 - DNA, 15 bp, Homo sapiens
gcagacttgggggcc

SEQ ID NO: 18434 - DNA, 15 bp, Homo sapiens
cagacttgggggcca

SEQ ID NO: 18435 - DNA, 15 bp, Homo sapiens
agacttgggggccac

SEQ ID NO: 18436 - DNA, 15 bp, Homo sapiens
gacttgggggccaca

SEQ ID NO: 18437 - DNA, 15 bp, Homo sapiens
acttgggggccacaa

SEQ ID NO: 18438 - DNA, 15 bp, Homo sapiens
cttgggggccacaag

SEQ ID NO: 18439 - DNA, 15 bp, Homo sapiens
ttgggggccacaagt

SEQ ID NO: 18440 - DNA, 15 bp, Homo sapiens
tgggggccacaagtt

SEQ ID NO: 18441 - DNA, 15 bp, Homo sapiens
gggggccacaagtta

SEQ ID NO: 18442 - DNA, 15 bp, Homo sapiens
ggggccacaagttat

SEQ ID NO: 18443 - DNA, 15 bp, Homo sapiens
gggccacaagttata

SEQ ID NO: 18444 - DNA, 15 bp, Homo sapiens
ggccacaagttatag

SEQ ID NO: 18445 - DNA, 15 bp, Homo sapiens
gccacaagttatagg

SEQ ID NO: 18446 - DNA, 15 bp, Homo sapiens
ccacaagttataggg

SEQ ID NO: 18447 - DNA, 15 bp, Homo sapiens
cacaagttataggga

SEQ ID NO: 18448 - DNA, 15 bp, Homo sapiens
acaagttatagggag

SEQ ID NO: 18449 - DNA, 15 bp, Homo sapiens
caagttatagggagt

SEQ ID NO: 18450 - DNA, 15 bp, Homo sapiens
aagttatagggagtt

SEQ ID NO: 18451 - DNA, 15 bp, Homo sapiens
agttatagggagttc

SEQ ID NO: 18452 - DNA, 15 bp, Homo sapiens
gttatagggagttcc

SEQ ID NO: 18453 - DNA, 15 bp, Homo sapiens
ttatagggagttcca

SEQ ID NO: 18454 - DNA, 15 bp, Homo sapiens
tatagggagttccat

SEQ ID NO: 18455 - DNA, 15 bp, Homo sapiens
atagggagttccatt

SEQ ID NO: 18456 - DNA, 15 bp, Homo sapiens
tagggagttccattc

SEQ ID NO: 18457 - DNA, 15 bp, Homo sapiens
agggagttccattct

SEQ ID NO: 18458 - DNA, 15 bp, Homo sapiens
gggagttccattctt

SEQ ID NO: 18459 - DNA, 15 bp, Homo sapiens
ggagttccattctta

SEQ ID NO: 18460 - DNA, 15 bp, Homo sapiens
gagttccattcttat

SEQ ID NO: 18461 - DNA, 15 bp, Homo sapiens
agttccattcttatg

SEQ ID NO: 18462 - DNA, 15 bp, Homo sapiens
gttccattcttatgg

SEQ ID NO: 18463 - DNA, 15 bp, Homo sapiens
ttccattcttatggc

SEQ ID NO: 18464 - DNA, 15 bp, Homo sapiens
tccattcttatggct

SEQ ID NO: 18465 - DNA, 15 bp, Homo sapiens
ccattcttatggctt

SEQ ID NO: 18466 - DNA, 15 bp, Homo sapiens
cattcttatggcttc

SEQ ID NO: 18467 - DNA, 15 bp, Homo sapiens
attcttatggcttct

SEQ ID NO: 18468 - DNA, 15 bp, Homo sapiens
ttcttatggcttctg

SEQ ID NO: 18469 - DNA, 15 bp, Homo sapiens
tcttatggcttctgt

SEQ ID NO: 18470 - DNA, 15 bp, Homo sapiens
cttatggcttctgtt

SEQ ID NO: 18471 - DNA, 15 bp, Homo sapiens
ttatggcttctgttt

SEQ ID NO: 18472 - DNA, 15 bp, Homo sapiens
tatggcttctgtttt

SEQ ID NO: 18473 - DNA, 15 bp, Homo sapiens
atggcttctgttttg

SEQ ID NO: 18474 - DNA, 15 bp, Homo sapiens
tggcttctgttttgt

SEQ ID NO: 18475 - DNA, 15 bp, Homo sapiens
ggcttctgttttgtt

SEQ ID NO: 18476 - DNA, 15 bp, Homo sapiens
gcttctgttttgttt

SEQ ID NO: 18477 - DNA, 15 bp, Homo sapiens
cttctgttttgtttt

SEQ ID NO: 18478 - DNA, 15 bp, Homo sapiens
ttctgttttgttttt

SEQ ID NO: 18479 - DNA, 15 bp, Homo sapiens
tctgttttgtttttt

SEQ ID NO: 18480 - DNA, 15 bp, Homo sapiens
ctgttttgttttttg

SEQ ID NO: 18481 - DNA, 15 bp, Homo sapiens
tgttttgttttttga

SEQ ID NO: 18482 - DNA, 15 bp, Homo sapiens
gttttgttttttgaa

SEQ ID NO: 18483 - DNA, 15 bp, Homo sapiens
ttttgttttttgaag

SEQ ID NO: 18484 - DNA, 15 bp, Homo sapiens
tttgttttttgaagc

SEQ ID NO: 18485 - DNA, 15 bp, Homo sapiens
ttgttttttgaagca

SEQ ID NO: 18486 - DNA, 15 bp, Homo sapiens
tgttttttgaagcag

SEQ ID NO: 18487 - DNA, 15 bp, Homo sapiens
gttttttgaagcagg

SEQ ID NO: 18488 - DNA, 15 bp, Homo sapiens
ttttttgaagcagga

SEQ ID NO: 18489 - DNA, 15 bp, Homo sapiens
tttttgaagcaggag

SEQ ID NO: 18490 - DNA, 15 bp, Homo sapiens
ttttgaagcaggaga

SEQ ID NO: 18491 - DNA, 15 bp, Homo sapiens
tttgaagcaggagag

SEQ ID NO: 18492 - DNA, 15 bp, Homo sapiens
ttgaagcaggagaga

SEQ ID NO: 18493 - DNA, 15 bp, Homo sapiens
tgaagcaggagagaa

SEQ ID NO: 18494 - DNA, 15 bp, Homo sapiens
gaagcaggagagaaa

SEQ ID NO: 18495 - DNA, 15 bp, Homo sapiens
aagcaggagagaaag

SEQ ID NO: 18496 - DNA, 15 bp, Homo sapiens
agcaggagagaaagt

SEQ ID NO: 18497 - DNA, 15 bp, Homo sapiens
gcaggagagaaagtc

SEQ ID NO: 18498 - DNA, 15 bp, Homo sapiens
caggagagaaagtct

SEQ ID NO: 18499 - DNA, 15 bp, Homo sapiens
aggagagaaagtctg

SEQ ID NO: 18500 - DNA, 15 bp, Homo sapiens
ggagagaaagtctga

SEQ ID NO: 18501 - DNA, 15 bp, Homo sapiens
gagagaaagtctgaa

SEQ ID NO: 18502 - DNA, 15 bp, Homo sapiens
agagaaagtctgaag

SEQ ID NO: 18503 - DNA, 15 bp, Homo sapiens
gagaaagtctgaagg

SEQ ID NO: 18504 - DNA, 15 bp, Homo sapiens
agaaagtctgaaggt

SEQ ID NO: 18505 - DNA, 15 bp, Homo sapiens
gaaagtctgaaggta

SEQ ID NO: 18506 - DNA, 15 bp, Homo sapiens
aaagtctgaaggtaa

SEQ ID NO: 18507 - DNA, 15 bp, Homo sapiens
aagtctgaaggtaaa

SEQ ID NO: 18508 - DNA, 15 bp, Homo sapiens
agtctgaaggtaaag

SEQ ID NO: 18509 - DNA, 15 bp, Homo sapiens
gtctgaaggtaaaga

SEQ ID NO: 18510 - DNA, 15 bp, Homo sapiens
tctgaaggtaaagaa

SEQ ID NO: 18511 - DNA, 15 bp, Homo sapiens
ctgaaggtaaagaac

SEQ ID NO: 18512 - DNA, 15 bp, Homo sapiens
tgaaggtaaagaaca

SEQ ID NO: 18513 - DNA, 15 bp, Homo sapiens
gaaggtaaagaacat

SEQ ID NO: 18514 - DNA, 15 bp, Homo sapiens
aaggtaaagaacatt

SEQ ID NO: 18515 - DNA, 15 bp, Homo sapiens
aggtaaagaacattt

SEQ ID NO: 18516 - DNA, 15 bp, Homo sapiens
ggtaaagaacatttg

SEQ ID NO: 18517 - DNA, 15 bp, Homo sapiens
gtaaagaacatttga

SEQ ID NO: 18518 - DNA, 15 bp, Homo sapiens
taaagaacatttgaa

SEQ ID NO: 18519 - DNA, 15 bp, Homo sapiens
aaagaacatttgaaa

SEQ ID NO: 18520 - DNA, 15 bp, Homo sapiens
aagaacatttgaaag

SEQ ID NO: 18521 - DNA, 15 bp, Homo sapiens
agaacatttgaaaga

SEQ ID NO: 18522 - DNA, 15 bp, Homo sapiens
gaacatttgaaagag

SEQ ID NO: 18523 - DNA, 15 bp, Homo sapiens
aacatttgaaagagt

SEQ ID NO: 18524 - DNA, 15 bp, Homo sapiens
acatttgaaagagtc

SEQ ID NO: 18525 - DNA, 15 bp, Homo sapiens
catttgaaagagtca

SEQ ID NO: 18526 - DNA, 15 bp, Homo sapiens
atttgaaagagtcac

SEQ ID NO: 18527 - DNA, 15 bp, Homo sapiens
tttgaaagagtcact

SEQ ID NO: 18528 - DNA, 15 bp, Homo sapiens
ttgaaagagtcactt

SEQ ID NO: 18529 - DNA, 15 bp, Homo sapiens
tgaaagagtcacttc

SEQ ID NO: 18530 - DNA, 15 bp, Homo sapiens
gaaagagtcacttca

SEQ ID NO: 18531 - DNA, 15 bp, Homo sapiens
aaagagtcacttcag

SEQ ID NO: 18532 - DNA, 15 bp, Homo sapiens
aagagtcacttcaga

SEQ ID NO: 18533 - DNA, 15 bp, Homo sapiens
agagtcacttcagag

SEQ ID NO: 18534 - DNA, 15 bp, Homo sapiens
gagtcacttcagagg

SEQ ID NO: 18535 - DNA, 15 bp, Homo sapiens
agtcacttcagagga

SEQ ID NO: 18536 - DNA, 15 bp, Homo sapiens
gtcacttcagaggag

SEQ ID NO: 18537 - DNA, 15 bp, Homo sapiens
tcacttcagaggaga

SEQ ID NO: 18538 - DNA, 15 bp, Homo sapiens
cacttcagaggagaa

SEQ ID NO: 18539 - DNA, 15 bp, Homo sapiens
acttcagaggagaaa

SEQ ID NO: 18540 - DNA, 15 bp, Homo sapiens
cttcagaggagaaac

SEQ ID NO: 18541 - DNA, 15 bp, Homo sapiens
ttcagaggagaaacg

SEQ ID NO: 18542 - DNA, 15 bp, Homo sapiens
tcagaggagaaacga

SEQ ID NO: 18543 - DNA, 15 bp, Homo sapiens
cagaggagaaacgag

SEQ ID NO: 18544 - DNA, 15 bp, Homo sapiens
agaggagaaacgagt

SEQ ID NO: 18545 - DNA, 15 bp, Homo sapiens
gaggagaaacgagtg

SEQ ID NO: 18546 - DNA, 15 bp, Homo sapiens
aggagaaacgagtgg

SEQ ID NO: 18547 - DNA, 15 bp, Homo sapiens
ggagaaacgagtgga

SEQ ID NO: 18548 - DNA, 15 bp, Homo sapiens
gagaaacgagtggat

SEQ ID NO: 18549 - DNA, 15 bp, Homo sapiens
agaaacgagtggatc

SEQ ID NO: 18550 - DNA, 15 bp, Homo sapiens
gaaacgagtggatca

SEQ ID NO: 18551 - DNA, 15 bp, Homo sapiens
aaacgagtggatcaa

SEQ ID NO: 18552 - DNA, 15 bp, Homo sapiens
aacgagtggatcaaa

SEQ ID NO: 18553 - DNA, 15 bp, Homo sapiens
acgagtggatcaaaa

SEQ ID NO: 18554 - DNA, 15 bp, Homo sapiens
cgagtggatcaaaaa

SEQ ID NO: 18555 - DNA, 15 bp, Homo sapiens
gagtggatcaaaaaa

SEQ ID NO: 18556 - DNA, 15 bp, Homo sapiens
agtggatcaaaaaaa

SEQ ID NO: 18557 - DNA, 15 bp, Homo sapiens
gtggatcaaaaaaat

SEQ ID NO: 18558 - DNA, 15 bp, Homo sapiens
tggatcaaaaaaata

SEQ ID NO: 18559 - DNA, 15 bp, Homo sapiens
ggatcaaaaaaatat

SEQ ID NO: 18560 - DNA, 15 bp, Homo sapiens
gatcaaaaaaatata

SEQ ID NO: 18561 - DNA, 15 bp, Homo sapiens
atcaaaaaaatatag

SEQ ID NO: 18562 - DNA, 15 bp, Homo sapiens
tcaaaaaaatatagt

SEQ ID NO: 18563 - DNA, 15 bp, Homo sapiens
caaaaaaatatagta

SEQ ID NO: 18564 - DNA, 15 bp, Homo sapiens
aaaaaaatatagtag

SEQ ID NO: 18565 - DNA, 15 bp, Homo sapiens
aaaaaatatagtaga

SEQ ID NO: 18566 - DNA, 15 bp, Homo sapiens
aaaaatatagtagaa

SEQ ID NO: 18567 - DNA, 15 bp, Homo sapiens
aaaatatagtagaac

SEQ ID NO: 18568 - DNA, 15 bp, Homo sapiens
aaatatagtagaact

SEQ ID NO: 18569 - DNA, 15 bp, Homo sapiens
aatatagtagaactg

SEQ ID NO: 18570 - DNA, 15 bp, Homo sapiens
atatagtagaactgc

SEQ ID NO: 18571 - DNA, 15 bp, Homo sapiens
tatagtagaactgct

SEQ ID NO: 18572 - DNA, 15 bp, Homo sapiens
atagtagaactgcta

SEQ ID NO: 18573 - DNA, 15 bp, Homo sapiens
tagtagaactgctag

SEQ ID NO: 18574 - DNA, 15 bp, Homo sapiens
agtagaactgctagg

SEQ ID NO: 18575 - DNA, 15 bp, Homo sapiens
gtagaactgctaggc

SEQ ID NO: 18576 - DNA, 15 bp, Homo sapiens
tagaactgctaggca

SEQ ID NO: 18577 - DNA, 15 bp, Homo sapiens
agaactgctaggcag

SEQ ID NO: 18578 - DNA, 15 bp, Homo sapiens
gaactgctaggcagg

SEQ ID NO: 18579 - DNA, 15 bp, Homo sapiens
aactgctaggcaggg

SEQ ID NO: 18580 - DNA, 15 bp, Homo sapiens
actgctaggcagggt

SEQ ID NO: 18581 - DNA, 15 bp, Homo sapiens
ctgctaggcagggtg

SEQ ID NO: 18582 - DNA, 15 bp, Homo sapiens
tgctaggcagggtgg

SEQ ID NO: 18583 - DNA, 15 bp, Homo sapiens
gctaggcagggtggc

SEQ ID NO: 18584 - DNA, 15 bp, Homo sapiens
ctaggcagggtggcc

SEQ ID NO: 18585 - DNA, 15 bp, Homo sapiens
taggcagggtggccg

SEQ ID NO: 18586 - DNA, 15 bp, Homo sapiens
aggcagggtggccga

SEQ ID NO: 18587 - DNA, 15 bp, Homo sapiens
ggcagggtggccgat

SEQ ID NO: 18588 - DNA, 15 bp, Homo sapiens
gcagggtggccgatg

SEQ ID NO: 18589 - DNA, 15 bp, Homo sapiens
cagggtggccgatga

SEQ ID NO: 18590 - DNA, 15 bp, Homo sapiens
agggtggccgatgac

SEQ ID NO: 18591 - DNA, 15 bp, Homo sapiens
gggtggccgatgacc

SEQ ID NO: 18592 - DNA, 15 bp, Homo sapiens
ggtggccgatgaccc

SEQ ID NO: 18593 - DNA, 15 bp, Homo sapiens
gtggccgatgacccc

SEQ ID NO: 18594 - DNA, 15 bp, Homo sapiens
tggccgatgacccct

SEQ ID NO: 18595 - DNA, 15 bp, Homo sapiens
ggccgatgacccctc

SEQ ID NO: 18596 - DNA, 15 bp, Homo sapiens
gccgatgacccctcg

SEQ ID NO: 18597 - DNA, 15 bp, Homo sapiens
ccgatgacccctcga

SEQ ID NO: 18598 - DNA, 15 bp, Homo sapiens
cgatgacccctcgac

SEQ ID NO: 18599 - DNA, 15 bp, Homo sapiens
gatgacccctcgact

SEQ ID NO: 18600 - DNA, 15 bp, Homo sapiens
atgacccctcgactg

SEQ ID NO: 18601 - DNA, 15 bp, Homo sapiens
tgacccctcgactgg

SEQ ID NO: 18602 - DNA, 15 bp, Homo sapiens
gacccctcgactggt

SEQ ID NO: 18603 - DNA, 15 bp, Homo sapiens
acccctcgactggtg

SEQ ID NO: 18604 - DNA, 15 bp, Homo sapiens
cccctcgactggtgg

SEQ ID NO: 18605 - DNA, 15 bp, Homo sapiens
ccctcgactggtggc

SEQ ID NO: 18606 - DNA, 15 bp, Homo sapiens
cctcgactggtggcg

SEQ ID NO: 18607 - DNA, 15 bp, Homo sapiens
ctcgactggtggcga

SEQ ID NO: 18608 - DNA, 15 bp, Homo sapiens
tcgactggtggcgat

SEQ ID NO: 18609 - DNA, 15 bp, Homo sapiens
cgactggtggcgatg

SEQ ID NO: 18610 - DNA, 15 bp, Homo sapiens
gactggtggcgatgt

SEQ ID NO: 18611 - DNA, 15 bp, Homo sapiens
actggtggcgatgtt

SEQ ID NO: 18612 - DNA, 15 bp, Homo sapiens
ctggtggcgatgttc

SEQ ID NO: 18613 - DNA, 15 bp, Homo sapiens
tggtggcgatgttca

SEQ ID NO: 18614 - DNA, 15 bp, Homo sapiens
ggtggcgatgttcat

SEQ ID NO: 18615 - DNA, 15 bp, Homo sapiens
gtggcgatgttcatc

SEQ ID NO: 18616 - DNA, 15 bp, Homo sapiens
tggcgatgttcatct

SEQ ID NO: 18617 - DNA, 15 bp, Homo sapiens
ggcgatgttcatctg

SEQ ID NO: 18618 - DNA, 15 bp, Homo sapiens
gcgatgttcatctgc

SEQ ID NO: 18619 - DNA, 15 bp, Homo sapiens
cgatgttcatctgct

SEQ ID NO: 18620 - DNA, 15 bp, Homo sapiens
gatgttcatctgctc

SEQ ID NO: 18621 - DNA, 15 bp, Homo sapiens
atgttcatctgctct

SEQ ID NO: 18622 - DNA, 15 bp, Homo sapiens
tgttcatctgctctg

SEQ ID NO: 18623 - DNA, 15 bp, Homo sapiens
gttcatctgctctgc

SEQ ID NO: 18624 - DNA, 15 bp, Homo sapiens
ttcatctgctctgcc

SEQ ID NO: 18625 - DNA, 15 bp, Homo sapiens
tcatctgctctgcca

SEQ ID NO: 18626 - DNA, 15 bp, Homo sapiens
catctgctctgccat

SEQ ID NO: 18627 - DNA, 15 bp, Homo sapiens
atctgctctgccatg

SEQ ID NO: 18628 - DNA, 15 bp, Homo sapiens
tctgctctgccatgg

SEQ ID NO: 18629 - DNA, 15 bp, Homo sapiens
ctgctctgccatggg

SEQ ID NO: 18630 - DNA, 15 bp, Homo sapiens
tgctctgccatggga

SEQ ID NO: 18631 - DNA, 15 bp, Homo sapiens
gctctgccatgggac

SEQ ID NO: 18632 - DNA, 15 bp, Homo sapiens
ctctgccatgggaca

SEQ ID NO: 18633 - DNA, 15 bp, Homo sapiens
tctgccatgggacat

SEQ ID NO: 18634 - DNA, 15 bp, Homo sapiens
ctgccatgggacatt

SEQ ID NO: 18635 - DNA, 15 bp, Homo sapiens
tgccatgggacattc

SEQ ID NO: 18636 - DNA, 15 bp, Homo sapiens
gccatgggacattct

SEQ ID NO: 18637 - DNA, 15 bp, Homo sapiens
ccatgggacattctc

SEQ ID NO: 18638 - DNA, 15 bp, Homo sapiens
catgggacattctct

SEQ ID NO: 18639 - DNA, 15 bp, Homo sapiens
atgggacattctcta

SEQ ID NO: 18640 - DNA, 15 bp, Homo sapiens
tgggacattctctaa

SEQ ID NO: 18641 - DNA, 15 bp, Homo sapiens
gggacattctctaac

SEQ ID NO: 18642 - DNA, 15 bp, Homo sapiens
ggacattctctaaca

SEQ ID NO: 18643 - DNA, 15 bp, Homo sapiens
gacattctctaacaa

SEQ ID NO: 18644 - DNA, 15 bp, Homo sapiens
acattctctaacaaa

SEQ ID NO: 18645 - DNA, 15 bp, Homo sapiens
cattctctaacaaag

SEQ ID NO: 18646 - DNA, 15 bp, Homo sapiens
attctctaacaaagc

SEQ ID NO: 18647 - DNA, 15 bp, Homo sapiens
ttctctaacaaagct

SEQ ID NO: 18648 - DNA, 15 bp, Homo sapiens
tctctaacaaagctt

SEQ ID NO: 18649 - DNA, 15 bp, Homo sapiens
ctctaacaaagctta

SEQ ID NO: 18650 - DNA, 15 bp, Homo sapiens
tctaacaaagcttag

SEQ ID NO: 18651 - DNA, 15 bp, Homo sapiens
ctaacaaagcttagc

SEQ ID NO: 18652 - DNA, 15 bp, Homo sapiens
taacaaagcttagca

SEQ ID NO: 18653 - DNA, 15 bp, Homo sapiens
aacaaagcttagcac

SEQ ID NO: 18654 - DNA, 15 bp, Homo sapiens
acaaagcttagcacg

SEQ ID NO: 18655 - DNA, 15 bp, Homo sapiens
caaagcttagcacgt

SEQ ID NO: 18656 - DNA, 15 bp, Homo sapiens
aaagcttagcacgtg

SEQ ID NO: 18657 - DNA, 15 bp, Homo sapiens
aagcttagcacgtgc

SEQ ID NO: 18658 - DNA, 15 bp, Homo sapiens
agcttagcacgtgct

SEQ ID NO: 18659 - DNA, 15 bp, Homo sapiens
gcttagcacgtgctg

SEQ ID NO: 18660 - DNA, 15 bp, Homo sapiens
cttagcacgtgctgg

SEQ ID NO: 18661 - DNA, 15 bp, Homo sapiens
ttagcacgtgctggg

SEQ ID NO: 18662 - DNA, 15 bp, Homo sapiens
tagcacgtgctgggc

SEQ ID NO: 18663 - DNA, 15 bp, Homo sapiens
agcacgtgctgggct

SEQ ID NO: 18664 - DNA, 15 bp, Homo sapiens
gcacgtgctgggctg

SEQ ID NO: 18665 - DNA, 15 bp, Homo sapiens
cacgtgctgggctga

SEQ ID NO: 18666 - DNA, 15 bp, Homo sapiens
acgtgctgggctgat

SEQ ID NO: 18667 - DNA, 15 bp, Homo sapiens
cgtgctgggctgatg

SEQ ID NO: 18668 - DNA, 15 bp, Homo sapiens
gtgctgggctgatga

SEQ ID NO: 18669 - DNA, 15 bp, Homo sapiens
tgctgggctgatgag

SEQ ID NO: 18670 - DNA, 15 bp, Homo sapiens
gctgggctgatgagt

SEQ ID NO: 18671 - DNA, 15 bp, Homo sapiens
ctgggctgatgagtg

SEQ ID NO: 18672 - DNA, 15 bp, Homo sapiens
tgggctgatgagtgc

SEQ ID NO: 18673 - DNA, 15 bp, Homo sapiens
gggctgatgagtgct

SEQ ID NO: 18674 - DNA, 15 bp, Homo sapiens
ggctgatgagtgcta

SEQ ID NO: 18675 - DNA, 15 bp, Homo sapiens
gctgatgagtgctat

SEQ ID NO: 18676 - DNA, 15 bp, Homo sapiens
ctgatgagtgctatg

SEQ ID NO: 18677 - DNA, 15 bp, Homo sapiens
tgatgagtgctatga

SEQ ID NO: 18678 - DNA, 15 bp, Homo sapiens
gatgagtgctatgaa

SEQ ID NO: 18679 - DNA, 15 bp, Homo sapiens
atgagtgctatgaaa

SEQ ID NO: 18680 - DNA, 15 bp, Homo sapiens
tgagtgctatgaaaa

SEQ ID NO: 18681 - DNA, 15 bp, Homo sapiens
gagtgctatgaaaaa

SEQ ID NO: 18682 - DNA, 15 bp, Homo sapiens
agtgctatgaaaaag

SEQ ID NO: 18683 - DNA, 15 bp, Homo sapiens
gtgctatgaaaaagc

SEQ ID NO: 18684 - DNA, 15 bp, Homo sapiens
tgctatgaaaaagcc

SEQ ID NO: 18685 - DNA, 15 bp, Homo sapiens
gctatgaaaaagcca

SEQ ID NO: 18686 - DNA, 15 bp, Homo sapiens
ctatgaaaaagccag

SEQ ID NO: 18687 - DNA, 15 bp, Homo sapiens
tatgaaaaagccagg

SEQ ID NO: 18688 - DNA, 15 bp, Homo sapiens
atgaaaaagccaggg

SEQ ID NO: 18689 - DNA, 15 bp, Homo sapiens
tgaaaaagccagggg

SEQ ID NO: 18690 - DNA, 15 bp, Homo sapiens
gaaaaagccaggggc

SEQ ID NO: 18691 - DNA, 15 bp, Homo sapiens
aaaaagccaggggcc

SEQ ID NO: 18692 - DNA, 15 bp, Homo sapiens
aaaagccaggggccc

SEQ ID NO: 18693 - DNA, 15 bp, Homo sapiens
aaagccaggggcccg

SEQ ID NO: 18694 - DNA, 15 bp, Homo sapiens
aagccaggggcccga

SEQ ID NO: 18695 - DNA, 15 bp, Homo sapiens
agccaggggcccgag

SEQ ID NO: 18696 - DNA, 15 bp, Homo sapiens
gccaggggcccgagg

SEQ ID NO: 18697 - DNA, 15 bp, Homo sapiens
ccaggggcccgagga

SEQ ID NO: 18698 - DNA, 15 bp, Homo sapiens
caggggcccgaggac

SEQ ID NO: 18699 - DNA, 15 bp, Homo sapiens
aggggcccgaggaca

SEQ ID NO: 18700 - DNA, 15 bp, Homo sapiens
ggggcccgaggacac

SEQ ID NO: 18701 - DNA, 15 bp, Homo sapiens
gggcccgaggacact

SEQ ID NO: 18702 - DNA, 15 bp, Homo sapiens
ggcccgaggacactg

SEQ ID NO: 18703 - DNA, 15 bp, Homo sapiens
gcccgaggacactgg

SEQ ID NO: 18704 - DNA, 15 bp, Homo sapiens
cccgaggacactggg

SEQ ID NO: 18705 - DNA, 15 bp, Homo sapiens
ccgaggacactgggg

SEQ ID NO: 18706 - DNA, 15 bp, Homo sapiens
cgaggacactggggt

SEQ ID NO: 18707 - DNA, 15 bp, Homo sapiens
gaggacactggggtg

SEQ ID NO: 18708 - DNA, 15 bp, Homo sapiens
aggacactggggtgg

SEQ ID NO: 18709 - DNA, 15 bp, Homo sapiens
ggacactggggtgga

SEQ ID NO: 18710 - DNA, 15 bp, Homo sapiens
gacactggggtggac

SEQ ID NO: 18711 - DNA, 15 bp, Homo sapiens
acactggggtggaca

SEQ ID NO: 18712 - DNA, 15 bp, Homo sapiens
cactggggtggacag

SEQ ID NO: 18713 - DNA, 15 bp, Homo sapiens
actggggtggacagg

SEQ ID NO: 18714 - DNA, 15 bp, Homo sapiens
ctggggtggacaggc

SEQ ID NO: 18715 - DNA, 15 bp, Homo sapiens
tggggtggacaggct

SEQ ID NO: 18716 - DNA, 15 bp, Homo sapiens
ggggtggacaggctc

SEQ ID NO: 18717 - DNA, 15 bp, Homo sapiens
gggtggacaggctcc

SEQ ID NO: 18718 - DNA, 15 bp, Homo sapiens
ggtggacaggctccc

SEQ ID NO: 18719 - DNA, 15 bp, Homo sapiens
gtggacaggctcccc

SEQ ID NO: 18720 - DNA, 15 bp, Homo sapiens
tggacaggctcccct

SEQ ID NO: 18721 - DNA, 15 bp, Homo sapiens
ggacaggctcccctg

SEQ ID NO: 18722 - DNA, 15 bp, Homo sapiens
gacaggctcccctgg

SEQ ID NO: 18723 - DNA, 15 bp, Homo sapiens
acaggctcccctggg

SEQ ID NO: 18724 - DNA, 15 bp, Homo sapiens
caggctcccctgggg

SEQ ID NO: 18725 - DNA, 15 bp, Homo sapiens
aggctcccctgggga

SEQ ID NO: 18726 - DNA, 15 bp, Homo sapiens
ggctcccctggggaa

SEQ ID NO: 18727 - DNA, 15 bp, Homo sapiens
gctcccctggggaag

SEQ ID NO: 18728 - DNA, 15 bp, Homo sapiens
ctcccctggggaagt

SEQ ID NO: 18729 - DNA, 15 bp, Homo sapiens
tcccctggggaagtc

SEQ ID NO: 18730 - DNA, 15 bp, Homo sapiens
cccctggggaagtcc

SEQ ID NO: 18731 - DNA, 15 bp, Homo sapiens
ccctggggaagtcct

SEQ ID NO: 18732 - DNA, 15 bp, Homo sapiens
cctggggaagtcctc

SEQ ID NO: 18733 - DNA, 15 bp, Homo sapiens
ctggggaagtcctct

SEQ ID NO: 18734 - DNA, 15 bp, Homo sapiens
tggggaagtcctctt

SEQ ID NO: 18735 - DNA, 15 bp, Homo sapiens
ggggaagtcctctta

SEQ ID NO: 18736 - DNA, 15 bp, Homo sapiens
gggaagtcctcttag

SEQ ID NO: 18737 - DNA, 15 bp, Homo sapiens
ggaagtcctcttaga

SEQ ID NO: 18738 - DNA, 15 bp, Homo sapiens
gaagtcctcttagaa

SEQ ID NO: 18739 - DNA, 15 bp, Homo sapiens
aagtcctcttagaac

SEQ ID NO: 18740 - DNA, 15 bp, Homo sapiens
agtcctcttagaact

SEQ ID NO: 18741 - DNA, 15 bp, Homo sapiens
gtcctcttagaactg

SEQ ID NO: 18742 - DNA, 15 bp, Homo sapiens
tcctcttagaactga

SEQ ID NO: 18743 - DNA, 15 bp, Homo sapiens
cctcttagaactgag

SEQ ID NO: 18744 - DNA, 15 bp, Homo sapiens
ctcttagaactgagg

SEQ ID NO: 18745 - DNA, 15 bp, Homo sapiens
tcttagaactgaggg

SEQ ID NO: 18746 - DNA, 15 bp, Homo sapiens
cttagaactgaggga

SEQ ID NO: 18747 - DNA, 15 bp, Homo sapiens
ttagaactgagggat

SEQ ID NO: 18748 - DNA, 15 bp, Homo sapiens
tagaactgagggatc

SEQ ID NO: 18749 - DNA, 15 bp, Homo sapiens
agaactgagggatca

SEQ ID NO: 18750 - DNA, 15 bp, Homo sapiens
gaactgagggatcaa

SEQ ID NO: 18751 - DNA, 15 bp, Homo sapiens
aactgagggatcaac

SEQ ID NO: 18752 - DNA, 15 bp, Homo sapiens
actgagggatcaaca

SEQ ID NO: 18753 - DNA, 15 bp, Homo sapiens
ctgagggatcaacac

SEQ ID NO: 18754 - DNA, 15 bp, Homo sapiens
tgagggatcaacact

SEQ ID NO: 18755 - DNA, 15 bp, Homo sapiens
gagggatcaacactg

SEQ ID NO: 18756 - DNA, 15 bp, Homo sapiens
agggatcaacactgg

SEQ ID NO: 18757 - DNA, 15 bp, Homo sapiens
gggatcaacactgga

SEQ ID NO: 18758 - DNA, 15 bp, Homo sapiens
ggatcaacactggag

SEQ ID NO: 18759 - DNA, 15 bp, Homo sapiens
gatcaacactggagg

SEQ ID NO: 18760 - DNA, 15 bp, Homo sapiens
atcaacactggagga

SEQ ID NO: 18761 - DNA, 15 bp, Homo sapiens
tcaacactggaggag

SEQ ID NO: 18762 - DNA, 15 bp, Homo sapiens
caacactggaggaga

SEQ ID NO: 18763 - DNA, 15 bp, Homo sapiens
aacactggaggagac

SEQ ID NO: 18764 - DNA, 15 bp, Homo sapiens
acactggaggagact

SEQ ID NO: 18765 - DNA, 15 bp, Homo sapiens
cactggaggagactg

SEQ ID NO: 18766 - DNA, 15 bp, Homo sapiens
actggaggagactgc

SEQ ID NO: 18767 - DNA, 15 bp, Homo sapiens
ctggaggagactgca

SEQ ID NO: 18768 - DNA, 15 bp, Homo sapiens
tggaggagactgcaa

SEQ ID NO: 18769 - DNA, 15 bp, Homo sapiens
ggaggagactgcaag

SEQ ID NO: 18770 - DNA, 15 bp, Homo sapiens
gaggagactgcaagg

SEQ ID NO: 18771 - DNA, 15 bp, Homo sapiens
aggagactgcaaggg

SEQ ID NO: 18772 - DNA, 15 bp, Homo sapiens
ggagactgcaagggg

SEQ ID NO: 18773 - DNA, 15 bp, Homo sapiens
gagactgcaaggggt

SEQ ID NO: 18774 - DNA, 15 bp, Homo sapiens
agactgcaaggggta

SEQ ID NO: 18775 - DNA, 15 bp, Homo sapiens
gactgcaaggggtac

SEQ ID NO: 18776 - DNA, 15 bp, Homo sapiens
actgcaaggggtacg

SEQ ID NO: 18777 - DNA, 15 bp, Homo sapiens
ctgcaaggggtacgg

SEQ ID NO: 18778 - DNA, 15 bp, Homo sapiens
tgcaaggggtacggg

SEQ ID NO: 18779 - DNA, 15 bp, Homo sapiens
gcaaggggtacggga

SEQ ID NO: 18780 - DNA, 15 bp, Homo sapiens
caaggggtacgggat

SEQ ID NO: 18781 - DNA, 15 bp, Homo sapiens
aaggggtacgggata

SEQ ID NO: 18782 - DNA, 15 bp, Homo sapiens
aggggtacgggataa

SEQ ID NO: 18783 - DNA, 15 bp, Homo sapiens
ggggtacgggataaa

SEQ ID NO: 18784 - DNA, 15 bp, Homo sapiens
gggtacgggataaat

SEQ ID NO: 18785 - DNA, 15 bp, Homo sapiens
ggtacgggataaatg

SEQ ID NO: 18786 - DNA, 15 bp, Homo sapiens
gtacgggataaatgt

SEQ ID NO: 18787 - DNA, 15 bp, Homo sapiens
tacgggataaatgtt

SEQ ID NO: 18788 - DNA, 15 bp, Homo sapiens
acgggataaatgttc

SEQ ID NO: 18789 - DNA, 15 bp, Homo sapiens
cgggataaatgttcc

SEQ ID NO: 18790 - DNA, 15 bp, Homo sapiens
gggataaatgttcct

SEQ ID NO: 18791 - DNA, 15 bp, Homo sapiens
ggataaatgttcctg

SEQ ID NO: 18792 - DNA, 15 bp, Homo sapiens
gataaatgttcctgg

SEQ ID NO: 18793 - DNA, 15 bp, Homo sapiens
ataaatgttcctggt

SEQ ID NO: 18794 - DNA, 15 bp, Homo sapiens
taaatgttcctggtg

SEQ ID NO: 18795 - DNA, 15 bp, Homo sapiens
aaatgttcctggtga

SEQ ID NO: 18796 - DNA, 15 bp, Homo sapiens
aatgttcctggtgaa

SEQ ID NO: 18797 - DNA, 15 bp, Homo sapiens
atgttcctggtgaag

SEQ ID NO: 18798 - DNA, 15 bp, Homo sapiens
tgttcctggtgaagg

SEQ ID NO: 18799 - DNA, 15 bp, Homo sapiens
gttcctggtgaagga

SEQ ID NO: 18800 - DNA, 15 bp, Homo sapiens
ttcctggtgaaggaa

SEQ ID NO: 18801 - DNA, 15 bp, Homo sapiens
tcctggtgaaggaaa

SEQ ID NO: 18802 - DNA, 15 bp, Homo sapiens
cctggtgaaggaaac

SEQ ID NO: 18803 - DNA, 15 bp, Homo sapiens
ctggtgaaggaaaca

SEQ ID NO: 18804 - DNA, 15 bp, Homo sapiens
tggtgaaggaaacag

SEQ ID NO: 18805 - DNA, 15 bp, Homo sapiens
ggtgaaggaaacagc

SEQ ID NO: 18806 - DNA, 15 bp, Homo sapiens
gtgaaggaaacagca

SEQ ID NO: 18807 - DNA, 15 bp, Homo sapiens
tgaaggaaacagcag

SEQ ID NO: 18808 - DNA, 15 bp, Homo sapiens
gaaggaaacagcagg

SEQ ID NO: 18809 - DNA, 15 bp, Homo sapiens
aaggaaacagcaggg

SEQ ID NO: 18810 - DNA, 15 bp, Homo sapiens
aggaaacagcagggg

SEQ ID NO: 18811 - DNA, 15 bp, Homo sapiens
ggaaacagcaggggc

SEQ ID NO: 18812 - DNA, 15 bp, Homo sapiens
gaaacagcaggggca

SEQ ID NO: 18813 - DNA, 15 bp, Homo sapiens
aaacagcaggggcaa

SEQ ID NO: 18814 - DNA, 15 bp, Homo sapiens
aacagcaggggcaaa

SEQ ID NO: 18815 - DNA, 15 bp, Homo sapiens
acagcaggggcaaag

SEQ ID NO: 18816 - DNA, 15 bp, Homo sapiens
cagcaggggcaaagg

SEQ ID NO: 18817 - DNA, 15 bp, Homo sapiens
agcaggggcaaaggc

SEQ ID NO: 18818 - DNA, 15 bp, Homo sapiens
gcaggggcaaaggcc

SEQ ID NO: 18819 - DNA, 15 bp, Homo sapiens
caggggcaaaggccc

SEQ ID NO: 18820 - DNA, 15 bp, Homo sapiens
aggggcaaaggccct

SEQ ID NO: 18821 - DNA, 15 bp, Homo sapiens
ggggcaaaggccctg

SEQ ID NO: 18822 - DNA, 15 bp, Homo sapiens
gggcaaaggccctgc

SEQ ID NO: 18823 - DNA, 15 bp, Homo sapiens
ggcaaaggccctgca

SEQ ID NO: 18824 - DNA, 15 bp, Homo sapiens
gcaaaggccctgcag

SEQ ID NO: 18825 - DNA, 15 bp, Homo sapiens
caaaggccctgcagc

SEQ ID NO: 18826 - DNA, 15 bp, Homo sapiens
aaaggccctgcagca

SEQ ID NO: 18827 - DNA, 15 bp, Homo sapiens
aaggccctgcagcag

SEQ ID NO: 18828 - DNA, 15 bp, Homo sapiens
aggccctgcagcaga

SEQ ID NO: 18829 - DNA, 15 bp, Homo sapiens
ggccctgcagcagaa

SEQ ID NO: 18830 - DNA, 15 bp, Homo sapiens
gccctgcagcagaaa

SEQ ID NO: 18831 - DNA, 15 bp, Homo sapiens
ccctgcagcagaaag

SEQ ID NO: 18832 - DNA, 15 bp, Homo sapiens
cctgcagcagaaagg

SEQ ID NO: 18833 - DNA, 15 bp, Homo sapiens
ctgcagcagaaagga

SEQ ID NO: 18834 - DNA, 15 bp, Homo sapiens
tgcagcagaaaggag

SEQ ID NO: 18835 - DNA, 15 bp, Homo sapiens
gcagcagaaaggagc

SEQ ID NO: 18836 - DNA, 15 bp, Homo sapiens
cagcagaaaggagcg

SEQ ID NO: 18837 - DNA, 15 bp, Homo sapiens
agcagaaaggagcga

SEQ ID NO: 18838 - DNA, 15 bp, Homo sapiens
gcagaaaggagcgag

SEQ ID NO: 18839 - DNA, 15 bp, Homo sapiens
cagaaaggagcgagg

SEQ ID NO: 18840 - DNA, 15 bp, Homo sapiens
agaaaggagcgaggc

SEQ ID NO: 18841 - DNA, 15 bp, Homo sapiens
gaaaggagcgaggcc

SEQ ID NO: 18842 - DNA, 15 bp, Homo sapiens
aaaggagcgaggccc

SEQ ID NO: 18843 - DNA, 15 bp, Homo sapiens
aaggagcgaggccct

SEQ ID NO: 18844 - DNA, 15 bp, Homo sapiens
aggagcgaggccctt

SEQ ID NO: 18845 - DNA, 15 bp, Homo sapiens
ggagcgaggcccttt

SEQ ID NO: 18846 - DNA, 15 bp, Homo sapiens
gagcgaggccctttg

SEQ ID NO: 18847 - DNA, 15 bp, Homo sapiens
agcgaggccctttgg

SEQ ID NO: 18848 - DNA, 15 bp, Homo sapiens
gcgaggccctttgga

SEQ ID NO: 18849 - DNA, 15 bp, Homo sapiens
cgaggccctttggag

SEQ ID NO: 18850 - DNA, 15 bp, Homo sapiens
gaggccctttggagt

SEQ ID NO: 18851 - DNA, 15 bp, Homo sapiens
aggccctttggagta

SEQ ID NO: 18852 - DNA, 15 bp, Homo sapiens
ggccctttggagtaa

SEQ ID NO: 18853 - DNA, 15 bp, Homo sapiens
gccctttggagtaac

SEQ ID NO: 18854 - DNA, 15 bp, Homo sapiens
ccctttggagtaaca

SEQ ID NO: 18855 - DNA, 15 bp, Homo sapiens
cctttggagtaacag

SEQ ID NO: 18856 - DNA, 15 bp, Homo sapiens
ctttggagtaacaga

SEQ ID NO: 18857 - DNA, 15 bp, Homo sapiens
tttggagtaacagaa

SEQ ID NO: 18858 - DNA, 15 bp, Homo sapiens
ttggagtaacagaaa

SEQ ID NO: 18859 - DNA, 15 bp, Homo sapiens
tggagtaacagaaag

SEQ ID NO: 18860 - DNA, 15 bp, Homo sapiens
ggagtaacagaaaga

SEQ ID NO: 18861 - DNA, 15 bp, Homo sapiens
gagtaacagaaagac

SEQ ID NO: 18862 - DNA, 15 bp, Homo sapiens
agtaacagaaagacc

SEQ ID NO: 18863 - DNA, 15 bp, Homo sapiens
gtaacagaaagacca

SEQ ID NO: 18864 - DNA, 15 bp, Homo sapiens
taacagaaagaccat

SEQ ID NO: 18865 - DNA, 15 bp, Homo sapiens
aacagaaagaccatg

SEQ ID NO: 18866 - DNA, 15 bp, Homo sapiens
acagaaagaccatgg

SEQ ID NO: 18867 - DNA, 15 bp, Homo sapiens
cagaaagaccatggt

SEQ ID NO: 18868 - DNA, 15 bp, Homo sapiens
agaaagaccatggtg

SEQ ID NO: 18869 - DNA, 15 bp, Homo sapiens
gaaagaccatggtga

SEQ ID NO: 18870 - DNA, 15 bp, Homo sapiens
aaagaccatggtgac

SEQ ID NO: 18871 - DNA, 15 bp, Homo sapiens
aagaccatggtgaca

SEQ ID NO: 18872 - DNA, 15 bp, Homo sapiens
agaccatggtgacag

SEQ ID NO: 18873 - DNA, 15 bp, Homo sapiens
gaccatggtgacagg

SEQ ID NO: 18874 - DNA, 15 bp, Homo sapiens
accatggtgacagga

SEQ ID NO: 18875 - DNA, 15 bp, Homo sapiens
ccatggtgacaggag

SEQ ID NO: 18876 - DNA, 15 bp, Homo sapiens
catggtgacaggagc

SEQ ID NO: 18877 - DNA, 15 bp, Homo sapiens
atggtgacaggagct

SEQ ID NO: 18878 - DNA, 15 bp, Homo sapiens
tggtgacaggagctc

SEQ ID NO: 18879 - DNA, 15 bp, Homo sapiens
ggtgacaggagctca

SEQ ID NO: 18880 - DNA, 15 bp, Homo sapiens
gtgacaggagctcag

SEQ ID NO: 18881 - DNA, 15 bp, Homo sapiens
tgacaggagctcaga

SEQ ID NO: 18882 - DNA, 15 bp, Homo sapiens
gacaggagctcagaa

SEQ ID NO: 18883 - DNA, 15 bp, Homo sapiens
acaggagctcagaaa

SEQ ID NO: 18884 - DNA, 15 bp, Homo sapiens
caggagctcagaaag

SEQ ID NO: 18885 - DNA, 15 bp, Homo sapiens
aggagctcagaaaga

SEQ ID NO: 18886 - DNA, 15 bp, Homo sapiens
ggagctcagaaagac

SEQ ID NO: 18887 - DNA, 15 bp, Homo sapiens
gagctcagaaagacc

SEQ ID NO: 18888 - DNA, 15 bp, Homo sapiens
agctcagaaagacca

SEQ ID NO: 18889 - DNA, 15 bp, Homo sapiens
gctcagaaagaccac

SEQ ID NO: 18890 - DNA, 15 bp, Homo sapiens
ctcagaaagaccact

SEQ ID NO: 18891 - DNA, 15 bp, Homo sapiens
tcagaaagaccactg

SEQ ID NO: 18892 - DNA, 15 bp, Homo sapiens
cagaaagaccactgg

SEQ ID NO: 18893 - DNA, 15 bp, Homo sapiens
agaaagaccactggt

SEQ ID NO: 18894 - DNA, 15 bp, Homo sapiens
gaaagaccactggtg

SEQ ID NO: 18895 - DNA, 15 bp, Homo sapiens
aaagaccactggtgt

SEQ ID NO: 18896 - DNA, 15 bp, Homo sapiens
aagaccactggtgtt

SEQ ID NO: 18897 - DNA, 15 bp, Homo sapiens
agaccactggtgtta

SEQ ID NO: 18898 - DNA, 15 bp, Homo sapiens
gaccactggtgttaa

SEQ ID NO: 18899 - DNA, 15 bp, Homo sapiens
accactggtgttaag

SEQ ID NO: 18900 - DNA, 15 bp, Homo sapiens
ccactggtgttaaga

SEQ ID NO: 18901 - DNA, 15 bp, Homo sapiens
cactggtgttaagac

SEQ ID NO: 18902 - DNA, 15 bp, Homo sapiens
actggtgttaagact

SEQ ID NO: 18903 - DNA, 15 bp, Homo sapiens
ctggtgttaagacta

SEQ ID NO: 18904 - DNA, 15 bp, Homo sapiens
tggtgttaagactat

SEQ ID NO: 18905 - DNA, 15 bp, Homo sapiens
ggtgttaagactatg

SEQ ID NO: 18906 - DNA, 15 bp, Homo sapiens
gtgttaagactatga

SEQ ID NO: 18907 - DNA, 15 bp, Homo sapiens
tgttaagactatgag

SEQ ID NO: 18908 - DNA, 15 bp, Homo sapiens
gttaagactatgagc

SEQ ID NO: 18909 - DNA, 15 bp, Homo sapiens
ttaagactatgagcc

SEQ ID NO: 18910 - DNA, 15 bp, Homo sapiens
taagactatgagcca

SEQ ID NO: 18911 - DNA, 15 bp, Homo sapiens
aagactatgagccag

SEQ ID NO: 18912 - DNA, 15 bp, Homo sapiens
agactatgagccagt

SEQ ID NO: 18913 - DNA, 15 bp, Homo sapiens
gactatgagccagtg

SEQ ID NO: 18914 - DNA, 15 bp, Homo sapiens
actatgagccagtgg

SEQ ID NO: 18915 - DNA, 15 bp, Homo sapiens
ctatgagccagtgga

SEQ ID NO: 18916 - DNA, 15 bp, Homo sapiens
tatgagccagtggag

SEQ ID NO: 18917 - DNA, 15 bp, Homo sapiens
atgagccagtggagg

SEQ ID NO: 18918 - DNA, 15 bp, Homo sapiens
tgagccagtggaggc

SEQ ID NO: 18919 - DNA, 15 bp, Homo sapiens
gagccagtggaggcc

SEQ ID NO: 18920 - DNA, 15 bp, Homo sapiens
agccagtggaggcca

SEQ ID NO: 18921 - DNA, 15 bp, Homo sapiens
gccagtggaggccag

SEQ ID NO: 18922 - DNA, 15 bp, Homo sapiens
ccagtggaggccaga

SEQ ID NO: 18923 - DNA, 15 bp, Homo sapiens
cagtggaggccagat

SEQ ID NO: 18924 - DNA, 15 bp, Homo sapiens
agtggaggccagatt

SEQ ID NO: 18925 - DNA, 15 bp, Homo sapiens
gtggaggccagattg

SEQ ID NO: 18926 - DNA, 15 bp, Homo sapiens
tggaggccagattgg

SEQ ID NO: 18927 - DNA, 15 bp, Homo sapiens
ggaggccagattggg

SEQ ID NO: 18928 - DNA, 15 bp, Homo sapiens
gaggccagattgggg

SEQ ID NO: 18929 - DNA, 15 bp, Homo sapiens
aggccagattgggga

SEQ ID NO: 18930 - DNA, 15 bp, Homo sapiens
ggccagattggggaa

SEQ ID NO: 18931 - DNA, 15 bp, Homo sapiens
gccagattggggaat

SEQ ID NO: 18932 - DNA, 15 bp, Homo sapiens
ccagattggggaatg

SEQ ID NO: 18933 - DNA, 15 bp, Homo sapiens
cagattggggaatgg

SEQ ID NO: 18934 - DNA, 15 bp, Homo sapiens
agattggggaatggg

SEQ ID NO: 18935 - DNA, 15 bp, Homo sapiens
gattggggaatggga

SEQ ID NO: 18936 - DNA, 15 bp, Homo sapiens
attggggaatgggat

SEQ ID NO: 18937 - DNA, 15 bp, Homo sapiens
ttggggaatgggatg

SEQ ID NO: 18938 - DNA, 15 bp, Homo sapiens
tggggaatgggatgg

SEQ ID NO: 18939 - DNA, 15 bp, Homo sapiens
ggggaatgggatggg

SEQ ID NO: 18940 - DNA, 15 bp, Homo sapiens
gggaatgggatggga

SEQ ID NO: 18941 - DNA, 15 bp, Homo sapiens
ggaatgggatgggag

SEQ ID NO: 18942 - DNA, 15 bp, Homo sapiens
gaatgggatgggagg

SEQ ID NO: 18943 - DNA, 15 bp, Homo sapiens
aatgggatgggaggg

SEQ ID NO: 18944 - DNA, 15 bp, Homo sapiens
atgggatgggagggt

SEQ ID NO: 18945 - DNA, 15 bp, Homo sapiens
tgggatgggagggtg

SEQ ID NO: 18946 - DNA, 15 bp, Homo sapiens
gggatgggagggtgc

SEQ ID NO: 18947 - DNA, 15 bp, Homo sapiens
ggatgggagggtgct

SEQ ID NO: 18948 - DNA, 15 bp, Homo sapiens
gatgggagggtgctt

SEQ ID NO: 18949 - DNA, 15 bp, Homo sapiens
atgggagggtgcttg

SEQ ID NO: 18950 - DNA, 15 bp, Homo sapiens
tgggagggtgcttga

SEQ ID NO: 18951 - DNA, 15 bp, Homo sapiens
gggagggtgcttgaa

SEQ ID NO: 18952 - DNA, 15 bp, Homo sapiens
ggagggtgcttgaag

SEQ ID NO: 18953 - DNA, 15 bp, Homo sapiens
gagggtgcttgaaga

SEQ ID NO: 18954 - DNA, 15 bp, Homo sapiens
agggtgcttgaagac

SEQ ID NO: 18955 - DNA, 15 bp, Homo sapiens
gggtgcttgaagacc

SEQ ID NO: 18956 - DNA, 15 bp, Homo sapiens
ggtgcttgaagacca

SEQ ID NO: 18957 - DNA, 15 bp, Homo sapiens
gtgcttgaagaccat

SEQ ID NO: 18958 - DNA, 15 bp, Homo sapiens
tgcttgaagaccatg

SEQ ID NO: 18959 - DNA, 15 bp, Homo sapiens
gcttgaagaccatgg

SEQ ID NO: 18960 - DNA, 15 bp, Homo sapiens
cttgaagaccatggt

SEQ ID NO: 18961 - DNA, 15 bp, Homo sapiens
ttgaagaccatggtg

SEQ ID NO: 18962 - DNA, 15 bp, Homo sapiens
tgaagaccatggtga

SEQ ID NO: 18963 - DNA, 15 bp, Homo sapiens
gaagaccatggtgag

SEQ ID NO: 18964 - DNA, 15 bp, Homo sapiens
aagaccatggtgagg

SEQ ID NO: 18965 - DNA, 15 bp, Homo sapiens
agaccatggtgaggc

SEQ ID NO: 18966 - DNA, 15 bp, Homo sapiens
gaccatggtgaggct

SEQ ID NO: 18967 - DNA, 15 bp, Homo sapiens
accatggtgaggctc

SEQ ID NO: 18968 - DNA, 15 bp, Homo sapiens
ccatggtgaggctct

SEQ ID NO: 18969 - DNA, 15 bp, Homo sapiens
catggtgaggctctc

SEQ ID NO: 18970 - DNA, 15 bp, Homo sapiens
atggtgaggctctct

SEQ ID NO: 18971 - DNA, 15 bp, Homo sapiens
tggtgaggctctctt

SEQ ID NO: 18972 - DNA, 15 bp, Homo sapiens
ggtgaggctctcttg

SEQ ID NO: 18973 - DNA, 15 bp, Homo sapiens
gtgaggctctcttgg

SEQ ID NO: 18974 - DNA, 15 bp, Homo sapiens
tgaggctctcttggt

SEQ ID NO: 18975 - DNA, 15 bp, Homo sapiens
gaggctctcttggtc

SEQ ID NO: 18976 - DNA, 15 bp, Homo sapiens
aggctctcttggtct

SEQ ID NO: 18977 - DNA, 15 bp, Homo sapiens
ggctctcttggtctt

SEQ ID NO: 18978 - DNA, 15 bp, Homo sapiens
gctctcttggtcttt

SEQ ID NO: 18979 - DNA, 15 bp, Homo sapiens
ctctcttggtcttta

SEQ ID NO: 18980 - DNA, 15 bp, Homo sapiens
tctcttggtctttac

SEQ ID NO: 18981 - DNA, 15 bp, Homo sapiens
ctcttggtctttact

SEQ ID NO: 18982 - DNA, 15 bp, Homo sapiens
tcttggtctttactt

SEQ ID NO: 18983 - DNA, 15 bp, Homo sapiens
cttggtctttacttt

SEQ ID NO: 18984 - DNA, 15 bp, Homo sapiens
ttggtctttactttt

SEQ ID NO: 18985 - DNA, 15 bp, Homo sapiens
tggtctttactttta

SEQ ID NO: 18986 - DNA, 15 bp, Homo sapiens
ggtctttacttttaa

SEQ ID NO: 18987 - DNA, 15 bp, Homo sapiens
gtctttacttttaag

SEQ ID NO: 18988 - DNA, 15 bp, Homo sapiens
tctttacttttaaga

SEQ ID NO: 18989 - DNA, 15 bp, Homo sapiens
ctttacttttaagaa

SEQ ID NO: 18990 - DNA, 15 bp, Homo sapiens
tttacttttaagaag

SEQ ID NO: 18991 - DNA, 15 bp, Homo sapiens
ttacttttaagaaga

SEQ ID NO: 18992 - DNA, 15 bp, Homo sapiens
tacttttaagaagaa

SEQ ID NO: 18993 - DNA, 15 bp, Homo sapiens
acttttaagaagaat

SEQ ID NO: 18994 - DNA, 15 bp, Homo sapiens
cttttaagaagaata

SEQ ID NO: 18995 - DNA, 15 bp, Homo sapiens
ttttaagaagaatag

SEQ ID NO: 18996 - DNA, 15 bp, Homo sapiens
tttaagaagaatagg

SEQ ID NO: 18997 - DNA, 15 bp, Homo sapiens
ttaagaagaatagga

SEQ ID NO: 18998 - DNA, 15 bp, Homo sapiens
taagaagaataggac

SEQ ID NO: 18999 - DNA, 15 bp, Homo sapiens
aagaagaataggaca

SEQ ID NO: 19000 - DNA, 15 bp, Homo sapiens
agaagaataggacac

SEQ ID NO: 19001 - DNA, 15 bp, Homo sapiens
gaagaataggacact

SEQ ID NO: 19002 - DNA, 15 bp, Homo sapiens
aagaataggacactt

SEQ ID NO: 19003 - DNA, 15 bp, Homo sapiens
agaataggacacttc

SEQ ID NO: 19004 - DNA, 15 bp, Homo sapiens
gaataggacacttcc

SEQ ID NO: 19005 - DNA, 15 bp, Homo sapiens
aataggacacttcca

SEQ ID NO: 19006 - DNA, 15 bp, Homo sapiens
ataggacacttccaa

SEQ ID NO: 19007 - DNA, 15 bp, Homo sapiens
taggacacttccaaa

SEQ ID NO: 19008 - DNA, 15 bp, Homo sapiens
aggacacttccaaag

SEQ ID NO: 19009 - DNA, 15 bp, Homo sapiens
ggacacttccaaagg

SEQ ID NO: 19010 - DNA, 15 bp, Homo sapiens
gacacttccaaaggg

SEQ ID NO: 19011 - DNA, 15 bp, Homo sapiens
acacttccaaagggt

SEQ ID NO: 19012 - DNA, 15 bp, Homo sapiens
cacttccaaagggta

SEQ ID NO: 19013 - DNA, 15 bp, Homo sapiens
acttccaaagggtag

SEQ ID NO: 19014 - DNA, 15 bp, Homo sapiens
cttccaaagggtagt

SEQ ID NO: 19015 - DNA, 15 bp, Homo sapiens
ttccaaagggtagtg

SEQ ID NO: 19016 - DNA, 15 bp, Homo sapiens
tccaaagggtagtgt

SEQ ID NO: 19017 - DNA, 15 bp, Homo sapiens
ccaaagggtagtgtc

SEQ ID NO: 19018 - DNA, 15 bp, Homo sapiens
caaagggtagtgtca

SEQ ID NO: 19019 - DNA, 15 bp, Homo sapiens
aaagggtagtgtcaa

SEQ ID NO: 19020 - DNA, 15 bp, Homo sapiens
aagggtagtgtcaag

SEQ ID NO: 19021 - DNA, 15 bp, Homo sapiens
agggtagtgtcaagt

SEQ ID NO: 19022 - DNA, 15 bp, Homo sapiens
gggtagtgtcaagtg

SEQ ID NO: 19023 - DNA, 15 bp, Homo sapiens
ggtagtgtcaagtgc

SEQ ID NO: 19024 - DNA, 15 bp, Homo sapiens
gtagtgtcaagtgcc

SEQ ID NO: 19025 - DNA, 15 bp, Homo sapiens
tagtgtcaagtgcca

SEQ ID NO: 19026 - DNA, 15 bp, Homo sapiens
agtgtcaagtgccaa

SEQ ID NO: 19027 - DNA, 15 bp, Homo sapiens
gtgtcaagtgccaag

SEQ ID NO: 19028 - DNA, 15 bp, Homo sapiens
tgtcaagtgccaagg

SEQ ID NO: 19029 - DNA, 15 bp, Homo sapiens
gtcaagtgccaagga

SEQ ID NO: 19030 - DNA, 15 bp, Homo sapiens
tcaagtgccaaggaa

SEQ ID NO: 19031 - DNA, 15 bp, Homo sapiens
caagtgccaaggaag

SEQ ID NO: 19032 - DNA, 15 bp, Homo sapiens
aagtgccaaggaaga

SEQ ID NO: 19033 - DNA, 15 bp, Homo sapiens
agtgccaaggaagat

SEQ ID NO: 19034 - DNA, 15 bp, Homo sapiens
gtgccaaggaagatc

SEQ ID NO: 19035 - DNA, 15 bp, Homo sapiens
tgccaaggaagatca

SEQ ID NO: 19036 - DNA, 15 bp, Homo sapiens
gccaaggaagatcag

SEQ ID NO: 19037 - DNA, 15 bp, Homo sapiens
ccaaggaagatcagg

SEQ ID NO: 19038 - DNA, 15 bp, Homo sapiens
caaggaagatcagga

SEQ ID NO: 19039 - DNA, 15 bp, Homo sapiens
aaggaagatcaggag

SEQ ID NO: 19040 - DNA, 15 bp, Homo sapiens
aggaagatcaggagg

SEQ ID NO: 19041 - DNA, 15 bp, Homo sapiens
ggaagatcaggaggg

SEQ ID NO: 19042 - DNA, 15 bp, Homo sapiens
gaagatcaggagggc

SEQ ID NO: 19043 - DNA, 15 bp, Homo sapiens
aagatcaggagggct

SEQ ID NO: 19044 - DNA, 15 bp, Homo sapiens
agatcaggagggctt

SEQ ID NO: 19045 - DNA, 15 bp, Homo sapiens
gatcaggagggcttt

SEQ ID NO: 19046 - DNA, 15 bp, Homo sapiens
atcaggagggctttt

SEQ ID NO: 19047 - DNA, 15 bp, Homo sapiens
tcaggagggcttttc

SEQ ID NO: 19048 - DNA, 15 bp, Homo sapiens
caggagggcttttcc

SEQ ID NO: 19049 - DNA, 15 bp, Homo sapiens
aggagggcttttccc

SEQ ID NO: 19050 - DNA, 15 bp, Homo sapiens
ggagggcttttcccc

SEQ ID NO: 19051 - DNA, 15 bp, Homo sapiens
gagggcttttcccca

SEQ ID NO: 19052 - DNA, 15 bp, Homo sapiens
agggcttttccccac

SEQ ID NO: 19053 - DNA, 15 bp, Homo sapiens
gggcttttccccaca

SEQ ID NO: 19054 - DNA, 15 bp, Homo sapiens
ggcttttccccacac

SEQ ID NO: 19055 - DNA, 15 bp, Homo sapiens
gcttttccccacacc

SEQ ID NO: 19056 - DNA, 15 bp, Homo sapiens
cttttccccacacca

SEQ ID NO: 19057 - DNA, 15 bp, Homo sapiens
ttttccccacaccag

SEQ ID NO: 19058 - DNA, 15 bp, Homo sapiens
tttccccacaccagc

SEQ ID NO: 19059 - DNA, 15 bp, Homo sapiens
ttccccacaccagcc

SEQ ID NO: 19060 - DNA, 15 bp, Homo sapiens
tccccacaccagccc

SEQ ID NO: 19061 - DNA, 15 bp, Homo sapiens
ccccacaccagccct

SEQ ID NO: 19062 - DNA, 15 bp, Homo sapiens
cccacaccagcccta

SEQ ID NO: 19063 - DNA, 15 bp, Homo sapiens
ccacaccagccctag

SEQ ID NO: 19064 - DNA, 15 bp, Homo sapiens
cacaccagccctagg

SEQ ID NO: 19065 - DNA, 15 bp, Homo sapiens
acaccagccctagga

SEQ ID NO: 19066 - DNA, 15 bp, Homo sapiens
caccagccctaggac

SEQ ID NO: 19067 - DNA, 15 bp, Homo sapiens
accagccctaggact

SEQ ID NO: 19068 - DNA, 15 bp, Homo sapiens
ccagccctaggactt

SEQ ID NO: 19069 - DNA, 15 bp, Homo sapiens
cagccctaggacttt

SEQ ID NO: 19070 - DNA, 15 bp, Homo sapiens
agccctaggactttg

SEQ ID NO: 19071 - DNA, 15 bp, Homo sapiens
gccctaggactttgg

SEQ ID NO: 19072 - DNA, 15 bp, Homo sapiens
ccctaggactttgga

SEQ ID NO: 19073 - DNA, 15 bp, Homo sapiens
cctaggactttggac

SEQ ID NO: 19074 - DNA, 15 bp, Homo sapiens
ctaggactttggact

SEQ ID NO: 19075 - DNA, 15 bp, Homo sapiens
taggactttggactc

SEQ ID NO: 19076 - DNA, 15 bp, Homo sapiens
aggactttggactct

SEQ ID NO: 19077 - DNA, 15 bp, Homo sapiens
ggactttggactctg

SEQ ID NO: 19078 - DNA, 15 bp, Homo sapiens
gactttggactctgg

SEQ ID NO: 19079 - DNA, 15 bp, Homo sapiens
actttggactctggg

SEQ ID NO: 19080 - DNA, 15 bp, Homo sapiens
ctttggactctggga

SEQ ID NO: 19081 - DNA, 15 bp, Homo sapiens
tttggactctgggag

SEQ ID NO: 19082 - DNA, 15 bp, Homo sapiens
ttggactctgggagc

SEQ ID NO: 19083 - DNA, 15 bp, Homo sapiens
tggactctgggagcc

SEQ ID NO: 19084 - DNA, 15 bp, Homo sapiens
ggactctgggagcct

SEQ ID NO: 19085 - DNA, 15 bp, Homo sapiens
gactctgggagcctc

SEQ ID NO: 19086 - DNA, 15 bp, Homo sapiens
actctgggagcctca

SEQ ID NO: 19087 - DNA, 15 bp, Homo sapiens
ctctgggagcctcag

SEQ ID NO: 19088 - DNA, 15 bp, Homo sapiens
tctgggagcctcagt

SEQ ID NO: 19089 - DNA, 15 bp, Homo sapiens
ctgggagcctcagtt

SEQ ID NO: 19090 - DNA, 15 bp, Homo sapiens
tgggagcctcagttt

SEQ ID NO: 19091 - DNA, 15 bp, Homo sapiens
gggagcctcagtttg

SEQ ID NO: 19092 - DNA, 15 bp, Homo sapiens
ggagcctcagtttgc

SEQ ID NO: 19093 - DNA, 15 bp, Homo sapiens
gagcctcagtttgct

SEQ ID NO: 19094 - DNA, 15 bp, Homo sapiens
agcctcagtttgctc

SEQ ID NO: 19095 - DNA, 15 bp, Homo sapiens
gcctcagtttgctca

SEQ ID NO: 19096 - DNA, 15 bp, Homo sapiens
cctcagtttgctcat

SEQ ID NO: 19097 - DNA, 15 bp, Homo sapiens
ctcagtttgctcatc

SEQ ID NO: 19098 - DNA, 15 bp, Homo sapiens
tcagtttgctcatcc

SEQ ID NO: 19099 - DNA, 15 bp, Homo sapiens
cagtttgctcatcca

SEQ ID NO: 19100 - DNA, 15 bp, Homo sapiens
agtttgctcatccag

SEQ ID NO: 19101 - DNA, 15 bp, Homo sapiens
gtttgctcatccagg

SEQ ID NO: 19102 - DNA, 15 bp, Homo sapiens
tttgctcatccagga

SEQ ID NO: 19103 - DNA, 15 bp, Homo sapiens
ttgctcatccaggaa

SEQ ID NO: 19104 - DNA, 15 bp, Homo sapiens
tgctcatccaggaaa

SEQ ID NO: 19105 - DNA, 15 bp, Homo sapiens
gctcatccaggaaag

SEQ ID NO: 19106 - DNA, 15 bp, Homo sapiens
ctcatccaggaaaga

SEQ ID NO: 19107 - DNA, 15 bp, Homo sapiens
tcatccaggaaagag

SEQ ID NO: 19108 - DNA, 15 bp, Homo sapiens
catccaggaaagaga

SEQ ID NO: 19109 - DNA, 15 bp, Homo sapiens
atccaggaaagagaa

SEQ ID NO: 19110 - DNA, 15 bp, Homo sapiens
tccaggaaagagaaa

SEQ ID NO: 19111 - DNA, 15 bp, Homo sapiens
ccaggaaagagaaat

SEQ ID NO: 19112 - DNA, 15 bp, Homo sapiens
caggaaagagaaatt

SEQ ID NO: 19113 - DNA, 15 bp, Homo sapiens
aggaaagagaaattt

SEQ ID NO: 19114 - DNA, 15 bp, Homo sapiens
ggaaagagaaattta

SEQ ID NO: 19115 - DNA, 15 bp, Homo sapiens
gaaagagaaatttaa

SEQ ID NO: 19116 - DNA, 15 bp, Homo sapiens
aaagagaaatttaaa

SEQ ID NO: 19117 - DNA, 15 bp, Homo sapiens
aagagaaatttaaaa

SEQ ID NO: 19118 - DNA, 15 bp, Homo sapiens
agagaaatttaaaac

SEQ ID NO: 19119 - DNA, 15 bp, Homo sapiens
gagaaatttaaaacc

SEQ ID NO: 19120 - DNA, 15 bp, Homo sapiens
agaaatttaaaaccc

SEQ ID NO: 19121 - DNA, 15 bp, Homo sapiens
gaaatttaaaaccct

SEQ ID NO: 19122 - DNA, 15 bp, Homo sapiens
aaatttaaaaccctc

SEQ ID NO: 19123 - DNA, 15 bp, Homo sapiens
aatttaaaaccctct

SEQ ID NO: 19124 - DNA, 15 bp, Homo sapiens
atttaaaaccctcta

SEQ ID NO: 19125 - DNA, 15 bp, Homo sapiens
tttaaaaccctctac

SEQ ID NO: 19126 - DNA, 15 bp, Homo sapiens
ttaaaaccctctact

SEQ ID NO: 19127 - DNA, 15 bp, Homo sapiens
taaaaccctctactt

SEQ ID NO: 19128 - DNA, 15 bp, Homo sapiens
aaaaccctctacttc

SEQ ID NO: 19129 - DNA, 15 bp, Homo sapiens
aaaccctctacttca

SEQ ID NO: 19130 - DNA, 15 bp, Homo sapiens
aaccctctacttcac

SEQ ID NO: 19131 - DNA, 15 bp, Homo sapiens
accctctacttcaca

SEQ ID NO: 19132 - DNA, 15 bp, Homo sapiens
ccctctacttcacag

SEQ ID NO: 19133 - DNA, 15 bp, Homo sapiens
cctctacttcacagg

SEQ ID NO: 19134 - DNA, 15 bp, Homo sapiens
ctctacttcacaggg

SEQ ID NO: 19135 - DNA, 15 bp, Homo sapiens
tctacttcacaggga

SEQ ID NO: 19136 - DNA, 15 bp, Homo sapiens
ctacttcacagggaa

SEQ ID NO: 19137 - DNA, 15 bp, Homo sapiens
tacttcacagggaat

SEQ ID NO: 19138 - DNA, 15 bp, Homo sapiens
acttcacagggaatg

SEQ ID NO: 19139 - DNA, 15 bp, Homo sapiens
cttcacagggaatgt

SEQ ID NO: 19140 - DNA, 15 bp, Homo sapiens
ttcacagggaatgtt

SEQ ID NO: 19141 - DNA, 15 bp, Homo sapiens
tcacagggaatgttg

SEQ ID NO: 19142 - DNA, 15 bp, Homo sapiens
cacagggaatgttgt

SEQ ID NO: 19143 - DNA, 15 bp, Homo sapiens
acagggaatgttgtc

SEQ ID NO: 19144 - DNA, 15 bp, Homo sapiens
cagggaatgttgtcg

SEQ ID NO: 19145 - DNA, 15 bp, Homo sapiens
agggaatgttgtcgg

SEQ ID NO: 19146 - DNA, 15 bp, Homo sapiens
gggaatgttgtcgga

SEQ ID NO: 19147 - DNA, 15 bp, Homo sapiens
ggaatgttgtcggaa

SEQ ID NO: 19148 - DNA, 15 bp, Homo sapiens
gaatgttgtcggaat

SEQ ID NO: 19149 - DNA, 15 bp, Homo sapiens
aatgttgtcggaatt

SEQ ID NO: 19150 - DNA, 15 bp, Homo sapiens
atgttgtcggaatta

SEQ ID NO: 19151 - DNA, 15 bp, Homo sapiens
tgttgtcggaattaa

SEQ ID NO: 19152 - DNA, 15 bp, Homo sapiens
gttgtcggaattaaa

SEQ ID NO: 19153 - DNA, 15 bp, Homo sapiens
ttgtcggaattaaac

SEQ ID NO: 19154 - DNA, 15 bp, Homo sapiens
tgtcggaattaaacc

SEQ ID NO: 19155 - DNA, 15 bp, Homo sapiens
gtcggaattaaacca

SEQ ID NO: 19156 - DNA, 15 bp, Homo sapiens
tcggaattaaaccag

SEQ ID NO: 19157 - DNA, 15 bp, Homo sapiens
cggaattaaaccaga

SEQ ID NO: 19158 - DNA, 15 bp, Homo sapiens
ggaattaaaccagac

SEQ ID NO: 19159 - DNA, 15 bp, Homo sapiens
gaattaaaccagacc

SEQ ID NO: 19160 - DNA, 15 bp, Homo sapiens
aattaaaccagacct

SEQ ID NO: 19161 - DNA, 15 bp, Homo sapiens
attaaaccagacctt

SEQ ID NO: 19162 - DNA, 15 bp, Homo sapiens
ttaaaccagaccttg

SEQ ID NO: 19163 - DNA, 15 bp, Homo sapiens
taaaccagaccttgc

SEQ ID NO: 19164 - DNA, 15 bp, Homo sapiens
aaaccagaccttgca

SEQ ID NO: 19165 - DNA, 15 bp, Homo sapiens
aaccagaccttgcat

SEQ ID NO: 19166 - DNA, 15 bp, Homo sapiens
accagaccttgcatg

SEQ ID NO: 19167 - DNA, 15 bp, Homo sapiens
ccagaccttgcatga

SEQ ID NO: 19168 - DNA, 15 bp, Homo sapiens
cagaccttgcatgaa

SEQ ID NO: 19169 - DNA, 15 bp, Homo sapiens
agaccttgcatgaaa

SEQ ID NO: 19170 - DNA, 15 bp, Homo sapiens
gaccttgcatgaaaa

SEQ ID NO: 19171 - DNA, 15 bp, Homo sapiens
accttgcatgaaaat

SEQ ID NO: 19172 - DNA, 15 bp, Homo sapiens
ccttgcatgaaaata

SEQ ID NO: 19173 - DNA, 15 bp, Homo sapiens
cttgcatgaaaatat

SEQ ID NO: 19174 - DNA, 15 bp, Homo sapiens
ttgcatgaaaatata

SEQ ID NO: 19175 - DNA, 15 bp, Homo sapiens
tgcatgaaaatatag

SEQ ID NO: 19176 - DNA, 15 bp, Homo sapiens
gcatgaaaatatagt

SEQ ID NO: 19177 - DNA, 15 bp, Homo sapiens
catgaaaatatagta

SEQ ID NO: 19178 - DNA, 15 bp, Homo sapiens
atgaaaatatagtac

SEQ ID NO: 19179 - DNA, 15 bp, Homo sapiens
tgaaaatatagtact

SEQ ID NO: 19180 - DNA, 15 bp, Homo sapiens
gaaaatatagtactc

SEQ ID NO: 19181 - DNA, 15 bp, Homo sapiens
aaaatatagtactca

SEQ ID NO: 19182 - DNA, 15 bp, Homo sapiens
aaatatagtactcag

SEQ ID NO: 19183 - DNA, 15 bp, Homo sapiens
aatatagtactcagt

SEQ ID NO: 19184 - DNA, 15 bp, Homo sapiens
atatagtactcagtg

SEQ ID NO: 19185 - DNA, 15 bp, Homo sapiens
tatagtactcagtga

SEQ ID NO: 19186 - DNA, 15 bp, Homo sapiens
atagtactcagtgaa

SEQ ID NO: 19187 - DNA, 15 bp, Homo sapiens
tagtactcagtgaag

SEQ ID NO: 19188 - DNA, 15 bp, Homo sapiens
agtactcagtgaagt

SEQ ID NO: 19189 - DNA, 15 bp, Homo sapiens
gtactcagtgaagtg

SEQ ID NO: 19190 - DNA, 15 bp, Homo sapiens
tactcagtgaagtgc

SEQ ID NO: 19191 - DNA, 15 bp, Homo sapiens
actcagtgaagtgcc

SEQ ID NO: 19192 - DNA, 15 bp, Homo sapiens
ctcagtgaagtgcct

SEQ ID NO: 19193 - DNA, 15 bp, Homo sapiens
tcagtgaagtgcctg

SEQ ID NO: 19194 - DNA, 15 bp, Homo sapiens
cagtgaagtgcctgg

SEQ ID NO: 19195 - DNA, 15 bp, Homo sapiens
agtgaagtgcctggc

SEQ ID NO: 19196 - DNA, 15 bp, Homo sapiens
gtgaagtgcctggcg

SEQ ID NO: 19197 - DNA, 15 bp, Homo sapiens
tgaagtgcctggcga

SEQ ID NO: 19198 - DNA, 15 bp, Homo sapiens
gaagtgcctggcgaa

SEQ ID NO: 19199 - DNA, 15 bp, Homo sapiens
aagtgcctggcgaag

SEQ ID NO: 19200 - DNA, 15 bp, Homo sapiens
agtgcctggcgaaga

SEQ ID NO: 19201 - DNA, 15 bp, Homo sapiens
gtgcctggcgaagag

SEQ ID NO: 19202 - DNA, 15 bp, Homo sapiens
tgcctggcgaagagc

SEQ ID NO: 19203 - DNA, 15 bp, Homo sapiens
gcctggcgaagagca

SEQ ID NO: 19204 - DNA, 15 bp, Homo sapiens
cctggcgaagagcag

SEQ ID NO: 19205 - DNA, 15 bp, Homo sapiens
ctggcgaagagcagg

SEQ ID NO: 19206 - DNA, 15 bp, Homo sapiens
tggcgaagagcaggg

SEQ ID NO: 19207 - DNA, 15 bp, Homo sapiens
ggcgaagagcagggg

SEQ ID NO: 19208 - DNA, 15 bp, Homo sapiens
gcgaagagcaggggc

SEQ ID NO: 19209 - DNA, 15 bp, Homo sapiens
cgaagagcaggggct

SEQ ID NO: 19210 - DNA, 15 bp, Homo sapiens
gaagagcaggggctc

SEQ ID NO: 19211 - DNA, 15 bp, Homo sapiens
aagagcaggggctca

SEQ ID NO: 19212 - DNA, 15 bp, Homo sapiens
agagcaggggctcag

SEQ ID NO: 19213 - DNA, 15 bp, Homo sapiens
gagcaggggctcagc

SEQ ID NO: 19214 - DNA, 15 bp, Homo sapiens
agcaggggctcagcc

SEQ ID NO: 19215 - DNA, 15 bp, Homo sapiens
gcaggggctcagcca

SEQ ID NO: 19216 - DNA, 15 bp, Homo sapiens
caggggctcagccag

SEQ ID NO: 19217 - DNA, 15 bp, Homo sapiens
aggggctcagccagg

SEQ ID NO: 19218 - DNA, 15 bp, Homo sapiens
ggggctcagccaggt

SEQ ID NO: 19219 - DNA, 15 bp, Homo sapiens
gggctcagccaggtc

SEQ ID NO: 19220 - DNA, 15 bp, Homo sapiens
ggctcagccaggtct

SEQ ID NO: 19221 - DNA, 15 bp, Homo sapiens
gctcagccaggtctc

SEQ ID NO: 19222 - DNA, 15 bp, Homo sapiens
ctcagccaggtctca

SEQ ID NO: 19223 - DNA, 15 bp, Homo sapiens
tcagccaggtctcat

SEQ ID NO: 19224 - DNA, 15 bp, Homo sapiens
cagccaggtctcata

SEQ ID NO: 19225 - DNA, 15 bp, Homo sapiens
agccaggtctcatac

SEQ ID NO: 19226 - DNA, 15 bp, Homo sapiens
gccaggtctcataca

SEQ ID NO: 19227 - DNA, 15 bp, Homo sapiens
ccaggtctcatacaa

SEQ ID NO: 19228 - DNA, 15 bp, Homo sapiens
caggtctcatacaac

SEQ ID NO: 19229 - DNA, 15 bp, Homo sapiens
aggtctcatacaaca

SEQ ID NO: 19230 - DNA, 15 bp, Homo sapiens
ggtctcatacaacaa

SEQ ID NO: 19231 - DNA, 15 bp, Homo sapiens
gtctcatacaacaaa

SEQ ID NO: 19232 - DNA, 15 bp, Homo sapiens
tctcatacaacaaat

SEQ ID NO: 19233 - DNA, 15 bp, Homo sapiens
ctcatacaacaaatc

SEQ ID NO: 19234 - DNA, 15 bp, Homo sapiens
tcatacaacaaatcc

SEQ ID NO: 19235 - DNA, 15 bp, Homo sapiens
catacaacaaatcct

SEQ ID NO: 19236 - DNA, 15 bp, Homo sapiens
atacaacaaatcctc

SEQ ID NO: 19237 - DNA, 15 bp, Homo sapiens
tacaacaaatcctct

SEQ ID NO: 19238 - DNA, 15 bp, Homo sapiens
acaacaaatcctctg

SEQ ID NO: 19239 - DNA, 15 bp, Homo sapiens
caacaaatcctctgt

SEQ ID NO: 19240 - DNA, 15 bp, Homo sapiens
aacaaatcctctgta

SEQ ID NO: 19241 - DNA, 15 bp, Homo sapiens
acaaatcctctgtac

SEQ ID NO: 19242 - DNA, 15 bp, Homo sapiens
caaatcctctgtact

SEQ ID NO: 19243 - DNA, 15 bp, Homo sapiens
aaatcctctgtactc

SEQ ID NO: 19244 - DNA, 15 bp, Homo sapiens
aatcctctgtactcc

SEQ ID NO: 19245 - DNA, 15 bp, Homo sapiens
atcctctgtactcca

SEQ ID NO: 19246 - DNA, 15 bp, Homo sapiens
tcctctgtactccat

SEQ ID NO: 19247 - DNA, 15 bp, Homo sapiens
cctctgtactccatc

SEQ ID NO: 19248 - DNA, 15 bp, Homo sapiens
ctctgtactccatcc

SEQ ID NO: 19249 - DNA, 15 bp, Homo sapiens
tctgtactccatccc

SEQ ID NO: 19250 - DNA, 15 bp, Homo sapiens
ctgtactccatccca

SEQ ID NO: 19251 - DNA, 15 bp, Homo sapiens
tgtactccatcccac

SEQ ID NO: 19252 - DNA, 15 bp, Homo sapiens
gtactccatcccaca

SEQ ID NO: 19253 - DNA, 15 bp, Homo sapiens
tactccatcccacaa

SEQ ID NO: 19254 - DNA, 15 bp, Homo sapiens
actccatcccacaag

SEQ ID NO: 19255 - DNA, 15 bp, Homo sapiens
ctccatcccacaagc

SEQ ID NO: 19256 - DNA, 15 bp, Homo sapiens
tccatcccacaagcc

SEQ ID NO: 19257 - DNA, 15 bp, Homo sapiens
ccatcccacaagccc

SEQ ID NO: 19258 - DNA, 15 bp, Homo sapiens
catcccacaagccct

SEQ ID NO: 19259 - DNA, 15 bp, Homo sapiens
atcccacaagccctg

SEQ ID NO: 19260 - DNA, 15 bp, Homo sapiens
tcccacaagccctgt

SEQ ID NO: 19261 - DNA, 15 bp, Homo sapiens
cccacaagccctgtg

SEQ ID NO: 19262 - DNA, 15 bp, Homo sapiens
ccacaagccctgtga

SEQ ID NO: 19263 - DNA, 15 bp, Homo sapiens
cacaagccctgtgac

SEQ ID NO: 19264 - DNA, 15 bp, Homo sapiens
acaagccctgtgaca

SEQ ID NO: 19265 - DNA, 15 bp, Homo sapiens
caagccctgtgacat

SEQ ID NO: 19266 - DNA, 15 bp, Homo sapiens
aagccctgtgacatc

SEQ ID NO: 19267 - DNA, 15 bp, Homo sapiens
agccctgtgacatct

SEQ ID NO: 19268 - DNA, 15 bp, Homo sapiens
gccctgtgacatctt

SEQ ID NO: 19269 - DNA, 15 bp, Homo sapiens
ccctgtgacatctta

SEQ ID NO: 19270 - DNA, 15 bp, Homo sapiens
cctgtgacatcttag

SEQ ID NO: 19271 - DNA, 15 bp, Homo sapiens
ctgtgacatcttagg

SEQ ID NO: 19272 - DNA, 15 bp, Homo sapiens
tgtgacatcttagga

SEQ ID NO: 19273 - DNA, 15 bp, Homo sapiens
gtgacatcttaggac

SEQ ID NO: 19274 - DNA, 15 bp, Homo sapiens
tgacatcttaggacc

SEQ ID NO: 19275 - DNA, 15 bp, Homo sapiens
gacatcttaggacca

SEQ ID NO: 19276 - DNA, 15 bp, Homo sapiens
acatcttaggaccac

SEQ ID NO: 19277 - DNA, 15 bp, Homo sapiens
catcttaggaccact

SEQ ID NO: 19278 - DNA, 15 bp, Homo sapiens
atcttaggaccactc

SEQ ID NO: 19279 - DNA, 15 bp, Homo sapiens
tcttaggaccactct

SEQ ID NO: 19280 - DNA, 15 bp, Homo sapiens
cttaggaccactctg

SEQ ID NO: 19281 - DNA, 15 bp, Homo sapiens
ttaggaccactctgc

SEQ ID NO: 19282 - DNA, 15 bp, Homo sapiens
taggaccactctgca

SEQ ID NO: 19283 - DNA, 15 bp, Homo sapiens
aggaccactctgcat

SEQ ID NO: 19284 - DNA, 15 bp, Homo sapiens
ggaccactctgcatc

SEQ ID NO: 19285 - DNA, 15 bp, Homo sapiens
gaccactctgcatct

SEQ ID NO: 19286 - DNA, 15 bp, Homo sapiens
accactctgcatctc

SEQ ID NO: 19287 - DNA, 15 bp, Homo sapiens
ccactctgcatctct

SEQ ID NO: 19288 - DNA, 15 bp, Homo sapiens
cactctgcatctctt

SEQ ID NO: 19289 - DNA, 15 bp, Homo sapiens
actctgcatctcttt

SEQ ID NO: 19290 - DNA, 15 bp, Homo sapiens
ctctgcatctctttc

SEQ ID NO: 19291 - DNA, 15 bp, Homo sapiens
tctgcatctctttcc

SEQ ID NO: 19292 - DNA, 15 bp, Homo sapiens
ctgcatctctttccc

SEQ ID NO: 19293 - DNA, 15 bp, Homo sapiens
tgcatctctttccct

SEQ ID NO: 19294 - DNA, 15 bp, Homo sapiens
gcatctctttccctg

SEQ ID NO: 19295 - DNA, 15 bp, Homo sapiens
catctctttccctgc

SEQ ID NO: 19296 - DNA, 15 bp, Homo sapiens
atctctttccctgct

SEQ ID NO: 19297 - DNA, 15 bp, Homo sapiens
tctctttccctgctg

SEQ ID NO: 19298 - DNA, 15 bp, Homo sapiens
ctctttccctgctgg

SEQ ID NO: 19299 - DNA, 15 bp, Homo sapiens
tctttccctgctgga

SEQ ID NO: 19300 - DNA, 15 bp, Homo sapiens
ctttccctgctggaa

SEQ ID NO: 19301 - DNA, 15 bp, Homo sapiens
tttccctgctggaac

SEQ ID NO: 19302 - DNA, 15 bp, Homo sapiens
ttccctgctggaacc

SEQ ID NO: 19303 - DNA, 15 bp, Homo sapiens
tccctgctggaacct

SEQ ID NO: 19304 - DNA, 15 bp, Homo sapiens
ccctgctggaaccta

SEQ ID NO: 19305 - DNA, 15 bp, Homo sapiens
cctgctggaacctag

SEQ ID NO: 19306 - DNA, 15 bp, Homo sapiens
ctgctggaacctagc

SEQ ID NO: 19307 - DNA, 15 bp, Homo sapiens
tgctggaacctagca

SEQ ID NO: 19308 - DNA, 15 bp, Homo sapiens
gctggaacctagcac

SEQ ID NO: 19309 - DNA, 15 bp, Homo sapiens
ctggaacctagcact

SEQ ID NO: 19310 - DNA, 15 bp, Homo sapiens
tggaacctagcactg

SEQ ID NO: 19311 - DNA, 15 bp, Homo sapiens
ggaacctagcactgt

SEQ ID NO: 19312 - DNA, 15 bp, Homo sapiens
gaacctagcactgtg

SEQ ID NO: 19313 - DNA, 15 bp, Homo sapiens
aacctagcactgtgc

SEQ ID NO: 19314 - DNA, 15 bp, Homo sapiens
acctagcactgtgcc

SEQ ID NO: 19315 - DNA, 15 bp, Homo sapiens
cctagcactgtgccc

SEQ ID NO: 19316 - DNA, 15 bp, Homo sapiens
ctagcactgtgccca

SEQ ID NO: 19317 - DNA, 15 bp, Homo sapiens
tagcactgtgcccag

SEQ ID NO: 19318 - DNA, 15 bp, Homo sapiens
agcactgtgcccagc

SEQ ID NO: 19319 - DNA, 15 bp, Homo sapiens
gcactgtgcccagca

SEQ ID NO: 19320 - DNA, 15 bp, Homo sapiens
cactgtgcccagcac

SEQ ID NO: 19321 - DNA, 15 bp, Homo sapiens
actgtgcccagcaca

SEQ ID NO: 19322 - DNA, 15 bp, Homo sapiens
ctgtgcccagcacac

SEQ ID NO: 19323 - DNA, 15 bp, Homo sapiens
tgtgcccagcacaca

SEQ ID NO: 19324 - DNA, 15 bp, Homo sapiens
gtgcccagcacacag

SEQ ID NO: 19325 - DNA, 15 bp, Homo sapiens
tgcccagcacacagt

SEQ ID NO: 19326 - DNA, 15 bp, Homo sapiens
gcccagcacacagta

SEQ ID NO: 19327 - DNA, 15 bp, Homo sapiens
cccagcacacagtag

SEQ ID NO: 19328 - DNA, 15 bp, Homo sapiens
ccagcacacagtagg

SEQ ID NO: 19329 - DNA, 15 bp, Homo sapiens
cagcacacagtaggc

SEQ ID NO: 19330 - DNA, 15 bp, Homo sapiens
agcacacagtaggca

SEQ ID NO: 19331 - DNA, 15 bp, Homo sapiens
gcacacagtaggcag

SEQ ID NO: 19332 - DNA, 15 bp, Homo sapiens
cacacagtaggcagt

SEQ ID NO: 19333 - DNA, 15 bp, Homo sapiens
acacagtaggcagtc

SEQ ID NO: 19334 - DNA, 15 bp, Homo sapiens
cacagtaggcagtca

SEQ ID NO: 19335 - DNA, 15 bp, Homo sapiens
acagtaggcagtcaa

SEQ ID NO: 19336 - DNA, 15 bp, Homo sapiens
cagtaggcagtcaat

SEQ ID NO: 19337 - DNA, 15 bp, Homo sapiens
agtaggcagtcaata

SEQ ID NO: 19338 - DNA, 15 bp, Homo sapiens
gtaggcagtcaataa

SEQ ID NO: 19339 - DNA, 15 bp, Homo sapiens
taggcagtcaataaa

SEQ ID NO: 19340 - DNA, 15 bp, Homo sapiens
aggcagtcaataaat

SEQ ID NO: 19341 - DNA, 15 bp, Homo sapiens
ggcagtcaataaatg

SEQ ID NO: 19342 - DNA, 15 bp, Homo sapiens
gcagtcaataaatgc

SEQ ID NO: 19343 - DNA, 15 bp, Homo sapiens
cagtcaataaatgct

SEQ ID NO: 19344 - DNA, 15 bp, Homo sapiens
agtcaataaatgctt

SEQ ID NO: 19345 - DNA, 15 bp, Homo sapiens
gtcaataaatgcttg

SEQ ID NO: 19346 - DNA, 15 bp, Homo sapiens
tcaataaatgcttgt

SEQ ID NO: 19347 - DNA, 15 bp, Homo sapiens
caataaatgcttgtc

SEQ ID NO: 19348 - DNA, 15 bp, Homo sapiens
aataaatgcttgtcg

SEQ ID NO: 19349 - DNA, 15 bp, Homo sapiens
ataaatgcttgtcga

SEQ ID NO: 19350 - DNA, 15 bp, Homo sapiens
taaatgcttgtcgat

SEQ ID NO: 19351 - DNA, 15 bp, Homo sapiens
aaatgcttgtcgatg

SEQ ID NO: 19352 - DNA, 15 bp, Homo sapiens
aatgcttgtcgatga

SEQ ID NO: 19353 - DNA, 15 bp, Homo sapiens
atgcttgtcgatgaa

SEQ ID NO: 19354 - DNA, 15 bp, Homo sapiens
tgcttgtcgatgaat

SEQ ID NO: 19355 - DNA, 15 bp, Homo sapiens
gcttgtcgatgaatc

SEQ ID NO: 19356 - DNA, 15 bp, Homo sapiens
cttgtcgatgaatca

SEQ ID NO: 19357 - DNA, 15 bp, Homo sapiens
ttgtcgatgaatcat

SEQ ID NO: 19358 - DNA, 15 bp, Homo sapiens
tgtcgatgaatcatc

SEQ ID NO: 19359 - DNA, 15 bp, Homo sapiens
gtcgatgaatcatct

SEQ ID NO: 19360 - DNA, 15 bp, Homo sapiens
tcgatgaatcatctc

SEQ ID NO: 19361 - DNA, 15 bp, Homo sapiens
cgatgaatcatctct

SEQ ID NO: 19362 - DNA, 15 bp, Homo sapiens
gatgaatcatctcta

SEQ ID NO: 19363 - DNA, 15 bp, Homo sapiens
atgaatcatctctaa

SEQ ID NO: 19364 - DNA, 15 bp, Homo sapiens
tgaatcatctctaag

SEQ ID NO: 19365 - DNA, 15 bp, Homo sapiens
gaatcatctctaagc

SEQ ID NO: 19366 - DNA, 15 bp, Homo sapiens
aatcatctctaagct

SEQ ID NO: 19367 - DNA, 15 bp, Homo sapiens
atcatctctaagctt

SEQ ID NO: 19368 - DNA, 15 bp, Homo sapiens
tcatctctaagcttt

SEQ ID NO: 19369 - DNA, 15 bp, Homo sapiens
catctctaagcttta

SEQ ID NO: 19370 - DNA, 15 bp, Homo sapiens
atctctaagctttag

SEQ ID NO: 19371 - DNA, 15 bp, Homo sapiens
tctctaagctttaga

SEQ ID NO: 19372 - DNA, 15 bp, Homo sapiens
ctctaagctttagag

SEQ ID NO: 19373 - DNA, 15 bp, Homo sapiens
tctaagctttagagt

SEQ ID NO: 19374 - DNA, 15 bp, Homo sapiens
ctaagctttagagtt

SEQ ID NO: 19375 - DNA, 15 bp, Homo sapiens
taagctttagagtta

SEQ ID NO: 19376 - DNA, 15 bp, Homo sapiens
aagctttagagttac

SEQ ID NO: 19377 - DNA, 15 bp, Homo sapiens
agctttagagttacc

SEQ ID NO: 19378 - DNA, 15 bp, Homo sapiens
gctttagagttacca

SEQ ID NO: 19379 - DNA, 15 bp, Homo sapiens
ctttagagttaccaa

SEQ ID NO: 19380 - DNA, 15 bp, Homo sapiens
tttagagttaccaaa

SEQ ID NO: 19381 - DNA, 15 bp, Homo sapiens
ttagagttaccaaat

SEQ ID NO: 19382 - DNA, 15 bp, Homo sapiens
tagagttaccaaatg

SEQ ID NO: 19383 - DNA, 15 bp, Homo sapiens
agagttaccaaatgc

SEQ ID NO: 19384 - DNA, 15 bp, Homo sapiens
gagttaccaaatgcc

SEQ ID NO: 19385 - DNA, 15 bp, Homo sapiens
agttaccaaatgcct

SEQ ID NO: 19386 - DNA, 15 bp, Homo sapiens
gttaccaaatgcctg

SEQ ID NO: 19387 - DNA, 15 bp, Homo sapiens
ttaccaaatgcctgg

SEQ ID NO: 19388 - DNA, 15 bp, Homo sapiens
taccaaatgcctggt

SEQ ID NO: 19389 - DNA, 15 bp, Homo sapiens
accaaatgcctggtc

SEQ ID NO: 19390 - DNA, 15 bp, Homo sapiens
ccaaatgcctggtcc

SEQ ID NO: 19391 - DNA, 15 bp, Homo sapiens
caaatgcctggtcca

SEQ ID NO: 19392 - DNA, 15 bp, Homo sapiens
aaatgcctggtccag

SEQ ID NO: 19393 - DNA, 15 bp, Homo sapiens
aatgcctggtccagc

SEQ ID NO: 19394 - DNA, 15 bp, Homo sapiens
atgcctggtccagca

SEQ ID NO: 19395 - DNA, 15 bp, Homo sapiens
tgcctggtccagcaa

SEQ ID NO: 19396 - DNA, 15 bp, Homo sapiens
gcctggtccagcaac

SEQ ID NO: 19397 - DNA, 15 bp, Homo sapiens
cctggtccagcaacc

SEQ ID NO: 19398 - DNA, 15 bp, Homo sapiens
ctggtccagcaaccc

SEQ ID NO: 19399 - DNA, 15 bp, Homo sapiens
tggtccagcaaccca

SEQ ID NO: 19400 - DNA, 15 bp, Homo sapiens
ggtccagcaacccag

SEQ ID NO: 19401 - DNA, 15 bp, Homo sapiens
gtccagcaacccagg

SEQ ID NO: 19402 - DNA, 15 bp, Homo sapiens
tccagcaacccaggg

SEQ ID NO: 19403 - DNA, 15 bp, Homo sapiens
ccagcaacccaggga

SEQ ID NO: 19404 - DNA, 15 bp, Homo sapiens
cagcaacccagggaa

SEQ ID NO: 19405 - DNA, 15 bp, Homo sapiens
agcaacccagggaaa

SEQ ID NO: 19406 - DNA, 15 bp, Homo sapiens
gcaacccagggaaag

SEQ ID NO: 19407 - DNA, 15 bp, Homo sapiens
caacccagggaaagc

SEQ ID NO: 19408 - DNA, 15 bp, Homo sapiens
aacccagggaaagca

SEQ ID NO: 19409 - DNA, 15 bp, Homo sapiens
acccagggaaagcag

SEQ ID NO: 19410 - DNA, 15 bp, Homo sapiens
cccagggaaagcagc

SEQ ID NO: 19411 - DNA, 15 bp, Homo sapiens
ccagggaaagcagcc

SEQ ID NO: 19412 - DNA, 15 bp, Homo sapiens
cagggaaagcagcca

SEQ ID NO: 19413 - DNA, 15 bp, Homo sapiens
agggaaagcagccat

SEQ ID NO: 19414 - DNA, 15 bp, Homo sapiens
gggaaagcagccatt

SEQ ID NO: 19415 - DNA, 15 bp, Homo sapiens
ggaaagcagccattt

SEQ ID NO: 19416 - DNA, 15 bp, Homo sapiens
gaaagcagccatttg

SEQ ID NO: 19417 - DNA, 15 bp, Homo sapiens
aaagcagccatttgg

SEQ ID NO: 19418 - DNA, 15 bp, Homo sapiens
aagcagccatttggg

SEQ ID NO: 19419 - DNA, 15 bp, Homo sapiens
agcagccatttgggt

SEQ ID NO: 19420 - DNA, 15 bp, Homo sapiens
gcagccatttgggtt

SEQ ID NO: 19421 - DNA, 15 bp, Homo sapiens
cagccatttgggttt

SEQ ID NO: 19422 - DNA, 15 bp, Homo sapiens
agccatttgggtttc

SEQ ID NO: 19423 - DNA, 15 bp, Homo sapiens
gccatttgggtttct

SEQ ID NO: 19424 - DNA, 15 bp, Homo sapiens
ccatttgggtttctg

SEQ ID NO: 19425 - DNA, 15 bp, Homo sapiens
catttgggtttctga

SEQ ID NO: 19426 - DNA, 15 bp, Homo sapiens
atttgggtttctgaa

SEQ ID NO: 19427 - DNA, 15 bp, Homo sapiens
tttgggtttctgaac

SEQ ID NO: 19428 - DNA, 15 bp, Homo sapiens
ttgggtttctgaact

SEQ ID NO: 19429 - DNA, 15 bp, Homo sapiens
tgggtttctgaactc

SEQ ID NO: 19430 - DNA, 15 bp, Homo sapiens
gggtttctgaactct

SEQ ID NO: 19431 - DNA, 15 bp, Homo sapiens
ggtttctgaactcta

SEQ ID NO: 19432 - DNA, 15 bp, Homo sapiens
gtttctgaactctat

SEQ ID NO: 19433 - DNA, 15 bp, Homo sapiens
tttctgaactctatc

SEQ ID NO: 19434 - DNA, 15 bp, Homo sapiens
ttctgaactctatcc

SEQ ID NO: 19435 - DNA, 15 bp, Homo sapiens
tctgaactctatcct

SEQ ID NO: 19436 - DNA, 15 bp, Homo sapiens
ctgaactctatcctg

SEQ ID NO: 19437 - DNA, 15 bp, Homo sapiens
tgaactctatcctga

SEQ ID NO: 19438 - DNA, 15 bp, Homo sapiens
gaactctatcctgat

SEQ ID NO: 19439 - DNA, 15 bp, Homo sapiens
aactctatcctgatg

SEQ ID NO: 19440 - DNA, 15 bp, Homo sapiens
actctatcctgatgg

SEQ ID NO: 19441 - DNA, 15 bp, Homo sapiens
ctctatcctgatggc

SEQ ID NO: 19442 - DNA, 15 bp, Homo sapiens
tctatcctgatggct

SEQ ID NO: 19443 - DNA, 15 bp, Homo sapiens
ctatcctgatggcta

SEQ ID NO: 19444 - DNA, 15 bp, Homo sapiens
tatcctgatggctac

SEQ ID NO: 19445 - DNA, 15 bp, Homo sapiens
atcctgatggctacc

SEQ ID NO: 19446 - DNA, 15 bp, Homo sapiens
tcctgatggctacca

SEQ ID NO: 19447 - DNA, 15 bp, Homo sapiens
cctgatggctaccac

SEQ ID NO: 19448 - DNA, 15 bp, Homo sapiens
ctgatggctaccacg

SEQ ID NO: 19449 - DNA, 15 bp, Homo sapiens
tgatggctaccacgg

SEQ ID NO: 19450 - DNA, 15 bp, Homo sapiens
gatggctaccacgga

SEQ ID NO: 19451 - DNA, 15 bp, Homo sapiens
atggctaccacggac

SEQ ID NO: 19452 - DNA, 15 bp, Homo sapiens
tggctaccacggact

SEQ ID NO: 19453 - DNA, 15 bp, Homo sapiens
ggctaccacggactt

SEQ ID NO: 19454 - DNA, 15 bp, Homo sapiens
gctaccacggacttc

SEQ ID NO: 19455 - DNA, 15 bp, Homo sapiens
ctaccacggacttct

SEQ ID NO: 19456 - DNA, 15 bp, Homo sapiens
taccacggacttctc

SEQ ID NO: 19457 - DNA, 15 bp, Homo sapiens
accacggacttctcc

SEQ ID NO: 19458 - DNA, 15 bp, Homo sapiens
ccacggacttctccc

SEQ ID NO: 19459 - DNA, 15 bp, Homo sapiens
cacggacttctccca

SEQ ID NO: 19460 - DNA, 15 bp, Homo sapiens
acggacttctcccat

SEQ ID NO: 19461 - DNA, 15 bp, Homo sapiens
cggacttctcccatg

SEQ ID NO: 19462 - DNA, 15 bp, Homo sapiens
ggacttctcccatgc

SEQ ID NO: 19463 - DNA, 15 bp, Homo sapiens
gacttctcccatgcc

SEQ ID NO: 19464 - DNA, 15 bp, Homo sapiens
acttctcccatgccc

SEQ ID NO: 19465 - DNA, 15 bp, Homo sapiens
cttctcccatgccct

SEQ ID NO: 19466 - DNA, 15 bp, Homo sapiens
ttctcccatgccctc

SEQ ID NO: 19467 - DNA, 15 bp, Homo sapiens
tctcccatgccctca

SEQ ID NO: 19468 - DNA, 15 bp, Homo sapiens
ctcccatgccctcac

SEQ ID NO: 19469 - DNA, 15 bp, Homo sapiens
tcccatgccctcacc

SEQ ID NO: 19470 - DNA, 15 bp, Homo sapiens
cccatgccctcacct

SEQ ID NO: 19471 - DNA, 15 bp, Homo sapiens
ccatgccctcacctg

SEQ ID NO: 19472 - DNA, 15 bp, Homo sapiens
catgccctcacctga

SEQ ID NO: 19473 - DNA, 15 bp, Homo sapiens
atgccctcacctgat

SEQ ID NO: 19474 - DNA, 15 bp, Homo sapiens
tgccctcacctgatg

SEQ ID NO: 19475 - DNA, 15 bp, Homo sapiens
gccctcacctgatgt

SEQ ID NO: 19476 - DNA, 15 bp, Homo sapiens
ccctcacctgatgtg

SEQ ID NO: 19477 - DNA, 15 bp, Homo sapiens
cctcacctgatgtgg

SEQ ID NO: 19478 - DNA, 15 bp, Homo sapiens
ctcacctgatgtggc

SEQ ID NO: 19479 - DNA, 15 bp, Homo sapiens
tcacctgatgtggct

SEQ ID NO: 19480 - DNA, 15 bp, Homo sapiens
cacctgatgtggctg

SEQ ID NO: 19481 - DNA, 15 bp, Homo sapiens
acctgatgtggctgt

SEQ ID NO: 19482 - DNA, 15 bp, Homo sapiens
cctgatgtggctgtg

SEQ ID NO: 19483 - DNA, 15 bp, Homo sapiens
ctgatgtggctgtgc

SEQ ID NO: 19484 - DNA, 15 bp, Homo sapiens
tgatgtggctgtgct

SEQ ID NO: 19485 - DNA, 15 bp, Homo sapiens
gatgtggctgtgctc

SEQ ID NO: 19486 - DNA, 15 bp, Homo sapiens
atgtggctgtgctca

SEQ ID NO: 19487 - DNA, 15 bp, Homo sapiens
tgtggctgtgctcag

SEQ ID NO: 19488 - DNA, 15 bp, Homo sapiens
gtggctgtgctcagt

SEQ ID NO: 19489 - DNA, 15 bp, Homo sapiens
tggctgtgctcagtg

SEQ ID NO: 19490 - DNA, 15 bp, Homo sapiens
ggctgtgctcagtgc

SEQ ID NO: 19491 - DNA, 15 bp, Homo sapiens
gctgtgctcagtgca

SEQ ID NO: 19492 - DNA, 15 bp, Homo sapiens
ctgtgctcagtgcac

SEQ ID NO: 19493 - DNA, 15 bp, Homo sapiens
tgtgctcagtgcaca

SEQ ID NO: 19494 - DNA, 15 bp, Homo sapiens
gtgctcagtgcacag

SEQ ID NO: 19495 - DNA, 15 bp, Homo sapiens
tgctcagtgcacaga

SEQ ID NO: 19496 - DNA, 15 bp, Homo sapiens
gctcagtgcacagag

SEQ ID NO: 19497 - DNA, 15 bp, Homo sapiens
ctcagtgcacagagg

SEQ ID NO: 19498 - DNA, 15 bp, Homo sapiens
tcagtgcacagaggg

SEQ ID NO: 19499 - DNA, 15 bp, Homo sapiens
cagtgcacagagggc

SEQ ID NO: 19500 - DNA, 15 bp, Homo sapiens
agtgcacagagggcc

SEQ ID NO: 19501 - DNA, 15 bp, Homo sapiens
gtgcacagagggcct

SEQ ID NO: 19502 - DNA, 15 bp, Homo sapiens
tgcacagagggccta

SEQ ID NO: 19503 - DNA, 15 bp, Homo sapiens
gcacagagggcctac

SEQ ID NO: 19504 - DNA, 15 bp, Homo sapiens
cacagagggcctaca

SEQ ID NO: 19505 - DNA, 15 bp, Homo sapiens
acagagggcctacag

SEQ ID NO: 19506 - DNA, 15 bp, Homo sapiens
cagagggcctacagc

SEQ ID NO: 19507 - DNA, 15 bp, Homo sapiens
agagggcctacagcc

SEQ ID NO: 19508 - DNA, 15 bp, Homo sapiens
gagggcctacagcca

SEQ ID NO: 19509 - DNA, 15 bp, Homo sapiens
agggcctacagccaa

SEQ ID NO: 19510 - DNA, 15 bp, Homo sapiens
gggcctacagccaac

SEQ ID NO: 19511 - DNA, 15 bp, Homo sapiens
ggcctacagccaaca

SEQ ID NO: 19512 - DNA, 15 bp, Homo sapiens
gcctacagccaacat

SEQ ID NO: 19513 - DNA, 15 bp, Homo sapiens
cctacagccaacatt

SEQ ID NO: 19514 - DNA, 15 bp, Homo sapiens
ctacagccaacattt

SEQ ID NO: 19515 - DNA, 15 bp, Homo sapiens
tacagccaacatttc

SEQ ID NO: 19516 - DNA, 15 bp, Homo sapiens
acagccaacatttcc

SEQ ID NO: 19517 - DNA, 15 bp, Homo sapiens
cagccaacatttcct

SEQ ID NO: 19518 - DNA, 15 bp, Homo sapiens
agccaacatttcctc

SEQ ID NO: 19519 - DNA, 15 bp, Homo sapiens
gccaacatttcctca

SEQ ID NO: 19520 - DNA, 15 bp, Homo sapiens
ccaacatttcctcaa

SEQ ID NO: 19521 - DNA, 15 bp, Homo sapiens
caacatttcctcaac

SEQ ID NO: 19522 - DNA, 15 bp, Homo sapiens
aacatttcctcaaca

SEQ ID NO: 19523 - DNA, 15 bp, Homo sapiens
acatttcctcaacag

SEQ ID NO: 19524 - DNA, 15 bp, Homo sapiens
catttcctcaacagg

SEQ ID NO: 19525 - DNA, 15 bp, Homo sapiens
atttcctcaacagga

SEQ ID NO: 19526 - DNA, 15 bp, Homo sapiens
tttcctcaacaggaa

SEQ ID NO: 19527 - DNA, 15 bp, Homo sapiens
ttcctcaacaggaag

SEQ ID NO: 19528 - DNA, 15 bp, Homo sapiens
tcctcaacaggaagc

SEQ ID NO: 19529 - DNA, 15 bp, Homo sapiens
cctcaacaggaagcc

SEQ ID NO: 19530 - DNA, 15 bp, Homo sapiens
ctcaacaggaagccc

SEQ ID NO: 19531 - DNA, 15 bp, Homo sapiens
tcaacaggaagccct

SEQ ID NO: 19532 - DNA, 15 bp, Homo sapiens
caacaggaagccctc

SEQ ID NO: 19533 - DNA, 15 bp, Homo sapiens
aacaggaagccctct

SEQ ID NO: 19534 - DNA, 15 bp, Homo sapiens
acaggaagccctctg

SEQ ID NO: 19535 - DNA, 15 bp, Homo sapiens
caggaagccctctga

SEQ ID NO: 19536 - DNA, 15 bp, Homo sapiens
aggaagccctctgat

SEQ ID NO: 19537 - DNA, 15 bp, Homo sapiens
ggaagccctctgata

SEQ ID NO: 19538 - DNA, 15 bp, Homo sapiens
gaagccctctgatag

SEQ ID NO: 19539 - DNA, 15 bp, Homo sapiens
aagccctctgatagg

SEQ ID NO: 19540 - DNA, 15 bp, Homo sapiens
agccctctgataggg

SEQ ID NO: 19541 - DNA, 15 bp, Homo sapiens
gccctctgatagggc

SEQ ID NO: 19542 - DNA, 15 bp, Homo sapiens
ccctctgatagggct

SEQ ID NO: 19543 - DNA, 15 bp, Homo sapiens
cctctgatagggctc

SEQ ID NO: 19544 - DNA, 15 bp, Homo sapiens
ctctgatagggctcc

SEQ ID NO: 19545 - DNA, 15 bp, Homo sapiens
tctgatagggctccc

SEQ ID NO: 19546 - DNA, 15 bp, Homo sapiens
ctgatagggctccca

SEQ ID NO: 19547 - DNA, 15 bp, Homo sapiens
tgatagggctcccac

SEQ ID NO: 19548 - DNA, 15 bp, Homo sapiens
gatagggctcccaca

SEQ ID NO: 19549 - DNA, 15 bp, Homo sapiens
atagggctcccacag

SEQ ID NO: 19550 - DNA, 15 bp, Homo sapiens
tagggctcccacagg

SEQ ID NO: 19551 - DNA, 15 bp, Homo sapiens
agggctcccacaggt

SEQ ID NO: 19552 - DNA, 15 bp, Homo sapiens
gggctcccacaggta

SEQ ID NO: 19553 - DNA, 15 bp, Homo sapiens
ggctcccacaggtaa

SEQ ID NO: 19554 - DNA, 15 bp, Homo sapiens
gctcccacaggtaag

SEQ ID NO: 19555 - DNA, 15 bp, Homo sapiens
ctcccacaggtaagg

SEQ ID NO: 19556 - DNA, 15 bp, Homo sapiens
tcccacaggtaaggg

SEQ ID NO: 19557 - DNA, 15 bp, Homo sapiens
cccacaggtaaggga

SEQ ID NO: 19558 - DNA, 15 bp, Homo sapiens
ccacaggtaagggat

SEQ ID NO: 19559 - DNA, 15 bp, Homo sapiens
cacaggtaagggata

SEQ ID NO: 19560 - DNA, 15 bp, Homo sapiens
acaggtaagggatat

SEQ ID NO: 19561 - DNA, 15 bp, Homo sapiens
caggtaagggatata

SEQ ID NO: 19562 - DNA, 15 bp, Homo sapiens
aggtaagggatatac

SEQ ID NO: 19563 - DNA, 15 bp, Homo sapiens
ggtaagggatatacc

SEQ ID NO: 19564 - DNA, 15 bp, Homo sapiens
gtaagggatataccc

SEQ ID NO: 19565 - DNA, 15 bp, Homo sapiens
taagggatataccct

SEQ ID NO: 19566 - DNA, 15 bp, Homo sapiens
aagggatataccctg

SEQ ID NO: 19567 - DNA, 15 bp, Homo sapiens
agggatataccctga

SEQ ID NO: 19568 - DNA, 15 bp, Homo sapiens
gggatataccctgag

SEQ ID NO: 19569 - DNA, 15 bp, Homo sapiens
ggatataccctgaga

SEQ ID NO: 19570 - DNA, 15 bp, Homo sapiens
gatataccctgagat

SEQ ID NO: 19571 - DNA, 15 bp, Homo sapiens
atataccctgagatc

SEQ ID NO: 19572 - DNA, 15 bp, Homo sapiens
tataccctgagatcc

SEQ ID NO: 19573 - DNA, 15 bp, Homo sapiens
ataccctgagatcct

SEQ ID NO: 19574 - DNA, 15 bp, Homo sapiens
taccctgagatcctc

SEQ ID NO: 19575 - DNA, 15 bp, Homo sapiens
accctgagatcctcc

SEQ ID NO: 19576 - DNA, 15 bp, Homo sapiens
ccctgagatcctccg

SEQ ID NO: 19577 - DNA, 15 bp, Homo sapiens
cctgagatcctccgc

SEQ ID NO: 19578 - DNA, 15 bp, Homo sapiens
ctgagatcctccgcc

SEQ ID NO: 19579 - DNA, 15 bp, Homo sapiens
tgagatcctccgcca

SEQ ID NO: 19580 - DNA, 15 bp, Homo sapiens
gagatcctccgccat

SEQ ID NO: 19581 - DNA, 15 bp, Homo sapiens
agatcctccgccatt

SEQ ID NO: 19582 - DNA, 15 bp, Homo sapiens
gatcctccgccattt

SEQ ID NO: 19583 - DNA, 15 bp, Homo sapiens
atcctccgccatttc

SEQ ID NO: 19584 - DNA, 15 bp, Homo sapiens
tcctccgccatttcc

SEQ ID NO: 19585 - DNA, 15 bp, Homo sapiens
cctccgccatttccc

SEQ ID NO: 19586 - DNA, 15 bp, Homo sapiens
ctccgccatttccca

SEQ ID NO: 19587 - DNA, 15 bp, Homo sapiens
tccgccatttcccaa

SEQ ID NO: 19588 - DNA, 15 bp, Homo sapiens
ccgccatttcccaag

SEQ ID NO: 19589 - DNA, 15 bp, Homo sapiens
cgccatttcccaaga

SEQ ID NO: 19590 - DNA, 15 bp, Homo sapiens
gccatttcccaagag

SEQ ID NO: 19591 - DNA, 15 bp, Homo sapiens
ccatttcccaagagg

SEQ ID NO: 19592 - DNA, 15 bp, Homo sapiens
catttcccaagaggg

SEQ ID NO: 19593 - DNA, 15 bp, Homo sapiens
atttcccaagagggc

SEQ ID NO: 19594 - DNA, 15 bp, Homo sapiens
tttcccaagagggct

SEQ ID NO: 19595 - DNA, 15 bp, Homo sapiens
ttcccaagagggcta

SEQ ID NO: 19596 - DNA, 15 bp, Homo sapiens
tcccaagagggctag

SEQ ID NO: 19597 - DNA, 15 bp, Homo sapiens
cccaagagggctagg

SEQ ID NO: 19598 - DNA, 15 bp, Homo sapiens
ccaagagggctaggt

SEQ ID NO: 19599 - DNA, 15 bp, Homo sapiens
caagagggctaggtc

SEQ ID NO: 19600 - DNA, 15 bp, Homo sapiens
aagagggctaggtca

SEQ ID NO: 19601 - DNA, 15 bp, Homo sapiens
agagggctaggtcac

SEQ ID NO: 19602 - DNA, 15 bp, Homo sapiens
gagggctaggtcaca

SEQ ID NO: 19603 - DNA, 15 bp, Homo sapiens
agggctaggtcacaa

SEQ ID NO: 19604 - DNA, 15 bp, Homo sapiens
gggctaggtcacaaa

SEQ ID NO: 19605 - DNA, 15 bp, Homo sapiens
ggctaggtcacaaag

SEQ ID NO: 19606 - DNA, 15 bp, Homo sapiens
gctaggtcacaaagg

SEQ ID NO: 19607 - DNA, 15 bp, Homo sapiens
ctaggtcacaaaggg

SEQ ID NO: 19608 - DNA, 15 bp, Homo sapiens
taggtcacaaagggt

SEQ ID NO: 19609 - DNA, 15 bp, Homo sapiens
aggtcacaaagggtg

SEQ ID NO: 19610 - DNA, 15 bp, Homo sapiens
ggtcacaaagggtgg

SEQ ID NO: 19611 - DNA, 15 bp, Homo sapiens
gtcacaaagggtggc

SEQ ID NO: 19612 - DNA, 15 bp, Homo sapiens
tcacaaagggtggct

SEQ ID NO: 19613 - DNA, 15 bp, Homo sapiens
cacaaagggtggcta

SEQ ID NO: 19614 - DNA, 15 bp, Homo sapiens
acaaagggtggctag

SEQ ID NO: 19615 - DNA, 15 bp, Homo sapiens
caaagggtggctagt

SEQ ID NO: 19616 - DNA, 15 bp, Homo sapiens
aaagggtggctagtc

SEQ ID NO: 19617 - DNA, 15 bp, Homo sapiens
aagggtggctagtct

SEQ ID NO: 19618 - DNA, 15 bp, Homo sapiens
agggtggctagtctt

SEQ ID NO: 19619 - DNA, 15 bp, Homo sapiens
gggtggctagtcttc

SEQ ID NO: 19620 - DNA, 15 bp, Homo sapiens
ggtggctagtcttca

SEQ ID NO: 19621 - DNA, 15 bp, Homo sapiens
gtggctagtcttcaa

SEQ ID NO: 19622 - DNA, 15 bp, Homo sapiens
tggctagtcttcaac

SEQ ID NO: 19623 - DNA, 15 bp, Homo sapiens
ggctagtcttcaaca

SEQ ID NO: 19624 - DNA, 15 bp, Homo sapiens
gctagtcttcaacag

SEQ ID NO: 19625 - DNA, 15 bp, Homo sapiens
ctagtcttcaacagt

SEQ ID NO: 19626 - DNA, 15 bp, Homo sapiens
tagtcttcaacagtg

SEQ ID NO: 19627 - DNA, 15 bp, Homo sapiens
agtcttcaacagtgc

SEQ ID NO: 19628 - DNA, 15 bp, Homo sapiens
gtcttcaacagtgct

SEQ ID NO: 19629 - DNA, 15 bp, Homo sapiens
tcttcaacagtgctg

SEQ ID NO: 19630 - DNA, 15 bp, Homo sapiens
cttcaacagtgctgc

SEQ ID NO: 19631 - DNA, 15 bp, Homo sapiens
ttcaacagtgctgca

SEQ ID NO: 19632 - DNA, 15 bp, Homo sapiens
tcaacagtgctgcaa

SEQ ID NO: 19633 - DNA, 15 bp, Homo sapiens
caacagtgctgcaag

SEQ ID NO: 19634 - DNA, 15 bp, Homo sapiens
aacagtgctgcaagt

SEQ ID NO: 19635 - DNA, 15 bp, Homo sapiens
acagtgctgcaagtc

SEQ ID NO: 19636 - DNA, 15 bp, Homo sapiens
cagtgctgcaagtca

SEQ ID NO: 19637 - DNA, 15 bp, Homo sapiens
agtgctgcaagtcac

SEQ ID NO: 19638 - DNA, 15 bp, Homo sapiens
gtgctgcaagtcact

SEQ ID NO: 19639 - DNA, 15 bp, Homo sapiens
tgctgcaagtcactg

SEQ ID NO: 19640 - DNA, 15 bp, Homo sapiens
gctgcaagtcactgg

SEQ ID NO: 19641 - DNA, 15 bp, Homo sapiens
ctgcaagtcactggc

SEQ ID NO: 19642 - DNA, 15 bp, Homo sapiens
tgcaagtcactggca

SEQ ID NO: 19643 - DNA, 15 bp, Homo sapiens
gcaagtcactggcag

SEQ ID NO: 19644 - DNA, 15 bp, Homo sapiens
caagtcactggcagc

SEQ ID NO: 19645 - DNA, 15 bp, Homo sapiens
aagtcactggcagca

SEQ ID NO: 19646 - DNA, 15 bp, Homo sapiens
agtcactggcagcac

SEQ ID NO: 19647 - DNA, 15 bp, Homo sapiens
gtcactggcagcaca

SEQ ID NO: 19648 - DNA, 15 bp, Homo sapiens
tcactggcagcacac

SEQ ID NO: 19649 - DNA, 15 bp, Homo sapiens
cactggcagcacaca

SEQ ID NO: 19650 - DNA, 15 bp, Homo sapiens
actggcagcacacag

SEQ ID NO: 19651 - DNA, 15 bp, Homo sapiens
ctggcagcacacagg

SEQ ID NO: 19652 - DNA, 15 bp, Homo sapiens
tggcagcacacaggt

SEQ ID NO: 19653 - DNA, 15 bp, Homo sapiens
ggcagcacacaggtt

SEQ ID NO: 19654 - DNA, 15 bp, Homo sapiens
gcagcacacaggttc

SEQ ID NO: 19655 - DNA, 15 bp, Homo sapiens
cagcacacaggttct

SEQ ID NO: 19656 - DNA, 15 bp, Homo sapiens
agcacacaggttcta

SEQ ID NO: 19657 - DNA, 15 bp, Homo sapiens
gcacacaggttctaa

SEQ ID NO: 19658 - DNA, 15 bp, Homo sapiens
cacacaggttctaaa

SEQ ID NO: 19659 - DNA, 15 bp, Homo sapiens
acacaggttctaaaa

SEQ ID NO: 19660 - DNA, 15 bp, Homo sapiens
cacaggttctaaaac

SEQ ID NO: 19661 - DNA, 15 bp, Homo sapiens
acaggttctaaaaca

SEQ ID NO: 19662 - DNA, 15 bp, Homo sapiens
caggttctaaaacaa

SEQ ID NO: 19663 - DNA, 15 bp, Homo sapiens
aggttctaaaacaat

SEQ ID NO: 19664 - DNA, 15 bp, Homo sapiens
ggttctaaaacaata

SEQ ID NO: 19665 - DNA, 15 bp, Homo sapiens
gttctaaaacaataa

SEQ ID NO: 19666 - DNA, 15 bp, Homo sapiens
ttctaaaacaataat

SEQ ID NO: 19667 - DNA, 15 bp, Homo sapiens
tctaaaacaataata

SEQ ID NO: 19668 - DNA, 15 bp, Homo sapiens
ctaaaacaataatat

SEQ ID NO: 19669 - DNA, 15 bp, Homo sapiens
taaaacaataatatg

SEQ ID NO: 19670 - DNA, 15 bp, Homo sapiens
aaaacaataatatgt

SEQ ID NO: 19671 - DNA, 15 bp, Homo sapiens
aaacaataatatgtt

SEQ ID NO: 19672 - DNA, 15 bp, Homo sapiens
aacaataatatgttg

SEQ ID NO: 19673 - DNA, 15 bp, Homo sapiens
acaataatatgttga

SEQ ID NO: 19674 - DNA, 15 bp, Homo sapiens
caataatatgttgaa

SEQ ID NO: 19675 - DNA, 15 bp, Homo sapiens
aataatatgttgaaa

SEQ ID NO: 19676 - DNA, 15 bp, Homo sapiens
ataatatgttgaaat

SEQ ID NO: 19677 - DNA, 15 bp, Homo sapiens
taatatgttgaaatg

SEQ ID NO: 19678 - DNA, 15 bp, Homo sapiens
aatatgttgaaatgt

SEQ ID NO: 19679 - DNA, 15 bp, Homo sapiens
atatgttgaaatgta

SEQ ID NO: 19680 - DNA, 15 bp, Homo sapiens
tatgttgaaatgtac

SEQ ID NO: 19681 - DNA, 15 bp, Homo sapiens
atgttgaaatgtact

SEQ ID NO: 19682 - DNA, 15 bp, Homo sapiens
tgttgaaatgtactc

SEQ ID NO: 19683 - DNA, 15 bp, Homo sapiens
gttgaaatgtactca

SEQ ID NO: 19684 - DNA, 15 bp, Homo sapiens
ttgaaatgtactcac

SEQ ID NO: 19685 - DNA, 15 bp, Homo sapiens
tgaaatgtactcacc

SEQ ID NO: 19686 - DNA, 15 bp, Homo sapiens
gaaatgtactcacca

SEQ ID NO: 19687 - DNA, 15 bp, Homo sapiens
aaatgtactcaccaa

SEQ ID NO: 19688 - DNA, 15 bp, Homo sapiens
aatgtactcaccaag

SEQ ID NO: 19689 - DNA, 15 bp, Homo sapiens
atgtactcaccaaga

SEQ ID NO: 19690 - DNA, 15 bp, Homo sapiens
tgtactcaccaagaa

SEQ ID NO: 19691 - DNA, 15 bp, Homo sapiens
gtactcaccaagaaa

SEQ ID NO: 19692 - DNA, 15 bp, Homo sapiens
tactcaccaagaaag

SEQ ID NO: 19693 - DNA, 15 bp, Homo sapiens
actcaccaagaaagc

SEQ ID NO: 19694 - DNA, 15 bp, Homo sapiens
ctcaccaagaaagcc

SEQ ID NO: 19695 - DNA, 15 bp, Homo sapiens
tcaccaagaaagcca

SEQ ID NO: 19696 - DNA, 15 bp, Homo sapiens
caccaagaaagccac

SEQ ID NO: 19697 - DNA, 15 bp, Homo sapiens
accaagaaagccacc

SEQ ID NO: 19698 - DNA, 15 bp, Homo sapiens
ccaagaaagccaccg

SEQ ID NO: 19699 - DNA, 15 bp, Homo sapiens
caagaaagccaccga

SEQ ID NO: 19700 - DNA, 15 bp, Homo sapiens
aagaaagccaccgac

SEQ ID NO: 19701 - DNA, 15 bp, Homo sapiens
agaaagccaccgacc

SEQ ID NO: 19702 - DNA, 15 bp, Homo sapiens
gaaagccaccgacct

SEQ ID NO: 19703 - DNA, 15 bp, Homo sapiens
aaagccaccgaccta

SEQ ID NO: 19704 - DNA, 15 bp, Homo sapiens
aagccaccgacctac

SEQ ID NO: 19705 - DNA, 15 bp, Homo sapiens
agccaccgacctaca

SEQ ID NO: 19706 - DNA, 15 bp, Homo sapiens
gccaccgacctacaa

SEQ ID NO: 19707 - DNA, 15 bp, Homo sapiens
ccaccgacctacaaa

SEQ ID NO: 19708 - DNA, 15 bp, Homo sapiens
caccgacctacaaag

SEQ ID NO: 19709 - DNA, 15 bp, Homo sapiens
accgacctacaaaga

SEQ ID NO: 19710 - DNA, 15 bp, Homo sapiens
ccgacctacaaagaa

SEQ ID NO: 19711 - DNA, 15 bp, Homo sapiens
cgacctacaaagaaa

SEQ ID NO: 19712 - DNA, 15 bp, Homo sapiens
gacctacaaagaaac

SEQ ID NO: 19713 - DNA, 15 bp, Homo sapiens
acctacaaagaaacc

SEQ ID NO: 19714 - DNA, 15 bp, Homo sapiens
cctacaaagaaaccc

SEQ ID NO: 19715 - DNA, 15 bp, Homo sapiens
ctacaaagaaaccct

SEQ ID NO: 19716 - DNA, 15 bp, Homo sapiens
tacaaagaaaccctt

SEQ ID NO: 19717 - DNA, 15 bp, Homo sapiens
acaaagaaaccctta

SEQ ID NO: 19718 - DNA, 15 bp, Homo sapiens
caaagaaacccttat

SEQ ID NO: 19719 - DNA, 15 bp, Homo sapiens
aaagaaacccttatc

SEQ ID NO: 19720 - DNA, 15 bp, Homo sapiens
aagaaacccttatcg

SEQ ID NO: 19721 - DNA, 15 bp, Homo sapiens
agaaacccttatcgc

SEQ ID NO: 19722 - DNA, 15 bp, Homo sapiens
gaaacccttatcgct

SEQ ID NO: 19723 - DNA, 15 bp, Homo sapiens
aaacccttatcgctg

SEQ ID NO: 19724 - DNA, 15 bp, Homo sapiens
aacccttatcgctga

SEQ ID NO: 19725 - DNA, 15 bp, Homo sapiens
acccttatcgctgat

SEQ ID NO: 19726 - DNA, 15 bp, Homo sapiens
cccttatcgctgatc

SEQ ID NO: 19727 - DNA, 15 bp, Homo sapiens
ccttatcgctgatct

SEQ ID NO: 19728 - DNA, 15 bp, Homo sapiens
cttatcgctgatctt

SEQ ID NO: 19729 - DNA, 15 bp, Homo sapiens
ttatcgctgatcttg

SEQ ID NO: 19730 - DNA, 15 bp, Homo sapiens
tatcgctgatcttgc

SEQ ID NO: 19731 - DNA, 15 bp, Homo sapiens
atcgctgatcttgca

SEQ ID NO: 19732 - DNA, 15 bp, Homo sapiens
tcgctgatcttgcaa

SEQ ID NO: 19733 - DNA, 15 bp, Homo sapiens
cgctgatcttgcaat

SEQ ID NO: 19734 - DNA, 15 bp, Homo sapiens
gctgatcttgcaatg

SEQ ID NO: 19735 - DNA, 15 bp, Homo sapiens
ctgatcttgcaatga

SEQ ID NO: 19736 - DNA, 15 bp, Homo sapiens
tgatcttgcaatgag

SEQ ID NO: 19737 - DNA, 15 bp, Homo sapiens
gatcttgcaatgagc

SEQ ID NO: 19738 - DNA, 15 bp, Homo sapiens
atcttgcaatgagca

SEQ ID NO: 19739 - DNA, 15 bp, Homo sapiens
tcttgcaatgagcac

SEQ ID NO: 19740 - DNA, 15 bp, Homo sapiens
cttgcaatgagcacc

SEQ ID NO: 19741 - DNA, 15 bp, Homo sapiens
ttgcaatgagcacca

SEQ ID NO: 19742 - DNA, 15 bp, Homo sapiens
tgcaatgagcaccaa

SEQ ID NO: 19743 - DNA, 15 bp, Homo sapiens
gcaatgagcaccaac

SEQ ID NO: 19744 - DNA, 15 bp, Homo sapiens
caatgagcaccaacc

SEQ ID NO: 19745 - DNA, 15 bp, Homo sapiens
aatgagcaccaacct

SEQ ID NO: 19746 - DNA, 15 bp, Homo sapiens
atgagcaccaacctc

SEQ ID NO: 19747 - DNA, 15 bp, Homo sapiens
tgagcaccaacctcc

SEQ ID NO: 19748 - DNA, 15 bp, Homo sapiens
gagcaccaacctccc

SEQ ID NO: 19749 - DNA, 15 bp, Homo sapiens
agcaccaacctcccc

SEQ ID NO: 19750 - DNA, 15 bp, Homo sapiens
gcaccaacctcccct

SEQ ID NO: 19751 - DNA, 15 bp, Homo sapiens
caccaacctcccctt

SEQ ID NO: 19752 - DNA, 15 bp, Homo sapiens
accaacctccccttt

SEQ ID NO: 19753 - DNA, 15 bp, Homo sapiens
ccaacctcccctttg

SEQ ID NO: 19754 - DNA, 15 bp, Homo sapiens
caacctcccctttgc

SEQ ID NO: 19755 - DNA, 15 bp, Homo sapiens
aacctcccctttgca

SEQ ID NO: 19756 - DNA, 15 bp, Homo sapiens
acctcccctttgcaa

SEQ ID NO: 19757 - DNA, 15 bp, Homo sapiens
cctcccctttgcaag

SEQ ID NO: 19758 - DNA, 15 bp, Homo sapiens
ctcccctttgcaaga

SEQ ID NO: 19759 - DNA, 15 bp, Homo sapiens
tcccctttgcaagag

SEQ ID NO: 19760 - DNA, 15 bp, Homo sapiens
cccctttgcaagagc

SEQ ID NO: 19761 - DNA, 15 bp, Homo sapiens
ccctttgcaagagct

SEQ ID NO: 19762 - DNA, 15 bp, Homo sapiens
cctttgcaagagctg

SEQ ID NO: 19763 - DNA, 15 bp, Homo sapiens
ctttgcaagagctga

SEQ ID NO: 19764 - DNA, 15 bp, Homo sapiens
tttgcaagagctgag

SEQ ID NO: 19765 - DNA, 15 bp, Homo sapiens
ttgcaagagctgaga

SEQ ID NO: 19766 - DNA, 15 bp, Homo sapiens
tgcaagagctgagat

SEQ ID NO: 19767 - DNA, 15 bp, Homo sapiens
gcaagagctgagatc

SEQ ID NO: 19768 - DNA, 15 bp, Homo sapiens
caagagctgagatcg

SEQ ID NO: 19769 - DNA, 15 bp, Homo sapiens
aagagctgagatcga

SEQ ID NO: 19770 - DNA, 15 bp, Homo sapiens
agagctgagatcgaa

SEQ ID NO: 19771 - DNA, 15 bp, Homo sapiens
gagctgagatcgaaa

SEQ ID NO: 19772 - DNA, 15 bp, Homo sapiens
agctgagatcgaaag

SEQ ID NO: 19773 - DNA, 15 bp, Homo sapiens
gctgagatcgaaaga

SEQ ID NO: 19774 - DNA, 15 bp, Homo sapiens
ctgagatcgaaagat

SEQ ID NO: 19775 - DNA, 15 bp, Homo sapiens
tgagatcgaaagata

SEQ ID NO: 19776 - DNA, 15 bp, Homo sapiens
gagatcgaaagataa

SEQ ID NO: 19777 - DNA, 15 bp, Homo sapiens
agatcgaaagataaa

SEQ ID NO: 19778 - DNA, 15 bp, Homo sapiens
gatcgaaagataaag

SEQ ID NO: 19779 - DNA, 15 bp, Homo sapiens
atcgaaagataaaga

SEQ ID NO: 19780 - DNA, 15 bp, Homo sapiens
tcgaaagataaagaa

SEQ ID NO: 19781 - DNA, 15 bp, Homo sapiens
cgaaagataaagaag

SEQ ID NO: 19782 - DNA, 15 bp, Homo sapiens
gaaagataaagaagc

SEQ ID NO: 19783 - DNA, 15 bp, Homo sapiens
aaagataaagaagct

SEQ ID NO: 19784 - DNA, 15 bp, Homo sapiens
aagataaagaagcta

SEQ ID NO: 19785 - DNA, 15 bp, Homo sapiens
agataaagaagctat

SEQ ID NO: 19786 - DNA, 15 bp, Homo sapiens
gataaagaagctatc

SEQ ID NO: 19787 - DNA, 15 bp, Homo sapiens
ataaagaagctatca

SEQ ID NO: 19788 - DNA, 15 bp, Homo sapiens
taaagaagctatcaa

SEQ ID NO: 19789 - DNA, 15 bp, Homo sapiens
aaagaagctatcaaa

SEQ ID NO: 19790 - DNA, 15 bp, Homo sapiens
aagaagctatcaaaa

SEQ ID NO: 19791 - DNA, 15 bp, Homo sapiens
agaagctatcaaaaa

SEQ ID NO: 19792 - DNA, 15 bp, Homo sapiens
gaagctatcaaaaag

SEQ ID NO: 19793 - DNA, 15 bp, Homo sapiens
aagctatcaaaaagc

SEQ ID NO: 19794 - DNA, 15 bp, Homo sapiens
agctatcaaaaagcc

SEQ ID NO: 19795 - DNA, 15 bp, Homo sapiens
gctatcaaaaagcca

SEQ ID NO: 19796 - DNA, 15 bp, Homo sapiens
ctatcaaaaagccat

SEQ ID NO: 19797 - DNA, 15 bp, Homo sapiens
tatcaaaaagccatc

SEQ ID NO: 19798 - DNA, 15 bp, Homo sapiens
atcaaaaagccatct

SEQ ID NO: 19799 - DNA, 15 bp, Homo sapiens
tcaaaaagccatctg

SEQ ID NO: 19800 - DNA, 15 bp, Homo sapiens
caaaaagccatctgc

SEQ ID NO: 19801 - DNA, 15 bp, Homo sapiens
aaaaagccatctgcc

SEQ ID NO: 19802 - DNA, 15 bp, Homo sapiens
aaaagccatctgccc

SEQ ID NO: 19803 - DNA, 15 bp, Homo sapiens
aaagccatctgccca

SEQ ID NO: 19804 - DNA, 15 bp, Homo sapiens
aagccatctgcccac

SEQ ID NO: 19805 - DNA, 15 bp, Homo sapiens
agccatctgcccact

SEQ ID NO: 19806 - DNA, 15 bp, Homo sapiens
gccatctgcccactt

SEQ ID NO: 19807 - DNA, 15 bp, Homo sapiens
ccatctgcccactta

SEQ ID NO: 19808 - DNA, 15 bp, Homo sapiens
catctgcccacttaa

SEQ ID NO: 19809 - DNA, 15 bp, Homo sapiens
atctgcccacttaaa

SEQ ID NO: 19810 - DNA, 15 bp, Homo sapiens
tctgcccacttaaaa

SEQ ID NO: 19811 - DNA, 15 bp, Homo sapiens
ctgcccacttaaaat

SEQ ID NO: 19812 - DNA, 15 bp, Homo sapiens
tgcccacttaaaata

SEQ ID NO: 19813 - DNA, 15 bp, Homo sapiens
gcccacttaaaataa

SEQ ID NO: 19814 - DNA, 15 bp, Homo sapiens
cccacttaaaataat

SEQ ID NO: 19815 - DNA, 15 bp, Homo sapiens
ccacttaaaataata

SEQ ID NO: 19816 - DNA, 15 bp, Homo sapiens
cacttaaaataatat

SEQ ID NO: 19817 - DNA, 15 bp, Homo sapiens
acttaaaataatatc

SEQ ID NO: 19818 - DNA, 15 bp, Homo sapiens
cttaaaataatatca

SEQ ID NO: 19819 - DNA, 15 bp, Homo sapiens
ttaaaataatatcac

SEQ ID NO: 19820 - DNA, 15 bp, Homo sapiens
taaaataatatcaca

SEQ ID NO: 19821 - DNA, 15 bp, Homo sapiens
aaaataatatcacaa

SEQ ID NO: 19822 - DNA, 15 bp, Homo sapiens
aaataatatcacaag

SEQ ID NO: 19823 - DNA, 15 bp, Homo sapiens
aataatatcacaagt

SEQ ID NO: 19824 - DNA, 15 bp, Homo sapiens
ataatatcacaagtc

SEQ ID NO: 19825 - DNA, 15 bp, Homo sapiens
taatatcacaagtca

SEQ ID NO: 19826 - DNA, 15 bp, Homo sapiens
aatatcacaagtcat

SEQ ID NO: 19827 - DNA, 15 bp, Homo sapiens
atatcacaagtcatg

SEQ ID NO: 19828 - DNA, 15 bp, Homo sapiens
tatcacaagtcatgt

SEQ ID NO: 19829 - DNA, 15 bp, Homo sapiens
atcacaagtcatgtt

SEQ ID NO: 19830 - DNA, 15 bp, Homo sapiens
tcacaagtcatgtta

SEQ ID NO: 19831 - DNA, 15 bp, Homo sapiens
cacaagtcatgttag

SEQ ID NO: 19832 - DNA, 15 bp, Homo sapiens
acaagtcatgttagg

SEQ ID NO: 19833 - DNA, 15 bp, Homo sapiens
caagtcatgttagga

SEQ ID NO: 19834 - DNA, 15 bp, Homo sapiens
aagtcatgttaggaa

SEQ ID NO: 19835 - DNA, 15 bp, Homo sapiens
agtcatgttaggaac

SEQ ID NO: 19836 - DNA, 15 bp, Homo sapiens
gtcatgttaggaacc

SEQ ID NO: 19837 - DNA, 15 bp, Homo sapiens
tcatgttaggaacca

SEQ ID NO: 19838 - DNA, 15 bp, Homo sapiens
catgttaggaaccac

SEQ ID NO: 19839 - DNA, 15 bp, Homo sapiens
atgttaggaaccaca

SEQ ID NO: 19840 - DNA, 15 bp, Homo sapiens
tgttaggaaccacag

SEQ ID NO: 19841 - DNA, 15 bp, Homo sapiens
gttaggaaccacaga

SEQ ID NO: 19842 - DNA, 15 bp, Homo sapiens
ttaggaaccacagac

SEQ ID NO: 19843 - DNA, 15 bp, Homo sapiens
taggaaccacagacc

SEQ ID NO: 19844 - DNA, 15 bp, Homo sapiens
aggaaccacagacct

SEQ ID NO: 19845 - DNA, 15 bp, Homo sapiens
ggaaccacagacctg

SEQ ID NO: 19846 - DNA, 15 bp, Homo sapiens
gaaccacagacctgg

SEQ ID NO: 19847 - DNA, 15 bp, Homo sapiens
aaccacagacctggg

SEQ ID NO: 19848 - DNA, 15 bp, Homo sapiens
accacagacctgggg

SEQ ID NO: 19849 - DNA, 15 bp, Homo sapiens
ccacagacctggggc

SEQ ID NO: 19850 - DNA, 15 bp, Homo sapiens
cacagacctggggcc

SEQ ID NO: 19851 - DNA, 15 bp, Homo sapiens
acagacctggggcca

SEQ ID NO: 19852 - DNA, 15 bp, Homo sapiens
cagacctggggccag

SEQ ID NO: 19853 - DNA, 15 bp, Homo sapiens
agacctggggccaga

SEQ ID NO: 19854 - DNA, 15 bp, Homo sapiens
gacctggggccagat

SEQ ID NO: 19855 - DNA, 15 bp, Homo sapiens
acctggggccagata

SEQ ID NO: 19856 - DNA, 15 bp, Homo sapiens
cctggggccagatac

SEQ ID NO: 19857 - DNA, 15 bp, Homo sapiens
ctggggccagatacc

SEQ ID NO: 19858 - DNA, 15 bp, Homo sapiens
tggggccagatacca

SEQ ID NO: 19859 - DNA, 15 bp, Homo sapiens
ggggccagataccaa

SEQ ID NO: 19860 - DNA, 15 bp, Homo sapiens
gggccagataccaaa

SEQ ID NO: 19861 - DNA, 15 bp, Homo sapiens
ggccagataccaaaa

SEQ ID NO: 19862 - DNA, 15 bp, Homo sapiens
gccagataccaaaac

SEQ ID NO: 19863 - DNA, 15 bp, Homo sapiens
ccagataccaaaaca

SEQ ID NO: 19864 - DNA, 15 bp, Homo sapiens
cagataccaaaacaa

SEQ ID NO: 19865 - DNA, 15 bp, Homo sapiens
agataccaaaacaat

SEQ ID NO: 19866 - DNA, 15 bp, Homo sapiens
gataccaaaacaatt

SEQ ID NO: 19867 - DNA, 15 bp, Homo sapiens
ataccaaaacaattg

SEQ ID NO: 19868 - DNA, 15 bp, Homo sapiens
taccaaaacaattgt

SEQ ID NO: 19869 - DNA, 15 bp, Homo sapiens
accaaaacaattgtc

SEQ ID NO: 19870 - DNA, 15 bp, Homo sapiens
ccaaaacaattgtct

SEQ ID NO: 19871 - DNA, 15 bp, Homo sapiens
caaaacaattgtctg

SEQ ID NO: 19872 - DNA, 15 bp, Homo sapiens
aaaacaattgtctga

SEQ ID NO: 19873 - DNA, 15 bp, Homo sapiens
aaacaattgtctgaa

SEQ ID NO: 19874 - DNA, 15 bp, Homo sapiens
aacaattgtctgaac

SEQ ID NO: 19875 - DNA, 15 bp, Homo sapiens
acaattgtctgaaca

SEQ ID NO: 19876 - DNA, 15 bp, Homo sapiens
caattgtctgaacag

SEQ ID NO: 19877 - DNA, 15 bp, Homo sapiens
aattgtctgaacagg

SEQ ID NO: 19878 - DNA, 15 bp, Homo sapiens
attgtctgaacaggc

SEQ ID NO: 19879 - DNA, 15 bp, Homo sapiens
ttgtctgaacaggct

SEQ ID NO: 19880 - DNA, 15 bp, Homo sapiens
tgtctgaacaggctg

SEQ ID NO: 19881 - DNA, 15 bp, Homo sapiens
gtctgaacaggctgc

SEQ ID NO: 19882 - DNA, 15 bp, Homo sapiens
tctgaacaggctgct

SEQ ID NO: 19883 - DNA, 15 bp, Homo sapiens
ctgaacaggctgctt

SEQ ID NO: 19884 - DNA, 15 bp, Homo sapiens
tgaacaggctgcttc

SEQ ID NO: 19885 - DNA, 15 bp, Homo sapiens
gaacaggctgcttca

SEQ ID NO: 19886 - DNA, 15 bp, Homo sapiens
aacaggctgcttcaa

SEQ ID NO: 19887 - DNA, 15 bp, Homo sapiens
acaggctgcttcaat

SEQ ID NO: 19888 - DNA, 15 bp, Homo sapiens
caggctgcttcaatt

SEQ ID NO: 19889 - DNA, 15 bp, Homo sapiens
aggctgcttcaattt

SEQ ID NO: 19890 - DNA, 15 bp, Homo sapiens
ggctgcttcaatttc

SEQ ID NO: 19891 - DNA, 15 bp, Homo sapiens
gctgcttcaatttct

SEQ ID NO: 19892 - DNA, 15 bp, Homo sapiens
ctgcttcaatttctc

SEQ ID NO: 19893 - DNA, 15 bp, Homo sapiens
tgcttcaatttctcc

SEQ ID NO: 19894 - DNA, 15 bp, Homo sapiens
gcttcaatttctcct

SEQ ID NO: 19895 - DNA, 15 bp, Homo sapiens
cttcaatttctcctt

SEQ ID NO: 19896 - DNA, 15 bp, Homo sapiens
ttcaatttctcctta

SEQ ID NO: 19897 - DNA, 15 bp, Homo sapiens
tcaatttctccttaa

SEQ ID NO: 19898 - DNA, 15 bp, Homo sapiens
caatttctccttaaa

SEQ ID NO: 19899 - DNA, 15 bp, Homo sapiens
aatttctccttaaaa

SEQ ID NO: 19900 - DNA, 15 bp, Homo sapiens
atttctccttaaaac

SEQ ID NO: 19901 - DNA, 15 bp, Homo sapiens
tttctccttaaaacc

SEQ ID NO: 19902 - DNA, 15 bp, Homo sapiens
ttctccttaaaaccg

SEQ ID NO: 19903 - DNA, 15 bp, Homo sapiens
tctccttaaaaccgc

SEQ ID NO: 19904 - DNA, 15 bp, Homo sapiens
ctccttaaaaccgcc

SEQ ID NO: 19905 - DNA, 15 bp, Homo sapiens
tccttaaaaccgccc

SEQ ID NO: 19906 - DNA, 15 bp, Homo sapiens
ccttaaaaccgccca

SEQ ID NO: 19907 - DNA, 15 bp, Homo sapiens
cttaaaaccgcccat

SEQ ID NO: 19908 - DNA, 15 bp, Homo sapiens
ttaaaaccgcccatg

SEQ ID NO: 19909 - DNA, 15 bp, Homo sapiens
taaaaccgcccatgt

SEQ ID NO: 19910 - DNA, 15 bp, Homo sapiens
aaaaccgcccatgta

SEQ ID NO: 19911 - DNA, 15 bp, Homo sapiens
aaaccgcccatgtat

SEQ ID NO: 19912 - DNA, 15 bp, Homo sapiens
aaccgcccatgtatg

SEQ ID NO: 19913 - DNA, 15 bp, Homo sapiens
accgcccatgtatgt

SEQ ID NO: 19914 - DNA, 15 bp, Homo sapiens
ccgcccatgtatgtt

SEQ ID NO: 19915 - DNA, 15 bp, Homo sapiens
cgcccatgtatgtta

SEQ ID NO: 19916 - DNA, 15 bp, Homo sapiens
gcccatgtatgttaa

SEQ ID NO: 19917 - DNA, 15 bp, Homo sapiens
cccatgtatgttaaa

SEQ ID NO: 19918 - DNA, 15 bp, Homo sapiens
ccatgtatgttaaaa

SEQ ID NO: 19919 - DNA, 15 bp, Homo sapiens
catgtatgttaaaag

SEQ ID NO: 19920 - DNA, 15 bp, Homo sapiens
atgtatgttaaaaga

SEQ ID NO: 19921 - DNA, 15 bp, Homo sapiens
tgtatgttaaaagaa

SEQ ID NO: 19922 - DNA, 15 bp, Homo sapiens
gtatgttaaaagaaa

SEQ ID NO: 19923 - DNA, 15 bp, Homo sapiens
tatgttaaaagaaaa

SEQ ID NO: 19924 - DNA, 15 bp, Homo sapiens
atgttaaaagaaaaa

SEQ ID NO: 19925 - DNA, 15 bp, Homo sapiens
tgttaaaagaaaaac

SEQ ID NO: 19926 - DNA, 15 bp, Homo sapiens
gttaaaagaaaaaca

SEQ ID NO: 19927 - DNA, 15 bp, Homo sapiens
ttaaaagaaaaacac

SEQ ID NO: 19928 - DNA, 15 bp, Homo sapiens
taaaagaaaaacacc

SEQ ID NO: 19929 - DNA, 15 bp, Homo sapiens
aaaagaaaaacaccc

SEQ ID NO: 19930 - DNA, 15 bp, Homo sapiens
aaagaaaaacaccct

SEQ ID NO: 19931 - DNA, 15 bp, Homo sapiens
aagaaaaacaccctc

SEQ ID NO: 19932 - DNA, 15 bp, Homo sapiens
agaaaaacaccctct

SEQ ID NO: 19933 - DNA, 15 bp, Homo sapiens
gaaaaacaccctctc

SEQ ID NO: 19934 - DNA, 15 bp, Homo sapiens
aaaaacaccctctcc

SEQ ID NO: 19935 - DNA, 15 bp, Homo sapiens
aaaacaccctctcca

SEQ ID NO: 19936 - DNA, 15 bp, Homo sapiens
aaacaccctctccac

SEQ ID NO: 19937 - DNA, 15 bp, Homo sapiens
aacaccctctccacc

SEQ ID NO: 19938 - DNA, 15 bp, Homo sapiens
acaccctctccaccc

SEQ ID NO: 19939 - DNA, 15 bp, Homo sapiens
caccctctccaccca

SEQ ID NO: 19940 - DNA, 15 bp, Homo sapiens
accctctccacccac

SEQ ID NO: 19941 - DNA, 15 bp, Homo sapiens
ccctctccacccacc

SEQ ID NO: 19942 - DNA, 15 bp, Homo sapiens
cctctccacccacct

SEQ ID NO: 19943 - DNA, 15 bp, Homo sapiens
ctctccacccacctt

SEQ ID NO: 19944 - DNA, 15 bp, Homo sapiens
tctccacccaccttg

SEQ ID NO: 19945 - DNA, 15 bp, Homo sapiens
ctccacccaccttgg

SEQ ID NO: 19946 - DNA, 15 bp, Homo sapiens
cacccaccttggccc

SEQ ID NO: 19947 - DNA, 15 bp, Homo sapiens
acccaccttggccct

SEQ ID NO: 19948 - DNA, 15 bp, Homo sapiens
cccaccttggccctg

SEQ ID NO: 19949 - DNA, 15 bp, Homo sapiens
ccaccttggccctgc

SEQ ID NO: 19950 - DNA, 15 bp, Homo sapiens
caccttggccctgca

SEQ ID NO: 19951 - DNA, 15 bp, Homo sapiens
accttggccctgcaa

SEQ ID NO: 19952 - DNA, 15 bp, Homo sapiens
ccttggccctgcaag

SEQ ID NO: 19953 - DNA, 15 bp, Homo sapiens
cttggccctgcaagg

SEQ ID NO: 19954 - DNA, 15 bp, Homo sapiens
ttggccctgcaaggt

SEQ ID NO: 19955 - DNA, 15 bp, Homo sapiens
tggccctgcaaggtt

SEQ ID NO: 19956 - DNA, 15 bp, Homo sapiens
ggccctgcaaggttt

SEQ ID NO: 19957 - DNA, 15 bp, Homo sapiens
gccctgcaaggtttt

SEQ ID NO: 19958 - DNA, 15 bp, Homo sapiens
ccctgcaaggttttg

SEQ ID NO: 19959 - DNA, 15 bp, Homo sapiens
cctgcaaggttttga

SEQ ID NO: 19960 - DNA, 15 bp, Homo sapiens
ctgcaaggttttgat

SEQ ID NO: 19961 - DNA, 15 bp, Homo sapiens
tgcaaggttttgatt

SEQ ID NO: 19962 - DNA, 15 bp, Homo sapiens
gcaaggttttgattt

SEQ ID NO: 19963 - DNA, 15 bp, Homo sapiens
caaggttttgatttc

SEQ ID NO: 19964 - DNA, 15 bp, Homo sapiens
aaggttttgatttct

SEQ ID NO: 19965 - DNA, 15 bp, Homo sapiens
aggttttgatttctc

SEQ ID NO: 19966 - DNA, 15 bp, Homo sapiens
ggttttgatttctct

SEQ ID NO: 19967 - DNA, 15 bp, Homo sapiens
gttttgatttctctg

SEQ ID NO: 19968 - DNA, 15 bp, Homo sapiens
ttttgatttctctgt

SEQ ID NO: 19969 - DNA, 15 bp, Homo sapiens
tttgatttctctgtt

SEQ ID NO: 19970 - DNA, 15 bp, Homo sapiens
ttgatttctctgttc

SEQ ID NO: 19971 - DNA, 15 bp, Homo sapiens
tgatttctctgttct

SEQ ID NO: 19972 - DNA, 15 bp, Homo sapiens
gatttctctgttctc

SEQ ID NO: 19973 - DNA, 15 bp, Homo sapiens
atttctctgttctct

SEQ ID NO: 19974 - DNA, 15 bp, Homo sapiens
tttctctgttctctg

SEQ ID NO: 19975 - DNA, 15 bp, Homo sapiens
ttctctgttctctgc

SEQ ID NO: 19976 - DNA, 15 bp, Homo sapiens
tctctgttctctgcc

SEQ ID NO: 19977 - DNA, 15 bp, Homo sapiens
ctctgttctctgcct

SEQ ID NO: 19978 - DNA, 15 bp, Homo sapiens
tctgttctctgcctt

SEQ ID NO: 19979 - DNA, 15 bp, Homo sapiens
ctgttctctgccttt

SEQ ID NO: 19980 - DNA, 15 bp, Homo sapiens
tgttctctgcctttc

SEQ ID NO: 19981 - DNA, 15 bp, Homo sapiens
gttctctgcctttca

SEQ ID NO: 19982 - DNA, 15 bp, Homo sapiens
ttctctgcctttcac

SEQ ID NO: 19983 - DNA, 15 bp, Homo sapiens
tctctgcctttcaca

SEQ ID NO: 19984 - DNA, 15 bp, Homo sapiens
ctctgcctttcacac

SEQ ID NO: 19985 - DNA, 15 bp, Homo sapiens
tctgcctttcacact

SEQ ID NO: 19986 - DNA, 15 bp, Homo sapiens
ctgcctttcacactc

SEQ ID NO: 19987 - DNA, 15 bp, Homo sapiens
tgcctttcacactct

SEQ ID NO: 19988 - DNA, 15 bp, Homo sapiens
gcctttcacactctt

SEQ ID NO: 19989 - DNA, 15 bp, Homo sapiens
cctttcacactcttt

SEQ ID NO: 19990 - DNA, 15 bp, Homo sapiens
ctttcacactcttta

SEQ ID NO: 19991 - DNA, 15 bp, Homo sapiens
tttcacactctttaa

SEQ ID NO: 19992 - DNA, 15 bp, Homo sapiens
ttcacactctttaaa

SEQ ID NO: 19993 - DNA, 15 bp, Homo sapiens
tcacactctttaaaa

SEQ ID NO: 19994 - DNA, 15 bp, Homo sapiens
cacactctttaaaat

SEQ ID NO: 19995 - DNA, 15 bp, Homo sapiens
acactctttaaaatg

SEQ ID NO: 19996 - DNA, 15 bp, Homo sapiens
cactctttaaaatga

SEQ ID NO: 19997 - DNA, 15 bp, Homo sapiens
actctttaaaatgac

SEQ ID NO: 19998 - DNA, 15 bp, Homo sapiens
ctctttaaaatgacc

SEQ ID NO: 19999 - DNA, 15 bp, Homo sapiens
tctttaaaatgacca

SEQ ID NO: 20000 - DNA, 15 bp, Homo sapiens
ctttaaaatgaccaa

SEQ ID NO: 20001 - DNA, 15 bp, Homo sapiens
tttaaaatgaccaaa

SEQ ID NO: 20002 - DNA, 15 bp, Homo sapiens
ttaaaatgaccaaac

SEQ ID NO: 20003 - DNA, 15 bp, Homo sapiens
taaaatgaccaaact

SEQ ID NO: 20004 - DNA, 15 bp, Homo sapiens
aaaatgaccaaactc

SEQ ID NO: 20005 - DNA, 15 bp, Homo sapiens
aaatgaccaaactcc

SEQ ID NO: 20006 - DNA, 15 bp, Homo sapiens
aatgaccaaactcct

SEQ ID NO: 20007 - DNA, 15 bp, Homo sapiens
atgaccaaactcctt

SEQ ID NO: 20008 - DNA, 15 bp, Homo sapiens
tgaccaaactccttt

SEQ ID NO: 20009 - DNA, 15 bp, Homo sapiens
gaccaaactccttta

SEQ ID NO: 20010 - DNA, 15 bp, Homo sapiens
accaaactcctttac

SEQ ID NO: 20011 - DNA, 15 bp, Homo sapiens
ccaaactcctttacc

SEQ ID NO: 20012 - DNA, 15 bp, Homo sapiens
caaactcctttaccc

SEQ ID NO: 20013 - DNA, 15 bp, Homo sapiens
aaactcctttaccca

SEQ ID NO: 20014 - DNA, 15 bp, Homo sapiens
aactcctttacccaa

SEQ ID NO: 20015 - DNA, 15 bp, Homo sapiens
actcctttacccaaa

SEQ ID NO: 20016 - DNA, 15 bp, Homo sapiens
ctcctttacccaaac

SEQ ID NO: 20017 - DNA, 15 bp, Homo sapiens
tcctttacccaaact

SEQ ID NO: 20018 - DNA, 15 bp, Homo sapiens
cctttacccaaactg

SEQ ID NO: 20019 - DNA, 15 bp, Homo sapiens
ctttacccaaactgt

SEQ ID NO: 20020 - DNA, 15 bp, Homo sapiens
tttacccaaactgtc

SEQ ID NO: 20021 - DNA, 15 bp, Homo sapiens
ttacccaaactgtcg

SEQ ID NO: 20022 - DNA, 15 bp, Homo sapiens
tacccaaactgtcgc

SEQ ID NO: 20023 - DNA, 15 bp, Homo sapiens
acccaaactgtcgca

SEQ ID NO: 20024 - DNA, 15 bp, Homo sapiens
cccaaactgtcgcat

SEQ ID NO: 20025 - DNA, 15 bp, Homo sapiens
ccaaactgtcgcatc

SEQ ID NO: 20026 - DNA, 15 bp, Homo sapiens
caaactgtcgcatct

SEQ ID NO: 20027 - DNA, 15 bp, Homo sapiens
aaactgtcgcatctt

SEQ ID NO: 20028 - DNA, 15 bp, Homo sapiens
aactgtcgcatctta

SEQ ID NO: 20029 - DNA, 15 bp, Homo sapiens
actgtcgcatcttac

SEQ ID NO: 20030 - DNA, 15 bp, Homo sapiens
ctgtcgcatcttaca

SEQ ID NO: 20031 - DNA, 15 bp, Homo sapiens
tgtcgcatcttacag

SEQ ID NO: 20032 - DNA, 15 bp, Homo sapiens
gtcgcatcttacaga

SEQ ID NO: 20033 - DNA, 15 bp, Homo sapiens
tcgcatcttacagac

SEQ ID NO: 20034 - DNA, 15 bp, Homo sapiens
cgcatcttacagaca

SEQ ID NO: 20035 - DNA, 15 bp, Homo sapiens
gcatcttacagacag

SEQ ID NO: 20036 - DNA, 15 bp, Homo sapiens
catcttacagacagg

SEQ ID NO: 20037 - DNA, 15 bp, Homo sapiens
atcttacagacaggg

SEQ ID NO: 20038 - DNA, 15 bp, Homo sapiens
tcttacagacagggt

SEQ ID NO: 20039 - DNA, 15 bp, Homo sapiens
cttacagacagggtt

SEQ ID NO: 20040 - DNA, 15 bp, Homo sapiens
ttacagacagggttc

SEQ ID NO: 20041 - DNA, 15 bp, Homo sapiens
tacagacagggttcc

SEQ ID NO: 20042 - DNA, 15 bp, Homo sapiens
acagacagggttccc

SEQ ID NO: 20043 - DNA, 15 bp, Homo sapiens
cagacagggttccca

SEQ ID NO: 20044 - DNA, 15 bp, Homo sapiens
agacagggttcccat

SEQ ID NO: 20045 - DNA, 15 bp, Homo sapiens
gacagggttcccatg

SEQ ID NO: 20046 - DNA, 15 bp, Homo sapiens
acagggttcccatga

SEQ ID NO: 20047 - DNA, 15 bp, Homo sapiens
cagggttcccatgac

SEQ ID NO: 20048 - DNA, 15 bp, Homo sapiens
agggttcccatgaca

SEQ ID NO: 20049 - DNA, 15 bp, Homo sapiens
gggttcccatgacag

SEQ ID NO: 20050 - DNA, 15 bp, Homo sapiens
ggttcccatgacagc

SEQ ID NO: 20051 - DNA, 15 bp, Homo sapiens
gttcccatgacagcc

SEQ ID NO: 20052 - DNA, 15 bp, Homo sapiens
ttcccatgacagccg

SEQ ID NO: 20053 - DNA, 15 bp, Homo sapiens
tcccatgacagccgg

SEQ ID NO: 20054 - DNA, 15 bp, Homo sapiens
cccatgacagccggc

SEQ ID NO: 20055 - DNA, 15 bp, Homo sapiens
ccatgacagccggcg

SEQ ID NO: 20056 - DNA, 15 bp, Homo sapiens
catgacagccggcgg

SEQ ID NO: 20057 - DNA, 15 bp, Homo sapiens
atgacagccggcggg

SEQ ID NO: 20058 - DNA, 15 bp, Homo sapiens
tgacagccggcgggg

SEQ ID NO: 20059 - DNA, 15 bp, Homo sapiens
gacagccggcgggga

SEQ ID NO: 20060 - DNA, 15 bp, Homo sapiens
acagccggcggggat

SEQ ID NO: 20061 - DNA, 15 bp, Homo sapiens
cagccggcggggatg

SEQ ID NO: 20062 - DNA, 15 bp, Homo sapiens
agccggcggggatga

SEQ ID NO: 20063 - DNA, 15 bp, Homo sapiens
gccggcggggatgac

SEQ ID NO: 20064 - DNA, 15 bp, Homo sapiens
ccggcggggatgaca

SEQ ID NO: 20065 - DNA, 15 bp, Homo sapiens
cggcggggatgacag

SEQ ID NO: 20066 - DNA, 15 bp, Homo sapiens
ggcggggatgacagc

SEQ ID NO: 20067 - DNA, 15 bp, Homo sapiens
gcggggatgacagct

SEQ ID NO: 20068 - DNA, 15 bp, Homo sapiens
cggggatgacagctt

SEQ ID NO: 20069 - DNA, 15 bp, Homo sapiens
ggggatgacagcttg

SEQ ID NO: 20070 - DNA, 15 bp, Homo sapiens
gggatgacagcttgg

SEQ ID NO: 20071 - DNA, 15 bp, Homo sapiens
ggatgacagcttggg

SEQ ID NO: 20072 - DNA, 15 bp, Homo sapiens
gatgacagcttggga

SEQ ID NO: 20073 - DNA, 15 bp, Homo sapiens
atgacagcttgggaa

SEQ ID NO: 20074 - DNA, 15 bp, Homo sapiens
tgacagcttgggaaa

SEQ ID NO: 20075 - DNA, 15 bp, Homo sapiens
gacagcttgggaaag

SEQ ID NO: 20076 - DNA, 15 bp, Homo sapiens
acagcttgggaaagt

SEQ ID NO: 20077 - DNA, 15 bp, Homo sapiens
cagcttgggaaagtg

SEQ ID NO: 20078 - DNA, 15 bp, Homo sapiens
agcttgggaaagtga

SEQ ID NO: 20079 - DNA, 15 bp, Homo sapiens
gcttgggaaagtgat

SEQ ID NO: 20080 - DNA, 15 bp, Homo sapiens
cttgggaaagtgata

SEQ ID NO: 20081 - DNA, 15 bp, Homo sapiens
ttgggaaagtgatag

SEQ ID NO: 20082 - DNA, 15 bp, Homo sapiens
tgggaaagtgataga

SEQ ID NO: 20083 - DNA, 15 bp, Homo sapiens
gggaaagtgatagaa

SEQ ID NO: 20084 - DNA, 15 bp, Homo sapiens
ggaaagtgatagaaa

SEQ ID NO: 20085 - DNA, 15 bp, Homo sapiens
gaaagtgatagaaat

SEQ ID NO: 20086 - DNA, 15 bp, Homo sapiens
aaagtgatagaaatg

SEQ ID NO: 20087 - DNA, 15 bp, Homo sapiens
aagtgatagaaatga

SEQ ID NO: 20088 - DNA, 15 bp, Homo sapiens
agtgatagaaatgaa

SEQ ID NO: 20089 - DNA, 15 bp, Homo sapiens
gtgatagaaatgaag

SEQ ID NO: 20090 - DNA, 15 bp, Homo sapiens
tgatagaaatgaagg

SEQ ID NO: 20091 - DNA, 15 bp, Homo sapiens
gatagaaatgaaggt

SEQ ID NO: 20092 - DNA, 15 bp, Homo sapiens
atagaaatgaaggta

SEQ ID NO: 20093 - DNA, 15 bp, Homo sapiens
tagaaatgaaggtag

SEQ ID NO: 20094 - DNA, 15 bp, Homo sapiens
agaaatgaaggtagc

SEQ ID NO: 20095 - DNA, 15 bp, Homo sapiens
gaaatgaaggtagct

SEQ ID NO: 20096 - DNA, 15 bp, Homo sapiens
aaatgaaggtagctc

SEQ ID NO: 20097 - DNA, 15 bp, Homo sapiens
aatgaaggtagctct

SEQ ID NO: 20098 - DNA, 15 bp, Homo sapiens
atgaaggtagctctg

SEQ ID NO: 20099 - DNA, 15 bp, Homo sapiens
tgaaggtagctctgg

SEQ ID NO: 20100 - DNA, 15 bp, Homo sapiens
gaaggtagctctggg

SEQ ID NO: 20101 - DNA, 15 bp, Homo sapiens
aaggtagctctgggg

SEQ ID NO: 20102 - DNA, 15 bp, Homo sapiens
aggtagctctggggt

SEQ ID NO: 20103 - DNA, 15 bp, Homo sapiens
ggtagctctggggta

SEQ ID NO: 20104 - DNA, 15 bp, Homo sapiens
gtagctctggggtac

SEQ ID NO: 20105 - DNA, 15 bp, Homo sapiens
tagctctggggtact

SEQ ID NO: 20106 - DNA, 15 bp, Homo sapiens
agctctggggtactg

SEQ ID NO: 20107 - DNA, 15 bp, Homo sapiens
gctctggggtactgg

SEQ ID NO: 20108 - DNA, 15 bp, Homo sapiens
ctctggggtactgga

SEQ ID NO: 20109 - DNA, 15 bp, Homo sapiens
tctggggtactggac

SEQ ID NO: 20110 - DNA, 15 bp, Homo sapiens
ctggggtactggacc

SEQ ID NO: 20111 - DNA, 15 bp, Homo sapiens
tggggtactggacct

SEQ ID NO: 20112 - DNA, 15 bp, Homo sapiens
ggggtactggacctg

SEQ ID NO: 20113 - DNA, 15 bp, Homo sapiens
gggtactggacctgc

SEQ ID NO: 20114 - DNA, 15 bp, Homo sapiens
ggtactggacctgct

SEQ ID NO: 20115 - DNA, 15 bp, Homo sapiens
gtactggacctgctc

SEQ ID NO: 20116 - DNA, 15 bp, Homo sapiens
tactggacctgctca

SEQ ID NO: 20117 - DNA, 15 bp, Homo sapiens
actggacctgctcag

SEQ ID NO: 20118 - DNA, 15 bp, Homo sapiens
ctggacctgctcagt

SEQ ID NO: 20119 - DNA, 15 bp, Homo sapiens
tggacctgctcagta

SEQ ID NO: 20120 - DNA, 15 bp, Homo sapiens
ggacctgctcagtat

SEQ ID NO: 20121 - DNA, 15 bp, Homo sapiens
gacctgctcagtatc

SEQ ID NO: 20122 - DNA, 15 bp, Homo sapiens
acctgctcagtatct

SEQ ID NO: 20123 - DNA, 15 bp, Homo sapiens
cctgctcagtatctt

SEQ ID NO: 20124 - DNA, 15 bp, Homo sapiens
ctgctcagtatcttc

SEQ ID NO: 20125 - DNA, 15 bp, Homo sapiens
tgctcagtatcttca

SEQ ID NO: 20126 - DNA, 15 bp, Homo sapiens
gctcagtatcttcat

SEQ ID NO: 20127 - DNA, 15 bp, Homo sapiens
ctcagtatcttcatc

SEQ ID NO: 20128 - DNA, 15 bp, Homo sapiens
tcagtatcttcatct

SEQ ID NO: 20129 - DNA, 15 bp, Homo sapiens
cagtatcttcatctg

SEQ ID NO: 20130 - DNA, 15 bp, Homo sapiens
agtatcttcatctgg

SEQ ID NO: 20131 - DNA, 15 bp, Homo sapiens
gtatcttcatctggg

SEQ ID NO: 20132 - DNA, 15 bp, Homo sapiens
tatcttcatctgggt

SEQ ID NO: 20133 - DNA, 15 bp, Homo sapiens
atcttcatctgggtg

SEQ ID NO: 20134 - DNA, 15 bp, Homo sapiens
tcttcatctgggtgg

SEQ ID NO: 20135 - DNA, 15 bp, Homo sapiens
cttcatctgggtggt

SEQ ID NO: 20136 - DNA, 15 bp, Homo sapiens
ttcatctgggtggtg

SEQ ID NO: 20137 - DNA, 15 bp, Homo sapiens
tcatctgggtggtgg

SEQ ID NO: 20138 - DNA, 15 bp, Homo sapiens
catctgggtggtggc

SEQ ID NO: 20139 - DNA, 15 bp, Homo sapiens
atctgggtggtggct

SEQ ID NO: 20140 - DNA, 15 bp, Homo sapiens
tctgggtggtggcta

SEQ ID NO: 20141 - DNA, 15 bp, Homo sapiens
ctgggtggtggctac

SEQ ID NO: 20142 - DNA, 15 bp, Homo sapiens
tgggtggtggctaca

SEQ ID NO: 20143 - DNA, 15 bp, Homo sapiens
gggtggtggctacac

SEQ ID NO: 20144 - DNA, 15 bp, Homo sapiens
ggtggtggctacaca

SEQ ID NO: 20145 - DNA, 15 bp, Homo sapiens
gtggtggctacacaa

SEQ ID NO: 20146 - DNA, 15 bp, Homo sapiens
tggtggctacacaag

SEQ ID NO: 20147 - DNA, 15 bp, Homo sapiens
ggtggctacacaagt

SEQ ID NO: 20148 - DNA, 15 bp, Homo sapiens
gtggctacacaagtg

SEQ ID NO: 20149 - DNA, 15 bp, Homo sapiens
tggctacacaagtgc

SEQ ID NO: 20150 - DNA, 15 bp, Homo sapiens
ggctacacaagtgca

SEQ ID NO: 20151 - DNA, 15 bp, Homo sapiens
gctacacaagtgcat

SEQ ID NO: 20152 - DNA, 15 bp, Homo sapiens
ctacacaagtgcata

SEQ ID NO: 20153 - DNA, 15 bp, Homo sapiens
tacacaagtgcatac

SEQ ID NO: 20154 - DNA, 15 bp, Homo sapiens
acacaagtgcataca

SEQ ID NO: 20155 - DNA, 15 bp, Homo sapiens
cacaagtgcatacat

SEQ ID NO: 20156 - DNA, 15 bp, Homo sapiens
acaagtgcatacata

SEQ ID NO: 20157 - DNA, 15 bp, Homo sapiens
caagtgcatacatat

SEQ ID NO: 20158 - DNA, 15 bp, Homo sapiens
aagtgcatacatatg

SEQ ID NO: 20159 - DNA, 15 bp, Homo sapiens
agtgcatacatatgt

SEQ ID NO: 20160 - DNA, 15 bp, Homo sapiens
gtgcatacatatgta

SEQ ID NO: 20161 - DNA, 15 bp, Homo sapiens
tgcatacatatgtac

SEQ ID NO: 20162 - DNA, 15 bp, Homo sapiens
gcatacatatgtaca

SEQ ID NO: 20163 - DNA, 15 bp, Homo sapiens
catacatatgtacaa

SEQ ID NO: 20164 - DNA, 15 bp, Homo sapiens
atacatatgtacaaa

SEQ ID NO: 20165 - DNA, 15 bp, Homo sapiens
tacatatgtacaaat

SEQ ID NO: 20166 - DNA, 15 bp, Homo sapiens
acatatgtacaaatc

SEQ ID NO: 20167 - DNA, 15 bp, Homo sapiens
catatgtacaaatcc

SEQ ID NO: 20168 - DNA, 15 bp, Homo sapiens
atatgtacaaatcca

SEQ ID NO: 20169 - DNA, 15 bp, Homo sapiens
tatgtacaaatccac

SEQ ID NO: 20170 - DNA, 15 bp, Homo sapiens
atgtacaaatccact

SEQ ID NO: 20171 - DNA, 15 bp, Homo sapiens
tgtacaaatccactg

SEQ ID NO: 20172 - DNA, 15 bp, Homo sapiens
gtacaaatccactgg

SEQ ID NO: 20173 - DNA, 15 bp, Homo sapiens
tacaaatccactggg

SEQ ID NO: 20174 - DNA, 15 bp, Homo sapiens
acaaatccactgggc

SEQ ID NO: 20175 - DNA, 15 bp, Homo sapiens
caaatccactgggct

SEQ ID NO: 20176 - DNA, 15 bp, Homo sapiens
aaatccactgggcta

SEQ ID NO: 20177 - DNA, 15 bp, Homo sapiens
aatccactgggctat

SEQ ID NO: 20178 - DNA, 15 bp, Homo sapiens
atccactgggctata

SEQ ID NO: 20179 - DNA, 15 bp, Homo sapiens
tccactgggctatac

SEQ ID NO: 20180 - DNA, 15 bp, Homo sapiens
ccactgggctataca

SEQ ID NO: 20181 - DNA, 15 bp, Homo sapiens
cactgggctatacac

SEQ ID NO: 20182 - DNA, 15 bp, Homo sapiens
actgggctatacaca

SEQ ID NO: 20183 - DNA, 15 bp, Homo sapiens
ctgggctatacacag

SEQ ID NO: 20184 - DNA, 15 bp, Homo sapiens
tgggctatacacaga

SEQ ID NO: 20185 - DNA, 15 bp, Homo sapiens
gggctatacacagaa

SEQ ID NO: 20186 - DNA, 15 bp, Homo sapiens
ggctatacacagaat

SEQ ID NO: 20187 - DNA, 15 bp, Homo sapiens
gctatacacagaata

SEQ ID NO: 20188 - DNA, 15 bp, Homo sapiens
ctatacacagaatat

SEQ ID NO: 20189 - DNA, 15 bp, Homo sapiens
tatacacagaatatc

SEQ ID NO: 20190 - DNA, 15 bp, Homo sapiens
atacacagaatatca

SEQ ID NO: 20191 - DNA, 15 bp, Homo sapiens
tacacagaatatcag

SEQ ID NO: 20192 - DNA, 15 bp, Homo sapiens
acacagaatatcagt

SEQ ID NO: 20193 - DNA, 15 bp, Homo sapiens
cacagaatatcagta

SEQ ID NO: 20194 - DNA, 15 bp, Homo sapiens
acagaatatcagtac

SEQ ID NO: 20195 - DNA, 15 bp, Homo sapiens
cagaatatcagtaca

SEQ ID NO: 20196 - DNA, 15 bp, Homo sapiens
agaatatcagtacac

SEQ ID NO: 20197 - DNA, 15 bp, Homo sapiens
gaatatcagtacact

SEQ ID NO: 20198 - DNA, 15 bp, Homo sapiens
aatatcagtacactt

SEQ ID NO: 20199 - DNA, 15 bp, Homo sapiens
atatcagtacacttt

SEQ ID NO: 20200 - DNA, 15 bp, Homo sapiens
tatcagtacacttta

SEQ ID NO: 20201 - DNA, 15 bp, Homo sapiens
atcagtacactttat

SEQ ID NO: 20202 - DNA, 15 bp, Homo sapiens
tcagtacactttatg

SEQ ID NO: 20203 - DNA, 15 bp, Homo sapiens
cagtacactttatgt

SEQ ID NO: 20204 - DNA, 15 bp, Homo sapiens
agtacactttatgta

SEQ ID NO: 20205 - DNA, 15 bp, Homo sapiens
gtacactttatgtag

SEQ ID NO: 20206 - DNA, 15 bp, Homo sapiens
tacactttatgtagg

SEQ ID NO: 20207 - DNA, 15 bp, Homo sapiens
acactttatgtaggt

SEQ ID NO: 20208 - DNA, 15 bp, Homo sapiens
cactttatgtaggta

SEQ ID NO: 20209 - DNA, 15 bp, Homo sapiens
actttatgtaggtat

SEQ ID NO: 20210 - DNA, 15 bp, Homo sapiens
ctttatgtaggtata

SEQ ID NO: 20211 - DNA, 15 bp, Homo sapiens
tttatgtaggtatac

SEQ ID NO: 20212 - DNA, 15 bp, Homo sapiens
ttatgtaggtatacc

SEQ ID NO: 20213 - DNA, 15 bp, Homo sapiens
tatgtaggtatacct

SEQ ID NO: 20214 - DNA, 15 bp, Homo sapiens
atgtaggtatacctc

SEQ ID NO: 20215 - DNA, 15 bp, Homo sapiens
tgtaggtatacctcg

SEQ ID NO: 20216 - DNA, 15 bp, Homo sapiens
gtaggtatacctcga

SEQ ID NO: 20217 - DNA, 15 bp, Homo sapiens
taggtatacctcgat

SEQ ID NO: 20218 - DNA, 15 bp, Homo sapiens
aggtatacctcgata

SEQ ID NO: 20219 - DNA, 15 bp, Homo sapiens
ggtatacctcgataa

SEQ ID NO: 20220 - DNA, 15 bp, Homo sapiens
gtatacctcgataaa

SEQ ID NO: 20221 - DNA, 15 bp, Homo sapiens
tatacctcgataaag

SEQ ID NO: 20222 - DNA, 15 bp, Homo sapiens
atacctcgataaagc

SEQ ID NO: 20223 - DNA, 15 bp, Homo sapiens
tacctcgataaagca

SEQ ID NO: 20224 - DNA, 15 bp, Homo sapiens
acctcgataaagcaa

SEQ ID NO: 20225 - DNA, 15 bp, Homo sapiens
cctcgataaagcaaa

SEQ ID NO: 20226 - DNA, 15 bp, Homo sapiens
ctcgataaagcaaaa

SEQ ID NO: 20227 - DNA, 15 bp, Homo sapiens
tcgataaagcaaaaa

SEQ ID NO: 20228 - DNA, 15 bp, Homo sapiens
cgataaagcaaaaaa

SEQ ID NO: 20229 - DNA, 15 bp, Homo sapiens
gataaagcaaaaaaa

SEQ ID NO: 20230 - DNA, 15 bp, Homo sapiens
ataaagcaaaaaaaa

SEQ ID NO: 20231 - DNA, 15 bp, Homo sapiens
taaagcaaaaaaaaa

SEQ ID NO: 20232 - DNA, 15 bp, Homo sapiens
aaagcaaaaaaaaaa

SEQ ID NO: 20233 - DNA, 15 bp, Homo sapiens
aagcaaaaaaaaaaa

SEQ ID NO: 20234 - DNA, 15 bp, Homo sapiens
agcaaaaaaaaaaaa

SEQ ID NO: 20235 - DNA, 15 bp, Homo sapiens
gcaaaaaaaaaaaaa

SEQ ID NO: 20236 - DNA, 15 bp, Homo sapiens
aaaaaaaaaaaaaaa

SEQ ID NO: 20237 - DNA, 15 bp, Homo sapiens
aaaaaaaaaaaaaag

SEQ ID NO: 20238 - DNA, 15 bp, Homo sapiens
aaaaaaaaaaaaggt

SEQ ID NO: 20239 - DNA, 15 bp, Homo sapiens
aaaaaaaaaaaggta

SEQ ID NO: 20240 - DNA, 15 bp, Homo sapiens
aaaaaaaaaaggtaa

SEQ ID NO: 20241 - DNA, 15 bp, Homo sapiens
aaaaaaaaaggtaaa

SEQ ID NO: 20242 - DNA, 15 bp, Homo sapiens
aaaaaaaaggtaaaa

SEQ ID NO: 20243 - DNA, 15 bp, Homo sapiens
aaaaaaaggtaaaag

SEQ ID NO: 20244 - DNA, 15 bp, Homo sapiens
aaaaaaggtaaaagg

SEQ ID NO: 20245 - DNA, 15 bp, Homo sapiens
aaaaaggtaaaagga

SEQ ID NO: 20246 - DNA, 15 bp, Homo sapiens
aaaaggtaaaaggaa

SEQ ID NO: 20247 - DNA, 15 bp, Homo sapiens
aaaggtaaaaggaaa

SEQ ID NO: 20248 - DNA, 15 bp, Homo sapiens
aaggtaaaaggaaag

SEQ ID NO: 20249 - DNA, 15 bp, Homo sapiens
aggtaaaaggaaagc

SEQ ID NO: 20250 - DNA, 15 bp, Homo sapiens
ggtaaaaggaaagca

SEQ ID NO: 20251 - DNA, 15 bp, Homo sapiens
gtaaaaggaaagcac

SEQ ID NO: 20252 - DNA, 15 bp, Homo sapiens
taaaaggaaagcacg

SEQ ID NO: 20253 - DNA, 15 bp, Homo sapiens
aaaaggaaagcacga

SEQ ID NO: 20254 - DNA, 15 bp, Homo sapiens
aaaggaaagcacgac

SEQ ID NO: 20255 - DNA, 15 bp, Homo sapiens
aaggaaagcacgaca

SEQ ID NO: 20256 - DNA, 15 bp, Homo sapiens
aggaaagcacgacat

SEQ ID NO: 20257 - DNA, 15 bp, Homo sapiens
ggaaagcacgacatg

SEQ ID NO: 20258 - DNA, 15 bp, Homo sapiens
gaaagcacgacatgc

SEQ ID NO: 20259 - DNA, 15 bp, Homo sapiens
aaagcacgacatgct

SEQ ID NO: 20260 - DNA, 15 bp, Homo sapiens
aagcacgacatgctg

SEQ ID NO: 20261 - DNA, 15 bp, Homo sapiens
agcacgacatgctgg

SEQ ID NO: 20262 - DNA, 15 bp, Homo sapiens
gcacgacatgctggg

SEQ ID NO: 20263 - DNA, 15 bp, Homo sapiens
cacgacatgctggga

SEQ ID NO: 20264 - DNA, 15 bp, Homo sapiens
acgacatgctgggaa

SEQ ID NO: 20265 - DNA, 15 bp, Homo sapiens
cgacatgctgggaac

SEQ ID NO: 20266 - DNA, 15 bp, Homo sapiens
gacatgctgggaaca

SEQ ID NO: 20267 - DNA, 15 bp, Homo sapiens
acatgctgggaacac

SEQ ID NO: 20268 - DNA, 15 bp, Homo sapiens
catgctgggaacacc

SEQ ID NO: 20269 - DNA, 15 bp, Homo sapiens
atgctgggaacacca

SEQ ID NO: 20270 - DNA, 15 bp, Homo sapiens
tgctgggaacaccaa

SEQ ID NO: 20271 - DNA, 15 bp, Homo sapiens
gctgggaacaccaag

SEQ ID NO: 20272 - DNA, 15 bp, Homo sapiens
ctgggaacaccaaga

SEQ ID NO: 20273 - DNA, 15 bp, Homo sapiens
tgggaacaccaagag

SEQ ID NO: 20274 - DNA, 15 bp, Homo sapiens
gggaacaccaagagt

SEQ ID NO: 20275 - DNA, 15 bp, Homo sapiens
ggaacaccaagagtg

SEQ ID NO: 20276 - DNA, 15 bp, Homo sapiens
gaacaccaagagtga

SEQ ID NO: 20277 - DNA, 15 bp, Homo sapiens
aacaccaagagtgaa

SEQ ID NO: 20278 - DNA, 15 bp, Homo sapiens
acaccaagagtgaaa

SEQ ID NO: 20279 - DNA, 15 bp, Homo sapiens
caccaagagtgaaat

SEQ ID NO: 20280 - DNA, 15 bp, Homo sapiens
accaagagtgaaatc

SEQ ID NO: 20281 - DNA, 15 bp, Homo sapiens
ccaagagtgaaatcc

SEQ ID NO: 20282 - DNA, 15 bp, Homo sapiens
caagagtgaaatcca

SEQ ID NO: 20283 - DNA, 15 bp, Homo sapiens
aagagtgaaatccag

SEQ ID NO: 20284 - DNA, 15 bp, Homo sapiens
agagtgaaatccaga

SEQ ID NO: 20285 - DNA, 15 bp, Homo sapiens
gagtgaaatccagaa

SEQ ID NO: 20286 - DNA, 15 bp, Homo sapiens
agtgaaatccagaat

SEQ ID NO: 20287 - DNA, 15 bp, Homo sapiens
gtgaaatccagaatt

SEQ ID NO: 20288 - DNA, 15 bp, Homo sapiens
tgaaatccagaattt

SEQ ID NO: 20289 - DNA, 15 bp, Homo sapiens
gaaatccagaatttg

SEQ ID NO: 20290 - DNA, 15 bp, Homo sapiens
aaatccagaatttgc

SEQ ID NO: 20291 - DNA, 15 bp, Homo sapiens
aatccagaatttgcc

SEQ ID NO: 20292 - DNA, 15 bp, Homo sapiens
atccagaatttgccc

SEQ ID NO: 20293 - DNA, 15 bp, Homo sapiens
tccagaatttgccct

SEQ ID NO: 20294 - DNA, 15 bp, Homo sapiens
ccagaatttgccctg

SEQ ID NO: 20295 - DNA, 15 bp, Homo sapiens
cagaatttgccctga

SEQ ID NO: 20296 - DNA, 15 bp, Homo sapiens
agaatttgccctgaa

SEQ ID NO: 20297 - DNA, 15 bp, Homo sapiens
gaatttgccctgaat

SEQ ID NO: 20298 - DNA, 15 bp, Homo sapiens
aatttgccctgaatc

SEQ ID NO: 20299 - DNA, 15 bp, Homo sapiens
atttgccctgaatca

SEQ ID NO: 20300 - DNA, 15 bp, Homo sapiens
tttgccctgaatcat

SEQ ID NO: 20301 - DNA, 15 bp, Homo sapiens
ttgccctgaatcatg

SEQ ID NO: 20302 - DNA, 15 bp, Homo sapiens
tgccctgaatcatgc

SEQ ID NO: 20303 - DNA, 15 bp, Homo sapiens
gccctgaatcatgcc

SEQ ID NO: 20304 - DNA, 15 bp, Homo sapiens
ccctgaatcatgcca

SEQ ID NO: 20305 - DNA, 15 bp, Homo sapiens
cctgaatcatgccac

SEQ ID NO: 20306 - DNA, 15 bp, Homo sapiens
ctgaatcatgccacg

SEQ ID NO: 20307 - DNA, 15 bp, Homo sapiens
tgaatcatgccacgc

SEQ ID NO: 20308 - DNA, 15 bp, Homo sapiens
gaatcatgccacgct

SEQ ID NO: 20309 - DNA, 15 bp, Homo sapiens
aatcatgccacgctt

SEQ ID NO: 20310 - DNA, 15 bp, Homo sapiens
atcatgccacgcttt

SEQ ID NO: 20311 - DNA, 15 bp, Homo sapiens
tcatgccacgctttc

SEQ ID NO: 20312 - DNA, 15 bp, Homo sapiens
catgccacgctttct

SEQ ID NO: 20313 - DNA, 15 bp, Homo sapiens
atgccacgctttcta

SEQ ID NO: 20314 - DNA, 15 bp, Homo sapiens
tgccacgctttctag

SEQ ID NO: 20315 - DNA, 15 bp, Homo sapiens
gccacgctttctaga

SEQ ID NO: 20316 - DNA, 15 bp, Homo sapiens
ccacgctttctagag

SEQ ID NO: 20317 - DNA, 15 bp, Homo sapiens
cacgctttctagagg

SEQ ID NO: 20318 - DNA, 15 bp, Homo sapiens
acgctttctagagga

SEQ ID NO: 20319 - DNA, 15 bp, Homo sapiens
cgctttctagaggac

SEQ ID NO: 20320 - DNA, 15 bp, Homo sapiens
gctttctagaggacc

SEQ ID NO: 20321 - DNA, 15 bp, Homo sapiens
ctttctagaggacca

SEQ ID NO: 20322 - DNA, 15 bp, Homo sapiens
tttctagaggaccag

SEQ ID NO: 20323 - DNA, 15 bp, Homo sapiens
ttctagaggaccagt

SEQ ID NO: 20324 - DNA, 15 bp, Homo sapiens
tctagaggaccagtt

SEQ ID NO: 20325 - DNA, 15 bp, Homo sapiens
ctagaggaccagttt

SEQ ID NO: 20326 - DNA, 15 bp, Homo sapiens
tagaggaccagttta

SEQ ID NO: 20327 - DNA, 15 bp, Homo sapiens
agaggaccagtttaa

SEQ ID NO: 20328 - DNA, 15 bp, Homo sapiens
gaggaccagtttaaa

SEQ ID NO: 20329 - DNA, 15 bp, Homo sapiens
aggaccagtttaaaa

SEQ ID NO: 20330 - DNA, 15 bp, Homo sapiens
ggaccagtttaaaaa

SEQ ID NO: 20331 - DNA, 15 bp, Homo sapiens
gaccagtttaaaaaa

SEQ ID NO: 20332 - DNA, 15 bp, Homo sapiens
accagtttaaaaaaa

SEQ ID NO: 20333 - DNA, 15 bp, Homo sapiens
ccagtttaaaaaaaa

SEQ ID NO: 20334 - DNA, 15 bp, Homo sapiens
cagtttaaaaaaaaa

SEQ ID NO: 20335 - DNA, 15 bp, Homo sapiens
agtttaaaaaaaaaa

SEQ ID NO: 20336 - DNA, 15 bp, Homo sapiens
gtttaaaaaaaaaaa

SEQ ID NO: 20337 - DNA, 15 bp, Homo sapiens
tttaaaaaaaaaaaa

SEQ ID NO: 20338 - DNA, 15 bp, Homo sapiens
ttaaaaaaaaaaaaa

SEQ ID NO: 20339 - DNA, 15 bp, Homo sapiens
taaaaaaaaaaaaat

SEQ ID NO: 20340 - DNA, 15 bp, Homo sapiens
aaaaaaaaaaaaata

SEQ ID NO: 20341 - DNA, 15 bp, Homo sapiens
aaaaaaaaaaaatag

SEQ ID NO: 20342 - DNA, 15 bp, Homo sapiens
aaaaaaaaaaataga

SEQ ID NO: 20343 - DNA, 15 bp, Homo sapiens
aaaaaaaaaatagaa

SEQ ID NO: 20344 - DNA, 15 bp, Homo sapiens
aaaaaaaaatagaaa

SEQ ID NO: 20345 - DNA, 15 bp, Homo sapiens
aaaaaaaatagaaaa

SEQ ID NO: 20346 - DNA, 15 bp, Homo sapiens
aaaaaaatagaaaaa

SEQ ID NO: 20347 - DNA, 15 bp, Homo sapiens
aaaaaatagaaaaaa

SEQ ID NO: 20348 - DNA, 15 bp, Homo sapiens
aaaaatagaaaaaaa

SEQ ID NO: 20349 - DNA, 15 bp, Homo sapiens
aaaatagaaaaaaat

SEQ ID NO: 20350 - DNA, 15 bp, Homo sapiens
aaatagaaaaaaata

SEQ ID NO: 20351 - DNA, 15 bp, Homo sapiens
aatagaaaaaaataa

SEQ ID NO: 20352 - DNA, 15 bp, Homo sapiens
atagaaaaaaataaa

SEQ ID NO: 20353 - DNA, 15 bp, Homo sapiens
tagaaaaaaataaat

SEQ ID NO: 20354 - DNA, 15 bp, Homo sapiens
agaaaaaaataaatg

SEQ ID NO: 20355 - DNA, 15 bp, Homo sapiens
gaaaaaaataaatgt

SEQ ID NO: 20356 - DNA, 15 bp, Homo sapiens
aaaaaaataaatgtc

SEQ ID NO: 20357 - DNA, 15 bp, Homo sapiens
aaaaaataaatgtcc

SEQ ID NO: 20358 - DNA, 15 bp, Homo sapiens
aaaaataaatgtccc

SEQ ID NO: 20359 - DNA, 15 bp, Homo sapiens
aaaataaatgtccct

SEQ ID NO: 20360 - DNA, 15 bp, Homo sapiens
aaataaatgtcccta

SEQ ID NO: 20361 - DNA, 15 bp, Homo sapiens
aataaatgtccctag

SEQ ID NO: 20362 - DNA, 15 bp, Homo sapiens
ataaatgtccctagc

SEQ ID NO: 20363 - DNA, 15 bp, Homo sapiens
taaatgtccctagca

SEQ ID NO: 20364 - DNA, 15 bp, Homo sapiens
aaatgtccctagcat

SEQ ID NO: 20365 - DNA, 15 bp, Homo sapiens
aatgtccctagcatt

SEQ ID NO: 20366 - DNA, 15 bp, Homo sapiens
atgtccctagcattt

SEQ ID NO: 20367 - DNA, 15 bp, Homo sapiens
tgtccctagcatttc

SEQ ID NO: 20368 - DNA, 15 bp, Homo sapiens
gtccctagcatttct

SEQ ID NO: 20369 - DNA, 15 bp, Homo sapiens
tccctagcatttctt

SEQ ID NO: 20370 - DNA, 15 bp, Homo sapiens
ccctagcatttcttc

SEQ ID NO: 20371 - DNA, 15 bp, Homo sapiens
cctagcatttcttcc

SEQ ID NO: 20372 - DNA, 15 bp, Homo sapiens
ctagcatttcttccc

SEQ ID NO: 20373 - DNA, 15 bp, Homo sapiens
tagcatttcttccct

SEQ ID NO: 20374 - DNA, 15 bp, Homo sapiens
agcatttcttccctg

SEQ ID NO: 20375 - DNA, 15 bp, Homo sapiens
gcatttcttccctgg

SEQ ID NO: 20376 - DNA, 15 bp, Homo sapiens
catttcttccctggc

SEQ ID NO: 20377 - DNA, 15 bp, Homo sapiens
atttcttccctggcc

SEQ ID NO: 20378 - DNA, 15 bp, Homo sapiens
tttcttccctggccc

SEQ ID NO: 20379 - DNA, 15 bp, Homo sapiens
ttcttccctggccct

SEQ ID NO: 20380 - DNA, 15 bp, Homo sapiens
tcttccctggccctg

SEQ ID NO: 20381 - DNA, 15 bp, Homo sapiens
cttccctggccctgt

SEQ ID NO: 20382 - DNA, 15 bp, Homo sapiens
ttccctggccctgtc

SEQ ID NO: 20383 - DNA, 15 bp, Homo sapiens
tccctggccctgtca

SEQ ID NO: 20384 - DNA, 15 bp, Homo sapiens
ccctggccctgtcac

SEQ ID NO: 20385 - DNA, 15 bp, Homo sapiens
cctggccctgtcact

SEQ ID NO: 20386 - DNA, 15 bp, Homo sapiens
ctggccctgtcactc

SEQ ID NO: 20387 - DNA, 15 bp, Homo sapiens
tggccctgtcactca

SEQ ID NO: 20388 - DNA, 15 bp, Homo sapiens
ggccctgtcactcac

SEQ ID NO: 20389 - DNA, 15 bp, Homo sapiens
gccctgtcactcact

SEQ ID NO: 20390 - DNA, 15 bp, Homo sapiens
ccctgtcactcacta

SEQ ID NO: 20391 - DNA, 15 bp, Homo sapiens
cctgtcactcactag

SEQ ID NO: 20392 - DNA, 15 bp, Homo sapiens
ctgtcactcactagc

SEQ ID NO: 20393 - DNA, 15 bp, Homo sapiens
tgtcactcactagct

SEQ ID NO: 20394 - DNA, 15 bp, Homo sapiens
gtcactcactagctg

SEQ ID NO: 20395 - DNA, 15 bp, Homo sapiens
tcactcactagctga

SEQ ID NO: 20396 - DNA, 15 bp, Homo sapiens
cactcactagctgag

SEQ ID NO: 20397 - DNA, 15 bp, Homo sapiens
actcactagctgaga

SEQ ID NO: 20398 - DNA, 15 bp, Homo sapiens
ctcactagctgagag

SEQ ID NO: 20399 - DNA, 15 bp, Homo sapiens
tcactagctgagagg

SEQ ID NO: 20400 - DNA, 15 bp, Homo sapiens
cactagctgagaggc

SEQ ID NO: 20401 - DNA, 15 bp, Homo sapiens
actagctgagaggct

SEQ ID NO: 20402 - DNA, 15 bp, Homo sapiens
ctagctgagaggctt

SEQ ID NO: 20403 - DNA, 15 bp, Homo sapiens
tagctgagaggcttt

SEQ ID NO: 20404 - DNA, 15 bp, Homo sapiens
agctgagaggctttg

SEQ ID NO: 20405 - DNA, 15 bp, Homo sapiens
gctgagaggctttga

SEQ ID NO: 20406 - DNA, 15 bp, Homo sapiens
ctgagaggctttgag

SEQ ID NO: 20407 - DNA, 15 bp, Homo sapiens
tgagaggctttgagc

SEQ ID NO: 20408 - DNA, 15 bp, Homo sapiens
gagaggctttgagca

SEQ ID NO: 20409 - DNA, 15 bp, Homo sapiens
agaggctttgagcaa

SEQ ID NO: 20410 - DNA, 15 bp, Homo sapiens
gaggctttgagcaag

SEQ ID NO: 20411 - DNA, 15 bp, Homo sapiens
aggctttgagcaagc

SEQ ID NO: 20412 - DNA, 15 bp, Homo sapiens
ggctttgagcaagct

SEQ ID NO: 20413 - DNA, 15 bp, Homo sapiens
gctttgagcaagctg

SEQ ID NO: 20414 - DNA, 15 bp, Homo sapiens
ctttgagcaagctgg

SEQ ID NO: 20415 - DNA, 15 bp, Homo sapiens
tttgagcaagctggc

SEQ ID NO: 20416 - DNA, 15 bp, Homo sapiens
ttgagcaagctggct

SEQ ID NO: 20417 - DNA, 15 bp, Homo sapiens
tgagcaagctggctc

SEQ ID NO: 20418 - DNA, 15 bp, Homo sapiens
gagcaagctggctca

SEQ ID NO: 20419 - DNA, 15 bp, Homo sapiens
agcaagctggctcat

SEQ ID NO: 20420 - DNA, 15 bp, Homo sapiens
gcaagctggctcatc

SEQ ID NO: 20421 - DNA, 15 bp, Homo sapiens
caagctggctcatct

SEQ ID NO: 20422 - DNA, 15 bp, Homo sapiens
aagctggctcatctc

SEQ ID NO: 20423 - DNA, 15 bp, Homo sapiens
agctggctcatctct

SEQ ID NO: 20424 - DNA, 15 bp, Homo sapiens
gctggctcatctctc

SEQ ID NO: 20425 - DNA, 15 bp, Homo sapiens
ctggctcatctctct

SEQ ID NO: 20426 - DNA, 15 bp, Homo sapiens
tggctcatctctctg

SEQ ID NO: 20427 - DNA, 15 bp, Homo sapiens
ggctcatctctctga

SEQ ID NO: 20428 - DNA, 15 bp, Homo sapiens
gctcatctctctgag

SEQ ID NO: 20429 - DNA, 15 bp, Homo sapiens
ctcatctctctgagc

SEQ ID NO: 20430 - DNA, 15 bp, Homo sapiens
tcatctctctgagct

SEQ ID NO: 20431 - DNA, 15 bp, Homo sapiens
catctctctgagcta

SEQ ID NO: 20432 - DNA, 15 bp, Homo sapiens
atctctctgagctac

SEQ ID NO: 20433 - DNA, 15 bp, Homo sapiens
tctctctgagctacc

SEQ ID NO: 20434 - DNA, 15 bp, Homo sapiens
ctctctgagctacct

SEQ ID NO: 20435 - DNA, 15 bp, Homo sapiens
tctctgagctacctg

SEQ ID NO: 20436 - DNA, 15 bp, Homo sapiens
ctctgagctacctgt

SEQ ID NO: 20437 - DNA, 15 bp, Homo sapiens
tctgagctacctgtc

SEQ ID NO: 20438 - DNA, 15 bp, Homo sapiens
ctgagctacctgtct

SEQ ID NO: 20439 - DNA, 15 bp, Homo sapiens
tgagctacctgtctc

SEQ ID NO: 20440 - DNA, 15 bp, Homo sapiens
gagctacctgtctcc

SEQ ID NO: 20441 - DNA, 15 bp, Homo sapiens
agctacctgtctccc

SEQ ID NO: 20442 - DNA, 15 bp, Homo sapiens
gctacctgtctcccc

SEQ ID NO: 20443 - DNA, 15 bp, Homo sapiens
ctacctgtctcccct

SEQ ID NO: 20444 - DNA, 15 bp, Homo sapiens
tacctgtctcccctc

SEQ ID NO: 20445 - DNA, 15 bp, Homo sapiens
acctgtctcccctct

SEQ ID NO: 20446 - DNA, 15 bp, Homo sapiens
cctgtctcccctcta

SEQ ID NO: 20447 - DNA, 15 bp, Homo sapiens
ctgtctcccctctac

SEQ ID NO: 20448 - DNA, 15 bp, Homo sapiens
tgtctcccctctact

SEQ ID NO: 20449 - DNA, 15 bp, Homo sapiens
gtctcccctctacta

SEQ ID NO: 20450 - DNA, 15 bp, Homo sapiens
tctcccctctactaa

SEQ ID NO: 20451 - DNA, 15 bp, Homo sapiens
ctcccctctactaaa

SEQ ID NO: 20452 - DNA, 15 bp, Homo sapiens
tcccctctactaaat

SEQ ID NO: 20453 - DNA, 15 bp, Homo sapiens
cccctctactaaatg

SEQ ID NO: 20454 - DNA, 15 bp, Homo sapiens
ccctctactaaatgg

SEQ ID NO: 20455 - DNA, 15 bp, Homo sapiens
cctctactaaatggg

SEQ ID NO: 20456 - DNA, 15 bp, Homo sapiens
ctctactaaatgggg

SEQ ID NO: 20457 - DNA, 15 bp, Homo sapiens
tctactaaatgggga

SEQ ID NO: 20458 - DNA, 15 bp, Homo sapiens
ctactaaatggggat

SEQ ID NO: 20459 - DNA, 15 bp, Homo sapiens
tactaaatggggata

SEQ ID NO: 20460 - DNA, 15 bp, Homo sapiens
actaaatggggataa

SEQ ID NO: 20461 - DNA, 15 bp, Homo sapiens
ctaaatggggataat

SEQ ID NO: 20462 - DNA, 15 bp, Homo sapiens
taaatggggataatc

SEQ ID NO: 20463 - DNA, 15 bp, Homo sapiens
aaatggggataatca

SEQ ID NO: 20464 - DNA, 15 bp, Homo sapiens
aatggggataatcat

SEQ ID NO: 20465 - DNA, 15 bp, Homo sapiens
atggggataatcata

SEQ ID NO: 20466 - DNA, 15 bp, Homo sapiens
tggggataatcatag

SEQ ID NO: 20467 - DNA, 15 bp, Homo sapiens
ggggataatcatagc

SEQ ID NO: 20468 - DNA, 15 bp, Homo sapiens
gggataatcatagca

SEQ ID NO: 20469 - DNA, 15 bp, Homo sapiens
ggataatcatagcac

SEQ ID NO: 20470 - DNA, 15 bp, Homo sapiens
gataatcatagcacc

SEQ ID NO: 20471 - DNA, 15 bp, Homo sapiens
ataatcatagcacct

SEQ ID NO: 20472 - DNA, 15 bp, Homo sapiens
taatcatagcaccta

SEQ ID NO: 20473 - DNA, 15 bp, Homo sapiens
aatcatagcacctac

SEQ ID NO: 20474 - DNA, 15 bp, Homo sapiens
atcatagcacctaca

SEQ ID NO: 20475 - DNA, 15 bp, Homo sapiens
tcatagcacctacac

SEQ ID NO: 20476 - DNA, 15 bp, Homo sapiens
catagcacctacaca

SEQ ID NO: 20477 - DNA, 15 bp, Homo sapiens
atagcacctacacaa

SEQ ID NO: 20478 - DNA, 15 bp, Homo sapiens
tagcacctacacaac

SEQ ID NO: 20479 - DNA, 15 bp, Homo sapiens
agcacctacacaaca

SEQ ID NO: 20480 - DNA, 15 bp, Homo sapiens
gcacctacacaacac

SEQ ID NO: 20481 - DNA, 15 bp, Homo sapiens
cacctacacaacaca

SEQ ID NO: 20482 - DNA, 15 bp, Homo sapiens
acctacacaacacag

SEQ ID NO: 20483 - DNA, 15 bp, Homo sapiens
cctacacaacacagc

SEQ ID NO: 20484 - DNA, 15 bp, Homo sapiens
ctacacaacacagca

SEQ ID NO: 20485 - DNA, 15 bp, Homo sapiens
tacacaacacagcat

SEQ ID NO: 20486 - DNA, 15 bp, Homo sapiens
acacaacacagcatg

SEQ ID NO: 20487 - DNA, 15 bp, Homo sapiens
cacaacacagcatgc

SEQ ID NO: 20488 - DNA, 15 bp, Homo sapiens
acaacacagcatgca

SEQ ID NO: 20489 - DNA, 15 bp, Homo sapiens
caacacagcatgcac

SEQ ID NO: 20490 - DNA, 15 bp, Homo sapiens
aacacagcatgcaca

SEQ ID NO: 20491 - DNA, 15 bp, Homo sapiens
acacagcatgcacag

SEQ ID NO: 20492 - DNA, 15 bp, Homo sapiens
cacagcatgcacagc

SEQ ID NO: 20493 - DNA, 15 bp, Homo sapiens
acagcatgcacagca

SEQ ID NO: 20494 - DNA, 15 bp, Homo sapiens
cagcatgcacagcag

SEQ ID NO: 20495 - DNA, 15 bp, Homo sapiens
agcatgcacagcagg

SEQ ID NO: 20496 - DNA, 15 bp, Homo sapiens
gcatgcacagcaggc

SEQ ID NO: 20497 - DNA, 15 bp, Homo sapiens
catgcacagcaggcc

SEQ ID NO: 20498 - DNA, 15 bp, Homo sapiens
atgcacagcaggcct

SEQ ID NO: 20499 - DNA, 15 bp, Homo sapiens
tgcacagcaggcctc

SEQ ID NO: 20500 - DNA, 15 bp, Homo sapiens
gcacagcaggcctca

SEQ ID NO: 20501 - DNA, 15 bp, Homo sapiens
cacagcaggcctcac

SEQ ID NO: 20502 - DNA, 15 bp, Homo sapiens
acagcaggcctcacg

SEQ ID NO: 20503 - DNA, 15 bp, Homo sapiens
cagcaggcctcacgg

SEQ ID NO: 20504 - DNA, 15 bp, Homo sapiens
agcaggcctcacgga

SEQ ID NO: 20505 - DNA, 15 bp, Homo sapiens
gcaggcctcacggag

SEQ ID NO: 20506 - DNA, 15 bp, Homo sapiens
caggcctcacggaga

SEQ ID NO: 20507 - DNA, 15 bp, Homo sapiens
aggcctcacggagag

SEQ ID NO: 20508 - DNA, 15 bp, Homo sapiens
ggcctcacggagaga

SEQ ID NO: 20509 - DNA, 15 bp, Homo sapiens
gcctcacggagagaa

SEQ ID NO: 20510 - DNA, 15 bp, Homo sapiens
cctcacggagagaat

SEQ ID NO: 20511 - DNA, 15 bp, Homo sapiens
ctcacggagagaatg

SEQ ID NO: 20512 - DNA, 15 bp, Homo sapiens
tcacggagagaatgg

SEQ ID NO: 20513 - DNA, 15 bp, Homo sapiens
cacggagagaatgga

SEQ ID NO: 20514 - DNA, 15 bp, Homo sapiens
acggagagaatggat

SEQ ID NO: 20515 - DNA, 15 bp, Homo sapiens
cggagagaatggatc

SEQ ID NO: 20516 - DNA, 15 bp, Homo sapiens
ggagagaatggatct

SEQ ID NO: 20517 - DNA, 15 bp, Homo sapiens
gagagaatggatctg

SEQ ID NO: 20518 - DNA, 15 bp, Homo sapiens
agagaatggatctga

SEQ ID NO: 20519 - DNA, 15 bp, Homo sapiens
gagaatggatctgat

SEQ ID NO: 20520 - DNA, 15 bp, Homo sapiens
agaatggatctgatg

SEQ ID NO: 20521 - DNA, 15 bp, Homo sapiens
gaatggatctgatgt

SEQ ID NO: 20522 - DNA, 15 bp, Homo sapiens
aatggatctgatgtt

SEQ ID NO: 20523 - DNA, 15 bp, Homo sapiens
atggatctgatgttc

SEQ ID NO: 20524 - DNA, 15 bp, Homo sapiens
tggatctgatgttca

SEQ ID NO: 20525 - DNA, 15 bp, Homo sapiens
ggatctgatgttcat

SEQ ID NO: 20526 - DNA, 15 bp, Homo sapiens
gatctgatgttcata

SEQ ID NO: 20527 - DNA, 15 bp, Homo sapiens
atctgatgttcatag

SEQ ID NO: 20528 - DNA, 15 bp, Homo sapiens
tctgatgttcatagc

SEQ ID NO: 20529 - DNA, 15 bp, Homo sapiens
ctgatgttcatagca

SEQ ID NO: 20530 - DNA, 15 bp, Homo sapiens
tgatgttcatagcac

SEQ ID NO: 20531 - DNA, 15 bp, Homo sapiens
gatgttcatagcaca

SEQ ID NO: 20532 - DNA, 15 bp, Homo sapiens
atgttcatagcacag

SEQ ID NO: 20533 - DNA, 15 bp, Homo sapiens
tgttcatagcacaga

SEQ ID NO: 20534 - DNA, 15 bp, Homo sapiens
gttcatagcacagaa

SEQ ID NO: 20535 - DNA, 15 bp, Homo sapiens
ttcatagcacagaaa

SEQ ID NO: 20536 - DNA, 15 bp, Homo sapiens
tcatagcacagaaat

SEQ ID NO: 20537 - DNA, 15 bp, Homo sapiens
catagcacagaaatc

SEQ ID NO: 20538 - DNA, 15 bp, Homo sapiens
atagcacagaaatca

SEQ ID NO: 20539 - DNA, 15 bp, Homo sapiens
tagcacagaaatcag

SEQ ID NO: 20540 - DNA, 15 bp, Homo sapiens
agcacagaaatcagt

SEQ ID NO: 20541 - DNA, 15 bp, Homo sapiens
gcacagaaatcagta

SEQ ID NO: 20542 - DNA, 15 bp, Homo sapiens
cacagaaatcagtaa

SEQ ID NO: 20543 - DNA, 15 bp, Homo sapiens
acagaaatcagtaaa

SEQ ID NO: 20544 - DNA, 15 bp, Homo sapiens
cagaaatcagtaaat

SEQ ID NO: 20545 - DNA, 15 bp, Homo sapiens
agaaatcagtaaatg

SEQ ID NO: 20546 - DNA, 15 bp, Homo sapiens
gaaatcagtaaatgc

SEQ ID NO: 20547 - DNA, 15 bp, Homo sapiens
aaatcagtaaatgct

SEQ ID NO: 20548 - DNA, 15 bp, Homo sapiens
aatcagtaaatgctg

SEQ ID NO: 20549 - DNA, 15 bp, Homo sapiens
atcagtaaatgctgg

SEQ ID NO: 20550 - DNA, 15 bp, Homo sapiens
tcagtaaatgctggc

SEQ ID NO: 20551 - DNA, 15 bp, Homo sapiens
cagtaaatgctggcc

SEQ ID NO: 20552 - DNA, 15 bp, Homo sapiens
agtaaatgctggcca

SEQ ID NO: 20553 - DNA, 15 bp, Homo sapiens
gtaaatgctggccag

SEQ ID NO: 20554 - DNA, 15 bp, Homo sapiens
taaatgctggccagt

SEQ ID NO: 20555 - DNA, 15 bp, Homo sapiens
aaatgctggccagtt

SEQ ID NO: 20556 - DNA, 15 bp, Homo sapiens
aatgctggccagtta

SEQ ID NO: 20557 - DNA, 15 bp, Homo sapiens
atgctggccagttat

SEQ ID NO: 20558 - DNA, 15 bp, Homo sapiens
tgctggccagttatc

SEQ ID NO: 20559 - DNA, 15 bp, Homo sapiens
gctggccagttatct

SEQ ID NO: 20560 - DNA, 15 bp, Homo sapiens
ctggccagttatctt

SEQ ID NO: 20561 - DNA, 15 bp, Homo sapiens
tggccagttatcttt

SEQ ID NO: 20562 - DNA, 15 bp, Homo sapiens
ggccagttatctttt

SEQ ID NO: 20563 - DNA, 15 bp, Homo sapiens
gccagttatcttttg

SEQ ID NO: 20564 - DNA, 15 bp, Homo sapiens
ccagttatcttttgc

SEQ ID NO: 20565 - DNA, 15 bp, Homo sapiens
cagttatcttttgca

SEQ ID NO: 20566 - DNA, 15 bp, Homo sapiens
agttatcttttgcag

SEQ ID NO: 20567 - DNA, 15 bp, Homo sapiens
gttatcttttgcagt

SEQ ID NO: 20568 - DNA, 15 bp, Homo sapiens
ttatcttttgcagtt

SEQ ID NO: 20569 - DNA, 15 bp, Homo sapiens
tatcttttgcagtta

SEQ ID NO: 20570 - DNA, 15 bp, Homo sapiens
atcttttgcagttac

SEQ ID NO: 20571 - DNA, 15 bp, Homo sapiens
tcttttgcagttacc

SEQ ID NO: 20572 - DNA, 15 bp, Homo sapiens
cttttgcagttacca

SEQ ID NO: 20573 - DNA, 15 bp, Homo sapiens
ttttgcagttaccac

SEQ ID NO: 20574 - DNA, 15 bp, Homo sapiens
tttgcagttaccacc

SEQ ID NO: 20575 - DNA, 15 bp, Homo sapiens
ttgcagttaccacca

SEQ ID NO: 20576 - DNA, 15 bp, Homo sapiens
tgcagttaccaccat

SEQ ID NO: 20577 - DNA, 15 bp, Homo sapiens
gcagttaccaccatg

SEQ ID NO: 20578 - DNA, 15 bp, Homo sapiens
cagttaccaccatgc

SEQ ID NO: 20579 - DNA, 15 bp, Homo sapiens
agttaccaccatgct

SEQ ID NO: 20580 - DNA, 15 bp, Homo sapiens
gttaccaccatgctt

SEQ ID NO: 20581 - DNA, 15 bp, Homo sapiens
ttaccaccatgcttc

SEQ ID NO: 20582 - DNA, 15 bp, Homo sapiens
taccaccatgcttca

SEQ ID NO: 20583 - DNA, 15 bp, Homo sapiens
accaccatgcttcag

SEQ ID NO: 20584 - DNA, 15 bp, Homo sapiens
ccaccatgcttcagt

SEQ ID NO: 20585 - DNA, 15 bp, Homo sapiens
caccatgcttcagtt

SEQ ID NO: 20586 - DNA, 15 bp, Homo sapiens
accatgcttcagtta

SEQ ID NO: 20587 - DNA, 15 bp, Homo sapiens
ccatgcttcagttac

SEQ ID NO: 20588 - DNA, 15 bp, Homo sapiens
catgcttcagttacc

SEQ ID NO: 20589 - DNA, 15 bp, Homo sapiens
atgcttcagttacct

SEQ ID NO: 20590 - DNA, 15 bp, Homo sapiens
tgcttcagttacctt

SEQ ID NO: 20591 - DNA, 15 bp, Homo sapiens
gcttcagttaccttg

SEQ ID NO: 20592 - DNA, 15 bp, Homo sapiens
cttcagttaccttgc

SEQ ID NO: 20593 - DNA, 15 bp, Homo sapiens
ttcagttaccttgcc

SEQ ID NO: 20594 - DNA, 15 bp, Homo sapiens
tcagttaccttgccc

SEQ ID NO: 20595 - DNA, 15 bp, Homo sapiens
cagttaccttgccca

SEQ ID NO: 20596 - DNA, 15 bp, Homo sapiens
agttaccttgcccat

SEQ ID NO: 20597 - DNA, 15 bp, Homo sapiens
gttaccttgcccatg

SEQ ID NO: 20598 - DNA, 15 bp, Homo sapiens
ttaccttgcccatgt

SEQ ID NO: 20599 - DNA, 15 bp, Homo sapiens
taccttgcccatgtt

SEQ ID NO: 20600 - DNA, 15 bp, Homo sapiens
accttgcccatgttt

SEQ ID NO: 20601 - DNA, 15 bp, Homo sapiens
ccttgcccatgtttg

SEQ ID NO: 20602 - DNA, 15 bp, Homo sapiens
cttgcccatgtttgc

SEQ ID NO: 20603 - DNA, 15 bp, Homo sapiens
ttgcccatgtttgct

SEQ ID NO: 20604 - DNA, 15 bp, Homo sapiens
tgcccatgtttgctg

SEQ ID NO: 20605 - DNA, 15 bp, Homo sapiens
gcccatgtttgctgc

SEQ ID NO: 20606 - DNA, 15 bp, Homo sapiens
cccatgtttgctgca

SEQ ID NO: 20607 - DNA, 15 bp, Homo sapiens
ccatgtttgctgcat

SEQ ID NO: 20608 - DNA, 15 bp, Homo sapiens
catgtttgctgcatt

SEQ ID NO: 20609 - DNA, 15 bp, Homo sapiens
atgtttgctgcattc

SEQ ID NO: 20610 - DNA, 15 bp, Homo sapiens
tgtttgctgcattca

SEQ ID NO: 20611 - DNA, 15 bp, Homo sapiens
gtttgctgcattcaa

SEQ ID NO: 20612 - DNA, 15 bp, Homo sapiens
tttgctgcattcaat

SEQ ID NO: 20613 - DNA, 15 bp, Homo sapiens
ttgctgcattcaatc

SEQ ID NO: 20614 - DNA, 15 bp, Homo sapiens
tgctgcattcaatcc

SEQ ID NO: 20615 - DNA, 15 bp, Homo sapiens
gctgcattcaatcca

SEQ ID NO: 20616 - DNA, 15 bp, Homo sapiens
ctgcattcaatccaa

SEQ ID NO: 20617 - DNA, 15 bp, Homo sapiens
tgcattcaatccaac

SEQ ID NO: 20618 - DNA, 15 bp, Homo sapiens
gcattcaatccaacc

SEQ ID NO: 20619 - DNA, 15 bp, Homo sapiens
cattcaatccaacca

SEQ ID NO: 20620 - DNA, 15 bp, Homo sapiens
attcaatccaaccat

SEQ ID NO: 20621 - DNA, 15 bp, Homo sapiens
ttcaatccaaccatg

SEQ ID NO: 20622 - DNA, 15 bp, Homo sapiens
tcaatccaaccatgc

SEQ ID NO: 20623 - DNA, 15 bp, Homo sapiens
caatccaaccatgca

SEQ ID NO: 20624 - DNA, 15 bp, Homo sapiens
aatccaaccatgcaa

SEQ ID NO: 20625 - DNA, 15 bp, Homo sapiens
atccaaccatgcaaa

SEQ ID NO: 20626 - DNA, 15 bp, Homo sapiens
tccaaccatgcaaag

SEQ ID NO: 20627 - DNA, 15 bp, Homo sapiens
ccaaccatgcaaagt

SEQ ID NO: 20628 - DNA, 15 bp, Homo sapiens
caaccatgcaaagtg

SEQ ID NO: 20629 - DNA, 15 bp, Homo sapiens
aaccatgcaaagtga

SEQ ID NO: 20630 - DNA, 15 bp, Homo sapiens
accatgcaaagtgac

SEQ ID NO: 20631 - DNA, 15 bp, Homo sapiens
ccatgcaaagtgact

SEQ ID NO: 20632 - DNA, 15 bp, Homo sapiens
catgcaaagtgactg

SEQ ID NO: 20633 - DNA, 15 bp, Homo sapiens
atgcaaagtgactgt

SEQ ID NO: 20634 - DNA, 15 bp, Homo sapiens
tgcaaagtgactgtc

SEQ ID NO: 20635 - DNA, 15 bp, Homo sapiens
gcaaagtgactgtca

SEQ ID NO: 20636 - DNA, 15 bp, Homo sapiens
caaagtgactgtcat

SEQ ID NO: 20637 - DNA, 15 bp, Homo sapiens
aaagtgactgtcatt

SEQ ID NO: 20638 - DNA, 15 bp, Homo sapiens
aagtgactgtcattt

SEQ ID NO: 20639 - DNA, 15 bp, Homo sapiens
agtgactgtcatttc

SEQ ID NO: 20640 - DNA, 15 bp, Homo sapiens
gtgactgtcatttcc

SEQ ID NO: 20641 - DNA, 15 bp, Homo sapiens
tgactgtcatttccc

SEQ ID NO: 20642 - DNA, 15 bp, Homo sapiens
gactgtcatttccct

SEQ ID NO: 20643 - DNA, 15 bp, Homo sapiens
actgtcatttccctt

SEQ ID NO: 20644 - DNA, 15 bp, Homo sapiens
ctgtcatttccctta

SEQ ID NO: 20645 - DNA, 15 bp, Homo sapiens
tgtcatttcccttag

SEQ ID NO: 20646 - DNA, 15 bp, Homo sapiens
gtcatttcccttagc

SEQ ID NO: 20647 - DNA, 15 bp, Homo sapiens
tcatttcccttagca

SEQ ID NO: 20648 - DNA, 15 bp, Homo sapiens
catttcccttagcag

SEQ ID NO: 20649 - DNA, 15 bp, Homo sapiens
atttcccttagcaga

SEQ ID NO: 20650 - DNA, 15 bp, Homo sapiens
tttcccttagcagag

SEQ ID NO: 20651 - DNA, 15 bp, Homo sapiens
ttcccttagcagaga

SEQ ID NO: 20652 - DNA, 15 bp, Homo sapiens
tcccttagcagagaa

SEQ ID NO: 20653 - DNA, 15 bp, Homo sapiens
cccttagcagagaag

SEQ ID NO: 20654 - DNA, 15 bp, Homo sapiens
ccttagcagagaagg

SEQ ID NO: 20655 - DNA, 15 bp, Homo sapiens
cttagcagagaagga

SEQ ID NO: 20656 - DNA, 15 bp, Homo sapiens
ttagcagagaaggaa

SEQ ID NO: 20657 - DNA, 15 bp, Homo sapiens
tagcagagaaggaaa

SEQ ID NO: 20658 - DNA, 15 bp, Homo sapiens
agcagagaaggaaac

SEQ ID NO: 20659 - DNA, 15 bp, Homo sapiens
gcagagaaggaaacg

SEQ ID NO: 20660 - DNA, 15 bp, Homo sapiens
cagagaaggaaacgg

SEQ ID NO: 20661 - DNA, 15 bp, Homo sapiens
agagaaggaaacgga

SEQ ID NO: 20662 - DNA, 15 bp, Homo sapiens
gagaaggaaacggag

SEQ ID NO: 20663 - DNA, 15 bp, Homo sapiens
agaaggaaacggagg

SEQ ID NO: 20664 - DNA, 15 bp, Homo sapiens
gaaggaaacggaggc

SEQ ID NO: 20665 - DNA, 15 bp, Homo sapiens
aaggaaacggaggca

SEQ ID NO: 20666 - DNA, 15 bp, Homo sapiens
aggaaacggaggcaa

SEQ ID NO: 20667 - DNA, 15 bp, Homo sapiens
ggaaacggaggcaag

SEQ ID NO: 20668 - DNA, 15 bp, Homo sapiens
gaaacggaggcaagg

SEQ ID NO: 20669 - DNA, 15 bp, Homo sapiens
aaacggaggcaaggc

SEQ ID NO: 20670 - DNA, 15 bp, Homo sapiens
aacggaggcaaggcc

SEQ ID NO: 20671 - DNA, 15 bp, Homo sapiens
acggaggcaaggcca

SEQ ID NO: 20672 - DNA, 15 bp, Homo sapiens
cggaggcaaggccac

SEQ ID NO: 20673 - DNA, 15 bp, Homo sapiens
ggaggcaaggccaca

SEQ ID NO: 20674 - DNA, 15 bp, Homo sapiens
gaggcaaggccacac

SEQ ID NO: 20675 - DNA, 15 bp, Homo sapiens
aggcaaggccacaca

SEQ ID NO: 20676 - DNA, 15 bp, Homo sapiens
ggcaaggccacacag

SEQ ID NO: 20677 - DNA, 15 bp, Homo sapiens
gcaaggccacacagc

SEQ ID NO: 20678 - DNA, 15 bp, Homo sapiens
caaggccacacagct

SEQ ID NO: 20679 - DNA, 15 bp, Homo sapiens
aaggccacacagctg

SEQ ID NO: 20680 - DNA, 15 bp, Homo sapiens
aggccacacagctga

SEQ ID NO: 20681 - DNA, 15 bp, Homo sapiens
ggccacacagctgat

SEQ ID NO: 20682 - DNA, 15 bp, Homo sapiens
gccacacagctgatg

SEQ ID NO: 20683 - DNA, 15 bp, Homo sapiens
ccacacagctgatgg

SEQ ID NO: 20684 - DNA, 15 bp, Homo sapiens
cacacagctgatggg

SEQ ID NO: 20685 - DNA, 15 bp, Homo sapiens
acacagctgatgggc

SEQ ID NO: 20686 - DNA, 15 bp, Homo sapiens
cacagctgatgggcg

SEQ ID NO: 20687 - DNA, 15 bp, Homo sapiens
acagctgatgggcgg

SEQ ID NO: 20688 - DNA, 15 bp, Homo sapiens
cagctgatgggcgga

SEQ ID NO: 20689 - DNA, 15 bp, Homo sapiens
agctgatgggcggag

SEQ ID NO: 20690 - DNA, 15 bp, Homo sapiens
gctgatgggcggagc

SEQ ID NO: 20691 - DNA, 15 bp, Homo sapiens
ctgatgggcggagcc

SEQ ID NO: 20692 - DNA, 15 bp, Homo sapiens
tgatgggcggagccg

SEQ ID NO: 20693 - DNA, 15 bp, Homo sapiens
gatgggcggagccga

SEQ ID NO: 20694 - DNA, 15 bp, Homo sapiens
atgggcggagccgaa

SEQ ID NO: 20695 - DNA, 15 bp, Homo sapiens
tgggcggagccgaat

SEQ ID NO: 20696 - DNA, 15 bp, Homo sapiens
gggcggagccgaatt

SEQ ID NO: 20697 - DNA, 15 bp, Homo sapiens
ggcggagccgaattt

SEQ ID NO: 20698 - DNA, 15 bp, Homo sapiens
gcggagccgaattta

SEQ ID NO: 20699 - DNA, 15 bp, Homo sapiens
cggagccgaatttag

SEQ ID NO: 20700 - DNA, 15 bp, Homo sapiens
ggagccgaatttagg

SEQ ID NO: 20701 - DNA, 15 bp, Homo sapiens
gagccgaatttagga

SEQ ID NO: 20702 - DNA, 15 bp, Homo sapiens
agccgaatttaggag

SEQ ID NO: 20703 - DNA, 15 bp, Homo sapiens
gccgaatttaggaga

SEQ ID NO: 20704 - DNA, 15 bp, Homo sapiens
ccgaatttaggagag

SEQ ID NO: 20705 - DNA, 15 bp, Homo sapiens
cgaatttaggagagg

SEQ ID NO: 20706 - DNA, 15 bp, Homo sapiens
gaatttaggagagga

SEQ ID NO: 20707 - DNA, 15 bp, Homo sapiens
aatttaggagaggaa

SEQ ID NO: 20708 - DNA, 15 bp, Homo sapiens
atttaggagaggaat

SEQ ID NO: 20709 - DNA, 15 bp, Homo sapiens
tttaggagaggaatc

SEQ ID NO: 20710 - DNA, 15 bp, Homo sapiens
ttaggagaggaatcc

SEQ ID NO: 20711 - DNA, 15 bp, Homo sapiens
taggagaggaatcca

SEQ ID NO: 20712 - DNA, 15 bp, Homo sapiens
aggagaggaatccag

SEQ ID NO: 20713 - DNA, 15 bp, Homo sapiens
ggagaggaatccagg

SEQ ID NO: 20714 - DNA, 15 bp, Homo sapiens
gagaggaatccagga

SEQ ID NO: 20715 - DNA, 15 bp, Homo sapiens
agaggaatccaggaa

SEQ ID NO: 20716 - DNA, 15 bp, Homo sapiens
gaggaatccaggaaa

SEQ ID NO: 20717 - DNA, 15 bp, Homo sapiens
aggaatccaggaaac

SEQ ID NO: 20718 - DNA, 15 bp, Homo sapiens
ggaatccaggaaact

SEQ ID NO: 20719 - DNA, 15 bp, Homo sapiens
gaatccaggaaactg

SEQ ID NO: 20720 - DNA, 15 bp, Homo sapiens
aatccaggaaactgt

SEQ ID NO: 20721 - DNA, 15 bp, Homo sapiens
atccaggaaactgta

SEQ ID NO: 20722 - DNA, 15 bp, Homo sapiens
tccaggaaactgtag

SEQ ID NO: 20723 - DNA, 15 bp, Homo sapiens
ccaggaaactgtagg

SEQ ID NO: 20724 - DNA, 15 bp, Homo sapiens
caggaaactgtaggt

SEQ ID NO: 20725 - DNA, 15 bp, Homo sapiens
aggaaactgtaggtg

SEQ ID NO: 20726 - DNA, 15 bp, Homo sapiens
ggaaactgtaggtgt

SEQ ID NO: 20727 - DNA, 15 bp, Homo sapiens
gaaactgtaggtgtg

SEQ ID NO: 20728 - DNA, 15 bp, Homo sapiens
aaactgtaggtgtgg

SEQ ID NO: 20729 - DNA, 15 bp, Homo sapiens
aactgtaggtgtggc

SEQ ID NO: 20730 - DNA, 15 bp, Homo sapiens
actgtaggtgtggct

SEQ ID NO: 20731 - DNA, 15 bp, Homo sapiens
ctgtaggtgtggctc

SEQ ID NO: 20732 - DNA, 15 bp, Homo sapiens
tgtaggtgtggctcc

SEQ ID NO: 20733 - DNA, 15 bp, Homo sapiens
gtaggtgtggctccc

SEQ ID NO: 20734 - DNA, 15 bp, Homo sapiens
taggtgtggctccct

SEQ ID NO: 20735 - DNA, 15 bp, Homo sapiens
aggtgtggctcccta

SEQ ID NO: 20736 - DNA, 15 bp, Homo sapiens
ggtgtggctccctaa

SEQ ID NO: 20737 - DNA, 15 bp, Homo sapiens
gtgtggctccctaaa

SEQ ID NO: 20738 - DNA, 15 bp, Homo sapiens
tgtggctccctaaat

SEQ ID NO: 20739 - DNA, 15 bp, Homo sapiens
gtggctccctaaata

SEQ ID NO: 20740 - DNA, 15 bp, Homo sapiens
tggctccctaaatac

SEQ ID NO: 20741 - DNA, 15 bp, Homo sapiens
ggctccctaaatact

SEQ ID NO: 20742 - DNA, 15 bp, Homo sapiens
gctccctaaatactg

SEQ ID NO: 20743 - DNA, 15 bp, Homo sapiens
ctccctaaatactga

SEQ ID NO: 20744 - DNA, 15 bp, Homo sapiens
tccctaaatactgac

SEQ ID NO: 20745 - DNA, 15 bp, Homo sapiens
ccctaaatactgaca

SEQ ID NO: 20746 - DNA, 15 bp, Homo sapiens
cctaaatactgacac

SEQ ID NO: 20747 - DNA, 15 bp, Homo sapiens
ctaaatactgacact

SEQ ID NO: 20748 - DNA, 15 bp, Homo sapiens
taaatactgacacta

SEQ ID NO: 20749 - DNA, 15 bp, Homo sapiens
aaatactgacactag

SEQ ID NO: 20750 - DNA, 15 bp, Homo sapiens
aatactgacactagc

SEQ ID NO: 20751 - DNA, 15 bp, Homo sapiens
atactgacactagct

SEQ ID NO: 20752 - DNA, 15 bp, Homo sapiens
tactgacactagcta

SEQ ID NO: 20753 - DNA, 15 bp, Homo sapiens
actgacactagctaa

SEQ ID NO: 20754 - DNA, 15 bp, Homo sapiens
ctgacactagctaac

SEQ ID NO: 20755 - DNA, 15 bp, Homo sapiens
tgacactagctaaca

SEQ ID NO: 20756 - DNA, 15 bp, Homo sapiens
gacactagctaacac

SEQ ID NO: 20757 - DNA, 15 bp, Homo sapiens
acactagctaacacc

SEQ ID NO: 20758 - DNA, 15 bp, Homo sapiens
cactagctaacacct

SEQ ID NO: 20759 - DNA, 15 bp, Homo sapiens
actagctaacacctg

SEQ ID NO: 20760 - DNA, 15 bp, Homo sapiens
ctagctaacacctgt

SEQ ID NO: 20761 - DNA, 15 bp, Homo sapiens
tagctaacacctgta

SEQ ID NO: 20762 - DNA, 15 bp, Homo sapiens
agctaacacctgtat

SEQ ID NO: 20763 - DNA, 15 bp, Homo sapiens
gctaacacctgtatg

SEQ ID NO: 20764 - DNA, 15 bp, Homo sapiens
ctaacacctgtatga

SEQ ID NO: 20765 - DNA, 15 bp, Homo sapiens
taacacctgtatgat

SEQ ID NO: 20766 - DNA, 15 bp, Homo sapiens
aacacctgtatgata

SEQ ID NO: 20767 - DNA, 15 bp, Homo sapiens
acacctgtatgatac

SEQ ID NO: 20768 - DNA, 15 bp, Homo sapiens
cacctgtatgatact

SEQ ID NO: 20769 - DNA, 15 bp, Homo sapiens
acctgtatgatacta

SEQ ID NO: 20770 - DNA, 15 bp, Homo sapiens
cctgtatgatactac

SEQ ID NO: 20771 - DNA, 15 bp, Homo sapiens
ctgtatgatactact

SEQ ID NO: 20772 - DNA, 15 bp, Homo sapiens
tgtatgatactactt

SEQ ID NO: 20773 - DNA, 15 bp, Homo sapiens
gtatgatactacttt

SEQ ID NO: 20774 - DNA, 15 bp, Homo sapiens
tatgatactactttg

SEQ ID NO: 20775 - DNA, 15 bp, Homo sapiens
atgatactactttga

SEQ ID NO: 20776 - DNA, 15 bp, Homo sapiens
tgatactactttgag

SEQ ID NO: 20777 - DNA, 15 bp, Homo sapiens
gatactactttgagc

SEQ ID NO: 20778 - DNA, 15 bp, Homo sapiens
atactactttgagcc

SEQ ID NO: 20779 - DNA, 15 bp, Homo sapiens
tactactttgagcca

SEQ ID NO: 20780 - DNA, 15 bp, Homo sapiens
actactttgagccag

SEQ ID NO: 20781 - DNA, 15 bp, Homo sapiens
ctactttgagccaga

SEQ ID NO: 20782 - DNA, 15 bp, Homo sapiens
tactttgagccagac

SEQ ID NO: 20783 - DNA, 15 bp, Homo sapiens
actttgagccagact

SEQ ID NO: 20784 - DNA, 15 bp, Homo sapiens
ctttgagccagactc

SEQ ID NO: 20785 - DNA, 15 bp, Homo sapiens
tttgagccagactcg

SEQ ID NO: 20786 - DNA, 15 bp, Homo sapiens
ttgagccagactcgg

SEQ ID NO: 20787 - DNA, 15 bp, Homo sapiens
tgagccagactcggt

SEQ ID NO: 20788 - DNA, 15 bp, Homo sapiens
gagccagactcggtt

SEQ ID NO: 20789 - DNA, 15 bp, Homo sapiens
agccagactcggttc

SEQ ID NO: 20790 - DNA, 15 bp, Homo sapiens
gccagactcggttct

SEQ ID NO: 20791 - DNA, 15 bp, Homo sapiens
ccagactcggttctg

SEQ ID NO: 20792 - DNA, 15 bp, Homo sapiens
cagactcggttctga

SEQ ID NO: 20793 - DNA, 15 bp, Homo sapiens
agactcggttctgag

SEQ ID NO: 20794 - DNA, 15 bp, Homo sapiens
gactcggttctgagc

SEQ ID NO: 20795 - DNA, 15 bp, Homo sapiens
actcggttctgagca

SEQ ID NO: 20796 - DNA, 15 bp, Homo sapiens
ctcggttctgagcac

SEQ ID NO: 20797 - DNA, 15 bp, Homo sapiens
tcggttctgagcacc

SEQ ID NO: 20798 - DNA, 15 bp, Homo sapiens
cggttctgagcacct

SEQ ID NO: 20799 - DNA, 15 bp, Homo sapiens
ggttctgagcacctt

SEQ ID NO: 20800 - DNA, 15 bp, Homo sapiens
gttctgagcaccttt

SEQ ID NO: 20801 - DNA, 15 bp, Homo sapiens
ttctgagcaccttta

SEQ ID NO: 20802 - DNA, 15 bp, Homo sapiens
tctgagcacctttac

SEQ ID NO: 20803 - DNA, 15 bp, Homo sapiens
ctgagcacctttact

SEQ ID NO: 20804 - DNA, 15 bp, Homo sapiens
tgagcacctttactc

SEQ ID NO: 20805 - DNA, 15 bp, Homo sapiens
gagcacctttactct

SEQ ID NO: 20806 - DNA, 15 bp, Homo sapiens
agcacctttactctt

SEQ ID NO: 20807 - DNA, 15 bp, Homo sapiens
gcacctttactctta

SEQ ID NO: 20808 - DNA, 15 bp, Homo sapiens
cacctttactcttat

SEQ ID NO: 20809 - DNA, 15 bp, Homo sapiens
acctttactcttatc

SEQ ID NO: 20810 - DNA, 15 bp, Homo sapiens
cctttactcttatcc

SEQ ID NO: 20811 - DNA, 15 bp, Homo sapiens
ctttactcttatccc

SEQ ID NO: 20812 - DNA, 15 bp, Homo sapiens
tttactcttatcccg

SEQ ID NO: 20813 - DNA, 15 bp, Homo sapiens
ttactcttatcccgt

SEQ ID NO: 20814 - DNA, 15 bp, Homo sapiens
tactcttatcccgta

SEQ ID NO: 20815 - DNA, 15 bp, Homo sapiens
actcttatcccgtaa

SEQ ID NO: 20816 - DNA, 15 bp, Homo sapiens
ctcttatcccgtaaa

SEQ ID NO: 20817 - DNA, 15 bp, Homo sapiens
tcttatcccgtaaag

SEQ ID NO: 20818 - DNA, 15 bp, Homo sapiens
cttatcccgtaaagt

SEQ ID NO: 20819 - DNA, 15 bp, Homo sapiens
ttatcccgtaaagta

SEQ ID NO: 20820 - DNA, 15 bp, Homo sapiens
tatcccgtaaagtag

SEQ ID NO: 20821 - DNA, 15 bp, Homo sapiens
atcccgtaaagtaga

SEQ ID NO: 20822 - DNA, 15 bp, Homo sapiens
tcccgtaaagtagat

SEQ ID NO: 20823 - DNA, 15 bp, Homo sapiens
cccgtaaagtagatg

SEQ ID NO: 20824 - DNA, 15 bp, Homo sapiens
ccgtaaagtagatgc

SEQ ID NO: 20825 - DNA, 15 bp, Homo sapiens
cgtaaagtagatgct

SEQ ID NO: 20826 - DNA, 15 bp, Homo sapiens
gtaaagtagatgcta

SEQ ID NO: 20827 - DNA, 15 bp, Homo sapiens
taaagtagatgctat

SEQ ID NO: 20828 - DNA, 15 bp, Homo sapiens
aaagtagatgctata

SEQ ID NO: 20829 - DNA, 15 bp, Homo sapiens
aagtagatgctataa

SEQ ID NO: 20830 - DNA, 15 bp, Homo sapiens
agtagatgctataat

SEQ ID NO: 20831 - DNA, 15 bp, Homo sapiens
gtagatgctataatt

SEQ ID NO: 20832 - DNA, 15 bp, Homo sapiens
tagatgctataattc

SEQ ID NO: 20833 - DNA, 15 bp, Homo sapiens
agatgctataattct

SEQ ID NO: 20834 - DNA, 15 bp, Homo sapiens
gatgctataattctg

SEQ ID NO: 20835 - DNA, 15 bp, Homo sapiens
atgctataattctgt

SEQ ID NO: 20836 - DNA, 15 bp, Homo sapiens
tgctataattctgtt

SEQ ID NO: 20837 - DNA, 15 bp, Homo sapiens
gctataattctgttt

SEQ ID NO: 20838 - DNA, 15 bp, Homo sapiens
ctataattctgtttt

SEQ ID NO: 20839 - DNA, 15 bp, Homo sapiens
tataattctgtttta

SEQ ID NO: 20840 - DNA, 15 bp, Homo sapiens
ataattctgttttac

SEQ ID NO: 20841 - DNA, 15 bp, Homo sapiens
taattctgttttaca

SEQ ID NO: 20842 - DNA, 15 bp, Homo sapiens
aattctgttttacag

SEQ ID NO: 20843 - DNA, 15 bp, Homo sapiens
attctgttttacagg

SEQ ID NO: 20844 - DNA, 15 bp, Homo sapiens
ttctgttttacaggt

SEQ ID NO: 20845 - DNA, 15 bp, Homo sapiens
tctgttttacaggtg

SEQ ID NO: 20846 - DNA, 15 bp, Homo sapiens
ctgttttacaggtga

SEQ ID NO: 20847 - DNA, 15 bp, Homo sapiens
tgttttacaggtgag

SEQ ID NO: 20848 - DNA, 15 bp, Homo sapiens
gttttacaggtgagg

SEQ ID NO: 20849 - DNA, 15 bp, Homo sapiens
ttttacaggtgaggg

SEQ ID NO: 20850 - DNA, 15 bp, Homo sapiens
tttacaggtgagggt

SEQ ID NO: 20851 - DNA, 15 bp, Homo sapiens
ttacaggtgagggtc

SEQ ID NO: 20852 - DNA, 15 bp, Homo sapiens
tacaggtgagggtcc

SEQ ID NO: 20853 - DNA, 15 bp, Homo sapiens
acaggtgagggtcct

SEQ ID NO: 20854 - DNA, 15 bp, Homo sapiens
caggtgagggtcctg

SEQ ID NO: 20855 - DNA, 15 bp, Homo sapiens
aggtgagggtcctga

SEQ ID NO: 20856 - DNA, 15 bp, Homo sapiens
ggtgagggtcctgag

SEQ ID NO: 20857 - DNA, 15 bp, Homo sapiens
gtgagggtcctgagg

SEQ ID NO: 20858 - DNA, 15 bp, Homo sapiens
tgagggtcctgaggc

SEQ ID NO: 20859 - DNA, 15 bp, Homo sapiens
gagggtcctgaggca

SEQ ID NO: 20860 - DNA, 15 bp, Homo sapiens
agggtcctgaggcat

SEQ ID NO: 20861 - DNA, 15 bp, Homo sapiens
gggtcctgaggcatg

SEQ ID NO: 20862 - DNA, 15 bp, Homo sapiens
ggtcctgaggcatgg

SEQ ID NO: 20863 - DNA, 15 bp, Homo sapiens
gtcctgaggcatggt

SEQ ID NO: 20864 - DNA, 15 bp, Homo sapiens
tcctgaggcatggtg

SEQ ID NO: 20865 - DNA, 15 bp, Homo sapiens
cctgaggcatggtgt

SEQ ID NO: 20866 - DNA, 15 bp, Homo sapiens
ctgaggcatggtgta

SEQ ID NO: 20867 - DNA, 15 bp, Homo sapiens
tgaggcatggtgtag

SEQ ID NO: 20868 - DNA, 15 bp, Homo sapiens
gaggcatggtgtagt

SEQ ID NO: 20869 - DNA, 15 bp, Homo sapiens
aggcatggtgtagtt

SEQ ID NO: 20870 - DNA, 15 bp, Homo sapiens
ggcatggtgtagtta

SEQ ID NO: 20871 - DNA, 15 bp, Homo sapiens
gcatggtgtagttaa

SEQ ID NO: 20872 - DNA, 15 bp, Homo sapiens
catggtgtagttaaa

SEQ ID NO: 20873 - DNA, 15 bp, Homo sapiens
atggtgtagttaaat

SEQ ID NO: 20874 - DNA, 15 bp, Homo sapiens
tggtgtagttaaatg

SEQ ID NO: 20875 - DNA, 15 bp, Homo sapiens
ggtgtagttaaatgc

SEQ ID NO: 20876 - DNA, 15 bp, Homo sapiens
gtgtagttaaatgcg

SEQ ID NO: 20877 - DNA, 15 bp, Homo sapiens
tgtagttaaatgcgt

SEQ ID NO: 20878 - DNA, 15 bp, Homo sapiens
gtagttaaatgcgtt

SEQ ID NO: 20879 - DNA, 15 bp, Homo sapiens
tagttaaatgcgttg

SEQ ID NO: 20880 - DNA, 15 bp, Homo sapiens
agttaaatgcgttgg

SEQ ID NO: 20881 - DNA, 15 bp, Homo sapiens
gttaaatgcgttggc

SEQ ID NO: 20882 - DNA, 15 bp, Homo sapiens
ttaaatgcgttggcc

SEQ ID NO: 20883 - DNA, 15 bp, Homo sapiens
taaatgcgttggcca

SEQ ID NO: 20884 - DNA, 15 bp, Homo sapiens
aaatgcgttggccaa

SEQ ID NO: 20885 - DNA, 15 bp, Homo sapiens
aatgcgttggccaag

SEQ ID NO: 20886 - DNA, 15 bp, Homo sapiens
atgcgttggccaagg

SEQ ID NO: 20887 - DNA, 15 bp, Homo sapiens
tgcgttggccaaggt

SEQ ID NO: 20888 - DNA, 15 bp, Homo sapiens
gcgttggccaaggtc

SEQ ID NO: 20889 - DNA, 15 bp, Homo sapiens
cgttggccaaggtca

SEQ ID NO: 20890 - DNA, 15 bp, Homo sapiens
gttggccaaggtcac

SEQ ID NO: 20891 - DNA, 15 bp, Homo sapiens
ttggccaaggtcaca

SEQ ID NO: 20892 - DNA, 15 bp, Homo sapiens
tggccaaggtcacaa

SEQ ID NO: 20893 - DNA, 15 bp, Homo sapiens
ggccaaggtcacaag

SEQ ID NO: 20894 - DNA, 15 bp, Homo sapiens
gccaaggtcacaagg

SEQ ID NO: 20895 - DNA, 15 bp, Homo sapiens
ccaaggtcacaaggc

SEQ ID NO: 20896 - DNA, 15 bp, Homo sapiens
caaggtcacaaggcc

SEQ ID NO: 20897 - DNA, 15 bp, Homo sapiens
aaggtcacaaggcca

SEQ ID NO: 20898 - DNA, 15 bp, Homo sapiens
aggtcacaaggccag

SEQ ID NO: 20899 - DNA, 15 bp, Homo sapiens
ggtcacaaggccagt

SEQ ID NO: 20900 - DNA, 15 bp, Homo sapiens
gtcacaaggccagta

SEQ ID NO: 20901 - DNA, 15 bp, Homo sapiens
tcacaaggccagtaa

SEQ ID NO: 20902 - DNA, 15 bp, Homo sapiens
cacaaggccagtaag

SEQ ID NO: 20903 - DNA, 15 bp, Homo sapiens
acaaggccagtaagt

SEQ ID NO: 20904 - DNA, 15 bp, Homo sapiens
caaggccagtaagtg

SEQ ID NO: 20905 - DNA, 15 bp, Homo sapiens
aaggccagtaagtgg

SEQ ID NO: 20906 - DNA, 15 bp, Homo sapiens
aggccagtaagtggc

SEQ ID NO: 20907 - DNA, 15 bp, Homo sapiens
ggccagtaagtggca

SEQ ID NO: 20908 - DNA, 15 bp, Homo sapiens
gccagtaagtggcag

SEQ ID NO: 20909 - DNA, 15 bp, Homo sapiens
ccagtaagtggcagc

SEQ ID NO: 20910 - DNA, 15 bp, Homo sapiens
cagtaagtggcagcg

SEQ ID NO: 20911 - DNA, 15 bp, Homo sapiens
agtaagtggcagcgc

SEQ ID NO: 20912 - DNA, 15 bp, Homo sapiens
gtaagtggcagcgcc

SEQ ID NO: 20913 - DNA, 15 bp, Homo sapiens
taagtggcagcgcca

SEQ ID NO: 20914 - DNA, 15 bp, Homo sapiens
aagtggcagcgccag

SEQ ID NO: 20915 - DNA, 15 bp, Homo sapiens
agtggcagcgccagg

SEQ ID NO: 20916 - DNA, 15 bp, Homo sapiens
gtggcagcgccagga

SEQ ID NO: 20917 - DNA, 15 bp, Homo sapiens
tggcagcgccaggat

SEQ ID NO: 20918 - DNA, 15 bp, Homo sapiens
ggcagcgccaggatt

SEQ ID NO: 20919 - DNA, 15 bp, Homo sapiens
gcagcgccaggattt

SEQ ID NO: 20920 - DNA, 15 bp, Homo sapiens
cagcgccaggatttg

SEQ ID NO: 20921 - DNA, 15 bp, Homo sapiens
agcgccaggatttga

SEQ ID NO: 20922 - DNA, 15 bp, Homo sapiens
gcgccaggatttgaa

SEQ ID NO: 20923 - DNA, 15 bp, Homo sapiens
cgccaggatttgaac

SEQ ID NO: 20924 - DNA, 15 bp, Homo sapiens
gccaggatttgaacc

SEQ ID NO: 20925 - DNA, 15 bp, Homo sapiens
ccaggatttgaaccc

SEQ ID NO: 20926 - DNA, 15 bp, Homo sapiens
caggatttgaaccca

SEQ ID NO: 20927 - DNA, 15 bp, Homo sapiens
aggatttgaacccag

SEQ ID NO: 20928 - DNA, 15 bp, Homo sapiens
ggatttgaacccagg

SEQ ID NO: 20929 - DNA, 15 bp, Homo sapiens
gatttgaacccaggc

SEQ ID NO: 20930 - DNA, 15 bp, Homo sapiens
atttgaacccaggca

SEQ ID NO: 20931 - DNA, 15 bp, Homo sapiens
tttgaacccaggcaa

SEQ ID NO: 20932 - DNA, 15 bp, Homo sapiens
ttgaacccaggcaat

SEQ ID NO: 20933 - DNA, 15 bp, Homo sapiens
tgaacccaggcaatc

SEQ ID NO: 20934 - DNA, 15 bp, Homo sapiens
gaacccaggcaatct

SEQ ID NO: 20935 - DNA, 15 bp, Homo sapiens
aacccaggcaatcta

SEQ ID NO: 20936 - DNA, 15 bp, Homo sapiens
acccaggcaatctat

SEQ ID NO: 20937 - DNA, 15 bp, Homo sapiens
cccaggcaatctatg

SEQ ID NO: 20938 - DNA, 15 bp, Homo sapiens
ccaggcaatctatgc

SEQ ID NO: 20939 - DNA, 15 bp, Homo sapiens
caggcaatctatgcc

SEQ ID NO: 20940 - DNA, 15 bp, Homo sapiens
aggcaatctatgcca

SEQ ID NO: 20941 - DNA, 15 bp, Homo sapiens
ggcaatctatgccag

SEQ ID NO: 20942 - DNA, 15 bp, Homo sapiens
gcaatctatgccaga

SEQ ID NO: 20943 - DNA, 15 bp, Homo sapiens
caatctatgccagaa

SEQ ID NO: 20944 - DNA, 15 bp, Homo sapiens
aatctatgccagaat

SEQ ID NO: 20945 - DNA, 15 bp, Homo sapiens
atctatgccagaatc

SEQ ID NO: 20946 - DNA, 15 bp, Homo sapiens
tctatgccagaatcc

SEQ ID NO: 20947 - DNA, 15 bp, Homo sapiens
ctatgccagaatcca

SEQ ID NO: 20948 - DNA, 15 bp, Homo sapiens
tatgccagaatccac

SEQ ID NO: 20949 - DNA, 15 bp, Homo sapiens
atgccagaatccaca

SEQ ID NO: 20950 - DNA, 15 bp, Homo sapiens
tgccagaatccacac

SEQ ID NO: 20951 - DNA, 15 bp, Homo sapiens
gccagaatccacact

SEQ ID NO: 20952 - DNA, 15 bp, Homo sapiens
ccagaatccacactc

SEQ ID NO: 20953 - DNA, 15 bp, Homo sapiens
cagaatccacactct

SEQ ID NO: 20954 - DNA, 15 bp, Homo sapiens
agaatccacactctt

SEQ ID NO: 20955 - DNA, 15 bp, Homo sapiens
gaatccacactctta

SEQ ID NO: 20956 - DNA, 15 bp, Homo sapiens
aatccacactcttaa

SEQ ID NO: 20957 - DNA, 15 bp, Homo sapiens
atccacactcttaat

SEQ ID NO: 20958 - DNA, 15 bp, Homo sapiens
tccacactcttaatg

SEQ ID NO: 20959 - DNA, 15 bp, Homo sapiens
ccacactcttaatgc

SEQ ID NO: 20960 - DNA, 15 bp, Homo sapiens
cacactcttaatgct

SEQ ID NO: 20961 - DNA, 15 bp, Homo sapiens
acactcttaatgctg

SEQ ID NO: 20962 - DNA, 15 bp, Homo sapiens
cactcttaatgctgt

SEQ ID NO: 20963 - DNA, 15 bp, Homo sapiens
actcttaatgctgta

SEQ ID NO: 20964 - DNA, 15 bp, Homo sapiens
ctcttaatgctgtaa

SEQ ID NO: 20965 - DNA, 15 bp, Homo sapiens
tcttaatgctgtaag

SEQ ID NO: 20966 - DNA, 15 bp, Homo sapiens
cttaatgctgtaaga

SEQ ID NO: 20967 - DNA, 15 bp, Homo sapiens
ttaatgctgtaagaa

SEQ ID NO: 20968 - DNA, 15 bp, Homo sapiens
taatgctgtaagaaa

SEQ ID NO: 20969 - DNA, 15 bp, Homo sapiens
aatgctgtaagaaaa

SEQ ID NO: 20970 - DNA, 15 bp, Homo sapiens
atgctgtaagaaaaa

SEQ ID NO: 20971 - DNA, 15 bp, Homo sapiens
tgctgtaagaaaaac

SEQ ID NO: 20972 - DNA, 15 bp, Homo sapiens
gctgtaagaaaaacc

SEQ ID NO: 20973 - DNA, 15 bp, Homo sapiens
ctgtaagaaaaacca

SEQ ID NO: 20974 - DNA, 15 bp, Homo sapiens
tgtaagaaaaaccat

SEQ ID NO: 20975 - DNA, 15 bp, Homo sapiens
gtaagaaaaaccatg

SEQ ID NO: 20976 - DNA, 15 bp, Homo sapiens
taagaaaaaccatgc

SEQ ID NO: 20977 - DNA, 15 bp, Homo sapiens
aagaaaaaccatgct

SEQ ID NO: 20978 - DNA, 15 bp, Homo sapiens
agaaaaaccatgctg

SEQ ID NO: 20979 - DNA, 15 bp, Homo sapiens
gaaaaaccatgctgc

SEQ ID NO: 20980 - DNA, 15 bp, Homo sapiens
aaaaaccatgctgcc

SEQ ID NO: 20981 - DNA, 15 bp, Homo sapiens
aaaaccatgctgcct

SEQ ID NO: 20982 - DNA, 15 bp, Homo sapiens
aaaccatgctgcctg

SEQ ID NO: 20983 - DNA, 15 bp, Homo sapiens
aaccatgctgcctgc

SEQ ID NO: 20984 - DNA, 15 bp, Homo sapiens
accatgctgcctgcc

SEQ ID NO: 20985 - DNA, 15 bp, Homo sapiens
ccatgctgcctgccc

SEQ ID NO: 20986 - DNA, 15 bp, Homo sapiens
catgctgcctgcccc

SEQ ID NO: 20987 - DNA, 15 bp, Homo sapiens
atgctgcctgccccc

SEQ ID NO: 20988 - DNA, 15 bp, Homo sapiens
tgctgcctgccccct

SEQ ID NO: 20989 - DNA, 15 bp, Homo sapiens
gctgcctgccccctt

SEQ ID NO: 20990 - DNA, 15 bp, Homo sapiens
ctgcctgcccccttt

SEQ ID NO: 20991 - DNA, 15 bp, Homo sapiens
tgcctgcccccttta

SEQ ID NO: 20992 - DNA, 15 bp, Homo sapiens
gcctgccccctttaa

SEQ ID NO: 20993 - DNA, 15 bp, Homo sapiens
cctgccccctttaaa

SEQ ID NO: 20994 - DNA, 15 bp, Homo sapiens
ctgccccctttaaat

SEQ ID NO: 20995 - DNA, 15 bp, Homo sapiens
tgccccctttaaatg

SEQ ID NO: 20996 - DNA, 15 bp, Homo sapiens
gccccctttaaatga

SEQ ID NO: 20997 - DNA, 15 bp, Homo sapiens
ccccctttaaatgaa

SEQ ID NO: 20998 - DNA, 15 bp, Homo sapiens
cccctttaaatgaag

SEQ ID NO: 20999 - DNA, 15 bp, Homo sapiens
ccctttaaatgaagt

SEQ ID NO: 21000 - DNA, 15 bp, Homo sapiens
cctttaaatgaagtc

SEQ ID NO: 21001 - DNA, 15 bp, Homo sapiens
ctttaaatgaagtct

SEQ ID NO: 21002 - DNA, 15 bp, Homo sapiens
tttaaatgaagtctc

SEQ ID NO: 21003 - DNA, 15 bp, Homo sapiens
ttaaatgaagtctca

SEQ ID NO: 21004 - DNA, 15 bp, Homo sapiens
taaatgaagtctcag

SEQ ID NO: 21005 - DNA, 15 bp, Homo sapiens
aaatgaagtctcaga

SEQ ID NO: 21006 - DNA, 15 bp, Homo sapiens
aatgaagtctcagat

SEQ ID NO: 21007 - DNA, 15 bp, Homo sapiens
atgaagtctcagatt

SEQ ID NO: 21008 - DNA, 15 bp, Homo sapiens
tgaagtctcagatta

SEQ ID NO: 21009 - DNA, 15 bp, Homo sapiens
gaagtctcagattat

SEQ ID NO: 21010 - DNA, 15 bp, Homo sapiens
aagtctcagattatg

SEQ ID NO: 21011 - DNA, 15 bp, Homo sapiens
agtctcagattatgg

SEQ ID NO: 21012 - DNA, 15 bp, Homo sapiens
gtctcagattatggt

SEQ ID NO: 21013 - DNA, 15 bp, Homo sapiens
tctcagattatggtg

SEQ ID NO: 21014 - DNA, 15 bp, Homo sapiens
ctcagattatggtgg

SEQ ID NO: 21015 - DNA, 15 bp, Homo sapiens
tcagattatggtggg

SEQ ID NO: 21016 - DNA, 15 bp, Homo sapiens
cagattatggtgggg

SEQ ID NO: 21017 - DNA, 15 bp, Homo sapiens
agattatggtggggc

SEQ ID NO: 21018 - DNA, 15 bp, Homo sapiens
gattatggtggggct

SEQ ID NO: 21019 - DNA, 15 bp, Homo sapiens
attatggtggggctc

SEQ ID NO: 21020 - DNA, 15 bp, Homo sapiens
ttatggtggggctca

SEQ ID NO: 21021 - DNA, 15 bp, Homo sapiens
tatggtggggctcac

SEQ ID NO: 21022 - DNA, 15 bp, Homo sapiens
atggtggggctcaca

SEQ ID NO: 21023 - DNA, 15 bp, Homo sapiens
tggtggggctcacag

SEQ ID NO: 21024 - DNA, 15 bp, Homo sapiens
ggtggggctcacagg

SEQ ID NO: 21025 - DNA, 15 bp, Homo sapiens
gtggggctcacaggt

SEQ ID NO: 21026 - DNA, 15 bp, Homo sapiens
tggggctcacaggtg

SEQ ID NO: 21027 - DNA, 15 bp, Homo sapiens
ggggctcacaggtgg

SEQ ID NO: 21028 - DNA, 15 bp, Homo sapiens
gggctcacaggtggg

SEQ ID NO: 21029 - DNA, 15 bp, Homo sapiens
ggctcacaggtgggt

SEQ ID NO: 21030 - DNA, 15 bp, Homo sapiens
gctcacaggtgggtg

SEQ ID NO: 21031 - DNA, 15 bp, Homo sapiens
ctcacaggtgggtga

SEQ ID NO: 21032 - DNA, 15 bp, Homo sapiens
tcacaggtgggtgag

SEQ ID NO: 21033 - DNA, 15 bp, Homo sapiens
cacaggtgggtgagt

SEQ ID NO: 21034 - DNA, 15 bp, Homo sapiens
acaggtgggtgagtg

SEQ ID NO: 21035 - DNA, 15 bp, Homo sapiens
caggtgggtgagtgg

SEQ ID NO: 21036 - DNA, 15 bp, Homo sapiens
aggtgggtgagtggg

SEQ ID NO: 21037 - DNA, 15 bp, Homo sapiens
ggtgggtgagtgggt

SEQ ID NO: 21038 - DNA, 15 bp, Homo sapiens
gtgggtgagtgggta

SEQ ID NO: 21039 - DNA, 15 bp, Homo sapiens
tgggtgagtgggtac

SEQ ID NO: 21040 - DNA, 15 bp, Homo sapiens
gggtgagtgggtacc

SEQ ID NO: 21041 - DNA, 15 bp, Homo sapiens
ggtgagtgggtacct

SEQ ID NO: 21042 - DNA, 15 bp, Homo sapiens
gtgagtgggtacctg

SEQ ID NO: 21043 - DNA, 15 bp, Homo sapiens
tgagtgggtacctgc

SEQ ID NO: 21044 - DNA, 15 bp, Homo sapiens
gagtgggtacctgcc

SEQ ID NO: 21045 - DNA, 15 bp, Homo sapiens
agtgggtacctgcct

SEQ ID NO: 21046 - DNA, 15 bp, Homo sapiens
gtgggtacctgcctg

SEQ ID NO: 21047 - DNA, 15 bp, Homo sapiens
tgggtacctgcctgc

SEQ ID NO: 21048 - DNA, 15 bp, Homo sapiens
gggtacctgcctgcc

SEQ ID NO: 21049 - DNA, 15 bp, Homo sapiens
ggtacctgcctgcct

SEQ ID NO: 21050 - DNA, 15 bp, Homo sapiens
gtacctgcctgcctg

SEQ ID NO: 21051 - DNA, 15 bp, Homo sapiens
tacctgcctgcctgc

SEQ ID NO: 21052 - DNA, 15 bp, Homo sapiens
acctgcctgcctgct

SEQ ID NO: 21053 - DNA, 15 bp, Homo sapiens
cctgcctgcctgctc

SEQ ID NO: 21054 - DNA, 15 bp, Homo sapiens
ctgcctgcctgctca

SEQ ID NO: 21055 - DNA, 15 bp, Homo sapiens
tgcctgcctgctcag

SEQ ID NO: 21056 - DNA, 15 bp, Homo sapiens
gcctgcctgctcagt

SEQ ID NO: 21057 - DNA, 15 bp, Homo sapiens
cctgcctgctcagtt

SEQ ID NO: 21058 - DNA, 15 bp, Homo sapiens
ctgcctgctcagtta

SEQ ID NO: 21059 - DNA, 15 bp, Homo sapiens
tgcctgctcagttac

SEQ ID NO: 21060 - DNA, 15 bp, Homo sapiens
gcctgctcagttacc

SEQ ID NO: 21061 - DNA, 15 bp, Homo sapiens
cctgctcagttaccc

SEQ ID NO: 21062 - DNA, 15 bp, Homo sapiens
ctgctcagttaccca

SEQ ID NO: 21063 - DNA, 15 bp, Homo sapiens
tgctcagttacccag

SEQ ID NO: 21064 - DNA, 15 bp, Homo sapiens
gctcagttacccagg

SEQ ID NO: 21065 - DNA, 15 bp, Homo sapiens
ctcagttacccaggc

SEQ ID NO: 21066 - DNA, 15 bp, Homo sapiens
tcagttacccaggca

SEQ ID NO: 21067 - DNA, 15 bp, Homo sapiens
cagttacccaggcac

SEQ ID NO: 21068 - DNA, 15 bp, Homo sapiens
agttacccaggcaca

SEQ ID NO: 21069 - DNA, 15 bp, Homo sapiens
gttacccaggcacat

SEQ ID NO: 21070 - DNA, 15 bp, Homo sapiens
ttacccaggcacatc

SEQ ID NO: 21071 - DNA, 15 bp, Homo sapiens
tacccaggcacatct

SEQ ID NO: 21072 - DNA, 15 bp, Homo sapiens
acccaggcacatctg

SEQ ID NO: 21073 - DNA, 15 bp, Homo sapiens
cccaggcacatctgc

SEQ ID NO: 21074 - DNA, 15 bp, Homo sapiens
ccaggcacatctgcc

SEQ ID NO: 21075 - DNA, 15 bp, Homo sapiens
caggcacatctgccc

SEQ ID NO: 21076 - DNA, 15 bp, Homo sapiens
aggcacatctgccca

SEQ ID NO: 21077 - DNA, 15 bp, Homo sapiens
ggcacatctgcccac

SEQ ID NO: 21078 - DNA, 15 bp, Homo sapiens
gcacatctgcccacc

SEQ ID NO: 21079 - DNA, 15 bp, Homo sapiens
cacatctgcccacca

SEQ ID NO: 21080 - DNA, 15 bp, Homo sapiens
acatctgcccaccag

SEQ ID NO: 21081 - DNA, 15 bp, Homo sapiens
catctgcccaccaga

SEQ ID NO: 21082 - DNA, 15 bp, Homo sapiens
atctgcccaccagac

SEQ ID NO: 21083 - DNA, 15 bp, Homo sapiens
tctgcccaccagacc

SEQ ID NO: 21084 - DNA, 15 bp, Homo sapiens
ctgcccaccagaccg

SEQ ID NO: 21085 - DNA, 15 bp, Homo sapiens
tgcccaccagaccgg

SEQ ID NO: 21086 - DNA, 15 bp, Homo sapiens
gcccaccagaccgga

SEQ ID NO: 21087 - DNA, 15 bp, Homo sapiens
cccaccagaccggag

SEQ ID NO: 21088 - DNA, 15 bp, Homo sapiens
ccaccagaccggagc

SEQ ID NO: 21089 - DNA, 15 bp, Homo sapiens
caccagaccggagct

SEQ ID NO: 21090 - DNA, 15 bp, Homo sapiens
accagaccggagcta

SEQ ID NO: 21091 - DNA, 15 bp, Homo sapiens
ccagaccggagctag

SEQ ID NO: 21092 - DNA, 15 bp, Homo sapiens
cagaccggagctaga

SEQ ID NO: 21093 - DNA, 15 bp, Homo sapiens
agaccggagctagac

SEQ ID NO: 21094 - DNA, 15 bp, Homo sapiens
gaccggagctagacc

SEQ ID NO: 21095 - DNA, 15 bp, Homo sapiens
accggagctagacct

SEQ ID NO: 21096 - DNA, 15 bp, Homo sapiens
ccggagctagacctt

SEQ ID NO: 21097 - DNA, 15 bp, Homo sapiens
cggagctagaccttt

SEQ ID NO: 21098 - DNA, 15 bp, Homo sapiens
ggagctagacctttc

SEQ ID NO: 21099 - DNA, 15 bp, Homo sapiens
gagctagacctttct

SEQ ID NO: 21100 - DNA, 15 bp, Homo sapiens
agctagacctttctg

SEQ ID NO: 21101 - DNA, 15 bp, Homo sapiens
gctagacctttctga

SEQ ID NO: 21102 - DNA, 15 bp, Homo sapiens
ctagacctttctgaa

SEQ ID NO: 21103 - DNA, 15 bp, Homo sapiens
tagacctttctgaac

SEQ ID NO: 21104 - DNA, 15 bp, Homo sapiens
agacctttctgaacc

SEQ ID NO: 21105 - DNA, 15 bp, Homo sapiens
gacctttctgaacca

SEQ ID NO: 21106 - DNA, 15 bp, Homo sapiens
acctttctgaaccac

SEQ ID NO: 21107 - DNA, 15 bp, Homo sapiens
cctttctgaaccact

SEQ ID NO: 21108 - DNA, 15 bp, Homo sapiens
ctttctgaaccactc

SEQ ID NO: 21109 - DNA, 15 bp, Homo sapiens
tttctgaaccactca

SEQ ID NO: 21110 - DNA, 15 bp, Homo sapiens
ttctgaaccactcac

SEQ ID NO: 21111 - DNA, 15 bp, Homo sapiens
tctgaaccactcaca

SEQ ID NO: 21112 - DNA, 15 bp, Homo sapiens
ctgaaccactcacag

SEQ ID NO: 21113 - DNA, 15 bp, Homo sapiens
tgaaccactcacagc

SEQ ID NO: 21114 - DNA, 15 bp, Homo sapiens
gaaccactcacagcc

SEQ ID NO: 21115 - DNA, 15 bp, Homo sapiens
aaccactcacagcct

SEQ ID NO: 21116 - DNA, 15 bp, Homo sapiens
accactcacagccta

SEQ ID NO: 21117 - DNA, 15 bp, Homo sapiens
ccactcacagcctaa

SEQ ID NO: 21118 - DNA, 15 bp, Homo sapiens
cactcacagcctaag

SEQ ID NO: 21119 - DNA, 15 bp, Homo sapiens
actcacagcctaagg

SEQ ID NO: 21120 - DNA, 15 bp, Homo sapiens
ctcacagcctaaggc

SEQ ID NO: 21121 - DNA, 15 bp, Homo sapiens
tcacagcctaaggcc

SEQ ID NO: 21122 - DNA, 15 bp, Homo sapiens
cacagcctaaggcct

SEQ ID NO: 21123 - DNA, 15 bp, Homo sapiens
acagcctaaggcctt

SEQ ID NO: 21124 - DNA, 15 bp, Homo sapiens
cagcctaaggcctta

SEQ ID NO: 21125 - DNA, 15 bp, Homo sapiens
agcctaaggccttac

SEQ ID NO: 21126 - DNA, 15 bp, Homo sapiens
gcctaaggccttacc

SEQ ID NO: 21127 - DNA, 15 bp, Homo sapiens
cctaaggccttacca

SEQ ID NO: 21128 - DNA, 15 bp, Homo sapiens
ctaaggccttaccag

SEQ ID NO: 21129 - DNA, 15 bp, Homo sapiens
taaggccttaccaga

SEQ ID NO: 21130 - DNA, 15 bp, Homo sapiens
aaggccttaccagaa

SEQ ID NO: 21131 - DNA, 15 bp, Homo sapiens
aggccttaccagaac

SEQ ID NO: 21132 - DNA, 15 bp, Homo sapiens
ggccttaccagaacc

SEQ ID NO: 21133 - DNA, 15 bp, Homo sapiens
gccttaccagaacca

SEQ ID NO: 21134 - DNA, 15 bp, Homo sapiens
ccttaccagaaccag

SEQ ID NO: 21135 - DNA, 15 bp, Homo sapiens
cttaccagaaccagc

SEQ ID NO: 21136 - DNA, 15 bp, Homo sapiens
ttaccagaaccagca

SEQ ID NO: 21137 - DNA, 15 bp, Homo sapiens
taccagaaccagcag

SEQ ID NO: 21138 - DNA, 15 bp, Homo sapiens
accagaaccagcaga

SEQ ID NO: 21139 - DNA, 15 bp, Homo sapiens
ccagaaccagcagaa

SEQ ID NO: 21140 - DNA, 15 bp, Homo sapiens
cagaaccagcagaac

SEQ ID NO: 21141 - DNA, 15 bp, Homo sapiens
agaaccagcagaacc

SEQ ID NO: 21142 - DNA, 15 bp, Homo sapiens
gaaccagcagaaccc

SEQ ID NO: 21143 - DNA, 15 bp, Homo sapiens
aaccagcagaaccca

SEQ ID NO: 21144 - DNA, 15 bp, Homo sapiens
accagcagaacccac

SEQ ID NO: 21145 - DNA, 15 bp, Homo sapiens
ccagcagaacccaca

SEQ ID NO: 21146 - DNA, 15 bp, Homo sapiens
cagcagaacccacaa

SEQ ID NO: 21147 - DNA, 15 bp, Homo sapiens
agcagaacccacaaa

SEQ ID NO: 21148 - DNA, 15 bp, Homo sapiens
gcagaacccacaaat

SEQ ID NO: 21149 - DNA, 15 bp, Homo sapiens
cagaacccacaaatg

SEQ ID NO: 21150 - DNA, 15 bp, Homo sapiens
agaacccacaaatgt

SEQ ID NO: 21151 - DNA, 15 bp, Homo sapiens
gaacccacaaatgtc

SEQ ID NO: 21152 - DNA, 15 bp, Homo sapiens
aacccacaaatgtct

SEQ ID NO: 21153 - DNA, 15 bp, Homo sapiens
acccacaaatgtctt

SEQ ID NO: 21154 - DNA, 15 bp, Homo sapiens
cccacaaatgtctta

SEQ ID NO: 21155 - DNA, 15 bp, Homo sapiens
ccacaaatgtcttac

SEQ ID NO: 21156 - DNA, 15 bp, Homo sapiens
cacaaatgtcttact

SEQ ID NO: 21157 - DNA, 15 bp, Homo sapiens
acaaatgtcttactg

SEQ ID NO: 21158 - DNA, 15 bp, Homo sapiens
caaatgtcttactgc

SEQ ID NO: 21159 - DNA, 15 bp, Homo sapiens
aaatgtcttactgca

SEQ ID NO: 21160 - DNA, 15 bp, Homo sapiens
aatgtcttactgcag

SEQ ID NO: 21161 - DNA, 15 bp, Homo sapiens
atgtcttactgcagc

SEQ ID NO: 21162 - DNA, 15 bp, Homo sapiens
tgtcttactgcagcc

SEQ ID NO: 21163 - DNA, 15 bp, Homo sapiens
gtcttactgcagcca

SEQ ID NO: 21164 - DNA, 15 bp, Homo sapiens
tcttactgcagccag

SEQ ID NO: 21165 - DNA, 15 bp, Homo sapiens
cttactgcagccagg

SEQ ID NO: 21166 - DNA, 15 bp, Homo sapiens
ttactgcagccaggg

SEQ ID NO: 21167 - DNA, 15 bp, Homo sapiens
tactgcagccagggg

SEQ ID NO: 21168 - DNA, 15 bp, Homo sapiens
actgcagccaggggc

SEQ ID NO: 21169 - DNA, 15 bp, Homo sapiens
ctgcagccaggggct

SEQ ID NO: 21170 - DNA, 15 bp, Homo sapiens
tgcagccaggggctt

SEQ ID NO: 21171 - DNA, 15 bp, Homo sapiens
gcagccaggggcttc

SEQ ID NO: 21172 - DNA, 15 bp, Homo sapiens
cagccaggggcttct

SEQ ID NO: 21173 - DNA, 15 bp, Homo sapiens
agccaggggcttctg

SEQ ID NO: 21174 - DNA, 15 bp, Homo sapiens
gccaggggcttctga

SEQ ID NO: 21175 - DNA, 15 bp, Homo sapiens
ccaggggcttctgac

SEQ ID NO: 21176 - DNA, 15 bp, Homo sapiens
caggggcttctgacc

SEQ ID NO: 21177 - DNA, 15 bp, Homo sapiens
aggggcttctgacca

SEQ ID NO: 21178 - DNA, 15 bp, Homo sapiens
ggggcttctgaccaa

SEQ ID NO: 21179 - DNA, 15 bp, Homo sapiens
gggcttctgaccaag

SEQ ID NO: 21180 - DNA, 15 bp, Homo sapiens
ggcttctgaccaagc

SEQ ID NO: 21181 - DNA, 15 bp, Homo sapiens
gcttctgaccaagcg

SEQ ID NO: 21182 - DNA, 15 bp, Homo sapiens
cttctgaccaagcgt

SEQ ID NO: 21183 - DNA, 15 bp, Homo sapiens
ttctgaccaagcgta

SEQ ID NO: 21184 - DNA, 15 bp, Homo sapiens
tctgaccaagcgtat

SEQ ID NO: 21185 - DNA, 15 bp, Homo sapiens
ctgaccaagcgtata

SEQ ID NO: 21186 - DNA, 15 bp, Homo sapiens
tgaccaagcgtatac

SEQ ID NO: 21187 - DNA, 15 bp, Homo sapiens
gaccaagcgtataca

SEQ ID NO: 21188 - DNA, 15 bp, Homo sapiens
accaagcgtatacat

SEQ ID NO: 21189 - DNA, 15 bp, Homo sapiens
ccaagcgtatacata

SEQ ID NO: 21190 - DNA, 15 bp, Homo sapiens
caagcgtatacatac

SEQ ID NO: 21191 - DNA, 15 bp, Homo sapiens
aagcgtatacataca

SEQ ID NO: 21192 - DNA, 15 bp, Homo sapiens
agcgtatacatacaa

SEQ ID NO: 21193 - DNA, 15 bp, Homo sapiens
gcgtatacatacaag

SEQ ID NO: 21194 - DNA, 15 bp, Homo sapiens
cgtatacatacaagg

SEQ ID NO: 21195 - DNA, 15 bp, Homo sapiens
gtatacatacaaggt

SEQ ID NO: 21196 - DNA, 15 bp, Homo sapiens
tatacatacaaggtc

SEQ ID NO: 21197 - DNA, 15 bp, Homo sapiens
atacatacaaggtcc

SEQ ID NO: 21198 - DNA, 15 bp, Homo sapiens
tacatacaaggtcca

SEQ ID NO: 21199 - DNA, 15 bp, Homo sapiens
acatacaaggtccaa

SEQ ID NO: 21200 - DNA, 15 bp, Homo sapiens
catacaaggtccaaa

SEQ ID NO: 21201 - DNA, 15 bp, Homo sapiens
atacaaggtccaaaa

SEQ ID NO: 21202 - DNA, 15 bp, Homo sapiens
tacaaggtccaaaaa

SEQ ID NO: 21203 - DNA, 15 bp, Homo sapiens
acaaggtccaaaaag

SEQ ID NO: 21204 - DNA, 15 bp, Homo sapiens
caaggtccaaaaagc

SEQ ID NO: 21205 - DNA, 15 bp, Homo sapiens
aaggtccaaaaagca

SEQ ID NO: 21206 - DNA, 15 bp, Homo sapiens
aggtccaaaaagcat

SEQ ID NO: 21207 - DNA, 15 bp, Homo sapiens
ggtccaaaaagcatt

SEQ ID NO: 21208 - DNA, 15 bp, Homo sapiens
gtccaaaaagcattt

SEQ ID NO: 21209 - DNA, 15 bp, Homo sapiens
tccaaaaagcatttt

SEQ ID NO: 21210 - DNA, 15 bp, Homo sapiens
ccaaaaagcattttc

SEQ ID NO: 21211 - DNA, 15 bp, Homo sapiens
caaaaagcattttcc

SEQ ID NO: 21212 - DNA, 15 bp, Homo sapiens
aaaaagcattttccc

SEQ ID NO: 21213 - DNA, 15 bp, Homo sapiens
aaaagcattttccca

SEQ ID NO: 21214 - DNA, 15 bp, Homo sapiens
aaagcattttcccat

SEQ ID NO: 21215 - DNA, 15 bp, Homo sapiens
aagcattttcccatt

SEQ ID NO: 21216 - DNA, 15 bp, Homo sapiens
agcattttcccattt

SEQ ID NO: 21217 - DNA, 15 bp, Homo sapiens
gcattttcccatttc

SEQ ID NO: 21218 - DNA, 15 bp, Homo sapiens
cattttcccatttcc

SEQ ID NO: 21219 - DNA, 15 bp, Homo sapiens
attttcccatttcca

SEQ ID NO: 21220 - DNA, 15 bp, Homo sapiens
ttttcccatttccat

SEQ ID NO: 21221 - DNA, 15 bp, Homo sapiens
tttcccatttccatt

SEQ ID NO: 21222 - DNA, 15 bp, Homo sapiens
ttcccatttccattc

SEQ ID NO: 21223 - DNA, 15 bp, Homo sapiens
tcccatttccattcc

SEQ ID NO: 21224 - DNA, 15 bp, Homo sapiens
cccatttccattccc

SEQ ID NO: 21225 - DNA, 15 bp, Homo sapiens
ccatttccattccca

SEQ ID NO: 21226 - DNA, 15 bp, Homo sapiens
catttccattcccag

SEQ ID NO: 21227 - DNA, 15 bp, Homo sapiens
atttccattcccagt

SEQ ID NO: 21228 - DNA, 15 bp, Homo sapiens
tttccattcccagtc

SEQ ID NO: 21229 - DNA, 15 bp, Homo sapiens
ttccattcccagtcc

SEQ ID NO: 21230 - DNA, 15 bp, Homo sapiens
tccattcccagtcct

SEQ ID NO: 21231 - DNA, 15 bp, Homo sapiens
ccattcccagtcctc

SEQ ID NO: 21232 - DNA, 15 bp, Homo sapiens
cattcccagtcctcc

SEQ ID NO: 21233 - DNA, 15 bp, Homo sapiens
attcccagtcctccc

SEQ ID NO: 21234 - DNA, 15 bp, Homo sapiens
ttcccagtcctccca

SEQ ID NO: 21235 - DNA, 15 bp, Homo sapiens
tcccagtcctcccag

SEQ ID NO: 21236 - DNA, 15 bp, Homo sapiens
cccagtcctcccagg

SEQ ID NO: 21237 - DNA, 15 bp, Homo sapiens
ccagtcctcccagga

SEQ ID NO: 21238 - DNA, 15 bp, Homo sapiens
cagtcctcccaggaa

SEQ ID NO: 21239 - DNA, 15 bp, Homo sapiens
agtcctcccaggaac

SEQ ID NO: 21240 - DNA, 15 bp, Homo sapiens
gtcctcccaggaaca

SEQ ID NO: 21241 - DNA, 15 bp, Homo sapiens
tcctcccaggaacag

SEQ ID NO: 21242 - DNA, 15 bp, Homo sapiens
cctcccaggaacagg

SEQ ID NO: 21243 - DNA, 15 bp, Homo sapiens
ctcccaggaacaggg

SEQ ID NO: 21244 - DNA, 15 bp, Homo sapiens
tcccaggaacaggga

SEQ ID NO: 21245 - DNA, 15 bp, Homo sapiens
cccaggaacagggaa

SEQ ID NO: 21246 - DNA, 15 bp, Homo sapiens
ccaggaacagggaaa

SEQ ID NO: 21247 - DNA, 15 bp, Homo sapiens
caggaacagggaaat

SEQ ID NO: 21248 - DNA, 15 bp, Homo sapiens
aggaacagggaaatg

SEQ ID NO: 21249 - DNA, 15 bp, Homo sapiens
ggaacagggaaatgt

SEQ ID NO: 21250 - DNA, 15 bp, Homo sapiens
gaacagggaaatgta

SEQ ID NO: 21251 - DNA, 15 bp, Homo sapiens
aacagggaaatgtat

SEQ ID NO: 21252 - DNA, 15 bp, Homo sapiens
acagggaaatgtata

SEQ ID NO: 21253 - DNA, 15 bp, Homo sapiens
cagggaaatgtatac

SEQ ID NO: 21254 - DNA, 15 bp, Homo sapiens
agggaaatgtataca

SEQ ID NO: 21255 - DNA, 15 bp, Homo sapiens
gggaaatgtatacat

SEQ ID NO: 21256 - DNA, 15 bp, Homo sapiens
ggaaatgtatacatt

SEQ ID NO: 21257 - DNA, 15 bp, Homo sapiens
gaaatgtatacattt

SEQ ID NO: 21258 - DNA, 15 bp, Homo sapiens
aaatgtatacatttt

SEQ ID NO: 21259 - DNA, 15 bp, Homo sapiens
aatgtatacatttta

SEQ ID NO: 21260 - DNA, 15 bp, Homo sapiens
atgtatacattttag

SEQ ID NO: 21261 - DNA, 15 bp, Homo sapiens
tgtatacattttagg

SEQ ID NO: 21262 - DNA, 15 bp, Homo sapiens
gtatacattttaggg

SEQ ID NO: 21263 - DNA, 15 bp, Homo sapiens
tatacattttaggga

SEQ ID NO: 21264 - DNA, 15 bp, Homo sapiens
atacattttagggag

SEQ ID NO: 21265 - DNA, 15 bp, Homo sapiens
tacattttagggaga

SEQ ID NO: 21266 - DNA, 15 bp, Homo sapiens
acattttagggagaa

SEQ ID NO: 21267 - DNA, 15 bp, Homo sapiens
cattttagggagaat

SEQ ID NO: 21268 - DNA, 15 bp, Homo sapiens
attttagggagaatc

SEQ ID NO: 21269 - DNA, 15 bp, Homo sapiens
ttttagggagaatct

SEQ ID NO: 21270 - DNA, 15 bp, Homo sapiens
tttagggagaatcta

SEQ ID NO: 21271 - DNA, 15 bp, Homo sapiens
ttagggagaatctag

SEQ ID NO: 21272 - DNA, 15 bp, Homo sapiens
tagggagaatctagt

SEQ ID NO: 21273 - DNA, 15 bp, Homo sapiens
agggagaatctagtg

SEQ ID NO: 21274 - DNA, 15 bp, Homo sapiens
gggagaatctagtga

SEQ ID NO: 21275 - DNA, 15 bp, Homo sapiens
ggagaatctagtgat

SEQ ID NO: 21276 - DNA, 15 bp, Homo sapiens
gagaatctagtgatc

SEQ ID NO: 21277 - DNA, 15 bp, Homo sapiens
agaatctagtgatcc

SEQ ID NO: 21278 - DNA, 15 bp, Homo sapiens
gaatctagtgatcct

SEQ ID NO: 21279 - DNA, 15 bp, Homo sapiens
aatctagtgatcctg

SEQ ID NO: 21280 - DNA, 15 bp, Homo sapiens
atctagtgatcctgg

SEQ ID NO: 21281 - DNA, 15 bp, Homo sapiens
tctagtgatcctggg

SEQ ID NO: 21282 - DNA, 15 bp, Homo sapiens
ctagtgatcctgggc

SEQ ID NO: 21283 - DNA, 15 bp, Homo sapiens
tagtgatcctgggcc

SEQ ID NO: 21284 - DNA, 15 bp, Homo sapiens
agtgatcctgggcca

SEQ ID NO: 21285 - DNA, 15 bp, Homo sapiens
gtgatcctgggccag

SEQ ID NO: 21286 - DNA, 15 bp, Homo sapiens
tgatcctgggccaga

SEQ ID NO: 21287 - DNA, 15 bp, Homo sapiens
gatcctgggccagac

SEQ ID NO: 21288 - DNA, 15 bp, Homo sapiens
atcctgggccagact

SEQ ID NO: 21289 - DNA, 15 bp, Homo sapiens
tcctgggccagactt

SEQ ID NO: 21290 - DNA, 15 bp, Homo sapiens
cctgggccagactta

SEQ ID NO: 21291 - DNA, 15 bp, Homo sapiens
ctgggccagacttag

SEQ ID NO: 21292 - DNA, 15 bp, Homo sapiens
tgggccagacttagg

SEQ ID NO: 21293 - DNA, 15 bp, Homo sapiens
gggccagacttaggt

SEQ ID NO: 21294 - DNA, 15 bp, Homo sapiens
ggccagacttaggtg

SEQ ID NO: 21295 - DNA, 15 bp, Homo sapiens
gccagacttaggtga

SEQ ID NO: 21296 - DNA, 15 bp, Homo sapiens
ccagacttaggtgac

SEQ ID NO: 21297 - DNA, 15 bp, Homo sapiens
cagacttaggtgacc

SEQ ID NO: 21298 - DNA, 15 bp, Homo sapiens
agacttaggtgaccg

SEQ ID NO: 21299 - DNA, 15 bp, Homo sapiens
gacttaggtgaccgc

SEQ ID NO: 21300 - DNA, 15 bp, Homo sapiens
acttaggtgaccgca

SEQ ID NO: 21301 - DNA, 15 bp, Homo sapiens
cttaggtgaccgcaa

SEQ ID NO: 21302 - DNA, 15 bp, Homo sapiens
ttaggtgaccgcaaa

SEQ ID NO: 21303 - DNA, 15 bp, Homo sapiens
taggtgaccgcaaaa

SEQ ID NO: 21304 - DNA, 15 bp, Homo sapiens
aggtgaccgcaaaaa

SEQ ID NO: 21305 - DNA, 15 bp, Homo sapiens
ggtgaccgcaaaaag

SEQ ID NO: 21306 - DNA, 15 bp, Homo sapiens
gtgaccgcaaaaaga

SEQ ID NO: 21307 - DNA, 15 bp, Homo sapiens
tgaccgcaaaaagaa

SEQ ID NO: 21308 - DNA, 15 bp, Homo sapiens
gaccgcaaaaagaat

SEQ ID NO: 21309 - DNA, 15 bp, Homo sapiens
accgcaaaaagaatc

SEQ ID NO: 21310 - DNA, 15 bp, Homo sapiens
ccgcaaaaagaatca

SEQ ID NO: 21311 - DNA, 15 bp, Homo sapiens
cgcaaaaagaatcag

SEQ ID NO: 21312 - DNA, 15 bp, Homo sapiens
gcaaaaagaatcagg

SEQ ID NO: 21313 - DNA, 15 bp, Homo sapiens
caaaaagaatcagga

SEQ ID NO: 21314 - DNA, 15 bp, Homo sapiens
aaaaagaatcaggac

SEQ ID NO: 21315 - DNA, 15 bp, Homo sapiens
aaaagaatcaggact

SEQ ID NO: 21316 - DNA, 15 bp, Homo sapiens
aaagaatcaggacta

SEQ ID NO: 21317 - DNA, 15 bp, Homo sapiens
aagaatcaggactag

SEQ ID NO: 21318 - DNA, 15 bp, Homo sapiens
agaatcaggactagc

SEQ ID NO: 21319 - DNA, 15 bp, Homo sapiens
gaatcaggactagct

SEQ ID NO: 21320 - DNA, 15 bp, Homo sapiens
aatcaggactagctg

SEQ ID NO: 21321 - DNA, 15 bp, Homo sapiens
atcaggactagctgc

SEQ ID NO: 21322 - DNA, 15 bp, Homo sapiens
tcaggactagctgct

SEQ ID NO: 21323 - DNA, 15 bp, Homo sapiens
caggactagctgctg

SEQ ID NO: 21324 - DNA, 15 bp, Homo sapiens
aggactagctgctgc

SEQ ID NO: 21325 - DNA, 15 bp, Homo sapiens
ggactagctgctgcc

SEQ ID NO: 21326 - DNA, 15 bp, Homo sapiens
gactagctgctgccc

SEQ ID NO: 21327 - DNA, 15 bp, Homo sapiens
actagctgctgccct

SEQ ID NO: 21328 - DNA, 15 bp, Homo sapiens
ctagctgctgccctt

SEQ ID NO: 21329 - DNA, 15 bp, Homo sapiens
tagctgctgccctta

SEQ ID NO: 21330 - DNA, 15 bp, Homo sapiens
agctgctgcccttaa

SEQ ID NO: 21331 - DNA, 15 bp, Homo sapiens
gctgctgcccttaaa

SEQ ID NO: 21332 - DNA, 15 bp, Homo sapiens
ctgctgcccttaaag

SEQ ID NO: 21333 - DNA, 15 bp, Homo sapiens
tgctgcccttaaaga

SEQ ID NO: 21334 - DNA, 15 bp, Homo sapiens
gctgcccttaaagaa

SEQ ID NO: 21335 - DNA, 15 bp, Homo sapiens
ctgcccttaaagaac

SEQ ID NO: 21336 - DNA, 15 bp, Homo sapiens
tgcccttaaagaact

SEQ ID NO: 21337 - DNA, 15 bp, Homo sapiens
gcccttaaagaactc

SEQ ID NO: 21338 - DNA, 15 bp, Homo sapiens
cccttaaagaactca

SEQ ID NO: 21339 - DNA, 15 bp, Homo sapiens
ccttaaagaactcat

SEQ ID NO: 21340 - DNA, 15 bp, Homo sapiens
cttaaagaactcata

SEQ ID NO: 21341 - DNA, 15 bp, Homo sapiens
ttaaagaactcatag

SEQ ID NO: 21342 - DNA, 15 bp, Homo sapiens
taaagaactcatagc

SEQ ID NO: 21343 - DNA, 15 bp, Homo sapiens
aaagaactcatagct

SEQ ID NO: 21344 - DNA, 15 bp, Homo sapiens
aagaactcatagctt

SEQ ID NO: 21345 - DNA, 15 bp, Homo sapiens
agaactcatagcttg

SEQ ID NO: 21346 - DNA, 15 bp, Homo sapiens
gaactcatagcttga

SEQ ID NO: 21347 - DNA, 15 bp, Homo sapiens
aactcatagcttgat

SEQ ID NO: 21348 - DNA, 15 bp, Homo sapiens
actcatagcttgata

SEQ ID NO: 21349 - DNA, 15 bp, Homo sapiens
ctcatagcttgatag

SEQ ID NO: 21350 - DNA, 15 bp, Homo sapiens
tcatagcttgataga

SEQ ID NO: 21351 - DNA, 15 bp, Homo sapiens
catagcttgatagag

SEQ ID NO: 21352 - DNA, 15 bp, Homo sapiens
atagcttgatagagg

SEQ ID NO: 21353 - DNA, 15 bp, Homo sapiens
tagcttgatagagga

SEQ ID NO: 21354 - DNA, 15 bp, Homo sapiens
agcttgatagaggaa

SEQ ID NO: 21355 - DNA, 15 bp, Homo sapiens
gcttgatagaggaaa

SEQ ID NO: 21356 - DNA, 15 bp, Homo sapiens
cttgatagaggaaac

SEQ ID NO: 21357 - DNA, 15 bp, Homo sapiens
ttgatagaggaaacc

SEQ ID NO: 21358 - DNA, 15 bp, Homo sapiens
tgatagaggaaacct

SEQ ID NO: 21359 - DNA, 15 bp, Homo sapiens
gatagaggaaaccta

SEQ ID NO: 21360 - DNA, 15 bp, Homo sapiens
atagaggaaacctag

SEQ ID NO: 21361 - DNA, 15 bp, Homo sapiens
tagaggaaacctagg

SEQ ID NO: 21362 - DNA, 15 bp, Homo sapiens
agaggaaacctaggg

SEQ ID NO: 21363 - DNA, 15 bp, Homo sapiens
gaggaaacctaggga

SEQ ID NO: 21364 - DNA, 15 bp, Homo sapiens
aggaaacctagggaa

SEQ ID NO: 21365 - DNA, 15 bp, Homo sapiens
ggaaacctagggaaa

SEQ ID NO: 21366 - DNA, 15 bp, Homo sapiens
gaaacctagggaaat

SEQ ID NO: 21367 - DNA, 15 bp, Homo sapiens
aaacctagggaaatc

SEQ ID NO: 21368 - DNA, 15 bp, Homo sapiens
aacctagggaaatct

SEQ ID NO: 21369 - DNA, 15 bp, Homo sapiens
acctagggaaatctt

SEQ ID NO: 21370 - DNA, 15 bp, Homo sapiens
cctagggaaatcttc

SEQ ID NO: 21371 - DNA, 15 bp, Homo sapiens
ctagggaaatcttct

SEQ ID NO: 21372 - DNA, 15 bp, Homo sapiens
tagggaaatcttctg

SEQ ID NO: 21373 - DNA, 15 bp, Homo sapiens
agggaaatcttctgg

SEQ ID NO: 21374 - DNA, 15 bp, Homo sapiens
gggaaatcttctggg

SEQ ID NO: 21375 - DNA, 15 bp, Homo sapiens
ggaaatcttctgggg

SEQ ID NO: 21376 - DNA, 15 bp, Homo sapiens
gaaatcttctggggc

SEQ ID NO: 21377 - DNA, 15 bp, Homo sapiens
aaatcttctggggcc

SEQ ID NO: 21378 - DNA, 15 bp, Homo sapiens
aatcttctggggccc

SEQ ID NO: 21379 - DNA, 15 bp, Homo sapiens
atcttctggggcccc

SEQ ID NO: 21380 - DNA, 15 bp, Homo sapiens
tcttctggggccccc

SEQ ID NO: 21381 - DNA, 15 bp, Homo sapiens
cttctggggccccct

SEQ ID NO: 21382 - DNA, 15 bp, Homo sapiens
ttctggggccccctg

SEQ ID NO: 21383 - DNA, 15 bp, Homo sapiens
tctggggccccctgg

SEQ ID NO: 21384 - DNA, 15 bp, Homo sapiens
ctggggccccctggg

SEQ ID NO: 21385 - DNA, 15 bp, Homo sapiens
tggggccccctgggg

SEQ ID NO: 21386 - DNA, 15 bp, Homo sapiens
ggggccccctggggt

SEQ ID NO: 21387 - DNA, 15 bp, Homo sapiens
gggccccctggggta

SEQ ID NO: 21388 - DNA, 15 bp, Homo sapiens
ggccccctggggtat

SEQ ID NO: 21389 - DNA, 15 bp, Homo sapiens
gccccctggggtata

SEQ ID NO: 21390 - DNA, 15 bp, Homo sapiens
ccccctggggtataa

SEQ ID NO: 21391 - DNA, 15 bp, Homo sapiens
cccctggggtataac

SEQ ID NO: 21392 - DNA, 15 bp, Homo sapiens
ccctggggtataact

SEQ ID NO: 21393 - DNA, 15 bp, Homo sapiens
cctggggtataactg

SEQ ID NO: 21394 - DNA, 15 bp, Homo sapiens
ctggggtataactga

SEQ ID NO: 21395 - DNA, 15 bp, Homo sapiens
tggggtataactgat

SEQ ID NO: 21396 - DNA, 15 bp, Homo sapiens
ggggtataactgatt

SEQ ID NO: 21397 - DNA, 15 bp, Homo sapiens
gggtataactgatta

SEQ ID NO: 21398 - DNA, 15 bp, Homo sapiens
ggtataactgattat

SEQ ID NO: 21399 - DNA, 15 bp, Homo sapiens
gtataactgattatt

SEQ ID NO: 21400 - DNA, 15 bp, Homo sapiens
tataactgattattt

SEQ ID NO: 21401 - DNA, 15 bp, Homo sapiens
ataactgattatttc

SEQ ID NO: 21402 - DNA, 15 bp, Homo sapiens
taactgattatttct

SEQ ID NO: 21403 - DNA, 15 bp, Homo sapiens
aactgattatttctc

SEQ ID NO: 21404 - DNA, 15 bp, Homo sapiens
actgattatttctcc

SEQ ID NO: 21405 - DNA, 15 bp, Homo sapiens
ctgattatttctccc

SEQ ID NO: 21406 - DNA, 15 bp, Homo sapiens
tgattatttctccct

SEQ ID NO: 21407 - DNA, 15 bp, Homo sapiens
gattatttctccctg

SEQ ID NO: 21408 - DNA, 15 bp, Homo sapiens
attatttctccctgt

SEQ ID NO: 21409 - DNA, 15 bp, Homo sapiens
ttatttctccctgtc

SEQ ID NO: 21410 - DNA, 15 bp, Homo sapiens
tatttctccctgtcc

SEQ ID NO: 21411 - DNA, 15 bp, Homo sapiens
atttctccctgtccc

SEQ ID NO: 21412 - DNA, 15 bp, Homo sapiens
tttctccctgtccct

SEQ ID NO: 21413 - DNA, 15 bp, Homo sapiens
ttctccctgtcccta

SEQ ID NO: 21414 - DNA, 15 bp, Homo sapiens
tctccctgtccctaa

SEQ ID NO: 21415 - DNA, 15 bp, Homo sapiens
ctccctgtccctaaa

SEQ ID NO: 21416 - DNA, 15 bp, Homo sapiens
tccctgtccctaaat

SEQ ID NO: 21417 - DNA, 15 bp, Homo sapiens
ccctgtccctaaatg

SEQ ID NO: 21418 - DNA, 15 bp, Homo sapiens
cctgtccctaaatga

SEQ ID NO: 21419 - DNA, 15 bp, Homo sapiens
ctgtccctaaatgat

SEQ ID NO: 21420 - DNA, 15 bp, Homo sapiens
tgtccctaaatgatc

SEQ ID NO: 21421 - DNA, 15 bp, Homo sapiens
gtccctaaatgatca

SEQ ID NO: 21422 - DNA, 15 bp, Homo sapiens
tccctaaatgatcac

SEQ ID NO: 21423 - DNA, 15 bp, Homo sapiens
ccctaaatgatcaca

SEQ ID NO: 21424 - DNA, 15 bp, Homo sapiens
cctaaatgatcacag

SEQ ID NO: 21425 - DNA, 15 bp, Homo sapiens
ctaaatgatcacagg

SEQ ID NO: 21426 - DNA, 15 bp, Homo sapiens
taaatgatcacaggt

SEQ ID NO: 21427 - DNA, 15 bp, Homo sapiens
aaatgatcacaggtg

SEQ ID NO: 21428 - DNA, 15 bp, Homo sapiens
aatgatcacaggtgg

SEQ ID NO: 21429 - DNA, 15 bp, Homo sapiens
atgatcacaggtggt

SEQ ID NO: 21430 - DNA, 15 bp, Homo sapiens
tgatcacaggtggtg

SEQ ID NO: 21431 - DNA, 15 bp, Homo sapiens
gatcacaggtggtgt

SEQ ID NO: 21432 - DNA, 15 bp, Homo sapiens
atcacaggtggtgtg

SEQ ID NO: 21433 - DNA, 15 bp, Homo sapiens
tcacaggtggtgtgg

SEQ ID NO: 21434 - DNA, 15 bp, Homo sapiens
cacaggtggtgtggc

SEQ ID NO: 21435 - DNA, 15 bp, Homo sapiens
acaggtggtgtggca

SEQ ID NO: 21436 - DNA, 15 bp, Homo sapiens
caggtggtgtggcaa

SEQ ID NO: 21437 - DNA, 15 bp, Homo sapiens
aggtggtgtggcaaa

SEQ ID NO: 21438 - DNA, 15 bp, Homo sapiens
ggtggtgtggcaaaa

SEQ ID NO: 21439 - DNA, 15 bp, Homo sapiens
gtggtgtggcaaaaa

SEQ ID NO: 21440 - DNA, 15 bp, Homo sapiens
tggtgtggcaaaaaa

SEQ ID NO: 21441 - DNA, 15 bp, Homo sapiens
ggtgtggcaaaaaaa

SEQ ID NO: 21442 - DNA, 15 bp, Homo sapiens
gtgtggcaaaaaaac

SEQ ID NO: 21443 - DNA, 15 bp, Homo sapiens
tgtggcaaaaaaaca

SEQ ID NO: 21444 - DNA, 15 bp, Homo sapiens
gtggcaaaaaaacaa

SEQ ID NO: 21445 - DNA, 15 bp, Homo sapiens
tggcaaaaaaacaag

SEQ ID NO: 21446 - DNA, 15 bp, Homo sapiens
ggcaaaaaaacaagg

SEQ ID NO: 21447 - DNA, 15 bp, Homo sapiens
gcaaaaaaacaaggg

SEQ ID NO: 21448 - DNA, 15 bp, Homo sapiens
caaaaaaacaaggga

SEQ ID NO: 21449 - DNA, 15 bp, Homo sapiens
aaaaaaacaagggac

SEQ ID NO: 21450 - DNA, 15 bp, Homo sapiens
aaaaaacaagggaca

SEQ ID NO: 21451 - DNA, 15 bp, Homo sapiens
aaaaacaagggacaa

SEQ ID NO: 21452 - DNA, 15 bp, Homo sapiens
aaaacaagggacaaa

SEQ ID NO: 21453 - DNA, 15 bp, Homo sapiens
aaacaagggacaaaa

SEQ ID NO: 21454 - DNA, 15 bp, Homo sapiens
aacaagggacaaaaa

SEQ ID NO: 21455 - DNA, 15 bp, Homo sapiens
acaagggacaaaaac

SEQ ID NO: 21456 - DNA, 15 bp, Homo sapiens
caagggacaaaaact

SEQ ID NO: 21457 - DNA, 15 bp, Homo sapiens
aagggacaaaaactt

SEQ ID NO: 21458 - DNA, 15 bp, Homo sapiens
agggacaaaaacttc

SEQ ID NO: 21459 - DNA, 15 bp, Homo sapiens
gggacaaaaacttca

SEQ ID NO: 21460 - DNA, 15 bp, Homo sapiens
ggacaaaaacttcaa

SEQ ID NO: 21461 - DNA, 15 bp, Homo sapiens
gacaaaaacttcaag

SEQ ID NO: 21462 - DNA, 15 bp, Homo sapiens
acaaaaacttcaagt

SEQ ID NO: 21463 - DNA, 15 bp, Homo sapiens
caaaaacttcaagtc

SEQ ID NO: 21464 - DNA, 15 bp, Homo sapiens
aaaaacttcaagtcc

SEQ ID NO: 21465 - DNA, 15 bp, Homo sapiens
aaaacttcaagtcca

SEQ ID NO: 21466 - DNA, 15 bp, Homo sapiens
aaacttcaagtccag

SEQ ID NO: 21467 - DNA, 15 bp, Homo sapiens
aacttcaagtccagt

SEQ ID NO: 21468 - DNA, 15 bp, Homo sapiens
acttcaagtccagta

SEQ ID NO: 21469 - DNA, 15 bp, Homo sapiens
cttcaagtccagtac

SEQ ID NO: 21470 - DNA, 15 bp, Homo sapiens
ttcaagtccagtacc

SEQ ID NO: 21471 - DNA, 15 bp, Homo sapiens
tcaagtccagtaccc

SEQ ID NO: 21472 - DNA, 15 bp, Homo sapiens
caagtccagtaccca

SEQ ID NO: 21473 - DNA, 15 bp, Homo sapiens
aagtccagtacccat

SEQ ID NO: 21474 - DNA, 15 bp, Homo sapiens
agtccagtacccatc

SEQ ID NO: 21475 - DNA, 15 bp, Homo sapiens
gtccagtacccatct

SEQ ID NO: 21476 - DNA, 15 bp, Homo sapiens
tccagtacccatctg

SEQ ID NO: 21477 - DNA, 15 bp, Homo sapiens
ccagtacccatctgg

SEQ ID NO: 21478 - DNA, 15 bp, Homo sapiens
cagtacccatctggt

SEQ ID NO: 21479 - DNA, 15 bp, Homo sapiens
agtacccatctggtt

SEQ ID NO: 21480 - DNA, 15 bp, Homo sapiens
gtacccatctggttc

SEQ ID NO: 21481 - DNA, 15 bp, Homo sapiens
tacccatctggttct

SEQ ID NO: 21482 - DNA, 15 bp, Homo sapiens
acccatctggttctg

SEQ ID NO: 21483 - DNA, 15 bp, Homo sapiens
cccatctggttctgt

SEQ ID NO: 21484 - DNA, 15 bp, Homo sapiens
ccatctggttctgtc

SEQ ID NO: 21485 - DNA, 15 bp, Homo sapiens
catctggttctgtct

SEQ ID NO: 21486 - DNA, 15 bp, Homo sapiens
atctggttctgtctc

SEQ ID NO: 21487 - DNA, 15 bp, Homo sapiens
tctggttctgtctct

SEQ ID NO: 21488 - DNA, 15 bp, Homo sapiens
ctggttctgtctctc

SEQ ID NO: 21489 - DNA, 15 bp, Homo sapiens
tggttctgtctctct

SEQ ID NO: 21490 - DNA, 15 bp, Homo sapiens
ggttctgtctctctg

SEQ ID NO: 21491 - DNA, 15 bp, Homo sapiens
gttctgtctctctgc

SEQ ID NO: 21492 - DNA, 15 bp, Homo sapiens
ttctgtctctctgct

SEQ ID NO: 21493 - DNA, 15 bp, Homo sapiens
tctgtctctctgcta

SEQ ID NO: 21494 - DNA, 15 bp, Homo sapiens
ctgtctctctgctag

SEQ ID NO: 21495 - DNA, 15 bp, Homo sapiens
tgtctctctgctaga

SEQ ID NO: 21496 - DNA, 15 bp, Homo sapiens
gtctctctgctagag

SEQ ID NO: 21497 - DNA, 15 bp, Homo sapiens
tctctctgctagagc

SEQ ID NO: 21498 - DNA, 15 bp, Homo sapiens
ctctctgctagagcc

SEQ ID NO: 21499 - DNA, 15 bp, Homo sapiens
tctctgctagagcca

SEQ ID NO: 21500 - DNA, 15 bp, Homo sapiens
ctctgctagagccac

SEQ ID NO: 21501 - DNA, 15 bp, Homo sapiens
tctgctagagccact

SEQ ID NO: 21502 - DNA, 15 bp, Homo sapiens
ctgctagagccactg

SEQ ID NO: 21503 - DNA, 15 bp, Homo sapiens
tgctagagccactgc

SEQ ID NO: 21504 - DNA, 15 bp, Homo sapiens
gctagagccactgct

SEQ ID NO: 21505 - DNA, 15 bp, Homo sapiens
ctagagccactgctt

SEQ ID NO: 21506 - DNA, 15 bp, Homo sapiens
tagagccactgcttt

SEQ ID NO: 21507 - DNA, 15 bp, Homo sapiens
agagccactgctttc

SEQ ID NO: 21508 - DNA, 15 bp, Homo sapiens
gagccactgctttct

SEQ ID NO: 21509 - DNA, 15 bp, Homo sapiens
agccactgctttctt

SEQ ID NO: 21510 - DNA, 15 bp, Homo sapiens
gccactgctttcttg

SEQ ID NO: 21511 - DNA, 15 bp, Homo sapiens
ccactgctttcttgt

SEQ ID NO: 21512 - DNA, 15 bp, Homo sapiens
cactgctttcttgtg

SEQ ID NO: 21513 - DNA, 15 bp, Homo sapiens
actgctttcttgtga

SEQ ID NO: 21514 - DNA, 15 bp, Homo sapiens
ctgctttcttgtgag

SEQ ID NO: 21515 - DNA, 15 bp, Homo sapiens
tgctttcttgtgaga

SEQ ID NO: 21516 - DNA, 15 bp, Homo sapiens
gctttcttgtgagag

SEQ ID NO: 21517 - DNA, 15 bp, Homo sapiens
ctttcttgtgagagc

SEQ ID NO: 21518 - DNA, 15 bp, Homo sapiens
tttcttgtgagagca

SEQ ID NO: 21519 - DNA, 15 bp, Homo sapiens
ttcttgtgagagcat

SEQ ID NO: 21520 - DNA, 15 bp, Homo sapiens
tcttgtgagagcatg

SEQ ID NO: 21521 - DNA, 15 bp, Homo sapiens
cttgtgagagcatgg

SEQ ID NO: 21522 - DNA, 15 bp, Homo sapiens
ttgtgagagcatggg

SEQ ID NO: 21523 - DNA, 15 bp, Homo sapiens
tgtgagagcatgggc

SEQ ID NO: 21524 - DNA, 15 bp, Homo sapiens
gtgagagcatgggct

SEQ ID NO: 21525 - DNA, 15 bp, Homo sapiens
tgagagcatgggctc

SEQ ID NO: 21526 - DNA, 15 bp, Homo sapiens
gagagcatgggctca

SEQ ID NO: 21527 - DNA, 15 bp, Homo sapiens
agagcatgggctcag

SEQ ID NO: 21528 - DNA, 15 bp, Homo sapiens
gagcatgggctcagc

SEQ ID NO: 21529 - DNA, 15 bp, Homo sapiens
agcatgggctcagcc

SEQ ID NO: 21530 - DNA, 15 bp, Homo sapiens
gcatgggctcagccc

SEQ ID NO: 21531 - DNA, 15 bp, Homo sapiens
catgggctcagcccc

SEQ ID NO: 21532 - DNA, 15 bp, Homo sapiens
atgggctcagcccct

SEQ ID NO: 21533 - DNA, 15 bp, Homo sapiens
tgggctcagcccctc

SEQ ID NO: 21534 - DNA, 15 bp, Homo sapiens
gggctcagcccctcg

SEQ ID NO: 21535 - DNA, 15 bp, Homo sapiens
ggctcagcccctcgc

SEQ ID NO: 21536 - DNA, 15 bp, Homo sapiens
gctcagcccctcgcc

SEQ ID NO: 21537 - DNA, 15 bp, Homo sapiens
ctcagcccctcgcct

SEQ ID NO: 21538 - DNA, 15 bp, Homo sapiens
tcagcccctcgcctc

SEQ ID NO: 21539 - DNA, 15 bp, Homo sapiens
cagcccctcgcctcc

SEQ ID NO: 21540 - DNA, 15 bp, Homo sapiens
agcccctcgcctcca

SEQ ID NO: 21541 - DNA, 15 bp, Homo sapiens
gcccctcgcctccac

SEQ ID NO: 21542 - DNA, 15 bp, Homo sapiens
cccctcgcctccaca

SEQ ID NO: 21543 - DNA, 15 bp, Homo sapiens
ccctcgcctccacag

SEQ ID NO: 21544 - DNA, 15 bp, Homo sapiens
cctcgcctccacagg

SEQ ID NO: 21545 - DNA, 15 bp, Homo sapiens
ctcgcctccacagga

SEQ ID NO: 21546 - DNA, 15 bp, Homo sapiens
tcgcctccacaggac

SEQ ID NO: 21547 - DNA, 15 bp, Homo sapiens
cgcctccacaggact

SEQ ID NO: 21548 - DNA, 15 bp, Homo sapiens
gcctccacaggactc

SEQ ID NO: 21549 - DNA, 15 bp, Homo sapiens
cctccacaggactca

SEQ ID NO: 21550 - DNA, 15 bp, Homo sapiens
ctccacaggactcaa

SEQ ID NO: 21551 - DNA, 15 bp, Homo sapiens
tccacaggactcaaa

SEQ ID NO: 21552 - DNA, 15 bp, Homo sapiens
ccacaggactcaaaa

SEQ ID NO: 21553 - DNA, 15 bp, Homo sapiens
cacaggactcaaaag

SEQ ID NO: 21554 - DNA, 15 bp, Homo sapiens
acaggactcaaaagt

SEQ ID NO: 21555 - DNA, 15 bp, Homo sapiens
caggactcaaaagta

SEQ ID NO: 21556 - DNA, 15 bp, Homo sapiens
aggactcaaaagtag

SEQ ID NO: 21557 - DNA, 15 bp, Homo sapiens
ggactcaaaagtaga

SEQ ID NO: 21558 - DNA, 15 bp, Homo sapiens
gactcaaaagtagat

SEQ ID NO: 21559 - DNA, 15 bp, Homo sapiens
actcaaaagtagatt

SEQ ID NO: 21560 - DNA, 15 bp, Homo sapiens
ctcaaaagtagatta

SEQ ID NO: 21561 - DNA, 15 bp, Homo sapiens
tcaaaagtagattac

SEQ ID NO: 21562 - DNA, 15 bp, Homo sapiens
caaaagtagattaca

SEQ ID NO: 21563 - DNA, 15 bp, Homo sapiens
aaaagtagattacag

SEQ ID NO: 21564 - DNA, 15 bp, Homo sapiens
aaagtagattacagc

SEQ ID NO: 21565 - DNA, 15 bp, Homo sapiens
aagtagattacagcg

SEQ ID NO: 21566 - DNA, 15 bp, Homo sapiens
agtagattacagcgt

SEQ ID NO: 21567 - DNA, 15 bp, Homo sapiens
gtagattacagcgtt

SEQ ID NO: 21568 - DNA, 15 bp, Homo sapiens
tagattacagcgtta

SEQ ID NO: 21569 - DNA, 15 bp, Homo sapiens
agattacagcgttaa

SEQ ID NO: 21570 - DNA, 15 bp, Homo sapiens
gattacagcgttaac

SEQ ID NO: 21571 - DNA, 15 bp, Homo sapiens
attacagcgttaaca

SEQ ID NO: 21572 - DNA, 15 bp, Homo sapiens
ttacagcgttaacag

SEQ ID NO: 21573 - DNA, 15 bp, Homo sapiens
tacagcgttaacagt

SEQ ID NO: 21574 - DNA, 15 bp, Homo sapiens
acagcgttaacagta

SEQ ID NO: 21575 - DNA, 15 bp, Homo sapiens
cagcgttaacagtag

SEQ ID NO: 21576 - DNA, 15 bp, Homo sapiens
agcgttaacagtaga

SEQ ID NO: 21577 - DNA, 15 bp, Homo sapiens
gcgttaacagtagag

SEQ ID NO: 21578 - DNA, 15 bp, Homo sapiens
cgttaacagtagagt

SEQ ID NO: 21579 - DNA, 15 bp, Homo sapiens
gttaacagtagagtg

SEQ ID NO: 21580 - DNA, 15 bp, Homo sapiens
ttaacagtagagtgc

SEQ ID NO: 21581 - DNA, 15 bp, Homo sapiens
taacagtagagtgca

SEQ ID NO: 21582 - DNA, 15 bp, Homo sapiens
aacagtagagtgcac

SEQ ID NO: 21583 - DNA, 15 bp, Homo sapiens
acagtagagtgcaca

SEQ ID NO: 21584 - DNA, 15 bp, Homo sapiens
cagtagagtgcacag

SEQ ID NO: 21585 - DNA, 15 bp, Homo sapiens
agtagagtgcacagg

SEQ ID NO: 21586 - DNA, 15 bp, Homo sapiens
gtagagtgcacaggc

SEQ ID NO: 21587 - DNA, 15 bp, Homo sapiens
tagagtgcacaggct

SEQ ID NO: 21588 - DNA, 15 bp, Homo sapiens
agagtgcacaggctt

SEQ ID NO: 21589 - DNA, 15 bp, Homo sapiens
gagtgcacaggcttc

SEQ ID NO: 21590 - DNA, 15 bp, Homo sapiens
agtgcacaggcttca

SEQ ID NO: 21591 - DNA, 15 bp, Homo sapiens
gtgcacaggcttcaa

SEQ ID NO: 21592 - DNA, 15 bp, Homo sapiens
tgcacaggcttcaag

SEQ ID NO: 21593 - DNA, 15 bp, Homo sapiens
gcacaggcttcaagg

SEQ ID NO: 21594 - DNA, 15 bp, Homo sapiens
cacaggcttcaaggt

SEQ ID NO: 21595 - DNA, 15 bp, Homo sapiens
acaggcttcaaggtc

SEQ ID NO: 21596 - DNA, 15 bp, Homo sapiens
caggcttcaaggtca

SEQ ID NO: 21597 - DNA, 15 bp, Homo sapiens
aggcttcaaggtcag

SEQ ID NO: 21598 - DNA, 15 bp, Homo sapiens
ggcttcaaggtcagg

SEQ ID NO: 21599 - DNA, 15 bp, Homo sapiens
gcttcaaggtcaggc

SEQ ID NO: 21600 - DNA, 15 bp, Homo sapiens
cttcaaggtcaggca

SEQ ID NO: 21601 - DNA, 15 bp, Homo sapiens
ttcaaggtcaggcat

SEQ ID NO: 21602 - DNA, 15 bp, Homo sapiens
tcaaggtcaggcatg

SEQ ID NO: 21603 - DNA, 15 bp, Homo sapiens
caaggtcaggcatgg

SEQ ID NO: 21604 - DNA, 15 bp, Homo sapiens
aaggtcaggcatggg

SEQ ID NO: 21605 - DNA, 15 bp, Homo sapiens
aggtcaggcatgggt

SEQ ID NO: 21606 - DNA, 15 bp, Homo sapiens
ggtcaggcatgggtg

SEQ ID NO: 21607 - DNA, 15 bp, Homo sapiens
gtcaggcatgggtga

SEQ ID NO: 21608 - DNA, 15 bp, Homo sapiens
tcaggcatgggtgaa

SEQ ID NO: 21609 - DNA, 15 bp, Homo sapiens
caggcatgggtgaac

SEQ ID NO: 21610 - DNA, 15 bp, Homo sapiens
aggcatgggtgaact

SEQ ID NO: 21611 - DNA, 15 bp, Homo sapiens
ggcatgggtgaactg

SEQ ID NO: 21612 - DNA, 15 bp, Homo sapiens
gcatgggtgaactgg

SEQ ID NO: 21613 - DNA, 15 bp, Homo sapiens
catgggtgaactgga

SEQ ID NO: 21614 - DNA, 15 bp, Homo sapiens
atgggtgaactggaa

SEQ ID NO: 21615 - DNA, 15 bp, Homo sapiens
tgggtgaactggaag

SEQ ID NO: 21616 - DNA, 15 bp, Homo sapiens
gggtgaactggaaga

SEQ ID NO: 21617 - DNA, 15 bp, Homo sapiens
ggtgaactggaagag

SEQ ID NO: 21618 - DNA, 15 bp, Homo sapiens
gtgaactggaagagc

SEQ ID NO: 21619 - DNA, 15 bp, Homo sapiens
tgaactggaagagcc

SEQ ID NO: 21620 - DNA, 15 bp, Homo sapiens
gaactggaagagcca

SEQ ID NO: 21621 - DNA, 15 bp, Homo sapiens
aactggaagagccag

SEQ ID NO: 21622 - DNA, 15 bp, Homo sapiens
actggaagagccagg

SEQ ID NO: 21623 - DNA, 15 bp, Homo sapiens
ctggaagagccaggt

SEQ ID NO: 21624 - DNA, 15 bp, Homo sapiens
tggaagagccaggtg

SEQ ID NO: 21625 - DNA, 15 bp, Homo sapiens
ggaagagccaggtgc

SEQ ID NO: 21626 - DNA, 15 bp, Homo sapiens
gaagagccaggtgcc

SEQ ID NO: 21627 - DNA, 15 bp, Homo sapiens
aagagccaggtgcca

SEQ ID NO: 21628 - DNA, 15 bp, Homo sapiens
agagccaggtgccat

SEQ ID NO: 21629 - DNA, 15 bp, Homo sapiens
gagccaggtgccatc

SEQ ID NO: 21630 - DNA, 15 bp, Homo sapiens
agccaggtgccatca

SEQ ID NO: 21631 - DNA, 15 bp, Homo sapiens
gccaggtgccatcac

SEQ ID NO: 21632 - DNA, 15 bp, Homo sapiens
ccaggtgccatcact

SEQ ID NO: 21633 - DNA, 15 bp, Homo sapiens
caggtgccatcactg

SEQ ID NO: 21634 - DNA, 15 bp, Homo sapiens
aggtgccatcactgc

SEQ ID NO: 21635 - DNA, 15 bp, Homo sapiens
ggtgccatcactgcc

SEQ ID NO: 21636 - DNA, 15 bp, Homo sapiens
gtgccatcactgcct

SEQ ID NO: 21637 - DNA, 15 bp, Homo sapiens
tgccatcactgcctc

SEQ ID NO: 21638 - DNA, 15 bp, Homo sapiens
gccatcactgcctca

SEQ ID NO: 21639 - DNA, 15 bp, Homo sapiens
ccatcactgcctcaa

SEQ ID NO: 21640 - DNA, 15 bp, Homo sapiens
catcactgcctcaac

SEQ ID NO: 21641 - DNA, 15 bp, Homo sapiens
atcactgcctcaacc

SEQ ID NO: 21642 - DNA, 15 bp, Homo sapiens
tcactgcctcaacca

SEQ ID NO: 21643 - DNA, 15 bp, Homo sapiens
cactgcctcaaccag

SEQ ID NO: 21644 - DNA, 15 bp, Homo sapiens
actgcctcaaccagt

SEQ ID NO: 21645 - DNA, 15 bp, Homo sapiens
ctgcctcaaccagtt

SEQ ID NO: 21646 - DNA, 15 bp, Homo sapiens
tgcctcaaccagttt

SEQ ID NO: 21647 - DNA, 15 bp, Homo sapiens
gcctcaaccagtttc

SEQ ID NO: 21648 - DNA, 15 bp, Homo sapiens
cctcaaccagtttct

SEQ ID NO: 21649 - DNA, 15 bp, Homo sapiens
ctcaaccagtttctc

SEQ ID NO: 21650 - DNA, 15 bp, Homo sapiens
tcaaccagtttctcc

SEQ ID NO: 21651 - DNA, 15 bp, Homo sapiens
caaccagtttctcca

SEQ ID NO: 21652 - DNA, 15 bp, Homo sapiens
aaccagtttctccac

SEQ ID NO: 21653 - DNA, 15 bp, Homo sapiens
accagtttctccacc

SEQ ID NO: 21654 - DNA, 15 bp, Homo sapiens
ccagtttctccacct

SEQ ID NO: 21655 - DNA, 15 bp, Homo sapiens
cagtttctccacctc

SEQ ID NO: 21656 - DNA, 15 bp, Homo sapiens
agtttctccacctct

SEQ ID NO: 21657 - DNA, 15 bp, Homo sapiens
gtttctccacctctg

SEQ ID NO: 21658 - DNA, 15 bp, Homo sapiens
tttctccacctctgg

SEQ ID NO: 21659 - DNA, 15 bp, Homo sapiens
ttctccacctctgga

SEQ ID NO: 21660 - DNA, 15 bp, Homo sapiens
tctccacctctggaa

SEQ ID NO: 21661 - DNA, 15 bp, Homo sapiens
ctccacctctggaat

SEQ ID NO: 21662 - DNA, 15 bp, Homo sapiens
tccacctctggaatc

SEQ ID NO: 21663 - DNA, 15 bp, Homo sapiens
ccacctctggaatcc

SEQ ID NO: 21664 - DNA, 15 bp, Homo sapiens
cacctctggaatcct

SEQ ID NO: 21665 - DNA, 15 bp, Homo sapiens
acctctggaatcctg

SEQ ID NO: 21666 - DNA, 15 bp, Homo sapiens
cctctggaatcctgg

SEQ ID NO: 21667 - DNA, 15 bp, Homo sapiens
ctctggaatcctggt

SEQ ID NO: 21668 - DNA, 15 bp, Homo sapiens
tctggaatcctggtt

SEQ ID NO: 21669 - DNA, 15 bp, Homo sapiens
ctggaatcctggttt

SEQ ID NO: 21670 - DNA, 15 bp, Homo sapiens
tggaatcctggtttc

SEQ ID NO: 21671 - DNA, 15 bp, Homo sapiens
ggaatcctggtttcc

SEQ ID NO: 21672 - DNA, 15 bp, Homo sapiens
gaatcctggtttcct

SEQ ID NO: 21673 - DNA, 15 bp, Homo sapiens
aatcctggtttcctg

SEQ ID NO: 21674 - DNA, 15 bp, Homo sapiens
atcctggtttcctgc

SEQ ID NO: 21675 - DNA, 15 bp, Homo sapiens
tcctggtttcctgct

SEQ ID NO: 21676 - DNA, 15 bp, Homo sapiens
cctggtttcctgctc

SEQ ID NO: 21677 - DNA, 15 bp, Homo sapiens
ctggtttcctgctct

SEQ ID NO: 21678 - DNA, 15 bp, Homo sapiens
tggtttcctgctctg

SEQ ID NO: 21679 - DNA, 15 bp, Homo sapiens
ggtttcctgctctgt

SEQ ID NO: 21680 - DNA, 15 bp, Homo sapiens
gtttcctgctctgtc

SEQ ID NO: 21681 - DNA, 15 bp, Homo sapiens
tttcctgctctgtca

SEQ ID NO: 21682 - DNA, 15 bp, Homo sapiens
ttcctgctctgtcag

SEQ ID NO: 21683 - DNA, 15 bp, Homo sapiens
tcctgctctgtcaga

SEQ ID NO: 21684 - DNA, 15 bp, Homo sapiens
cctgctctgtcagaa

SEQ ID NO: 21685 - DNA, 15 bp, Homo sapiens
ctgctctgtcagaaa

SEQ ID NO: 21686 - DNA, 15 bp, Homo sapiens
tgctctgtcagaaag

SEQ ID NO: 21687 - DNA, 15 bp, Homo sapiens
gctctgtcagaaaga

SEQ ID NO: 21688 - DNA, 15 bp, Homo sapiens
ctctgtcagaaagag

SEQ ID NO: 21689 - DNA, 15 bp, Homo sapiens
tctgtcagaaagaga

SEQ ID NO: 21690 - DNA, 15 bp, Homo sapiens
ctgtcagaaagagaa

SEQ ID NO: 21691 - DNA, 15 bp, Homo sapiens
tgtcagaaagagaat

SEQ ID NO: 21692 - DNA, 15 bp, Homo sapiens
gtcagaaagagaatc

SEQ ID NO: 21693 - DNA, 15 bp, Homo sapiens
tcagaaagagaatct

SEQ ID NO: 21694 - DNA, 15 bp, Homo sapiens
cagaaagagaatctg

SEQ ID NO: 21695 - DNA, 15 bp, Homo sapiens
agaaagagaatctgc

SEQ ID NO: 21696 - DNA, 15 bp, Homo sapiens
gaaagagaatctgct

SEQ ID NO: 21697 - DNA, 15 bp, Homo sapiens
aaagagaatctgctc

SEQ ID NO: 21698 - DNA, 15 bp, Homo sapiens
aagagaatctgctct

SEQ ID NO: 21699 - DNA, 15 bp, Homo sapiens
agagaatctgctcta

SEQ ID NO: 21700 - DNA, 15 bp, Homo sapiens
gagaatctgctctac

SEQ ID NO: 21701 - DNA, 15 bp, Homo sapiens
agaatctgctctacc

SEQ ID NO: 21702 - DNA, 15 bp, Homo sapiens
gaatctgctctaccc

SEQ ID NO: 21703 - DNA, 15 bp, Homo sapiens
aatctgctctacccc

SEQ ID NO: 21704 - DNA, 15 bp, Homo sapiens
atctgctctaccccc

SEQ ID NO: 21705 - DNA, 15 bp, Homo sapiens
tctgctctacccccc

SEQ ID NO: 21706 - DNA, 15 bp, Homo sapiens
ctgctctacccccca

SEQ ID NO: 21707 - DNA, 15 bp, Homo sapiens
tgctctaccccccac

SEQ ID NO: 21708 - DNA, 15 bp, Homo sapiens
gctctaccccccact

SEQ ID NO: 21709 - DNA, 15 bp, Homo sapiens
ctctaccccccactg

SEQ ID NO: 21710 - DNA, 15 bp, Homo sapiens
tctaccccccactgg

SEQ ID NO: 21711 - DNA, 15 bp, Homo sapiens
ctaccccccactggc

SEQ ID NO: 21712 - DNA, 15 bp, Homo sapiens
taccccccactggca

SEQ ID NO: 21713 - DNA, 15 bp, Homo sapiens
accccccactggcaa

SEQ ID NO: 21714 - DNA, 15 bp, Homo sapiens
ccccccactggcaaa

SEQ ID NO: 21715 - DNA, 15 bp, Homo sapiens
cccccactggcaaag

SEQ ID NO: 21716 - DNA, 15 bp, Homo sapiens
ccccactggcaaagc

SEQ ID NO: 21717 - DNA, 15 bp, Homo sapiens
cccactggcaaagcc

SEQ ID NO: 21718 - DNA, 15 bp, Homo sapiens
ccactggcaaagccc

SEQ ID NO: 21719 - DNA, 15 bp, Homo sapiens
cactggcaaagccct

SEQ ID NO: 21720 - DNA, 15 bp, Homo sapiens
actggcaaagccctt

SEQ ID NO: 21721 - DNA, 15 bp, Homo sapiens
ctggcaaagcccttg

SEQ ID NO: 21722 - DNA, 15 bp, Homo sapiens
tggcaaagcccttgg

SEQ ID NO: 21723 - DNA, 15 bp, Homo sapiens
ggcaaagcccttggt

SEQ ID NO: 21724 - DNA, 15 bp, Homo sapiens
gcaaagcccttggtc

SEQ ID NO: 21725 - DNA, 15 bp, Homo sapiens
caaagcccttggtcc

SEQ ID NO: 21726 - DNA, 15 bp, Homo sapiens
aaagcccttggtcca

SEQ ID NO: 21727 - DNA, 15 bp, Homo sapiens
aagcccttggtccac

SEQ ID NO: 21728 - DNA, 15 bp, Homo sapiens
agcccttggtccaca

SEQ ID NO: 21729 - DNA, 15 bp, Homo sapiens
gcccttggtccacac

SEQ ID NO: 21730 - DNA, 15 bp, Homo sapiens
cccttggtccacact

SEQ ID NO: 21731 - DNA, 15 bp, Homo sapiens
ccttggtccacacta

SEQ ID NO: 21732 - DNA, 15 bp, Homo sapiens
cttggtccacactat

SEQ ID NO: 21733 - DNA, 15 bp, Homo sapiens
ttggtccacactatg

SEQ ID NO: 21734 - DNA, 15 bp, Homo sapiens
tggtccacactatgt

SEQ ID NO: 21735 - DNA, 15 bp, Homo sapiens
ggtccacactatgtc

SEQ ID NO: 21736 - DNA, 15 bp, Homo sapiens
gtccacactatgtca

SEQ ID NO: 21737 - DNA, 15 bp, Homo sapiens
tccacactatgtcat

SEQ ID NO: 21738 - DNA, 15 bp, Homo sapiens
ccacactatgtcatt

SEQ ID NO: 21739 - DNA, 15 bp, Homo sapiens
cacactatgtcattg

SEQ ID NO: 21740 - DNA, 15 bp, Homo sapiens
acactatgtcattgc

SEQ ID NO: 21741 - DNA, 15 bp, Homo sapiens
cactatgtcattgca

SEQ ID NO: 21742 - DNA, 15 bp, Homo sapiens
actatgtcattgcag

SEQ ID NO: 21743 - DNA, 15 bp, Homo sapiens
ctatgtcattgcagt

SEQ ID NO: 21744 - DNA, 15 bp, Homo sapiens
tatgtcattgcagtt

SEQ ID NO: 21745 - DNA, 15 bp, Homo sapiens
atgtcattgcagttc

SEQ ID NO: 21746 - DNA, 15 bp, Homo sapiens
tgtcattgcagttct

SEQ ID NO: 21747 - DNA, 15 bp, Homo sapiens
gtcattgcagttctc

SEQ ID NO: 21748 - DNA, 15 bp, Homo sapiens
tcattgcagttctct

SEQ ID NO: 21749 - DNA, 15 bp, Homo sapiens
cattgcagttctctc

SEQ ID NO: 21750 - DNA, 15 bp, Homo sapiens
attgcagttctctcc

SEQ ID NO: 21751 - DNA, 15 bp, Homo sapiens
ttgcagttctctcca

SEQ ID NO: 21752 - DNA, 15 bp, Homo sapiens
tgcagttctctccac

SEQ ID NO: 21753 - DNA, 15 bp, Homo sapiens
gcagttctctccact

SEQ ID NO: 21754 - DNA, 15 bp, Homo sapiens
cagttctctccactc

SEQ ID NO: 21755 - DNA, 15 bp, Homo sapiens
agttctctccactcc

SEQ ID NO: 21756 - DNA, 15 bp, Homo sapiens
gttctctccactcca

SEQ ID NO: 21757 - DNA, 15 bp, Homo sapiens
ttctctccactccag

SEQ ID NO: 21758 - DNA, 15 bp, Homo sapiens
tctctccactccagc

SEQ ID NO: 21759 - DNA, 15 bp, Homo sapiens
ctctccactccagca

SEQ ID NO: 21760 - DNA, 15 bp, Homo sapiens
tctccactccagcac

SEQ ID NO: 21761 - DNA, 15 bp, Homo sapiens
ctccactccagcaca

SEQ ID NO: 21762 - DNA, 15 bp, Homo sapiens
tccactccagcacac

SEQ ID NO: 21763 - DNA, 15 bp, Homo sapiens
ccactccagcacact

SEQ ID NO: 21764 - DNA, 15 bp, Homo sapiens
cactccagcacactg

SEQ ID NO: 21765 - DNA, 15 bp, Homo sapiens
actccagcacactgc

SEQ ID NO: 21766 - DNA, 15 bp, Homo sapiens
ctccagcacactgct

SEQ ID NO: 21767 - DNA, 15 bp, Homo sapiens
tccagcacactgctg

SEQ ID NO: 21768 - DNA, 15 bp, Homo sapiens
ccagcacactgctga

SEQ ID NO: 21769 - DNA, 15 bp, Homo sapiens
cagcacactgctgat

SEQ ID NO: 21770 - DNA, 15 bp, Homo sapiens
agcacactgctgatc

SEQ ID NO: 21771 - DNA, 15 bp, Homo sapiens
gcacactgctgatca

SEQ ID NO: 21772 - DNA, 15 bp, Homo sapiens
cacactgctgatcat

SEQ ID NO: 21773 - DNA, 15 bp, Homo sapiens
acactgctgatcatt

SEQ ID NO: 21774 - DNA, 15 bp, Homo sapiens
cactgctgatcattc

SEQ ID NO: 21775 - DNA, 15 bp, Homo sapiens
actgctgatcattca

SEQ ID NO: 21776 - DNA, 15 bp, Homo sapiens
ctgctgatcattcac

SEQ ID NO: 21777 - DNA, 15 bp, Homo sapiens
tgctgatcattcaca

SEQ ID NO: 21778 - DNA, 15 bp, Homo sapiens
gctgatcattcacac

SEQ ID NO: 21779 - DNA, 15 bp, Homo sapiens
ctgatcattcacacc

SEQ ID NO: 21780 - DNA, 15 bp, Homo sapiens
tgatcattcacacca

SEQ ID NO: 21781 - DNA, 15 bp, Homo sapiens
gatcattcacaccaa

SEQ ID NO: 21782 - DNA, 15 bp, Homo sapiens
atcattcacaccaag

SEQ ID NO: 21783 - DNA, 15 bp, Homo sapiens
tcattcacaccaagc

SEQ ID NO: 21784 - DNA, 15 bp, Homo sapiens
cattcacaccaagct

SEQ ID NO: 21785 - DNA, 15 bp, Homo sapiens
attcacaccaagctc

SEQ ID NO: 21786 - DNA, 15 bp, Homo sapiens
ttcacaccaagctca

SEQ ID NO: 21787 - DNA, 15 bp, Homo sapiens
tcacaccaagctcat

SEQ ID NO: 21788 - DNA, 15 bp, Homo sapiens
cacaccaagctcatt

SEQ ID NO: 21789 - DNA, 15 bp, Homo sapiens
acaccaagctcattt

SEQ ID NO: 21790 - DNA, 15 bp, Homo sapiens
caccaagctcatttc

SEQ ID NO: 21791 - DNA, 15 bp, Homo sapiens
accaagctcatttcc

SEQ ID NO: 21792 - DNA, 15 bp, Homo sapiens
ccaagctcatttcca

SEQ ID NO: 21793 - DNA, 15 bp, Homo sapiens
caagctcatttccac

SEQ ID NO: 21794 - DNA, 15 bp, Homo sapiens
aagctcatttccacc

SEQ ID NO: 21795 - DNA, 15 bp, Homo sapiens
agctcatttccaccc

SEQ ID NO: 21796 - DNA, 15 bp, Homo sapiens
gctcatttccacccc

SEQ ID NO: 21797 - DNA, 15 bp, Homo sapiens
ctcatttccacccca

SEQ ID NO: 21798 - DNA, 15 bp, Homo sapiens
tcatttccaccccag

SEQ ID NO: 21799 - DNA, 15 bp, Homo sapiens
catttccaccccagg

SEQ ID NO: 21800 - DNA, 15 bp, Homo sapiens
atttccaccccagga

SEQ ID NO: 21801 - DNA, 15 bp, Homo sapiens
tttccaccccaggac

SEQ ID NO: 21802 - DNA, 15 bp, Homo sapiens
ttccaccccaggact

SEQ ID NO: 21803 - DNA, 15 bp, Homo sapiens
tccaccccaggactt

SEQ ID NO: 21804 - DNA, 15 bp, Homo sapiens
ccaccccaggacttt

SEQ ID NO: 21805 - DNA, 15 bp, Homo sapiens
caccccaggactttg

SEQ ID NO: 21806 - DNA, 15 bp, Homo sapiens
accccaggactttgc

SEQ ID NO: 21807 - DNA, 15 bp, Homo sapiens
ccccaggactttgca

SEQ ID NO: 21808 - DNA, 15 bp, Homo sapiens
cccaggactttgcac

SEQ ID NO: 21809 - DNA, 15 bp, Homo sapiens
ccaggactttgcact

SEQ ID NO: 21810 - DNA, 15 bp, Homo sapiens
caggactttgcactt

SEQ ID NO: 21811 - DNA, 15 bp, Homo sapiens
aggactttgcacttg

SEQ ID NO: 21812 - DNA, 15 bp, Homo sapiens
ggactttgcacttgc

SEQ ID NO: 21813 - DNA, 15 bp, Homo sapiens
gactttgcacttgct

SEQ ID NO: 21814 - DNA, 15 bp, Homo sapiens
actttgcacttgctg

SEQ ID NO: 21815 - DNA, 15 bp, Homo sapiens
ctttgcacttgctgt

SEQ ID NO: 21816 - DNA, 15 bp, Homo sapiens
tttgcacttgctgtt

SEQ ID NO: 21817 - DNA, 15 bp, Homo sapiens
ttgcacttgctgttt

SEQ ID NO: 21818 - DNA, 15 bp, Homo sapiens
tgcacttgctgtttc

SEQ ID NO: 21819 - DNA, 15 bp, Homo sapiens
gcacttgctgtttcc

SEQ ID NO: 21820 - DNA, 15 bp, Homo sapiens
cacttgctgtttcct

SEQ ID NO: 21821 - DNA, 15 bp, Homo sapiens
acttgctgtttcctc

SEQ ID NO: 21822 - DNA, 15 bp, Homo sapiens
cttgctgtttcctct

SEQ ID NO: 21823 - DNA, 15 bp, Homo sapiens
ttgctgtttcctcta

SEQ ID NO: 21824 - DNA, 15 bp, Homo sapiens
tgctgtttcctctac

SEQ ID NO: 21825 - DNA, 15 bp, Homo sapiens
gctgtttcctctacc

SEQ ID NO: 21826 - DNA, 15 bp, Homo sapiens
ctgtttcctctacct

SEQ ID NO: 21827 - DNA, 15 bp, Homo sapiens
tgtttcctctaccta

SEQ ID NO: 21828 - DNA, 15 bp, Homo sapiens
gtttcctctacctag

SEQ ID NO: 21829 - DNA, 15 bp, Homo sapiens
tttcctctacctaga

SEQ ID NO: 21830 - DNA, 15 bp, Homo sapiens
ttcctctacctagaa

SEQ ID NO: 21831 - DNA, 15 bp, Homo sapiens
tcctctacctagaac

SEQ ID NO: 21832 - DNA, 15 bp, Homo sapiens
cctctacctagaaca

SEQ ID NO: 21833 - DNA, 15 bp, Homo sapiens
ctctacctagaacac

SEQ ID NO: 21834 - DNA, 15 bp, Homo sapiens
tctacctagaacacc

SEQ ID NO: 21835 - DNA, 15 bp, Homo sapiens
ctacctagaacaccc

SEQ ID NO: 21836 - DNA, 15 bp, Homo sapiens
tacctagaacaccct

SEQ ID NO: 21837 - DNA, 15 bp, Homo sapiens
acctagaacaccctt

SEQ ID NO: 21838 - DNA, 15 bp, Homo sapiens
cctagaacacccttg

SEQ ID NO: 21839 - DNA, 15 bp, Homo sapiens
ctagaacacccttgt

SEQ ID NO: 21840 - DNA, 15 bp, Homo sapiens
tagaacacccttgtt

SEQ ID NO: 21841 - DNA, 15 bp, Homo sapiens
agaacacccttgttc

SEQ ID NO: 21842 - DNA, 15 bp, Homo sapiens
gaacacccttgttcc

SEQ ID NO: 21843 - DNA, 15 bp, Homo sapiens
aacacccttgttcca

SEQ ID NO: 21844 - DNA, 15 bp, Homo sapiens
acacccttgttccat

SEQ ID NO: 21845 - DNA, 15 bp, Homo sapiens
cacccttgttccata

SEQ ID NO: 21846 - DNA, 15 bp, Homo sapiens
acccttgttccatat

SEQ ID NO: 21847 - DNA, 15 bp, Homo sapiens
cccttgttccatata

SEQ ID NO: 21848 - DNA, 15 bp, Homo sapiens
ccttgttccatatat

SEQ ID NO: 21849 - DNA, 15 bp, Homo sapiens
cttgttccatatatg

SEQ ID NO: 21850 - DNA, 15 bp, Homo sapiens
ttgttccatatatgc

SEQ ID NO: 21851 - DNA, 15 bp, Homo sapiens
tgttccatatatgca

SEQ ID NO: 21852 - DNA, 15 bp, Homo sapiens
gttccatatatgcac

SEQ ID NO: 21853 - DNA, 15 bp, Homo sapiens
ttccatatatgcaca

SEQ ID NO: 21854 - DNA, 15 bp, Homo sapiens
tccatatatgcacat

SEQ ID NO: 21855 - DNA, 15 bp, Homo sapiens
ccatatatgcacata

SEQ ID NO: 21856 - DNA, 15 bp, Homo sapiens
catatatgcacataa

SEQ ID NO: 21857 - DNA, 15 bp, Homo sapiens
atatatgcacataac

SEQ ID NO: 21858 - DNA, 15 bp, Homo sapiens
tatatgcacataact

SEQ ID NO: 21859 - DNA, 15 bp, Homo sapiens
atatgcacataactg

SEQ ID NO: 21860 - DNA, 15 bp, Homo sapiens
tatgcacataactgt

SEQ ID NO: 21861 - DNA, 15 bp, Homo sapiens
atgcacataactgtt

SEQ ID NO: 21862 - DNA, 15 bp, Homo sapiens
tgcacataactgtta

SEQ ID NO: 21863 - DNA, 15 bp, Homo sapiens
gcacataactgttat

SEQ ID NO: 21864 - DNA, 15 bp, Homo sapiens
cacataactgttatt

SEQ ID NO: 21865 - DNA, 15 bp, Homo sapiens
acataactgttattc

SEQ ID NO: 21866 - DNA, 15 bp, Homo sapiens
cataactgttattca

SEQ ID NO: 21867 - DNA, 15 bp, Homo sapiens
ataactgttattcat

SEQ ID NO: 21868 - DNA, 15 bp, Homo sapiens
taactgttattcatc

SEQ ID NO: 21869 - DNA, 15 bp, Homo sapiens
aactgttattcatca

SEQ ID NO: 21870 - DNA, 15 bp, Homo sapiens
actgttattcatcat

SEQ ID NO: 21871 - DNA, 15 bp, Homo sapiens
ctgttattcatcatc

SEQ ID NO: 21872 - DNA, 15 bp, Homo sapiens
tgttattcatcatcc

SEQ ID NO: 21873 - DNA, 15 bp, Homo sapiens
gttattcatcatcca

SEQ ID NO: 21874 - DNA, 15 bp, Homo sapiens
ttattcatcatccag

SEQ ID NO: 21875 - DNA, 15 bp, Homo sapiens
tattcatcatccagg

SEQ ID NO: 21876 - DNA, 15 bp, Homo sapiens
attcatcatccagga

SEQ ID NO: 21877 - DNA, 15 bp, Homo sapiens
ttcatcatccaggac

SEQ ID NO: 21878 - DNA, 15 bp, Homo sapiens
tcatcatccaggact

SEQ ID NO: 21879 - DNA, 15 bp, Homo sapiens
catcatccaggactt

SEQ ID NO: 21880 - DNA, 15 bp, Homo sapiens
atcatccaggactta

SEQ ID NO: 21881 - DNA, 15 bp, Homo sapiens
tcatccaggacttag

SEQ ID NO: 21882 - DNA, 15 bp, Homo sapiens
catccaggacttagt

SEQ ID NO: 21883 - DNA, 15 bp, Homo sapiens
atccaggacttagtt

SEQ ID NO: 21884 - DNA, 15 bp, Homo sapiens
tccaggacttagttt

SEQ ID NO: 21885 - DNA, 15 bp, Homo sapiens
ccaggacttagttta

SEQ ID NO: 21886 - DNA, 15 bp, Homo sapiens
caggacttagtttaa

SEQ ID NO: 21887 - DNA, 15 bp, Homo sapiens
aggacttagtttaaa

SEQ ID NO: 21888 - DNA, 15 bp, Homo sapiens
ggacttagtttaaat

SEQ ID NO: 21889 - DNA, 15 bp, Homo sapiens
gacttagtttaaatg

SEQ ID NO: 21890 - DNA, 15 bp, Homo sapiens
acttagtttaaatga

SEQ ID NO: 21891 - DNA, 15 bp, Homo sapiens
cttagtttaaatgaa

SEQ ID NO: 21892 - DNA, 15 bp, Homo sapiens
ttagtttaaatgaaa

SEQ ID NO: 21893 - DNA, 15 bp, Homo sapiens
tagtttaaatgaaac

SEQ ID NO: 21894 - DNA, 15 bp, Homo sapiens
agtttaaatgaaacc

SEQ ID NO: 21895 - DNA, 15 bp, Homo sapiens
gtttaaatgaaacct

SEQ ID NO: 21896 - DNA, 15 bp, Homo sapiens
tttaaatgaaacctc

SEQ ID NO: 21897 - DNA, 15 bp, Homo sapiens
ttaaatgaaacctcc

SEQ ID NO: 21898 - DNA, 15 bp, Homo sapiens
taaatgaaacctcct

SEQ ID NO: 21899 - DNA, 15 bp, Homo sapiens
aaatgaaacctcctc

SEQ ID NO: 21900 - DNA, 15 bp, Homo sapiens
aatgaaacctcctca

SEQ ID NO: 21901 - DNA, 15 bp, Homo sapiens
atgaaacctcctcag

SEQ ID NO: 21902 - DNA, 15 bp, Homo sapiens
tgaaacctcctcaga

SEQ ID NO: 21903 - DNA, 15 bp, Homo sapiens
gaaacctcctcagaa

SEQ ID NO: 21904 - DNA, 15 bp, Homo sapiens
aaacctcctcagaaa

SEQ ID NO: 21905 - DNA, 15 bp, Homo sapiens
aacctcctcagaaaa

SEQ ID NO: 21906 - DNA, 15 bp, Homo sapiens
acctcctcagaaaag

SEQ ID NO: 21907 - DNA, 15 bp, Homo sapiens
cctcctcagaaaagt

SEQ ID NO: 21908 - DNA, 15 bp, Homo sapiens
ctcctcagaaaagtc

SEQ ID NO: 21909 - DNA, 15 bp, Homo sapiens
tcctcagaaaagtcc

SEQ ID NO: 21910 - DNA, 15 bp, Homo sapiens
cctcagaaaagtcct

SEQ ID NO: 21911 - DNA, 15 bp, Homo sapiens
ctcagaaaagtcctc

SEQ ID NO: 21912 - DNA, 15 bp, Homo sapiens
tcagaaaagtcctcc

SEQ ID NO: 21913 - DNA, 15 bp, Homo sapiens
cagaaaagtcctccc

SEQ ID NO: 21914 - DNA, 15 bp, Homo sapiens
agaaaagtcctccct

SEQ ID NO: 21915 - DNA, 15 bp, Homo sapiens
gaaaagtcctccctg

SEQ ID NO: 21916 - DNA, 15 bp, Homo sapiens
aaaagtcctccctgt

SEQ ID NO: 21917 - DNA, 15 bp, Homo sapiens
aaagtcctccctgtt

SEQ ID NO: 21918 - DNA, 15 bp, Homo sapiens
aagtcctccctgttc

SEQ ID NO: 21919 - DNA, 15 bp, Homo sapiens
agtcctccctgttcc

SEQ ID NO: 21920 - DNA, 15 bp, Homo sapiens
gtcctccctgttcct

SEQ ID NO: 21921 - DNA, 15 bp, Homo sapiens
tcctccctgttcctt

SEQ ID NO: 21922 - DNA, 15 bp, Homo sapiens
cctccctgttccttt

SEQ ID NO: 21923 - DNA, 15 bp, Homo sapiens
ctccctgttcctttt

SEQ ID NO: 21924 - DNA, 15 bp, Homo sapiens
tccctgttccttttc

SEQ ID NO: 21925 - DNA, 15 bp, Homo sapiens
ccctgttccttttcc

SEQ ID NO: 21926 - DNA, 15 bp, Homo sapiens
cctgttccttttcct

SEQ ID NO: 21927 - DNA, 15 bp, Homo sapiens
ctgttccttttccta

SEQ ID NO: 21928 - DNA, 15 bp, Homo sapiens
tgttccttttcctac

SEQ ID NO: 21929 - DNA, 15 bp, Homo sapiens
gttccttttcctaca

SEQ ID NO: 21930 - DNA, 15 bp, Homo sapiens
ttccttttcctacaa

SEQ ID NO: 21931 - DNA, 15 bp, Homo sapiens
tccttttcctacaaa

SEQ ID NO: 21932 - DNA, 15 bp, Homo sapiens
ccttttcctacaaac

SEQ ID NO: 21933 - DNA, 15 bp, Homo sapiens
cttttcctacaaact

SEQ ID NO: 21934 - DNA, 15 bp, Homo sapiens
ttttcctacaaactc

SEQ ID NO: 21935 - DNA, 15 bp, Homo sapiens
tttcctacaaactct

SEQ ID NO: 21936 - DNA, 15 bp, Homo sapiens
ttcctacaaactctc

SEQ ID NO: 21937 - DNA, 15 bp, Homo sapiens
tcctacaaactctcc

SEQ ID NO: 21938 - DNA, 15 bp, Homo sapiens
cctacaaactctccc

SEQ ID NO: 21939 - DNA, 15 bp, Homo sapiens
ctacaaactctcccc

SEQ ID NO: 21940 - DNA, 15 bp, Homo sapiens
tacaaactctccccc

SEQ ID NO: 21941 - DNA, 15 bp, Homo sapiens
acaaactctccccca

SEQ ID NO: 21942 - DNA, 15 bp, Homo sapiens
caaactctcccccac

SEQ ID NO: 21943 - DNA, 15 bp, Homo sapiens
aaactctcccccacc

SEQ ID NO: 21944 - DNA, 15 bp, Homo sapiens
aactctcccccacct

SEQ ID NO: 21945 - DNA, 15 bp, Homo sapiens
actctcccccacctc

SEQ ID NO: 21946 - DNA, 15 bp, Homo sapiens
ctctcccccacctcc

SEQ ID NO: 21947 - DNA, 15 bp, Homo sapiens
tctcccccacctccc

SEQ ID NO: 21948 - DNA, 15 bp, Homo sapiens
ctcccccacctcccc

SEQ ID NO: 21949 - DNA, 15 bp, Homo sapiens
tcccccacctcccca

SEQ ID NO: 21950 - DNA, 15 bp, Homo sapiens
cccccacctccccac

SEQ ID NO: 21951 - DNA, 15 bp, Homo sapiens
ccccacctccccacc

SEQ ID NO: 21952 - DNA, 15 bp, Homo sapiens
cccacctccccaccg

SEQ ID NO: 21953 - DNA, 15 bp, Homo sapiens
ccacctccccaccgt

SEQ ID NO: 21954 - DNA, 15 bp, Homo sapiens
cacctccccaccgta

SEQ ID NO: 21955 - DNA, 15 bp, Homo sapiens
acctccccaccgtat

SEQ ID NO: 21956 - DNA, 15 bp, Homo sapiens
cctccccaccgtatc

SEQ ID NO: 21957 - DNA, 15 bp, Homo sapiens
ctccccaccgtatct

SEQ ID NO: 21958 - DNA, 15 bp, Homo sapiens
tccccaccgtatctg

SEQ ID NO: 21959 - DNA, 15 bp, Homo sapiens
ccccaccgtatctgc

SEQ ID NO: 21960 - DNA, 15 bp, Homo sapiens
cccaccgtatctgca

SEQ ID NO: 21961 - DNA, 15 bp, Homo sapiens
ccaccgtatctgcat

SEQ ID NO: 21962 - DNA, 15 bp, Homo sapiens
caccgtatctgcata

SEQ ID NO: 21963 - DNA, 15 bp, Homo sapiens
accgtatctgcataa

SEQ ID NO: 21964 - DNA, 15 bp, Homo sapiens
ccgtatctgcataac

SEQ ID NO: 21965 - DNA, 15 bp, Homo sapiens
cgtatctgcataact

SEQ ID NO: 21966 - DNA, 15 bp, Homo sapiens
gtatctgcataactc

SEQ ID NO: 21967 - DNA, 15 bp, Homo sapiens
tatctgcataactct

SEQ ID NO: 21968 - DNA, 15 bp, Homo sapiens
atctgcataactctt

SEQ ID NO: 21969 - DNA, 15 bp, Homo sapiens
tctgcataactcttc

SEQ ID NO: 21970 - DNA, 15 bp, Homo sapiens
ctgcataactcttct

SEQ ID NO: 21971 - DNA, 15 bp, Homo sapiens
tgcataactcttctt

SEQ ID NO: 21972 - DNA, 15 bp, Homo sapiens
gcataactcttcttt

SEQ ID NO: 21973 - DNA, 15 bp, Homo sapiens
cataactcttcttta

SEQ ID NO: 21974 - DNA, 15 bp, Homo sapiens
ataactcttctttat

SEQ ID NO: 21975 - DNA, 15 bp, Homo sapiens
taactcttctttatc

SEQ ID NO: 21976 - DNA, 15 bp, Homo sapiens
aactcttctttatca

SEQ ID NO: 21977 - DNA, 15 bp, Homo sapiens
actcttctttatcat

SEQ ID NO: 21978 - DNA, 15 bp, Homo sapiens
ctcttctttatcatc

SEQ ID NO: 21979 - DNA, 15 bp, Homo sapiens
tcttctttatcatca

SEQ ID NO: 21980 - DNA, 15 bp, Homo sapiens
cttctttatcatcat

SEQ ID NO: 21981 - DNA, 15 bp, Homo sapiens
ttctttatcatcatt

SEQ ID NO: 21982 - DNA, 15 bp, Homo sapiens
tctttatcatcattc

SEQ ID NO: 21983 - DNA, 15 bp, Homo sapiens
ctttatcatcattcg

SEQ ID NO: 21984 - DNA, 15 bp, Homo sapiens
tttatcatcattcgg

SEQ ID NO: 21985 - DNA, 15 bp, Homo sapiens
ttatcatcattcggg

SEQ ID NO: 21986 - DNA, 15 bp, Homo sapiens
tatcatcattcggga

SEQ ID NO: 21987 - DNA, 15 bp, Homo sapiens
atcatcattcgggac

SEQ ID NO: 21988 - DNA, 15 bp, Homo sapiens
tcatcattcgggact

SEQ ID NO: 21989 - DNA, 15 bp, Homo sapiens
catcattcgggactc

SEQ ID NO: 21990 - DNA, 15 bp, Homo sapiens
atcattcgggactca

SEQ ID NO: 21991 - DNA, 15 bp, Homo sapiens
tcattcgggactcac

SEQ ID NO: 21992 - DNA, 15 bp, Homo sapiens
cattcgggactcacc

SEQ ID NO: 21993 - DNA, 15 bp, Homo sapiens
attcgggactcacct

SEQ ID NO: 21994 - DNA, 15 bp, Homo sapiens
ttcgggactcacctc

SEQ ID NO: 21995 - DNA, 15 bp, Homo sapiens
tcgggactcacctcc

SEQ ID NO: 21996 - DNA, 15 bp, Homo sapiens
cgggactcacctcct

SEQ ID NO: 21997 - DNA, 15 bp, Homo sapiens
gggactcacctcctc

SEQ ID NO: 21998 - DNA, 15 bp, Homo sapiens
ggactcacctcctca

SEQ ID NO: 21999 - DNA, 15 bp, Homo sapiens
gactcacctcctcaa

SEQ ID NO: 22000 - DNA, 15 bp, Homo sapiens
actcacctcctcaaa

SEQ ID NO: 22001 - DNA, 15 bp, Homo sapiens
ctcacctcctcaaag

SEQ ID NO: 22002 - DNA, 15 bp, Homo sapiens
tcacctcctcaaagg

SEQ ID NO: 22003 - DNA, 15 bp, Homo sapiens
cacctcctcaaaggc

SEQ ID NO: 22004 - DNA, 15 bp, Homo sapiens
acctcctcaaaggcc

SEQ ID NO: 22005 - DNA, 15 bp, Homo sapiens
cctcctcaaaggccc

SEQ ID NO: 22006 - DNA, 15 bp, Homo sapiens
ctcctcaaaggccct

SEQ ID NO: 22007 - DNA, 15 bp, Homo sapiens
tcctcaaaggccctc

SEQ ID NO: 22008 - DNA, 15 bp, Homo sapiens
cctcaaaggccctcc

SEQ ID NO: 22009 - DNA, 15 bp, Homo sapiens
ctcaaaggccctccc

SEQ ID NO: 22010 - DNA, 15 bp, Homo sapiens
tcaaaggccctccct

SEQ ID NO: 22011 - DNA, 15 bp, Homo sapiens
caaaggccctccctt

SEQ ID NO: 22012 - DNA, 15 bp, Homo sapiens
aaaggccctcccttt

SEQ ID NO: 22013 - DNA, 15 bp, Homo sapiens
aaggccctcccttta

SEQ ID NO: 22014 - DNA, 15 bp, Homo sapiens
aggccctccctttaa

SEQ ID NO: 22015 - DNA, 15 bp, Homo sapiens
ggccctccctttaac

SEQ ID NO: 22016 - DNA, 15 bp, Homo sapiens
gccctccctttaaca

SEQ ID NO: 22017 - DNA, 15 bp, Homo sapiens
ccctccctttaacag

SEQ ID NO: 22018 - DNA, 15 bp, Homo sapiens
cctccctttaacagc

SEQ ID NO: 22019 - DNA, 15 bp, Homo sapiens
ctccctttaacagca

SEQ ID NO: 22020 - DNA, 15 bp, Homo sapiens
tccctttaacagcat

SEQ ID NO: 22021 - DNA, 15 bp, Homo sapiens
ccctttaacagcatg

SEQ ID NO: 22022 - DNA, 15 bp, Homo sapiens
cctttaacagcatgt

SEQ ID NO: 22023 - DNA, 15 bp, Homo sapiens
ctttaacagcatgtc

SEQ ID NO: 22024 - DNA, 15 bp, Homo sapiens
tttaacagcatgtct

SEQ ID NO: 22025 - DNA, 15 bp, Homo sapiens
ttaacagcatgtctg

SEQ ID NO: 22026 - DNA, 15 bp, Homo sapiens
taacagcatgtctga

SEQ ID NO: 22027 - DNA, 15 bp, Homo sapiens
aacagcatgtctgac

SEQ ID NO: 22028 - DNA, 15 bp, Homo sapiens
acagcatgtctgaca

SEQ ID NO: 22029 - DNA, 15 bp, Homo sapiens
cagcatgtctgacac

SEQ ID NO: 22030 - DNA, 15 bp, Homo sapiens
agcatgtctgacaca

SEQ ID NO: 22031 - DNA, 15 bp, Homo sapiens
gcatgtctgacacag

SEQ ID NO: 22032 - DNA, 15 bp, Homo sapiens
catgtctgacacagt

SEQ ID NO: 22033 - DNA, 15 bp, Homo sapiens
atgtctgacacagtc

SEQ ID NO: 22034 - DNA, 15 bp, Homo sapiens
tgtctgacacagtca

SEQ ID NO: 22035 - DNA, 15 bp, Homo sapiens
gtctgacacagtcat

SEQ ID NO: 22036 - DNA, 15 bp, Homo sapiens
tctgacacagtcatt

SEQ ID NO: 22037 - DNA, 15 bp, Homo sapiens
ctgacacagtcattc

SEQ ID NO: 22038 - DNA, 15 bp, Homo sapiens
tgacacagtcattcc

SEQ ID NO: 22039 - DNA, 15 bp, Homo sapiens
gacacagtcattccc

SEQ ID NO: 22040 - DNA, 15 bp, Homo sapiens
acacagtcattccct

SEQ ID NO: 22041 - DNA, 15 bp, Homo sapiens
cacagtcattccctc

SEQ ID NO: 22042 - DNA, 15 bp, Homo sapiens
acagtcattccctcc

SEQ ID NO: 22043 - DNA, 15 bp, Homo sapiens
cagtcattccctccc

SEQ ID NO: 22044 - DNA, 15 bp, Homo sapiens
agtcattccctccca

SEQ ID NO: 22045 - DNA, 15 bp, Homo sapiens
gtcattccctcccaa

SEQ ID NO: 22046 - DNA, 15 bp, Homo sapiens
tcattccctcccaat

SEQ ID NO: 22047 - DNA, 15 bp, Homo sapiens
cattccctcccaatc

SEQ ID NO: 22048 - DNA, 15 bp, Homo sapiens
attccctcccaatct

SEQ ID NO: 22049 - DNA, 15 bp, Homo sapiens
ttccctcccaatcta

SEQ ID NO: 22050 - DNA, 15 bp, Homo sapiens
tccctcccaatctat

SEQ ID NO: 22051 - DNA, 15 bp, Homo sapiens
ccctcccaatctatc

SEQ ID NO: 22052 - DNA, 15 bp, Homo sapiens
cctcccaatctatcc

SEQ ID NO: 22053 - DNA, 15 bp, Homo sapiens
ctcccaatctatccc

SEQ ID NO: 22054 - DNA, 15 bp, Homo sapiens
tcccaatctatcccc

SEQ ID NO: 22055 - DNA, 15 bp, Homo sapiens
cccaatctatcccct

SEQ ID NO: 22056 - DNA, 15 bp, Homo sapiens
ccaatctatcccctt

SEQ ID NO: 22057 - DNA, 15 bp, Homo sapiens
caatctatcccctta

SEQ ID NO: 22058 - DNA, 15 bp, Homo sapiens
aatctatccccttac

SEQ ID NO: 22059 - DNA, 15 bp, Homo sapiens
atctatccccttact

SEQ ID NO: 22060 - DNA, 15 bp, Homo sapiens
tctatccccttactc

SEQ ID NO: 22061 - DNA, 15 bp, Homo sapiens
ctatccccttactcc

SEQ ID NO: 22062 - DNA, 15 bp, Homo sapiens
tatccccttactccc

SEQ ID NO: 22063 - DNA, 15 bp, Homo sapiens
atccccttactccct

SEQ ID NO: 22064 - DNA, 15 bp, Homo sapiens
tccccttactccctt

SEQ ID NO: 22065 - DNA, 15 bp, Homo sapiens
ccccttactcccttc

SEQ ID NO: 22066 - DNA, 15 bp, Homo sapiens
cccttactcccttca

SEQ ID NO: 22067 - DNA, 15 bp, Homo sapiens
ccttactcccttcag

SEQ ID NO: 22068 - DNA, 15 bp, Homo sapiens
cttactcccttcagc

SEQ ID NO: 22069 - DNA, 15 bp, Homo sapiens
ttactcccttcagca

SEQ ID NO: 22070 - DNA, 15 bp, Homo sapiens
tactcccttcagcag

SEQ ID NO: 22071 - DNA, 15 bp, Homo sapiens
actcccttcagcagc

SEQ ID NO: 22072 - DNA, 15 bp, Homo sapiens
ctcccttcagcagct

SEQ ID NO: 22073 - DNA, 15 bp, Homo sapiens
tcccttcagcagcta

SEQ ID NO: 22074 - DNA, 15 bp, Homo sapiens
cccttcagcagctaa

SEQ ID NO: 22075 - DNA, 15 bp, Homo sapiens
ccttcagcagctaac

SEQ ID NO: 22076 - DNA, 15 bp, Homo sapiens
cttcagcagctaact

SEQ ID NO: 22077 - DNA, 15 bp, Homo sapiens
ttcagcagctaactt

SEQ ID NO: 22078 - DNA, 15 bp, Homo sapiens
tcagcagctaacttt

SEQ ID NO: 22079 - DNA, 15 bp, Homo sapiens
cagcagctaactttg

SEQ ID NO: 22080 - DNA, 15 bp, Homo sapiens
agcagctaactttgt

SEQ ID NO: 22081 - DNA, 15 bp, Homo sapiens
gcagctaactttgtc

SEQ ID NO: 22082 - DNA, 15 bp, Homo sapiens
cagctaactttgtcc

SEQ ID NO: 22083 - DNA, 15 bp, Homo sapiens
agctaactttgtccc

SEQ ID NO: 22084 - DNA, 15 bp, Homo sapiens
gctaactttgtccct

SEQ ID NO: 22085 - DNA, 15 bp, Homo sapiens
ctaactttgtcccta

SEQ ID NO: 22086 - DNA, 15 bp, Homo sapiens
taactttgtccctat

SEQ ID NO: 22087 - DNA, 15 bp, Homo sapiens
aactttgtccctatt

SEQ ID NO: 22088 - DNA, 15 bp, Homo sapiens
actttgtccctattt

SEQ ID NO: 22089 - DNA, 15 bp, Homo sapiens
ctttgtccctattta

SEQ ID NO: 22090 - DNA, 15 bp, Homo sapiens
tttgtccctatttat

SEQ ID NO: 22091 - DNA, 15 bp, Homo sapiens
ttgtccctatttatc

SEQ ID NO: 22092 - DNA, 15 bp, Homo sapiens
tgtccctatttatcc

SEQ ID NO: 22093 - DNA, 15 bp, Homo sapiens
gtccctatttatcct

SEQ ID NO: 22094 - DNA, 15 bp, Homo sapiens
tccctatttatccta

SEQ ID NO: 22095 - DNA, 15 bp, Homo sapiens
ccctatttatcctat

SEQ ID NO: 22096 - DNA, 15 bp, Homo sapiens
cctatttatcctatc

SEQ ID NO: 22097 - DNA, 15 bp, Homo sapiens
ctatttatcctatct

SEQ ID NO: 22098 - DNA, 15 bp, Homo sapiens
tatttatcctatctg

SEQ ID NO: 22099 - DNA, 15 bp, Homo sapiens
atttatcctatctgc

SEQ ID NO: 22100 - DNA, 15 bp, Homo sapiens
tttatcctatctgct

SEQ ID NO: 22101 - DNA, 15 bp, Homo sapiens
ttatcctatctgctt

SEQ ID NO: 22102 - DNA, 15 bp, Homo sapiens
tatcctatctgcttg

SEQ ID NO: 22103 - DNA, 15 bp, Homo sapiens
atcctatctgcttgc

SEQ ID NO: 22104 - DNA, 15 bp, Homo sapiens
tcctatctgcttgct

SEQ ID NO: 22105 - DNA, 15 bp, Homo sapiens
cctatctgcttgctt

SEQ ID NO: 22106 - DNA, 15 bp, Homo sapiens
ctatctgcttgcttg

SEQ ID NO: 22107 - DNA, 15 bp, Homo sapiens
tatctgcttgcttgc

SEQ ID NO: 22108 - DNA, 15 bp, Homo sapiens
atctgcttgcttgct

SEQ ID NO: 22109 - DNA, 15 bp, Homo sapiens
tctgcttgcttgctt

SEQ ID NO: 22110 - DNA, 15 bp, Homo sapiens
ctgcttgcttgcttg

SEQ ID NO: 22111 - DNA, 15 bp, Homo sapiens
tgcttgcttgcttgt

SEQ ID NO: 22112 - DNA, 15 bp, Homo sapiens
gcttgcttgcttgtt

SEQ ID NO: 22113 - DNA, 15 bp, Homo sapiens
cttgcttgcttgttt

SEQ ID NO: 22114 - DNA, 15 bp, Homo sapiens
ttgcttgcttgtttt

SEQ ID NO: 22115 - DNA, 15 bp, Homo sapiens
tgcttgcttgttttt

SEQ ID NO: 22116 - DNA, 15 bp, Homo sapiens
gcttgcttgtttttt

SEQ ID NO: 22117 - DNA, 15 bp, Homo sapiens
cttgcttgttttttc

SEQ ID NO: 22118 - DNA, 15 bp, Homo sapiens
ttgcttgttttttca

SEQ ID NO: 22119 - DNA, 15 bp, Homo sapiens
tgcttgttttttcaa

SEQ ID NO: 22120 - DNA, 15 bp, Homo sapiens
gcttgttttttcaaa

SEQ ID NO: 22121 - DNA, 15 bp, Homo sapiens
cttgttttttcaaac

SEQ ID NO: 22122 - DNA, 15 bp, Homo sapiens
ttgttttttcaaact

SEQ ID NO: 22123 - DNA, 15 bp, Homo sapiens
tgttttttcaaactg

SEQ ID NO: 22124 - DNA, 15 bp, Homo sapiens
gttttttcaaactgt

SEQ ID NO: 22125 - DNA, 15 bp, Homo sapiens
ttttttcaaactgtc

SEQ ID NO: 22126 - DNA, 15 bp, Homo sapiens
tttttcaaactgtct

SEQ ID NO: 22127 - DNA, 15 bp, Homo sapiens
ttttcaaactgtctc

SEQ ID NO: 22128 - DNA, 15 bp, Homo sapiens
tttcaaactgtctcc

SEQ ID NO: 22129 - DNA, 15 bp, Homo sapiens
ttcaaactgtctccc

SEQ ID NO: 22130 - DNA, 15 bp, Homo sapiens
tcaaactgtctccca

SEQ ID NO: 22131 - DNA, 15 bp, Homo sapiens
caaactgtctcccat

SEQ ID NO: 22132 - DNA, 15 bp, Homo sapiens
aaactgtctcccata

SEQ ID NO: 22133 - DNA, 15 bp, Homo sapiens
aactgtctcccatag

SEQ ID NO: 22134 - DNA, 15 bp, Homo sapiens
actgtctcccatagg

SEQ ID NO: 22135 - DNA, 15 bp, Homo sapiens
ctgtctcccatagga

SEQ ID NO: 22136 - DNA, 15 bp, Homo sapiens
tgtctcccataggag

SEQ ID NO: 22137 - DNA, 15 bp, Homo sapiens
gtctcccataggagc

SEQ ID NO: 22138 - DNA, 15 bp, Homo sapiens
tctcccataggagcc

SEQ ID NO: 22139 - DNA, 15 bp, Homo sapiens
ctcccataggagcct

SEQ ID NO: 22140 - DNA, 15 bp, Homo sapiens
tcccataggagcctg

SEQ ID NO: 22141 - DNA, 15 bp, Homo sapiens
cccataggagcctgt

SEQ ID NO: 22142 - DNA, 15 bp, Homo sapiens
ccataggagcctgta

SEQ ID NO: 22143 - DNA, 15 bp, Homo sapiens
cataggagcctgtat

SEQ ID NO: 22144 - DNA, 15 bp, Homo sapiens
ataggagcctgtatg

SEQ ID NO: 22145 - DNA, 15 bp, Homo sapiens
taggagcctgtatga

SEQ ID NO: 22146 - DNA, 15 bp, Homo sapiens
aggagcctgtatgaa

SEQ ID NO: 22147 - DNA, 15 bp, Homo sapiens
ggagcctgtatgaat

SEQ ID NO: 22148 - DNA, 15 bp, Homo sapiens
gagcctgtatgaatc

SEQ ID NO: 22149 - DNA, 15 bp, Homo sapiens
agcctgtatgaatcc

SEQ ID NO: 22150 - DNA, 15 bp, Homo sapiens
gcctgtatgaatcct

SEQ ID NO: 22151 - DNA, 15 bp, Homo sapiens
cctgtatgaatcctt

SEQ ID NO: 22152 - DNA, 15 bp, Homo sapiens
ctgtatgaatccttg

SEQ ID NO: 22153 - DNA, 15 bp, Homo sapiens
tgtatgaatccttga

SEQ ID NO: 22154 - DNA, 15 bp, Homo sapiens
gtatgaatccttgag

SEQ ID NO: 22155 - DNA, 15 bp, Homo sapiens
tatgaatccttgagg

SEQ ID NO: 22156 - DNA, 15 bp, Homo sapiens
atgaatccttgaggg

SEQ ID NO: 22157 - DNA, 15 bp, Homo sapiens
tgaatccttgagggt

SEQ ID NO: 22158 - DNA, 15 bp, Homo sapiens
gaatccttgagggta

SEQ ID NO: 22159 - DNA, 15 bp, Homo sapiens
aatccttgagggtag

SEQ ID NO: 22160 - DNA, 15 bp, Homo sapiens
atccttgagggtagg

SEQ ID NO: 22161 - DNA, 15 bp, Homo sapiens
tccttgagggtaggg

SEQ ID NO: 22162 - DNA, 15 bp, Homo sapiens
ccttgagggtagggt

SEQ ID NO: 22163 - DNA, 15 bp, Homo sapiens
cttgagggtagggta

SEQ ID NO: 22164 - DNA, 15 bp, Homo sapiens
ttgagggtagggtag

SEQ ID NO: 22165 - DNA, 15 bp, Homo sapiens
tgagggtagggtaga

SEQ ID NO: 22166 - DNA, 15 bp, Homo sapiens
gagggtagggtagat

SEQ ID NO: 22167 - DNA, 15 bp, Homo sapiens
agggtagggtagatg

SEQ ID NO: 22168 - DNA, 15 bp, Homo sapiens
gggtagggtagatgt

SEQ ID NO: 22169 - DNA, 15 bp, Homo sapiens
ggtagggtagatgtc

SEQ ID NO: 22170 - DNA, 15 bp, Homo sapiens
gtagggtagatgtct

SEQ ID NO: 22171 - DNA, 15 bp, Homo sapiens
tagggtagatgtctg

SEQ ID NO: 22172 - DNA, 15 bp, Homo sapiens
agggtagatgtctgt

SEQ ID NO: 22173 - DNA, 15 bp, Homo sapiens
gggtagatgtctgtc

SEQ ID NO: 22174 - DNA, 15 bp, Homo sapiens
ggtagatgtctgtct

SEQ ID NO: 22175 - DNA, 15 bp, Homo sapiens
gtagatgtctgtctt

SEQ ID NO: 22176 - DNA, 15 bp, Homo sapiens
tagatgtctgtcttg

SEQ ID NO: 22177 - DNA, 15 bp, Homo sapiens
agatgtctgtcttgt

SEQ ID NO: 22178 - DNA, 15 bp, Homo sapiens
gatgtctgtcttgtt

SEQ ID NO: 22179 - DNA, 15 bp, Homo sapiens
atgtctgtcttgttc

SEQ ID NO: 22180 - DNA, 15 bp, Homo sapiens
tgtctgtcttgttca

SEQ ID NO: 22181 - DNA, 15 bp, Homo sapiens
gtctgtcttgttcag

SEQ ID NO: 22182 - DNA, 15 bp, Homo sapiens
tctgtcttgttcagg

SEQ ID NO: 22183 - DNA, 15 bp, Homo sapiens
ctgtcttgttcaggg

SEQ ID NO: 22184 - DNA, 15 bp, Homo sapiens
tgtcttgttcagggc

SEQ ID NO: 22185 - DNA, 15 bp, Homo sapiens
gtcttgttcagggct

SEQ ID NO: 22186 - DNA, 15 bp, Homo sapiens
tcttgttcagggctt

SEQ ID NO: 22187 - DNA, 15 bp, Homo sapiens
cttgttcagggcttt

SEQ ID NO: 22188 - DNA, 15 bp, Homo sapiens
ttgttcagggcttta

SEQ ID NO: 22189 - DNA, 15 bp, Homo sapiens
tgttcagggctttac

SEQ ID NO: 22190 - DNA, 15 bp, Homo sapiens
gttcagggctttaca

SEQ ID NO: 22191 - DNA, 15 bp, Homo sapiens
ttcagggctttacag

SEQ ID NO: 22192 - DNA, 15 bp, Homo sapiens
tcagggctttacagt

SEQ ID NO: 22193 - DNA, 15 bp, Homo sapiens
cagggctttacagtg

SEQ ID NO: 22194 - DNA, 15 bp, Homo sapiens
agggctttacagtgg

SEQ ID NO: 22195 - DNA, 15 bp, Homo sapiens
gggctttacagtgga

SEQ ID NO: 22196 - DNA, 15 bp, Homo sapiens
ggctttacagtggaa

SEQ ID NO: 22197 - DNA, 15 bp, Homo sapiens
gctttacagtggaac

SEQ ID NO: 22198 - DNA, 15 bp, Homo sapiens
ctttacagtggaact

SEQ ID NO: 22199 - DNA, 15 bp, Homo sapiens
tttacagtggaactc

SEQ ID NO: 22200 - DNA, 15 bp, Homo sapiens
ttacagtggaactca

SEQ ID NO: 22201 - DNA, 15 bp, Homo sapiens
tacagtggaactcaa

SEQ ID NO: 22202 - DNA, 15 bp, Homo sapiens
acagtggaactcaat

SEQ ID NO: 22203 - DNA, 15 bp, Homo sapiens
cagtggaactcaata

SEQ ID NO: 22204 - DNA, 15 bp, Homo sapiens
agtggaactcaataa

SEQ ID NO: 22205 - DNA, 15 bp, Homo sapiens
gtggaactcaataaa

SEQ ID NO: 22206 - DNA, 15 bp, Homo sapiens
tggaactcaataaat

SEQ ID NO: 22207 - DNA, 15 bp, Homo sapiens
ggaactcaataaatg

SEQ ID NO: 22208 - DNA, 15 bp, Homo sapiens
gaactcaataaatgg

SEQ ID NO: 22209 - DNA, 15 bp, Homo sapiens
aactcaataaatgga

SEQ ID NO: 22210 - DNA, 15 bp, Homo sapiens
actcaataaatggag

SEQ ID NO: 22211 - DNA, 15 bp, Homo sapiens
ctcaataaatggagg

SEQ ID NO: 22212 - DNA, 15 bp, Homo sapiens
tcaataaatggagga

SEQ ID NO: 22213 - DNA, 15 bp, Homo sapiens
caataaatggaggaa

SEQ ID NO: 22214 - DNA, 15 bp, Homo sapiens
aataaatggaggaat

SEQ ID NO: 22215 - DNA, 15 bp, Homo sapiens
ataaatggaggaata

SEQ ID NO: 22216 - DNA, 15 bp, Homo sapiens
taaatggaggaataa

SEQ ID NO: 22217 - DNA, 15 bp, Homo sapiens
aaatggaggaataaa

SEQ ID NO: 22218 - DNA, 15 bp, Homo sapiens
aatggaggaataaaa

SEQ ID NO: 22219 - DNA, 15 bp, Homo sapiens
atggaggaataaaac

SEQ ID NO: 22220 - DNA, 15 bp, Homo sapiens
tggaggaataaaacc

SEQ ID NO: 22221 - DNA, 15 bp, Homo sapiens
ggaggaataaaaccc

SEQ ID NO: 22222 - DNA, 15 bp, Homo sapiens
gaggaataaaacccc

SEQ ID NO: 22223 - DNA, 15 bp, Homo sapiens
aggaataaaacccca

SEQ ID NO: 22224 - DNA, 15 bp, Homo sapiens
ggaataaaaccccag

SEQ ID NO: 22225 - DNA, 15 bp, Homo sapiens
gaataaaaccccagt

SEQ ID NO: 22226 - DNA, 15 bp, Homo sapiens
aataaaaccccagtt

SEQ ID NO: 22227 - DNA, 15 bp, Homo sapiens
ataaaaccccagtta

SEQ ID NO: 22228 - DNA, 15 bp, Homo sapiens
taaaaccccagttaa

SEQ ID NO: 22229 - DNA, 15 bp, Homo sapiens
aaaaccccagttaaa

SEQ ID NO: 22230 - DNA, 15 bp, Homo sapiens
aaaccccagttaaaa

SEQ ID NO: 22231 - DNA, 15 bp, Homo sapiens
aaccccagttaaaac

SEQ ID NO: 22232 - DNA, 15 bp, Homo sapiens
accccagttaaaaca

SEQ ID NO: 22233 - DNA, 15 bp, Homo sapiens
ccccagttaaaacag

SEQ ID NO: 22234 - DNA, 15 bp, Homo sapiens
cccagttaaaacagt

SEQ ID NO: 22235 - DNA, 15 bp, Homo sapiens
ccagttaaaacagtg

SEQ ID NO: 22236 - DNA, 15 bp, Homo sapiens
cagttaaaacagtgc

SEQ ID NO: 22237 - DNA, 15 bp, Homo sapiens
agttaaaacagtgcc

SEQ ID NO: 22238 - DNA, 15 bp, Homo sapiens
gttaaaacagtgcct

SEQ ID NO: 22239 - DNA, 15 bp, Homo sapiens
ttaaaacagtgccta

SEQ ID NO: 22240 - DNA, 15 bp, Homo sapiens
taaaacagtgcctag

SEQ ID NO: 22241 - DNA, 15 bp, Homo sapiens
aaaacagtgcctagc

SEQ ID NO: 22242 - DNA, 15 bp, Homo sapiens
aaacagtgcctagca

SEQ ID NO: 22243 - DNA, 15 bp, Homo sapiens
aacagtgcctagcac

SEQ ID NO: 22244 - DNA, 15 bp, Homo sapiens
acagtgcctagcacg

SEQ ID NO: 22245 - DNA, 15 bp, Homo sapiens
cagtgcctagcacgt

SEQ ID NO: 22246 - DNA, 15 bp, Homo sapiens
agtgcctagcacgtg

SEQ ID NO: 22247 - DNA, 15 bp, Homo sapiens
gtgcctagcacgtgt

SEQ ID NO: 22248 - DNA, 15 bp, Homo sapiens
tgcctagcacgtgtt

SEQ ID NO: 22249 - DNA, 15 bp, Homo sapiens
gcctagcacgtgttt

SEQ ID NO: 22250 - DNA, 15 bp, Homo sapiens
cctagcacgtgtttg

SEQ ID NO: 22251 - DNA, 15 bp, Homo sapiens
ctagcacgtgtttga

SEQ ID NO: 22252 - DNA, 15 bp, Homo sapiens
tagcacgtgtttgac

SEQ ID NO: 22253 - DNA, 15 bp, Homo sapiens
agcacgtgtttgacc

SEQ ID NO: 22254 - DNA, 15 bp, Homo sapiens
gcacgtgtttgacct

SEQ ID NO: 22255 - DNA, 15 bp, Homo sapiens
cacgtgtttgacctc

SEQ ID NO: 22256 - DNA, 15 bp, Homo sapiens
acgtgtttgacctcc

SEQ ID NO: 22257 - DNA, 15 bp, Homo sapiens
cgtgtttgacctcca

SEQ ID NO: 22258 - DNA, 15 bp, Homo sapiens
gtgtttgacctccat

SEQ ID NO: 22259 - DNA, 15 bp, Homo sapiens
tgtttgacctccatc

SEQ ID NO: 22260 - DNA, 15 bp, Homo sapiens
gtttgacctccatca

SEQ ID NO: 22261 - DNA, 15 bp, Homo sapiens
tttgacctccatcac

SEQ ID NO: 22262 - DNA, 15 bp, Homo sapiens
ttgacctccatcact

SEQ ID NO: 22263 - DNA, 15 bp, Homo sapiens
tgacctccatcactc

SEQ ID NO: 22264 - DNA, 15 bp, Homo sapiens
gacctccatcactct

SEQ ID NO: 22265 - DNA, 15 bp, Homo sapiens
acctccatcactctt

SEQ ID NO: 22266 - DNA, 15 bp, Homo sapiens
cctccatcactcttt

SEQ ID NO: 22267 - DNA, 15 bp, Homo sapiens
ctccatcactctttg

SEQ ID NO: 22268 - DNA, 15 bp, Homo sapiens
tccatcactctttga

SEQ ID NO: 22269 - DNA, 15 bp, Homo sapiens
ccatcactctttgac

SEQ ID NO: 22270 - DNA, 15 bp, Homo sapiens
catcactctttgact

SEQ ID NO: 22271 - DNA, 15 bp, Homo sapiens
atcactctttgactg

SEQ ID NO: 22272 - DNA, 15 bp, Homo sapiens
tcactctttgactga

SEQ ID NO: 22273 - DNA, 15 bp, Homo sapiens
cactctttgactgac

SEQ ID NO: 22274 - DNA, 15 bp, Homo sapiens
actctttgactgact

SEQ ID NO: 22275 - DNA, 15 bp, Homo sapiens
ctctttgactgactg

SEQ ID NO: 22276 - DNA, 15 bp, Homo sapiens
tctttgactgactga

SEQ ID NO: 22277 - DNA, 15 bp, Homo sapiens
ctttgactgactgac

SEQ ID NO: 22278 - DNA, 15 bp, Homo sapiens
tttgactgactgact

SEQ ID NO: 22279 - DNA, 15 bp, Homo sapiens
ttgactgactgactc

SEQ ID NO: 22280 - DNA, 15 bp, Homo sapiens
tgactgactgactca

SEQ ID NO: 22281 - DNA, 15 bp, Homo sapiens
gactgactgactcaa

SEQ ID NO: 22282 - DNA, 15 bp, Homo sapiens
actgactgactcaat

SEQ ID NO: 22283 - DNA, 15 bp, Homo sapiens
ctgactgactcaatg

SEQ ID NO: 22284 - DNA, 15 bp, Homo sapiens
tgactgactcaatgc

SEQ ID NO: 22285 - DNA, 15 bp, Homo sapiens
gactgactcaatgca

SEQ ID NO: 22286 - DNA, 15 bp, Homo sapiens
actgactcaatgcac

SEQ ID NO: 22287 - DNA, 15 bp, Homo sapiens
ctgactcaatgcacc

SEQ ID NO: 22288 - DNA, 15 bp, Homo sapiens
tgactcaatgcaccc

SEQ ID NO: 22289 - DNA, 15 bp, Homo sapiens
gactcaatgcaccct

SEQ ID NO: 22290 - DNA, 15 bp, Homo sapiens
actcaatgcaccctc

SEQ ID NO: 22291 - DNA, 15 bp, Homo sapiens
ctcaatgcaccctcc

SEQ ID NO: 22292 - DNA, 15 bp, Homo sapiens
tcaatgcaccctcct

SEQ ID NO: 22293 - DNA, 15 bp, Homo sapiens
caatgcaccctcctc

SEQ ID NO: 22294 - DNA, 15 bp, Homo sapiens
aatgcaccctcctcc

SEQ ID NO: 22295 - DNA, 15 bp, Homo sapiens
atgcaccctcctccc

SEQ ID NO: 22296 - DNA, 15 bp, Homo sapiens
tgcaccctcctccct

SEQ ID NO: 22297 - DNA, 15 bp, Homo sapiens
gcaccctcctccctg

SEQ ID NO: 22298 - DNA, 15 bp, Homo sapiens
caccctcctccctgt

SEQ ID NO: 22299 - DNA, 15 bp, Homo sapiens
accctcctccctgtc

SEQ ID NO: 22300 - DNA, 15 bp, Homo sapiens
ccctcctccctgtcc

SEQ ID NO: 22301 - DNA, 15 bp, Homo sapiens
cctcctccctgtcct

SEQ ID NO: 22302 - DNA, 15 bp, Homo sapiens
ctcctccctgtcctg

SEQ ID NO: 22303 - DNA, 15 bp, Homo sapiens
tcctccctgtcctgg

SEQ ID NO: 22304 - DNA, 15 bp, Homo sapiens
cctccctgtcctgga

SEQ ID NO: 22305 - DNA, 15 bp, Homo sapiens
ctccctgtcctggag

SEQ ID NO: 22306 - DNA, 15 bp, Homo sapiens
tccctgtcctggaga

SEQ ID NO: 22307 - DNA, 15 bp, Homo sapiens
ccctgtcctggagag

SEQ ID NO: 22308 - DNA, 15 bp, Homo sapiens
cctgtcctggagagc

SEQ ID NO: 22309 - DNA, 15 bp, Homo sapiens
ctgtcctggagagca

SEQ ID NO: 22310 - DNA, 15 bp, Homo sapiens
tgtcctggagagcag

SEQ ID NO: 22311 - DNA, 15 bp, Homo sapiens
gtcctggagagcagg

SEQ ID NO: 22312 - DNA, 15 bp, Homo sapiens
tcctggagagcaggc

SEQ ID NO: 22313 - DNA, 15 bp, Homo sapiens
cctggagagcaggcc

SEQ ID NO: 22314 - DNA, 15 bp, Homo sapiens
ctggagagcaggcct

SEQ ID NO: 22315 - DNA, 15 bp, Homo sapiens
tggagagcaggcctg

SEQ ID NO: 22316 - DNA, 15 bp, Homo sapiens
ggagagcaggcctga

SEQ ID NO: 22317 - DNA, 15 bp, Homo sapiens
gagagcaggcctgag

SEQ ID NO: 22318 - DNA, 15 bp, Homo sapiens
agagcaggcctgagg

SEQ ID NO: 22319 - DNA, 15 bp, Homo sapiens
gagcaggcctgaggg

SEQ ID NO: 22320 - DNA, 15 bp, Homo sapiens
agcaggcctgagggg

SEQ ID NO: 22321 - DNA, 15 bp, Homo sapiens
gcaggcctgaggggt

SEQ ID NO: 22322 - DNA, 15 bp, Homo sapiens
caggcctgaggggtt

SEQ ID NO: 22323 - DNA, 15 bp, Homo sapiens
aggcctgaggggttc

SEQ ID NO: 22324 - DNA, 15 bp, Homo sapiens
ggcctgaggggttcc

SEQ ID NO: 22325 - DNA, 15 bp, Homo sapiens
gcctgaggggttcct

SEQ ID NO: 22326 - DNA, 15 bp, Homo sapiens
cctgaggggttcctg

SEQ ID NO: 22327 - DNA, 15 bp, Homo sapiens
ctgaggggttcctgg

SEQ ID NO: 22328 - DNA, 15 bp, Homo sapiens
tgaggggttcctggg

SEQ ID NO: 22329 - DNA, 15 bp, Homo sapiens
gaggggttcctgggc

SEQ ID NO: 22330 - DNA, 15 bp, Homo sapiens
aggggttcctgggcc

SEQ ID NO: 22331 - DNA, 15 bp, Homo sapiens
ggggttcctgggccg

SEQ ID NO: 22332 - DNA, 15 bp, Homo sapiens
gggttcctgggccgg

SEQ ID NO: 22333 - DNA, 15 bp, Homo sapiens
ggttcctgggccgga

SEQ ID NO: 22334 - DNA, 15 bp, Homo sapiens
gttcctgggccggaa

SEQ ID NO: 22335 - DNA, 15 bp, Homo sapiens
ttcctgggccggaat

SEQ ID NO: 22336 - DNA, 15 bp, Homo sapiens
tcctgggccggaatg

SEQ ID NO: 22337 - DNA, 15 bp, Homo sapiens
cctgggccggaatgc

SEQ ID NO: 22338 - DNA, 15 bp, Homo sapiens
ctgggccggaatgct

SEQ ID NO: 22339 - DNA, 15 bp, Homo sapiens
tgggccggaatgctt

SEQ ID NO: 22340 - DNA, 15 bp, Homo sapiens
gggccggaatgcttg

SEQ ID NO: 22341 - DNA, 15 bp, Homo sapiens
ggccggaatgcttgt

SEQ ID NO: 22342 - DNA, 15 bp, Homo sapiens
gccggaatgcttgtc

SEQ ID NO: 22343 - DNA, 15 bp, Homo sapiens
ccggaatgcttgtcc

SEQ ID NO: 22344 - DNA, 15 bp, Homo sapiens
cggaatgcttgtcct

SEQ ID NO: 22345 - DNA, 15 bp, Homo sapiens
ggaatgcttgtcctc

SEQ ID NO: 22346 - DNA, 15 bp, Homo sapiens
gaatgcttgtcctcc

SEQ ID NO: 22347 - DNA, 15 bp, Homo sapiens
aatgcttgtcctcca

SEQ ID NO: 22348 - DNA, 15 bp, Homo sapiens
atgcttgtcctccat

SEQ ID NO: 22349 - DNA, 15 bp, Homo sapiens
tgcttgtcctccatc

SEQ ID NO: 22350 - DNA, 15 bp, Homo sapiens
gcttgtcctccatcc

SEQ ID NO: 22351 - DNA, 15 bp, Homo sapiens
cttgtcctccatccc

SEQ ID NO: 22352 - DNA, 15 bp, Homo sapiens
ttgtcctccatccca

SEQ ID NO: 22353 - DNA, 15 bp, Homo sapiens
tgtcctccatcccag

SEQ ID NO: 22354 - DNA, 15 bp, Homo sapiens
gtcctccatcccaga

SEQ ID NO: 22355 - DNA, 15 bp, Homo sapiens
tcctccatcccagac

SEQ ID NO: 22356 - DNA, 15 bp, Homo sapiens
cctccatcccagaca

SEQ ID NO: 22357 - DNA, 15 bp, Homo sapiens
ctccatcccagacac

SEQ ID NO: 22358 - DNA, 15 bp, Homo sapiens
tccatcccagacaca

SEQ ID NO: 22359 - DNA, 15 bp, Homo sapiens
ccatcccagacacag

SEQ ID NO: 22360 - DNA, 15 bp, Homo sapiens
catcccagacacagc

SEQ ID NO: 22361 - DNA, 15 bp, Homo sapiens
atcccagacacagcc

SEQ ID NO: 22362 - DNA, 15 bp, Homo sapiens
tcccagacacagccc

SEQ ID NO: 22363 - DNA, 15 bp, Homo sapiens
cccagacacagccct

SEQ ID NO: 22364 - DNA, 15 bp, Homo sapiens
ccagacacagccctg

SEQ ID NO: 22365 - DNA, 15 bp, Homo sapiens
cagacacagccctgc

SEQ ID NO: 22366 - DNA, 15 bp, Homo sapiens
agacacagccctgcg

SEQ ID NO: 22367 - DNA, 15 bp, Homo sapiens
gacacagccctgcgt

SEQ ID NO: 22368 - DNA, 15 bp, Homo sapiens
acacagccctgcgtt

SEQ ID NO: 22369 - DNA, 15 bp, Homo sapiens
cacagccctgcgttg

SEQ ID NO: 22370 - DNA, 15 bp, Homo sapiens
acagccctgcgttgg

SEQ ID NO: 22371 - DNA, 15 bp, Homo sapiens
cagccctgcgttggc

SEQ ID NO: 22372 - DNA, 15 bp, Homo sapiens
agccctgcgttggcg

SEQ ID NO: 22373 - DNA, 15 bp, Homo sapiens
gccctgcgttggcgg

SEQ ID NO: 22374 - DNA, 15 bp, Homo sapiens
ccctgcgttggcgga

SEQ ID NO: 22375 - DNA, 15 bp, Homo sapiens
cctgcgttggcggag

SEQ ID NO: 22376 - DNA, 15 bp, Homo sapiens
ctgcgttggcggagg

SEQ ID NO: 22377 - DNA, 15 bp, Homo sapiens
tgcgttggcggaggt

SEQ ID NO: 22378 - DNA, 15 bp, Homo sapiens
gcgttggcggaggtg

SEQ ID NO: 22379 - DNA, 15 bp, Homo sapiens
cgttggcggaggtgg

SEQ ID NO: 22380 - DNA, 15 bp, Homo sapiens
gttggcggaggtggc

SEQ ID NO: 22381 - DNA, 15 bp, Homo sapiens
ttggcggaggtggcg

SEQ ID NO: 22382 - DNA, 15 bp, Homo sapiens
tggcggaggtggcgc

SEQ ID NO: 22383 - DNA, 15 bp, Homo sapiens
ggcggaggtggcgct

SEQ ID NO: 22384 - DNA, 15 bp, Homo sapiens
gcggaggtggcgctg

SEQ ID NO: 22385 - DNA, 15 bp, Homo sapiens
cggaggtggcgctgg

SEQ ID NO: 22386 - DNA, 15 bp, Homo sapiens
ggaggtggcgctggc

SEQ ID NO: 22387 - DNA, 15 bp, Homo sapiens
gaggtggcgctggct

SEQ ID NO: 22388 - DNA, 15 bp, Homo sapiens
aggtggcgctggctg

SEQ ID NO: 22389 - DNA, 15 bp, Homo sapiens
ggtggcgctggctga

SEQ ID NO: 22390 - DNA, 15 bp, Homo sapiens
gtggcgctggctgac

SEQ ID NO: 22391 - DNA, 15 bp, Homo sapiens
tggcgctggctgaca

SEQ ID NO: 22392 - DNA, 15 bp, Homo sapiens
ggcgctggctgacat

SEQ ID NO: 22393 - DNA, 15 bp, Homo sapiens
gcgctggctgacatt

SEQ ID NO: 22394 - DNA, 15 bp, Homo sapiens
cgctggctgacatta

SEQ ID NO: 22395 - DNA, 15 bp, Homo sapiens
gctggctgacattac

SEQ ID NO: 22396 - DNA, 15 bp, Homo sapiens
ctggctgacattacc

SEQ ID NO: 22397 - DNA, 15 bp, Homo sapiens
tggctgacattacct

SEQ ID NO: 22398 - DNA, 15 bp, Homo sapiens
ggctgacattacctg

SEQ ID NO: 22399 - DNA, 15 bp, Homo sapiens
gctgacattacctgc

SEQ ID NO: 22400 - DNA, 15 bp, Homo sapiens
ctgacattacctgcg

SEQ ID NO: 22401 - DNA, 15 bp, Homo sapiens
tgacattacctgcgc

SEQ ID NO: 22402 - DNA, 15 bp, Homo sapiens
gacattacctgcgcc

SEQ ID NO: 22403 - DNA, 15 bp, Homo sapiens
acattacctgcgcct

SEQ ID NO: 22404 - DNA, 15 bp, Homo sapiens
cattacctgcgcctc

SEQ ID NO: 22405 - DNA, 15 bp, Homo sapiens
attacctgcgcctca

SEQ ID NO: 22406 - DNA, 15 bp, Homo sapiens
ttacctgcgcctcac

SEQ ID NO: 22407 - DNA, 15 bp, Homo sapiens
tacctgcgcctcacc

SEQ ID NO: 22408 - DNA, 15 bp, Homo sapiens
acctgcgcctcaccg

SEQ ID NO: 22409 - DNA, 15 bp, Homo sapiens
cctgcgcctcaccgg

SEQ ID NO: 22410 - DNA, 15 bp, Homo sapiens
ctgcgcctcaccggc

SEQ ID NO: 22411 - DNA, 15 bp, Homo sapiens
tgcgcctcaccggct

SEQ ID NO: 22412 - DNA, 15 bp, Homo sapiens
gcgcctcaccggctt

SEQ ID NO: 22413 - DNA, 15 bp, Homo sapiens
cgcctcaccggcttc

SEQ ID NO: 22414 - DNA, 15 bp, Homo sapiens
gcctcaccggcttca

SEQ ID NO: 22415 - DNA, 15 bp, Homo sapiens
cctcaccggcttcat

SEQ ID NO: 22416 - DNA, 15 bp, Homo sapiens
ctcaccggcttcatg

SEQ ID NO: 22417 - DNA, 15 bp, Homo sapiens
tcaccggcttcatgc

SEQ ID NO: 22418 - DNA, 15 bp, Homo sapiens
caccggcttcatgca

SEQ ID NO: 22419 - DNA, 15 bp, Homo sapiens
accggcttcatgcag

SEQ ID NO: 22420 - DNA, 15 bp, Homo sapiens
ccggcttcatgcagc

SEQ ID NO: 22421 - DNA, 15 bp, Homo sapiens
cggcttcatgcagct

SEQ ID NO: 22422 - DNA, 15 bp, Homo sapiens
ggcttcatgcagctc

SEQ ID NO: 22423 - DNA, 15 bp, Homo sapiens
gcttcatgcagctct

SEQ ID NO: 22424 - DNA, 15 bp, Homo sapiens
cttcatgcagctctt

SEQ ID NO: 22425 - DNA, 15 bp, Homo sapiens
ttcatgcagctcttc

SEQ ID NO: 22426 - DNA, 15 bp, Homo sapiens
tcatgcagctcttca

SEQ ID NO: 22427 - DNA, 15 bp, Homo sapiens
catgcagctcttcag

SEQ ID NO: 22428 - DNA, 15 bp, Homo sapiens
atgcagctcttcagc

SEQ ID NO: 22429 - DNA, 15 bp, Homo sapiens
tgcagctcttcagct

SEQ ID NO: 22430 - DNA, 15 bp, Homo sapiens
gcagctcttcagctg

SEQ ID NO: 22431 - DNA, 15 bp, Homo sapiens
cagctcttcagctgc

SEQ ID NO: 22432 - DNA, 15 bp, Homo sapiens
agctcttcagctgcc

SEQ ID NO: 22433 - DNA, 15 bp, Homo sapiens
gctcttcagctgcct

SEQ ID NO: 22434 - DNA, 15 bp, Homo sapiens
ctcttcagctgcctg

SEQ ID NO: 22435 - DNA, 15 bp, Homo sapiens
tcttcagctgcctgg

SEQ ID NO: 22436 - DNA, 15 bp, Homo sapiens
cttcagctgcctggc

SEQ ID NO: 22437 - DNA, 15 bp, Homo sapiens
ttcagctgcctggcc

SEQ ID NO: 22438 - DNA, 15 bp, Homo sapiens
tcagctgcctggcct

SEQ ID NO: 22439 - DNA, 15 bp, Homo sapiens
cagctgcctggcctc

SEQ ID NO: 22440 - DNA, 15 bp, Homo sapiens
agctgcctggcctca

SEQ ID NO: 22441 - DNA, 15 bp, Homo sapiens
gctgcctggcctcag

SEQ ID NO: 22442 - DNA, 15 bp, Homo sapiens
ctgcctggcctcagc

SEQ ID NO: 22443 - DNA, 15 bp, Homo sapiens
tgcctggcctcagcc

SEQ ID NO: 22444 - DNA, 15 bp, Homo sapiens
gcctggcctcagcct

SEQ ID NO: 22445 - DNA, 15 bp, Homo sapiens
cctggcctcagcctc

SEQ ID NO: 22446 - DNA, 15 bp, Homo sapiens
ctggcctcagcctcc

SEQ ID NO: 22447 - DNA, 15 bp, Homo sapiens
tggcctcagcctcca

SEQ ID NO: 22448 - DNA, 15 bp, Homo sapiens
ggcctcagcctccac

SEQ ID NO: 22449 - DNA, 15 bp, Homo sapiens
gcctcagcctccacg

SEQ ID NO: 22450 - DNA, 15 bp, Homo sapiens
cctcagcctccacgg

SEQ ID NO: 22451 - DNA, 15 bp, Homo sapiens
ctcagcctccacggg

SEQ ID NO: 22452 - DNA, 15 bp, Homo sapiens
tcagcctccacggga

SEQ ID NO: 22453 - DNA, 15 bp, Homo sapiens
cagcctccacgggac

SEQ ID NO: 22454 - DNA, 15 bp, Homo sapiens
agcctccacgggacc

SEQ ID NO: 22455 - DNA, 15 bp, Homo sapiens
gcctccacgggaccc

SEQ ID NO: 22456 - DNA, 15 bp, Homo sapiens
cctccacgggaccct

SEQ ID NO: 22457 - DNA, 15 bp, Homo sapiens
ctccacgggaccctg

SEQ ID NO: 22458 - DNA, 15 bp, Homo sapiens
tccacgggaccctgg

SEQ ID NO: 22459 - DNA, 15 bp, Homo sapiens
ccacgggaccctggc

SEQ ID NO: 22460 - DNA, 15 bp, Homo sapiens
cacgggaccctggca

SEQ ID NO: 22461 - DNA, 15 bp, Homo sapiens
acgggaccctggcac

SEQ ID NO: 22462 - DNA, 15 bp, Homo sapiens
cgggaccctggcact

SEQ ID NO: 22463 - DNA, 15 bp, Homo sapiens
gggaccctggcactc

SEQ ID NO: 22464 - DNA, 15 bp, Homo sapiens
ggaccctggcactcg

SEQ ID NO: 22465 - DNA, 15 bp, Homo sapiens
gaccctggcactcgg

SEQ ID NO: 22466 - DNA, 15 bp, Homo sapiens
accctggcactcggg

SEQ ID NO: 22467 - DNA, 15 bp, Homo sapiens
ccctggcactcgggc

SEQ ID NO: 22468 - DNA, 15 bp, Homo sapiens
cctggcactcgggct

SEQ ID NO: 22469 - DNA, 15 bp, Homo sapiens
ctggcactcgggctg

SEQ ID NO: 22470 - DNA, 15 bp, Homo sapiens
tggcactcgggctgt

SEQ ID NO: 22471 - DNA, 15 bp, Homo sapiens
ggcactcgggctgtg

SEQ ID NO: 22472 - DNA, 15 bp, Homo sapiens
gcactcgggctgtgg

SEQ ID NO: 22473 - DNA, 15 bp, Homo sapiens
cactcgggctgtggc

SEQ ID NO: 22474 - DNA, 15 bp, Homo sapiens
actcgggctgtggct

SEQ ID NO: 22475 - DNA, 15 bp, Homo sapiens
ctcgggctgtggctc

SEQ ID NO: 22476 - DNA, 15 bp, Homo sapiens
tcgggctgtggctcc

SEQ ID NO: 22477 - DNA, 15 bp, Homo sapiens
cgggctgtggctcca

SEQ ID NO: 22478 - DNA, 15 bp, Homo sapiens
gggctgtggctccag

SEQ ID NO: 22479 - DNA, 15 bp, Homo sapiens
ggctgtggctccagc

SEQ ID NO: 22480 - DNA, 15 bp, Homo sapiens
gctgtggctccagct

SEQ ID NO: 22481 - DNA, 15 bp, Homo sapiens
ctgtggctccagctg

SEQ ID NO: 22482 - DNA, 15 bp, Homo sapiens
tgtggctccagctgc

SEQ ID NO: 22483 - DNA, 15 bp, Homo sapiens
gtggctccagctgcg

SEQ ID NO: 22484 - DNA, 15 bp, Homo sapiens
tggctccagctgcgg

SEQ ID NO: 22485 - DNA, 15 bp, Homo sapiens
ggctccagctgcggc

SEQ ID NO: 22486 - DNA, 15 bp, Homo sapiens
gctccagctgcggca

SEQ ID NO: 22487 - DNA, 15 bp, Homo sapiens
ctccagctgcggcag

SEQ ID NO: 22488 - DNA, 15 bp, Homo sapiens
tccagctgcggcagc

SEQ ID NO: 22489 - DNA, 15 bp, Homo sapiens
ccagctgcggcagct

SEQ ID NO: 22490 - DNA, 15 bp, Homo sapiens
cagctgcggcagctg

SEQ ID NO: 22491 - DNA, 15 bp, Homo sapiens
agctgcggcagctgc

SEQ ID NO: 22492 - DNA, 15 bp, Homo sapiens
gctgcggcagctgct

SEQ ID NO: 22493 - DNA, 15 bp, Homo sapiens
ctgcggcagctgctg

SEQ ID NO: 22494 - DNA, 15 bp, Homo sapiens
tgcggcagctgctgc

SEQ ID NO: 22495 - DNA, 15 bp, Homo sapiens
gcggcagctgctgct

SEQ ID NO: 22496 - DNA, 15 bp, Homo sapiens
cggcagctgctgctg

SEQ ID NO: 22497 - DNA, 15 bp, Homo sapiens
ggcagctgctgctgc

SEQ ID NO: 22498 - DNA, 15 bp, Homo sapiens
gcagctgctgctgct

SEQ ID NO: 22499 - DNA, 15 bp, Homo sapiens
cagctgctgctgctg

SEQ ID NO: 22500 - DNA, 15 bp, Homo sapiens
agctgctgctgctgg

SEQ ID NO: 22501 - DNA, 15 bp, Homo sapiens
gctgctgctgctggg

SEQ ID NO: 22502 - DNA, 15 bp, Homo sapiens
ctgctgctgctgggg

SEQ ID NO: 22503 - DNA, 15 bp, Homo sapiens
tgctgctgctggggc

SEQ ID NO: 22504 - DNA, 15 bp, Homo sapiens
gctgctgctggggca

SEQ ID NO: 22505 - DNA, 15 bp, Homo sapiens
ctgctgctggggcag

SEQ ID NO: 22506 - DNA, 15 bp, Homo sapiens
tgctgctggggcagc

SEQ ID NO: 22507 - DNA, 15 bp, Homo sapiens
gctgctggggcagcc

SEQ ID NO: 22508 - DNA, 15 bp, Homo sapiens
ctgctggggcagccc

SEQ ID NO: 22509 - DNA, 15 bp, Homo sapiens
tgctggggcagccct

SEQ ID NO: 22510 - DNA, 15 bp, Homo sapiens
gctggggcagccctt

SEQ ID NO: 22511 - DNA, 15 bp, Homo sapiens
ctggggcagcccttc

SEQ ID NO: 22512 - DNA, 15 bp, Homo sapiens
tggggcagcccttcg

SEQ ID NO: 22513 - DNA, 15 bp, Homo sapiens
ggggcagcccttcgg

SEQ ID NO: 22514 - DNA, 15 bp, Homo sapiens
gggcagcccttcggc

SEQ ID NO: 22515 - DNA, 15 bp, Homo sapiens
ggcagcccttcggca

SEQ ID NO: 22516 - DNA, 15 bp, Homo sapiens
gcagcccttcggcat

SEQ ID NO: 22517 - DNA, 15 bp, Homo sapiens
cagcccttcggcatc

SEQ ID NO: 22518 - DNA, 15 bp, Homo sapiens
agcccttcggcatca

SEQ ID NO: 22519 - DNA, 15 bp, Homo sapiens
gcccttcggcatcag

SEQ ID NO: 22520 - DNA, 15 bp, Homo sapiens
cccttcggcatcagt

SEQ ID NO: 22521 - DNA, 15 bp, Homo sapiens
ccttcggcatcagtg

SEQ ID NO: 22522 - DNA, 15 bp, Homo sapiens
cttcggcatcagtgg

SEQ ID NO: 22523 - DNA, 15 bp, Homo sapiens
ttcggcatcagtggg

SEQ ID NO: 22524 - DNA, 15 bp, Homo sapiens
tcggcatcagtgggt

SEQ ID NO: 22525 - DNA, 15 bp, Homo sapiens
cggcatcagtgggtg

SEQ ID NO: 22526 - DNA, 15 bp, Homo sapiens
ggcatcagtgggtgt

SEQ ID NO: 22527 - DNA, 15 bp, Homo sapiens
gcatcagtgggtgtg

SEQ ID NO: 22528 - DNA, 15 bp, Homo sapiens
catcagtgggtgtgg

SEQ ID NO: 22529 - DNA, 15 bp, Homo sapiens
atcagtgggtgtggg

SEQ ID NO: 22530 - DNA, 15 bp, Homo sapiens
tcagtgggtgtggga

SEQ ID NO: 22531 - DNA, 15 bp, Homo sapiens
cagtgggtgtgggag

SEQ ID NO: 22532 - DNA, 15 bp, Homo sapiens
agtgggtgtgggagc

SEQ ID NO: 22533 - DNA, 15 bp, Homo sapiens
gtgggtgtgggagcg

SEQ ID NO: 22534 - DNA, 15 bp, Homo sapiens
tgggtgtgggagcgg

SEQ ID NO: 22535 - DNA, 15 bp, Homo sapiens
gggtgtgggagcggg

SEQ ID NO: 22536 - DNA, 15 bp, Homo sapiens
ggtgtgggagcgggt

SEQ ID NO: 22537 - DNA, 15 bp, Homo sapiens
gtgtgggagcgggtg

SEQ ID NO: 22538 - DNA, 15 bp, Homo sapiens
tgtgggagcgggtgc

SEQ ID NO: 22539 - DNA, 15 bp, Homo sapiens
gtgggagcgggtgcg

SEQ ID NO: 22540 - DNA, 15 bp, Homo sapiens
tgggagcgggtgcga

SEQ ID NO: 22541 - DNA, 15 bp, Homo sapiens
gggagcgggtgcgat

SEQ ID NO: 22542 - DNA, 15 bp, Homo sapiens
ggagcgggtgcgatc

SEQ ID NO: 22543 - DNA, 15 bp, Homo sapiens
gagcgggtgcgatcc

SEQ ID NO: 22544 - DNA, 15 bp, Homo sapiens
agcgggtgcgatccg

SEQ ID NO: 22545 - DNA, 15 bp, Homo sapiens
gcgggtgcgatccgg

SEQ ID NO: 22546 - DNA, 15 bp, Homo sapiens
cgggtgcgatccgga

SEQ ID NO: 22547 - DNA, 15 bp, Homo sapiens
gggtgcgatccggag

SEQ ID NO: 22548 - DNA, 15 bp, Homo sapiens
ggtgcgatccggagc

SEQ ID NO: 22549 - DNA, 15 bp, Homo sapiens
gtgcgatccggagca

SEQ ID NO: 22550 - DNA, 15 bp, Homo sapiens
tgcgatccggagcag

SEQ ID NO: 22551 - DNA, 15 bp, Homo sapiens
gcgatccggagcagg

SEQ ID NO: 22552 - DNA, 15 bp, Homo sapiens
cgatccggagcagga

SEQ ID NO: 22553 - DNA, 15 bp, Homo sapiens
gatccggagcaggac

SEQ ID NO: 22554 - DNA, 15 bp, Homo sapiens
atccggagcaggact

SEQ ID NO: 22555 - DNA, 15 bp, Homo sapiens
tccggagcaggactg

SEQ ID NO: 22556 - DNA, 15 bp, Homo sapiens
ccggagcaggactgt

SEQ ID NO: 22557 - DNA, 15 bp, Homo sapiens
cggagcaggactgtg

SEQ ID NO: 22558 - DNA, 15 bp, Homo sapiens
ggagcaggactgtgt

SEQ ID NO: 22559 - DNA, 15 bp, Homo sapiens
gagcaggactgtgta

SEQ ID NO: 22560 - DNA, 15 bp, Homo sapiens
agcaggactgtgtag

SEQ ID NO: 22561 - DNA, 15 bp, Homo sapiens
gcaggactgtgtagt

SEQ ID NO: 22562 - DNA, 15 bp, Homo sapiens
caggactgtgtagtt

SEQ ID NO: 22563 - DNA, 15 bp, Homo sapiens
aggactgtgtagttg

SEQ ID NO: 22564 - DNA, 15 bp, Homo sapiens
ggactgtgtagttgc

SEQ ID NO: 22565 - DNA, 15 bp, Homo sapiens
gactgtgtagttgcg

SEQ ID NO: 22566 - DNA, 15 bp, Homo sapiens
actgtgtagttgcgg

SEQ ID NO: 22567 - DNA, 15 bp, Homo sapiens
ctgtgtagttgcggc

SEQ ID NO: 22568 - DNA, 15 bp, Homo sapiens
tgtgtagttgcggcc

SEQ ID NO: 22569 - DNA, 15 bp, Homo sapiens
gtgtagttgcggccg

SEQ ID NO: 22570 - DNA, 15 bp, Homo sapiens
tgtagttgcggccgt

SEQ ID NO: 22571 - DNA, 15 bp, Homo sapiens
gtagttgcggccgtg

SEQ ID NO: 22572 - DNA, 15 bp, Homo sapiens
tagttgcggccgtgg

SEQ ID NO: 22573 - DNA, 15 bp, Homo sapiens
agttgcggccgtggt

SEQ ID NO: 22574 - DNA, 15 bp, Homo sapiens
gttgcggccgtggtt

SEQ ID NO: 22575 - DNA, 15 bp, Homo sapiens
ttgcggccgtggttg

SEQ ID NO: 22576 - DNA, 15 bp, Homo sapiens
tgcggccgtggttgt

SEQ ID NO: 22577 - DNA, 15 bp, Homo sapiens
gcggccgtggttgtt

SEQ ID NO: 22578 - DNA, 15 bp, Homo sapiens
cggccgtggttgttg

SEQ ID NO: 22579 - DNA, 15 bp, Homo sapiens
ggccgtggttgttgg

SEQ ID NO: 22580 - DNA, 15 bp, Homo sapiens
gccgtggttgttggc

SEQ ID NO: 22581 - DNA, 15 bp, Homo sapiens
ccgtggttgttggcc

SEQ ID NO: 22582 - DNA, 15 bp, Homo sapiens
cgtggttgttggccc

SEQ ID NO: 22583 - DNA, 15 bp, Homo sapiens
gtggttgttggccca

SEQ ID NO: 22584 - DNA, 15 bp, Homo sapiens
tggttgttggcccag

SEQ ID NO: 22585 - DNA, 15 bp, Homo sapiens
ggttgttggcccaga

SEQ ID NO: 22586 - DNA, 15 bp, Homo sapiens
gttgttggcccagaa

SEQ ID NO: 22587 - DNA, 15 bp, Homo sapiens
ttgttggcccagaaa

SEQ ID NO: 22588 - DNA, 15 bp, Homo sapiens
tgttggcccagaaag

SEQ ID NO: 22589 - DNA, 15 bp, Homo sapiens
gttggcccagaaagt

SEQ ID NO: 22590 - DNA, 15 bp, Homo sapiens
ttggcccagaaagtg

SEQ ID NO: 22591 - DNA, 15 bp, Homo sapiens
tggcccagaaagtgc

SEQ ID NO: 22592 - DNA, 15 bp, Homo sapiens
ggcccagaaagtgcc

SEQ ID NO: 22593 - DNA, 15 bp, Homo sapiens
gcccagaaagtgccc

SEQ ID NO: 22594 - DNA, 15 bp, Homo sapiens
cccagaaagtgccct

SEQ ID NO: 22595 - DNA, 15 bp, Homo sapiens
ccagaaagtgccctc

SEQ ID NO: 22596 - DNA, 15 bp, Homo sapiens
cagaaagtgccctca

SEQ ID NO: 22597 - DNA, 15 bp, Homo sapiens
agaaagtgccctcag

SEQ ID NO: 22598 - DNA, 15 bp, Homo sapiens
gaaagtgccctcagg

SEQ ID NO: 22599 - DNA, 15 bp, Homo sapiens
aaagtgccctcaggg

SEQ ID NO: 22600 - DNA, 15 bp, Homo sapiens
aagtgccctcagggg

SEQ ID NO: 22601 - DNA, 15 bp, Homo sapiens
agtgccctcaggggt

SEQ ID NO: 22602 - DNA, 15 bp, Homo sapiens
gtgccctcaggggtc

SEQ ID NO: 22603 - DNA, 15 bp, Homo sapiens
tgccctcaggggtct

SEQ ID NO: 22604 - DNA, 15 bp, Homo sapiens
gccctcaggggtctc

SEQ ID NO: 22605 - DNA, 15 bp, Homo sapiens
ccctcaggggtctca

SEQ ID NO: 22606 - DNA, 15 bp, Homo sapiens
cctcaggggtctcat

SEQ ID NO: 22607 - DNA, 15 bp, Homo sapiens
ctcaggggtctcata

SEQ ID NO: 22608 - DNA, 15 bp, Homo sapiens
tcaggggtctcatag

SEQ ID NO: 22609 - DNA, 15 bp, Homo sapiens
caggggtctcatagc

SEQ ID NO: 22610 - DNA, 15 bp, Homo sapiens
aggggtctcatagcg

SEQ ID NO: 22611 - DNA, 15 bp, Homo sapiens
ggggtctcatagcgc

SEQ ID NO: 22612 - DNA, 15 bp, Homo sapiens
gggtctcatagcgca

SEQ ID NO: 22613 - DNA, 15 bp, Homo sapiens
ggtctcatagcgcac

SEQ ID NO: 22614 - DNA, 15 bp, Homo sapiens
gtctcatagcgcacc

SEQ ID NO: 22615 - DNA, 15 bp, Homo sapiens
tctcatagcgcacca

SEQ ID NO: 22616 - DNA, 15 bp, Homo sapiens
ctcatagcgcaccac

SEQ ID NO: 22617 - DNA, 15 bp, Homo sapiens
tcatagcgcaccacg

SEQ ID NO: 22618 - DNA, 15 bp, Homo sapiens
catagcgcaccacga

SEQ ID NO: 22619 - DNA, 15 bp, Homo sapiens
atagcgcaccacgaa

SEQ ID NO: 22620 - DNA, 15 bp, Homo sapiens
tagcgcaccacgaag

SEQ ID NO: 22621 - DNA, 15 bp, Homo sapiens
agcgcaccacgaagt

SEQ ID NO: 22622 - DNA, 15 bp, Homo sapiens
gcgcaccacgaagtc

SEQ ID NO: 22623 - DNA, 15 bp, Homo sapiens
cgcaccacgaagtcg

SEQ ID NO: 22624 - DNA, 15 bp, Homo sapiens
gcaccacgaagtcga

SEQ ID NO: 22625 - DNA, 15 bp, Homo sapiens
caccacgaagtcgag

SEQ ID NO: 22626 - DNA, 15 bp, Homo sapiens
accacgaagtcgagg

SEQ ID NO: 22627 - DNA, 15 bp, Homo sapiens
ccacgaagtcgaggc

SEQ ID NO: 22628 - DNA, 15 bp, Homo sapiens
cacgaagtcgaggcg

SEQ ID NO: 22629 - DNA, 15 bp, Homo sapiens
acgaagtcgaggcgc

SEQ ID NO: 22630 - DNA, 15 bp, Homo sapiens
cgaagtcgaggcgcg

SEQ ID NO: 22631 - DNA, 15 bp, Homo sapiens
gaagtcgaggcgcgc

SEQ ID NO: 22632 - DNA, 15 bp, Homo sapiens
aagtcgaggcgcgcc

SEQ ID NO: 22633 - DNA, 15 bp, Homo sapiens
agtcgaggcgcgccc

SEQ ID NO: 22634 - DNA, 15 bp, Homo sapiens
gtcgaggcgcgcccc

SEQ ID NO: 22635 - DNA, 15 bp, Homo sapiens
tcgaggcgcgcccca

SEQ ID NO: 22636 - DNA, 15 bp, Homo sapiens
cgaggcgcgccccat

SEQ ID NO: 22637 - DNA, 15 bp, Homo sapiens
gaggcgcgccccatc

SEQ ID NO: 22638 - DNA, 15 bp, Homo sapiens
aggcgcgccccatcg

SEQ ID NO: 22639 - DNA, 15 bp, Homo sapiens
ggcgcgccccatcgc

SEQ ID NO: 22640 - DNA, 15 bp, Homo sapiens
gcgcgccccatcgcc

SEQ ID NO: 22641 - DNA, 15 bp, Homo sapiens
cgcgccccatcgccc

SEQ ID NO: 22642 - DNA, 15 bp, Homo sapiens
gcgccccatcgcccg

SEQ ID NO: 22643 - DNA, 15 bp, Homo sapiens
cgccccatcgcccgc

SEQ ID NO: 22644 - DNA, 15 bp, Homo sapiens
gccccatcgcccgcg

SEQ ID NO: 22645 - DNA, 15 bp, Homo sapiens
ccccatcgcccgcgc

SEQ ID NO: 22646 - DNA, 15 bp, Homo sapiens
cccatcgcccgcgcc

SEQ ID NO: 22647 - DNA, 15 bp, Homo sapiens
ccatcgcccgcgccc

SEQ ID NO: 22648 - DNA, 15 bp, Homo sapiens
catcgcccgcgccct

SEQ ID NO: 22649 - DNA, 15 bp, Homo sapiens
atcgcccgcgccctc

SEQ ID NO: 22650 - DNA, 15 bp, Homo sapiens
tcgcccgcgccctca

SEQ ID NO: 22651 - DNA, 15 bp, Homo sapiens
cgcccgcgccctcag

SEQ ID NO: 22652 - DNA, 15 bp, Homo sapiens
gcccgcgccctcagc

SEQ ID NO: 22653 - DNA, 15 bp, Homo sapiens
cccgcgccctcagca

SEQ ID NO: 22654 - DNA, 15 bp, Homo sapiens
ccgcgccctcagcaa

SEQ ID NO: 22655 - DNA, 15 bp, Homo sapiens
cgcgccctcagcaaa

SEQ ID NO: 22656 - DNA, 15 bp, Homo sapiens
gcgccctcagcaaag

SEQ ID NO: 22657 - DNA, 15 bp, Homo sapiens
cgccctcagcaaagg

SEQ ID NO: 22658 - DNA, 15 bp, Homo sapiens
gccctcagcaaaggg

SEQ ID NO: 22659 - DNA, 15 bp, Homo sapiens
ccctcagcaaagggc

SEQ ID NO: 22660 - DNA, 15 bp, Homo sapiens
cctcagcaaagggca

SEQ ID NO: 22661 - DNA, 15 bp, Homo sapiens
ctcagcaaagggcag

SEQ ID NO: 22662 - DNA, 15 bp, Homo sapiens
tcagcaaagggcagc

SEQ ID NO: 22663 - DNA, 15 bp, Homo sapiens
cagcaaagggcagct

SEQ ID NO: 22664 - DNA, 15 bp, Homo sapiens
agcaaagggcagctg

SEQ ID NO: 22665 - DNA, 15 bp, Homo sapiens
gcaaagggcagctgg

SEQ ID NO: 22666 - DNA, 15 bp, Homo sapiens
caaagggcagctgga

SEQ ID NO: 22667 - DNA, 15 bp, Homo sapiens
aaagggcagctggaa

SEQ ID NO: 22668 - DNA, 15 bp, Homo sapiens
aagggcagctggaag

SEQ ID NO: 22669 - DNA, 15 bp, Homo sapiens
agggcagctggaagg

SEQ ID NO: 22670 - DNA, 15 bp, Homo sapiens
gggcagctggaaggc

SEQ ID NO: 22671 - DNA, 15 bp, Homo sapiens
ggcagctggaaggca

SEQ ID NO: 22672 - DNA, 15 bp, Homo sapiens
gcagctggaaggcaa

SEQ ID NO: 22673 - DNA, 15 bp, Homo sapiens
cagctggaaggcaaa

SEQ ID NO: 22674 - DNA, 15 bp, Homo sapiens
agctggaaggcaaag

SEQ ID NO: 22675 - DNA, 15 bp, Homo sapiens
gctggaaggcaaagc

SEQ ID NO: 22676 - DNA, 15 bp, Homo sapiens
ctggaaggcaaagcg

SEQ ID NO: 22677 - DNA, 15 bp, Homo sapiens
tggaaggcaaagcgg

SEQ ID NO: 22678 - DNA, 15 bp, Homo sapiens
ggaaggcaaagcggt

SEQ ID NO: 22679 - DNA, 15 bp, Homo sapiens
gaaggcaaagcggtc

SEQ ID NO: 22680 - DNA, 15 bp, Homo sapiens
aaggcaaagcggtcg

SEQ ID NO: 22681 - DNA, 15 bp, Homo sapiens
aggcaaagcggtcgg

SEQ ID NO: 22682 - DNA, 15 bp, Homo sapiens
ggcaaagcggtcggt

SEQ ID NO: 22683 - DNA, 15 bp, Homo sapiens
gcaaagcggtcggtg

SEQ ID NO: 22684 - DNA, 15 bp, Homo sapiens
caaagcggtcggtgc

SEQ ID NO: 22685 - DNA, 15 bp, Homo sapiens
aaagcggtcggtgcg

SEQ ID NO: 22686 - DNA, 15 bp, Homo sapiens
aagcggtcggtgcgg

SEQ ID NO: 22687 - DNA, 15 bp, Homo sapiens
agcggtcggtgcggc

SEQ ID NO: 22688 - DNA, 15 bp, Homo sapiens
gcggtcggtgcggcc

SEQ ID NO: 22689 - DNA, 15 bp, Homo sapiens
cggtcggtgcggccg

SEQ ID NO: 22690 - DNA, 15 bp, Homo sapiens
ggtcggtgcggccgc

SEQ ID NO: 22691 - DNA, 15 bp, Homo sapiens
gtcggtgcggccgcc

SEQ ID NO: 22692 - DNA, 15 bp, Homo sapiens
tcggtgcggccgccg

SEQ ID NO: 22693 - DNA, 15 bp, Homo sapiens
cggtgcggccgccgt

SEQ ID NO: 22694 - DNA, 15 bp, Homo sapiens
ggtgcggccgccgtc

SEQ ID NO: 22695 - DNA, 15 bp, Homo sapiens
gtgcggccgccgtcg

SEQ ID NO: 22696 - DNA, 15 bp, Homo sapiens
tgcggccgccgtcgt

SEQ ID NO: 22697 - DNA, 15 bp, Homo sapiens
gcggccgccgtcgtc

SEQ ID NO: 22698 - DNA, 15 bp, Homo sapiens
cggccgccgtcgtcg

SEQ ID NO: 22699 - DNA, 15 bp, Homo sapiens
ggccgccgtcgtcgg

SEQ ID NO: 22700 - DNA, 15 bp, Homo sapiens
gccgccgtcgtcggg

SEQ ID NO: 22701 - DNA, 15 bp, Homo sapiens
ccgccgtcgtcgggc

SEQ ID NO: 22702 - DNA, 15 bp, Homo sapiens
cgccgtcgtcgggcg

SEQ ID NO: 22703 - DNA, 15 bp, Homo sapiens
gccgtcgtcgggcga

SEQ ID NO: 22704 - DNA, 15 bp, Homo sapiens
ccgtcgtcgggcgag

SEQ ID NO: 22705 - DNA, 15 bp, Homo sapiens
cgtcgtcgggcgagg

SEQ ID NO: 22706 - DNA, 15 bp, Homo sapiens
gtcgtcgggcgagga

SEQ ID NO: 22707 - DNA, 15 bp, Homo sapiens
tcgtcgggcgaggag

SEQ ID NO: 22708 - DNA, 15 bp, Homo sapiens
cgtcgggcgaggagg

SEQ ID NO: 22709 - DNA, 15 bp, Homo sapiens
gtcgggcgaggaggc

SEQ ID NO: 22710 - DNA, 15 bp, Homo sapiens
tcgggcgaggaggcg

SEQ ID NO: 22711 - DNA, 15 bp, Homo sapiens
cgggcgaggaggcgg

SEQ ID NO: 22712 - DNA, 15 bp, Homo sapiens
gggcgaggaggcgga

SEQ ID NO: 22713 - DNA, 15 bp, Homo sapiens
ggcgaggaggcggat

SEQ ID NO: 22714 - DNA, 15 bp, Homo sapiens
gcgaggaggcggatg

SEQ ID NO: 22715 - DNA, 15 bp, Homo sapiens
cgaggaggcggatgc

SEQ ID NO: 22716 - DNA, 15 bp, Homo sapiens
gaggaggcggatgcc

SEQ ID NO: 22717 - DNA, 15 bp, Homo sapiens
aggaggcggatgcct

SEQ ID NO: 22718 - DNA, 15 bp, Homo sapiens
ggaggcggatgcctg

SEQ ID NO: 22719 - DNA, 15 bp, Homo sapiens
gaggcggatgcctgg

SEQ ID NO: 22720 - DNA, 15 bp, Homo sapiens
aggcggatgcctggc

SEQ ID NO: 22721 - DNA, 15 bp, Homo sapiens
ggcggatgcctggcc

SEQ ID NO: 22722 - DNA, 15 bp, Homo sapiens
gcggatgcctggccg

SEQ ID NO: 22723 - DNA, 15 bp, Homo sapiens
cggatgcctggccgg

SEQ ID NO: 22724 - DNA, 15 bp, Homo sapiens
ggatgcctggccggg

SEQ ID NO: 22725 - DNA, 15 bp, Homo sapiens
gatgcctggccggga

SEQ ID NO: 22726 - DNA, 15 bp, Homo sapiens
atgcctggccgggac

SEQ ID NO: 22727 - DNA, 15 bp, Homo sapiens
tgcctggccgggacc

SEQ ID NO: 22728 - DNA, 15 bp, Homo sapiens
gcctggccgggaccc

SEQ ID NO: 22729 - DNA, 15 bp, Homo sapiens
cctggccgggaccca

SEQ ID NO: 22730 - DNA, 15 bp, Homo sapiens
ctggccgggacccag

SEQ ID NO: 22731 - DNA, 15 bp, Homo sapiens
tggccgggacccagg

SEQ ID NO: 22732 - DNA, 15 bp, Homo sapiens
ggccgggacccaggc

SEQ ID NO: 22733 - DNA, 15 bp, Homo sapiens
gccgggacccaggcc

SEQ ID NO: 22734 - DNA, 15 bp, Homo sapiens
ccgggacccaggccg

SEQ ID NO: 22735 - DNA, 15 bp, Homo sapiens
cgggacccaggccga

SEQ ID NO: 22736 - DNA, 15 bp, Homo sapiens
gggacccaggccgag

SEQ ID NO: 22737 - DNA, 15 bp, Homo sapiens
ggacccaggccgagc

SEQ ID NO: 22738 - DNA, 15 bp, Homo sapiens
gacccaggccgagcc

SEQ ID NO: 22739 - DNA, 15 bp, Homo sapiens
acccaggccgagccc

SEQ ID NO: 22740 - DNA, 15 bp, Homo sapiens
cccaggccgagcccc

SEQ ID NO: 22741 - DNA, 15 bp, Homo sapiens
ccaggccgagccccg

SEQ ID NO: 22742 - DNA, 15 bp, Homo sapiens
caggccgagccccgg

SEQ ID NO: 22743 - DNA, 15 bp, Homo sapiens
aggccgagccccgga

SEQ ID NO: 22744 - DNA, 15 bp, Homo sapiens
ggccgagccccggat

SEQ ID NO: 22745 - DNA, 15 bp, Homo sapiens
gccgagccccggatc

SEQ ID NO: 22746 - DNA, 15 bp, Homo sapiens
ccgagccccggatcc

SEQ ID NO: 22747 - DNA, 15 bp, Homo sapiens
cgagccccggatcca

SEQ ID NO: 22748 - DNA, 15 bp, Homo sapiens
gagccccggatccag

SEQ ID NO: 22749 - DNA, 15 bp, Homo sapiens
agccccggatccagg

SEQ ID NO: 22750 - DNA, 15 bp, Homo sapiens
gccccggatccagga

SEQ ID NO: 22751 - DNA, 15 bp, Homo sapiens
ccccggatccaggat

SEQ ID NO: 22752 - DNA, 15 bp, Homo sapiens
cccggatccaggatg

SEQ ID NO: 22753 - DNA, 15 bp, Homo sapiens
ccggatccaggatgg

SEQ ID NO: 22754 - DNA, 15 bp, Homo sapiens
cggatccaggatggg

SEQ ID NO: 22755 - DNA, 15 bp, Homo sapiens
ggatccaggatggga

SEQ ID NO: 22756 - DNA, 15 bp, Homo sapiens
gatccaggatgggat

SEQ ID NO: 22757 - DNA, 15 bp, Homo sapiens
atccaggatgggatc

SEQ ID NO: 22758 - DNA, 15 bp, Homo sapiens
tccaggatgggatct

SEQ ID NO: 22759 - DNA, 15 bp, Homo sapiens
ccaggatgggatctc

SEQ ID NO: 22760 - DNA, 15 bp, Homo sapiens
caggatgggatctcc

SEQ ID NO: 22761 - DNA, 15 bp, Homo sapiens
aggatgggatctcct

SEQ ID NO: 22762 - DNA, 15 bp, Homo sapiens
ggatgggatctcctg

SEQ ID NO: 22763 - DNA, 15 bp, Homo sapiens
gatgggatctcctgc

SEQ ID NO: 22764 - DNA, 15 bp, Homo sapiens
atgggatctcctgct

SEQ ID NO: 22765 - DNA, 15 bp, Homo sapiens
tgggatctcctgctc

SEQ ID NO: 22766 - DNA, 15 bp, Homo sapiens
gggatctcctgctcc

SEQ ID NO: 22767 - DNA, 15 bp, Homo sapiens
ggatctcctgctcct

SEQ ID NO: 22768 - DNA, 15 bp, Homo sapiens
gatctcctgctcctg

SEQ ID NO: 22769 - DNA, 15 bp, Homo sapiens
atctcctgctcctgt

SEQ ID NO: 22770 - DNA, 15 bp, Homo sapiens
tctcctgctcctgtt

SEQ ID NO: 22771 - DNA, 15 bp, Homo sapiens
ctcctgctcctgttc

SEQ ID NO: 22772 - DNA, 15 bp, Homo sapiens
tcctgctcctgttcc

SEQ ID NO: 22773 - DNA, 15 bp, Homo sapiens
cctgctcctgttcct

SEQ ID NO: 22774 - DNA, 15 bp, Homo sapiens
ctgctcctgttcctc

SEQ ID NO: 22775 - DNA, 15 bp, Homo sapiens
tgctcctgttcctcc

SEQ ID NO: 22776 - DNA, 15 bp, Homo sapiens
gctcctgttcctccc

SEQ ID NO: 22777 - DNA, 15 bp, Homo sapiens
ctcctgttcctcccg

SEQ ID NO: 22778 - DNA, 15 bp, Homo sapiens
tcctgttcctcccgc

SEQ ID NO: 22779 - DNA, 15 bp, Homo sapiens
cctgttcctcccgct

SEQ ID NO: 22780 - DNA, 15 bp, Homo sapiens
ctgttcctcccgctc

SEQ ID NO: 22781 - DNA, 15 bp, Homo sapiens
tgttcctcccgctcc

SEQ ID NO: 22782 - DNA, 15 bp, Homo sapiens
gttcctcccgctcct

SEQ ID NO: 22783 - DNA, 15 bp, Homo sapiens
ttcctcccgctcctg

SEQ ID NO: 22784 - DNA, 15 bp, Homo sapiens
tcctcccgctcctgc

SEQ ID NO: 22785 - DNA, 15 bp, Homo sapiens
cctcccgctcctgcc

SEQ ID NO: 22786 - DNA, 15 bp, Homo sapiens
ctcccgctcctgccc

SEQ ID NO: 22787 - DNA, 15 bp, Homo sapiens
tcccgctcctgccca

SEQ ID NO: 22788 - DNA, 15 bp, Homo sapiens
cccgctcctgcccac

SEQ ID NO: 22789 - DNA, 15 bp, Homo sapiens
ccgctcctgcccacg

SEQ ID NO: 22790 - DNA, 15 bp, Homo sapiens
cgctcctgcccacgg

SEQ ID NO: 22791 - DNA, 15 bp, Homo sapiens
gctcctgcccacggc

SEQ ID NO: 22792 - DNA, 15 bp, Homo sapiens
ctcctgcccacggcg

SEQ ID NO: 22793 - DNA, 15 bp, Homo sapiens
tcctgcccacggcgg

SEQ ID NO: 22794 - DNA, 15 bp, Homo sapiens
cctgcccacggcggg

SEQ ID NO: 22795 - DNA, 15 bp, Homo sapiens
ctgcccacggcgggc

SEQ ID NO: 22796 - DNA, 15 bp, Homo sapiens
tgcccacggcgggct

SEQ ID NO: 22797 - DNA, 15 bp, Homo sapiens
gcccacggcgggctg

SEQ ID NO: 22798 - DNA, 15 bp, Homo sapiens
cccacggcgggctgc

SEQ ID NO: 22799 - DNA, 15 bp, Homo sapiens
ccacggcgggctgcg

SEQ ID NO: 22800 - DNA, 15 bp, Homo sapiens
cacggcgggctgcgc

SEQ ID NO: 22801 - DNA, 15 bp, Homo sapiens
acggcgggctgcgcg

SEQ ID NO: 22802 - DNA, 15 bp, Homo sapiens
cggcgggctgcgcgg

SEQ ID NO: 22803 - DNA, 15 bp, Homo sapiens
ggcgggctgcgcggg

SEQ ID NO: 22804 - DNA, 15 bp, Homo sapiens
gcgggctgcgcggga

SEQ ID NO: 22805 - DNA, 15 bp, Homo sapiens
cgggctgcgcgggac

SEQ ID NO: 22806 - DNA, 15 bp, Homo sapiens
gggctgcgcgggacg

SEQ ID NO: 22807 - DNA, 15 bp, Homo sapiens
ggctgcgcgggacgt

SEQ ID NO: 22808 - DNA, 15 bp, Homo sapiens
gctgcgcgggacgta

SEQ ID NO: 22809 - DNA, 15 bp, Homo sapiens
ctgcgcgggacgtag

SEQ ID NO: 22810 - DNA, 15 bp, Homo sapiens
tgcgcgggacgtagc

SEQ ID NO: 22811 - DNA, 15 bp, Homo sapiens
gcgcgggacgtagcg

SEQ ID NO: 22812 - DNA, 15 bp, Homo sapiens
cgcgggacgtagcgc

SEQ ID NO: 22813 - DNA, 15 bp, Homo sapiens
gcgggacgtagcgcg

SEQ ID NO: 22814 - DNA, 15 bp, Homo sapiens
cgggacgtagcgcgc

SEQ ID NO: 22815 - DNA, 15 bp, Homo sapiens
gggacgtagcgcgct

SEQ ID NO: 22816 - DNA, 15 bp, Homo sapiens
ggacgtagcgcgctg

SEQ ID NO: 22817 - DNA, 15 bp, Homo sapiens
gacgtagcgcgctgg

SEQ ID NO: 22818 - DNA, 15 bp, Homo sapiens
acgtagcgcgctggg

SEQ ID NO: 22819 - DNA, 15 bp, Homo sapiens
cgtagcgcgctgggt

SEQ ID NO: 22820 - DNA, 15 bp, Homo sapiens
gtagcgcgctgggtg

SEQ ID NO: 22821 - DNA, 15 bp, Homo sapiens
tagcgcgctgggtgg

SEQ ID NO: 22822 - DNA, 15 bp, Homo sapiens
agcgcgctgggtggt

SEQ ID NO: 22823 - DNA, 15 bp, Homo sapiens
gcgcgctgggtggtc

SEQ ID NO: 22824 - DNA, 15 bp, Homo sapiens
cgcgctgggtggtcg

SEQ ID NO: 22825 - DNA, 15 bp, Homo sapiens
gcgctgggtggtcgc

SEQ ID NO: 22826 - DNA, 15 bp, Homo sapiens
cgctgggtggtcgca

SEQ ID NO: 22827 - DNA, 15 bp, Homo sapiens
gctgggtggtcgcaa

SEQ ID NO: 22828 - DNA, 15 bp, Homo sapiens
ctgggtggtcgcaaa

SEQ ID NO: 22829 - DNA, 15 bp, Homo sapiens
tgggtggtcgcaaaa

SEQ ID NO: 22830 - DNA, 15 bp, Homo sapiens
gggtggtcgcaaaag

SEQ ID NO: 22831 - DNA, 15 bp, Homo sapiens
ggtggtcgcaaaagg

SEQ ID NO: 22832 - DNA, 15 bp, Homo sapiens
gtggtcgcaaaagga

SEQ ID NO: 22833 - DNA, 15 bp, Homo sapiens
tggtcgcaaaaggaa

SEQ ID NO: 22834 - DNA, 15 bp, Homo sapiens
ggtcgcaaaaggaag

SEQ ID NO: 22835 - DNA, 15 bp, Homo sapiens
gtcgcaaaaggaagc

SEQ ID NO: 22836 - DNA, 15 bp, Homo sapiens
tcgcaaaaggaagcc

SEQ ID NO: 22837 - DNA, 15 bp, Homo sapiens
cgcaaaaggaagccc

SEQ ID NO: 22838 - DNA, 15 bp, Homo sapiens
gcaaaaggaagccca

SEQ ID NO: 22839 - DNA, 15 bp, Homo sapiens
caaaaggaagcccag

SEQ ID NO: 22840 - DNA, 15 bp, Homo sapiens
aaaaggaagcccagc

SEQ ID NO: 22841 - DNA, 15 bp, Homo sapiens
aaaggaagcccagcc

SEQ ID NO: 22842 - DNA, 15 bp, Homo sapiens
aaggaagcccagccg

SEQ ID NO: 22843 - DNA, 15 bp, Homo sapiens
aggaagcccagccgt

SEQ ID NO: 22844 - DNA, 15 bp, Homo sapiens
ggaagcccagccgtc

SEQ ID NO: 22845 - DNA, 15 bp, Homo sapiens
gaagcccagccgtcg

SEQ ID NO: 22846 - DNA, 15 bp, Homo sapiens
aagcccagccgtcgt

SEQ ID NO: 22847 - DNA, 15 bp, Homo sapiens
agcccagccgtcgtg

SEQ ID NO: 22848 - DNA, 15 bp, Homo sapiens
gcccagccgtcgtgt

SEQ ID NO: 22849 - DNA, 15 bp, Homo sapiens
cccagccgtcgtgtg

SEQ ID NO: 22850 - DNA, 15 bp, Homo sapiens
ccagccgtcgtgtga

SEQ ID NO: 22851 - DNA, 15 bp, Homo sapiens
cagccgtcgtgtgag

SEQ ID NO: 22852 - DNA, 15 bp, Homo sapiens
agccgtcgtgtgagg

SEQ ID NO: 22853 - DNA, 15 bp, Homo sapiens
gccgtcgtgtgaggc

SEQ ID NO: 22854 - DNA, 15 bp, Homo sapiens
ccgtcgtgtgaggcc

SEQ ID NO: 22855 - DNA, 15 bp, Homo sapiens
cgtcgtgtgaggccc

SEQ ID NO: 22856 - DNA, 15 bp, Homo sapiens
gtcgtgtgaggcccg

SEQ ID NO: 22857 - DNA, 15 bp, Homo sapiens
tcgtgtgaggcccgc

SEQ ID NO: 22858 - DNA, 15 bp, Homo sapiens
cgtgtgaggcccgca

SEQ ID NO: 22859 - DNA, 15 bp, Homo sapiens
gtgtgaggcccgcac

SEQ ID NO: 22860 - DNA, 15 bp, Homo sapiens
tgtgaggcccgcacg

SEQ ID NO: 22861 - DNA, 15 bp, Homo sapiens
gtgaggcccgcacgt

SEQ ID NO: 22862 - DNA, 15 bp, Homo sapiens
tgaggcccgcacgtg

SEQ ID NO: 22863 - DNA, 15 bp, Homo sapiens
gaggcccgcacgtgc

SEQ ID NO: 22864 - DNA, 15 bp, Homo sapiens
aggcccgcacgtgca

SEQ ID NO: 22865 - DNA, 15 bp, Homo sapiens
ggcccgcacgtgcac

SEQ ID NO: 22866 - DNA, 15 bp, Homo sapiens
gcccgcacgtgcacc

SEQ ID NO: 22867 - DNA, 15 bp, Homo sapiens
cccgcacgtgcaccg

SEQ ID NO: 22868 - DNA, 15 bp, Homo sapiens
ccgcacgtgcaccgc

SEQ ID NO: 22869 - DNA, 15 bp, Homo sapiens
cgcacgtgcaccgcc

SEQ ID NO: 22870 - DNA, 15 bp, Homo sapiens
gcacgtgcaccgcct

SEQ ID NO: 22871 - DNA, 15 bp, Homo sapiens
cacgtgcaccgcctt

SEQ ID NO: 22872 - DNA, 15 bp, Homo sapiens
acgtgcaccgccttc

SEQ ID NO: 22873 - DNA, 15 bp, Homo sapiens
cgtgcaccgccttct

SEQ ID NO: 22874 - DNA, 15 bp, Homo sapiens
gtgcaccgccttctc

SEQ ID NO: 22875 - DNA, 15 bp, Homo sapiens
tgcaccgccttctcg

SEQ ID NO: 22876 - DNA, 15 bp, Homo sapiens
gcaccgccttctcga

SEQ ID NO: 22877 - DNA, 15 bp, Homo sapiens
caccgccttctcgaa

SEQ ID NO: 22878 - DNA, 15 bp, Homo sapiens
accgccttctcgaag

SEQ ID NO: 22879 - DNA, 15 bp, Homo sapiens
ccgccttctcgaagg

SEQ ID NO: 22880 - DNA, 15 bp, Homo sapiens
cgccttctcgaagga

SEQ ID NO: 22881 - DNA, 15 bp, Homo sapiens
gccttctcgaaggag

SEQ ID NO: 22882 - DNA, 15 bp, Homo sapiens
ccttctcgaaggagc

SEQ ID NO: 22883 - DNA, 15 bp, Homo sapiens
cttctcgaaggagcg

SEQ ID NO: 22884 - DNA, 15 bp, Homo sapiens
ttctcgaaggagcgg

SEQ ID NO: 22885 - DNA, 15 bp, Homo sapiens
tctcgaaggagcggt

SEQ ID NO: 22886 - DNA, 15 bp, Homo sapiens
ctcgaaggagcggtt

SEQ ID NO: 22887 - DNA, 15 bp, Homo sapiens
tcgaaggagcggttc

SEQ ID NO: 22888 - DNA, 15 bp, Homo sapiens
cgaaggagcggttca

SEQ ID NO: 22889 - DNA, 15 bp, Homo sapiens
gaaggagcggttcag

SEQ ID NO: 22890 - DNA, 15 bp, Homo sapiens
aaggagcggttcagc

SEQ ID NO: 22891 - DNA, 15 bp, Homo sapiens
aggagcggttcagca

SEQ ID NO: 22892 - DNA, 15 bp, Homo sapiens
ggagcggttcagcac

SEQ ID NO: 22893 - DNA, 15 bp, Homo sapiens
gagcggttcagcacg

SEQ ID NO: 22894 - DNA, 15 bp, Homo sapiens
agcggttcagcacgc

SEQ ID NO: 22895 - DNA, 15 bp, Homo sapiens
gcggttcagcacgcg

SEQ ID NO: 22896 - DNA, 15 bp, Homo sapiens
cggttcagcacgcgt

SEQ ID NO: 22897 - DNA, 15 bp, Homo sapiens
ggttcagcacgcgta

SEQ ID NO: 22898 - DNA, 15 bp, Homo sapiens
gttcagcacgcgtac

SEQ ID NO: 22899 - DNA, 15 bp, Homo sapiens
ttcagcacgcgtacc

SEQ ID NO: 22900 - DNA, 15 bp, Homo sapiens
tcagcacgcgtacca

SEQ ID NO: 22901 - DNA, 15 bp, Homo sapiens
cagcacgcgtaccaa

SEQ ID NO: 22902 - DNA, 15 bp, Homo sapiens
agcacgcgtaccaac

SEQ ID NO: 22903 - DNA, 15 bp, Homo sapiens
gcacgcgtaccaacc

SEQ ID NO: 22904 - DNA, 15 bp, Homo sapiens
cacgcgtaccaaccc

SEQ ID NO: 22905 - DNA, 15 bp, Homo sapiens
acgcgtaccaacccg

SEQ ID NO: 22906 - DNA, 15 bp, Homo sapiens
cgcgtaccaacccgc

SEQ ID NO: 22907 - DNA, 15 bp, Homo sapiens
gcgtaccaacccgcg

SEQ ID NO: 22908 - DNA, 15 bp, Homo sapiens
cgtaccaacccgcgc

SEQ ID NO: 22909 - DNA, 15 bp, Homo sapiens
gtaccaacccgcgca

SEQ ID NO: 22910 - DNA, 15 bp, Homo sapiens
taccaacccgcgcag

SEQ ID NO: 22911 - DNA, 15 bp, Homo sapiens
accaacccgcgcagc

SEQ ID NO: 22912 - DNA, 15 bp, Homo sapiens
ccaacccgcgcagca

SEQ ID NO: 22913 - DNA, 15 bp, Homo sapiens
caacccgcgcagcac

SEQ ID NO: 22914 - DNA, 15 bp, Homo sapiens
aacccgcgcagcacc

SEQ ID NO: 22915 - DNA, 15 bp, Homo sapiens
acccgcgcagcaccg

SEQ ID NO: 22916 - DNA, 15 bp, Homo sapiens
cccgcgcagcaccgg

SEQ ID NO: 22917 - DNA, 15 bp, Homo sapiens
ccgcgcagcaccggc

SEQ ID NO: 22918 - DNA, 15 bp, Homo sapiens
cgcgcagcaccggcg

SEQ ID NO: 22919 - DNA, 15 bp, Homo sapiens
gcgcagcaccggcgg

SEQ ID NO: 22920 - DNA, 15 bp, Homo sapiens
cgcagcaccggcggg

SEQ ID NO: 22921 - DNA, 15 bp, Homo sapiens
gcagcaccggcgggc

SEQ ID NO: 22922 - DNA, 15 bp, Homo sapiens
cagcaccggcgggcg

SEQ ID NO: 22923 - DNA, 15 bp, Homo sapiens
agcaccggcgggcgg

SEQ ID NO: 22924 - DNA, 15 bp, Homo sapiens
gcaccggcgggcggc

SEQ ID NO: 22925 - DNA, 15 bp, Homo sapiens
caccggcgggcggcc

SEQ ID NO: 22926 - DNA, 15 bp, Homo sapiens
accggcgggcggccc

SEQ ID NO: 22927 - DNA, 15 bp, Homo sapiens
ccggcgggcggcccc

SEQ ID NO: 22928 - DNA, 15 bp, Homo sapiens
cggcgggcggccccc

SEQ ID NO: 22929 - DNA, 15 bp, Homo sapiens
ggcgggcggccccca

SEQ ID NO: 22930 - DNA, 15 bp, Homo sapiens
gcgggcggcccccag

SEQ ID NO: 22931 - DNA, 15 bp, Homo sapiens
cgggcggcccccagg

SEQ ID NO: 22932 - DNA, 15 bp, Homo sapiens
gggcggcccccaggc

SEQ ID NO: 22933 - DNA, 15 bp, Homo sapiens
ggcggcccccaggca

SEQ ID NO: 22934 - DNA, 15 bp, Homo sapiens
gcggcccccaggcac

SEQ ID NO: 22935 - DNA, 15 bp, Homo sapiens
cggcccccaggcacc

SEQ ID NO: 22936 - DNA, 15 bp, Homo sapiens
ggcccccaggcaccc

SEQ ID NO: 22937 - DNA, 15 bp, Homo sapiens
gcccccaggcaccca

SEQ ID NO: 22938 - DNA, 15 bp, Homo sapiens
cccccaggcacccac

SEQ ID NO: 22939 - DNA, 15 bp, Homo sapiens
ccccaggcacccaca

SEQ ID NO: 22940 - DNA, 15 bp, Homo sapiens
cccaggcacccacac

SEQ ID NO: 22941 - DNA, 15 bp, Homo sapiens
ccaggcacccacacc

SEQ ID NO: 22942 - DNA, 15 bp, Homo sapiens
caggcacccacaccc

SEQ ID NO: 22943 - DNA, 15 bp, Homo sapiens
aggcacccacacccc

SEQ ID NO: 22944 - DNA, 15 bp, Homo sapiens
ggcacccacaccccg

SEQ ID NO: 22945 - DNA, 15 bp, Homo sapiens
gcacccacaccccgg

SEQ ID NO: 22946 - DNA, 15 bp, Homo sapiens
cacccacaccccggc

SEQ ID NO: 22947 - DNA, 15 bp, Homo sapiens
acccacaccccggca

SEQ ID NO: 22948 - DNA, 15 bp, Homo sapiens
cccacaccccggcac

SEQ ID NO: 22949 - DNA, 15 bp, Homo sapiens
ccacaccccggcacc

SEQ ID NO: 22950 - DNA, 15 bp, Homo sapiens
cacaccccggcaccc

SEQ ID NO: 22951 - DNA, 15 bp, Homo sapiens
acaccccggcacccc

SEQ ID NO: 22952 - DNA, 15 bp, Homo sapiens
caccccggcaccccc

SEQ ID NO: 22953 - DNA, 15 bp, Homo sapiens
accccggcacccccg

SEQ ID NO: 22954 - DNA, 15 bp, Homo sapiens
ccccggcacccccgg

SEQ ID NO: 22955 - DNA, 15 bp, Homo sapiens
cccggcacccccggg

SEQ ID NO: 22956 - DNA, 15 bp, Homo sapiens
ccggcacccccgggg

SEQ ID NO: 22957 - DNA, 15 bp, Homo sapiens
cggcacccccgggga

SEQ ID NO: 22958 - DNA, 15 bp, Homo sapiens
ggcacccccggggac

SEQ ID NO: 22959 - DNA, 15 bp, Homo sapiens
gcacccccggggacc

SEQ ID NO: 22960 - DNA, 15 bp, Homo sapiens
cacccccggggaccg

SEQ ID NO: 22961 - DNA, 15 bp, Homo sapiens
acccccggggaccgc

SEQ ID NO: 22962 - DNA, 15 bp, Homo sapiens
cccccggggaccgct

SEQ ID NO: 22963 - DNA, 15 bp, Homo sapiens
ccccggggaccgctc

SEQ ID NO: 22964 - DNA, 15 bp, Homo sapiens
cccggggaccgctcc

SEQ ID NO: 22965 - DNA, 15 bp, Homo sapiens
ccggggaccgctccg

SEQ ID NO: 22966 - DNA, 15 bp, Homo sapiens
cggggaccgctccgg

SEQ ID NO: 22967 - DNA, 15 bp, Homo sapiens
ggggaccgctccggg

SEQ ID NO: 22968 - DNA, 15 bp, Homo sapiens
gggaccgctccggga

SEQ ID NO: 22969 - DNA, 15 bp, Homo sapiens
ggaccgctccgggag

SEQ ID NO: 22970 - DNA, 15 bp, Homo sapiens
gaccgctccgggagg

SEQ ID NO: 22971 - DNA, 15 bp, Homo sapiens
accgctccgggaggc

SEQ ID NO: 22972 - DNA, 15 bp, Homo sapiens
ccgctccgggaggcg

SEQ ID NO: 22973 - DNA, 15 bp, Homo sapiens
cgctccgggaggcgg

SEQ ID NO: 22974 - DNA, 15 bp, Homo sapiens
gctccgggaggcggc

SEQ ID NO: 22975 - DNA, 15 bp, Homo sapiens
ctccgggaggcggca

SEQ ID NO: 22976 - DNA, 15 bp, Homo sapiens
tccgggaggcggcag

SEQ ID NO: 22977 - DNA, 15 bp, Homo sapiens
ccgggaggcggcagc

SEQ ID NO: 22978 - DNA, 15 bp, Homo sapiens
cgggaggcggcagca

SEQ ID NO: 22979 - DNA, 15 bp, Homo sapiens
gggaggcggcagcag

SEQ ID NO: 22980 - DNA, 15 bp, Homo sapiens
ggaggcggcagcagc

SEQ ID NO: 22981 - DNA, 15 bp, Homo sapiens
gaggcggcagcagcg

SEQ ID NO: 22982 - DNA, 15 bp, Homo sapiens
aggcggcagcagcgc

SEQ ID NO: 22983 - DNA, 15 bp, Homo sapiens
ggcggcagcagcgcc

SEQ ID NO: 22984 - DNA, 15 bp, Homo sapiens
gcggcagcagcgcct

SEQ ID NO: 22985 - DNA, 15 bp, Homo sapiens
cggcagcagcgcctc

SEQ ID NO: 22986 - DNA, 15 bp, Homo sapiens
ggcagcagcgcctcc

SEQ ID NO: 22987 - DNA, 15 bp, Homo sapiens
gcagcagcgcctcca

SEQ ID NO: 22988 - DNA, 15 bp, Homo sapiens
cagcagcgcctccag

SEQ ID NO: 22989 - DNA, 15 bp, Homo sapiens
agcagcgcctccagc

SEQ ID NO: 22990 - DNA, 15 bp, Homo sapiens
gcagcgcctccagct

SEQ ID NO: 22991 - DNA, 15 bp, Homo sapiens
cagcgcctccagctc

SEQ ID NO: 22992 - DNA, 15 bp, Homo sapiens
agcgcctccagctcc

SEQ ID NO: 22993 - DNA, 15 bp, Homo sapiens
gcgcctccagctcca

SEQ ID NO: 22994 - DNA, 15 bp, Homo sapiens
cgcctccagctccac

SEQ ID NO: 22995 - DNA, 15 bp, Homo sapiens
gcctccagctccacc

SEQ ID NO: 22996 - DNA, 15 bp, Homo sapiens
cctccagctccacca

SEQ ID NO: 22997 - DNA, 15 bp, Homo sapiens
ctccagctccaccat

SEQ ID NO: 22998 - DNA, 15 bp, Homo sapiens
tccagctccaccatg

SEQ ID NO: 22999 - DNA, 15 bp, Homo sapiens
ccagctccaccatga

SEQ ID NO: 23000 - DNA, 15 bp, Homo sapiens
cagctccaccatgac

SEQ ID NO: 23001 - DNA, 15 bp, Homo sapiens
agctccaccatgacg

SEQ ID NO: 23002 - DNA, 15 bp, Homo sapiens
gctccaccatgacgc

SEQ ID NO: 23003 - DNA, 15 bp, Homo sapiens
ctccaccatgacgcg

SEQ ID NO: 23004 - DNA, 15 bp, Homo sapiens
tccaccatgacgcgc

SEQ ID NO: 23005 - DNA, 15 bp, Homo sapiens
ccaccatgacgcgcc

SEQ ID NO: 23006 - DNA, 15 bp, Homo sapiens
caccatgacgcgccc

SEQ ID NO: 23007 - DNA, 15 bp, Homo sapiens
accatgacgcgcccc

SEQ ID NO: 23008 - DNA, 15 bp, Homo sapiens
ccatgacgcgcccca

SEQ ID NO: 23009 - DNA, 15 bp, Homo sapiens
catgacgcgccccaa

SEQ ID NO: 23010 - DNA, 15 bp, Homo sapiens
atgacgcgccccaag

SEQ ID NO: 23011 - DNA, 15 bp, Homo sapiens
tgacgcgccccaagc

SEQ ID NO: 23012 - DNA, 15 bp, Homo sapiens
gacgcgccccaagcg

SEQ ID NO: 23013 - DNA, 15 bp, Homo sapiens
acgcgccccaagcgc

SEQ ID NO: 23014 - DNA, 15 bp, Homo sapiens
cgcgccccaagcgct

SEQ ID NO: 23015 - DNA, 15 bp, Homo sapiens
gcgccccaagcgctc

SEQ ID NO: 23016 - DNA, 15 bp, Homo sapiens
cgccccaagcgctcc

SEQ ID NO: 23017 - DNA, 15 bp, Homo sapiens
gccccaagcgctcca

SEQ ID NO: 23018 - DNA, 15 bp, Homo sapiens
ccccaagcgctccag

SEQ ID NO: 23019 - DNA, 15 bp, Homo sapiens
cccaagcgctccaga

SEQ ID NO: 23020 - DNA, 15 bp, Homo sapiens
ccaagcgctccagac

SEQ ID NO: 23021 - DNA, 15 bp, Homo sapiens
caagcgctccagacg

SEQ ID NO: 23022 - DNA, 15 bp, Homo sapiens
aagcgctccagacgg

SEQ ID NO: 23023 - DNA, 15 bp, Homo sapiens
agcgctccagacggc

SEQ ID NO: 23024 - DNA, 15 bp, Homo sapiens
gcgctccagacggcc

SEQ ID NO: 23025 - DNA, 15 bp, Homo sapiens
cgctccagacggccc

SEQ ID NO: 23026 - DNA, 15 bp, Homo sapiens
gctccagacggcccg

SEQ ID NO: 23027 - DNA, 15 bp, Homo sapiens
ctccagacggcccgg

SEQ ID NO: 23028 - DNA, 15 bp, Homo sapiens
tccagacggcccggc

SEQ ID NO: 23029 - DNA, 15 bp, Homo sapiens
ccagacggcccggcg

SEQ ID NO: 23030 - DNA, 15 bp, Homo sapiens
cagacggcccggcgc

SEQ ID NO: 23031 - DNA, 15 bp, Homo sapiens
agacggcccggcgcg

SEQ ID NO: 23032 - DNA, 15 bp, Homo sapiens
gacggcccggcgcgg

SEQ ID NO: 23033 - DNA, 15 bp, Homo sapiens
acggcccggcgcggg

SEQ ID NO: 23034 - DNA, 15 bp, Homo sapiens
cggcccggcgcgggc

SEQ ID NO: 23035 - DNA, 15 bp, Homo sapiens
ggcccggcgcgggcg

SEQ ID NO: 23036 - DNA, 15 bp, Homo sapiens
gcccggcgcgggcgg

SEQ ID NO: 23037 - DNA, 15 bp, Homo sapiens
cccggcgcgggcggc

SEQ ID NO: 23038 - DNA, 15 bp, Homo sapiens
ccggcgcgggcggca

SEQ ID NO: 23039 - DNA, 15 bp, Homo sapiens
cggcgcgggcggcag

SEQ ID NO: 23040 - DNA, 15 bp, Homo sapiens
ggcgcgggcggcagc

SEQ ID NO: 23041 - DNA, 15 bp, Homo sapiens
gcgcgggcggcagcg

SEQ ID NO: 23042 - DNA, 15 bp, Homo sapiens
cgcgggcggcagcga

SEQ ID NO: 23043 - DNA, 15 bp, Homo sapiens
gcgggcggcagcgaa

SEQ ID NO: 23044 - DNA, 15 bp, Homo sapiens
cgggcggcagcgaaa

SEQ ID NO: 23045 - DNA, 15 bp, Homo sapiens
gggcggcagcgaaaa

SEQ ID NO: 23046 - DNA, 15 bp, Homo sapiens
ggcggcagcgaaaat

SEQ ID NO: 23047 - DNA, 15 bp, Homo sapiens
gcggcagcgaaaatg

SEQ ID NO: 23048 - DNA, 15 bp, Homo sapiens
cggcagcgaaaatgt

SEQ ID NO: 23049 - DNA, 15 bp, Homo sapiens
ggcagcgaaaatgtg

SEQ ID NO: 23050 - DNA, 15 bp, Homo sapiens
gcagcgaaaatgtgg

SEQ ID NO: 23051 - DNA, 15 bp, Homo sapiens
cagcgaaaatgtggg

SEQ ID NO: 23052 - DNA, 15 bp, Homo sapiens
agcgaaaatgtgggg

SEQ ID NO: 23053 - DNA, 15 bp, Homo sapiens
gcgaaaatgtgggga

SEQ ID NO: 23054 - DNA, 15 bp, Homo sapiens
cgaaaatgtggggac

SEQ ID NO: 23055 - DNA, 15 bp, Homo sapiens
gaaaatgtggggacc

SEQ ID NO: 23056 - DNA, 15 bp, Homo sapiens
aaaatgtggggacca

SEQ ID NO: 23057 - DNA, 15 bp, Homo sapiens
aaatgtggggaccag

SEQ ID NO: 23058 - DNA, 15 bp, Homo sapiens
aatgtggggaccagg

SEQ ID NO: 23059 - DNA, 15 bp, Homo sapiens
atgtggggaccaggt

SEQ ID NO: 23060 - DNA, 15 bp, Homo sapiens
tgtggggaccaggta

SEQ ID NO: 23061 - DNA, 15 bp, Homo sapiens
gtggggaccaggtaa

SEQ ID NO: 23062 - DNA, 15 bp, Homo sapiens
tggggaccaggtaaa

SEQ ID NO: 23063 - DNA, 15 bp, Homo sapiens
ggggaccaggtaaaa

SEQ ID NO: 23064 - DNA, 15 bp, Homo sapiens
gggaccaggtaaaac

SEQ ID NO: 23065 - DNA, 15 bp, Homo sapiens
ggaccaggtaaaacc

SEQ ID NO: 23066 - DNA, 15 bp, Homo sapiens
gaccaggtaaaaccc

SEQ ID NO: 23067 - DNA, 15 bp, Homo sapiens
accaggtaaaacccc

SEQ ID NO: 23068 - DNA, 15 bp, Homo sapiens
ccaggtaaaaccccc

SEQ ID NO: 23069 - DNA, 15 bp, Homo sapiens
caggtaaaacccccc

SEQ ID NO: 23070 - DNA, 15 bp, Homo sapiens
aggtaaaaccccccg

SEQ ID NO: 23071 - DNA, 15 bp, Homo sapiens
ggtaaaaccccccgc

SEQ ID NO: 23072 - DNA, 15 bp, Homo sapiens
gtaaaaccccccgcc

SEQ ID NO: 23073 - DNA, 15 bp, Homo sapiens
taaaaccccccgcca

SEQ ID NO: 23074 - DNA, 15 bp, Homo sapiens
aaaaccccccgccag

SEQ ID NO: 23075 - DNA, 15 bp, Homo sapiens
aaaccccccgccagc

SEQ ID NO: 23076 - DNA, 15 bp, Homo sapiens
aaccccccgccagcg

SEQ ID NO: 23077 - DNA, 15 bp, Homo sapiens
accccccgccagcgg

SEQ ID NO: 23078 - DNA, 15 bp, Homo sapiens
ccccccgccagcggg

SEQ ID NO: 23079 - DNA, 15 bp, Homo sapiens
cccccgccagcgggg

SEQ ID NO: 23080 - DNA, 15 bp, Homo sapiens
ccccgccagcgggga

SEQ ID NO: 23081 - DNA, 15 bp, Homo sapiens
cccgccagcggggac

SEQ ID NO: 23082 - DNA, 15 bp, Homo sapiens
ccgccagcggggacg

SEQ ID NO: 23083 - DNA, 15 bp, Homo sapiens
cgccagcggggacgg

SEQ ID NO: 23084 - DNA, 15 bp, Homo sapiens
gccagcggggacggg

SEQ ID NO: 23085 - DNA, 15 bp, Homo sapiens
ccagcggggacgggg

SEQ ID NO: 23086 - DNA, 15 bp, Homo sapiens
cagcggggacggggc

SEQ ID NO: 23087 - DNA, 15 bp, Homo sapiens
agcggggacggggca

SEQ ID NO: 23088 - DNA, 15 bp, Homo sapiens
gcggggacggggcac

SEQ ID NO: 23089 - DNA, 15 bp, Homo sapiens
cggggacggggcaca

SEQ ID NO: 23090 - DNA, 15 bp, Homo sapiens
ggggacggggcacag

SEQ ID NO: 23091 - DNA, 15 bp, Homo sapiens
gggacggggcacagc

SEQ ID NO: 23092 - DNA, 15 bp, Homo sapiens
ggacggggcacagcg

SEQ ID NO: 23093 - DNA, 15 bp, Homo sapiens
gacggggcacagcgg

SEQ ID NO: 23094 - DNA, 15 bp, Homo sapiens
acggggcacagcggt

SEQ ID NO: 23095 - DNA, 15 bp, Homo sapiens
cggggcacagcggtg

SEQ ID NO: 23096 - DNA, 15 bp, Homo sapiens
ggggcacagcggtga

SEQ ID NO: 23097 - DNA, 15 bp, Homo sapiens
gggcacagcggtgag

SEQ ID NO: 23098 - DNA, 15 bp, Homo sapiens
ggcacagcggtgagg

SEQ ID NO: 23099 - DNA, 15 bp, Homo sapiens
gcacagcggtgaggg

SEQ ID NO: 23100 - DNA, 15 bp, Homo sapiens
cacagcggtgagggc

SEQ ID NO: 23101 - DNA, 15 bp, Homo sapiens
acagcggtgagggct

SEQ ID NO: 23102 - DNA, 15 bp, Homo sapiens
cagcggtgagggctc

SEQ ID NO: 23103 - DNA, 15 bp, Homo sapiens
agcggtgagggctcg

SEQ ID NO: 23104 - DNA, 15 bp, Homo sapiens
gcggtgagggctcgg

SEQ ID NO: 23105 - DNA, 15 bp, Homo sapiens
cggtgagggctcggg

SEQ ID NO: 23106 - DNA, 15 bp, Homo sapiens
ggtgagggctcgggg

SEQ ID NO: 23107 - DNA, 15 bp, Homo sapiens
gtgagggctcggggc

SEQ ID NO: 23108 - DNA, 15 bp, Homo sapiens
tgagggctcggggca

SEQ ID NO: 23109 - DNA, 15 bp, Homo sapiens
gagggctcggggcaa

SEQ ID NO: 23110 - DNA, 15 bp, Homo sapiens
agggctcggggcaag

SEQ ID NO: 23111 - DNA, 15 bp, Homo sapiens
gggctcggggcaagc

SEQ ID NO: 23112 - DNA, 15 bp, Homo sapiens
ggctcggggcaagcc

SEQ ID NO: 23113 - DNA, 15 bp, Homo sapiens
gctcggggcaagcct

SEQ ID NO: 23114 - DNA, 15 bp, Homo sapiens
ctcggggcaagcctc

SEQ ID NO: 23115 - DNA, 15 bp, Homo sapiens
tcggggcaagcctcc

SEQ ID NO: 23116 - DNA, 15 bp, Homo sapiens
cggggcaagcctcct

SEQ ID NO: 23117 - DNA, 15 bp, Homo sapiens
ggggcaagcctcctc

SEQ ID NO: 23118 - DNA, 15 bp, Homo sapiens
gggcaagcctcctct

SEQ ID NO: 23119 - DNA, 15 bp, Homo sapiens
ggcaagcctcctctt

SEQ ID NO: 23120 - DNA, 15 bp, Homo sapiens
gcaagcctcctcttc

SEQ ID NO: 23121 - DNA, 15 bp, Homo sapiens
caagcctcctcttcc

SEQ ID NO: 23122 - DNA, 15 bp, Homo sapiens
aagcctcctcttcct

SEQ ID NO: 23123 - DNA, 15 bp, Homo sapiens
agcctcctcttcctc

SEQ ID NO: 23124 - DNA, 15 bp, Homo sapiens
gcctcctcttcctcc

SEQ ID NO: 23125 - DNA, 15 bp, Homo sapiens
cctcctcttcctcct

SEQ ID NO: 23126 - DNA, 15 bp, Homo sapiens
ctcctcttcctcctc

SEQ ID NO: 23127 - DNA, 15 bp, Homo sapiens
tcctcttcctcctcc

SEQ ID NO: 23128 - DNA, 15 bp, Homo sapiens
cctcttcctcctccc

SEQ ID NO: 23129 - DNA, 15 bp, Homo sapiens
ctcttcctcctcccc

SEQ ID NO: 23130 - DNA, 15 bp, Homo sapiens
tcttcctcctcccct

SEQ ID NO: 23131 - DNA, 15 bp, Homo sapiens
cttcctcctcccctt

SEQ ID NO: 23132 - DNA, 15 bp, Homo sapiens
ttcctcctccccttc

SEQ ID NO: 23133 - DNA, 15 bp, Homo sapiens
tcctcctccccttca

SEQ ID NO: 23134 - DNA, 15 bp, Homo sapiens
cctcctccccttcat

SEQ ID NO: 23135 - DNA, 15 bp, Homo sapiens
ctcctccccttcatc

SEQ ID NO: 23136 - DNA, 15 bp, Homo sapiens
tcctccccttcatcc

SEQ ID NO: 23137 - DNA, 15 bp, Homo sapiens
cctccccttcatccc

SEQ ID NO: 23138 - DNA, 15 bp, Homo sapiens
ctccccttcatcccc

SEQ ID NO: 23139 - DNA, 15 bp, Homo sapiens
tccccttcatcccca

SEQ ID NO: 23140 - DNA, 15 bp, Homo sapiens
ccccttcatccccat

SEQ ID NO: 23141 - DNA, 15 bp, Homo sapiens
cccttcatccccatc

SEQ ID NO: 23142 - DNA, 15 bp, Homo sapiens
ccttcatccccatcc

SEQ ID NO: 23143 - DNA, 15 bp, Homo sapiens
cttcatccccatcct

SEQ ID NO: 23144 - DNA, 15 bp, Homo sapiens
ttcatccccatcctc

SEQ ID NO: 23145 - DNA, 15 bp, Homo sapiens
tcatccccatcctcg

SEQ ID NO: 23146 - DNA, 15 bp, Homo sapiens
catccccatcctcgc

SEQ ID NO: 23147 - DNA, 15 bp, Homo sapiens
atccccatcctcgcc

SEQ ID NO: 23148 - DNA, 15 bp, Homo sapiens
tccccatcctcgcca

SEQ ID NO: 23149 - DNA, 15 bp, Homo sapiens
ccccatcctcgccat

SEQ ID NO: 23150 - DNA, 15 bp, Homo sapiens
cccatcctcgccatc

SEQ ID NO: 23151 - DNA, 15 bp, Homo sapiens
ccatcctcgccatcg

SEQ ID NO: 23152 - DNA, 15 bp, Homo sapiens
catcctcgccatcgt

SEQ ID NO: 23153 - DNA, 15 bp, Homo sapiens
atcctcgccatcgtc

SEQ ID NO: 23154 - DNA, 15 bp, Homo sapiens
tcctcgccatcgtcg

SEQ ID NO: 23155 - DNA, 15 bp, Homo sapiens
cctcgccatcgtcgt

SEQ ID NO: 23156 - DNA, 15 bp, Homo sapiens
ctcgccatcgtcgtc

SEQ ID NO: 23157 - DNA, 15 bp, Homo sapiens
tcgccatcgtcgtcc

SEQ ID NO: 23158 - DNA, 15 bp, Homo sapiens
cgccatcgtcgtcct

SEQ ID NO: 23159 - DNA, 15 bp, Homo sapiens
gccatcgtcgtcctc

SEQ ID NO: 23160 - DNA, 15 bp, Homo sapiens
ccatcgtcgtcctcg

SEQ ID NO: 23161 - DNA, 15 bp, Homo sapiens
catcgtcgtcctcgt

SEQ ID NO: 23162 - DNA, 15 bp, Homo sapiens
atcgtcgtcctcgtc

SEQ ID NO: 23163 - DNA, 15 bp, Homo sapiens
tcgtcgtcctcgtcg

SEQ ID NO: 23164 - DNA, 15 bp, Homo sapiens
cgtcgtcctcgtcgg

SEQ ID NO: 23165 - DNA, 15 bp, Homo sapiens
gtcgtcctcgtcggc

SEQ ID NO: 23166 - DNA, 15 bp, Homo sapiens
tcgtcctcgtcggcc

SEQ ID NO: 23167 - DNA, 15 bp, Homo sapiens
cgtcctcgtcggccc

SEQ ID NO: 23168 - DNA, 15 bp, Homo sapiens
gtcctcgtcggcccc

SEQ ID NO: 23169 - DNA, 15 bp, Homo sapiens
tcctcgtcggccccg

SEQ ID NO: 23170 - DNA, 15 bp, Homo sapiens
cctcgtcggccccgc

SEQ ID NO: 23171 - DNA, 15 bp, Homo sapiens
ctcgtcggccccgcc

SEQ ID NO: 23172 - DNA, 15 bp, Homo sapiens
tcgtcggccccgccg

SEQ ID NO: 23173 - DNA, 15 bp, Homo sapiens
cgtcggccccgccgc

SEQ ID NO: 23174 - DNA, 15 bp, Homo sapiens
gtcggccccgccgcc

SEQ ID NO: 23175 - DNA, 15 bp, Homo sapiens
tcggccccgccgccg

SEQ ID NO: 23176 - DNA, 15 bp, Homo sapiens
cggccccgccgccgc

SEQ ID NO: 23177 - DNA, 15 bp, Homo sapiens
ggccccgccgccgcc

SEQ ID NO: 23178 - DNA, 15 bp, Homo sapiens
gccccgccgccgccg

SEQ ID NO: 23179 - DNA, 15 bp, Homo sapiens
ccccgccgccgccgc

SEQ ID NO: 23180 - DNA, 15 bp, Homo sapiens
cccgccgccgccgcc

SEQ ID NO: 23181 - DNA, 15 bp, Homo sapiens
cgccgccgccgccgc

SEQ ID NO: 23182 - DNA, 15 bp, Homo sapiens
ccgccgccgccgcca

SEQ ID NO: 23183 - DNA, 15 bp, Homo sapiens
cgccgccgccgccat

SEQ ID NO: 23184 - DNA, 15 bp, Homo sapiens
gccgccgccgccatc

SEQ ID NO: 23185 - DNA, 15 bp, Homo sapiens
ccgccgccgccatct

SEQ ID NO: 23186 - DNA, 15 bp, Homo sapiens
cgccgccgccatctt

SEQ ID NO: 23187 - DNA, 15 bp, Homo sapiens
gccgccgccatcttg

SEQ ID NO: 23188 - DNA, 15 bp, Homo sapiens
ccgccgccatcttgc

SEQ ID NO: 23189 - DNA, 15 bp, Homo sapiens
cgccgccatcttgcc

SEQ ID NO: 23190 - DNA, 15 bp, Homo sapiens
gccgccatcttgccc

SEQ ID NO: 23191 - DNA, 15 bp, Homo sapiens
ccgccatcttgcccg

SEQ ID NO: 23192 - DNA, 15 bp, Homo sapiens
cgccatcttgcccgg

SEQ ID NO: 23193 - DNA, 15 bp, Homo sapiens
gccatcttgcccggc

SEQ ID NO: 23194 - DNA, 15 bp, Homo sapiens
ccatcttgcccggcc

SEQ ID NO: 23195 - DNA, 15 bp, Homo sapiens
catcttgcccggccg

SEQ ID NO: 23196 - DNA, 15 bp, Homo sapiens
atcttgcccggccgc

SEQ ID NO: 23197 - DNA, 15 bp, Homo sapiens
tcttgcccggccgcc

SEQ ID NO: 23198 - DNA, 15 bp, Homo sapiens
cttgcccggccgccg

SEQ ID NO: 23199 - DNA, 15 bp, Homo sapiens
ttgcccggccgccgc

SEQ ID NO: 23200 - DNA, 15 bp, Homo sapiens
tgcccggccgccgcc

SEQ ID NO: 23201 - DNA, 15 bp, Homo sapiens
gcccggccgccgccg

SEQ ID NO: 23202 - DNA, 15 bp, Homo sapiens
cccggccgccgccgc

SEQ ID NO: 23203 - DNA, 15 bp, Homo sapiens
ccggccgccgccgcc

SEQ ID NO: 23204 - DNA, 15 bp, Homo sapiens
cggccgccgccgcca

SEQ ID NO: 23205 - DNA, 15 bp, Homo sapiens
ggccgccgccgccat

SEQ ID NO: 23206 - DNA, 15 bp, Homo sapiens
cgccatcttgcccgc

SEQ ID NO: 23207 - DNA, 15 bp, Homo sapiens
gccatcttgcccgcc

SEQ ID NO: 23208 - DNA, 15 bp, Homo sapiens
ccatcttgcccgccc

SEQ ID NO: 23209 - DNA, 15 bp, Homo sapiens
catcttgcccgcccc

SEQ ID NO: 23210 - DNA, 15 bp, Homo sapiens
atcttgcccgccccg

SEQ ID NO: 23211 - DNA, 15 bp, Homo sapiens
tcttgcccgccccgg

SEQ ID NO: 23212 - DNA, 15 bp, Homo sapiens
cttgcccgccccggg

SEQ ID NO: 23213 - DNA, 15 bp, Homo sapiens
ttgcccgccccgggc

SEQ ID NO: 23214 - DNA, 15 bp, Homo sapiens
tgcccgccccgggcc

SEQ ID NO: 23215 - DNA, 15 bp, Homo sapiens
gcccgccccgggccc

SEQ ID NO: 23216 - DNA, 15 bp, Homo sapiens
cccgccccgggcccg

SEQ ID NO: 23217 - DNA, 15 bp, Homo sapiens
ccgccccgggcccgc

SEQ ID NO: 23218 - DNA, 15 bp, Homo sapiens
cgccccgggcccgcc

SEQ ID NO: 23219 - DNA, 15 bp, Homo sapiens
gccccgggcccgccc

SEQ ID NO: 23220 - DNA, 15 bp, Homo sapiens
ccccgggcccgcccc

SEQ ID NO: 23221 - DNA, 15 bp, Homo sapiens
cccgggcccgcccca

SEQ ID NO: 23222 - DNA, 15 bp, Homo sapiens
ccgggcccgccccac

SEQ ID NO: 23223 - DNA, 15 bp, Homo sapiens
cgggcccgccccacg

SEQ ID NO: 23224 - DNA, 15 bp, Homo sapiens
gggcccgccccacgg

SEQ ID NO: 23225 - DNA, 15 bp, Homo sapiens
ggcccgccccacggc

SEQ ID NO: 23226 - DNA, 15 bp, Homo sapiens
gcccgccccacggcc

SEQ ID NO: 23227 - DNA, 15 bp, Homo sapiens
cccgccccacggccg

SEQ ID NO: 23228 - DNA, 15 bp, Homo sapiens
ccgccccacggccgg

SEQ ID NO: 23229 - DNA, 15 bp, Homo sapiens
cgccccacggccggt

SEQ ID NO: 23230 - DNA, 15 bp, Homo sapiens
gccccacggccggta

SEQ ID NO: 23231 - DNA, 15 bp, Homo sapiens
ccccacggccggtag

SEQ ID NO: 23232 - DNA, 15 bp, Homo sapiens
cccacggccggtagc

SEQ ID NO: 23233 - DNA, 15 bp, Homo sapiens
ccacggccggtagcg

SEQ ID NO: 23234 - DNA, 15 bp, Homo sapiens
cacggccggtagcgg

SEQ ID NO: 23235 - DNA, 15 bp, Homo sapiens
acggccggtagcggc

SEQ ID NO: 23236 - DNA, 15 bp, Homo sapiens
cggccggtagcggcg

SEQ ID NO: 23237 - DNA, 15 bp, Homo sapiens
ggccggtagcggcgc

SEQ ID NO: 23238 - DNA, 15 bp, Homo sapiens
gccggtagcggcgca

SEQ ID NO: 23239 - DNA, 15 bp, Homo sapiens
ccggtagcggcgcaa

SEQ ID NO: 23240 - DNA, 15 bp, Homo sapiens
cggtagcggcgcaac

SEQ ID NO: 23241 - DNA, 15 bp, Homo sapiens
ggtagcggcgcaact

SEQ ID NO: 23242 - DNA, 15 bp, Homo sapiens
gtagcggcgcaactg

SEQ ID NO: 23243 - DNA, 15 bp, Homo sapiens
tagcggcgcaactgc

SEQ ID NO: 23244 - DNA, 15 bp, Homo sapiens
agcggcgcaactgcg

SEQ ID NO: 23245 - DNA, 15 bp, Homo sapiens
gcggcgcaactgcgc

SEQ ID NO: 23246 - DNA, 15 bp, Homo sapiens
cggcgcaactgcgcc

SEQ ID NO: 23247 - DNA, 15 bp, Homo sapiens
ggcgcaactgcgcca

SEQ ID NO: 23248 - DNA, 15 bp, Homo sapiens
gcgcaactgcgccag

SEQ ID NO: 23249 - DNA, 15 bp, Homo sapiens
cgcaactgcgccagc

SEQ ID NO: 23250 - DNA, 15 bp, Homo sapiens
gcaactgcgccagcg

SEQ ID NO: 23251 - DNA, 15 bp, Homo sapiens
caactgcgccagcgg

SEQ ID NO: 23252 - DNA, 15 bp, Homo sapiens
aactgcgccagcggc

SEQ ID NO: 23253 - DNA, 15 bp, Homo sapiens
actgcgccagcggca

SEQ ID NO: 23254 - DNA, 15 bp, Homo sapiens
ctgcgccagcggcag

SEQ ID NO: 23255 - DNA, 15 bp, Homo sapiens
tgcgccagcggcagc

SEQ ID NO: 23256 - DNA, 15 bp, Homo sapiens
gcgccagcggcagcc

SEQ ID NO: 23257 - DNA, 15 bp, Homo sapiens
cgccagcggcagccc

SEQ ID NO: 23258 - DNA, 15 bp, Homo sapiens
gccagcggcagcccc

SEQ ID NO: 23259 - DNA, 15 bp, Homo sapiens
ccagcggcagcccca

SEQ ID NO: 23260 - DNA, 15 bp, Homo sapiens
cagcggcagccccaa

SEQ ID NO: 23261 - DNA, 15 bp, Homo sapiens
agcggcagccccaag

SEQ ID NO: 23262 - DNA, 15 bp, Homo sapiens
gcggcagccccaagg

SEQ ID NO: 23263 - DNA, 15 bp, Homo sapiens
cggcagccccaaggc

SEQ ID NO: 23264 - DNA, 15 bp, Homo sapiens
ggcagccccaaggcc

SEQ ID NO: 23265 - DNA, 15 bp, Homo sapiens
gcagccccaaggcct

SEQ ID NO: 23266 - DNA, 15 bp, Homo sapiens
cagccccaaggcctc

SEQ ID NO: 23267 - DNA, 15 bp, Homo sapiens
agccccaaggcctcg

SEQ ID NO: 23268 - DNA, 15 bp, Homo sapiens
gccccaaggcctcgt

SEQ ID NO: 23269 - DNA, 15 bp, Homo sapiens
ccccaaggcctcgtc

SEQ ID NO: 23270 - DNA, 15 bp, Homo sapiens
cccaaggcctcgtcg

SEQ ID NO: 23271 - DNA, 15 bp, Homo sapiens
ccaaggcctcgtcgg

SEQ ID NO: 23272 - DNA, 15 bp, Homo sapiens
caaggcctcgtcggc

SEQ ID NO: 23273 - DNA, 15 bp, Homo sapiens
aaggcctcgtcggcg

SEQ ID NO: 23274 - DNA, 15 bp, Homo sapiens
aggcctcgtcggcga

SEQ ID NO: 23275 - DNA, 15 bp, Homo sapiens
ggcctcgtcggcgaa

SEQ ID NO: 23276 - DNA, 15 bp, Homo sapiens
gcctcgtcggcgaac

SEQ ID NO: 23277 - DNA, 15 bp, Homo sapiens
cctcgtcggcgaaca

SEQ ID NO: 23278 - DNA, 15 bp, Homo sapiens
ctcgtcggcgaacag

SEQ ID NO: 23279 - DNA, 15 bp, Homo sapiens
tcgtcggcgaacagc

SEQ ID NO: 23280 - DNA, 15 bp, Homo sapiens
cgtcggcgaacagca

SEQ ID NO: 23281 - DNA, 15 bp, Homo sapiens
gtcggcgaacagcac

SEQ ID NO: 23282 - DNA, 15 bp, Homo sapiens
tcggcgaacagcacc

SEQ ID NO: 23283 - DNA, 15 bp, Homo sapiens
cggcgaacagcaccc

SEQ ID NO: 23284 - DNA, 15 bp, Homo sapiens
ggcgaacagcaccct

SEQ ID NO: 23285 - DNA, 15 bp, Homo sapiens
gcgaacagcaccctc

SEQ ID NO: 23286 - DNA, 15 bp, Homo sapiens
cgaacagcaccctcc

SEQ ID NO: 23287 - DNA, 15 bp, Homo sapiens
gaacagcaccctccg

SEQ ID NO: 23288 - DNA, 15 bp, Homo sapiens
aacagcaccctccgc

SEQ ID NO: 23289 - DNA, 15 bp, Homo sapiens
acagcaccctccgcg

SEQ ID NO: 23290 - DNA, 15 bp, Homo sapiens
cagcaccctccgcgg

SEQ ID NO: 23291 - DNA, 15 bp, Homo sapiens
agcaccctccgcggg

SEQ ID NO: 23292 - DNA, 15 bp, Homo sapiens
gcaccctccgcgggg

SEQ ID NO: 23293 - DNA, 15 bp, Homo sapiens
caccctccgcggggc

SEQ ID NO: 23294 - DNA, 15 bp, Homo sapiens
accctccgcggggcc

SEQ ID NO: 23295 - DNA, 15 bp, Homo sapiens
ccctccgcggggcca

SEQ ID NO: 23296 - DNA, 15 bp, Homo sapiens
cctccgcggggccac

SEQ ID NO: 23297 - DNA, 15 bp, Homo sapiens
ctccgcggggccacc

SEQ ID NO: 23298 - DNA, 15 bp, Homo sapiens
tccgcggggccaccg

SEQ ID NO: 23299 - DNA, 15 bp, Homo sapiens
ccgcggggccaccgc

SEQ ID NO: 23300 - DNA, 15 bp, Homo sapiens
cgcggggccaccgcc

SEQ ID NO: 23301 - DNA, 15 bp, Homo sapiens
gcggggccaccgccg

SEQ ID NO: 23302 - DNA, 15 bp, Homo sapiens
cggggccaccgccgc

SEQ ID NO: 23303 - DNA, 15 bp, Homo sapiens
ggggccaccgccgcc

SEQ ID NO: 23304 - DNA, 15 bp, Homo sapiens
gggccaccgccgcct

SEQ ID NO: 23305 - DNA, 15 bp, Homo sapiens
ggccaccgccgcctc

SEQ ID NO: 23306 - DNA, 15 bp, Homo sapiens
gccaccgccgcctcg

SEQ ID NO: 23307 - DNA, 15 bp, Homo sapiens
ccaccgccgcctcga

SEQ ID NO: 23308 - DNA, 15 bp, Homo sapiens
caccgccgcctcgac

SEQ ID NO: 23309 - DNA, 15 bp, Homo sapiens
accgccgcctcgacc

SEQ ID NO: 23310 - DNA, 15 bp, Homo sapiens
ccgccgcctcgaccg

SEQ ID NO: 23311 - DNA, 15 bp, Homo sapiens
cgccgcctcgaccga

SEQ ID NO: 23312 - DNA, 15 bp, Homo sapiens
gccgcctcgaccgag

SEQ ID NO: 23313 - DNA, 15 bp, Homo sapiens
ccgcctcgaccgagg

SEQ ID NO: 23314 - DNA, 15 bp, Homo sapiens
cgcctcgaccgaggt

SEQ ID NO: 23315 - DNA, 15 bp, Homo sapiens
gcctcgaccgaggtg

SEQ ID NO: 23316 - DNA, 15 bp, Homo sapiens
cctcgaccgaggtgc

SEQ ID NO: 23317 - DNA, 15 bp, Homo sapiens
ctcgaccgaggtgcg

SEQ ID NO: 23318 - DNA, 15 bp, Homo sapiens
tcgaccgaggtgcgg

SEQ ID NO: 23319 - DNA, 15 bp, Homo sapiens
cgaccgaggtgcggg

SEQ ID NO: 23320 - DNA, 15 bp, Homo sapiens
gaccgaggtgcgggg

SEQ ID NO: 23321 - DNA, 15 bp, Homo sapiens
accgaggtgcggggc

SEQ ID NO: 23322 - DNA, 15 bp, Homo sapiens
ccgaggtgcggggct

SEQ ID NO: 23323 - DNA, 15 bp, Homo sapiens
cgaggtgcggggctc

SEQ ID NO: 23324 - DNA, 15 bp, Homo sapiens
gaggtgcggggctca

SEQ ID NO: 23325 - DNA, 15 bp, Homo sapiens
aggtgcggggctcac

SEQ ID NO: 23326 - DNA, 15 bp, Homo sapiens
ggtgcggggctcacc

SEQ ID NO: 23327 - DNA, 15 bp, Homo sapiens
gtgcggggctcaccc

SEQ ID NO: 23328 - DNA, 15 bp, Homo sapiens
tgcggggctcacccg

SEQ ID NO: 23329 - DNA, 15 bp, Homo sapiens
gcggggctcacccgc

SEQ ID NO: 23330 - DNA, 15 bp, Homo sapiens
cggggctcacccgcg

SEQ ID NO: 23331 - DNA, 15 bp, Homo sapiens
ggggctcacccgcgg

SEQ ID NO: 23332 - DNA, 15 bp, Homo sapiens
gggctcacccgcggc

SEQ ID NO: 23333 - DNA, 15 bp, Homo sapiens
ggctcacccgcggcc

SEQ ID NO: 23334 - DNA, 15 bp, Homo sapiens
gctcacccgcggccg

SEQ ID NO: 23335 - DNA, 15 bp, Homo sapiens
ctcacccgcggccgg

SEQ ID NO: 23336 - DNA, 15 bp, Homo sapiens
tcacccgcggccggc

SEQ ID NO: 23337 - DNA, 15 bp, Homo sapiens
cacccgcggccggcg

SEQ ID NO: 23338 - DNA, 15 bp, Homo sapiens
acccgcggccggcga

SEQ ID NO: 23339 - DNA, 15 bp, Homo sapiens
cccgcggccggcgag

SEQ ID NO: 23340 - DNA, 15 bp, Homo sapiens
ccgcggccggcgagg

SEQ ID NO: 23341 - DNA, 15 bp, Homo sapiens
cgcggccggcgaggg

SEQ ID NO: 23342 - DNA, 15 bp, Homo sapiens
gcggccggcgagggg

SEQ ID NO: 23343 - DNA, 15 bp, Homo sapiens
cggccggcgaggggg

SEQ ID NO: 23344 - DNA, 15 bp, Homo sapiens
ggccggcgagggggg

SEQ ID NO: 23345 - DNA, 15 bp, Homo sapiens
gccggcgaggggggc

SEQ ID NO: 23346 - DNA, 15 bp, Homo sapiens
ccggcgaggggggcg

SEQ ID NO: 23347 - DNA, 15 bp, Homo sapiens
cggcgaggggggcgc

SEQ ID NO: 23348 - DNA, 15 bp, Homo sapiens
ggcgaggggggcgcg

SEQ ID NO: 23349 - DNA, 15 bp, Homo sapiens
gcgaggggggcgcgg

SEQ ID NO: 23350 - DNA, 15 bp, Homo sapiens
cgaggggggcgcgga

SEQ ID NO: 23351 - DNA, 15 bp, Homo sapiens
gaggggggcgcggaa

SEQ ID NO: 23352 - DNA, 15 bp, Homo sapiens
aggggggcgcggaat

SEQ ID NO: 23353 - DNA, 15 bp, Homo sapiens
ggggggcgcggaatg

SEQ ID NO: 23354 - DNA, 15 bp, Homo sapiens
gggggcgcggaatgc

SEQ ID NO: 23355 - DNA, 15 bp, Homo sapiens
ggggcgcggaatgcc

SEQ ID NO: 23356 - DNA, 15 bp, Homo sapiens
gggcgcggaatgccg

SEQ ID NO: 23357 - DNA, 15 bp, Homo sapiens
ggcgcggaatgccgc

SEQ ID NO: 23358 - DNA, 15 bp, Homo sapiens
gcgcggaatgccgca

SEQ ID NO: 23359 - DNA, 15 bp, Homo sapiens
cgcggaatgccgcag

SEQ ID NO: 23360 - DNA, 15 bp, Homo sapiens
gcggaatgccgcagc

SEQ ID NO: 23361 - DNA, 15 bp, Homo sapiens
cggaatgccgcagcg

SEQ ID NO: 23362 - DNA, 15 bp, Homo sapiens
ggaatgccgcagcgg

SEQ ID NO: 23363 - DNA, 15 bp, Homo sapiens
gaatgccgcagcggg

SEQ ID NO: 23364 - DNA, 15 bp, Homo sapiens
aatgccgcagcgggg

SEQ ID NO: 23365 - DNA, 15 bp, Homo sapiens
atgccgcagcggggg

SEQ ID NO: 23366 - DNA, 15 bp, Homo sapiens
tgccgcagcgggggc

SEQ ID NO: 23367 - DNA, 15 bp, Homo sapiens
gccgcagcgggggct

SEQ ID NO: 23368 - DNA, 15 bp, Homo sapiens
ccgcagcgggggctc

SEQ ID NO: 23369 - DNA, 15 bp, Homo sapiens
cgcagcgggggctcc

SEQ ID NO: 23370 - DNA, 15 bp, Homo sapiens
gcagcgggggctcca

SEQ ID NO: 23371 - DNA, 15 bp, Homo sapiens
cagcgggggctccac

SEQ ID NO: 23372 - DNA, 15 bp, Homo sapiens
agcgggggctccaca

SEQ ID NO: 23373 - DNA, 15 bp, Homo sapiens
gcgggggctccacag

SEQ ID NO: 23374 - DNA, 15 bp, Homo sapiens
cgggggctccacagg

SEQ ID NO: 23375 - DNA, 15 bp, Homo sapiens
gggggctccacaggg

SEQ ID NO: 23376 - DNA, 15 bp, Homo sapiens
ggggctccacagggg

SEQ ID NO: 23377 - DNA, 15 bp, Homo sapiens
gggctccacaggggc

SEQ ID NO: 23378 - DNA, 15 bp, Homo sapiens
ggctccacaggggcc

SEQ ID NO: 23379 - DNA, 15 bp, Homo sapiens
gctccacaggggccg

SEQ ID NO: 23380 - DNA, 15 bp, Homo sapiens
ctccacaggggccgt

SEQ ID NO: 23381 - DNA, 15 bp, Homo sapiens
tccacaggggccgta

SEQ ID NO: 23382 - DNA, 15 bp, Homo sapiens
ccacaggggccgtac

SEQ ID NO: 23383 - DNA, 15 bp, Homo sapiens
cacaggggccgtacg

SEQ ID NO: 23384 - DNA, 15 bp, Homo sapiens
acaggggccgtacgc

SEQ ID NO: 23385 - DNA, 15 bp, Homo sapiens
caggggccgtacgcg

SEQ ID NO: 23386 - DNA, 15 bp, Homo sapiens
aggggccgtacgcgc

SEQ ID NO: 23387 - DNA, 15 bp, Homo sapiens
ggggccgtacgcgcc

SEQ ID NO: 23388 - DNA, 15 bp, Homo sapiens
gggccgtacgcgcca

SEQ ID NO: 23389 - DNA, 15 bp, Homo sapiens
ggccgtacgcgccat

SEQ ID NO: 23390 - DNA, 15 bp, Homo sapiens
gccgtacgcgccata

SEQ ID NO: 23391 - DNA, 15 bp, Homo sapiens
ccgtacgcgccatat

SEQ ID NO: 23392 - DNA, 15 bp, Homo sapiens
cgtacgcgccatatc

SEQ ID NO: 23393 - DNA, 15 bp, Homo sapiens
gtacgcgccatatcg

SEQ ID NO: 23394 - DNA, 15 bp, Homo sapiens
tacgcgccatatcgg

SEQ ID NO: 23395 - DNA, 15 bp, Homo sapiens
acgcgccatatcggc

SEQ ID NO: 23396 - DNA, 15 bp, Homo sapiens
cgcgccatatcggcg

SEQ ID NO: 23397 - DNA, 15 bp, Homo sapiens
gcgccatatcggcgg

SEQ ID NO: 23398 - DNA, 15 bp, Homo sapiens
cgccatatcggcggc

SEQ ID NO: 23399 - DNA, 15 bp, Homo sapiens
gccatatcggcggcg

SEQ ID NO: 23400 - DNA, 15 bp, Homo sapiens
ccatatcggcggcgg

SEQ ID NO: 23401 - DNA, 15 bp, Homo sapiens
catatcggcggcggc

SEQ ID NO: 23402 - DNA, 15 bp, Homo sapiens
atatcggcggcggcg

SEQ ID NO: 23403 - DNA, 15 bp, Homo sapiens
tatcggcggcggcgg

SEQ ID NO: 23404 - DNA, 15 bp, Homo sapiens
atcggcggcggcggc

SEQ ID NO: 23405 - DNA, 15 bp, Homo sapiens
tcggcggcggcggcg

SEQ ID NO: 23406 - DNA, 15 bp, Homo sapiens
gcggcggcggcggca

SEQ ID NO: 23407 - DNA, 15 bp, Homo sapiens
cggcggcggcggcac

SEQ ID NO: 23408 - DNA, 15 bp, Homo sapiens
ggcggcggcggcacc

SEQ ID NO: 23409 - DNA, 15 bp, Homo sapiens
gcggcggcggcaccg

SEQ ID NO: 23410 - DNA, 15 bp, Homo sapiens
cggcggcggcaccga

SEQ ID NO: 23411 - DNA, 15 bp, Homo sapiens
ggcggcggcaccgac

SEQ ID NO: 23412 - DNA, 15 bp, Homo sapiens
gcggcggcaccgacg

SEQ ID NO: 23413 - DNA, 15 bp, Homo sapiens
cggcggcaccgacgg

SEQ ID NO: 23414 - DNA, 15 bp, Homo sapiens
ggcggcaccgacggc

SEQ ID NO: 23415 - DNA, 15 bp, Homo sapiens
gcggcaccgacggca

SEQ ID NO: 23416 - DNA, 15 bp, Homo sapiens
cggcaccgacggcac

SEQ ID NO: 23417 - DNA, 15 bp, Homo sapiens
ggcaccgacggcacc

SEQ ID NO: 23418 - DNA, 15 bp, Homo sapiens
gcaccgacggcaccg

SEQ ID NO: 23419 - DNA, 15 bp, Homo sapiens
caccgacggcaccgg

SEQ ID NO: 23420 - DNA, 15 bp, Homo sapiens
accgacggcaccggc

SEQ ID NO: 23421 - DNA, 15 bp, Homo sapiens
ccgacggcaccggcg

SEQ ID NO: 23422 - DNA, 15 bp, Homo sapiens
cgacggcaccggcgg

SEQ ID NO: 23423 - DNA, 15 bp, Homo sapiens
gacggcaccggcggc

SEQ ID NO: 23424 - DNA, 15 bp, Homo sapiens
acggcaccggcggcg

SEQ ID NO: 23425 - DNA, 15 bp, Homo sapiens
cggcaccggcggcgg

SEQ ID NO: 23426 - DNA, 15 bp, Homo sapiens
ggcaccggcggcggg

SEQ ID NO: 23427 - DNA, 15 bp, Homo sapiens
gcaccggcggcggga

SEQ ID NO: 23428 - DNA, 15 bp, Homo sapiens
caccggcggcgggac

SEQ ID NO: 23429 - DNA, 15 bp, Homo sapiens
accggcggcgggacc

SEQ ID NO: 23430 - DNA, 15 bp, Homo sapiens
ccggcggcgggaccg

SEQ ID NO: 23431 - DNA, 15 bp, Homo sapiens
cggcggcgggaccgg

SEQ ID NO: 23432 - DNA, 15 bp, Homo sapiens
ggcggcgggaccggc

SEQ ID NO: 23433 - DNA, 15 bp, Homo sapiens
gcggcgggaccggcg

SEQ ID NO: 23434 - DNA, 15 bp, Homo sapiens
cggcgggaccggcgg

SEQ ID NO: 23435 - DNA, 15 bp, Homo sapiens
ggcgggaccggcggg

SEQ ID NO: 23436 - DNA, 15 bp, Homo sapiens
gcgggaccggcgggg

SEQ ID NO: 23437 - DNA, 15 bp, Homo sapiens
cgggaccggcggggg

SEQ ID NO: 23438 - DNA, 15 bp, Homo sapiens
gggaccggcgggggc

SEQ ID NO: 23439 - DNA, 15 bp, Homo sapiens
ggaccggcgggggca

SEQ ID NO: 23440 - DNA, 15 bp, Homo sapiens
gaccggcgggggcag

SEQ ID NO: 23441 - DNA, 15 bp, Homo sapiens
accggcgggggcagg

SEQ ID NO: 23442 - DNA, 15 bp, Homo sapiens
ccggcgggggcaggg

SEQ ID NO: 23443 - DNA, 15 bp, Homo sapiens
cggcgggggcagggc

SEQ ID NO: 23444 - DNA, 15 bp, Homo sapiens
ggcgggggcagggcc

SEQ ID NO: 23445 - DNA, 15 bp, Homo sapiens
gcgggggcagggcct

SEQ ID NO: 23446 - DNA, 15 bp, Homo sapiens
cgggggcagggcctg

SEQ ID NO: 23447 - DNA, 15 bp, Homo sapiens
gggggcagggcctga

SEQ ID NO: 23448 - DNA, 15 bp, Homo sapiens
ggggcagggcctgaa

SEQ ID NO: 23449 - DNA, 15 bp, Homo sapiens
gggcagggcctgaag

SEQ ID NO: 23450 - DNA, 15 bp, Homo sapiens
ggcagggcctgaagg

SEQ ID NO: 23451 - DNA, 15 bp, Homo sapiens
gcagggcctgaaggg

SEQ ID NO: 23452 - DNA, 15 bp, Homo sapiens
cagggcctgaagggg

SEQ ID NO: 23453 - DNA, 15 bp, Homo sapiens
agggcctgaaggggc

SEQ ID NO: 23454 - DNA, 15 bp, Homo sapiens
gggcctgaaggggcg

SEQ ID NO: 23455 - DNA, 15 bp, Homo sapiens
ggcctgaaggggcgg

SEQ ID NO: 23456 - DNA, 15 bp, Homo sapiens
gcctgaaggggcggg

SEQ ID NO: 23457 - DNA, 15 bp, Homo sapiens
cctgaaggggcgggc

SEQ ID NO: 23458 - DNA, 15 bp, Homo sapiens
ctgaaggggcgggca

SEQ ID NO: 23459 - DNA, 15 bp, Homo sapiens
tgaaggggcgggcag

SEQ ID NO: 23460 - DNA, 15 bp, Homo sapiens
gaaggggcgggcagc

SEQ ID NO: 23461 - DNA, 15 bp, Homo sapiens
aaggggcgggcagcc

SEQ ID NO: 23462 - DNA, 15 bp, Homo sapiens
aggggcgggcagcca

SEQ ID NO: 23463 - DNA, 15 bp, Homo sapiens
ggggcgggcagccaa

SEQ ID NO: 23464 - DNA, 15 bp, Homo sapiens
gggcgggcagccaat

SEQ ID NO: 23465 - DNA, 15 bp, Homo sapiens
ggcgggcagccaatg

SEQ ID NO: 23466 - DNA, 15 bp, Homo sapiens
gcgggcagccaatgg

SEQ ID NO: 23467 - DNA, 15 bp, Homo sapiens
cgggcagccaatggg

SEQ ID NO: 23468 - DNA, 15 bp, Homo sapiens
gggcagccaatggga

SEQ ID NO: 23469 - DNA, 15 bp, Homo sapiens
ggcagccaatgggaa

SEQ ID NO: 23470 - DNA, 15 bp, Homo sapiens
gcagccaatgggaag

SEQ ID NO: 23471 - DNA, 15 bp, Homo sapiens
cagccaatgggaagg

SEQ ID NO: 23472 - DNA, 15 bp, Homo sapiens
agccaatgggaaggc

SEQ ID NO: 23473 - DNA, 15 bp, Homo sapiens
gccaatgggaaggcc

SEQ ID NO: 23474 - DNA, 15 bp, Homo sapiens
ccaatgggaaggcca

SEQ ID NO: 23475 - DNA, 15 bp, Homo sapiens
caatgggaaggccag

SEQ ID NO: 23476 - DNA, 15 bp, Homo sapiens
aatgggaaggccagc

SEQ ID NO: 23477 - DNA, 15 bp, Homo sapiens
atgggaaggccagcg

SEQ ID NO: 23478 - DNA, 15 bp, Homo sapiens
tgggaaggccagcgc

SEQ ID NO: 23479 - DNA, 15 bp, Homo sapiens
gggaaggccagcgcg

SEQ ID NO: 23480 - DNA, 15 bp, Homo sapiens
ggaaggccagcgcgg

SEQ ID NO: 23481 - DNA, 15 bp, Homo sapiens
gaaggccagcgcgga

SEQ ID NO: 23482 - DNA, 15 bp, Homo sapiens
aaggccagcgcggag

SEQ ID NO: 23483 - DNA, 15 bp, Homo sapiens
aggccagcgcggagg

SEQ ID NO: 23484 - DNA, 15 bp, Homo sapiens
ggccagcgcggaggg

SEQ ID NO: 23485 - DNA, 15 bp, Homo sapiens
gccagcgcggagggg

SEQ ID NO: 23486 - DNA, 15 bp, Homo sapiens
ccagcgcggaggggt

SEQ ID NO: 23487 - DNA, 15 bp, Homo sapiens
cagcgcggaggggta

SEQ ID NO: 23488 - DNA, 15 bp, Homo sapiens
agcgcggaggggtac

SEQ ID NO: 23489 - DNA, 15 bp, Homo sapiens
gcgcggaggggtacg

SEQ ID NO: 23490 - DNA, 15 bp, Homo sapiens
cgcggaggggtacgg

SEQ ID NO: 23491 - DNA, 15 bp, Homo sapiens
gcggaggggtacggc

SEQ ID NO: 23492 - DNA, 15 bp, Homo sapiens
cggaggggtacggct

SEQ ID NO: 23493 - DNA, 15 bp, Homo sapiens
ggaggggtacggctc

SEQ ID NO: 23494 - DNA, 15 bp, Homo sapiens
gaggggtacggctca

SEQ ID NO: 23495 - DNA, 15 bp, Homo sapiens
aggggtacggctcac

SEQ ID NO: 23496 - DNA, 15 bp, Homo sapiens
ggggtacggctcacg

SEQ ID NO: 23497 - DNA, 15 bp, Homo sapiens
gggtacggctcacgg

SEQ ID NO: 23498 - DNA, 15 bp, Homo sapiens
ggtacggctcacggg

SEQ ID NO: 23499 - DNA, 15 bp, Homo sapiens
gtacggctcacgggg

SEQ ID NO: 23500 - DNA, 15 bp, Homo sapiens
tacggctcacggggg

SEQ ID NO: 23501 - DNA, 15 bp, Homo sapiens
acggctcacgggggc

SEQ ID NO: 23502 - DNA, 15 bp, Homo sapiens
cggctcacgggggca

SEQ ID NO: 23503 - DNA, 15 bp, Homo sapiens
ggctcacgggggcat

SEQ ID NO: 23504 - DNA, 15 bp, Homo sapiens
gctcacgggggcata

SEQ ID NO: 23505 - DNA, 15 bp, Homo sapiens
ctcacgggggcatag

SEQ ID NO: 23506 - DNA, 15 bp, Homo sapiens
tcacgggggcatagg

SEQ ID NO: 23507 - DNA, 15 bp, Homo sapiens
cacgggggcataggc

SEQ ID NO: 23508 - DNA, 15 bp, Homo sapiens
acgggggcataggcg

SEQ ID NO: 23509 - DNA, 15 bp, Homo sapiens
cgggggcataggcgg

SEQ ID NO: 23510 - DNA, 15 bp, Homo sapiens
gggggcataggcggt

SEQ ID NO: 23511 - DNA, 15 bp, Homo sapiens
ggggcataggcggtg

SEQ ID NO: 23512 - DNA, 15 bp, Homo sapiens
gggcataggcggtga

SEQ ID NO: 23513 - DNA, 15 bp, Homo sapiens
ggcataggcggtgag

SEQ ID NO: 23514 - DNA, 15 bp, Homo sapiens
gcataggcggtgaga

SEQ ID NO: 23515 - DNA, 15 bp, Homo sapiens
cataggcggtgagat

SEQ ID NO: 23516 - DNA, 15 bp, Homo sapiens
ataggcggtgagatg

SEQ ID NO: 23517 - DNA, 15 bp, Homo sapiens
taggcggtgagatga

SEQ ID NO: 23518 - DNA, 15 bp, Homo sapiens
aggcggtgagatgaa

SEQ ID NO: 23519 - DNA, 15 bp, Homo sapiens
ggcggtgagatgaag

SEQ ID NO: 23520 - DNA, 15 bp, Homo sapiens
gcggtgagatgaaga

SEQ ID NO: 23521 - DNA, 15 bp, Homo sapiens
cggtgagatgaagac

SEQ ID NO: 23522 - DNA, 15 bp, Homo sapiens
ggtgagatgaagaca

SEQ ID NO: 23523 - DNA, 15 bp, Homo sapiens
gtgagatgaagacaa

SEQ ID NO: 23524 - DNA, 15 bp, Homo sapiens
tgagatgaagacaag

SEQ ID NO: 23525 - DNA, 15 bp, Homo sapiens
gagatgaagacaagt

SEQ ID NO: 23526 - DNA, 15 bp, Homo sapiens
agatgaagacaagta

SEQ ID NO: 23527 - DNA, 15 bp, Homo sapiens
gatgaagacaagtat

SEQ ID NO: 23528 - DNA, 15 bp, Homo sapiens
atgaagacaagtatt

SEQ ID NO: 23529 - DNA, 15 bp, Homo sapiens
tgaagacaagtattg

SEQ ID NO: 23530 - DNA, 15 bp, Homo sapiens
gaagacaagtattgc

SEQ ID NO: 23531 - DNA, 15 bp, Homo sapiens
aagacaagtattgca

SEQ ID NO: 23532 - DNA, 15 bp, Homo sapiens
agacaagtattgcag

SEQ ID NO: 23533 - DNA, 15 bp, Homo sapiens
gacaagtattgcaga

SEQ ID NO: 23534 - DNA, 15 bp, Homo sapiens
acaagtattgcagag

SEQ ID NO: 23535 - DNA, 15 bp, Homo sapiens
caagtattgcagagg

SEQ ID NO: 23536 - DNA, 15 bp, Homo sapiens
aagtattgcagaggg

SEQ ID NO: 23537 - DNA, 15 bp, Homo sapiens
agtattgcagagggc

SEQ ID NO: 23538 - DNA, 15 bp, Homo sapiens
gtattgcagagggcc

SEQ ID NO: 23539 - DNA, 15 bp, Homo sapiens
tattgcagagggcca

SEQ ID NO: 23540 - DNA, 15 bp, Homo sapiens
attgcagagggccaa

SEQ ID NO: 23541 - DNA, 15 bp, Homo sapiens
ttgcagagggccaat

SEQ ID NO: 23542 - DNA, 15 bp, Homo sapiens
tgcagagggccaatg

SEQ ID NO: 23543 - DNA, 15 bp, Homo sapiens
gcagagggccaatgg

SEQ ID NO: 23544 - DNA, 15 bp, Homo sapiens
cagagggccaatggg

SEQ ID NO: 23545 - DNA, 15 bp, Homo sapiens
agagggccaatgggc

SEQ ID NO: 23546 - DNA, 15 bp, Homo sapiens
gagggccaatgggca

SEQ ID NO: 23547 - DNA, 15 bp, Homo sapiens
agggccaatgggcag

SEQ ID NO: 23548 - DNA, 15 bp, Homo sapiens
gggccaatgggcagc

SEQ ID NO: 23549 - DNA, 15 bp, Homo sapiens
ggccaatgggcagcc

SEQ ID NO: 23550 - DNA, 15 bp, Homo sapiens
gccaatgggcagcca

SEQ ID NO: 23551 - DNA, 15 bp, Homo sapiens
ccaatgggcagccat

SEQ ID NO: 23552 - DNA, 15 bp, Homo sapiens
caatgggcagccatg

SEQ ID NO: 23553 - DNA, 15 bp, Homo sapiens
aatgggcagccatgc

SEQ ID NO: 23554 - DNA, 15 bp, Homo sapiens
atgggcagccatgca

SEQ ID NO: 23555 - DNA, 15 bp, Homo sapiens
tgggcagccatgcac

SEQ ID NO: 23556 - DNA, 15 bp, Homo sapiens
gggcagccatgcacg

SEQ ID NO: 23557 - DNA, 15 bp, Homo sapiens
ggcagccatgcacgg

SEQ ID NO: 23558 - DNA, 15 bp, Homo sapiens
gcagccatgcacgga

SEQ ID NO: 23559 - DNA, 15 bp, Homo sapiens
cagccatgcacggat

SEQ ID NO: 23560 - DNA, 15 bp, Homo sapiens
agccatgcacggatg

SEQ ID NO: 23561 - DNA, 15 bp, Homo sapiens
gccatgcacggatga

SEQ ID NO: 23562 - DNA, 15 bp, Homo sapiens
ccatgcacggatgac

SEQ ID NO: 23563 - DNA, 15 bp, Homo sapiens
catgcacggatgacg

SEQ ID NO: 23564 - DNA, 15 bp, Homo sapiens
atgcacggatgacgt

SEQ ID NO: 23565 - DNA, 15 bp, Homo sapiens
tgcacggatgacgta

SEQ ID NO: 23566 - DNA, 15 bp, Homo sapiens
gcacggatgacgtac

SEQ ID NO: 23567 - DNA, 15 bp, Homo sapiens
cacggatgacgtaca

SEQ ID NO: 23568 - DNA, 15 bp, Homo sapiens
acggatgacgtacag

SEQ ID NO: 23569 - DNA, 15 bp, Homo sapiens
cggatgacgtacagc

SEQ ID NO: 23570 - DNA, 15 bp, Homo sapiens
ggatgacgtacagcg

SEQ ID NO: 23571 - DNA, 15 bp, Homo sapiens
gatgacgtacagcga

SEQ ID NO: 23572 - DNA, 15 bp, Homo sapiens
atgacgtacagcgaa

SEQ ID NO: 23573 - DNA, 15 bp, Homo sapiens
tgacgtacagcgaat

SEQ ID NO: 23574 - DNA, 15 bp, Homo sapiens
gacgtacagcgaatt

SEQ ID NO: 23575 - DNA, 15 bp, Homo sapiens
acgtacagcgaattg

SEQ ID NO: 23576 - DNA, 15 bp, Homo sapiens
cgtacagcgaattga

SEQ ID NO: 23577 - DNA, 15 bp, Homo sapiens
gtacagcgaattgag

SEQ ID NO: 23578 - DNA, 15 bp, Homo sapiens
tacagcgaattgaga

SEQ ID NO: 23579 - DNA, 15 bp, Homo sapiens
acagcgaattgagag

SEQ ID NO: 23580 - DNA, 15 bp, Homo sapiens
cagcgaattgagagc

SEQ ID NO: 23581 - DNA, 15 bp, Homo sapiens
agcgaattgagagcc

SEQ ID NO: 23582 - DNA, 15 bp, Homo sapiens
gcgaattgagagccg

SEQ ID NO: 23583 - DNA, 15 bp, Homo sapiens
cgaattgagagccgg

SEQ ID NO: 23584 - DNA, 15 bp, Homo sapiens
gaattgagagccgga

SEQ ID NO: 23585 - DNA, 15 bp, Homo sapiens
aattgagagccggag

SEQ ID NO: 23586 - DNA, 15 bp, Homo sapiens
attgagagccggaga

SEQ ID NO: 23587 - DNA, 15 bp, Homo sapiens
ttgagagccggagaa

SEQ ID NO: 23588 - DNA, 15 bp, Homo sapiens
tgagagccggagaag

SEQ ID NO: 23589 - DNA, 15 bp, Homo sapiens
gagagccggagaagc

SEQ ID NO: 23590 - DNA, 15 bp, Homo sapiens
agagccggagaagca

SEQ ID NO: 23591 - DNA, 15 bp, Homo sapiens
gagccggagaagcac

SEQ ID NO: 23592 - DNA, 15 bp, Homo sapiens
agccggagaagcacg

SEQ ID NO: 23593 - DNA, 15 bp, Homo sapiens
gccggagaagcacgc

SEQ ID NO: 23594 - DNA, 15 bp, Homo sapiens
ccggagaagcacgca

SEQ ID NO: 23595 - DNA, 15 bp, Homo sapiens
cggagaagcacgcag

SEQ ID NO: 23596 - DNA, 15 bp, Homo sapiens
ggagaagcacgcagc

SEQ ID NO: 23597 - DNA, 15 bp, Homo sapiens
gagaagcacgcagcc

SEQ ID NO: 23598 - DNA, 15 bp, Homo sapiens
agaagcacgcagcca

SEQ ID NO: 23599 - DNA, 15 bp, Homo sapiens
gaagcacgcagccaa

SEQ ID NO: 23600 - DNA, 15 bp, Homo sapiens
aagcacgcagccaat

SEQ ID NO: 23601 - DNA, 15 bp, Homo sapiens
agcacgcagccaatg

SEQ ID NO: 23602 - DNA, 15 bp, Homo sapiens
gcacgcagccaatgg

SEQ ID NO: 23603 - DNA, 15 bp, Homo sapiens
cacgcagccaatggg

SEQ ID NO: 23604 - DNA, 15 bp, Homo sapiens
acgcagccaatgggg

SEQ ID NO: 23605 - DNA, 15 bp, Homo sapiens
cgcagccaatgggga

SEQ ID NO: 23606 - DNA, 15 bp, Homo sapiens
gcagccaatggggat

SEQ ID NO: 23607 - DNA, 15 bp, Homo sapiens
cagccaatggggatg

SEQ ID NO: 23608 - DNA, 15 bp, Homo sapiens
agccaatggggatgc

SEQ ID NO: 23609 - DNA, 15 bp, Homo sapiens
gccaatggggatgcc

SEQ ID NO: 23610 - DNA, 15 bp, Homo sapiens
ccaatggggatgccc

SEQ ID NO: 23611 - DNA, 15 bp, Homo sapiens
caatggggatgcccg

SEQ ID NO: 23612 - DNA, 15 bp, Homo sapiens
aatggggatgcccgg

SEQ ID NO: 23613 - DNA, 15 bp, Homo sapiens
atggggatgcccggg

SEQ ID NO: 23614 - DNA, 15 bp, Homo sapiens
tggggatgcccggga

SEQ ID NO: 23615 - DNA, 15 bp, Homo sapiens
ggggatgcccgggag

SEQ ID NO: 23616 - DNA, 15 bp, Homo sapiens
gggatgcccgggagt

SEQ ID NO: 23617 - DNA, 15 bp, Homo sapiens
ggatgcccgggagtg

SEQ ID NO: 23618 - DNA, 15 bp, Homo sapiens
gatgcccgggagtgg

SEQ ID NO: 23619 - DNA, 15 bp, Homo sapiens
atgcccgggagtggg

SEQ ID NO: 23620 - DNA, 15 bp, Homo sapiens
tgcccgggagtgggc

SEQ ID NO: 23621 - DNA, 15 bp, Homo sapiens
gcccgggagtgggcg

SEQ ID NO: 23622 - DNA, 15 bp, Homo sapiens
cccgggagtgggcgg

SEQ ID NO: 23623 - DNA, 15 bp, Homo sapiens
ccgggagtgggcggt

SEQ ID NO: 23624 - DNA, 15 bp, Homo sapiens
cgggagtgggcggtg

SEQ ID NO: 23625 - DNA, 15 bp, Homo sapiens
gggagtgggcggtgt

SEQ ID NO: 23626 - DNA, 15 bp, Homo sapiens
ggagtgggcggtgta

SEQ ID NO: 23627 - DNA, 15 bp, Homo sapiens
gagtgggcggtgtag

SEQ ID NO: 23628 - DNA, 15 bp, Homo sapiens
agtgggcggtgtagg

SEQ ID NO: 23629 - DNA, 15 bp, Homo sapiens
gtgggcggtgtaggg

SEQ ID NO: 23630 - DNA, 15 bp, Homo sapiens
tgggcggtgtagggg

SEQ ID NO: 23631 - DNA, 15 bp, Homo sapiens
gggcggtgtaggggg

SEQ ID NO: 23632 - DNA, 15 bp, Homo sapiens
ggcggtgtagggggc

SEQ ID NO: 23633 - DNA, 15 bp, Homo sapiens
gcggtgtagggggcg

SEQ ID NO: 23634 - DNA, 15 bp, Homo sapiens
cggtgtagggggcgg

SEQ ID NO: 23635 - DNA, 15 bp, Homo sapiens
ggtgtagggggcggg

SEQ ID NO: 23636 - DNA, 15 bp, Homo sapiens
gtgtagggggcggga

SEQ ID NO: 23637 - DNA, 15 bp, Homo sapiens
tgtagggggcgggat

SEQ ID NO: 23638 - DNA, 15 bp, Homo sapiens
gtagggggcgggatg

SEQ ID NO: 23639 - DNA, 15 bp, Homo sapiens
tagggggcgggatga

SEQ ID NO: 23640 - DNA, 15 bp, Homo sapiens
agggggcgggatgat

SEQ ID NO: 23641 - DNA, 15 bp, Homo sapiens
gggggcgggatgatc

SEQ ID NO: 23642 - DNA, 15 bp, Homo sapiens
ggggcgggatgatcg

SEQ ID NO: 23643 - DNA, 15 bp, Homo sapiens
gggcgggatgatcga

SEQ ID NO: 23644 - DNA, 15 bp, Homo sapiens
ggcgggatgatcgag

SEQ ID NO: 23645 - DNA, 15 bp, Homo sapiens
gcgggatgatcgagg

SEQ ID NO: 23646 - DNA, 15 bp, Homo sapiens
cgggatgatcgagga

SEQ ID NO: 23647 - DNA, 15 bp, Homo sapiens
gggatgatcgaggaa

SEQ ID NO: 23648 - DNA, 15 bp, Homo sapiens
ggatgatcgaggaat

SEQ ID NO: 23649 - DNA, 15 bp, Homo sapiens
gatgatcgaggaatc

SEQ ID NO: 23650 - DNA, 15 bp, Homo sapiens
atgatcgaggaatca

SEQ ID NO: 23651 - DNA, 15 bp, Homo sapiens
tgatcgaggaatcaa

SEQ ID NO: 23652 - DNA, 15 bp, Homo sapiens
gatcgaggaatcaat

SEQ ID NO: 23653 - DNA, 15 bp, Homo sapiens
atcgaggaatcaatg

SEQ ID NO: 23654 - DNA, 15 bp, Homo sapiens
tcgaggaatcaatgg

SEQ ID NO: 23655 - DNA, 15 bp, Homo sapiens
cgaggaatcaatgga

SEQ ID NO: 23656 - DNA, 15 bp, Homo sapiens
gaggaatcaatggag

SEQ ID NO: 23657 - DNA, 15 bp, Homo sapiens
aggaatcaatggaga

SEQ ID NO: 23658 - DNA, 15 bp, Homo sapiens
ggaatcaatggagag

SEQ ID NO: 23659 - DNA, 15 bp, Homo sapiens
gaatcaatggagagg

SEQ ID NO: 23660 - DNA, 15 bp, Homo sapiens
aatcaatggagaggc

SEQ ID NO: 23661 - DNA, 15 bp, Homo sapiens
atcaatggagaggcc

SEQ ID NO: 23662 - DNA, 15 bp, Homo sapiens
tcaatggagaggccg

SEQ ID NO: 23663 - DNA, 15 bp, Homo sapiens
caatggagaggccgg

SEQ ID NO: 23664 - DNA, 15 bp, Homo sapiens
aatggagaggccgga

SEQ ID NO: 23665 - DNA, 15 bp, Homo sapiens
atggagaggccggaa

SEQ ID NO: 23666 - DNA, 15 bp, Homo sapiens
tggagaggccggaat

SEQ ID NO: 23667 - DNA, 15 bp, Homo sapiens
ggagaggccggaatg

SEQ ID NO: 23668 - DNA, 15 bp, Homo sapiens
gagaggccggaatgg

SEQ ID NO: 23669 - DNA, 15 bp, Homo sapiens
agaggccggaatggg

SEQ ID NO: 23670 - DNA, 15 bp, Homo sapiens
gaggccggaatgggg

SEQ ID NO: 23671 - DNA, 15 bp, Homo sapiens
aggccggaatggggg

SEQ ID NO: 23672 - DNA, 15 bp, Homo sapiens
ggccggaatgggggt

SEQ ID NO: 23673 - DNA, 15 bp, Homo sapiens
gccggaatgggggtg

SEQ ID NO: 23674 - DNA, 15 bp, Homo sapiens
ccggaatgggggtgg

SEQ ID NO: 23675 - DNA, 15 bp, Homo sapiens
cggaatgggggtggt

SEQ ID NO: 23676 - DNA, 15 bp, Homo sapiens
ggaatgggggtggtg

SEQ ID NO: 23677 - DNA, 15 bp, Homo sapiens
gaatgggggtggtgc

SEQ ID NO: 23678 - DNA, 15 bp, Homo sapiens
aatgggggtggtgcg

SEQ ID NO: 23679 - DNA, 15 bp, Homo sapiens
atgggggtggtgcga

SEQ ID NO: 23680 - DNA, 15 bp, Homo sapiens
tgggggtggtgcgaa

SEQ ID NO: 23681 - DNA, 15 bp, Homo sapiens
gggggtggtgcgaaa

SEQ ID NO: 23682 - DNA, 15 bp, Homo sapiens
ggggtggtgcgaaat

SEQ ID NO: 23683 - DNA, 15 bp, Homo sapiens
gggtggtgcgaaatc

SEQ ID NO: 23684 - DNA, 15 bp, Homo sapiens
ggtggtgcgaaatcc

SEQ ID NO: 23685 - DNA, 15 bp, Homo sapiens
gtggtgcgaaatcca

SEQ ID NO: 23686 - DNA, 15 bp, Homo sapiens
tggtgcgaaatccat

SEQ ID NO: 23687 - DNA, 15 bp, Homo sapiens
ggtgcgaaatccatg

SEQ ID NO: 23688 - DNA, 15 bp, Homo sapiens
gtgcgaaatccatga

SEQ ID NO: 23689 - DNA, 15 bp, Homo sapiens
tgcgaaatccatgat

SEQ ID NO: 23690 - DNA, 15 bp, Homo sapiens
gcgaaatccatgatg

SEQ ID NO: 23691 - DNA, 15 bp, Homo sapiens
cgaaatccatgatga

SEQ ID NO: 23692 - DNA, 15 bp, Homo sapiens
gaaatccatgatgaa

SEQ ID NO: 23693 - DNA, 15 bp, Homo sapiens
aaatccatgatgaag

SEQ ID NO: 23694 - DNA, 15 bp, Homo sapiens
aatccatgatgaaga

SEQ ID NO: 23695 - DNA, 15 bp, Homo sapiens
atccatgatgaagaa

SEQ ID NO: 23696 - DNA, 15 bp, Homo sapiens
tccatgatgaagaaa

SEQ ID NO: 23697 - DNA, 15 bp, Homo sapiens
ccatgatgaagaaaa

SEQ ID NO: 23698 - DNA, 15 bp, Homo sapiens
catgatgaagaaaac

SEQ ID NO: 23699 - DNA, 15 bp, Homo sapiens
atgatgaagaaaaca

SEQ ID NO: 23700 - DNA, 15 bp, Homo sapiens
tgatgaagaaaacag

SEQ ID NO: 23701 - DNA, 15 bp, Homo sapiens
gatgaagaaaacaga

SEQ ID NO: 23702 - DNA, 15 bp, Homo sapiens
atgaagaaaacagaa

SEQ ID NO: 23703 - DNA, 15 bp, Homo sapiens
tgaagaaaacagaag

SEQ ID NO: 23704 - DNA, 15 bp, Homo sapiens
gaagaaaacagaagc

SEQ ID NO: 23705 - DNA, 15 bp, Homo sapiens
aagaaaacagaagca

SEQ ID NO: 23706 - DNA, 15 bp, Homo sapiens
agaaaacagaagcag

SEQ ID NO: 23707 - DNA, 15 bp, Homo sapiens
gaaaacagaagcaga

SEQ ID NO: 23708 - DNA, 15 bp, Homo sapiens
aaaacagaagcagac

SEQ ID NO: 23709 - DNA, 15 bp, Homo sapiens
aaacagaagcagaca

SEQ ID NO: 23710 - DNA, 15 bp, Homo sapiens
aacagaagcagacag

SEQ ID NO: 23711 - DNA, 15 bp, Homo sapiens
acagaagcagacagc

SEQ ID NO: 23712 - DNA, 15 bp, Homo sapiens
cagaagcagacagct

SEQ ID NO: 23713 - DNA, 15 bp, Homo sapiens
agaagcagacagcta

SEQ ID NO: 23714 - DNA, 15 bp, Homo sapiens
gaagcagacagctaa

SEQ ID NO: 23715 - DNA, 15 bp, Homo sapiens
aagcagacagctaat

SEQ ID NO: 23716 - DNA, 15 bp, Homo sapiens
agcagacagctaatg

SEQ ID NO: 23717 - DNA, 15 bp, Homo sapiens
gcagacagctaatgc

SEQ ID NO: 23718 - DNA, 15 bp, Homo sapiens
cagacagctaatgcg

SEQ ID NO: 23719 - DNA, 15 bp, Homo sapiens
agacagctaatgcgg

SEQ ID NO: 23720 - DNA, 15 bp, Homo sapiens
gacagctaatgcgga

SEQ ID NO: 23721 - DNA, 15 bp, Homo sapiens
acagctaatgcggaa

SEQ ID NO: 23722 - DNA, 15 bp, Homo sapiens
cagctaatgcggaag

SEQ ID NO: 23723 - DNA, 15 bp, Homo sapiens
agctaatgcggaagt

SEQ ID NO: 23724 - DNA, 15 bp, Homo sapiens
gctaatgcggaagtc

SEQ ID NO: 23725 - DNA, 15 bp, Homo sapiens
ctaatgcggaagtct

SEQ ID NO: 23726 - DNA, 15 bp, Homo sapiens
taatgcggaagtctg

SEQ ID NO: 23727 - DNA, 15 bp, Homo sapiens
aatgcggaagtctga

SEQ ID NO: 23728 - DNA, 15 bp, Homo sapiens
atgcggaagtctgag

SEQ ID NO: 23729 - DNA, 15 bp, Homo sapiens
tgcggaagtctgagc

SEQ ID NO: 23730 - DNA, 15 bp, Homo sapiens
gcggaagtctgagcg

SEQ ID NO: 23731 - DNA, 15 bp, Homo sapiens
cggaagtctgagcga

SEQ ID NO: 23732 - DNA, 15 bp, Homo sapiens
ggaagtctgagcgag

SEQ ID NO: 23733 - DNA, 15 bp, Homo sapiens
gaagtctgagcgaga

SEQ ID NO: 23734 - DNA, 15 bp, Homo sapiens
aagtctgagcgagag

SEQ ID NO: 23735 - DNA, 15 bp, Homo sapiens
agtctgagcgagaga

SEQ ID NO: 23736 - DNA, 15 bp, Homo sapiens
gtctgagcgagagag

SEQ ID NO: 23737 - DNA, 15 bp, Homo sapiens
tctgagcgagagagg

SEQ ID NO: 23738 - DNA, 15 bp, Homo sapiens
ctgagcgagagaggc

SEQ ID NO: 23739 - DNA, 15 bp, Homo sapiens
tgagcgagagaggca

SEQ ID NO: 23740 - DNA, 15 bp, Homo sapiens
gagcgagagaggcat

SEQ ID NO: 23741 - DNA, 15 bp, Homo sapiens
agcgagagaggcatg

SEQ ID NO: 23742 - DNA, 15 bp, Homo sapiens
gcgagagaggcatgt

SEQ ID NO: 23743 - DNA, 15 bp, Homo sapiens
cgagagaggcatgtg

SEQ ID NO: 23744 - DNA, 15 bp, Homo sapiens
gagagaggcatgtgg

SEQ ID NO: 23745 - DNA, 15 bp, Homo sapiens
agagaggcatgtggg

SEQ ID NO: 23746 - DNA, 15 bp, Homo sapiens
gagaggcatgtgggc

SEQ ID NO: 23747 - DNA, 15 bp, Homo sapiens
agaggcatgtgggcg

SEQ ID NO: 23748 - DNA, 15 bp, Homo sapiens
gaggcatgtgggcgg

SEQ ID NO: 23749 - DNA, 15 bp, Homo sapiens
aggcatgtgggcggt

SEQ ID NO: 23750 - DNA, 15 bp, Homo sapiens
ggcatgtgggcggtg

SEQ ID NO: 23751 - DNA, 15 bp, Homo sapiens
gcatgtgggcggtgg

SEQ ID NO: 23752 - DNA, 15 bp, Homo sapiens
catgtgggcggtggg

SEQ ID NO: 23753 - DNA, 15 bp, Homo sapiens
atgtgggcggtggga

SEQ ID NO: 23754 - DNA, 15 bp, Homo sapiens
tgtgggcggtgggaa

SEQ ID NO: 23755 - DNA, 15 bp, Homo sapiens
gtgggcggtgggaaa

SEQ ID NO: 23756 - DNA, 15 bp, Homo sapiens
tgggcggtgggaaaa

SEQ ID NO: 23757 - DNA, 15 bp, Homo sapiens
gggcggtgggaaaag

SEQ ID NO: 23758 - DNA, 15 bp, Homo sapiens
ggcggtgggaaaagt

SEQ ID NO: 23759 - DNA, 15 bp, Homo sapiens
gcggtgggaaaagtg

SEQ ID NO: 23760 - DNA, 15 bp, Homo sapiens
cggtgggaaaagtgg

SEQ ID NO: 23761 - DNA, 15 bp, Homo sapiens
ggtgggaaaagtgga

SEQ ID NO: 23762 - DNA, 15 bp, Homo sapiens
gtgggaaaagtggaa

SEQ ID NO: 23763 - DNA, 15 bp, Homo sapiens
tgggaaaagtggaat

SEQ ID NO: 23764 - DNA, 15 bp, Homo sapiens
gggaaaagtggaatg

SEQ ID NO: 23765 - DNA, 15 bp, Homo sapiens
ggaaaagtggaatgg

SEQ ID NO: 23766 - DNA, 15 bp, Homo sapiens
gaaaagtggaatggc

SEQ ID NO: 23767 - DNA, 15 bp, Homo sapiens
aaaagtggaatggct

SEQ ID NO: 23768 - DNA, 15 bp, Homo sapiens
aaagtggaatggcta

SEQ ID NO: 23769 - DNA, 15 bp, Homo sapiens
aagtggaatggctac

SEQ ID NO: 23770 - DNA, 15 bp, Homo sapiens
agtggaatggctaca

SEQ ID NO: 23771 - DNA, 15 bp, Homo sapiens
gtggaatggctacag

SEQ ID NO: 23772 - DNA, 15 bp, Homo sapiens
tggaatggctacagg

SEQ ID NO: 23773 - DNA, 15 bp, Homo sapiens
ggaatggctacaggc

SEQ ID NO: 23774 - DNA, 15 bp, Homo sapiens
gaatggctacaggcg

SEQ ID NO: 23775 - DNA, 15 bp, Homo sapiens
aatggctacaggcga

SEQ ID NO: 23776 - DNA, 15 bp, Homo sapiens
atggctacaggcgat

SEQ ID NO: 23777 - DNA, 15 bp, Homo sapiens
tggctacaggcgatg

SEQ ID NO: 23778 - DNA, 15 bp, Homo sapiens
ggctacaggcgatga

SEQ ID NO: 23779 - DNA, 15 bp, Homo sapiens
gctacaggcgatgag

SEQ ID NO: 23780 - DNA, 15 bp, Homo sapiens
ctacaggcgatgagg

SEQ ID NO: 23781 - DNA, 15 bp, Homo sapiens
tacaggcgatgaggg

SEQ ID NO: 23782 - DNA, 15 bp, Homo sapiens
acaggcgatgagggc

SEQ ID NO: 23783 - DNA, 15 bp, Homo sapiens
caggcgatgagggca

SEQ ID NO: 23784 - DNA, 15 bp, Homo sapiens
aggcgatgagggcag

SEQ ID NO: 23785 - DNA, 15 bp, Homo sapiens
ggcgatgagggcagc

SEQ ID NO: 23786 - DNA, 15 bp, Homo sapiens
gcgatgagggcagcc

SEQ ID NO: 23787 - DNA, 15 bp, Homo sapiens
cgatgagggcagccg

SEQ ID NO: 23788 - DNA, 15 bp, Homo sapiens
gatgagggcagccgg

SEQ ID NO: 23789 - DNA, 15 bp, Homo sapiens
atgagggcagccggg

SEQ ID NO: 23790 - DNA, 15 bp, Homo sapiens
tgagggcagccggga

SEQ ID NO: 23791 - DNA, 15 bp, Homo sapiens
gagggcagccgggaa

SEQ ID NO: 23792 - DNA, 15 bp, Homo sapiens
agggcagccgggaac

SEQ ID NO: 23793 - DNA, 15 bp, Homo sapiens
gggcagccgggaacg

SEQ ID NO: 23794 - DNA, 15 bp, Homo sapiens
ggcagccgggaacga

SEQ ID NO: 23795 - DNA, 15 bp, Homo sapiens
gcagccgggaacgaa

SEQ ID NO: 23796 - DNA, 15 bp, Homo sapiens
cagccgggaacgaac

SEQ ID NO: 23797 - DNA, 15 bp, Homo sapiens
agccgggaacgaacg

SEQ ID NO: 23798 - DNA, 15 bp, Homo sapiens
gccgggaacgaacgc

SEQ ID NO: 23799 - DNA, 15 bp, Homo sapiens
ccgggaacgaacgca

SEQ ID NO: 23800 - DNA, 15 bp, Homo sapiens
cgggaacgaacgcag

SEQ ID NO: 23801 - DNA, 15 bp, Homo sapiens
gggaacgaacgcaga

SEQ ID NO: 23802 - DNA, 15 bp, Homo sapiens
ggaacgaacgcagag

SEQ ID NO: 23803 - DNA, 15 bp, Homo sapiens
gaacgaacgcagagg

SEQ ID NO: 23804 - DNA, 15 bp, Homo sapiens
aacgaacgcagaggc

SEQ ID NO: 23805 - DNA, 15 bp, Homo sapiens
acgaacgcagaggcc

SEQ ID NO: 23806 - DNA, 15 bp, Homo sapiens
cgaacgcagaggccc

SEQ ID NO: 23807 - DNA, 15 bp, Homo sapiens
gaacgcagaggccca

SEQ ID NO: 23808 - DNA, 15 bp, Homo sapiens
aacgcagaggcccaa

SEQ ID NO: 23809 - DNA, 15 bp, Homo sapiens
acgcagaggcccaaa

SEQ ID NO: 23810 - DNA, 15 bp, Homo sapiens
cgcagaggcccaaaa

SEQ ID NO: 23811 - DNA, 15 bp, Homo sapiens
gcagaggcccaaaaa

SEQ ID NO: 23812 - DNA, 15 bp, Homo sapiens
cagaggcccaaaaag

SEQ ID NO: 23813 - DNA, 15 bp, Homo sapiens
agaggcccaaaaagt

SEQ ID NO: 23814 - DNA, 15 bp, Homo sapiens
gaggcccaaaaagtg

SEQ ID NO: 23815 - DNA, 15 bp, Homo sapiens
aggcccaaaaagtgg

SEQ ID NO: 23816 - DNA, 15 bp, Homo sapiens
ggcccaaaaagtggg

SEQ ID NO: 23817 - DNA, 15 bp, Homo sapiens
gcccaaaaagtggga

SEQ ID NO: 23818 - DNA, 15 bp, Homo sapiens
cccaaaaagtgggag

SEQ ID NO: 23819 - DNA, 15 bp, Homo sapiens
ccaaaaagtgggaga

SEQ ID NO: 23820 - DNA, 15 bp, Homo sapiens
caaaaagtgggagat

SEQ ID NO: 23821 - DNA, 15 bp, Homo sapiens
aaaaagtgggagatc

SEQ ID NO: 23822 - DNA, 15 bp, Homo sapiens
aaaagtgggagatcc

SEQ ID NO: 23823 - DNA, 15 bp, Homo sapiens
aaagtgggagatccc

SEQ ID NO: 23824 - DNA, 15 bp, Homo sapiens
aagtgggagatcccg

SEQ ID NO: 23825 - DNA, 15 bp, Homo sapiens
agtgggagatcccgc

SEQ ID NO: 23826 - DNA, 15 bp, Homo sapiens
gtgggagatcccgcg

SEQ ID NO: 23827 - DNA, 15 bp, Homo sapiens
tgggagatcccgcgg

SEQ ID NO: 23828 - DNA, 15 bp, Homo sapiens
gggagatcccgcggg

SEQ ID NO: 23829 - DNA, 15 bp, Homo sapiens
ggagatcccgcgggt

SEQ ID NO: 23830 - DNA, 15 bp, Homo sapiens
gagatcccgcgggtt

SEQ ID NO: 23831 - DNA, 15 bp, Homo sapiens
agatcccgcgggttg

SEQ ID NO: 23832 - DNA, 15 bp, Homo sapiens
gatcccgcgggttgc

SEQ ID NO: 23833 - DNA, 15 bp, Homo sapiens
atcccgcgggttgcg

SEQ ID NO: 23834 - DNA, 15 bp, Homo sapiens
tcccgcgggttgcgt

SEQ ID NO: 23835 - DNA, 15 bp, Homo sapiens
cccgcgggttgcgta

SEQ ID NO: 23836 - DNA, 15 bp, Homo sapiens
ccgcgggttgcgtag

SEQ ID NO: 23837 - DNA, 15 bp, Homo sapiens
cgcgggttgcgtagg

SEQ ID NO: 23838 - DNA, 15 bp, Homo sapiens
gcgggttgcgtaggc

SEQ ID NO: 23839 - DNA, 15 bp, Homo sapiens
cgggttgcgtaggcg

SEQ ID NO: 23840 - DNA, 15 bp, Homo sapiens
gggttgcgtaggcgg

SEQ ID NO: 23841 - DNA, 15 bp, Homo sapiens
ggttgcgtaggcggt

SEQ ID NO: 23842 - DNA, 15 bp, Homo sapiens
gttgcgtaggcggtg

SEQ ID NO: 23843 - DNA, 15 bp, Homo sapiens
ttgcgtaggcggtgg

SEQ ID NO: 23844 - DNA, 15 bp, Homo sapiens
tgcgtaggcggtgga

SEQ ID NO: 23845 - DNA, 15 bp, Homo sapiens
gcgtaggcggtggaa

SEQ ID NO: 23846 - DNA, 15 bp, Homo sapiens
cgtaggcggtggaac

SEQ ID NO: 23847 - DNA, 15 bp, Homo sapiens
gtaggcggtggaacg

SEQ ID NO: 23848 - DNA, 15 bp, Homo sapiens
taggcggtggaacgg

SEQ ID NO: 23849 - DNA, 15 bp, Homo sapiens
aggcggtggaacggt

SEQ ID NO: 23850 - DNA, 15 bp, Homo sapiens
ggcggtggaacggta

SEQ ID NO: 23851 - DNA, 15 bp, Homo sapiens
gcggtggaacggtag

SEQ ID NO: 23852 - DNA, 15 bp, Homo sapiens
cggtggaacggtagc

SEQ ID NO: 23853 - DNA, 15 bp, Homo sapiens
ggtggaacggtagct

SEQ ID NO: 23854 - DNA, 15 bp, Homo sapiens
gtggaacggtagcta

SEQ ID NO: 23855 - DNA, 15 bp, Homo sapiens
tggaacggtagctag

SEQ ID NO: 23856 - DNA, 15 bp, Homo sapiens
ggaacggtagctaga

SEQ ID NO: 23857 - DNA, 15 bp, Homo sapiens
gaacggtagctagag

SEQ ID NO: 23858 - DNA, 15 bp, Homo sapiens
aacggtagctagaga

SEQ ID NO: 23859 - DNA, 15 bp, Homo sapiens
acggtagctagagag

SEQ ID NO: 23860 - DNA, 15 bp, Homo sapiens
cggtagctagagaga

SEQ ID NO: 23861 - DNA, 15 bp, Homo sapiens
ggtagctagagagag

SEQ ID NO: 23862 - DNA, 15 bp, Homo sapiens
gtagctagagagaga

SEQ ID NO: 23863 - DNA, 15 bp, Homo sapiens
tagctagagagagag

SEQ ID NO: 23864 - DNA, 15 bp, Homo sapiens
agctagagagagaga

SEQ ID NO: 23865 - DNA, 15 bp, Homo sapiens
gctagagagagagaa

SEQ ID NO: 23866 - DNA, 15 bp, Homo sapiens
ctagagagagagaac

SEQ ID NO: 23867 - DNA, 15 bp, Homo sapiens
tagagagagagaaca

SEQ ID NO: 23868 - DNA, 15 bp, Homo sapiens
agagagagagaacag

SEQ ID NO: 23869 - DNA, 15 bp, Homo sapiens
gagagagagaacagc

SEQ ID NO: 23870 - DNA, 15 bp, Homo sapiens
agagagagaacagcc

SEQ ID NO: 23871 - DNA, 15 bp, Homo sapiens
gagagagaacagcca

SEQ ID NO: 23872 - DNA, 15 bp, Homo sapiens
agagagaacagccaa

SEQ ID NO: 23873 - DNA, 15 bp, Homo sapiens
gagagaacagccaat

SEQ ID NO: 23874 - DNA, 15 bp, Homo sapiens
agagaacagccaatg

SEQ ID NO: 23875 - DNA, 15 bp, Homo sapiens
gagaacagccaatgg

SEQ ID NO: 23876 - DNA, 15 bp, Homo sapiens
agaacagccaatgga

SEQ ID NO: 23877 - DNA, 15 bp, Homo sapiens
gaacagccaatggag

SEQ ID NO: 23878 - DNA, 15 bp, Homo sapiens
aacagccaatggaga

SEQ ID NO: 23879 - DNA, 15 bp, Homo sapiens
acagccaatggagag

SEQ ID NO: 23880 - DNA, 15 bp, Homo sapiens
cagccaatggagagc

SEQ ID NO: 23881 - DNA, 15 bp, Homo sapiens
agccaatggagagcc

SEQ ID NO: 23882 - DNA, 15 bp, Homo sapiens
gccaatggagagcca

SEQ ID NO: 23883 - DNA, 15 bp, Homo sapiens
ccaatggagagccac

SEQ ID NO: 23884 - DNA, 15 bp, Homo sapiens
caatggagagccacg

SEQ ID NO: 23885 - DNA, 15 bp, Homo sapiens
aatggagagccacgc

SEQ ID NO: 23886 - DNA, 15 bp, Homo sapiens
atggagagccacgcg

SEQ ID NO: 23887 - DNA, 15 bp, Homo sapiens
tggagagccacgcgt

SEQ ID NO: 23888 - DNA, 15 bp, Homo sapiens
ggagagccacgcgtg

SEQ ID NO: 23889 - DNA, 15 bp, Homo sapiens
gagagccacgcgtgg

SEQ ID NO: 23890 - DNA, 15 bp, Homo sapiens
agagccacgcgtggg

SEQ ID NO: 23891 - DNA, 15 bp, Homo sapiens
gagccacgcgtggga

SEQ ID NO: 23892 - DNA, 15 bp, Homo sapiens
agccacgcgtgggat

SEQ ID NO: 23893 - DNA, 15 bp, Homo sapiens
gccacgcgtgggatg

SEQ ID NO: 23894 - DNA, 15 bp, Homo sapiens
ccacgcgtgggatga

SEQ ID NO: 23895 - DNA, 15 bp, Homo sapiens
cacgcgtgggatgac

SEQ ID NO: 23896 - DNA, 15 bp, Homo sapiens
acgcgtgggatgacg

SEQ ID NO: 23897 - DNA, 15 bp, Homo sapiens
cgcgtgggatgacga

SEQ ID NO: 23898 - DNA, 15 bp, Homo sapiens
gcgtgggatgacgac

SEQ ID NO: 23899 - DNA, 15 bp, Homo sapiens
cgtgggatgacgaca

SEQ ID NO: 23900 - DNA, 15 bp, Homo sapiens
gtgggatgacgacaa

SEQ ID NO: 23901 - DNA, 15 bp, Homo sapiens
tgggatgacgacaat

SEQ ID NO: 23902 - DNA, 15 bp, Homo sapiens
gggatgacgacaatg

SEQ ID NO: 23903 - DNA, 15 bp, Homo sapiens
ggatgacgacaatgg

SEQ ID NO: 23904 - DNA, 15 bp, Homo sapiens
gatgacgacaatggc

SEQ ID NO: 23905 - DNA, 15 bp, Homo sapiens
atgacgacaatggct

SEQ ID NO: 23906 - DNA, 15 bp, Homo sapiens
tgacgacaatggctg

SEQ ID NO: 23907 - DNA, 15 bp, Homo sapiens
gacgacaatggctgc

SEQ ID NO: 23908 - DNA, 15 bp, Homo sapiens
acgacaatggctgca

SEQ ID NO: 23909 - DNA, 15 bp, Homo sapiens
cgacaatggctgcag

SEQ ID NO: 23910 - DNA, 15 bp, Homo sapiens
gacaatggctgcagc

SEQ ID NO: 23911 - DNA, 15 bp, Homo sapiens
acaatggctgcagcg

SEQ ID NO: 23912 - DNA, 15 bp, Homo sapiens
caatggctgcagcga

SEQ ID NO: 23913 - DNA, 15 bp, Homo sapiens
aatggctgcagcgag

SEQ ID NO: 23914 - DNA, 15 bp, Homo sapiens
atggctgcagcgagc

SEQ ID NO: 23915 - DNA, 15 bp, Homo sapiens
tggctgcagcgagcc

SEQ ID NO: 23916 - DNA, 15 bp, Homo sapiens
ggctgcagcgagcca

SEQ ID NO: 23917 - DNA, 15 bp, Homo sapiens
gctgcagcgagccaa

SEQ ID NO: 23918 - DNA, 15 bp, Homo sapiens
ctgcagcgagccaat

SEQ ID NO: 23919 - DNA, 15 bp, Homo sapiens
tgcagcgagccaatg

SEQ ID NO: 23920 - DNA, 15 bp, Homo sapiens
gcagcgagccaatgg

SEQ ID NO: 23921 - DNA, 15 bp, Homo sapiens
cagcgagccaatggg

SEQ ID NO: 23922 - DNA, 15 bp, Homo sapiens
agcgagccaatgggg

SEQ ID NO: 23923 - DNA, 15 bp, Homo sapiens
gcgagccaatgggga

SEQ ID NO: 23924 - DNA, 15 bp, Homo sapiens
cgagccaatggggag

SEQ ID NO: 23925 - DNA, 15 bp, Homo sapiens
gagccaatggggagg

SEQ ID NO: 23926 - DNA, 15 bp, Homo sapiens
agccaatggggaggc

SEQ ID NO: 23927 - DNA, 15 bp, Homo sapiens
gccaatggggaggct

SEQ ID NO: 23928 - DNA, 15 bp, Homo sapiens
ccaatggggaggctt

SEQ ID NO: 23929 - DNA, 15 bp, Homo sapiens
caatggggaggcttg

SEQ ID NO: 23930 - DNA, 15 bp, Homo sapiens
aatggggaggcttgt

SEQ ID NO: 23931 - DNA, 15 bp, Homo sapiens
atggggaggcttgtg

SEQ ID NO: 23932 - DNA, 15 bp, Homo sapiens
tggggaggcttgtga

SEQ ID NO: 23933 - DNA, 15 bp, Homo sapiens
ggggaggcttgtgag

SEQ ID NO: 23934 - DNA, 15 bp, Homo sapiens
gggaggcttgtgagc

SEQ ID NO: 23935 - DNA, 15 bp, Homo sapiens
ggaggcttgtgagcg

SEQ ID NO: 23936 - DNA, 15 bp, Homo sapiens
gaggcttgtgagcgt

SEQ ID NO: 23937 - DNA, 15 bp, Homo sapiens
aggcttgtgagcgtg

SEQ ID NO: 23938 - DNA, 15 bp, Homo sapiens
ggcttgtgagcgtgc

SEQ ID NO: 23939 - DNA, 15 bp, Homo sapiens
gcttgtgagcgtgca

SEQ ID NO: 23940 - DNA, 15 bp, Homo sapiens
cttgtgagcgtgcac

SEQ ID NO: 23941 - DNA, 15 bp, Homo sapiens
ttgtgagcgtgcact

SEQ ID NO: 23942 - DNA, 15 bp, Homo sapiens
tgtgagcgtgcactg

SEQ ID NO: 23943 - DNA, 15 bp, Homo sapiens
gtgagcgtgcactgc

SEQ ID NO: 23944 - DNA, 15 bp, Homo sapiens
tgagcgtgcactgcg

SEQ ID NO: 23945 - DNA, 15 bp, Homo sapiens
gagcgtgcactgcgg

SEQ ID NO: 23946 - DNA, 15 bp, Homo sapiens
agcgtgcactgcggc

SEQ ID NO: 23947 - DNA, 15 bp, Homo sapiens
gcgtgcactgcggct

SEQ ID NO: 23948 - DNA, 15 bp, Homo sapiens
cgtgcactgcggctt

SEQ ID NO: 23949 - DNA, 15 bp, Homo sapiens
gtgcactgcggcttc

SEQ ID NO: 23950 - DNA, 15 bp, Homo sapiens
tgcactgcggcttcg

SEQ ID NO: 23951 - DNA, 15 bp, Homo sapiens
gcactgcggcttcga

SEQ ID NO: 23952 - DNA, 15 bp, Homo sapiens
cactgcggcttcgaa

SEQ ID NO: 23953 - DNA, 15 bp, Homo sapiens
actgcggcttcgaag

SEQ ID NO: 23954 - DNA, 15 bp, Homo sapiens
ctgcggcttcgaagg

SEQ ID NO: 23955 - DNA, 15 bp, Homo sapiens
tgcggcttcgaaggg

SEQ ID NO: 23956 - DNA, 15 bp, Homo sapiens
gcggcttcgaagggg

SEQ ID NO: 23957 - DNA, 15 bp, Homo sapiens
cggcttcgaaggggt

SEQ ID NO: 23958 - DNA, 15 bp, Homo sapiens
ggcttcgaaggggtg

SEQ ID NO: 23959 - DNA, 15 bp, Homo sapiens
gcttcgaaggggtgg

SEQ ID NO: 23960 - DNA, 15 bp, Homo sapiens
cttcgaaggggtggt

SEQ ID NO: 23961 - DNA, 15 bp, Homo sapiens
ttcgaaggggtggtg

SEQ ID NO: 23962 - DNA, 15 bp, Homo sapiens
tcgaaggggtggtgc

SEQ ID NO: 23963 - DNA, 15 bp, Homo sapiens
cgaaggggtggtgcc

SEQ ID NO: 23964 - DNA, 15 bp, Homo sapiens
gaaggggtggtgcca

SEQ ID NO: 23965 - DNA, 15 bp, Homo sapiens
aaggggtggtgccaa

SEQ ID NO: 23966 - DNA, 15 bp, Homo sapiens
aggggtggtgccaag

SEQ ID NO: 23967 - DNA, 15 bp, Homo sapiens
ggggtggtgccaagg

SEQ ID NO: 23968 - DNA, 15 bp, Homo sapiens
gggtggtgccaaggt

SEQ ID NO: 23969 - DNA, 15 bp, Homo sapiens
ggtggtgccaaggtg

SEQ ID NO: 23970 - DNA, 15 bp, Homo sapiens
gtggtgccaaggtgg

SEQ ID NO: 23971 - DNA, 15 bp, Homo sapiens
tggtgccaaggtgga

SEQ ID NO: 23972 - DNA, 15 bp, Homo sapiens
ggtgccaaggtggag

SEQ ID NO: 23973 - DNA, 15 bp, Homo sapiens
gtgccaaggtggagc

SEQ ID NO: 23974 - DNA, 15 bp, Homo sapiens
tgccaaggtggagct

SEQ ID NO: 23975 - DNA, 15 bp, Homo sapiens
gccaaggtggagcta

SEQ ID NO: 23976 - DNA, 15 bp, Homo sapiens
ccaaggtggagctag

SEQ ID NO: 23977 - DNA, 15 bp, Homo sapiens
caaggtggagctagc

SEQ ID NO: 23978 - DNA, 15 bp, Homo sapiens
aaggtggagctagcc

SEQ ID NO: 23979 - DNA, 15 bp, Homo sapiens
aggtggagctagcca

SEQ ID NO: 23980 - DNA, 15 bp, Homo sapiens
ggtggagctagccaa

SEQ ID NO: 23981 - DNA, 15 bp, Homo sapiens
gtggagctagccaat

SEQ ID NO: 23982 - DNA, 15 bp, Homo sapiens
tggagctagccaata

SEQ ID NO: 23983 - DNA, 15 bp, Homo sapiens
ggagctagccaatac

SEQ ID NO: 23984 - DNA, 15 bp, Homo sapiens
gagctagccaatacg

SEQ ID NO: 23985 - DNA, 15 bp, Homo sapiens
agctagccaatacga

SEQ ID NO: 23986 - DNA, 15 bp, Homo sapiens
gctagccaatacgaa

SEQ ID NO: 23987 - DNA, 15 bp, Homo sapiens
ctagccaatacgaag

SEQ ID NO: 23988 - DNA, 15 bp, Homo sapiens
tagccaatacgaagg

SEQ ID NO: 23989 - DNA, 15 bp, Homo sapiens
agccaatacgaaggc

SEQ ID NO: 23990 - DNA, 15 bp, Homo sapiens
gccaatacgaaggct

SEQ ID NO: 23991 - DNA, 15 bp, Homo sapiens
ccaatacgaaggcta

SEQ ID NO: 23992 - DNA, 15 bp, Homo sapiens
caatacgaaggctaa

SEQ ID NO: 23993 - DNA, 15 bp, Homo sapiens
aatacgaaggctaaa

SEQ ID NO: 23994 - DNA, 15 bp, Homo sapiens
atacgaaggctaaaa

SEQ ID NO: 23995 - DNA, 15 bp, Homo sapiens
tacgaaggctaaaag

SEQ ID NO: 23996 - DNA, 15 bp, Homo sapiens
acgaaggctaaaagg

SEQ ID NO: 23997 - DNA, 15 bp, Homo sapiens
cgaaggctaaaagga

SEQ ID NO: 23998 - DNA, 15 bp, Homo sapiens
gaaggctaaaaggag

SEQ ID NO: 23999 - DNA, 15 bp, Homo sapiens
aaggctaaaaggaga

SEQ ID NO: 24000 - DNA, 15 bp, Homo sapiens
aggctaaaaggagac

SEQ ID NO: 24001 - DNA, 15 bp, Homo sapiens
ggctaaaaggagacc

SEQ ID NO: 24002 - DNA, 15 bp, Homo sapiens
gctaaaaggagacca

SEQ ID NO: 24003 - DNA, 15 bp, Homo sapiens
ctaaaaggagaccaa

SEQ ID NO: 24004 - DNA, 15 bp, Homo sapiens
taaaaggagaccaag

SEQ ID NO: 24005 - DNA, 15 bp, Homo sapiens
aaaaggagaccaaga

SEQ ID NO: 24006 - DNA, 15 bp, Homo sapiens
aaaggagaccaagag

SEQ ID NO: 24007 - DNA, 15 bp, Homo sapiens
aaggagaccaagagg

SEQ ID NO: 24008 - DNA, 15 bp, Homo sapiens
aggagaccaagaggc

SEQ ID NO: 24009 - DNA, 15 bp, Homo sapiens
ggagaccaagaggcg

SEQ ID NO: 24010 - DNA, 15 bp, Homo sapiens
gagaccaagaggcgg

SEQ ID NO: 24011 - DNA, 15 bp, Homo sapiens
agaccaagaggcggg

SEQ ID NO: 24012 - DNA, 15 bp, Homo sapiens
gaccaagaggcgggt

SEQ ID NO: 24013 - DNA, 15 bp, Homo sapiens
accaagaggcgggtg

SEQ ID NO: 24014 - DNA, 15 bp, Homo sapiens
ccaagaggcgggtgt

SEQ ID NO: 24015 - DNA, 15 bp, Homo sapiens
caagaggcgggtgtg

SEQ ID NO: 24016 - DNA, 15 bp, Homo sapiens
aagaggcgggtgtgt

SEQ ID NO: 24017 - DNA, 15 bp, Homo sapiens
agaggcgggtgtgta

SEQ ID NO: 24018 - DNA, 15 bp, Homo sapiens
gaggcgggtgtgtag

SEQ ID NO: 24019 - DNA, 15 bp, Homo sapiens
aggcgggtgtgtagg

SEQ ID NO: 24020 - DNA, 15 bp, Homo sapiens
ggcgggtgtgtaggg

SEQ ID NO: 24021 - DNA, 15 bp, Homo sapiens
gcgggtgtgtaggga

SEQ ID NO: 24022 - DNA, 15 bp, Homo sapiens
cgggtgtgtagggag

SEQ ID NO: 24023 - DNA, 15 bp, Homo sapiens
gggtgtgtagggagc

SEQ ID NO: 24024 - DNA, 15 bp, Homo sapiens
ggtgtgtagggagcc

SEQ ID NO: 24025 - DNA, 15 bp, Homo sapiens
gtgtgtagggagccg

SEQ ID NO: 24026 - DNA, 15 bp, Homo sapiens
tgtgtagggagccga

SEQ ID NO: 24027 - DNA, 15 bp, Homo sapiens
gtgtagggagccgag

SEQ ID NO: 24028 - DNA, 15 bp, Homo sapiens
tgtagggagccgagc

SEQ ID NO: 24029 - DNA, 15 bp, Homo sapiens
gtagggagccgagcc

SEQ ID NO: 24030 - DNA, 15 bp, Homo sapiens
tagggagccgagcca

SEQ ID NO: 24031 - DNA, 15 bp, Homo sapiens
agggagccgagccaa

SEQ ID NO: 24032 - DNA, 15 bp, Homo sapiens
gggagccgagccaat

SEQ ID NO: 24033 - DNA, 15 bp, Homo sapiens
ggagccgagccaatg

SEQ ID NO: 24034 - DNA, 15 bp, Homo sapiens
gagccgagccaatgg

SEQ ID NO: 24035 - DNA, 15 bp, Homo sapiens
agccgagccaatgga

SEQ ID NO: 24036 - DNA, 15 bp, Homo sapiens
gccgagccaatggag

SEQ ID NO: 24037 - DNA, 15 bp, Homo sapiens
ccgagccaatggagg

SEQ ID NO: 24038 - DNA, 15 bp, Homo sapiens
cgagccaatggaggt

SEQ ID NO: 24039 - DNA, 15 bp, Homo sapiens
gagccaatggaggtg

SEQ ID NO: 24040 - DNA, 15 bp, Homo sapiens
agccaatggaggtgg

SEQ ID NO: 24041 - DNA, 15 bp, Homo sapiens
gccaatggaggtgga

SEQ ID NO: 24042 - DNA, 15 bp, Homo sapiens
ccaatggaggtggag

SEQ ID NO: 24043 - DNA, 15 bp, Homo sapiens
caatggaggtggagg

SEQ ID NO: 24044 - DNA, 15 bp, Homo sapiens
aatggaggtggaggc

SEQ ID NO: 24045 - DNA, 15 bp, Homo sapiens
atggaggtggaggct

SEQ ID NO: 24046 - DNA, 15 bp, Homo sapiens
tggaggtggaggctg

SEQ ID NO: 24047 - DNA, 15 bp, Homo sapiens
ggaggtggaggctga

SEQ ID NO: 24048 - DNA, 15 bp, Homo sapiens
gaggtggaggctgaa

SEQ ID NO: 24049 - DNA, 15 bp, Homo sapiens
aggtggaggctgaag

SEQ ID NO: 24050 - DNA, 15 bp, Homo sapiens
ggtggaggctgaagg

SEQ ID NO: 24051 - DNA, 15 bp, Homo sapiens
gtggaggctgaaggc

SEQ ID NO: 24052 - DNA, 15 bp, Homo sapiens
tggaggctgaaggcg

SEQ ID NO: 24053 - DNA, 15 bp, Homo sapiens
ggaggctgaaggcgg

SEQ ID NO: 24054 - DNA, 15 bp, Homo sapiens
gaggctgaaggcggg

SEQ ID NO: 24055 - DNA, 15 bp, Homo sapiens
aggctgaaggcggga

SEQ ID NO: 24056 - DNA, 15 bp, Homo sapiens
ggctgaaggcgggag

SEQ ID NO: 24057 - DNA, 15 bp, Homo sapiens
gctgaaggcgggagc

SEQ ID NO: 24058 - DNA, 15 bp, Homo sapiens
ctgaaggcgggagcg

SEQ ID NO: 24059 - DNA, 15 bp, Homo sapiens
tgaaggcgggagcga

SEQ ID NO: 24060 - DNA, 15 bp, Homo sapiens
gaaggcgggagcgag

SEQ ID NO: 24061 - DNA, 15 bp, Homo sapiens
aaggcgggagcgagg

SEQ ID NO: 24062 - DNA, 15 bp, Homo sapiens
aggcgggagcgagga

SEQ ID NO: 24063 - DNA, 15 bp, Homo sapiens
ggcgggagcgaggac

SEQ ID NO: 24064 - DNA, 15 bp, Homo sapiens
gcgggagcgaggacg

SEQ ID NO: 24065 - DNA, 15 bp, Homo sapiens
cgggagcgaggacga

SEQ ID NO: 24066 - DNA, 15 bp, Homo sapiens
gggagcgaggacgag

SEQ ID NO: 24067 - DNA, 15 bp, Homo sapiens
ggagcgaggacgaga

SEQ ID NO: 24068 - DNA, 15 bp, Homo sapiens
gagcgaggacgagag

SEQ ID NO: 24069 - DNA, 15 bp, Homo sapiens
agcgaggacgagagc

SEQ ID NO: 24070 - DNA, 15 bp, Homo sapiens
gcgaggacgagagct

SEQ ID NO: 24071 - DNA, 15 bp, Homo sapiens
cgaggacgagagctg

SEQ ID NO: 24072 - DNA, 15 bp, Homo sapiens
gaggacgagagctgg

SEQ ID NO: 24073 - DNA, 15 bp, Homo sapiens
aggacgagagctggc

SEQ ID NO: 24074 - DNA, 15 bp, Homo sapiens
ggacgagagctggcg

SEQ ID NO: 24075 - DNA, 15 bp, Homo sapiens
gacgagagctggcgg

SEQ ID NO: 24076 - DNA, 15 bp, Homo sapiens
acgagagctggcgga

SEQ ID NO: 24077 - DNA, 15 bp, Homo sapiens
cgagagctggcggat

SEQ ID NO: 24078 - DNA, 15 bp, Homo sapiens
gagagctggcggata

SEQ ID NO: 24079 - DNA, 15 bp, Homo sapiens
agagctggcggatag

SEQ ID NO: 24080 - DNA, 15 bp, Homo sapiens
gagctggcggatagc

SEQ ID NO: 24081 - DNA, 15 bp, Homo sapiens
agctggcggatagcc

SEQ ID NO: 24082 - DNA, 15 bp, Homo sapiens
gctggcggatagcca

SEQ ID NO: 24083 - DNA, 15 bp, Homo sapiens
ctggcggatagccaa

SEQ ID NO: 24084 - DNA, 15 bp, Homo sapiens
tggcggatagccaat

SEQ ID NO: 24085 - DNA, 15 bp, Homo sapiens
ggcggatagccaatg

SEQ ID NO: 24086 - DNA, 15 bp, Homo sapiens
gcggatagccaatga

SEQ ID NO: 24087 - DNA, 15 bp, Homo sapiens
cggatagccaatgag

SEQ ID NO: 24088 - DNA, 15 bp, Homo sapiens
ggatagccaatgagg

SEQ ID NO: 24089 - DNA, 15 bp, Homo sapiens
gatagccaatgaggg

SEQ ID NO: 24090 - DNA, 15 bp, Homo sapiens
atagccaatgaggga

SEQ ID NO: 24091 - DNA, 15 bp, Homo sapiens
tagccaatgagggag

SEQ ID NO: 24092 - DNA, 15 bp, Homo sapiens
agccaatgagggagc

SEQ ID NO: 24093 - DNA, 15 bp, Homo sapiens
gccaatgagggagcc

SEQ ID NO: 24094 - DNA, 15 bp, Homo sapiens
ccaatgagggagcca

SEQ ID NO: 24095 - DNA, 15 bp, Homo sapiens
caatgagggagccag

SEQ ID NO: 24096 - DNA, 15 bp, Homo sapiens
aatgagggagccagg

SEQ ID NO: 24097 - DNA, 15 bp, Homo sapiens
atgagggagccaggg

SEQ ID NO: 24098 - DNA, 15 bp, Homo sapiens
tgagggagccagggt

SEQ ID NO: 24099 - DNA, 15 bp, Homo sapiens
gagggagccagggtg

SEQ ID NO: 24100 - DNA, 15 bp, Homo sapiens
agggagccagggtga

SEQ ID NO: 24101 - DNA, 15 bp, Homo sapiens
gggagccagggtgaa

SEQ ID NO: 24102 - DNA, 15 bp, Homo sapiens
ggagccagggtgaag

SEQ ID NO: 24103 - DNA, 15 bp, Homo sapiens
gagccagggtgaagg

SEQ ID NO: 24104 - DNA, 15 bp, Homo sapiens
agccagggtgaaggc

SEQ ID NO: 24105 - DNA, 15 bp, Homo sapiens
gccagggtgaaggcg

SEQ ID NO: 24106 - DNA, 15 bp, Homo sapiens
ccagggtgaaggcgt

SEQ ID NO: 24107 - DNA, 15 bp, Homo sapiens
cagggtgaaggcgta

SEQ ID NO: 24108 - DNA, 15 bp, Homo sapiens
agggtgaaggcgtag

SEQ ID NO: 24109 - DNA, 15 bp, Homo sapiens
gggtgaaggcgtaga

SEQ ID NO: 24110 - DNA, 15 bp, Homo sapiens
ggtgaaggcgtagag

SEQ ID NO: 24111 - DNA, 15 bp, Homo sapiens
gtgaaggcgtagaga

SEQ ID NO: 24112 - DNA, 15 bp, Homo sapiens
tgaaggcgtagagac

SEQ ID NO: 24113 - DNA, 15 bp, Homo sapiens
gaaggcgtagagacc

SEQ ID NO: 24114 - DNA, 15 bp, Homo sapiens
aaggcgtagagacct

SEQ ID NO: 24115 - DNA, 15 bp, Homo sapiens
aggcgtagagacctc

SEQ ID NO: 24116 - DNA, 15 bp, Homo sapiens
ggcgtagagacctca

SEQ ID NO: 24117 - DNA, 15 bp, Homo sapiens
gcgtagagacctcaa

SEQ ID NO: 24118 - DNA, 15 bp, Homo sapiens
cgtagagacctcaaa

SEQ ID NO: 24119 - DNA, 15 bp, Homo sapiens
gtagagacctcaaag

SEQ ID NO: 24120 - DNA, 15 bp, Homo sapiens
tagagacctcaaagg

SEQ ID NO: 24121 - DNA, 15 bp, Homo sapiens
agagacctcaaagga

SEQ ID NO: 24122 - DNA, 15 bp, Homo sapiens
gagacctcaaaggac

SEQ ID NO: 24123 - DNA, 15 bp, Homo sapiens
agacctcaaaggaca

SEQ ID NO: 24124 - DNA, 15 bp, Homo sapiens
gacctcaaaggacag

SEQ ID NO: 24125 - DNA, 15 bp, Homo sapiens
acctcaaaggacagt

SEQ ID NO: 24126 - DNA, 15 bp, Homo sapiens
cctcaaaggacagta

SEQ ID NO: 24127 - DNA, 15 bp, Homo sapiens
ctcaaaggacagtac

SEQ ID NO: 24128 - DNA, 15 bp, Homo sapiens
tcaaaggacagtact

SEQ ID NO: 24129 - DNA, 15 bp, Homo sapiens
caaaggacagtacta

SEQ ID NO: 24130 - DNA, 15 bp, Homo sapiens
aaaggacagtactag

SEQ ID NO: 24131 - DNA, 15 bp, Homo sapiens
aaggacagtactagt

SEQ ID NO: 24132 - DNA, 15 bp, Homo sapiens
aggacagtactagta

SEQ ID NO: 24133 - DNA, 15 bp, Homo sapiens
ggacagtactagtat

SEQ ID NO: 24134 - DNA, 15 bp, Homo sapiens
gacagtactagtatg

SEQ ID NO: 24135 - DNA, 15 bp, Homo sapiens
acagtactagtatgg

SEQ ID NO: 24136 - DNA, 15 bp, Homo sapiens
cagtactagtatggg

SEQ ID NO: 24137 - DNA, 15 bp, Homo sapiens
agtactagtatggga

SEQ ID NO: 24138 - DNA, 15 bp, Homo sapiens
gtactagtatgggat

SEQ ID NO: 24139 - DNA, 15 bp, Homo sapiens
tactagtatgggatg

SEQ ID NO: 24140 - DNA, 15 bp, Homo sapiens
actagtatgggatga

SEQ ID NO: 24141 - DNA, 15 bp, Homo sapiens
ctagtatgggatgag

SEQ ID NO: 24142 - DNA, 15 bp, Homo sapiens
tagtatgggatgagc

SEQ ID NO: 24143 - DNA, 15 bp, Homo sapiens
agtatgggatgagcc

SEQ ID NO: 24144 - DNA, 15 bp, Homo sapiens
gtatgggatgagcca

SEQ ID NO: 24145 - DNA, 15 bp, Homo sapiens
tatgggatgagccaa

SEQ ID NO: 24146 - DNA, 15 bp, Homo sapiens
atgggatgagccaat

SEQ ID NO: 24147 - DNA, 15 bp, Homo sapiens
tgggatgagccaatg

SEQ ID NO: 24148 - DNA, 15 bp, Homo sapiens
gggatgagccaatgc

SEQ ID NO: 24149 - DNA, 15 bp, Homo sapiens
ggatgagccaatgcc

SEQ ID NO: 24150 - DNA, 15 bp, Homo sapiens
gatgagccaatgccg

SEQ ID NO: 24151 - DNA, 15 bp, Homo sapiens
atgagccaatgccga

SEQ ID NO: 24152 - DNA, 15 bp, Homo sapiens
tgagccaatgccgag

SEQ ID NO: 24153 - DNA, 15 bp, Homo sapiens
gagccaatgccgagg

SEQ ID NO: 24154 - DNA, 15 bp, Homo sapiens
agccaatgccgaggc

SEQ ID NO: 24155 - DNA, 15 bp, Homo sapiens
gccaatgccgaggct

SEQ ID NO: 24156 - DNA, 15 bp, Homo sapiens
ccaatgccgaggcta

SEQ ID NO: 24157 - DNA, 15 bp, Homo sapiens
caatgccgaggctag

SEQ ID NO: 24158 - DNA, 15 bp, Homo sapiens
aatgccgaggctaga

SEQ ID NO: 24159 - DNA, 15 bp, Homo sapiens
atgccgaggctagat

SEQ ID NO: 24160 - DNA, 15 bp, Homo sapiens
tgccgaggctagata

SEQ ID NO: 24161 - DNA, 15 bp, Homo sapiens
gccgaggctagatag

SEQ ID NO: 24162 - DNA, 15 bp, Homo sapiens
ccgaggctagatagt

SEQ ID NO: 24163 - DNA, 15 bp, Homo sapiens
cgaggctagatagtg

SEQ ID NO: 24164 - DNA, 15 bp, Homo sapiens
gaggctagatagtgc

SEQ ID NO: 24165 - DNA, 15 bp, Homo sapiens
aggctagatagtgca

SEQ ID NO: 24166 - DNA, 15 bp, Homo sapiens
ggctagatagtgcag

SEQ ID NO: 24167 - DNA, 15 bp, Homo sapiens
gctagatagtgcagc

SEQ ID NO: 24168 - DNA, 15 bp, Homo sapiens
ctagatagtgcagcg

SEQ ID NO: 24169 - DNA, 15 bp, Homo sapiens
tagatagtgcagcgg

SEQ ID NO: 24170 - DNA, 15 bp, Homo sapiens
agatagtgcagcggg

SEQ ID NO: 24171 - DNA, 15 bp, Homo sapiens
gatagtgcagcggga

SEQ ID NO: 24172 - DNA, 15 bp, Homo sapiens
atagtgcagcgggac

SEQ ID NO: 24173 - DNA, 15 bp, Homo sapiens
tagtgcagcgggacg

SEQ ID NO: 24174 - DNA, 15 bp, Homo sapiens
agtgcagcgggacgg

SEQ ID NO: 24175 - DNA, 15 bp, Homo sapiens
gtgcagcgggacgga

SEQ ID NO: 24176 - DNA, 15 bp, Homo sapiens
tgcagcgggacggag

SEQ ID NO: 24177 - DNA, 15 bp, Homo sapiens
gcagcgggacggagg

SEQ ID NO: 24178 - DNA, 15 bp, Homo sapiens
cagcgggacggaggg

SEQ ID NO: 24179 - DNA, 15 bp, Homo sapiens
agcgggacggaggga

SEQ ID NO: 24180 - DNA, 15 bp, Homo sapiens
gcgggacggagggag

SEQ ID NO: 24181 - DNA, 15 bp, Homo sapiens
cgggacggagggagg

SEQ ID NO: 24182 - DNA, 15 bp, Homo sapiens
gggacggagggagga

SEQ ID NO: 24183 - DNA, 15 bp, Homo sapiens
ggacggagggaggac

SEQ ID NO: 24184 - DNA, 15 bp, Homo sapiens
gacggagggaggact

SEQ ID NO: 24185 - DNA, 15 bp, Homo sapiens
acggagggaggactt

SEQ ID NO: 24186 - DNA, 15 bp, Homo sapiens
cggagggaggacttg

SEQ ID NO: 24187 - DNA, 15 bp, Homo sapiens
ggagggaggacttgg

SEQ ID NO: 24188 - DNA, 15 bp, Homo sapiens
gagggaggacttgga

SEQ ID NO: 24189 - DNA, 15 bp, Homo sapiens
agggaggacttggag

SEQ ID NO: 24190 - DNA, 15 bp, Homo sapiens
gggaggacttggagg

SEQ ID NO: 24191 - DNA, 15 bp, Homo sapiens
ggaggacttggaggc

SEQ ID NO: 24192 - DNA, 15 bp, Homo sapiens
gaggacttggaggca

SEQ ID NO: 24193 - DNA, 15 bp, Homo sapiens
aggacttggaggcaa

SEQ ID NO: 24194 - DNA, 15 bp, Homo sapiens
ggacttggaggcaag

SEQ ID NO: 24195 - DNA, 15 bp, Homo sapiens
gacttggaggcaaga

SEQ ID NO: 24196 - DNA, 15 bp, Homo sapiens
acttggaggcaagat

SEQ ID NO: 24197 - DNA, 15 bp, Homo sapiens
cttggaggcaagatg

SEQ ID NO: 24198 - DNA, 15 bp, Homo sapiens
ttggaggcaagatgg

SEQ ID NO: 24199 - DNA, 15 bp, Homo sapiens
tggaggcaagatggg

SEQ ID NO: 24200 - DNA, 15 bp, Homo sapiens
ggaggcaagatgggg

SEQ ID NO: 24201 - DNA, 15 bp, Homo sapiens
gaggcaagatgggga

SEQ ID NO: 24202 - DNA, 15 bp, Homo sapiens
aggcaagatggggaa

SEQ ID NO: 24203 - DNA, 15 bp, Homo sapiens
ggcaagatggggaaa

SEQ ID NO: 24204 - DNA, 15 bp, Homo sapiens
gcaagatggggaaaa

SEQ ID NO: 24205 - DNA, 15 bp, Homo sapiens
caagatggggaaaaa

SEQ ID NO: 24206 - DNA, 15 bp, Homo sapiens
aagatggggaaaaaa

SEQ ID NO: 24207 - DNA, 15 bp, Homo sapiens
agatggggaaaaaag

SEQ ID NO: 24208 - DNA, 15 bp, Homo sapiens
gatggggaaaaaagc

SEQ ID NO: 24209 - DNA, 15 bp, Homo sapiens
atggggaaaaaagca

SEQ ID NO: 24210 - DNA, 15 bp, Homo sapiens
tggggaaaaaagcag

SEQ ID NO: 24211 - DNA, 15 bp, Homo sapiens
ggggaaaaaagcaga

SEQ ID NO: 24212 - DNA, 15 bp, Homo sapiens
gggaaaaaagcagag

SEQ ID NO: 24213 - DNA, 15 bp, Homo sapiens
ggaaaaaagcagagc

SEQ ID NO: 24214 - DNA, 15 bp, Homo sapiens
gaaaaaagcagagcc

SEQ ID NO: 24215 - DNA, 15 bp, Homo sapiens
aaaaaagcagagccg

SEQ ID NO: 24216 - DNA, 15 bp, Homo sapiens
aaaaagcagagccga

SEQ ID NO: 24217 - DNA, 15 bp, Homo sapiens
aaaagcagagccgac

SEQ ID NO: 24218 - DNA, 15 bp, Homo sapiens
aaagcagagccgacg

SEQ ID NO: 24219 - DNA, 15 bp, Homo sapiens
aagcagagccgacgg

SEQ ID NO: 24220 - DNA, 15 bp, Homo sapiens
agcagagccgacggg

SEQ ID NO: 24221 - DNA, 15 bp, Homo sapiens
gcagagccgacgggg

SEQ ID NO: 24222 - DNA, 15 bp, Homo sapiens
cagagccgacggggg

SEQ ID NO: 24223 - DNA, 15 bp, Homo sapiens
agagccgacgggggc

SEQ ID NO: 24224 - DNA, 15 bp, Homo sapiens
gagccgacgggggca

SEQ ID NO: 24225 - DNA, 15 bp, Homo sapiens
agccgacgggggcag

SEQ ID NO: 24226 - DNA, 15 bp, Homo sapiens
gccgacgggggcagt

SEQ ID NO: 24227 - DNA, 15 bp, Homo sapiens
ccgacgggggcagtg

SEQ ID NO: 24228 - DNA, 15 bp, Homo sapiens
cgacgggggcagtgt

SEQ ID NO: 24229 - DNA, 15 bp, Homo sapiens
gacgggggcagtgta

SEQ ID NO: 24230 - DNA, 15 bp, Homo sapiens
acgggggcagtgtag

SEQ ID NO: 24231 - DNA, 15 bp, Homo sapiens
cgggggcagtgtagg

SEQ ID NO: 24232 - DNA, 15 bp, Homo sapiens
gggggcagtgtaggt

SEQ ID NO: 24233 - DNA, 15 bp, Homo sapiens
ggggcagtgtaggtg

SEQ ID NO: 24234 - DNA, 15 bp, Homo sapiens
gggcagtgtaggtgg

SEQ ID NO: 24235 - DNA, 15 bp, Homo sapiens
ggcagtgtaggtggt

SEQ ID NO: 24236 - DNA, 15 bp, Homo sapiens
gcagtgtaggtggtg

SEQ ID NO: 24237 - DNA, 15 bp, Homo sapiens
cagtgtaggtggtgt

SEQ ID NO: 24238 - DNA, 15 bp, Homo sapiens
agtgtaggtggtgtg

SEQ ID NO: 24239 - DNA, 15 bp, Homo sapiens
gtgtaggtggtgtga

SEQ ID NO: 24240 - DNA, 15 bp, Homo sapiens
tgtaggtggtgtgaa

SEQ ID NO: 24241 - DNA, 15 bp, Homo sapiens
gtaggtggtgtgaag

SEQ ID NO: 24242 - DNA, 15 bp, Homo sapiens
taggtggtgtgaagg

SEQ ID NO: 24243 - DNA, 15 bp, Homo sapiens
aggtggtgtgaaggg

SEQ ID NO: 24244 - DNA, 15 bp, Homo sapiens
ggtggtgtgaaggga

SEQ ID NO: 24245 - DNA, 15 bp, Homo sapiens
gtggtgtgaagggag

SEQ ID NO: 24246 - DNA, 15 bp, Homo sapiens
tggtgtgaagggagg

SEQ ID NO: 24247 - DNA, 15 bp, Homo sapiens
ggtgtgaagggaggc

SEQ ID NO: 24248 - DNA, 15 bp, Homo sapiens
gtgtgaagggaggca

SEQ ID NO: 24249 - DNA, 15 bp, Homo sapiens
tgtgaagggaggcat

SEQ ID NO: 24250 - DNA, 15 bp, Homo sapiens
gtgaagggaggcatg

SEQ ID NO: 24251 - DNA, 15 bp, Homo sapiens
tgaagggaggcatga

SEQ ID NO: 24252 - DNA, 15 bp, Homo sapiens
gaagggaggcatgag

SEQ ID NO: 24253 - DNA, 15 bp, Homo sapiens
aagggaggcatgagt

SEQ ID NO: 24254 - DNA, 15 bp, Homo sapiens
agggaggcatgagta

SEQ ID NO: 24255 - DNA, 15 bp, Homo sapiens
gggaggcatgagtag

SEQ ID NO: 24256 - DNA, 15 bp, Homo sapiens
ggaggcatgagtagc

SEQ ID NO: 24257 - DNA, 15 bp, Homo sapiens
gaggcatgagtagcc

SEQ ID NO: 24258 - DNA, 15 bp, Homo sapiens
aggcatgagtagcca

SEQ ID NO: 24259 - DNA, 15 bp, Homo sapiens
ggcatgagtagccaa

SEQ ID NO: 24260 - DNA, 15 bp, Homo sapiens
gcatgagtagccaat

SEQ ID NO: 24261 - DNA, 15 bp, Homo sapiens
catgagtagccaata

SEQ ID NO: 24262 - DNA, 15 bp, Homo sapiens
atgagtagccaataa

SEQ ID NO: 24263 - DNA, 15 bp, Homo sapiens
tgagtagccaataag

SEQ ID NO: 24264 - DNA, 15 bp, Homo sapiens
gagtagccaataagg

SEQ ID NO: 24265 - DNA, 15 bp, Homo sapiens
agtagccaataagga

SEQ ID NO: 24266 - DNA, 15 bp, Homo sapiens
gtagccaataaggag

SEQ ID NO: 24267 - DNA, 15 bp, Homo sapiens
tagccaataaggagg

SEQ ID NO: 24268 - DNA, 15 bp, Homo sapiens
agccaataaggaggc

SEQ ID NO: 24269 - DNA, 15 bp, Homo sapiens
gccaataaggaggct

SEQ ID NO: 24270 - DNA, 15 bp, Homo sapiens
ccaataaggaggctg

SEQ ID NO: 24271 - DNA, 15 bp, Homo sapiens
caataaggaggctgg

SEQ ID NO: 24272 - DNA, 15 bp, Homo sapiens
aataaggaggctgga

SEQ ID NO: 24273 - DNA, 15 bp, Homo sapiens
ataaggaggctggag

SEQ ID NO: 24274 - DNA, 15 bp, Homo sapiens
taaggaggctggaga

SEQ ID NO: 24275 - DNA, 15 bp, Homo sapiens
aaggaggctggagag

SEQ ID NO: 24276 - DNA, 15 bp, Homo sapiens
aggaggctggagagg

SEQ ID NO: 24277 - DNA, 15 bp, Homo sapiens
ggaggctggagagga

SEQ ID NO: 24278 - DNA, 15 bp, Homo sapiens
gaggctggagaggag

SEQ ID NO: 24279 - DNA, 15 bp, Homo sapiens
aggctggagaggagg

SEQ ID NO: 24280 - DNA, 15 bp, Homo sapiens
ggctggagaggagga

SEQ ID NO: 24281 - DNA, 15 bp, Homo sapiens
gctggagaggaggac

SEQ ID NO: 24282 - DNA, 15 bp, Homo sapiens
ctggagaggaggacg

SEQ ID NO: 24283 - DNA, 15 bp, Homo sapiens
tggagaggaggacgc

SEQ ID NO: 24284 - DNA, 15 bp, Homo sapiens
ggagaggaggacgct

SEQ ID NO: 24285 - DNA, 15 bp, Homo sapiens
gagaggaggacgctg

SEQ ID NO: 24286 - DNA, 15 bp, Homo sapiens
agaggaggacgctgt

SEQ ID NO: 24287 - DNA, 15 bp, Homo sapiens
gaggaggacgctgtg

SEQ ID NO: 24288 - DNA, 15 bp, Homo sapiens
aggaggacgctgtgt

SEQ ID NO: 24289 - DNA, 15 bp, Homo sapiens
ggaggacgctgtgta

SEQ ID NO: 24290 - DNA, 15 bp, Homo sapiens
gaggacgctgtgtag

SEQ ID NO: 24291 - DNA, 15 bp, Homo sapiens
aggacgctgtgtaga

SEQ ID NO: 24292 - DNA, 15 bp, Homo sapiens
ggacgctgtgtagac

SEQ ID NO: 24293 - DNA, 15 bp, Homo sapiens
gacgctgtgtagaca

SEQ ID NO: 24294 - DNA, 15 bp, Homo sapiens
acgctgtgtagacag

SEQ ID NO: 24295 - DNA, 15 bp, Homo sapiens
cgctgtgtagacaga

SEQ ID NO: 24296 - DNA, 15 bp, Homo sapiens
gctgtgtagacagag

SEQ ID NO: 24297 - DNA, 15 bp, Homo sapiens
ctgtgtagacagagt

SEQ ID NO: 24298 - DNA, 15 bp, Homo sapiens
tgtgtagacagagtc

SEQ ID NO: 24299 - DNA, 15 bp, Homo sapiens
gtgtagacagagtct

SEQ ID NO: 24300 - DNA, 15 bp, Homo sapiens
tgtagacagagtctg

SEQ ID NO: 24301 - DNA, 15 bp, Homo sapiens
gtagacagagtctga

SEQ ID NO: 24302 - DNA, 15 bp, Homo sapiens
tagacagagtctgag

SEQ ID NO: 24303 - DNA, 15 bp, Homo sapiens
agacagagtctgagg

SEQ ID NO: 24304 - DNA, 15 bp, Homo sapiens
gacagagtctgaggt

SEQ ID NO: 24305 - DNA, 15 bp, Homo sapiens
acagagtctgaggta

SEQ ID NO: 24306 - DNA, 15 bp, Homo sapiens
cagagtctgaggtat

SEQ ID NO: 24307 - DNA, 15 bp, Homo sapiens
agagtctgaggtatt

SEQ ID NO: 24308 - DNA, 15 bp, Homo sapiens
gagtctgaggtattg

SEQ ID NO: 24309 - DNA, 15 bp, Homo sapiens
agtctgaggtattgg

SEQ ID NO: 24310 - DNA, 15 bp, Homo sapiens
gtctgaggtattggg

SEQ ID NO: 24311 - DNA, 15 bp, Homo sapiens
tctgaggtattgggt

SEQ ID NO: 24312 - DNA, 15 bp, Homo sapiens
ctgaggtattgggtg

SEQ ID NO: 24313 - DNA, 15 bp, Homo sapiens
tgaggtattgggtgg

SEQ ID NO: 24314 - DNA, 15 bp, Homo sapiens
gaggtattgggtggc

SEQ ID NO: 24315 - DNA, 15 bp, Homo sapiens
aggtattgggtggcc

SEQ ID NO: 24316 - DNA, 15 bp, Homo sapiens
ggtattgggtggccg

SEQ ID NO: 24317 - DNA, 15 bp, Homo sapiens
gtattgggtggccgg

SEQ ID NO: 24318 - DNA, 15 bp, Homo sapiens
tattgggtggccgga

SEQ ID NO: 24319 - DNA, 15 bp, Homo sapiens
attgggtggccggac

SEQ ID NO: 24320 - DNA, 15 bp, Homo sapiens
ttgggtggccggaca

SEQ ID NO: 24321 - DNA, 15 bp, Homo sapiens
tgggtggccggacag

SEQ ID NO: 24322 - DNA, 15 bp, Homo sapiens
gggtggccggacagc

SEQ ID NO: 24323 - DNA, 15 bp, Homo sapiens
ggtggccggacagca

SEQ ID NO: 24324 - DNA, 15 bp, Homo sapiens
gtggccggacagcag

SEQ ID NO: 24325 - DNA, 15 bp, Homo sapiens
tggccggacagcaga

SEQ ID NO: 24326 - DNA, 15 bp, Homo sapiens
ggccggacagcagaa

SEQ ID NO: 24327 - DNA, 15 bp, Homo sapiens
gccggacagcagaac

SEQ ID NO: 24328 - DNA, 15 bp, Homo sapiens
ccggacagcagaacc

SEQ ID NO: 24329 - DNA, 15 bp, Homo sapiens
cggacagcagaacca

SEQ ID NO: 24330 - DNA, 15 bp, Homo sapiens
ggacagcagaaccat

SEQ ID NO: 24331 - DNA, 15 bp, Homo sapiens
gacagcagaaccata

SEQ ID NO: 24332 - DNA, 15 bp, Homo sapiens
acagcagaaccatag

SEQ ID NO: 24333 - DNA, 15 bp, Homo sapiens
cagcagaaccataga

SEQ ID NO: 24334 - DNA, 15 bp, Homo sapiens
agcagaaccatagaa

SEQ ID NO: 24335 - DNA, 15 bp, Homo sapiens
gcagaaccatagaac

SEQ ID NO: 24336 - DNA, 15 bp, Homo sapiens
cagaaccatagaacg

SEQ ID NO: 24337 - DNA, 15 bp, Homo sapiens
agaaccatagaacgc

SEQ ID NO: 24338 - DNA, 15 bp, Homo sapiens
gaaccatagaacgca

SEQ ID NO: 24339 - DNA, 15 bp, Homo sapiens
aaccatagaacgcag

SEQ ID NO: 24340 - DNA, 15 bp, Homo sapiens
accatagaacgcagg

SEQ ID NO: 24341 - DNA, 15 bp, Homo sapiens
ccatagaacgcaggc

SEQ ID NO: 24342 - DNA, 15 bp, Homo sapiens
catagaacgcaggca

SEQ ID NO: 24343 - DNA, 15 bp, Homo sapiens
atagaacgcaggcag

SEQ ID NO: 24344 - DNA, 15 bp, Homo sapiens
tagaacgcaggcagc

SEQ ID NO: 24345 - DNA, 15 bp, Homo sapiens
agaacgcaggcagcc

SEQ ID NO: 24346 - DNA, 15 bp, Homo sapiens
gaacgcaggcagcca

SEQ ID NO: 24347 - DNA, 15 bp, Homo sapiens
aacgcaggcagccat

SEQ ID NO: 24348 - DNA, 15 bp, Homo sapiens
acgcaggcagccatt

SEQ ID NO: 24349 - DNA, 15 bp, Homo sapiens
cgcaggcagccatta

SEQ ID NO: 24350 - DNA, 15 bp, Homo sapiens
gcaggcagccattag

SEQ ID NO: 24351 - DNA, 15 bp, Homo sapiens
caggcagccattagg

SEQ ID NO: 24352 - DNA, 15 bp, Homo sapiens
aggcagccattagga

SEQ ID NO: 24353 - DNA, 15 bp, Homo sapiens
ggcagccattaggaa

SEQ ID NO: 24354 - DNA, 15 bp, Homo sapiens
gcagccattaggaaa

SEQ ID NO: 24355 - DNA, 15 bp, Homo sapiens
cagccattaggaaaa

SEQ ID NO: 24356 - DNA, 15 bp, Homo sapiens
agccattaggaaaaa

SEQ ID NO: 24357 - DNA, 15 bp, Homo sapiens
gccattaggaaaaat

SEQ ID NO: 24358 - DNA, 15 bp, Homo sapiens
ccattaggaaaaatg

SEQ ID NO: 24359 - DNA, 15 bp, Homo sapiens
cattaggaaaaatgt

SEQ ID NO: 24360 - DNA, 15 bp, Homo sapiens
attaggaaaaatgtg

SEQ ID NO: 24361 - DNA, 15 bp, Homo sapiens
ttaggaaaaatgtgc

SEQ ID NO: 24362 - DNA, 15 bp, Homo sapiens
taggaaaaatgtgct

SEQ ID NO: 24363 - DNA, 15 bp, Homo sapiens
aggaaaaatgtgctt

SEQ ID NO: 24364 - DNA, 15 bp, Homo sapiens
ggaaaaatgtgcttc

SEQ ID NO: 24365 - DNA, 15 bp, Homo sapiens
gaaaaatgtgcttct

SEQ ID NO: 24366 - DNA, 15 bp, Homo sapiens
aaaaatgtgcttctc

SEQ ID NO: 24367 - DNA, 15 bp, Homo sapiens
aaaatgtgcttctca

SEQ ID NO: 24368 - DNA, 15 bp, Homo sapiens
aaatgtgcttctcag

SEQ ID NO: 24369 - DNA, 15 bp, Homo sapiens
aatgtgcttctcagg

SEQ ID NO: 24370 - DNA, 15 bp, Homo sapiens
atgtgcttctcaggg

SEQ ID NO: 24371 - DNA, 15 bp, Homo sapiens
tgtgcttctcaggga

SEQ ID NO: 24372 - DNA, 15 bp, Homo sapiens
gtgcttctcagggat

SEQ ID NO: 24373 - DNA, 15 bp, Homo sapiens
tgcttctcagggatg

SEQ ID NO: 24374 - DNA, 15 bp, Homo sapiens
gcttctcagggatgg

SEQ ID NO: 24375 - DNA, 15 bp, Homo sapiens
cttctcagggatggg

SEQ ID NO: 24376 - DNA, 15 bp, Homo sapiens
ttctcagggatgggg

SEQ ID NO: 24377 - DNA, 15 bp, Homo sapiens
tctcagggatggggt

SEQ ID NO: 24378 - DNA, 15 bp, Homo sapiens
ctcagggatggggtt

SEQ ID NO: 24379 - DNA, 15 bp, Homo sapiens
tcagggatggggtta

SEQ ID NO: 24380 - DNA, 15 bp, Homo sapiens
cagggatggggttac

SEQ ID NO: 24381 - DNA, 15 bp, Homo sapiens
agggatggggttacc

SEQ ID NO: 24382 - DNA, 15 bp, Homo sapiens
gggatggggttaccc

SEQ ID NO: 24383 - DNA, 15 bp, Homo sapiens
ggatggggttaccct

SEQ ID NO: 24384 - DNA, 15 bp, Homo sapiens
gatggggttaccctc

SEQ ID NO: 24385 - DNA, 15 bp, Homo sapiens
atggggttaccctct

SEQ ID NO: 24386 - DNA, 15 bp, Homo sapiens
tggggttaccctctc

SEQ ID NO: 24387 - DNA, 15 bp, Homo sapiens
ggggttaccctctcc

SEQ ID NO: 24388 - DNA, 15 bp, Homo sapiens
gggttaccctctccc

SEQ ID NO: 24389 - DNA, 15 bp, Homo sapiens
ggttaccctctccct

SEQ ID NO: 24390 - DNA, 15 bp, Homo sapiens
gttaccctctcccta

SEQ ID NO: 24391 - DNA, 15 bp, Homo sapiens
ttaccctctccctaa

SEQ ID NO: 24392 - DNA, 15 bp, Homo sapiens
taccctctccctaac

SEQ ID NO: 24393 - DNA, 15 bp, Homo sapiens
accctctccctaacc

SEQ ID NO: 24394 - DNA, 15 bp, Homo sapiens
ccctctccctaaccc

SEQ ID NO: 24395 - DNA, 15 bp, Homo sapiens
cctctccctaaccct

SEQ ID NO: 24396 - DNA, 15 bp, Homo sapiens
ctctccctaaccctc

SEQ ID NO: 24397 - DNA, 15 bp, Homo sapiens
tctccctaaccctcc

SEQ ID NO: 24398 - DNA, 15 bp, Homo sapiens
ctccctaaccctccg

SEQ ID NO: 24399 - DNA, 15 bp, Homo sapiens
tccctaaccctccgt

SEQ ID NO: 24400 - DNA, 15 bp, Homo sapiens
ccctaaccctccgtg

SEQ ID NO: 24401 - DNA, 15 bp, Homo sapiens
cctaaccctccgtga

SEQ ID NO: 24402 - DNA, 15 bp, Homo sapiens
ctaaccctccgtgac

SEQ ID NO: 24403 - DNA, 15 bp, Homo sapiens
taaccctccgtgact

SEQ ID NO: 24404 - DNA, 15 bp, Homo sapiens
aaccctccgtgactc

SEQ ID NO: 24405 - DNA, 15 bp, Homo sapiens
accctccgtgactcc

SEQ ID NO: 24406 - DNA, 15 bp, Homo sapiens
ccctccgtgactccc

SEQ ID NO: 24407 - DNA, 15 bp, Homo sapiens
cctccgtgactcccc

SEQ ID NO: 24408 - DNA, 15 bp, Homo sapiens
ctccgtgactcccca

SEQ ID NO: 24409 - DNA, 15 bp, Homo sapiens
tccgtgactccccat

SEQ ID NO: 24410 - DNA, 15 bp, Homo sapiens
ccgtgactccccatt

SEQ ID NO: 24411 - DNA, 15 bp, Homo sapiens
cgtgactccccattg

SEQ ID NO: 24412 - DNA, 15 bp, Homo sapiens
gtgactccccattgc

SEQ ID NO: 24413 - DNA, 15 bp, Homo sapiens
tgactccccattgcc

SEQ ID NO: 24414 - DNA, 15 bp, Homo sapiens
gactccccattgccc

SEQ ID NO: 24415 - DNA, 15 bp, Homo sapiens
actccccattgcccc

SEQ ID NO: 24416 - DNA, 15 bp, Homo sapiens
ctccccattgcccca

SEQ ID NO: 24417 - DNA, 15 bp, Homo sapiens
tccccattgccccag

SEQ ID NO: 24418 - DNA, 15 bp, Homo sapiens
ccccattgccccagg

SEQ ID NO: 24419 - DNA, 15 bp, Homo sapiens
cccattgccccagga

SEQ ID NO: 24420 - DNA, 15 bp, Homo sapiens
ccattgccccaggaa

SEQ ID NO: 24421 - DNA, 15 bp, Homo sapiens
cattgccccaggaat

SEQ ID NO: 24422 - DNA, 15 bp, Homo sapiens
attgccccaggaata

SEQ ID NO: 24423 - DNA, 15 bp, Homo sapiens
ttgccccaggaatac

SEQ ID NO: 24424 - DNA, 15 bp, Homo sapiens
tgccccaggaatacc

SEQ ID NO: 24425 - DNA, 15 bp, Homo sapiens
gccccaggaataccc

SEQ ID NO: 24426 - DNA, 15 bp, Homo sapiens
ccccaggaataccca

SEQ ID NO: 24427 - DNA, 15 bp, Homo sapiens
cccaggaatacccag

SEQ ID NO: 24428 - DNA, 15 bp, Homo sapiens
ccaggaatacccaga

SEQ ID NO: 24429 - DNA, 15 bp, Homo sapiens
caggaatacccagag

SEQ ID NO: 24430 - DNA, 15 bp, Homo sapiens
aggaatacccagagc

SEQ ID NO: 24431 - DNA, 15 bp, Homo sapiens
ggaatacccagagcc

SEQ ID NO: 24432 - DNA, 15 bp, Homo sapiens
gaatacccagagccc

SEQ ID NO: 24433 - DNA, 15 bp, Homo sapiens
aatacccagagcccc

SEQ ID NO: 24434 - DNA, 15 bp, Homo sapiens
atacccagagcccct

SEQ ID NO: 24435 - DNA, 15 bp, Homo sapiens
tacccagagcccctg

SEQ ID NO: 24436 - DNA, 15 bp, Homo sapiens
acccagagcccctga

SEQ ID NO: 24437 - DNA, 15 bp, Homo sapiens
cccagagcccctgaa

SEQ ID NO: 24438 - DNA, 15 bp, Homo sapiens
ccagagcccctgaag

SEQ ID NO: 24439 - DNA, 15 bp, Homo sapiens
cagagcccctgaagg

SEQ ID NO: 24440 - DNA, 15 bp, Homo sapiens
agagcccctgaaggc

SEQ ID NO: 24441 - DNA, 15 bp, Homo sapiens
gagcccctgaaggcc

SEQ ID NO: 24442 - DNA, 15 bp, Homo sapiens
agcccctgaaggcct

SEQ ID NO: 24443 - DNA, 15 bp, Homo sapiens
gcccctgaaggccta

SEQ ID NO: 24444 - DNA, 15 bp, Homo sapiens
cccctgaaggcctag

SEQ ID NO: 24445 - DNA, 15 bp, Homo sapiens
ccctgaaggcctaga

SEQ ID NO: 24446 - DNA, 15 bp, Homo sapiens
cctgaaggcctagac

SEQ ID NO: 24447 - DNA, 15 bp, Homo sapiens
ctgaaggcctagacc

SEQ ID NO: 24448 - DNA, 15 bp, Homo sapiens
tgaaggcctagacca

SEQ ID NO: 24449 - DNA, 15 bp, Homo sapiens
gaaggcctagaccac

SEQ ID NO: 24450 - DNA, 15 bp, Homo sapiens
aaggcctagaccaca

SEQ ID NO: 24451 - DNA, 15 bp, Homo sapiens
aggcctagaccacac

SEQ ID NO: 24452 - DNA, 15 bp, Homo sapiens
ggcctagaccacacc

SEQ ID NO: 24453 - DNA, 15 bp, Homo sapiens
gcctagaccacacct

SEQ ID NO: 24454 - DNA, 15 bp, Homo sapiens
cctagaccacacctt

SEQ ID NO: 24455 - DNA, 15 bp, Homo sapiens
ctagaccacaccttg

SEQ ID NO: 24456 - DNA, 15 bp, Homo sapiens
tagaccacaccttgg

SEQ ID NO: 24457 - DNA, 15 bp, Homo sapiens
agaccacaccttggt

SEQ ID NO: 24458 - DNA, 15 bp, Homo sapiens
gaccacaccttggtg

SEQ ID NO: 24459 - DNA, 15 bp, Homo sapiens
accacaccttggtgt

SEQ ID NO: 24460 - DNA, 15 bp, Homo sapiens
ccacaccttggtgtg

SEQ ID NO: 24461 - DNA, 15 bp, Homo sapiens
cacaccttggtgtgt

SEQ ID NO: 24462 - DNA, 15 bp, Homo sapiens
acaccttggtgtgtg

SEQ ID NO: 24463 - DNA, 15 bp, Homo sapiens
caccttggtgtgtga

SEQ ID NO: 24464 - DNA, 15 bp, Homo sapiens
accttggtgtgtgaa

SEQ ID NO: 24465 - DNA, 15 bp, Homo sapiens
ccttggtgtgtgaac

SEQ ID NO: 24466 - DNA, 15 bp, Homo sapiens
cttggtgtgtgaact

SEQ ID NO: 24467 - DNA, 15 bp, Homo sapiens
ttggtgtgtgaacta

SEQ ID NO: 24468 - DNA, 15 bp, Homo sapiens
tggtgtgtgaactag

SEQ ID NO: 24469 - DNA, 15 bp, Homo sapiens
ggtgtgtgaactagg

SEQ ID NO: 24470 - DNA, 15 bp, Homo sapiens
gtgtgtgaactagga

SEQ ID NO: 24471 - DNA, 15 bp, Homo sapiens
tgtgtgaactaggaa

SEQ ID NO: 24472 - DNA, 15 bp, Homo sapiens
gtgtgaactaggaaa

SEQ ID NO: 24473 - DNA, 15 bp, Homo sapiens
tgtgaactaggaaag

SEQ ID NO: 24474 - DNA, 15 bp, Homo sapiens
gtgaactaggaaagt

SEQ ID NO: 24475 - DNA, 15 bp, Homo sapiens
tgaactaggaaagtg

SEQ ID NO: 24476 - DNA, 15 bp, Homo sapiens
gaactaggaaagtga

SEQ ID NO: 24477 - DNA, 15 bp, Homo sapiens
aactaggaaagtgaa

SEQ ID NO: 24478 - DNA, 15 bp, Homo sapiens
actaggaaagtgaaa

SEQ ID NO: 24479 - DNA, 15 bp, Homo sapiens
ctaggaaagtgaaaa

SEQ ID NO: 24480 - DNA, 15 bp, Homo sapiens
taggaaagtgaaaat

SEQ ID NO: 24481 - DNA, 15 bp, Homo sapiens
aggaaagtgaaaatg

SEQ ID NO: 24482 - DNA, 15 bp, Homo sapiens
ggaaagtgaaaatga

SEQ ID NO: 24483 - DNA, 15 bp, Homo sapiens
gaaagtgaaaatgac

SEQ ID NO: 24484 - DNA, 15 bp, Homo sapiens
aaagtgaaaatgact

SEQ ID NO: 24485 - DNA, 15 bp, Homo sapiens
aagtgaaaatgactg

SEQ ID NO: 24486 - DNA, 15 bp, Homo sapiens
agtgaaaatgactgt

SEQ ID NO: 24487 - DNA, 15 bp, Homo sapiens
gtgaaaatgactgtc

SEQ ID NO: 24488 - DNA, 15 bp, Homo sapiens
tgaaaatgactgtcc

SEQ ID NO: 24489 - DNA, 15 bp, Homo sapiens
gaaaatgactgtcct

SEQ ID NO: 24490 - DNA, 15 bp, Homo sapiens
aaaatgactgtcctg

SEQ ID NO: 24491 - DNA, 15 bp, Homo sapiens
aaatgactgtcctgt

SEQ ID NO: 24492 - DNA, 15 bp, Homo sapiens
aatgactgtcctgtt

SEQ ID NO: 24493 - DNA, 15 bp, Homo sapiens
atgactgtcctgttg

SEQ ID NO: 24494 - DNA, 15 bp, Homo sapiens
tgactgtcctgttgc

SEQ ID NO: 24495 - DNA, 15 bp, Homo sapiens
gactgtcctgttgca

SEQ ID NO: 24496 - DNA, 15 bp, Homo sapiens
actgtcctgttgcag

SEQ ID NO: 24497 - DNA, 15 bp, Homo sapiens
ctgtcctgttgcagt

SEQ ID NO: 24498 - DNA, 15 bp, Homo sapiens
tgtcctgttgcagtt

SEQ ID NO: 24499 - DNA, 15 bp, Homo sapiens
gtcctgttgcagtta

SEQ ID NO: 24500 - DNA, 15 bp, Homo sapiens
tcctgttgcagttag

SEQ ID NO: 24501 - DNA, 15 bp, Homo sapiens
cctgttgcagttagt

SEQ ID NO: 24502 - DNA, 15 bp, Homo sapiens
ctgttgcagttagtt

SEQ ID NO: 24503 - DNA, 15 bp, Homo sapiens
tgttgcagttagtta

SEQ ID NO: 24504 - DNA, 15 bp, Homo sapiens
gttgcagttagttac

SEQ ID NO: 24505 - DNA, 15 bp, Homo sapiens
ttgcagttagttact

SEQ ID NO: 24506 - DNA, 15 bp, Homo sapiens
tgcagttagttactt

SEQ ID NO: 24507 - DNA, 15 bp, Homo sapiens
gcagttagttactta

SEQ ID NO: 24508 - DNA, 15 bp, Homo sapiens
cagttagttacttac

SEQ ID NO: 24509 - DNA, 15 bp, Homo sapiens
agttagttacttact

SEQ ID NO: 24510 - DNA, 15 bp, Homo sapiens
gttagttacttactg

SEQ ID NO: 24511 - DNA, 15 bp, Homo sapiens
ttagttacttactgg

SEQ ID NO: 24512 - DNA, 15 bp, Homo sapiens
tagttacttactggg

SEQ ID NO: 24513 - DNA, 15 bp, Homo sapiens
agttacttactgggt

SEQ ID NO: 24514 - DNA, 15 bp, Homo sapiens
gttacttactgggtc

SEQ ID NO: 24515 - DNA, 15 bp, Homo sapiens
ttacttactgggtcc

SEQ ID NO: 24516 - DNA, 15 bp, Homo sapiens
tacttactgggtcct

SEQ ID NO: 24517 - DNA, 15 bp, Homo sapiens
acttactgggtcctc

SEQ ID NO: 24518 - DNA, 15 bp, Homo sapiens
cttactgggtcctcc

SEQ ID NO: 24519 - DNA, 15 bp, Homo sapiens
ttactgggtcctccc

SEQ ID NO: 24520 - DNA, 15 bp, Homo sapiens
tactgggtcctccct

SEQ ID NO: 24521 - DNA, 15 bp, Homo sapiens
actgggtcctccctg

SEQ ID NO: 24522 - DNA, 15 bp, Homo sapiens
ctgggtcctccctgc

SEQ ID NO: 24523 - DNA, 15 bp, Homo sapiens
tgggtcctccctgcc

SEQ ID NO: 24524 - DNA, 15 bp, Homo sapiens
gggtcctccctgccc

SEQ ID NO: 24525 - DNA, 15 bp, Homo sapiens
ggtcctccctgccca

SEQ ID NO: 24526 - DNA, 15 bp, Homo sapiens
gtcctccctgcccaa

SEQ ID NO: 24527 - DNA, 15 bp, Homo sapiens
tcctccctgcccaac

SEQ ID NO: 24528 - DNA, 15 bp, Homo sapiens
cctccctgcccaact

SEQ ID NO: 24529 - DNA, 15 bp, Homo sapiens
ctccctgcccaacta

SEQ ID NO: 24530 - DNA, 15 bp, Homo sapiens
tccctgcccaactac

SEQ ID NO: 24531 - DNA, 15 bp, Homo sapiens
ccctgcccaactaca

SEQ ID NO: 24532 - DNA, 15 bp, Homo sapiens
cctgcccaactacaa

SEQ ID NO: 24533 - DNA, 15 bp, Homo sapiens
ctgcccaactacaac

SEQ ID NO: 24534 - DNA, 15 bp, Homo sapiens
tgcccaactacaacc

SEQ ID NO: 24535 - DNA, 15 bp, Homo sapiens
gcccaactacaacct

SEQ ID NO: 24536 - DNA, 15 bp, Homo sapiens
cccaactacaacctt

SEQ ID NO: 24537 - DNA, 15 bp, Homo sapiens
ccaactacaaccttt

SEQ ID NO: 24538 - DNA, 15 bp, Homo sapiens
caactacaacctttt

SEQ ID NO: 24539 - DNA, 15 bp, Homo sapiens
aactacaaccttttc

SEQ ID NO: 24540 - DNA, 15 bp, Homo sapiens
actacaaccttttct

SEQ ID NO: 24541 - DNA, 15 bp, Homo sapiens
ctacaaccttttctt

SEQ ID NO: 24542 - DNA, 15 bp, Homo sapiens
tacaaccttttcttg

SEQ ID NO: 24543 - DNA, 15 bp, Homo sapiens
acaaccttttcttga

SEQ ID NO: 24544 - DNA, 15 bp, Homo sapiens
caaccttttcttgag

SEQ ID NO: 24545 - DNA, 15 bp, Homo sapiens
aaccttttcttgagc

SEQ ID NO: 24546 - DNA, 15 bp, Homo sapiens
accttttcttgagca

SEQ ID NO: 24547 - DNA, 15 bp, Homo sapiens
ccttttcttgagcag

SEQ ID NO: 24548 - DNA, 15 bp, Homo sapiens
cttttcttgagcagt

SEQ ID NO: 24549 - DNA, 15 bp, Homo sapiens
ttttcttgagcagtg

SEQ ID NO: 24550 - DNA, 15 bp, Homo sapiens
tttcttgagcagtgc

SEQ ID NO: 24551 - DNA, 15 bp, Homo sapiens
ttcttgagcagtgcc

SEQ ID NO: 24552 - DNA, 15 bp, Homo sapiens
tcttgagcagtgcca

SEQ ID NO: 24553 - DNA, 15 bp, Homo sapiens
cttgagcagtgccac

SEQ ID NO: 24554 - DNA, 15 bp, Homo sapiens
ttgagcagtgccaca

SEQ ID NO: 24555 - DNA, 15 bp, Homo sapiens
tgagcagtgccacaa

SEQ ID NO: 24556 - DNA, 15 bp, Homo sapiens
gagcagtgccacaag

SEQ ID NO: 24557 - DNA, 15 bp, Homo sapiens
agcagtgccacaagc

SEQ ID NO: 24558 - DNA, 15 bp, Homo sapiens
gcagtgccacaagcc

SEQ ID NO: 24559 - DNA, 15 bp, Homo sapiens
cagtgccacaagcca

SEQ ID NO: 24560 - DNA, 15 bp, Homo sapiens
agtgccacaagccaa

SEQ ID NO: 24561 - DNA, 15 bp, Homo sapiens
gtgccacaagccaag

SEQ ID NO: 24562 - DNA, 15 bp, Homo sapiens
tgccacaagccaaga

SEQ ID NO: 24563 - DNA, 15 bp, Homo sapiens
gccacaagccaagaa

SEQ ID NO: 24564 - DNA, 15 bp, Homo sapiens
ccacaagccaagaat

SEQ ID NO: 24565 - DNA, 15 bp, Homo sapiens
cacaagccaagaatg

SEQ ID NO: 24566 - DNA, 15 bp, Homo sapiens
acaagccaagaatgc

SEQ ID NO: 24567 - DNA, 15 bp, Homo sapiens
caagccaagaatgcc

SEQ ID NO: 24568 - DNA, 15 bp, Homo sapiens
aagccaagaatgccc

SEQ ID NO: 24569 - DNA, 15 bp, Homo sapiens
agccaagaatgcccc

SEQ ID NO: 24570 - DNA, 15 bp, Homo sapiens
gccaagaatgcccct

SEQ ID NO: 24571 - DNA, 15 bp, Homo sapiens
ccaagaatgcccctg

SEQ ID NO: 24572 - DNA, 15 bp, Homo sapiens
caagaatgcccctga

SEQ ID NO: 24573 - DNA, 15 bp, Homo sapiens
aagaatgcccctgat

SEQ ID NO: 24574 - DNA, 15 bp, Homo sapiens
agaatgcccctgatt

SEQ ID NO: 24575 - DNA, 15 bp, Homo sapiens
gaatgcccctgattg

SEQ ID NO: 24576 - DNA, 15 bp, Homo sapiens
aatgcccctgattgt

SEQ ID NO: 24577 - DNA, 15 bp, Homo sapiens
atgcccctgattgtt

SEQ ID NO: 24578 - DNA, 15 bp, Homo sapiens
tgcccctgattgtta

SEQ ID NO: 24579 - DNA, 15 bp, Homo sapiens
gcccctgattgttag

SEQ ID NO: 24580 - DNA, 15 bp, Homo sapiens
cccctgattgttagc

SEQ ID NO: 24581 - DNA, 15 bp, Homo sapiens
ccctgattgttagcc

SEQ ID NO: 24582 - DNA, 15 bp, Homo sapiens
cctgattgttagccg

SEQ ID NO: 24583 - DNA, 15 bp, Homo sapiens
ctgattgttagccgc

SEQ ID NO: 24584 - DNA, 15 bp, Homo sapiens
tgattgttagccgca

SEQ ID NO: 24585 - DNA, 15 bp, Homo sapiens
gattgttagccgcaa

SEQ ID NO: 24586 - DNA, 15 bp, Homo sapiens
attgttagccgcaag

SEQ ID NO: 24587 - DNA, 15 bp, Homo sapiens
ttgttagccgcaagc

SEQ ID NO: 24588 - DNA, 15 bp, Homo sapiens
tgttagccgcaagca

SEQ ID NO: 24589 - DNA, 15 bp, Homo sapiens
gttagccgcaagcac

SEQ ID NO: 24590 - DNA, 15 bp, Homo sapiens
ttagccgcaagcact

SEQ ID NO: 24591 - DNA, 15 bp, Homo sapiens
tagccgcaagcactc

SEQ ID NO: 24592 - DNA, 15 bp, Homo sapiens
agccgcaagcactct

SEQ ID NO: 24593 - DNA, 15 bp, Homo sapiens
gccgcaagcactctc

SEQ ID NO: 24594 - DNA, 15 bp, Homo sapiens
ccgcaagcactctcc

SEQ ID NO: 24595 - DNA, 15 bp, Homo sapiens
cgcaagcactctcca

SEQ ID NO: 24596 - DNA, 15 bp, Homo sapiens
gcaagcactctccag

SEQ ID NO: 24597 - DNA, 15 bp, Homo sapiens
caagcactctccagg

SEQ ID NO: 24598 - DNA, 15 bp, Homo sapiens
aagcactctccagga

SEQ ID NO: 24599 - DNA, 15 bp, Homo sapiens
agcactctccaggac

SEQ ID NO: 24600 - DNA, 15 bp, Homo sapiens
gcactctccaggact

SEQ ID NO: 24601 - DNA, 15 bp, Homo sapiens
cactctccaggactt

SEQ ID NO: 24602 - DNA, 15 bp, Homo sapiens
actctccaggacttg

SEQ ID NO: 24603 - DNA, 15 bp, Homo sapiens
ctctccaggacttga

SEQ ID NO: 24604 - DNA, 15 bp, Homo sapiens
tctccaggacttgat

SEQ ID NO: 24605 - DNA, 15 bp, Homo sapiens
ctccaggacttgata

SEQ ID NO: 24606 - DNA, 15 bp, Homo sapiens
tccaggacttgatac

SEQ ID NO: 24607 - DNA, 15 bp, Homo sapiens
ccaggacttgatact

SEQ ID NO: 24608 - DNA, 15 bp, Homo sapiens
caggacttgatacta

SEQ ID NO: 24609 - DNA, 15 bp, Homo sapiens
aggacttgatactat

SEQ ID NO: 24610 - DNA, 15 bp, Homo sapiens
ggacttgatactatt

SEQ ID NO: 24611 - DNA, 15 bp, Homo sapiens
gacttgatactattg

SEQ ID NO: 24612 - DNA, 15 bp, Homo sapiens
acttgatactattgt

SEQ ID NO: 24613 - DNA, 15 bp, Homo sapiens
cttgatactattgtt

SEQ ID NO: 24614 - DNA, 15 bp, Homo sapiens
ttgatactattgttg

SEQ ID NO: 24615 - DNA, 15 bp, Homo sapiens
tgatactattgttga

SEQ ID NO: 24616 - DNA, 15 bp, Homo sapiens
gatactattgttgaa

SEQ ID NO: 24617 - DNA, 15 bp, Homo sapiens
atactattgttgaat

SEQ ID NO: 24618 - DNA, 15 bp, Homo sapiens
tactattgttgaatg

SEQ ID NO: 24619 - DNA, 15 bp, Homo sapiens
actattgttgaatga

SEQ ID NO: 24620 - DNA, 15 bp, Homo sapiens
ctattgttgaatgaa

SEQ ID NO: 24621 - DNA, 15 bp, Homo sapiens
tattgttgaatgaat

SEQ ID NO: 24622 - DNA, 15 bp, Homo sapiens
attgttgaatgaatg

SEQ ID NO: 24623 - DNA, 15 bp, Homo sapiens
ttgttgaatgaatgg

SEQ ID NO: 24624 - DNA, 15 bp, Homo sapiens
tgttgaatgaatggc

SEQ ID NO: 24625 - DNA, 15 bp, Homo sapiens
gttgaatgaatggcc

SEQ ID NO: 24626 - DNA, 15 bp, Homo sapiens
ttgaatgaatggccg

SEQ ID NO: 24627 - DNA, 15 bp, Homo sapiens
tgaatgaatggccga

SEQ ID NO: 24628 - DNA, 15 bp, Homo sapiens
gaatgaatggccgaa

SEQ ID NO: 24629 - DNA, 15 bp, Homo sapiens
aatgaatggccgaat

SEQ ID NO: 24630 - DNA, 15 bp, Homo sapiens
atgaatggccgaata

SEQ ID NO: 24631 - DNA, 15 bp, Homo sapiens
tgaatggccgaatag

SEQ ID NO: 24632 - DNA, 15 bp, Homo sapiens
gaatggccgaatagg

SEQ ID NO: 24633 - DNA, 15 bp, Homo sapiens
aatggccgaatagga

SEQ ID NO: 24634 - DNA, 15 bp, Homo sapiens
atggccgaataggaa

SEQ ID NO: 24635 - DNA, 15 bp, Homo sapiens
tggccgaataggaaa

SEQ ID NO: 24636 - DNA, 15 bp, Homo sapiens
ggccgaataggaaat

SEQ ID NO: 24637 - DNA, 15 bp, Homo sapiens
gccgaataggaaatt

SEQ ID NO: 24638 - DNA, 15 bp, Homo sapiens
ccgaataggaaattt

SEQ ID NO: 24639 - DNA, 15 bp, Homo sapiens
cgaataggaaattta

SEQ ID NO: 24640 - DNA, 15 bp, Homo sapiens
gaataggaaatttaa

SEQ ID NO: 24641 - DNA, 15 bp, Homo sapiens
aataggaaatttaac

SEQ ID NO: 24642 - DNA, 15 bp, Homo sapiens
ataggaaatttaact

SEQ ID NO: 24643 - DNA, 15 bp, Homo sapiens
taggaaatttaactt

SEQ ID NO: 24644 - DNA, 15 bp, Homo sapiens
aggaaatttaacttt

SEQ ID NO: 24645 - DNA, 15 bp, Homo sapiens
ggaaatttaactttc

SEQ ID NO: 24646 - DNA, 15 bp, Homo sapiens
gaaatttaactttct

SEQ ID NO: 24647 - DNA, 15 bp, Homo sapiens
aaatttaactttctg

SEQ ID NO: 24648 - DNA, 15 bp, Homo sapiens
aatttaactttctga

SEQ ID NO: 24649 - DNA, 15 bp, Homo sapiens
atttaactttctgaa

SEQ ID NO: 24650 - DNA, 15 bp, Homo sapiens
tttaactttctgaag

SEQ ID NO: 24651 - DNA, 15 bp, Homo sapiens
ttaactttctgaagg

SEQ ID NO: 24652 - DNA, 15 bp, Homo sapiens
taactttctgaagga

SEQ ID NO: 24653 - DNA, 15 bp, Homo sapiens
aactttctgaaggat

SEQ ID NO: 24654 - DNA, 15 bp, Homo sapiens
actttctgaaggatt

SEQ ID NO: 24655 - DNA, 15 bp, Homo sapiens
ctttctgaaggattc

SEQ ID NO: 24656 - DNA, 15 bp, Homo sapiens
tttctgaaggattca

SEQ ID NO: 24657 - DNA, 15 bp, Homo sapiens
ttctgaaggattcac

SEQ ID NO: 24658 - DNA, 15 bp, Homo sapiens
tctgaaggattcact

SEQ ID NO: 24659 - DNA, 15 bp, Homo sapiens
ctgaaggattcactt

SEQ ID NO: 24660 - DNA, 15 bp, Homo sapiens
tgaaggattcacttt

SEQ ID NO: 24661 - DNA, 15 bp, Homo sapiens
gaaggattcactttt

SEQ ID NO: 24662 - DNA, 15 bp, Homo sapiens
aaggattcacttttt

SEQ ID NO: 24663 - DNA, 15 bp, Homo sapiens
aggattcactttttt

SEQ ID NO: 24664 - DNA, 15 bp, Homo sapiens
ggattcactttttta

SEQ ID NO: 24665 - DNA, 15 bp, Homo sapiens
gattcacttttttaa

SEQ ID NO: 24666 - DNA, 15 bp, Homo sapiens
attcacttttttaaa

SEQ ID NO: 24667 - DNA, 15 bp, Homo sapiens
ttcacttttttaaat

SEQ ID NO: 24668 - DNA, 15 bp, Homo sapiens
tcacttttttaaatt

SEQ ID NO: 24669 - DNA, 15 bp, Homo sapiens
cacttttttaaattt

SEQ ID NO: 24670 - DNA, 15 bp, Homo sapiens
acttttttaaatttc

SEQ ID NO: 24671 - DNA, 15 bp, Homo sapiens
cttttttaaatttca

SEQ ID NO: 24672 - DNA, 15 bp, Homo sapiens
ttttttaaatttcag

SEQ ID NO: 24673 - DNA, 15 bp, Homo sapiens
tttttaaatttcagc

SEQ ID NO: 24674 - DNA, 15 bp, Homo sapiens
ttttaaatttcagct

SEQ ID NO: 24675 - DNA, 15 bp, Homo sapiens
tttaaatttcagctc

SEQ ID NO: 24676 - DNA, 15 bp, Homo sapiens
ttaaatttcagctca

SEQ ID NO: 24677 - DNA, 15 bp, Homo sapiens
taaatttcagctcag

SEQ ID NO: 24678 - DNA, 15 bp, Homo sapiens
aaatttcagctcagc

SEQ ID NO: 24679 - DNA, 15 bp, Homo sapiens
aatttcagctcagca

SEQ ID NO: 24680 - DNA, 15 bp, Homo sapiens
atttcagctcagcaa

SEQ ID NO: 24681 - DNA, 15 bp, Homo sapiens
tttcagctcagcaaa

SEQ ID NO: 24682 - DNA, 15 bp, Homo sapiens
ttcagctcagcaaac

SEQ ID NO: 24683 - DNA, 15 bp, Homo sapiens
tcagctcagcaaaca

SEQ ID NO: 24684 - DNA, 15 bp, Homo sapiens
cagctcagcaaacac

SEQ ID NO: 24685 - DNA, 15 bp, Homo sapiens
agctcagcaaacact

SEQ ID NO: 24686 - DNA, 15 bp, Homo sapiens
gctcagcaaacactg

SEQ ID NO: 24687 - DNA, 15 bp, Homo sapiens
ctcagcaaacactga

SEQ ID NO: 24688 - DNA, 15 bp, Homo sapiens
tcagcaaacactgac

SEQ ID NO: 24689 - DNA, 15 bp, Homo sapiens
cagcaaacactgacc

SEQ ID NO: 24690 - DNA, 15 bp, Homo sapiens
agcaaacactgacct

SEQ ID NO: 24691 - DNA, 15 bp, Homo sapiens
gcaaacactgacctg

SEQ ID NO: 24692 - DNA, 15 bp, Homo sapiens
caaacactgacctga

SEQ ID NO: 24693 - DNA, 15 bp, Homo sapiens
aaacactgacctgac

SEQ ID NO: 24694 - DNA, 15 bp, Homo sapiens
aacactgacctgact

SEQ ID NO: 24695 - DNA, 15 bp, Homo sapiens
acactgacctgactg

SEQ ID NO: 24696 - DNA, 15 bp, Homo sapiens
cactgacctgactgt

SEQ ID NO: 24697 - DNA, 15 bp, Homo sapiens
actgacctgactgtg

SEQ ID NO: 24698 - DNA, 15 bp, Homo sapiens
ctgacctgactgtgt

SEQ ID NO: 24699 - DNA, 15 bp, Homo sapiens
tgacctgactgtgtg

SEQ ID NO: 24700 - DNA, 15 bp, Homo sapiens
gacctgactgtgtgc

SEQ ID NO: 24701 - DNA, 15 bp, Homo sapiens
acctgactgtgtgct

SEQ ID NO: 24702 - DNA, 15 bp, Homo sapiens
cctgactgtgtgcta

SEQ ID NO: 24703 - DNA, 15 bp, Homo sapiens
ctgactgtgtgctac

SEQ ID NO: 24704 - DNA, 15 bp, Homo sapiens
tgactgtgtgctacc

SEQ ID NO: 24705 - DNA, 15 bp, Homo sapiens
gactgtgtgctacca

SEQ ID NO: 24706 - DNA, 15 bp, Homo sapiens
actgtgtgctaccag

SEQ ID NO: 24707 - DNA, 15 bp, Homo sapiens
ctgtgtgctaccaga

SEQ ID NO: 24708 - DNA, 15 bp, Homo sapiens
tgtgtgctaccagaa

SEQ ID NO: 24709 - DNA, 15 bp, Homo sapiens
gtgtgctaccagaag

SEQ ID NO: 24710 - DNA, 15 bp, Homo sapiens
tgtgctaccagaagt

SEQ ID NO: 24711 - DNA, 15 bp, Homo sapiens
gtgctaccagaagtt

SEQ ID NO: 24712 - DNA, 15 bp, Homo sapiens
tgctaccagaagttg

SEQ ID NO: 24713 - DNA, 15 bp, Homo sapiens
gctaccagaagttga

SEQ ID NO: 24714 - DNA, 15 bp, Homo sapiens
ctaccagaagttgat

SEQ ID NO: 24715 - DNA, 15 bp, Homo sapiens
taccagaagttgatt

SEQ ID NO: 24716 - DNA, 15 bp, Homo sapiens
accagaagttgattg

SEQ ID NO: 24717 - DNA, 15 bp, Homo sapiens
ccagaagttgattgg

SEQ ID NO: 24718 - DNA, 15 bp, Homo sapiens
cagaagttgattggg

SEQ ID NO: 24719 - DNA, 15 bp, Homo sapiens
agaagttgattgggc

SEQ ID NO: 24720 - DNA, 15 bp, Homo sapiens
gaagttgattgggca

SEQ ID NO: 24721 - DNA, 15 bp, Homo sapiens
aagttgattgggcat

SEQ ID NO: 24722 - DNA, 15 bp, Homo sapiens
agttgattgggcata

SEQ ID NO: 24723 - DNA, 15 bp, Homo sapiens
gttgattgggcatat

SEQ ID NO: 24724 - DNA, 15 bp, Homo sapiens
ttgattgggcatatg

SEQ ID NO: 24725 - DNA, 15 bp, Homo sapiens
tgattgggcatatgg

SEQ ID NO: 24726 - DNA, 15 bp, Homo sapiens
gattgggcatatggg

SEQ ID NO: 24727 - DNA, 15 bp, Homo sapiens
attgggcatatgggt

SEQ ID NO: 24728 - DNA, 15 bp, Homo sapiens
ttgggcatatgggta

SEQ ID NO: 24729 - DNA, 15 bp, Homo sapiens
tgggcatatgggtag

SEQ ID NO: 24730 - DNA, 15 bp, Homo sapiens
gggcatatgggtagc

SEQ ID NO: 24731 - DNA, 15 bp, Homo sapiens
ggcatatgggtagct

SEQ ID NO: 24732 - DNA, 15 bp, Homo sapiens
gcatatgggtagctt

SEQ ID NO: 24733 - DNA, 15 bp, Homo sapiens
catatgggtagcttc

SEQ ID NO: 24734 - DNA, 15 bp, Homo sapiens
atatgggtagcttct

SEQ ID NO: 24735 - DNA, 15 bp, Homo sapiens
tatgggtagcttctg

SEQ ID NO: 24736 - DNA, 15 bp, Homo sapiens
atgggtagcttctga

SEQ ID NO: 24737 - DNA, 15 bp, Homo sapiens
tgggtagcttctgac

SEQ ID NO: 24738 - DNA, 15 bp, Homo sapiens
gggtagcttctgact

SEQ ID NO: 24739 - DNA, 15 bp, Homo sapiens
ggtagcttctgacta

SEQ ID NO: 24740 - DNA, 15 bp, Homo sapiens
gtagcttctgactaa

SEQ ID NO: 24741 - DNA, 15 bp, Homo sapiens
tagcttctgactaat

SEQ ID NO: 24742 - DNA, 15 bp, Homo sapiens
agcttctgactaatg

SEQ ID NO: 24743 - DNA, 15 bp, Homo sapiens
gcttctgactaatgg

SEQ ID NO: 24744 - DNA, 15 bp, Homo sapiens
cttctgactaatgga

SEQ ID NO: 24745 - DNA, 15 bp, Homo sapiens
ttctgactaatggaa

SEQ ID NO: 24746 - DNA, 15 bp, Homo sapiens
tctgactaatggaat

SEQ ID NO: 24747 - DNA, 15 bp, Homo sapiens
ctgactaatggaatc

SEQ ID NO: 24748 - DNA, 15 bp, Homo sapiens
tgactaatggaatca

SEQ ID NO: 24749 - DNA, 15 bp, Homo sapiens
gactaatggaatcac

SEQ ID NO: 24750 - DNA, 15 bp, Homo sapiens
actaatggaatcaca

SEQ ID NO: 24751 - DNA, 15 bp, Homo sapiens
ctaatggaatcacaa

SEQ ID NO: 24752 - DNA, 15 bp, Homo sapiens
taatggaatcacaat

SEQ ID NO: 24753 - DNA, 15 bp, Homo sapiens
aatggaatcacaatc

SEQ ID NO: 24754 - DNA, 15 bp, Homo sapiens
atggaatcacaatca

SEQ ID NO: 24755 - DNA, 15 bp, Homo sapiens
tggaatcacaatcaa

SEQ ID NO: 24756 - DNA, 15 bp, Homo sapiens
ggaatcacaatcaaa

SEQ ID NO: 24757 - DNA, 15 bp, Homo sapiens
gaatcacaatcaaag

SEQ ID NO: 24758 - DNA, 15 bp, Homo sapiens
aatcacaatcaaagc

SEQ ID NO: 24759 - DNA, 15 bp, Homo sapiens
atcacaatcaaagcc

SEQ ID NO: 24760 - DNA, 15 bp, Homo sapiens
tcacaatcaaagccc

SEQ ID NO: 24761 - DNA, 15 bp, Homo sapiens
cacaatcaaagccct

SEQ ID NO: 24762 - DNA, 15 bp, Homo sapiens
acaatcaaagccctg

SEQ ID NO: 24763 - DNA, 15 bp, Homo sapiens
caatcaaagccctgt

SEQ ID NO: 24764 - DNA, 15 bp, Homo sapiens
aatcaaagccctgtc

SEQ ID NO: 24765 - DNA, 15 bp, Homo sapiens
atcaaagccctgtcc

SEQ ID NO: 24766 - DNA, 15 bp, Homo sapiens
tcaaagccctgtcct

SEQ ID NO: 24767 - DNA, 15 bp, Homo sapiens
caaagccctgtcctt

SEQ ID NO: 24768 - DNA, 15 bp, Homo sapiens
aaagccctgtccttc

SEQ ID NO: 24769 - DNA, 15 bp, Homo sapiens
aagccctgtccttct

SEQ ID NO: 24770 - DNA, 15 bp, Homo sapiens
agccctgtccttctt

SEQ ID NO: 24771 - DNA, 15 bp, Homo sapiens
gccctgtccttcttg

SEQ ID NO: 24772 - DNA, 15 bp, Homo sapiens
ccctgtccttcttgc

SEQ ID NO: 24773 - DNA, 15 bp, Homo sapiens
cctgtccttcttgcc

SEQ ID NO: 24774 - DNA, 15 bp, Homo sapiens
ctgtccttcttgccc

SEQ ID NO: 24775 - DNA, 15 bp, Homo sapiens
tgtccttcttgccca

SEQ ID NO: 24776 - DNA, 15 bp, Homo sapiens
gtccttcttgcccaa

SEQ ID NO: 24777 - DNA, 15 bp, Homo sapiens
tccttcttgcccaac

SEQ ID NO: 24778 - DNA, 15 bp, Homo sapiens
ccttcttgcccaacc

SEQ ID NO: 24779 - DNA, 15 bp, Homo sapiens
cttcttgcccaacct

SEQ ID NO: 24780 - DNA, 15 bp, Homo sapiens
ttcttgcccaacctg

SEQ ID NO: 24781 - DNA, 15 bp, Homo sapiens
tcttgcccaacctga

SEQ ID NO: 24782 - DNA, 15 bp, Homo sapiens
cttgcccaacctgac

SEQ ID NO: 24783 - DNA, 15 bp, Homo sapiens
ttgcccaacctgaca

SEQ ID NO: 24784 - DNA, 15 bp, Homo sapiens
tgcccaacctgacac

SEQ ID NO: 24785 - DNA, 15 bp, Homo sapiens
gcccaacctgacact

SEQ ID NO: 24786 - DNA, 15 bp, Homo sapiens
cccaacctgacactc

SEQ ID NO: 24787 - DNA, 15 bp, Homo sapiens
ccaacctgacactcc

SEQ ID NO: 24788 - DNA, 15 bp, Homo sapiens
caacctgacactcca

SEQ ID NO: 24789 - DNA, 15 bp, Homo sapiens
aacctgacactccac

SEQ ID NO: 24790 - DNA, 15 bp, Homo sapiens
acctgacactccaca

SEQ ID NO: 24791 - DNA, 15 bp, Homo sapiens
cctgacactccacac

SEQ ID NO: 24792 - DNA, 15 bp, Homo sapiens
ctgacactccacacc

SEQ ID NO: 24793 - DNA, 15 bp, Homo sapiens
tgacactccacaccc

SEQ ID NO: 24794 - DNA, 15 bp, Homo sapiens
gacactccacacccc

SEQ ID NO: 24795 - DNA, 15 bp, Homo sapiens
acactccacacccca

SEQ ID NO: 24796 - DNA, 15 bp, Homo sapiens
cactccacaccccac

SEQ ID NO: 24797 - DNA, 15 bp, Homo sapiens
actccacaccccaca

SEQ ID NO: 24798 - DNA, 15 bp, Homo sapiens
ctccacaccccacag

SEQ ID NO: 24799 - DNA, 15 bp, Homo sapiens
tccacaccccacagg

SEQ ID NO: 24800 - DNA, 15 bp, Homo sapiens
ccacaccccacaggg

SEQ ID NO: 24801 - DNA, 15 bp, Homo sapiens
cacaccccacagggg

SEQ ID NO: 24802 - DNA, 15 bp, Homo sapiens
acaccccacaggggc

SEQ ID NO: 24803 - DNA, 15 bp, Homo sapiens
caccccacaggggcc

SEQ ID NO: 24804 - DNA, 15 bp, Homo sapiens
accccacaggggcct

SEQ ID NO: 24805 - DNA, 15 bp, Homo sapiens
ccccacaggggcctc

SEQ ID NO: 24806 - DNA, 15 bp, Homo sapiens
cccacaggggcctca

SEQ ID NO: 24807 - DNA, 15 bp, Homo sapiens
ccacaggggcctcac

SEQ ID NO: 24808 - DNA, 15 bp, Homo sapiens
cacaggggcctcacc

SEQ ID NO: 24809 - DNA, 15 bp, Homo sapiens
acaggggcctcacct

SEQ ID NO: 24810 - DNA, 15 bp, Homo sapiens
caggggcctcacctc

SEQ ID NO: 24811 - DNA, 15 bp, Homo sapiens
aggggcctcacctcc

SEQ ID NO: 24812 - DNA, 15 bp, Homo sapiens
ggggcctcacctccc

SEQ ID NO: 24813 - DNA, 15 bp, Homo sapiens
gggcctcacctccct

SEQ ID NO: 24814 - DNA, 15 bp, Homo sapiens
ggcctcacctccctt

SEQ ID NO: 24815 - DNA, 15 bp, Homo sapiens
gcctcacctcccttc

SEQ ID NO: 24816 - DNA, 15 bp, Homo sapiens
cctcacctcccttct

SEQ ID NO: 24817 - DNA, 15 bp, Homo sapiens
ctcacctcccttctt

SEQ ID NO: 24818 - DNA, 15 bp, Homo sapiens
tcacctcccttcttt

SEQ ID NO: 24819 - DNA, 15 bp, Homo sapiens
cacctcccttctttc

SEQ ID NO: 24820 - DNA, 15 bp, Homo sapiens
acctcccttctttct

SEQ ID NO: 24821 - DNA, 15 bp, Homo sapiens
cctcccttctttctg

SEQ ID NO: 24822 - DNA, 15 bp, Homo sapiens
ctcccttctttctgt

SEQ ID NO: 24823 - DNA, 15 bp, Homo sapiens
tcccttctttctgtc

SEQ ID NO: 24824 - DNA, 15 bp, Homo sapiens
cccttctttctgtcc

SEQ ID NO: 24825 - DNA, 15 bp, Homo sapiens
ccttctttctgtccc

SEQ ID NO: 24826 - DNA, 15 bp, Homo sapiens
cttctttctgtcccc

SEQ ID NO: 24827 - DNA, 15 bp, Homo sapiens
ttctttctgtccccc

SEQ ID NO: 24828 - DNA, 15 bp, Homo sapiens
tctttctgtcccccc

SEQ ID NO: 24829 - DNA, 15 bp, Homo sapiens
ctttctgtcccccca

SEQ ID NO: 24830 - DNA, 15 bp, Homo sapiens
tttctgtccccccat

SEQ ID NO: 24831 - DNA, 15 bp, Homo sapiens
ttctgtccccccatc

SEQ ID NO: 24832 - DNA, 15 bp, Homo sapiens
tctgtccccccatct

SEQ ID NO: 24833 - DNA, 15 bp, Homo sapiens
ctgtccccccatctc

SEQ ID NO: 24834 - DNA, 15 bp, Homo sapiens
tgtccccccatctct

SEQ ID NO: 24835 - DNA, 15 bp, Homo sapiens
gtccccccatctctg

SEQ ID NO: 24836 - DNA, 15 bp, Homo sapiens
tccccccatctctgc

SEQ ID NO: 24837 - DNA, 15 bp, Homo sapiens
ccccccatctctgct

SEQ ID NO: 24838 - DNA, 15 bp, Homo sapiens
cccccatctctgctt

SEQ ID NO: 24839 - DNA, 15 bp, Homo sapiens
ccccatctctgcttc

SEQ ID NO: 24840 - DNA, 15 bp, Homo sapiens
cccatctctgcttct

SEQ ID NO: 24841 - DNA, 15 bp, Homo sapiens
ccatctctgcttcta

SEQ ID NO: 24842 - DNA, 15 bp, Homo sapiens
catctctgcttctac

SEQ ID NO: 24843 - DNA, 15 bp, Homo sapiens
atctctgcttctact

SEQ ID NO: 24844 - DNA, 15 bp, Homo sapiens
tctctgcttctactg

SEQ ID NO: 24845 - DNA, 15 bp, Homo sapiens
ctctgcttctactgt

SEQ ID NO: 24846 - DNA, 15 bp, Homo sapiens
tctgcttctactgtt

SEQ ID NO: 24847 - DNA, 15 bp, Homo sapiens
ctgcttctactgttc

SEQ ID NO: 24848 - DNA, 15 bp, Homo sapiens
tgcttctactgttcc

SEQ ID NO: 24849 - DNA, 15 bp, Homo sapiens
gcttctactgttccc

SEQ ID NO: 24850 - DNA, 15 bp, Homo sapiens
cttctactgttccct

SEQ ID NO: 24851 - DNA, 15 bp, Homo sapiens
ttctactgttccctc

SEQ ID NO: 24852 - DNA, 15 bp, Homo sapiens
tctactgttccctct

SEQ ID NO: 24853 - DNA, 15 bp, Homo sapiens
ctactgttccctctc

SEQ ID NO: 24854 - DNA, 15 bp, Homo sapiens
tactgttccctctcc

SEQ ID NO: 24855 - DNA, 15 bp, Homo sapiens
actgttccctctccc

SEQ ID NO: 24856 - DNA, 15 bp, Homo sapiens
ctgttccctctccca

SEQ ID NO: 24857 - DNA, 15 bp, Homo sapiens
tgttccctctcccaa

SEQ ID NO: 24858 - DNA, 15 bp, Homo sapiens
gttccctctcccaag

SEQ ID NO: 24859 - DNA, 15 bp, Homo sapiens
ttccctctcccaaga

SEQ ID NO: 24860 - DNA, 15 bp, Homo sapiens
tccctctcccaagag

SEQ ID NO: 24861 - DNA, 15 bp, Homo sapiens
ccctctcccaagagt

SEQ ID NO: 24862 - DNA, 15 bp, Homo sapiens
cctctcccaagagtg

SEQ ID NO: 24863 - DNA, 15 bp, Homo sapiens
ctctcccaagagtgc

SEQ ID NO: 24864 - DNA, 15 bp, Homo sapiens
tctcccaagagtgct

SEQ ID NO: 24865 - DNA, 15 bp, Homo sapiens
ctcccaagagtgctg

SEQ ID NO: 24866 - DNA, 15 bp, Homo sapiens
tcccaagagtgctgt

SEQ ID NO: 24867 - DNA, 15 bp, Homo sapiens
cccaagagtgctgtt

SEQ ID NO: 24868 - DNA, 15 bp, Homo sapiens
ccaagagtgctgttc

SEQ ID NO: 24869 - DNA, 15 bp, Homo sapiens
caagagtgctgttcc

SEQ ID NO: 24870 - DNA, 15 bp, Homo sapiens
aagagtgctgttcct

SEQ ID NO: 24871 - DNA, 15 bp, Homo sapiens
agagtgctgttcctt

SEQ ID NO: 24872 - DNA, 15 bp, Homo sapiens
gagtgctgttccttc

SEQ ID NO: 24873 - DNA, 15 bp, Homo sapiens
agtgctgttccttct

SEQ ID NO: 24874 - DNA, 15 bp, Homo sapiens
gtgctgttccttctg

SEQ ID NO: 24875 - DNA, 15 bp, Homo sapiens
tgctgttccttctgc

SEQ ID NO: 24876 - DNA, 15 bp, Homo sapiens
gctgttccttctgct

SEQ ID NO: 24877 - DNA, 15 bp, Homo sapiens
ctgttccttctgctg

SEQ ID NO: 24878 - DNA, 15 bp, Homo sapiens
tgttccttctgctgc

SEQ ID NO: 24879 - DNA, 15 bp, Homo sapiens
gttccttctgctgct

SEQ ID NO: 24880 - DNA, 15 bp, Homo sapiens
ttccttctgctgctt

SEQ ID NO: 24881 - DNA, 15 bp, Homo sapiens
tccttctgctgcttc

SEQ ID NO: 24882 - DNA, 15 bp, Homo sapiens
ccttctgctgcttcc

SEQ ID NO: 24883 - DNA, 15 bp, Homo sapiens
cttctgctgcttcca

SEQ ID NO: 24884 - DNA, 15 bp, Homo sapiens
ttctgctgcttccat

SEQ ID NO: 24885 - DNA, 15 bp, Homo sapiens
tctgctgcttccatc

SEQ ID NO: 24886 - DNA, 15 bp, Homo sapiens
ctgctgcttccatct

SEQ ID NO: 24887 - DNA, 15 bp, Homo sapiens
tgctgcttccatcta

SEQ ID NO: 24888 - DNA, 15 bp, Homo sapiens
gctgcttccatctag

SEQ ID NO: 24889 - DNA, 15 bp, Homo sapiens
ctgcttccatctagt

SEQ ID NO: 24890 - DNA, 15 bp, Homo sapiens
tgcttccatctagta

SEQ ID NO: 24891 - DNA, 15 bp, Homo sapiens
gcttccatctagtaa

SEQ ID NO: 24892 - DNA, 15 bp, Homo sapiens
cttccatctagtaaa

SEQ ID NO: 24893 - DNA, 15 bp, Homo sapiens
ttccatctagtaaac

SEQ ID NO: 24894 - DNA, 15 bp, Homo sapiens
tccatctagtaaact

SEQ ID NO: 24895 - DNA, 15 bp, Homo sapiens
ccatctagtaaactc

SEQ ID NO: 24896 - DNA, 15 bp, Homo sapiens
catctagtaaactcc

SEQ ID NO: 24897 - DNA, 15 bp, Homo sapiens
atctagtaaactcct

SEQ ID NO: 24898 - DNA, 15 bp, Homo sapiens
tctagtaaactcctt

SEQ ID NO: 24899 - DNA, 15 bp, Homo sapiens
ctagtaaactccttt

SEQ ID NO: 24900 - DNA, 15 bp, Homo sapiens
tagtaaactcctttc

SEQ ID NO: 24901 - DNA, 15 bp, Homo sapiens
agtaaactcctttcg

SEQ ID NO: 24902 - DNA, 15 bp, Homo sapiens
gtaaactcctttcgc

SEQ ID NO: 24903 - DNA, 15 bp, Homo sapiens
taaactcctttcgct

SEQ ID NO: 24904 - DNA, 15 bp, Homo sapiens
aaactcctttcgctc

SEQ ID NO: 24905 - DNA, 15 bp, Homo sapiens
aactcctttcgctct

SEQ ID NO: 24906 - DNA, 15 bp, Homo sapiens
actcctttcgctctc

SEQ ID NO: 24907 - DNA, 15 bp, Homo sapiens
ctcctttcgctctcc

SEQ ID NO: 24908 - DNA, 15 bp, Homo sapiens
tcctttcgctctccc

SEQ ID NO: 24909 - DNA, 15 bp, Homo sapiens
cctttcgctctccct

SEQ ID NO: 24910 - DNA, 15 bp, Homo sapiens
ctttcgctctccctt

SEQ ID NO: 24911 - DNA, 15 bp, Homo sapiens
tttcgctctcccttt

SEQ ID NO: 24912 - DNA, 15 bp, Homo sapiens
ttcgctctccctttg

SEQ ID NO: 24913 - DNA, 15 bp, Homo sapiens
tcgctctccctttgg

SEQ ID NO: 24914 - DNA, 15 bp, Homo sapiens
cgctctccctttggg

SEQ ID NO: 24915 - DNA, 15 bp, Homo sapiens
gctctccctttgggg

SEQ ID NO: 24916 - DNA, 15 bp, Homo sapiens
ctctccctttggggt

SEQ ID NO: 24917 - DNA, 15 bp, Homo sapiens
tctccctttggggtc

SEQ ID NO: 24918 - DNA, 15 bp, Homo sapiens
ctccctttggggtct

SEQ ID NO: 24919 - DNA, 15 bp, Homo sapiens
tccctttggggtctc

SEQ ID NO: 24920 - DNA, 15 bp, Homo sapiens
ccctttggggtctca

SEQ ID NO: 24921 - DNA, 15 bp, Homo sapiens
cctttggggtctcac

SEQ ID NO: 24922 - DNA, 15 bp, Homo sapiens
ctttggggtctcacc

SEQ ID NO: 24923 - DNA, 15 bp, Homo sapiens
tttggggtctcacct

SEQ ID NO: 24924 - DNA, 15 bp, Homo sapiens
ttggggtctcacctt

SEQ ID NO: 24925 - DNA, 15 bp, Homo sapiens
tggggtctcaccttc

SEQ ID NO: 24926 - DNA, 15 bp, Homo sapiens
ggggtctcaccttct

SEQ ID NO: 24927 - DNA, 15 bp, Homo sapiens
gggtctcaccttctg

SEQ ID NO: 24928 - DNA, 15 bp, Homo sapiens
ggtctcaccttctgt

SEQ ID NO: 24929 - DNA, 15 bp, Homo sapiens
gtctcaccttctgtg

SEQ ID NO: 24930 - DNA, 15 bp, Homo sapiens
tctcaccttctgtgg

SEQ ID NO: 24931 - DNA, 15 bp, Homo sapiens
ctcaccttctgtggg

SEQ ID NO: 24932 - DNA, 15 bp, Homo sapiens
tcaccttctgtggga

SEQ ID NO: 24933 - DNA, 15 bp, Homo sapiens
caccttctgtgggaa

SEQ ID NO: 24934 - DNA, 15 bp, Homo sapiens
accttctgtgggaac

SEQ ID NO: 24935 - DNA, 15 bp, Homo sapiens
ccttctgtgggaact

SEQ ID NO: 24936 - DNA, 15 bp, Homo sapiens
cttctgtgggaactc

SEQ ID NO: 24937 - DNA, 15 bp, Homo sapiens
ttctgtgggaactca

SEQ ID NO: 24938 - DNA, 15 bp, Homo sapiens
tctgtgggaactcaa

SEQ ID NO: 24939 - DNA, 15 bp, Homo sapiens
ctgtgggaactcaac

SEQ ID NO: 24940 - DNA, 15 bp, Homo sapiens
tgtgggaactcaact

SEQ ID NO: 24941 - DNA, 15 bp, Homo sapiens
gtgggaactcaactg

SEQ ID NO: 24942 - DNA, 15 bp, Homo sapiens
tgggaactcaactgc

SEQ ID NO: 24943 - DNA, 15 bp, Homo sapiens
gggaactcaactgca

SEQ ID NO: 24944 - DNA, 15 bp, Homo sapiens
ggaactcaactgcag

SEQ ID NO: 24945 - DNA, 15 bp, Homo sapiens
gaactcaactgcagc

SEQ ID NO: 24946 - DNA, 15 bp, Homo sapiens
aactcaactgcagct

SEQ ID NO: 24947 - DNA, 15 bp, Homo sapiens
actcaactgcagctt

SEQ ID NO: 24948 - DNA, 15 bp, Homo sapiens
ctcaactgcagcttt

SEQ ID NO: 24949 - DNA, 15 bp, Homo sapiens
tcaactgcagctttt

SEQ ID NO: 24950 - DNA, 15 bp, Homo sapiens
caactgcagcttttg

SEQ ID NO: 24951 - DNA, 15 bp, Homo sapiens
aactgcagcttttgt

SEQ ID NO: 24952 - DNA, 15 bp, Homo sapiens
actgcagcttttgtc

SEQ ID NO: 24953 - DNA, 15 bp, Homo sapiens
ctgcagcttttgtcc

SEQ ID NO: 24954 - DNA, 15 bp, Homo sapiens
tgcagcttttgtccg

SEQ ID NO: 24955 - DNA, 15 bp, Homo sapiens
gcagcttttgtccgc

SEQ ID NO: 24956 - DNA, 15 bp, Homo sapiens
cagcttttgtccgct

SEQ ID NO: 24957 - DNA, 15 bp, Homo sapiens
agcttttgtccgctg

SEQ ID NO: 24958 - DNA, 15 bp, Homo sapiens
gcttttgtccgctga

SEQ ID NO: 24959 - DNA, 15 bp, Homo sapiens
cttttgtccgctgaa

SEQ ID NO: 24960 - DNA, 15 bp, Homo sapiens
ttttgtccgctgaac

SEQ ID NO: 24961 - DNA, 15 bp, Homo sapiens
tttgtccgctgaaca

SEQ ID NO: 24962 - DNA, 15 bp, Homo sapiens
ttgtccgctgaacac

SEQ ID NO: 24963 - DNA, 15 bp, Homo sapiens
tgtccgctgaacaca

SEQ ID NO: 24964 - DNA, 15 bp, Homo sapiens
gtccgctgaacacat

SEQ ID NO: 24965 - DNA, 15 bp, Homo sapiens
tccgctgaacacatc

SEQ ID NO: 24966 - DNA, 15 bp, Homo sapiens
ccgctgaacacatcc

SEQ ID NO: 24967 - DNA, 15 bp, Homo sapiens
cgctgaacacatcca

SEQ ID NO: 24968 - DNA, 15 bp, Homo sapiens
gctgaacacatccat

SEQ ID NO: 24969 - DNA, 15 bp, Homo sapiens
ctgaacacatccatt

SEQ ID NO: 24970 - DNA, 15 bp, Homo sapiens
tgaacacatccattc

SEQ ID NO: 24971 - DNA, 15 bp, Homo sapiens
gaacacatccattca

SEQ ID NO: 24972 - DNA, 15 bp, Homo sapiens
aacacatccattcat

SEQ ID NO: 24973 - DNA, 15 bp, Homo sapiens
acacatccattcata

SEQ ID NO: 24974 - DNA, 15 bp, Homo sapiens
cacatccattcatac

SEQ ID NO: 24975 - DNA, 15 bp, Homo sapiens
acatccattcataca

SEQ ID NO: 24976 - DNA, 15 bp, Homo sapiens
catccattcatacat

SEQ ID NO: 24977 - DNA, 15 bp, Homo sapiens
atccattcatacatt

SEQ ID NO: 24978 - DNA, 15 bp, Homo sapiens
tccattcatacattc

SEQ ID NO: 24979 - DNA, 15 bp, Homo sapiens
ccattcatacattcc

SEQ ID NO: 24980 - DNA, 15 bp, Homo sapiens
cattcatacattcct

SEQ ID NO: 24981 - DNA, 15 bp, Homo sapiens
attcatacattcctt

SEQ ID NO: 24982 - DNA, 15 bp, Homo sapiens
ttcatacattccttc

SEQ ID NO: 24983 - DNA, 15 bp, Homo sapiens
tcatacattccttct

SEQ ID NO: 24984 - DNA, 15 bp, Homo sapiens
catacattccttctc

SEQ ID NO: 24985 - DNA, 15 bp, Homo sapiens
atacattccttctcc

SEQ ID NO: 24986 - DNA, 15 bp, Homo sapiens
tacattccttctcca

SEQ ID NO: 24987 - DNA, 15 bp, Homo sapiens
acattccttctccat

SEQ ID NO: 24988 - DNA, 15 bp, Homo sapiens
cattccttctccatc

SEQ ID NO: 24989 - DNA, 15 bp, Homo sapiens
attccttctccatcc

SEQ ID NO: 24990 - DNA, 15 bp, Homo sapiens
ttccttctccatcct

SEQ ID NO: 24991 - DNA, 15 bp, Homo sapiens
tccttctccatcctg

SEQ ID NO: 24992 - DNA, 15 bp, Homo sapiens
ccttctccatcctgg

SEQ ID NO: 24993 - DNA, 15 bp, Homo sapiens
cttctccatcctggg

SEQ ID NO: 24994 - DNA, 15 bp, Homo sapiens
ttctccatcctggga

SEQ ID NO: 24995 - DNA, 15 bp, Homo sapiens
tctccatcctgggaa

SEQ ID NO: 24996 - DNA, 15 bp, Homo sapiens
ctccatcctgggaag

SEQ ID NO: 24997 - DNA, 15 bp, Homo sapiens
tccatcctgggaaga

SEQ ID NO: 24998 - DNA, 15 bp, Homo sapiens
ccatcctgggaagat

SEQ ID NO: 24999 - DNA, 15 bp, Homo sapiens
catcctgggaagatt

SEQ ID NO: 25000 - DNA, 15 bp, Homo sapiens
atcctgggaagattt

SEQ ID NO: 25001 - DNA, 15 bp, Homo sapiens
tcctgggaagattta

SEQ ID NO: 25002 - DNA, 15 bp, Homo sapiens
cctgggaagatttac

SEQ ID NO: 25003 - DNA, 15 bp, Homo sapiens
ctgggaagatttact

SEQ ID NO: 25004 - DNA, 15 bp, Homo sapiens
tgggaagatttactg

SEQ ID NO: 25005 - DNA, 15 bp, Homo sapiens
gggaagatttactga

SEQ ID NO: 25006 - DNA, 15 bp, Homo sapiens
ggaagatttactgaa

SEQ ID NO: 25007 - DNA, 15 bp, Homo sapiens
gaagatttactgaac

SEQ ID NO: 25008 - DNA, 15 bp, Homo sapiens
aagatttactgaaca

SEQ ID NO: 25009 - DNA, 15 bp, Homo sapiens
agatttactgaacac

SEQ ID NO: 25010 - DNA, 15 bp, Homo sapiens
gatttactgaacacc

SEQ ID NO: 25011 - DNA, 15 bp, Homo sapiens
atttactgaacacct

SEQ ID NO: 25012 - DNA, 15 bp, Homo sapiens
tttactgaacaccta

SEQ ID NO: 25013 - DNA, 15 bp, Homo sapiens
ttactgaacacctac

SEQ ID NO: 25014 - DNA, 15 bp, Homo sapiens
tactgaacacctact

SEQ ID NO: 25015 - DNA, 15 bp, Homo sapiens
actgaacacctactg

SEQ ID NO: 25016 - DNA, 15 bp, Homo sapiens
ctgaacacctactga

SEQ ID NO: 25017 - DNA, 15 bp, Homo sapiens
tgaacacctactgag

SEQ ID NO: 25018 - DNA, 15 bp, Homo sapiens
gaacacctactgagt

SEQ ID NO: 25019 - DNA, 15 bp, Homo sapiens
aacacctactgagtg

SEQ ID NO: 25020 - DNA, 15 bp, Homo sapiens
acacctactgagtgc

SEQ ID NO: 25021 - DNA, 15 bp, Homo sapiens
cacctactgagtgcc

SEQ ID NO: 25022 - DNA, 15 bp, Homo sapiens
acctactgagtgcca

SEQ ID NO: 25023 - DNA, 15 bp, Homo sapiens
cctactgagtgccag

SEQ ID NO: 25024 - DNA, 15 bp, Homo sapiens
ctactgagtgccagg

SEQ ID NO: 25025 - DNA, 15 bp, Homo sapiens
tactgagtgccaggt

SEQ ID NO: 25026 - DNA, 15 bp, Homo sapiens
actgagtgccaggtt

SEQ ID NO: 25027 - DNA, 15 bp, Homo sapiens
ctgagtgccaggttc

SEQ ID NO: 25028 - DNA, 15 bp, Homo sapiens
tgagtgccaggttct

SEQ ID NO: 25029 - DNA, 15 bp, Homo sapiens
gagtgccaggttctg

SEQ ID NO: 25030 - DNA, 15 bp, Homo sapiens
agtgccaggttctga

SEQ ID NO: 25031 - DNA, 15 bp, Homo sapiens
gtgccaggttctgag

SEQ ID NO: 25032 - DNA, 15 bp, Homo sapiens
tgccaggttctgagc

SEQ ID NO: 25033 - DNA, 15 bp, Homo sapiens
gccaggttctgagca

SEQ ID NO: 25034 - DNA, 15 bp, Homo sapiens
ccaggttctgagcat

SEQ ID NO: 25035 - DNA, 15 bp, Homo sapiens
caggttctgagcatg

SEQ ID NO: 25036 - DNA, 15 bp, Homo sapiens
aggttctgagcatgc

SEQ ID NO: 25037 - DNA, 15 bp, Homo sapiens
ggttctgagcatgct

SEQ ID NO: 25038 - DNA, 15 bp, Homo sapiens
gttctgagcatgctg

SEQ ID NO: 25039 - DNA, 15 bp, Homo sapiens
ttctgagcatgctgt

SEQ ID NO: 25040 - DNA, 15 bp, Homo sapiens
tctgagcatgctgtt

SEQ ID NO: 25041 - DNA, 15 bp, Homo sapiens
ctgagcatgctgtta

SEQ ID NO: 25042 - DNA, 15 bp, Homo sapiens
tgagcatgctgttat

SEQ ID NO: 25043 - DNA, 15 bp, Homo sapiens
gagcatgctgttatc

SEQ ID NO: 25044 - DNA, 15 bp, Homo sapiens
agcatgctgttatct

SEQ ID NO: 25045 - DNA, 15 bp, Homo sapiens
gcatgctgttatctc

SEQ ID NO: 25046 - DNA, 15 bp, Homo sapiens
catgctgttatctca

SEQ ID NO: 25047 - DNA, 15 bp, Homo sapiens
atgctgttatctcat

SEQ ID NO: 25048 - DNA, 15 bp, Homo sapiens
tgctgttatctcatt

SEQ ID NO: 25049 - DNA, 15 bp, Homo sapiens
gctgttatctcatta

SEQ ID NO: 25050 - DNA, 15 bp, Homo sapiens
ctgttatctcattag

SEQ ID NO: 25051 - DNA, 15 bp, Homo sapiens
tgttatctcattaga

SEQ ID NO: 25052 - DNA, 15 bp, Homo sapiens
gttatctcattagaa

SEQ ID NO: 25053 - DNA, 15 bp, Homo sapiens
ttatctcattagaac

SEQ ID NO: 25054 - DNA, 15 bp, Homo sapiens
tatctcattagaacc

SEQ ID NO: 25055 - DNA, 15 bp, Homo sapiens
atctcattagaacct

SEQ ID NO: 25056 - DNA, 15 bp, Homo sapiens
tctcattagaacctc

SEQ ID NO: 25057 - DNA, 15 bp, Homo sapiens
ctcattagaacctca

SEQ ID NO: 25058 - DNA, 15 bp, Homo sapiens
tcattagaacctcac

SEQ ID NO: 25059 - DNA, 15 bp, Homo sapiens
cattagaacctcaca

SEQ ID NO: 25060 - DNA, 15 bp, Homo sapiens
attagaacctcacag

SEQ ID NO: 25061 - DNA, 15 bp, Homo sapiens
ttagaacctcacagc

SEQ ID NO: 25062 - DNA, 15 bp, Homo sapiens
tagaacctcacagca

SEQ ID NO: 25063 - DNA, 15 bp, Homo sapiens
agaacctcacagcat

SEQ ID NO: 25064 - DNA, 15 bp, Homo sapiens
gaacctcacagcatc

SEQ ID NO: 25065 - DNA, 15 bp, Homo sapiens
aacctcacagcatcc

SEQ ID NO: 25066 - DNA, 15 bp, Homo sapiens
acctcacagcatcct

SEQ ID NO: 25067 - DNA, 15 bp, Homo sapiens
cctcacagcatccta

SEQ ID NO: 25068 - DNA, 15 bp, Homo sapiens
ctcacagcatcctag

SEQ ID NO: 25069 - DNA, 15 bp, Homo sapiens
tcacagcatcctagg

SEQ ID NO: 25070 - DNA, 15 bp, Homo sapiens
cacagcatcctagga

SEQ ID NO: 25071 - DNA, 15 bp, Homo sapiens
acagcatcctaggag

SEQ ID NO: 25072 - DNA, 15 bp, Homo sapiens
cagcatcctaggagg

SEQ ID NO: 25073 - DNA, 15 bp, Homo sapiens
agcatcctaggaggg

SEQ ID NO: 25074 - DNA, 15 bp, Homo sapiens
gcatcctaggaggga

SEQ ID NO: 25075 - DNA, 15 bp, Homo sapiens
catcctaggagggag

SEQ ID NO: 25076 - DNA, 15 bp, Homo sapiens
atcctaggagggagg

SEQ ID NO: 25077 - DNA, 15 bp, Homo sapiens
tcctaggagggaggt

SEQ ID NO: 25078 - DNA, 15 bp, Homo sapiens
cctaggagggaggtg

SEQ ID NO: 25079 - DNA, 15 bp, Homo sapiens
ctaggagggaggtga

SEQ ID NO: 25080 - DNA, 15 bp, Homo sapiens
taggagggaggtgat

SEQ ID NO: 25081 - DNA, 15 bp, Homo sapiens
aggagggaggtgatc

SEQ ID NO: 25082 - DNA, 15 bp, Homo sapiens
ggagggaggtgatcc

SEQ ID NO: 25083 - DNA, 15 bp, Homo sapiens
gagggaggtgatcct

SEQ ID NO: 25084 - DNA, 15 bp, Homo sapiens
agggaggtgatcctt

SEQ ID NO: 25085 - DNA, 15 bp, Homo sapiens
gggaggtgatccttc

SEQ ID NO: 25086 - DNA, 15 bp, Homo sapiens
ggaggtgatccttcc

SEQ ID NO: 25087 - DNA, 15 bp, Homo sapiens
gaggtgatccttcca

SEQ ID NO: 25088 - DNA, 15 bp, Homo sapiens
aggtgatccttccag

SEQ ID NO: 25089 - DNA, 15 bp, Homo sapiens
ggtgatccttccagc

SEQ ID NO: 25090 - DNA, 15 bp, Homo sapiens
gtgatccttccagca

SEQ ID NO: 25091 - DNA, 15 bp, Homo sapiens
tgatccttccagcag

SEQ ID NO: 25092 - DNA, 15 bp, Homo sapiens
gatccttccagcagc

SEQ ID NO: 25093 - DNA, 15 bp, Homo sapiens
atccttccagcagcc

SEQ ID NO: 25094 - DNA, 15 bp, Homo sapiens
tccttccagcagccc

SEQ ID NO: 25095 - DNA, 15 bp, Homo sapiens
ccttccagcagcccc

SEQ ID NO: 25096 - DNA, 15 bp, Homo sapiens
cttccagcagcccct

SEQ ID NO: 25097 - DNA, 15 bp, Homo sapiens
ttccagcagcccctc

SEQ ID NO: 25098 - DNA, 15 bp, Homo sapiens
tccagcagcccctct

SEQ ID NO: 25099 - DNA, 15 bp, Homo sapiens
ccagcagcccctctc

SEQ ID NO: 25100 - DNA, 15 bp, Homo sapiens
cagcagcccctctcc

SEQ ID NO: 25101 - DNA, 15 bp, Homo sapiens
agcagcccctctccc

SEQ ID NO: 25102 - DNA, 15 bp, Homo sapiens
gcagcccctctcccc

SEQ ID NO: 25103 - DNA, 15 bp, Homo sapiens
cagcccctctcccca

SEQ ID NO: 25104 - DNA, 15 bp, Homo sapiens
agcccctctccccag

SEQ ID NO: 25105 - DNA, 15 bp, Homo sapiens
gcccctctccccagg

SEQ ID NO: 25106 - DNA, 15 bp, Homo sapiens
cccctctccccaggt

SEQ ID NO: 25107 - DNA, 15 bp, Homo sapiens
ccctctccccaggtc

SEQ ID NO: 25108 - DNA, 15 bp, Homo sapiens
cctctccccaggtct

SEQ ID NO: 25109 - DNA, 15 bp, Homo sapiens
ctctccccaggtctc

SEQ ID NO: 25110 - DNA, 15 bp, Homo sapiens
tctccccaggtctcc

SEQ ID NO: 25111 - DNA, 15 bp, Homo sapiens
ctccccaggtctcca

SEQ ID NO: 25112 - DNA, 15 bp, Homo sapiens
tccccaggtctccat

SEQ ID NO: 25113 - DNA, 15 bp, Homo sapiens
ccccaggtctccatg

SEQ ID NO: 25114 - DNA, 15 bp, Homo sapiens
cccaggtctccatgt

SEQ ID NO: 25115 - DNA, 15 bp, Homo sapiens
ccaggtctccatgtt

SEQ ID NO: 25116 - DNA, 15 bp, Homo sapiens
caggtctccatgttc

SEQ ID NO: 25117 - DNA, 15 bp, Homo sapiens
aggtctccatgttca

SEQ ID NO: 25118 - DNA, 15 bp, Homo sapiens
ggtctccatgttcag

SEQ ID NO: 25119 - DNA, 15 bp, Homo sapiens
gtctccatgttcagg

SEQ ID NO: 25120 - DNA, 15 bp, Homo sapiens
tctccatgttcagga

SEQ ID NO: 25121 - DNA, 15 bp, Homo sapiens
ctccatgttcaggat

SEQ ID NO: 25122 - DNA, 15 bp, Homo sapiens
tccatgttcaggatg

SEQ ID NO: 25123 - DNA, 15 bp, Homo sapiens
ccatgttcaggatgt

SEQ ID NO: 25124 - DNA, 15 bp, Homo sapiens
catgttcaggatgtc

SEQ ID NO: 25125 - DNA, 15 bp, Homo sapiens
atgttcaggatgtcc

SEQ ID NO: 25126 - DNA, 15 bp, Homo sapiens
tgttcaggatgtcca

SEQ ID NO: 25127 - DNA, 15 bp, Homo sapiens
gttcaggatgtccat

SEQ ID NO: 25128 - DNA, 15 bp, Homo sapiens
ttcaggatgtccatg

SEQ ID NO: 25129 - DNA, 15 bp, Homo sapiens
tcaggatgtccatga

SEQ ID NO: 25130 - DNA, 15 bp, Homo sapiens
caggatgtccatgag

SEQ ID NO: 25131 - DNA, 15 bp, Homo sapiens
aggatgtccatgagt

SEQ ID NO: 25132 - DNA, 15 bp, Homo sapiens
ggatgtccatgagtt

SEQ ID NO: 25133 - DNA, 15 bp, Homo sapiens
gatgtccatgagtta

SEQ ID NO: 25134 - DNA, 15 bp, Homo sapiens
atgtccatgagttag

SEQ ID NO: 25135 - DNA, 15 bp, Homo sapiens
tgtccatgagttaga

SEQ ID NO: 25136 - DNA, 15 bp, Homo sapiens
gtccatgagttagaa

SEQ ID NO: 25137 - DNA, 15 bp, Homo sapiens
tccatgagttagaaa

SEQ ID NO: 25138 - DNA, 15 bp, Homo sapiens
ccatgagttagaaat

SEQ ID NO: 25139 - DNA, 15 bp, Homo sapiens
catgagttagaaatg

SEQ ID NO: 25140 - DNA, 15 bp, Homo sapiens
atgagttagaaatga

SEQ ID NO: 25141 - DNA, 15 bp, Homo sapiens
tgagttagaaatgaa

SEQ ID NO: 25142 - DNA, 15 bp, Homo sapiens
gagttagaaatgaat

SEQ ID NO: 25143 - DNA, 15 bp, Homo sapiens
agttagaaatgaata

SEQ ID NO: 25144 - DNA, 15 bp, Homo sapiens
gttagaaatgaatat

SEQ ID NO: 25145 - DNA, 15 bp, Homo sapiens
ttagaaatgaatatg

SEQ ID NO: 25146 - DNA, 15 bp, Homo sapiens
tagaaatgaatatgt

SEQ ID NO: 25147 - DNA, 15 bp, Homo sapiens
agaaatgaatatgtt

SEQ ID NO: 25148 - DNA, 15 bp, Homo sapiens
gaaatgaatatgttc

SEQ ID NO: 25149 - DNA, 15 bp, Homo sapiens
aaatgaatatgttca

SEQ ID NO: 25150 - DNA, 15 bp, Homo sapiens
aatgaatatgttcag

SEQ ID NO: 25151 - DNA, 15 bp, Homo sapiens
atgaatatgttcagc

SEQ ID NO: 25152 - DNA, 15 bp, Homo sapiens
tgaatatgttcagct

SEQ ID NO: 25153 - DNA, 15 bp, Homo sapiens
gaatatgttcagctg

SEQ ID NO: 25154 - DNA, 15 bp, Homo sapiens
aatatgttcagctgc

SEQ ID NO: 25155 - DNA, 15 bp, Homo sapiens
atatgttcagctgca

SEQ ID NO: 25156 - DNA, 15 bp, Homo sapiens
tatgttcagctgcaa

SEQ ID NO: 25157 - DNA, 15 bp, Homo sapiens
atgttcagctgcaag

SEQ ID NO: 25158 - DNA, 15 bp, Homo sapiens
tgttcagctgcaagt

SEQ ID NO: 25159 - DNA, 15 bp, Homo sapiens
gttcagctgcaagta

SEQ ID NO: 25160 - DNA, 15 bp, Homo sapiens
ttcagctgcaagtaa

SEQ ID NO: 25161 - DNA, 15 bp, Homo sapiens
tcagctgcaagtaac

SEQ ID NO: 25162 - DNA, 15 bp, Homo sapiens
cagctgcaagtaaca

SEQ ID NO: 25163 - DNA, 15 bp, Homo sapiens
agctgcaagtaacag

SEQ ID NO: 25164 - DNA, 15 bp, Homo sapiens
gctgcaagtaacaga

SEQ ID NO: 25165 - DNA, 15 bp, Homo sapiens
ctgcaagtaacagaa

SEQ ID NO: 25166 - DNA, 15 bp, Homo sapiens
tgcaagtaacagaaa

SEQ ID NO: 25167 - DNA, 15 bp, Homo sapiens
gcaagtaacagaaaa

SEQ ID NO: 25168 - DNA, 15 bp, Homo sapiens
caagtaacagaaaaa

SEQ ID NO: 25169 - DNA, 15 bp, Homo sapiens
aagtaacagaaaaat

SEQ ID NO: 25170 - DNA, 15 bp, Homo sapiens
agtaacagaaaaatc

SEQ ID NO: 25171 - DNA, 15 bp, Homo sapiens
gtaacagaaaaatca

SEQ ID NO: 25172 - DNA, 15 bp, Homo sapiens
taacagaaaaatcat

SEQ ID NO: 25173 - DNA, 15 bp, Homo sapiens
aacagaaaaatcata

SEQ ID NO: 25174 - DNA, 15 bp, Homo sapiens
acagaaaaatcataa

SEQ ID NO: 25175 - DNA, 15 bp, Homo sapiens
cagaaaaatcataaa

SEQ ID NO: 25176 - DNA, 15 bp, Homo sapiens
agaaaaatcataaaa

SEQ ID NO: 25177 - DNA, 15 bp, Homo sapiens
gaaaaatcataaaat

SEQ ID NO: 25178 - DNA, 15 bp, Homo sapiens
aaaaatcataaaata

SEQ ID NO: 25179 - DNA, 15 bp, Homo sapiens
aaaatcataaaataa

SEQ ID NO: 25180 - DNA, 15 bp, Homo sapiens
aaatcataaaataat

SEQ ID NO: 25181 - DNA, 15 bp, Homo sapiens
aatcataaaataatg

SEQ ID NO: 25182 - DNA, 15 bp, Homo sapiens
atcataaaataatgg

SEQ ID NO: 25183 - DNA, 15 bp, Homo sapiens
tcataaaataatggg

SEQ ID NO: 25184 - DNA, 15 bp, Homo sapiens
cataaaataatgggg

SEQ ID NO: 25185 - DNA, 15 bp, Homo sapiens
ataaaataatggggg

SEQ ID NO: 25186 - DNA, 15 bp, Homo sapiens
taaaataatgggggc

SEQ ID NO: 25187 - DNA, 15 bp, Homo sapiens
aaaataatgggggct

SEQ ID NO: 25188 - DNA, 15 bp, Homo sapiens
aaataatgggggctt

SEQ ID NO: 25189 - DNA, 15 bp, Homo sapiens
aataatgggggctta

SEQ ID NO: 25190 - DNA, 15 bp, Homo sapiens
ataatgggggcttaa

SEQ ID NO: 25191 - DNA, 15 bp, Homo sapiens
taatgggggcttaag

SEQ ID NO: 25192 - DNA, 15 bp, Homo sapiens
aatgggggcttaagc

SEQ ID NO: 25193 - DNA, 15 bp, Homo sapiens
atgggggcttaagca

SEQ ID NO: 25194 - DNA, 15 bp, Homo sapiens
tgggggcttaagcaa

SEQ ID NO: 25195 - DNA, 15 bp, Homo sapiens
gggggcttaagcaag

SEQ ID NO: 25196 - DNA, 15 bp, Homo sapiens
ggggcttaagcaaga

SEQ ID NO: 25197 - DNA, 15 bp, Homo sapiens
gggcttaagcaagac

SEQ ID NO: 25198 - DNA, 15 bp, Homo sapiens
ggcttaagcaagaca

SEQ ID NO: 25199 - DNA, 15 bp, Homo sapiens
gcttaagcaagacag

SEQ ID NO: 25200 - DNA, 15 bp, Homo sapiens
cttaagcaagacaga

SEQ ID NO: 25201 - DNA, 15 bp, Homo sapiens
ttaagcaagacagaa

SEQ ID NO: 25202 - DNA, 15 bp, Homo sapiens
taagcaagacagaac

SEQ ID NO: 25203 - DNA, 15 bp, Homo sapiens
aagcaagacagaact

SEQ ID NO: 25204 - DNA, 15 bp, Homo sapiens
agcaagacagaactt

SEQ ID NO: 25205 - DNA, 15 bp, Homo sapiens
gcaagacagaacttt

SEQ ID NO: 25206 - DNA, 15 bp, Homo sapiens
caagacagaacttta

SEQ ID NO: 25207 - DNA, 15 bp, Homo sapiens
aagacagaactttat

SEQ ID NO: 25208 - DNA, 15 bp, Homo sapiens
agacagaactttatt

SEQ ID NO: 25209 - DNA, 15 bp, Homo sapiens
gacagaactttattt

SEQ ID NO: 25210 - DNA, 15 bp, Homo sapiens
acagaactttatttt

SEQ ID NO: 25211 - DNA, 15 bp, Homo sapiens
cagaactttattttt

SEQ ID NO: 25212 - DNA, 15 bp, Homo sapiens
agaactttatttttt

SEQ ID NO: 25213 - DNA, 15 bp, Homo sapiens
gaactttattttttt

SEQ ID NO: 25214 - DNA, 15 bp, Homo sapiens
aactttatttttttc

SEQ ID NO: 25215 - DNA, 15 bp, Homo sapiens
actttatttttttct

SEQ ID NO: 25216 - DNA, 15 bp, Homo sapiens
ctttatttttttctc

SEQ ID NO: 25217 - DNA, 15 bp, Homo sapiens
tttatttttttctca

SEQ ID NO: 25218 - DNA, 15 bp, Homo sapiens
ttatttttttctcac

SEQ ID NO: 25219 - DNA, 15 bp, Homo sapiens
tatttttttctcacc

SEQ ID NO: 25220 - DNA, 15 bp, Homo sapiens
atttttttctcacct

SEQ ID NO: 25221 - DNA, 15 bp, Homo sapiens
tttttttctcaccta

SEQ ID NO: 25222 - DNA, 15 bp, Homo sapiens
ttttttctcacctaa

SEQ ID NO: 25223 - DNA, 15 bp, Homo sapiens
tttttctcacctaaa

SEQ ID NO: 25224 - DNA, 15 bp, Homo sapiens
ttttctcacctaaaa

SEQ ID NO: 25225 - DNA, 15 bp, Homo sapiens
tttctcacctaaaag

SEQ ID NO: 25226 - DNA, 15 bp, Homo sapiens
ttctcacctaaaagt

SEQ ID NO: 25227 - DNA, 15 bp, Homo sapiens
tctcacctaaaagtt

SEQ ID NO: 25228 - DNA, 15 bp, Homo sapiens
ctcacctaaaagttc

SEQ ID NO: 25229 - DNA, 15 bp, Homo sapiens
tcacctaaaagttca

SEQ ID NO: 25230 - DNA, 15 bp, Homo sapiens
cacctaaaagttcaa

SEQ ID NO: 25231 - DNA, 15 bp, Homo sapiens
acctaaaagttcaag

SEQ ID NO: 25232 - DNA, 15 bp, Homo sapiens
cctaaaagttcaagc

SEQ ID NO: 25233 - DNA, 15 bp, Homo sapiens
ctaaaagttcaagct

SEQ ID NO: 25234 - DNA, 15 bp, Homo sapiens
taaaagttcaagctg

SEQ ID NO: 25235 - DNA, 15 bp, Homo sapiens
aaaagttcaagctgg

SEQ ID NO: 25236 - DNA, 15 bp, Homo sapiens
aaagttcaagctggc

SEQ ID NO: 25237 - DNA, 15 bp, Homo sapiens
aagttcaagctggca

SEQ ID NO: 25238 - DNA, 15 bp, Homo sapiens
agttcaagctggcaa

SEQ ID NO: 25239 - DNA, 15 bp, Homo sapiens
gttcaagctggcaaa

SEQ ID NO: 25240 - DNA, 15 bp, Homo sapiens
ttcaagctggcaaat

SEQ ID NO: 25241 - DNA, 15 bp, Homo sapiens
tcaagctggcaaata

SEQ ID NO: 25242 - DNA, 15 bp, Homo sapiens
caagctggcaaatag

SEQ ID NO: 25243 - DNA, 15 bp, Homo sapiens
aagctggcaaatagt

SEQ ID NO: 25244 - DNA, 15 bp, Homo sapiens
agctggcaaatagtc

SEQ ID NO: 25245 - DNA, 15 bp, Homo sapiens
gctggcaaatagtcc

SEQ ID NO: 25246 - DNA, 15 bp, Homo sapiens
ctggcaaatagtcca

SEQ ID NO: 25247 - DNA, 15 bp, Homo sapiens
tggcaaatagtccag

SEQ ID NO: 25248 - DNA, 15 bp, Homo sapiens
ggcaaatagtccagg

SEQ ID NO: 25249 - DNA, 15 bp, Homo sapiens
gcaaatagtccaggg

SEQ ID NO: 25250 - DNA, 15 bp, Homo sapiens
caaatagtccaggga

SEQ ID NO: 25251 - DNA, 15 bp, Homo sapiens
aaatagtccagggac

SEQ ID NO: 25252 - DNA, 15 bp, Homo sapiens
aatagtccagggact

SEQ ID NO: 25253 - DNA, 15 bp, Homo sapiens
atagtccagggactc

SEQ ID NO: 25254 - DNA, 15 bp, Homo sapiens
tagtccagggactcc

SEQ ID NO: 25255 - DNA, 15 bp, Homo sapiens
agtccagggactcct

SEQ ID NO: 25256 - DNA, 15 bp, Homo sapiens
gtccagggactcctt

SEQ ID NO: 25257 - DNA, 15 bp, Homo sapiens
tccagggactccttc

SEQ ID NO: 25258 - DNA, 15 bp, Homo sapiens
ccagggactccttcc

SEQ ID NO: 25259 - DNA, 15 bp, Homo sapiens
cagggactccttcct

SEQ ID NO: 25260 - DNA, 15 bp, Homo sapiens
agggactccttcctg

SEQ ID NO: 25261 - DNA, 15 bp, Homo sapiens
gggactccttcctgc

SEQ ID NO: 25262 - DNA, 15 bp, Homo sapiens
ggactccttcctgcc

SEQ ID NO: 25263 - DNA, 15 bp, Homo sapiens
gactccttcctgccc

SEQ ID NO: 25264 - DNA, 15 bp, Homo sapiens
actccttcctgccca

SEQ ID NO: 25265 - DNA, 15 bp, Homo sapiens
ctccttcctgcccac

SEQ ID NO: 25266 - DNA, 15 bp, Homo sapiens
tccttcctgcccacc

SEQ ID NO: 25267 - DNA, 15 bp, Homo sapiens
ccttcctgcccacct

SEQ ID NO: 25268 - DNA, 15 bp, Homo sapiens
cttcctgcccacctg

SEQ ID NO: 25269 - DNA, 15 bp, Homo sapiens
ttcctgcccacctgg

SEQ ID NO: 25270 - DNA, 15 bp, Homo sapiens
tcctgcccacctggt

SEQ ID NO: 25271 - DNA, 15 bp, Homo sapiens
cctgcccacctggtt

SEQ ID NO: 25272 - DNA, 15 bp, Homo sapiens
ctgcccacctggttt

SEQ ID NO: 25273 - DNA, 15 bp, Homo sapiens
tgcccacctggtttg

SEQ ID NO: 25274 - DNA, 15 bp, Homo sapiens
gcccacctggtttgg

SEQ ID NO: 25275 - DNA, 15 bp, Homo sapiens
cccacctggtttggg

SEQ ID NO: 25276 - DNA, 15 bp, Homo sapiens
ccacctggtttgggc

SEQ ID NO: 25277 - DNA, 15 bp, Homo sapiens
cacctggtttgggca

SEQ ID NO: 25278 - DNA, 15 bp, Homo sapiens
acctggtttgggcat

SEQ ID NO: 25279 - DNA, 15 bp, Homo sapiens
cctggtttgggcatt

SEQ ID NO: 25280 - DNA, 15 bp, Homo sapiens
ctggtttgggcattg

SEQ ID NO: 25281 - DNA, 15 bp, Homo sapiens
tggtttgggcattgt

SEQ ID NO: 25282 - DNA, 15 bp, Homo sapiens
ggtttgggcattgtc

SEQ ID NO: 25283 - DNA, 15 bp, Homo sapiens
gtttgggcattgtct

SEQ ID NO: 25284 - DNA, 15 bp, Homo sapiens
tttgggcattgtctg

SEQ ID NO: 25285 - DNA, 15 bp, Homo sapiens
ttgggcattgtctgt

SEQ ID NO: 25286 - DNA, 15 bp, Homo sapiens
tgggcattgtctgtc

SEQ ID NO: 25287 - DNA, 15 bp, Homo sapiens
gggcattgtctgtcc

SEQ ID NO: 25288 - DNA, 15 bp, Homo sapiens
ggcattgtctgtccc

SEQ ID NO: 25289 - DNA, 15 bp, Homo sapiens
gcattgtctgtcccg

SEQ ID NO: 25290 - DNA, 15 bp, Homo sapiens
cattgtctgtcccga

SEQ ID NO: 25291 - DNA, 15 bp, Homo sapiens
attgtctgtcccgat

SEQ ID NO: 25292 - DNA, 15 bp, Homo sapiens
ttgtctgtcccgatc

SEQ ID NO: 25293 - DNA, 15 bp, Homo sapiens
tgtctgtcccgatct

SEQ ID NO: 25294 - DNA, 15 bp, Homo sapiens
gtctgtcccgatctg

SEQ ID NO: 25295 - DNA, 15 bp, Homo sapiens
tctgtcccgatctgg

SEQ ID NO: 25296 - DNA, 15 bp, Homo sapiens
ctgtcccgatctggc

SEQ ID NO: 25297 - DNA, 15 bp, Homo sapiens
tgtcccgatctggct

SEQ ID NO: 25298 - DNA, 15 bp, Homo sapiens
gtcccgatctggctc

SEQ ID NO: 25299 - DNA, 15 bp, Homo sapiens
tcccgatctggctcc

SEQ ID NO: 25300 - DNA, 15 bp, Homo sapiens
cccgatctggctcca

SEQ ID NO: 25301 - DNA, 15 bp, Homo sapiens
ccgatctggctccaa

SEQ ID NO: 25302 - DNA, 15 bp, Homo sapiens
cgatctggctccaag

SEQ ID NO: 25303 - DNA, 15 bp, Homo sapiens
gatctggctccaaga

SEQ ID NO: 25304 - DNA, 15 bp, Homo sapiens
atctggctccaagac

SEQ ID NO: 25305 - DNA, 15 bp, Homo sapiens
tctggctccaagact

SEQ ID NO: 25306 - DNA, 15 bp, Homo sapiens
ctggctccaagactc

SEQ ID NO: 25307 - DNA, 15 bp, Homo sapiens
tggctccaagactct

SEQ ID NO: 25308 - DNA, 15 bp, Homo sapiens
ggctccaagactctc

SEQ ID NO: 25309 - DNA, 15 bp, Homo sapiens
gctccaagactctca

SEQ ID NO: 25310 - DNA, 15 bp, Homo sapiens
ctccaagactctcag

SEQ ID NO: 25311 - DNA, 15 bp, Homo sapiens
tccaagactctcagt

SEQ ID NO: 25312 - DNA, 15 bp, Homo sapiens
ccaagactctcagtc

SEQ ID NO: 25313 - DNA, 15 bp, Homo sapiens
caagactctcagtct

SEQ ID NO: 25314 - DNA, 15 bp, Homo sapiens
aagactctcagtctt

SEQ ID NO: 25315 - DNA, 15 bp, Homo sapiens
agactctcagtcttc

SEQ ID NO: 25316 - DNA, 15 bp, Homo sapiens
gactctcagtcttca

SEQ ID NO: 25317 - DNA, 15 bp, Homo sapiens
actctcagtcttcaa

SEQ ID NO: 25318 - DNA, 15 bp, Homo sapiens
ctctcagtcttcaac

SEQ ID NO: 25319 - DNA, 15 bp, Homo sapiens
tctcagtcttcaaca

SEQ ID NO: 25320 - DNA, 15 bp, Homo sapiens
ctcagtcttcaacaa

SEQ ID NO: 25321 - DNA, 15 bp, Homo sapiens
tcagtcttcaacaaa

SEQ ID NO: 25322 - DNA, 15 bp, Homo sapiens
cagtcttcaacaaat

SEQ ID NO: 25323 - DNA, 15 bp, Homo sapiens
agtcttcaacaaatc

SEQ ID NO: 25324 - DNA, 15 bp, Homo sapiens
gtcttcaacaaatcc

SEQ ID NO: 25325 - DNA, 15 bp, Homo sapiens
tcttcaacaaatcct

SEQ ID NO: 25326 - DNA, 15 bp, Homo sapiens
cttcaacaaatcctt

SEQ ID NO: 25327 - DNA, 15 bp, Homo sapiens
ttcaacaaatccttt

SEQ ID NO: 25328 - DNA, 15 bp, Homo sapiens
tcaacaaatcctttt

SEQ ID NO: 25329 - DNA, 15 bp, Homo sapiens
caacaaatccttttg

SEQ ID NO: 25330 - DNA, 15 bp, Homo sapiens
aacaaatccttttgg

SEQ ID NO: 25331 - DNA, 15 bp, Homo sapiens
acaaatccttttggc

SEQ ID NO: 25332 - DNA, 15 bp, Homo sapiens
caaatccttttggct

SEQ ID NO: 25333 - DNA, 15 bp, Homo sapiens
aaatccttttggctg

SEQ ID NO: 25334 - DNA, 15 bp, Homo sapiens
aatccttttggctgt

SEQ ID NO: 25335 - DNA, 15 bp, Homo sapiens
atccttttggctgtc

SEQ ID NO: 25336 - DNA, 15 bp, Homo sapiens
tccttttggctgtct

SEQ ID NO: 25337 - DNA, 15 bp, Homo sapiens
ccttttggctgtcta

SEQ ID NO: 25338 - DNA, 15 bp, Homo sapiens
cttttggctgtctat

SEQ ID NO: 25339 - DNA, 15 bp, Homo sapiens
ttttggctgtctatt

SEQ ID NO: 25340 - DNA, 15 bp, Homo sapiens
tttggctgtctatta

SEQ ID NO: 25341 - DNA, 15 bp, Homo sapiens
ttggctgtctattaa

SEQ ID NO: 25342 - DNA, 15 bp, Homo sapiens
tggctgtctattaaa

SEQ ID NO: 25343 - DNA, 15 bp, Homo sapiens
ggctgtctattaaaa

SEQ ID NO: 25344 - DNA, 15 bp, Homo sapiens
gctgtctattaaaaa

SEQ ID NO: 25345 - DNA, 15 bp, Homo sapiens
ctgtctattaaaaat

SEQ ID NO: 25346 - DNA, 15 bp, Homo sapiens
tgtctattaaaaata

SEQ ID NO: 25347 - DNA, 15 bp, Homo sapiens
gtctattaaaaatat

SEQ ID NO: 25348 - DNA, 15 bp, Homo sapiens
tctattaaaaatatt

SEQ ID NO: 25349 - DNA, 15 bp, Homo sapiens
ctattaaaaatattt

SEQ ID NO: 25350 - DNA, 15 bp, Homo sapiens
tattaaaaatattta

SEQ ID NO: 25351 - DNA, 15 bp, Homo sapiens
attaaaaatatttac

SEQ ID NO: 25352 - DNA, 15 bp, Homo sapiens
ttaaaaatatttacc

SEQ ID NO: 25353 - DNA, 15 bp, Homo sapiens
taaaaatatttacca

SEQ ID NO: 25354 - DNA, 15 bp, Homo sapiens
aaaaatatttaccaa

SEQ ID NO: 25355 - DNA, 15 bp, Homo sapiens
aaaatatttaccaaa

SEQ ID NO: 25356 - DNA, 15 bp, Homo sapiens
aaatatttaccaaat

SEQ ID NO: 25357 - DNA, 15 bp, Homo sapiens
aatatttaccaaatc

SEQ ID NO: 25358 - DNA, 15 bp, Homo sapiens
atatttaccaaatcc

SEQ ID NO: 25359 - DNA, 15 bp, Homo sapiens
tatttaccaaatcca

SEQ ID NO: 25360 - DNA, 15 bp, Homo sapiens
atttaccaaatccat

SEQ ID NO: 25361 - DNA, 15 bp, Homo sapiens
tttaccaaatccatc

SEQ ID NO: 25362 - DNA, 15 bp, Homo sapiens
ttaccaaatccatcc

SEQ ID NO: 25363 - DNA, 15 bp, Homo sapiens
taccaaatccatcct

SEQ ID NO: 25364 - DNA, 15 bp, Homo sapiens
accaaatccatcctc

SEQ ID NO: 25365 - DNA, 15 bp, Homo sapiens
ccaaatccatcctct

SEQ ID NO: 25366 - DNA, 15 bp, Homo sapiens
caaatccatcctctt

SEQ ID NO: 25367 - DNA, 15 bp, Homo sapiens
aaatccatcctcttc

SEQ ID NO: 25368 - DNA, 15 bp, Homo sapiens
aatccatcctcttct

SEQ ID NO: 25369 - DNA, 15 bp, Homo sapiens
atccatcctcttctc

SEQ ID NO: 25370 - DNA, 15 bp, Homo sapiens
tccatcctcttctca

SEQ ID NO: 25371 - DNA, 15 bp, Homo sapiens
ccatcctcttctcac

SEQ ID NO: 25372 - DNA, 15 bp, Homo sapiens
catcctcttctcacc

SEQ ID NO: 25373 - DNA, 15 bp, Homo sapiens
atcctcttctcacca

SEQ ID NO: 25374 - DNA, 15 bp, Homo sapiens
tcctcttctcaccac

SEQ ID NO: 25375 - DNA, 15 bp, Homo sapiens
cctcttctcaccacc

SEQ ID NO: 25376 - DNA, 15 bp, Homo sapiens
ctcttctcaccacct

SEQ ID NO: 25377 - DNA, 15 bp, Homo sapiens
tcttctcaccacctc

SEQ ID NO: 25378 - DNA, 15 bp, Homo sapiens
cttctcaccacctcc

SEQ ID NO: 25379 - DNA, 15 bp, Homo sapiens
ttctcaccacctcca

SEQ ID NO: 25380 - DNA, 15 bp, Homo sapiens
tctcaccacctccac

SEQ ID NO: 25381 - DNA, 15 bp, Homo sapiens
ctcaccacctccact

SEQ ID NO: 25382 - DNA, 15 bp, Homo sapiens
tcaccacctccactg

SEQ ID NO: 25383 - DNA, 15 bp, Homo sapiens
caccacctccactgc

SEQ ID NO: 25384 - DNA, 15 bp, Homo sapiens
accacctccactgcc

SEQ ID NO: 25385 - DNA, 15 bp, Homo sapiens
ccacctccactgcca

SEQ ID NO: 25386 - DNA, 15 bp, Homo sapiens
cacctccactgccag

SEQ ID NO: 25387 - DNA, 15 bp, Homo sapiens
acctccactgccagc

SEQ ID NO: 25388 - DNA, 15 bp, Homo sapiens
cctccactgccagca

SEQ ID NO: 25389 - DNA, 15 bp, Homo sapiens
ctccactgccagcac

SEQ ID NO: 25390 - DNA, 15 bp, Homo sapiens
tccactgccagcact

SEQ ID NO: 25391 - DNA, 15 bp, Homo sapiens
ccactgccagcacta

SEQ ID NO: 25392 - DNA, 15 bp, Homo sapiens
cactgccagcactat

SEQ ID NO: 25393 - DNA, 15 bp, Homo sapiens
actgccagcactatc

SEQ ID NO: 25394 - DNA, 15 bp, Homo sapiens
ctgccagcactatca

SEQ ID NO: 25395 - DNA, 15 bp, Homo sapiens
tgccagcactatcac

SEQ ID NO: 25396 - DNA, 15 bp, Homo sapiens
gccagcactatcacc

SEQ ID NO: 25397 - DNA, 15 bp, Homo sapiens
ccagcactatcacca

SEQ ID NO: 25398 - DNA, 15 bp, Homo sapiens
cagcactatcaccag

SEQ ID NO: 25399 - DNA, 15 bp, Homo sapiens
agcactatcaccagt

SEQ ID NO: 25400 - DNA, 15 bp, Homo sapiens
gcactatcaccagtc

SEQ ID NO: 25401 - DNA, 15 bp, Homo sapiens
cactatcaccagtca

SEQ ID NO: 25402 - DNA, 15 bp, Homo sapiens
actatcaccagtcac

SEQ ID NO: 25403 - DNA, 15 bp, Homo sapiens
ctatcaccagtcacc

SEQ ID NO: 25404 - DNA, 15 bp, Homo sapiens
tatcaccagtcacct

SEQ ID NO: 25405 - DNA, 15 bp, Homo sapiens
atcaccagtcaccta

SEQ ID NO: 25406 - DNA, 15 bp, Homo sapiens
tcaccagtcacctag

SEQ ID NO: 25407 - DNA, 15 bp, Homo sapiens
caccagtcacctaga

SEQ ID NO: 25408 - DNA, 15 bp, Homo sapiens
accagtcacctagac

SEQ ID NO: 25409 - DNA, 15 bp, Homo sapiens
ccagtcacctagact

SEQ ID NO: 25410 - DNA, 15 bp, Homo sapiens
cagtcacctagacta

SEQ ID NO: 25411 - DNA, 15 bp, Homo sapiens
agtcacctagactac

SEQ ID NO: 25412 - DNA, 15 bp, Homo sapiens
gtcacctagactact

SEQ ID NO: 25413 - DNA, 15 bp, Homo sapiens
tcacctagactactg

SEQ ID NO: 25414 - DNA, 15 bp, Homo sapiens
cacctagactactgc

SEQ ID NO: 25415 - DNA, 15 bp, Homo sapiens
acctagactactgca

SEQ ID NO: 25416 - DNA, 15 bp, Homo sapiens
cctagactactgcag

SEQ ID NO: 25417 - DNA, 15 bp, Homo sapiens
ctagactactgcagt

SEQ ID NO: 25418 - DNA, 15 bp, Homo sapiens
tagactactgcagta

SEQ ID NO: 25419 - DNA, 15 bp, Homo sapiens
agactactgcagtag

SEQ ID NO: 25420 - DNA, 15 bp, Homo sapiens
gactactgcagtagc

SEQ ID NO: 25421 - DNA, 15 bp, Homo sapiens
actactgcagtagcc

SEQ ID NO: 25422 - DNA, 15 bp, Homo sapiens
ctactgcagtagcca

SEQ ID NO: 25423 - DNA, 15 bp, Homo sapiens
tactgcagtagccag

SEQ ID NO: 25424 - DNA, 15 bp, Homo sapiens
actgcagtagccagc

SEQ ID NO: 25425 - DNA, 15 bp, Homo sapiens
ctgcagtagccagct

SEQ ID NO: 25426 - DNA, 15 bp, Homo sapiens
tgcagtagccagctc

SEQ ID NO: 25427 - DNA, 15 bp, Homo sapiens
gcagtagccagctcc

SEQ ID NO: 25428 - DNA, 15 bp, Homo sapiens
cagtagccagctcct

SEQ ID NO: 25429 - DNA, 15 bp, Homo sapiens
agtagccagctcctt

SEQ ID NO: 25430 - DNA, 15 bp, Homo sapiens
gtagccagctccttg

SEQ ID NO: 25431 - DNA, 15 bp, Homo sapiens
tagccagctccttgc

SEQ ID NO: 25432 - DNA, 15 bp, Homo sapiens
agccagctccttgct

SEQ ID NO: 25433 - DNA, 15 bp, Homo sapiens
gccagctccttgctg

SEQ ID NO: 25434 - DNA, 15 bp, Homo sapiens
ccagctccttgctgg

SEQ ID NO: 25435 - DNA, 15 bp, Homo sapiens
cagctccttgctggt

SEQ ID NO: 25436 - DNA, 15 bp, Homo sapiens
agctccttgctggtc

SEQ ID NO: 25437 - DNA, 15 bp, Homo sapiens
gctccttgctggtcc

SEQ ID NO: 25438 - DNA, 15 bp, Homo sapiens
ctccttgctggtccc

SEQ ID NO: 25439 - DNA, 15 bp, Homo sapiens
tccttgctggtcccc

SEQ ID NO: 25440 - DNA, 15 bp, Homo sapiens
ccttgctggtcccct

SEQ ID NO: 25441 - DNA, 15 bp, Homo sapiens
cttgctggtcccctg

SEQ ID NO: 25442 - DNA, 15 bp, Homo sapiens
ttgctggtcccctgc

SEQ ID NO: 25443 - DNA, 15 bp, Homo sapiens
tgctggtcccctgct

SEQ ID NO: 25444 - DNA, 15 bp, Homo sapiens
gctggtcccctgctt

SEQ ID NO: 25445 - DNA, 15 bp, Homo sapiens
ctggtcccctgcttc

SEQ ID NO: 25446 - DNA, 15 bp, Homo sapiens
tggtcccctgcttcc

SEQ ID NO: 25447 - DNA, 15 bp, Homo sapiens
ggtcccctgcttcca

SEQ ID NO: 25448 - DNA, 15 bp, Homo sapiens
gtcccctgcttccac

SEQ ID NO: 25449 - DNA, 15 bp, Homo sapiens
tcccctgcttccaca

SEQ ID NO: 25450 - DNA, 15 bp, Homo sapiens
cccctgcttccacat

SEQ ID NO: 25451 - DNA, 15 bp, Homo sapiens
ccctgcttccacatt

SEQ ID NO: 25452 - DNA, 15 bp, Homo sapiens
cctgcttccacattc

SEQ ID NO: 25453 - DNA, 15 bp, Homo sapiens
ctgcttccacattca

SEQ ID NO: 25454 - DNA, 15 bp, Homo sapiens
tgcttccacattcag

SEQ ID NO: 25455 - DNA, 15 bp, Homo sapiens
gcttccacattcagg

SEQ ID NO: 25456 - DNA, 15 bp, Homo sapiens
cttccacattcaggc

SEQ ID NO: 25457 - DNA, 15 bp, Homo sapiens
ttccacattcaggcc

SEQ ID NO: 25458 - DNA, 15 bp, Homo sapiens
tccacattcaggccc

SEQ ID NO: 25459 - DNA, 15 bp, Homo sapiens
ccacattcaggccct

SEQ ID NO: 25460 - DNA, 15 bp, Homo sapiens
cacattcaggcccta

SEQ ID NO: 25461 - DNA, 15 bp, Homo sapiens
acattcaggccctag

SEQ ID NO: 25462 - DNA, 15 bp, Homo sapiens
cattcaggccctaga

SEQ ID NO: 25463 - DNA, 15 bp, Homo sapiens
attcaggccctagac

SEQ ID NO: 25464 - DNA, 15 bp, Homo sapiens
ttcaggccctagacc

SEQ ID NO: 25465 - DNA, 15 bp, Homo sapiens
tcaggccctagaccc

SEQ ID NO: 25466 - DNA, 15 bp, Homo sapiens
caggccctagacccc

SEQ ID NO: 25467 - DNA, 15 bp, Homo sapiens
aggccctagacccca

SEQ ID NO: 25468 - DNA, 15 bp, Homo sapiens
ggccctagaccccat

SEQ ID NO: 25469 - DNA, 15 bp, Homo sapiens
gccctagaccccatt

SEQ ID NO: 25470 - DNA, 15 bp, Homo sapiens
ccctagaccccattg

SEQ ID NO: 25471 - DNA, 15 bp, Homo sapiens
cctagaccccattgt

SEQ ID NO: 25472 - DNA, 15 bp, Homo sapiens
ctagaccccattgta

SEQ ID NO: 25473 - DNA, 15 bp, Homo sapiens
tagaccccattgtac

SEQ ID NO: 25474 - DNA, 15 bp, Homo sapiens
agaccccattgtaca

SEQ ID NO: 25475 - DNA, 15 bp, Homo sapiens
gaccccattgtacac

SEQ ID NO: 25476 - DNA, 15 bp, Homo sapiens
accccattgtacact

SEQ ID NO: 25477 - DNA, 15 bp, Homo sapiens
ccccattgtacactc

SEQ ID NO: 25478 - DNA, 15 bp, Homo sapiens
cccattgtacactca

SEQ ID NO: 25479 - DNA, 15 bp, Homo sapiens
ccattgtacactcag

SEQ ID NO: 25480 - DNA, 15 bp, Homo sapiens
cattgtacactcagc

SEQ ID NO: 25481 - DNA, 15 bp, Homo sapiens
attgtacactcagca

SEQ ID NO: 25482 - DNA, 15 bp, Homo sapiens
ttgtacactcagcat

SEQ ID NO: 25483 - DNA, 15 bp, Homo sapiens
tgtacactcagcatt

SEQ ID NO: 25484 - DNA, 15 bp, Homo sapiens
gtacactcagcattc

SEQ ID NO: 25485 - DNA, 15 bp, Homo sapiens
tacactcagcattca

SEQ ID NO: 25486 - DNA, 15 bp, Homo sapiens
acactcagcattcag

SEQ ID NO: 25487 - DNA, 15 bp, Homo sapiens
cactcagcattcagg

SEQ ID NO: 25488 - DNA, 15 bp, Homo sapiens
actcagcattcaggg

SEQ ID NO: 25489 - DNA, 15 bp, Homo sapiens
ctcagcattcagggg

SEQ ID NO: 25490 - DNA, 15 bp, Homo sapiens
tcagcattcaggggc

SEQ ID NO: 25491 - DNA, 15 bp, Homo sapiens
cagcattcaggggct

SEQ ID NO: 25492 - DNA, 15 bp, Homo sapiens
agcattcaggggctt

SEQ ID NO: 25493 - DNA, 15 bp, Homo sapiens
gcattcaggggcttc

SEQ ID NO: 25494 - DNA, 15 bp, Homo sapiens
cattcaggggcttcc

SEQ ID NO: 25495 - DNA, 15 bp, Homo sapiens
attcaggggcttcct

SEQ ID NO: 25496 - DNA, 15 bp, Homo sapiens
ttcaggggcttcctg

SEQ ID NO: 25497 - DNA, 15 bp, Homo sapiens
tcaggggcttcctgt

SEQ ID NO: 25498 - DNA, 15 bp, Homo sapiens
caggggcttcctgtt

SEQ ID NO: 25499 - DNA, 15 bp, Homo sapiens
aggggcttcctgtta

SEQ ID NO: 25500 - DNA, 15 bp, Homo sapiens
ggggcttcctgttaa

SEQ ID NO: 25501 - DNA, 15 bp, Homo sapiens
gggcttcctgttaaa

SEQ ID NO: 25502 - DNA, 15 bp, Homo sapiens
ggcttcctgttaaat

SEQ ID NO: 25503 - DNA, 15 bp, Homo sapiens
gcttcctgttaaatc

SEQ ID NO: 25504 - DNA, 15 bp, Homo sapiens
cttcctgttaaatcc

SEQ ID NO: 25505 - DNA, 15 bp, Homo sapiens
ttcctgttaaatcct

SEQ ID NO: 25506 - DNA, 15 bp, Homo sapiens
tcctgttaaatccta

SEQ ID NO: 25507 - DNA, 15 bp, Homo sapiens
cctgttaaatcctaa

SEQ ID NO: 25508 - DNA, 15 bp, Homo sapiens
ctgttaaatcctaac

SEQ ID NO: 25509 - DNA, 15 bp, Homo sapiens
tgttaaatcctaaca

SEQ ID NO: 25510 - DNA, 15 bp, Homo sapiens
gttaaatcctaacac

SEQ ID NO: 25511 - DNA, 15 bp, Homo sapiens
ttaaatcctaacacg

SEQ ID NO: 25512 - DNA, 15 bp, Homo sapiens
taaatcctaacacgg

SEQ ID NO: 25513 - DNA, 15 bp, Homo sapiens
aaatcctaacacggt

SEQ ID NO: 25514 - DNA, 15 bp, Homo sapiens
aatcctaacacggtt

SEQ ID NO: 25515 - DNA, 15 bp, Homo sapiens
atcctaacacggttt

SEQ ID NO: 25516 - DNA, 15 bp, Homo sapiens
tcctaacacggtttg

SEQ ID NO: 25517 - DNA, 15 bp, Homo sapiens
cctaacacggtttgt

SEQ ID NO: 25518 - DNA, 15 bp, Homo sapiens
ctaacacggtttgtg

SEQ ID NO: 25519 - DNA, 15 bp, Homo sapiens
taacacggtttgtgt

SEQ ID NO: 25520 - DNA, 15 bp, Homo sapiens
aacacggtttgtgtt

SEQ ID NO: 25521 - DNA, 15 bp, Homo sapiens
acacggtttgtgttt

SEQ ID NO: 25522 - DNA, 15 bp, Homo sapiens
cacggtttgtgtttc

SEQ ID NO: 25523 - DNA, 15 bp, Homo sapiens
acggtttgtgtttct

SEQ ID NO: 25524 - DNA, 15 bp, Homo sapiens
cggtttgtgtttctc

SEQ ID NO: 25525 - DNA, 15 bp, Homo sapiens
ggtttgtgtttctcc

SEQ ID NO: 25526 - DNA, 15 bp, Homo sapiens
gtttgtgtttctcct

SEQ ID NO: 25527 - DNA, 15 bp, Homo sapiens
tttgtgtttctcctc

SEQ ID NO: 25528 - DNA, 15 bp, Homo sapiens
ttgtgtttctcctct

SEQ ID NO: 25529 - DNA, 15 bp, Homo sapiens
tgtgtttctcctctg

SEQ ID NO: 25530 - DNA, 15 bp, Homo sapiens
gtgtttctcctctgc

SEQ ID NO: 25531 - DNA, 15 bp, Homo sapiens
tgtttctcctctgct

SEQ ID NO: 25532 - DNA, 15 bp, Homo sapiens
gtttctcctctgctt

SEQ ID NO: 25533 - DNA, 15 bp, Homo sapiens
tttctcctctgcttg

SEQ ID NO: 25534 - DNA, 15 bp, Homo sapiens
ttctcctctgcttgc

SEQ ID NO: 25535 - DNA, 15 bp, Homo sapiens
tctcctctgcttgca

SEQ ID NO: 25536 - DNA, 15 bp, Homo sapiens
ctcctctgcttgcaa

SEQ ID NO: 25537 - DNA, 15 bp, Homo sapiens
tcctctgcttgcaac

SEQ ID NO: 25538 - DNA, 15 bp, Homo sapiens
cctctgcttgcaacc

SEQ ID NO: 25539 - DNA, 15 bp, Homo sapiens
ctctgcttgcaaccc

SEQ ID NO: 25540 - DNA, 15 bp, Homo sapiens
tctgcttgcaaccct

SEQ ID NO: 25541 - DNA, 15 bp, Homo sapiens
ctgcttgcaaccctg

SEQ ID NO: 25542 - DNA, 15 bp, Homo sapiens
tgcttgcaaccctgt

SEQ ID NO: 25543 - DNA, 15 bp, Homo sapiens
gcttgcaaccctgtc

SEQ ID NO: 25544 - DNA, 15 bp, Homo sapiens
cttgcaaccctgtca

SEQ ID NO: 25545 - DNA, 15 bp, Homo sapiens
ttgcaaccctgtcat

SEQ ID NO: 25546 - DNA, 15 bp, Homo sapiens
tgcaaccctgtcatg

SEQ ID NO: 25547 - DNA, 15 bp, Homo sapiens
gcaaccctgtcatgc

SEQ ID NO: 25548 - DNA, 15 bp, Homo sapiens
caaccctgtcatgcc

SEQ ID NO: 25549 - DNA, 15 bp, Homo sapiens
aaccctgtcatgcct

SEQ ID NO: 25550 - DNA, 15 bp, Homo sapiens
accctgtcatgcctt

SEQ ID NO: 25551 - DNA, 15 bp, Homo sapiens
ccctgtcatgccttc

SEQ ID NO: 25552 - DNA, 15 bp, Homo sapiens
cctgtcatgccttcc

SEQ ID NO: 25553 - DNA, 15 bp, Homo sapiens
ctgtcatgccttcct

SEQ ID NO: 25554 - DNA, 15 bp, Homo sapiens
tgtcatgccttcctc

SEQ ID NO: 25555 - DNA, 15 bp, Homo sapiens
gtcatgccttcctcc

SEQ ID NO: 25556 - DNA, 15 bp, Homo sapiens
tcatgccttcctcct

SEQ ID NO: 25557 - DNA, 15 bp, Homo sapiens
catgccttcctcctc

SEQ ID NO: 25558 - DNA, 15 bp, Homo sapiens
atgccttcctcctca

SEQ ID NO: 25559 - DNA, 15 bp, Homo sapiens
tgccttcctcctcac

SEQ ID NO: 25560 - DNA, 15 bp, Homo sapiens
gccttcctcctcact

SEQ ID NO: 25561 - DNA, 15 bp, Homo sapiens
ccttcctcctcactc

SEQ ID NO: 25562 - DNA, 15 bp, Homo sapiens
cttcctcctcactca

SEQ ID NO: 25563 - DNA, 15 bp, Homo sapiens
ttcctcctcactcag

SEQ ID NO: 25564 - DNA, 15 bp, Homo sapiens
tcctcctcactcagc

SEQ ID NO: 25565 - DNA, 15 bp, Homo sapiens
cctcctcactcagcg

SEQ ID NO: 25566 - DNA, 15 bp, Homo sapiens
ctcctcactcagcgt

SEQ ID NO: 25567 - DNA, 15 bp, Homo sapiens
tcctcactcagcgtt

SEQ ID NO: 25568 - DNA, 15 bp, Homo sapiens
cctcactcagcgttg

SEQ ID NO: 25569 - DNA, 15 bp, Homo sapiens
ctcactcagcgttga

SEQ ID NO: 25570 - DNA, 15 bp, Homo sapiens
tcactcagcgttgaa

SEQ ID NO: 25571 - DNA, 15 bp, Homo sapiens
cactcagcgttgaag

SEQ ID NO: 25572 - DNA, 15 bp, Homo sapiens
actcagcgttgaagc

SEQ ID NO: 25573 - DNA, 15 bp, Homo sapiens
ctcagcgttgaagcc

SEQ ID NO: 25574 - DNA, 15 bp, Homo sapiens
tcagcgttgaagcca

SEQ ID NO: 25575 - DNA, 15 bp, Homo sapiens
cagcgttgaagccaa

SEQ ID NO: 25576 - DNA, 15 bp, Homo sapiens
agcgttgaagccaaa

SEQ ID NO: 25577 - DNA, 15 bp, Homo sapiens
gcgttgaagccaaag

SEQ ID NO: 25578 - DNA, 15 bp, Homo sapiens
cgttgaagccaaagt

SEQ ID NO: 25579 - DNA, 15 bp, Homo sapiens
gttgaagccaaagtc

SEQ ID NO: 25580 - DNA, 15 bp, Homo sapiens
ttgaagccaaagtcc

SEQ ID NO: 25581 - DNA, 15 bp, Homo sapiens
tgaagccaaagtcct

SEQ ID NO: 25582 - DNA, 15 bp, Homo sapiens
gaagccaaagtcctt

SEQ ID NO: 25583 - DNA, 15 bp, Homo sapiens
aagccaaagtcctta

SEQ ID NO: 25584 - DNA, 15 bp, Homo sapiens
agccaaagtccttac

SEQ ID NO: 25585 - DNA, 15 bp, Homo sapiens
gccaaagtccttacc

SEQ ID NO: 25586 - DNA, 15 bp, Homo sapiens
ccaaagtccttacca

SEQ ID NO: 25587 - DNA, 15 bp, Homo sapiens
caaagtccttaccat

SEQ ID NO: 25588 - DNA, 15 bp, Homo sapiens
aaagtccttaccatg

SEQ ID NO: 25589 - DNA, 15 bp, Homo sapiens
aagtccttaccatgg

SEQ ID NO: 25590 - DNA, 15 bp, Homo sapiens
agtccttaccatggc

SEQ ID NO: 25591 - DNA, 15 bp, Homo sapiens
gtccttaccatggcc

SEQ ID NO: 25592 - DNA, 15 bp, Homo sapiens
tccttaccatggcct

SEQ ID NO: 25593 - DNA, 15 bp, Homo sapiens
ccttaccatggccta

SEQ ID NO: 25594 - DNA, 15 bp, Homo sapiens
cttaccatggcctac

SEQ ID NO: 25595 - DNA, 15 bp, Homo sapiens
ttaccatggcctaca

SEQ ID NO: 25596 - DNA, 15 bp, Homo sapiens
taccatggcctacaa

SEQ ID NO: 25597 - DNA, 15 bp, Homo sapiens
accatggcctacaag

SEQ ID NO: 25598 - DNA, 15 bp, Homo sapiens
ccatggcctacaagg

SEQ ID NO: 25599 - DNA, 15 bp, Homo sapiens
catggcctacaaggt

SEQ ID NO: 25600 - DNA, 15 bp, Homo sapiens
atggcctacaaggtc

SEQ ID NO: 25601 - DNA, 15 bp, Homo sapiens
tggcctacaaggtcc

SEQ ID NO: 25602 - DNA, 15 bp, Homo sapiens
ggcctacaaggtcct

SEQ ID NO: 25603 - DNA, 15 bp, Homo sapiens
gcctacaaggtcctg

SEQ ID NO: 25604 - DNA, 15 bp, Homo sapiens
cctacaaggtcctgc

SEQ ID NO: 25605 - DNA, 15 bp, Homo sapiens
ctacaaggtcctgcg

SEQ ID NO: 25606 - DNA, 15 bp, Homo sapiens
tacaaggtcctgcgt

SEQ ID NO: 25607 - DNA, 15 bp, Homo sapiens
acaaggtcctgcgtg

SEQ ID NO: 25608 - DNA, 15 bp, Homo sapiens
caaggtcctgcgtgg

SEQ ID NO: 25609 - DNA, 15 bp, Homo sapiens
aaggtcctgcgtggt

SEQ ID NO: 25610 - DNA, 15 bp, Homo sapiens
aggtcctgcgtggtc

SEQ ID NO: 25611 - DNA, 15 bp, Homo sapiens
ggtcctgcgtggtct

SEQ ID NO: 25612 - DNA, 15 bp, Homo sapiens
gtcctgcgtggtcta

SEQ ID NO: 25613 - DNA, 15 bp, Homo sapiens
tcctgcgtggtctaa

SEQ ID NO: 25614 - DNA, 15 bp, Homo sapiens
cctgcgtggtctaac

SEQ ID NO: 25615 - DNA, 15 bp, Homo sapiens
ctgcgtggtctaacc

SEQ ID NO: 25616 - DNA, 15 bp, Homo sapiens
tgcgtggtctaacct

SEQ ID NO: 25617 - DNA, 15 bp, Homo sapiens
gcgtggtctaacctc

SEQ ID NO: 25618 - DNA, 15 bp, Homo sapiens
cgtggtctaacctcc

SEQ ID NO: 25619 - DNA, 15 bp, Homo sapiens
gtggtctaacctccg

SEQ ID NO: 25620 - DNA, 15 bp, Homo sapiens
tggtctaacctccga

SEQ ID NO: 25621 - DNA, 15 bp, Homo sapiens
ggtctaacctccgag

SEQ ID NO: 25622 - DNA, 15 bp, Homo sapiens
gtctaacctccgagt

SEQ ID NO: 25623 - DNA, 15 bp, Homo sapiens
tctaacctccgagtc

SEQ ID NO: 25624 - DNA, 15 bp, Homo sapiens
ctaacctccgagtcc

SEQ ID NO: 25625 - DNA, 15 bp, Homo sapiens
taacctccgagtccc

SEQ ID NO: 25626 - DNA, 15 bp, Homo sapiens
aacctccgagtcccc

SEQ ID NO: 25627 - DNA, 15 bp, Homo sapiens
acctccgagtcccct

SEQ ID NO: 25628 - DNA, 15 bp, Homo sapiens
cctccgagtcccctt

SEQ ID NO: 25629 - DNA, 15 bp, Homo sapiens
ctccgagtccccttt

SEQ ID NO: 25630 - DNA, 15 bp, Homo sapiens
tccgagtcccctttc

SEQ ID NO: 25631 - DNA, 15 bp, Homo sapiens
ccgagtcccctttct

SEQ ID NO: 25632 - DNA, 15 bp, Homo sapiens
cgagtcccctttctg

SEQ ID NO: 25633 - DNA, 15 bp, Homo sapiens
gagtcccctttctga

SEQ ID NO: 25634 - DNA, 15 bp, Homo sapiens
agtcccctttctgac

SEQ ID NO: 25635 - DNA, 15 bp, Homo sapiens
gtcccctttctgacc

SEQ ID NO: 25636 - DNA, 15 bp, Homo sapiens
tcccctttctgacct

SEQ ID NO: 25637 - DNA, 15 bp, Homo sapiens
cccctttctgacctc

SEQ ID NO: 25638 - DNA, 15 bp, Homo sapiens
ccctttctgacctca

SEQ ID NO: 25639 - DNA, 15 bp, Homo sapiens
cctttctgacctcac

SEQ ID NO: 25640 - DNA, 15 bp, Homo sapiens
ctttctgacctcacc

SEQ ID NO: 25641 - DNA, 15 bp, Homo sapiens
tttctgacctcacct

SEQ ID NO: 25642 - DNA, 15 bp, Homo sapiens
ttctgacctcacctc

SEQ ID NO: 25643 - DNA, 15 bp, Homo sapiens
tctgacctcacctcc

SEQ ID NO: 25644 - DNA, 15 bp, Homo sapiens
ctgacctcacctcca

SEQ ID NO: 25645 - DNA, 15 bp, Homo sapiens
tgacctcacctccag

SEQ ID NO: 25646 - DNA, 15 bp, Homo sapiens
gacctcacctccagc

SEQ ID NO: 25647 - DNA, 15 bp, Homo sapiens
acctcacctccagct

SEQ ID NO: 25648 - DNA, 15 bp, Homo sapiens
cctcacctccagctt

SEQ ID NO: 25649 - DNA, 15 bp, Homo sapiens
ctcacctccagcttc

SEQ ID NO: 25650 - DNA, 15 bp, Homo sapiens
tcacctccagcttct

SEQ ID NO: 25651 - DNA, 15 bp, Homo sapiens
cacctccagcttctc

SEQ ID NO: 25652 - DNA, 15 bp, Homo sapiens
acctccagcttctct

SEQ ID NO: 25653 - DNA, 15 bp, Homo sapiens
cctccagcttctctt

SEQ ID NO: 25654 - DNA, 15 bp, Homo sapiens
ctccagcttctcttc

SEQ ID NO: 25655 - DNA, 15 bp, Homo sapiens
tccagcttctcttct

SEQ ID NO: 25656 - DNA, 15 bp, Homo sapiens
ccagcttctcttctt

SEQ ID NO: 25657 - DNA, 15 bp, Homo sapiens
cagcttctcttcttg

SEQ ID NO: 25658 - DNA, 15 bp, Homo sapiens
agcttctcttcttgc

SEQ ID NO: 25659 - DNA, 15 bp, Homo sapiens
gcttctcttcttgct

SEQ ID NO: 25660 - DNA, 15 bp, Homo sapiens
cttctcttcttgctc

SEQ ID NO: 25661 - DNA, 15 bp, Homo sapiens
ttctcttcttgctct

SEQ ID NO: 25662 - DNA, 15 bp, Homo sapiens
tctcttcttgctctc

SEQ ID NO: 25663 - DNA, 15 bp, Homo sapiens
ctcttcttgctctct

SEQ ID NO: 25664 - DNA, 15 bp, Homo sapiens
tcttcttgctctctc

SEQ ID NO: 25665 - DNA, 15 bp, Homo sapiens
cttcttgctctctcc

SEQ ID NO: 25666 - DNA, 15 bp, Homo sapiens
ttcttgctctctcca

SEQ ID NO: 25667 - DNA, 15 bp, Homo sapiens
tcttgctctctccac

SEQ ID NO: 25668 - DNA, 15 bp, Homo sapiens
cttgctctctccaca

SEQ ID NO: 25669 - DNA, 15 bp, Homo sapiens
ttgctctctccacac

SEQ ID NO: 25670 - DNA, 15 bp, Homo sapiens
tgctctctccacact

SEQ ID NO: 25671 - DNA, 15 bp, Homo sapiens
gctctctccacacta

SEQ ID NO: 25672 - DNA, 15 bp, Homo sapiens
ctctctccacactaa

SEQ ID NO: 25673 - DNA, 15 bp, Homo sapiens
tctctccacactaac

SEQ ID NO: 25674 - DNA, 15 bp, Homo sapiens
ctctccacactaacc

SEQ ID NO: 25675 - DNA, 15 bp, Homo sapiens
tctccacactaacca

SEQ ID NO: 25676 - DNA, 15 bp, Homo sapiens
ctccacactaaccac

SEQ ID NO: 25677 - DNA, 15 bp, Homo sapiens
tccacactaaccaca

SEQ ID NO: 25678 - DNA, 15 bp, Homo sapiens
ccacactaaccacac

SEQ ID NO: 25679 - DNA, 15 bp, Homo sapiens
cacactaaccacacc

SEQ ID NO: 25680 - DNA, 15 bp, Homo sapiens
acactaaccacacca

SEQ ID NO: 25681 - DNA, 15 bp, Homo sapiens
cactaaccacaccag

SEQ ID NO: 25682 - DNA, 15 bp, Homo sapiens
actaaccacaccagc

SEQ ID NO: 25683 - DNA, 15 bp, Homo sapiens
ctaaccacaccagcc

SEQ ID NO: 25684 - DNA, 15 bp, Homo sapiens
taaccacaccagccc

SEQ ID NO: 25685 - DNA, 15 bp, Homo sapiens
aaccacaccagcccc

SEQ ID NO: 25686 - DNA, 15 bp, Homo sapiens
accacaccagccccc

SEQ ID NO: 25687 - DNA, 15 bp, Homo sapiens
ccacaccagccccct

SEQ ID NO: 25688 - DNA, 15 bp, Homo sapiens
cacaccagccccctt

SEQ ID NO: 25689 - DNA, 15 bp, Homo sapiens
acaccagcccccttg

SEQ ID NO: 25690 - DNA, 15 bp, Homo sapiens
caccagcccccttgt

SEQ ID NO: 25691 - DNA, 15 bp, Homo sapiens
accagcccccttgta

SEQ ID NO: 25692 - DNA, 15 bp, Homo sapiens
ccagcccccttgtag

SEQ ID NO: 25693 - DNA, 15 bp, Homo sapiens
cagcccccttgtaga

SEQ ID NO: 25694 - DNA, 15 bp, Homo sapiens
agcccccttgtagac

SEQ ID NO: 25695 - DNA, 15 bp, Homo sapiens
gcccccttgtagacc

SEQ ID NO: 25696 - DNA, 15 bp, Homo sapiens
cccccttgtagacct

SEQ ID NO: 25697 - DNA, 15 bp, Homo sapiens
ccccttgtagacctt

SEQ ID NO: 25698 - DNA, 15 bp, Homo sapiens
cccttgtagaccttg

SEQ ID NO: 25699 - DNA, 15 bp, Homo sapiens
ccttgtagaccttga

SEQ ID NO: 25700 - DNA, 15 bp, Homo sapiens
cttgtagaccttgaa

SEQ ID NO: 25701 - DNA, 15 bp, Homo sapiens
ttgtagaccttgaac

SEQ ID NO: 25702 - DNA, 15 bp, Homo sapiens
tgtagaccttgaaca

SEQ ID NO: 25703 - DNA, 15 bp, Homo sapiens
gtagaccttgaacaa

SEQ ID NO: 25704 - DNA, 15 bp, Homo sapiens
tagaccttgaacaaa

SEQ ID NO: 25705 - DNA, 15 bp, Homo sapiens
agaccttgaacaaat

SEQ ID NO: 25706 - DNA, 15 bp, Homo sapiens
gaccttgaacaaatc

SEQ ID NO: 25707 - DNA, 15 bp, Homo sapiens
accttgaacaaatca

SEQ ID NO: 25708 - DNA, 15 bp, Homo sapiens
ccttgaacaaatcag

SEQ ID NO: 25709 - DNA, 15 bp, Homo sapiens
cttgaacaaatcagg

SEQ ID NO: 25710 - DNA, 15 bp, Homo sapiens
ttgaacaaatcaggt

SEQ ID NO: 25711 - DNA, 15 bp, Homo sapiens
tgaacaaatcaggta

SEQ ID NO: 25712 - DNA, 15 bp, Homo sapiens
gaacaaatcaggtac

SEQ ID NO: 25713 - DNA, 15 bp, Homo sapiens
aacaaatcaggtaca

SEQ ID NO: 25714 - DNA, 15 bp, Homo sapiens
acaaatcaggtacat

SEQ ID NO: 25715 - DNA, 15 bp, Homo sapiens
caaatcaggtacatt

SEQ ID NO: 25716 - DNA, 15 bp, Homo sapiens
aaatcaggtacattc

SEQ ID NO: 25717 - DNA, 15 bp, Homo sapiens
aatcaggtacattcc

SEQ ID NO: 25718 - DNA, 15 bp, Homo sapiens
atcaggtacattccc

SEQ ID NO: 25719 - DNA, 15 bp, Homo sapiens
tcaggtacattccca

SEQ ID NO: 25720 - DNA, 15 bp, Homo sapiens
caggtacattcccac

SEQ ID NO: 25721 - DNA, 15 bp, Homo sapiens
aggtacattcccacc

SEQ ID NO: 25722 - DNA, 15 bp, Homo sapiens
ggtacattcccacct

SEQ ID NO: 25723 - DNA, 15 bp, Homo sapiens
gtacattcccacctc

SEQ ID NO: 25724 - DNA, 15 bp, Homo sapiens
tacattcccacctca

SEQ ID NO: 25725 - DNA, 15 bp, Homo sapiens
acattcccacctcag

SEQ ID NO: 25726 - DNA, 15 bp, Homo sapiens
cattcccacctcagg

SEQ ID NO: 25727 - DNA, 15 bp, Homo sapiens
attcccacctcagga

SEQ ID NO: 25728 - DNA, 15 bp, Homo sapiens
ttcccacctcaggac

SEQ ID NO: 25729 - DNA, 15 bp, Homo sapiens
tcccacctcaggacc

SEQ ID NO: 25730 - DNA, 15 bp, Homo sapiens
cccacctcaggacct

SEQ ID NO: 25731 - DNA, 15 bp, Homo sapiens
ccacctcaggacctt

SEQ ID NO: 25732 - DNA, 15 bp, Homo sapiens
cacctcaggaccttt

SEQ ID NO: 25733 - DNA, 15 bp, Homo sapiens
acctcaggacctttg

SEQ ID NO: 25734 - DNA, 15 bp, Homo sapiens
cctcaggacctttgc

SEQ ID NO: 25735 - DNA, 15 bp, Homo sapiens
ctcaggacctttgcc

SEQ ID NO: 25736 - DNA, 15 bp, Homo sapiens
tcaggacctttgccc

SEQ ID NO: 25737 - DNA, 15 bp, Homo sapiens
caggacctttgccct

SEQ ID NO: 25738 - DNA, 15 bp, Homo sapiens
aggacctttgccctg

SEQ ID NO: 25739 - DNA, 15 bp, Homo sapiens
ggacctttgccctgg

SEQ ID NO: 25740 - DNA, 15 bp, Homo sapiens
gacctttgccctggc

SEQ ID NO: 25741 - DNA, 15 bp, Homo sapiens
acctttgccctggct

SEQ ID NO: 25742 - DNA, 15 bp, Homo sapiens
cctttgccctggctg

SEQ ID NO: 25743 - DNA, 15 bp, Homo sapiens
ctttgccctggctgt

SEQ ID NO: 25744 - DNA, 15 bp, Homo sapiens
tttgccctggctgtt

SEQ ID NO: 25745 - DNA, 15 bp, Homo sapiens
ttgccctggctgttt

SEQ ID NO: 25746 - DNA, 15 bp, Homo sapiens
tgccctggctgtttc

SEQ ID NO: 25747 - DNA, 15 bp, Homo sapiens
gccctggctgtttcc

SEQ ID NO: 25748 - DNA, 15 bp, Homo sapiens
ccctggctgtttcct

SEQ ID NO: 25749 - DNA, 15 bp, Homo sapiens
cctggctgtttcctt

SEQ ID NO: 25750 - DNA, 15 bp, Homo sapiens
ctggctgtttccttt

SEQ ID NO: 25751 - DNA, 15 bp, Homo sapiens
tggctgtttcctttg

SEQ ID NO: 25752 - DNA, 15 bp, Homo sapiens
ggctgtttcctttgg

SEQ ID NO: 25753 - DNA, 15 bp, Homo sapiens
gctgtttcctttgga

SEQ ID NO: 25754 - DNA, 15 bp, Homo sapiens
ctgtttcctttggag

SEQ ID NO: 25755 - DNA, 15 bp, Homo sapiens
tgtttcctttggagt

SEQ ID NO: 25756 - DNA, 15 bp, Homo sapiens
gtttcctttggagtt

SEQ ID NO: 25757 - DNA, 15 bp, Homo sapiens
tttcctttggagttc

SEQ ID NO: 25758 - DNA, 15 bp, Homo sapiens
ttcctttggagttcc

SEQ ID NO: 25759 - DNA, 15 bp, Homo sapiens
tcctttggagttcct

SEQ ID NO: 25760 - DNA, 15 bp, Homo sapiens
cctttggagttcctc

SEQ ID NO: 25761 - DNA, 15 bp, Homo sapiens
ctttggagttcctca

SEQ ID NO: 25762 - DNA, 15 bp, Homo sapiens
tttggagttcctcag

SEQ ID NO: 25763 - DNA, 15 bp, Homo sapiens
ttggagttcctcaga

SEQ ID NO: 25764 - DNA, 15 bp, Homo sapiens
tggagttcctcagat

SEQ ID NO: 25765 - DNA, 15 bp, Homo sapiens
ggagttcctcagata

SEQ ID NO: 25766 - DNA, 15 bp, Homo sapiens
gagttcctcagatat

SEQ ID NO: 25767 - DNA, 15 bp, Homo sapiens
agttcctcagatatc

SEQ ID NO: 25768 - DNA, 15 bp, Homo sapiens
gttcctcagatatct

SEQ ID NO: 25769 - DNA, 15 bp, Homo sapiens
ttcctcagatatcta

SEQ ID NO: 25770 - DNA, 15 bp, Homo sapiens
tcctcagatatctag

SEQ ID NO: 25771 - DNA, 15 bp, Homo sapiens
cctcagatatctagc

SEQ ID NO: 25772 - DNA, 15 bp, Homo sapiens
ctcagatatctagct

SEQ ID NO: 25773 - DNA, 15 bp, Homo sapiens
tcagatatctagctg

SEQ ID NO: 25774 - DNA, 15 bp, Homo sapiens
cagatatctagctgg

SEQ ID NO: 25775 - DNA, 15 bp, Homo sapiens
agatatctagctggc

SEQ ID NO: 25776 - DNA, 15 bp, Homo sapiens
gatatctagctggct

SEQ ID NO: 25777 - DNA, 15 bp, Homo sapiens
atatctagctggctc

SEQ ID NO: 25778 - DNA, 15 bp, Homo sapiens
tatctagctggctcc

SEQ ID NO: 25779 - DNA, 15 bp, Homo sapiens
atctagctggctccc

SEQ ID NO: 25780 - DNA, 15 bp, Homo sapiens
tctagctggctccct

SEQ ID NO: 25781 - DNA, 15 bp, Homo sapiens
ctagctggctccctc

SEQ ID NO: 25782 - DNA, 15 bp, Homo sapiens
tagctggctccctcc

SEQ ID NO: 25783 - DNA, 15 bp, Homo sapiens
agctggctccctccc

SEQ ID NO: 25784 - DNA, 15 bp, Homo sapiens
gctggctccctccct

SEQ ID NO: 25785 - DNA, 15 bp, Homo sapiens
ctggctccctccctc

SEQ ID NO: 25786 - DNA, 15 bp, Homo sapiens
tggctccctccctca

SEQ ID NO: 25787 - DNA, 15 bp, Homo sapiens
ggctccctccctcat

SEQ ID NO: 25788 - DNA, 15 bp, Homo sapiens
gctccctccctcatc

SEQ ID NO: 25789 - DNA, 15 bp, Homo sapiens
ctccctccctcatct

SEQ ID NO: 25790 - DNA, 15 bp, Homo sapiens
tccctccctcatctc

SEQ ID NO: 25791 - DNA, 15 bp, Homo sapiens
ccctccctcatctcc

SEQ ID NO: 25792 - DNA, 15 bp, Homo sapiens
cctccctcatctcct

SEQ ID NO: 25793 - DNA, 15 bp, Homo sapiens
ctccctcatctcctt

SEQ ID NO: 25794 - DNA, 15 bp, Homo sapiens
tccctcatctccttc

SEQ ID NO: 25795 - DNA, 15 bp, Homo sapiens
ccctcatctccttca

SEQ ID NO: 25796 - DNA, 15 bp, Homo sapiens
cctcatctccttcaa

SEQ ID NO: 25797 - DNA, 15 bp, Homo sapiens
ctcatctccttcaag

SEQ ID NO: 25798 - DNA, 15 bp, Homo sapiens
tcatctccttcaagt

SEQ ID NO: 25799 - DNA, 15 bp, Homo sapiens
catctccttcaagtc

SEQ ID NO: 25800 - DNA, 15 bp, Homo sapiens
atctccttcaagtct

SEQ ID NO: 25801 - DNA, 15 bp, Homo sapiens
tctccttcaagtctt

SEQ ID NO: 25802 - DNA, 15 bp, Homo sapiens
ctccttcaagtcttt

SEQ ID NO: 25803 - DNA, 15 bp, Homo sapiens
tccttcaagtctttg

SEQ ID NO: 25804 - DNA, 15 bp, Homo sapiens
ccttcaagtctttgt

SEQ ID NO: 25805 - DNA, 15 bp, Homo sapiens
cttcaagtctttgtc

SEQ ID NO: 25806 - DNA, 15 bp, Homo sapiens
ttcaagtctttgtca

SEQ ID NO: 25807 - DNA, 15 bp, Homo sapiens
tcaagtctttgtcag

SEQ ID NO: 25808 - DNA, 15 bp, Homo sapiens
caagtctttgtcaga

SEQ ID NO: 25809 - DNA, 15 bp, Homo sapiens
aagtctttgtcagag

SEQ ID NO: 25810 - DNA, 15 bp, Homo sapiens
agtctttgtcagagg

SEQ ID NO: 25811 - DNA, 15 bp, Homo sapiens
gtctttgtcagaggc

SEQ ID NO: 25812 - DNA, 15 bp, Homo sapiens
tctttgtcagaggcc

SEQ ID NO: 25813 - DNA, 15 bp, Homo sapiens
ctttgtcagaggccc

SEQ ID NO: 25814 - DNA, 15 bp, Homo sapiens
tttgtcagaggcccc

SEQ ID NO: 25815 - DNA, 15 bp, Homo sapiens
ttgtcagaggcccct

SEQ ID NO: 25816 - DNA, 15 bp, Homo sapiens
tgtcagaggcccctg

SEQ ID NO: 25817 - DNA, 15 bp, Homo sapiens
gtcagaggcccctgt

SEQ ID NO: 25818 - DNA, 15 bp, Homo sapiens
tcagaggcccctgtc

SEQ ID NO: 25819 - DNA, 15 bp, Homo sapiens
cagaggcccctgtct

SEQ ID NO: 25820 - DNA, 15 bp, Homo sapiens
agaggcccctgtctc

SEQ ID NO: 25821 - DNA, 15 bp, Homo sapiens
gaggcccctgtctct

SEQ ID NO: 25822 - DNA, 15 bp, Homo sapiens
aggcccctgtctctg

SEQ ID NO: 25823 - DNA, 15 bp, Homo sapiens
ggcccctgtctctgg

SEQ ID NO: 25824 - DNA, 15 bp, Homo sapiens
gcccctgtctctggg

SEQ ID NO: 25825 - DNA, 15 bp, Homo sapiens
cccctgtctctgggg

SEQ ID NO: 25826 - DNA, 15 bp, Homo sapiens
ccctgtctctgggga

SEQ ID NO: 25827 - DNA, 15 bp, Homo sapiens
cctgtctctggggac

SEQ ID NO: 25828 - DNA, 15 bp, Homo sapiens
ctgtctctggggact

SEQ ID NO: 25829 - DNA, 15 bp, Homo sapiens
tgtctctggggactt

SEQ ID NO: 25830 - DNA, 15 bp, Homo sapiens
gtctctggggacttt

SEQ ID NO: 25831 - DNA, 15 bp, Homo sapiens
tctctggggactttt

SEQ ID NO: 25832 - DNA, 15 bp, Homo sapiens
ctctggggacttttc

SEQ ID NO: 25833 - DNA, 15 bp, Homo sapiens
tctggggacttttcc

SEQ ID NO: 25834 - DNA, 15 bp, Homo sapiens
ctggggacttttcct

SEQ ID NO: 25835 - DNA, 15 bp, Homo sapiens
tggggacttttcctg

SEQ ID NO: 25836 - DNA, 15 bp, Homo sapiens
ggggacttttcctga

SEQ ID NO: 25837 - DNA, 15 bp, Homo sapiens
gggacttttcctgac

SEQ ID NO: 25838 - DNA, 15 bp, Homo sapiens
ggacttttcctgacc

SEQ ID NO: 25839 - DNA, 15 bp, Homo sapiens
gacttttcctgaccc

SEQ ID NO: 25840 - DNA, 15 bp, Homo sapiens
acttttcctgacccg

SEQ ID NO: 25841 - DNA, 15 bp, Homo sapiens
cttttcctgacccgt

SEQ ID NO: 25842 - DNA, 15 bp, Homo sapiens
ttttcctgacccgtt

SEQ ID NO: 25843 - DNA, 15 bp, Homo sapiens
tttcctgacccgttt

SEQ ID NO: 25844 - DNA, 15 bp, Homo sapiens
ttcctgacccgttta

SEQ ID NO: 25845 - DNA, 15 bp, Homo sapiens
tcctgacccgtttaa

SEQ ID NO: 25846 - DNA, 15 bp, Homo sapiens
cctgacccgtttaat

SEQ ID NO: 25847 - DNA, 15 bp, Homo sapiens
ctgacccgtttaatc

SEQ ID NO: 25848 - DNA, 15 bp, Homo sapiens
tgacccgtttaatct

SEQ ID NO: 25849 - DNA, 15 bp, Homo sapiens
gacccgtttaatctt

SEQ ID NO: 25850 - DNA, 15 bp, Homo sapiens
acccgtttaatcttg

SEQ ID NO: 25851 - DNA, 15 bp, Homo sapiens
cccgtttaatcttgc

SEQ ID NO: 25852 - DNA, 15 bp, Homo sapiens
ccgtttaatcttgcc

SEQ ID NO: 25853 - DNA, 15 bp, Homo sapiens
cgtttaatcttgcct

SEQ ID NO: 25854 - DNA, 15 bp, Homo sapiens
gtttaatcttgccta

SEQ ID NO: 25855 - DNA, 15 bp, Homo sapiens
tttaatcttgcctac

SEQ ID NO: 25856 - DNA, 15 bp, Homo sapiens
ttaatcttgcctact

SEQ ID NO: 25857 - DNA, 15 bp, Homo sapiens
taatcttgcctactc

SEQ ID NO: 25858 - DNA, 15 bp, Homo sapiens
aatcttgcctactca

SEQ ID NO: 25859 - DNA, 15 bp, Homo sapiens
atcttgcctactcac

SEQ ID NO: 25860 - DNA, 15 bp, Homo sapiens
tcttgcctactcacc

SEQ ID NO: 25861 - DNA, 15 bp, Homo sapiens
cttgcctactcaccc

SEQ ID NO: 25862 - DNA, 15 bp, Homo sapiens
ttgcctactcacccc

SEQ ID NO: 25863 - DNA, 15 bp, Homo sapiens
tgcctactcaccccc

SEQ ID NO: 25864 - DNA, 15 bp, Homo sapiens
gcctactcaccccca

SEQ ID NO: 25865 - DNA, 15 bp, Homo sapiens
cctactcacccccaa

SEQ ID NO: 25866 - DNA, 15 bp, Homo sapiens
ctactcacccccaac

SEQ ID NO: 25867 - DNA, 15 bp, Homo sapiens
tactcacccccaact

SEQ ID NO: 25868 - DNA, 15 bp, Homo sapiens
actcacccccaactc

SEQ ID NO: 25869 - DNA, 15 bp, Homo sapiens
ctcacccccaactcc

SEQ ID NO: 25870 - DNA, 15 bp, Homo sapiens
tcacccccaactccc

SEQ ID NO: 25871 - DNA, 15 bp, Homo sapiens
cacccccaactccca

SEQ ID NO: 25872 - DNA, 15 bp, Homo sapiens
acccccaactcccag

SEQ ID NO: 25873 - DNA, 15 bp, Homo sapiens
cccccaactcccagc

SEQ ID NO: 25874 - DNA, 15 bp, Homo sapiens
ccccaactcccagcc

SEQ ID NO: 25875 - DNA, 15 bp, Homo sapiens
cccaactcccagccc

SEQ ID NO: 25876 - DNA, 15 bp, Homo sapiens
ccaactcccagccct

SEQ ID NO: 25877 - DNA, 15 bp, Homo sapiens
caactcccagccctc

SEQ ID NO: 25878 - DNA, 15 bp, Homo sapiens
aactcccagccctcc

SEQ ID NO: 25879 - DNA, 15 bp, Homo sapiens
actcccagccctccc

SEQ ID NO: 25880 - DNA, 15 bp, Homo sapiens
ctcccagccctccca

SEQ ID NO: 25881 - DNA, 15 bp, Homo sapiens
tcccagccctcccag

SEQ ID NO: 25882 - DNA, 15 bp, Homo sapiens
cccagccctcccagt

SEQ ID NO: 25883 - DNA, 15 bp, Homo sapiens
ccagccctcccagtc

SEQ ID NO: 25884 - DNA, 15 bp, Homo sapiens
cagccctcccagtct

SEQ ID NO: 25885 - DNA, 15 bp, Homo sapiens
agccctcccagtctc

SEQ ID NO: 25886 - DNA, 15 bp, Homo sapiens
gccctcccagtctcc

SEQ ID NO: 25887 - DNA, 15 bp, Homo sapiens
ccctcccagtctcct

SEQ ID NO: 25888 - DNA, 15 bp, Homo sapiens
cctcccagtctcctt

SEQ ID NO: 25889 - DNA, 15 bp, Homo sapiens
ctcccagtctccttc

SEQ ID NO: 25890 - DNA, 15 bp, Homo sapiens
tcccagtctccttcc

SEQ ID NO: 25891 - DNA, 15 bp, Homo sapiens
cccagtctccttccc

SEQ ID NO: 25892 - DNA, 15 bp, Homo sapiens
ccagtctccttcccg

SEQ ID NO: 25893 - DNA, 15 bp, Homo sapiens
cagtctccttcccga

SEQ ID NO: 25894 - DNA, 15 bp, Homo sapiens
agtctccttcccgag

SEQ ID NO: 25895 - DNA, 15 bp, Homo sapiens
gtctccttcccgaga

SEQ ID NO: 25896 - DNA, 15 bp, Homo sapiens
tctccttcccgagaa

SEQ ID NO: 25897 - DNA, 15 bp, Homo sapiens
ctccttcccgagaag

SEQ ID NO: 25898 - DNA, 15 bp, Homo sapiens
tccttcccgagaagc

SEQ ID NO: 25899 - DNA, 15 bp, Homo sapiens
ccttcccgagaagcc

SEQ ID NO: 25900 - DNA, 15 bp, Homo sapiens
cttcccgagaagccc

SEQ ID NO: 25901 - DNA, 15 bp, Homo sapiens
ttcccgagaagccct

SEQ ID NO: 25902 - DNA, 15 bp, Homo sapiens
tcccgagaagccctc

SEQ ID NO: 25903 - DNA, 15 bp, Homo sapiens
cccgagaagccctcc

SEQ ID NO: 25904 - DNA, 15 bp, Homo sapiens
ccgagaagccctcca

SEQ ID NO: 25905 - DNA, 15 bp, Homo sapiens
cgagaagccctccat

SEQ ID NO: 25906 - DNA, 15 bp, Homo sapiens
gagaagccctccatg

SEQ ID NO: 25907 - DNA, 15 bp, Homo sapiens
agaagccctccatga

SEQ ID NO: 25908 - DNA, 15 bp, Homo sapiens
gaagccctccatgag

SEQ ID NO: 25909 - DNA, 15 bp, Homo sapiens
aagccctccatgaga

SEQ ID NO: 25910 - DNA, 15 bp, Homo sapiens
agccctccatgagag

SEQ ID NO: 25911 - DNA, 15 bp, Homo sapiens
gccctccatgagaga

SEQ ID NO: 25912 - DNA, 15 bp, Homo sapiens
ccctccatgagagag

SEQ ID NO: 25913 - DNA, 15 bp, Homo sapiens
cctccatgagagagg

SEQ ID NO: 25914 - DNA, 15 bp, Homo sapiens
ctccatgagagagga

SEQ ID NO: 25915 - DNA, 15 bp, Homo sapiens
tccatgagagaggat

SEQ ID NO: 25916 - DNA, 15 bp, Homo sapiens
ccatgagagaggata

SEQ ID NO: 25917 - DNA, 15 bp, Homo sapiens
catgagagaggatat

SEQ ID NO: 25918 - DNA, 15 bp, Homo sapiens
atgagagaggatata

SEQ ID NO: 25919 - DNA, 15 bp, Homo sapiens
tgagagaggatatag

SEQ ID NO: 25920 - DNA, 15 bp, Homo sapiens
gagagaggatatagt

SEQ ID NO: 25921 - DNA, 15 bp, Homo sapiens
agagaggatatagtc

SEQ ID NO: 25922 - DNA, 15 bp, Homo sapiens
gagaggatatagtcc

SEQ ID NO: 25923 - DNA, 15 bp, Homo sapiens
agaggatatagtcca

SEQ ID NO: 25924 - DNA, 15 bp, Homo sapiens
gaggatatagtccag

SEQ ID NO: 25925 - DNA, 15 bp, Homo sapiens
aggatatagtccagt

SEQ ID NO: 25926 - DNA, 15 bp, Homo sapiens
ggatatagtccagta

SEQ ID NO: 25927 - DNA, 15 bp, Homo sapiens
gatatagtccagtat

SEQ ID NO: 25928 - DNA, 15 bp, Homo sapiens
atatagtccagtata

SEQ ID NO: 25929 - DNA, 15 bp, Homo sapiens
tatagtccagtatag

SEQ ID NO: 25930 - DNA, 15 bp, Homo sapiens
atagtccagtataga

SEQ ID NO: 25931 - DNA, 15 bp, Homo sapiens
tagtccagtatagag

SEQ ID NO: 25932 - DNA, 15 bp, Homo sapiens
agtccagtatagagg

SEQ ID NO: 25933 - DNA, 15 bp, Homo sapiens
gtccagtatagaggg

SEQ ID NO: 25934 - DNA, 15 bp, Homo sapiens
tccagtatagagggg

SEQ ID NO: 25935 - DNA, 15 bp, Homo sapiens
ccagtatagagggga

SEQ ID NO: 25936 - DNA, 15 bp, Homo sapiens
cagtatagaggggag

SEQ ID NO: 25937 - DNA, 15 bp, Homo sapiens
agtatagaggggagg

SEQ ID NO: 25938 - DNA, 15 bp, Homo sapiens
gtatagaggggaggt

SEQ ID NO: 25939 - DNA, 15 bp, Homo sapiens
tatagaggggaggta

SEQ ID NO: 25940 - DNA, 15 bp, Homo sapiens
atagaggggaggtag

SEQ ID NO: 25941 - DNA, 15 bp, Homo sapiens
tagaggggaggtagc

SEQ ID NO: 25942 - DNA, 15 bp, Homo sapiens
agaggggaggtagcg

SEQ ID NO: 25943 - DNA, 15 bp, Homo sapiens
gaggggaggtagcga

SEQ ID NO: 25944 - DNA, 15 bp, Homo sapiens
aggggaggtagcgac

SEQ ID NO: 25945 - DNA, 15 bp, Homo sapiens
ggggaggtagcgacc

SEQ ID NO: 25946 - DNA, 15 bp, Homo sapiens
gggaggtagcgacct

SEQ ID NO: 25947 - DNA, 15 bp, Homo sapiens
ggaggtagcgacctc

SEQ ID NO: 25948 - DNA, 15 bp, Homo sapiens
gaggtagcgacctct

SEQ ID NO: 25949 - DNA, 15 bp, Homo sapiens
aggtagcgacctcta

SEQ ID NO: 25950 - DNA, 15 bp, Homo sapiens
ggtagcgacctctac

SEQ ID NO: 25951 - DNA, 15 bp, Homo sapiens
gtagcgacctctacc

SEQ ID NO: 25952 - DNA, 15 bp, Homo sapiens
tagcgacctctaccc

SEQ ID NO: 25953 - DNA, 15 bp, Homo sapiens
agcgacctctacccc

SEQ ID NO: 25954 - DNA, 15 bp, Homo sapiens
gcgacctctacccct

SEQ ID NO: 25955 - DNA, 15 bp, Homo sapiens
cgacctctacccctc

SEQ ID NO: 25956 - DNA, 15 bp, Homo sapiens
gacctctacccctct

SEQ ID NO: 25957 - DNA, 15 bp, Homo sapiens
acctctacccctctc

SEQ ID NO: 25958 - DNA, 15 bp, Homo sapiens
cctctacccctctct

SEQ ID NO: 25959 - DNA, 15 bp, Homo sapiens
ctctacccctctctg

SEQ ID NO: 25960 - DNA, 15 bp, Homo sapiens
tctacccctctctgc

SEQ ID NO: 25961 - DNA, 15 bp, Homo sapiens
ctacccctctctgcc

SEQ ID NO: 25962 - DNA, 15 bp, Homo sapiens
tacccctctctgccc

SEQ ID NO: 25963 - DNA, 15 bp, Homo sapiens
acccctctctgccct

SEQ ID NO: 25964 - DNA, 15 bp, Homo sapiens
cccctctctgccctc

SEQ ID NO: 25965 - DNA, 15 bp, Homo sapiens
ccctctctgccctcc

SEQ ID NO: 25966 - DNA, 15 bp, Homo sapiens
cctctctgccctcct

SEQ ID NO: 25967 - DNA, 15 bp, Homo sapiens
ctctctgccctcctg

SEQ ID NO: 25968 - DNA, 15 bp, Homo sapiens
tctctgccctcctga

SEQ ID NO: 25969 - DNA, 15 bp, Homo sapiens
ctctgccctcctgac

SEQ ID NO: 25970 - DNA, 15 bp, Homo sapiens
tctgccctcctgacc

SEQ ID NO: 25971 - DNA, 15 bp, Homo sapiens
ctgccctcctgaccc

SEQ ID NO: 25972 - DNA, 15 bp, Homo sapiens
tgccctcctgacccc

SEQ ID NO: 25973 - DNA, 15 bp, Homo sapiens
gccctcctgacccca

SEQ ID NO: 25974 - DNA, 15 bp, Homo sapiens
ccctcctgaccccag

SEQ ID NO: 25975 - DNA, 15 bp, Homo sapiens
cctcctgaccccagc

SEQ ID NO: 25976 - DNA, 15 bp, Homo sapiens
ctcctgaccccagcc

SEQ ID NO: 25977 - DNA, 15 bp, Homo sapiens
tcctgaccccagccc

SEQ ID NO: 25978 - DNA, 15 bp, Homo sapiens
cctgaccccagcccc

SEQ ID NO: 25979 - DNA, 15 bp, Homo sapiens
ctgaccccagccccc

SEQ ID NO: 25980 - DNA, 15 bp, Homo sapiens
tgaccccagccccca

SEQ ID NO: 25981 - DNA, 15 bp, Homo sapiens
gaccccagcccccat

SEQ ID NO: 25982 - DNA, 15 bp, Homo sapiens
accccagcccccatt

SEQ ID NO: 25983 - DNA, 15 bp, Homo sapiens
ccccagcccccattc

SEQ ID NO: 25984 - DNA, 15 bp, Homo sapiens
cccagcccccattct

SEQ ID NO: 25985 - DNA, 15 bp, Homo sapiens
ccagcccccattctg

SEQ ID NO: 25986 - DNA, 15 bp, Homo sapiens
cagcccccattctgc

SEQ ID NO: 25987 - DNA, 15 bp, Homo sapiens
agcccccattctgca

SEQ ID NO: 25988 - DNA, 15 bp, Homo sapiens
gcccccattctgcaa

SEQ ID NO: 25989 - DNA, 15 bp, Homo sapiens
cccccattctgcaag

SEQ ID NO: 25990 - DNA, 15 bp, Homo sapiens
ccccattctgcaagg

SEQ ID NO: 25991 - DNA, 15 bp, Homo sapiens
cccattctgcaagga

SEQ ID NO: 25992 - DNA, 15 bp, Homo sapiens
ccattctgcaaggat

SEQ ID NO: 25993 - DNA, 15 bp, Homo sapiens
cattctgcaaggatc

SEQ ID NO: 25994 - DNA, 15 bp, Homo sapiens
attctgcaaggatct

SEQ ID NO: 25995 - DNA, 15 bp, Homo sapiens
ttctgcaaggatctt

SEQ ID NO: 25996 - DNA, 15 bp, Homo sapiens
tctgcaaggatcttg

SEQ ID NO: 25997 - DNA, 15 bp, Homo sapiens
ctgcaaggatcttgg

SEQ ID NO: 25998 - DNA, 15 bp, Homo sapiens
tgcaaggatcttggc

SEQ ID NO: 25999 - DNA, 15 bp, Homo sapiens
gcaaggatcttggct

SEQ ID NO: 26000 - DNA, 15 bp, Homo sapiens
caaggatcttggctt

SEQ ID NO: 26001 - DNA, 15 bp, Homo sapiens
aaggatcttggcttt

SEQ ID NO: 26002 - DNA, 15 bp, Homo sapiens
aggatcttggctttc

SEQ ID NO: 26003 - DNA, 15 bp, Homo sapiens
ggatcttggctttca

SEQ ID NO: 26004 - DNA, 15 bp, Homo sapiens
gatcttggctttcag

SEQ ID NO: 26005 - DNA, 15 bp, Homo sapiens
atcttggctttcagc

SEQ ID NO: 26006 - DNA, 15 bp, Homo sapiens
tcttggctttcagca

SEQ ID NO: 26007 - DNA, 15 bp, Homo sapiens
cttggctttcagcag

SEQ ID NO: 26008 - DNA, 15 bp, Homo sapiens
ttggctttcagcagc

SEQ ID NO: 26009 - DNA, 15 bp, Homo sapiens
tggctttcagcagcc

SEQ ID NO: 26010 - DNA, 15 bp, Homo sapiens
ggctttcagcagccg

SEQ ID NO: 26011 - DNA, 15 bp, Homo sapiens
gctttcagcagccgt

SEQ ID NO: 26012 - DNA, 15 bp, Homo sapiens
ctttcagcagccgta

SEQ ID NO: 26013 - DNA, 15 bp, Homo sapiens
tttcagcagccgtag

SEQ ID NO: 26014 - DNA, 15 bp, Homo sapiens
ttcagcagccgtagc

SEQ ID NO: 26015 - DNA, 15 bp, Homo sapiens
tcagcagccgtagca

SEQ ID NO: 26016 - DNA, 15 bp, Homo sapiens
cagcagccgtagcat

SEQ ID NO: 26017 - DNA, 15 bp, Homo sapiens
agcagccgtagcatt

SEQ ID NO: 26018 - DNA, 15 bp, Homo sapiens
gcagccgtagcattt

SEQ ID NO: 26019 - DNA, 15 bp, Homo sapiens
cagccgtagcatttc

SEQ ID NO: 26020 - DNA, 15 bp, Homo sapiens
agccgtagcatttcc

SEQ ID NO: 26021 - DNA, 15 bp, Homo sapiens
gccgtagcatttccc

SEQ ID NO: 26022 - DNA, 15 bp, Homo sapiens
ccgtagcatttccct

SEQ ID NO: 26023 - DNA, 15 bp, Homo sapiens
cgtagcatttccctc

SEQ ID NO: 26024 - DNA, 15 bp, Homo sapiens
gtagcatttccctct

SEQ ID NO: 26025 - DNA, 15 bp, Homo sapiens
tagcatttccctctc

SEQ ID NO: 26026 - DNA, 15 bp, Homo sapiens
agcatttccctctca

SEQ ID NO: 26027 - DNA, 15 bp, Homo sapiens
gcatttccctctcac

SEQ ID NO: 26028 - DNA, 15 bp, Homo sapiens
catttccctctcaca

SEQ ID NO: 26029 - DNA, 15 bp, Homo sapiens
atttccctctcacac

SEQ ID NO: 26030 - DNA, 15 bp, Homo sapiens
tttccctctcacacc

SEQ ID NO: 26031 - DNA, 15 bp, Homo sapiens
ttccctctcacaccc

SEQ ID NO: 26032 - DNA, 15 bp, Homo sapiens
tccctctcacaccct

SEQ ID NO: 26033 - DNA, 15 bp, Homo sapiens
ccctctcacaccctg

SEQ ID NO: 26034 - DNA, 15 bp, Homo sapiens
cctctcacaccctgg

SEQ ID NO: 26035 - DNA, 15 bp, Homo sapiens
ctctcacaccctggg

SEQ ID NO: 26036 - DNA, 15 bp, Homo sapiens
tctcacaccctgggc

SEQ ID NO: 26037 - DNA, 15 bp, Homo sapiens
ctcacaccctgggcc

SEQ ID NO: 26038 - DNA, 15 bp, Homo sapiens
tcacaccctgggcct

SEQ ID NO: 26039 - DNA, 15 bp, Homo sapiens
cacaccctgggcctg

SEQ ID NO: 26040 - DNA, 15 bp, Homo sapiens
acaccctgggcctgc

SEQ ID NO: 26041 - DNA, 15 bp, Homo sapiens
caccctgggcctgcc

SEQ ID NO: 26042 - DNA, 15 bp, Homo sapiens
accctgggcctgccc

SEQ ID NO: 26043 - DNA, 15 bp, Homo sapiens
ccctgggcctgccca

SEQ ID NO: 26044 - DNA, 15 bp, Homo sapiens
cctgggcctgcccaa

SEQ ID NO: 26045 - DNA, 15 bp, Homo sapiens
ctgggcctgcccaag

SEQ ID NO: 26046 - DNA, 15 bp, Homo sapiens
tgggcctgcccaagg

SEQ ID NO: 26047 - DNA, 15 bp, Homo sapiens
gggcctgcccaaggg

SEQ ID NO: 26048 - DNA, 15 bp, Homo sapiens
ggcctgcccaagggg

SEQ ID NO: 26049 - DNA, 15 bp, Homo sapiens
gcctgcccaaggggc

SEQ ID NO: 26050 - DNA, 15 bp, Homo sapiens
cctgcccaaggggcc

SEQ ID NO: 26051 - DNA, 15 bp, Homo sapiens
ctgcccaaggggcca

SEQ ID NO: 26052 - DNA, 15 bp, Homo sapiens
tgcccaaggggccag

SEQ ID NO: 26053 - DNA, 15 bp, Homo sapiens
gcccaaggggccagc

SEQ ID NO: 26054 - DNA, 15 bp, Homo sapiens
cccaaggggccagct

SEQ ID NO: 26055 - DNA, 15 bp, Homo sapiens
ccaaggggccagctc

SEQ ID NO: 26056 - DNA, 15 bp, Homo sapiens
caaggggccagctca

SEQ ID NO: 26057 - DNA, 15 bp, Homo sapiens
aaggggccagctcac

SEQ ID NO: 26058 - DNA, 15 bp, Homo sapiens
aggggccagctcaca

SEQ ID NO: 26059 - DNA, 15 bp, Homo sapiens
ggggccagctcacat

SEQ ID NO: 26060 - DNA, 15 bp, Homo sapiens
gggccagctcacatt

SEQ ID NO: 26061 - DNA, 15 bp, Homo sapiens
ggccagctcacattc

SEQ ID NO: 26062 - DNA, 15 bp, Homo sapiens
gccagctcacattct

SEQ ID NO: 26063 - DNA, 15 bp, Homo sapiens
ccagctcacattctc

SEQ ID NO: 26064 - DNA, 15 bp, Homo sapiens
cagctcacattctcg

SEQ ID NO: 26065 - DNA, 15 bp, Homo sapiens
agctcacattctcgg

SEQ ID NO: 26066 - DNA, 15 bp, Homo sapiens
gctcacattctcggc

SEQ ID NO: 26067 - DNA, 15 bp, Homo sapiens
ctcacattctcggcc

SEQ ID NO: 26068 - DNA, 15 bp, Homo sapiens
tcacattctcggcca

SEQ ID NO: 26069 - DNA, 15 bp, Homo sapiens
cacattctcggccac

SEQ ID NO: 26070 - DNA, 15 bp, Homo sapiens
acattctcggccacc

SEQ ID NO: 26071 - DNA, 15 bp, Homo sapiens
cattctcggccacca

SEQ ID NO: 26072 - DNA, 15 bp, Homo sapiens
attctcggccaccat

SEQ ID NO: 26073 - DNA, 15 bp, Homo sapiens
ttctcggccaccatc

SEQ ID NO: 26074 - DNA, 15 bp, Homo sapiens
tctcggccaccatcc

SEQ ID NO: 26075 - DNA, 15 bp, Homo sapiens
ctcggccaccatcct

SEQ ID NO: 26076 - DNA, 15 bp, Homo sapiens
tcggccaccatcctc

SEQ ID NO: 26077 - DNA, 15 bp, Homo sapiens
cggccaccatcctca

SEQ ID NO: 26078 - DNA, 15 bp, Homo sapiens
ggccaccatcctcac

SEQ ID NO: 26079 - DNA, 15 bp, Homo sapiens
gccaccatcctcact

SEQ ID NO: 26080 - DNA, 15 bp, Homo sapiens
ccaccatcctcactt

SEQ ID NO: 26081 - DNA, 15 bp, Homo sapiens
caccatcctcacttc

SEQ ID NO: 26082 - DNA, 15 bp, Homo sapiens
accatcctcacttcg

SEQ ID NO: 26083 - DNA, 15 bp, Homo sapiens
ccatcctcacttcgt

SEQ ID NO: 26084 - DNA, 15 bp, Homo sapiens
catcctcacttcgtt

SEQ ID NO: 26085 - DNA, 15 bp, Homo sapiens
atcctcacttcgttt

SEQ ID NO: 26086 - DNA, 15 bp, Homo sapiens
tcctcacttcgtttg

SEQ ID NO: 26087 - DNA, 15 bp, Homo sapiens
cctcacttcgtttgc

SEQ ID NO: 26088 - DNA, 15 bp, Homo sapiens
ctcacttcgtttgcc

SEQ ID NO: 26089 - DNA, 15 bp, Homo sapiens
tcacttcgtttgcct

SEQ ID NO: 26090 - DNA, 15 bp, Homo sapiens
cacttcgtttgcctc

SEQ ID NO: 26091 - DNA, 15 bp, Homo sapiens
acttcgtttgcctcc

SEQ ID NO: 26092 - DNA, 15 bp, Homo sapiens
cttcgtttgcctcct

SEQ ID NO: 26093 - DNA, 15 bp, Homo sapiens
ttcgtttgcctccta

SEQ ID NO: 26094 - DNA, 15 bp, Homo sapiens
tcgtttgcctcctat

SEQ ID NO: 26095 - DNA, 15 bp, Homo sapiens
cgtttgcctcctata

SEQ ID NO: 26096 - DNA, 15 bp, Homo sapiens
gtttgcctcctatat

SEQ ID NO: 26097 - DNA, 15 bp, Homo sapiens
tttgcctcctatatc

SEQ ID NO: 26098 - DNA, 15 bp, Homo sapiens
ttgcctcctatatct

SEQ ID NO: 26099 - DNA, 15 bp, Homo sapiens
tgcctcctatatctc

SEQ ID NO: 26100 - DNA, 15 bp, Homo sapiens
gcctcctatatctct

SEQ ID NO: 26101 - DNA, 15 bp, Homo sapiens
cctcctatatctctg

SEQ ID NO: 26102 - DNA, 15 bp, Homo sapiens
ctcctatatctctgg

SEQ ID NO: 26103 - DNA, 15 bp, Homo sapiens
tcctatatctctggc

SEQ ID NO: 26104 - DNA, 15 bp, Homo sapiens
cctatatctctggcc

SEQ ID NO: 26105 - DNA, 15 bp, Homo sapiens
ctatatctctggcca

SEQ ID NO: 26106 - DNA, 15 bp, Homo sapiens
tatatctctggccac

SEQ ID NO: 26107 - DNA, 15 bp, Homo sapiens
atatctctggccact

SEQ ID NO: 26108 - DNA, 15 bp, Homo sapiens
tatctctggccactc

SEQ ID NO: 26109 - DNA, 15 bp, Homo sapiens
atctctggccactct

SEQ ID NO: 26110 - DNA, 15 bp, Homo sapiens
tctctggccactctc

SEQ ID NO: 26111 - DNA, 15 bp, Homo sapiens
ctctggccactctct

SEQ ID NO: 26112 - DNA, 15 bp, Homo sapiens
tctggccactctctt

SEQ ID NO: 26113 - DNA, 15 bp, Homo sapiens
ctggccactctcttt

SEQ ID NO: 26114 - DNA, 15 bp, Homo sapiens
tggccactctctttc

SEQ ID NO: 26115 - DNA, 15 bp, Homo sapiens
ggccactctctttca

SEQ ID NO: 26116 - DNA, 15 bp, Homo sapiens
gccactctctttcat

SEQ ID NO: 26117 - DNA, 15 bp, Homo sapiens
ccactctctttcatg

SEQ ID NO: 26118 - DNA, 15 bp, Homo sapiens
cactctctttcatgg

SEQ ID NO: 26119 - DNA, 15 bp, Homo sapiens
actctctttcatgga

SEQ ID NO: 26120 - DNA, 15 bp, Homo sapiens
ctctctttcatggag

SEQ ID NO: 26121 - DNA, 15 bp, Homo sapiens
tctctttcatggagt

SEQ ID NO: 26122 - DNA, 15 bp, Homo sapiens
ctctttcatggagtg

SEQ ID NO: 26123 - DNA, 15 bp, Homo sapiens
tctttcatggagtga

SEQ ID NO: 26124 - DNA, 15 bp, Homo sapiens
ctttcatggagtgag

SEQ ID NO: 26125 - DNA, 15 bp, Homo sapiens
tttcatggagtgagt

SEQ ID NO: 26126 - DNA, 15 bp, Homo sapiens
ttcatggagtgagtg

SEQ ID NO: 26127 - DNA, 15 bp, Homo sapiens
tcatggagtgagtga

SEQ ID NO: 26128 - DNA, 15 bp, Homo sapiens
catggagtgagtgac

SEQ ID NO: 26129 - DNA, 15 bp, Homo sapiens
atggagtgagtgaca

SEQ ID NO: 26130 - DNA, 15 bp, Homo sapiens
tggagtgagtgacag

SEQ ID NO: 26131 - DNA, 15 bp, Homo sapiens
ggagtgagtgacagt

SEQ ID NO: 26132 - DNA, 15 bp, Homo sapiens
gagtgagtgacagta

SEQ ID NO: 26133 - DNA, 15 bp, Homo sapiens
agtgagtgacagtaa

SEQ ID NO: 26134 - DNA, 15 bp, Homo sapiens
gtgagtgacagtaag

SEQ ID NO: 26135 - DNA, 15 bp, Homo sapiens
tgagtgacagtaagg

SEQ ID NO: 26136 - DNA, 15 bp, Homo sapiens
gagtgacagtaaggg

SEQ ID NO: 26137 - DNA, 15 bp, Homo sapiens
agtgacagtaaggga

SEQ ID NO: 26138 - DNA, 15 bp, Homo sapiens
gtgacagtaagggac

SEQ ID NO: 26139 - DNA, 15 bp, Homo sapiens
tgacagtaagggaca

SEQ ID NO: 26140 - DNA, 15 bp, Homo sapiens
gacagtaagggacag

SEQ ID NO: 26141 - DNA, 15 bp, Homo sapiens
acagtaagggacaga

SEQ ID NO: 26142 - DNA, 15 bp, Homo sapiens
cagtaagggacagat

SEQ ID NO: 26143 - DNA, 15 bp, Homo sapiens
agtaagggacagatg

SEQ ID NO: 26144 - DNA, 15 bp, Homo sapiens
gtaagggacagatgg

SEQ ID NO: 26145 - DNA, 15 bp, Homo sapiens
taagggacagatggt

SEQ ID NO: 26146 - DNA, 15 bp, Homo sapiens
aagggacagatggtc

SEQ ID NO: 26147 - DNA, 15 bp, Homo sapiens
agggacagatggtct

SEQ ID NO: 26148 - DNA, 15 bp, Homo sapiens
gggacagatggtctg

SEQ ID NO: 26149 - DNA, 15 bp, Homo sapiens
ggacagatggtctgg

SEQ ID NO: 26150 - DNA, 15 bp, Homo sapiens
gacagatggtctggg

SEQ ID NO: 26151 - DNA, 15 bp, Homo sapiens
acagatggtctgggg

SEQ ID NO: 26152 - DNA, 15 bp, Homo sapiens
cagatggtctgggga

SEQ ID NO: 26153 - DNA, 15 bp, Homo sapiens
agatggtctggggaa

SEQ ID NO: 26154 - DNA, 15 bp, Homo sapiens
gatggtctggggaag

SEQ ID NO: 26155 - DNA, 15 bp, Homo sapiens
atggtctggggaagg

SEQ ID NO: 26156 - DNA, 15 bp, Homo sapiens
tggtctggggaaggt

SEQ ID NO: 26157 - DNA, 15 bp, Homo sapiens
ggtctggggaaggta

SEQ ID NO: 26158 - DNA, 15 bp, Homo sapiens
gtctggggaaggtat

SEQ ID NO: 26159 - DNA, 15 bp, Homo sapiens
tctggggaaggtata

SEQ ID NO: 26160 - DNA, 15 bp, Homo sapiens
ctggggaaggtataa

SEQ ID NO: 26161 - DNA, 15 bp, Homo sapiens
tggggaaggtataag

SEQ ID NO: 26162 - DNA, 15 bp, Homo sapiens
ggggaaggtataagg

SEQ ID NO: 26163 - DNA, 15 bp, Homo sapiens
gggaaggtataagga

SEQ ID NO: 26164 - DNA, 15 bp, Homo sapiens
ggaaggtataaggag

SEQ ID NO: 26165 - DNA, 15 bp, Homo sapiens
gaaggtataaggaga

SEQ ID NO: 26166 - DNA, 15 bp, Homo sapiens
aaggtataaggagaa

SEQ ID NO: 26167 - DNA, 15 bp, Homo sapiens
aggtataaggagaat

SEQ ID NO: 26168 - DNA, 15 bp, Homo sapiens
ggtataaggagaatg

SEQ ID NO: 26169 - DNA, 15 bp, Homo sapiens
gtataaggagaatgc

SEQ ID NO: 26170 - DNA, 15 bp, Homo sapiens
tataaggagaatgca

SEQ ID NO: 26171 - DNA, 15 bp, Homo sapiens
ataaggagaatgcag

SEQ ID NO: 26172 - DNA, 15 bp, Homo sapiens
taaggagaatgcagc

SEQ ID NO: 26173 - DNA, 15 bp, Homo sapiens
aaggagaatgcagcc

SEQ ID NO: 26174 - DNA, 15 bp, Homo sapiens
aggagaatgcagccc

SEQ ID NO: 26175 - DNA, 15 bp, Homo sapiens
ggagaatgcagccca

SEQ ID NO: 26176 - DNA, 15 bp, Homo sapiens
gagaatgcagcccac

SEQ ID NO: 26177 - DNA, 15 bp, Homo sapiens
agaatgcagcccaca

SEQ ID NO: 26178 - DNA, 15 bp, Homo sapiens
gaatgcagcccacac

SEQ ID NO: 26179 - DNA, 15 bp, Homo sapiens
aatgcagcccacacc

SEQ ID NO: 26180 - DNA, 15 bp, Homo sapiens
atgcagcccacacct

SEQ ID NO: 26181 - DNA, 15 bp, Homo sapiens
tgcagcccacacctc

SEQ ID NO: 26182 - DNA, 15 bp, Homo sapiens
gcagcccacacctct

SEQ ID NO: 26183 - DNA, 15 bp, Homo sapiens
cagcccacacctctg

SEQ ID NO: 26184 - DNA, 15 bp, Homo sapiens
agcccacacctctga

SEQ ID NO: 26185 - DNA, 15 bp, Homo sapiens
gcccacacctctgat

SEQ ID NO: 26186 - DNA, 15 bp, Homo sapiens
cccacacctctgatc

SEQ ID NO: 26187 - DNA, 15 bp, Homo sapiens
ccacacctctgatcc

SEQ ID NO: 26188 - DNA, 15 bp, Homo sapiens
cacacctctgatcct

SEQ ID NO: 26189 - DNA, 15 bp, Homo sapiens
acacctctgatcctg

SEQ ID NO: 26190 - DNA, 15 bp, Homo sapiens
cacctctgatcctga

SEQ ID NO: 26191 - DNA, 15 bp, Homo sapiens
acctctgatcctgag

SEQ ID NO: 26192 - DNA, 15 bp, Homo sapiens
cctctgatcctgaga

SEQ ID NO: 26193 - DNA, 15 bp, Homo sapiens
ctctgatcctgagag

SEQ ID NO: 26194 - DNA, 15 bp, Homo sapiens
tctgatcctgagaga

SEQ ID NO: 26195 - DNA, 15 bp, Homo sapiens
ctgatcctgagagag

SEQ ID NO: 26196 - DNA, 15 bp, Homo sapiens
tgatcctgagagaga

SEQ ID NO: 26197 - DNA, 15 bp, Homo sapiens
gatcctgagagagaa

SEQ ID NO: 26198 - DNA, 15 bp, Homo sapiens
atcctgagagagaaa

SEQ ID NO: 26199 - DNA, 15 bp, Homo sapiens
tcctgagagagaaaa

SEQ ID NO: 26200 - DNA, 15 bp, Homo sapiens
cctgagagagaaaac

SEQ ID NO: 26201 - DNA, 15 bp, Homo sapiens
ctgagagagaaaact

SEQ ID NO: 26202 - DNA, 15 bp, Homo sapiens
tgagagagaaaacta

SEQ ID NO: 26203 - DNA, 15 bp, Homo sapiens
gagagagaaaactag

SEQ ID NO: 26204 - DNA, 15 bp, Homo sapiens
agagagaaaactagc

SEQ ID NO: 26205 - DNA, 15 bp, Homo sapiens
gagagaaaactagcc

SEQ ID NO: 26206 - DNA, 15 bp, Homo sapiens
agagaaaactagccc

SEQ ID NO: 26207 - DNA, 15 bp, Homo sapiens
gagaaaactagcccc

SEQ ID NO: 26208 - DNA, 15 bp, Homo sapiens
agaaaactagccccc

SEQ ID NO: 26209 - DNA, 15 bp, Homo sapiens
gaaaactagccccct

SEQ ID NO: 26210 - DNA, 15 bp, Homo sapiens
aaaactagccccctt

SEQ ID NO: 26211 - DNA, 15 bp, Homo sapiens
aaactagcccccttt

SEQ ID NO: 26212 - DNA, 15 bp, Homo sapiens
aactagccccctttt

SEQ ID NO: 26213 - DNA, 15 bp, Homo sapiens
actagcccccttttc

SEQ ID NO: 26214 - DNA, 15 bp, Homo sapiens
ctagcccccttttcc

SEQ ID NO: 26215 - DNA, 15 bp, Homo sapiens
tagcccccttttcca

SEQ ID NO: 26216 - DNA, 15 bp, Homo sapiens
agcccccttttccag

SEQ ID NO: 26217 - DNA, 15 bp, Homo sapiens
gcccccttttccagg

SEQ ID NO: 26218 - DNA, 15 bp, Homo sapiens
cccccttttccagga

SEQ ID NO: 26219 - DNA, 15 bp, Homo sapiens
ccccttttccaggag

SEQ ID NO: 26220 - DNA, 15 bp, Homo sapiens
cccttttccaggagg

SEQ ID NO: 26221 - DNA, 15 bp, Homo sapiens
ccttttccaggaggg

SEQ ID NO: 26222 - DNA, 15 bp, Homo sapiens
cttttccaggagggg

SEQ ID NO: 26223 - DNA, 15 bp, Homo sapiens
ttttccaggaggggg

SEQ ID NO: 26224 - DNA, 15 bp, Homo sapiens
tttccaggaggggga

SEQ ID NO: 26225 - DNA, 15 bp, Homo sapiens
ttccaggagggggac

SEQ ID NO: 26226 - DNA, 15 bp, Homo sapiens
tccaggagggggaca

SEQ ID NO: 26227 - DNA, 15 bp, Homo sapiens
ccaggagggggacag

SEQ ID NO: 26228 - DNA, 15 bp, Homo sapiens
caggagggggacagg

SEQ ID NO: 26229 - DNA, 15 bp, Homo sapiens
aggagggggacaggt

SEQ ID NO: 26230 - DNA, 15 bp, Homo sapiens
ggagggggacaggtg

SEQ ID NO: 26231 - DNA, 15 bp, Homo sapiens
gagggggacaggtgc

SEQ ID NO: 26232 - DNA, 15 bp, Homo sapiens
agggggacaggtgct

SEQ ID NO: 26233 - DNA, 15 bp, Homo sapiens
gggggacaggtgctg

SEQ ID NO: 26234 - DNA, 15 bp, Homo sapiens
ggggacaggtgctgg

SEQ ID NO: 26235 - DNA, 15 bp, Homo sapiens
gggacaggtgctggg

SEQ ID NO: 26236 - DNA, 15 bp, Homo sapiens
ggacaggtgctgggg

SEQ ID NO: 26237 - DNA, 15 bp, Homo sapiens
gacaggtgctggggc

SEQ ID NO: 26238 - DNA, 15 bp, Homo sapiens
acaggtgctggggca

SEQ ID NO: 26239 - DNA, 15 bp, Homo sapiens
caggtgctggggcag

SEQ ID NO: 26240 - DNA, 15 bp, Homo sapiens
aggtgctggggcagg

SEQ ID NO: 26241 - DNA, 15 bp, Homo sapiens
ggtgctggggcaggg

SEQ ID NO: 26242 - DNA, 15 bp, Homo sapiens
gtgctggggcaggga

SEQ ID NO: 26243 - DNA, 15 bp, Homo sapiens
tgctggggcagggaa

SEQ ID NO: 26244 - DNA, 15 bp, Homo sapiens
gctggggcagggaac

SEQ ID NO: 26245 - DNA, 15 bp, Homo sapiens
ctggggcagggaaca

SEQ ID NO: 26246 - DNA, 15 bp, Homo sapiens
tggggcagggaacaa

SEQ ID NO: 26247 - DNA, 15 bp, Homo sapiens
ggggcagggaacaat

SEQ ID NO: 26248 - DNA, 15 bp, Homo sapiens
gggcagggaacaatg

SEQ ID NO: 26249 - DNA, 15 bp, Homo sapiens
ggcagggaacaatgc

SEQ ID NO: 26250 - DNA, 15 bp, Homo sapiens
gcagggaacaatgcc

SEQ ID NO: 26251 - DNA, 15 bp, Homo sapiens
cagggaacaatgcct

SEQ ID NO: 26252 - DNA, 15 bp, Homo sapiens
agggaacaatgcctc

SEQ ID NO: 26253 - DNA, 15 bp, Homo sapiens
gggaacaatgcctct

SEQ ID NO: 26254 - DNA, 15 bp, Homo sapiens
ggaacaatgcctctg

SEQ ID NO: 26255 - DNA, 15 bp, Homo sapiens
gaacaatgcctctgc

SEQ ID NO: 26256 - DNA, 15 bp, Homo sapiens
aacaatgcctctgct

SEQ ID NO: 26257 - DNA, 15 bp, Homo sapiens
acaatgcctctgctg

SEQ ID NO: 26258 - DNA, 15 bp, Homo sapiens
caatgcctctgctga

SEQ ID NO: 26259 - DNA, 15 bp, Homo sapiens
aatgcctctgctgat

SEQ ID NO: 26260 - DNA, 15 bp, Homo sapiens
atgcctctgctgata

SEQ ID NO: 26261 - DNA, 15 bp, Homo sapiens
tgcctctgctgatag

SEQ ID NO: 26262 - DNA, 15 bp, Homo sapiens
gcctctgctgataga

SEQ ID NO: 26263 - DNA, 15 bp, Homo sapiens
cctctgctgatagaa

SEQ ID NO: 26264 - DNA, 15 bp, Homo sapiens
ctctgctgatagaac

SEQ ID NO: 26265 - DNA, 15 bp, Homo sapiens
tctgctgatagaact

SEQ ID NO: 26266 - DNA, 15 bp, Homo sapiens
ctgctgatagaactg

SEQ ID NO: 26267 - DNA, 15 bp, Homo sapiens
tgctgatagaactgg

SEQ ID NO: 26268 - DNA, 15 bp, Homo sapiens
gctgatagaactggc

SEQ ID NO: 26269 - DNA, 15 bp, Homo sapiens
ctgatagaactggcc

SEQ ID NO: 26270 - DNA, 15 bp, Homo sapiens
tgatagaactggcct

SEQ ID NO: 26271 - DNA, 15 bp, Homo sapiens
gatagaactggcctg

SEQ ID NO: 26272 - DNA, 15 bp, Homo sapiens
atagaactggcctgg

SEQ ID NO: 26273 - DNA, 15 bp, Homo sapiens
tagaactggcctggt

SEQ ID NO: 26274 - DNA, 15 bp, Homo sapiens
agaactggcctggtt

SEQ ID NO: 26275 - DNA, 15 bp, Homo sapiens
gaactggcctggttt

SEQ ID NO: 26276 - DNA, 15 bp, Homo sapiens
aactggcctggttta

SEQ ID NO: 26277 - DNA, 15 bp, Homo sapiens
actggcctggtttat

SEQ ID NO: 26278 - DNA, 15 bp, Homo sapiens
ctggcctggtttata

SEQ ID NO: 26279 - DNA, 15 bp, Homo sapiens
tggcctggtttataa

SEQ ID NO: 26280 - DNA, 15 bp, Homo sapiens
ggcctggtttataat

SEQ ID NO: 26281 - DNA, 15 bp, Homo sapiens
gcctggtttataatt

SEQ ID NO: 26282 - DNA, 15 bp, Homo sapiens
cctggtttataatta

SEQ ID NO: 26283 - DNA, 15 bp, Homo sapiens
ctggtttataattac

SEQ ID NO: 26284 - DNA, 15 bp, Homo sapiens
tggtttataattacg

SEQ ID NO: 26285 - DNA, 15 bp, Homo sapiens
ggtttataattacgc

SEQ ID NO: 26286 - DNA, 15 bp, Homo sapiens
gtttataattacgca

SEQ ID NO: 26287 - DNA, 15 bp, Homo sapiens
tttataattacgcag

SEQ ID NO: 26288 - DNA, 15 bp, Homo sapiens
ttataattacgcagg

SEQ ID NO: 26289 - DNA, 15 bp, Homo sapiens
tataattacgcagga

SEQ ID NO: 26290 - DNA, 15 bp, Homo sapiens
ataattacgcaggag

SEQ ID NO: 26291 - DNA, 15 bp, Homo sapiens
taattacgcaggagg

SEQ ID NO: 26292 - DNA, 15 bp, Homo sapiens
aattacgcaggaggt

SEQ ID NO: 26293 - DNA, 15 bp, Homo sapiens
attacgcaggaggtg

SEQ ID NO: 26294 - DNA, 15 bp, Homo sapiens
ttacgcaggaggtgt

SEQ ID NO: 26295 - DNA, 15 bp, Homo sapiens
tacgcaggaggtgta

SEQ ID NO: 26296 - DNA, 15 bp, Homo sapiens
acgcaggaggtgtag

SEQ ID NO: 26297 - DNA, 15 bp, Homo sapiens
cgcaggaggtgtagg

SEQ ID NO: 26298 - DNA, 15 bp, Homo sapiens
gcaggaggtgtaggg

SEQ ID NO: 26299 - DNA, 15 bp, Homo sapiens
caggaggtgtaggga

SEQ ID NO: 26300 - DNA, 15 bp, Homo sapiens
aggaggtgtagggaa

SEQ ID NO: 26301 - DNA, 15 bp, Homo sapiens
ggaggtgtagggaac

SEQ ID NO: 26302 - DNA, 15 bp, Homo sapiens
gaggtgtagggaaca

SEQ ID NO: 26303 - DNA, 15 bp, Homo sapiens
aggtgtagggaacat

SEQ ID NO: 26304 - DNA, 15 bp, Homo sapiens
ggtgtagggaacatt

SEQ ID NO: 26305 - DNA, 15 bp, Homo sapiens
gtgtagggaacattc

SEQ ID NO: 26306 - DNA, 15 bp, Homo sapiens
tgtagggaacattcc

SEQ ID NO: 26307 - DNA, 15 bp, Homo sapiens
gtagggaacattccg

SEQ ID NO: 26308 - DNA, 15 bp, Homo sapiens
tagggaacattccga

SEQ ID NO: 26309 - DNA, 15 bp, Homo sapiens
agggaacattccgac

SEQ ID NO: 26310 - DNA, 15 bp, Homo sapiens
gggaacattccgacc

SEQ ID NO: 26311 - DNA, 15 bp, Homo sapiens
ggaacattccgaccc

SEQ ID NO: 26312 - DNA, 15 bp, Homo sapiens
gaacattccgaccca

SEQ ID NO: 26313 - DNA, 15 bp, Homo sapiens
aacattccgacccaa

SEQ ID NO: 26314 - DNA, 15 bp, Homo sapiens
acattccgacccaag

SEQ ID NO: 26315 - DNA, 15 bp, Homo sapiens
cattccgacccaagt

SEQ ID NO: 26316 - DNA, 15 bp, Homo sapiens
attccgacccaagtc

SEQ ID NO: 26317 - DNA, 15 bp, Homo sapiens
ttccgacccaagtct

SEQ ID NO: 26318 - DNA, 15 bp, Homo sapiens
tccgacccaagtctg

SEQ ID NO: 26319 - DNA, 15 bp, Homo sapiens
ccgacccaagtctgc

SEQ ID NO: 26320 - DNA, 15 bp, Homo sapiens
cgacccaagtctgca

SEQ ID NO: 26321 - DNA, 15 bp, Homo sapiens
gacccaagtctgcag

SEQ ID NO: 26322 - DNA, 15 bp, Homo sapiens
acccaagtctgcagg

SEQ ID NO: 26323 - DNA, 15 bp, Homo sapiens
cccaagtctgcaggg

SEQ ID NO: 26324 - DNA, 15 bp, Homo sapiens
ccaagtctgcaggga

SEQ ID NO: 26325 - DNA, 15 bp, Homo sapiens
caagtctgcagggag

SEQ ID NO: 26326 - DNA, 15 bp, Homo sapiens
aagtctgcagggagc

SEQ ID NO: 26327 - DNA, 15 bp, Homo sapiens
agtctgcagggagca

SEQ ID NO: 26328 - DNA, 15 bp, Homo sapiens
gtctgcagggagcaa

SEQ ID NO: 26329 - DNA, 15 bp, Homo sapiens
tctgcagggagcaag

SEQ ID NO: 26330 - DNA, 15 bp, Homo sapiens
ctgcagggagcaagg

SEQ ID NO: 26331 - DNA, 15 bp, Homo sapiens
tgcagggagcaaggg

SEQ ID NO: 26332 - DNA, 15 bp, Homo sapiens
gcagggagcaagggg

SEQ ID NO: 26333 - DNA, 15 bp, Homo sapiens
cagggagcaaggggt

SEQ ID NO: 26334 - DNA, 15 bp, Homo sapiens
agggagcaaggggtt

SEQ ID NO: 26335 - DNA, 15 bp, Homo sapiens
gggagcaaggggtta

SEQ ID NO: 26336 - DNA, 15 bp, Homo sapiens
ggagcaaggggttat

SEQ ID NO: 26337 - DNA, 15 bp, Homo sapiens
gagcaaggggttatt

SEQ ID NO: 26338 - DNA, 15 bp, Homo sapiens
agcaaggggttatta

SEQ ID NO: 26339 - DNA, 15 bp, Homo sapiens
gcaaggggttattaa

SEQ ID NO: 26340 - DNA, 15 bp, Homo sapiens
caaggggttattaac

SEQ ID NO: 26341 - DNA, 15 bp, Homo sapiens
aaggggttattaact

SEQ ID NO: 26342 - DNA, 15 bp, Homo sapiens
aggggttattaacta

SEQ ID NO: 26343 - DNA, 15 bp, Homo sapiens
ggggttattaactat

SEQ ID NO: 26344 - DNA, 15 bp, Homo sapiens
gggttattaactatg

SEQ ID NO: 26345 - DNA, 15 bp, Homo sapiens
ggttattaactatgg

SEQ ID NO: 26346 - DNA, 15 bp, Homo sapiens
gttattaactatggg

SEQ ID NO: 26347 - DNA, 15 bp, Homo sapiens
ttattaactatggga

SEQ ID NO: 26348 - DNA, 15 bp, Homo sapiens
tattaactatgggaa

SEQ ID NO: 26349 - DNA, 15 bp, Homo sapiens
attaactatgggaac

SEQ ID NO: 26350 - DNA, 15 bp, Homo sapiens
ttaactatgggaaca

SEQ ID NO: 26351 - DNA, 15 bp, Homo sapiens
taactatgggaacat

SEQ ID NO: 26352 - DNA, 15 bp, Homo sapiens
aactatgggaacatc

SEQ ID NO: 26353 - DNA, 15 bp, Homo sapiens
actatgggaacatca

SEQ ID NO: 26354 - DNA, 15 bp, Homo sapiens
ctatgggaacatcag

SEQ ID NO: 26355 - DNA, 15 bp, Homo sapiens
tatgggaacatcagt

SEQ ID NO: 26356 - DNA, 15 bp, Homo sapiens
atgggaacatcagtg

SEQ ID NO: 26357 - DNA, 15 bp, Homo sapiens
tgggaacatcagtgc

SEQ ID NO: 26358 - DNA, 15 bp, Homo sapiens
gggaacatcagtgca

SEQ ID NO: 26359 - DNA, 15 bp, Homo sapiens
ggaacatcagtgcaa

SEQ ID NO: 26360 - DNA, 15 bp, Homo sapiens
gaacatcagtgcaag

SEQ ID NO: 26361 - DNA, 15 bp, Homo sapiens
aacatcagtgcaagg

SEQ ID NO: 26362 - DNA, 15 bp, Homo sapiens
acatcagtgcaaggg

SEQ ID NO: 26363 - DNA, 15 bp, Homo sapiens
catcagtgcaaggga

SEQ ID NO: 26364 - DNA, 15 bp, Homo sapiens
atcagtgcaagggat

SEQ ID NO: 26365 - DNA, 15 bp, Homo sapiens
tcagtgcaagggatc

SEQ ID NO: 26366 - DNA, 15 bp, Homo sapiens
cagtgcaagggatca

SEQ ID NO: 26367 - DNA, 15 bp, Homo sapiens
agtgcaagggatcat

SEQ ID NO: 26368 - DNA, 15 bp, Homo sapiens
gtgcaagggatcatt

SEQ ID NO: 26369 - DNA, 15 bp, Homo sapiens
tgcaagggatcatta

SEQ ID NO: 26370 - DNA, 15 bp, Homo sapiens
gcaagggatcattaa

SEQ ID NO: 26371 - DNA, 15 bp, Homo sapiens
caagggatcattaac

SEQ ID NO: 26372 - DNA, 15 bp, Homo sapiens
aagggatcattaacc

SEQ ID NO: 26373 - DNA, 15 bp, Homo sapiens
agggatcattaacct

SEQ ID NO: 26374 - DNA, 15 bp, Homo sapiens
gggatcattaacctt

SEQ ID NO: 26375 - DNA, 15 bp, Homo sapiens
ggatcattaacctta

SEQ ID NO: 26376 - DNA, 15 bp, Homo sapiens
gatcattaaccttag

SEQ ID NO: 26377 - DNA, 15 bp, Homo sapiens
atcattaaccttagg

SEQ ID NO: 26378 - DNA, 15 bp, Homo sapiens
tcattaaccttagga

SEQ ID NO: 26379 - DNA, 15 bp, Homo sapiens
cattaaccttaggac

SEQ ID NO: 26380 - DNA, 15 bp, Homo sapiens
attaaccttaggacc

SEQ ID NO: 26381 - DNA, 15 bp, Homo sapiens
ttaaccttaggacca

SEQ ID NO: 26382 - DNA, 15 bp, Homo sapiens
taaccttaggaccat

SEQ ID NO: 26383 - DNA, 15 bp, Homo sapiens
aaccttaggaccatc

SEQ ID NO: 26384 - DNA, 15 bp, Homo sapiens
accttaggaccatca

SEQ ID NO: 26385 - DNA, 15 bp, Homo sapiens
ccttaggaccatcac

SEQ ID NO: 26386 - DNA, 15 bp, Homo sapiens
cttaggaccatcact

SEQ ID NO: 26387 - DNA, 15 bp, Homo sapiens
ttaggaccatcactg

SEQ ID NO: 26388 - DNA, 15 bp, Homo sapiens
taggaccatcactgc

SEQ ID NO: 26389 - DNA, 15 bp, Homo sapiens
aggaccatcactgca

SEQ ID NO: 26390 - DNA, 15 bp, Homo sapiens
ggaccatcactgcaa

SEQ ID NO: 26391 - DNA, 15 bp, Homo sapiens
gaccatcactgcaag

SEQ ID NO: 26392 - DNA, 15 bp, Homo sapiens
accatcactgcaagg

SEQ ID NO: 26393 - DNA, 15 bp, Homo sapiens
ccatcactgcaaggg

SEQ ID NO: 26394 - DNA, 15 bp, Homo sapiens
catcactgcaagggg

SEQ ID NO: 26395 - DNA, 15 bp, Homo sapiens
atcactgcaaggggt

SEQ ID NO: 26396 - DNA, 15 bp, Homo sapiens
tcactgcaaggggtc

SEQ ID NO: 26397 - DNA, 15 bp, Homo sapiens
cactgcaaggggtca

SEQ ID NO: 26398 - DNA, 15 bp, Homo sapiens
actgcaaggggtcat

SEQ ID NO: 26399 - DNA, 15 bp, Homo sapiens
ctgcaaggggtcatt

SEQ ID NO: 26400 - DNA, 15 bp, Homo sapiens
tgcaaggggtcatta

SEQ ID NO: 26401 - DNA, 15 bp, Homo sapiens
gcaaggggtcattaa

SEQ ID NO: 26402 - DNA, 15 bp, Homo sapiens
caaggggtcattaac

SEQ ID NO: 26403 - DNA, 15 bp, Homo sapiens
aaggggtcattaacc

SEQ ID NO: 26404 - DNA, 15 bp, Homo sapiens
aggggtcattaacct

SEQ ID NO: 26405 - DNA, 15 bp, Homo sapiens
ggggtcattaacctt

SEQ ID NO: 26406 - DNA, 15 bp, Homo sapiens
gggtcattaaccttg

SEQ ID NO: 26407 - DNA, 15 bp, Homo sapiens
ggtcattaaccttgg

SEQ ID NO: 26408 - DNA, 15 bp, Homo sapiens
gtcattaaccttggg

SEQ ID NO: 26409 - DNA, 15 bp, Homo sapiens
tcattaaccttgggg

SEQ ID NO: 26410 - DNA, 15 bp, Homo sapiens
cattaaccttggggc

SEQ ID NO: 26411 - DNA, 15 bp, Homo sapiens
attaaccttggggcc

SEQ ID NO: 26412 - DNA, 15 bp, Homo sapiens
ttaaccttggggcca

SEQ ID NO: 26413 - DNA, 15 bp, Homo sapiens
taaccttggggccat

SEQ ID NO: 26414 - DNA, 15 bp, Homo sapiens
aaccttggggccatc

SEQ ID NO: 26415 - DNA, 15 bp, Homo sapiens
accttggggccatca

SEQ ID NO: 26416 - DNA, 15 bp, Homo sapiens
ccttggggccatcac

SEQ ID NO: 26417 - DNA, 15 bp, Homo sapiens
cttggggccatcact

SEQ ID NO: 26418 - DNA, 15 bp, Homo sapiens
ttggggccatcacta

SEQ ID NO: 26419 - DNA, 15 bp, Homo sapiens
tggggccatcactag

SEQ ID NO: 26420 - DNA, 15 bp, Homo sapiens
ggggccatcactaga

SEQ ID NO: 26421 - DNA, 15 bp, Homo sapiens
gggccatcactagaa

SEQ ID NO: 26422 - DNA, 15 bp, Homo sapiens
ggccatcactagaat

SEQ ID NO: 26423 - DNA, 15 bp, Homo sapiens
gccatcactagaatc

SEQ ID NO: 26424 - DNA, 15 bp, Homo sapiens
ccatcactagaatca

SEQ ID NO: 26425 - DNA, 15 bp, Homo sapiens
catcactagaatcag

SEQ ID NO: 26426 - DNA, 15 bp, Homo sapiens
atcactagaatcagc

SEQ ID NO: 26427 - DNA, 15 bp, Homo sapiens
tcactagaatcagct

SEQ ID NO: 26428 - DNA, 15 bp, Homo sapiens
cactagaatcagctc

SEQ ID NO: 26429 - DNA, 15 bp, Homo sapiens
actagaatcagctcc

SEQ ID NO: 26430 - DNA, 15 bp, Homo sapiens
ctagaatcagctccc

SEQ ID NO: 26431 - DNA, 15 bp, Homo sapiens
tagaatcagctcccc

SEQ ID NO: 26432 - DNA, 15 bp, Homo sapiens
agaatcagctcccca

SEQ ID NO: 26433 - DNA, 15 bp, Homo sapiens
gaatcagctccccag

SEQ ID NO: 26434 - DNA, 15 bp, Homo sapiens
aatcagctccccagg

SEQ ID NO: 26435 - DNA, 15 bp, Homo sapiens
atcagctccccagga

SEQ ID NO: 26436 - DNA, 15 bp, Homo sapiens
tcagctccccaggac

SEQ ID NO: 26437 - DNA, 15 bp, Homo sapiens
cagctccccaggact

SEQ ID NO: 26438 - DNA, 15 bp, Homo sapiens
agctccccaggactc

SEQ ID NO: 26439 - DNA, 15 bp, Homo sapiens
gctccccaggactcc

SEQ ID NO: 26440 - DNA, 15 bp, Homo sapiens
ctccccaggactcct

SEQ ID NO: 26441 - DNA, 15 bp, Homo sapiens
tccccaggactcctt

SEQ ID NO: 26442 - DNA, 15 bp, Homo sapiens
ccccaggactccttc

SEQ ID NO: 26443 - DNA, 15 bp, Homo sapiens
cccaggactccttcc

SEQ ID NO: 26444 - DNA, 15 bp, Homo sapiens
ccaggactccttcct

SEQ ID NO: 26445 - DNA, 15 bp, Homo sapiens
caggactccttcctg

SEQ ID NO: 26446 - DNA, 15 bp, Homo sapiens
aggactccttcctga

SEQ ID NO: 26447 - DNA, 15 bp, Homo sapiens
ggactccttcctgac

SEQ ID NO: 26448 - DNA, 15 bp, Homo sapiens
gactccttcctgaca

SEQ ID NO: 26449 - DNA, 15 bp, Homo sapiens
actccttcctgacat

SEQ ID NO: 26450 - DNA, 15 bp, Homo sapiens
ctccttcctgacatg

SEQ ID NO: 26451 - DNA, 15 bp, Homo sapiens
tccttcctgacatgc

SEQ ID NO: 26452 - DNA, 15 bp, Homo sapiens
ccttcctgacatgca

SEQ ID NO: 26453 - DNA, 15 bp, Homo sapiens
cttcctgacatgcat

SEQ ID NO: 26454 - DNA, 15 bp, Homo sapiens
ttcctgacatgcatg

SEQ ID NO: 26455 - DNA, 15 bp, Homo sapiens
tcctgacatgcatgc

SEQ ID NO: 26456 - DNA, 15 bp, Homo sapiens
cctgacatgcatgct

SEQ ID NO: 26457 - DNA, 15 bp, Homo sapiens
ctgacatgcatgctc

SEQ ID NO: 26458 - DNA, 15 bp, Homo sapiens
tgacatgcatgctcc

SEQ ID NO: 26459 - DNA, 15 bp, Homo sapiens
gacatgcatgctcct

SEQ ID NO: 26460 - DNA, 15 bp, Homo sapiens
acatgcatgctcctc

SEQ ID NO: 26461 - DNA, 15 bp, Homo sapiens
catgcatgctcctca

SEQ ID NO: 26462 - DNA, 15 bp, Homo sapiens
atgcatgctcctcac

SEQ ID NO: 26463 - DNA, 15 bp, Homo sapiens
tgcatgctcctcacc

SEQ ID NO: 26464 - DNA, 15 bp, Homo sapiens
gcatgctcctcaccc

SEQ ID NO: 26465 - DNA, 15 bp, Homo sapiens
catgctcctcacccc

SEQ ID NO: 26466 - DNA, 15 bp, Homo sapiens
atgctcctcaccccc

SEQ ID NO: 26467 - DNA, 15 bp, Homo sapiens
tgctcctcaccccct

SEQ ID NO: 26468 - DNA, 15 bp, Homo sapiens
gctcctcaccccctc

SEQ ID NO: 26469 - DNA, 15 bp, Homo sapiens
ctcctcaccccctcc

SEQ ID NO: 26470 - DNA, 15 bp, Homo sapiens
tcctcaccccctccc

SEQ ID NO: 26471 - DNA, 15 bp, Homo sapiens
cctcaccccctccct

SEQ ID NO: 26472 - DNA, 15 bp, Homo sapiens
ctcaccccctccctt

SEQ ID NO: 26473 - DNA, 15 bp, Homo sapiens
tcaccccctcccttg

SEQ ID NO: 26474 - DNA, 15 bp, Homo sapiens
caccccctcccttgc

SEQ ID NO: 26475 - DNA, 15 bp, Homo sapiens
accccctcccttgct

SEQ ID NO: 26476 - DNA, 15 bp, Homo sapiens
ccccctcccttgctc

SEQ ID NO: 26477 - DNA, 15 bp, Homo sapiens
cccctcccttgctcc

SEQ ID NO: 26478 - DNA, 15 bp, Homo sapiens
ccctcccttgctccc

SEQ ID NO: 26479 - DNA, 15 bp, Homo sapiens
cctcccttgctccct

SEQ ID NO: 26480 - DNA, 15 bp, Homo sapiens
ctcccttgctccctc

SEQ ID NO: 26481 - DNA, 15 bp, Homo sapiens
tcccttgctccctcc

SEQ ID NO: 26482 - DNA, 15 bp, Homo sapiens
cccttgctccctccc

SEQ ID NO: 26483 - DNA, 15 bp, Homo sapiens
ccttgctccctccca

SEQ ID NO: 26484 - DNA, 15 bp, Homo sapiens
cttgctccctcccac

SEQ ID NO: 26485 - DNA, 15 bp, Homo sapiens
ttgctccctcccaca

SEQ ID NO: 26486 - DNA, 15 bp, Homo sapiens
tgctccctcccacat

SEQ ID NO: 26487 - DNA, 15 bp, Homo sapiens
gctccctcccacatg

SEQ ID NO: 26488 - DNA, 15 bp, Homo sapiens
ctccctcccacatgc

SEQ ID NO: 26489 - DNA, 15 bp, Homo sapiens
tccctcccacatgcc

SEQ ID NO: 26490 - DNA, 15 bp, Homo sapiens
ccctcccacatgccg

SEQ ID NO: 26491 - DNA, 15 bp, Homo sapiens
cctcccacatgccgt

SEQ ID NO: 26492 - DNA, 15 bp, Homo sapiens
ctcccacatgccgtg

SEQ ID NO: 26493 - DNA, 15 bp, Homo sapiens
tcccacatgccgtga

SEQ ID NO: 26494 - DNA, 15 bp, Homo sapiens
cccacatgccgtgac

SEQ ID NO: 26495 - DNA, 15 bp, Homo sapiens
ccacatgccgtgaca

SEQ ID NO: 26496 - DNA, 15 bp, Homo sapiens
cacatgccgtgacat

SEQ ID NO: 26497 - DNA, 15 bp, Homo sapiens
acatgccgtgacatc

SEQ ID NO: 26498 - DNA, 15 bp, Homo sapiens
catgccgtgacatct

SEQ ID NO: 26499 - DNA, 15 bp, Homo sapiens
atgccgtgacatctg

SEQ ID NO: 26500 - DNA, 15 bp, Homo sapiens
tgccgtgacatctgt

SEQ ID NO: 26501 - DNA, 15 bp, Homo sapiens
gccgtgacatctgtt

SEQ ID NO: 26502 - DNA, 15 bp, Homo sapiens
ccgtgacatctgtta

SEQ ID NO: 26503 - DNA, 15 bp, Homo sapiens
cgtgacatctgttaa

SEQ ID NO: 26504 - DNA, 15 bp, Homo sapiens
gtgacatctgttaaa

SEQ ID NO: 26505 - DNA, 15 bp, Homo sapiens
tgacatctgttaaac

SEQ ID NO: 26506 - DNA, 15 bp, Homo sapiens
gacatctgttaaaca

SEQ ID NO: 26507 - DNA, 15 bp, Homo sapiens
acatctgttaaacac

SEQ ID NO: 26508 - DNA, 15 bp, Homo sapiens
catctgttaaacacc

SEQ ID NO: 26509 - DNA, 15 bp, Homo sapiens
atctgttaaacacct

SEQ ID NO: 26510 - DNA, 15 bp, Homo sapiens
tctgttaaacacctg

SEQ ID NO: 26511 - DNA, 15 bp, Homo sapiens
ctgttaaacacctgc

SEQ ID NO: 26512 - DNA, 15 bp, Homo sapiens
tgttaaacacctgct

SEQ ID NO: 26513 - DNA, 15 bp, Homo sapiens
gttaaacacctgctg

SEQ ID NO: 26514 - DNA, 15 bp, Homo sapiens
ttaaacacctgctgt

SEQ ID NO: 26515 - DNA, 15 bp, Homo sapiens
taaacacctgctgtt

SEQ ID NO: 26516 - DNA, 15 bp, Homo sapiens
aaacacctgctgttc

SEQ ID NO: 26517 - DNA, 15 bp, Homo sapiens
aacacctgctgttca

SEQ ID NO: 26518 - DNA, 15 bp, Homo sapiens
acacctgctgttcac

SEQ ID NO: 26519 - DNA, 15 bp, Homo sapiens
cacctgctgttcaca

SEQ ID NO: 26520 - DNA, 15 bp, Homo sapiens
acctgctgttcacag

SEQ ID NO: 26521 - DNA, 15 bp, Homo sapiens
cctgctgttcacagg

SEQ ID NO: 26522 - DNA, 15 bp, Homo sapiens
ctgctgttcacaggg

SEQ ID NO: 26523 - DNA, 15 bp, Homo sapiens
tgctgttcacagggt

SEQ ID NO: 26524 - DNA, 15 bp, Homo sapiens
gctgttcacagggtc

SEQ ID NO: 26525 - DNA, 15 bp, Homo sapiens
ctgttcacagggtcc

SEQ ID NO: 26526 - DNA, 15 bp, Homo sapiens
tgttcacagggtccc

SEQ ID NO: 26527 - DNA, 15 bp, Homo sapiens
gttcacagggtccct

SEQ ID NO: 26528 - DNA, 15 bp, Homo sapiens
ttcacagggtccctg

SEQ ID NO: 26529 - DNA, 15 bp, Homo sapiens
tcacagggtccctgc

SEQ ID NO: 26530 - DNA, 15 bp, Homo sapiens
cacagggtccctgca

SEQ ID NO: 26531 - DNA, 15 bp, Homo sapiens
acagggtccctgcag

SEQ ID NO: 26532 - DNA, 15 bp, Homo sapiens
cagggtccctgcagg

SEQ ID NO: 26533 - DNA, 15 bp, Homo sapiens
agggtccctgcaggc

SEQ ID NO: 26534 - DNA, 15 bp, Homo sapiens
gggtccctgcaggcc

SEQ ID NO: 26535 - DNA, 15 bp, Homo sapiens
ggtccctgcaggcct

SEQ ID NO: 26536 - DNA, 15 bp, Homo sapiens
gtccctgcaggcctc

SEQ ID NO: 26537 - DNA, 15 bp, Homo sapiens
tccctgcaggcctcc

SEQ ID NO: 26538 - DNA, 15 bp, Homo sapiens
ccctgcaggcctcca

SEQ ID NO: 26539 - DNA, 15 bp, Homo sapiens
cctgcaggcctccaa

SEQ ID NO: 26540 - DNA, 15 bp, Homo sapiens
ctgcaggcctccaag

SEQ ID NO: 26541 - DNA, 15 bp, Homo sapiens
tgcaggcctccaagc

SEQ ID NO: 26542 - DNA, 15 bp, Homo sapiens
gcaggcctccaagca

SEQ ID NO: 26543 - DNA, 15 bp, Homo sapiens
caggcctccaagcag

SEQ ID NO: 26544 - DNA, 15 bp, Homo sapiens
aggcctccaagcagg

SEQ ID NO: 26545 - DNA, 15 bp, Homo sapiens
ggcctccaagcaggg

SEQ ID NO: 26546 - DNA, 15 bp, Homo sapiens
gcctccaagcagggg

SEQ ID NO: 26547 - DNA, 15 bp, Homo sapiens
cctccaagcagggga

SEQ ID NO: 26548 - DNA, 15 bp, Homo sapiens
ctccaagcaggggac

SEQ ID NO: 26549 - DNA, 15 bp, Homo sapiens
tccaagcaggggacc

SEQ ID NO: 26550 - DNA, 15 bp, Homo sapiens
ccaagcaggggacct

SEQ ID NO: 26551 - DNA, 15 bp, Homo sapiens
caagcaggggacctc

SEQ ID NO: 26552 - DNA, 15 bp, Homo sapiens
aagcaggggacctca

SEQ ID NO: 26553 - DNA, 15 bp, Homo sapiens
agcaggggacctcat

SEQ ID NO: 26554 - DNA, 15 bp, Homo sapiens
gcaggggacctcatc

SEQ ID NO: 26555 - DNA, 15 bp, Homo sapiens
caggggacctcatcc

SEQ ID NO: 26556 - DNA, 15 bp, Homo sapiens
aggggacctcatccc

SEQ ID NO: 26557 - DNA, 15 bp, Homo sapiens
ggggacctcatccca

SEQ ID NO: 26558 - DNA, 15 bp, Homo sapiens
gggacctcatcccac

SEQ ID NO: 26559 - DNA, 15 bp, Homo sapiens
ggacctcatcccacc

SEQ ID NO: 26560 - DNA, 15 bp, Homo sapiens
gacctcatcccacct

SEQ ID NO: 26561 - DNA, 15 bp, Homo sapiens
acctcatcccacctt

SEQ ID NO: 26562 - DNA, 15 bp, Homo sapiens
cctcatcccaccttg

SEQ ID NO: 26563 - DNA, 15 bp, Homo sapiens
ctcatcccaccttgg

SEQ ID NO: 26564 - DNA, 15 bp, Homo sapiens
tcatcccaccttggt

SEQ ID NO: 26565 - DNA, 15 bp, Homo sapiens
catcccaccttggtg

SEQ ID NO: 26566 - DNA, 15 bp, Homo sapiens
atcccaccttggtgc

SEQ ID NO: 26567 - DNA, 15 bp, Homo sapiens
tcccaccttggtgcc

SEQ ID NO: 26568 - DNA, 15 bp, Homo sapiens
cccaccttggtgcct

SEQ ID NO: 26569 - DNA, 15 bp, Homo sapiens
ccaccttggtgcctc

SEQ ID NO: 26570 - DNA, 15 bp, Homo sapiens
caccttggtgcctcc

SEQ ID NO: 26571 - DNA, 15 bp, Homo sapiens
accttggtgcctccc

SEQ ID NO: 26572 - DNA, 15 bp, Homo sapiens
ccttggtgcctcccc

SEQ ID NO: 26573 - DNA, 15 bp, Homo sapiens
cttggtgcctcccct

SEQ ID NO: 26574 - DNA, 15 bp, Homo sapiens
ttggtgcctcccctg

SEQ ID NO: 26575 - DNA, 15 bp, Homo sapiens
tggtgcctcccctgg

SEQ ID NO: 26576 - DNA, 15 bp, Homo sapiens
ggtgcctcccctggc

SEQ ID NO: 26577 - DNA, 15 bp, Homo sapiens
gtgcctcccctggct

SEQ ID NO: 26578 - DNA, 15 bp, Homo sapiens
tgcctcccctggctg

SEQ ID NO: 26579 - DNA, 15 bp, Homo sapiens
gcctcccctggctgt

SEQ ID NO: 26580 - DNA, 15 bp, Homo sapiens
cctcccctggctgtc

SEQ ID NO: 26581 - DNA, 15 bp, Homo sapiens
ctcccctggctgtcc

SEQ ID NO: 26582 - DNA, 15 bp, Homo sapiens
tcccctggctgtcca

SEQ ID NO: 26583 - DNA, 15 bp, Homo sapiens
cccctggctgtccaa

SEQ ID NO: 26584 - DNA, 15 bp, Homo sapiens
ccctggctgtccaac

SEQ ID NO: 26585 - DNA, 15 bp, Homo sapiens
cctggctgtccaaca

SEQ ID NO: 26586 - DNA, 15 bp, Homo sapiens
ctggctgtccaacac

SEQ ID NO: 26587 - DNA, 15 bp, Homo sapiens
tggctgtccaacaca

SEQ ID NO: 26588 - DNA, 15 bp, Homo sapiens
ggctgtccaacacac

SEQ ID NO: 26589 - DNA, 15 bp, Homo sapiens
gctgtccaacacacc

SEQ ID NO: 26590 - DNA, 15 bp, Homo sapiens
ctgtccaacacaccc

SEQ ID NO: 26591 - DNA, 15 bp, Homo sapiens
tgtccaacacaccca

SEQ ID NO: 26592 - DNA, 15 bp, Homo sapiens
gtccaacacacccaa

SEQ ID NO: 26593 - DNA, 15 bp, Homo sapiens
tccaacacacccaag

SEQ ID NO: 26594 - DNA, 15 bp, Homo sapiens
ccaacacacccaagc

SEQ ID NO: 26595 - DNA, 15 bp, Homo sapiens
caacacacccaagcc

SEQ ID NO: 26596 - DNA, 15 bp, Homo sapiens
aacacacccaagcca

SEQ ID NO: 26597 - DNA, 15 bp, Homo sapiens
acacacccaagccat

SEQ ID NO: 26598 - DNA, 15 bp, Homo sapiens
cacacccaagccatt

SEQ ID NO: 26599 - DNA, 15 bp, Homo sapiens
acacccaagccattt

SEQ ID NO: 26600 - DNA, 15 bp, Homo sapiens
cacccaagccatttt

SEQ ID NO: 26601 - DNA, 15 bp, Homo sapiens
acccaagccattttt

SEQ ID NO: 26602 - DNA, 15 bp, Homo sapiens
cccaagccatttttg

SEQ ID NO: 26603 - DNA, 15 bp, Homo sapiens
ccaagccatttttgg

SEQ ID NO: 26604 - DNA, 15 bp, Homo sapiens
caagccatttttggg

SEQ ID NO: 26605 - DNA, 15 bp, Homo sapiens
aagccatttttgggt

SEQ ID NO: 26606 - DNA, 15 bp, Homo sapiens
agccatttttgggtc

SEQ ID NO: 26607 - DNA, 15 bp, Homo sapiens
gccatttttgggtct

SEQ ID NO: 26608 - DNA, 15 bp, Homo sapiens
ccatttttgggtctc

SEQ ID NO: 26609 - DNA, 15 bp, Homo sapiens
catttttgggtctca

SEQ ID NO: 26610 - DNA, 15 bp, Homo sapiens
atttttgggtctcag

SEQ ID NO: 26611 - DNA, 15 bp, Homo sapiens
tttttgggtctcaga

SEQ ID NO: 26612 - DNA, 15 bp, Homo sapiens
ttttgggtctcagat

SEQ ID NO: 26613 - DNA, 15 bp, Homo sapiens
tttgggtctcagatg

SEQ ID NO: 26614 - DNA, 15 bp, Homo sapiens
ttgggtctcagatgt

SEQ ID NO: 26615 - DNA, 15 bp, Homo sapiens
tgggtctcagatgtg

SEQ ID NO: 26616 - DNA, 15 bp, Homo sapiens
gggtctcagatgtgt

SEQ ID NO: 26617 - DNA, 15 bp, Homo sapiens
ggtctcagatgtgtc

SEQ ID NO: 26618 - DNA, 15 bp, Homo sapiens
gtctcagatgtgtcc

SEQ ID NO: 26619 - DNA, 15 bp, Homo sapiens
tctcagatgtgtccc

SEQ ID NO: 26620 - DNA, 15 bp, Homo sapiens
ctcagatgtgtccca

SEQ ID NO: 26621 - DNA, 15 bp, Homo sapiens
tcagatgtgtcccac

SEQ ID NO: 26622 - DNA, 15 bp, Homo sapiens
cagatgtgtcccacc

SEQ ID NO: 26623 - DNA, 15 bp, Homo sapiens
agatgtgtcccacca

SEQ ID NO: 26624 - DNA, 15 bp, Homo sapiens
gatgtgtcccaccaa

SEQ ID NO: 26625 - DNA, 15 bp, Homo sapiens
atgtgtcccaccaac

SEQ ID NO: 26626 - DNA, 15 bp, Homo sapiens
tgtgtcccaccaact

SEQ ID NO: 26627 - DNA, 15 bp, Homo sapiens
gtgtcccaccaactc

SEQ ID NO: 26628 - DNA, 15 bp, Homo sapiens
tgtcccaccaactca

SEQ ID NO: 26629 - DNA, 15 bp, Homo sapiens
gtcccaccaactcag

SEQ ID NO: 26630 - DNA, 15 bp, Homo sapiens
tcccaccaactcaga

SEQ ID NO: 26631 - DNA, 15 bp, Homo sapiens
cccaccaactcagaa

SEQ ID NO: 26632 - DNA, 15 bp, Homo sapiens
ccaccaactcagaag

SEQ ID NO: 26633 - DNA, 15 bp, Homo sapiens
caccaactcagaagc

SEQ ID NO: 26634 - DNA, 15 bp, Homo sapiens
accaactcagaagcc

SEQ ID NO: 26635 - DNA, 15 bp, Homo sapiens
ccaactcagaagcct

SEQ ID NO: 26636 - DNA, 15 bp, Homo sapiens
caactcagaagcctc

SEQ ID NO: 26637 - DNA, 15 bp, Homo sapiens
aactcagaagcctca

SEQ ID NO: 26638 - DNA, 15 bp, Homo sapiens
actcagaagcctcaa

SEQ ID NO: 26639 - DNA, 15 bp, Homo sapiens
ctcagaagcctcaac

SEQ ID NO: 26640 - DNA, 15 bp, Homo sapiens
tcagaagcctcaacc

SEQ ID NO: 26641 - DNA, 15 bp, Homo sapiens
cagaagcctcaacca

SEQ ID NO: 26642 - DNA, 15 bp, Homo sapiens
agaagcctcaaccag

SEQ ID NO: 26643 - DNA, 15 bp, Homo sapiens
gaagcctcaaccagc

SEQ ID NO: 26644 - DNA, 15 bp, Homo sapiens
aagcctcaaccagcg

SEQ ID NO: 26645 - DNA, 15 bp, Homo sapiens
agcctcaaccagcga

SEQ ID NO: 26646 - DNA, 15 bp, Homo sapiens
gcctcaaccagcgaa

SEQ ID NO: 26647 - DNA, 15 bp, Homo sapiens
cctcaaccagcgaaa

SEQ ID NO: 26648 - DNA, 15 bp, Homo sapiens
ctcaaccagcgaaag

SEQ ID NO: 26649 - DNA, 15 bp, Homo sapiens
tcaaccagcgaaagt

SEQ ID NO: 26650 - DNA, 15 bp, Homo sapiens
caaccagcgaaagtt

SEQ ID NO: 26651 - DNA, 15 bp, Homo sapiens
aaccagcgaaagttt

SEQ ID NO: 26652 - DNA, 15 bp, Homo sapiens
accagcgaaagtttt

SEQ ID NO: 26653 - DNA, 15 bp, Homo sapiens
ccagcgaaagttttg

SEQ ID NO: 26654 - DNA, 15 bp, Homo sapiens
cagcgaaagttttgt

SEQ ID NO: 26655 - DNA, 15 bp, Homo sapiens
agcgaaagttttgtt

SEQ ID NO: 26656 - DNA, 15 bp, Homo sapiens
gcgaaagttttgttt

SEQ ID NO: 26657 - DNA, 15 bp, Homo sapiens
cgaaagttttgtttt

SEQ ID NO: 26658 - DNA, 15 bp, Homo sapiens
gaaagttttgttttg

SEQ ID NO: 26659 - DNA, 15 bp, Homo sapiens
aaagttttgttttga

SEQ ID NO: 26660 - DNA, 15 bp, Homo sapiens
aagttttgttttgaa

SEQ ID NO: 26661 - DNA, 15 bp, Homo sapiens
agttttgttttgaac

SEQ ID NO: 26662 - DNA, 15 bp, Homo sapiens
gttttgttttgaact

SEQ ID NO: 26663 - DNA, 15 bp, Homo sapiens
ttttgttttgaacta

SEQ ID NO: 26664 - DNA, 15 bp, Homo sapiens
tttgttttgaactaa

SEQ ID NO: 26665 - DNA, 15 bp, Homo sapiens
ttgttttgaactaat

SEQ ID NO: 26666 - DNA, 15 bp, Homo sapiens
tgttttgaactaatg

SEQ ID NO: 26667 - DNA, 15 bp, Homo sapiens
gttttgaactaatgg

SEQ ID NO: 26668 - DNA, 15 bp, Homo sapiens
ttttgaactaatggt

SEQ ID NO: 26669 - DNA, 15 bp, Homo sapiens
tttgaactaatggtg

SEQ ID NO: 26670 - DNA, 15 bp, Homo sapiens
ttgaactaatggtgg

SEQ ID NO: 26671 - DNA, 15 bp, Homo sapiens
tgaactaatggtggg

SEQ ID NO: 26672 - DNA, 15 bp, Homo sapiens
gaactaatggtgggg

SEQ ID NO: 26673 - DNA, 15 bp, Homo sapiens
aactaatggtgggga

SEQ ID NO: 26674 - DNA, 15 bp, Homo sapiens
actaatggtggggag

SEQ ID NO: 26675 - DNA, 15 bp, Homo sapiens
ctaatggtggggagg

SEQ ID NO: 26676 - DNA, 15 bp, Homo sapiens
taatggtggggaggg

SEQ ID NO: 26677 - DNA, 15 bp, Homo sapiens
aatggtggggagggt

SEQ ID NO: 26678 - DNA, 15 bp, Homo sapiens
atggtggggagggtt

SEQ ID NO: 26679 - DNA, 15 bp, Homo sapiens
tggtggggagggttg

SEQ ID NO: 26680 - DNA, 15 bp, Homo sapiens
ggtggggagggttgg

SEQ ID NO: 26681 - DNA, 15 bp, Homo sapiens
gtggggagggttggg

SEQ ID NO: 26682 - DNA, 15 bp, Homo sapiens
tggggagggttgggt

SEQ ID NO: 26683 - DNA, 15 bp, Homo sapiens
ggggagggttgggtg

SEQ ID NO: 26684 - DNA, 15 bp, Homo sapiens
gggagggttgggtgt

SEQ ID NO: 26685 - DNA, 15 bp, Homo sapiens
ggagggttgggtgtt

SEQ ID NO: 26686 - DNA, 15 bp, Homo sapiens
gagggttgggtgttt

SEQ ID NO: 26687 - DNA, 15 bp, Homo sapiens
agggttgggtgtttt

SEQ ID NO: 26688 - DNA, 15 bp, Homo sapiens
gggttgggtgttttt

SEQ ID NO: 26689 - DNA, 15 bp, Homo sapiens
ggttgggtgtttttt

SEQ ID NO: 26690 - DNA, 15 bp, Homo sapiens
gttgggtgttttttt

SEQ ID NO: 26691 - DNA, 15 bp, Homo sapiens
ttgggtgtttttttt

SEQ ID NO: 26692 - DNA, 15 bp, Homo sapiens
tgggtgttttttttt

SEQ ID NO: 26693 - DNA, 15 bp, Homo sapiens
gggtgtttttttttt

SEQ ID NO: 26694 - DNA, 15 bp, Homo sapiens
ggtgttttttttttt

SEQ ID NO: 26695 - DNA, 15 bp, Homo sapiens
gtgtttttttttttt

SEQ ID NO: 26696 - DNA, 15 bp, Homo sapiens
tgttttttttttttt

SEQ ID NO: 26697 - DNA, 15 bp, Homo sapiens
gtttttttttttttt

SEQ ID NO: 26698 - DNA, 15 bp, Homo sapiens
ttttttttttttttt

SEQ ID NO: 26699 - DNA, 15 bp, Homo sapiens
tttttttttttttta

SEQ ID NO: 26700 - DNA, 15 bp, Homo sapiens
ttttttttttttaat

SEQ ID NO: 26701 - DNA, 15 bp, Homo sapiens
tttttttttttaatt

SEQ ID NO: 26702 - DNA, 15 bp, Homo sapiens
ttttttttttaattg

SEQ ID NO: 26703 - DNA, 15 bp, Homo sapiens
tttttttttaattgt

SEQ ID NO: 26704 - DNA, 15 bp, Homo sapiens
ttttttttaattgtt

SEQ ID NO: 26705 - DNA, 15 bp, Homo sapiens
tttttttaattgttg

SEQ ID NO: 26706 - DNA, 15 bp, Homo sapiens
ttttttaattgttgt

SEQ ID NO: 26707 - DNA, 15 bp, Homo sapiens
tttttaattgttgtt

SEQ ID NO: 26708 - DNA, 15 bp, Homo sapiens
ttttaattgttgttg

SEQ ID NO: 26709 - DNA, 15 bp, Homo sapiens
tttaattgttgttgg

SEQ ID NO: 26710 - DNA, 15 bp, Homo sapiens
ttaattgttgttggc

SEQ ID NO: 26711 - DNA, 15 bp, Homo sapiens
taattgttgttggct

SEQ ID NO: 26712 - DNA, 15 bp, Homo sapiens
aattgttgttggctg

SEQ ID NO: 26713 - DNA, 15 bp, Homo sapiens
attgttgttggctga

SEQ ID NO: 26714 - DNA, 15 bp, Homo sapiens
ttgttgttggctgat

SEQ ID NO: 26715 - DNA, 15 bp, Homo sapiens
tgttgttggctgatt

SEQ ID NO: 26716 - DNA, 15 bp, Homo sapiens
gttgttggctgattt

SEQ ID NO: 26717 - DNA, 15 bp, Homo sapiens
ttgttggctgatttt

SEQ ID NO: 26718 - DNA, 15 bp, Homo sapiens
tgttggctgattttt

SEQ ID NO: 26719 - DNA, 15 bp, Homo sapiens
gttggctgatttttt

SEQ ID NO: 26720 - DNA, 15 bp, Homo sapiens
ttggctgattttttt

SEQ ID NO: 26721 - DNA, 15 bp, Homo sapiens
tggctgattttttta

SEQ ID NO: 26722 - DNA, 15 bp, Homo sapiens
ggctgatttttttaa

SEQ ID NO: 26723 - DNA, 15 bp, Homo sapiens
gctgatttttttaag

SEQ ID NO: 26724 - DNA, 15 bp, Homo sapiens
ctgatttttttaagg

SEQ ID NO: 26725 - DNA, 15 bp, Homo sapiens
tgatttttttaaggt

SEQ ID NO: 26726 - DNA, 15 bp, Homo sapiens
gatttttttaaggtc

SEQ ID NO: 26727 - DNA, 15 bp, Homo sapiens
atttttttaaggtct

SEQ ID NO: 26728 - DNA, 15 bp, Homo sapiens
tttttttaaggtctt

SEQ ID NO: 26729 - DNA, 15 bp, Homo sapiens
ttttttaaggtcttt

SEQ ID NO: 26730 - DNA, 15 bp, Homo sapiens
tttttaaggtctttt

SEQ ID NO: 26731 - DNA, 15 bp, Homo sapiens
ttttaaggtcttttt

SEQ ID NO: 26732 - DNA, 15 bp, Homo sapiens
tttaaggtctttttt

SEQ ID NO: 26733 - DNA, 15 bp, Homo sapiens
ttaaggtcttttttt

SEQ ID NO: 26734 - DNA, 15 bp, Homo sapiens
taaggtctttttttt

SEQ ID NO: 26735 - DNA, 15 bp, Homo sapiens
aaggtcttttttttt

SEQ ID NO: 26736 - DNA, 15 bp, Homo sapiens
aggtctttttttttc

SEQ ID NO: 26737 - DNA, 15 bp, Homo sapiens
ggtctttttttttct

SEQ ID NO: 26738 - DNA, 15 bp, Homo sapiens
gtctttttttttcta

SEQ ID NO: 26739 - DNA, 15 bp, Homo sapiens
tctttttttttctat

SEQ ID NO: 26740 - DNA, 15 bp, Homo sapiens
ctttttttttctatt

SEQ ID NO: 26741 - DNA, 15 bp, Homo sapiens
tttttttttctattc

SEQ ID NO: 26742 - DNA, 15 bp, Homo sapiens
ttttttttctattct

SEQ ID NO: 26743 - DNA, 15 bp, Homo sapiens
tttttttctattctt

SEQ ID NO: 26744 - DNA, 15 bp, Homo sapiens
ttttttctattcttt

SEQ ID NO: 26745 - DNA, 15 bp, Homo sapiens
tttttctattctttt

SEQ ID NO: 26746 - DNA, 15 bp, Homo sapiens
ttttctattcttttt

SEQ ID NO: 26747 - DNA, 15 bp, Homo sapiens
tttctattctttttt

SEQ ID NO: 26748 - DNA, 15 bp, Homo sapiens
ttctattcttttttt

SEQ ID NO: 26749 - DNA, 15 bp, Homo sapiens
tctattctttttttt

SEQ ID NO: 26750 - DNA, 15 bp, Homo sapiens
ctattcttttttttt

SEQ ID NO: 26751 - DNA, 15 bp, Homo sapiens
tattctttttttttt

SEQ ID NO: 26752 - DNA, 15 bp, Homo sapiens
attcttttttttttt

SEQ ID NO: 26753 - DNA, 15 bp, Homo sapiens
ttctttttttttttt

SEQ ID NO: 26754 - DNA, 15 bp, Homo sapiens
tcttttttttttttt

SEQ ID NO: 26755 - DNA, 15 bp, Homo sapiens
ctttttttttttttt

SEQ ID NO: 26756 - DNA, 15 bp, Homo sapiens
ttttttttttttttc

SEQ ID NO: 26757 - DNA, 15 bp, Homo sapiens
tttttttttttttct

SEQ ID NO: 26758 - DNA, 15 bp, Homo sapiens
ttttttttttttctt

SEQ ID NO: 26759 - DNA, 15 bp, Homo sapiens
tttttttttttcttg

SEQ ID NO: 26760 - DNA, 15 bp, Homo sapiens
ttttttttttcttgt

SEQ ID NO: 26761 - DNA, 15 bp, Homo sapiens
tttttttttcttgtc

SEQ ID NO: 26762 - DNA, 15 bp, Homo sapiens
ttttttttcttgtct

SEQ ID NO: 26763 - DNA, 15 bp, Homo sapiens
tttttttcttgtctt

SEQ ID NO: 26764 - DNA, 15 bp, Homo sapiens
ttttttcttgtcttc

SEQ ID NO: 26765 - DNA, 15 bp, Homo sapiens
tttttcttgtcttca

SEQ ID NO: 26766 - DNA, 15 bp, Homo sapiens
ttttcttgtcttcac

SEQ ID NO: 26767 - DNA, 15 bp, Homo sapiens
tttcttgtcttcaca

SEQ ID NO: 26768 - DNA, 15 bp, Homo sapiens
ttcttgtcttcacaa

SEQ ID NO: 26769 - DNA, 15 bp, Homo sapiens
tcttgtcttcacaaa

SEQ ID NO: 26770 - DNA, 15 bp, Homo sapiens
cttgtcttcacaaag

SEQ ID NO: 26771 - DNA, 15 bp, Homo sapiens
ttgtcttcacaaagc

SEQ ID NO: 26772 - DNA, 15 bp, Homo sapiens
tgtcttcacaaagcc

SEQ ID NO: 26773 - DNA, 15 bp, Homo sapiens
gtcttcacaaagcca

SEQ ID NO: 26774 - DNA, 15 bp, Homo sapiens
tcttcacaaagccag

SEQ ID NO: 26775 - DNA, 15 bp, Homo sapiens
cttcacaaagccagg

SEQ ID NO: 26776 - DNA, 15 bp, Homo sapiens
ttcacaaagccaggc

SEQ ID NO: 26777 - DNA, 15 bp, Homo sapiens
tcacaaagccaggcc

SEQ ID NO: 26778 - DNA, 15 bp, Homo sapiens
cacaaagccaggcca

SEQ ID NO: 26779 - DNA, 15 bp, Homo sapiens
acaaagccaggccat

SEQ ID NO: 26780 - DNA, 15 bp, Homo sapiens
caaagccaggccatc

SEQ ID NO: 26781 - DNA, 15 bp, Homo sapiens
aaagccaggccatca

SEQ ID NO: 26782 - DNA, 15 bp, Homo sapiens
aagccaggccatcag

SEQ ID NO: 26783 - DNA, 15 bp, Homo sapiens
agccaggccatcagg

SEQ ID NO: 26784 - DNA, 15 bp, Homo sapiens
gccaggccatcaggc

SEQ ID NO: 26785 - DNA, 15 bp, Homo sapiens
ccaggccatcaggcc

SEQ ID NO: 26786 - DNA, 15 bp, Homo sapiens
caggccatcaggccc

SEQ ID NO: 26787 - DNA, 15 bp, Homo sapiens
aggccatcaggccca

SEQ ID NO: 26788 - DNA, 15 bp, Homo sapiens
ggccatcaggcccat

SEQ ID NO: 26789 - DNA, 15 bp, Homo sapiens
gccatcaggcccatt

SEQ ID NO: 26790 - DNA, 15 bp, Homo sapiens
ccatcaggcccattc

SEQ ID NO: 26791 - DNA, 15 bp, Homo sapiens
catcaggcccattct

SEQ ID NO: 26792 - DNA, 15 bp, Homo sapiens
atcaggcccattctg

SEQ ID NO: 26793 - DNA, 15 bp, Homo sapiens
tcaggcccattctgg

SEQ ID NO: 26794 - DNA, 15 bp, Homo sapiens
caggcccattctggg

SEQ ID NO: 26795 - DNA, 15 bp, Homo sapiens
aggcccattctgggc

SEQ ID NO: 26796 - DNA, 15 bp, Homo sapiens
ggcccattctgggct

SEQ ID NO: 26797 - DNA, 15 bp, Homo sapiens
gcccattctgggctt

SEQ ID NO: 26798 - DNA, 15 bp, Homo sapiens
cccattctgggcttt

SEQ ID NO: 26799 - DNA, 15 bp, Homo sapiens
ccattctgggctttt

SEQ ID NO: 26800 - DNA, 15 bp, Homo sapiens
cattctgggcttttc

SEQ ID NO: 26801 - DNA, 15 bp, Homo sapiens
attctgggcttttcc

SEQ ID NO: 26802 - DNA, 15 bp, Homo sapiens
ttctgggcttttcca

SEQ ID NO: 26803 - DNA, 15 bp, Homo sapiens
tctgggcttttccag

SEQ ID NO: 26804 - DNA, 15 bp, Homo sapiens
ctgggcttttccaga

SEQ ID NO: 26805 - DNA, 15 bp, Homo sapiens
tgggcttttccagaa

SEQ ID NO: 26806 - DNA, 15 bp, Homo sapiens
gggcttttccagaag

SEQ ID NO: 26807 - DNA, 15 bp, Homo sapiens
ggcttttccagaagg

SEQ ID NO: 26808 - DNA, 15 bp, Homo sapiens
gcttttccagaaggg

SEQ ID NO: 26809 - DNA, 15 bp, Homo sapiens
cttttccagaagggt

SEQ ID NO: 26810 - DNA, 15 bp, Homo sapiens
ttttccagaagggtg

SEQ ID NO: 26811 - DNA, 15 bp, Homo sapiens
tttccagaagggtga

SEQ ID NO: 26812 - DNA, 15 bp, Homo sapiens
ttccagaagggtgag

SEQ ID NO: 26813 - DNA, 15 bp, Homo sapiens
tccagaagggtgagt

SEQ ID NO: 26814 - DNA, 15 bp, Homo sapiens
ccagaagggtgagtc

SEQ ID NO: 26815 - DNA, 15 bp, Homo sapiens
cagaagggtgagtct

SEQ ID NO: 26816 - DNA, 15 bp, Homo sapiens
agaagggtgagtctg

SEQ ID NO: 26817 - DNA, 15 bp, Homo sapiens
gaagggtgagtctga

SEQ ID NO: 26818 - DNA, 15 bp, Homo sapiens
aagggtgagtctgag

SEQ ID NO: 26819 - DNA, 15 bp, Homo sapiens
agggtgagtctgagt

SEQ ID NO: 26820 - DNA, 15 bp, Homo sapiens
gggtgagtctgagtt

SEQ ID NO: 26821 - DNA, 15 bp, Homo sapiens
ggtgagtctgagttg

SEQ ID NO: 26822 - DNA, 15 bp, Homo sapiens
gtgagtctgagttga

SEQ ID NO: 26823 - DNA, 15 bp, Homo sapiens
tgagtctgagttgag

SEQ ID NO: 26824 - DNA, 15 bp, Homo sapiens
gagtctgagttgagg

SEQ ID NO: 26825 - DNA, 15 bp, Homo sapiens
agtctgagttgagga

SEQ ID NO: 26826 - DNA, 15 bp, Homo sapiens
gtctgagttgaggaa

SEQ ID NO: 26827 - DNA, 15 bp, Homo sapiens
tctgagttgaggaaa

SEQ ID NO: 26828 - DNA, 15 bp, Homo sapiens
ctgagttgaggaaag

SEQ ID NO: 26829 - DNA, 15 bp, Homo sapiens
tgagttgaggaaaga

SEQ ID NO: 26830 - DNA, 15 bp, Homo sapiens
gagttgaggaaagag

SEQ ID NO: 26831 - DNA, 15 bp, Homo sapiens
agttgaggaaagagg

SEQ ID NO: 26832 - DNA, 15 bp, Homo sapiens
gttgaggaaagaggc

SEQ ID NO: 26833 - DNA, 15 bp, Homo sapiens
ttgaggaaagaggcc

SEQ ID NO: 26834 - DNA, 15 bp, Homo sapiens
tgaggaaagaggccc

SEQ ID NO: 26835 - DNA, 15 bp, Homo sapiens
gaggaaagaggccct

SEQ ID NO: 26836 - DNA, 15 bp, Homo sapiens
aggaaagaggccctc

SEQ ID NO: 26837 - DNA, 15 bp, Homo sapiens
ggaaagaggccctcc

SEQ ID NO: 26838 - DNA, 15 bp, Homo sapiens
gaaagaggccctcct

SEQ ID NO: 26839 - DNA, 15 bp, Homo sapiens
aaagaggccctcctt

SEQ ID NO: 26840 - DNA, 15 bp, Homo sapiens
aagaggccctccttt

SEQ ID NO: 26841 - DNA, 15 bp, Homo sapiens
agaggccctcctttt

SEQ ID NO: 26842 - DNA, 15 bp, Homo sapiens
gaggccctccttttt

SEQ ID NO: 26843 - DNA, 15 bp, Homo sapiens
aggccctccttttta

SEQ ID NO: 26844 - DNA, 15 bp, Homo sapiens
ggccctcctttttac

SEQ ID NO: 26845 - DNA, 15 bp, Homo sapiens
gccctcctttttacg

SEQ ID NO: 26846 - DNA, 15 bp, Homo sapiens
ccctcctttttacga

SEQ ID NO: 26847 - DNA, 15 bp, Homo sapiens
cctcctttttacgag

SEQ ID NO: 26848 - DNA, 15 bp, Homo sapiens
ctcctttttacgagg

SEQ ID NO: 26849 - DNA, 15 bp, Homo sapiens
tcctttttacgaggg

SEQ ID NO: 26850 - DNA, 15 bp, Homo sapiens
cctttttacgagggc

SEQ ID NO: 26851 - DNA, 15 bp, Homo sapiens
ctttttacgagggct

SEQ ID NO: 26852 - DNA, 15 bp, Homo sapiens
tttttacgagggctt

SEQ ID NO: 26853 - DNA, 15 bp, Homo sapiens
ttttacgagggctta

SEQ ID NO: 26854 - DNA, 15 bp, Homo sapiens
tttacgagggcttag

SEQ ID NO: 26855 - DNA, 15 bp, Homo sapiens
ttacgagggcttaga

SEQ ID NO: 26856 - DNA, 15 bp, Homo sapiens
tacgagggcttagaa

SEQ ID NO: 26857 - DNA, 15 bp, Homo sapiens
acgagggcttagaag

SEQ ID NO: 26858 - DNA, 15 bp, Homo sapiens
cgagggcttagaagg

SEQ ID NO: 26859 - DNA, 15 bp, Homo sapiens
gagggcttagaaggt

SEQ ID NO: 26860 - DNA, 15 bp, Homo sapiens
agggcttagaaggtt

SEQ ID NO: 26861 - DNA, 15 bp, Homo sapiens
gggcttagaaggttg

SEQ ID NO: 26862 - DNA, 15 bp, Homo sapiens
ggcttagaaggttgg

SEQ ID NO: 26863 - DNA, 15 bp, Homo sapiens
gcttagaaggttggg

SEQ ID NO: 26864 - DNA, 15 bp, Homo sapiens
cttagaaggttgggg

SEQ ID NO: 26865 - DNA, 15 bp, Homo sapiens
ttagaaggttggggg

SEQ ID NO: 26866 - DNA, 15 bp, Homo sapiens
tagaaggttggggga

SEQ ID NO: 26867 - DNA, 15 bp, Homo sapiens
agaaggttgggggag

SEQ ID NO: 26868 - DNA, 15 bp, Homo sapiens
gaaggttgggggagg

SEQ ID NO: 26869 - DNA, 15 bp, Homo sapiens
aaggttgggggagga

SEQ ID NO: 26870 - DNA, 15 bp, Homo sapiens
aggttgggggaggaa

SEQ ID NO: 26871 - DNA, 15 bp, Homo sapiens
ggttgggggaggaaa

SEQ ID NO: 26872 - DNA, 15 bp, Homo sapiens
gttgggggaggaaag

SEQ ID NO: 26873 - DNA, 15 bp, Homo sapiens
ttgggggaggaaagg

SEQ ID NO: 26874 - DNA, 15 bp, Homo sapiens
tgggggaggaaaggg

SEQ ID NO: 26875 - DNA, 15 bp, Homo sapiens
gggggaggaaagggg

SEQ ID NO: 26876 - DNA, 15 bp, Homo sapiens
ggggaggaaaggggg

SEQ ID NO: 26877 - DNA, 15 bp, Homo sapiens
gggaggaaagggggc

SEQ ID NO: 26878 - DNA, 15 bp, Homo sapiens
ggaggaaagggggca

SEQ ID NO: 26879 - DNA, 15 bp, Homo sapiens
gaggaaagggggcaa

SEQ ID NO: 26880 - DNA, 15 bp, Homo sapiens
aggaaagggggcaaa

SEQ ID NO: 26881 - DNA, 15 bp, Homo sapiens
ggaaagggggcaaag

SEQ ID NO: 26882 - DNA, 15 bp, Homo sapiens
gaaagggggcaaagg

SEQ ID NO: 26883 - DNA, 15 bp, Homo sapiens
aaagggggcaaaggg

SEQ ID NO: 26884 - DNA, 15 bp, Homo sapiens
aagggggcaaagggg

SEQ ID NO: 26885 - DNA, 15 bp, Homo sapiens
agggggcaaaggggt

SEQ ID NO: 26886 - DNA, 15 bp, Homo sapiens
gggggcaaaggggtg

SEQ ID NO: 26887 - DNA, 15 bp, Homo sapiens
ggggcaaaggggtga

SEQ ID NO: 26888 - DNA, 15 bp, Homo sapiens
gggcaaaggggtgaa

SEQ ID NO: 26889 - DNA, 15 bp, Homo sapiens
ggcaaaggggtgaag

SEQ ID NO: 26890 - DNA, 15 bp, Homo sapiens
gcaaaggggtgaagg

SEQ ID NO: 26891 - DNA, 15 bp, Homo sapiens
caaaggggtgaaggg

SEQ ID NO: 26892 - DNA, 15 bp, Homo sapiens
aaaggggtgaagggg

SEQ ID NO: 26893 - DNA, 15 bp, Homo sapiens
aaggggtgaaggggt

SEQ ID NO: 26894 - DNA, 15 bp, Homo sapiens
aggggtgaaggggtg

SEQ ID NO: 26895 - DNA, 15 bp, Homo sapiens
ggggtgaaggggtgg

SEQ ID NO: 26896 - DNA, 15 bp, Homo sapiens
gggtgaaggggtgga

SEQ ID NO: 26897 - DNA, 15 bp, Homo sapiens
ggtgaaggggtggat

SEQ ID NO: 26898 - DNA, 15 bp, Homo sapiens
gtgaaggggtggatc

SEQ ID NO: 26899 - DNA, 15 bp, Homo sapiens
tgaaggggtggatct

SEQ ID NO: 26900 - DNA, 15 bp, Homo sapiens
gaaggggtggatctt

SEQ ID NO: 26901 - DNA, 15 bp, Homo sapiens
aaggggtggatcttg

SEQ ID NO: 26902 - DNA, 15 bp, Homo sapiens
aggggtggatcttgg

SEQ ID NO: 26903 - DNA, 15 bp, Homo sapiens
ggggtggatcttggc

SEQ ID NO: 26904 - DNA, 15 bp, Homo sapiens
gggtggatcttggcc

SEQ ID NO: 26905 - DNA, 15 bp, Homo sapiens
ggtggatcttggcca

SEQ ID NO: 26906 - DNA, 15 bp, Homo sapiens
gtggatcttggccac

SEQ ID NO: 26907 - DNA, 15 bp, Homo sapiens
tggatcttggccacc

SEQ ID NO: 26908 - DNA, 15 bp, Homo sapiens
ggatcttggccacca

SEQ ID NO: 26909 - DNA, 15 bp, Homo sapiens
gatcttggccaccag

SEQ ID NO: 26910 - DNA, 15 bp, Homo sapiens
atcttggccaccaga

SEQ ID NO: 26911 - DNA, 15 bp, Homo sapiens
tcttggccaccagat

SEQ ID NO: 26912 - DNA, 15 bp, Homo sapiens
cttggccaccagatt

SEQ ID NO: 26913 - DNA, 15 bp, Homo sapiens
ttggccaccagattt

SEQ ID NO: 26914 - DNA, 15 bp, Homo sapiens
tggccaccagatttg

SEQ ID NO: 26915 - DNA, 15 bp, Homo sapiens
ggccaccagatttgt

SEQ ID NO: 26916 - DNA, 15 bp, Homo sapiens
gccaccagatttgta

SEQ ID NO: 26917 - DNA, 15 bp, Homo sapiens
ccaccagatttgtac

SEQ ID NO: 26918 - DNA, 15 bp, Homo sapiens
caccagatttgtacc

SEQ ID NO: 26919 - DNA, 15 bp, Homo sapiens
accagatttgtacca

SEQ ID NO: 26920 - DNA, 15 bp, Homo sapiens
ccagatttgtaccat

SEQ ID NO: 26921 - DNA, 15 bp, Homo sapiens
cagatttgtaccatg

SEQ ID NO: 26922 - DNA, 15 bp, Homo sapiens
agatttgtaccatgt

SEQ ID NO: 26923 - DNA, 15 bp, Homo sapiens
gatttgtaccatgta

SEQ ID NO: 26924 - DNA, 15 bp, Homo sapiens
atttgtaccatgtaa

SEQ ID NO: 26925 - DNA, 15 bp, Homo sapiens
tttgtaccatgtaaa

SEQ ID NO: 26926 - DNA, 15 bp, Homo sapiens
ttgtaccatgtaaat

SEQ ID NO: 26927 - DNA, 15 bp, Homo sapiens
tgtaccatgtaaata

SEQ ID NO: 26928 - DNA, 15 bp, Homo sapiens
gtaccatgtaaataa

SEQ ID NO: 26929 - DNA, 15 bp, Homo sapiens
taccatgtaaataaa

SEQ ID NO: 26930 - DNA, 15 bp, Homo sapiens
accatgtaaataaaa

SEQ ID NO: 26931 - DNA, 15 bp, Homo sapiens
ccatgtaaataaaaa

SEQ ID NO: 26932 - DNA, 15 bp, Homo sapiens
catgtaaataaaaag

SEQ ID NO: 26933 - DNA, 15 bp, Homo sapiens
atgtaaataaaaagc

SEQ ID NO: 26934 - DNA, 15 bp, Homo sapiens
tgtaaataaaaagcc

SEQ ID NO: 26935 - DNA, 15 bp, Homo sapiens
gtaaataaaaagccc

SEQ ID NO: 26936 - DNA, 15 bp, Homo sapiens
taaataaaaagccct

SEQ ID NO: 26937 - DNA, 15 bp, Homo sapiens
aaataaaaagccctt

SEQ ID NO: 26938 - DNA, 15 bp, Homo sapiens
aataaaaagcccttt

SEQ ID NO: 26939 - DNA, 15 bp, Homo sapiens
ataaaaagccctttc

SEQ ID NO: 26940 - DNA, 15 bp, Homo sapiens
taaaaagccctttcc

SEQ ID NO: 26941 - DNA, 15 bp, Homo sapiens
aaaaagccctttcca

SEQ ID NO: 26942 - DNA, 15 bp, Homo sapiens
aaaagccctttccaa

SEQ ID NO: 26943 - DNA, 15 bp, Homo sapiens
aaagccctttccaat

SEQ ID NO: 26944 - DNA, 15 bp, Homo sapiens
aagccctttccaatt

SEQ ID NO: 26945 - DNA, 15 bp, Homo sapiens
agccctttccaattt

SEQ ID NO: 26946 - DNA, 15 bp, Homo sapiens
gccctttccaatttc

SEQ ID NO: 26947 - DNA, 15 bp, Homo sapiens
ccctttccaatttct

SEQ ID NO: 26948 - DNA, 15 bp, Homo sapiens
cctttccaatttctc

SEQ ID NO: 26949 - DNA, 15 bp, Homo sapiens
ctttccaatttctct

SEQ ID NO: 26950 - DNA, 15 bp, Homo sapiens
tttccaatttctctt

SEQ ID NO: 26951 - DNA, 15 bp, Homo sapiens
ttccaatttctcttc

SEQ ID NO: 26952 - DNA, 15 bp, Homo sapiens
tccaatttctcttcc

SEQ ID NO: 26953 - DNA, 15 bp, Homo sapiens
ccaatttctcttccc

SEQ ID NO: 26954 - DNA, 15 bp, Homo sapiens
caatttctcttcccc

SEQ ID NO: 26955 - DNA, 15 bp, Homo sapiens
aatttctcttcccca

SEQ ID NO: 26956 - DNA, 15 bp, Homo sapiens
atttctcttccccag

SEQ ID NO: 26957 - DNA, 15 bp, Homo sapiens
tttctcttccccagg

SEQ ID NO: 26958 - DNA, 15 bp, Homo sapiens
ttctcttccccaggt

SEQ ID NO: 26959 - DNA, 15 bp, Homo sapiens
tctcttccccaggtc

SEQ ID NO: 26960 - DNA, 15 bp, Homo sapiens
ctcttccccaggtct

SEQ ID NO: 26961 - DNA, 15 bp, Homo sapiens
tcttccccaggtctg

SEQ ID NO: 26962 - DNA, 15 bp, Homo sapiens
cttccccaggtctga

SEQ ID NO: 26963 - DNA, 15 bp, Homo sapiens
ttccccaggtctgaa

SEQ ID NO: 26964 - DNA, 15 bp, Homo sapiens
tccccaggtctgaag

SEQ ID NO: 26965 - DNA, 15 bp, Homo sapiens
ccccaggtctgaagc

SEQ ID NO: 26966 - DNA, 15 bp, Homo sapiens
cccaggtctgaagcc

SEQ ID NO: 26967 - DNA, 15 bp, Homo sapiens
ccaggtctgaagcca

SEQ ID NO: 26968 - DNA, 15 bp, Homo sapiens
caggtctgaagccag

SEQ ID NO: 26969 - DNA, 15 bp, Homo sapiens
aggtctgaagccagt

SEQ ID NO: 26970 - DNA, 15 bp, Homo sapiens
ggtctgaagccagtc

SEQ ID NO: 26971 - DNA, 15 bp, Homo sapiens
gtctgaagccagtct

SEQ ID NO: 26972 - DNA, 15 bp, Homo sapiens
tctgaagccagtctt

SEQ ID NO: 26973 - DNA, 15 bp, Homo sapiens
ctgaagccagtcttg

SEQ ID NO: 26974 - DNA, 15 bp, Homo sapiens
tgaagccagtcttgt

SEQ ID NO: 26975 - DNA, 15 bp, Homo sapiens
gaagccagtcttgta

SEQ ID NO: 26976 - DNA, 15 bp, Homo sapiens
aagccagtcttgtag

SEQ ID NO: 26977 - DNA, 15 bp, Homo sapiens
agccagtcttgtaga

SEQ ID NO: 26978 - DNA, 15 bp, Homo sapiens
gccagtcttgtagag

SEQ ID NO: 26979 - DNA, 15 bp, Homo sapiens
ccagtcttgtagagg

SEQ ID NO: 26980 - DNA, 15 bp, Homo sapiens
cagtcttgtagaggg

SEQ ID NO: 26981 - DNA, 15 bp, Homo sapiens
agtcttgtagagggc

SEQ ID NO: 26982 - DNA, 15 bp, Homo sapiens
gtcttgtagagggct

SEQ ID NO: 26983 - DNA, 15 bp, Homo sapiens
tcttgtagagggctg

SEQ ID NO: 26984 - DNA, 15 bp, Homo sapiens
cttgtagagggctgg

SEQ ID NO: 26985 - DNA, 15 bp, Homo sapiens
ttgtagagggctgga

SEQ ID NO: 26986 - DNA, 15 bp, Homo sapiens
tgtagagggctggag

SEQ ID NO: 26987 - DNA, 15 bp, Homo sapiens
gtagagggctggagt

SEQ ID NO: 26988 - DNA, 15 bp, Homo sapiens
tagagggctggagtg

SEQ ID NO: 26989 - DNA, 15 bp, Homo sapiens
agagggctggagtgg

SEQ ID NO: 26990 - DNA, 15 bp, Homo sapiens
gagggctggagtggt

SEQ ID NO: 26991 - DNA, 15 bp, Homo sapiens
agggctggagtggtt

SEQ ID NO: 26992 - DNA, 15 bp, Homo sapiens
gggctggagtggttg

SEQ ID NO: 26993 - DNA, 15 bp, Homo sapiens
ggctggagtggttgt

SEQ ID NO: 26994 - DNA, 15 bp, Homo sapiens
gctggagtggttgtt

SEQ ID NO: 26995 - DNA, 15 bp, Homo sapiens
ctggagtggttgttg

SEQ ID NO: 26996 - DNA, 15 bp, Homo sapiens
tggagtggttgttgg

SEQ ID NO: 26997 - DNA, 15 bp, Homo sapiens
ggagtggttgttgga

SEQ ID NO: 26998 - DNA, 15 bp, Homo sapiens
gagtggttgttggac

SEQ ID NO: 26999 - DNA, 15 bp, Homo sapiens
agtggttgttggacg

SEQ ID NO: 27000 - DNA, 15 bp, Homo sapiens
gtggttgttggacga

SEQ ID NO: 27001 - DNA, 15 bp, Homo sapiens
tggttgttggacgac

SEQ ID NO: 27002 - DNA, 15 bp, Homo sapiens
ggttgttggacgact

SEQ ID NO: 27003 - DNA, 15 bp, Homo sapiens
gttgttggacgacta

SEQ ID NO: 27004 - DNA, 15 bp, Homo sapiens
ttgttggacgactag

SEQ ID NO: 27005 - DNA, 15 bp, Homo sapiens
tgttggacgactaga

SEQ ID NO: 27006 - DNA, 15 bp, Homo sapiens
gttggacgactagaa

SEQ ID NO: 27007 - DNA, 15 bp, Homo sapiens
ttggacgactagaac

SEQ ID NO: 27008 - DNA, 15 bp, Homo sapiens
tggacgactagaacc

SEQ ID NO: 27009 - DNA, 15 bp, Homo sapiens
ggacgactagaaccc

SEQ ID NO: 27010 - DNA, 15 bp, Homo sapiens
gacgactagaaccct

SEQ ID NO: 27011 - DNA, 15 bp, Homo sapiens
acgactagaaccctg

SEQ ID NO: 27012 - DNA, 15 bp, Homo sapiens
cgactagaaccctgg

SEQ ID NO: 27013 - DNA, 15 bp, Homo sapiens
gactagaaccctggg

SEQ ID NO: 27014 - DNA, 15 bp, Homo sapiens
actagaaccctgggc

SEQ ID NO: 27015 - DNA, 15 bp, Homo sapiens
ctagaaccctgggct

SEQ ID NO: 27016 - DNA, 15 bp, Homo sapiens
tagaaccctgggctt

SEQ ID NO: 27017 - DNA, 15 bp, Homo sapiens
agaaccctgggcttt

SEQ ID NO: 27018 - DNA, 15 bp, Homo sapiens
gaaccctgggctttg

SEQ ID NO: 27019 - DNA, 15 bp, Homo sapiens
aaccctgggctttgc

SEQ ID NO: 27020 - DNA, 15 bp, Homo sapiens
accctgggctttgca

SEQ ID NO: 27021 - DNA, 15 bp, Homo sapiens
ccctgggctttgcag

SEQ ID NO: 27022 - DNA, 15 bp, Homo sapiens
cctgggctttgcagg

SEQ ID NO: 27023 - DNA, 15 bp, Homo sapiens
ctgggctttgcaggg

SEQ ID NO: 27024 - DNA, 15 bp, Homo sapiens
tgggctttgcagggt

SEQ ID NO: 27025 - DNA, 15 bp, Homo sapiens
gggctttgcagggtg

SEQ ID NO: 27026 - DNA, 15 bp, Homo sapiens
ggctttgcagggtgc

SEQ ID NO: 27027 - DNA, 15 bp, Homo sapiens
gctttgcagggtgct

SEQ ID NO: 27028 - DNA, 15 bp, Homo sapiens
ctttgcagggtgctg

SEQ ID NO: 27029 - DNA, 15 bp, Homo sapiens
tttgcagggtgctgg

SEQ ID NO: 27030 - DNA, 15 bp, Homo sapiens
ttgcagggtgctggg

SEQ ID NO: 27031 - DNA, 15 bp, Homo sapiens
tgcagggtgctggga

SEQ ID NO: 27032 - DNA, 15 bp, Homo sapiens
gcagggtgctgggag

SEQ ID NO: 27033 - DNA, 15 bp, Homo sapiens
cagggtgctgggagc

SEQ ID NO: 27034 - DNA, 15 bp, Homo sapiens
agggtgctgggagct

SEQ ID NO: 27035 - DNA, 15 bp, Homo sapiens
gggtgctgggagctg

SEQ ID NO: 27036 - DNA, 15 bp, Homo sapiens
ggtgctgggagctgg

SEQ ID NO: 27037 - DNA, 15 bp, Homo sapiens
gtgctgggagctgga

SEQ ID NO: 27038 - DNA, 15 bp, Homo sapiens
tgctgggagctggaa

SEQ ID NO: 27039 - DNA, 15 bp, Homo sapiens
gctgggagctggaag

SEQ ID NO: 27040 - DNA, 15 bp, Homo sapiens
ctgggagctggaagt

SEQ ID NO: 27041 - DNA, 15 bp, Homo sapiens
tgggagctggaagtc

SEQ ID NO: 27042 - DNA, 15 bp, Homo sapiens
gggagctggaagtct

SEQ ID NO: 27043 - DNA, 15 bp, Homo sapiens
ggagctggaagtctt

SEQ ID NO: 27044 - DNA, 15 bp, Homo sapiens
gagctggaagtcttc

SEQ ID NO: 27045 - DNA, 15 bp, Homo sapiens
agctggaagtcttca

SEQ ID NO: 27046 - DNA, 15 bp, Homo sapiens
gctggaagtcttcac

SEQ ID NO: 27047 - DNA, 15 bp, Homo sapiens
ctggaagtcttcacc

SEQ ID NO: 27048 - DNA, 15 bp, Homo sapiens
tggaagtcttcacca

SEQ ID NO: 27049 - DNA, 15 bp, Homo sapiens
ggaagtcttcaccat

SEQ ID NO: 27050 - DNA, 15 bp, Homo sapiens
gaagtcttcaccatg

SEQ ID NO: 27051 - DNA, 15 bp, Homo sapiens
aagtcttcaccatgg

SEQ ID NO: 27052 - DNA, 15 bp, Homo sapiens
agtcttcaccatggc

SEQ ID NO: 27053 - DNA, 15 bp, Homo sapiens
gtcttcaccatggcc

SEQ ID NO: 27054 - DNA, 15 bp, Homo sapiens
tcttcaccatggcct

SEQ ID NO: 27055 - DNA, 15 bp, Homo sapiens
cttcaccatggcctg

SEQ ID NO: 27056 - DNA, 15 bp, Homo sapiens
ttcaccatggcctgt

SEQ ID NO: 27057 - DNA, 15 bp, Homo sapiens
tcaccatggcctgtc

SEQ ID NO: 27058 - DNA, 15 bp, Homo sapiens
caccatggcctgtca

SEQ ID NO: 27059 - DNA, 15 bp, Homo sapiens
accatggcctgtcag

SEQ ID NO: 27060 - DNA, 15 bp, Homo sapiens
ccatggcctgtcagg

SEQ ID NO: 27061 - DNA, 15 bp, Homo sapiens
catggcctgtcagga

SEQ ID NO: 27062 - DNA, 15 bp, Homo sapiens
atggcctgtcaggag

SEQ ID NO: 27063 - DNA, 15 bp, Homo sapiens
tggcctgtcaggaga

SEQ ID NO: 27064 - DNA, 15 bp, Homo sapiens
ggcctgtcaggagaa

SEQ ID NO: 27065 - DNA, 15 bp, Homo sapiens
gcctgtcaggagaag

SEQ ID NO: 27066 - DNA, 15 bp, Homo sapiens
cctgtcaggagaagc

SEQ ID NO: 27067 - DNA, 15 bp, Homo sapiens
ctgtcaggagaagcc

SEQ ID NO: 27068 - DNA, 15 bp, Homo sapiens
tgtcaggagaagccc

SEQ ID NO: 27069 - DNA, 15 bp, Homo sapiens
gtcaggagaagcccc

SEQ ID NO: 27070 - DNA, 15 bp, Homo sapiens
tcaggagaagcccct

SEQ ID NO: 27071 - DNA, 15 bp, Homo sapiens
caggagaagcccctg

SEQ ID NO: 27072 - DNA, 15 bp, Homo sapiens
aggagaagcccctgg

SEQ ID NO: 27073 - DNA, 15 bp, Homo sapiens
ggagaagcccctggg

SEQ ID NO: 27074 - DNA, 15 bp, Homo sapiens
gagaagcccctgggg

SEQ ID NO: 27075 - DNA, 15 bp, Homo sapiens
agaagcccctggggg

SEQ ID NO: 27076 - DNA, 15 bp, Homo sapiens
gaagcccctgggggc

SEQ ID NO: 27077 - DNA, 15 bp, Homo sapiens
aagcccctgggggct

SEQ ID NO: 27078 - DNA, 15 bp, Homo sapiens
agcccctgggggctg

SEQ ID NO: 27079 - DNA, 15 bp, Homo sapiens
gcccctgggggctgg

SEQ ID NO: 27080 - DNA, 15 bp, Homo sapiens
cccctgggggctggt

SEQ ID NO: 27081 - DNA, 15 bp, Homo sapiens
ccctgggggctggtc

SEQ ID NO: 27082 - DNA, 15 bp, Homo sapiens
cctgggggctggtct

SEQ ID NO: 27083 - DNA, 15 bp, Homo sapiens
ctgggggctggtcta

SEQ ID NO: 27084 - DNA, 15 bp, Homo sapiens
tgggggctggtctac

SEQ ID NO: 27085 - DNA, 15 bp, Homo sapiens
gggggctggtctacc

SEQ ID NO: 27086 - DNA, 15 bp, Homo sapiens
ggggctggtctacca

SEQ ID NO: 27087 - DNA, 15 bp, Homo sapiens
gggctggtctaccat

SEQ ID NO: 27088 - DNA, 15 bp, Homo sapiens
ggctggtctaccatg

SEQ ID NO: 27089 - DNA, 15 bp, Homo sapiens
gctggtctaccatgc

SEQ ID NO: 27090 - DNA, 15 bp, Homo sapiens
ctggtctaccatgct

SEQ ID NO: 27091 - DNA, 15 bp, Homo sapiens
tggtctaccatgctg

SEQ ID NO: 27092 - DNA, 15 bp, Homo sapiens
ggtctaccatgctga

SEQ ID NO: 27093 - DNA, 15 bp, Homo sapiens
gtctaccatgctgac

SEQ ID NO: 27094 - DNA, 15 bp, Homo sapiens
tctaccatgctgacc

SEQ ID NO: 27095 - DNA, 15 bp, Homo sapiens
ctaccatgctgacca

SEQ ID NO: 27096 - DNA, 15 bp, Homo sapiens
taccatgctgaccag

SEQ ID NO: 27097 - DNA, 15 bp, Homo sapiens
accatgctgaccagt

SEQ ID NO: 27098 - DNA, 15 bp, Homo sapiens
ccatgctgaccagtg

SEQ ID NO: 27099 - DNA, 15 bp, Homo sapiens
catgctgaccagtgg

SEQ ID NO: 27100 - DNA, 15 bp, Homo sapiens
atgctgaccagtggt

SEQ ID NO: 27101 - DNA, 15 bp, Homo sapiens
tgctgaccagtggtt

SEQ ID NO: 27102 - DNA, 15 bp, Homo sapiens
gctgaccagtggttg

SEQ ID NO: 27103 - DNA, 15 bp, Homo sapiens
ctgaccagtggttga

SEQ ID NO: 27104 - DNA, 15 bp, Homo sapiens
tgaccagtggttgaa

SEQ ID NO: 27105 - DNA, 15 bp, Homo sapiens
gaccagtggttgaat

SEQ ID NO: 27106 - DNA, 15 bp, Homo sapiens
accagtggttgaata

SEQ ID NO: 27107 - DNA, 15 bp, Homo sapiens
ccagtggttgaatag

SEQ ID NO: 27108 - DNA, 15 bp, Homo sapiens
cagtggttgaataga

SEQ ID NO: 27109 - DNA, 15 bp, Homo sapiens
agtggttgaatagag

SEQ ID NO: 27110 - DNA, 15 bp, Homo sapiens
gtggttgaatagagt

SEQ ID NO: 27111 - DNA, 15 bp, Homo sapiens
tggttgaatagagtg

SEQ ID NO: 27112 - DNA, 15 bp, Homo sapiens
ggttgaatagagtgc

SEQ ID NO: 27113 - DNA, 15 bp, Homo sapiens
gttgaatagagtgcc

SEQ ID NO: 27114 - DNA, 15 bp, Homo sapiens
ttgaatagagtgcct

SEQ ID NO: 27115 - DNA, 15 bp, Homo sapiens
tgaatagagtgcctg

SEQ ID NO: 27116 - DNA, 15 bp, Homo sapiens
gaatagagtgcctgc

SEQ ID NO: 27117 - DNA, 15 bp, Homo sapiens
aatagagtgcctgct

SEQ ID NO: 27118 - DNA, 15 bp, Homo sapiens
atagagtgcctgctg

SEQ ID NO: 27119 - DNA, 15 bp, Homo sapiens
tagagtgcctgctga

SEQ ID NO: 27120 - DNA, 15 bp, Homo sapiens
agagtgcctgctgag

SEQ ID NO: 27121 - DNA, 15 bp, Homo sapiens
gagtgcctgctgagg

SEQ ID NO: 27122 - DNA, 15 bp, Homo sapiens
agtgcctgctgaggt

SEQ ID NO: 27123 - DNA, 15 bp, Homo sapiens
gtgcctgctgaggtc

SEQ ID NO: 27124 - DNA, 15 bp, Homo sapiens
tgcctgctgaggtca

SEQ ID NO: 27125 - DNA, 15 bp, Homo sapiens
gcctgctgaggtcaa

SEQ ID NO: 27126 - DNA, 15 bp, Homo sapiens
cctgctgaggtcaag

SEQ ID NO: 27127 - DNA, 15 bp, Homo sapiens
ctgctgaggtcaaga

SEQ ID NO: 27128 - DNA, 15 bp, Homo sapiens
tgctgaggtcaagag

SEQ ID NO: 27129 - DNA, 15 bp, Homo sapiens
gctgaggtcaagaga

SEQ ID NO: 27130 - DNA, 15 bp, Homo sapiens
ctgaggtcaagagat

SEQ ID NO: 27131 - DNA, 15 bp, Homo sapiens
tgaggtcaagagatg

SEQ ID NO: 27132 - DNA, 15 bp, Homo sapiens
gaggtcaagagatgc

SEQ ID NO: 27133 - DNA, 15 bp, Homo sapiens
aggtcaagagatgca

SEQ ID NO: 27134 - DNA, 15 bp, Homo sapiens
ggtcaagagatgcag

SEQ ID NO: 27135 - DNA, 15 bp, Homo sapiens
gtcaagagatgcagc

SEQ ID NO: 27136 - DNA, 15 bp, Homo sapiens
tcaagagatgcagcc

SEQ ID NO: 27137 - DNA, 15 bp, Homo sapiens
caagagatgcagccg

SEQ ID NO: 27138 - DNA, 15 bp, Homo sapiens
aagagatgcagccgc

SEQ ID NO: 27139 - DNA, 15 bp, Homo sapiens
agagatgcagccgcc

SEQ ID NO: 27140 - DNA, 15 bp, Homo sapiens
gagatgcagccgcca

SEQ ID NO: 27141 - DNA, 15 bp, Homo sapiens
agatgcagccgccaa

SEQ ID NO: 27142 - DNA, 15 bp, Homo sapiens
gatgcagccgccaat

SEQ ID NO: 27143 - DNA, 15 bp, Homo sapiens
atgcagccgccaatt

SEQ ID NO: 27144 - DNA, 15 bp, Homo sapiens
tgcagccgccaattc

SEQ ID NO: 27145 - DNA, 15 bp, Homo sapiens
gcagccgccaattcc

SEQ ID NO: 27146 - DNA, 15 bp, Homo sapiens
cagccgccaattcct

SEQ ID NO: 27147 - DNA, 15 bp, Homo sapiens
agccgccaattcctg

SEQ ID NO: 27148 - DNA, 15 bp, Homo sapiens
gccgccaattcctgg

SEQ ID NO: 27149 - DNA, 15 bp, Homo sapiens
ccgccaattcctgga

SEQ ID NO: 27150 - DNA, 15 bp, Homo sapiens
cgccaattcctggac

SEQ ID NO: 27151 - DNA, 15 bp, Homo sapiens
gccaattcctggaca

SEQ ID NO: 27152 - DNA, 15 bp, Homo sapiens
ccaattcctggacaa

SEQ ID NO: 27153 - DNA, 15 bp, Homo sapiens
caattcctggacaac

SEQ ID NO: 27154 - DNA, 15 bp, Homo sapiens
aattcctggacaacc

SEQ ID NO: 27155 - DNA, 15 bp, Homo sapiens
attcctggacaacct

SEQ ID NO: 27156 - DNA, 15 bp, Homo sapiens
ttcctggacaaccta

SEQ ID NO: 27157 - DNA, 15 bp, Homo sapiens
tcctggacaacctaa

SEQ ID NO: 27158 - DNA, 15 bp, Homo sapiens
cctggacaacctaaa

SEQ ID NO: 27159 - DNA, 15 bp, Homo sapiens
ctggacaacctaaaa

SEQ ID NO: 27160 - DNA, 15 bp, Homo sapiens
tggacaacctaaaag

SEQ ID NO: 27161 - DNA, 15 bp, Homo sapiens
ggacaacctaaaagc

SEQ ID NO: 27162 - DNA, 15 bp, Homo sapiens
gacaacctaaaagcc

SEQ ID NO: 27163 - DNA, 15 bp, Homo sapiens
acaacctaaaagcct

SEQ ID NO: 27164 - DNA, 15 bp, Homo sapiens
caacctaaaagcctc

SEQ ID NO: 27165 - DNA, 15 bp, Homo sapiens
aacctaaaagcctca

SEQ ID NO: 27166 - DNA, 15 bp, Homo sapiens
acctaaaagcctcac

SEQ ID NO: 27167 - DNA, 15 bp, Homo sapiens
cctaaaagcctcaca

SEQ ID NO: 27168 - DNA, 15 bp, Homo sapiens
ctaaaagcctcacaa

SEQ ID NO: 27169 - DNA, 15 bp, Homo sapiens
taaaagcctcacaag

SEQ ID NO: 27170 - DNA, 15 bp, Homo sapiens
aaaagcctcacaagc

SEQ ID NO: 27171 - DNA, 15 bp, Homo sapiens
aaagcctcacaagct

SEQ ID NO: 27172 - DNA, 15 bp, Homo sapiens
aagcctcacaagctt

SEQ ID NO: 27173 - DNA, 15 bp, Homo sapiens
agcctcacaagcttc

SEQ ID NO: 27174 - DNA, 15 bp, Homo sapiens
gcctcacaagcttca

SEQ ID NO: 27175 - DNA, 15 bp, Homo sapiens
cctcacaagcttcaa

SEQ ID NO: 27176 - DNA, 15 bp, Homo sapiens
ctcacaagcttcaag

SEQ ID NO: 27177 - DNA, 15 bp, Homo sapiens
tcacaagcttcaagt

SEQ ID NO: 27178 - DNA, 15 bp, Homo sapiens
cacaagcttcaagtc

SEQ ID NO: 27179 - DNA, 15 bp, Homo sapiens
acaagcttcaagtct

SEQ ID NO: 27180 - DNA, 15 bp, Homo sapiens
caagcttcaagtctc

SEQ ID NO: 27181 - DNA, 15 bp, Homo sapiens
aagcttcaagtctcc

SEQ ID NO: 27182 - DNA, 15 bp, Homo sapiens
agcttcaagtctcca

SEQ ID NO: 27183 - DNA, 15 bp, Homo sapiens
gcttcaagtctccaa

SEQ ID NO: 27184 - DNA, 15 bp, Homo sapiens
cttcaagtctccaag

SEQ ID NO: 27185 - DNA, 15 bp, Homo sapiens
ttcaagtctccaagg

SEQ ID NO: 27186 - DNA, 15 bp, Homo sapiens
tcaagtctccaagga

SEQ ID NO: 27187 - DNA, 15 bp, Homo sapiens
caagtctccaaggac

SEQ ID NO: 27188 - DNA, 15 bp, Homo sapiens
aagtctccaaggact

SEQ ID NO: 27189 - DNA, 15 bp, Homo sapiens
agtctccaaggactc

SEQ ID NO: 27190 - DNA, 15 bp, Homo sapiens
gtctccaaggactct

SEQ ID NO: 27191 - DNA, 15 bp, Homo sapiens
tctccaaggactctc

SEQ ID NO: 27192 - DNA, 15 bp, Homo sapiens
ctccaaggactctcc

SEQ ID NO: 27193 - DNA, 15 bp, Homo sapiens
tccaaggactctcca

SEQ ID NO: 27194 - DNA, 15 bp, Homo sapiens
ccaaggactctccaa

SEQ ID NO: 27195 - DNA, 15 bp, Homo sapiens
caaggactctccaaa

SEQ ID NO: 27196 - DNA, 15 bp, Homo sapiens
aaggactctccaaat

SEQ ID NO: 27197 - DNA, 15 bp, Homo sapiens
aggactctccaaatc

SEQ ID NO: 27198 - DNA, 15 bp, Homo sapiens
ggactctccaaatcc

SEQ ID NO: 27199 - DNA, 15 bp, Homo sapiens
gactctccaaatccc

SEQ ID NO: 27200 - DNA, 15 bp, Homo sapiens
actctccaaatccca

SEQ ID NO: 27201 - DNA, 15 bp, Homo sapiens
ctctccaaatcccag

SEQ ID NO: 27202 - DNA, 15 bp, Homo sapiens
tctccaaatcccagg

SEQ ID NO: 27203 - DNA, 15 bp, Homo sapiens
ctccaaatcccagga

SEQ ID NO: 27204 - DNA, 15 bp, Homo sapiens
tccaaatcccaggat

SEQ ID NO: 27205 - DNA, 15 bp, Homo sapiens
ccaaatcccaggatc

SEQ ID NO: 27206 - DNA, 15 bp, Homo sapiens
caaatcccaggatct

SEQ ID NO: 27207 - DNA, 15 bp, Homo sapiens
aaatcccaggatctc

SEQ ID NO: 27208 - DNA, 15 bp, Homo sapiens
aatcccaggatctcc

SEQ ID NO: 27209 - DNA, 15 bp, Homo sapiens
atcccaggatctccc

SEQ ID NO: 27210 - DNA, 15 bp, Homo sapiens
tcccaggatctccct

SEQ ID NO: 27211 - DNA, 15 bp, Homo sapiens
cccaggatctccctg

SEQ ID NO: 27212 - DNA, 15 bp, Homo sapiens
ccaggatctccctgc

SEQ ID NO: 27213 - DNA, 15 bp, Homo sapiens
caggatctccctgcc

SEQ ID NO: 27214 - DNA, 15 bp, Homo sapiens
aggatctccctgcca

SEQ ID NO: 27215 - DNA, 15 bp, Homo sapiens
ggatctccctgccat

SEQ ID NO: 27216 - DNA, 15 bp, Homo sapiens
gatctccctgccatc

SEQ ID NO: 27217 - DNA, 15 bp, Homo sapiens
atctccctgccatca

SEQ ID NO: 27218 - DNA, 15 bp, Homo sapiens
tctccctgccatcac

SEQ ID NO: 27219 - DNA, 15 bp, Homo sapiens
ctccctgccatcaca

SEQ ID NO: 27220 - DNA, 15 bp, Homo sapiens
tccctgccatcacat

SEQ ID NO: 27221 - DNA, 15 bp, Homo sapiens
ccctgccatcacatc

SEQ ID NO: 27222 - DNA, 15 bp, Homo sapiens
cctgccatcacatcc

SEQ ID NO: 27223 - DNA, 15 bp, Homo sapiens
ctgccatcacatcct

SEQ ID NO: 27224 - DNA, 15 bp, Homo sapiens
tgccatcacatccta

SEQ ID NO: 27225 - DNA, 15 bp, Homo sapiens
gccatcacatcctag

SEQ ID NO: 27226 - DNA, 15 bp, Homo sapiens
ccatcacatcctaga

SEQ ID NO: 27227 - DNA, 15 bp, Homo sapiens
catcacatcctagaa

SEQ ID NO: 27228 - DNA, 15 bp, Homo sapiens
atcacatcctagaat

SEQ ID NO: 27229 - DNA, 15 bp, Homo sapiens
tcacatcctagaatt

SEQ ID NO: 27230 - DNA, 15 bp, Homo sapiens
cacatcctagaattt

SEQ ID NO: 27231 - DNA, 15 bp, Homo sapiens
acatcctagaattta

SEQ ID NO: 27232 - DNA, 15 bp, Homo sapiens
catcctagaatttaa

SEQ ID NO: 27233 - DNA, 15 bp, Homo sapiens
atcctagaatttaaa

SEQ ID NO: 27234 - DNA, 15 bp, Homo sapiens
tcctagaatttaaaa

SEQ ID NO: 27235 - DNA, 15 bp, Homo sapiens
cctagaatttaaaac

SEQ ID NO: 27236 - DNA, 15 bp, Homo sapiens
ctagaatttaaaacc

SEQ ID NO: 27237 - DNA, 15 bp, Homo sapiens
tagaatttaaaacct

SEQ ID NO: 27238 - DNA, 15 bp, Homo sapiens
agaatttaaaacctg

SEQ ID NO: 27239 - DNA, 15 bp, Homo sapiens
gaatttaaaacctga

SEQ ID NO: 27240 - DNA, 15 bp, Homo sapiens
aatttaaaacctgag

SEQ ID NO: 27241 - DNA, 15 bp, Homo sapiens
atttaaaacctgaga

SEQ ID NO: 27242 - DNA, 15 bp, Homo sapiens
tttaaaacctgagaa

SEQ ID NO: 27243 - DNA, 15 bp, Homo sapiens
ttaaaacctgagaac

SEQ ID NO: 27244 - DNA, 15 bp, Homo sapiens
taaaacctgagaaca

SEQ ID NO: 27245 - DNA, 15 bp, Homo sapiens
aaaacctgagaacat

SEQ ID NO: 27246 - DNA, 15 bp, Homo sapiens
aaacctgagaacatc

SEQ ID NO: 27247 - DNA, 15 bp, Homo sapiens
aacctgagaacatca

SEQ ID NO: 27248 - DNA, 15 bp, Homo sapiens
acctgagaacatcaa

SEQ ID NO: 27249 - DNA, 15 bp, Homo sapiens
cctgagaacatcaag

SEQ ID NO: 27250 - DNA, 15 bp, Homo sapiens
ctgagaacatcaagt

SEQ ID NO: 27251 - DNA, 15 bp, Homo sapiens
tgagaacatcaagtt

SEQ ID NO: 27252 - DNA, 15 bp, Homo sapiens
gagaacatcaagttc

SEQ ID NO: 27253 - DNA, 15 bp, Homo sapiens
agaacatcaagttca

SEQ ID NO: 27254 - DNA, 15 bp, Homo sapiens
gaacatcaagttcag

SEQ ID NO: 27255 - DNA, 15 bp, Homo sapiens
aacatcaagttcagg

SEQ ID NO: 27256 - DNA, 15 bp, Homo sapiens
acatcaagttcagga

SEQ ID NO: 27257 - DNA, 15 bp, Homo sapiens
catcaagttcaggaa

SEQ ID NO: 27258 - DNA, 15 bp, Homo sapiens
atcaagttcaggaaa

SEQ ID NO: 27259 - DNA, 15 bp, Homo sapiens
tcaagttcaggaaag

SEQ ID NO: 27260 - DNA, 15 bp, Homo sapiens
caagttcaggaaagc

SEQ ID NO: 27261 - DNA, 15 bp, Homo sapiens
aagttcaggaaagct

SEQ ID NO: 27262 - DNA, 15 bp, Homo sapiens
agttcaggaaagctt

SEQ ID NO: 27263 - DNA, 15 bp, Homo sapiens
gttcaggaaagcttg

SEQ ID NO: 27264 - DNA, 15 bp, Homo sapiens
ttcaggaaagcttgg

SEQ ID NO: 27265 - DNA, 15 bp, Homo sapiens
tcaggaaagcttggg

SEQ ID NO: 27266 - DNA, 15 bp, Homo sapiens
caggaaagcttgggg

SEQ ID NO: 27267 - DNA, 15 bp, Homo sapiens
aggaaagcttgggga

SEQ ID NO: 27268 - DNA, 15 bp, Homo sapiens
ggaaagcttggggat

SEQ ID NO: 27269 - DNA, 15 bp, Homo sapiens
gaaagcttggggatt

SEQ ID NO: 27270 - DNA, 15 bp, Homo sapiens
aaagcttggggattt

SEQ ID NO: 27271 - DNA, 15 bp, Homo sapiens
aagcttggggatttc

SEQ ID NO: 27272 - DNA, 15 bp, Homo sapiens
agcttggggatttca

SEQ ID NO: 27273 - DNA, 15 bp, Homo sapiens
gcttggggatttcaa

SEQ ID NO: 27274 - DNA, 15 bp, Homo sapiens
cttggggatttcaaa

SEQ ID NO: 27275 - DNA, 15 bp, Homo sapiens
ttggggatttcaaag

SEQ ID NO: 27276 - DNA, 15 bp, Homo sapiens
tggggatttcaaagc

SEQ ID NO: 27277 - DNA, 15 bp, Homo sapiens
ggggatttcaaagcc

SEQ ID NO: 27278 - DNA, 15 bp, Homo sapiens
gggatttcaaagccc

SEQ ID NO: 27279 - DNA, 15 bp, Homo sapiens
ggatttcaaagccca

SEQ ID NO: 27280 - DNA, 15 bp, Homo sapiens
gatttcaaagcccag

SEQ ID NO: 27281 - DNA, 15 bp, Homo sapiens
atttcaaagcccagc

SEQ ID NO: 27282 - DNA, 15 bp, Homo sapiens
tttcaaagcccagca

SEQ ID NO: 27283 - DNA, 15 bp, Homo sapiens
ttcaaagcccagcac

SEQ ID NO: 27284 - DNA, 15 bp, Homo sapiens
tcaaagcccagcacc

SEQ ID NO: 27285 - DNA, 15 bp, Homo sapiens
caaagcccagcacca

SEQ ID NO: 27286 - DNA, 15 bp, Homo sapiens
aaagcccagcaccaa

SEQ ID NO: 27287 - DNA, 15 bp, Homo sapiens
aagcccagcaccaaa

SEQ ID NO: 27288 - DNA, 15 bp, Homo sapiens
agcccagcaccaaag

SEQ ID NO: 27289 - DNA, 15 bp, Homo sapiens
gcccagcaccaaaga

SEQ ID NO: 27290 - DNA, 15 bp, Homo sapiens
cccagcaccaaagaa

SEQ ID NO: 27291 - DNA, 15 bp, Homo sapiens
ccagcaccaaagaaa

SEQ ID NO: 27292 - DNA, 15 bp, Homo sapiens
cagcaccaaagaaag

SEQ ID NO: 27293 - DNA, 15 bp, Homo sapiens
agcaccaaagaaagc

SEQ ID NO: 27294 - DNA, 15 bp, Homo sapiens
gcaccaaagaaagcg

SEQ ID NO: 27295 - DNA, 15 bp, Homo sapiens
caccaaagaaagcgg

SEQ ID NO: 27296 - DNA, 15 bp, Homo sapiens
accaaagaaagcggg

SEQ ID NO: 27297 - DNA, 15 bp, Homo sapiens
ccaaagaaagcggga

SEQ ID NO: 27298 - DNA, 15 bp, Homo sapiens
caaagaaagcgggac

SEQ ID NO: 27299 - DNA, 15 bp, Homo sapiens
aaagaaagcgggacc

SEQ ID NO: 27300 - DNA, 15 bp, Homo sapiens
aagaaagcgggaccc

SEQ ID NO: 27301 - DNA, 15 bp, Homo sapiens
agaaagcgggaccca

SEQ ID NO: 27302 - DNA, 15 bp, Homo sapiens
gaaagcgggacccac

SEQ ID NO: 27303 - DNA, 15 bp, Homo sapiens
aaagcgggacccaca

SEQ ID NO: 27304 - DNA, 15 bp, Homo sapiens
aagcgggacccacac

SEQ ID NO: 27305 - DNA, 15 bp, Homo sapiens
agcgggacccacact

SEQ ID NO: 27306 - DNA, 15 bp, Homo sapiens
gcgggacccacactc

SEQ ID NO: 27307 - DNA, 15 bp, Homo sapiens
cgggacccacactcg

SEQ ID NO: 27308 - DNA, 15 bp, Homo sapiens
gggacccacactcgc

SEQ ID NO: 27309 - DNA, 15 bp, Homo sapiens
ggacccacactcgcc

SEQ ID NO: 27310 - DNA, 15 bp, Homo sapiens
gacccacactcgcca

SEQ ID NO: 27311 - DNA, 15 bp, Homo sapiens
acccacactcgccag

SEQ ID NO: 27312 - DNA, 15 bp, Homo sapiens
cccacactcgccagc

SEQ ID NO: 27313 - DNA, 15 bp, Homo sapiens
ccacactcgccagct

SEQ ID NO: 27314 - DNA, 15 bp, Homo sapiens
cacactcgccagctc

SEQ ID NO: 27315 - DNA, 15 bp, Homo sapiens
acactcgccagctct

SEQ ID NO: 27316 - DNA, 15 bp, Homo sapiens
cactcgccagctctg

SEQ ID NO: 27317 - DNA, 15 bp, Homo sapiens
actcgccagctctgt

SEQ ID NO: 27318 - DNA, 15 bp, Homo sapiens
ctcgccagctctgtg

SEQ ID NO: 27319 - DNA, 15 bp, Homo sapiens
tcgccagctctgtga

SEQ ID NO: 27320 - DNA, 15 bp, Homo sapiens
cgccagctctgtgat

SEQ ID NO: 27321 - DNA, 15 bp, Homo sapiens
gccagctctgtgatc

SEQ ID NO: 27322 - DNA, 15 bp, Homo sapiens
ccagctctgtgatct

SEQ ID NO: 27323 - DNA, 15 bp, Homo sapiens
cagctctgtgatctt

SEQ ID NO: 27324 - DNA, 15 bp, Homo sapiens
agctctgtgatcttg

SEQ ID NO: 27325 - DNA, 15 bp, Homo sapiens
gctctgtgatcttgg

SEQ ID NO: 27326 - DNA, 15 bp, Homo sapiens
ctctgtgatcttggg

SEQ ID NO: 27327 - DNA, 15 bp, Homo sapiens
tctgtgatcttgggc

SEQ ID NO: 27328 - DNA, 15 bp, Homo sapiens
ctgtgatcttgggca

SEQ ID NO: 27329 - DNA, 15 bp, Homo sapiens
tgtgatcttgggcaa

SEQ ID NO: 27330 - DNA, 15 bp, Homo sapiens
gtgatcttgggcaag

SEQ ID NO: 27331 - DNA, 15 bp, Homo sapiens
tgatcttgggcaagt

SEQ ID NO: 27332 - DNA, 15 bp, Homo sapiens
gatcttgggcaagtt

SEQ ID NO: 27333 - DNA, 15 bp, Homo sapiens
atcttgggcaagttg

SEQ ID NO: 27334 - DNA, 15 bp, Homo sapiens
tcttgggcaagttgc

SEQ ID NO: 27335 - DNA, 15 bp, Homo sapiens
cttgggcaagttgct

SEQ ID NO: 27336 - DNA, 15 bp, Homo sapiens
ttgggcaagttgctt

SEQ ID NO: 27337 - DNA, 15 bp, Homo sapiens
tgggcaagttgcttg

SEQ ID NO: 27338 - DNA, 15 bp, Homo sapiens
gggcaagttgcttga

SEQ ID NO: 27339 - DNA, 15 bp, Homo sapiens
ggcaagttgcttgac

SEQ ID NO: 27340 - DNA, 15 bp, Homo sapiens
gcaagttgcttgact

SEQ ID NO: 27341 - DNA, 15 bp, Homo sapiens
caagttgcttgacta

SEQ ID NO: 27342 - DNA, 15 bp, Homo sapiens
aagttgcttgactac

SEQ ID NO: 27343 - DNA, 15 bp, Homo sapiens
agttgcttgactact

SEQ ID NO: 27344 - DNA, 15 bp, Homo sapiens
gttgcttgactactt

SEQ ID NO: 27345 - DNA, 15 bp, Homo sapiens
ttgcttgactactta

SEQ ID NO: 27346 - DNA, 15 bp, Homo sapiens
tgcttgactacttat

SEQ ID NO: 27347 - DNA, 15 bp, Homo sapiens
gcttgactacttata

SEQ ID NO: 27348 - DNA, 15 bp, Homo sapiens
cttgactacttatac

SEQ ID NO: 27349 - DNA, 15 bp, Homo sapiens
ttgactacttatacc

SEQ ID NO: 27350 - DNA, 15 bp, Homo sapiens
tgactacttatacct

SEQ ID NO: 27351 - DNA, 15 bp, Homo sapiens
gactacttatacctc

SEQ ID NO: 27352 - DNA, 15 bp, Homo sapiens
actacttatacctcc

SEQ ID NO: 27353 - DNA, 15 bp, Homo sapiens
ctacttatacctccg

SEQ ID NO: 27354 - DNA, 15 bp, Homo sapiens
tacttatacctccgt

SEQ ID NO: 27355 - DNA, 15 bp, Homo sapiens
acttatacctccgtt

SEQ ID NO: 27356 - DNA, 15 bp, Homo sapiens
cttatacctccgttt

SEQ ID NO: 27357 - DNA, 15 bp, Homo sapiens
ttatacctccgtttc

SEQ ID NO: 27358 - DNA, 15 bp, Homo sapiens
tatacctccgtttcc

SEQ ID NO: 27359 - DNA, 15 bp, Homo sapiens
atacctccgtttccc

SEQ ID NO: 27360 - DNA, 15 bp, Homo sapiens
tacctccgtttccct

SEQ ID NO: 27361 - DNA, 15 bp, Homo sapiens
acctccgtttccctc

SEQ ID NO: 27362 - DNA, 15 bp, Homo sapiens
cctccgtttccctca

SEQ ID NO: 27363 - DNA, 15 bp, Homo sapiens
ctccgtttccctcat

SEQ ID NO: 27364 - DNA, 15 bp, Homo sapiens
tccgtttccctcatc

SEQ ID NO: 27365 - DNA, 15 bp, Homo sapiens
ccgtttccctcatct

SEQ ID NO: 27366 - DNA, 15 bp, Homo sapiens
cgtttccctcatctg

SEQ ID NO: 27367 - DNA, 15 bp, Homo sapiens
gtttccctcatctgt

SEQ ID NO: 27368 - DNA, 15 bp, Homo sapiens
tttccctcatctgta

SEQ ID NO: 27369 - DNA, 15 bp, Homo sapiens
ttccctcatctgtat

SEQ ID NO: 27370 - DNA, 15 bp, Homo sapiens
tccctcatctgtata

SEQ ID NO: 27371 - DNA, 15 bp, Homo sapiens
ccctcatctgtataa

SEQ ID NO: 27372 - DNA, 15 bp, Homo sapiens
cctcatctgtataac

SEQ ID NO: 27373 - DNA, 15 bp, Homo sapiens
ctcatctgtataaca

SEQ ID NO: 27374 - DNA, 15 bp, Homo sapiens
tcatctgtataacag

SEQ ID NO: 27375 - DNA, 15 bp, Homo sapiens
catctgtataacagg

SEQ ID NO: 27376 - DNA, 15 bp, Homo sapiens
atctgtataacagga

SEQ ID NO: 27377 - DNA, 15 bp, Homo sapiens
tctgtataacaggaa

SEQ ID NO: 27378 - DNA, 15 bp, Homo sapiens
ctgtataacaggaat

SEQ ID NO: 27379 - DNA, 15 bp, Homo sapiens
tgtataacaggaata

SEQ ID NO: 27380 - DNA, 15 bp, Homo sapiens
gtataacaggaatac

SEQ ID NO: 27381 - DNA, 15 bp, Homo sapiens
tataacaggaataca

SEQ ID NO: 27382 - DNA, 15 bp, Homo sapiens
ataacaggaatacaa

SEQ ID NO: 27383 - DNA, 15 bp, Homo sapiens
taacaggaatacaat

SEQ ID NO: 27384 - DNA, 15 bp, Homo sapiens
aacaggaatacaata

SEQ ID NO: 27385 - DNA, 15 bp, Homo sapiens
acaggaatacaataa

SEQ ID NO: 27386 - DNA, 15 bp, Homo sapiens
caggaatacaataat

SEQ ID NO: 27387 - DNA, 15 bp, Homo sapiens
aggaatacaataatg

SEQ ID NO: 27388 - DNA, 15 bp, Homo sapiens
ggaatacaataatga

SEQ ID NO: 27389 - DNA, 15 bp, Homo sapiens
gaatacaataatgat

SEQ ID NO: 27390 - DNA, 15 bp, Homo sapiens
aatacaataatgatg

SEQ ID NO: 27391 - DNA, 15 bp, Homo sapiens
atacaataatgatga

SEQ ID NO: 27392 - DNA, 15 bp, Homo sapiens
tacaataatgatgag

SEQ ID NO: 27393 - DNA, 15 bp, Homo sapiens
acaataatgatgaga

SEQ ID NO: 27394 - DNA, 15 bp, Homo sapiens
caataatgatgagat

SEQ ID NO: 27395 - DNA, 15 bp, Homo sapiens
aataatgatgagatg

SEQ ID NO: 27396 - DNA, 15 bp, Homo sapiens
ataatgatgagatgg

SEQ ID NO: 27397 - DNA, 15 bp, Homo sapiens
taatgatgagatgga

SEQ ID NO: 27398 - DNA, 15 bp, Homo sapiens
aatgatgagatggag

SEQ ID NO: 27399 - DNA, 15 bp, Homo sapiens
atgatgagatggagc

SEQ ID NO: 27400 - DNA, 15 bp, Homo sapiens
tgatgagatggagct

SEQ ID NO: 27401 - DNA, 15 bp, Homo sapiens
gatgagatggagctc

SEQ ID NO: 27402 - DNA, 15 bp, Homo sapiens
atgagatggagctca

SEQ ID NO: 27403 - DNA, 15 bp, Homo sapiens
tgagatggagctcaa

SEQ ID NO: 27404 - DNA, 15 bp, Homo sapiens
gagatggagctcaag

SEQ ID NO: 27405 - DNA, 15 bp, Homo sapiens
agatggagctcaagg

SEQ ID NO: 27406 - DNA, 15 bp, Homo sapiens
gatggagctcaaggg

SEQ ID NO: 27407 - DNA, 15 bp, Homo sapiens
atggagctcaagggg

SEQ ID NO: 27408 - DNA, 15 bp, Homo sapiens
tggagctcaaggggc

SEQ ID NO: 27409 - DNA, 15 bp, Homo sapiens
ggagctcaaggggcc

SEQ ID NO: 27410 - DNA, 15 bp, Homo sapiens
gagctcaaggggcca

SEQ ID NO: 27411 - DNA, 15 bp, Homo sapiens
agctcaaggggccat

SEQ ID NO: 27412 - DNA, 15 bp, Homo sapiens
gctcaaggggccatg

SEQ ID NO: 27413 - DNA, 15 bp, Homo sapiens
ctcaaggggccatgg

SEQ ID NO: 27414 - DNA, 15 bp, Homo sapiens
tcaaggggccatggt

SEQ ID NO: 27415 - DNA, 15 bp, Homo sapiens
caaggggccatggtg

SEQ ID NO: 27416 - DNA, 15 bp, Homo sapiens
aaggggccatggtga

SEQ ID NO: 27417 - DNA, 15 bp, Homo sapiens
aggggccatggtgag

SEQ ID NO: 27418 - DNA, 15 bp, Homo sapiens
ggggccatggtgagg

SEQ ID NO: 27419 - DNA, 15 bp, Homo sapiens
gggccatggtgagga

SEQ ID NO: 27420 - DNA, 15 bp, Homo sapiens
ggccatggtgaggat

SEQ ID NO: 27421 - DNA, 15 bp, Homo sapiens
gccatggtgaggatt

SEQ ID NO: 27422 - DNA, 15 bp, Homo sapiens
ccatggtgaggattg

SEQ ID NO: 27423 - DNA, 15 bp, Homo sapiens
catggtgaggattga

SEQ ID NO: 27424 - DNA, 15 bp, Homo sapiens
atggtgaggattgaa

SEQ ID NO: 27425 - DNA, 15 bp, Homo sapiens
tggtgaggattgaac

SEQ ID NO: 27426 - DNA, 15 bp, Homo sapiens
ggtgaggattgaaca

SEQ ID NO: 27427 - DNA, 15 bp, Homo sapiens
gtgaggattgaacat

SEQ ID NO: 27428 - DNA, 15 bp, Homo sapiens
tgaggattgaacatg

SEQ ID NO: 27429 - DNA, 15 bp, Homo sapiens
gaggattgaacatga

SEQ ID NO: 27430 - DNA, 15 bp, Homo sapiens
aggattgaacatgat

SEQ ID NO: 27431 - DNA, 15 bp, Homo sapiens
ggattgaacatgatc

SEQ ID NO: 27432 - DNA, 15 bp, Homo sapiens
gattgaacatgatca

SEQ ID NO: 27433 - DNA, 15 bp, Homo sapiens
attgaacatgatcac

SEQ ID NO: 27434 - DNA, 15 bp, Homo sapiens
ttgaacatgatcact

SEQ ID NO: 27435 - DNA, 15 bp, Homo sapiens
tgaacatgatcactt

SEQ ID NO: 27436 - DNA, 15 bp, Homo sapiens
gaacatgatcacttg

SEQ ID NO: 27437 - DNA, 15 bp, Homo sapiens
aacatgatcacttgt

SEQ ID NO: 27438 - DNA, 15 bp, Homo sapiens
acatgatcacttgtg

SEQ ID NO: 27439 - DNA, 15 bp, Homo sapiens
catgatcacttgtga

SEQ ID NO: 27440 - DNA, 15 bp, Homo sapiens
atgatcacttgtgag

SEQ ID NO: 27441 - DNA, 15 bp, Homo sapiens
tgatcacttgtgaga

SEQ ID NO: 27442 - DNA, 15 bp, Homo sapiens
gatcacttgtgagac

SEQ ID NO: 27443 - DNA, 15 bp, Homo sapiens
atcacttgtgagaca

SEQ ID NO: 27444 - DNA, 15 bp, Homo sapiens
tcacttgtgagacat

SEQ ID NO: 27445 - DNA, 15 bp, Homo sapiens
cacttgtgagacatg

SEQ ID NO: 27446 - DNA, 15 bp, Homo sapiens
acttgtgagacatgt

SEQ ID NO: 27447 - DNA, 15 bp, Homo sapiens
cttgtgagacatgtt

SEQ ID NO: 27448 - DNA, 15 bp, Homo sapiens
ttgtgagacatgttc

SEQ ID NO: 27449 - DNA, 15 bp, Homo sapiens
tgtgagacatgttca

SEQ ID NO: 27450 - DNA, 15 bp, Homo sapiens
gtgagacatgttcag

SEQ ID NO: 27451 - DNA, 15 bp, Homo sapiens
tgagacatgttcagc

SEQ ID NO: 27452 - DNA, 15 bp, Homo sapiens
gagacatgttcagca

SEQ ID NO: 27453 - DNA, 15 bp, Homo sapiens
agacatgttcagcac

SEQ ID NO: 27454 - DNA, 15 bp, Homo sapiens
gacatgttcagcact

SEQ ID NO: 27455 - DNA, 15 bp, Homo sapiens
acatgttcagcactg

SEQ ID NO: 27456 - DNA, 15 bp, Homo sapiens
catgttcagcactgt

SEQ ID NO: 27457 - DNA, 15 bp, Homo sapiens
atgttcagcactgta

SEQ ID NO: 27458 - DNA, 15 bp, Homo sapiens
tgttcagcactgtat

SEQ ID NO: 27459 - DNA, 15 bp, Homo sapiens
gttcagcactgtatc

SEQ ID NO: 27460 - DNA, 15 bp, Homo sapiens
ttcagcactgtatct

SEQ ID NO: 27461 - DNA, 15 bp, Homo sapiens
tcagcactgtatctg

SEQ ID NO: 27462 - DNA, 15 bp, Homo sapiens
cagcactgtatctga

SEQ ID NO: 27463 - DNA, 15 bp, Homo sapiens
agcactgtatctgac

SEQ ID NO: 27464 - DNA, 15 bp, Homo sapiens
gcactgtatctgacc

SEQ ID NO: 27465 - DNA, 15 bp, Homo sapiens
cactgtatctgaccc

SEQ ID NO: 27466 - DNA, 15 bp, Homo sapiens
actgtatctgaccca

SEQ ID NO: 27467 - DNA, 15 bp, Homo sapiens
ctgtatctgacccat

SEQ ID NO: 27468 - DNA, 15 bp, Homo sapiens
tgtatctgacccatg

SEQ ID NO: 27469 - DNA, 15 bp, Homo sapiens
gtatctgacccatgg

SEQ ID NO: 27470 - DNA, 15 bp, Homo sapiens
tatctgacccatgga

SEQ ID NO: 27471 - DNA, 15 bp, Homo sapiens
atctgacccatggaa

SEQ ID NO: 27472 - DNA, 15 bp, Homo sapiens
tctgacccatggaaa

SEQ ID NO: 27473 - DNA, 15 bp, Homo sapiens
ctgacccatggaaaa

SEQ ID NO: 27474 - DNA, 15 bp, Homo sapiens
tgacccatggaaaat

SEQ ID NO: 27475 - DNA, 15 bp, Homo sapiens
gacccatggaaaatt

SEQ ID NO: 27476 - DNA, 15 bp, Homo sapiens
acccatggaaaattc

SEQ ID NO: 27477 - DNA, 15 bp, Homo sapiens
cccatggaaaattca

SEQ ID NO: 27478 - DNA, 15 bp, Homo sapiens
ccatggaaaattcaa

SEQ ID NO: 27479 - DNA, 15 bp, Homo sapiens
catggaaaattcaag

SEQ ID NO: 27480 - DNA, 15 bp, Homo sapiens
atggaaaattcaaga

SEQ ID NO: 27481 - DNA, 15 bp, Homo sapiens
tggaaaattcaagat

SEQ ID NO: 27482 - DNA, 15 bp, Homo sapiens
ggaaaattcaagata

SEQ ID NO: 27483 - DNA, 15 bp, Homo sapiens
gaaaattcaagataa

SEQ ID NO: 27484 - DNA, 15 bp, Homo sapiens
aaaattcaagataaa

SEQ ID NO: 27485 - DNA, 15 bp, Homo sapiens
aaattcaagataaac

SEQ ID NO: 27486 - DNA, 15 bp, Homo sapiens
aattcaagataaaca

SEQ ID NO: 27487 - DNA, 15 bp, Homo sapiens
attcaagataaacat

SEQ ID NO: 27488 - DNA, 15 bp, Homo sapiens
ttcaagataaacatc

SEQ ID NO: 27489 - DNA, 15 bp, Homo sapiens
tcaagataaacatca

SEQ ID NO: 27490 - DNA, 15 bp, Homo sapiens
caagataaacatcag

SEQ ID NO: 27491 - DNA, 15 bp, Homo sapiens
aagataaacatcagc

SEQ ID NO: 27492 - DNA, 15 bp, Homo sapiens
agataaacatcagct

SEQ ID NO: 27493 - DNA, 15 bp, Homo sapiens
gataaacatcagcta

SEQ ID NO: 27494 - DNA, 15 bp, Homo sapiens
ataaacatcagctac

SEQ ID NO: 27495 - DNA, 15 bp, Homo sapiens
taaacatcagctact

SEQ ID NO: 27496 - DNA, 15 bp, Homo sapiens
aaacatcagctactg

SEQ ID NO: 27497 - DNA, 15 bp, Homo sapiens
aacatcagctactga

SEQ ID NO: 27498 - DNA, 15 bp, Homo sapiens
acatcagctactgag

SEQ ID NO: 27499 - DNA, 15 bp, Homo sapiens
catcagctactgaga

SEQ ID NO: 27500 - DNA, 15 bp, Homo sapiens
atcagctactgagat

SEQ ID NO: 27501 - DNA, 15 bp, Homo sapiens
tcagctactgagatg

SEQ ID NO: 27502 - DNA, 15 bp, Homo sapiens
cagctactgagatga

SEQ ID NO: 27503 - DNA, 15 bp, Homo sapiens
agctactgagatgat

SEQ ID NO: 27504 - DNA, 15 bp, Homo sapiens
gctactgagatgatg

SEQ ID NO: 27505 - DNA, 15 bp, Homo sapiens
ctactgagatgatgg

SEQ ID NO: 27506 - DNA, 15 bp, Homo sapiens
tactgagatgatggc

SEQ ID NO: 27507 - DNA, 15 bp, Homo sapiens
actgagatgatggcg

SEQ ID NO: 27508 - DNA, 15 bp, Homo sapiens
ctgagatgatggcgg

SEQ ID NO: 27509 - DNA, 15 bp, Homo sapiens
tgagatgatggcgga

SEQ ID NO: 27510 - DNA, 15 bp, Homo sapiens
gagatgatggcggat

SEQ ID NO: 27511 - DNA, 15 bp, Homo sapiens
agatgatggcggata

SEQ ID NO: 27512 - DNA, 15 bp, Homo sapiens
gatgatggcggatat

SEQ ID NO: 27513 - DNA, 15 bp, Homo sapiens
atgatggcggatatt

SEQ ID NO: 27514 - DNA, 15 bp, Homo sapiens
tgatggcggatattt

SEQ ID NO: 27515 - DNA, 15 bp, Homo sapiens
gatggcggatatttg

SEQ ID NO: 27516 - DNA, 15 bp, Homo sapiens
atggcggatatttgg

SEQ ID NO: 27517 - DNA, 15 bp, Homo sapiens
tggcggatatttgga

SEQ ID NO: 27518 - DNA, 15 bp, Homo sapiens
ggcggatatttggaa

SEQ ID NO: 27519 - DNA, 15 bp, Homo sapiens
gcggatatttggaat

SEQ ID NO: 27520 - DNA, 15 bp, Homo sapiens
cggatatttggaatc

SEQ ID NO: 27521 - DNA, 15 bp, Homo sapiens
ggatatttggaatcc

SEQ ID NO: 27522 - DNA, 15 bp, Homo sapiens
gatatttggaatcct

SEQ ID NO: 27523 - DNA, 15 bp, Homo sapiens
atatttggaatccta

SEQ ID NO: 27524 - DNA, 15 bp, Homo sapiens
tatttggaatcctaa

SEQ ID NO: 27525 - DNA, 15 bp, Homo sapiens
atttggaatcctaaa

SEQ ID NO: 27526 - DNA, 15 bp, Homo sapiens
tttggaatcctaaat

SEQ ID NO: 27527 - DNA, 15 bp, Homo sapiens
ttggaatcctaaatc

SEQ ID NO: 27528 - DNA, 15 bp, Homo sapiens
tggaatcctaaatcc

SEQ ID NO: 27529 - DNA, 15 bp, Homo sapiens
ggaatcctaaatcct

SEQ ID NO: 27530 - DNA, 15 bp, Homo sapiens
gaatcctaaatcctt

SEQ ID NO: 27531 - DNA, 15 bp, Homo sapiens
aatcctaaatccttg

SEQ ID NO: 27532 - DNA, 15 bp, Homo sapiens
atcctaaatccttgg

SEQ ID NO: 27533 - DNA, 15 bp, Homo sapiens
tcctaaatccttgga

SEQ ID NO: 27534 - DNA, 15 bp, Homo sapiens
cctaaatccttggaa

SEQ ID NO: 27535 - DNA, 15 bp, Homo sapiens
ctaaatccttggaaa

SEQ ID NO: 27536 - DNA, 15 bp, Homo sapiens
taaatccttggaaac

SEQ ID NO: 27537 - DNA, 15 bp, Homo sapiens
aaatccttggaaact

SEQ ID NO: 27538 - DNA, 15 bp, Homo sapiens
aatccttggaaactg

SEQ ID NO: 27539 - DNA, 15 bp, Homo sapiens
atccttggaaactgg

SEQ ID NO: 27540 - DNA, 15 bp, Homo sapiens
tccttggaaactggg

SEQ ID NO: 27541 - DNA, 15 bp, Homo sapiens
ccttggaaactgggg

SEQ ID NO: 27542 - DNA, 15 bp, Homo sapiens
cttggaaactggggc

SEQ ID NO: 27543 - DNA, 15 bp, Homo sapiens
ttggaaactggggct

SEQ ID NO: 27544 - DNA, 15 bp, Homo sapiens
tggaaactggggctt

SEQ ID NO: 27545 - DNA, 15 bp, Homo sapiens
ggaaactggggcttt

SEQ ID NO: 27546 - DNA, 15 bp, Homo sapiens
gaaactggggctttt

SEQ ID NO: 27547 - DNA, 15 bp, Homo sapiens
aaactggggcttttt

SEQ ID NO: 27548 - DNA, 15 bp, Homo sapiens
aactggggctttttg

SEQ ID NO: 27549 - DNA, 15 bp, Homo sapiens
actggggctttttga

SEQ ID NO: 27550 - DNA, 15 bp, Homo sapiens
ctggggctttttgaa

SEQ ID NO: 27551 - DNA, 15 bp, Homo sapiens
tggggctttttgaag

SEQ ID NO: 27552 - DNA, 15 bp, Homo sapiens
ggggctttttgaagt

SEQ ID NO: 27553 - DNA, 15 bp, Homo sapiens
gggctttttgaagta

SEQ ID NO: 27554 - DNA, 15 bp, Homo sapiens
ggctttttgaagtaa

SEQ ID NO: 27555 - DNA, 15 bp, Homo sapiens
gctttttgaagtaaa

SEQ ID NO: 27556 - DNA, 15 bp, Homo sapiens
ctttttgaagtaaaa

SEQ ID NO: 27557 - DNA, 15 bp, Homo sapiens
tttttgaagtaaaag

SEQ ID NO: 27558 - DNA, 15 bp, Homo sapiens
ttttgaagtaaaaga

SEQ ID NO: 27559 - DNA, 15 bp, Homo sapiens
tttgaagtaaaagac

SEQ ID NO: 27560 - DNA, 15 bp, Homo sapiens
ttgaagtaaaagacc

SEQ ID NO: 27561 - DNA, 15 bp, Homo sapiens
tgaagtaaaagaccc

SEQ ID NO: 27562 - DNA, 15 bp, Homo sapiens
gaagtaaaagacccc

SEQ ID NO: 27563 - DNA, 15 bp, Homo sapiens
aagtaaaagacccca

SEQ ID NO: 27564 - DNA, 15 bp, Homo sapiens
agtaaaagaccccaa

SEQ ID NO: 27565 - DNA, 15 bp, Homo sapiens
gtaaaagaccccaaa

SEQ ID NO: 27566 - DNA, 15 bp, Homo sapiens
taaaagaccccaaag

SEQ ID NO: 27567 - DNA, 15 bp, Homo sapiens
aaaagaccccaaagg

SEQ ID NO: 27568 - DNA, 15 bp, Homo sapiens
aaagaccccaaaggc

SEQ ID NO: 27569 - DNA, 15 bp, Homo sapiens
aagaccccaaaggct

SEQ ID NO: 27570 - DNA, 15 bp, Homo sapiens
agaccccaaaggctg

SEQ ID NO: 27571 - DNA, 15 bp, Homo sapiens
gaccccaaaggctga

SEQ ID NO: 27572 - DNA, 15 bp, Homo sapiens
accccaaaggctgag

SEQ ID NO: 27573 - DNA, 15 bp, Homo sapiens
ccccaaaggctgagg

SEQ ID NO: 27574 - DNA, 15 bp, Homo sapiens
cccaaaggctgaggg

SEQ ID NO: 27575 - DNA, 15 bp, Homo sapiens
ccaaaggctgagggc

SEQ ID NO: 27576 - DNA, 15 bp, Homo sapiens
caaaggctgagggcc

SEQ ID NO: 27577 - DNA, 15 bp, Homo sapiens
aaaggctgagggcct

SEQ ID NO: 27578 - DNA, 15 bp, Homo sapiens
aaggctgagggcctc

SEQ ID NO: 27579 - DNA, 15 bp, Homo sapiens
aggctgagggcctca

SEQ ID NO: 27580 - DNA, 15 bp, Homo sapiens
ggctgagggcctcag

SEQ ID NO: 27581 - DNA, 15 bp, Homo sapiens
gctgagggcctcaga

SEQ ID NO: 27582 - DNA, 15 bp, Homo sapiens
ctgagggcctcagaa

SEQ ID NO: 27583 - DNA, 15 bp, Homo sapiens
tgagggcctcagaag

SEQ ID NO: 27584 - DNA, 15 bp, Homo sapiens
gagggcctcagaagc

SEQ ID NO: 27585 - DNA, 15 bp, Homo sapiens
agggcctcagaagca

SEQ ID NO: 27586 - DNA, 15 bp, Homo sapiens
gggcctcagaagcat

SEQ ID NO: 27587 - DNA, 15 bp, Homo sapiens
ggcctcagaagcatc

SEQ ID NO: 27588 - DNA, 15 bp, Homo sapiens
gcctcagaagcatca

SEQ ID NO: 27589 - DNA, 15 bp, Homo sapiens
cctcagaagcatcag

SEQ ID NO: 27590 - DNA, 15 bp, Homo sapiens
ctcagaagcatcagg

SEQ ID NO: 27591 - DNA, 15 bp, Homo sapiens
tcagaagcatcaggc

SEQ ID NO: 27592 - DNA, 15 bp, Homo sapiens
cagaagcatcaggcc

SEQ ID NO: 27593 - DNA, 15 bp, Homo sapiens
agaagcatcaggcca

SEQ ID NO: 27594 - DNA, 15 bp, Homo sapiens
gaagcatcaggccat

SEQ ID NO: 27595 - DNA, 15 bp, Homo sapiens
aagcatcaggccatg

SEQ ID NO: 27596 - DNA, 15 bp, Homo sapiens
agcatcaggccatga

SEQ ID NO: 27597 - DNA, 15 bp, Homo sapiens
gcatcaggccatgat

SEQ ID NO: 27598 - DNA, 15 bp, Homo sapiens
catcaggccatgatg

SEQ ID NO: 27599 - DNA, 15 bp, Homo sapiens
atcaggccatgatgt

SEQ ID NO: 27600 - DNA, 15 bp, Homo sapiens
tcaggccatgatgtt

SEQ ID NO: 27601 - DNA, 15 bp, Homo sapiens
caggccatgatgttc

SEQ ID NO: 27602 - DNA, 15 bp, Homo sapiens
aggccatgatgttcc

SEQ ID NO: 27603 - DNA, 15 bp, Homo sapiens
ggccatgatgttcct

SEQ ID NO: 27604 - DNA, 15 bp, Homo sapiens
gccatgatgttcctg

SEQ ID NO: 27605 - DNA, 15 bp, Homo sapiens
ccatgatgttcctga

SEQ ID NO: 27606 - DNA, 15 bp, Homo sapiens
catgatgttcctgaa

SEQ ID NO: 27607 - DNA, 15 bp, Homo sapiens
atgatgttcctgaaa

SEQ ID NO: 27608 - DNA, 15 bp, Homo sapiens
tgatgttcctgaaac

SEQ ID NO: 27609 - DNA, 15 bp, Homo sapiens
gatgttcctgaaaca

SEQ ID NO: 27610 - DNA, 15 bp, Homo sapiens
atgttcctgaaacaa

SEQ ID NO: 27611 - DNA, 15 bp, Homo sapiens
tgttcctgaaacaag

SEQ ID NO: 27612 - DNA, 15 bp, Homo sapiens
gttcctgaaacaaga

SEQ ID NO: 27613 - DNA, 15 bp, Homo sapiens
ttcctgaaacaagag

SEQ ID NO: 27614 - DNA, 15 bp, Homo sapiens
tcctgaaacaagagg

SEQ ID NO: 27615 - DNA, 15 bp, Homo sapiens
cctgaaacaagaggg

SEQ ID NO: 27616 - DNA, 15 bp, Homo sapiens
ctgaaacaagagggt

SEQ ID NO: 27617 - DNA, 15 bp, Homo sapiens
tgaaacaagagggtc

SEQ ID NO: 27618 - DNA, 15 bp, Homo sapiens
gaaacaagagggtca

SEQ ID NO: 27619 - DNA, 15 bp, Homo sapiens
aaacaagagggtcag

SEQ ID NO: 27620 - DNA, 15 bp, Homo sapiens
aacaagagggtcagg

SEQ ID NO: 27621 - DNA, 15 bp, Homo sapiens
acaagagggtcaggg

SEQ ID NO: 27622 - DNA, 15 bp, Homo sapiens
caagagggtcagggt

SEQ ID NO: 27623 - DNA, 15 bp, Homo sapiens
aagagggtcagggtc

SEQ ID NO: 27624 - DNA, 15 bp, Homo sapiens
agagggtcagggtcc

SEQ ID NO: 27625 - DNA, 15 bp, Homo sapiens
gagggtcagggtccc

SEQ ID NO: 27626 - DNA, 15 bp, Homo sapiens
agggtcagggtccca

SEQ ID NO: 27627 - DNA, 15 bp, Homo sapiens
gggtcagggtcccaa

SEQ ID NO: 27628 - DNA, 15 bp, Homo sapiens
ggtcagggtcccaat

SEQ ID NO: 27629 - DNA, 15 bp, Homo sapiens
gtcagggtcccaatg

SEQ ID NO: 27630 - DNA, 15 bp, Homo sapiens
tcagggtcccaatgg

SEQ ID NO: 27631 - DNA, 15 bp, Homo sapiens
cagggtcccaatggg

SEQ ID NO: 27632 - DNA, 15 bp, Homo sapiens
agggtcccaatgggc

SEQ ID NO: 27633 - DNA, 15 bp, Homo sapiens
gggtcccaatgggcc

SEQ ID NO: 27634 - DNA, 15 bp, Homo sapiens
ggtcccaatgggcct

SEQ ID NO: 27635 - DNA, 15 bp, Homo sapiens
gtcccaatgggcctc

SEQ ID NO: 27636 - DNA, 15 bp, Homo sapiens
tcccaatgggcctct

SEQ ID NO: 27637 - DNA, 15 bp, Homo sapiens
cccaatgggcctctg

SEQ ID NO: 27638 - DNA, 15 bp, Homo sapiens
ccaatgggcctctgg

SEQ ID NO: 27639 - DNA, 15 bp, Homo sapiens
caatgggcctctggg

SEQ ID NO: 27640 - DNA, 15 bp, Homo sapiens
aatgggcctctgggg

SEQ ID NO: 27641 - DNA, 15 bp, Homo sapiens
atgggcctctggggt

SEQ ID NO: 27642 - DNA, 15 bp, Homo sapiens
tgggcctctggggtt

SEQ ID NO: 27643 - DNA, 15 bp, Homo sapiens
gggcctctggggttc

SEQ ID NO: 27644 - DNA, 15 bp, Homo sapiens
ggcctctggggttca

SEQ ID NO: 27645 - DNA, 15 bp, Homo sapiens
gcctctggggttcat

SEQ ID NO: 27646 - DNA, 15 bp, Homo sapiens
cctctggggttcatc

SEQ ID NO: 27647 - DNA, 15 bp, Homo sapiens
ctctggggttcatcg

SEQ ID NO: 27648 - DNA, 15 bp, Homo sapiens
tctggggttcatcgt

SEQ ID NO: 27649 - DNA, 15 bp, Homo sapiens
ctggggttcatcgtg

SEQ ID NO: 27650 - DNA, 15 bp, Homo sapiens
tggggttcatcgtga

SEQ ID NO: 27651 - DNA, 15 bp, Homo sapiens
ggggttcatcgtgag

SEQ ID NO: 27652 - DNA, 15 bp, Homo sapiens
gggttcatcgtgagg

SEQ ID NO: 27653 - DNA, 15 bp, Homo sapiens
ggttcatcgtgagga

SEQ ID NO: 27654 - DNA, 15 bp, Homo sapiens
gttcatcgtgaggat

SEQ ID NO: 27655 - DNA, 15 bp, Homo sapiens
ttcatcgtgaggatg

SEQ ID NO: 27656 - DNA, 15 bp, Homo sapiens
tcatcgtgaggatgg

SEQ ID NO: 27657 - DNA, 15 bp, Homo sapiens
catcgtgaggatgga

SEQ ID NO: 27658 - DNA, 15 bp, Homo sapiens
atcgtgaggatggat

SEQ ID NO: 27659 - DNA, 15 bp, Homo sapiens
tcgtgaggatggatg

SEQ ID NO: 27660 - DNA, 15 bp, Homo sapiens
cgtgaggatggatgc

SEQ ID NO: 27661 - DNA, 15 bp, Homo sapiens
gtgaggatggatgca

SEQ ID NO: 27662 - DNA, 15 bp, Homo sapiens
tgaggatggatgcat

SEQ ID NO: 27663 - DNA, 15 bp, Homo sapiens
gaggatggatgcatt

SEQ ID NO: 27664 - DNA, 15 bp, Homo sapiens
aggatggatgcatta

SEQ ID NO: 27665 - DNA, 15 bp, Homo sapiens
ggatggatgcattaa

SEQ ID NO: 27666 - DNA, 15 bp, Homo sapiens
gatggatgcattaat

SEQ ID NO: 27667 - DNA, 15 bp, Homo sapiens
atggatgcattaata

SEQ ID NO: 27668 - DNA, 15 bp, Homo sapiens
tggatgcattaatat

SEQ ID NO: 27669 - DNA, 15 bp, Homo sapiens
ggatgcattaatatt

SEQ ID NO: 27670 - DNA, 15 bp, Homo sapiens
gatgcattaatattg

SEQ ID NO: 27671 - DNA, 15 bp, Homo sapiens
atgcattaatattgg

SEQ ID NO: 27672 - DNA, 15 bp, Homo sapiens
tgcattaatattggg

SEQ ID NO: 27673 - DNA, 15 bp, Homo sapiens
gcattaatattgggg

SEQ ID NO: 27674 - DNA, 15 bp, Homo sapiens
cattaatattgggga

SEQ ID NO: 27675 - DNA, 15 bp, Homo sapiens
attaatattggggac

SEQ ID NO: 27676 - DNA, 15 bp, Homo sapiens
ttaatattggggacc

SEQ ID NO: 27677 - DNA, 15 bp, Homo sapiens
taatattggggacct

SEQ ID NO: 27678 - DNA, 15 bp, Homo sapiens
aatattggggacctg

SEQ ID NO: 27679 - DNA, 15 bp, Homo sapiens
atattggggacctgc

SEQ ID NO: 27680 - DNA, 15 bp, Homo sapiens
tattggggacctgct

SEQ ID NO: 27681 - DNA, 15 bp, Homo sapiens
attggggacctgcta

SEQ ID NO: 27682 - DNA, 15 bp, Homo sapiens
ttggggacctgctag

SEQ ID NO: 27683 - DNA, 15 bp, Homo sapiens
tggggacctgctagg

SEQ ID NO: 27684 - DNA, 15 bp, Homo sapiens
ggggacctgctaggg

SEQ ID NO: 27685 - DNA, 15 bp, Homo sapiens
gggacctgctaggga

SEQ ID NO: 27686 - DNA, 15 bp, Homo sapiens
ggacctgctagggac

SEQ ID NO: 27687 - DNA, 15 bp, Homo sapiens
gacctgctagggacc

SEQ ID NO: 27688 - DNA, 15 bp, Homo sapiens
acctgctagggacct

SEQ ID NO: 27689 - DNA, 15 bp, Homo sapiens
cctgctagggacctt

SEQ ID NO: 27690 - DNA, 15 bp, Homo sapiens
ctgctagggaccttc

SEQ ID NO: 27691 - DNA, 15 bp, Homo sapiens
tgctagggaccttcc

SEQ ID NO: 27692 - DNA, 15 bp, Homo sapiens
gctagggaccttccc

SEQ ID NO: 27693 - DNA, 15 bp, Homo sapiens
ctagggaccttccca

SEQ ID NO: 27694 - DNA, 15 bp, Homo sapiens
tagggaccttcccag

SEQ ID NO: 27695 - DNA, 15 bp, Homo sapiens
agggaccttcccagt

SEQ ID NO: 27696 - DNA, 15 bp, Homo sapiens
gggaccttcccagtg

SEQ ID NO: 27697 - DNA, 15 bp, Homo sapiens
ggaccttcccagtgg

SEQ ID NO: 27698 - DNA, 15 bp, Homo sapiens
gaccttcccagtggg

SEQ ID NO: 27699 - DNA, 15 bp, Homo sapiens
accttcccagtggga

SEQ ID NO: 27700 - DNA, 15 bp, Homo sapiens
ccttcccagtgggac

SEQ ID NO: 27701 - DNA, 15 bp, Homo sapiens
cttcccagtgggaca

SEQ ID NO: 27702 - DNA, 15 bp, Homo sapiens
ttcccagtgggacag

SEQ ID NO: 27703 - DNA, 15 bp, Homo sapiens
tcccagtgggacagt

SEQ ID NO: 27704 - DNA, 15 bp, Homo sapiens
cccagtgggacagtg

SEQ ID NO: 27705 - DNA, 15 bp, Homo sapiens
ccagtgggacagtgg

SEQ ID NO: 27706 - DNA, 15 bp, Homo sapiens
cagtgggacagtggc

SEQ ID NO: 27707 - DNA, 15 bp, Homo sapiens
agtgggacagtggct

SEQ ID NO: 27708 - DNA, 15 bp, Homo sapiens
gtgggacagtggctg

SEQ ID NO: 27709 - DNA, 15 bp, Homo sapiens
tgggacagtggctgg

SEQ ID NO: 27710 - DNA, 15 bp, Homo sapiens
gggacagtggctggg

SEQ ID NO: 27711 - DNA, 15 bp, Homo sapiens
ggacagtggctgggt

SEQ ID NO: 27712 - DNA, 15 bp, Homo sapiens
gacagtggctgggtc

SEQ ID NO: 27713 - DNA, 15 bp, Homo sapiens
acagtggctgggtca

SEQ ID NO: 27714 - DNA, 15 bp, Homo sapiens
cagtggctgggtcag

SEQ ID NO: 27715 - DNA, 15 bp, Homo sapiens
agtggctgggtcagg

SEQ ID NO: 27716 - DNA, 15 bp, Homo sapiens
gtggctgggtcaggg

SEQ ID NO: 27717 - DNA, 15 bp, Homo sapiens
tggctgggtcagggc

SEQ ID NO: 27718 - DNA, 15 bp, Homo sapiens
ggctgggtcagggca

SEQ ID NO: 27719 - DNA, 15 bp, Homo sapiens
gctgggtcagggcac

SEQ ID NO: 27720 - DNA, 15 bp, Homo sapiens
ctgggtcagggcact

SEQ ID NO: 27721 - DNA, 15 bp, Homo sapiens
tgggtcagggcactc

SEQ ID NO: 27722 - DNA, 15 bp, Homo sapiens
gggtcagggcactca

SEQ ID NO: 27723 - DNA, 15 bp, Homo sapiens
ggtcagggcactcaa

SEQ ID NO: 27724 - DNA, 15 bp, Homo sapiens
gtcagggcactcaag

SEQ ID NO: 27725 - DNA, 15 bp, Homo sapiens
tcagggcactcaagc

SEQ ID NO: 27726 - DNA, 15 bp, Homo sapiens
cagggcactcaagcc

SEQ ID NO: 27727 - DNA, 15 bp, Homo sapiens
agggcactcaagccc

SEQ ID NO: 27728 - DNA, 15 bp, Homo sapiens
gggcactcaagccct

SEQ ID NO: 27729 - DNA, 15 bp, Homo sapiens
ggcactcaagcccta

SEQ ID NO: 27730 - DNA, 15 bp, Homo sapiens
gcactcaagccctaa

SEQ ID NO: 27731 - DNA, 15 bp, Homo sapiens
cactcaagccctaaa

SEQ ID NO: 27732 - DNA, 15 bp, Homo sapiens
actcaagccctaaaa

SEQ ID NO: 27733 - DNA, 15 bp, Homo sapiens
ctcaagccctaaaac

SEQ ID NO: 27734 - DNA, 15 bp, Homo sapiens
tcaagccctaaaacg

SEQ ID NO: 27735 - DNA, 15 bp, Homo sapiens
caagccctaaaacgt

SEQ ID NO: 27736 - DNA, 15 bp, Homo sapiens
aagccctaaaacgtg

SEQ ID NO: 27737 - DNA, 15 bp, Homo sapiens
agccctaaaacgtga

SEQ ID NO: 27738 - DNA, 15 bp, Homo sapiens
gccctaaaacgtgat

SEQ ID NO: 27739 - DNA, 15 bp, Homo sapiens
ccctaaaacgtgatg

SEQ ID NO: 27740 - DNA, 15 bp, Homo sapiens
cctaaaacgtgatga

SEQ ID NO: 27741 - DNA, 15 bp, Homo sapiens
ctaaaacgtgatgag

SEQ ID NO: 27742 - DNA, 15 bp, Homo sapiens
taaaacgtgatgagg

SEQ ID NO: 27743 - DNA, 15 bp, Homo sapiens
aaaacgtgatgaggc

SEQ ID NO: 27744 - DNA, 15 bp, Homo sapiens
aaacgtgatgaggcg

SEQ ID NO: 27745 - DNA, 15 bp, Homo sapiens
aacgtgatgaggcga

SEQ ID NO: 27746 - DNA, 15 bp, Homo sapiens
acgtgatgaggcgag

SEQ ID NO: 27747 - DNA, 15 bp, Homo sapiens
cgtgatgaggcgaga

SEQ ID NO: 27748 - DNA, 15 bp, Homo sapiens
gtgatgaggcgagac

SEQ ID NO: 27749 - DNA, 15 bp, Homo sapiens
tgatgaggcgagact

SEQ ID NO: 27750 - DNA, 15 bp, Homo sapiens
gatgaggcgagactt

SEQ ID NO: 27751 - DNA, 15 bp, Homo sapiens
atgaggcgagacttt

SEQ ID NO: 27752 - DNA, 15 bp, Homo sapiens
tgaggcgagactttt

SEQ ID NO: 27753 - DNA, 15 bp, Homo sapiens
gaggcgagacttttc

SEQ ID NO: 27754 - DNA, 15 bp, Homo sapiens
aggcgagacttttct

SEQ ID NO: 27755 - DNA, 15 bp, Homo sapiens
ggcgagacttttctc

SEQ ID NO: 27756 - DNA, 15 bp, Homo sapiens
gcgagacttttctct

SEQ ID NO: 27757 - DNA, 15 bp, Homo sapiens
cgagacttttctctc

SEQ ID NO: 27758 - DNA, 15 bp, Homo sapiens
gagacttttctctct

SEQ ID NO: 27759 - DNA, 15 bp, Homo sapiens
agacttttctctctt

SEQ ID NO: 27760 - DNA, 15 bp, Homo sapiens
gacttttctctcttt

SEQ ID NO: 27761 - DNA, 15 bp, Homo sapiens
acttttctctctttc

SEQ ID NO: 27762 - DNA, 15 bp, Homo sapiens
cttttctctctttcc

SEQ ID NO: 27763 - DNA, 15 bp, Homo sapiens
ttttctctctttcct

SEQ ID NO: 27764 - DNA, 15 bp, Homo sapiens
tttctctctttcctc

SEQ ID NO: 27765 - DNA, 15 bp, Homo sapiens
ttctctctttcctca

SEQ ID NO: 27766 - DNA, 15 bp, Homo sapiens
tctctctttcctcat

SEQ ID NO: 27767 - DNA, 15 bp, Homo sapiens
ctctctttcctcatt

SEQ ID NO: 27768 - DNA, 15 bp, Homo sapiens
tctctttcctcattc

SEQ ID NO: 27769 - DNA, 15 bp, Homo sapiens
ctctttcctcattca

SEQ ID NO: 27770 - DNA, 15 bp, Homo sapiens
tctttcctcattcag

SEQ ID NO: 27771 - DNA, 15 bp, Homo sapiens
ctttcctcattcagt

SEQ ID NO: 27772 - DNA, 15 bp, Homo sapiens
tttcctcattcagta

SEQ ID NO: 27773 - DNA, 15 bp, Homo sapiens
ttcctcattcagtaa

SEQ ID NO: 27774 - DNA, 15 bp, Homo sapiens
tcctcattcagtaac

SEQ ID NO: 27775 - DNA, 15 bp, Homo sapiens
cctcattcagtaact

SEQ ID NO: 27776 - DNA, 15 bp, Homo sapiens
ctcattcagtaactg

SEQ ID NO: 27777 - DNA, 15 bp, Homo sapiens
tcattcagtaactgt

SEQ ID NO: 27778 - DNA, 15 bp, Homo sapiens
cattcagtaactgtc

SEQ ID NO: 27779 - DNA, 15 bp, Homo sapiens
attcagtaactgtca

SEQ ID NO: 27780 - DNA, 15 bp, Homo sapiens
ttcagtaactgtcag

SEQ ID NO: 27781 - DNA, 15 bp, Homo sapiens
tcagtaactgtcagt

SEQ ID NO: 27782 - DNA, 15 bp, Homo sapiens
cagtaactgtcagta

SEQ ID NO: 27783 - DNA, 15 bp, Homo sapiens
agtaactgtcagtag

SEQ ID NO: 27784 - DNA, 15 bp, Homo sapiens
gtaactgtcagtaga

SEQ ID NO: 27785 - DNA, 15 bp, Homo sapiens
taactgtcagtagat

SEQ ID NO: 27786 - DNA, 15 bp, Homo sapiens
aactgtcagtagatt

SEQ ID NO: 27787 - DNA, 15 bp, Homo sapiens
actgtcagtagattc

SEQ ID NO: 27788 - DNA, 15 bp, Homo sapiens
ctgtcagtagattct

SEQ ID NO: 27789 - DNA, 15 bp, Homo sapiens
tgtcagtagattctg

SEQ ID NO: 27790 - DNA, 15 bp, Homo sapiens
gtcagtagattctgg

SEQ ID NO: 27791 - DNA, 15 bp, Homo sapiens
tcagtagattctggg

SEQ ID NO: 27792 - DNA, 15 bp, Homo sapiens
cagtagattctggga

SEQ ID NO: 27793 - DNA, 15 bp, Homo sapiens
agtagattctgggag

SEQ ID NO: 27794 - DNA, 15 bp, Homo sapiens
gtagattctgggagc

SEQ ID NO: 27795 - DNA, 15 bp, Homo sapiens
tagattctgggagcc

SEQ ID NO: 27796 - DNA, 15 bp, Homo sapiens
agattctgggagcca

SEQ ID NO: 27797 - DNA, 15 bp, Homo sapiens
gattctgggagccag

SEQ ID NO: 27798 - DNA, 15 bp, Homo sapiens
attctgggagccagg

SEQ ID NO: 27799 - DNA, 15 bp, Homo sapiens
ttctgggagccaggg

SEQ ID NO: 27800 - DNA, 15 bp, Homo sapiens
tctgggagccaggga

SEQ ID NO: 27801 - DNA, 15 bp, Homo sapiens
ctgggagccagggat

SEQ ID NO: 27802 - DNA, 15 bp, Homo sapiens
tgggagccagggatt

SEQ ID NO: 27803 - DNA, 15 bp, Homo sapiens
gggagccagggattc

SEQ ID NO: 27804 - DNA, 15 bp, Homo sapiens
ggagccagggattct

SEQ ID NO: 27805 - DNA, 15 bp, Homo sapiens
gagccagggattctc

SEQ ID NO: 27806 - DNA, 15 bp, Homo sapiens
agccagggattctcc

SEQ ID NO: 27807 - DNA, 15 bp, Homo sapiens
gccagggattctccg

SEQ ID NO: 27808 - DNA, 15 bp, Homo sapiens
ccagggattctccga

SEQ ID NO: 27809 - DNA, 15 bp, Homo sapiens
cagggattctccgac

SEQ ID NO: 27810 - DNA, 15 bp, Homo sapiens
agggattctccgact

SEQ ID NO: 27811 - DNA, 15 bp, Homo sapiens
gggattctccgactc

SEQ ID NO: 27812 - DNA, 15 bp, Homo sapiens
ggattctccgactct

SEQ ID NO: 27813 - DNA, 15 bp, Homo sapiens
gattctccgactctt

SEQ ID NO: 27814 - DNA, 15 bp, Homo sapiens
attctccgactcttc

SEQ ID NO: 27815 - DNA, 15 bp, Homo sapiens
ttctccgactcttca

SEQ ID NO: 27816 - DNA, 15 bp, Homo sapiens
tctccgactcttcaa

SEQ ID NO: 27817 - DNA, 15 bp, Homo sapiens
ctccgactcttcaag

SEQ ID NO: 27818 - DNA, 15 bp, Homo sapiens
tccgactcttcaagt

SEQ ID NO: 27819 - DNA, 15 bp, Homo sapiens
ccgactcttcaagtc

SEQ ID NO: 27820 - DNA, 15 bp, Homo sapiens
cgactcttcaagtcc

SEQ ID NO: 27821 - DNA, 15 bp, Homo sapiens
gactcttcaagtcca

SEQ ID NO: 27822 - DNA, 15 bp, Homo sapiens
actcttcaagtccat

SEQ ID NO: 27823 - DNA, 15 bp, Homo sapiens
ctcttcaagtccatg

SEQ ID NO: 27824 - DNA, 15 bp, Homo sapiens
tcttcaagtccatga

SEQ ID NO: 27825 - DNA, 15 bp, Homo sapiens
cttcaagtccatgaa

SEQ ID NO: 27826 - DNA, 15 bp, Homo sapiens
ttcaagtccatgaat

SEQ ID NO: 27827 - DNA, 15 bp, Homo sapiens
tcaagtccatgaatt

SEQ ID NO: 27828 - DNA, 15 bp, Homo sapiens
caagtccatgaattt

SEQ ID NO: 27829 - DNA, 15 bp, Homo sapiens
aagtccatgaatttt

SEQ ID NO: 27830 - DNA, 15 bp, Homo sapiens
agtccatgaatttta

SEQ ID NO: 27831 - DNA, 15 bp, Homo sapiens
gtccatgaattttag

SEQ ID NO: 27832 - DNA, 15 bp, Homo sapiens
tccatgaattttagg

SEQ ID NO: 27833 - DNA, 15 bp, Homo sapiens
ccatgaattttaggg

SEQ ID NO: 27834 - DNA, 15 bp, Homo sapiens
catgaattttagggg

SEQ ID NO: 27835 - DNA, 15 bp, Homo sapiens
atgaattttagggga

SEQ ID NO: 27836 - DNA, 15 bp, Homo sapiens
tgaattttaggggat

SEQ ID NO: 27837 - DNA, 15 bp, Homo sapiens
gaattttaggggatg

SEQ ID NO: 27838 - DNA, 15 bp, Homo sapiens
aattttaggggatga

SEQ ID NO: 27839 - DNA, 15 bp, Homo sapiens
attttaggggatgac

SEQ ID NO: 27840 - DNA, 15 bp, Homo sapiens
ttttaggggatgaca

SEQ ID NO: 27841 - DNA, 15 bp, Homo sapiens
tttaggggatgacag

SEQ ID NO: 27842 - DNA, 15 bp, Homo sapiens
ttaggggatgacagt

SEQ ID NO: 27843 - DNA, 15 bp, Homo sapiens
taggggatgacagtg

SEQ ID NO: 27844 - DNA, 15 bp, Homo sapiens
aggggatgacagtgg

SEQ ID NO: 27845 - DNA, 15 bp, Homo sapiens
ggggatgacagtggg

SEQ ID NO: 27846 - DNA, 15 bp, Homo sapiens
gggatgacagtgggc

SEQ ID NO: 27847 - DNA, 15 bp, Homo sapiens
ggatgacagtgggct

SEQ ID NO: 27848 - DNA, 15 bp, Homo sapiens
gatgacagtgggctc

SEQ ID NO: 27849 - DNA, 15 bp, Homo sapiens
atgacagtgggctct

SEQ ID NO: 27850 - DNA, 15 bp, Homo sapiens
tgacagtgggctctc

SEQ ID NO: 27851 - DNA, 15 bp, Homo sapiens
gacagtgggctctcc

SEQ ID NO: 27852 - DNA, 15 bp, Homo sapiens
acagtgggctctccg

SEQ ID NO: 27853 - DNA, 15 bp, Homo sapiens
cagtgggctctccgc

SEQ ID NO: 27854 - DNA, 15 bp, Homo sapiens
agtgggctctccgct

SEQ ID NO: 27855 - DNA, 15 bp, Homo sapiens
gtgggctctccgctt

SEQ ID NO: 27856 - DNA, 15 bp, Homo sapiens
tgggctctccgcttt

SEQ ID NO: 27857 - DNA, 15 bp, Homo sapiens
gggctctccgctttc

SEQ ID NO: 27858 - DNA, 15 bp, Homo sapiens
ggctctccgctttct

SEQ ID NO: 27859 - DNA, 15 bp, Homo sapiens
gctctccgctttctc

SEQ ID NO: 27860 - DNA, 15 bp, Homo sapiens
ctctccgctttctcc

SEQ ID NO: 27861 - DNA, 15 bp, Homo sapiens
tctccgctttctcct

SEQ ID NO: 27862 - DNA, 15 bp, Homo sapiens
ctccgctttctcctc

SEQ ID NO: 27863 - DNA, 15 bp, Homo sapiens
tccgctttctcctcc

SEQ ID NO: 27864 - DNA, 15 bp, Homo sapiens
ccgctttctcctcca

SEQ ID NO: 27865 - DNA, 15 bp, Homo sapiens
cgctttctcctccat

SEQ ID NO: 27866 - DNA, 15 bp, Homo sapiens
gctttctcctccatg

SEQ ID NO: 27867 - DNA, 15 bp, Homo sapiens
ctttctcctccatga

SEQ ID NO: 27868 - DNA, 15 bp, Homo sapiens
tttctcctccatgaa

SEQ ID NO: 27869 - DNA, 15 bp, Homo sapiens
ttctcctccatgaag

SEQ ID NO: 27870 - DNA, 15 bp, Homo sapiens
tctcctccatgaagt

SEQ ID NO: 27871 - DNA, 15 bp, Homo sapiens
ctcctccatgaagta

SEQ ID NO: 27872 - DNA, 15 bp, Homo sapiens
tcctccatgaagtaa

SEQ ID NO: 27873 - DNA, 15 bp, Homo sapiens
cctccatgaagtaac

SEQ ID NO: 27874 - DNA, 15 bp, Homo sapiens
ctccatgaagtaact

SEQ ID NO: 27875 - DNA, 15 bp, Homo sapiens
tccatgaagtaactt

SEQ ID NO: 27876 - DNA, 15 bp, Homo sapiens
ccatgaagtaactta

SEQ ID NO: 27877 - DNA, 15 bp, Homo sapiens
catgaagtaacttac

SEQ ID NO: 27878 - DNA, 15 bp, Homo sapiens
atgaagtaacttaca

SEQ ID NO: 27879 - DNA, 15 bp, Homo sapiens
tgaagtaacttacat

SEQ ID NO: 27880 - DNA, 15 bp, Homo sapiens
gaagtaacttacatg

SEQ ID NO: 27881 - DNA, 15 bp, Homo sapiens
aagtaacttacatgc

SEQ ID NO: 27882 - DNA, 15 bp, Homo sapiens
agtaacttacatgcc

SEQ ID NO: 27883 - DNA, 15 bp, Homo sapiens
gtaacttacatgccc

SEQ ID NO: 27884 - DNA, 15 bp, Homo sapiens
taacttacatgcccc

SEQ ID NO: 27885 - DNA, 15 bp, Homo sapiens
aacttacatgcccct

SEQ ID NO: 27886 - DNA, 15 bp, Homo sapiens
acttacatgcccctc

SEQ ID NO: 27887 - DNA, 15 bp, Homo sapiens
cttacatgcccctca

SEQ ID NO: 27888 - DNA, 15 bp, Homo sapiens
ttacatgcccctcac

SEQ ID NO: 27889 - DNA, 15 bp, Homo sapiens
tacatgcccctcacc

SEQ ID NO: 27890 - DNA, 15 bp, Homo sapiens
acatgcccctcaccc

SEQ ID NO: 27891 - DNA, 15 bp, Homo sapiens
catgcccctcaccct

SEQ ID NO: 27892 - DNA, 15 bp, Homo sapiens
atgcccctcaccctc

SEQ ID NO: 27893 - DNA, 15 bp, Homo sapiens
tgcccctcaccctct

SEQ ID NO: 27894 - DNA, 15 bp, Homo sapiens
gcccctcaccctctg

SEQ ID NO: 27895 - DNA, 15 bp, Homo sapiens
cccctcaccctctgt

SEQ ID NO: 27896 - DNA, 15 bp, Homo sapiens
ccctcaccctctgtg

SEQ ID NO: 27897 - DNA, 15 bp, Homo sapiens
cctcaccctctgtgg

SEQ ID NO: 27898 - DNA, 15 bp, Homo sapiens
ctcaccctctgtggg

SEQ ID NO: 27899 - DNA, 15 bp, Homo sapiens
tcaccctctgtggga

SEQ ID NO: 27900 - DNA, 15 bp, Homo sapiens
caccctctgtgggag

SEQ ID NO: 27901 - DNA, 15 bp, Homo sapiens
accctctgtgggagg

SEQ ID NO: 27902 - DNA, 15 bp, Homo sapiens
ccctctgtgggaggg

SEQ ID NO: 27903 - DNA, 15 bp, Homo sapiens
cctctgtgggagggg

SEQ ID NO: 27904 - DNA, 15 bp, Homo sapiens
ctctgtgggaggggt

SEQ ID NO: 27905 - DNA, 15 bp, Homo sapiens
tctgtgggaggggtg

SEQ ID NO: 27906 - DNA, 15 bp, Homo sapiens
ctgtgggaggggtgt

SEQ ID NO: 27907 - DNA, 15 bp, Homo sapiens
tgtgggaggggtgtt

SEQ ID NO: 27908 - DNA, 15 bp, Homo sapiens
gtgggaggggtgttg

SEQ ID NO: 27909 - DNA, 15 bp, Homo sapiens
tgggaggggtgttgc

SEQ ID NO: 27910 - DNA, 15 bp, Homo sapiens
gggaggggtgttgca

SEQ ID NO: 27911 - DNA, 15 bp, Homo sapiens
ggaggggtgttgcag

SEQ ID NO: 27912 - DNA, 15 bp, Homo sapiens
gaggggtgttgcagg

SEQ ID NO: 27913 - DNA, 15 bp, Homo sapiens
aggggtgttgcaggg

SEQ ID NO: 27914 - DNA, 15 bp, Homo sapiens
ggggtgttgcagggg

SEQ ID NO: 27915 - DNA, 15 bp, Homo sapiens
gggtgttgcaggggg

SEQ ID NO: 27916 - DNA, 15 bp, Homo sapiens
ggtgttgcagggggt

SEQ ID NO: 27917 - DNA, 15 bp, Homo sapiens
gtgttgcagggggtg

SEQ ID NO: 27918 - DNA, 15 bp, Homo sapiens
tgttgcagggggtgc

SEQ ID NO: 27919 - DNA, 15 bp, Homo sapiens
gttgcagggggtgca

SEQ ID NO: 27920 - DNA, 15 bp, Homo sapiens
ttgcagggggtgcag

SEQ ID NO: 27921 - DNA, 15 bp, Homo sapiens
tgcagggggtgcaga

SEQ ID NO: 27922 - DNA, 15 bp, Homo sapiens
gcagggggtgcagaa

SEQ ID NO: 27923 - DNA, 15 bp, Homo sapiens
cagggggtgcagaac

SEQ ID NO: 27924 - DNA, 15 bp, Homo sapiens
agggggtgcagaact

SEQ ID NO: 27925 - DNA, 15 bp, Homo sapiens
gggggtgcagaactc

SEQ ID NO: 27926 - DNA, 15 bp, Homo sapiens
ggggtgcagaactcc

SEQ ID NO: 27927 - DNA, 15 bp, Homo sapiens
gggtgcagaactccc

SEQ ID NO: 27928 - DNA, 15 bp, Homo sapiens
ggtgcagaactcccc

SEQ ID NO: 27929 - DNA, 15 bp, Homo sapiens
gtgcagaactcccct

SEQ ID NO: 27930 - DNA, 15 bp, Homo sapiens
tgcagaactcccctc

SEQ ID NO: 27931 - DNA, 15 bp, Homo sapiens
gcagaactcccctcg

SEQ ID NO: 27932 - DNA, 15 bp, Homo sapiens
cagaactcccctcgc

SEQ ID NO: 27933 - DNA, 15 bp, Homo sapiens
agaactcccctcgcc

SEQ ID NO: 27934 - DNA, 15 bp, Homo sapiens
gaactcccctcgccg

SEQ ID NO: 27935 - DNA, 15 bp, Homo sapiens
aactcccctcgccgg

SEQ ID NO: 27936 - DNA, 15 bp, Homo sapiens
actcccctcgccggg

SEQ ID NO: 27937 - DNA, 15 bp, Homo sapiens
ctcccctcgccgggt

SEQ ID NO: 27938 - DNA, 15 bp, Homo sapiens
tcccctcgccgggta

SEQ ID NO: 27939 - DNA, 15 bp, Homo sapiens
cccctcgccgggtag

SEQ ID NO: 27940 - DNA, 15 bp, Homo sapiens
ccctcgccgggtagt

SEQ ID NO: 27941 - DNA, 15 bp, Homo sapiens
cctcgccgggtagtt

SEQ ID NO: 27942 - DNA, 15 bp, Homo sapiens
ctcgccgggtagttc

SEQ ID NO: 27943 - DNA, 15 bp, Homo sapiens
tcgccgggtagttca

SEQ ID NO: 27944 - DNA, 15 bp, Homo sapiens
cgccgggtagttcaa

SEQ ID NO: 27945 - DNA, 15 bp, Homo sapiens
gccgggtagttcaag

SEQ ID NO: 27946 - DNA, 15 bp, Homo sapiens
ccgggtagttcaagc

SEQ ID NO: 27947 - DNA, 15 bp, Homo sapiens
cgggtagttcaagca

SEQ ID NO: 27948 - DNA, 15 bp, Homo sapiens
gggtagttcaagcaa

SEQ ID NO: 27949 - DNA, 15 bp, Homo sapiens
ggtagttcaagcaat

SEQ ID NO: 27950 - DNA, 15 bp, Homo sapiens
gtagttcaagcaatg

SEQ ID NO: 27951 - DNA, 15 bp, Homo sapiens
tagttcaagcaatgg

SEQ ID NO: 27952 - DNA, 15 bp, Homo sapiens
agttcaagcaatggg

SEQ ID NO: 27953 - DNA, 15 bp, Homo sapiens
gttcaagcaatgggg

SEQ ID NO: 27954 - DNA, 15 bp, Homo sapiens
ttcaagcaatgggga

SEQ ID NO: 27955 - DNA, 15 bp, Homo sapiens
tcaagcaatggggac

SEQ ID NO: 27956 - DNA, 15 bp, Homo sapiens
caagcaatggggacc

SEQ ID NO: 27957 - DNA, 15 bp, Homo sapiens
aagcaatggggacca

SEQ ID NO: 27958 - DNA, 15 bp, Homo sapiens
agcaatggggaccat

SEQ ID NO: 27959 - DNA, 15 bp, Homo sapiens
gcaatggggaccata

SEQ ID NO: 27960 - DNA, 15 bp, Homo sapiens
caatggggaccatat

SEQ ID NO: 27961 - DNA, 15 bp, Homo sapiens
aatggggaccatatc

SEQ ID NO: 27962 - DNA, 15 bp, Homo sapiens
atggggaccatatca

SEQ ID NO: 27963 - DNA, 15 bp, Homo sapiens
tggggaccatatcaa

SEQ ID NO: 27964 - DNA, 15 bp, Homo sapiens
ggggaccatatcaat

SEQ ID NO: 27965 - DNA, 15 bp, Homo sapiens
gggaccatatcaatt

SEQ ID NO: 27966 - DNA, 15 bp, Homo sapiens
ggaccatatcaattc

SEQ ID NO: 27967 - DNA, 15 bp, Homo sapiens
gaccatatcaattcc

SEQ ID NO: 27968 - DNA, 15 bp, Homo sapiens
accatatcaattcca

SEQ ID NO: 27969 - DNA, 15 bp, Homo sapiens
ccatatcaattccat

SEQ ID NO: 27970 - DNA, 15 bp, Homo sapiens
catatcaattccatc

SEQ ID NO: 27971 - DNA, 15 bp, Homo sapiens
atatcaattccatct

SEQ ID NO: 27972 - DNA, 15 bp, Homo sapiens
tatcaattccatcta

SEQ ID NO: 27973 - DNA, 15 bp, Homo sapiens
atcaattccatctat

SEQ ID NO: 27974 - DNA, 15 bp, Homo sapiens
tcaattccatctata

SEQ ID NO: 27975 - DNA, 15 bp, Homo sapiens
caattccatctatag

SEQ ID NO: 27976 - DNA, 15 bp, Homo sapiens
aattccatctatagg

SEQ ID NO: 27977 - DNA, 15 bp, Homo sapiens
attccatctataggg

SEQ ID NO: 27978 - DNA, 15 bp, Homo sapiens
ttccatctataggga

SEQ ID NO: 27979 - DNA, 15 bp, Homo sapiens
tccatctatagggaa

SEQ ID NO: 27980 - DNA, 15 bp, Homo sapiens
ccatctatagggaaa

SEQ ID NO: 27981 - DNA, 15 bp, Homo sapiens
catctatagggaaac

SEQ ID NO: 27982 - DNA, 15 bp, Homo sapiens
atctatagggaaact

SEQ ID NO: 27983 - DNA, 15 bp, Homo sapiens
tctatagggaaactg

SEQ ID NO: 27984 - DNA, 15 bp, Homo sapiens
ctatagggaaactga

SEQ ID NO: 27985 - DNA, 15 bp, Homo sapiens
tatagggaaactgag

SEQ ID NO: 27986 - DNA, 15 bp, Homo sapiens
atagggaaactgagg

SEQ ID NO: 27987 - DNA, 15 bp, Homo sapiens
tagggaaactgaggc

SEQ ID NO: 27988 - DNA, 15 bp, Homo sapiens
agggaaactgaggcc

SEQ ID NO: 27989 - DNA, 15 bp, Homo sapiens
gggaaactgaggcct

SEQ ID NO: 27990 - DNA, 15 bp, Homo sapiens
ggaaactgaggcctg

SEQ ID NO: 27991 - DNA, 15 bp, Homo sapiens
gaaactgaggcctgg

SEQ ID NO: 27992 - DNA, 15 bp, Homo sapiens
aaactgaggcctgga

SEQ ID NO: 27993 - DNA, 15 bp, Homo sapiens
aactgaggcctggag

SEQ ID NO: 27994 - DNA, 15 bp, Homo sapiens
actgaggcctggagt

SEQ ID NO: 27995 - DNA, 15 bp, Homo sapiens
ctgaggcctggagta

SEQ ID NO: 27996 - DNA, 15 bp, Homo sapiens
tgaggcctggagtag

SEQ ID NO: 27997 - DNA, 15 bp, Homo sapiens
gaggcctggagtagg

SEQ ID NO: 27998 - DNA, 15 bp, Homo sapiens
aggcctggagtaggg

SEQ ID NO: 27999 - DNA, 15 bp, Homo sapiens
ggcctggagtagggc

SEQ ID NO: 28000 - DNA, 15 bp, Homo sapiens
gcctggagtagggcg

SEQ ID NO: 28001 - DNA, 15 bp, Homo sapiens
cctggagtagggcga

SEQ ID NO: 28002 - DNA, 15 bp, Homo sapiens
ctggagtagggcgag

SEQ ID NO: 28003 - DNA, 15 bp, Homo sapiens
tggagtagggcgagg

SEQ ID NO: 28004 - DNA, 15 bp, Homo sapiens
ggagtagggcgaggc

SEQ ID NO: 28005 - DNA, 15 bp, Homo sapiens
gagtagggcgaggcc

SEQ ID NO: 28006 - DNA, 15 bp, Homo sapiens
agtagggcgaggcct

SEQ ID NO: 28007 - DNA, 15 bp, Homo sapiens
gtagggcgaggcctc

SEQ ID NO: 28008 - DNA, 15 bp, Homo sapiens
tagggcgaggcctct

SEQ ID NO: 28009 - DNA, 15 bp, Homo sapiens
agggcgaggcctctg

SEQ ID NO: 28010 - DNA, 15 bp, Homo sapiens
gggcgaggcctctgg

SEQ ID NO: 28011 - DNA, 15 bp, Homo sapiens
ggcgaggcctctggg

SEQ ID NO: 28012 - DNA, 15 bp, Homo sapiens
gcgaggcctctggga

SEQ ID NO: 28013 - DNA, 15 bp, Homo sapiens
cgaggcctctgggaa

SEQ ID NO: 28014 - DNA, 15 bp, Homo sapiens
gaggcctctgggaac

SEQ ID NO: 28015 - DNA, 15 bp, Homo sapiens
aggcctctgggaacc

SEQ ID NO: 28016 - DNA, 15 bp, Homo sapiens
ggcctctgggaaccc

SEQ ID NO: 28017 - DNA, 15 bp, Homo sapiens
gcctctgggaaccca

SEQ ID NO: 28018 - DNA, 15 bp, Homo sapiens
cctctgggaacccag

SEQ ID NO: 28019 - DNA, 15 bp, Homo sapiens
ctctgggaacccagc

SEQ ID NO: 28020 - DNA, 15 bp, Homo sapiens
tctgggaacccagcc

SEQ ID NO: 28021 - DNA, 15 bp, Homo sapiens
ctgggaacccagccc

SEQ ID NO: 28022 - DNA, 15 bp, Homo sapiens
tgggaacccagccct

SEQ ID NO: 28023 - DNA, 15 bp, Homo sapiens
gggaacccagcccta

SEQ ID NO: 28024 - DNA, 15 bp, Homo sapiens
ggaacccagccctat

SEQ ID NO: 28025 - DNA, 15 bp, Homo sapiens
gaacccagccctatt

SEQ ID NO: 28026 - DNA, 15 bp, Homo sapiens
aacccagccctattc

SEQ ID NO: 28027 - DNA, 15 bp, Homo sapiens
acccagccctattct

SEQ ID NO: 28028 - DNA, 15 bp, Homo sapiens
cccagccctattctg

SEQ ID NO: 28029 - DNA, 15 bp, Homo sapiens
ccagccctattctgt

SEQ ID NO: 28030 - DNA, 15 bp, Homo sapiens
cagccctattctgtc

SEQ ID NO: 28031 - DNA, 15 bp, Homo sapiens
agccctattctgtct

SEQ ID NO: 28032 - DNA, 15 bp, Homo sapiens
gccctattctgtctc

SEQ ID NO: 28033 - DNA, 15 bp, Homo sapiens
ccctattctgtctct

SEQ ID NO: 28034 - DNA, 15 bp, Homo sapiens
cctattctgtctctt

SEQ ID NO: 28035 - DNA, 15 bp, Homo sapiens
ctattctgtctcttt

SEQ ID NO: 28036 - DNA, 15 bp, Homo sapiens
tattctgtctctttc

SEQ ID NO: 28037 - DNA, 15 bp, Homo sapiens
attctgtctctttcc

SEQ ID NO: 28038 - DNA, 15 bp, Homo sapiens
ttctgtctctttccc

SEQ ID NO: 28039 - DNA, 15 bp, Homo sapiens
tctgtctctttccct

SEQ ID NO: 28040 - DNA, 15 bp, Homo sapiens
ctgtctctttccctg

SEQ ID NO: 28041 - DNA, 15 bp, Homo sapiens
tgtctctttccctgg

SEQ ID NO: 28042 - DNA, 15 bp, Homo sapiens
gtctctttccctggc

SEQ ID NO: 28043 - DNA, 15 bp, Homo sapiens
tctctttccctggca

SEQ ID NO: 28044 - DNA, 15 bp, Homo sapiens
ctctttccctggcat

SEQ ID NO: 28045 - DNA, 15 bp, Homo sapiens
tctttccctggcatt

SEQ ID NO: 28046 - DNA, 15 bp, Homo sapiens
ctttccctggcattt

SEQ ID NO: 28047 - DNA, 15 bp, Homo sapiens
tttccctggcatttc

SEQ ID NO: 28048 - DNA, 15 bp, Homo sapiens
ttccctggcatttcc

SEQ ID NO: 28049 - DNA, 15 bp, Homo sapiens
tccctggcatttccc

SEQ ID NO: 28050 - DNA, 15 bp, Homo sapiens
ccctggcatttccca

SEQ ID NO: 28051 - DNA, 15 bp, Homo sapiens
cctggcatttcccat

SEQ ID NO: 28052 - DNA, 15 bp, Homo sapiens
ctggcatttcccatc

SEQ ID NO: 28053 - DNA, 15 bp, Homo sapiens
tggcatttcccatcc

SEQ ID NO: 28054 - DNA, 15 bp, Homo sapiens
ggcatttcccatcca

SEQ ID NO: 28055 - DNA, 15 bp, Homo sapiens
gcatttcccatccac

SEQ ID NO: 28056 - DNA, 15 bp, Homo sapiens
catttcccatccaca

SEQ ID NO: 28057 - DNA, 15 bp, Homo sapiens
atttcccatccacac

SEQ ID NO: 28058 - DNA, 15 bp, Homo sapiens
tttcccatccacaca

SEQ ID NO: 28059 - DNA, 15 bp, Homo sapiens
ttcccatccacacat

SEQ ID NO: 28060 - DNA, 15 bp, Homo sapiens
tcccatccacacata

SEQ ID NO: 28061 - DNA, 15 bp, Homo sapiens
cccatccacacatag

SEQ ID NO: 28062 - DNA, 15 bp, Homo sapiens
ccatccacacataga

SEQ ID NO: 28063 - DNA, 15 bp, Homo sapiens
catccacacatagag

SEQ ID NO: 28064 - DNA, 15 bp, Homo sapiens
atccacacatagagc

SEQ ID NO: 28065 - DNA, 15 bp, Homo sapiens
tccacacatagagct

SEQ ID NO: 28066 - DNA, 15 bp, Homo sapiens
ccacacatagagctt

SEQ ID NO: 28067 - DNA, 15 bp, Homo sapiens
cacacatagagcttc

SEQ ID NO: 28068 - DNA, 15 bp, Homo sapiens
acacatagagcttca

SEQ ID NO: 28069 - DNA, 15 bp, Homo sapiens
cacatagagcttcag

SEQ ID NO: 28070 - DNA, 15 bp, Homo sapiens
acatagagcttcaga

SEQ ID NO: 28071 - DNA, 15 bp, Homo sapiens
catagagcttcagat

SEQ ID NO: 28072 - DNA, 15 bp, Homo sapiens
atagagcttcagatt

SEQ ID NO: 28073 - DNA, 15 bp, Homo sapiens
tagagcttcagattc

SEQ ID NO: 28074 - DNA, 15 bp, Homo sapiens
agagcttcagattct

SEQ ID NO: 28075 - DNA, 15 bp, Homo sapiens
gagcttcagattctc

SEQ ID NO: 28076 - DNA, 15 bp, Homo sapiens
agcttcagattctct

SEQ ID NO: 28077 - DNA, 15 bp, Homo sapiens
gcttcagattctctt

SEQ ID NO: 28078 - DNA, 15 bp, Homo sapiens
cttcagattctcttt

SEQ ID NO: 28079 - DNA, 15 bp, Homo sapiens
ttcagattctctttc

SEQ ID NO: 28080 - DNA, 15 bp, Homo sapiens
tcagattctctttct

SEQ ID NO: 28081 - DNA, 15 bp, Homo sapiens
cagattctctttctt

SEQ ID NO: 28082 - DNA, 15 bp, Homo sapiens
agattctctttcttt

SEQ ID NO: 28083 - DNA, 15 bp, Homo sapiens
gattctctttctttc

SEQ ID NO: 28084 - DNA, 15 bp, Homo sapiens
attctctttctttcc

SEQ ID NO: 28085 - DNA, 15 bp, Homo sapiens
ttctctttctttccc

SEQ ID NO: 28086 - DNA, 15 bp, Homo sapiens
tctctttctttcccc

SEQ ID NO: 28087 - DNA, 15 bp, Homo sapiens
ctctttctttcccca

SEQ ID NO: 28088 - DNA, 15 bp, Homo sapiens
tctttctttccccag

SEQ ID NO: 28089 - DNA, 15 bp, Homo sapiens
ctttctttccccaga

SEQ ID NO: 28090 - DNA, 15 bp, Homo sapiens
tttctttccccagag

SEQ ID NO: 28091 - DNA, 15 bp, Homo sapiens
ttctttccccagaga

SEQ ID NO: 28092 - DNA, 15 bp, Homo sapiens
tctttccccagagac

SEQ ID NO: 28093 - DNA, 15 bp, Homo sapiens
ctttccccagagacc

SEQ ID NO: 28094 - DNA, 15 bp, Homo sapiens
tttccccagagaccc

SEQ ID NO: 28095 - DNA, 15 bp, Homo sapiens
ttccccagagaccct

SEQ ID NO: 28096 - DNA, 15 bp, Homo sapiens
tccccagagaccctc

SEQ ID NO: 28097 - DNA, 15 bp, Homo sapiens
ccccagagaccctca

SEQ ID NO: 28098 - DNA, 15 bp, Homo sapiens
cccagagaccctcaa

SEQ ID NO: 28099 - DNA, 15 bp, Homo sapiens
ccagagaccctcaaa

SEQ ID NO: 28100 - DNA, 15 bp, Homo sapiens
cagagaccctcaaat

SEQ ID NO: 28101 - DNA, 15 bp, Homo sapiens
agagaccctcaaata

SEQ ID NO: 28102 - DNA, 15 bp, Homo sapiens
gagaccctcaaatat

SEQ ID NO: 28103 - DNA, 15 bp, Homo sapiens
agaccctcaaatatc

SEQ ID NO: 28104 - DNA, 15 bp, Homo sapiens
gaccctcaaatatcc

SEQ ID NO: 28105 - DNA, 15 bp, Homo sapiens
accctcaaatatcct

SEQ ID NO: 28106 - DNA, 15 bp, Homo sapiens
ccctcaaatatcctc

SEQ ID NO: 28107 - DNA, 15 bp, Homo sapiens
cctcaaatatcctct

SEQ ID NO: 28108 - DNA, 15 bp, Homo sapiens
ctcaaatatcctctc

SEQ ID NO: 28109 - DNA, 15 bp, Homo sapiens
tcaaatatcctctca

SEQ ID NO: 28110 - DNA, 15 bp, Homo sapiens
caaatatcctctcac

SEQ ID NO: 28111 - DNA, 15 bp, Homo sapiens
aaatatcctctcact

SEQ ID NO: 28112 - DNA, 15 bp, Homo sapiens
aatatcctctcactc

SEQ ID NO: 28113 - DNA, 15 bp, Homo sapiens
atatcctctcactca

SEQ ID NO: 28114 - DNA, 15 bp, Homo sapiens
tatcctctcactcac

SEQ ID NO: 28115 - DNA, 15 bp, Homo sapiens
atcctctcactcaca

SEQ ID NO: 28116 - DNA, 15 bp, Homo sapiens
tcctctcactcacag

SEQ ID NO: 28117 - DNA, 15 bp, Homo sapiens
cctctcactcacaga

SEQ ID NO: 28118 - DNA, 15 bp, Homo sapiens
ctctcactcacagaa

SEQ ID NO: 28119 - DNA, 15 bp, Homo sapiens
tctcactcacagaat

SEQ ID NO: 28120 - DNA, 15 bp, Homo sapiens
ctcactcacagaatg

SEQ ID NO: 28121 - DNA, 15 bp, Homo sapiens
tcactcacagaatgg

SEQ ID NO: 28122 - DNA, 15 bp, Homo sapiens
cactcacagaatggt

SEQ ID NO: 28123 - DNA, 15 bp, Homo sapiens
actcacagaatggtg

SEQ ID NO: 28124 - DNA, 15 bp, Homo sapiens
ctcacagaatggtgt

SEQ ID NO: 28125 - DNA, 15 bp, Homo sapiens
tcacagaatggtgtc

SEQ ID NO: 28126 - DNA, 15 bp, Homo sapiens
cacagaatggtgtct

SEQ ID NO: 28127 - DNA, 15 bp, Homo sapiens
acagaatggtgtctc

SEQ ID NO: 28128 - DNA, 15 bp, Homo sapiens
cagaatggtgtctct

SEQ ID NO: 28129 - DNA, 15 bp, Homo sapiens
agaatggtgtctctg

SEQ ID NO: 28130 - DNA, 15 bp, Homo sapiens
gaatggtgtctctgc

SEQ ID NO: 28131 - DNA, 15 bp, Homo sapiens
aatggtgtctctgcc

SEQ ID NO: 28132 - DNA, 15 bp, Homo sapiens
atggtgtctctgcct

SEQ ID NO: 28133 - DNA, 15 bp, Homo sapiens
tggtgtctctgcctg

SEQ ID NO: 28134 - DNA, 15 bp, Homo sapiens
ggtgtctctgcctgc

SEQ ID NO: 28135 - DNA, 15 bp, Homo sapiens
gtgtctctgcctgcc

SEQ ID NO: 28136 - DNA, 15 bp, Homo sapiens
tgtctctgcctgcct

SEQ ID NO: 28137 - DNA, 15 bp, Homo sapiens
gtctctgcctgcctc

SEQ ID NO: 28138 - DNA, 15 bp, Homo sapiens
tctctgcctgcctcg

SEQ ID NO: 28139 - DNA, 15 bp, Homo sapiens
ctctgcctgcctcgg

SEQ ID NO: 28140 - DNA, 15 bp, Homo sapiens
tctgcctgcctcggg

SEQ ID NO: 28141 - DNA, 15 bp, Homo sapiens
ctgcctgcctcgggt

SEQ ID NO: 28142 - DNA, 15 bp, Homo sapiens
tgcctgcctcgggtt

SEQ ID NO: 28143 - DNA, 15 bp, Homo sapiens
gcctgcctcgggttg

SEQ ID NO: 28144 - DNA, 15 bp, Homo sapiens
cctgcctcgggttgg

SEQ ID NO: 28145 - DNA, 15 bp, Homo sapiens
ctgcctcgggttggc

SEQ ID NO: 28146 - DNA, 15 bp, Homo sapiens
tgcctcgggttggcc

SEQ ID NO: 28147 - DNA, 15 bp, Homo sapiens
gcctcgggttggccc

SEQ ID NO: 28148 - DNA, 15 bp, Homo sapiens
cctcgggttggccct

SEQ ID NO: 28149 - DNA, 15 bp, Homo sapiens
ctcgggttggccctg

SEQ ID NO: 28150 - DNA, 15 bp, Homo sapiens
tcgggttggccctgt

SEQ ID NO: 28151 - DNA, 15 bp, Homo sapiens
cgggttggccctgtg

SEQ ID NO: 28152 - DNA, 15 bp, Homo sapiens
gggttggccctgtga

SEQ ID NO: 28153 - DNA, 15 bp, Homo sapiens
ggttggccctgtgat

SEQ ID NO: 28154 - DNA, 15 bp, Homo sapiens
gttggccctgtgatt

SEQ ID NO: 28155 - DNA, 15 bp, Homo sapiens
ttggccctgtgattt

SEQ ID NO: 28156 - DNA, 15 bp, Homo sapiens
tggccctgtgattta

SEQ ID NO: 28157 - DNA, 15 bp, Homo sapiens
ggccctgtgatttat

SEQ ID NO: 28158 - DNA, 15 bp, Homo sapiens
gccctgtgatttatt

SEQ ID NO: 28159 - DNA, 15 bp, Homo sapiens
ccctgtgatttattt

SEQ ID NO: 28160 - DNA, 15 bp, Homo sapiens
cctgtgatttatttt

SEQ ID NO: 28161 - DNA, 15 bp, Homo sapiens
ctgtgatttatttta

SEQ ID NO: 28162 - DNA, 15 bp, Homo sapiens
tgtgatttattttag

SEQ ID NO: 28163 - DNA, 15 bp, Homo sapiens
gtgatttattttagt

SEQ ID NO: 28164 - DNA, 15 bp, Homo sapiens
tgatttattttagtt

SEQ ID NO: 28165 - DNA, 15 bp, Homo sapiens
gatttattttagttc

SEQ ID NO: 28166 - DNA, 15 bp, Homo sapiens
atttattttagttct

SEQ ID NO: 28167 - DNA, 15 bp, Homo sapiens
tttattttagttctt

SEQ ID NO: 28168 - DNA, 15 bp, Homo sapiens
ttattttagttcttt

SEQ ID NO: 28169 - DNA, 15 bp, Homo sapiens
tattttagttctttt

SEQ ID NO: 28170 - DNA, 15 bp, Homo sapiens
attttagttcttttc

SEQ ID NO: 28171 - DNA, 15 bp, Homo sapiens
ttttagttcttttcc

SEQ ID NO: 28172 - DNA, 15 bp, Homo sapiens
tttagttcttttccc

SEQ ID NO: 28173 - DNA, 15 bp, Homo sapiens
ttagttcttttccct

SEQ ID NO: 28174 - DNA, 15 bp, Homo sapiens
tagttcttttccctt

SEQ ID NO: 28175 - DNA, 15 bp, Homo sapiens
agttcttttcccttg

SEQ ID NO: 28176 - DNA, 15 bp, Homo sapiens
gttcttttcccttgt

SEQ ID NO: 28177 - DNA, 15 bp, Homo sapiens
ttcttttcccttgtt

SEQ ID NO: 28178 - DNA, 15 bp, Homo sapiens
tcttttcccttgttt

SEQ ID NO: 28179 - DNA, 15 bp, Homo sapiens
cttttcccttgtttt

SEQ ID NO: 28180 - DNA, 15 bp, Homo sapiens
ttttcccttgttttt

SEQ ID NO: 28181 - DNA, 15 bp, Homo sapiens
tttcccttgtttttt

SEQ ID NO: 28182 - DNA, 15 bp, Homo sapiens
ttcccttgttttttt

SEQ ID NO: 28183 - DNA, 15 bp, Homo sapiens
tcccttgtttttttt

SEQ ID NO: 28184 - DNA, 15 bp, Homo sapiens
cccttgttttttttt

SEQ ID NO: 28185 - DNA, 15 bp, Homo sapiens
ccttgtttttttttt

SEQ ID NO: 28186 - DNA, 15 bp, Homo sapiens
cttgttttttttttt

SEQ ID NO: 28187 - DNA, 15 bp, Homo sapiens
ttgtttttttttttt

SEQ ID NO: 28188 - DNA, 15 bp, Homo sapiens
tgttttttttttttc

SEQ ID NO: 28189 - DNA, 15 bp, Homo sapiens
gttttttttttttca

SEQ ID NO: 28190 - DNA, 15 bp, Homo sapiens
ttttttttttttcaa

SEQ ID NO: 28191 - DNA, 15 bp, Homo sapiens
tttttttttttcaaa

SEQ ID NO: 28192 - DNA, 15 bp, Homo sapiens
ttttttttttcaaac

SEQ ID NO: 28193 - DNA, 15 bp, Homo sapiens
tttttttttcaaact

SEQ ID NO: 28194 - DNA, 15 bp, Homo sapiens
ttttttttcaaactc

SEQ ID NO: 28195 - DNA, 15 bp, Homo sapiens
tttttttcaaactct

SEQ ID NO: 28196 - DNA, 15 bp, Homo sapiens
ttttttcaaactcta

SEQ ID NO: 28197 - DNA, 15 bp, Homo sapiens
tttttcaaactctat

SEQ ID NO: 28198 - DNA, 15 bp, Homo sapiens
ttttcaaactctata

SEQ ID NO: 28199 - DNA, 15 bp, Homo sapiens
tttcaaactctatac

SEQ ID NO: 28200 - DNA, 15 bp, Homo sapiens
ttcaaactctataca

SEQ ID NO: 28201 - DNA, 15 bp, Homo sapiens
tcaaactctatacac

SEQ ID NO: 28202 - DNA, 15 bp, Homo sapiens
caaactctatacact

SEQ ID NO: 28203 - DNA, 15 bp, Homo sapiens
aaactctatacactt

SEQ ID NO: 28204 - DNA, 15 bp, Homo sapiens
aactctatacacttt

SEQ ID NO: 28205 - DNA, 15 bp, Homo sapiens
actctatacactttt

SEQ ID NO: 28206 - DNA, 15 bp, Homo sapiens
ctctatacacttttg

SEQ ID NO: 28207 - DNA, 15 bp, Homo sapiens
tctatacacttttgt

SEQ ID NO: 28208 - DNA, 15 bp, Homo sapiens
ctatacacttttgtt

SEQ ID NO: 28209 - DNA, 15 bp, Homo sapiens
tatacacttttgttt

SEQ ID NO: 28210 - DNA, 15 bp, Homo sapiens
atacacttttgtttt

SEQ ID NO: 28211 - DNA, 15 bp, Homo sapiens
tacacttttgtttta

SEQ ID NO: 28212 - DNA, 15 bp, Homo sapiens
acacttttgttttaa

SEQ ID NO: 28213 - DNA, 15 bp, Homo sapiens
cacttttgttttaaa

SEQ ID NO: 28214 - DNA, 15 bp, Homo sapiens
acttttgttttaaaa

SEQ ID NO: 28215 - DNA, 15 bp, Homo sapiens
cttttgttttaaaaa

SEQ ID NO: 28216 - DNA, 15 bp, Homo sapiens
ttttgttttaaaaac

SEQ ID NO: 28217 - DNA, 15 bp, Homo sapiens
tttgttttaaaaact

SEQ ID NO: 28218 - DNA, 15 bp, Homo sapiens
ttgttttaaaaactg

SEQ ID NO: 28219 - DNA, 15 bp, Homo sapiens
tgttttaaaaactgt

SEQ ID NO: 28220 - DNA, 15 bp, Homo sapiens
gttttaaaaactgtg

SEQ ID NO: 28221 - DNA, 15 bp, Homo sapiens
ttttaaaaactgtgg

SEQ ID NO: 28222 - DNA, 15 bp, Homo sapiens
tttaaaaactgtggt

SEQ ID NO: 28223 - DNA, 15 bp, Homo sapiens
ttaaaaactgtggtt

SEQ ID NO: 28224 - DNA, 15 bp, Homo sapiens
taaaaactgtggttt

SEQ ID NO: 28225 - DNA, 15 bp, Homo sapiens
aaaaactgtggtttc

SEQ ID NO: 28226 - DNA, 15 bp, Homo sapiens
aaaactgtggtttct

SEQ ID NO: 28227 - DNA, 15 bp, Homo sapiens
aaactgtggtttctc

SEQ ID NO: 28228 - DNA, 15 bp, Homo sapiens
aactgtggtttctca

SEQ ID NO: 28229 - DNA, 15 bp, Homo sapiens
actgtggtttctcat

SEQ ID NO: 28230 - DNA, 15 bp, Homo sapiens
ctgtggtttctcatg

SEQ ID NO: 28231 - DNA, 15 bp, Homo sapiens
tgtggtttctcatga

SEQ ID NO: 28232 - DNA, 15 bp, Homo sapiens
gtggtttctcatgag

SEQ ID NO: 28233 - DNA, 15 bp, Homo sapiens
tggtttctcatgagc

SEQ ID NO: 28234 - DNA, 15 bp, Homo sapiens
ggtttctcatgagcc

SEQ ID NO: 28235 - DNA, 15 bp, Homo sapiens
gtttctcatgagccc

SEQ ID NO: 28236 - DNA, 15 bp, Homo sapiens
tttctcatgagccct

SEQ ID NO: 28237 - DNA, 15 bp, Homo sapiens
ttctcatgagcccta

SEQ ID NO: 28238 - DNA, 15 bp, Homo sapiens
tctcatgagccctat

SEQ ID NO: 28239 - DNA, 15 bp, Homo sapiens
ctcatgagccctatt

SEQ ID NO: 28240 - DNA, 15 bp, Homo sapiens
tcatgagccctatta

SEQ ID NO: 28241 - DNA, 15 bp, Homo sapiens
catgagccctattat

SEQ ID NO: 28242 - DNA, 15 bp, Homo sapiens
atgagccctattatc

SEQ ID NO: 28243 - DNA, 15 bp, Homo sapiens
tgagccctattatct

SEQ ID NO: 28244 - DNA, 15 bp, Homo sapiens
gagccctattatctc

SEQ ID NO: 28245 - DNA, 15 bp, Homo sapiens
agccctattatctca

SEQ ID NO: 28246 - DNA, 15 bp, Homo sapiens
gccctattatctcat

SEQ ID NO: 28247 - DNA, 15 bp, Homo sapiens
ccctattatctcatt

SEQ ID NO: 28248 - DNA, 15 bp, Homo sapiens
cctattatctcattg

SEQ ID NO: 28249 - DNA, 15 bp, Homo sapiens
ctattatctcattga

SEQ ID NO: 28250 - DNA, 15 bp, Homo sapiens
tattatctcattgat

SEQ ID NO: 28251 - DNA, 15 bp, Homo sapiens
attatctcattgata

SEQ ID NO: 28252 - DNA, 15 bp, Homo sapiens
ttatctcattgatac

SEQ ID NO: 28253 - DNA, 15 bp, Homo sapiens
tatctcattgatacc

SEQ ID NO: 28254 - DNA, 15 bp, Homo sapiens
atctcattgatacct

SEQ ID NO: 28255 - DNA, 15 bp, Homo sapiens
tctcattgatacctc

SEQ ID NO: 28256 - DNA, 15 bp, Homo sapiens
ctcattgatacctct

SEQ ID NO: 28257 - DNA, 15 bp, Homo sapiens
tcattgatacctctc

SEQ ID NO: 28258 - DNA, 15 bp, Homo sapiens
cattgatacctctca

SEQ ID NO: 28259 - DNA, 15 bp, Homo sapiens
attgatacctctcac

SEQ ID NO: 28260 - DNA, 15 bp, Homo sapiens
ttgatacctctcacc

SEQ ID NO: 28261 - DNA, 15 bp, Homo sapiens
tgatacctctcacct

SEQ ID NO: 28262 - DNA, 15 bp, Homo sapiens
gatacctctcacctc

SEQ ID NO: 28263 - DNA, 15 bp, Homo sapiens
atacctctcacctct

SEQ ID NO: 28264 - DNA, 15 bp, Homo sapiens
tacctctcacctctg

SEQ ID NO: 28265 - DNA, 15 bp, Homo sapiens
acctctcacctctgt

SEQ ID NO: 28266 - DNA, 15 bp, Homo sapiens
cctctcacctctgtg

SEQ ID NO: 28267 - DNA, 15 bp, Homo sapiens
ctctcacctctgtgg

SEQ ID NO: 28268 - DNA, 15 bp, Homo sapiens
tctcacctctgtggt

SEQ ID NO: 28269 - DNA, 15 bp, Homo sapiens
ctcacctctgtggtg

SEQ ID NO: 28270 - DNA, 15 bp, Homo sapiens
tcacctctgtggtga

SEQ ID NO: 28271 - DNA, 15 bp, Homo sapiens
cacctctgtggtgag

SEQ ID NO: 28272 - DNA, 15 bp, Homo sapiens
acctctgtggtgagg

SEQ ID NO: 28273 - DNA, 15 bp, Homo sapiens
cctctgtggtgaggg

SEQ ID NO: 28274 - DNA, 15 bp, Homo sapiens
ctctgtggtgagggg

SEQ ID NO: 28275 - DNA, 15 bp, Homo sapiens
tctgtggtgagggga

SEQ ID NO: 28276 - DNA, 15 bp, Homo sapiens
ctgtggtgaggggaa

SEQ ID NO: 28277 - DNA, 15 bp, Homo sapiens
tgtggtgaggggaag

SEQ ID NO: 28278 - DNA, 15 bp, Homo sapiens
gtggtgaggggaaga

SEQ ID NO: 28279 - DNA, 15 bp, Homo sapiens
tggtgaggggaagaa

SEQ ID NO: 28280 - DNA, 15 bp, Homo sapiens
ggtgaggggaagaaa

SEQ ID NO: 28281 - DNA, 15 bp, Homo sapiens
gtgaggggaagaaat

SEQ ID NO: 28282 - DNA, 15 bp, Homo sapiens
tgaggggaagaaatc

SEQ ID NO: 28283 - DNA, 15 bp, Homo sapiens
gaggggaagaaatca

SEQ ID NO: 28284 - DNA, 15 bp, Homo sapiens
aggggaagaaatcat

SEQ ID NO: 28285 - DNA, 15 bp, Homo sapiens
ggggaagaaatcata

SEQ ID NO: 28286 - DNA, 15 bp, Homo sapiens
gggaagaaatcatat

SEQ ID NO: 28287 - DNA, 15 bp, Homo sapiens
ggaagaaatcatatt

SEQ ID NO: 28288 - DNA, 15 bp, Homo sapiens
gaagaaatcatattt

SEQ ID NO: 28289 - DNA, 15 bp, Homo sapiens
aagaaatcatatttt

SEQ ID NO: 28290 - DNA, 15 bp, Homo sapiens
agaaatcatattttc

SEQ ID NO: 28291 - DNA, 15 bp, Homo sapiens
gaaatcatattttca

SEQ ID NO: 28292 - DNA, 15 bp, Homo sapiens
aaatcatattttcag

SEQ ID NO: 28293 - DNA, 15 bp, Homo sapiens
aatcatattttcaga

SEQ ID NO: 28294 - DNA, 15 bp, Homo sapiens
atcatattttcagat

SEQ ID NO: 28295 - DNA, 15 bp, Homo sapiens
tcatattttcagatg

SEQ ID NO: 28296 - DNA, 15 bp, Homo sapiens
catattttcagatga

SEQ ID NO: 28297 - DNA, 15 bp, Homo sapiens
atattttcagatgac

SEQ ID NO: 28298 - DNA, 15 bp, Homo sapiens
tattttcagatgact

SEQ ID NO: 28299 - DNA, 15 bp, Homo sapiens
attttcagatgactc

SEQ ID NO: 28300 - DNA, 15 bp, Homo sapiens
ttttcagatgactcg

SEQ ID NO: 28301 - DNA, 15 bp, Homo sapiens
tttcagatgactcgt

SEQ ID NO: 28302 - DNA, 15 bp, Homo sapiens
ttcagatgactcgta

SEQ ID NO: 28303 - DNA, 15 bp, Homo sapiens
tcagatgactcgtaa

SEQ ID NO: 28304 - DNA, 15 bp, Homo sapiens
cagatgactcgtaaa

SEQ ID NO: 28305 - DNA, 15 bp, Homo sapiens
agatgactcgtaaag

SEQ ID NO: 28306 - DNA, 15 bp, Homo sapiens
gatgactcgtaaagg

SEQ ID NO: 28307 - DNA, 15 bp, Homo sapiens
atgactcgtaaaggg

SEQ ID NO: 28308 - DNA, 15 bp, Homo sapiens
tgactcgtaaagggc

SEQ ID NO: 28309 - DNA, 15 bp, Homo sapiens
gactcgtaaagggca

SEQ ID NO: 28310 - DNA, 15 bp, Homo sapiens
actcgtaaagggcaa

SEQ ID NO: 28311 - DNA, 15 bp, Homo sapiens
ctcgtaaagggcaaa

SEQ ID NO: 28312 - DNA, 15 bp, Homo sapiens
tcgtaaagggcaaag

SEQ ID NO: 28313 - DNA, 15 bp, Homo sapiens
cgtaaagggcaaaga

SEQ ID NO: 28314 - DNA, 15 bp, Homo sapiens
gtaaagggcaaagaa

SEQ ID NO: 28315 - DNA, 15 bp, Homo sapiens
taaagggcaaagaaa

SEQ ID NO: 28316 - DNA, 15 bp, Homo sapiens
aaagggcaaagaaaa

SEQ ID NO: 28317 - DNA, 15 bp, Homo sapiens
aagggcaaagaaaaa

SEQ ID NO: 28318 - DNA, 15 bp, Homo sapiens
agggcaaagaaaaaa

SEQ ID NO: 28319 - DNA, 15 bp, Homo sapiens
gggcaaagaaaaaaa

SEQ ID NO: 28320 - DNA, 15 bp, Homo sapiens
ggcaaagaaaaaaac

SEQ ID NO: 28321 - DNA, 15 bp, Homo sapiens
gcaaagaaaaaaacc

SEQ ID NO: 28322 - DNA, 15 bp, Homo sapiens
caaagaaaaaaaccc

SEQ ID NO: 28323 - DNA, 15 bp, Homo sapiens
aaagaaaaaaaccca

SEQ ID NO: 28324 - DNA, 15 bp, Homo sapiens
aagaaaaaaacccaa

SEQ ID NO: 28325 - DNA, 15 bp, Homo sapiens
agaaaaaaacccaaa

SEQ ID NO: 28326 - DNA, 15 bp, Homo sapiens
gaaaaaaacccaaaa

SEQ ID NO: 28327 - DNA, 15 bp, Homo sapiens
aaaaaaacccaaaat

SEQ ID NO: 28328 - DNA, 15 bp, Homo sapiens
aaaaaacccaaaatt

SEQ ID NO: 28329 - DNA, 15 bp, Homo sapiens
aaaaacccaaaattt

SEQ ID NO: 28330 - DNA, 15 bp, Homo sapiens
aaaacccaaaatttc

SEQ ID NO: 28331 - DNA, 15 bp, Homo sapiens
aaacccaaaatttca

SEQ ID NO: 28332 - DNA, 15 bp, Homo sapiens
aacccaaaatttcaa

SEQ ID NO: 28333 - DNA, 15 bp, Homo sapiens
acccaaaatttcaaa

SEQ ID NO: 28334 - DNA, 15 bp, Homo sapiens
cccaaaatttcaaaa

SEQ ID NO: 28335 - DNA, 15 bp, Homo sapiens
ccaaaatttcaaaat

SEQ ID NO: 28336 - DNA, 15 bp, Homo sapiens
caaaatttcaaaatt

SEQ ID NO: 28337 - DNA, 15 bp, Homo sapiens
aaaatttcaaaattt

SEQ ID NO: 28338 - DNA, 15 bp, Homo sapiens
aaatttcaaaatttc

SEQ ID NO: 28339 - DNA, 15 bp, Homo sapiens
aatttcaaaatttcc

SEQ ID NO: 28340 - DNA, 15 bp, Homo sapiens
atttcaaaatttccg

SEQ ID NO: 28341 - DNA, 15 bp, Homo sapiens
tttcaaaatttccgt

SEQ ID NO: 28342 - DNA, 15 bp, Homo sapiens
ttcaaaatttccgtt

SEQ ID NO: 28343 - DNA, 15 bp, Homo sapiens
tcaaaatttccgttt

SEQ ID NO: 28344 - DNA, 15 bp, Homo sapiens
caaaatttccgttta

SEQ ID NO: 28345 - DNA, 15 bp, Homo sapiens
aaaatttccgtttaa

SEQ ID NO: 28346 - DNA, 15 bp, Homo sapiens
aaatttccgtttaag

SEQ ID NO: 28347 - DNA, 15 bp, Homo sapiens
aatttccgtttaagt

SEQ ID NO: 28348 - DNA, 15 bp, Homo sapiens
atttccgtttaagtc

SEQ ID NO: 28349 - DNA, 15 bp, Homo sapiens
tttccgtttaagtct

SEQ ID NO: 28350 - DNA, 15 bp, Homo sapiens
ttccgtttaagtctc

SEQ ID NO: 28351 - DNA, 15 bp, Homo sapiens
tccgtttaagtctca

SEQ ID NO: 28352 - DNA, 15 bp, Homo sapiens
ccgtttaagtctcat

SEQ ID NO: 28353 - DNA, 15 bp, Homo sapiens
cgtttaagtctcata

SEQ ID NO: 28354 - DNA, 15 bp, Homo sapiens
gtttaagtctcataa

SEQ ID NO: 28355 - DNA, 15 bp, Homo sapiens
tttaagtctcataat

SEQ ID NO: 28356 - DNA, 15 bp, Homo sapiens
ttaagtctcataatc

SEQ ID NO: 28357 - DNA, 15 bp, Homo sapiens
taagtctcataatca

SEQ ID NO: 28358 - DNA, 15 bp, Homo sapiens
aagtctcataatcaa

SEQ ID NO: 28359 - DNA, 15 bp, Homo sapiens
agtctcataatcaag

SEQ ID NO: 28360 - DNA, 15 bp, Homo sapiens
gtctcataatcaaga

SEQ ID NO: 28361 - DNA, 15 bp, Homo sapiens
tctcataatcaagaa

SEQ ID NO: 28362 - DNA, 15 bp, Homo sapiens
ctcataatcaagaaa

SEQ ID NO: 28363 - DNA, 15 bp, Homo sapiens
tcataatcaagaaaa

SEQ ID NO: 28364 - DNA, 15 bp, Homo sapiens
cataatcaagaaaag

SEQ ID NO: 28365 - DNA, 15 bp, Homo sapiens
ataatcaagaaaagg

SEQ ID NO: 28366 - DNA, 15 bp, Homo sapiens
taatcaagaaaagga

SEQ ID NO: 28367 - DNA, 15 bp, Homo sapiens
aatcaagaaaaggag

SEQ ID NO: 28368 - DNA, 15 bp, Homo sapiens
atcaagaaaaggaga

SEQ ID NO: 28369 - DNA, 15 bp, Homo sapiens
tcaagaaaaggagaa

SEQ ID NO: 28370 - DNA, 15 bp, Homo sapiens
caagaaaaggagaaa

SEQ ID NO: 28371 - DNA, 15 bp, Homo sapiens
aagaaaaggagaaac

SEQ ID NO: 28372 - DNA, 15 bp, Homo sapiens
agaaaaggagaaaca

SEQ ID NO: 28373 - DNA, 15 bp, Homo sapiens
gaaaaggagaaacac

SEQ ID NO: 28374 - DNA, 15 bp, Homo sapiens
aaaaggagaaacaca

SEQ ID NO: 28375 - DNA, 15 bp, Homo sapiens
aaaggagaaacacag

SEQ ID NO: 28376 - DNA, 15 bp, Homo sapiens
aaggagaaacacaga

SEQ ID NO: 28377 - DNA, 15 bp, Homo sapiens
aggagaaacacagag

SEQ ID NO: 28378 - DNA, 15 bp, Homo sapiens
ggagaaacacagaga

SEQ ID NO: 28379 - DNA, 15 bp, Homo sapiens
gagaaacacagagag

SEQ ID NO: 28380 - DNA, 15 bp, Homo sapiens
agaaacacagagaga

SEQ ID NO: 28381 - DNA, 15 bp, Homo sapiens
gaaacacagagagag

SEQ ID NO: 28382 - DNA, 15 bp, Homo sapiens
aaacacagagagaga

SEQ ID NO: 28383 - DNA, 15 bp, Homo sapiens
aacacagagagagag

SEQ ID NO: 28384 - DNA, 15 bp, Homo sapiens
acacagagagagaga

SEQ ID NO: 28385 - DNA, 15 bp, Homo sapiens
cacagagagagagaa

SEQ ID NO: 28386 - DNA, 15 bp, Homo sapiens
acagagagagagaaa

SEQ ID NO: 28387 - DNA, 15 bp, Homo sapiens
cagagagagagaaaa

SEQ ID NO: 28388 - DNA, 15 bp, Homo sapiens
agagagagagaaaaa

SEQ ID NO: 28389 - DNA, 15 bp, Homo sapiens
gagagagagaaaaaa

SEQ ID NO: 28390 - DNA, 15 bp, Homo sapiens
agagagagaaaaaaa

SEQ ID NO: 28391 - DNA, 15 bp, Homo sapiens
gagagagaaaaaaaa

SEQ ID NO: 28392 - DNA, 15 bp, Homo sapiens
agagagaaaaaaaaa

SEQ ID NO: 28393 - DNA, 15 bp, Homo sapiens
gagagaaaaaaaaaa

SEQ ID NO: 28394 - DNA, 15 bp, Homo sapiens
agagaaaaaaaaaac

SEQ ID NO: 28395 - DNA, 15 bp, Homo sapiens
gagaaaaaaaaaact

SEQ ID NO: 28396 - DNA, 15 bp, Homo sapiens
agaaaaaaaaaacta

SEQ ID NO: 28397 - DNA, 15 bp, Homo sapiens
gaaaaaaaaaactat

SEQ ID NO: 28398 - DNA, 15 bp, Homo sapiens
aaaaaaaaaactatg

SEQ ID NO: 28399 - DNA, 15 bp, Homo sapiens
aaaaaaaaactatga

SEQ ID NO: 28400 - DNA, 15 bp, Homo sapiens
aaaaaaaactatgag

SEQ ID NO: 28401 - DNA, 15 bp, Homo sapiens
aaaaaaactatgaga

SEQ ID NO: 28402 - DNA, 15 bp, Homo sapiens
aaaaaactatgagaa

SEQ ID NO: 28403 - DNA, 15 bp, Homo sapiens
aaaaactatgagaac

SEQ ID NO: 28404 - DNA, 15 bp, Homo sapiens
aaaactatgagaacc

SEQ ID NO: 28405 - DNA, 15 bp, Homo sapiens
aaactatgagaaccc

SEQ ID NO: 28406 - DNA, 15 bp, Homo sapiens
aactatgagaacccc

SEQ ID NO: 28407 - DNA, 15 bp, Homo sapiens
actatgagaaccccc

SEQ ID NO: 28408 - DNA, 15 bp, Homo sapiens
ctatgagaacccccc

SEQ ID NO: 28409 - DNA, 15 bp, Homo sapiens
tatgagaaccccccc

SEQ ID NO: 28410 - DNA, 15 bp, Homo sapiens
atgagaacccccccc

SEQ ID NO: 28411 - DNA, 15 bp, Homo sapiens
tgagaaccccccccc

SEQ ID NO: 28412 - DNA, 15 bp, Homo sapiens
gagaaccccccccca

SEQ ID NO: 28413 - DNA, 15 bp, Homo sapiens
agaacccccccccac

SEQ ID NO: 28414 - DNA, 15 bp, Homo sapiens
gaacccccccccacc

SEQ ID NO: 28415 - DNA, 15 bp, Homo sapiens
aacccccccccaccc

SEQ ID NO: 28416 - DNA, 15 bp, Homo sapiens
acccccccccacccc

SEQ ID NO: 28417 - DNA, 15 bp, Homo sapiens
cccccccccaccccg

SEQ ID NO: 28418 - DNA, 15 bp, Homo sapiens
ccccccccaccccgt

SEQ ID NO: 28419 - DNA, 15 bp, Homo sapiens
cccccccaccccgtg

SEQ ID NO: 28420 - DNA, 15 bp, Homo sapiens
ccccccaccccgtga

SEQ ID NO: 28421 - DNA, 15 bp, Homo sapiens
cccccaccccgtgat

SEQ ID NO: 28422 - DNA, 15 bp, Homo sapiens
ccccaccccgtgatt

SEQ ID NO: 28423 - DNA, 15 bp, Homo sapiens
cccaccccgtgatta

SEQ ID NO: 28424 - DNA, 15 bp, Homo sapiens
ccaccccgtgattat

SEQ ID NO: 28425 - DNA, 15 bp, Homo sapiens
caccccgtgattatc

SEQ ID NO: 28426 - DNA, 15 bp, Homo sapiens
accccgtgattatca

SEQ ID NO: 28427 - DNA, 15 bp, Homo sapiens
ccccgtgattatcag

SEQ ID NO: 28428 - DNA, 15 bp, Homo sapiens
cccgtgattatcagc

SEQ ID NO: 28429 - DNA, 15 bp, Homo sapiens
ccgtgattatcagcg

SEQ ID NO: 28430 - DNA, 15 bp, Homo sapiens
cgtgattatcagcgc

SEQ ID NO: 28431 - DNA, 15 bp, Homo sapiens
gtgattatcagcgca

SEQ ID NO: 28432 - DNA, 15 bp, Homo sapiens
tgattatcagcgcac

SEQ ID NO: 28433 - DNA, 15 bp, Homo sapiens
gattatcagcgcaca

SEQ ID NO: 28434 - DNA, 15 bp, Homo sapiens
attatcagcgcacac

SEQ ID NO: 28435 - DNA, 15 bp, Homo sapiens
ttatcagcgcacaca

SEQ ID NO: 28436 - DNA, 15 bp, Homo sapiens
tatcagcgcacacac

SEQ ID NO: 28437 - DNA, 15 bp, Homo sapiens
atcagcgcacacact

SEQ ID NO: 28438 - DNA, 15 bp, Homo sapiens
tcagcgcacacactc

SEQ ID NO: 28439 - DNA, 15 bp, Homo sapiens
cagcgcacacactca

SEQ ID NO: 28440 - DNA, 15 bp, Homo sapiens
agcgcacacactcat

SEQ ID NO: 28441 - DNA, 15 bp, Homo sapiens
gcgcacacactcatc

SEQ ID NO: 28442 - DNA, 15 bp, Homo sapiens
cgcacacactcatcg

SEQ ID NO: 28443 - DNA, 15 bp, Homo sapiens
gcacacactcatcga

SEQ ID NO: 28444 - DNA, 15 bp, Homo sapiens
cacacactcatcgaa

SEQ ID NO: 28445 - DNA, 15 bp, Homo sapiens
acacactcatcgaaa

SEQ ID NO: 28446 - DNA, 15 bp, Homo sapiens
cacactcatcgaaaa

SEQ ID NO: 28447 - DNA, 15 bp, Homo sapiens
acactcatcgaaaaa

SEQ ID NO: 28448 - DNA, 15 bp, Homo sapiens
cactcatcgaaaaaa

SEQ ID NO: 28449 - DNA, 15 bp, Homo sapiens
actcatcgaaaaaaa

SEQ ID NO: 28450 - DNA, 15 bp, Homo sapiens
ctcatcgaaaaaaat

SEQ ID NO: 28451 - DNA, 15 bp, Homo sapiens
tcatcgaaaaaaatt

SEQ ID NO: 28452 - DNA, 15 bp, Homo sapiens
catcgaaaaaaattt

SEQ ID NO: 28453 - DNA, 15 bp, Homo sapiens
atcgaaaaaaatttg

SEQ ID NO: 28454 - DNA, 15 bp, Homo sapiens
tcgaaaaaaatttgg

SEQ ID NO: 28455 - DNA, 15 bp, Homo sapiens
cgaaaaaaatttgga

SEQ ID NO: 28456 - DNA, 15 bp, Homo sapiens
gaaaaaaatttggat

SEQ ID NO: 28457 - DNA, 15 bp, Homo sapiens
aaaaaaatttggatt

SEQ ID NO: 28458 - DNA, 15 bp, Homo sapiens
aaaaaatttggatta

SEQ ID NO: 28459 - DNA, 15 bp, Homo sapiens
aaaaatttggattat

SEQ ID NO: 28460 - DNA, 15 bp, Homo sapiens
aaaatttggattatt

SEQ ID NO: 28461 - DNA, 15 bp, Homo sapiens
aaatttggattatta

SEQ ID NO: 28462 - DNA, 15 bp, Homo sapiens
aatttggattattag

SEQ ID NO: 28463 - DNA, 15 bp, Homo sapiens
atttggattattaga

SEQ ID NO: 28464 - DNA, 15 bp, Homo sapiens
tttggattattagaa

SEQ ID NO: 28465 - DNA, 15 bp, Homo sapiens
ttggattattagaag

SEQ ID NO: 28466 - DNA, 15 bp, Homo sapiens
tggattattagaaga

SEQ ID NO: 28467 - DNA, 15 bp, Homo sapiens
ggattattagaagag

SEQ ID NO: 28468 - DNA, 15 bp, Homo sapiens
gattattagaagaga

SEQ ID NO: 28469 - DNA, 15 bp, Homo sapiens
attattagaagagag

SEQ ID NO: 28470 - DNA, 15 bp, Homo sapiens
ttattagaagagaga

SEQ ID NO: 28471 - DNA, 15 bp, Homo sapiens
tattagaagagagag

SEQ ID NO: 28472 - DNA, 15 bp, Homo sapiens
attagaagagagagg

SEQ ID NO: 28473 - DNA, 15 bp, Homo sapiens
ttagaagagagaggt

SEQ ID NO: 28474 - DNA, 15 bp, Homo sapiens
tagaagagagaggtc

SEQ ID NO: 28475 - DNA, 15 bp, Homo sapiens
agaagagagaggtct

SEQ ID NO: 28476 - DNA, 15 bp, Homo sapiens
gaagagagaggtctg

SEQ ID NO: 28477 - DNA, 15 bp, Homo sapiens
aagagagaggtctgc

SEQ ID NO: 28478 - DNA, 15 bp, Homo sapiens
agagagaggtctgcg

SEQ ID NO: 28479 - DNA, 15 bp, Homo sapiens
gagagaggtctgcgg

SEQ ID NO: 28480 - DNA, 15 bp, Homo sapiens
agagaggtctgcggc

SEQ ID NO: 28481 - DNA, 15 bp, Homo sapiens
gagaggtctgcggct

SEQ ID NO: 28482 - DNA, 15 bp, Homo sapiens
agaggtctgcggctt

SEQ ID NO: 28483 - DNA, 15 bp, Homo sapiens
gaggtctgcggcttc

SEQ ID NO: 28484 - DNA, 15 bp, Homo sapiens
aggtctgcggcttcc

SEQ ID NO: 28485 - DNA, 15 bp, Homo sapiens
ggtctgcggcttcca

SEQ ID NO: 28486 - DNA, 15 bp, Homo sapiens
gtctgcggcttccac

SEQ ID NO: 28487 - DNA, 15 bp, Homo sapiens
tctgcggcttccaca

SEQ ID NO: 28488 - DNA, 15 bp, Homo sapiens
ctgcggcttccacac

SEQ ID NO: 28489 - DNA, 15 bp, Homo sapiens
tgcggcttccacacc

SEQ ID NO: 28490 - DNA, 15 bp, Homo sapiens
gcggcttccacaccg

SEQ ID NO: 28491 - DNA, 15 bp, Homo sapiens
cggcttccacaccgt

SEQ ID NO: 28492 - DNA, 15 bp, Homo sapiens
ggcttccacaccgta

SEQ ID NO: 28493 - DNA, 15 bp, Homo sapiens
gcttccacaccgtac

SEQ ID NO: 28494 - DNA, 15 bp, Homo sapiens
cttccacaccgtaca

SEQ ID NO: 28495 - DNA, 15 bp, Homo sapiens
ttccacaccgtacag

SEQ ID NO: 28496 - DNA, 15 bp, Homo sapiens
tccacaccgtacagc

SEQ ID NO: 28497 - DNA, 15 bp, Homo sapiens
ccacaccgtacagcg

SEQ ID NO: 28498 - DNA, 15 bp, Homo sapiens
cacaccgtacagcgt

SEQ ID NO: 28499 - DNA, 15 bp, Homo sapiens
acaccgtacagcgtg

SEQ ID NO: 28500 - DNA, 15 bp, Homo sapiens
caccgtacagcgtgg

SEQ ID NO: 28501 - DNA, 15 bp, Homo sapiens
accgtacagcgtggt

SEQ ID NO: 28502 - DNA, 15 bp, Homo sapiens
ccgtacagcgtggtt

SEQ ID NO: 28503 - DNA, 15 bp, Homo sapiens
cgtacagcgtggttt

SEQ ID NO: 28504 - DNA, 15 bp, Homo sapiens
gtacagcgtggtttt

SEQ ID NO: 28505 - DNA, 15 bp, Homo sapiens
tacagcgtggttttt

SEQ ID NO: 28506 - DNA, 15 bp, Homo sapiens
acagcgtggtttttc

SEQ ID NO: 28507 - DNA, 15 bp, Homo sapiens
cagcgtggtttttct

SEQ ID NO: 28508 - DNA, 15 bp, Homo sapiens
agcgtggtttttctt

SEQ ID NO: 28509 - DNA, 15 bp, Homo sapiens
gcgtggtttttcttc

SEQ ID NO: 28510 - DNA, 15 bp, Homo sapiens
cgtggtttttcttct

SEQ ID NO: 28511 - DNA, 15 bp, Homo sapiens
gtggtttttcttctc

SEQ ID NO: 28512 - DNA, 15 bp, Homo sapiens
tggtttttcttctcg

SEQ ID NO: 28513 - DNA, 15 bp, Homo sapiens
ggtttttcttctcgg

SEQ ID NO: 28514 - DNA, 15 bp, Homo sapiens
gtttttcttctcggt

SEQ ID NO: 28515 - DNA, 15 bp, Homo sapiens
tttttcttctcggta

SEQ ID NO: 28516 - DNA, 15 bp, Homo sapiens
ttttcttctcggtat

SEQ ID NO: 28517 - DNA, 15 bp, Homo sapiens
tttcttctcggtata

SEQ ID NO: 28518 - DNA, 15 bp, Homo sapiens
ttcttctcggtataa

SEQ ID NO: 28519 - DNA, 15 bp, Homo sapiens
tcttctcggtataaa

SEQ ID NO: 28520 - DNA, 15 bp, Homo sapiens
cttctcggtataaaa

SEQ ID NO: 28521 - DNA, 15 bp, Homo sapiens
ttctcggtataaaag

SEQ ID NO: 28522 - DNA, 15 bp, Homo sapiens
tctcggtataaaagc

SEQ ID NO: 28523 - DNA, 15 bp, Homo sapiens
ctcggtataaaagca

SEQ ID NO: 28524 - DNA, 15 bp, Homo sapiens
tcggtataaaagcaa

SEQ ID NO: 28525 - DNA, 15 bp, Homo sapiens
cggtataaaagcaaa

SEQ ID NO: 28526 - DNA, 15 bp, Homo sapiens
ggtataaaagcaaag

SEQ ID NO: 28527 - DNA, 15 bp, Homo sapiens
gtataaaagcaaagt

SEQ ID NO: 28528 - DNA, 15 bp, Homo sapiens
tataaaagcaaagtt

SEQ ID NO: 28529 - DNA, 15 bp, Homo sapiens
ataaaagcaaagttg

SEQ ID NO: 28530 - DNA, 15 bp, Homo sapiens
taaaagcaaagttgt

SEQ ID NO: 28531 - DNA, 15 bp, Homo sapiens
aaaagcaaagttgtt

SEQ ID NO: 28532 - DNA, 15 bp, Homo sapiens
aaagcaaagttgttt

SEQ ID NO: 28533 - DNA, 15 bp, Homo sapiens
aagcaaagttgtttt

SEQ ID NO: 28534 - DNA, 15 bp, Homo sapiens
agcaaagttgttttt

SEQ ID NO: 28535 - DNA, 15 bp, Homo sapiens
gcaaagttgtttttg

SEQ ID NO: 28536 - DNA, 15 bp, Homo sapiens
caaagttgtttttga

SEQ ID NO: 28537 - DNA, 15 bp, Homo sapiens
aaagttgtttttgat

SEQ ID NO: 28538 - DNA, 15 bp, Homo sapiens
aagttgtttttgata

SEQ ID NO: 28539 - DNA, 15 bp, Homo sapiens
agttgtttttgatac

SEQ ID NO: 28540 - DNA, 15 bp, Homo sapiens
gttgtttttgatacg

SEQ ID NO: 28541 - DNA, 15 bp, Homo sapiens
ttgtttttgatacgt

SEQ ID NO: 28542 - DNA, 15 bp, Homo sapiens
tgtttttgatacgtg

SEQ ID NO: 28543 - DNA, 15 bp, Homo sapiens
gtttttgatacgtga

SEQ ID NO: 28544 - DNA, 15 bp, Homo sapiens
tttttgatacgtgac

SEQ ID NO: 28545 - DNA, 15 bp, Homo sapiens
ttttgatacgtgaca

SEQ ID NO: 28546 - DNA, 15 bp, Homo sapiens
tttgatacgtgacag

SEQ ID NO: 28547 - DNA, 15 bp, Homo sapiens
ttgatacgtgacagt

SEQ ID NO: 28548 - DNA, 15 bp, Homo sapiens
tgatacgtgacagtt

SEQ ID NO: 28549 - DNA, 15 bp, Homo sapiens
gatacgtgacagttt

SEQ ID NO: 28550 - DNA, 15 bp, Homo sapiens
atacgtgacagtttc

SEQ ID NO: 28551 - DNA, 15 bp, Homo sapiens
tacgtgacagtttcc

SEQ ID NO: 28552 - DNA, 15 bp, Homo sapiens
acgtgacagtttccc

SEQ ID NO: 28553 - DNA, 15 bp, Homo sapiens
cgtgacagtttccca

SEQ ID NO: 28554 - DNA, 15 bp, Homo sapiens
gtgacagtttcccac

SEQ ID NO: 28555 - DNA, 15 bp, Homo sapiens
tgacagtttcccaca

SEQ ID NO: 28556 - DNA, 15 bp, Homo sapiens
gacagtttcccacaa

SEQ ID NO: 28557 - DNA, 15 bp, Homo sapiens
acagtttcccacaag

SEQ ID NO: 28558 - DNA, 15 bp, Homo sapiens
cagtttcccacaagc

SEQ ID NO: 28559 - DNA, 15 bp, Homo sapiens
agtttcccacaagcc

SEQ ID NO: 28560 - DNA, 15 bp, Homo sapiens
gtttcccacaagcca

SEQ ID NO: 28561 - DNA, 15 bp, Homo sapiens
tttcccacaagccag

SEQ ID NO: 28562 - DNA, 15 bp, Homo sapiens
ttcccacaagccagg

SEQ ID NO: 28563 - DNA, 15 bp, Homo sapiens
tcccacaagccaggc

SEQ ID NO: 28564 - DNA, 15 bp, Homo sapiens
cccacaagccaggct

SEQ ID NO: 28565 - DNA, 15 bp, Homo sapiens
ccacaagccaggctg

SEQ ID NO: 28566 - DNA, 15 bp, Homo sapiens
cacaagccaggctga

SEQ ID NO: 28567 - DNA, 15 bp, Homo sapiens
acaagccaggctgat

SEQ ID NO: 28568 - DNA, 15 bp, Homo sapiens
caagccaggctgatc

SEQ ID NO: 28569 - DNA, 15 bp, Homo sapiens
aagccaggctgatcc

SEQ ID NO: 28570 - DNA, 15 bp, Homo sapiens
agccaggctgatcct

SEQ ID NO: 28571 - DNA, 15 bp, Homo sapiens
gccaggctgatcctt

SEQ ID NO: 28572 - DNA, 15 bp, Homo sapiens
ccaggctgatccttt

SEQ ID NO: 28573 - DNA, 15 bp, Homo sapiens
caggctgatcctttt

SEQ ID NO: 28574 - DNA, 15 bp, Homo sapiens
aggctgatccttttc

SEQ ID NO: 28575 - DNA, 15 bp, Homo sapiens
ggctgatccttttct

SEQ ID NO: 28576 - DNA, 15 bp, Homo sapiens
gctgatccttttctg

SEQ ID NO: 28577 - DNA, 15 bp, Homo sapiens
ctgatccttttctgt

SEQ ID NO: 28578 - DNA, 15 bp, Homo sapiens
tgatccttttctgtc

SEQ ID NO: 28579 - DNA, 15 bp, Homo sapiens
gatccttttctgtca

SEQ ID NO: 28580 - DNA, 15 bp, Homo sapiens
atccttttctgtcag

SEQ ID NO: 28581 - DNA, 15 bp, Homo sapiens
tccttttctgtcagt

SEQ ID NO: 28582 - DNA, 15 bp, Homo sapiens
ccttttctgtcagtc

SEQ ID NO: 28583 - DNA, 15 bp, Homo sapiens
cttttctgtcagtcc

SEQ ID NO: 28584 - DNA, 15 bp, Homo sapiens
ttttctgtcagtcca

SEQ ID NO: 28585 - DNA, 15 bp, Homo sapiens
tttctgtcagtccac

SEQ ID NO: 28586 - DNA, 15 bp, Homo sapiens
ttctgtcagtccact

SEQ ID NO: 28587 - DNA, 15 bp, Homo sapiens
tctgtcagtccactt

SEQ ID NO: 28588 - DNA, 15 bp, Homo sapiens
ctgtcagtccacttc

SEQ ID NO: 28589 - DNA, 15 bp, Homo sapiens
tgtcagtccacttca

SEQ ID NO: 28590 - DNA, 15 bp, Homo sapiens
gtcagtccacttcac

SEQ ID NO: 28591 - DNA, 15 bp, Homo sapiens
tcagtccacttcacc

SEQ ID NO: 28592 - DNA, 15 bp, Homo sapiens
cagtccacttcacca

SEQ ID NO: 28593 - DNA, 15 bp, Homo sapiens
agtccacttcaccaa

SEQ ID NO: 28594 - DNA, 15 bp, Homo sapiens
gtccacttcaccaag

SEQ ID NO: 28595 - DNA, 15 bp, Homo sapiens
tccacttcaccaagg

SEQ ID NO: 28596 - DNA, 15 bp, Homo sapiens
ccacttcaccaaggt

SEQ ID NO: 28597 - DNA, 15 bp, Homo sapiens
cacttcaccaaggtg

SEQ ID NO: 28598 - DNA, 15 bp, Homo sapiens
acttcaccaaggtga

SEQ ID NO: 28599 - DNA, 15 bp, Homo sapiens
cttcaccaaggtgag

SEQ ID NO: 28600 - DNA, 15 bp, Homo sapiens
ttcaccaaggtgagt

SEQ ID NO: 28601 - DNA, 15 bp, Homo sapiens
tcaccaaggtgagtg

SEQ ID NO: 28602 - DNA, 15 bp, Homo sapiens
caccaaggtgagtgt

SEQ ID NO: 28603 - DNA, 15 bp, Homo sapiens
accaaggtgagtgtc

SEQ ID NO: 28604 - DNA, 15 bp, Homo sapiens
ccaaggtgagtgtcc

SEQ ID NO: 28605 - DNA, 15 bp, Homo sapiens
caaggtgagtgtccc

SEQ ID NO: 28606 - DNA, 15 bp, Homo sapiens
aaggtgagtgtccct

SEQ ID NO: 28607 - DNA, 15 bp, Homo sapiens
aggtgagtgtccctg

SEQ ID NO: 28608 - DNA, 15 bp, Homo sapiens
ggtgagtgtccctgc

SEQ ID NO: 28609 - DNA, 15 bp, Homo sapiens
gtgagtgtccctgct

SEQ ID NO: 28610 - DNA, 15 bp, Homo sapiens
tgagtgtccctgctc

SEQ ID NO: 28611 - DNA, 15 bp, Homo sapiens
gagtgtccctgctct

SEQ ID NO: 28612 - DNA, 15 bp, Homo sapiens
agtgtccctgctctc

SEQ ID NO: 28613 - DNA, 15 bp, Homo sapiens
gtgtccctgctctcc

SEQ ID NO: 28614 - DNA, 15 bp, Homo sapiens
tgtccctgctctccc

SEQ ID NO: 28615 - DNA, 15 bp, Homo sapiens
gtccctgctctcccc

SEQ ID NO: 28616 - DNA, 15 bp, Homo sapiens
tccctgctctcccct

SEQ ID NO: 28617 - DNA, 15 bp, Homo sapiens
ccctgctctccccta

SEQ ID NO: 28618 - DNA, 15 bp, Homo sapiens
cctgctctcccctac

SEQ ID NO: 28619 - DNA, 15 bp, Homo sapiens
ctgctctcccctacc

SEQ ID NO: 28620 - DNA, 15 bp, Homo sapiens
tgctctcccctacca

SEQ ID NO: 28621 - DNA, 15 bp, Homo sapiens
gctctcccctaccag

SEQ ID NO: 28622 - DNA, 15 bp, Homo sapiens
ctctcccctaccaga

SEQ ID NO: 28623 - DNA, 15 bp, Homo sapiens
tctcccctaccagat

SEQ ID NO: 28624 - DNA, 15 bp, Homo sapiens
ctcccctaccagatg

SEQ ID NO: 28625 - DNA, 15 bp, Homo sapiens
tcccctaccagatgt

SEQ ID NO: 28626 - DNA, 15 bp, Homo sapiens
cccctaccagatgtg

SEQ ID NO: 28627 - DNA, 15 bp, Homo sapiens
ccctaccagatgtgg

SEQ ID NO: 28628 - DNA, 15 bp, Homo sapiens
cctaccagatgtggg

SEQ ID NO: 28629 - DNA, 15 bp, Homo sapiens
ctaccagatgtgggc

SEQ ID NO: 28630 - DNA, 15 bp, Homo sapiens
taccagatgtgggcc

SEQ ID NO: 28631 - DNA, 15 bp, Homo sapiens
accagatgtgggccc

SEQ ID NO: 28632 - DNA, 15 bp, Homo sapiens
ccagatgtgggcccc

SEQ ID NO: 28633 - DNA, 15 bp, Homo sapiens
cagatgtgggcccca

SEQ ID NO: 28634 - DNA, 15 bp, Homo sapiens
agatgtgggccccat

SEQ ID NO: 28635 - DNA, 15 bp, Homo sapiens
gatgtgggccccatt

SEQ ID NO: 28636 - DNA, 15 bp, Homo sapiens
atgtgggccccattg

SEQ ID NO: 28637 - DNA, 15 bp, Homo sapiens
tgtgggccccattgg

SEQ ID NO: 28638 - DNA, 15 bp, Homo sapiens
gtgggccccattgga

SEQ ID NO: 28639 - DNA, 15 bp, Homo sapiens
tgggccccattggag

SEQ ID NO: 28640 - DNA, 15 bp, Homo sapiens
gggccccattggagg

SEQ ID NO: 28641 - DNA, 15 bp, Homo sapiens
ggccccattggagga

SEQ ID NO: 28642 - DNA, 15 bp, Homo sapiens
gccccattggaggag

SEQ ID NO: 28643 - DNA, 15 bp, Homo sapiens
ccccattggaggaga

SEQ ID NO: 28644 - DNA, 15 bp, Homo sapiens
cccattggaggagat

SEQ ID NO: 28645 - DNA, 15 bp, Homo sapiens
ccattggaggagatg

SEQ ID NO: 28646 - DNA, 15 bp, Homo sapiens
cattggaggagatgg

SEQ ID NO: 28647 - DNA, 15 bp, Homo sapiens
attggaggagatggc

SEQ ID NO: 28648 - DNA, 15 bp, Homo sapiens
ttggaggagatggca

SEQ ID NO: 28649 - DNA, 15 bp, Homo sapiens
tggaggagatggcag

SEQ ID NO: 28650 - DNA, 15 bp, Homo sapiens
ggaggagatggcagg

SEQ ID NO: 28651 - DNA, 15 bp, Homo sapiens
gaggagatggcaggg

SEQ ID NO: 28652 - DNA, 15 bp, Homo sapiens
aggagatggcaggga

SEQ ID NO: 28653 - DNA, 15 bp, Homo sapiens
ggagatggcagggag

SEQ ID NO: 28654 - DNA, 15 bp, Homo sapiens
gagatggcagggagg

SEQ ID NO: 28655 - DNA, 15 bp, Homo sapiens
agatggcagggaggt

SEQ ID NO: 28656 - DNA, 15 bp, Homo sapiens
gatggcagggaggta

SEQ ID NO: 28657 - DNA, 15 bp, Homo sapiens
atggcagggaggtag

SEQ ID NO: 28658 - DNA, 15 bp, Homo sapiens
tggcagggaggtagg

SEQ ID NO: 28659 - DNA, 15 bp, Homo sapiens
ggcagggaggtaggc

SEQ ID NO: 28660 - DNA, 15 bp, Homo sapiens
gcagggaggtaggca

SEQ ID NO: 28661 - DNA, 15 bp, Homo sapiens
cagggaggtaggcac

SEQ ID NO: 28662 - DNA, 15 bp, Homo sapiens
agggaggtaggcacg

SEQ ID NO: 28663 - DNA, 15 bp, Homo sapiens
gggaggtaggcacgg

SEQ ID NO: 28664 - DNA, 15 bp, Homo sapiens
ggaggtaggcacggc

SEQ ID NO: 28665 - DNA, 15 bp, Homo sapiens
gaggtaggcacggcg

SEQ ID NO: 28666 - DNA, 15 bp, Homo sapiens
aggtaggcacggcgg

SEQ ID NO: 28667 - DNA, 15 bp, Homo sapiens
ggtaggcacggcggg

SEQ ID NO: 28668 - DNA, 15 bp, Homo sapiens
gtaggcacggcgggg

SEQ ID NO: 28669 - DNA, 15 bp, Homo sapiens
taggcacggcggggg

SEQ ID NO: 28670 - DNA, 15 bp, Homo sapiens
aggcacggcgggggg

SEQ ID NO: 28671 - DNA, 15 bp, Homo sapiens
ggcacggcggggggg

SEQ ID NO: 28672 - DNA, 15 bp, Homo sapiens
gcacggcgggggggt

SEQ ID NO: 28673 - DNA, 15 bp, Homo sapiens
cacggcgggggggtc

SEQ ID NO: 28674 - DNA, 15 bp, Homo sapiens
acggcgggggggtca

SEQ ID NO: 28675 - DNA, 15 bp, Homo sapiens
cggcgggggggtcag

SEQ ID NO: 28676 - DNA, 15 bp, Homo sapiens
ggcgggggggtcagg

SEQ ID NO: 28677 - DNA, 15 bp, Homo sapiens
gcgggggggtcaggg

SEQ ID NO: 28678 - DNA, 15 bp, Homo sapiens
cgggggggtcagggg

SEQ ID NO: 28679 - DNA, 15 bp, Homo sapiens
gggggggtcaggggc

SEQ ID NO: 28680 - DNA, 15 bp, Homo sapiens
ggggggtcaggggcc

SEQ ID NO: 28681 - DNA, 15 bp, Homo sapiens
gggggtcaggggccc

SEQ ID NO: 28682 - DNA, 15 bp, Homo sapiens
ggggtcaggggccct

SEQ ID NO: 28683 - DNA, 15 bp, Homo sapiens
gggtcaggggccctc

SEQ ID NO: 28684 - DNA, 15 bp, Homo sapiens
ggtcaggggccctct

SEQ ID NO: 28685 - DNA, 15 bp, Homo sapiens
gtcaggggccctctg

SEQ ID NO: 28686 - DNA, 15 bp, Homo sapiens
tcaggggccctctgg

SEQ ID NO: 28687 - DNA, 15 bp, Homo sapiens
caggggccctctggt

SEQ ID NO: 28688 - DNA, 15 bp, Homo sapiens
aggggccctctggta

SEQ ID NO: 28689 - DNA, 15 bp, Homo sapiens
ggggccctctggtac

SEQ ID NO: 28690 - DNA, 15 bp, Homo sapiens
gggccctctggtaca

SEQ ID NO: 28691 - DNA, 15 bp, Homo sapiens
ggccctctggtacag

SEQ ID NO: 28692 - DNA, 15 bp, Homo sapiens
gccctctggtacagt

SEQ ID NO: 28693 - DNA, 15 bp, Homo sapiens
ccctctggtacagtg

SEQ ID NO: 28694 - DNA, 15 bp, Homo sapiens
cctctggtacagtgg

SEQ ID NO: 28695 - DNA, 15 bp, Homo sapiens
ctctggtacagtggg

SEQ ID NO: 28696 - DNA, 15 bp, Homo sapiens
tctggtacagtggga

SEQ ID NO: 28697 - DNA, 15 bp, Homo sapiens
ctggtacagtgggat

SEQ ID NO: 28698 - DNA, 15 bp, Homo sapiens
tggtacagtgggatg

SEQ ID NO: 28699 - DNA, 15 bp, Homo sapiens
ggtacagtgggatgt

SEQ ID NO: 28700 - DNA, 15 bp, Homo sapiens
gtacagtgggatgta

SEQ ID NO: 28701 - DNA, 15 bp, Homo sapiens
tacagtgggatgtac

SEQ ID NO: 28702 - DNA, 15 bp, Homo sapiens
acagtgggatgtacc

SEQ ID NO: 28703 - DNA, 15 bp, Homo sapiens
cagtgggatgtaccc

SEQ ID NO: 28704 - DNA, 15 bp, Homo sapiens
agtgggatgtaccca

SEQ ID NO: 28705 - DNA, 15 bp, Homo sapiens
gtgggatgtacccag

SEQ ID NO: 28706 - DNA, 15 bp, Homo sapiens
tgggatgtacccagc

SEQ ID NO: 28707 - DNA, 15 bp, Homo sapiens
gggatgtacccagct

SEQ ID NO: 28708 - DNA, 15 bp, Homo sapiens
ggatgtacccagcta

SEQ ID NO: 28709 - DNA, 15 bp, Homo sapiens
gatgtacccagctac

SEQ ID NO: 28710 - DNA, 15 bp, Homo sapiens
atgtacccagctacc

SEQ ID NO: 28711 - DNA, 15 bp, Homo sapiens
tgtacccagctaccg

SEQ ID NO: 28712 - DNA, 15 bp, Homo sapiens
gtacccagctaccgt

SEQ ID NO: 28713 - DNA, 15 bp, Homo sapiens
tacccagctaccgtg

SEQ ID NO: 28714 - DNA, 15 bp, Homo sapiens
acccagctaccgtga

SEQ ID NO: 28715 - DNA, 15 bp, Homo sapiens
cccagctaccgtgat

SEQ ID NO: 28716 - DNA, 15 bp, Homo sapiens
ccagctaccgtgatt

SEQ ID NO: 28717 - DNA, 15 bp, Homo sapiens
cagctaccgtgattc

SEQ ID NO: 28718 - DNA, 15 bp, Homo sapiens
agctaccgtgattcc

SEQ ID NO: 28719 - DNA, 15 bp, Homo sapiens
gctaccgtgattcca

SEQ ID NO: 28720 - DNA, 15 bp, Homo sapiens
ctaccgtgattccag

SEQ ID NO: 28721 - DNA, 15 bp, Homo sapiens
taccgtgattccagc

SEQ ID NO: 28722 - DNA, 15 bp, Homo sapiens
accgtgattccagcc

SEQ ID NO: 28723 - DNA, 15 bp, Homo sapiens
ccgtgattccagcca

SEQ ID NO: 28724 - DNA, 15 bp, Homo sapiens
cgtgattccagccag

SEQ ID NO: 28725 - DNA, 15 bp, Homo sapiens
gtgattccagccagg

SEQ ID NO: 28726 - DNA, 15 bp, Homo sapiens
tgattccagccaggt

SEQ ID NO: 28727 - DNA, 15 bp, Homo sapiens
gattccagccaggta

SEQ ID NO: 28728 - DNA, 15 bp, Homo sapiens
attccagccaggtaa

SEQ ID NO: 28729 - DNA, 15 bp, Homo sapiens
ttccagccaggtaag

SEQ ID NO: 28730 - DNA, 15 bp, Homo sapiens
tccagccaggtaagg

SEQ ID NO: 28731 - DNA, 15 bp, Homo sapiens
ccagccaggtaaggt

SEQ ID NO: 28732 - DNA, 15 bp, Homo sapiens
cagccaggtaaggtc

SEQ ID NO: 28733 - DNA, 15 bp, Homo sapiens
agccaggtaaggtct

SEQ ID NO: 28734 - DNA, 15 bp, Homo sapiens
gccaggtaaggtctt

SEQ ID NO: 28735 - DNA, 15 bp, Homo sapiens
ccaggtaaggtcttt

SEQ ID NO: 28736 - DNA, 15 bp, Homo sapiens
caggtaaggtcttta

SEQ ID NO: 28737 - DNA, 15 bp, Homo sapiens
aggtaaggtctttaa

SEQ ID NO: 28738 - DNA, 15 bp, Homo sapiens
ggtaaggtctttaaa

SEQ ID NO: 28739 - DNA, 15 bp, Homo sapiens
gtaaggtctttaaaa

SEQ ID NO: 28740 - DNA, 15 bp, Homo sapiens
taaggtctttaaaaa

SEQ ID NO: 28741 - DNA, 15 bp, Homo sapiens
aaggtctttaaaaaa

SEQ ID NO: 28742 - DNA, 15 bp, Homo sapiens
aggtctttaaaaaaa

SEQ ID NO: 28743 - DNA, 15 bp, Homo sapiens
ggtctttaaaaaaat

SEQ ID NO: 28744 - DNA, 15 bp, Homo sapiens
gtctttaaaaaaata

SEQ ID NO: 28745 - DNA, 15 bp, Homo sapiens
tctttaaaaaaataa

SEQ ID NO: 28746 - DNA, 15 bp, Homo sapiens
ctttaaaaaaataat

SEQ ID NO: 28747 - DNA, 15 bp, Homo sapiens
tttaaaaaaataata

SEQ ID NO: 28748 - DNA, 15 bp, Homo sapiens
ttaaaaaaataataa

SEQ ID NO: 28749 - DNA, 15 bp, Homo sapiens
taaaaaaataataat

SEQ ID NO: 28750 - DNA, 15 bp, Homo sapiens
aaaaaaataataata

SEQ ID NO: 28751 - DNA, 15 bp, Homo sapiens
aaaaaataataatag

SEQ ID NO: 28752 - DNA, 15 bp, Homo sapiens
aaaaataataataga

SEQ ID NO: 28753 - DNA, 15 bp, Homo sapiens
aaaataataatagaa

SEQ ID NO: 28754 - DNA, 15 bp, Homo sapiens
aaataataatagaat

SEQ ID NO: 28755 - DNA, 15 bp, Homo sapiens
aataataatagaata

SEQ ID NO: 28756 - DNA, 15 bp, Homo sapiens
ataataatagaataa

SEQ ID NO: 28757 - DNA, 15 bp, Homo sapiens
taataatagaataaa

SEQ ID NO: 28758 - DNA, 15 bp, Homo sapiens
aataatagaataaat

SEQ ID NO: 28759 - DNA, 15 bp, Homo sapiens
ataatagaataaatg

SEQ ID NO: 28760 - DNA, 15 bp, Homo sapiens
taatagaataaatgg

SEQ ID NO: 28761 - DNA, 15 bp, Homo sapiens
aatagaataaatggc

SEQ ID NO: 28762 - DNA, 15 bp, Homo sapiens
atagaataaatggca

SEQ ID NO: 28763 - DNA, 15 bp, Homo sapiens
tagaataaatggcag

SEQ ID NO: 28764 - DNA, 15 bp, Homo sapiens
agaataaatggcaga

SEQ ID NO: 28765 - DNA, 15 bp, Homo sapiens
gaataaatggcagaa

SEQ ID NO: 28766 - DNA, 15 bp, Homo sapiens
aataaatggcagaag

SEQ ID NO: 28767 - DNA, 15 bp, Homo sapiens
ataaatggcagaaga

SEQ ID NO: 28768 - DNA, 15 bp, Homo sapiens
taaatggcagaagac

SEQ ID NO: 28769 - DNA, 15 bp, Homo sapiens
aaatggcagaagact

SEQ ID NO: 28770 - DNA, 15 bp, Homo sapiens
aatggcagaagactt

SEQ ID NO: 28771 - DNA, 15 bp, Homo sapiens
atggcagaagactta

SEQ ID NO: 28772 - DNA, 15 bp, Homo sapiens
tggcagaagacttaa

SEQ ID NO: 28773 - DNA, 15 bp, Homo sapiens
ggcagaagacttaaa

SEQ ID NO: 28774 - DNA, 15 bp, Homo sapiens
gcagaagacttaaag

SEQ ID NO: 28775 - DNA, 15 bp, Homo sapiens
cagaagacttaaagg

SEQ ID NO: 28776 - DNA, 15 bp, Homo sapiens
agaagacttaaaggt

SEQ ID NO: 28777 - DNA, 15 bp, Homo sapiens
gaagacttaaaggtg

SEQ ID NO: 28778 - DNA, 15 bp, Homo sapiens
aagacttaaaggtga

SEQ ID NO: 28779 - DNA, 15 bp, Homo sapiens
agacttaaaggtgaa

SEQ ID NO: 28780 - DNA, 15 bp, Homo sapiens
gacttaaaggtgaag

SEQ ID NO: 28781 - DNA, 15 bp, Homo sapiens
acttaaaggtgaagt

SEQ ID NO: 28782 - DNA, 15 bp, Homo sapiens
cttaaaggtgaagta

SEQ ID NO: 28783 - DNA, 15 bp, Homo sapiens
ttaaaggtgaagtac

SEQ ID NO: 28784 - DNA, 15 bp, Homo sapiens
taaaggtgaagtact

SEQ ID NO: 28785 - DNA, 15 bp, Homo sapiens
aaaggtgaagtactt

SEQ ID NO: 28786 - DNA, 15 bp, Homo sapiens
aaggtgaagtactta

SEQ ID NO: 28787 - DNA, 15 bp, Homo sapiens
aggtgaagtacttaa

SEQ ID NO: 28788 - DNA, 15 bp, Homo sapiens
ggtgaagtacttaat

SEQ ID NO: 28789 - DNA, 15 bp, Homo sapiens
gtgaagtacttaatg

SEQ ID NO: 28790 - DNA, 15 bp, Homo sapiens
tgaagtacttaatgc

SEQ ID NO: 28791 - DNA, 15 bp, Homo sapiens
gaagtacttaatgca

SEQ ID NO: 28792 - DNA, 15 bp, Homo sapiens
aagtacttaatgcat

SEQ ID NO: 28793 - DNA, 15 bp, Homo sapiens
agtacttaatgcatg

SEQ ID NO: 28794 - DNA, 15 bp, Homo sapiens
gtacttaatgcatgg

SEQ ID NO: 28795 - DNA, 15 bp, Homo sapiens
tacttaatgcatggg

SEQ ID NO: 28796 - DNA, 15 bp, Homo sapiens
acttaatgcatgggc

SEQ ID NO: 28797 - DNA, 15 bp, Homo sapiens
cttaatgcatgggca

SEQ ID NO: 28798 - DNA, 15 bp, Homo sapiens
ttaatgcatgggcag

SEQ ID NO: 28799 - DNA, 15 bp, Homo sapiens
taatgcatgggcagg

SEQ ID NO: 28800 - DNA, 15 bp, Homo sapiens
aatgcatgggcaggg

SEQ ID NO: 28801 - DNA, 15 bp, Homo sapiens
atgcatgggcagggg

SEQ ID NO: 28802 - DNA, 15 bp, Homo sapiens
tgcatgggcaggggc

SEQ ID NO: 28803 - DNA, 15 bp, Homo sapiens
gcatgggcaggggca

SEQ ID NO: 28804 - DNA, 15 bp, Homo sapiens
catgggcaggggcaa

SEQ ID NO: 28805 - DNA, 15 bp, Homo sapiens
atgggcaggggcaaa

SEQ ID NO: 28806 - DNA, 15 bp, Homo sapiens
tgggcaggggcaaaa

SEQ ID NO: 28807 - DNA, 15 bp, Homo sapiens
gggcaggggcaaaaa

SEQ ID NO: 28808 - DNA, 15 bp, Homo sapiens
ggcaggggcaaaaat

SEQ ID NO: 28809 - DNA, 15 bp, Homo sapiens
gcaggggcaaaaata

SEQ ID NO: 28810 - DNA, 15 bp, Homo sapiens
caggggcaaaaataa

SEQ ID NO: 28811 - DNA, 15 bp, Homo sapiens
aggggcaaaaataaa

SEQ ID NO: 28812 - DNA, 15 bp, Homo sapiens
ggggcaaaaataaat

SEQ ID NO: 28813 - DNA, 15 bp, Homo sapiens
gggcaaaaataaatg

SEQ ID NO: 28814 - DNA, 15 bp, Homo sapiens
ggcaaaaataaatga

SEQ ID NO: 28815 - DNA, 15 bp, Homo sapiens
gcaaaaataaatgaa

SEQ ID NO: 28816 - DNA, 15 bp, Homo sapiens
caaaaataaatgaat

SEQ ID NO: 28817 - DNA, 15 bp, Homo sapiens
aaaaataaatgaatt

SEQ ID NO: 28818 - DNA, 15 bp, Homo sapiens
aaaataaatgaattc

SEQ ID NO: 28819 - DNA, 15 bp, Homo sapiens
aaataaatgaattca

SEQ ID NO: 28820 - DNA, 15 bp, Homo sapiens
aataaatgaattcat

SEQ ID NO: 28821 - DNA, 15 bp, Homo sapiens
ataaatgaattcatc

SEQ ID NO: 28822 - DNA, 15 bp, Homo sapiens
taaatgaattcatca

SEQ ID NO: 28823 - DNA, 15 bp, Homo sapiens
aaatgaattcatcaa

SEQ ID NO: 28824 - DNA, 15 bp, Homo sapiens
aatgaattcatcaat

SEQ ID NO: 28825 - DNA, 15 bp, Homo sapiens
atgaattcatcaatt

SEQ ID NO: 28826 - DNA, 15 bp, Homo sapiens
tgaattcatcaattg

SEQ ID NO: 28827 - DNA, 15 bp, Homo sapiens
gaattcatcaattga

SEQ ID NO: 28828 - DNA, 15 bp, Homo sapiens
aattcatcaattgat

SEQ ID NO: 28829 - DNA, 15 bp, Homo sapiens
attcatcaattgata

SEQ ID NO: 28830 - DNA, 15 bp, Homo sapiens
ttcatcaattgatac

SEQ ID NO: 28831 - DNA, 15 bp, Homo sapiens
tcatcaattgatacg

SEQ ID NO: 28832 - DNA, 15 bp, Homo sapiens
catcaattgatacgt

SEQ ID NO: 28833 - DNA, 15 bp, Homo sapiens
atcaattgatacgta

SEQ ID NO: 28834 - DNA, 15 bp, Homo sapiens
tcaattgatacgtag

SEQ ID NO: 28835 - DNA, 15 bp, Homo sapiens
caattgatacgtaga

SEQ ID NO: 28836 - DNA, 15 bp, Homo sapiens
aattgatacgtagat

SEQ ID NO: 28837 - DNA, 15 bp, Homo sapiens
attgatacgtagatg

SEQ ID NO: 28838 - DNA, 15 bp, Homo sapiens
ttgatacgtagatgg

SEQ ID NO: 28839 - DNA, 15 bp, Homo sapiens
tgatacgtagatgga

SEQ ID NO: 28840 - DNA, 15 bp, Homo sapiens
gatacgtagatggat

SEQ ID NO: 28841 - DNA, 15 bp, Homo sapiens
atacgtagatggata

SEQ ID NO: 28842 - DNA, 15 bp, Homo sapiens
tacgtagatggatag

SEQ ID NO: 28843 - DNA, 15 bp, Homo sapiens
acgtagatggatagg

SEQ ID NO: 28844 - DNA, 15 bp, Homo sapiens
cgtagatggatagga

SEQ ID NO: 28845 - DNA, 15 bp, Homo sapiens
gtagatggataggat

SEQ ID NO: 28846 - DNA, 15 bp, Homo sapiens
tagatggataggatt

SEQ ID NO: 28847 - DNA, 15 bp, Homo sapiens
agatggataggattt

SEQ ID NO: 28848 - DNA, 15 bp, Homo sapiens
gatggataggatttt

SEQ ID NO: 28849 - DNA, 15 bp, Homo sapiens
atggataggattttt

SEQ ID NO: 28850 - DNA, 15 bp, Homo sapiens
tggataggattttta

SEQ ID NO: 28851 - DNA, 15 bp, Homo sapiens
ggataggatttttaa

SEQ ID NO: 28852 - DNA, 15 bp, Homo sapiens
gataggatttttaaa

SEQ ID NO: 28853 - DNA, 15 bp, Homo sapiens
ataggatttttaaaa

SEQ ID NO: 28854 - DNA, 15 bp, Homo sapiens
taggatttttaaaat

SEQ ID NO: 28855 - DNA, 15 bp, Homo sapiens
aggatttttaaaata

SEQ ID NO: 28856 - DNA, 15 bp, Homo sapiens
ggatttttaaaatat

SEQ ID NO: 28857 - DNA, 15 bp, Homo sapiens
gatttttaaaatatg

SEQ ID NO: 28858 - DNA, 15 bp, Homo sapiens
atttttaaaatatgt

SEQ ID NO: 28859 - DNA, 15 bp, Homo sapiens
tttttaaaatatgtc

SEQ ID NO: 28860 - DNA, 15 bp, Homo sapiens
ttttaaaatatgtca

SEQ ID NO: 28861 - DNA, 15 bp, Homo sapiens
tttaaaatatgtcag

SEQ ID NO: 28862 - DNA, 15 bp, Homo sapiens
ttaaaatatgtcagc

SEQ ID NO: 28863 - DNA, 15 bp, Homo sapiens
taaaatatgtcagct

SEQ ID NO: 28864 - DNA, 15 bp, Homo sapiens
aaaatatgtcagctg

SEQ ID NO: 28865 - DNA, 15 bp, Homo sapiens
aaatatgtcagctgc

SEQ ID NO: 28866 - DNA, 15 bp, Homo sapiens
aatatgtcagctgcc

SEQ ID NO: 28867 - DNA, 15 bp, Homo sapiens
atatgtcagctgcca

SEQ ID NO: 28868 - DNA, 15 bp, Homo sapiens
tatgtcagctgccag

SEQ ID NO: 28869 - DNA, 15 bp, Homo sapiens
atgtcagctgccagt

SEQ ID NO: 28870 - DNA, 15 bp, Homo sapiens
tgtcagctgccagtc

SEQ ID NO: 28871 - DNA, 15 bp, Homo sapiens
gtcagctgccagtct

SEQ ID NO: 28872 - DNA, 15 bp, Homo sapiens
tcagctgccagtctt

SEQ ID NO: 28873 - DNA, 15 bp, Homo sapiens
cagctgccagtcttt

SEQ ID NO: 28874 - DNA, 15 bp, Homo sapiens
agctgccagtcttta

SEQ ID NO: 28875 - DNA, 15 bp, Homo sapiens
gctgccagtctttat

SEQ ID NO: 28876 - DNA, 15 bp, Homo sapiens
ctgccagtctttatg

SEQ ID NO: 28877 - DNA, 15 bp, Homo sapiens
tgccagtctttatgg

SEQ ID NO: 28878 - DNA, 15 bp, Homo sapiens
gccagtctttatgga

SEQ ID NO: 28879 - DNA, 15 bp, Homo sapiens
ccagtctttatggat

SEQ ID NO: 28880 - DNA, 15 bp, Homo sapiens
cagtctttatggatt

SEQ ID NO: 28881 - DNA, 15 bp, Homo sapiens
agtctttatggattt

SEQ ID NO: 28882 - DNA, 15 bp, Homo sapiens
gtctttatggatttc

SEQ ID NO: 28883 - DNA, 15 bp, Homo sapiens
tctttatggatttca

SEQ ID NO: 28884 - DNA, 15 bp, Homo sapiens
ctttatggatttcag

SEQ ID NO: 28885 - DNA, 15 bp, Homo sapiens
tttatggatttcaga

SEQ ID NO: 28886 - DNA, 15 bp, Homo sapiens
ttatggatttcagag

SEQ ID NO: 28887 - DNA, 15 bp, Homo sapiens
tatggatttcagagc

SEQ ID NO: 28888 - DNA, 15 bp, Homo sapiens
atggatttcagagct

SEQ ID NO: 28889 - DNA, 15 bp, Homo sapiens
tggatttcagagctt

SEQ ID NO: 28890 - DNA, 15 bp, Homo sapiens
ggatttcagagcttt

SEQ ID NO: 28891 - DNA, 15 bp, Homo sapiens
gatttcagagctttg

SEQ ID NO: 28892 - DNA, 15 bp, Homo sapiens
atttcagagctttga

SEQ ID NO: 28893 - DNA, 15 bp, Homo sapiens
tttcagagctttgaa

SEQ ID NO: 28894 - DNA, 15 bp, Homo sapiens
ttcagagctttgaac

SEQ ID NO: 28895 - DNA, 15 bp, Homo sapiens
tcagagctttgaaca

SEQ ID NO: 28896 - DNA, 15 bp, Homo sapiens
cagagctttgaacaa

SEQ ID NO: 28897 - DNA, 15 bp, Homo sapiens
agagctttgaacaac

SEQ ID NO: 28898 - DNA, 15 bp, Homo sapiens
gagctttgaacaact

SEQ ID NO: 28899 - DNA, 15 bp, Homo sapiens
agctttgaacaactt

SEQ ID NO: 28900 - DNA, 15 bp, Homo sapiens
gctttgaacaacttg

SEQ ID NO: 28901 - DNA, 15 bp, Homo sapiens
ctttgaacaacttga

SEQ ID NO: 28902 - DNA, 15 bp, Homo sapiens
tttgaacaacttgaa

SEQ ID NO: 28903 - DNA, 15 bp, Homo sapiens
ttgaacaacttgaaa

SEQ ID NO: 28904 - DNA, 15 bp, Homo sapiens
tgaacaacttgaaat

SEQ ID NO: 28905 - DNA, 15 bp, Homo sapiens
gaacaacttgaaatg

SEQ ID NO: 28906 - DNA, 15 bp, Homo sapiens
aacaacttgaaatgc

SEQ ID NO: 28907 - DNA, 15 bp, Homo sapiens
acaacttgaaatgct

SEQ ID NO: 28908 - DNA, 15 bp, Homo sapiens
caacttgaaatgctg

SEQ ID NO: 28909 - DNA, 15 bp, Homo sapiens
aacttgaaatgctgt

SEQ ID NO: 28910 - DNA, 15 bp, Homo sapiens
acttgaaatgctgtc

SEQ ID NO: 28911 - DNA, 15 bp, Homo sapiens
cttgaaatgctgtcc

SEQ ID NO: 28912 - DNA, 15 bp, Homo sapiens
ttgaaatgctgtcca

SEQ ID NO: 28913 - DNA, 15 bp, Homo sapiens
tgaaatgctgtccag

SEQ ID NO: 28914 - DNA, 15 bp, Homo sapiens
gaaatgctgtccagg

SEQ ID NO: 28915 - DNA, 15 bp, Homo sapiens
aaatgctgtccaggt

SEQ ID NO: 28916 - DNA, 15 bp, Homo sapiens
aatgctgtccaggtg

SEQ ID NO: 28917 - DNA, 15 bp, Homo sapiens
atgctgtccaggtgc

SEQ ID NO: 28918 - DNA, 15 bp, Homo sapiens
tgctgtccaggtgca

SEQ ID NO: 28919 - DNA, 15 bp, Homo sapiens
gctgtccaggtgcaa

SEQ ID NO: 28920 - DNA, 15 bp, Homo sapiens
ctgtccaggtgcaac

SEQ ID NO: 28921 - DNA, 15 bp, Homo sapiens
tgtccaggtgcaact

SEQ ID NO: 28922 - DNA, 15 bp, Homo sapiens
gtccaggtgcaactg

SEQ ID NO: 28923 - DNA, 15 bp, Homo sapiens
tccaggtgcaactga

SEQ ID NO: 28924 - DNA, 15 bp, Homo sapiens
ccaggtgcaactgaa

SEQ ID NO: 28925 - DNA, 15 bp, Homo sapiens
caggtgcaactgaaa

SEQ ID NO: 28926 - DNA, 15 bp, Homo sapiens
aggtgcaactgaaaa

SEQ ID NO: 28927 - DNA, 15 bp, Homo sapiens
ggtgcaactgaaaat

SEQ ID NO: 28928 - DNA, 15 bp, Homo sapiens
gtgcaactgaaaatt

SEQ ID NO: 28929 - DNA, 15 bp, Homo sapiens
tgcaactgaaaattt

SEQ ID NO: 28930 - DNA, 15 bp, Homo sapiens
gcaactgaaaatttc

SEQ ID NO: 28931 - DNA, 15 bp, Homo sapiens
caactgaaaatttca

SEQ ID NO: 28932 - DNA, 15 bp, Homo sapiens
aactgaaaatttcaa

SEQ ID NO: 28933 - DNA, 15 bp, Homo sapiens
actgaaaatttcaac

SEQ ID NO: 28934 - DNA, 15 bp, Homo sapiens
ctgaaaatttcaact

SEQ ID NO: 28935 - DNA, 15 bp, Homo sapiens
tgaaaatttcaactg

SEQ ID NO: 28936 - DNA, 15 bp, Homo sapiens
gaaaatttcaactgc

SEQ ID NO: 28937 - DNA, 15 bp, Homo sapiens
aaaatttcaactgca

SEQ ID NO: 28938 - DNA, 15 bp, Homo sapiens
aaatttcaactgcat

SEQ ID NO: 28939 - DNA, 15 bp, Homo sapiens
aatttcaactgcatc

SEQ ID NO: 28940 - DNA, 15 bp, Homo sapiens
atttcaactgcatct

SEQ ID NO: 28941 - DNA, 15 bp, Homo sapiens
tttcaactgcatctc

SEQ ID NO: 28942 - DNA, 15 bp, Homo sapiens
ttcaactgcatctct

SEQ ID NO: 28943 - DNA, 15 bp, Homo sapiens
tcaactgcatctctc

SEQ ID NO: 28944 - DNA, 15 bp, Homo sapiens
caactgcatctctct

SEQ ID NO: 28945 - DNA, 15 bp, Homo sapiens
aactgcatctctctc

SEQ ID NO: 28946 - DNA, 15 bp, Homo sapiens
actgcatctctctca

SEQ ID NO: 28947 - DNA, 15 bp, Homo sapiens
ctgcatctctctcat

SEQ ID NO: 28948 - DNA, 15 bp, Homo sapiens
tgcatctctctcatc

SEQ ID NO: 28949 - DNA, 15 bp, Homo sapiens
gcatctctctcatct

SEQ ID NO: 28950 - DNA, 15 bp, Homo sapiens
catctctctcatctc

SEQ ID NO: 28951 - DNA, 15 bp, Homo sapiens
atctctctcatctct

SEQ ID NO: 28952 - DNA, 15 bp, Homo sapiens
tctctctcatctctt

SEQ ID NO: 28953 - DNA, 15 bp, Homo sapiens
ctctctcatctcttt

SEQ ID NO: 28954 - DNA, 15 bp, Homo sapiens
tctctcatctctttg

SEQ ID NO: 28955 - DNA, 15 bp, Homo sapiens
ctctcatctctttgt

SEQ ID NO: 28956 - DNA, 15 bp, Homo sapiens
tctcatctctttgtc

SEQ ID NO: 28957 - DNA, 15 bp, Homo sapiens
ctcatctctttgtct

SEQ ID NO: 28958 - DNA, 15 bp, Homo sapiens
tcatctctttgtctc

SEQ ID NO: 28959 - DNA, 15 bp, Homo sapiens
catctctttgtctct

SEQ ID NO: 28960 - DNA, 15 bp, Homo sapiens
atctctttgtctctt

SEQ ID NO: 28961 - DNA, 15 bp, Homo sapiens
tctctttgtctctta

SEQ ID NO: 28962 - DNA, 15 bp, Homo sapiens
ctctttgtctcttag

SEQ ID NO: 28963 - DNA, 15 bp, Homo sapiens
tctttgtctcttagc

SEQ ID NO: 28964 - DNA, 15 bp, Homo sapiens
ctttgtctcttagct

SEQ ID NO: 28965 - DNA, 15 bp, Homo sapiens
tttgtctcttagctc

SEQ ID NO: 28966 - DNA, 15 bp, Homo sapiens
ttgtctcttagctct

SEQ ID NO: 28967 - DNA, 15 bp, Homo sapiens
tgtctcttagctctt

SEQ ID NO: 28968 - DNA, 15 bp, Homo sapiens
gtctcttagctcttg

SEQ ID NO: 28969 - DNA, 15 bp, Homo sapiens
tctcttagctcttga

SEQ ID NO: 28970 - DNA, 15 bp, Homo sapiens
ctcttagctcttgat

SEQ ID NO: 28971 - DNA, 15 bp, Homo sapiens
tcttagctcttgatg

SEQ ID NO: 28972 - DNA, 15 bp, Homo sapiens
cttagctcttgatgc

SEQ ID NO: 28973 - DNA, 15 bp, Homo sapiens
ttagctcttgatgcc

SEQ ID NO: 28974 - DNA, 15 bp, Homo sapiens
tagctcttgatgcct

SEQ ID NO: 28975 - DNA, 15 bp, Homo sapiens
agctcttgatgcctc

SEQ ID NO: 28976 - DNA, 15 bp, Homo sapiens
gctcttgatgcctct

SEQ ID NO: 28977 - DNA, 15 bp, Homo sapiens
ctcttgatgcctctc

SEQ ID NO: 28978 - DNA, 15 bp, Homo sapiens
tcttgatgcctctca

SEQ ID NO: 28979 - DNA, 15 bp, Homo sapiens
cttgatgcctctcat

SEQ ID NO: 28980 - DNA, 15 bp, Homo sapiens
ttgatgcctctcatc

SEQ ID NO: 28981 - DNA, 15 bp, Homo sapiens
tgatgcctctcatcc

SEQ ID NO: 28982 - DNA, 15 bp, Homo sapiens
gatgcctctcatcct

SEQ ID NO: 28983 - DNA, 15 bp, Homo sapiens
atgcctctcatcctt

SEQ ID NO: 28984 - DNA, 15 bp, Homo sapiens
tgcctctcatccttc

SEQ ID NO: 28985 - DNA, 15 bp, Homo sapiens
gcctctcatccttct

SEQ ID NO: 28986 - DNA, 15 bp, Homo sapiens
cctctcatccttctc

SEQ ID NO: 28987 - DNA, 15 bp, Homo sapiens
ctctcatccttctct

SEQ ID NO: 28988 - DNA, 15 bp, Homo sapiens
tctcatccttctctg

SEQ ID NO: 28989 - DNA, 15 bp, Homo sapiens
ctcatccttctctgt

SEQ ID NO: 28990 - DNA, 15 bp, Homo sapiens
tcatccttctctgtc

SEQ ID NO: 28991 - DNA, 15 bp, Homo sapiens
catccttctctgtct

SEQ ID NO: 28992 - DNA, 15 bp, Homo sapiens
atccttctctgtctc

SEQ ID NO: 28993 - DNA, 15 bp, Homo sapiens
tccttctctgtctct

SEQ ID NO: 28994 - DNA, 15 bp, Homo sapiens
ccttctctgtctctc

SEQ ID NO: 28995 - DNA, 15 bp, Homo sapiens
cttctctgtctctct

SEQ ID NO: 28996 - DNA, 15 bp, Homo sapiens
ttctctgtctctctg

SEQ ID NO: 28997 - DNA, 15 bp, Homo sapiens
tctctgtctctctgc

SEQ ID NO: 28998 - DNA, 15 bp, Homo sapiens
ctctgtctctctgct

SEQ ID NO: 28999 - DNA, 15 bp, Homo sapiens
tctgtctctctgctc

SEQ ID NO: 29000 - DNA, 15 bp, Homo sapiens
ctgtctctctgctca

SEQ ID NO: 29001 - DNA, 15 bp, Homo sapiens
tgtctctctgctcac

SEQ ID NO: 29002 - DNA, 15 bp, Homo sapiens
gtctctctgctcacc

SEQ ID NO: 29003 - DNA, 15 bp, Homo sapiens
tctctctgctcaccc

SEQ ID NO: 29004 - DNA, 15 bp, Homo sapiens
ctctctgctcaccct

SEQ ID NO: 29005 - DNA, 15 bp, Homo sapiens
tctctgctcaccctg

SEQ ID NO: 29006 - DNA, 15 bp, Homo sapiens
ctctgctcaccctgt

SEQ ID NO: 29007 - DNA, 15 bp, Homo sapiens
tctgctcaccctgtc

SEQ ID NO: 29008 - DNA, 15 bp, Homo sapiens
ctgctcaccctgtct

SEQ ID NO: 29009 - DNA, 15 bp, Homo sapiens
tgctcaccctgtctt

SEQ ID NO: 29010 - DNA, 15 bp, Homo sapiens
gctcaccctgtcttg

SEQ ID NO: 29011 - DNA, 15 bp, Homo sapiens
ctcaccctgtcttgc

SEQ ID NO: 29012 - DNA, 15 bp, Homo sapiens
tcaccctgtcttgct

SEQ ID NO: 29013 - DNA, 15 bp, Homo sapiens
caccctgtcttgctc

SEQ ID NO: 29014 - DNA, 15 bp, Homo sapiens
accctgtcttgctct

SEQ ID NO: 29015 - DNA, 15 bp, Homo sapiens
ccctgtcttgctctt

SEQ ID NO: 29016 - DNA, 15 bp, Homo sapiens
cctgtcttgctcttt

SEQ ID NO: 29017 - DNA, 15 bp, Homo sapiens
ctgtcttgctctttt

SEQ ID NO: 29018 - DNA, 15 bp, Homo sapiens
tgtcttgctctttta

SEQ ID NO: 29019 - DNA, 15 bp, Homo sapiens
gtcttgctcttttac

SEQ ID NO: 29020 - DNA, 15 bp, Homo sapiens
tcttgctcttttaca

SEQ ID NO: 29021 - DNA, 15 bp, Homo sapiens
cttgctcttttacat

SEQ ID NO: 29022 - DNA, 15 bp, Homo sapiens
ttgctcttttacatg

SEQ ID NO: 29023 - DNA, 15 bp, Homo sapiens
tgctcttttacatgt

SEQ ID NO: 29024 - DNA, 15 bp, Homo sapiens
gctcttttacatgtt

SEQ ID NO: 29025 - DNA, 15 bp, Homo sapiens
ctcttttacatgttt

SEQ ID NO: 29026 - DNA, 15 bp, Homo sapiens
tcttttacatgtttc

SEQ ID NO: 29027 - DNA, 15 bp, Homo sapiens
cttttacatgtttct

SEQ ID NO: 29028 - DNA, 15 bp, Homo sapiens
ttttacatgtttctc

SEQ ID NO: 29029 - DNA, 15 bp, Homo sapiens
tttacatgtttctct

SEQ ID NO: 29030 - DNA, 15 bp, Homo sapiens
ttacatgtttctctg

SEQ ID NO: 29031 - DNA, 15 bp, Homo sapiens
tacatgtttctctgc

SEQ ID NO: 29032 - DNA, 15 bp, Homo sapiens
acatgtttctctgcc

SEQ ID NO: 29033 - DNA, 15 bp, Homo sapiens
catgtttctctgcct

SEQ ID NO: 29034 - DNA, 15 bp, Homo sapiens
atgtttctctgcctc

SEQ ID NO: 29035 - DNA, 15 bp, Homo sapiens
tgtttctctgcctct

SEQ ID NO: 29036 - DNA, 15 bp, Homo sapiens
gtttctctgcctctc

SEQ ID NO: 29037 - DNA, 15 bp, Homo sapiens
tttctctgcctctct

SEQ ID NO: 29038 - DNA, 15 bp, Homo sapiens
ttctctgcctctctt

SEQ ID NO: 29039 - DNA, 15 bp, Homo sapiens
tctctgcctctcttt

SEQ ID NO: 29040 - DNA, 15 bp, Homo sapiens
ctctgcctctctttc

SEQ ID NO: 29041 - DNA, 15 bp, Homo sapiens
tctgcctctctttct

SEQ ID NO: 29042 - DNA, 15 bp, Homo sapiens
ctgcctctctttctc

SEQ ID NO: 29043 - DNA, 15 bp, Homo sapiens
tgcctctctttctcc

SEQ ID NO: 29044 - DNA, 15 bp, Homo sapiens
gcctctctttctccc

SEQ ID NO: 29045 - DNA, 15 bp, Homo sapiens
cctctctttctcccg

SEQ ID NO: 29046 - DNA, 15 bp, Homo sapiens
ctctctttctcccgc

SEQ ID NO: 29047 - DNA, 15 bp, Homo sapiens
tctctttctcccgcc

SEQ ID NO: 29048 - DNA, 15 bp, Homo sapiens
ctctttctcccgcca

SEQ ID NO: 29049 - DNA, 15 bp, Homo sapiens
tctttctcccgccat

SEQ ID NO: 29050 - DNA, 15 bp, Homo sapiens
ctttctcccgccatc

SEQ ID NO: 29051 - DNA, 15 bp, Homo sapiens
tttctcccgccatct

SEQ ID NO: 29052 - DNA, 15 bp, Homo sapiens
ttctcccgccatctg

SEQ ID NO: 29053 - DNA, 15 bp, Homo sapiens
tctcccgccatctgt

SEQ ID NO: 29054 - DNA, 15 bp, Homo sapiens
ctcccgccatctgtc

SEQ ID NO: 29055 - DNA, 15 bp, Homo sapiens
tcccgccatctgtct

SEQ ID NO: 29056 - DNA, 15 bp, Homo sapiens
cccgccatctgtctg

SEQ ID NO: 29057 - DNA, 15 bp, Homo sapiens
ccgccatctgtctgt

SEQ ID NO: 29058 - DNA, 15 bp, Homo sapiens
cgccatctgtctgtc

SEQ ID NO: 29059 - DNA, 15 bp, Homo sapiens
gccatctgtctgtcg

SEQ ID NO: 29060 - DNA, 15 bp, Homo sapiens
ccatctgtctgtcgc

SEQ ID NO: 29061 - DNA, 15 bp, Homo sapiens
catctgtctgtcgct

SEQ ID NO: 29062 - DNA, 15 bp, Homo sapiens
atctgtctgtcgcta

SEQ ID NO: 29063 - DNA, 15 bp, Homo sapiens
tctgtctgtcgctac

SEQ ID NO: 29064 - DNA, 15 bp, Homo sapiens
ctgtctgtcgctaca

SEQ ID NO: 29065 - DNA, 15 bp, Homo sapiens
tgtctgtcgctacac

SEQ ID NO: 29066 - DNA, 15 bp, Homo sapiens
gtctgtcgctacact

SEQ ID NO: 29067 - DNA, 15 bp, Homo sapiens
tctgtcgctacactc

SEQ ID NO: 29068 - DNA, 15 bp, Homo sapiens
ctgtcgctacactca

SEQ ID NO: 29069 - DNA, 15 bp, Homo sapiens
tgtcgctacactcag

SEQ ID NO: 29070 - DNA, 15 bp, Homo sapiens
gtcgctacactcaga

SEQ ID NO: 29071 - DNA, 15 bp, Homo sapiens
tcgctacactcagac

SEQ ID NO: 29072 - DNA, 15 bp, Homo sapiens
cgctacactcagact

SEQ ID NO: 29073 - DNA, 15 bp, Homo sapiens
gctacactcagactc

SEQ ID NO: 29074 - DNA, 15 bp, Homo sapiens
ctacactcagactct

SEQ ID NO: 29075 - DNA, 15 bp, Homo sapiens
tacactcagactctc

SEQ ID NO: 29076 - DNA, 15 bp, Homo sapiens
acactcagactctct

SEQ ID NO: 29077 - DNA, 15 bp, Homo sapiens
cactcagactctctt

SEQ ID NO: 29078 - DNA, 15 bp, Homo sapiens
actcagactctcttt

SEQ ID NO: 29079 - DNA, 15 bp, Homo sapiens
ctcagactctctttc

SEQ ID NO: 29080 - DNA, 15 bp, Homo sapiens
tcagactctctttcc

SEQ ID NO: 29081 - DNA, 15 bp, Homo sapiens
cagactctctttccc

SEQ ID NO: 29082 - DNA, 15 bp, Homo sapiens
agactctctttcccc

SEQ ID NO: 29083 - DNA, 15 bp, Homo sapiens
gactctctttccccg

SEQ ID NO: 29084 - DNA, 15 bp, Homo sapiens
actctctttccccgc

SEQ ID NO: 29085 - DNA, 15 bp, Homo sapiens
ctctctttccccgca

SEQ ID NO: 29086 - DNA, 15 bp, Homo sapiens
tctctttccccgcat

SEQ ID NO: 29087 - DNA, 15 bp, Homo sapiens
ctctttccccgcatc

SEQ ID NO: 29088 - DNA, 15 bp, Homo sapiens
tctttccccgcatct

SEQ ID NO: 29089 - DNA, 15 bp, Homo sapiens
ctttccccgcatctc

SEQ ID NO: 29090 - DNA, 15 bp, Homo sapiens
tttccccgcatctct

SEQ ID NO: 29091 - DNA, 15 bp, Homo sapiens
ttccccgcatctctc

SEQ ID NO: 29092 - DNA, 15 bp, Homo sapiens
tccccgcatctctcc

SEQ ID NO: 29093 - DNA, 15 bp, Homo sapiens
ccccgcatctctcct

SEQ ID NO: 29094 - DNA, 15 bp, Homo sapiens
cccgcatctctcctg

SEQ ID NO: 29095 - DNA, 15 bp, Homo sapiens
ccgcatctctcctgg

SEQ ID NO: 29096 - DNA, 15 bp, Homo sapiens
cgcatctctcctggc

SEQ ID NO: 29097 - DNA, 15 bp, Homo sapiens
gcatctctcctggcc

SEQ ID NO: 29098 - DNA, 15 bp, Homo sapiens
catctctcctggcct

SEQ ID NO: 29099 - DNA, 15 bp, Homo sapiens
atctctcctggcctc

SEQ ID NO: 29100 - DNA, 15 bp, Homo sapiens
tctctcctggcctct

SEQ ID NO: 29101 - DNA, 15 bp, Homo sapiens
ctctcctggcctctg

SEQ ID NO: 29102 - DNA, 15 bp, Homo sapiens
tctcctggcctctga

SEQ ID NO: 29103 - DNA, 15 bp, Homo sapiens
ctcctggcctctgac

SEQ ID NO: 29104 - DNA, 15 bp, Homo sapiens
tcctggcctctgacc

SEQ ID NO: 29105 - DNA, 15 bp, Homo sapiens
cctggcctctgacca

SEQ ID NO: 29106 - DNA, 15 bp, Homo sapiens
ctggcctctgaccat

SEQ ID NO: 29107 - DNA, 15 bp, Homo sapiens
tggcctctgaccatc

SEQ ID NO: 29108 - DNA, 15 bp, Homo sapiens
ggcctctgaccatct

SEQ ID NO: 29109 - DNA, 15 bp, Homo sapiens
gcctctgaccatctc

SEQ ID NO: 29110 - DNA, 15 bp, Homo sapiens
cctctgaccatctcc

SEQ ID NO: 29111 - DNA, 15 bp, Homo sapiens
ctctgaccatctccc

SEQ ID NO: 29112 - DNA, 15 bp, Homo sapiens
tctgaccatctcccc

SEQ ID NO: 29113 - DNA, 15 bp, Homo sapiens
ctgaccatctcccct

SEQ ID NO: 29114 - DNA, 15 bp, Homo sapiens
tgaccatctccccta

SEQ ID NO: 29115 - DNA, 15 bp, Homo sapiens
gaccatctcccctat

SEQ ID NO: 29116 - DNA, 15 bp, Homo sapiens
accatctcccctatc

SEQ ID NO: 29117 - DNA, 15 bp, Homo sapiens
ccatctcccctatct

SEQ ID NO: 29118 - DNA, 15 bp, Homo sapiens
catctcccctatctc

SEQ ID NO: 29119 - DNA, 15 bp, Homo sapiens
atctcccctatctct

SEQ ID NO: 29120 - DNA, 15 bp, Homo sapiens
tctcccctatctctg

SEQ ID NO: 29121 - DNA, 15 bp, Homo sapiens
ctcccctatctctgt

SEQ ID NO: 29122 - DNA, 15 bp, Homo sapiens
tcccctatctctgtc

SEQ ID NO: 29123 - DNA, 15 bp, Homo sapiens
cccctatctctgtct

SEQ ID NO: 29124 - DNA, 15 bp, Homo sapiens
ccctatctctgtctc

SEQ ID NO: 29125 - DNA, 15 bp, Homo sapiens
cctatctctgtctcc

SEQ ID NO: 29126 - DNA, 15 bp, Homo sapiens
ctatctctgtctcct

SEQ ID NO: 29127 - DNA, 15 bp, Homo sapiens
tatctctgtctcctc

SEQ ID NO: 29128 - DNA, 15 bp, Homo sapiens
atctctgtctcctcc

SEQ ID NO: 29129 - DNA, 15 bp, Homo sapiens
tctctgtctcctcca

SEQ ID NO: 29130 - DNA, 15 bp, Homo sapiens
ctctgtctcctccat

SEQ ID NO: 29131 - DNA, 15 bp, Homo sapiens
tctgtctcctccatc

SEQ ID NO: 29132 - DNA, 15 bp, Homo sapiens
ctgtctcctccatct

SEQ ID NO: 29133 - DNA, 15 bp, Homo sapiens
tgtctcctccatctt

SEQ ID NO: 29134 - DNA, 15 bp, Homo sapiens
gtctcctccatcttg

SEQ ID NO: 29135 - DNA, 15 bp, Homo sapiens
tctcctccatcttga

SEQ ID NO: 29136 - DNA, 15 bp, Homo sapiens
ctcctccatcttgac

SEQ ID NO: 29137 - DNA, 15 bp, Homo sapiens
tcctccatcttgacc

SEQ ID NO: 29138 - DNA, 15 bp, Homo sapiens
cctccatcttgacca

SEQ ID NO: 29139 - DNA, 15 bp, Homo sapiens
ctccatcttgaccac

SEQ ID NO: 29140 - DNA, 15 bp, Homo sapiens
tccatcttgaccaca

SEQ ID NO: 29141 - DNA, 15 bp, Homo sapiens
ccatcttgaccacac

SEQ ID NO: 29142 - DNA, 15 bp, Homo sapiens
catcttgaccacact

SEQ ID NO: 29143 - DNA, 15 bp, Homo sapiens
atcttgaccacactc

SEQ ID NO: 29144 - DNA, 15 bp, Homo sapiens
tcttgaccacactcc

SEQ ID NO: 29145 - DNA, 15 bp, Homo sapiens
cttgaccacactcca

SEQ ID NO: 29146 - DNA, 15 bp, Homo sapiens
ttgaccacactccat

SEQ ID NO: 29147 - DNA, 15 bp, Homo sapiens
tgaccacactccatc

SEQ ID NO: 29148 - DNA, 15 bp, Homo sapiens
gaccacactccatcg

SEQ ID NO: 29149 - DNA, 15 bp, Homo sapiens
accacactccatcga

SEQ ID NO: 29150 - DNA, 15 bp, Homo sapiens
ccacactccatcgat

SEQ ID NO: 29151 - DNA, 15 bp, Homo sapiens
cacactccatcgatc

SEQ ID NO: 29152 - DNA, 15 bp, Homo sapiens
acactccatcgatct

SEQ ID NO: 29153 - DNA, 15 bp, Homo sapiens
cactccatcgatctc

SEQ ID NO: 29154 - DNA, 15 bp, Homo sapiens
actccatcgatctcc

SEQ ID NO: 29155 - DNA, 15 bp, Homo sapiens
ctccatcgatctcct

SEQ ID NO: 29156 - DNA, 15 bp, Homo sapiens
tccatcgatctcctt

SEQ ID NO: 29157 - DNA, 15 bp, Homo sapiens
ccatcgatctccttt

SEQ ID NO: 29158 - DNA, 15 bp, Homo sapiens
catcgatctcctttc

SEQ ID NO: 29159 - DNA, 15 bp, Homo sapiens
atcgatctcctttcc

SEQ ID NO: 29160 - DNA, 15 bp, Homo sapiens
tcgatctcctttcct

SEQ ID NO: 29161 - DNA, 15 bp, Homo sapiens
cgatctcctttcctc

SEQ ID NO: 29162 - DNA, 15 bp, Homo sapiens
gatctcctttcctcc

SEQ ID NO: 29163 - DNA, 15 bp, Homo sapiens
atctcctttcctcca

SEQ ID NO: 29164 - DNA, 15 bp, Homo sapiens
tctcctttcctccat

SEQ ID NO: 29165 - DNA, 15 bp, Homo sapiens
ctcctttcctccatc

SEQ ID NO: 29166 - DNA, 15 bp, Homo sapiens
tcctttcctccatct

SEQ ID NO: 29167 - DNA, 15 bp, Homo sapiens
cctttcctccatctc

SEQ ID NO: 29168 - DNA, 15 bp, Homo sapiens
ctttcctccatctct

SEQ ID NO: 29169 - DNA, 15 bp, Homo sapiens
tttcctccatctctc

SEQ ID NO: 29170 - DNA, 15 bp, Homo sapiens
ttcctccatctctcc

SEQ ID NO: 29171 - DNA, 15 bp, Homo sapiens
tcctccatctctccc

SEQ ID NO: 29172 - DNA, 15 bp, Homo sapiens
cctccatctctcccg

SEQ ID NO: 29173 - DNA, 15 bp, Homo sapiens
ctccatctctcccgc

SEQ ID NO: 29174 - DNA, 15 bp, Homo sapiens
tccatctctcccgct

SEQ ID NO: 29175 - DNA, 15 bp, Homo sapiens
ccatctctcccgctc

SEQ ID NO: 29176 - DNA, 15 bp, Homo sapiens
catctctcccgctct

SEQ ID NO: 29177 - DNA, 15 bp, Homo sapiens
atctctcccgctctc

SEQ ID NO: 29178 - DNA, 15 bp, Homo sapiens
tctctcccgctctct

SEQ ID NO: 29179 - DNA, 15 bp, Homo sapiens
ctctcccgctctctt

SEQ ID NO: 29180 - DNA, 15 bp, Homo sapiens
tctcccgctctcttt

SEQ ID NO: 29181 - DNA, 15 bp, Homo sapiens
ctcccgctctctttt

SEQ ID NO: 29182 - DNA, 15 bp, Homo sapiens
tcccgctctcttttc

SEQ ID NO: 29183 - DNA, 15 bp, Homo sapiens
cccgctctcttttct

SEQ ID NO: 29184 - DNA, 15 bp, Homo sapiens
ccgctctcttttctt

SEQ ID NO: 29185 - DNA, 15 bp, Homo sapiens
cgctctcttttcttg

SEQ ID NO: 29186 - DNA, 15 bp, Homo sapiens
gctctcttttcttgc

SEQ ID NO: 29187 - DNA, 15 bp, Homo sapiens
ctctcttttcttgcc

SEQ ID NO: 29188 - DNA, 15 bp, Homo sapiens
tctcttttcttgcct

SEQ ID NO: 29189 - DNA, 15 bp, Homo sapiens
ctcttttcttgcctt

SEQ ID NO: 29190 - DNA, 15 bp, Homo sapiens
tcttttcttgccttc

SEQ ID NO: 29191 - DNA, 15 bp, Homo sapiens
cttttcttgccttcc

SEQ ID NO: 29192 - DNA, 15 bp, Homo sapiens
ttttcttgccttccc

SEQ ID NO: 29193 - DNA, 15 bp, Homo sapiens
tttcttgccttcccc

SEQ ID NO: 29194 - DNA, 15 bp, Homo sapiens
ttcttgccttccccc

SEQ ID NO: 29195 - DNA, 15 bp, Homo sapiens
tcttgccttccccca

SEQ ID NO: 29196 - DNA, 15 bp, Homo sapiens
cttgccttcccccac

SEQ ID NO: 29197 - DNA, 15 bp, Homo sapiens
ttgccttcccccacc

SEQ ID NO: 29198 - DNA, 15 bp, Homo sapiens
tgccttcccccacct

SEQ ID NO: 29199 - DNA, 15 bp, Homo sapiens
gccttcccccacctg

SEQ ID NO: 29200 - DNA, 15 bp, Homo sapiens
ccttcccccacctgc

SEQ ID NO: 29201 - DNA, 15 bp, Homo sapiens
cttcccccacctgcc

SEQ ID NO: 29202 - DNA, 15 bp, Homo sapiens
ttcccccacctgcct

SEQ ID NO: 29203 - DNA, 15 bp, Homo sapiens
tcccccacctgcctt

SEQ ID NO: 29204 - DNA, 15 bp, Homo sapiens
cccccacctgccttc

SEQ ID NO: 29205 - DNA, 15 bp, Homo sapiens
ccccacctgccttcc

SEQ ID NO: 29206 - DNA, 15 bp, Homo sapiens
cccacctgccttccc

SEQ ID NO: 29207 - DNA, 15 bp, Homo sapiens
ccacctgccttccca

SEQ ID NO: 29208 - DNA, 15 bp, Homo sapiens
cacctgccttcccag

SEQ ID NO: 29209 - DNA, 15 bp, Homo sapiens
acctgccttcccagc

SEQ ID NO: 29210 - DNA, 15 bp, Homo sapiens
cctgccttcccagcc

SEQ ID NO: 29211 - DNA, 15 bp, Homo sapiens
ctgccttcccagcca

SEQ ID NO: 29212 - DNA, 15 bp, Homo sapiens
tgccttcccagccag

SEQ ID NO: 29213 - DNA, 15 bp, Homo sapiens
gccttcccagccagc

SEQ ID NO: 29214 - DNA, 15 bp, Homo sapiens
ccttcccagccagca

SEQ ID NO: 29215 - DNA, 15 bp, Homo sapiens
cttcccagccagcat

SEQ ID NO: 29216 - DNA, 15 bp, Homo sapiens
ttcccagccagcatc

SEQ ID NO: 29217 - DNA, 15 bp, Homo sapiens
tcccagccagcatcc

SEQ ID NO: 29218 - DNA, 15 bp, Homo sapiens
cccagccagcatcca

SEQ ID NO: 29219 - DNA, 15 bp, Homo sapiens
ccagccagcatccag

SEQ ID NO: 29220 - DNA, 15 bp, Homo sapiens
cagccagcatccagc

SEQ ID NO: 29221 - DNA, 15 bp, Homo sapiens
agccagcatccagcc

SEQ ID NO: 29222 - DNA, 15 bp, Homo sapiens
gccagcatccagcct

SEQ ID NO: 29223 - DNA, 15 bp, Homo sapiens
ccagcatccagccta

SEQ ID NO: 29224 - DNA, 15 bp, Homo sapiens
cagcatccagcctag

SEQ ID NO: 29225 - DNA, 15 bp, Homo sapiens
agcatccagcctaga

SEQ ID NO: 29226 - DNA, 15 bp, Homo sapiens
gcatccagcctagag

SEQ ID NO: 29227 - DNA, 15 bp, Homo sapiens
catccagcctagagc

SEQ ID NO: 29228 - DNA, 15 bp, Homo sapiens
atccagcctagagct

SEQ ID NO: 29229 - DNA, 15 bp, Homo sapiens
tccagcctagagctt

SEQ ID NO: 29230 - DNA, 15 bp, Homo sapiens
ccagcctagagcttt

SEQ ID NO: 29231 - DNA, 15 bp, Homo sapiens
cagcctagagctttg

SEQ ID NO: 29232 - DNA, 15 bp, Homo sapiens
agcctagagctttgt

SEQ ID NO: 29233 - DNA, 15 bp, Homo sapiens
gcctagagctttgta

SEQ ID NO: 29234 - DNA, 15 bp, Homo sapiens
cctagagctttgtac

SEQ ID NO: 29235 - DNA, 15 bp, Homo sapiens
ctagagctttgtaca

SEQ ID NO: 29236 - DNA, 15 bp, Homo sapiens
tagagctttgtacac

SEQ ID NO: 29237 - DNA, 15 bp, Homo sapiens
agagctttgtacaca

SEQ ID NO: 29238 - DNA, 15 bp, Homo sapiens
gagctttgtacacag

SEQ ID NO: 29239 - DNA, 15 bp, Homo sapiens
agctttgtacacagc

SEQ ID NO: 29240 - DNA, 15 bp, Homo sapiens
gctttgtacacagct

SEQ ID NO: 29241 - DNA, 15 bp, Homo sapiens
ctttgtacacagctg

SEQ ID NO: 29242 - DNA, 15 bp, Homo sapiens
tttgtacacagctgg

SEQ ID NO: 29243 - DNA, 15 bp, Homo sapiens
ttgtacacagctggc

SEQ ID NO: 29244 - DNA, 15 bp, Homo sapiens
tgtacacagctggcg

SEQ ID NO: 29245 - DNA, 15 bp, Homo sapiens
gtacacagctggcgt

SEQ ID NO: 29246 - DNA, 15 bp, Homo sapiens
tacacagctggcgtt

SEQ ID NO: 29247 - DNA, 15 bp, Homo sapiens
acacagctggcgttt

SEQ ID NO: 29248 - DNA, 15 bp, Homo sapiens
cacagctggcgttta

SEQ ID NO: 29249 - DNA, 15 bp, Homo sapiens
acagctggcgtttaa

SEQ ID NO: 29250 - DNA, 15 bp, Homo sapiens
cagctggcgtttaat

SEQ ID NO: 29251 - DNA, 15 bp, Homo sapiens
agctggcgtttaata

SEQ ID NO: 29252 - DNA, 15 bp, Homo sapiens
gctggcgtttaataa

SEQ ID NO: 29253 - DNA, 15 bp, Homo sapiens
ctggcgtttaataat

SEQ ID NO: 29254 - DNA, 15 bp, Homo sapiens
tggcgtttaataata

SEQ ID NO: 29255 - DNA, 15 bp, Homo sapiens
ggcgtttaataatag

SEQ ID NO: 29256 - DNA, 15 bp, Homo sapiens
gcgtttaataatagt

SEQ ID NO: 29257 - DNA, 15 bp, Homo sapiens
cgtttaataatagta

SEQ ID NO: 29258 - DNA, 15 bp, Homo sapiens
gtttaataatagtaa

SEQ ID NO: 29259 - DNA, 15 bp, Homo sapiens
tttaataatagtaat

SEQ ID NO: 29260 - DNA, 15 bp, Homo sapiens
ttaataatagtaatg

SEQ ID NO: 29261 - DNA, 15 bp, Homo sapiens
taataatagtaatgt

SEQ ID NO: 29262 - DNA, 15 bp, Homo sapiens
aataatagtaatgtc

SEQ ID NO: 29263 - DNA, 15 bp, Homo sapiens
ataatagtaatgtcg

SEQ ID NO: 29264 - DNA, 15 bp, Homo sapiens
taatagtaatgtcgc

SEQ ID NO: 29265 - DNA, 15 bp, Homo sapiens
aatagtaatgtcgcc

SEQ ID NO: 29266 - DNA, 15 bp, Homo sapiens
atagtaatgtcgccg

SEQ ID NO: 29267 - DNA, 15 bp, Homo sapiens
tagtaatgtcgccga

SEQ ID NO: 29268 - DNA, 15 bp, Homo sapiens
agtaatgtcgccgag

SEQ ID NO: 29269 - DNA, 15 bp, Homo sapiens
gtaatgtcgccgagg

SEQ ID NO: 29270 - DNA, 15 bp, Homo sapiens
taatgtcgccgagga

SEQ ID NO: 29271 - DNA, 15 bp, Homo sapiens
aatgtcgccgaggac

SEQ ID NO: 29272 - DNA, 15 bp, Homo sapiens
atgtcgccgaggacc

SEQ ID NO: 29273 - DNA, 15 bp, Homo sapiens
tgtcgccgaggacct

SEQ ID NO: 29274 - DNA, 15 bp, Homo sapiens
gtcgccgaggacctt

SEQ ID NO: 29275 - DNA, 15 bp, Homo sapiens
tcgccgaggaccttt

SEQ ID NO: 29276 - DNA, 15 bp, Homo sapiens
cgccgaggaccttta

SEQ ID NO: 29277 - DNA, 15 bp, Homo sapiens
gccgaggacctttac

SEQ ID NO: 29278 - DNA, 15 bp, Homo sapiens
ccgaggacctttaca

SEQ ID NO: 29279 - DNA, 15 bp, Homo sapiens
cgaggacctttacat

SEQ ID NO: 29280 - DNA, 15 bp, Homo sapiens
gaggacctttacatt

SEQ ID NO: 29281 - DNA, 15 bp, Homo sapiens
aggacctttacattt

SEQ ID NO: 29282 - DNA, 15 bp, Homo sapiens
ggacctttacatttt

SEQ ID NO: 29283 - DNA, 15 bp, Homo sapiens
gacctttacatttta

SEQ ID NO: 29284 - DNA, 15 bp, Homo sapiens
acctttacattttat

SEQ ID NO: 29285 - DNA, 15 bp, Homo sapiens
cctttacattttatg

SEQ ID NO: 29286 - DNA, 15 bp, Homo sapiens
ctttacattttatga

SEQ ID NO: 29287 - DNA, 15 bp, Homo sapiens
tttacattttatgag

SEQ ID NO: 29288 - DNA, 15 bp, Homo sapiens
ttacattttatgaga

SEQ ID NO: 29289 - DNA, 15 bp, Homo sapiens
tacattttatgagag

SEQ ID NO: 29290 - DNA, 15 bp, Homo sapiens
acattttatgagagt

SEQ ID NO: 29291 - DNA, 15 bp, Homo sapiens
cattttatgagagtg

SEQ ID NO: 29292 - DNA, 15 bp, Homo sapiens
attttatgagagtga

SEQ ID NO: 29293 - DNA, 15 bp, Homo sapiens
ttttatgagagtgag

SEQ ID NO: 29294 - DNA, 15 bp, Homo sapiens
tttatgagagtgagc

SEQ ID NO: 29295 - DNA, 15 bp, Homo sapiens
ttatgagagtgagca

SEQ ID NO: 29296 - DNA, 15 bp, Homo sapiens
tatgagagtgagcat

SEQ ID NO: 29297 - DNA, 15 bp, Homo sapiens
atgagagtgagcatc

SEQ ID NO: 29298 - DNA, 15 bp, Homo sapiens
tgagagtgagcatca

SEQ ID NO: 29299 - DNA, 15 bp, Homo sapiens
gagagtgagcatcag

SEQ ID NO: 29300 - DNA, 15 bp, Homo sapiens
agagtgagcatcagt

SEQ ID NO: 29301 - DNA, 15 bp, Homo sapiens
gagtgagcatcagtt

SEQ ID NO: 29302 - DNA, 15 bp, Homo sapiens
agtgagcatcagttc

SEQ ID NO: 29303 - DNA, 15 bp, Homo sapiens
gtgagcatcagttct

SEQ ID NO: 29304 - DNA, 15 bp, Homo sapiens
tgagcatcagttctg

SEQ ID NO: 29305 - DNA, 15 bp, Homo sapiens
gagcatcagttctgt

SEQ ID NO: 29306 - DNA, 15 bp, Homo sapiens
agcatcagttctgtt

SEQ ID NO: 29307 - DNA, 15 bp, Homo sapiens
gcatcagttctgttc

SEQ ID NO: 29308 - DNA, 15 bp, Homo sapiens
catcagttctgttca

SEQ ID NO: 29309 - DNA, 15 bp, Homo sapiens
atcagttctgttcac

SEQ ID NO: 29310 - DNA, 15 bp, Homo sapiens
tcagttctgttcacc

SEQ ID NO: 29311 - DNA, 15 bp, Homo sapiens
cagttctgttcaccc

SEQ ID NO: 29312 - DNA, 15 bp, Homo sapiens
agttctgttcaccct

SEQ ID NO: 29313 - DNA, 15 bp, Homo sapiens
gttctgttcacccta

SEQ ID NO: 29314 - DNA, 15 bp, Homo sapiens
ttctgttcaccctag

SEQ ID NO: 29315 - DNA, 15 bp, Homo sapiens
tctgttcaccctagt

SEQ ID NO: 29316 - DNA, 15 bp, Homo sapiens
ctgttcaccctagta

SEQ ID NO: 29317 - DNA, 15 bp, Homo sapiens
tgttcaccctagtag

SEQ ID NO: 29318 - DNA, 15 bp, Homo sapiens
gttcaccctagtagc

SEQ ID NO: 29319 - DNA, 15 bp, Homo sapiens
ttcaccctagtagca

SEQ ID NO: 29320 - DNA, 15 bp, Homo sapiens
tcaccctagtagcag

SEQ ID NO: 29321 - DNA, 15 bp, Homo sapiens
caccctagtagcagg

SEQ ID NO: 29322 - DNA, 15 bp, Homo sapiens
accctagtagcagga

SEQ ID NO: 29323 - DNA, 15 bp, Homo sapiens
ccctagtagcaggag

SEQ ID NO: 29324 - DNA, 15 bp, Homo sapiens
cctagtagcaggagg

SEQ ID NO: 29325 - DNA, 15 bp, Homo sapiens
ctagtagcaggagga

SEQ ID NO: 29326 - DNA, 15 bp, Homo sapiens
tagtagcaggaggat

SEQ ID NO: 29327 - DNA, 15 bp, Homo sapiens
agtagcaggaggatt

SEQ ID NO: 29328 - DNA, 15 bp, Homo sapiens
gtagcaggaggattg

SEQ ID NO: 29329 - DNA, 15 bp, Homo sapiens
tagcaggaggattgc

SEQ ID NO: 29330 - DNA, 15 bp, Homo sapiens
agcaggaggattgca

SEQ ID NO: 29331 - DNA, 15 bp, Homo sapiens
gcaggaggattgcaa

SEQ ID NO: 29332 - DNA, 15 bp, Homo sapiens
caggaggattgcaag

SEQ ID NO: 29333 - DNA, 15 bp, Homo sapiens
aggaggattgcaagg

SEQ ID NO: 29334 - DNA, 15 bp, Homo sapiens
ggaggattgcaaggt

SEQ ID NO: 29335 - DNA, 15 bp, Homo sapiens
gaggattgcaaggtg

SEQ ID NO: 29336 - DNA, 15 bp, Homo sapiens
aggattgcaaggtgc

SEQ ID NO: 29337 - DNA, 15 bp, Homo sapiens
ggattgcaaggtgcc

SEQ ID NO: 29338 - DNA, 15 bp, Homo sapiens
gattgcaaggtgccg

SEQ ID NO: 29339 - DNA, 15 bp, Homo sapiens
attgcaaggtgccgg

SEQ ID NO: 29340 - DNA, 15 bp, Homo sapiens
ttgcaaggtgccggg

SEQ ID NO: 29341 - DNA, 15 bp, Homo sapiens
tgcaaggtgccgggg

SEQ ID NO: 29342 - DNA, 15 bp, Homo sapiens
gcaaggtgccggggc

SEQ ID NO: 29343 - DNA, 15 bp, Homo sapiens
caaggtgccggggca

SEQ ID NO: 29344 - DNA, 15 bp, Homo sapiens
aaggtgccggggcaa

SEQ ID NO: 29345 - DNA, 15 bp, Homo sapiens
aggtgccggggcaag

SEQ ID NO: 29346 - DNA, 15 bp, Homo sapiens
ggtgccggggcaagc

SEQ ID NO: 29347 - DNA, 15 bp, Homo sapiens
gtgccggggcaagct

SEQ ID NO: 29348 - DNA, 15 bp, Homo sapiens
tgccggggcaagctg

SEQ ID NO: 29349 - DNA, 15 bp, Homo sapiens
gccggggcaagctga

SEQ ID NO: 29350 - DNA, 15 bp, Homo sapiens
ccggggcaagctgag

SEQ ID NO: 29351 - DNA, 15 bp, Homo sapiens
cggggcaagctgagc

SEQ ID NO: 29352 - DNA, 15 bp, Homo sapiens
ggggcaagctgagca

SEQ ID NO: 29353 - DNA, 15 bp, Homo sapiens
gggcaagctgagcac

SEQ ID NO: 29354 - DNA, 15 bp, Homo sapiens
ggcaagctgagcact

SEQ ID NO: 29355 - DNA, 15 bp, Homo sapiens
gcaagctgagcactt

SEQ ID NO: 29356 - DNA, 15 bp, Homo sapiens
caagctgagcactta

SEQ ID NO: 29357 - DNA, 15 bp, Homo sapiens
aagctgagcacttaa

SEQ ID NO: 29358 - DNA, 15 bp, Homo sapiens
agctgagcacttaac

SEQ ID NO: 29359 - DNA, 15 bp, Homo sapiens
gctgagcacttaact

SEQ ID NO: 29360 - DNA, 15 bp, Homo sapiens
ctgagcacttaactg

SEQ ID NO: 29361 - DNA, 15 bp, Homo sapiens
tgagcacttaactga

SEQ ID NO: 29362 - DNA, 15 bp, Homo sapiens
gagcacttaactgaa

SEQ ID NO: 29363 - DNA, 15 bp, Homo sapiens
agcacttaactgaac

SEQ ID NO: 29364 - DNA, 15 bp, Homo sapiens
gcacttaactgaact

SEQ ID NO: 29365 - DNA, 15 bp, Homo sapiens
cacttaactgaactt

SEQ ID NO: 29366 - DNA, 15 bp, Homo sapiens
acttaactgaacttt

SEQ ID NO: 29367 - DNA, 15 bp, Homo sapiens
cttaactgaactttg

SEQ ID NO: 29368 - DNA, 15 bp, Homo sapiens
ttaactgaactttgc

SEQ ID NO: 29369 - DNA, 15 bp, Homo sapiens
taactgaactttgct

SEQ ID NO: 29370 - DNA, 15 bp, Homo sapiens
aactgaactttgctt

SEQ ID NO: 29371 - DNA, 15 bp, Homo sapiens
actgaactttgcttg

SEQ ID NO: 29372 - DNA, 15 bp, Homo sapiens
ctgaactttgcttgt

SEQ ID NO: 29373 - DNA, 15 bp, Homo sapiens
tgaactttgcttgta

SEQ ID NO: 29374 - DNA, 15 bp, Homo sapiens
gaactttgcttgtat

SEQ ID NO: 29375 - DNA, 15 bp, Homo sapiens
aactttgcttgtatc

SEQ ID NO: 29376 - DNA, 15 bp, Homo sapiens
actttgcttgtatcg

SEQ ID NO: 29377 - DNA, 15 bp, Homo sapiens
ctttgcttgtatcgc

SEQ ID NO: 29378 - DNA, 15 bp, Homo sapiens
tttgcttgtatcgct

SEQ ID NO: 29379 - DNA, 15 bp, Homo sapiens
ttgcttgtatcgctt

SEQ ID NO: 29380 - DNA, 15 bp, Homo sapiens
tgcttgtatcgcttt

SEQ ID NO: 29381 - DNA, 15 bp, Homo sapiens
gcttgtatcgcttta

SEQ ID NO: 29382 - DNA, 15 bp, Homo sapiens
cttgtatcgctttag

SEQ ID NO: 29383 - DNA, 15 bp, Homo sapiens
ttgtatcgctttaga

SEQ ID NO: 29384 - DNA, 15 bp, Homo sapiens
tgtatcgctttagag

SEQ ID NO: 29385 - DNA, 15 bp, Homo sapiens
gtatcgctttagagg

SEQ ID NO: 29386 - DNA, 15 bp, Homo sapiens
tatcgctttagagga

SEQ ID NO: 29387 - DNA, 15 bp, Homo sapiens
atcgctttagaggag

SEQ ID NO: 29388 - DNA, 15 bp, Homo sapiens
tcgctttagaggaga

SEQ ID NO: 29389 - DNA, 15 bp, Homo sapiens
cgctttagaggagac

SEQ ID NO: 29390 - DNA, 15 bp, Homo sapiens
gctttagaggagacc

SEQ ID NO: 29391 - DNA, 15 bp, Homo sapiens
ctttagaggagaccc

SEQ ID NO: 29392 - DNA, 15 bp, Homo sapiens
tttagaggagaccct

SEQ ID NO: 29393 - DNA, 15 bp, Homo sapiens
ttagaggagaccctt

SEQ ID NO: 29394 - DNA, 15 bp, Homo sapiens
tagaggagacccttg

SEQ ID NO: 29395 - DNA, 15 bp, Homo sapiens
agaggagacccttgg

SEQ ID NO: 29396 - DNA, 15 bp, Homo sapiens
gaggagacccttggg

SEQ ID NO: 29397 - DNA, 15 bp, Homo sapiens
aggagacccttgggg

SEQ ID NO: 29398 - DNA, 15 bp, Homo sapiens
ggagacccttggggc

SEQ ID NO: 29399 - DNA, 15 bp, Homo sapiens
gagacccttggggcg

SEQ ID NO: 29400 - DNA, 15 bp, Homo sapiens
agacccttggggcgg

SEQ ID NO: 29401 - DNA, 15 bp, Homo sapiens
gacccttggggcggg

SEQ ID NO: 29402 - DNA, 15 bp, Homo sapiens
acccttggggcgggg

SEQ ID NO: 29403 - DNA, 15 bp, Homo sapiens
cccttggggcggggg

SEQ ID NO: 29404 - DNA, 15 bp, Homo sapiens
ccttggggcgggggg

SEQ ID NO: 29405 - DNA, 15 bp, Homo sapiens
cttggggcggggggg

SEQ ID NO: 29406 - DNA, 15 bp, Homo sapiens
ttggggcgggggggc

SEQ ID NO: 29407 - DNA, 15 bp, Homo sapiens
tggggcgggggggca

SEQ ID NO: 29408 - DNA, 15 bp, Homo sapiens
ggggcgggggggcag

SEQ ID NO: 29409 - DNA, 15 bp, Homo sapiens
gggcgggggggcagg

SEQ ID NO: 29410 - DNA, 15 bp, Homo sapiens
ggcgggggggcaggg

SEQ ID NO: 29411 - DNA, 15 bp, Homo sapiens
gcgggggggcaggga

SEQ ID NO: 29412 - DNA, 15 bp, Homo sapiens
cgggggggcagggag

SEQ ID NO: 29413 - DNA, 15 bp, Homo sapiens
gggggggcagggagc

SEQ ID NO: 29414 - DNA, 15 bp, Homo sapiens
ggggggcagggagca

SEQ ID NO: 29415 - DNA, 15 bp, Homo sapiens
gggggcagggagcac

SEQ ID NO: 29416 - DNA, 15 bp, Homo sapiens
ggggcagggagcact

SEQ ID NO: 29417 - DNA, 15 bp, Homo sapiens
gggcagggagcactt

SEQ ID NO: 29418 - DNA, 15 bp, Homo sapiens
ggcagggagcacttc

SEQ ID NO: 29419 - DNA, 15 bp, Homo sapiens
gcagggagcacttca

SEQ ID NO: 29420 - DNA, 15 bp, Homo sapiens
cagggagcacttcac

SEQ ID NO: 29421 - DNA, 15 bp, Homo sapiens
agggagcacttcaca

SEQ ID NO: 29422 - DNA, 15 bp, Homo sapiens
gggagcacttcacac

SEQ ID NO: 29423 - DNA, 15 bp, Homo sapiens
ggagcacttcacacc

SEQ ID NO: 29424 - DNA, 15 bp, Homo sapiens
gagcacttcacacca

SEQ ID NO: 29425 - DNA, 15 bp, Homo sapiens
agcacttcacaccat

SEQ ID NO: 29426 - DNA, 15 bp, Homo sapiens
gcacttcacaccatt

SEQ ID NO: 29427 - DNA, 15 bp, Homo sapiens
cacttcacaccattg

SEQ ID NO: 29428 - DNA, 15 bp, Homo sapiens
acttcacaccattgt

SEQ ID NO: 29429 - DNA, 15 bp, Homo sapiens
cttcacaccattgtc

SEQ ID NO: 29430 - DNA, 15 bp, Homo sapiens
ttcacaccattgtca

SEQ ID NO: 29431 - DNA, 15 bp, Homo sapiens
tcacaccattgtcaa

SEQ ID NO: 29432 - DNA, 15 bp, Homo sapiens
cacaccattgtcaac

SEQ ID NO: 29433 - DNA, 15 bp, Homo sapiens
acaccattgtcaacc

SEQ ID NO: 29434 - DNA, 15 bp, Homo sapiens
caccattgtcaaccg

SEQ ID NO: 29435 - DNA, 15 bp, Homo sapiens
accattgtcaaccgt

SEQ ID NO: 29436 - DNA, 15 bp, Homo sapiens
ccattgtcaaccgta

SEQ ID NO: 29437 - DNA, 15 bp, Homo sapiens
cattgtcaaccgtag

SEQ ID NO: 29438 - DNA, 15 bp, Homo sapiens
attgtcaaccgtagt

SEQ ID NO: 29439 - DNA, 15 bp, Homo sapiens
ttgtcaaccgtagtt

SEQ ID NO: 29440 - DNA, 15 bp, Homo sapiens
tgtcaaccgtagttt

SEQ ID NO: 29441 - DNA, 15 bp, Homo sapiens
gtcaaccgtagttta

SEQ ID NO: 29442 - DNA, 15 bp, Homo sapiens
tcaaccgtagtttag

SEQ ID NO: 29443 - DNA, 15 bp, Homo sapiens
caaccgtagtttagc

SEQ ID NO: 29444 - DNA, 15 bp, Homo sapiens
aaccgtagtttagct

SEQ ID NO: 29445 - DNA, 15 bp, Homo sapiens
accgtagtttagctg

SEQ ID NO: 29446 - DNA, 15 bp, Homo sapiens
ccgtagtttagctgt

SEQ ID NO: 29447 - DNA, 15 bp, Homo sapiens
cgtagtttagctgtg

SEQ ID NO: 29448 - DNA, 15 bp, Homo sapiens
gtagtttagctgtgt

SEQ ID NO: 29449 - DNA, 15 bp, Homo sapiens
tagtttagctgtgtg

SEQ ID NO: 29450 - DNA, 15 bp, Homo sapiens
agtttagctgtgtgg

SEQ ID NO: 29451 - DNA, 15 bp, Homo sapiens
gtttagctgtgtgga

SEQ ID NO: 29452 - DNA, 15 bp, Homo sapiens
tttagctgtgtggac

SEQ ID NO: 29453 - DNA, 15 bp, Homo sapiens
ttagctgtgtggacc

SEQ ID NO: 29454 - DNA, 15 bp, Homo sapiens
tagctgtgtggacct

SEQ ID NO: 29455 - DNA, 15 bp, Homo sapiens
agctgtgtggaccta

SEQ ID NO: 29456 - DNA, 15 bp, Homo sapiens
gctgtgtggacctac

SEQ ID NO: 29457 - DNA, 15 bp, Homo sapiens
ctgtgtggacctacc

SEQ ID NO: 29458 - DNA, 15 bp, Homo sapiens
tgtgtggacctaccc

SEQ ID NO: 29459 - DNA, 15 bp, Homo sapiens
gtgtggacctacccc

SEQ ID NO: 29460 - DNA, 15 bp, Homo sapiens
tgtggacctacccca

SEQ ID NO: 29461 - DNA, 15 bp, Homo sapiens
gtggacctaccccag

SEQ ID NO: 29462 - DNA, 15 bp, Homo sapiens
tggacctaccccagg

SEQ ID NO: 29463 - DNA, 15 bp, Homo sapiens
ggacctaccccagga

SEQ ID NO: 29464 - DNA, 15 bp, Homo sapiens
gacctaccccaggac

SEQ ID NO: 29465 - DNA, 15 bp, Homo sapiens
acctaccccaggact

SEQ ID NO: 29466 - DNA, 15 bp, Homo sapiens
cctaccccaggactg

SEQ ID NO: 29467 - DNA, 15 bp, Homo sapiens
ctaccccaggactgc

SEQ ID NO: 29468 - DNA, 15 bp, Homo sapiens
taccccaggactgca

SEQ ID NO: 29469 - DNA, 15 bp, Homo sapiens
accccaggactgcat

SEQ ID NO: 29470 - DNA, 15 bp, Homo sapiens
ccccaggactgcatg

SEQ ID NO: 29471 - DNA, 15 bp, Homo sapiens
cccaggactgcatgt

SEQ ID NO: 29472 - DNA, 15 bp, Homo sapiens
ccaggactgcatgtg

SEQ ID NO: 29473 - DNA, 15 bp, Homo sapiens
caggactgcatgtgt

SEQ ID NO: 29474 - DNA, 15 bp, Homo sapiens
aggactgcatgtgtg

SEQ ID NO: 29475 - DNA, 15 bp, Homo sapiens
ggactgcatgtgtgt

SEQ ID NO: 29476 - DNA, 15 bp, Homo sapiens
gactgcatgtgtgtg

SEQ ID NO: 29477 - DNA, 15 bp, Homo sapiens
actgcatgtgtgtga

SEQ ID NO: 29478 - DNA, 15 bp, Homo sapiens
ctgcatgtgtgtgac

SEQ ID NO: 29479 - DNA, 15 bp, Homo sapiens
tgcatgtgtgtgacc

SEQ ID NO: 29480 - DNA, 15 bp, Homo sapiens
gcatgtgtgtgacca

SEQ ID NO: 29481 - DNA, 15 bp, Homo sapiens
catgtgtgtgaccag

SEQ ID NO: 29482 - DNA, 15 bp, Homo sapiens
atgtgtgtgaccaga

SEQ ID NO: 29483 - DNA, 15 bp, Homo sapiens
tgtgtgtgaccagag

SEQ ID NO: 29484 - DNA, 15 bp, Homo sapiens
gtgtgtgaccagagt

SEQ ID NO: 29485 - DNA, 15 bp, Homo sapiens
tgtgtgaccagagtc

SEQ ID NO: 29486 - DNA, 15 bp, Homo sapiens
gtgtgaccagagtcc

SEQ ID NO: 29487 - DNA, 15 bp, Homo sapiens
tgtgaccagagtcca

SEQ ID NO: 29488 - DNA, 15 bp, Homo sapiens
gtgaccagagtccat

SEQ ID NO: 29489 - DNA, 15 bp, Homo sapiens
tgaccagagtccata

SEQ ID NO: 29490 - DNA, 15 bp, Homo sapiens
gaccagagtccatat

SEQ ID NO: 29491 - DNA, 15 bp, Homo sapiens
accagagtccatatt

SEQ ID NO: 29492 - DNA, 15 bp, Homo sapiens
ccagagtccatattc

SEQ ID NO: 29493 - DNA, 15 bp, Homo sapiens
cagagtccatattca

SEQ ID NO: 29494 - DNA, 15 bp, Homo sapiens
agagtccatattcag

SEQ ID NO: 29495 - DNA, 15 bp, Homo sapiens
gagtccatattcagg

SEQ ID NO: 29496 - DNA, 15 bp, Homo sapiens
agtccatattcagga

SEQ ID NO: 29497 - DNA, 15 bp, Homo sapiens
gtccatattcaggaa

SEQ ID NO: 29498 - DNA, 15 bp, Homo sapiens
tccatattcaggaag

SEQ ID NO: 29499 - DNA, 15 bp, Homo sapiens
ccatattcaggaagc

SEQ ID NO: 29500 - DNA, 15 bp, Homo sapiens
catattcaggaagca

SEQ ID NO: 29501 - DNA, 15 bp, Homo sapiens
atattcaggaagcaa

SEQ ID NO: 29502 - DNA, 15 bp, Homo sapiens
tattcaggaagcaaa

SEQ ID NO: 29503 - DNA, 15 bp, Homo sapiens
attcaggaagcaaac

SEQ ID NO: 29504 - DNA, 15 bp, Homo sapiens
ttcaggaagcaaaca

SEQ ID NO: 29505 - DNA, 15 bp, Homo sapiens
tcaggaagcaaacag

SEQ ID NO: 29506 - DNA, 15 bp, Homo sapiens
caggaagcaaacagg

SEQ ID NO: 29507 - DNA, 15 bp, Homo sapiens
aggaagcaaacaggt

SEQ ID NO: 29508 - DNA, 15 bp, Homo sapiens
ggaagcaaacaggtt

SEQ ID NO: 29509 - DNA, 15 bp, Homo sapiens
gaagcaaacaggttg

SEQ ID NO: 29510 - DNA, 15 bp, Homo sapiens
aagcaaacaggttgt

SEQ ID NO: 29511 - DNA, 15 bp, Homo sapiens
agcaaacaggttgtt

SEQ ID NO: 29512 - DNA, 15 bp, Homo sapiens
gcaaacaggttgttc

SEQ ID NO: 29513 - DNA, 15 bp, Homo sapiens
caaacaggttgttca

SEQ ID NO: 29514 - DNA, 15 bp, Homo sapiens
aaacaggttgttcag

SEQ ID NO: 29515 - DNA, 15 bp, Homo sapiens
aacaggttgttcagg

SEQ ID NO: 29516 - DNA, 15 bp, Homo sapiens
acaggttgttcaggg

SEQ ID NO: 29517 - DNA, 15 bp, Homo sapiens
caggttgttcagggc

SEQ ID NO: 29518 - DNA, 15 bp, Homo sapiens
aggttgttcagggct

SEQ ID NO: 29519 - DNA, 15 bp, Homo sapiens
ggttgttcagggctg

SEQ ID NO: 29520 - DNA, 15 bp, Homo sapiens
gttgttcagggctgg

SEQ ID NO: 29521 - DNA, 15 bp, Homo sapiens
ttgttcagggctggg

SEQ ID NO: 29522 - DNA, 15 bp, Homo sapiens
tgttcagggctgggg

SEQ ID NO: 29523 - DNA, 15 bp, Homo sapiens
gttcagggctggggt

SEQ ID NO: 29524 - DNA, 15 bp, Homo sapiens
ttcagggctggggtg

SEQ ID NO: 29525 - DNA, 15 bp, Homo sapiens
tcagggctggggtga

SEQ ID NO: 29526 - DNA, 15 bp, Homo sapiens
cagggctggggtgag

SEQ ID NO: 29527 - DNA, 15 bp, Homo sapiens
agggctggggtgagc

SEQ ID NO: 29528 - DNA, 15 bp, Homo sapiens
gggctggggtgagct

SEQ ID NO: 29529 - DNA, 15 bp, Homo sapiens
ggctggggtgagctc

SEQ ID NO: 29530 - DNA, 15 bp, Homo sapiens
gctggggtgagctcg

SEQ ID NO: 29531 - DNA, 15 bp, Homo sapiens
ctggggtgagctcga

SEQ ID NO: 29532 - DNA, 15 bp, Homo sapiens
tggggtgagctcgat

SEQ ID NO: 29533 - DNA, 15 bp, Homo sapiens
ggggtgagctcgatt

SEQ ID NO: 29534 - DNA, 15 bp, Homo sapiens
gggtgagctcgattc

SEQ ID NO: 29535 - DNA, 15 bp, Homo sapiens
ggtgagctcgattct

SEQ ID NO: 29536 - DNA, 15 bp, Homo sapiens
gtgagctcgattctg

SEQ ID NO: 29537 - DNA, 15 bp, Homo sapiens
tgagctcgattctgc

SEQ ID NO: 29538 - DNA, 15 bp, Homo sapiens
gagctcgattctgca

SEQ ID NO: 29539 - DNA, 15 bp, Homo sapiens
agctcgattctgcag

SEQ ID NO: 29540 - DNA, 15 bp, Homo sapiens
gctcgattctgcagg

SEQ ID NO: 29541 - DNA, 15 bp, Homo sapiens
ctcgattctgcaggc

SEQ ID NO: 29542 - DNA, 15 bp, Homo sapiens
tcgattctgcaggct

SEQ ID NO: 29543 - DNA, 15 bp, Homo sapiens
cgattctgcaggctt

SEQ ID NO: 29544 - DNA, 15 bp, Homo sapiens
gattctgcaggctta

SEQ ID NO: 29545 - DNA, 15 bp, Homo sapiens
attctgcaggcttag

SEQ ID NO: 29546 - DNA, 15 bp, Homo sapiens
ttctgcaggcttagc

SEQ ID NO: 29547 - DNA, 15 bp, Homo sapiens
tctgcaggcttagca

SEQ ID NO: 29548 - DNA, 15 bp, Homo sapiens
ctgcaggcttagcac

SEQ ID NO: 29549 - DNA, 15 bp, Homo sapiens
tgcaggcttagcaca

SEQ ID NO: 29550 - DNA, 15 bp, Homo sapiens
gcaggcttagcacag

SEQ ID NO: 29551 - DNA, 15 bp, Homo sapiens
caggcttagcacagc

SEQ ID NO: 29552 - DNA, 15 bp, Homo sapiens
aggcttagcacagcg

SEQ ID NO: 29553 - DNA, 15 bp, Homo sapiens
ggcttagcacagcgt

SEQ ID NO: 29554 - DNA, 15 bp, Homo sapiens
gcttagcacagcgtt

SEQ ID NO: 29555 - DNA, 15 bp, Homo sapiens
cttagcacagcgttt

SEQ ID NO: 29556 - DNA, 15 bp, Homo sapiens
ttagcacagcgtttg

SEQ ID NO: 29557 - DNA, 15 bp, Homo sapiens
tagcacagcgtttgg

SEQ ID NO: 29558 - DNA, 15 bp, Homo sapiens
agcacagcgtttggc

SEQ ID NO: 29559 - DNA, 15 bp, Homo sapiens
gcacagcgtttggca

SEQ ID NO: 29560 - DNA, 15 bp, Homo sapiens
cacagcgtttggcac

SEQ ID NO: 29561 - DNA, 15 bp, Homo sapiens
acagcgtttggcaca

SEQ ID NO: 29562 - DNA, 15 bp, Homo sapiens
cagcgtttggcacaa

SEQ ID NO: 29563 - DNA, 15 bp, Homo sapiens
agcgtttggcacaaa

SEQ ID NO: 29564 - DNA, 15 bp, Homo sapiens
gcgtttggcacaaag

SEQ ID NO: 29565 - DNA, 15 bp, Homo sapiens
cgtttggcacaaagt

SEQ ID NO: 29566 - DNA, 15 bp, Homo sapiens
gtttggcacaaagta

SEQ ID NO: 29567 - DNA, 15 bp, Homo sapiens
tttggcacaaagtaa

SEQ ID NO: 29568 - DNA, 15 bp, Homo sapiens
ttggcacaaagtaag

SEQ ID NO: 29569 - DNA, 15 bp, Homo sapiens
tggcacaaagtaagt

SEQ ID NO: 29570 - DNA, 15 bp, Homo sapiens
ggcacaaagtaagtg

SEQ ID NO: 29571 - DNA, 15 bp, Homo sapiens
gcacaaagtaagtgc

SEQ ID NO: 29572 - DNA, 15 bp, Homo sapiens
cacaaagtaagtgct

SEQ ID NO: 29573 - DNA, 15 bp, Homo sapiens
acaaagtaagtgctc

SEQ ID NO: 29574 - DNA, 15 bp, Homo sapiens
caaagtaagtgctca

SEQ ID NO: 29575 - DNA, 15 bp, Homo sapiens
aaagtaagtgctcac

SEQ ID NO: 29576 - DNA, 15 bp, Homo sapiens
aagtaagtgctcacg

SEQ ID NO: 29577 - DNA, 15 bp, Homo sapiens
agtaagtgctcacga

SEQ ID NO: 29578 - DNA, 15 bp, Homo sapiens
gtaagtgctcacgaa

SEQ ID NO: 29579 - DNA, 15 bp, Homo sapiens
taagtgctcacgaag

SEQ ID NO: 29580 - DNA, 15 bp, Homo sapiens
aagtgctcacgaagt

SEQ ID NO: 29581 - DNA, 15 bp, Homo sapiens
agtgctcacgaagtg

SEQ ID NO: 29582 - DNA, 15 bp, Homo sapiens
gtgctcacgaagtgt

SEQ ID NO: 29583 - DNA, 15 bp, Homo sapiens
tgctcacgaagtgtt

SEQ ID NO: 29584 - DNA, 15 bp, Homo sapiens
gctcacgaagtgtta

SEQ ID NO: 29585 - DNA, 15 bp, Homo sapiens
ctcacgaagtgttag

SEQ ID NO: 29586 - DNA, 15 bp, Homo sapiens
tcacgaagtgttagc

SEQ ID NO: 29587 - DNA, 15 bp, Homo sapiens
cacgaagtgttagct

SEQ ID NO: 29588 - DNA, 15 bp, Homo sapiens
acgaagtgttagcta

SEQ ID NO: 29589 - DNA, 15 bp, Homo sapiens
cgaagtgttagctat

SEQ ID NO: 29590 - DNA, 15 bp, Homo sapiens
gaagtgttagctatt

SEQ ID NO: 29591 - DNA, 15 bp, Homo sapiens
aagtgttagctatta

SEQ ID NO: 29592 - DNA, 15 bp, Homo sapiens
agtgttagctattag

SEQ ID NO: 29593 - DNA, 15 bp, Homo sapiens
gtgttagctattagt

SEQ ID NO: 29594 - DNA, 15 bp, Homo sapiens
tgttagctattagta

SEQ ID NO: 29595 - DNA, 15 bp, Homo sapiens
gttagctattagtat

SEQ ID NO: 29596 - DNA, 15 bp, Homo sapiens
ttagctattagtatt

SEQ ID NO: 29597 - DNA, 15 bp, Homo sapiens
tagctattagtattt

SEQ ID NO: 29598 - DNA, 15 bp, Homo sapiens
agctattagtatttc

SEQ ID NO: 29599 - DNA, 15 bp, Homo sapiens
gctattagtatttct

SEQ ID NO: 29600 - DNA, 15 bp, Homo sapiens
ctattagtatttctg

SEQ ID NO: 29601 - DNA, 15 bp, Homo sapiens
tattagtatttctgt

SEQ ID NO: 29602 - DNA, 15 bp, Homo sapiens
attagtatttctgta

SEQ ID NO: 29603 - DNA, 15 bp, Homo sapiens
ttagtatttctgtaa

SEQ ID NO: 29604 - DNA, 15 bp, Homo sapiens
tagtatttctgtaac

SEQ ID NO: 29605 - DNA, 15 bp, Homo sapiens
agtatttctgtaacc

SEQ ID NO: 29606 - DNA, 15 bp, Homo sapiens
gtatttctgtaacca

SEQ ID NO: 29607 - DNA, 15 bp, Homo sapiens
tatttctgtaaccaa

SEQ ID NO: 29608 - DNA, 15 bp, Homo sapiens
atttctgtaaccaaa

SEQ ID NO: 29609 - DNA, 15 bp, Homo sapiens
tttctgtaaccaaat

SEQ ID NO: 29610 - DNA, 15 bp, Homo sapiens
ttctgtaaccaaatt

SEQ ID NO: 29611 - DNA, 15 bp, Homo sapiens
tctgtaaccaaatta

SEQ ID NO: 29612 - DNA, 15 bp, Homo sapiens
ctgtaaccaaattag

SEQ ID NO: 29613 - DNA, 15 bp, Homo sapiens
tgtaaccaaattaga

SEQ ID NO: 29614 - DNA, 15 bp, Homo sapiens
gtaaccaaattagaa

SEQ ID NO: 29615 - DNA, 15 bp, Homo sapiens
taaccaaattagaat

SEQ ID NO: 29616 - DNA, 15 bp, Homo sapiens
aaccaaattagaatc

SEQ ID NO: 29617 - DNA, 15 bp, Homo sapiens
accaaattagaatca

SEQ ID NO: 29618 - DNA, 15 bp, Homo sapiens
ccaaattagaatcat

SEQ ID NO: 29619 - DNA, 15 bp, Homo sapiens
caaattagaatcatg

SEQ ID NO: 29620 - DNA, 15 bp, Homo sapiens
aaattagaatcatgc

SEQ ID NO: 29621 - DNA, 15 bp, Homo sapiens
aattagaatcatgct

SEQ ID NO: 29622 - DNA, 15 bp, Homo sapiens
attagaatcatgcta

SEQ ID NO: 29623 - DNA, 15 bp, Homo sapiens
ttagaatcatgctat

SEQ ID NO: 29624 - DNA, 15 bp, Homo sapiens
tagaatcatgctata

SEQ ID NO: 29625 - DNA, 15 bp, Homo sapiens
agaatcatgctatat

SEQ ID NO: 29626 - DNA, 15 bp, Homo sapiens
gaatcatgctatata

SEQ ID NO: 29627 - DNA, 15 bp, Homo sapiens
aatcatgctatatat

SEQ ID NO: 29628 - DNA, 15 bp, Homo sapiens
atcatgctatatatt

SEQ ID NO: 29629 - DNA, 15 bp, Homo sapiens
tcatgctatatattg

SEQ ID NO: 29630 - DNA, 15 bp, Homo sapiens
catgctatatattgg

SEQ ID NO: 29631 - DNA, 15 bp, Homo sapiens
atgctatatattggt

SEQ ID NO: 29632 - DNA, 15 bp, Homo sapiens
tgctatatattggtt

SEQ ID NO: 29633 - DNA, 15 bp, Homo sapiens
gctatatattggttt

SEQ ID NO: 29634 - DNA, 15 bp, Homo sapiens
ctatatattggtttt

SEQ ID NO: 29635 - DNA, 15 bp, Homo sapiens
tatatattggttttg

SEQ ID NO: 29636 - DNA, 15 bp, Homo sapiens
atatattggttttgt

SEQ ID NO: 29637 - DNA, 15 bp, Homo sapiens
tatattggttttgtt

SEQ ID NO: 29638 - DNA, 15 bp, Homo sapiens
atattggttttgttc

SEQ ID NO: 29639 - DNA, 15 bp, Homo sapiens
tattggttttgttcc

SEQ ID NO: 29640 - DNA, 15 bp, Homo sapiens
attggttttgttcct

SEQ ID NO: 29641 - DNA, 15 bp, Homo sapiens
ttggttttgttcctg

SEQ ID NO: 29642 - DNA, 15 bp, Homo sapiens
tggttttgttcctgc

SEQ ID NO: 29643 - DNA, 15 bp, Homo sapiens
ggttttgttcctgct

SEQ ID NO: 29644 - DNA, 15 bp, Homo sapiens
gttttgttcctgctt

SEQ ID NO: 29645 - DNA, 15 bp, Homo sapiens
ttttgttcctgcttt

SEQ ID NO: 29646 - DNA, 15 bp, Homo sapiens
tttgttcctgcttta

SEQ ID NO: 29647 - DNA, 15 bp, Homo sapiens
ttgttcctgctttat

SEQ ID NO: 29648 - DNA, 15 bp, Homo sapiens
tgttcctgctttatt

SEQ ID NO: 29649 - DNA, 15 bp, Homo sapiens
gttcctgctttattc

SEQ ID NO: 29650 - DNA, 15 bp, Homo sapiens
ttcctgctttattca

SEQ ID NO: 29651 - DNA, 15 bp, Homo sapiens
tcctgctttattcaa

SEQ ID NO: 29652 - DNA, 15 bp, Homo sapiens
cctgctttattcaat

SEQ ID NO: 29653 - DNA, 15 bp, Homo sapiens
ctgctttattcaatt

SEQ ID NO: 29654 - DNA, 15 bp, Homo sapiens
tgctttattcaatta

SEQ ID NO: 29655 - DNA, 15 bp, Homo sapiens
gctttattcaattaa

SEQ ID NO: 29656 - DNA, 15 bp, Homo sapiens
ctttattcaattaac

SEQ ID NO: 29657 - DNA, 15 bp, Homo sapiens
tttattcaattaaca

SEQ ID NO: 29658 - DNA, 15 bp, Homo sapiens
ttattcaattaacag

SEQ ID NO: 29659 - DNA, 15 bp, Homo sapiens
tattcaattaacagt

SEQ ID NO: 29660 - DNA, 15 bp, Homo sapiens
attcaattaacagta

SEQ ID NO: 29661 - DNA, 15 bp, Homo sapiens
ttcaattaacagtag

SEQ ID NO: 29662 - DNA, 15 bp, Homo sapiens
tcaattaacagtagt

SEQ ID NO: 29663 - DNA, 15 bp, Homo sapiens
caattaacagtagtg

SEQ ID NO: 29664 - DNA, 15 bp, Homo sapiens
aattaacagtagtgt

SEQ ID NO: 29665 - DNA, 15 bp, Homo sapiens
attaacagtagtgtt

SEQ ID NO: 29666 - DNA, 15 bp, Homo sapiens
ttaacagtagtgttt

SEQ ID NO: 29667 - DNA, 15 bp, Homo sapiens
taacagtagtgtttt

SEQ ID NO: 29668 - DNA, 15 bp, Homo sapiens
aacagtagtgttttt

SEQ ID NO: 29669 - DNA, 15 bp, Homo sapiens
acagtagtgtttttg

SEQ ID NO: 29670 - DNA, 15 bp, Homo sapiens
cagtagtgtttttga

SEQ ID NO: 29671 - DNA, 15 bp, Homo sapiens
agtagtgtttttgaa

SEQ ID NO: 29672 - DNA, 15 bp, Homo sapiens
gtagtgtttttgaag

SEQ ID NO: 29673 - DNA, 15 bp, Homo sapiens
tagtgtttttgaagc

SEQ ID NO: 29674 - DNA, 15 bp, Homo sapiens
agtgtttttgaagct

SEQ ID NO: 29675 - DNA, 15 bp, Homo sapiens
gtgtttttgaagctt

SEQ ID NO: 29676 - DNA, 15 bp, Homo sapiens
tgtttttgaagctta

SEQ ID NO: 29677 - DNA, 15 bp, Homo sapiens
gtttttgaagcttac

SEQ ID NO: 29678 - DNA, 15 bp, Homo sapiens
tttttgaagcttact

SEQ ID NO: 29679 - DNA, 15 bp, Homo sapiens
ttttgaagcttacta

SEQ ID NO: 29680 - DNA, 15 bp, Homo sapiens
tttgaagcttactaa

SEQ ID NO: 29681 - DNA, 15 bp, Homo sapiens
ttgaagcttactaaa

SEQ ID NO: 29682 - DNA, 15 bp, Homo sapiens
tgaagcttactaaaa

SEQ ID NO: 29683 - DNA, 15 bp, Homo sapiens
gaagcttactaaaaa

SEQ ID NO: 29684 - DNA, 15 bp, Homo sapiens
aagcttactaaaaat

SEQ ID NO: 29685 - DNA, 15 bp, Homo sapiens
agcttactaaaaatt

SEQ ID NO: 29686 - DNA, 15 bp, Homo sapiens
gcttactaaaaattg

SEQ ID NO: 29687 - DNA, 15 bp, Homo sapiens
cttactaaaaattgt

SEQ ID NO: 29688 - DNA, 15 bp, Homo sapiens
ttactaaaaattgtt

SEQ ID NO: 29689 - DNA, 15 bp, Homo sapiens
tactaaaaattgttt

SEQ ID NO: 29690 - DNA, 15 bp, Homo sapiens
actaaaaattgtttg

SEQ ID NO: 29691 - DNA, 15 bp, Homo sapiens
ctaaaaattgtttga

SEQ ID NO: 29692 - DNA, 15 bp, Homo sapiens
taaaaattgtttgaa

SEQ ID NO: 29693 - DNA, 15 bp, Homo sapiens
aaaaattgtttgaac

SEQ ID NO: 29694 - DNA, 15 bp, Homo sapiens
aaaattgtttgaaca

SEQ ID NO: 29695 - DNA, 15 bp, Homo sapiens
aaattgtttgaacac

SEQ ID NO: 29696 - DNA, 15 bp, Homo sapiens
aattgtttgaacaca

SEQ ID NO: 29697 - DNA, 15 bp, Homo sapiens
attgtttgaacacat

SEQ ID NO: 29698 - DNA, 15 bp, Homo sapiens
ttgtttgaacacatg

SEQ ID NO: 29699 - DNA, 15 bp, Homo sapiens
tgtttgaacacatga

SEQ ID NO: 29700 - DNA, 15 bp, Homo sapiens
gtttgaacacatgat

SEQ ID NO: 29701 - DNA, 15 bp, Homo sapiens
tttgaacacatgatc

SEQ ID NO: 29702 - DNA, 15 bp, Homo sapiens
ttgaacacatgatct

SEQ ID NO: 29703 - DNA, 15 bp, Homo sapiens
tgaacacatgatctt

SEQ ID NO: 29704 - DNA, 15 bp, Homo sapiens
gaacacatgatcttt

SEQ ID NO: 29705 - DNA, 15 bp, Homo sapiens
aacacatgatctttc

SEQ ID NO: 29706 - DNA, 15 bp, Homo sapiens
acacatgatctttca

SEQ ID NO: 29707 - DNA, 15 bp, Homo sapiens
cacatgatctttcat

SEQ ID NO: 29708 - DNA, 15 bp, Homo sapiens
acatgatctttcatg

SEQ ID NO: 29709 - DNA, 15 bp, Homo sapiens
catgatctttcatga

SEQ ID NO: 29710 - DNA, 15 bp, Homo sapiens
atgatctttcatgat

SEQ ID NO: 29711 - DNA, 15 bp, Homo sapiens
tgatctttcatgatg

SEQ ID NO: 29712 - DNA, 15 bp, Homo sapiens
gatctttcatgatgg

SEQ ID NO: 29713 - DNA, 15 bp, Homo sapiens
atctttcatgatgga

SEQ ID NO: 29714 - DNA, 15 bp, Homo sapiens
tctttcatgatggac

SEQ ID NO: 29715 - DNA, 15 bp, Homo sapiens
ctttcatgatggaca

SEQ ID NO: 29716 - DNA, 15 bp, Homo sapiens
tttcatgatggacaa

SEQ ID NO: 29717 - DNA, 15 bp, Homo sapiens
ttcatgatggacaag

SEQ ID NO: 29718 - DNA, 15 bp, Homo sapiens
tcatgatggacaaga

SEQ ID NO: 29719 - DNA, 15 bp, Homo sapiens
catgatggacaagac

SEQ ID NO: 29720 - DNA, 15 bp, Homo sapiens
atgatggacaagact

SEQ ID NO: 29721 - DNA, 15 bp, Homo sapiens
tgatggacaagactg

SEQ ID NO: 29722 - DNA, 15 bp, Homo sapiens
gatggacaagactgt

SEQ ID NO: 29723 - DNA, 15 bp, Homo sapiens
atggacaagactgtc

SEQ ID NO: 29724 - DNA, 15 bp, Homo sapiens
tggacaagactgtcc

SEQ ID NO: 29725 - DNA, 15 bp, Homo sapiens
ggacaagactgtcct

SEQ ID NO: 29726 - DNA, 15 bp, Homo sapiens
gacaagactgtcctc

SEQ ID NO: 29727 - DNA, 15 bp, Homo sapiens
acaagactgtcctca

SEQ ID NO: 29728 - DNA, 15 bp, Homo sapiens
caagactgtcctcac

SEQ ID NO: 29729 - DNA, 15 bp, Homo sapiens
aagactgtcctcaca

SEQ ID NO: 29730 - DNA, 15 bp, Homo sapiens
agactgtcctcacat

SEQ ID NO: 29731 - DNA, 15 bp, Homo sapiens
gactgtcctcacatc

SEQ ID NO: 29732 - DNA, 15 bp, Homo sapiens
actgtcctcacatca

SEQ ID NO: 29733 - DNA, 15 bp, Homo sapiens
ctgtcctcacatcag

SEQ ID NO: 29734 - DNA, 15 bp, Homo sapiens
tgtcctcacatcagc

SEQ ID NO: 29735 - DNA, 15 bp, Homo sapiens
gtcctcacatcagca

SEQ ID NO: 29736 - DNA, 15 bp, Homo sapiens
tcctcacatcagcat

SEQ ID NO: 29737 - DNA, 15 bp, Homo sapiens
cctcacatcagcatg

SEQ ID NO: 29738 - DNA, 15 bp, Homo sapiens
ctcacatcagcatga

SEQ ID NO: 29739 - DNA, 15 bp, Homo sapiens
tcacatcagcatgaa

SEQ ID NO: 29740 - DNA, 15 bp, Homo sapiens
cacatcagcatgaac

SEQ ID NO: 29741 - DNA, 15 bp, Homo sapiens
acatcagcatgaact

SEQ ID NO: 29742 - DNA, 15 bp, Homo sapiens
catcagcatgaactt

SEQ ID NO: 29743 - DNA, 15 bp, Homo sapiens
atcagcatgaacttt

SEQ ID NO: 29744 - DNA, 15 bp, Homo sapiens
tcagcatgaactttg

SEQ ID NO: 29745 - DNA, 15 bp, Homo sapiens
cagcatgaactttga

SEQ ID NO: 29746 - DNA, 15 bp, Homo sapiens
agcatgaactttgat

SEQ ID NO: 29747 - DNA, 15 bp, Homo sapiens
gcatgaactttgatt

SEQ ID NO: 29748 - DNA, 15 bp, Homo sapiens
catgaactttgattg

SEQ ID NO: 29749 - DNA, 15 bp, Homo sapiens
atgaactttgattga

SEQ ID NO: 29750 - DNA, 15 bp, Homo sapiens
tgaactttgattgat

SEQ ID NO: 29751 - DNA, 15 bp, Homo sapiens
gaactttgattgatt

SEQ ID NO: 29752 - DNA, 15 bp, Homo sapiens
aactttgattgattt

SEQ ID NO: 29753 - DNA, 15 bp, Homo sapiens
actttgattgatttg

SEQ ID NO: 29754 - DNA, 15 bp, Homo sapiens
ctttgattgatttga

SEQ ID NO: 29755 - DNA, 15 bp, Homo sapiens
tttgattgatttgac

SEQ ID NO: 29756 - DNA, 15 bp, Homo sapiens
ttgattgatttgacc

SEQ ID NO: 29757 - DNA, 15 bp, Homo sapiens
tgattgatttgacca

SEQ ID NO: 29758 - DNA, 15 bp, Homo sapiens
gattgatttgaccaa

SEQ ID NO: 29759 - DNA, 15 bp, Homo sapiens
attgatttgaccaag

SEQ ID NO: 29760 - DNA, 15 bp, Homo sapiens
ttgatttgaccaagt

SEQ ID NO: 29761 - DNA, 15 bp, Homo sapiens
tgatttgaccaagtg

SEQ ID NO: 29762 - DNA, 15 bp, Homo sapiens
gatttgaccaagtgc

SEQ ID NO: 29763 - DNA, 15 bp, Homo sapiens
atttgaccaagtgcc

SEQ ID NO: 29764 - DNA, 15 bp, Homo sapiens
tttgaccaagtgccg

SEQ ID NO: 29765 - DNA, 15 bp, Homo sapiens
ttgaccaagtgccga

SEQ ID NO: 29766 - DNA, 15 bp, Homo sapiens
tgaccaagtgccgat

SEQ ID NO: 29767 - DNA, 15 bp, Homo sapiens
gaccaagtgccgatt

SEQ ID NO: 29768 - DNA, 15 bp, Homo sapiens
accaagtgccgattg

SEQ ID NO: 29769 - DNA, 15 bp, Homo sapiens
ccaagtgccgattgt

SEQ ID NO: 29770 - DNA, 15 bp, Homo sapiens
caagtgccgattgtt

SEQ ID NO: 29771 - DNA, 15 bp, Homo sapiens
aagtgccgattgttg

SEQ ID NO: 29772 - DNA, 15 bp, Homo sapiens
agtgccgattgttgg

SEQ ID NO: 29773 - DNA, 15 bp, Homo sapiens
gtgccgattgttgga

SEQ ID NO: 29774 - DNA, 15 bp, Homo sapiens
tgccgattgttggac

SEQ ID NO: 29775 - DNA, 15 bp, Homo sapiens
gccgattgttggaca

SEQ ID NO: 29776 - DNA, 15 bp, Homo sapiens
ccgattgttggacat

SEQ ID NO: 29777 - DNA, 15 bp, Homo sapiens
cgattgttggacatt

SEQ ID NO: 29778 - DNA, 15 bp, Homo sapiens
gattgttggacattc

SEQ ID NO: 29779 - DNA, 15 bp, Homo sapiens
attgttggacattcc

SEQ ID NO: 29780 - DNA, 15 bp, Homo sapiens
ttgttggacattccg

SEQ ID NO: 29781 - DNA, 15 bp, Homo sapiens
tgttggacattccgg

SEQ ID NO: 29782 - DNA, 15 bp, Homo sapiens
gttggacattccggt

SEQ ID NO: 29783 - DNA, 15 bp, Homo sapiens
ttggacattccggtt

SEQ ID NO: 29784 - DNA, 15 bp, Homo sapiens
tggacattccggttg

SEQ ID NO: 29785 - DNA, 15 bp, Homo sapiens
ggacattccggttgt

SEQ ID NO: 29786 - DNA, 15 bp, Homo sapiens
gacattccggttgtt

SEQ ID NO: 29787 - DNA, 15 bp, Homo sapiens
acattccggttgttt

SEQ ID NO: 29788 - DNA, 15 bp, Homo sapiens
cattccggttgtttc

SEQ ID NO: 29789 - DNA, 15 bp, Homo sapiens
attccggttgtttct

SEQ ID NO: 29790 - DNA, 15 bp, Homo sapiens
ttccggttgtttctc

SEQ ID NO: 29791 - DNA, 15 bp, Homo sapiens
tccggttgtttctcg

SEQ ID NO: 29792 - DNA, 15 bp, Homo sapiens
ccggttgtttctcgt

SEQ ID NO: 29793 - DNA, 15 bp, Homo sapiens
cggttgtttctcgtt

SEQ ID NO: 29794 - DNA, 15 bp, Homo sapiens
ggttgtttctcgttt

SEQ ID NO: 29795 - DNA, 15 bp, Homo sapiens
gttgtttctcgtttt

SEQ ID NO: 29796 - DNA, 15 bp, Homo sapiens
ttgtttctcgttttt

SEQ ID NO: 29797 - DNA, 15 bp, Homo sapiens
tgtttctcgtttttt

SEQ ID NO: 29798 - DNA, 15 bp, Homo sapiens
gtttctcgttttttt

SEQ ID NO: 29799 - DNA, 15 bp, Homo sapiens
tttctcgtttttttc

SEQ ID NO: 29800 - DNA, 15 bp, Homo sapiens
ttctcgtttttttct

SEQ ID NO: 29801 - DNA, 15 bp, Homo sapiens
tctcgtttttttcta

SEQ ID NO: 29802 - DNA, 15 bp, Homo sapiens
ctcgtttttttctat

SEQ ID NO: 29803 - DNA, 15 bp, Homo sapiens
tcgtttttttctata

SEQ ID NO: 29804 - DNA, 15 bp, Homo sapiens
cgtttttttctataa

SEQ ID NO: 29805 - DNA, 15 bp, Homo sapiens
gtttttttctataaa

SEQ ID NO: 29806 - DNA, 15 bp, Homo sapiens
tttttttctataaac

SEQ ID NO: 29807 - DNA, 15 bp, Homo sapiens
ttttttctataaaca

SEQ ID NO: 29808 - DNA, 15 bp, Homo sapiens
tttttctataaacat

SEQ ID NO: 29809 - DNA, 15 bp, Homo sapiens
ttttctataaacatc

SEQ ID NO: 29810 - DNA, 15 bp, Homo sapiens
tttctataaacatcc

SEQ ID NO: 29811 - DNA, 15 bp, Homo sapiens
ttctataaacatccc

SEQ ID NO: 29812 - DNA, 15 bp, Homo sapiens
tctataaacatccct

SEQ ID NO: 29813 - DNA, 15 bp, Homo sapiens
ctataaacatccctg

SEQ ID NO: 29814 - DNA, 15 bp, Homo sapiens
tataaacatccctga

SEQ ID NO: 29815 - DNA, 15 bp, Homo sapiens
ataaacatccctgac

SEQ ID NO: 29816 - DNA, 15 bp, Homo sapiens
taaacatccctgact

SEQ ID NO: 29817 - DNA, 15 bp, Homo sapiens
aaacatccctgactg

SEQ ID NO: 29818 - DNA, 15 bp, Homo sapiens
aacatccctgactgc

SEQ ID NO: 29819 - DNA, 15 bp, Homo sapiens
acatccctgactgct

SEQ ID NO: 29820 - DNA, 15 bp, Homo sapiens
catccctgactgctt

SEQ ID NO: 29821 - DNA, 15 bp, Homo sapiens
atccctgactgcttc

SEQ ID NO: 29822 - DNA, 15 bp, Homo sapiens
tccctgactgcttcc

SEQ ID NO: 29823 - DNA, 15 bp, Homo sapiens
ccctgactgcttcct

SEQ ID NO: 29824 - DNA, 15 bp, Homo sapiens
cctgactgcttcctt

SEQ ID NO: 29825 - DNA, 15 bp, Homo sapiens
ctgactgcttccttg

SEQ ID NO: 29826 - DNA, 15 bp, Homo sapiens
tgactgcttccttgg

SEQ ID NO: 29827 - DNA, 15 bp, Homo sapiens
gactgcttccttgga

SEQ ID NO: 29828 - DNA, 15 bp, Homo sapiens
actgcttccttggat

SEQ ID NO: 29829 - DNA, 15 bp, Homo sapiens
ctgcttccttggatt

SEQ ID NO: 29830 - DNA, 15 bp, Homo sapiens
tgcttccttggattc

SEQ ID NO: 29831 - DNA, 15 bp, Homo sapiens
gcttccttggattcc

SEQ ID NO: 29832 - DNA, 15 bp, Homo sapiens
cttccttggattcct

SEQ ID NO: 29833 - DNA, 15 bp, Homo sapiens
ttccttggattcctg

SEQ ID NO: 29834 - DNA, 15 bp, Homo sapiens
tccttggattcctga

SEQ ID NO: 29835 - DNA, 15 bp, Homo sapiens
ccttggattcctgaa

SEQ ID NO: 29836 - DNA, 15 bp, Homo sapiens
cttggattcctgaaa

SEQ ID NO: 29837 - DNA, 15 bp, Homo sapiens
ttggattcctgaaaa

SEQ ID NO: 29838 - DNA, 15 bp, Homo sapiens
tggattcctgaaaag

SEQ ID NO: 29839 - DNA, 15 bp, Homo sapiens
ggattcctgaaaagg

SEQ ID NO: 29840 - DNA, 15 bp, Homo sapiens
gattcctgaaaaggg

SEQ ID NO: 29841 - DNA, 15 bp, Homo sapiens
attcctgaaaaggga

SEQ ID NO: 29842 - DNA, 15 bp, Homo sapiens
ttcctgaaaagggag

SEQ ID NO: 29843 - DNA, 15 bp, Homo sapiens
tcctgaaaagggagt

SEQ ID NO: 29844 - DNA, 15 bp, Homo sapiens
cctgaaaagggagtt

SEQ ID NO: 29845 - DNA, 15 bp, Homo sapiens
ctgaaaagggagttg

SEQ ID NO: 29846 - DNA, 15 bp, Homo sapiens
tgaaaagggagttgc

SEQ ID NO: 29847 - DNA, 15 bp, Homo sapiens
gaaaagggagttgct

SEQ ID NO: 29848 - DNA, 15 bp, Homo sapiens
aaaagggagttgctg

SEQ ID NO: 29849 - DNA, 15 bp, Homo sapiens
aaagggagttgctgg

SEQ ID NO: 29850 - DNA, 15 bp, Homo sapiens
aagggagttgctggg

SEQ ID NO: 29851 - DNA, 15 bp, Homo sapiens
agggagttgctgggg

SEQ ID NO: 29852 - DNA, 15 bp, Homo sapiens
gggagttgctggggc

SEQ ID NO: 29853 - DNA, 15 bp, Homo sapiens
ggagttgctggggca

SEQ ID NO: 29854 - DNA, 15 bp, Homo sapiens
gagttgctggggcaa

SEQ ID NO: 29855 - DNA, 15 bp, Homo sapiens
agttgctggggcaaa

SEQ ID NO: 29856 - DNA, 15 bp, Homo sapiens
gttgctggggcaaag

SEQ ID NO: 29857 - DNA, 15 bp, Homo sapiens
ttgctggggcaaagg

SEQ ID NO: 29858 - DNA, 15 bp, Homo sapiens
tgctggggcaaaggg

SEQ ID NO: 29859 - DNA, 15 bp, Homo sapiens
gctggggcaaagggg

SEQ ID NO: 29860 - DNA, 15 bp, Homo sapiens
ctggggcaaaggggg

SEQ ID NO: 29861 - DNA, 15 bp, Homo sapiens
tggggcaaagggggc

SEQ ID NO: 29862 - DNA, 15 bp, Homo sapiens
ggggcaaagggggcg

SEQ ID NO: 29863 - DNA, 15 bp, Homo sapiens
gggcaaagggggcgt

SEQ ID NO: 29864 - DNA, 15 bp, Homo sapiens
ggcaaagggggcgtg

SEQ ID NO: 29865 - DNA, 15 bp, Homo sapiens
gcaaagggggcgtgc

SEQ ID NO: 29866 - DNA, 15 bp, Homo sapiens
caaagggggcgtgca

SEQ ID NO: 29867 - DNA, 15 bp, Homo sapiens
aaagggggcgtgcat

SEQ ID NO: 29868 - DNA, 15 bp, Homo sapiens
aagggggcgtgcatt

SEQ ID NO: 29869 - DNA, 15 bp, Homo sapiens
agggggcgtgcattt

SEQ ID NO: 29870 - DNA, 15 bp, Homo sapiens
gggggcgtgcatttt

SEQ ID NO: 29871 - DNA, 15 bp, Homo sapiens
ggggcgtgcattttt

SEQ ID NO: 29872 - DNA, 15 bp, Homo sapiens
gggcgtgcattttta

SEQ ID NO: 29873 - DNA, 15 bp, Homo sapiens
ggcgtgcatttttaa

SEQ ID NO: 29874 - DNA, 15 bp, Homo sapiens
gcgtgcatttttaaa

SEQ ID NO: 29875 - DNA, 15 bp, Homo sapiens
cgtgcatttttaaag

SEQ ID NO: 29876 - DNA, 15 bp, Homo sapiens
gtgcatttttaaagt

SEQ ID NO: 29877 - DNA, 15 bp, Homo sapiens
tgcatttttaaagtt

SEQ ID NO: 29878 - DNA, 15 bp, Homo sapiens
gcatttttaaagttt

SEQ ID NO: 29879 - DNA, 15 bp, Homo sapiens
catttttaaagttta

SEQ ID NO: 29880 - DNA, 15 bp, Homo sapiens
atttttaaagtttat

SEQ ID NO: 29881 - DNA, 15 bp, Homo sapiens
tttttaaagtttatg

SEQ ID NO: 29882 - DNA, 15 bp, Homo sapiens
ttttaaagtttatga

SEQ ID NO: 29883 - DNA, 15 bp, Homo sapiens
tttaaagtttatgac

SEQ ID NO: 29884 - DNA, 15 bp, Homo sapiens
ttaaagtttatgacc

SEQ ID NO: 29885 - DNA, 15 bp, Homo sapiens
taaagtttatgaccc

SEQ ID NO: 29886 - DNA, 15 bp, Homo sapiens
aaagtttatgaccct

SEQ ID NO: 29887 - DNA, 15 bp, Homo sapiens
aagtttatgaccctc

SEQ ID NO: 29888 - DNA, 15 bp, Homo sapiens
agtttatgaccctct

SEQ ID NO: 29889 - DNA, 15 bp, Homo sapiens
gtttatgaccctctc

SEQ ID NO: 29890 - DNA, 15 bp, Homo sapiens
tttatgaccctctct

SEQ ID NO: 29891 - DNA, 15 bp, Homo sapiens
ttatgaccctctctg

SEQ ID NO: 29892 - DNA, 15 bp, Homo sapiens
tatgaccctctctgc

SEQ ID NO: 29893 - DNA, 15 bp, Homo sapiens
atgaccctctctgct

SEQ ID NO: 29894 - DNA, 15 bp, Homo sapiens
tgaccctctctgcta

SEQ ID NO: 29895 - DNA, 15 bp, Homo sapiens
gaccctctctgctaa

SEQ ID NO: 29896 - DNA, 15 bp, Homo sapiens
accctctctgctaat

SEQ ID NO: 29897 - DNA, 15 bp, Homo sapiens
ccctctctgctaatt

SEQ ID NO: 29898 - DNA, 15 bp, Homo sapiens
cctctctgctaattc

SEQ ID NO: 29899 - DNA, 15 bp, Homo sapiens
ctctctgctaattct

SEQ ID NO: 29900 - DNA, 15 bp, Homo sapiens
tctctgctaattctc

SEQ ID NO: 29901 - DNA, 15 bp, Homo sapiens
ctctgctaattctcc

SEQ ID NO: 29902 - DNA, 15 bp, Homo sapiens
tctgctaattctcct

SEQ ID NO: 29903 - DNA, 15 bp, Homo sapiens
ctgctaattctcctt

SEQ ID NO: 29904 - DNA, 15 bp, Homo sapiens
tgctaattctccttc

SEQ ID NO: 29905 - DNA, 15 bp, Homo sapiens
gctaattctccttcc

SEQ ID NO: 29906 - DNA, 15 bp, Homo sapiens
ctaattctccttcca

SEQ ID NO: 29907 - DNA, 15 bp, Homo sapiens
taattctccttccaa

SEQ ID NO: 29908 - DNA, 15 bp, Homo sapiens
aattctccttccaaa

SEQ ID NO: 29909 - DNA, 15 bp, Homo sapiens
attctccttccaaaa

SEQ ID NO: 29910 - DNA, 15 bp, Homo sapiens
ttctccttccaaaag

SEQ ID NO: 29911 - DNA, 15 bp, Homo sapiens
tctccttccaaaagg

SEQ ID NO: 29912 - DNA, 15 bp, Homo sapiens
ctccttccaaaaggt

SEQ ID NO: 29913 - DNA, 15 bp, Homo sapiens
tccttccaaaaggtt

SEQ ID NO: 29914 - DNA, 15 bp, Homo sapiens
ccttccaaaaggttg

SEQ ID NO: 29915 - DNA, 15 bp, Homo sapiens
cttccaaaaggttgt

SEQ ID NO: 29916 - DNA, 15 bp, Homo sapiens
ttccaaaaggttgtc

SEQ ID NO: 29917 - DNA, 15 bp, Homo sapiens
tccaaaaggttgtcc

SEQ ID NO: 29918 - DNA, 15 bp, Homo sapiens
ccaaaaggttgtcct

SEQ ID NO: 29919 - DNA, 15 bp, Homo sapiens
caaaaggttgtccta

SEQ ID NO: 29920 - DNA, 15 bp, Homo sapiens
aaaaggttgtcctat

SEQ ID NO: 29921 - DNA, 15 bp, Homo sapiens
aaaggttgtcctatt

SEQ ID NO: 29922 - DNA, 15 bp, Homo sapiens
aaggttgtcctattt

SEQ ID NO: 29923 - DNA, 15 bp, Homo sapiens
aggttgtcctatttt

SEQ ID NO: 29924 - DNA, 15 bp, Homo sapiens
ggttgtcctatttta

SEQ ID NO: 29925 - DNA, 15 bp, Homo sapiens
gttgtcctattttat

SEQ ID NO: 29926 - DNA, 15 bp, Homo sapiens
ttgtcctattttatg

SEQ ID NO: 29927 - DNA, 15 bp, Homo sapiens
tgtcctattttatgc

SEQ ID NO: 29928 - DNA, 15 bp, Homo sapiens
gtcctattttatgct

SEQ ID NO: 29929 - DNA, 15 bp, Homo sapiens
tcctattttatgctc

SEQ ID NO: 29930 - DNA, 15 bp, Homo sapiens
cctattttatgctcc

SEQ ID NO: 29931 - DNA, 15 bp, Homo sapiens
ctattttatgctccc

SEQ ID NO: 29932 - DNA, 15 bp, Homo sapiens
tattttatgctccct

SEQ ID NO: 29933 - DNA, 15 bp, Homo sapiens
attttatgctccctc

SEQ ID NO: 29934 - DNA, 15 bp, Homo sapiens
ttttatgctccctct

SEQ ID NO: 29935 - DNA, 15 bp, Homo sapiens
tttatgctccctcta

SEQ ID NO: 29936 - DNA, 15 bp, Homo sapiens
ttatgctccctctac

SEQ ID NO: 29937 - DNA, 15 bp, Homo sapiens
tatgctccctctact

SEQ ID NO: 29938 - DNA, 15 bp, Homo sapiens
atgctccctctactt

SEQ ID NO: 29939 - DNA, 15 bp, Homo sapiens
tgctccctctactta

SEQ ID NO: 29940 - DNA, 15 bp, Homo sapiens
gctccctctacttaa

SEQ ID NO: 29941 - DNA, 15 bp, Homo sapiens
ctccctctacttaag

SEQ ID NO: 29942 - DNA, 15 bp, Homo sapiens
tccctctacttaagc

SEQ ID NO: 29943 - DNA, 15 bp, Homo sapiens
ccctctacttaagct

SEQ ID NO: 29944 - DNA, 15 bp, Homo sapiens
cctctacttaagcta

SEQ ID NO: 29945 - DNA, 15 bp, Homo sapiens
ctctacttaagctaa

SEQ ID NO: 29946 - DNA, 15 bp, Homo sapiens
tctacttaagctaac

SEQ ID NO: 29947 - DNA, 15 bp, Homo sapiens
ctacttaagctaacc

SEQ ID NO: 29948 - DNA, 15 bp, Homo sapiens
tacttaagctaaccc

SEQ ID NO: 29949 - DNA, 15 bp, Homo sapiens
acttaagctaaccct

SEQ ID NO: 29950 - DNA, 15 bp, Homo sapiens
cttaagctaacccta

SEQ ID NO: 29951 - DNA, 15 bp, Homo sapiens
ttaagctaaccctag

SEQ ID NO: 29952 - DNA, 15 bp, Homo sapiens
taagctaaccctagg

SEQ ID NO: 29953 - DNA, 15 bp, Homo sapiens
aagctaaccctaggt

SEQ ID NO: 29954 - DNA, 15 bp, Homo sapiens
agctaaccctaggtg

SEQ ID NO: 29955 - DNA, 15 bp, Homo sapiens
gctaaccctaggtga

SEQ ID NO: 29956 - DNA, 15 bp, Homo sapiens
ctaaccctaggtgag

SEQ ID NO: 29957 - DNA, 15 bp, Homo sapiens
taaccctaggtgagt

SEQ ID NO: 29958 - DNA, 15 bp, Homo sapiens
aaccctaggtgagta

SEQ ID NO: 29959 - DNA, 15 bp, Homo sapiens
accctaggtgagtat

SEQ ID NO: 29960 - DNA, 15 bp, Homo sapiens
ccctaggtgagtatt

SEQ ID NO: 29961 - DNA, 15 bp, Homo sapiens
cctaggtgagtatta

SEQ ID NO: 29962 - DNA, 15 bp, Homo sapiens
ctaggtgagtattat

SEQ ID NO: 29963 - DNA, 15 bp, Homo sapiens
taggtgagtattatt

SEQ ID NO: 29964 - DNA, 15 bp, Homo sapiens
aggtgagtattatta

SEQ ID NO: 29965 - DNA, 15 bp, Homo sapiens
ggtgagtattattat

SEQ ID NO: 29966 - DNA, 15 bp, Homo sapiens
gtgagtattattatg

SEQ ID NO: 29967 - DNA, 15 bp, Homo sapiens
tgagtattattatgt

SEQ ID NO: 29968 - DNA, 15 bp, Homo sapiens
gagtattattatgtt

SEQ ID NO: 29969 - DNA, 15 bp, Homo sapiens
agtattattatgttt

SEQ ID NO: 29970 - DNA, 15 bp, Homo sapiens
gtattattatgtttt

SEQ ID NO: 29971 - DNA, 15 bp, Homo sapiens
tattattatgtttta

SEQ ID NO: 29972 - DNA, 15 bp, Homo sapiens
attattatgttttaa

SEQ ID NO: 29973 - DNA, 15 bp, Homo sapiens
ttattatgttttaat

SEQ ID NO: 29974 - DNA, 15 bp, Homo sapiens
tattatgttttaatt

SEQ ID NO: 29975 - DNA, 15 bp, Homo sapiens
attatgttttaatta

SEQ ID NO: 29976 - DNA, 15 bp, Homo sapiens
ttatgttttaattat

SEQ ID NO: 29977 - DNA, 15 bp, Homo sapiens
tatgttttaattatt

SEQ ID NO: 29978 - DNA, 15 bp, Homo sapiens
atgttttaattattt

SEQ ID NO: 29979 - DNA, 15 bp, Homo sapiens
tgttttaattatttc

SEQ ID NO: 29980 - DNA, 15 bp, Homo sapiens
gttttaattatttcc

SEQ ID NO: 29981 - DNA, 15 bp, Homo sapiens
ttttaattatttccc

SEQ ID NO: 29982 - DNA, 15 bp, Homo sapiens
tttaattatttccca

SEQ ID NO: 29983 - DNA, 15 bp, Homo sapiens
ttaattatttcccaa

SEQ ID NO: 29984 - DNA, 15 bp, Homo sapiens
taattatttcccaac

SEQ ID NO: 29985 - DNA, 15 bp, Homo sapiens
aattatttcccaaca

SEQ ID NO: 29986 - DNA, 15 bp, Homo sapiens
attatttcccaacat

SEQ ID NO: 29987 - DNA, 15 bp, Homo sapiens
ttatttcccaacatg

SEQ ID NO: 29988 - DNA, 15 bp, Homo sapiens
tatttcccaacatga

SEQ ID NO: 29989 - DNA, 15 bp, Homo sapiens
atttcccaacatgac

SEQ ID NO: 29990 - DNA, 15 bp, Homo sapiens
tttcccaacatgaca

SEQ ID NO: 29991 - DNA, 15 bp, Homo sapiens
ttcccaacatgacag

SEQ ID NO: 29992 - DNA, 15 bp, Homo sapiens
tcccaacatgacagg

SEQ ID NO: 29993 - DNA, 15 bp, Homo sapiens
cccaacatgacaggt

SEQ ID NO: 29994 - DNA, 15 bp, Homo sapiens
ccaacatgacaggta

SEQ ID NO: 29995 - DNA, 15 bp, Homo sapiens
caacatgacaggtaa

SEQ ID NO: 29996 - DNA, 15 bp, Homo sapiens
aacatgacaggtaag

SEQ ID NO: 29997 - DNA, 15 bp, Homo sapiens
acatgacaggtaaga

SEQ ID NO: 29998 - DNA, 15 bp, Homo sapiens
catgacaggtaagaa

SEQ ID NO: 29999 - DNA, 15 bp, Homo sapiens
atgacaggtaagaaa

SEQ ID NO: 30000 - DNA, 15 bp, Homo sapiens
tgacaggtaagaaaa

SEQ ID NO: 30001 - DNA, 15 bp, Homo sapiens
gacaggtaagaaaaa

SEQ ID NO: 30002 - DNA, 15 bp, Homo sapiens
acaggtaagaaaaac

SEQ ID NO: 30003 - DNA, 15 bp, Homo sapiens
caggtaagaaaaaca

SEQ ID NO: 30004 - DNA, 15 bp, Homo sapiens
aggtaagaaaaacac

SEQ ID NO: 30005 - DNA, 15 bp, Homo sapiens
ggtaagaaaaacaca

SEQ ID NO: 30006 - DNA, 15 bp, Homo sapiens
gtaagaaaaacacat

SEQ ID NO: 30007 - DNA, 15 bp, Homo sapiens
taagaaaaacacatt

SEQ ID NO: 30008 - DNA, 15 bp, Homo sapiens
aagaaaaacacatta

SEQ ID NO: 30009 - DNA, 15 bp, Homo sapiens
agaaaaacacattat

SEQ ID NO: 30010 - DNA, 15 bp, Homo sapiens
gaaaaacacattatc

SEQ ID NO: 30011 - DNA, 15 bp, Homo sapiens
aaaaacacattatca

SEQ ID NO: 30012 - DNA, 15 bp, Homo sapiens
aaaacacattatcac

SEQ ID NO: 30013 - DNA, 15 bp, Homo sapiens
aaacacattatcaca

SEQ ID NO: 30014 - DNA, 15 bp, Homo sapiens
aacacattatcacat

SEQ ID NO: 30015 - DNA, 15 bp, Homo sapiens
acacattatcacatt

SEQ ID NO: 30016 - DNA, 15 bp, Homo sapiens
cacattatcacattg

SEQ ID NO: 30017 - DNA, 15 bp, Homo sapiens
acattatcacattgt

SEQ ID NO: 30018 - DNA, 15 bp, Homo sapiens
cattatcacattgtt

SEQ ID NO: 30019 - DNA, 15 bp, Homo sapiens
attatcacattgttg

SEQ ID NO: 30020 - DNA, 15 bp, Homo sapiens
ttatcacattgttga

SEQ ID NO: 30021 - DNA, 15 bp, Homo sapiens
tatcacattgttgaa

SEQ ID NO: 30022 - DNA, 15 bp, Homo sapiens
atcacattgttgaaa

SEQ ID NO: 30023 - DNA, 15 bp, Homo sapiens
tcacattgttgaaat

SEQ ID NO: 30024 - DNA, 15 bp, Homo sapiens
cacattgttgaaatt

SEQ ID NO: 30025 - DNA, 15 bp, Homo sapiens
acattgttgaaattt

SEQ ID NO: 30026 - DNA, 15 bp, Homo sapiens
cattgttgaaatttg

SEQ ID NO: 30027 - DNA, 15 bp, Homo sapiens
attgttgaaatttgc

SEQ ID NO: 30028 - DNA, 15 bp, Homo sapiens
ttgttgaaatttgca

SEQ ID NO: 30029 - DNA, 15 bp, Homo sapiens
tgttgaaatttgcat

SEQ ID NO: 30030 - DNA, 15 bp, Homo sapiens
gttgaaatttgcatc

SEQ ID NO: 30031 - DNA, 15 bp, Homo sapiens
ttgaaatttgcatct

SEQ ID NO: 30032 - DNA, 15 bp, Homo sapiens
tgaaatttgcatctt

SEQ ID NO: 30033 - DNA, 15 bp, Homo sapiens
gaaatttgcatcttg

SEQ ID NO: 30034 - DNA, 15 bp, Homo sapiens
aaatttgcatcttgt

SEQ ID NO: 30035 - DNA, 15 bp, Homo sapiens
aatttgcatcttgtg

SEQ ID NO: 30036 - DNA, 15 bp, Homo sapiens
atttgcatcttgtga

SEQ ID NO: 30037 - DNA, 15 bp, Homo sapiens
tttgcatcttgtgat

SEQ ID NO: 30038 - DNA, 15 bp, Homo sapiens
ttgcatcttgtgatt

SEQ ID NO: 30039 - DNA, 15 bp, Homo sapiens
tgcatcttgtgatta

SEQ ID NO: 30040 - DNA, 15 bp, Homo sapiens
gcatcttgtgattac

SEQ ID NO: 30041 - DNA, 15 bp, Homo sapiens
catcttgtgattact

SEQ ID NO: 30042 - DNA, 15 bp, Homo sapiens
atcttgtgattactt

SEQ ID NO: 30043 - DNA, 15 bp, Homo sapiens
tcttgtgattacttt

SEQ ID NO: 30044 - DNA, 15 bp, Homo sapiens
cttgtgattactttt

SEQ ID NO: 30045 - DNA, 15 bp, Homo sapiens
ttgtgattactttta

SEQ ID NO: 30046 - DNA, 15 bp, Homo sapiens
tgtgattacttttac

SEQ ID NO: 30047 - DNA, 15 bp, Homo sapiens
gtgattacttttact

SEQ ID NO: 30048 - DNA, 15 bp, Homo sapiens
tgattacttttacta

SEQ ID NO: 30049 - DNA, 15 bp, Homo sapiens
gattacttttactat

SEQ ID NO: 30050 - DNA, 15 bp, Homo sapiens
attacttttactatt

SEQ ID NO: 30051 - DNA, 15 bp, Homo sapiens
ttacttttactattc

SEQ ID NO: 30052 - DNA, 15 bp, Homo sapiens
tacttttactattca

SEQ ID NO: 30053 - DNA, 15 bp, Homo sapiens
acttttactattcat

SEQ ID NO: 30054 - DNA, 15 bp, Homo sapiens
cttttactattcatt

SEQ ID NO: 30055 - DNA, 15 bp, Homo sapiens
ttttactattcattg

SEQ ID NO: 30056 - DNA, 15 bp, Homo sapiens
tttactattcattgg

SEQ ID NO: 30057 - DNA, 15 bp, Homo sapiens
ttactattcattggc

SEQ ID NO: 30058 - DNA, 15 bp, Homo sapiens
tactattcattggcc

SEQ ID NO: 30059 - DNA, 15 bp, Homo sapiens
actattcattggcca

SEQ ID NO: 30060 - DNA, 15 bp, Homo sapiens
ctattcattggccat

SEQ ID NO: 30061 - DNA, 15 bp, Homo sapiens
tattcattggccatt

SEQ ID NO: 30062 - DNA, 15 bp, Homo sapiens
attcattggccattc

SEQ ID NO: 30063 - DNA, 15 bp, Homo sapiens
ttcattggccattca

SEQ ID NO: 30064 - DNA, 15 bp, Homo sapiens
tcattggccattcat

SEQ ID NO: 30065 - DNA, 15 bp, Homo sapiens
cattggccattcatg

SEQ ID NO: 30066 - DNA, 15 bp, Homo sapiens
attggccattcatgc

SEQ ID NO: 30067 - DNA, 15 bp, Homo sapiens
ttggccattcatgct

SEQ ID NO: 30068 - DNA, 15 bp, Homo sapiens
tggccattcatgctt

SEQ ID NO: 30069 - DNA, 15 bp, Homo sapiens
ggccattcatgcttt

SEQ ID NO: 30070 - DNA, 15 bp, Homo sapiens
gccattcatgctttt

SEQ ID NO: 30071 - DNA, 15 bp, Homo sapiens
ccattcatgcttttt

SEQ ID NO: 30072 - DNA, 15 bp, Homo sapiens
cattcatgctttttt

SEQ ID NO: 30073 - DNA, 15 bp, Homo sapiens
attcatgcttttttt

SEQ ID NO: 30074 - DNA, 15 bp, Homo sapiens
ttcatgctttttttt

SEQ ID NO: 30075 - DNA, 15 bp, Homo sapiens
tcatgcttttttttt

SEQ ID NO: 30076 - DNA, 15 bp, Homo sapiens
catgctttttttttt

SEQ ID NO: 30077 - DNA, 15 bp, Homo sapiens
atgcttttttttttt

SEQ ID NO: 30078 - DNA, 15 bp, Homo sapiens
tgctttttttttttt

SEQ ID NO: 30079 - DNA, 15 bp, Homo sapiens
gcttttttttttttt

SEQ ID NO: 30080 - DNA, 15 bp, Homo sapiens
ttttttttttttttg

SEQ ID NO: 30081 - DNA, 15 bp, Homo sapiens
tttttttttttttgg

SEQ ID NO: 30082 - DNA, 15 bp, Homo sapiens
ttttttttttttggt

SEQ ID NO: 30083 - DNA, 15 bp, Homo sapiens
tttttttttttggtt

SEQ ID NO: 30084 - DNA, 15 bp, Homo sapiens
ttttttttttggttg

SEQ ID NO: 30085 - DNA, 15 bp, Homo sapiens
tttttttttggttgt

SEQ ID NO: 30086 - DNA, 15 bp, Homo sapiens
ttttttttggttgtc

SEQ ID NO: 30087 - DNA, 15 bp, Homo sapiens
tttttttggttgtct

SEQ ID NO: 30088 - DNA, 15 bp, Homo sapiens
ttttttggttgtctg

SEQ ID NO: 30089 - DNA, 15 bp, Homo sapiens
tttttggttgtctgg

SEQ ID NO: 30090 - DNA, 15 bp, Homo sapiens
ttttggttgtctggt

SEQ ID NO: 30091 - DNA, 15 bp, Homo sapiens
tttggttgtctggtc

SEQ ID NO: 30092 - DNA, 15 bp, Homo sapiens
ttggttgtctggtca

SEQ ID NO: 30093 - DNA, 15 bp, Homo sapiens
tggttgtctggtcat

SEQ ID NO: 30094 - DNA, 15 bp, Homo sapiens
ggttgtctggtcatg

SEQ ID NO: 30095 - DNA, 15 bp, Homo sapiens
gttgtctggtcatgt

SEQ ID NO: 30096 - DNA, 15 bp, Homo sapiens
ttgtctggtcatgtc

SEQ ID NO: 30097 - DNA, 15 bp, Homo sapiens
tgtctggtcatgtcc

SEQ ID NO: 30098 - DNA, 15 bp, Homo sapiens
gtctggtcatgtcct

SEQ ID NO: 30099 - DNA, 15 bp, Homo sapiens
tctggtcatgtcctt

SEQ ID NO: 30100 - DNA, 15 bp, Homo sapiens
ctggtcatgtcctta

SEQ ID NO: 30101 - DNA, 15 bp, Homo sapiens
tggtcatgtccttac

SEQ ID NO: 30102 - DNA, 15 bp, Homo sapiens
ggtcatgtccttact

SEQ ID NO: 30103 - DNA, 15 bp, Homo sapiens
gtcatgtccttactc

SEQ ID NO: 30104 - DNA, 15 bp, Homo sapiens
tcatgtccttactcc

SEQ ID NO: 30105 - DNA, 15 bp, Homo sapiens
catgtccttactcct

SEQ ID NO: 30106 - DNA, 15 bp, Homo sapiens
atgtccttactccta

SEQ ID NO: 30107 - DNA, 15 bp, Homo sapiens
tgtccttactcctaa

SEQ ID NO: 30108 - DNA, 15 bp, Homo sapiens
gtccttactcctaat

SEQ ID NO: 30109 - DNA, 15 bp, Homo sapiens
tccttactcctaata

SEQ ID NO: 30110 - DNA, 15 bp, Homo sapiens
ccttactcctaatag

SEQ ID NO: 30111 - DNA, 15 bp, Homo sapiens
cttactcctaatagg

SEQ ID NO: 30112 - DNA, 15 bp, Homo sapiens
ttactcctaataggg

SEQ ID NO: 30113 - DNA, 15 bp, Homo sapiens
tactcctaatagggt

SEQ ID NO: 30114 - DNA, 15 bp, Homo sapiens
actcctaatagggtg

SEQ ID NO: 30115 - DNA, 15 bp, Homo sapiens
ctcctaatagggtgt

SEQ ID NO: 30116 - DNA, 15 bp, Homo sapiens
tcctaatagggtgtt

SEQ ID NO: 30117 - DNA, 15 bp, Homo sapiens
cctaatagggtgttc

SEQ ID NO: 30118 - DNA, 15 bp, Homo sapiens
ctaatagggtgttca

SEQ ID NO: 30119 - DNA, 15 bp, Homo sapiens
taatagggtgttcat

SEQ ID NO: 30120 - DNA, 15 bp, Homo sapiens
aatagggtgttcatc

SEQ ID NO: 30121 - DNA, 15 bp, Homo sapiens
atagggtgttcatct

SEQ ID NO: 30122 - DNA, 15 bp, Homo sapiens
tagggtgttcatctt

SEQ ID NO: 30123 - DNA, 15 bp, Homo sapiens
agggtgttcatctta

SEQ ID NO: 30124 - DNA, 15 bp, Homo sapiens
gggtgttcatcttat

SEQ ID NO: 30125 - DNA, 15 bp, Homo sapiens
ggtgttcatcttatt

SEQ ID NO: 30126 - DNA, 15 bp, Homo sapiens
gtgttcatcttattt

SEQ ID NO: 30127 - DNA, 15 bp, Homo sapiens
tgttcatcttatttt

SEQ ID NO: 30128 - DNA, 15 bp, Homo sapiens
gttcatcttattttt

SEQ ID NO: 30129 - DNA, 15 bp, Homo sapiens
ttcatcttatttttc

SEQ ID NO: 30130 - DNA, 15 bp, Homo sapiens
tcatcttatttttcc

SEQ ID NO: 30131 - DNA, 15 bp, Homo sapiens
catcttatttttccc

SEQ ID NO: 30132 - DNA, 15 bp, Homo sapiens
atcttatttttccct

SEQ ID NO: 30133 - DNA, 15 bp, Homo sapiens
tcttatttttccctt

SEQ ID NO: 30134 - DNA, 15 bp, Homo sapiens
cttatttttccctta

SEQ ID NO: 30135 - DNA, 15 bp, Homo sapiens
ttatttttcccttat

SEQ ID NO: 30136 - DNA, 15 bp, Homo sapiens
tatttttcccttatt

SEQ ID NO: 30137 - DNA, 15 bp, Homo sapiens
atttttcccttattg

SEQ ID NO: 30138 - DNA, 15 bp, Homo sapiens
tttttcccttattga

SEQ ID NO: 30139 - DNA, 15 bp, Homo sapiens
ttttcccttattgat

SEQ ID NO: 30140 - DNA, 15 bp, Homo sapiens
tttcccttattgatt

SEQ ID NO: 30141 - DNA, 15 bp, Homo sapiens
ttcccttattgattt

SEQ ID NO: 30142 - DNA, 15 bp, Homo sapiens
tcccttattgatttg

SEQ ID NO: 30143 - DNA, 15 bp, Homo sapiens
cccttattgatttgc

SEQ ID NO: 30144 - DNA, 15 bp, Homo sapiens
ccttattgatttgcc

SEQ ID NO: 30145 - DNA, 15 bp, Homo sapiens
cttattgatttgcca

SEQ ID NO: 30146 - DNA, 15 bp, Homo sapiens
ttattgatttgccac

SEQ ID NO: 30147 - DNA, 15 bp, Homo sapiens
tattgatttgccaca

SEQ ID NO: 30148 - DNA, 15 bp, Homo sapiens
attgatttgccacag

SEQ ID NO: 30149 - DNA, 15 bp, Homo sapiens
ttgatttgccacagc

SEQ ID NO: 30150 - DNA, 15 bp, Homo sapiens
tgatttgccacagct

SEQ ID NO: 30151 - DNA, 15 bp, Homo sapiens
gatttgccacagctc

SEQ ID NO: 30152 - DNA, 15 bp, Homo sapiens
atttgccacagctct

SEQ ID NO: 30153 - DNA, 15 bp, Homo sapiens
tttgccacagctctt

SEQ ID NO: 30154 - DNA, 15 bp, Homo sapiens
ttgccacagctcttt

SEQ ID NO: 30155 - DNA, 15 bp, Homo sapiens
tgccacagctcttta

SEQ ID NO: 30156 - DNA, 15 bp, Homo sapiens
gccacagctctttat

SEQ ID NO: 30157 - DNA, 15 bp, Homo sapiens
ccacagctctttatt

SEQ ID NO: 30158 - DNA, 15 bp, Homo sapiens
cacagctctttattt

SEQ ID NO: 30159 - DNA, 15 bp, Homo sapiens
acagctctttatttg

SEQ ID NO: 30160 - DNA, 15 bp, Homo sapiens
cagctctttatttgg

SEQ ID NO: 30161 - DNA, 15 bp, Homo sapiens
agctctttatttgga

SEQ ID NO: 30162 - DNA, 15 bp, Homo sapiens
gctctttatttggaa

SEQ ID NO: 30163 - DNA, 15 bp, Homo sapiens
ctctttatttggaat

SEQ ID NO: 30164 - DNA, 15 bp, Homo sapiens
tctttatttggaatg

SEQ ID NO: 30165 - DNA, 15 bp, Homo sapiens
ctttatttggaatgg

SEQ ID NO: 30166 - DNA, 15 bp, Homo sapiens
tttatttggaatggt

SEQ ID NO: 30167 - DNA, 15 bp, Homo sapiens
ttatttggaatggtt

SEQ ID NO: 30168 - DNA, 15 bp, Homo sapiens
tatttggaatggtta

SEQ ID NO: 30169 - DNA, 15 bp, Homo sapiens
atttggaatggttat

SEQ ID NO: 30170 - DNA, 15 bp, Homo sapiens
tttggaatggttatt

SEQ ID NO: 30171 - DNA, 15 bp, Homo sapiens
ttggaatggttatta

SEQ ID NO: 30172 - DNA, 15 bp, Homo sapiens
tggaatggttattaa

SEQ ID NO: 30173 - DNA, 15 bp, Homo sapiens
ggaatggttattaac

SEQ ID NO: 30174 - DNA, 15 bp, Homo sapiens
gaatggttattaacc

SEQ ID NO: 30175 - DNA, 15 bp, Homo sapiens
aatggttattaacct

SEQ ID NO: 30176 - DNA, 15 bp, Homo sapiens
atggttattaacctt

SEQ ID NO: 30177 - DNA, 15 bp, Homo sapiens
tggttattaaccttt

SEQ ID NO: 30178 - DNA, 15 bp, Homo sapiens
ggttattaacctttc

SEQ ID NO: 30179 - DNA, 15 bp, Homo sapiens
gttattaacctttca

SEQ ID NO: 30180 - DNA, 15 bp, Homo sapiens
ttattaacctttcat

SEQ ID NO: 30181 - DNA, 15 bp, Homo sapiens
tattaacctttcatc

SEQ ID NO: 30182 - DNA, 15 bp, Homo sapiens
attaacctttcatca

SEQ ID NO: 30183 - DNA, 15 bp, Homo sapiens
ttaacctttcatcag

SEQ ID NO: 30184 - DNA, 15 bp, Homo sapiens
taacctttcatcagc

SEQ ID NO: 30185 - DNA, 15 bp, Homo sapiens
aacctttcatcagcc

SEQ ID NO: 30186 - DNA, 15 bp, Homo sapiens
acctttcatcagcca

SEQ ID NO: 30187 - DNA, 15 bp, Homo sapiens
cctttcatcagccat

SEQ ID NO: 30188 - DNA, 15 bp, Homo sapiens
ctttcatcagccatt

SEQ ID NO: 30189 - DNA, 15 bp, Homo sapiens
tttcatcagccatta

SEQ ID NO: 30190 - DNA, 15 bp, Homo sapiens
ttcatcagccattac

SEQ ID NO: 30191 - DNA, 15 bp, Homo sapiens
tcatcagccattaca

SEQ ID NO: 30192 - DNA, 15 bp, Homo sapiens
catcagccattacat

SEQ ID NO: 30193 - DNA, 15 bp, Homo sapiens
atcagccattacata

SEQ ID NO: 30194 - DNA, 15 bp, Homo sapiens
tcagccattacatat

SEQ ID NO: 30195 - DNA, 15 bp, Homo sapiens
cagccattacatata

SEQ ID NO: 30196 - DNA, 15 bp, Homo sapiens
agccattacatatat

SEQ ID NO: 30197 - DNA, 15 bp, Homo sapiens
gccattacatatata

SEQ ID NO: 30198 - DNA, 15 bp, Homo sapiens
ccattacatatatag

SEQ ID NO: 30199 - DNA, 15 bp, Homo sapiens
cattacatatatagc

SEQ ID NO: 30200 - DNA, 15 bp, Homo sapiens
attacatatatagca

SEQ ID NO: 30201 - DNA, 15 bp, Homo sapiens
ttacatatatagcaa

SEQ ID NO: 30202 - DNA, 15 bp, Homo sapiens
tacatatatagcaaa

SEQ ID NO: 30203 - DNA, 15 bp, Homo sapiens
acatatatagcaaat

SEQ ID NO: 30204 - DNA, 15 bp, Homo sapiens
catatatagcaaata

SEQ ID NO: 30205 - DNA, 15 bp, Homo sapiens
atatatagcaaatat

SEQ ID NO: 30206 - DNA, 15 bp, Homo sapiens
tatatagcaaatatt

SEQ ID NO: 30207 - DNA, 15 bp, Homo sapiens
atatagcaaatattt

SEQ ID NO: 30208 - DNA, 15 bp, Homo sapiens
tatagcaaatatttt

SEQ ID NO: 30209 - DNA, 15 bp, Homo sapiens
atagcaaatattttc

SEQ ID NO: 30210 - DNA, 15 bp, Homo sapiens
tagcaaatattttcc

SEQ ID NO: 30211 - DNA, 15 bp, Homo sapiens
agcaaatattttccc

SEQ ID NO: 30212 - DNA, 15 bp, Homo sapiens
gcaaatattttcccc

SEQ ID NO: 30213 - DNA, 15 bp, Homo sapiens
caaatattttcccca

SEQ ID NO: 30214 - DNA, 15 bp, Homo sapiens
aaatattttccccaa

SEQ ID NO: 30215 - DNA, 15 bp, Homo sapiens
aatattttccccaat

SEQ ID NO: 30216 - DNA, 15 bp, Homo sapiens
atattttccccaatt

SEQ ID NO: 30217 - DNA, 15 bp, Homo sapiens
tattttccccaattc

SEQ ID NO: 30218 - DNA, 15 bp, Homo sapiens
attttccccaattca

SEQ ID NO: 30219 - DNA, 15 bp, Homo sapiens
ttttccccaattcat

SEQ ID NO: 30220 - DNA, 15 bp, Homo sapiens
tttccccaattcatc

SEQ ID NO: 30221 - DNA, 15 bp, Homo sapiens
ttccccaattcatca

SEQ ID NO: 30222 - DNA, 15 bp, Homo sapiens
tccccaattcatcat

SEQ ID NO: 30223 - DNA, 15 bp, Homo sapiens
ccccaattcatcatt

SEQ ID NO: 30224 - DNA, 15 bp, Homo sapiens
cccaattcatcattt

SEQ ID NO: 30225 - DNA, 15 bp, Homo sapiens
ccaattcatcatttg

SEQ ID NO: 30226 - DNA, 15 bp, Homo sapiens
caattcatcatttgc

SEQ ID NO: 30227 - DNA, 15 bp, Homo sapiens
aattcatcatttgct

SEQ ID NO: 30228 - DNA, 15 bp, Homo sapiens
attcatcatttgctt

SEQ ID NO: 30229 - DNA, 15 bp, Homo sapiens
ttcatcatttgcttt

SEQ ID NO: 30230 - DNA, 15 bp, Homo sapiens
tcatcatttgctttt

SEQ ID NO: 30231 - DNA, 15 bp, Homo sapiens
catcatttgcttttt

SEQ ID NO: 30232 - DNA, 15 bp, Homo sapiens
atcatttgctttttt

SEQ ID NO: 30233 - DNA, 15 bp, Homo sapiens
tcatttgcttttttt

SEQ ID NO: 30234 - DNA, 15 bp, Homo sapiens
catttgctttttttc

SEQ ID NO: 30235 - DNA, 15 bp, Homo sapiens
atttgctttttttct

SEQ ID NO: 30236 - DNA, 15 bp, Homo sapiens
tttgctttttttcta

SEQ ID NO: 30237 - DNA, 15 bp, Homo sapiens
ttgctttttttctat

SEQ ID NO: 30238 - DNA, 15 bp, Homo sapiens
tgctttttttctatt

SEQ ID NO: 30239 - DNA, 15 bp, Homo sapiens
gctttttttctattt

SEQ ID NO: 30240 - DNA, 15 bp, Homo sapiens
ctttttttctatttg

SEQ ID NO: 30241 - DNA, 15 bp, Homo sapiens
tttttttctatttgt

SEQ ID NO: 30242 - DNA, 15 bp, Homo sapiens
ttttttctatttgtt

SEQ ID NO: 30243 - DNA, 15 bp, Homo sapiens
tttttctatttgttt

SEQ ID NO: 30244 - DNA, 15 bp, Homo sapiens
ttttctatttgttta

SEQ ID NO: 30245 - DNA, 15 bp, Homo sapiens
tttctatttgtttat

SEQ ID NO: 30246 - DNA, 15 bp, Homo sapiens
ttctatttgtttatg

SEQ ID NO: 30247 - DNA, 15 bp, Homo sapiens
tctatttgtttatgg

SEQ ID NO: 30248 - DNA, 15 bp, Homo sapiens
ctatttgtttatggt

SEQ ID NO: 30249 - DNA, 15 bp, Homo sapiens
tatttgtttatggtg

SEQ ID NO: 30250 - DNA, 15 bp, Homo sapiens
atttgtttatggtgt

SEQ ID NO: 30251 - DNA, 15 bp, Homo sapiens
tttgtttatggtgtt

SEQ ID NO: 30252 - DNA, 15 bp, Homo sapiens
ttgtttatggtgttt

SEQ ID NO: 30253 - DNA, 15 bp, Homo sapiens
tgtttatggtgtttt

SEQ ID NO: 30254 - DNA, 15 bp, Homo sapiens
gtttatggtgttttt

SEQ ID NO: 30255 - DNA, 15 bp, Homo sapiens
tttatggtgtttttt

SEQ ID NO: 30256 - DNA, 15 bp, Homo sapiens
ttatggtgttttttg

SEQ ID NO: 30257 - DNA, 15 bp, Homo sapiens
tatggtgttttttgt

SEQ ID NO: 30258 - DNA, 15 bp, Homo sapiens
atggtgttttttgtg

SEQ ID NO: 30259 - DNA, 15 bp, Homo sapiens
tggtgttttttgtga

SEQ ID NO: 30260 - DNA, 15 bp, Homo sapiens
ggtgttttttgtgat

SEQ ID NO: 30261 - DNA, 15 bp, Homo sapiens
gtgttttttgtgatg

SEQ ID NO: 30262 - DNA, 15 bp, Homo sapiens
tgttttttgtgatgc

SEQ ID NO: 30263 - DNA, 15 bp, Homo sapiens
gttttttgtgatgct

SEQ ID NO: 30264 - DNA, 15 bp, Homo sapiens
ttttttgtgatgctt

SEQ ID NO: 30265 - DNA, 15 bp, Homo sapiens
tttttgtgatgctta

SEQ ID NO: 30266 - DNA, 15 bp, Homo sapiens
ttttgtgatgcttat

SEQ ID NO: 30267 - DNA, 15 bp, Homo sapiens
tttgtgatgcttatg

SEQ ID NO: 30268 - DNA, 15 bp, Homo sapiens
ttgtgatgcttatga

SEQ ID NO: 30269 - DNA, 15 bp, Homo sapiens
tgtgatgcttatgat

SEQ ID NO: 30270 - DNA, 15 bp, Homo sapiens
gtgatgcttatgatg

SEQ ID NO: 30271 - DNA, 15 bp, Homo sapiens
tgatgcttatgatgg

SEQ ID NO: 30272 - DNA, 15 bp, Homo sapiens
gatgcttatgatggt

SEQ ID NO: 30273 - DNA, 15 bp, Homo sapiens
atgcttatgatggtt

SEQ ID NO: 30274 - DNA, 15 bp, Homo sapiens
tgcttatgatggttt

SEQ ID NO: 30275 - DNA, 15 bp, Homo sapiens
gcttatgatggtttt

SEQ ID NO: 30276 - DNA, 15 bp, Homo sapiens
cttatgatggtttta

SEQ ID NO: 30277 - DNA, 15 bp, Homo sapiens
ttatgatggttttat

SEQ ID NO: 30278 - DNA, 15 bp, Homo sapiens
tatgatggttttata

SEQ ID NO: 30279 - DNA, 15 bp, Homo sapiens
atgatggttttatac

SEQ ID NO: 30280 - DNA, 15 bp, Homo sapiens
tgatggttttataca

SEQ ID NO: 30281 - DNA, 15 bp, Homo sapiens
gatggttttatacag

SEQ ID NO: 30282 - DNA, 15 bp, Homo sapiens
atggttttatacagt

SEQ ID NO: 30283 - DNA, 15 bp, Homo sapiens
tggttttatacagtc

SEQ ID NO: 30284 - DNA, 15 bp, Homo sapiens
ggttttatacagtca

SEQ ID NO: 30285 - DNA, 15 bp, Homo sapiens
gttttatacagtcaa

SEQ ID NO: 30286 - DNA, 15 bp, Homo sapiens
ttttatacagtcaaa

SEQ ID NO: 30287 - DNA, 15 bp, Homo sapiens
tttatacagtcaaat

SEQ ID NO: 30288 - DNA, 15 bp, Homo sapiens
ttatacagtcaaata

SEQ ID NO: 30289 - DNA, 15 bp, Homo sapiens
tatacagtcaaatag

SEQ ID NO: 30290 - DNA, 15 bp, Homo sapiens
atacagtcaaatagg

SEQ ID NO: 30291 - DNA, 15 bp, Homo sapiens
tacagtcaaataggt

SEQ ID NO: 30292 - DNA, 15 bp, Homo sapiens
acagtcaaataggtt

SEQ ID NO: 30293 - DNA, 15 bp, Homo sapiens
cagtcaaataggtta

SEQ ID NO: 30294 - DNA, 15 bp, Homo sapiens
agtcaaataggttag

SEQ ID NO: 30295 - DNA, 15 bp, Homo sapiens
gtcaaataggttagt

SEQ ID NO: 30296 - DNA, 15 bp, Homo sapiens
tcaaataggttagtc

SEQ ID NO: 30297 - DNA, 15 bp, Homo sapiens
caaataggttagtct

SEQ ID NO: 30298 - DNA, 15 bp, Homo sapiens
aaataggttagtctt

SEQ ID NO: 30299 - DNA, 15 bp, Homo sapiens
aataggttagtcttt

SEQ ID NO: 30300 - DNA, 15 bp, Homo sapiens
ataggttagtctttt

SEQ ID NO: 30301 - DNA, 15 bp, Homo sapiens
taggttagtcttttt

SEQ ID NO: 30302 - DNA, 15 bp, Homo sapiens
aggttagtctttttt

SEQ ID NO: 30303 - DNA, 15 bp, Homo sapiens
ggttagtcttttttt

SEQ ID NO: 30304 - DNA, 15 bp, Homo sapiens
gttagtctttttttc

SEQ ID NO: 30305 - DNA, 15 bp, Homo sapiens
ttagtctttttttct

SEQ ID NO: 30306 - DNA, 15 bp, Homo sapiens
tagtctttttttctg

SEQ ID NO: 30307 - DNA, 15 bp, Homo sapiens
agtctttttttctgt

SEQ ID NO: 30308 - DNA, 15 bp, Homo sapiens
gtctttttttctgtg

SEQ ID NO: 30309 - DNA, 15 bp, Homo sapiens
tctttttttctgtgg

SEQ ID NO: 30310 - DNA, 15 bp, Homo sapiens
ctttttttctgtggc

SEQ ID NO: 30311 - DNA, 15 bp, Homo sapiens
tttttttctgtggct

SEQ ID NO: 30312 - DNA, 15 bp, Homo sapiens
ttttttctgtggctt

SEQ ID NO: 30313 - DNA, 15 bp, Homo sapiens
tttttctgtggcttc

SEQ ID NO: 30314 - DNA, 15 bp, Homo sapiens
ttttctgtggcttct

SEQ ID NO: 30315 - DNA, 15 bp, Homo sapiens
tttctgtggcttctg

SEQ ID NO: 30316 - DNA, 15 bp, Homo sapiens
ttctgtggcttctgt

SEQ ID NO: 30317 - DNA, 15 bp, Homo sapiens
tctgtggcttctgtc

SEQ ID NO: 30318 - DNA, 15 bp, Homo sapiens
ctgtggcttctgtct

SEQ ID NO: 30319 - DNA, 15 bp, Homo sapiens
tgtggcttctgtctc

SEQ ID NO: 30320 - DNA, 15 bp, Homo sapiens
gtggcttctgtctct

SEQ ID NO: 30321 - DNA, 15 bp, Homo sapiens
tggcttctgtctctg

SEQ ID NO: 30322 - DNA, 15 bp, Homo sapiens
ggcttctgtctctgg

SEQ ID NO: 30323 - DNA, 15 bp, Homo sapiens
gcttctgtctctggt

SEQ ID NO: 30324 - DNA, 15 bp, Homo sapiens
cttctgtctctggtt

SEQ ID NO: 30325 - DNA, 15 bp, Homo sapiens
ttctgtctctggttt

SEQ ID NO: 30326 - DNA, 15 bp, Homo sapiens
tctgtctctggtttt

SEQ ID NO: 30327 - DNA, 15 bp, Homo sapiens
ctgtctctggttttg

SEQ ID NO: 30328 - DNA, 15 bp, Homo sapiens
tgtctctggttttgt

SEQ ID NO: 30329 - DNA, 15 bp, Homo sapiens
gtctctggttttgtg

SEQ ID NO: 30330 - DNA, 15 bp, Homo sapiens
tctctggttttgtgc

SEQ ID NO: 30331 - DNA, 15 bp, Homo sapiens
ctctggttttgtgct

SEQ ID NO: 30332 - DNA, 15 bp, Homo sapiens
tctggttttgtgctt

SEQ ID NO: 30333 - DNA, 15 bp, Homo sapiens
ctggttttgtgctta

SEQ ID NO: 30334 - DNA, 15 bp, Homo sapiens
tggttttgtgcttag

SEQ ID NO: 30335 - DNA, 15 bp, Homo sapiens
ggttttgtgcttaga

SEQ ID NO: 30336 - DNA, 15 bp, Homo sapiens
gttttgtgcttagaa

SEQ ID NO: 30337 - DNA, 15 bp, Homo sapiens
ttttgtgcttagaaa

SEQ ID NO: 30338 - DNA, 15 bp, Homo sapiens
tttgtgcttagaaag

SEQ ID NO: 30339 - DNA, 15 bp, Homo sapiens
ttgtgcttagaaagt

SEQ ID NO: 30340 - DNA, 15 bp, Homo sapiens
tgtgcttagaaagtc

SEQ ID NO: 30341 - DNA, 15 bp, Homo sapiens
gtgcttagaaagtcc

SEQ ID NO: 30342 - DNA, 15 bp, Homo sapiens
tgcttagaaagtcct

SEQ ID NO: 30343 - DNA, 15 bp, Homo sapiens
gcttagaaagtcctt

SEQ ID NO: 30344 - DNA, 15 bp, Homo sapiens
cttagaaagtccttt

SEQ ID NO: 30345 - DNA, 15 bp, Homo sapiens
ttagaaagtcctttc

SEQ ID NO: 30346 - DNA, 15 bp, Homo sapiens
tagaaagtcctttcc

SEQ ID NO: 30347 - DNA, 15 bp, Homo sapiens
agaaagtcctttcct

SEQ ID NO: 30348 - DNA, 15 bp, Homo sapiens
gaaagtcctttccta

SEQ ID NO: 30349 - DNA, 15 bp, Homo sapiens
aaagtcctttcctac

SEQ ID NO: 30350 - DNA, 15 bp, Homo sapiens
aagtcctttcctact

SEQ ID NO: 30351 - DNA, 15 bp, Homo sapiens
agtcctttcctactt

SEQ ID NO: 30352 - DNA, 15 bp, Homo sapiens
gtcctttcctacttg

SEQ ID NO: 30353 - DNA, 15 bp, Homo sapiens
tcctttcctacttga

SEQ ID NO: 30354 - DNA, 15 bp, Homo sapiens
cctttcctacttgaa

SEQ ID NO: 30355 - DNA, 15 bp, Homo sapiens
ctttcctacttgaaa

SEQ ID NO: 30356 - DNA, 15 bp, Homo sapiens
tttcctacttgaaaa

SEQ ID NO: 30357 - DNA, 15 bp, Homo sapiens
ttcctacttgaaaat

SEQ ID NO: 30358 - DNA, 15 bp, Homo sapiens
tcctacttgaaaatg

SEQ ID NO: 30359 - DNA, 15 bp, Homo sapiens
cctacttgaaaatga

SEQ ID NO: 30360 - DNA, 15 bp, Homo sapiens
ctacttgaaaatgag

SEQ ID NO: 30361 - DNA, 15 bp, Homo sapiens
tacttgaaaatgaga

SEQ ID NO: 30362 - DNA, 15 bp, Homo sapiens
acttgaaaatgagat

SEQ ID NO: 30363 - DNA, 15 bp, Homo sapiens
cttgaaaatgagata

SEQ ID NO: 30364 - DNA, 15 bp, Homo sapiens
ttgaaaatgagataa

SEQ ID NO: 30365 - DNA, 15 bp, Homo sapiens
tgaaaatgagataaa

SEQ ID NO: 30366 - DNA, 15 bp, Homo sapiens
gaaaatgagataaat

SEQ ID NO: 30367 - DNA, 15 bp, Homo sapiens
aaaatgagataaatg

SEQ ID NO: 30368 - DNA, 15 bp, Homo sapiens
aaatgagataaatgt

SEQ ID NO: 30369 - DNA, 15 bp, Homo sapiens
aatgagataaatgtt

SEQ ID NO: 30370 - DNA, 15 bp, Homo sapiens
atgagataaatgttc

SEQ ID NO: 30371 - DNA, 15 bp, Homo sapiens
tgagataaatgttca

SEQ ID NO: 30372 - DNA, 15 bp, Homo sapiens
gagataaatgttcac

SEQ ID NO: 30373 - DNA, 15 bp, Homo sapiens
agataaatgttcacc

SEQ ID NO: 30374 - DNA, 15 bp, Homo sapiens
gataaatgttcacct

SEQ ID NO: 30375 - DNA, 15 bp, Homo sapiens
ataaatgttcaccta

SEQ ID NO: 30376 - DNA, 15 bp, Homo sapiens
taaatgttcacctat

SEQ ID NO: 30377 - DNA, 15 bp, Homo sapiens
aaatgttcacctatg

SEQ ID NO: 30378 - DNA, 15 bp, Homo sapiens
aatgttcacctatgt

SEQ ID NO: 30379 - DNA, 15 bp, Homo sapiens
atgttcacctatgtt

SEQ ID NO: 30380 - DNA, 15 bp, Homo sapiens
tgttcacctatgttg

SEQ ID NO: 30381 - DNA, 15 bp, Homo sapiens
gttcacctatgttgg

SEQ ID NO: 30382 - DNA, 15 bp, Homo sapiens
ttcacctatgttggc

SEQ ID NO: 30383 - DNA, 15 bp, Homo sapiens
tcacctatgttggct

SEQ ID NO: 30384 - DNA, 15 bp, Homo sapiens
cacctatgttggctt

SEQ ID NO: 30385 - DNA, 15 bp, Homo sapiens
acctatgttggcttc

SEQ ID NO: 30386 - DNA, 15 bp, Homo sapiens
cctatgttggcttct

SEQ ID NO: 30387 - DNA, 15 bp, Homo sapiens
ctatgttggcttcta

SEQ ID NO: 30388 - DNA, 15 bp, Homo sapiens
tatgttggcttctag

SEQ ID NO: 30389 - DNA, 15 bp, Homo sapiens
atgttggcttctagt

SEQ ID NO: 30390 - DNA, 15 bp, Homo sapiens
tgttggcttctagtc

SEQ ID NO: 30391 - DNA, 15 bp, Homo sapiens
gttggcttctagtct

SEQ ID NO: 30392 - DNA, 15 bp, Homo sapiens
ttggcttctagtctc

SEQ ID NO: 30393 - DNA, 15 bp, Homo sapiens
tggcttctagtctct

SEQ ID NO: 30394 - DNA, 15 bp, Homo sapiens
ggcttctagtctctt

SEQ ID NO: 30395 - DNA, 15 bp, Homo sapiens
gcttctagtctcttt

SEQ ID NO: 30396 - DNA, 15 bp, Homo sapiens
cttctagtctctttt

SEQ ID NO: 30397 - DNA, 15 bp, Homo sapiens
ttctagtctctttta

SEQ ID NO: 30398 - DNA, 15 bp, Homo sapiens
tctagtctcttttat

SEQ ID NO: 30399 - DNA, 15 bp, Homo sapiens
ctagtctcttttatg

SEQ ID NO: 30400 - DNA, 15 bp, Homo sapiens
tagtctcttttatgg

SEQ ID NO: 30401 - DNA, 15 bp, Homo sapiens
agtctcttttatggc

SEQ ID NO: 30402 - DNA, 15 bp, Homo sapiens
gtctcttttatggct

SEQ ID NO: 30403 - DNA, 15 bp, Homo sapiens
tctcttttatggctt

SEQ ID NO: 30404 - DNA, 15 bp, Homo sapiens
ctcttttatggcttc

SEQ ID NO: 30405 - DNA, 15 bp, Homo sapiens
tcttttatggcttca

SEQ ID NO: 30406 - DNA, 15 bp, Homo sapiens
cttttatggcttcat

SEQ ID NO: 30407 - DNA, 15 bp, Homo sapiens
ttttatggcttcatt

SEQ ID NO: 30408 - DNA, 15 bp, Homo sapiens
tttatggcttcattt

SEQ ID NO: 30409 - DNA, 15 bp, Homo sapiens
ttatggcttcatttt

SEQ ID NO: 30410 - DNA, 15 bp, Homo sapiens
tatggcttcattttt

SEQ ID NO: 30411 - DNA, 15 bp, Homo sapiens
atggcttcatttttt

SEQ ID NO: 30412 - DNA, 15 bp, Homo sapiens
tggcttcattttttc

SEQ ID NO: 30413 - DNA, 15 bp, Homo sapiens
ggcttcattttttcc

SEQ ID NO: 30414 - DNA, 15 bp, Homo sapiens
gcttcattttttcca

SEQ ID NO: 30415 - DNA, 15 bp, Homo sapiens
cttcattttttccat

SEQ ID NO: 30416 - DNA, 15 bp, Homo sapiens
ttcattttttccatt

SEQ ID NO: 30417 - DNA, 15 bp, Homo sapiens
tcattttttccattt

SEQ ID NO: 30418 - DNA, 15 bp, Homo sapiens
cattttttccattta

SEQ ID NO: 30419 - DNA, 15 bp, Homo sapiens
attttttccatttac

SEQ ID NO: 30420 - DNA, 15 bp, Homo sapiens
ttttttccatttact

SEQ ID NO: 30421 - DNA, 15 bp, Homo sapiens
tttttccatttacta

SEQ ID NO: 30422 - DNA, 15 bp, Homo sapiens
ttttccatttactat

SEQ ID NO: 30423 - DNA, 15 bp, Homo sapiens
tttccatttactata

SEQ ID NO: 30424 - DNA, 15 bp, Homo sapiens
ttccatttactatag

SEQ ID NO: 30425 - DNA, 15 bp, Homo sapiens
tccatttactataga

SEQ ID NO: 30426 - DNA, 15 bp, Homo sapiens
ccatttactatagag

SEQ ID NO: 30427 - DNA, 15 bp, Homo sapiens
catttactatagagg

SEQ ID NO: 30428 - DNA, 15 bp, Homo sapiens
atttactatagaggt

SEQ ID NO: 30429 - DNA, 15 bp, Homo sapiens
tttactatagaggtt

SEQ ID NO: 30430 - DNA, 15 bp, Homo sapiens
ttactatagaggtta

SEQ ID NO: 30431 - DNA, 15 bp, Homo sapiens
tactatagaggttaa

SEQ ID NO: 30432 - DNA, 15 bp, Homo sapiens
actatagaggttaag

SEQ ID NO: 30433 - DNA, 15 bp, Homo sapiens
ctatagaggttaaga

SEQ ID NO: 30434 - DNA, 15 bp, Homo sapiens
tatagaggttaagag

SEQ ID NO: 30435 - DNA, 15 bp, Homo sapiens
atagaggttaagagt

SEQ ID NO: 30436 - DNA, 15 bp, Homo sapiens
tagaggttaagagtg

SEQ ID NO: 30437 - DNA, 15 bp, Homo sapiens
agaggttaagagtgt

SEQ ID NO: 30438 - DNA, 15 bp, Homo sapiens
gaggttaagagtgtg

SEQ ID NO: 30439 - DNA, 15 bp, Homo sapiens
aggttaagagtgtgg

SEQ ID NO: 30440 - DNA, 15 bp, Homo sapiens
ggttaagagtgtggg

SEQ ID NO: 30441 - DNA, 15 bp, Homo sapiens
gttaagagtgtgggt

SEQ ID NO: 30442 - DNA, 15 bp, Homo sapiens
ttaagagtgtgggta

SEQ ID NO: 30443 - DNA, 15 bp, Homo sapiens
taagagtgtgggtac

SEQ ID NO: 30444 - DNA, 15 bp, Homo sapiens
aagagtgtgggtact

SEQ ID NO: 30445 - DNA, 15 bp, Homo sapiens
agagtgtgggtactg

SEQ ID NO: 30446 - DNA, 15 bp, Homo sapiens
gagtgtgggtactgg

SEQ ID NO: 30447 - DNA, 15 bp, Homo sapiens
agtgtgggtactgga

SEQ ID NO: 30448 - DNA, 15 bp, Homo sapiens
gtgtgggtactggag

SEQ ID NO: 30449 - DNA, 15 bp, Homo sapiens
tgtgggtactggagc

SEQ ID NO: 30450 - DNA, 15 bp, Homo sapiens
gtgggtactggagcc

SEQ ID NO: 30451 - DNA, 15 bp, Homo sapiens
tgggtactggagcca

SEQ ID NO: 30452 - DNA, 15 bp, Homo sapiens
gggtactggagccag

SEQ ID NO: 30453 - DNA, 15 bp, Homo sapiens
ggtactggagccaga

SEQ ID NO: 30454 - DNA, 15 bp, Homo sapiens
gtactggagccagac

SEQ ID NO: 30455 - DNA, 15 bp, Homo sapiens
tactggagccagact

SEQ ID NO: 30456 - DNA, 15 bp, Homo sapiens
actggagccagactg

SEQ ID NO: 30457 - DNA, 15 bp, Homo sapiens
ctggagccagactgt

SEQ ID NO: 30458 - DNA, 15 bp, Homo sapiens
tggagccagactgtc

SEQ ID NO: 30459 - DNA, 15 bp, Homo sapiens
ggagccagactgtct

SEQ ID NO: 30460 - DNA, 15 bp, Homo sapiens
gagccagactgtctg

SEQ ID NO: 30461 - DNA, 15 bp, Homo sapiens
agccagactgtctgg

SEQ ID NO: 30462 - DNA, 15 bp, Homo sapiens
gccagactgtctggg

SEQ ID NO: 30463 - DNA, 15 bp, Homo sapiens
ccagactgtctggga

SEQ ID NO: 30464 - DNA, 15 bp, Homo sapiens
cagactgtctgggac

SEQ ID NO: 30465 - DNA, 15 bp, Homo sapiens
agactgtctgggaca

SEQ ID NO: 30466 - DNA, 15 bp, Homo sapiens
gactgtctgggacaa

SEQ ID NO: 30467 - DNA, 15 bp, Homo sapiens
actgtctgggacaaa

SEQ ID NO: 30468 - DNA, 15 bp, Homo sapiens
ctgtctgggacaaac

SEQ ID NO: 30469 - DNA, 15 bp, Homo sapiens
tgtctgggacaaacc

SEQ ID NO: 30470 - DNA, 15 bp, Homo sapiens
gtctgggacaaaccc

SEQ ID NO: 30471 - DNA, 15 bp, Homo sapiens
tctgggacaaaccca

SEQ ID NO: 30472 - DNA, 15 bp, Homo sapiens
ctgggacaaacccag

SEQ ID NO: 30473 - DNA, 15 bp, Homo sapiens
tgggacaaacccagc

SEQ ID NO: 30474 - DNA, 15 bp, Homo sapiens
gggacaaacccagcg

SEQ ID NO: 30475 - DNA, 15 bp, Homo sapiens
ggacaaacccagcgt

SEQ ID NO: 30476 - DNA, 15 bp, Homo sapiens
gacaaacccagcgtc

SEQ ID NO: 30477 - DNA, 15 bp, Homo sapiens
acaaacccagcgtca

SEQ ID NO: 30478 - DNA, 15 bp, Homo sapiens
caaacccagcgtcac

SEQ ID NO: 30479 - DNA, 15 bp, Homo sapiens
aaacccagcgtcacc

SEQ ID NO: 30480 - DNA, 15 bp, Homo sapiens
aacccagcgtcaccc

SEQ ID NO: 30481 - DNA, 15 bp, Homo sapiens
acccagcgtcacccc

SEQ ID NO: 30482 - DNA, 15 bp, Homo sapiens
cccagcgtcacccca

SEQ ID NO: 30483 - DNA, 15 bp, Homo sapiens
ccagcgtcaccccaa

SEQ ID NO: 30484 - DNA, 15 bp, Homo sapiens
cagcgtcaccccaag

SEQ ID NO: 30485 - DNA, 15 bp, Homo sapiens
agcgtcaccccaagc

SEQ ID NO: 30486 - DNA, 15 bp, Homo sapiens
gcgtcaccccaagcc

SEQ ID NO: 30487 - DNA, 15 bp, Homo sapiens
cgtcaccccaagccc

SEQ ID NO: 30488 - DNA, 15 bp, Homo sapiens
gtcaccccaagccct

SEQ ID NO: 30489 - DNA, 15 bp, Homo sapiens
tcaccccaagcccta

SEQ ID NO: 30490 - DNA, 15 bp, Homo sapiens
caccccaagccctat

SEQ ID NO: 30491 - DNA, 15 bp, Homo sapiens
accccaagccctatg

SEQ ID NO: 30492 - DNA, 15 bp, Homo sapiens
ccccaagccctatgt

SEQ ID NO: 30493 - DNA, 15 bp, Homo sapiens
cccaagccctatgtg

SEQ ID NO: 30494 - DNA, 15 bp, Homo sapiens
ccaagccctatgtgt

SEQ ID NO: 30495 - DNA, 15 bp, Homo sapiens
caagccctatgtgtg

SEQ ID NO: 30496 - DNA, 15 bp, Homo sapiens
aagccctatgtgtga

SEQ ID NO: 30497 - DNA, 15 bp, Homo sapiens
agccctatgtgtgat

SEQ ID NO: 30498 - DNA, 15 bp, Homo sapiens
gccctatgtgtgatt

SEQ ID NO: 30499 - DNA, 15 bp, Homo sapiens
ccctatgtgtgattt

SEQ ID NO: 30500 - DNA, 15 bp, Homo sapiens
cctatgtgtgatttt

SEQ ID NO: 30501 - DNA, 15 bp, Homo sapiens
ctatgtgtgattttt

SEQ ID NO: 30502 - DNA, 15 bp, Homo sapiens
tatgtgtgattttta

SEQ ID NO: 30503 - DNA, 15 bp, Homo sapiens
atgtgtgatttttag

SEQ ID NO: 30504 - DNA, 15 bp, Homo sapiens
tgtgtgatttttagc

SEQ ID NO: 30505 - DNA, 15 bp, Homo sapiens
gtgtgatttttagcc

SEQ ID NO: 30506 - DNA, 15 bp, Homo sapiens
tgtgatttttagcca

SEQ ID NO: 30507 - DNA, 15 bp, Homo sapiens
gtgatttttagccag

SEQ ID NO: 30508 - DNA, 15 bp, Homo sapiens
tgatttttagccagg

SEQ ID NO: 30509 - DNA, 15 bp, Homo sapiens
gatttttagccaggc

SEQ ID NO: 30510 - DNA, 15 bp, Homo sapiens
atttttagccaggca

SEQ ID NO: 30511 - DNA, 15 bp, Homo sapiens
tttttagccaggcac

SEQ ID NO: 30512 - DNA, 15 bp, Homo sapiens
ttttagccaggcact

SEQ ID NO: 30513 - DNA, 15 bp, Homo sapiens
tttagccaggcactt

SEQ ID NO: 30514 - DNA, 15 bp, Homo sapiens
ttagccaggcactta

SEQ ID NO: 30515 - DNA, 15 bp, Homo sapiens
tagccaggcacttaa

SEQ ID NO: 30516 - DNA, 15 bp, Homo sapiens
agccaggcacttaac

SEQ ID NO: 30517 - DNA, 15 bp, Homo sapiens
gccaggcacttaacc

SEQ ID NO: 30518 - DNA, 15 bp, Homo sapiens
ccaggcacttaacct

SEQ ID NO: 30519 - DNA, 15 bp, Homo sapiens
caggcacttaacctc

SEQ ID NO: 30520 - DNA, 15 bp, Homo sapiens
aggcacttaacctct

SEQ ID NO: 30521 - DNA, 15 bp, Homo sapiens
ggcacttaacctctc

SEQ ID NO: 30522 - DNA, 15 bp, Homo sapiens
gcacttaacctctcc

SEQ ID NO: 30523 - DNA, 15 bp, Homo sapiens
cacttaacctctcca

SEQ ID NO: 30524 - DNA, 15 bp, Homo sapiens
acttaacctctccat

SEQ ID NO: 30525 - DNA, 15 bp, Homo sapiens
cttaacctctccata

SEQ ID NO: 30526 - DNA, 15 bp, Homo sapiens
ttaacctctccatac

SEQ ID NO: 30527 - DNA, 15 bp, Homo sapiens
taacctctccatacc

SEQ ID NO: 30528 - DNA, 15 bp, Homo sapiens
aacctctccatacct

SEQ ID NO: 30529 - DNA, 15 bp, Homo sapiens
acctctccatacctc

SEQ ID NO: 30530 - DNA, 15 bp, Homo sapiens
cctctccatacctcc

SEQ ID NO: 30531 - DNA, 15 bp, Homo sapiens
ctctccatacctcca

SEQ ID NO: 30532 - DNA, 15 bp, Homo sapiens
tctccatacctccat

SEQ ID NO: 30533 - DNA, 15 bp, Homo sapiens
ctccatacctccatt

SEQ ID NO: 30534 - DNA, 15 bp, Homo sapiens
tccatacctccattt

SEQ ID NO: 30535 - DNA, 15 bp, Homo sapiens
ccatacctccatttc

SEQ ID NO: 30536 - DNA, 15 bp, Homo sapiens
catacctccatttcc

SEQ ID NO: 30537 - DNA, 15 bp, Homo sapiens
atacctccatttcct

SEQ ID NO: 30538 - DNA, 15 bp, Homo sapiens
tacctccatttcctc

SEQ ID NO: 30539 - DNA, 15 bp, Homo sapiens
acctccatttcctca

SEQ ID NO: 30540 - DNA, 15 bp, Homo sapiens
cctccatttcctcat

SEQ ID NO: 30541 - DNA, 15 bp, Homo sapiens
ctccatttcctcata

SEQ ID NO: 30542 - DNA, 15 bp, Homo sapiens
tccatttcctcatat

SEQ ID NO: 30543 - DNA, 15 bp, Homo sapiens
ccatttcctcatatg

SEQ ID NO: 30544 - DNA, 15 bp, Homo sapiens
catttcctcatatgt

SEQ ID NO: 30545 - DNA, 15 bp, Homo sapiens
atttcctcatatgta

SEQ ID NO: 30546 - DNA, 15 bp, Homo sapiens
tttcctcatatgtac

SEQ ID NO: 30547 - DNA, 15 bp, Homo sapiens
ttcctcatatgtact

SEQ ID NO: 30548 - DNA, 15 bp, Homo sapiens
tcctcatatgtactg

SEQ ID NO: 30549 - DNA, 15 bp, Homo sapiens
cctcatatgtactgc

SEQ ID NO: 30550 - DNA, 15 bp, Homo sapiens
ctcatatgtactgca

SEQ ID NO: 30551 - DNA, 15 bp, Homo sapiens
tcatatgtactgcaa

SEQ ID NO: 30552 - DNA, 15 bp, Homo sapiens
catatgtactgcaat

SEQ ID NO: 30553 - DNA, 15 bp, Homo sapiens
atatgtactgcaatg

SEQ ID NO: 30554 - DNA, 15 bp, Homo sapiens
tatgtactgcaatgg

SEQ ID NO: 30555 - DNA, 15 bp, Homo sapiens
atgtactgcaatggt

SEQ ID NO: 30556 - DNA, 15 bp, Homo sapiens
tgtactgcaatggtt

SEQ ID NO: 30557 - DNA, 15 bp, Homo sapiens
gtactgcaatggtta

SEQ ID NO: 30558 - DNA, 15 bp, Homo sapiens
tactgcaatggttat

SEQ ID NO: 30559 - DNA, 15 bp, Homo sapiens
actgcaatggttata

SEQ ID NO: 30560 - DNA, 15 bp, Homo sapiens
ctgcaatggttataa

SEQ ID NO: 30561 - DNA, 15 bp, Homo sapiens
tgcaatggttataat

SEQ ID NO: 30562 - DNA, 15 bp, Homo sapiens
gcaatggttataata

SEQ ID NO: 30563 - DNA, 15 bp, Homo sapiens
caatggttataatag

SEQ ID NO: 30564 - DNA, 15 bp, Homo sapiens
aatggttataatagt

SEQ ID NO: 30565 - DNA, 15 bp, Homo sapiens
atggttataatagta

SEQ ID NO: 30566 - DNA, 15 bp, Homo sapiens
tggttataatagtac

SEQ ID NO: 30567 - DNA, 15 bp, Homo sapiens
ggttataatagtacc

SEQ ID NO: 30568 - DNA, 15 bp, Homo sapiens
gttataatagtacct

SEQ ID NO: 30569 - DNA, 15 bp, Homo sapiens
ttataatagtacctt

SEQ ID NO: 30570 - DNA, 15 bp, Homo sapiens
tataatagtaccttc

SEQ ID NO: 30571 - DNA, 15 bp, Homo sapiens
ataatagtaccttcc

SEQ ID NO: 30572 - DNA, 15 bp, Homo sapiens
taatagtaccttcct

SEQ ID NO: 30573 - DNA, 15 bp, Homo sapiens
aatagtaccttcctc

SEQ ID NO: 30574 - DNA, 15 bp, Homo sapiens
atagtaccttcctca

SEQ ID NO: 30575 - DNA, 15 bp, Homo sapiens
tagtaccttcctcag

SEQ ID NO: 30576 - DNA, 15 bp, Homo sapiens
agtaccttcctcagg

SEQ ID NO: 30577 - DNA, 15 bp, Homo sapiens
gtaccttcctcagga

SEQ ID NO: 30578 - DNA, 15 bp, Homo sapiens
taccttcctcaggag

SEQ ID NO: 30579 - DNA, 15 bp, Homo sapiens
accttcctcaggagt

SEQ ID NO: 30580 - DNA, 15 bp, Homo sapiens
ccttcctcaggagtc

SEQ ID NO: 30581 - DNA, 15 bp, Homo sapiens
cttcctcaggagtct

SEQ ID NO: 30582 - DNA, 15 bp, Homo sapiens
ttcctcaggagtctt

SEQ ID NO: 30583 - DNA, 15 bp, Homo sapiens
tcctcaggagtcttt

SEQ ID NO: 30584 - DNA, 15 bp, Homo sapiens
cctcaggagtctttg

SEQ ID NO: 30585 - DNA, 15 bp, Homo sapiens
ctcaggagtctttgt

SEQ ID NO: 30586 - DNA, 15 bp, Homo sapiens
tcaggagtctttgtt

SEQ ID NO: 30587 - DNA, 15 bp, Homo sapiens
caggagtctttgttt

SEQ ID NO: 30588 - DNA, 15 bp, Homo sapiens
aggagtctttgttta

SEQ ID NO: 30589 - DNA, 15 bp, Homo sapiens
ggagtctttgtttag

SEQ ID NO: 30590 - DNA, 15 bp, Homo sapiens
gagtctttgtttaga

SEQ ID NO: 30591 - DNA, 15 bp, Homo sapiens
agtctttgtttagat

SEQ ID NO: 30592 - DNA, 15 bp, Homo sapiens
gtctttgtttagatt

SEQ ID NO: 30593 - DNA, 15 bp, Homo sapiens
tctttgtttagatta

SEQ ID NO: 30594 - DNA, 15 bp, Homo sapiens
ctttgtttagattaa

SEQ ID NO: 30595 - DNA, 15 bp, Homo sapiens
tttgtttagattaaa

SEQ ID NO: 30596 - DNA, 15 bp, Homo sapiens
ttgtttagattaaaa

SEQ ID NO: 30597 - DNA, 15 bp, Homo sapiens
tgtttagattaaaat

SEQ ID NO: 30598 - DNA, 15 bp, Homo sapiens
gtttagattaaaatt

SEQ ID NO: 30599 - DNA, 15 bp, Homo sapiens
tttagattaaaattt

SEQ ID NO: 30600 - DNA, 15 bp, Homo sapiens
ttagattaaaatttt

SEQ ID NO: 30601 - DNA, 15 bp, Homo sapiens
tagattaaaattttt

SEQ ID NO: 30602 - DNA, 15 bp, Homo sapiens
agattaaaattttta

SEQ ID NO: 30603 - DNA, 15 bp, Homo sapiens
gattaaaatttttaa

SEQ ID NO: 30604 - DNA, 15 bp, Homo sapiens
attaaaatttttaac

SEQ ID NO: 30605 - DNA, 15 bp, Homo sapiens
ttaaaatttttaacc

SEQ ID NO: 30606 - DNA, 15 bp, Homo sapiens
taaaatttttaacca

SEQ ID NO: 30607 - DNA, 15 bp, Homo sapiens
aaaatttttaaccac

SEQ ID NO: 30608 - DNA, 15 bp, Homo sapiens
aaatttttaaccaca

SEQ ID NO: 30609 - DNA, 15 bp, Homo sapiens
aatttttaaccacag

SEQ ID NO: 30610 - DNA, 15 bp, Homo sapiens
atttttaaccacagt

SEQ ID NO: 30611 - DNA, 15 bp, Homo sapiens
tttttaaccacagta

SEQ ID NO: 30612 - DNA, 15 bp, Homo sapiens
ttttaaccacagtaa

SEQ ID NO: 30613 - DNA, 15 bp, Homo sapiens
tttaaccacagtaaa

SEQ ID NO: 30614 - DNA, 15 bp, Homo sapiens
ttaaccacagtaaat

SEQ ID NO: 30615 - DNA, 15 bp, Homo sapiens
taaccacagtaaata

SEQ ID NO: 30616 - DNA, 15 bp, Homo sapiens
aaccacagtaaatac

SEQ ID NO: 30617 - DNA, 15 bp, Homo sapiens
accacagtaaatact

SEQ ID NO: 30618 - DNA, 15 bp, Homo sapiens
ccacagtaaatactt

SEQ ID NO: 30619 - DNA, 15 bp, Homo sapiens
cacagtaaatactta

SEQ ID NO: 30620 - DNA, 15 bp, Homo sapiens
acagtaaatacttag

SEQ ID NO: 30621 - DNA, 15 bp, Homo sapiens
cagtaaatacttagc

SEQ ID NO: 30622 - DNA, 15 bp, Homo sapiens
agtaaatacttagca

SEQ ID NO: 30623 - DNA, 15 bp, Homo sapiens
gtaaatacttagcac

SEQ ID NO: 30624 - DNA, 15 bp, Homo sapiens
taaatacttagcaca

SEQ ID NO: 30625 - DNA, 15 bp, Homo sapiens
aaatacttagcacaa

SEQ ID NO: 30626 - DNA, 15 bp, Homo sapiens
aatacttagcacaag

SEQ ID NO: 30627 - DNA, 15 bp, Homo sapiens
atacttagcacaagg

SEQ ID NO: 30628 - DNA, 15 bp, Homo sapiens
tacttagcacaaggc

SEQ ID NO: 30629 - DNA, 15 bp, Homo sapiens
acttagcacaaggcc

SEQ ID NO: 30630 - DNA, 15 bp, Homo sapiens
cttagcacaaggcct

SEQ ID NO: 30631 - DNA, 15 bp, Homo sapiens
ttagcacaaggcctg

SEQ ID NO: 30632 - DNA, 15 bp, Homo sapiens
tagcacaaggcctga

SEQ ID NO: 30633 - DNA, 15 bp, Homo sapiens
agcacaaggcctgac

SEQ ID NO: 30634 - DNA, 15 bp, Homo sapiens
gcacaaggcctgaca

SEQ ID NO: 30635 - DNA, 15 bp, Homo sapiens
cacaaggcctgacac

SEQ ID NO: 30636 - DNA, 15 bp, Homo sapiens
acaaggcctgacaca

SEQ ID NO: 30637 - DNA, 15 bp, Homo sapiens
caaggcctgacacac

SEQ ID NO: 30638 - DNA, 15 bp, Homo sapiens
aaggcctgacacaca

SEQ ID NO: 30639 - DNA, 15 bp, Homo sapiens
aggcctgacacacaa

SEQ ID NO: 30640 - DNA, 15 bp, Homo sapiens
ggcctgacacacaat

SEQ ID NO: 30641 - DNA, 15 bp, Homo sapiens
gcctgacacacaata

SEQ ID NO: 30642 - DNA, 15 bp, Homo sapiens
cctgacacacaataa

SEQ ID NO: 30643 - DNA, 15 bp, Homo sapiens
ctgacacacaataaa

SEQ ID NO: 30644 - DNA, 15 bp, Homo sapiens
tgacacacaataaac

SEQ ID NO: 30645 - DNA, 15 bp, Homo sapiens
gacacacaataaacc

SEQ ID NO: 30646 - DNA, 15 bp, Homo sapiens
acacacaataaaccc

SEQ ID NO: 30647 - DNA, 15 bp, Homo sapiens
cacacaataaaccca

SEQ ID NO: 30648 - DNA, 15 bp, Homo sapiens
acacaataaacccaa

SEQ ID NO: 30649 - DNA, 15 bp, Homo sapiens
cacaataaacccaag

SEQ ID NO: 30650 - DNA, 15 bp, Homo sapiens
acaataaacccaaga

SEQ ID NO: 30651 - DNA, 15 bp, Homo sapiens
caataaacccaagat

SEQ ID NO: 30652 - DNA, 15 bp, Homo sapiens
aataaacccaagatc

SEQ ID NO: 30653 - DNA, 15 bp, Homo sapiens
ataaacccaagatca

SEQ ID NO: 30654 - DNA, 15 bp, Homo sapiens
taaacccaagatcag

SEQ ID NO: 30655 - DNA, 15 bp, Homo sapiens
aaacccaagatcagc

SEQ ID NO: 30656 - DNA, 15 bp, Homo sapiens
aacccaagatcagca

SEQ ID NO: 30657 - DNA, 15 bp, Homo sapiens
acccaagatcagcat

SEQ ID NO: 30658 - DNA, 15 bp, Homo sapiens
cccaagatcagcatt

SEQ ID NO: 30659 - DNA, 15 bp, Homo sapiens
ccaagatcagcatta

SEQ ID NO: 30660 - DNA, 15 bp, Homo sapiens
caagatcagcattag

SEQ ID NO: 30661 - DNA, 15 bp, Homo sapiens
aagatcagcattagg

SEQ ID NO: 30662 - DNA, 15 bp, Homo sapiens
agatcagcattaggt

SEQ ID NO: 30663 - DNA, 15 bp, Homo sapiens
gatcagcattaggtg

SEQ ID NO: 30664 - DNA, 15 bp, Homo sapiens
atcagcattaggtgt

SEQ ID NO: 30665 - DNA, 15 bp, Homo sapiens
tcagcattaggtgtt

SEQ ID NO: 30666 - DNA, 15 bp, Homo sapiens
cagcattaggtgtta

SEQ ID NO: 30667 - DNA, 15 bp, Homo sapiens
agcattaggtgttaa

SEQ ID NO: 30668 - DNA, 15 bp, Homo sapiens
gcattaggtgttaaa

SEQ ID NO: 30669 - DNA, 15 bp, Homo sapiens
cattaggtgttaaaa

SEQ ID NO: 30670 - DNA, 15 bp, Homo sapiens
attaggtgttaaaac

SEQ ID NO: 30671 - DNA, 15 bp, Homo sapiens
ttaggtgttaaaact

SEQ ID NO: 30672 - DNA, 15 bp, Homo sapiens
taggtgttaaaactt

SEQ ID NO: 30673 - DNA, 15 bp, Homo sapiens
aggtgttaaaactta

SEQ ID NO: 30674 - DNA, 15 bp, Homo sapiens
ggtgttaaaacttat

SEQ ID NO: 30675 - DNA, 15 bp, Homo sapiens
gtgttaaaacttata

SEQ ID NO: 30676 - DNA, 15 bp, Homo sapiens
tgttaaaacttatat

SEQ ID NO: 30677 - DNA, 15 bp, Homo sapiens
gttaaaacttatatc

SEQ ID NO: 30678 - DNA, 15 bp, Homo sapiens
ttaaaacttatatct

SEQ ID NO: 30679 - DNA, 15 bp, Homo sapiens
taaaacttatatctt

SEQ ID NO: 30680 - DNA, 15 bp, Homo sapiens
aaaacttatatcttg

SEQ ID NO: 30681 - DNA, 15 bp, Homo sapiens
aaacttatatcttga

SEQ ID NO: 30682 - DNA, 15 bp, Homo sapiens
aacttatatcttgaa

SEQ ID NO: 30683 - DNA, 15 bp, Homo sapiens
acttatatcttgaat

SEQ ID NO: 30684 - DNA, 15 bp, Homo sapiens
cttatatcttgaatg

SEQ ID NO: 30685 - DNA, 15 bp, Homo sapiens
ttatatcttgaatgg

SEQ ID NO: 30686 - DNA, 15 bp, Homo sapiens
tatatcttgaatgga

SEQ ID NO: 30687 - DNA, 15 bp, Homo sapiens
atatcttgaatggat

SEQ ID NO: 30688 - DNA, 15 bp, Homo sapiens
tatcttgaatggatc

SEQ ID NO: 30689 - DNA, 15 bp, Homo sapiens
atcttgaatggatct

SEQ ID NO: 30690 - DNA, 15 bp, Homo sapiens
tcttgaatggatctg

SEQ ID NO: 30691 - DNA, 15 bp, Homo sapiens
cttgaatggatctgg

SEQ ID NO: 30692 - DNA, 15 bp, Homo sapiens
ttgaatggatctggg

SEQ ID NO: 30693 - DNA, 15 bp, Homo sapiens
tgaatggatctgggc

SEQ ID NO: 30694 - DNA, 15 bp, Homo sapiens
gaatggatctgggca

SEQ ID NO: 30695 - DNA, 15 bp, Homo sapiens
aatggatctgggcat

SEQ ID NO: 30696 - DNA, 15 bp, Homo sapiens
atggatctgggcatt

SEQ ID NO: 30697 - DNA, 15 bp, Homo sapiens
tggatctgggcattt

SEQ ID NO: 30698 - DNA, 15 bp, Homo sapiens
ggatctgggcatttt

SEQ ID NO: 30699 - DNA, 15 bp, Homo sapiens
gatctgggcatttta

SEQ ID NO: 30700 - DNA, 15 bp, Homo sapiens
atctgggcattttag

SEQ ID NO: 30701 - DNA, 15 bp, Homo sapiens
tctgggcattttagg

SEQ ID NO: 30702 - DNA, 15 bp, Homo sapiens
ctgggcattttaggg

SEQ ID NO: 30703 - DNA, 15 bp, Homo sapiens
tgggcattttagggt

SEQ ID NO: 30704 - DNA, 15 bp, Homo sapiens
gggcattttagggta

SEQ ID NO: 30705 - DNA, 15 bp, Homo sapiens
ggcattttagggtat

SEQ ID NO: 30706 - DNA, 15 bp, Homo sapiens
gcattttagggtata

SEQ ID NO: 30707 - DNA, 15 bp, Homo sapiens
cattttagggtatat

SEQ ID NO: 30708 - DNA, 15 bp, Homo sapiens
attttagggtatatg

SEQ ID NO: 30709 - DNA, 15 bp, Homo sapiens
ttttagggtatatga

SEQ ID NO: 30710 - DNA, 15 bp, Homo sapiens
tttagggtatatgat

SEQ ID NO: 30711 - DNA, 15 bp, Homo sapiens
ttagggtatatgatg

SEQ ID NO: 30712 - DNA, 15 bp, Homo sapiens
tagggtatatgatga

SEQ ID NO: 30713 - DNA, 15 bp, Homo sapiens
agggtatatgatgat

SEQ ID NO: 30714 - DNA, 15 bp, Homo sapiens
gggtatatgatgatg

SEQ ID NO: 30715 - DNA, 15 bp, Homo sapiens
ggtatatgatgatgg

SEQ ID NO: 30716 - DNA, 15 bp, Homo sapiens
gtatatgatgatggt

SEQ ID NO: 30717 - DNA, 15 bp, Homo sapiens
tatatgatgatggtg

SEQ ID NO: 30718 - DNA, 15 bp, Homo sapiens
atatgatgatggtga

SEQ ID NO: 30719 - DNA, 15 bp, Homo sapiens
tatgatgatggtgac

SEQ ID NO: 30720 - DNA, 15 bp, Homo sapiens
atgatgatggtgaca

SEQ ID NO: 30721 - DNA, 15 bp, Homo sapiens
tgatgatggtgacat

SEQ ID NO: 30722 - DNA, 15 bp, Homo sapiens
gatgatggtgacatt

SEQ ID NO: 30723 - DNA, 15 bp, Homo sapiens
atgatggtgacattt

SEQ ID NO: 30724 - DNA, 15 bp, Homo sapiens
tgatggtgacatttc

SEQ ID NO: 30725 - DNA, 15 bp, Homo sapiens
gatggtgacatttca

SEQ ID NO: 30726 - DNA, 15 bp, Homo sapiens
atggtgacatttcaa

SEQ ID NO: 30727 - DNA, 15 bp, Homo sapiens
tggtgacatttcaaa

SEQ ID NO: 30728 - DNA, 15 bp, Homo sapiens
ggtgacatttcaaac

SEQ ID NO: 30729 - DNA, 15 bp, Homo sapiens
gtgacatttcaaact

SEQ ID NO: 30730 - DNA, 15 bp, Homo sapiens
tgacatttcaaactg

SEQ ID NO: 30731 - DNA, 15 bp, Homo sapiens
gacatttcaaactgg

SEQ ID NO: 30732 - DNA, 15 bp, Homo sapiens
acatttcaaactggg

SEQ ID NO: 30733 - DNA, 15 bp, Homo sapiens
catttcaaactgggc

SEQ ID NO: 30734 - DNA, 15 bp, Homo sapiens
atttcaaactgggca

SEQ ID NO: 30735 - DNA, 15 bp, Homo sapiens
tttcaaactgggcag

SEQ ID NO: 30736 - DNA, 15 bp, Homo sapiens
ttcaaactgggcagg

SEQ ID NO: 30737 - DNA, 15 bp, Homo sapiens
tcaaactgggcaggg

SEQ ID NO: 30738 - DNA, 15 bp, Homo sapiens
caaactgggcaggga

SEQ ID NO: 30739 - DNA, 15 bp, Homo sapiens
aaactgggcagggag

SEQ ID NO: 30740 - DNA, 15 bp, Homo sapiens
aactgggcagggagg

SEQ ID NO: 30741 - DNA, 15 bp, Homo sapiens
actgggcagggaggg

SEQ ID NO: 30742 - DNA, 15 bp, Homo sapiens
ctgggcagggagggg

SEQ ID NO: 30743 - DNA, 15 bp, Homo sapiens
tgggcagggaggggt

SEQ ID NO: 30744 - DNA, 15 bp, Homo sapiens
gggcagggaggggtt

SEQ ID NO: 30745 - DNA, 15 bp, Homo sapiens
ggcagggaggggttg

SEQ ID NO: 30746 - DNA, 15 bp, Homo sapiens
gcagggaggggttgt

SEQ ID NO: 30747 - DNA, 15 bp, Homo sapiens
cagggaggggttgtt

SEQ ID NO: 30748 - DNA, 15 bp, Homo sapiens
agggaggggttgttg

SEQ ID NO: 30749 - DNA, 15 bp, Homo sapiens
gggaggggttgttgg

SEQ ID NO: 30750 - DNA, 15 bp, Homo sapiens
ggaggggttgttggg

SEQ ID NO: 30751 - DNA, 15 bp, Homo sapiens
gaggggttgttggga

SEQ ID NO: 30752 - DNA, 15 bp, Homo sapiens
aggggttgttgggat

SEQ ID NO: 30753 - DNA, 15 bp, Homo sapiens
ggggttgttgggata

SEQ ID NO: 30754 - DNA, 15 bp, Homo sapiens
gggttgttgggataa

SEQ ID NO: 30755 - DNA, 15 bp, Homo sapiens
ggttgttgggataat

SEQ ID NO: 30756 - DNA, 15 bp, Homo sapiens
gttgttgggataatg

SEQ ID NO: 30757 - DNA, 15 bp, Homo sapiens
ttgttgggataatgg

SEQ ID NO: 30758 - DNA, 15 bp, Homo sapiens
tgttgggataatgga

SEQ ID NO: 30759 - DNA, 15 bp, Homo sapiens
gttgggataatggac

SEQ ID NO: 30760 - DNA, 15 bp, Homo sapiens
ttgggataatggact

SEQ ID NO: 30761 - DNA, 15 bp, Homo sapiens
tgggataatggactg

SEQ ID NO: 30762 - DNA, 15 bp, Homo sapiens
gggataatggactga

SEQ ID NO: 30763 - DNA, 15 bp, Homo sapiens
ggataatggactgac

SEQ ID NO: 30764 - DNA, 15 bp, Homo sapiens
gataatggactgact

SEQ ID NO: 30765 - DNA, 15 bp, Homo sapiens
ataatggactgacta

SEQ ID NO: 30766 - DNA, 15 bp, Homo sapiens
taatggactgactat

SEQ ID NO: 30767 - DNA, 15 bp, Homo sapiens
aatggactgactatt

SEQ ID NO: 30768 - DNA, 15 bp, Homo sapiens
atggactgactattc

SEQ ID NO: 30769 - DNA, 15 bp, Homo sapiens
tggactgactattca

SEQ ID NO: 30770 - DNA, 15 bp, Homo sapiens
ggactgactattcac

SEQ ID NO: 30771 - DNA, 15 bp, Homo sapiens
gactgactattcact

SEQ ID NO: 30772 - DNA, 15 bp, Homo sapiens
actgactattcactc

SEQ ID NO: 30773 - DNA, 15 bp, Homo sapiens
ctgactattcactca

SEQ ID NO: 30774 - DNA, 15 bp, Homo sapiens
tgactattcactcaa

SEQ ID NO: 30775 - DNA, 15 bp, Homo sapiens
gactattcactcaat

SEQ ID NO: 30776 - DNA, 15 bp, Homo sapiens
actattcactcaata

SEQ ID NO: 30777 - DNA, 15 bp, Homo sapiens
ctattcactcaataa

SEQ ID NO: 30778 - DNA, 15 bp, Homo sapiens
tattcactcaataac

SEQ ID NO: 30779 - DNA, 15 bp, Homo sapiens
attcactcaataact

SEQ ID NO: 30780 - DNA, 15 bp, Homo sapiens
ttcactcaataactt

SEQ ID NO: 30781 - DNA, 15 bp, Homo sapiens
tcactcaataacttt

SEQ ID NO: 30782 - DNA, 15 bp, Homo sapiens
cactcaataacttta

SEQ ID NO: 30783 - DNA, 15 bp, Homo sapiens
actcaataactttat

SEQ ID NO: 30784 - DNA, 15 bp, Homo sapiens
ctcaataactttatc

SEQ ID NO: 30785 - DNA, 15 bp, Homo sapiens
tcaataactttatct

SEQ ID NO: 30786 - DNA, 15 bp, Homo sapiens
caataactttatctt

SEQ ID NO: 30787 - DNA, 15 bp, Homo sapiens
aataactttatcttc

SEQ ID NO: 30788 - DNA, 15 bp, Homo sapiens
ataactttatcttct

SEQ ID NO: 30789 - DNA, 15 bp, Homo sapiens
taactttatcttctc

SEQ ID NO: 30790 - DNA, 15 bp, Homo sapiens
aactttatcttctcc

SEQ ID NO: 30791 - DNA, 15 bp, Homo sapiens
actttatcttctccc

SEQ ID NO: 30792 - DNA, 15 bp, Homo sapiens
ctttatcttctccct

SEQ ID NO: 30793 - DNA, 15 bp, Homo sapiens
tttatcttctcccta

SEQ ID NO: 30794 - DNA, 15 bp, Homo sapiens
ttatcttctccctaa

SEQ ID NO: 30795 - DNA, 15 bp, Homo sapiens
tatcttctccctaat

SEQ ID NO: 30796 - DNA, 15 bp, Homo sapiens
atcttctccctaatt

SEQ ID NO: 30797 - DNA, 15 bp, Homo sapiens
tcttctccctaatta

SEQ ID NO: 30798 - DNA, 15 bp, Homo sapiens
cttctccctaattat

SEQ ID NO: 30799 - DNA, 15 bp, Homo sapiens
ttctccctaattatc

SEQ ID NO: 30800 - DNA, 15 bp, Homo sapiens
tctccctaattatct

SEQ ID NO: 30801 - DNA, 15 bp, Homo sapiens
ctccctaattatctc

SEQ ID NO: 30802 - DNA, 15 bp, Homo sapiens
tccctaattatctca

SEQ ID NO: 30803 - DNA, 15 bp, Homo sapiens
ccctaattatctcag

SEQ ID NO: 30804 - DNA, 15 bp, Homo sapiens
cctaattatctcaga

SEQ ID NO: 30805 - DNA, 15 bp, Homo sapiens
ctaattatctcagac

SEQ ID NO: 30806 - DNA, 15 bp, Homo sapiens
taattatctcagaca

SEQ ID NO: 30807 - DNA, 15 bp, Homo sapiens
aattatctcagacac

SEQ ID NO: 30808 - DNA, 15 bp, Homo sapiens
attatctcagacaca

SEQ ID NO: 30809 - DNA, 15 bp, Homo sapiens
ttatctcagacacat

SEQ ID NO: 30810 - DNA, 15 bp, Homo sapiens
tatctcagacacatt

SEQ ID NO: 30811 - DNA, 15 bp, Homo sapiens
atctcagacacattt

SEQ ID NO: 30812 - DNA, 15 bp, Homo sapiens
tctcagacacatttg

SEQ ID NO: 30813 - DNA, 15 bp, Homo sapiens
ctcagacacatttgt

SEQ ID NO: 30814 - DNA, 15 bp, Homo sapiens
tcagacacatttgtt

SEQ ID NO: 30815 - DNA, 15 bp, Homo sapiens
cagacacatttgtta

SEQ ID NO: 30816 - DNA, 15 bp, Homo sapiens
agacacatttgttaa

SEQ ID NO: 30817 - DNA, 15 bp, Homo sapiens
gacacatttgttaaa

SEQ ID NO: 30818 - DNA, 15 bp, Homo sapiens
acacatttgttaaac

SEQ ID NO: 30819 - DNA, 15 bp, Homo sapiens
cacatttgttaaacc

SEQ ID NO: 30820 - DNA, 15 bp, Homo sapiens
acatttgttaaacca

SEQ ID NO: 30821 - DNA, 15 bp, Homo sapiens
catttgttaaaccat

SEQ ID NO: 30822 - DNA, 15 bp, Homo sapiens
atttgttaaaccata

SEQ ID NO: 30823 - DNA, 15 bp, Homo sapiens
tttgttaaaccatac

SEQ ID NO: 30824 - DNA, 15 bp, Homo sapiens
ttgttaaaccatact

SEQ ID NO: 30825 - DNA, 15 bp, Homo sapiens
tgttaaaccatactc

SEQ ID NO: 30826 - DNA, 15 bp, Homo sapiens
gttaaaccatactcc

SEQ ID NO: 30827 - DNA, 15 bp, Homo sapiens
ttaaaccatactcca

SEQ ID NO: 30828 - DNA, 15 bp, Homo sapiens
taaaccatactccat

SEQ ID NO: 30829 - DNA, 15 bp, Homo sapiens
aaaccatactccatg

SEQ ID NO: 30830 - DNA, 15 bp, Homo sapiens
aaccatactccatgg

SEQ ID NO: 30831 - DNA, 15 bp, Homo sapiens
accatactccatggt

SEQ ID NO: 30832 - DNA, 15 bp, Homo sapiens
ccatactccatggtc

SEQ ID NO: 30833 - DNA, 15 bp, Homo sapiens
catactccatggtcc

SEQ ID NO: 30834 - DNA, 15 bp, Homo sapiens
atactccatggtcct

SEQ ID NO: 30835 - DNA, 15 bp, Homo sapiens
tactccatggtcctc

SEQ ID NO: 30836 - DNA, 15 bp, Homo sapiens
actccatggtcctcc

SEQ ID NO: 30837 - DNA, 15 bp, Homo sapiens
ctccatggtcctcca

SEQ ID NO: 30838 - DNA, 15 bp, Homo sapiens
tccatggtcctccag

SEQ ID NO: 30839 - DNA, 15 bp, Homo sapiens
ccatggtcctccagt

SEQ ID NO: 30840 - DNA, 15 bp, Homo sapiens
catggtcctccagtt

SEQ ID NO: 30841 - DNA, 15 bp, Homo sapiens
atggtcctccagttt

SEQ ID NO: 30842 - DNA, 15 bp, Homo sapiens
tggtcctccagtttg

SEQ ID NO: 30843 - DNA, 15 bp, Homo sapiens
ggtcctccagtttga

SEQ ID NO: 30844 - DNA, 15 bp, Homo sapiens
gtcctccagtttgaa

SEQ ID NO: 30845 - DNA, 15 bp, Homo sapiens
tcctccagtttgaaa

SEQ ID NO: 30846 - DNA, 15 bp, Homo sapiens
cctccagtttgaaat

SEQ ID NO: 30847 - DNA, 15 bp, Homo sapiens
ctccagtttgaaatg

SEQ ID NO: 30848 - DNA, 15 bp, Homo sapiens
tccagtttgaaatgc

SEQ ID NO: 30849 - DNA, 15 bp, Homo sapiens
ccagtttgaaatgcc

SEQ ID NO: 30850 - DNA, 15 bp, Homo sapiens
cagtttgaaatgcca

SEQ ID NO: 30851 - DNA, 15 bp, Homo sapiens
agtttgaaatgccac

SEQ ID NO: 30852 - DNA, 15 bp, Homo sapiens
gtttgaaatgccaca

SEQ ID NO: 30853 - DNA, 15 bp, Homo sapiens
tttgaaatgccacat

SEQ ID NO: 30854 - DNA, 15 bp, Homo sapiens
ttgaaatgccacatt

SEQ ID NO: 30855 - DNA, 15 bp, Homo sapiens
tgaaatgccacattc

SEQ ID NO: 30856 - DNA, 15 bp, Homo sapiens
gaaatgccacattca

SEQ ID NO: 30857 - DNA, 15 bp, Homo sapiens
aaatgccacattcat

SEQ ID NO: 30858 - DNA, 15 bp, Homo sapiens
aatgccacattcatc

SEQ ID NO: 30859 - DNA, 15 bp, Homo sapiens
atgccacattcatca

SEQ ID NO: 30860 - DNA, 15 bp, Homo sapiens
tgccacattcatcac

SEQ ID NO: 30861 - DNA, 15 bp, Homo sapiens
gccacattcatcaca

SEQ ID NO: 30862 - DNA, 15 bp, Homo sapiens
ccacattcatcacaa

SEQ ID NO: 30863 - DNA, 15 bp, Homo sapiens
cacattcatcacaaa

SEQ ID NO: 30864 - DNA, 15 bp, Homo sapiens
acattcatcacaaat

SEQ ID NO: 30865 - DNA, 15 bp, Homo sapiens
cattcatcacaaatt

SEQ ID NO: 30866 - DNA, 15 bp, Homo sapiens
attcatcacaaattc

SEQ ID NO: 30867 - DNA, 15 bp, Homo sapiens
ttcatcacaaattca

SEQ ID NO: 30868 - DNA, 15 bp, Homo sapiens
tcatcacaaattcag

SEQ ID NO: 30869 - DNA, 15 bp, Homo sapiens
catcacaaattcagt

SEQ ID NO: 30870 - DNA, 15 bp, Homo sapiens
atcacaaattcagtt

SEQ ID NO: 30871 - DNA, 15 bp, Homo sapiens
tcacaaattcagttc

SEQ ID NO: 30872 - DNA, 15 bp, Homo sapiens
cacaaattcagttct

SEQ ID NO: 30873 - DNA, 15 bp, Homo sapiens
acaaattcagttctc

SEQ ID NO: 30874 - DNA, 15 bp, Homo sapiens
caaattcagttctct

SEQ ID NO: 30875 - DNA, 15 bp, Homo sapiens
aaattcagttctctc

SEQ ID NO: 30876 - DNA, 15 bp, Homo sapiens
aattcagttctctcc

SEQ ID NO: 30877 - DNA, 15 bp, Homo sapiens
attcagttctctcca

SEQ ID NO: 30878 - DNA, 15 bp, Homo sapiens
ttcagttctctccat

SEQ ID NO: 30879 - DNA, 15 bp, Homo sapiens
tcagttctctccata

SEQ ID NO: 30880 - DNA, 15 bp, Homo sapiens
cagttctctccatat

SEQ ID NO: 30881 - DNA, 15 bp, Homo sapiens
agttctctccatatg

SEQ ID NO: 30882 - DNA, 15 bp, Homo sapiens
gttctctccatatgt

SEQ ID NO: 30883 - DNA, 15 bp, Homo sapiens
ttctctccatatgtg

SEQ ID NO: 30884 - DNA, 15 bp, Homo sapiens
tctctccatatgtgg

SEQ ID NO: 30885 - DNA, 15 bp, Homo sapiens
ctctccatatgtggg

SEQ ID NO: 30886 - DNA, 15 bp, Homo sapiens
tctccatatgtgggt

SEQ ID NO: 30887 - DNA, 15 bp, Homo sapiens
ctccatatgtgggtc

SEQ ID NO: 30888 - DNA, 15 bp, Homo sapiens
tccatatgtgggtcc

SEQ ID NO: 30889 - DNA, 15 bp, Homo sapiens
ccatatgtgggtcca

SEQ ID NO: 30890 - DNA, 15 bp, Homo sapiens
catatgtgggtccat

SEQ ID NO: 30891 - DNA, 15 bp, Homo sapiens
atatgtgggtccatg

SEQ ID NO: 30892 - DNA, 15 bp, Homo sapiens
tatgtgggtccatgt

SEQ ID NO: 30893 - DNA, 15 bp, Homo sapiens
atgtgggtccatgtc

SEQ ID NO: 30894 - DNA, 15 bp, Homo sapiens
tgtgggtccatgtcc

SEQ ID NO: 30895 - DNA, 15 bp, Homo sapiens
gtgggtccatgtcca

SEQ ID NO: 30896 - DNA, 15 bp, Homo sapiens
tgggtccatgtccaa

SEQ ID NO: 30897 - DNA, 15 bp, Homo sapiens
gggtccatgtccaag

SEQ ID NO: 30898 - DNA, 15 bp, Homo sapiens
ggtccatgtccaagc

SEQ ID NO: 30899 - DNA, 15 bp, Homo sapiens
gtccatgtccaagct

SEQ ID NO: 30900 - DNA, 15 bp, Homo sapiens
tccatgtccaagctt

SEQ ID NO: 30901 - DNA, 15 bp, Homo sapiens
ccatgtccaagcttt

SEQ ID NO: 30902 - DNA, 15 bp, Homo sapiens
catgtccaagctttc

SEQ ID NO: 30903 - DNA, 15 bp, Homo sapiens
atgtccaagctttct

SEQ ID NO: 30904 - DNA, 15 bp, Homo sapiens
tgtccaagctttcta

SEQ ID NO: 30905 - DNA, 15 bp, Homo sapiens
gtccaagctttctat

SEQ ID NO: 30906 - DNA, 15 bp, Homo sapiens
tccaagctttctatt

SEQ ID NO: 30907 - DNA, 15 bp, Homo sapiens
ccaagctttctattc

SEQ ID NO: 30908 - DNA, 15 bp, Homo sapiens
caagctttctattct

SEQ ID NO: 30909 - DNA, 15 bp, Homo sapiens
aagctttctattctg

SEQ ID NO: 30910 - DNA, 15 bp, Homo sapiens
agctttctattctgt

SEQ ID NO: 30911 - DNA, 15 bp, Homo sapiens
gctttctattctgtt

SEQ ID NO: 30912 - DNA, 15 bp, Homo sapiens
ctttctattctgttc

SEQ ID NO: 30913 - DNA, 15 bp, Homo sapiens
tttctattctgttct

SEQ ID NO: 30914 - DNA, 15 bp, Homo sapiens
ttctattctgttctc

SEQ ID NO: 30915 - DNA, 15 bp, Homo sapiens
tctattctgttctct

SEQ ID NO: 30916 - DNA, 15 bp, Homo sapiens
ctattctgttctctt

SEQ ID NO: 30917 - DNA, 15 bp, Homo sapiens
tattctgttctcttc

SEQ ID NO: 30918 - DNA, 15 bp, Homo sapiens
attctgttctcttcc

SEQ ID NO: 30919 - DNA, 15 bp, Homo sapiens
ttctgttctcttccc

SEQ ID NO: 30920 - DNA, 15 bp, Homo sapiens
tctgttctcttcccc

SEQ ID NO: 30921 - DNA, 15 bp, Homo sapiens
ctgttctcttcccca

SEQ ID NO: 30922 - DNA, 15 bp, Homo sapiens
tgttctcttccccag

SEQ ID NO: 30923 - DNA, 15 bp, Homo sapiens
gttctcttccccagt

SEQ ID NO: 30924 - DNA, 15 bp, Homo sapiens
ttctcttccccagta

SEQ ID NO: 30925 - DNA, 15 bp, Homo sapiens
tctcttccccagtat

SEQ ID NO: 30926 - DNA, 15 bp, Homo sapiens
ctcttccccagtatc

SEQ ID NO: 30927 - DNA, 15 bp, Homo sapiens
tcttccccagtatct

SEQ ID NO: 30928 - DNA, 15 bp, Homo sapiens
cttccccagtatctg

SEQ ID NO: 30929 - DNA, 15 bp, Homo sapiens
ttccccagtatctgt

SEQ ID NO: 30930 - DNA, 15 bp, Homo sapiens
tccccagtatctgtt

SEQ ID NO: 30931 - DNA, 15 bp, Homo sapiens
ccccagtatctgttc

SEQ ID NO: 30932 - DNA, 15 bp, Homo sapiens
cccagtatctgttct

SEQ ID NO: 30933 - DNA, 15 bp, Homo sapiens
ccagtatctgttctt

SEQ ID NO: 30934 - DNA, 15 bp, Homo sapiens
cagtatctgttctta

SEQ ID NO: 30935 - DNA, 15 bp, Homo sapiens
agtatctgttcttat

SEQ ID NO: 30936 - DNA, 15 bp, Homo sapiens
gtatctgttcttata

SEQ ID NO: 30937 - DNA, 15 bp, Homo sapiens
tatctgttcttatac

SEQ ID NO: 30938 - DNA, 15 bp, Homo sapiens
atctgttcttatacc

SEQ ID NO: 30939 - DNA, 15 bp, Homo sapiens
tctgttcttatacca

SEQ ID NO: 30940 - DNA, 15 bp, Homo sapiens
ctgttcttataccag

SEQ ID NO: 30941 - DNA, 15 bp, Homo sapiens
tgttcttataccagg

SEQ ID NO: 30942 - DNA, 15 bp, Homo sapiens
gttcttataccaggg

SEQ ID NO: 30943 - DNA, 15 bp, Homo sapiens
ttcttataccagggc

SEQ ID NO: 30944 - DNA, 15 bp, Homo sapiens
tcttataccagggcc

SEQ ID NO: 30945 - DNA, 15 bp, Homo sapiens
cttataccagggcca

SEQ ID NO: 30946 - DNA, 15 bp, Homo sapiens
ttataccagggccac

SEQ ID NO: 30947 - DNA, 15 bp, Homo sapiens
tataccagggccaca

SEQ ID NO: 30948 - DNA, 15 bp, Homo sapiens
ataccagggccacac

SEQ ID NO: 30949 - DNA, 15 bp, Homo sapiens
taccagggccacact

SEQ ID NO: 30950 - DNA, 15 bp, Homo sapiens
accagggccacactg

SEQ ID NO: 30951 - DNA, 15 bp, Homo sapiens
ccagggccacactgt

SEQ ID NO: 30952 - DNA, 15 bp, Homo sapiens
cagggccacactgtt

SEQ ID NO: 30953 - DNA, 15 bp, Homo sapiens
agggccacactgttt

SEQ ID NO: 30954 - DNA, 15 bp, Homo sapiens
gggccacactgtttt

SEQ ID NO: 30955 - DNA, 15 bp, Homo sapiens
ggccacactgttttg

SEQ ID NO: 30956 - DNA, 15 bp, Homo sapiens
gccacactgttttgc

SEQ ID NO: 30957 - DNA, 15 bp, Homo sapiens
ccacactgttttgct

SEQ ID NO: 30958 - DNA, 15 bp, Homo sapiens
cacactgttttgctg

SEQ ID NO: 30959 - DNA, 15 bp, Homo sapiens
acactgttttgctga

SEQ ID NO: 30960 - DNA, 15 bp, Homo sapiens
cactgttttgctgat

SEQ ID NO: 30961 - DNA, 15 bp, Homo sapiens
actgttttgctgatt

SEQ ID NO: 30962 - DNA, 15 bp, Homo sapiens
ctgttttgctgattg

SEQ ID NO: 30963 - DNA, 15 bp, Homo sapiens
tgttttgctgattgt

SEQ ID NO: 30964 - DNA, 15 bp, Homo sapiens
gttttgctgattgtt

SEQ ID NO: 30965 - DNA, 15 bp, Homo sapiens
ttttgctgattgttg

SEQ ID NO: 30966 - DNA, 15 bp, Homo sapiens
tttgctgattgttgc

SEQ ID NO: 30967 - DNA, 15 bp, Homo sapiens
ttgctgattgttgct

SEQ ID NO: 30968 - DNA, 15 bp, Homo sapiens
tgctgattgttgctt

SEQ ID NO: 30969 - DNA, 15 bp, Homo sapiens
gctgattgttgcttt

SEQ ID NO: 30970 - DNA, 15 bp, Homo sapiens
ctgattgttgctttg

SEQ ID NO: 30971 - DNA, 15 bp, Homo sapiens
tgattgttgctttgc

SEQ ID NO: 30972 - DNA, 15 bp, Homo sapiens
gattgttgctttgca

SEQ ID NO: 30973 - DNA, 15 bp, Homo sapiens
attgttgctttgcaa

SEQ ID NO: 30974 - DNA, 15 bp, Homo sapiens
ttgttgctttgcaat

SEQ ID NO: 30975 - DNA, 15 bp, Homo sapiens
tgttgctttgcaata

SEQ ID NO: 30976 - DNA, 15 bp, Homo sapiens
gttgctttgcaatac

SEQ ID NO: 30977 - DNA, 15 bp, Homo sapiens
ttgctttgcaataca

SEQ ID NO: 30978 - DNA, 15 bp, Homo sapiens
tgctttgcaatacaa

SEQ ID NO: 30979 - DNA, 15 bp, Homo sapiens
gctttgcaatacaat

SEQ ID NO: 30980 - DNA, 15 bp, Homo sapiens
ctttgcaatacaatt

SEQ ID NO: 30981 - DNA, 15 bp, Homo sapiens
tttgcaatacaattc

SEQ ID NO: 30982 - DNA, 15 bp, Homo sapiens
ttgcaatacaattca

SEQ ID NO: 30983 - DNA, 15 bp, Homo sapiens
tgcaatacaattcaa

SEQ ID NO: 30984 - DNA, 15 bp, Homo sapiens
gcaatacaattcaat

SEQ ID NO: 30985 - DNA, 15 bp, Homo sapiens
caatacaattcaata

SEQ ID NO: 30986 - DNA, 15 bp, Homo sapiens
aatacaattcaatac

SEQ ID NO: 30987 - DNA, 15 bp, Homo sapiens
atacaattcaatacc

SEQ ID NO: 30988 - DNA, 15 bp, Homo sapiens
tacaattcaataccc

SEQ ID NO: 30989 - DNA, 15 bp, Homo sapiens
acaattcaataccca

SEQ ID NO: 30990 - DNA, 15 bp, Homo sapiens
caattcaatacccag

SEQ ID NO: 30991 - DNA, 15 bp, Homo sapiens
aattcaatacccagc

SEQ ID NO: 30992 - DNA, 15 bp, Homo sapiens
attcaatacccagcc

SEQ ID NO: 30993 - DNA, 15 bp, Homo sapiens
ttcaatacccagcca

SEQ ID NO: 30994 - DNA, 15 bp, Homo sapiens
tcaatacccagccat

SEQ ID NO: 30995 - DNA, 15 bp, Homo sapiens
caatacccagccatg

SEQ ID NO: 30996 - DNA, 15 bp, Homo sapiens
aatacccagccatgg

SEQ ID NO: 30997 - DNA, 15 bp, Homo sapiens
atacccagccatggg

SEQ ID NO: 30998 - DNA, 15 bp, Homo sapiens
tacccagccatgggt

SEQ ID NO: 30999 - DNA, 15 bp, Homo sapiens
acccagccatgggtg

SEQ ID NO: 31000 - DNA, 15 bp, Homo sapiens
cccagccatgggtgt

SEQ ID NO: 31001 - DNA, 15 bp, Homo sapiens
ccagccatgggtgtc

SEQ ID NO: 31002 - DNA, 15 bp, Homo sapiens
cagccatgggtgtcc

SEQ ID NO: 31003 - DNA, 15 bp, Homo sapiens
agccatgggtgtccc

SEQ ID NO: 31004 - DNA, 15 bp, Homo sapiens
gccatgggtgtccct

SEQ ID NO: 31005 - DNA, 15 bp, Homo sapiens
ccatgggtgtccctg

SEQ ID NO: 31006 - DNA, 15 bp, Homo sapiens
catgggtgtccctgg

SEQ ID NO: 31007 - DNA, 15 bp, Homo sapiens
atgggtgtccctggc

SEQ ID NO: 31008 - DNA, 15 bp, Homo sapiens
tgggtgtccctggca

SEQ ID NO: 31009 - DNA, 15 bp, Homo sapiens
gggtgtccctggcac

SEQ ID NO: 31010 - DNA, 15 bp, Homo sapiens
ggtgtccctggcacc

SEQ ID NO: 31011 - DNA, 15 bp, Homo sapiens
gtgtccctggcacct

SEQ ID NO: 31012 - DNA, 15 bp, Homo sapiens
tgtccctggcacctt

SEQ ID NO: 31013 - DNA, 15 bp, Homo sapiens
gtccctggcaccttg

SEQ ID NO: 31014 - DNA, 15 bp, Homo sapiens
tccctggcaccttgc

SEQ ID NO: 31015 - DNA, 15 bp, Homo sapiens
ccctggcaccttgcc

SEQ ID NO: 31016 - DNA, 15 bp, Homo sapiens
cctggcaccttgccc

SEQ ID NO: 31017 - DNA, 15 bp, Homo sapiens
ctggcaccttgccct

SEQ ID NO: 31018 - DNA, 15 bp, Homo sapiens
tggcaccttgccctt

SEQ ID NO: 31019 - DNA, 15 bp, Homo sapiens
ggcaccttgcccttc

SEQ ID NO: 31020 - DNA, 15 bp, Homo sapiens
gcaccttgcccttct

SEQ ID NO: 31021 - DNA, 15 bp, Homo sapiens
caccttgcccttctt

SEQ ID NO: 31022 - DNA, 15 bp, Homo sapiens
accttgcccttcttt

SEQ ID NO: 31023 - DNA, 15 bp, Homo sapiens
ccttgcccttcttta

SEQ ID NO: 31024 - DNA, 15 bp, Homo sapiens
cttgcccttctttat

SEQ ID NO: 31025 - DNA, 15 bp, Homo sapiens
ttgcccttctttatt

SEQ ID NO: 31026 - DNA, 15 bp, Homo sapiens
tgcccttctttattc

SEQ ID NO: 31027 - DNA, 15 bp, Homo sapiens
gcccttctttattct

SEQ ID NO: 31028 - DNA, 15 bp, Homo sapiens
cccttctttattctt

SEQ ID NO: 31029 - DNA, 15 bp, Homo sapiens
ccttctttattcttg

SEQ ID NO: 31030 - DNA, 15 bp, Homo sapiens
cttctttattcttga

SEQ ID NO: 31031 - DNA, 15 bp, Homo sapiens
ttctttattcttgat

SEQ ID NO: 31032 - DNA, 15 bp, Homo sapiens
tctttattcttgatt

SEQ ID NO: 31033 - DNA, 15 bp, Homo sapiens
ctttattcttgatta

SEQ ID NO: 31034 - DNA, 15 bp, Homo sapiens
tttattcttgattat

SEQ ID NO: 31035 - DNA, 15 bp, Homo sapiens
ttattcttgattatt

SEQ ID NO: 31036 - DNA, 15 bp, Homo sapiens
tattcttgattattt

SEQ ID NO: 31037 - DNA, 15 bp, Homo sapiens
attcttgattatttc

SEQ ID NO: 31038 - DNA, 15 bp, Homo sapiens
ttcttgattatttca

SEQ ID NO: 31039 - DNA, 15 bp, Homo sapiens
tcttgattatttcag

SEQ ID NO: 31040 - DNA, 15 bp, Homo sapiens
cttgattatttcagg

SEQ ID NO: 31041 - DNA, 15 bp, Homo sapiens
ttgattatttcaggc

SEQ ID NO: 31042 - DNA, 15 bp, Homo sapiens
tgattatttcaggca

SEQ ID NO: 31043 - DNA, 15 bp, Homo sapiens
gattatttcaggcag

SEQ ID NO: 31044 - DNA, 15 bp, Homo sapiens
attatttcaggcagc

SEQ ID NO: 31045 - DNA, 15 bp, Homo sapiens
ttatttcaggcagca

SEQ ID NO: 31046 - DNA, 15 bp, Homo sapiens
tatttcaggcagcat

SEQ ID NO: 31047 - DNA, 15 bp, Homo sapiens
atttcaggcagcatc

SEQ ID NO: 31048 - DNA, 15 bp, Homo sapiens
tttcaggcagcatca

SEQ ID NO: 31049 - DNA, 15 bp, Homo sapiens
ttcaggcagcatcag

SEQ ID NO: 31050 - DNA, 15 bp, Homo sapiens
tcaggcagcatcagt

SEQ ID NO: 31051 - DNA, 15 bp, Homo sapiens
caggcagcatcagtt

SEQ ID NO: 31052 - DNA, 15 bp, Homo sapiens
aggcagcatcagttg

SEQ ID NO: 31053 - DNA, 15 bp, Homo sapiens
ggcagcatcagttga

SEQ ID NO: 31054 - DNA, 15 bp, Homo sapiens
gcagcatcagttgaa

SEQ ID NO: 31055 - DNA, 15 bp, Homo sapiens
cagcatcagttgaac

SEQ ID NO: 31056 - DNA, 15 bp, Homo sapiens
agcatcagttgaacc

SEQ ID NO: 31057 - DNA, 15 bp, Homo sapiens
gcatcagttgaacca

SEQ ID NO: 31058 - DNA, 15 bp, Homo sapiens
catcagttgaaccag

SEQ ID NO: 31059 - DNA, 15 bp, Homo sapiens
atcagttgaaccagc

SEQ ID NO: 31060 - DNA, 15 bp, Homo sapiens
tcagttgaaccagcc

SEQ ID NO: 31061 - DNA, 15 bp, Homo sapiens
cagttgaaccagcca

SEQ ID NO: 31062 - DNA, 15 bp, Homo sapiens
agttgaaccagccag

SEQ ID NO: 31063 - DNA, 15 bp, Homo sapiens
gttgaaccagccaga

SEQ ID NO: 31064 - DNA, 15 bp, Homo sapiens
ttgaaccagccagag

SEQ ID NO: 31065 - DNA, 15 bp, Homo sapiens
tgaaccagccagaga

SEQ ID NO: 31066 - DNA, 15 bp, Homo sapiens
gaaccagccagagac

SEQ ID NO: 31067 - DNA, 15 bp, Homo sapiens
aaccagccagagacc

SEQ ID NO: 31068 - DNA, 15 bp, Homo sapiens
accagccagagacca

SEQ ID NO: 31069 - DNA, 15 bp, Homo sapiens
ccagccagagaccag

SEQ ID NO: 31070 - DNA, 15 bp, Homo sapiens
cagccagagaccagc

SEQ ID NO: 31071 - DNA, 15 bp, Homo sapiens
agccagagaccagca

SEQ ID NO: 31072 - DNA, 15 bp, Homo sapiens
gccagagaccagcaa

SEQ ID NO: 31073 - DNA, 15 bp, Homo sapiens
ccagagaccagcaaa

SEQ ID NO: 31074 - DNA, 15 bp, Homo sapiens
cagagaccagcaaat

SEQ ID NO: 31075 - DNA, 15 bp, Homo sapiens
agagaccagcaaatg

SEQ ID NO: 31076 - DNA, 15 bp, Homo sapiens
gagaccagcaaatgt

SEQ ID NO: 31077 - DNA, 15 bp, Homo sapiens
agaccagcaaatgtt

SEQ ID NO: 31078 - DNA, 15 bp, Homo sapiens
gaccagcaaatgttc

SEQ ID NO: 31079 - DNA, 15 bp, Homo sapiens
accagcaaatgttct

SEQ ID NO: 31080 - DNA, 15 bp, Homo sapiens
ccagcaaatgttctt

SEQ ID NO: 31081 - DNA, 15 bp, Homo sapiens
cagcaaatgttctta

SEQ ID NO: 31082 - DNA, 15 bp, Homo sapiens
agcaaatgttcttat

SEQ ID NO: 31083 - DNA, 15 bp, Homo sapiens
gcaaatgttcttatt

SEQ ID NO: 31084 - DNA, 15 bp, Homo sapiens
caaatgttcttattt

SEQ ID NO: 31085 - DNA, 15 bp, Homo sapiens
aaatgttcttatttg

SEQ ID NO: 31086 - DNA, 15 bp, Homo sapiens
aatgttcttatttga

SEQ ID NO: 31087 - DNA, 15 bp, Homo sapiens
atgttcttatttgag

SEQ ID NO: 31088 - DNA, 15 bp, Homo sapiens
tgttcttatttgagg

SEQ ID NO: 31089 - DNA, 15 bp, Homo sapiens
gttcttatttgaggc

SEQ ID NO: 31090 - DNA, 15 bp, Homo sapiens
ttcttatttgaggca

SEQ ID NO: 31091 - DNA, 15 bp, Homo sapiens
tcttatttgaggcaa

SEQ ID NO: 31092 - DNA, 15 bp, Homo sapiens
cttatttgaggcaat

SEQ ID NO: 31093 - DNA, 15 bp, Homo sapiens
ttatttgaggcaatc

SEQ ID NO: 31094 - DNA, 15 bp, Homo sapiens
tatttgaggcaatcc

SEQ ID NO: 31095 - DNA, 15 bp, Homo sapiens
atttgaggcaatcct

SEQ ID NO: 31096 - DNA, 15 bp, Homo sapiens
tttgaggcaatcctc

SEQ ID NO: 31097 - DNA, 15 bp, Homo sapiens
ttgaggcaatcctcc

SEQ ID NO: 31098 - DNA, 15 bp, Homo sapiens
tgaggcaatcctcct

SEQ ID NO: 31099 - DNA, 15 bp, Homo sapiens
gaggcaatcctcctc

SEQ ID NO: 31100 - DNA, 15 bp, Homo sapiens
aggcaatcctcctct

SEQ ID NO: 31101 - DNA, 15 bp, Homo sapiens
ggcaatcctcctctc

SEQ ID NO: 31102 - DNA, 15 bp, Homo sapiens
gcaatcctcctctcg

SEQ ID NO: 31103 - DNA, 15 bp, Homo sapiens
caatcctcctctcgc

SEQ ID NO: 31104 - DNA, 15 bp, Homo sapiens
aatcctcctctcgca

SEQ ID NO: 31105 - DNA, 15 bp, Homo sapiens
atcctcctctcgcac

SEQ ID NO: 31106 - DNA, 15 bp, Homo sapiens
tcctcctctcgcaca

SEQ ID NO: 31107 - DNA, 15 bp, Homo sapiens
cctcctctcgcacac

SEQ ID NO: 31108 - DNA, 15 bp, Homo sapiens
ctcctctcgcacaca

SEQ ID NO: 31109 - DNA, 15 bp, Homo sapiens
tcctctcgcacacat

SEQ ID NO: 31110 - DNA, 15 bp, Homo sapiens
cctctcgcacacatg

SEQ ID NO: 31111 - DNA, 15 bp, Homo sapiens
ctctcgcacacatgc

SEQ ID NO: 31112 - DNA, 15 bp, Homo sapiens
tctcgcacacatgca

SEQ ID NO: 31113 - DNA, 15 bp, Homo sapiens
ctcgcacacatgcac

SEQ ID NO: 31114 - DNA, 15 bp, Homo sapiens
tcgcacacatgcact

SEQ ID NO: 31115 - DNA, 15 bp, Homo sapiens
cgcacacatgcactc

SEQ ID NO: 31116 - DNA, 15 bp, Homo sapiens
gcacacatgcactct

SEQ ID NO: 31117 - DNA, 15 bp, Homo sapiens
cacacatgcactctg

SEQ ID NO: 31118 - DNA, 15 bp, Homo sapiens
acacatgcactctgg

SEQ ID NO: 31119 - DNA, 15 bp, Homo sapiens
cacatgcactctggc

SEQ ID NO: 31120 - DNA, 15 bp, Homo sapiens
acatgcactctggct

SEQ ID NO: 31121 - DNA, 15 bp, Homo sapiens
catgcactctggctc

SEQ ID NO: 31122 - DNA, 15 bp, Homo sapiens
atgcactctggctct

SEQ ID NO: 31123 - DNA, 15 bp, Homo sapiens
tgcactctggctctc

SEQ ID NO: 31124 - DNA, 15 bp, Homo sapiens
gcactctggctctcc

SEQ ID NO: 31125 - DNA, 15 bp, Homo sapiens
cactctggctctcca

SEQ ID NO: 31126 - DNA, 15 bp, Homo sapiens
actctggctctccat

SEQ ID NO: 31127 - DNA, 15 bp, Homo sapiens
ctctggctctccatg

SEQ ID NO: 31128 - DNA, 15 bp, Homo sapiens
tctggctctccatgc

SEQ ID NO: 31129 - DNA, 15 bp, Homo sapiens
ctggctctccatgca

SEQ ID NO: 31130 - DNA, 15 bp, Homo sapiens
tggctctccatgcat

SEQ ID NO: 31131 - DNA, 15 bp, Homo sapiens
ggctctccatgcatg

SEQ ID NO: 31132 - DNA, 15 bp, Homo sapiens
gctctccatgcatgt

SEQ ID NO: 31133 - DNA, 15 bp, Homo sapiens
ctctccatgcatgtg

SEQ ID NO: 31134 - DNA, 15 bp, Homo sapiens
tctccatgcatgtgt

SEQ ID NO: 31135 - DNA, 15 bp, Homo sapiens
ctccatgcatgtgtc

SEQ ID NO: 31136 - DNA, 15 bp, Homo sapiens
tccatgcatgtgtcc

SEQ ID NO: 31137 - DNA, 15 bp, Homo sapiens
ccatgcatgtgtcca

SEQ ID NO: 31138 - DNA, 15 bp, Homo sapiens
catgcatgtgtccat

SEQ ID NO: 31139 - DNA, 15 bp, Homo sapiens
atgcatgtgtccatt

SEQ ID NO: 31140 - DNA, 15 bp, Homo sapiens
tgcatgtgtccattt

SEQ ID NO: 31141 - DNA, 15 bp, Homo sapiens
gcatgtgtccatttc

SEQ ID NO: 31142 - DNA, 15 bp, Homo sapiens
catgtgtccatttct

SEQ ID NO: 31143 - DNA, 15 bp, Homo sapiens
atgtgtccatttctc

SEQ ID NO: 31144 - DNA, 15 bp, Homo sapiens
tgtgtccatttctct

SEQ ID NO: 31145 - DNA, 15 bp, Homo sapiens
gtgtccatttctctc

SEQ ID NO: 31146 - DNA, 15 bp, Homo sapiens
tgtccatttctctca

SEQ ID NO: 31147 - DNA, 15 bp, Homo sapiens
gtccatttctctcaa

SEQ ID NO: 31148 - DNA, 15 bp, Homo sapiens
tccatttctctcaat

SEQ ID NO: 31149 - DNA, 15 bp, Homo sapiens
ccatttctctcaatg

SEQ ID NO: 31150 - DNA, 15 bp, Homo sapiens
catttctctcaatgt

SEQ ID NO: 31151 - DNA, 15 bp, Homo sapiens
atttctctcaatgtc

SEQ ID NO: 31152 - DNA, 15 bp, Homo sapiens
tttctctcaatgtct

SEQ ID NO: 31153 - DNA, 15 bp, Homo sapiens
ttctctcaatgtctc

SEQ ID NO: 31154 - DNA, 15 bp, Homo sapiens
tctctcaatgtctct

SEQ ID NO: 31155 - DNA, 15 bp, Homo sapiens
ctctcaatgtctctc

SEQ ID NO: 31156 - DNA, 15 bp, Homo sapiens
tctcaatgtctctca

SEQ ID NO: 31157 - DNA, 15 bp, Homo sapiens
ctcaatgtctctcac

SEQ ID NO: 31158 - DNA, 15 bp, Homo sapiens
tcaatgtctctcact

SEQ ID NO: 31159 - DNA, 15 bp, Homo sapiens
caatgtctctcacta

SEQ ID NO: 31160 - DNA, 15 bp, Homo sapiens
aatgtctctcactat

SEQ ID NO: 31161 - DNA, 15 bp, Homo sapiens
atgtctctcactatc

SEQ ID NO: 31162 - DNA, 15 bp, Homo sapiens
tgtctctcactatct

SEQ ID NO: 31163 - DNA, 15 bp, Homo sapiens
gtctctcactatctc

SEQ ID NO: 31164 - DNA, 15 bp, Homo sapiens
tctctcactatctct

SEQ ID NO: 31165 - DNA, 15 bp, Homo sapiens
ctctcactatctctt

SEQ ID NO: 31166 - DNA, 15 bp, Homo sapiens
tctcactatctcttg

SEQ ID NO: 31167 - DNA, 15 bp, Homo sapiens
ctcactatctcttgt

SEQ ID NO: 31168 - DNA, 15 bp, Homo sapiens
tcactatctcttgtt

SEQ ID NO: 31169 - DNA, 15 bp, Homo sapiens
cactatctcttgttc

SEQ ID NO: 31170 - DNA, 15 bp, Homo sapiens
actatctcttgttct

SEQ ID NO: 31171 - DNA, 15 bp, Homo sapiens
ctatctcttgttctc

SEQ ID NO: 31172 - DNA, 15 bp, Homo sapiens
tatctcttgttctct

SEQ ID NO: 31173 - DNA, 15 bp, Homo sapiens
atctcttgttctctc

SEQ ID NO: 31174 - DNA, 15 bp, Homo sapiens
tctcttgttctctct

SEQ ID NO: 31175 - DNA, 15 bp, Homo sapiens
ctcttgttctctctt

SEQ ID NO: 31176 - DNA, 15 bp, Homo sapiens
tcttgttctctcttg

SEQ ID NO: 31177 - DNA, 15 bp, Homo sapiens
cttgttctctcttgc

SEQ ID NO: 31178 - DNA, 15 bp, Homo sapiens
ttgttctctcttgct

SEQ ID NO: 31179 - DNA, 15 bp, Homo sapiens
tgttctctcttgctc

SEQ ID NO: 31180 - DNA, 15 bp, Homo sapiens
gttctctcttgctcg

SEQ ID NO: 31181 - DNA, 15 bp, Homo sapiens
ttctctcttgctcgc

SEQ ID NO: 31182 - DNA, 15 bp, Homo sapiens
tctctcttgctcgct

SEQ ID NO: 31183 - DNA, 15 bp, Homo sapiens
ctctcttgctcgctc

SEQ ID NO: 31184 - DNA, 15 bp, Homo sapiens
tctcttgctcgctct

SEQ ID NO: 31185 - DNA, 15 bp, Homo sapiens
ctcttgctcgctctt

SEQ ID NO: 31186 - DNA, 15 bp, Homo sapiens
tcttgctcgctcttt

SEQ ID NO: 31187 - DNA, 15 bp, Homo sapiens
cttgctcgctctttg

SEQ ID NO: 31188 - DNA, 15 bp, Homo sapiens
ttgctcgctctttgt

SEQ ID NO: 31189 - DNA, 15 bp, Homo sapiens
tgctcgctctttgtg

SEQ ID NO: 31190 - DNA, 15 bp, Homo sapiens
gctcgctctttgtgt

SEQ ID NO: 31191 - DNA, 15 bp, Homo sapiens
ctcgctctttgtgtg

SEQ ID NO: 31192 - DNA, 15 bp, Homo sapiens
tcgctctttgtgtgt

SEQ ID NO: 31193 - DNA, 15 bp, Homo sapiens
cgctctttgtgtgtg

SEQ ID NO: 31194 - DNA, 15 bp, Homo sapiens
gctctttgtgtgtgt

SEQ ID NO: 31195 - DNA, 15 bp, Homo sapiens
ctctttgtgtgtgtc

SEQ ID NO: 31196 - DNA, 15 bp, Homo sapiens
tctttgtgtgtgtct

SEQ ID NO: 31197 - DNA, 15 bp, Homo sapiens
ctttgtgtgtgtctc

SEQ ID NO: 31198 - DNA, 15 bp, Homo sapiens
tttgtgtgtgtctct

SEQ ID NO: 31199 - DNA, 15 bp, Homo sapiens
ttgtgtgtgtctctt

SEQ ID NO: 31200 - DNA, 15 bp, Homo sapiens
tgtgtgtgtctcttt

SEQ ID NO: 31201 - DNA, 15 bp, Homo sapiens
gtgtgtgtctctttg

SEQ ID NO: 31202 - DNA, 15 bp, Homo sapiens
tgtgtgtctctttgt

SEQ ID NO: 31203 - DNA, 15 bp, Homo sapiens
gtgtgtctctttgtc

SEQ ID NO: 31204 - DNA, 15 bp, Homo sapiens
tgtgtctctttgtct

SEQ ID NO: 31205 - DNA, 15 bp, Homo sapiens
gtgtctctttgtctc

SEQ ID NO: 31206 - DNA, 15 bp, Homo sapiens
tgtctctttgtctct

SEQ ID NO: 31207 - DNA, 15 bp, Homo sapiens
gtctctttgtctcta

SEQ ID NO: 31208 - DNA, 15 bp, Homo sapiens
tctctttgtctctat

SEQ ID NO: 31209 - DNA, 15 bp, Homo sapiens
ctctttgtctctatg

SEQ ID NO: 31210 - DNA, 15 bp, Homo sapiens
tctttgtctctatgt

SEQ ID NO: 31211 - DNA, 15 bp, Homo sapiens
ctttgtctctatgta

SEQ ID NO: 31212 - DNA, 15 bp, Homo sapiens
tttgtctctatgtat

SEQ ID NO: 31213 - DNA, 15 bp, Homo sapiens
ttgtctctatgtatc

SEQ ID NO: 31214 - DNA, 15 bp, Homo sapiens
tgtctctatgtatcc

SEQ ID NO: 31215 - DNA, 15 bp, Homo sapiens
gtctctatgtatccc

SEQ ID NO: 31216 - DNA, 15 bp, Homo sapiens
tctctatgtatccct

SEQ ID NO: 31217 - DNA, 15 bp, Homo sapiens
ctctatgtatcccta

SEQ ID NO: 31218 - DNA, 15 bp, Homo sapiens
tctatgtatccctat

SEQ ID NO: 31219 - DNA, 15 bp, Homo sapiens
ctatgtatccctatc

SEQ ID NO: 31220 - DNA, 15 bp, Homo sapiens
tatgtatccctatct

SEQ ID NO: 31221 - DNA, 15 bp, Homo sapiens
atgtatccctatctc

SEQ ID NO: 31222 - DNA, 15 bp, Homo sapiens
tgtatccctatctct

SEQ ID NO: 31223 - DNA, 15 bp, Homo sapiens
gtatccctatctctc

SEQ ID NO: 31224 - DNA, 15 bp, Homo sapiens
tatccctatctctca

SEQ ID NO: 31225 - DNA, 15 bp, Homo sapiens
atccctatctctcag

SEQ ID NO: 31226 - DNA, 15 bp, Homo sapiens
tccctatctctcagc

SEQ ID NO: 31227 - DNA, 15 bp, Homo sapiens
ccctatctctcagcc

SEQ ID NO: 31228 - DNA, 15 bp, Homo sapiens
cctatctctcagcca

SEQ ID NO: 31229 - DNA, 15 bp, Homo sapiens
ctatctctcagccag

SEQ ID NO: 31230 - DNA, 15 bp, Homo sapiens
tatctctcagccagt

SEQ ID NO: 31231 - DNA, 15 bp, Homo sapiens
atctctcagccagtc

SEQ ID NO: 31232 - DNA, 15 bp, Homo sapiens
tctctcagccagtcc

SEQ ID NO: 31233 - DNA, 15 bp, Homo sapiens
ctctcagccagtccc

SEQ ID NO: 31234 - DNA, 15 bp, Homo sapiens
tctcagccagtcccc

SEQ ID NO: 31235 - DNA, 15 bp, Homo sapiens
ctcagccagtcccct

SEQ ID NO: 31236 - DNA, 15 bp, Homo sapiens
tcagccagtcccctg

SEQ ID NO: 31237 - DNA, 15 bp, Homo sapiens
cagccagtcccctgg

SEQ ID NO: 31238 - DNA, 15 bp, Homo sapiens
agccagtcccctgga

SEQ ID NO: 31239 - DNA, 15 bp, Homo sapiens
gccagtcccctggat

SEQ ID NO: 31240 - DNA, 15 bp, Homo sapiens
ccagtcccctggata

SEQ ID NO: 31241 - DNA, 15 bp, Homo sapiens
cagtcccctggatag

SEQ ID NO: 31242 - DNA, 15 bp, Homo sapiens
agtcccctggataga

SEQ ID NO: 31243 - DNA, 15 bp, Homo sapiens
gtcccctggatagag

SEQ ID NO: 31244 - DNA, 15 bp, Homo sapiens
tcccctggatagagg

SEQ ID NO: 31245 - DNA, 15 bp, Homo sapiens
cccctggatagaggg

SEQ ID NO: 31246 - DNA, 15 bp, Homo sapiens
ccctggatagagggg

SEQ ID NO: 31247 - DNA, 15 bp, Homo sapiens
cctggatagaggggc

SEQ ID NO: 31248 - DNA, 15 bp, Homo sapiens
ctggatagaggggca

SEQ ID NO: 31249 - DNA, 15 bp, Homo sapiens
tggatagaggggcaa

SEQ ID NO: 31250 - DNA, 15 bp, Homo sapiens
ggatagaggggcaat

SEQ ID NO: 31251 - DNA, 15 bp, Homo sapiens
gatagaggggcaatt

SEQ ID NO: 31252 - DNA, 15 bp, Homo sapiens
atagaggggcaattg

SEQ ID NO: 31253 - DNA, 15 bp, Homo sapiens
tagaggggcaattgt

SEQ ID NO: 31254 - DNA, 15 bp, Homo sapiens
agaggggcaattgtc

SEQ ID NO: 31255 - DNA, 15 bp, Homo sapiens
gaggggcaattgtca

SEQ ID NO: 31256 - DNA, 15 bp, Homo sapiens
aggggcaattgtcaa

SEQ ID NO: 31257 - DNA, 15 bp, Homo sapiens
ggggcaattgtcaac

SEQ ID NO: 31258 - DNA, 15 bp, Homo sapiens
gggcaattgtcaact

SEQ ID NO: 31259 - DNA, 15 bp, Homo sapiens
ggcaattgtcaactt

SEQ ID NO: 31260 - DNA, 15 bp, Homo sapiens
gcaattgtcaacttg

SEQ ID NO: 31261 - DNA, 15 bp, Homo sapiens
caattgtcaacttga

SEQ ID NO: 31262 - DNA, 15 bp, Homo sapiens
aattgtcaacttgaa

SEQ ID NO: 31263 - DNA, 15 bp, Homo sapiens
attgtcaacttgaag

SEQ ID NO: 31264 - DNA, 15 bp, Homo sapiens
ttgtcaacttgaagc

SEQ ID NO: 31265 - DNA, 15 bp, Homo sapiens
tgtcaacttgaagcc

SEQ ID NO: 31266 - DNA, 15 bp, Homo sapiens
gtcaacttgaagccc

SEQ ID NO: 31267 - DNA, 15 bp, Homo sapiens
tcaacttgaagccct

SEQ ID NO: 31268 - DNA, 15 bp, Homo sapiens
caacttgaagccctg

SEQ ID NO: 31269 - DNA, 15 bp, Homo sapiens
aacttgaagccctgc

SEQ ID NO: 31270 - DNA, 15 bp, Homo sapiens
acttgaagccctgca

SEQ ID NO: 31271 - DNA, 15 bp, Homo sapiens
cttgaagccctgcag

SEQ ID NO: 31272 - DNA, 15 bp, Homo sapiens
ttgaagccctgcaga

SEQ ID NO: 31273 - DNA, 15 bp, Homo sapiens
tgaagccctgcagac

SEQ ID NO: 31274 - DNA, 15 bp, Homo sapiens
gaagccctgcagaca

SEQ ID NO: 31275 - DNA, 15 bp, Homo sapiens
aagccctgcagacac

SEQ ID NO: 31276 - DNA, 15 bp, Homo sapiens
agccctgcagacacc

SEQ ID NO: 31277 - DNA, 15 bp, Homo sapiens
gccctgcagacacct

SEQ ID NO: 31278 - DNA, 15 bp, Homo sapiens
ccctgcagacaccta

SEQ ID NO: 31279 - DNA, 15 bp, Homo sapiens
cctgcagacacctaa

SEQ ID NO: 31280 - DNA, 15 bp, Homo sapiens
ctgcagacacctaat

SEQ ID NO: 31281 - DNA, 15 bp, Homo sapiens
tgcagacacctaatg

SEQ ID NO: 31282 - DNA, 15 bp, Homo sapiens
gcagacacctaatga

SEQ ID NO: 31283 - DNA, 15 bp, Homo sapiens
cagacacctaatgac

SEQ ID NO: 31284 - DNA, 15 bp, Homo sapiens
agacacctaatgact

SEQ ID NO: 31285 - DNA, 15 bp, Homo sapiens
gacacctaatgactt

SEQ ID NO: 31286 - DNA, 15 bp, Homo sapiens
acacctaatgactta

SEQ ID NO: 31287 - DNA, 15 bp, Homo sapiens
cacctaatgacttaa

SEQ ID NO: 31288 - DNA, 15 bp, Homo sapiens
acctaatgacttaac

SEQ ID NO: 31289 - DNA, 15 bp, Homo sapiens
cctaatgacttaacc

SEQ ID NO: 31290 - DNA, 15 bp, Homo sapiens
ctaatgacttaacca

SEQ ID NO: 31291 - DNA, 15 bp, Homo sapiens
taatgacttaaccag

SEQ ID NO: 31292 - DNA, 15 bp, Homo sapiens
aatgacttaaccaga

SEQ ID NO: 31293 - DNA, 15 bp, Homo sapiens
atgacttaaccagac

SEQ ID NO: 31294 - DNA, 15 bp, Homo sapiens
tgacttaaccagaca

SEQ ID NO: 31295 - DNA, 15 bp, Homo sapiens
gacttaaccagacag

SEQ ID NO: 31296 - DNA, 15 bp, Homo sapiens
acttaaccagacagc

SEQ ID NO: 31297 - DNA, 15 bp, Homo sapiens
cttaaccagacagcg

SEQ ID NO: 31298 - DNA, 15 bp, Homo sapiens
ttaaccagacagcgt

SEQ ID NO: 31299 - DNA, 15 bp, Homo sapiens
taaccagacagcgta

SEQ ID NO: 31300 - DNA, 15 bp, Homo sapiens
aaccagacagcgtag

SEQ ID NO: 31301 - DNA, 15 bp, Homo sapiens
accagacagcgtaga

SEQ ID NO: 31302 - DNA, 15 bp, Homo sapiens
ccagacagcgtagaa

SEQ ID NO: 31303 - DNA, 15 bp, Homo sapiens
cagacagcgtagaag

SEQ ID NO: 31304 - DNA, 15 bp, Homo sapiens
agacagcgtagaagg

SEQ ID NO: 31305 - DNA, 15 bp, Homo sapiens
gacagcgtagaaggg

SEQ ID NO: 31306 - DNA, 15 bp, Homo sapiens
acagcgtagaagggc

SEQ ID NO: 31307 - DNA, 15 bp, Homo sapiens
cagcgtagaagggcc

SEQ ID NO: 31308 - DNA, 15 bp, Homo sapiens
agcgtagaagggccc

SEQ ID NO: 31309 - DNA, 15 bp, Homo sapiens
gcgtagaagggccct

SEQ ID NO: 31310 - DNA, 15 bp, Homo sapiens
cgtagaagggccctg

SEQ ID NO: 31311 - DNA, 15 bp, Homo sapiens
gtagaagggccctgg

SEQ ID NO: 31312 - DNA, 15 bp, Homo sapiens
tagaagggccctggc

SEQ ID NO: 31313 - DNA, 15 bp, Homo sapiens
agaagggccctggcc

SEQ ID NO: 31314 - DNA, 15 bp, Homo sapiens
gaagggccctggccc

SEQ ID NO: 31315 - DNA, 15 bp, Homo sapiens
aagggccctggccct

SEQ ID NO: 31316 - DNA, 15 bp, Homo sapiens
agggccctggccctt

SEQ ID NO: 31317 - DNA, 15 bp, Homo sapiens
gggccctggcccttg

SEQ ID NO: 31318 - DNA, 15 bp, Homo sapiens
ggccctggcccttgt

SEQ ID NO: 31319 - DNA, 15 bp, Homo sapiens
gccctggcccttgtc

SEQ ID NO: 31320 - DNA, 15 bp, Homo sapiens
ccctggcccttgtct

SEQ ID NO: 31321 - DNA, 15 bp, Homo sapiens
cctggcccttgtcta

SEQ ID NO: 31322 - DNA, 15 bp, Homo sapiens
ctggcccttgtctac

SEQ ID NO: 31323 - DNA, 15 bp, Homo sapiens
tggcccttgtctact

SEQ ID NO: 31324 - DNA, 15 bp, Homo sapiens
ggcccttgtctactc

SEQ ID NO: 31325 - DNA, 15 bp, Homo sapiens
gcccttgtctactcc

SEQ ID NO: 31326 - DNA, 15 bp, Homo sapiens
cccttgtctactcca

SEQ ID NO: 31327 - DNA, 15 bp, Homo sapiens
ccttgtctactccac

SEQ ID NO: 31328 - DNA, 15 bp, Homo sapiens
cttgtctactccacg

SEQ ID NO: 31329 - DNA, 15 bp, Homo sapiens
ttgtctactccacgc

SEQ ID NO: 31330 - DNA, 15 bp, Homo sapiens
tgtctactccacgcc

SEQ ID NO: 31331 - DNA, 15 bp, Homo sapiens
gtctactccacgcct

SEQ ID NO: 31332 - DNA, 15 bp, Homo sapiens
tctactccacgcctc

SEQ ID NO: 31333 - DNA, 15 bp, Homo sapiens
ctactccacgcctct

SEQ ID NO: 31334 - DNA, 15 bp, Homo sapiens
tactccacgcctctc

SEQ ID NO: 31335 - DNA, 15 bp, Homo sapiens
actccacgcctctcc

SEQ ID NO: 31336 - DNA, 15 bp, Homo sapiens
ctccacgcctctccg

SEQ ID NO: 31337 - DNA, 15 bp, Homo sapiens
tccacgcctctccgt

SEQ ID NO: 31338 - DNA, 15 bp, Homo sapiens
ccacgcctctccgtg

SEQ ID NO: 31339 - DNA, 15 bp, Homo sapiens
cacgcctctccgtgc

SEQ ID NO: 31340 - DNA, 15 bp, Homo sapiens
acgcctctccgtgct

SEQ ID NO: 31341 - DNA, 15 bp, Homo sapiens
cgcctctccgtgctc

SEQ ID NO: 31342 - DNA, 15 bp, Homo sapiens
gcctctccgtgctca

SEQ ID NO: 31343 - DNA, 15 bp, Homo sapiens
cctctccgtgctcag

SEQ ID NO: 31344 - DNA, 15 bp, Homo sapiens
ctctccgtgctcagt

SEQ ID NO: 31345 - DNA, 15 bp, Homo sapiens
tctccgtgctcagtg

SEQ ID NO: 31346 - DNA, 15 bp, Homo sapiens
ctccgtgctcagtgt

SEQ ID NO: 31347 - DNA, 15 bp, Homo sapiens
tccgtgctcagtgta

SEQ ID NO: 31348 - DNA, 15 bp, Homo sapiens
ccgtgctcagtgtag

SEQ ID NO: 31349 - DNA, 15 bp, Homo sapiens
cgtgctcagtgtaga

SEQ ID NO: 31350 - DNA, 15 bp, Homo sapiens
gtgctcagtgtagaa

SEQ ID NO: 31351 - DNA, 15 bp, Homo sapiens
tgctcagtgtagaag

SEQ ID NO: 31352 - DNA, 15 bp, Homo sapiens
gctcagtgtagaagg

SEQ ID NO: 31353 - DNA, 15 bp, Homo sapiens
ctcagtgtagaaggg

SEQ ID NO: 31354 - DNA, 15 bp, Homo sapiens
tcagtgtagaagggc

SEQ ID NO: 31355 - DNA, 15 bp, Homo sapiens
cagtgtagaagggca

SEQ ID NO: 31356 - DNA, 15 bp, Homo sapiens
agtgtagaagggcaa

SEQ ID NO: 31357 - DNA, 15 bp, Homo sapiens
gtgtagaagggcaaa

SEQ ID NO: 31358 - DNA, 15 bp, Homo sapiens
tgtagaagggcaaat

SEQ ID NO: 31359 - DNA, 15 bp, Homo sapiens
gtagaagggcaaatt

SEQ ID NO: 31360 - DNA, 15 bp, Homo sapiens
tagaagggcaaattg

SEQ ID NO: 31361 - DNA, 15 bp, Homo sapiens
agaagggcaaattga

SEQ ID NO: 31362 - DNA, 15 bp, Homo sapiens
gaagggcaaattgaa

SEQ ID NO: 31363 - DNA, 15 bp, Homo sapiens
aagggcaaattgaag

SEQ ID NO: 31364 - DNA, 15 bp, Homo sapiens
agggcaaattgaaga

SEQ ID NO: 31365 - DNA, 15 bp, Homo sapiens
gggcaaattgaagac

SEQ ID NO: 31366 - DNA, 15 bp, Homo sapiens
ggcaaattgaagacc

SEQ ID NO: 31367 - DNA, 15 bp, Homo sapiens
gcaaattgaagacca

SEQ ID NO: 31368 - DNA, 15 bp, Homo sapiens
caaattgaagaccag

SEQ ID NO: 31369 - DNA, 15 bp, Homo sapiens
aaattgaagaccaga

SEQ ID NO: 31370 - DNA, 15 bp, Homo sapiens
aattgaagaccagag

SEQ ID NO: 31371 - DNA, 15 bp, Homo sapiens
attgaagaccagaga

SEQ ID NO: 31372 - DNA, 15 bp, Homo sapiens
ttgaagaccagagat

SEQ ID NO: 31373 - DNA, 15 bp, Homo sapiens
tgaagaccagagatc

SEQ ID NO: 31374 - DNA, 15 bp, Homo sapiens
gaagaccagagatct

SEQ ID NO: 31375 - DNA, 15 bp, Homo sapiens
aagaccagagatctc

SEQ ID NO: 31376 - DNA, 15 bp, Homo sapiens
agaccagagatctca

SEQ ID NO: 31377 - DNA, 15 bp, Homo sapiens
gaccagagatctcag

SEQ ID NO: 31378 - DNA, 15 bp, Homo sapiens
accagagatctcagg

SEQ ID NO: 31379 - DNA, 15 bp, Homo sapiens
ccagagatctcaggg

SEQ ID NO: 31380 - DNA, 15 bp, Homo sapiens
cagagatctcagggc

SEQ ID NO: 31381 - DNA, 15 bp, Homo sapiens
agagatctcagggcc

SEQ ID NO: 31382 - DNA, 15 bp, Homo sapiens
gagatctcagggcct

SEQ ID NO: 31383 - DNA, 15 bp, Homo sapiens
agatctcagggcctc

SEQ ID NO: 31384 - DNA, 15 bp, Homo sapiens
gatctcagggcctca

SEQ ID NO: 31385 - DNA, 15 bp, Homo sapiens
atctcagggcctcac

SEQ ID NO: 31386 - DNA, 15 bp, Homo sapiens
tctcagggcctcacc

SEQ ID NO: 31387 - DNA, 15 bp, Homo sapiens
ctcagggcctcaccg

SEQ ID NO: 31388 - DNA, 15 bp, Homo sapiens
tcagggcctcaccga

SEQ ID NO: 31389 - DNA, 15 bp, Homo sapiens
cagggcctcaccgaa

SEQ ID NO: 31390 - DNA, 15 bp, Homo sapiens
agggcctcaccgaaa

SEQ ID NO: 31391 - DNA, 15 bp, Homo sapiens
gggcctcaccgaaat

SEQ ID NO: 31392 - DNA, 15 bp, Homo sapiens
ggcctcaccgaaatg

SEQ ID NO: 31393 - DNA, 15 bp, Homo sapiens
gcctcaccgaaatgc

SEQ ID NO: 31394 - DNA, 15 bp, Homo sapiens
cctcaccgaaatgca

SEQ ID NO: 31395 - DNA, 15 bp, Homo sapiens
ctcaccgaaatgcag

SEQ ID NO: 31396 - DNA, 15 bp, Homo sapiens
tcaccgaaatgcagc

SEQ ID NO: 31397 - DNA, 15 bp, Homo sapiens
caccgaaatgcagcg

SEQ ID NO: 31398 - DNA, 15 bp, Homo sapiens
accgaaatgcagcgg

SEQ ID NO: 31399 - DNA, 15 bp, Homo sapiens
ccgaaatgcagcggc

SEQ ID NO: 31400 - DNA, 15 bp, Homo sapiens
cgaaatgcagcggca

SEQ ID NO: 31401 - DNA, 15 bp, Homo sapiens
gaaatgcagcggcag

SEQ ID NO: 31402 - DNA, 15 bp, Homo sapiens
aaatgcagcggcaga

SEQ ID NO: 31403 - DNA, 15 bp, Homo sapiens
aatgcagcggcagag

SEQ ID NO: 31404 - DNA, 15 bp, Homo sapiens
atgcagcggcagagt

SEQ ID NO: 31405 - DNA, 15 bp, Homo sapiens
tgcagcggcagagtt

SEQ ID NO: 31406 - DNA, 15 bp, Homo sapiens
gcagcggcagagttg

SEQ ID NO: 31407 - DNA, 15 bp, Homo sapiens
cagcggcagagttga

SEQ ID NO: 31408 - DNA, 15 bp, Homo sapiens
agcggcagagttgaa

SEQ ID NO: 31409 - DNA, 15 bp, Homo sapiens
gcggcagagttgaaa

SEQ ID NO: 31410 - DNA, 15 bp, Homo sapiens
cggcagagttgaaat

SEQ ID NO: 31411 - DNA, 15 bp, Homo sapiens
ggcagagttgaaatc

SEQ ID NO: 31412 - DNA, 15 bp, Homo sapiens
gcagagttgaaatcc

SEQ ID NO: 31413 - DNA, 15 bp, Homo sapiens
cagagttgaaatcca

SEQ ID NO: 31414 - DNA, 15 bp, Homo sapiens
agagttgaaatccaa

SEQ ID NO: 31415 - DNA, 15 bp, Homo sapiens
gagttgaaatccaag

SEQ ID NO: 31416 - DNA, 15 bp, Homo sapiens
agttgaaatccaagc

SEQ ID NO: 31417 - DNA, 15 bp, Homo sapiens
gttgaaatccaagcc

SEQ ID NO: 31418 - DNA, 15 bp, Homo sapiens
ttgaaatccaagcct

SEQ ID NO: 31419 - DNA, 15 bp, Homo sapiens
tgaaatccaagccta

SEQ ID NO: 31420 - DNA, 15 bp, Homo sapiens
gaaatccaagcctag

SEQ ID NO: 31421 - DNA, 15 bp, Homo sapiens
aaatccaagcctaga

SEQ ID NO: 31422 - DNA, 15 bp, Homo sapiens
aatccaagcctagat

SEQ ID NO: 31423 - DNA, 15 bp, Homo sapiens
atccaagcctagatc

SEQ ID NO: 31424 - DNA, 15 bp, Homo sapiens
tccaagcctagatct

SEQ ID NO: 31425 - DNA, 15 bp, Homo sapiens
ccaagcctagatctc

SEQ ID NO: 31426 - DNA, 15 bp, Homo sapiens
caagcctagatctca

SEQ ID NO: 31427 - DNA, 15 bp, Homo sapiens
aagcctagatctcag

SEQ ID NO: 31428 - DNA, 15 bp, Homo sapiens
agcctagatctcagg

SEQ ID NO: 31429 - DNA, 15 bp, Homo sapiens
gcctagatctcagga

SEQ ID NO: 31430 - DNA, 15 bp, Homo sapiens
cctagatctcaggac

SEQ ID NO: 31431 - DNA, 15 bp, Homo sapiens
ctagatctcaggact

SEQ ID NO: 31432 - DNA, 15 bp, Homo sapiens
tagatctcaggactc

SEQ ID NO: 31433 - DNA, 15 bp, Homo sapiens
agatctcaggactct

SEQ ID NO: 31434 - DNA, 15 bp, Homo sapiens
gatctcaggactcta

SEQ ID NO: 31435 - DNA, 15 bp, Homo sapiens
atctcaggactctag

SEQ ID NO: 31436 - DNA, 15 bp, Homo sapiens
tctcaggactctagg

SEQ ID NO: 31437 - DNA, 15 bp, Homo sapiens
ctcaggactctaggt

SEQ ID NO: 31438 - DNA, 15 bp, Homo sapiens
tcaggactctaggtg

SEQ ID NO: 31439 - DNA, 15 bp, Homo sapiens
caggactctaggtgg

SEQ ID NO: 31440 - DNA, 15 bp, Homo sapiens
aggactctaggtggg

SEQ ID NO: 31441 - DNA, 15 bp, Homo sapiens
ggactctaggtggga

SEQ ID NO: 31442 - DNA, 15 bp, Homo sapiens
gactctaggtgggac

SEQ ID NO: 31443 - DNA, 15 bp, Homo sapiens
actctaggtgggacc

SEQ ID NO: 31444 - DNA, 15 bp, Homo sapiens
ctctaggtgggaccc

SEQ ID NO: 31445 - DNA, 15 bp, Homo sapiens
tctaggtgggaccct

SEQ ID NO: 31446 - DNA, 15 bp, Homo sapiens
ctaggtgggaccctg

SEQ ID NO: 31447 - DNA, 15 bp, Homo sapiens
taggtgggaccctgg

SEQ ID NO: 31448 - DNA, 15 bp, Homo sapiens
aggtgggaccctggt

SEQ ID NO: 31449 - DNA, 15 bp, Homo sapiens
ggtgggaccctggtt

SEQ ID NO: 31450 - DNA, 15 bp, Homo sapiens
gtgggaccctggttc

SEQ ID NO: 31451 - DNA, 15 bp, Homo sapiens
tgggaccctggttct

SEQ ID NO: 31452 - DNA, 15 bp, Homo sapiens
gggaccctggttctg

SEQ ID NO: 31453 - DNA, 15 bp, Homo sapiens
ggaccctggttctgg

SEQ ID NO: 31454 - DNA, 15 bp, Homo sapiens
gaccctggttctggc

SEQ ID NO: 31455 - DNA, 15 bp, Homo sapiens
accctggttctggct

SEQ ID NO: 31456 - DNA, 15 bp, Homo sapiens
ccctggttctggctc

SEQ ID NO: 31457 - DNA, 15 bp, Homo sapiens
cctggttctggctct

SEQ ID NO: 31458 - DNA, 15 bp, Homo sapiens
ctggttctggctctc

SEQ ID NO: 31459 - DNA, 15 bp, Homo sapiens
tggttctggctctct

SEQ ID NO: 31460 - DNA, 15 bp, Homo sapiens
ggttctggctctctc

SEQ ID NO: 31461 - DNA, 15 bp, Homo sapiens
gttctggctctctcc

SEQ ID NO: 31462 - DNA, 15 bp, Homo sapiens
ttctggctctctccc

SEQ ID NO: 31463 - DNA, 15 bp, Homo sapiens
tctggctctctcccc

SEQ ID NO: 31464 - DNA, 15 bp, Homo sapiens
ctggctctctcccca

SEQ ID NO: 31465 - DNA, 15 bp, Homo sapiens
tggctctctccccaa

SEQ ID NO: 31466 - DNA, 15 bp, Homo sapiens
ggctctctccccaac

SEQ ID NO: 31467 - DNA, 15 bp, Homo sapiens
gctctctccccaact

SEQ ID NO: 31468 - DNA, 15 bp, Homo sapiens
ctctctccccaactg

SEQ ID NO: 31469 - DNA, 15 bp, Homo sapiens
tctctccccaactga

SEQ ID NO: 31470 - DNA, 15 bp, Homo sapiens
ctctccccaactgaa

SEQ ID NO: 31471 - DNA, 15 bp, Homo sapiens
tctccccaactgaag

SEQ ID NO: 31472 - DNA, 15 bp, Homo sapiens
ctccccaactgaagg

SEQ ID NO: 31473 - DNA, 15 bp, Homo sapiens
tccccaactgaaggc

SEQ ID NO: 31474 - DNA, 15 bp, Homo sapiens
ccccaactgaaggcc

SEQ ID NO: 31475 - DNA, 15 bp, Homo sapiens
cccaactgaaggcct

SEQ ID NO: 31476 - DNA, 15 bp, Homo sapiens
ccaactgaaggcctc

SEQ ID NO: 31477 - DNA, 15 bp, Homo sapiens
caactgaaggcctca

SEQ ID NO: 31478 - DNA, 15 bp, Homo sapiens
aactgaaggcctcag

SEQ ID NO: 31479 - DNA, 15 bp, Homo sapiens
actgaaggcctcagt

SEQ ID NO: 31480 - DNA, 15 bp, Homo sapiens
ctgaaggcctcagtt

SEQ ID NO: 31481 - DNA, 15 bp, Homo sapiens
tgaaggcctcagttt

SEQ ID NO: 31482 - DNA, 15 bp, Homo sapiens
gaaggcctcagttta

SEQ ID NO: 31483 - DNA, 15 bp, Homo sapiens
aaggcctcagtttac

SEQ ID NO: 31484 - DNA, 15 bp, Homo sapiens
aggcctcagtttacc

SEQ ID NO: 31485 - DNA, 15 bp, Homo sapiens
ggcctcagtttaccc

SEQ ID NO: 31486 - DNA, 15 bp, Homo sapiens
gcctcagtttacccc

SEQ ID NO: 31487 - DNA, 15 bp, Homo sapiens
cctcagtttacccct

SEQ ID NO: 31488 - DNA, 15 bp, Homo sapiens
ctcagtttacccctc

SEQ ID NO: 31489 - DNA, 15 bp, Homo sapiens
tcagtttacccctca

SEQ ID NO: 31490 - DNA, 15 bp, Homo sapiens
cagtttacccctcag

SEQ ID NO: 31491 - DNA, 15 bp, Homo sapiens
agtttacccctcagc

SEQ ID NO: 31492 - DNA, 15 bp, Homo sapiens
gtttacccctcagca

SEQ ID NO: 31493 - DNA, 15 bp, Homo sapiens
tttacccctcagcac

SEQ ID NO: 31494 - DNA, 15 bp, Homo sapiens
ttacccctcagcacc

SEQ ID NO: 31495 - DNA, 15 bp, Homo sapiens
tacccctcagcaccc

SEQ ID NO: 31496 - DNA, 15 bp, Homo sapiens
acccctcagcaccca

SEQ ID NO: 31497 - DNA, 15 bp, Homo sapiens
cccctcagcacccag

SEQ ID NO: 31498 - DNA, 15 bp, Homo sapiens
ccctcagcacccaga

SEQ ID NO: 31499 - DNA, 15 bp, Homo sapiens
cctcagcacccagaa

SEQ ID NO: 31500 - DNA, 15 bp, Homo sapiens
ctcagcacccagaag

SEQ ID NO: 31501 - DNA, 15 bp, Homo sapiens
tcagcacccagaagg

SEQ ID NO: 31502 - DNA, 15 bp, Homo sapiens
cagcacccagaaggg

SEQ ID NO: 31503 - DNA, 15 bp, Homo sapiens
agcacccagaagggg

SEQ ID NO: 31504 - DNA, 15 bp, Homo sapiens
gcacccagaaggggg

SEQ ID NO: 31505 - DNA, 15 bp, Homo sapiens
cacccagaaggggga

SEQ ID NO: 31506 - DNA, 15 bp, Homo sapiens
acccagaagggggaa

SEQ ID NO: 31507 - DNA, 15 bp, Homo sapiens
cccagaagggggaag

SEQ ID NO: 31508 - DNA, 15 bp, Homo sapiens
ccagaagggggaagg

SEQ ID NO: 31509 - DNA, 15 bp, Homo sapiens
cagaagggggaaggg

SEQ ID NO: 31510 - DNA, 15 bp, Homo sapiens
agaagggggaagggg

SEQ ID NO: 31511 - DNA, 15 bp, Homo sapiens
gaagggggaagggga

SEQ ID NO: 31512 - DNA, 15 bp, Homo sapiens
aagggggaaggggaa

SEQ ID NO: 31513 - DNA, 15 bp, Homo sapiens
agggggaaggggaac

SEQ ID NO: 31514 - DNA, 15 bp, Homo sapiens
gggggaaggggaacc

SEQ ID NO: 31515 - DNA, 15 bp, Homo sapiens
ggggaaggggaacct

SEQ ID NO: 31516 - DNA, 15 bp, Homo sapiens
gggaaggggaacctg

SEQ ID NO: 31517 - DNA, 15 bp, Homo sapiens
ggaaggggaacctgg

SEQ ID NO: 31518 - DNA, 15 bp, Homo sapiens
gaaggggaacctggg

SEQ ID NO: 31519 - DNA, 15 bp, Homo sapiens
aaggggaacctgggc

SEQ ID NO: 31520 - DNA, 15 bp, Homo sapiens
aggggaacctgggct

SEQ ID NO: 31521 - DNA, 15 bp, Homo sapiens
ggggaacctgggcta

SEQ ID NO: 31522 - DNA, 15 bp, Homo sapiens
gggaacctgggctac

SEQ ID NO: 31523 - DNA, 15 bp, Homo sapiens
ggaacctgggctacc

SEQ ID NO: 31524 - DNA, 15 bp, Homo sapiens
gaacctgggctacca

SEQ ID NO: 31525 - DNA, 15 bp, Homo sapiens
aacctgggctaccat

SEQ ID NO: 31526 - DNA, 15 bp, Homo sapiens
acctgggctaccatt

SEQ ID NO: 31527 - DNA, 15 bp, Homo sapiens
cctgggctaccattc

SEQ ID NO: 31528 - DNA, 15 bp, Homo sapiens
ctgggctaccattcc

SEQ ID NO: 31529 - DNA, 15 bp, Homo sapiens
tgggctaccattccc

SEQ ID NO: 31530 - DNA, 15 bp, Homo sapiens
gggctaccattcccc

SEQ ID NO: 31531 - DNA, 15 bp, Homo sapiens
ggctaccattccccc

SEQ ID NO: 31532 - DNA, 15 bp, Homo sapiens
gctaccattccccct

SEQ ID NO: 31533 - DNA, 15 bp, Homo sapiens
ctaccattccccctt

SEQ ID NO: 31534 - DNA, 15 bp, Homo sapiens
taccattcccccttc

SEQ ID NO: 31535 - DNA, 15 bp, Homo sapiens
accattcccccttct

SEQ ID NO: 31536 - DNA, 15 bp, Homo sapiens
ccattcccccttctg

SEQ ID NO: 31537 - DNA, 15 bp, Homo sapiens
cattcccccttctgc

SEQ ID NO: 31538 - DNA, 15 bp, Homo sapiens
attcccccttctgcc

SEQ ID NO: 31539 - DNA, 15 bp, Homo sapiens
ttcccccttctgcct

SEQ ID NO: 31540 - DNA, 15 bp, Homo sapiens
tcccccttctgcctt

SEQ ID NO: 31541 - DNA, 15 bp, Homo sapiens
cccccttctgccttc

SEQ ID NO: 31542 - DNA, 15 bp, Homo sapiens
ccccttctgccttct

SEQ ID NO: 31543 - DNA, 15 bp, Homo sapiens
cccttctgccttctc

SEQ ID NO: 31544 - DNA, 15 bp, Homo sapiens
ccttctgccttctca

SEQ ID NO: 31545 - DNA, 15 bp, Homo sapiens
cttctgccttctcac

SEQ ID NO: 31546 - DNA, 15 bp, Homo sapiens
ttctgccttctcaca

SEQ ID NO: 31547 - DNA, 15 bp, Homo sapiens
tctgccttctcacac

SEQ ID NO: 31548 - DNA, 15 bp, Homo sapiens
ctgccttctcacacg

SEQ ID NO: 31549 - DNA, 15 bp, Homo sapiens
tgccttctcacacgt

SEQ ID NO: 31550 - DNA, 15 bp, Homo sapiens
gccttctcacacgtt

SEQ ID NO: 31551 - DNA, 15 bp, Homo sapiens
ccttctcacacgttg

SEQ ID NO: 31552 - DNA, 15 bp, Homo sapiens
cttctcacacgttgg

SEQ ID NO: 31553 - DNA, 15 bp, Homo sapiens
ttctcacacgttgga

SEQ ID NO: 31554 - DNA, 15 bp, Homo sapiens
tctcacacgttggac

SEQ ID NO: 31555 - DNA, 15 bp, Homo sapiens
ctcacacgttggacc

SEQ ID NO: 31556 - DNA, 15 bp, Homo sapiens
tcacacgttggaccc

SEQ ID NO: 31557 - DNA, 15 bp, Homo sapiens
cacacgttggacccc

SEQ ID NO: 31558 - DNA, 15 bp, Homo sapiens
acacgttggacccca

SEQ ID NO: 31559 - DNA, 15 bp, Homo sapiens
cacgttggaccccaa

SEQ ID NO: 31560 - DNA, 15 bp, Homo sapiens
acgttggaccccaac

SEQ ID NO: 31561 - DNA, 15 bp, Homo sapiens
cgttggaccccaact

SEQ ID NO: 31562 - DNA, 15 bp, Homo sapiens
gttggaccccaactt

SEQ ID NO: 31563 - DNA, 15 bp, Homo sapiens
ttggaccccaacttc

SEQ ID NO: 31564 - DNA, 15 bp, Homo sapiens
tggaccccaacttcc

SEQ ID NO: 31565 - DNA, 15 bp, Homo sapiens
ggaccccaacttccc

SEQ ID NO: 31566 - DNA, 15 bp, Homo sapiens
gaccccaacttccca

SEQ ID NO: 31567 - DNA, 15 bp, Homo sapiens
accccaacttcccac

SEQ ID NO: 31568 - DNA, 15 bp, Homo sapiens
ccccaacttcccaca

SEQ ID NO: 31569 - DNA, 15 bp, Homo sapiens
cccaacttcccacag

SEQ ID NO: 31570 - DNA, 15 bp, Homo sapiens
ccaacttcccacagg

SEQ ID NO: 31571 - DNA, 15 bp, Homo sapiens
caacttcccacaggt

SEQ ID NO: 31572 - DNA, 15 bp, Homo sapiens
aacttcccacaggtt

SEQ ID NO: 31573 - DNA, 15 bp, Homo sapiens
acttcccacaggttg

SEQ ID NO: 31574 - DNA, 15 bp, Homo sapiens
cttcccacaggttgg

SEQ ID NO: 31575 - DNA, 15 bp, Homo sapiens
ttcccacaggttgga

SEQ ID NO: 31576 - DNA, 15 bp, Homo sapiens
tcccacaggttggac

SEQ ID NO: 31577 - DNA, 15 bp, Homo sapiens
cccacaggttggacg

SEQ ID NO: 31578 - DNA, 15 bp, Homo sapiens
ccacaggttggacga

SEQ ID NO: 31579 - DNA, 15 bp, Homo sapiens
cacaggttggacgat

SEQ ID NO: 31580 - DNA, 15 bp, Homo sapiens
acaggttggacgatc

SEQ ID NO: 31581 - DNA, 15 bp, Homo sapiens
caggttggacgatcc

SEQ ID NO: 31582 - DNA, 15 bp, Homo sapiens
aggttggacgatcca

SEQ ID NO: 31583 - DNA, 15 bp, Homo sapiens
ggttggacgatccac

SEQ ID NO: 31584 - DNA, 15 bp, Homo sapiens
gttggacgatccacg

SEQ ID NO: 31585 - DNA, 15 bp, Homo sapiens
ttggacgatccacga

SEQ ID NO: 31586 - DNA, 15 bp, Homo sapiens
tggacgatccacgat

SEQ ID NO: 31587 - DNA, 15 bp, Homo sapiens
ggacgatccacgatc

SEQ ID NO: 31588 - DNA, 15 bp, Homo sapiens
gacgatccacgatca

SEQ ID NO: 31589 - DNA, 15 bp, Homo sapiens
acgatccacgatcac

SEQ ID NO: 31590 - DNA, 15 bp, Homo sapiens
cgatccacgatcaca

SEQ ID NO: 31591 - DNA, 15 bp, Homo sapiens
gatccacgatcacag

SEQ ID NO: 31592 - DNA, 15 bp, Homo sapiens
atccacgatcacagt

SEQ ID NO: 31593 - DNA, 15 bp, Homo sapiens
tccacgatcacagtg

SEQ ID NO: 31594 - DNA, 15 bp, Homo sapiens
ccacgatcacagtgt

SEQ ID NO: 31595 - DNA, 15 bp, Homo sapiens
cacgatcacagtgtg

SEQ ID NO: 31596 - DNA, 15 bp, Homo sapiens
acgatcacagtgtgg

SEQ ID NO: 31597 - DNA, 15 bp, Homo sapiens
cgatcacagtgtggg

SEQ ID NO: 31598 - DNA, 15 bp, Homo sapiens
gatcacagtgtgggg

SEQ ID NO: 31599 - DNA, 15 bp, Homo sapiens
atcacagtgtggggc

SEQ ID NO: 31600 - DNA, 15 bp, Homo sapiens
tcacagtgtggggcc

SEQ ID NO: 31601 - DNA, 15 bp, Homo sapiens
cacagtgtggggccc

SEQ ID NO: 31602 - DNA, 15 bp, Homo sapiens
acagtgtggggccca

SEQ ID NO: 31603 - DNA, 15 bp, Homo sapiens
cagtgtggggcccag

SEQ ID NO: 31604 - DNA, 15 bp, Homo sapiens
agtgtggggcccagc

SEQ ID NO: 31605 - DNA, 15 bp, Homo sapiens
gtgtggggcccagcc

SEQ ID NO: 31606 - DNA, 15 bp, Homo sapiens
tgtggggcccagcct

SEQ ID NO: 31607 - DNA, 15 bp, Homo sapiens
gtggggcccagcctc

SEQ ID NO: 31608 - DNA, 15 bp, Homo sapiens
tggggcccagcctca

SEQ ID NO: 31609 - DNA, 15 bp, Homo sapiens
ggggcccagcctcac

SEQ ID NO: 31610 - DNA, 15 bp, Homo sapiens
gggcccagcctcaca

SEQ ID NO: 31611 - DNA, 15 bp, Homo sapiens
ggcccagcctcacaa

SEQ ID NO: 31612 - DNA, 15 bp, Homo sapiens
gcccagcctcacaag

SEQ ID NO: 31613 - DNA, 15 bp, Homo sapiens
cccagcctcacaaga

SEQ ID NO: 31614 - DNA, 15 bp, Homo sapiens
ccagcctcacaagag

SEQ ID NO: 31615 - DNA, 15 bp, Homo sapiens
cagcctcacaagagc

SEQ ID NO: 31616 - DNA, 15 bp, Homo sapiens
agcctcacaagagct

SEQ ID NO: 31617 - DNA, 15 bp, Homo sapiens
gcctcacaagagctg

SEQ ID NO: 31618 - DNA, 15 bp, Homo sapiens
cctcacaagagctgg

SEQ ID NO: 31619 - DNA, 15 bp, Homo sapiens
ctcacaagagctggg

SEQ ID NO: 31620 - DNA, 15 bp, Homo sapiens
tcacaagagctgggc

SEQ ID NO: 31621 - DNA, 15 bp, Homo sapiens
cacaagagctgggct

SEQ ID NO: 31622 - DNA, 15 bp, Homo sapiens
acaagagctgggcta

SEQ ID NO: 31623 - DNA, 15 bp, Homo sapiens
caagagctgggctag

SEQ ID NO: 31624 - DNA, 15 bp, Homo sapiens
aagagctgggctagg

SEQ ID NO: 31625 - DNA, 15 bp, Homo sapiens
agagctgggctaggt

SEQ ID NO: 31626 - DNA, 15 bp, Homo sapiens
gagctgggctaggtg

SEQ ID NO: 31627 - DNA, 15 bp, Homo sapiens
agctgggctaggtga

SEQ ID NO: 31628 - DNA, 15 bp, Homo sapiens
gctgggctaggtgag

SEQ ID NO: 31629 - DNA, 15 bp, Homo sapiens
ctgggctaggtgagg

SEQ ID NO: 31630 - DNA, 15 bp, Homo sapiens
tgggctaggtgaggc

SEQ ID NO: 31631 - DNA, 15 bp, Homo sapiens
gggctaggtgaggcc

SEQ ID NO: 31632 - DNA, 15 bp, Homo sapiens
ggctaggtgaggccc

SEQ ID NO: 31633 - DNA, 15 bp, Homo sapiens
gctaggtgaggcccc

SEQ ID NO: 31634 - DNA, 15 bp, Homo sapiens
ctaggtgaggccccg

SEQ ID NO: 31635 - DNA, 15 bp, Homo sapiens
taggtgaggccccgg

SEQ ID NO: 31636 - DNA, 15 bp, Homo sapiens
aggtgaggccccgga

SEQ ID NO: 31637 - DNA, 15 bp, Homo sapiens
ggtgaggccccggac

SEQ ID NO: 31638 - DNA, 15 bp, Homo sapiens
gtgaggccccggact

SEQ ID NO: 31639 - DNA, 15 bp, Homo sapiens
tgaggccccggactc

SEQ ID NO: 31640 - DNA, 15 bp, Homo sapiens
gaggccccggactcc

SEQ ID NO: 31641 - DNA, 15 bp, Homo sapiens
aggccccggactcca

SEQ ID NO: 31642 - DNA, 15 bp, Homo sapiens
ggccccggactccat

SEQ ID NO: 31643 - DNA, 15 bp, Homo sapiens
gccccggactccata

SEQ ID NO: 31644 - DNA, 15 bp, Homo sapiens
ccccggactccatag

SEQ ID NO: 31645 - DNA, 15 bp, Homo sapiens
cccggactccatagg

SEQ ID NO: 31646 - DNA, 15 bp, Homo sapiens
ccggactccataggt

SEQ ID NO: 31647 - DNA, 15 bp, Homo sapiens
cggactccataggtc

SEQ ID NO: 31648 - DNA, 15 bp, Homo sapiens
ggactccataggtca

SEQ ID NO: 31649 - DNA, 15 bp, Homo sapiens
gactccataggtcag

SEQ ID NO: 31650 - DNA, 15 bp, Homo sapiens
actccataggtcagg

SEQ ID NO: 31651 - DNA, 15 bp, Homo sapiens
ctccataggtcagga

SEQ ID NO: 31652 - DNA, 15 bp, Homo sapiens
tccataggtcaggag

SEQ ID NO: 31653 - DNA, 15 bp, Homo sapiens
ccataggtcaggagg

SEQ ID NO: 31654 - DNA, 15 bp, Homo sapiens
cataggtcaggaggc

SEQ ID NO: 31655 - DNA, 15 bp, Homo sapiens
ataggtcaggaggcc

SEQ ID NO: 31656 - DNA, 15 bp, Homo sapiens
taggtcaggaggcct

SEQ ID NO: 31657 - DNA, 15 bp, Homo sapiens
aggtcaggaggccta

SEQ ID NO: 31658 - DNA, 15 bp, Homo sapiens
ggtcaggaggcctag

SEQ ID NO: 31659 - DNA, 15 bp, Homo sapiens
gtcaggaggcctagt

SEQ ID NO: 31660 - DNA, 15 bp, Homo sapiens
tcaggaggcctagtt

SEQ ID NO: 31661 - DNA, 15 bp, Homo sapiens
caggaggcctagttg

SEQ ID NO: 31662 - DNA, 15 bp, Homo sapiens
aggaggcctagttgg

SEQ ID NO: 31663 - DNA, 15 bp, Homo sapiens
ggaggcctagttggc

SEQ ID NO: 31664 - DNA, 15 bp, Homo sapiens
gaggcctagttggcc

SEQ ID NO: 31665 - DNA, 15 bp, Homo sapiens
aggcctagttggcca

SEQ ID NO: 31666 - DNA, 15 bp, Homo sapiens
ggcctagttggccag

SEQ ID NO: 31667 - DNA, 15 bp, Homo sapiens
gcctagttggccaga

SEQ ID NO: 31668 - DNA, 15 bp, Homo sapiens
cctagttggccagag

SEQ ID NO: 31669 - DNA, 15 bp, Homo sapiens
ctagttggccagagc

SEQ ID NO: 31670 - DNA, 15 bp, Homo sapiens
tagttggccagagcg

SEQ ID NO: 31671 - DNA, 15 bp, Homo sapiens
agttggccagagcgt

SEQ ID NO: 31672 - DNA, 15 bp, Homo sapiens
gttggccagagcgtg

SEQ ID NO: 31673 - DNA, 15 bp, Homo sapiens
ttggccagagcgtgg

SEQ ID NO: 31674 - DNA, 15 bp, Homo sapiens
tggccagagcgtggt

SEQ ID NO: 31675 - DNA, 15 bp, Homo sapiens
ggccagagcgtggtg

SEQ ID NO: 31676 - DNA, 15 bp, Homo sapiens
gccagagcgtggtga

SEQ ID NO: 31677 - DNA, 15 bp, Homo sapiens
ccagagcgtggtgat

SEQ ID NO: 31678 - DNA, 15 bp, Homo sapiens
cagagcgtggtgatg

SEQ ID NO: 31679 - DNA, 15 bp, Homo sapiens
agagcgtggtgatga

SEQ ID NO: 31680 - DNA, 15 bp, Homo sapiens
gagcgtggtgatgat

SEQ ID NO: 31681 - DNA, 15 bp, Homo sapiens
agcgtggtgatgatg

SEQ ID NO: 31682 - DNA, 15 bp, Homo sapiens
gcgtggtgatgatgg

SEQ ID NO: 31683 - DNA, 15 bp, Homo sapiens
cgtggtgatgatgga

SEQ ID NO: 31684 - DNA, 15 bp, Homo sapiens
gtggtgatgatggag

SEQ ID NO: 31685 - DNA, 15 bp, Homo sapiens
tggtgatgatggagg

SEQ ID NO: 31686 - DNA, 15 bp, Homo sapiens
ggtgatgatggaggc

SEQ ID NO: 31687 - DNA, 15 bp, Homo sapiens
gtgatgatggaggca

SEQ ID NO: 31688 - DNA, 15 bp, Homo sapiens
tgatgatggaggcat

SEQ ID NO: 31689 - DNA, 15 bp, Homo sapiens
gatgatggaggcatg

SEQ ID NO: 31690 - DNA, 15 bp, Homo sapiens
atgatggaggcatgt

SEQ ID NO: 31691 - DNA, 15 bp, Homo sapiens
tgatggaggcatgtc

SEQ ID NO: 31692 - DNA, 15 bp, Homo sapiens
gatggaggcatgtca

SEQ ID NO: 31693 - DNA, 15 bp, Homo sapiens
atggaggcatgtcag

SEQ ID NO: 31694 - DNA, 15 bp, Homo sapiens
tggaggcatgtcagt

SEQ ID NO: 31695 - DNA, 15 bp, Homo sapiens
ggaggcatgtcagtc

SEQ ID NO: 31696 - DNA, 15 bp, Homo sapiens
gaggcatgtcagtca

SEQ ID NO: 31697 - DNA, 15 bp, Homo sapiens
aggcatgtcagtcag

SEQ ID NO: 31698 - DNA, 15 bp, Homo sapiens
ggcatgtcagtcagt

SEQ ID NO: 31699 - DNA, 15 bp, Homo sapiens
gcatgtcagtcagtc

SEQ ID NO: 31700 - DNA, 15 bp, Homo sapiens
catgtcagtcagtca

SEQ ID NO: 31701 - DNA, 15 bp, Homo sapiens
atgtcagtcagtcag

SEQ ID NO: 31702 - DNA, 15 bp, Homo sapiens
tgtcagtcagtcagg

SEQ ID NO: 31703 - DNA, 15 bp, Homo sapiens
gtcagtcagtcaggc

SEQ ID NO: 31704 - DNA, 15 bp, Homo sapiens
tcagtcagtcaggct

SEQ ID NO: 31705 - DNA, 15 bp, Homo sapiens
cagtcagtcaggctg

SEQ ID NO: 31706 - DNA, 15 bp, Homo sapiens
agtcagtcaggctgt

SEQ ID NO: 31707 - DNA, 15 bp, Homo sapiens
gtcagtcaggctgtg

SEQ ID NO: 31708 - DNA, 15 bp, Homo sapiens
tcagtcaggctgtgt

SEQ ID NO: 31709 - DNA, 15 bp, Homo sapiens
cagtcaggctgtgtg

SEQ ID NO: 31710 - DNA, 15 bp, Homo sapiens
agtcaggctgtgtgt

SEQ ID NO: 31711 - DNA, 15 bp, Homo sapiens
gtcaggctgtgtgtc

SEQ ID NO: 31712 - DNA, 15 bp, Homo sapiens
tcaggctgtgtgtcc

SEQ ID NO: 31713 - DNA, 15 bp, Homo sapiens
caggctgtgtgtccc

SEQ ID NO: 31714 - DNA, 15 bp, Homo sapiens
aggctgtgtgtcccc

SEQ ID NO: 31715 - DNA, 15 bp, Homo sapiens
ggctgtgtgtcccca

SEQ ID NO: 31716 - DNA, 15 bp, Homo sapiens
gctgtgtgtccccag

SEQ ID NO: 31717 - DNA, 15 bp, Homo sapiens
ctgtgtgtccccaga

SEQ ID NO: 31718 - DNA, 15 bp, Homo sapiens
tgtgtgtccccagag

SEQ ID NO: 31719 - DNA, 15 bp, Homo sapiens
gtgtgtccccagagc

SEQ ID NO: 31720 - DNA, 15 bp, Homo sapiens
tgtgtccccagagct

SEQ ID NO: 31721 - DNA, 15 bp, Homo sapiens
gtgtccccagagctg

SEQ ID NO: 31722 - DNA, 15 bp, Homo sapiens
tgtccccagagctgg

SEQ ID NO: 31723 - DNA, 15 bp, Homo sapiens
gtccccagagctggt

SEQ ID NO: 31724 - DNA, 15 bp, Homo sapiens
tccccagagctggtg

SEQ ID NO: 31725 - DNA, 15 bp, Homo sapiens
ccccagagctggtgc

SEQ ID NO: 31726 - DNA, 15 bp, Homo sapiens
cccagagctggtgct

SEQ ID NO: 31727 - DNA, 15 bp, Homo sapiens
ccagagctggtgctg

SEQ ID NO: 31728 - DNA, 15 bp, Homo sapiens
cagagctggtgctgg

SEQ ID NO: 31729 - DNA, 15 bp, Homo sapiens
agagctggtgctggt

SEQ ID NO: 31730 - DNA, 15 bp, Homo sapiens
gagctggtgctggtc

SEQ ID NO: 31731 - DNA, 15 bp, Homo sapiens
agctggtgctggtcc

SEQ ID NO: 31732 - DNA, 15 bp, Homo sapiens
gctggtgctggtccc

SEQ ID NO: 31733 - DNA, 15 bp, Homo sapiens
ctggtgctggtcccc

SEQ ID NO: 31734 - DNA, 15 bp, Homo sapiens
tggtgctggtccccg

SEQ ID NO: 31735 - DNA, 15 bp, Homo sapiens
ggtgctggtccccga

SEQ ID NO: 31736 - DNA, 15 bp, Homo sapiens
gtgctggtccccgaa

SEQ ID NO: 31737 - DNA, 15 bp, Homo sapiens
tgctggtccccgaaa

SEQ ID NO: 31738 - DNA, 15 bp, Homo sapiens
gctggtccccgaaaa

SEQ ID NO: 31739 - DNA, 15 bp, Homo sapiens
ctggtccccgaaaac

SEQ ID NO: 31740 - DNA, 15 bp, Homo sapiens
tggtccccgaaaacc

SEQ ID NO: 31741 - DNA, 15 bp, Homo sapiens
ggtccccgaaaacct

SEQ ID NO: 31742 - DNA, 15 bp, Homo sapiens
gtccccgaaaacctt

SEQ ID NO: 31743 - DNA, 15 bp, Homo sapiens
tccccgaaaaccttg

SEQ ID NO: 31744 - DNA, 15 bp, Homo sapiens
ccccgaaaaccttga

SEQ ID NO: 31745 - DNA, 15 bp, Homo sapiens
cccgaaaaccttgat

SEQ ID NO: 31746 - DNA, 15 bp, Homo sapiens
ccgaaaaccttgatt

SEQ ID NO: 31747 - DNA, 15 bp, Homo sapiens
cgaaaaccttgattg

SEQ ID NO: 31748 - DNA, 15 bp, Homo sapiens
gaaaaccttgattgt

SEQ ID NO: 31749 - DNA, 15 bp, Homo sapiens
aaaaccttgattgtg

SEQ ID NO: 31750 - DNA, 15 bp, Homo sapiens
aaaccttgattgtgg

SEQ ID NO: 31751 - DNA, 15 bp, Homo sapiens
aaccttgattgtggg

SEQ ID NO: 31752 - DNA, 15 bp, Homo sapiens
accttgattgtgggg

SEQ ID NO: 31753 - DNA, 15 bp, Homo sapiens
ccttgattgtggggc

SEQ ID NO: 31754 - DNA, 15 bp, Homo sapiens
cttgattgtggggcc

SEQ ID NO: 31755 - DNA, 15 bp, Homo sapiens
ttgattgtggggccc

SEQ ID NO: 31756 - DNA, 15 bp, Homo sapiens
tgattgtggggcccc

SEQ ID NO: 31757 - DNA, 15 bp, Homo sapiens
gattgtggggcccct

SEQ ID NO: 31758 - DNA, 15 bp, Homo sapiens
attgtggggcccctc

SEQ ID NO: 31759 - DNA, 15 bp, Homo sapiens
ttgtggggcccctct

SEQ ID NO: 31760 - DNA, 15 bp, Homo sapiens
tgtggggcccctcta

SEQ ID NO: 31761 - DNA, 15 bp, Homo sapiens
gtggggcccctctag

SEQ ID NO: 31762 - DNA, 15 bp, Homo sapiens
tggggcccctctaga

SEQ ID NO: 31763 - DNA, 15 bp, Homo sapiens
ggggcccctctagag

SEQ ID NO: 31764 - DNA, 15 bp, Homo sapiens
gggcccctctagaga

SEQ ID NO: 31765 - DNA, 15 bp, Homo sapiens
ggcccctctagagag

SEQ ID NO: 31766 - DNA, 15 bp, Homo sapiens
gcccctctagagagt

SEQ ID NO: 31767 - DNA, 15 bp, Homo sapiens
cccctctagagagtc

SEQ ID NO: 31768 - DNA, 15 bp, Homo sapiens
ccctctagagagtct

SEQ ID NO: 31769 - DNA, 15 bp, Homo sapiens
cctctagagagtctg

SEQ ID NO: 31770 - DNA, 15 bp, Homo sapiens
ctctagagagtctga

SEQ ID NO: 31771 - DNA, 15 bp, Homo sapiens
tctagagagtctgat

SEQ ID NO: 31772 - DNA, 15 bp, Homo sapiens
ctagagagtctgatg

SEQ ID NO: 31773 - DNA, 15 bp, Homo sapiens
tagagagtctgatga

SEQ ID NO: 31774 - DNA, 15 bp, Homo sapiens
agagagtctgatgat

SEQ ID NO: 31775 - DNA, 15 bp, Homo sapiens
gagagtctgatgatg

SEQ ID NO: 31776 - DNA, 15 bp, Homo sapiens
agagtctgatgatgg

SEQ ID NO: 31777 - DNA, 15 bp, Homo sapiens
gagtctgatgatggg

SEQ ID NO: 31778 - DNA, 15 bp, Homo sapiens
agtctgatgatgggc

SEQ ID NO: 31779 - DNA, 15 bp, Homo sapiens
gtctgatgatgggct

SEQ ID NO: 31780 - DNA, 15 bp, Homo sapiens
tctgatgatgggctc

SEQ ID NO: 31781 - DNA, 15 bp, Homo sapiens
ctgatgatgggctct

SEQ ID NO: 31782 - DNA, 15 bp, Homo sapiens
tgatgatgggctctg

SEQ ID NO: 31783 - DNA, 15 bp, Homo sapiens
gatgatgggctctgt

SEQ ID NO: 31784 - DNA, 15 bp, Homo sapiens
atgatgggctctgta

SEQ ID NO: 31785 - DNA, 15 bp, Homo sapiens
tgatgggctctgtat

SEQ ID NO: 31786 - DNA, 15 bp, Homo sapiens
gatgggctctgtatt

SEQ ID NO: 31787 - DNA, 15 bp, Homo sapiens
atgggctctgtattg

SEQ ID NO: 31788 - DNA, 15 bp, Homo sapiens
tgggctctgtattgg

SEQ ID NO: 31789 - DNA, 15 bp, Homo sapiens
gggctctgtattggc

SEQ ID NO: 31790 - DNA, 15 bp, Homo sapiens
ggctctgtattggcg

SEQ ID NO: 31791 - DNA, 15 bp, Homo sapiens
gctctgtattggcga

SEQ ID NO: 31792 - DNA, 15 bp, Homo sapiens
ctctgtattggcgaa

SEQ ID NO: 31793 - DNA, 15 bp, Homo sapiens
tctgtattggcgaag

SEQ ID NO: 31794 - DNA, 15 bp, Homo sapiens
ctgtattggcgaagg

SEQ ID NO: 31795 - DNA, 15 bp, Homo sapiens
tgtattggcgaaggc

SEQ ID NO: 31796 - DNA, 15 bp, Homo sapiens
gtattggcgaaggct

SEQ ID NO: 31797 - DNA, 15 bp, Homo sapiens
tattggcgaaggctg

SEQ ID NO: 31798 - DNA, 15 bp, Homo sapiens
attggcgaaggctga

SEQ ID NO: 31799 - DNA, 15 bp, Homo sapiens
ttggcgaaggctgag

SEQ ID NO: 31800 - DNA, 15 bp, Homo sapiens
tggcgaaggctgagg

SEQ ID NO: 31801 - DNA, 15 bp, Homo sapiens
ggcgaaggctgaggc

SEQ ID NO: 31802 - DNA, 15 bp, Homo sapiens
gcgaaggctgaggct

SEQ ID NO: 31803 - DNA, 15 bp, Homo sapiens
cgaaggctgaggctt

SEQ ID NO: 31804 - DNA, 15 bp, Homo sapiens
gaaggctgaggcttt

SEQ ID NO: 31805 - DNA, 15 bp, Homo sapiens
aaggctgaggctttt

SEQ ID NO: 31806 - DNA, 15 bp, Homo sapiens
aggctgaggcttttc

SEQ ID NO: 31807 - DNA, 15 bp, Homo sapiens
ggctgaggcttttcc

SEQ ID NO: 31808 - DNA, 15 bp, Homo sapiens
gctgaggcttttcca

SEQ ID NO: 31809 - DNA, 15 bp, Homo sapiens
ctgaggcttttccag

SEQ ID NO: 31810 - DNA, 15 bp, Homo sapiens
tgaggcttttccagc

SEQ ID NO: 31811 - DNA, 15 bp, Homo sapiens
gaggcttttccagct

SEQ ID NO: 31812 - DNA, 15 bp, Homo sapiens
aggcttttccagctc

SEQ ID NO: 31813 - DNA, 15 bp, Homo sapiens
ggcttttccagctcc

SEQ ID NO: 31814 - DNA, 15 bp, Homo sapiens
gcttttccagctccc

SEQ ID NO: 31815 - DNA, 15 bp, Homo sapiens
cttttccagctcccc

SEQ ID NO: 31816 - DNA, 15 bp, Homo sapiens
ttttccagctccccc

SEQ ID NO: 31817 - DNA, 15 bp, Homo sapiens
tttccagctcccccc

SEQ ID NO: 31818 - DNA, 15 bp, Homo sapiens
ttccagctcccccca

SEQ ID NO: 31819 - DNA, 15 bp, Homo sapiens
tccagctccccccat

SEQ ID NO: 31820 - DNA, 15 bp, Homo sapiens
ccagctccccccatg

SEQ ID NO: 31821 - DNA, 15 bp, Homo sapiens
cagctccccccatga

SEQ ID NO: 31822 - DNA, 15 bp, Homo sapiens
agctccccccatgag

SEQ ID NO: 31823 - DNA, 15 bp, Homo sapiens
gctccccccatgagg

SEQ ID NO: 31824 - DNA, 15 bp, Homo sapiens
ctccccccatgaggc

SEQ ID NO: 31825 - DNA, 15 bp, Homo sapiens
tccccccatgaggcc

SEQ ID NO: 31826 - DNA, 15 bp, Homo sapiens
ccccccatgaggccc

SEQ ID NO: 31827 - DNA, 15 bp, Homo sapiens
cccccatgaggccca

SEQ ID NO: 31828 - DNA, 15 bp, Homo sapiens
ccccatgaggcccag

SEQ ID NO: 31829 - DNA, 15 bp, Homo sapiens
cccatgaggcccaga

SEQ ID NO: 31830 - DNA, 15 bp, Homo sapiens
ccatgaggcccagac

SEQ ID NO: 31831 - DNA, 15 bp, Homo sapiens
catgaggcccagacc

SEQ ID NO: 31832 - DNA, 15 bp, Homo sapiens
atgaggcccagacca

SEQ ID NO: 31833 - DNA, 15 bp, Homo sapiens
tgaggcccagaccaa

SEQ ID NO: 31834 - DNA, 15 bp, Homo sapiens
gaggcccagaccaaa

SEQ ID NO: 31835 - DNA, 15 bp, Homo sapiens
aggcccagaccaaag

SEQ ID NO: 31836 - DNA, 15 bp, Homo sapiens
ggcccagaccaaagg

SEQ ID NO: 31837 - DNA, 15 bp, Homo sapiens
gcccagaccaaaggc

SEQ ID NO: 31838 - DNA, 15 bp, Homo sapiens
cccagaccaaaggca

SEQ ID NO: 31839 - DNA, 15 bp, Homo sapiens
ccagaccaaaggcac

SEQ ID NO: 31840 - DNA, 15 bp, Homo sapiens
cagaccaaaggcaca

SEQ ID NO: 31841 - DNA, 15 bp, Homo sapiens
agaccaaaggcacac

SEQ ID NO: 31842 - DNA, 15 bp, Homo sapiens
gaccaaaggcacacc

SEQ ID NO: 31843 - DNA, 15 bp, Homo sapiens
accaaaggcacacca

SEQ ID NO: 31844 - DNA, 15 bp, Homo sapiens
ccaaaggcacaccag

SEQ ID NO: 31845 - DNA, 15 bp, Homo sapiens
caaaggcacaccagc

SEQ ID NO: 31846 - DNA, 15 bp, Homo sapiens
aaaggcacaccagcc

SEQ ID NO: 31847 - DNA, 15 bp, Homo sapiens
aaggcacaccagcct

SEQ ID NO: 31848 - DNA, 15 bp, Homo sapiens
aggcacaccagcctc

SEQ ID NO: 31849 - DNA, 15 bp, Homo sapiens
ggcacaccagcctca

SEQ ID NO: 31850 - DNA, 15 bp, Homo sapiens
gcacaccagcctcaa

SEQ ID NO: 31851 - DNA, 15 bp, Homo sapiens
cacaccagcctcaac

SEQ ID NO: 31852 - DNA, 15 bp, Homo sapiens
acaccagcctcaacc

SEQ ID NO: 31853 - DNA, 15 bp, Homo sapiens
caccagcctcaacct

SEQ ID NO: 31854 - DNA, 15 bp, Homo sapiens
accagcctcaacctc

SEQ ID NO: 31855 - DNA, 15 bp, Homo sapiens
ccagcctcaacctcc

SEQ ID NO: 31856 - DNA, 15 bp, Homo sapiens
cagcctcaacctcct

SEQ ID NO: 31857 - DNA, 15 bp, Homo sapiens
agcctcaacctcctc

SEQ ID NO: 31858 - DNA, 15 bp, Homo sapiens
gcctcaacctcctcc

SEQ ID NO: 31859 - DNA, 15 bp, Homo sapiens
cctcaacctcctcct

SEQ ID NO: 31860 - DNA, 15 bp, Homo sapiens
ctcaacctcctcctc

SEQ ID NO: 31861 - DNA, 15 bp, Homo sapiens
tcaacctcctcctcc

SEQ ID NO: 31862 - DNA, 15 bp, Homo sapiens
caacctcctcctccc

SEQ ID NO: 31863 - DNA, 15 bp, Homo sapiens
aacctcctcctcccc

SEQ ID NO: 31864 - DNA, 15 bp, Homo sapiens
acctcctcctccccc

SEQ ID NO: 31865 - DNA, 15 bp, Homo sapiens
cctcctcctccccct

SEQ ID NO: 31866 - DNA, 15 bp, Homo sapiens
ctcctcctccccctg

SEQ ID NO: 31867 - DNA, 15 bp, Homo sapiens
tcctcctccccctgt

SEQ ID NO: 31868 - DNA, 15 bp, Homo sapiens
cctcctccccctgtt

SEQ ID NO: 31869 - DNA, 15 bp, Homo sapiens
ctcctccccctgttg

SEQ ID NO: 31870 - DNA, 15 bp, Homo sapiens
tcctccccctgttgc

SEQ ID NO: 31871 - DNA, 15 bp, Homo sapiens
cctccccctgttgcc

SEQ ID NO: 31872 - DNA, 15 bp, Homo sapiens
ctccccctgttgcca

SEQ ID NO: 31873 - DNA, 15 bp, Homo sapiens
tccccctgttgccat

SEQ ID NO: 31874 - DNA, 15 bp, Homo sapiens
ccccctgttgccatc

SEQ ID NO: 31875 - DNA, 15 bp, Homo sapiens
cccctgttgccatct

SEQ ID NO: 31876 - DNA, 15 bp, Homo sapiens
ccctgttgccatctc

SEQ ID NO: 31877 - DNA, 15 bp, Homo sapiens
cctgttgccatctct

SEQ ID NO: 31878 - DNA, 15 bp, Homo sapiens
ctgttgccatctctg

SEQ ID NO: 31879 - DNA, 15 bp, Homo sapiens
tgttgccatctctgg

SEQ ID NO: 31880 - DNA, 15 bp, Homo sapiens
gttgccatctctggc

SEQ ID NO: 31881 - DNA, 15 bp, Homo sapiens
ttgccatctctggcg

SEQ ID NO: 31882 - DNA, 15 bp, Homo sapiens
tgccatctctggcgg

SEQ ID NO: 31883 - DNA, 15 bp, Homo sapiens
gccatctctggcgga

SEQ ID NO: 31884 - DNA, 15 bp, Homo sapiens
ccatctctggcggag

SEQ ID NO: 31885 - DNA, 15 bp, Homo sapiens
catctctggcggagt

SEQ ID NO: 31886 - DNA, 15 bp, Homo sapiens
atctctggcggagtg

SEQ ID NO: 31887 - DNA, 15 bp, Homo sapiens
tctctggcggagtgg

SEQ ID NO: 31888 - DNA, 15 bp, Homo sapiens
ctctggcggagtggc

SEQ ID NO: 31889 - DNA, 15 bp, Homo sapiens
tctggcggagtggcc

SEQ ID NO: 31890 - DNA, 15 bp, Homo sapiens
ctggcggagtggcca

SEQ ID NO: 31891 - DNA, 15 bp, Homo sapiens
tggcggagtggccat

SEQ ID NO: 31892 - DNA, 15 bp, Homo sapiens
ggcggagtggccatg

SEQ ID NO: 31893 - DNA, 15 bp, Homo sapiens
gcggagtggccatgt

SEQ ID NO: 31894 - DNA, 15 bp, Homo sapiens
cggagtggccatgta

SEQ ID NO: 31895 - DNA, 15 bp, Homo sapiens
ggagtggccatgtat

SEQ ID NO: 31896 - DNA, 15 bp, Homo sapiens
gagtggccatgtatt

SEQ ID NO: 31897 - DNA, 15 bp, Homo sapiens
agtggccatgtattt

SEQ ID NO: 31898 - DNA, 15 bp, Homo sapiens
gtggccatgtatttg

SEQ ID NO: 31899 - DNA, 15 bp, Homo sapiens
tggccatgtatttgg

SEQ ID NO: 31900 - DNA, 15 bp, Homo sapiens
ggccatgtatttggg

SEQ ID NO: 31901 - DNA, 15 bp, Homo sapiens
gccatgtatttggga

SEQ ID NO: 31902 - DNA, 15 bp, Homo sapiens
ccatgtatttgggaa

SEQ ID NO: 31903 - DNA, 15 bp, Homo sapiens
catgtatttgggaac

SEQ ID NO: 31904 - DNA, 15 bp, Homo sapiens
atgtatttgggaacg

SEQ ID NO: 31905 - DNA, 15 bp, Homo sapiens
tgtatttgggaacgt

SEQ ID NO: 31906 - DNA, 15 bp, Homo sapiens
gtatttgggaacgtt

SEQ ID NO: 31907 - DNA, 15 bp, Homo sapiens
tatttgggaacgttg

SEQ ID NO: 31908 - DNA, 15 bp, Homo sapiens
atttgggaacgttgt

SEQ ID NO: 31909 - DNA, 15 bp, Homo sapiens
tttgggaacgttgtt

SEQ ID NO: 31910 - DNA, 15 bp, Homo sapiens
ttgggaacgttgttc

SEQ ID NO: 31911 - DNA, 15 bp, Homo sapiens
tgggaacgttgttcc

SEQ ID NO: 31912 - DNA, 15 bp, Homo sapiens
gggaacgttgttcca

SEQ ID NO: 31913 - DNA, 15 bp, Homo sapiens
ggaacgttgttccag

SEQ ID NO: 31914 - DNA, 15 bp, Homo sapiens
gaacgttgttccaga

SEQ ID NO: 31915 - DNA, 15 bp, Homo sapiens
aacgttgttccagag

SEQ ID NO: 31916 - DNA, 15 bp, Homo sapiens
acgttgttccagagt

SEQ ID NO: 31917 - DNA, 15 bp, Homo sapiens
cgttgttccagagtg

SEQ ID NO: 31918 - DNA, 15 bp, Homo sapiens
gttgttccagagtgg

SEQ ID NO: 31919 - DNA, 15 bp, Homo sapiens
ttgttccagagtgga

SEQ ID NO: 31920 - DNA, 15 bp, Homo sapiens
tgttccagagtggac

SEQ ID NO: 31921 - DNA, 15 bp, Homo sapiens
gttccagagtggaca

SEQ ID NO: 31922 - DNA, 15 bp, Homo sapiens
ttccagagtggacag

SEQ ID NO: 31923 - DNA, 15 bp, Homo sapiens
tccagagtggacagg

SEQ ID NO: 31924 - DNA, 15 bp, Homo sapiens
ccagagtggacaggg

SEQ ID NO: 31925 - DNA, 15 bp, Homo sapiens
cagagtggacaggga

SEQ ID NO: 31926 - DNA, 15 bp, Homo sapiens
agagtggacagggag

SEQ ID NO: 31927 - DNA, 15 bp, Homo sapiens
gagtggacagggaga

SEQ ID NO: 31928 - DNA, 15 bp, Homo sapiens
agtggacagggagac

SEQ ID NO: 31929 - DNA, 15 bp, Homo sapiens
gtggacagggagact

SEQ ID NO: 31930 - DNA, 15 bp, Homo sapiens
tggacagggagactg

SEQ ID NO: 31931 - DNA, 15 bp, Homo sapiens
ggacagggagactga

SEQ ID NO: 31932 - DNA, 15 bp, Homo sapiens
gacagggagactgag

SEQ ID NO: 31933 - DNA, 15 bp, Homo sapiens
acagggagactgagg

SEQ ID NO: 31934 - DNA, 15 bp, Homo sapiens
cagggagactgaggc

SEQ ID NO: 31935 - DNA, 15 bp, Homo sapiens
agggagactgaggcc

SEQ ID NO: 31936 - DNA, 15 bp, Homo sapiens
gggagactgaggccc

SEQ ID NO: 31937 - DNA, 15 bp, Homo sapiens
ggagactgaggccct

SEQ ID NO: 31938 - DNA, 15 bp, Homo sapiens
gagactgaggcccta

SEQ ID NO: 31939 - DNA, 15 bp, Homo sapiens
agactgaggccctag

SEQ ID NO: 31940 - DNA, 15 bp, Homo sapiens
gactgaggccctagg

SEQ ID NO: 31941 - DNA, 15 bp, Homo sapiens
actgaggccctaggg

SEQ ID NO: 31942 - DNA, 15 bp, Homo sapiens
ctgaggccctaggga

SEQ ID NO: 31943 - DNA, 15 bp, Homo sapiens
tgaggccctagggag

SEQ ID NO: 31944 - DNA, 15 bp, Homo sapiens
gaggccctagggagg

SEQ ID NO: 31945 - DNA, 15 bp, Homo sapiens
aggccctagggaggc

SEQ ID NO: 31946 - DNA, 15 bp, Homo sapiens
ggccctagggaggct

SEQ ID NO: 31947 - DNA, 15 bp, Homo sapiens
gccctagggaggctg

SEQ ID NO: 31948 - DNA, 15 bp, Homo sapiens
ccctagggaggctgg

SEQ ID NO: 31949 - DNA, 15 bp, Homo sapiens
cctagggaggctggc

SEQ ID NO: 31950 - DNA, 15 bp, Homo sapiens
ctagggaggctggct

SEQ ID NO: 31951 - DNA, 15 bp, Homo sapiens
tagggaggctggctc

SEQ ID NO: 31952 - DNA, 15 bp, Homo sapiens
agggaggctggctct

SEQ ID NO: 31953 - DNA, 15 bp, Homo sapiens
gggaggctggctctg

SEQ ID NO: 31954 - DNA, 15 bp, Homo sapiens
ggaggctggctctgt

SEQ ID NO: 31955 - DNA, 15 bp, Homo sapiens
gaggctggctctgtt

SEQ ID NO: 31956 - DNA, 15 bp, Homo sapiens
aggctggctctgttt

SEQ ID NO: 31957 - DNA, 15 bp, Homo sapiens
ggctggctctgtttc

SEQ ID NO: 31958 - DNA, 15 bp, Homo sapiens
gctggctctgtttcc

SEQ ID NO: 31959 - DNA, 15 bp, Homo sapiens
ctggctctgtttcca

SEQ ID NO: 31960 - DNA, 15 bp, Homo sapiens
tggctctgtttccag

SEQ ID NO: 31961 - DNA, 15 bp, Homo sapiens
ggctctgtttccagg

SEQ ID NO: 31962 - DNA, 15 bp, Homo sapiens
gctctgtttccaggc

SEQ ID NO: 31963 - DNA, 15 bp, Homo sapiens
ctctgtttccaggcc

SEQ ID NO: 31964 - DNA, 15 bp, Homo sapiens
tctgtttccaggcct

SEQ ID NO: 31965 - DNA, 15 bp, Homo sapiens
ctgtttccaggcctg

SEQ ID NO: 31966 - DNA, 15 bp, Homo sapiens
tgtttccaggcctgg

SEQ ID NO: 31967 - DNA, 15 bp, Homo sapiens
gtttccaggcctggt

SEQ ID NO: 31968 - DNA, 15 bp, Homo sapiens
tttccaggcctggta

SEQ ID NO: 31969 - DNA, 15 bp, Homo sapiens
ttccaggcctggtag

SEQ ID NO: 31970 - DNA, 15 bp, Homo sapiens
tccaggcctggtagg

SEQ ID NO: 31971 - DNA, 15 bp, Homo sapiens
ccaggcctggtaggc

SEQ ID NO: 31972 - DNA, 15 bp, Homo sapiens
caggcctggtaggca

SEQ ID NO: 31973 - DNA, 15 bp, Homo sapiens
aggcctggtaggcaa

SEQ ID NO: 31974 - DNA, 15 bp, Homo sapiens
ggcctggtaggcaag

SEQ ID NO: 31975 - DNA, 15 bp, Homo sapiens
gcctggtaggcaaga

SEQ ID NO: 31976 - DNA, 15 bp, Homo sapiens
cctggtaggcaagag

SEQ ID NO: 31977 - DNA, 15 bp, Homo sapiens
ctggtaggcaagagg

SEQ ID NO: 31978 - DNA, 15 bp, Homo sapiens
tggtaggcaagaggc

SEQ ID NO: 31979 - DNA, 15 bp, Homo sapiens
ggtaggcaagaggcc

SEQ ID NO: 31980 - DNA, 15 bp, Homo sapiens
gtaggcaagaggccc

SEQ ID NO: 31981 - DNA, 15 bp, Homo sapiens
taggcaagaggccct

SEQ ID NO: 31982 - DNA, 15 bp, Homo sapiens
aggcaagaggcccta

SEQ ID NO: 31983 - DNA, 15 bp, Homo sapiens
ggcaagaggccctat

SEQ ID NO: 31984 - DNA, 15 bp, Homo sapiens
gcaagaggccctatg

SEQ ID NO: 31985 - DNA, 15 bp, Homo sapiens
caagaggccctatga

SEQ ID NO: 31986 - DNA, 15 bp, Homo sapiens
aagaggccctatgaa

SEQ ID NO: 31987 - DNA, 15 bp, Homo sapiens
agaggccctatgaag

SEQ ID NO: 31988 - DNA, 15 bp, Homo sapiens
gaggccctatgaagc

SEQ ID NO: 31989 - DNA, 15 bp, Homo sapiens
aggccctatgaagca

SEQ ID NO: 31990 - DNA, 15 bp, Homo sapiens
ggccctatgaagcag

SEQ ID NO: 31991 - DNA, 15 bp, Homo sapiens
gccctatgaagcagc

SEQ ID NO: 31992 - DNA, 15 bp, Homo sapiens
ccctatgaagcagca

SEQ ID NO: 31993 - DNA, 15 bp, Homo sapiens
cctatgaagcagcaa

SEQ ID NO: 31994 - DNA, 15 bp, Homo sapiens
ctatgaagcagcaag

SEQ ID NO: 31995 - DNA, 15 bp, Homo sapiens
tatgaagcagcaagc

SEQ ID NO: 31996 - DNA, 15 bp, Homo sapiens
atgaagcagcaagct

SEQ ID NO: 31997 - DNA, 15 bp, Homo sapiens
tgaagcagcaagctg

SEQ ID NO: 31998 - DNA, 15 bp, Homo sapiens
gaagcagcaagctgc

SEQ ID NO: 31999 - DNA, 15 bp, Homo sapiens
aagcagcaagctgcc

SEQ ID NO: 32000 - DNA, 15 bp, Homo sapiens
agcagcaagctgcct

SEQ ID NO: 32001 - DNA, 15 bp, Homo sapiens
gcagcaagctgcctg

SEQ ID NO: 32002 - DNA, 15 bp, Homo sapiens
cagcaagctgcctga

SEQ ID NO: 32003 - DNA, 15 bp, Homo sapiens
agcaagctgcctgac

SEQ ID NO: 32004 - DNA, 15 bp, Homo sapiens
gcaagctgcctgact

SEQ ID NO: 32005 - DNA, 15 bp, Homo sapiens
caagctgcctgactt

SEQ ID NO: 32006 - DNA, 15 bp, Homo sapiens
aagctgcctgacttt

SEQ ID NO: 32007 - DNA, 15 bp, Homo sapiens
agctgcctgactttc

SEQ ID NO: 32008 - DNA, 15 bp, Homo sapiens
gctgcctgactttca

SEQ ID NO: 32009 - DNA, 15 bp, Homo sapiens
ctgcctgactttcag

SEQ ID NO: 32010 - DNA, 15 bp, Homo sapiens
tgcctgactttcaga

SEQ ID NO: 32011 - DNA, 15 bp, Homo sapiens
gcctgactttcagat

SEQ ID NO: 32012 - DNA, 15 bp, Homo sapiens
cctgactttcagatg

SEQ ID NO: 32013 - DNA, 15 bp, Homo sapiens
ctgactttcagatgg

SEQ ID NO: 32014 - DNA, 15 bp, Homo sapiens
tgactttcagatggt

SEQ ID NO: 32015 - DNA, 15 bp, Homo sapiens
gactttcagatggtt

SEQ ID NO: 32016 - DNA, 15 bp, Homo sapiens
actttcagatggttc

SEQ ID NO: 32017 - DNA, 15 bp, Homo sapiens
ctttcagatggttcc

SEQ ID NO: 32018 - DNA, 15 bp, Homo sapiens
tttcagatggttcca

SEQ ID NO: 32019 - DNA, 15 bp, Homo sapiens
ttcagatggttccaa

SEQ ID NO: 32020 - DNA, 15 bp, Homo sapiens
tcagatggttccaag

SEQ ID NO: 32021 - DNA, 15 bp, Homo sapiens
cagatggttccaagg

SEQ ID NO: 32022 - DNA, 15 bp, Homo sapiens
agatggttccaagga

SEQ ID NO: 32023 - DNA, 15 bp, Homo sapiens
gatggttccaaggag

SEQ ID NO: 32024 - DNA, 15 bp, Homo sapiens
atggttccaaggagt

SEQ ID NO: 32025 - DNA, 15 bp, Homo sapiens
tggttccaaggagtt

SEQ ID NO: 32026 - DNA, 15 bp, Homo sapiens
ggttccaaggagttt

SEQ ID NO: 32027 - DNA, 15 bp, Homo sapiens
gttccaaggagtttg

SEQ ID NO: 32028 - DNA, 15 bp, Homo sapiens
ttccaaggagtttgg

SEQ ID NO: 32029 - DNA, 15 bp, Homo sapiens
tccaaggagtttgga

SEQ ID NO: 32030 - DNA, 15 bp, Homo sapiens
ccaaggagtttggac

SEQ ID NO: 32031 - DNA, 15 bp, Homo sapiens
caaggagtttggaca

SEQ ID NO: 32032 - DNA, 15 bp, Homo sapiens
aaggagtttggacac

SEQ ID NO: 32033 - DNA, 15 bp, Homo sapiens
aggagtttggacacc

SEQ ID NO: 32034 - DNA, 15 bp, Homo sapiens
ggagtttggacacca

SEQ ID NO: 32035 - DNA, 15 bp, Homo sapiens
gagtttggacaccag

SEQ ID NO: 32036 - DNA, 15 bp, Homo sapiens
agtttggacaccagg

SEQ ID NO: 32037 - DNA, 15 bp, Homo sapiens
gtttggacaccaggg

SEQ ID NO: 32038 - DNA, 15 bp, Homo sapiens
tttggacaccaggga

SEQ ID NO: 32039 - DNA, 15 bp, Homo sapiens
ttggacaccagggac

SEQ ID NO: 32040 - DNA, 15 bp, Homo sapiens
tggacaccagggaca

SEQ ID NO: 32041 - DNA, 15 bp, Homo sapiens
ggacaccagggacac

SEQ ID NO: 32042 - DNA, 15 bp, Homo sapiens
gacaccagggacact

SEQ ID NO: 32043 - DNA, 15 bp, Homo sapiens
acaccagggacactg

SEQ ID NO: 32044 - DNA, 15 bp, Homo sapiens
caccagggacactgg

SEQ ID NO: 32045 - DNA, 15 bp, Homo sapiens
accagggacactggc

SEQ ID NO: 32046 - DNA, 15 bp, Homo sapiens
ccagggacactggcc

SEQ ID NO: 32047 - DNA, 15 bp, Homo sapiens
cagggacactggcct

SEQ ID NO: 32048 - DNA, 15 bp, Homo sapiens
agggacactggccta

SEQ ID NO: 32049 - DNA, 15 bp, Homo sapiens
gggacactggcctac

SEQ ID NO: 32050 - DNA, 15 bp, Homo sapiens
ggacactggcctaca

SEQ ID NO: 32051 - DNA, 15 bp, Homo sapiens
gacactggcctacac

SEQ ID NO: 32052 - DNA, 15 bp, Homo sapiens
acactggcctacaca

SEQ ID NO: 32053 - DNA, 15 bp, Homo sapiens
cactggcctacacat

SEQ ID NO: 32054 - DNA, 15 bp, Homo sapiens
actggcctacacata

SEQ ID NO: 32055 - DNA, 15 bp, Homo sapiens
ctggcctacacatac

SEQ ID NO: 32056 - DNA, 15 bp, Homo sapiens
tggcctacacatact

SEQ ID NO: 32057 - DNA, 15 bp, Homo sapiens
ggcctacacatactg

SEQ ID NO: 32058 - DNA, 15 bp, Homo sapiens
gcctacacatactga

SEQ ID NO: 32059 - DNA, 15 bp, Homo sapiens
cctacacatactgag

SEQ ID NO: 32060 - DNA, 15 bp, Homo sapiens
ctacacatactgaga

SEQ ID NO: 32061 - DNA, 15 bp, Homo sapiens
tacacatactgagac

SEQ ID NO: 32062 - DNA, 15 bp, Homo sapiens
acacatactgagact

SEQ ID NO: 32063 - DNA, 15 bp, Homo sapiens
cacatactgagactt

SEQ ID NO: 32064 - DNA, 15 bp, Homo sapiens
acatactgagacttt

SEQ ID NO: 32065 - DNA, 15 bp, Homo sapiens
catactgagactttg

SEQ ID NO: 32066 - DNA, 15 bp, Homo sapiens
atactgagactttgg

SEQ ID NO: 32067 - DNA, 15 bp, Homo sapiens
tactgagactttggg

SEQ ID NO: 32068 - DNA, 15 bp, Homo sapiens
actgagactttggga

SEQ ID NO: 32069 - DNA, 15 bp, Homo sapiens
ctgagactttgggac

SEQ ID NO: 32070 - DNA, 15 bp, Homo sapiens
tgagactttgggacc

SEQ ID NO: 32071 - DNA, 15 bp, Homo sapiens
gagactttgggaccg

SEQ ID NO: 32072 - DNA, 15 bp, Homo sapiens
agactttgggaccgt

SEQ ID NO: 32073 - DNA, 15 bp, Homo sapiens
gactttgggaccgta

SEQ ID NO: 32074 - DNA, 15 bp, Homo sapiens
actttgggaccgtag

SEQ ID NO: 32075 - DNA, 15 bp, Homo sapiens
ctttgggaccgtaga

SEQ ID NO: 32076 - DNA, 15 bp, Homo sapiens
tttgggaccgtagac

SEQ ID NO: 32077 - DNA, 15 bp, Homo sapiens
ttgggaccgtagacc

SEQ ID NO: 32078 - DNA, 15 bp, Homo sapiens
tgggaccgtagaccc

SEQ ID NO: 32079 - DNA, 15 bp, Homo sapiens
gggaccgtagacccc

SEQ ID NO: 32080 - DNA, 15 bp, Homo sapiens
ggaccgtagacccca

SEQ ID NO: 32081 - DNA, 15 bp, Homo sapiens
gaccgtagaccccac

SEQ ID NO: 32082 - DNA, 15 bp, Homo sapiens
accgtagaccccaca

SEQ ID NO: 32083 - DNA, 15 bp, Homo sapiens
ccgtagaccccacag

SEQ ID NO: 32084 - DNA, 15 bp, Homo sapiens
cgtagaccccacagt

SEQ ID NO: 32085 - DNA, 15 bp, Homo sapiens
gtagaccccacagtc

SEQ ID NO: 32086 - DNA, 15 bp, Homo sapiens
tagaccccacagtct

SEQ ID NO: 32087 - DNA, 15 bp, Homo sapiens
agaccccacagtctg

SEQ ID NO: 32088 - DNA, 15 bp, Homo sapiens
gaccccacagtctgt

SEQ ID NO: 32089 - DNA, 15 bp, Homo sapiens
accccacagtctgtg

SEQ ID NO: 32090 - DNA, 15 bp, Homo sapiens
ccccacagtctgtgg

SEQ ID NO: 32091 - DNA, 15 bp, Homo sapiens
cccacagtctgtggt

SEQ ID NO: 32092 - DNA, 15 bp, Homo sapiens
ccacagtctgtggtt

SEQ ID NO: 32093 - DNA, 15 bp, Homo sapiens
cacagtctgtggttt

SEQ ID NO: 32094 - DNA, 15 bp, Homo sapiens
acagtctgtggtttt

SEQ ID NO: 32095 - DNA, 15 bp, Homo sapiens
cagtctgtggttttg

SEQ ID NO: 32096 - DNA, 15 bp, Homo sapiens
agtctgtggttttga

SEQ ID NO: 32097 - DNA, 15 bp, Homo sapiens
gtctgtggttttgag

SEQ ID NO: 32098 - DNA, 15 bp, Homo sapiens
tctgtggttttgaga

SEQ ID NO: 32099 - DNA, 15 bp, Homo sapiens
ctgtggttttgagat

SEQ ID NO: 32100 - DNA, 15 bp, Homo sapiens
tgtggttttgagatt

SEQ ID NO: 32101 - DNA, 15 bp, Homo sapiens
gtggttttgagattc

SEQ ID NO: 32102 - DNA, 15 bp, Homo sapiens
tggttttgagattct

SEQ ID NO: 32103 - DNA, 15 bp, Homo sapiens
ggttttgagattcta

SEQ ID NO: 32104 - DNA, 15 bp, Homo sapiens
gttttgagattctag

SEQ ID NO: 32105 - DNA, 15 bp, Homo sapiens
ttttgagattctagg

SEQ ID NO: 32106 - DNA, 15 bp, Homo sapiens
tttgagattctagga

SEQ ID NO: 32107 - DNA, 15 bp, Homo sapiens
ttgagattctaggat

SEQ ID NO: 32108 - DNA, 15 bp, Homo sapiens
tgagattctaggatc

SEQ ID NO: 32109 - DNA, 15 bp, Homo sapiens
gagattctaggatcc

SEQ ID NO: 32110 - DNA, 15 bp, Homo sapiens
agattctaggatcct

SEQ ID NO: 32111 - DNA, 15 bp, Homo sapiens
gattctaggatcctt

SEQ ID NO: 32112 - DNA, 15 bp, Homo sapiens
attctaggatccttt

SEQ ID NO: 32113 - DNA, 15 bp, Homo sapiens
ttctaggatccttta

SEQ ID NO: 32114 - DNA, 15 bp, Homo sapiens
tctaggatcctttaa

SEQ ID NO: 32115 - DNA, 15 bp, Homo sapiens
ctaggatcctttaaa

SEQ ID NO: 32116 - DNA, 15 bp, Homo sapiens
taggatcctttaaat

SEQ ID NO: 32117 - DNA, 15 bp, Homo sapiens
aggatcctttaaatc

SEQ ID NO: 32118 - DNA, 15 bp, Homo sapiens
ggatcctttaaatct

SEQ ID NO: 32119 - DNA, 15 bp, Homo sapiens
gatcctttaaatcta

SEQ ID NO: 32120 - DNA, 15 bp, Homo sapiens
atcctttaaatctaa

SEQ ID NO: 32121 - DNA, 15 bp, Homo sapiens
tcctttaaatctaag

SEQ ID NO: 32122 - DNA, 15 bp, Homo sapiens
cctttaaatctaaga

SEQ ID NO: 32123 - DNA, 15 bp, Homo sapiens
ctttaaatctaagaa

SEQ ID NO: 32124 - DNA, 15 bp, Homo sapiens
tttaaatctaagaaa

SEQ ID NO: 32125 - DNA, 15 bp, Homo sapiens
ttaaatctaagaaat

SEQ ID NO: 32126 - DNA, 15 bp, Homo sapiens
taaatctaagaaatg

SEQ ID NO: 32127 - DNA, 15 bp, Homo sapiens
aaatctaagaaatgc

SEQ ID NO: 32128 - DNA, 15 bp, Homo sapiens
aatctaagaaatgct

SEQ ID NO: 32129 - DNA, 15 bp, Homo sapiens
atctaagaaatgctg

SEQ ID NO: 32130 - DNA, 15 bp, Homo sapiens
tctaagaaatgctgt

SEQ ID NO: 32131 - DNA, 15 bp, Homo sapiens
ctaagaaatgctgtt

SEQ ID NO: 32132 - DNA, 15 bp, Homo sapiens
taagaaatgctgttc

SEQ ID NO: 32133 - DNA, 15 bp, Homo sapiens
aagaaatgctgttct

SEQ ID NO: 32134 - DNA, 15 bp, Homo sapiens
agaaatgctgttcta

SEQ ID NO: 32135 - DNA, 15 bp, Homo sapiens
gaaatgctgttctat

SEQ ID NO: 32136 - DNA, 15 bp, Homo sapiens
aaatgctgttctatg

SEQ ID NO: 32137 - DNA, 15 bp, Homo sapiens
aatgctgttctatga

SEQ ID NO: 32138 - DNA, 15 bp, Homo sapiens
atgctgttctatgat

SEQ ID NO: 32139 - DNA, 15 bp, Homo sapiens
tgctgttctatgatt

SEQ ID NO: 32140 - DNA, 15 bp, Homo sapiens
gctgttctatgattc

SEQ ID NO: 32141 - DNA, 15 bp, Homo sapiens
ctgttctatgattct

SEQ ID NO: 32142 - DNA, 15 bp, Homo sapiens
tgttctatgattctg

SEQ ID NO: 32143 - DNA, 15 bp, Homo sapiens
gttctatgattctga

SEQ ID NO: 32144 - DNA, 15 bp, Homo sapiens
ttctatgattctgag

SEQ ID NO: 32145 - DNA, 15 bp, Homo sapiens
tctatgattctgagg

SEQ ID NO: 32146 - DNA, 15 bp, Homo sapiens
ctatgattctgaggt

SEQ ID NO: 32147 - DNA, 15 bp, Homo sapiens
tatgattctgaggtc

SEQ ID NO: 32148 - DNA, 15 bp, Homo sapiens
atgattctgaggtcc

SEQ ID NO: 32149 - DNA, 15 bp, Homo sapiens
tgattctgaggtcct

SEQ ID NO: 32150 - DNA, 15 bp, Homo sapiens
gattctgaggtcctg

SEQ ID NO: 32151 - DNA, 15 bp, Homo sapiens
attctgaggtcctgg

SEQ ID NO: 32152 - DNA, 15 bp, Homo sapiens
ttctgaggtcctggt

SEQ ID NO: 32153 - DNA, 15 bp, Homo sapiens
tctgaggtcctggtg

SEQ ID NO: 32154 - DNA, 15 bp, Homo sapiens
ctgaggtcctggtgt

SEQ ID NO: 32155 - DNA, 15 bp, Homo sapiens
tgaggtcctggtgtt

SEQ ID NO: 32156 - DNA, 15 bp, Homo sapiens
gaggtcctggtgtta

SEQ ID NO: 32157 - DNA, 15 bp, Homo sapiens
aggtcctggtgttat

SEQ ID NO: 32158 - DNA, 15 bp, Homo sapiens
ggtcctggtgttata

SEQ ID NO: 32159 - DNA, 15 bp, Homo sapiens
gtcctggtgttatac

SEQ ID NO: 32160 - DNA, 15 bp, Homo sapiens
tcctggtgttatact

SEQ ID NO: 32161 - DNA, 15 bp, Homo sapiens
cctggtgttatacta

SEQ ID NO: 32162 - DNA, 15 bp, Homo sapiens
ctggtgttatactat

SEQ ID NO: 32163 - DNA, 15 bp, Homo sapiens
tggtgttatactatt

SEQ ID NO: 32164 - DNA, 15 bp, Homo sapiens
ggtgttatactattt

SEQ ID NO: 32165 - DNA, 15 bp, Homo sapiens
gtgttatactatttg

SEQ ID NO: 32166 - DNA, 15 bp, Homo sapiens
tgttatactatttga

SEQ ID NO: 32167 - DNA, 15 bp, Homo sapiens
gttatactatttgaa

SEQ ID NO: 32168 - DNA, 15 bp, Homo sapiens
ttatactatttgaag

SEQ ID NO: 32169 - DNA, 15 bp, Homo sapiens
tatactatttgaaga

SEQ ID NO: 32170 - DNA, 15 bp, Homo sapiens
atactatttgaagac

SEQ ID NO: 32171 - DNA, 15 bp, Homo sapiens
tactatttgaagacc

SEQ ID NO: 32172 - DNA, 15 bp, Homo sapiens
actatttgaagaccc

SEQ ID NO: 32173 - DNA, 15 bp, Homo sapiens
ctatttgaagacccc

SEQ ID NO: 32174 - DNA, 15 bp, Homo sapiens
tatttgaagacccca

SEQ ID NO: 32175 - DNA, 15 bp, Homo sapiens
atttgaagaccccag

SEQ ID NO: 32176 - DNA, 15 bp, Homo sapiens
tttgaagaccccagg

SEQ ID NO: 32177 - DNA, 15 bp, Homo sapiens
ttgaagaccccaggg

SEQ ID NO: 32178 - DNA, 15 bp, Homo sapiens
tgaagaccccagggg

SEQ ID NO: 32179 - DNA, 15 bp, Homo sapiens
gaagaccccaggggt

SEQ ID NO: 32180 - DNA, 15 bp, Homo sapiens
aagaccccaggggtc

SEQ ID NO: 32181 - DNA, 15 bp, Homo sapiens
agaccccaggggtcc

SEQ ID NO: 32182 - DNA, 15 bp, Homo sapiens
gaccccaggggtccc

SEQ ID NO: 32183 - DNA, 15 bp, Homo sapiens
accccaggggtccca

SEQ ID NO: 32184 - DNA, 15 bp, Homo sapiens
ccccaggggtcccag

SEQ ID NO: 32185 - DNA, 15 bp, Homo sapiens
cccaggggtcccagt

SEQ ID NO: 32186 - DNA, 15 bp, Homo sapiens
ccaggggtcccagta

SEQ ID NO: 32187 - DNA, 15 bp, Homo sapiens
caggggtcccagtat

SEQ ID NO: 32188 - DNA, 15 bp, Homo sapiens
aggggtcccagtatc

SEQ ID NO: 32189 - DNA, 15 bp, Homo sapiens
ggggtcccagtatct

SEQ ID NO: 32190 - DNA, 15 bp, Homo sapiens
gggtcccagtatctg

SEQ ID NO: 32191 - DNA, 15 bp, Homo sapiens
ggtcccagtatctgt

SEQ ID NO: 32192 - DNA, 15 bp, Homo sapiens
gtcccagtatctgtg

SEQ ID NO: 32193 - DNA, 15 bp, Homo sapiens
tcccagtatctgtgg

SEQ ID NO: 32194 - DNA, 15 bp, Homo sapiens
cccagtatctgtgga

SEQ ID NO: 32195 - DNA, 15 bp, Homo sapiens
ccagtatctgtggag

SEQ ID NO: 32196 - DNA, 15 bp, Homo sapiens
cagtatctgtggagc

SEQ ID NO: 32197 - DNA, 15 bp, Homo sapiens
agtatctgtggagcc

SEQ ID NO: 32198 - DNA, 15 bp, Homo sapiens
gtatctgtggagcct

SEQ ID NO: 32199 - DNA, 15 bp, Homo sapiens
tatctgtggagcctg

SEQ ID NO: 32200 - DNA, 15 bp, Homo sapiens
atctgtggagcctgc

SEQ ID NO: 32201 - DNA, 15 bp, Homo sapiens
tctgtggagcctgcc

SEQ ID NO: 32202 - DNA, 15 bp, Homo sapiens
ctgtggagcctgcct

SEQ ID NO: 32203 - DNA, 15 bp, Homo sapiens
tgtggagcctgcctg

SEQ ID NO: 32204 - DNA, 15 bp, Homo sapiens
gtggagcctgcctgg

SEQ ID NO: 32205 - DNA, 15 bp, Homo sapiens
tggagcctgcctggc

SEQ ID NO: 32206 - DNA, 15 bp, Homo sapiens
ggagcctgcctggca

SEQ ID NO: 32207 - DNA, 15 bp, Homo sapiens
gagcctgcctggcac

SEQ ID NO: 32208 - DNA, 15 bp, Homo sapiens
agcctgcctggcact

SEQ ID NO: 32209 - DNA, 15 bp, Homo sapiens
gcctgcctggcactc

SEQ ID NO: 32210 - DNA, 15 bp, Homo sapiens
cctgcctggcactct

SEQ ID NO: 32211 - DNA, 15 bp, Homo sapiens
ctgcctggcactctc

SEQ ID NO: 32212 - DNA, 15 bp, Homo sapiens
tgcctggcactctca

SEQ ID NO: 32213 - DNA, 15 bp, Homo sapiens
gcctggcactctcag

SEQ ID NO: 32214 - DNA, 15 bp, Homo sapiens
cctggcactctcaga

SEQ ID NO: 32215 - DNA, 15 bp, Homo sapiens
ctggcactctcagag

SEQ ID NO: 32216 - DNA, 15 bp, Homo sapiens
tggcactctcagagc

SEQ ID NO: 32217 - DNA, 15 bp, Homo sapiens
ggcactctcagagct

SEQ ID NO: 32218 - DNA, 15 bp, Homo sapiens
gcactctcagagctt

SEQ ID NO: 32219 - DNA, 15 bp, Homo sapiens
cactctcagagcttc

SEQ ID NO: 32220 - DNA, 15 bp, Homo sapiens
actctcagagcttca

SEQ ID NO: 32221 - DNA, 15 bp, Homo sapiens
ctctcagagcttcaa

SEQ ID NO: 32222 - DNA, 15 bp, Homo sapiens
tctcagagcttcaaa

SEQ ID NO: 32223 - DNA, 15 bp, Homo sapiens
ctcagagcttcaaac

SEQ ID NO: 32224 - DNA, 15 bp, Homo sapiens
tcagagcttcaaacc

SEQ ID NO: 32225 - DNA, 15 bp, Homo sapiens
cagagcttcaaacct

SEQ ID NO: 32226 - DNA, 15 bp, Homo sapiens
agagcttcaaacctg

SEQ ID NO: 32227 - DNA, 15 bp, Homo sapiens
gagcttcaaacctgg

SEQ ID NO: 32228 - DNA, 15 bp, Homo sapiens
agcttcaaacctggg

SEQ ID NO: 32229 - DNA, 15 bp, Homo sapiens
gcttcaaacctgggt

SEQ ID NO: 32230 - DNA, 15 bp, Homo sapiens
cttcaaacctgggtc

SEQ ID NO: 32231 - DNA, 15 bp, Homo sapiens
ttcaaacctgggtcc

SEQ ID NO: 32232 - DNA, 15 bp, Homo sapiens
tcaaacctgggtcct

SEQ ID NO: 32233 - DNA, 15 bp, Homo sapiens
caaacctgggtcctc

SEQ ID NO: 32234 - DNA, 15 bp, Homo sapiens
aaacctgggtcctct

SEQ ID NO: 32235 - DNA, 15 bp, Homo sapiens
aacctgggtcctctc

SEQ ID NO: 32236 - DNA, 15 bp, Homo sapiens
acctgggtcctctcc

SEQ ID NO: 32237 - DNA, 15 bp, Homo sapiens
cctgggtcctctcca

SEQ ID NO: 32238 - DNA, 15 bp, Homo sapiens
ctgggtcctctccac

SEQ ID NO: 32239 - DNA, 15 bp, Homo sapiens
tgggtcctctccaca

SEQ ID NO: 32240 - DNA, 15 bp, Homo sapiens
gggtcctctccacaa

SEQ ID NO: 32241 - DNA, 15 bp, Homo sapiens
ggtcctctccacaac

SEQ ID NO: 32242 - DNA, 15 bp, Homo sapiens
gtcctctccacaacc

SEQ ID NO: 32243 - DNA, 15 bp, Homo sapiens
tcctctccacaaccc

SEQ ID NO: 32244 - DNA, 15 bp, Homo sapiens
cctctccacaaccca

SEQ ID NO: 32245 - DNA, 15 bp, Homo sapiens
ctctccacaacccaa

SEQ ID NO: 32246 - DNA, 15 bp, Homo sapiens
tctccacaacccaag

SEQ ID NO: 32247 - DNA, 15 bp, Homo sapiens
ctccacaacccaaga

SEQ ID NO: 32248 - DNA, 15 bp, Homo sapiens
tccacaacccaagaa

SEQ ID NO: 32249 - DNA, 15 bp, Homo sapiens
ccacaacccaagaag

SEQ ID NO: 32250 - DNA, 15 bp, Homo sapiens
cacaacccaagaagg

SEQ ID NO: 32251 - DNA, 15 bp, Homo sapiens
acaacccaagaaggg

SEQ ID NO: 32252 - DNA, 15 bp, Homo sapiens
caacccaagaagggc

SEQ ID NO: 32253 - DNA, 15 bp, Homo sapiens
aacccaagaagggcc

SEQ ID NO: 32254 - DNA, 15 bp, Homo sapiens
acccaagaagggcca

SEQ ID NO: 32255 - DNA, 15 bp, Homo sapiens
cccaagaagggccag

SEQ ID NO: 32256 - DNA, 15 bp, Homo sapiens
ccaagaagggccagg

SEQ ID NO: 32257 - DNA, 15 bp, Homo sapiens
caagaagggccaggt

SEQ ID NO: 32258 - DNA, 15 bp, Homo sapiens
aagaagggccaggtc

SEQ ID NO: 32259 - DNA, 15 bp, Homo sapiens
agaagggccaggtct

SEQ ID NO: 32260 - DNA, 15 bp, Homo sapiens
gaagggccaggtctt

SEQ ID NO: 32261 - DNA, 15 bp, Homo sapiens
aagggccaggtcttc

SEQ ID NO: 32262 - DNA, 15 bp, Homo sapiens
agggccaggtcttca

SEQ ID NO: 32263 - DNA, 15 bp, Homo sapiens
gggccaggtcttcag

SEQ ID NO: 32264 - DNA, 15 bp, Homo sapiens
ggccaggtcttcaga

SEQ ID NO: 32265 - DNA, 15 bp, Homo sapiens
gccaggtcttcagag

SEQ ID NO: 32266 - DNA, 15 bp, Homo sapiens
ccaggtcttcagagc

SEQ ID NO: 32267 - DNA, 15 bp, Homo sapiens
caggtcttcagagct

SEQ ID NO: 32268 - DNA, 15 bp, Homo sapiens
aggtcttcagagcta

SEQ ID NO: 32269 - DNA, 15 bp, Homo sapiens
ggtcttcagagctag

SEQ ID NO: 32270 - DNA, 15 bp, Homo sapiens
gtcttcagagctagg

SEQ ID NO: 32271 - DNA, 15 bp, Homo sapiens
tcttcagagctaggg

SEQ ID NO: 32272 - DNA, 15 bp, Homo sapiens
cttcagagctagggg

SEQ ID NO: 32273 - DNA, 15 bp, Homo sapiens
ttcagagctaggggc

SEQ ID NO: 32274 - DNA, 15 bp, Homo sapiens
tcagagctaggggct

SEQ ID NO: 32275 - DNA, 15 bp, Homo sapiens
cagagctaggggctt

SEQ ID NO: 32276 - DNA, 15 bp, Homo sapiens
agagctaggggcttg

SEQ ID NO: 32277 - DNA, 15 bp, Homo sapiens
gagctaggggcttgt

SEQ ID NO: 32278 - DNA, 15 bp, Homo sapiens
agctaggggcttgtc

SEQ ID NO: 32279 - DNA, 15 bp, Homo sapiens
gctaggggcttgtca

SEQ ID NO: 32280 - DNA, 15 bp, Homo sapiens
ctaggggcttgtcat

SEQ ID NO: 32281 - DNA, 15 bp, Homo sapiens
taggggcttgtcata

SEQ ID NO: 32282 - DNA, 15 bp, Homo sapiens
aggggcttgtcatag

SEQ ID NO: 32283 - DNA, 15 bp, Homo sapiens
ggggcttgtcatagt

SEQ ID NO: 32284 - DNA, 15 bp, Homo sapiens
gggcttgtcatagtg

SEQ ID NO: 32285 - DNA, 15 bp, Homo sapiens
ggcttgtcatagtgg

SEQ ID NO: 32286 - DNA, 15 bp, Homo sapiens
gcttgtcatagtggc

SEQ ID NO: 32287 - DNA, 15 bp, Homo sapiens
cttgtcatagtggcc

SEQ ID NO: 32288 - DNA, 15 bp, Homo sapiens
ttgtcatagtggcca

SEQ ID NO: 32289 - DNA, 15 bp, Homo sapiens
tgtcatagtggccag

SEQ ID NO: 32290 - DNA, 15 bp, Homo sapiens
gtcatagtggccaga

SEQ ID NO: 32291 - DNA, 15 bp, Homo sapiens
tcatagtggccagat

SEQ ID NO: 32292 - DNA, 15 bp, Homo sapiens
catagtggccagatg

SEQ ID NO: 32293 - DNA, 15 bp, Homo sapiens
atagtggccagatgg

SEQ ID NO: 32294 - DNA, 15 bp, Homo sapiens
tagtggccagatgga

SEQ ID NO: 32295 - DNA, 15 bp, Homo sapiens
agtggccagatggac

SEQ ID NO: 32296 - DNA, 15 bp, Homo sapiens
gtggccagatggaca

SEQ ID NO: 32297 - DNA, 15 bp, Homo sapiens
tggccagatggacat

SEQ ID NO: 32298 - DNA, 15 bp, Homo sapiens
ggccagatggacatc

SEQ ID NO: 32299 - DNA, 15 bp, Homo sapiens
gccagatggacatca

SEQ ID NO: 32300 - DNA, 15 bp, Homo sapiens
ccagatggacatcac

SEQ ID NO: 32301 - DNA, 15 bp, Homo sapiens
cagatggacatcacc

SEQ ID NO: 32302 - DNA, 15 bp, Homo sapiens
agatggacatcacct

SEQ ID NO: 32303 - DNA, 15 bp, Homo sapiens
gatggacatcaccta

SEQ ID NO: 32304 - DNA, 15 bp, Homo sapiens
atggacatcacctac

SEQ ID NO: 32305 - DNA, 15 bp, Homo sapiens
tggacatcacctacc

SEQ ID NO: 32306 - DNA, 15 bp, Homo sapiens
ggacatcacctacca

SEQ ID NO: 32307 - DNA, 15 bp, Homo sapiens
gacatcacctaccac

SEQ ID NO: 32308 - DNA, 15 bp, Homo sapiens
acatcacctaccaca

SEQ ID NO: 32309 - DNA, 15 bp, Homo sapiens
catcacctaccacat

SEQ ID NO: 32310 - DNA, 15 bp, Homo sapiens
atcacctaccacatc

SEQ ID NO: 32311 - DNA, 15 bp, Homo sapiens
tcacctaccacatcc

SEQ ID NO: 32312 - DNA, 15 bp, Homo sapiens
cacctaccacatcca

SEQ ID NO: 32313 - DNA, 15 bp, Homo sapiens
acctaccacatccac

SEQ ID NO: 32314 - DNA, 15 bp, Homo sapiens
cctaccacatccacc

SEQ ID NO: 32315 - DNA, 15 bp, Homo sapiens
ctaccacatccacca

SEQ ID NO: 32316 - DNA, 15 bp, Homo sapiens
taccacatccaccag

SEQ ID NO: 32317 - DNA, 15 bp, Homo sapiens
accacatccaccagc

SEQ ID NO: 32318 - DNA, 15 bp, Homo sapiens
ccacatccaccagca

SEQ ID NO: 32319 - DNA, 15 bp, Homo sapiens
cacatccaccagcac

SEQ ID NO: 32320 - DNA, 15 bp, Homo sapiens
acatccaccagcacc

SEQ ID NO: 32321 - DNA, 15 bp, Homo sapiens
catccaccagcaccc

SEQ ID NO: 32322 - DNA, 15 bp, Homo sapiens
atccaccagcaccca

SEQ ID NO: 32323 - DNA, 15 bp, Homo sapiens
tccaccagcacccat

SEQ ID NO: 32324 - DNA, 15 bp, Homo sapiens
ccaccagcacccatg

SEQ ID NO: 32325 - DNA, 15 bp, Homo sapiens
caccagcacccatgt

SEQ ID NO: 32326 - DNA, 15 bp, Homo sapiens
accagcacccatgtc

SEQ ID NO: 32327 - DNA, 15 bp, Homo sapiens
ccagcacccatgtca

SEQ ID NO: 32328 - DNA, 15 bp, Homo sapiens
cagcacccatgtcac

SEQ ID NO: 32329 - DNA, 15 bp, Homo sapiens
agcacccatgtcacc

SEQ ID NO: 32330 - DNA, 15 bp, Homo sapiens
gcacccatgtcaccc

SEQ ID NO: 32331 - DNA, 15 bp, Homo sapiens
cacccatgtcacccc

SEQ ID NO: 32332 - DNA, 15 bp, Homo sapiens
acccatgtcacccca

SEQ ID NO: 32333 - DNA, 15 bp, Homo sapiens
cccatgtcaccccac

SEQ ID NO: 32334 - DNA, 15 bp, Homo sapiens
ccatgtcaccccacc

SEQ ID NO: 32335 - DNA, 15 bp, Homo sapiens
catgtcaccccacct

SEQ ID NO: 32336 - DNA, 15 bp, Homo sapiens
atgtcaccccacctg

SEQ ID NO: 32337 - DNA, 15 bp, Homo sapiens
tgtcaccccacctgg

SEQ ID NO: 32338 - DNA, 15 bp, Homo sapiens
gtcaccccacctggg

SEQ ID NO: 32339 - DNA, 15 bp, Homo sapiens
tcaccccacctgggc

SEQ ID NO: 32340 - DNA, 15 bp, Homo sapiens
caccccacctgggcc

SEQ ID NO: 32341 - DNA, 15 bp, Homo sapiens
accccacctgggcca

SEQ ID NO: 32342 - DNA, 15 bp, Homo sapiens
ccccacctgggccaa

SEQ ID NO: 32343 - DNA, 15 bp, Homo sapiens
cccacctgggccaag

SEQ ID NO: 32344 - DNA, 15 bp, Homo sapiens
ccacctgggccaagc

SEQ ID NO: 32345 - DNA, 15 bp, Homo sapiens
cacctgggccaagcc

SEQ ID NO: 32346 - DNA, 15 bp, Homo sapiens
acctgggccaagcct

SEQ ID NO: 32347 - DNA, 15 bp, Homo sapiens
cctgggccaagcctg

SEQ ID NO: 32348 - DNA, 15 bp, Homo sapiens
ctgggccaagcctgc

SEQ ID NO: 32349 - DNA, 15 bp, Homo sapiens
tgggccaagcctgct

SEQ ID NO: 32350 - DNA, 15 bp, Homo sapiens
gggccaagcctgctg

SEQ ID NO: 32351 - DNA, 15 bp, Homo sapiens
ggccaagcctgctgc

SEQ ID NO: 32352 - DNA, 15 bp, Homo sapiens
gccaagcctgctgca

SEQ ID NO: 32353 - DNA, 15 bp, Homo sapiens
ccaagcctgctgcag

SEQ ID NO: 32354 - DNA, 15 bp, Homo sapiens
caagcctgctgcagg

SEQ ID NO: 32355 - DNA, 15 bp, Homo sapiens
aagcctgctgcagga

SEQ ID NO: 32356 - DNA, 15 bp, Homo sapiens
agcctgctgcaggac

SEQ ID NO: 32357 - DNA, 15 bp, Homo sapiens
gcctgctgcaggaca

SEQ ID NO: 32358 - DNA, 15 bp, Homo sapiens
cctgctgcaggacag

SEQ ID NO: 32359 - DNA, 15 bp, Homo sapiens
ctgctgcaggacagg

SEQ ID NO: 32360 - DNA, 15 bp, Homo sapiens
tgctgcaggacaggg

SEQ ID NO: 32361 - DNA, 15 bp, Homo sapiens
gctgcaggacagggc

SEQ ID NO: 32362 - DNA, 15 bp, Homo sapiens
ctgcaggacagggca

SEQ ID NO: 32363 - DNA, 15 bp, Homo sapiens
tgcaggacagggcag

SEQ ID NO: 32364 - DNA, 15 bp, Homo sapiens
gcaggacagggcagc

SEQ ID NO: 32365 - DNA, 15 bp, Homo sapiens
caggacagggcagcc

SEQ ID NO: 32366 - DNA, 15 bp, Homo sapiens
aggacagggcagcca

SEQ ID NO: 32367 - DNA, 15 bp, Homo sapiens
ggacagggcagccag

SEQ ID NO: 32368 - DNA, 15 bp, Homo sapiens
gacagggcagccagt

SEQ ID NO: 32369 - DNA, 15 bp, Homo sapiens
acagggcagccagtt

SEQ ID NO: 32370 - DNA, 15 bp, Homo sapiens
cagggcagccagttc

SEQ ID NO: 32371 - DNA, 15 bp, Homo sapiens
agggcagccagttct

SEQ ID NO: 32372 - DNA, 15 bp, Homo sapiens
gggcagccagttctc

SEQ ID NO: 32373 - DNA, 15 bp, Homo sapiens
ggcagccagttctcg

SEQ ID NO: 32374 - DNA, 15 bp, Homo sapiens
gcagccagttctcgg

SEQ ID NO: 32375 - DNA, 15 bp, Homo sapiens
cagccagttctcgga

SEQ ID NO: 32376 - DNA, 15 bp, Homo sapiens
agccagttctcggaa

SEQ ID NO: 32377 - DNA, 15 bp, Homo sapiens
gccagttctcggaac

SEQ ID NO: 32378 - DNA, 15 bp, Homo sapiens
ccagttctcggaacg

SEQ ID NO: 32379 - DNA, 15 bp, Homo sapiens
cagttctcggaacga

SEQ ID NO: 32380 - DNA, 15 bp, Homo sapiens
agttctcggaacgaa

SEQ ID NO: 32381 - DNA, 15 bp, Homo sapiens
gttctcggaacgaaa

SEQ ID NO: 32382 - DNA, 15 bp, Homo sapiens
ttctcggaacgaaac

SEQ ID NO: 32383 - DNA, 15 bp, Homo sapiens
tctcggaacgaaacc

SEQ ID NO: 32384 - DNA, 15 bp, Homo sapiens
ctcggaacgaaacct

SEQ ID NO: 32385 - DNA, 15 bp, Homo sapiens
tcggaacgaaacctg

SEQ ID NO: 32386 - DNA, 15 bp, Homo sapiens
cggaacgaaacctgt

SEQ ID NO: 32387 - DNA, 15 bp, Homo sapiens
ggaacgaaacctgtg

SEQ ID NO: 32388 - DNA, 15 bp, Homo sapiens
gaacgaaacctgtgg

SEQ ID NO: 32389 - DNA, 15 bp, Homo sapiens
aacgaaacctgtggg

SEQ ID NO: 32390 - DNA, 15 bp, Homo sapiens
acgaaacctgtgggg

SEQ ID NO: 32391 - DNA, 15 bp, Homo sapiens
cgaaacctgtggggt

SEQ ID NO: 32392 - DNA, 15 bp, Homo sapiens
gaaacctgtggggtg

SEQ ID NO: 32393 - DNA, 15 bp, Homo sapiens
aaacctgtggggtgg

SEQ ID NO: 32394 - DNA, 15 bp, Homo sapiens
aacctgtggggtggg

SEQ ID NO: 32395 - DNA, 15 bp, Homo sapiens
acctgtggggtgggg

SEQ ID NO: 32396 - DNA, 15 bp, Homo sapiens
cctgtggggtggggt

SEQ ID NO: 32397 - DNA, 15 bp, Homo sapiens
ctgtggggtggggta

SEQ ID NO: 32398 - DNA, 15 bp, Homo sapiens
tgtggggtggggtat

SEQ ID NO: 32399 - DNA, 15 bp, Homo sapiens
gtggggtggggtatc

SEQ ID NO: 32400 - DNA, 15 bp, Homo sapiens
tggggtggggtatct

SEQ ID NO: 32401 - DNA, 15 bp, Homo sapiens
ggggtggggtatctg

SEQ ID NO: 32402 - DNA, 15 bp, Homo sapiens
gggtggggtatctgc

SEQ ID NO: 32403 - DNA, 15 bp, Homo sapiens
ggtggggtatctgcc

SEQ ID NO: 32404 - DNA, 15 bp, Homo sapiens
gtggggtatctgccc

SEQ ID NO: 32405 - DNA, 15 bp, Homo sapiens
tggggtatctgccct

SEQ ID NO: 32406 - DNA, 15 bp, Homo sapiens
ggggtatctgccctc

SEQ ID NO: 32407 - DNA, 15 bp, Homo sapiens
gggtatctgccctct

SEQ ID NO: 32408 - DNA, 15 bp, Homo sapiens
ggtatctgccctctt

SEQ ID NO: 32409 - DNA, 15 bp, Homo sapiens
gtatctgccctcttc

SEQ ID NO: 32410 - DNA, 15 bp, Homo sapiens
tatctgccctcttct

SEQ ID NO: 32411 - DNA, 15 bp, Homo sapiens
atctgccctcttctc

SEQ ID NO: 32412 - DNA, 15 bp, Homo sapiens
tctgccctcttctct

SEQ ID NO: 32413 - DNA, 15 bp, Homo sapiens
ctgccctcttctctt

SEQ ID NO: 32414 - DNA, 15 bp, Homo sapiens
tgccctcttctcttc

SEQ ID NO: 32415 - DNA, 15 bp, Homo sapiens
gccctcttctcttcc

SEQ ID NO: 32416 - DNA, 15 bp, Homo sapiens
ccctcttctcttcct

SEQ ID NO: 32417 - DNA, 15 bp, Homo sapiens
cctcttctcttcctc

SEQ ID NO: 32418 - DNA, 15 bp, Homo sapiens
ctcttctcttcctcc

SEQ ID NO: 32419 - DNA, 15 bp, Homo sapiens
tcttctcttcctccg

SEQ ID NO: 32420 - DNA, 15 bp, Homo sapiens
cttctcttcctccgt

SEQ ID NO: 32421 - DNA, 15 bp, Homo sapiens
ttctcttcctccgtg

SEQ ID NO: 32422 - DNA, 15 bp, Homo sapiens
tctcttcctccgtgg

SEQ ID NO: 32423 - DNA, 15 bp, Homo sapiens
ctcttcctccgtggt

SEQ ID NO: 32424 - DNA, 15 bp, Homo sapiens
tcttcctccgtggtg

SEQ ID NO: 32425 - DNA, 15 bp, Homo sapiens
cttcctccgtggtgt

SEQ ID NO: 32426 - DNA, 15 bp, Homo sapiens
ttcctccgtggtgtc

SEQ ID NO: 32427 - DNA, 15 bp, Homo sapiens
tcctccgtggtgtcg

SEQ ID NO: 32428 - DNA, 15 bp, Homo sapiens
cctccgtggtgtcga

SEQ ID NO: 32429 - DNA, 15 bp, Homo sapiens
ctccgtggtgtcgat

SEQ ID NO: 32430 - DNA, 15 bp, Homo sapiens
tccgtggtgtcgatg

SEQ ID NO: 32431 - DNA, 15 bp, Homo sapiens
ccgtggtgtcgatga

SEQ ID NO: 32432 - DNA, 15 bp, Homo sapiens
cgtggtgtcgatgaa

SEQ ID NO: 32433 - DNA, 15 bp, Homo sapiens
gtggtgtcgatgaag

SEQ ID NO: 32434 - DNA, 15 bp, Homo sapiens
tggtgtcgatgaagc

SEQ ID NO: 32435 - DNA, 15 bp, Homo sapiens
ggtgtcgatgaagcc

SEQ ID NO: 32436 - DNA, 15 bp, Homo sapiens
gtgtcgatgaagccc

SEQ ID NO: 32437 - DNA, 15 bp, Homo sapiens
tgtcgatgaagcccg

SEQ ID NO: 32438 - DNA, 15 bp, Homo sapiens
gtcgatgaagcccgg

SEQ ID NO: 32439 - DNA, 15 bp, Homo sapiens
tcgatgaagcccggc

SEQ ID NO: 32440 - DNA, 15 bp, Homo sapiens
cgatgaagcccggcg

SEQ ID NO: 32441 - DNA, 15 bp, Homo sapiens
gatgaagcccggcgc

SEQ ID NO: 32442 - DNA, 15 bp, Homo sapiens
atgaagcccggcgca

SEQ ID NO: 32443 - DNA, 15 bp, Homo sapiens
tgaagcccggcgcat

SEQ ID NO: 32444 - DNA, 15 bp, Homo sapiens
gaagcccggcgcatc

SEQ ID NO: 32445 - DNA, 15 bp, Homo sapiens
aagcccggcgcatcc

SEQ ID NO: 32446 - DNA, 15 bp, Homo sapiens
agcccggcgcatccg

SEQ ID NO: 32447 - DNA, 15 bp, Homo sapiens
gcccggcgcatccgg

SEQ ID NO: 32448 - DNA, 15 bp, Homo sapiens
cccggcgcatccggc

SEQ ID NO: 32449 - DNA, 15 bp, Homo sapiens
ccggcgcatccggcc

SEQ ID NO: 32450 - DNA, 15 bp, Homo sapiens
cggcgcatccggccg

SEQ ID NO: 32451 - DNA, 15 bp, Homo sapiens
ggcgcatccggccgc

SEQ ID NO: 32452 - DNA, 15 bp, Homo sapiens
gcgcatccggccgcc

SEQ ID NO: 32453 - DNA, 15 bp, Homo sapiens
cgcatccggccgcca

SEQ ID NO: 32454 - DNA, 15 bp, Homo sapiens
gcatccggccgccat

SEQ ID NO: 32455 - DNA, 15 bp, Homo sapiens
catccggccgccatg

SEQ ID NO: 32456 - DNA, 15 bp, Homo sapiens
atccggccgccatga

SEQ ID NO: 32457 - DNA, 15 bp, Homo sapiens
tccggccgccatgac

SEQ ID NO: 32458 - DNA, 15 bp, Homo sapiens
ccggccgccatgacg

SEQ ID NO: 32459 - DNA, 15 bp, Homo sapiens
cggccgccatgacgt

SEQ ID NO: 32460 - DNA, 15 bp, Homo sapiens
ggccgccatgacgtc

SEQ ID NO: 32461 - DNA, 15 bp, Homo sapiens
gccgccatgacgtca

SEQ ID NO: 32462 - DNA, 15 bp, Homo sapiens
ccgccatgacgtcaa

SEQ ID NO: 32463 - DNA, 15 bp, Homo sapiens
cgccatgacgtcaat

SEQ ID NO: 32464 - DNA, 15 bp, Homo sapiens
gccatgacgtcaatg

SEQ ID NO: 32465 - DNA, 15 bp, Homo sapiens
ccatgacgtcaatgg

SEQ ID NO: 32466 - DNA, 15 bp, Homo sapiens
catgacgtcaatggc

SEQ ID NO: 32467 - DNA, 15 bp, Homo sapiens
atgacgtcaatggcg

SEQ ID NO: 32468 - DNA, 15 bp, Homo sapiens
tgacgtcaatggcgg

SEQ ID NO: 32469 - DNA, 15 bp, Homo sapiens
gacgtcaatggcgga

SEQ ID NO: 32470 - DNA, 15 bp, Homo sapiens
acgtcaatggcggaa

SEQ ID NO: 32471 - DNA, 15 bp, Homo sapiens
cgtcaatggcggaaa

SEQ ID NO: 32472 - DNA, 15 bp, Homo sapiens
gtcaatggcggaaaa

SEQ ID NO: 32473 - DNA, 15 bp, Homo sapiens
tcaatggcggaaaaa

SEQ ID NO: 32474 - DNA, 15 bp, Homo sapiens
caatggcggaaaaat

SEQ ID NO: 32475 - DNA, 15 bp, Homo sapiens
aatggcggaaaaatc

SEQ ID NO: 32476 - DNA, 15 bp, Homo sapiens
atggcggaaaaatct

SEQ ID NO: 32477 - DNA, 15 bp, Homo sapiens
tggcggaaaaatctg

SEQ ID NO: 32478 - DNA, 15 bp, Homo sapiens
ggcggaaaaatctgg

SEQ ID NO: 32479 - DNA, 15 bp, Homo sapiens
gcggaaaaatctggg

SEQ ID NO: 32480 - DNA, 15 bp, Homo sapiens
cggaaaaatctgggc

SEQ ID NO: 32481 - DNA, 15 bp, Homo sapiens
ggaaaaatctgggca

SEQ ID NO: 32482 - DNA, 15 bp, Homo sapiens
gaaaaatctgggcaa

SEQ ID NO: 32483 - DNA, 15 bp, Homo sapiens
aaaaatctgggcaag

SEQ ID NO: 32484 - DNA, 15 bp, Homo sapiens
aaaatctgggcaagt

SEQ ID NO: 32485 - DNA, 15 bp, Homo sapiens
aaatctgggcaagtc

SEQ ID NO: 32486 - DNA, 15 bp, Homo sapiens
aatctgggcaagtcg

SEQ ID NO: 32487 - DNA, 15 bp, Homo sapiens
atctgggcaagtcgg

SEQ ID NO: 32488 - DNA, 15 bp, Homo sapiens
tctgggcaagtcggg

SEQ ID NO: 32489 - DNA, 15 bp, Homo sapiens
ctgggcaagtcgggg

SEQ ID NO: 32490 - DNA, 15 bp, Homo sapiens
tgggcaagtcggggg

SEQ ID NO: 32491 - DNA, 15 bp, Homo sapiens
gggcaagtcgggggc

SEQ ID NO: 32492 - DNA, 15 bp, Homo sapiens
ggcaagtcgggggct

SEQ ID NO: 32493 - DNA, 15 bp, Homo sapiens
gcaagtcgggggctg

SEQ ID NO: 32494 - DNA, 15 bp, Homo sapiens
caagtcgggggctgt

SEQ ID NO: 32495 - DNA, 15 bp, Homo sapiens
aagtcgggggctgtg

SEQ ID NO: 32496 - DNA, 15 bp, Homo sapiens
agtcgggggctgtga

SEQ ID NO: 32497 - DNA, 15 bp, Homo sapiens
gtcgggggctgtgac

SEQ ID NO: 32498 - DNA, 15 bp, Homo sapiens
tcgggggctgtgaca

SEQ ID NO: 32499 - DNA, 15 bp, Homo sapiens
cgggggctgtgacaa

SEQ ID NO: 32500 - DNA, 15 bp, Homo sapiens
gggggctgtgacaac

SEQ ID NO: 32501 - DNA, 15 bp, Homo sapiens
ggggctgtgacaaca

SEQ ID NO: 32502 - DNA, 15 bp, Homo sapiens
gggctgtgacaacag

SEQ ID NO: 32503 - DNA, 15 bp, Homo sapiens
ggctgtgacaacagg

SEQ ID NO: 32504 - DNA, 15 bp, Homo sapiens
gctgtgacaacaggg

SEQ ID NO: 32505 - DNA, 15 bp, Homo sapiens
ctgtgacaacagggc

SEQ ID NO: 32506 - DNA, 15 bp, Homo sapiens
tgtgacaacagggcc

SEQ ID NO: 32507 - DNA, 15 bp, Homo sapiens
gtgacaacagggccc

SEQ ID NO: 32508 - DNA, 15 bp, Homo sapiens
tgacaacagggccca

SEQ ID NO: 32509 - DNA, 15 bp, Homo sapiens
gacaacagggcccag

SEQ ID NO: 32510 - DNA, 15 bp, Homo sapiens
acaacagggcccaga

SEQ ID NO: 32511 - DNA, 15 bp, Homo sapiens
caacagggcccagat

SEQ ID NO: 32512 - DNA, 15 bp, Homo sapiens
aacagggcccagatg

SEQ ID NO: 32513 - DNA, 15 bp, Homo sapiens
acagggcccagatgc

SEQ ID NO: 32514 - DNA, 15 bp, Homo sapiens
cagggcccagatgca

SEQ ID NO: 32515 - DNA, 15 bp, Homo sapiens
agggcccagatgcag

SEQ ID NO: 32516 - DNA, 15 bp, Homo sapiens
gggcccagatgcaga

SEQ ID NO: 32517 - DNA, 15 bp, Homo sapiens
ggcccagatgcagac

SEQ ID NO: 32518 - DNA, 15 bp, Homo sapiens
gcccagatgcagacc

SEQ ID NO: 32519 - DNA, 15 bp, Homo sapiens
cccagatgcagaccc

SEQ ID NO: 32520 - DNA, 15 bp, Homo sapiens
ccagatgcagacccc

SEQ ID NO: 32521 - DNA, 15 bp, Homo sapiens
cagatgcagaccccg

SEQ ID NO: 32522 - DNA, 15 bp, Homo sapiens
agatgcagaccccga

SEQ ID NO: 32523 - DNA, 15 bp, Homo sapiens
gatgcagaccccgat

SEQ ID NO: 32524 - DNA, 15 bp, Homo sapiens
atgcagaccccgata

SEQ ID NO: 32525 - DNA, 15 bp, Homo sapiens
tgcagaccccgatat

SEQ ID NO: 32526 - DNA, 15 bp, Homo sapiens
gcagaccccgatatg

SEQ ID NO: 32527 - DNA, 15 bp, Homo sapiens
cagaccccgatatga

SEQ ID NO: 32528 - DNA, 15 bp, Homo sapiens
agaccccgatatgaa

SEQ ID NO: 32529 - DNA, 15 bp, Homo sapiens
gaccccgatatgaaa

SEQ ID NO: 32530 - DNA, 15 bp, Homo sapiens
accccgatatgaaaa

SEQ ID NO: 32531 - DNA, 15 bp, Homo sapiens
ccccgatatgaaaac

SEQ ID NO: 32532 - DNA, 15 bp, Homo sapiens
cccgatatgaaaaca

SEQ ID NO: 32533 - DNA, 15 bp, Homo sapiens
ccgatatgaaaacat

SEQ ID NO: 32534 - DNA, 15 bp, Homo sapiens
cgatatgaaaacata

SEQ ID NO: 32535 - DNA, 15 bp, Homo sapiens
gatatgaaaacataa

SEQ ID NO: 32536 - DNA, 15 bp, Homo sapiens
atatgaaaacataat

SEQ ID NO: 32537 - DNA, 15 bp, Homo sapiens
tatgaaaacataatc

SEQ ID NO: 32538 - DNA, 15 bp, Homo sapiens
atgaaaacataatct

SEQ ID NO: 32539 - DNA, 15 bp, Homo sapiens
tgaaaacataatctg

SEQ ID NO: 32540 - DNA, 15 bp, Homo sapiens
gaaaacataatctgt

SEQ ID NO: 32541 - DNA, 15 bp, Homo sapiens
aaaacataatctgtg

SEQ ID NO: 32542 - DNA, 15 bp, Homo sapiens
aaacataatctgtgt

SEQ ID NO: 32543 - DNA, 15 bp, Homo sapiens
aacataatctgtgtc

SEQ ID NO: 32544 - DNA, 15 bp, Homo sapiens
acataatctgtgtcc

SEQ ID NO: 32545 - DNA, 15 bp, Homo sapiens
cataatctgtgtccc

SEQ ID NO: 32546 - DNA, 15 bp, Homo sapiens
ataatctgtgtccca

SEQ ID NO: 32547 - DNA, 15 bp, Homo sapiens
taatctgtgtcccag

SEQ ID NO: 32548 - DNA, 15 bp, Homo sapiens
aatctgtgtcccaga

SEQ ID NO: 32549 - DNA, 15 bp, Homo sapiens
atctgtgtcccagaa

SEQ ID NO: 32550 - DNA, 15 bp, Homo sapiens
tctgtgtcccagaaa

SEQ ID NO: 32551 - DNA, 15 bp, Homo sapiens
ctgtgtcccagaaac

SEQ ID NO: 32552 - DNA, 15 bp, Homo sapiens
tgtgtcccagaaaca

SEQ ID NO: 32553 - DNA, 15 bp, Homo sapiens
gtgtcccagaaacat

SEQ ID NO: 32554 - DNA, 15 bp, Homo sapiens
tgtcccagaaacatc

SEQ ID NO: 32555 - DNA, 15 bp, Homo sapiens
gtcccagaaacatcc

SEQ ID NO: 32556 - DNA, 15 bp, Homo sapiens
tcccagaaacatccc

SEQ ID NO: 32557 - DNA, 15 bp, Homo sapiens
cccagaaacatcccc

SEQ ID NO: 32558 - DNA, 15 bp, Homo sapiens
ccagaaacatccccc

SEQ ID NO: 32559 - DNA, 15 bp, Homo sapiens
cagaaacatccccca

SEQ ID NO: 32560 - DNA, 15 bp, Homo sapiens
agaaacatcccccat

SEQ ID NO: 32561 - DNA, 15 bp, Homo sapiens
gaaacatcccccatt

SEQ ID NO: 32562 - DNA, 15 bp, Homo sapiens
aaacatcccccattc

SEQ ID NO: 32563 - DNA, 15 bp, Homo sapiens
aacatcccccattca

SEQ ID NO: 32564 - DNA, 15 bp, Homo sapiens
acatcccccattcag

SEQ ID NO: 32565 - DNA, 15 bp, Homo sapiens
catcccccattcagc

SEQ ID NO: 32566 - DNA, 15 bp, Homo sapiens
atcccccattcagct

SEQ ID NO: 32567 - DNA, 15 bp, Homo sapiens
tcccccattcagctt

SEQ ID NO: 32568 - DNA, 15 bp, Homo sapiens
cccccattcagcttc

SEQ ID NO: 32569 - DNA, 15 bp, Homo sapiens
ccccattcagcttct

SEQ ID NO: 32570 - DNA, 15 bp, Homo sapiens
cccattcagcttctg

SEQ ID NO: 32571 - DNA, 15 bp, Homo sapiens
ccattcagcttctga

SEQ ID NO: 32572 - DNA, 15 bp, Homo sapiens
cattcagcttctgag

SEQ ID NO: 32573 - DNA, 15 bp, Homo sapiens
attcagcttctgaga

SEQ ID NO: 32574 - DNA, 15 bp, Homo sapiens
ttcagcttctgagaa

SEQ ID NO: 32575 - DNA, 15 bp, Homo sapiens
tcagcttctgagaaa

SEQ ID NO: 32576 - DNA, 15 bp, Homo sapiens
cagcttctgagaaac

SEQ ID NO: 32577 - DNA, 15 bp, Homo sapiens
agcttctgagaaacc

SEQ ID NO: 32578 - DNA, 15 bp, Homo sapiens
gcttctgagaaaccc

SEQ ID NO: 32579 - DNA, 15 bp, Homo sapiens
cttctgagaaaccca

SEQ ID NO: 32580 - DNA, 15 bp, Homo sapiens
ttctgagaaacccag

SEQ ID NO: 32581 - DNA, 15 bp, Homo sapiens
tctgagaaacccagt

SEQ ID NO: 32582 - DNA, 15 bp, Homo sapiens
ctgagaaacccagtc

SEQ ID NO: 32583 - DNA, 15 bp, Homo sapiens
tgagaaacccagtca

SEQ ID NO: 32584 - DNA, 15 bp, Homo sapiens
gagaaacccagtcag

SEQ ID NO: 32585 - DNA, 15 bp, Homo sapiens
agaaacccagtcaga

SEQ ID NO: 32586 - DNA, 15 bp, Homo sapiens
gaaacccagtcagaa

SEQ ID NO: 32587 - DNA, 15 bp, Homo sapiens
aaacccagtcagaaa

SEQ ID NO: 32588 - DNA, 15 bp, Homo sapiens
aacccagtcagaaag

SEQ ID NO: 32589 - DNA, 15 bp, Homo sapiens
acccagtcagaaagg

SEQ ID NO: 32590 - DNA, 15 bp, Homo sapiens
cccagtcagaaaggg

SEQ ID NO: 32591 - DNA, 15 bp, Homo sapiens
ccagtcagaaaggga

SEQ ID NO: 32592 - DNA, 15 bp, Homo sapiens
cagtcagaaagggac

SEQ ID NO: 32593 - DNA, 15 bp, Homo sapiens
agtcagaaagggacg

SEQ ID NO: 32594 - DNA, 15 bp, Homo sapiens
gtcagaaagggacgt

SEQ ID NO: 32595 - DNA, 15 bp, Homo sapiens
tcagaaagggacgtc

SEQ ID NO: 32596 - DNA, 15 bp, Homo sapiens
cagaaagggacgtcc

SEQ ID NO: 32597 - DNA, 15 bp, Homo sapiens
agaaagggacgtccc

SEQ ID NO: 32598 - DNA, 15 bp, Homo sapiens
gaaagggacgtccca

SEQ ID NO: 32599 - DNA, 15 bp, Homo sapiens
aaagggacgtcccaa

SEQ ID NO: 32600 - DNA, 15 bp, Homo sapiens
aagggacgtcccaac

SEQ ID NO: 32601 - DNA, 15 bp, Homo sapiens
agggacgtcccaaca

SEQ ID NO: 32602 - DNA, 15 bp, Homo sapiens
gggacgtcccaacag

SEQ ID NO: 32603 - DNA, 15 bp, Homo sapiens
ggacgtcccaacaga

SEQ ID NO: 32604 - DNA, 15 bp, Homo sapiens
gacgtcccaacagac

SEQ ID NO: 32605 - DNA, 15 bp, Homo sapiens
acgtcccaacagaca

SEQ ID NO: 32606 - DNA, 15 bp, Homo sapiens
cgtcccaacagacag

SEQ ID NO: 32607 - DNA, 15 bp, Homo sapiens
gtcccaacagacagt

SEQ ID NO: 32608 - DNA, 15 bp, Homo sapiens
tcccaacagacagtg

SEQ ID NO: 32609 - DNA, 15 bp, Homo sapiens
cccaacagacagtgc

SEQ ID NO: 32610 - DNA, 15 bp, Homo sapiens
ccaacagacagtgca

SEQ ID NO: 32611 - DNA, 15 bp, Homo sapiens
caacagacagtgcag

SEQ ID NO: 32612 - DNA, 15 bp, Homo sapiens
aacagacagtgcagg

SEQ ID NO: 32613 - DNA, 15 bp, Homo sapiens
acagacagtgcagga

SEQ ID NO: 32614 - DNA, 15 bp, Homo sapiens
cagacagtgcaggaa

SEQ ID NO: 32615 - DNA, 15 bp, Homo sapiens
agacagtgcaggaag

SEQ ID NO: 32616 - DNA, 15 bp, Homo sapiens
gacagtgcaggaagc

SEQ ID NO: 32617 - DNA, 15 bp, Homo sapiens
acagtgcaggaagcc

SEQ ID NO: 32618 - DNA, 15 bp, Homo sapiens
cagtgcaggaagccg

SEQ ID NO: 32619 - DNA, 15 bp, Homo sapiens
agtgcaggaagccgg

SEQ ID NO: 32620 - DNA, 15 bp, Homo sapiens
gtgcaggaagccggc

SEQ ID NO: 32621 - DNA, 15 bp, Homo sapiens
tgcaggaagccggct

SEQ ID NO: 32622 - DNA, 15 bp, Homo sapiens
gcaggaagccggctg

SEQ ID NO: 32623 - DNA, 15 bp, Homo sapiens
caggaagccggctgc

SEQ ID NO: 32624 - DNA, 15 bp, Homo sapiens
aggaagccggctgcc

SEQ ID NO: 32625 - DNA, 15 bp, Homo sapiens
ggaagccggctgccc

SEQ ID NO: 32626 - DNA, 15 bp, Homo sapiens
gaagccggctgccca

SEQ ID NO: 32627 - DNA, 15 bp, Homo sapiens
aagccggctgcccag

SEQ ID NO: 32628 - DNA, 15 bp, Homo sapiens
agccggctgcccagc

SEQ ID NO: 32629 - DNA, 15 bp, Homo sapiens
gccggctgcccagcc

SEQ ID NO: 32630 - DNA, 15 bp, Homo sapiens
ccggctgcccagccc

SEQ ID NO: 32631 - DNA, 15 bp, Homo sapiens
cggctgcccagcccg

SEQ ID NO: 32632 - DNA, 15 bp, Homo sapiens
ggctgcccagcccgg

SEQ ID NO: 32633 - DNA, 15 bp, Homo sapiens
gctgcccagcccggc

SEQ ID NO: 32634 - DNA, 15 bp, Homo sapiens
ctgcccagcccggcc

SEQ ID NO: 32635 - DNA, 15 bp, Homo sapiens
tgcccagcccggccc

SEQ ID NO: 32636 - DNA, 15 bp, Homo sapiens
gcccagcccggccct

SEQ ID NO: 32637 - DNA, 15 bp, Homo sapiens
cccagcccggccctc

SEQ ID NO: 32638 - DNA, 15 bp, Homo sapiens
ccagcccggccctct

SEQ ID NO: 32639 - DNA, 15 bp, Homo sapiens
cagcccggccctcta

SEQ ID NO: 32640 - DNA, 15 bp, Homo sapiens
agcccggccctctag

SEQ ID NO: 32641 - DNA, 15 bp, Homo sapiens
gcccggccctctagg

SEQ ID NO: 32642 - DNA, 15 bp, Homo sapiens
cccggccctctaggt

SEQ ID NO: 32643 - DNA, 15 bp, Homo sapiens
ccggccctctaggtc

SEQ ID NO: 32644 - DNA, 15 bp, Homo sapiens
cggccctctaggtcc

SEQ ID NO: 32645 - DNA, 15 bp, Homo sapiens
ggccctctaggtcct

SEQ ID NO: 32646 - DNA, 15 bp, Homo sapiens
gccctctaggtcctc

SEQ ID NO: 32647 - DNA, 15 bp, Homo sapiens
ccctctaggtcctct

SEQ ID NO: 32648 - DNA, 15 bp, Homo sapiens
cctctaggtcctcta

SEQ ID NO: 32649 - DNA, 15 bp, Homo sapiens
ctctaggtcctctac

SEQ ID NO: 32650 - DNA, 15 bp, Homo sapiens
tctaggtcctctacc

SEQ ID NO: 32651 - DNA, 15 bp, Homo sapiens
ctaggtcctctaccc

SEQ ID NO: 32652 - DNA, 15 bp, Homo sapiens
taggtcctctacccc

SEQ ID NO: 32653 - DNA, 15 bp, Homo sapiens
aggtcctctaccccc

SEQ ID NO: 32654 - DNA, 15 bp, Homo sapiens
ggtcctctaccccca

SEQ ID NO: 32655 - DNA, 15 bp, Homo sapiens
gtcctctacccccag

SEQ ID NO: 32656 - DNA, 15 bp, Homo sapiens
tcctctacccccaga

SEQ ID NO: 32657 - DNA, 15 bp, Homo sapiens
cctctacccccagac

SEQ ID NO: 32658 - DNA, 15 bp, Homo sapiens
ctctacccccagaca

SEQ ID NO: 32659 - DNA, 15 bp, Homo sapiens
tctacccccagacag

SEQ ID NO: 32660 - DNA, 15 bp, Homo sapiens
ctacccccagacaga

SEQ ID NO: 32661 - DNA, 15 bp, Homo sapiens
tacccccagacagat

SEQ ID NO: 32662 - DNA, 15 bp, Homo sapiens
acccccagacagatc

SEQ ID NO: 32663 - DNA, 15 bp, Homo sapiens
cccccagacagatca

SEQ ID NO: 32664 - DNA, 15 bp, Homo sapiens
ccccagacagatcat

SEQ ID NO: 32665 - DNA, 15 bp, Homo sapiens
cccagacagatcatc

SEQ ID NO: 32666 - DNA, 15 bp, Homo sapiens
ccagacagatcatct

SEQ ID NO: 32667 - DNA, 15 bp, Homo sapiens
cagacagatcatctc

SEQ ID NO: 32668 - DNA, 15 bp, Homo sapiens
agacagatcatctcc

SEQ ID NO: 32669 - DNA, 15 bp, Homo sapiens
gacagatcatctcca

SEQ ID NO: 32670 - DNA, 15 bp, Homo sapiens
acagatcatctccat

SEQ ID NO: 32671 - DNA, 15 bp, Homo sapiens
cagatcatctccatg

SEQ ID NO: 32672 - DNA, 15 bp, Homo sapiens
agatcatctccatgt

SEQ ID NO: 32673 - DNA, 15 bp, Homo sapiens
gatcatctccatgtc

SEQ ID NO: 32674 - DNA, 15 bp, Homo sapiens
atcatctccatgtcc

SEQ ID NO: 32675 - DNA, 15 bp, Homo sapiens
tcatctccatgtccc

SEQ ID NO: 32676 - DNA, 15 bp, Homo sapiens
catctccatgtccct

SEQ ID NO: 32677 - DNA, 15 bp, Homo sapiens
atctccatgtccctg

SEQ ID NO: 32678 - DNA, 15 bp, Homo sapiens
tctccatgtccctgt

SEQ ID NO: 32679 - DNA, 15 bp, Homo sapiens
ctccatgtccctgtc

SEQ ID NO: 32680 - DNA, 15 bp, Homo sapiens
tccatgtccctgtct

SEQ ID NO: 32681 - DNA, 15 bp, Homo sapiens
ccatgtccctgtctg

SEQ ID NO: 32682 - DNA, 15 bp, Homo sapiens
catgtccctgtctga

SEQ ID NO: 32683 - DNA, 15 bp, Homo sapiens
atgtccctgtctgag

SEQ ID NO: 32684 - DNA, 15 bp, Homo sapiens
tgtccctgtctgaga

SEQ ID NO: 32685 - DNA, 15 bp, Homo sapiens
gtccctgtctgagaa

SEQ ID NO: 32686 - DNA, 15 bp, Homo sapiens
tccctgtctgagaat

SEQ ID NO: 32687 - DNA, 15 bp, Homo sapiens
ccctgtctgagaatg

SEQ ID NO: 32688 - DNA, 15 bp, Homo sapiens
cctgtctgagaatgt

SEQ ID NO: 32689 - DNA, 15 bp, Homo sapiens
ctgtctgagaatgta

SEQ ID NO: 32690 - DNA, 15 bp, Homo sapiens
tgtctgagaatgtat

SEQ ID NO: 32691 - DNA, 15 bp, Homo sapiens
gtctgagaatgtatc

SEQ ID NO: 32692 - DNA, 15 bp, Homo sapiens
tctgagaatgtatct

SEQ ID NO: 32693 - DNA, 15 bp, Homo sapiens
ctgagaatgtatcta

SEQ ID NO: 32694 - DNA, 15 bp, Homo sapiens
tgagaatgtatctat

SEQ ID NO: 32695 - DNA, 15 bp, Homo sapiens
gagaatgtatctatg

SEQ ID NO: 32696 - DNA, 15 bp, Homo sapiens
agaatgtatctatgc

SEQ ID NO: 32697 - DNA, 15 bp, Homo sapiens
gaatgtatctatgct

SEQ ID NO: 32698 - DNA, 15 bp, Homo sapiens
aatgtatctatgctt

SEQ ID NO: 32699 - DNA, 15 bp, Homo sapiens
atgtatctatgcttt

SEQ ID NO: 32700 - DNA, 15 bp, Homo sapiens
tgtatctatgctttg

SEQ ID NO: 32701 - DNA, 15 bp, Homo sapiens
gtatctatgctttgc

SEQ ID NO: 32702 - DNA, 15 bp, Homo sapiens
tatctatgctttgct

SEQ ID NO: 32703 - DNA, 15 bp, Homo sapiens
atctatgctttgctg

SEQ ID NO: 32704 - DNA, 15 bp, Homo sapiens
tctatgctttgctga

SEQ ID NO: 32705 - DNA, 15 bp, Homo sapiens
ctatgctttgctgag

SEQ ID NO: 32706 - DNA, 15 bp, Homo sapiens
tatgctttgctgagt

SEQ ID NO: 32707 - DNA, 15 bp, Homo sapiens
atgctttgctgagtc

SEQ ID NO: 32708 - DNA, 15 bp, Homo sapiens
tgctttgctgagtca

SEQ ID NO: 32709 - DNA, 15 bp, Homo sapiens
gctttgctgagtcag

SEQ ID NO: 32710 - DNA, 15 bp, Homo sapiens
ctttgctgagtcagg

SEQ ID NO: 32711 - DNA, 15 bp, Homo sapiens
tttgctgagtcaggc

SEQ ID NO: 32712 - DNA, 15 bp, Homo sapiens
ttgctgagtcaggcc

SEQ ID NO: 32713 - DNA, 15 bp, Homo sapiens
tgctgagtcaggcca

SEQ ID NO: 32714 - DNA, 15 bp, Homo sapiens
gctgagtcaggccat

SEQ ID NO: 32715 - DNA, 15 bp, Homo sapiens
ctgagtcaggccatc

SEQ ID NO: 32716 - DNA, 15 bp, Homo sapiens
tgagtcaggccatcc

SEQ ID NO: 32717 - DNA, 15 bp, Homo sapiens
gagtcaggccatccc

SEQ ID NO: 32718 - DNA, 15 bp, Homo sapiens
agtcaggccatccca

SEQ ID NO: 32719 - DNA, 15 bp, Homo sapiens
gtcaggccatcccac

SEQ ID NO: 32720 - DNA, 15 bp, Homo sapiens
tcaggccatcccaca

SEQ ID NO: 32721 - DNA, 15 bp, Homo sapiens
caggccatcccacat

SEQ ID NO: 32722 - DNA, 15 bp, Homo sapiens
aggccatcccacatg

SEQ ID NO: 32723 - DNA, 15 bp, Homo sapiens
ggccatcccacatgt

SEQ ID NO: 32724 - DNA, 15 bp, Homo sapiens
gccatcccacatgtg

SEQ ID NO: 32725 - DNA, 15 bp, Homo sapiens
ccatcccacatgtgt

SEQ ID NO: 32726 - DNA, 15 bp, Homo sapiens
catcccacatgtgtt

SEQ ID NO: 32727 - DNA, 15 bp, Homo sapiens
atcccacatgtgttt

SEQ ID NO: 32728 - DNA, 15 bp, Homo sapiens
tcccacatgtgtttg

SEQ ID NO: 32729 - DNA, 15 bp, Homo sapiens
cccacatgtgtttgg

SEQ ID NO: 32730 - DNA, 15 bp, Homo sapiens
ccacatgtgtttggg

SEQ ID NO: 32731 - DNA, 15 bp, Homo sapiens
cacatgtgtttgggg

SEQ ID NO: 32732 - DNA, 15 bp, Homo sapiens
acatgtgtttgggga

SEQ ID NO: 32733 - DNA, 15 bp, Homo sapiens
catgtgtttggggag

SEQ ID NO: 32734 - DNA, 15 bp, Homo sapiens
atgtgtttggggaga

SEQ ID NO: 32735 - DNA, 15 bp, Homo sapiens
tgtgtttggggagaa

SEQ ID NO: 32736 - DNA, 15 bp, Homo sapiens
gtgtttggggagaat

SEQ ID NO: 32737 - DNA, 15 bp, Homo sapiens
tgtttggggagaatt

SEQ ID NO: 32738 - DNA, 15 bp, Homo sapiens
gtttggggagaattc

SEQ ID NO: 32739 - DNA, 15 bp, Homo sapiens
tttggggagaattct

SEQ ID NO: 32740 - DNA, 15 bp, Homo sapiens
ttggggagaattctt

SEQ ID NO: 32741 - DNA, 15 bp, Homo sapiens
tggggagaattctta

SEQ ID NO: 32742 - DNA, 15 bp, Homo sapiens
ggggagaattcttag

SEQ ID NO: 32743 - DNA, 15 bp, Homo sapiens
gggagaattcttagc

SEQ ID NO: 32744 - DNA, 15 bp, Homo sapiens
ggagaattcttagct

SEQ ID NO: 32745 - DNA, 15 bp, Homo sapiens
gagaattcttagctc

SEQ ID NO: 32746 - DNA, 15 bp, Homo sapiens
agaattcttagctct

SEQ ID NO: 32747 - DNA, 15 bp, Homo sapiens
gaattcttagctctg

SEQ ID NO: 32748 - DNA, 15 bp, Homo sapiens
aattcttagctctgg

SEQ ID NO: 32749 - DNA, 15 bp, Homo sapiens
attcttagctctggc

SEQ ID NO: 32750 - DNA, 15 bp, Homo sapiens
ttcttagctctggcc

SEQ ID NO: 32751 - DNA, 15 bp, Homo sapiens
tcttagctctggcca

SEQ ID NO: 32752 - DNA, 15 bp, Homo sapiens
cttagctctggccaa

SEQ ID NO: 32753 - DNA, 15 bp, Homo sapiens
ttagctctggccaag

SEQ ID NO: 32754 - DNA, 15 bp, Homo sapiens
tagctctggccaagt

SEQ ID NO: 32755 - DNA, 15 bp, Homo sapiens
agctctggccaagtg

SEQ ID NO: 32756 - DNA, 15 bp, Homo sapiens
gctctggccaagtgt

SEQ ID NO: 32757 - DNA, 15 bp, Homo sapiens
ctctggccaagtgtc

SEQ ID NO: 32758 - DNA, 15 bp, Homo sapiens
tctggccaagtgtcc

SEQ ID NO: 32759 - DNA, 15 bp, Homo sapiens
ctggccaagtgtcca

SEQ ID NO: 32760 - DNA, 15 bp, Homo sapiens
tggccaagtgtccag

SEQ ID NO: 32761 - DNA, 15 bp, Homo sapiens
ggccaagtgtccagg

SEQ ID NO: 32762 - DNA, 15 bp, Homo sapiens
gccaagtgtccaggc

SEQ ID NO: 32763 - DNA, 15 bp, Homo sapiens
ccaagtgtccaggca

SEQ ID NO: 32764 - DNA, 15 bp, Homo sapiens
caagtgtccaggcag

SEQ ID NO: 32765 - DNA, 15 bp, Homo sapiens
aagtgtccaggcagc

SEQ ID NO: 32766 - DNA, 15 bp, Homo sapiens
agtgtccaggcagct

SEQ ID NO: 32767 - DNA, 15 bp, Homo sapiens
gtgtccaggcagctt

SEQ ID NO: 32768 - DNA, 15 bp, Homo sapiens
tgtccaggcagcttc

SEQ ID NO: 32769 - DNA, 15 bp, Homo sapiens
gtccaggcagcttca

SEQ ID NO: 32770 - DNA, 15 bp, Homo sapiens
tccaggcagcttcag

SEQ ID NO: 32771 - DNA, 15 bp, Homo sapiens
ccaggcagcttcaga

SEQ ID NO: 32772 - DNA, 15 bp, Homo sapiens
caggcagcttcagaa

SEQ ID NO: 32773 - DNA, 15 bp, Homo sapiens
aggcagcttcagaag

SEQ ID NO: 32774 - DNA, 15 bp, Homo sapiens
ggcagcttcagaagt

SEQ ID NO: 32775 - DNA, 15 bp, Homo sapiens
gcagcttcagaagtg

SEQ ID NO: 32776 - DNA, 15 bp, Homo sapiens
cagcttcagaagtga

SEQ ID NO: 32777 - DNA, 15 bp, Homo sapiens
agcttcagaagtgac

SEQ ID NO: 32778 - DNA, 15 bp, Homo sapiens
gcttcagaagtgacc

SEQ ID NO: 32779 - DNA, 15 bp, Homo sapiens
cttcagaagtgacca

SEQ ID NO: 32780 - DNA, 15 bp, Homo sapiens
ttcagaagtgaccac

SEQ ID NO: 32781 - DNA, 15 bp, Homo sapiens
tcagaagtgaccaca

SEQ ID NO: 32782 - DNA, 15 bp, Homo sapiens
cagaagtgaccacag

SEQ ID NO: 32783 - DNA, 15 bp, Homo sapiens
agaagtgaccacagg

SEQ ID NO: 32784 - DNA, 15 bp, Homo sapiens
gaagtgaccacaggc

SEQ ID NO: 32785 - DNA, 15 bp, Homo sapiens
aagtgaccacaggcc

SEQ ID NO: 32786 - DNA, 15 bp, Homo sapiens
agtgaccacaggcca

SEQ ID NO: 32787 - DNA, 15 bp, Homo sapiens
gtgaccacaggccag

SEQ ID NO: 32788 - DNA, 15 bp, Homo sapiens
tgaccacaggccagc

SEQ ID NO: 32789 - DNA, 15 bp, Homo sapiens
gaccacaggccagcc

SEQ ID NO: 32790 - DNA, 15 bp, Homo sapiens
accacaggccagcca

SEQ ID NO: 32791 - DNA, 15 bp, Homo sapiens
ccacaggccagccac

SEQ ID NO: 32792 - DNA, 15 bp, Homo sapiens
cacaggccagccaca

SEQ ID NO: 32793 - DNA, 15 bp, Homo sapiens
acaggccagccacat

SEQ ID NO: 32794 - DNA, 15 bp, Homo sapiens
caggccagccacatg

SEQ ID NO: 32795 - DNA, 15 bp, Homo sapiens
aggccagccacatgg

SEQ ID NO: 32796 - DNA, 15 bp, Homo sapiens
ggccagccacatggg

SEQ ID NO: 32797 - DNA, 15 bp, Homo sapiens
gccagccacatgggc

SEQ ID NO: 32798 - DNA, 15 bp, Homo sapiens
ccagccacatgggcc

SEQ ID NO: 32799 - DNA, 15 bp, Homo sapiens
cagccacatgggcca

SEQ ID NO: 32800 - DNA, 15 bp, Homo sapiens
agccacatgggccag

SEQ ID NO: 32801 - DNA, 15 bp, Homo sapiens
gccacatgggccagg

SEQ ID NO: 32802 - DNA, 15 bp, Homo sapiens
ccacatgggccaggc

SEQ ID NO: 32803 - DNA, 15 bp, Homo sapiens
cacatgggccaggcc

SEQ ID NO: 32804 - DNA, 15 bp, Homo sapiens
acatgggccaggcca

SEQ ID NO: 32805 - DNA, 15 bp, Homo sapiens
catgggccaggccag

SEQ ID NO: 32806 - DNA, 15 bp, Homo sapiens
atgggccaggccaga

SEQ ID NO: 32807 - DNA, 15 bp, Homo sapiens
tgggccaggccagag

SEQ ID NO: 32808 - DNA, 15 bp, Homo sapiens
gggccaggccagagt

SEQ ID NO: 32809 - DNA, 15 bp, Homo sapiens
ggccaggccagagtg

SEQ ID NO: 32810 - DNA, 15 bp, Homo sapiens
gccaggccagagtgg

SEQ ID NO: 32811 - DNA, 15 bp, Homo sapiens
ccaggccagagtggt

SEQ ID NO: 32812 - DNA, 15 bp, Homo sapiens
caggccagagtggtg

SEQ ID NO: 32813 - DNA, 15 bp, Homo sapiens
aggccagagtggtgg

SEQ ID NO: 32814 - DNA, 15 bp, Homo sapiens
ggccagagtggtgga

SEQ ID NO: 32815 - DNA, 15 bp, Homo sapiens
gccagagtggtggaa

SEQ ID NO: 32816 - DNA, 15 bp, Homo sapiens
ccagagtggtggaaa

SEQ ID NO: 32817 - DNA, 15 bp, Homo sapiens
cagagtggtggaaaa

SEQ ID NO: 32818 - DNA, 15 bp, Homo sapiens
agagtggtggaaaac

SEQ ID NO: 32819 - DNA, 15 bp, Homo sapiens
gagtggtggaaaaca

SEQ ID NO: 32820 - DNA, 15 bp, Homo sapiens
agtggtggaaaacat

SEQ ID NO: 32821 - DNA, 15 bp, Homo sapiens
gtggtggaaaacatc

SEQ ID NO: 32822 - DNA, 15 bp, Homo sapiens
tggtggaaaacatcc

SEQ ID NO: 32823 - DNA, 15 bp, Homo sapiens
ggtggaaaacatcca

SEQ ID NO: 32824 - DNA, 15 bp, Homo sapiens
gtggaaaacatccat

SEQ ID NO: 32825 - DNA, 15 bp, Homo sapiens
tggaaaacatccatt

SEQ ID NO: 32826 - DNA, 15 bp, Homo sapiens
ggaaaacatccattt

SEQ ID NO: 32827 - DNA, 15 bp, Homo sapiens
gaaaacatccatttg

SEQ ID NO: 32828 - DNA, 15 bp, Homo sapiens
aaaacatccatttgc

SEQ ID NO: 32829 - DNA, 15 bp, Homo sapiens
aaacatccatttgca

SEQ ID NO: 32830 - DNA, 15 bp, Homo sapiens
aacatccatttgcac

SEQ ID NO: 32831 - DNA, 15 bp, Homo sapiens
acatccatttgcacc

SEQ ID NO: 32832 - DNA, 15 bp, Homo sapiens
catccatttgcaccg

SEQ ID NO: 32833 - DNA, 15 bp, Homo sapiens
atccatttgcaccga

SEQ ID NO: 32834 - DNA, 15 bp, Homo sapiens
tccatttgcaccgaa

SEQ ID NO: 32835 - DNA, 15 bp, Homo sapiens
ccatttgcaccgaaa

SEQ ID NO: 32836 - DNA, 15 bp, Homo sapiens
catttgcaccgaaat

SEQ ID NO: 32837 - DNA, 15 bp, Homo sapiens
atttgcaccgaaatc

SEQ ID NO: 32838 - DNA, 15 bp, Homo sapiens
tttgcaccgaaatcg

SEQ ID NO: 32839 - DNA, 15 bp, Homo sapiens
ttgcaccgaaatcgg

SEQ ID NO: 32840 - DNA, 15 bp, Homo sapiens
tgcaccgaaatcggt

SEQ ID NO: 32841 - DNA, 15 bp, Homo sapiens
gcaccgaaatcggta

SEQ ID NO: 32842 - DNA, 15 bp, Homo sapiens
caccgaaatcggtat

SEQ ID NO: 32843 - DNA, 15 bp, Homo sapiens
accgaaatcggtatt

SEQ ID NO: 32844 - DNA, 15 bp, Homo sapiens
ccgaaatcggtatta

SEQ ID NO: 32845 - DNA, 15 bp, Homo sapiens
cgaaatcggtattag

SEQ ID NO: 32846 - DNA, 15 bp, Homo sapiens
gaaatcggtattagt

SEQ ID NO: 32847 - DNA, 15 bp, Homo sapiens
aaatcggtattagtt

SEQ ID NO: 32848 - DNA, 15 bp, Homo sapiens
aatcggtattagttt

SEQ ID NO: 32849 - DNA, 15 bp, Homo sapiens
atcggtattagtttg

SEQ ID NO: 32850 - DNA, 15 bp, Homo sapiens
tcggtattagtttgt

SEQ ID NO: 32851 - DNA, 15 bp, Homo sapiens
cggtattagtttgtt

SEQ ID NO: 32852 - DNA, 15 bp, Homo sapiens
ggtattagtttgttc

SEQ ID NO: 32853 - DNA, 15 bp, Homo sapiens
gtattagtttgttct

SEQ ID NO: 32854 - DNA, 15 bp, Homo sapiens
tattagtttgttctg

SEQ ID NO: 32855 - DNA, 15 bp, Homo sapiens
attagtttgttctgg

SEQ ID NO: 32856 - DNA, 15 bp, Homo sapiens
ttagtttgttctggc

SEQ ID NO: 32857 - DNA, 15 bp, Homo sapiens
tagtttgttctggct

SEQ ID NO: 32858 - DNA, 15 bp, Homo sapiens
agtttgttctggctg

SEQ ID NO: 32859 - DNA, 15 bp, Homo sapiens
gtttgttctggctgc

SEQ ID NO: 32860 - DNA, 15 bp, Homo sapiens
tttgttctggctgct

SEQ ID NO: 32861 - DNA, 15 bp, Homo sapiens
ttgttctggctgcta

SEQ ID NO: 32862 - DNA, 15 bp, Homo sapiens
tgttctggctgctat

SEQ ID NO: 32863 - DNA, 15 bp, Homo sapiens
gttctggctgctata

SEQ ID NO: 32864 - DNA, 15 bp, Homo sapiens
ttctggctgctataa

SEQ ID NO: 32865 - DNA, 15 bp, Homo sapiens
tctggctgctataac

SEQ ID NO: 32866 - DNA, 15 bp, Homo sapiens
ctggctgctataaca

SEQ ID NO: 32867 - DNA, 15 bp, Homo sapiens
tggctgctataacaa

SEQ ID NO: 32868 - DNA, 15 bp, Homo sapiens
ggctgctataacaaa

SEQ ID NO: 32869 - DNA, 15 bp, Homo sapiens
gctgctataacaaag

SEQ ID NO: 32870 - DNA, 15 bp, Homo sapiens
ctgctataacaaagt

SEQ ID NO: 32871 - DNA, 15 bp, Homo sapiens
tgctataacaaagta

SEQ ID NO: 32872 - DNA, 15 bp, Homo sapiens
gctataacaaagtac

SEQ ID NO: 32873 - DNA, 15 bp, Homo sapiens
ctataacaaagtacc

SEQ ID NO: 32874 - DNA, 15 bp, Homo sapiens
tataacaaagtacca

SEQ ID NO: 32875 - DNA, 15 bp, Homo sapiens
ataacaaagtaccac

SEQ ID NO: 32876 - DNA, 15 bp, Homo sapiens
taacaaagtaccaca

SEQ ID NO: 32877 - DNA, 15 bp, Homo sapiens
aacaaagtaccacaa

SEQ ID NO: 32878 - DNA, 15 bp, Homo sapiens
acaaagtaccacaac

SEQ ID NO: 32879 - DNA, 15 bp, Homo sapiens
caaagtaccacaact

SEQ ID NO: 32880 - DNA, 15 bp, Homo sapiens
aaagtaccacaactg

SEQ ID NO: 32881 - DNA, 15 bp, Homo sapiens
aagtaccacaactga

SEQ ID NO: 32882 - DNA, 15 bp, Homo sapiens
agtaccacaactgag

SEQ ID NO: 32883 - DNA, 15 bp, Homo sapiens
gtaccacaactgagt

SEQ ID NO: 32884 - DNA, 15 bp, Homo sapiens
taccacaactgagtg

SEQ ID NO: 32885 - DNA, 15 bp, Homo sapiens
accacaactgagtgg

SEQ ID NO: 32886 - DNA, 15 bp, Homo sapiens
ccacaactgagtggc

SEQ ID NO: 32887 - DNA, 15 bp, Homo sapiens
cacaactgagtggct

SEQ ID NO: 32888 - DNA, 15 bp, Homo sapiens
acaactgagtggctt

SEQ ID NO: 32889 - DNA, 15 bp, Homo sapiens
caactgagtggcttc

SEQ ID NO: 32890 - DNA, 15 bp, Homo sapiens
aactgagtggcttca

SEQ ID NO: 32891 - DNA, 15 bp, Homo sapiens
actgagtggcttcag

SEQ ID NO: 32892 - DNA, 15 bp, Homo sapiens
ctgagtggcttcagc

SEQ ID NO: 32893 - DNA, 15 bp, Homo sapiens
tgagtggcttcagca

SEQ ID NO: 32894 - DNA, 15 bp, Homo sapiens
gagtggcttcagcaa

SEQ ID NO: 32895 - DNA, 15 bp, Homo sapiens
agtggcttcagcaac

SEQ ID NO: 32896 - DNA, 15 bp, Homo sapiens
gtggcttcagcaaca

SEQ ID NO: 32897 - DNA, 15 bp, Homo sapiens
tggcttcagcaacag

SEQ ID NO: 32898 - DNA, 15 bp, Homo sapiens
ggcttcagcaacaga

SEQ ID NO: 32899 - DNA, 15 bp, Homo sapiens
gcttcagcaacagaa

SEQ ID NO: 32900 - DNA, 15 bp, Homo sapiens
cttcagcaacagaaa

SEQ ID NO: 32901 - DNA, 15 bp, Homo sapiens
ttcagcaacagaaat

SEQ ID NO: 32902 - DNA, 15 bp, Homo sapiens
tcagcaacagaaatt

SEQ ID NO: 32903 - DNA, 15 bp, Homo sapiens
cagcaacagaaattg

SEQ ID NO: 32904 - DNA, 15 bp, Homo sapiens
agcaacagaaattga

SEQ ID NO: 32905 - DNA, 15 bp, Homo sapiens
gcaacagaaattgat

SEQ ID NO: 32906 - DNA, 15 bp, Homo sapiens
caacagaaattgatc

SEQ ID NO: 32907 - DNA, 15 bp, Homo sapiens
aacagaaattgatca

SEQ ID NO: 32908 - DNA, 15 bp, Homo sapiens
acagaaattgatcat

SEQ ID NO: 32909 - DNA, 15 bp, Homo sapiens
cagaaattgatcatc

SEQ ID NO: 32910 - DNA, 15 bp, Homo sapiens
agaaattgatcatct

SEQ ID NO: 32911 - DNA, 15 bp, Homo sapiens
gaaattgatcatctc

SEQ ID NO: 32912 - DNA, 15 bp, Homo sapiens
aaattgatcatctca

SEQ ID NO: 32913 - DNA, 15 bp, Homo sapiens
aattgatcatctcac

SEQ ID NO: 32914 - DNA, 15 bp, Homo sapiens
attgatcatctcaca

SEQ ID NO: 32915 - DNA, 15 bp, Homo sapiens
ttgatcatctcacag

SEQ ID NO: 32916 - DNA, 15 bp, Homo sapiens
tgatcatctcacagt

SEQ ID NO: 32917 - DNA, 15 bp, Homo sapiens
gatcatctcacagtt

SEQ ID NO: 32918 - DNA, 15 bp, Homo sapiens
atcatctcacagttc

SEQ ID NO: 32919 - DNA, 15 bp, Homo sapiens
tcatctcacagttct

SEQ ID NO: 32920 - DNA, 15 bp, Homo sapiens
catctcacagttctg

SEQ ID NO: 32921 - DNA, 15 bp, Homo sapiens
atctcacagttctgg

SEQ ID NO: 32922 - DNA, 15 bp, Homo sapiens
tctcacagttctgga

SEQ ID NO: 32923 - DNA, 15 bp, Homo sapiens
ctcacagttctggag

SEQ ID NO: 32924 - DNA, 15 bp, Homo sapiens
tcacagttctggagg

SEQ ID NO: 32925 - DNA, 15 bp, Homo sapiens
cacagttctggaggc

SEQ ID NO: 32926 - DNA, 15 bp, Homo sapiens
acagttctggaggcc

SEQ ID NO: 32927 - DNA, 15 bp, Homo sapiens
cagttctggaggcca

SEQ ID NO: 32928 - DNA, 15 bp, Homo sapiens
agttctggaggccag

SEQ ID NO: 32929 - DNA, 15 bp, Homo sapiens
gttctggaggccaga

SEQ ID NO: 32930 - DNA, 15 bp, Homo sapiens
ttctggaggccagag

SEQ ID NO: 32931 - DNA, 15 bp, Homo sapiens
tctggaggccagagt

SEQ ID NO: 32932 - DNA, 15 bp, Homo sapiens
ctggaggccagagtc

SEQ ID NO: 32933 - DNA, 15 bp, Homo sapiens
tggaggccagagtcc

SEQ ID NO: 32934 - DNA, 15 bp, Homo sapiens
ggaggccagagtcca

SEQ ID NO: 32935 - DNA, 15 bp, Homo sapiens
gaggccagagtccaa

SEQ ID NO: 32936 - DNA, 15 bp, Homo sapiens
aggccagagtccaag

SEQ ID NO: 32937 - DNA, 15 bp, Homo sapiens
ggccagagtccaaga

SEQ ID NO: 32938 - DNA, 15 bp, Homo sapiens
gccagagtccaagat

SEQ ID NO: 32939 - DNA, 15 bp, Homo sapiens
ccagagtccaagatc

SEQ ID NO: 32940 - DNA, 15 bp, Homo sapiens
cagagtccaagatca

SEQ ID NO: 32941 - DNA, 15 bp, Homo sapiens
agagtccaagatcaa

SEQ ID NO: 32942 - DNA, 15 bp, Homo sapiens
gagtccaagatcaag

SEQ ID NO: 32943 - DNA, 15 bp, Homo sapiens
agtccaagatcaagg

SEQ ID NO: 32944 - DNA, 15 bp, Homo sapiens
gtccaagatcaaggt

SEQ ID NO: 32945 - DNA, 15 bp, Homo sapiens
tccaagatcaaggtg

SEQ ID NO: 32946 - DNA, 15 bp, Homo sapiens
ccaagatcaaggtgt

SEQ ID NO: 32947 - DNA, 15 bp, Homo sapiens
caagatcaaggtgtt

SEQ ID NO: 32948 - DNA, 15 bp, Homo sapiens
aagatcaaggtgttg

SEQ ID NO: 32949 - DNA, 15 bp, Homo sapiens
agatcaaggtgttgc

SEQ ID NO: 32950 - DNA, 15 bp, Homo sapiens
gatcaaggtgttgcc

SEQ ID NO: 32951 - DNA, 15 bp, Homo sapiens
atcaaggtgttgcca

SEQ ID NO: 32952 - DNA, 15 bp, Homo sapiens
tcaaggtgttgccag

SEQ ID NO: 32953 - DNA, 15 bp, Homo sapiens
caaggtgttgccagg

SEQ ID NO: 32954 - DNA, 15 bp, Homo sapiens
aaggtgttgccaggg

SEQ ID NO: 32955 - DNA, 15 bp, Homo sapiens
aggtgttgccagggt

SEQ ID NO: 32956 - DNA, 15 bp, Homo sapiens
ggtgttgccagggtt

SEQ ID NO: 32957 - DNA, 15 bp, Homo sapiens
gtgttgccagggttg

SEQ ID NO: 32958 - DNA, 15 bp, Homo sapiens
tgttgccagggttgg

SEQ ID NO: 32959 - DNA, 15 bp, Homo sapiens
gttgccagggttggt

SEQ ID NO: 32960 - DNA, 15 bp, Homo sapiens
ttgccagggttggtt

SEQ ID NO: 32961 - DNA, 15 bp, Homo sapiens
tgccagggttggttc

SEQ ID NO: 32962 - DNA, 15 bp, Homo sapiens
gccagggttggttcc

SEQ ID NO: 32963 - DNA, 15 bp, Homo sapiens
ccagggttggttcct

SEQ ID NO: 32964 - DNA, 15 bp, Homo sapiens
cagggttggttcctt

SEQ ID NO: 32965 - DNA, 15 bp, Homo sapiens
agggttggttccttc

SEQ ID NO: 32966 - DNA, 15 bp, Homo sapiens
gggttggttccttct

SEQ ID NO: 32967 - DNA, 15 bp, Homo sapiens
ggttggttccttctg

SEQ ID NO: 32968 - DNA, 15 bp, Homo sapiens
gttggttccttctgg

SEQ ID NO: 32969 - DNA, 15 bp, Homo sapiens
ttggttccttctggg

SEQ ID NO: 32970 - DNA, 15 bp, Homo sapiens
tggttccttctgggg

SEQ ID NO: 32971 - DNA, 15 bp, Homo sapiens
ggttccttctggggg

SEQ ID NO: 32972 - DNA, 15 bp, Homo sapiens
gttccttctgggggc

SEQ ID NO: 32973 - DNA, 15 bp, Homo sapiens
ttccttctgggggcc

SEQ ID NO: 32974 - DNA, 15 bp, Homo sapiens
tccttctgggggcca

SEQ ID NO: 32975 - DNA, 15 bp, Homo sapiens
ccttctgggggccat

SEQ ID NO: 32976 - DNA, 15 bp, Homo sapiens
cttctgggggccata

SEQ ID NO: 32977 - DNA, 15 bp, Homo sapiens
ttctgggggccataa

SEQ ID NO: 32978 - DNA, 15 bp, Homo sapiens
tctgggggccataag

SEQ ID NO: 32979 - DNA, 15 bp, Homo sapiens
ctgggggccataagg

SEQ ID NO: 32980 - DNA, 15 bp, Homo sapiens
tgggggccataaggg

SEQ ID NO: 32981 - DNA, 15 bp, Homo sapiens
gggggccataaggga

SEQ ID NO: 32982 - DNA, 15 bp, Homo sapiens
ggggccataagggag

SEQ ID NO: 32983 - DNA, 15 bp, Homo sapiens
gggccataagggaga

SEQ ID NO: 32984 - DNA, 15 bp, Homo sapiens
ggccataagggagaa

SEQ ID NO: 32985 - DNA, 15 bp, Homo sapiens
gccataagggagaag

SEQ ID NO: 32986 - DNA, 15 bp, Homo sapiens
ccataagggagaagc

SEQ ID NO: 32987 - DNA, 15 bp, Homo sapiens
cataagggagaagct

SEQ ID NO: 32988 - DNA, 15 bp, Homo sapiens
ataagggagaagctg

SEQ ID NO: 32989 - DNA, 15 bp, Homo sapiens
taagggagaagctgc

SEQ ID NO: 32990 - DNA, 15 bp, Homo sapiens
aagggagaagctgct

SEQ ID NO: 32991 - DNA, 15 bp, Homo sapiens
agggagaagctgctc

SEQ ID NO: 32992 - DNA, 15 bp, Homo sapiens
gggagaagctgctcc

SEQ ID NO: 32993 - DNA, 15 bp, Homo sapiens
ggagaagctgctcca

SEQ ID NO: 32994 - DNA, 15 bp, Homo sapiens
gagaagctgctccag

SEQ ID NO: 32995 - DNA, 15 bp, Homo sapiens
agaagctgctccagg

SEQ ID NO: 32996 - DNA, 15 bp, Homo sapiens
gaagctgctccaggc

SEQ ID NO: 32997 - DNA, 15 bp, Homo sapiens
aagctgctccaggcc

SEQ ID NO: 32998 - DNA, 15 bp, Homo sapiens
agctgctccaggcct

SEQ ID NO: 32999 - DNA, 15 bp, Homo sapiens
gctgctccaggcctc

SEQ ID NO: 33000 - DNA, 15 bp, Homo sapiens
ctgctccaggcctct

SEQ ID NO: 33001 - DNA, 15 bp, Homo sapiens
tgctccaggcctctc

SEQ ID NO: 33002 - DNA, 15 bp, Homo sapiens
gctccaggcctctcc

SEQ ID NO: 33003 - DNA, 15 bp, Homo sapiens
ctccaggcctctccc

SEQ ID NO: 33004 - DNA, 15 bp, Homo sapiens
tccaggcctctcccc

SEQ ID NO: 33005 - DNA, 15 bp, Homo sapiens
ccaggcctctccccc

SEQ ID NO: 33006 - DNA, 15 bp, Homo sapiens
caggcctctccccca

SEQ ID NO: 33007 - DNA, 15 bp, Homo sapiens
aggcctctcccccag

SEQ ID NO: 33008 - DNA, 15 bp, Homo sapiens
ggcctctcccccagc

SEQ ID NO: 33009 - DNA, 15 bp, Homo sapiens
gcctctcccccagct

SEQ ID NO: 33010 - DNA, 15 bp, Homo sapiens
cctctcccccagctt

SEQ ID NO: 33011 - DNA, 15 bp, Homo sapiens
ctctcccccagcttc

SEQ ID NO: 33012 - DNA, 15 bp, Homo sapiens
tctcccccagcttct

SEQ ID NO: 33013 - DNA, 15 bp, Homo sapiens
ctcccccagcttctg

SEQ ID NO: 33014 - DNA, 15 bp, Homo sapiens
tcccccagcttctgg

SEQ ID NO: 33015 - DNA, 15 bp, Homo sapiens
cccccagcttctggt

SEQ ID NO: 33016 - DNA, 15 bp, Homo sapiens
ccccagcttctggtg

SEQ ID NO: 33017 - DNA, 15 bp, Homo sapiens
cccagcttctggtgg

SEQ ID NO: 33018 - DNA, 15 bp, Homo sapiens
ccagcttctggtggt

SEQ ID NO: 33019 - DNA, 15 bp, Homo sapiens
cagcttctggtggtt

SEQ ID NO: 33020 - DNA, 15 bp, Homo sapiens
agcttctggtggttg

SEQ ID NO: 33021 - DNA, 15 bp, Homo sapiens
gcttctggtggttgc

SEQ ID NO: 33022 - DNA, 15 bp, Homo sapiens
cttctggtggttgct

SEQ ID NO: 33023 - DNA, 15 bp, Homo sapiens
ttctggtggttgctg

SEQ ID NO: 33024 - DNA, 15 bp, Homo sapiens
tctggtggttgctgg

SEQ ID NO: 33025 - DNA, 15 bp, Homo sapiens
ctggtggttgctggc

SEQ ID NO: 33026 - DNA, 15 bp, Homo sapiens
tggtggttgctggca

SEQ ID NO: 33027 - DNA, 15 bp, Homo sapiens
ggtggttgctggcaa

SEQ ID NO: 33028 - DNA, 15 bp, Homo sapiens
gtggttgctggcaat

SEQ ID NO: 33029 - DNA, 15 bp, Homo sapiens
tggttgctggcaatc

SEQ ID NO: 33030 - DNA, 15 bp, Homo sapiens
ggttgctggcaatct

SEQ ID NO: 33031 - DNA, 15 bp, Homo sapiens
gttgctggcaatctt

SEQ ID NO: 33032 - DNA, 15 bp, Homo sapiens
ttgctggcaatcttt

SEQ ID NO: 33033 - DNA, 15 bp, Homo sapiens
tgctggcaatctttg

SEQ ID NO: 33034 - DNA, 15 bp, Homo sapiens
gctggcaatctttgt

SEQ ID NO: 33035 - DNA, 15 bp, Homo sapiens
ctggcaatctttgtt

SEQ ID NO: 33036 - DNA, 15 bp, Homo sapiens
tggcaatctttgtta

SEQ ID NO: 33037 - DNA, 15 bp, Homo sapiens
ggcaatctttgttat

SEQ ID NO: 33038 - DNA, 15 bp, Homo sapiens
gcaatctttgttatt

SEQ ID NO: 33039 - DNA, 15 bp, Homo sapiens
caatctttgttattt

SEQ ID NO: 33040 - DNA, 15 bp, Homo sapiens
aatctttgttatttc

SEQ ID NO: 33041 - DNA, 15 bp, Homo sapiens
atctttgttatttct

SEQ ID NO: 33042 - DNA, 15 bp, Homo sapiens
tctttgttatttctt

SEQ ID NO: 33043 - DNA, 15 bp, Homo sapiens
ctttgttatttcttg

SEQ ID NO: 33044 - DNA, 15 bp, Homo sapiens
tttgttatttcttgg

SEQ ID NO: 33045 - DNA, 15 bp, Homo sapiens
ttgttatttcttggc

SEQ ID NO: 33046 - DNA, 15 bp, Homo sapiens
tgttatttcttggct

SEQ ID NO: 33047 - DNA, 15 bp, Homo sapiens
gttatttcttggctt

SEQ ID NO: 33048 - DNA, 15 bp, Homo sapiens
ttatttcttggcttg

SEQ ID NO: 33049 - DNA, 15 bp, Homo sapiens
tatttcttggcttga

SEQ ID NO: 33050 - DNA, 15 bp, Homo sapiens
atttcttggcttgaa

SEQ ID NO: 33051 - DNA, 15 bp, Homo sapiens
tttcttggcttgaag

SEQ ID NO: 33052 - DNA, 15 bp, Homo sapiens
ttcttggcttgaagg

SEQ ID NO: 33053 - DNA, 15 bp, Homo sapiens
tcttggcttgaagga

SEQ ID NO: 33054 - DNA, 15 bp, Homo sapiens
cttggcttgaaggag

SEQ ID NO: 33055 - DNA, 15 bp, Homo sapiens
ttggcttgaaggagc

SEQ ID NO: 33056 - DNA, 15 bp, Homo sapiens
tggcttgaaggagca

SEQ ID NO: 33057 - DNA, 15 bp, Homo sapiens
ggcttgaaggagcat

SEQ ID NO: 33058 - DNA, 15 bp, Homo sapiens
gcttgaaggagcatc

SEQ ID NO: 33059 - DNA, 15 bp, Homo sapiens
cttgaaggagcatca

SEQ ID NO: 33060 - DNA, 15 bp, Homo sapiens
ttgaaggagcatcac

SEQ ID NO: 33061 - DNA, 15 bp, Homo sapiens
tgaaggagcatcacc

SEQ ID NO: 33062 - DNA, 15 bp, Homo sapiens
gaaggagcatcaccc

SEQ ID NO: 33063 - DNA, 15 bp, Homo sapiens
aaggagcatcacccc

SEQ ID NO: 33064 - DNA, 15 bp, Homo sapiens
aggagcatcacccca

SEQ ID NO: 33065 - DNA, 15 bp, Homo sapiens
ggagcatcaccccat

SEQ ID NO: 33066 - DNA, 15 bp, Homo sapiens
gagcatcaccccatc

SEQ ID NO: 33067 - DNA, 15 bp, Homo sapiens
agcatcaccccatct

SEQ ID NO: 33068 - DNA, 15 bp, Homo sapiens
gcatcaccccatctc

SEQ ID NO: 33069 - DNA, 15 bp, Homo sapiens
catcaccccatctct

SEQ ID NO: 33070 - DNA, 15 bp, Homo sapiens
atcaccccatctctg

SEQ ID NO: 33071 - DNA, 15 bp, Homo sapiens
tcaccccatctctgg

SEQ ID NO: 33072 - DNA, 15 bp, Homo sapiens
caccccatctctggc

SEQ ID NO: 33073 - DNA, 15 bp, Homo sapiens
accccatctctggct

SEQ ID NO: 33074 - DNA, 15 bp, Homo sapiens
ccccatctctggctt

SEQ ID NO: 33075 - DNA, 15 bp, Homo sapiens
cccatctctggcttc

SEQ ID NO: 33076 - DNA, 15 bp, Homo sapiens
ccatctctggcttca

SEQ ID NO: 33077 - DNA, 15 bp, Homo sapiens
catctctggcttcat

SEQ ID NO: 33078 - DNA, 15 bp, Homo sapiens
atctctggcttcatt

SEQ ID NO: 33079 - DNA, 15 bp, Homo sapiens
tctctggcttcattc

SEQ ID NO: 33080 - DNA, 15 bp, Homo sapiens
ctctggcttcattca

SEQ ID NO: 33081 - DNA, 15 bp, Homo sapiens
tctggcttcattcat

SEQ ID NO: 33082 - DNA, 15 bp, Homo sapiens
ctggcttcattcatt

SEQ ID NO: 33083 - DNA, 15 bp, Homo sapiens
tggcttcattcattc

SEQ ID NO: 33084 - DNA, 15 bp, Homo sapiens
ggcttcattcattca

SEQ ID NO: 33085 - DNA, 15 bp, Homo sapiens
gcttcattcattcac

SEQ ID NO: 33086 - DNA, 15 bp, Homo sapiens
cttcattcattcact

SEQ ID NO: 33087 - DNA, 15 bp, Homo sapiens
ttcattcattcactc

SEQ ID NO: 33088 - DNA, 15 bp, Homo sapiens
tcattcattcactca

SEQ ID NO: 33089 - DNA, 15 bp, Homo sapiens
cattcattcactcac

SEQ ID NO: 33090 - DNA, 15 bp, Homo sapiens
attcattcactcacc

SEQ ID NO: 33091 - DNA, 15 bp, Homo sapiens
ttcattcactcacct

SEQ ID NO: 33092 - DNA, 15 bp, Homo sapiens
tcattcactcacctt

SEQ ID NO: 33093 - DNA, 15 bp, Homo sapiens
cattcactcaccttc

SEQ ID NO: 33094 - DNA, 15 bp, Homo sapiens
attcactcaccttct

SEQ ID NO: 33095 - DNA, 15 bp, Homo sapiens
ttcactcaccttctc

SEQ ID NO: 33096 - DNA, 15 bp, Homo sapiens
tcactcaccttctca

SEQ ID NO: 33097 - DNA, 15 bp, Homo sapiens
cactcaccttctcat

SEQ ID NO: 33098 - DNA, 15 bp, Homo sapiens
actcaccttctcatc

SEQ ID NO: 33099 - DNA, 15 bp, Homo sapiens
ctcaccttctcatct

SEQ ID NO: 33100 - DNA, 15 bp, Homo sapiens
tcaccttctcatctc

SEQ ID NO: 33101 - DNA, 15 bp, Homo sapiens
caccttctcatctca

SEQ ID NO: 33102 - DNA, 15 bp, Homo sapiens
accttctcatctcac

SEQ ID NO: 33103 - DNA, 15 bp, Homo sapiens
ccttctcatctcacc

SEQ ID NO: 33104 - DNA, 15 bp, Homo sapiens
cttctcatctcacca

SEQ ID NO: 33105 - DNA, 15 bp, Homo sapiens
ttctcatctcaccag

SEQ ID NO: 33106 - DNA, 15 bp, Homo sapiens
tctcatctcaccagt

SEQ ID NO: 33107 - DNA, 15 bp, Homo sapiens
ctcatctcaccagtg

SEQ ID NO: 33108 - DNA, 15 bp, Homo sapiens
tcatctcaccagtgc

SEQ ID NO: 33109 - DNA, 15 bp, Homo sapiens
catctcaccagtgct

SEQ ID NO: 33110 - DNA, 15 bp, Homo sapiens
atctcaccagtgctc

SEQ ID NO: 33111 - DNA, 15 bp, Homo sapiens
tctcaccagtgctct

SEQ ID NO: 33112 - DNA, 15 bp, Homo sapiens
ctcaccagtgctctc

SEQ ID NO: 33113 - DNA, 15 bp, Homo sapiens
tcaccagtgctctcc

SEQ ID NO: 33114 - DNA, 15 bp, Homo sapiens
caccagtgctctccc

SEQ ID NO: 33115 - DNA, 15 bp, Homo sapiens
accagtgctctccca

SEQ ID NO: 33116 - DNA, 15 bp, Homo sapiens
ccagtgctctcccag

SEQ ID NO: 33117 - DNA, 15 bp, Homo sapiens
cagtgctctcccagg

SEQ ID NO: 33118 - DNA, 15 bp, Homo sapiens
agtgctctcccaggc

SEQ ID NO: 33119 - DNA, 15 bp, Homo sapiens
gtgctctcccaggcc

SEQ ID NO: 33120 - DNA, 15 bp, Homo sapiens
tgctctcccaggccc

SEQ ID NO: 33121 - DNA, 15 bp, Homo sapiens
gctctcccaggccct

SEQ ID NO: 33122 - DNA, 15 bp, Homo sapiens
ctctcccaggccctt

SEQ ID NO: 33123 - DNA, 15 bp, Homo sapiens
tctcccaggcccttg

SEQ ID NO: 33124 - DNA, 15 bp, Homo sapiens
ctcccaggcccttgt

SEQ ID NO: 33125 - DNA, 15 bp, Homo sapiens
tcccaggcccttgtt

SEQ ID NO: 33126 - DNA, 15 bp, Homo sapiens
cccaggcccttgttc

SEQ ID NO: 33127 - DNA, 15 bp, Homo sapiens
ccaggcccttgttcg

SEQ ID NO: 33128 - DNA, 15 bp, Homo sapiens
caggcccttgttcgg

SEQ ID NO: 33129 - DNA, 15 bp, Homo sapiens
aggcccttgttcgga

SEQ ID NO: 33130 - DNA, 15 bp, Homo sapiens
ggcccttgttcggag

SEQ ID NO: 33131 - DNA, 15 bp, Homo sapiens
gcccttgttcggagc

SEQ ID NO: 33132 - DNA, 15 bp, Homo sapiens
cccttgttcggagcc

SEQ ID NO: 33133 - DNA, 15 bp, Homo sapiens
ccttgttcggagcct

SEQ ID NO: 33134 - DNA, 15 bp, Homo sapiens
cttgttcggagcctc

SEQ ID NO: 33135 - DNA, 15 bp, Homo sapiens
ttgttcggagcctcc

SEQ ID NO: 33136 - DNA, 15 bp, Homo sapiens
tgttcggagcctcca

SEQ ID NO: 33137 - DNA, 15 bp, Homo sapiens
gttcggagcctccac

SEQ ID NO: 33138 - DNA, 15 bp, Homo sapiens
ttcggagcctccaca

SEQ ID NO: 33139 - DNA, 15 bp, Homo sapiens
tcggagcctccacag

SEQ ID NO: 33140 - DNA, 15 bp, Homo sapiens
cggagcctccacaga

SEQ ID NO: 33141 - DNA, 15 bp, Homo sapiens
ggagcctccacagac

SEQ ID NO: 33142 - DNA, 15 bp, Homo sapiens
gagcctccacagacc

SEQ ID NO: 33143 - DNA, 15 bp, Homo sapiens
agcctccacagaccc

SEQ ID NO: 33144 - DNA, 15 bp, Homo sapiens
gcctccacagaccca

SEQ ID NO: 33145 - DNA, 15 bp, Homo sapiens
cctccacagacccac

SEQ ID NO: 33146 - DNA, 15 bp, Homo sapiens
ctccacagacccaca

SEQ ID NO: 33147 - DNA, 15 bp, Homo sapiens
tccacagacccacac

SEQ ID NO: 33148 - DNA, 15 bp, Homo sapiens
ccacagacccacact

SEQ ID NO: 33149 - DNA, 15 bp, Homo sapiens
cacagacccacactc

SEQ ID NO: 33150 - DNA, 15 bp, Homo sapiens
acagacccacactcc

SEQ ID NO: 33151 - DNA, 15 bp, Homo sapiens
cagacccacactcct

SEQ ID NO: 33152 - DNA, 15 bp, Homo sapiens
agacccacactcctg

SEQ ID NO: 33153 - DNA, 15 bp, Homo sapiens
gacccacactcctgt

SEQ ID NO: 33154 - DNA, 15 bp, Homo sapiens
acccacactcctgtt

SEQ ID NO: 33155 - DNA, 15 bp, Homo sapiens
cccacactcctgttt

SEQ ID NO: 33156 - DNA, 15 bp, Homo sapiens
ccacactcctgtttc

SEQ ID NO: 33157 - DNA, 15 bp, Homo sapiens
cacactcctgtttct

SEQ ID NO: 33158 - DNA, 15 bp, Homo sapiens
acactcctgtttctc

SEQ ID NO: 33159 - DNA, 15 bp, Homo sapiens
cactcctgtttctca

SEQ ID NO: 33160 - DNA, 15 bp, Homo sapiens
actcctgtttctcac

SEQ ID NO: 33161 - DNA, 15 bp, Homo sapiens
ctcctgtttctcacg

SEQ ID NO: 33162 - DNA, 15 bp, Homo sapiens
tcctgtttctcacgc

SEQ ID NO: 33163 - DNA, 15 bp, Homo sapiens
cctgtttctcacgca

SEQ ID NO: 33164 - DNA, 15 bp, Homo sapiens
ctgtttctcacgcag

SEQ ID NO: 33165 - DNA, 15 bp, Homo sapiens
tgtttctcacgcagt

SEQ ID NO: 33166 - DNA, 15 bp, Homo sapiens
gtttctcacgcagta

SEQ ID NO: 33167 - DNA, 15 bp, Homo sapiens
tttctcacgcagtaa

SEQ ID NO: 33168 - DNA, 15 bp, Homo sapiens
ttctcacgcagtaat

SEQ ID NO: 33169 - DNA, 15 bp, Homo sapiens
tctcacgcagtaatg

SEQ ID NO: 33170 - DNA, 15 bp, Homo sapiens
ctcacgcagtaatgt

SEQ ID NO: 33171 - DNA, 15 bp, Homo sapiens
tcacgcagtaatgtt

SEQ ID NO: 33172 - DNA, 15 bp, Homo sapiens
cacgcagtaatgttc

SEQ ID NO: 33173 - DNA, 15 bp, Homo sapiens
acgcagtaatgttct

SEQ ID NO: 33174 - DNA, 15 bp, Homo sapiens
cgcagtaatgttcta

SEQ ID NO: 33175 - DNA, 15 bp, Homo sapiens
gcagtaatgttctaa

SEQ ID NO: 33176 - DNA, 15 bp, Homo sapiens
cagtaatgttctaag

SEQ ID NO: 33177 - DNA, 15 bp, Homo sapiens
agtaatgttctaagc

SEQ ID NO: 33178 - DNA, 15 bp, Homo sapiens
gtaatgttctaagcc

SEQ ID NO: 33179 - DNA, 15 bp, Homo sapiens
taatgttctaagccc

SEQ ID NO: 33180 - DNA, 15 bp, Homo sapiens
aatgttctaagcccc

SEQ ID NO: 33181 - DNA, 15 bp, Homo sapiens
atgttctaagccccc

SEQ ID NO: 33182 - DNA, 15 bp, Homo sapiens
tgttctaagccccca

SEQ ID NO: 33183 - DNA, 15 bp, Homo sapiens
gttctaagcccccag

SEQ ID NO: 33184 - DNA, 15 bp, Homo sapiens
ttctaagcccccagg

SEQ ID NO: 33185 - DNA, 15 bp, Homo sapiens
tctaagcccccagga

SEQ ID NO: 33186 - DNA, 15 bp, Homo sapiens
ctaagcccccaggag

SEQ ID NO: 33187 - DNA, 15 bp, Homo sapiens
taagcccccaggaga

SEQ ID NO: 33188 - DNA, 15 bp, Homo sapiens
aagcccccaggagac

SEQ ID NO: 33189 - DNA, 15 bp, Homo sapiens
agcccccaggagact

SEQ ID NO: 33190 - DNA, 15 bp, Homo sapiens
gcccccaggagacta

SEQ ID NO: 33191 - DNA, 15 bp, Homo sapiens
cccccaggagactaa

SEQ ID NO: 33192 - DNA, 15 bp, Homo sapiens
ccccaggagactaag

SEQ ID NO: 33193 - DNA, 15 bp, Homo sapiens
cccaggagactaaga

SEQ ID NO: 33194 - DNA, 15 bp, Homo sapiens
ccaggagactaagaa

SEQ ID NO: 33195 - DNA, 15 bp, Homo sapiens
caggagactaagaac

SEQ ID NO: 33196 - DNA, 15 bp, Homo sapiens
aggagactaagaact

SEQ ID NO: 33197 - DNA, 15 bp, Homo sapiens
ggagactaagaactt

SEQ ID NO: 33198 - DNA, 15 bp, Homo sapiens
gagactaagaactta

SEQ ID NO: 33199 - DNA, 15 bp, Homo sapiens
agactaagaacttaa

SEQ ID NO: 33200 - DNA, 15 bp, Homo sapiens
gactaagaacttaat

SEQ ID NO: 33201 - DNA, 15 bp, Homo sapiens
actaagaacttaata

SEQ ID NO: 33202 - DNA, 15 bp, Homo sapiens
ctaagaacttaatac

SEQ ID NO: 33203 - DNA, 15 bp, Homo sapiens
taagaacttaatacc

SEQ ID NO: 33204 - DNA, 15 bp, Homo sapiens
aagaacttaatacct

SEQ ID NO: 33205 - DNA, 15 bp, Homo sapiens
agaacttaatacctg

SEQ ID NO: 33206 - DNA, 15 bp, Homo sapiens
gaacttaatacctgg

SEQ ID NO: 33207 - DNA, 15 bp, Homo sapiens
aacttaatacctgga

SEQ ID NO: 33208 - DNA, 15 bp, Homo sapiens
acttaatacctggat

SEQ ID NO: 33209 - DNA, 15 bp, Homo sapiens
cttaatacctggatt

SEQ ID NO: 33210 - DNA, 15 bp, Homo sapiens
ttaatacctggattc

SEQ ID NO: 33211 - DNA, 15 bp, Homo sapiens
taatacctggattct

SEQ ID NO: 33212 - DNA, 15 bp, Homo sapiens
aatacctggattctc

SEQ ID NO: 33213 - DNA, 15 bp, Homo sapiens
atacctggattctca

SEQ ID NO: 33214 - DNA, 15 bp, Homo sapiens
tacctggattctcac

SEQ ID NO: 33215 - DNA, 15 bp, Homo sapiens
acctggattctcaca

SEQ ID NO: 33216 - DNA, 15 bp, Homo sapiens
cctggattctcacac

SEQ ID NO: 33217 - DNA, 15 bp, Homo sapiens
ctggattctcacact

SEQ ID NO: 33218 - DNA, 15 bp, Homo sapiens
tggattctcacactc

SEQ ID NO: 33219 - DNA, 15 bp, Homo sapiens
ggattctcacactca

SEQ ID NO: 33220 - DNA, 15 bp, Homo sapiens
gattctcacactcat

SEQ ID NO: 33221 - DNA, 15 bp, Homo sapiens
attctcacactcatc

SEQ ID NO: 33222 - DNA, 15 bp, Homo sapiens
ttctcacactcatct

SEQ ID NO: 33223 - DNA, 15 bp, Homo sapiens
tctcacactcatctc

SEQ ID NO: 33224 - DNA, 15 bp, Homo sapiens
ctcacactcatctcc

SEQ ID NO: 33225 - DNA, 15 bp, Homo sapiens
tcacactcatctccc

SEQ ID NO: 33226 - DNA, 15 bp, Homo sapiens
cacactcatctccct

SEQ ID NO: 33227 - DNA, 15 bp, Homo sapiens
acactcatctccctc

SEQ ID NO: 33228 - DNA, 15 bp, Homo sapiens
cactcatctccctca

SEQ ID NO: 33229 - DNA, 15 bp, Homo sapiens
actcatctccctcag

SEQ ID NO: 33230 - DNA, 15 bp, Homo sapiens
ctcatctccctcagc

SEQ ID NO: 33231 - DNA, 15 bp, Homo sapiens
tcatctccctcagca

SEQ ID NO: 33232 - DNA, 15 bp, Homo sapiens
catctccctcagcac

SEQ ID NO: 33233 - DNA, 15 bp, Homo sapiens
atctccctcagcacc

SEQ ID NO: 33234 - DNA, 15 bp, Homo sapiens
tctccctcagcacca

SEQ ID NO: 33235 - DNA, 15 bp, Homo sapiens
ctccctcagcaccac

SEQ ID NO: 33236 - DNA, 15 bp, Homo sapiens
tccctcagcaccaca

SEQ ID NO: 33237 - DNA, 15 bp, Homo sapiens
ccctcagcaccacag

SEQ ID NO: 33238 - DNA, 15 bp, Homo sapiens
cctcagcaccacagc

SEQ ID NO: 33239 - DNA, 15 bp, Homo sapiens
ctcagcaccacagct

SEQ ID NO: 33240 - DNA, 15 bp, Homo sapiens
tcagcaccacagctc

SEQ ID NO: 33241 - DNA, 15 bp, Homo sapiens
cagcaccacagctct

SEQ ID NO: 33242 - DNA, 15 bp, Homo sapiens
agcaccacagctctg

SEQ ID NO: 33243 - DNA, 15 bp, Homo sapiens
gcaccacagctctga

SEQ ID NO: 33244 - DNA, 15 bp, Homo sapiens
caccacagctctgac

SEQ ID NO: 33245 - DNA, 15 bp, Homo sapiens
accacagctctgaca

SEQ ID NO: 33246 - DNA, 15 bp, Homo sapiens
ccacagctctgacaa

SEQ ID NO: 33247 - DNA, 15 bp, Homo sapiens
cacagctctgacaac

SEQ ID NO: 33248 - DNA, 15 bp, Homo sapiens
acagctctgacaacc

SEQ ID NO: 33249 - DNA, 15 bp, Homo sapiens
cagctctgacaacca

SEQ ID NO: 33250 - DNA, 15 bp, Homo sapiens
agctctgacaaccac

SEQ ID NO: 33251 - DNA, 15 bp, Homo sapiens
gctctgacaaccacc

SEQ ID NO: 33252 - DNA, 15 bp, Homo sapiens
ctctgacaaccaccc

SEQ ID NO: 33253 - DNA, 15 bp, Homo sapiens
tctgacaaccacccc

SEQ ID NO: 33254 - DNA, 15 bp, Homo sapiens
ctgacaaccaccccc

SEQ ID NO: 33255 - DNA, 15 bp, Homo sapiens
tgacaaccaccccca

SEQ ID NO: 33256 - DNA, 15 bp, Homo sapiens
gacaaccacccccag

SEQ ID NO: 33257 - DNA, 15 bp, Homo sapiens
acaaccacccccagg

SEQ ID NO: 33258 - DNA, 15 bp, Homo sapiens
caaccacccccagga

SEQ ID NO: 33259 - DNA, 15 bp, Homo sapiens
aaccacccccaggag

SEQ ID NO: 33260 - DNA, 15 bp, Homo sapiens
accacccccaggagg

SEQ ID NO: 33261 - DNA, 15 bp, Homo sapiens
ccacccccaggaggt

SEQ ID NO: 33262 - DNA, 15 bp, Homo sapiens
cacccccaggaggtg

SEQ ID NO: 33263 - DNA, 15 bp, Homo sapiens
acccccaggaggtga

SEQ ID NO: 33264 - DNA, 15 bp, Homo sapiens
cccccaggaggtgac

SEQ ID NO: 33265 - DNA, 15 bp, Homo sapiens
ccccaggaggtgaca

SEQ ID NO: 33266 - DNA, 15 bp, Homo sapiens
cccaggaggtgacag

SEQ ID NO: 33267 - DNA, 15 bp, Homo sapiens
ccaggaggtgacagc

SEQ ID NO: 33268 - DNA, 15 bp, Homo sapiens
caggaggtgacagca

SEQ ID NO: 33269 - DNA, 15 bp, Homo sapiens
aggaggtgacagcaa

SEQ ID NO: 33270 - DNA, 15 bp, Homo sapiens
ggaggtgacagcaaa

SEQ ID NO: 33271 - DNA, 15 bp, Homo sapiens
gaggtgacagcaaag

SEQ ID NO: 33272 - DNA, 15 bp, Homo sapiens
aggtgacagcaaaga

SEQ ID NO: 33273 - DNA, 15 bp, Homo sapiens
ggtgacagcaaagaa

SEQ ID NO: 33274 - DNA, 15 bp, Homo sapiens
gtgacagcaaagaaa

SEQ ID NO: 33275 - DNA, 15 bp, Homo sapiens
tgacagcaaagaaag

SEQ ID NO: 33276 - DNA, 15 bp, Homo sapiens
gacagcaaagaaagg

SEQ ID NO: 33277 - DNA, 15 bp, Homo sapiens
acagcaaagaaagga

SEQ ID NO: 33278 - DNA, 15 bp, Homo sapiens
cagcaaagaaaggaa

SEQ ID NO: 33279 - DNA, 15 bp, Homo sapiens
agcaaagaaaggaag

SEQ ID NO: 33280 - DNA, 15 bp, Homo sapiens
gcaaagaaaggaagg

SEQ ID NO: 33281 - DNA, 15 bp, Homo sapiens
caaagaaaggaagga

SEQ ID NO: 33282 - DNA, 15 bp, Homo sapiens
aaagaaaggaaggag

SEQ ID NO: 33283 - DNA, 15 bp, Homo sapiens
aagaaaggaaggagc

SEQ ID NO: 33284 - DNA, 15 bp, Homo sapiens
agaaaggaaggagca

SEQ ID NO: 33285 - DNA, 15 bp, Homo sapiens
gaaaggaaggagcaa

SEQ ID NO: 33286 - DNA, 15 bp, Homo sapiens
aaaggaaggagcaac

SEQ ID NO: 33287 - DNA, 15 bp, Homo sapiens
aaggaaggagcaact

SEQ ID NO: 33288 - DNA, 15 bp, Homo sapiens
aggaaggagcaactg

SEQ ID NO: 33289 - DNA, 15 bp, Homo sapiens
ggaaggagcaactgc

SEQ ID NO: 33290 - DNA, 15 bp, Homo sapiens
gaaggagcaactgct

SEQ ID NO: 33291 - DNA, 15 bp, Homo sapiens
aaggagcaactgctc

SEQ ID NO: 33292 - DNA, 15 bp, Homo sapiens
aggagcaactgctcc

SEQ ID NO: 33293 - DNA, 15 bp, Homo sapiens
ggagcaactgctccc

SEQ ID NO: 33294 - DNA, 15 bp, Homo sapiens
gagcaactgctcccc

SEQ ID NO: 33295 - DNA, 15 bp, Homo sapiens
agcaactgctccccc

SEQ ID NO: 33296 - DNA, 15 bp, Homo sapiens
gcaactgctccccca

SEQ ID NO: 33297 - DNA, 15 bp, Homo sapiens
caactgctcccccag

SEQ ID NO: 33298 - DNA, 15 bp, Homo sapiens
aactgctcccccaga

SEQ ID NO: 33299 - DNA, 15 bp, Homo sapiens
actgctcccccagaa

SEQ ID NO: 33300 - DNA, 15 bp, Homo sapiens
ctgctcccccagaac

SEQ ID NO: 33301 - DNA, 15 bp, Homo sapiens
tgctcccccagaacc

SEQ ID NO: 33302 - DNA, 15 bp, Homo sapiens
gctcccccagaaccc

SEQ ID NO: 33303 - DNA, 15 bp, Homo sapiens
ctcccccagaaccct

SEQ ID NO: 33304 - DNA, 15 bp, Homo sapiens
tcccccagaaccctt

SEQ ID NO: 33305 - DNA, 15 bp, Homo sapiens
cccccagaacccttc

SEQ ID NO: 33306 - DNA, 15 bp, Homo sapiens
ccccagaacccttct

SEQ ID NO: 33307 - DNA, 15 bp, Homo sapiens
cccagaacccttcta

SEQ ID NO: 33308 - DNA, 15 bp, Homo sapiens
ccagaacccttctat

SEQ ID NO: 33309 - DNA, 15 bp, Homo sapiens
cagaacccttctata

SEQ ID NO: 33310 - DNA, 15 bp, Homo sapiens
agaacccttctatac

SEQ ID NO: 33311 - DNA, 15 bp, Homo sapiens
gaacccttctatact

SEQ ID NO: 33312 - DNA, 15 bp, Homo sapiens
aacccttctatactc

SEQ ID NO: 33313 - DNA, 15 bp, Homo sapiens
acccttctatactcc

SEQ ID NO: 33314 - DNA, 15 bp, Homo sapiens
cccttctatactccc

SEQ ID NO: 33315 - DNA, 15 bp, Homo sapiens
ccttctatactcccc

SEQ ID NO: 33316 - DNA, 15 bp, Homo sapiens
cttctatactccccc

SEQ ID NO: 33317 - DNA, 15 bp, Homo sapiens
ttctatactcccccg

SEQ ID NO: 33318 - DNA, 15 bp, Homo sapiens
tctatactcccccgg

SEQ ID NO: 33319 - DNA, 15 bp, Homo sapiens
ctatactcccccggg

SEQ ID NO: 33320 - DNA, 15 bp, Homo sapiens
tatactcccccgggc

SEQ ID NO: 33321 - DNA, 15 bp, Homo sapiens
atactcccccgggct

SEQ ID NO: 33322 - DNA, 15 bp, Homo sapiens
tactcccccgggctg

SEQ ID NO: 33323 - DNA, 15 bp, Homo sapiens
actcccccgggctgc

SEQ ID NO: 33324 - DNA, 15 bp, Homo sapiens
ctcccccgggctgct

SEQ ID NO: 33325 - DNA, 15 bp, Homo sapiens
tcccccgggctgctc

SEQ ID NO: 33326 - DNA, 15 bp, Homo sapiens
cccccgggctgctct

SEQ ID NO: 33327 - DNA, 15 bp, Homo sapiens
ccccgggctgctctc

SEQ ID NO: 33328 - DNA, 15 bp, Homo sapiens
cccgggctgctctca

SEQ ID NO: 33329 - DNA, 15 bp, Homo sapiens
ccgggctgctctcag

SEQ ID NO: 33330 - DNA, 15 bp, Homo sapiens
cgggctgctctcagc

SEQ ID NO: 33331 - DNA, 15 bp, Homo sapiens
gggctgctctcagca

SEQ ID NO: 33332 - DNA, 15 bp, Homo sapiens
ggctgctctcagcag

SEQ ID NO: 33333 - DNA, 15 bp, Homo sapiens
gctgctctcagcagc

SEQ ID NO: 33334 - DNA, 15 bp, Homo sapiens
ctgctctcagcagct

SEQ ID NO: 33335 - DNA, 15 bp, Homo sapiens
tgctctcagcagctg

SEQ ID NO: 33336 - DNA, 15 bp, Homo sapiens
gctctcagcagctgt

SEQ ID NO: 33337 - DNA, 15 bp, Homo sapiens
ctctcagcagctgtg

SEQ ID NO: 33338 - DNA, 15 bp, Homo sapiens
tctcagcagctgtgt

SEQ ID NO: 33339 - DNA, 15 bp, Homo sapiens
ctcagcagctgtgtg

SEQ ID NO: 33340 - DNA, 15 bp, Homo sapiens
tcagcagctgtgtgc

SEQ ID NO: 33341 - DNA, 15 bp, Homo sapiens
cagcagctgtgtgcc

SEQ ID NO: 33342 - DNA, 15 bp, Homo sapiens
agcagctgtgtgccc

SEQ ID NO: 33343 - DNA, 15 bp, Homo sapiens
gcagctgtgtgccca

SEQ ID NO: 33344 - DNA, 15 bp, Homo sapiens
cagctgtgtgcccaa

SEQ ID NO: 33345 - DNA, 15 bp, Homo sapiens
agctgtgtgcccaac

SEQ ID NO: 33346 - DNA, 15 bp, Homo sapiens
gctgtgtgcccaact

SEQ ID NO: 33347 - DNA, 15 bp, Homo sapiens
ctgtgtgcccaactc

SEQ ID NO: 33348 - DNA, 15 bp, Homo sapiens
tgtgtgcccaactca

SEQ ID NO: 33349 - DNA, 15 bp, Homo sapiens
gtgtgcccaactcag

SEQ ID NO: 33350 - DNA, 15 bp, Homo sapiens
tgtgcccaactcagt

SEQ ID NO: 33351 - DNA, 15 bp, Homo sapiens
gtgcccaactcagtg

SEQ ID NO: 33352 - DNA, 15 bp, Homo sapiens
tgcccaactcagtgc

SEQ ID NO: 33353 - DNA, 15 bp, Homo sapiens
gcccaactcagtgct

SEQ ID NO: 33354 - DNA, 15 bp, Homo sapiens
cccaactcagtgctg

SEQ ID NO: 33355 - DNA, 15 bp, Homo sapiens
ccaactcagtgctgt

SEQ ID NO: 33356 - DNA, 15 bp, Homo sapiens
caactcagtgctgtg

SEQ ID NO: 33357 - DNA, 15 bp, Homo sapiens
aactcagtgctgtga

SEQ ID NO: 33358 - DNA, 15 bp, Homo sapiens
actcagtgctgtgag

SEQ ID NO: 33359 - DNA, 15 bp, Homo sapiens
ctcagtgctgtgagg

SEQ ID NO: 33360 - DNA, 15 bp, Homo sapiens
tcagtgctgtgaggt

SEQ ID NO: 33361 - DNA, 15 bp, Homo sapiens
cagtgctgtgaggtg

SEQ ID NO: 33362 - DNA, 15 bp, Homo sapiens
agtgctgtgaggtgg

SEQ ID NO: 33363 - DNA, 15 bp, Homo sapiens
gtgctgtgaggtgga

SEQ ID NO: 33364 - DNA, 15 bp, Homo sapiens
tgctgtgaggtggaa

SEQ ID NO: 33365 - DNA, 15 bp, Homo sapiens
gctgtgaggtggaac

SEQ ID NO: 33366 - DNA, 15 bp, Homo sapiens
ctgtgaggtggaacg

SEQ ID NO: 33367 - DNA, 15 bp, Homo sapiens
tgtgaggtggaacgg

SEQ ID NO: 33368 - DNA, 15 bp, Homo sapiens
gtgaggtggaacggg

SEQ ID NO: 33369 - DNA, 15 bp, Homo sapiens
tgaggtggaacgggg

SEQ ID NO: 33370 - DNA, 15 bp, Homo sapiens
gaggtggaacgggga

SEQ ID NO: 33371 - DNA, 15 bp, Homo sapiens
aggtggaacggggag

SEQ ID NO: 33372 - DNA, 15 bp, Homo sapiens
ggtggaacggggaga

SEQ ID NO: 33373 - DNA, 15 bp, Homo sapiens
gtggaacggggagat

SEQ ID NO: 33374 - DNA, 15 bp, Homo sapiens
tggaacggggagatg

SEQ ID NO: 33375 - DNA, 15 bp, Homo sapiens
ggaacggggagatgg

SEQ ID NO: 33376 - DNA, 15 bp, Homo sapiens
gaacggggagatgga

SEQ ID NO: 33377 - DNA, 15 bp, Homo sapiens
aacggggagatggag

SEQ ID NO: 33378 - DNA, 15 bp, Homo sapiens
acggggagatggaga

SEQ ID NO: 33379 - DNA, 15 bp, Homo sapiens
cggggagatggagac

SEQ ID NO: 33380 - DNA, 15 bp, Homo sapiens
ggggagatggagaca

SEQ ID NO: 33381 - DNA, 15 bp, Homo sapiens
gggagatggagacac

SEQ ID NO: 33382 - DNA, 15 bp, Homo sapiens
ggagatggagacaca

SEQ ID NO: 33383 - DNA, 15 bp, Homo sapiens
gagatggagacacac

SEQ ID NO: 33384 - DNA, 15 bp, Homo sapiens
agatggagacacaca

SEQ ID NO: 33385 - DNA, 15 bp, Homo sapiens
gatggagacacacac

SEQ ID NO: 33386 - DNA, 15 bp, Homo sapiens
atggagacacacaca

SEQ ID NO: 33387 - DNA, 15 bp, Homo sapiens
tggagacacacacac

SEQ ID NO: 33388 - DNA, 15 bp, Homo sapiens
ggagacacacacaca

SEQ ID NO: 33389 - DNA, 15 bp, Homo sapiens
gagacacacacacac

SEQ ID NO: 33390 - DNA, 15 bp, Homo sapiens
agacacacacacaca

SEQ ID NO: 33391 - DNA, 15 bp, Homo sapiens
gacacacacacacac

SEQ ID NO: 33392 - DNA, 15 bp, Homo sapiens
acacacacacacaca

SEQ ID NO: 33393 - DNA, 15 bp, Homo sapiens
cacacacacacacac

SEQ ID NO: 33394 - DNA, 15 bp, Homo sapiens
acacacacacacacc

SEQ ID NO: 33395 - DNA, 15 bp, Homo sapiens
cacacacacacacca

SEQ ID NO: 33396 - DNA, 15 bp, Homo sapiens
acacacacacaccag

SEQ ID NO: 33397 - DNA, 15 bp, Homo sapiens
cacacacacaccaga

SEQ ID NO: 33398 - DNA, 15 bp, Homo sapiens
acacacacaccagag

SEQ ID NO: 33399 - DNA, 15 bp, Homo sapiens
cacacacaccagaga

SEQ ID NO: 33400 - DNA, 15 bp, Homo sapiens
acacacaccagagag

SEQ ID NO: 33401 - DNA, 15 bp, Homo sapiens
cacacaccagagagt

SEQ ID NO: 33402 - DNA, 15 bp, Homo sapiens
acacaccagagagtt

SEQ ID NO: 33403 - DNA, 15 bp, Homo sapiens
cacaccagagagttt

SEQ ID NO: 33404 - DNA, 15 bp, Homo sapiens
acaccagagagttta

SEQ ID NO: 33405 - DNA, 15 bp, Homo sapiens
caccagagagtttat

SEQ ID NO: 33406 - DNA, 15 bp, Homo sapiens
accagagagtttata

SEQ ID NO: 33407 - DNA, 15 bp, Homo sapiens
ccagagagtttataa

SEQ ID NO: 33408 - DNA, 15 bp, Homo sapiens
cagagagtttataaa

SEQ ID NO: 33409 - DNA, 15 bp, Homo sapiens
agagagtttataaaa

SEQ ID NO: 33410 - DNA, 15 bp, Homo sapiens
gagagtttataaaat

SEQ ID NO: 33411 - DNA, 15 bp, Homo sapiens
agagtttataaaatg

SEQ ID NO: 33412 - DNA, 15 bp, Homo sapiens
gagtttataaaatgt

SEQ ID NO: 33413 - DNA, 15 bp, Homo sapiens
agtttataaaatgtg

SEQ ID NO: 33414 - DNA, 15 bp, Homo sapiens
gtttataaaatgtgc

SEQ ID NO: 33415 - DNA, 15 bp, Homo sapiens
tttataaaatgtgca

SEQ ID NO: 33416 - DNA, 15 bp, Homo sapiens
ttataaaatgtgcac

SEQ ID NO: 33417 - DNA, 15 bp, Homo sapiens
tataaaatgtgcaca

SEQ ID NO: 33418 - DNA, 15 bp, Homo sapiens
ataaaatgtgcacac

SEQ ID NO: 33419 - DNA, 15 bp, Homo sapiens
taaaatgtgcacacg

SEQ ID NO: 33420 - DNA, 15 bp, Homo sapiens
aaaatgtgcacacgg

SEQ ID NO: 33421 - DNA, 15 bp, Homo sapiens
aaatgtgcacacgga

SEQ ID NO: 33422 - DNA, 15 bp, Homo sapiens
aatgtgcacacggaa

SEQ ID NO: 33423 - DNA, 15 bp, Homo sapiens
atgtgcacacggaaa

SEQ ID NO: 33424 - DNA, 15 bp, Homo sapiens
tgtgcacacggaaac

SEQ ID NO: 33425 - DNA, 15 bp, Homo sapiens
gtgcacacggaaaca

SEQ ID NO: 33426 - DNA, 15 bp, Homo sapiens
tgcacacggaaacac

SEQ ID NO: 33427 - DNA, 15 bp, Homo sapiens
gcacacggaaacact

SEQ ID NO: 33428 - DNA, 15 bp, Homo sapiens
cacacggaaacactt

SEQ ID NO: 33429 - DNA, 15 bp, Homo sapiens
acacggaaacacttc

SEQ ID NO: 33430 - DNA, 15 bp, Homo sapiens
cacggaaacacttcc

SEQ ID NO: 33431 - DNA, 15 bp, Homo sapiens
acggaaacacttcct

SEQ ID NO: 33432 - DNA, 15 bp, Homo sapiens
cggaaacacttccta

SEQ ID NO: 33433 - DNA, 15 bp, Homo sapiens
ggaaacacttcctaa

SEQ ID NO: 33434 - DNA, 15 bp, Homo sapiens
gaaacacttcctaaa

SEQ ID NO: 33435 - DNA, 15 bp, Homo sapiens
aaacacttcctaaag

SEQ ID NO: 33436 - DNA, 15 bp, Homo sapiens
aacacttcctaaaga

SEQ ID NO: 33437 - DNA, 15 bp, Homo sapiens
acacttcctaaagaa

SEQ ID NO: 33438 - DNA, 15 bp, Homo sapiens
cacttcctaaagaaa

SEQ ID NO: 33439 - DNA, 15 bp, Homo sapiens
acttcctaaagaaag

SEQ ID NO: 33440 - DNA, 15 bp, Homo sapiens
cttcctaaagaaaga

SEQ ID NO: 33441 - DNA, 15 bp, Homo sapiens
ttcctaaagaaagaa

SEQ ID NO: 33442 - DNA, 15 bp, Homo sapiens
tcctaaagaaagaag

SEQ ID NO: 33443 - DNA, 15 bp, Homo sapiens
cctaaagaaagaagt

SEQ ID NO: 33444 - DNA, 15 bp, Homo sapiens
ctaaagaaagaagtg

SEQ ID NO: 33445 - DNA, 15 bp, Homo sapiens
taaagaaagaagtgg

SEQ ID NO: 33446 - DNA, 15 bp, Homo sapiens
aaagaaagaagtgga

SEQ ID NO: 33447 - DNA, 15 bp, Homo sapiens
aagaaagaagtggag

SEQ ID NO: 33448 - DNA, 15 bp, Homo sapiens
agaaagaagtggagt

SEQ ID NO: 33449 - DNA, 15 bp, Homo sapiens
gaaagaagtggagtt

SEQ ID NO: 33450 - DNA, 15 bp, Homo sapiens
aaagaagtggagttc

SEQ ID NO: 33451 - DNA, 15 bp, Homo sapiens
aagaagtggagttct

SEQ ID NO: 33452 - DNA, 15 bp, Homo sapiens
agaagtggagttctc

SEQ ID NO: 33453 - DNA, 15 bp, Homo sapiens
gaagtggagttctca

SEQ ID NO: 33454 - DNA, 15 bp, Homo sapiens
aagtggagttctcaa

SEQ ID NO: 33455 - DNA, 15 bp, Homo sapiens
agtggagttctcaag

SEQ ID NO: 33456 - DNA, 15 bp, Homo sapiens
gtggagttctcaagt

SEQ ID NO: 33457 - DNA, 15 bp, Homo sapiens
tggagttctcaagtc

SEQ ID NO: 33458 - DNA, 15 bp, Homo sapiens
ggagttctcaagtca

SEQ ID NO: 33459 - DNA, 15 bp, Homo sapiens
gagttctcaagtcac

SEQ ID NO: 33460 - DNA, 15 bp, Homo sapiens
agttctcaagtcact

SEQ ID NO: 33461 - DNA, 15 bp, Homo sapiens
gttctcaagtcacta

SEQ ID NO: 33462 - DNA, 15 bp, Homo sapiens
ttctcaagtcactat

SEQ ID NO: 33463 - DNA, 15 bp, Homo sapiens
tctcaagtcactatg

SEQ ID NO: 33464 - DNA, 15 bp, Homo sapiens
ctcaagtcactatgg

SEQ ID NO: 33465 - DNA, 15 bp, Homo sapiens
tcaagtcactatggg

SEQ ID NO: 33466 - DNA, 15 bp, Homo sapiens
caagtcactatggga

SEQ ID NO: 33467 - DNA, 15 bp, Homo sapiens
aagtcactatgggac

SEQ ID NO: 33468 - DNA, 15 bp, Homo sapiens
agtcactatgggact

SEQ ID NO: 33469 - DNA, 15 bp, Homo sapiens
gtcactatgggacta

SEQ ID NO: 33470 - DNA, 15 bp, Homo sapiens
tcactatgggactac

SEQ ID NO: 33471 - DNA, 15 bp, Homo sapiens
cactatgggactacg

SEQ ID NO: 33472 - DNA, 15 bp, Homo sapiens
actatgggactacgg

SEQ ID NO: 33473 - DNA, 15 bp, Homo sapiens
ctatgggactacgga

SEQ ID NO: 33474 - DNA, 15 bp, Homo sapiens
tatgggactacggaa

SEQ ID NO: 33475 - DNA, 15 bp, Homo sapiens
atgggactacggaac

SEQ ID NO: 33476 - DNA, 15 bp, Homo sapiens
tgggactacggaact

SEQ ID NO: 33477 - DNA, 15 bp, Homo sapiens
gggactacggaactc

SEQ ID NO: 33478 - DNA, 15 bp, Homo sapiens
ggactacggaactcg

SEQ ID NO: 33479 - DNA, 15 bp, Homo sapiens
gactacggaactcgg

SEQ ID NO: 33480 - DNA, 15 bp, Homo sapiens
actacggaactcggc

SEQ ID NO: 33481 - DNA, 15 bp, Homo sapiens
ctacggaactcggca

SEQ ID NO: 33482 - DNA, 15 bp, Homo sapiens
tacggaactcggcat

SEQ ID NO: 33483 - DNA, 15 bp, Homo sapiens
acggaactcggcatc

SEQ ID NO: 33484 - DNA, 15 bp, Homo sapiens
cggaactcggcatct

SEQ ID NO: 33485 - DNA, 15 bp, Homo sapiens
ggaactcggcatctg

SEQ ID NO: 33486 - DNA, 15 bp, Homo sapiens
gaactcggcatctga

SEQ ID NO: 33487 - DNA, 15 bp, Homo sapiens
aactcggcatctgag

SEQ ID NO: 33488 - DNA, 15 bp, Homo sapiens
actcggcatctgagc

SEQ ID NO: 33489 - DNA, 15 bp, Homo sapiens
ctcggcatctgagca

SEQ ID NO: 33490 - DNA, 15 bp, Homo sapiens
tcggcatctgagcat

SEQ ID NO: 33491 - DNA, 15 bp, Homo sapiens
cggcatctgagcatc

SEQ ID NO: 33492 - DNA, 15 bp, Homo sapiens
ggcatctgagcatcc

SEQ ID NO: 33493 - DNA, 15 bp, Homo sapiens
gcatctgagcatccc

SEQ ID NO: 33494 - DNA, 15 bp, Homo sapiens
catctgagcatcccc

SEQ ID NO: 33495 - DNA, 15 bp, Homo sapiens
atctgagcatcccct

SEQ ID NO: 33496 - DNA, 15 bp, Homo sapiens
tctgagcatcccctt

SEQ ID NO: 33497 - DNA, 15 bp, Homo sapiens
ctgagcatccccttc

SEQ ID NO: 33498 - DNA, 15 bp, Homo sapiens
tgagcatccccttct

SEQ ID NO: 33499 - DNA, 15 bp, Homo sapiens
gagcatccccttctg

SEQ ID NO: 33500 - DNA, 15 bp, Homo sapiens
agcatccccttctgt

SEQ ID NO: 33501 - DNA, 15 bp, Homo sapiens
gcatccccttctgta

SEQ ID NO: 33502 - DNA, 15 bp, Homo sapiens
catccccttctgtat

SEQ ID NO: 33503 - DNA, 15 bp, Homo sapiens
atccccttctgtata

SEQ ID NO: 33504 - DNA, 15 bp, Homo sapiens
tccccttctgtataa

SEQ ID NO: 33505 - DNA, 15 bp, Homo sapiens
ccccttctgtataat

SEQ ID NO: 33506 - DNA, 15 bp, Homo sapiens
cccttctgtataatg

SEQ ID NO: 33507 - DNA, 15 bp, Homo sapiens
ccttctgtataatgg

SEQ ID NO: 33508 - DNA, 15 bp, Homo sapiens
cttctgtataatggg

SEQ ID NO: 33509 - DNA, 15 bp, Homo sapiens
ttctgtataatgggg

SEQ ID NO: 33510 - DNA, 15 bp, Homo sapiens
tctgtataatggggt

SEQ ID NO: 33511 - DNA, 15 bp, Homo sapiens
ctgtataatggggtt

SEQ ID NO: 33512 - DNA, 15 bp, Homo sapiens
tgtataatggggttg

SEQ ID NO: 33513 - DNA, 15 bp, Homo sapiens
gtataatggggttgg

SEQ ID NO: 33514 - DNA, 15 bp, Homo sapiens
tataatggggttggc

SEQ ID NO: 33515 - DNA, 15 bp, Homo sapiens
ataatggggttggct

SEQ ID NO: 33516 - DNA, 15 bp, Homo sapiens
taatggggttggctg

SEQ ID NO: 33517 - DNA, 15 bp, Homo sapiens
aatggggttggctgg

SEQ ID NO: 33518 - DNA, 15 bp, Homo sapiens
atggggttggctggg

SEQ ID NO: 33519 - DNA, 15 bp, Homo sapiens
tggggttggctgggc

SEQ ID NO: 33520 - DNA, 15 bp, Homo sapiens
ggggttggctgggca

SEQ ID NO: 33521 - DNA, 15 bp, Homo sapiens
gggttggctgggcag

SEQ ID NO: 33522 - DNA, 15 bp, Homo sapiens
ggttggctgggcagt

SEQ ID NO: 33523 - DNA, 15 bp, Homo sapiens
gttggctgggcagtc

SEQ ID NO: 33524 - DNA, 15 bp, Homo sapiens
ttggctgggcagtcc

SEQ ID NO: 33525 - DNA, 15 bp, Homo sapiens
tggctgggcagtccc

SEQ ID NO: 33526 - DNA, 15 bp, Homo sapiens
ggctgggcagtccct

SEQ ID NO: 33527 - DNA, 15 bp, Homo sapiens
gctgggcagtccctt

SEQ ID NO: 33528 - DNA, 15 bp, Homo sapiens
ctgggcagtcccttc

SEQ ID NO: 33529 - DNA, 15 bp, Homo sapiens
tgggcagtcccttcc

SEQ ID NO: 33530 - DNA, 15 bp, Homo sapiens
gggcagtcccttcca

SEQ ID NO: 33531 - DNA, 15 bp, Homo sapiens
ggcagtcccttccag

SEQ ID NO: 33532 - DNA, 15 bp, Homo sapiens
gcagtcccttccagc

SEQ ID NO: 33533 - DNA, 15 bp, Homo sapiens
cagtcccttccagct

SEQ ID NO: 33534 - DNA, 15 bp, Homo sapiens
agtcccttccagctc

SEQ ID NO: 33535 - DNA, 15 bp, Homo sapiens
gtcccttccagctct

SEQ ID NO: 33536 - DNA, 15 bp, Homo sapiens
tcccttccagctctg

SEQ ID NO: 33537 - DNA, 15 bp, Homo sapiens
cccttccagctctgg

SEQ ID NO: 33538 - DNA, 15 bp, Homo sapiens
ccttccagctctggc

SEQ ID NO: 33539 - DNA, 15 bp, Homo sapiens
cttccagctctggct

SEQ ID NO: 33540 - DNA, 15 bp, Homo sapiens
ttccagctctggctt

SEQ ID NO: 33541 - DNA, 15 bp, Homo sapiens
tccagctctggcttc

SEQ ID NO: 33542 - DNA, 15 bp, Homo sapiens
ccagctctggcttcc

SEQ ID NO: 33543 - DNA, 15 bp, Homo sapiens
cagctctggcttcct

SEQ ID NO: 33544 - DNA, 15 bp, Homo sapiens
agctctggcttcctc

SEQ ID NO: 33545 - DNA, 15 bp, Homo sapiens
gctctggcttcctct

SEQ ID NO: 33546 - DNA, 15 bp, Homo sapiens
ctctggcttcctctc

SEQ ID NO: 33547 - DNA, 15 bp, Homo sapiens
tctggcttcctctca

SEQ ID NO: 33548 - DNA, 15 bp, Homo sapiens
ctggcttcctctcag

SEQ ID NO: 33549 - DNA, 15 bp, Homo sapiens
tggcttcctctcaga

SEQ ID NO: 33550 - DNA, 15 bp, Homo sapiens
ggcttcctctcagac

SEQ ID NO: 33551 - DNA, 15 bp, Homo sapiens
gcttcctctcagacc

SEQ ID NO: 33552 - DNA, 15 bp, Homo sapiens
cttcctctcagacca

SEQ ID NO: 33553 - DNA, 15 bp, Homo sapiens
ttcctctcagaccag

SEQ ID NO: 33554 - DNA, 15 bp, Homo sapiens
tcctctcagaccagg

SEQ ID NO: 33555 - DNA, 15 bp, Homo sapiens
cctctcagaccagga

SEQ ID NO: 33556 - DNA, 15 bp, Homo sapiens
ctctcagaccaggat

SEQ ID NO: 33557 - DNA, 15 bp, Homo sapiens
tctcagaccaggatt

SEQ ID NO: 33558 - DNA, 15 bp, Homo sapiens
ctcagaccaggatta

SEQ ID NO: 33559 - DNA, 15 bp, Homo sapiens
tcagaccaggattat

SEQ ID NO: 33560 - DNA, 15 bp, Homo sapiens
cagaccaggattata

SEQ ID NO: 33561 - DNA, 15 bp, Homo sapiens
agaccaggattatag

SEQ ID NO: 33562 - DNA, 15 bp, Homo sapiens
gaccaggattatagg

SEQ ID NO: 33563 - DNA, 15 bp, Homo sapiens
accaggattatagga

SEQ ID NO: 33564 - DNA, 15 bp, Homo sapiens
ccaggattataggat

SEQ ID NO: 33565 - DNA, 15 bp, Homo sapiens
caggattataggatc

SEQ ID NO: 33566 - DNA, 15 bp, Homo sapiens
aggattataggatcc

SEQ ID NO: 33567 - DNA, 15 bp, Homo sapiens
ggattataggatcct

SEQ ID NO: 33568 - DNA, 15 bp, Homo sapiens
gattataggatcctg

SEQ ID NO: 33569 - DNA, 15 bp, Homo sapiens
attataggatcctga

SEQ ID NO: 33570 - DNA, 15 bp, Homo sapiens
ttataggatcctgaa

SEQ ID NO: 33571 - DNA, 15 bp, Homo sapiens
tataggatcctgaaa

SEQ ID NO: 33572 - DNA, 15 bp, Homo sapiens
ataggatcctgaaaa

SEQ ID NO: 33573 - DNA, 15 bp, Homo sapiens
taggatcctgaaaag

SEQ ID NO: 33574 - DNA, 15 bp, Homo sapiens
aggatcctgaaaagc

SEQ ID NO: 33575 - DNA, 15 bp, Homo sapiens
ggatcctgaaaagcc

SEQ ID NO: 33576 - DNA, 15 bp, Homo sapiens
gatcctgaaaagcca

SEQ ID NO: 33577 - DNA, 15 bp, Homo sapiens
atcctgaaaagccag

SEQ ID NO: 33578 - DNA, 15 bp, Homo sapiens
tcctgaaaagccagt

SEQ ID NO: 33579 - DNA, 15 bp, Homo sapiens
cctgaaaagccagtg

SEQ ID NO: 33580 - DNA, 15 bp, Homo sapiens
ctgaaaagccagtgc

SEQ ID NO: 33581 - DNA, 15 bp, Homo sapiens
tgaaaagccagtgct

SEQ ID NO: 33582 - DNA, 15 bp, Homo sapiens
gaaaagccagtgctt

SEQ ID NO: 33583 - DNA, 15 bp, Homo sapiens
aaaagccagtgcttc

SEQ ID NO: 33584 - DNA, 15 bp, Homo sapiens
aaagccagtgcttcc

SEQ ID NO: 33585 - DNA, 15 bp, Homo sapiens
aagccagtgcttccc

SEQ ID NO: 33586 - DNA, 15 bp, Homo sapiens
agccagtgcttccct

SEQ ID NO: 33587 - DNA, 15 bp, Homo sapiens
gccagtgcttccctc

SEQ ID NO: 33588 - DNA, 15 bp, Homo sapiens
ccagtgcttccctca

SEQ ID NO: 33589 - DNA, 15 bp, Homo sapiens
cagtgcttccctcag

SEQ ID NO: 33590 - DNA, 15 bp, Homo sapiens
agtgcttccctcagg

SEQ ID NO: 33591 - DNA, 15 bp, Homo sapiens
gtgcttccctcaggg

SEQ ID NO: 33592 - DNA, 15 bp, Homo sapiens
tgcttccctcaggga

SEQ ID NO: 33593 - DNA, 15 bp, Homo sapiens
gcttccctcagggag

SEQ ID NO: 33594 - DNA, 15 bp, Homo sapiens
cttccctcagggagt

SEQ ID NO: 33595 - DNA, 15 bp, Homo sapiens
ttccctcagggagtg

SEQ ID NO: 33596 - DNA, 15 bp, Homo sapiens
tccctcagggagtgg

SEQ ID NO: 33597 - DNA, 15 bp, Homo sapiens
ccctcagggagtgga

SEQ ID NO: 33598 - DNA, 15 bp, Homo sapiens
cctcagggagtggaa

SEQ ID NO: 33599 - DNA, 15 bp, Homo sapiens
ctcagggagtggaag

SEQ ID NO: 33600 - DNA, 15 bp, Homo sapiens
tcagggagtggaagg

SEQ ID NO: 33601 - DNA, 15 bp, Homo sapiens
cagggagtggaaggt

SEQ ID NO: 33602 - DNA, 15 bp, Homo sapiens
agggagtggaaggtt

SEQ ID NO: 33603 - DNA, 15 bp, Homo sapiens
gggagtggaaggttc

SEQ ID NO: 33604 - DNA, 15 bp, Homo sapiens
ggagtggaaggttct

SEQ ID NO: 33605 - DNA, 15 bp, Homo sapiens
gagtggaaggttctg

SEQ ID NO: 33606 - DNA, 15 bp, Homo sapiens
agtggaaggttctgg

SEQ ID NO: 33607 - DNA, 15 bp, Homo sapiens
gtggaaggttctggg

SEQ ID NO: 33608 - DNA, 15 bp, Homo sapiens
tggaaggttctgggg

SEQ ID NO: 33609 - DNA, 15 bp, Homo sapiens
ggaaggttctggggc

SEQ ID NO: 33610 - DNA, 15 bp, Homo sapiens
gaaggttctggggct

SEQ ID NO: 33611 - DNA, 15 bp, Homo sapiens
aaggttctggggctc

SEQ ID NO: 33612 - DNA, 15 bp, Homo sapiens
aggttctggggctca

SEQ ID NO: 33613 - DNA, 15 bp, Homo sapiens
ggttctggggctcag

SEQ ID NO: 33614 - DNA, 15 bp, Homo sapiens
gttctggggctcagc

SEQ ID NO: 33615 - DNA, 15 bp, Homo sapiens
ttctggggctcagca

SEQ ID NO: 33616 - DNA, 15 bp, Homo sapiens
tctggggctcagcag

SEQ ID NO: 33617 - DNA, 15 bp, Homo sapiens
ctggggctcagcagg

SEQ ID NO: 33618 - DNA, 15 bp, Homo sapiens
tggggctcagcaggg

SEQ ID NO: 33619 - DNA, 15 bp, Homo sapiens
ggggctcagcagggg

SEQ ID NO: 33620 - DNA, 15 bp, Homo sapiens
gggctcagcaggggg

SEQ ID NO: 33621 - DNA, 15 bp, Homo sapiens
ggctcagcagggggc

SEQ ID NO: 33622 - DNA, 15 bp, Homo sapiens
gctcagcagggggcc

SEQ ID NO: 33623 - DNA, 15 bp, Homo sapiens
ctcagcagggggccc

SEQ ID NO: 33624 - DNA, 15 bp, Homo sapiens
tcagcagggggcccg

SEQ ID NO: 33625 - DNA, 15 bp, Homo sapiens
cagcagggggcccgg

SEQ ID NO: 33626 - DNA, 15 bp, Homo sapiens
agcagggggcccgga

SEQ ID NO: 33627 - DNA, 15 bp, Homo sapiens
gcagggggcccggag

SEQ ID NO: 33628 - DNA, 15 bp, Homo sapiens
cagggggcccggagc

SEQ ID NO: 33629 - DNA, 15 bp, Homo sapiens
agggggcccggagcc

SEQ ID NO: 33630 - DNA, 15 bp, Homo sapiens
gggggcccggagcca

SEQ ID NO: 33631 - DNA, 15 bp, Homo sapiens
ggggcccggagccat

SEQ ID NO: 33632 - DNA, 15 bp, Homo sapiens
gggcccggagccatt

SEQ ID NO: 33633 - DNA, 15 bp, Homo sapiens
ggcccggagccattg

SEQ ID NO: 33634 - DNA, 15 bp, Homo sapiens
gcccggagccattgt

SEQ ID NO: 33635 - DNA, 15 bp, Homo sapiens
cccggagccattgtg

SEQ ID NO: 33636 - DNA, 15 bp, Homo sapiens
ccggagccattgtgg

SEQ ID NO: 33637 - DNA, 15 bp, Homo sapiens
cggagccattgtgga

SEQ ID NO: 33638 - DNA, 15 bp, Homo sapiens
ggagccattgtggag

SEQ ID NO: 33639 - DNA, 15 bp, Homo sapiens
gagccattgtggagg

SEQ ID NO: 33640 - DNA, 15 bp, Homo sapiens
agccattgtggaggg

SEQ ID NO: 33641 - DNA, 15 bp, Homo sapiens
gccattgtggagggc

SEQ ID NO: 33642 - DNA, 15 bp, Homo sapiens
ccattgtggagggct

SEQ ID NO: 33643 - DNA, 15 bp, Homo sapiens
cattgtggagggctt

SEQ ID NO: 33644 - DNA, 15 bp, Homo sapiens
attgtggagggcttt

SEQ ID NO: 33645 - DNA, 15 bp, Homo sapiens
ttgtggagggctttc

SEQ ID NO: 33646 - DNA, 15 bp, Homo sapiens
tgtggagggctttca

SEQ ID NO: 33647 - DNA, 15 bp, Homo sapiens
gtggagggctttcaa

SEQ ID NO: 33648 - DNA, 15 bp, Homo sapiens
tggagggctttcaag

SEQ ID NO: 33649 - DNA, 15 bp, Homo sapiens
ggagggctttcaagg

SEQ ID NO: 33650 - DNA, 15 bp, Homo sapiens
gagggctttcaaggt

SEQ ID NO: 33651 - DNA, 15 bp, Homo sapiens
agggctttcaaggtg

SEQ ID NO: 33652 - DNA, 15 bp, Homo sapiens
gggctttcaaggtga

SEQ ID NO: 33653 - DNA, 15 bp, Homo sapiens
ggctttcaaggtgag

SEQ ID NO: 33654 - DNA, 15 bp, Homo sapiens
gctttcaaggtgagg

SEQ ID NO: 33655 - DNA, 15 bp, Homo sapiens
ctttcaaggtgagga

SEQ ID NO: 33656 - DNA, 15 bp, Homo sapiens
tttcaaggtgaggac

SEQ ID NO: 33657 - DNA, 15 bp, Homo sapiens
ttcaaggtgaggaca

SEQ ID NO: 33658 - DNA, 15 bp, Homo sapiens
tcaaggtgaggacaa

SEQ ID NO: 33659 - DNA, 15 bp, Homo sapiens
caaggtgaggacaat

SEQ ID NO: 33660 - DNA, 15 bp, Homo sapiens
aaggtgaggacaata

SEQ ID NO: 33661 - DNA, 15 bp, Homo sapiens
aggtgaggacaatag

SEQ ID NO: 33662 - DNA, 15 bp, Homo sapiens
ggtgaggacaataga

SEQ ID NO: 33663 - DNA, 15 bp, Homo sapiens
gtgaggacaatagaa

SEQ ID NO: 33664 - DNA, 15 bp, Homo sapiens
tgaggacaatagaag

SEQ ID NO: 33665 - DNA, 15 bp, Homo sapiens
gaggacaatagaaga

SEQ ID NO: 33666 - DNA, 15 bp, Homo sapiens
aggacaatagaagag

SEQ ID NO: 33667 - DNA, 15 bp, Homo sapiens
ggacaatagaagagc

SEQ ID NO: 33668 - DNA, 15 bp, Homo sapiens
gacaatagaagagca

SEQ ID NO: 33669 - DNA, 15 bp, Homo sapiens
acaatagaagagcag

SEQ ID NO: 33670 - DNA, 15 bp, Homo sapiens
caatagaagagcagg

SEQ ID NO: 33671 - DNA, 15 bp, Homo sapiens
aatagaagagcaggt

SEQ ID NO: 33672 - DNA, 15 bp, Homo sapiens
atagaagagcaggtc

SEQ ID NO: 33673 - DNA, 15 bp, Homo sapiens
tagaagagcaggtct

SEQ ID NO: 33674 - DNA, 15 bp, Homo sapiens
agaagagcaggtctt

SEQ ID NO: 33675 - DNA, 15 bp, Homo sapiens
gaagagcaggtcttg

SEQ ID NO: 33676 - DNA, 15 bp, Homo sapiens
aagagcaggtcttgc

SEQ ID NO: 33677 - DNA, 15 bp, Homo sapiens
agagcaggtcttgcg

SEQ ID NO: 33678 - DNA, 15 bp, Homo sapiens
gagcaggtcttgcgt

SEQ ID NO: 33679 - DNA, 15 bp, Homo sapiens
agcaggtcttgcgtg

SEQ ID NO: 33680 - DNA, 15 bp, Homo sapiens
gcaggtcttgcgtgg

SEQ ID NO: 33681 - DNA, 15 bp, Homo sapiens
caggtcttgcgtggc

SEQ ID NO: 33682 - DNA, 15 bp, Homo sapiens
aggtcttgcgtggct

SEQ ID NO: 33683 - DNA, 15 bp, Homo sapiens
ggtcttgcgtggctt

SEQ ID NO: 33684 - DNA, 15 bp, Homo sapiens
gtcttgcgtggcttg

SEQ ID NO: 33685 - DNA, 15 bp, Homo sapiens
tcttgcgtggcttgg

SEQ ID NO: 33686 - DNA, 15 bp, Homo sapiens
cttgcgtggcttgga

SEQ ID NO: 33687 - DNA, 15 bp, Homo sapiens
ttgcgtggcttggac

SEQ ID NO: 33688 - DNA, 15 bp, Homo sapiens
tgcgtggcttggaca

SEQ ID NO: 33689 - DNA, 15 bp, Homo sapiens
gcgtggcttggacag

SEQ ID NO: 33690 - DNA, 15 bp, Homo sapiens
cgtggcttggacagg

SEQ ID NO: 33691 - DNA, 15 bp, Homo sapiens
gtggcttggacaggg

SEQ ID NO: 33692 - DNA, 15 bp, Homo sapiens
tggcttggacaggga

SEQ ID NO: 33693 - DNA, 15 bp, Homo sapiens
ggcttggacagggaa

SEQ ID NO: 33694 - DNA, 15 bp, Homo sapiens
gcttggacagggaaa

SEQ ID NO: 33695 - DNA, 15 bp, Homo sapiens
cttggacagggaaag

SEQ ID NO: 33696 - DNA, 15 bp, Homo sapiens
ttggacagggaaaga

SEQ ID NO: 33697 - DNA, 15 bp, Homo sapiens
tggacagggaaagag

SEQ ID NO: 33698 - DNA, 15 bp, Homo sapiens
ggacagggaaagagg

SEQ ID NO: 33699 - DNA, 15 bp, Homo sapiens
gacagggaaagagga

SEQ ID NO: 33700 - DNA, 15 bp, Homo sapiens
acagggaaagaggag

SEQ ID NO: 33701 - DNA, 15 bp, Homo sapiens
cagggaaagaggaga

SEQ ID NO: 33702 - DNA, 15 bp, Homo sapiens
agggaaagaggagaa

SEQ ID NO: 33703 - DNA, 15 bp, Homo sapiens
gggaaagaggagaag

SEQ ID NO: 33704 - DNA, 15 bp, Homo sapiens
ggaaagaggagaagg

SEQ ID NO: 33705 - DNA, 15 bp, Homo sapiens
gaaagaggagaagga

SEQ ID NO: 33706 - DNA, 15 bp, Homo sapiens
aaagaggagaaggag

SEQ ID NO: 33707 - DNA, 15 bp, Homo sapiens
aagaggagaaggagt

SEQ ID NO: 33708 - DNA, 15 bp, Homo sapiens
agaggagaaggagtg

SEQ ID NO: 33709 - DNA, 15 bp, Homo sapiens
gaggagaaggagtgg

SEQ ID NO: 33710 - DNA, 15 bp, Homo sapiens
aggagaaggagtggg

SEQ ID NO: 33711 - DNA, 15 bp, Homo sapiens
ggagaaggagtgggc

SEQ ID NO: 33712 - DNA, 15 bp, Homo sapiens
gagaaggagtgggca

SEQ ID NO: 33713 - DNA, 15 bp, Homo sapiens
agaaggagtgggcat

SEQ ID NO: 33714 - DNA, 15 bp, Homo sapiens
gaaggagtgggcatt

SEQ ID NO: 33715 - DNA, 15 bp, Homo sapiens
aaggagtgggcattt

SEQ ID NO: 33716 - DNA, 15 bp, Homo sapiens
aggagtgggcatttg

SEQ ID NO: 33717 - DNA, 15 bp, Homo sapiens
ggagtgggcatttga

SEQ ID NO: 33718 - DNA, 15 bp, Homo sapiens
gagtgggcatttgag

SEQ ID NO: 33719 - DNA, 15 bp, Homo sapiens
agtgggcatttgagg

SEQ ID NO: 33720 - DNA, 15 bp, Homo sapiens
gtgggcatttgaggc

SEQ ID NO: 33721 - DNA, 15 bp, Homo sapiens
tgggcatttgaggca

SEQ ID NO: 33722 - DNA, 15 bp, Homo sapiens
gggcatttgaggcag

SEQ ID NO: 33723 - DNA, 15 bp, Homo sapiens
ggcatttgaggcagg

SEQ ID NO: 33724 - DNA, 15 bp, Homo sapiens
gcatttgaggcaggg

SEQ ID NO: 33725 - DNA, 15 bp, Homo sapiens
catttgaggcagggg

SEQ ID NO: 33726 - DNA, 15 bp, Homo sapiens
atttgaggcaggggg

SEQ ID NO: 33727 - DNA, 15 bp, Homo sapiens
tttgaggcagggggt

SEQ ID NO: 33728 - DNA, 15 bp, Homo sapiens
ttgaggcagggggtg

SEQ ID NO: 33729 - DNA, 15 bp, Homo sapiens
tgaggcagggggtgt

SEQ ID NO: 33730 - DNA, 15 bp, Homo sapiens
gaggcagggggtgta

SEQ ID NO: 33731 - DNA, 15 bp, Homo sapiens
aggcagggggtgtag

SEQ ID NO: 33732 - DNA, 15 bp, Homo sapiens
ggcagggggtgtagc

SEQ ID NO: 33733 - DNA, 15 bp, Homo sapiens
gcagggggtgtagca

SEQ ID NO: 33734 - DNA, 15 bp, Homo sapiens
cagggggtgtagcat

SEQ ID NO: 33735 - DNA, 15 bp, Homo sapiens
agggggtgtagcatg

SEQ ID NO: 33736 - DNA, 15 bp, Homo sapiens
gggggtgtagcatga

SEQ ID NO: 33737 - DNA, 15 bp, Homo sapiens
ggggtgtagcatgag

SEQ ID NO: 33738 - DNA, 15 bp, Homo sapiens
gggtgtagcatgagc

SEQ ID NO: 33739 - DNA, 15 bp, Homo sapiens
ggtgtagcatgagcc

SEQ ID NO: 33740 - DNA, 15 bp, Homo sapiens
gtgtagcatgagcca

SEQ ID NO: 33741 - DNA, 15 bp, Homo sapiens
tgtagcatgagccag

SEQ ID NO: 33742 - DNA, 15 bp, Homo sapiens
gtagcatgagccagg

SEQ ID NO: 33743 - DNA, 15 bp, Homo sapiens
tagcatgagccaggc

SEQ ID NO: 33744 - DNA, 15 bp, Homo sapiens
agcatgagccaggct

SEQ ID NO: 33745 - DNA, 15 bp, Homo sapiens
gcatgagccaggctt

SEQ ID NO: 33746 - DNA, 15 bp, Homo sapiens
catgagccaggcttg

SEQ ID NO: 33747 - DNA, 15 bp, Homo sapiens
atgagccaggcttga

SEQ ID NO: 33748 - DNA, 15 bp, Homo sapiens
tgagccaggcttgag

SEQ ID NO: 33749 - DNA, 15 bp, Homo sapiens
gagccaggcttgagg

SEQ ID NO: 33750 - DNA, 15 bp, Homo sapiens
agccaggcttgaggg

SEQ ID NO: 33751 - DNA, 15 bp, Homo sapiens
gccaggcttgagggc

SEQ ID NO: 33752 - DNA, 15 bp, Homo sapiens
ccaggcttgagggcc

SEQ ID NO: 33753 - DNA, 15 bp, Homo sapiens
caggcttgagggcca

SEQ ID NO: 33754 - DNA, 15 bp, Homo sapiens
aggcttgagggccag

SEQ ID NO: 33755 - DNA, 15 bp, Homo sapiens
ggcttgagggccaga

SEQ ID NO: 33756 - DNA, 15 bp, Homo sapiens
gcttgagggccagaa

SEQ ID NO: 33757 - DNA, 15 bp, Homo sapiens
cttgagggccagaaa

SEQ ID NO: 33758 - DNA, 15 bp, Homo sapiens
ttgagggccagaaat

SEQ ID NO: 33759 - DNA, 15 bp, Homo sapiens
tgagggccagaaatt

SEQ ID NO: 33760 - DNA, 15 bp, Homo sapiens
gagggccagaaattg

SEQ ID NO: 33761 - DNA, 15 bp, Homo sapiens
agggccagaaattgg

SEQ ID NO: 33762 - DNA, 15 bp, Homo sapiens
gggccagaaattggg

SEQ ID NO: 33763 - DNA, 15 bp, Homo sapiens
ggccagaaattgggg

SEQ ID NO: 33764 - DNA, 15 bp, Homo sapiens
gccagaaattggggt

SEQ ID NO: 33765 - DNA, 15 bp, Homo sapiens
ccagaaattggggtg

SEQ ID NO: 33766 - DNA, 15 bp, Homo sapiens
cagaaattggggtga

SEQ ID NO: 33767 - DNA, 15 bp, Homo sapiens
agaaattggggtgaa

SEQ ID NO: 33768 - DNA, 15 bp, Homo sapiens
gaaattggggtgaac

SEQ ID NO: 33769 - DNA, 15 bp, Homo sapiens
aaattggggtgaact

SEQ ID NO: 33770 - DNA, 15 bp, Homo sapiens
aattggggtgaactc

SEQ ID NO: 33771 - DNA, 15 bp, Homo sapiens
attggggtgaactct

SEQ ID NO: 33772 - DNA, 15 bp, Homo sapiens
ttggggtgaactctg

SEQ ID NO: 33773 - DNA, 15 bp, Homo sapiens
tggggtgaactctga

SEQ ID NO: 33774 - DNA, 15 bp, Homo sapiens
ggggtgaactctgat

SEQ ID NO: 33775 - DNA, 15 bp, Homo sapiens
gggtgaactctgatg

SEQ ID NO: 33776 - DNA, 15 bp, Homo sapiens
ggtgaactctgatgg

SEQ ID NO: 33777 - DNA, 15 bp, Homo sapiens
gtgaactctgatggg

SEQ ID NO: 33778 - DNA, 15 bp, Homo sapiens
tgaactctgatgggg

SEQ ID NO: 33779 - DNA, 15 bp, Homo sapiens
gaactctgatggggg

SEQ ID NO: 33780 - DNA, 15 bp, Homo sapiens
aactctgatgggggc

SEQ ID NO: 33781 - DNA, 15 bp, Homo sapiens
actctgatgggggct

SEQ ID NO: 33782 - DNA, 15 bp, Homo sapiens
ctctgatgggggctg

SEQ ID NO: 33783 - DNA, 15 bp, Homo sapiens
tctgatgggggctgg

SEQ ID NO: 33784 - DNA, 15 bp, Homo sapiens
ctgatgggggctggg

SEQ ID NO: 33785 - DNA, 15 bp, Homo sapiens
tgatgggggctgggt

SEQ ID NO: 33786 - DNA, 15 bp, Homo sapiens
gatgggggctgggta

SEQ ID NO: 33787 - DNA, 15 bp, Homo sapiens
atgggggctgggtag

SEQ ID NO: 33788 - DNA, 15 bp, Homo sapiens
tgggggctgggtaga

SEQ ID NO: 33789 - DNA, 15 bp, Homo sapiens
gggggctgggtagag

SEQ ID NO: 33790 - DNA, 15 bp, Homo sapiens
ggggctgggtagaga

SEQ ID NO: 33791 - DNA, 15 bp, Homo sapiens
gggctgggtagagaa

SEQ ID NO: 33792 - DNA, 15 bp, Homo sapiens
ggctgggtagagaag

SEQ ID NO: 33793 - DNA, 15 bp, Homo sapiens
gctgggtagagaagc

SEQ ID NO: 33794 - DNA, 15 bp, Homo sapiens
ctgggtagagaagct

SEQ ID NO: 33795 - DNA, 15 bp, Homo sapiens
tgggtagagaagctt

SEQ ID NO: 33796 - DNA, 15 bp, Homo sapiens
gggtagagaagcttc

SEQ ID NO: 33797 - DNA, 15 bp, Homo sapiens
ggtagagaagcttct

SEQ ID NO: 33798 - DNA, 15 bp, Homo sapiens
gtagagaagcttcta

SEQ ID NO: 33799 - DNA, 15 bp, Homo sapiens
tagagaagcttctac

SEQ ID NO: 33800 - DNA, 15 bp, Homo sapiens
agagaagcttctaca

SEQ ID NO: 33801 - DNA, 15 bp, Homo sapiens
gagaagcttctacag

SEQ ID NO: 33802 - DNA, 15 bp, Homo sapiens
agaagcttctacagg

SEQ ID NO: 33803 - DNA, 15 bp, Homo sapiens
gaagcttctacaggc

SEQ ID NO: 33804 - DNA, 15 bp, Homo sapiens
aagcttctacaggcc

SEQ ID NO: 33805 - DNA, 15 bp, Homo sapiens
agcttctacaggccc

SEQ ID NO: 33806 - DNA, 15 bp, Homo sapiens
gcttctacaggcccc

SEQ ID NO: 33807 - DNA, 15 bp, Homo sapiens
cttctacaggcccca

SEQ ID NO: 33808 - DNA, 15 bp, Homo sapiens
ttctacaggccccag

SEQ ID NO: 33809 - DNA, 15 bp, Homo sapiens
tctacaggccccagc

SEQ ID NO: 33810 - DNA, 15 bp, Homo sapiens
ctacaggccccagct

SEQ ID NO: 33811 - DNA, 15 bp, Homo sapiens
tacaggccccagctc

SEQ ID NO: 33812 - DNA, 15 bp, Homo sapiens
acaggccccagctca

SEQ ID NO: 33813 - DNA, 15 bp, Homo sapiens
caggccccagctcaa

SEQ ID NO: 33814 - DNA, 15 bp, Homo sapiens
aggccccagctcaag

SEQ ID NO: 33815 - DNA, 15 bp, Homo sapiens
ggccccagctcaaga

SEQ ID NO: 33816 - DNA, 15 bp, Homo sapiens
gccccagctcaagag

SEQ ID NO: 33817 - DNA, 15 bp, Homo sapiens
ccccagctcaagaga

SEQ ID NO: 33818 - DNA, 15 bp, Homo sapiens
cccagctcaagagac

SEQ ID NO: 33819 - DNA, 15 bp, Homo sapiens
ccagctcaagagacc

SEQ ID NO: 33820 - DNA, 15 bp, Homo sapiens
cagctcaagagaccc

SEQ ID NO: 33821 - DNA, 15 bp, Homo sapiens
agctcaagagacccc

SEQ ID NO: 33822 - DNA, 15 bp, Homo sapiens
gctcaagagacccca

SEQ ID NO: 33823 - DNA, 15 bp, Homo sapiens
ctcaagagaccccat

SEQ ID NO: 33824 - DNA, 15 bp, Homo sapiens
tcaagagaccccatc

SEQ ID NO: 33825 - DNA, 15 bp, Homo sapiens
caagagaccccatct

SEQ ID NO: 33826 - DNA, 15 bp, Homo sapiens
aagagaccccatctc

SEQ ID NO: 33827 - DNA, 15 bp, Homo sapiens
agagaccccatctct

SEQ ID NO: 33828 - DNA, 15 bp, Homo sapiens
gagaccccatctctc

SEQ ID NO: 33829 - DNA, 15 bp, Homo sapiens
agaccccatctctcc

SEQ ID NO: 33830 - DNA, 15 bp, Homo sapiens
gaccccatctctcct

SEQ ID NO: 33831 - DNA, 15 bp, Homo sapiens
accccatctctcctc

SEQ ID NO: 33832 - DNA, 15 bp, Homo sapiens
ccccatctctcctcc

SEQ ID NO: 33833 - DNA, 15 bp, Homo sapiens
cccatctctcctcct

SEQ ID NO: 33834 - DNA, 15 bp, Homo sapiens
ccatctctcctcctc

SEQ ID NO: 33835 - DNA, 15 bp, Homo sapiens
catctctcctcctct

SEQ ID NO: 33836 - DNA, 15 bp, Homo sapiens
atctctcctcctctc

SEQ ID NO: 33837 - DNA, 15 bp, Homo sapiens
tctctcctcctctct

SEQ ID NO: 33838 - DNA, 15 bp, Homo sapiens
ctctcctcctctctg

SEQ ID NO: 33839 - DNA, 15 bp, Homo sapiens
tctcctcctctctgt

SEQ ID NO: 33840 - DNA, 15 bp, Homo sapiens
ctcctcctctctgtc

SEQ ID NO: 33841 - DNA, 15 bp, Homo sapiens
tcctcctctctgtca

SEQ ID NO: 33842 - DNA, 15 bp, Homo sapiens
cctcctctctgtcac

SEQ ID NO: 33843 - DNA, 15 bp, Homo sapiens
ctcctctctgtcact

SEQ ID NO: 33844 - DNA, 15 bp, Homo sapiens
tcctctctgtcactt

SEQ ID NO: 33845 - DNA, 15 bp, Homo sapiens
cctctctgtcacttg

SEQ ID NO: 33846 - DNA, 15 bp, Homo sapiens
ctctctgtcacttgc

SEQ ID NO: 33847 - DNA, 15 bp, Homo sapiens
tctctgtcacttgcc

SEQ ID NO: 33848 - DNA, 15 bp, Homo sapiens
ctctgtcacttgcca

SEQ ID NO: 33849 - DNA, 15 bp, Homo sapiens
tctgtcacttgccat

SEQ ID NO: 33850 - DNA, 15 bp, Homo sapiens
ctgtcacttgccatg

SEQ ID NO: 33851 - DNA, 15 bp, Homo sapiens
tgtcacttgccatgc

SEQ ID NO: 33852 - DNA, 15 bp, Homo sapiens
gtcacttgccatgct

SEQ ID NO: 33853 - DNA, 15 bp, Homo sapiens
tcacttgccatgctg

SEQ ID NO: 33854 - DNA, 15 bp, Homo sapiens
cacttgccatgctgg

SEQ ID NO: 33855 - DNA, 15 bp, Homo sapiens
acttgccatgctgga

SEQ ID NO: 33856 - DNA, 15 bp, Homo sapiens
cttgccatgctggat

SEQ ID NO: 33857 - DNA, 15 bp, Homo sapiens
ttgccatgctggatc

SEQ ID NO: 33858 - DNA, 15 bp, Homo sapiens
tgccatgctggatcc

SEQ ID NO: 33859 - DNA, 15 bp, Homo sapiens
gccatgctggatccg

SEQ ID NO: 33860 - DNA, 15 bp, Homo sapiens
ccatgctggatccgt

SEQ ID NO: 33861 - DNA, 15 bp, Homo sapiens
catgctggatccgtg

SEQ ID NO: 33862 - DNA, 15 bp, Homo sapiens
atgctggatccgtgc

SEQ ID NO: 33863 - DNA, 15 bp, Homo sapiens
tgctggatccgtgca

SEQ ID NO: 33864 - DNA, 15 bp, Homo sapiens
gctggatccgtgcat

SEQ ID NO: 33865 - DNA, 15 bp, Homo sapiens
ctggatccgtgcatg

SEQ ID NO: 33866 - DNA, 15 bp, Homo sapiens
tggatccgtgcatga

SEQ ID NO: 33867 - DNA, 15 bp, Homo sapiens
ggatccgtgcatgat

SEQ ID NO: 33868 - DNA, 15 bp, Homo sapiens
gatccgtgcatgatc

SEQ ID NO: 33869 - DNA, 15 bp, Homo sapiens
atccgtgcatgatca

SEQ ID NO: 33870 - DNA, 15 bp, Homo sapiens
tccgtgcatgatcac

SEQ ID NO: 33871 - DNA, 15 bp, Homo sapiens
ccgtgcatgatcaca

SEQ ID NO: 33872 - DNA, 15 bp, Homo sapiens
cgtgcatgatcacac

SEQ ID NO: 33873 - DNA, 15 bp, Homo sapiens
gtgcatgatcacact

SEQ ID NO: 33874 - DNA, 15 bp, Homo sapiens
tgcatgatcacactc

SEQ ID NO: 33875 - DNA, 15 bp, Homo sapiens
gcatgatcacactcc

SEQ ID NO: 33876 - DNA, 15 bp, Homo sapiens
catgatcacactcct

SEQ ID NO: 33877 - DNA, 15 bp, Homo sapiens
atgatcacactcctg

SEQ ID NO: 33878 - DNA, 15 bp, Homo sapiens
tgatcacactcctgg

SEQ ID NO: 33879 - DNA, 15 bp, Homo sapiens
gatcacactcctgga

SEQ ID NO: 33880 - DNA, 15 bp, Homo sapiens
atcacactcctggac

SEQ ID NO: 33881 - DNA, 15 bp, Homo sapiens
tcacactcctggact

SEQ ID NO: 33882 - DNA, 15 bp, Homo sapiens
cacactcctggactc

SEQ ID NO: 33883 - DNA, 15 bp, Homo sapiens
acactcctggactcg

SEQ ID NO: 33884 - DNA, 15 bp, Homo sapiens
cactcctggactcgc

SEQ ID NO: 33885 - DNA, 15 bp, Homo sapiens
actcctggactcgcc

SEQ ID NO: 33886 - DNA, 15 bp, Homo sapiens
ctcctggactcgcct

SEQ ID NO: 33887 - DNA, 15 bp, Homo sapiens
tcctggactcgcctc

SEQ ID NO: 33888 - DNA, 15 bp, Homo sapiens
cctggactcgcctcc

SEQ ID NO: 33889 - DNA, 15 bp, Homo sapiens
ctggactcgcctcct

SEQ ID NO: 33890 - DNA, 15 bp, Homo sapiens
tggactcgcctcctt

SEQ ID NO: 33891 - DNA, 15 bp, Homo sapiens
ggactcgcctccttg

SEQ ID NO: 33892 - DNA, 15 bp, Homo sapiens
gactcgcctccttgc

SEQ ID NO: 33893 - DNA, 15 bp, Homo sapiens
actcgcctccttgcc

SEQ ID NO: 33894 - DNA, 15 bp, Homo sapiens
ctcgcctccttgccc

SEQ ID NO: 33895 - DNA, 15 bp, Homo sapiens
tcgcctccttgccct

SEQ ID NO: 33896 - DNA, 15 bp, Homo sapiens
cgcctccttgccctg

SEQ ID NO: 33897 - DNA, 15 bp, Homo sapiens
gcctccttgccctga

SEQ ID NO: 33898 - DNA, 15 bp, Homo sapiens
cctccttgccctgag

SEQ ID NO: 33899 - DNA, 15 bp, Homo sapiens
ctccttgccctgaga

SEQ ID NO: 33900 - DNA, 15 bp, Homo sapiens
tccttgccctgagat

SEQ ID NO: 33901 - DNA, 15 bp, Homo sapiens
ccttgccctgagatc

SEQ ID NO: 33902 - DNA, 15 bp, Homo sapiens
cttgccctgagatcc

SEQ ID NO: 33903 - DNA, 15 bp, Homo sapiens
ttgccctgagatcca

SEQ ID NO: 33904 - DNA, 15 bp, Homo sapiens
tgccctgagatccag

SEQ ID NO: 33905 - DNA, 15 bp, Homo sapiens
gccctgagatccaga

SEQ ID NO: 33906 - DNA, 15 bp, Homo sapiens
ccctgagatccagac

SEQ ID NO: 33907 - DNA, 15 bp, Homo sapiens
cctgagatccagacc

SEQ ID NO: 33908 - DNA, 15 bp, Homo sapiens
ctgagatccagaccc

SEQ ID NO: 33909 - DNA, 15 bp, Homo sapiens
tgagatccagacccc

SEQ ID NO: 33910 - DNA, 15 bp, Homo sapiens
gagatccagaccccc

SEQ ID NO: 33911 - DNA, 15 bp, Homo sapiens
agatccagacccccg

SEQ ID NO: 33912 - DNA, 15 bp, Homo sapiens
gatccagacccccgt

SEQ ID NO: 33913 - DNA, 15 bp, Homo sapiens
atccagacccccgta

SEQ ID NO: 33914 - DNA, 15 bp, Homo sapiens
tccagacccccgtat

SEQ ID NO: 33915 - DNA, 15 bp, Homo sapiens
ccagacccccgtatt

SEQ ID NO: 33916 - DNA, 15 bp, Homo sapiens
cagacccccgtattc

SEQ ID NO: 33917 - DNA, 15 bp, Homo sapiens
agacccccgtattca

SEQ ID NO: 33918 - DNA, 15 bp, Homo sapiens
gacccccgtattcag

SEQ ID NO: 33919 - DNA, 15 bp, Homo sapiens
acccccgtattcagc

SEQ ID NO: 33920 - DNA, 15 bp, Homo sapiens
cccccgtattcagct

SEQ ID NO: 33921 - DNA, 15 bp, Homo sapiens
ccccgtattcagctg

SEQ ID NO: 33922 - DNA, 15 bp, Homo sapiens
cccgtattcagctgc

SEQ ID NO: 33923 - DNA, 15 bp, Homo sapiens
ccgtattcagctgcc

SEQ ID NO: 33924 - DNA, 15 bp, Homo sapiens
cgtattcagctgccc

SEQ ID NO: 33925 - DNA, 15 bp, Homo sapiens
gtattcagctgcccc

SEQ ID NO: 33926 - DNA, 15 bp, Homo sapiens
tattcagctgccccc

SEQ ID NO: 33927 - DNA, 15 bp, Homo sapiens
attcagctgccccct

SEQ ID NO: 33928 - DNA, 15 bp, Homo sapiens
ttcagctgccccctc

SEQ ID NO: 33929 - DNA, 15 bp, Homo sapiens
tcagctgccccctca

SEQ ID NO: 33930 - DNA, 15 bp, Homo sapiens
cagctgccccctcag

SEQ ID NO: 33931 - DNA, 15 bp, Homo sapiens
agctgccccctcagc

SEQ ID NO: 33932 - DNA, 15 bp, Homo sapiens
gctgccccctcagct

SEQ ID NO: 33933 - DNA, 15 bp, Homo sapiens
ctgccccctcagctc

SEQ ID NO: 33934 - DNA, 15 bp, Homo sapiens
tgccccctcagctcc

SEQ ID NO: 33935 - DNA, 15 bp, Homo sapiens
gccccctcagctcct

SEQ ID NO: 33936 - DNA, 15 bp, Homo sapiens
ccccctcagctcctc

SEQ ID NO: 33937 - DNA, 15 bp, Homo sapiens
cccctcagctcctcc

SEQ ID NO: 33938 - DNA, 15 bp, Homo sapiens
ccctcagctcctcca

SEQ ID NO: 33939 - DNA, 15 bp, Homo sapiens
cctcagctcctccac

SEQ ID NO: 33940 - DNA, 15 bp, Homo sapiens
ctcagctcctccact

SEQ ID NO: 33941 - DNA, 15 bp, Homo sapiens
tcagctcctccactc

SEQ ID NO: 33942 - DNA, 15 bp, Homo sapiens
cagctcctccactca

SEQ ID NO: 33943 - DNA, 15 bp, Homo sapiens
agctcctccactcac

SEQ ID NO: 33944 - DNA, 15 bp, Homo sapiens
gctcctccactcaca

SEQ ID NO: 33945 - DNA, 15 bp, Homo sapiens
ctcctccactcacat

SEQ ID NO: 33946 - DNA, 15 bp, Homo sapiens
tcctccactcacata

SEQ ID NO: 33947 - DNA, 15 bp, Homo sapiens
cctccactcacatat

SEQ ID NO: 33948 - DNA, 15 bp, Homo sapiens
ctccactcacatatt

SEQ ID NO: 33949 - DNA, 15 bp, Homo sapiens
tccactcacatattt

SEQ ID NO: 33950 - DNA, 15 bp, Homo sapiens
ccactcacatattta

SEQ ID NO: 33951 - DNA, 15 bp, Homo sapiens
cactcacatatttaa

SEQ ID NO: 33952 - DNA, 15 bp, Homo sapiens
actcacatatttaat

SEQ ID NO: 33953 - DNA, 15 bp, Homo sapiens
ctcacatatttaatg

SEQ ID NO: 33954 - DNA, 15 bp, Homo sapiens
tcacatatttaatgc

SEQ ID NO: 33955 - DNA, 15 bp, Homo sapiens
cacatatttaatgcc

SEQ ID NO: 33956 - DNA, 15 bp, Homo sapiens
acatatttaatgcca

SEQ ID NO: 33957 - DNA, 15 bp, Homo sapiens
catatttaatgccag

SEQ ID NO: 33958 - DNA, 15 bp, Homo sapiens
atatttaatgccaga

SEQ ID NO: 33959 - DNA, 15 bp, Homo sapiens
tatttaatgccagac

SEQ ID NO: 33960 - DNA, 15 bp, Homo sapiens
atttaatgccagact

SEQ ID NO: 33961 - DNA, 15 bp, Homo sapiens
tttaatgccagactc

SEQ ID NO: 33962 - DNA, 15 bp, Homo sapiens
ttaatgccagactct

SEQ ID NO: 33963 - DNA, 15 bp, Homo sapiens
taatgccagactctt

SEQ ID NO: 33964 - DNA, 15 bp, Homo sapiens
aatgccagactcttc

SEQ ID NO: 33965 - DNA, 15 bp, Homo sapiens
atgccagactcttca

SEQ ID NO: 33966 - DNA, 15 bp, Homo sapiens
tgccagactcttcat

SEQ ID NO: 33967 - DNA, 15 bp, Homo sapiens
gccagactcttcatg

SEQ ID NO: 33968 - DNA, 15 bp, Homo sapiens
ccagactcttcatgt

SEQ ID NO: 33969 - DNA, 15 bp, Homo sapiens
cagactcttcatgtc

SEQ ID NO: 33970 - DNA, 15 bp, Homo sapiens
agactcttcatgtct

SEQ ID NO: 33971 - DNA, 15 bp, Homo sapiens
gactcttcatgtcta

SEQ ID NO: 33972 - DNA, 15 bp, Homo sapiens
actcttcatgtctat

SEQ ID NO: 33973 - DNA, 15 bp, Homo sapiens
ctcttcatgtctatc

SEQ ID NO: 33974 - DNA, 15 bp, Homo sapiens
tcttcatgtctatct

SEQ ID NO: 33975 - DNA, 15 bp, Homo sapiens
cttcatgtctatcta

SEQ ID NO: 33976 - DNA, 15 bp, Homo sapiens
ttcatgtctatctac

SEQ ID NO: 33977 - DNA, 15 bp, Homo sapiens
tcatgtctatctaca

SEQ ID NO: 33978 - DNA, 15 bp, Homo sapiens
catgtctatctacac

SEQ ID NO: 33979 - DNA, 15 bp, Homo sapiens
atgtctatctacacc

SEQ ID NO: 33980 - DNA, 15 bp, Homo sapiens
tgtctatctacacct

SEQ ID NO: 33981 - DNA, 15 bp, Homo sapiens
gtctatctacacctg

SEQ ID NO: 33982 - DNA, 15 bp, Homo sapiens
tctatctacacctgc

SEQ ID NO: 33983 - DNA, 15 bp, Homo sapiens
ctatctacacctgca

SEQ ID NO: 33984 - DNA, 15 bp, Homo sapiens
tatctacacctgcac

SEQ ID NO: 33985 - DNA, 15 bp, Homo sapiens
atctacacctgcact

SEQ ID NO: 33986 - DNA, 15 bp, Homo sapiens
tctacacctgcactt

SEQ ID NO: 33987 - DNA, 15 bp, Homo sapiens
ctacacctgcacttt

SEQ ID NO: 33988 - DNA, 15 bp, Homo sapiens
tacacctgcactttt

SEQ ID NO: 33989 - DNA, 15 bp, Homo sapiens
acacctgcacttttg

SEQ ID NO: 33990 - DNA, 15 bp, Homo sapiens
cacctgcacttttgc

SEQ ID NO: 33991 - DNA, 15 bp, Homo sapiens
acctgcacttttgca

SEQ ID NO: 33992 - DNA, 15 bp, Homo sapiens
cctgcacttttgcac

SEQ ID NO: 33993 - DNA, 15 bp, Homo sapiens
ctgcacttttgcacc

SEQ ID NO: 33994 - DNA, 15 bp, Homo sapiens
tgcacttttgcaccc

SEQ ID NO: 33995 - DNA, 15 bp, Homo sapiens
gcacttttgcaccca

SEQ ID NO: 33996 - DNA, 15 bp, Homo sapiens
cacttttgcacccaa

SEQ ID NO: 33997 - DNA, 15 bp, Homo sapiens
acttttgcacccaat

SEQ ID NO: 33998 - DNA, 15 bp, Homo sapiens
cttttgcacccaatc

SEQ ID NO: 33999 - DNA, 15 bp, Homo sapiens
ttttgcacccaatcc

SEQ ID NO: 34000 - DNA, 15 bp, Homo sapiens
tttgcacccaatcca

SEQ ID NO: 34001 - DNA, 15 bp, Homo sapiens
ttgcacccaatccaa

SEQ ID NO: 34002 - DNA, 15 bp, Homo sapiens
tgcacccaatccaac

SEQ ID NO: 34003 - DNA, 15 bp, Homo sapiens
gcacccaatccaact

SEQ ID NO: 34004 - DNA, 15 bp, Homo sapiens
cacccaatccaactc

SEQ ID NO: 34005 - DNA, 15 bp, Homo sapiens
acccaatccaactcc

SEQ ID NO: 34006 - DNA, 15 bp, Homo sapiens
cccaatccaactccc

SEQ ID NO: 34007 - DNA, 15 bp, Homo sapiens
ccaatccaactcccc

SEQ ID NO: 34008 - DNA, 15 bp, Homo sapiens
caatccaactccccg

SEQ ID NO: 34009 - DNA, 15 bp, Homo sapiens
aatccaactccccgc

SEQ ID NO: 34010 - DNA, 15 bp, Homo sapiens
atccaactccccgcc

SEQ ID NO: 34011 - DNA, 15 bp, Homo sapiens
tccaactccccgcca

SEQ ID NO: 34012 - DNA, 15 bp, Homo sapiens
ccaactccccgccat

SEQ ID NO: 34013 - DNA, 15 bp, Homo sapiens
caactccccgccatg

SEQ ID NO: 34014 - DNA, 15 bp, Homo sapiens
aactccccgccatgt

SEQ ID NO: 34015 - DNA, 15 bp, Homo sapiens
actccccgccatgtc

SEQ ID NO: 34016 - DNA, 15 bp, Homo sapiens
ctccccgccatgtcc

SEQ ID NO: 34017 - DNA, 15 bp, Homo sapiens
tccccgccatgtccc

SEQ ID NO: 34018 - DNA, 15 bp, Homo sapiens
ccccgccatgtcccc

SEQ ID NO: 34019 - DNA, 15 bp, Homo sapiens
cccgccatgtccccc

SEQ ID NO: 34020 - DNA, 15 bp, Homo sapiens
ccgccatgtccccca

SEQ ID NO: 34021 - DNA, 15 bp, Homo sapiens
cgccatgtcccccat

SEQ ID NO: 34022 - DNA, 15 bp, Homo sapiens
gccatgtcccccatc

SEQ ID NO: 34023 - DNA, 15 bp, Homo sapiens
ccatgtcccccatct

SEQ ID NO: 34024 - DNA, 15 bp, Homo sapiens
catgtcccccatctc

SEQ ID NO: 34025 - DNA, 15 bp, Homo sapiens
atgtcccccatctca

SEQ ID NO: 34026 - DNA, 15 bp, Homo sapiens
tgtcccccatctcag

SEQ ID NO: 34027 - DNA, 15 bp, Homo sapiens
gtcccccatctcagg

SEQ ID NO: 34028 - DNA, 15 bp, Homo sapiens
tcccccatctcaggt

SEQ ID NO: 34029 - DNA, 15 bp, Homo sapiens
cccccatctcaggta

SEQ ID NO: 34030 - DNA, 15 bp, Homo sapiens
ccccatctcaggtaa

SEQ ID NO: 34031 - DNA, 15 bp, Homo sapiens
cccatctcaggtaat

SEQ ID NO: 34032 - DNA, 15 bp, Homo sapiens
ccatctcaggtaatg

SEQ ID NO: 34033 - DNA, 15 bp, Homo sapiens
catctcaggtaatgt

SEQ ID NO: 34034 - DNA, 15 bp, Homo sapiens
atctcaggtaatgtc

SEQ ID NO: 34035 - DNA, 15 bp, Homo sapiens
tctcaggtaatgtca

SEQ ID NO: 34036 - DNA, 15 bp, Homo sapiens
ctcaggtaatgtcag

SEQ ID NO: 34037 - DNA, 15 bp, Homo sapiens
tcaggtaatgtcagc

SEQ ID NO: 34038 - DNA, 15 bp, Homo sapiens
caggtaatgtcagct

SEQ ID NO: 34039 - DNA, 15 bp, Homo sapiens
aggtaatgtcagctc

SEQ ID NO: 34040 - DNA, 15 bp, Homo sapiens
ggtaatgtcagctcg

SEQ ID NO: 34041 - DNA, 15 bp, Homo sapiens
gtaatgtcagctcgg

SEQ ID NO: 34042 - DNA, 15 bp, Homo sapiens
taatgtcagctcggt

SEQ ID NO: 34043 - DNA, 15 bp, Homo sapiens
aatgtcagctcggtc

SEQ ID NO: 34044 - DNA, 15 bp, Homo sapiens
atgtcagctcggtcc

SEQ ID NO: 34045 - DNA, 15 bp, Homo sapiens
tgtcagctcggtcct

SEQ ID NO: 34046 - DNA, 15 bp, Homo sapiens
gtcagctcggtcctt

SEQ ID NO: 34047 - DNA, 15 bp, Homo sapiens
tcagctcggtccttc

SEQ ID NO: 34048 - DNA, 15 bp, Homo sapiens
cagctcggtccttcc

SEQ ID NO: 34049 - DNA, 15 bp, Homo sapiens
agctcggtccttcca

SEQ ID NO: 34050 - DNA, 15 bp, Homo sapiens
gctcggtccttccag

SEQ ID NO: 34051 - DNA, 15 bp, Homo sapiens
ctcggtccttccagc

SEQ ID NO: 34052 - DNA, 15 bp, Homo sapiens
tcggtccttccagct

SEQ ID NO: 34053 - DNA, 15 bp, Homo sapiens
cggtccttccagctg

SEQ ID NO: 34054 - DNA, 15 bp, Homo sapiens
ggtccttccagctgc

SEQ ID NO: 34055 - DNA, 15 bp, Homo sapiens
gtccttccagctgct

SEQ ID NO: 34056 - DNA, 15 bp, Homo sapiens
tccttccagctgctc

SEQ ID NO: 34057 - DNA, 15 bp, Homo sapiens
ccttccagctgctca

SEQ ID NO: 34058 - DNA, 15 bp, Homo sapiens
cttccagctgctcaa

SEQ ID NO: 34059 - DNA, 15 bp, Homo sapiens
ttccagctgctcaag

SEQ ID NO: 34060 - DNA, 15 bp, Homo sapiens
tccagctgctcaagc

SEQ ID NO: 34061 - DNA, 15 bp, Homo sapiens
ccagctgctcaagct

SEQ ID NO: 34062 - DNA, 15 bp, Homo sapiens
cagctgctcaagcta

SEQ ID NO: 34063 - DNA, 15 bp, Homo sapiens
agctgctcaagctaa

SEQ ID NO: 34064 - DNA, 15 bp, Homo sapiens
gctgctcaagctaaa

SEQ ID NO: 34065 - DNA, 15 bp, Homo sapiens
ctgctcaagctaaaa

SEQ ID NO: 34066 - DNA, 15 bp, Homo sapiens
tgctcaagctaaaac

SEQ ID NO: 34067 - DNA, 15 bp, Homo sapiens
gctcaagctaaaacc

SEQ ID NO: 34068 - DNA, 15 bp, Homo sapiens
ctcaagctaaaaccc

SEQ ID NO: 34069 - DNA, 15 bp, Homo sapiens
tcaagctaaaaccca

SEQ ID NO: 34070 - DNA, 15 bp, Homo sapiens
caagctaaaacccat

SEQ ID NO: 34071 - DNA, 15 bp, Homo sapiens
aagctaaaacccatg

SEQ ID NO: 34072 - DNA, 15 bp, Homo sapiens
agctaaaacccatgt

SEQ ID NO: 34073 - DNA, 15 bp, Homo sapiens
gctaaaacccatgtc

SEQ ID NO: 34074 - DNA, 15 bp, Homo sapiens
ctaaaacccatgtca

SEQ ID NO: 34075 - DNA, 15 bp, Homo sapiens
taaaacccatgtcac

SEQ ID NO: 34076 - DNA, 15 bp, Homo sapiens
aaaacccatgtcact

SEQ ID NO: 34077 - DNA, 15 bp, Homo sapiens
aaacccatgtcactt

SEQ ID NO: 34078 - DNA, 15 bp, Homo sapiens
aacccatgtcacttt

SEQ ID NO: 34079 - DNA, 15 bp, Homo sapiens
acccatgtcactttg

SEQ ID NO: 34080 - DNA, 15 bp, Homo sapiens
cccatgtcactttga

SEQ ID NO: 34081 - DNA, 15 bp, Homo sapiens
ccatgtcactttgac

SEQ ID NO: 34082 - DNA, 15 bp, Homo sapiens
catgtcactttgact

SEQ ID NO: 34083 - DNA, 15 bp, Homo sapiens
atgtcactttgactc

SEQ ID NO: 34084 - DNA, 15 bp, Homo sapiens
tgtcactttgactct

SEQ ID NO: 34085 - DNA, 15 bp, Homo sapiens
gtcactttgactctc

SEQ ID NO: 34086 - DNA, 15 bp, Homo sapiens
tcactttgactctcc

SEQ ID NO: 34087 - DNA, 15 bp, Homo sapiens
cactttgactctccc

SEQ ID NO: 34088 - DNA, 15 bp, Homo sapiens
actttgactctccct

SEQ ID NO: 34089 - DNA, 15 bp, Homo sapiens
ctttgactctccctc

SEQ ID NO: 34090 - DNA, 15 bp, Homo sapiens
tttgactctccctct

SEQ ID NO: 34091 - DNA, 15 bp, Homo sapiens
ttgactctccctctt

SEQ ID NO: 34092 - DNA, 15 bp, Homo sapiens
tgactctccctcttg

SEQ ID NO: 34093 - DNA, 15 bp, Homo sapiens
gactctccctcttgc

SEQ ID NO: 34094 - DNA, 15 bp, Homo sapiens
actctccctcttgcc

SEQ ID NO: 34095 - DNA, 15 bp, Homo sapiens
ctctccctcttgccc

SEQ ID NO: 34096 - DNA, 15 bp, Homo sapiens
tctccctcttgccca

SEQ ID NO: 34097 - DNA, 15 bp, Homo sapiens
ctccctcttgcccac

SEQ ID NO: 34098 - DNA, 15 bp, Homo sapiens
tccctcttgcccact

SEQ ID NO: 34099 - DNA, 15 bp, Homo sapiens
ccctcttgcccacta

SEQ ID NO: 34100 - DNA, 15 bp, Homo sapiens
cctcttgcccactac

SEQ ID NO: 34101 - DNA, 15 bp, Homo sapiens
ctcttgcccactaca

SEQ ID NO: 34102 - DNA, 15 bp, Homo sapiens
tcttgcccactacat

SEQ ID NO: 34103 - DNA, 15 bp, Homo sapiens
cttgcccactacatc

SEQ ID NO: 34104 - DNA, 15 bp, Homo sapiens
ttgcccactacatcc

SEQ ID NO: 34105 - DNA, 15 bp, Homo sapiens
tgcccactacatcca

SEQ ID NO: 34106 - DNA, 15 bp, Homo sapiens
gcccactacatccaa

SEQ ID NO: 34107 - DNA, 15 bp, Homo sapiens
cccactacatccaag

SEQ ID NO: 34108 - DNA, 15 bp, Homo sapiens
ccactacatccaagc

SEQ ID NO: 34109 - DNA, 15 bp, Homo sapiens
cactacatccaagct

SEQ ID NO: 34110 - DNA, 15 bp, Homo sapiens
actacatccaagctg

SEQ ID NO: 34111 - DNA, 15 bp, Homo sapiens
ctacatccaagctgc

SEQ ID NO: 34112 - DNA, 15 bp, Homo sapiens
tacatccaagctgct

SEQ ID NO: 34113 - DNA, 15 bp, Homo sapiens
acatccaagctgcta

SEQ ID NO: 34114 - DNA, 15 bp, Homo sapiens
catccaagctgctag

SEQ ID NO: 34115 - DNA, 15 bp, Homo sapiens
atccaagctgctagc

SEQ ID NO: 34116 - DNA, 15 bp, Homo sapiens
tccaagctgctagca

SEQ ID NO: 34117 - DNA, 15 bp, Homo sapiens
ccaagctgctagcac

SEQ ID NO: 34118 - DNA, 15 bp, Homo sapiens
caagctgctagcact

SEQ ID NO: 34119 - DNA, 15 bp, Homo sapiens
aagctgctagcactg

SEQ ID NO: 34120 - DNA, 15 bp, Homo sapiens
agctgctagcactgc

SEQ ID NO: 34121 - DNA, 15 bp, Homo sapiens
gctgctagcactgct

SEQ ID NO: 34122 - DNA, 15 bp, Homo sapiens
ctgctagcactgctc

SEQ ID NO: 34123 - DNA, 15 bp, Homo sapiens
tgctagcactgctcc

SEQ ID NO: 34124 - DNA, 15 bp, Homo sapiens
gctagcactgctcct

SEQ ID NO: 34125 - DNA, 15 bp, Homo sapiens
ctagcactgctcctg

SEQ ID NO: 34126 - DNA, 15 bp, Homo sapiens
tagcactgctcctga

SEQ ID NO: 34127 - DNA, 15 bp, Homo sapiens
agcactgctcctgat

SEQ ID NO: 34128 - DNA, 15 bp, Homo sapiens
gcactgctcctgatc

SEQ ID NO: 34129 - DNA, 15 bp, Homo sapiens
cactgctcctgatcc

SEQ ID NO: 34130 - DNA, 15 bp, Homo sapiens
actgctcctgatcca

SEQ ID NO: 34131 - DNA, 15 bp, Homo sapiens
ctgctcctgatccag

SEQ ID NO: 34132 - DNA, 15 bp, Homo sapiens
tgctcctgatccagc

SEQ ID NO: 34133 - DNA, 15 bp, Homo sapiens
gctcctgatccagct

SEQ ID NO: 34134 - DNA, 15 bp, Homo sapiens
ctcctgatccagctt

SEQ ID NO: 34135 - DNA, 15 bp, Homo sapiens
tcctgatccagcttc

SEQ ID NO: 34136 - DNA, 15 bp, Homo sapiens
cctgatccagcttca

SEQ ID NO: 34137 - DNA, 15 bp, Homo sapiens
ctgatccagcttcag

SEQ ID NO: 34138 - DNA, 15 bp, Homo sapiens
tgatccagcttcaga

SEQ ID NO: 34139 - DNA, 15 bp, Homo sapiens
gatccagcttcagat

SEQ ID NO: 34140 - DNA, 15 bp, Homo sapiens
atccagcttcagatt

SEQ ID NO: 34141 - DNA, 15 bp, Homo sapiens
tccagcttcagatta

SEQ ID NO: 34142 - DNA, 15 bp, Homo sapiens
ccagcttcagattaa

SEQ ID NO: 34143 - DNA, 15 bp, Homo sapiens
cagcttcagattaag

SEQ ID NO: 34144 - DNA, 15 bp, Homo sapiens
agcttcagattaagt

SEQ ID NO: 34145 - DNA, 15 bp, Homo sapiens
gcttcagattaagtc

SEQ ID NO: 34146 - DNA, 15 bp, Homo sapiens
cttcagattaagtct

SEQ ID NO: 34147 - DNA, 15 bp, Homo sapiens
ttcagattaagtctc

SEQ ID NO: 34148 - DNA, 15 bp, Homo sapiens
tcagattaagtctca

SEQ ID NO: 34149 - DNA, 15 bp, Homo sapiens
cagattaagtctcag

SEQ ID NO: 34150 - DNA, 15 bp, Homo sapiens
agattaagtctcaga

SEQ ID NO: 34151 - DNA, 15 bp, Homo sapiens
gattaagtctcagaa

SEQ ID NO: 34152 - DNA, 15 bp, Homo sapiens
attaagtctcagaat

SEQ ID NO: 34153 - DNA, 15 bp, Homo sapiens
ttaagtctcagaatc

SEQ ID NO: 34154 - DNA, 15 bp, Homo sapiens
taagtctcagaatct

SEQ ID NO: 34155 - DNA, 15 bp, Homo sapiens
aagtctcagaatcta

SEQ ID NO: 34156 - DNA, 15 bp, Homo sapiens
agtctcagaatctac

SEQ ID NO: 34157 - DNA, 15 bp, Homo sapiens
gtctcagaatctacc

SEQ ID NO: 34158 - DNA, 15 bp, Homo sapiens
tctcagaatctaccc

SEQ ID NO: 34159 - DNA, 15 bp, Homo sapiens
ctcagaatctaccca

SEQ ID NO: 34160 - DNA, 15 bp, Homo sapiens
tcagaatctacccac

SEQ ID NO: 34161 - DNA, 15 bp, Homo sapiens
cagaatctacccact

SEQ ID NO: 34162 - DNA, 15 bp, Homo sapiens
agaatctacccactt

SEQ ID NO: 34163 - DNA, 15 bp, Homo sapiens
gaatctacccacttc

SEQ ID NO: 34164 - DNA, 15 bp, Homo sapiens
aatctacccacttct

SEQ ID NO: 34165 - DNA, 15 bp, Homo sapiens
atctacccacttctc

SEQ ID NO: 34166 - DNA, 15 bp, Homo sapiens
tctacccacttctcg

SEQ ID NO: 34167 - DNA, 15 bp, Homo sapiens
ctacccacttctcgc

SEQ ID NO: 34168 - DNA, 15 bp, Homo sapiens
tacccacttctcgcc

SEQ ID NO: 34169 - DNA, 15 bp, Homo sapiens
acccacttctcgcct

SEQ ID NO: 34170 - DNA, 15 bp, Homo sapiens
cccacttctcgcctt

SEQ ID NO: 34171 - DNA, 15 bp, Homo sapiens
ccacttctcgccttc

SEQ ID NO: 34172 - DNA, 15 bp, Homo sapiens
cacttctcgccttct

SEQ ID NO: 34173 - DNA, 15 bp, Homo sapiens
acttctcgccttctc

SEQ ID NO: 34174 - DNA, 15 bp, Homo sapiens
cttctcgccttctcc

SEQ ID NO: 34175 - DNA, 15 bp, Homo sapiens
ttctcgccttctcca

SEQ ID NO: 34176 - DNA, 15 bp, Homo sapiens
tctcgccttctccac

SEQ ID NO: 34177 - DNA, 15 bp, Homo sapiens
ctcgccttctccact

SEQ ID NO: 34178 - DNA, 15 bp, Homo sapiens
tcgccttctccactg

SEQ ID NO: 34179 - DNA, 15 bp, Homo sapiens
cgccttctccactgc

SEQ ID NO: 34180 - DNA, 15 bp, Homo sapiens
gccttctccactgcc

SEQ ID NO: 34181 - DNA, 15 bp, Homo sapiens
ccttctccactgcca

SEQ ID NO: 34182 - DNA, 15 bp, Homo sapiens
cttctccactgccac

SEQ ID NO: 34183 - DNA, 15 bp, Homo sapiens
ttctccactgccacc

SEQ ID NO: 34184 - DNA, 15 bp, Homo sapiens
tctccactgccacca

SEQ ID NO: 34185 - DNA, 15 bp, Homo sapiens
ctccactgccaccag

SEQ ID NO: 34186 - DNA, 15 bp, Homo sapiens
tccactgccaccagc

SEQ ID NO: 34187 - DNA, 15 bp, Homo sapiens
ccactgccaccagcc

SEQ ID NO: 34188 - DNA, 15 bp, Homo sapiens
cactgccaccagccc

SEQ ID NO: 34189 - DNA, 15 bp, Homo sapiens
actgccaccagccca

SEQ ID NO: 34190 - DNA, 15 bp, Homo sapiens
ctgccaccagcccat

SEQ ID NO: 34191 - DNA, 15 bp, Homo sapiens
tgccaccagcccatt

SEQ ID NO: 34192 - DNA, 15 bp, Homo sapiens
gccaccagcccattc

SEQ ID NO: 34193 - DNA, 15 bp, Homo sapiens
ccaccagcccattct

SEQ ID NO: 34194 - DNA, 15 bp, Homo sapiens
caccagcccattctg

SEQ ID NO: 34195 - DNA, 15 bp, Homo sapiens
accagcccattctgt

SEQ ID NO: 34196 - DNA, 15 bp, Homo sapiens
ccagcccattctgtg

SEQ ID NO: 34197 - DNA, 15 bp, Homo sapiens
cagcccattctgtgc

SEQ ID NO: 34198 - DNA, 15 bp, Homo sapiens
agcccattctgtgcc

SEQ ID NO: 34199 - DNA, 15 bp, Homo sapiens
gcccattctgtgcca

SEQ ID NO: 34200 - DNA, 15 bp, Homo sapiens
cccattctgtgccag

SEQ ID NO: 34201 - DNA, 15 bp, Homo sapiens
ccattctgtgccagc

SEQ ID NO: 34202 - DNA, 15 bp, Homo sapiens
cattctgtgccagca

SEQ ID NO: 34203 - DNA, 15 bp, Homo sapiens
attctgtgccagcat

SEQ ID NO: 34204 - DNA, 15 bp, Homo sapiens
ttctgtgccagcatc

SEQ ID NO: 34205 - DNA, 15 bp, Homo sapiens
tctgtgccagcatca

SEQ ID NO: 34206 - DNA, 15 bp, Homo sapiens
ctgtgccagcatcat

SEQ ID NO: 34207 - DNA, 15 bp, Homo sapiens
tgtgccagcatcatc

SEQ ID NO: 34208 - DNA, 15 bp, Homo sapiens
gtgccagcatcatca

SEQ ID NO: 34209 - DNA, 15 bp, Homo sapiens
tgccagcatcatcac

SEQ ID NO: 34210 - DNA, 15 bp, Homo sapiens
gccagcatcatcact

SEQ ID NO: 34211 - DNA, 15 bp, Homo sapiens
ccagcatcatcactt

SEQ ID NO: 34212 - DNA, 15 bp, Homo sapiens
cagcatcatcacttg

SEQ ID NO: 34213 - DNA, 15 bp, Homo sapiens
agcatcatcacttgc

SEQ ID NO: 34214 - DNA, 15 bp, Homo sapiens
gcatcatcacttgcc

SEQ ID NO: 34215 - DNA, 15 bp, Homo sapiens
catcatcacttgcca

SEQ ID NO: 34216 - DNA, 15 bp, Homo sapiens
atcatcacttgccag

SEQ ID NO: 34217 - DNA, 15 bp, Homo sapiens
tcatcacttgccagg

SEQ ID NO: 34218 - DNA, 15 bp, Homo sapiens
catcacttgccagga

SEQ ID NO: 34219 - DNA, 15 bp, Homo sapiens
atcacttgccaggac

SEQ ID NO: 34220 - DNA, 15 bp, Homo sapiens
tcacttgccaggact

SEQ ID NO: 34221 - DNA, 15 bp, Homo sapiens
cacttgccaggactg

SEQ ID NO: 34222 - DNA, 15 bp, Homo sapiens
acttgccaggactgt

SEQ ID NO: 34223 - DNA, 15 bp, Homo sapiens
cttgccaggactgtt

SEQ ID NO: 34224 - DNA, 15 bp, Homo sapiens
ttgccaggactgtta

SEQ ID NO: 34225 - DNA, 15 bp, Homo sapiens
tgccaggactgttac

SEQ ID NO: 34226 - DNA, 15 bp, Homo sapiens
gccaggactgttaca

SEQ ID NO: 34227 - DNA, 15 bp, Homo sapiens
ccaggactgttacaa

SEQ ID NO: 34228 - DNA, 15 bp, Homo sapiens
caggactgttacaat

SEQ ID NO: 34229 - DNA, 15 bp, Homo sapiens
aggactgttacaata

SEQ ID NO: 34230 - DNA, 15 bp, Homo sapiens
ggactgttacaatag

SEQ ID NO: 34231 - DNA, 15 bp, Homo sapiens
gactgttacaatagc

SEQ ID NO: 34232 - DNA, 15 bp, Homo sapiens
actgttacaatagcc

SEQ ID NO: 34233 - DNA, 15 bp, Homo sapiens
ctgttacaatagcct

SEQ ID NO: 34234 - DNA, 15 bp, Homo sapiens
tgttacaatagcctc

SEQ ID NO: 34235 - DNA, 15 bp, Homo sapiens
gttacaatagcctcc

SEQ ID NO: 34236 - DNA, 15 bp, Homo sapiens
ttacaatagcctcct

SEQ ID NO: 34237 - DNA, 15 bp, Homo sapiens
tacaatagcctcctc

SEQ ID NO: 34238 - DNA, 15 bp, Homo sapiens
acaatagcctcctca

SEQ ID NO: 34239 - DNA, 15 bp, Homo sapiens
caatagcctcctcac

SEQ ID NO: 34240 - DNA, 15 bp, Homo sapiens
aatagcctcctcact

SEQ ID NO: 34241 - DNA, 15 bp, Homo sapiens
atagcctcctcacta

SEQ ID NO: 34242 - DNA, 15 bp, Homo sapiens
tagcctcctcactag

SEQ ID NO: 34243 - DNA, 15 bp, Homo sapiens
agcctcctcactagc

SEQ ID NO: 34244 - DNA, 15 bp, Homo sapiens
gcctcctcactagcc

SEQ ID NO: 34245 - DNA, 15 bp, Homo sapiens
cctcctcactagccc

SEQ ID NO: 34246 - DNA, 15 bp, Homo sapiens
ctcctcactagcccc

SEQ ID NO: 34247 - DNA, 15 bp, Homo sapiens
tcctcactagcccca

SEQ ID NO: 34248 - DNA, 15 bp, Homo sapiens
cctcactagccccac

SEQ ID NO: 34249 - DNA, 15 bp, Homo sapiens
ctcactagccccact

SEQ ID NO: 34250 - DNA, 15 bp, Homo sapiens
tcactagccccactc

SEQ ID NO: 34251 - DNA, 15 bp, Homo sapiens
cactagccccactca

SEQ ID NO: 34252 - DNA, 15 bp, Homo sapiens
actagccccactcac

SEQ ID NO: 34253 - DNA, 15 bp, Homo sapiens
ctagccccactcaca

SEQ ID NO: 34254 - DNA, 15 bp, Homo sapiens
tagccccactcacag

SEQ ID NO: 34255 - DNA, 15 bp, Homo sapiens
agccccactcacagc

SEQ ID NO: 34256 - DNA, 15 bp, Homo sapiens
gccccactcacagca

SEQ ID NO: 34257 - DNA, 15 bp, Homo sapiens
ccccactcacagcag

SEQ ID NO: 34258 - DNA, 15 bp, Homo sapiens
cccactcacagcagc

SEQ ID NO: 34259 - DNA, 15 bp, Homo sapiens
ccactcacagcagcc

SEQ ID NO: 34260 - DNA, 15 bp, Homo sapiens
cactcacagcagcca

SEQ ID NO: 34261 - DNA, 15 bp, Homo sapiens
actcacagcagccag

SEQ ID NO: 34262 - DNA, 15 bp, Homo sapiens
ctcacagcagccaga

SEQ ID NO: 34263 - DNA, 15 bp, Homo sapiens
tcacagcagccagat

SEQ ID NO: 34264 - DNA, 15 bp, Homo sapiens
cacagcagccagatg

SEQ ID NO: 34265 - DNA, 15 bp, Homo sapiens
acagcagccagatga

SEQ ID NO: 34266 - DNA, 15 bp, Homo sapiens
cagcagccagatgaa

SEQ ID NO: 34267 - DNA, 15 bp, Homo sapiens
agcagccagatgaat

SEQ ID NO: 34268 - DNA, 15 bp, Homo sapiens
gcagccagatgaatc

SEQ ID NO: 34269 - DNA, 15 bp, Homo sapiens
cagccagatgaatct

SEQ ID NO: 34270 - DNA, 15 bp, Homo sapiens
agccagatgaatctt

SEQ ID NO: 34271 - DNA, 15 bp, Homo sapiens
gccagatgaatcttt

SEQ ID NO: 34272 - DNA, 15 bp, Homo sapiens
ccagatgaatctttt

SEQ ID NO: 34273 - DNA, 15 bp, Homo sapiens
cagatgaatcttttg

SEQ ID NO: 34274 - DNA, 15 bp, Homo sapiens
agatgaatcttttga

SEQ ID NO: 34275 - DNA, 15 bp, Homo sapiens
gatgaatcttttgag

SEQ ID NO: 34276 - DNA, 15 bp, Homo sapiens
atgaatcttttgagt

SEQ ID NO: 34277 - DNA, 15 bp, Homo sapiens
tgaatcttttgagtc

SEQ ID NO: 34278 - DNA, 15 bp, Homo sapiens
gaatcttttgagtcc

SEQ ID NO: 34279 - DNA, 15 bp, Homo sapiens
aatcttttgagtcca

SEQ ID NO: 34280 - DNA, 15 bp, Homo sapiens
atcttttgagtccat

SEQ ID NO: 34281 - DNA, 15 bp, Homo sapiens
tcttttgagtccatg

SEQ ID NO: 34282 - DNA, 15 bp, Homo sapiens
cttttgagtccatgc

SEQ ID NO: 34283 - DNA, 15 bp, Homo sapiens
ttttgagtccatgcc

SEQ ID NO: 34284 - DNA, 15 bp, Homo sapiens
tttgagtccatgcct

SEQ ID NO: 34285 - DNA, 15 bp, Homo sapiens
ttgagtccatgccta

SEQ ID NO: 34286 - DNA, 15 bp, Homo sapiens
tgagtccatgcctag

SEQ ID NO: 34287 - DNA, 15 bp, Homo sapiens
gagtccatgcctagt

SEQ ID NO: 34288 - DNA, 15 bp, Homo sapiens
agtccatgcctagtc

SEQ ID NO: 34289 - DNA, 15 bp, Homo sapiens
gtccatgcctagtca

SEQ ID NO: 34290 - DNA, 15 bp, Homo sapiens
tccatgcctagtcac

SEQ ID NO: 34291 - DNA, 15 bp, Homo sapiens
ccatgcctagtcact

SEQ ID NO: 34292 - DNA, 15 bp, Homo sapiens
catgcctagtcactg

SEQ ID NO: 34293 - DNA, 15 bp, Homo sapiens
atgcctagtcactgg

SEQ ID NO: 34294 - DNA, 15 bp, Homo sapiens
tgcctagtcactggg

SEQ ID NO: 34295 - DNA, 15 bp, Homo sapiens
gcctagtcactgggg

SEQ ID NO: 34296 - DNA, 15 bp, Homo sapiens
cctagtcactggggc

SEQ ID NO: 34297 - DNA, 15 bp, Homo sapiens
ctagtcactggggca

SEQ ID NO: 34298 - DNA, 15 bp, Homo sapiens
tagtcactggggcaa

SEQ ID NO: 34299 - DNA, 15 bp, Homo sapiens
agtcactggggcaaa

SEQ ID NO: 34300 - DNA, 15 bp, Homo sapiens
gtcactggggcaaaa

SEQ ID NO: 34301 - DNA, 15 bp, Homo sapiens
tcactggggcaaaat

SEQ ID NO: 34302 - DNA, 15 bp, Homo sapiens
cactggggcaaaata

SEQ ID NO: 34303 - DNA, 15 bp, Homo sapiens
actggggcaaaatag

SEQ ID NO: 34304 - DNA, 15 bp, Homo sapiens
ctggggcaaaatagg

SEQ ID NO: 34305 - DNA, 15 bp, Homo sapiens
tggggcaaaatagga

SEQ ID NO: 34306 - DNA, 15 bp, Homo sapiens
ggggcaaaataggac

SEQ ID NO: 34307 - DNA, 15 bp, Homo sapiens
gggcaaaataggact

SEQ ID NO: 34308 - DNA, 15 bp, Homo sapiens
ggcaaaataggactc

SEQ ID NO: 34309 - DNA, 15 bp, Homo sapiens
gcaaaataggactcc

SEQ ID NO: 34310 - DNA, 15 bp, Homo sapiens
caaaataggactccg

SEQ ID NO: 34311 - DNA, 15 bp, Homo sapiens
aaaataggactccga

SEQ ID NO: 34312 - DNA, 15 bp, Homo sapiens
aaataggactccgag

SEQ ID NO: 34313 - DNA, 15 bp, Homo sapiens
aataggactccgagg

SEQ ID NO: 34314 - DNA, 15 bp, Homo sapiens
ataggactccgagga

SEQ ID NO: 34315 - DNA, 15 bp, Homo sapiens
taggactccgaggag

SEQ ID NO: 34316 - DNA, 15 bp, Homo sapiens
aggactccgaggaga

SEQ ID NO: 34317 - DNA, 15 bp, Homo sapiens
ggactccgaggagaa

SEQ ID NO: 34318 - DNA, 15 bp, Homo sapiens
gactccgaggagaaa

SEQ ID NO: 34319 - DNA, 15 bp, Homo sapiens
actccgaggagaaag

SEQ ID NO: 34320 - DNA, 15 bp, Homo sapiens
ctccgaggagaaagt

SEQ ID NO: 34321 - DNA, 15 bp, Homo sapiens
tccgaggagaaagtc

SEQ ID NO: 34322 - DNA, 15 bp, Homo sapiens
ccgaggagaaagtcc

SEQ ID NO: 34323 - DNA, 15 bp, Homo sapiens
cgaggagaaagtccg

SEQ ID NO: 34324 - DNA, 15 bp, Homo sapiens
gaggagaaagtccga

SEQ ID NO: 34325 - DNA, 15 bp, Homo sapiens
aggagaaagtccgag

SEQ ID NO: 34326 - DNA, 15 bp, Homo sapiens
ggagaaagtccgaga

SEQ ID NO: 34327 - DNA, 15 bp, Homo sapiens
gagaaagtccgagac

SEQ ID NO: 34328 - DNA, 15 bp, Homo sapiens
agaaagtccgagacc

SEQ ID NO: 34329 - DNA, 15 bp, Homo sapiens
gaaagtccgagacca

SEQ ID NO: 34330 - DNA, 15 bp, Homo sapiens
aaagtccgagaccag

SEQ ID NO: 34331 - DNA, 15 bp, Homo sapiens
aagtccgagaccagc

SEQ ID NO: 34332 - DNA, 15 bp, Homo sapiens
agtccgagaccagct

SEQ ID NO: 34333 - DNA, 15 bp, Homo sapiens
gtccgagaccagctc

SEQ ID NO: 34334 - DNA, 15 bp, Homo sapiens
tccgagaccagctcc

SEQ ID NO: 34335 - DNA, 15 bp, Homo sapiens
ccgagaccagctccg

SEQ ID NO: 34336 - DNA, 15 bp, Homo sapiens
cgagaccagctccgg

SEQ ID NO: 34337 - DNA, 15 bp, Homo sapiens
gagaccagctccggc

SEQ ID NO: 34338 - DNA, 15 bp, Homo sapiens
agaccagctccggca

SEQ ID NO: 34339 - DNA, 15 bp, Homo sapiens
gaccagctccggcaa

SEQ ID NO: 34340 - DNA, 15 bp, Homo sapiens
accagctccggcaag

SEQ ID NO: 34341 - DNA, 15 bp, Homo sapiens
ccagctccggcaaga

SEQ ID NO: 34342 - DNA, 15 bp, Homo sapiens
cagctccggcaagat

SEQ ID NO: 34343 - DNA, 15 bp, Homo sapiens
agctccggcaagatg

SEQ ID NO: 34344 - DNA, 15 bp, Homo sapiens
gctccggcaagatga

SEQ ID NO: 34345 - DNA, 15 bp, Homo sapiens
ctccggcaagatgag

SEQ ID NO: 34346 - DNA, 15 bp, Homo sapiens
tccggcaagatgagc

SEQ ID NO: 34347 - DNA, 15 bp, Homo sapiens
ccggcaagatgagca

SEQ ID NO: 34348 - DNA, 15 bp, Homo sapiens
cggcaagatgagcaa

SEQ ID NO: 34349 - DNA, 15 bp, Homo sapiens
ggcaagatgagcaaa

SEQ ID NO: 34350 - DNA, 15 bp, Homo sapiens
gcaagatgagcaaac

SEQ ID NO: 34351 - DNA, 15 bp, Homo sapiens
caagatgagcaaaca

SEQ ID NO: 34352 - DNA, 15 bp, Homo sapiens
aagatgagcaaacac

SEQ ID NO: 34353 - DNA, 15 bp, Homo sapiens
agatgagcaaacaca

SEQ ID NO: 34354 - DNA, 15 bp, Homo sapiens
gatgagcaaacacag

SEQ ID NO: 34355 - DNA, 15 bp, Homo sapiens
atgagcaaacacagc

SEQ ID NO: 34356 - DNA, 15 bp, Homo sapiens
tgagcaaacacagcc

SEQ ID NO: 34357 - DNA, 15 bp, Homo sapiens
gagcaaacacagcct

SEQ ID NO: 34358 - DNA, 15 bp, Homo sapiens
agcaaacacagcctg

SEQ ID NO: 34359 - DNA, 15 bp, Homo sapiens
gcaaacacagcctgt

SEQ ID NO: 34360 - DNA, 15 bp, Homo sapiens
caaacacagcctgtg

SEQ ID NO: 34361 - DNA, 15 bp, Homo sapiens
aaacacagcctgtgc

SEQ ID NO: 34362 - DNA, 15 bp, Homo sapiens
aacacagcctgtgca

SEQ ID NO: 34363 - DNA, 15 bp, Homo sapiens
acacagcctgtgcag

SEQ ID NO: 34364 - DNA, 15 bp, Homo sapiens
cacagcctgtgcagg

SEQ ID NO: 34365 - DNA, 15 bp, Homo sapiens
acagcctgtgcaggg

SEQ ID NO: 34366 - DNA, 15 bp, Homo sapiens
cagcctgtgcagggt

SEQ ID NO: 34367 - DNA, 15 bp, Homo sapiens
agcctgtgcagggtg

SEQ ID NO: 34368 - DNA, 15 bp, Homo sapiens
gcctgtgcagggtgc

SEQ ID NO: 34369 - DNA, 15 bp, Homo sapiens
cctgtgcagggtgca

SEQ ID NO: 34370 - DNA, 15 bp, Homo sapiens
ctgtgcagggtgcag

SEQ ID NO: 34371 - DNA, 15 bp, Homo sapiens
tgtgcagggtgcagg

SEQ ID NO: 34372 - DNA, 15 bp, Homo sapiens
gtgcagggtgcaggg

SEQ ID NO: 34373 - DNA, 15 bp, Homo sapiens
tgcagggtgcaggga

SEQ ID NO: 34374 - DNA, 15 bp, Homo sapiens
gcagggtgcagggag

SEQ ID NO: 34375 - DNA, 15 bp, Homo sapiens
cagggtgcagggagg

SEQ ID NO: 34376 - DNA, 15 bp, Homo sapiens
agggtgcagggaggg

SEQ ID NO: 34377 - DNA, 15 bp, Homo sapiens
gggtgcagggagggc

SEQ ID NO: 34378 - DNA, 15 bp, Homo sapiens
ggtgcagggagggct

SEQ ID NO: 34379 - DNA, 15 bp, Homo sapiens
gtgcagggagggcta

SEQ ID NO: 34380 - DNA, 15 bp, Homo sapiens
tgcagggagggctag

SEQ ID NO: 34381 - DNA, 15 bp, Homo sapiens
gcagggagggctaga

SEQ ID NO: 34382 - DNA, 15 bp, Homo sapiens
cagggagggctagag

SEQ ID NO: 34383 - DNA, 15 bp, Homo sapiens
agggagggctagagg

SEQ ID NO: 34384 - DNA, 15 bp, Homo sapiens
gggagggctagaggc

SEQ ID NO: 34385 - DNA, 15 bp, Homo sapiens
ggagggctagaggcc

SEQ ID NO: 34386 - DNA, 15 bp, Homo sapiens
gagggctagaggcct

SEQ ID NO: 34387 - DNA, 15 bp, Homo sapiens
agggctagaggcctg

SEQ ID NO: 34388 - DNA, 15 bp, Homo sapiens
gggctagaggcctga

SEQ ID NO: 34389 - DNA, 15 bp, Homo sapiens
ggctagaggcctgag

SEQ ID NO: 34390 - DNA, 15 bp, Homo sapiens
gctagaggcctgagg

SEQ ID NO: 34391 - DNA, 15 bp, Homo sapiens
ctagaggcctgaggc

SEQ ID NO: 34392 - DNA, 15 bp, Homo sapiens
tagaggcctgaggct

SEQ ID NO: 34393 - DNA, 15 bp, Homo sapiens
agaggcctgaggctt

SEQ ID NO: 34394 - DNA, 15 bp, Homo sapiens
gaggcctgaggcttg

SEQ ID NO: 34395 - DNA, 15 bp, Homo sapiens
aggcctgaggcttga

SEQ ID NO: 34396 - DNA, 15 bp, Homo sapiens
ggcctgaggcttgaa

SEQ ID NO: 34397 - DNA, 15 bp, Homo sapiens
gcctgaggcttgaaa

SEQ ID NO: 34398 - DNA, 15 bp, Homo sapiens
cctgaggcttgaaac

SEQ ID NO: 34399 - DNA, 15 bp, Homo sapiens
ctgaggcttgaaaca

SEQ ID NO: 34400 - DNA, 15 bp, Homo sapiens
tgaggcttgaaacag

SEQ ID NO: 34401 - DNA, 15 bp, Homo sapiens
gaggcttgaaacagc

SEQ ID NO: 34402 - DNA, 15 bp, Homo sapiens
aggcttgaaacagct

SEQ ID NO: 34403 - DNA, 15 bp, Homo sapiens
ggcttgaaacagctc

SEQ ID NO: 34404 - DNA, 15 bp, Homo sapiens
gcttgaaacagctct

SEQ ID NO: 34405 - DNA, 15 bp, Homo sapiens
cttgaaacagctctc

SEQ ID NO: 34406 - DNA, 15 bp, Homo sapiens
ttgaaacagctctca

SEQ ID NO: 34407 - DNA, 15 bp, Homo sapiens
tgaaacagctctcaa

SEQ ID NO: 34408 - DNA, 15 bp, Homo sapiens
gaaacagctctcaag

SEQ ID NO: 34409 - DNA, 15 bp, Homo sapiens
aaacagctctcaagt

SEQ ID NO: 34410 - DNA, 15 bp, Homo sapiens
aacagctctcaagtg

SEQ ID NO: 34411 - DNA, 15 bp, Homo sapiens
acagctctcaagtgg

SEQ ID NO: 34412 - DNA, 15 bp, Homo sapiens
cagctctcaagtgga

SEQ ID NO: 34413 - DNA, 15 bp, Homo sapiens
agctctcaagtggag

SEQ ID NO: 34414 - DNA, 15 bp, Homo sapiens
gctctcaagtggagg

SEQ ID NO: 34415 - DNA, 15 bp, Homo sapiens
ctctcaagtggaggg

SEQ ID NO: 34416 - DNA, 15 bp, Homo sapiens
tctcaagtggagggg

SEQ ID NO: 34417 - DNA, 15 bp, Homo sapiens
ctcaagtggaggggg

SEQ ID NO: 34418 - DNA, 15 bp, Homo sapiens
tcaagtggaggggga

SEQ ID NO: 34419 - DNA, 15 bp, Homo sapiens
caagtggagggggaa

SEQ ID NO: 34420 - DNA, 15 bp, Homo sapiens
aagtggagggggaaa

SEQ ID NO: 34421 - DNA, 15 bp, Homo sapiens
agtggagggggaaac

SEQ ID NO: 34422 - DNA, 15 bp, Homo sapiens
gtggagggggaaaca

SEQ ID NO: 34423 - DNA, 15 bp, Homo sapiens
tggagggggaaacaa

SEQ ID NO: 34424 - DNA, 15 bp, Homo sapiens
ggagggggaaacaac

SEQ ID NO: 34425 - DNA, 15 bp, Homo sapiens
gagggggaaacaacc

SEQ ID NO: 34426 - DNA, 15 bp, Homo sapiens
agggggaaacaacca

SEQ ID NO: 34427 - DNA, 15 bp, Homo sapiens
gggggaaacaaccat

SEQ ID NO: 34428 - DNA, 15 bp, Homo sapiens
ggggaaacaaccatt

SEQ ID NO: 34429 - DNA, 15 bp, Homo sapiens
gggaaacaaccattg

SEQ ID NO: 34430 - DNA, 15 bp, Homo sapiens
ggaaacaaccattgc

SEQ ID NO: 34431 - DNA, 15 bp, Homo sapiens
gaaacaaccattgcc

SEQ ID NO: 34432 - DNA, 15 bp, Homo sapiens
aaacaaccattgccc

SEQ ID NO: 34433 - DNA, 15 bp, Homo sapiens
aacaaccattgccct

SEQ ID NO: 34434 - DNA, 15 bp, Homo sapiens
acaaccattgccctc

SEQ ID NO: 34435 - DNA, 15 bp, Homo sapiens
caaccattgccctca

SEQ ID NO: 34436 - DNA, 15 bp, Homo sapiens
aaccattgccctcat

SEQ ID NO: 34437 - DNA, 15 bp, Homo sapiens
accattgccctcata

SEQ ID NO: 34438 - DNA, 15 bp, Homo sapiens
ccattgccctcatag

SEQ ID NO: 34439 - DNA, 15 bp, Homo sapiens
cattgccctcataga

SEQ ID NO: 34440 - DNA, 15 bp, Homo sapiens
attgccctcatagag

SEQ ID NO: 34441 - DNA, 15 bp, Homo sapiens
ttgccctcatagagg

SEQ ID NO: 34442 - DNA, 15 bp, Homo sapiens
tgccctcatagagga

SEQ ID NO: 34443 - DNA, 15 bp, Homo sapiens
gccctcatagaggac

SEQ ID NO: 34444 - DNA, 15 bp, Homo sapiens
ccctcatagaggaca

SEQ ID NO: 34445 - DNA, 15 bp, Homo sapiens
cctcatagaggacac

SEQ ID NO: 34446 - DNA, 15 bp, Homo sapiens
ctcatagaggacaca

SEQ ID NO: 34447 - DNA, 15 bp, Homo sapiens
tcatagaggacacat

SEQ ID NO: 34448 - DNA, 15 bp, Homo sapiens
catagaggacacatc

SEQ ID NO: 34449 - DNA, 15 bp, Homo sapiens
atagaggacacatcc

SEQ ID NO: 34450 - DNA, 15 bp, Homo sapiens
tagaggacacatcca

SEQ ID NO: 34451 - DNA, 15 bp, Homo sapiens
agaggacacatccac

SEQ ID NO: 34452 - DNA, 15 bp, Homo sapiens
gaggacacatccaca

SEQ ID NO: 34453 - DNA, 15 bp, Homo sapiens
aggacacatccacac

SEQ ID NO: 34454 - DNA, 15 bp, Homo sapiens
ggacacatccacacc

SEQ ID NO: 34455 - DNA, 15 bp, Homo sapiens
gacacatccacacca

SEQ ID NO: 34456 - DNA, 15 bp, Homo sapiens
acacatccacaccag

SEQ ID NO: 34457 - DNA, 15 bp, Homo sapiens
cacatccacaccagg

SEQ ID NO: 34458 - DNA, 15 bp, Homo sapiens
acatccacaccaggg

SEQ ID NO: 34459 - DNA, 15 bp, Homo sapiens
catccacaccagggc

SEQ ID NO: 34460 - DNA, 15 bp, Homo sapiens
atccacaccagggct

SEQ ID NO: 34461 - DNA, 15 bp, Homo sapiens
tccacaccagggctg

SEQ ID NO: 34462 - DNA, 15 bp, Homo sapiens
ccacaccagggctgt

SEQ ID NO: 34463 - DNA, 15 bp, Homo sapiens
cacaccagggctgtg

SEQ ID NO: 34464 - DNA, 15 bp, Homo sapiens
acaccagggctgtgc

SEQ ID NO: 34465 - DNA, 15 bp, Homo sapiens
caccagggctgtgct

SEQ ID NO: 34466 - DNA, 15 bp, Homo sapiens
accagggctgtgcta

SEQ ID NO: 34467 - DNA, 15 bp, Homo sapiens
ccagggctgtgctag

SEQ ID NO: 34468 - DNA, 15 bp, Homo sapiens
cagggctgtgctagc

SEQ ID NO: 34469 - DNA, 15 bp, Homo sapiens
agggctgtgctagcg

SEQ ID NO: 34470 - DNA, 15 bp, Homo sapiens
gggctgtgctagcgt

SEQ ID NO: 34471 - DNA, 15 bp, Homo sapiens
ggctgtgctagcgtg

SEQ ID NO: 34472 - DNA, 15 bp, Homo sapiens
gctgtgctagcgtgg

SEQ ID NO: 34473 - DNA, 15 bp, Homo sapiens
ctgtgctagcgtggg

SEQ ID NO: 34474 - DNA, 15 bp, Homo sapiens
tgtgctagcgtgggc

SEQ ID NO: 34475 - DNA, 15 bp, Homo sapiens
gtgctagcgtgggca

SEQ ID NO: 34476 - DNA, 15 bp, Homo sapiens
tgctagcgtgggcag

SEQ ID NO: 34477 - DNA, 15 bp, Homo sapiens
gctagcgtgggcagg

SEQ ID NO: 34478 - DNA, 15 bp, Homo sapiens
ctagcgtgggcaggc

SEQ ID NO: 34479 - DNA, 15 bp, Homo sapiens
tagcgtgggcaggca

SEQ ID NO: 34480 - DNA, 15 bp, Homo sapiens
agcgtgggcaggcaa

SEQ ID NO: 34481 - DNA, 15 bp, Homo sapiens
gcgtgggcaggcaag

SEQ ID NO: 34482 - DNA, 15 bp, Homo sapiens
cgtgggcaggcaagc

SEQ ID NO: 34483 - DNA, 15 bp, Homo sapiens
gtgggcaggcaagcc

SEQ ID NO: 34484 - DNA, 15 bp, Homo sapiens
tgggcaggcaagcca

SEQ ID NO: 34485 - DNA, 15 bp, Homo sapiens
gggcaggcaagccag

SEQ ID NO: 34486 - DNA, 15 bp, Homo sapiens
ggcaggcaagccagg

SEQ ID NO: 34487 - DNA, 15 bp, Homo sapiens
gcaggcaagccaggt

SEQ ID NO: 34488 - DNA, 15 bp, Homo sapiens
caggcaagccaggtg

SEQ ID NO: 34489 - DNA, 15 bp, Homo sapiens
aggcaagccaggtgc

SEQ ID NO: 34490 - DNA, 15 bp, Homo sapiens
ggcaagccaggtgct

SEQ ID NO: 34491 - DNA, 15 bp, Homo sapiens
gcaagccaggtgctg

SEQ ID NO: 34492 - DNA, 15 bp, Homo sapiens
caagccaggtgctgg

SEQ ID NO: 34493 - DNA, 15 bp, Homo sapiens
aagccaggtgctgga

SEQ ID NO: 34494 - DNA, 15 bp, Homo sapiens
agccaggtgctggac

SEQ ID NO: 34495 - DNA, 15 bp, Homo sapiens
gccaggtgctggacc

SEQ ID NO: 34496 - DNA, 15 bp, Homo sapiens
ccaggtgctggacct

SEQ ID NO: 34497 - DNA, 15 bp, Homo sapiens
caggtgctggacctc

SEQ ID NO: 34498 - DNA, 15 bp, Homo sapiens
aggtgctggacctct

SEQ ID NO: 34499 - DNA, 15 bp, Homo sapiens
ggtgctggacctctg

SEQ ID NO: 34500 - DNA, 15 bp, Homo sapiens
gtgctggacctctgc

SEQ ID NO: 34501 - DNA, 15 bp, Homo sapiens
tgctggacctctgca

SEQ ID NO: 34502 - DNA, 15 bp, Homo sapiens
gctggacctctgcac

SEQ ID NO: 34503 - DNA, 15 bp, Homo sapiens
ctggacctctgcacg

SEQ ID NO: 34504 - DNA, 15 bp, Homo sapiens
tggacctctgcacgt

SEQ ID NO: 34505 - DNA, 15 bp, Homo sapiens
ggacctctgcacgtg

SEQ ID NO: 34506 - DNA, 15 bp, Homo sapiens
gacctctgcacgtgg

SEQ ID NO: 34507 - DNA, 15 bp, Homo sapiens
acctctgcacgtggg

SEQ ID NO: 34508 - DNA, 15 bp, Homo sapiens
cctctgcacgtgggg

SEQ ID NO: 34509 - DNA, 15 bp, Homo sapiens
ctctgcacgtggggc

SEQ ID NO: 34510 - DNA, 15 bp, Homo sapiens
tctgcacgtggggca

SEQ ID NO: 34511 - DNA, 15 bp, Homo sapiens
ctgcacgtggggcat

SEQ ID NO: 34512 - DNA, 15 bp, Homo sapiens
tgcacgtggggcatg

SEQ ID NO: 34513 - DNA, 15 bp, Homo sapiens
gcacgtggggcatgt

SEQ ID NO: 34514 - DNA, 15 bp, Homo sapiens
cacgtggggcatgtg

SEQ ID NO: 34515 - DNA, 15 bp, Homo sapiens
acgtggggcatgtgt

SEQ ID NO: 34516 - DNA, 15 bp, Homo sapiens
cgtggggcatgtgtg

SEQ ID NO: 34517 - DNA, 15 bp, Homo sapiens
gtggggcatgtgtgg

SEQ ID NO: 34518 - DNA, 15 bp, Homo sapiens
tggggcatgtgtggg

SEQ ID NO: 34519 - DNA, 15 bp, Homo sapiens
ggggcatgtgtgggt

SEQ ID NO: 34520 - DNA, 15 bp, Homo sapiens
gggcatgtgtgggta

SEQ ID NO: 34521 - DNA, 15 bp, Homo sapiens
ggcatgtgtgggtat

SEQ ID NO: 34522 - DNA, 15 bp, Homo sapiens
gcatgtgtgggtatg

SEQ ID NO: 34523 - DNA, 15 bp, Homo sapiens
catgtgtgggtatgt

SEQ ID NO: 34524 - DNA, 15 bp, Homo sapiens
atgtgtgggtatgta

SEQ ID NO: 34525 - DNA, 15 bp, Homo sapiens
tgtgtgggtatgtac

SEQ ID NO: 34526 - DNA, 15 bp, Homo sapiens
gtgtgggtatgtaca

SEQ ID NO: 34527 - DNA, 15 bp, Homo sapiens
tgtgggtatgtacat

SEQ ID NO: 34528 - DNA, 15 bp, Homo sapiens
gtgggtatgtacatg

SEQ ID NO: 34529 - DNA, 15 bp, Homo sapiens
tgggtatgtacatgt

SEQ ID NO: 34530 - DNA, 15 bp, Homo sapiens
gggtatgtacatgta

SEQ ID NO: 34531 - DNA, 15 bp, Homo sapiens
ggtatgtacatgtac

SEQ ID NO: 34532 - DNA, 15 bp, Homo sapiens
gtatgtacatgtacc

SEQ ID NO: 34533 - DNA, 15 bp, Homo sapiens
tatgtacatgtacct

SEQ ID NO: 34534 - DNA, 15 bp, Homo sapiens
atgtacatgtacctg

SEQ ID NO: 34535 - DNA, 15 bp, Homo sapiens
tgtacatgtacctgt

SEQ ID NO: 34536 - DNA, 15 bp, Homo sapiens
gtacatgtacctgtg

SEQ ID NO: 34537 - DNA, 15 bp, Homo sapiens
tacatgtacctgtgt

SEQ ID NO: 34538 - DNA, 15 bp, Homo sapiens
acatgtacctgtgtt

SEQ ID NO: 34539 - DNA, 15 bp, Homo sapiens
catgtacctgtgttc

SEQ ID NO: 34540 - DNA, 15 bp, Homo sapiens
atgtacctgtgttct

SEQ ID NO: 34541 - DNA, 15 bp, Homo sapiens
tgtacctgtgttctt

SEQ ID NO: 34542 - DNA, 15 bp, Homo sapiens
gtacctgtgttcttg

SEQ ID NO: 34543 - DNA, 15 bp, Homo sapiens
tacctgtgttcttgg

SEQ ID NO: 34544 - DNA, 15 bp, Homo sapiens
acctgtgttcttggt

SEQ ID NO: 34545 - DNA, 15 bp, Homo sapiens
cctgtgttcttggtg

SEQ ID NO: 34546 - DNA, 15 bp, Homo sapiens
ctgtgttcttggtgt

SEQ ID NO: 34547 - DNA, 15 bp, Homo sapiens
tgtgttcttggtgtg

SEQ ID NO: 34548 - DNA, 15 bp, Homo sapiens
gtgttcttggtgtgt

SEQ ID NO: 34549 - DNA, 15 bp, Homo sapiens
tgttcttggtgtgtg

SEQ ID NO: 34550 - DNA, 15 bp, Homo sapiens
gttcttggtgtgtgt

SEQ ID NO: 34551 - DNA, 15 bp, Homo sapiens
ttcttggtgtgtgtg

SEQ ID NO: 34552 - DNA, 15 bp, Homo sapiens
tcttggtgtgtgtgt

SEQ ID NO: 34553 - DNA, 15 bp, Homo sapiens
cttggtgtgtgtgtg

SEQ ID NO: 34554 - DNA, 15 bp, Homo sapiens
ttggtgtgtgtgtgt

SEQ ID NO: 34555 - DNA, 15 bp, Homo sapiens
gtgtgtgtgtgtcta

SEQ ID NO: 34556 - DNA, 15 bp, Homo sapiens
tgtgtgtgtgtctag

SEQ ID NO: 34557 - DNA, 15 bp, Homo sapiens
gtgtgtgtgtctaga

SEQ ID NO: 34558 - DNA, 15 bp, Homo sapiens
tgtgtgtgtctagag

SEQ ID NO: 34559 - DNA, 15 bp, Homo sapiens
gtgtgtgtctagagc

SEQ ID NO: 34560 - DNA, 15 bp, Homo sapiens
tgtgtgtctagagct

SEQ ID NO: 34561 - DNA, 15 bp, Homo sapiens
gtgtgtctagagctg

SEQ ID NO: 34562 - DNA, 15 bp, Homo sapiens
tgtgtctagagctgg

SEQ ID NO: 34563 - DNA, 15 bp, Homo sapiens
gtgtctagagctggg

SEQ ID NO: 34564 - DNA, 15 bp, Homo sapiens
tgtctagagctgggg

SEQ ID NO: 34565 - DNA, 15 bp, Homo sapiens
gtctagagctggggt

SEQ ID NO: 34566 - DNA, 15 bp, Homo sapiens
tctagagctggggtg

SEQ ID NO: 34567 - DNA, 15 bp, Homo sapiens
ctagagctggggtgc

SEQ ID NO: 34568 - DNA, 15 bp, Homo sapiens
tagagctggggtgca

SEQ ID NO: 34569 - DNA, 15 bp, Homo sapiens
agagctggggtgcaa

SEQ ID NO: 34570 - DNA, 15 bp, Homo sapiens
gagctggggtgcaac

SEQ ID NO: 34571 - DNA, 15 bp, Homo sapiens
agctggggtgcaact

SEQ ID NO: 34572 - DNA, 15 bp, Homo sapiens
gctggggtgcaacta

SEQ ID NO: 34573 - DNA, 15 bp, Homo sapiens
ctggggtgcaactat

SEQ ID NO: 34574 - DNA, 15 bp, Homo sapiens
tggggtgcaactatg

SEQ ID NO: 34575 - DNA, 15 bp, Homo sapiens
ggggtgcaactatgg

SEQ ID NO: 34576 - DNA, 15 bp, Homo sapiens
gggtgcaactatggg

SEQ ID NO: 34577 - DNA, 15 bp, Homo sapiens
ggtgcaactatgggg

SEQ ID NO: 34578 - DNA, 15 bp, Homo sapiens
gtgcaactatggggc

SEQ ID NO: 34579 - DNA, 15 bp, Homo sapiens
tgcaactatggggcc

SEQ ID NO: 34580 - DNA, 15 bp, Homo sapiens
gcaactatggggccc

SEQ ID NO: 34581 - DNA, 15 bp, Homo sapiens
caactatggggcccc

SEQ ID NO: 34582 - DNA, 15 bp, Homo sapiens
aactatggggcccct

SEQ ID NO: 34583 - DNA, 15 bp, Homo sapiens
actatggggcccctc

SEQ ID NO: 34584 - DNA, 15 bp, Homo sapiens
ctatggggcccctcg

SEQ ID NO: 34585 - DNA, 15 bp, Homo sapiens
tatggggcccctcgg

SEQ ID NO: 34586 - DNA, 15 bp, Homo sapiens
atggggcccctcggg

SEQ ID NO: 34587 - DNA, 15 bp, Homo sapiens
tggggcccctcggga

(The sequence listing continues in the following parts.)

1. A single stranded oligonucleotide having a sequence 5′-X-Y-Z, wherein X is any nucleotide, Y is a nucleotide sequence of 6 nucleotides in length that is not a seed sequence of a human microRNA, and Z is a nucleotide sequence of 1-23 nucleotides in length, wherein the single stranded oligonucleotide is complementary with at least 8 consecutive nucleotides of a PRC2-associated region of a FOXP3 gene.

2. The single stranded oligonucleotide of claim 1, wherein the oligonucleotide does not comprise three or more consecutive guanosine nucleotides.

3. The single stranded oligonucleotide of claim 1, wherein the oligonucleotide does not comprise four or more consecutive guanosine nucleotides.

4. The single stranded oligonucleotide of claim 1, wherein the oligonucleotide is 8 to 30 nucleotides in length.

5. The single stranded oligonucleotide of claim 1, wherein the oligonucleotide is 8 to 10 nucleotides in length and all but 1, 2, or 3 of the nucleotides of the complementary sequence of the PRC2-associated region are cytosine or guano sine nucleotides.

6. The single stranded oligonucleotide of claim 1, wherein at least one nucleotide of the oligonucleotide is a nucleotide analogue.

7. The single stranded oligonucleotide of claim 6, wherein the at least one nucleotide analogue results in an increase in Tm of the oligonucleotide in a range of 1 to 5° C. compared with an oligonucleotide that does not have the at least one nucleotide analogue.

8. The single stranded oligonucleotide of claim 1, wherein at least one nucleotide of the oligonucleotide comprises a 2′ O-methyl.

9. The single stranded oligonucleotide of claim 1, wherein each nucleotide of the oligonucleotide comprises a 2′ O-methyl.

10. The single stranded oligonucleotide of claim 1, wherein the oligonucleotide comprises at least one ribonucleotide, at least one deoxyribonucleotide, or at least one bridged nucleotide.

11. The single strand oligonucleotide of claim 10, wherein the bridged nucleotide is a LNA nucleotide, a cEt nucleotide or a ENA modified nucleotide.

12. The single stranded oligonucleotide of claim 1, wherein each nucleotide of the oligonucleotide is a LNA nucleotide.

13. The single stranded oligonucleotide of claim 1, wherein the nucleotides of the oligonucleotide comprise alternating deoxyribonucleotides and 2′-fluoro-deoxyribonucleotides.

14. The single stranded oligonucleotide of claim 1, wherein the nucleotides of the oligonucleotide comprise alternating deoxyribonucleotides and 2′-O-methyl nucleotides.

15. The single stranded oligonucleotide of claim 1, wherein the nucleotides of the oligonucleotide comprise alternating deoxyribonucleotides and ENA nucleotide analogues.

16. The single stranded oligonucleotide of claim 1, wherein the nucleotides of the oligonucleotide comprise alternating deoxyribonucleotides and LNA nucleotides.

17. The single stranded oligonucleotide of claim 13, wherein the 5′ nucleotide of the oligonucleotide is a deoxyribonucleotide.

18. The single stranded oligonucleotide of claim 1, wherein the nucleotides of the oligonucleotide comprise alternating LNA nucleotides and 2′-O-methyl nucleotides.

19. The single stranded oligonucleotide of claim 18, wherein the 5′ nucleotide of the oligonucleotide is a LNA nucleotide.

20. The single stranded oligonucleotide of claim 1, wherein the nucleotides of the oligonucleotide comprise deoxyribonucleotides flanked by at least one LNA nucleotide on each of the 5′ and 3′ ends of the deoxyribonucleotides.

21. The single stranded oligonucleotide of claim 1, further comprising phosphorothioate internucleotide linkages between at least two nucleotides.

22. The single stranded oligonucleotide of claim 21, further comprising phosphorothioate internucleotide linkages between all nucleotides.

23. The single stranded oligonucleotide of claim 1, wherein the nucleotide at the 3′ position of the oligonucleotide has a 3′ hydroxyl group.

24. The single stranded oligonucleotide of claim 1, wherein the nucleotide at the 3′ position of the oligonucleotide has a 3′ thiophosphate.

25. The single stranded oligonucleotide of claim 1, further comprising a biotin moiety conjugated to the 5′ nucleotide.

26. A single stranded oligonucleotide comprising a region of complementarity that is complementary with at least 8 consecutive nucleotides of a PRC2-associated region of a FOXP3 gene, wherein the oligonucleotide has at least one of:
a) a sequence that is 5′X-Y-Z, wherein X is any nucleotide and wherein X is anchored at the 5′ end of the oligonucleotide, Y is a nucleotide sequence of 6 nucleotides in length that is not a human seed sequence of a microRNA, and Z is a nucleotide sequence of 1 to 23 nucleotides in length;
b) a sequence that does not comprise three or more consecutive guanosine nucleotides;
c) a sequence that has less than a threshold level of sequence identity with every sequence of nucleotides, of equivalent length to the second nucleotide sequence, that are between 50 kilobases upstream of a 5′-end of an off-target gene and 50 kilobases downstream of a 3′-end of the off-target gene;
d) a sequence that is complementary to a PRC2-associated region that encodes an RNA that forms a secondary structure comprising at least two single stranded loops; and/or
e) a sequence that has greater than 60% G-C content.

27. The single stranded oligonucleotide of claim 26, wherein the oligonucleotide has the sequence 5′X-Y-Z and wherein the oligonucleotide is 8-50 nucleotides in length.

28. The single stranded oligonucleotide of claim 1, wherein the single stranded oligonucleotide, when delivered to a cell, is capable of increasing the level of CTLA4, GITR, and/or IL-10 expression in the cell.

29. The single stranded oligonucleotide of claim 28, wherein the cell is a T cell.

30. The single stranded oligonucleotide of claim 1, wherein the single stranded oligonucleotide, when delivered to a population of T cells, is capable of increasing the number of CD4+CD25+FOXP3+ T cells in the population of T cells.

31. A composition comprising a single stranded oligonucleotide of claim 1 and a carrier.

32. A composition comprising a single stranded oligonucleotide of claim 1 in a buffered solution.

33. The composition of claim 32, wherein the oligonucleotide is conjugated to the carrier.

34. The composition of claim 33, wherein the carrier is a peptide.

35. The composition of claim 33, wherein the carrier is a steroid.

36. A pharmaceutical composition comprising a composition of claim 31 and a pharmaceutically acceptable carrier.

37. A kit comprising a container housing the composition of claim 31.

38. A method of increasing expression of FOXP3 in a cell, the method comprising delivering the single stranded oligonucleotide of claim 1 into the cell.

39. The method of claim 38, wherein delivery of the single stranded oligonucleotide into the cell results in a level of expression of FOXP3 that is at least 50% greater than a level of expression of FOXP3 in a control cell that does not comprise the single stranded oligonucleotide.

40. The method of claim 38, wherein delivery of the single stranded oligonucleotide into the cell results in an increased level of CTLA4, GITR, and/or IL-10 expression compared to an appropriate control cell that does not comprise the singled stranded oligonucleotide.

41. The method of claim 40, wherein delivery of the single stranded oligonucleotide into the cell results in a level of expression of CTLA4, GITR, and/or IL-10 that is at least 30% greater than a level of expression of CTLA4, GITR, and/or IL-10 in a control cell that does not comprise the single stranded oligonucleotide.

42. The method of claim 38, wherein the cell is a T cell.

43. A method increasing levels of FOXP3 in a subject, the method comprising administering the single stranded oligonucleotide of claim 1 to the subject.

44. The method of claim 43, wherein administration of the single stranded oligonucleotide to the subject results in an increased level of CTLA4, GITR, and/or IL-10 expression the subject compared to an appropriate control subject who has not been administered the single stranded oligonucleotide.

45. The method of claim 44, wherein administration of the single stranded oligonucleotide to the subject results in a level of expression of CTLA4, GITR, and/or IL-10 that is at least 30% greater than a level of CTLA4, GITR, and/or IL-10 in the appropriate control subject who has not been administered the single stranded oligonucleotide.

46. The method of claim 43, wherein administration of the single stranded oligonucleotide to the subject results in an increased level of CTLA4, GITR, and/or IL-10 in a T cell of the subject compared to a T cell in the control subject who has not been administered the single stranded oligonucleotide.

47. The method of claim 46, wherein administration of the single stranded oligonucleotide to the subject results in a level of expression of CTLA4, GITR, and/or IL-10 in the T cell of the subject that is at least 30% greater than a level of CTLA4, GITR, and/or IL-10 in the T cell in the control subject who has not been administered the single stranded oligonucleotide.

48. The method of claim 43, wherein administration of the of the single stranded oligonucleotide to the subject results in an increased number of CD4+CD25+FOXP3+ T cells in the subject compared to a control subject who has not been administered the single stranded oligonucleotide.

49. The method of claim 48, wherein administration of the single stranded oligonucleotide to the subject results in a number of CD4+CD25+FOXP3+ T cells in the subject that is at least 30% greater than a number of CD4+CD25+FOXP3+ T cells in the control subject who has not been administered the single stranded oligonucleotide.

50. A method of treating a condition or disease associated with decreased levels of FOXP3 in a subject, the method comprising administering the single stranded oligonucleotide of claim 1 to the subject.

51. The method of claim 50, wherein the condition or disease is associated with aberrant immune cell activation.

52. A method of increasing expression of FOXP3 in a cell, the method comprising delivering an oligonucleotide having a region of complementarity that is complementary with at least 8 consecutive nucleotides of a EZH1 mRNA or EZH2 mRNA to the cell.

53. The method of claim 52, wherein the oligonucleotide is 8 to 30 nucleotides in length.

54. The method of claim 52, wherein at least one nucleotide of the oligonucleotide is a nucleotide analogue.

55. The method of claim 52, wherein the oligonucleotide comprises a gapmer.

56. The method of claim 55, wherein the gapmer comprises a central region of at least 4 DNA nucleotides flanked one both sides by at least two nucleotide analogues.

57. The method of claim 55, wherein the at least two nucleotide analogues comprise at least one LNA or at least one 2′-O modified ribonucleotide.
